(19) United States
(12) Patent Application Publication
(10) Pub. No.: US 2006/0003322 A1
(43) Pub. Date: Jan. 5, 2006

(54) Bioinformatically detectable group of novel regulatory genes and uses thereof

(76) Inventor: Isaac Bentwich, Kvuzat Shiler (IL)

Correspondence Address: ROSETTA-GENOMICS, 10 PLAUT-STREET SCIENCE PARK, P.O. BOX 2061, REHOVOT, 76706, IL

(21) Appl. No.: 10/310,914

(22) Filed: Dec. 6, 2002

Related U.S. Application Data
(63) Continuation-in-part of application No. 10/293,338, filed on Nov. 14, 2002, now abandoned.

(51) Int. Cl. C12Q 1/68

(52) U.S. Cl. 435/6

(57) ABSTRACT

The present invention relates to a first group of novel genes, here identified as “genomic address messenger” or “GAM” genes, and a second group of novel operon-like genes, here identified as “genomic record” or “GR” genes. GAM genes selectively inhibit translation of known ‘target’ genes, many of which are known to be involved in various diseases. Nucleic acid molecules are provided respectively encoding 20600 GAM genes, and 6635 GR genes, as are vectors and probes both comprising the nucleic acid molecules, and methods and systems for detecting GAM and GR genes and specific functions and utilities thereof, for detecting expression of GAM and GR genes, and for selectively enhancing and selectively inhibiting translation of the respective target genes thereof.

### FIELD OF THE INVENTION

[0001] The present invention relates to a group of bioinformatically detectable novel genes, here identified as “genomic address messenger” or “GAM” genes, which are believed to be related to the micro RNA (miRNA) group of genes.

### BACKGROUND OF THE INVENTION

[0002] Small RNAs are known to perform diverse cellular functions, including post-transcriptional gene expression regulation. The first two such RNA genes, Lin-4 and Let-7, were identified by genetic analysis of Caenorhabditis Elegans (Elegans) developmental timing, and were termed short temporal RNA (stRNA) (Wightman, B., Ha, I., Ruvkun, G., Cell 75, 855 (1993); Erdmann, V. A. et al., Nucleic Acids Res. 29, 189 (2001); Lee, R. C., Feinbaum, R. L., Ambros, V., Cell 75, 843 (1993); Reinhart, B. et al., Nature 403, 901 (2000)).

[0003] Lin-4 and Let-7 each transcribe a 22 nucleotide (nt) RNA, which acts a post transcriptional repressor of target mRNAs, by binding to elements in the 3′-untranslated region (UTR) of these target mRNAs, which are complimentary to the 22 nt sequence of Lin-4 and Let-7 respectively. While Lin-4 and Let-7 are expressed at different developmental stage, first larval stage and fourth larval stage respectively, both specify the temporal progression of cell fates, by triggering post-transcriptional control over other genes (Wightman, B., Ha, I., Ruvkun, G., Cell 75, 855 (1993); Slack et al., Mol. Cell 5, 659 (2000)). Let-7 as well as its temporal regulation have been demonstrated to be conserved in all major groups of bilaterally symmetrical animals, from nematodes, through flies to humans (Pasquinelli, A., et al. Nature 408, 86 (2000)).

[0004] The initial transcription product of Lin-4 and Let-7 is a ˜60-80 nt RNA, the nucleotide sequence of the first half of which is partially complimentary to that of its second half, therefore allowing this RNA to fold onto itself, forming a ‘hairpin structure’. The final gene product is a ˜22 nt RNA, which is ‘diced’ from the above mentioned ‘hairpin structure’, by an enzyme called Dicer, which also apparently also mediates the complimentary binding of this ˜22 nt segment to a binding site in the 3′ UTR of its target gene.

[0005] Recent studies have uncovered 93 new genes in this class, now referred to as micro RNA or miRNA genes, in genomes of Elegans, Drosophilea, and Human (Lagos-Quintana, M., Rauhut, R., Lendeckel, W., Tuschl, T., Science 294, 853 (2001); Lau, N. C., Lim, L. P., Weinstein, E. G., Bartel, D. P., Science 294, 858 (2001); Lee, R. C., Ambros, V., Science 294, 862 (2001). Like the well studied Lin-4 and Let-7, all newly found MIR genes produce a ˜60-80 nt RNA having a nucleotide sequence capable of forming a ‘hairpin structure’. Expressions of the precursor ˜60-80 nt RNA and of the resulting diced ˜22 nt RNA of most of these newly discovered MIR genes have been detected.

[0006] Based on the striking homology of the newly discovered MIR genes to their well-studied predecessors Lin-4 and Let-7, the new MIR genes are believed to have a similar basic function as that of Lin-4 and Let-7: modulation of target genes by complimentary binding to the UTR of these target genes, with special emphasis on modulation of developmental control processes. This is despite the fact that the above mentioned recent studies did not find target genes to which the newly discovered MIR genes complementarily bind. While existing evidence suggests that the number of regulatory RNA genes “may turn out to be very large, numbering in the hundreds or even thousands in each genome”, detecting such genes is challenging (Ruvkun G., ‘Perspective: Glimpses of a tiny RNA world’, Science 294, 779 (2001)).

[0007] The ability to detect novel RNA genes is limited by the methodologies used to detect such genes. All RNA genes identified so far either present a visibly discernable whole body phenotype, as do Lin-4 and Let-7 (Wightman et. al., Cell 75, 855 (1993); Reinhart et al., Nature 403, 901 (2000)), or produce significant enough quantities of RNA so as to be detected by the standard biochemical genomic techniques, as do the 93 recently detected miRNA genes. Since a limited number clones were sequenced by the researchers discovering these genes, 300 by Bartel and 100 by Tuschl (Bartel et. al., Science 294, 858 (2001); Tuschl et. al., Science 294, 853 (2001)), the RNA genes found can not be much rarer than 1% of all RNA genes. The recently detected miRNA genes therefore represent the more prevalent among the miRNA gene family.

[0008] Current methodology has therefore been unable to detect RNA genes which either do not present a visually discernable whole body phenotype, or are rare (e.g. rarer than 0.1% of all RNA genes), and therefore do not produce significant enough quantities of RNA so as to be detected by standard biochemical technique.

### SUMMARY OF THE INVENTION

[0009] The present invention relates to a novel group of regulatory, non-protein coding genes, which are functional in specifically inhibiting translation of other genes, some of which are known to be involved in various diseases. Each gene in this novel group of genes, here identified as “GAM” or “Genomic Address Messengers”, specifically inhibits translation of one of more other ‘target’ genes by means of complimentary hybridization of a segment of the RNA transcript encoded by GAM2, to an inhibitor site located in the 3′untranslated region of the mRNA of the one or more ‘target’ genes.

[0010] In various preferred embodiments, the present invention seeks to provide improved method and system for specific modulation of expression of specific known ‘target’ genes involved in significant human diseases, and improved method and system for detection of expression of these target genes.

[0011] Accordingly, the invention provides several substantially pure DNAs (e.g., genomic DNA, cDNA or synthetic DNA) each encoding a novel gene of the GAM group of gene, vectors comprising the DNAs, probes comprising the DNAs, a method and system for selectively modulating translation of known ‘target’ genes utilizing the vectors, and a method and system for detecting expression of known ‘target’ genes utilizing the probe.

[0012] By “substantially pure DNA” is meant DNA that is free of the genes which, in the naturally-occurring genome of the organism from which the DNA of the invention is derived, flank the genes discovered and isolated by the present invention. The term therefore includes, for example, a recombinant DNA which is incorporated into a vector, into an autonomously replicating plasmid or virus, or into the genomic DNA of a prokaryote or eukaryote at a site other than its natural site; or which exists as a separate molecule (e.g., a cDNA or a genomic or cDNA fragment produced by PCR or restriction endonuclease digestion) independent of other sequences. It also includes a recombinant DNA which is part of a hybrid gene encoding additional polypeptide sequence.

[0013] “Inhibiting translation” is defined as the ability to prevent synthesis of a specific protein encoded by a respective gene, by means of inhibiting the translation of the mRNA of this gene. “Translation inhibiter site” is defined as the minimal DNA sequence sufficient to inhibit translation.

[0014] There is thus provided in accordance with a preferred embodiment of the present invention a bioinformatically detectable novel gene encoding substantially pure DNA wherein: RNA encoded by the bioinformatically detectable novel gene is about 18 to about 24 nucleotides in length, and originates from an RNA precursor, which RNA precursor is about 50 to about 120 nucleotides in length, a nucleotide sequence of a first half of the RNA precursor is a partial inversed-reversed sequence of a nucleotide sequence of a second half thereof, a nucleotide sequence of the RNA encoded by the novel gene is a partial inversed-reversed sequence of a nucleotide sequence of a binding site associated with at least one target gene, the novel gene cannot be detected by either of the following: a visually discernable whole body phenotype, and detection of 99.9% of RNA species shorter than 25 nucleotides expressed in a tissue sample, and a function of the novel gene is bioinformatically deducible.

[0015] There is further provided in accordance with another preferred embodiment of the present invention a bioinformatically detectable novel gene encoding substantially pure DNA wherein: RNA encoded by the bioninformatically detectable novel gene includes a plurality of RNA sections, each of the RNA sections being about 50 to about 120 nucleotides in length, and including an RNA segment, which RNA segment is about 18 to about 24 nucleotides in length, a nucleotide sequence of a first half of each of the RNA sections encoded by the novel gene is a partial inversed-reversed sequence of nucleotide sequence of a second half thereof, a nucleotide sequence of each of the RNA segments encoded by the novel gene is a partial inversed-reversed sequence of the nucleotide sequence of a binding site associated with at least one target gene, and a function of the novel gene is bioinformatically deducible from the following data elements: the nucleotide sequence of the RNA encoded by the novel gene, a nucleotide sequence of the at least one target gene, and function of the at least one target gene.

[0016] There is still further provided in accordance with another preferred embodiment of the present invention a bioinformatically detectable novel gene encoding substantially pure DNA wherein: RNA encoded by the bioinformatically detectable novel gene is about 18 to about 24 nucleotides in length, and originates from an RNA precursor, which RNA precursor is about 50 to about 120 nucleotides in length, a nucleotide sequence of a first half of the RNA precursor is a partial inversed-reversed sequence of a nucleotide sequence of a second half thereof, a nucleotide sequence of the RNA encoded by the novel gene is a partial inversed-reversed sequence of a nucleotide sequence of a binding site associated with at least one target gene, a function of the novel gene is modulation of expression of the at least one target gene, and the at least one target gene does not encode a protein.

[0017] There is additionaly provided in accordance with another preferred embodiment of the present invention A bioinformatically detectable novel gene encoding substantially pure DNA wherein: the bioinformatically detectable novel gene does not encode a protein, RNA encoded by the bioinformatically detectable novel gene is maternally transferred by a cell to at least one daughter cell of the cell, a function of the novel gene includes modulation of a cell type of the daughter cell, and the modulation is bioinformatically deducible.

[0018] There is moreover provided in accordance with another preferred embodiment of the present invention a bioinformatically detectable novel gene encoding substantially pure DNA wherein: the bioinformatically detectable novel gene does not encode a protein, a function of the novel gene is promotion of expression of the at lease one target gene, and the at least one target gene is bioinformatically deducible.

[0019] Further in accordance with a preferred embodiment of the present invention the function of the novel gene is bioinformatically deducible from the following data elements: the nucleotide sequence of the RNA encoded by the bioinformatically detectable novel gene, a nucleotide sequence of the at least one target gene, and a function of the at least one target gene.

[0020] Still further in accordance with a preferred embodiment of the present invention the RNA encoded by the novel gene complementarily binds the binding site associated with the at least one target gene, thereby modulating expression of the at least one target gene.

[0021] Additionally in accordance with a preferred embodiment of the present invention the binding site associated with at least one target gene is located in an untranslated region of RNA encoded by the at least one target gene.

[0022] Moreover in accordance with a preferred embodiment of the present invention the function of the novel gene is selective inhibition of translation of the at least one target gene, which selective inhibition includes complementary hybridization of the RNA encoded by the novel gene to the binding site.

[0023] Further in accordance with a preferred embodiment of the present invention the invention includes a vector including the DNA.

[0024] Still further in accordance with a preferred embodiment of the present invention the invention includes a method of selectively inhibiting translation of at least one gene, including introducing the vector.

[0025] Moreover in accordance with a preferred embodiment of the present invention the introducing includes utilizing RNAi pathway.

[0026] Additionally in accordance with a preferred embodiment of the present invention the invention includes a gene expression inhibition system including: the vector, and a vector inserter, functional to insert the vector into a cell, thereby selectively inhibiting translation of at least one gene.

[0027] Further in accordance with a preferred embodiment of the present invention the invention includes a probe including the DNA.

[0028] Still further in accordance with a preferred embodiment of the present invention the invention includes a method of selectively detecting expression of at least one gene, including using the probe.

[0029] Additionally in accordance with a preferred embodiment of the present invention the invention includes a gene expression detection system including: the probe, and a gene expression detector functional to selectively detect expression of at least one gene.

### BRIEF DESCRIPTION OF DRAWINGS

[0030] FIG. 1 is a simplified diagram illustrating the genomic differentiation enigma that the present invention addresses;

[0031] FIGS. 2 through 4 are schematic diagrams which when taken together provide an analogy that illustrates a conceptual model of the present invention, addressing the genomic differentiation enigma;

[0032] FIGS. 5A and 5B are schematic diagrams, which when taken together illustrate a ‘genomic records’ concept of the conceptual model of the present invention, addressing the genomic differentiation enigma;

[0033] FIG. 6 is a schematic diagram illustrating a ‘genomically programmed cell differentiation’ concept of the conceptual model of the present invention, addressing the genomic differentiation enigma;

[0034] FIG. 7 is a schematic diagram illustrating a ‘genomically programmed cell-specific protein expression modulation’ concept of the conceptual model of the present invention, addressing the genomic differentiation enigma;

[0035] FIG. 8 is a simplified diagram illustrating a mode by which genes of a novel group of genes of the present invention, modulate expression of known target genes;

[0036] FIG. 9 is a simplified block diagram illustrating a bioinformatic gene detection system capable of detecting genes of the novel group of genes of the present invention, which system is constructed and operative in accordance with a preferred embodiment of the present invention;

[0037] FIG. 10 is a simplified flowchart illustrating operation of a mechanism for training of a computer system to recognize the novel genes of the present invention, which mechanism is constructed and operative in accordance with a preferred embodiment of the present invention;

[0038] FIG. 11A is a simplified block diagram of a non-coding genomic sequence detector constructed and operative in accordance with a preferred embodiment of the present invention;

[0039] FIG. 11B is a simplified flowchart illustrating operation of a non-coding genomic sequence detector constructed and operative in accordance with a preferred embodiment of the present invention;

[0040] FIG. 12A is a simplified block diagram of a hairpin detector constructed and operative in accordance with a preferred embodiment of the present invention;

[0041] FIG. 12B is a simplified flowchart illustrating operation of a hairpin detector constructed and operative in accordance with a preferred embodiment of the present invention;

[0042] FIG. 13A is a simplified block diagram of a dicer-cut location detector constructed and operative in accordance with a preferred embodiment of the present invention;

[0043] FIG. 13 B is a simplified flowchart illustrating training of a dicer-cut location detector constructed and operative in accordance with a preferred embodiment of the present invention;

[0044] FIG. 14A is a simplified block diagram of a target-gene binding-site detector constructed and operative in accordance with a preferred embodiment of the present invention;

[0045] FIG. 14B is a simplified flowchart illustrating operation of a target-gene binding-site detector constructed and operative in accordance with a preferred embodiment of the present invention;

[0046] FIG. 15 is a simplified flowchart illustrating operation of a function & utility analyzer constructed and operative in accordance with a preferred embodiment of the present invention;

[0047] FIG. 16 is a simplified diagram describing a novel bioinformatically detected group of regulatory genes, referred to here as Genomic Record (GR) genes, each of which encodes an ‘operon-like’ cluster of novel miRNA-like genes, which in turn modulates expression of a plurality of target genes;.

[0048] FIG. 17 is a simplified diagram illustrating a mode by which genes of a novel group of operon-like genes of the present invention, modulate expression of other such genes, in a cascading manner;

[0049] FIG. 18 is a block diagram illustrating an overview of a methodology for finding novel genes and operons of the present invention, and their respective functions;

[0050] FIG. 19 is a block diagram illustrating different utilities of genes of a novel group of genes, and operons of a novel group of operons, both of the present invention;

[0051] FIGS. 20A and 20B are simplified diagrams, which when taken together illustrate a mode of gene therapy applicable to genes of the novel group of genes of the present invention;

[0052] FIG. 21A is an annotated sequence of EST72223 comprising novel gene GAM24 detected by the gene detection system of the present invention;

[0053] FIGS. 21B and 21C are pictures of laboratory results, which when taken together demonstrate laboratory confirmation of expression of the bioinformatically detected novel gene GAM24 of FIG. 21A;

[0054] FIG. 21D provides pictures of laboratory results, which when taken together demonstrate further laboratory confirmation of expression of the bioinformatically detected novel gene GAM24 of FIG. 21A;

[0055] FIG. 22A is an annotated sequence of an EST7929020 comprising novel genes GAM23 and GAM25 detected by the gene detection system of the present invention;

[0056] FIG. 22B is a picture of laboratory results, which confirm expression of bioinformatically detected novel genes GAM23 and GAM25 of FIG. 22A;

[0057] FIG. 22C is a picture of laboratory results, which confirm endogenous expression of bioinformatically detected novel gene GAM25 of FIG. 22A;

[0058] FIG. 23A is an annotated sequence of an EST1388749 comprising novel gene GAM26 detected by the gene detection system of the present invention;

[0059] FIG. 23B is a picture of laboratory results, which confirm expression of the bioinformatically detected novel gene GAM26 of FIG. 23A;

[0060] FIGS. 24A through 20624D are schematic diagrams illustrating sequences, functions and utilities of 20601 specific genes of the novel group of genes of the present invention, detected using the bioinformatic gene detection system described hereinabove with reference to FIGS. 8 through 15; and

[0061] FIGS. 20625 through 27260 are schematic diagrams illustrating sequences, functions and utilities of 6636 specific genes of a group of novel regulatory ‘operon-like’ genes of the present invention, detected using the bioinformatic gene detection system described hereinabove with reference to FIGS. 8 through 15.

### DETAILED DESCRIPTION OF A PREFERRED EMBODIMENT

[0062] Reference is now made to FIG. 1 which is a simplified diagram providing a conceptual explanation of a genomic differentiation enigma, which the present invention addresses.

[0063] FIG. 1 depicts different cell types in an organism, such as CARTILAGE CELL, LIVER CELL, FIBROBLAST CELL and BONE CELL all containing identical DNA, and deriving from the initial FERTILIZED EGG CELL, and yet each of these cells expressing different proteins, and hence acquiring different shape and function.

[0064] The present invention proposes that the inevitable conclusion from this constraint is, however, strikingly simple: the coding system used must be modular. It must comprise multiple modules, or records, one for each cell-type, and a mechanism whereby each cell at its inception is instructed which record to open, and behaves according to instructions in that record.

[0065] This modular code concept is somewhat difficult to grasp, since we are strongly habituated to viewing things from an external viewpoint. An architect, for example, looks at a blueprint of a building, which details exactly where each element (block, window, door, electrical switch, etc.) is to be placed relative to all other elements, and then instructs builders to place these elements in their designated places. This is an external viewpoint: the architect is external to the blueprint, which itself is external to the physical building, and its different elements. The architect may therefore act as an ‘external organizing agent’: seeing the full picture and the relationships between all elements, and being able to instruct from the outside where to place each of them.

[0066] Genomics differentiation coding evidently works differently, without any such external organizing agent: It comprises only one smart block (the first cell), which is the architect and the blueprint, and which continuously duplicates itself, somehow knowing when to manifest itself as a block and when as a window, door, or electrical switch.

[0067] Reference is now made to FIGS. 2 through 4 which are schematic diagrams which when taken together provide an analogy that illustrates a conceptual model of the present invention, addressing the genomic differentiation enigma.

[0068] Reference is now made to FIG. 2A. Imagine a very talented chef, capable of preparing any meal provided he is given specific written cooking instructions. This chef is equipped with two items: (a) a thick recipe book, and (b) a small note with a number scribbled on it. The book comprises multiple pages, each page detailing how to prepare a specific meal. The small note indicates the page to be opened, and therefore the meal to be prepared. The chef looks at the page-number written on the note, opens the recipe book at the appropriate page, and prepares the meal according to the written instructions on this page. As an example, FIG. 2A depicts a CHEF holding a note with the number 12 written on it, he opens the book on page 12, and since that page contains the recipe for preparing BREAD, the CHEF prepares a loaf of BREAD.

[0069] Reference is now made to FIG. 2B, which depicts two identical chefs, CHEF A and CHEF B, holding an identical recipe book. Despite their identity, and the identity of their recipe book, since CHEF A holds a note numbered 12, and therefore opens the book on page 12 and prepares BREAD, whereas CHEF B holds a note numbered 34 and therefore opens the book on page 34 and prepares a PIE.

[0070] Reference is now made to FIG. 3. Imagine the chef of the analogy is also capable of duplicating himself once he has finished preparing the specified meal. The format of the book is such that at the bottom of each page, two numbers are written. When he has finished preparing the meal specified on that page, the chef is trained to do the following: (i) divide himself into two identical duplicate chefs, (ii) duplicate the recipe book and hand a copy to each of his duplicate chefs, and (iii) write down the two numbers found at the bottom of the page of the meal he prepared, on two small notes, handing one note to each of his two duplicate chefs.

[0071] Each of the two resulting duplicate chefs are now equipped with the same book, and have the same talent to prepare any meal, but since each of them received a different note, they will now prepare different meals.

[0072] FIG. 3 depicts CHEF A holding a recipe book and receiving a note numbered 12. CHEF A therefore opens the book on page 12 and prepares BREAD. When he is finished making bread, CHEF A performs the following actions: (i) divides himself into two duplicate chefs, designated CHEF B and CHEF C, (ii) duplicates his recipe book handing a copy to each of CHEF B and CHEF C, (iii) writes down the numbers found at the bottom of page 12, numbers 34 and 57, on two notes, handing note numbered 34 to CHEF B and note numbered 57 to CHEF C.

[0073] Accordingly, CHEF B receives a note numbered 34 and therefore opens the recipe book on page 34 and prepares PIE, whereas CHEF C receives a note numbered 57 and therefore opens the book on page 57 and therefore prepares RICE.

[0074] It is appreciated that while CHEF A, CHEF B & CHEF C are identical and hold identical recipe books, they each prepare a different meal. It is also appreciated that the meals prepared by CHEF B and CHEF C are determined CHEF A, and are mediated by the differently numbered notes passed on from CHEF A to CHEF B and CHEF C.

[0075] It is further appreciated that the mechanism illustrated by FIG. 3 enables an unlimited lineage of chefs to divide into duplicate, identical chefs and to determine the meals those duplicate chefs would prepare. For example, having been directed to page 34, when CHEF B divides into duplicate chefs (not shown), he will instruct its two duplicate chefs to prepare meals specified on pages 14 and 93 respectively, according to the numbers at the bottom of page 34 to which he was directed. Similarly, CHEF C will instruct its duplicate chefs to prepare meals specified on pages 21 and 46 respectively, etc.

[0076] Reference is now made to FIG. 4. Imagine that the cooking instructions on each page of the recipe book are written in shorthand format: The main meal-page to which the chef was directed by the scribbled note, merely contains a list of numbers which direct him to multiple successive pages, each specifying how to prepare an ingredient of that meal.

[0077] As an example, FIG. 4 depicts CHEF A of FIGS. 2 and 3, holding a recipe book and a note numbered 12. Accordingly, CHEF A opens the recipe book on page 12, which details the instructions for preparing BREAD. However, the ‘instructions’ on making BREAD found on page 12 comprise only of 3 numbers, 18, 7 and 83, which ‘refer’ CHEF A to pages detailing preparation of the ingredients of BREAD-FLOUR, MILK and SALT, respectively.

[0078] As illustrated in FIG. 4, turning from the main ‘meal page’ (e.g. 12) to respective ‘ingredients pages’ (e.g. pages 18, 7 & 83) is mediated by scribbled notes with the page-numbers written on them. In this analogy, the scribbled notes are required for seeking the target pages to be turned to—both when turning to main ‘meal pages’ (e.g. page 12), as well as when turning to ‘ingredient pages’ (e.g. pages 18, 7 & 83).

[0079] The chef in the given analogy, schematically depicted in FIGS. 2 through 4, represents a cell; the thick recipe book represents the DNA; preparing a meal in the given analogy represents the cell manifesting itself as a specific cell-type; and ingredients of a meal represent proteins expressed by that cell-type. Like the chef equipped with the thick recipe book in the given analogy, all cells in an organism contain the same DNA and are therefore each potentially capable of manifesting itself as any cell-type, expressing proteins typical of that cell type.

[0080] Reference is now made to FIGS. 5A and 5B which are schematic diagrams, which when taken together illustrate a ‘genomic records’ concept of the conceptual model of the present invention, addressing the genomic differentiation enigma.

[0081] The Genomic Records concept asserts that the DNA (the thick recipe book in the illustration) comprises a very large number of Genomic Records (analogous to pages in the recipe book), each containing the instructions for differentiation of a different cell-type, or developmental process. Each Genomic Record is headed by a very short genomic sequence which functions as a ‘Genomic Address’ of that Genomic Record (analogous to the page number in the recipe book). At its inception, in addition to the DNA, each cell also receives a short RNA segment (the scribbled note in the illustration). This short RNA segment binds complementarily to a ‘Genomic Address’ sequence of one of the Genomic Records, thereby activating that Genomic Record, and accordingly determining the cell's-fate (analogous to opening the book on the page corresponding to the number on the scribbled note, thereby determining the meal to be prepared).

[0082] Reference is now made to FIG. 5A. a CELL is illustrated which comprises a GENOME. The GENOME comprises a plurality of GENOMIC RECORDS, each of which correlates to a specific cell type (for clarity only 6 sample genomic records are shown). Each genomic record comprises genomic instructions on differentiation into a specific cell-type, as further elaborated below with reference to FIG. 7. At cell inception, the CELL receives a maternal short RNA segment, which activates one of the GENOMIC RECORDS, causing the cell to differentiate according to the instructions comprised in that genomic record. As an example, FIG. 5A illustrates reception of a maternal short RNA segment designated A′ and outlined by a broken line, which activates the FIBRO genomic record, causing the cell to differentiate into a FIBROBLAST CELL.

[0083] Reference is now made to FIG. 5B, which is a simplified schematic diagram, illustrating cellular differentiation mediated by the ‘Genomic Records’ concept. FIG. 5B depicts 2 cells in an organism, designated CELL A and CELL B, each having a GENOME. It is appreciated that since CELL A and CELL B are cells in the same organism, the GENOME of CELL A is identical to that of CELL B. Despite having an identical GENOME, CELL A differentiates differently from CELL B, due to activation of different genomic records in these two cells. In CELL A the FIBRO GENOMIC RECORD is activated, causing CELL A to differentiate into a FIBROBLAST CELL, whereas in CELL B the BONE GENOMIC RECORD is activated, causing the CELL B to differentiate into a BONE CELL. The cause for activation of different genomic records in these two cells is the different maternal short RNA which they both received: CELL A received a maternal short RNA segment designated A′ which activated genomic record FIBRO, whereas CELL B received a maternal short RNA segment designated B′ which activated genomic record BONE.

[0084] Reference is now made to FIG. 6 which is a schematic diagram illustrating a ‘genomically programmed cell differentiation’ concept of the conceptual model of the present invention, addressing the genomic differentiation enigma.

[0085] A cell designated CELL A divides into 2 cells designated CELL B and CELL C. CELL A, CELL B and CELL C each comprise a GENOME, which GENOME comprises a plurality of GENOMIC RECORDS. It is appreciated that since CELL A, CELL B and CELL C are cells in the same organism, the GENOME of these cells, and the GENOMIC RECORDS comprised therein, are identical.

[0086] As described above with reference to FIG. 5B, at its inception, CELL A receives a maternal short RNA segment, designated A′ and marked by a broken line, which activates the FIBRO genomic record, thereby causing CELL A to differentiate into a FIBROBLAST CELL. However, FIG. 6 shows further details of the genomic records: each cell genomic record also comprises two short genomic sequences, referred to here as Daughter Cell Genomic Addresses. Blocks designated B and C are Daughter Cell Genomic Addresses of the FIBRO Genomic Record. At cell division, each parent cell transcribes two short RNA segments, corresponding to the two Daughter Cell Genomic Addresses of the Genomic Record of that parent cell, and transfers one to each of its two daughter cells. CELL A of FIG. 6 transcribes and transfers to its two respective daughter cells, two short RNA segments, outlined by a broken line and designated B′ and C′, corresponding to daughter cell genomic addresses designated B and C comprised in the FIBRO genomic record.

[0087] CELL B therefore receives the above mentioned maternal short RNA segment designated B′, which binds complementarily to genomic address designated B of genomic record BONE, thereby activating this genomic record, which in turn causes CELL B to differentiate into a BONE CELL. Similarly, CELL C receives the above mentioned maternal short RNA segment designated C′, which binds complementarily to genomic address designated C of genomic record CARTIL., thereby activating this genomic record, which in turn causes CELL C to differentiate into a CARTILAGE CELL.

[0088] It is appreciated that the mechanism illustrated by FIG. 6 enables an unlimited lineage of cells to divide into daughter cells containing the same DNA, and to determine the cell-fate of these daughter cells. For example, when CELL B and CELL C divide into their respective daughter cells (not shown), they will transfer short RNA segments designated D′ & E′, and F′ & G′ respectively, to their respective daughter cells. The cell fate of each of these daughter cells would be determined by the identity of the maternal short RNA segment they receive, which would determine the genomic record activated.

[0089] Reference is now made to FIG. 7 which is a schematic diagram illustrating a ‘genomically programmed cell-specific protein expression modulation’ concept of the conceptual model of the present invention, addressing the genomic differentiation enigma.

[0090] Cell A receives a maternal short RNA segment designated A′, which activates a genomic record designated FIBRO, by anti-sense binding to a binding site ‘header’ of this genomic record, designated A. Genomic record FIBRO encodes 3 short RNA segments, designated 1, 2 and 4 respectively, which modulate expression of target genes designated GENE1, GENE2 and GENE4 respectively. Modulation of expression of these genes results in CELL A differentiating into a FIBROBLAST CELL.

[0091] Reference is now made to FIG. 8 which is a simplified diagram illustrating a mode by which genes of a novel group of genes of the present invention, modulate expression of known target genes.

[0092] The novel genes of the present invention are micro RNA (miRNA)-like, regulatory RNA genes, modulating expression of known target genes. This mode of modulation is common to other known miRNA genes, as described hereinabove with reference to the background of the invention section.

[0093] GAM GENE and TARGET GENE are two human genes contained in the DNA of the human genome.

[0094] GAM GENE encodes a GAM PRECURSOR RNA. However, similar to other miRNA genes, and unlike most ordinary genes, its RNA, GAM PRECURSOR RNA, does not encode a protein.

[0095] GAM PRECURSOR RNA folds onto itself, forming GAM FOLDED PRECURSOR RNA. As FIG. 8 illustrates, GAM FOLDED PRECURSOR RNA forms a ‘hairpin structure’, folding onto itself. As is well known in the art, this ‘hairpin structure’, is typical genes of the miRNA genes, and is due to the fact that nucleotide sequence of the first half of the RNA of a gene in this group is an accurate or partial inversed-reversed sequence of the nucleotide sequence of its second half. By “inversed-reversed” is meant a sequence which is reversed and wherein each nucleotide is replaced by a complimentary nucleotide, as is well known in the art (e.g. ATGGC is the inversed-reversed sequence of GCCAT).

[0096] An enzyme complex, designated DICER COMPLEX, ‘dices’ the GAM FOLDED PRECURSOR RNA into a single stranded RNA segment, about 22 nucleotides long, designated GAM RNA. As is known in the art, ‘dicing’ of the hairpin structured RNA precursor into shorter RNA segments about 22 nucleotides long by a Dicer type enzyme is catalyzed by an enzyme complex comprising an enzyme called Dicer together with other necessary proteins.

[0097] TARGET GENE encodes a corresponding messenger RNA, designated TARGET RNA. This TARGET RNA comprises 3 regions: a 5′ untranslated region, a protein coding region and a 3′ untranslated region, designated 5′UTR, PROTEIN CODING and 3′UTR respectively.

[0098] GAM RNA binds complementarily a BINDING SITE, located on the 3′UTR segment of TARGET RNA. This complementarily binding is due to the fact that the nucleotide sequence of GAM RNA is an accurate or partial inversed-reversed sequence of the nucleotide sequence of BINDING SITE.

[0099] The complimentary binding of GAM RNA to BINDING SITE inhibits translation of TARGET RNA into TARGET PROTEIN. TARGET PROTEIN is therefore outlined by a broken line.

[0100] It is appreciated by one skilled in the art that the mode of transcriptional inhibition illustrated by FIG. 8 with specific reference to GAM genes of the present invention, is in fact common to all other miRNA genes. A specific complimentary binding site has been demonstrated only for Lin-4 and Let-7. All the other 93 newly discovered miRNA genes are also believed by those skilled in the art to modulate expression of other genes by complimentary binding, although specific complimentary binding sites for these genes have not yet been found (Ruvkun G., ‘Perspective: Glimpses of a tiny RNA world’, Science 294, 779 (2001)). The present invention discloses a novel group of genes, the GAM genes, belonging to the miRNA genes group, and for which a specific an complimentary binding has been determined.

[0101] Reference is now made to FIG. 9 which is a simplified block diagram illustrating a bioinformatic gene detection system capable of detecting genes of the novel group of genes of the present invention, which system is constructed and operative in accordance with a preferred embodiment of the present invention.

[0102] A centerpiece of the present invention is a bioinformatic gene detection engine 100, which is a preferred implementation of a mechanism capable of bioinformatically detecting genes of the novel group of genes of the present invention.

[0103] The function of the bioinformatic gene detection engine 100 is as follows: it receives three types of input, expressed RNA data 102, sequenced DNA data 104, and protein function data 106, performs a complex process of analysis of this data as elaborated below, and based on this analysis produces output of a bioinformatically detected group of novel genes designated 108.

[0104] Expressed RNA data 102 comprises published expressed sequence tags (EST) data, published mRNA data, as well as other sources of published RNA data. Sequenced DNA data 104 comprises alphanumeric data describing sequenced genomic data, which preferably includes annotation data such as location of known protein coding regions relative to the sequenced data. Protein function data 106 comprises scientific publications reporting studies which elucidated physiological function known proteins, and their connection, involvement and possible utility in treatment and diagnosis of various diseases. Expressed RNA data 102, sequenced DNA data 104 may preferably be obtained from data published by the National Center for Bioinformatics (NCBI) at the National Institute of Health (NIH), as well as from various other published data sources. Protein function data 106 may preferably be obtained from any one of numerous relevant published data sources, such as the Online Mendelian Inherited Disease In Man (OMIM) database developed by John Hopkins University, and also published by NCBI.

[0105] Prior to actual detection of bioinformatically detected novel genes 108 by the bioinformatic gene detection engine 100, a process of bioinformatic gene detection engine training & validation designated 110 takes place. This process uses the known miRNA genes as a training set (some 200 such genes have been found to date using biological laboratory means), to train the bioinformatic gene detection engine 100 to bioinformatically recognize miRNA-like genes, and their respective potential target binding sites. Bioinformatic gene detection engine training & validation 110 is further describe hereinbelow with reference to FIG. 10.

[0106] The bioinformatic gene detection engine 100 comprises several modules which are preferably activated sequentially, and are described as follows:

[0107] A non-coding genomic sequence detector 112 operative to bioinformatically detect non-protein coding genomic sequences. The non-coding genomic sequence detector 112 is further described hereinbelow with reference to FIGS. 11A and 11B.

[0108] A hairpin detector 114 operative to bioinformatically detect genomic ‘hairpin-shaped’ sequences, similar to GAM FOLDED PRECURSOR of FIG. 8. The hairpin detector 114 is further described hereinbelow with reference to FIGS. 12A and 12B.

[0109] A dicer-cut location detector 116 operative to bioinformatically detect the location on a hairpin shaped sequence which is enzymatically cut by DICER COMPLEX of FIG. 8. The dicer-cut location detector 116 is further described hereinbelow with reference to FIG. 13A.

[0110] A target-gene binding-site detector 118 operative to bioinformatically detect target genes having binding sites, the nucleotide sequence of which is partially complementary to that of a given genomic sequence, such as a sequence cut by DICER COMPLEX of FIG. 8. The target-gene binding-site detector 118 is further described hereinbelow with reference to FIGS. 14A and 14B.

[0111] A function & utility analyzer 120 operative to analyze function and utility of target genes, in order to identify target genes which have a significant clinical function and utility. The function & utility analyzer 120 is further described hereinbelow with reference to FIG. 15.

[0112] Hardware implementation of the bioinformatic gene detection engine 100 is important, since significant computing power is preferably required in order to perform the computation of bioinformatic gene detection engine 100 in reasonable time and cost. As an example, it is estimated that using one powerful 8-processor PC Server, over 30 months of computing time (at 24 hours per day) would be required in order to detect all miRNA genes in human EST data, and their respective binding sites.

[0113] For example, in order to address this challenge at reasonable time and cost, a preferred embodiment of the present invention may comprise a cluster of a large number of personal computers (PCs), such as 100 PCs (Pentium IV, 1.7 GHz, with 40 GB storage each), connected by Ethernet to several strong servers, such as 4 servers (2-CPU, Xeon 2.2 GHz, with 200 GB storage each), combined with an 8-processor server (8-CPU, Xeon 550 Mhz w/8 GB RAM) connected via 2 HBA fiber-channels to an EMC Clariion 100-disks, 3.6 Terabyte storage device. Additionally, preferably an efficient database computer program, such as Microsoft™ SQL-Server database computer program is used and is optimized to the specific requirements of bioinformatic gene detection engine 100. Furthermore, the PCs are preferably optimized to operate close to 100% CPU usage continuously, as is known in the art. Using suitable hardware and software may preferably reduce the required calculation time in the abovementioned example from 30 months to 20 days.

[0114] It is appreciated that the abovementioned hardware configuration is not meant to be limiting, and is given as an illustration only. The present invention may be implemented in a wide variety of hardware and software configurations.

[0115] The present invention discloses 527 novel genes of the GAM group of genes, which have been detected bioinformatically, as described hereinbelow with reference to FIGS. 24 through 550. Laboratory confirmation of 4 genes of the GAM group of genes is described hereinbelow with reference to FIGS. 21A through 23.

[0116] Reference is now made to FIG. 10 which is a simplified flowchart illustrating operation of a mechanism for training of a computer system to recognize the novel genes of the present invention. This mechanism is a preferred implementation of the bioinformatic gene detection engine training & validation 110 described hereinabove with reference to FIG. 9.

[0117] Bioinformatic gene detection engine training & validation 110 of FIG. 9 begins by training the bioinformatic gene detection engine to recognize known miRNA genes, as designated by numeral 122. This training step comprises hairpin detector training & validation 124, further described hereinbelow with reference to FIG. 12 A, dicer-cut location detector training & validation 126, further described hereinbelow with reference to FIGS. 13A and 13B, and target-gene binding-site detector training & validation 128, further described hereinbelow with reference to FIG. 14A.

[0118] Next, the bioinformatic gene detection engine 100 is used to bioinformatically detect sample novel genes, as designated by numeral 130. An example of a sample novel gene thus detected is described hereinbelow with reference to FIG. 21.

[0119] Finally, wet lab experiments are preferably conducted in order to validate expression and preferably function the sample novel genes detected by the bioinformatic gene detection engine 100 in the previous step. An example of wet-lab validation of the abovementioned sample novel gene bioinformatically detected by the system is described hereinbelow with reference to FIGS. 22A and 22B.

[0120] Reference is now made to FIG. 11A which is a simplified block diagram of a preferred implementation of the non-coding genomic sequence detector 112 described hereinabove with reference to FIG. 9. Non-protein coding genomic sequence detector 112 of FIG. 9 preferably receives as input at least two types of published genomic data: expressed RNA data 102, including EST data and mRNA data, and sequenced DNA data 104. After its initial training, indicated by numeral 134, and based on the abovementioned input data, the non-protein coding genomic sequence detector 112 produces as output a plurality of non-protein coding genomic sequences 136. Preferred operation of the non-protein coding genomic sequence detector 112 is described hereinbelow with reference to FIG. 11B.

[0121] Reference is now made to FIG. 11B which is a simplified flowchart illustrating a preferred operation of the non-coding genomic sequence detector 112 of FIG. 9. Detection of non-protein coding genomic sequences to be further analyzed by the system generally preferably progresses in one of the following two paths.

[0122] A first path for detecting non-protein coding genomic sequences begins by receiving a plurality of known RNA sequences, such as EST data. Each RNA sequence is first compared to all known protein-coding sequences, in order to select only those RNA sequences which are non-protein coding. This can preferably be performed by BLAST comparison of the RNA sequence to known protein coding sequences. The abovementioned BLAST comparison to the DNA preferably also provides the localization of the RNA on the DNA.

[0123] Optionally, an attempt may be made to ‘expand’ the non-protein RNA sequences thus found, by searching for transcription start and end signals, upstream and downstream of location of the RNA on the DNA respectively, as is well known in the art.

[0124] A second path for detecting non-protein coding genomic sequences starts by receiving DNA sequences. The DNA sequences are parsed into non protein coding sequences, based on published DNA annotation data: extracting those DNA sequences which are between known protein coding sequences. Next, transcription start and end signals are sought. If such signals are found, and depending on their ‘strength’, probable expressed non-protein coding genomic sequences are yielded.

[0125] Reference is now made to FIG. 12A which is a simplified block diagram of a preferred implementation of the hairpin detector 114 described hereinabove with reference to FIG. 9.

[0126] The goal of the hairpin detector 114 is to detect ‘hairpin’ shaped genomic sequences, similar to those of known miRNA genes. As mentioned hereinabove with reference to FIG. 8, a ‘hairpin’ genomic sequence refers to a genomic sequence which ‘folds onto itself’ forming a hairpin like shape, due to the fact that nucleotide sequence of the first half of the nucleotide sequence is an accurate or

[0127] The hairpin detector 114 of FIG. 9 receives as input a plurality of non-protein coding genomic sequences 136 of FIG. 11A, and after a phase of hairpin detector training & validation 124 of FIG. 10, is operative to detect and output ‘hairpin shaped’ sequences found in the input expressed non-protein coding sequences, designated by numeral 138.

[0128] The phase of hairpin detector training & validation 124 is an iterative process of applying the hairpin detector 114 to known hairpin shaped miRNA genes, calibrating the hairpin detector 114 such that it identifies the training set of known hairpins, as well as sequences which are similar thereto. Preferred operation of the hairpin detector 114 is described hereinbelow with reference to FIG. 12B.

[0129] Reference is now made to FIG. 12B which is a simplified flowchart illustrating a preferred operation of the hairpin detector 114 of FIG. 9.

[0130] A hairpin structure is a two dimensional folding structure, resulting from the nucleotide sequence pattern: the nucleotide sequence of the first half of the hairpin sequence is an inversed-reversed sequence of the second half thereof. Different methodologies are known in the art for detection of various two dimensional and three dimensional hairpin structures.

[0131] In a preferred embodiment of the present invention, the hairpin detector 114 initially calculates possible 2-dimensional (2D) folding patterns of a given one of the non-protein coding genomic sequences 136, preferably using a 2D folding algorithm based on free-energy calculation, such as the Zucker algorithm, as is well known in the art.

[0132] Next, the hairpin detector 114 analyzes the results of the 2D folding, in order to determine the presence, and location of hairpin structures. A 2D folding algorithm typically provides as output a listing of the base-pairing of the 2D folded shape, i.e. a listing of which all two pairs of nucleotides in the sequence which will bond. The goal of this second step, is to asses this base-pairing listing, in order to determine if it describes a hairpin type bonding pattern.

[0133] The hairpin detector 114 then assess those hairpin structures found by the previous step, comparing them to hairpins of known miRNA genes, using various parameters such as length, free-energy, amount and type of mismatches, etc. Only hairpins that bear statistically significant resemblance of the population of hairpins of known miRNAs, according to the abovementioned parameters are accepted.

[0134] Lastly, the hairpin detector 114 attempts to select those hairpin structures which are as stable as the hairpins of know miRNA genes. This may be achieved in various manners. A preferred embodiment of the present invention utilizes the following methodology comprising three steps:

[0135] First, the hairpin detector 114 attempts to group potential hairpins into ‘families’ of closely related hairpins. As is known in the art, a free-energy calculation algorithm, typically provides multiple ‘versions’ each describing a different possible 2D folding pattern for the given genomic sequence, and the free energy of such possible folding. The hairpin detector 114 therefore preferably assesses all hairpins found on all ‘versions’, grouping hairpins which appear in different versions, but which share near identical locations into a common ‘family’ of hairpins. For example, all hairpins in different versions, the center of which is within 7 nucleotides of each other may preferably be grouped to a single ‘family’.

[0136] Next, hairpin ‘families’ are assessed, in order to select only those families which represent hairpins that are as stable as those of known miRNA hairpins. For example, preferably only families which are represented in at least 65% of the free-energy calculation 2D folding versions, are considered stable.

[0137] Finally, an attempt is made to select the most suitable hairpin from each selected family. For example, preferably the hairpin which appears in more versions than other hairpins, and in versions the free-energy of which is lower, may be selected.

[0138] Reference is now made to FIG. 13A which is a simplified block diagram of a preferred implementation of the dicer-cut location detector 116 described hereinabove with reference to FIG. 9.

[0139] The goal of the dicer-cut location detector 116 is to detect the location in which DICER COMPLEX of FIG. 8, comprising the enzyme Dicer, would ‘dice’ the given hairpin sequence, similar to GAM FOLDED PRECURSOR RNA, yielding GAM RNA both of FIG. 8.

[0140] The dicer-cut location detector 116 of FIG. 9 therefore receives as input a plurality of hairpins on genomic sequences 138 of FIG. 12A, which were calculated by the previous step, and after a phase of dicer-cut location detector training & validation 126 of FIG. 10, is operative to detect a respective plurality of dicer-cut sequences from hairpins 140, one for each hairpin.

[0141] In a preferred embodiment of the present invention, the dicer-cut location detector 116 preferably uses a combination of neural networks, Bayesian networks, Markovian modeling, and Support Vector Machines (SVMs) trained on the known dicer-cut locations of known miRNA genes, in order to detect dicer-cut locations. Dicer-cut location detector training & validation 126, which is further described hereinbelow with reference to FIG. 13B.

[0142] Reference is now made to FIG. 13 B which is a simplified flowchart illustrating a preferred implementation of dicer-cut location detector training & validation 126 of FIG. 10. Dicer-cut location detector 116 first preprocesses known miRNA hairpins and their respective dicer-cut locations, so as to be able to properly analyze them and train the detection system accordingly:

[0143] The folding pattern is calculated for each known miRNA, preferably based on free-energy calculation, and the size of the hairpin, the size of the loop at the center of the hairpin, and ‘bulges’ (i.e. mismatched base-pairs) in the folded hairpin are noted.

[0144] The dicer-cut location, which is known for known miRNA genes, is noted relative to the above, as well as to the nucleotides in each location along the hairpin. Frequency of identity of nucleotides, and nucleotide-pairing, relative to their location in the hairpin, and relative to the known dicer-cut location in the known miRNA genes is analyzed and modeled.

[0145] Different techniques are well known in the art for analysis of existing pattern from a given ‘training set’ of species belonging to a genus, which techniques are then capable, to a certain degree, to detect similar patterns in other species not belonging to the training-set genus. Such techniques include, but are not limited to neural networks, Bayesian networks, Support Vector Machines (SVM), Genetic Algorithms, Markovian modeling, and others, as is well known in the art.

[0146] Using such techniques, preferably a combination of several of the above techniques, the known hairpins are represented as a several different networks (such as neural, Bayesian, or SVM) input and output layers. Both nucleotide, and ‘bulge’ (i.e. nucleotide pairing or mismatch) are represented for each position in the hairpin, at the input layer, and a corresponding true/false flag at each position, indicating whether it was diced by dicer at the output layer. Multiple networks are preferably used concurrently, and the results therefrom are integrated and further optimized. Markovian modeling may also be used to validate the results and enhance their accuracy. Finally, the bioinformatic detection of dicer-cut location of a sample novel is confirmed by wet-lab experimentation.

[0147] Reference is now made to FIG. 14A which is a simplified block diagram of a preferred implementation of the target-gene binding-site detector 118 described hereinabove with reference to FIG. 9. The goal of the target-gene binding-site detector 118 is to detect a BINDING SITE of FIG. 8, located in an untranslated region of the RNA of a known gene, the nucleotide sequence of which BINDING SITE is at least partially complementary to that of a GAM RNA of FIG. 8, thereby determining that the abovementioned known gene is a target gene of GAM of FIG. 8.

[0148] The target-gene binding-site detector 118 of FIG. 9 therefore receives as input a plurality of dicer-cut sequences from hairpins 140 of FIG. 13A which were calculated by the previous step, and a plurality of potential target gene sequences 142 which derive sequence DNA data 104 of FIG. 9, and after a phase of target-gene binding-site detector training & validation 128 of FIG. 10, is operative to detect target-genes having binding site/s 144 the nucleotide sequence of which is at least partially complementary to that of each of the plurality of dicer-cut sequences from hairpins 140. Preferred operation of the target-gene binding-site detector is further described hereinbelow with reference to FIG. 14B.

[0149] Reference is now made to FIG. 14B which is a simplified flowchart illustrating a preferred operation of the target-gene binding-site detector 118 of FIG. 9. In a preferred embodiment of the present invention, the target-gene binding-site detector 118 first performs a BLAST comparison of the nucleotide sequence of each of the plurality of dicer-cut sequences from hairpins 140, to the potential target gene sequences 142, in order to find crude potential matches. Blast results are then filtered to results which are similar to those of known binding sites (e.g. binding sites of miRNA genes Lin-4 and Let-7 to target genes Lin-14, Lin-41, Lin 28 etc.). Next the binding site is expanded, checking if nucleotide sequenced immediately adjacent to the binding site found by BLAST, may improve the match. Suitable binding sites, then are computed for free-energy and spatial structure. The results are analyzed, selecting only those binding sites, which have free-energy and spatial structure similar to that of known binding sites.

[0150] Reference is now made to FIG. 15 which is a simplified flowchart illustrating a preferred operation of the function & utility analyzer 120 described hereinabove with reference to FIG. 9. The goal of the function & utility analyzer 120 is to determine if a potential target gene is in fact a valid clinically useful target gene. Since a potential novel GAM gene binding a binding site in the UTR of a target gene is understood to inhibit expression of that target gene, and if that target gene is shown to have a valid clinical utility, then in such a case it follows that the potential novel gene itself also has a valid useful function—which is the opposite of that of the target gene.

[0151] The function & utility analyzer 120 preferably receives as input a plurality of potential novel target genes having binding-site/s 144, generated by the target-gene binding-site detector 118, both of FIG. 14A. Each potential gene, is evaluated as follows:

[0152] First the system first checks to see if the function of the potential target gene is scientifically well established. Preferably, this can be achieved bioinformatically by searching various published data sources presenting information on known function of proteins. Many such data sources exist and are published as is well known in the art.

[0153] Next, for those target genes the function of which is scientifically known and is well documented, the system then checks if scientific research data exists which links them to known diseases. For example, a preferred embodiment of the present invention utilizes the OMIM™ database published by NCBI, which summarizes research publications relating to genes which have been shown to be associated with diseases.

[0154] Finally, the specific possible utility of the target gene is evaluated. While this process too may be facilitated by bioinformatic means, it might require human evaluation of published scientific research regarding the target gene, in order to determine the utility of the target gene to the diagnosis and or treatment of specific disease. Only potential novel genes, the target-genes of which have passed all three examinations, are accepted as novel genes.

[0155] Reference is now made to FIG. 16, which is a simplified diagram describing a novel bioinformatically detected group of regulatory genes, referred to here as Genomic Record (GR) genes, that encode an ‘operon-like’ cluster of novel miRNA-like genes, each modulating expression of a plurality of target genes, the function and utility of which target genes is known.

[0156] GR GENE (Genomic Record Gene) is gene of a novel, bioinformatically detected group of regulatory, non protein coding, RNA genes. The method by which GR is detected is described hereinabove with reference to FIGS. 6-15.

[0157] GR GENE encodes an RNA molecule, typically several hundred nucleotides long, designated GR PRECURSOR RNA.

[0158] GR PRECURSOR RNA folds spatially, as illustrated by GR FOLDED PRECURSOR RNA, into a plurality of what is known in the art as ‘hair-pin’ structures. The nucleotide sequence of GR PRECURSOR RNA comprises a plurality of segments, the first half of each such segment having a nucleotide sequence which is at least a partial inversed-reversed sequence of the second half thereof, thereby causing formation of a plurality of ‘hairpin’ structures, as is well known in the art.

[0159] GR FOLDED PRECURSOR RNA is naturally processed by cellular enzymatic activity, into 3 separate hairpin shaped RNA segments, each corresponding to GAM PRECURSOR RNA of FIG. 8, designated GAM1 PRECURSOR, GAM2 PRECURSOR and GAM3 PRECURSOR respectively.

[0160] The above mentioned GAM precursors, are diced by Dicer of FIG. 8, yielding short RNA segments of about 22 nucleotides in length, each corresponding to GAM RNA of FIG. 8, designated GAM1, GAM2 and GAM3 respectively.

[0161] GAM1, GAM2 and GAM3 each bind complementarily to binding sites located in untranslated regions of respective target genes, designated GAM1-TARGET RNA, GAM2-TARGET RNA and GAM3-TARGET RNA respectively. This binding inhibits translation of the respective target proteins designated GAM1-TARGET PROTEIN, GAM2-TARGET PROTEIN and GAM3-TARGET PROTEIN respectively.

[0162] The structure of GAM genes comprised in a GR GENE, and their mode of modulation of expression of their respective target genes is described hereinabove with reference to FIG. 8. The bioinformatic approach to detection of GAM genes comprised in a GR GENE is described hereinabove with reference to FIGS. 9 through 15. The present invention discloses 147 novel genes of the GR group of genes, which have been detected bioinformatically, as described hereinbelow with reference to FIGS. 551 through 697. Laboratory confirmation of 3 genes of the GR group of genes is described hereinbelow with reference to FIGS. 21A through 23.

[0163] In summary, the current invention discloses a very large number of novel GR genes, each of which encodes a plurality of GAM genes, which in turn may modulate expression of a plurality of target proteins. It is appreciated therefore that the function of GR genes is in fact similar to that of the Genomic Records concept of the present invention addressing the differentiation enigma, described hereinabove with reference to FIG. 7.

[0164] Reference is now made to FIG. 17 which is a simplified diagram illustrating a mode by which genes of a novel group of operon-like genes, described hereinabove with reference to FIG. 16 of the present invention, modulate expression of other such genes, in a cascading manner.

[0165] GR1 GENE and GR2 GENE are two genes of the novel group of operon-like genes designated GR of FIG. 16. As is typical of genes of the GR group of genes, GR1 and GR2 each encode a long RNA precursor, which in turn folds into a folded RNA precursor comprising multiple hairpin shapes, and is cut into respective separate hairpin shaped RNA segments, each of which RNA segments being diced to yield a gene of a group of genes designated GAM of FIG. 8. In this manner GR1 yields GAM1, GAM2 and GAM3, and GR2 yields GAM4, GAM5 and GAM6.

[0166] As FIG. 17 shows, GAM 3 which derives from GR1, binds a binding site located adjacent to GR2 GENE, thus modulating expression of GR2, thereby invoking expression of GAM4, GAM5 and GAM6 which derive from GR2.

[0167] It is appreciated that the mode of modulation of expression presented by FIG. 17 enables an unlimited ‘cascading effect’ in which a GR gene comprises multiple GAM genes, each of which may modulate expression of other GR genes, each such GR gene comprising additional GAM genes, etc., whereby eventually certain GAM genes modulate expression of target proteins. This mechanism is in accord with the conceptual model of the present invention addressing the differentiation enigma, described hereinabove with specific reference to FIGS. 6 and 7.

[0168] Reference is now made to FIG. 18 which is a block diagram illustrating an overview of a methodology for finding novel genes and operon-like genes of the present invention, and their respective functions.

[0169] According to a preferred embodiment of the present invention, the methodology to finding novel genes of the present invention and their function comprises of the following major steps:

[0170] First, genes of the novel group of genes of the present invention, referred to here as GAM genes, are located and their function elicited by detecting target proteins they bind and the function of those target proteins, as described hereinabove with reference to FIGS. 9 through 15.

[0171] Next, genes of a novel group of operon-like genes of the present invention, referred to here as GR genes, are located, by locating clusters of proximally located GAM genes, based on the previous step.

[0172] Consequently, the hierarchy of GR and GAM genes is elicited: binding sites for non-protein-binding GAM genes comprised in each GR gene found, are sought adjacent to other GR genes. When found, such a binding site indicates that the connection between the GAM and the GR the expression of which it modulates, and thus the hierarchy of the GR genes and the GAM genes they comprise.

[0173] Lastly, the function of GR genes and GAM genes which are ‘high’ in the hierarchy, i.e. GAM genes which modulate expression of other GR genes rather than directly modulating expression of target proteins, may be deduced. A preferred approach is as follows: The function of protein-modulating GAM genes is deducible from the proteins which they modulate, provided that the function of these target proteins are known. The function of ‘higher’ GAM genes may be deduced by comparing the function of protein-modulating GAM genes, with the hierarchical relationships by which the ‘higher’ GAM genes are connected to the protein-modulating GAM genes. For example, given a group of several protein-modulating GAM genes, which collectively cause a protein expression pattern typical of a certain cell-type, then a ‘higher’ GAM gene is sought which modulates expression of GR genes which perhaps modulate expression of other genes which eventually modulate expression of the given group of protein-modulating GAM genes. The ‘higher’ GAM gene found in this manner, is taken to be responsible for differentiation of that cell-type, as per the conceptual model of the invention described hereinabove with reference to FIG. 6.

[0174] Reference is now made to FIG. 19 which is a block diagram illustrating different utilities of genes of the novel group of genes of the present invention referred to here as GAM genes and GR genes.

[0175] The present invention discloses a first plurality of novel genes referred to here as GAM genes, and a second plurality of operon-like genes referred to here as GR genes, each of the GR genes encoding a plurality of GAM genes. The present invention further discloses a very large number of known target-genes, which are bound by, and the expression of which is modulated by each of the novel genes of the present invention. Published scientific data referenced by the present invention provides specific, substantial, and credible evidence that the abovementioned target genes modulated by novel genes of the present invention, are associated with various diseases. Specific novel genes of the present invention, target genes thereof and diseases associated therewith, are described hereinbelow with reference to FIGS. 24 through 27260. It is therefore appreciated that a function of GAM genes and GR genes of the present invention is modulation of expression of target genes related to known diseases, and that therefore utilities of novel genes of the present invention include diagnosis and treatment of the abovementioned diseases. FIG. 19 describes various types of diagnostic and therapeutic utilities of novel genes of the present invention.

[0176] A utility of novel genes of the present invention is detection of GAM genes and of GR genes. It is appreciated that since GAM genes and GR genes modulate expression of disease related target genes, that detection of expression of GAM genes in clinical scenarios associated with said diseases is a specific, substantial and credible utility. Diagnosis of novel genes of the present invention may preferably be implemented by RNA expression detection techniques, including but not limited to biochips, as is well known in the art. Diagnosis of expression of genes of the present invention may be useful for research purposes, in order to further understand the connection between the novel genes of the present invention and the abovementioned related diseases, for disease diagnosis and prevention purposes, and for monitoring disease progress.

[0177] Another utility of novel genes of the present invention is anti-GAM gene therapy, a mode of therapy which allows up regulation of a disease related target-gene of a novel GAM gene of the present invention, by lowering levels of the novel GAM gene which naturally inhibits expression of that target gene. This mode of therapy is particularly useful with respect to target genes which have been shown to be under-expressed in association with a specific disease. Anti-GAM gene therapy is further discussed hereinbelow with reference to FIGS. 20A and 20B.

[0178] A further utility of novel genes of the present invention is GAM replacement therapy, a mode of therapy which achieves down regulation of a disease related target-gene of a novel GAM gene of the present invention, by raising levels of the GAM gene which naturally inhibits expression of that target gene. This mode of therapy is particularly useful with respect to target genes which have been shown to be over-expressed in association with a specific disease. GAM replacement therapy involves introduction of supplementary GAM gene products into a cell, or stimulation of a cell to produce excess GAM gene products. GAM replacement therapy may preferably be achieved by transfecting cells with an artificial DNA molecule encoding a GAM gene, which causes the cells to produce the GAM gene product, as is well known in the art.

[0179] Yet a further utility of novel genes of the present invention is modified GAM therapy. Disease conditions are likely to exist, in which a mutation in a binding site of a GAM gene prevents natural GAM gene to effectively bind inhibit a disease related target-gene, causing up regulation of that target gene, and thereby contributing to the disease pathology. In such conditions, a modified GAM gene is designed which effectively binds the mutated GAM binding site, i.e. is an effective anti-sense of the mutated GAM binding site, and is introduced in disease effected cells. Modified GAM therapy is preferably achieved by transfecting cells with an artificial DNA molecule encoding the modified GAM gene, which causes the cells to produce the modified GAM gene product, as is well known in the art.

[0180] An additional utility of novel genes of the present invention is induced cellular differentiation therapy. As aspect of the present invention is finding genes which determine cellular differentiation, as described hereinabove with reference to FIG. 18. Induced cellular differentiation therapy comprises transfection of cell with such GAM genes thereby determining their differentiation as desired. It is appreciated that this approach may be widely applicable, inter alia as a means for auto transplantation —harvesting cells of one cell-type from a patient, modifying their differentiation as desired, and then transplanting them back into the patient. It is further appreciated that this approach may also be utilized to modify cell differentiation in vivo, by transfecting cells in a genetically diseased tissue with a cell-differentiation determining GAM gene, thus stimulating these cells to differentiate appropriately.

[0181] Reference is now made to FIGS. 20A and 20B, simplified diagrams which when taken together illustrate anti-GAM gene therapy mentioned hereinabove with reference to FIG. 19. A utility of novel genes of the present invention is anti-GAM gene therapy, a mode of therapy which allows up regulation of a disease related target-gene of a novel GAM gene of the present invention, by lowering levels of the novel GAM gene which naturally inhibits expression of that target gene. FIG. 20A shows a normal GAM gene, inhibiting translation of a target gene of GAM gene, by binding to a BINDING SITE found in an untranslated region of TARGET RNA, as described hereinabove with reference to FIG. 8.

[0182] FIG. 20B shows an example of anti-GAM gene therapy. ANTI-GAM RNA is short artificial RNA molecule the sequence of which is an anti-sense of GAM RNA. Anti-GAM treatment comprises transfecting diseased cells with ANTI-GAM RNA, or with a DNA encoding thereof. The ANTI-GAM RNA binds the natural GAM RNA, thereby preventing binding of natural GAM RNA to its BINDING SITE. This prevents natural translation inhibition of TARGET RNA by GAM RNA, thereby up regulating expression of TARGET PROTEIN.

[0183] It is appreciated that anti-GAM gene therapy is particularly useful with respect to target genes which have been shown to be under-expressed in association with a specific disease.

[0184] Reference is now made to FIG. 21A which is an annotated sequence of an EST comprising a novel gene detected by the gene detection system of the present invention. FIG. 21A shows the nucleotide sequence of a known human non-protein coding EST (Expressed Sequence Tag), identified as EST72223. It is appreciated that the sequence of this EST comprises sequences of one known miRNA gene, identified as MIR98, and of one novel GAM gene, referred to here as GAM24, detected by the bioinformatic gene detection system of the present invention, described hereinabove with reference to FIG. 9.

[0185] Reference is now made to FIGS. 21B and 21C that are pictures of laboratory results, which when taken together demonstrate laboratory confirmation of expression of the bioinformatically detected novel gene of FIG. 21A. Reference is now made to FIG. 21B which is a Northern blot analysis of MIR-98 and EST72223 transcripts. MIR-98 and EST72223 were reacted with MIR-98 and GAM24 probes as indicated in the figure. It is appreciated that the probes of both MIR-98 and GAM24 reacted with EST72223, indicating that EST72223 contains the sequences of MIR-98 and of GAM24. It is further appreciated that the probe of GAM24 does not cross-react with MIR-98.

[0186] Reference is now made to FIG. 21C. A Northern blot analysis of EST72223 and MIR-98 transfections were performed, subsequently marking RNA by the MIR-98 and GAM24 probes. Left, Northern reacted with MIR-98, Right, Northern reacted with GAM24. The molecular Sizes of EST72223, MIR-98 and GAM24 are indicated by arrows. Hela are control cells that have not been introduced to exogenous RNA. EST and MIR-98 Transfections are RNA obtained from Hela transfected with EST72223 and MIR-98, respectively. MIR-98 and EST are the transcripts used for the transfection experiment. The results indicate that EST72223, when transfected into Hela cells, is cut yielding known miRNA gene MIR-98 and novel miRNA gene GAM24.

[0187] Reference is now made to FIG. 21D, which is a Northern blot of a lisate experiment with MIR-98 and GAM24. Northern blot analysis of hairpins in EST72223. Left, Northern reacted with predicted Mir-98 hairpin probe, Right, Northern reacted with predicted GAM24 hairpin probe. The molecular size of EST Is indicated by arrow. The molecular sizes of Mir-98 and GAM24 are 80 nt and 100 nt, respectively as indicated by arrows. The 22 nt molecular marker is indicated by arrow. 1-Hela lysate; 2-EST incubated 4 h with Hela lysate; 3-EST without lysate; 4-Mir transcript incubated 4 h with Hela lysate; 5-Mir transcript incubated overnight with Hela lysate; 6-Mir transcript without lysate; 7-RNA extracted from Hela cells following transfection with Mir transcript.

[0188] Technical methods used in experiments, the results of which are depicted in FIGS. 21B, 21C and 21D are as follows:

[0189] Transcript preparations: Digoxigenin (DIG) labeled transcripts were prepared from EST72223 (TIGER), MIR98 and predicted precursor hairpins by using a DIG RNA labeling kit (Roche Molecular Biochemicals) according to the manufacture's protocol. Briefly, PCR products with T7 promoter at the 5′ end or T3 promoter at the 3′end were prepared from each DNA in order to use it as a template to prepare sense and antisense transcripts, respectively.

[0190] MIR-98 was amplified using EST72223 as a templet with T7miR98 forward primer: 5-′TAATACGACTCACTATAGGGTGAGGTAGTAAGTTGTATTGTT-3′ and T3miR98 revse primer: 5′-AATTAACCCTCACTAAAGGGAAAGTAGTAAGTTGTATAGTT-3′ EST72223 was amplified with T7-EST 72223 forward primer: 5′-TAATACGACTCACTATAGGCCCTTATTAGAGGATTCTGCT-3′ and T3-EST72223 reverse primer: 5′-AATTAACCCTCACTAAAGGTTTTTTTTTCCTGAGACAGAGT-3′ Bet-4 was amplified using EST72223 as a templet with Bet-4 forward primer: 5′-GAGGCAGGAGAATTGCTTGA-3′ and T3-EST72223 reverse primer: 5′-AATTAACCCTCACTAAAGGCCTGAGACAGAGTCTTGCTC-3′

[0191] The PCR products were cleaned and used for DIG-labeled or unlabeled transcription reactions with the appropriate polymerase. For transfection experiments, CAP reaction was performed by using a mMassage mMachine kit (Ambion).

[0192] Transfection procedure: Transfection of Hela cells was performed by using TransMessenger reagent (Qiagen) according to the manufacture's protocol. Briefly, Hela cells were seeded to 1-2×10ˆ6 cells per plate a day before transfection. Two μg RNA transcripts were mixed with 8 μl Enhancer in a final volume of 100 μl, mixed and incubated at room temperature for 5 min. 16 μl TransMessenger reagent was added to the RNA-Enhancer, mixed and incubated for additional 10 min. Cell plates were washed with sterile PBS twice and then incubated with the transfection mix diluted with 2.5 ml DMEM medium without serum. Cells were incubated with transfection mix for three hours under their normal growth condition (370 C and 5% CO₂) before the transfection mix was removed and a fresh DMEM medium containing serum was added to the cells. Cells were left to grow 48 hours before harvesting.

[0193] Target RNA cleavage assay: Cap-labeled target RNAs were generated using mMessage mMachine™ (Ambion). Caped RNA transcripts were preincubated at 30° C. for 15 min in supplemented Hela S100 obtained from Computer Cell Culture, Mos, Belgium. After addition of all components, final concentrations were 100 mM target RNA, 1 m M ATP, 0.2 mM GTP, 10 U/ml RNasin, 30 μg/ml creatine kinase, 25 mM creatine phosphate, and 50% S100 extract. Incubation was continued for 4 hours to overnight. Cleavage reaction was stopped by the addition of 8 volumes of proteinase K buffer (200 Mm Tris-Hcl, pH 7.5, 25 m M EDTA, 300 mM NaCl, and 2% SDS). Proteinase K, dissolved in 50 mM Tris-HCl, pH 8, 5 m M CaCl₂, and 50% glycerol, was added to a final concentration of 0.6 mg/ml. Sample were subjected to phenol/chlorophorm extraction and kept frozen until analyzed by urea-TBE PAGE.

[0194] Northern analysis: RNAs were extracted from cells by using Tri-reagent according to the manufacture's protocol. The RNAs were dissolved in water and heated to 650 C to disrupt any association of the 25 nt RNA with larger RNA molecules. RNA were placed on ice and incubated for 30 min with PEG (MW=8000) in a final concentration of 5% and NaCl in a final concentration of 0.5M to precipitate high molecular weight nucleic acid. The RNAs were centrifuged at 10,000×g for 10 min to pellet the high molecular weight nucleic acid. The supernatant containing the low molecular weight RNAs was collected and three volumes of ethanol was added. The RNAs were placed at −200 C for at least two hours and then centrifuged at 10,000×g for 10 min. The pellets were dissolved in Urea-TBE buffer (1Xtbe, 7M urea) for further analysis by a Northern blot.

[0195] RNA samples were boiled for 5 min before loading on 15%-8% polyacrylamide (19:1) gels containing 7M urea and 1×TBE. Gels were run in 1×TBE at a constant voltage of 300V and then transferred into a nylon membrane. The membrane was exposed to 3 min ultraviolet light to cross link the RNAs to the membrane. Hybridization was performed overnight with DIG-labeled probes at 420 C. Membranes were washed twice with SSC×2 and 0.2% SDS for 10 min. at 420 C and then washed twice with SSC×0.5 for 5 min at room temperature. The membrane was then developed by using a DIG luminescent detection kit (Roche) using anti DIG and CSPD reaction, according to the manufacture's protocol.

[0196] It is appreciated that the data presented in FIGS. 21A, 21B, 21C and 21D, when taken together validate the function of the bioinformatic gene detection engine 100 of FIG. 9. FIG. 21A shows a novel GAM gene bioinformatically detected by the bioinformatic gene detection engine 100, and FIGS. 21B, 21C and 21D show laboratory confirmation of the expression of this novel gene. This is in accord with the engine training and validation methodology described hereinabove with reference to FIG. 10.

[0197] Reference is now made to FIG. 22A which is an annotated sequence of an EST comprising a novel gene detected by the gene detection system of the present invention. FIG. 22A shows the nucleotide sequence of a known human non-protein coding EST (Expressed Sequence Tag), identified as EST 7929020. It is appreciated that the sequence of this EST comprises sequences of two novel GAM genes, referred to here as GAM23 and GAM25, detected by the bioinformatic gene detection system of the present invention, described hereinabove with reference to FIG. 9.

[0198] Reference is now made to FIG. 22B which presents pictures of laboratory results, that demonstrate laboratory confirmation of expression of the bioinformatically detected novel gene of FIG. 22A. Northern blot analysis of hairpins in EST7929020. Left, Northern reacted with predicted GAM25 hairpin probe, Right, Northern reacted with predicted GAM23 hairpin probe. The molecular size of EST is indicated by arrow. The molecular sizes of GAM23 and GAM25 are 60 nt, as indicated by arrow. The 22 nt molecular marker is indicated by arrow. 1-Hela lysate; 2-EST incubated 4 h with Hela lysate; 3-EST incubated overnight with Hela lysate; 4-EST without lysate; 5-GAM transcript; 6-GAM 22 nt marker; 7-GAM PCR probe; 8-RNA from control Hela cells; 9-RNA extracted from Hela cells following transfection with EST.

[0199] Reference is now made to FIG. 22C which is a picture of a Northern blot confirming Endogenous expression of bioinformatically detected gene GAM25 of FIG. 22A from in Hela cells. Northern was reacted with a predicted GAM25 hairpin probe. The molecular size of EST7929020 is indicated. The molecular sizes of GAM25 is 58 nt, as indicated. A 19 nt DNA oligo molecular marker is indicated. Endogenous expression of GAM25 in Hela total RNA fraction and in S-100 fraction is indicated by arrows. 1-GAM25 transcript; 2-GAM25 DNA oligo marker; 3-RNA from control Hela cells; 4-RNA extracted from Hela cells following transfection with EST; 5-RNA extracted from S-100 Hela lysate.

[0200] Reference is now made to FIG. 23A which is an annotated sequence of an EST comprising a novel gene detected by the gene detection system of the present invention. FIG. 23A shows the nucleotide sequence of a known human non-protein coding EST (Expressed Sequence Tag), identified as EST 1388749. It is appreciated that the sequence of this EST comprises sequence of a novel GAM gene, referred to here as GAM26, detected by the bioinformatic gene detection system of the present invention, described hereinabove with reference to FIG. 9.

[0201] Reference is now made to FIG. 23B which is a picture of Northern blot analysis, confirming expression of novel bioinformatically detected gene GAM26, and natural processing thereof from EST1388749. Northern reacted with predicted GAM26 hairpin probe. The molecular size of EST is indicated by arrow. The molecular sizes of GAM26 is 130 nt, as indicated by arrow. The 22 nt molecular marker is indicated by arrow. 1-Hela lysate; 2-EST incubated 4 h with Hela lysate; 3-EST incubated overnight with Hela lysate; 4-EST without lysate; 5-GAM transcript; 6-GAM 22 nt marker; 7-GAM PCR probe.

[0202] Reference is now made to FIG. 24A, which is a simplified diagram providing a conceptual explanation of the mode by which a novel bioinformatically detected gene, referred to here as GAM24 modulates expression of target genes thereof, the function and utility of which target genes is known in the art.

[0203] GAM24 (Genomic Address Messenger 24) is a novel bioinformatically detected regulatory, non protein coding, micro RNA (miRNA) gene. The method by which GAM24 was detected is described hereinabove with reference to FIGS. 6-15.

[0204] GAM24 GENE and GAM24-TARGET GENE are two human genes contained in the human genome.

[0205] GAM24 GENE encodes a GAM24 PRECURSOR RNA. Similar to other miRNA genes, and unlike most ordinary genes, the RNA transcribed by GAM24, GAM24 PRECURSOR RNA, does not encoded a protein.

[0206] GAM24 PRECURSOR RNA folds onto itself, forming GAM24 FOLDED PRECURSOR RNA. As FIG. 24 illustrates, GAM24 FOLDED PRECURSOR RNA forms a ‘hairpin structure’, folding onto itself. As is well known in the art, this ‘hairpin structure’, is typical of RNA encoded by miRNA genes, and is due to the fact that the nucleotide sequence of the first half of the RNA encoded by a miRNA gene is an accurate or partial inversed-reversed sequence of the nucleotide sequence of the second half thereof. By “inversed-reversed” is meant a sequence which is reversed and wherein each nucleotide is replaced by a complimentary nucleotide, as is well known in the art (e.g. ATGGC is the inversed-reversed sequence of GCCAT).

[0207] An enzyme complex designated DICER COMPLEX, ‘dices’ the GAM24 FOLDED PRECURSOR RNA into a single stranded ˜22 nt long RNA segment, designated GAM24 RNA. As is known in the art, ‘dicing’ of a hairpin structured RNA precursor product into short a ˜22 nt RNA segment is catalyzed by an enzyme complex comprising an enzyme called Dicer together with other necessary proteins.

[0208] GAM24-TARGET GENE encodes a corresponding messenger RNA, designated GAM24-TARGET RNA. GAM24-TARGET RNA comprises three regions, as is typical of mRNA of a protein coding gene: a 5′ untranslated region, a protein coding region and a 3′ untranslated region, designated 5′UTR, PROTEIN CODING and 3′UTR respectively.

[0209] GAM24 RNA binds complimentarily to a BINDING SITE, located on an untranslated region of GAM24-TARGET RNA. This complimentarily binding is due to the fact that the nucleotide sequence of GAM24 RNA is an accurate or a partial inversed-reversed sequence of the nucleotide sequence of BINDING SITE. It is appreciated that while FIG. 24A depicts the BINDING SITE on the 3′UTR region, this is meant as an example only—the BINDING SITE may be located on the 5′UTR region as well.

[0210] The complimentary binding of GAM24 RNA to BINDING SITE inhibits translation of GAM24-TARGET RNA into GAM24-TARGET PROTEIN. GAM24-TARGET PROTEIN is therefore outlined by a broken line.

[0211] It is appreciated that GAM24-TARGET GENE in fact represents a plurality of target genes of GAM24. The mRNA of each of this plurality of target genes of GAM24 comprises a BINDING SITE, having a nucleotide sequence which is at least partly complementary to GAM24 RNA, and which when bound by GAM24 RNA causes inhibition of translation of one of a plurality of target proteins of GAM24. The plurality of target genes of GAM24 and their respective binding sites, are described hereinbelow with reference to FIG. 24D.

[0212] It is appreciated by one skilled in the art that the mode of translational inhibition illustrated by FIG. 24 with specific reference to translational inhibition exerted by GAM24 on one or more target genes of GAM24, is in fact common to other known miRNA genes. As mentioned hereinabove with reference to the background section, although a specific complimentary binding site has been demonstrated only for miRNA genes Lin-4 and Let-7, all other recently discovered miRNA genes are also believed by those skilled in the art to modulate expression of other genes by complimentary binding, although specific complimentary binding sites of these genes have not yet been found (Ruvkun G., ‘Perspective: Glimpses of a tiny RNA world’, Science 294, 779 (2001)).

[0213] Reference is now made to FIG. 24B which shows the nucleotide sequence of GAM24 PRECURSOR RNA of FIG. 24A, designated SEQ ID:1, and a probable nucleotide sequence of GAM24 RNA of FIG. 24A, designated SEQ ID:20602. The nucleotide sequence of SEQ ID:20602, which is highly likely (over 0.878955%) to be identical or highly similar to that of GAM24, is marked by an underline within the sequence of GAM24 PRECURSOR RNA.

[0214] Reference is now made to FIG. 24C, which shows the secondary folding of GAM24 PRECURSOR RNA, forming a ‘hairpin structure’ designated GAM24 FOLDED PRECURSOR RNA, both of FIG. 24A. A probable (>0.878955%) nucleotide sequence of GAM24 RNA, designated SEQ ID:20602 of FIG. 24B, is marked by an underline on GAM24 FOLDED PRECURSOR RNA. It is appreciated that the complimentary base-paring is not perfect, with ‘bulges’, as is well known in the art with respect to the RNA folding of all known miRNA genes.

[0215] Reference is now made to FIG. 24D, which is a table showing binding sites found in untranslated regions of a plurality of target genes of GAM24, each binding site corresponding to BINDING SITE of FIG. 24A, and their complementarity to SEQ ID:20602, which is highly likely (>0.878955%) to be identical or highly similar to the nucleotide sequence of GAM24 RNA of FIG. 24A.

[0216] It is appreciated that the functions, and accordingly the utilities, of GAM24 correlate with, and may be deduced from, the identity of the target genes which GAM24 binds and inhibits, and the function of these target genes, as elaborated hereinbelow.

[0217] Reference is now made to DCLRE1A BINDING SITE. DCLRE1A is a target gene of GAM24, corresponding to GAM24-TARGET GENE of FIG. 24A. DCLRE1A BINDING SITE is a binding site found in an untranslated region of DCLRE1A, corresponding to BINDING SITE of FIG. 24A. FIG. 24D illustrates the complementarity of the nucleotide sequence of DCLRE1A BINDING SITE, designated SEQ ID:507529, to the nucleotide sequence of GAM24 RNA of FIG. 24A, designated SEQ ID:20602. a function of GAM24 is therefore inhibition of (DCLRE1A). Accordingly, utilities of GAM24 include diagnosis and treatment of diseases and clinical conditions with which DCLRE1A is associated.

[0218] Reference is now made to DKFZP58612223 BINDING SITE. DKFZP58612223 is a target gene of GAM24, corresponding to GAM24-TARGET GENE of FIG. 24A. DKFZP58612223 BINDING SITE is a binding site found in an untranslated region of DKFZP58612223, corresponding to BINDING SITE of FIG. 24A. FIG. 24D illustrates the complementarity of the nucleotide sequence of DKFZP58612223 BINDING SITE, designated SEQ ID:534456, to the nucleotide sequence of GAM24 RNA of FIG. 24A, designated SEQ ID:20602. Yet another function of GAM24 is therefore inhibition of (DKFZP58612223). Accordingly, utilities of GAM24 include diagnosis and treatment of diseases and clinical conditions with which DKFZP58612223 is associated.

[0219] Reference is now made to FLJ13725 BINDING SITE. FLJ13725 is a target gene of GAM24, corresponding to GAM24-TARGET GENE of FIG. 24A. FLJ13725 BINDING SITE is a binding site found in an untranslated region of FLJ13725, corresponding to BINDING SITE of FIG. 24A. FIG. 24D illustrates the complementarity of the nucleotide sequence of FLJ13725 BINDING SITE, designated SEQ ID:604594, to the nucleotide sequence of GAM24 RNA of FIG. 24A, designated SEQ ID:20602. An additional function of GAM24 is therefore inhibition of (FLJ13725). Accordingly, utilities of GAM24 include diagnosis and treatment of diseases and clinical conditions with which FLJ13725 is associated.

[0220] Reference is now made to PASK BINDING SITE. PASK is a target gene of GAM24, corresponding to GAM24-TARGET GENE of FIG. 24A. PASK BINDING SITE is a binding site found in an untranslated region of PASK, corresponding to BINDING SITE of FIG. 24A. FIG. 24D illustrates the complementarity of the nucleotide sequence of PASK BINDING SITE, designated SEQ ID:907327, to the nucleotide sequence of GAM24 RNA of FIG. 24A, designated SEQ ID:20602. A further function of GAM24 is therefore inhibition of (PASK). Accordingly, utilities of GAM24 include diagnosis and treatment of diseases and clinical conditions with which PASK is associated.

[0221] Reference is now made to TIGD5 BINDING SITE. TIGD5 is a target gene of GAM24, corresponding to GAM24-TARGET GENE of FIG. 24A. TIGD5 BINDING SITE is a binding site found in an untranslated region of TIGD5, corresponding to BINDING SITE of FIG. 24A. FIG. 24D illustrates the complementarity of the nucleotide sequence of TIGD5 BINDING SITE, designated SEQ ID:993571, to the nucleotide sequence of GAM24 RNA of FIG. 24A, designated SEQ ID:20602. Yet a further function of GAM24 is therefore inhibition of (TIGD5). Accordingly, utilities of GAM24 include diagnosis and treatment of diseases and clinical conditions with which TIGD5 is associated.

[0222] Reference is now made to LOC151556 BINDING SITE. LOC151556 is a target gene of GAM24, corresponding to GAM24-TARGET GENE of FIG. 24A. LOC151556 BINDING SITE is a binding site found in an untranslated region of LOC151556, corresponding to BINDING SITE of FIG. 24A. FIG. 24D illustrates the complementarity of the nucleotide sequence of LOC151556 BINDING SITE, designated SEQ ID:1151343, to the nucleotide sequence of GAM24 RNA of FIG. 24A, designated SEQ ID:20602. Another function of GAM24 is therefore inhibition of (LOC151556). Accordingly, utilities of GAM24 include diagnosis and treatment of diseases and clinical conditions with which LOC151556 is associated.

[0223] Reference is now made to LOC196812 BINDING SITE. LOC196812 is a target gene of GAM24, corresponding to GAM24-TARGET GENE of FIG. 24A. LOC1196812 BINDING SITE is a binding site found in an untranslated region of LOC196812, corresponding to BINDING SITE of FIG. 24A. FIG. 24D illustrates the complementarity of the nucleotide sequence of LOC196812 BINDING SITE, designated SEQ ID:1214315, to the nucleotide sequence of GAM24 RNA of FIG. 24A, designated SEQ ID:20602. Yet another function of GAM24 is therefore inhibition of (LOC196812). Accordingly, utilities of GAM24 include diagnosis and treatment of diseases and clinical conditions with which LOC196812 is associated.

[0224] Reference is now made to LOC256158 BINDING SITE. LOC256158 is a target gene of GAM24, corresponding to GAM24-TARGET GENE of FIG. 24A. LOC256158 BINDING SITE is a binding site found in an untranslated region of LOC256158, corresponding to BINDING SITE of FIG. 24A. FIG. 24D illustrates the complementarity of the nucleotide sequence of LOC256158 BINDING SITE, designated SEQ ID:1317257, to the nucleotide sequence of GAM24 RNA of FIG. 24A, designated SEQ ID:20602. An additional function of GAM24 is therefore inhibition of (LOC256158). Accordingly, utilities of GAM24 include diagnosis and treatment of diseases and clinical conditions with which LOC256158 is associated.

[0225] Reference is now made to LOC90342 BINDING SITE. LOC90342 is a target gene of GAM24, corresponding to GAM24-TARGET GENE of FIG. 24A. LOC90342 BINDING SITE is a binding site found in an untranslated region of LOC90342, corresponding to BINDING SITE of FIG. 24A. FIG. 24D illustrates the complementarity of the nucleotide sequence of LOC90342 BINDING SITE, designated SEQ ID: 1356067, to the nucleotide sequence of GAM24 RNA of FIG. 24A, designated SEQ ID:20602. A further function of GAM24 is therefore inhibition of (LOC90342). Accordingly, utilities of GAM24 include diagnosis and treatment of diseases and clinical conditions with which LOC90342 is associated.

[0226] Reference is now made to FIG. 25A, which is a simplified diagram providing a conceptual explanation of the mode by which a novel bioinformatically detected gene, referred to here as GAM25 modulates expression of target genes thereof, the function and utility of which target genes is known in the art.

[0227] GAM25 (Genomic Address Messenger 25) is a novel bioinformatically detected regulatory, non protein coding, micro RNA (miRNA) gene. The method by which GAM25 was detected is described hereinabove with reference to FIGS. 6-15.

[0228] GAM25 GENE and GAM25-TARGET GENE are two human genes contained in the human genome.

[0229] GAM25 GENE encodes a GAM25 PRECURSOR RNA. Similar to other miRNA genes, and unlike most ordinary genes, the RNA transcribed by GAM25, GAM25 PRECURSOR RNA, does not encoded a protein.

[0230] GAM25 PRECURSOR RNA folds onto itself, forming GAM25 FOLDED PRECURSOR RNA. As FIG. 25 illustrates, GAM25 FOLDED PRECURSOR RNA forms a ‘hairpin structure’, folding onto itself As is well known in the art, this ‘hairpin structure’, is typical of RNA encoded by miRNA genes, and is due to the fact that the nucleotide sequence of the first half of the RNA encoded by a miRNA gene is an accurate or partial inversed-reversed sequence of the nucleotide sequence of the second half thereof. By “inversed-reversed” is meant a sequence which is reversed and wherein each nucleotide is replaced by a complimentary nucleotide, as is well known in the art (e.g. ATGGC is the inversed-reversed sequence of GCCAT).

[0231] An enzyme complex designated DICER COMPLEX, ‘dices’ the GAM25 FOLDED PRECURSOR RNA into a single stranded ˜22 nt long RNA segment, designated GAM25 RNA. As is known in the art, ‘dicing’ of a hairpin structured RNA precursor product into short a ˜22 nt RNA segment is catalyzed by an enzyme complex comprising an enzyme called Dicer together with other necessary proteins.

[0232] GAM25-TARGET GENE encodes a corresponding messenger RNA, designated GAM25-TARGET RNA. GAM25-TARGET RNA comprises three regions, as is typical of mRNA of a protein coding gene: a 5′ untranslated region, a protein coding region and a 3′ untranslated region, designated 5′UTR, PROTEIN CODING and 3′UTR respectively.

[0233] GAM25 RNA binds complimentarily to a BINDING SITE, located on an untranslated region of GAM25-TARGET RNA. This complimentarily binding is due to the fact that the nucleotide sequence of GAM25 RNA is an accurate or a partial inversed-reversed sequence of the nucleotide sequence of BINDING SITE. It is appreciated that while FIG. 25A depicts the BINDING SITE on the 3′UTR region, this is meant as an example only—the BINDING SITE may be located on the 5′UTR region as well.

[0234] The complimentary binding of GAM25 RNA to BINDING SITE inhibits translation of GAM25-TARGET RNA into GAM25-TARGET PROTEIN. GAM25-TARGET PROTEIN is therefore outlined by a broken line.

[0235] It is appreciated that GAM25-TARGET GENE in fact represents a plurality of target genes of GAM25. The mRNA of each of this plurality of target genes of GAM25 comprises a BINDING SITE, having a nucleotide sequence which is at least partly complementary to GAM25 RNA, and which when bound by GAM25 RNA causes inhibition of translation of one of a plurality of target proteins of GAM25. The plurality of target genes of GAM25 and their respective binding sites, are described hereinbelow with reference to FIG. 25D.

[0236] It is appreciated by one skilled in the art that the mode of translational inhibition illustrated by FIG. 25 with specific reference to translational inhibition exerted by GAM25 on one or more target genes of GAM25, is in fact common to other known miRNA genes. As mentioned hereinabove with reference to the background section, although a specific complimentary binding site has been demonstrated only for miRNA genes Lin-4 and Let-7, all other recently discovered miRNA genes are also believed by those skilled in the art to modulate expression of other genes by complimentary binding, although specific complimentary binding sites of these genes have not yet been found (Ruvkun G., ‘Perspective: Glimpses of a tiny RNA world’, Science 294, 779 (2001)).

[0237] Reference is now made to FIG. 25B which shows the nucleotide sequence of GAM25 PRECURSOR RNA of FIG. 25A, designated SEQ ID:2, and a probable nucleotide sequence of GAM25 RNA of FIG. 25A, designated SEQ ID:29474. The nucleotide sequence of SEQ ID:29474, which is highly likely (over 0.25%) to be identical or highly similar to that of GAM25, is marked by an underline within the sequence of GAM25 PRECURSOR RNA.

[0238] Reference is now made to FIG. 25C, which shows the secondary folding of GAM25 PRECURSOR RNA, forming a ‘hairpin structure’ designated GAM25 FOLDED PRECURSOR RNA, both of FIG. 25A. A probable (>0.25%) nucleotide sequence of GAM25 RNA, designated SEQ ID:29474 of FIG. 25B, is marked by an underline on GAM25 FOLDED PRECURSOR RNA. It is appreciated that the complimentary base-paring is not perfect, with ‘bulges’, as is well known in the art with respect to the RNA folding of all known miRNA genes.

[0239] Reference is now made to FIG. 25D, which is a table showing binding sites found in untranslated regions of a plurality of target genes of GAM25, each binding site corresponding to BINDING SITE of FIG. 25A, and their complementarity to SEQ ID:29474, which is highly likely (>0.25%) to be identical or highly similar to the nucleotide sequence of GAM25 RNA of FIG. 25A.

[0240] It is appreciated that the functions, and accordingly the utilities, of GAM25 correlate with, and may be deduced from, the identity of the target genes which GAM25 binds and inhibits, and the function of these target genes, as elaborated hereinbelow.

[0241] Reference is now made to EED BINDING SITE. embryonic ectoderm development (EED) is a target gene of GAM25, corresponding to GAM25-TARGET GENE of FIG. 25A. EED BINDING SITE is a binding site found in an untranslated region of EED, corresponding to BINDING SITE of FIG. 25A. FIG. 25D illustrates the complementarity of the nucleotide sequence of EED BINDING SITE, designated SEQ ID:144323, to the nucleotide sequence of GAM25 RNA of FIG. 25A, designated SEQ ID:29474.

[0242] a function of GAM25 is therefore inhibition of embryonic ectoderm development (EED), a gene which encodes a transcripition factor that may be a transcriptional repressor involved in embryonic development. Accordingly, utilities of GAM25 include diagnosis and treatment of the abovementioned diseases and clinical conditions.

[0243] The function of EED has been established by previous studies. In Drosophila, the Polycomb-group (PcG) and trithorax-group (trxG) genes are part of a cellular memory system responsible for the stable inheritance of gene activity. PcG and trxG genes are repressors and activators, respectively, of Drosophila homeotic gene expression. ENX1 (EZH2; 601573) is a mammalian homolog of the Drosophila ‘enhancer of zeste’ gene and has domains with sequence homology to both PcG and trxG genes. Using a yeast 2-hybrid screen with ENX1 as bait, followed by screening a fetal brain cDNA library, Sewalt et al. (1998) isolated a cDNA encoding EED. EED is the human homolog of Eed, a murine PcG gene homologous to the Drosophila homeotic gene, ‘extra sex combs.’ The predicted 535-amino acid human EED protein is 100% identical to the murine protein. The N-terminal region of EED contains a putative PEST sequence, which is implicated in protein degradation, and there are 5 WD40 domains throughout the EED protein. WD40 domains are involved in protein-protein interactions, and Sewalt et al. (1998) showed that all 5 are necessary for the ENX1-EED interaction to occur. Northern blot analysis detected 1.5- and 2.0-kb EED transcripts in all tissues and cell lines tested; larger transcripts were detected in normal human tissues only, but at much lower levels. Highest expression was found in testis, spleen, prostate, ovary, and small intestine, as well as in colorectal adenocarcinoma, chronic myeloid leukemia, and osteosarcoma cell lines, with lower levels in thymus, colon, and peripheral blood leukocytes.

[0244] Animal model experiments lend further support to the function of EED. In marsupials and the extraembryonic region of the mouse, X inactivation is imprinted: the paternal X chromosome is preferentially inactivated whereas the maternal X is always active. Having more than 1 active X chromosome is deleterious to extraembryonic development in the mouse. Wang et al. (2001) showed that the eed gene is required for primary and secondary trophoblast giant cell development in female embryos. Results from mice carrying a paternally inherited X-linked GFP transgene implicated eed in the stable maintenance of imprinted X inactivation in extraembryonic tissues. Based on the recent finding that the EED protein interacts with histone deacetylases, Wang et al. (2001) suggested that this maintenance activity involves hypoacetylation of the inactivated paternal X chromosome in the extraembryonic tissues.

[0245] It is appreciated that the abovementioned animal model for EED is acknowledged by those skilled in the art as a scientifically valid animal model, as can be further appreciated from the publications sited hereinbelow.

[0246] Full details of the abovementioned studies are described in the following publications, the disclosure of which are hereby incorporated by reference:

[0247] ewalt, R. G. A. B.; van der Vlag, J.; Gunster, M. J.; Hamer, K. M.; den Blaauwen, J. L.; Satijn, D. P. E.; Hendrix, T.; van Driel, R.; Otte, A. P.: Characterization of interactions between the mammalian Polycomb-group proteins Enx1/EZH2 and EED suggests the existence of different mammalian Polycomb-group protein complexes. Molec. Cell. Biol. 18: 3586-3595, 1998. PubMed ID: 9584199 5. Wang, J.; Mager, J.; Chen, Y.; Schneider, E.; Cross, J. C.; Nagy, A.; Magnuson, T.: Imprinted X inactivation maintained by a mouse Polycomb group gene. Nature Genet. 28: 371-375, 2001.

[0248] Further studies establishing the function and utilities of EED are found in John Hopkins OMIM database record ID 605984, and in references numbered 1-5 listed hereinbelow.

[0249] Reference is now made to MLPH BINDING SITE. (MLPH) is a target gene of GAM25, corresponding to GAM25-TARGET GENE of FIG. 25A. MLPH BINDING SITE is a binding site found in an untranslated region of MLPH, corresponding to BINDING SITE of FIG. 25A. FIG. 25D illustrates the complementarity of the nucleotide sequence of MLPH BINDING SITE, designated SEQ ID:256513, to the nucleotide sequence of GAM25 RNA of FIG. 25A, designated SEQ ID:29474.

[0250] Yet another function of GAM25 is therefore inhibition of (MLPH), a gene which encodes a transcripition factor that is a member of the Rab effector family. and is associated with Griscelli syndrome. Accordingly, utilities of GAM25 include diagnosis and treatment of the abovementioned diseases and clinical conditions.

[0251] The function of MLPH has been established by previous studies. In 3 pigment mutations of the mouse, dilute (d), ashen (ash), and leaden (ln), melanin synthesis is normal but melanosome transport is impaired, resulting in the clumping of the melanosomes in the perinuclear region of the cell (Silvers, 1979). Genetic evidence suggested that these loci encode proteins that function in the same or overlapping pathways. All 3 mutations have identical phenotypes. In addition, Matesic et al. (2001) stated that the doubly and triply homozygous mutant combinations on a nonagouti background have phenotypes that are indistinguishable from any of the single mutations alone. Furthermore, all 3 mutations are suppressed by the cell autonomous, semidominant ‘dilute suppressor’ (dsu). By positional cloning, Matesic et al. (2001) identified in mouse a gene, which they designated melanophilin (Mlph), encoding a novel member of the Rab effector family. Northern blot analysis demonstrated expression of 3 Mlph transcripts in most adult tissues, with highest expression in epithelial-enriched tissues such as kidney, lung, skin, small intestine, and stomach. Matesic et al. (2001) determined that the Mlph gene is mutated in leaden mice. Mutations in ashen and dilute occur in the Rab27a (603868) and myosin Va (160777) genes, respectively. Matesic et al. (2001) suggested that Mlph may function as part of a transport complex with MyoVa and Rab27a. Matesic et al. (2001) noted that all characterized patients with Griscelli syndrome (214450) carry mutations in the MYOVA or the RAB27A gene. Thus, it would not be surprising to find patients with Griscelli syndrome, or patients with other hypopigmentation disorders, with mutations in the MLPH gene.

[0252] Full details of the abovementioned studies are described in the following publications, the disclosure of which are hereby incorporated by reference:

[0253] Matesic, L. E.; Yip, R.; Reuss, A. E.; Swing, D. A.; O'Sullivan, T. N.; Fletcher, C. F.; Copeland, N. G.; Jenkins, N. A.: Mutations in Mlph, encoding a member of the Rab effector family, cause the melanosome transport defects observed in leaden mice. Proc. Nat. Acad. Sci. 98: 10238-10243, 2001. PubMed ID: 11504925 2. Silvers, W. K.: The Coat Colors of Mice. New York: Springer, 1979.

[0254] Further studies establishing the function and utilities of MLPH are found in John Hopkins OMIM database record ID 606526, and in references numbered 6-7 listed hereinbelow.

[0255] Reference is now made to NPY2R BINDING SITE. neuropeptide Y receptor Y2 (NPY2R) is a target gene of GAM25, corresponding to GAM25-TARGET GENE of FIG. 25A. NPY2R BINDING SITE is a binding site found in an untranslated region of NPY2R, corresponding to BINDING SITE of FIG. 25A. FIG. 25D illustrates the complementarity of the nucleotide sequence of NPY2R BINDING SITE, designated SEQ ID:277186, to the nucleotide sequence of GAM25 RNA of FIG. 25A, designated SEQ ID:29474.

[0256] An additional function of GAM25 is therefore inhibition of neuropeptide Y receptor Y2 (NPY2R), a gene which encodes a receptor that stimulates intracellular calcium flux and may modulate psychomotor activity, food intake, endocrine secretion and vasoconstriction. Accordingly, utilities of GAM25 include diagnosis and treatment of the abovementioned diseases and clinical conditions.

[0257] The function of NPY2R has been established by previous studies. Neuropeptide Y (NPY) signals through a family of G protein-coupled receptors present in the brain and sympathetic neurons. At least 3 types of neuropeptide Y receptor have been defined on the basis of pharmacologic criteria, tissue distribution, and structure of the encoding gene; see 162641 and 162643. Rose et al. (1995) reported the expression cloning in COS cells of a cDNA for the human type 2 receptor, NPY2R. Transfected cells showed high affinity for NPY (162640), peptide YY (PYY; 600781), and a fragment of NPY including amino acids 13 to 36. The predicted 381-amino acid protein has 7 transmembrane domains characteristic of G protein-coupled receptors and is only 31% identical to the human Y1 receptor (NPY1R; 162641). A 4-kb mRNA was detected on Northern blots of tissue samples from several regions of the nervous system. Gerald et al. (1995) cloned the cDNA corresponding to the human Y2 receptor from a human hippocampal cDNA expression library using a radiolabeled PYY-binding assay. They expressed the Y2 gene in COS-7 cells and performed a hormone-binding assay which showed that the Y2 receptor binds (from highest to lowest affinity) PYY, NPY, and pancreatic polypeptide (PP; 167780) hormones.

[0258] Full details of the abovementioned studies are described in the following publications, the disclosure of which are hereby incorporated by reference:

[0259] erald, C.; Walker, M. W.; Vaysse, P. J.-J.; He, C.; Branchek, T. A.; Weinshank, R. L.: Expression cloning and pharmacological characterization of a human hippocampal neuropeptide Y/peptide YY Y2 receptor subtype. J. Biol. Chem. 270: 26758-26761, 1995. PubMed ID: 7592910 4. Rose, P. M.; Fernandes, P.; Lynch, J. S.; Frazier, S. T.; Fisher, S. M.; Kodukula, K.; Kienzle, B.; Seethala, R.: Cloning and functional expression of a cDNA encoding a human type 2 neuropeptide Y receptor. J. Biol. Chem. 270: 22661-22664, 1995.

[0260] Further studies establishing the function and utilities of NPY2R are found in John Hopkins OMIM database record ID 162642, and in references numbered 8-11 listed hereinbelow.

[0261] Reference is now made to NR1I2 BINDING SITE. nuclear receptor subfamily 1, group I, member 2 (NR1I2) is a target gene of GAM25, corresponding to GAM25-TARGET GENE of FIG. 25A. NR1I2 BINDING SITE is a binding site found in an untranslated region of NR1I2, corresponding to BINDING SITE of FIG. 25A. FIG. 25D illustrates the complementarity of the nucleotide sequence of NR1I2 BINDING SITE, designated SEQ ID:277734, to the nucleotide sequence of GAM25 RNA of FIG. 25A, designated SEQ ID:29474.

[0262] A further function of GAM25 is therefore inhibition of nuclear receptor subfamily 1, group I, member 2 (NR1112), a gene which encodes a Protein that binds to a response element in the cyp3a4 gene promoter and activates its expression in response to a wide variety of endobiotics and xenobiotics. Accordingly, utilities of GAM25 include diagnosis and treatment of the abovementioned diseases and clinical conditions.

[0263] The function of NR1I2 has been established by previous studies. Lehmann et al. (1998) identified a nuclear receptor, termed PXR, that binds to the rifampicin/dexamethasone response element in the CYP3A4 (124010) promoter as a heterodimer with the 9-cis retinoic acid receptor RXR (see 180245). The human PXR is related to the mouse Pxr1, which they had cloned and shown to be activated by dexamethasone, pregnenolone 16-alpha-carbonitrile (PCN), and other compounds known to induce expression of the CYP3A1 gene, the predominant form of CYP3A in rat liver and intestine. Lehmann et al. (1998) isolated PXR clones from a human liver cDNA library. Amino acid sequence comparison showed that human PXR shared 96% and 76% sequence identity with mouse Pxr1 in the DNA-binding and ligand-binding domains, respectively. Initiation of translation at a CUG initiation codon would yield a protein of 434 amino acids. Northern blot analysis detected most abundant expression in liver, colon, and small intestine; transcripts of 2.6, 4.3, and 5 kb were present in each of these tissues. Lehmann et al. (1998) provided several lines of evidence indicating that human PXR serves as a key transcriptional regulator of the CYP3A4 gene.

[0264] Animal model experiments lend further support to the function of NR1I2. The induction of CYP3A enzymes is species-specific and believed to involve 1 or more cellular factors, or receptor-like xenosensors. Xie et al. (2000) identified one such factor as the nuclear receptor Pxr and its human homolog SXR. Xie et al. (2000) showed that targeted disruption of the mouse Pxr gene abolished induction of CYP3A by prototypic inducers such as dexamethasone or pregnenolone-16-alpha-carbonitrile. In Pxr-null mice carrying a transgene for an activated form of human SXR, there was constitutive upregulation of CYP3A gene expression and enhanced protection against toxic xenobiotic compounds. Xie et al. (2000) demonstrated that species origin of the receptor, rather than the promoter structure of the CYP3A genes, dictates the species-specific pattern of CYP3A inducibility. Thus, they could generate ‘humanized’ transgenic mice that were responsive to human-specific inducers such as the antibiotic rifampicin. Xie et al. (2000) concluded that the SXR/Pxr genes encode the primary species-specific xenosensors that mediate the adaptive hepatic response, and may represent the critical biochemical mechanism of human xenoprotection.

[0265] It is appreciated that the abovementioned animal model for NR1I2 is acknowledged by those skilled in the art as a scientifically valid animal model, as can be further appreciated from the publications sited hereinbelow.

[0266] Full details of the abovementioned studies are described in the following publications, the disclosure of which are hereby incorporated by reference:

[0267] ehmann, J. M.; McKee, D. D.; Watson, M. A.; Willson, T. M.; Moore, J. T.; Kliewer, S. A.: The human orphan nuclear receptor PXR is activated by compounds that regulate CYP3A4 gene expression and cause drug interactions. J. Clin. Invest. 102: 1016-1023, 1998. PubMed ID: 9727070 6. Xie, W.; Barwick, J. L.; Downes, M.; Blumberg, B.; Simon, C. M.; Nelson, M. C.; Neuschwander-Tetri, B. A.; Brunt, E. M.; Guzelian, P. S.; Evans, R. M.: Humanized xenobiotic response in mice expressing nuclear receptor SXR. Nature 406: 435-439, 2000.

[0268] Further studies establishing the function and utilities of NR1I2 are found in John Hopkins OMIM database record ID 603065, and in references numbered 12-18 listed hereinbelow.

[0269] Reference is now made to dJ383J4.3 BINDING SITE. dJ383J4.3 is a target gene of GAM25, corresponding to GAM25-TARGET GENE of FIG. 25A. dJ383J4.3 BINDING SITE is a binding site found in an untranslated region of dJ383J4.3, corresponding to BINDING SITE of FIG. 25A. FIG. 25D illustrates the complementarity of the nucleotide sequence of dJ383J4.3 BINDING SITE, designated SEQ ID:512554, to the nucleotide sequence of GAM25 RNA of FIG. 25A, designated SEQ ID:29474. Yet a further function of GAM25 is therefore inhibition of (dJ383J4.3). Accordingly, utilities of GAM25 include diagnosis and treatment of diseases and clinical conditions with which dJ383J4.3 is associated.

[0270] Reference is now made to FLJ14280 BINDING SITE. FLJ14280 is a target gene of GAM25, corresponding to GAM25-TARGET GENE of FIG. 25A. FLJ14280 BINDING SITE is a binding site found in an untranslated region of FLJ14280, corresponding to BINDING SITE of FIG. 25A. FIG. 25D illustrates the complementarity of the nucleotide sequence of FLJ14280 BINDING SITE, designated SEQ ID:610221, to the nucleotide sequence of GAM25 RNA of FIG. 25A, designated SEQ ID:29474. Another function of GAM25 is therefore inhibition of (FLJ14280). Accordingly, utilities of GAM25 include diagnosis and treatment of diseases and clinical conditions with which FLJ14280 is associated.

[0271] Reference is now made to KIAA1678 BINDING SITE. KIAA1678 is a target gene of GAM25, corresponding to GAM25-TARGET GENE of FIG. 25A. KIAA1678 BINDING SITE is a binding site found in an untranslated region of KIAA1678, corresponding to BINDING SITE of FIG. 25A. FIG. 25D illustrates the complementarity of the nucleotide sequence of KIAA1678 BINDING SITE, designated SEQ ID:803886, to the nucleotide sequence of GAM25 RNA of FIG. 25A, designated SEQ ID:29474. Yet another function of GAM25 is therefore inhibition of (KIAA1678). Accordingly, utilities of GAM25 include diagnosis and treatment of diseases and clinical conditions with which KIAA1678 is associated.

[0272] Reference is now made to KIAA1724 BINDING SITE. KIAA1724 is a target gene of GAM25, corresponding to GAM25-TARGET GENE of FIG. 25A. KIAA1724 BINDING SITE is a binding site found in an untranslated region of KIAA1724, corresponding to BINDING SITE of FIG. 25A. FIG. 25D illustrates the complementarity of the nucleotide sequence of KIAA1724 BINDING SITE, designated SEQ ID:806213, to the nucleotide sequence of GAM25 RNA of FIG. 25A, designated SEQ ID:29474. An additional function of GAM25 is therefore inhibition of (KIAA1724). Accordingly, utilities of GAM25 include diagnosis and treatment of diseases and clinical conditions with which KIAA1724 is associated.

[0273] Reference is now made to KIAA1949 BINDING SITE. KIAA1949 is a target gene of GAM25, corresponding to GAM25-TARGET GENE of FIG. 25A. KIAA1949 BINDING SITE is a binding site found in an untranslated region of KIAA1949, corresponding to BINDING SITE of FIG. 25A. FIG. 25D illustrates the complementarity of the nucleotide sequence of KIAA1949 BINDING SITE, designated SEQ ID:820868, to the nucleotide sequence of GAM25 RNA of FIG. 25A, designated SEQ ID:29474. A further function of GAM25 is therefore inhibition of (KIAA1949). Accordingly, utilities of GAM25 include diagnosis and treatment of diseases and clinical conditions with which KIAA1949 is associated.

[0274] Reference is now made to RoXaN BINDING SITE. RoXaN is a target gene of GAM25, corresponding to GAM25-TARGET GENE of FIG. 25A. RoXaN BINDING SITE is a binding site found in an untranslated region of RoXaN, corresponding to BINDING SITE of FIG. 25A. FIG. 25D illustrates the complementarity of the nucleotide sequence of RoXaN BINDING SITE, designated SEQ ID:950975, to the nucleotide sequence of GAM25 RNA of FIG. 25A, designated SEQ ID:29474. Yet a further function of GAM25 is therefore inhibition of (RoXaN). Accordingly, utilities of GAM25 include diagnosis and treatment of diseases and clinical conditions with which RoXaN is associated.

[0275] Reference is now made to SERP1 BINDING SITE. SERP1 is a target gene of GAM25, corresponding to GAM25-TARGET GENE of FIG. 25A. SERP1 BINDING SITE is a binding site found in an untranslated region of SERP1, corresponding to BINDING SITE of FIG. 25A. FIG. 25D illustrates the complementarity of the nucleotide sequence of SERP1 BINDING SITE, designated SEQ ID:963990, to the nucleotide sequence of GAM25 RNA of FIG. 25A, designated SEQ ID:29474. Another function of GAM25 is therefore inhibition of (SERP1). Accordingly, utilities of GAM25 include diagnosis and treatment of diseases and clinical conditions with which SERP1 is associated.

[0276] Reference is now made to SYNE-1 BINDING SITE. SYNE-1 is a target gene of GAM25, corresponding to GAM25-TARGET GENE of FIG. 25A. SYNE-1 BINDING SITE is a binding site found in an untranslated region of SYNE-1, corresponding to BINDING SITE of FIG. 25A. FIG. 25D illustrates the complementarity of the nucleotide sequence of SYNE-1 BINDING SITE, designated SEQ ID:986316, to the nucleotide sequence of GAM25 RNA of FIG. 25A, designated SEQ ID:29474. Yet another function of GAM25 is therefore inhibition of (SYNE-1). Accordingly, utilities of GAM25 include diagnosis and treatment of diseases and clinical conditions with which SYNE-1 is associated.

[0277] Reference is now made to TNRC4 BINDING SITE. TNRC4 is a target gene of GAM25, corresponding to GAM25-TARGET GENE of FIG. 25A. TNRC4 BINDING SITE is a binding site found in an untranslated region of TNRC4, corresponding to BINDING SITE of FIG. 25A. FIG. 25D illustrates the complementarity of the nucleotide sequence of TNRC4 BINDING SITE, designated SEQ ID:996086, to the nucleotide sequence of GAM25 RNA of FIG. 25A, designated SEQ ID:29474. An additional function of GAM25 is therefore inhibition of (TNRC4). Accordingly, utilities of GAM25 include diagnosis and treatment of diseases and clinical conditions with which TNRC4 is associated.

[0278] Reference is now made to LOC196047 BINDING SITE. LOC196047 is a target gene of GAM25, corresponding to GAM25-TARGET GENE of FIG. 25A. LOC196047 BINDING SITE is a binding site found in an untranslated region of LOC196047, corresponding to BINDING SITE of FIG. 25A. FIG. 25D illustrates the complementarity of the nucleotide sequence of LOC196047 BINDING SITE, designated SEQ ID:1210373, to the nucleotide sequence of GAM25 RNA of FIG. 25A, designated SEQ ID:29474. A further function of GAM25 is therefore inhibition of (LOC196047). Accordingly, utilities of GAM25 include diagnosis and treatment of diseases and clinical conditions with which LOC196047 is associated.

[0279] Reference is now made to LOC221540 BINDING SITE. LOC221540 is a target gene of GAM25, corresponding to GAM25-TARGET GENE of FIG. 25A. LOC221540 BINDING SITE is a binding site found in an untranslated region of LOC221540, corresponding to BINDING SITE of FIG. 25A. FIG. 25D illustrates the complementarity of the nucleotide sequence of LOC221540 BINDING SITE, designated SEQ ID: 1274947, to the nucleotide sequence of GAM25 RNA of FIG. 25A, designated SEQ ID:29474. Yet a further function of GAM25 is therefore inhibition of (LOC221540). Accordingly, utilities of GAM25 include diagnosis and treatment of diseases and clinical conditions with which LOC221540 is associated.

[0280] Reference is now made to LOC257545 BINDING SITE. LOC257545 is a target gene of GAM25, corresponding to GAM25-TARGET GENE of FIG. 25A. LOC257545 BINDING SITE is a binding site found in an untranslated region of LOC257545, corresponding to BINDING SITE of FIG. 25A. FIG. 25D illustrates the complementarity of the nucleotide sequence of LOC257545 BINDING SITE, designated SEQ ID:1274947, to the nucleotide sequence of GAM25 RNA of FIG. 25A, designated SEQ ID:29474. Another function of GAM25 is therefore inhibition of (LOC257545). Accordingly, utilities of GAM25 include diagnosis and treatment of diseases and clinical conditions with which LOC257545 is associated.

[0281] Reference is now made to LOC257598 BINDING SITE. LOC257598 is a target gene of GAM25, corresponding to GAM25-TARGET GENE of FIG. 25A. LOC257598 BINDING SITE is a binding site found in an untranslated region of LOC257598, corresponding to BINDING SITE of FIG. 25A. FIG. 25D illustrates the complementarity of the nucleotide sequence of LOC257598 BINDING SITE, designated SEQ ID:1274947, to the nucleotide sequence of GAM25 RNA of FIG. 25A, designated SEQ ID:29474. Yet another function of GAM25 is therefore inhibition of (LOC257598). Accordingly, utilities of GAM25 include diagnosis and treatment of diseases and clinical conditions with which LOC257598 is associated.

[0282] Reference is now made to LOC63928 BINDING SITE. LOC63928 is a target gene of GAM25, corresponding to GAM25-TARGET GENE of FIG. 25A. LOC63928 BINDING SITE is a binding site found in an untranslated region of LOC63928, corresponding to BINDING SITE of FIG. 25A. FIG. 25D illustrates the complementarity of the nucleotide sequence of LOC63928 BINDING SITE, designated SEQ ID: 1347928, to the nucleotide sequence of GAM25 RNA of FIG. 25A, designated SEQ ID:29474. An additional function of GAM25 is therefore inhibition of (LOC63928). Accordingly, utilities of GAM25 include diagnosis and treatment of diseases and clinical conditions with which LOC63928 is associated.

[0283] Reference is now made to FIG. 26A, which is a simplified diagram providing a conceptual explanation of the mode by which a novel bioinformatically detected gene, referred to here as GAM26 modulates expression of target genes thereof, the function and utility of which target genes is known in the art.

[0284] GAM26 (Genomic Address Messenger 26) is a novel bioinformatically detected regulatory, non protein coding, micro RNA (miRNA) gene. The method by which GAM26 was detected is described hereinabove with reference to FIGS. 6-15.

[0285] GAM26 GENE and GAM26-TARGET GENE are two human genes contained in the human genome.

[0286] GAM26 GENE encodes a GAM26 PRECURSOR RNA. Similar to other miRNA genes, and unlike most ordinary genes, the RNA transcribed by GAM26, GAM26 PRECURSOR RNA, does not encoded a protein.

[0287] GAM26 PRECURSOR RNA folds onto itself, forming GAM26 FOLDED PRECURSOR RNA. As FIG. 26 illustrates, GAM26 FOLDED PRECURSOR RNA forms a ‘hairpin structure’, folding onto itself As is well known in the art, this ‘hairpin structure’, is typical of RNA encoded by miRNA genes, and is due to the fact that the nucleotide sequence of the first half of the RNA encoded by a miRNA gene is an accurate or partial inversed-reversed sequence of the nucleotide sequence of the second half thereof. By “inversed-reversed” is meant a sequence which is reversed and wherein each nucleotide is replaced by a complimentary nucleotide, as is well known in the art (e.g. ATGGC is the inversed-reversed sequence of GCCAT).

[0288] An enzyme complex designated DICER COMPLEX, ‘dices’ the GAM26 FOLDED PRECURSOR RNA into a single stranded ˜22 nt long RNA segment, designated GAM26 RNA. As is known in the art, ‘dicing’ of a hairpin structured RNA precursor product into short a ˜22 nt RNA segment is catalyzed by an enzyme complex comprising an enzyme called Dicer together with other necessary proteins.

[0289] GAM26-TARGET GENE encodes a corresponding messenger RNA, designated GAM26-TARGET RNA. GAM26-TARGET RNA comprises three regions, as is typical of mRNA of a protein coding gene: a 5′ untranslated region, a protein coding region and a 3′ untranslated region, designated 5′UTR, PROTEIN CODING and 3′UTR respectively.

[0290] GAM26 RNA binds complimentarily to a BINDING SITE, located on an untranslated region of GAM26-TARGET RNA. This complimentarily binding is due to the fact that the nucleotide sequence of GAM26 RNA is an accurate or a partial inversed-reversed sequence of the nucleotide sequence of BINDING SITE. It is appreciated that while FIG. 26A depicts the BINDING SITE on the 3′UTR region, this is meant as an example only—the BINDING SITE may be located on the 5′UTR region as well.

[0291] The complimentary binding of GAM26 RNA to BINDING SITE inhibits translation of GAM26-TARGET RNA into GAM26-TARGET PROTEIN. GAM26-TARGET PROTEIN is therefore outlined by a broken line.

[0292] It is appreciated that GAM26-TARGET GENE in fact represents a plurality of target genes of GAM26. The mRNA of each of this plurality of target genes of GAM26 comprises a BINDING SITE, having a nucleotide sequence which is at least partly complementary to GAM26 RNA, and which when bound by GAM26 RNA causes inhibition of translation of one of a plurality of target proteins of GAM26. The plurality of target genes of GAM26 and their respective binding sites, are described hereinbelow with reference to FIG. 26D.

[0293] It is appreciated by one skilled in the art that the mode of translational inhibition illustrated by FIG. 26 with specific reference to translational inhibition exerted by GAM26 on one or more target genes of GAM26, is in fact common to other known miRNA genes. As mentioned hereinabove with reference to the background section, although a specific complimentary binding site has been demonstrated only for miRNA genes Lin-4 and Let-7, all other recently discovered miRNA genes are also believed by those skilled in the art to modulate expression of other genes by complimentary binding, although specific complimentary binding sites of these genes have not yet been found (Ruvkun G., ‘Perspective: Glimpses of a tiny RNA world’, Science 294, 779 (2001)).

[0294] Reference is now made to FIG. 26B which shows the nucleotide sequence of GAM26 PRECURSOR RNA of FIG. 26A, designated SEQ ID:3, and a probable nucleotide sequence of GAM26 RNA of FIG. 26A, designated SEQ ID:20604. The nucleotide sequence of SEQ ID:20604, which is highly likely (over 0.801122%) to be identical or highly similar to that of GAM26, is marked by an underline within the sequence of GAM26 PRECURSOR RNA.

[0295] Reference is now made to FIG. 26C, which shows the secondary folding of GAM26 PRECURSOR RNA, forming a ‘hairpin structure’ designated GAM26 FOLDED PRECURSOR RNA, both of FIG. 26A. A probable (>0.801122%) nucleotide sequence of GAM26 RNA, designated SEQ ID:20604 of FIG. 26B, is marked by an underline on GAM26 FOLDED PRECURSOR RNA. It is appreciated that the complimentary base-paring is not perfect, with ‘bulges’, as is well known in the art with respect to the RNA folding of all known miRNA genes.

[0296] Reference is now made to FIG. 26D, which is a table showing binding sites found in untranslated regions of a plurality of target genes of GAM26, each binding site corresponding to BINDING SITE of FIG. 26A, and their complementarity to SEQ ID:20604, which is highly likely (>0.801122%) to be identical or highly similar to the nucleotide sequence of GAM26 RNA of FIG. 26A.

[0297] It is appreciated that the functions, and accordingly the utilities, of GAM26 correlate with, and may be deduced from, the identity of the target genes which GAM26 binds and inhibits, and the function of these target genes, as elaborated hereinbelow.

[0298] Reference is now made to ACVR1B BINDING SITE. activin A receptor, type IB (ACVR1B) is a target gene of GAM26, corresponding to GAM26-TARGET GENE of FIG. 26A. ACVR1B BINDING SITE is a binding site found in an untranslated region of ACVR1B, corresponding to BINDING SITE of FIG. 26A. FIG. 26D illustrates the complementarity of the nucleotide sequence of ACVR1B BINDING SITE, designated SEQ ID:46182, to the nucleotide sequence of GAM26 RNA of FIG. 26A, designated SEQ ID:20604.

[0299] a function of GAM26 is therefore inhibition of activin A receptor, type IB (ACVR1B), a gene which encodes a receptor that Activin receptor-like kinase; similar to activin, TGF-beta, and C. elegans daf-1 receptors. Accordingly, utilities of GAM26 include diagnosis and treatment of the abovementioned diseases and clinical conditions.

[0300] The function of ACVR1B has been established by previous studies. See ACVRL1 (601284). Human cDNA clones encoding 4 putative transmembrane ser/thr kinases were identified by ten Dijke et al. (1993). Using degenerate DNA primers based on the human activin receptor type II (see 102581) and C. elegans Daf-1 gene products, they PCR-amplified mRNA from human erythroleukemia (HEL) cells, a cell type known to respond both to activin (147290) and TGF-beta (190180). Their partial clone of the ALK4 gene encodes a 383-amino acid polypeptide with a truncated extracellular domain but sequence and structural domain similarities with the other 3 ALK genes they cloned. ALK1, ALK2 (102576), ALK3 (601299), and ALK4 share approximately 40% sequence identity with activin receptors type II and IIB, TGF-beta receptor (see 190181), and Daf-1 in their kinase domains but share 60 to 79% sequence identity among themselves, suggesting to ten Dijke et al. (1993) that the ALK gene products form a subfamily of receptor ser/thr kinases. By Northern analysis, ten Dijke et al. (1993) showed that ALK4 is expressed in many tissues, most strongly in human kidney, pancreas, brain, lung, and liver. Su et al. (2001) described the gene structure and novel somatic mutations of the activin type IB receptor in pancreatic cancer. This was the first description of ACVR1B as a tumor suppressor gene.

[0301] Full details of the abovementioned studies are described in the following publications, the disclosure of which are hereby incorporated by reference:

[0302] en Dijke, P.; Ichijo, H.; Franzen, P.; Schulz, P.; Saras, J.; Toyoshima, H.; Heldin, C.-H.; Miyazono, K.: Activin receptor-like kinases: a novel subclass of cell-surface receptors with predicted serine/threonine kinase activity. Oncogene 8: 2879-2887, 1993. PubMed ID: 8397373 3. Su, G. H.; Bansal, R.; Murphy, K. M.; Montgomery, E.; Yeo, C. J.; Hruban, R. H.; Kern, S. E.: ACVR1B (ALK4, activin receptor type 1B) gene mutations in pancreatic carcinoma. Proc. Nat. Acad. Sci. 98: 3254-3257, 2001.

[0303] Further studies establishing the function and utilities of ACVR1B are found in John Hopkins OMIM database record ID 601300, and in references numbered 19-24 listed hereinbelow.

[0304] Referring now to ACVR1B BINDING SITE. activin A receptor, type IB (ACVR1B) is a target gene of GAM26, corresponding to GAM26-TARGET GENE of FIG. 26A. ACVR1B BINDING SITE is a binding site found in an untranslated region of ACVR1B, corresponding to BINDING SITE of FIG. 26A. FIG. 26D illustrates the complementarity of the nucleotide sequence of ACVR1B BINDING SITE, designated SEQ ID:46198, to the nucleotide sequence of GAM26 RNA of FIG. 26A, designated SEQ ID:20604.

[0305] Yet another function of GAM26 is therefore inhibition of activin A receptor, type IB (ACVR1B), a gene which encodes a receptor that Activin receptor-like kinase; similar to activin, TGF-beta, and C. elegans daf-1 receptors. Accordingly, utilities of GAM26 include diagnosis and treatment of the abovementioned diseases and clinical conditions. The function and utilities of ACVR1B have been established by previous studies, as described hereinabove with reference to FIG. 26D.

[0306] Reference is now made to DLG3 BINDING SITE. discs, large (Drosophila) homolog 3 (neuroendocrine-dlg) (DLG3) is a target gene of GAM26, corresponding to GAM26-TARGET GENE of FIG. 26A. DLG3 BINDING SITE is a binding site found in an untranslated region of DLG3, corresponding to BINDING SITE of FIG. 26A. FIG. 26D illustrates the complementarity of the nucleotide sequence of DLG3 BINDING SITE, designated SEQ ID:46198, to the nucleotide sequence of GAM26 RNA of FIG. 26A, designated SEQ ID:20604.

[0307] An additional function of GAM26 is therefore inhibition of discs, large (Drosophila) homolog 3 (neuroendocrine-dlg) (DLG3), a gene which encodes a Protein that mediates protein-protein interactions at the cytoplasmic surface of the cell membrane. Accordingly, utilities of GAM26 include diagnosis and treatment of the abovementioned diseases and clinical conditions.

[0308] The function of DLG3 has been established by previous studies. The discs-large family is a collection of proteins first described in Drosophila that have a common structural organization and are thought to be involved in signal transduction and mediating protein-protein interactions at the cytoplasmic surface of the cell membrane. Each protein has 3 distinct structural domains: an N-terminal segment comprising 1 or more discs-large homologous regions (DHRs); a SRC oncogene (190090) homology motif 3 (SH3); and a C-terminal domain with homology to guanylate kinase (139270). The defining member of this group of proteins is the gene product of the Drosophila lethal (1) discs-large 1 locus (601014), which was originally identified by the analysis of recessive lethal mutants. Germline mutations in the Drosophila gene dlg result in loss of apical-basal lateral polarity, disruption of normal cell-cell adhesion, and neoplastic overgrowth of the imaginal disc epithelium. The DLG1 gene maps to human 3q29; the MPP2 gene (600723) maps to 17q12-q21. Smith et al. (1996) isolated and characterized another human gene, MPP3, which they called DLG3, with the structural characteristics of the discs-large family. The putative MPP3 gene product has a molecular weight of 66 kD and is located on chromosome 17 in the same segment, 17q12-q21, as MPP2. The products of the MPP2 and MPP3 genes show 36% identity and 58% similarity to each other, and both show nearly 60% sequence similarity to the EMP55 (305360) gene which encodes an erythroid phosphoprotein that is a component of the red cell membrane.

[0309] Full details of the abovementioned studies are described in the following publications, the disclosure of which are hereby incorporated by reference:

[0310] mith, S. A.; Holik, P.; Stevens, J.; Mazoyer, S.; Melis, R.; Williams, B.; White, R.; Albertsen, H.: Isolation of a gene (DLG3) encoding a second member of the discs-large family on chromosome 17q12-q21. Genomics 31: 145-150, 1996.

[0311] Further studies establishing the function and utilities of DLG3 are found in John Hopkins OMIM database record ID 601114, and in references numbered 26 listed hereinbelow.

[0312] Reference is now made to ADARB1 BINDING SITE. adenosine deaminase, RNA-specific, B1 (homolog of rat RED1) (ADARB1) is a target gene of GAM26, corresponding to GAM26-TARGET GENE of FIG. 26A. ADARB1 BINDING SITE is a binding site found in an untranslated region of ADARB1, corresponding to BINDING SITE of FIG. 26A. FIG. 26D illustrates the complementarity of the nucleotide sequence of ADARB1 BINDING SITE, designated SEQ ID:48568, to the nucleotide sequence of GAM26 RNA of FIG. 26A, designated SEQ ID:20604.

[0313] A further function of GAM26 is therefore inhibition of adenosine deaminase, RNA-specific, B1 (homolog of rat RED1) (ADARB1), a gene which encodes a Enzyme that RNA editing involves the deamination of adenosines at specific sites. Accordingly, utilities of GAM26 include diagnosis and treatment of the abovementioned diseases and clinical conditions.

[0314] The function of ADARB1 has been established by previous studies. RNA editing involves the deamination of adenosines at specific sites, the result of which can be a change in the amino acid sequence of the protein so that it differs from that predicted by the sequence of the DNA. Editing of the glutamate receptor B (GluRB; 138247) pre-mRNA has been shown to alter a codon (referred to as the Q/R site) for a channel determinant that controls the calcium permeability of the AMPA glutamate receptors. Melcher et al. (1996) tested the candidate dsRNA adenosine deaminase DRADA (601059) and showed that when coexpressed with a GluR-B minigene in HEK 293 cells, DRADA produced low-level editing at the GluR-B Q/R site. The authors then screened a rat brain cDNA library with the predicted catalytic domain of rat DRADA to identify other potential editing enzymes. A cDNA encoding a predicted 711-amino acid protein was isolated that gave about 90% of the expected activity in their editing assay. Melcher et al. (1996) designated this novel mammalian RNA editing protein RNA-editing enzyme-1 (RED1). Rat RED1 and DRADA share about 31% overall identity primarily due to their conservation in the C-terminal catalytic domain. Northern blots showed highest expression of RED1 in rat brain. Melcher et al. (1996) further observed that while RED1 was more efficient at deaminating some sites, DRADA had stronger activity at others. They speculated that a combination of these and perhaps other editing enzymes may be involved in determining the overall editing process for a given transcript. Higuchi et al. (2000) studied ADAR2-mediated RNA editing by generating mice that were homozygous for a targeted functional null allele. Editing in Adar2−/− mice was substantially reduced at most of 25 positions in diverse transcripts; the mutant mice became prone to seizures and died young. The impaired phenotype appeared to result entirely from a single underedited position, since it reverted to normal when both alleles for the underedited transcript were substituted with alleles encoding the edited version exonically. The critical position specifies an ion channel determinant, the Q/R site, in AMPA receptor GluRB premessenger RNA. Higuchi et al. (2000) concluded that this transcript is physiologically the most important substrate of ADAR2.

[0315] Full details of the abovementioned studies are described in the following publications, the disclosure of which are hereby incorporated by reference:

[0316] elcher, T.; Maas, S.; Herb, A.; Sprengel, R.; Seeburg, P. H.; Higuchi, M.: A mammalian RNA editing enzyme. Nature 379: 460-463, 1996. PubMed ID: 8559253 1. Higuchi, M.; Maas, S.; Single, F. N.; Hartner, J.; Rozov, A.; Burnashev, N.; Feldmeyer, D.; Sprengel, R.; Seeburg, P. H.: Point mutation in an AMPA receptor gene rescues lethality in mice deficient in the RNA-editing enzyme ADAR2. Nature 406: 78-81, 2000.

[0317] Further studies establishing the function and utilities of ADARB1 are found in John Hopkins OMIM database record ID 601218, and in references numbered 28-34 listed hereinbelow.

[0318] Referring now to ADARB1 BINDING SITE. adenosine deaminase, RNA-specific, B1 (homolog of rat RED1) (ADARB1) is a target gene of GAM26, corresponding to GAM26-TARGET GENE of FIG. 26A. ADARB1 BINDING SITE is a binding site found in an untranslated region of ADARB1, corresponding to BINDING SITE of FIG. 26A. FIG. 26D illustrates the complementarity of the nucleotide sequence of ADARB1 BINDING SITE, designated SEQ ID:48568, to the nucleotide sequence of GAM26 RNA of FIG. 26A, designated SEQ ID:20604.

[0319] Yet a further function of GAM26 is therefore inhibition of adenosine deaminase, RNA-specific, B1 (homolog of rat RED1) (ADARB1), a gene which encodes a Enzyme that RNA editing involves the deamination of adenosines at specific sites. Accordingly, utilities of GAM26 include diagnosis and treatment of the abovementioned diseases and clinical conditions. The function and utilities of ADARB1 have been established by previous studies, as described hereinabove with reference to FIG. 26D.

[0320] Reference is now made to ADRBK1 BINDING SITE. adrenergic, beta, receptor kinase 1 (ADRBK1) is a target gene of GAM26, corresponding to GAM26-TARGET GENE of FIG. 26A. ADRBK1 BINDING SITE is a binding site found in an untranslated region of ADRBK1, corresponding to BINDING SITE of FIG. 26A. FIG. 26D illustrates the complementarity of the nucleotide sequence of ADRBK1 BINDING SITE, designated SEQ ID:51719, to the nucleotide sequence of GAM26 RNA of FIG. 26A, designated SEQ ID:20604.

[0321] Another function of GAM26 is therefore inhibition of adrenergic, beta, receptor kinase 1 (ADRBK1), a gene which encodes a Enzyme that regulates desensitization of b-adrenergic receptors and related GPCRs. Accordingly, utilities of GAM26 include diagnosis and treatment of the abovementioned diseases and clinical conditions.

[0322] The function of ADRBK1 has been established by previous studies. Beta-adrenergic receptor kinase (BARK) phosphorylates the beta-2-adrenergic receptor (109690) and appears to mediate agonist-specific desensitization observed at high agonist concentrations. BARK is a ubiquitous cytosolic enzyme that specifically phosphorylates the activated form of the beta-adrenergic and related G protein-coupled receptors. Benovic et al. (1991) used the bovine BARK cDNA to screen a human retina library and isolate the human cDNA. They showed that it encodes a protein of 689 amino acids with an overall 98% amino acid and 92.5% nucleotide identity with bovine BARK. By study of rodent/human hybrid cells retaining various human chromosomes and parts of chromosomes, Benovic et al. (1991) demonstrated that the ADRBK1 gene segregates with the long arm of chromosome 11, centromeric to 11q13, i.e., 11cen-q13. Benovic et al. (1991) mapped the homologous gene to mouse chromosome 19.

[0323] Animal model experiments lend further support to the function of ADRBK1. Rockman et al. (1998) mated transgenic mice with cardiac-restricted overexpression of either a peptide inhibitor of beta-ARK1 or the beta-2-AR into a genetic model of murine heart failure. They found that overexpression of the inhibitor prevented the development of cardiomyopathy in this murine model of heart failure.

[0324] It is appreciated that the abovementioned animal model for ADRBK1 is acknowledged by those skilled in the art as a scientifically valid animal model, as can be further appreciated from the publications sited hereinbelow.

[0325] Full details of the abovementioned studies are described in the following publications, the disclosure of which are hereby incorporated by reference:

[0326] enovic, J. L.; Stone, W. C.; Huebner, K.; Croce, C.; Caron, M. G.; Lefkowitz, R. J.: cDNA cloning and chromosomal localization of the human beta-adrenergic receptor kinase. FEBS Lett. 283: 122-126, 1991. PubMed ID: 2037065 4. Rockman, H. A.; Chien, K. R.; Choi, D.-J.; Iaccarino, G.; Hunter, J. J.; Ross, J., Jr.; Lefkowitz, R. J.; Koch, W. J.: Expression of a beta-adrenergic receptor kinase 1 inhibitor prevents the development of myocardial failure in gene-targeted mice. Proc. Nat. Acad. Sci. 95: 7000-7005, 1998.

[0327] Further studies establishing the function and utilities of ADRBK1 are found in John Hopkins OMIM database record ID 109635, and in references numbered 35-39 listed hereinbelow.

[0328] Referring now to ADRBK1 BINDING SITE. adrenergic, beta, receptor kinase 1 (ADRBK1) is a target gene of GAM26, corresponding to GAM26-TARGET GENE of FIG. 26A. ADRBK1 BINDING SITE is a binding site found in an untranslated region of ADRBK1, corresponding to BINDING SITE of FIG. 26A. FIG. 26D illustrates the complementarity of the nucleotide sequence of ADRBK1 BINDING SITE, designated SEQ ID:51737, to the nucleotide sequence of GAM26 RNA of FIG. 26A, designated SEQ ID:20604.

[0329] Yet another function of GAM26 is therefore inhibition of adrenergic, beta, receptor kinase 1 (ADRBK1), a gene which encodes a Enzyme that regulates desensitization of b-adrenergic receptors and related GPCRs. Accordingly, utilities of GAM26 include diagnosis and treatment of the abovementioned diseases and clinical conditions. The function and utilities of ADRBK1 have been established by previous studies, as described hereinabove with reference to FIG. 26D.

[0330] Referring now to ADRBK1 BINDING SITE. adrenergic, beta, receptor kinase 1 (ADRBK1) is a target gene of GAM26, corresponding to GAM26-TARGET GENE of FIG. 26A. ADRBK1 BINDING SITE is a binding site found in an untranslated region of ADRBK1, corresponding to BINDING SITE of FIG. 26A. FIG. 26D illustrates the complementarity of the nucleotide sequence of ADRBK1 BINDING SITE, designated SEQ ID:51737, to the nucleotide sequence of GAM26 RNA of FIG. 26A, designated SEQ ID:20604.

[0331] An additional function of GAM26 is therefore inhibition of adrenergic, beta, receptor kinase 1 (ADRBK1), a gene which encodes a Enzyme that regulates desensitization of b-adrenergic receptors and related GPCRs. Accordingly, utilities of GAM26 include diagnosis and treatment of the abovementioned diseases and clinical conditions. The function and utilities of ADRBK1 have been established by previous studies, as described hereinabove with reference to FIG. 26D.

[0332] Reference is now made to AKAP13 BINDING SITE. A kinase (PRKA) anchor protein 13 (AKAP13) is a target gene of GAM26, corresponding to GAM26-TARGET GENE of FIG. 26A. AKAP13 BINDING SITE is a binding site found in an untranslated region of AKAP13, corresponding to BINDING SITE of FIG. 26A. FIG. 26D illustrates the complementarity of the nucleotide sequence of AKAP13 BINDING SITE, designated SEQ ID:54490, to the nucleotide sequence of GAM26 RNA of FIG. 26A, designated SEQ ID:20604.

[0333] A further function of GAM26 is therefore inhibition of A kinase (PRKA) anchor protein 13 (AKAP13), a gene which encodes a Protein that regulates subcellular localization of type II cAMP-dependent PKA. Accordingly, utilities of GAM26 include diagnosis and treatment of the abovementioned diseases and clinical conditions.

[0334] The function of AKAP13 has been established by previous studies. Gene map locus 15q24-q25 A-kinase anchor proteins (AKAPs; see 602449), such as AKAP13, direct the activity of protein kinase A (PKA; see 176911) by tethering the enzyme near its physiologic substrates. AKAP13 is also known as LBC. Catalytic GDP-GTP exchange factors (GEFs), such as LBC, play an important role in regulating the Rho/Rac GTPase cycle. The Rho/Rac family of small GTPases mediates cytoskeletal reorganization, gene transcription, and cell cycle progression through unique signal transduction pathways. By probing a breast cancer expression library using an interaction cloning strategy for proteins that bind RXR (see 180245), Rubino et al. (1998) obtained a full-length cDNA encoding LBC, which they called BRX (breast cancer cDNA-encoded nuclear receptor-binding auxiliary protein). The deduced 1,428-amino acid BRX protein contains a region of identity to the LBC sequence identified by Toksoz and Williams (1994) that is preceded by 3 novel regions. A fifth, C-terminal region binds the estrogen receptor (ESR1; 133430). In addition to the tissues detected by Toksoz and Williams (1994), Northern blot analysis by Rubino et al. (1998) revealed BRX mRNA expression in reproductive tissues (ovary and placenta), and a 5.3-kb BRX transcript was detected in breast cancer cell lines, normal breast, and testis. Western blot and immunohistochemic analysis showed that BRX is expressed as a 170-kD protein in mammary epithelial cell lobules and terminal ducts. Binding analysis determined that BRX binds to ESR1, RXR, PPAR (170998), and THR (see 190120). Regions 4 and 5 of BRX were shown to bind independently to the ligand-binding domain near the C terminus of ESR1 without the requirement of other bridging proteins. Overexpression of BRX in the presence of estrogen augmented the activity of an estrogen response element. ESR activation by BRX could be inhibited by a dominant-negative mutant of CDC42 (116952). By genomic sequence and somatic cell hybrid analyses, Sterpetti et al. (1999) determined that proto-LBC and onco-LBC both contain N-terminal DH and PH domains; however, proto-LBC has a distinct C terminus absent in the oncoprotein. FISH with onco-LBC probes localized the LBC gene to 15q24-q25 and showed that onco-LBC represents a chimera derived from fusion with an unrelated sequence on 7q36. Northern blot analysis detected variably sized LBC transcripts and extended the known tissue distribution to spleen and a number of cancer cell lines. Immunoblot and thin-layer chromatography analysis showed that both proto- and onco-LBC can promote the formation of GTP-bound RHOA (ARHA; 165390). Mutation analysis indicated that the transforming activity of proto-LBC is increased by truncation of the C terminus, and that the DH and PH domains, but not the chromosome 7 sequence, are required for transformation. Immunoblot analysis determined that the proto-LBC form is in the membrane fraction, while the majority of the onco-LBC product is cytosolic, indicating that the C terminus may play a major role in the subcellular localization and regulation of LBC. Using FISH with onco-LBC probes, Sterpetti et al. (1999) localized the LBC gene to 15q24-q25 and showed that onco-LBC represents a chimera derived from fusion with an unrelated sequence on 7q36.

[0335] Full details of the abovementioned studies are described in the following publications, the disclosure of which are hereby incorporated by reference:

[0336] ubino, D.; Driggers, P.; Arbit, D.; Kemp, L.; Miller, B.; Coso, O.; Pagliai, K.; Gray, K.; Gutkind, S.; Segars, J.: Characterization of Brx, a novel Db1 family member that modulates estrogen receptor action. Oncogene 16: 2513-2526, 1998. PubMed ID: 9627117 4. Sterpetti, P.; Hack, A. A.; Bashar, M. P.; Park, B.; Cheng, S.-D.; Knoll, J. H. M.; Urano, T.; Feig, L. A.; Toksoz, D.: Activation of the Lbc Rho exchange factor proto-oncogene by truncation of an extended C terminus that regulates transformation and targeting. Molec. Cell. Biol. 19: 1334-1345, 1999.

[0337] Further studies establishing the function and utilities of AKAP13 are found in John Hopkins OMIM database record ID 604686, and in references numbered 40-44 listed hereinbelow.

[0338] Reference is now made to AMD1 BINDING SITE. S-adenosylmethionine decarboxylase 1 (AMD1) is a target gene of GAM26, corresponding to GAM26-TARGET GENE of FIG. 26A. AMD1 BINDING SITE is a binding site found in an untranslated region of AMD1, corresponding to BINDING SITE of FIG. 26A. FIG. 26D illustrates the complementarity of the nucleotide sequence of AMD1 BINDING SITE, designated SEQ ID:57140, to the nucleotide sequence of GAM26 RNA of FIG. 26A, designated SEQ ID:20604.

[0339] Yet a further function of GAM26 is therefore inhibition of S-adenosylmethionine decarboxylase 1 (AMD1), a gene which encodes a Enzyme that catalyzes the removal of the carboxylate group of S-adenosylmethionine in the polyamine biosynthesis pathway. Accordingly, utilities of GAM26 include diagnosis and treatment of the abovementioned diseases and clinical conditions.

[0340] The function of AMD1 has been established by previous studies. The polyamines spermine, spermidine, and putrescine are low molecular weight aliphatic amines essential for cellular proliferation and tumor promotion. Ornithine decarboxylase (ODC; 165640) and S-adenosylmethionine decarboxylase (AdoMetDC) catalyze the rate-limiting steps in polyamine biosynthesis. A concordant rise in ODC and AdoMetDC activity is seen in various neoplastic conditions including colon cancer and benign colonic polyps. A rat cDNA clone for AdoMetDC was used by Radford et al. (1987, 1989) in mouse-human somatic cell hybrid experiments to map the AMD gene to chromosomes 6 and X. They demonstrated that the gene on chromosome 6, symbolized AMD1, is not amplified in colon neoplasia. The sequence on X, symbolized AMD2, was localized to Xq22-q28 and may represent a pseudogene. That AMD2 is indeed a pseudogene was indicated by the findings of Maric et al. (1992) that the X-chromosome gene lacks introns which are present in the chromosome 6 gene. The gene on chromosome 6 encompasses at least 22 kb and comprises 9 exons and 8 introns, in contrast to the corresponding rat gene that has only 8 exons. Other aspects of the structure and organization were presented by Maric et al. (1992). Pulkka et al. (1993) characterized 2 AMD genes in the rat and localized both to rat chromosome 20 by mouse-rat somatic cell hybrids. They showed a high degree of conservation of sequence and structural organization in the coding portions but the 5-prime flanking regions were totally different. Maric et al. (1995) characterized the AMD pseudogene on the X chromosome. It lacks all the introns present in AMD1 and has numerous mutations in the protein-coding region. By fluorescence in situ hybridization, they mapped AMD1 to 6q21-q22 and the pseudogene, which they referred to as AMD2, to Xq28.

[0341] Full details of the abovementioned studies are described in the following publications, the disclosure of which are hereby incorporated by reference:

[0342] aric, S.C.; Crozat, A.; Janne, O. A.: Structure and organization of the human S-adenosylmethionine decarboxylase gene. J. Biol. Chem. 267: 18915-18923, 1992. PubMed ID: 1527020 2. Maric, S. C.; Crozat, A.; Louhimo, J.; Knuutila, S.; Janne, O. A.: The human S-adenosylmethionine decarboxylase gene: nucleotide sequence of a pseudogene and chromosomal localization of the active gene (AMD1) and the pseudogene (AMD2). Cytogenet. Cell Genet. 70: 195-199, 1995.

[0343] Further studies establishing the function and utilities of AMD1 are found in John Hopkins OMIM database record ID 180980, and in references numbered 45-49 listed hereinbelow.

[0344] Reference is now made to APP BINDING SITE. amyloid beta (A4) precursor protein (protease nexin-II, Alzheimer disc (APP) is a target gene of GAM26, corresponding to GAM26-TARGET GENE of FIG. 26A. APP BINDING SITE is a binding site found in an untranslated region of APP, corresponding to BINDING SITE of FIG. 26A. FIG. 26D illustrates the complementarity of the nucleotide sequence of APP BINDING SITE, designated SEQ ID:62063, to the nucleotide sequence of GAM26 RNA of FIG. 26A, designated SEQ ID:20604.

[0345] Another function of GAM26 is therefore inhibition of amyloid beta (A4) precursor protein (protease nexin-II, Alzheimer disc (APP), a gene which encodes a Protein that is associated with amyloidosis. Accordingly, utilities of GAM26 include diagnosis and treatment of the abovementioned diseases and clinical conditions.

[0346] The function of APP has been established by previous studies. APP, a widely expressed cell surface protein, is cleaved in the transmembrane region by gamma-secretase. Gamma-cleavage of APP produces the extracellular amyloid beta peptide of Alzheimer disease and releases an intracellular tail fragment. Cao and Sudhof (2001) demonstrated that the cytoplasmic tail of APP forms a multimeric complex with the nuclear adaptor protein Fe65 (602709) and the histone acetyltransferase TIP60 (601409). This complex potently stimulates transcription via heterologous Gal4 or LexA DNA binding domains, suggesting that release of the cytoplasmic tail of APP by gamma-cleavage may function in gene expression.

[0347] Animal model experiments lend further support to the function of APP. Calhoun et al. (1998) studied the pattern of neuron loss in transgenic mice expressing mutant human APP with the ‘Swedish mutation’ (104760.0008). These mice develop APP-immunoreactive plaques, primarily in neocortex and hippocampus, progressively with age (Sturchler-Pierrat et al., 1997). Calhoun et al. (1998) showed that formation of amyloid plaques can lead to region-specific loss of neurons in the transgenic mouse. Neuron loss was observed primarily in the vicinity of plaques, but intraneuronal amyloidogenic APP processing could not be excluded as an additional cause. The extent of the observed loss was less than that reported in end-stage AD, possibly because overexpression of APP in the transgenic mouse has a neuroprotective effect. It is also likely that neuron loss would increase in these mice with further aging.

[0348] It is appreciated that the abovementioned animal model for APP is acknowledged by those skilled in the art as a scientifically valid animal model, as can be further appreciated from the publications sited hereinbelow.

[0349] Full details of the abovementioned studies are described in the following publications, the disclosure of which are hereby incorporated by reference:

[0350] Calhoun, M. E.; Wiederhold, K.-H.; Abramowski, D.; Phinney, A. L.; Probst, A.; Sturchler-Pierrat, C.; Staufenbiel, M.; Sommer, B.; Jucker, M.: Neuron loss in APP transgenic mice. Nature 395: 765-766, 1998.

[0351] Further studies establishing the function and utilities of APP are found in John Hopkins OMIM database record ID 104760, and in references numbered 50-148 listed hereinbelow.

[0352] Reference is now made to ARAF1 BINDING SITE. v-raf murine sarcoma 3611 viral oncogene homolog 1 (ARAF1) is a target gene of GAM26, corresponding to GAM26-TARGET GENE of FIG. 26A. ARAF1 BINDING SITE is a binding site found in an untranslated region of ARAF1, corresponding to BINDING SITE of FIG. 26A. FIG. 26D illustrates the complementarity of the nucleotide sequence of ARAF1 BINDING SITE, designated SEQ ID:63732, to the nucleotide sequence of GAM26 RNA of FIG. 26A, designated SEQ ID:20604.

[0353] Yet another function of GAM26 is therefore inhibition of v-raf murine sarcoma 3611 viral oncogene homolog 1 (ARAF1), a gene which encodes a Enzyme that may play a critical role in cell growth and development. and is associated with angioimmunoblastic lymphadenopathy. Accordingly, utilities of GAM26 include diagnosis and treatment of the abovementioned diseases and clinical conditions.

[0354] The function of ARAF1 has been established by previous studies. By screening a mouse cDNA library with a v-raf oncogene probe, Huebner et al. (1986) also isolated a transforming raf-related cDNA, A-raf, that represented a gene distinct from RAF1. As an initial step in the analysis of this RAF1-related cDNA, they isolated a human ARAF cDNA and used it to map the genes in mouse and man. The mouse gene cosegregated with the X chromosome in Chinese hamster-mouse hybrid cells. In humans, 2 independently segregating loci, designated ARAF1 and ARAF2, were mapped to chromosomes X and 7, respectively. (Huebner et al. (1986) had not conclusively shown that the ARAF2 locus on chromosome 7 is transcribed, and indeed the ARAF2 locus, now designated ARAF2P, has been shown to be a pseudogene (Lee et al., 1994).) The single X-linked ARAF locus of the mouse and the ARAF1 locus of man are actively transcribed in several mouse and human cell lines. Because of an 80% homology to RAF1 in its kinase domain, the authors speculated that the ARAF1 gene product may have serine/threonine-specific kinase activity. By in situ hybridization, ARAF1 was mapped to Xp21-q11, probably Xp13-p11. Popescu and Mark (1989) regionalized the gene to Xp11.4-p11.2 by in situ hybridization. Beck et al. (1987) deduced the complete 606-amino acid sequence of the human ARAF1 oncogene from the 2,453-nucleotide sequence of the cDNA. Avner et al. (1987) found that in the mouse the A-raf oncogene is on the X chromosome, 10 to 17 cM proximal to the Hprt gene. The localization was considered compatible with the presence of the ARAF oncogene on the short arm of the X chromosome between the centromere and Xp21 in man. The RAF protooncogenes encode cytoplasmic protein serine/threonine kinases that play a critical role in cell growth and development. Araf1 in the mouse is expressed predominantly in urogenital tissues. Lee et al. (1994) demonstrated that the ARAF1 gene in the human comprises 16 exons encoded by a minimum of 10,776 nucleotides.

[0355] Full details of the abovementioned studies are described in the following publications, the disclosure of which are hereby incorporated by reference:

[0356] eck, T. W.; Huleihel, M.; Gunnell, M.; Bonner, T. I.; Rapp, U. R. The complete coding sequence of the human A-raf-1 oncogene and transforming activity of a human A-raf carrying retrovirus. Nucleic Acids Res. 15: 595-609, 1987. PubMed ID: 3029685 4. Lee, J.-E.; Beck, T. W.; Brennscheidt, U.; DeGennaro, L. J.; Rapp, U. R.: The complete sequence and promoter activity of the human A-raf-1 gene (ARAF1). Genomics 20: 43-55, 1994.

[0357] Further studies establishing the function and utilities of ARAF1 are found in John Hopkins OMIM database record ID 311010, and in references numbered 149-154 listed hereinbelow.

[0358] Reference is now made to ASC BINDING SITE. apoptosis-associated speck-like protein containing (ASC) is a target gene of GAM26, corresponding to GAM26-TARGET GENE of FIG. 26A. ASC BINDING SITE is a binding site found in an untranslated region of ASC, corresponding to BINDING SITE of FIG. 26A. FIG. 26D illustrates the complementarity of the nucleotide sequence of ASC BINDING SITE, designated SEQ ID:66821, to the nucleotide sequence of GAM26 RNA of FIG. 26A, designated SEQ ID:20604.

[0359] An additional function of GAM26 is therefore inhibition of apoptosis-associated speck-like protein containing (ASC), a gene which encodes a Protein that is an adaptor protein with a caspase-associated recruitment domain motif; may act to promote apoptosis induced by etoposide. Accordingly, utilities of GAM26 include diagnosis and treatment of the abovementioned diseases and clinical conditions.

[0360] The function of ASC has been established by previous studies. Western blot analysis by Masumoto et al. (1999) indicated that ASC may have proapoptotic activity by increasing the susceptibility of leukemia cell lines to apoptotic stimuli by anticancer drugs. Methylation-sensitive restriction PCR and methylation-specific PCR (MSP) analyses by Conway et al. (2000) indicated that silencing of TMS1 correlates with hypermethylation of the CpG island surrounding exon 1 and that overexpression of DNMT1 promotes hypermethylation and silencing of TMS1. Breast cancer cell lines, but not normal breast tissue, exhibited complete methylation of TMS1 and expressed no TMS1 message. Expression of TMS1 in breast cancer cell lines inhibited growth and reduced the number of surviving colonies. Conway et al. (2000) concluded that TMS1 functions in the promotion of caspase-dependent apoptosis and that overexpression of TMS1 inhibits the growth of breast cancer cells. Using bisulfite genomic sequencing, Dnase I-hypersensitive site mapping, and chromatin immunoprecipitation, Stimson and Vertino (2002) showed that in normal fibroblasts, the TMS1 CpG island is composed of an unmethylated domain with distinct 5-prime and 3-prime boundaries. De novo methylation of the CpG island in cells overexpressing DNMT1 was accompanied by a loss of CpG island-specific hypersensitive site formation, localized hypoacetylation of histone H3 (see 601128) and H4 (see 602822), and gene silencing. Stimson and Vertino (2002) proposed the existence of protein-binding sites that demarcate the boundaries of TMS1 CpG islands in normal cells and that the boundaries are overcome by aberrant methylation, resulting in gene silencing.

[0361] Full details of the abovementioned studies are described in the following publications, the disclosure of which are hereby incorporated by reference:

[0362] artinon, F.; Hofmann, K.; Tschopp, J.: The pyrin domain: a possible member of the death domain-fold family implicated in apoptosis and inflammation. Curr. Biol. 10: R118-R120, 2001. 3. Masumoto, J.; Taniguchi, S.; Ayukawa, K.; Sarvotham, H.; Kishino, T.; Niikawa, N.; Hidaka, E.; Katsuyama, T.; Higuchi, T.; Sagara, J.: ASC, a novel 22-kDa protein, aggregates during apoptosis of human promyelocytic leukemia HL-60 cells. J. Biol. Chem. 274: 33835-33838, 1999.

[0363] Further studies establishing the function and utilities of ASC are found in John Hopkins OMIM database record ID 606838, and in references numbered 155-159 listed hereinbelow.

[0364] Reference is now made to ATF4 BINDING SITE. activating transcription factor 4 (tax-responsive enhancer element B67 (ATF4) is a target gene of GAM26, corresponding to GAM26-TARGET GENE of FIG. 26A. ATF4 BINDING SITE is a binding site found in an untranslated region of ATF4, corresponding to BINDING SITE of FIG. 26A. FIG. 26D illustrates the complementarity of the nucleotide sequence of ATF4 BINDING SITE, designated SEQ ID:67884, to the nucleotide sequence of GAM26 RNA of FIG. 26A, designated SEQ ID:20604.

[0365] A further function of GAM26 is therefore inhibition of activating transcription factor 4 (tax-responsive enhancer element B67 (ATF4), a gene which encodes a transcripition factor that functions as a specific repressor of CRE-dependent transcription. Accordingly, utilities of GAM26 include diagnosis and treatment of the abovementioned diseases and clinical conditions.

[0366] The function of ATF4 has been established by previous studies. The cAMP response element (CRE) is an octanucleotide motif that mediates diverse transcriptional regulatory effects. By screening a Jurkat T-cell line expression library for the ability to bind CRE, Karpinski et al. (1992) isolated and characterized a full-length cDNA corresponding to ATF4, which they called CREB2 (CRE-binding protein-2). The predicted protein contains 351-amino acids. Northern blot analysis revealed that the 1.5-kb CREB2 mRNA was expressed in all human tumor cell lines and mouse organs tested. Unlike CREB (123810), which activates transcription from CRE-containing promoters, CREB2 functions as a specific repressor of CRE-dependent transcription. The transcriptional repressor activity resides within the C-terminal leucine zipper and basic domain region of the CREB2 protein.

[0367] Animal model experiments lend further support to the function of ATF4. Tanaka et al. (1998) used gene targeting to generate mice lacking Atf4. They found that Atf4-deficient mice exhibited severe microphthalmia. The Atf4-deficient eyes revealed a normal gross lens structure up to embryonic day 14.5, after which the lens degenerated due to apoptosis without the formation of lens secondary fiber cells. Retinal development was normal in the mutant mice. The lens-specific expression of Atf4 in the mutant mice led not only to the recovery of lens secondary fibers but also to the induction of hyperplasia of these fibers. Tanaka et al. (1998) concluded that ATF4 is essential for the later stages of lens fiber cell differentiation.

[0368] It is appreciated that the abovementioned animal model for ATF4 is acknowledged by those skilled in the art as a scientifically valid animal model, as can be further appreciated from the publications sited hereinbelow.

[0369] Full details of the abovementioned studies are described in the following publications, the disclosure of which are hereby incorporated by reference:

[0370] arpinski, B. A.; Morle, G. D.; Huggenvik, J.; Uhler, M. D.; Leiden, J. M.: Molecular cloning of human CREB-2: an ATF/CREB transcription factor that can negatively regulate transcription from the cAMP response element. Proc. Nat. Acad. Sci. 89: 4820-4824, 1992. PubMed ID: 1534408 3. Tanaka, T.; Tsujimura, T.; Takeda, K.; Sugihara, A.; Maekawa, A.; Terada, N.; Yoshida, N.; Akira, S.: Targeted disruption of ATF4 discloses its essential role in the formation of eye lens fibres. Genes Cells 3: 801-810, 1998.

[0371] Further studies establishing the function and utilities of ATF4 are found in John Hopkins OMIM database record ID 604064, and in references numbered 160-163 listed hereinbelow.

[0372] Reference is now made to ATP1A1 BINDING SITE. ATPase, Na+/K+ transporting, alpha 1 polypeptide (ATP1A1) is a target gene of GAM26, corresponding to GAM26-TARGET GENE of FIG. 26A. ATP1A1 BINDING SITE is a binding site found in an untranslated region of ATP1A1, corresponding to BINDING SITE of FIG. 26A. FIG. 26D illustrates the complementarity of the nucleotide sequence of ATP1A1 BINDING SITE, designated SEQ ID:68935, to the nucleotide sequence of GAM26 RNA of FIG. 26A, designated SEQ ID:20604.

[0373] Yet a further function of GAM26 is therefore inhibition of ATPase, Na+/K+ transporting, alpha 1 polypeptide (ATP1A1), a gene which encodes a Enzyme that catalyzes the hydrolysis of ATP coupled with the exchange of Na+/K+ ions across the plasma membrane. Accordingly, utilities of GAM26 include diagnosis and treatment of the abovementioned diseases and clinical conditions.

[0374] The function of ATP1A1 has been established by previous studies. Na,K-ATPase (Na(+),K(+)-activated ATP phosphohydrolase; EC 3.6.1.3) is an integral membrane protein responsible for establishing and maintaining the electrochemical gradients of Na and K ions across the plasma membrane. As these gradients are essential for osmoregulation, for sodium-coupled transport of a variety of organic and inorganic molecules, and for electrical excitability of nerve and muscle, the enzyme plays an essential role in cellular physiology. It is composed of 2 subunits, a large catalytic subunit (alpha) and a smaller glycoprotein subunit (beta) of unknown function. (See 182330.) Biochemical studies have demonstrated the existence of 2 isoforms of the catalytic subunit, alpha and alpha(+). Kidney contains predominantly the alpha form, whereas both alpha and alpha(+) are found in brain, adipose tissue, and skeletal muscle. A third isoform, alpha-III, has been identified in rat brain. Studies by Shull and Lingrel (1987) demonstrated that the catalytic subunit of Na,K-ATPase is encoded by multiple genes. Shull and Lingrel (1987) identified separate genes encoding the alpha and alpha(+) isoforms. These genes were called alpha-A and alpha-B (ATP1A2; 182340), respectively. In addition, they isolated 2 other genes, termed alpha-C and alpha-D, one of which is physically linked to the alpha(+) gene; these genes showed nucleotide and deduced amino acid homology to the catalytic subunit cDNA sequences but did not correspond to any previously identified isoforms.

[0375] Animal model experiments lend further support to the function of ATP1A1. To determine the functional roles of the ATP1A1 and ATP1A2 proteins, James et al. (1999) generated mice with targeted disruption of either the Atp1a1 or Atp1a2 gene. Hearts from heterozygous Atp1a2 mice were hypercontractile as a result of increased calcium transients during the contractile cycle. In contrast, hearts from heterozygous Atp1a1 mice were hypocontractile. The different functional roles of these 2 proteins were further demonstrated since inhibition of the Atp1a2 protein with ouabain increased the contractility of heterozygous Atp1a1 hearts. These results illustrated a specific role for the ATP1A2 protein in calcium signaling during cardiac contraction.

[0376] It is appreciated that the abovementioned animal model for ATP1A1 is acknowledged by those skilled in the art as a scientifically valid animal model, as can be further appreciated from the publications sited hereinbelow.

[0377] Full details of the abovementioned studies are described in the following publications, the disclosure of which are hereby incorporated by reference:

[0378] Shull, M. M.; Lingrel, J. B.: Multiple genes encode the human Na+,K+-ATPase catalytic subunit. Proc. Nat. Acad. Sci. 84: 4039-4043, 1987. PubMed ID: 3035563 8. James, P. F.; Grupp, I. L.; Grupp, G.; Woo, A. L.; Askew, G. R.; Croyle, M. L.; Walsh, R. A.; Lingrel, J. B.: Identification of a specific role for the Na,K-ATPase alpha-2 isoform as a regulator of calcium in the heart. Molec. Cell 3: 555-563, 1999.

[0379] Further studies establishing the function and utilities of ATP1A1 are found in John Hopkins OMIM database record ID 182310, and in references numbered 164-178 listed hereinbelow.

[0380] Referring now to ATP1A1 BINDING SITE. ATPase, Na+/K+ transporting, alpha 1 polypeptide (ATP1A1) is a target gene of GAM26, corresponding to GAM26-TARGET GENE of FIG. 26A. ATP1A1 BINDING SITE is a binding site found in an untranslated region of ATP1A1, corresponding to BINDING SITE of FIG. 26A. FIG. 26D illustrates the complementarity of the nucleotide sequence of ATP1A1 BINDING SITE, designated SEQ ID:68949, to the nucleotide sequence of GAM26 RNA of FIG. 26A, designated SEQ ID:20604.

[0381] Another function of GAM26 is therefore inhibition of ATPase, Na+/K+ transporting, alpha 1 polypeptide (ATP1A1), a gene which encodes a Enzyme that catalyzes the hydrolysis of ATP coupled with the exchange of Na+/K+ ions across the plasma membrane. Accordingly, utilities of GAM26 include diagnosis and treatment of the abovementioned diseases and clinical conditions. The function and utilities of ATP1A1 have been established by previous studies, as described hereinabove with reference to FIG. 26D.

[0382] Referring now to ATP1A1 BINDING SITE. ATPase, Na+/K+ transporting, alpha 1 polypeptide (ATP1A1) is a target gene of GAM26, corresponding to GAM26-TARGET GENE of FIG. 26A. ATP1A1 BINDING SITE is a binding site found in an untranslated region of ATP1A1, corresponding to BINDING SITE of FIG. 26A. FIG. 26D illustrates the complementarity of the nucleotide sequence of ATP1A1BINDING SITE, designated SEQ ID:68961, to the nucleotide sequence of GAM26 RNA of FIG. 26A, designated SEQ ID:20604.

[0383] Yet another function of GAM26 is therefore inhibition of ATPase, Na+/K+ transporting, alpha 1 polypeptide (ATP1A1), a gene which encodes a Enzyme that catalyzes the hydrolysis of ATP coupled with the exchange of Na+/K+ ions across the plasma membrane. Accordingly, utilities of GAM26 include diagnosis and treatment of the abovementioned diseases and clinical conditions. The function and utilities of ATP1A1 have been established by previous studies, as described hereinabove with reference to FIG. 26D.

[0384] Reference is now made to ATP2B2 BINDING SITE. ATPase, Ca++ transporting, plasma membrane 2 (NOTE: redefinition of sy (ATP2B2) is a target gene of GAM26, corresponding to GAM26-TARGET GENE of FIG. 26A. ATP2B2 BINDING SITE is a binding site found in an untranslated region of ATP2B2, corresponding to BINDING SITE of FIG. 26A. FIG. 26D illustrates the complementarity of the nucleotide sequence of ATP2B2 BINDING SITE, designated SEQ ID:69717, to the nucleotide sequence of GAM26 RNA of FIG. 26A, designated SEQ ID:20604.

[0385] An additional function of GAM26 is therefore inhibition of ATPase, Ca++ transporting, plasma membrane 2 (NOTE: redefinition of sy (ATP2B2), a gene which encodes a Enzyme that catalyzes the hydrolysis of ATP coupled with the transport of calcium out of the cell. Accordingly, utilities of GAM26 include diagnosis and treatment of the abovementioned diseases and clinical conditions.

[0386] The function of ATP2B2 has been established by previous studies. The plasma membrane Ca(2+)-transporting ATPase designated as PMCA4 was mapped to 1q25-q32 by Olson et al. (1991) by 3 independent methods: Southern analysis of human-rodent somatic cell hybrids, in situ hybridization of human metaphase spreads, and genetic linkage analysis in the CEPH pedigrees. No evidence was obtained for multiple copies of the gene at this locus; however, a cross-hybridizing sequence was detected on Xq13-qter at low stringency. Further studies were required to determine whether the X-chromosomal sequence represented another member of the PMCA gene family.

[0387] Full details of the abovementioned studies are described in the following publications, the disclosure of which are hereby incorporated by reference:

[0388] Ison, S.; Wang, M. G.; Carafoli, E.; Strehler, E. E.; McBride, O. W. Localization of two genes encoding plasma membrane Ca(2+)-transporting ATPases to human chromosomes 1q25-32 and 12q21-23. Genomics 9: 629-641, 1991.

[0389] Further studies establishing the function and utilities of ATP2B2 are found in John Hopkins OMIM database record ID 108732, and in references numbered 180 listed hereinbelow.

[0390] Reference is now made to DR1 BINDING SITE. down-regulator of transcription 1, TBP-binding (negative cofactor 2) (DR1) is a target gene of GAM26, corresponding to GAM26-TARGET GENE of FIG. 26A. DR1 BINDING SITE is a binding site found in an untranslated region of DR1, corresponding to BINDING SITE of FIG. 26A. FIG. 26D illustrates the complementarity of the nucleotide sequence of DR1 BINDING SITE, designated SEQ ID:69717, to the nucleotide sequence of GAM26 RNA of FIG. 26A, designated SEQ ID:20604.

[0391] A further function of GAM26 is therefore inhibition of down-regulator of transcription 1, TBP-binding (negative cofactor 2) (DR1), a gene which encodes a Protein that influences functional repression of both activated and basal transcription of class ii genes. Accordingly, utilities of GAM26 include diagnosis and treatment of the abovementioned diseases and clinical conditions.

[0392] The function of DR1 has been established by previous studies. Several phosphoproteins are known to interact with TBP, the TATA box-binding protein (600075). Among them, DR1 is a TBP-associated phosphoprotein that represses both basal and activated levels of transcription. Inostroza et al. (1992) biochemically characterized DR1 purified from HeLa cells and cloned the human gene from a HeLa cell cDNA library. The gene encodes a 176-amino acid polypeptide of 19 kD. They showed that DR1 is phosphorylated in vivo and that phosphorylation of DR1 affected its interaction with TBP. The DR1 protein contains 3 domains: a histone fold motif at the N terminus, a TBP-binding domain, and a glutamine- and alanine-rich region. Mermelstein et al. (1996) showed that the histone fold motif of DR1 is required for DR1-DRAP1 interaction. Both the TBP-binding domain and the glutamine- and alanine-rich region are required for DR1-mediated repression of transcription. Yeung et al. (1997) demonstrated that the TBP-binding domain has 2 functions: it tethers the DR1 repressor complex to the promoter by interacting with TBP, and it is required for the corepression activity of DRAP1, although it is not required for DR1-DRAP1 interaction. Yeung et al. (1997) determined that the glutamine- and alanine-rich region is the repressor domain of DR1 and that this domain interacts with TBP. Goppelt et al. (1996) proposed that binding of DR1 repressor complexes to TBP-promoter complexes establishes a mechanism in which an altered DNA conformation, together with the formation of higher order complexes, inhibits the assembly of the preinitiation complex and controls the rate of RNA polymerase II transcription.

[0393] Full details of the abovementioned studies are described in the following publications, the disclosure of which are hereby incorporated by reference:

[0394] nostroza, J. A.; Mermeistein, F. H.; Ha, I.; Lane, W. S.; Reinberg, D.: Dr1, a TATA-binding protein-associated phosphoprotein and inhibitor of class II gene transcription. Cell 70: 477-489, 1992. PubMed ID: 1339312 5. Mermelstein, F.; Yeung, K.; Cao, J.; Inostroza, J. A.; Erdjument-Bromage, H.; Eagelson, K.; Landsman, D.; Levitt, P.; Tempst, P.; Reinberg, D.: Requirement of a corepressor for Dr1-mediated repression of transcription. Genes Dev. 10: 1033-1048, 1996.

[0395] Further studies establishing the function and utilities of DR1 are found in John Hopkins OMIM database record ID 601482, and in references numbered 185-193 listed hereinbelow.

[0396] Referring now to ATP2B2 BINDING SITE. ATPase, Ca++ transporting, plasma membrane 2 (NOTE: redefinition of sy (ATP2B2) is a target gene of GAM26, corresponding to GAM26-TARGET GENE of FIG. 26A. ATP2B2 BINDING SITE is a binding site found in an untranslated region of ATP2B2, corresponding to BINDING SITE of FIG. 26A. FIG. 26D illustrates the complementarity of the nucleotide sequence of ATP2B2 BINDING SITE, designated SEQ ID:69718, to the nucleotide sequence of GAM26 RNA of FIG. 26A, designated SEQ ID:20604.

[0397] Yet a further function of GAM26 is therefore inhibition of ATPase, Ca++ transporting, plasma membrane 2 (NOTE: redefinition of sy (ATP2B2), a gene which encodes a Enzyme that catalyzes the hydrolysis of ATP coupled with the transport of calcium out of the cell. Accordingly, utilities of GAM26 include diagnosis and treatment of the abovementioned diseases and clinical conditions. The function and utilities of ATP2B2 have been established by previous studies, as described hereinabove with reference to FIG. 26D.

[0398] Referring now to ATP2B2 BINDING SITE. ATPase, Ca++ transporting, plasma membrane 2 (NOTE: redefinition of sy (ATP2B2) is a target gene of GAM26, corresponding to GAM26-TARGET GENE of FIG. 26A. ATP2B2 BINDING SITE is a binding site found in an untranslated region of ATP2B2, corresponding to BINDING SITE of FIG. 26A. FIG. 26D illustrates the complementarity of the nucleotide sequence of ATP2B2 BINDING SITE, designated SEQ ID:69745, to the nucleotide sequence of GAM26 RNA of FIG. 26A, designated SEQ ID:20604.

[0399] Another function of GAM26 is therefore inhibition of ATPase, Ca++ transporting, plasma membrane 2 (NOTE: redefinition of sy (ATP2B2), a gene which encodes a Enzyme that catalyzes the hydrolysis of ATP coupled with the transport of calcium out of the cell. Accordingly, utilities of GAM26 include diagnosis and treatment of the abovementioned diseases and clinical conditions. The function and utilities of ATP2B2 have been established by previous studies, as described hereinabove with reference to FIG. 26D.

[0400] Referring now to DR1 BINDING SITE. down-regulator of transcription 1, TBP-binding (negative cofactor 2) (DR1) is a target gene of GAM26, corresponding to GAM26-TARGET GENE of FIG. 26A. DR1 BINDING SITE is a binding site found in an untranslated region of DR1, corresponding to BINDING SITE of FIG. 26A. FIG. 26D illustrates the complementarity of the nucleotide sequence of DR1 BINDING SITE, designated SEQ ID:69745, to the nucleotide sequence of GAM26 RNA of FIG. 26A, designated SEQ ID:20604.

[0401] Yet another function of GAM26 is therefore inhibition of down-regulator of transcription 1, TBP-binding (negative cofactor 2) (DR1), a gene which encodes a Protein that influences functional repression of both activated and basal transcription of class ii genes. Accordingly, utilities of GAM26 include diagnosis and treatment of the abovementioned diseases and clinical conditions. The function and utilities of DR1 have been established by previous studies, as described hereinabove with reference to FIG. 26D.

[0402] Referring now to ATP2B2 BINDING SITE. ATPase, Ca++ transporting, plasma membrane 2 (NOTE: redefinition of sy (ATP2B2) is a target gene of GAM26, corresponding to GAM26-TARGET GENE of FIG. 26A. ATP2B2 BINDING SITE is a binding site found in an untranslated region of ATP2B2, corresponding to BINDING SITE of FIG. 26A. FIG. 26D illustrates the complementarity of the nucleotide sequence of ATP2B2 BINDING SITE, designated SEQ ID:69749, to the nucleotide sequence of GAM26 RNA of FIG. 26A, designated SEQ ID:20604.

[0403] An additional function of GAM26 is therefore inhibition of ATPase, Ca++ transporting, plasma membrane 2 (NOTE: redefinition of sy (ATP2B2), a gene which encodes a Enzyme that catalyzes the hydrolysis of ATP coupled with the transport of calcium out of the cell. Accordingly, utilities of GAM26 include diagnosis and treatment of the abovementioned diseases and clinical conditions. The function and utilities of ATP2B2 have been established by previous studies, as described hereinabove with reference to FIG. 26D.

[0404] Reference is now made to AUP1 BINDING SITE. ancient ubiquitous protein 1 (AUP1) is a target gene of GAM26, corresponding to GAM26-TARGET GENE of FIG. 26A. AUP1 BINDING SITE is a binding site found in an untranslated region of AUP1, corresponding to BINDING SITE of FIG. 26A. FIG. 26D illustrates the complementarity of the nucleotide sequence of AUP1 BINDING SITE, designated SEQ ID:72273, to the nucleotide sequence of GAM26 RNA of FIG. 26A, designated SEQ ID:20604.

[0405] A further function of GAM26 is therefore inhibition of ancient ubiquitous protein 1 (AUP1), a gene which encodes a Protein that is an ubiquitously expressed protein. Accordingly, utilities of GAM26 include diagnosis and treatment of the abovementioned diseases and clinical conditions.

[0406] The function of AUP1 has been established by previous studies. While searching for genes on mouse chromosome 6 between microsatellite markers D6Mit5 and D6Mit21, Jang et al. (1996) found a nonrepetitive 0.7-kb fragment that hybridized to human, cat, and dog DNAs on a zoo blot. Using this fragment as a probe, they cloned cDNAs from mouse neonatal brain and adult mouse testis cDNA libraries. Jang et al. (1996) sequenced overlapping cDNAs and found an open reading frame of 410 amino acids with putative secretion signal sequence at the N terminus and a domain with homology to the ‘ancient conserved region’ of the ARCN1 (600820) gene. They called the new gene AUP1, for ancient ubiquitous protein-1. Northern blot analysis in the mouse revealed a 1.5-kb Aup1 transcript in all adult tissues tested and in fetal samples from days E10 to E14. By database analysis, Jang et al. (1996) revealed the existence of a Caenorhabditis elegans homolog, hypothetical protein F44b9, which has 35% amino acid identity to mouse Aup1. With numerous overlapping EST sequences, Jang et al. (1996) identified a human homolog of mouse Aup1.

[0407] Full details of the abovementioned studies are described in the following publications, the disclosure of which are hereby incorporated by reference:

[0408] ang, W.; Weber, J. S.; Bashir, R.; Bushby, K.; Meisler, M. H. Aup1, a novel gene on mouse chromosome 6 and human chromosome 2p13. Genomics 36: 366-368, 1996.

[0409] Further studies establishing the function and utilities of AUP1 are found in John Hopkins OMIM database record ID 602434, and in references numbered 194 listed hereinbelow.

[0410] Referring now to AUP1 BINDING SITE. ancient ubiquitous protein 1 (AUP1) is a target gene of GAM26, corresponding to GAM26-TARGET GENE of FIG. 26A. AUP1 BINDING SITE is a binding site found in an untranslated region of AUP1, corresponding to BINDING SITE of FIG. 26A. FIG. 26D illustrates the complementarity of the nucleotide sequence of AUP1 BINDING SITE, designated SEQ ID:72277, to the nucleotide sequence of GAM26 RNA of FIG. 26A, designated SEQ ID:20604.

[0411] Yet a further function of GAM26 is therefore inhibition of ancient ubiquitous protein 1 (AUP1), a gene which encodes a Protein that is an ubiquitously expressed protein. Accordingly, utilities of GAM26 include diagnosis and treatment of the abovementioned diseases and clinical conditions. The function and utilities of AUP1 have been established by previous studies, as described hereinabove with reference to FIG. 26D.

[0412] Reference is now made to BCL11B BINDING SITE. B-cell CLL/lymphoma 11B (zinc finger protein) (BCL11B) is a target gene of GAM26, corresponding to GAM26-TARGET GENE of FIG. 26A. BCL11B BINDING SITE is a binding site found in an untranslated region of BCL11B, corresponding to BINDING SITE of FIG. 26A. FIG. 26D illustrates the complementarity of the nucleotide sequence of BCL11B BINDING SITE, designated SEQ ID:78295, to the nucleotide sequence of GAM26 RNA of FIG. 26A, designated SEQ ID:20604.

[0413] Another function of GAM26 is therefore inhibition of B-cell CLL/lymphoma 11B (zinc finger protein) (BCL11B), a gene which encodes a Protein that is implicated in mouse and human leukemias and is associated with T-cell leukemia/lymphoma. Accordingly, utilities of GAM26 include diagnosis and treatment of the abovementioned diseases and clinical conditions.

[0414] The function of BCL11B has been established by previous studies. BCL11A (606558) is a highly conserved gene across a wide range of species and is implicated in mouse and human leukemias. By database analysis, Satterwhite et al. (2001) identified a human homolog of BCL11A, designated BCL11B. The deduced 823-amino acid BCL11B protein is 61% identical to BCL11A overall but 95% identical in the zinc finger domains. It is also 86% identical to mouse Ctip2. Like BCL11A, BCL11B has a large 5-prime CpG island. Northern blot analysis detected expression in malignant T-cell lines derived from patients with adult T-cell leukemia/lymphoma but not in any malignant B-cell lines examined.

[0415] Full details of the abovementioned studies are described in the following publications, the disclosure of which are hereby incorporated by reference:

[0416] atterwhite, E.; Sonoki, T.; Willis, T. G.; Harder, L.; Nowak, R.; Arriola, E. L.; Liu, H.; Price, H. P.; Gesk, S.; Steinemann, D.; Schlegelberger, B.; Oscier, D. G.; Siebert, R.; Tucker, P. W.; Dyer, M. J. S.: The BCL11 gene family: involvement of BCL11A in lymphoid malignancies. Blood 98: 3413-3420, 2001.

[0417] Further studies establishing the function and utilities of BCL11B are found in John Hopkins OMIM database record ID 606558, and in references numbered 195 listed hereinbelow.

[0418] Referring now to BCL11B BINDING SITE. B-cell CLL/lymphoma 11B (zinc finger protein) (BCL11B) is a target gene of GAM26, corresponding to GAM26-TARGET GENE of FIG. 26A. BCL11B BINDING SITE is a binding site found in an untranslated region of BCL11B, corresponding to BINDING SITE of FIG. 26A. FIG. 26D illustrates the complementarity of the nucleotide sequence of BCL11B BINDING SITE, designated SEQ ID:78304, to the nucleotide sequence of GAM26 RNA of FIG. 26A, designated SEQ ID:20604.

[0419] Yet another function of GAM26 is therefore inhibition of B-cell CLL/lymphoma 11B (zinc finger protein) (BCL11B), a gene which encodes a Protein that is implicated in mouse and human leukemias and is associated with T-cell leukemia/lymphoma. Accordingly, utilities of GAM26 include diagnosis and treatment of the abovementioned diseases and clinical conditions. The function and utilities of BCL11B have been established by previous studies, as described hereinabove with reference to FIG. 26D.

[0420] Referring now to BCL11B BINDING SITE. B-cell CLL/lymphoma 11B (zinc finger protein) (BCL11B) is a target gene of GAM26, corresponding to GAM26-TARGET GENE of FIG. 26A. BCL11B BINDING SITE is a binding site found in an untranslated region of BCL11B, corresponding to BINDING SITE of FIG. 26A. FIG. 26D illustrates the complementarity of the nucleotide sequence of BCL11B BINDING SITE, designated SEQ ID:78304, to the nucleotide sequence of GAM26 RNA of FIG. 26A, designated SEQ ID:20604.

[0421] An additional function of GAM26 is therefore inhibition of B-cell CLL/lymphoma 11B (zinc finger protein) (BCL11B), a gene which encodes a Protein that is implicated in mouse and human leukemias and is associated with T-cell leukemia/lymphoma. Accordingly, utilities of GAM26 include diagnosis and treatment of the abovementioned diseases and clinical conditions. The function and utilities of BCL11B have been established by previous studies, as described hereinabove with reference to FIG. 26D.

[0422] Referring now to BCL11B BINDING SITE. B-cell CLL/lymphoma 11B (zinc finger protein) (BCL11B) is a target gene of GAM26, corresponding to GAM26-TARGET GENE of FIG. 26A. BCL11B BINDING SITE is a binding site found in an untranslated region of BCL11B, corresponding to BINDING SITE of FIG. 26A. FIG. 26D illustrates the complementarity of the nucleotide sequence of BCL11B BINDING SITE, designated SEQ ID:78310, to the nucleotide sequence of GAM26 RNA of FIG. 26A, designated SEQ ID:20604.

[0423] A further function of GAM26 is therefore inhibition of B-cell CLL/lymphoma 11B (zinc finger protein) (BCL11B), a gene which encodes a Protein that is implicated in mouse and human leukemias and is associated with T-cell leukemia/lymphoma. Accordingly, utilities of GAM26 include diagnosis and treatment of the abovementioned diseases and clinical conditions. The function and utilities of BCL11B have been established by previous studies, as described hereinabove with reference to FIG. 26D.

[0424] Referring now to BCL11B BINDING SITE. B-cell CLL/lymphoma 11B (zinc finger protein) (BCL11B) is a target gene of GAM26, corresponding to GAM26-TARGET GENE of FIG. 26A. BCL11B BINDING SITE is a binding site found in an untranslated region of BCL11B, corresponding to BINDING SITE of FIG. 26A. FIG. 26D illustrates the complementarity of the nucleotide sequence of BCL11B BINDING SITE, designated SEQ ID:78336, to the nucleotide sequence of GAM26 RNA of FIG. 26A, designated SEQ ID:20604.

[0425] Yet a further function of GAM26 is therefore inhibition of B-cell CLL/lymphoma 11B (zinc finger protein) (BCL11B), a gene which encodes a Protein that is implicated in mouse and human leukemias and is associated with T-cell leukemia/lymphoma. Accordingly, utilities of GAM26 include diagnosis and treatment of the abovementioned diseases and clinical conditions. The function and utilities of BCL11B have been established by previous studies, as described hereinabove with reference to FIG. 26D.

[0426] Reference is now made to BCL7B BINDING SITE. B-cell CLL/lymphoma 7B (BCL7B) is a target gene of GAM26, corresponding to GAM26-TARGET GENE of FIG. 26A. BCL7B BINDING SITE is a binding site found in an untranslated region of BCL7B, corresponding to BINDING SITE of FIG. 26A. FIG. 26D illustrates the complementarity of the nucleotide sequence of BCL7B BINDING SITE, designated SEQ ID:79353, to the nucleotide sequence of GAM26 RNA of FIG. 26A, designated SEQ ID:20604.

[0427] Another function of GAM26 is therefore inhibition of B-cell CLL/lymphoma 7B (BCL7B), a gene which encodes a Protein that is of yet unknown fanction and is associated with Williams-Beuren syndrome. Accordingly, utilities of GAM26 include diagnosis and treatment of the abovementioned diseases and clinical conditions.

[0428] The function of BCL7B has been established by previous studies. Meng et al. (1998) constructed a physical map encompassing the 1.5-Mb region of chromosome 7q11.23 that is commonly deleted in Williams-Beuren syndrome (WBS; 194050). They identified 3 genes within this region, including BCL7B, which contains 6 exons. By EST database searching, screening of a liver cDNA library, and sequencing, they cloned a BCL7B cDNA encoding a deduced 202-amino acid protein that shows high homology to the BCL7A gene (601406), which was cloned from a complex chromosomal translocation in Burkitt lymphoma cell lines. BCL7B is highly conserved from C. elegans to human, suggesting that it has been conserved through evolution.

[0429] Full details of the abovementioned studies are described in the following publications, the disclosure of which are hereby incorporated by reference:

[0430] adayel, D. M.; Osborne, L. R.; Coignet, L. J. A.; Zani, V. J.; Tsui, L.-C.; Scherer, S. W.; Dyer, M. J. S.: The BCL7 gene family: deletion of BCL7B in Williams syndrome. Gene 224: 35-44, 1998. PubMed ID: 9931421 2. Meng, X.; Lu, X.; Li, Z.; Green, E. D.; Massa, H.; Trask, B. J.; Morris, C. A.; Keating, M. T.: Complete physical map of the common deletion region in Williams syndrome and identification and characterization of three novel genes. Hum. Genet. 103: 590-599, 1998.

[0431] Further studies establishing the function and utilities of BCL7B are found in John Hopkins OMIM database record ID 605846, and in references numbered 196-197 listed hereinbelow.

[0432] Reference is now made to BCR BINDING SITE. breakpoint cluster region (BCR) is a target gene of GAM26, corresponding to GAM26-TARGET GENE of FIG. 26A. BCR BINDING SITE is a binding site found in an untranslated region of BCR, corresponding to BINDING SITE of FIG. 26A. FIG. 26D illustrates the complementarity of the nucleotide sequence of BCR BINDING SITE, designated SEQ ID:79756, to the nucleotide sequence of GAM26 RNA of FIG. 26A, designated SEQ ID:20604.

[0433] Yet another function of GAM26 is therefore inhibition of breakpoint cluster region (BCR), a gene which encodes a Protein that is a serine/threonine kinase that involves in the t(9;22) translocation (Philadelphia chromosome) and is associated with chronic myeloid leukemia (cml), acute myeloid leukemia (aml), acute lymphoblastic leukemia (all). Accordingly, utilities of GAM26 include diagnosis and treatment of the abovementioned diseases and clinical conditions.

[0434] The function of BCR has been established by previous studies. The normal BCR gene occupies a region of about 135 kb on chromosome 22. It is expressed as mRNAs of 4.5- and 6.7-kb, which apparently encode for the same cytoplasmic 160-kD protein, and contains 23 exons as well as an unusual inverted repeat flanking the first exon. The BCR protein reportedly contains a unique serine/threonine kinase activity and at least two SH2 binding sites encoded in its first exon and a C-terminal domain that functions as a GTPase activating protein for p21(rac) (Diekmann et al., 1991); see rac serine/threonine protein kinase (164730). Chissoe et al. (1995) sequenced the complete BCR gene and greater than 80% of the human ABL gene, which are both involved in the t(9;22) translocation (Philadelphia chromosome) associated with more than 90% of chronic myelogenous leukemia, 25 to 30% of adult and 2 to 10% of childhood acute lymphoblastic leukemia, and rare cases of acute myelogenous leukemia. Comparison of the gene with its cDNA sequence revealed the positions of 23 BCR exons and putative alternative BCR first and second exons. From the sequence of 4 newly studied Philadelphia chromosome translocations and a review of several other previously sequenced breakpoints, Chissoe et al. (1995) could discern no consistent breakpoint features. No clear-cut mechanism for Philadelphia chromosome translocation was evident. Because tyrosine kinase activity is essential to the transforming function of BCR-ABL, Druker et al. (2001) reasoned that an inhibitor of the kinase may be an effective treatment for CML. They found that indeed a tyrosine kinase inhibitor (STI571) was well tolerated and had significant antileukemic activity in patients with CML in whom treatment with standard chemotherapy had failed. This experience demonstrated the potential for the development of anticancer drugs based on the specific molecular abnormality present in a human cancer.

[0435] Animal model experiments lend further support to the function of BCR. Cancer is thought to arise from multiple genetic events that establish irreversible malignancy. A different mechanism might be present in certain leukemias initiated by a chromosomal translocation. Huettner et al. (2000) adopted a new approach to determine if ablation of the genetic abnormality is sufficient for reversion. They generated a conditional transgenic model of BCR-ABL-induced leukemia. The most common form of the product of the fusion gene, p210 BCR-ABL1, is found in more than 90% of patients with chronic myclogenous leukemia and in up to 15% of adult patients with de novo acute lymphoblastic leukemia. Efforts to establish a useful transgenic model had been hampered by embryonic lethality when the oncogene is expressed during embryogenesis, by reduced penetrance, or by extremely long latency. Huettner et al. (2000) used the ‘knock-in’ approach to induce leukemia by p190 BCR-ABL1 (Castellanos et al., 1997). Lethal leukemia developed within an acceptable time frame in all animals, and complete remission was achieved by suppression of BCR-ABL1 expression, even after multiple rounds of induction and reversion. The results demonstrated that BCR-ABL1 is required for both induction and maintenance of leukemia. The findings suggested that complete and lasting remissions can be achieved if the genetic abnormality is abolished or silenced before secondary mutations are acquired. The results have implications for therapies that directly target leukemia oncogenes, with a relevant example being the use of BCR-ABL1-specific tyrosine kinase inhibitors.

[0436] It is appreciated that the abovementioned animal model for BCR is acknowledged by those skilled in the art as a scientifically valid animal model, as can be further appreciated from the publications sited hereinbelow.

[0437] Full details of the abovementioned studies are described in the following publications, the disclosure of which are hereby incorporated by reference:

[0438] hissoe, S. L.; Bodenteich, A.; Wang, Y.-F.; Wang, Y.-P.; Burian, D.; Clifton, S. W.; Crabtree, J.; Freeman, A.; Iyer, K.; Jian, L.; Ma, Y.; McLaury, H.-J.; Pan, H.-Q.; Sarhan, O. H.; Toth, S.; Wang, Z.; Zhang, G.; Heisterkamp, N.; Groffen, J.; Roe, B. A.: Sequence and analysis of the human ABL gene, the BCR gene, and regions involved in the Philadelphia chromosomal translocation. Genomics 27: 67-82, 1995. PubMed ID: 7665185 31. Huettner, C. S.; Zhang, P.; Van Etten, R. A.; Tenen, D. G. Reversibility of acute B-cell leukaemia induced by BCR-ABL1. Nature Genet. 24: 57-60, 2000.

[0439] Further studies establishing the function and utilities of BCR are found in John Hopkins OMIM database record ID 151410, and in references numbered 198-267 listed hereinbelow.

[0440] Referring now to BCR BINDING SITE. breakpoint cluster region (BCR) is a target gene of GAM26, corresponding to GAM26-TARGET GENE of FIG. 26A. BCR BINDING SITE is a binding site found in an untranslated region of BCR, corresponding to BINDING SITE of FIG. 26A. FIG. 26D illustrates the complementarity of the nucleotide sequence of BCR BINDING SITE, designated SEQ ID:79756, to the nucleotide sequence of GAM26 RNA of FIG. 26A, designated SEQ ID:20604.

[0441] An additional function of GAM26 is therefore inhibition of breakpoint cluster region (BCR), a gene which encodes a Protein that is a serine/threonine kinase that involves in the t(9;22) translocation (Philadelphia chromosome) and is associated with chronic mycloid leukemia (cml), acute myeloid leukemia (aml), acute lymphoblastic leukemia (all). Accordingly, utilities of GAM26 include diagnosis and treatment of the abovementioned diseases and clinical conditions. The function and utilities of BCR have been established by previous studies, as described hereinabove with reference to FIG. 26D.

[0442] Referring now to BCR BINDING SITE. breakpoint cluster region (BCR) is a target gene of GAM26, corresponding to GAM26-TARGET GENE of FIG. 26A. BCR BINDING SITE is a binding site found in an untranslated region of BCR, corresponding to BINDING SITE of FIG. 26A. FIG. 26D illustrates the complementarity of the nucleotide sequence of BCR BINDING SITE, designated SEQ ID:79759, to the nucleotide sequence of GAM26 RNA of FIG. 26A, designated SEQ ID:20604.

[0443] A further function of GAM26 is therefore inhibition of breakpoint cluster region (BCR), a gene which encodes a Protein that is a serine/threonine kinase that involves in the t(9;22) translocation (Philadelphia chromosome) and is associated with chronic myeloid leukemia (cml), acute myeloid leukemia (aml), acute lymphoblastic leukemia (all). Accordingly, utilities of GAM26 include diagnosis and treatment of the abovementioned diseases and clinical conditions. The function and utilities of BCR have been established by previous studies, as described hereinabove with reference to FIG. 26D.

[0444] Referring now to BCR BINDING SITE. breakpoint cluster region (BCR) is a target gene of GAM26, corresponding to GAM26-TARGET GENE of FIG. 26A. BCR BINDING SITE is a binding site found in an untranslated region of BCR, corresponding to BINDING SITE of FIG. 26A. FIG. 26D illustrates the complementarity of the nucleotide sequence of BCR BINDING SITE, designated SEQ ID:79761, to the nucleotide sequence of GAM26 RNA of FIG. 26A, designated SEQ ID:20604.

[0445] Yet a further function of GAM26 is therefore inhibition of breakpoint cluster region (BCR), a gene which encodes a Protein that is a serine/threonine kinase that involves in the t(9;22) translocation (Philadelphia chromosome) and is associated with chronic myeloid leukemia (cml), acute myeloid leukemia (aml), acute lymphoblastic leukemia (all). Accordingly, utilities of GAM26 include diagnosis and treatment of the abovementioned diseases and clinical conditions. The function and utilities of BCR have been established by previous studies, as described hereinabove with reference to FIG. 26D.

[0446] Referring now to BCR BINDING SITE. breakpoint cluster region (BCR) is a target gene of GAM26, corresponding to GAM26-TARGET GENE of FIG. 26A. BCR BINDING SITE is a binding site found in an untranslated region of BCR, corresponding to BINDING SITE of FIG. 26A. FIG. 26D illustrates the complementarity of the nucleotide sequence of BCR BINDING SITE, designated SEQ ID:79761, to the nucleotide sequence of GAM26 RNA of FIG. 26A, designated SEQ ID:20604.

[0447] Another function of GAM26 is therefore inhibition of breakpoint cluster region (BCR), a gene which encodes a Protein that is a serine/threonine kinase that involves in the t(9;22) translocation (Philadelphia chromosome) and is associated with chronic myeloid leukemia (cml), acute myeloid leukemia (aml), acute lymphoblastic leukemia (all). Accordingly, utilities of GAM26 include diagnosis and treatment of the abovementioned diseases and clinical conditions. The function and utilities of BCR have been established by previous studies, as described hereinabove with reference to FIG. 26D.

[0448] Referring now to BCR BINDING SITE. breakpoint cluster region (BCR) is a target gene of GAM26, corresponding to GAM26-TARGET GENE of FIG. 26A. BCR BINDING SITE is a binding site found in an untranslated region of BCR, corresponding to BINDING SITE of FIG. 26A. FIG. 26D illustrates the complementarity of the nucleotide sequence of BCR BINDING SITE, designated SEQ ID:79762, to the nucleotide sequence of GAM26 RNA of FIG. 26A, designated SEQ ID:20604.

[0449] Yet another function of GAM26 is therefore inhibition of breakpoint cluster region (BCR), a gene which encodes a Protein that is a serine/threonine kinase that involves in the t(9;22) translocation (Philadelphia chromosome) and is associated with chronic myeloid leukemia (cml), acute myeloid leukemia (aml), acute lymphoblastic leukemia (all). Accordingly, utilities of GAM26 include diagnosis and treatment of the abovementioned diseases and clinical conditions. The function and utilities of BCR have been established by previous studies, as described hereinabove with reference to FIG. 26D.

[0450] Referring now to BCR BINDING SITE. breakpoint cluster region (BCR) is a target gene of GAM26, corresponding to GAM26-TARGET GENE of FIG. 26A. BCR BINDING SITE is a binding site found in an untranslated region of BCR, corresponding to BINDING SITE of FIG. 26A. FIG. 26D illustrates the complementarity of the nucleotide sequence of BCR BINDING SITE, designated SEQ ID:79766, to the nucleotide sequence of GAM26 RNA of FIG. 26A, designated SEQ ID:20604.

[0451] An additional function of GAM26 is therefore inhibition of breakpoint cluster region (BCR), a gene which encodes a Protein that is a serine/threonine kinase that involves in the t(9;22) translocation (Philadelphia chromosome) and is associated with chronic myeloid leukemia (cml), acute myeloid leukemia (aml), acute lymphoblastic leukemia (all). Accordingly, utilities of GAM26 include diagnosis and treatment of the abovementioned diseases and clinical conditions. The function and utilities of BCR have been established by previous studies, as described hereinabove with reference to FIG. 26D.

[0452] Referring now to BCR BINDING SITE. breakpoint cluster region (BCR) is a target gene of GAM26, corresponding to GAM26-TARGET GENE of FIG. 26A. BCR BINDING SITE is a binding site found in an untranslated region of BCR, corresponding to BINDING SITE of FIG. 26A. FIG. 26D illustrates the complementarity of the nucleotide sequence of BCR BINDING SITE, designated SEQ ID:79766, to the nucleotide sequence of GAM26 RNA of FIG. 26A, designated SEQ ID:20604.

[0453] A further function of GAM26 is therefore inhibition of breakpoint cluster region (BCR), a gene which encodes a Protein that is a serine/threonine kinase that involves in the t(9;22) translocation (Philadelphia chromosome) and is associated with chronic myeloid leukemia (cml), acute myeloid leukemia (aml), acute lymphoblastic leukemia (all). Accordingly, utilities of GAM26 include diagnosis and treatment of the abovementioned diseases and clinical conditions. The function and utilities of BCR have been established by previous studies, as described hereinabove with reference to FIG. 26D.

[0454] Reference is now made to ZNF6 BINDING SITE. zinc finger protein 6 (CMPX1) (ZNF6) is a target gene of GAM26, corresponding to GAM26-TARGET GENE of FIG. 26A. ZNF6 BINDING SITE is a binding site found in an untranslated region of ZNF6, corresponding to BINDING SITE of FIG. 26A. FIG. 26D illustrates the complementarity of the nucleotide sequence of ZNF6 BINDING SITE, designated SEQ ID:79766, to the nucleotide sequence of GAM26 RNA of FIG. 26A, designated SEQ ID:20604.

[0455] Yet a further function of GAM26 is therefore inhibition of zinc finger protein 6 (CMPX1) (ZNF6), a gene which encodes a Protein that is probably a transcriptional activator. Accordingly, utilities of GAM26 include diagnosis and treatment of the abovementioned diseases and clinical conditions.

[0456] The function of ZNF6 has been established by previous studies. See 194520. This gene was originally called CMPX1 and later ZNF6 by the Human Gene Mapping Workshop nomenclature committee. Lloyd et al. (1991) mapped the ZNF6 gene to the region in the proximal long arm of the X chromosome that shows homology to a region of the Y chromosome. It was mapped to Xq21.1-q21.3 by in situ hybridization, analysis of somatic cell hybrids, and study of males carrying deleted X chromosomes. The ZNF6 gene is highly conserved across species. Dosage in male and female mice indicated that it is also X-linked in that species. ZFX (314980), ZFY, and ZNF6 may be derived from a common ancestral gene.

[0457] Full details of the abovementioned studies are described in the following publications, the disclosure of which are hereby incorporated by reference:

[0458] Lloyd, S. L.; Sargent, C. A.; Chalmers, J.; Lim, E.; Habeebu, S. S. M.; Affara, N. A.: An X-linked zinc finger gene mapping to Xq21.1-q21.3 closely related to ZFX and ZFY: possible origins from a common ancestral gene. Nucleic Acids Res. 19: 4835-4841, 1991.

[0459] Further studies establishing the function and utilities of ZNF6 are found in John Hopkins OMIM database record ID 314990, and in references numbered 268 listed hereinbelow.

[0460] Reference is now made to BCRP2 BINDING SITE. Breakpoint cluster region protein, uterine leiomyo (BCRP2) is a target gene of GAM26, corresponding to GAM26-TARGET GENE of FIG. 26A. BCRP2 BINDING SITE is a binding site found in an untranslated region of BCRP2, corresponding to BINDING SITE of FIG. 26A. FIG. 26D illustrates the complementarity of the nucleotide sequence of BCRP2 BINDING SITE, designated SEQ ID:79919, to the nucleotide sequence of GAM26 RNA of FIG. 26A, designated SEQ ID:20604.

[0461] Another function of GAM26 is therefore inhibition of Breakpoint cluster region protein, uterine leiomyo (BCRP2), a gene which encodes a Protein that accelerates osteoblast differentiation. Accordingly, utilities of GAM26 include diagnosis and treatment of the abovementioned diseases and clinical conditions.

[0462] The function of BCRP2 has been established by previous studies. In a t(12;14) breakpoint cluster region, Lynch et al. (1998) identified 4 expressed genes: REC2 (602948), cytoskeletal alpha-actinin (102575), D14S1460E (BCRP1), and D14S1461E (BCRP2). All map to the 14q24.1-q24.2 region. Northern blot analysis revealed BCRP2 expression in all human tissues tested.

[0463] Full details of the abovementioned studies are described in the following publications, the disclosure of which are hereby incorporated by reference:

[0464] ynch, R. A.; Piper, M.; Bankier, A.; Bhugra, B.; Surti, U.; Liu, J.; Buckler, A.; Dear, P. H.; Menon, A. G.: Genomic and functional map of the chromosome 14 t(12;14) breakpoint cluster region in uterine leiomyoma. Genomics 52: 17-26, 1998.

[0465] Further studies establishing the function and utilities of BCRP2 are found in John Hopkins OMIM database record ID 603812, and in references numbered 269 listed hereinbelow.

[0466] Referring now to BCRP2 BINDING SITE. Breakpoint cluster region protein, uterine leiomyo (BCRP2) is a target gene of GAM26, corresponding to GAM26-TARGET GENE of FIG. 26A. BCRP2 BINDING SITE is a binding site found in an untranslated region of BCRP2, corresponding to BINDING SITE of FIG. 26A. FIG. 26D illustrates the complementarity of the nucleotide sequence of BCRP2 BINDING SITE, designated SEQ ID:79941, to the nucleotide sequence of GAM26 RNA of FIG. 26A, designated SEQ ID:20604.

[0467] Yet another function of GAM26 is therefore inhibition of Breakpoint cluster region protein, uterine leiomyo (BCRP2), a gene which encodes a Protein that accelerates osteoblast differentiation. Accordingly, utilities of GAM26 include diagnosis and treatment of the abovementioned diseases and clinical conditions. The function and utilities of BCRP2 have been established by previous studies, as described hereinabove with reference to FIG. 26D.

[0468] Reference is now made to BSG BINDING SITE. basigin (OK blood group) (BSG) is a target gene of GAM26, corresponding to GAM26-TARGET GENE of FIG. 26A. BSG BINDING SITE is a binding site found in an untranslated region of BSG, corresponding to BINDING SITE of FIG. 26A. FIG. 26D illustrates the complementarity of the nucleotide sequence of BSG BINDING SITE, designated SEQ ID:83983, to the nucleotide sequence of GAM26 RNA of FIG. 26A, designated SEQ ID:20604.

[0469] An additional function of GAM26 is therefore inhibition of basigin (OK blood group) (BSG), a gene which encodes a Protein that is a LEUKOCYTE ACTIVATION ANTIGEN and a member of the immunoglobulin superfamily. Accordingly, utilities of GAM26 include diagnosis and treatment of the abovementioned diseases and clinical conditions.

[0470] The function of BSG has been established by previous studies. Basigin is a member of the immunoglobulin superfamily, with a structure related to the putative primordial form of the family. It was cloned as a carrier of an oncodevelopmental carbohydrate marker expressed in teratocarcinoma stem cells. It is expressed broadly in both embryos and adults (4,5:Miyauchi et al., 1990, 1991; Kanekura et al., 1991). As members of the immunoglobulin superfamily play fundamental roles in intercellular recognition involved in various immunologic phenomena, differentiation, and development, basigin is thought also to play a role in intercellular recognition.

[0471] Animal model experiments lend further support to the function of BSG. Naruhashi et al. (1997) generated mice deficient in basigin by targeted disruption. Bsg −/− mice showed worse performance than their wildtype and heterozygous littermates in the Y-maze task, which assesses short-term memory, and in the water-finding task, which examines latent learning, without any motor dysfunction. Moreover, the mutant mice showed less acclimation in the habituation task compared with the wildtype mice. The mutant mice were also more sensitive to electric foot shock. Naruhashi et al. (1997) found these findings consistent with the expression profile of basigin in the central nervous system and suggested that basigin may play an important role in learning and memory as well as in sensory functions

[0472] It is appreciated that the abovementioned animal model for BSG is acknowledged by those skilled in the art as a scientifically valid animal model, as can be further appreciated from the publications sited hereinbelow.

[0473] Full details of the abovementioned studies are described in the following publications, the disclosure of which are hereby incorporated by reference:

[0474] Kanekura, T.; Miyauchi, T.; Tashiro, M.; Muramatsu, T.: Basigin, a new member of the immunoglobulin superfamily: genes in different mammalian species, glycosylation changes in the molecule from adult organs and possible variation in the N-terminal sequences. Cell Struct. Funct. 16: 23-30, 1991. PubMed ID: 2032306 6. Naruhashi, K.; Kadomatsu, K.; Igakura, T.; Fan, Q.-W.; Kuno, N.; Muramatsu, H.; Miyauchi, T.; Hasegawa, T.; Itoh, A.; Muramatsu, T.; Nabeshima, T.: Abnormalities of sensory and memory functions in mice lacking Bsg gene. Biochem. Biophsy. Res. Commun. 236: 733-737, 1997.

[0475] Further studies establishing the function and utilities of BSG are found in John Hopkins OMIM database record ID 109480, and in references numbered 270-277 listed hereinbelow.

[0476] Reference is now made to BSN BINDING SITE. bassoon (presynaptic cytomatrix protein) (BSN) is a target gene of GAM26, corresponding to GAM26-TARGET GENE of FIG. 26A. BSN BINDING SITE is a binding site found in an untranslated region of BSN, corresponding to BINDING SITE of FIG. 26A. FIG. 26D illustrates the complementarity of the nucleotide sequence of BSN BINDING SITE, designated SEQ ID:84199, to the nucleotide sequence of GAM26 RNA of FIG. 26A, designated SEQ ID:20604.

[0477] A further function of GAM26 is therefore inhibition of bassoon (presynaptic cytomatrix protein) (BSN), a gene which encodes a Protein that may be involved in cytomatrix organization at the site of neurotransmitter release and is associated with Multiple system atrophy (MSA). Accordingly, utilities of GAM26 include diagnosis and treatment of the abovementioned diseases and clinical conditions.

[0478] The function of BSN has been established by previous studies. Both the presynaptic terminal and the postsynaptic compartment of neuronal synapses comprise a highly specialized cytoskeleton underlying the synaptic membranes. The presynaptic nerve terminal is the principal site of regulated neurotransmitter release. The active zone is the region of the presynaptic plasmalemma over which synaptic vesicles dock, fuse, and release neurotransmitter. Piccolo (PCLO; 604918), a 420-kD protein, is 1 component of the presynaptic cytomatrix. Tom Dieck et al. (1998) isolated a large (greater than 400 kD) protein in mouse that is also found in the presynaptic compartments of rat brain synapses. They designated the protein Bassoon because it, along with Piccolo, is part of the ensemble of presynaptic proteins that are involved in orchestrating events at the nerve terminal. Bassoon is found in axon terminals of hippocampal neurons where it is highly concentrated in the vicinity of the active zone. Piccolo has a similar distribution and colocalizes with Bassoon in cultured hippocampal cells. Tom Dieck et al. (1998) suggested that Bassoon may be involved in cytomatrix organization at the site of neurotransmitter release Multiple system atrophy (MSA) is a sporadic progressive neurodegenerative disease. By differential hybridization to high-density cDNA filters, Hashida et al. (1998) identified human frontal lobe cDNAs with altered expression patterns in MSA patients. One partial cDNA whose expression was elevated 2-fold in MSA cerebella encoded a protein that the authors designated ZNF231 (zinc finger protein-231). By screening additional libraries with the partial cDNA, they assembled a full-length ZNF231 cDNA. The predicted 3,926-amino acid protein contains 2 glycine-proline dipeptide repeats, a pair of homologous C8 double zinc finger motifs, a leucine zipper motif, an SH3 domain-binding motif, 2 nuclear targeting sequences, 2 glutamine-rich domains, and a histidine-rich domain. Northern blot analysis of rat tissues indicated that the ZNF231 gene was expressed as a 16-kb mRNA specifically in brain. By RT-PCR of human brain cell lines and tissue, Hashida et al. (1998) determined that ZNF231 was expressed in the cerebellum and in a neuroblastoma cell line, but not in the white matter. Ishikawa et al. (1997) recovered a ZNF231 cDNA, designated KIAA0434, as 1 of 78 brain cDNAs that may encode large proteins. Gundelfinger (1999) stated that ZNF231 is the human homolog of Bassoon

[0479] Full details of the abovementioned studies are described in the following publications, the disclosure of which are hereby incorporated by reference:

[0480] om Dieck, S.; Sanmarti-Vila, L.; Langnaese, K.; Richter, K.; Kindler, S.; Soyke, A.; Wex, H.; Smalla, K.-H.; Kampf, U.; Franzer, J.-T.; Stumm, M.; Garner, C. C.; Gundelfinger, E. D.: Bassoon, a novel zinc-finger CAG/glutamine-repeat protein selectively localized at the active zone of presynaptic nerve terminals. J. Cell Biol. 142: 499-509, 1998. PubMed ID: 9679147 2. Hashida, H.; Goto, J.; Zhao, N.; Takahashi, N.; Hirai, M.; Kanazawa, I.; Sakaki, Y.: Cloning and mapping of ZNF231, a novel brain-specific gene encoding neuronal double zinc finger protein whose expression is enhanced in a neurodegenerative disorder, multiple system atrophy (MSA). Genomics 54: 50-58, 1998.

[0481] Further studies establishing the function and utilities of BSN are found in John Hopkins OMIM database record ID 604020, and in references numbered 278-282 listed hereinbelow.

[0482] Reference is now made to BTG3 BINDING SITE. BTG family, member 3 (BTG3) is a target gene of GAM26, corresponding to GAM26-TARGET GENE of FIG. 26A. BTG3 BINDING SITE is a binding site found in an untranslated region of BTG3, corresponding to BINDING SITE of FIG. 26A. FIG. 26D illustrates the complementarity of the nucleotide sequence of BTG3 BINDING SITE, designated SEQ ID:84854, to the nucleotide sequence of GAM26 RNA of FIG. 26A, designated SEQ ID:20604.

[0483] Yet a further function of GAM26 is therefore inhibition of BTG family, member 3 (BTG3), a gene which encodes a Protein that may inhibit cell cycle progression from the g0/g1 to s phase. Accordingly, utilities of GAM26 include diagnosis and treatment of the abovementioned diseases and clinical conditions.

[0484] The function of BTG3 has been established by previous studies. Using the RT-PCR-mediated cloning procedure, Yoshida et al. (1998) identified BTG3, a novel member of the PC3/BTG/TOB family of growth inhibitory genes. They obtained full-length sequences of the human and mouse cDNAs by screening a Daudi cell cDNA library and a testis cDNA library, respectively. The human BTG3 cDNA, which the authors called ANA, encodes a deduced 252-amino acid protein that shares 93% sequence identity with the mouse protein. Northern blot analysis detected a 1.5-kb transcript in various human tissues, with relatively high expression in testis, prostate, ovary, thymus, and lung, and low expression in skeletal muscle and spleen. Further analysis in mouse revealed that BTG3 expression was high in the ventricular zone of the developing central nervous system. Overexpression of BTG3 impaired serum-induced cell cycle progression from the G0/G1 to S phase.

[0485] Full details of the abovementioned studies are described in the following publications, the disclosure of which are hereby incorporated by reference:

[0486] oshida, Y.; Matsuda, S.; Ikematsu, N.; Kawamura-Tsuzuku, J.; Inazawa, J.; Umemori, H.; Yamamoto, T.: ANA, a novel member of Tob/BTG1 family, is expressed in the ventricular zone of the developing central nervous system. Oncogene 16: 2687-2693, 1998.

[0487] Further studies establishing the function and utilities of BTG3 are found in John Hopkins OMIM database record ID 605674, and in references numbered 283 listed hereinbelow.

[0488] Reference is now made to CHS1 BINDING SITE. Chediak-Higashi syndrome 1 (CHS1) is a target gene of GAM26, corresponding to GAM26-TARGET GENE of FIG. 26A. CHS1 BINDING SITE is a binding site found in an untranslated region of CHS1, corresponding to BINDING SITE of FIG. 26A. FIG. 26D illustrates the complementarity of the nucleotide sequence of CHS1 BINDING SITE, designated SEQ ID:84854, to the nucleotide sequence of GAM26 RNA of FIG. 26A, designated SEQ ID:20604.

[0489] Another function of GAM26 is therefore inhibition of Chediak-Higashi syndrome 1 (CHS1), a gene which encodes a Protein that is associated with chediak-Higashi syndrome. Accordingly, utilities of GAM26 include diagnosis and treatment of the abovementioned diseases and clinical conditions.

[0490] The function of CHS1 has been established by previous studies. Barbosa et al. (1997) identified novel mutations within the region of the coding domain common to both CHS1 isoforms in 3 CHS patients: C-to-T transitions that generated stop codons (R50X; 606897.0006 and Q1029X; 606897.0007) were found in 2 patients, and a novel frameshift mutation (deletion of nucleotides 3073 and 3074 of the coding domain) was found in a third. Northern blots of lymphoblastoid mRNA from CHS patients revealed loss of the largest transcript (approximately 13.5 kb) in 2 of 7 CHS patients, while the small mRNA was undiminished in abundance. These results suggested that the small isoform alone cannot complement Chediak-Higashi syndrome. All beige and CHS1 mutations that had been identified were predicted to result in either truncated or absent proteins. Although Perou et al. (1996) and Barbosa et al. (1996) reported identification of the ‘beige’ gene, the 2 cDNAs were quite different. Nagle et al. (1996) described the sequence of a human cDNA homologous to mouse ‘beige,’ identified pathologic mutations in patients with Chediak-Higashi syndrome, and clarified the discrepancies of the previous reports of sequence. Analysis of the CHS1 polypeptide demonstrated that its modular architecture is similar to that of the yeast vacuolar sorting protein VPS15. Nagle et al. (1996) screened human cDNA libraries with mouse ‘beige’ probes to yield the human ‘beige’ cDNA homolog, and found 87.9% amino acid identity between the 2 sequences. The predicted human protein comprises 3,801 amino acids, with a molecular mass of approximately 43 kD. Barbosa et al. (1997) reported the sequences of 2 major mRNA isoforms of the CHS1 gene in human and mouse. These isoforms differ both in size and in sequence at the 3-prime end of their coding domains, with a small isoform (approximately 5.8 kb) arising from incomplete splicing and reading through an intron. These mRNAs also differ in tissue distribution of transcription and in predicted biologic properties.

[0491] Full details of the abovementioned studies are described in the following publications, the disclosure of which are hereby incorporated by reference:

[0492] arim, M. A.; Nagle, D. L.; Kandil, H. H.; Burger, J.; Moore, K. J.; Spritz, R. A.: Mutations in the Chediak-Higashi syndrome gene (CHS1) indicate requirement for the complete 3801 amino acid CHS protein. Hum. Molec. Genet. 6: 1087-1089, 1997. PubMed ID: 9215679 1. Barbosa, M. D. F. S.; Barrat, F. J.; Tchernev, V. T.; Nguyen, Q. A.; Mishra, V. S.; Colman, S. D.; Pastural, E.; Dufourcq-Lagelouse, R.; Fischer, A.; Holcombe, R. F.; Wallace, M. R.; Brandt, S. J.; de Saint Basile, G.; Kingsmore S. F.: Identification of mutations in two major mRNA isoforms of the Chediak-Higashi syndrome gene in human and mouse. Hum. Molec. Genet. 6: 1091-1098, 1997.

[0493] Further studies establishing the function and utilities of CHS1 are found in John Hopkins OMIM database record ID 606897, and in references numbered 284-296 listed hereinbelow.

[0494] Referring now to BTG3 BINDING SITE. BTG family, member 3 (BTG3) is a target gene of GAM26, corresponding to GAM26-TARGET GENE of FIG. 26A. BTG3 BINDING SITE is a binding site found in an untranslated region of BTG3, corresponding to BINDING SITE of FIG. 26A. FIG. 26D illustrates the complementarity of the nucleotide sequence of BTG3 BINDING SITE, designated SEQ ID:84863, to the nucleotide sequence of GAM26 RNA of FIG. 26A, designated SEQ ID:20604.

[0495] Yet another function of GAM26 is therefore inhibition of BTG family, member 3 (BTG3), a gene which encodes a Protein that may inhibit cell cycle progression from the g0/g1 to s phase. Accordingly, utilities of GAM26 include diagnosis and treatment of the abovementioned diseases and clinical conditions. The function and utilities of BTG3 have been established by previous studies, as described hereinabove with reference to FIG. 26D.

[0496] Reference is now made to HIRA BINDING SITE. HIR (histone cell cycle regulation defective, S. cerevisiae) homolog A (HIRA) is a target gene of GAM26, corresponding to GAM26-TARGET GENE of FIG. 26A. HIRA BINDING SITE is a binding site found in an untranslated region of HIRA, corresponding to BINDING SITE of FIG. 26A. FIG. 26D illustrates the complementarity of the nucleotide sequence of HIRA BINDING SITE, designated SEQ ID:85041, to the nucleotide sequence of GAM26 RNA of FIG. 26A, designated SEQ ID:20604.

[0497] An additional function of GAM26 is therefore inhibition of HIR (histone cell cycle regulation defective, S. cerevisiae) homolog A (HIRA), a gene which encodes a transcripition factor that could have a part in mechanisms of transcriptional regulation similar to that played by yeast hir1 and hir2 together. and is associated with DiGeorge syndrome. Accordingly, utilities of GAM26 include diagnosis and treatment of the abovementioned diseases and clinical conditions.

[0498] The function of HIRA has been established by previous studies. The human TUPLE1 gene encodes a putative transcription regulator with a sequence similar to that of the yeast TUP1 gene (Halford et al., 1993). The protein product of the TUPLE1 gene contains WD40 domains, motifs thought to be involved in protein-protein interactions. Halford et al. (1993) demonstrated that the TUPLE1 gene maps to chromosome 22 and to the shortest region of deletion overlap in a series of over 100 patients with the DiGeorge syndrome (DGS; 188400), velocardiofacial syndrome (VCFS; 192430), or a related disorder. It is expressed in a range of fetal tissues. Halford et al. (1993) cloned the murine Tuple1 gene and showed that it has strong sequence similarity to the human gene. Since TUPLE1 is a candidate gene for DGS through the mechanism of haploinsufficiency and it might be possible to produce models of this disorder by creating mutations in the mouse gene, Mattei et al. (1994) mapped the gene to mouse chromosome 16 by isotopic in situ hybridization. The experiments were carried out using metaphase spreads from a WMP male mouse in which all of the autosomes, except 19, were in the form of metacentric Robertsonian translocations. In the human, TUPLE1 is centromeric to COMT (116790), which in turn is centromeric to IGLC1 (147220); all of these expressed sequences map to mouse chromosome 16. Magnaghi et al. (1998) reported an interaction between HIRA and the transcription factor PAX3 (606597). PAX3 haploinsufficiency results in the mouse ‘splotch’ and human Waardenburg syndrome (see 193500) phenotypes. Mice homozygous for PAX3 mutations die in utero with a phenocopy of DiGeorge syndrome, or neonatally with neural tube defects. HIRA was also found to interact with core histones. Thus, altered stoichiometry of complexes containing HIRA may be important for the development of structures affected in Waardenburg syndrome and DiGeorge syndrome.

[0499] Full details of the abovementioned studies are described in the following publications, the disclosure of which are hereby incorporated by reference:

[0500] alford, S.; Wilson, D. I.; Daw, S.C. M.; Roberts, C.; Wadey, R.; Kamath, S.; Wickremasinghe, A.; Burn, J.; Goodship, J.; Mattei, M.-G.; Moorman, A. F. M.; Scambler, P. J.: Isolation of a gene expressed during early embryogenesis from the region of 22q11 commonly deleted in DiGeorge syndrome. Hum. Molec. Genet. 2: 1577-1582, 1993. PubMed ID: 8268909 5. Magnaghi, P.; Roberts, C.; Lorain, S.; Lipinski, M.; Scambler, P. J.: HIRA, a mammalian homologue of Saccharomyces cerevisiae transcriptional co-repressors, interacts with Pax3. Nature Genet. 20: 74-77, 1998.

[0501] Further studies establishing the function and utilities of HIRA are found in John Hopkins OMIM database record ID 600237, and in references numbered 297-304 listed hereinbelow.

[0502] Reference is now made to CACNA1A BINDING SITE. calcium channel, voltage-dependent, P/Q type, alpha 1A subunit (CACNA1A) is a target gene of GAM26, corresponding to GAM26-TARGET GENE of FIG. 26A. CACNA1A BINDING SITE is a binding site found in an untranslated region of CACNA1A, corresponding to BINDING SITE of FIG. 26A. FIG. 26D illustrates the complementarity of the nucleotide sequence of CACNA1A BINDING SITE, designated SEQ ID:87774, to the nucleotide sequence of GAM26 RNA of FIG. 26A, designated SEQ ID:20604.

[0503] A further function of GAM26 is therefore inhibition of calcium channel, voltage-dependent, P/Q type, alpha 1A subunit (CACNA1A), a gene which encodes a Protein that is associated with episodic ataxia type 2, familial hemiplegic migraine, spinocerebellar ataxia type 6, and idiopathic generalized epilepsy, . . . Accordingly, utilities of GAM26 include diagnosis and treatment of the abovementioned diseases and clinical conditions.

[0504] The function of CACNA1A has been established by previous studies. Ca(2+) currents have been described on the basis of their biophysical and pharmacologic properties and include L-, N-, T-, P-, Q-, and R-types. The distinctive properties of these Ca(2+) channel types are related primarily to the expression of a variety of alpha-1 isoforms (Dunlap et al., 1995). The alpha-1A isoform is abundantly expressed in neuronal tissue and corresponds to the P/Q Ca(2+) channel type. The B and E isoforms are also expressed in neuronal tissue and correspond to the N-type and R-type of Ca(2+) channels, respectively (Lehmann-Horn and Jurkat-Rott, 1999). The genes encoding the alpha-1A, B, and E isoforms are symbolized CACNL1A4 or CACNA1A, CACNL1A5 (601012), and CACNL1A6 (601013) and are located on 19p13, 9q34 and 1q25-q31, respectively (Diriong et al., 1995).

[0505] Animal model experiments lend further support to the function of CACNA1A. By a positional cloning approach, Fletcher et al. (1996) identified an alpha-1 voltage-sensitive Ca(2+) channel gene that is mutated in the ‘tottering’ mutations in tg and tg(1a) mice. The tg mutation is a well-studied mutation that gives rise to behavioral arrest seizures, which may be compared to human absence (or petit mal) epilepsy (600131) and cerebellar ataxia. The tottering phenotype also includes motor seizures. Fletcher et al. (1996) noted that the tg leaner mice, tg(1a), suffer from absence seizures but do not have motor seizures. These mice are severely ataxic. Fletcher et al. (1996) mapped the tg phenotype to mouse chromosome 8 in the vicinity of the Junb gene (165161). Fletcher et al. (1996) evaluated the Ca(2+) channel gene as a candidate for the tg locus using RT-PCR and sequencing. In the tg(1a) mice they demonstrated a single G-to-A change in a splice donor site in the portion of the mouse gene encoding the putative regulatory C-terminal domain of the channel. This mutation resulted in several aberrant mRNA species, including insertion of 98 nucleotides at position 5901/2 and deletion of nucleotides 5763-5901, either of which altered the reading frame 3-prime to the mutations. The tg transcript contained a C-to-A change at position 1802 relative to the control sequence. Fletcher et al. (1996) reported that this alteration leads to a nonconservative proline-to-leucine amino acid substitution that may affect the pore function of the Ca(2+) channel. Fletcher et al. (1996) noted that this is the first gene identified as being involved in absence epilepsy.

[0506] It is appreciated that the abovementioned animal model for CACNA1A is acknowledged by those skilled in the art as a scientifically valid animal model, as can be further appreciated from the publications sited hereinbelow.

[0507] Full details of the abovementioned studies are described in the following publications, the disclosure of which are hereby incorporated by reference:

[0508] unlap, K.; Luebke, J. I.; Turner, T. J.: Exocytotic Ca(2+) channels in mammalian central neurons. Trends Neurosci. 18: 89-98, 1995. PubMed ID: 7537420 8. Fletcher, C. F.; Lutz, C. M.; O'Sullivan, T. N.; Shaughnessy, J. D, Jr.; Hawkes, R.; Frankel, W. N.; Copeland, N. G.; Jenkins, N. A.: Absence epilepsy in tottering mutant mice is associated with calcium channel defects. Cell 87: 607-617, 1996.

[0509] Further studies establishing the function and utilities of CACNA1A are found in John Hopkins OMIM database record ID 601011, and in references numbered 305-335 listed hereinbelow.

[0510] Reference is now made to CALM1 BINDING SITE. calmodulin 1 (phosphorylase kinase, delta) (CALM1) is a target gene of GAM26, corresponding to GAM26-TARGET GENE of FIG. 26A. CALM1 BINDING SITE is a binding site found in an untranslated region of CALM1, corresponding to BINDING SITE of FIG. 26A. FIG. 26D illustrates the complementarity of the nucleotide sequence of CALM1 BINDING SITE, designated SEQ ID:89443, to the nucleotide sequence of GAM26 RNA of FIG. 26A, designated SEQ ID:20604.

[0511] Yet a further function of GAM26 is therefore inhibition of calmodulin 1 (phosphorylase kinase, delta) (CALM1), a gene which encodes a Protein that plays roles in growth and the cell cycle as well as in signal transduction and the synthesis and release of neurotransmitters. Accordingly, utilities of GAM26 include diagnosis and treatment of the abovementioned diseases and clinical conditions.

[0512] The function of CALM1 has been established by previous studies. Calmodulin is the archetype of the family of calcium-modulated proteins of which nearly 20 members have been found. They are identified by their occurrence in the cytosol or on membranes facing the cytosol and by a high affinity for calcium. Calmodulin contains 149 amino acids and has 4 calcium-binding domains. Its functions include roles in growth and the cell cycle as well as in signal transduction and the synthesis and release of neurotransmitters. To determine how calcium/calmodulin activates calcium/calmodulin-dependent protein kinase I (CAMK1; 604998), Chin et al. (1997) characterized CAMK1 activation by calmodulin mutants with substitutions at hydrophobic residues. They found that CAMK1 activity is dependent on met124 within the C-terminal domain of calmodulin as well as on N-terminal hydrophobic residues of calmodulin.

[0513] Full details of the abovementioned studies are described in the following publications, the disclosure of which are hereby incorporated by reference:

[0514] hyner, J. A.; Ottiger, M.; Wicki, R.; Greenwood, T. M.; Strehler, E. E.: Structure of the human CALM1 calmodulin gene and identification of two CALM1-related pseudogenes CALM1P1 and CALM1P2. Europ. J. Biochem. 225: 71-82, 1994. PubMed ID: 7925473 2. Chin, D.; Winkler, K. E.; Means, A. R.: Characterization of substrate phosphorylation and use of calmodulin mutants to address implications from the enzyme crystal structure of calmodulin-dependent protein kinase I. J. Biol. Chem. 272: 31235-31240, 1997.

[0515] Further studies establishing the function and utilities of CALM1 are found in John Hopkins OMIM database record ID 114180, and in references numbered 336-347 listed hereinbelow.

[0516] Referring now to CALM1 BINDING SITE. calmodulin 1 (phosphorylase kinase, delta) (CALM1) is a target gene of GAM26, corresponding to GAM26-TARGET GENE of FIG. 26A. CALM1 BINDING SITE is a binding site found in an untranslated region of CALM1, corresponding to BINDING SITE of FIG. 26A. FIG. 26D illustrates the complementarity of the nucleotide sequence of CALM1 BINDING SITE, designated SEQ ID:89450, to the nucleotide sequence of GAM26 RNA of FIG. 26A, designated SEQ ID:20604.

[0517] Another function of GAM26 is therefore inhibition of calmodulin 1 (phosphorylase kinase, delta) (CALM1), a gene which encodes a Protein that plays roles in growth and the cell cycle as well as in signal transduction and the synthesis and release of neurotransmitters. Accordingly, utilities of GAM26 include diagnosis and treatment of the abovementioned diseases and clinical conditions. The function and utilities of CALM1 have been established by previous studies, as described hereinabove with reference to FIG. 26D.

[0518] Referring now to CACNA1A BINDING SITE. calcium channel, voltage-dependent, P/Q type, alpha 1A subunit (CACNA1A) is a target gene of GAM26, corresponding to GAM26-TARGET GENE of FIG. 26A. CACNA1A BINDING SITE is a binding site found in an untranslated region of CACNA1A, corresponding to BINDING SITE of FIG. 26A. FIG. 26D illustrates the complementarity of the nucleotide sequence of CACNA1A BINDING SITE, designated SEQ ID:94853, to the nucleotide sequence of GAM26 RNA of FIG. 26A, designated SEQ ID:20604.

[0519] Yet another function of GAM26 is therefore inhibition of calcium channel, voltage-dependent, P/Q type, alpha 1A subunit (CACNA1A), a gene which encodes a Protein that is associated with episodic ataxia type 2, familial hemiplegic migraine, spinocerebellar ataxia type 6, and idiopathic generalized epilepsy, . . . Accordingly, utilities of GAM26 include diagnosis and treatment of the abovementioned diseases and clinical conditions. The function and utilities of CACNA1A have been established by previous studies, as described hereinabove with reference to FIG. 26D.

[0520] Reference is now made to CBL BINDING SITE. Cas-Br-M (murine) ecotropic retroviral transforming sequence (CBL) is a target gene of GAM26, corresponding to GAM26-TARGET GENE of FIG. 26A. CBL BINDING SITE is a binding site found in an untranslated region of CBL, corresponding to BINDING SITE of FIG. 26A. FIG. 26D illustrates the complementarity of the nucleotide sequence of CBL BINDING SITE, designated SEQ ID:94853, to the nucleotide sequence of GAM26 RNA of FIG. 26A, designated SEQ ID:20604.

[0521] An additional function of GAM26 is therefore inhibition of Cas-Br-M (murine) ecotropic retroviral transforming sequence (CBL), a gene which encodes a Protein that may modify receptor tyrosine kinase-mediated signal transduction. and is associated with B-lineage lymphomas. Accordingly, utilities of GAM26 include diagnosis and treatment of the abovementioned diseases and clinical conditions.

[0522] The function of CBL has been established by previous studies. Cas NS-1 is an acutely transforming murine retrovirus that induces pre-B and pro-B cell lymphomas. Molecular cloning showed that it was generated from the ecotropic Cas-Br-M virus by sequential recombinations with endogenous retroviral sequences and a cellular oncogene. Langdon et al. (1989) found that the oncogene sequence shows no homology with known oncogenes, but some similarity to the yeast transcriptional activator GCN4. A 100-kD gag-cbl fusion protein, with no detectable kinase activity, is responsible for the cellular transformation. The cellular homolog of v-cbl, present in mouse and human DNA, is expressed in a range of hemopoietic lineages. Wei et al. (1990) mapped the CBL2 gene to 11q23.3-qter by molecular characterization of the breakpoints in 2 somatic cell hybrids. Savage et al. (1991) studied the relation of CBL2 to the breakpoints in malignancies with translocations involving chromosome 11. CBL2 was translocated from chromosome 11 to 4 in an acute leukemia cell line possessing a t(4;11)(q21;q23) and from chromosome 11 to 14 in a B-cell lymphoma with a t(11;14)(q23;q32). CBL2 remained on chromosome 11 in a Ewing sarcoma cell line (133450) with a t(11;22)(q23;q12). Other studies indicated that NCAM (116930) and the genes for the 3 subunits of CD3 were all proximal to the tightly clustered THY1 (188230), ETS1 (164720), and CBL2 in 11q23. Vulval induction during development of Caenorhabditis elegans is mediated by LET-23, a homolog of the mammalian epidermal growth factor receptor tyrosine kinase (131550). The sli-1 gene is a negative regulator of LET-23 and was shown by Yoon et al. (1995) to encode a protein similar to the mammalian protooncoprotein CBL2. The sli-1 and CBL2 proteins share approximately 55% amino acid identity over a stretch of 390 residues, which includes a C(3)HC(4) zinc-binding motif known as the RING finger, and multiple consensus binding sites for SRC homology 3 (SH3) domains. The authors stated that sli-1 and CBL2 may define a new class of proteins that modify receptor tyrosine kinase-mediated signal transduction.

[0523] Full details of the abovementioned studies are described in the following publications, the disclosure of which are hereby incorporated by reference:

[0524] avage, P. D.; Shapiro, M.; Langdon, W. Y.; Geurts van Kessel, A. D.; Seuanez, H. N.; Akao, Y.; Croce, C.; Morse, H. C., III; Kersey, J. H.: Relationship of the human protooncogene CBL2 on 11q23 to the t(4;11), t(11;22), and t(11;14) breakpoints. Cytogenet. Cell Genet. 56: 112-115, 1991. PubMed ID: 2013228 12. Yoon, C. H.; Lee, J.; Jongeward, G. D.; Sternberg, P. W.: Similarity of sli-1, a regulator of vulval development in C. elegans, to the mammalian proto-oncogene c-cbl. Science 269: 1102-1105, 1995.

[0525] Further studies establishing the function and utilities of CBL are found in John Hopkins OMIM database record ID 165360, and in references numbered 348-359 listed hereinbelow.

[0526] Referring now to CBL BINDING SITE. Cas-Br-M (murine) ecotropic retroviral transforming sequence (CBL) is a target gene of GAM26, corresponding to GAM26-TARGET GENE of FIG. 26A. CBL BINDING SITE is a binding site found in an untranslated region of CBL, corresponding to BINDING SITE of FIG. 26A. FIG. 26D illustrates the complementarity of the nucleotide sequence of CBL BINDING SITE, designated SEQ ID:94853, to the nucleotide sequence of GAM26 RNA of FIG. 26A, designated SEQ ID:20604.

[0527] A further function of GAM26 is therefore inhibition of Cas-Br-M (murine) ecotropic retroviral transforming sequence (CBL), a gene which encodes a Protein that may modify receptor tyrosine kinase-mediated signal transduction. and is associated with B-lineage lymphomas. Accordingly, utilities of GAM26 include diagnosis and treatment of the abovementioned diseases and clinical conditions. The function and utilities of CBL have been established by previous studies, as described hereinabove with reference to FIG. 26D.

[0528] Referring now to CBL BINDING SITE. Cas-Br-M (murine) ecotropic retroviral transforming sequence (CBL) is a target gene of GAM26, corresponding to GAM26-TARGET GENE of FIG. 26A. CBL BINDING SITE is a binding site found in an untranslated region of CBL, corresponding to BINDING SITE of FIG. 26A. FIG. 26D illustrates the complementarity of the nucleotide sequence of CBL BINDING SITE, designated SEQ ID:94853, to the nucleotide sequence of GAM26 RNA of FIG. 26A, designated SEQ ID:20604.

[0529] Yet a further function of GAM26 is therefore inhibition of Cas-Br-M (murine) ecotropic retroviral transforming sequence (CBL), a gene which encodes a Protein that may modify receptor tyrosine kinase-mediated signal transduction. and is associated with B-lineage lymphomas. Accordingly, utilities of GAM26 include diagnosis and treatment of the abovementioned diseases and clinical conditions. The function and utilities of CBL have been established by previous studies, as described hereinabove with reference to FIG. 26D.

[0530] Referring now to CBL BINDING SITE. Cas-Br-M (murine) ecotropic retroviral transforming sequence (CBL) is a target gene of GAM26, corresponding to GAM26-TARGET GENE of FIG. 26A. CBL BINDING SITE is a binding site found in an untranslated region of CBL, corresponding to BINDING SITE of FIG. 26A. FIG. 26D illustrates the complementarity of the nucleotide sequence of CBL BINDING SITE, designated SEQ ID:94853, to the nucleotide sequence of GAM26 RNA of FIG. 26A, designated SEQ ID:20604.

[0531] Another function of GAM26 is therefore inhibition of Cas-Br-M (murine) ecotropic retroviral transforming sequence (CBL), a gene which encodes a Protein that may modify receptor tyrosine kinase-mediated signal transduction. and is associated with B-lineage lymphomas. Accordingly, utilities of GAM26 include diagnosis and treatment of the abovementioned diseases and clinical conditions. The function and utilities of CBL have been established by previous studies, as described hereinabove with reference to FIG. 26D.

[0532] Reference is now made to FGF18 BINDING SITE. fibroblast growth factor 18 (FGF18) is a target gene of GAM26, corresponding to GAM26-TARGET GENE of FIG. 26A. FGF18 BINDING SITE is a binding site found in an untranslated region of FGF18, corresponding to BINDING SITE of FIG. 26A. FIG. 26D illustrates the complementarity of the nucleotide sequence of FGF18 BINDING SITE, designated SEQ ID:94853, to the nucleotide sequence of GAM26 RNA of FIG. 26A, designated SEQ ID:20604.

[0533] Yet another function of GAM26 is therefore inhibition of fibroblast growth factor 18 (FGF18), a gene which encodes a Protein that stimulates hepatic and intestinal proliferation. Accordingly, utilities of GAM26 include diagnosis and treatment of the abovementioned diseases and clinical conditions.

[0534] The function of FGF18 has been established by previous studies. The fibroblast growth factors (FGFs; e.g., FGF2; 134920) are a family of growth factors and oncogenes that contain a conserved, approximately 120-amino acid core. Individual FGFs play important roles in embryonic development, cell growth, morphogenesis, tissue repair, inflammation, angiogenesis, and tumor growth and invasion. Ohbayashi et al. (1998) isolated human, mouse, and rat cDNAs encoding a novel member of the FGF family, FGF18. The deduced 207-amino acid human and rat FGF18 proteins are 99% identical. FGF18 contains a typical hydrophobic signal sequence at its N terminus, and the authors demonstrated that recombinant rat Fgf18 can be efficiently secreted by High Five insect cells. Recombinant rat Fgf18 induced neurite outgrowth in PC12 cells. Northern blot analysis of rat adult tissues showed abundant expression of Fgf18 in lung but did not detect Fgf18 expression in other tissues. In rat 14.5- and 19.5-day embryos, in situ hybridization showed Fgf18 expression in several discrete regions. Independently, Hu et al. (1998) isolated human and mouse FGF18 cDNAs. Among known FGF family members, the FGF18 protein is most similar to FGF8 (600483) and FGF17 (603725), with human FGF18 showing 60% and 58% identity with human FGF8 and FGF17, respectively. The authors demonstrated that recombinant mouse Fgf18 is glycosylated and can stimulate proliferation of NIH 3T3 cells in vitro in a heparan sulfate-dependent manner. Northern blot analysis of mouse adult tissues showed highest Fgf18 expression in the lung and kidney, and in situ hybridization of mouse 15.5-day embryos detected Fgf18 transcripts primarily in the lung. However, injection of recombinant mouse Fgf18 into normal mice induced proliferation in a wide variety of tissues, with the liver and small intestine appearing to be the primary targets. Hu et al. (1998) showed that transgenic mice overexpressing Fgf18 in the liver exhibited an increase in liver weight and hepatocellular proliferation. By radiation hybrid analysis and FISH, Whitmore et al. (2000) mapped the FGF18 gene to chromosome 5q34.

[0535] Full details of the abovementioned studies are described in the following publications, the disclosure of which are hereby incorporated by reference:

[0536] hbayashi, N.; Hoshikawa, M.; Kimura, S.; Yamasaki, M.; Fukui, S.; Itoh, N.: Structure and expression of the mRNA encoding a novel fibroblast growth factor, FGF-18. J. Biol. Chem. 273: 18161-18164, 1998. PubMed ID: 9660775 3. Whitmore, T. E.; Maurer, M. F.; Sexson, S.; Raymond, F.; Conklin, D.; Deisher, T. A.: Assignment of fibroblast growth factor 18 (FGF18) to human chromosome 5q34 by use of radiation hybrid mapping and fluorescence in situ hybridization. Cytogenet. Cell Genet. 90: 231-233, 2000.

[0537] Further studies establishing the function and utilities of FGF18 are found in John Hopkins OMIM database record ID 603726, and in references numbered 360-362 listed hereinbelow.

[0538] Referring now to FGF18 BINDING SITE. fibroblast growth factor 18 (FGF18) is a target gene of GAM26, corresponding to GAM26-TARGET GENE of FIG. 26A. FGF18 BINDING SITE is a binding site found in an untranslated region of FGF18, corresponding to BINDING SITE of FIG. 26A. FIG. 26D illustrates the complementarity of the nucleotide sequence of FGF18 BINDING SITE, designated SEQ ID:94853, to the nucleotide sequence of GAM26 RNA of FIG. 26A, designated SEQ ID:20604.

[0539] An additional function of GAM26 is therefore inhibition of fibroblast growth factor 18 (FGF18), a gene which encodes a Protein that stimulates hepatic and intestinal proliferation. Accordingly, utilities of GAM26 include diagnosis and treatment of the abovementioned diseases and clinical conditions. The function and utilities of FGF18 have been established by previous studies, as described hereinabove with reference to FIG. 26D.

[0540] Reference is now made to FMR1 BINDING SITE. fragile X mental retardation 1 (FMR1) is a target gene of GAM26, corresponding to GAM26-TARGET GENE of FIG. 26A. FMR1 BINDING SITE is a binding site found in an untranslated region of FMR1, corresponding to BINDING SITE of FIG. 26A. FIG. 26D illustrates the complementarity of the nucleotide sequence of FMR1 BINDING SITE, designated SEQ ID:94853, to the nucleotide sequence of GAM26 RNA of FIG. 26A, designated SEQ ID:20604.

[0541] A further function of GAM26 is therefore inhibition of fragile X mental retardation 1 (FMR1), a gene which encodes a Protein that is associated with fragile x syndrome. Accordingly, utilities of GAM26 include diagnosis and treatment of the abovementioned diseases and clinical conditions.

[0542] The function of FMR1 has been established by previous studies. X-linked mental retardation associated with marXq28, or fragile X syndrome, is characterized by moderate to severe mental retardation, macroorchidism, large ears, prominent jaw, and high-pitched jocular speech. Expression is variable, with mental retardation being the most common feature. This phenotype is associated with mutations in the FMR1 gene. McCabe et al. (1999) summarized the proceedings of a workshop on the fragile X syndrome held in December 1998. Filippi et al. (1983) studied linkage with G6PD and colorblindness in 18 Sardinian pedigrees. In 6 informative pedigrees the fragile X syndrome showed close linkage with G6PD deficiency and deutan colorblindness. The maximum likelihood estimate of recombination was 6% with 90% fiducial limits between 2.5 and 19.5% and odds favoring linkage of 428:1. No hint of linkage of G6PD and the Renpenning form of X-linked mental retardation (309500) or other unspecified type of X-linked mental retardation was found. Patients with the Renpenning form not only lack the facial features and macroorchidism typical of the fragile X syndrome but also have microcephaly. Brown et al. (1988) performed a multilocus linkage analysis of the fragile X syndrome in 147 families using 4 flanking markers. As previously observed by Giannelli et al. (1987), significant variation in the recombination distance between F9 and FRAXA was found also in this group of families. Heterogeneity testing showed that 20% of the families had tight F9-FRAXA linkage, whereas 80% demonstrated loose linkage, with an average recombination distance of 0.35. On average, the multipoint distances found were DXS51-F9, 6.9%; F9-FRAXA, 22.4%; FRAXA-DXS52, 12.7%; and DXS52-DXS15, 2.2%. Thibodeau et al. (1988) also reported on linkage data between the fragile X locus and 4 polymorphic markers: DXS51, F9, DXS98, and DXS52. The markers were studied in 14 families with fragile X and 9 normal pedigrees from the CEPH collection. In this set of families, as has been previously observed, there was evidence for genetic heterogeneity between the fragile X locus and the F9 site. The observed recombination frequencies were as follows: DXS51—F9, 0%; F9-DXS52, 45%; DXS51-FRAXA, 15%; F9-FRAXA, 18%; DXS98-FRAXA, 36%; and DXS52-FRAXA, 15%. The authors proposed the following relative order for the 5 loci, based on multipoint linkage analysis: (DXS51, F9, DXS98)—FRAXA—DXS52. Laggerbauer et al. (2001) showed that FMR1 strongly inhibited translation of various mRNAs at nanomolar concentrations in both rabbit reticulocyte lysate and microinjected Xenopus laevis oocytes. The effect was specific for FMR1, since other proteins with similar RNA-binding domains, including the autosomal homologs of FMR1, FXR1, and FXR2, failed to suppress translation in the same concentration range. Initial studies addressing the underlying mechanism of inhibition suggested that FMR1 may inhibit the assembly of 80S ribosomes on the target mRNAs. A disease-causing substitution, ile304 to asn (I304N, 309550.0001), rendered FMR1 incapable of interfering with translation in both test systems, and severely impaired homooligomerization of FMR1. The failure of FMR1 I304N to suppress translation was not due to its reduced affinity for mRNA or its interacting proteins FXR1 and FXR2. The authors hypothesized that inhibition of translation may be a function of FMR1 in vivo, and that failure of mutant FMR1 protein to oligomerize may contribute to the pathophysiologic events leading to fragile X syndrome.

[0543] Animal model experiments lend further support to the function of FMR1. Zhang et al. (2001) developed a Drosophila model of fragile X syndrome using loss-of-function mutants and overexpression of the FMR1 homolog, Dfxr (Drosophila fragile X-related gene). Dfxr nulls displayed enlarged synaptic terminals, whereas neuronal overexpression resulted in fewer and larger synaptic boutons. Synaptic structural defects were accompanied by altered neurotransmission, with synapse type-specific regulation in central and peripheral synapses.

[0544] It is appreciated that the abovementioned animal model for FMR1 is acknowledged by those skilled in the art as a scientifically valid animal model, as can be further appreciated from the publications sited hereinbelow.

[0545] Full details of the abovementioned studies are described in the following publications, the disclosure of which are hereby incorporated by reference:

[0546] hang, Y. Q.; Bailey, A. M.; Matthies, H. J. G.; Renden, R. B.; Smith, M. A.; Speese, S. D.; Rubin, G. M.; Broadie, K.: Drosophila fragile X-related gene regulates the MAP1B homolog Futsch to control synaptic structure and function. Cell 107: 591-603, 2001. PubMed ID: 11733059 139. McCabe, E. R. B.; de la Cruz, F.; Clapp, K.: Workshop on Fragile X: future research directions. Am. J. Med. Genet. 85: 317-322, 1999.

[0547] Further studies establishing the function and utilities of FMR1 are found in John Hopkins OMIM database record ID 309550, and in references numbered 363-461 listed hereinbelow.

[0548] Referring now to FMR1 BINDING SITE. fragile X mental retardation 1 (FMR1) is a target gene of GAM26, corresponding to GAM26-TARGET GENE of FIG. 26A. FMR1 BINDING SITE is a binding site found in an untranslated region of FMR1, corresponding to BINDING SITE of FIG. 26A. FIG. 26D illustrates the complementarity of the nucleotide sequence of FMR1 BINDING SITE, designated SEQ ID:94853, to the nucleotide sequence of GAM26 RNA of FIG. 26A, designated SEQ ID:20604.

[0549] Yet a further function of GAM26 is therefore inhibition of fragile X mental retardation 1 (FMR1), a gene which encodes a Protein that is associated with fragile x syndrome. Accordingly, utilities of GAM26 include diagnosis and treatment of the abovementioned diseases and clinical conditions. The function and utilities of FMR1 have been established by previous studies, as described hereinabove with reference to FIG. 26D.

[0550] Referring now to FMR1 BINDING SITE. fragile X mental retardation 1 (FMR1) is a target gene of GAM26, corresponding to GAM26-TARGET GENE of FIG. 26A. FMR1 BINDING SITE is a binding site found in an untranslated region of FMR1, corresponding to BINDING SITE of FIG. 26A. FIG. 26D illustrates the complementarity of the nucleotide sequence of FMR1 BINDING SITE, designated SEQ ID:94853, to the nucleotide sequence of GAM26 RNA of FIG. 26A, designated SEQ ID:20604.

[0551] Another function of GAM26 is therefore inhibition of fragile X mental retardation 1 (FMR1), a gene which encodes a Protein that is associated with fragile x syndrome. Accordingly, utilities of GAM26 include diagnosis and treatment of the abovementioned diseases and clinical conditions. The function and utilities of FMR1 have been established by previous studies, as described hereinabove with reference to FIG. 26D.

[0552] Referring now to FMR1 BINDING SITE. fragile X mental retardation 1 (FMR1) is a target gene of GAM26, corresponding to GAM26-TARGET GENE of FIG. 26A. FMR1 BINDING SITE is a binding site found in an untranslated region of FMR1, corresponding to BINDING SITE of FIG. 26A. FIG. 26D illustrates the complementarity of the nucleotide sequence of FMR1 BINDING SITE, designated SEQ ID:94853, to the nucleotide sequence of GAM26 RNA of FIG. 26A, designated SEQ ID:20604.

[0553] Yet another function of GAM26 is therefore inhibition of fragile X mental retardation 1 (FMR1), a gene which encodes a Protein that is associated with fragile x syndrome. Accordingly, utilities of GAM26 include diagnosis and treatment of the abovementioned diseases and clinical conditions. The function and utilities of FMR1 have been established by previous studies, as described hereinabove with reference to FIG. 26D.

[0554] Referring now to FMR1 BINDING SITE. fragile X mental retardation 1 (FMR1) is a target gene of GAM26, corresponding to GAM26-TARGET GENE of FIG. 26A. FMR1 BINDING SITE is a binding site found in an untranslated region of FMR1, corresponding to BINDING SITE of FIG. 26A. FIG. 26D illustrates the complementarity of the nucleotide sequence of FMR1 BINDING SITE, designated SEQ ID:94853, to the nucleotide sequence of GAM26 RNA of FIG. 26A, designated SEQ ID:20604.

[0555] An additional function of GAM26 is therefore inhibition of fragile X mental retardation 1 (FMR1), a gene which encodes a Protein that is associated with fragile x syndrome. Accordingly, utilities of GAM26 include diagnosis and treatment of the abovementioned diseases and clinical conditions. The function and utilities of FMR1 have been established by previous studies, as described hereinabove with reference to FIG. 26D.

[0556] Referring now to FMR1 BINDING SITE. fragile X mental retardation 1 (FMR1) is a target gene of GAM26, corresponding to GAM26-TARGET GENE of FIG. 26A. FMR1 BINDING SITE is a binding site found in an untranslated region of FMR1, corresponding to BINDING SITE of FIG. 26A. FIG. 26D illustrates the complementarity of the nucleotide sequence of FMR1 BINDING SITE, designated SEQ ID:94853, to the nucleotide sequence of GAM26 RNA of FIG. 26A, designated SEQ ID:20604.

[0557] A further function of GAM26 is therefore inhibition of fragile X mental retardation 1 (FMR1), a gene which encodes a Protein that is associated with fragile x syndrome. Accordingly, utilities of GAM26 include diagnosis and treatment of the abovementioned diseases and clinical conditions. The function and utilities of FMR1 have been established by previous studies, as described hereinabove with reference to FIG. 26D.

[0558] Referring now to FMR1 BINDING SITE. fragile X mental retardation 1 (FMR1) is a target gene of GAM26, corresponding to GAM26-TARGET GENE of FIG. 26A. FMR1 BINDING SITE is a binding site found in an untranslated region of FMR1, corresponding to BINDING SITE of FIG. 26A. FIG. 26D illustrates the complementarity of the nucleotide sequence of FMR1 BINDING SITE, designated SEQ ID:94853, to the nucleotide sequence of GAM26 RNA of FIG. 26A, designated SEQ ID:20604.

[0559] Yet a further function of GAM26 is therefore inhibition of fragile X mental retardation 1 (FMR1), a gene which encodes a Protein that is associated with fragile x syndrome. Accordingly, utilities of GAM26 include diagnosis and treatment of the abovementioned diseases and clinical conditions. The function and utilities of FMR1 have been established by previous studies, as described hereinabove with reference to FIG. 26D.

[0560] Reference is now made to GSPT1 BINDING SITE. G1 to S phase transition 1 (GSPT1) is a target gene of GAM26, corresponding to GAM26-TARGET GENE of FIG. 26A. GSPT1 BINDING SITE is a binding site found in an untranslated region of GSPT1, corresponding to BINDING SITE of FIG. 26A. FIG. 26D illustrates the complementarity of the nucleotide sequence of GSPT1 BINDING SITE, designated SEQ ID:94853, to the nucleotide sequence of GAM26 RNA of FIG. 26A, designated SEQ ID:20604.

[0561] Another function of GAM26 is therefore inhibition of G1 to S phase transition 1 (GSPT1), a gene which encodes a Protein that involves in regulation of mammalian cell growth. Accordingly, utilities of GAM26 include diagnosis and treatment of the abovementioned diseases and clinical conditions.

[0562] The function of GSPT1 has been established by previous studies. Kikuchi et al. (1988) isolated a gene from a yeast genomic library that could complement a temperature-sensitive mutant of Saccharomyces cerevisiae. The gene, termed GST1, seemed to be essential for the G1-to-S phase transition in the yeast cell cycle. The gene product appeared to be a GTP-binding protein of molecular mass 76,565 Da, with 38% identity in amino acid sequence with the alpha subunit of elongation factor-1 (130590). Hoshino et al. (1989) cloned the human equivalent from a cDNA library. By nonradioactive in situ hybridization, Ozawa et al. (1992) mapped the GSPT1 gene, the human homolog of the yeast gene GST1-Hs, to human chromosome 16p13.1. Southern blot hybridization with a panel of human-rodent somatic cells confirmed the localization of the GSPT1 gene on chromosome 16 and also showed the existence of a homologous gene on the X chromosome. They pointed out that a breakpoint for nonrandom chromosome rearrangements has been found in the region of GSPT1 in patients with acute nonlymphocytic leukemia.

[0563] Full details of the abovementioned studies are described in the following publications, the disclosure of which are hereby incorporated by reference:

[0564] zawa, K.; Murakami, Y.; Eki, T.; Yokoyama, K.; Soeda, E.; Hoshino, S.; Ui, M.; Hanaoka, F.: Mapping of the human GSPT1 gene, a human homolog of the yeast GST1 gene, to chromosomal band 16p13.1. Somat. Cell Molec. Genet. 18: 189-194, 1992. PubMed ID: 1574740 1. Hoshino, S.; Miyazawa, H.; Enomoto, T.; Hanaoka, F.; Kikuchi, Y.; Kikuchi, A.; Ui, M.: A human homologue of the yeast GST1 gene codes for a GTP-binding protein and is expressed in a proliferation-dependent manner in mammalian cells. EMBO J. 8: 3807-3814, 1989.

[0565] Further studies establishing the function and utilities of GSPT1 are found in John Hopkins OMIM database record ID 139259, and in references numbered 462-464 listed hereinbelow.

[0566] Referring now to GSPT1 BINDING SITE. G1 to S phase transition 1 (GSPT1) is a target gene of GAM26, corresponding to GAM26-TARGET GENE of FIG. 26A. GSPT1 BINDING SITE is a binding site found in an untranslated region of GSPT1, corresponding to BINDING SITE of FIG. 26A. FIG. 26D illustrates the complementarity of the nucleotide sequence of GSPT1 BINDING SITE, designated SEQ ID:94853, to the nucleotide sequence of GAM26 RNA of FIG. 26A, designated SEQ ID:20604.

[0567] Yet another function of GAM26 is therefore inhibition of G1 to S phase transition 1 (GSPT1), a gene which encodes a Protein that involves in regulation of mammalian cell growth. Accordingly, utilities of GAM26 include diagnosis and treatment of the abovementioned diseases and clinical conditions. The function and utilities of GSPT1 have been established by previous studies, as described hereinabove with reference to FIG. 26D.

[0568] Referring now to GSPT1 BINDING SITE. G1 to S phase transition 1 (GSPT1) is a target gene of GAM26, corresponding to GAM26-TARGET GENE of FIG. 26A. GSPT1 BINDING SITE is a binding site found in an untranslated region of GSPT1, corresponding to BINDING SITE of FIG. 26A. FIG. 26D illustrates the complementarity of the nucleotide sequence of GSPT1 BINDING SITE, designated SEQ ID:94853, to the nucleotide sequence of GAM26 RNA of FIG. 26A, designated SEQ ID:20604.

[0569] An additional function of GAM26 is therefore inhibition of G1 to S phase transition 1 (GSPT1), a gene which encodes a Protein that involves in regulation of mammalian cell growth. Accordingly, utilities of GAM26 include diagnosis and treatment of the abovementioned diseases and clinical conditions. The function and utilities of GSPT1 have been established by previous studies, as described hereinabove with reference to FIG. 26D.

[0570] Reference is now made to MLLT1 BINDING SITE. myeloid/lymphoid or mixed-lineage leukemia (trithorax (Drosophila) hom (MLLT1) is a target gene of GAM26, corresponding to GAM26-TARGET GENE of FIG. 26A. MLLT1 BINDING SITE is a binding site found in an untranslated region of MLLT1, corresponding to BINDING SITE of FIG. 26A. FIG. 26D illustrates the complementarity of the nucleotide sequence of MLLT1 BINDING SITE, designated SEQ ID:94853, to the nucleotide sequence of GAM26 RNA of FIG. 26A, designated SEQ ID:20604.

[0571] A further function of GAM26 is therefore inhibition of myeloid/lymphoid or mixed-lineage leukemia (trithorax (Drosophila) hom (MLLT1), a gene which encodes a Protein that is associated with acute leukemias. Accordingly, utilities of GAM26 include diagnosis and treatment of the abovementioned diseases and clinical conditions.

[0572] The function of MLLT1 has been established by previous studies. Tkachuk et al. (1992) showed that the gene involved in recurring 11q23 leukemogenic translocations codes for an unusually large protein that is a homolog of Drosophila ‘trithorax’ and is involved in homeotic gene regulation (MLL; 159555). In studies of a t(11;19) translocation, they identified a chimeric protein containing the amino-terminal ‘AT-hook’ motifs of the MLL gene on chromosome 11 fused to a previously undescribed protein from chromosome 19. The nucleotide sequence determinations demonstrated an open reading frame that coded for a predicted 62-kD protein, which Tkachuk et al. (1992) named ENL for ‘eleven-nineteen leukemia.’ Nakamura et al. (1993) showed that the gene on chromosome 19 that is fused to the MLL gene (also known as ALL1 gene) in patients with leukemia and translocation t(11;19)(q23;p13) shows high sequence homology to the genes on chromosome 4 (159557) and chromosome 9 (159558) that are fused with the ALL1 gene in patients with translocation t(4;11)(q21;q23) and t(9;11)(p22;q23), respectively. The 3 protein gene products contained nuclear targeting sequences as well as serine-rich and proline-rich regions. The results suggested that the different proteins fused to ALL1 polypeptides. These leukemias provide similar functional domains. Thirman et al. (1994) pointed out that the breakpoint that results in the fusion of MLL to the ENL gene is located at 19p13.3. Another translocation t(11;19)(q23;p13.1) results in fusion of the MLL gene with the ELL gene (600284) in acute myeloid leukemia. This gene is also symbolized MLLT1.

[0573] Full details of the abovementioned studies are described in the following publications, the disclosure of which are hereby incorporated by reference:

[0574] akamura, T.; Alder, H.; Gu, Y.; Prasad, R.; Canaani, O.; Kamada, N.; Gale, R. P.; Lange, B.; Crist, W. M.; Nowell, P. C.; Croce, C. M.; Canaani, E.: Genes on chromosomes 4, 9, and 19 involved in 11q23 abnormalities in acute leukemia share sequence homology and/or common motifs. Proc. Nat. Acad. Sci. 90: 4631-4635, 1993. PubMed ID: 8506309 3. Thirman, M. J.; Levitan, D. A.; Kobayashi, H.; Simon, M. C.; Rowley, J. D.: Cloning of ELL, a gene that fuses to MLL in a t(11;19)(q23;p13.1) in acute myeloid leukemia. Proc. Nat. Acad. Sci. 91: 12110-12114, 1994.

[0575] Further studies establishing the function and utilities of MLLT1 are found in John Hopkins OMIM database record ID 159556, and in references numbered 465-468 listed hereinbelow.

[0576] Referring now to MLLT1 BINDING SITE. mycloid/lymphoid or mixed-lineage leukemia (trithorax (Drosophila) hom (MLLT1) is a target gene of GAM26, corresponding to GAM26-TARGET GENE of FIG. 26A. MLLT1 BINDING SITE is a binding site found in an untranslated region of MLLT1, corresponding to BINDING SITE of FIG. 26A. FIG. 26D illustrates the complementarity of the nucleotide sequence of MLLT1 BINDING SITE, designated SEQ ID:94853, to the nucleotide sequence of GAM26 RNA of FIG. 26A, designated SEQ ID:20604.

[0577] Yet a further function of GAM26 is therefore inhibition of myeloid/lymphoid or mixed-lineage leukemia (trithorax (Drosophila) hom (MLLT1), a gene which encodes a Protein that is associated with acute leukemias. Accordingly, utilities of GAM26 include diagnosis and treatment of the abovementioned diseases and clinical conditions. The function and utilities of MLLT1 have been established by previous studies, as described hereinabove with reference to FIG. 26D.

[0578] Reference is now made to NTRK3 BINDING SITE. neurotrophic tyrosine kinase, receptor, type 3 (NTRK3) is a target gene of GAM26, corresponding to GAM26-TARGET GENE of FIG. 26A. NTRK3 BINDING SITE is a binding site found in an untranslated region of NTRK3, corresponding to BINDING SITE of FIG. 26A. FIG. 26D illustrates the complementarity of the nucleotide sequence of NTRK3 BINDING SITE, designated SEQ ID:94853, to the nucleotide sequence of GAM26 RNA of FIG. 26A, designated SEQ ID:20604.

[0579] Another function of GAM26 is therefore inhibition of neurotrophic tyrosine kinase, receptor, type 3 (NTRK3), a gene which encodes a Protein that is a tyrosine-protein kinase receptor. Accordingly, utilities of GAM26 include diagnosis and treatment of the abovementioned diseases and clinical conditions.

[0580] The function of NTRK3 has been established by previous studies. Bothwell (1996), Carter and Lewin (1997), and Bibel and Barde (2000) reviewed neurotrophins and their receptors. Nerve growth factor receptor (NGFR; 162010) is also referred to as p75(NTR) due to its molecular mass and its ability to bind at low affinity not only NGF (see 162030), but also other neurotrophins, including brain-derived neurotrophic factor (BDNF; 113505), neurotrophin-3 (NTF3; 162660), and neurotrophin-4/5 (NTF5; 162662). As a monomer, NGFR binds NGF with low affinity. Higher affinity binding is achieved by association with higher molecular mass, low-affinity neurotrophin receptors, namely the tropomyosin receptor kinases, TRKA (NTRK1; 191315), TRKB (NTRK2; 600456), and TRKC (NTRK3). TRKA, TRKB, and TRKC are specific for or ‘preferred by’ NGF, NTF5 and BDNF, and NTF3, respectively (Ip et al., 1993). NTF3 also binds to TRKA and TRKB, but with significantly lower affinity. Lamballe et al. (1991) isolated and characterized TRKC, a member of the TRK family of tyrosine protein kinase genes. They found that TRKC is preferentially expressed in the brain; in situ hybridization studies showed transcripts in the hippocampus, cerebral cortex, and the granular cell layer of the cerebellum. The product of the TRKC gene is a glycoprotein of 145 kD, gp145(trkC), which is equally related to the previously characterized gp140(trk) (TRKA) and gp145(trkB) (TRKB) tyrosine kinases. Lamballe et al. (1991) demonstrated that gp145(trkC) is a receptor for NTF3, a factor important in the development of certain areas of the central nervous system, but does not bind NGF or BDNF.

[0581] Full details of the abovementioned studies are described in the following publications, the disclosure of which are hereby incorporated by reference:

[0582] ibel, M.; Barde, Y.-A.: Neurotrophins: key regulators of cell fate and cell shape in the vertebrate nervous system. Genes Dev. 14: 2919-2937, 2000. PubMed ID: 11114882 6. Lamballe, F.; Klein, R.; Barbacid, M.: TRKC, a new member of the TRK family of tyrosine protein kinases, is a receptor for neurotrophin-3. Cell 66: 967-979, 1991.

[0583] Further studies establishing the function and utilities of NTRK3 are found in John Hopkins OMIM database record ID 191316, and in references numbered 469-477 listed hereinbelow.

[0584] Reference is now made to PPP3CA BINDING SITE. protein phosphatase 3 (formerly 2B), catalytic subunit, alpha isoform (PPP3CA) is a target gene of GAM26, corresponding to GAM26-TARGET GENE of FIG. 26A. PPP3CA BINDING SITE is a binding site found in an untranslated region of PPP3CA, corresponding to BINDING SITE of FIG. 26A. FIG. 26D illustrates the complementarity of the nucleotide sequence of PPP3CA BINDING SITE, designated SEQ ID:94853, to the nucleotide sequence of GAM26 RNA of FIG. 26A, designated SEQ ID:20604.

[0585] Yet another function of GAM26 is therefore inhibition of protein phosphatase 3 (formerly 2B), catalytic subunit, alpha isoform (PPP3CA), a gene which encodes a Enzyme that is the catalytic subunit of calcium-dependent, calmodulin-stimulated protein phosphatase. Accordingly, utilities of GAM26 include diagnosis and treatment of the abovementioned diseases and clinical conditions.

[0586] The function of PPP3CA has been established by previous studies. Semsarian et al. (1999) and Musaro et al. (1999) independently showed that IGF1 (147440) stimulates skeletal muscle hypertrophy and a switch to glycolytic metabolism by activating calcineurin A and inducing the nuclear translocation of transcription factor NFATC1 (600489). Semsarian et al. (1999) found that hypertrophy was suppressed by the calcineurin inhibitors cyclosporin A or FK506, but not by inhibitors of the MAP kinase or phosphatidylinositol-3-OH kinase pathways. Musaro et al. (1999) showed that expression of a dominant-negative calcineurin mutant also repressed myocyte differentiation and hypertrophy. Musaro et al. (1999) demonstrated that either IGF1 or activated calcineurin induces expression of transcription factor GATA2 (137295), which accumulates in a subset of myocyte nuclei, where it associates with calcineurin and a specific dephosphorylated isoform of NFATC1.

[0587] Animal model experiments lend further support to the function of PPP3CA. Winder et al. (1998) generated transgenic mice that overexpressed a truncated form of the murine calcineurin A-alpha catalytic subunit under the control of the CaMKII-alpha promoter. Mice expressing this transgene show increased calcium-dependent phosphatase activity in the hippocampus. Physiologic studies and pharmacologic experiments revealed a novel, intermediate phase of long-term potentiation (1-LTP) in the CA1 region of the hippocampus. This I-LTP differs from the E-LTP (early component of LTP) by requiring multiple trains for induction and in being dependent on PKA (cAMP-dependent protein kinase). It also differs from the L-LTP (late component of LTP) in not requiring new protein synthesis. These data suggested to Winder et al. (1998) that calcineurin acts as an inhibitory constraint on I-LTP that is relieved by PKA, and that this inhibitory constraint acts as a gate to regulate the synaptic induction of L-LTP.

[0588] It is appreciated that the abovementioned animal model for PPP3CA is acknowledged by those skilled in the art as a scientifically valid animal model, as can be further appreciated from the publications sited hereinbelow.

[0589] Full details of the abovementioned studies are described in the following publications, the disclosure of which are hereby incorporated by reference:

[0590] Winder, D. G.; Mansuy, I. M.; Osman, M.; Moallem, T. M.; Kandel, E. R.: Genetic and pharmacological evidence for a novel, intermediate phase of long-term potentiation suppressed by calcineurin. Cell 92: 25-37, 1998. PubMed ID: 9489697 2. Fuentes, J. J.; Genesca, L.; Kingsbury, T. J.; Cunningham, K. W.; Perez-Riba, M.; Estivill, X.; de la Luna, S.: DSCR1, overexpressed in Down syndrome, is an inhibitor of calcineurin-mediated signaling pathways. Hum. Molec. Genet. 9: 1681-1690, 2000.

[0591] Further studies establishing the function and utilities of PPP3CA are found in John Hopkins OMIM database record ID 114105, and in references numbered 478-490 listed hereinbelow.

[0592] Referring now to PPP3CA BINDING SITE. protein phosphatase 3 (formerly 2B), catalytic subunit, alpha isoform (PPP3CA) is a target gene of GAM26, corresponding to GAM26-TARGET GENE of FIG. 26A. PPP3CA BINDING SITE is a binding site found in an untranslated region of PPP3CA, corresponding to BINDING SITE of FIG. 26A. FIG. 26D illustrates the complementarity of the nucleotide sequence of PPP3CA BINDING SITE, designated SEQ ID:94853, to the nucleotide sequence of GAM26 RNA of FIG. 26A, designated SEQ ID:20604.

[0593] An additional function of GAM26 is therefore inhibition of protein phosphatase 3 (formerly 2B), catalytic subunit, alpha isoform (PPP3CA), a gene which encodes a Enzyme that is the catalytic subunit of calcium-dependent, calmodulin-stimulated protein phosphatase. Accordingly, utilities of GAM26 include diagnosis and treatment of the abovementioned diseases and clinical conditions. The function and utilities of PPP3CA have been established by previous studies, as described hereinabove with reference to FIG. 26D.

[0594] Referring now to PPP3CA BINDING SITE. protein phosphatase 3 (formerly 2B), catalytic subunit, alpha isoform (PPP3CA) is a target gene of GAM26, corresponding to GAM26-TARGET GENE of FIG. 26A. PPP3CA BINDING SITE is a binding site found in an untranslated region of PPP3CA, corresponding to BINDING SITE of FIG. 26A. FIG. 26D illustrates the complementarity of the nucleotide sequence of PPP3CA BINDING SITE, designated SEQ ID:94853, to the nucleotide sequence of GAM26 RNA of FIG. 26A, designated SEQ ID:20604.

[0595] A further function of GAM26 is therefore inhibition of protein phosphatase 3 (formerly 2B), catalytic subunit, alpha isoform (PPP3CA), a gene which encodes a Enzyme that is the catalytic subunit of calcium-dependent, calmodulin-stimulated protein phosphatase. Accordingly, utilities of GAM26 include diagnosis and treatment of the abovementioned diseases and clinical conditions. The function and utilities of PPP3CA have been established by previous studies, as described hereinabove with reference to FIG. 26D.

[0596] Reference is now made to RELN BINDING SITE. reelin (RELN) is a target gene of GAM26, corresponding to GAM26-TARGET GENE of FIG. 26A. RELN BINDING SITE is a binding site found in an untranslated region of RELN, corresponding to BINDING SITE of FIG. 26A. FIG. 26D illustrates the complementarity of the nucleotide sequence of RELN BINDING SITE, designated SEQ ID:94853, to the nucleotide sequence of GAM26 RNA of FIG. 26A, designated SEQ ID:20604.

[0597] Yet a further function of GAM26 is therefore inhibition of reelin (RELN), a gene which encodes a transcripition factor that is associated with norman-roberts syndrome. Accordingly, utilities of GAM26 include diagnosis and treatment of the abovementioned diseases and clinical conditions.

[0598] The function of RELN has been established by previous studies. Normal development of the cerebral cortex requires long-range migration of cortical neurons from proliferative regions deep in the brain. Lissencephaly (‘smooth brain,’ from ‘lissos,’ meaning ‘smooth,’ and ‘encephalos,’ meaning ‘brain’) is a severe developmental disorder in which neuronal migration is impaired, leading to a thickened cerebral cortex whose normally folded contour is simplified and smooth. X-linked lissencephaly (300067) is caused by mutation in the gene encoding doublecortin (DCX; 300121). Deletion of or mutation in the LIS1 gene (601545), located on 17p, causes isolated lissencephaly sequence (ILS), and haploinsufficiency of this and other neighboring genes is responsible for the Miller-Dieker lissencephaly syndrome (247200), a contiguous gene deletion syndrome. Lissencephaly is a feature of a number of syndromes, such as the Walker-Warburg syndrome (236670). Hong et al. (2000) studied an autosomal recessive form of lissencephaly associated with severe abnormalities of the cerebellum, hippocampus, and brainstem; see lissencephaly syndrome, Norman-Roberts type (257320). They tested for linkage to markers near RELN on chromosome 7 and DAB1 on 1p32-p31, because mutations in the mouse homologs of these 2 genes cause brain defects in mice that resemble lissencephaly, including hypoplasia of the cerebellum, brainstem abnormalities, and a neuronal migration disorder of the neocortex and hippocampus. In 2 unrelated pedigrees, they found substantial regions of homozygosity in affected children near the RELN locus on 7q22. In these 2 families, they demonstrated different splice site mutations in the RELN gene. The study of these human patients pointed to several previously unsuspected functions of reelin in and outside of the brain. Although abnormalities of RELN mRNA had been reported in postmortem brains of schizophrenic humans (Impagnatiello et al., 1998), no evidence of schizophrenia was found in individuals with heterozygous or homozygous RELN mutations. On the other hand, one of the lissencephaly patients studied with a muscle biopsy showed evidence of abnormal neuromuscular connectivity (Hourihane et al., 1993). Moreover, at least 3 patients had persistent lymphedema neonatally, and one showed accumulation of chlyous (i.e., fatty) ascites fluid that required peritoneal shunting (Hourihane et al., 1993). The apparent role for reelin in serum homeostasis may reflect reelin interactions with LDL superfamily receptors outside the brain, as well as in the brain.

[0599] Animal model experiments lend further support to the function of RELN. To investigate Reln function, Magdaleno et al. (2002) generated transgenic mice using the nestin (NES; 600915) promoter to drive ectopic expression of Rein in the ventricular zone during early brain development. Ectopic Reln expression in transgenic reelin mice, which lack endogenous Reln expression, induced tryosine phosphorylation of Dab1 in the ventricular zone. The transgene also rescued some, but not all, of the neuroanatomic and behavioral abnormalities characteristic of the reeler phenotype, including ataxia and the migration of Purkinje cells. Magdaleno et al. (2002) hypothesized that Reln functions in concert with other positional cues to promote cell-cell interactions that are required for layer formation during development.

[0600] It is appreciated that the abovementioned animal model for RELN is acknowledged by those skilled in the art as a scientifically valid animal model, as can be further appreciated from the publications sited hereinbelow.

[0601] Full details of the abovementioned studies are described in the following publications, the disclosure of which are hereby incorporated by reference:

[0602] ong, S. E.; Shugart, Y. Y.; Huang, D. T.; Al Shahwan, S.; Grant, P. E.; Hourihane, J. O.; Martin, N. D. T.; Walsh, C. A.: Autosomal recessive lissencephaly with cerebellar hypoplasia is associated with human RELN mutations. Nature Genet. 26: 93-96, 2000. Note: Erratum: Nature Genet. 27: 225 only, 2001. PubMed ID: 10973257 12. Magdaleno, S.; Keshvara, L.; Curran, T.: Rescue of ataxia and preplate splitting by ectopic expression of reelin in reeler mice. Neuron 33: 573-586, 2002.

[0603] Further studies establishing the function and utilities of RELN are found in John Hopkins OMIM database record ID 600514, and in references numbered 491-505 listed hereinbelow.

[0604] Reference is now made to RGS19IP1 BINDING SITE. (RGS19IP1) is a target gene of GAM26, corresponding to GAM26-TARGET GENE of FIG. 26A. RGS19IP1 BINDING SITE is a binding site found in an untranslated region of RGS19IP1, corresponding to BINDING SITE of FIG. 26A. FIG. 26D illustrates the complementarity of the nucleotide sequence of RGS19IP1 BINDING SITE, designated SEQ ID:94853, to the nucleotide sequence of GAM26 RNA of FIG. 26A, designated SEQ ID:20604.

[0605] Another function of GAM26 is therefore inhibition of (RGS19IP1), a gene which encodes a Protein that is involved in g protein-linked signaling. Accordingly, utilities of GAM26 include diagnosis and treatment of the abovementioned diseases and clinical conditions.

[0606] The function of RGS19IP1 has been established by previous studies. Northern blot analysis detected a 1.8-kb C19ORF3 transcript in all tissues tested, with strongest expression in pancreas, followed by skeletal muscle, brain, kidney, placenta, lung, liver, and lowest expression in heart. Expression levels did not correlate with those of GAIP. Immunoblot analysis demonstrated the presence of C19ORF3 primarily in cytosolic fractions but also in membrane fractions. Immunofluorescence analysis showed expression of endogenous C19ORF3 in both a diffuse and a punctate staining pattern throughout the cytoplasm. Using a yeast 2-hybrid system, Bunn et al. (1999) isolated a cDNA encoding C19ORF3, which they called GLUT1CBP (GLUT1 (SLC2A1; 138140) C-terminus-binding protein). SDS-PAGE and Western blot analyses determined that C19ORF3 is expressed as a 39-kD protein in all tissues tested except small intestine. Yeast 2-hybrid analysis showed that C19ORF3 binds SLC2A1 through its PDZ domain. Northern blot analysis revealed similar expression patterns for C19ORF3 and SLC2A1, with both being expressed most strongly in brain. Using a yeast 2-hybrid screen for brain-interacting proteins, the authors determined that only SLC2A1, KIF1B, and alpha actinin-1 (ACTN1; 102575) bind C19ORF3 through its PDZ domain; myosin VI (MYO6; 600970) was shown to interact with C19ORF3 but not via the PDZ domain.

[0607] Full details of the abovementioned studies are described in the following publications, the disclosure of which are hereby incorporated by reference:

[0608] Bunn, R. C.; Jensen, M. A.; Reed, B. C.: Protein interactions with the glucose transporter binding protein GLUT1CBP that provide a link between GLUT1 and the cytoskeleton. Molec. Biol. Cell 10: 819-832, 1999. PubMed ID: 10198040 Von Kap-Herr, C.; Kandala, G.; Mann, S. S.; Hart, T. C.; Pettenati, M. J.; Setaluri, V. Assignment of PDZ domain-containing protein GIPC gene (C19orf3) to human chromosome band 19p13.1 by in situ hybridization and radiation hybrid mapping. Cytogenet. Cell Genet. 89: 234-235, 2000.

[0609] Further studies establishing the function and utilities of RGS19IP1 are found in John Hopkins OMIM database record ID 605072, and in references numbered 506-508 listed hereinbelow.

[0610] Referring now to RGS19IP1 BINDING SITE. (RGS19IP1) is a target gene of GAM26, corresponding to GAM26-TARGET GENE of FIG. 26A. RGS19IP1 BINDING SITE is a binding site found in an untranslated region of RGS19IP1, corresponding to BINDING SITE of FIG. 26A. FIG. 26D illustrates the complementarity of the nucleotide sequence of RGS19IP1 BINDING SITE, designated SEQ ID:94853, to the nucleotide sequence of GAM26 RNA of FIG. 26A, designated SEQ ID:20604.

[0611] Yet another function of GAM26 is therefore inhibition of (RGS19IP1), a gene which encodes a Protein that is involved in g protein-linked signaling. Accordingly, utilities of GAM26 include diagnosis and treatment of the abovementioned diseases and clinical conditions. The function and utilities of RGS19IP1 have been established by previous studies, as described hereinabove with reference to FIG. 26D.

[0612] Referring now to RGS19IP1 BINDING SITE. (RGS19IP1) is a target gene of GAM26, corresponding to GAM26-TARGET GENE of FIG. 26A. RGS19IP1 BINDING SITE is a binding site found in an untranslated region of RGS19IP1, corresponding to BINDING SITE of FIG. 26A. FIG. 26D illustrates the complementarity of the nucleotide sequence of RGS19IP1 BINDING SITE, designated SEQ ID:94853, to the nucleotide sequence of GAM26 RNA of FIG. 26A, designated SEQ ID:20604.

[0613] An additional function of GAM26 is therefore inhibition of (RGS19IP1), a gene which encodes a Protein that is involved in g protein-linked signaling. Accordingly, utilities of GAM26 include diagnosis and treatment of the abovementioned diseases and clinical conditions. The function and utilities of RGS19IP1 have been established by previous studies, as described hereinabove with reference to FIG. 26D.

[0614] Referring now to RGS19IP1 BINDING SITE. (RGS19IP1) is a target gene of GAM26, corresponding to GAM26-TARGET GENE of FIG. 26A. RGS19IP1 BINDING SITE is a binding site found in an untranslated region of RGS19IP1, corresponding to BINDING SITE of FIG. 26A. FIG. 26D illustrates the complementarity of the nucleotide sequence of RGS19IP1 BINDING SITE, designated SEQ ID:94853, to the nucleotide sequence of GAM26 RNA of FIG. 26A, designated SEQ ID:20604.

[0615] A further function of GAM26 is therefore inhibition of (RGS19IP1), a gene which encodes a Protein that is involved in g protein-linked signaling. Accordingly, utilities of GAM26 include diagnosis and treatment of the abovementioned diseases and clinical conditions. The function and utilities of RGS19IP1 have been established by previous studies, as described hereinabove with reference to FIG. 26D.

[0616] Reference is now made to UBE2B BINDING SITE. ubiquitin-conjugating enzyme E2B (RAD6 homolog) (UBE2B) is a target gene of GAM26, corresponding to GAM26-TARGET GENE of FIG. 26A. UBE2B BINDING SITE is a binding site found in an untranslated region of UBE2B, corresponding to BINDING SITE of FIG. 26A. FIG. 26D illustrates the complementarity of the nucleotide sequence of UBE2B BINDING SITE, designated SEQ ID:94853, to the nucleotide sequence of GAM26 RNA of FIG. 26A, designated SEQ ID:20604.

[0617] Yet a further function of GAM26 is therefore inhibition of ubiquitin-conjugating enzyme E2B (RAD6 homolog) (UBE2B), a gene which encodes a Enzyme that catalyzes the covalent attachment of ubiquitin to other proteins and is required for postreplication repair of uv-damaged dna. Accordingly, utilities of GAM26 include diagnosis and treatment of the abovementioned diseases and clinical conditions.

[0618] The function of UBE2B has been established by previous studies. The RAD6 pathway is central to postreplicative DNA repair in eukaryotic cells. Two principal elements of this pathway are the ubiquitin-conjugating enzymes RAD6 and the MMS2 (603001)-UBC13 (603679) heterodimer, which are recruited to chromatin by the RING-finger proteins RAD18 (605256) and RAD5 (607266), respectively. Hoege et al. (2002) showed that UBC9 (601661), a small ubiquitin-related modifier (SUMO)-conjugating enzyme, is also affiliated with this pathway and that proliferating cell nuclear antigen (PCNA; 176740), a DNA polymerase sliding clamp involved in DNA synthesis and repair, is a substrate. PCNA is monoubiquitinated through RAD6 and RAD18, modified by lys63-linked multiubiquitination, which additionally requires MMS2, UBC13, and RAD5, and is conjugated to SUMO by UBC9. All 3 modifications affect the same lysine residue of PCNA, K164, suggesting that they label PCNA for alternative functions. Hoege et al. (2002) demonstrated that these modifications differentially affect resistance to DNA damage, and that damage-induced PCNA ubiquitination is elementary for DNA repair and occurs at the same conserved residue in yeast and humans.

[0619] Animal model experiments lend further support to the function of UBE2B. Roest et al. (1996) reported the phenotype of the first animal mutant in the ubiquitin pathway. Experimental inactivation of the RAD6B gene in mice caused male infertility. Derailment of spermatogenesis became overt during the postmeiotic condensation of chromatin in spermatids. In yeast the gene is not only implicated in postreplication repair and damage-induced mutagenesis but is also required for sporulation and may modulate chromatin structure via histone ubiquitination. The authors stated that the findings in the ‘knock-out’ mice provided a parallel between yeast sporulation and mammalian spermatogenesis and strongly implicated RAD6-dependent ubiquitination in chromatin remodeling in the human. Since heterozygous male mice and even knockout female mice are completely normal and fertile and thus able to transmit the defect, similar RAD6B mutations may cause male infertility in man. The fact that the RAD6B mice are viable and phenotypically normal is presumably due to functional redundancy with RAD6A (312180).

[0620] It is appreciated that the abovementioned animal model for UBE2B is acknowledged by those skilled in the art as a scientifically valid animal model, as can be further appreciated from the publications sited hereinbelow.

[0621] Full details of the abovementioned studies are described in the following publications, the disclosure of which are hereby incorporated by reference:

[0622] Hoege, C.; Pfander, B.; Moldovan, G.-L.; Pyrowolakis, G.; Jentsch, S.: RAD6-dependent DNA repair is linked to modification of PCNA by ubiquitin and SUMO. Nature 419: 135-141, 2002. PubMed ID: 12226657 Roest, H. P.; van Klaveren, J.; de Wit, J.; van Gurp, C. G.; Koken, M. H. M.; Vermey, M.; van Roijen, J. H.; Hoogerbrugge, J. W.; Vreeburg, J. T. M.; Baarends, W. M.; Bootsma, D.; Grootegoed, J. A.; Hoeijmakers, J. H. J.: Inactivation of the HR6B ubiquitin-conjugating DNA repair enzyme in mice causes male sterility associated with chromatin modification. Cell 86: 799-810, 1996.

[0623] Further studies establishing the function and utilities of UBE2B are found in John Hopkins OMIM database record ID 179095, and in references numbered 509-513 listed hereinbelow.

[0624] Referring now to UBE2B BINDING SITE. ubiquitin-conjugating enzyme E2B (RAD6 homolog) (UBE2B) is a target gene of GAM26, corresponding to GAM26-TARGET GENE of FIG. 26A. UBE2B BINDING SITE is a binding site found in an untranslated region of UBE2B, corresponding to BINDING SITE of FIG. 26A. FIG. 26D illustrates the complementarity of the nucleotide sequence of UBE2B BINDING SITE, designated SEQ ID:94853, to the nucleotide sequence of GAM26 RNA of FIG. 26A, designated SEQ ID:20604.

[0625] Another function of GAM26 is therefore inhibition of ubiquitin-conjugating enzyme E2B (RAD6 homolog) (UBE2B), a gene which encodes a Enzyme that catalyzes the covalent attachment of ubiquitin to other proteins and is required for postreplication repair of uv-damaged dna. Accordingly, utilities of GAM26 include diagnosis and treatment of the abovementioned diseases and clinical conditions. The function and utilities of UBE2B have been established by previous studies, as described hereinabove with reference to FIG. 26D.

[0626] Referring now to UBE2B BINDING SITE. ubiquitin-conjugating enzyme E2B (RAD6 homolog) (UBE2B) is a target gene of GAM26, corresponding to GAM26-TARGET GENE of FIG. 26A. UBE2B BINDING SITE is a binding site found in an untranslated region of UBE2B, corresponding to BINDING SITE of FIG. 26A. FIG. 26D illustrates the complementarity of the nucleotide sequence of UBE2B BINDING SITE, designated SEQ ID:94853, to the nucleotide sequence of GAM26 RNA of FIG. 26A, designated SEQ ID:20604.

[0627] Yet another function of GAM26 is therefore inhibition of ubiquitin-conjugating enzyme E2B (RAD6 homolog) (UBE2B), a gene which encodes a Enzyme that catalyzes the covalent attachment of ubiquitin to other proteins and is required for postreplication repair of uv-damaged dna. Accordingly, utilities of GAM26 include diagnosis and treatment of the abovementioned diseases and clinical conditions. The function and utilities of UBE2B have been established by previous studies, as described hereinabove with reference to FIG. 26D.

[0628] Referring now to UBE2B BINDING SITE. ubiquitin-conjugating enzyme E2B (RAD6 homolog) (UBE2B) is a target gene of GAM26, corresponding to GAM26-TARGET GENE of FIG. 26A. UBE2B BINDING SITE is a binding site found in an untranslated region of UBE2B, corresponding to BINDING SITE of FIG. 26A. FIG. 26D illustrates the complementarity of the nucleotide sequence of UBE2B BINDING SITE, designated SEQ ID:94853, to the nucleotide sequence of GAM26 RNA of FIG. 26A, designated SEQ ID:20604.

[0629] An additional function of GAM26 is therefore inhibition of ubiquitin-conjugating enzyme E2B (RAD6 homolog) (UBE2B), a gene which encodes a Enzyme that catalyzes the covalent attachment of ubiquitin to other proteins and is required for postreplication repair of uv-damaged dna. Accordingly, utilities of GAM26 include diagnosis and treatment of the abovementioned diseases and clinical conditions. The function and utilities of UBE2B have been established by previous studies, as described hereinabove with reference to FIG. 26D.

[0630] Reference is now made to CAMK4 BINDING SITE. calcium/calmodulin-dependent protein kinase IV (CAMK4) is a target gene of GAM26, corresponding to GAM26-TARGET GENE of FIG. 26A. CAMK4 BINDING SITE is a binding site found in an untranslated region of CAMK4, corresponding to BINDING SITE of FIG. 26A. FIG. 26D illustrates the complementarity of the nucleotide sequence of CAMK4 BINDING SITE, designated SEQ ID:94860, to the nucleotide sequence of GAM26 RNA of FIG. 26A, designated SEQ ID:20604.

[0631] A further function of GAM26 is therefore inhibition of calcium/calmodulin-dependent protein kinase IV (CAMK4), a gene which encodes a Enzyme that is a heat-stable, acidic, calmodulin-binding protein. Accordingly, utilities of GAM26 include diagnosis and treatment of the abovementioned diseases and clinical conditions.

[0632] The function of CAMK4 has been established by previous studies. Protein phosphorylation, a prominent activity in the brain, apparently plays an important role in several neural functions such as neural transmitter release, ion channel modulation, and axoplasmic transport. Sikela et al. (1989) identified cDNA clones corresponding to a brain Ca(2+)/calmodulin-dependent protein kinase, which they referred to as brain CaM kinase IV (CAMK4). On the basis of Western blot analysis, this kinase appeared to be restricted to brain in the rat; interestingly, it was not detected in the brain of the newborn, but became detectable within a few days after birth.

[0633] Animal model experiments lend further support to the function of CAMK4. Camk4 is a multifunctional serine/threonine protein kinase with limited tissue distribution that has been implicated in transcriptional regulation in lymphocytes, neurons, and male germ cells. In the mouse testis, however, Camk4 is expressed in spermatids and associated with chromatin and nuclear matrix. Elongating spermatids are not transcriptionally active, raising the possibility that Camk4 has a novel function in male germ cells. To investigate the role of Camk4 in spermatogenesis, Wu et al. (2000) generated mice with a targeted deletion of the Camk4 gene. Male Camk4−/− mice were infertile with impairment of spermiogenesis in late elongating spermatids. The sequential deposition of sperm basic nuclear proteins on chromatin was disrupted, with a specific loss of protamine-2 (182890) and prolonged retention of transition protein-2 (190232) in step-15 spermatids. Protamine-2 is phosphorylated by Camk4 in vitro, implicating a connection between Camk4 signaling and the exchange of basic nuclear proteins in mammalian male germ cells. Defects in protamine-2 have been identified in sperm of infertile men, suggesting that the results of Wu et al. (2000) may have clinical implications for the understanding of human male infertility.

[0634] It is appreciated that the abovementioned animal model for CAMK4 is acknowledged by those skilled in the art as a scientifically valid animal model, as can be further appreciated from the publications sited hereinbelow.

[0635] Full details of the abovementioned studies are described in the following publications, the disclosure of which are hereby incorporated by reference:

[0636] ikela, J. M.; Law, M. L.; Kao, F.-T.; Hartz, J. A.; Wei, Q.; Hahn, W. E.: Chromosomal localization of the human gene for brain Ca(2+)/calmodulin-dependent protein kinase type IV. Genomics 4: 21-27, 1989. PubMed ID: 2536634 7. Wu, J. Y.; Ribar, T. J.; Cummings, D. E.; Burton, K. A.; McKnight, G. S.; Means, A. R.: Spermiogenesis and exchange of basic nuclear proteins are impaired in male germ cells lacking Camk4. Nature Genet. 25: 448-452, 2000.

[0637] Further studies establishing the function and utilities of CAMK4 are found in John Hopkins OMIM database record ID 114080, and in references numbered 514-520 listed hereinbelow.

[0638] Referring now to CBL BINDING SITE. Cas-Br-M (murine) ecotropic retroviral transforming sequence (CBL) is a target gene of GAM26, corresponding to GAM26-TARGET GENE of FIG. 26A. CBL BINDING SITE is a binding site found in an untranslated region of CBL, corresponding to BINDING SITE of FIG. 26A. FIG. 26D illustrates the complementarity of the nucleotide sequence of CBL BINDING SITE, designated SEQ ID:94860, to the nucleotide sequence of GAM26 RNA of FIG. 26A, designated SEQ ID:20604.

[0639] Yet a further function of GAM26 is therefore inhibition of Cas-Br-M (murine) ecotropic retroviral transforming sequence (CBL), a gene which encodes a Protein that may modify receptor tyrosine kinase-mediated signal transduction. and is associated with B-lineage lymphomas. Accordingly, utilities of GAM26 include diagnosis and treatment of the abovementioned diseases and clinical conditions. The function and utilities of CBL have been established by previous studies, as described hereinabove with reference to FIG. 26D.

[0640] Reference is now made to CD47 BINDING SITE. CD47 antigen (Rh-related antigen, integrin-associated signal transduce (CD47) is a target gene of GAM26, corresponding to GAM26-TARGET GENE of FIG. 26A. CD47 BINDING SITE is a binding site found in an untranslated region of CD47, corresponding to BINDING SITE of FIG. 26A. FIG. 26D illustrates the complementarity of the nucleotide sequence of CD47 BINDING SITE, designated SEQ ID:97660, to the nucleotide sequence of GAM26 RNA of FIG. 26A, designated SEQ ID:20604.

[0641] Another function of GAM26 is therefore inhibition of CD47 antigen (Rh-related antigen, integrin-associated signal transduce (CD47), a gene which encodes a Protein that may be involved in membrane permeability changes induced following virus infection. Accordingly, utilities of GAM26 include diagnosis and treatment of the abovementioned diseases and clinical conditions.

[0642] The function of CD47 has been established by previous studies. By testing hybrids containing various deletions of chromosome 3, Miller et al. (1987) described an IgM monoclonal antibody, 1D8, that recognized an antigen coded by a gene located in the region 3cen-q22. The monoclonal antibody was designated MER6. The antigen was absent in the Rh deficiency syndrome, Rh-null hemolytic anemia (268150). This antigen probably had no pathogenetic role in the Rh deficiency, which was shown by Cherif-Zahar et al. (1996) to be due to mutation in the Rh50 gene (180297) on chromosome 6. They noted that many cell

[0643] Animal model experiments lend further support to the function of CD47. By testing hybrids containing various deletions of chromosome 3, Miller et al. (1987) described an IgM monoclonal antibody, 1D8, that recognized an antigen coded by a gene located in the region 3cen-q22. The monoclonal antibody was designated MER6. The antigen was absent in the Rh deficiency syndrome, Rh-null hemolytic anemia (268150). This antigen probably had no pathogenetic role in the Rh deficiency, which was shown by Cherif-Zahar et al. (1996) to be due to mutation in the Rh50 gene (180297) on chromosome 6. They noted that many cell

[0644] It is appreciated that the abovementioned animal model for CD47 is acknowledged by those skilled in the art as a scientifically valid animal model, as can be further appreciated from the publications sited hereinbelow.

[0645] Full details of the abovementioned studies are described in the following publications, the disclosure of which are hereby incorporated by reference:

[0646] By testing hybrids containing various deletions of chromosome 3, Miller et al. (1987) described an IgM monoclonal antibody, 1D8, that recognized an antigen coded by a gene located in the region 3cen-q22. The monoclonal antibody was designated MER6. The antigen was absent in the Rh deficiency syndrome, Rh-null hemolytic anemia (268150). This antigen probably had no pathogenetic role in the Rh deficiency, which was shown by Cherif-Zahar et al. (1996) to be due to mutation in the Rh50 gene (180297) on chromosome 6. They noted that many cell.

[0647] Further studies establishing the function and utilities of CD47 are found in John Hopkins OMIM database record ID 601028, and in references numbered 521-527 listed hereinbelow.

[0648] Reference is now made to CDC2L1 BINDING SITE. cell division cycle 2-like 1 (PITSLRE proteins) (CDC2L1) is a target gene of GAM26, corresponding to GAM26-TARGET GENE of FIG. 26A. CDC2L1 BINDING SITE is a binding site found in an untranslated region of CDC2L1, corresponding to BINDING SITE of FIG. 26A. FIG. 26D illustrates the complementarity of the nucleotide sequence of CDC2L1 BINDING SITE, designated SEQ ID:99045, to the nucleotide sequence of GAM26 RNA of FIG. 26A, designated SEQ ID:20604.

[0649] Yet another function of GAM26 is therefore inhibition of cell division cycle 2-like 1 (PITSLRE proteins) (CDC2L1), a gene which encodes a Protein that is a negative regulator of normal cell cycle progression. Accordingly, utilities of GAM26 include diagnosis and treatment of the abovementioned diseases and clinical conditions.

[0650] The function of CDC2L1 has been established by previous studies. Bunnell et al. (1990) identified a human cell division control (CDC)-related protein kinase, p58, that is structurally and functionally related to p34(cdc2) (CDC2; 116940). Abnormal expression of the p58 protein kinase in eukaryotic cells had effects suggesting that it is a negative regulator of normal cell cycle progression. The gene is well conserved evolutionarily. Its expression is regulated during murine embryogenesis, and its activity is coordinately regulated with that of p34(cdc2) during the cell cycle. Eipers et al. (1991) assigned the expressed p58 gene to 1p36 by somatic cell hybrid analysis, in situ hybridization, and nested PCR amplification of microdissected chromosomes. The authors stated that this gene, tentatively symbolized PK58, may be implicated in the pathogenesis of tumors that have deletion in the region of 1p36. Eipers et al. (1992) detailed the complete structure of the CDC2L1 gene including its putative promoter region, transcriptional start sites, exonic sequences, and intron/exon boundary sequences. The gene is 10 kb in size and contains 12 exons and 11 introns.

[0651] Full details of the abovementioned studies are described in the following publications, the disclosure of which are hereby incorporated by reference:

[0652] unnell, B.; Heath, L. S.; Adams, D. E.; Lahti, J. M.; Kidd, V. J. Elevated expression of a p58 protein kinase leads to changes in the CHO cell cycle. Proc. Nat. Acad. Sci. 87: 7467-7471, 1990. PubMed ID: 2217177 2. Cornelis, S.; Bruynooghe, Y.; Denecker, G.; Van Huffel, S.; Tinton, S.; Beyaert, R.: Identification and characterization of a novel cell cycle-regulated internal ribosome entry site. Molec. Cell 5: 597-605, 2000.

[0653] Further studies establishing the function and utilities of CDC2L1 are found in John Hopkins OMIM database record ID 176873, and in references numbered 528-535 listed hereinbelow.

[0654] Referring now to CDC2L1 BINDING SITE. cell division cycle 2-like 1 (PITSLRE proteins) (CDC2L1) is a target gene of GAM26, corresponding to GAM26-TARGET GENE of FIG. 26A. CDC2L1 BINDING SITE is a binding site found in an untranslated region of CDC2L1, corresponding to BINDING SITE of FIG. 26A. FIG. 26D illustrates the complementarity of the nucleotide sequence of CDC2L1 BINDING SITE, designated SEQ ID:99046, to the nucleotide sequence of GAM26 RNA of FIG. 26A, designated SEQ ID:20604.

[0655] An additional function of GAM26 is therefore inhibition of cell division cycle 2-like 1 (PITSLRE proteins) (CDC2L1), a gene which encodes a Protein that is a negative regulator of normal cell cycle progression. Accordingly, utilities of GAM26 include diagnosis and treatment of the abovementioned diseases and clinical conditions. The function and utilities of CDC2L1 have been established by previous studies, as described hereinabove with reference to FIG. 26D.

[0656] Reference is now made to CDC34 BINDING SITE. cell division cycle 34 (CDC34) is a target gene of GAM26, corresponding to GAM26-TARGET GENE of FIG. 26A. CDC34 BINDING SITE is a binding site found in an untranslated region of CDC34, corresponding to BINDING SITE of FIG. 26A. FIG. 26D illustrates the complementarity of the nucleotide sequence of CDC34 BINDING SITE, designated SEQ ID:99180, to the nucleotide sequence of GAM26 RNA of FIG. 26A, designated SEQ ID:20604.

[0657] A further function of GAM26 is therefore inhibition of cell division cycle 34 (CDC34), a gene which encodes a Protein that catalyzes the covalent attachment of ubiquitin to other proteins. Accordingly, utilities of GAM26 include diagnosis and treatment of the abovementioned diseases and clinical conditions.

[0658] The function of CDC34 has been established by previous studies. Genomic instability with aneuploidy and chromosomal rearrangement is a hallmark of human malignancies. Normal eukaryotes from yeasts to humans have a conserved checkpoint mechanism in cell division for maintenance of genomic stability. After DNA strand breaks, checkpoint genes induce rest in the G1 and G2 phases of the cell cycle until the damage is repaired. The tumor suppressor gene p53 (191170) is a checkpoint gene required for the G1 arrest after DNA damage. Plon et al. (1993) isolated a putative human G2 checkpoint gene, a homolog of the CDC34 gene of Saccharomyces cerevisiae. Human CDC34 could substitute efficiently for yeast CDC34. Plon et al. (1993) demonstrated by in situ hybridization that the CDC34 gene is located in the far telomeric region of 19p13.3, in a region of homology between human 19p and mouse 11.

[0659] Full details of the abovementioned studies are described in the following publications, the disclosure of which are hereby incorporated by reference:

[0660] Ion, S. E.; Leppig, K. A.; Do, H.-N.; Groudine, M.: Cloning of the human homolog of the CDC34 cell cycle gene by complementation in yeast. Proc. Nat. Acad. Sci. 90: 10484-10488, 1993.

[0661] Further studies establishing the function and utilities of CDC34 are found in John Hopkins OMIM database record ID 116948, and in references numbered 536 listed hereinbelow.

[0662] Reference is now made to CDH23 BINDING SITE. cadherin related 23 (CDH23) is a target gene of GAM26, corresponding to GAM26-TARGET GENE of FIG. 26A. CDH23 BINDING SITE is a binding site found in an untranslated region of CDH23, corresponding to BINDING SITE of FIG. 26A. FIG. 26D illustrates the complementarity of the nucleotide sequence of CDH23 BINDING SITE, designated SEQ ID:100443, to the nucleotide sequence of GAM26 RNA of FIG. 26A, designated SEQ ID:20604.

[0663] Yet a further function of GAM26 is therefore inhibition of cadherin related 23 (CDH23), a gene which encodes a Protein that is associated with usher syndrome type 1d (ush1d). Accordingly, utilities of GAM26 include diagnosis and treatment of the abovementioned diseases and clinical conditions.

[0664] The function of CDH23 has been established by previous studies. Bolz et al. (2001) identified a Cuban pedigree in which type I Usher syndrome was linked to the USH1D locus on chromosome 10. Affected individuals presented with congenital deafness and a highly variable degree of retinal degeneration as an autosomal recessive trait. Using a positional candidate approach, Bolz et al. (2001) identified CDH23 as the gene responsible for USH1D in these individuals. CDH23 encodes a predicted protein of 3,354 amino acids with a single transmembrane domain and 27 cadherin repeats. In the Cuban family, the authors detected 2 different CDH23 mutations. A severe course of the retinal disease was observed in individuals homozygous for a presumed truncating splice-site mutation (605516.0001), whereas mild retinitis pigmentosa was present in individuals carrying a homozygous missense mutation (605516.0002). Variable expression of the retinal phenotype was seen in patients with a combination of the 2 mutations. Bolz et al. (2001) also identified 2 mutations in the CDH23 gene in a German patient with Usher syndrome (see 605516.0003). Only missense mutations of CDH23 have been observed in families with nonsyndromic deafness, whereas nonsense, frameshift, splice-site, and missense mutations have been identified in families with Usher syndrome. Astuto et al. (2002) screened a panel of 69 probands with Usher syndrome and 38 probands with recessive nonsyndromic deafness for the presence of mutations in the entire coding region of CDH23, by heteroduplex, SSCP, and direct sequence analyses. Thirty-six different CDH23 mutations were detected in 45 families; 33 of these mutations were novel, including 18 missense, 3 nonsense, 5 splicing defects, 5 microdeletions, and 2 insertions. Seven mutations were common to more than 1 family. Ophthalmologic examination of patients with nonsyndromic deafness revealed asymptomatic manifestations similar to retinitis pigmentosa (RP; 268000), which indicated that missense mutations may have a subtle effect in the retina. Furthermore, patients with mutations in CDH23 displayed a wide range of hearing loss and RP phenotypes, differing in severity, age at onset, type, and the presence or absence of vestibular areflexia. Astuto et al. (2002) also presented a comprehensive catalog of CDH23 mutations identified both in their study and in patients reported elsewhere with either recessive nonsyndromic deafness or Usher syndrome type I.

[0665] Full details of the abovementioned studies are described in the following publications, the disclosure of which are hereby incorporated by reference:

[0666] olz, H.; von Brederlow, B.; Ramirez, A.; Bryda, E. C.; Kutsche, K.; Nothwang, H. G.; Seeliger, M.; Cabrera, M. C.-S.; Vila, M. C.; Molina, O. P.; Gal, A.; Kubisch, C.: Mutation of CDH23, encoding a new member of the cadherin gene family, causes Usher syndrome type ID. Nature Genet. 27: 108-112, 2001. PubMed ID: 11138009 1. Astuto, L. M.; Bork, J. M.; Weston, M. D.; Askew, J. W.; Fields, R. R.; Orten, D. J.; Ohliger, S. J.; Riazuddin, S.; Morell, R. J.; Khan, S.; Riazuddin, S.; Kremer, H.; and 15 others: CDH23 mutation and phenotype heterogeneity: a profile of 107 diverse families with Usher syndrome and nonsyndromic deafness. Am. J. Hum. Genet. 71: 262-275, 2002.

[0667] Further studies establishing the function and utilities of CDH23 are found in John Hopkins OMIM database record ID 605516, and in references numbered 537-541 listed hereinbelow.

[0668] Reference is now made to CDH6 BINDING SITE. cadherin 6, type 2, K-cadherin (fetal kidney) (CDH6) is a target gene of GAM26, corresponding to GAM26-TARGET GENE of FIG. 26A. CDH6 BINDING SITE is a binding site found in an untranslated region of CDH6, corresponding to BINDING SITE of FIG. 26A. FIG. 26D illustrates the complementarity of the nucleotide sequence of CDH6 BINDING SITE, designated SEQ ID:100628, to the nucleotide sequence of GAM26 RNA of FIG. 26A, designated SEQ ID:20604.

[0669] Another function of GAM26 is therefore inhibition of cadherin 6, type 2, K-cadherin (fetal kidney) (CDH6), a gene which encodes a Protein that is a calcium dependent cell adhesion protein. Accordingly, utilities of GAM26 include diagnosis and treatment of the abovementioned diseases and clinical conditions.

[0670] The function of CDH6 has been established by previous studies. Cadherins are calcium-dependent cell-cell adhesion molecules that mediate cell-cell binding in a homophilic manner. They play key roles in morphogenesis and in the maintenance of orderly structures such as epithelium, and may be involved in the metastasis and invasion of cancer. Mature cadherin proteins are composed of a large N-terminal extracellular domain, a single membrane-spanning domain, and a small C-terminal cytoplasmic domain. The extracellular domain consists of 5 subdomains, each containing a cadherin motif, and appears to determine the specificity of the homophilic cell adhesion activity of the cadherin; the amino acid sequence of the cytoplasmic domain is highly conserved among cadherins. CLONING By PCR using degenerate oligonucleotides based on highly conserved sequences of the cadherin cytoplasmic domain, followed by screening of a human fetal brain cDNA library, Suzuki et al. (1991) isolated a partial cDNA encoding CDH6. Using this partial CDH6 cDNA to screen a human hepatocellular carcinoma cell cDNA library, Shimoyama et al. (1995) cloned a full-length CDH6 cDNA. The deduced 790-amino acid CDH6 protein contains a signal sequence, prosequence, extracellular domain, transmembrane sequence, and cytoplasmic domain. The predicted 737-amino acid mature CDH6 protein has 97% amino acid similarity with rat K-cadherin, 64% with human CDH12 (600562), and 60% with human CDH8 (603008) and CDH11 (600023). Northern blot analysis detected multiple CDH6 transcripts in a variety of normal human tissues, with highest levels in kidney, brain, and cerebellum; no expression was found in liver, heart, or colonic mucosa. Four of 6 hepatocellular carcinoma cell lines and 3 of 4 renal carcinoma cell lines showed strong expression of CDH6 transcripts. Among small cell lung carcinoma lines, all 11 CDH6-positive lines were of the classic type, whereas all 4 CDH6-negative lines were of the variant type.

[0671] Full details of the abovementioned studies are described in the following publications, the disclosure of which are hereby incorporated by reference:

[0672] himoyama, Y.; Gotoh, M.; Terasaki, T.; Kitajima, M.; Hirohashi, S. Isolation and sequence analysis of human cadherin-6 complementary DNA for the full coding sequence and its expression in human carcinoma cells. Cancer Res. 55: 2206-2211, 1995. PubMed ID: 7743525 3. Suzuki, S.; Sano, K.; Tanihara, H.: Diversity of the cadherin family: evidence for eight new cadherins in nervous tissue. Cell Regul. 2: 261-270, 1991.

[0673] Further studies establishing the function and utilities of CDH6 are found in John Hopkins OMIM database record ID 603007, and in references numbered 542-544 listed hereinbelow.

[0674] Referring now to CDH6 BINDING SITE. cadherin 6, type 2, K-cadherin (fetal kidney) (CDH6) is a target gene of GAM26, corresponding to GAM26-TARGET GENE of FIG. 26A. CDH6 BINDING SITE is a binding site found in an untranslated region of CDH6, corresponding to BINDING SITE of FIG. 26A. FIG. 26D illustrates the complementarity of the nucleotide sequence of CDH6 BINDING SITE, designated SEQ ID:100637, to the nucleotide sequence of GAM26 RNA of FIG. 26A, designated SEQ ID:20604.

[0675] Yet another function of GAM26 is therefore inhibition of cadherin 6, type 2, K-cadherin (fetal kidney) (CDH6), a gene which encodes a Protein that is a calcium dependent cell adhesion protein. Accordingly, utilities of GAM26 include diagnosis and treatment of the abovementioned diseases and clinical conditions. The function and utilities of CDH6 have been established by previous studies, as described hereinabove with reference to FIG. 26D.

[0676] Reference is now made to PEA15 BINDING SITE. phosphoprotein enriched in astrocytes 15 (PEA15) is a target gene of GAM26, corresponding to GAM26-TARGET GENE of FIG. 26A. PEA15 BINDING SITE is a binding site found in an untranslated region of PEA15, corresponding to BINDING SITE of FIG. 26A. FIG. 26D illustrates the complementarity of the nucleotide sequence of PEA15 BINDING SITE, designated SEQ ID:100637, to the nucleotide sequence of GAM26 RNA of FIG. 26A, designated SEQ ID:20604.

[0677] An additional function of GAM26 is therefore inhibition of phosphoprotein enriched in astrocytes 15 (PEA15), a gene which encodes a Protein that is a phosphoprotein and involved in glucose uptake. Accordingly, utilities of GAM26 include diagnosis and treatment of the abovementioned diseases and clinical conditions.

[0678] The function of PEA15 has been established by previous studies. Astrocytes are involved in a variety of functions, including storage of glycogen and support for the migration and differentiation of neurons. They express membrane receptors which allow them to respond to extracellular signals. Activation of the receptors induces a cascade of events, such as the stimulation of protein kinases and the subsequent phosphorylation of target proteins. Araujo et al. (1993) identified a unique 15-kD protein in astrocytes that exists as a nonphosphorylated form and as 2 increasingly phosphorylated varieties. This protein, which they called PEA15, contains a consensus site for protein kinase C (PKC; e.g., 176960) and is an endogenous substrate for PKC. Using differential display to identify genes whose expressions are altered in tissues derived from type II diabetes mellitus (125853) patients compared with nondiabetic individuals, Condorelli et al. (1998) cloned cDNAs encoding PEA15, which they named PED for ‘phosphoprotein enriched in diabetes’. The ubiquitously expressed 2.8-kb PED mRNA was overexpressed in fibroblasts, skeletal muscle, and adipose tissue from type II diabetics. Levels of the 15-kD PED phosphoprotein were also elevated in type II diabetic tissues. The authors demonstrated that transfection of a PED cDNA into differentiating L6 skeletal muscle cells increases the content of glucose transporter-1 (GLUT1; 138140) on the plasma membrane and inhibits insulin-stimulated glucose transport and cell surface recruitment of glucose transporter-4 (GLUT4; 138190). These effects were reversed by blocking PKC activity.

[0679] Full details of the abovementioned studies are described in the following publications, the disclosure of which are hereby incorporated by reference:
[0680] raujo, H.; Danziger, N.; Cordier, J.; Glowinski, J.; Chneiweiss, H. Characterization of PEA-15, a major substrate for protein kinase C in astrocytes. J. Biol. Chem. 268: 5911-5920, 1993. PubMed ID: 8449955 3. Condorelli, G.; Vigliotta, G.; lavarone, C.; Caruso, M.; Tocchetti, C. G.; Andreozzi, F.; Cafieri, A.; Tecce, M. F.; Formisano, P.; Beguinot, L.; Beguinot, F.: PED/PEA-15 gene controls glucose transport and is overexpressed in type 2 diabetes mellitus. EMBO J. 17: 3858-3866, 1998.

[0681] Further studies establishing the function and utilities of PEA15 are found in John Hopkins OMIM database record ID 603434, and in references numbered 545-551 listed hereinbelow.

[0682] Referring now to CDH6 BINDING SITE. cadherin 6, type 2, K-cadherin (fetal kidney) (CDH6) is a target gene of GAM26, corresponding to GAM26-TARGET GENE of FIG. 26A. CDH6 BINDING SITE is a binding site found in an untranslated region of CDH6, corresponding to BINDING SITE of FIG. 26A. FIG. 26D illustrates the complementarity of the nucleotide sequence of CDH6 BINDING SITE, designated SEQ ID:100646, to the nucleotide sequence of GAM26 RNA of FIG. 26A, designated SEQ ID:20604.

[0683] A further function of GAM26 is therefore inhibition of cadherin 6, type 2, K-cadherin (fetal kidney) (CDH6), a gene which encodes a Protein that is a calcium dependent cell adhesion protein. Accordingly, utilities of GAM26 include diagnosis and treatment of the abovementioned diseases and clinical conditions. The function and utilities of CDH6 have been established by previous studies, as described hereinabove with reference to FIG. 26D.

[0684] Reference is now made to CDK9 BINDING SITE. cyclin-dependent kinase 9 (CDC2-related kinase) (CDK9) is a target gene of GAM26, corresponding to GAM26-TARGET GENE of FIG. 26A. CDK9 BINDING SITE is a binding site found in an untranslated region of CDK9, corresponding to BINDING SITE of FIG. 26A. FIG. 26D illustrates the complementarity of the nucleotide sequence of CDK9 BINDING SITE, designated SEQ ID:101419, to the nucleotide sequence of GAM26 RNA of FIG. 26A, designated SEQ ID:20604.

[0685] Yet a further function of GAM26 is therefore inhibition of cyclin-dependent kinase 9 (CDC2-related kinase) (CDK9), a gene which encodes a Protein that is a positive transcription elongation factor band. Accordingly, utilities of GAM26 include diagnosis and treatment of the abovementioned diseases and clinical conditions.

[0686] The function of CDK9 has been established by previous studies. Cyclin-dependent kinases (CDKs) are CDC2 (116940)-related kinases that bind to cyclin to form active holoenzymes that play a pivotal role in the regulation of the eukaryotic cell cycle. To identify additional CDC2 family members, Grana et al. (1994) performed PCR on a mouse embryonic cDNA library using degenerate oligonucleotides based on regions conserved among CDC2-related proteins. They used a resulting PCR product to screen a human cDNA library and isolated a CDK9 cDNA. The predicted 372-amino acid protein contains the 11 conserved regions characteristic of the protein kinase catalytic domain, a putative nuclear localization signal, and a putative ATP-binding site. The authors called the protein PITALRE because it contains a pro-ile-thr-ala-leu-arg-glu motif that is similar to the PSTAIRE motif found in prototypic CDC2 kinases. CDK9 shares 41 to 43% amino acid sequence identity with CDC2, CDK2 (116953), CDK3 (123828), and CDK5 (123831). Subcellular fractionation and Western blot analyses demonstrated that CDK9 has a molecular mass of 43 kD and is located primarily in the nucleus. Three cellular proteins coimmunoprecipitated with CDK9, and CDK9 immunocomplexes had an RB1 (180200) kinase activity. Northern blot analysis indicated that CDK9 was expressed as 2.8- and 3.2-kb mRNAs in all tissues tested, with the highest levels in liver and placenta. Yang et al. (2001) identified 7SK snRNA (606515) as a specific P-TEFb-associated factor. 7SK inhibits general and HIV-1 Tat-specific transcriptional activities of P-TEFb in vivo and in vitro by inhibiting the kinase activity of CDK9 and preventing recruitment of P-TEFb to the HIV-1 promoter. 7SK is efficiently dissociated from P-TEFb (the CDK9/cyclin T1 heterodimer) by treatment of cells with ultraviolet irradiation and actinomycin D. As these 2 agents have been shown to enhance significantly HIV-1 transcription and phosphorylation of Pol-II, Yang et al. (2001) concluded that their data provide a mechanistic explanation for this stimulatory effect. Yang et al. (2001) further suggested that the 7SK/P-TEFb interaction may serve as a principal control point for the induction of cellular and HIV-1 viral gene expression during stress-related responses. The study demonstrated the involvement of an snRNA in controlling the activity of CDK/cyclin kinase.

[0687] Full details of the abovementioned studies are described in the following publications, the disclosure of which are hereby incorporated by reference:

[0688] ang, Z.; Zhu, Q.; Luo, K.; Zhou, Q.: The 7SK small nuclear RNA inhibits the CDK9/cyclin T1 kinase to control transcription. Nature 414: 317-322, 2001. PubMed ID: 11713532 5. Grana, X.; De Luca, A.; Sang, N.; Fu, Y.; Claudio, P. P.; Rosenblatt, J.; Morgan, D. O.; Giordano, A.: PITALRE, a nuclear CDC2-related protein kinase that phosphorylates the retinoblastoma protein in vitro. Proc. Nat. Acad. Sci. 91: 3834-3838, 1994.

[0689] Further studies establishing the function and utilities of CDK9 are found in John Hopkins OMIM database record ID 603251, and in references numbered 552-559 listed hereinbelow.

[0690] Referring now to CDK9 BINDING SITE. cyclin-dependent kinase 9 (CDC2-related kinase) (CDK9) is a target gene of GAM26, corresponding to GAM26-TARGET GENE of FIG. 26A. CDK9 BINDING SITE is a binding site found in an untranslated region of CDK9, corresponding to BINDING SITE of FIG. 26A. FIG. 26D illustrates the complementarity of the nucleotide sequence of CDK9 BINDING SITE, designated SEQ ID:101421, to the nucleotide sequence of GAM26 RNA of FIG. 26A, designated SEQ ID:20604.

[0691] Another function of GAM26 is therefore inhibition of cyclin-dependent kinase 9 (CDC2-related kinase) (CDK9), a gene which encodes a Protein that is a positive transcription elongation factor band. Accordingly, utilities of GAM26 include diagnosis and treatment of the abovementioned diseases and clinical conditions. The function and utilities of CDK9 have been established by previous studies, as described hereinabove with reference to FIG. 26D.

[0692] Referring now to CDK9 BINDING SITE. cyclin-dependent kinase 9 (CDC2-related kinase) (CDK9) is a target gene of GAM26, corresponding to GAM26-TARGET GENE of FIG. 26A. CDK9 BINDING SITE is a binding site found in an untranslated region of CDK9, corresponding to BINDING SITE of FIG. 26A. FIG. 26D illustrates the complementarity of the nucleotide sequence of CDK9 BINDING SITE, designated SEQ ID:101424, to the nucleotide sequence of GAM26 RNA of FIG. 26A, designated SEQ ID:20604.

[0693] Yet another function of GAM26 is therefore inhibition of cyclin-dependent kinase 9 (CDC2-related kinase) (CDK9), a gene which encodes a Protein that is a positive transcription elongation factor band. Accordingly, utilities of GAM26 include diagnosis and treatment of the abovementioned diseases and clinical conditions. The function and utilities of CDK9 have been established by previous studies, as described hereinabove with reference to FIG. 26D.

[0694] Referring now to CDK9 BINDING SITE. cyclin-dependent kinase 9 (CDC2-related kinase) (CDK9) is a target gene of GAM26, corresponding to GAM26-TARGET GENE of FIG. 26A. CDK9 BINDING SITE is a binding site found in an untranslated region of CDK9, corresponding to BINDING SITE of FIG. 26A. FIG. 26D illustrates the complementarity of the nucleotide sequence of CDK9 BINDING SITE, designated SEQ ID:101437, to the nucleotide sequence of GAM26 RNA of FIG. 26A, designated SEQ ID:20604.

[0695] An additional function of GAM26 is therefore inhibition of cyclin-dependent kinase 9 (CDC2-related kinase) (CDK9), a gene which encodes a Protein that is a positive transcription elongation factor band. Accordingly, utilities of GAM26 include diagnosis and treatment of the abovementioned diseases and clinical conditions. The function and utilities of CDK9 have been established by previous studies, as described hereinabove with reference to FIG. 26D.

[0696] Reference is now made to CDKN2D BINDING SITE. cyclin-dependent kinase inhibitor 2D (p19, inhibits CDK4) (CDKN2D) is a target gene of GAM26, corresponding to GAM26-TARGET GENE of FIG. 26A. CDKN2D BINDING SITE is a binding site found in an untranslated region of CDKN2D, corresponding to BINDING SITE of FIG. 26A. FIG. 26D illustrates the complementarity of the nucleotide sequence of CDKN2D BINDING SITE, designated SEQ ID: 102195, to the nucleotide sequence of GAM26 RNA of FIG. 26A, designated SEQ ID:20604.

[0697] A further function of GAM26 is therefore inhibition of cyclin-dependent kinase inhibitor 2D (p19, inhibits CDK4) (CDKN2D), a gene which encodes a Protein that interacts strongly with cdk4 and cdk6. Accordingly, utilities of GAM26 include diagnosis and treatment of the abovementioned diseases and clinical conditions.

[0698] The function of CDKN2D has been established by previous studies. Cyclins are important in regulating the cell cycle through their formation of enzymatic complexes with various cyclin-dependent kinases. The D type cyclins complex with CDK4 (123829) and CDK6 to govern progression through the G1 phase of the cell cycle and later are involved with inactivating phosphorylation of the RB protein (180200) which results in release of RB-associated transcription factors that are needed for entry into S phase (Okuda et al., 1995). The activity of the cyclin D-dependent kinases is, in part, controlled by inhibitors such as the INK4 family (which includes INK4a (CDKN2A; 600160), 4b (CDKN2B; 600431), 4c (CDKN2C), and 4d (CDKN2D)). INK4a has been shown to act by competing with CDK4 and CDK6 and functions as a tumor suppressor in a variety of cancers. The INK4d protein was first identified in a yeast 2-hybrid system screened for CDK4 binding proteins (Hirai et al., 1995). The mouse INK4d protein interacts with cdk6 as well. In fibroblasts and macrophages it is rapidly induced at the G1-to-S transition. Overexpression of INK4d caused NIH 3T3 cells to arrest in G1 phase and inhibited cyclin D1-CDK4 kinase activity (Hirai et al., 1995). Okuda et al. (1995) described the cloning and mapping of the human INK4d gene (CDKN2D). The predicted 166-amino acid protein is 86% identical to the mouse protein and about 45% identical to other human INK4 family members. Northern blots showed that the 1.4-kb transcript is ubiquitously expressed with the highest levels in tissues with the most rapidly dividing cells. Lowest expression occurs at mid G1 phase and is highest during S phase. Okuda et al. (1995) obtained a P1-phage genomic clone including the gene and mapped it by fluorescence in situ hybridization to 19p13

[0699] Full details of the abovementioned studies are described in the following publications, the disclosure of which are hereby incorporated by reference:

[0700] irai, H.; Roussel, M. F.; Kato, J.-Y.; Ashmun, R. A.; Sherr, C. J. Novel INK4 proteins, p19 and p18, are specific inhibitors of cyclin D-dependent kinases CDK4 and CDK6. Molec. Cell. Biol. 15: 2672-2681, 1995. PubMed ID: 7739547 2. Okuda, T.; Hirai, H.; Valentine, V. A.; Shurtleff, S. A.; Kidd, V. J.; Lahti, J. M.; Sherr, C. J.; Downing, J. R.: Molecular cloning, expression pattern, and chromosomal localization of human CDKN2D/INK4d, an inhibitor of cyclin D-dependent kinases. Genomics 29: 623-630, 1995.

[0701] Further studies establishing the function and utilities of CDKN2D are found in John Hopkins OMIM database record ID 600927, and in references numbered 560-561 listed hereinbelow.

[0702] Referring now to CDKN2D BINDING SITE. cyclin-dependent kinase inhibitor 2D (p19, inhibits CDK4) (CDKN2D) is a target gene of GAM26, corresponding to GAM26-TARGET GENE of FIG. 26A. CDKN2D BINDING SITE is a binding site found in an untranslated region of CDKN2D, corresponding to BINDING SITE of FIG. 26A. FIG. 26D illustrates the complementarity of the nucleotide sequence of CDKN2D BINDING SITE, designated SEQ ID:102235, to the nucleotide sequence of GAM26 RNA of FIG. 26A, designated SEQ ID:20604.

[0703] Yet a further function of GAM26 is therefore inhibition of cyclin-dependent kinase inhibitor 2D (p19, inhibits CDK4) (CDKN2D), a gene which encodes a Protein that interacts strongly with cdk4 and cdk6. Accordingly, utilities of GAM26 include diagnosis and treatment of the abovementioned diseases and clinical conditions. The function and utilities of CDKN2D have been established by previous studies, as described hereinabove with reference to FIG. 26D.

[0704] Reference is now made to CHN2 BINDING SITE. chimerin (chimaerin) 2 (CHN2) is a target gene of GAM26, corresponding to GAM26-TARGET GENE of FIG. 26A. CHN2 BINDING SITE is a binding site found in an untranslated region of CHN2, corresponding to BINDING SITE of FIG. 26A. FIG. 26D illustrates the complementarity of the nucleotide sequence of CHN2 BINDING SITE, designated SEQ ID:105797, to the nucleotide sequence of GAM26 RNA of FIG. 26A, designated SEQ ID:20604.

[0705] Another function of GAM26 is therefore inhibition of chimerin (chimaerin) 2 (CHN2), a gene which encodes a receptor that plays a role in the progression from low-grade to high-grade tumors. Accordingly, utilities of GAM26 include diagnosis and treatment of the abovementioned diseases and clinical conditions.

[0706] The function of CHN2 has been established by previous studies. The Rho family of GTP-binding proteins is believed to play a role in membrane/cytoskeletal reorganization events. These proteins cycle between active GTP-bound and inactive GDP-bound forms. Activation to the GTP-bound state is mediated by specific guanine nucleotide dissociation stimulators, whereas acceleration of GTP hydrolysis can be accomplished by GTPase-activating proteins (GAPs). Leung et al. (1993) isolated a rat testis cDNA that encodes a 30-kD GAP, which they named beta-chimerin, or beta-1-chimerin. The 1.35-kb beta-1-chimerin transcript is present exclusively in testicular germ cells. The beta-1-chimerin protein contains a phorbol ester-binding region and a GAP domain, and is selective for Rae (see RAC1; 602048). Leung et al. (1994) detected a 46-kD RacGAP in soluble rat cerebellar extracts, using antibodies against beta-1-chimerin. By screening a human cerebellar cDNA library with a rat beta-1-chimerin cDNA, they cloned a 2.45-kb cDNA corresponding to the cerebellar chimerin, which they named beta-2-chimerin. The encoded 466-amino acid beta-2-chimerin protein is identical to beta-1-chimerin in both the phorbol ester-binding and GAP domains, but it contains an additional N-terminal SH2 domain which is strikingly similar to that of alpha-2-chimerin (CHN1; 118423). Based on Southern blot and cDNA analyses, the authors concluded that beta-1- and beta-2-chimerin are derived from the same gene by alternative splicing. In situ hybridization of rat brain showed that beta-2-chimerin mRNA is expressed only in the cerebellum, mainly in granule cells. Beta-2-chimerin protein is enriched in the particulate/synaptosomal fractions of rat cerebellum. Signaling in response to the second messenger diacylglycerol (DAG) is thought to proceed through the activation of protein kinase C (PKC) isozymes. Binding of this lipid second messenger and its related analogs, the phorbol esters, occurs at the C1 domains (also called cysteine-rich regions or zinc fingers) present in PKCs. The phorbol ester receptor family was expanded with the discovery of the chimerins. The several chimerin isoforms each possess a single C1 domain with approximately 40% homology to those present in PKCs. Having previously demonstrated that beta-2-chimerin binds phorbol esters with high affinity, Caloca et al. (1999) analyzed its properties as a DAG receptor by using a series of conformationally constrained cyclic DAG analogs (DAG lactones) as probes. They identified analogs that bind to beta-2-chimerin with high affinity. Cellular studies revealed that these DAG analogs induced translocation of beta-2-chimerin from cytosolic (soluble) to particulate fractions, and specifically to the perinuclear region. Binding and translocation were prevented by mutation of the conserved cys246 in the C1 domain. The results demonstrated that beta-2-chimerin is indeed a high affinity receptor for DAG through binding to its C1 domain and supported the concept that multiple pathways transduce signaling through DAG and the phorbol esters

[0707] Full details of the abovementioned studies are described in the following publications, the disclosure of which are hereby incorporated by reference:

[0708] eung, T.; How, B.-E.; Manser, E.; Lim, L.: Cerebellar beta-2-chimaerin, a GTPase-activating protein for p21 Ras-related Rac is specifically expressed in granule cells and has a unique N-terminal SH2 domain J. Biol. Chem. 269: 12888-12892, 1994. PubMed ID: 8175705 1. Caloca, M. J.; Garcia-Bermejo, M. L.; Blumberg, P. M.; Lewin, N. E.; Kremmer, E.; Mischak, H.; Wang, S.; Nacro, K.; Bienfait, B.; Marquez, V. E.; Kazanietz, M. G.: Beta-2-chimaerin is a novel target for diacylglycerol: binding properties and changes in subcellular localization mediated by ligand binding to its C1 domain. Proc. Nat. Acad. Sci. 96: 11854-11859, 1999.

[0709] Further studies establishing the function and utilities of CHN2 are found in John Hopkins OMIM database record ID 602857, and in references numbered 562-565 listed hereinbelow.

[0710] Reference is now made to CHRNA3 BINDING SITE. cholinergic receptor, nicotinic, alpha polypeptide 3 (CHRNA3) is a target gene of GAM26, corresponding to GAM26-TARGET GENE of FIG. 26A. CHRNA3 BINDING SITE is a binding site found in an untranslated region of CHRNA3, corresponding to BINDING SITE of FIG. 26A. FIG. 26D illustrates the complementarity of the nucleotide sequence of CHRNA3 BINDING SITE, designated SEQ ID:106136, to the nucleotide sequence of GAM26 RNA of FIG. 26A, designated SEQ ID:20604.

[0711] Yet another function of GAM26 is therefore inhibition of cholinergic receptor, nicotinic, alpha polypeptide 3 (CHRNA3), a gene which encodes a Protein that binds acetylcholine and opens an ion-conducting channel across the plasma membrane. and is associated with myasthenia gravis. Accordingly, utilities of GAM26 include diagnosis and treatment of the abovementioned diseases and clinical conditions.

[0712] The function of CHRNA3 has been established by previous studies. To examine the role of thymic AChRs in the anti-AChR response seen in myasthenia gravis (254200), Mihovilovic and Roses (1991) independently isolated the human alpha-3 subunit from a thymus cDNA library. The open reading frame coded for a 503-amino acid protein with a 29-amino acid putative signal peptide. On Northern blots, alpha-3 was transcribed as a major 3.0-kb mRNA with other minor bands in thymus but not in muscle or liver. Groot Kormelink and Luyten (1997) reported that alpha-3 was transcribed as a 3.0-kb mRNA on Northern blots of a neuroblastoma cell line. Prompted by the finding that mutations in the CHRNA4 gene (118504) are responsible for some cases of autosomal dominant nocturnal frontal lobe epilepsy (600513), Rempel et al. (1998) determined the genomic structure of the CHRNA3 gene necessary for mutational analysis of this gene as a candidate in families with epilepsy unlinked to CHRNA4.

[0713] Animal model experiments lend further support to the function of CHRNA3. The alpha-3 subunit of the neuronal nicotinic acetylcholine receptor is widely expressed in autonomic ganglia and in some parts of the brain. The alpha-3 subunit can form heteromultimeric ion channels with other alpha subunits and with beta-2 and beta-4 subunits. To understand better the function of CHRNA3 in vivo, Xu et al. (1999) prepared a null mutation for the alpha-3 gene by the deletion of exon 5 and found that homozygous −/− mice lacked detectable mRNA on Northern blotting. The null mice survived to birth but had impaired growth and increased mortality before and after weaning. The null mice had extreme bladder enlargement, dribbling urination, bladder infection, urinary stones, and widely dilated ocular pupils that did not contract in response to light. Detailed histologic studies of null mice showed no significant abnormalities in brain or peripheral tissues except urinary bladder, where inflammation was prominent. Ganglion cells and axons were present in bladder and bowel. Bladder strips from null mice failed to contract in response to 0.1 mM nicotine, but did contract in response to electrical field stimulation or carbamoylcholine. The number of acetylcholine-activated single-channel currents was severely reduced in the neurons of superior cervical ganglia in null mice with 5 physiologically distinguishable nicotinic acetylcholine receptor subtypes with different conductance and kinetic properties in wildtype mice, all of which were reduced in null mice. The findings in the alpha-3-null mice suggested that this subunit is an essential component of the nicotinic receptors mediating normal function of the autonomic nervous system. Xu et al. (1999) suggested that the phenotype in null mice may be similar to that of the rare megacystis-microcolon-intestinal hypoperistalsis syndrome (MMIH; 249210).

[0714] It is appreciated that the abovementioned animal model for CHRNA3 is acknowledged by those skilled in the art as a scientifically valid animal model, as can be further appreciated from the publications sited hereinbelow.

[0715] Full details of the abovementioned studies are described in the following publications, the disclosure of which are hereby incorporated by reference:

[0716] root Kormelink, P. J.; Luyten, W. H. M. L.: Cloning and sequence of full-length cDNAs encoding the human neuronal nicotinic acetylcholine receptor (nAChR) subunits beta-3 and beta-4 and expression of seven nAChR subunits in the human neuroblastoma cell line SH-SY5Y and/or IMR-32. FEBS Lett. 400: 309-314, 1997. PubMed ID: 9009220 12. Rempel, N.; Heyers, S.; Engels, H.; Sleegers, E.; Steinlein, O. K.: The structures of the human neuronal nicotinic acetylcholine receptor beta-2- and alpha-3-subunit genes (CHRNB2 and CHRNA3). Hum. Genet. 103: 645-653, 1998.

[0717] Further studies establishing the function and utilities of CHRNA3 are found in John Hopkins OMIM database record ID 118503, and in references numbered 566-578 listed hereinbelow.

[0718] Referring now to CHS1 BINDING SITE. Chediak-Higashi syndrome 1 (CHS1) is a target gene of GAM26, corresponding to GAM26-TARGET GENE of FIG. 26A. CHS1 BINDING SITE is a binding site found in an untranslated region of CHS1, corresponding to BINDING SITE of FIG. 26A. FIG. 26D illustrates the complementarity of the nucleotide sequence of CHS1 BINDING SITE, designated SEQ ID:106651, to the nucleotide sequence of GAM26 RNA of FIG. 26A, designated SEQ ID:20604.

[0719] An additional function of GAM26 is therefore inhibition of Chediak-Higashi syndrome 1 (CHS1), a gene which encodes a Protein that is associated with chediak-Higashi syndrome. Accordingly, utilities of GAM26 include diagnosis and treatment of the abovementioned diseases and clinical conditions. The function and utilities of CHS1 have been established by previous studies, as described hereinabove with reference to FIG. 26D.

[0720] Reference is now made to CKAP1 BINDING SITE. cytoskeleton-associated protein 1 (CKAP1) is a target gene of GAM26, corresponding to GAM26-TARGET GENE of FIG. 26A. CKAP1 BINDING SITE is a binding site found in an untranslated region of CKAP1, corresponding to BINDING SITE of FIG. 26A. FIG. 26D illustrates the complementarity of the nucleotide sequence of CKAP1 BINDING SITE, designated SEQ ID:107655, to the nucleotide sequence of GAM26 RNA of FIG. 26A, designated SEQ ID:20604.

[0721] A further function of GAM26 is therefore inhibition of cytoskeleton-associated protein 1 (CKAP1), a gene which encodes a Protein that binds to alpha-tubulin folding intermediates. Accordingly, utilities of GAM26 include diagnosis and treatment of the abovementioned diseases and clinical conditions.

[0722] The function of CKAP1 has been established by previous studies. The cytoskeleton is composed of 3 structural elements: actin filaments, microtubules, and intermediate filaments. Cytoskeletal activity is modulated by many cytoskeleton-associated proteins (CAPs). One group of CAPs is characterized by a highly conserved glycine motif, the CAP-GLY domain, which may contribute to its association with microtubules. Members of the group of CAPs include dynactin (601143), the dynein-associated protein. Watanabe et al. (1996) isolated a novel member of this family, which they called CKAP1 (for cytoskeleton-associated protein I, glycine motif). The cDNA was isolated from a human fetal-brain cDNA library and found to contain an open reading frame of 579 nucleotides encoding a 193-amino acid polypeptide. Three transcripts of different sizes were expressed in all tissues examined. By fluorescence in situ hybridization, Watanabe et al. (1996) assigned the gene to 19q13.11-q13.12.

[0723] Full details of the abovementioned studies are described in the following publications, the disclosure of which are hereby incorporated by reference:

[0724] atanabe, T. K.; Shimizu, F.; Nagata, M.; Kawai, A.; Fujiwara, T.; Nakamura, Y.; Takahashi, E.; Hirai, Y.: Cloning, expression, and mapping of CKAP1, which encodes a putative cytoskeleton-associated protein containing a CAP-GLY domain. Cytogenet. Cell Genet. 72: 208-211, 1996.

[0725] Further studies establishing the function and utilities of CKAP1 are found in John Hopkins OMIM database record ID 601303, and in references numbered 579 listed hereinbelow.

[0726] Referring now to CKAP1 BINDING SITE. cytoskeleton-associated protein 1 (CKAP1) is a target gene of GAM26, corresponding to GAM26-TARGET GENE of FIG. 26A. CKAP1 BINDING SITE is a binding site found in an untranslated region of CKAP1, corresponding to BINDING SITE of FIG. 26A. FIG. 26D illustrates the complementarity of the nucleotide sequence of CKAP1 BINDING SITE, designated SEQ ID:107655, to the nucleotide sequence of GAM26 RNA of FIG. 26A, designated SEQ ID:20604.

[0727] Yet a further function of GAM26 is therefore inhibition of cytoskeleton-associated protein 1 (CKAPI), a gene which encodes a Protein that binds to alpha-tubulin folding intermediates. Accordingly, utilities of GAM26 include diagnosis and treatment of the abovementioned diseases and clinical conditions. The function and utilities of CKAP1 have been established by previous studies, as described hereinabove with reference to FIG. 26D.

[0728] Referring now to CKAP1 BINDING SITE. cytoskeleton-associated protein 1 (CKAP1) is a target gene of GAM26, corresponding to GAM26-TARGET GENE of FIG. 26A. CKAP1 BINDING SITE is a binding site found in an untranslated region of CKAP1, corresponding to BINDING SITE of FIG. 26A. FIG. 26D illustrates the complementarity of the nucleotide sequence of CKAP1 BINDING SITE, designated SEQ ID:107659, to the nucleotide sequence of GAM26 RNA of FIG. 26A, designated SEQ ID:20604.

[0729] Another function of GAM26 is therefore inhibition of cytoskeleton-associated protein 1 (CKAP1), a gene which encodes a Protein that binds to alpha-tubulin folding intermediates. Accordingly, utilities of GAM26 include diagnosis and treatment of the abovementioned diseases and clinical conditions. The function and utilities of CKAP1 have been established by previous studies, as described hereinabove with reference to FIG. 26D.

[0730] Reference is now made to COL5A1 BINDING SITE. collagen, type V, alpha 1 (COL5A1) is a target gene of GAM26, corresponding to GAM26-TARGET GENE of FIG. 26A. COL5A1 BINDING SITE is a binding site found in an untranslated region of COL5A1, corresponding to BINDING SITE of FIG. 26A. FIG. 26D illustrates the complementarity of the nucleotide sequence of COL5A1 BINDING SITE, designated SEQ ID: 114312, to the nucleotide sequence of GAM26 RNA of FIG. 26A, designated SEQ ID:20604.

[0731] Yet another function of GAM26 is therefore inhibition of collagen, type V, alpha 1 (COL5A1), a gene which encodes a Protein that is associated with EHLERS-DANLOS SYNDROME. Accordingly, utilities of GAM26 include diagnosis and treatment of the abovementioned diseases and clinical conditions.

[0732] The function of COL5A1 has been established by previous studies. Type V collagen was first identified in human placenta and adult skin, but later studies showed that it is present in many other tissues and organs as a minor collagen component. Type V collagen occurs as heterotrimers of 3 different polypeptide chains, alpha-1, alpha-2 (COL5A2, 120190), and alpha-3 (COL5A3, 120216), or 2 copies of alpha-1 and 1 copy of alpha-2; it also occurs as a homotrimer of alpha-1 polypeptides. Takahara et al. (1991) reported the sequence of cDNA encoding the complete prepro-alpha-1(V) chain. The collagenous region and COOH-terminal noncollagenous region closely resembled that of the alpha-1(XI) (120280) chain; however, codon usage differed, suggesting that the COL5A1 gene is evolutionarily distinct Similarly, Wenstrup et al. (2000) found that 8 of 28 probands with classic EDS, who were heterozygous for expressed polymorphisms in COL5A1, showed complete or nearly complete loss of expression of 1 COL5A1 allele. Reduced levels of COL5A1 mRNA relative to levels of COL5A2 mRNA were also observed in the cultured fibroblasts from EDS probands. Products of the 2 COL5A1 alleles were approximately equal after the addition of cycloheximide to the fibroblast cultures. After harvesting of mRNAs from cycloheximide-treated cultured fibroblasts, heteroduplex analysis of overlapping RT-PCR segments spanning the complete COL5A1cDNA showed anomalies in 4 of the 8 probands, leading to identification of causative mutations; in the remaining 4 probands, targeting of CGA-to-TGA mutations in genomic DNA revealed a premature stop codon in one of them. Wenstrup et al. (2000) estimated that one-third of persons with classic EDS have mutations of the COL5A1 gene that result in haploinsufficiency. These findings indicated that normal formation of the heterotypic collagen fibrils that contain types I, III, and V collagen require the expression of both COL5A1 alleles

[0733] Full details of the abovementioned studies are described in the following publications, the disclosure of which are hereby incorporated by reference:

[0734] Takahara, K.; Sato, Y.; Okazawa, K.; Okamoto, N.; Noda, A.; Yaoi, Y.; Kato, I.: Complete primary structure of human collagen alpha-1(V) chain. J. Biol. Chem. 266: 13124-13129, 1991. PubMed ID: 2071595 17. Wenstrup, R. J.; Florer, J. B.; Willing, M. C.; Giunta, C.; Steinmann, B.; Young, F.; Susic, M.; Cole, W. G.: COL5A1 haploinsufficiency is a common molecular mechanism underlying the classical form of EDS. Am. J. Hum. Genet. 66: 1766-1776, 2000.

[0735] Further studies establishing the function and utilities of COL5A1 are found in John Hopkins OMIM database record ID 120215, and in references numbered 580-597 listed hereinbelow.

[0736] Referring now to COL5A1 BINDING SITE. collagen, type V, alpha 1 (COL5A1) is a target gene of GAM26, corresponding to GAM26-TARGET GENE of FIG. 26A. COL5A1 BINDING SITE is a binding site found in an untranslated region of COL5A1, corresponding to BINDING SITE of FIG. 26A. FIG. 26D illustrates the complementarity of the nucleotide sequence of COL5A1 BINDING SITE, designated SEQ ID:114314, to the nucleotide sequence of GAM26 RNA of FIG. 26A, designated SEQ ID:20604.

[0737] An additional function of GAM26 is therefore inhibition of collagen, type V, alpha 1 (COL5A1), a gene which encodes a Protein that is associated with EHLERS-DANLOS SYNDROME. Accordingly, utilities of GAM26 include diagnosis and treatment of the abovementioned diseases and clinical conditions. The function and utilities of COL5A1 have been established by previous studies, as described hereinabove with reference to FIG. 26D.

[0738] Reference is now made to CPE BINDING SITE. carboxypeptidase E (CPE) is a target gene of GAM26, corresponding to GAM26-TARGET GENE of FIG. 26A. CPE BINDING SITE is a binding site found in an untranslated region of CPE, corresponding to BINDING SITE of FIG. 26A. FIG. 26D illustrates the complementarity of the nucleotide sequence of CPE BINDING SITE, designated SEQ ID: 116431, to the nucleotide sequence of GAM26 RNA of FIG. 26A, designated SEQ ID:20604.

[0739] A further function of GAM26 is therefore inhibition of carboxypeptidase E (CPE), a gene which encodes a Enzyme that removes residual c-terminal arg or lys remaining after initial endoprotease cleavage. and is associated with hyperproinsulinemia and diabetes. Accordingly, utilities of GAM26 include diagnosis and treatment of the abovementioned diseases and clinical conditions.

[0740] The function of CPE has been established by previous studies. Naggert et al. (1995) stated that mice homozygous for the ‘fat’ mutation develop obesity and hyperglycemia that can be suppressed by treatment with exogenous insulin. The ‘fat’ mutation maps to mouse chromosome 8, very close to the gene for carboxypeptidase E (Cpe), which encodes an enzyme (CPE) that processes prohormone intermediates such as proinsulin. Naggert et al. (1995) demonstrated a defect in proinsulin processing associated with the virtual absence of CPE activity in extracts of fat/fat pancreatic islets and pituitaries. A single ser202-to-pro mutation distinguished the mutant Cpe allele and abolished enzymatic activity in vitro. Thus, the ‘fat’ mutation represents the first demonstration of an obesity-diabetes syndrome elicited by a genetic defect in a prohormone processing pathway. As indicated, CPE is involved in the biosynthesis of peptide hormones and neurotransmitters, including insulin. One of the features of type II diabetes mellitus (125853) is an elevation in the proinsulin level and/or molar ratio of proinsulin to insulin, suggesting that mutations in proinsulin processing enzymes may contribute to the development of this form of diabetes. Chen et al. (2001) scanned the CPE gene for mutations in a collection of Ashkenazi type II diabetes families and identified 5 novel single-nucleotide polymorphisms. One of these, a C-to-T transition at nucleotide 847, changed arginine to tryptophan (arg283 to trp; R283W). The arg283 residue is conserved among CPE orthologs as well as most enzymatically active metallocarboxypeptidases. Of the 272 Ashkenazi pedigrees with type II diabetes, Chen et al. (2001) found 4 families segregating R283W. Within these 4 families, patients who inherited one copy of this variant had much earlier age of onset of type II diabetes. The R283W CPE protein was found to cleave peptide substrates with substantially lower efficiencies and was, furthermore, less stable at elevated temperature. In addition, the R283W CPE variant had a narrower pH optimum and was much less active at pH 6.0 to 6.5, indicating that the R283W CPE variant would be substantially less active than wildtype CPE in the trans-Golgi network and immature secretory vesicles where the enzyme functions in vivo. Chen et al. (2001) predicted that in the homozygous state this mutant could cause hyperproinsulinemia and diabetes.

[0741] Full details of the abovementioned studies are described in the following publications, the disclosure of which are hereby incorporated by reference:

[0742] aggert, J. K.; Fricker, L. D.; Varlamov, O.; Nishina, P. M.; Rouille, Y.; Steiner, D. F.; Carroll, R. J.; Paigen, B. J.; Leiter, E. H.: Hyperproinsulinaemia in obese fat/fat mice associated with a carboxypeptidase E mutation which reduces enzyme activity. Nature Genet. 10: 135-142, 1995. PubMed ID: 7663508 1. Chen, H.; Jawahar, S.; Qian, Y.; Duong, Q.; Chan, G.; Parker, A.; Meyer, J. M.; Moore, K. J.; Chayen, S.; Gross, D. J.; Glaser, B.; Permutt, M. A.; Fricker, L. D.: Missense polymorphism in the human carboxypeptidase E gene alters enzymatic activity. Hum. Mutat. 18: 120-131, 2001.

[0743] Further studies establishing the function and utilities of CPE are found in John Hopkins OMIM database record ID 114855, and in references numbered 598-602 listed hereinbelow.

[0744] Reference is now made to CSNK1D BINDING SITE. casein kinase 1, delta (CSNK1D) is a target gene of GAM26, corresponding to GAM26-TARGET GENE of FIG. 26A. CSNK1D BINDING SITE is a binding site found in an untranslated region of CSNK1D, corresponding to BINDING SITE of FIG. 26A. FIG. 26D illustrates the complementarity of the nucleotide sequence of CSNK1D BINDING SITE, designated SEQ ID:120331, to the nucleotide sequence of GAM26 RNA of FIG. 26A, designated SEQ ID:20604.

[0745] Yet a further function of GAM26 is therefore inhibition of casein kinase 1, delta (CSNK1D), a gene which encodes a Protein that can phosphorylate a large number of proteins. Accordingly, utilities of GAM26 include diagnosis and treatment of the abovementioned diseases and clinical conditions.

[0746] The function of CSNK1D has been established by previous studies. Casein kinase I is a ubiquitous serine/threonine-specific protein kinase that constitutes most of the kinase activity in eukaryotic cells, where it is distributed in the nucleus, cytoplasm, and membrane fractions. The monomeric enzyme (34 to 55 kD) phosphorylates hierarchically a variety of substrates without the involvement of the so-called second messenger in signal transduction. A full-length rat CKI-delta cDNA was cloned by Graves et al. (1993). Fish et al. (1995) mapped the human CKI-delta locus to 17q25 by fluorescence in situ hybridization. Kusuda et al. (1996) isolated and sequenced a cDNA clone for human casein kinase I. An open reading frame of 415 amino acids was identified, showing 97% homology to rat CKI-delta; within the kinase domain of 284 amino acids the 2 were completely identical. The amino acid sequence of the kinase domain of human CSNK1D to yeast enzymes that are involved in the repair of DNA strand breaks supported speculation that the human gene product acts in DNA metabolism through excision and recombinational repair. By fluorescence in situ hybridization and PCR analysis of human/rodent hybrid cell panels, Kusuda et al. (1996) mapped CSNK1D to 17q25.2-q25.3.

[0747] Full details of the abovementioned studies are described in the following publications, the disclosure of which are hereby incorporated by reference:

[0748] raves, P. R.; Haas, D. W.; Hagedorn, C. H.; DePaoli-Roach, A. A.; Roach, P. J.: Molecular cloning, expression, and characterization of a 49-kilodalton casein kinase I isoform from rat testis. J. Biol. Chem. 268: 6394-6401, 1993. PubMed ID: 8454611 3. Kusuda, J.; Hidari, N.; Hirai, M.; Hashimoto, K.: Sequence analysis of the cDNA for the human casein kinase 1-delta (CSNK1D) gene and its chromosomal localization. Genomics 32: 140-143, 1996.

[0749] Further studies establishing the function and utilities of CSNK1D are found in John Hopkins OMIM database record ID 600864, and in references numbered 603-605 listed hereinbelow.

[0750] Reference is now made to CUGBP1 BINDING SITE. CUG triplet repeat, RNA-binding protein 1 (CUGBP1) is a target gene of GAM26, corresponding to GAM26-TARGET GENE of FIG. 26A. CUGBP1 BINDING SITE is a binding site found in an untranslated region of CUGBP1, corresponding to BINDING SITE of FIG. 26A. FIG. 26D illustrates the complementarity of the nucleotide sequence of CUGBP1 BINDING SITE, designated SEQ ID:122870, to the nucleotide sequence of GAM26 RNA of FIG. 26A, designated SEQ ID:20604.

[0751] Another function of GAM26 is therefore inhibition of CUG triplet repeat, RNA-binding protein 1 (CUGBP1), a gene which encodes a receptor that regulates splicing and translation of various mas. and is associated with myotonic dystrophy. Accordingly, utilities of GAM26 include diagnosis and treatment of the abovementioned diseases and clinical conditions.

[0752] The function of CUGBP1 has been established by previous studies. While an unstable CTG triplet repeat expansion is responsible for myotonic dystrophy (DM; 160900), the mechanism whereby this genetic defect induces the disease is unknown. To detect proteins that bind to CTG triplet repeats, Timchenko et al. (1996) performed bandshift analysis using as probes double-stranded DNA fragments having CTG repeats and single-stranded oligonucleotides having CTG repeats or RNA CUG repeats. The proteins were derived from nuclear and cytoplasmic extracts of HeLa cells, fibroblasts, and myotubes. Proteins binding to the double-stranded DNA repeat were inhibited by the nonlabeled repeat but not by a nonspecific DNA fragment. Another protein binding to the single-stranded CTG probe and the RNA CUG probe was inhibited by nonlabeled CTG(8) and CUG(8) repeats. The protein binding only to the RNA repeat (CUG)₈ was inhibited by nonlabeled (CUG)₈ but not by nonlabeled single- or double-stranded CTG repeats. Furthermore, the protein, designated CUG-binding protein (CUGBP) by the authors, exhibited no binding to an RNA oligonucleotide of triplet repeats of the same length but having a different sequence, CGG. The CUG-binding protein was localized to the cytoplasm, whereas double-stranded DNA binding proteins were localized to the nuclear extract. Thus, Timchenko et al. (1996) concluded that several trinucleotide-binding proteins exist and their specificity is determined by the triplet sequence. CTG trinucleotide repeats encode CUG repeat regions in the corresponding mRNAs. Timchenko et al. (1996) identified 2 proteins, termed CUGBP1 and CUGBP2, that bind specifically to CUG repeats in RNA. They suggested that these 2 proteins, with masses of 49 kD and 51 kD, respectively, are isoforms encoded by the same gene. Timchenko et al. (1996) cloned a gene, termed NAB50 by them, based on the interaction between its protein product and the yeast Nab2 protein. The authors stated that the NAB50 gene encodes the CUGBP1 and CUGBP2 proteins because anti-Nab50 antibodies crossreacted with both CUGBP isoforms. The gene predicts a 482-amino acid protein with a calculated molecular mass of 52 kD. The predicted protein contains 3 RNA-binding domains and is homologous to the hnRNPs

[0753] Full details of the abovementioned studies are described in the following publications, the disclosure of which are hereby incorporated by reference:

[0754] imchenko, L. T.; Miller, J. W.; Timchenko, N. A.; DeVore, D. R.; Datar, K. V.; Lin, L.; Roberts, R.; Caskey, C. T.; Swanson, M. S.: Identification of a (CUG)n triplet repeat RNA-binding protein and its expression in myotonic dystrophy. Nucleic Acids Res. 24: 4407-4414, 1996. PubMed ID: 8948631 1. Good, P. J.; Chen, Q.; Warner, S. J.; Herring, D.C.: A family of human RNA-binding proteins related to the Drosophila Bruno transcriptional regulator. J. Biol. Chem. 275: 28583-28592, 2000.

[0755] Further studies establishing the function and utilities of CUGBP1 are found in John Hopkins OMIM database record ID 601074, and in references numbered 606-609 listed hereinbelow.

[0756] Referring now to CUGBP1 BINDING SITE. CUG triplet repeat, RNA-binding protein 1 (CUGBP1) is a target gene of GAM26, corresponding to GAM26-TARGET GENE of FIG. 26A. CUGBP1 BINDING SITE is a binding site found in an untranslated region of CUGBP1, corresponding to BINDING SITE of FIG. 26A. FIG. 26D illustrates the complementarity of the nucleotide sequence of CUGBP1 BINDING SITE, designated SEQ ID: 122874, to the nucleotide sequence of GAM26 RNA of FIG. 26A, designated SEQ ID:20604.

[0757] Yet another function of GAM26 is therefore inhibition of CUG triplet repeat, RNA-binding protein 1 (CUGBP1), a gene which encodes a receptor that regulates splicing and translation of various mas. and is associated with myotonic dystrophy. Accordingly, utilities of GAM26 include diagnosis and treatment of the abovementioned diseases and clinical conditions. The function and utilities of CUGBP1 have been established by previous studies, as described hereinabove with reference to FIG. 26D.

[0758] Reference is now made to DAG1 BINDING SITE. dystroglycan 1 (dystrophin-associated glycoprotein 1) (DAG1) is a target gene of GAM26, corresponding to GAM26-TARGET GENE of FIG. 26A. DAG1 BINDING SITE is a binding site found in an untranslated region of DAG1, corresponding to BINDING SITE of FIG. 26A. FIG. 26D illustrates the complementarity of the nucleotide sequence of DAG1 BINDING SITE, designated SEQ ID:127812, to the nucleotide sequence of GAM26 RNA of FIG. 26A, designated SEQ ID:20604.

[0759] An additional function of GAM26 is therefore inhibition of dystroglycan 1 (dystrophin-associated glycoprotein 1) (DAG1), a gene which encodes a Protein that may provide linkage between the sarcolemma and extracellular matrix (ECM) and is associated with Fukuyama-type congenital muscular dystrophy. Accordingly, utilities of GAM26 include diagnosis and treatment of the abovementioned diseases and clinical conditions.

[0760] The function of DAG1 has been established by previous studies. Ibraghimov-Beskrovnaya et al. (1992) demonstrated that the transmembrane 43-kD and extracellular 156-kD dystrophin (300377)-associated glycoproteins are encoded by a single messenger RNA and that the extracellular 156-kD DAG binds laminin. Thus, the 156-kD DAG is a laminin-binding glycoprotein that may provide linkage between the sarcolemma and extracellular matrix (ECM). The dramatic reduction in the 156K DAG in Duchenne muscular dystrophy (310200) led to a loss of linkage between the sarcolemma and extracellular matrix, rendering muscle fibers more susceptible to necrosis. Ibraghimov-Beskrovnaya et al. (1992, 1992, 1993) mapped the DAG gene to chromosome 3 by Southern blot analysis of human/Chinese hamster somatic cell hybrid DNAs. One hybrid cell line with an isochromosome 3q was negative, suggesting location of the gene on 3p. The regional assignment was confirmed and further refined by fluorescence in situ hybridization, the localization being 3p21. The coding sequence of the DAG1 gene is organized into 2 exons, separated by a large intron (Ibraghimov-Beskrovnaya et al., 1993). The predicted amino acid sequence of human and rabbit dystroglycan are 93% identical, with predicted glycosylation sites being conserved. Human dystroglycan is expressed in a variety of fetal and adult tissues. The muscle and nonmuscle isoforms of dystroglycan differ by carbohydrate moieties but not protein sequence. Using PCR, immunohistochemistry, and immunoblotting to analyze samples from patients with Fukuyama congenital muscular dystrophy (FCMD; 253800), Hayashi et al. (2001) confirmed a deficiency of fukutin and found marked deficiency of highly glycosylated DAG1 in skeletal and cardiac muscle and reduced amounts of DAG1 in brain tissue. Beta-dystroglycan was normal in all tissues examined. These findings supported the suggestion that fukutin deficiency affects the modification of glycosylation of DAG1, which then cannot localize or function properly and may be degraded or eluted from the extracellular surface membrane of the muscle fiber. Hayashi et al. (2001) concluded that this disruption underlies the developmental, structural, and functional damage to muscles in patients with FCMD.

[0761] Animal model experiments lend further support to the function of DAG1. Cohn et al. (2002) found that striated muscle-specific disruption of the Dag1 gene in mice resulted in loss of the dystrophin-glycoprotein complex in differentiated muscle and a remarkably mild muscular dystrophy with hypertrophy and without tissue fibrosis. They found that satellite cells, expressing dystroglycan, supported continued efficient regeneration of skeletal muscle along with transient expression of dystroglycan in regenerating muscle fibers. Cohn et al. (2002) demonstrated a similar phenomenon of reexpression of functional dystroglycan in regenerating muscle fibers in a mild form of human muscular dystrophy caused by disruption of posttranslational dystroglycan processing. They concluded that maintenance of regenerative capacity by satellite cells expressing dystroglycan is likely responsible for mild disease progression in mice and possibly humans. Cohn et al. (2002) suggested that inadequate repair of skeletal muscle by satellite cells represents an important mechanism affecting the pathogenesis of muscular dystrophy.

[0762] It is appreciated that the abovementioned animal model for DAG1 is acknowledged by those skilled in the art as a scientifically valid animal model, as can be further appreciated from the publications sited hereinbelow.

[0763] Full details of the abovementioned studies are described in the following publications, the disclosure of which are hereby incorporated by reference:

[0764] Ibraghimov-Beskrovnaya, O.; Ervasti, J. M.; Leveille, C. J.; Slaughter, C. A.; Sernett, S. W.; Campbell, K. P.: Primary structure of dystrophin-associated glycoproteins linking dystrophin to the extracellular matrix. Nature 355: 696-702, 1992. PubMed ID: 1741056 8. Hayashi, Y. K.; Ogawa, M.; Tagawa, K.; Noguchi, S.; Ishihara, T.; Nonaka, I.; Arahata, K.: Selective deficiency of alpha-dystroglycan in Fukuyama-type congenital muscular dystrophy. Neurology 57: 115-121, 2001.

[0765] Further studies establishing the function and utilities of DAG1 are found in John Hopkins OMIM database record ID 128239, and in references numbered 610-634 listed hereinbelow.

[0766] Referring now to DAG1 BINDING SITE. dystroglycan 1 (dystrophin-associated glycoprotein 1) (DAG1) is a target gene of GAM26, corresponding to GAM26-TARGET GENE of FIG. 26A. DAG1 BINDING SITE is a binding site found in an untranslated region of DAG1, corresponding to BINDING SITE of FIG. 26A. FIG. 26D illustrates the complementarity of the nucleotide sequence of DAG1 BINDING SITE, designated SEQ ID:127882, to the nucleotide sequence of GAM26 RNA of FIG. 26A, designated SEQ ID:20604.

[0767] A further function of GAM26 is therefore inhibition of dystroglycan 1 (dystrophin-associated glycoprotein 1) (DAG1), a gene which encodes a Protein that may provide linkage between the sarcolemma and extracellular matrix (ECM) and is associated with Fukuyama-type congenital muscular dystrophy. Accordingly, utilities of GAM26 include diagnosis and treatment of the abovementioned diseases and clinical conditions. The function and utilities of DAG1 have been established by previous studies, as described hereinabove with reference to FIG. 26D.

[0768] Reference is now made to DDEF2 BINDING SITE. development and differentiation enhancing factor 2 (DDEF2) is a target gene of GAM26, corresponding to GAM26-TARGET GENE of FIG. 26A. DDEF2 BINDING SITE is a binding site found in an untranslated region of DDEF2, corresponding to BINDING SITE of FIG. 26A. FIG. 26D illustrates the complementarity of the nucleotide sequence of DDEF2 BINDING SITE, designated SEQ ID: 129959, to the nucleotide sequence of GAM26 RNA of FIG. 26A, designated SEQ ID:20604.

[0769] Yet a further function of GAM26 is therefore inhibition of development and differentiation enhancing factor 2 (DDEF2), a gene which encodes a Protein that interacts with members of the Arf and Src family. Accordingly, utilities of GAM26 include diagnosis and treatment of the abovementioned diseases and clinical conditions.

[0770] The function of DDEF2 has been established by previous studies. By screening human brain cDNAs for those encoding large proteins, Ishikawa et al. (1997) identified a cDNA, which they called KIAA0400, encoding development- and differentiation-enhancing factor-2. They found that the deduced 1,006-amino acid DDEF2 protein contains a 60-amino acid zinc finger motif thought to be associated with GTPase activating protein (GAP) activity. Using PYK2 (601212) as bait in a yeast 2-hybrid screen, Andreev et al. (1999) isolated DDEF2, a PYK2-binding protein which they designated PAP. DDEF2 is a multidomain protein composed of an N-terminal alpha-helical region with a coiled-coil motif, followed by a pleckstrin homology domain, an Arf-GAP domain, an ankyrin homology region, a proline-rich region, and a C-terminal SH3 domain. DDEF2 shares 95% sequence identity with the mouse homolog and 68% sequence identity with human DDEF1 (605953). Andreev et al. (1999) identified 2 DDEF2 isoforms, designated PAP-alpha and PAP-beta, that differ by deletion of 45 amino acids from the proline-rich region and 172 amino acids from the N terminus. Northern blot analysis detected expression of an approximately 5.7-kb transcript at high levels in brain, kidney, and heart, and at lower levels in placenta, lung, and pancreas. Immunofluorescence studies demonstrated that DDEF2 is localized in the Golgi apparatus and at the plasma membrane, where it is colocalized with PYK2. DDEF2 forms a stable complex with PYK2 and activation of PYK2 leads to tyrosine phosphorylation of DDEF2 in vivo. The interaction of DDEF2 and PYK2 appears to be mediated by binding of the SH3 domain of DDEF2 to the proline-rich region in the C terminus of PYK2. In addition, in vitro recombinant DDEF2 exhibits strong GAP activity towards the small GTPases ARF1 (103180) and ARF5 (103188) and weak activity towards ARF6 (600464).

[0771] Full details of the abovementioned studies are described in the following publications, the disclosure of which are hereby incorporated by reference:

[0772] ndreev, J.; Simon, J.-P.; Sabatini, D. D.; Kam, J.; Plowman, G.; Randazzo, P. A.; Schlessinger, J.: Identification of a new Pyk2 target protein with Arf-GAP activity. Molec. Cell. Biol. 19: 2338-2350, 1999. PubMed ID: 10022920 2. Ishikawa, K.; Nagase, T.; Nakajima, D.; Seki, N.; Ohira, M.; Miyajima, N.; Tanaka, A.; Kotani, H.; Nomura, N.; Ohara, O.: Prediction of the coding sequences of unidentified human genes. VIII. 78 new cDNA clones from brain which code for large proteins in vitro. DNA Res. 4: 307-313, 1997.

[0773] Further studies establishing the function and utilities of DDEF2 are found in John Hopkins OMIM database record ID 603817, and in references numbered 635 listed hereinbelow.

[0774] Referring now to DDEF2 BINDING SITE. development and differentiation enhancing factor 2 (DDEF2) is a target gene of GAM26, corresponding to GAM26-TARGET GENE of FIG. 26A. DDEF2 BINDING SITE is a binding site found in an untranslated region of DDEF2, corresponding to BINDING SITE of FIG. 26A. FIG. 26D illustrates the complementarity of the nucleotide sequence of DDEF2 BINDING SITE, designated SEQ ID: 129968, to the nucleotide sequence of GAM26 RNA of FIG. 26A, designated SEQ ID:20604.

[0775] Another function of GAM26 is therefore inhibition of development and differentiation enhancing factor 2 (DDEF2), a gene which encodes a Protein that interacts with members of the Arf and Src family. Accordingly, utilities of GAM26 include diagnosis and treatment of the abovementioned diseases and clinical conditions. The function and utilities of DDEF2 have been established by previous studies, as described hereinabove with reference to FIG. 26D.

[0776] Referring now to DDEF2 BINDING SITE. development and differentiation enhancing factor 2 (DDEF2) is a target gene of GAM26, corresponding to GAM26-TARGET GENE of FIG. 26A. DDEF2 BINDING SITE is a binding site found in an untranslated region of DDEF2, corresponding to BINDING SITE of FIG. 26A. FIG. 26D illustrates the complementarity of the nucleotide sequence of DDEF2 BINDING SITE, designated SEQ ID:129973, to the nucleotide sequence of GAM26 RNA of FIG. 26A, designated SEQ ID:20604.

[0777] Yet another function of GAM26 is therefore inhibition of development and differentiation enhancing factor 2 (DDEF2), a gene which encodes a Protein that interacts with members of the Arf and Src family. Accordingly, utilities of GAM26 include diagnosis and treatment of the abovementioned diseases and clinical conditions. The function and utilities of DDEF2 have been established by previous studies, as described hereinabove with reference to FIG. 26D.

[0778] Reference is now made to DHFR BINDING SITE. dihydrofolate reductase (DHFR) is a target gene of GAM26, corresponding to GAM26-TARGET GENE of FIG. 26A. DHFR BINDING SITE is a binding site found in an untranslated region of DHFR, corresponding to BINDING SITE of FIG. 26A. FIG. 26D illustrates the complementarity of the nucleotide sequence of DHFR BINDING SITE, designated SEQ ID: 133111, to the nucleotide sequence of GAM26 RNA of FIG. 26A, designated SEQ ID:20604.

[0779] An additional function of GAM26 is therefore inhibition of dihydrofolate reductase (DHFR), a gene which encodes a Enzyme that converts dihydrofolate into tetrahydrofolate. Accordingly, utilities of GAM26 include diagnosis and treatment of the abovementioned diseases and clinical conditions.

[0780] The function of DHFR has been established by previous studies. Dihydrofolate reductase (EC 1.5.1.3) converts dihydrofolate into tetrahydrofolate, a methyl group shuttle required for the de novo synthesis of purines, thymidylic acid, and certain amino acids. DHFR is inhibited by methotrexate (MTX), a folate analog used as an antineoplastic and immunosuppressive agent. From comparisons of eukaryotic gene sequences and protein sequences of homologous enzymes from bacterial and mammalian organisms, Craik et al. (1983) noted that intron-exon junctions often coincide with variable surface loops of the protein structure. Proteins studied included DHFR, trypsin, and chymotrypsin. They pointed out that altered surface structures can account for functional differences among the members of a family, e.g., the serine proteases. ‘Sliding’ of the intron-exon junctions may constitute a mechanism for generating length polymorphisms and divergent sequences. Different function can thus be achieved without disrupting the stability of the protein core. DNA sequence amplification is one of the most frequent manifestations of genomic instability in human tumors. In most human tumor cells, amplified DNA sequences are borne on unstable, extrachromosomal double minutes (DMs). Singer et al. (2000) isolated a large number of independent methotrexate-resistant human cell lines, all of which contained DHFR-bearing DMs. All but one of these also had suffered partial or complete loss of one of the parental DHFR-bearing chromosomes. Cells in a few populations displayed what could be transient intermediates in the amplification process, including an initial homogeneously staining chromosome region (HSR), its subsequent breakage, the appearance of DHFR-containing fragments, and, finally, DMs. The studies suggested that both HSRs and DMs are initiated by chromosome breaks, but that cell types differ in how the extra sequences ultimately are processed and/or maintained.

[0781] Full details of the abovementioned studies are described in the following publications, the disclosure of which are hereby incorporated by reference:

[0782] Singer, M. J.; Mesner, L. D.; Friedman, C. L.; Trask, B. J.; Hamlin, J. L.: Amplification of the human dihydrofolate reductase gene via double minutes is initiated by chromosome breaks. Proc. Nat. Acad. Sci. 97: 7921-7926, 2000. PubMed ID: 10859355 7. Craik, C. S.; Rutter, W. J.; Fletterick, R.: Splice junctions: association with variation in protein structure. Science 220: 1125-1129, 1983.

[0783] Further studies establishing the function and utilities of DHFR are found in John Hopkins OMIM database record ID 126060, and in references numbered 636-653 listed hereinbelow.

[0784] Referring now to DLG3 BINDING SITE. discs, large (Drosophila) homolog 3 (neuroendocrine-dlg) (DLG3) is a target gene of GAM26, corresponding to GAM26-TARGET GENE of FIG. 26A. DLG3 BINDING SITE is a binding site found in an untranslated region of DLG3, corresponding to BINDING SITE of FIG. 26A. FIG. 26D illustrates the complementarity of the nucleotide sequence of DLG3 BINDING SITE, designated SEQ ID:134695, to the nucleotide sequence of GAM26 RNA of FIG. 26A, designated SEQ ID:20604.

[0785] A further function of GAM26 is therefore inhibition of discs, large (Drosophila) homolog 3 (neuroendocrine-dlg) (DLG3), a gene which encodes a Protein that mediates protein-protein interactions at the cytoplasmic surface of the cell membrane. Accordingly, utilities of GAM26 include diagnosis and treatment of the abovementioned diseases and clinical conditions. The function and utilities of DLG3 have been established by previous studies, as described hereinabove with reference to FIG. 26D.

[0786] Referring now to DLG3 BINDING SITE. discs, large (Drosophila) homolog 3 (neuroendocrine-dlg) (DLG3) is a target gene of GAM26, corresponding to GAM26-TARGET GENE of FIG. 26A. DLG3 BINDING SITE is a binding site found in an untranslated region of DLG3, corresponding to BINDING SITE of FIG. 26A. FIG. 26D illustrates the complementarity of the nucleotide sequence of DLG3 BINDING SITE, designated SEQ ID:134697, to the nucleotide sequence of GAM26 RNA of FIG. 26A, designated SEQ ID:20604.

[0787] Yet a further function of GAM26 is therefore inhibition of discs, large (Drosophila) homolog 3 (neuroendocrine-dlg) (DLG3), a gene which encodes a Protein that mediates protein-protein interactions at the cytoplasmic surface of the cell membrane. Accordingly, utilities of GAM26 include diagnosis and treatment of the abovementioned diseases and clinical conditions. The function and utilities of DLG3 have been established by previous studies, as described hereinabove with reference to FIG. 26D.

[0788] Referring now to DR1 BINDING SITE. down-regulator of transcription 1, TBP-binding (negative cofactor 2) (DR1) is a target gene of GAM26, corresponding to GAM26-TARGET GENE of FIG. 26A. DR1 BINDING SITE is a binding site found in an untranslated region of DR1, corresponding to BINDING SITE of FIG. 26A. FIG. 26D illustrates the complementarity of the nucleotide sequence of DR1 BINDING SITE, designated SEQ ID:138522, to the nucleotide sequence of GAM26 RNA of FIG. 26A, designated SEQ ID:20604.

[0789] Another function of GAM26 is therefore inhibition of down-regulator of transcription 1, TBP-binding (negative cofactor 2) (DR1), a gene which encodes a Protein that influences functional repression of both activated and basal transcription of class ii genes. Accordingly, utilities of GAM26 include diagnosis and treatment of the abovementioned diseases and clinical conditions. The function and utilities of DR1 have been established by previous studies, as described hereinabove with reference to FIG. 26D.

[0790] Referring now to DR1 BINDING SITE. down-regulator of transcription 1, TBP-binding (negative cofactor 2) (DR1) is a target gene of GAM26, corresponding to GAM26-TARGET GENE of FIG. 26A. DR1 BINDING SITE is a binding site found in an untranslated region of DR1, corresponding to BINDING SITE of FIG. 26A. FIG. 26D illustrates the complementarity of the nucleotide sequence of DR1 BINDING SITE, designated SEQ ID:138525, to the nucleotide sequence of GAM26 RNA of FIG. 26A, designated SEQ ID:20604.

[0791] Yet another function of GAM26 is therefore inhibition of down-regulator of transcription 1, TBP-binding (negative cofactor 2) (DR1), a gene which encodes a Protein that influences functional repression of both activated and basal transcription of class ii genes. Accordingly, utilities of GAM26 include diagnosis and treatment of the abovementioned diseases and clinical conditions. The function and utilities of DR1 have been established by previous studies, as described hereinabove with reference to FIG. 26D.

[0792] Referring now to DR1 BINDING SITE. down-regulator of transcription 1, TBP-binding (negative cofactor 2) (DR1) is a target gene of GAM26, corresponding to GAM26-TARGET GENE of FIG. 26A. DR1 BINDING SITE is a binding site found in an untranslated region of DR1, corresponding to BINDING SITE of FIG. 26A. FIG. 26D illustrates the complementarity of the nucleotide sequence of DR1 BINDING SITE, designated SEQ ID:138526, to the nucleotide sequence of GAM26 RNA of FIG. 26A, designated SEQ ID:20604.

[0793] An additional function of GAM26 is therefore inhibition of down-regulator of transcription 1, TBP-binding (negative cofactor 2) (DR1), a gene which encodes a Protein that influences functional repression of both activated and basal transcription of class ii genes. Accordingly, utilities of GAM26 include diagnosis and treatment of the abovementioned diseases and clinical conditions. The function and utilities of DR1 have been established by previous studies, as described hereinabove with reference to FIG. 26D.

[0794] Referring now to DR1 BINDING SITE. down-regulator of transcription 1, TBP-binding (negative cofactor 2) (DR1) is a target gene of GAM26, corresponding to GAM26-TARGET GENE of FIG. 26A. DR1 BINDING SITE is a binding site found in an untranslated region of DR1, corresponding to BINDING SITE of FIG. 26A. FIG. 26D illustrates the complementarity of the nucleotide sequence of DR1 BINDING SITE, designated SEQ ID:138546, to the nucleotide sequence of GAM26 RNA of FIG. 26A, designated SEQ ID:20604.

[0795] A further function of GAM26 is therefore inhibition of down-regulator of transcription 1, TBP-binding (negative cofactor 2) (DR1), a gene which encodes a Protein that influences functional repression of both activated and basal transcription of class ii genes. Accordingly, utilities of GAM26 include diagnosis and treatment of the abovementioned diseases and clinical conditions. The function and utilities of DR1 have been established by previous studies, as described hereinabove with reference to FIG. 26D.

[0796] Reference is now made to DSCAM BINDING SITE. Down syndrome cell adhesion molecule (DSCAM) is a target gene of GAM26, corresponding to GAM26-TARGET GENE of FIG. 26A. DSCAM BINDING SITE is a binding site found in an untranslated region of DSCAM, corresponding to BINDING SITE of FIG. 26A. FIG. 26D illustrates the complementarity of the nucleotide sequence of DSCAM BINDING SITE, designated SEQ ID: 139794, to the nucleotide sequence of GAM26 RNA of FIG. 26A, designated SEQ ID:20604.

[0797] Yet a further function of GAM26 is therefore inhibition of Down syndrome cell adhesion molecule (DSCAM), a gene which encodes a Protein that is a cell adhesion molecule that can mediate cation-independent homophilic binding activity. Accordingly, utilities of GAM26 include diagnosis and treatment of the abovementioned diseases and clinical conditions.

[0798] The function of DSCAM has been established by previous studies. Schmucker et al. (2000) isolated a Drosophila homolog of the human DSCAM gene by its affinity to Dock (see DOCK1; 601403), an SH3/SH2 adaptor protein required for axon guidance. Dscam binds directly to both the SH2 and SH3 domains of Dock. Genetic studies revealed that Dscam, Dock, and Pak (see 602590), a serine/threonine kinase, act together to direct pathfinding of Bolwig's nerve, which contains a subclass of sensory axons, to an intermediate target in the embryo. Dscam also is required for the formation of axon pathways in the embryonic central nervous system. cDNA and genomic analyses revealed the existence of multiple forms of Dscam with a conserved architecture containing variable immunoglobulin and transmembrane domains. Alternative splicing can potentially generate more than 38,000 Dscam isoforms in Drosophila. The authors suggested that this molecular diversity may contribute to the specificity of neuronal connectivity. Barlow et al. (2001) studied a panel of 19 individuals with partial trisomy 21 (see 190685) and evaluated them using quantitative Southern blot dosage analysis and fluorescence in situ hybridization with subsets of 32 BACs spanning the region defined by D21S16 through the telomere. Fourteen individuals were duplicated for the candidate region, of whom 8 (57%) had the characteristic spectrum of Down syndrome-congenital heart disease (DS-CHD). Combining the results from these 8 individuals suggests that the candidate region for DS-CHD is demarcated by D21S3 (defined by ventricular septal defect), through PFKL (defined by tetralogy of Fallot). Barlow et al. (2001) concluded that the presence of 3 copies of gene(s) from this region is sufficient for the production of subsets of DS-CHD. This region does not include genes located near D21 S55, previously proposed as a Down syndrome critical region, or the genes encoding collagens VI (see 120220) and XVIII (120328). Of the potential gene candidates in the narrowed DS-CHD region, DSCAM is notable in that it encodes a cell adhesion molecule, spans more than 840 kb of the candidate region, and is expressed in the heart during cardiac development. Given these properties, Barlow et al. (2001) proposed DSCAM as a candidate for DS-CHD.

[0799] Full details of the abovementioned studies are described in the following publications, the disclosure of which are hereby incorporated by reference:

[0800] arlow, G. M.; Chen, X.-N.; Shi, Z. Y.; Lyons, G. E.; Kumit, D. M.; Celle, L.; Spinner, N. B.; Zackai, E.; Pettenati, M. J.; Van Riper, A. J.; Vekemans, M. J.; Mjaatvedt, C. H.; Korenberg, J. R.: Down syndrome congenital heart disease: a narrowed region and a candidate gene. Genet. Med. 3: 91-101, 2001. PubMed ID: 11280955 2. Schmucker, D.; Clemens, J. C.; Shu, H.; Worby, C. A.; Xiao, J.; Muda, M.; Dixon, J. E.; Zipursky, S. L.: Drosophila Dscam is an axon guidance receptor exhibiting extraordinary molecular diversity. Cell 101: 671-684, 2000.

[0801] Further studies establishing the function and utilities of DSCAM are found in John Hopkins OMIM database record ID 602523, and in references numbered 654-656 listed hereinbelow.

[0802] Referring now to DSCAM BINDING SITE. Down syndrome cell adhesion molecule (DSCAM) is a target gene of GAM26, corresponding to GAM26-TARGET GENE of FIG. 26A. DSCAM BINDING SITE is a binding site found in an untranslated region of DSCAM, corresponding to BINDING SITE of FIG. 26A. FIG. 26D illustrates the complementarity of the nucleotide sequence of DSCAM BINDING SITE, designated SEQ ID: 139795, to the nucleotide sequence of GAM26 RNA of FIG. 26A, designated SEQ ID:20604.

[0803] Another function of GAM26 is therefore inhibition of Down syndrome cell adhesion molecule (DSCAM), a gene which encodes a Protein that is a cell adhesion molecule that can mediate cation-independent homophilic binding activity. Accordingly, utilities of GAM26 include diagnosis and treatment of the abovementioned diseases and clinical conditions. The function and utilities of DSCAM have been established by previous studies, as described hereinabove with reference to FIG. 26D.

[0804] Referring now to DSCAM BINDING SITE. Down syndrome cell adhesion molecule (DSCAM) is a target gene of GAM26, corresponding to GAM26-TARGET GENE of FIG. 26A. DSCAM BINDING SITE is a binding site found in an untranslated region of DSCAM, corresponding to BINDING SITE of FIG. 26A. FIG. 26D illustrates the complementarity of the nucleotide sequence of DSCAM BINDING SITE, designated SEQ ID:139808, to the nucleotide sequence of GAM26 RNA of FIG. 26A, designated SEQ ID:20604.

[0805] Yet another function of GAM26 is therefore inhibition of Down syndrome cell adhesion molecule (DSCAM), a gene which encodes a Protein that is a cell adhesion molecule that can mediate cation-independent homophilic binding activity. Accordingly, utilities of GAM26 include diagnosis and treatment of the abovementioned diseases and clinical conditions. The function and utilities of DSCAM have been established by previous studies, as described hereinabove with reference to FIG. 26D.

[0806] Reference is now made to DSCR1 BINDING SITE. Down syndrome critical region gene 1 (DSCR1) is a target gene of GAM26, corresponding to GAM26-TARGET GENE of FIG. 26A. DSCR1 BINDING SITE is a binding site found in an untranslated region of DSCR1, corresponding to BINDING SITE of FIG. 26A. FIG. 26D illustrates the complementarity of the nucleotide sequence of DSCR1 BINDING SITE, designated SEQ ID:139913, to the nucleotide sequence of GAM26 RNA of FIG. 26A, designated SEQ ID:20604.

[0807] An additional function of GAM26 is therefore inhibition of Down syndrome critical region gene 1 (DSCR1), a gene which encodes a Protein that inhibits calcineurin-dependent transcriptional responses. Accordingly, utilities of GAM26 include diagnosis and treatment of the abovementioned diseases and clinical conditions.

[0808] The function of DSCR1 has been established by previous studies. The study of patients with partial trisomy 21 has defined an area of approximately 3 Mb at chromosomal region 21q22 as the minimal candidate region for the Down syndrome phenotype (190685). Using a novel exon cloning strategy, Fuentes et al. (1995) identified several putative exons from region 21q22.1-q22.2. One exon was used to isolate fetal brain cDNAs corresponding to a gene that the authors designated DSCR1. The predicted 171-amino acid protein contains 2 proline-rich regions, a putative DNA-binding domain, and an acidic region. Northern blot analysis revealed that the 2.2-kb DSCR1 transcript is expressed at the highest levels in fetal brain and adult heart and at lower levels in various other tissues. An additional 2-kb mRNA was detected in fetal and adult liver. Increased expression in the brains of young rats compared with adults suggested to Fuentes et al. (1995) that DSCR1 plays a role during central nervous system development. Fuentes et al. (1997) determined that DSCR1 spans nearly 45 kb and contains 7 exons, 4 of which are alternative first exons. They found tissue-specific expression patterns for the alternative transcripts. Kingsbury and Cunningham (2000) referred to the proteins encoded by the MCIP genes as calcipressins. Functional analysis showed that when expressed in yeast, DSCR1 and ZAKI4 inhibited calcineurin function. The authors proposed that increased expression of DSCR1 in trisomy-21 individuals may contribute to the neurologic, cardiac, or immunologic defects of Down syndrome.

[0809] Full details of the abovementioned studies are described in the following publications, the disclosure of which are hereby incorporated by reference:

[0810] uentes, J. J.; Pritchard, M. A.; Estivill, X.: Genomic organization, alternative splicing, and expression patterns of the DSCR1 (Down syndrome candidate region 1) gene. Genomics 44: 358-361, 1997. PubMed ID: 9325060 4. Kingsbury, T. J.; Cunningham, K. W.: A conserved family of calcineurin regulators. Genes Dev. 14: 1595-1604, 2000.

[0811] Further studies establishing the function and utilities of DSCR1 are found in John Hopkins OMIM database record ID 602917, and in references numbered 657 and 658-662 listed hereinbelow.

[0812] Reference is now made to DUSP5 BINDING SITE. dual specificity phosphatase 5 (DUSP5) is a target gene of GAM26, corresponding to GAM26-TARGET GENE of FIG. 26A. DUSP5 BINDING SITE is a binding site found in an untranslated region of DUSP5, corresponding to BINDING SITE of FIG. 26A. FIG. 26D illustrates the complementarity of the nucleotide sequence of DUSP5 BINDING SITE, designated SEQ ID:141448, to the nucleotide sequence of GAM26 RNA of FIG. 26A, designated SEQ ID:20604.

[0813] A further function of GAM26 is therefore inhibition of dual specificity phosphatase 5 (DUSP5), a gene which encodes a Protein that displays phosphatase activity toward several substrates. Accordingly, utilities of GAM26 include diagnosis and treatment of the abovementioned diseases and clinical conditions.

[0814] The function of DUSP5 has been established by previous studies. The VH1 phosphatase encoded by vaccinia virus is a dual-specificity protein-tyrosine phosphatase (PTPase) which hydrolyzes substrates phosphorylated on both tyrosine and serine/threonine residues. VH1-like PTPases have been identified in humans and other organisms. See DUSP1 (600714). To identify additional human dual-specificity PTPases, Martell et al. (1994) screened a genomic library with a partial DUSP1 cDNA. They isolated several novel PTPase genes, including 1 which they designated HVH3 for human VH1-like PTPase-3. Kwak and Dixon (1995) cloned human placental HVH3 cDNAs and reported that the predicted protein has 384 amino acids. Using immunofluorescence, they determined that epitope-tagged HVH3 is localized primarily in the nucleus of mammalian cells. Ishibashi et al. (1994) isolated HVH3 cDNAs from a human mammary epithelial cell cDNA library and found that the predicted protein has 397 amino acids. In vitro, recombinant protein containing the catalytic domain of HVH3 displayed phosphatase activity toward several substrates. The highest relative activity was toward ERK1 (601795), suggesting that it may be a target for HVH3 activity in vivo. Northern blot analysis revealed that HVH3 is expressed as a 2.5-kb mRNA in a variety of tissues, with the highest levels in pancreas and brain. HVH3 expression was induced by serum stimulation of fibroblasts and by heat shock, with similar kinetics to those observed with DUSP1. As has been proposed for other dual-specificity PTPases like DUSP1 and DUSP2 (603068), Ishibashi et al. (1994) suggested that the induction of HVH3 may lead to the deactivation of mitogen- or stress-activated protein kinases, thereby restoring these signaling pathways to their mitogen- or stress-sensitive state. By fluorescence in situ hybridization, Martell et al. (1994) mapped the HVH3 gene to 110q25

[0815] Full details of the abovementioned studies are described in the following publications, the disclosure of which are hereby incorporated by reference:

[0816] shibashi, T.; Bottaro, D. P.; Michieli, P.; Kelley, C. A.; Aaronson, S. A.: A novel dual specificity phosphatase induced by serum stimulation and heat shock. J. Biol. Chem. 269: 29897-29902, 1994. PubMed ID: 7961985 3. Martell, K. J.; Kwak, S.; Hakes, D. J.; Dixon, J. E.; Trent, J. M.: Chromosomal localization of four human VH1-like protein-tyrosine phosphatases. Genomics 22: 462-464, 1994.

[0817] Further studies establishing the function and utilities of DUSP5 are found in John Hopkins OMIM database record ID 603069, and in references numbered 663-665 listed hereinbelow.

[0818] Reference is now made to DVL3 BINDING SITE. dishevelled 3 (homologous to Drosophila dsh) (DVL3) is a target gene of GAM26, corresponding to GAM26-TARGET GENE of FIG. 26A. DVL3 BINDING SITE is a binding site found in an untranslated region of DVL3, corresponding to BINDING SITE of FIG. 26A. FIG. 26D illustrates the complementarity of the nucleotide sequence of DVL3 BINDING SITE, designated SEQ ID:141937, to the nucleotide sequence of GAM26 RNA of FIG. 26A, designated SEQ ID:20604.

[0819] Yet a further function of GAM26 is therefore inhibition of dishevelled 3 (homologous to Drosophila dsh) (DVL3), a gene which encodes a Protein that regulates cell proliferation. Accordingly, utilities of GAM26 include diagnosis and treatment of the abovementioned diseases and clinical conditions.

[0820] The function of DVL3 has been established by previous studies. The Drosophila dishevelled gene (dsh) encodes a cytoplasmic phosphoprotein (Klingensmith et al., 1994) that regulates cell proliferation, acting as a transducer molecule for developmental processes, including segmentation and neuroblast specification. Pizzuti et al. (1996) noted that dsh is required for the function of the wingless gene product wg, a segment polarity gene homologous to the mammalian protooncogene WNT1 (164820). Pizzuti et al. (1996) reported the isolation and chromosomal mapping of 2 human dsh homologs, designated DVL1 (601365) and DVL3 by them. The human dsh homologs were isolated from a fetal brain cDNA library. DVL3 encodes a predicted 716-amino acid polypeptide that shows 74% nucleotide homology with human DVL1 and 71% homology with the mouse Dvl1 gene. DVL1 and DVL3 share 64% amino acid identity. Pizzuti et al. (1996) reported that homology is particularly high in the N-terminal region and that there is more divergence in the C-terminal regions. PCR carried out using DNA from rodent human somatic cell hybrids and DVL3 specific primers led to the assignment of DVL3 to human chromosome 3. Pizzuti et al. (1996) regionally assigned DVL3 to band 3q27 using fluorescence in situ hybridization. Hybridization of poly(A) mRNA with the DVL3 cDNA revealed a 2.9-kb transcript with abundant expression in skeletal muscle, pancreas and heart. They also detected 5.9-kb and 5.0-kb transcripts in skeletal muscle, adult liver, adult heart, pancreas, and placenta. The 5.9-kb form was abundant in fetal tissues but the 5.0-kb form was absent from these tissues. Pizzuti et al. (1996) noted that Charcot-Marie-Tooth type 2B (600882) maps to chromosome 3q. Bui et al. (1997) also isolated human DVL3, which shares 98% amino acid identity with mouse Dvl3 and 49% with Drosophila dsh. The authors confirmed the chromosomal localization at 3p27. Semenov and Snyder (1997) isolated 3 human genes encoding proteins homologous to Drosophila dsh. The cDNA sequence of DVL3 reported by Semenov and Snyder (1997) differs from the previously reported sequences deposited in GenBank. Bui et al. (1997) detected expression of DVL3 mRNA in B cells, breast, kidney, bladder, endometrium, and 2 primary endometrial cultures. It was detected equally in normal human breast tissues and tumors and in colorectal samples of normal tissues, polyps, and tumors.

[0821] Full details of the abovementioned studies are described in the following publications, the disclosure of which are hereby incorporated by reference:

[0822] izzuti, A.; Amati, F.; Calabrese, G.; Mari, A.; Colosimo, A; Silani, V.; Giardino, L.; Ratti, A.; Penso, D.; Calza, L.; Palka, G.; Scarlato, G.; Novelli, G.; Dallapicolla, B.: cDNA characterization and chromosomal mapping of two human homologs of the Drosophila dishevelled polarity gene. Hum. Molec. Genet. 5: 953-958, 1996. PubMed ID: 8817329 4. Semenov, M. V.; Snyder, M.: Human dishevelled genes constitute a DHR-containing multigene family. Genomics 42: 302-310, 1997.

[0823] Further studies establishing the function and utilities of DVL3 are found in John Hopkins OMIM database record ID 601368, and in references numbered 666-669 listed hereinbelow.

[0824] Reference is now made to DXYS155E BINDING SITE. (DXYS155E) is a target gene of GAM26, corresponding to GAM26-TARGET GENE of FIG. 26A. DXYS155E BINDING SITE is a binding site found in an untranslated region of DXYS155E, corresponding to BINDING SITE of FIG. 26A. FIG. 26D illustrates the complementarity of the nucleotide sequence of DXYS155E BINDING SITE, designated SEQ ID:142341, to the nucleotide sequence of GAM26 RNA of FIG. 26A, designated SEQ ID:20604.

[0825] Another function of GAM26 is therefore inhibition of (DXYS155E), a gene which encodes a Protein that may be involved in b-cell activation. may also be involved in signal transduction and gene regulation. Accordingly, utilities of GAM26 include diagnosis and treatment of the abovementioned diseases and clinical conditions.

[0826] The function of DXYS155E has been established by previous studies. In the 2.6-megabase segment of the distal short arms of the X and Y chromosomes, called the pseudoautosomal region, Ellison et al. (1992) identified an expressed gene designated XE7. (See also 465000.) They reported the structure of the XE7 gene and its expression in various human tissues. The analysis of genomic and cDNA clones showed that alternative RNA splicing results in the production of 2 protein isoforms, one containing 385 amino acids and the other containing 695 residues. The smaller polypeptide is a truncated version of the larger and results from the inclusion of a cassette exon that has an in-frame stop codon. The XE7 gene appears to be ubiquitously expressed, and the production of both protein isoforms was predicted in each of the several tissues examined.

[0827] Full details of the abovementioned studies are described in the following publications, the disclosure of which are hereby incorporated by reference:

[0828] llison, J.; Passage, M.; Yu, L.-C.; Yen, P.; Mohandas, T. K.; Shapiro, L.: Directed isolation of human genes that escape X inactivation. Somat. Cell Molec. Genet. 18: 259-268, 1992. PubMed ID: 1496421 2. Ellison, J. W.; Ramos, C.; Yen, P. H.; Shapiro, L. J.: Structure and expression of the human pseudoautosomal gene XE7. Hum. Molec. Genet. 1: 691-696, 1992.

[0829] Further studies establishing the function and utilities of DXYS155E are found in John Hopkins OMIM database record ID 312095, and in references numbered 670-671 listed hereinbelow.

[0830] Reference is now made to DYRK2 BINDING SITE. dual-specificity tyrosine-(Y)-phosphorylation regulated kinase 2 (DYRK2) is a target gene of GAM26, corresponding to GAM26-TARGET GENE of FIG. 26A. DYRK2 BINDING SITE is a binding site found in an untranslated region of DYRK2, corresponding to BINDING SITE of FIG. 26A. FIG. 26D illustrates the complementarity of the nucleotide sequence of DYRK2 BINDING SITE, designated SEQ ID:142933, to the nucleotide sequence of GAM26 RNA of FIG. 26A, designated SEQ ID:20604.

[0831] Yet another function of GAM26 is therefore inhibition of dual-specificity tyrosine-(Y)-phosphorylation regulated kinase 2 (DYRK2), a gene which encodes a Protein that can phosphorylate histones h3 and h2b on ser and thr residues. Accordingly, utilities of GAM26 include diagnosis and treatment of the abovementioned diseases and clinical conditions.

[0832] The function of DYRK2 has been established by previous studies. DYRK1 (600855) is a dual-specificity protein kinase that catalyzes its autophosphorylation on serine/threonine and tyrosine residues and is presumably involved in brain development. By PCR using sequences conserved between DYRK1 and the related proteins MNB of Drosophila and Yak1 of S. cerevisiae, Becker et al. (1998) identified DYRK2 and DYRK3 (603497), kinases related to DYRK1. Human fetal brain DYRK2 (GenBank Y13493) cDNAs encode 2 isoforms: a deduced 528-amino acid protein and a protein containing 73 additional amino acids at the N terminus. The DYRK2 proteins contain a canonical kinase domain located between a large N-terminal region and a short C-terminal extension, and features specific to DYRK-related kinases. DYRK2 shares 46% identity with DYRK1 in the catalytic domain, but lacks the striking sequence motifs identified in DYRK1. The DYRK2 and DYRK3 proteins are related over their entire sequences except for the N-terminal region. Northern blot analysis of rat tissues detected Dyrk2 expression in testis, only after the onset of spermatogenesis. Recombinant DYRK2 was found predominantly in the cytoplasm of transfected mammalian cells. DYRK2 expressed in E. coli demonstrated tyrosine autophosphorylation and catalyzed phosphorylation of histones H3 and H2B in vitro. Based on sequence similarity to EST Z25301, Becker et al. (1998) tentatively mapped the DYRK2 gene to chromosome 12.

[0833] Full details of the abovementioned studies are described in the following publications, the disclosure of which are hereby incorporated by reference:

[0834] ecker, W.; Weber, Y.; Wetzel, K.; Eirmbter, K.; Tejedor, F. J.; Joost, H.-G.: Sequence characteristics, subcellular localization, and substrate specificity of DYRK-related kinases, a novel family of dual specificity protein kinases. J. Biol. Chem. 273: 25893-25902, 1998.

[0835] Further studies establishing the function and utilities of DYRK2 are found in John Hopkins OMIM database record ID 603496, and in references numbered 672 listed hereinbelow.

[0836] Referring now to DYRK2 BINDING SITE. dual-specificity tyrosine-(Y)-phosphorylation regulated kinase 2 (DYRK2) is a target gene of GAM26, corresponding to GAM26-TARGET GENE of FIG. 26A. DYRK2 BINDING SITE is a binding site found in an untranslated region of DYRK2, corresponding to BINDING SITE of FIG. 26A. FIG. 26D illustrates the complementarity of the nucleotide sequence of DYRK2 BINDING SITE, designated SEQ ID: 142953, to the nucleotide sequence of GAM26 RNA of FIG. 26A, designated SEQ ID:20604.

[0837] An additional function of GAM26 is therefore inhibition of dual-specificity tyrosine-(Y)-phosphorylation regulated kinase 2 (DYRK2), a gene which encodes a Protein that can phosphorylate histones h3 and h2b on ser and thr residues. Accordingly, utilities of GAM26 include diagnosis and treatment of the abovementioned diseases and clinical conditions. The function and utilities of DYRK2 have been established by previous studies, as described hereinabove with reference to FIG. 26D.

[0838] Reference is now made to EFNA3 BINDING SITE. ephrin-A3 (EFNA3) is a target gene of GAM26, corresponding to GAM26-TARGET GENE of FIG. 26A. EFNA3 BINDING SITE is a binding site found in an untranslated region of EFNA3, corresponding to BINDING SITE of FIG. 26A. FIG. 26D illustrates the complementarity of the nucleotide sequence of EFNA3 BINDING SITE, designated SEQ ID:144685, to the nucleotide sequence of GAM26 RNA of FIG. 26A, designated SEQ ID:20604.

[0839] A further function of GAM26 is therefore inhibition of ephrin-A3 (EFNA3), a gene which encodes a Protein that is a ligand of Eph-related receptor tyrosine kinases. Accordingly, utilities of GAM26 include diagnosis and treatment of the abovementioned diseases and clinical conditions.

[0840] The function of EFNA3 has been established by previous studies. Proteins in the LERK subfamily of ligands, called ephrins, bind to members of the EPH group of receptor tyrosine kinases. The various ephrins are characterized by sequence similarities and the fact that they are attached to the cell membrane by glycosylphosphatidylinositol (GPI) anchors or by a single transmembrane domain. See 179610 for additional information on ephrins and the Eph receptor family. By fluorescence in situ hybridization, Cerretti et al. (1996) mapped the EPLG3 gene to a cluster on chromosome 1q21-q22, together with EPLG1 (EFNA1; 191164) and EPLG4 (EFNA4; 601380). By interspecific backcross analysis, they mapped the mouse EPLG3 homolog (Ep13) to the central region of mouse chromosome 3. Cerretti and Nelson (1998) reported that the mouse Efna3 gene has 5 exons. The gene structures of human EFNA2 (602756) and mouse Efna3, Efna4 (601380), and Efnb1 (300035) are conserved through the first 3 exons.

[0841] Full details of the abovementioned studies are described in the following publications, the disclosure of which are hereby incorporated by reference:

[0842] erretti, D. P.; Lyman, S. D.; Kozlosky, C. J.; Copeland, N. G.; Gilbert, D. J.; Jenkins, N. A.; Valentine, V.; Kirstein, M. N.; Shapiro, D. N.; Morris, S. W.: The genes encoding the Eph-related receptor tyrosine kinase ligands LERK-1 (EPLG1, Epl1), LERK-3 (EPLG3, Ep13), and LERK-4 (EPLG4, Epl4) are clustered on human chromosome 1 and mouse chromosome 3. Genomics 33: 277-282, 1996. PubMed ID: 8660976 2. Cerretti, D. P.; Nelson, N.: Characterization of the genes for mouse LERK-3/Ephrin-A3 (Ep13), mouse LERK-4/Ephrin-A4 (Epl4), and human LERK-6/Ephrin-A2 (EPLG6): conservation of intron/exon structure. Genomics 47: 131-135, 1998.

[0843] Further studies establishing the function and utilities of EFNA3 are found in John Hopkins OMIM database record ID 601381, and in references numbered 673-674 listed hereinbelow.

[0844] Referring now to EFNA3 BINDING SITE. ephrin-A3 (EFNA3) is a target gene of GAM26, corresponding to GAM26-TARGET GENE of FIG. 26A. EFNA3 BINDING SITE is a binding site found in an untranslated region of EFNA3, corresponding to BINDING SITE of FIG. 26A. FIG. 26D illustrates the complementarity of the nucleotide sequence of EFNA3 BINDING SITE, designated SEQ ID: 144687, to the nucleotide sequence of GAM26 RNA of FIG. 26A, designated SEQ ID:20604.

[0845] Yet a further function of GAM26 is therefore inhibition of ephrin-A3 (EFNA3), a gene which encodes a Protein that is a ligand of Eph-related receptor tyrosine kinases. Accordingly, utilities of GAM26 include diagnosis and treatment of the abovementioned diseases and clinical conditions. The function and utilities of EFNA3 have been established by previous studies, as described hereinabove with reference to FIG. 26D.

[0846] Reference is now made to EGLN1 BINDING SITE. egl nine homolog 1 (C. elegans) (EGLN1) is a target gene of GAM26, corresponding to GAM26-TARGET GENE of FIG. 26A. EGLN1 BINDING SITE is a binding site found in an untranslated region of EGLN1, corresponding to BINDING SITE of FIG. 26A. FIG. 26D illustrates the complementarity of the nucleotide sequence of EGLN1 BINDING SITE, designated SEQ ID:145984, to the nucleotide sequence of GAM26 RNA of FIG. 26A, designated SEQ ID:20604.

[0847] Another function of GAM26 is therefore inhibition of egl nine homolog 1 (C. elegans) (EGLN1), a gene which encodes a Protein that is expressed in the cytoplasm of arterial smooth muscle cells. Accordingly, utilities of GAM26 include diagnosis and treatment of the abovementioned diseases and clinical conditions.

[0848] The function of EGLN1 has been established by previous studies. HIF is a transcriptional complex that plays a central role in mammalian oxygen homeostasis. Posttranslational modification by prolyl hydroxylation is a key regulatory event that targets HIF-alpha (HIF1; 603348) subunits for proteasomal destruction via the von Hippel-Lindau (VHL; 193300) ubiquitylation complex. Epstein et al. (2001) defined a conserved HIF-VHL-prolyl hydroxylase pathway in C. elegans and identified Egl9 as a dioxygenase that regulates HIF by prolyl hydroxylation. In mammalian cells, they showed that the HIF-prolyl hydroxylases are represented by 3 proteins with a conserved 2-histidine-1-carboxylate iron coordination motif at the catalytic site. The genes encoding these proteins were cloned and termed PHD1 (606424), PHD2, and PHD3 (606426) by the authors. Direct modulation of recombinant enzyme activity by graded hypoxia, iron chelation, and cobaltous ions mirrored the characteristics of HIF induction in vivo, fulfilling requirements for these enzymes being oxygen sensors that regulate HIF. In cultured mammalian cells, Bruick and McKnight (2001) found that the inappropriate accumulation of HIF caused by forced expression of the HIF1-alpha (603348) subunit under normoxic conditions was attenuated by coexpression of HPH. Suppression of HPH in cultured Drosophila melanogaster cells by RNA interference resulted in elevated expression of the hypoxia-inducible gene LDH (see 150000) under normoxic conditions. Bruick and McKnight (2001) concluded that HPH is an essential component of the pathway through which cells sense oxygen.

[0849] Full details of the abovementioned studies are described in the following publications, the disclosure of which are hereby incorporated by reference:

[0850] ruick, R. K.; McKnight, S. L.: A conserved family of prolyl-4-hydroxylases that modify HIF. Science 294: 1337-1340, 2001. PubMed ID: 11598268 3. Epstein, A. C. R.; Gleadle, J. M.; McNeill, L. A.; Hewitson, K. S.; O'Rourke, J.; Mole, D. R.; Mukherji, M.; Metzen, E.; Wilson, M. I.; Dhanda, A.; Tian, Y.-M.; Masson, N.; Hamilton, D. L.; Jaakkola, P.; Barstead, R.; Hodgkin, J.; Maxwell, P. H.; Pugh, C. W.; Schofield, C. J.; Ratcliffe, P. J.: C. elegans EGL-9 and mammalian homologs define a family of dioxygenases that regulate HIF by prolyl hydroxylation. Cell 107: 43-54, 2001.

[0851] Further studies establishing the function and utilities of EGLN1 are found in John Hopkins OMIM database record ID 606425, and in references numbered 675-677 listed hereinbelow.

[0852] Reference is now made to EGR3 BINDING SITE. early growth response 3 (EGR3) is a target gene of GAM26, corresponding to GAM26-TARGET GENE of FIG. 26A. EGR3 BINDING SITE is a binding site found in an untranslated region of EGR3, corresponding to BINDING SITE of FIG. 26A. FIG. 26D illustrates the complementarity of the nucleotide sequence of EGR3 BINDING SITE, designated SEQ ID:146843, to the nucleotide sequence of GAM26 RNA of FIG. 26A, designated SEQ ID:20604.

[0853] Yet another function of GAM26 is therefore inhibition of early growth response 3 (EGR3), a gene which encodes a Protein that is a putative transcription factor. Accordingly, utilities of GAM26 include diagnosis and treatment of the abovementioned diseases and clinical conditions.

[0854] The function of EGR3 has been established by previous studies. The human EGR3 gene was described by Patwardhan et al. (1991) as predicting a 387-amino acid protein containing 3 C2H2 zinc fingers nearly identical to those of EGR1 and EGR2. The EGR3 gene has a single intron. The gene was known to be induced in various brain regions in response to stress or following focal brain injury. Morris et al. (1998) stated that, in the SCN, it probably participates in the transcriptional regulation of genes in response to retinal input, as had been proposed for FOS. Muscle spindles are skeletal muscle sensory organs that provide axial and limb position information (proprioception) to the central nervous system. Spindles consist of encapsulated muscle fibers (intrafusal fibers) that are innervated by specialized motor and sensory axons. Tourtellotte and Milbrandt (1998) found that mice rendered deficient in Egr3 by gene targeting had gait ataxia, increased frequency of perinatal mortality, scoliosis, resting tremors, and ptosis. Although extrafusal skeletal muscle fibers appeared normal, Egr3-deficient animals lacked muscle spindles, a finding that is consistent with their profound gait ataxia. Egr3 was highly expressed in developing muscle spindles, but not in IIa afferent neurons or their terminals during developmental periods that coincided with the induction of spindle morphogenesis by sensory afferent axons. These results indicated that type I myotubes are dependent upon Egr3-mediated transcription for proper spindle development.

[0855] Full details of the abovementioned studies are described in the following publications, the disclosure of which are hereby incorporated by reference:

[0856] orris, M. E.; Viswanathan, N.; Kuhlman, S.; Davis, F. C.; Weitz, C. J.: A screen for genes induced in the suprachiasmatic nucleus by light. Science 279: 1544-1547, 1998. PubMed ID: 9488654 3. Tourtellotte, W. G.; Milbrandt, J.: Sensory ataxia and muscle spindle agenesis in mice lacking the transcription factor Egr3. Nature Genet. 20: 87-91, 1998.

[0857] Further studies establishing the function and utilities of EGR3 are found in John Hopkins OMIM database record ID 602419, and in references numbered 678-680 listed hereinbelow.

[0858] Referring now to EGR3 BINDING SITE. early growth response 3 (EGR3) is a target gene of GAM26, corresponding to GAM26-TARGET GENE of FIG. 26A. EGR3 BINDING SITE is a binding site found in an untranslated region of EGR3, corresponding to BINDING SITE of FIG. 26A. FIG. 26D illustrates the complementarity of the nucleotide sequence of EGR3 BINDING SITE, designated SEQ ID: 146845, to the nucleotide sequence of GAM26 RNA of FIG. 26A, designated SEQ ID:20604.

[0859] An additional function of GAM26 is therefore inhibition of early growth response 3 (EGR3), a gene which encodes a Protein that is a putative transcription factor. Accordingly, utilities of GAM26 include diagnosis and treatment of the abovementioned diseases and clinical conditions. The function and utilities of EGR3 have been established by previous studies, as described hereinabove with reference to FIG. 26D.

[0860] Referring now to EGR3 BINDING SITE. early growth response 3 (EGR3) is a target gene of GAM26, corresponding to GAM26-TARGET GENE of FIG. 26A. EGR3 BINDING SITE is a binding site found in an untranslated region of EGR3, corresponding to BINDING SITE of FIG. 26A. FIG. 26D illustrates the complementarity of the nucleotide sequence of EGR3 BINDING SITE, designated SEQ ID: 146876, to the nucleotide sequence of GAM26 RNA of FIG. 26A, designated SEQ ID:20604.

[0861] A further function of GAM26 is therefore inhibition of early growth response 3 (EGR3), a gene which encodes a Protein that is a putative transcription factor. Accordingly, utilities of GAM26 include diagnosis and treatment of the abovementioned diseases and clinical conditions. The function and utilities of EGR3 have been established by previous studies, as described hereinabove with reference to FIG. 26D.

[0862] Referring now to EGR3 BINDING SITE. early growth response 3 (EGR3) is a target gene of GAM26, corresponding to GAM26-TARGET GENE of FIG. 26A. EGR3 BINDING SITE is a binding site found in an untranslated region of EGR3, corresponding to BINDING SITE of FIG. 26A. FIG. 26D illustrates the complementarity of the nucleotide sequence of EGR3 BINDING SITE, designated SEQ ID: 146919, to the nucleotide sequence of GAM26 RNA of FIG. 26A, designated SEQ ID:20604.

[0863] Yet a further function of GAM26 is therefore inhibition of early growth response 3 (EGR3), a gene which encodes a Protein that is a putative transcription factor. Accordingly, utilities of GAM26 include diagnosis and treatment of the abovementioned diseases and clinical conditions. The function and utilities of EGR3 have been established by previous studies, as described hereinabove with reference to FIG. 26D.

[0864] Reference is now made to EIF2C1 BINDING SITE. eukaryotic translation initiation factor 2C, 1 (EIF2C1) is a target gene of GAM26, corresponding to GAM26-TARGET GENE of FIG. 26A. EIF2C1 BINDING SITE is a binding site found in an untranslated region of EIF2C1, corresponding to BINDING SITE of FIG. 26A. FIG. 26D illustrates the complementarity of the nucleotide sequence of EIF2C1 BINDING SITE, designated SEQ ID:148159, to the nucleotide sequence of GAM26 RNA of FIG. 26A, designated SEQ ID:20604.

[0865] Another function of GAM26 is therefore inhibition of eukaryotic translation initiation factor 2C, 1 (EIF2C1), a gene which encodes a Protein that plays an important role in the eukaryotic peptide chain initiation process. Accordingly, utilities of GAM26 include diagnosis and treatment of the abovementioned diseases and clinical conditions.

[0866] The function of EIF2C1 has been established by previous studies. Koesters et al. (1999) isolated a EIF2C1 cDNA from a human fetal kidney cDNA library. To obtain genomic sequence information, they isolated a P1 genomic clone containing the EIF2C1 locus. The human EIF2C1 gene encodes a protein of 857 amino acids. The 2,571-bp open reading frame is flanked by 238 bp of 5-prime sequence and an extremely large 3-prime untranslated region with multiple short repeated segments composed of mono-, tri-, or quatronucleotides interspersed throughout. Northern blot analysis demonstrated that the human EIF2C1 gene is ubiquitously expressed at low to medium levels. Differential polyadenylation and splicing resulted in a complex transcriptional pattern. Martinez et al. (2002) demonstrated that a single-stranded small interfering RNA (siRNA) resides in the human RNA-induced silencing complex (RISC) together with the EIF2C1 and/or EIF2C2 (606229) proteins. RISC could be rapidly formed in HeLa cell cytoplasmic extract supplemented with 21-nucleotide siRNA duplexes, but also by adding single-stranded antisense RNAs, which range in size between 19 and 29 nucleotides.

[0867] Full details of the abovementioned studies are described in the following publications, the disclosure of which are hereby incorporated by reference:

[0868] oesters, R.; Adams, V.; Betts, D.; Moos, R.; Schmid, M.; Siermann, A.; Hassam, S.; Weitz, S.; Lichter, P.; Heitz, P. U.; von Knebel Doeberitz, M.; Briner, J. Human eukaryotic initiation factor EIF2C1 gene: cDNA sequence, genomic organization, localization to chromosomal bands 1q34-p35, and expression. Genomics 61: 210-218, 1999. PubMed ID: 10534406 2. Martinez, J.; Patkaniowska, A.; Urlaub, H.; Luhmmann, R.; Tuschi, T.: Single-stranded antisense siRNAs guide target RNA cleavage in RNAi. Cell 110: 563-574, 2002.

[0869] Further studies establishing the function and utilities of EIF2C1 are found in John Hopkins OMIM database record ID 606228, and in references numbered 681-682 listed hereinbelow.

[0870] Reference is now made to EIF4G1 BINDING SITE. eukaryotic translation initiation factor 4 gamma, 1 (EIF4G1) is a target gene of GAM26, corresponding to GAM26-TARGET GENE of FIG. 26A. EIF4G1 BINDING SITE is a binding site found in an untranslated region of EIF4G1, corresponding to BINDING SITE of FIG. 26A. FIG. 26D illustrates the complementarity of the nucleotide sequence of EIF4G1 BINDING SITE, designated SEQ ID:148798, to the nucleotide sequence of GAM26 RNA of FIG. 26A, designated SEQ ID:20604.

[0871] Yet another function of GAM26 is therefore inhibition of eukaryotic translation initiation factor 4 gamma, 1 (EIF4G1), a gene which encodes a Protein that is a Translation initiation factor. Accordingly, utilities of GAM26 include diagnosis and treatment of the abovementioned diseases and clinical conditions.

[0872] The function of EIF4G1 has been established by previous studies. Gradi et al. (1998) identified a second human eIF4G gene. They designated the original gene eIF4GI and the novel gene eIF4GII (EIF4G3; 603929). Imataka et al. (1998) found that the human eIF4GI protein contains an additional 156 N-terminal amino acids compared to the sequence published by Yan et al. (1992). They demonstrated that this N-terminal region binds poly(A)-binding protein (PABP; 604679). In an in vitro translation system, an N-terminal fragment of eIF4GI that included the PABP-binding site inhibited poly(A)-dependent translation, but had no effect on translation of a deadenylated mRNA. Imataka et al. (1998) concluded that eIF4G probably functions in poly(A)-dependent translation in mammalian cells. By screening a rabbit brain library with oligonucleotide probes based on the sequence of rabbit eIF4-gamma peptides, Yan et al. (1992) identified partial eIF4-gamma cDNAs. They used the rabbit cDNAs as probes and isolated human brain cDNAs encoding eIF4-gamma. The predicted human protein contains 1,396 amino acids. Western blot analysis of poliovirus-infected HeLa cell extracts revealed that eIF4-gamma has an apparent molecular weight of 200 to 220 kD and is cleaved by this picornavirus. Imataka and Sonenberg (1997) stated that the N-terminal region of eIF4G contains a binding site for eIF4E. They demonstrated that the central third of eIF4G contains an eIF3 (see 602039)-binding region and an eIF4A-binding domain. A second, separate eIF4A-binding site is present in the C-terminal third. Neither eIF4A-binding domain alone activates translation. In contrast to eIF4G, the eIF4G-related translation regulator p97 (602325) binds eIF4A only through its N-terminal domain, which is homologous to the central domain of eIF4G

[0873] Full details of the abovementioned studies are described in the following publications, the disclosure of which are hereby incorporated by reference:

[0874] mataka, H.; Gradi, A.; Sonenberg, N.: A newly identified N-terminal amino acid sequence of human eIF4G binds poly(A)-binding protein and functions in poly(A)-dependent translation. EMBO J. 17: 7480-7489, 1998. PubMed ID: 9857202 4. Imataka, H.; Sonenberg, N.: Human eukaryotic translation initiation factor 4G (eIF4G) possesses two separate and independent binding sites for eIF4A. Molec. Cell. Biol. 17: 6940-6947, 1997.

[0875] Further studies establishing the function and utilities of EIF4G1 are found in John Hopkins OMIM database record ID 600495, and in references numbered 683-690 listed hereinbelow.

[0876] Referring now to EIF4G1 BINDING SITE. eukaryotic translation initiation factor 4 gamma, 1 (EIF4G1) is a target gene of GAM26, corresponding to GAM26-TARGET GENE of FIG. 26A. EIF4G1 BINDING SITE is a binding site found in an untranslated region of EIF4G1, corresponding to BINDING SITE of FIG. 26A. FIG. 26D illustrates the complementarity of the nucleotide sequence of EIF4G1 BINDING SITE, designated SEQ ID:148812, to the nucleotide sequence of GAM26 RNA of FIG. 26A, designated SEQ ID:20604.

[0877] An additional function of GAM26 is therefore inhibition of eukaryotic translation initiation factor 4 gamma, 1 (EIF4G1), a gene which encodes a Protein that is a Translation initiation factor. Accordingly, utilities of GAM26 include diagnosis and treatment of the abovementioned diseases and clinical conditions. The function and utilities of EIF4G1 have been established by previous studies, as described hereinabove with reference to FIG. 26D.

[0878] Reference is now made to EIF4G2 BINDING SITE. eukaryotic translation initiation factor 4 gamma, 2 (EIF4G2) is a target gene of GAM26, corresponding to GAM26-TARGET GENE of FIG. 26A. EIF4G2 BINDING SITE is a binding site found in an untranslated region of EIF4G2, corresponding to BINDING SITE of FIG. 26A. FIG. 26D illustrates the complementarity of the nucleotide sequence of EIF4G2 BINDING SITE, designated SEQ ID: 148906, to the nucleotide sequence of GAM26 RNA of FIG. 26A, designated SEQ ID:20604.

[0879] A further function of GAM26 is therefore inhibition of eukaryotic translation initiation factor 4 gamma, 2 (EIF4G2), a gene which encodes a Protein that is a repressor of translation. Accordingly, utilities of GAM26 include diagnosis and treatment of the abovementioned diseases and clinical conditions.

[0880] The function of EIF4G2 has been established by previous studies. Imataka et al. (1997) used immunoprecipitation studies with HA- or FLAG-tagged proteins to show that p97 specifically binds to EIF4A and EIF3, but not to EIF4E (133440) in vitro. Transient transfection experiments showed that p97 suppressed both cap-dependent and independent translation, and that overexpression of p97 reduced overall protein synthesis. Imataka et al. (1997) suggested that p97 is a general repressor of translation that acts by forming translationally inactive complexes. Levy-Strumpf et al. (1997) showed that while a fragment of DAP5 cDNA from the C-terminal region (encoding a 28-kD ‘miniprotein’) protected cells from IFNG-induced programmed cell death at low levels of expression, higher levels of expression were toxic. They proposed that the miniprotein may be a dominant-negative inhibitor of the essential DAP5 protein, and that DAP5 may play a specific role in apoptosis.

[0881] Full details of the abovementioned studies are described in the following publications, the disclosure of which are hereby incorporated by reference:

[0882] mataka, H.; Olsen, H. S.; Sonenberg. N.: A new translational regulator with homology to eukaryotic translation initiation factor 4G. EMBO J. 16: 817-825, 1997. PubMed ID: 9049310 2. Levy-Strumpf, N.; Deiss, L. P.; Berissi, H.; Kimchi, A.: DAP-5, a novel homolog of eukaryotic translation initiation factor 4G isolated as a putative modulator of gamma interferon-induced programmed cell death. Molec. Cell. Biol. 17: 1615-1625, 1997.

[0883] Further studies establishing the function and utilities of EIF4G2 are found in John Hopkins OMIM database record ID 602325, and in references numbered 691-692, 688 and 693-694 listed hereinbelow.

[0884] Reference is now made to EIF5A BINDING SITE. eukaryotic translation initiation factor 5A (EIF5A) is a target gene of GAM26, corresponding to GAM26-TARGET GENE of FIG. 26A. EIF5A BINDING SITE is a binding site found in an untranslated region of EIF5A, corresponding to BINDING SITE of FIG. 26A. FIG. 26D illustrates the complementarity of the nucleotide sequence of EIF5A BINDING SITE, designated SEQ ID: 148944, to the nucleotide sequence of GAM26 RNA of FIG. 26A, designated SEQ ID:20604.

[0885] Yet a further function of GAM26 is therefore inhibition of eukaryotic translation initiation factor 5A (EIF5A), a gene which encodes a Protein that is an initiation factor. Accordingly, utilities of GAM26 include diagnosis and treatment of the abovementioned diseases and clinical conditions.

[0886] The function of EIF5A has been established by previous studies. The eukaryotic initiation factor 5A is an 18-kD protein composed of 154 amino acids. It contains a unique amino acid residue, hypusine, that is formed posttranslationally via the transfer and hydroxylation of the butylamino-group from the polyamine spermidine to a lys50 within the EIF5A protein. Koettnitz et al. (1994) isolated and characterized the human EIF5A pseudogene. Subsequently, Koettnitz et al. (1995) identified a genomic clone with an EIF5A containing 3 introns and spanning about 4.8 kb. The authors showed that this sequence would successfully complement yeast carrying the HYP2 mutation (the homolog of EIF5A), whereas the pseudogenes could not. Steinkasserer et al. (1995) mapped the EIF5A gene to 17p13-p12 by fluorescence in situ hybridization. Three pseudogenes were mapped to 10q23.3, 17q25, and 19q13.2.

[0887] Full details of the abovementioned studies are described in the following publications, the disclosure of which are hereby incorporated by reference:

[0888] oettnitz, K.; Wohl, T.; Kappel, B.; Lottspeich, F.; Hauber, J.; Bevec, D.: Identification of a new member of the human cIF-5A gene family. Gene 159: 283-284, 1995. PubMed ID: 7622067 3. Steinkasserer, A.; Jones, T.; Sheer, D.; Koettnitz, K.; Hauber, J.; Bevec, D.: The eukaryotic cofactor for the human immunodeficiency virus type I (HIV-1) rev protein, eIF-5A, maps to chromosome 17p12-p 13: three eIF-5A pseudogenes map to 10q23.3, 17q25, and 19q13.2. Genomics 25: 749-752, 1995.

[0889] Further studies establishing the function and utilities of EIF5A are found in John Hopkins OMIM database record ID 600187, and in references numbered 695-697 listed hereinbelow.

[0890] Referring now to EIF5A BINDING SITE. eukaryotic translation initiation factor 5A (EIF5A) is a target gene of GAM26, corresponding to GAM26-TARGET GENE of FIG. 26A. EIF5A BINDING SITE is a binding site found in an untranslated region of EIF5A, corresponding to BINDING SITE of FIG. 26A. FIG. 26D illustrates the complementarity of the nucleotide sequence of EIF5A BINDING SITE, designated SEQ ID:148945, to the nucleotide sequence of GAM26 RNA of FIG. 26A, designated SEQ ID:20604.

[0891] Another function of GAM26 is therefore inhibition of eukaryotic translation initiation factor 5A (EIF5A), a gene which encodes a Protein that is an initiation factor. Accordingly, utilities of GAM26 include diagnosis and treatment of the abovementioned diseases and clinical conditions. The function and utilities of EIF5A have been established by previous studies, as described hereinabove with reference to FIG. 26D.

[0892] Referring now to EIF5A BINDING SITE. eukaryotic translation initiation factor 5A (EIF5A) is a target gene of GAM26, corresponding to GAM26-TARGET GENE of FIG. 26A. EIF5A BINDING SITE is a binding site found in an untranslated region of EIF5A, corresponding to BINDING SITE of FIG. 26A. FIG. 26D illustrates the complementarity of the nucleotide sequence of EIF5A BINDING SITE, designated SEQ ID:148952, to the nucleotide sequence of GAM26 RNA of FIG. 26A, designated SEQ ID:20604.

[0893] Yet another function of GAM26 is therefore inhibition of eukaryotic translation initiation factor 5A (EIF5A), a gene which encodes a Protein that is an initiation factor. Accordingly, utilities of GAM26 include diagnosis and treatment of the abovementioned diseases and clinical conditions. The function and utilities of EIF5A have been established by previous studies, as described hereinabove with reference to FIG. 26D.

[0894] Reference is now made to EP300 BINDING SITE. E1A binding protein p300 (EP300) is a target gene of GAM26, corresponding to GAM26-TARGET GENE of FIG. 26A. EP300 BINDING SITE is a binding site found in an untranslated region of EP300, corresponding to BINDING SITE of FIG. 26A. FIG. 26D illustrates the complementarity of the nucleotide sequence of EP300 BINDING SITE, designated SEQ ID:151947, to the nucleotide sequence of GAM26 RNA of FIG. 26A, designated SEQ ID:20604.

[0895] An additional function of GAM26 is therefore inhibition of E1A binding protein p300 (EP300), a gene which encodes a Protein that may have a function in cell cycle regulation. and is associated with COLORECTAL CANCER. Accordingly, utilities of GAM26 include diagnosis and treatment of the abovementioned diseases and clinical conditions.

[0896] The function of EP300 has been established by previous studies. The growth-controlling functions of the adenovirus E1A oncoprotein depend on its ability to interact with a set of cellular proteins. Among these are the retinoblastoma protein, p107, p130, and p300. Eckner et al. (1994) isolated a cDNA encoding full-length human p300. p300 contains 3 cysteine- and histidine-rich regions of which the most carboxy-terminal region interacts specifically with E1A. In its center, p300 contains a bromodomain, a hallmark of certain transcriptional coactivators. p300 and CREB-binding protein (CREBBP, or CBP; 600140) are highly related in primary structure (Arany et al., 1994). Several protein motifs such as a bromodomain, a KIX domain, and 3 regions rich in cys/his residues are well conserved between these 2 proteins.

[0897] Animal model experiments lend further support to the function of EP300. The EP300 protein is a histone acetyltransferase that regulates transcription via chromatin remodeling and is important in the processes of cell proliferation and differentiation. A role for EP300 in cancer had been implied by the fact that it is targeted by viral oncoproteins (Arany et al., 1995), it is fused to MLL (159555) in leukemia (Ida et al., 1997), and 2 missense sequence alterations in EP300 were identified in epithelial malignancies (Muraoka et al., 1996). Gayther et al. (2000) described EP300 mutations that predicted a truncated protein in 6 (3%) of 193 epithelial cancers analyzed. Of these 6 mutations, 2 were in primary tumors (a colorectal cancer and a breast cancer) and 4 were in cancer cell lines (colorectal, breast, and pancreatic). In addition, they identified a somatic in-frame insertion in a primary breast cancer and missense alterations in a primary colorectal cancer and 2 cell lines (breast and pancreatic). Inactivation of the second allele was demonstrated in 5 of the 6 cases with truncating mutations and in 2 other cases. The data showed that EP300 is mutated in epithelial cancers and provided the first evidence that it behaves as a classic tumor suppressor gene.

[0898] It is appreciated that the abovementioned animal model for EP300 is acknowledged by those skilled in the art as a scientifically valid animal model, as can be further appreciated from the publications sited hereinbelow.

[0899] Full details of the abovementioned studies are described in the following publications, the disclosure of which are hereby incorporated by reference:

[0900] Tini, M.; Benecke, A.; Um, S.-J.; Torchia, J.; Evans, R. M.; Chambon, P.: Association of CBP/p300 acetylase and thymine DNA glycosylase links DNA repair and transcription. Molec. Cell 9: 265-277, 2002. PubMed ID: 11864601 8. Lin, C. H.; Hare, B. J.; Wagner, G.; Harrison, S.C.; Maniatis, T.; Fraenkel, E.: A small domain of CBP/p300 binds diverse proteins: solution structure and functional studies. Molec. Cell 8: 581-590, 2001.

[0901] Further studies establishing the function and utilities of EP300 are found in John Hopkins OMIM database record ID 602700, and in references numbered 698-710 listed hereinbelow.

[0902] Reference is now made to EZH2 BINDING SITE. enhancer of zeste (Drosophila) homolog 2 (EZH2) is a target gene of GAM26, corresponding to GAM26-TARGET GENE of FIG. 26A. EZH2 BINDING SITE is a binding site found in an untranslated region of EZH2, corresponding to BINDING SITE of FIG. 26A. FIG. 26D illustrates the complementarity of the nucleotide sequence of EZH2 BINDING SITE, designated SEQ ID:156540, to the nucleotide sequence of GAM26 RNA of FIG. 26A, designated SEQ ID:20604.

[0903] A further function of GAM26 is therefore inhibition of enhancer of zeste (Drosophila) homolog 2 (EZH2), a gene which encodes a Protein that may be involved in the regulation of gene transcription and chromatin structure. and is associated with This protein may play a role in the hematopoietic and central nervous systems. Accordingly, utilities of GAM26 include diagnosis and treatment of the abovementioned diseases and clinical conditions.

[0904] The function of EZH2 has been established by previous studies. To identify genes that map on human chromosome 21 that may contribute to the phenotype of Down syndrome, Chen et al. (1996) applied exon trapping to cosmid DNA from a chromosome 21-specific library. One of the potential exons that was cloned and partially characterized showed strong homology to the Drosophila ‘enhancer of zeste’ protein from amino acid 665 to amino acid 694. The Drosophila protein is a member of the Polycomb group, which maintains homeotic gene repression and is thought to control gene expression by regulating chromatin. Chen et al. (1996) cloned the full-length cDNA for this human homolog, termed EZH2. Chen et al. (1996) mapped the human EZH2 cDNA within YACs between marker D21S65 and ERG (165080) on 21q22.2. However, Cardoso et al. (2000) later showed by FISH that the functional EZH2 gene maps to 7q35, not 21q22, and that the sequence isolated from the chromosome 21 cosmid corresponds to a pseudogene. By FISH, Laible et al. (1999) mapped the mouse Ezh2 gene to chromosome 6. Varambally et al. (2002) demonstrated through gene expression profiling that EZH2 is overexpressed in hormone-refractory, metastatic prostate cancer. Small interfering RNA (siRNA) duplexes targeted against EZH2 reduced the amounts of EZH2 protein present in prostate cells and also inhibited cell proliferation in vitro. Ectopic expression of EZH2 in prostate cells induced transcriptional repression of a specific cohort of genes. Gene silencing mediated by EZH2 requires the SET domain and is attenuated by inhibiting histone deacetylase activity. Amounts of both EZH2 mRNA and EZH2 protein were increased in metastatic prostate cancer. In addition, clinically localized prostate cancers that expressed higher concentrations of EZH2 showed a poorer prognosis. Thus, Varambally et al. (2002) concluded that dysregulated expression of EZH2 may be involved in the progression of prostate cancer as well as being a marker that distinguishes indolent prostate cancer from those at risk of lethal progression.

[0905] Full details of the abovementioned studies are described in the following publications, the disclosure of which are hereby incorporated by reference:

[0906] hen, H.; Rossier, C.; Antonarakis, S. E.: Cloning of a human homolog of the Drosophila enhancer of zeste gene (EZH2) that maps to chromosome 21q22.2. Genomics 38: 30-37, 1996. PubMed ID: 8954776 6. Varambally, S.; Dhanasekaran, S. M.; Zhou, M.; Barrette, T. R.; Kumar-Sinha, C.; Sanda, M. G.; Ghosh, D.; Pienta, K. J.; Sewalt, R. G. A. B.; Otte, A. P.; Rubin, M. A.; Chinnaiyan, A. M.: The polycomb group protein EZH2 is involved in progression of prostate cancer. Nature 419: 624-629, 2002.

[0907] Further studies establishing the function and utilities of EZH2 are found in John Hopkins OMIM database record ID 601573, and in references numbered 711-712, 712-713, 713-714, 714-715, 715-716 and 716 listed hereinbelow.

[0908] Referring now to EZH2 BINDING SITE. enhancer of zeste (Drosophila) homolog 2 (EZH2) is a target gene of GAM26, corresponding to GAM26-TARGET GENE of FIG. 26A. EZH2 BINDING SITE is a binding site found in an untranslated region of EZH2, corresponding to BINDING SITE of FIG. 26A. FIG. 26D illustrates the complementarity of the nucleotide sequence of EZH2 BINDING SITE, designated SEQ ID:156546, to the nucleotide sequence of GAM26 RNA of FIG. 26A, designated SEQ ID:20604.

[0909] Yet a further function of GAM26 is therefore inhibition of enhancer of zeste (Drosophila) homolog 2 (EZH2), a gene which encodes a Protein that may be involved in the regulation of gene transcription and chromatin structure. and is associated with This protein may play a role in the hematopoietic and central nervous systems. Accordingly, utilities of GAM26 include diagnosis and treatment of the abovementioned diseases and clinical conditions. The function and utilities of EZH2 have been established by previous studies, as described hereinabove with reference to FIG. 26D.

[0910] Referring now to EZH2 BINDING SITE. enhancer of zeste (Drosophila) homolog 2 (EZH2) is a target gene of GAM26, corresponding to GAM26-TARGET GENE of FIG. 26A. EZH2 BINDING SITE is a binding site found in an untranslated region of EZH2, corresponding to BINDING SITE of FIG. 26A. FIG. 26D illustrates the complementarity of the nucleotide sequence of EZH2 BINDING SITE, designated SEQ ID:156547, to the nucleotide sequence of GAM26 RNA of FIG. 26A, designated SEQ ID:20604.

[0911] Another function of GAM26 is therefore inhibition of enhancer of zeste (Drosophila) homolog 2 (EZH2), a gene which encodes a Protein that may be involved in the regulation of gene transcription and chromatin structure. and is associated with This protein may play a role in the hematopoietic and central nervous systems. Accordingly, utilities of GAM26 include diagnosis and treatment of the abovementioned diseases and clinical conditions. The function and utilities of EZH2 have been established by previous studies, as described hereinabove with reference to FIG. 26D.

[0912] Referring now to FGF18 BINDING SITE. fibroblast growth factor 18 (FGF18) is a target gene of GAM26, corresponding to GAM26-TARGET GENE of FIG. 26A. FGF18 BINDING SITE is a binding site found in an untranslated region of FGF18, corresponding to BINDING SITE of FIG. 26A. FIG. 26D illustrates the complementarity of the nucleotide sequence of FGF18 BINDING SITE, designated SEQ ID:163374, to the nucleotide sequence of GAM26 RNA of FIG. 26A, designated SEQ ID:20604.

[0913] Yet another function of GAM26 is therefore inhibition of fibroblast growth factor 18 (FGF18), a gene which encodes a Protein that stimulates hepatic and intestinal proliferation. Accordingly, utilities of GAM26 include diagnosis and treatment of the abovementioned diseases and clinical conditions. The function and utilities of FGF18 have been established by previous studies, as described hereinabove with reference to FIG. 26D.

[0914] Reference is now made to SERPINB8 BINDING SITE. serine (or cysteine) proteinase inhibitor, clade B (ovalbumin), member (SERPINB8) is a target gene of GAM26, corresponding to GAM26-TARGET GENE of FIG. 26A. SERPINB8 BINDING SITE is a binding site found in an untranslated region of SERPINB8, corresponding to BINDING SITE of FIG. 26A. FIG. 26D illustrates the complementarity of the nucleotide sequence of SERPINB8 BINDING SITE, designated SEQ ID:163374, to the nucleotide sequence of GAM26 RNA of FIG. 26A, designated SEQ ID:20604.

[0915] An additional function of GAM26 is therefore inhibition of serine (or cysteine) proteinase inhibitor, clade B (ovalbumin), member (SERPINB8), a gene which encodes a Protein that protease inhibitors; may be a serpin serine protease inhibitor that binds thrombin. Accordingly, utilities of GAM26 include diagnosis and treatment of the abovementioned diseases and clinical conditions.

[0916] The function of SERPINB8 has been established by previous studies. High molecular weight serine proteinase inhibitors (serpins) are a large superfamily of proteins which bind to and inactivate serine proteinases. These interactions are involved in many cellular processes including coagulation, fibrinolysis, complement fixation, matrix remodeling, and apoptosis. Sprecher et al. (1995) cloned 2 novel serpins, termed P18 and P19 (601799), from a human placenta cDNA library. Sequence analysis showed that P18 encodes a 376-amino acid polypeptide with over 60% identity to P16 (173321). Using Northern blotting, they observed that P18 was expressed as 2 transcripts of 1.4 and 3.8 kb. The 1.4-kb transcript was most abundant in liver and lung while the 3.8-kb transcript was most abundant in skeletal muscle and heart. They showed that P18 was localized to the cytoplasm of transfected cells and that it was able to form an SDS-insoluble complex with human thrombin (176930). Serpins are characterized by a well-conserved tertiary structure that consists of 3 beta sheets and 8 or 9 alpha helices (Huber and Carrell, 1989). A critical portion of the molecule, the reactive center loop, connects beta sheets A and C and, in most cases, serves as bait for a target serine proteinase. Bartuski et al. (1997) stated that more than 100 members of the serpin superfamily are known, including C1 esterase inhibitor (C1NH; 606860), antithrombin III (AT3; 107300), protease inhibitor 7 (PI7; 177010), and maspin (PI5; 154790), which are involved in complement activation, coagulation, cell differentiation, and tumor suppression, respectively, as well as many others. The ovalbumin-type serpins (ov-serpins) are a subset of the serpin superfamily and are characterized by their high degree of homology to chicken ovalbumin, the lack of N- and C-terminal extensions, the absence of a signal peptide, and a serine rather than an asparagine residue at the penultimate position. Four members of the ov-serpin family had been mapped to a 300-kb region within 18q21.3: P15, SCCA1 (600517), SCCA2 (600518), and PAI2 (173390). Using a panel of 18q21.3 YAC clones, PCR, and DNA blotting, Bartuski et al. (1997) mapped 2 additional ov-serpins, cytoplasmic antiproteinase 2 (CAP2 or PI8) and bone marrow-associated serpin bomapin (PI10; 602058), to the same region. Three of the serpins (PI8, PI10, and PAI2) mapped to the same YACs. Bartuski et al. (1997) estimated that the size of the 18q21.3 serpin cluster spans approximately 500 kb and contains at least 6 serpin genes. The gene order is cen—PI5—SCCA2—SCCA1—PAI2—PI10—PI8—tel. The characterization of the serpin gene cluster at 18q21 provided new opportunities to study coordinate gene regulation and the evolution of gene families.

[0917] Full details of the abovementioned studies are described in the following publications, the disclosure of which are hereby incorporated by reference:

[0918] artuski, A. J.; Kamachi, Y.; Schick, C.; Overhauser, J.; Silverman, G. A.: Cytoplasmic antiproteinase 2 (PI8) and bomapin (PI10) map to the serpin cluster at 18q21.3. Genomics 43: 321-328, 1997. PubMed ID: 9268635 3. Sprecher, C. A.; Morgenstern, K. A.; Mathewes, S.; Dahlen, J. R.; Schrader, S. K.; Foster, D.C.; Kisiel, W.: Molecular cloning, expression, and partial characterization of two novel members of the ovalbumin family of serine proteinase inhibitors. J. Biol. Chem. 270: 29854-29861, 1995.

[0919] Further studies establishing the function and utilities of SERPINB8 are found in John Hopkins OMIM database record ID 601697, and in references numbered 717-718, 718-719 and 719 listed hereinbelow.

[0920] Referring now to FGF18 BINDING SITE. fibroblast growth factor 18 (FGF18) is a target gene of GAM26, corresponding to GAM26-TARGET GENE of FIG. 26A. FGF18 BINDING SITE is a binding site found in an untranslated region of FGF18, corresponding to BINDING SITE of FIG. 26A. FIG. 26D illustrates the complementarity of the nucleotide sequence of FGF18 BINDING SITE, designated SEQ ID:163376, to the nucleotide sequence of GAM26 RNA of FIG. 26A, designated SEQ ID:20604.

[0921] A further function of GAM26 is therefore inhibition of fibroblast growth factor 18 (FGF18), a gene which encodes a Protein that stimulates hepatic and intestinal proliferation. Accordingly, utilities of GAM26 include diagnosis and treatment of the abovementioned diseases and clinical conditions. The function and utilities of FGF18 have been established by previous studies, as described hereinabove with reference to FIG. 26D.

[0922] Referring now to FGF18 BINDING SITE. fibroblast growth factor 18 (FGF18) is a target gene of GAM26, corresponding to GAM26-TARGET GENE of FIG. 26A. FGF18 BINDING SITE is a binding site found in an untranslated region of FGF18, corresponding to BINDING SITE of FIG. 26A. FIG. 26D illustrates the complementarity of the nucleotide sequence of FGF18 BINDING SITE, designated SEQ ID:163380, to the nucleotide sequence of GAM26 RNA of FIG. 26A, designated SEQ ID:20604.

[0923] Yet a further function of GAM26 is therefore inhibition of fibroblast growth factor 18 (FGF18), a gene which encodes a Protein that stimulates hepatic and intestinal proliferation. Accordingly, utilities of GAM26 include diagnosis and treatment of the abovementioned diseases and clinical conditions. The function and utilities of FGF18 have been established by previous studies, as described hereinabove with reference to FIG. 26D.

[0924] Reference is now made to FKRP BINDING SITE. FUKUTIN-RELATED PROTEIN (FKRP) is a target gene of GAM26, corresponding to GAM26-TARGET GENE of FIG. 26A. FKRP BINDING SITE is a binding site found in an untranslated region of FKRP, corresponding to BINDING SITE of FIG. 26A. FIG. 26D illustrates the complementarity of the nucleotide sequence of FKRP BINDING SITE, designated SEQ ID:166297, to the nucleotide sequence of GAM26 RNA of FIG. 26A, designated SEQ ID:20604.

[0925] Another function of GAM26 is therefore inhibition of FUKUTIN-RELATED PROTEIN (FKRP), a gene which encodes a Protein that is associated with congenital muscular dystrophies MDC1C. Accordingly, utilities of GAM26 include diagnosis and treatment of the abovementioned diseases and clinical conditions.

[0926] The function of FKRP has been established by previous studies. Brockington et al. (2001) identified the fukutin-related protein gene (FKRP) by database screening using the mouse fukutin sequence. The human version of the sequence was determined by a combination of EST assembly, RT-PCR, and RACE. The cDNA had a 1,488-bp open reading frame that encoded a 495-amino acid protein. Sequence analysis predicted a molecular organization similar to that found in several Golgi-resident glycosyltransferases. Northern blot analysis detected a 4.0-kb FKRP transcript expressed predominantly in skeletal muscle, placenta, and heart and relatively weakly in other tissues. Brockington et al. (2001) determined that the 12-kb FKRP gene is composed of 3 noncoding exons and a single large exon of 3.8 kb that contained part of the 5-prime untranslated region and the entire open reading frame and 3-prime untranslated region. By radiation hybrid mapping, Brockington et al. (2001) localized the FKRP gene to chromosome 19q13.3. Driss et al. (2000) demonstrated that autosomal recessive limb-girdle muscular dystrophy type 2I (LGMD2I; 607155), a mild, later-onset muscular dystrophy, maps to chromosome 19q13.3. The congenital muscular dystrophies (CMD) are a heterogeneous group of autosomal recessive disorders presenting in infancy with muscle weakness, contractures, and dystrophic changes on skeletal muscle biopsy. Structural brain defects, with or without mental retardation, are additional features of several CMD syndromes. Approximately 40% of patients with CMD have a primary deficiency (MDC1A) of the laminin alpha-2 chain of merosin (laminin-2) due to mutations in the LAMA2 gene (156225), which maps to 6q. In addition, a secondary deficiency of laminin alpha-2 is apparent in some CMD syndromes, including MDC1B (604801), which is mapped to chromosome 1q42, and both muscle-eye-brain disease (MEB; 253280), which maps to 1p, and Fukuyama CMD (FCMD; 253800) on 9q31, both of which are forms with severe brain involvement. The FCMD gene encodes a protein, fukutin, predicted through sequence analysis to be a phosphoryl-ligand transferase. Brockington et al. (2001) identified a member of the fukutin-related-protein family, which was found to be mutated in a severe form of CMD that they called MDC1C (606612). Patients harboring mutations in this gene had a secondary deficiency of laminin alpha-2 and a profound reduction in alpha-dystroglycan immunostaining. In addition, the molecular weight of alpha-dystroglycan was reduced in muscle. Together, these findings suggested that this protein is abnormally glycosylated in MDC1C and is central to the pathogenesis of the disorder. Brockington et al. (2001) identified mutations in the FKRP gene in 7 families with CMD characterized by disease onset in the first weeks of life and a severe phenotype with inability to walk, muscle hypertrophy, marked elevation of serum creatine kinase, and normal brain structure and function. Nine of the mutations were missense mutations and 2 were nonsense mutations. In 4 families, the affected individuals were compound heterozygotes; in the other 3 the patients were homozygous for the particular mutation. The 11 mutations were all different. Brockington et al. (2001) found FKRP mutations in 17 of 25 LGMD2I families, including some with a severe and early-onset phenotype. Affected individuals from 15 of 17 families had an identical C826A (leu276-to-ile; 606596.0004) mutation, and individuals in 5 families were homozygous for this recurrent mutation. Linkage analysis identified at least 2 possible haplotypes in linkage disequilibrium with this mutation. Patients with the C826A change had the clinically less severe LGMD2I phenotype, suggesting that this is a less disruptive FKRP mutation than those found in MDC1C. A variable reduction of alpha-dystroglycan (DAG1; 128239) expression was observed in the skeletal muscle biopsy of all individuals studied. In addition, several cases showed a deficiency of laminin 2 (LAMA2; 156225) either by immunocytochemistry or western blotting.

[0927] Full details of the abovementioned studies are described in the following publications, the disclosure of which are hereby incorporated by reference:

[0928] rockington, M.; Blake, D. J.; Prandini, P.; Brown, S.C.; Torelli, S.; Benson, M. A.; Ponting, C. P.; Estournet, B.; Romero, N. B.; Mercuri, E.; Voit, T.; Sewry, C. A.; Guicheney, P.; Muntoni, F.: Mutations in the fukutin-related protein gene (FKRP) cause a form of congenital muscular dystrophy with secondary laminin alpha-2 deficiency and abnormal glycosylation of alpha-dystroglycan. Am. J. Hum. Genet. 69: 1198-1209, 2001. PubMed ID: 11592034 4. Mercuri, E.; Sewry, C. A.; Brown, S.C.; Brockington, M.; Jungbluth, H. DeVile, C.; Counsell, S.; Manzur, A.; Muntoni, F.: Congenital muscular dystrophy with secondary merosin deficiency and normal brain MRI: a novel entity? Neuropediatrics 31: 186-189, 2000.

[0929] Further studies establishing the function and utilities of FKRP are found in John Hopkins OMIM database record ID 606596, and in references numbered 720-723 listed hereinbelow.

[0930] Reference is now made to FLT1 BINDING SITE. fms-related tyrosine kinase 1 (vascular endothelial growth factor/vasc (FLT1) is a target gene of GAM26, corresponding to GAM26-TARGET GENE of FIG. 26A. FLT1 BINDING SITE is a binding site found in an untranslated region of FLT1, corresponding to BINDING SITE of FIG. 26A. FIG. 26D illustrates the complementarity of the nucleotide sequence of FLT1 BINDING SITE, designated SEQ ID:167123, to the nucleotide sequence of GAM26 RNA of FIG. 26A, designated SEQ ID:20604.

[0931] Yet another function of GAM26 is therefore inhibition of fms-related tyrosine kinase 1 (vascular endothelial growth factor/vasc (FLT1), a gene which encodes a receptor that receptor for vegf, vegfb and pgf. has a tyrosine-protein kinase activity. Accordingly, utilities of GAM26 include diagnosis and treatment of the abovementioned diseases and clinical conditions.

[0932] The function of FLT1 has been established by previous studies. Oncogene FLT belongs to the src gene family and is related to oncogene ROS (165020). Like other members of this family, it shows tyrosine protein kinase activity that is important for the control of cell proliferation and differentiation. The sequence structure of the FLT gene resembles that of the FMS gene (164770); hence, Yoshida et al. (1987) proposed the name FLT as an acronym for FMS-like tyrosine kinase. Satoh et al. (1987) and Yoshida et al. (1987) mapped FLT to 13q12 by probing of DNA from a panel of human-mouse somatic cell hybrids and by in situ hybridization. By the isolation and analysis of a YAC containing the FLT1 and FLT3 (136351) genes, Imbert et al. (1994) confirmed their close physical linkage. FLT1 and FLT3 are linked in a head-to-tail configuration and are separated by about 150 kb. Imbert et al. (1994) found that the region contains 3 CpG islands, 2 of which were thought to correspond to FLT1 and FLT3 and the third to a putative, unidentified receptor-type tyrosine kinase (RTK) gene. They referred to studies performed by fluorescence in situ hybridization using the YAC as a probe. Wiesmann et al. (1997) reported the crystal structure to 1.7-angstrom resolution of the complex between the receptor-binding domain of VEGF and FLT1 domain 2. The crystal structure of the complex between VEGF and the second domain of FLT1 shows domain 2 in a predominantly hydrophobic interaction with the ‘poles’ of the VEGF dimer. Based on this structure and on mutational data, Wiesmann et al. (1997) presented a model of VEGF bound to the first 4 domains of FLT1.

[0933] Animal model experiments lend further support to the function of FLT1. VEGF and its high-affinity binding receptors, the tyrosine kinases FLK1 and FLT1, are thought to be important for the development of embryonic vasculature. Studying transgenic mice in whom the Flk1 gene was disrupted, Shalaby et al. (1995) demonstrated a total failure of embryonic mice to develop blood vessels and failure of blood island formation in the yolk sac. Fong et al. (1995) reported that in mice Flt1 is essential for the organization of embryonic vasculature, but is not essential for endothelial cell differentiation. Transgenic mouse embryos homozygous for a targeted mutation in the Flt1 locus formed endothelial cells in both embryonic and extraembryonic regions, but assembled these cells into abnormal vascular channels and died in utero at mid-somite stages. At earlier stages, the blood islands of homozygous mice were abnormal, with angioblasts in the interior as well as on the periphery. Fong et al. (1995) suggested that the Flt1 signaling pathway may regulate normal endothelial cell-cell or cell-matrix interactions during vascular development.

[0934] It is appreciated that the abovementioned animal model for FLT1 is acknowledged by those skilled in the art as a scientifically valid animal model, as can be further appreciated from the publications sited hereinbelow.

[0935] Full details of the abovementioned studies are described in the following publications, the disclosure of which are hereby incorporated by reference:

[0936] oshida, M. C.; Satoh, H.; Matsushime, H.; Shibuya, M.; Sasaki, M. Two ros-related protooncogenes, c-ros-1 and flt, are regionally mapped on human chromosomes 6q22 and 13q12, respectively. (Abstract) Cytogenet. Cell Genet. 46: 724 only, 1987. 3. Imbert, A.; Rosnet, O.; Marchetto, S.; Ollendorff, V.; Birnbaum, D.; Pebusque, M.-J.: Characterization of a yeast artificial chromosome from human chromosome band 13q12 containing the FLT1 and FLT3 receptor-type tyrosine kinase genes. Cytogenet. Cell Genet. 67: 175-177, 1994.

[0937] Further studies establishing the function and utilities of FLT1 are found in John Hopkins OMIM database record ID 165070, and in references numbered 724-732 listed hereinbelow.

[0938] Referring now to FLT1 BINDING SITE. fins-related tyrosine kinase 1 (vascular endothelial growth factor/vasc (FLT1) is a target gene of GAM26, corresponding to GAM26-TARGET GENE of FIG. 26A. FLT1 BINDING SITE is a binding site found in an untranslated region of FLT1, corresponding to BINDING SITE of FIG. 26A. FIG. 26D illustrates the complementarity of the nucleotide sequence of FLT1 BINDING SITE, designated SEQ ID:167194, to the nucleotide sequence of GAM26 RNA of FIG. 26A, designated SEQ ID:20604.

[0939] An additional function of GAM26 is therefore inhibition of fms-related tyrosine kinase 1 (vascular endothelial growth factor/vasc (FLT1), a gene which encodes a receptor that receptor for vegf, vegfb and pgf has a tyrosine-protein kinase activity. Accordingly, utilities of GAM26 include diagnosis and treatment of the abovementioned diseases and clinical conditions. The function and utilities of FLT1 have been established by previous studies, as described hereinabove with reference to FIG. 26D.

[0940] Referring now to FMR1 BINDING SITE. fragile X mental retardation 1 (FMR1) is a target gene of GAM26, corresponding to GAM26-TARGET GENE of FIG. 26A. FMR1 BINDING SITE is a binding site found in an untranslated region of FMR1, corresponding to BINDING SITE of FIG. 26A. FIG. 26D illustrates the complementarity of the nucleotide sequence of FMR1 BINDING SITE, designated SEQ ID: 167700, to the nucleotide sequence of GAM26 RNA of FIG. 26A, designated SEQ ID:20604.

[0941] A further function of GAM26 is therefore inhibition of fragile X mental retardation 1 (FMR1), a gene which encodes a Protein that is associated with fragile x syndrome. Accordingly, utilities of GAM26 include diagnosis and treatment of the abovementioned diseases and clinical conditions. The function and utilities of FMR1 have been established by previous studies, as described hereinabove with reference to FIG. 26D.

[0942] Referring now to FMR1 BINDING SITE. fragile X mental retardation 1 (FMR1) is a target gene of GAM26, corresponding to GAM26-TARGET GENE of FIG. 26A. FMR1 BINDING SITE is a binding site found in an untranslated region of FMR1, corresponding to BINDING SITE of FIG. 26A. FIG. 26D illustrates the complementarity of the nucleotide sequence of FMR1 BINDING SITE, designated SEQ ID:167700, to the nucleotide sequence of GAM26 RNA of FIG. 26A, designated SEQ ID:20604.

[0943] Yet a further function of GAM26 is therefore inhibition of fragile X mental retardation 1 (FMR1), a gene which encodes a Protein that is associated with fragile x syndrome. Accordingly, utilities of GAM26 include diagnosis and treatment of the abovementioned diseases and clinical conditions. The function and utilities of FMR1 have been established by previous studies, as described hereinabove with reference to FIG. 26D.

[0944] Reference is now made to SMURF1 BINDING SITE. SMAD UBIQUITINATION REGULATORY FACTOR 1 (SMURF1) is a target gene of GAM26, corresponding to GAM26-TARGET GENE of FIG. 26A. SMURF1 BINDING SITE is a binding site found in an untranslated region of SMURF1, corresponding to BINDING SITE of FIG. 26A. FIG. 26D illustrates the complementarity of the nucleotide sequence of SMURF1 BINDING SITE, designated SEQ ID:167709, to the nucleotide sequence of GAM26 RNA of FIG. 26A, designated SEQ ID:20604.

[0945] Another function of GAM26 is therefore inhibition of SMAD UBIQUITINATION REGULATORY FACTOR 1 (SMURF1), a gene which encodes a Enzyme that triggers ubiquitination and degradation of smads specific for the BMP pathway. Accordingly, utilities of GAM26 include diagnosis and treatment of the abovementioned diseases and clinical conditions.

[0946] The function of SMURF1 has been established by previous studies. Using a yeast 2-hybrid screen with frog Smad1 as bait, Zhu et al. (1999) identified cDNAs encoding frog and human SMURF1 (SMAD ubiquitination regulatory factor-1). Sequence analysis predicted that frog and human SMURF1 contain 731 amino acids, share 91% identity, are most closely related to yeast Pub1, and have significant homology to the Hect subclass of E3 ubiquitin ligases. Expression of SMURF1 caused a dose-dependent decrease in expression of SMAD1 and SMAD5, which function in BMP signaling, but not in expression of SMAD2 or SMAD3, which function in TGFB signaling. Pulse-chase analysis demonstrated that degradation of SMAD proteins occurs by ubiquitination of the SMAD Hect domain and transport to the proteasome. Mutational analysis indicated that the WW motif of SMURF1 associates with SMAD1 and SMAD5 through their PY motifs. In frog eggs, Smurf1 mRNA was localized to the animal pole; ectopic Smurf1 in frog embryos inhibited the transmission of BMP signals, affecting pattern formation.

[0947] Full details of the abovementioned studies are described in the following publications, the disclosure of which are hereby incorporated by reference:

[0948] hu, H.; Kavsak, P.; Abdollah, S.; Wrana, J. L.; Thomsen, G. H.: A SMAD ubiquitin ligase targets the BMP pathway and affects embryonic pattern formation. Nature 400: 687-693, 1999.

[0949] Further studies establishing the function and utilities of SMURF1 are found in John Hopkins OMIM database record ID 605568, and in references numbered 733-734 listed hereinbelow.

[0950] Referring now to FMR1 BINDING SITE. fragile X mental retardation 1 (FMR1) is a target gene of GAM26, corresponding to GAM26-TARGET GENE of FIG. 26A. FMR1 BINDING SITE is a binding site found in an untranslated region of FMR1, corresponding to BINDING SITE of FIG. 26A. FIG. 26D illustrates the complementarity of the nucleotide sequence of FMR1 BINDING SITE, designated SEQ ID:167713, to the nucleotide sequence of GAM26 RNA of FIG. 26A, designated SEQ ID:20604.

[0951] Yet another function of GAM26 is therefore inhibition of fragile X mental retardation 1 (FMR1), a gene which encodes a Protein that is associated with fragile x syndrome. Accordingly, utilities of GAM26 include diagnosis and treatment of the abovementioned diseases and clinical conditions. The function and utilities of FMR1 have been established by previous studies, as described hereinabove with reference to FIG. 26D.

[0952] Referring now to FMR1 BINDING SITE. fragile X mental retardation 1 (FMR1) is a target gene of GAM26, corresponding to GAM26-TARGET GENE of FIG. 26A. FMR1 BINDING SITE is a binding site found in an untranslated region of FMR1, corresponding to BINDING SITE of FIG. 26A. FIG. 26D illustrates the complementarity of the nucleotide sequence of FMR1 BINDING SITE, designated SEQ ID:167713, to the nucleotide sequence of GAM26 RNA of FIG. 26A, designated SEQ ID:20604.

[0953] An additional function of GAM26 is therefore inhibition of fragile X mental retardation 1 (FMR1), a gene which encodes a Protein that is associated with fragile x syndrome. Accordingly, utilities of GAM26 include diagnosis and treatment of the abovementioned diseases and clinical conditions. The function and utilities of FMR1 have been established by previous studies, as described hereinabove with reference to FIG. 26D.

[0954] Referring now to FMR1 BINDING SITE. fragile X mental retardation 1 (FMR1) is a target gene of GAM26, corresponding to GAM26-TARGET GENE of FIG. 26A. FMR1 BINDING SITE is a binding site found in an untranslated region of FMR1, corresponding to BINDING SITE of FIG. 26A. FIG. 26D illustrates the complementarity of the nucleotide sequence of FMR1 BINDING SITE, designated SEQ ID:167717, to the nucleotide sequence of GAM26 RNA of FIG. 26A, designated SEQ ID:20604.

[0955] A further function of GAM26 is therefore inhibition of fragile X mental retardation 1 (FMR1), a gene which encodes a Protein that is associated with fragile x syndrome. Accordingly, utilities of GAM26 include diagnosis and treatment of the abovementioned diseases and clinical conditions. The function and utilities of FMR1 have been established by previous studies, as described hereinabove with reference to FIG. 26D.

[0956] Referring now to FMR1 BINDING SITE. fragile X mental retardation 1 (FMR1) is a target gene of GAM26, corresponding to GAM26-TARGET GENE of FIG. 26A. FMR1 BINDING SITE is a binding site found in an untranslated region of FMR1, corresponding to BINDING SITE of FIG. 26A. FIG. 26D illustrates the complementarity of the nucleotide sequence of FMR1 BINDING SITE, designated SEQ ID:167717, to the nucleotide sequence of GAM26 RNA of FIG. 26A, designated SEQ ID:20604.

[0957] Yet a further function of GAM26 is therefore inhibition of fragile X mental retardation 1 (FMR1), a gene which encodes a Protein that is associated with fragile x syndrome. Accordingly, utilities of GAM26 include diagnosis and treatment of the abovementioned diseases and clinical conditions. The function and utilities of FMR1 have been established by previous studies, as described hereinabove with reference to FIG. 26D.

[0958] Referring now to FMR1 BINDING SITE. fragile X mental retardation 1 (FMR1) is a target gene of GAM26, corresponding to GAM26-TARGET GENE of FIG. 26A. FMR1 BINDING SITE is a binding site found in an untranslated region of FMR1, corresponding to BINDING SITE of FIG. 26A. FIG. 26D illustrates the complementarity of the nucleotide sequence of FMR1 BINDING SITE, designated SEQ ID:167722, to the nucleotide sequence of GAM26 RNA of FIG. 26A, designated SEQ ID:20604.

[0959] Another function of GAM26 is therefore inhibition of fragile X mental retardation 1 (FMR1), a gene which encodes a Protein that is associated with fragile x syndrome. Accordingly, utilities of GAM26 include diagnosis and treatment of the abovementioned diseases and clinical conditions. The function and utilities of FMR1 have been established by previous studies, as described hereinabove with reference to FIG. 26D.

[0960] Referring now to FMR1 BINDING SITE. fragile X mental retardation 1 (FMR1) is a target gene of GAM26, corresponding to GAM26-TARGET GENE of FIG. 26A. FMR1 BINDING SITE is a binding site found in an untranslated region of FMR1, corresponding to BINDING SITE of FIG. 26A. FIG. 26D illustrates the complementarity of the nucleotide sequence of FMR1 BINDING SITE, designated SEQ ID:167722, to the nucleotide sequence of GAM26 RNA of FIG. 26A, designated SEQ ID:20604.

[0961] Yet another function of GAM26 is therefore inhibition of fragile X mental retardation 1 (FMR1), a gene which encodes a Protein that is associated with fragile x syndrome. Accordingly, utilities of GAM26 include diagnosis and treatment of the abovementioned diseases and clinical conditions. The function and utilities of FMR1 have been established by previous studies, as described hereinabove with reference to FIG. 26D.

[0962] Reference is now made to GNB1 BINDING SITE. guanine nucleotide binding protein (G protein), beta polypeptide 1 (GNB1) is a target gene of GAM26, corresponding to GAM26-TARGET GENE of FIG. 26A. GNB1 BINDING SITE is a binding site found in an untranslated region of GNB1, corresponding to BINDING SITE of FIG. 26A. FIG. 26D illustrates the complementarity of the nucleotide sequence of GNB1 BINDING SITE, designated SEQ ID:167722, to the nucleotide sequence of GAM26 RNA of FIG. 26A, designated SEQ ID:20604.

[0963] An additional function of GAM26 is therefore inhibition of guanine nucleotide binding protein (G protein), beta polypeptide 1 (GNB1), a gene which encodes a Protein that transduces signals from G protein-coupled receptors to intracellular effectors. Accordingly, utilities of GAM26 include diagnosis and treatment of the abovementioned diseases and clinical conditions.

[0964] The function of GNB1 has been established by previous studies. Heterotrimeric guanine nucleotide-binding proteins (G proteins) transduce extracellular signals received by transmembrane receptors to effector proteins. Each subunit of the G protein complex is encoded by a member of 1 of 3 corresponding gene families. Hurowitz et al. (2000) counted 16 different members of the alpha-subunit family, 5 different members of the beta-subunit family, and 11 different members of the gamma-subunit family, as described in mammals. They identified and characterized BACs containing the human homologs of each of the alpha-, beta-, and gamma-subunit genes. The gene structure and chromosome location of each gene was determined, as were the orientations of paired genes. Using a cDNA probe against a mouse/human somatic cell hybrid panel, Sparkes et al. (1987) mapped the human beta-1 polypeptide of G protein to human chromosome 1. Levine et al. (1990) confirmed the assignment to chromosome 1 by Southern analysis of somatic cell hybrids, and Levine et al. (1990) and Modi et al. (1991) regionalized the assignment to 1pter-p31.2 by in situ hybridization. Although Sparkes et al. (1987) had mapped the mouse Gnb1 gene to chromosome 19, later studies showed that Gnb1 is located on distal mouse chromosome 4 (Danciger et al., 1990).

[0965] Full details of the abovementioned studies are described in the following publications, the disclosure of which are hereby incorporated by reference:

[0966] urowitz, E. H.; Melnyk, J. M.; Chen, Y.-J.; Kouros-Mehr, H.; Simon, M. I.; Shizuya, H.: Genomic characterization of the human heterotrimeric G protein alpha, beta, and gamma subunit genes. DNA Res. 7: 111-120, 2000. 6. Sparkes, R. S.; Cohn, V. H.; Mohandas, T.; Zollman, S.; Cire-Eversole, P.; Amatruda, T. T.; Reed, R. R.; Lochrie, M. A.; Simon, M. I.: Mapping of genes encoding the subunits of guanine nucleotide-binding protein (G-proteins) in humans. (Abstract) Cytogenet. Cell Genet. 46: 696 only, 1987.

[0967] Further studies establishing the function and utilities of GNB1 are found in John Hopkins OMIM database record ID 139380, and in references numbered 735-740 listed hereinbelow.

[0968] Referring now to ZNF6 BINDING SITE. zinc finger protein 6 (CMPX1) (ZNF6) is a target gene of GAM26, corresponding to GAM26-TARGET GENE of FIG. 26A. ZNF6 BINDING SITE is a binding site found in an untranslated region of ZNF6, corresponding to BINDING SITE of FIG. 26A. FIG. 26D illustrates the complementarity of the nucleotide sequence of ZNF6 BINDING SITE, designated SEQ ID:167722, to the nucleotide sequence of GAM26 RNA of FIG. 26A, designated SEQ ID:20604.

[0969] A further function of GAM26 is therefore inhibition of zinc finger protein 6 (CMPX1) (ZNF6), a gene which encodes a Protein that is probably a transcriptional activator. Accordingly, utilities of GAM26 include diagnosis and treatment of the abovementioned diseases and clinical conditions. The function and utilities of ZNF6 have been established by previous studies, as described hereinabove with reference to FIG. 26D.

[0970] Referring now to FMR1 BINDING SITE. fragile X mental retardation 1 (FMR1) is a target gene of GAM26, corresponding to GAM26-TARGET GENE of FIG. 26A. FMR1 BINDING SITE is a binding site found in an untranslated region of FMR1, corresponding to BINDING SITE of FIG. 26A. FIG. 26D illustrates the complementarity of the nucleotide sequence of FMR1 BINDING SITE, designated SEQ ID:167723, to the nucleotide sequence of GAM26 RNA of FIG. 26A, designated SEQ ID:20604.

[0971] Yet a further function of GAM26 is therefore inhibition of fragile X mental retardation 1 (FMR1), a gene which encodes a Protein that is associated with fragile x syndrome. Accordingly, utilities of GAM26 include diagnosis and treatment of the abovementioned diseases and clinical conditions. The function and utilities of FMR1 have been established by previous studies, as described hereinabove with reference to FIG. 26D.

[0972] Referring now to FMR1 BINDING SITE. fragile X mental retardation 1 (FMR1) is a target gene of GAM26, corresponding to GAM26-TARGET GENE of FIG. 26A. FMR1 BINDING SITE is a binding site found in an untranslated region of FMR1, corresponding to BINDING SITE of FIG. 26A. FIG. 26D illustrates the complementarity of the nucleotide sequence of FMR1 BINDING SITE, designated SEQ ID:167756, to the nucleotide sequence of GAM26 RNA of FIG. 26A, designated SEQ ID:20604.

[0973] Another function of GAM26 is therefore inhibition of fragile X mental retardation 1 (FMR1), a gene which encodes a Protein that is associated with fragile x syndrome. Accordingly, utilities of GAM26 include diagnosis and treatment of the abovementioned diseases and clinical conditions. The function and utilities of FMR1 have been established by previous studies, as described hereinabove with reference to FIG. 26D.

[0974] Reference is now made to FOXD2 BINDING SITE. forkhead box D2 (FOXD2) is a target gene of GAM26, corresponding to GAM26-TARGET GENE of FIG. 26A. FOXD2 BINDING SITE is a binding site found in an untranslated region of FOXD2, corresponding to BINDING SITE of FIG. 26A. FIG. 26D illustrates the complementarity of the nucleotide sequence of FOXD2 BINDING SITE, designated SEQ ID:169035, to the nucleotide sequence of GAM26 RNA of FIG. 26A, designated SEQ ID:20604.

[0975] Yet another function of GAM26 is therefore inhibition of forkhead box D2 (FOXD2), a gene which encodes a transcripition factor that is a probable transcription factor. Accordingly, utilities of GAM26 include diagnosis and treatment of the abovementioned diseases and clinical conditions.

[0976] The function of FOXD2 has been established by previous studies. Emstsson et al. (1997) described the cloning of a nearly full-length 4,258-bp cDNA encoding the human forkhead gene FREAC9 (FKHL17). The 5-prime untranslated region is unusual since it is very long (2,127 bp) and contains 15 upstream AUG codons. Hybridization to a panel consisting of RNA derived from 50 different tissues showed that the FKHL17 gene is transcribed exclusively in the kidney. By a combination of fluorescence in situ hybridization and somatic cell hybrid analyses, they localized the FKHL17 gene to 1p34-p32. The conceptual translation product predicts a protein of 372 amino acids within an N-terminal domain rich in acidic amino acids and with a high likelihood of forming an amphipathic helix, a DNA binding forkhead domain, and a C-terminal region that has a high probability of forming an amphipathic beta-sheet. The amino acid sequence of the DNA binding forkhead motif of this protein is identical to that of another forkhead protein, FREAC4 (601091), whereas 12 substitutions are present at the nucleotide level. There are no similarities in regions outside of the DNA binding domains of FREAC9 and FREAC4, and since the gene encoding the latter protein maps to 5q12-q13, it is likely that evolutionary selection has acted to maintain identical DNA binding domains between these 2 kidney-expressed transcription factors. Ernstsson et al. (1997) tabulated the chromosomal localization of 15 human forkhead genes in their Table 1

[0977] Full details of the abovementioned studies are described in the following publications, the disclosure of which are hereby incorporated by reference:

[0978] rnstsson, S.; Betz, R.; Lagercrantz, S.; Larsson, C.; Ericksson, S.; Cederberg, A.; Carlsson, P.; Enerback, S.: Cloning and characterization of freac-9 (FKHL17), a novel kidney-expressed human forkhead gene that maps to chromosome 1p32-p34. Genomics 46: 78-85, 1997.

[0979] Further studies establishing the function and utilities of FOXD2 are found in John Hopkins OMIM database record ID 602211, and in references numbered 741 listed hereinbelow.

[0980] Reference is now made to FOXF1 BINDING SITE. forkhead box F1 (FOXF1) is a target gene of GAM26, corresponding to GAM26-TARGET GENE of FIG. 26A. FOXF1 BINDING SITE is a binding site found in an untranslated region of FOXF1, corresponding to BINDING SITE of FIG. 26A. FIG. 26D illustrates the complementarity of the nucleotide sequence of FOXF1 BINDING SITE, designated SEQ ID:169360, to the nucleotide sequence of GAM26 RNA of FIG. 26A, designated SEQ ID:20604.

[0981] An additional function of GAM26 is therefore inhibition of forkhead box F1 (FOXF1), a gene which encodes a transcripition factor that is a probable transcription activator for a number of lung-specific genes. Accordingly, utilities of GAM26 include diagnosis and treatment of the abovementioned diseases and clinical conditions.

[0982] The function of FOXF1 has been established by previous studies. The forkhead genes are transcription factors distinguished by a characteristic 100-amino acid motif that was originally identified in Drosophila (see 164874). Pierrou et al. (1994) identified 7 human genes containing forkhead domains and designated them forkhead related activators (FREAC) 1 through 7. Northern blot analysis revealed that the FREAC1, or FKHL5, gene is expressed as a 2.6-kb mRNA in placenta and adult and fetal lung. Hellqvist et al. (1996) reported the FREAC1 cDNA sequence. The predicted 354-amino acid protein is nearly identical to FREAC2 (FKHL6; 603250) within a 112-residue region containing the forkhead domain and adjacent sequences, and within the C-terminal region. Using a reporter gene construct containing FREAC2 binding sequences in the promoter, Hellqvist et al. (1996) demonstrated that both FREAC1 and FREAC2 have C-terminal transcriptional activation domains. FREAC1/FREAC2 binding sequences are present in the promoters of several lung-specific genes, including CC10 (192020) and SPB (SFTPB; 178640). While both FREAC1 and FREAC2 transactivated an SPB promoter construct, CC10 was activated only by FREAC1. CC10 activation occurred specifically in a lung cell line with Clara cell-like characteristics. Hellqvist et al. (1996) reported that the mouse HFH8 gene and FREAC1 share 90% nucleotide sequence identity. By resequencing of HFH8, these authors demonstrated that 5 frameshifts in the HFH8 sequence reported by Clevidence et al. (1994) were due to sequencing errors.

[0983] Full details of the abovementioned studies are described in the following publications, the disclosure of which are hereby incorporated by reference:

[0984] levidence, D. E.; Overdier, D. G.; Peterson, R. S.; Porcella, A.; Ye, H.; Paulson, K. E.; Costa, R. H.: Members of the HNF-3/forkhead family of transcription factors exhibit distinct cellular expression patterns in lung and regulate the surfactant protein B promoter. Dev. Biol. 166: 195-209, 1994. PubMed ID: 7958446 2. Hellqvist, M.; Mahlapuu, M.; Blixt, A.; Enerback, S.; Carlsson, P.: The human forkhead protein FREAC-2 contains two functionally redundant activation domains and interacts with TBP and TFIIB. J. Biol. Chem. 273: 23335-23343, 1998.

[0985] Further studies establishing the function and utilities of FOXF1 are found in John Hopkins OMIM database record ID 601089, and in references numbered 742-746 listed hereinbelow.

[0986] Reference is now made to FUS1 BINDING SITE. FUS1 GENE (FUS1) is a target gene of GAM26, corresponding to GAM26-TARGET GENE of FIG. 26A. FUS1 BINDING SITE is a binding site found in an untranslated region of FUS1, corresponding to BINDING SITE of FIG. 26A. FIG. 26D illustrates the complementarity of the nucleotide sequence of FUS1 BINDING SITE, designated SEQ ID: 170829, to the nucleotide sequence of GAM26 RNA of FIG. 26A, designated SEQ ID:20604.

[0987] A further function of GAM26 is therefore inhibition of FUS1 GENE (FUS1), a gene which encodes a Protein that may function as a tumor suppressor. and is associated with lung cancer. Accordingly, utilities of GAM26 include diagnosis and treatment of the abovementioned diseases and clinical conditions.

[0988] The function of FUS1 has been established by previous studies. Lerman and Minna (2000) identified a FUS1 mutation in 2 nonsmall cell lung cancer (NSCLC) cell lines that resulted in a 28-bp truncation at the 3-prime end of exon 2 and a predicted protein of only 82 amino acids. Using SSCP and CpG island promoter methylation analyses, Kondo et al. (2001) failed to detect mutations, polymorphisms, or methylation of FUS1 in lung cancer specimens. Western blot analysis indicated low or no expression of FUS1 in lung cancer cell lines. Overexpression of transfected wildtype but not mutant FUS1 in NSCLCs led to the detection of an approximately 20-kD protein and a dramatic reduction in colony-forming cells. Ecdysone-induced expression of FUS1 had the same effects. Flow cytometric analysis indicated that the arrest occurred in G1 phase.

[0989] Full details of the abovementioned studies are described in the following publications, the disclosure of which are hereby incorporated by reference:

[0990] ondo, M.; Ji, L.; Kamibayashi, C.; Tomizawa, Y.; Randle, D.; Sekido, Y.; Yokota, J.; Kashuba, V.; Zabarovsky, E.; Kuzmin, I.; Lerman, M.; Roth, J.; Minna, J. D.: Overexpression of candidate tumor suppressor gene FUS1 isolated from the 3p21.3 homozygous deletion region leads to G1 arrest and growth inhibition of lung cancer cells. Oncogene 20: 6258-6262, 2001. PubMed ID: 11593436 2. Lerman, M. I.; Minna, J. D.: The 630-kb lung cancer homozygous deletion region on human chromosome 3p21.3: identification and evaluation of the resident candidate tumor suppressor genes. Cancer Res. 60: 6116-6133, 2000.

[0991] Further studies establishing the function and utilities of FUS1 are found in John Hopkins OMIM database record ID 607052, and in references numbered 747-748 listed hereinbelow.

[0992] Referring now to FUS1 BINDING SITE. FUS1 GENE (FUS1) is a target gene of GAM26, corresponding to GAM26-TARGET GENE of FIG. 26A. FUS1 BINDING SITE is a binding site found in an untranslated region of FUS1, corresponding to BINDING SITE of FIG. 26A. FIG. 26D illustrates the complementarity of the nucleotide sequence of FUS1 BINDING SITE, designated SEQ ID:170846, to the nucleotide sequence of GAM26 RNA of FIG. 26A, designated SEQ ID:20604.

[0993] Yet a further function of GAM26 is therefore inhibition of FUS1 GENE (FUS1), a gene which encodes a Protein that may function as a tumor suppressor. and is associated with lung cancer. Accordingly, utilities of GAM26 include diagnosis and treatment of the abovementioned diseases and clinical conditions. The function and utilities of FUS1 have been established by previous studies, as described hereinabove with reference to FIG. 26D.

[0994] Reference is now made to FZD2 BINDING SITE. frizzled (Drosophila) homolog 2 (FZD2) is a target gene of GAM26, corresponding to GAM26-TARGET GENE of FIG. 26A. FZD2 BINDING SITE is a binding site found in an untranslated region of FZD2, corresponding to BINDING SITE of FIG. 26A. FIG. 26D illustrates the complementarity of the nucleotide sequence of FZD2 BINDING SITE, designated SEQ ID:172450, to the nucleotide sequence of GAM26 RNA of FIG. 26A, designated SEQ ID:20604.

[0995] Another function of GAM26 is therefore inhibition of frizzled (Drosophila) homolog 2 (FZD2), a gene which encodes a Protein that is aputative receptor with a role in transmembrane signal transmission. Accordingly, utilities of GAM26 include diagnosis and treatment of the abovementioned diseases and clinical conditions.

[0996] The function of FZD2 has been established by previous studies. Following up on the identification of trinucleotide repeat expansions as the basis of many inherited human disorders, Zhao et al. (1995) isolated and characterized cDNAs containing trinucleotide repeats. In the course of these studies, they discovered a human homolog of the Drosophila polarity gene ‘frizzled’ (fz). The fz locus in Drosophila is required for the transmission of polarity signals across the plasma membrane in epidermal cells. The Drosophila fz gene encodes a protein with 7 putative transmembrane domains that is thought to function as a G protein-coupled receptor. Zhao et al. (1995) isolated a human homolog, symbolized FZD2, from a human ovarian cDNA library and mapped this gene to 17q21.1 by fluorescence in situ hybridization using a corresponding cosmid. The full-length cDNA of FZD2 encodes a protein of 565 amino acids that shares 56% sequence identity with Drosophila fz protein. Zhao et al. (1995) found that the expression of the FZD2 gene appears to be developmentally regulated, with high levels of expression in fetal kidney and lung and in adult colon and ovary. The structure of FZD2 suggests that it has a role in transmembrane signal transmission, although its precise physiologic function and associated pathways have yet to be determined. Wang et al. (1996) showed that a large family of frizzled homologs exists in mammals. They mapped FZD2 to mouse chromosome 11, syntenic to human chromosome 17q, by interspecific backcross analysis. Another human homolog, termed ‘frizzled 5,’ (601723) was also isolated by Wang et al. (1996).

[0997] Full details of the abovementioned studies are described in the following publications, the disclosure of which are hereby incorporated by reference:

[0998] ang, Y.; Macke, J. P.; Abella, B. S.; Andreasson, K.; Worley, P.; Gilbert, D. J.; Copeland, N. G.; Jenkins, N. A.; Nathans, J.: A large family of putative transmembrane receptors homologous to the product of the Drosophila tissue polarity gene frizzled. J. Biol. Chem. 271: 4468-4476, 1996. PubMed ID: 8626800 2. Zhao, Z. Y.; Lee, C. C.; Baldini, A.; Caskey, C. T.: A human homologue of the Drosophila polarity gene frizzled has been identified and mapped to 17q21.1. Genomics 27: 370-373, 1995.

[0999] Further studies establishing the function and utilities of FZD2 are found in John Hopkins OMIM database record ID 600667, and in references numbered 749-750 listed hereinbelow.

[1000] Reference is now made to GABRB3 BINDING SITE. gamma-aminobutyric acid (GABA) A receptor, beta 3 (GABRB3) is a target gene of GAM26, corresponding to GAM26-TARGET GENE of FIG. 26A. GABRB3 BINDING SITE is a binding site found in an untranslated region of GABRB3, corresponding to BINDING SITE of FIG. 26A. FIG. 26D illustrates the complementarity of the nucleotide sequence of GABRB3 BINDING SITE, designated SEQ ID:173934, to the nucleotide sequence of GAM26 RNA of FIG. 26A, designated SEQ ID:20604.

[1001] Yet another function of GAM26 is therefore inhibition of gamma-aminobutyric acid (GABA) A receptor, beta 3 (GABRB3), a gene which encodes a receptor that mediates neuronal inhibition by binding to the gaba/benzodiazepine receptor and opening an integral chloride channel. and is associated with Angelman syndrome and Prader-Willi syndrome. Accordingly, utilities of GAM26 include diagnosis and treatment of the abovementioned diseases and clinical conditions.

[1002] The function of GABRB3 has been established by previous studies. Wagstaff et al. (1991) showed that the gene encoding the beta-3 subunit of the GABA-A receptor (GABRB3) maps to the region of 15q involved in Angelman syndrome (AS; 105830) and Prader-Willi syndrome (PWS; 176270). Deletion of the gene was found in patients of both types with interstitial cytogenetic deletions. The gene was also deleted in an Angelman syndrome patient with an unbalanced 13;15 translocation but not in a PWS patient with an unbalanced 9;15 translocation. Wagstaff et al. (1991) suggested that this receptor gene may be involved in the pathogenesis of one or both of these syndromes. This is the first gene to be mapped to this region. Wagstaff et al. (1991) showed that the gene is located on mouse chromosome 7, very closely linked to 2 other genes that in the human have been mapped to the 15q11-q13 region. Saitoh et al. (1992) studied a highly informative family in which 3 sibs had Angelman syndrome and a deletion of one GABRB3 gene. The mother had the same deletion which she had inherited from her father. The finding supported the possibility that GABRB3 is the Angelman gene and indicated that the genes for AS and PWS are different since transmission of the deletion from the grandfather to the mother of the affected children did not result in PWS. Using the combined techniques of field-inversion gel electrophoresis (FIGE) and phage genomic library screening, Sinnett et al. (1993) constructed a high-resolution physical map covering nearly 1.0 Mb in the proximal region of 15q. The map showed that GABRB3 and GABRA5 (gamma-aminobutyric acid receptor alpha-5 subunit gene; 137142) are separated by less than 100 kb and are arranged in a head-to-head configuration. GABRB3 encompasses approximately 250 kb, while GABRA5 is contained within 70 kb. The difference in size is due largely to an intron of 150 kb within GABRB3. Chromosomal rearrangement breakpoints in 2 patients with Angelman syndrome were located within the large GABRB3 intron. Russek and Farb (1994) stated that the gene encoding the gamma-3 form of the GABA-A receptor (GABRG3; 600233) is located on 15q11-q13 in a cluster with GABRA5 and GABRB3.

[1003] Full details of the abovementioned studies are described in the following publications, the disclosure of which are hereby incorporated by reference:

[1004] Saitoh, S.; Kubota, T.; Ohta, T.; Jinno, Y.; Niikawa, N.; Sugimoto, T.; Wagstaff, J.; Lalande, M.: Familial Angelman syndrome caused by imprinted submicroscopic deletion encompassing GABA(A) receptor beta(3)-subunit gene. (Letter) Lancet 339: 366-367, 1992. PubMed ID: 1346439 15. Wagstaff, J.; Knoll, J. H. M.; Fleming, J.; Kirkness, E. F.; Martin-Gallardo, A.; Greenberg, F.; Graham, J. M., Jr.; Menninger, J.; Ward, D.; Venter, J. C.; Lalande, M.: Localization of the gene encoding the GABA(A) receptor beta-3 subunit to the Angelman/Prader-Willi region of human chromosome 15. Am. J. Hum. Genet. 49: 330-337, 1991.

[1005] Further studies establishing the function and utilities of GABRB3 are found in John Hopkins OMIM database record ID 137192, and in references numbered 751-765 listed hereinbelow.

[1006] Reference is now made to NPAS2 BINDING SITE. neuronal PAS domain protein 2 (NPAS2) is a target gene of GAM26, corresponding to GAM26-TARGET GENE of FIG. 26A. NPAS2 BINDING SITE is a binding site found in an untranslated region of NPAS2, corresponding to BINDING SITE of FIG. 26A. FIG. 26D illustrates the complementarity of the nucleotide sequence of NPAS2 BINDING SITE, designated SEQ ID:173934, to the nucleotide sequence of GAM26 RNA of FIG. 26A, designated SEQ ID:20604.

[1007] An additional function of GAM26 is therefore inhibition of neuronal PAS domain protein 2 (NPAS2), a gene which encodes a Protein that is a member of basic helix-loop-helix-PAS family of transcription factors. Accordingly, utilities of GAM26 include diagnosis and treatment of the abovementioned diseases and clinical conditions.

[1008] The function of NPAS2 has been established by previous studies. Members of the bHLH-PAS family are transcription factors that contain a basic helix-loop-helix (bHLH) DNA-recognition motif located N-terminal to a PAS domain composed of 2 imperfect direct repeats. See BMAL1 (602550). By searching an EST database, Zhou et al. (1997) identified human and mouse cDNAs encoding 2 novel bHLH-PAS proteins, NPAS1 (603346) and NPAS2. The predicted 824-amino acid human NPAS2 protein shares 87% sequence identity with mouse Npas2. Northern blot analysis of mouse tissues revealed that Npas2 is expressed predominantly in brain. In situ hybridization indicated that the pattern of Npas2 mRNA distribution in mouse brain is broad and complex, and is largely nonoverlapping with that of Npas1. Hogenesch et al. (1997) identified NPAS2 as MOP4 (member of the PAS superfamily 4). McNamara et al. (2001) reported a hormone-dependent interaction of the nuclear receptors RARA (180240) and RXRA (180245) with CLOCK (601851) and MOP4. They found that these interactions negatively regulate CLOCK-BMAL1 and MOP4-BMAL1 heterodimer-mediated transcriptional activation of clock gene expression in vascular cells. MOP4 exhibited a robust rhythm in the vasculature, and retinoic acid could phase shift PER2 (603426) mRNA rhythmicity in vivo and in serum-induced smooth muscle cells in vitro, providing a molecular mechanism for hormonal control of clock gene expression. McNamara et al. (2001) proposed that circadian or periodic availability of nuclear hormones may play a critical role in resetting a peripheral vascular clock.

[1009] Full details of the abovementioned studies are described in the following publications, the disclosure of which are hereby incorporated by reference:

[1010] cNamara, P.; Seo, S.; Rudic, R. D.; Sehgal, A.; Chakravarti, D.; FitzGerald, G. A.: Regulation of CLOCK and MOP4 by nuclear hormone receptors in the vasculature: a humoral mechanism to reset a peripheral clock. Cell 105: 877-889, 2001. PubMed ID: 11439184 6. Zhou, Y.-D.; Barnard, M.; Tian, H.; Li, X.; Ring, H. Z.; Francke, U.; Shelton, J.; Richardson, J.; Russell, D. W.; McKnight, S. L.: Molecular characterization of two mammalian bHLH-PAS domain proteins selectively expressed in the central nervous system. Proc. Nat. Acad. Sci. 94: 713-718, 1997.

[1011] Further studies establishing the function and utilities of NPAS2 are found in John Hopkins OMIM database record ID 603347, and in references numbered 766-771 listed hereinbelow.

[1012] Reference is now made to REPS2 BINDING SITE. RALBP1 associated Eps domain containing 2 (REPS2) is a target gene of GAM26, corresponding to GAM26-TARGET GENE of FIG. 26A. REPS2 BINDING SITE is a binding site found in an untranslated region of REPS2, corresponding to BINDING SITE of FIG. 26A. FIG. 26D illustrates the complementarity of the nucleotide sequence of REPS2 BINDING SITE, designated SEQ ID:173934, to the nucleotide sequence of GAM26 RNA of FIG. 26A, designated SEQ ID:20604.

[1013] A further function of GAM26 is therefore inhibition of RALBP1 associated Eps domain containing 2 (REPS2), a gene which encodes a Protein that interacts with the active form of RAS with adaptor protein GRB2 and binds calcium. Accordingly, utilities of GAM26 include diagnosis and treatment of the abovementioned diseases and clinical conditions.

[1014] The function of REPS2 has been established by previous studies. Small G proteins have GDP-bound inactive and GTP-bound active forms; RAL proteins (e.g., RALA; 179550) shift from the inactive to the active state through the actions of RALGDS (601619). RALGDS interacts with the active form of RAS (see HRAS; 190020). Using RALA-binding protein-1 (RALBP1; 605801) as bait in a yeast 2-hybrid screen of a brain cDNA library, Ikeda et al. (1998) isolated cDNAs encoding REPS2, which they termed POB1. Sequence analysis predicted that the 521-amino acid protein has 2 potential initiator methionines in its N terminus, a central EPS15 (600051)-like domain, and 2 proline-rich regions and a putative coiled-coil structure in its C terminus. Northern blot analysis revealed strong expression in rat cerebrum, cerebellum, lung, and testis, with weak expression in kidney and no expression in heart, thymus, liver, spleen, or adrenal gland. Immunoprecipitation and immunoblot analyses confirmed that the C-terminal 146 amino acids of REPS2 and the C-terminal 147 residues of RALBP1 interact in intact cells. RAL interacts with a distinct region of RALBP1, just N terminal of the REPS2-binding domain, and both proteins can interact simultaneously with RALBP1. Immunoblot analysis established that REPS2 is tyrosine phosphorylated in response to epidermal growth factor (EGF; 131530) and interacts with the EGF receptor (EGFR; 131550), possibly through the adaptor protein GRB2 (108355), with which REPS2 interacts specifically. Using nuclear magnetic resonance spectroscopy, Koshiba et al. (1999) showed that the EPS15 homology domain of REPS2 consists of 2 EF-hand structures, the second of which binds calcium.

[1015] Full details of the abovementioned studies are described in the following publications, the disclosure of which are hereby incorporated by reference:

[1016] keda, M.; Ishida, O.; Hinoi, T.; Kishida, S.; Kikuchi, A. Identification and characterization of a novel protein interacting with Ral-binding protein 1, a putative effector protein of Ral. J. Biol. Chem. 273: 814-821, 1998. PubMed ID: 9422736 2. Koshiba, S.; Kigawa, T.; Iwahara, J.; Kikuchi, A.; Yokoyama, S.: Solution structure of the Eps15 homology domain of a human POB1 (partner of RalBP1). FEBS Lett. 442: 138-142, 1999.

[1017] Further studies establishing the function and utilities of REPS2 are found in John Hopkins OMIM database record ID 300317, and in references numbered 772-773 listed hereinbelow.

[1018] Referring now to SERPINB8 BINDING SITE. serine (or cysteine) proteinase inhibitor, clade B (ovalbumin), member (SERPINB8) is a target gene of GAM26, corresponding to GAM26-TARGET GENE of FIG. 26A. SERPINB8 BINDING SITE is a binding site found in an untranslated region of SERPINB8, corresponding to BINDING SITE of FIG. 26A. FIG. 26D illustrates the complementarity of the nucleotide sequence of SERPINB8 BINDING SITE, designated SEQ ID: 173934, to the nucleotide sequence of GAM26 RNA of FIG. 26A, designated SEQ ID:20604.

[1019] Yet a further function of GAM26 is therefore inhibition of serine (or cysteine) proteinase inhibitor, clade B (ovalbumin), member (SERPINB8), a gene which encodes a Protein that protease inhibitors; may be a serpin serine protease inhibitor that binds thrombin. Accordingly, utilities of GAM26 include diagnosis and treatment of the abovementioned diseases and clinical conditions. The function and utilities of SERPINB8 have been established by previous studies, as described hereinabove with reference to FIG. 26D.

[1020] Reference is now made to GAL BINDING SITE. galanin (GAL) is a target gene of GAM26, corresponding to GAM26-TARGET GENE of FIG. 26A. GAL BINDING SITE is a binding site found in an untranslated region of GAL, corresponding to BINDING SITE of FIG. 26A. FIG. 26D illustrates the complementarity of the nucleotide sequence of GAL BINDING SITE, designated SEQ ID:174735, to the nucleotide sequence of GAM26 RNA of FIG. 26A, designated SEQ ID:20604.

[1021] Another function of GAM26 is therefore inhibition of galanin (GAL), a gene which encodes a hormone that stimulates LH secretion and enhances LHRH-induced LH release from dispersed anterior pituitary cells in vitro. Accordingly, utilities of GAM26 include diagnosis and treatment of the abovementioned diseases and clinical conditions.

[1022] The function of GAL has been established by previous studies. Galanin is a 29-amino acid peptide widely distributed in the peripheral and central nervous systems. In the brain, the highest concentrations are observed in the hypothalamus and particularly in the nerve terminals of the median eminence. Since the establishment of the neurovascular concept in the regulation of the hypothalamus-pituitary axis (Harris, 1948), it is well known that the median eminence represents a key area for neuroendocrine regulation. Hypothalamic releasing and inhibiting factors are secreted from median eminence terminals into the portal circulation to reach the adenohypophyseal cells where they exert specific actions. Lopez et al. (1991) presented evidence that galanin meets the criteria to be considered a hypothalamic-hypophysiotropic hormone. They found a possibly meaningful colocalization and cosecretion of galanin and LHRH (152760). Galanin stimulates LH secretion and enhances LHRH-induced LH release from dispersed anterior pituitary cells in vitro. Galanin is important to gastrointestinal function also (Rattan, 1991).

[1023] Animal model experiments lend further support to the function of GAL. The neuropeptide galanin is predominantly expressed by the lactotrophs (the prolactin-secreting cell type) in the rodent anterior pituitary and in the median eminence and paraventricular nucleus of the hypothalamus. Prolactin (PRL; 176760) and galanin colocalize in the same secretory granule, and the expression of both proteins is extremely sensitive to the estrogen status of the animal. Administration of estradiol-17-beta induces pituitary hyperplasia followed by adenoma formation and causes a 3,000-fold increase in the galanin mRNA content of the lactotroph. To further study the role of galanin in prolactin release and lactotroph growth, Wynick et al. (1998) generated mice carrying a loss-of-function mutation of the endogenous galanin gene. There was no evidence of embryonic lethality and the mutant mice grew normally. The specific endocrine abnormalities identified related to the expression of prolactin. Pituitary prolactin message levels and protein content of adult female mutant mice were reduced by 30 to 40% compared with wildtype controls. Mutant females failed to lactate and pups died of starvation/dehydration unless fostered onto wildtype mothers. Prolactin secretion in mutant females was markedly reduced at 7 days postpartum compared with wildtype controls with an associated failure in mammary gland maturation. There was almost complete abrogation of the proliferative response of the lactotroph to high doses of estrogen, with a failure to upregulate prolactin release and STAT5 (601511) expression or to increase pituitary cell number. These data supported the hypothesis that galanin acts as a paracrine regulator of prolactin expression and as a growth factor to the lactotroph.

[1024] It is appreciated that the abovementioned animal model for GAL is acknowledged by those skilled in the art as a scientifically valid animal model, as can be further appreciated from the publications sited hereinbelow.

[1025] Full details of the abovementioned studies are described in the following publications, the disclosure of which are hereby incorporated by reference:

[1026] Wynick, D.; Small, C. J.; Bacon, A.; Holmes, F. E.; Norman, M.; Ormandy, C. J.; Kilic, E.; Kerr, N.C. H.; Ghatei, M.; Talamantes, F.; Bloom, S. R.; Pachnis, V.: Galanin regulates prolactin release and lactotroph proliferation. Proc. Nat. Acad. Sci. 95: 12671-12676, 1998. PubMed ID: 9770544 6. Lopez, F. J.; Merchenthaler, I.; Ching, M.; Wisniewski, M. G.; Negro-Vilar, A.: Galanin: a hypothalamic-hypophysiotropic hormone modulating reproductive functions. Proc. Nat. Acad. Sci. 88: 4508-4512, 1991.

[1027] Further studies establishing the function and utilities of GAL are found in John Hopkins OMIM database record ID 137035, and in references numbered 774-785 listed hereinbelow.

[1028] Referring now to GAL BINDING SITE. galanin (GAL) is a target gene of GAM26, corresponding to GAM26-TARGET GENE of FIG. 26A. GAL BINDING SITE is a binding site found in an untranslated region of GAL, corresponding to BINDING SITE of FIG. 26A. FIG. 26D illustrates the complementarity of the nucleotide sequence of GAL BINDING SITE, designated SEQ ID: 174743, to the nucleotide sequence of GAM26 RNA of FIG. 26A, designated SEQ ID:20604.

[1029] Yet another function of GAM26 is therefore inhibition of galanin (GAL), a gene which encodes a hormone that stimulates LH secretion and enhances LHRH-induced LH release from dispersed anterior pituitary cells in vitro. Accordingly, utilities of GAM26 include diagnosis and treatment of the abovementioned diseases and clinical conditions. The function and utilities of GAL have been established by previous studies, as described hereinabove with reference to FIG. 26D.

[1030] Reference is now made to GDI1 BINDING SITE. GDP dissociation inhibitor 1 (GDI1) is a target gene of GAM26, corresponding to GAM26-TARGET GENE of FIG. 26A. GDI1 BINDING SITE is a binding site found in an untranslated region of GDI1, corresponding to BINDING SITE of FIG. 26A. FIG. 26D illustrates the complementarity of the nucleotide sequence of GDI1 BINDING SITE, designated SEQ ID:178360, to the nucleotide sequence of GAM26 RNA of FIG. 26A, designated SEQ ID:20604.

[1031] An additional function of GAM26 is therefore inhibition of GDP dissociation inhibitor 1 (GDI1), a gene which encodes a Protein that is associated with x-linked non-specific mental retardation (xlmr) types 41 (mrx41) and 48 (mrx48). Accordingly, utilities of GAM26 include diagnosis and treatment of the abovementioned diseases and clinical conditions.

[1032] The function of GDI1 has been established by previous studies. GDI binds to the small G proteins of the Rab family, particularly the brain-specific form RAB3A (179490), and modulates their activity and vesicle-mediated transport. D'Adamo et al. (1997) noted that GDI is expressed in all parts of the adult brain and, by in situ hybridization analysis, it is detectable in post-mitotic neural cells during mouse development, with the same timing and in the same cell types as Rab3a. Since the RABGDIA gene has these properties and maps to Xq28, it is a plausible candidate gene for one or more forms of X-linked nonspecific mental retardation (MRX) that map to this chromosomal region. Five families with X-linked nonspecific mental retardation had been mapped to Xq28; these families, which are reviewed in 309541, were designated MRX3, MRX25, MRX28, MRX41, and MRX48. D'Adamo et al. (1997) found unique mutations in the RABGDIA gene in affected members of the MRX41 (300104.0001) and MRX48 (300104.0002) families. Chelly (1999) referred to the protein mutant in MRX41 as oligophrenin-2 (OPHN2). Bienvenu et al. (1998) carried out mutation screening of the whole coding region of the GDI1 gene, using a combination of denaturing gradient gel electrophoresis and direct sequencing, in 164 patients found negative for expansions across the FRAXA GCC repeat. In addition to the nonsense mutation found in the MRX48 family (300104.0002), they identified a novel missense mutation in exon 11 of the GDI1 gene in a family with nonspecific mental retardation. In this large French family, all affected males showed moderate to severe mental retardation. X-linked semidominant inheritance was strongly suggested by the severe phenotypes in males in comparison to mildly affected females or unaffected obligate carriers. The study suggested that the prevalence of GDI1 mutations in nonspecific mental retardation may be 0.5 to 1%. One of the families included in the study by Bienvenu et al. (1998) was the so-designated MRX16 family reported by Moraine et al. (1994), known to be located in Xq28, in a genetic interval encompassing GDI1. Gendrot et al. (1999) found no mutation in the GDI1 gene in a large MRX16 family.

[1033] Full details of the abovementioned studies are described in the following publications, the disclosure of which are hereby incorporated by reference:

[1034] Bienvenu, T.; des Portes, V.; Saint Martin, A.; McDonell, N.; Billuart, P.; Carrie, A.; Vinet, M.-C.; Couvert, P.; Toniolo, D.; Ropers, H.-H.; Moraine, C.; van Bokhoven, H.; Fryns, J.-P.; Kahn, A.; Beldjord, C.; Chelly, J.: Non-specific X-linked semidominant mental retardation by mutations in a Rab GDP-dissociation inhibitor. Hum. Molec. Genet. 7: 1311-1315, 1998. PubMed ID: 9668174 4. D'Adamo, P.; Gulisano, M.; Oostra, B. A.; Chelly, J.; Toniolo, D.: GDI is responsible for X-linked mental retardation. (Abstract) Am. J. Hum. Genet. 61 (suppl.): A11 only, 1997.

[1035] Further studies establishing the function and utilities of GDI1 are found in John Hopkins OMIM database record ID 300104, and in references numbered 786-799 listed hereinbelow.

[1036] Referring now to GNB1 BINDING SITE. guanine nucleotide binding protein (G protein), beta polypeptide 1 (GNB1) is a target gene of GAM26, corresponding to GAM26-TARGET GENE of FIG. 26A. GNB1 BINDING SITE is a binding site found in an untranslated region of GNB1, corresponding to BINDING SITE of FIG. 26A. FIG. 26D illustrates the complementarity of the nucleotide sequence of GNB1 BINDING SITE, designated SEQ ID:182802, to the nucleotide sequence of GAM26 RNA of FIG. 26A, designated SEQ ID:20604.

[1037] A further function of GAM26 is therefore inhibition of guanine nucleotide binding protein (G protein), beta polypeptide 1 (GNB1), a gene which encodes a Protein that transduces signals from G protein-coupled receptors to intracellular effectors. Accordingly, utilities of GAM26 include diagnosis and treatment of the abovementioned diseases and clinical conditions. The function and utilities of GNB1 have been established by previous studies, as described hereinabove with reference to FIG. 26D.

[1038] Reference is now made to GPRK5 BINDING SITE. G protein-coupled receptor kinase 5 (GPRK5) is a target gene of GAM26, corresponding to GAM26-TARGET GENE of FIG. 26A. GPRK5 BINDING SITE is a binding site found in an untranslated region of GPRK5, corresponding to BINDING SITE of FIG. 26A. FIG. 26D illustrates the complementarity of the nucleotide sequence of GPRK5 BINDING SITE, designated SEQ ID:186691, to the nucleotide sequence of GAM26 RNA of FIG. 26A, designated SEQ ID:20604.

[1039] Yet a further function of GAM26 is therefore inhibition of G protein-coupled receptor kinase 5 (GPRK5), a gene which encodes a Enzyme that regulates the activity of G protein-coupled receptors. Accordingly, utilities of GAM26 include diagnosis and treatment of the abovementioned diseases and clinical conditions.

[1040] The function of GPRK5 has been established by previous studies. By PCR on neutrophil cDNA using primers based on sequences of known receptor kinases, Haribabu and Snyderman (1993) identified GPRK5 and GPRK6 (600869) sequences. Bullrich et al. (1995) used a rodent-human hybrid panel to map 2 newly identified members of the GRK family: GPRK5 and GPRK6 (600869) to 10q24-qter and 5q35, respectively. The hybrid cells containing parts of chromosomes 10 and 5 were used for the regionalization.

[1041] Full details of the abovementioned studies are described in the following publications, the disclosure of which are hereby incorporated by reference:

[1042] ullrich, F.; Druck, T.; Kunapuli, P.; Gomez, J.; Gripp, K. W.; Schlegelberger, B.; Lasota, J.; Aronson, M.; Cannizzaro, L. A.; Huebner, K.; Benovic, J. L.: Chromosomal mapping of the genes GPRK5 and GPRK6 encoding G protein-coupled receptor kinases GRK5 and GRK6. Cytogenet. Cell Genet. 70: 250-254, 1995. PubMed ID: 7789183 2. Haribabu, B.; Snyderman, R.: Identification of additional members of human G-protein-coupled receptor kinase multigene family. Proc. Nat. Acad. Sci. 90: 9398-9402, 1993.

[1043] Further studies establishing the function and utilities of GPRK5 are found in John Hopkins OMIM database record ID 600870, and in references numbered 800-801 listed hereinbelow.

[1044] Referring now to GSPT1 BINDING SITE. G1 to S phase transition 1 (GSPT1) is a target gene of GAM26, corresponding to GAM26-TARGET GENE of FIG. 26A. GSPT1 BINDING SITE is a binding site found in an untranslated region of GSPT1, corresponding to BINDING SITE of FIG. 26A. FIG. 26D illustrates the complementarity of the nucleotide sequence of GSPT1 BINDING SITE, designated SEQ ID:189737, to the nucleotide sequence of GAM26 RNA of FIG. 26A, designated SEQ ID:20604.

[1045] Another function of GAM26 is therefore inhibition of G1 to S phase transition 1 (GSPT1), a gene which encodes a Protein that involves in regulation of mammalian cell growth. Accordingly, utilities of GAM26 include diagnosis and treatment of the abovementioned diseases and clinical conditions. The function and utilities of GSPT1 have been established by previous studies, as described hereinabove with reference to FIG. 26D.

[1046] Referring now to GSPT1 BINDING SITE. G1 to S phase transition 1 (GSPT1) is a target gene of GAM26, corresponding to GAM26-TARGET GENE of FIG. 26A. GSPT1 BINDING SITE is a binding site found in an untranslated region of GSPT1, corresponding to BINDING SITE of FIG. 26A. FIG. 26D illustrates the complementarity of the nucleotide sequence of GSPT1 BINDING SITE, designated SEQ ID: 189752, to the nucleotide sequence of GAM26 RNA of FIG. 26A, designated SEQ ID:20604.

[1047] Yet another function of GAM26 is therefore inhibition of G1 to S phase transition 1 (GSPT1), a gene which encodes a Protein that involves in regulation of mammalian cell growth. Accordingly, utilities of GAM26 include diagnosis and treatment of the abovementioned diseases and clinical conditions. The function and utilities of GSPT1 have been established by previous studies, as described hereinabove with reference to FIG. 26D.

[1048] Referring now to GSPT1 BINDING SITE. G1 to S phase transition 1 (GSPT1) is a target gene of GAM26, corresponding to GAM26-TARGET GENE of FIG. 26A. GSPT1 BINDING SITE is a binding site found in an untranslated region of GSPT1, corresponding to BINDING SITE of FIG. 26A. FIG. 26D illustrates the complementarity of the nucleotide sequence of GSPT1 BINDING SITE, designated SEQ ID:189763, to the nucleotide sequence of GAM26 RNA of FIG. 26A, designated SEQ ID:20604.

[1049] An additional function of GAM26 is therefore inhibition of G1 to S phase transition 1 (GSPT1), a gene which encodes a Protein that involves in regulation of mammalian cell growth. Accordingly, utilities of GAM26 include diagnosis and treatment of the abovementioned diseases and clinical conditions. The function and utilities of GSPT1 have been established by previous studies, as described hereinabove with reference to FIG. 26D.

[1050] Referring now to GSPT1 BINDING SITE. G1 to S phase transition 1 (GSPT1) is a target gene of GAM26, corresponding to GAM26-TARGET GENE of FIG. 26A. GSPT1 BINDING SITE is a binding site found in an untranslated region of GSPT1, corresponding to BINDING SITE of FIG. 26A. FIG. 26D illustrates the complementarity of the nucleotide sequence of GSPT1 BINDING SITE, designated SEQ ID:189764, to the nucleotide sequence of GAM26 RNA of FIG. 26A, designated SEQ ID:20604.

[1051] A further function of GAM26 is therefore inhibition of G1 to S phase transition 1 (GSPT1), a gene which encodes a Protein that involves in regulation of mammalian cell growth. Accordingly, utilities of GAM26 include diagnosis and treatment of the abovementioned diseases and clinical conditions. The function and utilities of GSPT1 have been established by previous studies, as described hereinabove with reference to FIG. 26D.

[1052] Referring now to GSPT1 BINDING SITE. G1 to S phase transition 1 (GSPT1) is a target gene of GAM26, corresponding to GAM26-TARGET GENE of FIG. 26A. GSPT1 BINDING SITE is a binding site found in an untranslated region of GSPT1, corresponding to BINDING SITE of FIG. 26A. FIG. 26D illustrates the complementarity of the nucleotide sequence of GSPT1 BINDING SITE, designated SEQ ID:189765, to the nucleotide sequence of GAM26 RNA of FIG. 26A, designated SEQ ID:20604.

[1053] Yet a further function of GAM26 is therefore inhibition of G1 to S phase transition 1 (GSPT1), a gene which encodes a Protein that involves in regulation of mammalian cell growth. Accordingly, utilities of GAM26 include diagnosis and treatment of the abovementioned diseases and clinical conditions. The function and utilities of GSPT1 have been established by previous studies, as described hereinabove with reference to FIG. 26D.

[1054] Referring now to GSPT1 BINDING SITE. G1 to S phase transition 1 (GSPT1) is a target gene of GAM26, corresponding to GAM26-TARGET GENE of FIG. 26A. GSPT1 BINDING SITE is a binding site found in an untranslated region of GSPT1, corresponding to BINDING SITE of FIG. 26A. FIG. 26D illustrates the complementarity of the nucleotide sequence of GSPT1 BINDING SITE, designated SEQ ID:189777, to the nucleotide sequence of GAM26 RNA of FIG. 26A, designated SEQ ID:20604.

[1055] Another function of GAM26 is therefore inhibition of G1 to S phase transition 1 (GSPT1), a gene which encodes a Protein that involves in regulation of mammalian cell growth. Accordingly, utilities of GAM26 include diagnosis and treatment of the abovementioned diseases and clinical conditions. The function and utilities of GSPT1 have been established by previous studies, as described hereinabove with reference to FIG. 26D.

[1056] Reference is now made to GTF2I BINDING SITE. general transcription factor II, i (GTF2I) is a target gene of GAM26, corresponding to GAM26-TARGET GENE of FIG. 26A. GTF2I BINDING SITE is a binding site found in an untranslated region of GTF2I, corresponding to BINDING SITE of FIG. 26A. FIG. 26D illustrates the complementarity of the nucleotide sequence of GTF2I BINDING SITE, designated SEQ ID:190454, to the nucleotide sequence of GAM26 RNA of FIG. 26A, designated SEQ ID:20604.

[1057] Yet another function of GAM26 is therefore inhibition of general transcription factor II, i (GTF2I), a gene which encodes a transcripition factor that interacts with the basal transcription machinery by coordinating the formation of a multiprotein complex at the c-fos promoter, and linking specific signal responsive activator complexes. and is associated with Williams-Beuren syndrome. Accordingly, utilities of GAM26 include diagnosis and treatment of the abovementioned diseases and clinical conditions.

[1058] The function of GTF2I has been established by previous studies. Through transfection experiments, Roy et al. (1997) found that GTF21 is capable of binding to both a pyrimidine-rich initiator (Inr) and an E-box for upstream stimulatory factor-1 (USF1; 191523). GTF2I and USF1 can also act synergistically to activate transcription through both Inr and the E-box elements of the adenovirus major late promoter. By in vitro cotranslation followed by coimmunoprecipitation studies, Roy et al. (1997) confirmed direct protein interaction between GTF2I and USF1. Williams-Beuren syndrome (WBS; 194050) is a neurodevelopmental disorder with multisystemic manifestations caused by heterozygosity for a partial deletion of 7q11.23. The breakpoints cluster within regions located approximately 1 cM at either side of the elastin locus (ELN; 130160). Perez Jurado et al. (1998) characterized a duplicated region near the common deletion breakpoints, which includes a transcribed gene. The centromeric (C) and telomeric (T) copies are almost identical in the duplicated 3-prime portions but diverge at the 5-prime ends. C-specific 4.3-kb mRNA and T-specific 5.4-kb mRNA are widely expressed in embryonic and adult tissues. The telomeric gene gives rise to several tandemly spliced forms and is deleted in all WBS individuals who have documented ELN deletions. Database searches showed that this gene encodes BAP135, a protein phosphorylated by BTK in B cells, as well as the multifunctional transcription factor TFII-I; hence, the gene name GTF2I. The centromeric gene is not deleted in WBS and appears to be a partially truncated expressed pseudogene (GTF2IP1) with no protein product. Both loci map to different genomic clone contigs that also contain other deleted and nondeleted loci. The duplicated region containing GTF2I and GTF2IP1, respectively, is located close to the deletion breakpoints and may predispose to unequal meiotic recombination between chromosome 7 homologs and/or to intrachromosomal rearrangements. Hemizygosity for GTF2I may also contribute to the WBS phenotype.

[1059] Full details of the abovementioned studies are described in the following publications, the disclosure of which are hereby incorporated by reference:

[1060] erez Jurado, L. A.; Wang, Y.-K.; Peoples, R.; Coloma, A.; Cruces, J.; Francke, U.: A duplicated gene in the breakpoint regions of the 7q11.23 Williams-Beuren syndrome deletion encodes the initiator binding protein TFII-I and BAP-135, a phosphorylation target of BTK. Hum. Molec. Genet. 7: 325-334, 1998. PubMed ID: 9466987 2. Roy, A. L.; Du, H.; Gregor, P. D.; Novina, C. D.; Martinez, E.; Roeder, R. G. Cloning of an Inr- and E-box binding protein, TFII-I, that interacts physically and functionally with USF1. EMBO J. 16: 7091-7104, 1997.

[1061] Further studies establishing the function and utilities of GTF2I are found in John Hopkins OMIM database record ID 601679, and in references numbered 802-804 listed hereinbelow.

[1062] Reference is now made to HCCS BINDING SITE. holocytochrome c synthase (cytochrome c heme-lyase) (HCCS) is a target gene of GAM26, corresponding to GAM26-TARGET GENE of FIG. 26A. HCCS BINDING SITE is a binding site found in an untranslated region of HCCS, corresponding to BINDING SITE of FIG. 26A. FIG. 26D illustrates the complementarity of the nucleotide sequence of HCCS BINDING SITE, designated SEQ ID:192464, to the nucleotide sequence of GAM26 RNA of FIG. 26A, designated SEQ ID:20604.

[1063] An additional function of GAM26 is therefore inhibition of holocytochrome c synthase (cytochrome c heme-lyase) (HCCS), a gene which encodes a Enzyme that catalyzes the covalent addition of a heme group onto c-type cytochromes in mitochondria. and is associated with Microphthalmia with linear skin defects syndrome and Rett syndrome. Accordingly, utilities of GAM26 include diagnosis and treatment of the abovementioned diseases and clinical conditions.

[1064] The function of HCCS has been established by previous studies. Microphthalmia with linear skin defects syndrome (MLS; 309801) is an X-linked male-lethal disorder associated with X-chromosomal rearrangements resulting in monosomy from Xpter to Xp22. Features include microphthalmia, sclerocornea, linear skin defects, and agenesis of the corpus callosum. Using a cross-species conservation strategy, Schaefer et al. (1996) isolated an expressed sequence from the 450- to 550-kb MLS critical region on Xp22 by screening a human embryo cDNA library. Northern analysis demonstrated a transcript of approximately 2.6 kb in all tissues examined, with weaker expression of 1.2- and 5.2-kb transcripts. The strongest expression was observed in heart and skeletal muscle. Sequence analysis of a 3-kb cDNA contig revealed an 807-bp open reading frame encoding a putative 268-amino acid protein. Comparison of the sequence with sequences in databases revealed homology with holocytochrome c-type synthetases, which catalyze the covalent addition of a heme group onto c-type cytochromes in mitochondria. The c-type cytochromes are required for proper functioning of the electron transport pathway. The human gene, symbolized HCCS, and the corresponding murine gene characterized by Schaefer et al. (1996) share 83% nucleotide sequence identity and 85% amino acid identity. The authors stated that, because of the lack of a neuromuscular phenotype in MLS, it is uncertain how the deletion of a mitochondrial holocytochrome synthetase would contribute to phenotype seen in MLS. The expression pattern of the gene and knowledge of the function of holocytochrome synthetases suggested, however, that it is a good candidate for X-linked encephalomyopathies typically associated with mitochondrial dysfunction. Based on its chromosomal location and its role in the mitochondrial respiratory chain, HCCS was considered a candidate gene for Rett syndrome (RTT; 312750). The genomic structure of the gene, which occupies an 11-kb region and consists of 7 exons, was determined. No mutational abnormality of the gene was found in 20 RTT patients (Van den Veyver et al., 1998).

[1065] Full details of the abovementioned studies are described in the following publications, the disclosure of which are hereby incorporated by reference:

[1066] chaefer, L.; Ballabio, A.; Zoghbi, H. Y.: Cloning and characterization of a putative human holocytochrome c-type synthetase gene (HCCS) isolated from the critical region for microphthalmia with linear skin defects (MLS). Genomics 34: 166-172, 1996. PubMed ID: 8661044 2. Van den Veyver, I. B.; Subramanian, S.; Zoghbi, H. Y.: Genomic structure of a human holocytochrome c-type synthetase gene in Xp22.3 and mutation analysis in patients with Rett syndrome. Am. J. Med. Genet. 78: 179-181, 1998.

[1067] Further studies establishing the function and utilities of HCCS are found in John Hopkins OMIM database record ID 300056, and in references numbered 805-806 listed hereinbelow.

[1068] Reference is now made to HCN2 BINDING SITE. hyperpolarization activated cyclic nucleotide-gated potassium channel (HCN2) is a target gene of GAM26, corresponding to GAM26-TARGET GENE of FIG. 26A. HCN2 BINDING SITE is a binding site found in an untranslated region of HCN2, corresponding to BINDING SITE of FIG. 26A. FIG. 26D illustrates the complementarity of the nucleotide sequence of HCN2 BINDING SITE, designated SEQ ID: 192735, to the nucleotide sequence of GAM26 RNA of FIG. 26A, designated SEQ ID:20604.

[1069] A further function of GAM26 is therefore inhibition of hyperpolarization activated cyclic nucleotide-gated potassium channel (HCN2), a gene which encodes a channel that is hyperpolarization-activated cyclic nucleotide-gated cation channel 2 and may act as a pacemaker channel in the brain and the heart. Accordingly, utilities of GAM26 include diagnosis and treatment of the abovementioned diseases and clinical conditions.

[1070] The function of HCN2 has been established by previous studies. Ludwig et al. (1999) observed that when expressed in HEK293 cells, HCN2 gives rise to hyperpolarization-activated cation currents with the hallmark features of the native cation current. HCN2 has fast activation kinetics, and Ludwig et al. (1999) concluded that HCN2 may underlie the fast component of the cardiac hyperpolarization-activated cation current. By constructing truncation mutants, Wainger et al. (2001) demonstrated that the CNBD inhibits activation of the core transmembrane domain of HCN family members. Cyclic AMP binding relieves this inhibition. Differences in activation gating and extent of cAMP modulation between the HCN1 and HCN2 isoforms result largely from differences in the efficacy of CNBD inhibition.

[1071] Full details of the abovementioned studies are described in the following publications, the disclosure of which are hereby incorporated by reference:

[1072] udwig, A.; Zong, X.; Stieber, J.; Hullin, R.; Hofmann, F.; Biel, M.: Two pacemaker channels from human heart with profoundly different activation kinetics. EMBO J. 18: 2323-2329, 1999. PubMed ID: 10228147 2. Santoro, B.; Grant, S. G. N.; Bartsch, D.; Kandel, E. R.: Interactive cloning with the SH3 domain of N-src identifies a new brain specific ion channel protein, with homology to Eag and cyclic nucleotide-gated channels. Proc. Nat. Acad. Sci. 94: 14815-14820, 1997.

[1073] Further studies establishing the function and utilities of HCN2 are found in John Hopkins OMIM database record ID 602781, and in references numbered 807-810 listed hereinbelow.

[1074] Reference is now made to HDAC2 BINDING SITE. histone deacetylase 2 (HDAC2) is a target gene of GAM26, corresponding to GAM26-TARGET GENE of FIG. 26A. HDAC2 BINDING SITE is a binding site found in an untranslated region of HDAC2, corresponding to BINDING SITE of FIG. 26A. FIG. 26D illustrates the complementarity of the nucleotide sequence of HDAC2 BINDING SITE, designated SEQ ID:193593, to the nucleotide sequence of GAM26 RNA of FIG. 26A, designated SEQ ID:20604.

[1075] Yet a further function of GAM26 is therefore inhibition of histone deacetylase 2 (HDAC2), a gene which encodes a Enzyme that is responsible for the deacetylation of lysine residues on the n-terminal part of the core histones and mediates transcriptional repression. Accordingly, utilities of GAM26 include diagnosis and treatment of the abovementioned diseases and clinical conditions.

[1076] The function of HDAC2 has been established by previous studies. Zhang et al. (1998) identified the SIN3-associated 30-kD protein SAP30 (603378) as a novel component of the human histone deacetylase complex which is conserved among eukaryotic organisms. This complex includes SIN3, SAP18 (602949), the histone deacetylases HDAC1 (601241) and HDAC2, the histone-binding proteins RbAp46 (RBBP7; 602922) and RbAp48 (RBBP4; 602923), as well as other polypeptides. Yarden and Brody (1999) reported that BRCA1 (113705) interacts in vivo and in vitro with RBBP7 and RBBP4, with RB1 (180200), and that the BRCT domain of BRCA1 associates with HDAC1 and HDAC2. Rountree et al. (2000) showed that DNMT1 (126375) can establish a repressive transcription complex consisting of DNMT1, HDAC2, and DMAP1 (605077). The noncatalytic amino terminus of DNMT1 binds to HDAC2 and to DMAP1 and can mediate transcriptional repression. DMAP1 is targeted to replication foci through interaction with the far N terminus of DNMT1 throughout S phase, whereas HDAC2 joins DNMT1 and DMAP1 only during late S phase, providing a platform for how histones may become deacetylated in heterochromatin following replication.

[1077] Full details of the abovementioned studies are described in the following publications, the disclosure of which are hereby incorporated by reference:

[1078] arden, R. I.; Brody, L. C.: BRCA1 interacts with components of the histone deacetylase complex. Proc. Nat. Acad. Sci. 96: 4983-4988, 1999. PubMed ID: 10220405 4. Rountree, M. R.; Bachman, K. E.; Baylin, S. B.: DNMT1 binds HDAC2 and a new co-repressor, DMAP1, to form a complex at replication foci. Nature Genet. 25: 269-277, 2000.

[1079] Further studies establishing the function and utilities of HDAC2 are found in John Hopkins OMIM database record ID 605164, and in references numbered 811-817 listed hereinbelow.

[1080] Referring now to HDAC2 BINDING SITE. histone deacetylase 2 (HDAC2) is a target gene of GAM26, corresponding to GAM26-TARGET GENE of FIG. 26A. HDAC2 BINDING SITE is a binding site found in an untranslated region of HDAC2, corresponding to BINDING SITE of FIG. 26A. FIG. 26D illustrates the complementarity of the nucleotide sequence of HDAC2 BINDING SITE, designated SEQ ID:193594, to the nucleotide sequence of GAM26 RNA of FIG. 26A, designated SEQ ID:20604.

[1081] Another function of GAM26 is therefore inhibition of histone deacetylase 2 (HDAC2), a gene which encodes a Enzyme that is responsible for the deacetylation of lysine residues on the n-terminal part of the core histones and mediates transcriptional repression. Accordingly, utilities of GAM26 include diagnosis and treatment of the abovementioned diseases and clinical conditions. The function and utilities of HDAC2 have been established by previous studies, as described hereinabove with reference to FIG. 26D.

[1082] Reference is now made to IRS1 BINDING SITE. insulin receptor substrate 1 (IRS1) is a target gene of GAM26, corresponding to GAM26-TARGET GENE of FIG. 26A. IRS1 BINDING SITE is a binding site found in an untranslated region of IRS1, corresponding to BINDING SITE of FIG. 26A. FIG. 26D illustrates the complementarity of the nucleotide sequence of IRS1 BINDING SITE, designated SEQ ID:193594, to the nucleotide sequence of GAM26 RNA of FIG. 26A, designated SEQ ID:20604.

[1083] Yet another function of GAM26 is therefore inhibition of insulin receptor substrate 1 (IRS1), a gene which encodes a receptor that may mediate the control of various cellular processes by insulin. and is associated with DIABETES MELLITUS, TYPE II. Accordingly, utilities of GAM26 include diagnosis and treatment of the abovementioned diseases and clinical conditions.

[1084] The function of IRS1 has been established by previous studies. Sun et al. (1991) isolated cDNAs encoding a 160- to 185-kD phosphotyrosyl protein that is a substrate of the insulin receptor tyrosine kinase and a putative participant in insulin (INS; 176730) signaling. This protein, designated insulin receptor substrate-1 (IRS1), is found in a variety of insulin responsive cells and tissues. It exhibits no intrinsic enzyme activity but is believed to serve as a docking protein involved in binding and activating other signal transduction molecules after being phosphorylated on tyrosine by the insulin receptor kinase Almind et al. (1996) examined insulin-stimulated processes in a cultured myeloid progenitor cell stably overexpressing the insulin receptor when transfected with either wildtype human IRS1 or the gly972-to-arg common variant (numbering according to Nishiyama and Wands, 1992). They showed that the mutation in codon 972 of the IRS1 gene impairs insulin-stimulated signaling, especially along the phosphatidylinositol 3-kinase (171834) pathway, and may contribute to insulin resistance in normal and diabetic populations.

[1085] Animal model experiments lend further support to the function of IRS1. Clancy et al. (2001) found that mutation of chico extends fruit fly lifespan by up to 48% in homozygotes and 36% in heterozygotes. Extension of lifespan was not a result of impaired oogenesis in chico females, nor was it consistently correlated with increased stress resistance. The dwarf phenotype of chico homozygotes was also unnecessary for extension of lifespan. The role of insulin/IGF signaling in regulating animal aging is therefore evolutionarily conserved

[1086] It is appreciated that the abovementioned animal model for IRS1 is acknowledged by those skilled in the art as a scientifically valid animal model, as can be further appreciated from the publications sited hereinbelow.

[1087] Full details of the abovementioned studies are described in the following publications, the disclosure of which are hereby incorporated by reference:

[1088] Esposito, D. L.; Mammarella, S.; Ranieri, A.; Loggia, F. D.; Capani, F.; Consoli, A.; Mariani-Costantini, R.; Caramia, F. G.; Cama, A.; Battista, P.: Deletion of gly723 in the insulin receptor substrate-1 of a patient with noninsulin-dependent diabetes mellitus. Hum. Mutat. 7: 364-366, 1996. PubMed ID: 8723689 4. Almind, K.; Inoue, G.; Pedersen, O.; Kahn, C. R.: A common amino acid polymorphism in insulin receptor substrate-1 causes impaired insulin signaling: evidence from transfection studies. J. Clin. Invest. 97: 2569-2575, 1996.

[1089] Further studies establishing the function and utilities of IRS1 are found in John Hopkins OMIM database record ID 147545, and in references numbered 818-839 listed hereinbelow.

[1090] Reference is now made to HIC1 BINDING SITE. hypermethylated in cancer 1 (HIC1) is a target gene of GAM26, corresponding to GAM26-TARGET GENE of FIG. 26A. HIC1 BINDING SITE is a binding site found in an untranslated region of HIC1, corresponding to BINDING SITE of FIG. 26A. FIG. 26D illustrates the complementarity of the nucleotide sequence of HIC1 BINDING SITE, designated SEQ ID:195147, to the nucleotide sequence of GAM26 RNA of FIG. 26A, designated SEQ ID:20604.

[1091] An additional function of GAM26 is therefore inhibition of hypermethylated in cancer 1 (HIC1), a gene which encodes a transcripition factor that is a transcriptional repressor and may act as a tumor suppressor. and is associated with miller-dieker syndrome. Accordingly, utilities of GAM26 include diagnosis and treatment of the abovementioned diseases and clinical conditions.

[1092] The function of HIC1 has been established by previous studies. The human HIC1 (hypermethylated in cancer) gene maps to 17p13.3 and is deleted in the contiguous gene disorder Miller-Dieker syndrome (MDS; 247200) (Makos Wales et al., 1995; Chong et al., 1996). Grimm et al. (1999) isolated the murine Hic1 gene, which encodes a zinc finger protein with a poxvirus and zinc finger (POZ) domain. Comparison of genomic and cDNA sequences predicted 2 exons for the murine Hic1 gene. The second exon exhibits 88% identity at the DNA level to the corresponding region of the human HIC1 gene. During embryonic development, Hic1 is expressed in mesenchymes of the selerotomes, lateral body wall, limb, and craniofacial regions embedding the outgrowing peripheral nerves during their differentiation. During fetal development, Hic1 is also expressed in mesenchymes apposed to the precartilaginous condensations, at many interfaces to budding epithelia of inner organs, and weakly in muscles. Grimm et al. (1999) observed activation of Hic1 expression in the embryonic anlagen of many tissues displaying anomalies in MDS patients. Besides lissencephaly, MDS patients exhibit facial dysmorphism and frequently additional birth defects, e.g., anomalies of the heart, kidney, gastrointestinal tract, and the limbs. Thus, HIC1 activity may correlate with the defective development of the nose, jaws, extremities, gastrointestinal tract, and kidney in MDS patients.

[1093] Animal model experiments lend further support to the function of HIC1. The location of HIC1 in the Miller-Dieker syndrome critical deletion region on 17p13.3 makes it a candidate gene for involvement in the MDS gene deletion syndrome. To study the function of murine Hic1 in development, Carter et al. (2000) created Hic1-deficient mice. They found that these animals died perinatally and exhibited varying combinations of gross developmental defects throughout the second half of development, including acrania, exencephaly, cleft palate, limb anomalies, and omphalocele. These abnormalities demonstrated a role for Hic1 in the development of structures affected in the Miller-Dieker syndrome, and provided functional evidence to strengthen its candidacy as a gene involved in that disorder.

[1094] It is appreciated that the abovementioned animal model for HIC1 is acknowledged by those skilled in the art as a scientifically valid animal model, as can be further appreciated from the publications sited hereinbelow.

[1095] Full details of the abovementioned studies are described in the following publications, the disclosure of which are hereby incorporated by reference:

[1096] arter, M. G.; Johns, M. A.; Zeng, X.; Zhou, L.; Zink, M. C.; Mankowski, J. L.; Donovan, D. M.; Baylin, S. B.: Mice deficient in the candidate tumor suppressor gene Hic1 exhibit developmental defects of structures affected in the Miller-Dieker syndrome. Hum. Molec. Genet. 9: 413-419, 2000. PubMed ID: 10655551 3. Grimm, C.; Sporle, R.; Schmid, T. E.; Adler, I.-D.; Adamski, J.; Schughart, K.; Graw, J.: Isolation and embryonic expression of the novel mouse gene Hic1, the homologue of HIC1, a candidate gene for the Miller-Dieker syndrome. Hum. Molec. Genet. 8: 697-710, 1999.

[1097] Further studies establishing the function and utilities of HIC1 are found in John Hopkins OMIM database record ID 603825, and in references numbered 840-843 listed hereinbelow.

[1098] Referring now to HIRA BINDING SITE. HIR (histone cell cycle regulation defective, S. cerevisiae) homolog A (HIRA) is a target gene of GAM26, corresponding to GAM26-TARGET GENE of FIG. 26A. HIRA BINDING SITE is a binding site found in an untranslated region of HIRA, corresponding to BINDING SITE of FIG. 26A. FIG. 26D illustrates the complementarity of the nucleotide sequence of HIRA BINDING SITE, designated SEQ ID:195839, to the nucleotide sequence of GAM26 RNA of FIG. 26A, designated SEQ ID:20604.

[1099] A further function of GAM26 is therefore inhibition of HIR (histone cell cycle regulation defective, S. cerevisiae) homolog A (HIRA), a gene which encodes a transcripition factor that could have a part in mechanisms of transcriptional regulation similar to that played by yeast hir1 and hir2 together. and is associated with DiGeorge syndrome. Accordingly, utilities of GAM26 include diagnosis and treatment of the abovementioned diseases and clinical conditions. The function and utilities of HIRA have been established by previous studies, as described hereinabove with reference to FIG. 26D.

[1100] Referring now to HIRA BINDING SITE. HIR (histone cell cycle regulation defective, S. cerevisiae) homolog A (HIRA) is a target gene of GAM26, corresponding to GAM26-TARGET GENE of FIG. 26A. HIRA BINDING SITE is a binding site found in an untranslated region of HIRA, corresponding to BINDING SITE of FIG. 26A. FIG. 26D illustrates the complementarity of the nucleotide sequence of HIRA BINDING SITE, designated SEQ ID:195850, to the nucleotide sequence of GAM26 RNA of FIG. 26A, designated SEQ ID:20604.

[1101] Yet a further function of GAM26 is therefore inhibition of HIR (histone cell cycle regulation defective, S. cerevisiae) homolog A (HIRA), a gene which encodes a transcripition factor that could have a part in mechanisms of transcriptional regulation similar to that played by yeast hir1 and hir2 together. and is associated with DiGeorge syndrome. Accordingly, utilities of GAM26 include diagnosis and treatment of the abovementioned diseases and clinical conditions. The function and utilities of HIRA have been established by previous studies, as described hereinabove with reference to FIG. 26D.

[1102] Reference is now made to HMGA2 BINDING SITE. (HMGA2) is a target gene of GAM26, corresponding to GAM26-TARGET GENE of FIG. 26A. HMGA2 BINDING SITE is a binding site found in an untranslated region of HMGA2, corresponding to BINDING SITE of FIG. 26A. FIG. 26D illustrates the complementarity of the nucleotide sequence of HMGA2 BINDING SITE, designated SEQ ID: 197765, to the nucleotide sequence of GAM26 RNA of FIG. 26A, designated SEQ ID:20604.

[1103] Another function of GAM26 is therefore inhibition of (HMGA2), a gene which encodes a transcripition factor that may affect transcription and cell differentiation; shares common DNA-binding motif with other HMG HMG I/Y family members. and is associated with lipoma. Accordingly, utilities of GAM26 include diagnosis and treatment of the abovementioned diseases and clinical conditions.

[1104] The function of HMGA2 has been established by previous studies. Ashar et al. (1995) considered the HMGIC gene a good candidate for involvement in lipoma for several reasons, including the facts that it encodes a transcriptional regulating factor, that the pygmy mouse had disproportionately less fat than normal litter mates, and that the mouse gene maps to a region of chromosome 10 with homology of synteny to human 12q14-q15. Therefore, they cloned the human gene and investigated its possible role in lipomas. In FISH studies, Ashar et al. (1995) found apparent deletion of the 3-prime end of the HMGIC gene in translocations associated with lipoma. Chimeric transcripts were isolated from 2 lipomas in which HMGIC DNA-binding domains (AT hook motifs) were fused to either a LIM or an acidic transactivator domain. The identification of a gene rearranged in a benign neoplastic process suggests a role for HMGIC in adipogenesis and mesenchymal differentiation.

[1105] Animal model experiments lend further support to the function of HMGA2. To evaluate the role of the HMGIC component in the development of lipoma, Arlotta et al. (2000) expressed the 3 DNA-binding domains of HMGIC in transgenic mice. Despite the ubiquitous expression of the truncated HMGIC protein, the transgenic mice developed a selective abundance of fat tissue early in life, showed marked adipose tissue inflammation, and had an abnormally high incidence of lipomas. These findings demonstrated that the DNA-binding domain of HMGIC, in the absence of a C-terminal fusion partner, are sufficient to perturb adipogenesis and predispose to lipomas.

[1106] It is appreciated that the abovementioned animal model for HMGA2 is acknowledged by those skilled in the art as a scientifically valid animal model, as can be further appreciated from the publications sited hereinbelow.

[1107] Full details of the abovementioned studies are described in the following publications, the disclosure of which are hereby incorporated by reference:

[1108] shar, H. R.; Schoenberg Fejzo, M.; Tkachenko, A.; Zhou, X.; Fletcher, J. A.; Weremowicz, S.; Morton, C. C.; Chada, K.: Disruption of the architectural factor HMGI-C: DNA-binding AT hook motifs fused in lipomas to distinct transcriptional regulatory domains. Cell 82: 57-65, 1995. PubMed ID: 7606786 2. Arlotta, P.; Tai, A. K.-F.; Manfioletti, G.; Clifford, C.; Jay, G.; Ono, S. J.: Transgenic mice expressing a truncated form of the high mobility group I-C protein develop adiposity and an abnormally high prevalence of lipomas. J. Biol. Chem. 275: 14394-14400, 2000.

[1109] Further studies establishing the function and utilities of HMGA2 are found in John Hopkins OMIM database record ID 600698, and in references numbered 844-862 listed hereinbelow.

[1110] Referring now to HMGA2 BINDING SITE. (HMGA2) is a target gene of GAM26, corresponding to GAM26-TARGET GENE of FIG. 26A. HMGA2 BINDING SITE is a binding site found in an untranslated region of HMGA2, corresponding to BINDING SITE of FIG. 26A. FIG. 26D illustrates the complementarity of the nucleotide sequence of HMGA2 BINDING SITE, designated SEQ ID:197853, to the nucleotide sequence of GAM26 RNA of FIG. 26A, designated SEQ ID:20604.

[1111] Yet another function of GAM26 is therefore inhibition of (HMGA2), a gene which encodes a transcripition factor that may affect transcription and cell differentiation; shares common DNA-binding motif with other HMG HMG I/Y family members. and is associated with lipoma. Accordingly, utilities of GAM26 include diagnosis and treatment of the abovementioned diseases and clinical conditions. The function and utilities of HMGA2 have been established by previous studies, as described hereinabove with reference to FIG. 26D.

[1112] Reference is now made to HPCAL1 BINDING SITE. hippocalcin-like 1 (HPCAL1) is a target gene of GAM26, corresponding to GAM26-TARGET GENE of FIG. 26A. HPCAL1 BINDING SITE is a binding site found in an untranslated region of HPCAL1, corresponding to BINDING SITE of FIG. 26A. FIG. 26D illustrates the complementarity of the nucleotide sequence of HPCAL1 BINDING SITE, designated SEQ ID:201019, to the nucleotide sequence of GAM26 RNA of FIG. 26A, designated SEQ ID:20604.

[1113] An additional function of GAM26 is therefore inhibition of hippocalcin-like 1 (HPCAL1), a gene which encodes a Protein that is a neuron-specific Ca(2+)-binding proteins. Accordingly, utilities of GAM26 include diagnosis and treatment of the abovementioned diseases and clinical conditions.

[1114] The function of HPCAL1 has been established by previous studies. Hippocalcin-like-1 is a member of a family of neuron-specific Ca(2+)-binding proteins found in the retina and brain. Using rat hippocalcin (142622) cDNA as a probe in the screening of a human hippocampus cDNA library under low stringency conditions, Kobayashi et al. (1994) isolated a clone that encoded a novel calcium-binding protein structurally related to hippocalcin. They showed that this hippocalcin-like protein has a primary structure of 193 amino acids and contains 3 EF-hand structures and a possible NH2-terminal myristoylation site. A single transcript of 1.7 kb was detected only in the brain.

[1115] Full details of the abovementioned studies are described in the following publications, the disclosure of which are hereby incorporated by reference:

[1116] obayashi, M.; Takamatsu, K.; Fujishiro, M.; Saitoh, S.; Noguchi, T.: Molecular cloning of a novel calcium-binding protein structurally related to hippocalcin from human brain and chromosomal mapping of its gene. Biochim. Biophys. Acta 1222: 515-518, 1994.

[1117] Further studies establishing the function and utilities of HPCAL1 are found in John Hopkins OMIM database record ID 600207, and in references numbered 863 listed hereinbelow.

[1118] Reference is now made to HRB BINDING SITE. HIV-1 Rev binding protein (HRB) is a target gene of GAM26, corresponding to GAM26-TARGET GENE of FIG. 26A. HRB BINDING SITE is a binding site found in an untranslated region of HRB, corresponding to BINDING SITE of FIG. 26A. FIG. 26D illustrates the complementarity of the nucleotide sequence of HRB BINDING SITE, designated SEQ ID:201812, to the nucleotide sequence of GAM26 RNA of FIG. 26A, designated SEQ ID:20604.

[1119] A further function of GAM26 is therefore inhibition of HIV-1 Rev binding protein (HRB), a gene which encodes a Protein that may function as a cofactor for the Rev/Rex class of RNA export factors. Accordingly, utilities of GAM26 include diagnosis and treatment of the abovementioned diseases and clinical conditions.

[1120] The function of HRB has been established by previous studies. Fritz et al. (1995) reported the isolation of a gene they designated ‘Rev-interacting protein’ (RIP). The cDNA was isolated using the yeast 2-hybrid screening system in a study to identify proteins that interact with the Rev protein of HIV-1 and which thereby assist in HIV replication. A partial clone from the initial screen was used to obtain a full-length 2.4-kb RIP cDNA. The authors found that the predicted 562-amino acid protein is related to the nucleoporins (e.g., 114350), a class of proteins that mediate nucleocytoplasmic transport. The protein was detected in the nuclear extract of HeLa cells and by immunofluorescence on the nuclear surface. Expression studies showed that recombinant RIP did indeed lead to increased Rev activity. Salcini et al. (1997) reported that both the RAB and RABR (604018) proteins bind to the EH protein-protein interaction domain found in EPS15 (600051) and other proteins. Coimmunoprecipitation studies demonstrated that RAB and EPS15 are associated in vivo.

[1121] Animal model experiments lend further support to the function of HRB. Kang-Decker et al. (2001) generated mice deficient in HRB by targeted disruption. Male mice with a null mutation in Hrb were infertile and displayed round-headed spermatozoa that lacked an acrosome. In wildtype spermatids, Hrb was associated with the cytosolic surface of proacrosomic transport vesicles that fuse to create a single large acrosomic vesicle at step 3 of spermiogenesis. Although proacrosomic vesicles form in spermatids that lack Hrb, the vesicles are unable to fuse, blocking acrosome development at step 2. Kang-Decker et al. (2001) concluded that HRB is required for docking and/or fusion of proacrosomic vesicles during acrosome biogenesis.

[1122] It is appreciated that the abovementioned animal model for HRB is acknowledged by those skilled in the art as a scientifically valid animal model, as can be further appreciated from the publications sited hereinbelow.

[1123] Full details of the abovementioned studies are described in the following publications, the disclosure of which are hereby incorporated by reference:

[1124] ones, T.; Sheer, D.; Bevec, D.; Kappel, B.; Hauber, J.; Steinkasserer, A.: The human HIV-1 Rev binding-protein hRIP/Rab (HRB) maps to chromosome 2q36. Genomics 40: 198-199, 1997. PubMed ID: 9070945 4. Kang-Decker, N.; Mantchev, G. T.; Juneja, S.C.; McNiven, M. A.; van Deursen, J. M. A. Lack of acrosome formation in Hrb-deficient mice. Science 294: 1531-1533, 2001.

[1125] Further studies establishing the function and utilities of HRB are found in John Hopkins OMIM database record ID 600862, and in references numbered 864-868 listed hereinbelow.

[1126] Reference is now made to HS3ST3B1 BINDING SITE. heparan sulfate (glucosamine) 3-O-sulfotransferase 3B1 (HS3ST3B1) is a target gene of GAM26, corresponding to GAM26-TARGET GENE of FIG. 26A. HS3ST3B1 BINDING SITE is a binding site found in an untranslated region of HS3ST3B1, corresponding to BINDING SITE of FIG. 26A. FIG. 26D illustrates the complementarity of the nucleotide sequence of HS3ST3B1 BINDING SITE, designated SEQ ID:202532, to the nucleotide sequence of GAM26 RNA of FIG. 26A, designated SEQ ID:20604.

[1127] Yet a further function of GAM26 is therefore inhibition of heparan sulfate (glucosamine) 3-O-sulfotransferase 3B1 (HS3ST3B1), a gene which encodes a Enzyme that plays a role in the generation of heparan sulfate proteoglycan. Accordingly, utilities of GAM26 include diagnosis and treatment of the abovementioned diseases and clinical conditions.

[1128] The function of HS3ST3B1 has been established by previous studies. Heparan sulfate biosynthetic enzymes are key components in generating a myriad of distinct heparan sulfate fine structures that carry out multiple biologic activities. The heparan sulfate D-glucosaminyl 3-O-sulfotransferases (3OSTs) place the rare 3-O-sulfate group in various sequence contexts. See 3OST2 (604056). Shworak et al. (1999) isolated cDNAs encoding 3OST2, 3OST3A1 (604057), 3OST3B1, and 3OST4 (604059). Like 3OST2 and 3OST3A1, the predicted 390-amino acid 3OST3B1 protein is a type II integral membrane protein. Although the 3OST2 and 3OST3 enzymes have a similar regional organization, the homology between them is limited to their C-terminal sulfotransferase domains. In a companion paper, Liu et al. (1999) demonstrated that the 3OST3A and 3OST3B forms sulfate an identical disaccharide. By Southern blot analysis, Shworak et al. (1999) determined that the human genome contains 2 copies of the 3OST3A1 and 3OST3B1 genes; they named the duplicate genes 3OST3A2 and 3OST3B2. Northern blot analysis revealed that the 3OST3B gene was widely expressed as multiple transcripts, with the most abundant expression in liver and placenta. Using an interspecific backcross, Shworak et al. (1999) found that the mouse 3Ost3A and 3Ost3B genes are tightly linked on chromosome 11, suggesting that the 2 genes arose by a tandem duplication. By inclusion within mapped clones, the mapped the human 3OST3A1 and 3OST3B1 genes to 17p12-p11.2.

[1129] Full details of the abovementioned studies are described in the following publications, the disclosure of which are hereby incorporated by reference:

[1130] Liu, J.; Shworak, N. W.; Sinay, P.; Schwartz, J. J.; Zhang, L.; Fritze, L. M.; Rosenberg, R. D.: Expression of heparan sulfate D-glucosaminyl 3-O-sulfotransferase isoforms reveals novel substrate specificities. J. Biol. Chem. 274: 5185-5192, 1999. PubMed ID: 9988768 Shworak, N. W.; Liu, J.; Petros, L. M.; Zhang, L.; Kobayashi, M.; Copeland, N. G.; Jenkins, N. A.; Rosenberg, R. D.: Multiple isoforms of heparan sulfate D-glucosaminyl 3-O-sulfotransferase: isolation, characterization, and expression of human cDNAs and identification of distinct genomic loci. J. Biol. Chem. 274: 5170-5184, 1999.

[1131] Further studies establishing the function and utilities of HS3ST3B1 are found in John Hopkins OMIM database record ID 604058, and in references numbered 869-870 listed hereinbelow.

[1132] Reference is now made to ING1L BINDING SITE. inhibitor of growth family, member 1-like (ING1L) is a target gene of GAM26, corresponding to GAM26-TARGET GENE of FIG. 26A. ING1L BINDING SITE is a binding site found in an untranslated region of ING1L, corresponding to BINDING SITE of FIG. 26A. FIG. 26D illustrates the complementarity of the nucleotide sequence of ING1L BINDING SITE, designated SEQ ID:213784, to the nucleotide sequence of GAM26 RNA of FIG. 26A, designated SEQ ID:20604.

[1133] Another function of GAM26 is therefore inhibition of inhibitor of growth family, member 1-like (ING1L), a gene which encodes a Protein that may interfer with signals transmitted through p53 and p33 (ING1). and is associated with colon tumors and hepatocellular carcinoma. Accordingly, utilities of GAM26 include diagnosis and treatment of the abovementioned diseases and clinical conditions.

[1134] The function of ING1L has been established by previous studies. The ING1 gene (601566) encodes a putative tumor suppressor. By searching a human EST database for cDNAs with sequence similarity to ING1, Shimada et al. (1998) identified a partial ING1-like (ING1L) cDNA. Using this partial cDNA, they isolated a full-length human fetal brain ING1L cDNA. The deduced 280-amino acid ING1L protein shares 58.9% sequence identity with ING1. ING1L contains a C-terminal PHD-type zinc finger domain. The PHD zinc finger was first identified in 2 closely related plant homeodomain-containing proteins. It is a cys4-his-cys3 (C4HC3)-type motif spanning 50 to 80 amino acids. PHD zinc fingers have been found in a number of proteins implicated in chromatin-mediated transcriptional control. Northern blot analysis of normal human tissues detected ubiquitous expression of 1.3- and 1.5-kb ING1L transcripts. The authors found that ING1L expression was significantly higher in colon tumors than in the adjacent normal colon tissue. Nagashima et al. (2001) cloned ING1L, which they termed p33ING2. Western blot analysis showed ubiquitous but variable expression of ING1, while p33ING2 expression was highly variable or absent in many cell lines. Highest expression of p33ING2 occurred in cell lines with null or mutant p53 (191170). The DNA-damaging agents etoposide and neocarzinostatin induced expression of p33ING2 but not ING1. Like ING1, p33ING2 was found to negatively regulate cell growth and survival in a p53-dependent manner through the induction of G1-phase cell-cycle arrest and apoptosis. p33ING2 enhanced the transcriptional transactivation activity of p53 and increased the acetylation of p53 at lys382. Western blot analysis detected ING1 but not p33ING2 in p53 immunoprecipitates. Nagashima et al. (2001) concluded that p33ING2 is a DNA damage-inducible gene that negatively regulates cell proliferation through activation of p53 by enhancing its acetylation.

[1135] Full details of the abovementioned studies are described in the following publications, the disclosure of which are hereby incorporated by reference:

[1136] agashima, M.; Shiseki, M.; Miura, K.; Hagiwara, K.; Linke, S. P.; Pedeux, R.; Wang, X. W.; Yokota, J.; Riabowol, K.; Harris, C. C.: DNA damage-inducible gene p33ING2 negatively regulates cell proliferation through acetylation of p53. Proc. Nat. Acad. Sci. 98: 9671-9676, 2001. PubMed ID: 11481424 2. Shimada, Y.; Saito, A.; Suzuki, M.; Takahashi, E.; Horie, M.: Cloning of a novel gene (ING1L) homologous to ING1, a candidate tumor suppressor. Cytogenet. Cell Genet. 83: 232-235, 1998.

[1137] Further studies establishing the function and utilities of ING1L are found in John Hopkins OMIM database record ID 604215, and in references numbered 871-872 listed hereinbelow.

[1138] Referring now to ING1L BINDING SITE. inhibitor of growth family, member 1-like (ING1L) is a target gene of GAM26, corresponding to GAM26-TARGET GENE of FIG. 26A. ING1L BINDING SITE is a binding site found in an untranslated region of ING1L, corresponding to BINDING SITE of FIG. 26A. FIG. 26D illustrates the complementarity of the nucleotide sequence of ING1L BINDING SITE, designated SEQ ID:213788, to the nucleotide sequence of GAM26 RNA of FIG. 26A, designated SEQ ID:20604.

[1139] Yet another function of GAM26 is therefore inhibition of inhibitor of growth family, member 1-like (ING1L), a gene which encodes a Protein that may interfer with signals transmitted through p53 and p33 (ING1). and is associated with colon tumors and hepatocellular carcinoma. Accordingly, utilities of GAM26 include diagnosis and treatment of the abovementioned diseases and clinical conditions. The function and utilities of ING1L have been established by previous studies, as described hereinabove with reference to FIG. 26D.

[1140] Referring now to IRS1 BINDING SITE. insulin receptor substrate 1 (IRS1) is a target gene of GAM26, corresponding to GAM26-TARGET GENE of FIG. 26A. IRS1 BINDING SITE is a binding site found in an untranslated region of IRS1, corresponding to BINDING SITE of FIG. 26A. FIG. 26D illustrates the complementarity of the nucleotide sequence of IRS1 BINDING SITE, designated SEQ ID:215707, to the nucleotide sequence of GAM26 RNA of FIG. 26A, designated SEQ ID:20604.

[1141] An additional function of GAM26 is therefore inhibition of insulin receptor substrate 1 (IRS1), a gene which encodes a receptor that may mediate the control of various cellular processes by insulin. and is associated with DIABETES MELLITUS, TYPE II. Accordingly, utilities of GAM26 include diagnosis and treatment of the abovementioned diseases and clinical conditions. The function and utilities of IRS1 have been established by previous studies, as described hereinabove with reference to FIG. 26D.

[1142] Reference is now made to KCNA6 BINDING SITE. potassium voltage-gated channel, shaker-related subfamily, member 6 (KCNA6) is a target gene of GAM26, corresponding to GAM26-TARGET GENE of FIG. 26A. KCNA6 BINDING SITE is a binding site found in an untranslated region of KCNA6, corresponding to BINDING SITE of FIG. 26A. FIG. 26D illustrates the complementarity of the nucleotide sequence of KCNA6 BINDING SITE, designated SEQ ID:221336, to the nucleotide sequence of GAM26 RNA of FIG. 26A, designated SEQ ID:20604.

[1143] A further function of GAM26 is therefore inhibition of potassium voltage-gated channel, shaker-related subfamily, member 6 (KCNA6), a gene which encodes a Protein that mediates the voltage-dependent potassium ion permeability of excitable membranes. Accordingly, utilities of GAM26 include diagnosis and treatment of the abovementioned diseases and clinical conditions.

[1144] The function of KCNA6 has been established by previous studies. By screening a human fetal cDNA library with a rat RCK3 potassium channel cDNA, Grupe et al. (1990) isolated cDNAs encoding a protein that they designated HBK2 (human brain potassium channel-2). The authors also cloned cDNAs corresponding to the rat homolog, RCK2. The predicted 529-amino acid HBK2 protein shares 94% identity with RCK2. HBK2 and RCK2 have the characteristic structure of voltage-gated ionic channels, with 6 potential membrane-spanning segments. When expressed in Xenopus oocytes, the HBK2/RCK2 channels exhibited the functional characteristics of a delayed-rectifier channel that acts especially in the more positive membrane voltage range. The functional and pharmacologic properties of HBK2/RCK2 potassium channels were distinct from those of previously characterized channels. Grupe et al. (1990) determined that the HBK2 gene did not contain introns. Using interspecific backcrosses between Mus musculus and Mus spretus, Klocke et al. (1993) mapped the mouse gene encoding the Kv1.6 potassium voltage-gated channel, Kcna6, to chromosome 6 in a cluster with Kcna1, Kcna5 (176267), and the homolog of human TPI1 (190450). Since human TPI1 is located on band 12p13, Klocke et al. (1993) predicted that the human KCNA6 gene is located on 12p near other genes of the Shaker-related subfamily, KCNA1 and KCNA5. Albrecht et al. (1995) determined that a 300-kb cluster on chromosome 12p13 contains the human KCNA6, KCNA1, and KCNA5 genes arranged in tandem

[1145] Full details of the abovementioned studies are described in the following publications, the disclosure of which are hereby incorporated by reference:

[1146] lbrecht, B.; Weber, K.; Pongs, O.: Characterization of a voltage-activated K-channel gene cluster on human chromosome 12p13. Receptors Channels 3: 213-220, 1995. PubMed ID: 8821794 2. Grupe, A.; Schroter, K. H.; Ruppersberg, J. P.; Stocker, M.; Drewes, T.; Beckh, S.; Pongs, O.: Cloning and expression of a human voltage-gated potassium channel: a novel member of the RCK potassium channel family. EMBO J. 9: 1749-1756, 1990.

[1147] Further studies establishing the function and utilities of KCNA6 are found in John Hopkins OMIM database record ID 176257, and in references numbered 873-875 listed hereinbelow.

[1148] Reference is now made to KCNA7 BINDING SITE. potassium voltage-gated channel, shaker-related subfamily, member 7 (KCNA7) is a target gene of GAM26, corresponding to GAM26-TARGET GENE of FIG. 26A. KCNA7 BINDING SITE is a binding site found in an untranslated region of KCNA7, corresponding to BINDING SITE of FIG. 26A. FIG. 26D illustrates the complementarity of the nucleotide sequence of KCNA7 BINDING SITE, designated SEQ ID:221548, to the nucleotide sequence of GAM26 RNA of FIG. 26A, designated SEQ ID:20604.

[1149] Yet a further function of GAM26 is therefore inhibition of potassium voltage-gated channel, shaker-related subfamily, member 7 (KCNA7), a gene which encodes a Protein that allows nerve cells to efficiently repolarize following an action potential. Accordingly, utilities of GAM26 include diagnosis and treatment of the abovementioned diseases and clinical conditions.

[1150] The function of KCNA7 has been established by previous studies. See 176260 for a general discussion of potassium voltage-gated ion channels. Using a probe from the mouse in the study of somatic cell hybrids, McPherson et al. (1991) found that a seventh member of the Shaker-related potassium voltage-gated channel is encoded by a gene on chromosome 19. Kalman et al. (1998) reported the isolation of the mouse voltage-gated Shaker-related potassium channel gene, Kv1.7 (Kcna7). Unlike other known Kv1 family genes that have intronless coding regions, the protein-coding region of Kv1.7 was interrupted by a 1.9-kb intron. The gene was mapped to mouse chromosome 7 and human chromosome 19q13.3. The mouse Kv1.7 channel was voltage-dependent and exhibited cumulative inactivation. Northern blot analysis revealed transcripts of approximately 3 kb in mouse heart and skeletal muscle. Bardien-Kruger et al. (2002) deduced the coding region of KCNA7 by aligning the mouse cDNA sequence with a human BAC clone and mouse EST sequences. The region encodes a protein of 456 amino acid residues containing cytoplasmic N- and C-termini, a central core domain composed of 6 transmembrane segments and the characteristic pore-loop. The human intron was 1153 bp in length and smaller than that of mouse (1929 bp). Using the deduced amino acid sequences, the potassium-channels of the 2 species were highly conserved (greater than 95%). The expression of KCNA7 in human adult heart was confirmed by RT-PCR studies. Bardien-Kruger et al. (2002) refined the location of the KCNA7 gene within chromosome 19q13.3 by bioinformatic in silico mapping and implicated it as a positional candidate gene for progressive familial heart block type I (604559), an autosomal dominant cardiac conduction disorder mapped to 19q13.3. In affected individuals, Bardien-Kruger et al. (2002) screened the coding region of KCNA7 by PCR-SSCP analysis and direct DNA sequencing, which did not reveal any pathogenic sequence changes

[1151] Full details of the abovementioned studies are described in the following publications, the disclosure of which are hereby incorporated by reference:

[1152] ardien-Kruger, S.; Wulff, H.; Arieff, Z.; Brink, P.; Chandy, K. G.; Corfield, V.: Characterisation of the human voltage-gated potassium channel gene, KCNA7, a candidate gene for inherited cardiac disorders, and its exclusion as cause of progressive familial heart block I (PFHBI). Europ. J. Hum. Genet. 10: 36-43, 2002. PubMed ID: 11896454 2. Kalman, K.; Nguyen, A.; Tseng-Crank, J.; Dukes, I. D.; Chandy, G.; Hustad, C. M.; Copeland, N. G.; Jenkins, N. A.; Mohrenweiser, H.; Brandriff, B.; Cahalan, M.; Gutman, G. A.; Chandy, K. G.: Genomic organization, chromosomal localization, tissue distribution, and biophysical characterization of a novel mammalian Shaker-related voltage-gated potassium channel, Kv1.7. J. Biol. Chem. 273: 5851-5857, 1998.

[1153] Further studies establishing the function and utilities of KCNA7 are found in John Hopkins OMIM database record ID 176268, and in references numbered 876-878 listed hereinbelow.

[1154] Referring now to KCNA7 BINDING SITE. potassium voltage-gated channel, shaker-related subfamily, member 7 (KCNA7) is a target gene of GAM26, corresponding to GAM26-TARGET GENE of FIG. 26A. KCNA7 BINDING SITE is a binding site found in an untranslated region of KCNA7, corresponding to BINDING SITE of FIG. 26A. FIG. 26D illustrates the complementarity of the nucleotide sequence of KCNA7 BINDING SITE, designated SEQ ID:221616, to the nucleotide sequence of GAM26 RNA of FIG. 26A, designated SEQ ID:20604.

[1155] Another function of GAM26 is therefore inhibition of potassium voltage-gated channel, shaker-related subfamily, member 7 (KCNA7), a gene which encodes a Protein that allows nerve cells to efficiently repolarize following an action potential. Accordingly, utilities of GAM26 include diagnosis and treatment of the abovementioned diseases and clinical conditions. The function and utilities of KCNA7 have been established by previous studies, as described hereinabove with reference to FIG. 26D.

[1156] Referring now to KCNA7 BINDING SITE. potassium voltage-gated channel, shaker-related subfamily, member 7 (KCNA7) is a target gene of GAM26, corresponding to GAM26-TARGET GENE of FIG. 26A. KCNA7 BINDING SITE is a binding site found in an untranslated region of KCNA7, corresponding to BINDING SITE of FIG. 26A. FIG. 26D illustrates the complementarity of the nucleotide sequence of KCNA7 BINDING SITE, designated SEQ ID:221618, to the nucleotide sequence of GAM26 RNA of FIG. 26A, designated SEQ ID:20604.

[1157] Yet another function of GAM26 is therefore inhibition of potassium voltage-gated channel, shaker-related subfamily, member 7 (KCNA7), a gene which encodes a Protein that allows nerve cells to efficiently repolarize following an action potential. Accordingly, utilities of GAM26 include diagnosis and treatment of the abovementioned diseases and clinical conditions. The function and utilities of KCNA7 have been established by previous studies, as described hereinabove with reference to FIG. 26D.

[1158] Reference is now made to KCNF1 BINDING SITE. potassium voltage-gated channel, subfamily F, member 1 (KCNF1) is a target gene of GAM26, corresponding to GAM26-TARGET GENE of FIG. 26A. KCNF1 BINDING SITE is a binding site found in an untranslated region of KCNF1, corresponding to BINDING SITE of FIG. 26A. FIG. 26D illustrates the complementarity of the nucleotide sequence of KCNF1 BINDING SITE, designated SEQ ID:222269, to the nucleotide sequence of GAM26 RNA of FIG. 26A, designated SEQ ID:20604.

[1159] An additional function of GAM26 is therefore inhibition of potassium voltage-gated channel, subfamily F, member 1 (KCNF1), a gene which encodes a Protein that mediates the voltage-dependent potassium ion permeability of excitable membranes. Accordingly, utilities of GAM26 include diagnosis and treatment of the abovementioned diseases and clinical conditions.

[1160] The function of KCNF1 has been established by previous studies. Voltage-gated potassium channels are a family of plasma membrane proteins containing 6 putative transmembrane domains. See KCNA1 (176260). Su et al. (1997) identified ESTs encoding 2 novel putative potassium channels, KH1 and KH2 (603788). By screening a fetal brain library with a probe derived from the KH1 EST, they isolated cDNAs corresponding to the entire KH1 coding region. The KH1 gene shares 88% nucleotide homology with a rat potassium channel gene, IK8. The predicted 495-amino acid human protein contains 6 putative transmembrane domains. Northern blot analysis revealed that KH1 was expressed as a 5-kb mRNA in all tissues tested, with the highest levels in heart. A 2.4-kb transcript was detected only in brain. By fluorescence in situ hybridization, Su et al. (1997) mapped the KCNF1 gene to 2p25

[1161] Full details of the abovementioned studies are described in the following publications, the disclosure of which are hereby incorporated by reference:

[1162] u, K.; Kyaw, H.; Fan, P.; Zeng, Z.; Shell, B. K.; Carter, K. C.; Li, Y. Isolation, characterization, and mapping of two human potassium channels. Biochem. Biophys. Res. Commun. 241: 675-681, 1997.

[1163] Further studies establishing the function and utilities of KCNF1 are found in John Hopkins OMIM database record ID 603787, and in references numbered 879 listed hereinbelow.

[1164] Reference is now made to KCNK3 BINDING SITE. potassium channel, subfamily K, member 3 (TASK-1) (KCNK3) is a target gene of GAM26, corresponding to GAM26-TARGET GENE of FIG. 26A. KCNK3 BINDING SITE is a binding site found in an untranslated region of KCNK3, corresponding to BINDING SITE of FIG. 26A. FIG. 26D illustrates the complementarity of the nucleotide sequence of KCNK3 BINDING SITE, designated SEQ ID:223599, to the nucleotide sequence of GAM26 RNA of FIG. 26A, designated SEQ ID:20604.

[1165] A further function of GAM26 is therefore inhibition of potassium channel, subfamily K, member 3 (TASK-1) (KCNK3), a gene which encodes a Protein that is a ph-dependent, voltage-insensitive, background potassium channel. Accordingly, utilities of GAM26 include diagnosis and treatment of the abovementioned diseases and clinical conditions.

[1166] The function of KCNK3 has been established by previous studies. Potassium channels are ubiquitous multisubunit membrane proteins that regulate membrane potential in numerous cell types. One family of mammalian K+ channels is characterized by the presence of 4 transmembrane domains and 2 P domains per subunit; this family includes TASK, TWIK (KCNK1; 601745), and TREK (KCNK2; 603219). Duprat et al. (1997) identified mouse expressed sequence tags with similarity to TREK and TWIK and cloned a corresponding cDNA from a mouse brain library. The mouse cDNA was used to clone the human counterpart from a kidney cDNA library. The human cDNA, designated TASK, encodes a 394-amino acid polypeptide with 85% identity to the mouse ortholog. The sequence contains consensus sites for N-linked glycosylation and for phosphorylation at the C-terminal. Northern blot analysis showed that TASK is expressed in a variety of human tissues, with highest levels in pancreas and placenta. Expression of the TASK cDNA revealed that the functional protein creates currents that are K(+)-selective, instantaneous, and noninactivating. These currents showed an outward rectification when external K+ was low, but evinced absence of activation and inactivation kinetics as well as voltage independence, characteristics of so-called leak or background conductances. TASK currents were very sensitive to small changes in extracellular pH, suggesting that TASK has a role in cellular responses to changes in extracellular pH. Lesage and Lazdunski (1998) used a radiation hybrid mapping panel to map the human KCNK3 gene to chromosome 2p23 between markers WI13615 and WI11298. By fluorescence in situ hybridization, Manjunath et al. (1999) mapped the KCNK3 gene to 2p24.1-p23.3 and the mouse homolog to chromosome 5B.

[1167] Full details of the abovementioned studies are described in the following publications, the disclosure of which are hereby incorporated by reference:

[1168] esage, F.; Lazdunski, M.: Mapping of human potassium channel genes TREK-1 (KCNK2) and TASK (KCNK3) to chromosomes 1q41 and 2p23. Genomics 51: 478-479, 1998. PubMed ID: 9721223 3. Manjunath, N. A.; Bray-Ward, P.; Goldstein, S. A. N.; Gallagher, P. G.: Assignment of the 2P domain, acid-sensitive potassium channel OAT1 gene KCNK3 to human chromosome bands 2p24.1-p23.3 and murine 5B by in situ hybridization. Cytogenet. Cell Genet. 86: 242-243, 1999.

[1169] Further studies establishing the function and utilities of KCNK3 are found in John Hopkins OMIM database record ID 603220, and in references numbered 880-882 listed hereinbelow.

[1170] Referring now to KCNK3 BINDING SITE. potassium channel, subfamily K, member 3 (TASK-1) (KCNK3) is a target gene of GAM26, corresponding to GAM26-TARGET GENE of FIG. 26A. KCNK3 BINDING SITE is a binding site found in an untranslated region of KCNK3, corresponding to BINDING SITE of FIG. 26A. FIG. 26D illustrates the complementarity of the nucleotide sequence of KCNK3 BINDING SITE, designated SEQ ID:223678, to the nucleotide sequence of GAM26 RNA of FIG. 26A, designated SEQ ID:20604.

[1171] Yet a further function of GAM26 is therefore inhibition of potassium channel, subfamily K, member 3 (TASK-1) (KCNK3), a gene which encodes a Protein that is a ph-dependent, voltage-insensitive, background potassium channel. Accordingly, utilities of GAM26 include diagnosis and treatment of the abovementioned diseases and clinical conditions. The function and utilities of KCNK3 have been established by previous studies, as described hereinabove with reference to FIG. 26D.

[1172] Referring now to KCNK3 BINDING SITE. potassium channel, subfamily K, member 3 (TASK-1) (KCNK3) is a target gene of GAM26, corresponding to GAM26-TARGET GENE of FIG. 26A. KCNK3 BINDING SITE is a binding site found in an untranslated region of KCNK3, corresponding to BINDING SITE of FIG. 26A. FIG. 26D illustrates the complementarity of the nucleotide sequence of KCNK3 BINDING SITE, designated SEQ ID:223685, to the nucleotide sequence of GAM26 RNA of FIG. 26A, designated SEQ ID:20604.

[1173] Another function of GAM26 is therefore inhibition of potassium channel, subfamily K, member 3 (TASK-1) (KCNK3), a gene which encodes a Protein that is a ph-dependent, voltage-insensitive, background potassium channel. Accordingly, utilities of GAM26 include diagnosis and treatment of the abovementioned diseases and clinical conditions. The function and utilities of KCNK3 have been established by previous studies, as described hereinabove with reference to FIG. 26D.

[1174] Reference is now made to KCNMB4 BINDING SITE. potassium large conductance calcium-activated channel, subfamily M, be (KCNMB4) is a target gene of GAM26, corresponding to GAM26-TARGET GENE of FIG. 26A. KCNMB4 BINDING SITE is a binding site found in an untranslated region of KCNMB4, corresponding to BINDING SITE of FIG. 26A. FIG. 26D illustrates the complementarity of the nucleotide sequence of KCNMB4 BINDING SITE, designated SEQ ID:224477, to the nucleotide sequence of GAM26 RNA of FIG. 26A, designated SEQ ID:20604.

[1175] Yet another function of GAM26 is therefore inhibition of potassium large conductance calcium-activated channel, subfamily M, be (KCNMB4), a gene which encodes a Protein that regulates gating kinetics of slow K channels in a Ca-sensitive manner. Accordingly, utilities of GAM26 include diagnosis and treatment of the abovementioned diseases and clinical conditions.

[1176] The function of KCNMB4 has been established by previous studies. The large conductance, calcium-activated potassium (BK) channel is a member of the Shaker-related 6-transmembrane domain potassium channel superfamily that is sensitive to voltage and calcium. BK channels are composed of a pore-forming alpha subunit (KCNMA1, or HSLO; 600150) and, in some tissues, a beta subunit. The beta-1 subunit (KCNMB1; 603951) is expressed predominantly in smooth muscle cells, whereas the beta-2 subunit (KCNMB2; 605214) is expressed in endocrine tissue, such as adrenal chromaffin cells. By searching EST databases, Behrens et al. (2000) and Brenner et al. (2000) identified cDNAs encoding KCNMB4. Sequence analysis predicted that the 210-amino acid KCNMB4 protein contains 2 conserved transmembrane domains and an extracellular domain containing an N-glycosylation site and 4 cys residues; however, like KCNMB3 (605222), KCNMB4 lacks the putative charybdotoxin/iberiotoxin-binding site. RNA dot blot analysis by Behrens et al. (2000) revealed high and specific expression of KCNMB4 in central nervous system tissue, with no expression in normeuronal tissue. Northern blot analysis by Behrens et al. (2000) and Brenner et al. (2000) detected major 1.9- and minor 3.0- and 6.1-kb KCNMB4 transcripts in all brain tissues. Functional analysis of the effects of KCNMB4 on KCNMA1 showed that KCNMB4 slows activation kinetics, leads to steeper calcium sensitivity, and shifts the voltage range of BK current activation to more negative potentials than does KCNMB1. KCNMA1/KCNMB4 channels were not blocked by charybdotoxin or iberiotoxin and were activated by 17-beta-estradiol (Behrens et al., 2000). By electronic PCR, Behrens et al. (2000) mapped the KCNMB4 gene to 12q14.1-q15

[1177] Full details of the abovementioned studies are described in the following publications, the disclosure of which are hereby incorporated by reference:

[1178] ehrens, R.; Nolting, A.; Reimann, F.; Schwarz, M.; Waldschutz, R.; Pongs, O.: hKCNMB3 and hKCNMB4, cloning and characterization of two members of the large-conductance calcium-activated potassium channel beta subunit family. FEBS Lett. 474: 99-106, 2000. PubMed ID: 10828459 2. Brenner, R.; Jegla, T. J.; Wickenden, A.; Liu, Y.; Aldrich, R. W.: Cloning and functional characterization of novel large conductance calcium-activated potassium channel beta subunits, hKCNMB3 and hKCNMB4. J. Biol. Chem. 275: 6453-6461, 2000.

[1179] Further studies establishing the function and utilities of KCNMB4 are found in John Hopkins OMIM database record ID 605223, and in references numbered 883-884 listed hereinbelow.

[1180] Referring now to KCNMB4 BINDING SITE. potassium large conductance calcium-activated channel, subfamily M, be (KCNMB4) is a target gene of GAM26, corresponding to GAM26-TARGET GENE of FIG. 26A. KCNMB4 BINDING SITE is a binding site found in an untranslated region of KCNMB4, corresponding to BINDING SITE of FIG. 26A. FIG. 26D illustrates the complementarity of the nucleotide sequence of KCNMB4 BINDING SITE, designated SEQ ID:224480, to the nucleotide sequence of GAM26 RNA of FIG. 26A, designated SEQ ID:20604.

[1181] An additional function of GAM26 is therefore inhibition of potassium large conductance calcium-activated channel, subfamily M, be (KCNMB4), a gene which encodes a Protein that regulates gating kinetics of slow K channels in a Ca-sensitive manner. Accordingly, utilities of GAM26 include diagnosis and treatment of the abovementioned diseases and clinical conditions. The function and utilities of KCNMB4 have been established by previous studies, as described hereinabove with reference to FIG. 26D.

[1182] Reference is now made to KCNS2 BINDING SITE. potassium voltage-gated channel, delayed-rectifier, subfamily S, membe (KCNS2) is a target gene of GAM26, corresponding to GAM26-TARGET GENE of FIG. 26A. KCNS2 BINDING SITE is a binding site found in an untranslated region of KCNS2, corresponding to BINDING SITE of FIG. 26A. FIG. 26D illustrates the complementarity of the nucleotide sequence of KCNS2 BINDING SITE, designated SEQ ID:224998, to the nucleotide sequence of GAM26 RNA of FIG. 26A, designated SEQ ID:20604.

[1183] A further function of GAM26 is therefore inhibition of potassium voltage-gated channel, delayed-rectifier, subfamily S, membe (KCNS2), a gene which encodes a Protein that mediates the voltage-dependent potassium ion permeability of excitable membranes. Accordingly, utilities of GAM26 include diagnosis and treatment of the abovementioned diseases and clinical conditions.

[1184] The function of KCNS2 has been established by previous studies. See KCNS1 (602905). By searching an expressed sequence tag (EST) database with the peptide sequence of the silent Kv8.1 alpha subunit, Salinas et al. (1997) identified human cDNAs encoding KCNS2, which they called Kv9.2. Using these ESTs, the authors isolated a mouse Kcns2 cDNA from a brain cDNA library. The predicted 477-amino acid Kcns2 protein has all of the structural characteristics of an outward rectifier Kv alpha subunit, namely 6 transmembrane domains, a transmembrane region with 5 positively charged amino acids, and a conserved pore-forming region. Several putative phosphorylation sites are located in the cytoplasmic regions. Northern blot analysis showed that Kcns2 is expressed only in the brain. In situ hybridization detected high levels of Kcns2 mRNA in the olfactory bulb, cerebral cortex, hippocampal formation, habenula, basolateral amygdaloid nuclei, and cerebellum; expression was also found in the retina and spinal cord. Salinas et al. (1997) demonstrated that Kcns2 does not have potassium channel activity by itself but can modulate the activities of the Kv2.1 (see KCNB1; 600397) and Kv2.2 alpha subunits. By fluorescence in situ hybridization and radiation hybrid mapping, Banfi et al. (1996) mapped an EST (GenBank R19352) corresponding to the human KCNS2 gene (Salinas et al., 1997) to 8q22.

[1185] Full details of the abovementioned studies are described in the following publications, the disclosure of which are hereby incorporated by reference:

[1186] anfi, S.; Borsani, G.; Rossi, E.; Bernard, L.; Guffanti, A.; Rubboli, F.; Marchitiello, A.; Giglio, S.; Coluccia, E.; Zollo, M.; Zuffardi, O.; Ballabio, A.: Identification and mapping of human cDNAs homologous to Drosophila mutant genes through EST database searching. Nature Genet. 13: 167-174, 1996. PubMed ID: 8640222 2. Salinas, M.; Duprat, F.; Heurteaux, C.; Hugnot, J.-P.; Lazdunski, M.: New modulatory alpha subunits for mammalian Shab K(+) channels. J. Biol. Chem. 272: 24371-24379, 1997.

[1187] Further studies establishing the function and utilities of KCNS2 are found in John Hopkins OMIM database record ID 602906, and in references numbered 885-886 listed hereinbelow.

[1188] Reference is now made to KRAS2 BINDING SITE. v-Ki-ras2 Kirsten rat sarcoma 2 viral oncogene homolog (KRAS2) is a target gene of GAM26, corresponding to GAM26-TARGET GENE of FIG. 26A. KRAS2 BINDING SITE is a binding site found in an untranslated region of KRAS2, corresponding to BINDING SITE of FIG. 26A. FIG. 26D illustrates the complementarity of the nucleotide sequence of KRAS2 BINDING SITE, designated SEQ ID:229032, to the nucleotide sequence of GAM26 RNA of FIG. 26A, designated SEQ ID:20604.

[1189] Yet a further function of GAM26 is therefore inhibition of v-Ki-ras2 Kirsten rat sarcoma 2 viral oncogene homolog (KRAS2), a gene which encodes a Protein that ras proteins bind gdp/gtp and possess intrinsic gtpase activity. and is associated with LUNG CANCER and STOMACH CANCER. Accordingly, utilities of GAM26 include diagnosis and treatment of the abovementioned diseases and clinical conditions.

[1190] The function of KRAS2 has been established by previous studies. See 190020. KRAS2 is on chromosome 12; KRAS1P, a pseudogene, is on chromosome 6. Weinberg (1982) suggested that the then-recognized cellular oncogenes could be assigned to a small number of gene families; e.g., the ras family with at least 4 distinct oncogenes, and the src-yes-mos family with another 3. The probable role of at least 2 oncogenes in normal differentiation is indicated by the findings of transcription of KRAS and the McDonough strain of feline sarcoma virus (FMS) during mouse development (Muller et al., 1983). Furthermore, the differences in transcription in different tissues suggested a specific role for each: FMS was expressed in extraembryonic structures or in transport in these tissues, whereas KRAS was expressed ubiquitously. KRAS, with a length of more than 30 kb, is much larger than HRAS (190020) or NRAS (164790). Although the 3 ras genes, HRAS, KRAS, and NRAS, have different genetic structures, all code for proteins of 189 amino acid residues, generically designated p21. These genes acquire malignant properties by single point mutations that affect the incorporation of the 12th or 61st amino acid residue of their respective p21. KRAS is involved in malignancy much more often than is HRAS. In a study of 96 human tumors or tumor cell lines in the NIH 3T3 transforming system, Pulciani et al. (1982) found a mutated HRAS locus only in T24 bladder cancer cells, whereas transforming KRAS genes were identified in 8 different carcinomas and sarcomas. Holland et al. (2000) transferred, in a tissue-specific manner, genes encoding activated forms of Ras and Akt (164730) to astrocytes and neural progenitors in mice. Holland et al. (2000) found that although neither activated Ras nor Akt alone was sufficient to induce glioblastoma multiforme (GBM; 137800) formation, the combination of activated Ras and Akt induced high-grade gliomas with the histologic features of human GBMs. These tumors appeared to arise after gene transfer to neural progenitors, but not after transfer to differentiated astrocytes. Increased activity of RAS is found in many human GBMs, and Holland et al. (2000) demonstrated that Akt activity is increased in most of these tumors, implying that combined activation of these 2 pathways accurately models the biology of this disease. Bezieau et al. (2001) used ARMS (allele-specific amplification method) to evaluate the incidence of NRAS- and KRAS2-activating mutations in patients with multiple myeloma and related disorders. Mutations were more frequent in KRAS2 than in NRAS. The authors concluded that early mutations in these 2 oncogenes may play a major role in the oncogenesis of multiple myeloma and primary plasma cell leukemia. Rajagopalan et al. (2002) systematically evaluated mutation in BRAF (164757) and KRAS in 330 colorectal tumors. There were 32 mutations in BRAF, 28 with a V599E mutation (164757.0001) and 1 each with the R4611 (164757.0002), 1462S (164757.0003), G463E (164757.0004), or K600E (164757.0005) mutations. All but 2 mutations seemed to be heterozygous, and in all 20 cases for which normal tissue was available, the mutations were shown to be somatic. In the same set of tumors there were 169 mutations in KRAS. No tumor exhibited mutations in both BRAF and KRAS. There was also a striking difference in the frequency of BRAF mutations between cancers with and without mismatch repair deficiency. All but 1 of the 15 BRAF mutations identified in mismatch repair deficient cases resulted in a V599E substitution. Rajagopalan et al. (2002) concluded their results provide strong support for the hypothesis that BRAF and KRAS mutations are equivalent in their tumorigenic effects. Both genes seem to be mutated at a similar phase of tumorigenesis, after initiation but before malignant conversion. Moreover, no tumor concurrently contained both BRAF and KRAS mutations.

[1191] Animal model experiments lend further support to the function of KRAS2. Costa et al. (2002) crossed Nf1 heterozygote mice with mice heterozygous for a null mutation in the Kras gene and tested the Nf1 descendants. They found that the double heterozygotes with decreased Ras function had improved learning relative to Nf1 heterozygote mice. Costa et al. (2002) also showed that the Nf1 +/− mice have increased GABA-mediated inhibition and specific deficits in long-term potentiation, both of which can be reversed by decreasing Ras function. Costa et al. (2002) concluded that learning deficits associated with Nf1 may be caused by excessive Ras activity, which leads to impairments in long-term potentiation caused by increased GABA-mediated inhibition.

[1192] It is appreciated that the abovementioned animal model for KRAS2 is acknowledged by those skilled in the art as a scientifically valid animal model, as can be further appreciated from the publications sited hereinbelow.

[1193] Full details of the abovementioned studies are described in the following publications, the disclosure of which are hereby incorporated by reference:

[1194] osta, R. M.; Federov, N. B.; Kogan, J. H.; Murphy, G. G.; Stern, J.; Ohno, M.; Kucherlapati, R.; Jacks, T.; Silva, A. J.: Mechanism for the learning deficits in a mouse model of neurofibromatosis type 1. Nature 415: 526-530, 2002. PubMed ID: 11793011 39. Rajagopalan, H.; Bardelli, A.; Lengauer, C.; Kinzler, K. W.; Vogelstein, B.; Velculescu, V. E.: RAF/RAS oncogenes and mismatch-repair status. (Letter) Nature 418: 934 only, 2002.

[1195] Further studies establishing the function and utilities of KRAS2 are found in John Hopkins OMIM database record ID 190070, and in references numbered 887-942 listed hereinbelow.

[1196] Referring now to KRAS2 BINDING SITE. v-Ki-ras2 Kirsten rat sarcoma 2 viral oncogene homolog (KRAS2) is a target gene of GAM26, corresponding to GAM26-TARGET GENE of FIG. 26A. KRAS2 BINDING SITE is a binding site found in an untranslated region of KRAS2, corresponding to BINDING SITE of FIG. 26A. FIG. 26D illustrates the complementarity of the nucleotide sequence of KRAS2 BINDING SITE, designated SEQ ID:229035, to the nucleotide sequence of GAM26 RNA of FIG. 26A, designated SEQ ID:20604.

[1197] Another function of GAM26 is therefore inhibition of v-Ki-ras2 Kirsten rat sarcoma 2 viral oncogene homolog (KRAS2), a gene which encodes a Protein that ras proteins bind gdp/gtp and possess intrinsic gtpase activity. and is associated with LUNG CANCER and STOMACH CANCER. Accordingly, utilities of GAM26 include diagnosis and treatment of the abovementioned diseases and clinical conditions. The function and utilities of KRAS2 have been established by previous studies, as described hereinabove with reference to FIG. 26D.

[1198] Referring now to KRAS2 BINDING SITE. v-Ki-ras2 Kirsten rat sarcoma 2 viral oncogene homolog (KRAS2) is a target gene of GAM26, corresponding to GAM26-TARGET GENE of FIG. 26A. KRAS2 BINDING SITE is a binding site found in an untranslated region of KRAS2, corresponding to BINDING SITE of FIG. 26A. FIG. 26D illustrates the complementarity of the nucleotide sequence of KRAS2 BINDING SITE, designated SEQ ID:229036, to the nucleotide sequence of GAM26 RNA of FIG. 26A, designated SEQ ID:20604.

[1199] Yet another function of GAM26 is therefore inhibition of v-Ki-ras2 Kirsten rat sarcoma 2 viral oncogene homolog (KRAS2), a gene which encodes a Protein that ras proteins bind gdp/gtp and possess intrinsic gtpase activity. and is associated with LUNG CANCER and STOMACH CANCER. Accordingly, utilities of GAM26 include diagnosis and treatment of the abovementioned diseases and clinical conditions. The function and utilities of KRAS2 have been established by previous studies, as described hereinabove with reference to FIG. 26D.

[1200] Referring now to KRAS2 BINDING SITE. v-Ki-ras2 Kirsten rat sarcoma 2 viral oncogene homolog (KRAS2) is a target gene of GAM26, corresponding to GAM26-TARGET GENE of FIG. 26A. KRAS2 BINDING SITE is a binding site found in an untranslated region of KRAS2, corresponding to BINDING SITE of FIG. 26A. FIG. 26D illustrates the complementarity of the nucleotide sequence of KRAS2 BINDING SITE, designated SEQ ID:229050, to the nucleotide sequence of GAM26 RNA of FIG. 26A, designated SEQ ID:20604.

[1201] An additional function of GAM26 is therefore inhibition of v-Ki-ras2 Kirsten rat sarcoma 2 viral oncogene homolog (KRAS2), a gene which encodes a Protein that ras proteins bind gdp/gtp and possess intrinsic gtpase activity. and is associated with LUNG CANCER and STOMACH CANCER. Accordingly, utilities of GAM26 include diagnosis and treatment of the abovementioned diseases and clinical conditions. The function and utilities of KRAS2 have been established by previous studies, as described hereinabove with reference to FIG. 26D.

[1202] Referring now to KRAS2 BINDING SITE. v-Ki-ras2 Kirsten rat sarcoma 2 viral oncogene homolog (KRAS2) is a target gene of GAM26, corresponding to GAM26-TARGET GENE of FIG. 26A. KRAS2 BINDING SITE is a binding site found in an untranslated region of KRAS2, corresponding to BINDING SITE of FIG. 26A. FIG. 26D illustrates the complementarity of the nucleotide sequence of KRAS2 BINDING SITE, designated SEQ ID:229059, to the nucleotide sequence of GAM26 RNA of FIG. 26A, designated SEQ ID:20604.

[1203] A further function of GAM26 is therefore inhibition of v-Ki-ras2 Kirsten rat sarcoma 2 viral oncogene homolog (KRAS2), a gene which encodes a Protein that ras proteins bind gdp/gtp and possess intrinsic gtpase activity. and is associated with LUNG CANCER and STOMACH CANCER. Accordingly, utilities of GAM26 include diagnosis and treatment of the abovementioned diseases and clinical conditions. The function and utilities of KRAS2 have been established by previous studies, as described hereinabove with reference to FIG. 26D.

[1204] Reference is now made to LASS1 BINDING SITE. longevity assurance (LAG1, S. cerevisiae) homolog 1 (LASS1) is a target gene of GAM26, corresponding to GAM26-TARGET GENE of FIG. 26A. LASS1 BINDING SITE is a binding site found in an untranslated region of LASS1, corresponding to BINDING SITE of FIG. 26A. FIG. 26D illustrates the complementarity of the nucleotide sequence of LASS1 BINDING SITE, designated SEQ ID:231693, to the nucleotide sequence of GAM26 RNA of FIG. 26A, designated SEQ ID:20604.

[1205] Yet a further function of GAM26 is therefore inhibition of longevity assurance (LAG1, S. cerevisiae) homolog 1 (LASS1), a gene which encodes a Enzyme that may mediate cell differentiation events during embryonic development. Accordingly, utilities of GAM26 include diagnosis and treatment of the abovementioned diseases and clinical conditions.

[1206] The function of LASS1 has been established by previous studies. Longevity assurance gene-1 (Lag1) is preferentially expressed in young yeast, i.e., yeast cells that have undergone a small number of cell divisions. By screening genomic and cDNA libraries using a yeast Lag1 probe and degenerate PCR primers, followed by database searching, Jiang et al. (1998) identified a cDNA encoding LASS1. LASS1 had been identified previously by Lee (1991), who designated it UOG1 for upstream of GDF1 (602880). Lee (1991) showed that the potential 350-amino acid human and mouse UOG1 proteins are 81% identical. Jiang et al. (1998) determined that the deduced LASS1 protein contains a conserved 52-residue stretch termed the Lag1 motif, as well as a transmembrane domain. Complementation analysis indicated that LASS1, but not a similar gene, TRAM (605190), can replace yeast Lag1 in spite of limited amino acid homology. Northern blot analysis revealed expression of a 3.0-kb transcript in brain, skeletal muscle, and testis, as well as in glioblastoma and neuroblastoma cell lines By PCR screening of a BAC library, Jiang et al. (1998) determined that the LASS1 gene contains 8 exons and spans approximately 30 kb. The translation start codon is in a GC-rich region. There are no TATA boxes.

[1207] Full details of the abovementioned studies are described in the following publications, the disclosure of which are hereby incorporated by reference:

[1208] iang, J. C.; Kirchman, P. A.; Zagulski, M.; Hunt, J.; Jazwinski, S. M.: Homologs of the yeast longevity gene LAG1 in Caenorhabditis elegans and human. Genome Res. 8: 1259-1272, 1998. PubMed ID: 9872981 2. Lee, S.-J.: Expression of growth/differentiation factor 1 in the nervous system: conservation of a bicistronic structure. Proc. Nat. Acad. Sci. 88: 4250-4254, 1991.

[1209] Further studies establishing the function and utilities of LASS1 are found in John Hopkins OMIM database record ID 606919, and in references numbered 943-944 listed hereinbelow.

[1210] Reference is now made to LASS2 BINDING SITE. (LASS2) is a target gene of GAM26, corresponding to GAM26-TARGET GENE of FIG. 26A. LASS2 BINDING SITE is a binding site found in an untranslated region of LASS2, corresponding to BINDING SITE of FIG. 26A. FIG. 26D illustrates the complementarity of the nucleotide sequence of LASS2 BINDING SITE, designated SEQ ID:231822, to the nucleotide sequence of GAM26 RNA of FIG. 26A, designated SEQ ID:20604.

[1211] Another function of GAM26 is therefore inhibition of (LASS2), a gene which encodes a Protein that interacts with asialoglycoprotein receptor-1. Accordingly, utilities of GAM26 include diagnosis and treatment of the abovementioned diseases and clinical conditions.

[1212] The function of LASS2 has been established by previous studies. Longevity assurance gene-1 (Lag1) is preferentially expressed in young yeast, i.e., yeast cells that have undergone a small number of cell divisions. Yeast lifespan can be increased or decreased by mutation or overexpression of this gene. By EST database searching for homologs of Lag1, followed by 5-prime RACE, Pan et al. (2001) identified a cDNA encoding LASS2. The deduced 230-amino acid protein is 29% identical to LASS1 (606919) over 224 amino acids. It has 4 transmembrane helices (2 fewer than most Lag1 homologs), a Lag1 motif, and a C-terminal acidic domain. Northern blot analysis revealed expression of a 2.4-kb transcript in kidney and liver, with lower levels in brain, heart, placenta, and lung. GENE FUNCTION By yeast 2-hybrid screening of liver and fetal brain cDNA libraries with LASS2 as bait, followed by GST pull-down assays, Pan et al. (2001) showed that LASS2 interacts with asialoglycoprotein receptor-1 (ASGR1; 108360) and -2 (ASGR2; 108361), the C-terminal half of OCT1 (SLC22A1; 602607), and ATP6L (108745). Expression of LASS2 in hepatocellular carcinoma cell lines led to suppression of cancer cell growth

[1213] Full details of the abovementioned studies are described in the following publications, the disclosure of which are hereby incorporated by reference:

[1214] an, H.; Qin, W.-X.; Huo, K.-K.; Wan, D.-F.; Yu, Y.; Xu, Z.-G.; Hu, Q.-D.; Gu, K. T.; Zhou, X.-M.; Jiang, H.-Q.; Zhang, P.-P.; Huang, Y.; Li, Y.-Y.; Gu, J.-R.: Cloning, mapping, and characterization of a human homologue of the yeast longevity assurance gene LAG1. Genomics 77: 58-64, 2001.

[1215] Further studies establishing the function and utilities of LASS2 are found in John Hopkins OMIM database record ID 606920, and in references numbered 945 listed hereinbelow.

[1216] Reference is now made to LMO2 BINDING SITE. LIM domain only 2 (rhombotin-like 1) (LMO2) is a target gene of GAM26, corresponding to GAM26-TARGET GENE of FIG. 26A. LMO2 BINDING SITE is a binding site found in an untranslated region of LMO2, corresponding to BINDING SITE of FIG. 26A. FIG. 26D illustrates the complementarity of the nucleotide sequence of LMO2 BINDING SITE, designated SEQ ID:236309, to the nucleotide sequence of GAM26 RNA of FIG. 26A, designated SEQ ID:20604.

[1217] Yet another function of GAM26 is therefore inhibition of LIM domain only 2 (rhombotin-like 1) (LMO2), a gene which encodes a Protein that binds to the basic helix-loop-helix protein tal-1. and is associated with lymphoblastic leukemia. Accordingly, utilities of GAM26 include diagnosis and treatment of the abovementioned diseases and clinical conditions.

[1218] The function of LMO2 has been established by previous studies. Rhombotin comprises a multigene family. Rhombotin-1, implicated in an unusual subset of T-cell acute lymphoblastic leukemia, is located in the 11p15 region. A second member of the family, rhombotin-2, maps to 11p13 (see 186921). The known translocation breakpoints in the T-ALL cluster are at the 5-prime end of the RBTN2 gene within 25 kb of the presumed transcriptional start site Royer-Pokora et al. (1991) cloned 70 kb of DNA from 11p13 at the site of a recurrent translocation in T-cell leukemia: t(11;14)(p13;q11). The translocation involves the TCR-delta gene (186810) on 14q11 and a new site on 11p13. They found 2 new and 10 previously identified translocations mapping within 25 kb of each other on 11p13 and constituting the so-called 11p13 T-cell translocation cluster (11p13 ttc). A search for expressed sequences surrounding the breakpoint cluster region identified a gene telomeric of all breakpoints that was overexpressed in 3 T-ALL samples with a t(11;14). This new gene, called T-cell translocation gene-2 (TTG2), encodes a small cysteine-rich protein. It showed 48% amino acid identity with T-cell translocation gene-1, or rhombotin (186921), in 11p15. Both proteins contain 2 copies of a cysteine-rich motif. The proteins encoded by these 2 translocation-deregulated genes belong to a class of cysteine-rich proteins with the LIM motif and are important in normal development.

[1219] Full details of the abovementioned studies are described in the following publications, the disclosure of which are hereby incorporated by reference:

[1220] Royer-Pokora, B.; Loos, U.; Ludwig, W.-D.: TTG-2, a new gene encoding a cysteine-rich protein with the LIM motif, is overexpressed in acute T-cell leukaemia with the t(11;14)(p13;q11). Oncogene 6: 1887-1893, 1991.

[1221] Further studies establishing the function and utilities of LMO2 are found in John Hopkins OMIM database record ID 180385, and in references numbered 946-950 listed hereinbelow.

[1222] Referring now to LMO2 BINDING SITE. LIM domain only 2 (rhombotin-like 1) (LMO2) is a target gene of GAM26, corresponding to GAM26-TARGET GENE of FIG. 26A. LMO2 BINDING SITE is a binding site found in an untranslated region of LMO2, corresponding to BINDING SITE of FIG. 26A. FIG. 26D illustrates the complementarity of the nucleotide sequence of LMO2 BINDING SITE, designated SEQ ID:236311, to the nucleotide sequence of GAM26 RNA of FIG. 26A, designated SEQ ID:20604.

[1223] An additional function of GAM26 is therefore inhibition of LIM domain only 2 (rhombotin-like 1) (LMO2), a gene which encodes a Protein that binds to the basic helix-loop-helix protein tal-1. and is associated with lymphoblastic leukemia. Accordingly, utilities of GAM26 include diagnosis and treatment of the abovementioned diseases and clinical conditions. The function and utilities of LMO2 have been established by previous studies, as described hereinabove with reference to FIG. 26D.

[1224] Referring now to LMO2 BINDING SITE. LIM domain only 2 (rhombotin-like 1) (LMO2) is a target gene of GAM26, corresponding to GAM26-TARGET GENE of FIG. 26A. LMO2 BINDING SITE is a binding site found in an untranslated region of LMO2, corresponding to BINDING SITE of FIG. 26A. FIG. 26D illustrates the complementarity of the nucleotide sequence of LMO2 BINDING SITE, designated SEQ ID:236328, to the nucleotide sequence of GAM26 RNA of FIG. 26A, designated SEQ ID:20604.

[1225] A further function of GAM26 is therefore inhibition of LIM domain only 2 (rhombotin-like 1) (LMO2), a gene which encodes a Protein that binds to the basic helix-loop-helix protein tal-1. and is associated with lymphoblastic leukemia. Accordingly, utilities of GAM26 include diagnosis and treatment of the abovementioned diseases and clinical conditions. The function and utilities of LMO2 have been established by previous studies, as described hereinabove with reference to FIG. 26D.

[1226] Referring now to LMO2 BINDING SITE. LIM domain only 2 (rhombotin-like 1) (LMO2) is a target gene of GAM26, corresponding to GAM26-TARGET GENE of FIG. 26A. LMO2 BINDING SITE is a binding site found in an untranslated region of LMO2, corresponding to BINDING SITE of FIG. 26A. FIG. 26D illustrates the complementarity of the nucleotide sequence of LMO2 BINDING SITE, designated SEQ ID:236380, to the nucleotide sequence of GAM26 RNA of FIG. 26A, designated SEQ ID:20604.

[1227] Yet a further function of GAM26 is therefore inhibition of LIM domain only 2 (rhombotin-like 1) (LMO2), a gene which encodes a Protein that binds to the basic helix-loop-helix protein tal-1. and is associated with lymphoblastic leukemia. Accordingly, utilities of GAM26 include diagnosis and treatment of the abovementioned diseases and clinical conditions. The function and utilities of LMO2 have been established by previous studies, as described hereinabove with reference to FIG. 26D.

[1228] Referring now to LMO2 BINDING SITE. LIM domain only 2 (rhombotin-like 1) (LMO2) is a target gene of GAM26, corresponding to GAM26-TARGET GENE of FIG. 26A. LMO2 BINDING SITE is a binding site found in an untranslated region of LMO2, corresponding to BINDING SITE of FIG. 26A. FIG. 26D illustrates the complementarity of the nucleotide sequence of LMO2 BINDING SITE, designated SEQ ID:236383, to the nucleotide sequence of GAM26 RNA of FIG. 26A, designated SEQ ID:20604.

[1229] Another function of GAM26 is therefore inhibition of LIM domain only 2 (rhombotin-like 1) (LMO2), a gene which encodes a Protein that binds to the basic helix-loop-helix protein tal-1. and is associated with lymphoblastic leukemia. Accordingly, utilities of GAM26 include diagnosis and treatment of the abovementioned diseases and clinical conditions. The function and utilities of LMO2 have been established by previous studies, as described hereinabove with reference to FIG. 26D.

[1230] Referring now to LMO2 BINDING SITE. LIM domain only 2 (rhombotin-like 1) (LMO2) is a target gene of GAM26, corresponding to GAM26-TARGET GENE of FIG. 26A. LMO2 BINDING SITE is a binding site found in an untranslated region of LMO2, corresponding to BINDING SITE of FIG. 26A. FIG. 26D illustrates the complementarity of the nucleotide sequence of LMO2 BINDING SITE, designated SEQ ID:236384, to the nucleotide sequence of GAM26 RNA of FIG. 26A, designated SEQ ID:20604.

[1231] Yet another function of GAM26 is therefore inhibition of LIM domain only 2 (rhombotin-like 1) (LMO2), a gene which encodes a Protein that binds to the basic helix-loop-helix protein tal-1. and is associated with lymphoblastic leukemia. Accordingly, utilities of GAM26 include diagnosis and treatment of the abovementioned diseases and clinical conditions. The function and utilities of LMO2 have been established by previous studies, as described hereinabove with reference to FIG. 26D.

[1232] Referring now to LMO2 BINDING SITE. LIM domain only 2 (rhombotin-like 1) (LMO2) is a target gene of GAM26, corresponding to GAM26-TARGET GENE of FIG. 26A. LMO2 BINDING SITE is a binding site found in an untranslated region of LMO2, corresponding to BINDING SITE of FIG. 26A. FIG. 26D illustrates the complementarity of the nucleotide sequence of LMO2 BINDING SITE, designated SEQ ID:236385, to the nucleotide sequence of GAM26 RNA of FIG. 26A, designated SEQ ID:20604.

[1233] An additional function of GAM26 is therefore inhibition of LIM domain only 2 (rhombotin-like 1) (LMO2), a gene which encodes a Protein that binds to the basic helix-loop-helix protein tal-1. and is associated with lymphoblastic leukemia. Accordingly, utilities of GAM26 include diagnosis and treatment of the abovementioned diseases and clinical conditions. The function and utilities of LMO2 have been established by previous studies, as described hereinabove with reference to FIG. 26D.

[1234] Reference is now made to LRP8 BINDING SITE. low density lipoprotein receptor-related protein 8, apolipoprotein e r (LRP8) is a target gene of GAM26, corresponding to GAM26-TARGET GENE of FIG. 26A. LRP8 BINDING SITE is a binding site found in an untranslated region of LRP8, corresponding to BINDING SITE of FIG. 26A. FIG. 26D illustrates the complementarity of the nucleotide sequence of LRP8 BINDING SITE, designated SEQ ID:238167, to the nucleotide sequence of GAM26 RNA of FIG. 26A, designated SEQ ID:20604.

[1235] A further function of GAM26 is therefore inhibition of low density lipoprotein receptor-related protein 8, apolipoprotein e r (LRP8), a gene which encodes a receptor that binds vldl and transports it into cells by endocytosis. Accordingly, utilities of GAM26 include diagnosis and treatment of the abovementioned diseases and clinical conditions.

[1236] The function of LRP8 has been established by previous studies. Apolipoprotein E (APOE; 107741) is a 34-kD lipophilic protein that mediates high-affinity binding of APOE-containing lipoproteins to the low density lipoprotein receptor (see LDLR; 606945) and the very low density lipoprotein receptor (VLDLR; 192977). By screening a human placenta cDNA library with degenerate oligonucleotides based on a highly conserved region between LDLR and VLDLR, Kim et al. (1996) identified a cDNA encoding APOE receptor-2 (APOER2). The predicted 963-amino acid protein contains a putative 41-amino acid signal sequence and 5 functional domains that resemble those of LDLR and VLDLR. APOER2 appears specific for APOE-containing ligands: LDLR-deficient mammalian cells expressing APOER bound APOE-rich beta-VLDL with high affinity, but bound LDL and VLDL with much lower affinities. Northern blot analysis revealed that APOER2 is expressed as 4.5- and 8.5-kb mRNAs in brain and placenta Kim et al. (1997) reported that the APOER2 gene contains 19 exons and spans approximately 60 kb. Alternative splicing generates multiple transcripts encoding receptors with different numbers of cysteine-rich repeats in the ligand-binding domain

[1237] Full details of the abovementioned studies are described in the following publications, the disclosure of which are hereby incorporated by reference:

[1238] Kim, D.-H.; Iijima, H.; Goto, K.; Sakai, J.; Ishii, H.; Kim, H.-J.; Suzuki, H.; Kondo, H.; Saeki, S.; Yamamoto, T.: Human apolipoprotein E receptor 2: a novel lipoprotein receptor of the low density lipoprotein receptor family predominantly expressed in brain. J. Biol. Chem. 271: 8373-8380, 1996. PubMed ID: 8626535. Kim, D.-H.; Magoori, K.; Inoue, T. R.; Mao, C. C.; Kim, H.-J.; Suzuki, H.; Fujita, T.; Endo, Y.; Saeki, S.; Yamamoto, T. T.: Exon/intron organization, chromosome localization, alternative splicing, and transcription units of the human apolipoprotein E receptor 2 gene. J. Biol. Chem. 272: 8498-8504, 1997.

[1239] Further studies establishing the function and utilities of LRP8 are found in John Hopkins OMIM database record ID 602600, and in references numbered 497, 951-952 and 504 listed hereinbelow.

[1240] Referring now to LRP8 BINDING SITE. low density lipoprotein receptor-related protein 8, apolipoprotein e r (LRP8) is a target gene of GAM26, corresponding to GAM26-TARGET GENE of FIG. 26A. LRP8 BINDING SITE is a binding site found in an untranslated region of LRP8, corresponding to BINDING SITE of FIG. 26A. FIG. 26D illustrates the complementarity of the nucleotide sequence of LRP8 BINDING SITE, designated SEQ ID:238167, to the nucleotide sequence of GAM26 RNA of FIG. 26A, designated SEQ ID:20604.

[1241] Yet a further function of GAM26 is therefore inhibition of low density lipoprotein receptor-related protein 8, apolipoprotein e r (LRP8), a gene which encodes a receptor that binds vldl and transports it into cells by endocytosis. Accordingly, utilities of GAM26 include diagnosis and treatment of the abovementioned diseases and clinical conditions. The function and utilities of LRP8 have been established by previous studies, as described hereinabove with reference to FIG. 26D.

[1242] Referring now to LRP8 BINDING SITE. low density lipoprotein receptor-related protein 8, apolipoprotein e r (LRP8) is a target gene of GAM26, corresponding to GAM26-TARGET GENE of FIG. 26A. LRP8 BINDING SITE is a binding site found in an untranslated region of LRP8, corresponding to BINDING SITE of FIG. 26A. FIG. 26D illustrates the complementarity of the nucleotide sequence of LRP8 BINDING SITE, designated SEQ ID:238168, to the nucleotide sequence of GAM26 RNA of FIG. 26A, designated SEQ ID:20604.

[1243] Another function of GAM26 is therefore inhibition of low density lipoprotein receptor-related protein 8, apolipoprotein e r (LRP8), a gene which encodes a receptor that binds vldl and transports it into cells by endocytosis. Accordingly, utilities of GAM26 include diagnosis and treatment of the abovementioned diseases and clinical conditions. The function and utilities of LRP8 have been established by previous studies, as described hereinabove with reference to FIG. 26D.

[1244] Referring now to LRP8 BINDING SITE. low density lipoprotein receptor-related protein 8, apolipoprotein e r (LRP8) is a target gene of GAM26, corresponding to GAM26-TARGET GENE of FIG. 26A. LRP8 BINDING SITE is a binding site found in an untranslated region of LRP8, corresponding to BINDING SITE of FIG. 26A. FIG. 26D illustrates the complementarity of the nucleotide sequence of LRP8 BINDING SITE, designated SEQ ID:238188, to the nucleotide sequence of GAM26 RNA of FIG. 26A, designated SEQ ID:20604.

[1245] Yet another function of GAM26 is therefore inhibition of low density lipoprotein receptor-related protein 8, apolipoprotein e r (LRP8), a gene which encodes a receptor that binds vldl and transports it into cells by endocytosis. Accordingly, utilities of GAM26 include diagnosis and treatment of the abovementioned diseases and clinical conditions. The function and utilities of LRP8 have been established by previous studies, as described hereinabove with reference to FIG. 26D.

[1246] Referring now to LRP8 BINDING SITE. low density lipoprotein receptor-related protein 8, apolipoprotein e r (LRP8) is a target gene of GAM26, corresponding to GAM26-TARGET GENE of FIG. 26A. LRP8 BINDING SITE is a binding site found in an untranslated region of LRP8, corresponding to BINDING SITE of FIG. 26A. FIG. 26D illustrates the complementarity of the nucleotide sequence of LRP8 BINDING SITE, designated SEQ ID:238204, to the nucleotide sequence of GAM26 RNA of FIG. 26A, designated SEQ ID:20604.

[1247] An additional function of GAM26 is therefore inhibition of low density lipoprotein receptor-related protein 8, apolipoprotein e r (LRP8), a gene which encodes a receptor that binds vldl and transports it into cells by endocytosis. Accordingly, utilities of GAM26 include diagnosis and treatment of the abovementioned diseases and clinical conditions. The function and utilities of LRP8 have been established by previous studies, as described hereinabove with reference to FIG. 26D.

[1248] Referring now to LRP8 BINDING SITE. low density lipoprotein receptor-related protein 8, apolipoprotein e r (LRP8) is a target gene of GAM26, corresponding to GAM26-TARGET GENE of FIG. 26A. LRP8 BINDING SITE is a binding site found in an untranslated region of LRP8, corresponding to BINDING SITE of FIG. 26A. FIG. 26D illustrates the complementarity of the nucleotide sequence of LRP8 BINDING SITE, designated SEQ ID:238208, to the nucleotide sequence of GAM26 RNA of FIG. 26A, designated SEQ ID:20604.

[1249] A further function of GAM26 is therefore inhibition of low density lipoprotein receptor-related protein 8, apolipoprotein e r (LRP8), a gene which encodes a receptor that binds vldl and transports it into cells by endocytosis. Accordingly, utilities of GAM26 include diagnosis and treatment of the abovementioned diseases and clinical conditions. The function and utilities of LRP8 have been established by previous studies, as described hereinabove with reference to FIG. 26D.

[1250] Referring now to LRP8 BINDING SITE. low density lipoprotein receptor-related protein 8, apolipoprotein e r (LRP8) is a target gene of GAM26, corresponding to GAM26-TARGET GENE of FIG. 26A. LRP8 BINDING SITE is a binding site found in an untranslated region of LRP8, corresponding to BINDING SITE of FIG. 26A. FIG. 26D illustrates the complementarity of the nucleotide sequence of LRP8 BINDING SITE, designated SEQ ID:238239, to the nucleotide sequence of GAM26 RNA of FIG. 26A, designated SEQ ID:20604.

[1251] Yet a further function of GAM26 is therefore inhibition of low density lipoprotein receptor-related protein 8, apolipoprotein e r (LRP8), a gene which encodes a receptor that binds vldl and transports it into cells by endocytosis. Accordingly, utilities of GAM26 include diagnosis and treatment of the abovementioned diseases and clinical conditions. The function and utilities of LRP8 have been established by previous studies, as described hereinabove with reference to FIG. 26D.

[1252] Reference is now made to MAD BINDING SITE. MAX dimerization protein (MAD) is a target gene of GAM26, corresponding to GAM26-TARGET GENE of FIG. 26A. MAD BINDING SITE is a binding site found in an untranslated region of MAD, corresponding to BINDING SITE of FIG. 26A. FIG. 26D illustrates the complementarity of the nucleotide sequence of MAD BINDING SITE, designated SEQ ID:241104, to the nucleotide sequence of GAM26 RNA of FIG. 26A, designated SEQ ID:20604.

[1253] Another function of GAM26 is therefore inhibition of MAX dimerization protein (MAD), a gene which encodes a Protein that forms a heterodimer with MAX and represses transcription, antagonizes c-Myc (MYC), and promotes cellular differentiation. Accordingly, utilities of GAM26 include diagnosis and treatment of the abovementioned diseases and clinical conditions.

[1254] The function of MAD has been established by previous studies. The MAD and MXI1 (600020) genes encode proteins that belong to a distinct subfamily of MAX-interacting proteins. The MAX protein (154950) specifically interacts with the MYC protein family (190080) by forming heterodimers mediated by their basic-helix-loop-helix-leucine zipper interaction domains. Binding to MAX is essential for MYC transcription and transforming activity; MYC homodimers are inactive. Both MAD and MXI1 bind MAX in vitro, forming a sequence-specific DNA-binding complex similar to the MYC-MAX heterodimer. MAD and MYC compete for binding to MAX. In addition, MAD acts as a transcriptional repressor, while MYC appears to function as an activator. MXI1 also appears to lack a transcriptional activation domain. Therefore, MXI1 and MAD might antagonize MYC function and are candidate tumor suppressor genes. Edelhoff et al. (1994) mapped the human MAD and MXI1 genes to 2p13 and 10q25, respectively, by fluorescence in situ hybridization. The homologous gene in the mouse was mapped to chromosome 6 by interspecific backcross analysis. Shapiro et al. (1994) confirmed the assignments of the MAD and MXI1 genes to chromosomes 2p13-p12 and 10q24-q25, respectively, by somatic cell mapping and fluorescence in situ hybridization. The designation MAD was derived from MAX dimerizer (Eisenman, 1994).

[1255] Full details of the abovementioned studies are described in the following publications, the disclosure of which are hereby incorporated by reference:

[1256] Edelhoff, S.; Ayer, D. E.; Zervos, A. S.; Steingrimsson, E.; Jenkins, N. A.; Copeland, N. G.; Eisenman, R. N.; Brent, R.; Disteche, C. M.: Mapping of two genes encoding members of a distinct subfamily of MAX interacting proteins: MAD to human chromosome 2 and mouse chromosome 6, and MXI1 to chromosome 10 and mouse chromosome 19. Oncogene 9: 665-668, 1994. PubMed ID: 8290278 Shapiro, D. N.; Valentine, V.; Eagle, L.; Yin, X.; Morris, S. W.; Prochownik, E. V.: Assignment of the human MAD and MXI1 genes to chromosomes 2p12-p13 and 10q24-q25. Genomics 23: 282-285, 1994.

[1257] Further studies establishing the function and utilities of MAD are found in John Hopkins OMIM database record ID 600021, and in references numbered 953-955 listed hereinbelow.

[1258] Reference is now made to MAD1L1 BINDING SITE. MAD1 (mitotic arrest deficient, yeast, homolog)-like 1 (MAD1L1) is a target gene of GAM26, corresponding to GAM26-TARGET GENE of FIG. 26A. MAD1L1 BINDING SITE is a binding site found in an untranslated region of MAD1L1, corresponding to BINDING SITE of FIG. 26A. FIG. 26D illustrates the complementarity of the nucleotide sequence of MAD1L1 BINDING SITE, designated SEQ ID:241126, to the nucleotide sequence of GAM26 RNA of FIG. 26A, designated SEQ ID:20604.

[1259] Yet another function of GAM26 is therefore inhibition of MAD1 (mitotic arrest deficient, yeast, homolog)-like 1 (MAD1L1), a gene which encodes a Protein that appears to play a role in cytokinesis, cell shape, and specialized functions such as secretion and capping.Mitotic spindle checkpoint protein 1; may be a target for type 1 T cell leukemia virus oncoprotein Tax. Accordingly, utilities of GAM26 include diagnosis and treatment of the abovementioned diseases and clinical conditions.

[1260] The function of MAD1L1 has been established by previous studies. Aneuploidy is a characteristic of most human cancers, and defects of mitotic checkpoints appear to play a role in carcinogenesis. MAD1L1 is a checkpoint gene, and its dysfunction is associated with chromosomal instability. By RT-PCR-SSCP and nucleotide sequencing, Tsukasaki et al. (2001) performed a mutation search on the MAD1L1 gene in a total of 44 cell lines (hematopoietic, prostate, osteosarcoma, breast, glioblastoma, and lung) and 133 fresh cancer cells (hematopoietic, prostate, breast, and glioblastoma). Eight mutations consisting of missense, nonsense, and frameshift mutations were found, together with a number of nucleotide polymorphisms. All of the alterations in cell lines were heterozygous. The frequency of mutations was relatively high in prostate cancer (2 of 7 cell lines and 2 of 33 tumor specimens). Tsukasaki et al. (2001) placed a mutant truncated MAD1L1 gene from a lymphoma sample into 3 different cell lines and found that it was less inhibitory than wildtype MAD1L1 at decreasing cell proliferation. Coexpression experiments showed that the mutant form had a dominant-negative effect. Furthermore, this mutant impaired the mitotic checkpoint as shown by decreased mitotic indices in cells expressing mutant MAD1L1 after culture with the microtubule-disrupting agent nocodazole. The results suggested a pathogenic role of mutations in the MAD1L1 gene in various types of human cancer Gene-specific targeting of the SIN3 corepressor complex (see 602949) by DNA-bound repressors is an important mechanism of gene silencing in eukaryotes. The SIN3 corepressor specifically associates with a diverse group of transcriptional repressors, including members of the MAD family, that play crucial roles in development. Brubaker et al. (2000) determined the nuclear magnetic resonance imaging structure of the complex formed by the PAH2 domain of mammalian Sin3a with the transrepression domain (SIN3-interaction domain, or SID) of human MAD1. They showed that the Sin3a PAH2 domain and the MAD1 SID undergo mutual folding transitions upon complex formation, generating an unusual left-handed, 4-helix bundle structure and an amphipathic alpha helix, respectively. The SID helix is wedged within a deep hydrophobic pocket defined by 2 PAH2 helices. Luo et al. (2002) showed that RNA interference-mediated suppression of MAD1 function in mammalian cells caused loss of MAD2 kinetochore localization and impairment of the spindle checkpoint. MAD1 and CDC20 (603618) contain MAD2-binding motifs that share a common consensus, and the authors identified a class of MAD2-binding peptides (MBPs) with a similar consensus. Binding of one of these ligands, MBP1, triggered an extensive rearrangement of the tertiary structure of MAD2. MAD2 also underwent a similar striking structural change upon binding to a MAD1 or CDC20 binding motif peptide. These data suggested that, upon checkpoint activation, MAD1 recruits MAD2 to unattached kinetochores and may promote binding of MAD2 to CDC20

[1261] Full details of the abovementioned studies are described in the following publications, the disclosure of which are hereby incorporated by reference:

[1262] Tsukasaki, K.; Miller, C. W.; Greenspun, E.; Eshaghian, S.; Kawabata, H.; Fujimoto, T.; Tomonaga, M.; Sawyers, C.; Said, J. W.; Koeffler, H. P. Mutations in the mitotic check point gene, MAD1L1, in human cancers. Oncogene 20: 3301-3305, 2001. PubMed ID: 11423979 Luo, X.; Tang, Z.; Rizo, J.; Yu, H.: The Mad2 spindle checkpoint protein undergoes similar major conformational changes upon binding to either Mad1 or Cdc20. Molec. Cell 9: 59-71, 2002.

[1263] Further studies establishing the function and utilities of MAD1L1 are found in John Hopkins OMIM database record ID 602686, and in references numbered 956-960 listed hereinbelow.

[1264] Reference is now made to MAF BINDING SITE. v-maf musculoaponeurotic fibrosarcoma (avian) oncogene homolog (MAF) is a target gene of GAM26, corresponding to GAM26-TARGET GENE of FIG. 26A. MAF BINDING SITE is a binding site found in an untranslated region of MAF, corresponding to BINDING SITE of FIG. 26A. FIG. 26D illustrates the complementarity of the nucleotide sequence of MAF BINDING SITE, designated SEQ ID:241961, to the nucleotide sequence of GAM26 RNA of FIG. 26A, designated SEQ ID:20604.

[1265] An additional function of GAM26 is therefore inhibition of v-maf musculoaponeurotic fibrosarcoma (avian) oncogene homolog (MAF), a gene which encodes a transcripition factor that is a transcription factor; contains a leucine zipper motif and is associated with hereditary congenital cataract. Accordingly, utilities of GAM26 include diagnosis and treatment of the abovementioned diseases and clinical conditions.

[1266] The function of MAF has been established by previous studies. Nishizawa et al. (1989) identified in the human genome a cellular analog of v-maf which was isolated from the provirus of the avian musculoaponeurotic fibrosarcoma virus AS42. The deduced amino acid sequence of the v-maf gene product contains a leucine zipper motif similar to that found in a number of DNA binding proteins, including the gene products of the FOS (164810), JUN (165160), and MYC (190080) oncogenes. Through the use of a cDNA probe for in situ hybridization, Yoshida et al. (1991) localized the MAF gene to 16q22-q23. Blank and Andrews (1997) reviewed the MAF transcription factors, a unique subclass of basic-leucine zipper transcription (bZIP) factors. Members of the MAF family appear to play important roles in the regulation of differentiation. Human congenital cataract and ocular anterior segment dysgenesis both demonstrate extensive genetic and phenotypic heterogeneity. Kim et al. (1999) demonstrated that the homozygous null mutant Maf mouse embryo exhibits defective lens formation and microphthalmia. Jamieson et al. (2002) identified a family where ocular developmental abnormalities (cataract, anterior segment dysgenesis, and microphthalmia) cosegregated with a translocation, t(5;16)(p15.3;q23.2), in both balanced and unbalanced forms. Cloning the 16q23.2 breakpoint demonstrated that it transected the genomic-control domain of MAF. The 16q23.2 breakpoint transected the common fragile site FRA16D (see 605131), providing a molecular demonstration of a germline break in a common fragile site. Through mutation screening of a panel of patients with hereditary congenital cataract, Jamieson et al. (2002) identified a mutation in the MAF gene in a 3-generation family with cataract, microcornea, and iris coloboma

[1267] Full details of the abovementioned studies are described in the following publications, the disclosure of which are hereby incorporated by reference:

[1268] Jamieson, R. V.; Perveen, R.; Kerr, B.; Carette, M.; Yardley, J.; Heon, E.; Wirth, M. G.; van Heyningen, V.; Donnai, D.; Munier, F.; Black, G. C. M.: Domain disruption and mutation of the bZIP transcription factor, MAF, associated with cataract, ocular anterior segment dysgenesis and coloboma. Hum. Molec. Genet. 11: 33-42, 2002. PubMed ID: 11772997 Kim, J. I.; Li, T.; Ho, I. C.; Grusby, M. J.; Glimcher, L. H.: Requirement for the c-Maf transcription factor in crystallin gene regulation and lens development. Proc. Nat. Acad. Sci. 96: 3781-3785, 1999.

[1269] Further studies establishing the function and utilities of MAF are found in John Hopkins OMIM database record ID 177075, and in references numbered 961-965 listed hereinbelow.

[1270] Referring now to ADARB1 BINDING SITE. adenosine deaminase, RNA-specific, B1 (homolog of rat RED1) (ADARB1) is a target gene of GAM26, corresponding to GAM26-TARGET GENE of FIG. 26A. ADARB1 BINDING SITE is a binding site found in an untranslated region of ADARB1, corresponding to BINDING SITE of FIG. 26A. FIG. 26D illustrates the complementarity of the nucleotide sequence of ADARB1 BINDING SITE, designated SEQ ID:241978, to the nucleotide sequence of GAM26 RNA of FIG. 26A, designated SEQ ID:20604.

[1271] A further function of GAM26 is therefore inhibition of adenosine deaminase, RNA-specific, B1 (homolog of rat RED1) (ADARB1), a gene which encodes a Enzyme that RNA editing involves the deamination of adenosines at specific sites. Accordingly, utilities of GAM26 include diagnosis and treatment of the abovementioned diseases and clinical conditions. The function and utilities of ADARB1 have been established by previous studies, as described hereinabove with reference to FIG. 26D.

[1272] Referring now to BCL11B BINDING SITE. B-cell CLL/lymphoma 11B (zinc finger protein) (BCL11B) is a target gene of GAM26, corresponding to GAM26-TARGET GENE of FIG. 26A. BCL11B BINDING SITE is a binding site found in an untranslated region of BCL11B, corresponding to BINDING SITE of FIG. 26A. FIG. 26D illustrates the complementarity of the nucleotide sequence of BCL11B BINDING SITE, designated SEQ ID:241978, to the nucleotide sequence of GAM26 RNA of FIG. 26A, designated SEQ ID:20604.

[1273] Yet a further function of GAM26 is therefore inhibition of B-cell CLL/lymphoma 11B (zinc finger protein) (BCL11B), a gene which encodes a Protein that is implicated in mouse and human leukemias and is associated with T-cell leukemia/lymphoma. Accordingly, utilities of GAM26 include diagnosis and treatment of the abovementioned diseases and clinical conditions. The function and utilities of BCL11B have been established by previous studies, as described hereinabove with reference to FIG. 26D.

[1274] Referring now to FMR1 BINDING SITE. fragile X mental retardation 1 (FMR1) is a target gene of GAM26, corresponding to GAM26-TARGET GENE of FIG. 26A. FMR1 BINDING SITE is a binding site found in an untranslated region of FMR1, corresponding to BINDING SITE of FIG. 26A. FIG. 26D illustrates the complementarity of the nucleotide sequence of FMR1 BINDING SITE, designated SEQ ID:241978, to the nucleotide sequence of GAM26 RNA of FIG. 26A, designated SEQ ID:20604.

[1275] Another function of GAM26 is therefore inhibition of fragile X mental retardation 1 (FMR1), a gene which encodes a Protein that is associated with fragile x syndrome. Accordingly, utilities of GAM26 include diagnosis and treatment of the abovementioned diseases and clinical conditions. The function and utilities of FMR1 have been established by previous studies, as described hereinabove with reference to FIG. 26D.

[1276] Referring now to MAF BINDING SITE. v-maf musculoaponeurotic fibrosarcoma (avian) oncogene homolog (MAF) is a target gene of GAM26, corresponding to GAM26-TARGET GENE of FIG. 26A. MAF BINDING SITE is a binding site found in an untranslated region of MAF, corresponding to BINDING SITE of FIG. 26A. FIG. 26D illustrates the complementarity of the nucleotide sequence of MAF BINDING SITE, designated SEQ ID:241978, to the nucleotide sequence of GAM26 RNA of FIG. 26A, designated SEQ ID:20604.

[1277] Yet another function of GAM26 is therefore inhibition of v-maf musculoaponeurotic fibrosarcoma (avian) oncogene homolog (MAF), a gene which encodes a transcripition factor that is a transcription factor; contains a leucine zipper motif and is associated with hereditary congenital cataract. Accordingly, utilities of GAM26 include diagnosis and treatment of the abovementioned diseases and clinical conditions. The function and utilities of MAF have been established by previous studies, as described hereinabove with reference to FIG. 26D.

[1278] Referring now to NPAS2 BINDING SITE. neuronal PAS domain protein 2 (NPAS2) is a target gene of GAM26, corresponding to GAM26-TARGET GENE of FIG. 26A. NPAS2 BINDING SITE is a binding site found in an untranslated region of NPAS2, corresponding to BINDING SITE of FIG. 26A. FIG. 26D illustrates the complementarity of the nucleotide sequence of NPAS2 BINDING SITE, designated SEQ ID:241978, to the nucleotide sequence of GAM26 RNA of FIG. 26A, designated SEQ ID:20604.

[1279] An additional function of GAM26 is therefore inhibition of neuronal PAS domain protein 2 (NPAS2), a gene which encodes a Protein that is a member of basic helix-loop-helix-PAS family of transcription factors. Accordingly, utilities of GAM26 include diagnosis and treatment of the abovementioned diseases and clinical conditions. The function and utilities of NPAS2 have been established by previous studies, as described hereinabove with reference to FIG. 26D.

[1280] Referring now to RELN BINDING SITE. reelin (RELN) is a target gene of GAM26, corresponding to GAM26-TARGET GENE of FIG. 26A. RELN BINDING SITE is a binding site found in an untranslated region of RELN, corresponding to BINDING SITE of FIG. 26A. FIG. 26D illustrates the complementarity of the nucleotide sequence of RELN BINDING SITE, designated SEQ ID:241978, to the nucleotide sequence of GAM26 RNA of FIG. 26A, designated SEQ ID:20604.

[1281] A further function of GAM26 is therefore inhibition of reelin (RELN), a gene which encodes a transcripition factor that is associated with norman-roberts syndrome. Accordingly, utilities of GAM26 include diagnosis and treatment of the abovementioned diseases and clinical conditions. The function and utilities of RELN have been established by previous studies, as described hereinabove with reference to FIG. 26D.

[1282] Referring now to ZNF6 BINDING SITE. zinc finger protein 6 (CMPX1) (ZNF6) is a target gene of GAM26, corresponding to GAM26-TARGET GENE of FIG. 26A. ZNF6 BINDING SITE is a binding site found in an untranslated region of ZNF6, corresponding to BINDING SITE of FIG. 26A. FIG. 26D illustrates the complementarity of the nucleotide sequence of ZNF6 BINDING SITE, designated SEQ ID:241978, to the nucleotide sequence of GAM26 RNA of FIG. 26A, designated SEQ ID:20604.

[1283] Yet a further function of GAM26 is therefore inhibition of zinc finger protein 6 (CMPX1) (ZNF6), a gene which encodes a Protein that is probably a transcriptional activator. Accordingly, utilities of GAM26 include diagnosis and treatment of the abovementioned diseases and clinical conditions. The function and utilities of ZNF6 have been established by previous studies, as described hereinabove with reference to FIG. 26D.

[1284] Reference is now made to MAFK BINDING SITE. v-maf musculoaponeurotic fibrosarcoma (avian) oncogene family, protein (MAFK) is a target gene of GAM26, corresponding to GAM26-TARGET GENE of FIG. 26A. MAFK BINDING SITE is a binding site found in an untranslated region of MAFK, corresponding to BINDING SITE of FIG. 26A. FIG. 26D illustrates the complementarity of the nucleotide sequence of MAFK BINDING SITE, designated SEQ ID:242287, to the nucleotide sequence of GAM26 RNA of FIG. 26A, designated SEQ ID:20604.

[1285] Another function of GAM26 is therefore inhibition of v-maf musculoaponeurotic fibrosarcoma (avian) oncogene family, protein (MAFK), a gene which encodes a transcripition factor that is involved in regulation of transcription at NEF2 sites. Accordingly, utilities of GAM26 include diagnosis and treatment of the abovementioned diseases and clinical conditions.

[1286] The function of MAFK has been established by previous studies. The developmentally regulated expression of the globin genes depends on upstream regulatory elements termed locus control regions (LCRs). LCRs are associated with powerful enhancer activity that is mediated by the transcription factor NFE2 (nuclear factor erythroid-2). NFE2 recognition sites are also present in the gene promoters of 2 heme biosynthetic enzymes, porphobilinogen deaminase (PBGD; 176000) and ferrochelatase (FECH; 177000). NFE2 DNA-binding activity consists of a heterodimer containing an 18-kD Maf protein (MafF, MafG (602020), or MafK) and p45 (601490). Both subunits are members of the activator protein-1 superfamily of basic leucine zipper (bZip) proteins (see 165160). Maf homodimers suppress transcription at NFE2 sites. Toki et al. (1997) isolated a cDNA encoding human MAFK. The MAFK gene encodes a 156-amino acid polypeptide which is widely expressed, with highest levels seen in heart, placenta, skeletal muscle, and kidney. Toki et al. (1997) showed that MAFK could heterodimerize not only with p45, but also with NFE2-related factor 1 (NRF1; 163260) and NFE2-related factor 2 (600492); these heterodimers bound to NFE2 sites in vitro. In vivo, MAFK/p45 and MAFK/NRF1 heterodimers stimulated transcription from NFE2 sites. Similar results were found with MAFG. Iwata et al. (1998) showed that MAFK is encoded by 3 exons spanning approximately 10 kb By use of 2 DNA mapping panels isolated from mice of a recombinant inbred strain set, Peters and Eicher (1994) demonstrated that the ubiquitous subunit is located on mouse chromosome 5. Since this region of the mouse genome shares linkage homology with human chromosome 7q, Peters and Eicher (1994) suggested that human NFE2U is probably located on 7q. Iwata et al. (1998) used FISH to map the MAFK gene to human chromosome 7p22. Motohashi et al. (2000) found that mouse embryos expressing abundant transgene-derived Mafk died of severe anemia, while lines expressing lower levels of small Maf lived to adulthood. Megakaryocytes from the latter overexpressing lines exhibited reduced proplatelet formation and MARE (Maf recognition element)-dependent transcription, phenocopying Mafg null mice (see Shavit et al. (1998)). When the Mafg null mice were bred to small Maf-overexpressing transgenic animals, both loss- and gain-of-function phenotypes were reversed

[1287] Full details of the abovementioned studies are described in the following publications, the disclosure of which are hereby incorporated by reference:

[1288] Toki, T.; Itoh, J.; Kitazawa, J.; Arai, K.; Hatakeyama, K.; Akasaka, J.; Igarashi, K.; Nomura, N.; Yokoyama, M.; Yamamoto, M.; Ito, E.: Human small Maf proteins form heterodimers with CNC family transcription factors and recognize the NF-E2 motif. Oncogene 14: 1901-1910, 1997. PubMed ID: 9150357 Motohashi, H.; Katsuoka, F.; Shavit, J. A.; Engel, J. D.; Yamamoto, M.: Positive or negative MARE-dependent transcriptional regulation is determined by the abundance of small Maf proteins. Cell 103: 865-875, 2000.

[1289] Further studies establishing the function and utilities of MAFK are found in John Hopkins OMIM database record ID 600197, and in references numbered 966-970 listed hereinbelow.

[1290] Reference is now made to MAN2A1 BINDING SITE. mannosidase, alpha, class 2A, member 1 (MAN2A1) is a target gene of GAM26, corresponding to GAM26-TARGET GENE of FIG. 26A. MAN2A1 BINDING SITE is a binding site found in an untranslated region of MAN2A1, corresponding to BINDING SITE of FIG. 26A. FIG. 26D illustrates the complementarity of the nucleotide sequence of MAN2A1 BINDING SITE, designated SEQ ID:243405, to the nucleotide sequence of GAM26 RNA of FIG. 26A, designated SEQ ID:20604.

[1291] Yet another function of GAM26 is therefore inhibition of mannosidase, alpha, class 2A, member 1 (MAN2A1), a gene which encodes a Enzyme that catalyzes the final hydrolytic step in the asparagine-linked oligosaccharide (N-glycan) maturation pathway and is associated with lupus erythematosus. Accordingly, utilities of GAM26 include diagnosis and treatment of the abovementioned diseases and clinical conditions.

[1292] The function of MAN2A1 has been established by previous studies. Alpha-mannosidase II catalyzes the first committed step in the biosynthesis of complex N-glycans. Genetic deficiency of this enzyme should abolish complex N-glycan production as reportedly does inhibition of the enzyme by swainsonine. Chui et al. (1997) found that mice in whom the alpha-mannosidase II gene had been disrupted developed a dyserythropoietic anemia concurrent with loss of erythrocyte complex N-glycans. Unexpectedly, nonerythroid cell types continued to produce complex N-glycans by an alternate pathway comprising a distinct alpha-mannosidase. These studies revealed cell type-specific variations in N-linked oligosaccharide biosynthesis and an essential role for alpha-mannosidase II in the formation of erythroid complex N-glycans. Alpha-mannosidase II deficiency elicited a phenotype in mice that corresponds to human congenital dyserythropoietic anemia type II. Although a genetic defect of MAN2A1 was thought to cause congenital dyserythropoietic anemia type II, or HEMPAS (224100), Gasparini et al. (1997) excluded it as a candidate gene by demonstrating linkage of the disorder to markers on chromosome 20. Protein glycosylation in the Golgi apparatus produces structural variation at the cell surface and contributes to immune self-recognition. Altered protein glycosylation and antibodies that recognize endogenous glycans have been associated with various autoimmune syndromes, with the possibility that such abnormalities may reflect genetic defects in glycan formation. Studying mice with a null allele for alpha-mannosidase II, Chui et al. (2001) showed that mutation in this gene, which regulates the hybrid to complex branching pattern of extracellular asparagine (N)-linked oligosaccharide chains (N-glycans), results in a systemic autoimmune disease similar to human systemic lupus erythematosus (152700). The findings demonstrated a genetic cause of autoimmune disease provoked by a defect in the pathway of protein N-glycosylation.

[1293] Full details of the abovementioned studies are described in the following publications, the disclosure of which are hereby incorporated by reference:

[1294] Chui, D.; Oh-Eda, M.; Liao, Y.-F.; Panneerselvam, K.; Lai, A.; Marek, K. W.; Freeze, H. H.; Moremen, K. W.; Fukuda, M. N.; Marth, J. D.: Alpha-mannosidase-II deficiency results in dyserythropoiesis and unveils an alternate pathway in oligosaccharide biosynthesis. Cell 90: 157-167, 1997. PubMed ID: 9230311 2. Chui, D.; Sellakumar, G.; Green, R. S.; Sutton-Smith, M.; McQuistan, T.; Marek, K. W.; Morris, H. R.; Dell, A.; Marth, J. D.: Genetic remodeling of protein glycosylation in vivo induces autoimmune disease. Proc. Nat. Acad. Sci. 98: 1142-1147, 2001.

[1295] Further studies establishing the function and utilities of MAN2A1 are found in John Hopkins OMIM database record ID 154582, and in references numbered 971-975 listed hereinbelow.

[1296] Reference is now made to MAP3K5 BINDING SITE. mitogen-activated protein kinase kinase kinase 5 (MAP3K5) is a target gene of GAM26, corresponding to GAM26-TARGET GENE of FIG. 26A. MAP3K5 BINDING SITE is a binding site found in an untranslated region of MAP3K5, corresponding to BINDING SITE of FIG. 26A. FIG. 26D illustrates the complementarity of the nucleotide sequence of MAP3K5 BINDING SITE, designated SEQ ID:244540, to the nucleotide sequence of GAM26 RNA of FIG. 26A, designated SEQ ID:20604.

[1297] An additional function of GAM26 is therefore inhibition of mitogen-activated protein kinase kinase kinase 5 (MAP3K5), a gene which encodes a Enzyme that phosphorylates and activates two different subgroups of map kinase kinases, mkk4/sek1 and mkk3/mapkk6 (or mkk6) overexpression induces apoptotic cell death. Accordingly, utilities of GAM26 include diagnosis and treatment of the abovementioned diseases and clinical conditions.

[1298] The function of MAP3K5 has been established by previous studies. Mitogen-activated protein kinase (MAPK) signaling cascades include MAPK or extracellular signal-regulated kinase (ERK), MAPK kinase (MAP2K, also called MKK or MEK), and MAPK kinase kinase (MAP3K, also called MAPKKK or MEKK). MAPKK kinase/MEKK phosphorylates and activates its downstream protein kinase, MAPK kinase/MEK, which in turn activates MAPK. The kinases of these signaling cascades are highly conserved, and homologs exist in yeast, Drosophila, and mammalian cells Ichijo et al. (1997) used a similar cloning strategy to identify a nearly identical MAPKKK cDNA, termed ASK1 for apoptosis signal-regulating kinase. The deduced protein contains 1,375 amino acids, and is most closely related to yeast SSK2 and SSK22, which are upstream regulators of yeast HOG1 MAPK. ASK1 expression complements a yeast mutant lacking functional SSK2 and SSK22. ASK1 also activates MKK3 (602315), MKK4 (SEK1), and MKK6 (601254). Overexpression of ASK1 induces apoptotic cell death, and ASK1 is activated in cells treated with tumor necrosis factor-alpha (TNFA; 191160). Nishitoh et al. (1998) showed that ASK1 interacts with members of the TRAF family and is activated by TRAF2 (601895) in the TNF-signaling pathway. After activation by TRAF2, ASK1 activates MKK4, which in turn activates JNK. Thus, ASK1 is a mediator of TRAF2-induced JNK activation.

[1299] Animal model experiments lend further support to the function of MAP3K5. Using a forward genetic screen of C. elegans mutants, Kim et al. (2002) showed that viable worms lacking esp2 and esp8, homologs of the mammalian MAP kinases SEK1 and ASK1, were highly susceptible to and died more rapidly from both a gram-negative bacterium, P. aeruginosa, and a gram-positive organism, E. faecalis, than wildtype worms. RNA-interference and biochemical analyses likewise implicated the p38 MAP kinase homolog, pmk1, in susceptibility to these pathogens. Kim et al. (2002) concluded that MAP kinase signaling, which is also involved in plant pathogen resistance, is a conserved element in innate metazoan immunity to diverse pathogens.

[1300] It is appreciated that the abovementioned animal model for MAP3K5 is acknowledged by those skilled in the art as a scientifically valid animal model, as can be further appreciated from the publications sited hereinbelow.

[1301] Full details of the abovementioned studies are described in the following publications, the disclosure of which are hereby incorporated by reference:

[1302] im, D. H.; Feinbaum, R.; Alloing, G.; Emerson, F. E.; Garsin, D. A.; Inoue, H.; Tanaka-Hino, M.; Hisamoto, N.; Matsumoto, K.; Tan, M.-W.; Ausubel, F. M.: A conserved p38 MAP kinase pathway in Caenorhabditis elegans innate immunity. Science 297: 623-626, 2002. PubMed ID: 12142542 Nishitoh, H.; Saitoh, M.; Mochida, Y.; Takeda, K.; Nakano, H.; Rothe, M.; Miyazono, K.; Ichijo, H.: ASK1 is essential for JNK/SAPK activation by TRAF2. Molec. Cell 2: 389-395, 1998.

[1303] Further studies establishing the function and utilities of MAP3K5 are found in John Hopkins OMIM database record ID 602448, and in references numbered 976-985 listed hereinbelow.

[1304] Reference is now made to MAP4K5 BINDING SITE. mitogen-activated protein kinase kinase kinase kinase 5 (MAP4K5) is a target gene of GAM26, corresponding to GAM26-TARGET GENE of FIG. 26A. MAP4K5 BINDING SITE is a binding site found in an untranslated region of MAP4K5, corresponding to BINDING SITE of FIG. 26A. FIG. 26D illustrates the complementarity of the nucleotide sequence of MAP4K5 BINDING SITE, designated SEQ ID:245274, to the nucleotide sequence of GAM26 RNA of FIG. 26A, designated SEQ ID:20604.

[1305] A further function of GAM26 is therefore inhibition of mitogen-activated protein kinase kinase kinase kinase 5 (MAP4K5), a gene which encodes a Enzyme that is a serine/threonine protein kinase required for spore wall development. activates Jun N-terminal kinase; member of the STE20 kinase family. Accordingly, utilities of GAM26 include diagnosis and treatment of the abovementioned diseases and clinical conditions.

[1306] The function of MAP4K5 has been established by previous studies. Protein kinases (PKs) are critical to the regulation of many cellular processes, including growth factor response, cytoskeletal changes, gene expression, and metabolism. Mitogen-activated PKs (MAPKs) are a family of serine/threonine PKs involved in highly conserved cascades that control these processes. MAPKs are activated by MAPK kinases (MAP2Ks), which are activated by MAP2K kinases (MAP3Ks), which are activated by MAP3K kinases (MAP4Ks). For example, ERK2 (MAPK1; 176948) is activated by phosphorylation of ser/thr residues by its upstream kinase, MEK1 (MAP2K1; 176872), which is itself activated by MEKK1 (MAP3K1; 600982). Another MAPK, JNK (MAPK8; 601158), is predominantly activated in response to stress. JNK expression is also regulated by upstream kinases (e.g, MAP2K4; 601335), which are activated by MAP3Ks. Homologs of the S. cerevisiae STE20 and SPS1 proteins are predicted to link the membrane with the cytoplasmic signaling machinery; see 602255. By screening a T-cell library with a PCR-derived probe that was similar to yeast STE20, Tung and Blenis (1997) obtained a cDNA encoding MAP4K5, which they called ‘kinase homologous to SPS1/STE20,’ or KHS. Sequence analysis revealed that the 846-amino acid MAP4K5 protein contains an N-terminal catalytic domain and shares 55% amino acid identity with MAP4K2 (603166). Northern blot analysis detected a 4.5-kb MAP4K5 transcript in all tissues tested, namely spleen, thymus, prostate, testis, ovary, small intestine, colon, and peripheral blood leukocytes. SDS-PAGE and immunoblot analyses determined that MAP4K5 is expressed as a 95-kD protein. Confocal laser microscopy demonstrated cytoplasmic expression of MAP4K5. Functional analyses showed that MAP4K5 has kinase activity and that it activates JNK but not ERK1 (MAPK3; 601795) or MAPK14 (600289) through MAP2K4.

[1307] Full details of the abovementioned studies are described in the following publications, the disclosure of which are hereby incorporated by reference:

[1308] Tung, R. M.; Blenis, J.: A novel human SPS1/STE20 homologue, KHS, activates Jun N-terminal kinase. Oncogene 14: 653-659, 1997.

[1309] Further studies establishing the function and utilities of MAP4K5 are found in John Hopkins OMIM database record ID 604923, and in references numbered 986 listed hereinbelow.

[1310] Referring now to MAP4K5 BINDING SITE. mitogen-activated protein kinase kinase kinase kinase 5 (MAP4K5) is a target gene of GAM26, corresponding to GAM26-TARGET GENE of FIG. 26A. MAP4K5 BINDING SITE is a binding site found in an untranslated region of MAP4K5, corresponding to BINDING SITE of FIG. 26A. FIG. 26D illustrates the complementarity of the nucleotide sequence of MAP4K5 BINDING SITE, designated SEQ ID:245277, to the nucleotide sequence of GAM26 RNA of FIG. 26A, designated SEQ ID:20604.

[1311] Yet a further function of GAM26 is therefore inhibition of mitogen-activated protein kinase kinase kinase kinase 5 (MAP4K5), a gene which encodes a Enzyme that is a serine/threonine protein kinase required for spore wall development. activates Jun N-terminal kinase; member of the STE20 kinase family. Accordingly, utilities of GAM26 include diagnosis and treatment of the abovementioned diseases and clinical conditions. The function and utilities of MAP4K5 have been established by previous studies, as described hereinabove with reference to FIG. 26D.

[1312] Referring now to MAP4K5 BINDING SITE. mitogen-activated protein kinase kinase kinase kinase 5 (MAP4K5) is a target gene of GAM26, corresponding to GAM26-TARGET GENE of FIG. 26A. MAP4K5 BINDING SITE is a binding site found in an untranslated region of MAP4K5, corresponding to BINDING SITE of FIG. 26A. FIG. 26D illustrates the complementarity of the nucleotide sequence of MAP4K5 BINDING SITE, designated SEQ ID:245293, to the nucleotide sequence of GAM26 RNA of FIG. 26A, designated SEQ ID:20604.

[1313] Another function of GAM26 is therefore inhibition of mitogen-activated protein kinase kinase kinase kinase 5 (MAP4K5), a gene which encodes a Enzyme that is a serine/threonine protein kinase required for spore wall development. activates Jun N-terminal kinase; member of the STE20 kinase family. Accordingly, utilities of GAM26 include diagnosis and treatment of the abovementioned diseases and clinical conditions. The function and utilities of MAP4K5 have been established by previous studies, as described hereinabove with reference to FIG. 26D.

[1314] Referring now to MAP4K5 BINDING SITE. mitogen-activated protein kinase kinase kinase kinase 5 (MAP4K5) is a target gene of GAM26, corresponding to GAM26-TARGET GENE of FIG. 26A. MAP4K5 BINDING SITE is a binding site found in an untranslated region of MAP4K5, corresponding to BINDING SITE of FIG. 26A. FIG. 26D illustrates the complementarity of the nucleotide sequence of MAP4K5 BINDING SITE, designated SEQ ID:245294, to the nucleotide sequence of GAM26 RNA of FIG. 26A, designated SEQ ID:20604.

[1315] Yet another function of GAM26 is therefore inhibition of mitogen-activated protein kinase kinase kinase kinase 5 (MAP4K5), a gene which encodes a Enzyme that is a serine/threonine protein kinase required for spore wall development. activates Jun N-terminal kinase; member of the STE20 kinase family. Accordingly, utilities of GAM26 include diagnosis and treatment of the abovementioned diseases and clinical conditions. The function and utilities of MAP4K5 have been established by previous studies, as described hereinabove with reference to FIG. 26D.

[1316] Reference is now made to MAPK1 BINDING SITE. mitogen-activated protein kinase 1 (MAPK1) is a target gene of GAM26, corresponding to GAM26-TARGET GENE of FIG. 26A. MAPK1 BINDING SITE is a binding site found in an untranslated region of MAPK1, corresponding to BINDING SITE of FIG. 26A. FIG. 26D illustrates the complementarity of the nucleotide sequence of MAPK1 BINDING SITE, designated SEQ ID:245382, to the nucleotide sequence of GAM26 RNA of FIG. 26A, designated SEQ ID:20604.

[1317] An additional function of GAM26 is therefore inhibition of mitogen-activated protein kinase 1 (MAPK1), a gene which encodes a Enzyme that phosphorylates microtubule-associated protein-2 (map2). myelin basic protein (mbp), and elk-1; may promote entry in the cell cycle. Accordingly, utilities of GAM26 include diagnosis and treatment of the abovementioned diseases and clinical conditions.

[1318] The function of MAPK1 has been established by previous studies. Forcet et al. (2002) showed that in embryonic kidney cells expressing full-length, but not cytoplasmic domain-truncated, DCC (120470), NTN1 (601614) causes increased transient phosphorylation and activity of ERK1 and ERK2, but not of JNK1 (601158), JNK2 (602896), or p38 (MAPK14; 600289). This phosphorylation was mediated by MEK1 and/or MEK2. NTN1 also activated the transcription factor ELK1 (311040) and serum response element-regulated gene expression. Immunoprecipitation analysis showed interaction of full-length DCC with MEK1/2 in the presence or absence of NTN1. Forcet et al. (2002) showed that activation of Dcc by Ntn1 in rat embryonic day-13 dorsal spinal cord stimulates and is required for the outgrowth of commissural axons and Erk1/2 activation. Immunohistochemical analysis demonstrated expression of activated Erk1/2 in embryonic commissural axons, and this expression was diminished in Dcc or Ntn1 knockout animals. Forcet et al. (2002) concluded that the MAPK pathway is involved in responses to NTN1 and proposed that ERK activation affects axonal growth by phosphorylation of microtubule-associated proteins and neurofilaments. Stefanovsky et al. (2001) showed that epidermal growth factor (131530) induces immediate, ERK1/ERK2-dependent activation of endogenous ribosomal transcription, while inactivation of ERK1/ERK2 causes an equally immediate reversion to the basal transcription level. ERK1/ERK2 was found to phosphorylate the architectural transcription factor UBF (600673) at amino acids 117 and 201 within HMG boxes 1 and 2, preventing their interaction with DNA. Mutation of these sites inhibited transcription activation and abrogated the transcriptional response to ERK1/ERK2. Thus, growth factor regulation of ribosomal transcription likely acts by a cyclic modulation of DNA architecture. The data suggested a central role for ribosome biogenesis in growth regulation

[1319] Full details of the abovementioned studies are described in the following publications, the disclosure of which are hereby incorporated by reference:

[1320] Forcet, C.; Stein, E.; Pays, L.; Corset, V.; Llambi, F.; Tessier-Lavigne, M.; Mehlen, P.: Netrin-1-mediated axon outgrowth requires deleted in colorectal cancer-dependent MAPK activation. Nature 417: 443-447, 2002. PubMed ID: 11986622. Stefanovsky, V. Y.; Pelletier, G.; Hannan, R.; Gagnon-Kugler, T.; Rothblum, L. I.; Moss, T.: An immediate response of ribosomal transcription to growth factor stimulation in mammals is mediated by ERK phosphorylation of UBF. Molec. Cell 8: 1063-1073, 2001.

[1321] Further studies establishing the function and utilities of MAPK1 are found in John Hopkins OMIM database record ID 176948, and in references numbered 987-1001 listed hereinbelow.

[1322] Referring now to MAPK1 BINDING SITE. mitogen-activated protein kinase 1 (MAPK1) is a target gene of GAM26, corresponding to GAM26-TARGET GENE of FIG. 26A. MAPK1 BINDING SITE is a binding site found in an untranslated region of MAPK1, corresponding to BINDING SITE of FIG. 26A. FIG. 26D illustrates the complementarity of the nucleotide sequence of MAPK1 BINDING SITE, designated SEQ ID:245394, to the nucleotide sequence of GAM26 RNA of FIG. 26A, designated SEQ ID:20604.

[1323] A further function of GAM26 is therefore inhibition of mitogen-activated protein kinase 1 (MAPK1), a gene which encodes a Enzyme that phosphorylates microtubule-associated protein-2 (map2). myelin basic protein (mbp), and elk-1; may promote entry in the cell cycle. Accordingly, utilities of GAM26 include diagnosis and treatment of the abovementioned diseases and clinical conditions. The function and utilities of MAPK1 have been established by previous studies, as described hereinabove with reference to FIG. 26D.

[1324] Reference is now made to MATK BINDING SITE. megakaryocyte-associated tyrosine kinase (MATK) is a target gene of GAM26, corresponding to GAM26-TARGET GENE of FIG. 26A. MATK BINDING SITE is a binding site found in an untranslated region of MATK, corresponding to BINDING SITE of FIG. 26A. FIG. 26D illustrates the complementarity of the nucleotide sequence of MATK BINDING SITE, designated SEQ ID:247365, to the nucleotide sequence of GAM26 RNA of FIG. 26A, designated SEQ ID:20604.

[1325] Yet a further function of GAM26 is therefore inhibition of megakaryocyte-associated tyrosine kinase (MATK), a gene which encodes a Enzyme that can phosphorylate members of the SRC family of PTKs at the regulatory tyrosine residue. Accordingly, utilities of GAM26 include diagnosis and treatment of the abovementioned diseases and clinical conditions.

[1326] The function of MATK has been established by previous studies. In the mouse, Klages et al. (1994) reported the molecular cloning and preliminary functional characterization of a nonreceptor protein tyrosine kinase (PTK) that is related to CSK (124095). This PTK, designated Ctk for CSK-type protein-tyrosine kinase, was found to be a 52-kD protein expressed primarily in brain and predicted to be structurally similar to CSK. Klages et al. (1994) found that, like CSK, Ctk can phosphorylate members of the SRC family of PTKs at the regulatory tyrosine residue. Thus, Ctk and CSK define a family of kinases that phosphorylate carboxy-terminal regulatory tyrosine residues. Protein-tyrosine kinases play major roles in signal transduction pathways. Bennett et al. (1994) cloned a novel tyrosine kinase, termed megakaryoctye-associated tyrosine kinase (MATK), from a human megakaryocyte cDNA library using degenerate PCR. The MATK cDNA encodes a 527-amino acid protein that shows 50% amino acid identity to CSK and has the structural features of the CSK subfamily: SRC homology SH (2) and SH3 domains, a catalytic domain, a unique N terminus, lack of myristylation signals, lack of a negative regulatory phosphorylation site, and lack of an autophosphorylation site. Bennett et al. (1994) localized the MATK protein to the cytoplasm of megakaryocytic cells using immunofluorescence and immunoblot analysis of subcellular fractions. They showed by Northern blotting that the MATK gene is expressed abundantly in megakaryocytes and at a lower level in adult brain as a 2.3-kb transcript; it was not detectably expressed in any other examined tissue. Bennett et al. (1994) found that MATK expression is upregulated in megakaryocytic cells that are induced to differentiate by phorbol ester. They suggested that MATK functions in signal transduction pathways that are important in megakaryocyte growth and/or differentiation. Avraham et al. (1995) showed that MATK can phosphorylate the SRC (176947) protein in vitro. Sakano et al. (1994) cloned the MATK cDNA, named HYL by them, and localized the gene to 19p13.3 using fluorescence in situ hybridization. Avraham et al. (1995) mapped the MATK gene to chromosome 19 using somatic cell hybrids and found that the murine Matk gene maps within a region of synteny on chromosome 10. Zrihan-Licht et al. (1997) reported that MATK is expressed in human breast cancer but not in the adjacent normal breast tissues, suggesting that MATK might be involved in signaling in some cases of breast cancer. Zrihan-Licht et al. (1997) demonstrated that MATK interacts with ErbB-2 (164870) in vivo upon heregulin stimulation and that this interaction occurs via the SH2 domain of MATK.

[1327] Full details of the abovementioned studies are described in the following publications, the disclosure of which are hereby incorporated by reference:

[1328] lages, S.; Adam, D.; Class, K.; Fargnoli, J.; Bolen, J. B.; Penhallow, R. C.: Ctk: a protein-tyrosine kinase related to Csk that defines an enzyme family. Proc. Nat. Acad. Sci. 91: 2597-2601, 1994. PubMed ID: 7511815 1. Avraham, S.; Jiang, S.; Ota, S.; Fu, Y.; Deng, B.; Dowler, L. L.; White, R. A.; Avraham, H.: Structural and functional studies of the intracellular tyrosine kinase MATK gene and its translated product. J. Biol. Chem. 270: 1833-1842, 1995.

[1329] Further studies establishing the function and utilities of MATK are found in John Hopkins OMIM database record ID 600038, and in references numbered 1002-1006 listed hereinbelow.

[1330] Reference is now made to MID2 BINDING SITE. midline 2 (MID2) is a target gene of GAM26, corresponding to GAM26-TARGET GENE of FIG. 26A. MID2 BINDING SITE is a binding site found in an untranslated region of MID2, corresponding to BINDING SITE of FIG. 26A. FIG. 26D illustrates the complementarity of the nucleotide sequence of MID2 BINDING SITE, designated SEQ ID:254906, to the nucleotide sequence of GAM26 RNA of FIG. 26A, designated SEQ ID:20604.

[1331] Another function of GAM26 is therefore inhibition of midline 2 (MID2), a gene which encodes a Protein that Has fibronectin type III domain. Also has fibronectin type III domain, similar to FXY/MID1. Accordingly, utilities of GAM26 include diagnosis and treatment of the abovementioned diseases and clinical conditions.

[1332] The function of MID2 has been established by previous studies. By searching an EST database to identify human homologs of the MID1 gene, Buchner et al. (1999) identified MID2, a transcript closely related to MID1. MID1 and MID2 display 84% similarity and 77% identity at the protein level, and 70% identity at the nucleotide level. Like MID1, MID2 displays a RING finger, 2 B-boxes, a coiled-coil, and a conserved RFP-like C-terminal domain. The mouse Mid2 protein shows 99.3% identity with human MID2. MID2 appears to be part of a linkage group conserved between mouse and man. Buchner et al. (1999) found that the MID2 gene contains 9 exons. The junction sequences were all in agreement with the 5-prime and 3-prime splice site consensus motifs, with the exception of the exon 6 5-prime splice site which showed the sequence GCAAGT instead of the consensus GT dinucleotide reported in all but 0.13% of donor splice site sequences (Shapiro and Senaphthy, 1987). MID1 and MID2 have similar intron-exon structures, with the exception of MID2 exon 6 which had 30 additional amino acids as compared with MID1.

[1333] Full details of the abovementioned studies are described in the following publications, the disclosure of which are hereby incorporated by reference:

[1334] uchner, G.; Montini, E.; Andolfi, G.; Quaderi, N.; Cainarca, S.; Messali, S.; Bassi, M. T.; Ballabio, A.; Meroni, G.; Franco, B.: MID2, a homologue of the Opitz syndrome gene MID1: similarities in subcellular localization and differences in expression during development. Hum. Molec. Genet. 8: 1397-1407, 1999. PubMed ID: 10400986 3. Shapiro, M. B.; Senaphthy, P.: RNA splice junctions of different classes of eukaryotes: sequence statistics and functional implications in gene expression. Nucleic Acids Res. 15: 7155-7174, 1987.

[1335] Further studies establishing the function and utilities of MID2 are found in John Hopkins OMIM database record ID 300204, and in references numbered 1007-1009 listed hereinbelow.

[1336] Referring now to MID2 BINDING SITE. midline 2 (MID2) is a target gene of GAM26, corresponding to GAM26-TARGET GENE of FIG. 26A. MID2 BINDING SITE is a binding site found in an untranslated region of MID2, corresponding to BINDING SITE of FIG. 26A. FIG. 26D illustrates the complementarity of the nucleotide sequence of MID2 BINDING SITE, designated SEQ ID:254911, to the nucleotide sequence of GAM26 RNA of FIG. 26A, designated SEQ ID:20604.

[1337] Yet another function of GAM26 is therefore inhibition of midline 2 (MID2), a gene which encodes a Protein that Has fibronectin type III domain. Also has fibronectin type III domain, similar to FXY/MID1. Accordingly, utilities of GAM26 include diagnosis and treatment of the abovementioned diseases and clinical conditions. The function and utilities of MID2 have been established by previous studies, as described hereinabove with reference to FIG. 26D.

[1338] Referring now to MID2 BINDING SITE. midline 2 (MID2) is a target gene of GAM26, corresponding to GAM26-TARGET GENE of FIG. 26A. MID2 BINDING SITE is a binding site found in an untranslated region of MID2, corresponding to BINDING SITE of FIG. 26A. FIG. 26D illustrates the complementarity of the nucleotide sequence of MID2 BINDING SITE, designated SEQ ID:254918, to the nucleotide sequence of GAM26 RNA of FIG. 26A, designated SEQ ID:20604.

[1339] An additional function of GAM26 is therefore inhibition of midline 2 (MID2), a gene which encodes a Protein that Has fibronectin type III domain. Also has fibronectin type III domain, similar to FXY/MID1. Accordingly, utilities of GAM26 include diagnosis and treatment of the abovementioned diseases and clinical conditions. The function and utilities of MID2 have been established by previous studies, as described hereinabove with reference to FIG. 26D.

[1340] Referring now to MID2 BINDING SITE. midline 2 (MID2) is a target gene of GAM26, corresponding to GAM26-TARGET GENE of FIG. 26A. MID2 BINDING SITE is a binding site found in an untranslated region of MID2, corresponding to BINDING SITE of FIG. 26A. FIG. 26D illustrates the complementarity of the nucleotide sequence of MID2 BINDING SITE, designated SEQ ID:254922, to the nucleotide sequence of GAM26 RNA of FIG. 26A, designated SEQ ID:20604.

[1341] A further function of GAM26 is therefore inhibition of midline 2 (MID2), a gene which encodes a Protein that Has fibronectin type III domain. Also has fibronectin type III domain, similar to FXY/MID1. Accordingly, utilities of GAM26 include diagnosis and treatment of the abovementioned diseases and clinical conditions. The function and utilities of MID2 have been established by previous studies, as described hereinabove with reference to FIG. 26D.

[1342] Referring now to MID2 BINDING SITE. midline 2 (MID2) is a target gene of GAM26, corresponding to GAM26-TARGET GENE of FIG. 26A. MID2 BINDING SITE is a binding site found in an untranslated region of MID2, corresponding to BINDING SITE of FIG. 26A. FIG. 26D illustrates the complementarity of the nucleotide sequence of MID2 BINDING SITE, designated SEQ ID:254923, to the nucleotide sequence of GAM26 RNA of FIG. 26A, designated SEQ ID:20604.

[1343] Yet a further function of GAM26 is therefore inhibition of midline 2 (MID2), a gene which encodes a Protein that Has fibronectin type III domain. Also has fibronectin type III domain, similar to FXY/MID1. Accordingly, utilities of GAM26 include diagnosis and treatment of the abovementioned diseases and clinical conditions. The function and utilities of MID2 have been established by previous studies, as described hereinabove with reference to FIG. 26D.

[1344] Referring now to MLLT1 BINDING SITE. myeloid/lymphoid or mixed-lineage leukemia (trithorax (Drosophila) hom (MLLT1) is a target gene of GAM26, corresponding to GAM26-TARGET GENE of FIG. 26A. MLLT1 BINDING SITE is a binding site found in an untranslated region of MLLT1, corresponding to BINDING SITE of FIG. 26A. FIG. 26D illustrates the complementarity of the nucleotide sequence of MLLT1 BINDING SITE, designated SEQ ID:255942, to the nucleotide sequence of GAM26 RNA of FIG. 26A, designated SEQ ID:20604.

[1345] Another function of GAM26 is therefore inhibition of myeloid/lymphoid or mixed-lineage leukemia (trithorax (Drosophila) hom (MLLT1), a gene which encodes a Protein that is associated with acute leukemias. Accordingly, utilities of GAM26 include diagnosis and treatment of the abovementioned diseases and clinical conditions. The function and utilities of MLLT1 have been established by previous studies, as described hereinabove with reference to FIG. 26D.

[1346] Referring now to MLLT1 BINDING SITE. myeloid/lymphoid or mixed-lineage leukemia (trithorax (Drosophila) hom (MLLT1) is a target gene of GAM26, corresponding to GAM26-TARGET GENE of FIG. 26A. MLLT1 BINDING SITE is a binding site found in an untranslated region of MLLT1, corresponding to BINDING SITE of FIG. 26A. FIG. 26D illustrates the complementarity of the nucleotide sequence of MLLT1 BINDING SITE, designated SEQ ID:255948, to the nucleotide sequence of GAM26 RNA of FIG. 26A, designated SEQ ID:20604.

[1347] Yet another function of GAM26 is therefore inhibition of myeloid/lymphoid or mixed-lineage leukemia (trithorax (Drosophila) hom (MLLT1), a gene which encodes a Protein that is associated with acute leukemias. Accordingly, utilities of GAM26 include diagnosis and treatment of the abovementioned diseases and clinical conditions. The function and utilities of MLLT1 have been established by previous studies, as described hereinabove with reference to FIG. 26D.

[1348] Referring now to NTRK3 BINDING SITE. neurotrophic tyrosine kinase, receptor, type 3 (NTRK3) is a target gene of GAM26, corresponding to GAM26-TARGET GENE of FIG. 26A. NTRK3 BINDING SITE is a binding site found in an untranslated region of NTRK3, corresponding to BINDING SITE of FIG. 26A. FIG. 26D illustrates the complementarity of the nucleotide sequence of NTRK3 BINDING SITE, designated SEQ ID:255948, to the nucleotide sequence of GAM26 RNA of FIG. 26A, designated SEQ ID:20604.

[1349] An additional function of GAM26 is therefore inhibition of neurotrophic tyrosine kinase, receptor, type 3 (NTRK3), a gene which encodes a Protein that is a tyrosine-protein kinase receptor. Accordingly, utilities of GAM26 include diagnosis and treatment of the abovementioned diseases and clinical conditions. The function and utilities of NTRK3 have been established by previous studies, as described hereinabove with reference to FIG. 26D.

[1350] Referring now to MLLT1 BINDING SITE. myeloid/lymphoid or mixed-lineage leukemia (trithorax (Drosophila) horn (MLLT1) is a target gene of GAM26, corresponding to GAM26-TARGET GENE of FIG. 26A. MLLT1 BINDING SITE is a binding site found in an untranslated region of MLLT1, corresponding to BINDING SITE of FIG. 26A. FIG. 26D illustrates the complementarity of the nucleotide sequence of MLLT1 BINDING SITE, designated SEQ ID:255952, to the nucleotide sequence of GAM26 RNA of FIG. 26A, designated SEQ ID:20604.

[1351] A further function of GAM26 is therefore inhibition of myeloid/lymphoid or mixed-lineage leukemia (trithorax (Drosophila) horn (MLLT1), a gene which encodes a Protein that is associated with acute leukemias. Accordingly, utilities of GAM26 include diagnosis and treatment of the abovementioned diseases and clinical conditions. The function and utilities of MLLT1 have been established by previous studies, as described hereinabove with reference to FIG. 26D.

[1352] Referring now to MLLT1 BINDING SITE. myeloid/lymphoid or mixed-lineage leukemia (trithorax (Drosophila) horn (MLLT1) is a target gene of GAM26, corresponding to GAM26-TARGET GENE of FIG. 26A. MLLT1 BINDING SITE is a binding site found in an untranslated region of MLLT1, corresponding to BINDING SITE of FIG. 26A. FIG. 26D illustrates the complementarity of the nucleotide sequence of MLLT1 BINDING SITE, designated SEQ ID:255957, to the nucleotide sequence of GAM26 RNA of FIG. 26A, designated SEQ ID:20604.

[1353] Yet a further function of GAM26 is therefore inhibition of myeloid/lymphoid or mixed-lineage leukemia (trithorax (Drosophila) horn (MLLT1), a gene which encodes a Protein that is associated with acute leukemias. Accordingly, utilities of GAM26 include diagnosis and treatment of the abovementioned diseases and clinical conditions. The function and utilities of MLLT1 have been established by previous studies, as described hereinabove with reference to FIG. 26D.

[1354] Reference is now made to MPP6 BINDING SITE. MEMBRANE PROTEIN, PALMITOYLATED 6; MPP6 (MPP6) is a target gene of GAM26, corresponding to GAM26-TARGET GENE of FIG. 26A. MPP6 BINDING SITE is a binding site found in an untranslated region of MPP6, corresponding to BINDING SITE of FIG. 26A. FIG. 26D illustrates the complementarity of the nucleotide sequence of MPP6 BINDING SITE, designated SEQ ID:259906, to the nucleotide sequence of GAM26 RNA of FIG. 26A, designated SEQ ID:20604.

[1355] Another function of GAM26 is therefore inhibition of MEMBRANE PROTEIN, PALMITOYLATED 6; MPP6 (MPP6), a gene which encodes a Protein that may regulate transmembrane proteins that bind calcium, calmodulin, or nucleotides. Accordingly, utilities of GAM26 include diagnosis and treatment of the abovementioned diseases and clinical conditions.

[1356] The function of MPP6 has been established by previous studies. By searching an EST database with DLG2 (603583) as the probe, followed by PCR of a brain cDNA library and 5-prime RACE, Tseng et al. (2001) obtained a cDNA encoding MPP6, which they called VAM1 for VELI (603380)-associated MAGUK-1. The deduced 540-amino acid protein has a single PDZ domain, a central SH3 domain, and a C-terminal GUK domain, resembling other members of the p55 MAGUK subfamily. Like MPP1, MPP6 also contains a protein 4.1 (EPB41; 130500)-binding domain with its characteristic KKKK sequence, as well as a leucine zipper and 2 phosphorylation sites. Northern blot analysis revealed expression of an abundant 2.3-kb transcript and a minor 4.2-kb transcript only in testis. RT-PCR analysis detected predominant expression in testis, with lower amounts in ovary, prostate, thymus, small intestine, and several other tissues; VELI has a similar expression pattern. GST pull-down and mutation analyses indicated that a domain N-terminal of the PDZ region of VAM1 contains the minimal VELI-binding sequence. No binding between VAM1 and EPB41 was detected. Kamberov et al. (2000) cloned and characterized the mouse Mpp5 (606958) and Mpp6 genes, which they called Pals1 and Pals2, respectively. The Pals proteins bind to mouse Lin7 (VELI) through a region N-terminal to their PDZ domains.

[1357] Full details of the abovementioned studies are described in the following publications, the disclosure of which are hereby incorporated by reference:

[1358] amberov, E.; Makarova, O.; Roh, M.; Liu, A.; Karnak, D.; Straight, S.; Margolis, B.: Molecular cloning and characterization of Pals, proteins associated with mLin-7. J. Biol. Chem. 275: 11425-11431, 2000. PubMed ID: 10753959 2. Tseng, T.—C.; Marfatia, S. M.; Bryant, P. J.; Pack, S.; Zhuang, A.; O'Brien, J. E.; Lin, L.; Hanada, T.; Chishti, A. H.: VAM-1: a new member of the MAGUK family binds to human Veli-1 through a conserved domain. Biochim. Biophys. Acta 1518: 249-259, 2001.

[1359] Further studies establishing the function and utilities of MPP6 are found in John Hopkins OMIM database record ID 606959, and in references numbered 1010-1011 listed hereinbelow.

[1360] Referring now to MPP6 BINDING SITE. MEMBRANE PROTEIN, PALMITOYLATED 6; MPP6 (MPP6) is a target gene of GAM26, corresponding to GAM26-TARGET GENE of FIG. 26A. MPP6 BINDING SITE is a binding site found in an untranslated region of MPP6, corresponding to BINDING SITE of FIG. 26A. FIG. 26D illustrates the complementarity of the nucleotide sequence of MPP6 BINDING SITE, designated SEQ ID:259910, to the nucleotide sequence of GAM26 RNA of FIG. 26A, designated SEQ ID:20604.

[1361] Yet another function of GAM26 is therefore inhibition of MEMBRANE PROTEIN, PALMITOYLATED 6; MPP6 (MPP6), a gene which encodes a Protein that may regulate transmembrane proteins that bind calcium, calmodulin, or nucleotides. Accordingly, utilities of GAM26 include diagnosis and treatment of the abovementioned diseases and clinical conditions. The function and utilities of MPP6 have been established by previous studies, as described hereinabove with reference to FIG. 26D.

[1362] Reference is now made to MTA1L1 BINDING SITE. metastasis-associated 1-like 1 (MTA1L1) is a target gene of GAM26, corresponding to GAM26-TARGET GENE of FIG. 26A. MTA1L1 BINDING SITE is a binding site found in an untranslated region of MTA1L1, corresponding to BINDING SITE of FIG. 26A. FIG. 26D illustrates the complementarity of the nucleotide sequence of MTA1L1 BINDING SITE, designated SEQ ID:261852, to the nucleotide sequence of GAM26 RNA of FIG. 26A, designated SEQ ID:20604.

[1363] An additional function of GAM26 is therefore inhibition of metastasis-associated 1-like 1 (MTA1L1), a gene which encodes a Protein that regulates histone deacetylase core complex enzymatic activity. Accordingly, utilities of GAM26 include diagnosis and treatment of the abovementioned diseases and clinical conditions.

[1364] The function of MTA1L1 has been established by previous studies. The p53 tumor suppressor (191170) is a transcriptional factor whose activity is modulated by protein stability and posttranslational modifications including acetylation. Luo et al. (2000) showed that deacetylation of p53 is mediated by a histone deacetylase-1 (HDAC1; 601241)-containing complex. They also purified a p53 target protein, which they named PID, in the deacetylase complexes. PID is identical to MTA1L1, also called MTA2, which had been identified as a component of the nucleosome remodeling and histone deacetylation (NURD) complex. The authors found that MTA1L1 specifically interacts with p53 both in vitro and in vivo, and its expression reduces significantly the steady-state levels of acetylated p53. MTA1L1 expression strongly represses p53-dependent transcriptional activation, and, notably, it modulates p53-mediated cell growth arrest and apoptosis. Luo et al. (2000) concluded that their results show that deacetylation and functional interactions between the MTA1L1-associated NURD complex may represent an important pathway to regulate p53 function. Zhang et al. (1999) showed that MTA2 and the 32-kD MBD3 (603573) protein are subunits of the NURD complex. Immunoprecipitation analysis showed that MBD3 interacts with HDAC1, RBBP4 (602923), and RBBP7 (602922), but not with MI2 (CHD4; 603277), suggesting that MBD3 is embedded within the NURD complex. The authors found that MTA2 directs the assembly of an active histone deacetylase complex and that the association of MTA2 with the complex requires MBD3. Gel mobility shift analysis determined that both NURD and MBD3 are unable to bind to methylated DNA in the absence of MBD2 (603547). Zhang et al. (1999) proposed that NURD is involved in the transcriptional repression of methylated DNA. Wade et al. (1999) also identified MTA1, MTA1L, and MBD3 as components of the NURD complex, which they referred to as the MI2 complex.

[1365] Full details of the abovementioned studies are described in the following publications, the disclosure of which are hereby incorporated by reference:

[1366] utamura, M.; Nishimori, H.; Shiratsuchi, T.; Saji, S.; Nakamura, Y.; Tokino, T.: Molecular cloning, mapping, and characterization of a novel human gene, MTA1-L1, showing homology to a metastasis-associated gene, MTA1. J. Hum. Genet. 44: 52-56, 1999. PubMed ID: 9929979 2. Luo, J.; Su, F.; Chen, D.; Shiloh, A.; Gu, W.: Deacetylation of p53 modulates its effect on cell growth and apoptosis. Nature 408: 377-381, 2000.

[1367] Further studies establishing the function and utilities of MTA1L1 are found in John Hopkins OMIM database record ID 603947, and in references numbered 1012-1015 listed hereinbelow.

[1368] Reference is now made to MTMR1 BINDING SITE. myotubularin related protein 1 (MTMR1) is a target gene of GAM26, corresponding to GAM26-TARGET GENE of FIG. 26A. MTMR1 BINDING SITE is a binding site found in an untranslated region of MTMR1, corresponding to BINDING SITE of FIG. 26A. FIG. 26D illustrates the complementarity of the nucleotide sequence of MTMR1 BINDING SITE, designated SEQ ID:262287, to the nucleotide sequence of GAM26 RNA of FIG. 26A, designated SEQ ID:20604.

[1369] A further function of GAM26 is therefore inhibition of myotubularin related protein 1 (MTMR1), a gene which encodes a Protein that is a member of the myotubalarin family of dual specificity protein phosphatases. and is associated with biopsy-proven myotubular myopathy. Accordingly, utilities of GAM26 include diagnosis and treatment of the abovementioned diseases and clinical conditions.

[1370] The function of MTMR1 has been established by previous studies. X-linked myotubular myopathy is caused by mutations in the MTM1 (310400) gene. The corresponding protein, myotubularin, contains the consensus active site of tyrosine phosphatases (PTP) and is a dual-specific phosphatase (DSP), acting on both phosphotyrosine and phosphoserine. By searching an EST database, Laporte et al. (1996) identified partial cDNAs encoding MTMR1 (myotubularin-related protein-1), MTMR2 (603557), and MTMR3 (603558). Kioschis et al. (1998) isolated additional cDNAs corresponding to the entire MTMR1 coding region. The predicted MTMR1 protein contains 662 amino acids. The MTMR1 gene contain 16 exons and spans 71 kb. The authors identified 1 cDNA, MTMR1-alpha, that appeared to result from alternative splicing of exon 13. Laporte et al. (1998) identified cDNAs encoding 4 additional MTM1-related proteins, MTMR4 (603559), MTMR5 (603560), MTMR6 (603561), and MTMR7 (603562). Phylogenetic analysis of the consensus PTP/DSP region indicated that MTM1, MTMR1, MTMR2, a zebrafish ortholog of MTMR2, and Drosophila Mtmh1 form a distinct subgroup of the myotubularin protein family. Using Northern blot analysis, Laporte et al. (1998) found that the 3.7-kb MTMR1 mRNA is expressed ubiquitously. An additional 3.1-kb transcript was detected only in placenta. By inclusion within mapped clones, Laporte et al. (1996) localized the MTMR1 gene to Xq28, within the 100 kb telomeric to the MTM1 gene. Kioschis et al. (1998) determined that the 2 genes are transcribed in the same direction and are separated by 20 kb. Analysis of the genomic region containing MTM1 and MTMR1 revealed that the 2 genes share a similar structure, suggesting that they are related and arose from an intrachromosomal gene duplication. The authors stated that other examples of intrachromosomal gene duplications in Xq28 include the IDS (309900) gene duplication and a cluster of MAGE genes (see 300016). The MTMR1 gene shares structural similarities with the MTM1 gene, and is also located in the same chromosomal region. Because no MTM1 mutation was found in approximately 20% of males with biopsy-proven myotubular myopathy, Copley et al. (2002) screened the MTMR1 gene for mutations in 14 patients for whom no mutation was found in MTM1. Two of the pedigrees were consistent with X-linked recessive inheritance. No mutations were found in MTMR1.

[1371] Full details of the abovementioned studies are described in the following publications, the disclosure of which are hereby incorporated by reference:

[1372] opley, L. M.; Zhao, W. D.; Kopacz, K.; Herman, G. E.; Kioschis, P.; Poustka, A.; Taudien, S.; Platzer, M.: Exclusion of mutations in the MTMR1 gene as a frequent cause of X-linked myotubular myopathy. (Letter) Am. J. Med. Genet. 107: 256-258, 2002. PubMed ID: 11807911 2. Kioschis, P.; Wiemann, S.; Heiss, N. S.; Francis, F.; Gotz, C.; Poustka, A.; Taudien, S.; Platzer, M.; Wiehe, T.; Beckmann, G.; Weber, J.; Nordsiek, G.; Rosenthal, A.: Genomic organization of a 225-kb region in Xq28 containing the gene for X-linked myotubular myopathy (MTM1) and a related gene (MTMR1). Genomics 54: 256-266, 1998.

[1373] Further studies establishing the function and utilities of MTMR1 are found in John Hopkins OMIM database record ID 300171, and in references numbered 1016-1019 listed hereinbelow.

[1374] Reference is now made to MVK BINDING SITE. mevalonate kinase (mevalonic aciduria) (MVK) is a target gene of GAM26, corresponding to GAM26-TARGET GENE of FIG. 26A. MVK BINDING SITE is a binding site found in an untranslated region of MVK, corresponding to BINDING SITE of FIG. 26A. FIG. 26D illustrates the complementarity of the nucleotide sequence of MVK BINDING SITE, designated SEQ ID:264118, to the nucleotide sequence of GAM26 RNA of FIG. 26A, designated SEQ ID:20604.

[1375] Yet a further function of GAM26 is therefore inhibition of mevalonate kinase (mevalonic aciduria) (MVK), a gene which encodes a Enzyme that is associated with Mevalonicaciduria and hyperimmunoglobulinemia d and periodic fever syndrome (hids). Accordingly, utilities of GAM26 include diagnosis and treatment of the abovementioned diseases and clinical conditions.

[1376] The function of MVK has been established by previous studies. Mevalonicaciduria, the first recognized defect in the biosynthesis of cholesterol and isoprenoids, is a consequence of a deficiency of mevalonate kinase (ATP:mevalonate 5-phosphotransferase; EC 2.7.1.36). Mevalonic acid accumulates because of failure of conversion to 5-phosphomevalonic acid, which is catalyzed by mevalonate kinase. Mevalonic acid is synthesized from 3-hydroxy-3-methylglutaryl-CoA, a reaction catalyzed by HMG-CoA reductase (142910). Cuisset et al. (2001) screened the entire coding region of the MVK gene in 25 unrelated patients with HIDS. The patients (22 Dutch, 1 British, 1 Czech, and 1 Spanish), had mevalonate kinase enzyme activity varying from 1.8 to 28%. A total of 13 different mutations were identified, 7 of which were novel. The most common mutation was V3771 (251170.0002), detected in 20 patients, followed by 1268T (251170.0004), detected in 7 patients. The frequency or severity of febrile attacks did not differ between V3771 positive and negative patients. The data of Cuisset et al. (2001), combined with results from previous reports, showed that HIDS mutations were evenly distributed along the coding region of the MVK gene, in contrast to mutations causing mevalonicaciduria, which clustered between amino acids 243 and 334. Three of the HIDS patients illustrated genotypic and phenotypic overlap with mevalonicaciduria, suggesting that factors in addition to specific mutations are important for the resultant phenotype

[1377] Full details of the abovementioned studies are described in the following publications, the disclosure of which are hereby incorporated by reference:

[1378] uisset, L.; Drenth, J. P. H.; Simon, A.; Vincent, M. F.; van der Velde Visser, S.; van der Meer, J. W. M.; Grateau, G.; Delpech, M.; International Hyper-IgD Study Group: Molecular analysis of MVK mutations and enzymatic activity in hyper-IgD and periodic fever syndrome. Europ. J. Hum. Genet. 9: 260-266, 2001. PubMed ID: 11313769 3. Drenth, J. P. H.; Cuisset, L.; Grateau, G.; Vasseur, C.; van de Velde-Visser, S. D.; de Jong, J. G. N.; Beckmann, J. S.; van der Meer, J. W. M.; Delpech, M.; International Hyper-IgD Study Group: Mutations in the gene encoding mevalonate kinase cause hyper-IgD and periodic fever syndrome. Nature Genet. 22: 178-181, 1999.

[1379] Further studies establishing the function and utilities of MVK are found in John Hopkins OMIM database record ID 251170, and in references numbered 1020-1037 listed hereinbelow.

[1380] Reference is now made to NCKAP1 BINDING SITE. NCK-ASSOCIATED PROTEIN 1 (NCKAP1) is a target gene of GAM26, corresponding to GAM26-TARGET GENE of FIG. 26A. NCKAP1 BINDING SITE is a binding site found in an untranslated region of NCKAP1, corresponding to BINDING SITE of FIG. 26A. FIG. 26D illustrates the complementarity of the nucleotide sequence of NCKAP1 BINDING SITE, designated SEQ ID:268447, to the nucleotide sequence of GAM26 RNA of FIG. 26A, designated SEQ ID:20604.

[1381] Another function of GAM26 is therefore inhibition of NCK-ASSOCIATED PROTEIN 1 (NCKAP1), a gene which encodes a Protein that is an apoptosis-related protein and is associated with Alzheimer disease. Accordingly, utilities of GAM26 include diagnosis and treatment of the abovementioned diseases and clinical conditions.

[1382] The function of NCKAP1 has been established by previous studies. Alzheimer disease (AD; 104300), a major cause of senile dementia, is a progressive neurodegenerative disease of the central nervous system. To identify molecules involved in the AD process, Suzuki et al. (2000) used a modified differential display method to search for genes showing unique expression profiles at the transcriptional level in sporadic AD-affected brains compared to normal brains. Among 31 differentially expressed genes, 1 gene, NCKAP1, showed markedly reduced expression in most of the AD-affected brains examined. Suzuki et al. (2000) isolated a human cDNA containing a full-length NCKAP1 coding sequence. The deduced 1,128-amino acid NCKAP1 protein shares 99.2% amino acid sequence identity with rat Nck-associated protein-1 (Nap1); thus, the authors referred to NCKAP1 as NAP1. NCKAP1 also shares significant sequence homology with HEM1 (141180). NCKAP1 is a predicted type II transmembrane protein, with a C-terminal transmembrane domain. Northern blot analysis detected an approximately 4.2-kb NCKAP1 transcript in all tissues examined except peripheral blood leukocytes, with highest expression in brain, heart, and skeletal muscle. In the brain, NCKAP1 transcripts were present in all subregions examined, with slightly higher expression in the amygdala and hippocampus, which have dense populations of neurons. Northern blot analysis showed that NCKAP1 was expressed at a higher level in adult brain than in fetal brain. In situ hybridization of human brain indicated that NCKAP1 is expressed predominantly in neuronal cells. Suzuki et al. (2000) demonstrated that suppression of NCKAP1 expression using an antisense NCKAP1 oligonucleotide induces apoptosis of neuronal cells. By somatic cell hybrid analysis, Suzuki et al. (2000) mapped the NCKAP1 gene to chromosome 2. They localized the NCKAP1 gene to 2q32.1-q32.2 using FISH.

[1383] Full details of the abovementioned studies are described in the following publications, the disclosure of which are hereby incorporated by reference:

[1384] uzuki, T.; Nishiyama, K.; Yamamoto, A.; Inazawa, J.; Iwaki, T.; Yamada, T.; Kanazawa, I.; Sakaki, Y.: Molecular cloning of a novel apoptosis-related gene, human Nap1 (NCKAP1), and its possible relation to Alzheimer disease. Genomics 63: 246-254, 2000.

[1385] Further studies establishing the function and utilities of NCKAP1 are found in John Hopkins OMIM database record ID 604891, and in references numbered 1038 listed hereinbelow.

[1386] Reference is now made to NFYA BINDING SITE. nuclear transcription factor Y, alpha (NFYA) is a target gene of GAM26, corresponding to GAM26-TARGET GENE of FIG. 26A. NFYA BINDING SITE is a binding site found in an untranslated region of NFYA, corresponding to BINDING SITE of FIG. 26A. FIG. 26D illustrates the complementarity of the nucleotide sequence of NFYA BINDING SITE, designated SEQ ID:272973, to the nucleotide sequence of GAM26 RNA of FIG. 26A, designated SEQ ID:20604.

[1387] Yet another function of GAM26 is therefore inhibition of nuclear transcription factor Y, alpha (NFYA), a gene which encodes a Protein that stimulates the transcription of various genes by recognizing and binding to a ccaat motif in promoters. Accordingly, utilities of GAM26 include diagnosis and treatment of the abovementioned diseases and clinical conditions.

[1388] The function of NFYA has been established by previous studies. NF-Y is a transcription factor thought to be essential for expression of the class II genes of the major histocompatibility complex (MHC; see 142800). It recognizes a CCAAT motif upstream of gene promoters and is probably involved in the regulation of a variety of genes, including those for albumin (103600), alpha-globin (141800), collagen (see 120150), and beta-actin (102630). NF-Y is composed of 2 subunits, NFYA and NFYB (189904), both of which are necessary for DNA binding. This 2-subunit DNA-binding unit has been well conserved during evolution. NFYA and NFYB show striking sequence similarity with the yeast transcription factors Hap2 and Hap3, both of which are required for specific binding to a CCAAT-like motif. By in situ hybridization and analysis of somatic cell hybrids, L1 et al. (1991) assigned the NFYA gene to 6p21 (close to MHC) and the NFYB gene to human chromosome 12. After in situ hybridization, the maximum concentration of grains was in the region 12q22-q23. By Southern blot analysis of recombinant inbred lines and by in situ hybridization, the Nfya and Nfyb genes were assigned to mouse chromosome 17 and mouse chromosome 10, respectively. CCAAT, an upstream sequence element found in a multitude of higher eukaryotic promoters, serves as the recognition sequence for a variety of mammalian transcription factors. There are at least 3 chromatographically separable CCAAT-binding factors in HeLa cells: CP1, CP2, and CTF/NF-1 (600729). These factors recognize overlapping but distinct subsets of known CCAAT-containing promoters and make distinguishable patterns of contacts with DNA in and around the CCAAT motif. Becker et al. (1991) noted that of these 3 factors, CP1 bears the greatest resemblance to the yeast Hap complex. This complex of 3 genes, Hap2, Hap3, and Hap4, is required for the expression of respiration in Saccharomyces cerevisiae—in particular, for expression of the principal isoform of cytochrome C (CYC1; 123980). In the yeast, 3 proteins are associated in a heteromeric complex that binds to an upstream activation sequence in the CYC1 promoter. Like Hap2/3/4, CYP in the human consists of a heteromeric association of at least 2 components, CP1A and CP1B, both of which are required for binding. Most strikingly, the subunits of CP1 and Hap2/3/4 can be interchanged in vitro. Thus, CP1 likely represents the human homolog of the yeast Hap complex, with the CP1B fraction containing the Hap2 homolog and the CP1A fraction containing a Hap3 equivalent. Becker et al. (1991) reported the isolation of a HeLa cDNA whose expression in S. cerevisiae corrected the respiratory defect in a strain bearing a Hap2 deletion. The cDNA encoding the human Hap2 homolog encodes a protein of 257 amino acids which has a 62-amino acid C-terminal region that shares 73% identity with the essential core region of Hap2.

[1389] Full details of the abovementioned studies are described in the following publications, the disclosure of which are hereby incorporated by reference:

[1390] ecker, D. M.; Fikes, J. D.; Guarente, L.: A cDNA encoding a human CCAAT-binding protein cloned by functional complementation in yeast. Proc. Nat. Acad. Sci. 88: 1968-1972, 1991. PubMed ID: 2000400 2. Li, X.-Y.; Mattei, M. G.; Zaleska-Rutczynska, Z.; Hooft van Huijsduijnen, R.; Figueroa, F.; Nadeau, J.; Benoist, C.; Mathis, D.: One subunit of the transcription factor NF-Y maps close to the major histocompatibility complex in murine and human chromosomes. Genomics 11: 630-634, 1991.

[1391] Further studies establishing the function and utilities of NFYA are found in John Hopkins OMIM database record ID 189903, and in references numbered 1039-1040 listed hereinbelow.

[1392] Referring now to NFYA BINDING SITE. nuclear transcription factor Y, alpha (NFYA) is a target gene of GAM26, corresponding to GAM26-TARGET GENE of FIG. 26A. NFYA BINDING SITE is a binding site found in an untranslated region of NFYA, corresponding to BINDING SITE of FIG. 26A. FIG. 26D illustrates the complementarity of the nucleotide sequence of NFYA BINDING SITE, designated SEQ ID:272979, to the nucleotide sequence of GAM26 RNA of FIG. 26A, designated SEQ ID:20604.

[1393] An additional function of GAM26 is therefore inhibition of nuclear transcription factor Y, alpha (NFYA), a gene which encodes a Protein that stimulates the transcription of various genes by recognizing and binding to a ccaat motif in promoters. Accordingly, utilities of GAM26 include diagnosis and treatment of the abovementioned diseases and clinical conditions. The function and utilities of NFYA have been established by previous studies, as described hereinabove with reference to FIG. 26D.

[1394] Referring now to NPAS2 BINDING SITE. neuronal PAS domain protein 2 (NPAS2) is a target gene of GAM26, corresponding to GAM26-TARGET GENE of FIG. 26A. NPAS2 BINDING SITE is a binding site found in an untranslated region of NPAS2, corresponding to BINDING SITE of FIG. 26A. FIG. 26D illustrates the complementarity of the nucleotide sequence of NPAS2 BINDING SITE, designated SEQ ID:275935, to the nucleotide sequence of GAM26 RNA of FIG. 26A, designated SEQ ID:20604.

[1395] A further function of GAM26 is therefore inhibition of neuronal PAS domain protein 2 (NPAS2), a gene which encodes a Protein that is a member of basic helix-loop-helix-PAS family of transcription factors. Accordingly, utilities of GAM26 include diagnosis and treatment of the abovementioned diseases and clinical conditions. The function and utilities of NPAS2 have been established by previous studies, as described hereinabove with reference to FIG. 26D.

[1396] Referring now to NPAS2 BINDING SITE. neuronal PAS domain protein 2 (NPAS2) is a target gene of GAM26, corresponding to GAM26-TARGET GENE of FIG. 26A. NPAS2 BINDING SITE is a binding site found in an untranslated region of NPAS2, corresponding to BINDING SITE of FIG. 26A. FIG. 26D illustrates the complementarity of the nucleotide sequence of NPAS2 BINDING SITE, designated SEQ ID:275947, to the nucleotide sequence of GAM26 RNA of FIG. 26A, designated SEQ ID:20604.

[1397] Yet a further function of GAM26 is therefore inhibition of neuronal PAS domain protein 2 (NPAS2), a gene which encodes a Protein that is a member of basic helix-loop-helix-PAS family of transcription factors. Accordingly, utilities of GAM26 include diagnosis and treatment of the abovementioned diseases and clinical conditions. The function and utilities of NPAS2 have been established by previous studies, as described hereinabove with reference to FIG. 26D.

[1398] Reference is now made to NRG2 BINDING SITE. neuregulin 2 (NRG2) is a target gene of GAM26, corresponding to GAM26-TARGET GENE of FIG. 26A. NRG2 BINDING SITE is a binding site found in an untranslated region of NRG2, corresponding to BINDING SITE of FIG. 26A. FIG. 26D illustrates the complementarity of the nucleotide sequence of NRG2 BINDING SITE, designated SEQ ID:279264, to the nucleotide sequence of GAM26 RNA of FIG. 26A, designated SEQ ID:20604.

[1399] Another function of GAM26 is therefore inhibition of neuregulin 2 (NRG2), a gene which encodes a Protein that recruits erbb1 and erbb2 coreceptors resulting in ligand-stimulated tyrosine phosphorylation and activation of the erbb receptors. Accordingly, utilities of GAM26 include diagnosis and treatment of the abovementioned diseases and clinical conditions.

[1400] The function of NRG2 has been established by previous studies. Neuregulins are a family of growth and differentiation factors that are related to epidermal growth factor (EGF; 131530). The receptors for neuregulins are the ERBB family of tyrosine kinase transmembrane receptors, which includes the EGF receptor (EGFR; 131550), ERBB2 (164870), ERBB3 (190151), and ERBB4 (600543). Through interaction with ERBB receptors, neuregulins induce the growth and differentiation of epithelial, neuronal, glial, and other types of cells (Burden and Yarden, 1997). In particular, the neuregulin-ERBB signaling pathways play crucial roles in regulating the proliferation and differentiation of Schwann cells, the myelin-forming cells in the peripheral nervous system. For additional information about neuregulins, see NRG1 (142445). Using homologous mouse cDNA as probe, Busfield et al. (1997) cloned 2 NRG2 variants, which they called DON-lr and DON-1b, from a human fetal brain library. The clones predict mosaic proteins containing an N-terminal domain, an immunoglobulin-C2 loop, an EGF-like domain, a transmembrane sequence, and a large cytoplasmic tail showing a number of potential N-linked and O-linked glycosylation sites. DON-1b differs from DON-1r by an 8-amino acid insertion proximal to the transmembrane domain. Northern blot analysis of adult human tissues revealed expression of 3- and 4-kb transcripts restricted to the cerebellum. Expression was also detected in fetal brain and lung. In situ hybridization of mouse brain sections revealed restricted expression in the cerebellum and dentate gyrus.

[1401] Full details of the abovementioned studies are described in the following publications, the disclosure of which are hereby incorporated by reference:

[1402] urden, S.; Yarden, Y.: Neuregulins and their receptors: a versatile signaling module in organogenesis and oncogenesis. Neuron 18: 847-855, 1997. PubMed ID: 9208852 2. Busfield, S. J.; Michnick, D. A.; Chickering, T. W.; Revett, T. L.; Ma, J.; Woolf, E. A.; Comrack, C. A.; Dussault, B. J.; Woolf, J.; Goodearl, A. D. J.; Gearing, D. P.: Characterization of a neuregulin-related gene, Don-1, that is highly expressed in restricted regions of the cerebellum and hippocampus. Molec. Cell. Biol. 17: 4007-4014, 1997.

[1403] Further studies establishing the function and utilities of NRG2 are found in John Hopkins OMIM database record ID 603818, and in references numbered 1041-1046 listed hereinbelow.

[1404] Reference is now made to NUP98 BINDING SITE. nucleoporin 98 kD (NUP98) is a target gene of GAM26, corresponding to GAM26-TARGET GENE of FIG. 26A. NUP98 BINDING SITE is a binding site found in an untranslated region of NUP98, corresponding to BINDING SITE of FIG. 26A. FIG. 26D illustrates the complementarity of the nucleotide sequence of NUP98 BINDING SITE, designated SEQ ID:281811, to the nucleotide sequence of GAM26 RNA of FIG. 26A, designated SEQ ID:20604.

[1405] Yet another function of GAM26 is therefore inhibition of nucleoporin 98 kD (NUP98), a gene which encodes a Protein that functions in the nuclear transport of protein and RNA. Accordingly, utilities of GAM26 include diagnosis and treatment of the abovementioned diseases and clinical conditions.

[1406] The function of NUP98 has been established by previous studies. Nucleoporins are proteins that function in the nuclear transport of protein and RNA. Nakamura et al. (1996) showed that in 3 patients with t(7;11), the chromosome rearrangement created a genomic fusion between the HOXA9 gene (142956) and the nucleoporin gene NUP98 on 11p15. Expression of Hoxa7 and Hoxa9 is activated by proviral integration in BXH2 murine myeloid leukemias; this result, combined with the mapping of the HOXA cluster to 7p15, suggested that one of the HOXA genes may be involved in the human t(7;11)(p15;p15) translocation found in some myeloid leukemia patients. The translocation produced an invariant chimeric NUP98/HOXA9 transcript containing the amino terminal half of NUP98 fused in-frame to HOXA9. These studies identified HOXA9 as an important human myeloid leukemia gene and suggested an important role for nucleoporins in human myeloid leukemia, given that a second nucleoporin, NUP214 (114350), had also been implicated in human myeloid leukemia. The 11p15 gene was identified by exon trapping experiments. Borrow et al. (1996) likewise identified the HOXA9 and NUP98 genes as the parents of the fusion in t(7;11)(p15;p15) in acute myeloid leukemia of the FABM2 and M4 types. Borrow et al. (1996) suggested that the predicted NUP98/HOXA9 fusion protein may promote leukemogenesis through inhibition of HOXA9-mediated terminal differentiation and/or aberrant nucleocytoplasmic transport.

[1407] Full details of the abovementioned studies are described in the following publications, the disclosure of which are hereby incorporated by reference:

[1408] orrow, J.; Shearman, A. M.; Stanton, V. P., Jr.; Becher, R.; Collins, T.; Williams, A. J.; Dube, I.; Katz, F.; Kwong, Y. L.; Morris, C.; Ohyashiki, K.; Toyama, K.; Rowley, J.; Housman, D. E.: The t(7;11)(p15;p15) translocation in acute myeloid leukaemia fuses the genes for nucleoporin NUP98 and class I homeoprotein HOXA9. Nature Genet. 12: 159-167, 1996. PubMed ID: 8563754 12. Nakamura, T.; Largaespada, D. A.; Lee, M. P.; Johnson, L. A.; Ohyashiki, K.; Toyama, K.; Chen, S. J.; Willman, C. L.; Chen, I.-M.; Feinberg, A. P.; Jenkins, N. A.; Copeland, N. G.; Shaughnessy, J. D., Jr.: Fusion of the nucleoporin gene NUP98 to HOXA9 by the chromosome translocation t(7;11)(p15;p15) in human myeloid leukaemia. Nature Genet. 12: 154-158, 1996.

[1409] Further studies establishing the function and utilities of NUP98 are found in John Hopkins OMIM database record ID 601021, and in references numbered 1047-1062 listed hereinbelow.

[1410] Referring now to NUP98 BINDING SITE. nucleoporin 98 kD (NUP98) is a target gene of GAM26, corresponding to GAM26-TARGET GENE of FIG. 26A. NUP98 BINDING SITE is a binding site found in an untranslated region of NUP98, corresponding to BINDING SITE of FIG. 26A. FIG. 26D illustrates the complementarity of the nucleotide sequence of NUP98 BINDING SITE, designated SEQ ID:281839, to the nucleotide sequence of GAM26 RNA of FIG. 26A, designated SEQ ID:20604.

[1411] An additional function of GAM26 is therefore inhibition of nucleoporin 98 kD (NUP98), a gene which encodes a Protein that functions in the nuclear transport of protein and RNA. Accordingly, utilities of GAM26 include diagnosis and treatment of the abovementioned diseases and clinical conditions. The function and utilities of NUP98 have been established by previous studies, as described hereinabove with reference to FIG. 26D.

[1412] Reference is now made to OSR1 BINDING SITE. oxidative-stress responsive 1 (OSR1) is a target gene of GAM26, corresponding to GAM26-TARGET GENE of FIG. 26A. OSR1 BINDING SITE is a binding site found in an untranslated region of OSR1, corresponding to BINDING SITE of FIG. 26A. FIG. 26D illustrates the complementarity of the nucleotide sequence of OSR1 BINDING SITE, designated SEQ ID:285281, to the nucleotide sequence of GAM26 RNA of FIG. 26A, designated SEQ ID:20604.

[1413] A further function of GAM26 is therefore inhibition of oxidative-stress responsive 1 (OSR1), a gene which encodes a Protein that mediats stress-activated signals. Accordingly, utilities of GAM26 include diagnosis and treatment of the abovementioned diseases and clinical conditions.

[1414] The function of OSR1 has been established by previous studies. The 3p22-p21.3 chromosomal region is one of 3 regions of 3p that is commonly deleted in various carcinomas. By analyzing a cloned segment from this region, Tamari et al. (1999) identified a novel gene that they designated OSR1 (oxidative stress-responsive-1) because the predicted 527-amino acid protein shares 39% identity with Ste20/oxidant stress-response kinase-1 (602255). The OSR1 gene contains 18 exons and spans approximately 90 kb. Northern blot analysis revealed that OSR1 was expressed as a 4.6-kb major transcript in all tissues tested. A less abundant 7.5-kb mRNA was detected in heart and skeletal muscle. Daigo et al. (1999) reported that the OSR1 gene is located between the OCTL1 (604047) and MYD88 (602170) genes on 3p22-p21.3.

[1415] Full details of the abovementioned studies are described in the following publications, the disclosure of which are hereby incorporated by reference:

[1416] Tamari, M.; Daigo, Y.; Nakamura, Y.: Isolation and characterization of a novel serine threonine kinase gene on chromosome 3q22-21.3. J. Hum. Genet. 44: 116-120, 1999. PubMed ID: 10083736 Daigo, Y.; Isomura, M.; Nishiwaki, T.; Tamari, M.; Ishikawa, S.; Kai, M.; Murata, Y.; Takeuchi, K.; Yamane, Y.; Hayashi, R.; Minami, M.; Fujino, M. A.; Hojo, Y.; Uchiyama, I.; Takagi, T.; Nakamura, Y.: Characterization of a 1200-kb genomic segment of chromosome 3p22-p21.3. DNA Res. 6: 37-44, 1999.

[1417] Further studies establishing the function and utilities of OSR1 are found in John Hopkins OMIM database record ID 604046, and in references numbered 1063-1064 listed hereinbelow.

[1418] Reference is now made to PACE4 BINDING SITE. paired basic amino acid cleaving system 4 (PACE4) is a target gene of GAM26, corresponding to GAM26-TARGET GENE of FIG. 26A. PACE4 BINDING SITE is a binding site found in an untranslated region of PACE4, corresponding to BINDING SITE of FIG. 26A. FIG. 26D illustrates the complementarity of the nucleotide sequence of PACE4 BINDING SITE, designated SEQ ID:287686, to the nucleotide sequence of GAM26 RNA of FIG. 26A, designated SEQ ID:20604.

[1419] Yet a further function of GAM26 is therefore inhibition of paired basic amino acid cleaving system 4 (PACE4), a gene which encodes a Enzyme that processes hormone precursors by cleaving paired basic amino acids. Accordingly, utilities of GAM26 include diagnosis and treatment of the abovementioned diseases and clinical conditions.

[1420] The function of PACE4 has been established by previous studies. Using PCR methods, Kiefer et al. (1991) identified a second human subtilisin-like protease gene on chromosome 15. PCR primers were designed to be specific for the subfamily of eukaryotic subtilisin-like proteases with specificity for paired basic amino acid residue processing motifs. The gene encoding this protease, designated PACE4, also encoded a smaller subtilisin-related polypeptide derived by alternative mRNA splicing. As with the product of the PACE gene (136950), the tissue distribution of PACE4 was widespread, with comparatively higher levels in the liver. By in situ hybridization using isolated cosmid clones, Kiefer et al. (1991) mapped the PACE4 gene to chromosome 15 in close proximity to the PACE gene at 15q25-q26. Double labeling in situ hybridization suggested that the 2 genes are within 5 megabases of each other. Mbikay et al. (1995) mapped the gene for PACE4 (Pcsk6) to mouse chromosome 7 by RFLP analysis of a DNA panel from an interspecific backcross. It was located at a distance of 13 cM from the Pcsk3 locus, which specifies furin (136950), another member of this family of enzymes previously mapped to mouse chromosome 7. This is in concordance with the known close proximity of these 2 loci in the homologous region on human 15q25-qter. Pcsk3 and Pcsk6 map to a region of mouse chromosome 7 that has been associated cytogenetically with postnatal lethality in maternal disomy, suggesting that these genes may be imprinted.

[1421] Full details of the abovementioned studies are described in the following publications, the disclosure of which are hereby incorporated by reference:

[1422] iefer, M. C.; Tucker, J. E.; Joh, R.; Landsberg, K. E.; Saltman, D.; Barr, P. J.: Identification of a second human subtilisin-like protease gene in the fes/fps region of chromosome 15. DNA Cell Biol. 10: 757-769, 1991. PubMed ID: 1741956 2. Mbikay, M.; Seidah, N. G.; Chretien, M.; Simpson, E. M.: Chromosomal assignment of the genes for proprotein convertases PC4, PC5, and PACE 4 in mouse and human. Genomics 26: 123-129, 1995.

[1423] Further studies establishing the function and utilities of PACE4 are found in John Hopkins OMIM database record ID 167405, and in references numbered 1065-1066 listed hereinbelow.

[1424] Referring now to PACE4 BINDING SITE. paired basic amino acid cleaving system 4 (PACE4) is a target gene of GAM26, corresponding to GAM26-TARGET GENE of FIG. 26A. PACE4 BINDING SITE is a binding site found in an untranslated region of PACE4, corresponding to BINDING SITE of FIG. 26A. FIG. 26D illustrates the complementarity of the nucleotide sequence of PACE4 BINDING SITE, designated SEQ ID:287698, to the nucleotide sequence of GAM26 RNA of FIG. 26A, designated SEQ ID:20604.

[1425] Another function of GAM26 is therefore inhibition of paired basic amino acid cleaving system 4 (PACE4), a gene which encodes a Enzyme that processes hormone precursors by cleaving paired basic amino acids. Accordingly, utilities of GAM26 include diagnosis and treatment of the abovementioned diseases and clinical conditions. The function and utilities of PACE4 have been established by previous studies, as described hereinabove with reference to FIG. 26D.

[1426] Reference is now made to PACSIN1 BINDING SITE. protein kinase C and casein kinase substrate in neurons 1 (PACSIN1) is a target gene of GAM26, corresponding to GAM26-TARGET GENE of FIG. 26A. PACSIN1 BINDING SITE is a binding site found in an untranslated region of PACSIN1, corresponding to BINDING SITE of FIG. 26A. FIG. 26D illustrates the complementarity of the nucleotide sequence of PACSIN1 BINDING SITE, designated SEQ ID:287889, to the nucleotide sequence of GAM26 RNA of FIG. 26A, designated SEQ ID:20604.

[1427] Yet another function of GAM26 is therefore inhibition of protein kinase C and casein kinase substrate in neurons 1 (PACSIN1), a gene which encodes a Protein that plays a role in vesicle formation and transport. Accordingly, utilities of GAM26 include diagnosis and treatment of the abovementioned diseases and clinical conditions.

[1428] The function of PACSIN1 has been established by previous studies. By screening brain cDNA libraries for sequences with the potential to encode large proteins, Nagase et al. (2000) identified a partial cDNA encoding PACSIN1, which they called KIAA1379. The deduced 434-amino acid protein was predicted to be a homolog of rat syndapin I. RT-PCR analysis detected expression only in brain, predominantly in hippocampus. By EST database searching with mouse Pacsin1 as the probe, followed by 5-prime RACE, Sumoy et al. (2001) obtained full-length cDNAs encoding PACSIN1 and PACSIN3 (606513). Sequence analysis predicted that the 444-amino acid PACSIN1 protein, which is 95% identical to the mouse protein, contains a conserved N-terminal Fes/CIP4 homology (FCH) domain (also called the RAEYL motif), a central coiled-coil region, and a C-terminal SH3 motif. Northern blot analysis revealed strong expression of a 4.4-kb PACSIN1 transcript in brain, with much lower levels in heart, pancreas, and liver. In contrast, PACSIN2 (604960) and PACSIN3 were found to have ubiquitous expression patterns.

[1429] Full details of the abovementioned studies are described in the following publications, the disclosure of which are hereby incorporated by reference:

[1430] umoy, L.; Pluvinet, R.; Andreu, N.; Estivill, X.; Escarceller, M. PACSIN 3 is a novel SH3 domain cytoplasmic adapter protein of the pacsin-syndapin-FAP52 gene family. Gene 262: 199-205, 2001.

[1431] Further studies establishing the function and utilities of PACSIN1 are found in John Hopkins OMIM database record ID 606512, and in references numbered 1067-1068 listed hereinbelow.

[1432] Reference is now made to PAPOLA BINDING SITE. poly(A) polymerase alpha (PAPOLA) is a target gene of GAM26, corresponding to GAM26-TARGET GENE of FIG. 26A. PAPOLA BINDING SITE is a binding site found in an untranslated region of PAPOLA, corresponding to BINDING SITE of FIG. 26A. FIG. 26D illustrates the complementarity of the nucleotide sequence of PAPOLA BINDING SITE, designated SEQ ID:288993, to the nucleotide sequence of GAM26 RNA of FIG. 26A, designated SEQ ID:20604.

[1433] An additional function of GAM26 is therefore inhibition of poly(A) polymerase alpha (PAPOLA), a gene which encodes a Enzyme that creates the 3′ poly(a) tail of mRNA's. Accordingly, utilities of GAM26 include diagnosis and treatment of the abovementioned diseases and clinical conditions.

[1434] The function of PAPOLA has been established by previous studies. Polyadenylation of the 3-prime ends of eukaryotic mRNAs is a key event that takes place in the nucleus during maturation of mRNA. The reaction occurs in 2 distinct steps: endoribonucleolytic cleavage of the pre-RNA at the poly(A) site, followed by synthesis of the poly(A) tail at the 3-prime end of the upstream cleavage product. The poly(A) polymerase (PAP) is required for the adenosine addition reaction. Using RT-PCR on cytoplasmic RNA from primary human fibroblasts, Thuresson et al. (1994) obtained a cDNA encoding PAP. The deduced 500-amino acid protein is 99% similar to the bovine sequence. Western blot analysis of HeLa cell extracts detected heat-resistant 100- and 106-kD proteins in both nuclear and cytoplasmic fractions, and a 90-kD heat-sensitive protein in nuclear fractions. The 106-kD protein is phosphorylated. Functional analysis of mutated peptides showed that the N-terminal region of PAP is required for nonspecific polymerase activity, while both the N and C termini are required for specific polymerase activity.

[1435] Full details of the abovementioned studies are described in the following publications, the disclosure of which are hereby incorporated by reference:

[1436] huresson, A.-C.; Astrom, J.; Astrom, A.; Gronvik, K.-O.; Virtanen, A.: Multiple forms of poly(A) polymerases in human cells. Proc. Nat. Acad. Sci. 91: 979-983, 1994. PubMed ID: 8302877 2. Yamauchi, T.; Sugimoto, J.; Hatakeyama, T.; Asakawa, S.; Shimizu, N.; Isobe, M.: Assignment of the human poly(A) polymerase (PAP) gene to chromosome 14q32.1-q32.2 and isolation of a polymorphic CA repeat sequence. J. Hum. Genet. 44: 253-255, 1999.

[1437] Further studies establishing the function and utilities of PAPOLA are found in John Hopkins OMIM database record ID 605553, and in references numbered 1069-1070 and 1070 listed hereinbelow.

[1438] Referring now to PEA15 BINDING SITE. phosphoprotein enriched in astrocytes 15 (PEA15) is a target gene of GAM26, corresponding to GAM26-TARGET GENE of FIG. 26A. PEA15 BINDING SITE is a binding site found in an untranslated region of PEA15, corresponding to BINDING SITE of FIG. 26A. FIG. 26D illustrates the complementarity of the nucleotide sequence of PEA15 BINDING SITE, designated SEQ ID:301501, to the nucleotide sequence of GAM26 RNA of FIG. 26A, designated SEQ ID:20604.

[1439] A further function of GAM26 is therefore inhibition of phosphoprotein enriched in astrocytes 15 (PEA15), a gene which encodes a Protein that is a phosphoprotein and involved in glucose uptake. Accordingly, utilities of GAM26 include diagnosis and treatment of the abovementioned diseases and clinical conditions. The function and utilities of PEA15 have been established by previous studies, as described hereinabove with reference to FIG. 26D.

[1440] Referring now to PEA15 BINDING SITE. phosphoprotein enriched in astrocytes 15 (PEA15) is a target gene of GAM26, corresponding to GAM26-TARGET GENE of FIG. 26A. PEA15 BINDING SITE is a binding site found in an untranslated region of PEA15, corresponding to BINDING SITE of FIG. 26A. FIG. 26D illustrates the complementarity of the nucleotide sequence of PEA15 BINDING SITE, designated SEQ ID:301508, to the nucleotide sequence of GAM26 RNA of FIG. 26A, designated SEQ ID:20604.

[1441] Yet a further function of GAM26 is therefore inhibition of phosphoprotein enriched in astrocytes 15 (PEA15), a gene which encodes a Protein that is a phosphoprotein and involved in glucose uptake. Accordingly, utilities of GAM26 include diagnosis and treatment of the abovementioned diseases and clinical conditions. The function and utilities of PEA15 have been established by previous studies, as described hereinabove with reference to FIG. 26D.

[1442] Referring now to PEA15 BINDING SITE. phosphoprotein enriched in astrocytes 15 (PEA15) is a target gene of GAM26, corresponding to GAM26-TARGET GENE of FIG. 26A. PEA15 BINDING SITE is a binding site found in an untranslated region of PEA15, corresponding to BINDING SITE of FIG. 26A. FIG. 26D illustrates the complementarity of the nucleotide sequence of PEA15 BINDING SITE, designated SEQ ID:301547, to the nucleotide sequence of GAM26 RNA of FIG. 26A, designated SEQ ID:20604.

[1443] Another function of GAM26 is therefore inhibition of phosphoprotein enriched in astrocytes 15 (PEA15), a gene which encodes a Protein that is a phosphoprotein and involved in glucose uptake. Accordingly, utilities of GAM26 include diagnosis and treatment of the abovementioned diseases and clinical conditions. The function and utilities of PEA15 have been established by previous studies, as described hereinabove with reference to FIG. 26D.

[1444] Referring now to PEA15 BINDING SITE. phosphoprotein enriched in astrocytes 15 (PEA15) is a target gene of GAM26, corresponding to GAM26-TARGET GENE of FIG. 26A. PEA15 BINDING SITE is a binding site found in an untranslated region of PEA15, corresponding to BINDING SITE of FIG. 26A. FIG. 26D illustrates the complementarity of the nucleotide sequence of PEA15 BINDING SITE, designated SEQ ID:301572, to the nucleotide sequence of GAM26 RNA of FIG. 26A, designated SEQ ID:20604.

[1445] Yet another function of GAM26 is therefore inhibition of phosphoprotein enriched in astrocytes 15 (PEA15), a gene which encodes a Protein that is a phosphoprotein and involved in glucose uptake. Accordingly, utilities of GAM26 include diagnosis and treatment of the abovementioned diseases and clinical conditions. The function and utilities of PEA15 have been established by previous studies, as described hereinabove with reference to FIG. 26D.

[1446] Reference is now made to PIM1 BINDING SITE. pim-1 oncogene (PIM1) is a target gene of GAM26, corresponding to GAM26-TARGET GENE of FIG. 26A. PIM1 BINDING SITE is a binding site found in an untranslated region of PIM1, corresponding to BINDING SITE of FIG. 26A. FIG. 26D illustrates the complementarity of the nucleotide sequence of PIM1 BINDING SITE, designated SEQ ID:305922, to the nucleotide sequence of GAM26 RNA of FIG. 26A, designated SEQ ID:20604.

[1447] An additional function of GAM26 is therefore inhibition of pim-1 oncogene (PIM1), a gene which encodes a Enzyme that is a protooncogene and is associated with prostate cancer. Accordingly, utilities of GAM26 include diagnosis and treatment of the abovementioned diseases and clinical conditions.

[1448] The function of PIM1 has been established by previous studies. Amson et al. (1989) showed that the 33-kD product of the PIM gene is highly expressed in the liver and spleen during fetal hematopoiesis. In contrast, it is only slightly expressed in circulating granulocytes in adults. It was overexpressed in hematopoietic malignancies, particularly in myeloid and lymphoid acute leukemias. The results implied a physiologic role of the PIM1 oncogene during hematopoietic development and a deregulation of the gene in various leukemias

[1449] Animal model experiments lend further support to the function of PIM1. To understand the function of Pim1 and its role in hematopoietic development, Laird et al. (1993) generated mice deficient in Pim1 function. Pim1-deficient mice were ostensibly normal, healthy, and fertile; however, detailed analysis demonstrated a correlation of Pim1 deficiency with erythrocyte microcytosis, whereas overexpression of Pim1 in transgenic mice resulted in erythrocyte macrocytosis

[1450] It is appreciated that the abovementioned animal model for PIM1 is acknowledged by those skilled in the art as a scientifically valid animal model, as can be further appreciated from the publications sited hereinbelow.

[1451] Full details of the abovementioned studies are described in the following publications, the disclosure of which are hereby incorporated by reference:

[1452] Laird, P. W.; van der Lugt, N. M. T.; Clarke, A.; Domen, J.; Linders, K.; McWhir, J.; Berns, A.; Hooper, M.: In vivo analysis of Pim-1 deficiency. Nucleic Acids Res. 21: 4750-4755, 1993. PubMed ID: 8233823 Amson, R.; Sigaux, F.; Przedborski, S.; Flandrin, G.; Givol, D.; Telerman, A.: The human protooncogene product p33pim is expressed during fetal hematopoiesis and in diverse leukemias. Proc. Nat. Acad. Sci. 86: 8857-8861, 1989.

[1453] Further studies establishing the function and utilities of PIM1 are found in John Hopkins OMIM database record ID 164960, and in references numbered 1071-1082 listed hereinbelow.

[1454] Referring now to PIM1 BINDING SITE. pim-1 oncogene (PIM1) is a target gene of GAM26, corresponding to GAM26-TARGET GENE of FIG. 26A. PIM1 BINDING SITE is a binding site found in an untranslated region of PIM1, corresponding to BINDING SITE of FIG. 26A. FIG. 26D illustrates the complementarity of the nucleotide sequence of PIM1 BINDING SITE, designated SEQ ID:305956, to the nucleotide sequence of GAM26 RNA of FIG. 26A, designated SEQ ID:20604.

[1455] A further function of GAM26 is therefore inhibition of pim-1 oncogene (PIM1), a gene which encodes a Enzyme that is a protooncogene and is associated with prostate cancer. Accordingly, utilities of GAM26 include diagnosis and treatment of the abovementioned diseases and clinical conditions. The function and utilities of PIM1 have been established by previous studies, as described hereinabove with reference to FIG. 26D.

[1456] Reference is now made to PITPN BINDING SITE. phosphotidylinositol transfer protein (PITPN) is a target gene of GAM26, corresponding to GAM26-TARGET GENE of FIG. 26A. PITPN BINDING SITE is a binding site found in an untranslated region of PITPN, corresponding to BINDING SITE of FIG. 26A. FIG. 26D illustrates the complementarity of the nucleotide sequence of PITPN BINDING SITE, designated SEQ ID:306515, to the nucleotide sequence of GAM26 RNA of FIG. 26A, designated SEQ ID:20604.

[1457] Yet a further function of GAM26 is therefore inhibition of phosphotidylinositol transfer protein (PITPN), a gene which encodes a Protein that catalyzes the transfer of ptdins and phosphatidylcholine between membranes. Accordingly, utilities of GAM26 include diagnosis and treatment of the abovementioned diseases and clinical conditions.

[1458] The function of PITPN has been established by previous studies. Phosphatidylinositol transfer protein is a member of a diverse set of cytosolic phospholipid transfer proteins that are distinguished by their ability to transfer phospholipids between membranes in vitro (Wirtz, 1991). The rat PITPN gene encodes a polypeptide of 271 amino acids and is expressed in a wide range of tissues (Dickeson et al., 1989). The protein predicted by the human PITPN gene cloned and sequenced by Dickeson et al. (1994) showed only 3 amino acid sequence differences from the rat protein, 2 of which represented conservative substitutions. Hay and Martin (1993) reported studies suggesting that PITPN is identical to priming-specific factor-3, one of the 3 priming factors involved in the ATP-dependent priming of Ca(2+)-activated secretion. Rat PITPN shares 40% amino acid homology over its entire length with the Drosophila retinal degeneration B (rdgB) protein (Vihtelic et al., 1993). Flies carrying the rdgB mutation undergo light-enhanced retinal degeneration.

[1459] Animal model experiments lend further support to the function of PITPN. The mouse ‘vibrator’ (vb) mutation causes an early-onset progressive action tremor, degeneration of brain stem and spinal cord neurons, and juvenile death. Hamilton et al. (1997) cloned the vb mutation using an in vivo positional complementation approach followed by complete resequencing of the resulting 76-kb critical region in vb and its progenitor strain. The authors showed that the vb mutation is an intracisternal A particle retroposon insertion in intron 4 of the Pitpn gene, causing a 5-fold reduction in Pitpn RNA and protein levels. Expression of neurofilament light chain (NEFL; 162280) was also reduced in vb mice, suggesting 1 signaling pathway that may underlie vb pathology. The vb phenotype was suppressed in 1 intercross. By a complete genome scan, they mapped a major suppressor locus (Mvb1) to proximal mouse chromosome 19

[1460] It is appreciated that the abovementioned animal model for PITPN is acknowledged by those skilled in the art as a scientifically valid animal model, as can be further appreciated from the publications sited hereinbelow.

[1461] Full details of the abovementioned studies are described in the following publications, the disclosure of which are hereby incorporated by reference:

[1462] Hamilton, B. A.; Smith, D. J.; Mueller, K. L.; Kerrebrock, A. W.; Bronson, R. T.; van Berkel, V.; Daly, M. J.; Kruglyak, L.; Reeve, M. P.; Nemhauser, J. L.; Hawkins, T. L.; Rubin, E. M.; Lander, E. S.: The vibrator mutation causes neurodegeneration via reduced expression of PITP-alpha: positional complementation cloning and extragenic suppression. Neuron 18: 711-722, 1997. PubMed ID: 9182797. Wirtz, K. W. A.: Phospholipid transfer proteins. Annu. Rev. Biochem. 60: 73-99, 1991. PubMed ID: 1883207. Dickeson, S. K.; Lim, C. N.; Schuyler, G. T.; Dalton, T. P.; Helmkamp, G. M., Jr.; Yarbrough, L. R.: Isolation and sequence of cDNA clones encoding rat phosphatidylinositol transfer protein. J. Biol. Chem. 264: 16557-16564, 1989.

[1463] Further studies establishing the function and utilities of PITPN are found in John Hopkins OMIM database record ID 600174, and in references numbered 1083-1089 listed hereinbelow.

[1464] Reference is now made to POLI BINDING SITE. polymerase (DNA directed) iota (POLI) is a target gene of GAM26, corresponding to GAM26-TARGET GENE of FIG. 26A. POLI BINDING SITE is a binding site found in an untranslated region of POLI, corresponding to BINDING SITE of FIG. 26A. FIG. 26D illustrates the complementarity of the nucleotide sequence of POLI BINDING SITE, designated SEQ ID:312045, to the nucleotide sequence of GAM26 RNA of FIG. 26A, designated SEQ ID:20604.

[1465] Another function of GAM26 is therefore inhibition of polymerase (DNA directed) iota (POLI), a gene which encodes a Enzyme that incorporates deoxynucleotides opposite DNA lesions. Accordingly, utilities of GAM26 include diagnosis and treatment of the abovementioned diseases and clinical conditions.

[1466] The function of POLI has been established by previous studies. The S. cerevisiae RAD30 and human RAD30A genes encode Pol-eta, which bypasses a cis-syn thymine-thymine dimer efficiently and accurately. Johnson et al. (2000) showed that the related human gene RAD30B encodes the DNA polymerase Pol-iota, which misincorporates deoxynucleotides at a high rate. To bypass damage, Pol-iota specifically incorporates deoxynucleotides opposite highly distorting or noninstructional DNA lesions. This action is combined with that of DNA Pol-zeta (602776), which is essential for damaged-induced mutagenesis, to complete the lesion bypass. Pol-zeta is very inefficient in inserting deoxynucleotides opposite DNA lesions, but readily extends from such deoxynucleotides once they have been inserted. Thus, in a new model for mutagenic bypass of DNA lesions in eukaryotes, the 2 DNA polymerases act sequentially: Pol-iota incorporates deoxynucleotides opposite DNA lesions, and Pol-zeta functions as a mispair extender. Bebenek et al. (2001) reported that human Pol-iota has an intrinsic 5-prime-deoxyribose phosphate (dRP) lyase activity. In reactions reconstituted with uracil-DNA glycosylase (191525), apurinic/apyrimidinic (AP) endonuclease (107748), and DNA ligase I (126391), Pol-iota can use its dRP lyase and polymerase activities to repair G-U and A-U pairs in DNA. These data and 3 distinct catalytic properties of Pol-iota implicate it in specialized forms of base excision repair.

[1467] Full details of the abovementioned studies are described in the following publications, the disclosure of which are hereby incorporated by reference:

[1468] Johnson, R. E.; Washington, M. T.; Haracska, L.; Prakash, S.; Prakash, L.: Eukaryotic polymerases iota and zeta act sequentially to bypass DNA lesions. Nature 406: 1015-1019, 2000. PubMed ID: 10984059 Bebenek, K.; Tissier, A.; Frank, E. G.; McDonald, J. P.; Prasad, R.; Wilson, S. H.; Woodgate, R.; Kunkel, T. A. 5-prime-deoxyribose phosphate lyase activity of human DNA polymerase iota in vitro. Science 291: 2156-2159, 2001.

[1469] Further studies establishing the function and utilities of POLI are found in John Hopkins OMIM database record ID 605252, and in references numbered 1090-1092 listed hereinbelow.

[1470] Reference is now made to POLRMT BINDING SITE. polymerase (RNA) mitochondrial (DNA directed) (POLRMT) is a target gene of GAM26, corresponding to GAM26-TARGET GENE of FIG. 26A. POLRMT BINDING SITE is a binding site found in an untranslated region of POLRMT, corresponding to BINDING SITE of FIG. 26A. FIG. 26D illustrates the complementarity of the nucleotide sequence of POLRMT BINDING SITE, designated SEQ ID:312593, to the nucleotide sequence of GAM26 RNA of FIG. 26A, designated SEQ ID:20604.

[1471] Yet another function of GAM26 is therefore inhibition of polymerase (RNA) mitochondrial (DNA directed) (POLRMT), a gene which encodes a Enzyme that is a mitochondrial DNA-directed RNA polymerase. Accordingly, utilities of GAM26 include diagnosis and treatment of the abovementioned diseases and clinical conditions.

[1472] The function of POLRMT has been established by previous studies. Mitochondria of all organisms contain a genome that is distinct from that of the nucleus. The circular mitochondrial chromosome contains 37 genes that encode the RNA components of the mitochondrial translational apparatus, i.e., 22 transfer RNAs and 2 ribosomal RNA genes, as well as 13 polypeptide-encoding genes. All 13 polypeptides are essential components of 4 of the 5 complexes that form the mitochondrial oxidative phosphorylation (OXPHOS) pathway (complexes I, III, IV, and V). However, gene expression in mitochondria relies upon numerous nuclear genes that encode protein components required for transcription and translation of the mtDNA-encoded genes, as well as protein and RNA components required for replication of mtDNA. In addition, nuclear genes encode factors controlling the import, assembly, and turnover of OXPHOS complexes, and proteins acting as general regulators of mitochondrial function. Nuclear-encoded mitochondrial proteins are synthesized by cytoplasmic ribosomes, usually as precursors containing an N-terminal extension. Import into mitochondria is carried out by a complex, ATP-dependent transport system, followed by cleavage of the leader peptide, which eventually produces a mature, functional protein. Tiranti et al. (1997) noted that abnormalities in the nuclear genome repertoire controlling mitochondrial biogenesis were proposed as the cause of some human disorders characterized by the presence of mtDNA abnormalities and mendelian transmission. Both autosomal dominant (157640) and autosomal recessive (601779) forms of chronic progressive external ophthalmoplegia are associated with the accumulation of multiple deletions of mtDNA in stable tissues. Another example is tissue-specific mtDNA depletion (251880), an autosomal recessive disorder causing severe organ-specific syndromes in early infancy. Mendelian inheritance indicates the presence of transmissible mutations in nuclear genes that can ultimately damage the structural integrity of the mtDNA molecule or its copy number. Genes involved in the control of mtDNA replication and expression are considered attractive candidates for these disorders. The characterization of the collection of human proteins related to mitochondria, the so-called human mitochondrial proteome, is important in the elucidation of fundamental mechanisms of nucleo-mitochondrial intergenomic signaling, as well as to clinical researchers interested in mitochondrial disorders. Tiranti et al. (1997) used a gene cloning strategy based on the screening of the expressed sequence tags database (dbEST), using sequences of mitochondrial housekeeping proteins of yeast, to identify the cDNA encoding the precursor of the human mitochondrial RNA polymerase. They identified a 3,831-bp human cDNA predicted to encode a protein of 1,230 amino acid residues. The protein sequence showed significant homology with sequences corresponding to mitochondrial RNA polymerases from lower eukaryotes and to RNA polymerases from several bacteriophages. Mitochondrial RNA polymerase carries out the central activity of mitochondrial gene expression and, by providing the RNA primers for initiation of replication, is also implicated in the maintenance and propagation of the mitochondrial genome. Thus, it is an attractive candidate for disorders of nucleo-mitochondrial intergenomic signaling.

[1473] Full details of the abovementioned studies are described in the following publications, the disclosure of which are hereby incorporated by reference:

[1474] Tiranti, V.; Savoia, A.; Forti, F.; D'Apolito, M.-F.; Centra, M.; Rocchi, M.; Zeviani, M.: Identification of the gene encoding the human mitochondrial RNA polymerase (h-mtRPOL) by cyberscreening of the Expressed Sequence Tags database. Hum. Molec. Genet. 6: 615-625, 1997. PubMed ID: 9097968 Tiranti, V.; Savoia, A.; Forti, F.; D'Apolito, M.-F.; Centra, M.; Rocchi, M.; Zeviani, M.: Identification of the gene encoding the human mitochondrial RNA polymerase (h-mtRPOL) by cyberscreening of the Expressed Sequence Tags database. Hum. Molec. Genet. 6: 615-625, 1997.

[1475] Further studies establishing the function and utilities of POLRMT are found in John Hopkins OMIM database record ID 601778, and in references numbered 1093-1095 listed hereinbelow.

[1476] Reference is now made to PP BINDING SITE. pyrophosphatase (inorganic) (PP) is a target gene of GAM26, corresponding to GAM26-TARGET GENE of FIG. 26A. PP BINDING SITE is a binding site found in an untranslated region of PP, corresponding to BINDING SITE of FIG. 26A. FIG. 26D illustrates the complementarity of the nucleotide sequence of PP BINDING SITE, designated SEQ ID:313812, to the nucleotide sequence of GAM26 RNA of FIG. 26A, designated SEQ ID:20604.

[1477] An additional function of GAM26 is therefore inhibition of pyrophosphatase (inorganic) (PP), a gene which encodes a Enzyme that catalyzes the hydrolysis of pyrophosphate to inorganic phosphate. Accordingly, utilities of GAM26 include diagnosis and treatment of the abovementioned diseases and clinical conditions.

[1478] The function of PP has been established by previous studies. Among 3000 unrelated persons, Fisher et al. (1974) found no genetically determined variants of the enzyme in red cells. Assignment of the structural gene locus for inorganic pyrophosphatase to chromosome 10 was first reported by Van Cong et al. (1975) and confirmed by somatic cell hybrid studies in two other laboratories (McAlpine et al., 1976; Chern, 1976). From dosage studies in a patient trisomic for 10pter-10q 11.1, Snyder et al. (1984) showed that PP is not on the short arm; red cell PP levels were normal.

[1479] Full details of the abovementioned studies are described in the following publications, the disclosure of which are hereby incorporated by reference:

[1480] Van Cong, N.; Rebourcet, R.; Weil, D.; Pangalos, C.; Frezal, J. Localisation d'un locus de structure de la pyrophosphatase inorganique ‘erythrocytaire’ sur le chromosome 10 chez l'homme par la methode d'hypridation cellulaire homme-hamster. Comp. Rend. Acad. Sci. (Paris) 281: 435-438, 1975.

[1481] Further studies establishing the function and utilities of PP are found in John Hopkins OMIM database record ID 179030, and in references numbered 1096-1102 listed hereinbelow.

[1482] Referring now to CACNA1A BINDING SITE. calcium channel, voltage-dependent, P/Q type, alpha 1A subunit (CACNA1A) is a target gene of GAM26, corresponding to GAM26-TARGET GENE of FIG. 26A. CACNA1A BINDING SITE is a binding site found in an untranslated region of CACNA1A, corresponding to BINDING SITE of FIG. 26A. FIG. 26D illustrates the complementarity of the nucleotide sequence of CACNA1A BINDING SITE, designated SEQ ID:317209, to the nucleotide sequence of GAM26 RNA of FIG. 26A, designated SEQ ID:20604.

[1483] A further function of GAM26 is therefore inhibition of calcium channel, voltage-dependent, P/Q type, alpha 1A subunit (CACNA1A), a gene which encodes a Protein that is associated with episodic ataxia type 2, familial hemiplegic migraine, spinocerebellar ataxia type 6, and idiopathic generalized epilepsy,. Accordingly, utilities of GAM26 include diagnosis and treatment of the abovementioned diseases and clinical conditions. The function and utilities of CACNA1A have been established by previous studies, as described hereinabove with reference to FIG. 26D.

[1484] Referring now to CACNA1A BINDING SITE. calcium channel, voltage-dependent, P/Q type, alpha 1A subunit (CACNA1A) is a target gene of GAM26, corresponding to GAM26-TARGET GENE of FIG. 26A. CACNA1A BINDING SITE is a binding site found in an untranslated region of CACNA1A, corresponding to BINDING SITE of FIG. 26A. FIG. 26D illustrates the complementarity of the nucleotide sequence of CACNA1A BINDING SITE, designated SEQ ID:317209, to the nucleotide sequence of GAM26 RNA of FIG. 26A, designated SEQ ID:20604.

[1485] Yet a further function of GAM26 is therefore inhibition of calcium channel, voltage-dependent, P/Q type, alpha 1A subunit (CACNA1A), a gene which encodes a Protein that is associated with episodic ataxia type 2, familial hemiplegic migraine, spinocerebellar ataxia type 6, and idiopathic generalized epilepsy,. Accordingly, utilities of GAM26 include diagnosis and treatment of the abovementioned diseases and clinical conditions. The function and utilities of CACNA1A have been established by previous studies, as described hereinabove with reference to FIG. 26D.

[1486] Referring now to PPP3CA BINDING SITE. protein phosphatase 3 (formerly 2B), catalytic subunit, alpha isoform (PPP3CA) is a target gene of GAM26, corresponding to GAM26-TARGET GENE of FIG. 26A. PPP3CA BINDING SITE is a binding site found in an untranslated region of PPP3CA, corresponding to BINDING SITE of FIG. 26A. FIG. 26D illustrates the complementarity of the nucleotide sequence of PPP3CA BINDING SITE, designated SEQ ID:317209, to the nucleotide sequence of GAM26 RNA of FIG. 26A, designated SEQ ID:20604.

[1487] Another function of GAM26 is therefore inhibition of protein phosphatase 3 (formerly 2B), catalytic subunit, alpha isoform (PPP3CA), a gene which encodes a Enzyme that is the catalytic subunit of calcium-dependent, calmodulin-stimulated protein phosphatase. Accordingly, utilities of GAM26 include diagnosis and treatment of the abovementioned diseases and clinical conditions. The function and utilities of PPP3CA have been established by previous studies, as described hereinabove with reference to FIG. 26D.

[1488] Referring now to GABRB3 BINDING SITE. gamma-aminobutyric acid (GABA) A receptor, beta 3 (GABRB3) is a target gene of GAM26, corresponding to GAM26-TARGET GENE of FIG. 26A. GABRB3 BINDING SITE is a binding site found in an untranslated region of GABRB3, corresponding to BINDING SITE of FIG. 26A. FIG. 26D illustrates the complementarity of the nucleotide sequence of GABRB3 BINDING SITE, designated SEQ ID:317210, to the nucleotide sequence of GAM26 RNA of FIG. 26A, designated SEQ ID:20604.

[1489] Yet another function of GAM26 is therefore inhibition of gamma-aminobutyric acid (GABA) A receptor, beta 3 (GABRB3), a gene which encodes a receptor that mediates neuronal inhibition by binding to the gaba/benzodiazepine receptor and opening an integral chloride channel. and is associated with Angelman syndrome and Prader-Willi syndrome. Accordingly, utilities of GAM26 include diagnosis and treatment of the abovementioned diseases and clinical conditions. The function and utilities of GABRB3 have been established by previous studies, as described hereinabove with reference to FIG. 26D.

[1490] Referring now to PPP3CA BINDING SITE. protein phosphatase 3 (formerly 2B), catalytic subunit, alpha isoform (PPP3CA) is a target gene of GAM26, corresponding to GAM26-TARGET GENE of FIG. 26A. PPP3CA BINDING SITE is a binding site found in an untranslated region of PPP3CA, corresponding to BINDING SITE of FIG. 26A. FIG. 26D illustrates the complementarity of the nucleotide sequence of PPP3CA BINDING SITE, designated SEQ ID:317210, to the nucleotide sequence of GAM26 RNA of FIG. 26A, designated SEQ ID:20604.

[1491] An additional function of GAM26 is therefore inhibition of protein phosphatase 3 (formerly 2B), catalytic subunit, alpha isoform (PPP3CA), a gene which encodes a Enzyme that is the catalytic subunit of calcium-dependent, calmodulin-stimulated protein phosphatase. Accordingly, utilities of GAM26 include diagnosis and treatment of the abovementioned diseases and clinical conditions. The function and utilities of PPP3CA have been established by previous studies, as described hereinabove with reference to FIG. 26D.

[1492] Referring now to PPP3CA BINDING SITE. protein phosphatase 3 (formerly 2B), catalytic subunit, alpha isoform (PPP3CA) is a target gene of GAM26, corresponding to GAM26-TARGET GENE of FIG. 26A. PPP3CA BINDING SITE is a binding site found in an untranslated region of PPP3CA, corresponding to BINDING SITE of FIG. 26A. FIG. 26D illustrates the complementarity of the nucleotide sequence of PPP3CA BINDING SITE, designated SEQ ID:317246, to the nucleotide sequence of GAM26 RNA of FIG. 26A, designated SEQ ID:20604.

[1493] A further function of GAM26 is therefore inhibition of protein phosphatase 3 (formerly 2B), catalytic subunit, alpha isoform (PPP3CA), a gene which encodes a Enzyme that is the catalytic subunit of calcium-dependent, calmodulin-stimulated protein phosphatase. Accordingly, utilities of GAM26 include diagnosis and treatment of the abovementioned diseases and clinical conditions. The function and utilities of PPP3CA have been established by previous studies, as described hereinabove with reference to FIG. 26D.

[1494] Reference is now made to PRKAA2 BINDING SITE. protein kinase, AMP-activated, alpha 2 catalytic subunit (PRKAA2) is a target gene of GAM26, corresponding to GAM26-TARGET GENE of FIG. 26A. PRKAA2 BINDING SITE is a binding site found in an untranslated region of PRKAA2, corresponding to BINDING SITE of FIG. 26A. FIG. 26D illustrates the complementarity of the nucleotide sequence of PRKAA2 BINDING SITE, designated SEQ ID:318787, to the nucleotide sequence of GAM26 RNA of FIG. 26A, designated SEQ ID:20604.

[1495] Yet a further function of GAM26 is therefore inhibition of protein kinase, AMP-activated, alpha 2 catalytic subunit (PRKAA2), a gene which encodes a Protein that are responsible for the regulation of fatty acid synthesis by phosphorylation of acetyl-coa carboxylase. Accordingly, utilities of GAM26 include diagnosis and treatment of the abovementioned diseases and clinical conditions.

[1496] The function of PRKAA2 has been established by previous studies. AMP-activated protein kinase plays a key role in the regulation of fatty acid and cholesterol metabolism (Hardie, 1992; Hardie and MacKintosh, 1992). In vitro, it phosphorylates and inactivates 3-hydroxy-3-methylglutaryl-CoA reductase (HMGCR; 142910) and acetyl-CoA carboxylase (ACC; 200350), key enzymes involved in regulating de novo biosynthesis of cholesterol and fatty acids, respectively. See PRKAA1 (602739) for additional background. Beri et al. (1994) used a cDNA encoding rat liver AMPK to isolate human skeletal muscle AMPK cDNA clones. The human cDNA was more than 90% homologous to the rat sequence and predicted a protein of 62.3 kD that closely agreed with the mass of human AMPK observed in Western blots of human tissue extracts. A cDNA probe was used to identify a 9.5-kb transcript in several human tissues and to isolate human genomic clones. Stapleton et al. (1997) showed that rat liver Ampk-alpha-2 is associated with Ampk-beta-1 (PRKAB1; 602740) and Ampk-gamma-1 (PRKAG1; 602742). They noted that Ampk-alpha-1 (PRKAA1) is also associated with these beta and gamma isoforms. Beri et al. (1994) used PCR mapping of rodent/human hybrid cell lines to localize the human AMPK gene to chromosome 1, and they sublocalized the AMPK gene to 1p31 by fluorescence in situ hybridization with a human genomic clone. (The cDNA referred to as AMPK by Beri et al. (1994) encodes the alpha-2 subunit of AMPK.) Tsujikawa et al. (1998) determined that PRKAA2 and the CDC-like kinase-2 gene (CLK2; 602989) are located in the same interval of approximately 2.6 cM between D1S2890 and D1S2801. They suggested that CLK2 and PRKAA2 are possible candidate genes for gelatinous drop-like corneal dystrophy (204870). Mu et al. (2001) investigated the role of the metabolic sensor AMPK in the regulation of glucose transport in skeletal muscle. Expression in mouse muscle of a dominant inhibitory mutant of Ampk-alpha-2 completely blocked the ability of hypoxia and 5-aminoimidazole-4-carboxamide ribonucleoside (AICAR) to activate hexose uptake, while only partially reducing contraction-stimulated hexose uptake. These data indicated that AMPK transmits a portion of the signal by which muscle contraction increases glucose uptake, but other AMPK-independent pathways also contribute to the response. Minokoshi et al. (2002) demonstrated that leptin (164160) selectively stimulates phosphorylation and activation of AMPK-alpha-2 in skeletal muscle, thus establishing an additional signaling pathway for leptin. Early activation of AMPK occurs by leptin acting directly on muscle, whereas later activation depends on leptin functioning through the hypothalamic-sympathetic nervous system axis. In parallel with its activation of AMPK, leptin suppresses the activity of ACC (200350, 601557), thereby stimulating the oxidation of fatty acids in muscle. Blocking AMPK activation inhibits the phosphorylation of ACC stimulated by leptin. Minokoshi et al. (2002) concluded that their data identify AMPK as a principal mediator of the effects of leptin on fatty acid metabolism in muscle.

[1497] Full details of the abovementioned studies are described in the following publications, the disclosure of which are hereby incorporated by reference:

[1498] inokoshi, Y.; Kim, Y.-B.; Peroni, O. D.; Fryer, L. G. D.; Muller, C.; Carling, D.; Kahn, B. B.: Leptin stimulates fatty-acid oxidation by activating AMP-activated protein kinase. Nature 415: 339-343, 2002. PubMed ID: 11797013 5. Mu, J.; Brozinick, J. T., Jr.; Valladares, O.; Bucan, M.; Birnbaum, M. J.: A role for AMP-activated protein kinase in contraction- and hypoxia-regulated glucose transport in skeletal muscle. Molec. Cell 7: 1085-1094, 2001.

[1499] Further studies establishing the function and utilities of PRKAA2 are found in John Hopkins OMIM database record ID 600497, and in references numbered 1103-1109 listed hereinbelow.

[1500] Referring now to PRKAA2 BINDING SITE. protein kinase, AMP-activated, alpha 2 catalytic subunit (PRKAA2) is a target gene of GAM26, corresponding to GAM26-TARGET GENE of FIG. 26A. PRKAA2 BINDING SITE is a binding site found in an untranslated region of PRKAA2, corresponding to BINDING SITE of FIG. 26A. FIG. 26D illustrates the complementarity of the nucleotide sequence of PRKAA2 BINDING SITE, designated SEQ ID:318794, to the nucleotide sequence of GAM26 RNA of FIG. 26A, designated SEQ ID:20604.

[1501] Another function of GAM26 is therefore inhibition of protein kinase, AMP-activated, alpha 2 catalytic subunit (PRKAA2), a gene which encodes a Protein that are responsible for the regulation of fatty acid synthesis by phosphorylation of acetyl-coa carboxylase. Accordingly, utilities of GAM26 include diagnosis and treatment of the abovementioned diseases and clinical conditions. The function and utilities of PRKAA2 have been established by previous studies, as described hereinabove with reference to FIG. 26D.

[1502] Reference is now made to PSEN1 BINDING SITE. presenilin 1 (Alzheimer disease 3) (PSEN1) is a target gene of GAM26, corresponding to GAM26-TARGET GENE of FIG. 26A. PSEN1 BINDING SITE is a binding site found in an untranslated region of PSEN1, corresponding to BINDING SITE of FIG. 26A. FIG. 26D illustrates the complementarity of the nucleotide sequence of PSEN1 BINDING SITE, designated SEQ ID:322696, to the nucleotide sequence of GAM26 RNA of FIG. 26A, designated SEQ ID:20604.

[1503] Yet another function of GAM26 is therefore inhibition of presenilin 1 (Alzheimer disease 3) (PSEN1), a gene which encodes a Protein that is associated with ALZHEIMER DISEASE, FAMILIAL, TYPE 3. Accordingly, utilities of GAM26 include diagnosis and treatment of the abovementioned diseases and clinical conditions.

[1504] The function of PSEN1 has been established by previous studies. St. George-Hyslop et al. (1992), Van Broeckhoven et al. (1992), and Mullan et al. (1992) presented evidence of location of a mutation responsible for early-onset familial Alzheimer disease on 14q. Mullan et al. (1992) placed the gene proximal to that for alpha-1-antichymotrypsin (107280), thus excluding AACT, which is a component of plaque cores and a protease inhibitor, as a possible candidate gene for AD. In a subset of early-onset familial Alzheimer disease (FAD), mutations in the amyloid precursor protein (APP; 104760) have been identified; for example, 3 have been found in codon 717. However, the majority of early-onset FAD families do not show linkage to, or appear to have mutations in, the amyloid precursor protein gene. There may be an additional FAD locus on chromosome 21 separate from the APP locus (St. George-Hyslop et al., 1987; St. George-Hyslop et al., 1990; Tanzi et al., 1991), and a locus on chromosome 19 seemed quite definite (Pericak-Vance et al., 1991; Schellenberg et al., 1992). Schellenberg et al. (1992) indicated the existence of yet another locus for early-onset Alzheimer disease on chromosome 14; a total lod score of 9.15 at theta=0.01 was obtained with the marker D14S43 located at 14q24.3. A single early-onset family yielded a lod score of 4.89 (theta=0.0). When no assumptions were made about age-dependent penetrance, significant results were still obtained (maximum lod=5.94 at theta=0.0) despite the loss of power. Kamal et al. (2000) demonstrated that the axonal transport of APP in neurons is mediated by the direct binding of APP to the kinesin light chain (600025) subunit of kinesin-I. Kamal et al. (2001) identified an axonal membrane compartment that contains APP, beta-secretase (604252), and presenilin-1. The fast anterograde axonal transport of this compartment is mediated by APP and kinesin-I. Proteolytic processing of APP can occur in the compartment in vitro and in vivo in axons. This proteolysis generates amyloid-beta and a carboxy-terminal fragment of APP, and liberates kinesin-I from the membrane. Kamal et al. (2001) concluded that APP functions as a kinesin-I membrane receptor, mediating the axonal transport of beta-secretase and presenilin-1, and that processing of APP to amyloid-beta by secretases can occur in an axonal membrane compartment transported by kinesin-I. Lambert et al. (2001) studied 287 individuals with Alzheimer disease. In addition, brain samples from a further 99 cases were studied. They carried out genotype analysis at the polymorphic site at position −48 in the PS1 gene promoter. Lambert et al. (2001) found an increased risk of developing Alzheimer disease associated with the −48CC genotype (odds ratio=1.55; 95% CI 1.03 to 2.35). This appeared to be present in both familial and sporadic cases and independent of the APOE4 (see 107741) allele genotype. They also found that the A-beta load in the brains of individuals with the −48CC genotype was significantly increased (p less than 0.003). PS1 and PS2 have been suggested to be gamma-secretases responsible for the proteolytic cleavage of amyloid precursor protein (104760) to form amyloid beta. Wilson et al. (2002) examined whether these presenilins are required for the generation of multiple amyloid beta species by analyzing the production of several forms of secreted and intracellular amyloid beta in mouse cells lacking PS1, PS2, or both proteins. Although most amyloid beta species were abolished in PS1/PS2−/− cells, the production of intracellular A-beta-42 generated in the endoplasmic reticulum/intermediate compartment was unaffected by the absence of these proteins, either singly or in combination. Wilson et al. (2002) concluded that production of this pool of amyloid beta occurs independently of PS1/PS2, and therefore, another gamma-secretase activity must be responsible for cleavage of APP within the early secretory compartments

[1505] Animal model experiments lend further support to the function of PSEN1. Handler et al. (2000) analyzed Psen1-deficient mouse embryos and observed that lack of Psen1 leads to premature differentiation of neural progenitor cells. They concluded that Psen1 has a role in a cell fate decision between postmitotic neurons and neural progenitor cells. Handler et al. (2000) also detected changes in expression of genes involved in Notch signaling. They concluded that Psen1 controls neuronal differentiation in association with the downregulation of Notch signaling during neurogenesis. Due to the perinatal lethality of Psen1 knockout mice, Yu et al. (2001) developed a conditional knockout mouse (cKO), in which Psen1 inactivation was restricted to the postnatal forebrain. The cKO mice were viable with no gross abnormalities, allowing Yu et al. (2001) to investigate the effects of Psen1 inactivation on amyloid precursor protein processing the Notch signaling pathway, and synaptic and cognitive function in the adult brain. They concluded from their studies that inactivation of Psen1 function in the adult cerebral cortex leads to reduced beta-amyloid generation and subtle cognitive deficits without affecting expression of Notch downstream target genes. Using 3 groups of transgenic mice carrying the presenilin A246E mutation (104311.0003), the amyloid precursor protein K670N/M671L mutation (APP; 104760.0008), or both mutations, Dineley et al. (2002) showed that coexpression of both mutant transgenes resulted in accelerated beta-amyloid accumulation, first detected at 7 months in the cortex and hippocampus, compared to the APP or PS1 transgene alone. Contextual fear learning, a hippocampus-dependent associative learning task, but not cued fear learning, was impaired in mice carrying both mutations or the APP mutation, but not the PS1 mutation alone. The impairment manifested at 5 months of age, preceding detectable plaque deposition, and worsened with age. Dineley et al. (2002) also found increased levels of alpha-7 nicotinic acetylcholine receptor protein in the hippocampus, which they hypothesized contributes to disease progression via chronic activation of the ERK MAPK cascade.

[1506] It is appreciated that the abovementioned animal model for PSEN1 is acknowledged by those skilled in the art as a scientifically valid animal model, as can be further appreciated from the publications sited hereinbelow.

[1507] Full details of the abovementioned studies are described in the following publications, the disclosure of which are hereby incorporated by reference:

[1508] Dineley, K. T.; Xia, X.; Bui, D.; Sweatt, J. D.; Zheng, H. Accelerated plaque accumulation, associative learning deficits, and up-regulation of alpha-7 nicotinic receptor protein in transgenic mice co-expressing mutant human presenilin 1 and amyloid precursor proteins. J. Biol. Chem. 277: 22768-22780, 2002. PubMed ID: 11912199 93. Yu, H.; Saura, C. A.; Choi, S.-Y.; Sun, L. D.; Yang, X.; Handler, M.; Kawarabayashi, T.; Younkin, L.; Fedeles, B.; Wilson, M. A.; Younkin, S.; Kandel, E. R.; Kirkwood, A.; Shen, J.: APP processing and synaptic plasticity in presenilin-1 conditional knockout mice. Neuron 31: 713-726, 2001.

[1509] Further studies establishing the function and utilities of PSEN1 are found in John Hopkins OMIM database record ID 104311, and in references numbered 1110-1114, 67, 1115-1124, 75, 1125, 1126-1133, 90, 1134, 1135, 1136-1152, 117 and 1153-1196 listed hereinbelow.

[1510] Reference is now made to PTEN BINDING SITE. phosphatase and tensin homolog (mutated in multiple advanced cancers 1 (PTEN) is a target gene of GAM26, corresponding to GAM26-TARGET GENE of FIG. 26A. PTEN BINDING SITE is a binding site found in an untranslated region of PTEN, corresponding to BINDING SITE of FIG. 26A. FIG. 26D illustrates the complementarity of the nucleotide sequence of PTEN BINDING SITE, designated SEQ ID:324380, to the nucleotide sequence of GAM26 RNA of FIG. 26A, designated SEQ ID:20604.

[1511] An additional function of GAM26 is therefore inhibition of phosphatase and tensin homolog (mutated in multiple advanced cancers 1 (PTEN), a gene which encodes a Enzyme that is associated with Cowden disease. Accordingly, utilities of GAM26 include diagnosis and treatment of the abovementioned diseases and clinical conditions.

[1512] The function of PTEN has been established by previous studies. As tumors progress to more advanced stages, they acquire an increasing number of genetic alterations. Li et al. (1997) noted that one alteration which occurs at high frequency in a variety of human tumors is loss of heterozygosity (LOH) at 10q23. Although rarely seen in low-grade glial tumors and early-stage prostate cancers, LOH at 10q23 occurs in approximately 70% of glioblastomas (the most advanced form of glial tumor) and approximately 60% of advanced prostate cancers. This pattern of LOH and the finding that wildtype chromosome 10 suppresses the tumorigenicity of glioblastoma cells in mice suggested to Li et al. (1997) that 10q23 encodes a tumor suppressor gene. By mapping of homozygous deletions on 10q23, they isolated a candidate tumor suppressor gene that they called PTEN for ‘phosphatase and tensin homolog deleted on chromosome ten.’ Sequence analysis of the predicted 403-amino acid open reading frame (ORF) revealed a protein tyrosine phosphatase domain and a large region of homology (approximately 175 amino acids) to chicken tensin (600076; a protein that interacts with actin filaments at focal adhesions) and bovine auxilin. In preliminary screens, Li et al. (1997) detected mutations of PTEN in 31% (13 of 42) of glioblastoma cell lines and xenografts, 100% (4 of 4) of prostate cancer cell lines, 6% (4 of 65) of breast cancer cell lines and xenografts, and 17% (3 of 18) of primary glioblastomas. The homologies displayed by the structure of PTEN suggested to the investigators that it may suppress tumor cell growth by antagonizing protein tyrosine kinases and may regulate tumor cell invasion and metastasis through interactions at focal adhesions.

[1513] Animal model experiments lend further support to the function of PTEN. To examine the role of the dual-specificity phosphatase PTEN in ontogenesis and tumor suppression, Di Cristofano et al. (1998) disrupted mouse Pten by homologous recombination. Pten inactivation resulted in early embryonic lethality. Homozygous deficient ES (embryonic stem) cells formed aberrant embryoid bodies and displayed an altered ability to differentiate into endodermal, ectodermal, and mesodermal derivatives. Heterozygous knockout mice and chimeric mice derived from heterozygous ES cells showed hyperplastic/dysplastic changes in the prostate, skin, and colon, which are characteristic of Cowden disease, Lhermitte-Duclos disease, and Bannayan-Zonana syndrome. They also spontaneously developed germ cell, gonadostromal, thyroid, and colon tumors. In addition, Pten inactivation enhanced the ability of ES cells to generate tumors in nude and syngeneic mice, due to increased anchorage-independent growth and aberrant differentiation. These results supported the notion that PTEN haploinsufficiency plays a causal role in the 3 disorders in which mutations had been found, and demonstrated that Pten is a tumor suppressor essential for embryonic development.

[1514] It is appreciated that the abovementioned animal model for PTEN is acknowledged by those skilled in the art as a scientifically valid animal model, as can be further appreciated from the publications sited hereinbelow.

[1515] Full details of the abovementioned studies are described in the following publications, the disclosure of which are hereby incorporated by reference:

[1516] Di Cristofano, A.; Pesce, B.; Cordon-Cardo, C.; Pandolfi, P. P. Pten is essential for embryonic development and tumour suppression. Nature Genet. 19: 348-355, 1998. PubMed ID: 9697695 35. Li, J.; Yen, C.; Liaw, D.; Podsypanina, K.; Bose, S.; Wang, S. I.; Puc, J.; Miliaresis, C.; Rodgers, L.; McCombie, R.; Bigner, S. H.; Giovanella, B. C.; Ittmann, M.; Tycko, B.; Hibshoosh, H.; Wigler, M. H.; Parsons, R.: PTEN, a putative protein tyrosine phosphatase gene mutated in human brain, breast, and prostate cancer. Science 275: 1943-1946, 1997.

[1517] Further studies establishing the function and utilities of PTEN are found in John Hopkins OMIM database record ID 601728, and in references numbered 1197-1267 listed hereinbelow.

[1518] Referring now to PTEN BINDING SITE. phosphatase and tensin homolog (mutated in multiple advanced cancers 1 (PTEN) is a target gene of GAM26, corresponding to GAM26-TARGET GENE of FIG. 26A. PTEN BINDING SITE is a binding site found in an untranslated region of PTEN, corresponding to BINDING SITE of FIG. 26A. FIG. 26D illustrates the complementarity of the nucleotide sequence of PTEN BINDING SITE, designated SEQ ID:324398, to the nucleotide sequence of GAM26 RNA of FIG. 26A, designated SEQ ID:20604.

[1519] A further function of GAM26 is therefore inhibition of phosphatase and tensin homolog (mutated in multiple advanced cancers 1 (PTEN), a gene which encodes a Enzyme that is associated with Cowden disease. Accordingly, utilities of GAM26 include diagnosis and treatment of the abovementioned diseases and clinical conditions. The function and utilities of PTEN have been established by previous studies, as described hereinabove with reference to FIG. 26D.

[1520] Referring now to PTEN BINDING SITE. phosphatase and tensin homolog (mutated in multiple advanced cancers 1 (PTEN) is a target gene of GAM26, corresponding to GAM26-TARGET GENE of FIG. 26A. PTEN BINDING SITE is a binding site found in an untranslated region of PTEN, corresponding to BINDING SITE of FIG. 26A. FIG. 26D illustrates the complementarity of the nucleotide sequence of PTEN BINDING SITE, designated SEQ ID:324399, to the nucleotide sequence of GAM26 RNA of FIG. 26A, designated SEQ ID:20604.

[1521] Yet a further function of GAM26 is therefore inhibition of phosphatase and tensin homolog (mutated in multiple advanced cancers 1 (PTEN), a gene which encodes a Enzyme that is associated with Cowden disease. Accordingly, utilities of GAM26 include diagnosis and treatment of the abovementioned diseases and clinical conditions. The function and utilities of PTEN have been established by previous studies, as described hereinabove with reference to FIG. 26D.

[1522] Referring now to PTEN BINDING SITE. phosphatase and tensin homolog (mutated in multiple advanced cancers 1 (PTEN) is a target gene of GAM26, corresponding to GAM26-TARGET GENE of FIG. 26A. PTEN BINDING SITE is a binding site found in an untranslated region of PTEN, corresponding to BINDING SITE of FIG. 26A. FIG. 26D illustrates the complementarity of the nucleotide sequence of PTEN BINDING SITE, designated SEQ ID:324417, to the nucleotide sequence of GAM26 RNA of FIG. 26A, designated SEQ ID:20604.

[1523] Another function of GAM26 is therefore inhibition of phosphatase and tensin homolog (mutated in multiple advanced cancers 1 (PTEN), a gene which encodes a Enzyme that is associated with Cowden disease. Accordingly, utilities of GAM26 include diagnosis and treatment of the abovementioned diseases and clinical conditions. The function and utilities of PTEN have been established by previous studies, as described hereinabove with reference to FIG. 26D.

[1524] Referring now to PTEN BINDING SITE. phosphatase and tensin homolog (mutated in multiple advanced cancers 1 (PTEN) is a target gene of GAM26, corresponding to GAM26-TARGET GENE of FIG. 26A. PTEN BINDING SITE is a binding site found in an untranslated region of PTEN, corresponding to BINDING SITE of FIG. 26A. FIG. 26D illustrates the complementarity of the nucleotide sequence of PTEN BINDING SITE, designated SEQ ID:324417, to the nucleotide sequence of GAM26 RNA of FIG. 26A, designated SEQ ID:20604.

[1525] Yet another function of GAM26 is therefore inhibition of phosphatase and tensin homolog (mutated in multiple advanced cancers 1 (PTEN), a gene which encodes a Enzyme that is associated with Cowden disease. Accordingly, utilities of GAM26 include diagnosis and treatment of the abovementioned diseases and clinical conditions. The function and utilities of PTEN have been established by previous studies, as described hereinabove with reference to FIG. 26D.

[1526] Referring now to PTEN BINDING SITE. phosphatase and tensin homolog (mutated in multiple advanced cancers 1 (PTEN) is a target gene of GAM26, corresponding to GAM26-TARGET GENE of FIG. 26A. PTEN BINDING SITE is a binding site found in an untranslated region of PTEN, corresponding to BINDING SITE of FIG. 26A. FIG. 26D illustrates the complementarity of the nucleotide sequence of PTEN BINDING SITE, designated SEQ ID:324452, to the nucleotide sequence of GAM26 RNA of FIG. 26A, designated SEQ ID:20604.

[1527] An additional function of GAM26 is therefore inhibition of phosphatase and tensin homolog (mutated in multiple advanced cancers 1 (PTEN), a gene which encodes a Enzyme that is associated with Cowden disease. Accordingly, utilities of GAM26 include diagnosis and treatment of the abovementioned diseases and clinical conditions. The function and utilities of PTEN have been established by previous studies, as described hereinabove with reference to FIG. 26D.

[1528] Reference is now made to PTP4A2 BINDING SITE. protein tyrosine phosphatase type IVA, member 2 (PTP4A2) is a target gene of GAM26, corresponding to GAM26-TARGET GENE of FIG. 26A. PTP4A2 BINDING SITE is a binding site found in an untranslated region of PTP4A2, corresponding to BINDING SITE of FIG. 26A. FIG. 26D illustrates the complementarity of the nucleotide sequence of PTP4A2 BINDING SITE, designated SEQ ID:326495, to the nucleotide sequence of GAM26 RNA of FIG. 26A, designated SEQ ID:20604.

[1529] A further function of GAM26 is therefore inhibition of protein tyrosine phosphatase type IVA, member 2 (PTP4A2), a gene which encodes a Enzyme that is a protein tyrosine phosphatase which has a C-terminal prenylation site. Accordingly, utilities of GAM26 include diagnosis and treatment of the abovementioned diseases and clinical conditions.

[1530] The function of PTP4A2 has been established by previous studies. The rat Prl1 (phosphatase of regenerating liver-1; 601585) protein is a 20-kD nuclear protein tyrosine phosphatase (PTPase) that is not homologous to previously characterized dual-specificity PTPases or the monospecific PTPases. Montagna et al. (1995) identified a cDNA encoding a human PRL1-like protein, which they designated OV1. By using an in vitro prenylation screen, Cates et al. (1996) found that human PRL1 and OV1, which they referred to as PTP(CAAX1) and PTP(CAAX2), respectively, are farnesylated in vitro by mammalian farnesyl:protein transferase. Overexpression of these PTPs in epithelial cells caused a transformed phenotype in cultured cells and tumor growth in nude mice. Cates et al. (1996) concluded that PTP(CAAX1) and PTP(CAAX2) represent a novel class of isoprenylated, oncogenic PTPs. Zhao et al. (1996) isolated both cDNA and genomic clones as part of a screen for genes with CTG repeats. Among these were 2 cDNAs, HH13 and HH7-2, that were identical in their coding regions but differed primarily in their 5-prime untranslated regions (UTRs). The predicted 167-amino acid sequence from each was 89% identical to rat Prl1 but was unrelated to other PTPs except for the active site. The protein contains a large number of basic residues and has a predicted isoelectric point of 8.33. Northern blot analysis using a probe from the common 3-prime UTR of HH13 and HH7-2 identified transcripts of 2 and 4 kb in all human tissues examined. Zeng et al. (1998) identified cDNAs encoding the mouse homolog of human PTP(CAAX2), or PRL2. The predicted human and mouse PRL2 proteins are identical. Zhao et al. (1996) used the HH13 cDNA to identify a YAC that was mapped to 1p35 by fluorescence in situ hybridization. They found a third cDNA (designated HH18) which contains a large deletion in the reading frame and may be a splice variant of either HH13 or HH7-2. Furthermore, a processed pseudogene with 96% sequence identity was found in the BRCA1 (113705) region of 17q21.

[1531] Full details of the abovementioned studies are described in the following publications, the disclosure of which are hereby incorporated by reference:

[1532] ates, C. A.; Michael, R. L.; Stayrook, K. R.; Harvey, K. A.; Burke, Y. D.; Randall, S. K.; Crowell, P. L.; Crowell, D. N.: Prenylation of oncogenic human PTP(CAAX) protein tyrosine phosphatases. Cancer Lett. 110: 49-55, 1996. PubMed ID: 9018080 4. Zhao, Z.; Lee, C.-C.; Monckton, D. G.; Yazdani, A.; Coolbaugh, M. I.; Li, X.; Bailey, J.; Shen, Y.; Caskey, C. T.: Characterization and genomic mapping of genes and pseudogenes of a new human protein tyrosine phosphatase. Genomics 35: 172-181, 1996.

[1533] Further studies establishing the function and utilities of PTP4A2 are found in John Hopkins OMIM database record ID 601584, and in references numbered 1268-1269, 1271 and 1273 listed hereinbelow.

[1534] Referring now to PTP4A2 BINDING SITE. protein tyrosine phosphatase type IVA, member 2 (PTP4A2) is a target gene of GAM26, corresponding to GAM26-TARGET GENE of FIG. 26A. PTP4A2 BINDING SITE is a binding site found in an untranslated region of PTP4A2, corresponding to BINDING SITE of FIG. 26A. FIG. 26D illustrates the complementarity of the nucleotide sequence of PTP4A2 BINDING SITE, designated SEQ ID:326499, to the nucleotide sequence of GAM26 RNA of FIG. 26A, designated SEQ ID:20604.

[1535] Yet a further function of GAM26 is therefore inhibition of protein tyrosine phosphatase type IVA, member 2 (PTP4A2), a gene which encodes a Enzyme that is a protein tyrosine phosphatase which has a C-terminal prenylation site. Accordingly, utilities of GAM26 include diagnosis and treatment of the abovementioned diseases and clinical conditions. The function and utilities of PTP4A2 have been established by previous studies, as described hereinabove with reference to FIG. 26D.

[1536] Referring now to PTP4A2 BINDING SITE. protein tyrosine phosphatase type IVA, member 2 (PTP4A2) is a target gene of GAM26, corresponding to GAM26-TARGET GENE of FIG. 26A. PTP4A2 BINDING SITE is a binding site found in an untranslated region of PTP4A2, corresponding to BINDING SITE of FIG. 26A. FIG. 26D illustrates the complementarity of the nucleotide sequence of PTP4A2 BINDING SITE, designated SEQ ID:326500, to the nucleotide sequence of GAM26 RNA of FIG. 26A, designated SEQ ID:20604.

[1537] Another function of GAM26 is therefore inhibition of protein tyrosine phosphatase type IVA, member 2 (PTP4A2), a gene which encodes a Enzyme that is a protein tyrosine phosphatase which has a C-terminal prenylation site. Accordingly, utilities of GAM26 include diagnosis and treatment of the abovementioned diseases and clinical conditions. The function and utilities of PTP4A2 have been established by previous studies, as described hereinabove with reference to FIG. 26D.

[1538] Referring now to PTP4A2 BINDING SITE. protein tyrosine phosphatase type IVA, member 2 (PTP4A2) is a target gene of GAM26, corresponding to GAM26-TARGET GENE of FIG. 26A. PTP4A2 BINDING SITE is a binding site found in an untranslated region of PTP4A2, corresponding to BINDING SITE of FIG. 26A. FIG. 26D illustrates the complementarity of the nucleotide sequence of PTP4A2 BINDING SITE, designated SEQ ID:326502, to the nucleotide sequence of GAM26 RNA of FIG. 26A, designated SEQ ID:20604.

[1539] Yet another function of GAM26 is therefore inhibition of protein tyrosine phosphatase type IVA, member 2 (PTP4A2), a gene which encodes a Enzyme that is a protein tyrosine phosphatase which has a C-terminal prenylation site. Accordingly, utilities of GAM26 include diagnosis and treatment of the abovementioned diseases and clinical conditions. The function and utilities of PTP4A2 have been established by previous studies, as described hereinabove with reference to FIG. 26D.

[1540] Referring now to PTP4A2 BINDING SITE. protein tyrosine phosphatase type IVA, member 2 (PTP4A2) is a target gene of GAM26, corresponding to GAM26-TARGET GENE of FIG. 26A. PTP4A2 BINDING SITE is a binding site found in an untranslated region of PTP4A2, corresponding to BINDING SITE of FIG. 26A. FIG. 26D illustrates the complementarity of the nucleotide sequence of PTP4A2 BINDING SITE, designated SEQ ID:326511, to the nucleotide sequence of GAM26 RNA of FIG. 26A, designated SEQ ID:20604.

[1541] An additional function of GAM26 is therefore inhibition of protein tyrosine phosphatase type IVA, member 2 (PTP4A2), a gene which encodes a Enzyme that is a protein tyrosine phosphatase which has a C-terminal prenylation site. Accordingly, utilities of GAM26 include diagnosis and treatment of the abovementioned diseases and clinical conditions. The function and utilities of PTP4A2 have been established by previous studies, as described hereinabove with reference to FIG. 26D.

[1542] Referring now to PTP4A2 BINDING SITE. protein tyrosine phosphatase type IVA, member 2 (PTP4A2) is a target gene of GAM26, corresponding to GAM26-TARGET GENE of FIG. 26A. PTP4A2 BINDING SITE is a binding site found in an untranslated region of PTP4A2, corresponding to BINDING SITE of FIG. 26A. FIG. 26D illustrates the complementarity of the nucleotide sequence of PTP4A2 BINDING SITE, designated SEQ ID:326515, to the nucleotide sequence of GAM26 RNA of FIG. 26A, designated SEQ ID:20604.

[1543] A further function of GAM26 is therefore inhibition of protein tyrosine phosphatase type IVA, member 2 (PTP4A2), a gene which encodes a Enzyme that is a protein tyrosine phosphatase which has a C-terminal prenylation site. Accordingly, utilities of GAM26 include diagnosis and treatment of the abovementioned diseases and clinical conditions. The function and utilities of PTP4A2 have been established by previous studies, as described hereinabove with reference to FIG. 26D.

[1544] Reference is now made to PTPN1 BINDING SITE. protein tyrosine phosphatase, non-receptor type 1 (PTPN1) is a target gene of GAM26, corresponding to GAM26-TARGET GENE of FIG. 26A. PTPN1 BINDING SITE is a binding site found in an untranslated region of PTPN1, corresponding to BINDING SITE of FIG. 26A. FIG. 26D illustrates the complementarity of the nucleotide sequence of PTPN1 BINDING SITE, designated SEQ ID:326697, to the nucleotide sequence of GAM26 RNA of FIG. 26A, designated SEQ ID:20604.

[1545] Yet a further function of GAM26 is therefore inhibition of protein tyrosine phosphatase, non-receptor type 1 (PTPN1), a gene which encodes a Enzyme that is a non-receptor type 1 protein tyrosine phosphatase and inhibits insulin signaling. Accordingly, utilities of GAM26 include diagnosis and treatment of the abovementioned diseases and clinical conditions.

[1546] The function of PTPN1 has been established by previous studies. PTP1B inhibits insulin signaling and, when overexpressed, plays a role in insulin resistance (Ahmad et al., 1997). In the 3-prime untranslated region of the PTP1B gene, Di Paola et al. (2002) identified a 1484insG variation (176885.0001) that, in 2 different populations, was associated with several features of insulin resistance. Similar data were obtained in a family-based association study by use of sib pairs discordant for genotype (Gu et al., 2000). Subjects carrying the 1484insG variant showed PTP1B mRNA overexpression in skeletal muscle. PTP1B mRNA stability was significantly higher in human embryonic kidney cells transfected with 1484insG PTP1B as compared with those transfected with wildtype PTP1B. The data indicated that the 1484insG allele causes PTP1B overexpression and plays a role in insulin resistance. Therefore, individuals carrying the 1484insG variant might particularly benefit from PTP1B inhibitors in the treatment of insulin resistance (Kennedy and Ramachandran, 2000).

[1547] Animal model experiments lend further support to the function of PTPN1. Elchebly et al. (1999) generated PTP1B-deficient mice by targeted disruption of the mouse homolog of the PTP1B gene. Mice were phenotypically and pathologically normal and had normal life span. In the fed state, homozygous mutant mice had slightly lower blood glucose concentrations, and half the circulating insulin concentrations, of wildtype littermates. The enhanced insulin sensitivity of PTP1B-deficient mice was also evident in glucose- and insulin-tolerance tests. After insulin injection, deficient mice showed increased phosphorylation of the insulin receptor in liver and muscle tissue compared to wildtype mice. On a high-fat diet, PTP1B-deficient mice were resistant to weight gain and remained insulin sensitive, while wildtype mice rapidly gained weight and became insulin resistant. These results suggested a major role for PTP1B in modulation of insulin sensitivity and fuel metabolism. The authors proposed PTP1B as a potential therapeutic target for the treatment of type 2 diabetes and obesity.

[1548] It is appreciated that the abovementioned animal model for PTPN1 is acknowledged by those skilled in the art as a scientifically valid animal model, as can be further appreciated from the publications sited hereinbelow.

[1549] Full details of the abovementioned studies are described in the following publications, the disclosure of which are hereby incorporated by reference:

[1550] lchebly, M.; Payette, P.; Michaliszyn, E.; Cromlish, W.; Collins, S.; Loy, A. L.; Normandin, D.; Cheng, A.; Himms-Hagen, J.; Chan, C.-C.; Ramachandran, C.; Gresser, M. J.; Tremblay, M. L.; Kennedy, B. P.: Increased insulin sensitivity and obesity resistance in mice lacking the protein tyrosine phosphatase-1B gene. Science 283: 1544-1548, 1999. PubMed ID: 10066179 5. Di Paola, R.; Frittitta, L.; Miscio, G.; Bozzali, M.; Baratta, R.; Centra, M.; Spampinato, D.; Santagati, M. G.; Ercolino, T.; Cisternino, C.; Soccio, T. Mastroianno, S.; Tassi, V.; Almgren, P.; Pizzuti, A.; Vigneri, R.; Trischitta, V.: A variation in 3-prime UTR of hPTP1B increases specific gene expression and associates with insulin resistance. Am. J. Hum. Genet. 70: 806-812, 2002.

[1551] Further studies establishing the function and utilities of PTPN1 are found in John Hopkins OMIM database record ID 176885, and in references numbered 1274-1288 listed hereinbelow.

[1552] Reference is now made to PTPRF BINDING SITE. protein tyrosine phosphatase, receptor type, F (PTPRF) is a target gene of GAM26, corresponding to GAM26-TARGET GENE of FIG. 26A. PTPRF BINDING SITE is a binding site found in an untranslated region of PTPRF, corresponding to BINDING SITE of FIG. 26A. FIG. 26D illustrates the complementarity of the nucleotide sequence of PTPRF BINDING SITE, designated SEQ ID:327695, to the nucleotide sequence of GAM26 RNA of FIG. 26A, designated SEQ ID:20604.

[1553] Another function of GAM26 is therefore inhibition of protein tyrosine phosphatase, receptor type, F (PTPRF), a gene which encodes a Enzyme that negatively regulates the insulin signaling pathway. Accordingly, utilities of GAM26 include diagnosis and treatment of the abovementioned diseases and clinical conditions.

[1554] The function of PTPRF has been established by previous studies. The LAR gene (symbolized PTPRF) encodes a membrane protein that has a cytoplasmic domain with homology to protein-tyrosine phosphatase 1B (176885) and an extracellular domain homologous to the neural cellular adhesion molecule NCAM (116930). The human LAR molecule closely resembles cell adhesion molecules, which suggests that it may be involved in the regulation of phosphotyrosine levels through cell-cell or cell-matrix interactions. As a first step toward site-directed mutagenesis studies of LAR function, Schaapveld et al. (1995) characterized the mouse Ptprf gene. They found that its cytoplasmic region is encoded by 11 exons that span only 4.5 kb of genomic DNA. Compared to the known exon-intron structures of other mammalian receptor-like protein tyrosine phosphatase genes such as Ptpra (encoding LRP; 176884) and Ptprc (coding for Ly-5; 151460), the portion of the Ptprf gene encoding the cytoplasmic region of murine LAR contained not only smaller, but also fewer introns. O'Grady et al. (1994) demonstrated that the human LAR gene is composed of 33 exons spanning over 85 kb. Exon 2 encodes the signal sequence and the first 4 amino acids in the mature LAR protein. The 3 immunoglobulin-like domains are encoded by exons 3 to 7, and the 8 fibronectin type III (FN-III) domains by exons 8 to 17. Exons 18 to 22 encode the juxtamembrane and transmembrane domains, and exons 23 to 33 encode the 2 conserved tyrosine phosphatase domains and the entire 3-prime untranslated region. Alternative splicing of LAR mRNA was revealed by RT-PCR analysis.

[1555] Full details of the abovementioned studies are described in the following publications, the disclosure of which are hereby incorporated by reference:

[1556] chaapveld, R. Q. J.; van den Maagdenberg, A. M. J. M.; Schepens, J. T. G.; Olde Weghuis, D.; Geurts van Kessel, A.; Wieringa, B.; Hendriks, W. J. A. J.: The mouse gene Ptprf encoding the leukocyte common antigen-related molecule LAR: cloning, characterization, and chromosomal localization. Genomics 27: 124-130, 1995. PubMed ID: 7665159 6. O'Grady, P.; Krueger, N. X.; Streuli, M.; Saito, H.: Genomic organization of the human LAR protein tyrosine phosphatase gene and alternative splicing in the extracellular fibronectin type-III domains. J. Biol. Chem. 269: 25193-25199, 1994. PubMed ID: 7929208 9. Tsujikawa, K.; Kawakami, N.; Uchino, Y.; Ichijo, T.; Furukawa, T.; Saito, H.; Yamamoto, H.: Distinct functions of the two protein tyrosine phosphatase domains of LAR (leukocyte common antigen-related) on tyrosine dephosphorylation of insulin receptor. Molec. Endocr. 15: 271-280, 2001.

[1557] Further studies establishing the function and utilities of PTPRF are found in John Hopkins OMIM database record ID 179590, and in references numbered 1289-1297 listed hereinbelow.

[1558] Reference is now made to PURA BINDING SITE. purine-rich element binding protein A (PURA) is a target gene of GAM26, corresponding to GAM26-TARGET GENE of FIG. 26A. PURA BINDING SITE is a binding site found in an untranslated region of PURA, corresponding to BINDING SITE of FIG. 26A. FIG. 26D illustrates the complementarity of the nucleotide sequence of PURA BINDING SITE, designated SEQ ID:328884, to the nucleotide sequence of GAM26 RNA of FIG. 26A, designated SEQ ID:20604.

[1559] Yet another function of GAM26 is therefore inhibition of purine-rich element binding protein A (PURA), a gene which encodes a Protein that is a probable transcription activator. Accordingly, utilities of GAM26 include diagnosis and treatment of the abovementioned diseases and clinical conditions.

[1560] The function of PURA has been established by previous studies. Kennedy and Rutter (1992) identified a transcription factor, which they referred to as Pur-1 because of its ability to bind to purine-rich sequences. Such purine-rich stretches of nucleotides (GAGA boxes) are often found just upstream of transcription start sites in many genes, including insulin (INS; 176730). Mutational analysis suggested that the GAGA box plays an important role in transcription of the rat insulin I gene. Kennedy and Rutter (1992) identified at least 4 different proteins that bind specifically to the insulin GAGA box. Using a GAGA oligonucleotide, they isolated a cDNA encoding a sequence-specific protein from a lambda-gt11 expression library made from a hamster insulinoma cell line. This was the protein that they designated Pur-1. They found that it binds to the GAGA boxes of the rat insulin I and II genes and the human islet amyloid polypeptide gene. Pur-1 is a potent transactivator in both pancreatic and nonpancreatic cells. Furthermore, Pur-1 is able to activate an intact insulin promoter in HeLa cells, where it is normally inactive. Pur-alpha is a single-stranded DNA-binding protein with specific affinity for a purine-rich element of the configuration (GGN)n present in several initiation zones of eukaryotic DNA replication. It interacts with large T-antigen and cellular protein YB-1 (154030) to activate JC viral DNA transcription in human cells (Chen et al., 1995). The functional activities of Pur-alpha, together with its evolutionary conservation, suggested it may represent an important link between DNA replication and differential gene expression. Using a 16-kb genomic probe together with hybridization of a cDNA probe to blots of DNA from human/hamster cell lines, Ma et al. (1995) mapped the PURA gene to 5q31. This region is frequently deleted in myelogenous leukemias in hematologic malignancies and other cancers. Sequences with homology to the PURA gene were also present at 6q14.

[1561] Full details of the abovementioned studies are described in the following publications, the disclosure of which are hereby incorporated by reference:

[1562] allia, G. L.; Johnson, E. M.; Khalili, K.: Pur-alpha: a multifunctional single-stranded DNA- and RNA-binding protein. Nucleic Acids Res. 28: 3197-3205, 2000. PubMed ID: 10954586 3. Kennedy, G. C.; Rutter, W. J.: Pur-1, a zinc-finger protein that binds to purine-rich sequences, transactivates an insulin promoter in heterologous cells. Proc. Nat. Acad. Sci. 89: 11498-11502, 1992. PubMed ID: 1454839 4. Ma, Z.-W.; Pejovic, T.; Najfeld, V.; Ward, D.C.; Johnson, E. M.: Localization of PURA, the gene encoding the sequence-specific single-stranded-DNA-binding protein Pur-alpha, to chromosome band 5q31. Cytogenet. Cell Genet. 71: 64-67, 1995.

[1563] Further studies establishing the function and utilities of PURA are found in John Hopkins OMIM database record ID 600473, and in references numbered 1298-1301 listed hereinbelow.

[1564] Referring now to PURA BINDING SITE. purine-rich element binding protein A (PURA) is a target gene of GAM26, corresponding to GAM26-TARGET GENE of FIG. 26A. PURA BINDING SITE is a binding site found in an untranslated region of PURA, corresponding to BINDING SITE of FIG. 26A. FIG. 26D illustrates the complementarity of the nucleotide sequence of PURA BINDING SITE, designated SEQ ID:328886, to the nucleotide sequence of GAM26 RNA of FIG. 26A, designated SEQ ID:20604.

[1565] An additional function of GAM26 is therefore inhibition of purine-rich element binding protein A (PURA), a gene which encodes a Protein that is a probable transcription activator. Accordingly, utilities of GAM26 include diagnosis and treatment of the abovementioned diseases and clinical conditions. The function and utilities of PURA have been established by previous studies, as described hereinabove with reference to FIG. 26D.

[1566] Reference is now made to PX19 BINDING SITE. (PX19) is a target gene of GAM26, corresponding to GAM26-TARGET GENE of FIG. 26A. PX19 BINDING SITE is a binding site found in an untranslated region of PX19, corresponding to BINDING SITE of FIG. 26A. FIG. 26D illustrates the complementarity of the nucleotide sequence of PX19 BINDING SITE, designated SEQ ID:329171, to the nucleotide sequence of GAM26 RNA of FIG. 26A, designated SEQ ID:20604.

[1567] A further function of GAM26 is therefore inhibition of (PX19), a gene which encodes a Protein that plays a role in hemopoiesis. Accordingly, utilities of GAM26 include diagnosis and treatment of the abovementioned diseases and clinical conditions.

[1568] The function of PX19 has been established by previous studies. The late embryogenesis abundant (LEA) motif is found in plant proteins that protect against desiccation and other types of stress affecting plant embryo development. In chicken, a LEA motif-containing protein termed Px19 plays a role in hemopoiesis. By gene motif-targeted RT-PCR differential display of tonsillar B-lymphocyte subpopulations purified and sorted by flow cytometry, Guzman-Rojas et al. (2000) isolated a cDNA encoding human PX19, which they termed PRELI for ‘protein of relevant evolutionary and lymphoid interest.’ Sequence analysis predicted that the 219-amino acid human protein is 85% identical to the avian protein. PX19 contains 2 alpha helices with amphipathic domains in opposite orientation, and the LEA motifs (A/TAEKAK) are clustered within this region. Northern blot analysis detected 1.0- and 1.2-kb transcripts predominantly in fetal liver, with much lower levels in other fetal tissues. Expression was significantly reduced in adult liver, but was higher in other adult organs. Expression was low in bone marrow and thymus, but high in adult spleen, lymph node, and peripheral blood leukocytes. Further analysis of B-cell lines indicated that expression is higher in mature B cells, predominantly from germinal centers, and absent in progenitor and precursor B-cell lines. Guzman-Rojas et al. (2000) inferred from these data that PX19 expression is more important in B- than in T-lymphocyte differentiation and early lymphopoiesis, and that PX19 may be more significant for mature B lymphocytes during secondary immune responses, a stage of stressful selection pressure.

[1569] Full details of the abovementioned studies are described in the following publications, the disclosure of which are hereby incorporated by reference:

[1570] uzman-Rojas, L.; Sims, J. C.; Rangel, R.; Guret, C.; Sun, Y.; Alcocer, J. M.; Martinez-Valdez, H.: PRELI, the human homologue of the avian px19, is expressed by germinal center B lymphocytes. Int. Immun. 12: 607-612, 2000.

[1571] Further studies establishing the function and utilities of PX19 are found in John Hopkins OMIM database record ID 605733, and in references numbered 1302 listed hereinbelow.

[1572] Referring now to PX19 BINDING SITE. (PX19) is a target gene of GAM26, corresponding to GAM26-TARGET GENE of FIG. 26A. PX19 BINDING SITE is a binding site found in an untranslated region of PX19, corresponding to BINDING SITE of FIG. 26A. FIG. 26D illustrates the complementarity of the nucleotide sequence of PX19 BINDING SITE, designated SEQ ID:329172, to the nucleotide sequence of GAM26 RNA of FIG. 26A, designated SEQ ID:20604.

[1573] Yet a further function of GAM26 is therefore inhibition of (PX19), a gene which encodes a Protein that plays a role in hemopoiesis. Accordingly, utilities of GAM26 include diagnosis and treatment of the abovementioned diseases and clinical conditions. The function and utilities of PX19 have been established by previous studies, as described hereinabove with reference to FIG. 26D.

[1574] Referring now to PX19 BINDING SITE. (PX19) is a target gene of GAM26, corresponding to GAM26-TARGET GENE of FIG. 26A. PX19 BINDING SITE is a binding site found in an untranslated region of PX19, corresponding to BINDING SITE of FIG. 26A. FIG. 26D illustrates the complementarity of the nucleotide sequence of PX19 BINDING SITE, designated SEQ ID:329182, to the nucleotide sequence of GAM26 RNA of FIG. 26A, designated SEQ ID:20604.

[1575] Another function of GAM26 is therefore inhibition of (PX19), a gene which encodes a Protein that plays a role in hemopoiesis. Accordingly, utilities of GAM26 include diagnosis and treatment of the abovementioned diseases and clinical conditions. The function and utilities of PX19 have been established by previous studies, as described hereinabove with reference to FIG. 26D.

[1576] Reference is now made to RAB1A BINDING SITE. (RAB1A) is a target gene of GAM26, corresponding to GAM26-TARGET GENE of FIG. 26A. RAB1A BINDING SITE is a binding site found in an untranslated region of RAB1A, corresponding to BINDING SITE of FIG. 26A. FIG. 26D illustrates the complementarity of the nucleotide sequence of RAB1A BINDING SITE, designated SEQ ID:330375, to the nucleotide sequence of GAM26 RNA of FIG. 26A, designated SEQ ID:20604.

[1577] Yet another function of GAM26 is therefore inhibition of (RAB1A), a gene which encodes a Protein that is involved in vesicle transport. Accordingly, utilities of GAM26 include diagnosis and treatment of the abovementioned diseases and clinical conditions.

[1578] The function of RAB1A has been established by previous studies. RAB proteins have been postulated to regulate the targeting and fusion of membranous vesicles during organelle assembly and transport. RAB proteins undergo regulated exchange of GTP for GDP, and they slowly hydrolyze the bound GTP in a reaction that is thought to regulate the timing and unidirectional nature of these assembly events. All of the known RAB proteins terminate in sequences such as cys-X-cys (e.g., RAB3A, 179490), cys-cys (e.g., RAB1A), or a closely related sequence, and all are believed to be geranylgeranylated. From a human pheochromocytoma cDNA library, Zahraoui et al. (1989) isolated 7 cDNA clones corresponding to genes encoding the Ras-associated GTP-binding proteins. See RAB5A (179512). The predicted 205-amino acid human and rat RAB1 proteins are identical and share 75% identity with YPT1, the S. cerevisiae homolog. Northern blot analysis revealed that the RAB1 gene was expressed as a major (2.7 kb) and a minor (1.7 kb) mRNA in a human fibroblast cell line. The ‘wobbler’ spinal muscular atrophy gene (wr) maps to proximal mouse chromosome 11, tightly linked to Rab1 and Glns-ps1, an intronless pseudogene of the glutamine synthetase gene (138290). Wedemeyer et al. (1996) used these markers to construct a 1.3-Mb YAC contig of the Rab1 region on mouse chromosome 11. Two overlapping YACS were identified that contained a 150-kb region of human chromosome 2p, comprising the RAB1 locus as well as a newly discovered STS (AHY1.1) and a trapped exon (ETG1.1). The region was mapped to 2p14-p13.4 using somatic cell hybrids and a radiation hybrid panel, thus extending a known region of conserved synteny between mouse chromosome 11 and human 2p. The gene for limb-girdle muscular dystrophy type 2B (LGMD2B; 253601) maps to 2p16-p13. The authors noted that conservation between the mouse Rab1 and human RAB1 regions will be helpful in identifying candidate genes for the ‘wobbler’ spinal muscular atrophy and in clarifying a possible relationship between wr and LGMD2B.

[1579] Full details of the abovementioned studies are described in the following publications, the disclosure of which are hereby incorporated by reference:

[1580] llan, B. B.; Moyer, B. D.; Balch, W. E.: Rab1 recruitment of p115 into a cis-SNARE complex: programming budding COPII vesicles for fusion. Science 289: 444-448, 2000. PubMed ID: 10903204 2. Wedemeyer, N.; Lengeling, A.; Ronsiek, M.; Korthaus, D.; Baer, K.; Wuttke, M.; Jockusch, H.: YAC contigs of the Rab1 and wobbler (wr) spinal muscular atrophy gene region on proximal mouse chromosome 11 and of the homologous region on human chromosome 2p. Genomics 32: 447-454, 1996. PubMed ID: 8838809 3. Zahraoui, A.; Touchot, N.; Chardin, P.; Tavitian, A.: The human Rab genes encode a family of GTP-binding proteins related to yeast YPT1 and SEC4 products involved in secretion. J. Biol. Chem. 264: 12394-12401, 1989.

[1581] Further studies establishing the function and utilities of RAB1A are found in John Hopkins OMIM database record ID 179508, and in references numbered 1303-1305 listed hereinbelow.

[1582] Referring now to RAB1A BINDING SITE. (RAB1A) is a target gene of GAM26, corresponding to GAM26-TARGET GENE of FIG. 26A. RAB1A BINDING SITE is a binding site found in an untranslated region of RAB1A, corresponding to BINDING SITE of FIG. 26A. FIG. 26D illustrates the complementarity of the nucleotide sequence of RAB1A BINDING SITE, designated SEQ ID:330388, to the nucleotide sequence of GAM26 RNA of FIG. 26A, designated SEQ ID:20604.

[1583] An additional function of GAM26 is therefore inhibition of (RAB1A), a gene which encodes a Protein that is involved in vesicle transport. Accordingly, utilities of GAM26 include diagnosis and treatment of the abovementioned diseases and clinical conditions. The function and utilities of RAB1A have been established by previous studies, as described hereinabove with reference to FIG. 26D.

[1584] Referring now to RAB1A BINDING SITE. (RAB1A) is a target gene of GAM26, corresponding to GAM26-TARGET GENE of FIG. 26A. RAB1A BINDING SITE is a binding site found in an untranslated region of RAB1A, corresponding to BINDING SITE of FIG. 26A. FIG. 26D illustrates the complementarity of the nucleotide sequence of RAB1A BINDING SITE, designated SEQ ID:330410, to the nucleotide sequence of GAM26 RNA of FIG. 26A, designated SEQ ID:20604.

[1585] A further function of GAM26 is therefore inhibition of (RAB1A), a gene which encodes a Protein that is involved in vesicle transport. Accordingly, utilities of GAM26 include diagnosis and treatment of the abovementioned diseases and clinical conditions. The function and utilities of RAB1A have been established by previous studies, as described hereinabove with reference to FIG. 26D.

[1586] Reference is now made to RAB33A BINDING SITE. RAB33A, member RAS oncogene family (RAB33A) is a target gene of GAM26, corresponding to GAM26-TARGET GENE of FIG. 26A. RAB33A BINDING SITE is a binding site found in an untranslated region of RAB33A, corresponding to BINDING SITE of FIG. 26A. FIG. 26D illustrates the complementarity of the nucleotide sequence of RAB33A BINDING SITE, designated SEQ ID:330765, to the nucleotide sequence of GAM26 RNA of FIG. 26A, designated SEQ ID:20604.

[1587] Yet a further function of GAM26 is therefore inhibition of RAB33A, member RAS oncogene family (RAB33A), a gene which encodes a Protein that is an GTP-binding protein. Accordingly, utilities of GAM26 include diagnosis and treatment of the abovementioned diseases and clinical conditions.

[1588] The function of RAB33A has been established by previous studies. Small GTP-binding proteins are involved in many cellular functions, including signal transduction, vesicular transport, and control of cytoskeleton and chromatin structure. These proteins all contain conserved regions, termed G1 through G5, that are involved in GTP/GDP binding and GTPase activity. By RT-PCR analysis using degenerate primers from conserved regions of small GTP-binding proteins and screening a Jurkat T-lymphocyte cDNA library, Koda and Kakinuma (1993) isolated a cDNA encoding RAB33A, which they called S10. The deduced 237-amino acid RAB33A protein belongs to the RAB subfamily of small GTPases (see RAB1; 179508), other members of which are involved in vesicular transport. Northern blot analysis showed that expression of RAB33A is restricted to lymphoid and monocytic lineage.

[1589] Full details of the abovementioned studies are described in the following publications, the disclosure of which are hereby incorporated by reference:

[1590] oda, T.; Kakinuma, M.: Molecular cloning of a cDNA encoding a novel small GTP-binding protein. FEBS Lett. 328: 21-24, 1993. PubMed ID: 7688322 3. Zheng, J. Y.; Koda, T.; Arimura, Y.; Kishi, M.; Kakinuma, M.: Structure and expression of the mouse S10 gene. Biochim. Biophys. Acta 1351: 47-50, 1997.

[1591] Further studies establishing the function and utilities of RAB33A are found in John Hopkins OMIM database record ID 300333, and in references numbered 1306-1308 listed hereinbelow.

[1592] Reference is now made to RAD21 BINDING SITE. RAD21 (S. pombe) homolog (RAD21) is a target gene of GAM26, corresponding to GAM26-TARGET GENE of FIG. 26A. RAD21 BINDING SITE is a binding site found in an untranslated region of RAD21, corresponding to BINDING SITE of FIG. 26A. FIG. 26D illustrates the complementarity of the nucleotide sequence of RAD21 BINDING SITE, designated SEQ ID:333078, to the nucleotide sequence of GAM26 RNA of FIG. 26A, designated SEQ ID:20604.

[1593] Another function of GAM26 is therefore inhibition of RAD21 (S. pombe) homolog (RAD21), a gene which encodes a Protein that may act in double strand break repair. Accordingly, utilities of GAM26 include diagnosis and treatment of the abovementioned diseases and clinical conditions.

[1594] The function of RAD21 has been established by previous studies. Eukaryotic sister chromatids remain connected from the time of synthesis until they are separated in anaphase. This cohesion depends on a complex of proteins known as cohesins. In vertebrates, unlike in yeast, the cohesins dissociate from chromosome arms earlier in M phase, during prophase. Small amounts of cohesin remain near the centromere until metaphase, with complete removal at the beginning of anaphase. Cohesin complexes contain SMC1 (300040), SMC3 (CSPG6; 606062), SCC1 (RAD21), and either SA1 (STAG1; 604358) or SA2 (STAG2; 604359). The complexes, in turn, interact with PDS5, a protein implicated in chromosome cohesion, condensation, and recombination in yeast (Sumara et al., 2000). By sequencing cDNAs randomly selected from a cDNA library derived from a human immature myeloid cell line, Nomura et al. (1994) identified a cDNA encoding a homolog of S. pombe Rad21 that they termed KIAA0078. The deduced KIAA0078 protein has 631 amino acids. Northern blot analysis detected equivalent expression of KIAA0078 in all tissues tested.

[1595] Full details of the abovementioned studies are described in the following publications, the disclosure of which are hereby incorporated by reference:

[1596] umara, I.; Vorlaufer, E.; Gieffers, C.; Peters, B. H.; Peters, J.-M. Characterization of vertebrate cohesin complexes and their regulation in prophase. J. Cell Biol. 151: 749-761, 2000. PubMed ID: 11076961 5. Nomura, N.; Nagase, T.; Miyajima, N.; Sazuka, T.; Tanaka, A.; Sato, S.; Seki, N.; Kawarabayasi, Y.; Ishikawa, K.; Tabata, S. Prediction of the coding sequences of unidentified human genes. II. The coding sequences of 40 new genes (KIAA0041-KIAA0080) deduced by analysis of cDNA clones from human cell line KG-1. DNA Res. 1: 223-229, 1994.

[1597] Further studies establishing the function and utilities of RAD21 are found in John Hopkins OMIM database record ID 606462, and in references numbered 1309-1315 listed hereinbelow.

[1598] Reference is now made to RASGRP1 BINDING SITE. RAS guanyl releasing protein 1 (calcium and DAG-regulated) (RASGRP1) is a target gene of GAM26, corresponding to GAM26-TARGET GENE of FIG. 26A. RASGRP1 BINDING SITE is a binding site found in an untranslated region of RASGRP1, corresponding to BINDING SITE of FIG. 26A. FIG. 26D illustrates the complementarity of the nucleotide sequence of RASGRP1 BINDING SITE, designated SEQ ID:336440, to the nucleotide sequence of GAM26 RNA of FIG. 26A, designated SEQ ID:20604.

[1599] Yet another function of GAM26 is therefore inhibition of RAS guanyl releasing protein 1 (calcium and DAG-regulated) (RASGRP1), a gene which encodes a Protein that is a RAS guanyl releasing protein. Accordingly, utilities of GAM26 include diagnosis and treatment of the abovementioned diseases and clinical conditions.

[1600] The function of RASGRP1 has been established by previous studies. The basal ganglia are implicated in the central control of movement and in forms of procedural learning related to habit formation. The basal ganglia have a unique double-inhibitory pathway design combined with abundant expression of neuromodulators in striatal neurons. Genes with differentially high expression in the striatum include genes encoding proteins with signaling functions, such as adenylate cyclase-5 (ADCY5; 600293). In a search for striatum-enriched transcripts by a differential display method, Kawasaki et al. (1998) found a family of genes characterized by the presence of a Ras superfamily guanine nucleotide exchange factor (GEF) domain. Kawasaki et al. (1998) characterized the calcium- and diacylglycerol (DAG)-regulated GEFI. They showed that the calcium- and DAG-regulated GEFII, which was cloned by Ebinu et al. (1998), exhibited a different brain expression pattern. Bottorff et al. (1999) proposed that the Ras activator GEFII represented a 5-prime and 3-prime truncated version of a larger normal transcript that encodes a predicted 90-kD protein, which they called RAS guanyl nucleotide-releasing protein (RASGRP). Bottorff et al. (1999) studied the structure of the mouse and human sequences and confirmed their conclusions about the nature of the 5-prime truncation. They localized the human RASGRP1 gene to 15q 15 by in situ hybridization, and positioned the mouse gene on chromosome 2 near thrombospondin by linkage analysis.

[1601] Full details of the abovementioned studies are described in the following publications, the disclosure of which are hereby incorporated by reference:

[1602] Further studies establishing the function and utilities of RASGRP1 are found in John Hopkins OMIM database record ID 603962, and in references numbered 1316-1318 listed hereinbelow.

[1603] Reference is now made to LAF4 BINDING SITE. lymphoid nuclear protein related to AF4 (LAF4) is a target gene of GAM26, corresponding to GAM26-TARGET GENE of FIG. 26A. LAF4 BINDING SITE is a binding site found in an untranslated region of LAF4, corresponding to BINDING SITE of FIG. 26A. FIG. 26D illustrates the complementarity of the nucleotide sequence of LAF4 BINDING SITE, designated SEQ ID:338574, to the nucleotide sequence of GAM26 RNA of FIG. 26A, designated SEQ ID:20604.

[1604] An additional function of GAM26 is therefore inhibition of lymphoid nuclear protein related to AF4 (LAF4), a gene which encodes a Protein that may function in lymphoid development and oncogenesis. and is associated with leukemias. Accordingly, utilities of GAM26 include diagnosis and treatment of the abovementioned diseases and clinical conditions.

[1605] The function of LAF4 has been established by previous studies. The translocation t(4;11)(q21;q23) is present in approximately 50% of children under 1 year of age suffering from acute lymphoblastic leukemia (ALL). Lymphoid nuclear protein related to AF4 (LAF4) is related to MLLT2 (159557), also referred to as AF4, which is the gene that is fused to the MLL gene (159555), also termed ALL1, HRX, and HTRX, in t(4;11)(q21;q23). Ma and Staudt (1996) isolated a human cDNA encoding LAF4 from a subtracted cDNA library enriched for genes expressed in the Raji Burkitt's lymphoma cell line and not in the K562 erythroleukemia cell line. LAF4 is a 1,227-amino acid protein with a mass of 135 kD in B-cell lines. It is similar to MLLT2 throughout its length, with the greatest similarity in the N-terminal and C-terminal regions. LAF4 is a tissue-restricted nuclear transcriptional activator that is preferentially expressed in lymphoid tissue. Northern blot analysis detected a major 8.5-kb transcript in lymphoid cell lines. By interspecific backcross analysis, Liao et al. (1996) determined that the mouse Laf4 gene is located on chromosome 1. By fluorescence in situ hybridization, they assigned the human LAF4 gene to 2q11.2-q12. Liao et al. (1996) stated that the isolation of LAF4 has defined a highly conserved LAF4/MLLT2 gene family of nuclear transcription factors that may function in lymphoid development and oncogenesis.

[1606] Full details of the abovementioned studies are described in the following publications, the disclosure of which are hereby incorporated by reference:

[1607] iao, X.; Ma, C.; Trask, B.; Massa, H.; Gilbert, D. J.; Staudt, L. M.; Jenkins, N. A.; Copeland, N. G.: LAF4 maps to mouse chromosome 1 and human chromosome 2q11.2-q12. Mammalian Genome 7: 467-468, 1996. PubMed ID: 8662235 2. Ma, C.; Staudt, L. M.: LAF-4 encodes a lymphoid nuclear protein with transactivation potential that is homologous to AF-4, the gene fused to MLL in t(4;11) leukemias. Blood 87: 734-745, 1996.

[1608] Further studies establishing the function and utilities of LAF4 are found in John Hopkins OMIM database record ID 601464, and in references numbered 1319-1320 listed hereinbelow.

[1609] Reference is now made to RECK BINDING SITE. reversion-inducing-cysteine-rich protein with kazal motifs (RECK) is a target gene of GAM26, corresponding to GAM26-TARGET GENE of FIG. 26A. RECK BINDING SITE is a binding site found in an untranslated region of RECK, corresponding to BINDING SITE of FIG. 26A. FIG. 26D illustrates the complementarity of the nucleotide sequence of RECK BINDING SITE, designated SEQ ID:338574, to the nucleotide sequence of GAM26 RNA of FIG. 26A, designated SEQ ID:20604.

[1610] A further function of GAM26 is therefore inhibition of reversion-inducing-cysteine-rich protein with kazal motifs (RECK), a gene which encodes a Protein that plays a role in regulation of cancer progression and tumor angiogenesis. and is associated with cancerous tumors. Accordingly, utilities of GAM26 include diagnosis and treatment of the abovementioned diseases and clinical conditions.

[1611] The function of RECK has been established by previous studies. Transformed malignant cell lines frequently lose a flat morphology and acquire a round morphology. Genes that induce flat reversion may be useful in the control of cancer. By screening a fibroblast expression library for reversion-inducing cDNAs, Takahashi et al. (1998) isolated a cDNA encoding RECK (reversion-inducing, cysteine-rich protein with Kazal motifs). Sequence analysis predicted that the 971-amino acid RECK protein, which shares 93% amino acid identity with mouse Reck, is 9% cysteine and contains an N-terminal signal sequence; 5 putative cysteine knot motifs; 5 potential N-glycosylation sites; 3 central serine protease inhibitor domains with either complete or incomplete Kazal-type, 4-cys motifs; 2 regions with weak homology to EGF-like repeats; and a C-terminal hydrophobic glycosylphosphatidylinositol-anchoring signal. Immunoblot analysis showed that RECK is expressed as a 110-kD protein that is reduced to approximately 100 kD after deglycosylation. Northern blot analysis detected a 4.6-kb RECK transcript in a wide variety of tissues and normal cell lines, but no expression was detected in tumor cell lines. Restoration of RECK expression in tumor cell lines did not affect growth but did significantly suppress matrix invasion and metastatic activity. SDS-PAGE and gelatin zymography analysis demonstrated that due to a posttranscriptional event(s), secretion of MMP9 (120361), a key enzyme in tumor invasion and metastasis, is decreased in cells expressing RECK. An RECK mutant lacking the C-terminal 23 residues retained the ability to suppress tumor cell invasion and MMP9 proteolytic activity but lost the ability to inhibit MMP9 release.

[1612] Animal model experiments lend further support to the function of RECK. Oh et al. (2001) showed that in addition to MMP9, RECK also regulates MMP2 (120360) and MT1-MMP (MMP14; 600754), which are known to be involved in cancer progression. Mice lacking a functional Reck gene died around embryonic day 10.5 with defects in collagen fibrils, the basal lamina, and vascular development; this phenotype could be partially suppressed by Mmp2 null mutation. Vascular sprouting was dramatically suppressed in tumors derived from Reck-expressing fibrosarcoma cells grown in nude mice. These results supported a role for RECK in the regulation of MMP2 in vivo and implicated RECK downregulation in tumor angiogenesis.

[1613] It is appreciated that the abovementioned animal model for RECK is acknowledged by those skilled in the art as a scientifically valid animal model, as can be further appreciated from the publications sited hereinbelow.

[1614] Full details of the abovementioned studies are described in the following publications, the disclosure of which are hereby incorporated by reference:

[1615] akahashi, C.; Sheng, Z.; Horan, T. P.; Kitayama, H.; Maki, M.; Hitomi, K.; Kitaura, Y.; Takai, S.; Sasahara, R. M.; Horimoto, A.; Ikawa, Y.; Ratzkin, B. J.; Arakawa, T.; Noda, M.: Regulation of matrix metalloproteinase-9 and inhibition of tumor invasion by the membrane-anchored glycoprotein RECK. Proc. Nat. Acad. Sci. 95: 13221-13226, 1998. PubMed ID: 9789069 1. Oh, J.; Takahashi, R.; Kondo, S.; Mizoguchi, A.; Adachi, E.; Sasahara, R. M.; Nishimura, S.; Imamura, Y.; Kitayama, H.; Alexander, D. B.; Ide, C.; Horan, T. P.; Arakawa, T.; Yoshida, H.; Nishikawa, S.; Itoh, Y.; Seiki, M.; Itohara, S.; Takahashi, C.; Noda, M.: The membrane-anchored MMP inhibitor RECK is a key regulator of extracellular matrix integrity and angiogenesis. Cell 107: 789-800, 2001.

[1616] Further studies establishing the function and utilities of RECK are found in John Hopkins OMIM database record ID 605227, and in references numbered 1321-1322 listed hereinbelow.

[1617] Referring now to RECK BINDING SITE. reversion-inducing-cysteine-rich protein with kazal motifs (RECK) is a target gene of GAM26, corresponding to GAM26-TARGET GENE of FIG. 26A. RECK BINDING SITE is a binding site found in an untranslated region of RECK, corresponding to BINDING SITE of FIG. 26A. FIG. 26D illustrates the complementarity of the nucleotide sequence of RECK BINDING SITE, designated SEQ ID:338574, to the nucleotide sequence of GAM26 RNA of FIG. 26A, designated SEQ ID:20604.

[1618] Yet a further function of GAM26 is therefore inhibition of reversion-inducing-cysteine-rich protein with kazal motifs (RECK), a gene which encodes a Protein that plays a role in regulation of cancer progression and tumor angiogenesis. and is associated with cancerous tumors. Accordingly, utilities of GAM26 include diagnosis and treatment of the abovementioned diseases and clinical conditions. The function and utilities of RECK have been established by previous studies, as described hereinabove with reference to FIG. 26D.

[1619] Referring now to RECK BINDING SITE. reversion-inducing-cysteine-rich protein with kazal motifs (RECK) is a target gene of GAM26, corresponding to GAM26-TARGET GENE of FIG. 26A. RECK BINDING SITE is a binding site found in an untranslated region of RECK, corresponding to BINDING SITE of FIG. 26A. FIG. 26D illustrates the complementarity of the nucleotide sequence of RECK BINDING SITE, designated SEQ ID:338585, to the nucleotide sequence of GAM26 RNA of FIG. 26A, designated SEQ ID:20604.

[1620] Another function of GAM26 is therefore inhibition of reversion-inducing-cysteine-rich protein with kazal motifs (RECK), a gene which encodes a Protein that plays a role in regulation of cancer progression and tumor angiogenesis. and is associated with cancerous tumors. Accordingly, utilities of GAM26 include diagnosis and treatment of the abovementioned diseases and clinical conditions. The function and utilities of RECK have been established by previous studies, as described hereinabove with reference to FIG. 26D.

[1621] Reference is now made to RENT1 BINDING SITE. regulator of nonsense transcripts 1 (RENT1) is a target gene of GAM26, corresponding to GAM26-TARGET GENE of FIG. 26A. RENT1 BINDING SITE is a binding site found in an untranslated region of RENT1, corresponding to BINDING SITE of FIG. 26A. FIG. 26D illustrates the complementarity of the nucleotide sequence of RENT1 BINDING SITE, designated SEQ ID:339175, to the nucleotide sequence of GAM26 RNA of FIG. 26A, designated SEQ ID:20604.

[1622] Yet another function of GAM26 is therefore inhibition of regulator of nonsense transcripts 1 (RENT1), a gene which encodes a Protein that eliminates the production of nonsense-containing RNAs in mammalian cells. Accordingly, utilities of GAM26 include diagnosis and treatment of the abovementioned diseases and clinical conditions.

[1623] The function of RENT1 has been established by previous studies. Sun et al. (1998) provided evidence for a factor that functions to eliminate the production of nonsense-containing RNAs in mammalian cells. They identified the factor, variously referred to as RENT1 and HUPF1, by isolating cDNA for a human homolog of S. cerevisiae Upflp, which is a group I RNA helicase that functions in the nonsense-mediated decay of mRNA in yeast. Using monkey COS cells and human HeLa cells, Sun et al. (1998) demonstrated that expression of human Upfl protein harboring an arginine-to-cysteine mutation at residue 844 within the RNA helicase domain acts in a dominant-negative fashion to abrogate the decay of nonsense-containing mRNA that takes place in association with nuclei or in the cytoplasm. These findings provided evidence that nonsense-mediated mRNA decay is related mechanistically in yeast and in mammalian cells, regardless of the cellular site of decay.

[1624] Animal model experiments lend further support to the function of RENT1. Medghalchi et al. (2001) explored the consequences of loss of NMRD function in vertebrates through targeted disruption of the Rent1 gene, which encodes a mammalian ortholog of Upflp, in murine embryonic stem cells. Mice heterozygous for the targeted allele showed no apparent phenotypic abnormalities but homozygosity was never observed, demonstrating that Rent1 is essential for embryonic viability. Homozygous targeted embryos showed complete loss of NMRD and were viable in the preimplantation period, but resorbed shortly after implantation. Furthermore, Rent1 −/− blastocysts isolated at 3.5 days postcoitum underwent apoptosis in culture following a brief phase of cellular expansion. The authors hypothesized that NMRD is essential for mammalian cellular viability and supports a critical role for the pathway in the regulated expression of selected physiologic transcripts.

[1625] It is appreciated that the abovementioned animal model for RENT1 is acknowledged by those skilled in the art as a scientifically valid animal model, as can be further appreciated from the publications sited hereinbelow.

[1626] Full details of the abovementioned studies are described in the following publications, the disclosure of which are hereby incorporated by reference:

[1627] un, X.; Perlick, H. A.; Dietz, H. C.; Maquat, L. E.: A mutated human homologue to yeast Upfl protein has a dominant-negative effect on the decay of nonsense-containing mRNAs in mammalian cells. Proc. Nat. Acad. Sci. 95: 10009-10014, 1998. PubMed ID: 9707591 2. Medghalchi, S. M.; Frischmeyer, P. A.; Mendell, J. T.; Kelly, A. G.; Lawler, A. M.; Dietz, H. C.: Rent1, a trans-effector of nonsense-mediated mRNA decay, is essential for mammalian embryonic viability. Hum. Molec. Genet. 10: 99-105, 2001.

[1628] Further studies establishing the function and utilities of RENT1 are found in John Hopkins OMIM database record ID 601430, and in references numbered 1323-1328 listed hereinbelow.

[1629] Referring now to REPS2 BINDING SITE. RALBP1 associated Eps domain containing 2 (REPS2) is a target gene of GAM26, corresponding to GAM26-TARGET GENE of FIG. 26A. REPS2 BINDING SITE is a binding site found in an untranslated region of REPS2, corresponding to BINDING SITE of FIG. 26A. FIG. 26D illustrates the complementarity of the nucleotide sequence of REPS2 BINDING SITE, designated SEQ ID:339240, to the nucleotide sequence of GAM26 RNA of FIG. 26A, designated SEQ ID:20604.

[1630] An additional function of GAM26 is therefore inhibition of RALBP1 associated Eps domain containing 2 (REPS2), a gene which encodes a Protein that interacts with the active form of RAS with adaptor protein GRB2 and binds calcium. Accordingly, utilities of GAM26 include diagnosis and treatment of the abovementioned diseases and clinical conditions. The function and utilities of REPS2 have been established by previous studies, as described hereinabove with reference to FIG. 26D.

[1631] Referring now to REPS2 BINDING SITE. RALBP1 associated Eps domain containing 2 (REPS2) is a target gene of GAM26, corresponding to GAM26-TARGET GENE of FIG. 26A. REPS2 BINDING SITE is a binding site found in an untranslated region of REPS2, corresponding to BINDING SITE of FIG. 26A. FIG. 26D illustrates the complementarity of the nucleotide sequence of REPS2 BINDING SITE, designated SEQ ID:339246, to the nucleotide sequence of GAM26 RNA of FIG. 26A, designated SEQ ID:20604.

[1632] A further function of GAM26 is therefore inhibition of RALBP1 associated Eps domain containing 2 (REPS2), a gene which encodes a Protein that interacts with the active form of RAS with adaptor protein GRB2 and binds calcium. Accordingly, utilities of GAM26 include diagnosis and treatment of the abovementioned diseases and clinical conditions. The function and utilities of REPS2 have been established by previous studies, as described hereinabove with reference to FIG. 26D.

[1633] Referring now to REPS2 BINDING SITE. RALBP1 associated Eps domain containing 2 (REPS2) is a target gene of GAM26, corresponding to GAM26-TARGET GENE of FIG. 26A. REPS2 BINDING SITE is a binding site found in an untranslated region of REPS2, corresponding to BINDING SITE of FIG. 26A. FIG. 26D illustrates the complementarity of the nucleotide sequence of REPS2 BINDING SITE, designated SEQ ID:339265, to the nucleotide sequence of GAM26 RNA of FIG. 26A, designated SEQ ID:20604.

[1634] Yet a further function of GAM26 is therefore inhibition of RALBP1 associated Eps domain containing 2 (REPS2), a gene which encodes a Protein that interacts with the active form of RAS with adaptor protein GRB2 and binds calcium. Accordingly, utilities of GAM26 include diagnosis and treatment of the abovementioned diseases and clinical conditions. The function and utilities of REPS2 have been established by previous studies, as described hereinabove with reference to FIG. 26D.

[1635] Referring now to REPS2 BINDING SITE. RALBP1 associated Eps domain containing 2 (REPS2) is a target gene of GAM26, corresponding to GAM26-TARGET GENE of FIG. 26A. REPS2 BINDING SITE is a binding site found in an untranslated region of REPS2, corresponding to BINDING SITE of FIG. 26A. FIG. 26D illustrates the complementarity of the nucleotide sequence of REPS2 BINDING SITE, designated SEQ ID:339278, to the nucleotide sequence of GAM26 RNA of FIG. 26A, designated SEQ ID:20604.

[1636] Another function of GAM26 is therefore inhibition of RALBP1 associated Eps domain containing 2 (REPS2), a gene which encodes a Protein that interacts with the active form of RAS with adaptor protein GRB2 and binds calcium. Accordingly, utilities of GAM26 include diagnosis and treatment of the abovementioned diseases and clinical conditions. The function and utilities of REPS2 have been established by previous studies, as described hereinabove with reference to FIG. 26D.

[1637] Referring now to REPS2 BINDING SITE. RALBP1 associated Eps domain containing 2 (REPS2) is a target gene of GAM26, corresponding to GAM26-TARGET GENE of FIG. 26A. REPS2 BINDING SITE is a binding site found in an untranslated region of REPS2, corresponding to BINDING SITE of FIG. 26A. FIG. 26D illustrates the complementarity of the nucleotide sequence of REPS2 BINDING SITE, designated SEQ ID:339279, to the nucleotide sequence of GAM26 RNA of FIG. 26A, designated SEQ ID:20604.

[1638] Yet another function of GAM26 is therefore inhibition of RALBP1 associated Eps domain containing 2 (REPS2), a gene which encodes a Protein that interacts with the active form of RAS with adaptor protein GRB2 and binds calcium. Accordingly, utilities of GAM26 include diagnosis and treatment of the abovementioned diseases and clinical conditions. The function and utilities of REPS2 have been established by previous studies, as described hereinabove with reference to FIG. 26D.

[1639] Reference is now made to REV3L BINDING SITE. REV3 (yeast homolog)-like, catalytic subunit of DNA polymerase zeta (REV3L) is a target gene of GAM26, corresponding to GAM26-TARGET GENE of FIG. 26A. REV3L BINDING SITE is a binding site found in an untranslated region of REV3L, corresponding to BINDING SITE of FIG. 26A. FIG. 26D illustrates the complementarity of the nucleotide sequence of REV3L BINDING SITE, designated SEQ ID:339991, to the nucleotide sequence of GAM26 RNA of FIG. 26A, designated SEQ ID:20604.

[1640] An additional function of GAM26 is therefore inhibition of REV3 (yeast homolog)-like, catalytic subunit of DNA polymerase zeta (REV3L), a gene which encodes a Enzyme that is a catalytic subunit of DNA polymerase zeta and acts in translation replication and mutagenesis. Accordingly, utilities of GAM26 include diagnosis and treatment of the abovementioned diseases and clinical conditions.

[1641] The function of REV3L has been established by previous studies. To get a better understanding of mutagenic mechanisms in humans, Gibbs et al. (1998) cloned and sequenced the human homolog of the Saccharomyces cerevisiae REV3 gene. The yeast gene encodes the catalytic subunit of DNA polymerase zeta, a nonessential enzyme that is thought to carry out translesion replication and is responsible for virtually all DNA damage-induced mutagenesis and the majority of spontaneous mutagenesis. The human gene encodes an expected protein of 3,130 residues, about twice the size of the yeast protein, which has 1,504 amino acids. The 2 proteins are 29% identical in an amino-terminal region of approximately 340 residues, 39% identical in a carboxy-terminal region of approximately 850 residues, and 29% identical in a 55-residue region in the middle of the 2 genes. The sequence of the expected protein strongly predicted that it is the catalytic subunit of a DNA polymerase of the polymerase-zeta type; the carboxy-terminal domain possesses, in the right order, the 6 motifs characteristic of eukaryotic DNA polymerases, most closely resembles yeast polymerase-zeta among all polymerases in the GenBank database, and is different from the human alpha (POLA; 312040), delta (POLD1; 174761), and epsilon (POLE; 174762) enzymes. Human cells expressing high levels of an REV3 antisense RNA fragment grow normally, but show little or no UV-induced mutagenesis and are slightly more sensitive to killing by UV. The human gene therefore appears to carry out a function similar to that of its yeast counterpart. Xiao et al. (1998) identified human cDNA clones from 3 different libraries whose deduced amino acid sequences bore remarkable homology to yeast REV3. By in situ hybridization, they mapped the human REV3 gene to 1p33-p32. The gene encodes an mRNA of more than 10 kb. Its expression varies in different tissues and appeared to be elevated in some but not all of the tumor cell lines examined. In a study of genes involved in tumor suppression from 6q21, Morelli et al. (1998) identified the same sequence as that reported by Gibbs et al. (1998). The REV3L gene contains 33 exons (3 noncoding at the 5-prime end) and spans approximately 200 kb of genomic DNA. The chromosome 6 assignment is the more likely (AFS).

[1642] Full details of the abovementioned studies are described in the following publications, the disclosure of which are hereby incorporated by reference:

[1643] ibbs, P. E. M.; McGregor, W. G.; Maher, V. M.; Nisson, P.; Lawrence, C. W.: A human homolog of the Saccharomyces cerevisiae REV3 gene, which encodes the catalytic subunit of DNA polymerase zeta. Proc. Nat. Acad. Sci. 95: 6876-6880, 1998. PubMed ID: 9618506 3. Xiao, W.; Lechler, T.; Chow, B. L.; Fontanie, T.; Agustus, M.; Carter, K. C.; Wei, Y.-F.: Identification, chromosomal mapping and tissue-specific expression of hREV3 encoding a putative human DNA polymerase zeta. Carcinogenesis 19: 945-949, 1998.

[1644] Further studies establishing the function and utilities of REV3L are found in John Hopkins OMIM database record ID 602776, and in references numbered 1329-1331 listed hereinbelow.

[1645] Referring now to RGS19IP1 BINDING SITE. (RGS19IP1) is a target gene of GAM26, corresponding to GAM26-TARGET GENE of FIG. 26A. RGS19IP1 BINDING SITE is a binding site found in an untranslated region of RGS19IP1, corresponding to BINDING SITE of FIG. 26A. FIG. 26D illustrates the complementarity of the nucleotide sequence of RGS19IP1 BINDING SITE, designated SEQ ID:341338, to the nucleotide sequence of GAM26 RNA of FIG. 26A, designated SEQ ID:20604.

[1646] A further function of GAM26 is therefore inhibition of (RGS19IP1), a gene which encodes a Protein that is involved in g protein-linked signaling. Accordingly, utilities of GAM26 include diagnosis and treatment of the abovementioned diseases and clinical conditions. The function and utilities of RGS19IP1 have been established by previous studies, as described hereinabove with reference to FIG. 26D.

[1647] Referring now to RGS19IP1 BINDING SITE. (RGS19IP1) is a target gene of GAM26, corresponding to GAM26-TARGET GENE of FIG. 26A. RGS19IP1 BINDING SITE is a binding site found in an untranslated region of RGS19IP1, corresponding to BINDING SITE of FIG. 26A. FIG. 26D illustrates the complementarity of the nucleotide sequence of RGS19IP1 BINDING SITE, designated SEQ ID:341352, to the nucleotide sequence of GAM26 RNA of FIG. 26A, designated SEQ ID:20604.

[1648] Yet a further function of GAM26 is therefore inhibition of (RGS19IP1), a gene which encodes a Protein that is involved in g protein-linked signaling. Accordingly, utilities of GAM26 include diagnosis and treatment of the abovementioned diseases and clinical conditions. The function and utilities of RGS19IP1 have been established by previous studies, as described hereinabove with reference to FIG. 26D.

[1649] Reference is now made to RNF14 BINDING SITE. ring finger protein 14 (RNF14) is a target gene of GAM26, corresponding to GAM26-TARGET GENE of FIG. 26A. RNF14 BINDING SITE is a binding site found in an untranslated region of RNF14, corresponding to BINDING SITE of FIG. 26A. FIG. 26D illustrates the complementarity of the nucleotide sequence of RNF14 BINDING SITE, designated SEQ ID:342895, to the nucleotide sequence of GAM26 RNA of FIG. 26A, designated SEQ ID:20604.

[1650] Another function of GAM26 is therefore inhibition of ring finger protein 14 (RNF14), a gene which encodes a transcripition factor that associates with the androgen receptor (AR); functions as a transcriptional coactivator. Accordingly, utilities of GAM26 include diagnosis and treatment of the abovementioned diseases and clinical conditions.

[1651] The function of RNF14 has been established by previous studies. The RING finger motif is a unique zinc-chelating domain involved in mediating protein-DNA and protein-protein interactions. Using the sequence of the partial cDNA clone HFB30 isolated by Ueki et al. (1998) to screen a human fetal brain cDNA library, Ueki et al. (1999) cloned the full-length cDNA, which encoded a novel ring finger protein, RNF14. The deduced 474-amino acid protein has a calculated molecular mass of approximately 53 kD. RT-PCR analysis revealed ubiquitous expression of RNF14 in a wide variety of human tissues. Kang et al. (1999) independently cloned RNF14, which they called ARA54 (androgen receptor-associated protein-54), by a yeast 2-hybrid screen of a prostate cDNA library. Northern blot analysis detected a major 3-kb transcript, with highest expression in testis, followed by thymus, spleen, colon, prostate, and uterus. Low expression was detected in small intestine and blood leukocytes. The RNF14 transcript was also strongly detected in 2 other prostate cell lines. A second transcript of 2 kb was detected in testis only. Kang et al. (1999) demonstrated that RNF14 can function as a coactivator for androgen-dependent transcription on both wildtype and mutant androgen receptor (313700). They also showed that in the presence of a certain amount of 17-beta-estradiol or hydroxyflutamide, the transcriptional activity of a specific AR mutant was significantly enhanced, whereas that of wildtype and another AR mutant was not. The authors suggested that both RNF14 and the positions of the AR mutation might contribute to the specificity of AR-mediated transactivation. Ueki et al. (1999) determined that the RNF14 gene contains 9 exons and spans approximately 20 kb of genomic DNA. By somatic cell hybrid and radiation hybrid analyses, Ueki et al. (1999) mapped the RNF14 gene to chromosome 5q23.3-q31.1.

[1652] Full details of the abovementioned studies are described in the following publications, the disclosure of which are hereby incorporated by reference:

[1653] Ueki, N.; Seki, N.; Yano, K.; Masuho, Y.; Saito, T.; Muramatsu, M. Isolation and characterization of a novel human gene (HFB30) which encodes a protein with a RING finger motif. Biochim. Biophys. Acta 232-236, 1999. PubMed ID: 10320776. Kang, H.-Y.; Yeh, S.; Fujimoto, N.; Chang, C.: Cloning and characterization of human prostate coactivator ARA54, a novel protein that associates with the androgen receptor. J. Biol. Chem. 274: 8570-8576, 1999.

[1654] Further studies establishing the function and utilities of RNF14 are found in John Hopkins OMIM database record ID 605675, and in references numbered 1332-1334 listed hereinbelow.

[1655] Reference is now made to ROCK2 BINDING SITE. Rho-associated, coiled-coil containing protein kinase 2 (ROCK2) is a target gene of GAM26, corresponding to GAM26-TARGET GENE of FIG. 26A. ROCK2 BINDING SITE is a binding site found in an untranslated region of ROCK2, corresponding to BINDING SITE of FIG. 26A. FIG. 26D illustrates the complementarity of the nucleotide sequence of ROCK2 BINDING SITE, designated SEQ ID:344223, to the nucleotide sequence of GAM26 RNA of FIG. 26A, designated SEQ ID:20604.

[1656] Yet another function of GAM26 is therefore inhibition of Rho-associated, coiled-coil containing protein kinase 2 (ROCK2), a gene which encodes a Enzyme that regulates cytokinesis, smooth muscle contraction, the formation of actin stress fibers and focal adhesions. Accordingly, utilities of GAM26 include diagnosis and treatment of the abovementioned diseases and clinical conditions.

[1657] The function of ROCK2 has been established by previous studies. ROCK2 is a serine/threonine kinase that regulates cytokinesis, smooth muscle contraction, the formation of actin stress fibers and focal adhesions, and the activation of the c-fos (164810) serum response element. ROCK2, which is an isozyme of ROCK1 (601702), is a target for the small GTPase Rho (e.g., 165390). Nakamura et al. (2001) studied the role of Rho in the migration of corneal epithelial cells in rabbit. They detected both ROCK1 (601702) and ROCK2 in the corneal epithelium at protein and mRNA levels. They found that exoenzyme C3, a Rho inhibitor, inhibits corneal epithelial migration in a dose-dependent manner and prevents the stimulatory effect of the Rho activator lysophosphatidic acid (LPA). Both cytochalasin B, an inhibitor of actin filament assembly, and ML7, an inhibitor of myosin light chain kinase, also prevent LPA stimulation of epithelial migration. The authors suggested that Rho mediates corneal epithelial migration in response to external stimuli by regulating the organization of the actin cytoskeleton. Rao et al. (2001) investigated the role of Rho kinase in the modulation of aqueous humor outflow facility. The treatment of human trabecular meshwork and canal of Schlemm cells with a Rho kinase-specific inhibitor led to significant but reversible changes in cell shape and decreased actin stress fibers, focal adhesions, and protein phosphotyrosine staining. Based on the Rho kinase inhibitor-induced changes in myosin light chain phosphorylation and actomyosin organization, the authors suggested that cellular relaxation and loss of cell-substratum adhesions in the human trabecular meshwork and canal of Schlemm cells could result in either increased paracellular fluid flow across the canal of Schlemm or altered flow pathway through the juxtacanalicular tissue, thereby lowering resistance to outflow. They suggested Rho kinase as a potential target for the development of drugs to modulate intraocular pressure in glaucoma patients.

[1658] Full details of the abovementioned studies are described in the following publications, the disclosure of which are hereby incorporated by reference:

[1659] Nakamura, M.; Nagano, T.; Chikama, T.; Nishida, T.: Role of the small GTP-binding protein Rho in epithelial cell migration in the rabbit cornea. Invest. Ophthal. Vis. Sci. 42: 941-947, 2001. PubMed ID: 11274070. Rao, P. V.; Deng, P.-F.; Kumar, J.; Epstein, D. L.: Modulation of aqueous humor outflow facility by the Rho kinase-specific inhibitor Y-27632. Invest. Ophthal. Vis. Sci. 42: 1029-1037, 2001.

[1660] Further studies establishing the function and utilities of ROCK2 are found in John Hopkins OMIM database record ID 604002, and in references numbered 1335-1338 listed hereinbelow.

[1661] Referring now to ROCK2 BINDING SITE. Rho-associated, coiled-coil containing protein kinase 2 (ROCK2) is a target gene of GAM26, corresponding to GAM26-TARGET GENE of FIG. 26A. ROCK2 BINDING SITE is a binding site found in an untranslated region of ROCK2, corresponding to BINDING SITE of FIG. 26A. FIG. 26D illustrates the complementarity of the nucleotide sequence of ROCK2 BINDING SITE, designated SEQ ID:344231, to the nucleotide sequence of GAM26 RNA of FIG. 26A, designated SEQ ID:20604.

[1662] An additional function of GAM26 is therefore inhibition of Rho-associated, coiled-coil containing protein kinase 2 (ROCK2), a gene which encodes a Enzyme that regulates cytokinesis, smooth muscle contraction, the formation of actin stress fibers and focal adhesions. Accordingly, utilities of GAM26 include diagnosis and treatment of the abovementioned diseases and clinical conditions. The function and utilities of ROCK2 have been established by previous studies, as described hereinabove with reference to FIG. 26D.

[1663] Reference is now made to RORA BINDING SITE. RAR-related orphan receptor A (RORA) is a target gene of GAM26, corresponding to GAM26-TARGET GENE of FIG. 26A. RORA BINDING SITE is a binding site found in an untranslated region of RORA, corresponding to BINDING SITE of FIG. 26A. FIG. 26D illustrates the complementarity of the nucleotide sequence of RORA BINDING SITE, designated SEQ ID:344515, to the nucleotide sequence of GAM26 RNA of FIG. 26A, designated SEQ ID:20604.

[1664] A further function of GAM26 is therefore inhibition of RAR-related orphan receptor A (RORA), a gene which encodes a receptor that binds dna as a monomer to hormone response elements (hre) containing a single core motif half-site preceded by a short a-t rich sequences. Accordingly, utilities of GAM26 include diagnosis and treatment of the abovementioned diseases and clinical conditions.

[1665] The function of RORA has been established by previous studies. Meyer et al. (2000) showed that the RORA gene and the RORC (602943) gene, but not the RORB gene, are expressed in mesenchymal stem cells derived from bone marrow. Cells undergoing osteogenic differentiation showed increased messenger signal expression. They found that homozygous ‘staggerer’ mutants have thin long bones compared with heterozygous animals and wildtype littermates and that the bones of sg/sg animals are osteopenic. They concluded that the product of the Rora gene most likely acts by direct modulation of a bone matrix component

[1666] Animal model experiments lend further support to the function of RORA. The recessive mouse mutation ‘staggerer’ (sg) is associated with severe cerebellar ataxia due to a cell-autonomous defect in the development of Purkinje cells. These cells are reduced in numbers and show immature morphology, synaptic arrangement, biochemical properties, and gene expression. In addition, sg heterozygotes show accelerated dendritic atrophy and cell loss, suggesting that sg has a role in mature Purkinje cells. Certain functions of the immune system are also affected. Hamilton et al. (1996) mapped sg to a 160-kb interval on mouse chromosome 9 that was found to contain the gene encoding Rora, a member of the nuclear hormone receptor superfamily. Furthermore, sg mice were found to carry a deletion within the Rora gene that prevents translation of the ligand-binding homology domain. Based on these results, they proposed a model in which Rora interacts with the thyroid hormone signaling pathway to induce Purkinje cell maturation. Of the 4 different isoforms of the Rora gene that are generated by a combination of alternative promoter usage and exon splicing and that differ in their DNA-binding properties, Matysiak-Scholze and Nehls (1997) found that isoforms Roral and Rora4 are specifically coexpressed in the murine cerebellum and human cerebellum. Thus, at least 2 isoforms of the murine Rora gene are affected by the genomic deletion associated with the sg phenotype. The finding of cerebellum-specific coregulation of Rora1 and Rora4 suggested that distinct sets of target genes regulated by the Rora1 and Rora4 isoforms are required for Purkinje cell development

[1667] It is appreciated that the abovementioned animal model for RORA is acknowledged by those skilled in the art as a scientifically valid animal model, as can be further appreciated from the publications sited hereinbelow.

[1668] Full details of the abovementioned studies are described in the following publications, the disclosure of which are hereby incorporated by reference:

[1669] Meyer, T.; Kneissel, M.; Mariani, J.; Fournier, B.: In vitro and in vivo evidence for orphan nuclear receptor ROR-alpha function in bone metabolism. Proc. Nat. Acad. Sci. 97: 9197-9202, 2000. PubMed ID: 10900268 Matysiak-Scholze, U.; Nehls, M.: The structural integrity of ROR-alpha isoforms is mutated in staggerer mice: cerebellar coexpression of ROR-alpha-1 and ROR-alpha-4. Genomics 43: 78-84, 1997.

[1670] Further studies establishing the function and utilities of RORA are found in John Hopkins OMIM database record ID 600825, and in references numbered 1339-1348 listed hereinbelow.

[1671] Reference is now made to RPS6KA1 BINDING SITE. ribosomal protein S6 kinase, 90 kD, polypeptide 1 (RPS6KA1) is a target gene of GAM26, corresponding to GAM26-TARGET GENE of FIG. 26A. RPS6KA1 BINDING SITE is a binding site found in an untranslated region of RPS6KA1, corresponding to BINDING SITE of FIG. 26A. FIG. 26D illustrates the complementarity of the nucleotide sequence of RPS6KA1 BINDING SITE, designated SEQ ID:346249, to the nucleotide sequence of GAM26 RNA of FIG. 26A, designated SEQ ID:20604.

[1672] Yet a further function of GAM26 is therefore inhibition of ribosomal protein S6 kinase, 90 kD, polypeptide 1 (RPS6KA1), a gene which encodes a Enzyme that is an effector of the phosphatidylinositide-3-OH kinase signaling pathway. and is associated with type II diabetes mellitus. Accordingly, utilities of GAM26 include diagnosis and treatment of the abovementioned diseases and clinical conditions.

[1673] The function of RPS6KA1 has been established by previous studies. Moller et al. (1994) described the cloning and characterization of 3 genes encoding 3 isoforms of ribosomal protein S6 kinase (RSK), which they called HU1 (RPS6KA1), HU2 (RPS6KA2; 601685), and HU3 (RPS6KA3; 300075). The HU1 cDNA (GenBank L07597) encodes a predicted 735-amino acid protein containing 2 distinct consensus ATP-binding site sequences. Northern blot and RNase protection analyses detected an approximately 3.5-kb HU1 transcript in lymphocytes, skeletal muscle, liver, and adipose tissue.

[1674] Animal model experiments lend further support to the function of RPS6KA1. Shima et al. (1998) generated mice deficient in S6 kinase-1 by targeted disruption. These mice are viable and fertile, but exhibit a conspicuous reduction in body size during embryogenesis, an effect that was mostly overcome by adulthood. Shima et al. (1998) hypothesized that the weak penetrance of the phenotype may arise from increased expression in S6k1-deficient mice of the highly homologous gene S6K2 (601685). Pende et al. (2000) showed that mice deficient for S6 kinase-1, a known effector of the phosphatidylinositide-3-OH kinase signaling pathway, are hypoinsulinemic and glucose intolerant. Whereas insulin resistance was not observed in isolated muscle, such mice exhibit a sharp reduction in glucose-induced insulin secretion and in pancreatic insulin content. This is not due to a lesion in glucose sensing or insulin production, but to a reduction in pancreatic endocrine mass, which is accounted for by a selective decrease in beta-cell size. Pende et al. (2000) concluded that the observed phenotype closely parallels those of preclinical type II diabetes mellitus, in which malnutrition-induced hypoinsulinemia prediposes individuals to glucose intolerance.

[1675] It is appreciated that the abovementioned animal model for RPS6KA1 is acknowledged by those skilled in the art as a scientifically valid animal model, as can be further appreciated from the publications sited hereinbelow.

[1676] Full details of the abovementioned studies are described in the following publications, the disclosure of which are hereby incorporated by reference:

[1677] Moller, D. E.; Xia, C. H.; Tang, W.; Zhu, A. X.; Jakubowski, M. Human rsk isoforms: cloning and characterization of tissue-specific expression. Am. J. Physiol. 266: C351-C359, 1994.

[1678] Further studies establishing the function and utilities of RPS6KA1 are found in John Hopkins OMIM database record ID 601684, and in references numbered 1349-1355 listed hereinbelow.

[1679] Reference is now made to RRAS BINDING SITE. related RAS viral (r-ras) oncogene homolog (RRAS) is a target gene of GAM26, corresponding to GAM26-TARGET GENE of FIG. 26A. RRAS BINDING SITE is a binding site found in an untranslated region of RRAS, corresponding to BINDING SITE of FIG. 26A. FIG. 26D illustrates the complementarity of the nucleotide sequence of RRAS BINDING SITE, designated SEQ ID:346568, to the nucleotide sequence of GAM26 RNA of FIG. 26A, designated SEQ ID:20604.

[1680] Another function of GAM26 is therefore inhibition of related RAS viral (r-ras) oncogene homolog (RRAS), a gene which encodes a Enzyme that is a member of the ras family of GTP binding proteins. Accordingly, utilities of GAM26 include diagnosis and treatment of the abovementioned diseases and clinical conditions.

[1681] The function of RRAS has been established by previous studies. Lowe et al. (1987) isolated the human RRAS gene by low-stringency hybridization with a Harvey-ras probe. They found that the predicted 218-amino acid RRAS protein has an amino-terminal extension of 26 residues compared with HRAS p21 (190020) and shares 55% sequence identity with it. The cloned mouse Rras cDNA encodes a predicted protein sharing 94.5% sequence identity with the human protein. Lowe et al. (1987) determined that the RRAS gene has at least 6 exons.

[1682] Full details of the abovementioned studies are described in the following publications, the disclosure of which are hereby incorporated by reference:

[1683] Lowe, D. G.; Capon, D. J.; Delwart, E.; Sakaguchi, A. Y.; Naylor, S. L.; Goeddel, D. V.: Structure of the human and murine R-ras genes, novel genes closely related to ras proto-oncogenes. Cell 48: 137-146, 1987.

[1684] Further studies establishing the function and utilities of RRAS are found in John Hopkins OMIM database record ID 165090, and in references numbered 1356 listed hereinbelow.

[1685] Reference is now made to RRAS2 BINDING SITE. RELATED RAS VIRAL ONCOGENE HOMOLOG 2 (RRAS2) is a target gene of GAM26, corresponding to GAM26-TARGET GENE of FIG. 26A. RRAS2 BINDING SITE is a binding site found in an untranslated region of RRAS2, corresponding to BINDING SITE of FIG. 26A. FIG. 26D illustrates the complementarity of the nucleotide sequence of RRAS2 BINDING SITE, designated SEQ ID:346598, to the nucleotide sequence of GAM26 RNA of FIG. 26A, designated SEQ ID:20604.

[1686] Yet another function of GAM26 is therefore inhibition of RELATED RAS VIRAL ONCOGENE HOMOLOG 2 (RRAS2), a gene which encodes a Enzyme that is a member of the ras family of GTP binding proteins and is associated with OVARIAN CARCINOMA. Accordingly, utilities of GAM26 include diagnosis and treatment of the abovementioned diseases and clinical conditions.

[1687] The function of RRAS2 has been established by previous studies. The TC21 oncogene, a member of the RAS superfamily, was initially cloned from a human teratocarcinoma cDNA library by PCR methods using degenerate oligonucleotides corresponding to the conserved region of the RAS genes (Drivas et al., 1990). Chan et al. (1994) found the same oncogene when they generated an expression cDNA library from an ovarian carcinoma line. They found, furthermore, that a single point mutation substituting glutamine for leucine at position 72 was responsible for activation of transforming properties. While the cDNA clone possessed high transforming activity, the ovarian tumor genomic DNA, which contained the mutated TC21 allele, failed to induce transformed foci. Thus, expression cDNA cloning made it possible to identify and isolate a human oncogene that had evaded detection by conventional approaches. The International Radiation Hybrid Mapping Consortium mapped the RRAS2 gene to chromosome 11pter-p15.5 (RH40056).

[1688] Full details of the abovementioned studies are described in the following publications, the disclosure of which are hereby incorporated by reference:

[1689] Chan, A. M.-L.; Miki, T.; Meyers, K. A.; Aaronson, S. A.: A human oncogene of the RAS superfamily unmasked by expression cDNA cloning. Proc. Nat. Acad. Sci. 91: 7558-7562, 1994.

[1690] Further studies establishing the function and utilities of RRAS2 are found in John Hopkins OMIM database record ID 600098, and in references numbered 1357-1358 listed hereinbelow.

[1691] Reference is now made to RTN4 BINDING SITE. reticulon 4 (RTN4) is a target gene of GAM26, corresponding to GAM26-TARGET GENE of FIG. 26A. RTN4 BINDING SITE is a binding site found in an untranslated region of RTN4, corresponding to BINDING SITE of FIG. 26A. FIG. 26D illustrates the complementarity of the nucleotide sequence of RTN4 BINDING SITE, designated SEQ ID:347317, to the nucleotide sequence of GAM26 RNA of FIG. 26A, designated SEQ ID:20604.

[1692] An additional function of GAM26 is therefore inhibition of reticulon 4 (RTN4), a gene which encodes a Protein that plays a central role in limiting axonal regeneration after central nervous system injury. Accordingly, utilities of GAM26 include diagnosis and treatment of the abovementioned diseases and clinical conditions.

[1693] The function of RTN4 has been established by previous studies. NOGO has been identified as a component of the central nervous system myelin that prevents axonal regeneration in the adult vertebrate central nervous system. Analysis of NOGOA has shown that an axon-inhibiting domain of 66 amino acids is expressed at the extracellular surface and at the endoplasmic reticulum lumen of transfected cells and oligodendrocytes. The acidic amino terminus of NOGOA is detected at the cytosolic face of cellular membranes and may contribute to inhibition of axon regeneration at sites of oligodendrocyte injury. Fournier et al. (2001) showed that the extracellular domain of NOGO (NOGO-66) inhibits axonal extension but does not alter normeuronal cell morphology. In contrast, a multivalent form of the N terminus of NOGOA affects the morphology of both neurons and other cell types. Fournier et al. (2001) identified a brain-specific, leucine-rich-repeat protein with high affinity for soluble NOGO-66. Cleavage of the NOGO-66 receptor (605566) and other glycosylphosphatidylinositol-linked proteins from axonal surfaces renders neurons insensitive to NOGO-66. NOGO-66 receptor expression is sufficient to impart NOGO-66 axonal inhibition to unresponsive neurons. Disruption of the interaction between NOGO-66 and its receptor provides the potential for enhanced recovery after human central nervous system injury. GrandPre et al. (2002) identified competitive antagonists of the NOGO receptor derived from amino-terminal peptide fragments of NOGO-66. The NOGO-66(1-40) antagonist peptide blocks NOGO-66 or central nervous system myelin inhibition of axonal outgrowth in vitro, demonstrating that the NOGO receptor mediates a significant portion of axonal outgrowth inhibition by myelin. Intrathecal administration of the amino-terminal antagonist peptide to rats with midthoracic spinal cord hemisection resulted in significant axon outgrowth of the corticospinal tract, and improved functional recovery. Thus, GrandPre et al. (2002) concluded that NOGO-66 and the NOGO receptor have central roles in limiting axonal regeneration after central nervous system injury. Axonal regeneration in the adult central nervous system (CNS) is limited by 2 proteins in myelin, NOGO and myelin-associated glycoprotein (MAG; 159640). The receptor for Nogo (NgR) had been identified as an axonal glycosylphosphatidylinositol (GPI)-anchored protein, whereas the MAG receptor had remained elusive. Liu et al. (2002) demonstrated that MAG binds directly, with high affinity, to NgR. Cleavage of GPI-linked proteins from axons protects growth cones from MAG-induced collapse, and dominant-negative NgR eliminates MAG inhibition of neurite outgrowth. MAG-resistant embryonic neurons were rendered MAG-sensitive by expression of NgR. MAG and NOGO-66 activate NgR independently and serve as redundant NgR ligands that may limit axonal regeneration after CNS injury.

[1694] Full details of the abovementioned studies are described in the following publications, the disclosure of which are hereby incorporated by reference:

[1695] ournier, A. E.; GrandPre, T.; Strittmatter, S. M.: Identification of a receptor mediating Nogo-66 inhibition of axonal regeneration. Nature 409: 341-346, 2001. PubMed ID: 11201742 3. GrandPre, T.; Li, S.; Strittmatter, S. M.: Nogo-66 receptor antagonist peptide promotes axonal regeneration. Nature 417: 547-551, 2002.

[1696] Further studies establishing the function and utilities of RTN4 are found in John Hopkins OMIM database record ID 604475, and in references numbered 1359-1367 listed hereinbelow.

[1697] Referring now to RTN4 BINDING SITE. reticulon 4 (RTN4) is a target gene of GAM26, corresponding to GAM26-TARGET GENE of FIG. 26A. RTN4 BINDING SITE is a binding site found in an untranslated region of RTN4, corresponding to BINDING SITE of FIG. 26A. FIG. 26D illustrates the complementarity of the nucleotide sequence of RTN4 BINDING SITE, designated SEQ ID:347318, to the nucleotide sequence of GAM26 RNA of FIG. 26A, designated SEQ ID:20604.

[1698] A further function of GAM26 is therefore inhibition of reticulon 4 (RTN4), a gene which encodes a Protein that plays a central role in limiting axonal regeneration after central nervous system injury. Accordingly, utilities of GAM26 include diagnosis and treatment of the abovementioned diseases and clinical conditions. The function and utilities of RTN4 have been established by previous studies, as described hereinabove with reference to FIG. 26D.

[1699] Reference is now made to SAS BINDING SITE. sarcoma amplified sequence (SAS) is a target gene of GAM26, corresponding to GAM26-TARGET GENE of FIG. 26A. SAS BINDING SITE is a binding site found in an untranslated region of SAS, corresponding to BINDING SITE of FIG. 26A. FIG. 26D illustrates the complementarity of the nucleotide sequence of SAS BINDING SITE, designated SEQ ID:349188, to the nucleotide sequence of GAM26 RNA of FIG. 26A, designated SEQ ID:20604.

[1700] Yet a further function of GAM26 is therefore inhibition of sarcoma amplified sequence (SAS), a gene which encodes a Protein that is a member of the transmembrane 4 superfamily (TM4SF) and may be involved in growth-related cellular processes T. Accordingly, utilities of GAM26 include diagnosis and treatment of the abovementioned diseases and clinical conditions.

[1701] The function of SAS has been established by previous studies. SAS is a member of the transmembrane 4 superfamily, all members of which have 4 hydrophobic domains. This family includes various tumor-associated antigens such as CO-029 (600769), L6 (M3S1; 191155), and ME491 (CD63; 155740), hematopoietic cell antigens such as CD9 (143030), CD53 (151525), CD37 (151523), and TAPA1 (186845), as well as the parasitic trematode surface proteins Sm23 and Sj23. Meltzer et al. (1991) identified and partially cloned a gene that is amplified in human malignant fibrous histiocytoma. They demonstrated that the gene, designated sarcoma amplified sequence, is located on chromosome 12 by hybridization to a rodent/human somatic cell hybrid mapping panel. They further regionalized the assignment to 12q13-q14 by fluorescence in situ hybridization. This chromosomal region is commonly involved in rearrangements in myxoid liposarcoma, benign lipoma, and uterine leiomyoma. Meltzer et al. (1991) identified SAS amplification in 5 of 29 malignant fibrous histiocytoma biopsies, 4 of 12 liposarcoma biopsies, and 1 osteogenic sarcoma cell line. Since amplification of cellular oncogenes occurs frequently in human cancers, identification of amplified genes in tumor cells is a useful approach for understanding genetic alterations. Jankowski et al. (1995) characterized the genomic structure of SAS and showed that it has 6 exons spanning approximately 3.2 kb.

[1702] Full details of the abovementioned studies are described in the following publications, the disclosure of which are hereby incorporated by reference:

[1703] Jankowski, S. A.; De Jong, P.; Meltzer, P. S.: Genomic structure of SAS, a member of the transmembrane 4 superfamily amplified in human sarcomas. Genomics 25: 501-506, 1995. PubMed ID: 7789984 2. Meltzer, P. S.; Jankowski, S. A.; Dal Cin, P.; Sandberg, A. A.; Paz, I. B.; Coccia, M. A.; Smith, S. H.: Identification and cloning of a novel amplified DNA sequence in human malignant fibrous histiocytoma derived from a region of chromosome 12 frequently rearranged in soft tissue tumors. (Abstract) Cytogenet. Cell Genet. 58: 1979 only, 1991.

[1704] Further studies establishing the function and utilities of SAS are found in John Hopkins OMIM database record ID 181035, and in references numbered 1368-1369 listed hereinbelow.

[1705] Referring now to SERPINB8 BINDING SITE. serine (or cysteine) proteinase inhibitor, lade B (ovalbumin), member (SERPINB8) is a target gene of GAM26, corresponding to GAM26-TARGET GENE of FIG. 26A. SERPINB8 BINDING SITE is a binding site found in an untranslated region of SERPINB8, corresponding to BINDING SITE of FIG. 26A. FIG. 26D illustrates the complementarity of the nucleotide sequence of SERPINB8 BINDING SITE, designated SEQ ID:353985, to the nucleotide sequence of GAM26 RNA of FIG. 26A, designated SEQ ID:20604.

[1706] Another function of GAM26 is therefore inhibition of serine (or cysteine) proteinase inhibitor, clade B (ovalbumin), member (SERPINB8), a gene which encodes a Protein that protease inhibitors; may be a serpin serine protease inhibitor that binds thrombin. Accordingly, utilities of GAM26 include diagnosis and treatment of the abovementioned diseases and clinical conditions. The function and utilities of SERPINB8 have been established by previous studies, as described hereinabove with reference to FIG. 26D.

[1707] Referring now to REPS2 BINDING SITE. RALBP1 associated Eps domain containing 2 (REPS2) is a target gene of GAM26, corresponding to GAM26-TARGET GENE of FIG. 26A. REPS2 BINDING SITE is a binding site found in an untranslated region of REPS2, corresponding to BINDING SITE of FIG. 26A. FIG. 26D illustrates the complementarity of the nucleotide sequence of REPS2 BINDING SITE, designated SEQ ID:353987, to the nucleotide sequence of GAM26 RNA of FIG. 26A, designated SEQ ID:20604.

[1708] Yet another function of GAM26 is therefore inhibition of RALBP1 associated Eps domain containing 2 (REPS2), a gene which encodes a Protein that interacts with the active form of RAS with adaptor protein GRB2 and binds calcium. Accordingly, utilities of GAM26 include diagnosis and treatment of the abovementioned diseases and clinical conditions. The function and utilities of REPS2 have been established by previous studies, as described hereinabove with reference to FIG. 26D.

[1709] Referring now to SERPINB8 BINDING SITE. serine (or cysteine) proteinase inhibitor, clade B (ovalbumin), member (SERPINB8) is a target gene of GAM26, corresponding to GAM26-TARGET GENE of FIG. 26A. SERPINB8 BINDING SITE is a binding site found in an untranslated region of SERPINB8, corresponding to BINDING SITE of FIG. 26A. FIG. 26D illustrates the complementarity of the nucleotide sequence of SERPINB8 BINDING SITE, designated SEQ ID:353987, to the nucleotide sequence of GAM26 RNA of FIG. 26A, designated SEQ ID:20604.

[1710] An additional function of GAM26 is therefore inhibition of serine (or cysteine) proteinase inhibitor, clade B (ovalbumin), member (SERPINB8), a gene which encodes a Protein that protease inhibitors; may be a serpin serine protease inhibitor that binds thrombin. Accordingly, utilities of GAM26 include diagnosis and treatment of the abovementioned diseases and clinical conditions. The function and utilities of SERPINB8 have been established by previous studies, as described hereinabove with reference to FIG. 26D.

[1711] Referring now to GABRB3 BINDING SITE. gamma-aminobutyric acid (GABA) A receptor, beta 3 (GABRB3) is a target gene of GAM26, corresponding to GAM26-TARGET GENE of FIG. 26A. GABRB3 BINDING SITE is a binding site found in an untranslated region of GABRB3, corresponding to BINDING SITE of FIG. 26A. FIG. 26D illustrates the complementarity of the nucleotide sequence of GABRB3 BINDING SITE, designated SEQ ID:353989, to the nucleotide sequence of GAM26 RNA of FIG. 26A, designated SEQ ID:20604.

[1712] A further function of GAM26 is therefore inhibition of gamma-aminobutyric acid (GABA) A receptor, beta 3 (GABRB3), a gene which encodes a receptor that mediates neuronal inhibition by binding to the gaba/benzodiazepine receptor and opening an integral chloride channel. and is associated with Angelman syndrome and Prader-Willi syndrome. Accordingly, utilities of GAM26 include diagnosis and treatment of the abovementioned diseases and clinical conditions. The function and utilities of GABRB3 have been established by previous studies, as described hereinabove with reference to FIG. 26D.

[1713] Referring now to SERPINB8 BINDING SITE. serine (or cysteine) proteinase inhibitor, clade B (ovalbumin), member (SERPINB8) is a target gene of GAM26, corresponding to GAM26-TARGET GENE of FIG. 26A. SERPINB8 BINDING SITE is a binding site found in an untranslated region of SERPINB8, corresponding to BINDING SITE of FIG. 26A. FIG. 26D illustrates the complementarity of the nucleotide sequence of SERPINB8 BINDING SITE, designated SEQ ID:353989, to the nucleotide sequence of GAM26 RNA of FIG. 26A, designated SEQ ID:20604.

[1714] Yet a further function of GAM26 is therefore inhibition of serine (or cysteine) proteinase inhibitor, lade B (ovalbumin), member (SERPINB8), a gene which encodes a Protein that protease inhibitors; may be a serpin serine protease inhibitor that binds thrombin. Accordingly, utilities of GAM26 include diagnosis and treatment of the abovementioned diseases and clinical conditions. The function and utilities of SERPINB8 have been established by previous studies, as described hereinabove with reference to FIG. 26D.

[1715] Reference is now made to SFRP5 BINDING SITE. secreted frizzled-related protein 5 (SFRP5) is a target gene of GAM26, corresponding to GAM26-TARGET GENE of FIG. 26A. SFRP5 BINDING SITE is a binding site found in an untranslated region of SFRP5, corresponding to BINDING SITE of FIG. 26A. FIG. 26D illustrates the complementarity of the nucleotide sequence of SFRP5 BINDING SITE, designated SEQ ID:355430, to the nucleotide sequence of GAM26 RNA of FIG. 26A, designated SEQ ID:20604.

[1716] Another function of GAM26 is therefore inhibition of secreted frizzled-related protein 5 (SFRP5), a gene which encodes a Protein that receptor for wnt proteins that may modulate Wnt protein function and retinal cell polarization. Accordingly, utilities of GAM26 include diagnosis and treatment of the abovementioned diseases and clinical conditions.

[1717] The function of SFRP5 has been established by previous studies. Members of the ‘frizzled’ (FZ) transmembrane protein family (see 600667) are receptors for Wnt family members, cysteine-rich glycosylated ligands implicated in a variety of cellular processes, including control of cell polarity in a number of systems, including the Drosophila retina. See 164975. The secreted frizzled-related proteins (SFRPs) appear to act as soluble modulators of Wnt signaling by competing with membrane-bound frizzled receptors for the binding of secreted Wnt ligands. Chang et al. (1999) isolated bovine cDNAs encoding SFRP5, an SFRP highly expressed in the retinal pigment epithelium (RPE). By screening human genomic and RPE/retina libraries, they identified human SFRP5 genomic and cDNA clones. The SFRP5 gene contains 3 coding exons. The predicted 317-amino acid human protein shares 98% and 95% sequence identity with bovine and mouse Sfrp5, respectively. Like other SFRPs, SFRP5 contains an N-terminal signal peptide followed by a region homologous to the frizzled cysteine-rich domain (CRD). In an assay based on Wnt8 (see 601396)-induced axis duplication in Xenopus embryos, SFRP5 inhibited Wnt signaling. Chang et al. (1999) reported that although human SFRP5 is expressed in the RPE, SFRP2 (604157) is highly and preferentially expressed in bovine retina throughout the inner nuclear layer. Thus, photoreceptors appear to be bathed by complementary gradients of SFRP signaling molecules/modulators. The authors speculated that these putative inverse gradients of SFRP2 and SFRP5 might be involved in determining the polarity of photoreceptors and perhaps other cells in the retina.

[1718] Full details of the abovementioned studies are described in the following publications, the disclosure of which are hereby incorporated by reference:

[1719] Chang, J. T.; Esumi, N.; Moore, K.; Li, Y.; Zhang, S.; Chew, C.; Goodman, B.; Rattner, A.; Moody, S.; Stetten, G.; Campochiaro, P. A.; Zack, D. J. Cloning and characterization of a secreted frizzled-related protein that is expressed by the retinal pigment epithelium. Hum. Molec. Genet. 8: 575-583, 1999.

[1720] Further studies establishing the function and utilities of SFRP5 are found in John Hopkins OMIM database record ID 604158, and in references numbered 1370-1371 listed hereinbelow.

[1721] Reference is now made to SGCB BINDING SITE. sarcoglycan, beta (43 kD dystrophin-associated glycoprotein) (SGCB) is a target gene of GAM26, corresponding to GAM26-TARGET GENE of FIG. 26A. SGCB BINDING SITE is a binding site found in an untranslated region of SGCB, corresponding to BINDING SITE of FIG. 26A. FIG. 26D illustrates the complementarity of the nucleotide sequence of SGCB BINDING SITE, designated SEQ ID:356034, to the nucleotide sequence of GAM26 RNA of FIG. 26A, designated SEQ ID:20604.

[1722] Yet another function of GAM26 is therefore inhibition of sarcoglycan, beta (43 kD dystrophin-associated glycoprotein) (SGCB), a gene which encodes a Protein that is associated with limb-girdle muscular dystrophy type 2e. Accordingly, utilities of GAM26 include diagnosis and treatment of the abovementioned diseases and clinical conditions.

[1723] The function of SGCB has been established by previous studies. The dystrophin-glycoprotein complex (DGC) is a large oligomeric complex of sarcolemmal proteins and glycoproteins that acts as a structural link between the cytoskeleton of muscle and the extracellular matrix, and is believed to confer stability to the sarcolemma and protect muscle cells from contraction-induced damage. Lim et al. (1995) cloned and characterized human beta-sarcoglycan, a 43-kD component of the dystrophin-glycoprotein complex, and demonstrated its involvement in a form of muscular dystrophy, designated LGMD2E (604286). They showed that beta-sarcoglycan colocalizes with the DGC at the sarcolemma and is expressed ubiquitously, although predominantly in muscle. By PCR analysis of DNA from a panel of human/rodent somatic cell hybrids, they assigned the gene to chromosome 4 and then further narrowed the localization by study of DNA from somatic cell hybrids containing various fragments of chromosome 4. This involved assignment to the region 4p14-q21.2, which overlaps the centromere. By fluorescence in situ hybridization, they further narrowed the assignment to 4q12. Using pericentromeric markers and an intragenic polymorphic CA repeat, they demonstrated perfect cosegregation with autosomal recessive limb-girdle muscular dystrophy in Amish families from southern Indiana. A thr151-to-arg missense mutation (600900.0001) was identified in the beta-sarcoglycan gene that led to a dramatically reduced expression of beta-sarcoglycan in the sarcolemma and a concomitant loss of adhalin (600119) and 35-DAG (SGCD; 601411), which was interpreted as representing a disruption of a functional subcomplex within the dystrophin-glycoprotein complex. Durbeej et al. (2000) engineered Sgcb-null mice to analyze the biologic role of beta-sarcoglycan in the pathogenesis of LGMD2E. These mice developed severe muscular dystrophy and cardiomyopathy with focal areas of necrosis. The sarcoglycan-sarcospan and dystroglycan complexes were disrupted in skeletal, cardiac, and smooth muscle membranes. Epsilon-sarcoglycan (SGCE; 604149) was also reduced in membrane preparations of striated and smooth muscle. Loss of the sarcoglycan-sarcospan complex in vascular smooth muscle resulted in vascular irregularities in heart, diaphragm, and kidneys. Further biochemical characterization suggested the presence of a distinct epsilon-sarcoglycan complex in skeletal muscle that was disrupted in Sgcb-null mice. Thus, the authors concluded that perturbation of vascular function together with disruption of the epsilon-sarcoglycan-containing complex contribute to the pathogenesis of LGMD2E.

[1724] Full details of the abovementioned studies are described in the following publications, the disclosure of which are hereby incorporated by reference:

[1725] Lim, L. E.; Duclos, F.; Broux, O.; Bourg, N.; Sunada, Y.; Allamand, V.; Meyer, J.; Richard, I.; Moomaw, C.; Slaughter, C.; Tome, F. M. S.; Fardeau, M.; Jackson, C. E.; Beckmann, J. S.; Campbell, K. P.: Beta-sarcoglycan: characterization and role in limb-girdle muscular dystrophy linked to 4q12. Nature Genet. 11: 257-265, 1995. PubMed ID: 7581448 Durbeej, M.; Cohn, R. D.; Hrstka, R. F.; Moore, S. A.; Allamand, V.; Davidson, B. L.; Williamson, R. A.; Campbell, K. P.: Disruption of the beta-sarcoglycan gene reveals pathogenetic complexity of limb-girdle muscular dystrophy type 2E. Molec. Cell 5: 141-151, 2000.

[1726] Further studies establishing the function and utilities of SGCB are found in John Hopkins OMIM database record ID 600900, and in references numbered 1372-1378 listed hereinbelow.

[1727] Reference is now made to SLC1A1 BINDING SITE. solute carrier family 1 (neuronal/epithelial high affinity glutamate t (SLC1A1) is a target gene of GAM26, corresponding to GAM26-TARGET GENE of FIG. 26A. SLC1A1 BINDING SITE is a binding site found in an untranslated region of SLC1A1, corresponding to BINDING SITE of FIG. 26A. FIG. 26D illustrates the complementarity of the nucleotide sequence of SLC1A1 BINDING SITE, designated SEQ ID:362965, to the nucleotide sequence of GAM26 RNA of FIG. 26A, designated SEQ ID:20604.

[1728] An additional function of GAM26 is therefore inhibition of solute carrier family 1 (neuronal/epithelial high affinity glutamate t (SLC1A1), a gene which encodes a Protein that is a glutamate transporter, essential for terminating the postsynaptic action of glutamate by rapidly removing it from the synaptic cleft and is associated with amyotrophic lateral sclerosis; dicarboxylicaminoaciduria; familial ALS neurodegenerative disorders. Accordingly, utilities of GAM26 include diagnosis and treatment of the abovementioned diseases and clinical conditions.

[1729] The function of SLC1A1 has been established by previous studies. High-affinity glutamate transporters play an essential role in transporting glutamate across plasma membranes. In brain, these transporters are crucial in terminating the action of the excitatory neurotransmitter glutamate and in maintaining extracellular glutamate concentrations below neurotoxic levels. Functional defects of high-affinity glutamate transporters have been suggested to be involved in the pathophysiology of amyotrophic lateral sclerosis (105400). In small intestine and kidney, in which the high-affinity glutamate transporter mediates net absorption of glutamate and aspartate across epithelial cells, an inborn error of glutamate transport is thought to cause dicarboxylicaminoaciduria (222730). Kanai and Hediger (1992) isolated a cDNA encoding a high-affinity glutamate transporter, designated EAAC1, that also transports aspartate but not other amino acids. EAAC1 was found to be uniquely expressed throughout the body, particularly in brain (neurons), intestine, and kidney. By Southern analysis of a panel of human/rodent somatic cell hybrids and by fluorescence in situ hybridization (FISH), Smith et al. (1994) mapped the EAAC1 gene to 9p24. They suggested that mutations in this gene may be responsible for dicarboxylicaminoaciduria or for a form of familial ALS separate from the form due to mutation in the SOD1 gene (147450) on chromosome 21. Lin et al. (2001) used a yeast 2-hybrid assay to identify a protein that interacts with EAAC1. This protein, termed GTRAP3-18 (605709), is expressed in numerous tissues, localizes to the cell membrane and cytoplasm, and specifically interacts with the carboxy-terminal intracellular domain of EAAC1. Increasing the expression of GTRAP3-18 in cells reduces EAAC1-mediated glutamate transport by lowering substrate affinity. The expression of GTRAP3-18 can be upregulated by retinoic acid, which results in a specific reduction of EAAC1-mediated glutamate transport. Lin et al. (2001) concluded that glutamate transport proteins can be regulated potently and that GTRAP can modulate the transport functions ascribed to EAAC1. GTRAP3-18 may be important in regulating the metabolic functions of EAAC1.

[1730] Full details of the abovementioned studies are described in the following publications, the disclosure of which are hereby incorporated by reference:

[1731] anai, Y.; Hediger, M. A.: Primary structure and functional characterization of a high-affinity glutamate transporter. Nature 360: 467-471, 1992. PubMed ID: 1280334 3. Smith, C. P.; Weremowicz, S.; Kanai, Y.; Stelzner, M.; Morton, C. C.; Hediger, M. A.: Assignment of the gene coding for the human high-affinity glutamate transporter EAAC1 to 9p24: potential role in dicarboxylic aminoaciduria and neurodegenerative disorders. Genomics 20: 335-336, 1994. PubMed ID: 8020993 2. Lin, C. G.; Orlov, I.; Ruggiero, A. M.; Dykes-Hoberg, M.; Lee, A.; Jackson, M.; Rothstein, J. D.: Modulation of the neuronal glutamate transporter EAAC1 by the interacting protein GTRAP3-18. Nature 410: 84-88, 2001.

[1732] Further studies establishing the function and utilities of SLC1A1 are found in John Hopkins OMIM database record ID 133550, and in references numbered 1379-1381 listed hereinbelow.

[1733] Referring now to SLC1A1 BINDING SITE. solute carrier family 1 (neuronal/epithelial high affinity glutamate t (SLC1A1) is a target gene of GAM26, corresponding to GAM26-TARGET GENE of FIG. 26A. SLC1A1 BINDING SITE is a binding site found in an untranslated region of SLC1A1, corresponding to BINDING SITE of FIG. 26A. FIG. 26D illustrates the complementarity of the nucleotide sequence of SLC1A1 BINDING SITE, designated SEQ ID:362996, to the nucleotide sequence of GAM26 RNA of FIG. 26A, designated SEQ ID:20604.

[1734] A further function of GAM26 is therefore inhibition of solute carrier family 1 (neuronal/epithelial high affinity glutamate t (SLC1A1), a gene which encodes a Protein that is a glutamate transporter, essential for terminating the postsynaptic action of glutamate by rapidly removing it from the synaptic cleft and is associated with amyotrophic lateral sclerosis; dicarboxylicaminoaciduria; familial ALS; neurodegenerative disorders. Accordingly, utilities of GAM26 include diagnosis and treatment of the abovementioned diseases and clinical conditions. The function and utilities of SLC1A1 have been established by previous studies, as described hereinabove with reference to FIG. 26D.

[1735] Reference is now made to SMARCB1 BINDING SITE. SWI/SNF related, matrix associated, actin dependent regulator of chrom (SMARCB1) is a target gene of GAM26, corresponding to GAM26-TARGET GENE of FIG. 26A. SMARCB1 BINDING SITE is a binding site found in an untranslated region of SMARCB1, corresponding to BINDING SITE of FIG. 26A. FIG. 26D illustrates the complementarity of the nucleotide sequence of SMARCB1 BINDING SITE, designated SEQ ID:370333, to the nucleotide sequence of GAM26 RNA of FIG. 26A, designated SEQ ID:20604.

[1736] Yet a further function of GAM26 is therefore inhibition of SWI/SNF related, matrix associated, actin dependent regulator of chrom (SMARCB1), a gene which encodes a Protein that is associated with malignant rhabdoid tumors (mrt). Accordingly, utilities of GAM26 include diagnosis and treatment of the abovementioned diseases and clinical conditions.

[1737] The function of SMARCB1 has been established by previous studies. Versteege et al. (1998) found that the SNF5/INI1 gene contains 9 exons and spans approximately 50 kb. They concluded that biallelic, somatic alteration of SNF5/INI1, arising through a combination of complete deletions of the gene, frameshift alterations, and nonsense mutations, is a frequent, if not constant, feature of MRTs. This was considered fully consistent with the paradigm of the 2-hit recessive model of oncogenesis and supported the hypothesis that SNF5/INI1 is the MRT tumor suppressor gene. Although constitutional mutations were not detected in this study, which was based on sporadic tumors, previous reports of multifocal and/or familial MRTs indicated that constitutional inactivation of 1 allele of SNF5/INI1 could be responsible for hereditary cases. Given the low incidence of MRT and its aggressive evolution, which frequently leads to death at a young age, familial cases, if existing, would be expected to be rare. Altered chromatin organization at specific DNA sites may be crucial in the process of oncogenesis. The SWI/SNF complexes, which have been identified in organisms from yeast to humans, are thought to be important in the remodeling of chromatin structureMost samples and cell lines from malignant rhabdoid tumors show biallelic inactivating mutations of the SNF5 gene, suggesting that SNF5 may act as a tumor suppressor. Roberts et al. (2000) examined the role of Snf5 in development and cancer in a mouse model. They found that Snf5 is widely expressed during embryogenesis with focal areas of high-level expression in the mandibular portion of the first branchial arch and central nervous system. Homozygous knockout of Snf5 resulted in lethality by embryonic day 7, whereas heterozygous mice were born at the expected frequency and appeared normal. However, beginning as early as 5 weeks of age, heterozygous mice developed tumors consistent with malignant rhabdoid tumor. Most tumors arose in soft tissues derived from the first branchial arch. Most samples and cell lines from malignant rhabdoid tumors show biallelic inactivating mutations of the SNF5 gene, suggesting that SNF5 may act as a tumor suppressor. Roberts et al. (2000) examined the role of Snf5 in development and cancer in a mouse model. They found that Snf5 is widely expressed during embryogenesis with focal areas of high-level expression in the mandibular portion of the first branchial arch and central nervous system. Homozygous knockout of Snf5 resulted in lethality by embryonic day 7, whereas heterozygous mice were born at the expected frequency and appeared normal. However, beginning as early as 5 weeks of age, heterozygous mice developed tumors consistent with malignant rhabdoid tumor. Most tumors arose in soft tissues derived from the first branchial arch.

[1738] Full details of the abovementioned studies are described in the following publications, the disclosure of which are hereby incorporated by reference:

[1739] Versteege, I.; Sevenet, N.; Lange, J.; Rousseau-Merck, M.-F.; Ambros, P.; Handgretinger, R.; Aurias, A.; Delattre, O.: Truncating mutations of hSNF5/INI1 in aggressive paediatric cancer. Nature 394: 203-206, 1998. PubMed ID: 9671307. Roberts, C. W. M.; Galusha, S. A.; McMenamin, M. E.; Fletcher, C. D. M.; Orkin, S. H.: Haploinsufficiency of Snf5 (integrase interactor 1) predisposes to malignant rhabdoid tumors in mice. Proc. Nat. Acad. Sci. 97: 13796-13800, 2000.

[1740] Further studies establishing the function and utilities of SMARCB1 are found in John Hopkins OMIM database record ID 601607, and in references numbered 1382-1397 listed hereinbelow.

[1741] Reference is now made to SMARCC1 BINDING SITE. SWI/SNF-RELATED, MATRIX-ASSOCIATED, ACTIN-DEPENDENT REGULATOR OF CHROMATIN, SUBFAMILY C, MEMBER 1 (SMARCC1) is a target gene of GAM26, corresponding to GAM26-TARGET GENE of FIG. 26A. SMARCC1 BINDING SITE is a binding site found in an untranslated region of SMARCC1, corresponding to BINDING SITE of FIG. 26A. FIG. 26D illustrates the complementarity of the nucleotide sequence of SMARCC1 BINDING SITE, designated SEQ ID:370474, to the nucleotide sequence of GAM26 RNA of FIG. 26A, designated SEQ ID:20604.

[1742] Another function of GAM26 is therefore inhibition of SWI/SNF-RELATED, MATRIX-ASSOCIATED, ACTIN-DEPENDENT REGULATOR OF CHROMATIN, SUBFAMILY C, MEMBER 1 (SMARCC1), a gene which encodes a Protein that is involved in chromatin remodeling. Accordingly, utilities of GAM26 include diagnosis and treatment of the abovementioned diseases and clinical conditions.

[1743] The function of SMARCC1 has been established by previous studies. Chromatin is actively remodeled during development. Chromatin remodeling of certain genes appears to precede their transcriptional activation. In yeast, the multisubunit SWI/SNF complex is thought to be responsible for chromatin remodeling. Wang et al. (1996) isolated an analogous SWI/SNF complex from human YT cells. They found that the resultant complexes are composed of 9 to 12 polypeptides, which they termed BAFs (for BRG1-associated factors). Wang et al. (1996) isolated BAF155 from a human Jurkat T-cell cDNA library. This gene encodes a polypeptide of 1,104 amino acids, and is homologous both to the yeast SWI3 gene and to BAF170, another of the proteins in this chromatin remodeling complex (601734). SWI3, BAF155, and BAF170 all contain a predicted leucine zipper region (a dimerization motif for a variety of transcription factors) and a myb-like tryptophan-repeat domain. Western blot analysis and EST database analysis revealed that BAF155 is expressed in many tissues

[1744] Full details of the abovementioned studies are described in the following publications, the disclosure of which are hereby incorporated by reference:

[1745] ing, H. Z.; Vameghi-Meyers, V.; Wang, W.; Crabtree, G. R.; Francke, U.: Five SWI/SNF-related, matrix-associated, actin-dependent regulator of chromatin (SMARC) genes are dispersed in the human genome. Genomics 51: 140-143, 1998. PubMed ID: 9693044 2. Wang, W.; Xue, Y.; Zhou, S.; Kuo, A.; Cairns, B. R.; Crabtree, G. R.: Diversity and specialization of mammalian SWI/SNF complexes. Genes Dev. 10: 2117-2130, 1996.

[1746] Further studies establishing the function and utilities of SMARCC1 are found in John Hopkins OMIM database record ID 601732, and in references numbered 1398-1399 listed hereinbelow.

[1747] Reference is now made to SNX3 BINDING SITE. sorting nexin 3 (SNX3) is a target gene of GAM26, corresponding to GAM26-TARGET GENE of FIG. 26A. SNX3 BINDING SITE is a binding site found in an untranslated region of SNX3, corresponding to BINDING SITE of FIG. 26A. FIG. 26D illustrates the complementarity of the nucleotide sequence of SNX3 BINDING SITE, designated SEQ ID:373083, to the nucleotide sequence of GAM26 RNA of FIG. 26A, designated SEQ ID:20604.

[1748] Yet another function of GAM26 is therefore inhibition of sorting nexin 3 (SNX3), a gene which encodes a Protein that may associate with late-Golgi resident proteins rather than cell surface receptors. Accordingly, utilities of GAM26 include diagnosis and treatment of the abovementioned diseases and clinical conditions.

[1749] The function of SNX3 has been established by previous studies. By database searching with the sequence of sorting nexin-1 (SNX1; 601272), Haft et al. (1998) obtained several human EST clones, determined their nucleotide sequences, and constructed full-length cDNAS corresponding to an isoform of SNX1 (SNX1A), SNX2 (605929), SNX3, and SNX4 (605931). The SNX3 cDNA encodes a deduced 162-amino acid protein. Northern blot analysis detected an approximately 1.9-kb SNX3 transcript in all tissues tested, with highest expression in peripheral leukocytes, spleen, heart, and skeletal muscle, and low expression in kidney. Western blot analysis showed that SNX3 is found mainly in the cytosol, whereas SNX1, SNX1A, SNX2, and SNX4 are associated predominantly with membranes. Coimmunoprecipitation studies detected no association of SNX3 with any receptors studied. Because SNX3 is the human ortholog of yeast Grd19p, Haft et al. (1998) suggested that SNX3 may associate with late-Golgi resident proteins rather than cell surface receptors. Based on the functions of their yeast homologs, Haft et al. (1998) suggested that mammalian sorting nexins function in intracellular trafficking of proteins to various organelles.

[1750] Full details of the abovementioned studies are described in the following publications, the disclosure of which are hereby incorporated by reference:

[1751] Haft, C. R.; de la Luz Sierra, M.; Barr, V. A.; Haft, D. H.; Taylor, S. I.: Identification of a family of sorting nexin molecules and characterization of their association with receptors. Molec. Cell. Biol. 18: 7278-7287, 1998.

[1752] Further studies establishing the function and utilities of SNX3 are found in John Hopkins OMIM database record ID 605930, and in references numbered 1400 listed hereinbelow.

[1753] Reference is now made to SOX10 BINDING SITE. SRY (sex determining region Y)-box 10 (SOX10) is a target gene of GAM26, corresponding to GAM26-TARGET GENE of FIG. 26A. SOX10 BINDING SITE is a binding site found in an untranslated region of SOX10, corresponding to BINDING SITE of FIG. 26A. FIG. 26D illustrates the complementarity of the nucleotide sequence of SOX10 BINDING SITE, designated SEQ ID:374793, to the nucleotide sequence of GAM26 RNA of FIG. 26A, designated SEQ ID:20604.

[1754] An additional function of GAM26 is therefore inhibition of SRY (sex determining region Y)-box 10 (SOX10), a gene which encodes a transcripition factor that is associated with Waardenburg syndrome type 4. Accordingly, utilities of GAM26 include diagnosis and treatment of the abovementioned diseases and clinical conditions.

[1755] The function of SOX10 has been established by previous studies. Waardenburg syndrome combines deafness with pigmentary abnormalities and Hirschsprung disease (aganglionic megacolon). Both are congenital disorders caused by defective function of the embryonic neural crest. The disorders are associated in patients with Waardenburg-Shah syndrome (WS4; 277580) in which the manifestations are reminiscent of the white coat-spotting and aganglionic megacolon displayed by the mouse mutants Dom, piebald-lethal, and lethal spotting (Is). The last 2 phenotypes are caused by mutations in the genes encoding the endothelin-B receptor and its ligand, endothelin-3, respectively, in the mouse, and mutations in either of these 2 genes can result in the Waardenburg-Shah syndrome in humans. The identification of Sox10 as the gene mutated in Dom mice prompted Pingault et al. (1998) to analyze the role of its human homolog in neural crest defects. In 4 families with Waardenburg-Shah syndrome, they found mutations in the SOX10 gene (e.g., 602229.0001). These mutations probably result in haploinsufficiency of the SOX10 product.

[1756] Animal model experiments lend further support to the function of SOX10. mouse model of Hirschsprung disease (HSCR; 142623), dominant megacolon (Dom), arose spontaneously at the Jackson Laboratory (Lane and Liu, 1984). Megacolon was associated with dominantly inherited spotting. While Dom/+heterozygous mice displayed regional deficiencies of neural crest-derived enteric ganglia in the distal colon, Dom/Dom homozygous animals were embryonic lethal. Linkage analysis indicated that the Dom mutation is located in the mid-terminal region of mouse chromosome 15. Pingault et al. (1997) noted that, in mice, natural and in vitro-induced mutations affecting the Ret (164761), Ednrb (131242), and Edn3 (131244) genes generated phenotypes similar to human Hirschsprung disease. Using polymorphisms for conserved human/mouse genes, Pingault et al. (1997) established homology between the Dom locus and human chromosome 22q12-q13. Two genes, Smstr3 and Ads1 (103050), not previously mapped in the mouse genome, were also mapped to mouse chromosome 15. The investigators stated that 3 genes, Smstr3, Lgals1 (150570), and Pdgfb (190040), are possible Dom candidates, as they did not recombine with the Dom mutation in a backcross.

[1757] It is appreciated that the abovementioned animal model for SOX10 is acknowledged by those skilled in the art as a scientifically valid animal model, as can be further appreciated from the publications sited hereinbelow.

[1758] Full details of the abovementioned studies are described in the following publications, the disclosure of which are hereby incorporated by reference:

[1759] Touraine, R. L.; Attie-Bitach, T.; Manceau, E.; Korsch, E.; Sarda, P.; Pingault, V.; Encha-Razavi, F.; Pelet, A.; Auge, J.; Nivelon-Chevallier, A.; Holschneider, A. M.; Munnes, M.; Doerfler, W.; Goossens, M.; Munnich, A.; Vekemans, M.; Lyonnet, S.: Neurological phenotype in Waardenburg syndrome type 4 correlates with novel SOX10 truncating mutations and expression in developing brain. Am. J. Hum. Genet. 66: 1496-1503, 2000. Note: Erratum: Am. J. Hum. Genet. 66: 2020 only, 2000. PubMed ID: 10762540 Bondurand, N.; Kuhlbrodt, K.; Pingault, V.; Enderich, J.; Sajus, M.; Tommerup, N.; Warburg, M.; Hennekam, R. C. M.; Read, A. P.; Wegner, M.; Goossens, M.: A molecular analysis of the Yemenite deaf-blind hypopigmentation syndrome: SOX10 dysfunction causes different neurocristopathies. Hum. Molec. Genet. 8: 1785-1789, 1999.

[1760] Further studies establishing the function and utilities of SOX10 are found in John Hopkins OMIM database record ID 602229, and in references numbered 1401-1422 listed hereinbelow.

[1761] Referring now to SOX10 BINDING SITE. SRY (sex determining region Y)-box 10 (SOX10) is a target gene of GAM26, corresponding to GAM26-TARGET GENE of FIG. 26A. SOX10 BINDING SITE is a binding site found in an untranslated region of SOX10, corresponding to BINDING SITE of FIG. 26A. FIG. 26D illustrates the complementarity of the nucleotide sequence of SOX10 BINDING SITE, designated SEQ ID:374849, to the nucleotide sequence of GAM26 RNA of FIG. 26A, designated SEQ ID:20604.

[1762] A further function of GAM26 is therefore inhibition of SRY (sex determining region Y)-box 10 (SOX10), a gene which encodes a transcripition factor that is associated with Waardenburg syndrome type 4. Accordingly, utilities of GAM26 include diagnosis and treatment of the abovementioned diseases and clinical conditions. The function and utilities of SOX10 have been established by previous studies, as described hereinabove with reference to FIG. 26D.

[1763] Reference is now made to SOX11 BINDING SITE. SRY (sex determining region Y)-box 11 (SOX11) is a target gene of GAM26, corresponding to GAM26-TARGET GENE of FIG. 26A. SOX11 BINDING SITE is a binding site found in an untranslated region of SOX11, corresponding to BINDING SITE of FIG. 26A. FIG. 26D illustrates the complementarity of the nucleotide sequence of SOX11 BINDING SITE, designated SEQ ID:375242, to the nucleotide sequence of GAM26 RNA of FIG. 26A, designated SEQ ID:20604.

[1764] Yet a further function of GAM26 is therefore inhibition of SRY (sex determining region Y)-box 11 (SOX11), a gene which encodes a transcripition factor that is probably important in the developing nervous system. Accordingly, utilities of GAM26 include diagnosis and treatment of the abovementioned diseases and clinical conditions.

[1765] The function of SOX11 has been established by previous studies. SRY (480000) is the testis-determining gene located on the Y chromosome of mammals. It encodes a protein whose most striking feature is a motif of 78 amino acids conserved with respect to the DNA binding domain of the high mobility group (HMG) proteins. Jay et al. (1995) noted that more than 100 HMG box-containing proteins had been reported at that time and are classified in 2 distinct subgroups according to the sequence-specificity of the binding, the number of DNA binding domains, and phylogenetic considerations (Laudet et al., 1993). An important subgroup of HMG box-containing proteins includes SRY and SRY box-related (SOX) sequences. They contain only 1 DNA-binding domain, and they bind to DNA in a sequence-specific manner. They are all potential transcription factors implicated in the developmental control of gene expression. Degenerate PCR-based methods enabled the cloning and sequencing of a great number of new SRY-related box sequences in both vertebrates and invertebrates. Only a few have been further characterized and, except for SOX4 (184430), which has been shown to be a transcriptional activator in lymphocytes, and for SOX9 (114290), which is the site of mutations causing campomelic dysplasia (a disorder of bone and sex determination), the functions of the SOX proteins were as yet unknown. Jay et al. (1995) cloned and characterized the human SOX11 gene using the partial clones of both human and mouse SOX11 genes and mapped the gene to 2p25 by fluorescence in situ hybridization. The SOX11 sequence is strongly conserved with the chicken homolog and is related to SOX4. It contains several putative transcriptional activator or repressor domains. The authors observed that the SOX11 expression pattern is consistent with the hypothesis that this gene is important in the developing nervous system.

[1766] Full details of the abovementioned studies are described in the following publications, the disclosure of which are hereby incorporated by reference:

[1767] Jay, P.; Goze, C.; Marsollier, C.; Taviaux, S.; Hardelin, J.-P.; Koopman, P.; Berta, P.: The human SOX11 gene: cloning, chromosomal assignment and tissue expression. Genomics 29: 541-545, 1995.

[1768] Further studies establishing the function and utilities of SOX11 are found in John Hopkins OMIM database record ID 600898, and in references numbered 1423-1424 listed hereinbelow.

[1769] Reference is now made to SPG4 BINDING SITE. spastic paraplegia 4 (autosomal dominant; spastin) (SPG4) is a target gene of GAM26, corresponding to GAM26-TARGET GENE of FIG. 26A. SPG4 BINDING SITE is a binding site found in an untranslated region of SPG4, corresponding to BINDING SITE of FIG. 26A. FIG. 26D illustrates the complementarity of the nucleotide sequence of SPG4 BINDING SITE, designated SEQ ID:376880, to the nucleotide sequence of GAM26 RNA of FIG. 26A, designated SEQ ID:20604.

[1770] Another function of GAM26 is therefore inhibition of spastic paraplegia 4 (autosomal dominant; spastin) (SPG4), a gene which encodes a Protein that is probably an ATPase involved in the assembly or function of nuclear protein complexes and is associated with spastic paraparesis. Accordingly, utilities of GAM26 include diagnosis and treatment of the abovementioned diseases and clinical conditions.

[1771] The function of SPG4 has been established by previous studies. SPG4 is ubiquitously expressed in human adult and fetal tissue, showing slightly higher expression in fetal brain. Hazan et al. (1999) cloned the mouse ortholog of SPG4, which between amino acids 113 and 616 has 96% identity with human SPG4. Spg4 transcripts are ubiquitously expressed in adult tissues and from embryonic day 7 to 17 in mouse. Interaction with the cytoskeleton was mediated by the N-terminal region of spastin and was regulated through the ATPase activity of the AAA domain. Expression of missense mutations (including 604277.0001, 604277.0002, and 604277.0004) into the AAA domain led to constitutive binding to microtubules in transfected cells and induced the disappearance of the aster and the formation of thick perinuclear bundles, suggesting a role of spastin in microtubule dynamics. Consistently, wildtype spastin promoted microtubule disassembly in transfected cells. The authors suggested that spastin may be involved in microtubule dynamics similarly to the highly homologous microtubule-severing protein katanin (606696). The authors hypothesized that impairment of fine regulation of the microtubule cytoskeleton in long axons, due to spastin mutations, may underlie the pathogenesis of hereditary spastic paraplegia

[1772] Full details of the abovementioned studies are described in the following publications, the disclosure of which are hereby incorporated by reference:

[1773] Hazan, J.; Fonknechten, N.; Mavel, D.; Paternotte, C.; Samson, D.; Artiguenave, F.; Davoine, C.-S.; Cruaud, C.; Durr, A.; Wincker, P.; Brottier, P.; Cattolico, L.; Barbe, V.; Burgunder, J.-M.; Prud'homme, J.-F.; Brice, A.; Fontaine, B.; Heilig, R.; Weissenbach, J.: Spastin, a new AAA protein, is altered in the most frequent form of autosomal dominant spastic paraplegia. Nature Genet. 23: 296-303, 1999. PubMed ID: 10610178 Errico, A.; Ballabio, A.; Rugarli, E. I.: Spastin, the protein mutated in autosomal dominant hereditary spastic paraplegia, is involved in microtubule dynamics. Hum. Molec. Genet. 11: 153-163, 2002.

[1774] Further studies establishing the function and utilities of SPG4 are found in John Hopkins OMIM database record ID 604277, and in references numbered 1425-1437 listed hereinbelow.

[1775] Reference is now made to ST7 BINDING SITE. suppression of tumorigenicity 7 (ST7) is a target gene of GAM26, corresponding to GAM26-TARGET GENE of FIG. 26A. ST7 BINDING SITE is a binding site found in an untranslated region of ST7, corresponding to BINDING SITE of FIG. 26A. FIG. 26D illustrates the complementarity of the nucleotide sequence of ST7 BINDING SITE, designated SEQ ID:380179, to the nucleotide sequence of GAM26 RNA of FIG. 26A, designated SEQ ID:20604.

[1776] Yet another function of GAM26 is therefore inhibition of suppression of tumorigenicity 7 (ST7), a gene which encodes a Protein that has a role in regulating cell-environment or cell-cell interactions. and is associated with a variety of human tumors. Accordingly, utilities of GAM26 include diagnosis and treatment of the abovementioned diseases and clinical conditions.

[1777] The function of ST7 has been established by previous studies. A distinct tumor suppressor gene involved in primary ovarian carcinomas was suggested by the finding of Zenklusen et al. (1995) of allelic loss at 7q31.1 in such carcinomas. In 17 of 19 informative cases (73%), loss of heterozygosity (LOH) was detected in D7S522 at 7q31.1. The smallest common deleted region covered about 1 cM. Previous microcell fusion transfer of human chromosome 7 to a murine squamous cell carcinoma cell line indicated that the inserted chromosome can delay the onset of tumors and in some cases completely repress the tumorigenic potential. In situ hybridization showed that the clones that reverted to the malignant phenotype had expelled the inserted chromosome. The authors stated that LOH of 7q31.1 had frequently been found in squamous cell carcinomas of the head and neck and in colon and prostate carcinomas. Vincent et al. (2000) studied an individual with autism (209850) who carried the translocation t(7;13)(q31.3;q21). The chromosomal 7 breakpoint is located in the region of 7q in which a susceptibility locus for autism had been postulated. Using a combination of DNA sequence analysis and cDNA screening of human colon carcinoma and fetal brain cDNA libraries, Vincent et al. (2000) cloned the ST7 gene, which they designated RAY1 (or FAM4A1), which spanned the translocation breakpoint. The gene contains 16 exons and extends more than 220 kb at 7q31.3. Alternatively spliced transcripts differing at exon 7 and having 2 different exon 16s encode deduced proteins of 554 and 585 amino acids. Apparent homologs of RAY1 had been identified in mouse, rat, pig, chicken, fruit fly, and nematode. Vincent et al. (2000) determined that the human and mouse RAY1 genes share similar splicing patterns, and that their predicted protein products are 98% identical.

[1778] Full details of the abovementioned studies are described in the following publications, the disclosure of which are hereby incorporated by reference:

[1779] incent, J. B.; Herbrick, J.-A.; Gurling, H. M. D.; Bolton, P. F.; Roberts, W.; Scherer, S. W.: Identification of a novel gene on chromosome 7q31 that is interrupted by a translocation breakpoint in an autistic individual. Am. J. Hum. Genet. 67: 510-514, 2000. PubMed ID: 10889047 6. Zenklusen, J. C.; Weitzel, J. N.; Ball, H. G.; Conti, C. J.: Allelic loss at 7q31.1 in human primary ovarian carcinomas suggests the existence of a tumor suppressor gene. Oncogene 11: 359-363, 1995.

[1780] Further studies establishing the function and utilities of ST7 are found in John Hopkins OMIM database record ID 600833, and in references numbered 1438-1443 listed hereinbelow.

[1781] Reference is now made to STAR BINDING SITE. steroidogenic acute regulatory protein (STAR) is a target gene of GAM26, corresponding to GAM26-TARGET GENE of FIG. 26A. STAR BINDING SITE is a binding site found in an untranslated region of STAR, corresponding to BINDING SITE of FIG. 26A. FIG. 26D illustrates the complementarity of the nucleotide sequence of STAR BINDING SITE, designated SEQ ID:380380, to the nucleotide sequence of GAM26 RNA of FIG. 26A, designated SEQ ID:20604.

[1782] An additional function of GAM26 is therefore inhibition of steroidogenic acute regulatory protein (STAR), a gene which encodes a Protein that is associated with congenital lipoid adrenal hyperplasia (clah). Accordingly, utilities of GAM26 include diagnosis and treatment of the abovementioned diseases and clinical conditions.

[1783] The function of STAR has been established by previous studies. Steroidogenic acute regulatory protein appears to mediate the rapid increase in pregnenolone synthesis stimulated by tropic hormones. Sugawara et al. (1995) isolated cDNAs encoding this protein from a human adrenal cortex library; the authors symbolized the protein STAR. When coexpressed in COS-1 cells with cytochrome P450scc (118485) and adrenodoxin (103260), STAR increased pregnenolone synthesis more than 4-fold. A major STAR transcript of 1.6 kb and less abundant transcripts of 4.4 and 7.5 kb were detected in ovary and testis. Kidney had a lower amount of the 1.6-kb message. STAR mRNA was not detected in other tissues, including placenta. Sugawara et al. (1995) concluded that STAR expression is restricted to tissues that carry out mitochondrial sterol oxidations subject to acute regulation by cAMP and that STAR mRNA levels are regulated by cAMP.

[1784] Animal model experiments lend further support to the function of STAR. Caron et al. (1997) used targeted gene disruption to produce STAR knockout mice. Initially, the knockout mice were indistinguishable from wildtype littermates, except that males and females had female external genitalia. After birth, they failed to grow normally and died from adrenocortical insufficiency. Hormone assays confirmed severe defects in adrenal steroids—with loss of negative feedback regulation at hypothalamic-pituitary levels—whereas hormones constituting the gonadal axis did not differ significantly from levels in wildtype littermates. Histologically, the adrenal cortex of STAR knockout mice contained florid lipid deposits, with lesser deposits in the steroidogenic compartment of the testis and none in the ovary. The sex-specific differences in gonadal involvement supported a 2-stage model of the pathogenesis of STAR deficiency, with trophic hormone stimulation inducing progressive accumulation of lipids within the steroidogenic cells and ultimately causing their death.

[1785] It is appreciated that the abovementioned animal model for STAR is acknowledged by those skilled in the art as a scientifically valid animal model, as can be further appreciated from the publications sited hereinbelow.

[1786] Full details of the abovementioned studies are described in the following publications, the disclosure of which are hereby incorporated by reference:

[1787] aron, K. M.; Soo, S.-C.; Wetsel, W. C.; Stocco, D. M.; Clark, B. J.; Parker, K. L.: Targeted disruption of the mouse gene encoding steroidogenic acute regulatory protein provides insights into congenital lipoid adrenal hyperplasia. Proc. Nat. Acad. Sci. 94: 11540-11545, 1997. PubMed ID: 9326645 11. Sugawara, T.; Holt, J. A.; Driscoll, D.; Strauss, J. F., III; Lin, D.; Miller, W. L.; Patterson, D.; Clancy, K. P.; Hart, I. M.; Clark, B. J.; Stocco, D. M.: Human steroidogenic acute regulatory protein: functional activity in COS-1 cells, tissue-specific expression, and mapping of the structural gene to 8p11.2 and a pseudogene to chromosome 13. Proc. Nat. Acad. Sci. 92: 4778-4782, 1995.

[1788] Further studies establishing the function and utilities of STAR are found in John Hopkins OMIM database record ID 600617, and in references numbered 1444-1455 listed hereinbelow.

[1789] Referring now to STAR BINDING SITE. steroidogenic acute regulatory protein (STAR) is a target gene of GAM26, corresponding to GAM26-TARGET GENE of FIG. 26A. STAR BINDING SITE is a binding site found in an untranslated region of STAR, corresponding to BINDING SITE of FIG. 26A. FIG. 26D illustrates the complementarity of the nucleotide sequence of STAR BINDING SITE, designated SEQ ID:380387, to the nucleotide sequence of GAM26 RNA of FIG. 26A, designated SEQ ID:20604.

[1790] A further function of GAM26 is therefore inhibition of steroidogenic acute regulatory protein (STAR), a gene which encodes a Protein that is associated with congenital lipoid adrenal hyperplasia (clah). Accordingly, utilities of GAM26 include diagnosis and treatment of the abovementioned diseases and clinical conditions. The function and utilities of STAR have been established by previous studies, as described hereinabove with reference to FIG. 26D.

[1791] Reference is now made to STC1 BINDING SITE. stanniocalcin 1 (STC1) is a target gene of GAM26, corresponding to GAM26-TARGET GENE of FIG. 26A. STC1 BINDING SITE is a binding site found in an untranslated region of STC1, corresponding to BINDING SITE of FIG. 26A. FIG. 26D illustrates the complementarity of the nucleotide sequence of STC1 BINDING SITE, designated SEQ ID:381482, to the nucleotide sequence of GAM26 RNA of FIG. 26A, designated SEQ ID:20604.

[1792] Yet a further function of GAM26 is therefore inhibition of stanniocalcin 1 (STC1), a gene which encodes a Protein that stimulates renal phosphate reabsorption, and could therefore prevent hypercalcemia. Accordingly, utilities of GAM26 include diagnosis and treatment of the abovementioned diseases and clinical conditions.

[1793] The function of STC1 has been established by previous studies. Stanniocalcin (STC) is a calcium-regulated hormone in bony fishes. The hormone was so named because it is synthesized by the corpuscles of Stannius, endocrine glands that are associated with the kidneys of all fishes with a bony skeleton. The primary function of STC in fishes is the prevention of hypercalcemia; Olsen et al. (1996) noted that a rise in serum calcium levels is the primary stimulus for secretion. Upon release into the circulation, STC lowers calcium transport by the gills, thereby reducing its rate of influx from the environment into the extracellular compartment. A second equally important action of STC is stimulation of phosphate reabsorption by renal proximal tubules. The consequence of this renal effect is increased levels of plasma phosphate, which combines with excess calcium and promotes its disposal into bone and scales. Wagner et al. (1995) found evidence of STC immunoreactivity in human kidney and serum, suggesting the existence of the hormone in mammals. Olsen et al. (1996) isolated a human cDNA clone encoding the mammalian homolog of STC. Human STC was found to be 247 amino acids long and to share 73% amino acid sequence similarity with fish STC. Polyclonal antibodies to recombinant human STC localized to a distinct cell type in the nephron tubule, suggesting kidney as a possible site of synthesis. Recombinant human STC inhibited the gill transport of calcium when administered to fish and stimulated renal phosphate reabsorption in the rat.

[1794] Full details of the abovementioned studies are described in the following publications, the disclosure of which are hereby incorporated by reference:

[1795] lsen, H. S.; Cepeda, M. A.; Zhang, Q.-Q.; Rosen, C. A.; Vozzolo, B. L.; Wagner, G. F.: Human stanniocalcin: a possible hormonal regulator of mineral metabolism. Proc. Nat. Acad. Sci. 93: 1792-1796, 1996. PubMed ID: 8700837 6. Wagner, G. F.; Guiraudon, C. C.; Milliken, C.; Copp, D. H.: Immunological and biological evidence for a stanniocalcin-like hormone in human kidney. Proc. Nat. Acad. Sci. 92: 1871-1875, 1995.

[1796] Further studies establishing the function and utilities of STC1 are found in John Hopkins OMIM database record ID 601185, and in references numbered 1456-1463 listed hereinbelow.

[1797] Referring now to STC1 BINDING SITE. stanniocalcin 1 (STC1) is a target gene of GAM26, corresponding to GAM26-TARGET GENE of FIG. 26A. STC1 BINDING SITE is a binding site found in an untranslated region of STC1, corresponding to BINDING SITE of FIG. 26A. FIG. 26D illustrates the complementarity of the nucleotide sequence of STC1 BINDING SITE, designated SEQ ID:381506, to the nucleotide sequence of GAM26 RNA of FIG. 26A, designated SEQ ID:20604.

[1798] Another function of GAM26 is therefore inhibition of stanniocalcin 1 (STC1), a gene which encodes a Protein that stimulates renal phosphate reabsorption, and could therefore prevent hypercalcemia. Accordingly, utilities of GAM26 include diagnosis and treatment of the abovementioned diseases and clinical conditions. The function and utilities of STC1 have been established by previous studies, as described hereinabove with reference to FIG. 26D.

[1799] Referring now to STC1 BINDING SITE. stanniocalcin 1 (STC1) is a target gene of GAM26, corresponding to GAM26-TARGET GENE of FIG. 26A. STC1 BINDING SITE is a binding site found in an untranslated region of STC1, corresponding to BINDING SITE of FIG. 26A. FIG. 26D illustrates the complementarity of the nucleotide sequence of STC1 BINDING SITE, designated SEQ ID:381507, to the nucleotide sequence of GAM26 RNA of FIG. 26A, designated SEQ ID:20604.

[1800] Yet another function of GAM26 is therefore inhibition of stanniocalcin 1 (STC1), a gene which encodes a Protein that stimulates renal phosphate reabsorption, and could therefore prevent hypercalcemia. Accordingly, utilities of GAM26 include diagnosis and treatment of the abovementioned diseases and clinical conditions. The function and utilities of STC1 have been established by previous studies, as described hereinabove with reference to FIG. 26D.

[1801] Referring now to STAR BINDING SITE. steroidogenic acute regulatory protein (STAR) is a target gene of GAM26, corresponding to GAM26-TARGET GENE of FIG. 26A. STAR BINDING SITE is a binding site found in an untranslated region of STAR, corresponding to BINDING SITE of FIG. 26A. FIG. 26D illustrates the complementarity of the nucleotide sequence of STAR BINDING SITE, designated SEQ ID:381508, to the nucleotide sequence of GAM26 RNA of FIG. 26A, designated SEQ ID:20604.

[1802] An additional function of GAM26 is therefore inhibition of steroidogenic acute regulatory protein (STAR), a gene which encodes a Protein that is associated with congenital lipoid adrenal hyperplasia (clah). Accordingly, utilities of GAM26 include diagnosis and treatment of the abovementioned diseases and clinical conditions. The function and utilities of STAR have been established by previous studies, as described hereinabove with reference to FIG. 26D.

[1803] Referring now to STC1 BINDING SITE. stanniocalcin 1 (STC1) is a target gene of GAM26, corresponding to GAM26-TARGET GENE of FIG. 26A. STC1 BINDING SITE is a binding site found in an untranslated region of STC1, corresponding to BINDING SITE of FIG. 26A. FIG. 26D illustrates the complementarity of the nucleotide sequence of STC1 BINDING SITE, designated SEQ ID:381508, to the nucleotide sequence of GAM26 RNA of FIG. 26A, designated SEQ ID:20604.

[1804] A further function of GAM26 is therefore inhibition of stanniocalcin 1 (STC1), a gene which encodes a Protein that stimulates renal phosphate reabsorption, and could therefore prevent hypercalcemia. Accordingly, utilities of GAM26 include diagnosis and treatment of the abovementioned diseases and clinical conditions. The function and utilities of STC1 have been established by previous studies, as described hereinabove with reference to FIG. 26D.

[1805] Reference is now made to SYK BINDING SITE. spleen tyrosine kinase (SYK) is a target gene of GAM26, corresponding to GAM26-TARGET GENE of FIG. 26A. SYK BINDING SITE is a binding site found in an untranslated region of SYK, corresponding to BINDING SITE of FIG. 26A. FIG. 26D illustrates the complementarity of the nucleotide sequence of SYK BINDING SITE, designated SEQ ID:384918, to the nucleotide sequence of GAM26 RNA of FIG. 26A, designated SEQ ID:20604.

[1806] Yet a further function of GAM26 is therefore inhibition of spleen tyrosine kinase (SYK), a gene which encodes a Protein that may participate in signaling pathways and play a role in lymphocyte activation. Accordingly, utilities of GAM26 include diagnosis and treatment of the abovementioned diseases and clinical conditions.

[1807] The function of SYK has been established by previous studies. The pig protein-tyrosine kinase SYK, with a relative molecular mass of 72,000, was first described as a protein predominantly expressed in the spleen and thymus (Zioncheck et al., 1988). The nucleotide and deduced amino acid sequence indicated that SYK is a member of the family of nonreceptor type kinases (Taniguchi et al., 1991). Muller et al. (1994) cloned the human homolog. They found an open reading frame of 1,890 bp encoding a protein of 630 amino acids, in comparison with the pig SYK of 628 amino acids. In the human protein, the N-terminal SH2 domain spans amino acids 10-102, the C-terminal SH2 domain spans amino acids 163-254, and the kinase domain includes amino acids 366-621. On the amino acid level, the overall similarity between human and pig SYK is 93%. The similarity was highest in the kinase domain.

[1808] Animal model experiments lend further support to the function of SYK. Colucci et al. (2002) noted that humans with mutations in ZAP70 have T-cell immunodeficiency, that mice lacking Zap70 have blocked T-cell development, and that mice lacking Syk have a failure of B-cell development. NK cells express both molecules, which associate with immunoreceptor tyrosine-based activation motifs (ITAMs). Using mice deficient in both Zap70 and Syk, Colucci et al. (2002) observed NK cell activity comparable to that in wildtype mice. The mutant cells expressed Nkg2d (602893) and were able to lyse targets with and without Nkg2d ligands in vitro and in vivo. However, wildtype cells, but not the double-deficient cells, responded to CD16 (146740) and Ly49d (see 604274) cross-linking with increased cytotoxicity, suggesting that these 2 ITAM-bearing receptors are unable to signal in the mutant cells. Inhibitors of PI3K (see 601232) or Src kinases blocked and, in combination, abrogated cytotoxic activity in the mutant cells, whereas inhibition of both kinases was required to reduce wildtype NK activity. Colucci et al. (2002) concluded that intracellular signaling in the adaptive immune system, i.e., in B and T cells, is fundamentally different from that in the NK cells of the innate immune system.

[1809] It is appreciated that the abovementioned animal model for SYK is acknowledged by those skilled in the art as a scientifically valid animal model, as can be further appreciated from the publications sited hereinbelow.

[1810] Full details of the abovementioned studies are described in the following publications, the disclosure of which are hereby incorporated by reference:

[1811] olucci, F.; Schweighoffer, E.; Tomasello, E.; Turner, M.; Ortaldo, J. R.; Vivier, E.; Tybulewicz, V. L. J.; Di Santo, J. P.: Natural cytotoxicity uncoupled from the Syk and ZAP-70 intracellular kinases. Nature Immun. 3: 288-294, 2002. PubMed ID: 11836527 6. Muller, B.; Cooper, L.; Terhorst, C.: Molecular cloning of the human homologue to the pig protein-tyrosine kinase syk. Immunogenetics 39: 359-362, 1994.

[1812] Further studies establishing the function and utilities of SYK are found in John Hopkins OMIM database record ID 600085, and in references numbered 1464-1472 listed hereinbelow.

[1813] Reference is now made to SYNGR2 BINDING SITE. synaptogyrin 2 (SYNGR2) is a target gene of GAM26, corresponding to GAM26-TARGET GENE of FIG. 26A. SYNGR2 BINDING SITE is a binding site found in an untranslated region of SYNGR2, corresponding to BINDING SITE of FIG. 26A. FIG. 26D illustrates the complementarity of the nucleotide sequence of SYNGR2 BINDING SITE, designated SEQ ID:385461, to the nucleotide sequence of GAM26 RNA of FIG. 26A, designated SEQ ID:20604.

[1814] Another function of GAM26 is therefore inhibition of synaptogyrin 2 (SYNGR2), a gene which encodes a Protein that may play a role in regulating membrane traffic in non-neuronal cells. Accordingly, utilities of GAM26 include diagnosis and treatment of the abovementioned diseases and clinical conditions.

[1815] The function of SYNGR2 has been established by previous studies. Synaptic vesicles represent specialized secretory organelles that store neurotransmitters in nerve terminals, and release them by fusing with the presynaptic plasma membrane during exocytosis. Synaptogyrin (SYNGR1; 603925) and synaptophysins I (see 313475) and II (synaptoporin) contain 4 transmembrane regions with cytoplasmic) C and N termini, and are among the most abundant synaptic vesicle proteins. Janz and Sudhof (1998) identified a rat gene encoding cellugyrin, a protein related to synaptogyrin. Western blot analysis revealed that cellugyrin and synaptogyrin are expressed in mirror-image patterns in rat tissues: cellugyrin is ubiquitous with the lowest levels in brain, while synaptogyrin is detectable only in the brain. Subcellular fractionation of rat brain cells indicated that both synaptogyrin and cellugyrin are associated with microsomes; however, only synaptogyrin is found in synaptic vesicles. The authors suggested that synaptogyrin is a specialized version of the ubiquitous cellugyrin, supporting the concept that synaptic vesicles are a simplified and specialized form of a generic trafficking organelle. Independently, Kedra et al. (1998) identified cDNAs encoding the mouse and human homologs of cellugyrin, which they called synaptogyrin-2 (SYNGR2). Like SYNGR1, the predicted 224-amino acid human SYNGR2 protein contains 4 transmembrane regions. Northern blot analysis revealed that the 1.6-kb SYNGR2 mRNA was expressed at high levels in all tissues tested except brain.

[1816] Full details of the abovementioned studies are described in the following publications, the disclosure of which are hereby incorporated by reference:

[1817] anz, R.; Sudhof, T. C.: Cellugyrin, a novel ubiquitous form of synaptogyrin that is phosphorylated by pp60(c-src). J. Biol. Chem. 273: 2851-2857, 1998. PubMed ID: 9446595 2. Kedra, D.; Pan, H.-Q.; Seroussi, E.; Fransson, I.; Guilbaud, C.; Collins, J. E.; Dunham, I.; Blennow, E.; Roe, B. A.; Piehl, F.; Dumanski, J. P.: Characterization of the human synaptogyrin gene family. Hum. Genet. 103: 131-141, 1998.

[1818] Further studies establishing the function and utilities of SYNGR2 are found in John Hopkins OMIM database record ID 603926, and in references numbered 1473-1474 listed hereinbelow.

[1819] Referring now to SYNGR2 BINDING SITE. synaptogyrin 2 (SYNGR2) is a target gene of GAM26, corresponding to GAM26-TARGET GENE of FIG. 26A. SYNGR2 BINDING SITE is a binding site found in an untranslated region of SYNGR2, corresponding to BINDING SITE of FIG. 26A. FIG. 26D illustrates the complementarity of the nucleotide sequence of SYNGR2 BINDING SITE, designated SEQ ID:385484, to the nucleotide sequence of GAM26 RNA of FIG. 26A, designated SEQ ID:20604.

[1820] Yet another function of GAM26 is therefore inhibition of synaptogyrin 2 (SYNGR2), a gene which encodes a Protein that may play a role in regulating membrane traffic in non-neuronal cells. Accordingly, utilities of GAM26 include diagnosis and treatment of the abovementioned diseases and clinical conditions. The function and utilities of SYNGR2 have been established by previous studies, as described hereinabove with reference to FIG. 26D.

[1821] Referring now to SYNGR2 BINDING SITE. synaptogyrin 2 (SYNGR2) is a target gene of GAM26, corresponding to GAM26-TARGET GENE of FIG. 26A. SYNGR2 BINDING SITE is a binding site found in an untranslated region of SYNGR2, corresponding to BINDING SITE of FIG. 26A. FIG. 26D illustrates the complementarity of the nucleotide sequence of SYNGR2 BINDING SITE, designated SEQ ID:385485, to the nucleotide sequence of GAM26 RNA of FIG. 26A, designated SEQ ID:20604.

[1822] An additional function of GAM26 is therefore inhibition of synaptogyrin 2 (SYNGR2), a gene which encodes a Protein that may play a role in regulating membrane traffic in non-neuronal cells. Accordingly, utilities of GAM26 include diagnosis and treatment of the abovementioned diseases and clinical conditions. The function and utilities of SYNGR2 have been established by previous studies, as described hereinabove with reference to FIG. 26D.

[1823] Reference is now made to TBL3 BINDING SITE. transducin (beta)-like 3 (TBL3) is a target gene of GAM26, corresponding to GAM26-TARGET GENE of FIG. 26A. TBL3 BINDING SITE is a binding site found in an untranslated region of TBL3, corresponding to BINDING SITE of FIG. 26A. FIG. 26D illustrates the complementarity of the nucleotide sequence of TBL3 BINDING SITE, designated SEQ ID:388909, to the nucleotide sequence of GAM26 RNA of FIG. 26A, designated SEQ ID:20604.

[1824] A further function of GAM26 is therefore inhibition of transducin (beta)-like 3 (TBL3), a gene which encodes a Protein that belongs to members of the beta-transducin superfamily. Accordingly, utilities of GAM26 include diagnosis and treatment of the abovementioned diseases and clinical conditions.

[1825] The function of TBL3 has been established by previous studies. Weinstat-Saslow et al. (1993) isolated cDNAs that map to chromosome 16p in the region of the autosomal dominant polycystic kidney disease locus (601313). Sequence analysis of one of these cDNAs, TBL3, which was designated SAZD by the authors, revealed a similarity to members of the beta-transducin superfamily. The full-length TBL3 cDNA encodes a 519-amino acid protein with 7 WD40 (beta-transducin) motifs, each of which contains 40 to 45 amino acids with an invariant tryptophan residue. TBL3 shares 18 to 25% sequence identity with G protein beta subunits, with homology occurring predominantly in the conserved repeated WD40 motifs. By somatic cell and radiation hybrid analyses, Weinstat-Saslow et al. (1993) assigned the TBL3 gene to chromosome 16p13.3.

[1826] Full details of the abovementioned studies are described in the following publications, the disclosure of which are hereby incorporated by reference:

[1827] einstat-Saslow, D. L.; Germino, G. G.; Somlo, S.; Reeders, S. T.: A transducin-like gene maps to the autosomal dominant polycystic kidney disease gene region. Genomics 18: 709-711, 1993.

[1828] Further studies establishing the function and utilities of TBL3 are found in John Hopkins OMIM database record ID 605915, and in references numbered 1475 listed hereinbelow.

[1829] Reference is now made to TCF4 BINDING SITE. transcription factor 4 (TCF4) is a target gene of GAM26, corresponding to GAM26-TARGET GENE of FIG. 26A. TCF4 BINDING SITE is a binding site found in an untranslated region of TCF4, corresponding to BINDING SITE of FIG. 26A. FIG. 26D illustrates the complementarity of the nucleotide sequence of TCF4 BINDING SITE, designated SEQ ID:390926, to the nucleotide sequence of GAM26 RNA of FIG. 26A, designated SEQ ID:20604.

[1830] Yet a further function of GAM26 is therefore inhibition of transcription factor 4 (TCF4), a gene which encodes a Protein that is a transcriptional activator; interacts with ITF1 (TCF3); and contains basic helix-loop-helix domain. Accordingly, utilities of GAM26 include diagnosis and treatment of the abovementioned diseases and clinical conditions.

[1831] The function of TCF4 has been established by previous studies. The high mobility group (HMG) box is a DNA-binding domain. TCF7 (189908), also called TCF1, and LEF1 (153245), also called TCF1-alpha, are human lymphoid transcription factors that contain a virtually identical HMG box. By PCR of human genomic DNA using degenerate oligonucleotides based on the HMG boxes of TCF7 and LEF1, Castrop et al. (1992) identified the TCF7L1 (604652) and TCF7L2 genes, which they called TCF3 and TCF4, respectively. TCF7L1 and TCF7L2 were not expressed in cells of the lymphoid lineage. The deduced amino acid sequences of the HMG boxes of TCF7L1, TCF7L2, and TCF7 show striking homology. The authors suggested the existence of a subfamily of TCF7-like HMG box-containing transcription factors.

[1832] Animal model experiments lend further support to the function of TCF4. To study the physiologic role of Tcf4 (which is encoded by the Tcf712 gene), Korinek et al. (1998) disrupted Tcf712 by homologous recombination. The homozygous null mice died shortly after birth. A single histopathologic abnormality was observed. An apparently normal transition of intestinal endoderm into epithelium occurred at approximately embryonic day (E) 14.5. However, no proliferative compartments were maintained in the prospective crypt regions between the villi. As a consequence, the neonatal epithelium was composed entirely of differentiated, nondividing villus cells. Korinek et al. (1998) concluded that the genetic program controlled by Tcf712 maintains the crypt stem cells of the small intestine. The constitutive activity of Tcf4 in APC-deficient epithelial cells may contribute to their malignant transformation by maintaining stem cell characteristics.

[1833] It is appreciated that the abovementioned animal model for TCF4 is acknowledged by those skilled in the art as a scientifically valid animal model, as can be further appreciated from the publications sited hereinbelow.

[1834] Full details of the abovementioned studies are described in the following publications, the disclosure of which are hereby incorporated by reference:

[1835] astrop, J.; van Norren, K.; Clevers, H.: A gene family of HMG-box transcription factors with homology to TCF-1. Nucleic Acids Res. 20: 611 only, 1992. PubMed ID: 1741298 5. Korinek, V.; Barker, N.; Moerer, P.; van Donselaar, E.; Huls, G.; Peters, P. J.; Clevers, H.: Depletion of epithelial stem-cell compartments in the small intestine of mice lacking Tcf-4. Nature Genet. 19: 379-383, 1998.

[1836] Further studies establishing the function and utilities of TCF4 are found in John Hopkins OMIM database record ID 602228, and in references numbered 1477-1478, 1478, 1480, 1483-1484, 1484, 1486-1487, 1487-1488 and 1488 listed hereinbelow.

[1837] Referring now to TCF4 BINDING SITE. transcription factor 4 (TCF4) is a target gene of GAM26, corresponding to GAM26-TARGET GENE of FIG. 26A. TCF4 BINDING SITE is a binding site found in an untranslated region of TCF4, corresponding to BINDING SITE of FIG. 26A. FIG. 26D illustrates the complementarity of the nucleotide sequence of TCF4 BINDING SITE, designated SEQ ID:390929, to the nucleotide sequence of GAM26 RNA of FIG. 26A, designated SEQ ID:20604.

[1838] Another function of GAM26 is therefore inhibition of transcription factor 4 (TCF4), a gene which encodes a Protein that is a transcriptional activator; interacts with ITF1 (TCF3); and contains basic helix-loop-helix domain. Accordingly, utilities of GAM26 include diagnosis and treatment of the abovementioned diseases and clinical conditions. The function and utilities of TCF4 have been established by previous studies, as described hereinabove with reference to FIG. 26D.

[1839] Referring now to TCF4 BINDING SITE. transcription factor 4 (TCF4) is a target gene of GAM26, corresponding to GAM26-TARGET GENE of FIG. 26A. TCF4 BINDING SITE is a binding site found in an untranslated region of TCF4, corresponding to BINDING SITE of FIG. 26A. FIG. 26D illustrates the complementarity of the nucleotide sequence of TCF4 BINDING SITE, designated SEQ ID:390953, to the nucleotide sequence of GAM26 RNA of FIG. 26A, designated SEQ ID:20604.

[1840] Yet another function of GAM26 is therefore inhibition of transcription factor 4 (TCF4), a gene which encodes a Protein that is a transcriptional activator; interacts with ITF1 (TCF3); and contains basic helix-loop-helix domain. Accordingly, utilities of GAM26 include diagnosis and treatment of the abovementioned diseases and clinical conditions. The function and utilities of TCF4 have been established by previous studies, as described hereinabove with reference to FIG. 26D.

[1841] Referring now to TCF4 BINDING SITE. transcription factor 4 (TCF4) is a target gene of GAM26, corresponding to GAM26-TARGET GENE of FIG. 26A. TCF4 BINDING SITE is a binding site found in an untranslated region of TCF4, corresponding to BINDING SITE of FIG. 26A. FIG. 26D illustrates the complementarity of the nucleotide sequence of TCF4 BINDING SITE, designated SEQ ID:390956, to the nucleotide sequence of GAM26 RNA of FIG. 26A, designated SEQ ID:20604.

[1842] An additional function of GAM26 is therefore inhibition of transcription factor 4 (TCF4), a gene which encodes a Protein that is a transcriptional activator; interacts with ITF1 (TCF3); and contains basic helix-loop-helix domain. Accordingly, utilities of GAM26 include diagnosis and treatment of the abovementioned diseases and clinical conditions. The function and utilities of TCF4 have been established by previous studies, as described hereinabove with reference to FIG. 26D.

[1843] Reference is now made to THOP1 BINDING SITE. thimet oligopeptidase 1 (THOP1) is a target gene of GAM26, corresponding to GAM26-TARGET GENE of FIG. 26A. THOP1 BINDING SITE is a binding site found in an untranslated region of THOP1, corresponding to BINDING SITE of FIG. 26A. FIG. 26D illustrates the complementarity of the nucleotide sequence of THOP1 BINDING SITE, designated SEQ ID:396604, to the nucleotide sequence of GAM26 RNA of FIG. 26A, designated SEQ ID:20604.

[1844] A further function of GAM26 is therefore inhibition of thimet oligopeptidase 1 (THOP1), a gene which encodes a Enzyme that involves in the metabolism of neuropeptide and in cytoplasmic peptide degradation. Accordingly, utilities of GAM26 include diagnosis and treatment of the abovementioned diseases and clinical conditions.

[1845] The function of THOP1 has been established by previous studies. Papastoitsis et al. (1994) purified and characterized the metalloprotease from human Alzheimer disease brain that is able to cleave a synthetic peptide encompassing the amino-terminus of amyloid beta peptide and generate amyloidogenic fragments from recombinant human APP. Sequence comparison revealed that this enzyme has high homology to the previously described rat metalloendopeptidase 24.15 (EC 3.4.24.15). The beta-secretase-like activity of the human enzyme in vitro in combination with its localization in neurons and its co-localization with APP in transport vesicles purified from rabbit optic nerve rendered this enzyme an interesting candidate for amyloidogenic processing of APP. Using a cDNA encoding the rat enzyme, Meckelein et al. (1996) assigned the human gene, symbolized THOP1, to chromosome 19 by hybridization to DNA from human/rodent somatic cell hybrids. By fluorescence in situ hybridization, they localized the gene to 19q13.3. However, after localizing the THOP1 gene to the high-resolution cosmid contig map of human chromosome 19, Torres et al. (1998) found that the FISH mapping to 19q13.3 by Meckelein et al. (1996) was incorrect. Results of the hybridization and FISH mapping of positive clones indicated localization of THOP1 to 19p13.3, thus excluding THOP1 as a candidate gene for AD2.

[1846] Full details of the abovementioned studies are described in the following publications, the disclosure of which are hereby incorporated by reference:

[1847] apastoitsis, G.; Siman, R.; Scott, R.; Abraham, C. R.: Identification of a metalloprotease from Alzheimer's disease brain able to degrade the beta-amyloid precursor protein and generate amyloidogenic fragments. Biochemistry 33: 192-199, 1994. PubMed ID: 8286339 1. Meckelein, B.; Rohan de Silva, H. A.; Roses, A. D.; Rao, P. N.; Pettenati, M. J.; Xu, P.-T.; Hodge, R.; Glucksman, M. J.; Abraham, C. R.: Human endopeptidase (THOP1) is localized on chromosome 19 within the linkage region for the late-onset Alzheimer disease AD2 locus. Genomics 31: 246-249, 1996.

[1848] Further studies establishing the function and utilities of THOP1 are found in John Hopkins OMIM database record ID 601117, and in references numbered 1489-1491 listed hereinbelow.

[1849] Reference is now made to TIF1 BINDING SITE. transcriptional intermediary factor 1 (TIF1) is a target gene of GAM26, corresponding to GAM26-TARGET GENE of FIG. 26A. TIF1 BINDING SITE is a binding site found in an untranslated region of TIF1, corresponding to BINDING SITE of FIG. 26A. FIG. 26D illustrates the complementarity of the nucleotide sequence of TIF1 BINDING SITE, designated SEQ ID:397065, to the nucleotide sequence of GAM26 RNA of FIG. 26A, designated SEQ ID:20604.

[1850] Yet a further function of GAM26 is therefore inhibition of transcriptional intermediary factor 1 (TIF1), a gene which encodes a transcripition factor that mediates the activation function (AF-2) of nuclear estrogen receptor. Accordingly, utilities of GAM26 include diagnosis and treatment of the abovementioned diseases and clinical conditions.

[1851] The function of TIF1 has been established by previous studies. Hormonal regulation of gene activity is mediated by nuclear receptors acting as ligand-activated transcription factors. The activity of the ligand-dependent activation function, or AF2, of the receptors requires intermediary factors that interact with the AF2-activating domain, a C-terminal region that is highly conserved in the nuclear receptor family. Thenot et al. (1997) isolated human breast cancer cell cDNAs that encode transcription intermediary factor-1 (TIF1), a protein that is able to bind to the AF2-activating domain of the estrogen receptor (ESR; e.g., 133430). The deduced 1,013-amino acid TIF1 protein, which is more than 92% conserved with mouse Tif1, contains several domains: a RING finger, B-box fingers, a coiled-coil domain, a PHD homeodomain finger, and a bromodomain. A 26-amino acid region of TIF1 is sufficient for its hormone-dependent binding to the ESR. Thenot et al. (1997) demonstrated that the AF2-activating domain of ESR is required but not sufficient for the binding of TIF1, that TIF1 association with DNA-bound ESR requires the presence of estradiol, and that TIF1 interacts selectively with different nuclear receptors. The authors identified a cDNA variant that encodes a TIF1 isoform containing a 34-amino acid insertion. Northern blot analysis detected a major 4.5-kb transcript in MCF7 breast cancer cells. Fusion of PML (102578) and TIF1A to RARA (180240) and BRAF (164757), respectively, results in the production of PML-RAR-alpha and TIF1-alpha-B-RAF (T18) oncoproteins. Zhong et al. (1999) showed that PML, TIF1-alpha, and RXR-alpha (180245)/RAR-alpha function together in a retinoic acid-dependent transcription complex. Zhong et al. (1999) found that PML acts as a ligand-dependent coactivator of RXR-alpha/RARA-alpha. PML interacts with TIF1-alpha and CREB-binding protein (CBP; 600140). In PML −/− cells, the retinoic acid-dependent induction of genes such as RARB2 and the ability of TIF1-alpha and CBP to act as transcriptional coactivators on retinoic acid are impaired. Zhong et al. (1999) showed that both PML and TIF1-alpha are growth suppressors required for the growth-inhibitory activity of retinoic acid. T18, similar to PML-RAR-alpha, disrupts the retinoic acid-dependent activity of this complex in a dominant-negative manner, resulting in a growth advantage. PML-RAR-alpha was the first example of an oncoprotein generated by the fusion of 2 molecules participating in the same pathway, specifically the fusion of a transcription factor to one of its own cofactors. Since the PML and RAR-alpha pathways converge at the transcriptional level, there is no need for a double-dominant-negative product to explain the pathogenesis of acute promyelocytic leukemia, or APL. Beckstead et al. (2001) found that the Drosophila ‘bonus’ (bon) gene encodes a homolog of the vertebrate TIF1 transcriptional cofactors. Bon is required for male viability, molting, and numerous events in metamorphosis, including leg elongation, bristle development, and pigmentation. Most of these processes are associated with genes that are implicated in the ecdysone pathway, a nuclear hormone receptor pathway required throughout Drosophila development. Bon is associated with sites on the polytene chromosomes and can interact with numerous Drosophila nuclear receptor proteins. In vivo, bon behaves as a transcriptional inhibitor.

[1852] Full details of the abovementioned studies are described in the following publications, the disclosure of which are hereby incorporated by reference:

[1853] hong, S.; Delva, L.; Rachez, C.; Cenciarelli, C.; Gandini, D.; Zhang, H.; Kalantry, S.; Freedman, L. P.; Pandolfi, P. P.: A RA-dependent, tumour-growth suppressive transcription complex is the target of the PML-RAR-alpha and T18 oncoproteins. Nature Genet. 23: 287-295, 1999. PubMed ID: 10610177 1. Beckstead, R.; Ortiz, J. A.; Sanchez, C.; Prokopenko, S. N.; Chambon, P.; Losson, R.; Bellen, H. J.: Bonus, a Drosophila homolog of TIF1 proteins, interacts with nuclear receptors and can inhibit beta-FTZ-F1-dependent transcription. Molec. Cell 7: 753-765, 2001.

[1854] Further studies establishing the function and utilities of TIF1 are found in John Hopkins OMIM database record ID 603406, and in references numbered 1492-1497 listed hereinbelow.

[1855] Reference is now made to TIMP3 BINDING SITE. tissue inhibitor of metalloproteinase 3 (Sorsby fundus dystrophy, pseu (TIMP3) is a target gene of GAM26, corresponding to GAM26-TARGET GENE of FIG. 26A. TIMP3 BINDING SITE is a binding site found in an untranslated region of TIMP3, corresponding to BINDING SITE of FIG. 26A. FIG. 26D illustrates the complementarity of the nucleotide sequence of TIMP3 BINDING SITE, designated SEQ ID:397666, to the nucleotide sequence of GAM26 RNA of FIG. 26A, designated SEQ ID:20604.

[1856] Another function of GAM26 is therefore inhibition of tissue inhibitor of metalloproteinase 3 (Sorsby fundus dystrophy, pseu (TIMP3), a gene which encodes a Protein that is associated with Sorsby's fundus dystrophy. Accordingly, utilities of GAM26 include diagnosis and treatment of the abovementioned diseases and clinical conditions.

[1857] The function of TIMP3 has been established by previous studies. Osman et al. (2002) showed that mature dendritic cells (DCs) produce more MMP9 (120361) than do immature DCs, facilitating their hydroxaminic acid-inhibitable migration through gel in vitro and, presumably, through the extracellular matrix to monitor the antigenic environment in vivo. RT-PCR analysis indicated that the enhanced expression of MMP9 is correlated with a downregulation of TIMP1 and, particularly, TIMP2, while expression of TIMP3 is upregulated. The authors concluded that the balance of MMP and TIMP determines the net migratory capacity of DCs. They proposed that TIMP3 may be a marker for mature DCs. Langton et al. (1998) found that wildtype TIMP3 is localized entirely to the extracellular matrix (ECM) in both its glycosylated (27 kD) and unglycosylated (24 kD) forms. A COOH-terminally truncated TIMP3 molecule was found to be a non-ECM-bound matrix metalloproteinase (MMP) inhibitor, whereas a chimeric TIMP molecule, consisting of the NH2-terminal domain of TIMP2 fused to the COOH-terminal domain of TIMP3, displayed ECM binding, albeit with a lower affinity than the wildtype TIMP3 molecule. Thus, as in TIMP1 and TIMP2, the NH2-terminal domain is responsible for MMP inhibition, whereas the COOH-terminal domain is most important in mediating the specific functions of the molecule. A mutant TIMP3 in which serine-181 was changed to cysteine (188826.0001), found in Sorsby fundus dystrophy, gave rise to an additional 48-kD species (possibly a TIMP3 dimer) that retained its ability to inhibit MMPs and localize to the ECM when expressed in COS-7 cells. These data favored the hypothesis that the TIMP3 mutation seen in Sorsby fundus dystrophy contributes to disease progression by accumulation of mutant protein rather than by loss of functional TIMP3. Weber et al. (1994), who had mapped the gene for Sorsby fundus dystrophy (SFD; 1136900) to 22q13-qter, examined the TIMP3 gene as a possible site of causative mutations in SFD on the basis of its chromosomal location and its pivotal role in extracellular matrix remodeling. They identified point mutations in TIMP3 in affected members of 2 SFD pedigrees. These mutations were predicted to disrupt the tertiary structure and thus the functional properties of the mature protein.

[1858] Full details of the abovementioned studies are described in the following publications, the disclosure of which are hereby incorporated by reference:

[1859] sman, M.; Tortorella, M.; Londei, M.; Quaratino, S.: Expression of matrix metalloproteinases and tissue inhibitors of metalloproteinases define the migratory characteristics of human monocyte-derived dendritic cells. Immunology 105: 73-82, 2002. PubMed ID: 11849317 11. Weber, B. H. F.; Vogt, G.; Pruett, R. C.; Stohr, H.; Felbor, U.: Mutations in the tissue inhibitor metalloproteinases-3 (TIMP3) in patients with Sorsby's fundus dystrophy. Nature Genet. 8: 352-356, 1994.

[1860] Further studies establishing the function and utilities of TIMP3 are found in John Hopkins OMIM database record ID 188826, and in references numbered 1498-1510 listed hereinbelow.

[1861] Referring now to TIMP3 BINDING SITE. tissue inhibitor of metalloproteinase 3 (Sorsby fundus dystrophy, pseu (TIMP3) is a target gene of GAM26, corresponding to GAM26-TARGET GENE of FIG. 26A. TIMP3 BINDING SITE is a binding site found in an untranslated region of TIMP3, corresponding to BINDING SITE of FIG. 26A. FIG. 26D illustrates the complementarity of the nucleotide sequence of TIMP3 BINDING SITE, designated SEQ ID:397672, to the nucleotide sequence of GAM26 RNA of FIG. 26A, designated SEQ ID:20604.

[1862] Yet another function of GAM26 is therefore inhibition of tissue inhibitor of metalloproteinase 3 (Sorsby fundus dystrophy, pseu (TIMP3), a gene which encodes a Protein that is associated with Sorsby's fundus dystrophy. Accordingly, utilities of GAM26 include diagnosis and treatment of the abovementioned diseases and clinical conditions. The function and utilities of TIMP3 have been established by previous studies, as described hereinabove with reference to FIG. 26D.

[1863] Reference is now made to TMPO BINDING SITE. thymopoietin (TMPO) is a target gene of GAM26, corresponding to GAM26-TARGET GENE of FIG. 26A. TMPO BINDING SITE is a binding site found in an untranslated region of TMPO, corresponding to BINDING SITE of FIG. 26A. FIG. 26D illustrates the complementarity of the nucleotide sequence of TMPO BINDING SITE, designated SEQ ID:400315, to the nucleotide sequence of GAM26 RNA of FIG. 26A, designated SEQ ID:20604.

[1864] An additional function of GAM26 is therefore inhibition of thymopoietin (TMPO), a gene which encodes a Protein that plays important roles in T-cell development and function. Accordingly, utilities of GAM26 include diagnosis and treatment of the abovementioned diseases and clinical conditions.

[1865] The function of TMPO has been established by previous studies. A single TMPO gene encodes 3 thymopoictins: alpha (75 kD), beta (51 kD), and gamma (39 kD). TMPO-alpha is present diffusely throughout the nucleus, whereas TMPOs beta and gamma are localized to the nuclear membrane. Harris et al. (1995) cloned the TMPO gene. The 8 exons of the gene are spread over approximately 35 kb. The 3 isoforms are produced by alternative mRNA splicing. Exon 4, which is spliced into TMPO-alpha mRNA, contains sequences that encode a putative basic nuclear localization motif Exon 8, which is spliced into TMPO-beta and TMPO-gamma mRNAs, encodes a hydrophobic putative membrane-spanning domain that is thought to target these 2 gene products to the nuclear membrane. Harris et al. (1995) pointed out that TMPO-beta appears to be the human homolog of the rat protein LAP2 (lamina-associated polypeptide 2), which is thought to play an important role in the regulation of nuclear architecture by binding lamin B1 and chromosomes, in a manner regulated by phosphorylation during mitosis.

[1866] Full details of the abovementioned studies are described in the following publications, the disclosure of which are hereby incorporated by reference:

[1867] udhya, T.; Schlesinger, D. H.; Goldstein, G.: Isolation and complete amino acid sequence of human thymopoietin and splenin. Proc. Nat. Acad. Sci. 84: 3545-3549, 1987. PubMed ID: 3473468 3. Harris, C. A.; Andryuk, P. J.; Cline, S. W.; Mathew, S.; Siekierka, J. J.; Goldstein, G.: Structure and mapping of the human thymopoietin (TMPO) gene and relationship of human TMPO beta to rat lamin-associated polypeptide 2. Genomics 28: 198-205, 1995.

[1868] Further studies establishing the function and utilities of TMPO are found in John Hopkins OMIM database record ID 188380, and in references numbered 1511-1513 listed hereinbelow.

[1869] Reference is now made to U2AF1 BINDING SITE. U2(RNU2) small nuclear RNA auxiliary factor 1 (non-standard symbol) (U2AF1) is a target gene of GAM26, corresponding to GAM26-TARGET GENE of FIG. 26A. U2AF1 BINDING SITE is a binding site found in an untranslated region of U2AF1, corresponding to BINDING SITE of FIG. 26A. FIG. 26D illustrates the complementarity of the nucleotide sequence of U2AF1 BINDING SITE, designated SEQ ID:411863, to the nucleotide sequence of GAM26 RNA of FIG. 26A, designated SEQ ID:20604.

[1870] A further function of GAM26 is therefore inhibition of U2(RNU2) small nuclear RNA auxiliary factor 1 (non-standard symbol) (U2AF1), a gene which encodes a Protein that plays a critical role in both splicing constitutive and enhancer-dependent splicing. Accordingly, utilities of GAM26 include diagnosis and treatment of the abovementioned diseases and clinical conditions.

[1871] The function of U2AF1 has been established by previous studies. In vitro experiments demonstrate that pre-mRNA splicing begins with the assembly of a multicomponent complex on the pre-mRNA. This complex, the spliceosome, contains 2 types of factors: small nuclear ribonucleoprotein particles (snRNPs) and proteins. Binding of U2 snRNP (180690) to the pre-mRNA branch site requires, in addition to U2 snRNP itself, U1 snRNP (180680) and at least 3 protein factors: SF1, SF3, and U2 snRNP auxiliary factor (U2AF). Purified HeLa cell U2AF comprises 2 polypeptides of 65 (U2AF65; 191318) and 35 kD. U2AF35 is evolutionarily conserved and copurifies with U2AF65. Zhang et al. (1992) isolated a cDNA encoding U2AF35. They showed directly the interaction between the 65-kD and 35-kD proteins. With anti-peptide antibodies, they showed that the proteins have the same intranuclear location in coiled bodies, subnuclear organelles first identified by light microscopy in 1903. Lalioti et al. (1996) cloned portions of the UAF35 gene, or U2AF1, by exon trapping. The cDNA was then hybridized to a cosmid which maps to 21q22.3 near the cystathionine beta-synthase gene (236200). The map position was confirmed by fluorescence in situ hybridization.

[1872] Full details of the abovementioned studies are described in the following publications, the disclosure of which are hereby incorporated by reference:

[1873] Zhang, M.; Zamore, P. D.; Carmo-Fonseca, M.; Lamond, A. I.; Green, M. R.: Cloning and intracellular localization of the U2 small nuclear ribonucleoprotein auxiliary factor small subunit. Proc. Nat. Acad. Sci. 89: 8769-8773, 1992. PubMed ID: 1388271. Lalioti, M. D.; Gos, A.; Green, M. R.; Rossier, C.; Morris, M. A.; Antonarakis, S. E.: The gene for human U2 snRNP auxiliary factor small 35-kDa subunit (U2AF1) maps to the progressive myoclonus epilepsy (EPM1) critical region on chromosome 21q22.3. Genomics 33: 298-300, 1996.

[1874] Further studies establishing the function and utilities of U2AF1 are found in John Hopkins OMIM database record ID 191317, and in references numbered 1514-1517 listed hereinbelow.

[1875] Referring now to UBE2B BINDING SITE. ubiquitin-conjugating enzyme E2B (RAD6 homolog) (UBE2B) is a target gene of GAM26, corresponding to GAM26-TARGET GENE of FIG. 26A. UBE2B BINDING SITE is a binding site found in an untranslated region of UBE2B, corresponding to BINDING SITE of FIG. 26A. FIG. 26D illustrates the complementarity of the nucleotide sequence of UBE2B BINDING SITE, designated SEQ ID:412149, to the nucleotide sequence of GAM26 RNA of FIG. 26A, designated SEQ ID:20604.

[1876] Yet a further function of GAM26 is therefore inhibition of ubiquitin-conjugating enzyme E2B (RAD6 homolog) (UBE2B), a gene which encodes a Enzyme that catalyzes the covalent attachment of ubiquitin to other proteins and is required for postreplication repair of uv-damaged dna. Accordingly, utilities of GAM26 include diagnosis and treatment of the abovementioned diseases and clinical conditions. The function and utilities of UBE2B have been established by previous studies, as described hereinabove with reference to FIG. 26D.

[1877] Referring now to MLLT1 BINDING SITE. myeloid/lymphoid or mixed-lineage leukemia (trithorax (Drosophila) hom (MLLT1) is a target gene of GAM26, corresponding to GAM26-TARGET GENE of FIG. 26A. MLLT1 BINDING SITE is a binding site found in an untranslated region of MLLT1, corresponding to BINDING SITE of FIG. 26A. FIG. 26D illustrates the complementarity of the nucleotide sequence of MLLT1 BINDING SITE, designated SEQ ID:412156, to the nucleotide sequence of GAM26 RNA of FIG. 26A, designated SEQ ID:20604.

[1878] Another function of GAM26 is therefore inhibition of myeloid/lymphoid or mixed-lineage leukemia (trithorax (Drosophila) hom (MLLT1), a gene which encodes a Protein that is associated with acute leukemias. Accordingly, utilities of GAM26 include diagnosis and treatment of the abovementioned diseases and clinical conditions. The function and utilities of MLLT1 have been established by previous studies, as described hereinabove with reference to FIG. 26D.

[1879] Referring now to UBE2B BINDING SITE. ubiquitin-conjugating enzyme E2B (RAD6 homolog) (UBE2B) is a target gene of GAM26, corresponding to GAM26-TARGET GENE of FIG. 26A. UBE2B BINDING SITE is a binding site found in an untranslated region of UBE2B, corresponding to BINDING SITE of FIG. 26A. FIG. 26D illustrates the complementarity of the nucleotide sequence of UBE2B BINDING SITE, designated SEQ ID:412156, to the nucleotide sequence of GAM26 RNA of FIG. 26A, designated SEQ ID:20604.

[1880] Yet another function of GAM26 is therefore inhibition of ubiquitin-conjugating enzyme E2B (RAD6 homolog) (UBE2B), a gene which encodes a Enzyme that catalyzes the covalent attachment of ubiquitin to other proteins and is required for postreplication repair of uv-damaged dna. Accordingly, utilities of GAM26 include diagnosis and treatment of the abovementioned diseases and clinical conditions. The function and utilities of UBE2B have been established by previous studies, as described hereinabove with reference to FIG. 26D.

[1881] Referring now to UBE2B BINDING SITE. ubiquitin-conjugating enzyme E2B (RAD6 homolog) (UBE2B) is a target gene of GAM26, corresponding to GAM26-TARGET GENE of FIG. 26A. UBE2B BINDING SITE is a binding site found in an untranslated region of UBE2B, corresponding to BINDING SITE of FIG. 26A. FIG. 26D illustrates the complementarity of the nucleotide sequence of UBE2B BINDING SITE, designated SEQ ID:412157, to the nucleotide sequence of GAM26 RNA of FIG. 26A, designated SEQ ID:20604.

[1882] An additional function of GAM26 is therefore inhibition of ubiquitin-conjugating enzyme E2B (RAD6 homolog) (UBE2B), a gene which encodes a Enzyme that catalyzes the covalent attachment of ubiquitin to other proteins and is required for postreplication repair of uv-damaged dna. Accordingly, utilities of GAM26 include diagnosis and treatment of the abovementioned diseases and clinical conditions. The function and utilities of UBE2B have been established by previous studies, as described hereinabove with reference to FIG. 26D.

[1883] Reference is now made to UFD1L BINDING SITE. ubiquitin fusion degradation 1-like (UFD1L) is a target gene of GAM26, corresponding to GAM26-TARGET GENE of FIG. 26A. UFD1L BINDING SITE is a binding site found in an untranslated region of UFD1L, corresponding to BINDING SITE of FIG. 26A. FIG. 26D illustrates the complementarity of the nucleotide sequence of UFD1L BINDING SITE, designated SEQ ID:414051, to the nucleotide sequence of GAM26 RNA of FIG. 26A, designated SEQ ID:20604.

[1884] A further function of GAM26 is therefore inhibition of ubiquitin fusion degradation 1-like (UFD1L), a gene which encodes a Protein that is essential component of the ubiquitin-dependent proteolytic pathway. and is associated with some of the CATCH22-associated developmental defects. Accordingly, utilities of GAM26 include diagnosis and treatment of the abovementioned diseases and clinical conditions.

[1885] The function of UFD1L has been established by previous studies. In a search for genes in the 22q11.2 region possibly implicated in the DiGeorge syndrome (188400), Pizutti et al. (1997) identified a gene whose functional features and tissue-specific expression suggested a distinct role in embryogenesis. Symbolized UFD1L by them (for ubiquitin fusion degradation 1-like), the gene encodes the human homolog of the yeast ubiquitin fusion degradation 1 (UFD1) protein that is involved in the degradation of ubiquitin fusion proteins (see 191320). Cloning and characterization of the murine homolog (Ufd1l) showed it to be expressed during embryogenesis in the eyes and in the inner ear primordia. These findings suggested to Pizutti et al. (1997) that the proteolytic pathway recognizing ubiquitin fusion proteins for degradation is conserved in vertebrates and that UFD1L gene hemizygosity may be the cause of some of the CATCH22-associated developmental defects. The basic helix-loop-helix transcription factor dHAND (HAND2; 602407) is required for survival of cells in the neural crest-derived branchial and aortic arch arteries and the right ventricle. Mice lacking endothelin-1 (EDN1; 131240) have cardiac and cranial neural crest defects typical of the 22q11 deletion syndrome and display downregulation of dHAND, suggesting that a molecular pathway involving dHAND may be disrupted in that syndrome. The HAND2, EDN1, and ET1 receptor (EDNRA; 131243) genes do not map to 22q11, the DiGeorge syndrome critical region, in humans. In a screen for mouse genes dependent on dHAND, Yamagishi et al. (1999) identified Ufd1, which maps to human 22q11 and encodes a protein involved in degradation of ubiquitinated proteins. Mouse Ufd1 was specifically expressed in most tissues affected in patients with the DiGeorge (22q11 deletion) syndrome. Yamagishi et al. (1999) found, furthermore, that the human UFD1L gene was deleted in all 182 patients studied with the 22q11 deletion, and a smaller deletion of approximately 20 kb that removed exons 1 to 3 of UFD1L was found in 1 individual with features typical of 22q11 deletion syndrome. In the individual with the smaller deletion, patient J. F., Yamagishi et al. (1999) found that the CDC45L gene (603465), which is immediately telomeric of UFD1L, was the site of the deletion in the region between exons 5 and 6 of the 5-prime breakpoint. They considered that the deletion in CDC45L may act as a modifier of the phenotype in patient J. F. UFD1L and CDC45L are transcribed in opposite directions. The deletion left exons 4 to 12 of UFD1L intact; the first 5 exons of CDC45L were deleted. Patient J. F. had nearly all of the features commonly associated with the 2-Mb 22q11 deletion. Four days after birth the patient was diagnosed with interrupted aortic arch, persistent truncus arteriosus, cleft palate, small mouth, low-set ears, broad nasal bridge, neonatal hypocalcemia, T-lymphocyte deficiency, and syndactyly of her toes. The deletion was not present in her parents or in 100 control subjects.

[1886] Full details of the abovementioned studies are described in the following publications, the disclosure of which are hereby incorporated by reference:

[1887] izutti, A.; Novelli, G.; Ratti, A.; Amati, F.; Mari, A.; Calabrese, G.; Nicolis, S.; Silani, V.; Marino, B.; Scarlato, G.; Ottolenghi, S.; Dallapiccola, B.: UFD1L, a developmentally expressed ubiquitination gene, is deleted in CATCH 22 syndrome. Hum. Molec. Genet. 6: 259-265, 1997. PubMed ID: 9063746 2. Yamagishi, H.; Garg, V.; Matsuoka, R.; Thomas, T.; Srivastava, D.: A molecular pathway revealing a genetic basis for human cardiac and craniofacial defects. Science 283: 1158-1161, 1999.

[1888] Further studies establishing the function and utilities of UFD1L are found in John Hopkins OMIM database record ID 601754, and in references numbered 1518-1519 listed hereinbelow.

[1889] Referring now to UFD1L BINDING SITE. ubiquitin fusion degradation 1-like (UFD1L) is a target gene of GAM26, corresponding to GAM26-TARGET GENE of FIG. 26A. UFD1L BINDING SITE is a binding site found in an untranslated region of UFD1L, corresponding to BINDING SITE of FIG. 26A. FIG. 26D illustrates the complementarity of the nucleotide sequence of UFD1L BINDING SITE, designated SEQ ID:414052, to the nucleotide sequence of GAM26 RNA of FIG. 26A, designated SEQ ID:20604.

[1890] Yet a further function of GAM26 is therefore inhibition of ubiquitin fusion degradation 1-like (UFD1L), a gene which encodes a Protein that is essential component of the ubiquitin-dependent proteolytic pathway. and is associated with some of the CATCH22-associated developmental defects. Accordingly, utilities of GAM26 include diagnosis and treatment of the abovementioned diseases and clinical conditions. The function and utilities of UFD1L have been established by previous studies, as described hereinabove with reference to FIG. 26D.

[1891] Referring now to UFD1L BINDING SITE. ubiquitin fusion degradation 1-like (UFD1L) is a target gene of GAM26, corresponding to GAM26-TARGET GENE of FIG. 26A. UFD1L BINDING SITE is a binding site found in an untranslated region of UFD1L, corresponding to BINDING SITE of FIG. 26A. FIG. 26D illustrates the complementarity of the nucleotide sequence of UFD1L BINDING SITE, designated SEQ ID:414064, to the nucleotide sequence of GAM26 RNA of FIG. 26A, designated SEQ ID:20604.

[1892] Another function of GAM26 is therefore inhibition of ubiquitin fusion degradation 1-like (UFD1L), a gene which encodes a Protein that is essential component of the ubiquitin-dependent proteolytic pathway. and is associated with some of the CATCH22-associated developmental defects. Accordingly, utilities of GAM26 include diagnosis and treatment of the abovementioned diseases and clinical conditions. The function and utilities of UFD1L have been established by previous studies, as described hereinabove with reference to FIG. 26D.

[1893] Reference is now made to UNC119 BINDING SITE. unc119 (C. elegans) homolog (UNC119) is a target gene of GAM26, corresponding to GAM26-TARGET GENE of FIG. 26A. UNC119 BINDING SITE is a binding site found in an untranslated region of UNC119, corresponding to BINDING SITE of FIG. 26A. FIG. 26D illustrates the complementarity of the nucleotide sequence of UNC119 BINDING SITE, designated SEQ ID:414673, to the nucleotide sequence of GAM26 RNA of FIG. 26A, designated SEQ ID:20604.

[1894] Yet another function of GAM26 is therefore inhibition of unc119 (C. elegans) homolog (UNC119), a gene which encodes a Protein that is expressed in the retina and may play a role in the mechanism of photoreceptor neurotransmitter release through the synaptic vesicle cycle. Accordingly, utilities of GAM26 include diagnosis and treatment of the abovementioned diseases and clinical conditions.

[1895] The function of UNC119 has been established by previous studies. Using a subtractive hybridization strategy, Higashide et al. (1996) identified a retina-specific cDNA that they designated HRG4 (human retinal gene-4). Northern blot analysis revealed that the approximately 1.4-kb HRG4 mRNA is expressed specifically in human retina. The authors also cloned a cDNA encoding RRG4, the rat HRG4 homolog. The predicted 240-amino acid human and rat proteins both contain an N-terminal region rich in proline and glycine followed by a region with a mixture of alpha helices, beta sheets, and turns. Sequence comparisons indicated that the proline-glycine domains of RRG4 and HRG4 share only 67% homology, while the rest of the sequence is 100% identical. By in situ hybridization, Higashide et al. (1996) demonstrated that the HRG4 gene is expressed specifically in photoreceptors, both rods and cones, in human retina. In rat, the authors observed high levels of RRG4 expression in the outer retina beginning around postnatal day 5, when the photoreceptors begin to differentiate, and expression increased rapidly to reach the adult level by postnatal day 23. Mutations in the C. elegans unc119 gene lead to defects in locomotion, feeding behavior, and chemosensation. Both Swanson et al. (1998) and Higashide et al. (1998) observed that HRG4 shares strong homology with the C. elegans unc119 protein, leading Swanson et al. (1998) to designate the human protein UNC119. Swanson et al. (1998) stated that a human UNC119 cDNA functionally complemented the C. elegans unc119 mutation. Using immunofluorescence, Higashide et al. (1998) localized HRG4 to the outer plexiform layer of the retina in the synaptic termini of rod and cone photoreceptors. Electron microscopic immunolocalization showed that the protein is present in the cytoplasm and on the presynaptic membranes of the photoreceptor synapses. The authors suggested that HRG4 may play a role in the mechanism of photoreceptor neurotransmitter release through the synaptic vesicle cycle. They noted that the homology of HRG4 and unc119 is consistent with a possible role of HRG4 in the synaptic vesicle cycle, because the broad effects of unc119 on neuronal function are consistent with a defect in neurotransmission.

[1896] Full details of the abovementioned studies are described in the following publications, the disclosure of which are hereby incorporated by reference:

[1897] igashide, T.; Murakami, A.; McLaren, M. J.; Inana, G.: Cloning of the cDNA for a novel photoreceptor protein. J. Biol. Chem. 271: 1797-1804, 1996. PubMed ID: 8576185 4. Swanson, D. A.; Chang, J. T.; Campochiaro, P. A.; Zack, D. J.; Valle, D.: Mammalian orthologs of C. elegans unc-119 highly expressed in photoreceptors. Invest. Ophthal. Vis. Sci. 39: 2085-2094, 1998.

[1898] Further studies establishing the function and utilities of UNC119 are found in John Hopkins OMIM database record ID 604011, and in references numbered 1520-1523 listed hereinbelow.

[1899] Referring now to UNC119 BINDING SITE. unc 119 (C. elegans) homolog (UNC119) is a target gene of GAM26, corresponding to GAM26-TARGET GENE of FIG. 26A. UNC119 BINDING SITE is a binding site found in an untranslated region of UNC119, corresponding to BINDING SITE of FIG. 26A. FIG. 26D illustrates the complementarity of the nucleotide sequence of UNC119 BINDING SITE, designated SEQ ID:414674, to the nucleotide sequence of GAM26 RNA of FIG. 26A, designated SEQ ID:20604.

[1900] An additional function of GAM26 is therefore inhibition of unc119 (C. elegans) homolog (UNC119), a gene which encodes a Protein that is expressed in the retina and may play a role in the mechanism of photoreceptor neurotransmitter release through the synaptic vesicle cycle. Accordingly, utilities of GAM26 include diagnosis and treatment of the abovementioned diseases and clinical conditions. The function and utilities of UNC119 have been established by previous studies, as described hereinabove with reference to FIG. 26D.

[1901] Referring now to UNC119 BINDING SITE. unc 119 (C. elegans) homolog (UNC119) is a target gene of GAM26, corresponding to GAM26-TARGET GENE of FIG. 26A. UNC119 BINDING SITE is a binding site found in an untranslated region of UNC119, corresponding to BINDING SITE of FIG. 26A. FIG. 26D illustrates the complementarity of the nucleotide sequence of UNC119 BINDING SITE, designated SEQ ID:414696, to the nucleotide sequence of GAM26 RNA of FIG. 26A, designated SEQ ID:20604.

[1902] A further function of GAM26 is therefore inhibition of unc119 (C. elegans) homolog (UNC119), a gene which encodes a Protein that is expressed in the retina and may play a role in the mechanism of photoreceptor neurotransmitter release through the synaptic vesicle cycle. Accordingly, utilities of GAM26 include diagnosis and treatment of the abovementioned diseases and clinical conditions. The function and utilities of UNC119 have been established by previous studies, as described hereinabove with reference to FIG. 26D.

[1903] Reference is now made to USP11 BINDING SITE. ubiquitin specific protease 11 (USP11) is a target gene of GAM26, corresponding to GAM26-TARGET GENE of FIG. 26A. USP11 BINDING SITE is a binding site found in an untranslated region of USP11, corresponding to BINDING SITE of FIG. 26A. FIG. 26D illustrates the complementarity of the nucleotide sequence of USP11 BINDING SITE, designated SEQ ID:415547, to the nucleotide sequence of GAM26 RNA of FIG. 26A, designated SEQ ID:20604.

[1904] Yet a further function of GAM26 is therefore inhibition of ubiquitin specific protease 11 (USP11), a gene which encodes a Enzyme that removes ubiquitin from ubiquitin-conjugated proteins. Accordingly, utilities of GAM26 include diagnosis and treatment of the abovementioned diseases and clinical conditions.

[1905] The function of USP11 has been established by previous studies. Swanson et al. (1996) used a differential hybridization screen to isolate a novel cDNA from a human retina library. The cDNA encodes a protein of 690 amino acids and has strong homology to the proteins encoded by a variety of ubiquitin hydrolases (p values ranging between 2.4e-265 and 1.4e-13). Swanson et al. (1996) reviewed the role of ubiquitination in protein degradation and presented evidence that disturbances in protein processing and turnover can lead to retinal degeneration. They noted that there are at least 4 X-linked retinal diseases that map to a region within or overlapping the UHX1 interval. They cited evidence indicating that ubiquitin hydrolases play a role in oncogenesis (oncogenes and tumor suppressor gene products are degraded in ubiquitin-dependent pathways) and that the region of loss of heterozygosity in ovarian cancer lies within the mapping interval defined for UHX1. Swanson et al. (1996) mapped the structural gene encoding this cDNA, which they designated UHX1, to Xp21.2-p11.2 by somatic cell hybridization. Stoddart et al. (1999) mapped the UHX1 gene to Xp11.3 by inclusion within a YAC contig

[1906] Full details of the abovementioned studies are described in the following publications, the disclosure of which are hereby incorporated by reference:

[1907] wanson, D. A.; Freund, C. L.; Ploder, L.; McInnes, R. R.; Valle, D. A ubiquitin C-terminal hydrolase gene on the proximal short arm of the X chromosome: implications for X-linked retinal disorders. Hum. Molec. Genet. 5: 533-538, 1996. PubMed ID: 8845848 1. Stoddart, K. L.; Jermak, C.; Nagaraja, R.; Schlessinger, D.; Bech-Hansen, N. T.: Physical map covering a 2 Mb region in human Xp11.3 distal to DX6849. Gene 227: 111-116, 1999.

[1908] Further studies establishing the function and utilities of USP11 are found in John Hopkins OMIM database record ID 300050, and in references numbered 1524-1525 listed hereinbelow.

[1909] Reference is now made to UVRAG BINDING SITE. UV radiation resistance associated gene (UVRAG) is a target gene of GAM26, corresponding to GAM26-TARGET GENE of FIG. 26A. UVRAG BINDING SITE is a binding site found in an untranslated region of UVRAG, corresponding to BINDING SITE of FIG. 26A. FIG. 26D illustrates the complementarity of the nucleotide sequence of UVRAG BINDING SITE, designated SEQ ID:416390, to the nucleotide sequence of GAM26 RNA of FIG. 26A, designated SEQ ID:20604.

[1910] Another function of GAM26 is therefore inhibition of UV radiation resistance associated gene (UVRAG), a gene which encodes a Protein that confers UV radiation resistance to a xeroderma pigmentosum cell line. Accordingly, utilities of GAM26 include diagnosis and treatment of the abovementioned diseases and clinical conditions.

[1911] The function of UVRAG has been established by previous studies. Teitz et al. (1990) identified a cDNA that partially complements the ultraviolet (UV) sensitivity of xeroderma pigmentosum complementation group C (see XPC; 278720) cells. Perelman et al. (1997) named this gene ‘UV radiation resistance-associated gene’ (UVRAG) and reported that the 4.0 kb UVRAG mRNA encodes a predicted 648-amino acid protein. Using cell fractionation studies, they found that the UVRAG protein either is localized within an organelle or is part of the cytoskeleton. Northern blotting showed that UVRAG is expressed ubiquitously in humans; it was also present in most of the vertebrate species tested. By fluorescence in situ hybridization and PCR analysis of somatic cell hybrids, Perelman et al. (1997) mapped the UVRAG gene to 11q13, between D11S916 and D11S906

[1912] Full details of the abovementioned studies are described in the following publications, the disclosure of which are hereby incorporated by reference:

[1913] Perelman, B.; Dafni, N.; Naiman, T.; Eli, D.; Yaakov, M.; Yang Feng, T. L.; Sinha, S.; Weber, G.; Khodaei, S.; Sancar, A.; Dotan, I.; Canaani, D.: Molecular cloning of a novel human gene encoding a 63-kDa protein and its sublocalization within the 11q13 locus. Genomics 41: 397-405, 1997.

[1914] Further studies establishing the function and utilities of UVRAG are found in John Hopkins OMIM database record ID 602493, and in references numbered 1526-1527 listed hereinbelow.

[1915] Referring now to UVRAG BINDING SITE. UV radiation resistance associated gene (UVRAG) is a target gene of GAM26, corresponding to GAM26-TARGET GENE of FIG. 26A. UVRAG BINDING SITE is a binding site found in an untranslated region of UVRAG, corresponding to BINDING SITE of FIG. 26A. FIG. 26D illustrates the complementarity of the nucleotide sequence of UVRAG BINDING SITE, designated SEQ ID:416391, to the nucleotide sequence of GAM26 RNA of FIG. 26A, designated SEQ ID:20604.

[1916] Yet another function of GAM26 is therefore inhibition of UV radiation resistance associated gene (UVRAG), a gene which encodes a Protein that confers UV radiation resistance to a xeroderma pigmentosum cell line. Accordingly, utilities of GAM26 include diagnosis and treatment of the abovementioned diseases and clinical conditions. The function and utilities of UVRAG have been established by previous studies, as described hereinabove with reference to FIG. 26D.

[1917] Referring now to UVRAG BINDING SITE. UW radiation resistance associated gene (UVRAG) is a target gene of GAM26, corresponding to GAM26-TARGET GENE of FIG. 26A. UVRAG BINDING SITE is a binding site found in an untranslated region of UVRAG, corresponding to BINDING SITE of FIG. 26A. FIG. 26D illustrates the complementarity of the nucleotide sequence of UVRAG BINDING SITE, designated SEQ ID:416392, to the nucleotide sequence of GAM26 RNA of FIG. 26A, designated SEQ ID:20604.

[1918] An additional function of GAM26 is therefore inhibition of UV radiation resistance associated gene (UVRAG), a gene which encodes a Protein that confers UV radiation resistance to a xeroderma pigmentosum cell line. Accordingly, utilities of GAM26 include diagnosis and treatment of the abovementioned diseases and clinical conditions. The function and utilities of UVRAG have been established by previous studies, as described hereinabove with reference to FIG. 26D.

[1919] Referring now to UVRAG BINDING SITE. UV radiation resistance associated gene (UVRAG) is a target gene of GAM26, corresponding to GAM26-TARGET GENE of FIG. 26A. UVRAG BINDING SITE is a binding site found in an untranslated region of UVRAG, corresponding to BINDING SITE of FIG. 26A. FIG. 26D illustrates the complementarity of the nucleotide sequence of UVRAG BINDING SITE, designated SEQ ID:416394, to the nucleotide sequence of GAM26 RNA of FIG. 26A, designated SEQ ID:20604.

[1920] A further function of GAM26 is therefore inhibition of UV radiation resistance associated gene (UVRAG), a gene which encodes a Protein that confers UV radiation resistance to a xeroderma pigmentosum cell line. Accordingly, utilities of GAM26 include diagnosis and treatment of the abovementioned diseases and clinical conditions. The function and utilities of UVRAG have been established by previous studies, as described hereinabove with reference to FIG. 26D.

[1921] Referring now to UVRAG BINDING SITE. UV radiation resistance associated gene (UVRAG) is a target gene of GAM26, corresponding to GAM26-TARGET GENE of FIG. 26A. UVRAG BINDING SITE is a binding site found in an untranslated region of UVRAG, corresponding to BINDING SITE of FIG. 26A. FIG. 26D illustrates the complementarity of the nucleotide sequence of UVRAG BINDING SITE, designated SEQ ID:416396, to the nucleotide sequence of GAM26 RNA of FIG. 26A, designated SEQ ID:20604.

[1922] Yet a further function of GAM26 is therefore inhibition of UV radiation resistance associated gene (UVRAG), a gene which encodes a Protein that confers UV radiation resistance to a xeroderma pigmentosum cell line. Accordingly, utilities of GAM26 include diagnosis and treatment of the abovementioned diseases and clinical conditions. The function and utilities of UVRAG have been established by previous studies, as described hereinabove with reference to FIG. 26D.

[1923] Referring now to UVRAG BINDING SITE. UV radiation resistance associated gene (UVRAG) is a target gene of GAM26, corresponding to GAM26-TARGET GENE of FIG. 26A. UVRAG BINDING SITE is a binding site found in an untranslated region of UVRAG, corresponding to BINDING SITE of FIG. 26A. FIG. 26D illustrates the complementarity of the nucleotide sequence of UVRAG BINDING SITE, designated SEQ ID:416411, to the nucleotide sequence of GAM26 RNA of FIG. 26A, designated SEQ ID:20604.

[1924] Another function of GAM26 is therefore inhibition of UV radiation resistance associated gene (UVRAG), a gene which encodes a Protein that confers UV radiation resistance to a xeroderma pigmentosum cell line. Accordingly, utilities of GAM26 include diagnosis and treatment of the abovementioned diseases and clinical conditions. The function and utilities of UVRAG have been established by previous studies, as described hereinabove with reference to FIG. 26D.

[1925] Referring now to UVRAG BINDING SITE. UV radiation resistance associated gene (UVRAG) is a target gene of GAM26, corresponding to GAM26-TARGET GENE of FIG. 26A. UVRAG BINDING SITE is a binding site found in an untranslated region of UVRAG, corresponding to BINDING SITE of FIG. 26A. FIG. 26D illustrates the complementarity of the nucleotide sequence of UVRAG BINDING SITE, designated SEQ ID:416412, to the nucleotide sequence of GAM26 RNA of FIG. 26A, designated SEQ ID:20604.

[1926] Yet another function of GAM26 is therefore inhibition of UV radiation resistance associated gene (UVRAG), a gene which encodes a Protein that confers UV radiation resistance to a xeroderma pigmentosum cell line. Accordingly, utilities of GAM26 include diagnosis and treatment of the abovementioned diseases and clinical conditions. The function and utilities of UVRAG have been established by previous studies, as described hereinabove with reference to FIG. 26D.

[1927] Reference is now made to VAMP5 BINDING SITE. vesicle-associated membrane protein 5 (myobrevin) (VAMP5) is a target gene of GAM26, corresponding to GAM26-TARGET GENE of FIG. 26A. VAMP5 BINDING SITE is a binding site found in an untranslated region of VAMP5, corresponding to BINDING SITE of FIG. 26A. FIG. 26D illustrates the complementarity of the nucleotide sequence of VAMP5 BINDING SITE, designated SEQ ID:416481, to the nucleotide sequence of GAM26 RNA of FIG. 26A, designated SEQ ID:20604.

[1928] An additional function of GAM26 is therefore inhibition of vesicle-associated membrane protein 5 (myobrevin) (VAMP5), a gene which encodes a Protein that may participate in trafficking events that are associated with myogenesis. Accordingly, utilities of GAM26 include diagnosis and treatment of the abovementioned diseases and clinical conditions.

[1929] The function of VAMP5 has been established by previous studies. By database searching with the mouse synaptobrevin/Vamp2 (185881) sequence as query, Zeng et al. (1998) identified a mouse EST clone for Vamp5. The deduced 102-amino acid protein is predicted to contain a cytoplasmic coiled-coil structure at the N terminus, a hydrophobic domain, and a short hydrophilic C-terminal sequence. Vamp5 shares 33% sequence identity with cellubrevin (VAMP3; 603657) and synaptobrevin/Vamp2. Northern blot analysis detected a major 700-bp transcript in skeletal muscle and heart, with much lower expression in spleen, lung, liver, kidney, and testis, and no expression in brain. An approximately 1.5-kb transcript was detected in testis. By Northern blot analysis of mouse muscle cells in culture, Zeng et al. (1998) found that Vamp5 expression was 8- to 10-fold higher in multinucleated myotubes than in undifferentiated myoblasts. Western blot analysis revealed protein levels 6-fold higher in myotubes than in myoblasts. Immunofluorescence and electron microscopy indicated that Vamp5 localizes to intracellular perinuclear and peripheral vesicular structures of myotubes as well as to the plasma membrane. Vamp5 staining did not colocalize with a Golgi marker, GS28 (GOSR1; 604026), upon treatment of the cells with Golgi-disrupting agents.

[1930] Full details of the abovementioned studies are described in the following publications, the disclosure of which are hereby incorporated by reference:

[1931] eng, Q.; Subramaniam, V. N.; Wong, S. H.; Tang, B. L.; Parton, R. G.; Rea, S.; James, D. E.; Hong, W.: A novel synaptobrevin/VAMP homologous protein (VAMP5) is increased during in vitro myogenesis and present in the plasma membrane. Molec. Biol. Cell 9: 2423-2437, 1998.

[1932] Further studies establishing the function and utilities of VAMP5 are found in John Hopkins OMIM database record ID 607029, and in references numbered 1528 listed hereinbelow.

[1933] Reference is now made to VEGF BINDING SITE. vascular endothelial growth factor (VEGF) is a target gene of GAM26, corresponding to GAM26-TARGET GENE of FIG. 26A. VEGF BINDING SITE is a binding site found in an untranslated region of VEGF, corresponding to BINDING SITE of FIG. 26A. FIG. 26D illustrates the complementarity of the nucleotide sequence of VEGF BINDING SITE, designated SEQ ID:417797, to the nucleotide sequence of GAM26 RNA of FIG. 26A, designated SEQ ID:20604.

[1934] A further function of GAM26 is therefore inhibition of vascular endothelial growth factor (VEGF), a gene which encodes a Protein that induces endothelial cell proliferation and vascular permeability and is associated with tumors. Accordingly, utilities of GAM26 include diagnosis and treatment of the abovementioned diseases and clinical conditions.

[1935] The function of VEGF has been established by previous studies. To explore the possibility that VEGF and angiopoietins (see ANG2, 601922) collaborate during tumor angiogenesis, Holash et al. (1999) analyzed several different murine and human tumor models. Holash et al. (1999) noted that angiopoietin-1 (ANG1; 601667) was antiapoptotic for cultured endothelial cells and expression of its antagonist angiopoietin-2 was induced in the endothelium of co-opted tumor vessels before their regression. In contrast, marked induction of VEGF expression occurred much later in tumor progression, in the hypoxic periphery of tumor cells surrounding the few remaining internal vessels, as well as adjacent to the robust plexus of vessels at the tumor margin. Expression of Ang2 in the few surviving internal vessels and in the angiogenic vessels at the tumor margin suggested that the destabilizing action of angiopoietin-2 facilitates the angiogenic action of VEGF at the tumor rim. Holash et al. (1999) implanted rat RBA mammary adenocarcinoma cells into rat brains. Tumor cells rapidly associated with and migrated along cerebral blood vessels. There was minimal upregulation of VEGF. Holash et al. (1999) suggested that a subset of tumors rapidly co-opts existing host vessels to form an initially well vascularized tumor mass. Perhaps as part of a host defense mechanism there is widespread regression of these initially co-opted vessels, leading to a secondarily avascular tumor and a massive tumor cell loss. However, the remaining tumor is ultimately rescued by robust angiogenesis at the tumor margin.

[1936] Animal model experiments lend further support to the function of VEGF. De Fraipont et al. (2000) measured the cytosolic concentrations of 3 proteins involved in angiogenesis, namely, platelet-derived endothelial cell growth factor (PDECGF; 131222), VEGFA, and thrombospondin-1 (THBS1; 188060) in a series of 43 human sporadic adrenocortical tumors. The tumors were classified as adenomas, transitional tumors, or carcinomas. PDECGF/thymidine phosphorylase levels were not significantly different among these 3 groups. One hundred percent of the adenomas and 73% of the transitional tumors showed VEGFA concentrations under the threshold value of 107 ng/g protein, whereas 75% of the carcinomas had VEGFA concentrations above this threshold value. Similarly, 89% of the adenomas showed THBS1 concentrations above the threshold value of 57 microg/g protein, whereas only 25% of the carcinomas and 33% of the transitional tumor samples did so. IGF2 (147470) overexpression, a common genetic alteration of adrenocortical carcinomas, was significantly correlated with higher VEGFA and lower THBS1 concentrations. The authors concluded that a decrease in THBS1 expression is an event that precedes an increase in VEGFA expression during adrenocortical tumor progression. The population of premalignant tumors with low THBS1 and normal VEGFA levels could represent a selective target for antiangiogenic therapies.

[1937] It is appreciated that the abovementioned animal model for VEGF is acknowledged by those skilled in the art as a scientifically valid animal model, as can be further appreciated from the publications sited hereinbelow.

[1938] Full details of the abovementioned studies are described in the following publications, the disclosure of which are hereby incorporated by reference:

[1939] Holash, J.; Maisonpierre, P. C.; Compton, D.; Boland, P.; Alexander, C. R.; Zagzag, D.; Yancopoulos, G. D.; Wiegand, S. J.: Vessel cooption, regression, and growth in tumors mediated by angiopoietins and VEGF. Science 284: 1994-1998, 1999. PubMed ID: 10373119 de Fraipont, F.; E1 Atifi, M.; Gicquel, C.; Bertagna, X.; Chambaz, E. M.; Feige, J. J.: Expression of the angiogenesis markers vascular endothelial growth factor-A, thrombospondin-1, and platelet-derived endothelial cell growth factor in human sporadic adrenocortical tumors: correlation with genotypic alterations. J. Clin. Endocr. Metab. 85: 4734-4741, 2000.

[1940] Further studies establishing the function and utilities of VEGF are found in John Hopkins OMIM database record ID 192240, and in references numbered 1529-1566 listed hereinbelow.

[1941] Reference is now made to WHSC1L1 BINDING SITE. Wolf-Hirschhorn syndrome candidate 1-like 1 (WHSC1L1) is a target gene of GAM26, corresponding to GAM26-TARGET GENE of FIG. 26A. WHSC1L1 BINDING SITE is a binding site found in an untranslated region of WHSC1L1, corresponding to BINDING SITE of FIG. 26A. FIG. 26D illustrates the complementarity of the nucleotide sequence of WHSC1L1 BINDING SITE, designated SEQ ID:422800, to the nucleotide sequence of GAM26 RNA of FIG. 26A, designated SEQ ID:20604.

[1942] Yet a further function of GAM26 is therefore inhibition of Wolf-Hirschhorn syndrome candidate 1-like 1 (WHSC1L1), a gene which encodes a Protein that restores repair of base-base and single-nucleotide insertion-deletion mismatches, and increases the proficiency to process heteroduplexes with insertion-deletion mismatches. Accordingly, utilities of GAM26 include diagnosis and treatment of the abovementioned diseases and clinical conditions.

[1943] The function of WHSC1L1 has been established by previous studies. By EST database searching with mouse Nsd1 (606681) and human NSD2 (WHSC1; 602952) as probe and screening of an amnion cell cDNA library, Angrand et al. (2001) cloned a partial sequence for WHSC1L1, which they called NSD3. They obtained the full-length cDNA by 5-prime RACE. The deduced 1,437-amino acid protein contains 2 PWWP domains involved in protein-protein interaction, 5 PHD-type zinc finger motifs found in chromatin-associated proteins, a SAC (SET-associated cys-rich) domain, a SET domain, and a C-terminal C5HCH domain. They also identified a variant, arising from alternative polyadenylation and exon splicing, that encodes a deduced 645-amino acid peptide. The short isoform contains a single PWWP domain. By PCR analysis, Angrand et al. (2001) found the 2 variants, as well as a third, 1,388-amino acid peptide, in HeLa cells. WHSC1L1 shares 68% and 55% identity with mouse Nsd1 (606681) and human WHSC1 (602952), respectively, over a 700-amino acid block containing the SAC, SET, and C5HCH domains. Northern blot analysis detected an 8.5-kb transcript in all tissues examined, with highest expression in brain, heart, and skeletal muscle, and lower expression in liver and lung. Angrand et al. (2001) determined that the WHSC1L1 gene contains 24 exons and spans over 90 kb. By FISH, Angrand et al. (2001) mapped the WHSC1L1 gene to chromosome 8p12. Stec et al. (2001) identified a pseudogene (WHSC1L2P) on chromosome 17q21. Rosati et al. (2002) described fusion between the NUP98 gene (601021) and the NSD3 gene in a patient with acute myeloid leukemia associated with t(8;11)(p11.2;p15). FISH analysis revealed a split of a specific BAC which showed the fusion partner at 8p11.2 to be NSD3.

[1944] Full details of the abovementioned studies are described in the following publications, the disclosure of which are hereby incorporated by reference:

[1945] ngrand, P.-O.; Apiou, F.; Stewart, A. F.; Dutrillaux, B.; Losson, R.; Chambon, P.: NSD3, a new SET domain-containing gene, maps to 8p12 and is amplified in human breast cancer cell lines. Genomics 74: 79-88, 2001. PubMed ID: 11374904 2. Rosati, R.; La Starza, R.; Veronese, A.; Aventin, A.; Schwienbacher, C.; Vallespi, T.; Negrini, M.; Martelli, M. F.; Mecucci, C.: NUP98 is fused to the NSD3 gene in acute myeloid leukemia associated with t(8;11)(p11.2;p15). Blood 99: 3857-3860, 2002.

[1946] Further studies establishing the function and utilities of WHSC1L1 are found in John Hopkins OMIM database record ID 607083, and in references numbered 1567 and 1568 listed hereinbelow.

[1947] Referring now to WHSC1L1 BINDING SITE. Wolf-Hirschhorn syndrome candidate 1-like 1 (WHSC1L1) is a target gene of GAM26, corresponding to GAM26-TARGET GENE of FIG. 26A. WHSC1L1 BINDING SITE is a binding site found in an untranslated region of WHSC1L1, corresponding to BINDING SITE of FIG. 26A. FIG. 26D illustrates the complementarity of the nucleotide sequence of WHSC1L1 BINDING SITE, designated SEQ ID:422801, to the nucleotide sequence of GAM26 RNA of FIG. 26A, designated SEQ ID:20604.

[1948] Another function of GAM26 is therefore inhibition of Wolf-Hirschhorn syndrome candidate 1-like 1 (WHSC1L1), a gene which encodes a Protein that restores repair of base-base and single-nucleotide insertion-deletion mismatches, and increases the proficiency to process heteroduplexes with insertion-deletion mismatches. Accordingly, utilities of GAM26 include diagnosis and treatment of the abovementioned diseases and clinical conditions. The function and utilities of WHSC1L1 have been established by previous studies, as described hereinabove with reference to FIG. 26D.

[1949] Referring now to WHSC1L1 BINDING SITE. Wolf-Hirschhorn syndrome candidate 1-like 1 (WHSC1L1) is a target gene of GAM26, corresponding to GAM26-TARGET GENE of FIG. 26A. WHSC1L1 BINDING SITE is a binding site found in an untranslated region of WHSC1L1, corresponding to BINDING SITE of FIG. 26A. FIG. 26D illustrates the complementarity of the nucleotide sequence of WHSC1L1 BINDING SITE, designated SEQ ID:422875, to the nucleotide sequence of GAM26 RNA of FIG. 26A, designated SEQ ID:20604.

[1950] Yet another function of GAM26 is therefore inhibition of Wolf-Hirschhorn syndrome candidate 1-like 1 (WHSC1L1), a gene which encodes a Protein that restores repair of base-base and single-nucleotide insertion-deletion mismatches, and increases the proficiency to process heteroduplexes with insertion-deletion mismatches. Accordingly, utilities of GAM26 include diagnosis and treatment of the abovementioned diseases and clinical conditions. The function and utilities of WHSC1L1 have been established by previous studies, as described hereinabove with reference to FIG. 26D.

[1951] Reference is now made to YWHAH BINDING SITE. tyrosine 3-monooxygenase/tryptophan 5-monooxygenase activation protein (YWHAH) is a target gene of GAM26, corresponding to GAM26-TARGET GENE of FIG. 26A. YWHAH BINDING SITE is a binding site found in an untranslated region of YWHAH, corresponding to BINDING SITE of FIG. 26A. FIG. 26D illustrates the complementarity of the nucleotide sequence of YWHAH BINDING SITE, designated SEQ ID:426949, to the nucleotide sequence of GAM26 RNA of FIG. 26A, designated SEQ ID:20604.

[1952] An additional function of GAM26 is therefore inhibition of tyrosine 3-monooxygenase/tryptophan 5-monooxygenase activation protein (YWHAH), a gene which encodes a Protein that activates tyrosine and tryptophan hydroxylases in the presence of and strongly activates protein kinase c. Accordingly, utilities of GAM26 include diagnosis and treatment of the abovementioned diseases and clinical conditions.

[1953] The function of YWHAH has been established by previous studies. Protein 14-3-3 is a protein kinase-dependent activator of tyrosine and tryptophan hydroxylases (191290, 191060) and an endogenous inhibitor of protein kinase C (176960). It was first described as a brain-specific bovine protein. It consists of acidic dimeric subunits of about 27 kD. Immunohistochemical analyses showed that the 14-3-3 protein is located exclusively in the cytoplasm of neurons in the cerebral cortex and is axonally transported to the nerve terminals. Electrophoresis and chromatography demonstrated that the 14-3-3 protein exists in at least 7 distinct forms: alpha, beta, gamma, delta, epsilon, zeta, and eta. Watanabe et al. (1994) found mRNA corresponding to an eighth subtype, which they termed theta, in rat brain. The mRNA theta subtype was found in the gray matter of cerebellar cortex and the hippocampus, as well as in white matter where cell bodies of glial cells predominate. In contrast, mRNA of the zeta subtype was distributed widely in the brain gray matter with high levels of transcripts in the neocortex, hippocampus, caudate-putamen, thalamus, cerebellar cortex, and several brain stem nuclei. A human protein with phospholipase A2 activity was shown to be the zeta subtype of the 14-3-3 protein (Zupan et al., 1992). The gene is also symbolized YWHAH. Muratake et al. (1996) determined that the human YWHAH gene has 2 exons separated by an intron of approximately 8 kb. Using S1 nuclease mapping, primer extension, and RACE PCR, Muratake et al. (1996) identified the transcription initiation site. They also identified several regulatory element sequences, including CRE, in the 5-prime noncoding region. Muratake et al. (1996) noted that the presence of a CRE binding element may indicate that this gene is involved in brain responses to narcotics. The authors also found changes in a 7-bp repeat sequence (GCCTGCA) located in the noncoding region of exon 1 and they speculated that these changes, or other changes in the sequence of this gene, may be associated with neuropsychiatric disorders.

[1954] Full details of the abovementioned studies are described in the following publications, the disclosure of which are hereby incorporated by reference:

[1955] uratake, T.; Hayashi, S.; Ichikawa, T.; Kumanishi, T.; Ichimura, Y.; Kuwano, R.; Isobe, T.; Wang, Y.; Minoshima, S.; Shimizu, N.; Takahashi, Y.: Structural organization and chromosomal assignment of the human 14-3-3-eta chain gene (YWHAH). Genomics 36: 63-69, 1996. PubMed ID: 8812417 6. Zupan, L. A.; Steffens, D. L.; Berry, C. A.; Landt, M.; Gross, R. W.: Cloning and expression of a human 14-3-3 protein mediating phospholipolysis. J. Biol. Chem. 267: 8707-8710, 1992.

[1956] Further studies establishing the function and utilities of YWHAH are found in John Hopkins OMIM database record ID 113508, and in references numbered 1569-1574 listed hereinbelow.

[1957] Referring now to ZNF6 BINDING SITE. zinc finger protein 6 (CMPX1) (ZNF6) is a target gene of GAM26, corresponding to GAM26-TARGET GENE of FIG. 26A. ZNF6 BINDING SITE is a binding site found in an untranslated region of ZNF6, corresponding to BINDING SITE of FIG. 26A. FIG. 26D illustrates the complementarity of the nucleotide sequence of ZNF6 BINDING SITE, designated SEQ ID:432632, to the nucleotide sequence of GAM26 RNA of FIG. 26A, designated SEQ ID:20604.

[1958] A further function of GAM26 is therefore inhibition of zinc finger protein 6 (CMPX1) (ZNF6), a gene which encodes a Protein that is probably a transcriptional activator. Accordingly, utilities of GAM26 include diagnosis and treatment of the abovementioned diseases and clinical conditions. The function and utilities of ZNF6 have been established by previous studies, as described hereinabove with reference to FIG. 26D.

[1959] Referring now to ZNF6 BINDING SITE. zinc finger protein 6 (CMPX1) (ZNF6) is a target gene of GAM26, corresponding to GAM26-TARGET GENE of FIG. 26A. ZNF6 BINDING SITE is a binding site found in an untranslated region of ZNF6, corresponding to BINDING SITE of FIG. 26A. FIG. 26D illustrates the complementarity of the nucleotide sequence of ZNF6 BINDING SITE, designated SEQ ID:432637, to the nucleotide sequence of GAM26 RNA of FIG. 26A, designated SEQ ID:20604.

[1960] Yet a further function of GAM26 is therefore inhibition of zinc finger protein 6 (CMPX1) (ZNF6), a gene which encodes a Protein that is probably a transcriptional activator. Accordingly, utilities of GAM26 include diagnosis and treatment of the abovementioned diseases and clinical conditions. The function and utilities of ZNF6 have been established by previous studies, as described hereinabove with reference to FIG. 26D.

[1961] Referring now to ADARB1 BINDING SITE. adenosine deaminase, RNA-specific, B1 (homolog of rat RED1) (ADARB1) is a target gene of GAM26, corresponding to GAM26-TARGET GENE of FIG. 26A. ADARB1 BINDING SITE is a binding site found in an untranslated region of ADARB1, corresponding to BINDING SITE of FIG. 26A. FIG. 26D illustrates the complementarity of the nucleotide sequence of ADARB1 BINDING SITE, designated SEQ ID:432641, to the nucleotide sequence of GAM26 RNA of FIG. 26A, designated SEQ ID:20604.

[1962] Another function of GAM26 is therefore inhibition of adenosine deaminase, RNA-specific, B1 (homolog of rat RED1) (ADARB1), a gene which encodes a Enzyme that RNA editing involves the deamination of adenosines at specific sites. Accordingly, utilities of GAM26 include diagnosis and treatment of the abovementioned diseases and clinical conditions. The function and utilities of ADARB1 have been established by previous studies, as described hereinabove with reference to FIG. 26D.

[1963] Referring now to BCL11B BINDING SITE. B-cell CLL/lymphoma 11B (zinc finger protein) (BCL11B) is a target gene of GAM26, corresponding to GAM26-TARGET GENE of FIG. 26A. BCL11B BINDING SITE is a binding site found in an untranslated region of BCL11B, corresponding to BINDING SITE of FIG. 26A. FIG. 26D illustrates the complementarity of the nucleotide sequence of BCL11B BINDING SITE, designated SEQ ID:432641, to the nucleotide sequence of GAM26 RNA of FIG. 26A, designated SEQ ID:20604.

[1964] Yet another function of GAM26 is therefore inhibition of B-cell CLL/lymphoma 11B (zinc finger protein) (BCL11B), a gene which encodes a Protein that is implicated in mouse and human leukemias and is associated with T-cell leukemia/lymphoma. Accordingly, utilities of GAM26 include diagnosis and treatment of the abovementioned diseases and clinical conditions. The function and utilities of BCL11B have been established by previous studies, as described hereinabove with reference to FIG. 26D.

[1965] Referring now to BCR BINDING SITE. breakpoint cluster region (BCR) is a target gene of GAM26, corresponding to GAM26-TARGET GENE of FIG. 26A. BCR BINDING SITE is a binding site found in an untranslated region of BCR, corresponding to BINDING SITE of FIG. 26A. FIG. 26D illustrates the complementarity of the nucleotide sequence of BCR BINDING SITE, designated SEQ ID:432641, to the nucleotide sequence of GAM26 RNA of FIG. 26A, designated SEQ ID:20604.

[1966] An additional function of GAM26 is therefore inhibition of breakpoint cluster region (BCR), a gene which encodes a Protein that is a serine/threonine kinase that involves in the t(9;22) translocation (Philadelphia chromosome) and is associated with chronic mycloid leukemia (cml), acute myeloid leukemia (aml), acute lymphoblastic leukemia (all). Accordingly, utilities of GAM26 include diagnosis and treatment of the abovementioned diseases and clinical conditions. The function and utilities of BCR have been established by previous studies, as described hereinabove with reference to FIG. 26D.

[1967] Referring now to BCR BINDING SITE. breakpoint cluster region (BCR) is a target gene of GAM26, corresponding to GAM26-TARGET GENE of FIG. 26A. BCR BINDING SITE is a binding site found in an untranslated region of BCR, corresponding to BINDING SITE of FIG. 26A. FIG. 26D illustrates the complementarity of the nucleotide sequence of BCR BINDING SITE, designated SEQ ID:432641, to the nucleotide sequence of GAM26 RNA of FIG. 26A, designated SEQ ID:20604.

[1968] A further function of GAM26 is therefore inhibition of breakpoint cluster region (BCR), a gene which encodes a Protein that is a serine/threonine kinase that involves in the t(9;22) translocation (Philadelphia chromosome) and is associated with chronic myeloid leukemia (cml), acute myeloid leukemia (aml), acute lymphoblastic leukemia (all). Accordingly, utilities of GAM26 include diagnosis and treatment of the abovementioned diseases and clinical conditions. The function and utilities of BCR have been established by previous studies, as described hereinabove with reference to FIG. 26D.

[1969] Referring now to ZNF6 BINDING SITE. zinc finger protein 6 (CMPX1) (ZNF6) is a target gene of GAM26, corresponding to GAM26-TARGET GENE of FIG. 26A. ZNF6 BINDING SITE is a binding site found in an untranslated region of ZNF6, corresponding to BINDING SITE of FIG. 26A. FIG. 26D illustrates the complementarity of the nucleotide sequence of ZNF6 BINDING SITE, designated SEQ ID:432641, to the nucleotide sequence of GAM26 RNA of FIG. 26A, designated SEQ ID:20604.

[1970] Yet a further function of GAM26 is therefore inhibition of zinc finger protein 6 (CMPX1) (ZNF6), a gene which encodes a Protein that is probably a transcriptional activator. Accordingly, utilities of GAM26 include diagnosis and treatment of the abovementioned diseases and clinical conditions. The function and utilities of ZNF6 have been established by previous studies, as described hereinabove with reference to FIG. 26D.

[1971] Referring now to ZNF6 BINDING SITE. zinc finger protein 6 (CMPX1) (ZNF6) is a target gene of GAM26, corresponding to GAM26-TARGET GENE of FIG. 26A. ZNF6 BINDING SITE is a binding site found in an untranslated region of ZNF6, corresponding to BINDING SITE of FIG. 26A. FIG. 26D illustrates the complementarity of the nucleotide sequence of ZNF6 BINDING SITE, designated SEQ ID:432642, to the nucleotide sequence of GAM26 RNA of FIG. 26A, designated SEQ ID:20604.

[1972] Another function of GAM26 is therefore inhibition of zinc finger protein 6 (CMPX1) (ZNF6), a gene which encodes a Protein that is probably a transcriptional activator. Accordingly, utilities of GAM26 include diagnosis and treatment of the abovementioned diseases and clinical conditions. The function and utilities of ZNF6 have been established by previous studies, as described hereinabove with reference to FIG. 26D.

[1973] Referring now to ADARB1 BINDING SITE. adenosine deaminase, RNA-specific, B1 (homolog of rat RED1) (ADARB1) is a target gene of GAM26, corresponding to GAM26-TARGET GENE of FIG. 26A. ADARB1 BINDING SITE is a binding site found in an untranslated region of ADARB1, corresponding to BINDING SITE of FIG. 26A. FIG. 26D illustrates the complementarity of the nucleotide sequence of ADARB1 BINDING SITE, designated SEQ ID:432644, to the nucleotide sequence of GAM26 RNA of FIG. 26A, designated SEQ ID:20604.

[1974] Yet another function of GAM26 is therefore inhibition of adenosine deaminase, RNA-specific, B1 (homolog of rat RED1) (ADARB1), a gene which encodes a Enzyme that RNA editing involves the deamination of adenosines at specific sites. Accordingly, utilities of GAM26 include diagnosis and treatment of the abovementioned diseases and clinical conditions. The function and utilities of ADARB1 have been established by previous studies, as described hereinabove with reference to FIG. 26D.

[1975] Referring now to BCL11B BINDING SITE. B-cell CLL/lymphoma 11B (zinc finger protein) (BCL11B) is a target gene of GAM26, corresponding to GAM26-TARGET GENE of FIG. 26A. BCL11B BINDING SITE is a binding site found in an untranslated region of BCL11B, corresponding to BINDING SITE of FIG. 26A. FIG. 26D illustrates the complementarity of the nucleotide sequence of BCL11B BINDING SITE, designated SEQ ID:432644, to the nucleotide sequence of GAM26 RNA of FIG. 26A, designated SEQ ID:20604.

[1976] An additional function of GAM26 is therefore inhibition of B-cell CLL/lymphoma 11B (zinc finger protein) (BCL11B), a gene which encodes a Protein that is implicated in mouse and human leukemias and is associated with T-cell leukemia/lymphoma. Accordingly, utilities of GAM26 include diagnosis and treatment of the abovementioned diseases and clinical conditions. The function and utilities of BCL11B have been established by previous studies, as described hereinabove with reference to FIG. 26D.

[1977] Referring now to BCR BINDING SITE. breakpoint cluster region (BCR) is a target gene of GAM26, corresponding to GAM26-TARGET GENE of FIG. 26A. BCR BINDING SITE is a binding site found in an untranslated region of BCR, corresponding to BINDING SITE of FIG. 26A. FIG. 26D illustrates the complementarity of the nucleotide sequence of BCR BINDING SITE, designated SEQ ID:432644, to the nucleotide sequence of GAM26 RNA of FIG. 26A, designated SEQ ID:20604.

[1978] A further function of GAM26 is therefore inhibition of breakpoint cluster region (BCR), a gene which encodes a Protein that is a serine/threonine kinase that involves in the t(9;22) translocation (Philadelphia chromosome) and is associated with chronic myeloid leukemia (cml), acute myeloid leukemia (aml), acute lymphoblastic leukemia (all). Accordingly, utilities of GAM26 include diagnosis and treatment of the abovementioned diseases and clinical conditions. The function and utilities of BCR have been established by previous studies, as described hereinabove with reference to FIG. 26D.

[1979] Referring now to BCR BINDING SITE. breakpoint cluster region (BCR) is a target gene of GAM26, corresponding to GAM26-TARGET GENE of FIG. 26A. BCR BINDING SITE is a binding site found in an untranslated region of BCR, corresponding to BINDING SITE of FIG. 26A. FIG. 26D illustrates the complementarity of the nucleotide sequence of BCR BINDING SITE, designated SEQ ID:432644, to the nucleotide sequence of GAM26 RNA of FIG. 26A, designated SEQ ID:20604.

[1980] Yet a further function of GAM26 is therefore inhibition of breakpoint cluster region (BCR), a gene which encodes a Protein that is a serine/threonine kinase that involves in the t(9;22) translocation (Philadelphia chromosome) and is associated with chronic myeloid leukemia (cml), acute myeloid leukemia (aml), acute lymphoblastic leukemia (all). Accordingly, utilities of GAM26 include diagnosis and treatment of the abovementioned diseases and clinical conditions. The function and utilities of BCR have been established by previous studies, as described hereinabove with reference to FIG. 26D.

[1981] Referring now to REPS2 BINDING SITE. RALBP1 associated Eps domain containing 2 (REPS2) is a target gene of GAM26, corresponding to GAM26-TARGET GENE of FIG. 26A. REPS2 BINDING SITE is a binding site found in an untranslated region of REPS2, corresponding to BINDING SITE of FIG. 26A. FIG. 26D illustrates the complementarity of the nucleotide sequence of REPS2 BINDING SITE, designated SEQ ID:432644, to the nucleotide sequence of GAM26 RNA of FIG. 26A, designated SEQ ID:20604.

[1982] Another function of GAM26 is therefore inhibition of RALBP1 associated Eps domain containing 2 (REPS2), a gene which encodes a Protein that interacts with the active form of RAS with adaptor protein GRB2 and binds calcium. Accordingly, utilities of GAM26 include diagnosis and treatment of the abovementioned diseases and clinical conditions. The function and utilities of REPS2 have been established by previous studies, as described hereinabove with reference to FIG. 26D.

[1983] Referring now to ZNF6 BINDING SITE. zinc finger protein 6 (CMPX1) (ZNF6) is a target gene of GAM26, corresponding to GAM26-TARGET GENE of FIG. 26A. ZNF6 BINDING SITE is a binding site found in an untranslated region of ZNF6, corresponding to BINDING SITE of FIG. 26A. FIG. 26D illustrates the complementarity of the nucleotide sequence of ZNF6 BINDING SITE, designated SEQ ID:432644, to the nucleotide sequence of GAM26 RNA of FIG. 26A, designated SEQ ID:20604.

[1984] Yet another function of GAM26 is therefore inhibition of zinc finger protein 6 (CMPX1) (ZNF6), a gene which encodes a Protein that is probably a transcriptional activator. Accordingly, utilities of GAM26 include diagnosis and treatment of the abovementioned diseases and clinical conditions. The function and utilities of ZNF6 have been established by previous studies, as described hereinabove with reference to FIG. 26D.

[1985] Referring now to ZNF6 BINDING SITE. zinc finger protein 6 (CMPX1) (ZNF6) is a target gene of GAM26, corresponding to GAM26-TARGET GENE of FIG. 26A. ZNF6 BINDING SITE is a binding site found in an untranslated region of ZNF6, corresponding to BINDING SITE of FIG. 26A. FIG. 26D illustrates the complementarity of the nucleotide sequence of ZNF6 BINDING SITE, designated SEQ ID:432645, to the nucleotide sequence of GAM26 RNA of FIG. 26A, designated SEQ ID:20604.

[1986] An additional function of GAM26 is therefore inhibition of zinc finger protein 6 (CMPX1) (ZNF6), a gene which encodes a Protein that is probably a transcriptional activator. Accordingly, utilities of GAM26 include diagnosis and treatment of the abovementioned diseases and clinical conditions. The function and utilities of ZNF6 have been established by previous studies, as described hereinabove with reference to FIG. 26D.

[1987] Referring now to ZNF6 BINDING SITE. zinc finger protein 6 (CMPX1) (ZNF6) is a target gene of GAM26, corresponding to GAM26-TARGET GENE of FIG. 26A. ZNF6 BINDING SITE is a binding site found in an untranslated region of ZNF6, corresponding to BINDING SITE of FIG. 26A. FIG. 26D illustrates the complementarity of the nucleotide sequence of ZNF6 BINDING SITE, designated SEQ ID:432654, to the nucleotide sequence of GAM26 RNA of FIG. 26A, designated SEQ ID:20604.

[1988] A further function of GAM26 is therefore inhibition of zinc finger protein 6 (CMPX1) (ZNF6), a gene which encodes a Protein that is probably a transcriptional activator. Accordingly, utilities of GAM26 include diagnosis and treatment of the abovementioned diseases and clinical conditions. The function and utilities of ZNF6 have been established by previous studies, as described hereinabove with reference to FIG. 26D.

[1989] Referring now to ZNF6 BINDING SITE. zinc finger protein 6 (CMPX1) (ZNF6) is a target gene of GAM26, corresponding to GAM26-TARGET GENE of FIG. 26A. ZNF6 BINDING SITE is a binding site found in an untranslated region of ZNF6, corresponding to BINDING SITE of FIG. 26A. FIG. 26D illustrates the complementarity of the nucleotide sequence of ZNF6 BINDING SITE, designated SEQ ID:432654, to the nucleotide sequence of GAM26 RNA of FIG. 26A, designated SEQ ID:20604.

[1990] Yet a further function of GAM26 is therefore inhibition of zinc finger protein 6 (CMPX1) (ZNF6), a gene which encodes a Protein that is probably a transcriptional activator. Accordingly, utilities of GAM26 include diagnosis and treatment of the abovementioned diseases and clinical conditions. The function and utilities of ZNF6 have been established by previous studies, as described hereinabove with reference to FIG. 26D.

[1991] Referring now to ZNF6 BINDING SITE. zinc finger protein 6 (CMPX1) (ZNF6) is a target gene of GAM26, corresponding to GAM26-TARGET GENE of FIG. 26A. ZNF6 BINDING SITE is a binding site found in an untranslated region of ZNF6, corresponding to BINDING SITE of FIG. 26A. FIG. 26D illustrates the complementarity of the nucleotide sequence of ZNF6 BINDING SITE, designated SEQ ID:432655, to the nucleotide sequence of GAM26 RNA of FIG. 26A, designated SEQ ID:20604.

[1992] Another function of GAM26 is therefore inhibition of zinc finger protein 6 (CMPX1) (ZNF6), a gene which encodes a Protein that is probably a transcriptional activator. Accordingly, utilities of GAM26 include diagnosis and treatment of the abovementioned diseases and clinical conditions. The function and utilities of ZNF6 have been established by previous studies, as described hereinabove with reference to FIG. 26D.

[1993] Referring now to RELN BINDING SITE. reelin (RELN) is a target gene of GAM26, corresponding to GAM26-TARGET GENE of FIG. 26A. RELN BINDING SITE is a binding site found in an untranslated region of RELN, corresponding to BINDING SITE of FIG. 26A. FIG. 26D illustrates the complementarity of the nucleotide sequence of RELN BINDING SITE, designated SEQ ID:547115, to the nucleotide sequence of GAM26 RNA of FIG. 26A, designated SEQ ID:20604.

[1994] Yet another function of GAM26 is therefore inhibition of reelin (RELN), a gene which encodes a transcripition factor that is associated with norman-roberts syndrome. Accordingly, utilities of GAM26 include diagnosis and treatment of the abovementioned diseases and clinical conditions. The function and utilities of RELN have been established by previous studies, as described hereinabove with reference to FIG. 26D.

[1995] Referring now to DR1 BINDING SITE. down-regulator of transcription 1, TBP-binding (negative cofactor 2) (DR1) is a target gene of GAM26, corresponding to GAM26-TARGET GENE of FIG. 26A. DR1 BINDING SITE is a binding site found in an untranslated region of DR1, corresponding to BINDING SITE of FIG. 26A. FIG. 26D illustrates the complementarity of the nucleotide sequence of DR1 BINDING SITE, designated SEQ ID:625767, to the nucleotide sequence of GAM26 RNA of FIG. 26A, designated SEQ ID:20604.

[1996] An additional function of GAM26 is therefore inhibition of down-regulator of transcription 1, TBP-binding (negative cofactor 2) (DR1), a gene which encodes a Protein that influences functional repression of both activated and basal transcription of class ii genes. Accordingly, utilities of GAM26 include diagnosis and treatment of the abovementioned diseases and clinical conditions. The function and utilities of DR1 have been established by previous studies, as described hereinabove with reference to FIG. 26D.

[1997] Referring now to SOX10 BINDING SITE. SRY (sex determining region Y)-box 10 (SOX10) is a target gene of GAM26, corresponding to GAM26-TARGET GENE of FIG. 26A. SOX10 BINDING SITE is a binding site found in an untranslated region of SOX10, corresponding to BINDING SITE of FIG. 26A. FIG. 26D illustrates the complementarity of the nucleotide sequence of SOX10 BINDING SITE, designated SEQ ID:717573, to the nucleotide sequence of GAM26 RNA of FIG. 26A, designated SEQ ID:20604.

[1998] A further function of GAM26 is therefore inhibition of SRY (sex determining region Y)-box 10 (SOX10), a gene which encodes a transcripition factor that is associated with Waardenburg syndrome type 4. Accordingly, utilities of GAM26 include diagnosis and treatment of the abovementioned diseases and clinical conditions. The function and utilities of SOX10 have been established by previous studies, as described hereinabove with reference to FIG. 26D.

[1999] Referring now to ADRBK1 BINDING SITE. adrenergic, beta, receptor kinase 1 (ADRBK1) is a target gene of GAM26, corresponding to GAM26-TARGET GENE of FIG. 26A. ADRBK1 BINDING SITE is a binding site found in an untranslated region of ADRBK1, corresponding to BINDING SITE of FIG. 26A. FIG. 26D illustrates the complementarity of the nucleotide sequence of ADRBK1 BINDING SITE, designated SEQ ID:816521, to the nucleotide sequence of GAM26 RNA of FIG. 26A, designated SEQ ID:20604.

[2000] Yet a further function of GAM26 is therefore inhibition of adrenergic, beta, receptor kinase 1 (ADRBK1), a gene which encodes a Enzyme that regulates desensitization of b-adrenergic receptors and related GPCRs. Accordingly, utilities of GAM26 include diagnosis and treatment of the abovementioned diseases and clinical conditions. The function and utilities of ADRBK1 have been established by previous studies, as described hereinabove with reference to FIG. 26D.

[2001] Referring now to PEA15 BINDING SITE. phosphoprotein enriched in astrocytes 15 (PEA15) is a target gene of GAM26, corresponding to GAM26-TARGET GENE of FIG. 26A. PEA15 BINDING SITE is a binding site found in an untranslated region of PEA15, corresponding to BINDING SITE of FIG. 26A. FIG. 26D illustrates the complementarity of the nucleotide sequence of PEA15 BINDING SITE, designated SEQ ID:816521, to the nucleotide sequence of GAM26 RNA of FIG. 26A, designated SEQ ID:20604.

[2002] Another function of GAM26 is therefore inhibition of phosphoprotein enriched in astrocytes 15 (PEA15), a gene which encodes a Protein that is a phosphoprotein and involved in glucose uptake. Accordingly, utilities of GAM26 include diagnosis and treatment of the abovementioned diseases and clinical conditions. The function and utilities of PEA15 have been established by previous studies, as described hereinabove with reference to FIG. 26D.

[2003] Referring now to ADRBK1 BINDING SITE. adrenergic, beta, receptor kinase 1 (ADRBK1) is a target gene of GAM26, corresponding to GAM26-TARGET GENE of FIG. 26A. ADRBK1 BINDING SITE is a binding site found in an untranslated region of ADRBK1, corresponding to BINDING SITE of FIG. 26A. FIG. 26D illustrates the complementarity of the nucleotide sequence of ADRBK1 BINDING SITE, designated SEQ ID:844404, to the nucleotide sequence of GAM26 RNA of FIG. 26A, designated SEQ ID:20604.

[2004] Yet another function of GAM26 is therefore inhibition of adrenergic, beta, receptor kinase 1 (ADRBK1), a gene which encodes a Enzyme that regulates desensitization of b-adrenergic receptors and related GPCRs. Accordingly, utilities of GAM26 include diagnosis and treatment of the abovementioned diseases and clinical conditions. The function and utilities of ADRBK1 have been established by previous studies, as described hereinabove with reference to FIG. 26D.

[2005] Referring now to FOXF1 BINDING SITE. forkhead box F1 (FOXF1) is a target gene of GAM26, corresponding to GAM26-TARGET GENE of FIG. 26A. FOXF1 BINDING SITE is a binding site found in an untranslated region of FOXF1, corresponding to BINDING SITE of FIG. 26A. FIG. 26D illustrates the complementarity of the nucleotide sequence of FOXF1 BINDING SITE, designated SEQ ID:844404, to the nucleotide sequence of GAM26 RNA of FIG. 26A, designated SEQ ID:20604.

[2006] An additional function of GAM26 is therefore inhibition of forkhead box F1 (FOXF1), a gene which encodes a transcripition factor that is a probable transcription activator for a number of lung-specific genes. Accordingly, utilities of GAM26 include diagnosis and treatment of the abovementioned diseases and clinical conditions. The function and utilities of FOXF1 have been established by previous studies, as described hereinabove with reference to FIG. 26D.

[2007] Reference is now made to CHIC2 BINDING SITE. cystein-rich hydrophobic domain 2 (CHIC2) is a target gene of GAM26, corresponding to GAM26-TARGET GENE of FIG. 26A. CHIC2 BINDING SITE is a binding site found in an untranslated region of CHIC2, corresponding to BINDING SITE of FIG. 26A. FIG. 26D illustrates the complementarity of the nucleotide sequence of CHIC2 BINDING SITE, designated SEQ ID:893635, to the nucleotide sequence of GAM26 RNA of FIG. 26A, designated SEQ ID:20604.

[2008] A further function of GAM26 is therefore inhibition of cystein-rich hydrophobic domain 2 (CHIC2), a gene which encodes a Protein that is a Cysteine-rich hydrophobic protein 2. and is associated with acute myeloid leukemia. Accordingly, utilities of GAM26 include diagnosis and treatment of the abovementioned diseases and clinical conditions.

[2009] The function of CHIC2 has been established by previous studies. The ETV6 gene (600618), also known as TEL, is the main target of chromosomal translocations affecting 12p13. The rearrangements fuse ETV6 to a wide variety of partner genes in both myeloid and lymphoid malignancies. Cools et al. (1999) reported 4 cases of acute myeloid leukemia with very immature myeloblasts and a t(4;12)(q11-q12;p13). In all cases, ETV6 was found to be recombined with a novel gene homologous to the mouse Brx gene; the authors therefore named the gene ‘Brx-like translocated in leukemia,’ or BTL. RT-PCR experiments indicated that expression of the BTL-ETV6 transcript but not of the reciprocal ETV6-BTL transcript is a common finding in these leukemias. In contrast to most of the other ETV6 fusions, both the complete helix-loop-helix and ETS DNA-binding domains of ETV6 are present in the predicted BTL-ETV6 fusion protein, and a chimeric gene is transcribed from the BTL promoter.

[2010] Full details of the abovementioned studies are described in the following publications, the disclosure of which are hereby incorporated by reference:

[2011] ools, J.; Bilhou-Nabera, C.; Wlodarska, I.; Cabrol, C.; Talmant, P.; Bernard, P.; Hagemeijer, A.; Marynen, P.: Fusion of a novel gene, BTL, to ETV6 in acute myeloid leukemias with a t(4;12)(q11-q12;p13). Blood 94: 1820-1824, 1999.

[2012] Further studies establishing the function and utilities of CHIC2 are found in John Hopkins OMIM database record ID 604332, and in references numbered 1575 listed hereinbelow.

[2013] Referring now to MAP4K5 BINDING SITE. mitogen-activated protein kinase kinase kinase kinase 5 (MAP4K5) is a target gene of GAM26, corresponding to GAM26-TARGET GENE of FIG. 26A. MAP4K5 BINDING SITE is a binding site found in an untranslated region of MAP4K5, corresponding to BINDING SITE of FIG. 26A. FIG. 26D illustrates the complementarity of the nucleotide sequence of MAP4K5 BINDING SITE, designated SEQ ID:918189, to the nucleotide sequence of GAM26 RNA of FIG. 26A, designated SEQ ID:20604.

[2014] Yet a further function of GAM26 is therefore inhibition of mitogen-activated protein kinase kinase kinase kinase 5 (MAP4K5), a gene which encodes a Enzyme that is a serine/threonine protein kinase required for spore wall development. activates Jun N-terminal kinase; member of the STE20 kinase family. Accordingly, utilities of GAM26 include diagnosis and treatment of the abovementioned diseases and clinical conditions. The function and utilities of MAP4K5 have been established by previous studies, as described hereinabove with reference to FIG. 26D.

[2015] Referring now to ATP2B2 BINDING SITE. ATPase, Ca++ transporting, plasma membrane 2 (NOTE: redefinition of sy (ATP2B2) is a target gene of GAM26, corresponding to GAM26-TARGET GENE of FIG. 26A. ATP2B2 BINDING SITE is a binding site found in an untranslated region of ATP2B2, corresponding to BINDING SITE of FIG. 26A. FIG. 26D illustrates the complementarity of the nucleotide sequence of ATP2B2 BINDING SITE, designated SEQ ID:947819, to the nucleotide sequence of GAM26 RNA of FIG. 26A, designated SEQ ID:20604.

[2016] Another function of GAM26 is therefore inhibition of ATPase, Ca++ transporting, plasma membrane 2 (NOTE: redefinition of sy (ATP2B2), a gene which encodes a Enzyme that catalyzes the hydrolysis of ATP coupled with the transport of calcium out of the cell. Accordingly, utilities of GAM26 include diagnosis and treatment of the abovementioned diseases and clinical conditions. The function and utilities of ATP2B2 have been established by previous studies, as described hereinabove with reference to FIG. 26D.

[2017] Referring now to SERPINB8 BINDING SITE. serine (or cysteine) proteinase inhibitor, clade B (ovalbumin), member (SERPINB8) is a target gene of GAM26, corresponding to GAM26-TARGET GENE of FIG. 26A. SERPINB8 BINDING SITE is a binding site found in an untranslated region of SERPINB8, corresponding to BINDING SITE of FIG. 26A. FIG. 26D illustrates the complementarity of the nucleotide sequence of SERPINB8 BINDING SITE, designated SEQ ID:950359, to the nucleotide sequence of GAM26 RNA of FIG. 26A, designated SEQ ID:20604.

[2018] Yet another function of GAM26 is therefore inhibition of serine (or cysteine) proteinase inhibitor, clade B (ovalbumin), member (SERPINB8), a gene which encodes a Protein that protease inhibitors; may be a serpin serine protease inhibitor that binds thrombin. Accordingly, utilities of GAM26 include diagnosis and treatment of the abovementioned diseases and clinical conditions. The function and utilities of SERPINB8 have been established by previous studies, as described hereinabove with reference to FIG. 26D.

[2019] Referring now to SERPINB8 BINDING SITE. serine (or cysteine) proteinase inhibitor, clade B (ovalbumin), member (SERPINB8) is a target gene of GAM26, corresponding to GAM26-TARGET GENE of FIG. 26A. SERPINB8 BINDING SITE is a binding site found in an untranslated region of SERPINB8, corresponding to BINDING SITE of FIG. 26A. FIG. 26D illustrates the complementarity of the nucleotide sequence of SERPINB8 BINDING SITE, designated SEQ ID:950360, to the nucleotide sequence of GAM26 RNA of FIG. 26A, designated SEQ ID:20604.

[2020] An additional function of GAM26 is therefore inhibition of serine (or cysteine) proteinase inhibitor, clade B (ovalbumin), member (SERPINB8), a gene which encodes a Protein that protease inhibitors; may be a serpin serine protease inhibitor that binds thrombin. Accordingly, utilities of GAM26 include diagnosis and treatment of the abovementioned diseases and clinical conditions. The function and utilities of SERPINB8 have been established by previous studies, as described hereinabove with reference to FIG. 26D.

[2021] Referring now to FOXF1 BINDING SITE. forkhead box F1 (FOXF1) is a target gene of GAM26, corresponding to GAM26-TARGET GENE of FIG. 26A. FOXF1 BINDING SITE is a binding site found in an untranslated region of FOXF1, corresponding to BINDING SITE of FIG. 26A. FIG. 26D illustrates the complementarity of the nucleotide sequence of FOXF1 BINDING SITE, designated SEQ ID:969275, to the nucleotide sequence of GAM26 RNA of FIG. 26A, designated SEQ ID:20604.

[2022] A further function of GAM26 is therefore inhibition of forkhead box F1 (FOXF1), a gene which encodes a transcripition factor that is a probable transcription activator for a number of lung-specific genes. Accordingly, utilities of GAM26 include diagnosis and treatment of the abovementioned diseases and clinical conditions. The function and utilities of FOXF1 have been established by previous studies, as described hereinabove with reference to FIG. 26D.

[2023] Reference is now made to MMP2 BINDING SITE. matrix metalloproteinase 2 (gelatinase A, 72 kD gelatinase, 72 kD type I (MMP2) is a target gene of GAM26, corresponding to GAM26-TARGET GENE of FIG. 26A. MMP2 BINDING SITE is a binding site found in an untranslated region of MMP2, corresponding to BINDING SITE of FIG. 26A. FIG. 26D illustrates the complementarity of the nucleotide sequence of MMP2 BINDING SITE, designated SEQ ID:969275, to the nucleotide sequence of GAM26 RNA of FIG. 26A, designated SEQ ID:20604.

[2024] Yet a further function of GAM26 is therefore inhibition of matrix metalloproteinase 2 (gelatinase A, 72 kD gelatinase, 72 kD type I (MMP2), a gene which encodes a Enzyme that prevents trom binding to alpha-V/beta-3 and blocks cell surface collagenolytic activity and is associated with OSTEOLYSIS, IDIOPATHIC. Accordingly, utilities of GAM26 include diagnosis and treatment of the abovementioned diseases and clinical conditions.

[2025] The function of MMP2 has been established by previous studies. Angiogenesis depends on both cell adhesion and proteolytic mechanisms. Matrix metalloproteinase-2 and integrin alpha-V/beta-3 are functionally associated on the surface of angiogenic blood vessels. Brooks et al. (1998) found that a fragment of MMP2, which comprises the C-terminal hemopexin-like domain (amino acids 445-635) and is termed PEX, prevents this enzyme from binding to alpha-V/beta-3 and blocks cell surface collagenolytic activity in melanoma and endothelial cells. PEX blocks MMP2 activity on, the chick chorioallantoic membrane where it disrupts angiogenesis and tumor growth. Brooks et al. (1998) also found that a naturally occurring form of PEX can be detected in vivo in conjunction with alpha-V/beta-3 expression in tumors and during developmental retinal neovascularization. Levels of PEX in these vascularized tissues suggest that it interacts with endothelial cell alpha-V/beta-3 where it serves as a natural inhibitor of MMP2 activity, thereby regulating the invasive behavior of new blood vessels. The authors concluded that recombinant PEX may provide a potentially novel therapeutic approach for diseases associated with neovascularization.

[2026] Animal model experiments lend further support to the function of MMP2. To study the role of Mmp2 in angiogenesis, Kato et al. (2001) analyzed the Mmp2-deficient mice generated by Itoh et al. (1998). To determine whether corneal vascularization was altered in Mmp2-deficient mice, they implanted basic fibroblast growth factor (FGF)-containing micropellets into the cornea of mice and observed that Mmp2-deficient mice had decreased corneal neovascularization. The angiogenetic response normally induced by basic FGF is markedly reduced in mice lacking functional Mmp2. To determine the role of Mmp2 in vascular endothelial cell migration and tube formation in vitro, the authors prepared aortic rings from Mmp2-deficient mice. They observed that Mmp2-deficient mice showed a significant reduction of endothelial outgrowth compared to wildtype mice after stimulation with basic FGF. Kato et al. (2001) concluded that Mmp2 may play an important role in the regulation of corneal angiogenesis.

[2027] It is appreciated that the abovementioned animal model for MMP2 is acknowledged by those skilled in the art as a scientifically valid animal model, as can be further appreciated from the publications sited hereinbelow.

[2028] Full details of the abovementioned studies are described in the following publications, the disclosure of which are hereby incorporated by reference:

[2029] Brooks, P. C.; Silletti, S.; von Schalscha, T. L.; Friedlander, M.; Cheresh, D. A.: Disruption of angiogenesis by PEX, a noncatalytic metalloproteinase fragment with integrin binding activity. Cell 92: 391-400, 1998 Kato, T.; Kure, T.; Chang, J.-H.; Gabison, E. E.; Itoh, T.; Itohara, S.; Azar, D. T.: Diminished corneal angiogenesis in gelatinase A-deficient mice. FEBS Lett. 508: 187-190, 2001.

[2030] Further studies establishing the function and utilities of MMP2 are found in John Hopkins OMIM database record ID 120360, and in references numbered 1576-1593 listed hereinbelow.

[2031] Referring now to CACNA1A BINDING SITE. calcium channel, voltage-dependent, P/Q type, alpha 1A subunit (CACNA1A) is a target gene of GAM26, corresponding to GAM26-TARGET GENE of FIG. 26A. CACNA1A BINDING SITE is a binding site found in an untranslated region of CACNA1A, corresponding to BINDING SITE of FIG. 26A. FIG. 26D illustrates the complementarity of the nucleotide sequence of CACNA1A BINDING SITE, designated SEQ ID:969284, to the nucleotide sequence of GAM26 RNA of FIG. 26A, designated SEQ ID:20604.

[2032] Another function of GAM26 is therefore inhibition of calcium channel, voltage-dependent, P/Q type, alpha 1A subunit (CACNA1A), a gene which encodes a Protein that is associated with episodic ataxia type 2, familial hemiplegic migraine, spinocerebellar ataxia type 6, and idiopathic generalized epilepsy,. Accordingly, utilities of GAM26 include diagnosis and treatment of the abovementioned diseases and clinical conditions. The function and utilities of CACNA1A have been established by previous studies, as described hereinabove with reference to FIG. 26D.

[2033] Referring now to CAMK4 BINDING SITE. calcium/calmodulin-dependent protein kinase IV (CAMK4) is a target gene of GAM26, corresponding to GAM26-TARGET GENE of FIG. 26A. CAMK4 BINDING SITE is a binding site found in an untranslated region of CAMK4, corresponding to BINDING SITE of FIG. 26A. FIG. 26D illustrates the complementarity of the nucleotide sequence of CAMK4 BINDING SITE, designated SEQ ID:969284, to the nucleotide sequence of GAM26 RNA of FIG. 26A, designated SEQ ID:20604.

[2034] Yet another function of GAM26 is therefore inhibition of calcium/calmodulin-dependent protein kinase IV (CAMK4), a gene which encodes a Enzyme that is a heat-stable, acidic, calmodulin-binding protein. Accordingly, utilities of GAM26 include diagnosis and treatment of the abovementioned diseases and clinical conditions. The function and utilities of CAMK4 have been established by previous studies, as described hereinabove with reference to FIG. 26D.

[2035] Referring now to FGF18 BINDING SITE. fibroblast growth factor 18 (FGF18) is a target gene of GAM26, corresponding to GAM26-TARGET GENE of FIG. 26A. FGF18 BINDING SITE is a binding site found in an untranslated region of FGF18, corresponding to BINDING SITE of FIG. 26A. FIG. 26D illustrates the complementarity of the nucleotide sequence of FGF18 BINDING SITE, designated SEQ ID:969284, to the nucleotide sequence of GAM26 RNA of FIG. 26A, designated SEQ ID:20604.

[2036] An additional function of GAM26 is therefore inhibition of fibroblast growth factor 18 (FGF18), a gene which encodes a Protein that stimulates hepatic and intestinal proliferation. Accordingly, utilities of GAM26 include diagnosis and treatment of the abovementioned diseases and clinical conditions. The function and utilities of FGF18 have been established by previous studies, as described hereinabove with reference to FIG. 26D.

[2037] Referring now to RGS19IP1 BINDING SITE. (RGS19IP1) is a target gene of GAM26, corresponding to GAM26-TARGET GENE of FIG. 26A. RGS19IP1 BINDING SITE is a binding site found in an untranslated region of RGS19IP1, corresponding to BINDING SITE of FIG. 26A. FIG. 26D illustrates the complementarity of the nucleotide sequence of RGS19IP1 BINDING SITE, designated SEQ ID:969284, to the nucleotide sequence of GAM26 RNA of FIG. 26A, designated SEQ ID:20604.

[2038] A further function of GAM26 is therefore inhibition of (RGS19IP1), a gene which encodes a Protein that is involved in g protein-linked signaling. Accordingly, utilities of GAM26 include diagnosis and treatment of the abovementioned diseases and clinical conditions. The function and utilities of RGS19IP1 have been established by previous studies, as described hereinabove with reference to FIG. 26D.

[2039] Referring now to LRP8 BINDING SITE. low density lipoprotein receptor-related protein 8, apolipoprotein e r (LRP8) is a target gene of GAM26, corresponding to GAM26-TARGET GENE of FIG. 26A. LRP8 BINDING SITE is a binding site found in an untranslated region of LRP8, corresponding to BINDING SITE of FIG. 26A. FIG. 26D illustrates the complementarity of the nucleotide sequence of LRP8 BINDING SITE, designated SEQ ID:969288, to the nucleotide sequence of GAM26 RNA of FIG. 26A, designated SEQ ID:20604.

[2040] Yet a further function of GAM26 is therefore inhibition of low density lipoprotein receptor-related protein 8, apolipoprotein e r (LRP8), a gene which encodes a receptor that binds vldl and transports it into cells by endocytosis. Accordingly, utilities of GAM26 include diagnosis and treatment of the abovementioned diseases and clinical conditions. The function and utilities of LRP8 have been established by previous studies, as described hereinabove with reference to FIG. 26D.

[2041] Referring now to REPS2 BINDING SITE. RALBP1 associated Eps domain containing 2 (REPS2) is a target gene of GAM26, corresponding to GAM26-TARGET GENE of FIG. 26A. REPS2 BINDING SITE is a binding site found in an untranslated region of REPS2, corresponding to BINDING SITE of FIG. 26A. FIG. 26D illustrates the complementarity of the nucleotide sequence of REPS2 BINDING SITE, designated SEQ ID:969288, to the nucleotide sequence of GAM26 RNA of FIG. 26A, designated SEQ ID:20604.

[2042] Another function of GAM26 is therefore inhibition of RALBP1 associated Eps domain containing 2 (REPS2), a gene which encodes a Protein that interacts with the active form of RAS with adaptor protein GRB2 and binds calcium. Accordingly, utilities of GAM26 include diagnosis and treatment of the abovementioned diseases and clinical conditions. The function and utilities of REPS2 have been established by previous studies, as described hereinabove with reference to FIG. 26D.

[2043] Reference is now made to CRAT BINDING SITE. camitine acetyltransferase (CRAT) is a target gene of GAM26, corresponding to GAM26-TARGET GENE of FIG. 26A. CRAT BINDING SITE is a binding site found in an untranslated region of CRAT, corresponding to BINDING SITE of FIG. 26A. FIG. 26D illustrates the complementarity of the nucleotide sequence of CRAT BINDING SITE, designated SEQ ID:982983, to the nucleotide sequence of GAM26 RNA of FIG. 26A, designated SEQ ID:20604.

[2044] Yet another function of GAM26 is therefore inhibition of carnitine acetyltransferase (CRAT), a gene which encodes a Enzyme that catalyzes the reversible transfer of acyl groups from an acyl-CoA thioester to camitine. and is associated with Alzheimer's disease. Accordingly, utilities of GAM26 include diagnosis and treatment of the abovementioned diseases and clinical conditions.

[2045] The function of CRAT has been established by previous studies. Carnitine acyltransferases are a group of enzymes that catalyze the reversible transfer of acyl groups from an acyl-CoA thioester to carnitine, thus forming the corresponding acylcarnitine. These enzymes can be distinguished according to their substrate specificity in carnitine palmitoyltransferase (see CPT1, 600528 and CPT2, 600650), camitine octanoyltransferase (CROT; 606090), and carnitine acetyltransferase (EC 2.3.1.7). CRAT is a key enzyme for metabolic pathways involved with the control of the acyl-CoA/CoA ratio in mitochondria, peroxisomes, and endoplasmic reticulum Acetylcarnitine, which can be a precursor for acetylcholine synthesis catalyzed by choline acetyltransferase, is thought to slow the rate of mental deterioration in Alzheimer patients, and Kalaria and Harik (1992) found decreased function of CRAT in the brain of Alzheimer patients

[2046] Full details of the abovementioned studies are described in the following publications, the disclosure of which are hereby incorporated by reference:

[2047] Kalaria, R. N.; Harik, S. I.: Carnitine acetyltransferase activity in the human brain and its microvessels is decreased in Alzheimer's disease. Ann. Neurol. 32: 583-586, 1992. PubMed ID: 1456745 3. van der Leij, F. R.; Huijkman, N.C. A.; Boomsma, C.; Kuipers, J. R. G.; Bartelds, B.: Genomics of the human carnitine acyltransferase genes. Molec. Genet. Metab. 71: 139-153, 2000

[2048] Further studies establishing the function and utilities of CRAT are found in John Hopkins OMIM database record ID 600184, and in references numbered 1594-1596 listed hereinbelow.

[2049] Referring now to PX19 BINDING SITE. (PX19) is a target gene of GAM26, corresponding to GAM26-TARGET GENE of FIG. 26A. PX19 BINDING SITE is a binding site found in an untranslated region of PX19, corresponding to BINDING SITE of FIG. 26A. FIG. 26D illustrates the complementarity of the nucleotide sequence of PX19 BINDING SITE, designated SEQ ID:993966, to the nucleotide sequence of GAM26 RNA of FIG. 26A, designated SEQ ID:20604.

[2050] An additional function of GAM26 is therefore inhibition of (PX19), a gene which encodes a Protein that plays a role in hemopoiesis. Accordingly, utilities of GAM26 include diagnosis and treatment of the abovementioned diseases and clinical conditions. The function and utilities of PX19 have been established by previous studies, as described hereinabove with reference to FIG. 26D.

[2051] Reference is now made to ADAM10 BINDING SITE. a disintegrin and metalloproteinase domain 10 (ADAM10) is a target gene of GAM26, corresponding to GAM26-TARGET GENE of FIG. 26A. ADAM10 BINDING SITE is a binding site found in an untranslated region of ADAM10, corresponding to BINDING SITE of FIG. 26A. FIG. 26D illustrates the complementarity of the nucleotide sequence of ADAM10 BINDING SITE, designated SEQ ID:993970, to the nucleotide sequence of GAM26 RNA of FIG. 26A, designated SEQ ID:20604.

[2052] A further function of GAM26 is therefore inhibition of a disintegrin and metalloproteinase domain 10 (ADAM10), a gene which encodes a Enzyme that Member of ADAM family of zinc metalloproteases. Accordingly, utilities of GAM26 include diagnosis and treatment of the abovementioned diseases and clinical conditions.

[2053] The function of ADAM10 has been established by previous studies. Wolfsberg et al. (1995) identified a family of proteins containing a disintegrin and metalloproteinase (ADAM) domain. Members of this family are cell surface proteins with a unique structure possessing both potential adhesion and protease domains. Tumor necrosis factor-alpha (TNFA; 191160) is synthesized as a proinflammatory cytokine from a 233-amino acid precursor. Conversion of the membrane-bound precursor to a secreted mature protein is mediated by a protease termed TNFA convertase. Lunn et al. (1997) found that ADAM10 possesses TNFA convertase activity. TNFA is involved in a variety of diseases. To elucidate whether the ADAM10 locus maps to the same region as a disease susceptibility, Yamazaki et al. (1997) mapped the ADAM10 locus. Using a radiation hybrid mapping method, they showed that ADAM10 is located on 15q21.3-q23. Although ephrins form a high-affinity multivalent complex with their receptors present on axons, axons can be rapidly repelled rather than being bound. Hattori et al. (2000) showed that ephrin-A2 (602756) forms a stable complex with the metalloproteinase Kuzbanian (ADAM10) involving interactions outside the cleavage region and the protease domain. Eph receptor binding triggered ephrin-A2 cleavage in a localized reaction specific to the cognate ligand. The cleavage-inhibiting mutation in ephrin-A2 delayed axon withdrawal. Hattori et al. (2000) concluded that their studies reveal mechanisms for protease recognition and control of cell surface proteins, and, for ephrin-A2, they may provide a means for efficient axon detachment and termination of signaling.

[2054] Full details of the abovementioned studies are described in the following publications, the disclosure of which are hereby incorporated by reference:

[2055] unn, C. A.; Fan, X.; Dalie, B.; Miller, K.; Zavodny, P. J.; Narula, S. K.; Lundell, D.: Purification of ADAM 10 from bovine spleen as a TNFalpha convertase. FEBS Lett. 400: 333-335, 1997. PubMed ID: 9009225 1. Hattori, M.; Osterfield, M.; Flanagan, J. G.: Regulated cleavage of a contact-mediated axon repellent. Science 289: 1360-1365, 2000.

[2056] Further studies establishing the function and utilities of ADAM10 are found in John Hopkins OMIM database record ID 602192, and in references numbered 1597-1600 listed hereinbelow.

[2057] Referring now to REPS2 BINDING SITE. RALBP1 associated Eps domain containing 2 (REPS2) is a target gene of GAM26, corresponding to GAM26-TARGET GENE of FIG. 26A. REPS2 BINDING SITE is a binding site found in an untranslated region of REPS2, corresponding to BINDING SITE of FIG. 26A. FIG. 26D illustrates the complementarity of the nucleotide sequence of REPS2 BINDING SITE, designated SEQ ID:993970, to the nucleotide sequence of GAM26 RNA of FIG. 26A, designated SEQ ID:20604.

[2058] Yet a further function of GAM26 is therefore inhibition of RALBP1 associated Eps domain containing 2 (REPS2), a gene which encodes a Protein that interacts with the active form of RAS with adaptor protein GRB2 and binds calcium. Accordingly, utilities of GAM26 include diagnosis and treatment of the abovementioned diseases and clinical conditions. The function and utilities of REPS2 have been established by previous studies, as described hereinabove with reference to FIG. 26D.

[2059] Reference is now made to EXTL3 BINDING SITE. exostoses (multiple)-like 3 (EXTL3) is a target gene of GAM26, corresponding to GAM26-TARGET GENE of FIG. 26A. EXTL3 BINDING SITE is a binding site found in an untranslated region of EXTL3, corresponding to BINDING SITE of FIG. 26A. FIG. 26D illustrates the complementarity of the nucleotide sequence of EXTL3 BINDING SITE, designated SEQ ID:1065873, to the nucleotide sequence of GAM26 RNA of FIG. 26A, designated SEQ ID:20604.

[2060] Another function of GAM26 is therefore inhibition of exostoses (multiple)-like 3 (EXTL3), a gene which encodes a Protein that a member of the multiple exostoses gene family. Accordingly, utilities of GAM26 include diagnosis and treatment of the abovementioned diseases and clinical conditions.

[2061] The function of EXTL3 has been established by previous studies. By EST database searching with the sequences of EXT1 (133700), EXT2 (133701), and EXTL1 (601738), followed by 5-prime and 3-prime RACE, Saito et al. (1998) cloned full-length cDNAs for 2 new members of the EXT family, EXTL2 (602411) and EXTL3, which they called EXTR2 and EXTR1, respectively. The deduced 919-amino acid EXTL3 protein contains a highly conserved region in the C terminus common to other EXT proteins. Northern blot analysis detected expression of 6.2- and 4.7-kb EXTR1 transcripts in all tissues tested except ovary. The larger transcript was predominant in brain, skeletal muscle, and testis, and the shorter transcript in heart, liver, thymus, and prostate. Kobayashi et al. (2000) isolated a cDNA for a REG protein (see 167770) receptor from a rat islet cDNA library. Cells into which the cDNA had been introduced bound REG protein with high affinity. When the cDNA was introduced into a pancreatic beta-cell line that showed REG-dependent growth, the transformants exhibited a significant increase in the incorporation of 5-prime-bromo-2-prime-deoxyuridine as well as in the cell numbers in response to REG protein. A homology search revealed that the rat REG protein receptor cDNA is a homolog of EXTL3. The rat and human proteins share 97% sequence identity. Kobayashi et al. (2000) found that REG receptor mRNA in the rat is detectable in liver, kidney, stomach, small intestine, colon, adrenal gland, pituitary gland, and brain, but not in heart, suggesting the possible involvement of the REG-REG protein receptor signal system in a variety of cell types other than pancreatic beta cells. By somatic cell hybrid and radiation hybrid analyses, Saito et al. (1998) mapped the human EXTL3 gene to chromosome 8p21. By FISH, radiation hybrid analysis, and inclusion within a mapped contig, Van Hul et al. (1998) mapped the gene to 8p21-p12.

[2062] Full details of the abovementioned studies are described in the following publications, the disclosure of which are hereby incorporated by reference:

[2063] aito, T.; Seki, N.; Yamauchi, M.; Tsuji, S.; Hayashi, A.; Kozuma, S.; Hori, T.: Structure, chromosomal location, and expression profile of EXTR1 and EXTR2, new members of the multiple exostoses gene family. Biochem. Biophys. Res. Commun. 243: 61-66, 1998. PubMed ID: 9473480 3. Van Hul, W.; Wuyts, W.; Hendrickx, J.; Speleman, F.; Wauters, J.; De Boulle, K.; Van Roy, N.; Bossuyt, P.; Willems, P. J.: Identification of a third EXT-like gene (EXTL3) belonging to the EXT gene family. Genomics 47: 230-237, 1998.

[2064] Further studies establishing the function and utilities of EXTL3 are found in John Hopkins OMIM database record ID 605744, and in references numbered 1601-1603 listed hereinbelow.

[2065] Referring now to CAMK4 BINDING SITE. calcium/calmodulin-dependent protein kinase IV (CAMK4) is a target gene of GAM26, corresponding to GAM26-TARGET GENE of FIG. 26A. CAMK4 BINDING SITE is a binding site found in an untranslated region of CAMK4, corresponding to BINDING SITE of FIG. 26A. FIG. 26D illustrates the complementarity of the nucleotide sequence of CAMK4 BINDING SITE, designated SEQ ID:1295963, to the nucleotide sequence of GAM26 RNA of FIG. 26A, designated SEQ ID:20604.

[2066] Yet another function of GAM26 is therefore inhibition of calcium/calmodulin-dependent protein kinase IV (CAMK4), a gene which encodes a Enzyme that is a heat-stable, acidic, calmodulin-binding protein. Accordingly, utilities of GAM26 include diagnosis and treatment of the abovementioned diseases and clinical conditions. The function and utilities of CAMK4 have been established by previous studies, as described hereinabove with reference to FIG. 26D.

[2067] Referring now to EXTL3 BINDING SITE. exostoses (multiple)-like 3 (EXTL3) is a target gene of GAM26, corresponding to GAM26-TARGET GENE of FIG. 26A. EXTL3 BINDING SITE is a binding site found in an untranslated region of EXTL3, corresponding to BINDING SITE of FIG. 26A. FIG. 26D illustrates the complementarity of the nucleotide sequence of EXTL3 BINDING SITE, designated SEQ ID: 1310953, to the nucleotide sequence of GAM26 RNA of FIG. 26A, designated SEQ ID:20604.

[2068] An additional function of GAM26 is therefore inhibition of exostoses (multiple)-like 3 (EXTL3), a gene which encodes a Protein that a member of the multiple exostoses gene family. Accordingly, utilities of GAM26 include diagnosis and treatment of the abovementioned diseases and clinical conditions. The function and utilities of EXTL3 have been established by previous studies, as described hereinabove with reference to FIG. 26D.

[2069] Referring now to REPS2 BINDING SITE. RALBP1 associated Eps domain containing 2 (REPS2) is a target gene of GAM26, corresponding to GAM26-TARGET GENE of FIG. 26A. REPS2 BINDING SITE is a binding site found in an untranslated region of REPS2, corresponding to BINDING SITE of FIG. 26A. FIG. 26D illustrates the complementarity of the nucleotide sequence of REPS2 BINDING SITE, designated SEQ ID:1323750, to the nucleotide sequence of GAM26 RNA of FIG. 26A, designated SEQ ID:20604.

[2070] A further function of GAM26 is therefore inhibition of RALBP1 associated Eps domain containing 2 (REPS2), a gene which encodes a Protein that interacts with the active form of RAS with adaptor protein GRB2 and binds calcium. Accordingly, utilities of GAM26 include diagnosis and treatment of the abovementioned diseases and clinical conditions. The function and utilities of REPS2 have been established by previous studies, as described hereinabove with reference to FIG. 26D.

[2071] Reference is now made to FAF1 BINDING SITE. FAF1 is a target gene of GAM26, corresponding to GAM26-TARGET GENE of FIG. 26A. FAF1 BINDING SITE is a binding site found in an untranslated region of FAF1, corresponding to BINDING SITE of FIG. 26A. FIG. 26D illustrates the complementarity of the nucleotide sequence of FAF1 BINDING SITE, designated SEQ ID:46198, to the nucleotide sequence of GAM26 RNA of FIG. 26A, designated SEQ ID:20604. Yet a further function of GAM26 is therefore inhibition of (FAF1). Accordingly, utilities of GAM26 include diagnosis and treatment of diseases and clinical conditions with which FAF1 is associated.

[2072] Reference is now made to FLJ12377 BINDING SITE. FLJ12377 is a target gene of GAM26, corresponding to GAM26-TARGET GENE of FIG. 26A. FLJ12377 BINDING SITE is a binding site found in an untranslated region of FLJ12377, corresponding to BINDING SITE of FIG. 26A. FIG. 26D illustrates the complementarity of the nucleotide sequence of FLJ12377 BINDING SITE, designated SEQ ID:46198, to the nucleotide sequence of GAM26 RNA of FIG. 26A, designated SEQ ID:20604. Another function of GAM26 is therefore inhibition of (FLJI2377). Accordingly, utilities of GAM26 include diagnosis and treatment of diseases and clinical conditions with which FLJ12377 is associated.

[2073] Reference is now made to CHSY1 BINDING SITE. CHSY1 is a target gene of GAM26, corresponding to GAM26-TARGET GENE of FIG. 26A. CHSY1 BINDING SITE is a binding site found in an untranslated region of CHSY1, corresponding to BINDING SITE of FIG. 26A. FIG. 26D illustrates the complementarity of the nucleotide sequence of CHSY1 BINDING SITE, designated SEQ ID:94853, to the nucleotide sequence of GAM26 RNA of FIG. 26A, designated SEQ ID:20604. Yet another function of GAM26 is therefore inhibition of (CHSY1). Accordingly, utilities of GAM26 include diagnosis and treatment of diseases and clinical conditions with which CHSY1 is associated.

[2074] Reference is now made to CHSY1 BINDING SITE. CHSY1 is a target gene of GAM26, corresponding to GAM26-TARGET GENE of FIG. 26A. CHSY1 BINDING SITE is a binding site found in an untranslated region of CHSY1, corresponding to BINDING SITE of FIG. 26A. FIG. 26D illustrates the complementarity of the nucleotide sequence of CHSY1 BINDING SITE, designated SEQ ID:94853, to the nucleotide sequence of GAM26 RNA of FIG. 26A, designated SEQ ID:20604. An additional function of GAM26 is therefore inhibition of (CHSY1). Accordingly, utilities of GAM26 include diagnosis and treatment of diseases and clinical conditions with which CHSY1 is associated.

[2075] Reference is now made to FLJ21588 BINDING SITE. FLJ21588 is a target gene of GAM26, corresponding to GAM26-TARGET GENE of FIG. 26A. FLJ21588 BINDING SITE is a binding site found in an untranslated region of FLJ21588, corresponding to BINDING SITE of FIG. 26A. FIG. 26D illustrates the complementarity of the nucleotide sequence of FLJ21588 BINDING SITE, designated SEQ ID:94853, to the nucleotide sequence of GAM26 RNA of FIG. 26A, designated SEQ ID:20604. A further function of GAM26 is therefore inhibition of (FLJ21588). Accordingly, utilities of GAM26 include diagnosis and treatment of diseases and clinical conditions with which FLJ21588 is associated.

[2076] Reference is now made to MGC10702 BINDING SITE. MGC10702 is a target gene of GAM26, corresponding to GAM26-TARGET GENE of FIG. 26A. MGC10702 BINDING SITE is a binding site found in an untranslated region of MGC10702, corresponding to BINDING SITE of FIG. 26A. FIG. 26D illustrates the complementarity of the nucleotide sequence of MGC10702 BINDING SITE, designated SEQ ID:94853, to the nucleotide sequence of GAM26 RNA of FIG. 26A, designated SEQ ID:20604. Yet a further function of GAM26 is therefore inhibition of (MGC10702). Accordingly, utilities of GAM26 include diagnosis and treatment of diseases and clinical conditions with which MGC10702 is associated.

[2077] Reference is now made to QKI BINDING SITE. QKI is a target gene of GAM26, corresponding to GAM26-TARGET GENE of FIG. 26A. QKI BINDING SITE is a binding site found in an untranslated region of QKI, corresponding to BINDING SITE of FIG. 26A. FIG. 26D illustrates the complementarity of the nucleotide sequence of QKI BINDING SITE, designated SEQ ID:94853, to the nucleotide sequence of GAM26 RNA of FIG. 26A, designated SEQ ID:20604. Another function of GAM26 is therefore inhibition of (QKI). Accordingly, utilities of GAM26 include diagnosis and treatment of diseases and clinical conditions with which QKI is associated.

[2078] Reference is now made to STK39 BINDING SITE. STK39 is a target gene of GAM26, corresponding to GAM26-TARGET GENE of FIG. 26A. STK39 BINDING SITE is a binding site found in an untranslated region of STK39, corresponding to BINDING SITE of FIG. 26A. FIG. 26D illustrates the complementarity of the nucleotide sequence of STK39 BINDING SITE, designated SEQ ID:94853, to the nucleotide sequence of GAM26 RNA of FIG. 26A, designated SEQ ID:20604. Yet another function of GAM26 is therefore inhibition of (STK39). Accordingly, utilities of GAM26 include diagnosis and treatment of diseases and clinical conditions with which STK39 is associated.

[2079] Reference is now made to STK39 BINDING SITE. STK39 is a target gene of GAM26, corresponding to GAM26-TARGET GENE of FIG. 26A. STK39 BINDING SITE is a binding site found in an untranslated region of STK39, corresponding to BINDING SITE of FIG. 26A. FIG. 26D illustrates the complementarity of the nucleotide sequence of STK39 BINDING SITE, designated SEQ ID:94853, to the nucleotide sequence of GAM26 RNA of FIG. 26A, designated SEQ ID:20604. An additional function of GAM26 is therefore inhibition of (STK39). Accordingly, utilities of GAM26 include diagnosis and treatment of diseases and clinical conditions with which STK39 is associated.

[2080] Reference is now made to STK39 BINDING SITE. STK39 is a target gene of GAM26, corresponding to GAM26-TARGET GENE of FIG. 26A. STK39 BINDING SITE is a binding site found in an untranslated region of STK39, corresponding to BINDING SITE of FIG. 26A. FIG. 26D illustrates the complementarity of the nucleotide sequence of STK39 BINDING SITE, designated SEQ ID:94853, to the nucleotide sequence of GAM26 RNA of FIG. 26A, designated SEQ ID:20604. A further function of GAM26 is therefore inhibition of (STK39). Accordingly, utilities of GAM26 include diagnosis and treatment of diseases and clinical conditions with which STK39 is associated.

[2081] Reference is now made to FLJ10996 BINDING SITE. FLJ10996 is a target gene of GAM26, corresponding to GAM26-TARGET GENE of FIG. 26A. FLJ10996 BINDING SITE is a binding site found in an untranslated region of FLJ10996, corresponding to BINDING SITE of FIG. 26A. FIG. 26D illustrates the complementarity of the nucleotide sequence of FLJ10996 BINDING SITE, designated SEQ ID:94860, to the nucleotide sequence of GAM26 RNA of FIG. 26A, designated SEQ ID:20604. Yet a further function of GAM26 is therefore inhibition of (FLJ10996). Accordingly, utilities of GAM26 include diagnosis and treatment of diseases and clinical conditions with which FLJ10996 is associated.

[2082] Reference is now made to FLJ21588 BINDING SITE. FLJ21588 is a target gene of GAM26, corresponding to GAM26-TARGET GENE of FIG. 26A. FLJ21588 BINDING SITE is a binding site found in an untranslated region of FLJ21588, corresponding to BINDING SITE of FIG. 26A. FIG. 26D illustrates the complementarity of the nucleotide sequence of FLJ21588 BINDING SITE, designated SEQ ID:94860, to the nucleotide sequence of GAM26 RNA of FIG. 26A, designated SEQ ID:20604. Another function of GAM26 is therefore inhibition of (FLJ21588). Accordingly, utilities of GAM26 include diagnosis and treatment of diseases and clinical conditions with which FLJ21588 is associated.

[2083] Reference is now made to MGC4796 BINDING SITE. MGC4796 is a target gene of GAM26, corresponding to GAM26-TARGET GENE of FIG. 26A. MGC4796 BINDING SITE is a binding site found in an untranslated region of MGC4796, corresponding to BINDING SITE of FIG. 26A. FIG. 26D illustrates the complementarity of the nucleotide sequence of MGC4796 BINDING SITE, designated SEQ ID:94860, to the nucleotide sequence of GAM26 RNA of FIG. 26A, designated SEQ ID:20604. Yet another function of GAM26 is therefore inhibition of (MGC4796). Accordingly, utilities of GAM26 include diagnosis and treatment of diseases and clinical conditions with which MGC4796 is associated.

[2084] Reference is now made to OATPRP4 BINDING SITE. OATPRP4 is a target gene of GAM26, corresponding to GAM26-TARGET GENE of FIG. 26A. OATPRP4 BINDING SITE is a binding site found in an untranslated region of OATPRP4, corresponding to BINDING SITE of FIG. 26A. FIG. 26D illustrates the complementarity of the nucleotide sequence of OATPRP4 BINDING SITE, designated SEQ ID:163380, to the nucleotide sequence of GAM26 RNA of FIG. 26A, designated SEQ ID:20604. An additional function of GAM26 is therefore inhibition of (OATPRP4). Accordingly, utilities of GAM26 include diagnosis and treatment of diseases and clinical conditions with which OATPRP4 is associated.

[2085] Reference is now made to FLJ10996 BINDING SITE. FLJ10996 is a target gene of GAM26, corresponding to GAM26-TARGET GENE of FIG. 26A. FLJ10996 BINDING SITE is a binding site found in an untranslated region of FLJ10996, corresponding to BINDING SITE of FIG. 26A. FIG. 26D illustrates the complementarity of the nucleotide sequence of FLJ10996 BINDING SITE, designated SEQ ID: 167722, to the nucleotide sequence of GAM26 RNA of FIG. 26A, designated SEQ ID:20604. A further function of GAM26 is therefore inhibition of (FLJ10996). Accordingly, utilities of GAM26 include diagnosis and treatment of diseases and clinical conditions with which FLJ10996 is associated.

[2086] Reference is now made to KIAA1483 BINDING SITE. KIAA1483 is a target gene of GAM26, corresponding to GAM26-TARGET GENE of FIG. 26A. KIAA1483 BINDING SITE is a binding site found in an untranslated region of KIAA1483, corresponding to BINDING SITE of FIG. 26A. FIG. 26D illustrates the complementarity of the nucleotide sequence of KIAA1483 BINDING SITE, designated SEQ ID:193594, to the nucleotide sequence of GAM26 RNA of FIG. 26A, designated SEQ ID:20604. Yet a further function of GAM26 is therefore inhibition of (KIAA1483). Accordingly, utilities of GAM26 include diagnosis and treatment of diseases and clinical conditions with which KIAA1483 is associated.

[2087] Reference is now made to FLJ20539 BINDING SITE. FLJ20539 is a target gene of GAM26, corresponding to GAM26-TARGET GENE of FIG. 26A. FLJ20539 BINDING SITE is a binding site found in an untranslated region of FLJ20539, corresponding to BINDING SITE of FIG. 26A. FIG. 26D illustrates the complementarity of the nucleotide sequence of FLJ20539 BINDING SITE, designated SEQ ID:241978, to the nucleotide sequence of GAM26 RNA of FIG. 26A, designated SEQ ID:20604. Another function of GAM26 is therefore inhibition of (FLJ20539). Accordingly, utilities of GAM26 include diagnosis and treatment of diseases and clinical conditions with which FLJ20539 is associated.

[2088] Reference is now made to MGC2599 BINDING SITE. MGC2599 is a target gene of GAM26, corresponding to GAM26-TARGET GENE of FIG. 26A. MGC2599 BINDING SITE is a binding site found in an untranslated region of MGC2599, corresponding to BINDING SITE of FIG. 26A. FIG. 26D illustrates the complementarity of the nucleotide sequence of MGC2599 BINDING SITE, designated SEQ ID:241978, to the nucleotide sequence of GAM26 RNA of FIG. 26A, designated SEQ ID:20604. Yet another function of GAM26 is therefore inhibition of (MGC2599). Accordingly, utilities of GAM26 include diagnosis and treatment of diseases and clinical conditions with which MGC2599 is associated.

[2089] Reference is now made to TSLL2 BINDING SITE. TSLL2 is a target gene of GAM26, corresponding to GAM26-TARGET GENE of FIG. 26A. TSLL2 BINDING SITE is a binding site found in an untranslated region of TSLL2, corresponding to BINDING SITE of FIG. 26A. FIG. 26D illustrates the complementarity of the nucleotide sequence of TSLL2 BINDING SITE, designated SEQ ID:241978, to the nucleotide sequence of GAM26 RNA of FIG. 26A, designated SEQ ID:20604. An additional function of GAM26 is therefore inhibition of (TSLL2). Accordingly, utilities of GAM26 include diagnosis and treatment of diseases and clinical conditions with which TSLL2 is associated.

[2090] Reference is now made to KIAA0995 BINDING SITE. KIAA0995 is a target gene of GAM26, corresponding to GAM26-TARGET GENE of FIG. 26A. KIAA0995 BINDING SITE is a binding site found in an untranslated region of KIAA0995, corresponding to BINDING SITE of FIG. 26A. FIG. 26D illustrates the complementarity of the nucleotide sequence of KIAA0995 BINDING SITE, designated SEQ ID:245294, to the nucleotide sequence of GAM26 RNA of FIG. 26A, designated SEQ ID:20604. A further function of GAM26 is therefore inhibition of (KIAA0995). Accordingly, utilities of GAM26 include diagnosis and treatment of diseases and clinical conditions with which KIAA0995 is associated.

[2091] Reference is now made to PMX2B BINDING SITE. PMX2B is a target gene of GAM26, corresponding to GAM26-TARGET GENE of FIG. 26A. PMX2B BINDING SITE is a binding site found in an untranslated region of PMX2B, corresponding to BINDING SITE of FIG. 26A. FIG. 26D illustrates the complementarity of the nucleotide sequence of PMX2B BINDING SITE, designated SEQ ID:245294, to the nucleotide sequence of GAM26 RNA of FIG. 26A, designated SEQ ID:20604. Yet a further function of GAM26 is therefore inhibition of (PMX2B). Accordingly, utilities of GAM26 include diagnosis and treatment of diseases and clinical conditions with which PMX2B is associated.

[2092] Reference is now made to CLSTN1 BINDING SITE. CLSTN1 is a target gene of GAM26, corresponding to GAM26-TARGET GENE of FIG. 26A. CLSTN1 BINDING SITE is a binding site found in an untranslated region of CLSTN1, corresponding to BINDING SITE of FIG. 26A. FIG. 26D illustrates the complementarity of the nucleotide sequence of CLSTN1 BINDING SITE, designated SEQ ID:324417, to the nucleotide sequence of GAM26 RNA of FIG. 26A, designated SEQ ID:20604. Another function of GAM26 is therefore inhibition of (CLSTN1). Accordingly, utilities of GAM26 include diagnosis and treatment of diseases and clinical conditions with which CLSTN1 is associated.

[2093] Reference is now made to FLJ10996 BINDING SITE. FLJ10996 is a target gene of GAM26, corresponding to GAM26-TARGET GENE of FIG. 26A. FLJ0996 BINDING SITE is a binding site found in an untranslated region of FLJ0996, corresponding to BINDING SITE of FIG. 26A. FIG. 26D illustrates the complementarity of the nucleotide sequence of FLJ10996 BINDING SITE, designated SEQ ID:324417, to the nucleotide sequence of GAM26 RNA of FIG. 26A, designated SEQ ID:20604. Yet another function of GAM26 is therefore inhibition of (FLJ10996). Accordingly, utilities of GAM26 include diagnosis and treatment of diseases and clinical conditions with which FLJ10996 is associated.

[2094] Reference is now made to MGC4170 BINDING SITE. MGC4170 is a target gene of GAM26, corresponding to GAM26-TARGET GENE of FIG. 26A. MGC4170 BINDING SITE is a binding site found in an untranslated region of MGC4170, corresponding to BINDING SITE of FIG. 26A. FIG. 26D illustrates the complementarity of the nucleotide sequence of MGC4170 BINDING SITE, designated SEQ ID:324417, to the nucleotide sequence of GAM26 RNA of FIG. 26A, designated SEQ ID:20604. An additional function of GAM26 is therefore inhibition of (MGC4170). Accordingly, utilities of GAM26 include diagnosis and treatment of diseases and clinical conditions with which MGC4170 is associated.

[2095] Reference is now made to SSBP3 BINDING SITE. SSBP3 is a target gene of GAM26, corresponding to GAM26-TARGET GENE of FIG. 26A. SSBP3 BINDING SITE is a binding site found in an untranslated region of SSBP3, corresponding to BINDING SITE of FIG. 26A. FIG. 26D illustrates the complementarity of the nucleotide sequence of SSBP3 BINDING SITE, designated SEQ ID:412156, to the nucleotide sequence of GAM26 RNA of FIG. 26A, designated SEQ ID:20604. A further function of GAM26 is therefore inhibition of (SSBP3). Accordingly, utilities of GAM26 include diagnosis and treatment of diseases and clinical conditions with which SSBP3 is associated.

[2096] Reference is now made to ADAR3 BINDING SITE. ADAR3 is a target gene of GAM26, corresponding to GAM26-TARGET GENE of FIG. 26A. ADAR3 BINDING SITE is a binding site found in an untranslated region of ADAR3, corresponding to BINDING SITE of FIG. 26A. FIG. 26D illustrates the complementarity of the nucleotide sequence of ADAR3 BINDING SITE, designated SEQ ID:436814, to the nucleotide sequence of GAM26 RNA of FIG. 26A, designated SEQ ID:20604. Yet a further function of GAM26 is therefore inhibition of (ADAR3). Accordingly, utilities of GAM26 include diagnosis and treatment of diseases and clinical conditions with which ADAR3 is associated.

[2097] Reference is now made to ADPRTL2 BINDING SITE. ADPRTL2 is a target gene of GAM26, corresponding to GAM26-TARGET GENE of FIG. 26A. ADPRTL2 BINDING SITE is a binding site found in an untranslated region of ADPRTL2, corresponding to BINDING SITE of FIG. 26A. FIG. 26D illustrates the complementarity of the nucleotide sequence of ADPRTL2 BINDING SITE, designated SEQ ID:437139, to the nucleotide sequence of GAM26 RNA of FIG. 26A, designated SEQ ID:20604. Another function of GAM26 is therefore inhibition of (ADPRTL2). Accordingly, utilities of GAM26 include diagnosis and treatment of diseases and clinical conditions with which ADPRTL2 is associated.

[2098] Reference is now made to ADPRTL2 BINDING SITE. ADPRTL2 is a target gene of GAM26, corresponding to GAM26-TARGET GENE of FIG. 26A. ADPRTL2 BINDING SITE is a binding site found in an untranslated region of ADPRTL2, corresponding to BINDING SITE of FIG. 26A. FIG. 26D illustrates the complementarity of the nucleotide sequence of ADPRTL2 BINDING SITE, designated SEQ ID:437144, to the nucleotide sequence of GAM26 RNA of FIG. 26A, designated SEQ ID:20604. Yet another function of GAM26 is therefore inhibition of (ADPRTL2). Accordingly, utilities of GAM26 include diagnosis and treatment of diseases and clinical conditions with which ADPRTL2 is associated.

[2099] Reference is now made to AKAP9 BINDING SITE. AKAP9 is a target gene of GAM26, corresponding to GAM26-TARGET GENE of FIG. 26A. AKAP9 BINDING SITE is a binding site found in an untranslated region of AKAP9, corresponding to BINDING SITE of FIG. 26A. FIG. 26D illustrates the complementarity of the nucleotide sequence of AKAP9 BINDING SITE, designated SEQ ID:439691, to the nucleotide sequence of GAM26 RNA of FIG. 26A, designated SEQ ID:20604. An additional function of GAM26 is therefore inhibition of (AKAP9). Accordingly, utilities of GAM26 include diagnosis and treatment of diseases and clinical conditions with which AKAP9 is associated.

[2100] Reference is now made to ALTE BINDING SITE. ALTE is a target gene of GAM26, corresponding to GAM26-TARGET GENE of FIG. 26A. ALTE BINDING SITE is a binding site found in an untranslated region of ALTE, corresponding to BINDING SITE of FIG. 26A. FIG. 26D illustrates the complementarity of the nucleotide sequence of ALTE BINDING SITE, designated SEQ ID:440959, to the nucleotide sequence of GAM26 RNA of FIG. 26A, designated SEQ ID:20604. A further function of GAM26 is therefore inhibition of (ALTE). Accordingly, utilities of GAM26 include diagnosis and treatment of diseases and clinical conditions with which ALTE is associated.

[2101] Reference is now made to AP1GBP1 BINDING SITE. AP1GBP1 is a target gene of GAM26, corresponding to GAM26-TARGET GENE of FIG. 26A. AP1GBP1 BINDING SITE is a binding site found in an untranslated region of AP1GBP1, corresponding to BINDING SITE of FIG. 26A. FIG. 26D illustrates the complementarity of the nucleotide sequence of AP1GBP1 BINDING SITE, designated SEQ ID:442346, to the nucleotide sequence of GAM26 RNA of FIG. 26A, designated SEQ ID:20604. Yet a further function of GAM26 is therefore inhibition of (AP1GBP1). Accordingly, utilities of GAM26 include diagnosis and treatment of diseases and clinical conditions with which AP1GBP1 is associated.

[2102] Reference is now made to AP4E1 BINDING SITE. AP4E1 is a target gene of GAM26, corresponding to GAM26-TARGET GENE of FIG. 26A. AP4E1 BINDING SITE is a binding site found in an untranslated region of AP4E1, corresponding to BINDING SITE of FIG. 26A. FIG. 26D illustrates the complementarity of the nucleotide sequence of AP4E1 BINDING SITE, designated SEQ ID:443308, to the nucleotide sequence of GAM26 RNA of FIG. 26A, designated SEQ ID:20604. Another function of GAM26 is therefore inhibition of (AP4E1). Accordingly, utilities of GAM26 include diagnosis and treatment of diseases and clinical conditions with which AP4E1 is associated.

[2103] Reference is now made to ARF6 BINDING SITE. ARF6 is a target gene of GAM26, corresponding to GAM26-TARGET GENE of FIG. 26A. ARF6 BINDING SITE is a binding site found in an untranslated region of ARF6, corresponding to BINDING SITE of FIG. 26A. FIG. 26D illustrates the complementarity of the nucleotide sequence of ARF6 BINDING SITE, designated SEQ ID:445874, to the nucleotide sequence of GAM26 RNA of FIG. 26A, designated SEQ ID:20604. Yet another function of GAM26 is therefore inhibition of (ARF6). Accordingly, utilities of GAM26 include diagnosis and treatment of diseases and clinical conditions with which ARF6 is associated.

[2104] Reference is now made to ARF6 BINDING SITE. ARF6 is a target gene of GAM26, corresponding to GAM26-TARGET GENE of FIG. 26A. ARF6 BINDING SITE is a binding site found in an untranslated region of ARF6, corresponding to BINDING SITE of FIG. 26A. FIG. 26D illustrates the complementarity of the nucleotide sequence of ARF6 BINDING SITE, designated SEQ ID:445885, to the nucleotide sequence of GAM26 RNA of FIG. 26A, designated SEQ ID:20604. An additional function of GAM26 is therefore inhibition of (ARF6). Accordingly, utilities of GAM26 include diagnosis and treatment of diseases and clinical conditions with which ARF6 is associated.

[2105] Reference is now made to ARTS-1 BINDING SITE. ARTS-1 is a target gene of GAM26, corresponding to GAM26-TARGET GENE of FIG. 26A. ARTS-1 BINDING SITE is a binding site found in an untranslated region of ARTS-1, corresponding to BINDING SITE of FIG. 26A. FIG. 26D illustrates the complementarity of the nucleotide sequence of ARTS-1 BINDING SITE, designated SEQ ID:449602, to the nucleotide sequence of GAM26 RNA of FIG. 26A, designated SEQ ID:20604. A further function of GAM26 is therefore inhibition of (ARTS-1). Accordingly, utilities of GAM26 include diagnosis and treatment of diseases and clinical conditions with which ARTS-1 is associated.

[2106] Reference is now made to ATE1 BINDING SITE. ATE1 is a target gene of GAM26, corresponding to GAM26-TARGET GENE of FIG. 26A. ATE1 BINDING SITE is a binding site found in an untranslated region of ATE1, corresponding to BINDING SITE of FIG. 26A. FIG. 26D illustrates the complementarity of the nucleotide sequence of ATE1 BINDING SITE, designated SEQ ID:450724, to the nucleotide sequence of GAM26 RNA of FIG. 26A, designated SEQ ID:20604. Yet a further function of GAM26 is therefore inhibition of (ATE1). Accordingly, utilities of GAM26 include diagnosis and treatment of diseases and clinical conditions with which ATE1 is associated.

[2107] Reference is now made to ATP6V1B2 BINDING SITE. ATP6V1B2 is a target gene of GAM26, corresponding to GAM26-TARGET GENE of FIG. 26A. ATP6V1B2 BINDING SITE is a binding site found in an untranslated region of ATP6V1B2, corresponding to BINDING SITE of FIG. 26A. FIG. 26D illustrates the complementarity of the nucleotide sequence of ATP6V1B2 BINDING SITE, designated SEQ ID:451749, to the nucleotide sequence of GAM26 RNA of FIG. 26A, designated SEQ ID:20604. Another function of GAM26 is therefore inhibition of (ATP6V1B2). Accordingly, utilities of GAM26 include diagnosis and treatment of diseases and clinical conditions with which ATP6V1B2 is associated.

[2108] Reference is now made to AWP1 BINDING SITE. AWP1 is a target gene of GAM26, corresponding to GAM26-TARGET GENE of FIG. 26A. AWP1 BINDING SITE is a binding site found in an untranslated region of AWP1, corresponding to BINDING SITE of FIG. 26A. FIG. 26D illustrates the complementarity of the nucleotide sequence of AWP1 BINDING SITE, designated SEQ ID:452398, to the nucleotide sequence of GAM26 RNA of FIG. 26A, designated SEQ ID:20604. Yet another function of GAM26 is therefore inhibition of (AWP1). Accordingly, utilities of GAM26 include diagnosis and treatment of diseases and clinical conditions with which AWP1 is associated.

[2109] Reference is now made to AWP1 BINDING SITE. AWP1 is a target gene of GAM26, corresponding to GAM26-TARGET GENE of FIG. 26A. AWP1 BINDING SITE is a binding site found in an untranslated region of AWP1, corresponding to BINDING SITE of FIG. 26A. FIG. 26D illustrates the complementarity of the nucleotide sequence of AWP1 BINDING SITE, designated SEQ ID:452399, to the nucleotide sequence of GAM26 RNA of FIG. 26A, designated SEQ ID:20604. An additional function of GAM26 is therefore inhibition of (AWP1). Accordingly, utilities of GAM26 include diagnosis and treatment of diseases and clinical conditions with which AWP1 is associated.

[2110] Reference is now made to BA108L7.2 BINDING SITE. BA108L7.2 is a target gene of GAM26, corresponding to GAM26-TARGET GENE of FIG. 26A. BA108L7.2 BINDING SITE is a binding site found in an untranslated region of BA108L7.2, corresponding to BINDING SITE of FIG. 26A. FIG. 26D illustrates the complementarity of the nucleotide sequence of BA108L7.2 BINDING SITE, designated SEQ ID:453226, to the nucleotide sequence of GAM26 RNA of FIG. 26A, designated SEQ ID:20604. A further function of GAM26 is therefore inhibition of (BA108L7.2). Accordingly, utilities of GAM26 include diagnosis and treatment of diseases and clinical conditions with which BA108L7.2 is associated.

[2111] Reference is now made to BC-2 BINDING SITE. BC-2 is a target gene of GAM26, corresponding to GAM26-TARGET GENE of FIG. 26A. BC-2 BINDING SITE is a binding site found in an untranslated region of BC-2, corresponding to BINDING SITE of FIG. 26A. FIG. 26D illustrates the complementarity of the nucleotide sequence of BC-2 BINDING SITE, designated SEQ ID:454363, to the nucleotide sequence of GAM26 RNA of FIG. 26A, designated SEQ ID:20604. Yet a further function of GAM26 is therefore inhibition of (BC-2). Accordingly, utilities of GAM26 include diagnosis and treatment of diseases and clinical conditions with which BC-2 is associated.

[2112] Reference is now made to BEX1 BINDING SITE. BEX1 is a target gene of GAM26, corresponding to GAM26-TARGET GENE of FIG. 26A. BEX1 BINDING SITE is a binding site found in an untranslated region of BEX1, corresponding to BINDING SITE of FIG. 26A. FIG. 26D illustrates the complementarity of the nucleotide sequence of BEX1 BINDING SITE, designated SEQ ID:455564, to the nucleotide sequence of GAM26 RNA of FIG. 26A, designated SEQ ID:20604. Another function of GAM26 is therefore inhibition of (BEX1). Accordingly, utilities of GAM26 include diagnosis and treatment of diseases and clinical conditions with which BEX1 is associated.

[2113] Reference is now made to BLCAP BINDING SITE. BLCAP is a target gene of GAM26, corresponding to GAM26-TARGET GENE of FIG. 26A. BLCAP BINDING SITE is a binding site found in an untranslated region of BLCAP, corresponding to BINDING SITE of FIG. 26A. FIG. 26D illustrates the complementarity of the nucleotide sequence of BLCAP BINDING SITE, designated SEQ ID:457198, to the nucleotide sequence of GAM26 RNA of FIG. 26A, designated SEQ ID:20604. Yet another function of GAM26 is therefore inhibition of (BLCAP). Accordingly, utilities of GAM26 include diagnosis and treatment of diseases and clinical conditions with which BLCAP is associated.

[2114] Reference is now made to BLCAP BINDING SITE. BLCAP is a target gene of GAM26, corresponding to GAM26-TARGET GENE of FIG. 26A. BLCAP BINDING SITE is a binding site found in an untranslated region of BLCAP, corresponding to BINDING SITE of FIG. 26A. FIG. 26D illustrates the complementarity of the nucleotide sequence of BLCAP BINDING SITE, designated SEQ ID:457204, to the nucleotide sequence of GAM26 RNA of FIG. 26A, designated SEQ ID:20604. An additional function of GAM26 is therefore inhibition of (BLCAP). Accordingly, utilities of GAM26 include diagnosis and treatment of diseases and clinical conditions with which BLCAP is associated.

[2115] Reference is now made to BTBD1 BINDING SITE. BTBD1 is a target gene of GAM26, corresponding to GAM26-TARGET GENE of FIG. 26A. BTBD1 BINDING SITE is a binding site found in an untranslated region of BTBD1, corresponding to BINDING SITE of FIG. 26A. FIG. 26D illustrates the complementarity of the nucleotide sequence of BTBD1 BINDING SITE, designated SEQ ID:460514, to the nucleotide sequence of GAM26 RNA of FIG. 26A, designated SEQ ID:20604. A further function of GAM26 is therefore inhibition of (BTBD1). Accordingly, utilities of GAM26 include diagnosis and treatment of diseases and clinical conditions with which BTBD1 is associated.

[2116] Reference is now made to C12orf22 BINDING SITE. C12orf22 is a target gene of GAM26, corresponding to GAM26-TARGET GENE of FIG. 26A. C12orf22 BINDING SITE is a binding site found in an untranslated region of C12orf22, corresponding to BINDING SITE of FIG. 26A. FIG. 26D illustrates the complementarity of the nucleotide sequence of C12orf22 BINDING SITE, designated SEQ ID:463154, to the nucleotide sequence of GAM26 RNA of FIG. 26A, designated SEQ ID:20604. Yet a further function of GAM26 is therefore inhibition of (C12orf22). Accordingly, utilities of GAM26 include diagnosis and treatment of diseases and clinical conditions with which C12orf22 is associated.

[2117] Reference is now made to C12orf22 BINDING SITE. C12orf22 is a target gene of GAM26, corresponding to GAM26-TARGET GENE of FIG. 26A. C12orf22 BINDING SITE is a binding site found in an untranslated region of C12orf22, corresponding to BINDING SITE of FIG. 26A. FIG. 26D illustrates the complementarity of the nucleotide sequence of C12orf22 BINDING SITE, designated SEQ ID:463178, to the nucleotide sequence of GAM26 RNA of FIG. 26A, designated SEQ ID:20604. Another function of GAM26 is therefore inhibition of (C12orf22). Accordingly, utilities of GAM26 include diagnosis and treatment of diseases and clinical conditions with which C12orf22 is associated.

[2118] Reference is now made to C20orf124 BINDING SITE. C20orf124 is a target gene of GAM26, corresponding to GAM26-TARGET GENE of FIG. 26A. C20orf124 BINDING SITE is a binding site found in an untranslated region of C20orf124, corresponding to BINDING SITE of FIG. 26A. FIG. 26D illustrates the complementarity of the nucleotide sequence of C20orf124 BINDING SITE, designated SEQ ID:468753, to the nucleotide sequence of GAM26 RNA of FIG. 26A, designated SEQ ID:20604. Yet another function of GAM26 is therefore inhibition of (C20orf124). Accordingly, utilities of GAM26 include diagnosis and treatment of diseases and clinical conditions with which C20orf124 is associated.

[2119] Reference is now made to C20orf139 BINDING SITE. C20orf139 is a target gene of GAM26, corresponding to GAM26-TARGET GENE of FIG. 26A. C20orf139 BINDING SITE is a binding site found in an untranslated region of C20orf139, corresponding to BINDING SITE of FIG. 26A. FIG. 26D illustrates the complementarity of the nucleotide sequence of C20orf139 BINDING SITE, designated SEQ ID:469119, to the nucleotide sequence of GAM26 RNA of FIG. 26A, designated SEQ ID:20604. An additional function of GAM26 is therefore inhibition of (C20orf139). Accordingly, utilities of GAM26 include diagnosis and treatment of diseases and clinical conditions with which C20orf139 is associated.

[2120] Reference is now made to C20orf178 BINDING SITE. C20orf178 is a target gene of GAM26, corresponding to GAM26-TARGET GENE of FIG. 26A. C20orf178 BINDING SITE is a binding site found in an untranslated region of C20orf178, corresponding to BINDING SITE of FIG. 26A. FIG. 26D illustrates the complementarity of the nucleotide sequence of C20orf178 BINDING SITE, designated SEQ ID:470891, to the nucleotide sequence of GAM26 RNA of FIG. 26A, designated SEQ ID:20604. A further function of GAM26 is therefore inhibition of (C20orf178). Accordingly, utilities of GAM26 include diagnosis and treatment of diseases and clinical conditions with which C20orf178 is associated.

[2121] Reference is now made to C2orf7 BINDING SITE. C2orf7 is a target gene of GAM26, corresponding to GAM26-TARGET GENE of FIG. 26A. C2orf7 BINDING SITE is a binding site found in an untranslated region of C2orf7, corresponding to BINDING SITE of FIG. 26A. FIG. 26D illustrates the complementarity of the nucleotide sequence of C2orf7 BINDING SITE, designated SEQ ID:476575, to the nucleotide sequence of GAM26 RNA of FIG. 26A, designated SEQ ID:20604. Yet a further function of GAM26 is therefore inhibition of (C2orf7). Accordingly, utilities of GAM26 include diagnosis and treatment of diseases and clinical conditions with which C2orf7 is associated.

[2122] Reference is now made to C4S-2 BINDING SITE. C4S-2 is a target gene of GAM26, corresponding to GAM26-TARGET GENE of FIG. 26A. C4S-2 BINDING SITE is a binding site found in an untranslated region of C4S-2, corresponding to BINDING SITE of FIG. 26A. FIG. 26D illustrates the complementarity of the nucleotide sequence of C4S-2 BINDING SITE, designated SEQ ID:477108, to the nucleotide sequence of GAM26 RNA of FIG. 26A, designated SEQ ID:20604. Another function of GAM26 is therefore inhibition of (C4S-2). Accordingly, utilities of GAM26 include diagnosis and treatment of diseases and clinical conditions with which C4S-2 is associated.

[2123] Reference is now made to CAMTA1 BINDING SITE. CAMTA1 is a target gene of GAM26, corresponding to GAM26-TARGET GENE of FIG. 26A. CAMTA1 BINDING SITE is a binding site found in an untranslated region of CAMTA1, corresponding to BINDING SITE of FIG. 26A. FIG. 26D illustrates the complementarity of the nucleotide sequence of CAMTA1 BINDING SITE, designated SEQ ID:483028, to the nucleotide sequence of GAM26 RNA of FIG. 26A, designated SEQ ID:20604. Yet another function of GAM26 is therefore inhibition of (CAMTA1). Accordingly, utilities of GAM26 include diagnosis and treatment of diseases and clinical conditions with which CAMTA1 is associated.

[2124] Reference is now made to CARM1 BINDING SITE. CARM1 is a target gene of GAM26, corresponding to GAM26-TARGET GENE of FIG. 26A. CARM1 BINDING SITE is a binding site found in an untranslated region of CARM1, corresponding to BINDING SITE of FIG. 26A. FIG. 26D illustrates the complementarity of the nucleotide sequence of CARM1 BINDING SITE, designated SEQ ID:483979, to the nucleotide sequence of GAM26 RNA of FIG. 26A, designated SEQ ID:20604. An additional function of GAM26 is therefore inhibition of (CARM1). Accordingly, utilities of GAM26 include diagnosis and treatment of diseases and clinical conditions with which CARM1 is associated.

[2125] Reference is now made to CARM1 BINDING SITE. CARM1 is a target gene of GAM26, corresponding to GAM26-TARGET GENE of FIG. 26A. CARM1 BINDING SITE is a binding site found in an untranslated region of CARM1, corresponding to BINDING SITE of FIG. 26A. FIG. 26D illustrates the complementarity of the nucleotide sequence of CARM1 BINDING SITE, designated SEQ ID:483989, to the nucleotide sequence of GAM26 RNA of FIG. 26A, designated SEQ ID:20604. A further function of GAM26 is therefore inhibition of (CARM1). Accordingly, utilities of GAM26 include diagnosis and treatment of diseases and clinical conditions with which CARM1 is associated.

[2126] Reference is now made to CBLN1 BINDING SITE. CBLN1 is a target gene of GAM26, corresponding to GAM26-TARGET GENE of FIG. 26A. CBLN1 BINDING SITE is a binding site found in an untranslated region of CBLN1, corresponding to BINDING SITE of FIG. 26A. FIG. 26D illustrates the complementarity of the nucleotide sequence of CBLN1 BINDING SITE, designated SEQ ID:485030, to the nucleotide sequence of GAM26 RNA of FIG. 26A, designated SEQ ID:20604. Yet a further function of GAM26 is therefore inhibition of (CBLN1). Accordingly, utilities of GAM26 include diagnosis and treatment of diseases and clinical conditions with which CBLN1 is associated.

[2127] Reference is now made to CBLN1 BINDING SITE. CBLN1 is a target gene of GAM26, corresponding to GAM26-TARGET GENE of FIG. 26A. CBLN1 BINDING SITE is a binding site found in an untranslated region of CBLN1, corresponding to BINDING SITE of FIG. 26A. FIG. 26D illustrates the complementarity of the nucleotide sequence of CBLN1 BINDING SITE, designated SEQ ID:485054, to the nucleotide sequence of GAM26 RNA of FIG. 26A, designated SEQ ID:20604. Another function of GAM26 is therefore inhibition of (CBLN1). Accordingly, utilities of GAM26 include diagnosis and treatment of diseases and clinical conditions with which CBLN1 is associated.

[2128] Reference is now made to CDC14A BINDING SITE. CDC14A is a target gene of GAM26, corresponding to GAM26-TARGET GENE of FIG. 26A. CDC14A BINDING SITE is a binding site found in an untranslated region of CDC14A, corresponding to BINDING SITE of FIG. 26A. FIG. 26D illustrates the complementarity of the nucleotide sequence of CDC14A BINDING SITE, designated SEQ ID:487263, to the nucleotide sequence of GAM26 RNA of FIG. 26A, designated SEQ ID:20604. Yet another function of GAM26 is therefore inhibition of (CDC14A). Accordingly, utilities of GAM26 include diagnosis and treatment of diseases and clinical conditions with which CDC14A is associated.

[2129] Reference is now made to CDC14A BINDING SITE. CDC14A is a target gene of GAM26, corresponding to GAM26-TARGET GENE of FIG. 26A. CDC14A BINDING SITE is a binding site found in an untranslated region of CDC14A, corresponding to BINDING SITE of FIG. 26A. FIG. 26D illustrates the complementarity of the nucleotide sequence of CDC14A BINDING SITE, designated SEQ ID:487263, to the nucleotide sequence of GAM26 RNA of FIG. 26A, designated SEQ ID:20604. An additional function of GAM26 is therefore inhibition of (CDC14A). Accordingly, utilities of GAM26 include diagnosis and treatment of diseases and clinical conditions with which CDC14A is associated.

[2130] Reference is now made to CDC16 BINDING SITE. CDC16 is a target gene of GAM26, corresponding to GAM26-TARGET GENE of FIG. 26A. CDC16 BINDING SITE is a binding site found in an untranslated region of CDC16, corresponding to BINDING SITE of FIG. 26A. FIG. 26D illustrates the complementarity of the nucleotide sequence of CDC16 BINDING SITE, designated SEQ ID:487765, to the nucleotide sequence of GAM26 RNA of FIG. 26A, designated SEQ ID:20604. A further function of GAM26 is therefore inhibition of (CDC16). Accordingly, utilities of GAM26 include diagnosis and treatment of diseases and clinical conditions with which CDC16 is associated.

[2131] Reference is now made to CDC42BPB BINDING SITE. CDC42BPB is a target gene of GAM26, corresponding to GAM26-TARGET GENE of FIG. 26A. CDC42BPB BINDING SITE is a binding site found in an untranslated region of CDC42BPB, corresponding to BINDING SITE of FIG. 26A. FIG. 26D illustrates the complementarity of the nucleotide sequence of CDC42BPB BINDING SITE, designated SEQ ID:487991, to the nucleotide sequence of GAM26 RNA of FIG. 26A, designated SEQ ID:20604. Yet a further function of GAM26 is therefore inhibition of (CDC42BPB). Accordingly, utilities of GAM26 include diagnosis and treatment of diseases and clinical conditions with which CDC42BPB is associated.

[2132] Reference is now made to CDCA4 BINDING SITE. CDCA4 is a target gene of GAM26, corresponding to GAM26-TARGET GENE of FIG. 26A. CDCA4 BINDING SITE is a binding site found in an untranslated region of CDCA4, corresponding to BINDING SITE of FIG. 26A. FIG. 26D illustrates the complementarity of the nucleotide sequence of CDCA4 BINDING SITE, designated SEQ ID:488095, to the nucleotide sequence of GAM26 RNA of FIG. 26A, designated SEQ ID:20604. Another function of GAM26 is therefore inhibition of (CDCA4). Accordingly, utilities of GAM26 include diagnosis and treatment of diseases and clinical conditions with which CDCA4 is associated.

[2133] Reference is now made to CECR2 BINDING SITE. CECR2 is a target gene of GAM26, corresponding to GAM26-TARGET GENE of FIG. 26A. CECR2 BINDING SITE is a binding site found in an untranslated region of CECR2, corresponding to BINDING SITE of FIG. 26A. FIG. 26D illustrates the complementarity of the nucleotide sequence of CECR2 BINDING SITE, designated SEQ ID:489555, to the nucleotide sequence of GAM26 RNA of FIG. 26A, designated SEQ ID:20604. Yet another function of GAM26 is therefore inhibition of (CECR2). Accordingly, utilities of GAM26 include diagnosis and treatment of diseases and clinical conditions with which CECR2 is associated.

[2134] Reference is now made to CGGBP1 BINDING SITE. CGGBP1 is a target gene of GAM26, corresponding to GAM26-TARGET GENE of FIG. 26A. CGGBP1 BINDING SITE is a binding site found in an untranslated region of CGGBP1, corresponding to BINDING SITE of FIG. 26A. FIG. 26D illustrates the complementarity of the nucleotide sequence of CGGBP1 BINDING SITE, designated SEQ ID:492176, to the nucleotide sequence of GAM26 RNA of FIG. 26A, designated SEQ ID:20604. An additional function of GAM26 is therefore inhibition of (CGGBP1). Accordingly, utilities of GAM26 include diagnosis and treatment of diseases and clinical conditions with which CGGBP1 is associated.

[2135] Reference is now made to CGGBP1 BINDING SITE. CGGBP1 is a target gene of GAM26, corresponding to GAM26-TARGET GENE of FIG. 26A. CGGBP1 BINDING SITE is a binding site found in an untranslated region of CGGBP1, corresponding to BINDING SITE of FIG. 26A. FIG. 26D illustrates the complementarity of the nucleotide sequence of CGGBP1 BINDING SITE, designated SEQ ID:492221, to the nucleotide sequence of GAM26 RNA of FIG. 26A, designated SEQ ID:20604. A further function of GAM26 is therefore inhibition of (CGGBP1). Accordingly, utilities of GAM26 include diagnosis and treatment of diseases and clinical conditions with which CGGBP1 is associated.

[2136] Reference is now made to CHSY1 BINDING SITE. CHSY1 is a target gene of GAM26, corresponding to GAM26-TARGET GENE of FIG. 26A. CHSY1 BINDING SITE is a binding site found in an untranslated region of CHSY1, corresponding to BINDING SITE of FIG. 26A. FIG. 26D illustrates the complementarity of the nucleotide sequence of CHSY1 BINDING SITE, designated SEQ ID:494504, to the nucleotide sequence of GAM26 RNA of FIG. 26A, designated SEQ ID:20604. Yet a further function of GAM26 is therefore inhibition of (CHSY1). Accordingly, utilities of GAM26 include diagnosis and treatment of diseases and clinical conditions with which CHSY1 is associated.

[2137] Reference is now made to CHSY1 BINDING SITE. CHSY1 is a target gene of GAM26, corresponding to GAM26-TARGET GENE of FIG. 26A. CHSY1 BINDING SITE is a binding site found in an untranslated region of CHSY1, corresponding to BINDING SITE of FIG. 26A. FIG. 26D illustrates the complementarity of the nucleotide sequence of CHSY1 BINDING SITE, designated SEQ ID:494516, to the nucleotide sequence of GAM26 RNA of FIG. 26A, designated SEQ ID:20604. Another function of GAM26 is therefore inhibition of (CHSY1). Accordingly, utilities of GAM26 include diagnosis and treatment of diseases and clinical conditions with which CHSY1 is associated.

[2138] Reference is now made to CHSY1 BINDING SITE. CHSY1 is a target gene of GAM26, corresponding to GAM26-TARGET GENE of FIG. 26A. CHSY1 BINDING SITE is a binding site found in an untranslated region of CHSY1, corresponding to BINDING SITE of FIG. 26A. FIG. 26D illustrates the complementarity of the nucleotide sequence of CHSY1 BINDING SITE, designated SEQ ID:494532, to the nucleotide sequence of GAM26 RNA of FIG. 26A, designated SEQ ID:20604. Yet another function of GAM26 is therefore inhibition of (CHSY1). Accordingly, utilities of GAM26 include diagnosis and treatment of diseases and clinical conditions with which CHSY1 is associated.

[2139] Reference is now made to CHSY1 BINDING SITE. CHSY1 is a target gene of GAM26, corresponding to GAM26-TARGET GENE of FIG. 26A. CHSY1 BINDING SITE is a binding site found in an untranslated region of CHSY1, corresponding to BINDING SITE of FIG. 26A. FIG. 26D illustrates the complementarity of the nucleotide sequence of CHSY1 BINDING SITE, designated SEQ ID:494603, to the nucleotide sequence of GAM26 RNA of FIG. 26A, designated SEQ ID:20604. An additional function of GAM26 is therefore inhibition of (CHSY1). Accordingly, utilities of GAM26 include diagnosis and treatment of diseases and clinical conditions with which CHSY1 is associated.

[2140] Reference is now made to CLSTN1 BINDING SITE. CLSTN1 is a target gene of GAM26, corresponding to GAM26-TARGET GENE of FIG. 26A. CLSTN1 BINDING SITE is a binding site found in an untranslated region of CLSTN1, corresponding to BINDING SITE of FIG. 26A. FIG. 26D illustrates the complementarity of the nucleotide sequence of CLSTN1 BINDING SITE, designated SEQ ID:496944, to the nucleotide sequence of GAM26 RNA of FIG. 26A, designated SEQ ID:20604. A further function of GAM26 is therefore inhibition of (CLSTN1). Accordingly, utilities of GAM26 include diagnosis and treatment of diseases and clinical conditions with which CLSTN1 is associated.

[2141] Reference is now made to CNNM3 BINDING SITE. CNNM3 is a target gene of GAM26, corresponding to GAM26-TARGET GENE of FIG. 26A. CNNM3 BINDING SITE is a binding site found in an untranslated region of CNNM3, corresponding to BINDING SITE of FIG. 26A. FIG. 26D illustrates the complementarity of the nucleotide sequence of CNNM3 BINDING SITE, designated SEQ ID:498002, to the nucleotide sequence of GAM26 RNA of FIG. 26A, designated SEQ ID:20604. Yet a further function of GAM26 is therefore inhibition of (CNNM3). Accordingly, utilities of GAM26 include diagnosis and treatment of diseases and clinical conditions with which CNNM3 is associated.

[2142] Reference is now made to COASTER BINDING SITE. COASTER is a target gene of GAM26, corresponding to GAM26-TARGET GENE of FIG. 26A. COASTER BINDING SITE is a binding site found in an untranslated region of COASTER, corresponding to BINDING SITE of FIG. 26A. FIG. 26D illustrates the complementarity of the nucleotide sequence of COASTER BINDING SITE, designated SEQ ID:498924, to the nucleotide sequence of GAM26 RNA of FIG. 26A, designated SEQ ID:20604. Another function of GAM26 is therefore inhibition of (COASTER). Accordingly, utilities of GAM26 include diagnosis and treatment of diseases and clinical conditions with which COASTER is associated.

[2143] Reference is now made to COL4A3BP BINDING SITE. COL4A3BP is a target gene of GAM26, corresponding to GAM26-TARGET GENE of FIG. 26A. COL4A3BP BINDING SITE is a binding site found in an untranslated region of COL4A3BP, corresponding to BINDING SITE of FIG. 26A. FIG. 26D illustrates the complementarity of the nucleotide sequence of COL4A3BP BINDING SITE, designated SEQ ID:499352, to the nucleotide sequence of GAM26 RNA of FIG. 26A, designated SEQ ID:20604. Yet another function of GAM26 is therefore inhibition of (COL4A3BP). Accordingly, utilities of GAM26 include diagnosis and treatment of diseases and clinical conditions with which COL4A3BP is associated.

[2144] Reference is now made to CTCF BINDING SITE. CTCF is a target gene of GAM26, corresponding to GAM26-TARGET GENE of FIG. 26A. CTCF BINDING SITE is a binding site found in an untranslated region of CTCF, corresponding to BINDING SITE of FIG. 26A. FIG. 26D illustrates the complementarity of the nucleotide sequence of CTCF BINDING SITE, designated SEQ ID:503528, to the nucleotide sequence of GAM26 RNA of FIG. 26A, designated SEQ ID:20604. An additional function of GAM26 is therefore inhibition of (CTCF). Accordingly, utilities of GAM26 include diagnosis and treatment of diseases and clinical conditions with which CTCF is associated.

[2145] Reference is now made to CTCF BINDING SITE. CTCF is a target gene of GAM26, corresponding to GAM26-TARGET GENE of FIG. 26A. CTCF BINDING SITE is a binding site found in an untranslated region of CTCF, corresponding to BINDING SITE of FIG. 26A. FIG. 26D illustrates the complementarity of the nucleotide sequence of CTCF BINDING SITE, designated SEQ ID:503529, to the nucleotide sequence of GAM26 RNA of FIG. 26A, designated SEQ ID:20604. A further function of GAM26 is therefore inhibition of (CTCF). Accordingly, utilities of GAM26 include diagnosis and treatment of diseases and clinical conditions with which CTCF is associated.

[2146] Reference is now made to DDM36 BINDING SITE. DDM36 is a target gene of GAM26, corresponding to GAM26-TARGET GENE of FIG. 26A. DDM36 BINDING SITE is a binding site found in an untranslated region of DDM36, corresponding to BINDING SITE of FIG. 26A. FIG. 26D illustrates the complementarity of the nucleotide sequence of DDM36 BINDING SITE, designated SEQ ID:508506, to the nucleotide sequence of GAM26 RNA of FIG. 26A, designated SEQ ID:20604. Yet a further function of GAM26 is therefore inhibition of (DDM36). Accordingly, utilities of GAM26 include diagnosis and treatment of diseases and clinical conditions with which DDM36 is associated.

[2147] Reference is now made to DDM36 BINDING SITE. DDM36 is a target gene of GAM26, corresponding to GAM26-TARGET GENE of FIG. 26A. DDM36 BINDING SITE is a binding site found in an untranslated region of DDM36, corresponding to BINDING SITE of FIG. 26A. FIG. 26D illustrates the complementarity of the nucleotide sequence of DDM36 BINDING SITE, designated SEQ ID:508575, to the nucleotide sequence of GAM26 RNA of FIG. 26A, designated SEQ ID:20604. Another function of GAM26 is therefore inhibition of (DDM36). Accordingly, utilities of GAM26 include diagnosis and treatment of diseases and clinical conditions with which DDM36 is associated.

[2148] Reference is now made to DKFZP434D1335 BINDING SITE. DKFZP434D1335 is a target gene of GAM26, corresponding to GAM26-TARGET GENE of FIG. 26A. DKFZP434D1335 BINDING SITE is a binding site found in an untranslated region of DKFZP434D1335, corresponding to BINDING SITE of FIG. 26A. FIG. 26D illustrates the complementarity of the nucleotide sequence of DKFZP434D1335 BINDING SITE, designated SEQ ID:516151, to the nucleotide sequence of GAM26 RNA of FIG. 26A, designated SEQ ID:20604. Yet another function of GAM26 is therefore inhibition of (DKFZP434D1335). Accordingly, utilities of GAM26 include diagnosis and treatment of diseases and clinical conditions with which DKFZP434D1335 is associated.

[2149] Reference is now made to DKFZP434J154 BINDING SITE. DKFZP434J154 is a target gene of GAM26, corresponding to GAM26-TARGET GENE of FIG. 26A. DKFZP434J154 BINDING SITE is a binding site found in an untranslated region of DKFZP434J154, corresponding to BINDING SITE of FIG. 26A. FIG. 26D illustrates the complementarity of the nucleotide sequence of DKFZP434J154 BINDING SITE, designated SEQ ID:520474, to the nucleotide sequence of GAM26 RNA of FIG. 26A, designated SEQ ID:20604. An additional function of GAM26 is therefore inhibition of (DKFZP434J154). Accordingly, utilities of GAM26 include diagnosis and treatment of diseases and clinical conditions with which DKFZP434J154 is associated.

[2150] Reference is now made to DKFZP434N093 BINDING SITE. DKFZP434N093 is a target gene of GAM26, corresponding to GAM26-TARGET GENE of FIG. 26A. DKFZP434N093 BINDING SITE is a binding site found in an untranslated region of DKFZP434N093, corresponding to BINDING SITE of FIG. 26A. FIG. 26D illustrates the complementarity of the nucleotide sequence of DKFZP434N093 BINDING SITE, designated SEQ ID:522414, to the nucleotide sequence of GAM26 RNA of FIG. 26A, designated SEQ ID:20604. A further function of GAM26 is therefore inhibition of (DKFZP434N093). Accordingly, utilities of GAM26 include diagnosis and treatment of diseases and clinical conditions with which DKFZP434N093 is associated.

[2151] Reference is now made to DKFZP434P106 BINDING SITE. DKFZP434P106 is a target gene of GAM26, corresponding to GAM26-TARGET GENE of FIG. 26A. DKFZP434P106 BINDING SITE is a binding site found in an untranslated region of DKFZP434P106, corresponding to BINDING SITE of FIG. 26A. FIG. 26D illustrates the complementarity of the nucleotide sequence of DKFZP434P106 BINDING SITE, designated SEQ ID:523992, to the nucleotide sequence of GAM26 RNA of FIG. 26A, designated SEQ ID:20604. Yet a further function of GAM26 is therefore inhibition of (DKFZP434P106). Accordingly, utilities of GAM26 include diagnosis and treatment of diseases and clinical conditions with which DKFZP434P106 is associated.

[2152] Reference is now made to DKFZP566A1524 BINDING SITE. DKFZP566A1524 is a target gene of GAM26, corresponding to GAM26-TARGET GENE of FIG. 26A. DKFZP566A1524 BINDING SITE is a binding site found in an untranslated region of DKFZP566A1524, corresponding to BINDING SITE of FIG. 26A. FIG. 26D illustrates the complementarity of the nucleotide sequence of DKFZP566A1524 BINDING SITE, designated SEQ ID:531199, to the nucleotide sequence of GAM26 RNA of FIG. 26A, designated SEQ ID:20604. Another function of GAM26 is therefore inhibition of (DKFZP566A1524). Accordingly, utilities of GAM26 include diagnosis and treatment of diseases and clinical conditions with which DKFZP566A1524 is associated.

[2153] Reference is now made to DKFZP566K1924 BINDING SITE. DKFZP566K1924 is a target gene of GAM26, corresponding to GAM26-TARGET GENE of FIG. 26A. DKFZP566K1924 BINDING SITE is a binding site found in an untranslated region of DKFZP566K1924, corresponding to BINDING SITE of FIG. 26A. FIG. 26D illustrates the complementarity of the nucleotide sequence of DKFZP566K1924 BINDING SITE, designated SEQ ID:532863, to the nucleotide sequence of GAM26 RNA of FIG. 26A, designated SEQ ID:20604. Yet another function of GAM26 is therefore inhibition of (DKFZP566K1924). Accordingly, utilities of GAM26 include diagnosis and treatment of diseases and clinical conditions with which DKFZP566K1924 is associated.

[2154] Reference is now made to DKFZp761B0514 BINDING SITE. DKFZp761B0514 is a target gene of GAM26, corresponding to GAM26-TARGET GENE of FIG. 26A. DKFZp761B0514 BINDING SITE is a binding site found in an untranslated region of DKFZp761B0514, corresponding to BINDING SITE of FIG. 26A. FIG. 26D illustrates the complementarity of the nucleotide sequence of DKFZp761B0514 BINDING SITE, designated SEQ ID:536448, to the nucleotide sequence of GAM26 RNA of FIG. 26A, designated SEQ ID:20604. An additional function of GAM26 is therefore inhibition of (DKFZp761B0514). Accordingly, utilities of GAM26 include diagnosis and treatment of diseases and clinical conditions with which DKFZp761B0514 is associated.

[2155] Reference is now made to DKFZp762E1511 BINDING SITE. DKFZp762E1511 is a target gene of GAM26, corresponding to GAM26-TARGET GENE of FIG. 26A. DKFZp762E1511 BINDING SITE is a binding site found in an untranslated region of DKFZp762E1511, corresponding to BINDING SITE of FIG. 26A. FIG. 26D illustrates the complementarity of the nucleotide sequence of DKFZp762E1511 BINDING SITE, designated SEQ ID:539970, to the nucleotide sequence of GAM26 RNA of FIG. 26A, designated SEQ ID:20604. A further function of GAM26 is therefore inhibition of (DKFZp762E1511). Accordingly, utilities of GAM26 include diagnosis and treatment of diseases and clinical conditions with which DKFZp762E1511 is associated.

[2156] Reference is now made to Dlc2 BINDING SITE. Dlc2 is a target gene of GAM26, corresponding to GAM26-TARGET GENE of FIG. 26A. Dlc2 BINDING SITE is a binding site found in an untranslated region of Dlc2, corresponding to BINDING SITE of FIG. 26A. FIG. 26D illustrates the complementarity of the nucleotide sequence of Dlc2 BINDING SITE, designated SEQ ID:540962, to the nucleotide sequence of GAM26 RNA of FIG. 26A, designated SEQ ID:20604. Yet a further function of GAM26 is therefore inhibition of (Dlc2). Accordingly, utilities of GAM26 include diagnosis and treatment of diseases and clinical conditions with which Dlc2 is associated.

[2157] Reference is now made to E46L BINDING SITE. E46L is a target gene of GAM26, corresponding to GAM26-TARGET GENE of FIG. 26A. E46L BINDING SITE is a binding site found in an untranslated region of E46L, corresponding to BINDING SITE of FIG. 26A. FIG. 26D illustrates the complementarity of the nucleotide sequence of E46L BINDING SITE, designated SEQ ID:545962, to the nucleotide sequence of GAM26 RNA of FIG. 26A, designated SEQ ID:20604. Another function of GAM26 is therefore inhibition of (E46L). Accordingly, utilities of GAM26 include diagnosis and treatment of diseases and clinical conditions with which E46L is associated.

[2158] Reference is now made to E46L BINDING SITE. E46L is a target gene of GAM26, corresponding to GAM26-TARGET GENE of FIG. 26A. E46L BINDING SITE is a binding site found in an untranslated region of E46L, corresponding to BINDING SITE of FIG. 26A. FIG. 26D illustrates the complementarity of the nucleotide sequence of E46L BINDING SITE, designated SEQ ID:545966, to the nucleotide sequence of GAM26 RNA of FIG. 26A, designated SEQ ID:20604. Yet another function of GAM26 is therefore inhibition of (E46L). Accordingly, utilities of GAM26 include diagnosis and treatment of diseases and clinical conditions with which E46L is associated.

[2159] Reference is now made to EHM2 BINDING SITE. EHM2 is a target gene of GAM26, corresponding to GAM26-TARGET GENE of FIG. 26A. EHM2 BINDING SITE is a binding site found in an untranslated region of EHM2, corresponding to BINDING SITE of FIG. 26A. FIG. 26D illustrates the complementarity of the nucleotide sequence of EHM2 BINDING SITE, designated SEQ ID:547115, to the nucleotide sequence of GAM26 RNA of FIG. 26A, designated SEQ ID:20604. An additional function of GAM26 is therefore inhibition of (EHM2). Accordingly, utilities of GAM26 include diagnosis and treatment of diseases and clinical conditions with which EHM2 is associated.

[2160] Reference is now made to EHM2 BINDING SITE. EHM2 is a target gene of GAM26, corresponding to GAM26-TARGET GENE of FIG. 26A. EHM2 BINDING SITE is a binding site found in an untranslated region of EHM2, corresponding to BINDING SITE of FIG. 26A. FIG. 26D illustrates the complementarity of the nucleotide sequence of EHM2 BINDING SITE, designated SEQ ID:547149, to the nucleotide sequence of GAM26 RNA of FIG. 26A, designated SEQ ID:20604. A further function of GAM26 is therefore inhibition of (EHM2). Accordingly, utilities of GAM26 include diagnosis and treatment of diseases and clinical conditions with which EHM2 is associated.

[2161] Reference is now made to EHM2 BINDING SITE. EHM2 is a target gene of GAM26, corresponding to GAM26-TARGET GENE of FIG. 26A. EHM2 BINDING SITE is a binding site found in an untranslated region of EHM2, corresponding to BINDING SITE of FIG. 26A. FIG. 26D illustrates the complementarity of the nucleotide sequence of EHM2 BINDING SITE, designated SEQ ID:547151, to the nucleotide sequence of GAM26 RNA of FIG. 26A, designated SEQ ID:20604. Yet a further function of GAM26 is therefore inhibition of (EHM2). Accordingly, utilities of GAM26 include diagnosis and treatment of diseases and clinical conditions with which EHM2 is associated.

[2162] Reference is now made to ELKS BINDING SITE. ELKS is a target gene of GAM26, corresponding to GAM26-TARGET GENE of FIG. 26A. ELKS BINDING SITE is a binding site found in an untranslated region of ELKS, corresponding to BINDING SITE of FIG. 26A. FIG. 26D illustrates the complementarity of the nucleotide sequence of ELKS BINDING SITE, designated SEQ ID:548280, to the nucleotide sequence of GAM26 RNA of FIG. 26A, designated SEQ ID:20604. Another function of GAM26 is therefore inhibition of (ELKS). Accordingly, utilities of GAM26 include diagnosis and treatment of diseases and clinical conditions with which ELKS is associated.

[2163] Reference is now made to ELKS BINDING SITE. ELKS is a target gene of GAM26, corresponding to GAM26-TARGET GENE of FIG. 26A. ELKS BINDING SITE is a binding site found in an untranslated region of ELKS, corresponding to BINDING SITE of FIG. 26A. FIG. 26D illustrates the complementarity of the nucleotide sequence of ELKS BINDING SITE, designated SEQ ID:548281, to the nucleotide sequence of GAM26 RNA of FIG. 26A, designated SEQ ID:20604. Yet another function of GAM26 is therefore inhibition of (ELKS). Accordingly, utilities of GAM26 include diagnosis and treatment of diseases and clinical conditions with which ELKS is associated.

[2164] Reference is now made to ELKS BINDING SITE. ELKS is a target gene of GAM26, corresponding to GAM26-TARGET GENE of FIG. 26A. ELKS BINDING SITE is a binding site found in an untranslated region of ELKS, corresponding to BINDING SITE of FIG. 26A. FIG. 26D illustrates the complementarity of the nucleotide sequence of ELKS BINDING SITE, designated SEQ ID:548286, to the nucleotide sequence of GAM26 RNA of FIG. 26A, designated SEQ ID:20604. An additional function of GAM26 is therefore inhibition of (ELKS). Accordingly, utilities of GAM26 include diagnosis and treatment of diseases and clinical conditions with which ELKS is associated.

[2165] Reference is now made to ELKS BINDING SITE. ELKS is a target gene of GAM26, corresponding to GAM26-TARGET GENE of FIG. 26A. ELKS BINDING SITE is a binding site found in an untranslated region of ELKS, corresponding to BINDING SITE of FIG. 26A. FIG. 26D illustrates the complementarity of the nucleotide sequence of ELKS BINDING SITE, designated SEQ ID:548299, to the nucleotide sequence of GAM26 RNA of FIG. 26A, designated SEQ ID:20604. A further function of GAM26 is therefore inhibition of (ELKS). Accordingly, utilities of GAM26 include diagnosis and treatment of diseases and clinical conditions with which ELKS is associated.

[2166] Reference is now made to ELL2 BINDING SITE. ELL2 is a target gene of GAM26, corresponding to GAM26-TARGET GENE of FIG. 26A. ELL2 BINDING SITE is a binding site found in an untranslated region of ELL2, corresponding to BINDING SITE of FIG. 26A. FIG. 26D illustrates the complementarity of the nucleotide sequence of ELL2 BINDING SITE, designated SEQ ID:548421, to the nucleotide sequence of GAM26 RNA of FIG. 26A, designated SEQ ID:20604. Yet a further function of GAM26 is therefore inhibition of (ELL2). Accordingly, utilities of GAM26 include diagnosis and treatment of diseases and clinical conditions with which ELL2 is associated.

[2167] Reference is now made to ELL2 BINDING SITE. ELL2 is a target gene of GAM26, corresponding to GAM26-TARGET GENE of FIG. 26A. ELL2 BINDING SITE is a binding site found in an untranslated region of ELL2, corresponding to BINDING SITE of FIG. 26A. FIG. 26D illustrates the complementarity of the nucleotide sequence of ELL2 BINDING SITE, designated SEQ ID:548442, to the nucleotide sequence of GAM26 RNA of FIG. 26A, designated SEQ ID:20604. Another function of GAM26 is therefore inhibition of (ELL2). Accordingly, utilities of GAM26 include diagnosis and treatment of diseases and clinical conditions with which ELL2 is associated.

[2168] Reference is now made to FAF1 BINDING SITE. FAF1 is a target gene of GAM26, corresponding to GAM26-TARGET GENE of FIG. 26A. FAF1 BINDING SITE is a binding site found in an untranslated region of FAF1, corresponding to BINDING SITE of FIG. 26A. FIG. 26D illustrates the complementarity of the nucleotide sequence of FAF1 BINDING SITE, designated SEQ ID:552942, to the nucleotide sequence of GAM26 RNA of FIG. 26A, designated SEQ ID:20604. Yet another function of GAM26 is therefore inhibition of (FAF1). Accordingly, utilities of GAM26 include diagnosis and treatment of diseases and clinical conditions with which FAF1 is associated.

[2169] Reference is now made to FAF1 BINDING SITE. FAF1 is a target gene of GAM26, corresponding to GAM26-TARGET GENE of FIG. 26A. FAF1BINDING SITE is a binding site found in an untranslated region of FAF1, corresponding to BINDING SITE of FIG. 26A. FIG. 26D illustrates the complementarity of the nucleotide sequence of FAF1 BINDING SITE, designated SEQ ID:552963, to the nucleotide sequence of GAM26 RNA of FIG. 26A, designated SEQ ID:20604. An additional function of GAM26 is therefore inhibition of (FAF1). Accordingly, utilities of GAM26 include diagnosis and treatment of diseases and clinical conditions with which FAF1 is associated.

[2170] Reference is now made to FEM1B BINDING SITE. FEM1B is a target gene of GAM26, corresponding to GAM26-TARGET GENE of FIG. 26A. FEM1B BINDING SITE is a binding site found in an untranslated region of FEM1B, corresponding to BINDING SITE of FIG. 26A. FIG. 26D illustrates the complementarity of the nucleotide sequence of FEM1B BINDING SITE, designated SEQ ID:556003, to the nucleotide sequence of GAM26 RNA of FIG. 26A, designated SEQ ID:20604. A further function of GAM26 is therefore inhibition of (FEM1B). Accordingly, utilities of GAM26 include diagnosis and treatment of diseases and clinical conditions with which FEM1B is associated.

[2171] Reference is now made to FJX1 BINDING SITE. FJX1 is a target gene of GAM26, corresponding to GAM26-TARGET GENE of FIG. 26A. FJX1 BINDING SITE is a binding site found in an untranslated region of FJX1, corresponding to BINDING SITE of FIG. 26A. FIG. 26D illustrates the complementarity of the nucleotide sequence of FJX1 BINDING SITE, designated SEQ ID:557158, to the nucleotide sequence of GAM26 RNA of FIG. 26A, designated SEQ ID:20604. Yet a further function of GAM26 is therefore inhibition of (FJX1). Accordingly, utilities of GAM26 include diagnosis and treatment of diseases and clinical conditions with which FJX1 is associated.

[2172] Reference is now made to FLJ10211 BINDING SITE. FLJ10211 is a target gene of GAM26, corresponding to GAM26-TARGET GENE of FIG. 26A. FLJ10211 BINDING SITE is a binding site found in an untranslated region of FLJ10211, corresponding to BINDING SITE of FIG. 26A. FIG. 26D illustrates the complementarity of the nucleotide sequence of FLJ10211 BINDING SITE, designated SEQ ID:562466, to the nucleotide sequence of GAM26 RNA of FIG. 26A, designated SEQ ID:20604. Another function of GAM26 is therefore inhibition of (FLJ10211). Accordingly, utilities of GAM26 include diagnosis and treatment of diseases and clinical conditions with which FLJ10211 is associated.

[2173] Reference is now made to FLJ10211 BINDING SITE. FLJ10211 is a target gene of GAM26, corresponding to GAM26-TARGET GENE of FIG. 26A. FLJ10211 BINDING SITE is a binding site found in an untranslated region of FLJ10211, corresponding to BINDING SITE of FIG. 26A. FIG. 26D illustrates the complementarity of the nucleotide sequence of FLJ10211 BINDING SITE, designated SEQ ID:562496, to the nucleotide sequence of GAM26 RNA of FIG. 26A, designated SEQ ID:20604. Yet another function of GAM26 is therefore inhibition of (FLJ10211). Accordingly, utilities of GAM26 include diagnosis and treatment of diseases and clinical conditions with which FLJ10211 is associated.

[2174] Reference is now made to FLJ10211 BINDING SITE. FLJ10211 is a target gene of GAM26, corresponding to GAM26-TARGET GENE of FIG. 26A. FLJ10211 BINDING SITE is a binding site found in an untranslated region of FLJ10211, corresponding to BINDING SITE of FIG. 26A. FIG. 26D illustrates the complementarity of the nucleotide sequence of FLJ10211 BINDING SITE, designated SEQ ID:562509, to the nucleotide sequence of GAM26 RNA of FIG. 26A, designated SEQ ID:20604. An additional function of GAM26 is therefore inhibition of (FLJ10211). Accordingly, utilities of GAM26 include diagnosis and treatment of diseases and clinical conditions with which FLJ10211 is associated.

[2175] Reference is now made to FLJ10244 BINDING SITE. FLJ10244 is a target gene of GAM26, corresponding to GAM26-TARGET GENE of FIG. 26A. FLJ10244 BINDING SITE is a binding site found in an untranslated region of FLJ10244, corresponding to BINDING SITE of FIG. 26A. FIG. 26D illustrates the complementarity of the nucleotide sequence of FLJ10244 BINDING SITE, designated SEQ ID:562895, to the nucleotide sequence of GAM26 RNA of FIG. 26A, designated SEQ ID:20604. A further function of GAM26 is therefore inhibition of (FLJ10244). Accordingly, utilities of GAM26 include diagnosis and treatment of diseases and clinical conditions with which FLJ10244 is associated.

[2176] Reference is now made to FLJ10244 BINDING SITE. FLJ10244 is a target gene of GAM26, corresponding to GAM26-TARGET GENE of FIG. 26A. FLJ10244 BINDING SITE is a binding site found in an untranslated region of FLJ10244, corresponding to BINDING SITE of FIG. 26A. FIG. 26D illustrates the complementarity of the nucleotide sequence of FLJ10244 BINDING SITE, designated SEQ ID:562897, to the nucleotide sequence of GAM26 RNA of FIG. 26A, designated SEQ ID:20604. Yet a further function of GAM26 is therefore inhibition of (FLJ10244). Accordingly, utilities of GAM26 include diagnosis and treatment of diseases and clinical conditions with which FLJ10244 is associated.

[2177] Reference is now made to FLJ10244 BINDING SITE. FLJ10244 is a target gene of GAM26, corresponding to GAM26-TARGET GENE of FIG. 26A. FLJ10244 BINDING SITE is a binding site found in an untranslated region of FLJ10244, corresponding to BINDING SITE of FIG. 26A. FIG. 26D illustrates the complementarity of the nucleotide sequence of FLJ10244 BINDING SITE, designated SEQ ID:562906, to the nucleotide sequence of GAM26 RNA of FIG. 26A, designated SEQ ID:20604. Another function of GAM26 is therefore inhibition of (FLJ10244). Accordingly, utilities of GAM26 include diagnosis and treatment of diseases and clinical conditions with which FLJ10244 is associated.

[2178] Reference is now made to FLJ10244 BINDING SITE. FLJ10244 is a target gene of GAM26, corresponding to GAM26-TARGET GENE of FIG. 26A. FLJ10244 BINDING SITE is a binding site found in an untranslated region of FLJ10244, corresponding to BINDING SITE of FIG. 26A. FIG. 26D illustrates the complementarity of the nucleotide sequence of FLJ10244 BINDING SITE, designated SEQ ID:562923, to the nucleotide sequence of GAM26 RNA of FIG. 26A, designated SEQ ID:20604. Yet another function of GAM26 is therefore inhibition of (FLJ10244). Accordingly, utilities of GAM26 include diagnosis and treatment of diseases and clinical conditions with which FLJ10244 is associated.

[2179] Reference is now made to FLJ10244 BINDING SITE. FLJ10244 is a target gene of GAM26, corresponding to GAM26-TARGET GENE of FIG. 26A. FLJ10244 BINDING SITE is a binding site found in an untranslated region of FLJ10244, corresponding to BINDING SITE of FIG. 26A. FIG. 26D illustrates the complementarity of the nucleotide sequence of FLJ10244 BINDING SITE, designated SEQ ID:562943, to the nucleotide sequence of GAM26 RNA of FIG. 26A, designated SEQ ID:20604. An additional function of GAM26 is therefore inhibition of (FLJ10244). Accordingly, utilities of GAM26 include diagnosis and treatment of diseases and clinical conditions with which FLJ10244 is associated.

[2180] Reference is now made to FLJ10342 BINDING SITE. FLJ10342 is a target gene of GAM26, corresponding to GAM26-TARGET GENE of FIG. 26A. FLJ10342 BINDING SITE is a binding site found in an untranslated region of FLJ10342, corresponding to BINDING SITE of FIG. 26A. FIG. 26D illustrates the complementarity of the nucleotide sequence of FLJ10342 BINDING SITE, designated SEQ ID:564347, to the nucleotide sequence of GAM26 RNA of FIG. 26A, designated SEQ ID:20604. A further function of GAM26 is therefore inhibition of (FLJ10342). Accordingly, utilities of GAM26 include diagnosis and treatment of diseases and clinical conditions with which FLJ10342 is associated.

[2181] Reference is now made to FLJ10648 BINDING SITE. FLJ10648 is a target gene of GAM26, corresponding to GAM26-TARGET GENE of FIG. 26A. FLJ10648 BINDING SITE is a binding site found in an untranslated region of FLJ10648, corresponding to BINDING SITE of FIG. 26A. FIG. 26D illustrates the complementarity of the nucleotide sequence of FLJ10648 BINDING SITE, designated SEQ ID:569200, to the nucleotide sequence of GAM26 RNA of FIG. 26A, designated SEQ ID:20604. Yet a further function of GAM26 is therefore inhibition of (FLJ10648). Accordingly, utilities of GAM26 include diagnosis and treatment of diseases and clinical conditions with which FLJ10648 is associated.

[2182] Reference is now made to FLJ10709 BINDING SITE. FLJ10709 is a target gene of GAM26, corresponding to GAM26-TARGET GENE of FIG. 26A. FLJ10709 BINDING SITE is a binding site found in an untranslated region of FLJ10709, corresponding to BINDING SITE of FIG. 26A. FIG. 26D illustrates the complementarity of the nucleotide sequence of FLJ10709 BINDING SITE, designated SEQ ID:570431, to the nucleotide sequence of GAM26 RNA of FIG. 26A, designated SEQ ID:20604. Another function of GAM26 is therefore inhibition of (FLJ10709). Accordingly, utilities of GAM26 include diagnosis and treatment of diseases and clinical conditions with which FLJ10709 is associated.

[2183] Reference is now made to FLJ10856 BINDING SITE. FLJ10856 is a target gene of GAM26, corresponding to GAM26-TARGET GENE of FIG. 26A. FLJ10856 BINDING SITE is a binding site found in an untranslated region of FLJ10856, corresponding to BINDING SITE of FIG. 26A. FIG. 26D illustrates the complementarity of the nucleotide sequence of FLJ10856 BINDING SITE, designated SEQ ID:574295, to the nucleotide sequence of GAM26 RNA of FIG. 26A, designated SEQ ID:20604. Yet another function of GAM26 is therefore inhibition of (FLJ10856). Accordingly, utilities of GAM26 include diagnosis and treatment of diseases and clinical conditions with which FLJ10856 is associated.

[2184] Reference is now made to FLJ10925 BINDING SITE. FLJ10925 is a target gene of GAM26, corresponding to GAM26-TARGET GENE of FIG. 26A. FLJ10925 BINDING SITE is a binding site found in an untranslated region of FLJ10925, corresponding to BINDING SITE of FIG. 26A. FIG. 26D illustrates the complementarity of the nucleotide sequence of FLJ10925 BINDING SITE, designated SEQ ID:575621, to the nucleotide sequence of GAM26 RNA of FIG. 26A, designated SEQ ID:20604. An additional function of GAM26 is therefore inhibition of (FLJ10925). Accordingly, utilities of GAM26 include diagnosis and treatment of diseases and clinical conditions with which FLJ10925 is associated.

[2185] Reference is now made to FLJ10996 BINDING SITE. FLJ10996 is a target gene of GAM26, corresponding to GAM26-TARGET GENE of FIG. 26A. FLJ10996 BINDING SITE is a binding site found in an untranslated region of FLJ10996, corresponding to BINDING SITE of FIG. 26A. FIG. 26D illustrates the complementarity of the nucleotide sequence of FLJ10996 BINDING SITE, designated SEQ ID:576651, to the nucleotide sequence of GAM26 RNA of FIG. 26A, designated SEQ ID:20604. A further function of GAM26 is therefore inhibition of (FLJ10996). Accordingly, utilities of GAM26 include diagnosis and treatment of diseases and clinical conditions with which FLJ10996 is associated.

[2186] Reference is now made to FLJ11700 BINDING SITE. FLJ11700 is a target gene of GAM26, corresponding to GAM26-TARGET GENE of FIG. 26A. FLJ11700 BINDING SITE is a binding site found in an untranslated region of FLJ11700, corresponding to BINDING SITE of FIG. 26A. FIG. 26D illustrates the complementarity of the nucleotide sequence of FLJ11700 BINDING SITE, designated SEQ ID:582367, to the nucleotide sequence of GAM26 RNA of FIG. 26A, designated SEQ ID:20604. Yet a further function of GAM26 is therefore inhibition of (FLJ11700). Accordingly, utilities of GAM26 include diagnosis and treatment of diseases and clinical conditions with which FLJ11700 is associated.

[2187] Reference is now made to FLJ12363 BINDING SITE. FLJ12363 is a target gene of GAM26, corresponding to GAM26-TARGET GENE of FIG. 26A. FLJ12363 BINDING SITE is a binding site found in an untranslated region of FLJ12363, corresponding to BINDING SITE of FIG. 26A. FIG. 26D illustrates the complementarity of the nucleotide sequence of FLJ12363 BINDING SITE, designated SEQ ID:587504, to the nucleotide sequence of GAM26 RNA of FIG. 26A, designated SEQ ID:20604. Another function of GAM26 is therefore inhibition of (FLJ12363). Accordingly, utilities of GAM26 include diagnosis and treatment of diseases and clinical conditions with which FLJ12363 is associated.

[2188] Reference is now made to FLJ12363 BINDING SITE. FLJ12363 is a target gene of GAM26, corresponding to GAM26-TARGET GENE of FIG. 26A. FLJ12363 BINDING SITE is a binding site found in an untranslated region of FLJ12363, corresponding to BINDING SITE of FIG. 26A. FIG. 26D illustrates the complementarity of the nucleotide sequence of FLJ12363 BINDING SITE, designated SEQ ID:587507, to the nucleotide sequence of GAM26 RNA of FIG. 26A, designated SEQ ID:20604. Yet another function of GAM26 is therefore inhibition of (FLJ12363). Accordingly, utilities of GAM26 include diagnosis and treatment of diseases and clinical conditions with which FLJ12363 is associated.

[2189] Reference is now made to FLJ12377 BINDING SITE. FLJ12377 is a target gene of GAM26, corresponding to GAM26-TARGET GENE of FIG. 26A. FLJ12377 BINDING SITE is a binding site found in an untranslated region of FLJ12377, corresponding to BINDING SITE of FIG. 26A. FIG. 26D illustrates the complementarity of the nucleotide sequence of FLJ12377 BINDING SITE, designated SEQ ID:587654, to the nucleotide sequence of GAM26 RNA of FIG. 26A, designated SEQ ID:20604. An additional function of GAM26 is therefore inhibition of (FLJ12377). Accordingly, utilities of GAM26 include diagnosis and treatment of diseases and clinical conditions with which FLJ12377 is associated.

[2190] Reference is now made to FLJ12697 BINDING SITE. FLJ12697 is a target gene of GAM26, corresponding to GAM26-TARGET GENE of FIG. 26A. FLJ12697 BINDING SITE is a binding site found in an untranslated region of FLJ12697, corresponding to BINDING SITE of FIG. 26A. FIG. 26D illustrates the complementarity of the nucleotide sequence of FLJ12697 BINDING SITE, designated SEQ ID:592585, to the nucleotide sequence of GAM26 RNA of FIG. 26A, designated SEQ ID:20604. A further function of GAM26 is therefore inhibition of (FLJ12697). Accordingly, utilities of GAM26 include diagnosis and treatment of diseases and clinical conditions with which FLJ12697 is associated.

[2191] Reference is now made to FLJ12750 BINDING SITE. FLJ12750 is a target gene of GAM26, corresponding to GAM26-TARGET GENE of FIG. 26A. FLJ12750 BINDING SITE is a binding site found in an untranslated region of FLJ12750, corresponding to BINDING SITE of FIG. 26A. FIG. 26D illustrates the complementarity of the nucleotide sequence of FLJ12750 BINDING SITE, designated SEQ ID:593299, to the nucleotide sequence of GAM26 RNA of FIG. 26A, designated SEQ ID:20604. Yet a further function of GAM26 is therefore inhibition of (FLJ12750). Accordingly, utilities of GAM26 include diagnosis and treatment of diseases and clinical conditions with which FLJ12750 is associated.

[2192] Reference is now made to FLJ13189 BINDING SITE. FLJ13189 is a target gene of GAM26, corresponding to GAM26-TARGET GENE of FIG. 26A. FLJ13189 BINDING SITE is a binding site found in an untranslated region of FLJ13189, corresponding to BINDING SITE of FIG. 26A. FIG. 26D illustrates the complementarity of the nucleotide sequence of FLJ13189 BINDING SITE, designated SEQ ID:599594, to the nucleotide sequence of GAM26 RNA of FIG. 26A, designated SEQ ID:20604. Another function of GAM26 is therefore inhibition of (FLJ13189). Accordingly, utilities of GAM26 include diagnosis and treatment of diseases and clinical conditions with which FLJ13189 is associated.

[2193] Reference is now made to FLJ13189 BINDING SITE. FLJ13189 is a target gene of GAM26, corresponding to GAM26-TARGET GENE of FIG. 26A. FLJ13189 BINDING SITE is a binding site found in an untranslated region of FLJ13189, corresponding to BINDING SITE of FIG. 26A. FIG. 26D illustrates the complementarity of the nucleotide sequence of FLJ13189 BINDING SITE, designated SEQ ID:599628, to the nucleotide sequence of GAM26 RNA of FIG. 26A, designated SEQ ID:20604. Yet another function of GAM26 is therefore inhibition of (FLJ13189). Accordingly, utilities of GAM26 include diagnosis and treatment of diseases and clinical conditions with which FLJ13189 is associated.

[2194] Reference is now made to FLJ13194 BINDING SITE. FLJ13194 is a target gene of GAM26, corresponding to GAM26-TARGET GENE of FIG. 26A. FLJ13194 BINDING SITE is a binding site found in an untranslated region of FLJ13194, corresponding to BINDING SITE of FIG. 26A. FIG. 26D illustrates the complementarity of the nucleotide sequence of FLJ13194 BINDING SITE, designated SEQ ID:600122, to the nucleotide sequence of GAM26 RNA of FIG. 26A, designated SEQ ID:20604. An additional function of GAM26 is therefore inhibition of (FLJ13194). Accordingly, utilities of GAM26 include diagnosis and treatment of diseases and clinical conditions with which FLJ13194 is associated.

[2195] Reference is now made to FLJ13340 BINDING SITE. FLJ13340 is a target gene of GAM26, corresponding to GAM26-TARGET GENE of FIG. 26A. FLJ13340 BINDING SITE is a binding site found in an untranslated region of FLJ13340, corresponding to BINDING SITE of FIG. 26A. FIG. 26D illustrates the complementarity of the nucleotide sequence of FLJ13340 BINDING SITE, designated SEQ ID:601522, to the nucleotide sequence of GAM26 RNA of FIG. 26A, designated SEQ ID:20604. A further function of GAM26 is therefore inhibition of (FLJ13340). Accordingly, utilities of GAM26 include diagnosis and treatment of diseases and clinical conditions with which FLJ13340 is associated.

[2196] Reference is now made to TBDN100 BINDING SITE. TBDN100 is a target gene of GAM26, corresponding to GAM26-TARGET GENE of FIG. 26A. TBDN100 BINDING SITE is a binding site found in an untranslated region of TBDN100, corresponding to BINDING SITE of FIG. 26A. FIG. 26D illustrates the complementarity of the nucleotide sequence of TBDN100 BINDING SITE, designated SEQ ID:601522, to the nucleotide sequence of GAM26 RNA of FIG. 26A, designated SEQ ID:20604. Yet a further function of GAM26 is therefore inhibition of (TBDN100). Accordingly, utilities of GAM26 include diagnosis and treatment of diseases and clinical conditions with which TBDN100 is associated.

[2197] Reference is now made to FLJ13855 BINDING SITE. FLJ13855 is a target gene of GAM26, corresponding to GAM26-TARGET GENE of FIG. 26A. FLJ13855 BINDING SITE is a binding site found in an untranslated region of FLJ13855, corresponding to BINDING SITE of FIG. 26A. FIG. 26D illustrates the complementarity of the nucleotide sequence of FLJ13855 BINDING SITE, designated SEQ ID:605857, to the nucleotide sequence of GAM26 RNA of FIG. 26A, designated SEQ ID:20604. Another function of GAM26 is therefore inhibition of (FLJ13855). Accordingly, utilities of GAM26 include diagnosis and treatment of diseases and clinical conditions with which FLJ13855 is associated.

[2198] Reference is now made to FLJ13855 BINDING SITE. FLJ13855 is a target gene of GAM26, corresponding to GAM26-TARGET GENE of FIG. 26A. FLJ13855 BINDING SITE is a binding site found in an untranslated region of FLJ13855, corresponding to BINDING SITE of FIG. 26A. FIG. 26D illustrates the complementarity of the nucleotide sequence of FLJ13855 BINDING SITE, designated SEQ ID:605858, to the nucleotide sequence of GAM26 RNA of FIG. 26A, designated SEQ ID:20604. Yet another function of GAM26 is therefore inhibition of (FLJ13855). Accordingly, utilities of GAM26 include diagnosis and treatment of diseases and clinical conditions with which FLJ13855 is associated.

[2199] Reference is now made to FLJ14299 BINDING SITE. FLJ14299 is a target gene of GAM26, corresponding to GAM26-TARGET GENE of FIG. 26A. FLJ14299 BINDING SITE is a binding site found in an untranslated region of FLJ14299, corresponding to BINDING SITE of FIG. 26A. FIG. 26D illustrates the complementarity of the nucleotide sequence of FLJ14299 BINDING SITE, designated SEQ ID:610393, to the nucleotide sequence of GAM26 RNA of FIG. 26A, designated SEQ ID:20604. An additional function of GAM26 is therefore inhibition of (FLJ14299). Accordingly, utilities of GAM26 include diagnosis and treatment of diseases and clinical conditions with which FLJ14299 is associated.

[2200] Reference is now made to FLJ14451 BINDING SITE. FLJ14451 is a target gene of GAM26, corresponding to GAM26-TARGET GENE of FIG. 26A. FLJ14451 BINDING SITE is a binding site found in an untranslated region of FLJ14451, corresponding to BINDING SITE of FIG. 26A. FIG. 26D illustrates the complementarity of the nucleotide sequence of FLJ14451 BINDING SITE, designated SEQ ID:612603, to the nucleotide sequence of GAM26 RNA of FIG. 26A, designated SEQ ID:20604. A further function of GAM26 is therefore inhibition of (FLJ14451). Accordingly, utilities of GAM26 include diagnosis and treatment of diseases and clinical conditions with which FLJ14451 is associated.

[2201] Reference is now made to FLJ14451 BINDING SITE. FLJ14451 is a target gene of GAM26, corresponding to GAM26-TARGET GENE of FIG. 26A. FLJ14451 BINDING SITE is a binding site found in an untranslated region of FLJ14451, corresponding to BINDING SITE of FIG. 26A. FIG. 26D illustrates the complementarity of the nucleotide sequence of FLJ14451 BINDING SITE, designated SEQ ID:612607, to the nucleotide sequence of GAM26 RNA of FIG. 26A, designated SEQ ID:20604. Yet a further function of GAM26 is therefore inhibition of (FLJ14451). Accordingly, utilities of GAM26 include diagnosis and treatment of diseases and clinical conditions with which FLJ14451 is associated.

[2202] Reference is now made to FLJ20288 BINDING SITE. FLJ20288 is a target gene of GAM26, corresponding to GAM26-TARGET GENE of FIG. 26A. FLJ20288 BINDING SITE is a binding site found in an untranslated region of FLJ20288, corresponding to BINDING SITE of FIG. 26A. FIG. 26D illustrates the complementarity of the nucleotide sequence of FLJ20288 BINDING SITE, designated SEQ ID:625741, to the nucleotide sequence of GAM26 RNA of FIG. 26A, designated SEQ ID:20604. Another function of GAM26 is therefore inhibition of (FLJ20288). Accordingly, utilities of GAM26 include diagnosis and treatment of diseases and clinical conditions with which FLJ20288 is associated.

[2203] Reference is now made to FLJ20288 BINDING SITE. FLJ20288 is a target gene of GAM26, corresponding to GAM26-TARGET GENE of FIG. 26A. FLJ20288 BINDING SITE is a binding site found in an untranslated region of FLJ20288, corresponding to BINDING SITE of FIG. 26A. FIG. 26D illustrates the complementarity of the nucleotide sequence of FLJ20288 BINDING SITE, designated SEQ ID:625764, to the nucleotide sequence of GAM26 RNA of FIG. 26A, designated SEQ ID:20604. Yet another function of GAM26 is therefore inhibition of (FLJ20288). Accordingly, utilities of GAM26 include diagnosis and treatment of diseases and clinical conditions with which FLJ20288 is associated.

[2204] Reference is now made to PCAF BINDING SITE. PCAF is a target gene of GAM26, corresponding to GAM26-TARGET GENE of FIG. 26A. PCAF BINDING SITE is a binding site found in an untranslated region of PCAF, corresponding to BINDING SITE of FIG. 26A. FIG. 26D illustrates the complementarity of the nucleotide sequence of PCAF BINDING SITE, designated SEQ ID:625767, to the nucleotide sequence of GAM26 RNA of FIG. 26A, designated SEQ ID:20604. An additional function of GAM26 is therefore inhibition of (PCAF). Accordingly, utilities of GAM26 include diagnosis and treatment of diseases and clinical conditions with which PCAF is associated.

[2205] Reference is now made to FLJ20288 BINDING SITE. FLJ20288 is a target gene of GAM26, corresponding to GAM26-TARGET GENE of FIG. 26A. FLJ20288 BINDING SITE is a binding site found in an untranslated region of FLJ20288, corresponding to BINDING SITE of FIG. 26A. FIG. 26D illustrates the complementarity of the nucleotide sequence of FLJ20288 BINDING SITE, designated SEQ ID:625783, to the nucleotide sequence of GAM26 RNA of FIG. 26A, designated SEQ ID:20604. A further function of GAM26 is therefore inhibition of (FLJ20288). Accordingly, utilities of GAM26 include diagnosis and treatment of diseases and clinical conditions with which FLJ20288 is associated.

[2206] Reference is now made to FLJ20288 BINDING SITE. FLJ20288 is a target gene of GAM26, corresponding to GAM26-TARGET GENE of FIG. 26A. FLJ20288 BINDING SITE is a binding site found in an untranslated region of FLJ20288, corresponding to BINDING SITE of FIG. 26A. FIG. 26D illustrates the complementarity of the nucleotide sequence of FLJ20288 BINDING SITE, designated SEQ ID:625785, to the nucleotide sequence of GAM26 RNA of FIG. 26A, designated SEQ ID:20604. Yet a further function of GAM26 is therefore inhibition of (FLJ20288). Accordingly, utilities of GAM26 include diagnosis and treatment of diseases and clinical conditions with which FLJ20288 is associated.

[2207] Reference is now made to FLJ20288 BINDING SITE. FLJ20288 is a target gene of GAM26, corresponding to GAM26-TARGET GENE of FIG. 26A. FLJ20288 BINDING SITE is a binding site found in an untranslated region of FLJ20288, corresponding to BINDING SITE of FIG. 26A. FIG. 26D illustrates the complementarity of the nucleotide sequence of FLJ20288 BINDING SITE, designated SEQ ID:625802, to the nucleotide sequence of GAM26 RNA of FIG. 26A, designated SEQ ID:20604. Another function of GAM26 is therefore inhibition of (FLJ20288). Accordingly, utilities of GAM26 include diagnosis and treatment of diseases and clinical conditions with which FLJ20288 is associated.

[2208] Reference is now made to FLJ20400 BINDING SITE. FLJ20400 is a target gene of GAM26, corresponding to GAM26-TARGET GENE of FIG. 26A. FLJ20400 BINDING SITE is a binding site found in an untranslated region of FLJ20400, corresponding to BINDING SITE of FIG. 26A. FIG. 26D illustrates the complementarity of the nucleotide sequence of FLJ20400 BINDING SITE, designated SEQ ID:629258, to the nucleotide sequence of GAM26 RNA of FIG. 26A, designated SEQ ID:20604. Yet another function of GAM26 is therefore inhibition of (FLJ20400). Accordingly, utilities of GAM26 include diagnosis and treatment of diseases and clinical conditions with which FLJ20400 is associated.

[2209] Reference is now made to FLJ20421 BINDING SITE. FLJ20421 is a target gene of GAM26, corresponding to GAM26-TARGET GENE of FIG. 26A. FLJ20421 BINDING SITE is a binding site found in an untranslated region of FLJ20421, corresponding to BINDING SITE of FIG. 26A. FIG. 26D illustrates the complementarity of the nucleotide sequence of FLJ20421 BINDING SITE, designated SEQ ID:629645, to the nucleotide sequence of GAM26 RNA of FIG. 26A, designated SEQ ID:20604. An additional function of GAM26 is therefore inhibition of (FLJ20421). Accordingly, utilities of GAM26 include diagnosis and treatment of diseases and clinical conditions with which FLJ20421 is associated.

[2210] Reference is now made to FLJ20421 BINDING SITE. FLJ20421 is a target gene of GAM26, corresponding to GAM26-TARGET GENE of FIG. 26A. FLJ20421 BINDING SITE is a binding site found in an untranslated region of FLJ20421, corresponding to BINDING SITE of FIG. 26A. FIG. 26D illustrates the complementarity of the nucleotide sequence of FLJ20421 BINDING SITE, designated SEQ ID:629655, to the nucleotide sequence of GAM26 RNA of FIG. 26A, designated SEQ ID:20604. A further function of GAM26 is therefore inhibition of (FLJ20421). Accordingly, utilities of GAM26 include diagnosis and treatment of diseases and clinical conditions with which FLJ20421 is associated.

[2211] Reference is now made to FLJ20421 BINDING SITE. FLJ20421 is a target gene of GAM26, corresponding to GAM26-TARGET GENE of FIG. 26A. FLJ20421 BINDING SITE is a binding site found in an untranslated region of FLJ20421, corresponding to BINDING SITE of FIG. 26A. FIG. 26D illustrates the complementarity of the nucleotide sequence of FLJ20421 BINDING SITE, designated SEQ ID:629660, to the nucleotide sequence of GAM26 RNA of FIG. 26A, designated SEQ ID:20604. Yet a further function of GAM26 is therefore inhibition of (FLJ20421). Accordingly, utilities of GAM26 include diagnosis and treatment of diseases and clinical conditions with which FLJ20421 is associated.

[2212] Reference is now made to FLJ20425 BINDING SITE. FLJ20425 is a target gene of GAM26, corresponding to GAM26-TARGET GENE of FIG. 26A. FLJ20425 BINDING SITE is a binding site found in an untranslated region of FLJ20425, corresponding to BINDING SITE of FIG. 26A. FIG. 26D illustrates the complementarity of the nucleotide sequence of FLJ20425 BINDING SITE, designated SEQ ID:629739, to the nucleotide sequence of GAM26 RNA of FIG. 26A, designated SEQ ID:20604. Another function of GAM26 is therefore inhibition of (FLJ20425). Accordingly, utilities of GAM26 include diagnosis and treatment of diseases and clinical conditions with which FLJ20425 is associated.

[2213] Reference is now made to FLJ20539 BINDING SITE. FLJ20539 is a target gene of GAM26, corresponding to GAM26-TARGET GENE of FIG. 26A. FLJ20539 BINDING SITE is a binding site found in an untranslated region of FLJ20539, corresponding to BINDING SITE of FIG. 26A. FIG. 26D illustrates the complementarity of the nucleotide sequence of FLJ20539 BINDING SITE, designated SEQ ID:632084, to the nucleotide sequence of GAM26 RNA of FIG. 26A, designated SEQ ID:20604. Yet another function of GAM26 is therefore inhibition of (FLJ20539). Accordingly, utilities of GAM26 include diagnosis and treatment of diseases and clinical conditions with which FLJ20539 is associated.

[2214] Reference is now made to FLJ20718 BINDING SITE. FLJ20718 is a target gene of GAM26, corresponding to GAM26-TARGET GENE of FIG. 26A. FLJ20718 BINDING SITE is a binding site found in an untranslated region of FLJ20718, corresponding to BINDING SITE of FIG. 26A. FIG. 26D illustrates the complementarity of the nucleotide sequence of FLJ20718 BINDING SITE, designated SEQ ID:635286, to the nucleotide sequence of GAM26 RNA of FIG. 26A, designated SEQ ID:20604. An additional function of GAM26 is therefore inhibition of (FLJ20718). Accordingly, utilities of GAM26 include diagnosis and treatment of diseases and clinical conditions with which FLJ20718 is associated.

[2215] Reference is now made to FLJ21588 BINDING SITE. FLJ21588 is a target gene of GAM26, corresponding to GAM26-TARGET GENE of FIG. 26A. FLJ21588 BINDING SITE is a binding site found in an untranslated region of FLJ21588, corresponding to BINDING SITE of FIG. 26A. FIG. 26D illustrates the complementarity of the nucleotide sequence of FLJ21588 BINDING SITE, designated SEQ ID:641646, to the nucleotide sequence of GAM26 RNA of FIG. 26A, designated SEQ ID:20604. A further function of GAM26 is therefore inhibition of (FLJ21588). Accordingly, utilities of GAM26 include diagnosis and treatment of diseases and clinical conditions with which FLJ21588 is associated.

[2216] Reference is now made to FLJ21613 BINDING SITE. FLJ21613 is a target gene of GAM26, corresponding to GAM26-TARGET GENE of FIG. 26A. FLJ21613 BINDING SITE is a binding site found in an untranslated region of FLJ21613, corresponding to BINDING SITE of FIG. 26A. FIG. 26D illustrates the complementarity of the nucleotide sequence of FLJ21613 BINDING SITE, designated SEQ ID:641999, to the nucleotide sequence of GAM26 RNA of FIG. 26A, designated SEQ ID:20604. Yet a further function of GAM26 is therefore inhibition of (FLJ21613). Accordingly, utilities of GAM26 include diagnosis and treatment of diseases and clinical conditions with which FLJ21613 is associated.

[2217] Reference is now made to FLJ22393 BINDING SITE. FLJ22393 is a target gene of GAM26, corresponding to GAM26-TARGET GENE of FIG. 26A. FLJ22393 BINDING SITE is a binding site found in an untranslated region of FLJ22393, corresponding to BINDING SITE of FIG. 26A. FIG. 26D illustrates the complementarity of the nucleotide sequence of FLJ22393 BINDING SITE, designated SEQ ID:649088, to the nucleotide sequence of GAM26 RNA of FIG. 26A, designated SEQ ID:20604. Another function of GAM26 is therefore inhibition of (FLJ22393). Accordingly, utilities of GAM26 include diagnosis and treatment of diseases and clinical conditions with which FLJ22393 is associated.

[2218] Reference is now made to FLJ23251 BINDING SITE. FLJ23251 is a target gene of GAM26, corresponding to GAM26-TARGET GENE of FIG. 26A. FLJ23251 BINDING SITE is a binding site found in an untranslated region of FLJ23251, corresponding to BINDING SITE of FIG. 26A. FIG. 26D illustrates the complementarity of the nucleotide sequence of FLJ23251 BINDING SITE, designated SEQ ID:657789, to the nucleotide sequence of GAM26 RNA of FIG. 26A, designated SEQ ID:20604. Yet another function of GAM26 is therefore inhibition of (FLJ23251). Accordingly, utilities of GAM26 include diagnosis and treatment of diseases and clinical conditions with which FLJ23251 is associated.

[2219] Reference is now made to FLJ31564 BINDING SITE. FLJ31564 is a target gene of GAM26, corresponding to GAM26-TARGET GENE of FIG. 26A. FLJ31564 BINDING SITE is a binding site found in an untranslated region of FLJ31564, corresponding to BINDING SITE of FIG. 26A. FIG. 26D illustrates the complementarity of the nucleotide sequence of FLJ31564 BINDING SITE, designated SEQ ID:665686, to the nucleotide sequence of GAM26 RNA of FIG. 26A, designated SEQ ID:20604. An additional function of GAM26 is therefore inhibition of (FLJ31564). Accordingly, utilities of GAM26 include diagnosis and treatment of diseases and clinical conditions with which FLJ31564 is associated.

[2220] Reference is now made to FLJ31978 BINDING SITE. FLJ31978 is a target gene of GAM26, corresponding to GAM26-TARGET GENE of FIG. 26A. FLJ31978 BINDING SITE is a binding site found in an untranslated region of FLJ31978, corresponding to BINDING SITE of FIG. 26A. FIG. 26D illustrates the complementarity of the nucleotide sequence of FLJ31978 BINDING SITE, designated SEQ ID:666546, to the nucleotide sequence of GAM26 RNA of FIG. 26A, designated SEQ ID:20604. A further function of GAM26 is therefore inhibition of (FLJ31978). Accordingly, utilities of GAM26 include diagnosis and treatment of diseases and clinical conditions with which FLJ31978 is associated.

[2221] Reference is now made to FOXO3A BINDING SITE. FOXO3A is a target gene of GAM26, corresponding to GAM26-TARGET GENE of FIG. 26A. FOXO3A BINDING SITE is a binding site found in an untranslated region of FOXO3A, corresponding to BINDING SITE of FIG. 26A. FIG. 26D illustrates the complementarity of the nucleotide sequence of FOXO3A BINDING SITE, designated SEQ ID:669368, to the nucleotide sequence of GAM26 RNA of FIG. 26A, designated SEQ ID:20604. Yet a further function of GAM26 is therefore inhibition of (FOXO3A). Accordingly, utilities of GAM26 include diagnosis and treatment of diseases and clinical conditions with which FOXO3A is associated.

[2222] Reference is now made to FUBP3 BINDING SITE. FUBP3 is a target gene of GAM26, corresponding to GAM26-TARGET GENE of FIG. 26A. FUBP3 BINDING SITE is a binding site found in an untranslated region of FUBP3, corresponding to BINDING SITE of FIG. 26A. FIG. 26D illustrates the complementarity of the nucleotide sequence of FUBP3 BINDING SITE, designated SEQ ID:670361, to the nucleotide sequence of GAM26 RNA of FIG. 26A, designated SEQ ID:20604. Another function of GAM26 is therefore inhibition of (FUBP3). Accordingly, utilities of GAM26 include diagnosis and treatment of diseases and clinical conditions with which FUBP3 is associated.

[2223] Reference is now made to FUBP3 BINDING SITE. FUBP3 is a target gene of GAM26, corresponding to GAM26-TARGET GENE of FIG. 26A. FUBP3 BINDING SITE is a binding site found in an untranslated region of FUBP3, corresponding to BINDING SITE of FIG. 26A. FIG. 26D illustrates the complementarity of the nucleotide sequence of FUBP3 BINDING SITE, designated SEQ ID:670394, to the nucleotide sequence of GAM26 RNA of FIG. 26A, designated SEQ ID:20604. Yet another function of GAM26 is therefore inhibition of (FUBP3). Accordingly, utilities of GAM26 include diagnosis and treatment of diseases and clinical conditions with which FUBP3 is associated.

[2224] Reference is now made to GIOT-3 BINDING SITE. GIOT-3 is a target gene of GAM26, corresponding to GAM26-TARGET GENE of FIG. 26A. GIOT-3 BINDING SITE is a binding site found in an untranslated region of GIOT-3, corresponding to BINDING SITE of FIG. 26A. FIG. 26D illustrates the complementarity of the nucleotide sequence of GIOT-3 BINDING SITE, designated SEQ ID:674988, to the nucleotide sequence of GAM26 RNA of FIG. 26A, designated SEQ ID:20604. An additional function of GAM26 is therefore inhibition of (GIOT-3). Accordingly, utilities of GAM26 include diagnosis and treatment of diseases and clinical conditions with which GIOT-3 is associated.

[2225] Reference is now made to GIOT-3 BINDING SITE. GIOT-3 is a target gene of GAM26, corresponding to GAM26-TARGET GENE of FIG. 26A. GIOT-3 BINDING SITE is a binding site found in an untranslated region of GIOT-3, corresponding to BINDING SITE of FIG. 26A. FIG. 26D illustrates the complementarity of the nucleotide sequence of GIOT-3 BINDING SITE, designated SEQ ID:674995, to the nucleotide sequence of GAM26 RNA of FIG. 26A, designated SEQ ID:20604. A further function of GAM26 is therefore inhibition of (GIOT-3). Accordingly, utilities of GAM26 include diagnosis and treatment of diseases and clinical conditions with which GIOT-3 is associated.

[2226] Reference is now made to MGC14425 BINDING SITE. MGC14425 is a target gene of GAM26, corresponding to GAM26-TARGET GENE of FIG. 26A. MGC14425 BINDING SITE is a binding site found in an untranslated region of MGC14425, corresponding to BINDING SITE of FIG. 26A. FIG. 26D illustrates the complementarity of the nucleotide sequence of MGC14425 BINDING SITE, designated SEQ ID:676856, to the nucleotide sequence of GAM26 RNA of FIG. 26A, designated SEQ ID:20604. Yet a further function of GAM26 is therefore inhibition of (MGC14425). Accordingly, utilities of GAM26 include diagnosis and treatment of diseases and clinical conditions with which MGC14425 is associated.

[2227] Reference is now made to GNA13 BINDING SITE. GNA13 is a target gene of GAM26, corresponding to GAM26-TARGET GENE of FIG. 26A. GNA13 BINDING SITE is a binding site found in an untranslated region of GNA13, corresponding to BINDING SITE of FIG. 26A. FIG. 26D illustrates the complementarity of the nucleotide sequence of GNA13 BINDING SITE, designated SEQ ID:676857, to the nucleotide sequence of GAM26 RNA of FIG. 26A, designated SEQ ID:20604. Another function of GAM26 is therefore inhibition of (GNA13). Accordingly, utilities of GAM26 include diagnosis and treatment of diseases and clinical conditions with which GNA13 is associated.

[2228] Reference is now made to GOLPH2 BINDING SITE. GOLPH2 is a target gene of GAM26, corresponding to GAM26-TARGET GENE of FIG. 26A. GOLPH2 BINDING SITE is a binding site found in an untranslated region of GOLPH2, corresponding to BINDING SITE of FIG. 26A. FIG. 26D illustrates the complementarity of the nucleotide sequence of GOLPH2 BINDING SITE, designated SEQ ID:677940, to the nucleotide sequence of GAM26 RNA of FIG. 26A, designated SEQ ID:20604. Yet another function of GAM26 is therefore inhibition of (GOLPH2). Accordingly, utilities of GAM26 include diagnosis and treatment of diseases and clinical conditions with which GOLPH2 is associated.

[2229] Reference is now made to GSK3A BINDING SITE. GSK3A is a target gene of GAM26, corresponding to GAM26-TARGET GENE of FIG. 26A. GSK3A BINDING SITE is a binding site found in an untranslated region of GSK3A, corresponding to BINDING SITE of FIG. 26A. FIG. 26D illustrates the complementarity of the nucleotide sequence of GSK3A BINDING SITE, designated SEQ ID:681389, to the nucleotide sequence of GAM26 RNA of FIG. 26A, designated SEQ ID:20604. An additional function of GAM26 is therefore inhibition of (GSK3A). Accordingly, utilities of GAM26 include diagnosis and treatment of diseases and clinical conditions with which GSK3A is associated.

[2230] Reference is now made to GSK3A BINDING SITE. GSK3A is a target gene of GAM26, corresponding to GAM26-TARGET GENE of FIG. 26A. GSK3A BINDING SITE is a binding site found in an untranslated region of GSK3A, corresponding to BINDING SITE of FIG. 26A. FIG. 26D illustrates the complementarity of the nucleotide sequence of GSK3A BINDING SITE, designated SEQ ID:681400, to the nucleotide sequence of GAM26 RNA of FIG. 26A, designated SEQ ID:20604. A further function of GAM26 is therefore inhibition of (GSK3A). Accordingly, utilities of GAM26 include diagnosis and treatment of diseases and clinical conditions with which GSK3A is associated.

[2231] Reference is now made to GTF2A1 BINDING SITE. GTF2A1 is a target gene of GAM26, corresponding to GAM26-TARGET GENE of FIG. 26A. GTF2A1 BINDING SITE is a binding site found in an untranslated region of GTF2A1, corresponding to BINDING SITE of FIG. 26A. FIG. 26D illustrates the complementarity of the nucleotide sequence of GTF2A1 BINDING SITE, designated SEQ ID:681625, to the nucleotide sequence of GAM26 RNA of FIG. 26A, designated SEQ ID:20604. Yet a further function of GAM26 is therefore inhibition of (GTF2A1). Accordingly, utilities of GAM26 include diagnosis and treatment of diseases and clinical conditions with which GTF2A1 is associated.

[2232] Reference is now made to GTF2A1 BINDING SITE. GTF2A1 is a target gene of GAM26, corresponding to GAM26-TARGET GENE of FIG. 26A. GTF2A1 BINDING SITE is a binding site found in an untranslated region of GTF2A1, corresponding to BINDING SITE of FIG. 26A. FIG. 26D illustrates the complementarity of the nucleotide sequence of GTF2A1 BINDING SITE, designated SEQ ID:681632, to the nucleotide sequence of GAM26 RNA of FIG. 26A, designated SEQ ID:20604. Another function of GAM26 is therefore inhibition of (GTF2A1). Accordingly, utilities of GAM26 include diagnosis and treatment of diseases and clinical conditions with which GTF2A1 is associated.

[2233] Reference is now made to H2AV BINDING SITE. H2AV is a target gene of GAM26, corresponding to GAM26-TARGET GENE of FIG. 26A. H2AV BINDING SITE is a binding site found in an untranslated region of H2AV, corresponding to BINDING SITE of FIG. 26A. FIG. 26D illustrates the complementarity of the nucleotide sequence of H2AV BINDING SITE, designated SEQ ID:683857, to the nucleotide sequence of GAM26 RNA of FIG. 26A, designated SEQ ID:20604. Yet another function of GAM26 is therefore inhibition of (H2AV). Accordingly, utilities of GAM26 include diagnosis and treatment of diseases and clinical conditions with which H2AV is associated.

[2234] Reference is now made to H2AV BINDING SITE. H2AV is a target gene of GAM26, corresponding to GAM26-TARGET GENE of FIG. 26A. H2AV BINDING SITE is a binding site found in an untranslated region of H2AV, corresponding to BINDING SITE of FIG. 26A. FIG. 26D illustrates the complementarity of the nucleotide sequence of H2AV BINDING SITE, designated SEQ ID:683934, to the nucleotide sequence of GAM26 RNA of FIG. 26A, designated SEQ ID:20604. An additional function of GAM26 is therefore inhibition of (H2AV). Accordingly, utilities of GAM26 include diagnosis and treatment of diseases and clinical conditions with which H2AV is associated.

[2235] Reference is now made to HNRPA0 BINDING SITE. HNRPA0 is a target gene of GAM26, corresponding to GAM26-TARGET GENE of FIG. 26A. HNRPA0 BINDING SITE is a binding site found in an untranslated region of HNRPA0, corresponding to BINDING SITE of FIG. 26A. FIG. 26D illustrates the complementarity of the nucleotide sequence of HNRPA0 BINDING SITE, designated SEQ ID:689726, to the nucleotide sequence of GAM26 RNA of FIG. 26A, designated SEQ ID:20604. A further function of GAM26 is therefore inhibition of (HNRPA0). Accordingly, utilities of GAM26 include diagnosis and treatment of diseases and clinical conditions with which HNRPA0 is associated.

[2236] Reference is now made to HRIHFB2122 BINDING SITE. HRIHFB2122 is a target gene of GAM26, corresponding to GAM26-TARGET GENE of FIG. 26A. HRIHFB2122 BINDING SITE is a binding site found in an untranslated region of HRIHFB2122, corresponding to BINDING SITE of FIG. 26A. FIG. 26D illustrates the complementarity of the nucleotide sequence of HRIHFB2122 BINDING SITE, designated SEQ ID:691356, to the nucleotide sequence of GAM26 RNA of FIG. 26A, designated SEQ ID:20604. Yet a further function of GAM26 is therefore inhibition of (HRIHFB2122). Accordingly, utilities of GAM26 include diagnosis and treatment of diseases and clinical conditions with which HRIHFB2122 is associated.

[2237] Reference is now made to HS6ST1 BINDING SITE. HS6ST1 is a target gene of GAM26, corresponding to GAM26-TARGET GENE of FIG. 26A. HS6ST1 BINDING SITE is a binding site found in an untranslated region of HS6ST1, corresponding to BINDING SITE of FIG. 26A. FIG. 26D illustrates the complementarity of the nucleotide sequence of HS6ST1 BINDING SITE, designated SEQ ID:691939, to the nucleotide sequence of GAM26 RNA of FIG. 26A, designated SEQ ID:20604. Another function of GAM26 is therefore inhibition of (HS6ST1). Accordingly, utilities of GAM26 include diagnosis and treatment of diseases and clinical conditions with which HS6ST1 is associated.

[2238] Reference is now made to HSPC195 BINDING SITE. HSPC195 is a target gene of GAM26, corresponding to GAM26-TARGET GENE of FIG. 26A. HSPC195 BINDING SITE is a binding site found in an untranslated region of HSPC195, corresponding to BINDING SITE of FIG. 26A. FIG. 26D illustrates the complementarity of the nucleotide sequence of HSPC195 BINDING SITE, designated SEQ ID:696302, to the nucleotide sequence of GAM26 RNA of FIG. 26A, designated SEQ ID:20604. Yet another function of GAM26 is therefore inhibition of (HSPC195). Accordingly, utilities of GAM26 include diagnosis and treatment of diseases and clinical conditions with which HSPC195 is associated.

[2239] Reference is now made to HSPC195 BINDING SITE. HSPC195 is a target gene of GAM26, corresponding to GAM26-TARGET GENE of FIG. 26A. HSPC195 BINDING SITE is a binding site found in an untranslated region of HSPC195, corresponding to BINDING SITE of FIG. 26A. FIG. 26D illustrates the complementarity of the nucleotide sequence of HSPC195 BINDING SITE, designated SEQ ID:696329, to the nucleotide sequence of GAM26 RNA of FIG. 26A, designated SEQ ID:20604. An additional function of GAM26 is therefore inhibition of (HSPC195). Accordingly, utilities of GAM26 include diagnosis and treatment of diseases and clinical conditions with which HSPC195 is associated.

[2240] Reference is now made to HSPC195 BINDING SITE. HSPC195 is a target gene of GAM26, corresponding to GAM26-TARGET GENE of FIG. 26A. HSPC195 BINDING SITE is a binding site found in an untranslated region of HSPC195, corresponding to BINDING SITE of FIG. 26A. FIG. 26D illustrates the complementarity of the nucleotide sequence of HSPC195 BINDING SITE, designated SEQ ID:696330, to the nucleotide sequence of GAM26 RNA of FIG. 26A, designated SEQ ID:20604. A further function of GAM26 is therefore inhibition of (HSPC195). Accordingly, utilities of GAM26 include diagnosis and treatment of diseases and clinical conditions with which HSPC195 is associated.

[2241] Reference is now made to HSPC195 BINDING SITE. HSPC195 is a target gene of GAM26, corresponding to GAM26-TARGET GENE of FIG. 26A. HSPC195 BINDING SITE is a binding site found in an untranslated region of HSPC195, corresponding to BINDING SITE of FIG. 26A. FIG. 26D illustrates the complementarity of the nucleotide sequence of HSPC195 BINDING SITE, designated SEQ ID:696332, to the nucleotide sequence of GAM26 RNA of FIG. 26A, designated SEQ ID:20604. Yet a further function of GAM26 is therefore inhibition of (HSPC195). Accordingly, utilities of GAM26 include diagnosis and treatment of diseases and clinical conditions with which HSPC195 is associated.

[2242] Reference is now made to HSPC195 BINDING SITE. HSPC195 is a target gene of GAM26, corresponding to GAM26-TARGET GENE of FIG. 26A. HSPC195 BINDING SITE is a binding site found in an untranslated region of HSPC195, corresponding to BINDING SITE of FIG. 26A. FIG. 26D illustrates the complementarity of the nucleotide sequence of HSPC195 BINDING SITE, designated SEQ ID:696333, to the nucleotide sequence of GAM26 RNA of FIG. 26A, designated SEQ ID:20604. Another function of GAM26 is therefore inhibition of (HSPC195). Accordingly, utilities of GAM26 include diagnosis and treatment of diseases and clinical conditions with which HSPC195 is associated.

[2243] Reference is now made to HUMAGCGB BINDING SITE. HUMAGCGB is a target gene of GAM26, corresponding to GAM26-TARGET GENE of FIG. 26A. HUMAGCGB BINDING SITE is a binding site found in an untranslated region of HUMAGCGB, corresponding to BINDING SITE of FIG. 26A. FIG. 26D illustrates the complementarity of the nucleotide sequence of HUMAGCGB BINDING SITE, designated SEQ ID:698714, to the nucleotide sequence of GAM26 RNA of FIG. 26A, designated SEQ ID:20604. Yet another function of GAM26 is therefore inhibition of (HUMAGCGB). Accordingly, utilities of GAM26 include diagnosis and treatment of diseases and clinical conditions with which HUMAGCGB is associated.

[2244] Reference is now made to ILF3 BINDING SITE. ILF3 is a target gene of GAM26, corresponding to GAM26-TARGET GENE of FIG. 26A. ILF3 BINDING SITE is a binding site found in an untranslated region of ILF3, corresponding to BINDING SITE of FIG. 26A. FIG. 26D illustrates the complementarity of the nucleotide sequence of ILF3 BINDING SITE, designated SEQ ID:701811, to the nucleotide sequence of GAM26 RNA of FIG. 26A, designated SEQ ID:20604. An additional function of GAM26 is therefore inhibition of (ILF3). Accordingly, utilities of GAM26 include diagnosis and treatment of diseases and clinical conditions with which ILF3 is associated.

[2245] Reference is now made to ITPK1 BINDING SITE. ITPK1 is a target gene of GAM26, corresponding to GAM26-TARGET GENE of FIG. 26A. ITPK1 BINDING SITE is a binding site found in an untranslated region of ITPK1, corresponding to BINDING SITE of FIG. 26A. FIG. 26D illustrates the complementarity of the nucleotide sequence of ITPK1 BINDING SITE, designated SEQ ID:704065, to the nucleotide sequence of GAM26 RNA of FIG. 26A, designated SEQ ID:20604. A further function of GAM26 is therefore inhibition of (ITPK1). Accordingly, utilities of GAM26 include diagnosis and treatment of diseases and clinical conditions with which ITPK1 is associated.

[2246] Reference is now made to KCNT1 BINDING SITE. KCNT1 is a target gene of GAM26, corresponding to GAM26-TARGET GENE of FIG. 26A. KCNT1 BINDING SITE is a binding site found in an untranslated region of KCNT1, corresponding to BINDING SITE of FIG. 26A. FIG. 26D illustrates the complementarity of the nucleotide sequence of KCNT1 BINDING SITE, designated SEQ ID:707411, to the nucleotide sequence of GAM26 RNA of FIG. 26A, designated SEQ ID:20604. Yet a further function of GAM26 is therefore inhibition of (KCNT1). Accordingly, utilities of GAM26 include diagnosis and treatment of diseases and clinical conditions with which KCNT1 is associated.

[2247] Reference is now made to KIAA0082 BINDING SITE. KIAA0082 is a target gene of GAM26, corresponding to GAM26-TARGET GENE of FIG. 26A. KIAA0082 BINDING SITE is a binding site found in an untranslated region of KIAA0082, corresponding to BINDING SITE of FIG. 26A. FIG. 26D illustrates the complementarity of the nucleotide sequence of KIAA0082 BINDING SITE, designated SEQ ID:710416, to the nucleotide sequence of GAM26 RNA of FIG. 26A, designated SEQ ID:20604. Another function of GAM26 is therefore inhibition of (KIAA0082). Accordingly, utilities of GAM26 include diagnosis and treatment of diseases and clinical conditions with which KIAA0082 is associated.

[2248] Reference is now made to KIAA0082 BINDING SITE. KIAA0082 is a target gene of GAM26, corresponding to GAM26-TARGET GENE of FIG. 26A. KIAA0082 BINDING SITE is a binding site found in an untranslated region of KIAA0082, corresponding to BINDING SITE of FIG. 26A. FIG. 26D illustrates the complementarity of the nucleotide sequence of KIAA0082 BINDING SITE, designated SEQ ID:710439, to the nucleotide sequence of GAM26 RNA of FIG. 26A, designated SEQ ID:20604. Yet another function of GAM26 is therefore inhibition of (KIAA0082). Accordingly, utilities of GAM26 include diagnosis and treatment of diseases and clinical conditions with which KIAA0082 is associated.

[2249] Reference is now made to KIAA0084 BINDING SITE. KIAA0084 is a target gene of GAM26, corresponding to GAM26-TARGET GENE of FIG. 26A. KIAA0084 BINDING SITE is a binding site found in an untranslated region of KIAA0084, corresponding to BINDING SITE of FIG. 26A. FIG. 26D illustrates the complementarity of the nucleotide sequence of KIAA0084 BINDING SITE, designated SEQ ID:710507, to the nucleotide sequence of GAM26 RNA of FIG. 26A, designated SEQ ID:20604. An additional function of GAM26 is therefore inhibition of (KIAA0084). Accordingly, utilities of GAM26 include diagnosis and treatment of diseases and clinical conditions with which KIAA0084 is associated.

[2250] Reference is now made to KIAA0084 BINDING SITE. KIAA0084 is a target gene of GAM26, corresponding to GAM26-TARGET GENE of FIG. 26A. KIAA0084 BINDING SITE is a binding site found in an untranslated region of KIAA0084, corresponding to BINDING SITE of FIG. 26A. FIG. 26D illustrates the complementarity of the nucleotide sequence of KIAA0084 BINDING SITE, designated SEQ ID:710522, to the nucleotide sequence of GAM26 RNA of FIG. 26A, designated SEQ ID:20604. A further function of GAM26 is therefore inhibition of (KIAA0084). Accordingly, utilities of GAM26 include diagnosis and treatment of diseases and clinical conditions with which KIAA0084 is associated.

[2251] Reference is now made to KIAA0191 BINDING SITE. KIAA0191 is a target gene of GAM26, corresponding to GAM26-TARGET GENE of FIG. 26A. KIAA0191 BINDING SITE is a binding site found in an untranslated region of KIAA0191, corresponding to BINDING SITE of FIG. 26A. FIG. 26D illustrates the complementarity of the nucleotide sequence of KIAA0191 BINDING SITE, designated SEQ ID:715434, to the nucleotide sequence of GAM26 RNA of FIG. 26A, designated SEQ ID:20604. Yet a further function of GAM26 is therefore inhibition of (KIAA0191). Accordingly, utilities of GAM26 include diagnosis and treatment of diseases and clinical conditions with which KIAA0191 is associated.

[2252] Reference is now made to KIAA0191 BINDING SITE. KIAA0191 is a target gene of GAM26, corresponding to GAM26-TARGET GENE of FIG. 26A. KIAA0191 BINDING SITE is a binding site found in an untranslated region of KIAA0191, corresponding to BINDING SITE of FIG. 26A. FIG. 26D illustrates the complementarity of the nucleotide sequence of KIAA0191 BINDING SITE, designated SEQ ID:715436, to the nucleotide sequence of GAM26 RNA of FIG. 26A, designated SEQ ID:20604. Another function of GAM26 is therefore inhibition of (KIAA0191). Accordingly, utilities of GAM26 include diagnosis and treatment of diseases and clinical conditions with which KIAA0191 is associated.

[2253] Reference is now made to KIAA0191 BINDING SITE. KIAA0191 is a target gene of GAM26, corresponding to GAM26-TARGET GENE of FIG. 26A. KIAA0191 BINDING SITE is a binding site found in an untranslated region of KIAA0191, corresponding to BINDING SITE of FIG. 26A. FIG. 26D illustrates the complementarity of the nucleotide sequence of KIAA0191 BINDING SITE, designated SEQ ID:715438, to the nucleotide sequence of GAM26 RNA of FIG. 26A, designated SEQ ID:20604. Yet another function of GAM26 is therefore inhibition of (KIAA0191). Accordingly, utilities of GAM26 include diagnosis and treatment of diseases and clinical conditions with which KIAA0191 is associated.

[2254] Reference is now made to KIAA0191 BINDING SITE. KIAA0191 is a target gene of GAM26, corresponding to GAM26-TARGET GENE of FIG. 26A. KIAA0191 BINDING SITE is a binding site found in an untranslated region of KIAA0191, corresponding to BINDING SITE of FIG. 26A. FIG. 26D illustrates the complementarity of the nucleotide sequence of KIAA0191 BINDING SITE, designated SEQ ID:715439, to the nucleotide sequence of GAM26 RNA of FIG. 26A, designated SEQ ID:20604. An additional function of GAM26 is therefore inhibition of (KIAA0191). Accordingly, utilities of GAM26 include diagnosis and treatment of diseases and clinical conditions with which KIAA0191 is associated.

[2255] Reference is now made to KIAA0191 BINDING SITE. KIAA0191 is a target gene of GAM26, corresponding to GAM26-TARGET GENE of FIG. 26A. KIAA0191 BINDING SITE is a binding site found in an untranslated region of KIAA0191, corresponding to BINDING SITE of FIG. 26A. FIG. 26D illustrates the complementarity of the nucleotide sequence of KIAA0191 BINDING SITE, designated SEQ ID:715444, to the nucleotide sequence of GAM26 RNA of FIG. 26A, designated SEQ ID:20604. A further function of GAM26 is therefore inhibition of (KIAA0191). Accordingly, utilities of GAM26 include diagnosis and treatment of diseases and clinical conditions with which KIAA0191 is associated.

[2256] Reference is now made to KIAA0191 BINDING SITE. KIAA0191 is a target gene of GAM26, corresponding to GAM26-TARGET GENE of FIG. 26A. KIAA0191 BINDING SITE is a binding site found in an untranslated region of KIAA0191, corresponding to BINDING SITE of FIG. 26A. FIG. 26D illustrates the complementarity of the nucleotide sequence of KIAA0191 BINDING SITE, designated SEQ ID:715447, to the nucleotide sequence of GAM26 RNA of FIG. 26A, designated SEQ ID:20604. Yet a further function of GAM26 is therefore inhibition of (KIAA0191). Accordingly, utilities of GAM26 include diagnosis and treatment of diseases and clinical conditions with which KIAA0191 is associated.

[2257] Reference is now made to KIAA0227 BINDING SITE. KIAA0227 is a target gene of GAM26, corresponding to GAM26-TARGET GENE of FIG. 26A. KIAA0227 BINDING SITE is a binding site found in an untranslated region of KIAA0227, corresponding to BINDING SITE of FIG. 26A. FIG. 26D illustrates the complementarity of the nucleotide sequence of KIAA0227 BINDING SITE, designated SEQ ID:717573, to the nucleotide sequence of GAM26 RNA of FIG. 26A, designated SEQ ID:20604. Another function of GAM26 is therefore inhibition of (KIAA0227). Accordingly, utilities of GAM26 include diagnosis and treatment of diseases and clinical conditions with which KIAA0227 is associated.

[2258] Reference is now made to KIAA0227 BINDING SITE. KIAA0227 is a target gene of GAM26, corresponding to GAM26-TARGET GENE of FIG. 26A. KIAA0227 BINDING SITE is a binding site found in an untranslated region of KIAA0227, corresponding to BINDING SITE of FIG. 26A. FIG. 26D illustrates the complementarity of the nucleotide sequence of KIAA0227 BINDING SITE, designated SEQ ID:717578, to the nucleotide sequence of GAM26 RNA of FIG. 26A, designated SEQ ID:20604. Yet another function of GAM26 is therefore inhibition of (KIAA0227). Accordingly, utilities of GAM26 include diagnosis and treatment of diseases and clinical conditions with which KIAA0227 is associated.

[2259] Reference is now made to KIAA0227 BINDING SITE. KIAA0227 is a target gene of GAM26, corresponding to GAM26-TARGET GENE of FIG. 26A. KIAA0227 BINDING SITE is a binding site found in an untranslated region of KIAA0227, corresponding to BINDING SITE of FIG. 26A. FIG. 26D illustrates the complementarity of the nucleotide sequence of KIAA0227 BINDING SITE, designated SEQ ID:717615, to the nucleotide sequence of GAM26 RNA of FIG. 26A, designated SEQ ID:20604. An additional function of GAM26 is therefore inhibition of (KIAA0227). Accordingly, utilities of GAM26 include diagnosis and treatment of diseases and clinical conditions with which KIAA0227 is associated.

[2260] Reference is now made to KIAA0252 BINDING SITE. KIAA0252 is a target gene of GAM26, corresponding to GAM26-TARGET GENE of FIG. 26A. KIAA0252 BINDING SITE is a binding site found in an untranslated region of KIAA0252, corresponding to BINDING SITE of FIG. 26A. FIG. 26D illustrates the complementarity of the nucleotide sequence of KIAA0252 BINDING SITE, designated SEQ ID:718931, to the nucleotide sequence of GAM26 RNA of FIG. 26A, designated SEQ ID:20604. A further function of GAM26 is therefore inhibition of (KIAA0252). Accordingly, utilities of GAM26 include diagnosis and treatment of diseases and clinical conditions with which KIAA0252 is associated.

[2261] Reference is now made to KIAA0252 BINDING SITE. KIAA0252 is a target gene of GAM26, corresponding to GAM26-TARGET GENE of FIG. 26A. KIAA0252 BINDING SITE is a binding site found in an untranslated region of KIAA0252, corresponding to BINDING SITE of FIG. 26A. FIG. 26D illustrates the complementarity of the nucleotide sequence of KIAA0252 BINDING SITE, designated SEQ ID:718993, to the nucleotide sequence of GAM26 RNA of FIG. 26A, designated SEQ ID:20604. Yet a further function of GAM26 is therefore inhibition of (KIAA0252). Accordingly, utilities of GAM26 include diagnosis and treatment of diseases and clinical conditions with which KIAA0252 is associated.

[2262] Reference is now made to KIAA0252 BINDING SITE. KIAA0252 is a target gene of GAM26, corresponding to GAM26-TARGET GENE of FIG. 26A. KIAA0252 BINDING SITE is a binding site found in an untranslated region of KIAA0252, corresponding to BINDING SITE of FIG. 26A. FIG. 26D illustrates the complementarity of the nucleotide sequence of KIAA0252 BINDING SITE, designated SEQ ID:719014, to the nucleotide sequence of GAM26 RNA of FIG. 26A, designated SEQ ID:20604. Another function of GAM26 is therefore inhibition of (KIAA0252). Accordingly, utilities of GAM26 include diagnosis and treatment of diseases and clinical conditions with which KIAA0252 is associated.

[2263] Reference is now made to KIAA0336 BINDING SITE. KIAA0336 is a target gene of GAM26, corresponding to GAM26-TARGET GENE of FIG. 26A. KIAA0336 BINDING SITE is a binding site found in an untranslated region of KIAA0336, corresponding to BINDING SITE of FIG. 26A. FIG. 26D illustrates the complementarity of the nucleotide sequence of KIAA0336 BINDING SITE, designated SEQ ID:724234, to the nucleotide sequence of GAM26 RNA of FIG. 26A, designated SEQ ID:20604. Yet another function of GAM26 is therefore inhibition of (KIAA0336). Accordingly, utilities of GAM26 include diagnosis and treatment of diseases and clinical conditions with which KIAA0336 is associated.

[2264] Reference is now made to KIAA0397 BINDING SITE. KIAA0397 is a target gene of GAM26, corresponding to GAM26-TARGET GENE of FIG. 26A. KIAA0397 BINDING SITE is a binding site found in an untranslated region of KIAA0397, corresponding to BINDING SITE of FIG. 26A. FIG. 26D illustrates the complementarity of the nucleotide sequence of KIAA0397 BINDING SITE, designated SEQ ID:726863, to the nucleotide sequence of GAM26 RNA of FIG. 26A, designated SEQ ID:20604. An additional function of GAM26 is therefore inhibition of (KIAA0397). Accordingly, utilities of GAM26 include diagnosis and treatment of diseases and clinical conditions with which KIAA0397 is associated.

[2265] Reference is now made to KIAA0406 BINDING SITE. KIAA0406 is a target gene of GAM26, corresponding to GAM26-TARGET GENE of FIG. 26A. KIAA0406 BINDING SITE is a binding site found in an untranslated region of KIAA0406, corresponding to BINDING SITE of FIG. 26A. FIG. 26D illustrates the complementarity of the nucleotide sequence of KIAA0406 BINDING SITE, designated SEQ ID:726937, to the nucleotide sequence of GAM26 RNA of FIG. 26A, designated SEQ ID:20604. A further function of GAM26 is therefore inhibition of (KIAA0406). Accordingly, utilities of GAM26 include diagnosis and treatment of diseases and clinical conditions with which KIAA0406 is associated.

[2266] Reference is now made to KIAA0441 BINDING SITE. KIAA0441 is a target gene of GAM26, corresponding to GAM26-TARGET GENE of FIG. 26A. KIAA0441 BINDING SITE is a binding site found in an untranslated region of KIAA0441, corresponding to BINDING SITE of FIG. 26A. FIG. 26D illustrates the complementarity of the nucleotide sequence of KIAA0441 BINDING SITE, designated SEQ ID:730328, to the nucleotide sequence of GAM26 RNA of FIG. 26A, designated SEQ ID:20604. Yet a further function of GAM26 is therefore inhibition of (KIAA0441). Accordingly, utilities of GAM26 include diagnosis and treatment of diseases and clinical conditions with which KIAA0441 is associated.

[2267] Reference is now made to KIAA0475 BINDING SITE. KIAA0475 is a target gene of GAM26, corresponding to GAM26-TARGET GENE of FIG. 26A. KIAA0475 BINDING SITE is a binding site found in an untranslated region of KIAA0475, corresponding to BINDING SITE of FIG. 26A. FIG. 26D illustrates the complementarity of the nucleotide sequence of KIAA0475 BINDING SITE, designated SEQ ID:734620, to the nucleotide sequence of GAM26 RNA of FIG. 26A, designated SEQ ID:20604. Another function of GAM26 is therefore inhibition of (KIAA0475). Accordingly, utilities of GAM26 include diagnosis and treatment of diseases and clinical conditions with which KIAA0475 is associated.

[2268] Reference is now made to KIAA0633 BINDING SITE. KIAA0633 is a target gene of GAM26, corresponding to GAM26-TARGET GENE of FIG. 26A. KIAA0633 BINDING SITE is a binding site found in an untranslated region of KIAA0633, corresponding to BINDING SITE of FIG. 26A. FIG. 26D illustrates the complementarity of the nucleotide sequence of KIAA0633 BINDING SITE, designated SEQ ID:744516, to the nucleotide sequence of GAM26 RNA of FIG. 26A, designated SEQ ID:20604. Yet another function of GAM26 is therefore inhibition of (KIAA0633). Accordingly, utilities of GAM26 include diagnosis and treatment of diseases and clinical conditions with which KIAA0633 is associated.

[2269] Reference is now made to KIAA0649 BINDING SITE. KIAA0649 is a target gene of GAM26, corresponding to GAM26-TARGET GENE of FIG. 26A. KIAA0649 BINDING SITE is a binding site found in an untranslated region of KIAA0649, corresponding to BINDING SITE of FIG. 26A. FIG. 26D illustrates the complementarity of the nucleotide sequence of KIAA0649 BINDING SITE, designated SEQ ID:745411, to the nucleotide sequence of GAM26 RNA of FIG. 26A, designated SEQ ID:20604. An additional function of GAM26 is therefore inhibition of (KIAA0649). Accordingly, utilities of GAM26 include diagnosis and treatment of diseases and clinical conditions with which KIAA0649 is associated.

[2270] Reference is now made to KIAA0649 BINDING SITE. KIAA0649 is a target gene of GAM26, corresponding to GAM26-TARGET GENE of FIG. 26A. KIAA0649 BINDING SITE is a binding site found in an untranslated region of KIAA0649, corresponding to BINDING SITE of FIG. 26A. FIG. 26D illustrates the complementarity of the nucleotide sequence of KIAA0649 BINDING SITE, designated SEQ ID:745444, to the nucleotide sequence of GAM26 RNA of FIG. 26A, designated SEQ ID:20604. A further function of GAM26 is therefore inhibition of (KIAA0649). Accordingly, utilities of GAM26 include diagnosis and treatment of diseases and clinical conditions with which KIAA0649 is associated.

[2271] Reference is now made to KIAA0700 BINDING SITE. KIAA0700 is a target gene of GAM26, corresponding to GAM26-TARGET GENE of FIG. 26A. KIAA0700 BINDING SITE is a binding site found in an untranslated region of KIAA0700, corresponding to BINDING SITE of FIG. 26A. FIG. 26D illustrates the complementarity of the nucleotide sequence of KIAA0700 BINDING SITE, designated SEQ ID:747790, to the nucleotide sequence of GAM26 RNA of FIG. 26A, designated SEQ ID:20604. Yet a further function of GAM26 is therefore inhibition of (KIAA0700). Accordingly, utilities of GAM26 include diagnosis and treatment of diseases and clinical conditions with which KIAA0700 is associated.

[2272] Reference is now made to KIAA0844 BINDING SITE. KIAA0844 is a target gene of GAM26, corresponding to GAM26-TARGET GENE of FIG. 26A. KIAA0844 BINDING SITE is a binding site found in an untranslated region of KIAA0844, corresponding to BINDING SITE of FIG. 26A. FIG. 26D illustrates the complementarity of the nucleotide sequence of KIAA0844 BINDING SITE, designated SEQ ID:754642, to the nucleotide sequence of GAM26 RNA of FIG. 26A, designated SEQ ID:20604. Another function of GAM26 is therefore inhibition of (KIAA0844). Accordingly, utilities of GAM26 include diagnosis and treatment of diseases and clinical conditions with which KIAA0844 is associated.

[2273] Reference is now made to KIAA0960 BINDING SITE. KIAA0960 is a target gene of GAM26, corresponding to GAM26-TARGET GENE of FIG. 26A. KIAA0960 BINDING SITE is a binding site found in an untranslated region of KIAA0960, corresponding to BINDING SITE of FIG. 26A. FIG. 26D illustrates the complementarity of the nucleotide sequence of KIAA0960 BINDING SITE, designated SEQ ID:760740, to the nucleotide sequence of GAM26 RNA of FIG. 26A, designated SEQ ID:20604. Yet another function of GAM26 is therefore inhibition of (KIAA0960). Accordingly, utilities of GAM26 include diagnosis and treatment of diseases and clinical conditions with which KIAA0960 is associated.

[2274] Reference is now made to KIAA0963 BINDING SITE. KIAA0963 is a target gene of GAM26, corresponding to GAM26-TARGET GENE of FIG. 26A. KIAA0963 BINDING SITE is a binding site found in an untranslated region of KIAA0963, corresponding to BINDING SITE of FIG. 26A. FIG. 26D illustrates the complementarity of the nucleotide sequence of KIAA0963 BINDING SITE, designated SEQ ID:761105, to the nucleotide sequence of GAM26 RNA of FIG. 26A, designated SEQ ID:20604. An additional function of GAM26 is therefore inhibition of (KIAA0963). Accordingly, utilities of GAM26 include diagnosis and treatment of diseases and clinical conditions with which KIAA0963 is associated.

[2275] Reference is now made to KIAA0979 BINDING SITE. KIAA0979 is a target gene of GAM26, corresponding to GAM26-TARGET GENE of FIG. 26A. KIAA0979 BINDING SITE is a binding site found in an untranslated region of KIAA0979, corresponding to BINDING SITE of FIG. 26A. FIG. 26D illustrates the complementarity of the nucleotide sequence of KIAA0979 BINDING SITE, designated SEQ ID:762065, to the nucleotide sequence of GAM26 RNA of FIG. 26A, designated SEQ ID:20604. A further function of GAM26 is therefore inhibition of (KIAA0979). Accordingly, utilities of GAM26 include diagnosis and treatment of diseases and clinical conditions with which KIAA0979 is associated.

[2276] Reference is now made to FUBP3 BINDING SITE. FUBP3 is a target gene of GAM26, corresponding to GAM26-TARGET GENE of FIG. 26A. FUBP3 BINDING SITE is a binding site found in an untranslated region of FUBP3, corresponding to BINDING SITE of FIG. 26A. FIG. 26D illustrates the complementarity of the nucleotide sequence of FUBP3 BINDING SITE, designated SEQ ID:763022, to the nucleotide sequence of GAM26 RNA of FIG. 26A, designated SEQ ID:20604. Yet a further function of GAM26 is therefore inhibition of (FUBP3). Accordingly, utilities of GAM26 include diagnosis and treatment of diseases and clinical conditions with which FUBP3 is associated.

[2277] Reference is now made to KIAA0995 BINDING SITE. KIAA0995 is a target gene of GAM26, corresponding to GAM26-TARGET GENE of FIG. 26A. KIAA0995 BINDING SITE is a binding site found in an untranslated region of KIAA0995, corresponding to BINDING SITE of FIG. 26A. FIG. 26D illustrates the complementarity of the nucleotide sequence of KIAA0995 BINDING SITE, designated SEQ ID:763022, to the nucleotide sequence of GAM26 RNA of FIG. 26A, designated SEQ ID:20604. Another function of GAM26 is therefore inhibition of (KIAA0995). Accordingly, utilities of GAM26 include diagnosis and treatment of diseases and clinical conditions with which KIAA0995 is associated.

[2278] Reference is now made to KIAA0995 BINDING SITE. KIAA0995 is a target gene of GAM26, corresponding to GAM26-TARGET GENE of FIG. 26A. KIAA0995 BINDING SITE is a binding site found in an untranslated region of KIAA0995, corresponding to BINDING SITE of FIG. 26A. FIG. 26D illustrates the complementarity of the nucleotide sequence of KIAA0995 BINDING SITE, designated SEQ ID:763026, to the nucleotide sequence of GAM26 RNA of FIG. 26A, designated SEQ ID:20604. Yet another function of GAM26 is therefore inhibition of (KIAA0995). Accordingly, utilities of GAM26 include diagnosis and treatment of diseases and clinical conditions with which KIAA0995 is associated.

[2279] Reference is now made to KIAA0995 BINDING SITE. KIAA0995 is a target gene of GAM26, corresponding to GAM26-TARGET GENE of FIG. 26A. KIAA0995 BINDING SITE is a binding site found in an untranslated region of KIAA0995, corresponding to BINDING SITE of FIG. 26A. FIG. 26D illustrates the complementarity of the nucleotide sequence of KIAA0995 BINDING SITE, designated SEQ ID:763030, to the nucleotide sequence of GAM26 RNA of FIG. 26A, designated SEQ ID:20604. An additional function of GAM26 is therefore inhibition of (KIAA0995). Accordingly, utilities of GAM26 include diagnosis and treatment of diseases and clinical conditions with which KIAA0995 is associated.

[2280] Reference is now made to KIAA0995 BINDING SITE. KIAA0995 is a target gene of GAM26, corresponding to GAM26-TARGET GENE of FIG. 26A. KIAA0995 BINDING SITE is a binding site found in an untranslated region of KIAA0995, corresponding to BINDING SITE of FIG. 26A. FIG. 26D illustrates the complementarity of the nucleotide sequence of KIAA0995 BINDING SITE, designated SEQ ID:763031, to the nucleotide sequence of GAM26 RNA of FIG. 26A, designated SEQ ID:20604. A further function of GAM26 is therefore inhibition of (KIAA0995). Accordingly, utilities of GAM26 include diagnosis and treatment of diseases and clinical conditions with which KIAA0995 is associated.

[2281] Reference is now made to KIAA0995 BINDING SITE. KIAA0995 is a target gene of GAM26, corresponding to GAM26-TARGET GENE of FIG. 26A. KIAA0995 BINDING SITE is a binding site found in an untranslated region of KIAA0995, corresponding to BINDING SITE of FIG. 26A. FIG. 26D illustrates the complementarity of the nucleotide sequence of KIAA0995 BINDING SITE, designated SEQ ID:763039, to the nucleotide sequence of GAM26 RNA of FIG. 26A, designated SEQ ID:20604. Yet a further function of GAM26 is therefore inhibition of (KIAA0995). Accordingly, utilities of GAM26 include diagnosis and treatment of diseases and clinical conditions with which KIAA0995 is associated.

[2282] Reference is now made to KIAA116 BINDING SITE. KIAA016 is a target gene of GAM26, corresponding to GAM26-TARGET GENE of FIG. 26A. KIAA1016 BINDING SITE is a binding site found in an untranslated region of KIAA1016, corresponding to BINDING SITE of FIG. 26A. FIG. 26D illustrates the complementarity of the nucleotide sequence of KIAA1016 BINDING SITE, designated SEQ ID:764057, to the nucleotide sequence of GAM26 RNA of FIG. 26A, designated SEQ ID:20604. Another function of GAM26 is therefore inhibition of (KIAA1016). Accordingly, utilities of GAM26 include diagnosis and treatment of diseases and clinical conditions with which KIAA1016 is associated.

[2283] Reference is now made to KIAA1061 BINDING SITE. KIAA1061 is a target gene of GAM26, corresponding to GAM26-TARGET GENE of FIG. 26A. KIAA1061 BINDING SITE is a binding site found in an untranslated region of KIAA1061, corresponding to BINDING SITE of FIG. 26A. FIG. 26D illustrates the complementarity of the nucleotide sequence of KIAA1061 BINDING SITE, designated SEQ ID:768364, to the nucleotide sequence of GAM26 RNA of FIG. 26A, designated SEQ ID:20604. Yet another function of GAM26 is therefore inhibition of (KIAA1061). Accordingly, utilities of GAM26 include diagnosis and treatment of diseases and clinical conditions with which KIAA1061 is associated.

[2284] Reference is now made to KIAA1079 BINDING SITE. KIAA1079 is a target gene of GAM26, corresponding to GAM26-TARGET GENE of FIG. 26A. KIAA1079 BINDING SITE is a binding site found in an untranslated region of KIAA1079, corresponding to BINDING SITE of FIG. 26A. FIG. 26D illustrates the complementarity of the nucleotide sequence of KIAA1079 BINDING SITE, designated SEQ ID:769234, to the nucleotide sequence of GAM26 RNA of FIG. 26A, designated SEQ ID:20604. An additional function of GAM26 is therefore inhibition of (KIAA1079). Accordingly, utilities of GAM26 include diagnosis and treatment of diseases and clinical conditions with which KIAA1079 is associated.

[2285] Reference is now made to KIAA1091 BINDING SITE. KIAA1091 is a target gene of GAM26, corresponding to GAM26-TARGET GENE of FIG. 26A. KIAA1091 BINDING SITE is a binding site found in an untranslated region of KIAA1091, corresponding to BINDING SITE of FIG. 26A. FIG. 26D illustrates the complementarity of the nucleotide sequence of KIAA1091 BINDING SITE, designated SEQ ID:769882, to the nucleotide sequence of GAM26 RNA of FIG. 26A, designated SEQ ID:20604. A further function of GAM26 is therefore inhibition of (KIAA1091). Accordingly, utilities of GAM26 include diagnosis and treatment of diseases and clinical conditions with which KIAA1091 is associated.

[2286] Reference is now made to KIAA1140 BINDING SITE. KIAA1140 is a target gene of GAM26, corresponding to GAM26-TARGET GENE of FIG. 26A. KIAA1140 BINDING SITE is a binding site found in an untranslated region of KIAA1140, corresponding to BINDING SITE of FIG. 26A. FIG. 26D illustrates the complementarity of the nucleotide sequence of KIAA1140 BINDING SITE, designated SEQ ID:771839, to the nucleotide sequence of GAM26 RNA of FIG. 26A, designated SEQ ID:20604. Yet a further function of GAM26 is therefore inhibition of (KIAA1140). Accordingly, utilities of GAM26 include diagnosis and treatment of diseases and clinical conditions with which KIAA1140 is associated.

[2287] Reference is now made to KIAA1140 BINDING SITE. KIAA1140 is a target gene of GAM26, corresponding to GAM26-TARGET GENE of FIG. 26A. KIAA1140 BINDING SITE is a binding site found in an untranslated region of KIAA1140, corresponding to BINDING SITE of FIG. 26A. FIG. 26D illustrates the complementarity of the nucleotide sequence of KIAA1140 BINDING SITE, designated SEQ ID:771842, to the nucleotide sequence of GAM26 RNA of FIG. 26A, designated SEQ ID:20604. Another function of GAM26 is therefore inhibition of (KIAA1140). Accordingly, utilities of GAM26 include diagnosis and treatment of diseases and clinical conditions with which KIAA1140 is associated.

[2288] Reference is now made to KIAA1194 BINDING SITE. KIAA1194 is a target gene of GAM26, corresponding to GAM26-TARGET GENE of FIG. 26A. KIAA1194 BINDING SITE is a binding site found in an untranslated region of KIAA1194, corresponding to BINDING SITE of FIG. 26A. FIG. 26D illustrates the complementarity of the nucleotide sequence of KIAA1194 BINDING SITE, designated SEQ ID:776042, to the nucleotide sequence of GAM26 RNA of FIG. 26A, designated SEQ ID:20604. Yet another function of GAM26 is therefore inhibition of (KIAA1194). Accordingly, utilities of GAM26 include diagnosis and treatment of diseases and clinical conditions with which KIAA1194 is associated.

[2289] Reference is now made to KIAA1233 BINDING SITE. KIAA1233 is a target gene of GAM26, corresponding to GAM26-TARGET GENE of FIG. 26A. KIAA1233 BINDING SITE is a binding site found in an untranslated region of KIAA1233, corresponding to BINDING SITE of FIG. 26A. FIG. 26D illustrates the complementarity of the nucleotide sequence of KIAA1233 BINDING SITE, designated SEQ ID:779098, to the nucleotide sequence of GAM26 RNA of FIG. 26A, designated SEQ ID:20604. An additional function of GAM26 is therefore inhibition of (KIAA1233). Accordingly, utilities of GAM26 include diagnosis and treatment of diseases and clinical conditions with which KIAA1233 is associated.

[2290] Reference is now made to KIAA1332 BINDING SITE. KIAA1332 is a target gene of GAM26, corresponding to GAM26-TARGET GENE of FIG. 26A. KIAA1332 BINDING SITE is a binding site found in an untranslated region of KIAA1332, corresponding to BINDING SITE of FIG. 26A. FIG. 26D illustrates the complementarity of the nucleotide sequence of KIAA1332 BINDING SITE, designated SEQ ID:785691, to the nucleotide sequence of GAM26 RNA of FIG. 26A, designated SEQ ID:20604. A further function of GAM26 is therefore inhibition of (KIAA1332). Accordingly, utilities of GAM26 include diagnosis and treatment of diseases and clinical conditions with which KIAA1332 is associated.

[2291] Reference is now made to KIAA1458 BINDING SITE. KIAA1458 is a target gene of GAM26, corresponding to GAM26-TARGET GENE of FIG. 26A. KIAA1458 BINDING SITE is a binding site found in an untranslated region of KIAA1458, corresponding to BINDING SITE of FIG. 26A. FIG. 26D illustrates the complementarity of the nucleotide sequence of KIAA1458 BINDING SITE, designated SEQ ID:791465, to the nucleotide sequence of GAM26 RNA of FIG. 26A, designated SEQ ID:20604. Yet a further function of GAM26 is therefore inhibition of (KIAA1458). Accordingly, utilities of GAM26 include diagnosis and treatment of diseases and clinical conditions with which KIAA1458 is associated.

[2292] Reference is now made to KIAA1458 BINDING SITE. KIAA1458 is a target gene of GAM26, corresponding to GAM26-TARGET GENE of FIG. 26A. KIAA1458 BINDING SITE is a binding site found in an untranslated region of KIAA1458, corresponding to BINDING SITE of FIG. 26A. FIG. 26D illustrates the complementarity of the nucleotide sequence of KIAA1458 BINDING SITE, designated SEQ ID:791473, to the nucleotide sequence of GAM26 RNA of FIG. 26A, designated SEQ ID:20604. Another function of GAM26 is therefore inhibition of (KIAA1458). Accordingly, utilities of GAM26 include diagnosis and treatment of diseases and clinical conditions with which KIAA1458 is associated.

[2293] Reference is now made to KIAA1483 BINDING SITE. KIAA1483 is a target gene of GAM26, corresponding to GAM26-TARGET GENE of FIG. 26A. KIAA1483 BINDING SITE is a binding site found in an untranslated region of KIAA1483, corresponding to BINDING SITE of FIG. 26A. FIG. 26D illustrates the complementarity of the nucleotide sequence of KIAA1483 BINDING SITE, designated SEQ ID:792995, to the nucleotide sequence of GAM26 RNA of FIG. 26A, designated SEQ ID:20604. Yet another function of GAM26 is therefore inhibition of (KIAA1483). Accordingly, utilities of GAM26 include diagnosis and treatment of diseases and clinical conditions with which KIAA1483 is associated.

[2294] Reference is now made to KIAA1483 BINDING SITE. KIAA1483 is a target gene of GAM26, corresponding to GAM26-TARGET GENE of FIG. 26A. KIAA1483 BINDING SITE is a binding site found in an untranslated region of KIAA1483, corresponding to BINDING SITE of FIG. 26A. FIG. 26D illustrates the complementarity of the nucleotide sequence of KIAA1483 BINDING SITE, designated SEQ ID:793014, to the nucleotide sequence of GAM26 RNA of FIG. 26A, designated SEQ ID:20604. An additional function of GAM26 is therefore inhibition of (KIAA1483). Accordingly, utilities of GAM26 include diagnosis and treatment of diseases and clinical conditions with which KIAA1483 is associated.

[2295] Reference is now made to KIAA1542 BINDING SITE. KIAA1542 is a target gene of GAM26, corresponding to GAM26-TARGET GENE of FIG. 26A. KIAA1542 BINDING SITE is a binding site found in an untranslated region of KIAA1542, corresponding to BINDING SITE of FIG. 26A. FIG. 26D illustrates the complementarity of the nucleotide sequence of KIAA1542 BINDING SITE, designated SEQ ID:795954, to the nucleotide sequence of GAM26 RNA of FIG. 26A, designated SEQ ID:20604. A further function of GAM26 is therefore inhibition of (KIAA1542). Accordingly, utilities of GAM26 include diagnosis and treatment of diseases and clinical conditions with which KIAA1542 is associated.

[2296] Reference is now made to KIAA1542 BINDING SITE. KIAA1542 is a target gene of GAM26, corresponding to GAM26-TARGET GENE of FIG. 26A. KIAA1542 BINDING SITE is a binding site found in an untranslated region of KIAA1542, corresponding to BINDING SITE of FIG. 26A. FIG. 26D illustrates the complementarity of the nucleotide sequence of KIAA1542 BINDING SITE, designated SEQ ID:795958, to the nucleotide sequence of GAM26 RNA of FIG. 26A, designated SEQ ID:20604. Yet a further function of GAM26 is therefore inhibition of (KIAA1542). Accordingly, utilities of GAM26 include diagnosis and treatment of diseases and clinical conditions with which KIAA1542 is associated.

[2297] Reference is now made to KIAA1542 BINDING SITE. KIAA1542 is a target gene of GAM26, corresponding to GAM26-TARGET GENE of FIG. 26A. KIAA1542 BINDING SITE is a binding site found in an untranslated region of KIAA1542, corresponding to BINDING SITE of FIG. 26A. FIG. 26D illustrates the complementarity of the nucleotide sequence of KIAA1542 BINDING SITE, designated SEQ ID:795963, to the nucleotide sequence of GAM26 RNA of FIG. 26A, designated SEQ ID:20604. Another function of GAM26 is therefore inhibition of (KIAA1542). Accordingly, utilities of GAM26 include diagnosis and treatment of diseases and clinical conditions with which KIAA1542 is associated.

[2298] Reference is now made to KIAA1608 BINDING SITE. KIAA1608 is a target gene of GAM26, corresponding to GAM26-TARGET GENE of FIG. 26A. KIAA1608 BINDING SITE is a binding site found in an untranslated region of KIAA1608, corresponding to BINDING SITE of FIG. 26A. FIG. 26D illustrates the complementarity of the nucleotide sequence of KIAA1608 BINDING SITE, designated SEQ ID:799200, to the nucleotide sequence of GAM26 RNA of FIG. 26A, designated SEQ ID:20604. Yet another function of GAM26 is therefore inhibition of (KIAA1608). Accordingly, utilities of GAM26 include diagnosis and treatment of diseases and clinical conditions with which KIAA1608 is associated.

[2299] Reference is now made to KIAA1608 BINDING SITE. KIAA1608 is a target gene of GAM26, corresponding to GAM26-TARGET GENE of FIG. 26A. KIAA1608 BINDING SITE is a binding site found in an untranslated region of KIAA1608, corresponding to BINDING SITE of FIG. 26A. FIG. 26D illustrates the complementarity of the nucleotide sequence of KIAA1608 BINDING SITE, designated SEQ ID:799201, to the nucleotide sequence of GAM26 RNA of FIG. 26A, designated SEQ ID:20604. An additional function of GAM26 is therefore inhibition of (KIAA1608). Accordingly, utilities of GAM26 include diagnosis and treatment of diseases and clinical conditions with which KIAA1608 is associated.

[2300] Reference is now made to KIAA1766 BINDING SITE. KIAA1766 is a target gene of GAM26, corresponding to GAM26-TARGET GENE of FIG. 26A. KIAA1766 BINDING SITE is a binding site found in an untranslated region of KIAA1766, corresponding to BINDING SITE of FIG. 26A. FIG. 26D illustrates the complementarity of the nucleotide sequence of KIAA1766 BINDING SITE, designated SEQ ID:808833, to the nucleotide sequence of GAM26 RNA of FIG. 26A, designated SEQ ID:20604. A further function of GAM26 is therefore inhibition of (KIAA1766). Accordingly, utilities of GAM26 include diagnosis and treatment of diseases and clinical conditions with which KIAA1766 is associated.

[2301] Reference is now made to KIAA1893 BINDING SITE. KIAA1893 is a target gene of GAM26, corresponding to GAM26-TARGET GENE of FIG. 26A. KIAA1893 BINDING SITE is a binding site found in an untranslated region of KIAA1893, corresponding to BINDING SITE of FIG. 26A. FIG. 26D illustrates the complementarity of the nucleotide sequence of KIAA1893 BINDING SITE, designated SEQ ID:816521, to the nucleotide sequence of GAM26 RNA of FIG. 26A, designated SEQ ID:20604. Yet a further function of GAM26 is therefore inhibition of (KIAA1893). Accordingly, utilities of GAM26 include diagnosis and treatment of diseases and clinical conditions with which KIAA1893 is associated.

[2302] Reference is now made to KIAA1966 BINDING SITE. KIAA1966 is a target gene of GAM26, corresponding to GAM26-TARGET GENE of FIG. 26A. KIAA1966 BINDING SITE is a binding site found in an untranslated region of KIAA1966, corresponding to BINDING SITE of FIG. 26A. FIG. 26D illustrates the complementarity of the nucleotide sequence of KIAA1966 BINDING SITE, designated SEQ ID:822274, to the nucleotide sequence of GAM26 RNA of FIG. 26A, designated SEQ ID:20604. Another function of GAM26 is therefore inhibition of (KIAA1966). Accordingly, utilities of GAM26 include diagnosis and treatment of diseases and clinical conditions with which KIAA1966 is associated.

[2303] Reference is now made to KIAA1966 BINDING SITE. KIAA1966 is a target gene of GAM26, corresponding to GAM26-TARGET GENE of FIG. 26A. KIAA1966 BINDING SITE is a binding site found in an untranslated region of KIAA1966, corresponding to BINDING SITE of FIG. 26A. FIG. 26D illustrates the complementarity of the nucleotide sequence of KIAA1966 BINDING SITE, designated SEQ ID:822277, to the nucleotide sequence of GAM26 RNA of FIG. 26A, designated SEQ ID:20604. Yet another function of GAM26 is therefore inhibition of (KIAA1966). Accordingly, utilities of GAM26 include diagnosis and treatment of diseases and clinical conditions with which KIAA1966 is associated.

[2304] Reference is now made to KIAA1981 BINDING SITE. KIAA1981 is a target gene of GAM26, corresponding to GAM26-TARGET GENE of FIG. 26A. KIAA1981 BINDING SITE is a binding site found in an untranslated region of KIAA1981, corresponding to BINDING SITE of FIG. 26A. FIG. 26D illustrates the complementarity of the nucleotide sequence of KIAA1981 BINDING SITE, designated SEQ ID:823610, to the nucleotide sequence of GAM26 RNA of FIG. 26A, designated SEQ ID:20604. An additional function of GAM26 is therefore inhibition of (KIAA1981). Accordingly, utilities of GAM26 include diagnosis and treatment of diseases and clinical conditions with which KIAA1981 is associated.

[2305] Reference is now made to LANCL2 BINDING SITE. LANCL2 is a target gene of GAM26, corresponding to GAM26-TARGET GENE of FIG. 26A. LANCL2 BINDING SITE is a binding site found in an untranslated region of LANCL2, corresponding to BINDING SITE of FIG. 26A. FIG. 26D illustrates the complementarity of the nucleotide sequence of LANCL2 BINDING SITE, designated SEQ ID:828560, to the nucleotide sequence of GAM26 RNA of FIG. 26A, designated SEQ ID:20604. A further function of GAM26 is therefore inhibition of (LANCL2). Accordingly, utilities of GAM26 include diagnosis and treatment of diseases and clinical conditions with which LANCL2 is associated.

[2306] Reference is now made to LANO BINDING SITE. LANO is a target gene of GAM26, corresponding to GAM26-TARGET GENE of FIG. 26A. LANO BINDING SITE is a binding site found in an untranslated region of LANO, corresponding to BINDING SITE of FIG. 26A. FIG. 26D illustrates the complementarity of the nucleotide sequence of LANO BINDING SITE, designated SEQ ID:828789, to the nucleotide sequence of GAM26 RNA of FIG. 26A, designated SEQ ID:20604. Yet a further function of GAM26 is therefore inhibition of (LANO). Accordingly, utilities of GAM26 include diagnosis and treatment of diseases and clinical conditions with which LANO is associated.

[2307] Reference is now made to LAP1B BINDING SITE. LAP1B is a target gene of GAM26, corresponding to GAM26-TARGET GENE of FIG. 26A. LAP1B BINDING SITE is a binding site found in an untranslated region of LAP1B, corresponding to BINDING SITE of FIG. 26A. FIG. 26D illustrates the complementarity of the nucleotide sequence of LAP1B BINDING SITE, designated SEQ ID:828926, to the nucleotide sequence of GAM26 RNA of FIG. 26A, designated SEQ ID:20604. Another function of GAM26 is therefore inhibition of (LAP1B). Accordingly, utilities of GAM26 include diagnosis and treatment of diseases and clinical conditions with which LAP1B is associated.

[2308] Reference is now made to LSM4 BINDING SITE. LSM4 is a target gene of GAM26, corresponding to GAM26-TARGET GENE of FIG. 26A. LSM4 BINDING SITE is a binding site found in an untranslated region of LSM4, corresponding to BINDING SITE of FIG. 26A. FIG. 26D illustrates the complementarity of the nucleotide sequence of LSM4 BINDING SITE, designated SEQ ID:834693, to the nucleotide sequence of GAM26 RNA of FIG. 26A, designated SEQ ID:20604. Yet another function of GAM26 is therefore inhibition of (LSM4). Accordingly, utilities of GAM26 include diagnosis and treatment of diseases and clinical conditions with which LSM4 is associated.

[2309] Reference is now made to MAP2K7 BINDING SITE. MAP2K7 is a target gene of GAM26, corresponding to GAM26-TARGET GENE of FIG. 26A. MAP2K7 BINDING SITE is a binding site found in an untranslated region of MAP2K7, corresponding to BINDING SITE of FIG. 26A. FIG. 26D illustrates the complementarity of the nucleotide sequence of MAP2K7 BINDING SITE, designated SEQ ID:838581, to the nucleotide sequence of GAM26 RNA of FIG. 26A, designated SEQ ID:20604. An additional function of GAM26 is therefore inhibition of (MAP2K7). Accordingly, utilities of GAM26 include diagnosis and treatment of diseases and clinical conditions with which MAP2K7 is associated.

[2310] Reference is now made to MAPK81P3 BINDING SITE. MAPK81P3 is a target gene of GAM26, corresponding to GAM26-TARGET GENE of FIG. 26A. MAPK81P3 BINDING SITE is a binding site found in an untranslated region of MAPK81P3, corresponding to BINDING SITE of FIG. 26A. FIG. 26D illustrates the complementarity of the nucleotide sequence of MAPK81P3 BINDING SITE, designated SEQ ID:839431, to the nucleotide sequence of GAM26 RNA of FIG. 26A, designated SEQ ID:20604. A further function of GAM26 is therefore inhibition of (MAPK81P3). Accordingly, utilities of GAM26 include diagnosis and treatment of diseases and clinical conditions with which MAPK81P3 is associated.

[2311] Reference is now made to MESDC1 BINDING SITE. MESDC1 is a target gene of GAM26, corresponding to GAM26-TARGET GENE of FIG. 26A. MESDC1 BINDING SITE is a binding site found in an untranslated region of MESDC1, corresponding to BINDING SITE of FIG. 26A. FIG. 26D illustrates the complementarity of the nucleotide sequence of MESDC1 BINDING SITE, designated SEQ ID:842805, to the nucleotide sequence of GAM26 RNA of FIG. 26A, designated SEQ ID:20604. Yet a further function of GAM26 is therefore inhibition of (MESDC1). Accordingly, utilities of GAM26 include diagnosis and treatment of diseases and clinical conditions with which MESDC1 is associated.

[2312] Reference is now made to MESDC1 BINDING SITE. MESDC1 is a target gene of GAM26, corresponding to GAM26-TARGET GENE of FIG. 26A. MESDC1 BINDING SITE is a binding site found in an untranslated region of MESDC1, corresponding to BINDING SITE of FIG. 26A. FIG. 26D illustrates the complementarity of the nucleotide sequence of MESDC1 BINDING SITE, designated SEQ ID:842838, to the nucleotide sequence of GAM26 RNA of FIG. 26A, designated SEQ ID:20604. Another function of GAM26 is therefore inhibition of (MESDC1). Accordingly, utilities of GAM26 include diagnosis and treatment of diseases and clinical conditions with which MESDC1 is associated.

[2313] Reference is now made to OATPRP4 BINDING SITE. OATPRP4 is a target gene of GAM26, corresponding to GAM26-TARGET GENE of FIG. 26A. OATPRP4 BINDING SITE is a binding site found in an untranslated region of OATPRP4, corresponding to BINDING SITE of FIG. 26A. FIG. 26D illustrates the complementarity of the nucleotide sequence of OATPRP4 BINDING SITE, designated SEQ ID:844404, to the nucleotide sequence of GAM26 RNA of FIG. 26A, designated SEQ ID:20604. Yet another function of GAM26 is therefore inhibition of (OATPRP4). Accordingly, utilities of GAM26 include diagnosis and treatment of diseases and clinical conditions with which OATPRP4 is associated.

[2314] Reference is now made to SLC21A11 BINDING SITE. SLC21A11 is a target gene of GAM26, corresponding to GAM26-TARGET GENE of FIG. 26A. SLC21A11 BINDING SITE is a binding site found in an untranslated region of SLC21A11, corresponding to BINDING SITE of FIG. 26A. FIG. 26D illustrates the complementarity of the nucleotide sequence of SLC21A11 BINDING SITE, designated SEQ ID:844404, to the nucleotide sequence of GAM26 RNA of FIG. 26A, designated SEQ ID:20604. An additional function of GAM26 is therefore inhibition of (SLC21A11). Accordingly, utilities of GAM26 include diagnosis and treatment of diseases and clinical conditions with which SLC21A11 is associated.

[2315] Reference is now made to MGC10702 BINDING SITE. MGC10702 is a target gene of GAM26, corresponding to GAM26-TARGET GENE of FIG. 26A. MGC10702 BINDING SITE is a binding site found in an untranslated region of MGC10702, corresponding to BINDING SITE of FIG. 26A. FIG. 26D illustrates the complementarity of the nucleotide sequence of MGC10702 BINDING SITE, designated SEQ ID:844408, to the nucleotide sequence of GAM26 RNA of FIG. 26A, designated SEQ ID:20604. A further function of GAM26 is therefore inhibition of (MGC10702). Accordingly, utilities of GAM26 include diagnosis and treatment of diseases and clinical conditions with which MGC10702 is associated.

[2316] Reference is now made to MGC13159 BINDING SITE. MGC13159 is a target gene of GAM26, corresponding to GAM26-TARGET GENE of FIG. 26A. MGC13159 BINDING SITE is a binding site found in an untranslated region of MGC13159, corresponding to BINDING SITE of FIG. 26A. FIG. 26D illustrates the complementarity of the nucleotide sequence of MGC13159 BINDING SITE, designated SEQ ID:851324, to the nucleotide sequence of GAM26 RNA of FIG. 26A, designated SEQ ID:20604. Yet a further function of GAM26 is therefore inhibition of (MGC13159). Accordingly, utilities of GAM26 include diagnosis and treatment of diseases and clinical conditions with which MGC13159 is associated.

[2317] Reference is now made to MGC14425 BINDING SITE. MGC14425 is a target gene of GAM26, corresponding to GAM26-TARGET GENE of FIG. 26A. MGC14425 BINDING SITE is a binding site found in an untranslated region of MGC14425, corresponding to BINDING SITE of FIG. 26A. FIG. 26D illustrates the complementarity of the nucleotide sequence of MGC14425 BINDING SITE, designated SEQ ID:852921, to the nucleotide sequence of GAM26 RNA of FIG. 26A, designated SEQ ID:20604. Another function of GAM26 is therefore inhibition of (MGC14425). Accordingly, utilities of GAM26 include diagnosis and treatment of diseases and clinical conditions with which MGC14425 is associated.

[2318] Reference is now made to MGC15396 BINDING SITE. MGC15396 is a target gene of GAM26, corresponding to GAM26-TARGET GENE of FIG. 26A. MGC15396 BINDING SITE is a binding site found in an untranslated region of MGC15396, corresponding to BINDING SITE of FIG. 26A. FIG. 26D illustrates the complementarity of the nucleotide sequence of MGC15396 BINDING SITE, designated SEQ ID:853827, to the nucleotide sequence of GAM26 RNA of FIG. 26A, designated SEQ ID:20604. Yet another function of GAM26 is therefore inhibition of (MGC15396). Accordingly, utilities of GAM26 include diagnosis and treatment of diseases and clinical conditions with which MGC15396 is associated.

[2319] Reference is now made to MGC15396 BINDING SITE. MGC15396 is a target gene of GAM26, corresponding to GAM26-TARGET GENE of FIG. 26A. MGC15396 BINDING SITE is a binding site found in an untranslated region of MGC15396, corresponding to BINDING SITE of FIG. 26A. FIG. 26D illustrates the complementarity of the nucleotide sequence of MGC15396 BINDING SITE, designated SEQ ID:853851, to the nucleotide sequence of GAM26 RNA of FIG. 26A, designated SEQ ID:20604. An additional function of GAM26 is therefore inhibition of (MGC15396). Accordingly, utilities of GAM26 include diagnosis and treatment of diseases and clinical conditions with which MGC15396 is associated.

[2320] Reference is now made to MGC17347 BINDING SITE. MGC17347 is a target gene of GAM26, corresponding to GAM26-TARGET GENE of FIG. 26A. MGC17347 BINDING SITE is a binding site found in an untranslated region of MGC17347, corresponding to BINDING SITE of FIG. 26A. FIG. 26D illustrates the complementarity of the nucleotide sequence of MGC17347 BINDING SITE, designated SEQ ID:858358, to the nucleotide sequence of GAM26 RNA of FIG. 26A, designated SEQ ID:20604. A further function of GAM26 is therefore inhibition of (MGC17347). Accordingly, utilities of GAM26 include diagnosis and treatment of diseases and clinical conditions with which MGC17347 is associated.

[2321] Reference is now made to MGC17347 BINDING SITE. MGC17347 is a target gene of GAM26, corresponding to GAM26-TARGET GENE of FIG. 26A. MGC17347 BINDING SITE is a binding site found in an untranslated region of MGC17347, corresponding to BINDING SITE of FIG. 26A. FIG. 26D illustrates the complementarity of the nucleotide sequence of MGC17347 BINDING SITE, designated SEQ ID:858360, to the nucleotide sequence of GAM26 RNA of FIG. 26A, designated SEQ ID:20604. Yet a further function of GAM26 is therefore inhibition of (MGC17347). Accordingly, utilities of GAM26 include diagnosis and treatment of diseases and clinical conditions with which MGC17347 is associated.

[2322] Reference is now made to MGC1842 BINDING SITE. MGC1842 is a target gene of GAM26, corresponding to GAM26-TARGET GENE of FIG. 26A. MGC1842 BINDING SITE is a binding site found in an untranslated region of MGC1842, corresponding to BINDING SITE of FIG. 26A. FIG. 26D illustrates the complementarity of the nucleotide sequence of MGC1842 BINDING SITE, designated SEQ ID:858800, to the nucleotide sequence of GAM26 RNA of FIG. 26A, designated SEQ ID:20604. Another function of GAM26 is therefore inhibition of (MGC1842). Accordingly, utilities of GAM26 include diagnosis and treatment of diseases and clinical conditions with which MGC1842 is associated.

[2323] Reference is now made to MGC22679 BINDING SITE. MGC22679 is a target gene of GAM26, corresponding to GAM26-TARGET GENE of FIG. 26A. MGC22679 BINDING SITE is a binding site found in an untranslated region of MGC22679, corresponding to BINDING SITE of FIG. 26A. FIG. 26D illustrates the complementarity of the nucleotide sequence of MGC22679 BINDING SITE, designated SEQ ID:861565, to the nucleotide sequence of GAM26 RNA of FIG. 26A, designated SEQ ID:20604. Yet another function of GAM26 is therefore inhibition of (MGC22679). Accordingly, utilities of GAM26 include diagnosis and treatment of diseases and clinical conditions with which MGC22679 is associated.

[2324] Reference is now made to MGC2594 BINDING SITE. MGC2594 is a target gene of GAM26, corresponding to GAM26-TARGET GENE of FIG. 26A. MGC2594 BINDING SITE is a binding site found in an untranslated region of MGC2594, corresponding to BINDING SITE of FIG. 26A. FIG. 26D illustrates the complementarity of the nucleotide sequence of MGC2594 BINDING SITE, designated SEQ ID:864289, to the nucleotide sequence of GAM26 RNA of FIG. 26A, designated SEQ ID:20604. An additional function of GAM26 is therefore inhibition of (MGC2594). Accordingly, utilities of GAM26 include diagnosis and treatment of diseases and clinical conditions with which MGC2594 is associated.

[2325] Reference is now made to MGC26684 BINDING SITE. MGC26684 is a target gene of GAM26, corresponding to GAM26-TARGET GENE of FIG. 26A. MGC26684 BINDING SITE is a binding site found in an untranslated region of MGC26684, corresponding to BINDING SITE of FIG. 26A. FIG. 26D illustrates the complementarity of the nucleotide sequence of MGC26684 BINDING SITE, designated SEQ ID:865556, to the nucleotide sequence of GAM26 RNA of FIG. 26A, designated SEQ ID:20604. A further function of GAM26 is therefore inhibition of (MGC26684). Accordingly, utilities of GAM26 include diagnosis and treatment of diseases and clinical conditions with which MGC26684 is associated.

[2326] Reference is now made to MGC3222 BINDING SITE. MGC3222 is a target gene of GAM26, corresponding to GAM26-TARGET GENE of FIG. 26A. MGC3222 BINDING SITE is a binding site found in an untranslated region of MGC3222, corresponding to BINDING SITE of FIG. 26A. FIG. 26D illustrates the complementarity of the nucleotide sequence of MGC3222 BINDING SITE, designated SEQ ID:870434, to the nucleotide sequence of GAM26 RNA of FIG. 26A, designated SEQ ID:20604. Yet a further function of GAM26 is therefore inhibition of (MGC3222). Accordingly, utilities of GAM26 include diagnosis and treatment of diseases and clinical conditions with which MGC3222 is associated.

[2327] Reference is now made to MGC4170 BINDING SITE. MGC4170 is a target gene of GAM26, corresponding to GAM26-TARGET GENE of FIG. 26A. MGC4170 BINDING SITE is a binding site found in an untranslated region of MGC4170, corresponding to BINDING SITE of FIG. 26A. FIG. 26D illustrates the complementarity of the nucleotide sequence of MGC4170 BINDING SITE, designated SEQ ID:872011, to the nucleotide sequence of GAM26 RNA of FIG. 26A, designated SEQ ID:20604. Another function of GAM26 is therefore inhibition of (MGC4170). Accordingly, utilities of GAM26 include diagnosis and treatment of diseases and clinical conditions with which MGC4170 is associated.

[2328] Reference is now made to MGC4172 BINDING SITE. MGC4172 is a target gene of GAM26, corresponding to GAM26-TARGET GENE of FIG. 26A. MGC4172 BINDING SITE is a binding site found in an untranslated region of MGC4172, corresponding to BINDING SITE of FIG. 26A. FIG. 26D illustrates the complementarity of the nucleotide sequence of MGC4172 BINDING SITE, designated SEQ ID:872115, to the nucleotide sequence of GAM26 RNA of FIG. 26A, designated SEQ ID:20604. Yet another function of GAM26 is therefore inhibition of (MGC4172). Accordingly, utilities of GAM26 include diagnosis and treatment of diseases and clinical conditions with which MGC4172 is associated.

[2329] Reference is now made to MGC4172 BINDING SITE. MGC4172 is a target gene of GAM26, corresponding to GAM26-TARGET GENE of FIG. 26A. MGC4172 BINDING SITE is a binding site found in an untranslated region of MGC4172, corresponding to BINDING SITE of FIG. 26A. FIG. 26D illustrates the complementarity of the nucleotide sequence of MGC4172 BINDING SITE, designated SEQ ID:872142, to the nucleotide sequence of GAM26 RNA of FIG. 26A, designated SEQ ID:20604. An additional function of GAM26 is therefore inhibition of (MGC4172). Accordingly, utilities of GAM26 include diagnosis and treatment of diseases and clinical conditions with which MGC4172 is associated.

[2330] Reference is now made to MGC5466 BINDING SITE. MGC5466 is a target gene of GAM26, corresponding to GAM26-TARGET GENE of FIG. 26A. MGC5466 BINDING SITE is a binding site found in an untranslated region of MGC5466, corresponding to BINDING SITE of FIG. 26A. FIG. 26D illustrates the complementarity of the nucleotide sequence of MGC5466 BINDING SITE, designated SEQ ID:877031, to the nucleotide sequence of GAM26 RNA of FIG. 26A, designated SEQ ID:20604. A further function of GAM26 is therefore inhibition of (MGC5466). Accordingly, utilities of GAM26 include diagnosis and treatment of diseases and clinical conditions with which MGC5466 is associated.

[2331] Reference is now made to MIP-T3 BINDING SITE. MIP-T3 is a target gene of GAM26, corresponding to GAM26-TARGET GENE of FIG. 26A. MIP-T3 BINDING SITE is a binding site found in an untranslated region of MIP-T3, corresponding to BINDING SITE of FIG. 26A. FIG. 26D illustrates the complementarity of the nucleotide sequence of MIP-T3 BINDING SITE, designated SEQ ID:879055, to the nucleotide sequence of GAM26 RNA of FIG. 26A, designated SEQ ID:20604. Yet a further function of GAM26 is therefore inhibition of (MIP-T3). Accordingly, utilities of GAM26 include diagnosis and treatment of diseases and clinical conditions with which MIP-T3 is associated.

[2332] Reference is now made to MIR BINDING SITE. MIR is a target gene of GAM26, corresponding to GAM26-TARGET GENE of FIG. 26A. MIR BINDING SITE is a binding site found in an untranslated region of MIR, corresponding to BINDING SITE of FIG. 26A. FIG. 26D illustrates the complementarity of the nucleotide sequence of MIR BINDING SITE, designated SEQ ID:879086, to the nucleotide sequence of GAM26 RNA of FIG. 26A, designated SEQ ID:20604. Another function of GAM26 is therefore inhibition of (MIR). Accordingly, utilities of GAM26 include diagnosis and treatment of diseases and clinical conditions with which MIR is associated.

[2333] Reference is now made to MOV34-34KD BINDING SITE. MOV34-34KD is a target gene of GAM26, corresponding to GAM26-TARGET GENE of FIG. 26A. MOV34-34KD BINDING SITE is a binding site found in an untranslated region of MOV34-34KD, corresponding to BINDING SITE of FIG. 26A. FIG. 26D illustrates the complementarity of the nucleotide sequence of MOV34-34KD BINDING SITE, designated SEQ ID:881891, to the nucleotide sequence of GAM26 RNA of FIG. 26A, designated SEQ ID:20604. Yet another function of GAM26 is therefore inhibition of (MOV34-34KD). Accordingly, utilities of GAM26 include diagnosis and treatment of diseases and clinical conditions with which MOV34-34KD is associated.

[2334] Reference is now made to MOV34-34KD BINDING SITE. MOV34-34KD is a target gene of GAM26, corresponding to GAM26-TARGET GENE of FIG. 26A. MOV34-34KD BINDING SITE is a binding site found in an untranslated region of MOV34-34KD, corresponding to BINDING SITE of FIG. 26A. FIG. 26D illustrates the complementarity of the nucleotide sequence of MOV34-34KD BINDING SITE, designated SEQ ID:881892, to the nucleotide sequence of GAM26 RNA of FIG. 26A, designated SEQ ID:20604. An additional function of GAM26 is therefore inhibition of (MOV34-34KD). Accordingly, utilities of GAM26 include diagnosis and treatment of diseases and clinical conditions with which MOV34-34KD is associated.

[2335] Reference is now made to MOV34-34KD BINDING SITE. MOV34-34KD is a target gene of GAM26, corresponding to GAM26-TARGET GENE of FIG. 26A. MOV34-34KD BINDING SITE is a binding site found in an untranslated region of MOV34-34KD, corresponding to BINDING SITE of FIG. 26A. FIG. 26D illustrates the complementarity of the nucleotide sequence of MOV34-34KD BINDING SITE, designated SEQ ID:881894, to the nucleotide sequence of GAM26 RNA of FIG. 26A, designated SEQ ID:20604. A further function of GAM26 is therefore inhibition of (MOV34-34KD). Accordingly, utilities of GAM26 include diagnosis and treatment of diseases and clinical conditions with which MOV34-34KD is associated.

[2336] Reference is now made to MPZL1 BINDING SITE. MPZL1 is a target gene of GAM26, corresponding to GAM26-TARGET GENE of FIG. 26A. MPZL1 BINDING SITE is a binding site found in an untranslated region of MPZL1, corresponding to BINDING SITE of FIG. 26A. FIG. 26D illustrates the complementarity of the nucleotide sequence of MPZL1 BINDING SITE, designated SEQ ID:882046, to the nucleotide sequence of GAM26 RNA of FIG. 26A, designated SEQ ID:20604. Yet a further function of GAM26 is therefore inhibition of (MPZL1). Accordingly, utilities of GAM26 include diagnosis and treatment of diseases and clinical conditions with which MPZL1 is associated.

[2337] Reference is now made to MPZL1 BINDING SITE. MPZL1 is a target gene of GAM26, corresponding to GAM26-TARGET GENE of FIG. 26A. MPZL1 BINDING SITE is a binding site found in an untranslated region of MPZL1, corresponding to BINDING SITE of FIG. 26A. FIG. 26D illustrates the complementarity of the nucleotide sequence of MPZL1 BINDING SITE, designated SEQ ID:882049, to the nucleotide sequence of GAM26 RNA of FIG. 26A, designated SEQ ID:20604. Another function of GAM26 is therefore inhibition of (MPZL1). Accordingly, utilities of GAM26 include diagnosis and treatment of diseases and clinical conditions with which MPZL1 is associated.

[2338] Reference is now made to NCOR1 BINDING SITE. NCOR1 is a target gene of GAM26, corresponding to GAM26-TARGET GENE of FIG. 26A. NCOR1 BINDING SITE is a binding site found in an untranslated region of NCOR1, corresponding to BINDING SITE of FIG. 26A. FIG. 26D illustrates the complementarity of the nucleotide sequence of NCOR1 BINDING SITE, designated SEQ ID:889437, to the nucleotide sequence of GAM26 RNA of FIG. 26A, designated SEQ ID:20604. Yet another function of GAM26 is therefore inhibition of (NCOR1). Accordingly, utilities of GAM26 include diagnosis and treatment of diseases and clinical conditions with which NCOR1 is associated.

[2339] Reference is now made to NCOR1 BINDING SITE. NCOR1 is a target gene of GAM26, corresponding to GAM26-TARGET GENE of FIG. 26A. NCOR1 BINDING SITE is a binding site found in an untranslated region of NCOR1, corresponding to BINDING SITE of FIG. 26A. FIG. 26D illustrates the complementarity of the nucleotide sequence of NCOR1 BINDING SITE, designated SEQ ID:889452, to the nucleotide sequence of GAM26 RNA of FIG. 26A, designated SEQ ID:20604. An additional function of GAM26 is therefore inhibition of (NCOR1). Accordingly, utilities of GAM26 include diagnosis and treatment of diseases and clinical conditions with which NCOR1 is associated.

[2340] Reference is now made to NFAT5 BINDING SITE. NFAT5 is a target gene of GAM26, corresponding to GAM26-TARGET GENE of FIG. 26A. NFAT5 BINDING SITE is a binding site found in an untranslated region of NFAT5, corresponding to BINDING SITE of FIG. 26A. FIG. 26D illustrates the complementarity of the nucleotide sequence of NFAT5 BINDING SITE, designated SEQ ID:892135, to the nucleotide sequence of GAM26 RNA of FIG. 26A, designated SEQ ID:20604. A further function of GAM26 is therefore inhibition of (NFAT5). Accordingly, utilities of GAM26 include diagnosis and treatment of diseases and clinical conditions with which NFAT5 is associated.

[2341] Reference is now made to NIR1 BINDING SITE. NIR1 is a target gene of GAM26, corresponding to GAM26-TARGET GENE of FIG. 26A. NIR1 BINDING SITE is a binding site found in an untranslated region of NIR1, corresponding to BINDING SITE of FIG. 26A. FIG. 26D illustrates the complementarity of the nucleotide sequence of NIR1 BINDING SITE, designated SEQ ID:893156, to the nucleotide sequence of GAM26 RNA of FIG. 26A, designated SEQ ID:20604. Yet a further function of GAM26 is therefore inhibition of (NIR1). Accordingly, utilities of GAM26 include diagnosis and treatment of diseases and clinical conditions with which NIR1 is associated.

[2342] Reference is now made to NIR1. BINDING SITE. NIR1 is a target gene of GAM26, corresponding to GAM26-TARGET GENE of FIG. 26A. NIR1 BINDING SITE is a binding site found in an untranslated region of NIR1, corresponding to BINDING SITE of FIG. 26A. FIG. 26D illustrates the complementarity of the nucleotide sequence of NIR1 BINDING SITE, designated SEQ ID:893162, to the nucleotide sequence of GAM26 RNA of FIG. 26A, designated SEQ ID:20604. Another function of GAM26 is therefore inhibition of (NIR1). Accordingly, utilities of GAM26 include diagnosis and treatment of diseases and clinical conditions with which NIR1 is associated.

[2343] Reference is now made to NKX2B BINDING SITE. NKX2B is a target gene of GAM26, corresponding to GAM26-TARGET GENE of FIG. 26A. NKX2B BINDING SITE is a binding site found in an untranslated region of NKX2B, corresponding to BINDING SITE of FIG. 26A. FIG. 26D illustrates the complementarity of the nucleotide sequence of NKX2B BINDING SITE, designated SEQ ID:893635, to the nucleotide sequence of GAM26 RNA of FIG. 26A, designated SEQ ID:20604. Yet another function of GAM26 is therefore inhibition of (NKX2B). Accordingly, utilities of GAM26 include diagnosis and treatment of diseases and clinical conditions with which NKX2B is associated.

[2344] Reference is now made to NS1-BP BINDING SITE. NS1-BP is a target gene of GAM26, corresponding to GAM26-TARGET GENE of FIG. 26A. NS1-BP BINDING SITE is a binding site found in an untranslated region of NS1-BP, corresponding to BINDING SITE of FIG. 26A. FIG. 26D illustrates the complementarity of the nucleotide sequence of NS1-BP BINDING SITE, designated SEQ ID:896538, to the nucleotide sequence of GAM26 RNA of FIG. 26A, designated SEQ ID:20604. An additional function of GAM26 is therefore inhibition of (NS1-BP). Accordingly, utilities of GAM26 include diagnosis and treatment of diseases and clinical conditions with which NS1-BP is associated.

[2345] Reference is now made to NTN4 BINDING SITE. NTN4 is a target gene of GAM26, corresponding to GAM26-TARGET GENE of FIG. 26A. NTN4 BINDING SITE is a binding site found in an untranslated region of NTN4, corresponding to BINDING SITE of FIG. 26A. FIG. 26D illustrates the complementarity of the nucleotide sequence of NTN4 BINDING SITE, designated SEQ ID:896979, to the nucleotide sequence of GAM26 RNA of FIG. 26A, designated SEQ ID:20604. A further function of GAM26 is therefore inhibition of (NTN4). Accordingly, utilities of GAM26 include diagnosis and treatment of diseases and clinical conditions with which NTN4 is associated.

[2346] Reference is now made to OAZ1 BINDING SITE. OAZ1 is a target gene of GAM26, corresponding to GAM26-TARGET GENE of FIG. 26A. OAZ1 BINDING SITE is a binding site found in an untranslated region of OAZ1, corresponding to BINDING SITE of FIG. 26A. FIG. 26D illustrates the complementarity of the nucleotide sequence of OAZ1 BINDING SITE, designated SEQ ID:899518, to the nucleotide sequence of GAM26 RNA of FIG. 26A, designated SEQ ID:20604. Yet a further function of GAM26 is therefore inhibition of (OAZ1). Accordingly, utilities of GAM26 include diagnosis and treatment of diseases and clinical conditions with which OAZ1 is associated.

[2347] Reference is now made to OAZ1 BINDING SITE. OAZ1 is a target gene of GAM26, corresponding to GAM26-TARGET GENE of FIG. 26A. OAZ1 BINDING SITE is a binding site found in an untranslated region of OAZ1, corresponding to BINDING SITE of FIG. 26A. FIG. 26D illustrates the complementarity of the nucleotide sequence of OAZ1 BINDING SITE, designated SEQ ID:899526, to the nucleotide sequence of GAM26 RNA of FIG. 26A, designated SEQ ID:20604. Another function of GAM26 is therefore inhibition of (OAZ1). Accordingly, utilities of GAM26 include diagnosis and treatment of diseases and clinical conditions with which OAZ1 is associated.

[2348] Reference is now made to OAZ2 BINDING SITE. OAZ2 is a target gene of GAM26, corresponding to GAM26-TARGET GENE of FIG. 26A. OAZ2 BINDING SITE is a binding site found in an untranslated region of OAZ2, corresponding to BINDING SITE of FIG. 26A. FIG. 26D illustrates the complementarity of the nucleotide sequence of OAZ2 BINDING SITE, designated SEQ ID:899599, to the nucleotide sequence of GAM26 RNA of FIG. 26A, designated SEQ ID:20604. Yet another function of GAM26 is therefore inhibition of (OAZ2). Accordingly, utilities of GAM26 include diagnosis and treatment of diseases and clinical conditions with which OAZ2 is associated.

[2349] Reference is now made to OAZ2 BINDING SITE. OAZ2 is a target gene of GAM26, corresponding to GAM26-TARGET GENE of FIG. 26A. OAZ2 BINDING SITE is a binding site found in an untranslated region of OAZ2, corresponding to BINDING SITE of FIG. 26A. FIG. 26D illustrates the complementarity of the nucleotide sequence of OAZ2 BINDING SITE, designated SEQ ID:899619, to the nucleotide sequence of GAM26 RNA of FIG. 26A, designated SEQ ID:20604. An additional function of GAM26 is therefore inhibition of (OAZ2). Accordingly, utilities of GAM26 include diagnosis and treatment of diseases and clinical conditions with which OAZ2 is associated.

[2350] Reference is now made to OSBPL1A BINDING SITE. OSBPL1A is a target gene of GAM26, corresponding to GAM26-TARGET GENE of FIG. 26A. OSBPL1A BINDING SITE is a binding site found in an untranslated region of OSBPL1A, corresponding to BINDING SITE of FIG. 26A. FIG. 26D illustrates the complementarity of the nucleotide sequence of OSBPL1A BINDING SITE, designated SEQ ID:902150, to the nucleotide sequence of GAM26 RNA of FIG. 26A, designated SEQ ID:20604. A further function of GAM26 is therefore inhibition of (OSBPL1A). Accordingly, utilities of GAM26 include diagnosis and treatment of diseases and clinical conditions with which OSBPL1A is associated.

[2351] Reference is now made to PARG1 BINDING SITE. PARG1 is a target gene of GAM26, corresponding to GAM26-TARGET GENE of FIG. 26A. PARG1 BINDING SITE is a binding site found in an untranslated region of PARG1, corresponding to BINDING SITE of FIG. 26A. FIG. 26D illustrates the complementarity of the nucleotide sequence of PARG1 BINDING SITE, designated SEQ ID:907038, to the nucleotide sequence of GAM26 RNA of FIG. 26A, designated SEQ ID:20604. Yet a further function of GAM26 is therefore inhibition of (PARG1). Accordingly, utilities of GAM26 include diagnosis and treatment of diseases and clinical conditions with which PARG1 is associated.

[2352] Reference is now made to PCAF BINDING SITE. PCAF is a target gene of GAM26, corresponding to GAM26-TARGET GENE of FIG. 26A. PCAF BINDING SITE is a binding site found in an untranslated region of PCAF, corresponding to BINDING SITE of FIG. 26A. FIG. 26D illustrates the complementarity of the nucleotide sequence of PCAF BINDING SITE, designated SEQ ID:908148, to the nucleotide sequence of GAM26 RNA of FIG. 26A, designated SEQ ID:20604. Another function of GAM26 is therefore inhibition of (PCAF). Accordingly, utilities of GAM26 include diagnosis and treatment of diseases and clinical conditions with which PCAF is associated.

[2353] Reference is now made to PCCX2 BINDING SITE. PCCX2 is a target gene of GAM26, corresponding to GAM26-TARGET GENE of FIG. 26A. PCCX2 BINDING SITE is a binding site found in an untranslated region of PCCX2, corresponding to BINDING SITE of FIG. 26A. FIG. 26D illustrates the complementarity of the nucleotide sequence of PCCX2 BINDING SITE, designated SEQ ID:908515, to the nucleotide sequence of GAM26 RNA of FIG. 26A, designated SEQ ID:20604. Yet another function of GAM26 is therefore inhibition of (PCCX2). Accordingly, utilities of GAM26 include diagnosis and treatment of diseases and clinical conditions with which PCCX2 is associated.

[2354] Reference is now made to PELI2 BINDING SITE. PELI2 is a target gene of GAM26, corresponding to GAM26-TARGET GENE of FIG. 26A. PELI2 BINDING SITE is a binding site found in an untranslated region of PELI2, corresponding to BINDING SITE of FIG. 26A. FIG. 26D illustrates the complementarity of the nucleotide sequence of PELI2 BINDING SITE, designated SEQ ID:912193, to the nucleotide sequence of GAM26 RNA of FIG. 26A, designated SEQ ID:20604. An additional function of GAM26 is therefore inhibition of (PELI2). Accordingly, utilities of GAM26 include diagnosis and treatment of diseases and clinical conditions with which PELI2 is associated.

[2355] Reference is now made to PELI2 BINDING SITE. PELI2 is a target gene of GAM26, corresponding to GAM26-TARGET GENE of FIG. 26A. PELI2 BINDING SITE is a binding site found in an untranslated region of PELI2, corresponding to BINDING SITE of FIG. 26A. FIG. 26D illustrates the complementarity of the nucleotide sequence of PELI2 BINDING SITE, designated SEQ ID:912206, to the nucleotide sequence of GAM26 RNA of FIG. 26A, designated SEQ ID:20604. A further function of GAM26 is therefore inhibition of (PELI2). Accordingly, utilities of GAM26 include diagnosis and treatment of diseases and clinical conditions with which PELI2 is associated.

[2356] Reference is now made to PF1 BINDING SITE. PF1 is a target gene of GAM26, corresponding to GAM26-TARGET GENE of FIG. 26A. PF1 BINDING SITE is a binding site found in an untranslated region of PF1, corresponding to BINDING SITE of FIG. 26A. FIG. 26D illustrates the complementarity of the nucleotide sequence of PF1 BINDING SITE, designated SEQ ID:912812, to the nucleotide sequence of GAM26 RNA of FIG. 26A, designated SEQ ID:20604. Yet a further function of GAM26 is therefore inhibition of (PF1). Accordingly, utilities of GAM26 include diagnosis and treatment of diseases and clinical conditions with which PF1 is associated.

[2357] Reference is now made to PLCL2 BINDING SITE. PLCL2 is a target gene of GAM26, corresponding to GAM26-TARGET GENE of FIG. 26A. PLCL2 BINDING SITE is a binding site found in an untranslated region of PLCL2, corresponding to BINDING SITE of FIG. 26A. FIG. 26D illustrates the complementarity of the nucleotide sequence of PLCL2 BINDING SITE, designated SEQ ID:917013, to the nucleotide sequence of GAM26 RNA of FIG. 26A, designated SEQ ID:20604. Another function of GAM26 is therefore inhibition of (PLCL2). Accordingly, utilities of GAM26 include diagnosis and treatment of diseases and clinical conditions with which PLCL2 is associated.

[2358] Reference is now made to PM5 BINDING SITE. PM5 is a target gene of GAM26, corresponding to GAM26-TARGET GENE of FIG. 26A. PM5 BINDING SITE is a binding site found in an untranslated region of PM5, corresponding to BINDING SITE of FIG. 26A. FIG. 26D illustrates the complementarity of the nucleotide sequence of PM5 BINDING SITE, designated SEQ ID:917719, to the nucleotide sequence of GAM26 RNA of FIG. 26A, designated SEQ ID:20604. Yet another function of GAM26 is therefore inhibition of (PM5). Accordingly, utilities of GAM26 include diagnosis and treatment of diseases and clinical conditions with which PM5 is associated.

[2359] Reference is now made to PMX2B BINDING SITE. PMX2B is a target gene of GAM26, corresponding to GAM26-TARGET GENE of FIG. 26A. PMX2B BINDING SITE is a binding site found in an untranslated region of PMX2B, corresponding to BINDING SITE of FIG. 26A. FIG. 26D illustrates the complementarity of the nucleotide sequence of PMX2B BINDING SITE, designated SEQ ID:918145, to the nucleotide sequence of GAM26 RNA of FIG. 26A, designated SEQ ID:20604. An additional function of GAM26 is therefore inhibition of (PMX2B). Accordingly, utilities of GAM26 include diagnosis and treatment of diseases and clinical conditions with which PMX2B is associated.

[2360] Reference is now made to PMX2B BINDING SITE. PMX2B is a target gene of GAM26, corresponding to GAM26-TARGET GENE of FIG. 26A. PMX2B BINDING SITE is a binding site found in an untranslated region of PMX2B, corresponding to BINDING SITE of FIG. 26A. FIG. 26D illustrates the complementarity of the nucleotide sequence of PMX2B BINDING SITE, designated SEQ ID:918187, to the nucleotide sequence of GAM26 RNA of FIG. 26A, designated SEQ ID:20604. A further function of GAM26 is therefore inhibition of (PMX2B). Accordingly, utilities of GAM26 include diagnosis and treatment of diseases and clinical conditions with which PMX2B is associated.

[2361] Reference is now made to PMX2B BINDING SITE. PMX2B is a target gene of GAM26, corresponding to GAM26-TARGET GENE of FIG. 26A. PMX2B BINDING SITE is a binding site found in an untranslated region of PMX2B, corresponding to BINDING SITE of FIG. 26A. FIG. 26D illustrates the complementarity of the nucleotide sequence of PMX2B BINDING SITE, designated SEQ ID:918189, to the nucleotide sequence of GAM26 RNA of FIG. 26A, designated SEQ ID:20604. Yet a further function of GAM26 is therefore inhibition of (PMX2B). Accordingly, utilities of GAM26 include diagnosis and treatment of diseases and clinical conditions with which PMX2B is associated.

[2362] Reference is now made to PRDM8 BINDING SITE. PRDM8 is a target gene of GAM26, corresponding to GAM26-TARGET GENE of FIG. 26A. PRDM8 BINDING SITE is a binding site found in an untranslated region of PRDM8, corresponding to BINDING SITE of FIG. 26A. FIG. 26D illustrates the complementarity of the nucleotide sequence of PRDM8 BINDING SITE, designated SEQ ID:924600, to the nucleotide sequence of GAM26 RNA of FIG. 26A, designated SEQ ID:20604. Another function of GAM26 is therefore inhibition of (PRDM8). Accordingly, utilities of GAM26 include diagnosis and treatment of diseases and clinical conditions with which PRDM8 is associated.

[2363] Reference is now made to PSIP2 BINDING SITE. PSIP2 is a target gene of GAM26, corresponding to GAM26-TARGET GENE of FIG. 26A. PSIP2 BINDING SITE is a binding site found in an untranslated region of PSIP2, corresponding to BINDING SITE of FIG. 26A. FIG. 26D illustrates the complementarity of the nucleotide sequence of PSIP2 BINDING SITE, designated SEQ ID:933689, to the nucleotide sequence of GAM26 RNA of FIG. 26A, designated SEQ ID:20604. Yet another function of GAM26 is therefore inhibition of (PSIP2). Accordingly, utilities of GAM26 include diagnosis and treatment of diseases and clinical conditions with which PSIP2 is associated.

[2364] Reference is now made to PSIP2 BINDING SITE. PSIP2 is a target gene of GAM26, corresponding to GAM26-TARGET GENE of FIG. 26A. PSIP2 BINDING SITE is a binding site found in an untranslated region of PSIP2, corresponding to BINDING SITE of FIG. 26A. FIG. 26D illustrates the complementarity of the nucleotide sequence of PSIP2 BINDING SITE, designated SEQ ID:933709, to the nucleotide sequence of GAM26 RNA of FIG. 26A, designated SEQ ID:20604. An additional function of GAM26 is therefore inhibition of (PSIP2). Accordingly, utilities of GAM26 include diagnosis and treatment of diseases and clinical conditions with which PSIP2 is associated.

[2365] Reference is now made to PTR4 BINDING SITE. PTR4 is a target gene of GAM26, corresponding to GAM26-TARGET GENE of FIG. 26A. PTR4 BINDING SITE is a binding site found in an untranslated region of PTR4, corresponding to BINDING SITE of FIG. 26A. FIG. 26D illustrates the complementarity of the nucleotide sequence of PTR4 BINDING SITE, designated SEQ ID:937407, to the nucleotide sequence of GAM26 RNA of FIG. 26A, designated SEQ ID:20604. A further function of GAM26 is therefore inhibition of (PTR4). Accordingly, utilities of GAM26 include diagnosis and treatment of diseases and clinical conditions with which PTR4 is associated.

[2366] Reference is now made to QKI BINDING SITE. QKI is a target gene of GAM26, corresponding to GAM26-TARGET GENE of FIG. 26A. QKI BINDING SITE is a binding site found in an untranslated region of QKI, corresponding to BINDING SITE of FIG. 26A. FIG. 26D illustrates the complementarity of the nucleotide sequence of QKI BINDING SITE, designated SEQ ID:938140, to the nucleotide sequence of GAM26 RNA of FIG. 26A, designated SEQ ID:20604. Yet a further function of GAM26 is therefore inhibition of (QKI). Accordingly, utilities of GAM26 include diagnosis and treatment of diseases and clinical conditions with which QKI is associated.

[2367] Reference is now made to QKI BINDING SITE. QKI is a target gene of GAM26, corresponding to GAM26-TARGET GENE of FIG. 26A. QKI BINDING SITE is a binding site found in an untranslated region of QKI, corresponding to BINDING SITE of FIG. 26A. FIG. 26D illustrates the complementarity of the nucleotide sequence of QKI BINDING SITE, designated SEQ ID:938170, to the nucleotide sequence of GAM26 RNA of FIG. 26A, designated SEQ ID:20604. Another function of GAM26 is therefore inhibition of (QKI). Accordingly, utilities of GAM26 include diagnosis and treatment of diseases and clinical conditions with which QKI is associated.

[2368] Reference is now made to QKI BINDING SITE. QKI is a target gene of GAM26, corresponding to GAM26-TARGET GENE of FIG. 26A. QKI BINDING SITE is a binding site found in an untranslated region of QKI, corresponding to BINDING SITE of FIG. 26A. FIG. 26D illustrates the complementarity of the nucleotide sequence of QKI BINDING SITE, designated SEQ ID:938172, to the nucleotide sequence of GAM26 RNA of FIG. 26A, designated SEQ ID:20604. Yet another function of GAM26 is therefore inhibition of (QKI). Accordingly, utilities of GAM26 include diagnosis and treatment of diseases and clinical conditions with which QKI is associated.

[2369] Reference is now made to QKI BINDING SITE. QKI is a target gene of GAM26, corresponding to GAM26-TARGET GENE of FIG. 26A. QKI BINDING SITE is a binding site found in an untranslated region of QKI, corresponding to BINDING SITE of FIG. 26A. FIG. 26D illustrates the complementarity of the nucleotide sequence of QKI BINDING SITE, designated SEQ ID:938196, to the nucleotide sequence of GAM26 RNA of FIG. 26A, designated SEQ ID:20604. An additional function of GAM26 is therefore inhibition of (QKI). Accordingly, utilities of GAM26 include diagnosis and treatment of diseases and clinical conditions with which QKI is associated.

[2370] Reference is now made to RAB2 BINDING SITE. RAB2 is a target gene of GAM26, corresponding to GAM26-TARGET GENE of FIG. 26A. RAB2 BINDING SITE is a binding site found in an untranslated region of RAB2, corresponding to BINDING SITE of FIG. 26A. FIG. 26D illustrates the complementarity of the nucleotide sequence of RAB2 BINDING SITE, designated SEQ ID:939662, to the nucleotide sequence of GAM26 RNA of FIG. 26A, designated SEQ ID:20604. A further function of GAM26 is therefore inhibition of (RAB2). Accordingly, utilities of GAM26 include diagnosis and treatment of diseases and clinical conditions with which RAB2 is associated.

[2371] Reference is now made to RAB2 BINDING SITE. RAB2 is a target gene of GAM26, corresponding to GAM26-TARGET GENE of FIG. 26A. RAB2 BINDING SITE is a binding site found in an untranslated region of RAB2, corresponding to BINDING SITE of FIG. 26A. FIG. 26D illustrates the complementarity of the nucleotide sequence of RAB2 BINDING SITE, designated SEQ ID:939672, to the nucleotide sequence of GAM26 RNA of FIG. 26A, designated SEQ ID:20604. Yet a further function of GAM26 is therefore inhibition of (RAB2). Accordingly, utilities of GAM26 include diagnosis and treatment of diseases and clinical conditions with which RAB2 is associated.

[2372] Reference is now made to RAB2 BINDING SITE. RAB2 is a target gene of GAM26, corresponding to GAM26-TARGET GENE of FIG. 26A. RAB2 BINDING SITE is a binding site found in an untranslated region of RAB2, corresponding to BINDING SITE of FIG. 26A. FIG. 26D illustrates the complementarity of the nucleotide sequence of RAB2 BINDING SITE, designated SEQ ID:939672, to the nucleotide sequence of GAM26 RNA of FIG. 26A, designated SEQ ID:20604. Another function of GAM26 is therefore inhibition of (RAB2). Accordingly, utilities of GAM26 include diagnosis and treatment of diseases and clinical conditions with which RAB2 is associated.

[2373] Reference is now made to RAB22A BINDING SITE. RAB22A is a target gene of GAM26, corresponding to GAM26-TARGET GENE of FIG. 26A. RAB22A BINDING SITE is a binding site found in an untranslated region of RAB22A, corresponding to BINDING SITE of FIG. 26A. FIG. 26D illustrates the complementarity of the nucleotide sequence of RAB22A BINDING SITE, designated SEQ ID:939920, to the nucleotide sequence of GAM26 RNA of FIG. 26A, designated SEQ ID:20604. Yet another function of GAM26 is therefore inhibition of (RAB22A). Accordingly, utilities of GAM26 include diagnosis and treatment of diseases and clinical conditions with which RAB22A is associated.

[2374] Reference is now made to RAB22A BINDING SITE. RAB22A is a target gene of GAM26, corresponding to GAM26-TARGET GENE of FIG. 26A. RAB22A BINDING SITE is a binding site found in an untranslated region of RAB22A, corresponding to BINDING SITE of FIG. 26A. FIG. 26D illustrates the complementarity of the nucleotide sequence of RAB22A BINDING SITE, designated SEQ ID:939925, to the nucleotide sequence of GAM26 RNA of FIG. 26A, designated SEQ ID:20604. An additional function of GAM26 is therefore inhibition of (RAB22A). Accordingly, utilities of GAM26 include diagnosis and treatment of diseases and clinical conditions with which RAB22A is associated.

[2375] Reference is now made to RAB5EP BINDING SITE. RAB5EP is a target gene of GAM26, corresponding to GAM26-TARGET GENE of FIG. 26A. RAB5EP BINDING SITE is a binding site found in an untranslated region of RAB5EP, corresponding to BINDING SITE of FIG. 26A. FIG. 26D illustrates the complementarity of the nucleotide sequence of RAB5EP BINDING SITE, designated SEQ ID:941423, to the nucleotide sequence of GAM26 RNA of FIG. 26A, designated SEQ ID:20604. A further function of GAM26 is therefore inhibition of (RAB5EP). Accordingly, utilities of GAM26 include diagnosis and treatment of diseases and clinical conditions with which RAB5EP is associated.

[2376] Reference is now made to RALY BINDING SITE. RALY is a target gene of GAM26, corresponding to GAM26-TARGET GENE of FIG. 26A. RALY BINDING SITE is a binding site found in an untranslated region of RALY, corresponding to BINDING SITE of FIG. 26A. FIG. 26D illustrates the complementarity of the nucleotide sequence of RALY BINDING SITE, designated SEQ ID:943042, to the nucleotide sequence of GAM26 RNA of FIG. 26A, designated SEQ ID:20604. Yet a further function of GAM26 is therefore inhibition of (RALY). Accordingly, utilities of GAM26 include diagnosis and treatment of diseases and clinical conditions with which RALY is associated.

[2377] Reference is now made to RALY BINDING SITE. RALY is a target gene of GAM26, corresponding to GAM26-TARGET GENE of FIG. 26A. RALY BINDING SITE is a binding site found in an untranslated region of RALY, corresponding to BINDING SITE of FIG. 26A. FIG. 26D illustrates the complementarity of the nucleotide sequence of RALY BINDING SITE, designated SEQ ID:943043, to the nucleotide sequence of GAM26 RNA of FIG. 26A, designated SEQ ID:20604. Another function of GAM26 is therefore inhibition of (RALY). Accordingly, utilities of GAM26 include diagnosis and treatment of diseases and clinical conditions with which RALY is associated.

[2378] Reference is now made to RALY BINDING SITE. RALY is a target gene of GAM26, corresponding to GAM26-TARGET GENE of FIG. 26A. RALY BINDING SITE is a binding site found in an untranslated region of RALY, corresponding to BINDING SITE of FIG. 26A. FIG. 26D illustrates the complementarity of the nucleotide sequence of RALY BINDING SITE, designated SEQ ID:943044, to the nucleotide sequence of GAM26 RNA of FIG. 26A, designated SEQ ID:20604. Yet another function of GAM26 is therefore inhibition of (RALY). Accordingly, utilities of GAM26 include diagnosis and treatment of diseases and clinical conditions with which RALY is associated.

[2379] Reference is now made to RC3 BINDING SITE. RC3 is a target gene of GAM26, corresponding to GAM26-TARGET GENE of FIG. 26A. RC3 BINDING SITE is a binding site found in an untranslated region of RC3, corresponding to BINDING SITE of FIG. 26A. FIG. 26D illustrates the complementarity of the nucleotide sequence of RC3 BINDING SITE, designated SEQ ID:945022, to the nucleotide sequence of GAM26 RNA of FIG. 26A, designated SEQ ID:20604. An additional function of GAM26 is therefore inhibition of (RC3). Accordingly, utilities of GAM26 include diagnosis and treatment of diseases and clinical conditions with which RC3 is associated.

[2380] Reference is now made to RNPC2 BINDING SITE. RNPC2 is a target gene of GAM26, corresponding to GAM26-TARGET GENE of FIG. 26A. RNPC2 BINDING SITE is a binding site found in an untranslated region of RNPC2, corresponding to BINDING SITE of FIG. 26A. FIG. 26D illustrates the complementarity of the nucleotide sequence of RNPC2 BINDING SITE, designated SEQ ID:950359, to the nucleotide sequence of GAM26 RNA of FIG. 26A, designated SEQ ID:20604. A further function of GAM26 is therefore inhibition of (RNPC2). Accordingly, utilities of GAM26 include diagnosis and treatment of diseases and clinical conditions with which RNPC2 is associated.

[2381] Reference is now made to RNPC2 BINDING SITE. RNPC2 is a target gene of GAM26, corresponding to GAM26-TARGET GENE of FIG. 26A. RNPC2 BINDING SITE is a binding site found in an untranslated region of RNPC2, corresponding to BINDING SITE of FIG. 26A. FIG. 26D illustrates the complementarity of the nucleotide sequence of RNPC2 BINDING SITE, designated SEQ ID:950360, to the nucleotide sequence of GAM26 RNA of FIG. 26A, designated SEQ ID:20604. Yet a further function of GAM26 is therefore inhibition of (RNPC2). Accordingly, utilities of GAM26 include diagnosis and treatment of diseases and clinical conditions with which RNPC2 is associated.

[2382] Reference is now made to RPS6KC1 BINDING SITE. RPS6KC1 is a target gene of GAM26, corresponding to GAM26-TARGET GENE of FIG. 26A. RPS6KC1 BINDING SITE is a binding site found in an untranslated region of RPS6KC1, corresponding to BINDING SITE of FIG. 26A. FIG. 26D illustrates the complementarity of the nucleotide sequence of RPS6KC1 BINDING SITE, designated SEQ ID:952575, to the nucleotide sequence of GAM26 RNA of FIG. 26A, designated SEQ ID:20604. Another function of GAM26 is therefore inhibition of (RPS6KC1). Accordingly, utilities of GAM26 include diagnosis and treatment of diseases and clinical conditions with which RPS6KC1 is associated.

[2383] Reference is now made to SERP1 BINDING SITE. SERP1 is a target gene of GAM26, corresponding to GAM26-TARGET GENE of FIG. 26A. SERP1 BINDING SITE is a binding site found in an untranslated region of SERP1, corresponding to BINDING SITE of FIG. 26A. FIG. 26D illustrates the complementarity of the nucleotide sequence of SERP1 BINDING SITE, designated SEQ ID:963975, to the nucleotide sequence of GAM26 RNA of FIG. 26A, designated SEQ ID:20604. Yet another function of GAM26 is therefore inhibition of (SERP1). Accordingly, utilities of GAM26 include diagnosis and treatment of diseases and clinical conditions with which SERP1 is associated.

[2384] Reference is now made to SERP1 BINDING SITE. SERP1 is a target gene of GAM26, corresponding to GAM26-TARGET GENE of FIG. 26A. SERP1 BINDING SITE is a binding site found in an untranslated region of SERP1, corresponding to BINDING SITE of FIG. 26A. FIG. 26D illustrates the complementarity of the nucleotide sequence of SERP1 BINDING SITE, designated SEQ ID:963978, to the nucleotide sequence of GAM26 RNA of FIG. 26A, designated SEQ ID:20604. An additional function of GAM26 is therefore inhibition of (SERP1). Accordingly, utilities of GAM26 include diagnosis and treatment of diseases and clinical conditions with which SERP1 is associated.

[2385] Reference is now made to SERP1 BINDING SITE. SERP1 is a target gene of GAM26, corresponding to GAM26-TARGET GENE of FIG. 26A. SERP1 BINDING SITE is a binding site found in an untranslated region of SERP1, corresponding to BINDING SITE of FIG. 26A. FIG. 26D illustrates the complementarity of the nucleotide sequence of SERP1 BINDING SITE, designated SEQ ID:964015, to the nucleotide sequence of GAM26 RNA of FIG. 26A, designated SEQ ID:20604. A further function of GAM26 is therefore inhibition of (SERP1). Accordingly, utilities of GAM26 include diagnosis and treatment of diseases and clinical conditions with which SERP1 is associated.

[2386] Reference is now made to SFRS9 BINDING SITE. SFRS9 is a target gene of GAM26, corresponding to GAM26-TARGET GENE of FIG. 26A. SFRS9 BINDING SITE is a binding site found in an untranslated region of SFRS9, corresponding to BINDING SITE of FIG. 26A. FIG. 26D illustrates the complementarity of the nucleotide sequence of SFRS9 BINDING SITE, designated SEQ ID:964985, to the nucleotide sequence of GAM26 RNA of FIG. 26A, designated SEQ ID:20604. Yet a further function of GAM26 is therefore inhibition of (SFRS9). Accordingly, utilities of GAM26 include diagnosis and treatment of diseases and clinical conditions with which SFRS9 is associated.

[2387] Reference is now made to SH2D3C BINDING SITE. SH2D3C is a target gene of GAM26, corresponding to GAM26-TARGET GENE of FIG. 26A. SH2D3C BINDING SITE is a binding site found in an untranslated region of SH2D3C, corresponding to BINDING SITE of FIG. 26A. FIG. 26D illustrates the complementarity of the nucleotide sequence of SH2D3C BINDING SITE, designated SEQ ID:965802, to the nucleotide sequence of GAM26 RNA of FIG. 26A, designated SEQ ID:20604. Another function of GAM26 is therefore inhibition of (SH2D3C). Accordingly, utilities of GAM26 include diagnosis and treatment of diseases and clinical conditions with which SH2D3C is associated.

[2388] Reference is now made to SHANK3 BINDING SITE. SHANK3 is a target gene of GAM26, corresponding to GAM26-TARGET GENE of FIG. 26A. SHANK3 BINDING SITE is a binding site found in an untranslated region of SHANK3, corresponding to BINDING SITE of FIG. 26A. FIG. 26D illustrates the complementarity of the nucleotide sequence of SHANK3 BINDING SITE, designated SEQ ID:966276, to the nucleotide sequence of GAM26 RNA of FIG. 26A, designated SEQ ID:20604. Yet another function of GAM26 is therefore inhibition of (SHANK3). Accordingly, utilities of GAM26 include diagnosis and treatment of diseases and clinical conditions with which SHANK3 is associated.

[2389] Reference is now made to SHARP BINDING SITE. SHARP is a target gene of GAM26, corresponding to GAM26-TARGET GENE of FIG. 26A. SHARP BINDING SITE is a binding site found in an untranslated region of SHARP, corresponding to BINDING SITE of FIG. 26A. FIG. 26D illustrates the complementarity of the nucleotide sequence of SHARP BINDING SITE, designated SEQ ID:966487, to the nucleotide sequence of GAM26 RNA of FIG. 26A, designated SEQ ID:20604. An additional function of GAM26 is therefore inhibition of (SHARP). Accordingly, utilities of GAM26 include diagnosis and treatment of diseases and clinical conditions with which SHARP is associated.

[2390] Reference is now made to SIAT8A BINDING SITE. SIAT8A is a target gene of GAM26, corresponding to GAM26-TARGET GENE of FIG. 26A. SIAT8A BINDING SITE is a binding site found in an untranslated region of SIAT8A, corresponding to BINDING SITE of FIG. 26A. FIG. 26D illustrates the complementarity of the nucleotide sequence of SIAT8A BINDING SITE, designated SEQ ID:966899, to the nucleotide sequence of GAM26 RNA of FIG. 26A, designated SEQ ID:20604. A further function of GAM26 is therefore inhibition of (SIAT8A). Accordingly, utilities of GAM26 include diagnosis and treatment of diseases and clinical conditions with which SIAT8A is associated.

[2391] Reference is now made to SLC16A3 BINDING SITE. SLC16A3 is a target gene of GAM26, corresponding to GAM26-TARGET GENE of FIG. 26A. SLC16A3 BINDING SITE is a binding site found in an untranslated region of SLC16A3, corresponding to BINDING SITE of FIG. 26A. FIG. 26D illustrates the complementarity of the nucleotide sequence of SLC16A3 BINDING SITE, designated SEQ ID:968639, to the nucleotide sequence of GAM26 RNA of FIG. 26A, designated SEQ ID:20604. Yet a further function of GAM26 is therefore inhibition of (SLC16A3). Accordingly, utilities of GAM26 include diagnosis and treatment of diseases and clinical conditions with which SLC16A3 is associated.

[2392] Reference is now made to SLC21A11 BINDING SITE. SLC21A11 is a target gene of GAM26, corresponding to GAM26-TARGET GENE of FIG. 26A. SLC21A11 BINDING SITE is a binding site found in an untranslated region of SLC21A11, corresponding to BINDING SITE of FIG. 26A. FIG. 26D illustrates the complementarity of the nucleotide sequence of SLC21A11 BINDING SITE, designated SEQ ID:969275, to the nucleotide sequence of GAM26 RNA of FIG. 26A, designated SEQ ID:20604. Another function of GAM26 is therefore inhibition of (SLC21A11). Accordingly, utilities of GAM26 include diagnosis and treatment of diseases and clinical conditions with which SLC21A11 is associated.

[2393] Reference is now made to OATPRP4 BINDING SITE. OATPRP4 is a target gene of GAM26, corresponding to GAM26-TARGET GENE of FIG. 26A. OATPRP4 BINDING SITE is a binding site found in an untranslated region of OATPRP4, corresponding to BINDING SITE of FIG. 26A. FIG. 26D illustrates the complementarity of the nucleotide sequence of OATPRP4 BINDING SITE, designated SEQ ID:969284, to the nucleotide sequence of GAM26 RNA of FIG. 26A, designated SEQ ID:20604. Yet another function of GAM26 is therefore inhibition of (OATPRP4). Accordingly, utilities of GAM26 include diagnosis and treatment of diseases and clinical conditions with which OATPRP4 is associated.

[2394] Reference is now made to SLC21A11 BINDING SITE. SLC21A11 is a target gene of GAM26, corresponding to GAM26-TARGET GENE of FIG. 26A. SLC21A11 BINDING SITE is a binding site found in an untranslated region of SLC21A11, corresponding to BINDING SITE of FIG. 26A. FIG. 26D illustrates the complementarity of the nucleotide sequence of SLC2A11 BINDING SITE, designated SEQ ID:969284, to the nucleotide sequence of GAM26 RNA of FIG. 26A, designated SEQ ID:20604. An additional function of GAM26 is therefore inhibition of (SLC21A11). Accordingly, utilities of GAM26 include diagnosis and treatment of diseases and clinical conditions with which SLC21A11 is associated.

[2395] Reference is now made to SLC21A11 BINDING SITE. SLC21A11 is a target gene of GAM26, corresponding to GAM26-TARGET GENE of FIG. 26A. SLC21A11 BINDING SITE is a binding site found in an untranslated region of SLC21A11, corresponding to BINDING SITE of FIG. 26A. FIG. 26D illustrates the complementarity of the nucleotide sequence of SLC21A11 BINDING SITE, designated SEQ ID:969288, to the nucleotide sequence of GAM26 RNA of FIG. 26A, designated SEQ ID:20604. A further function of GAM26 is therefore inhibition of (SLC21A11). Accordingly, utilities of GAM26 include diagnosis and treatment of diseases and clinical conditions with which SLC21A11 is associated.

[2396] Reference is now made to SLC21A11 BINDING SITE. SLC21A11 is a target gene of GAM26, corresponding to GAM26-TARGET GENE of FIG. 26A. SLC21A11 BINDING SITE is a binding site found in an untranslated region of SLC21A11, corresponding to BINDING SITE of FIG. 26A. FIG. 26D illustrates the complementarity of the nucleotide sequence of SLC21A11 BINDING SITE, designated SEQ ID:969292, to the nucleotide sequence of GAM26 RNA of FIG. 26A, designated SEQ ID:20604. Yet a further function of GAM26 is therefore inhibition of (SLC21A11). Accordingly, utilities of GAM26 include diagnosis and treatment of diseases and clinical conditions with which SLC21A11 is associated.

[2397] Reference is now made to SLC21A11 BINDING SITE. SLC21A11 is a target gene of GAM26, corresponding to GAM26-TARGET GENE of FIG. 26A. SLC21A11 BINDING SITE is a binding site found in an untranslated region of SLC21A11, corresponding to BINDING SITE of FIG. 26A. FIG. 26D illustrates the complementarity of the nucleotide sequence of SLC21A11 BINDING SITE, designated SEQ ID:969328, to the nucleotide sequence of GAM26 RNA of FIG. 26A, designated SEQ ID:20604. Another function of GAM26 is therefore inhibition of (SLC21A11). Accordingly, utilities of GAM26 include diagnosis and treatment of diseases and clinical conditions with which SLC21A11 is associated.

[2398] Reference is now made to SLC21A11 BINDING SITE. SLC21A11 is a target gene of GAM26, corresponding to GAM26-TARGET GENE of FIG. 26A. SLC21A11 BINDING SITE is a binding site found in an untranslated region of SLC21A11, corresponding to BINDING SITE of FIG. 26A. FIG. 26D illustrates the complementarity of the nucleotide sequence of SLC21A11 BINDING SITE, designated SEQ ID:969329, to the nucleotide sequence of GAM26 RNA of FIG. 26A, designated SEQ ID:20604. Yet another function of GAM26 is therefore inhibition of (SLC21A11). Accordingly, utilities of GAM26 include diagnosis and treatment of diseases and clinical conditions with which SLC21A11 is associated.

[2399] Reference is now made to SRF BINDING SITE. SRF is a target gene of GAM26, corresponding to GAM26-TARGET GENE of FIG. 26A. SRF BINDING SITE is a binding site found in an untranslated region of SRF, corresponding to BINDING SITE of FIG. 26A. FIG. 26D illustrates the complementarity of the nucleotide sequence of SRF BINDING SITE, designated SEQ ID:979150, to the nucleotide sequence of GAM26 RNA of FIG. 26A, designated SEQ ID:20604. An additional function of GAM26 is therefore inhibition of (SRF). Accordingly, utilities of GAM26 include diagnosis and treatment of diseases and clinical conditions with which SRF is associated.

[2400] Reference is now made to SSBP3 BINDING SITE. SSBP3 is a target gene of GAM26, corresponding to GAM26-TARGET GENE of FIG. 26A. SSBP3 BINDING SITE is a binding site found in an untranslated region of SSBP3, corresponding to BINDING SITE of FIG. 26A. FIG. 26D illustrates the complementarity of the nucleotide sequence of SSBP3 BINDING SITE, designated SEQ ID:980403, to the nucleotide sequence of GAM26 RNA of FIG. 26A, designated SEQ ID:20604. A further function of GAM26 is therefore inhibition of (SSBP3). Accordingly, utilities of GAM26 include diagnosis and treatment of diseases and clinical conditions with which SSBP3 is associated.

[2401] Reference is now made to SSBP3 BINDING SITE. SSBP3 is a target gene of GAM26, corresponding to GAM26-TARGET GENE of FIG. 26A. SSBP3 BINDING SITE is a binding site found in an untranslated region of SSBP3, corresponding to BINDING SITE of FIG. 26A. FIG. 26D illustrates the complementarity of the nucleotide sequence of SSBP3 BINDING SITE, designated SEQ ID:980404, to the nucleotide sequence of GAM26 RNA of FIG. 26A, designated SEQ ID:20604. Yet a further function of GAM26 is therefore inhibition of (SSBP3). Accordingly, utilities of GAM26 include diagnosis and treatment of diseases and clinical conditions with which SSBP3 is associated.

[2402] Reference is now made to SSBP3 BINDING SITE. SSBP3 is a target gene of GAM26, corresponding to GAM26-TARGET GENE of FIG. 26A. SSBP3 BINDING SITE is a binding site found in an untranslated region of SSBP3, corresponding to BINDING SITE of FIG. 26A. FIG. 26D illustrates the complementarity of the nucleotide sequence of SSBP3 BINDING SITE, designated SEQ ID:980415, to the nucleotide sequence of GAM26 RNA of FIG. 26A, designated SEQ ID:20604. Another function of GAM26 is therefore inhibition of (SSBP3). Accordingly, utilities of GAM26 include diagnosis and treatment of diseases and clinical conditions with which SSBP3 is associated.

[2403] Reference is now made to SSBP4 BINDING SITE. SSBP4 is a target gene of GAM26, corresponding to GAM26-TARGET GENE of FIG. 26A. SSBP4 BINDING SITE is a binding site found in an untranslated region of SSBP4, corresponding to BINDING SITE of FIG. 26A. FIG. 26D illustrates the complementarity of the nucleotide sequence of SSBP4 BINDING SITE, designated SEQ ID:980450, to the nucleotide sequence of GAM26 RNA of FIG. 26A, designated SEQ ID:20604. Yet another function of GAM26 is therefore inhibition of (SSBP4). Accordingly, utilities of GAM26 include diagnosis and treatment of diseases and clinical conditions with which SSBP4 is associated.

[2404] Reference is now made to STIM2 BINDING SITE. STIM2 is a target gene of GAM26, corresponding to GAM26-TARGET GENE of FIG. 26A. STIM2 BINDING SITE is a binding site found in an untranslated region of STIM2, corresponding to BINDING SITE of FIG. 26A. FIG. 26D illustrates the complementarity of the nucleotide sequence of STIM2 BINDING SITE, designated SEQ ID:982983, to the nucleotide sequence of GAM26 RNA of FIG. 26A, designated SEQ ID:20604. An additional function of GAM26 is therefore inhibition of (STIM2). Accordingly, utilities of GAM26 include diagnosis and treatment of diseases and clinical conditions with which STIM2 is associated.

[2405] Reference is now made to STK39 BINDING SITE. STK39 is a target gene of GAM26, corresponding to GAM26-TARGET GENE of FIG. 26A. STK39 BINDING SITE is a binding site found in an untranslated region of STK39, corresponding to BINDING SITE of FIG. 26A. FIG. 26D illustrates the complementarity of the nucleotide sequence of STK39 BINDING SITE, designated SEQ ID:983798, to the nucleotide sequence of GAM26 RNA of FIG. 26A, designated SEQ ID:20604. A further function of GAM26 is therefore inhibition of (STK39). Accordingly, utilities of GAM26 include diagnosis and treatment of diseases and clinical conditions with which STK39 is associated.

[2406] Reference is now made to STK39 BINDING SITE. STK39 is a target gene of GAM26, corresponding to GAM26-TARGET GENE of FIG. 26A. STK39 BINDING SITE is a binding site found in an untranslated region of STK39, corresponding to BINDING SITE of FIG. 26A. FIG. 26D illustrates the complementarity of the nucleotide sequence of STK39 BINDING SITE, designated SEQ ID:983808, to the nucleotide sequence of GAM26 RNA of FIG. 26A, designated SEQ ID:20604. Yet a further function of GAM26 is therefore inhibition of (STK39). Accordingly, utilities of GAM26 include diagnosis and treatment of diseases and clinical conditions with which STK39 is associated.

[2407] Reference is now made to KIAA0995 BINDING SITE. KIAA0995 is a target gene of GAM26, corresponding to GAM26-TARGET GENE of FIG. 26A. KIAA0995 BINDING SITE is a binding site found in an untranslated region of KIAA0995, corresponding to BINDING SITE of FIG. 26A. FIG. 26D illustrates the complementarity of the nucleotide sequence of KIAA0995 BINDING SITE, designated SEQ ID:983814, to the nucleotide sequence of GAM26 RNA of FIG. 26A, designated SEQ ID:20604. Another function of GAM26 is therefore inhibition of (KIAA0995). Accordingly, utilities of GAM26 include diagnosis and treatment of diseases and clinical conditions with which KIAA0995 is associated.

[2408] Reference is now made to STK39 BINDING SITE. STK39 is a target gene of GAM26, corresponding to GAM26-TARGET GENE of FIG. 26A. STK39 BINDING SITE is a binding site found in an untranslated region of STK39, corresponding to BINDING SITE of FIG. 26A. FIG. 26D illustrates the complementarity of the nucleotide sequence of STK39 BINDING SITE, designated SEQ ID:983814, to the nucleotide sequence of GAM26 RNA of FIG. 26A, designated SEQ ID:20604. Yet another function of GAM26 is therefore inhibition of (STK39). Accordingly, utilities of GAM26 include diagnosis and treatment of diseases and clinical conditions with which STK39 is associated.

[2409] Reference is now made to STRBP BINDING SITE. STRBP is a target gene of GAM26, corresponding to GAM26-TARGET GENE of FIG. 26A. STRBP BINDING SITE is a binding site found in an untranslated region of STRBP, corresponding to BINDING SITE of FIG. 26A. FIG. 26D illustrates the complementarity of the nucleotide sequence of STRBP BINDING SITE, designated SEQ ID:984349, to the nucleotide sequence of GAM26 RNA of FIG. 26A, designated SEQ ID:20604. An additional function of GAM26 is therefore inhibition of (STRBP). Accordingly, utilities of GAM26 include diagnosis and treatment of diseases and clinical conditions with which STRBP is associated.

[2410] Reference is now made to SULT4A1 BINDING SITE. SULT4A1 is a target gene of GAM26, corresponding to GAM26-TARGET GENE of FIG. 26A. SULT4A1 BINDING SITE is a binding site found in an untranslated region of SULT4A1, corresponding to BINDING SITE of FIG. 26A. FIG. 26D illustrates the complementarity of the nucleotide sequence of SULT4A1 BINDING SITE, designated SEQ ID:985480, to the nucleotide sequence of GAM26 RNA of FIG. 26A, designated SEQ ID:20604. A further function of GAM26 is therefore inhibition of (SULT4A1). Accordingly, utilities of GAM26 include diagnosis and treatment of diseases and clinical conditions with which SULT4A1 is associated.

[2411] Reference is now made to SULT4A1 BINDING SITE. SULT4A1 is a target gene of GAM26, corresponding to GAM26-TARGET GENE of FIG. 26A. SULT4A1 BINDING SITE is a binding site found in an untranslated region of SULT4A1, corresponding to BINDING SITE of FIG. 26A. FIG. 26D illustrates the complementarity of the nucleotide sequence of SULT4A1 BINDING SITE, designated SEQ ID:985482, to the nucleotide sequence of GAM26 RNA of FIG. 26A, designated SEQ ID:20604. Yet a further function of GAM26 is therefore inhibition of (SULT4A1). Accordingly, utilities of GAM26 include diagnosis and treatment of diseases and clinical conditions with which SULT4A1 is associated.

[2412] Reference is now made to SULT4A1 BINDING SITE. SULT4A1 is a target gene of GAM26, corresponding to GAM26-TARGET GENE of FIG. 26A. SULT4A1 BINDING SITE is a binding site found in an untranslated region of SULT4A1, corresponding to BINDING SITE of FIG. 26A. FIG. 26D illustrates the complementarity of the nucleotide sequence of SULT4A1 BINDING SITE, designated SEQ ID:985499, to the nucleotide sequence of GAM26 RNA of FIG. 26A, designated SEQ ID:20604. Another function of GAM26 is therefore inhibition of (SULT4A1). Accordingly, utilities of GAM26 include diagnosis and treatment of diseases and clinical conditions with which SULT4A1 is associated.

[2413] Reference is now made to SULT4A1 BINDING SITE. SULT4A1 is a target gene of GAM26, corresponding to GAM26-TARGET GENE of FIG. 26A. SULT4A1 BINDING SITE is a binding site found in an untranslated region of SULT4A1, corresponding to BINDING SITE of FIG. 26A. FIG. 26D illustrates the complementarity of the nucleotide sequence of SULT4A1 BINDING SITE, designated SEQ ID:985516, to the nucleotide sequence of GAM26 RNA of FIG. 26A, designated SEQ ID:20604. Yet another function of GAM26 is therefore inhibition of (SULT4A1). Accordingly, utilities of GAM26 include diagnosis and treatment of diseases and clinical conditions with which SULT4A1 is associated.

[2414] Reference is now made to TBLR1 BINDING SITE. TBLR1 is a target gene of GAM26, corresponding to GAM26-TARGET GENE of FIG. 26A. TBLR1 BINDING SITE is a binding site found in an untranslated region of TBLR1, corresponding to BINDING SITE of FIG. 26A. FIG. 26D illustrates the complementarity of the nucleotide sequence of TBLR1 BINDING SITE, designated SEQ ID:989703, to the nucleotide sequence of GAM26 RNA of FIG. 26A, designated SEQ ID:20604. An additional function of GAM26 is therefore inhibition of (TBLR1). Accordingly, utilities of GAM26 include diagnosis and treatment of diseases and clinical conditions with which TBLR1 is associated.

[2415] Reference is now made to TIEG BINDING SITE. TIEG is a target gene of GAM26, corresponding to GAM26-TARGET GENE of FIG. 26A. TIEG BINDING SITE is a binding site found in an untranslated region of TIEG, corresponding to BINDING SITE of FIG. 26A. FIG. 26D illustrates the complementarity of the nucleotide sequence of TIEG BINDING SITE, designated SEQ ID:993412, to the nucleotide sequence of GAM26 RNA of FIG. 26A, designated SEQ ID:20604. A further function of GAM26 is therefore inhibition of (TIEG). Accordingly, utilities of GAM26 include diagnosis and treatment of diseases and clinical conditions with which TIEG is associated.

[2416] Reference is now made to TIEG BINDING SITE. TIEG is a target gene of GAM26, corresponding to GAM26-TARGET GENE of FIG. 26A. TIEG BINDING SITE is a binding site found in an untranslated region of TIEG, corresponding to BINDING SITE of FIG. 26A. FIG. 26D illustrates the complementarity of the nucleotide sequence of TIEG BINDING SITE, designated SEQ ID:993414, to the nucleotide sequence of GAM26 RNA of FIG. 26A, designated SEQ ID:20604. Yet a further function of GAM26 is therefore inhibition of (TIEG). Accordingly, utilities of GAM26 include diagnosis and treatment of diseases and clinical conditions with which TIEG is associated.

[2417] Reference is now made to FLJ20288 BINDING SITE. FLJ20288 is a target gene of GAM26, corresponding to GAM26-TARGET GENE of FIG. 26A. FLJ20288 BINDING SITE is a binding site found in an untranslated region of FLJ20288, corresponding to BINDING SITE of FIG. 26A. FIG. 26D illustrates the complementarity of the nucleotide sequence of FLJ20288 BINDING SITE, designated SEQ ID:993970, to the nucleotide sequence of GAM26 RNA of FIG. 26A, designated SEQ ID:20604. Another function of GAM26 is therefore inhibition of (FLJ20288). Accordingly, utilities of GAM26 include diagnosis and treatment of diseases and clinical conditions with which FLJ20288 is associated.

[2418] Reference is now made to TIP120A BINDING SITE. TIP120A is a target gene of GAM26, corresponding to GAM26-TARGET GENE of FIG. 26A. TIP120A BINDING SITE is a binding site found in an untranslated region of TIP120A, corresponding to BINDING SITE of FIG. 26A. FIG. 26D illustrates the complementarity of the nucleotide sequence of TIP120A BINDING SITE, designated SEQ ID:993970, to the nucleotide sequence of GAM26 RNA of FIG. 26A, designated SEQ ID:20604. Yet another function of GAM26 is therefore inhibition of (TIP120A). Accordingly, utilities of GAM26 include diagnosis and treatment of diseases and clinical conditions with which TIP120A is associated.

[2419] Reference is now made to TIP120A BINDING SITE. TIP120A is a target gene of GAM26, corresponding to GAM26-TARGET GENE of FIG. 26A. TIP120A BINDING SITE is a binding site found in an untranslated region of TIP120A, corresponding to BINDING SITE of FIG. 26A. FIG. 26D illustrates the complementarity of the nucleotide sequence of TIP120A BINDING SITE, designated SEQ ID:993979, to the nucleotide sequence of GAM26 RNA of FIG. 26A, designated SEQ ID:20604. An additional function of GAM26 is therefore inhibition of (TIP120A). Accordingly, utilities of GAM26 include diagnosis and treatment of diseases and clinical conditions with which TIP120A is associated.

[2420] Reference is now made to TIP120A BINDING SITE. TIP120A is a target gene of GAM26, corresponding to GAM26-TARGET GENE of FIG. 26A. TIP120A BINDING SITE is a binding site found in an untranslated region of TIP120A, corresponding to BINDING SITE of FIG. 26A. FIG. 26D illustrates the complementarity of the nucleotide sequence of TIP120A BINDING SITE, designated SEQ ID:993980, to the nucleotide sequence of GAM26 RNA of FIG. 26A, designated SEQ ID:20604. A further function of GAM26 is therefore inhibition of (TIP120A). Accordingly, utilities of GAM26 include diagnosis and treatment of diseases and clinical conditions with which TIP120A is associated.

[2421] Reference is now made to TLK2 BINDING SITE. TLK2 is a target gene of GAM26, corresponding to GAM26-TARGET GENE of FIG. 26A. TLK2 BINDING SITE is a binding site found in an untranslated region of TLK2, corresponding to BINDING SITE of FIG. 26A. FIG. 26D illustrates the complementarity of the nucleotide sequence of TLK2 BINDING SITE, designated SEQ ID:994634, to the nucleotide sequence of GAM26 RNA of FIG. 26A, designated SEQ ID:20604. Yet a further function of GAM26 is therefore inhibition of (TLK2). Accordingly, utilities of GAM26 include diagnosis and treatment of diseases and clinical conditions with which TLK2 is associated.

[2422] Reference is now made to TPARL BINDING SITE. TPARL is a target gene of GAM26, corresponding to GAM26-TARGET GENE of FIG. 26A. TPARL BINDING SITE is a binding site found in an untranslated region of TPARL, corresponding to BINDING SITE of FIG. 26A. FIG. 26D illustrates the complementarity of the nucleotide sequence of TPARL BINDING SITE, designated SEQ ID:997782, to the nucleotide sequence of GAM26 RNA of FIG. 26A, designated SEQ ID:20604. Another function of GAM26 is therefore inhibition of (TPARL). Accordingly, utilities of GAM26 include diagnosis and treatment of diseases and clinical conditions with which TPARL is associated.

[2423] Reference is now made to TRIM28 BINDING SITE. TRIM28 is a target gene of GAM26, corresponding to GAM26-TARGET GENE of FIG. 26A. TRIM28 BINDING SITE is a binding site found in an untranslated region of TRIM28, corresponding to BINDING SITE of FIG. 26A. FIG. 26D illustrates the complementarity of the nucleotide sequence of TRIM28 BINDING SITE, designated SEQ ID: 1000325, to the nucleotide sequence of GAM26 RNA of FIG. 26A, designated SEQ ID:20604. Yet another function of GAM26 is therefore inhibition of (TRIM28). Accordingly, utilities of GAM26 include diagnosis and treatment of diseases and clinical conditions with which TRIM28 is associated.

[2424] Reference is now made to TRIM28 BINDING SITE. TRIM28 is a target gene of GAM26, corresponding to GAM26-TARGET GENE of FIG. 26A. TRIM28 BINDING SITE is a binding site found in an untranslated region of TRIM28, corresponding to BINDING SITE of FIG. 26A. FIG. 26D illustrates the complementarity of the nucleotide sequence of TRIM28 BINDING SITE, designated SEQ ID: 1000339, to the nucleotide sequence of GAM26 RNA of FIG. 26A, designated SEQ ID:20604. An additional function of GAM26 is therefore inhibition of (TRIM28). Accordingly, utilities of GAM26 include diagnosis and treatment of diseases and clinical conditions with which TRIM28 is associated.

[2425] Reference is now made to TRIM28 BINDING SITE. TRIM28 is a target gene of GAM26, corresponding to GAM26-TARGET GENE of FIG. 26A. TRIM28 BINDING SITE is a binding site found in an untranslated region of TRIM28, corresponding to BINDING SITE of FIG. 26A. FIG. 26D illustrates the complementarity of the nucleotide sequence of TRIM28 BINDING SITE, designated SEQ ID: 1000350, to the nucleotide sequence of GAM26 RNA of FIG. 26A, designated SEQ ID:20604. A further function of GAM26 is therefore inhibition of (TRIM28). Accordingly, utilities of GAM26 include diagnosis and treatment of diseases and clinical conditions with which TRIM28 is associated.

[2426] Reference is now made to TRIM33 BINDING SITE. TRIM33 is a target gene of GAM26, corresponding to GAM26-TARGET GENE of FIG. 26A. TRIM33 BINDING SITE is a binding site found in an untranslated region of TRIM33, corresponding to BINDING SITE of FIG. 26A. FIG. 26D illustrates the complementarity of the nucleotide sequence of TRIM33 BINDING SITE, designated SEQ ID: 1000528, to the nucleotide sequence of GAM26 RNA of FIG. 26A, designated SEQ ID:20604. Yet a further function of GAM26 is therefore inhibition of (TRIM33). Accordingly, utilities of GAM26 include diagnosis and treatment of diseases and clinical conditions with which TRIM33 is associated.

[2427] Reference is now made to TRIM33 BINDING SITE. TRIM33 is a target gene of GAM26, corresponding to GAM26-TARGET GENE of FIG. 26A. TRIM33 BINDING SITE is a binding site found in an untranslated region of TRIM33, corresponding to BINDING SITE of FIG. 26A. FIG. 26D illustrates the complementarity of the nucleotide sequence of TRIM33 BINDING SITE, designated SEQ ID: 1000533, to the nucleotide sequence of GAM26 RNA of FIG. 26A, designated SEQ ID:20604. Another function of GAM26 is therefore inhibition of (TRIM33). Accordingly, utilities of GAM26 include diagnosis and treatment of diseases and clinical conditions with which TRIM33 is associated.

[2428] Reference is now made to TRIP10 BINDING SITE. TRIP10 is a target gene of GAM26, corresponding to GAM26-TARGET GENE of FIG. 26A. TRIP10 BINDING SITE is a binding site found in an untranslated region of TRIP10, corresponding to BINDING SITE of FIG. 26A. FIG. 26D illustrates the complementarity of the nucleotide sequence of TRIP10 BINDING SITE, designated SEQ ID:1001537, to the nucleotide sequence of GAM26 RNA of FIG. 26A, designated SEQ ID:20604. Yet another function of GAM26 is therefore inhibition of (TRIP10). Accordingly, utilities of GAM26 include diagnosis and treatment of diseases and clinical conditions with which TRIP10 is associated.

[2429] Reference is now made to ZDHHC3 BINDING SITE. ZDHHC3 is a target gene of GAM26, corresponding to GAM26-TARGET GENE of FIG. 26A. ZDHHC3 BINDING SITE is a binding site found in an untranslated region of ZDHHC3, corresponding to BINDING SITE of FIG. 26A. FIG. 26D illustrates the complementarity of the nucleotide sequence of ZDHHC3 BINDING SITE, designated SEQ ID: 1001537, to the nucleotide sequence of GAM26 RNA of FIG. 26A, designated SEQ ID:20604. An additional function of GAM26 is therefore inhibition of (ZDHHC3). Accordingly, utilities of GAM26 include diagnosis and treatment of diseases and clinical conditions with which ZDHHC3 is associated.

[2430] Reference is now made to WBSCR21 BINDING SITE. WBSCR21 is a target gene of GAM26, corresponding to GAM26-TARGET GENE of FIG. 26A. WBSCR21 BINDING SITE is a binding site found in an untranslated region of WBSCR21, corresponding to BINDING SITE of FIG. 26A. FIG. 26D illustrates the complementarity of the nucleotide sequence of WBSCR21 BINDING SITE, designated SEQ ID:1012104, to the nucleotide sequence of GAM26 RNA of FIG. 26A, designated SEQ ID:20604. A further function of GAM26 is therefore inhibition of (WBSCR21). Accordingly, utilities of GAM26 include diagnosis and treatment of diseases and clinical conditions with which WBSCR21 is associated.

[2431] Reference is now made to WBSCR21 BINDING SITE. WBSCR21 is a target gene of GAM26, corresponding to GAM26-TARGET GENE of FIG. 26A. WBSCR21 BINDING SITE is a binding site found in an untranslated region of WBSCR21, corresponding to BINDING SITE of FIG. 26A. FIG. 26D illustrates the complementarity of the nucleotide sequence of WBSCR21 BINDING SITE, designated SEQ ID:1012156, to the nucleotide sequence of GAM26 RNA of FIG. 26A, designated SEQ ID:20604. Yet a further function of GAM26 is therefore inhibition of (WBSCR21). Accordingly, utilities of GAM26 include diagnosis and treatment of diseases and clinical conditions with which WBSCR21 is associated.

[2432] Reference is now made to ZDHHC5 BINDING SITE. ZDHHC5 is a target gene of GAM26, corresponding to GAM26-TARGET GENE of FIG. 26A. ZDHHC5 BINDING SITE is a binding site found in an untranslated region of ZDHHC5, corresponding to BINDING SITE of FIG. 26A. FIG. 26D illustrates the complementarity of the nucleotide sequence of ZDHHC5 BINDING SITE, designated SEQ ID: 1016404, to the nucleotide sequence of GAM26 RNA of FIG. 26A, designated SEQ ID:20604. Another function of GAM26 is therefore inhibition of (ZDHHC5). Accordingly, utilities of GAM26 include diagnosis and treatment of diseases and clinical conditions with which ZDHHC5 is associated.

[2433] Reference is now made to ZDHHC5 BINDING SITE. ZDHHC5 is a target gene of GAM26, corresponding to GAM26-TARGET GENE of FIG. 26A. ZDHHC5 BINDING SITE is a binding site found in an untranslated region of ZDHHC5, corresponding to BINDING SITE of FIG. 26A. FIG. 26D illustrates the complementarity of the nucleotide sequence of ZDHHC5 BINDING SITE, designated SEQ ID: 1016478, to the nucleotide sequence of GAM26 RNA of FIG. 26A, designated SEQ ID:20604. Yet another function of GAM26 is therefore inhibition of (ZDHHC5). Accordingly, utilities of GAM26 include diagnosis and treatment of diseases and clinical conditions with which ZDHHC5 is associated.

[2434] Reference is now made to ZER6 BINDING SITE. ZER6 is a target gene of GAM26, corresponding to GAM26-TARGET GENE of FIG. 26A. ZER6 BINDING SITE is a binding site found in an untranslated region of ZER6, corresponding to BINDING SITE of FIG. 26A. FIG. 26D illustrates the complementarity of the nucleotide sequence of ZER6 BINDING SITE, designated SEQ ID:1016788, to the nucleotide sequence of GAM26 RNA of FIG. 26A, designated SEQ ID:20604. An additional function of GAM26 is therefore inhibition of (ZER6). Accordingly, utilities of GAM26 include diagnosis and treatment of diseases and clinical conditions with which ZER6 is associated.

[2435] Reference is now made to ZER6 BINDING SITE. ZER6 is a target gene of GAM26, corresponding to GAM26-TARGET GENE of FIG. 26A. ZER6 BINDING SITE is a binding site found in an untranslated region of ZER6, corresponding to BINDING SITE of FIG. 26A. FIG. 26D illustrates the complementarity of the nucleotide sequence of ZER6 BINDING SITE, designated SEQ ID:1016846, to the nucleotide sequence of GAM26 RNA of FIG. 26A, designated SEQ ID:20604. A further function of GAM26 is therefore inhibition of (ZER6). Accordingly, utilities of GAM26 include diagnosis and treatment of diseases and clinical conditions with which ZER6 is associated.

[2436] Reference is now made to ZF BINDING SITE. ZF is a target gene of GAM26, corresponding to GAM26-TARGET GENE of FIG. 26A. ZF BINDING SITE is a binding site found in an untranslated region of ZF, corresponding to BINDING SITE of FIG. 26A. FIG. 26D illustrates the complementarity of the nucleotide sequence of ZF BINDING SITE, designated SEQ ID:1016945, to the nucleotide sequence of GAM26 RNA of FIG. 26A, designated SEQ ID:20604. Yet a further function of GAM26 is therefore inhibition of (ZF). Accordingly, utilities of GAM26 include diagnosis and treatment of diseases and clinical conditions with which ZF is associated.

[2437] Reference is now made to ZNF364 BINDING SITE. ZNF364 is a target gene of GAM26, corresponding to GAM26-TARGET GENE of FIG. 26A. ZNF364 BINDING SITE is a binding site found in an untranslated region of ZNF364, corresponding to BINDING SITE of FIG. 26A. FIG. 26D illustrates the complementarity of the nucleotide sequence of ZNF364 BINDING SITE, designated SEQ ID: 1023294, to the nucleotide sequence of GAM26 RNA of FIG. 26A, designated SEQ ID:20604. Another function of GAM26 is therefore inhibition of (ZNF364). Accordingly, utilities of GAM26 include diagnosis and treatment of diseases and clinical conditions with which ZNF364 is associated.

[2438] Reference is now made to ZNF364 BINDING SITE. ZNF364 is a target gene of GAM26, corresponding to GAM26-TARGET GENE of FIG. 26A. ZNF364 BINDING SITE is a binding site found in an untranslated region of ZNF364, corresponding to BINDING SITE of FIG. 26A. FIG. 26D illustrates the complementarity of the nucleotide sequence of ZNF364 BINDING SITE, designated SEQ ID:1023303, to the nucleotide sequence of GAM26 RNA of FIG. 26A, designated SEQ ID:20604. Yet another function of GAM26 is therefore inhibition of (ZNF364). Accordingly, utilities of GAM26 include diagnosis and treatment of diseases and clinical conditions with which ZNF364 is associated.

[2439] Reference is now made to ZTL1 BINDING SITE. ZTL1 is a target gene of GAM26, corresponding to GAM26-TARGET GENE of FIG. 26A. ZTL1 BINDING SITE is a binding site found in an untranslated region of ZTL1, corresponding to BINDING SITE of FIG. 26A. FIG. 26D illustrates the complementarity of the nucleotide sequence of ZTL1 BINDING SITE, designated SEQ ID:1023979, to the nucleotide sequence of GAM26 RNA of FIG. 26A, designated SEQ ID:20604. An additional function of GAM26 is therefore inhibition of (ZTL1). Accordingly, utilities of GAM26 include diagnosis and treatment of diseases and clinical conditions with which ZTL1 is associated.

[2440] Reference is now made to ZTL1 BINDING SITE. ZTL1 is a target gene of GAM26, corresponding to GAM26-TARGET GENE of FIG. 26A. ZTL1 BINDING SITE is a binding site found in an untranslated region of ZTL1, corresponding to BINDING SITE of FIG. 26A. FIG. 26D illustrates the complementarity of the nucleotide sequence of ZTL1 BINDING SITE, designated SEQ ID:1023979, to the nucleotide sequence of GAM26 RNA of FIG. 26A, designated SEQ ID:20604. A further function of GAM26 is therefore inhibition of (ZTL1). Accordingly, utilities of GAM26 include diagnosis and treatment of diseases and clinical conditions with which ZTL1 is associated.

[2441] Reference is now made to CTCF BINDING SITE. CTCF is a target gene of GAM26, corresponding to GAM26-TARGET GENE of FIG. 26A. CTCF BINDING SITE is a binding site found in an untranslated region of CTCF, corresponding to BINDING SITE of FIG. 26A. FIG. 26D illustrates the complementarity of the nucleotide sequence of CTCF BINDING SITE, designated SEQ ID:1037665, to the nucleotide sequence of GAM26 RNA of FIG. 26A, designated SEQ ID:20604. Yet a further function of GAM26 is therefore inhibition of (CTCF). Accordingly, utilities of GAM26 include diagnosis and treatment of diseases and clinical conditions with which CTCF is associated.

[2442] Reference is now made to HRIHFB2122 BINDING SITE. HRIHFB2122 is a target gene of GAM26, corresponding to GAM26-TARGET GENE of FIG. 26A. HRIHFB2122 BINDING SITE is a binding site found in an untranslated region of HRIHFB2122, corresponding to BINDING SITE of FIG. 26A. FIG. 26D illustrates the complementarity of the nucleotide sequence of HRIHFB2122 BINDING SITE, designated SEQ ID: 1065873, to the nucleotide sequence of GAM26 RNA of FIG. 26A, designated SEQ ID:20604. Another function of GAM26 is therefore inhibition of (HRIHFB2122). Accordingly, utilities of GAM26 include diagnosis and treatment of diseases and clinical conditions with which HRIHFB2122 is associated.

[2443] Reference is now made to KIAA0397 BINDING SITE. KIAA0397 is a target gene of GAM26, corresponding to GAM26-TARGET GENE of FIG. 26A. KIAA0397 BINDING SITE is a binding site found in an untranslated region of KIAA0397, corresponding to BINDING SITE of FIG. 26A. FIG. 26D illustrates the complementarity of the nucleotide sequence of KIAA0397 BINDING SITE, designated SEQ ID:1065873, to the nucleotide sequence of GAM26 RNA of FIG. 26A, designated SEQ ID:20604. Yet another function of GAM26 is therefore inhibition of (KIAA0397). Accordingly, utilities of GAM26 include diagnosis and treatment of diseases and clinical conditions with which KIAA0397 is associated.

[2444] Reference is now made to FUBP3 BINDING SITE. FUBP3 is a target gene of GAM26, corresponding to GAM26-TARGET GENE of FIG. 26A. FUBP3 BINDING SITE is a binding site found in an untranslated region of FUBP3, corresponding to BINDING SITE of FIG. 26A. FIG. 26D illustrates the complementarity of the nucleotide sequence of FUBP3 BINDING SITE, designated SEQ ID: 1190283, to the nucleotide sequence of GAM26 RNA of FIG. 26A, designated SEQ ID:20604. An additional function of GAM26 is therefore inhibition of (FUBP3). Accordingly, utilities of GAM26 include diagnosis and treatment of diseases and clinical conditions with which FUBP3 is associated.

[2445] Reference is now made to H2AV BINDING SITE. H2AV is a target gene of GAM26, corresponding to GAM26-TARGET GENE of FIG. 26A. H2AV BINDING SITE is a binding site found in an untranslated region of H2AV, corresponding to BINDING SITE of FIG. 26A. FIG. 26D illustrates the complementarity of the nucleotide sequence of H2AV BINDING SITE, designated SEQ ID:1303366, to the nucleotide sequence of GAM26 RNA of FIG. 26A, designated SEQ ID:20604. A further function of GAM26 is therefore inhibition of (H2AV). Accordingly, utilities of GAM26 include diagnosis and treatment of diseases and clinical conditions with which H2AV is associated.

[2446] Reference is now made to FLJ20539 BINDING SITE. FLJ20539 is a target gene of GAM26, corresponding to GAM26-TARGET GENE of FIG. 26A. FLJ20539 BINDING SITE is a binding site found in an untranslated region of FLJ20539, corresponding to BINDING SITE of FIG. 26A. FIG. 26D illustrates the complementarity of the nucleotide sequence of FLJ20539 BINDING SITE, designated SEQ ID:1310953, to the nucleotide sequence of GAM26 RNA of FIG. 26A, designated SEQ ID:20604. Yet a further function of GAM26 is therefore inhibition of (FLJ20539). Accordingly, utilities of GAM26 include diagnosis and treatment of diseases and clinical conditions with which FLJ20539 is associated.

[2447] Reference is now made to KIAA1893 BINDING SITE. KIAA1893 is a target gene of GAM26, corresponding to GAM26-TARGET GENE of FIG. 26A. KIAA1893 BINDING SITE is a binding site found in an untranslated region of KIAA1893, corresponding to BINDING SITE of FIG. 26A. FIG. 26D illustrates the complementarity of the nucleotide sequence of KIAA1893 BINDING SITE, designated SEQ ID:1310953, to the nucleotide sequence of GAM26 RNA of FIG. 26A, designated SEQ ID:20604. Another function of GAM26 is therefore inhibition of (KIAA1893). Accordingly, utilities of GAM26 include diagnosis and treatment of diseases and clinical conditions with which KIAA1893 is associated.

[2448] Reference is now made to RINZF BINDING SITE. RINZF is a target gene of GAM26, corresponding to GAM26-TARGET GENE of FIG. 26A. RINZF BINDING SITE is a binding site found in an untranslated region of RINZF, corresponding to BINDING SITE of FIG. 26A. FIG. 26D illustrates the complementarity of the nucleotide sequence of RINZF BINDING SITE, designated SEQ ID:1310953, to the nucleotide sequence of GAM26 RNA of FIG. 26A, designated SEQ ID:20604. Yet another function of GAM26 is therefore inhibition of (RINZF). Accordingly, utilities of GAM26 include diagnosis and treatment of diseases and clinical conditions with which RINZF is associated.

[2449] Reference is now made to TIP120A BINDING SITE. TIP120A is a target gene of GAM26, corresponding to GAM26-TARGET GENE of FIG. 26A. TIP120A BINDING SITE is a binding site found in an untranslated region of TIP120A, corresponding to BINDING SITE of FIG. 26A. FIG. 26D illustrates the complementarity of the nucleotide sequence of TIP120A BINDING SITE, designated SEQ ID:1323750, to the nucleotide sequence of GAM26 RNA of FIG. 26A, designated SEQ ID:20604. An additional function of GAM26 is therefore inhibition of (TIP120A). Accordingly, utilities of GAM26 include diagnosis and treatment of diseases and clinical conditions with which TIP120A is associated.

[2450] Reference is now made to LOC146223 BINDING SITE. LOC146223 is a target gene of GAM26, corresponding to GAM26-TARGET GENE of FIG. 26A. LOC146223 BINDING SITE is a binding site found in an untranslated region of LOC146223, corresponding to BINDING SITE of FIG. 26A. FIG. 26D illustrates the complementarity of the nucleotide sequence of LOC146223 BINDING SITE, designated SEQ ID:94853, to the nucleotide sequence of GAM26 RNA of FIG. 26A, designated SEQ ID:20604. A further function of GAM26 is therefore inhibition of (LOC146223). Accordingly, utilities of GAM26 include diagnosis and treatment of diseases and clinical conditions with which LOC146223 is associated.

[2451] Reference is now made to LOC255426 BINDING SITE. LOC255426 is a target gene of GAM26, corresponding to GAM26-TARGET GENE of FIG. 26A. LOC255426 BINDING SITE is a binding site found in an untranslated region of LOC255426, corresponding to BINDING SITE of FIG. 26A. FIG. 26D illustrates the complementarity of the nucleotide sequence of LOC255426 BINDING SITE, designated SEQ ID:94853, to the nucleotide sequence of GAM26 RNA of FIG. 26A, designated SEQ ID:20604. Yet a further function of GAM26 is therefore inhibition of (LOC255426). Accordingly, utilities of GAM26 include diagnosis and treatment of diseases and clinical conditions with which LOC255426 is associated.

[2452] Reference is now made to LOC255426 BINDING SITE. LOC255426 is a target gene of GAM26, corresponding to GAM26-TARGET GENE of FIG. 26A. LOC255426 BINDING SITE is a binding site found in an untranslated region of LOC255426, corresponding to BINDING SITE of FIG. 26A. FIG. 26D illustrates the complementarity of the nucleotide sequence of LOC255426 BINDING SITE, designated SEQ ID:94853, to the nucleotide sequence of GAM26 RNA of FIG. 26A, designated SEQ ID:20604. Another function of GAM26 is therefore inhibition of (LOC255426). Accordingly, utilities of GAM26 include diagnosis and treatment of diseases and clinical conditions with which LOC255426 is associated.

[2453] Reference is now made to LOC255426 BINDING SITE. LOC255426 is a target gene of GAM26, corresponding to GAM26-TARGET GENE of FIG. 26A. LOC255426 BINDING SITE is a binding site found in an untranslated region of LOC255426, corresponding to BINDING SITE of FIG. 26A. FIG. 26D illustrates the complementarity of the nucleotide sequence of LOC255426 BINDING SITE, designated SEQ ID:94853, to the nucleotide sequence of GAM26 RNA of FIG. 26A, designated SEQ ID:20604. Yet another function of GAM26 is therefore inhibition of (LOC255426). Accordingly, utilities of GAM26 include diagnosis and treatment of diseases and clinical conditions with which LOC255426 is associated.

[2454] Reference is now made to LOC255426 BINDING SITE. LOC255426 is a target gene of GAM26, corresponding to GAM26-TARGET GENE of FIG. 26A. LOC255426 BINDING SITE is a binding site found in an untranslated region of LOC255426, corresponding to BINDING SITE of FIG. 26A. FIG. 26D illustrates the complementarity of the nucleotide sequence of LOC255426 BINDING SITE, designated SEQ ID:94853, to the nucleotide sequence of GAM26 RNA of FIG. 26A, designated SEQ ID:20604. An additional function of GAM26 is therefore inhibition of (LOC255426). Accordingly, utilities of GAM26 include diagnosis and treatment of diseases and clinical conditions with which LOC255426 is associated.

[2455] Reference is now made to LOC255426 BINDING SITE. LOC255426 is a target gene of GAM26, corresponding to GAM26-TARGET GENE of FIG. 26A. LOC255426 BINDING SITE is a binding site found in an untranslated region of LOC255426, corresponding to BINDING SITE of FIG. 26A. FIG. 26D illustrates the complementarity of the nucleotide sequence of LOC255426 BINDING SITE, designated SEQ ID:94853, to the nucleotide sequence of GAM26 RNA of FIG. 26A, designated SEQ ID:20604. A further function of GAM26 is therefore inhibition of (LOC255426). Accordingly, utilities of GAM26 include diagnosis and treatment of diseases and clinical conditions with which LOC255426 is associated.

[2456] Reference is now made to LOC255426 BINDING SITE. LOC255426 is a target gene of GAM26, corresponding to GAM26-TARGET GENE of FIG. 26A. LOC255426 BINDING SITE is a binding site found in an untranslated region of LOC255426, corresponding to BINDING SITE of FIG. 26A. FIG. 26D illustrates the complementarity of the nucleotide sequence of LOC255426 BINDING SITE, designated SEQ ID:94853, to the nucleotide sequence of GAM26 RNA of FIG. 26A, designated SEQ ID:20604. Yet a further function of GAM26 is therefore inhibition of (LOC255426). Accordingly, utilities of GAM26 include diagnosis and treatment of diseases and clinical conditions with which LOC255426 is associated.

[2457] Reference is now made to LOC122525 BINDING SITE. LOC122525 is a target gene of GAM26, corresponding to GAM26-TARGET GENE of FIG. 26A. LOC122525 BINDING SITE is a binding site found in an untranslated region of LOC122525, corresponding to BINDING SITE of FIG. 26A. FIG. 26D illustrates the complementarity of the nucleotide sequence of LOC122525 BINDING SITE, designated SEQ ID:173934, to the nucleotide sequence of GAM26 RNA of FIG. 26A, designated SEQ ID:20604. Another function of GAM26 is therefore inhibition of (LOC122525). Accordingly, utilities of GAM26 include diagnosis and treatment of diseases and clinical conditions with which LOC122525 is associated.

[2458] Reference is now made to LOC122525 BINDING SITE. LOC122525 is a target gene of GAM26, corresponding to GAM26-TARGET GENE of FIG. 26A. LOC122525 BINDING SITE is a binding site found in an untranslated region of LOC122525, corresponding to BINDING SITE of FIG. 26A. FIG. 26D illustrates the complementarity of the nucleotide sequence of LOC122525 BINDING SITE, designated SEQ ID:241978, to the nucleotide sequence of GAM26 RNA of FIG. 26A, designated SEQ ID:20604. Yet another function of GAM26 is therefore inhibition of (LOC122525). Accordingly, utilities of GAM26 include diagnosis and treatment of diseases and clinical conditions with which LOC122525 is associated.

[2459] Reference is now made to LOC146057 BINDING SITE. LOC146057 is a target gene of GAM26, corresponding to GAM26-TARGET GENE of FIG. 26A. LOC146057 BINDING SITE is a binding site found in an untranslated region of LOC146057, corresponding to BINDING SITE of FIG. 26A. FIG. 26D illustrates the complementarity of the nucleotide sequence of LOC146057 BINDING SITE, designated SEQ ID:264106, to the nucleotide sequence of GAM26 RNA of FIG. 26A, designated SEQ ID:20604. An additional function of GAM26 is therefore inhibition of (LOC146057). Accordingly, utilities of GAM26 include diagnosis and treatment of diseases and clinical conditions with which LOC146057 is associated.

[2460] Reference is now made to LOC203197 BINDING SITE. LOC203197 is a target gene of GAM26, corresponding to GAM26-TARGET GENE of FIG. 26A. LOC203197 BINDING SITE is a binding site found in an untranslated region of LOC203197, corresponding to BINDING SITE of FIG. 26A. FIG. 26D illustrates the complementarity of the nucleotide sequence of LOC203197 BINDING SITE, designated SEQ ID:317209, to the nucleotide sequence of GAM26 RNA of FIG. 26A, designated SEQ ID:20604. A further function of GAM26 is therefore inhibition of (LOC203197). Accordingly, utilities of GAM26 include diagnosis and treatment of diseases and clinical conditions with which LOC203197 is associated.

[2461] Reference is now made to LOC146223 BINDING SITE. LOC146223 is a target gene of GAM26, corresponding to GAM26-TARGET GENE of FIG. 26A. LOC146223 BINDING SITE is a binding site found in an untranslated region of LOC146223, corresponding to BINDING SITE of FIG. 26A. FIG. 26D illustrates the complementarity of the nucleotide sequence of LOC146223 BINDING SITE, designated SEQ ID:412156, to the nucleotide sequence of GAM26 RNA of FIG. 26A, designated SEQ ID:20604. Yet a further function of GAM26 is therefore inhibition of (LOC146223). Accordingly, utilities of GAM26 include diagnosis and treatment of diseases and clinical conditions with which LOC146223 is associated.

[2462] Reference is now made to LOC256905 BINDING SITE. LOC256905 is a target gene of GAM26, corresponding to GAM26-TARGET GENE of FIG. 26A. LOC256905 BINDING SITE is a binding site found in an untranslated region of LOC256905, corresponding to BINDING SITE of FIG. 26A. FIG. 26D illustrates the complementarity of the nucleotide sequence of LOC256905 BINDING SITE, designated SEQ ID:432644, to the nucleotide sequence of GAM26 RNA of FIG. 26A, designated SEQ ID:20604. Another function of GAM26 is therefore inhibition of (LOC256905). Accordingly, utilities of GAM26 include diagnosis and treatment of diseases and clinical conditions with which LOC256905 is associated.

[2463] Reference is now made to LOC158301 BINDING SITE. LOC158301 is a target gene of GAM26, corresponding to GAM26-TARGET GENE of FIG. 26A. LOC158301 BINDING SITE is a binding site found in an untranslated region of LOC158301, corresponding to BINDING SITE of FIG. 26A. FIG. 26D illustrates the complementarity of the nucleotide sequence of LOC158301 BINDING SITE, designated SEQ ID:670361, to the nucleotide sequence of GAM26 RNA of FIG. 26A, designated SEQ ID:20604. Yet another function of GAM26 is therefore inhibition of (LOC158301). Accordingly, utilities of GAM26 include diagnosis and treatment of diseases and clinical conditions with which LOC158301 is associated.

[2464] Reference is now made to LOC158301 BINDING SITE. LOC158301 is a target gene of GAM26, corresponding to GAM26-TARGET GENE of FIG. 26A. LOC158301 BINDING SITE is a binding site found in an untranslated region of LOC158301, corresponding to BINDING SITE of FIG. 26A. FIG. 26D illustrates the complementarity of the nucleotide sequence of LOC158301 BINDING SITE, designated SEQ ID:670394, to the nucleotide sequence of GAM26 RNA of FIG. 26A, designated SEQ ID:20604. An additional function of GAM26 is therefore inhibition of (LOC158301). Accordingly, utilities of GAM26 include diagnosis and treatment of diseases and clinical conditions with which LOC158301 is associated.

[2465] Reference is now made to LOC254573 BINDING SITE. LOC254573 is a target gene of GAM26, corresponding to GAM26-TARGET GENE of FIG. 26A. LOC254573 BINDING SITE is a binding site found in an untranslated region of LOC254573, corresponding to BINDING SITE of FIG. 26A. FIG. 26D illustrates the complementarity of the nucleotide sequence of LOC254573 BINDING SITE, designated SEQ ID:683857, to the nucleotide sequence of GAM26 RNA of FIG. 26A, designated SEQ ID:20604. A further function of GAM26 is therefore inhibition of (LOC254573). Accordingly, utilities of GAM26 include diagnosis and treatment of diseases and clinical conditions with which LOC254573 is associated.

[2466] Reference is now made to LOC158301 BINDING SITE. LOC158301 is a target gene of GAM26, corresponding to GAM26-TARGET GENE of FIG. 26A. LOC158301 BINDING SITE is a binding site found in an untranslated region of LOC158301, corresponding to BINDING SITE of FIG. 26A. FIG. 26D illustrates the complementarity of the nucleotide sequence of LOC158301 BINDING SITE, designated SEQ ID:763022, to the nucleotide sequence of GAM26 RNA of FIG. 26A, designated SEQ ID:20604. Yet a further function of GAM26 is therefore inhibition of (LOC158301). Accordingly, utilities of GAM26 include diagnosis and treatment of diseases and clinical conditions with which LOC158301 is associated.

[2467] Reference is now made to LOC57795 BINDING SITE. LOC57795 is a target gene of GAM26, corresponding to GAM26-TARGET GENE of FIG. 26A. LOC57795 BINDING SITE is a binding site found in an untranslated region of LOC57795, corresponding to BINDING SITE of FIG. 26A. FIG. 26D illustrates the complementarity of the nucleotide sequence of LOC57795 BINDING SITE, designated SEQ ID:865556, to the nucleotide sequence of GAM26 RNA of FIG. 26A, designated SEQ ID:20604. Another function of GAM26 is therefore inhibition of (LOC57795). Accordingly, utilities of GAM26 include diagnosis and treatment of diseases and clinical conditions with which LOC57795 is associated.

[2468] Reference is now made to LOC122525 BINDING SITE. LOC122525 is a target gene of GAM26, corresponding to GAM26-TARGET GENE of FIG. 26A. LOC122525 BINDING SITE is a binding site found in an untranslated region of LOC122525, corresponding to BINDING SITE of FIG. 26A. FIG. 26D illustrates the complementarity of the nucleotide sequence of LOC122525 BINDING SITE, designated SEQ ID:969284, to the nucleotide sequence of GAM26 RNA of FIG. 26A, designated SEQ ID:20604. Yet another function of GAM26 is therefore inhibition of (LOC122525). Accordingly, utilities of GAM26 include diagnosis and treatment of diseases and clinical conditions with which LOC122525 is associated.

[2469] Reference is now made to LOC112609 BINDING SITE. LOC112609 is a target gene of GAM26, corresponding to GAM26-TARGET GENE of FIG. 26A. LOC112609 BINDING SITE is a binding site found in an untranslated region of LOC112609, corresponding to BINDING SITE of FIG. 26A. FIG. 26D illustrates the complementarity of the nucleotide sequence of LOC112609 BINDING SITE, designated SEQ ID:1024445, to the nucleotide sequence of GAM26 RNA of FIG. 26A, designated SEQ ID:20604. An additional function of GAM26 is therefore inhibition of (LOC112609). Accordingly, utilities of GAM26 include diagnosis and treatment of diseases and clinical conditions with which LOC112609 is associated.

[2470] Reference is now made to LOC121536 BINDING SITE. LOC121536 is a target gene of GAM26, corresponding to GAM26-TARGET GENE of FIG. 26A. LOC121536 BINDING SITE is a binding site found in an untranslated region of LOC121536, corresponding to BINDING SITE of FIG. 26A. FIG. 26D illustrates the complementarity of the nucleotide sequence of LOC121536 BINDING SITE, designated SEQ ID:1036323, to the nucleotide sequence of GAM26 RNA of FIG. 26A, designated SEQ ID:20604. A further function of GAM26 is therefore inhibition of (LOC121536). Accordingly, utilities of GAM26 include diagnosis and treatment of diseases and clinical conditions with which LOC121536 is associated.

[2471] Reference is now made to LOC121536 BINDING SITE. LOC121536 is a target gene of GAM26, corresponding to GAM26-TARGET GENE of FIG. 26A. LOC121536 BINDING SITE is a binding site found in an untranslated region of LOC121536, corresponding to BINDING SITE of FIG. 26A. FIG. 26D illustrates the complementarity of the nucleotide sequence of LOC121536 BINDING SITE, designated SEQ ID:1036334, to the nucleotide sequence of GAM26 RNA of FIG. 26A, designated SEQ ID:20604. Yet a further function of GAM26 is therefore inhibition of (LOC121536). Accordingly, utilities of GAM26 include diagnosis and treatment of diseases and clinical conditions with which LOC121536 is associated.

[2472] Reference is now made to LOC121536 BINDING SITE. LOC121536 is a target gene of GAM26, corresponding to GAM26-TARGET GENE of FIG. 26A. LOC121536 BINDING SITE is a binding site found in an untranslated region of LOC121536, corresponding to BINDING SITE of FIG. 26A. FIG. 26D illustrates the complementarity of the nucleotide sequence of LOC121536 BINDING SITE, designated SEQ ID:1036375, to the nucleotide sequence of GAM26 RNA of FIG. 26A, designated SEQ ID:20604. Another function of GAM26 is therefore inhibition of (LOC121536). Accordingly, utilities of GAM26 include diagnosis and treatment of diseases and clinical conditions with which LOC121536 is associated.

[2473] Reference is now made to LOC122525 BINDING SITE. LOC122525 is a target gene of GAM26, corresponding to GAM26-TARGET GENE of FIG. 26A. LOC1122525 BINDING SITE is a binding site found in an untranslated region of LOC122525, corresponding to BINDING SITE of FIG. 26A. FIG. 26D illustrates the complementarity of the nucleotide sequence of LOC122525 BINDING SITE, designated SEQ ID: 1036926, to the nucleotide sequence of GAM26 RNA of FIG. 26A, designated SEQ ID:20604. Yet another function of GAM26 is therefore inhibition of (LOC122525). Accordingly, utilities of GAM26 include diagnosis and treatment of diseases and clinical conditions with which LOC122525 is associated.

[2474] Reference is now made to LOC124944 BINDING SITE. LOC124944 is a target gene of GAM26, corresponding to GAM26-TARGET GENE of FIG. 26A. LOC1124944 BINDING SITE is a binding site found in an untranslated region of LOC124944, corresponding to BINDING SITE of FIG. 26A. FIG. 26D illustrates the complementarity of the nucleotide sequence of LOC124944 BINDING SITE, designated SEQ ID:1041522, to the nucleotide sequence of GAM26 RNA of FIG. 26A, designated SEQ ID:20604. An additional function of GAM26 is therefore inhibition of (LOC124944). Accordingly, utilities of GAM26 include diagnosis and treatment of diseases and clinical conditions with which LOC124944 is associated.

[2475] Reference is now made to LOC125228 BINDING SITE. LOC125228 is a target gene of GAM26, corresponding to GAM26-TARGET GENE of FIG. 26A. LOC125228 BINDING SITE is a binding site found in an untranslated region of LOC125228, corresponding to BINDING SITE of FIG. 26A. FIG. 26D illustrates the complementarity of the nucleotide sequence of LOC125228 BINDING SITE, designated SEQ ID:1042173, to the nucleotide sequence of GAM26 RNA of FIG. 26A, designated SEQ ID:20604. A further function of GAM26 is therefore inhibition of (LOC125228). Accordingly, utilities of GAM26 include diagnosis and treatment of diseases and clinical conditions with which LOC125228 is associated.

[2476] Reference is now made to LOC125228 BINDING SITE. LOC125228 is a target gene of GAM26, corresponding to GAM26-TARGET GENE of FIG. 26A. LOC125228 BINDING SITE is a binding site found in an untranslated region of LOC125228, corresponding to BINDING SITE of FIG. 26A. FIG. 26D illustrates the complementarity of the nucleotide sequence of LOC125228 BINDING SITE, designated SEQ ID:1042179, to the nucleotide sequence of GAM26 RNA of FIG. 26A, designated SEQ ID:20604. Yet a further function of GAM26 is therefore inhibition of (LOC125228). Accordingly, utilities of GAM26 include diagnosis and treatment of diseases and clinical conditions with which LOC125228 is associated.

[2477] Reference is now made to LOC126432 BINDING SITE. LOC126432 is a target gene of GAM26, corresponding to GAM26-TARGET GENE of FIG. 26A. LOC126432 BINDING SITE is a binding site found in an untranslated region of LOC126432, corresponding to BINDING SITE of FIG. 26A. FIG. 26D illustrates the complementarity of the nucleotide sequence of LOC126432 BINDING SITE, designated SEQ ID: 1044359, to the nucleotide sequence of GAM26 RNA of FIG. 26A, designated SEQ ID:20604. Another function of GAM26 is therefore inhibition of (LOC126432). Accordingly, utilities of GAM26 include diagnosis and treatment of diseases and clinical conditions with which LOC126432 is associated.

[2478] Reference is now made to LOC126917 BINDING SITE. LOC126917 is a target gene of GAM26, corresponding to GAM26-TARGET GENE of FIG. 26A. LOC1126917 BINDING SITE is a binding site found in an untranslated region of LOC126917, corresponding to BINDING SITE of FIG. 26A. FIG. 26D illustrates the complementarity of the nucleotide sequence of LOC126917 BINDING SITE, designated SEQ ID:1045771, to the nucleotide sequence of GAM26 RNA of FIG. 26A, designated SEQ ID:20604. Yet another function of GAM26 is therefore inhibition of (LOC126917). Accordingly, utilities of GAM26 include diagnosis and treatment of diseases and clinical conditions with which LOC126917 is associated.

[2479] Reference is now made to LOC130367 BINDING SITE. LOC130367 is a target gene of GAM26, corresponding to GAM26-TARGET GENE of FIG. 26A. LOC130367 BINDING SITE is a binding site found in an untranslated region of LOC130367, corresponding to BINDING SITE of FIG. 26A. FIG. 26D illustrates the complementarity of the nucleotide sequence of LOC130367 BINDING SITE, designated SEQ ID: 1051475, to the nucleotide sequence of GAM26 RNA of FIG. 26A, designated SEQ ID:20604. An additional function of GAM26 is therefore inhibition of (LOC130367). Accordingly, utilities of GAM26 include diagnosis and treatment of diseases and clinical conditions with which LOC130367 is associated.

[2480] Reference is now made to LOC143243 BINDING SITE. LOC143243 is a target gene of GAM26, corresponding to GAM26-TARGET GENE of FIG. 26A. LOC143243 BINDING SITE is a binding site found in an untranslated region of LOC143243, corresponding to BINDING SITE of FIG. 26A. FIG. 26D illustrates the complementarity of the nucleotide sequence of LOC143243 BINDING SITE, designated SEQ ID:1065873, to the nucleotide sequence of GAM26 RNA of FIG. 26A, designated SEQ ID:20604. A further function of GAM26 is therefore inhibition of (LOC143243). Accordingly, utilities of GAM26 include diagnosis and treatment of diseases and clinical conditions with which LOC143243 is associated.

[2481] Reference is now made to LOC143891 BINDING SITE. LOC143891 is a target gene of GAM26, corresponding to GAM26-TARGET GENE of FIG. 26A. LOC143891 BINDING SITE is a binding site found in an untranslated region of LOC143891, corresponding to BINDING SITE of FIG. 26A. FIG. 26D illustrates the complementarity of the nucleotide sequence of LOC143891 BINDING SITE, designated SEQ ID:1068561, to the nucleotide sequence of GAM26 RNA of FIG. 26A, designated SEQ ID:20604. Yet a further function of GAM26 is therefore inhibition of (LOC143891). Accordingly, utilities of GAM26 include diagnosis and treatment of diseases and clinical conditions with which LOC143891 is associated.

[2482] Reference is now made to LOC145173 BINDING SITE. LOC145173 is a target gene of GAM26, corresponding to GAM26-TARGET GENE of FIG. 26A. LOC1145173 BINDING SITE is a binding site found in an untranslated region of LOC145173, corresponding to BINDING SITE of FIG. 26A. FIG. 26D illustrates the complementarity of the nucleotide sequence of LOC145173 BINDING SITE, designated SEQ ID:1077948, to the nucleotide sequence of GAM26 RNA of FIG. 26A, designated SEQ ID:20604. Another function of GAM26 is therefore inhibition of (LOC145173). Accordingly, utilities of GAM26 include diagnosis and treatment of diseases and clinical conditions with which LOC1145173 is associated.

[2483] Reference is now made to LOC145173 BINDING SITE. LOC145173 is a target gene of GAM26, corresponding to GAM26-TARGET GENE of FIG. 26A. LOC145173 BINDING SITE is a binding site found in an untranslated region of LOC145173, corresponding to BINDING SITE of FIG. 26A. FIG. 26D illustrates the complementarity of the nucleotide sequence of LOC145173 BINDING SITE, designated SEQ ID:1077952, to the nucleotide sequence of GAM26 RNA of FIG. 26A, designated SEQ ID:20604. Yet another function of GAM26 is therefore inhibition of (LOC145173). Accordingly, utilities of GAM26 include diagnosis and treatment of diseases and clinical conditions with which LOC145173 is associated.

[2484] Reference is now made to LOC145581 BINDING SITE. LOC145581 is a target gene of GAM26, corresponding to GAM26-TARGET GENE of FIG. 26A. LOC145581 BINDING SITE is a binding site found in an untranslated region of LOC145581, corresponding to BINDING SITE of FIG. 26A. FIG. 26D illustrates the complementarity of the nucleotide sequence of LOC145581 BINDING SITE, designated SEQ ID: 1081817, to the nucleotide sequence of GAM26 RNA of FIG. 26A, designated SEQ ID:20604. An additional function of GAM26 is therefore inhibition of (LOC145581). Accordingly, utilities of GAM26 include diagnosis and treatment of diseases and clinical conditions with which LOC145581 is associated.

[2485] Reference is now made to LOC145990 BINDING SITE. LOC145990 is a target gene of GAM26, corresponding to GAM26-TARGET GENE of FIG. 26A. LOC145990 BINDING SITE is a binding site found in an untranslated region of LOC145990, corresponding to BINDING SITE of FIG. 26A. FIG. 26D illustrates the complementarity of the nucleotide sequence of LOC145990 BINDING SITE, designated SEQ ID: 1089127, to the nucleotide sequence of GAM26 RNA of FIG. 26A, designated SEQ ID:20604. A further function of GAM26 is therefore inhibition of (LOC145990). Accordingly, utilities of GAM26 include diagnosis and treatment of diseases and clinical conditions with which LOC145990 is associated.

[2486] Reference is now made to LOC145990 BINDING SITE. LOC145990 is a target gene of GAM26, corresponding to GAM26-TARGET GENE of FIG. 26A. LOC145990 BINDING SITE is a binding site found in an untranslated region of LOC145990, corresponding to BINDING SITE of FIG. 26A. FIG. 26D illustrates the complementarity of the nucleotide sequence of LOC145990 BINDING SITE, designated SEQ ID:1089148, to the nucleotide sequence of GAM26 RNA of FIG. 26A, designated SEQ ID:20604. Yet a further function of GAM26 is therefore inhibition of (LOC145990). Accordingly, utilities of GAM26 include diagnosis and treatment of diseases and clinical conditions with which LOC145990 is associated.

[2487] Reference is now made to LOC145990 BINDING SITE. LOC145990 is a target gene of GAM26, corresponding to GAM26-TARGET GENE of FIG. 26A. LOC145990 BINDING SITE is a binding site found in an untranslated region of LOC145990, corresponding to BINDING SITE of FIG. 26A. FIG. 26D illustrates the complementarity of the nucleotide sequence of LOC145990 BINDING SITE, designated SEQ ID:1089170, to the nucleotide sequence of GAM26 RNA of FIG. 26A, designated SEQ ID:20604. Another function of GAM26 is therefore inhibition of (LOC145990). Accordingly, utilities of GAM26 include diagnosis and treatment of diseases and clinical conditions with which LOC145990 is associated.

[2488] Reference is now made to LOC145990 BINDING SITE. LOC145990 is a target gene of GAM26, corresponding to GAM26-TARGET GENE of FIG. 26A. LOC145990 BINDING SITE is a binding site found in an untranslated region of LOC145990, corresponding to BINDING SITE of FIG. 26A. FIG. 26D illustrates the complementarity of the nucleotide sequence of LOC145990 BINDING SITE, designated SEQ ID: 1089181, to the nucleotide sequence of GAM26 RNA of FIG. 26A, designated SEQ ID:20604. Yet another function of GAM26 is therefore inhibition of (LOC145990). Accordingly, utilities of GAM26 include diagnosis and treatment of diseases and clinical conditions with which LOC145990 is associated.

[2489] Reference is now made to LOC146057 BINDING SITE. LOC146057 is a target gene of GAM26, corresponding to GAM26-TARGET GENE of FIG. 26A. LOC146057 BINDING SITE is a binding site found in an untranslated region of LOC146057, corresponding to BINDING SITE of FIG. 26A. FIG. 26D illustrates the complementarity of the nucleotide sequence of LOC146057 BINDING SITE, designated SEQ ID: 1089542, to the nucleotide sequence of GAM26 RNA of FIG. 26A, designated SEQ ID:20604. An additional function of GAM26 is therefore inhibition of (LOC146057). Accordingly, utilities of GAM26 include diagnosis and treatment of diseases and clinical conditions with which LOC146057 is associated.

[2490] Reference is now made to LOC146057 BINDING SITE. LOC146057 is a target gene of GAM26, corresponding to GAM26-TARGET GENE of FIG. 26A. LOC146057 BINDING SITE is a binding site found in an untranslated region of LOC146057, corresponding to BINDING SITE of FIG. 26A. FIG. 26D illustrates the complementarity of the nucleotide sequence of LOC146057 BINDING SITE, designated SEQ ID: 1089568, to the nucleotide sequence of GAM26 RNA of FIG. 26A, designated SEQ ID:20604. A further function of GAM26 is therefore inhibition of (LOC146057). Accordingly, utilities of GAM26 include diagnosis and treatment of diseases and clinical conditions with which LOC146057 is associated.

[2491] Reference is now made to LOC146223 BINDING SITE. LOC146223 is a target gene of GAM26, corresponding to GAM26-TARGET GENE of FIG. 26A. LOC146223 BINDING SITE is a binding site found in an untranslated region of LOC146223, corresponding to BINDING SITE of FIG. 26A. FIG. 26D illustrates the complementarity of the nucleotide sequence of LOC146223 BINDING SITE, designated SEQ ID:1090768, to the nucleotide sequence of GAM26 RNA of FIG. 26A, designated SEQ ID:20604. Yet a further function of GAM26 is therefore inhibition of (LOC146223). Accordingly, utilities of GAM26 include diagnosis and treatment of diseases and clinical conditions with which LOC146223 is associated.

[2492] Reference is now made to LOC147057 BINDING SITE. LOC147057 is a target gene of GAM26, corresponding to GAM26-TARGET GENE of FIG. 26A. LOC147057 BINDING SITE is a binding site found in an untranslated region of LOC147057, corresponding to BINDING SITE of FIG. 26A. FIG. 26D illustrates the complementarity of the nucleotide sequence of LOC147057 BINDING SITE, designated SEQ ID:1102464, to the nucleotide sequence of GAM26 RNA of FIG. 26A, designated SEQ ID:20604. Another function of GAM26 is therefore inhibition of (LOC147057). Accordingly, utilities of GAM26 include diagnosis and treatment of diseases and clinical conditions with which LOC147057 is associated.

[2493] Reference is now made to LOC147409 BINDING SITE. LOC147409 is a target gene of GAM26, corresponding to GAM26-TARGET GENE of FIG. 26A. LOC147409 BINDING SITE is a binding site found in an untranslated region of LOC147409, corresponding to BINDING SITE of FIG. 26A. FIG. 26D illustrates the complementarity of the nucleotide sequence of LOC147409 BINDING SITE, designated SEQ ID: 1105742, to the nucleotide sequence of GAM26 RNA of FIG. 26A, designated SEQ ID:20604. Yet another function of GAM26 is therefore inhibition of (LOC147409). Accordingly, utilities of GAM26 include diagnosis and treatment of diseases and clinical conditions with which LOC147409 is associated.

[2494] Reference is now made to LOC147808 BINDING SITE. LOC147808 is a target gene of GAM26, corresponding to GAM26-TARGET GENE of FIG. 26A. LOC147808 BINDING SITE is a binding site found in an untranslated region of LOC147808, corresponding to BINDING SITE of FIG. 26A. FIG. 26D illustrates the complementarity of the nucleotide sequence of LOC147808 BINDING SITE, designated SEQ ID: 1108755, to the nucleotide sequence of GAM26 RNA of FIG. 26A, designated SEQ ID:20604. An additional function of GAM26 is therefore inhibition of (LOC147808). Accordingly, utilities of GAM26 include diagnosis and treatment of diseases and clinical conditions with which LOC147808 is associated.

[2495] Reference is now made to LOC150984 BINDING SITE. LOC150984 is a target gene of GAM26, corresponding to GAM26-TARGET GENE of FIG. 26A. LOC150984 BINDING SITE is a binding site found in an untranslated region of LOC150984, corresponding to BINDING SITE of FIG. 26A. FIG. 26D illustrates the complementarity of the nucleotide sequence of LOC150984 BINDING SITE, designated SEQ ID: 1144920, to the nucleotide sequence of GAM26 RNA of FIG. 26A, designated SEQ ID:20604. A further function of GAM26 is therefore inhibition of (LOC150984). Accordingly, utilities of GAM26 include diagnosis and treatment of diseases and clinical conditions with which LOC150984 is associated.

[2496] Reference is now made to LOC151517 BINDING SITE. LOC151517 is a target gene of GAM26, corresponding to GAM26-TARGET GENE of FIG. 26A. LOC151517 BINDING SITE is a binding site found in an untranslated region of LOC151517, corresponding to BINDING SITE of FIG. 26A. FIG. 26D illustrates the complementarity of the nucleotide sequence of LOC151517 BINDING SITE, designated SEQ ID: 1151083, to the nucleotide sequence of GAM26 RNA of FIG. 26A, designated SEQ ID:20604. Yet a further function of GAM26 is therefore inhibition of (LOC151517). Accordingly, utilities of GAM26 include diagnosis and treatment of diseases and clinical conditions with which LOC151517 is associated.

[2497] Reference is now made to LOC152048 BINDING SITE. LOC152048 is a target gene of GAM26, corresponding to GAM26-TARGET GENE of FIG. 26A. LOC152048 BINDING SITE is a binding site found in an untranslated region of LOC152048, corresponding to BINDING SITE of FIG. 26A. FIG. 26D illustrates the complementarity of the nucleotide sequence of LOC152048 BINDING SITE, designated SEQ ID:1155173, to the nucleotide sequence of GAM26 RNA of FIG. 26A, designated SEQ ID:20604. Another function of GAM26 is therefore inhibition of (LOC152048). Accordingly, utilities of GAM26 include diagnosis and treatment of diseases and clinical conditions with which LOC1152048 is associated.

[2498] Reference is now made to LOC154743 BINDING SITE. LOC154743 is a target gene of GAM26, corresponding to GAM26-TARGET GENE of FIG. 26A. LOC1154743 BINDING SITE is a binding site found in an untranslated region of LOC154743, corresponding to BINDING SITE of FIG. 26A. FIG. 26D illustrates the complementarity of the nucleotide sequence of LOC154743 BINDING SITE, designated SEQ ID:1174818, to the nucleotide sequence of GAM26 RNA of FIG. 26A, designated SEQ ID:20604. Yet another function of GAM26 is therefore inhibition of (LOC154743). Accordingly, utilities of GAM26 include diagnosis and treatment of diseases and clinical conditions with which LOC1154743 is associated.

[2499] Reference is now made to LOC154807 BINDING SITE. LOC154807 is a target gene of GAM26, corresponding to GAM26-TARGET GENE of FIG. 26A. LOC1154807 BINDING SITE is a binding site found in an untranslated region of LOC154807, corresponding to BINDING SITE of FIG. 26A. FIG. 26D illustrates the complementarity of the nucleotide sequence of LOC1154807 BINDING SITE, designated SEQ ID: 1175671, to the nucleotide sequence of GAM26 RNA of FIG. 26A, designated SEQ ID:20604. An additional function of GAM26 is therefore inhibition of (LOC154807). Accordingly, utilities of GAM26 include diagnosis and treatment of diseases and clinical conditions with which LOC154807 is associated.

[2500] Reference is now made to LOC154807 BINDING SITE. LOC154807 is a target gene of GAM26, corresponding to GAM26-TARGET GENE of FIG. 26A. LOC154807 BINDING SITE is a binding site found in an untranslated region of LOC154807, corresponding to BINDING SITE of FIG. 26A. FIG. 26D illustrates the complementarity of the nucleotide sequence of LOC154807 BINDING SITE, designated SEQ ID: 1175672, to the nucleotide sequence of GAM26 RNA of FIG. 26A, designated SEQ ID:20604. A further function of GAM26 is therefore inhibition of (LOC154807). Accordingly, utilities of GAM26 include diagnosis and treatment of diseases and clinical conditions with which LOC154807 is associated.

[2501] Reference is now made to LOC158301 BINDING SITE. LOC158301 is a target gene of GAM26, corresponding to GAM26-TARGET GENE of FIG. 26A. LOC158301 BINDING SITE is a binding site found in an untranslated region of LOC158301, corresponding to BINDING SITE of FIG. 26A. FIG. 26D illustrates the complementarity of the nucleotide sequence of LOC158301 BINDING SITE, designated SEQ ID: 1190223, to the nucleotide sequence of GAM26 RNA of FIG. 26A, designated SEQ ID:20604. Yet a further function of GAM26 is therefore inhibition of (LOC158301). Accordingly, utilities of GAM26 include diagnosis and treatment of diseases and clinical conditions with which LOC158301 is associated.

[2502] Reference is now made to LOC158301 BINDING SITE. LOC158301 is a target gene of GAM26, corresponding to GAM26-TARGET GENE of FIG. 26A. LOC158301 BINDING SITE is a binding site found in an untranslated region of LOC158301, corresponding to BINDING SITE of FIG. 26A. FIG. 26D illustrates the complementarity of the nucleotide sequence of LOC158301 BINDING SITE, designated SEQ ID: 1190283, to the nucleotide sequence of GAM26 RNA of FIG. 26A, designated SEQ ID:20604. Another function of GAM26 is therefore inhibition of (LOC158301). Accordingly, utilities of GAM26 include diagnosis and treatment of diseases and clinical conditions with which LOC158301 is associated.

[2503] Reference is now made to LOC158856 BINDING SITE. LOC158856 is a target gene of GAM26, corresponding to GAM26-TARGET GENE of FIG. 26A. LOC158856 BINDING SITE is a binding site found in an untranslated region of LOC158856, corresponding to BINDING SITE of FIG. 26A. FIG. 26D illustrates the complementarity of the nucleotide sequence of LOC158856 BINDING SITE, designated SEQ ID:1195246, to the nucleotide sequence of GAM26 RNA of FIG. 26A, designated SEQ ID:20604. Yet another function of GAM26 is therefore inhibition of (LOC158856). Accordingly, utilities of GAM26 include diagnosis and treatment of diseases and clinical conditions with which LOC158856 is associated.

[2504] Reference is now made to LOC161635 BINDING SITE. LOC161635 is a target gene of GAM26, corresponding to GAM26-TARGET GENE of FIG. 26A. LOC161635 BINDING SITE is a binding site found in an untranslated region of LOC161635, corresponding to BINDING SITE of FIG. 26A. FIG. 26D illustrates the complementarity of the nucleotide sequence of LOC161635 BINDING SITE, designated SEQ ID: 1199731, to the nucleotide sequence of GAM26 RNA of FIG. 26A, designated SEQ ID:20604. An additional function of GAM26 is therefore inhibition of (LOC161635). Accordingly, utilities of GAM26 include diagnosis and treatment of diseases and clinical conditions with which LOC161635 is associated.

[2505] Reference is now made to LOC162417 BINDING SITE. LOC162417 is a target gene of GAM26, corresponding to GAM26-TARGET GENE of FIG. 26A. LOC1162417 BINDING SITE is a binding site found in an untranslated region of LOC1162417, corresponding to BINDING SITE of FIG. 26A. FIG. 26D illustrates the complementarity of the nucleotide sequence of LOC162417 BINDING SITE, designated SEQ ID:1201175, to the nucleotide sequence of GAM26 RNA of FIG. 26A, designated SEQ ID:20604. A further function of GAM26 is therefore inhibition of (LOC162417). Accordingly, utilities of GAM26 include diagnosis and treatment of diseases and clinical conditions with which LOC162417 is associated.

[2506] Reference is now made to LOC162762 BINDING SITE. LOC162762 is a target gene of GAM26, corresponding to GAM26-TARGET GENE of FIG. 26A. LOC162762 BINDING SITE is a binding site found in an untranslated region of LOC162762, corresponding to BINDING SITE of FIG. 26A. FIG. 26D illustrates the complementarity of the nucleotide sequence of LOC162762 BINDING SITE, designated SEQ ID:1201432, to the nucleotide sequence of GAM26 RNA of FIG. 26A, designated SEQ ID:20604. Yet a further function of GAM26 is therefore inhibition of (LOC162762). Accordingly, utilities of GAM26 include diagnosis and treatment of diseases and clinical conditions with which LOC162762 is associated.

[2507] Reference is now made to LOC162762 BINDING SITE. LOC162762 is a target gene of GAM26, corresponding to GAM26-TARGET GENE of FIG. 26A. LOC1162762 BINDING SITE is a binding site found in an untranslated region of LOC162762, corresponding to BINDING SITE of FIG. 26A. FIG. 26D illustrates the complementarity of the nucleotide sequence of LOC162762 BINDING SITE, designated SEQ ID:1201436, to the nucleotide sequence of GAM26 RNA of FIG. 26A, designated SEQ ID:20604. Another function of GAM26 is therefore inhibition of (LOC162762). Accordingly, utilities of GAM26 include diagnosis and treatment of diseases and clinical conditions with which LOC162762 is associated.

[2508] Reference is now made to LOC163126 BINDING SITE. LOC163126 is a target gene of GAM26, corresponding to GAM26-TARGET GENE of FIG. 26A. LOC163126 BINDING SITE is a binding site found in an untranslated region of LOC163126, corresponding to BINDING SITE of FIG. 26A. FIG. 26D illustrates the complementarity of the nucleotide sequence of LOC163126 BINDING SITE, designated SEQ ID:1201784, to the nucleotide sequence of GAM26 RNA of FIG. 26A, designated SEQ ID:20604. Yet another function of GAM26 is therefore inhibition of (LOC163126). Accordingly, utilities of GAM26 include diagnosis and treatment of diseases and clinical conditions with which LOC163126 is associated.

[2509] Reference is now made to LOC163126 BINDING SITE. LOC163126 is a target gene of GAM26, corresponding to GAM26-TARGET GENE of FIG. 26A. LOC163126 BINDING SITE is a binding site found in an untranslated region of LOC163126, corresponding to BINDING SITE of FIG. 26A. FIG. 26D illustrates the complementarity of the nucleotide sequence of LOC163126 BINDING SITE, designated SEQ ID:1201817, to the nucleotide sequence of GAM26 RNA of FIG. 26A, designated SEQ ID:20604. An additional function of GAM26 is therefore inhibition of (LOC163126). Accordingly, utilities of GAM26 include diagnosis and treatment of diseases and clinical conditions with which LOC163126 is associated.

[2510] Reference is now made to LOC165257 BINDING SITE. LOC165257 is a target gene of GAM26, corresponding to GAM26-TARGET GENE of FIG. 26A. LOC165257 BINDING SITE is a binding site found in an untranslated region of LOC165257, corresponding to BINDING SITE of FIG. 26A. FIG. 26D illustrates the complementarity of the nucleotide sequence of LOC165257 BINDING SITE, designated SEQ ID:1205008, to the nucleotide sequence of GAM26 RNA of FIG. 26A, designated SEQ ID:20604. A further function of GAM26 is therefore inhibition of (LOC165257). Accordingly, utilities of GAM26 include diagnosis and treatment of diseases and clinical conditions with which LOC165257 is associated.

[2511] Reference is now made to LOC165333 BINDING SITE. LOC165333 is a target gene of GAM26, corresponding to GAM26-TARGET GENE of FIG. 26A. LOC165333 BINDING SITE is a binding site found in an untranslated region of LOC165333, corresponding to BINDING SITE of FIG. 26A. FIG. 26D illustrates the complementarity of the nucleotide sequence of LOC165333 BINDING SITE, designated SEQ ID:1205096, to the nucleotide sequence of GAM26 RNA of FIG. 26A, designated SEQ ID:20604. Yet a further function of GAM26 is therefore inhibition of (LOC165333). Accordingly, utilities of GAM26 include diagnosis and treatment of diseases and clinical conditions with which LOC165333 is associated.

[2512] Reference is now made to LOC165552 BINDING SITE. LOC165552 is a target gene of GAM26, corresponding to GAM26-TARGET GENE of FIG. 26A. LOC165552 BINDING SITE is a binding site found in an untranslated region of LOC165552, corresponding to BINDING SITE of FIG. 26A. FIG. 26D illustrates the complementarity of the nucleotide sequence of LOC165552 BINDING SITE, designated SEQ ID: 1205248, to the nucleotide sequence of GAM26 RNA of FIG. 26A, designated SEQ ID:20604. Another function of GAM26 is therefore inhibition of (LOC165552). Accordingly, utilities of GAM26 include diagnosis and treatment of diseases and clinical conditions with which LOC165552 is associated.

[2513] Reference is now made to LOC196549 BINDING SITE. LOC196549 is a target gene of GAM26, corresponding to GAM26-TARGET GENE of FIG. 26A. LOC196549 BINDING SITE is a binding site found in an untranslated region of LOC196549, corresponding to BINDING SITE of FIG. 26A. FIG. 26D illustrates the complementarity of the nucleotide sequence of LOC196549 BINDING SITE, designated SEQ ID:1213581, to the nucleotide sequence of GAM26 RNA of FIG. 26A, designated SEQ ID:20604. Yet another function of GAM26 is therefore inhibition of (LOC196549). Accordingly, utilities of GAM26 include diagnosis and treatment of diseases and clinical conditions with which LOC1196549 is associated.

[2514] Reference is now made to LOC202020 BINDING SITE. LOC202020 is a target gene of GAM26, corresponding to GAM26-TARGET GENE of FIG. 26A. LOC202020 BINDING SITE is a binding site found in an untranslated region of LOC202020, corresponding to BINDING SITE of FIG. 26A. FIG. 26D illustrates the complementarity of the nucleotide sequence of LOC202020 BINDING SITE, designated SEQ ID:1240261, to the nucleotide sequence of GAM26 RNA of FIG. 26A, designated SEQ ID:20604. An additional function of GAM26 is therefore inhibition of (LOC202020). Accordingly, utilities of GAM26 include diagnosis and treatment of diseases and clinical conditions with which LOC202020 is associated.

[2515] Reference is now made to LOC203197 BINDING SITE. LOC203197 is a target gene of GAM26, corresponding to GAM26-TARGET GENE of FIG. 26A. LOC203197 BINDING SITE is a binding site found in an untranslated region of LOC203197, corresponding to BINDING SITE of FIG. 26A. FIG. 26D illustrates the complementarity of the nucleotide sequence of LOC203197 BINDING SITE, designated SEQ ID: 1245216, to the nucleotide sequence of GAM26 RNA of FIG. 26A, designated SEQ ID:20604. A further function of GAM26 is therefore inhibition of (LOC203197). Accordingly, utilities of GAM26 include diagnosis and treatment of diseases and clinical conditions with which LOC203197 is associated.

[2516] Reference is now made to LOC203197 BINDING SITE. LOC203197 is a target gene of GAM26, corresponding to GAM26-TARGET GENE of FIG. 26A. LOC203197 BINDING SITE is a binding site found in an untranslated region of LOC203197, corresponding to BINDING SITE of FIG. 26A. FIG. 26D illustrates the complementarity of the nucleotide sequence of LOC203197 BINDING SITE, designated SEQ ID:1245218, to the nucleotide sequence of GAM26 RNA of FIG. 26A, designated SEQ ID:20604. Yet a further function of GAM26 is therefore inhibition of (LOC203197). Accordingly, utilities of GAM26 include diagnosis and treatment of diseases and clinical conditions with which LOC203197 is associated.

[2517] Reference is now made to LOC203197 BINDING SITE. LOC203197 is a target gene of GAM26, corresponding to GAM26-TARGET GENE of FIG. 26A. LOC203197 BINDING SITE is a binding site found in an untranslated region of LOC203197, corresponding to BINDING SITE of FIG. 26A. FIG. 26D illustrates the complementarity of the nucleotide sequence of LOC203197 BINDING SITE, designated SEQ ID: 1245270, to the nucleotide sequence of GAM26 RNA of FIG. 26A, designated SEQ ID:20604. Another function of GAM26 is therefore inhibition of (LOC203197). Accordingly, utilities of GAM26 include diagnosis and treatment of diseases and clinical conditions with which LOC203197 is associated.

[2518] Reference is now made to LOC203668 BINDING SITE. LOC203668 is a target gene of GAM26, corresponding to GAM26-TARGET GENE of FIG. 26A. LOC203668 BINDING SITE is a binding site found in an untranslated region of LOC203668, corresponding to BINDING SITE of FIG. 26A. FIG. 26D illustrates the complementarity of the nucleotide sequence of LOC203668 BINDING SITE, designated SEQ ID:1249923, to the nucleotide sequence of GAM26 RNA of FIG. 26A, designated SEQ ID:20604. Yet another function of GAM26 is therefore inhibition of (LOC203668). Accordingly, utilities of GAM26 include diagnosis and treatment of diseases and clinical conditions with which LOC203668 is associated.

[2519] Reference is now made to LOC219333 BINDING SITE. LOC219333 is a target gene of GAM26, corresponding to GAM26-TARGET GENE of FIG. 26A. LOC219333 BINDING SITE is a binding site found in an untranslated region of LOC219333, corresponding to BINDING SITE of FIG. 26A. FIG. 26D illustrates the complementarity of the nucleotide sequence of LOC219333 BINDING SITE, designated SEQ ID: 1253262, to the nucleotide sequence of GAM26 RNA of FIG. 26A, designated SEQ ID:20604. An additional function of GAM26 is therefore inhibition of (LOC219333). Accordingly, utilities of GAM26 include diagnosis and treatment of diseases and clinical conditions with which LOC219333 is associated.

[2520] Reference is now made to LOC219333 BINDING SITE. LOC219333 is a target gene of GAM26, corresponding to GAM26-TARGET GENE of FIG. 26A. LOC219333 BINDING SITE is a binding site found in an untranslated region of LOC219333, corresponding to BINDING SITE of FIG. 26A. FIG. 26D illustrates the complementarity of the nucleotide sequence of LOC219333 BINDING SITE, designated SEQ ID: 1253264, to the nucleotide sequence of GAM26 RNA of FIG. 26A, designated SEQ ID:20604. A further function of GAM26 is therefore inhibition of (LOC219333). Accordingly, utilities of GAM26 include diagnosis and treatment of diseases and clinical conditions with which LOC219333 is associated.

[2521] Reference is now made to LOC219654 BINDING SITE. LOC219654 is a target gene of GAM26, corresponding to GAM26-TARGET GENE of FIG. 26A. LOC219654 BINDING SITE is a binding site found in an untranslated region of LOC219654, corresponding to BINDING SITE of FIG. 26A. FIG. 26D illustrates the complementarity of the nucleotide sequence of LOC219654 BINDING SITE, designated SEQ ID:1256056, to the nucleotide sequence of GAM26 RNA of FIG. 26A, designated SEQ ID:20604. Yet a further function of GAM26 is therefore inhibition of (LOC219654). Accordingly, utilities of GAM26 include diagnosis and treatment of diseases and clinical conditions with which LOC219654 is associated.

[2522] Reference is now made to LOC219899 BINDING SITE. LOC219899 is a target gene of GAM26, corresponding to GAM26-TARGET GENE of FIG. 26A. LOC219899 BINDING SITE is a binding site found in an untranslated region of LOC219899, corresponding to BINDING SITE of FIG. 26A. FIG. 26D illustrates the complementarity of the nucleotide sequence of LOC219899 BINDING SITE, designated SEQ ID: 1258777, to the nucleotide sequence of GAM26 RNA of FIG. 26A, designated SEQ ID:20604. Another function of GAM26 is therefore inhibition of (LOC219899). Accordingly, utilities of GAM26 include diagnosis and treatment of diseases and clinical conditions with which LOC219899 is associated.

[2523] Reference is now made to LOC219899 BINDING SITE. LOC219899 is a target gene of GAM26, corresponding to GAM26-TARGET GENE of FIG. 26A. LOC219899 BINDING SITE is a binding site found in an untranslated region of LOC219899, corresponding to BINDING SITE of FIG. 26A. FIG. 26D illustrates the complementarity of the nucleotide sequence of LOC219899 BINDING SITE, designated SEQ ID:1258810, to the nucleotide sequence of GAM26 RNA of FIG. 26A, designated SEQ ID:20604. Yet another function of GAM26 is therefore inhibition of (LOC219899). Accordingly, utilities of GAM26 include diagnosis and treatment of diseases and clinical conditions with which LOC219899 is associated.

[2524] Reference is now made to LOC220058 BINDING SITE. LOC220058 is a target gene of GAM26, corresponding to GAM26-TARGET GENE of FIG. 26A. LOC220058 BINDING SITE is a binding site found in an untranslated region of LOC220058, corresponding to BINDING SITE of FIG. 26A. FIG. 26D illustrates the complementarity of the nucleotide sequence of LOC220058 BINDING SITE, designated SEQ ID:1261177, to the nucleotide sequence of GAM26 RNA of FIG. 26A, designated SEQ ID:20604. An additional function of GAM26 is therefore inhibition of (LOC220058). Accordingly, utilities of GAM26 include diagnosis and treatment of diseases and clinical conditions with which LOC220058 is associated.

[2525] Reference is now made to LOC245726 BINDING SITE. LOC245726 is a target gene of GAM26, corresponding to GAM26-TARGET GENE of FIG. 26A. LOC245726 BINDING SITE is a binding site found in an untranslated region of LOC245726, corresponding to BINDING SITE of FIG. 26A. FIG. 26D illustrates the complementarity of the nucleotide sequence of LOC245726 BINDING SITE, designated SEQ ID: 1287683, to the nucleotide sequence of GAM26 RNA of FIG. 26A, designated SEQ ID:20604. A further function of GAM26 is therefore inhibition of (LOC245726). Accordingly, utilities of GAM26 include diagnosis and treatment of diseases and clinical conditions with which LOC245726 is associated.

[2526] Reference is now made to LOC253943 BINDING SITE. LOC253943 is a target gene of GAM26, corresponding to GAM26-TARGET GENE of FIG. 26A. LOC253943 BINDING SITE is a binding site found in an untranslated region of LOC253943, corresponding to BINDING SITE of FIG. 26A. FIG. 26D illustrates the complementarity of the nucleotide sequence of LOC253943 BINDING SITE, designated SEQ ID: 1295954, to the nucleotide sequence of GAM26 RNA of FIG. 26A, designated SEQ ID:20604. Yet a further function of GAM26 is therefore inhibition of (LOC253943). Accordingly, utilities of GAM26 include diagnosis and treatment of diseases and clinical conditions with which LOC253943 is associated.

[2527] Reference is now made to LOC253943 BINDING SITE. LOC253943 is a target gene of GAM26, corresponding to GAM26-TARGET GENE of FIG. 26A. LOC253943 BINDING SITE is a binding site found in an untranslated region of LOC253943, corresponding to BINDING SITE of FIG. 26A. FIG. 26D illustrates the complementarity of the nucleotide sequence of LOC253943 BINDING SITE, designated SEQ ID: 1295956, to the nucleotide sequence of GAM26 RNA of FIG. 26A, designated SEQ ID:20604. Another function of GAM26 is therefore inhibition of (LOC253943). Accordingly, utilities of GAM26 include diagnosis and treatment of diseases and clinical conditions with which LOC253943 is associated.

[2528] Reference is now made to LOC253943 BINDING SITE. LOC253943 is a target gene of GAM26, corresponding to GAM26-TARGET GENE of FIG. 26A. LOC253943 BINDING SITE is a binding site found in an untranslated region of LOC253943, corresponding to BINDING SITE of FIG. 26A. FIG. 26D illustrates the complementarity of the nucleotide sequence of LOC253943 BINDING SITE, designated SEQ ID: 1295963, to the nucleotide sequence of GAM26 RNA of FIG. 26A, designated SEQ ID:20604. Yet another function of GAM26 is therefore inhibition of (LOC253943). Accordingly, utilities of GAM26 include diagnosis and treatment of diseases and clinical conditions with which LOC253943 is associated.

[2529] Reference is now made to LOC253943 BINDING SITE. LOC253943 is a target gene of GAM26, corresponding to GAM26-TARGET GENE of FIG. 26A. LOC253943 BINDING SITE is a binding site found in an untranslated region of LOC253943, corresponding to BINDING SITE of FIG. 26A. FIG. 26D illustrates the complementarity of the nucleotide sequence of LOC253943 BINDING SITE, designated SEQ ID:1295964, to the nucleotide sequence of GAM26 RNA of FIG. 26A, designated SEQ ID:20604. An additional function of GAM26 is therefore inhibition of (LOC253943). Accordingly, utilities of GAM26 include diagnosis and treatment of diseases and clinical conditions with which LOC253943 is associated.

[2530] Reference is now made to LOC254102 BINDING SITE. LOC254102 is a target gene of GAM26, corresponding to GAM26-TARGET GENE of FIG. 26A. LOC254102 BINDING SITE is a binding site found in an untranslated region of LOC254102, corresponding to BINDING SITE of FIG. 26A. FIG. 26D illustrates the complementarity of the nucleotide sequence of LOC254102 BINDING SITE, designated SEQ ID: 1298522, to the nucleotide sequence of GAM26 RNA of FIG. 26A, designated SEQ ID:20604. A further function of GAM26 is therefore inhibition of (LOC254102). Accordingly, utilities of GAM26 include diagnosis and treatment of diseases and clinical conditions with which LOC254102 is associated.

[2531] Reference is now made to LOC254102 BINDING SITE. LOC254102 is a target gene of GAM26, corresponding to GAM26-TARGET GENE of FIG. 26A. LOC254102 BINDING SITE is a binding site found in an untranslated region of LOC254102, corresponding to BINDING SITE of FIG. 26A. FIG. 26D illustrates the complementarity of the nucleotide sequence of LOC254102 BINDING SITE, designated SEQ ID: 1298528, to the nucleotide sequence of GAM26 RNA of FIG. 26A, designated SEQ ID:20604. Yet a further function of GAM26 is therefore inhibition of (LOC254102). Accordingly, utilities of GAM26 include diagnosis and treatment of diseases and clinical conditions with which LOC254102 is associated.

[2532] Reference is now made to LOC254107 BINDING SITE. LOC254107 is a target gene of GAM26, corresponding to GAM26-TARGET GENE of FIG. 26A. LOC254107 BINDING SITE is a binding site found in an untranslated region of LOC254107, corresponding to BINDING SITE of FIG. 26A. FIG. 26D illustrates the complementarity of the nucleotide sequence of LOC254107 BINDING SITE, designated SEQ ID:1298621, to the nucleotide sequence of GAM26 RNA of FIG. 26A, designated SEQ ID:20604. Another function of GAM26 is therefore inhibition of (LOC254107). Accordingly, utilities of GAM26 include diagnosis and treatment of diseases and clinical conditions with which LOC254107 is associated.

[2533] Reference is now made to LOC254573 BINDING SITE. LOC254573 is a target gene of GAM26, corresponding to GAM26-TARGET GENE of FIG. 26A. LOC254573 BINDING SITE is a binding site found in an untranslated region of LOC254573, corresponding to BINDING SITE of FIG. 26A. FIG. 26D illustrates the complementarity of the nucleotide sequence of LOC254573 BINDING SITE, designated SEQ ID: 1303366, to the nucleotide sequence of GAM26 RNA of FIG. 26A, designated SEQ ID:20604. Yet another function of GAM26 is therefore inhibition of (LOC254573). Accordingly, utilities of GAM26 include diagnosis and treatment of diseases and clinical conditions with which LOC254573 is associated.

[2534] Reference is now made to LOC255028 BINDING SITE. LOC255028 is a target gene of GAM26, corresponding to GAM26-TARGET GENE of FIG. 26A. LOC255028 BINDING SITE is a binding site found in an untranslated region of LOC255028, corresponding to BINDING SITE of FIG. 26A. FIG. 26D illustrates the complementarity of the nucleotide sequence of LOC255028 BINDING SITE, designated SEQ ID: 1306373, to the nucleotide sequence of GAM26 RNA of FIG. 26A, designated SEQ ID:20604. An additional function of GAM26 is therefore inhibition of (LOC255028). Accordingly, utilities of GAM26 include diagnosis and treatment of diseases and clinical conditions with which LOC255028 is associated.

[2535] Reference is now made to LOC255056 BINDING SITE. LOC255056 is a target gene of GAM26, corresponding to GAM26-TARGET GENE of FIG. 26A. LOC255056 BINDING SITE is a binding site found in an untranslated region of LOC255056, corresponding to BINDING SITE of FIG. 26A. FIG. 26D illustrates the complementarity of the nucleotide sequence of LOC255056 BINDING SITE, designated SEQ ID:1307405, to the nucleotide sequence of GAM26 RNA of FIG. 26A, designated SEQ ID:20604. A further function of GAM26 is therefore inhibition of (LOC255056). Accordingly, utilities of GAM26 include diagnosis and treatment of diseases and clinical conditions with which LOC255056 is associated.

[2536] Reference is now made to LOC255426 BINDING SITE. LOC255426 is a target gene of GAM26, corresponding to GAM26-TARGET GENE of FIG. 26A. LOC255426 BINDING SITE is a binding site found in an untranslated region of LOC255426, corresponding to BINDING SITE of FIG. 26A. FIG. 26D illustrates the complementarity of the nucleotide sequence of LOC255426 BINDING SITE, designated SEQ ID:1310952, to the nucleotide sequence of GAM26 RNA of FIG. 26A, designated SEQ ID:20604. Yet a further function of GAM26 is therefore inhibition of (LOC255426). Accordingly, utilities of GAM26 include diagnosis and treatment of diseases and clinical conditions with which LOC255426 is associated.

[2537] Reference is now made to LOC255426 BINDING SITE. LOC255426 is a target gene of GAM26, corresponding to GAM26-TARGET GENE of FIG. 26A. LOC255426 BINDING SITE is a binding site found in an untranslated region of LOC255426, corresponding to BINDING SITE of FIG. 26A. FIG. 26D illustrates the complementarity of the nucleotide sequence of LOC255426 BINDING SITE, designated SEQ ID:1310952, to the nucleotide sequence of GAM26 RNA of FIG. 26A, designated SEQ ID:20604. Another function of GAM26 is therefore inhibition of (LOC255426). Accordingly, utilities of GAM26 include diagnosis and treatment of diseases and clinical conditions with which LOC255426 is associated.

[2538] Reference is now made to LOC146223 BINDING SITE. LOC146223 is a target gene of GAM26, corresponding to GAM26-TARGET GENE of FIG. 26A. LOC146223 BINDING SITE is a binding site found in an untranslated region of LOC146223, corresponding to BINDING SITE of FIG. 26A. FIG. 26D illustrates the complementarity of the nucleotide sequence of LOC146223 BINDING SITE, designated SEQ ID:1310953, to the nucleotide sequence of GAM26 RNA of FIG. 26A, designated SEQ ID:20604. Yet another function of GAM26 is therefore inhibition of (LOC146223). Accordingly, utilities of GAM26 include diagnosis and treatment of diseases and clinical conditions with which LOC146223 is associated.

[2539] Reference is now made to LOC255426 BINDING SITE. LOC255426 is a target gene of GAM26, corresponding to GAM26-TARGET GENE of FIG. 26A. LOC255426 BINDING SITE is a binding site found in an untranslated region of LOC255426, corresponding to BINDING SITE of FIG. 26A. FIG. 26D illustrates the complementarity of the nucleotide sequence of LOC255426 BINDING SITE, designated SEQ ID:1310953, to the nucleotide sequence of GAM26 RNA of FIG. 26A, designated SEQ ID:20604. An additional function of GAM26 is therefore inhibition of (LOC255426). Accordingly, utilities of GAM26 include diagnosis and treatment of diseases and clinical conditions with which LOC255426 is associated.

[2540] Reference is now made to LOC201780 BINDING SITE. LOC201780 is a target gene of GAM26, corresponding to GAM26-TARGET GENE of FIG. 26A. LOC201780 BINDING SITE is a binding site found in an untranslated region of LOC201780, corresponding to BINDING SITE of FIG. 26A. FIG. 26D illustrates the complementarity of the nucleotide sequence of LOC201780 BINDING SITE, designated SEQ ID:1317863, to the nucleotide sequence of GAM26 RNA of FIG. 26A, designated SEQ ID:20604. A further function of GAM26 is therefore inhibition of (LOC201780). Accordingly, utilities of GAM26 include diagnosis and treatment of diseases and clinical conditions with which LOC201780 is associated.

[2541] Reference is now made to LOC256160 BINDING SITE. LOC256160 is a target gene of GAM26, corresponding to GAM26-TARGET GENE of FIG. 26A. LOC256160 BINDING SITE is a binding site found in an untranslated region of LOC256160, corresponding to BINDING SITE of FIG. 26A. FIG. 26D illustrates the complementarity of the nucleotide sequence of LOC256160 BINDING SITE, designated SEQ ID:1317863, to the nucleotide sequence of GAM26 RNA of FIG. 26A, designated SEQ ID:20604. Yet a further function of GAM26 is therefore inhibition of (LOC256160). Accordingly, utilities of GAM26 include diagnosis and treatment of diseases and clinical conditions with which LOC256160 is associated.

[2542] Reference is now made to LOC256537 BINDING SITE. LOC256537 is a target gene of GAM26, corresponding to GAM26-TARGET GENE of FIG. 26A. LOC256537 BINDING SITE is a binding site found in an untranslated region of LOC256537, corresponding to BINDING SITE of FIG. 26A. FIG. 26D illustrates the complementarity of the nucleotide sequence of LOC256537 BINDING SITE, designated SEQ ID:1321461, to the nucleotide sequence of GAM26 RNA of FIG. 26A, designated SEQ ID:20604. Another function of GAM26 is therefore inhibition of (LOC256537). Accordingly, utilities of GAM26 include diagnosis and treatment of diseases and clinical conditions with which LOC256537 is associated.

[2543] Reference is now made to LOC256586 BINDING SITE. LOC256586 is a target gene of GAM26, corresponding to GAM26-TARGET. GENE of FIG. 26A. LOC256586 BINDING SITE is a binding site found in an untranslated region of LOC256586, corresponding to BINDING SITE of FIG. 26A. FIG. 26D illustrates the complementarity of the nucleotide sequence of LOC256586 BINDING SITE, designated SEQ ID:1321729, to the nucleotide sequence of GAM26 RNA of FIG. 26A, designated SEQ ID:20604. Yet another function of GAM26 is therefore inhibition of (LOC256586). Accordingly, utilities of GAM26 include diagnosis and treatment of diseases and clinical conditions with which LOC256586 is associated.

[2544] Reference is now made to LOC256812 BINDING SITE. LOC256812 is a target gene of GAM26, corresponding to GAM26-TARGET GENE of FIG. 26A. LOC256812 BINDING SITE is a binding site found in an untranslated region of LOC256812, corresponding to BINDING SITE of FIG. 26A. FIG. 26D illustrates the complementarity of the nucleotide sequence of LOC256812 BINDING SITE, designated SEQ ID: 1322939, to the nucleotide sequence of GAM26 RNA of FIG. 26A, designated SEQ ID:20604. An additional function of GAM26 is therefore inhibition of (LOC256812). Accordingly, utilities of GAM26 include diagnosis and treatment of diseases and clinical conditions with which LOC256812 is associated.

[2545] Reference is now made to LOC256905 BINDING SITE. LOC256905 is a target gene of GAM26, corresponding to GAM26-TARGET GENE of FIG. 26A. LOC256905 BINDING SITE is a binding site found in an untranslated region of LOC256905, corresponding to BINDING SITE of FIG. 26A. FIG. 26D illustrates the complementarity of the nucleotide sequence of LOC256905 BINDING SITE, designated SEQ ID:1323732, to the nucleotide sequence of GAM26 RNA of FIG. 26A, designated SEQ ID:20604. A further function of GAM26 is therefore inhibition of (LOC256905). Accordingly, utilities of GAM26 include diagnosis and treatment of diseases and clinical conditions with which LOC256905 is associated.

[2546] Reference is now made to LOC256905 BINDING SITE. LOC256905 is a target gene of GAM26, corresponding to GAM26-TARGET GENE of FIG. 26A. LOC256905 BINDING SITE is a binding site found in an untranslated region of LOC256905, corresponding to BINDING SITE of FIG. 26A. FIG. 26D illustrates the complementarity of the nucleotide sequence of LOC256905 BINDING SITE, designated SEQ ID: 1323749, to the nucleotide sequence of GAM26 RNA of FIG. 26A, designated SEQ ID:20604. Yet a further function of GAM26 is therefore inhibition of (LOC256905). Accordingly, utilities of GAM26 include diagnosis and treatment of diseases and clinical conditions with which LOC256905 is associated.

[2547] Reference is now made to LOC256905 BINDING SITE. LOC256905 is a target gene of GAM26, corresponding to GAM26-TARGET GENE of FIG. 26A. LOC256905 BINDING SITE is a binding site found in an untranslated region of LOC256905, corresponding to BINDING SITE of FIG. 26A. FIG. 26D illustrates the complementarity of the nucleotide sequence of LOC256905 BINDING SITE, designated SEQ ID: 1323750, to the nucleotide sequence of GAM26 RNA of FIG. 26A, designated SEQ ID:20604. Another function of GAM26 is therefore inhibition of (LOC256905). Accordingly, utilities of GAM26 include diagnosis and treatment of diseases and clinical conditions with which LOC256905 is associated.

[2548] Reference is now made to LOC257222 BINDING SITE. LOC257222 is a target gene of GAM26, corresponding to GAM26-TARGET GENE of FIG. 26A. LOC257222 BINDING SITE is a binding site found in an untranslated region of LOC257222, corresponding to BINDING SITE of FIG. 26A. FIG. 26D illustrates the complementarity of the nucleotide sequence of LOC257222 BINDING SITE, designated SEQ ID:1326885, to the nucleotide sequence of GAM26 RNA of FIG. 26A, designated SEQ ID:20604. Yet another function of GAM26 is therefore inhibition of (LOC257222). Accordingly, utilities of GAM26 include diagnosis and treatment of diseases and clinical conditions with which LOC257222 is associated.

[2549] Reference is now made to LOC257479 BINDING SITE. LOC257479 is a target gene of GAM26, corresponding to GAM26-TARGET GENE of FIG. 26A. LOC257479 BINDING SITE is a binding site found in an untranslated region of LOC257479, corresponding to BINDING SITE of FIG. 26A. FIG. 26D illustrates the complementarity of the nucleotide sequence of LOC257479 BINDING SITE, designated SEQ ID:1330681, to the nucleotide sequence of GAM26 RNA of FIG. 26A, designated SEQ ID:20604. An additional function of GAM26 is therefore inhibition of (LOC257479). Accordingly, utilities of GAM26 include diagnosis and treatment of diseases and clinical conditions with which LOC257479 is associated.

[2550] Reference is now made to LOC257479 BINDING SITE. LOC257479 is a target gene of GAM26, corresponding to GAM26-TARGET GENE of FIG. 26A. LOC257479 BINDING SITE is a binding site found in an untranslated region of LOC257479, corresponding to BINDING SITE of FIG. 26A. FIG. 26D illustrates the complementarity of the nucleotide sequence of LOC257479 BINDING SITE, designated SEQ ID:1330687, to the nucleotide sequence of GAM26 RNA of FIG. 26A, designated SEQ ID:20604. A further function of GAM26 is therefore inhibition of (LOC257479). Accordingly, utilities of GAM26 include diagnosis and treatment of diseases and clinical conditions with which LOC257479 is associated.

[2551] Reference is now made to LOC257479 BINDING SITE. LOC257479 is a target gene of GAM26, corresponding to GAM26-TARGET GENE of FIG. 26A. LOC257479 BINDING SITE is a binding site found in an untranslated region of LOC257479, corresponding to BINDING SITE of FIG. 26A. FIG. 26D illustrates the complementarity of the nucleotide sequence of LOC257479 BINDING SITE, designated SEQ ID:1330706, to the nucleotide sequence of GAM26 RNA of FIG. 26A, designated SEQ ID:20604. Yet a further function of GAM26 is therefore inhibition of (LOC257479). Accordingly, utilities of GAM26 include diagnosis and treatment of diseases and clinical conditions with which LOC257479 is associated.

[2552] Reference is now made to LOC257479 BINDING SITE. LOC257479 is a target gene of GAM26, corresponding to GAM26-TARGET GENE of FIG. 26A. LOC257479 BINDING SITE is a binding site found in an untranslated region of LOC257479, corresponding to BINDING SITE of FIG. 26A. FIG. 26D illustrates the complementarity of the nucleotide sequence of LOC257479 BINDING SITE, designated SEQ ID: 1330708, to the nucleotide sequence of GAM26 RNA of FIG. 26A, designated SEQ ID:20604. Another function of GAM26 is therefore inhibition of (LOC257479). Accordingly, utilities of GAM26 include diagnosis and treatment of diseases and clinical conditions with which LOC257479 is associated.

[2553] Reference is now made to LOC51061 BINDING SITE. LOC51061 is a target gene of GAM26, corresponding to GAM26-TARGET GENE of FIG. 26A. LOC51061 BINDING SITE is a binding site found in an untranslated region of LOC51061, corresponding to BINDING SITE of FIG. 26A. FIG. 26D illustrates the complementarity of the nucleotide sequence of LOC51061 BINDING SITE, designated SEQ ID:1335336, to the nucleotide sequence of GAM26 RNA of FIG. 26A, designated SEQ ID:20604. Yet another function of GAM26 is therefore inhibition of (LOC51061). Accordingly, utilities of GAM26 include diagnosis and treatment of diseases and clinical conditions with which LOC51061 is associated.

[2554] Reference is now made to LOC55829 BINDING SITE. LOC55829 is a target gene of GAM26, corresponding to GAM26-TARGET GENE of FIG. 26A. LOC55829 BINDING SITE is a binding site found in an untranslated region of LOC55829, corresponding to BINDING SITE of FIG. 26A. FIG. 26D illustrates the complementarity of the nucleotide sequence of LOC55829 BINDING SITE, designated SEQ ID:1343670, to the nucleotide sequence of GAM26 RNA of FIG. 26A, designated SEQ ID:20604. An additional function of GAM26 is therefore inhibition of (LOC55829). Accordingly, utilities of GAM26 include diagnosis and treatment of diseases and clinical conditions with which LOC55829 is associated.

[2555] Reference is now made to LOC55829 BINDING SITE. LOC55829 is a target gene of GAM26, corresponding to GAM26-TARGET GENE of FIG. 26A. LOC55829 BINDING SITE is a binding site found in an untranslated region of LOC55829, corresponding to BINDING SITE of FIG. 26A. FIG. 26D illustrates the complementarity of the nucleotide sequence of LOC55829 BINDING SITE, designated SEQ ID:1343683, to the nucleotide sequence of GAM26 RNA of FIG. 26A, designated SEQ ID:20604. A further function of GAM26 is therefore inhibition of (LOC55829). Accordingly, utilities of GAM26 include diagnosis and treatment of diseases and clinical conditions with which LOC55829 is associated.

[2556] Reference is now made to LOC57795 BINDING SITE. LOC57795 is a target gene of GAM26, corresponding to GAM26-TARGET GENE of FIG. 26A. LOC57795 BINDING SITE is a binding site found in an untranslated region of LOC57795, corresponding to BINDING SITE of FIG. 26A. FIG. 26D illustrates the complementarity of the nucleotide sequence of LOC57795 BINDING SITE, designated SEQ ID: 1347000, to the nucleotide sequence of GAM26 RNA of FIG. 26A, designated SEQ ID:20604. Yet a further function of GAM26 is therefore inhibition of (LOC57795). Accordingly, utilities of GAM26 include diagnosis and treatment of diseases and clinical conditions with which LOC57795 is associated.

[2557] Reference is now made to LOC84548 BINDING SITE. LOC84548 is a target gene of GAM26, corresponding to GAM26-TARGET GENE of FIG. 26A. LOC84548 BINDING SITE is a binding site found in an untranslated region of LOC84548, corresponding to BINDING SITE of FIG. 26A. FIG. 26D illustrates the complementarity of the nucleotide sequence of LOC84548 BINDING SITE, designated SEQ ID: 1349247, to the nucleotide sequence of GAM26 RNA of FIG. 26A, designated SEQ ID:20604. Another function of GAM26 is therefore inhibition of (LOC84548). Accordingly, utilities of GAM26 include diagnosis and treatment of diseases and clinical conditions with which LOC84548 is associated.

[2558] Reference is now made to LOC84548 BINDING SITE. LOC84548 is a target gene of GAM26, corresponding to GAM26-TARGET GENE of FIG. 26A. LOC84548 BINDING SITE is a binding site found in an untranslated region of LOC84548, corresponding to BINDING SITE of FIG. 26A. FIG. 26D illustrates the complementarity of the nucleotide sequence of LOC84548 BINDING SITE, designated SEQ ID: 1349248, to the nucleotide sequence of GAM26 RNA of FIG. 26A, designated SEQ ID:20604. Yet another function of GAM26 is therefore inhibition of (LOC84548). Accordingly, utilities of GAM26 include diagnosis and treatment of diseases and clinical conditions with which LOC84548 is associated.

[2559] Reference is now made to LOC84548 BINDING SITE. LOC84548 is a target gene of GAM26, corresponding to GAM26-TARGET GENE of FIG. 26A. LOC84548 BINDING SITE is a binding site found in an untranslated region of LOC84548, corresponding to BINDING SITE of FIG. 26A. FIG. 26D illustrates the complementarity of the nucleotide sequence of LOC84548 BINDING SITE, designated SEQ ID:1349283, to the nucleotide sequence of GAM26 RNA of FIG. 26A, designated SEQ ID:20604. An additional function of GAM26 is therefore inhibition of (LOC84548). Accordingly, utilities of GAM26 include diagnosis and treatment of diseases and clinical conditions with which LOC84548 is associated.

[2560] Reference is now made to LOC84548 BINDING SITE. LOC84548 is a target gene of GAM26, corresponding to GAM26-TARGET GENE of FIG. 26A. LOC84548 BINDING SITE is a binding site found in an untranslated region of LOC84548, corresponding to BINDING SITE of FIG. 26A. FIG. 26D illustrates the complementarity of the nucleotide sequence of LOC84548 BINDING SITE, designated SEQ ID: 1349284, to the nucleotide sequence of GAM26 RNA of FIG. 26A, designated SEQ ID:20604. A further function of GAM26 is therefore inhibition of (LOC84548). Accordingly, utilities of GAM26 include diagnosis and treatment of diseases and clinical conditions with which LOC84548 is associated.

[2561] Reference is now made to LOC86010 BINDING SITE. LOC86010 is a target gene of GAM26, corresponding to GAM26-TARGET GENE of FIG. 26A. LOC86010 BINDING SITE is a binding site found in an untranslated region of LOC86010, corresponding to BINDING SITE of FIG. 26A. FIG. 26D illustrates the complementarity of the nucleotide sequence of LOC86010 BINDING SITE, designated SEQ ID: 1349829, to the nucleotide sequence of GAM26 RNA of FIG. 26A, designated SEQ ID:20604. Yet a further function of GAM26 is therefore inhibition of (LOC86010). Accordingly, utilities of GAM26 include diagnosis and treatment of diseases and clinical conditions with which LOC86010 is associated.

[2562] Reference is now made to LOC86010 BINDING SITE. LOC86010 is a target gene of GAM26, corresponding to GAM26-TARGET GENE of FIG. 26A. LOC86010 BINDING SITE is a binding site found in an untranslated region of LOC86010, corresponding to BINDING SITE of FIG. 26A. FIG. 26D illustrates the complementarity of the nucleotide sequence of LOC86010 BINDING SITE, designated SEQ ID:1349832, to the nucleotide sequence of GAM26 RNA of FIG. 26A, designated SEQ ID:20604. Another function of GAM26 is therefore inhibition of (LOC86010). Accordingly, utilities of GAM26 include diagnosis and treatment of diseases and clinical conditions with which LOC86010 is associated.

[2563] Reference is now made to LOC90379 BINDING SITE. LOC90379 is a target gene of GAM26, corresponding to GAM26-TARGET GENE of FIG. 26A. LOC90379 BINDING SITE is a binding site found in an untranslated region of LOC90379, corresponding to BINDING SITE of FIG. 26A. FIG. 26D illustrates the complementarity of the nucleotide sequence of LOC90379 BINDING SITE, designated SEQ ID:1356590, to the nucleotide sequence of GAM26 RNA of FIG. 26A, designated SEQ ID:20604. Yet another function of GAM26 is therefore inhibition of (LOC90379). Accordingly, utilities of GAM26 include diagnosis and treatment of diseases and clinical conditions with which LOC90379 is associated.

[2564] Reference is now made to LOC90835 BINDING SITE. LOC90835 is a target gene of GAM26, corresponding to GAM26-TARGET GENE of FIG. 26A. LOC90835 BINDING SITE is a binding site found in an untranslated region of LOC90835, corresponding to BINDING SITE of FIG. 26A. FIG. 26D illustrates the complementarity of the nucleotide sequence of LOC90835 BINDING SITE, designated SEQ ID: 1362330, to the nucleotide sequence of GAM26 RNA of FIG. 26A, designated SEQ ID:20604. An additional function of GAM26 is therefore inhibition of (LOC90835). Accordingly, utilities of GAM26 include diagnosis and treatment of diseases and clinical conditions with which LOC90835 is associated.

[2565] Reference is now made to LOC90835 BINDING SITE. LOC90835 is a target gene of GAM26, corresponding to GAM26-TARGET GENE of FIG. 26A. LOC90835 BINDING SITE is a binding site found in an untranslated region of LOC90835, corresponding to BINDING SITE of FIG. 26A. FIG. 26D illustrates the complementarity of the nucleotide sequence of LOC90835 BINDING SITE, designated SEQ ID:1362338, to the nucleotide sequence of GAM26 RNA of FIG. 26A, designated SEQ ID:20604. A further function of GAM26 is therefore inhibition of (LOC90835). Accordingly, utilities of GAM26 include diagnosis and treatment of diseases and clinical conditions with which LOC90835 is associated.

[2566] Reference is now made to LOC90874 BINDING SITE. LOC90874 is a target gene of GAM26, corresponding to GAM26-TARGET GENE of FIG. 26A. LOC90874 BINDING SITE is a binding site found in an untranslated region of LOC90874, corresponding to BINDING SITE of FIG. 26A. FIG. 26D illustrates the complementarity of the nucleotide sequence of LOC90874 BINDING SITE, designated SEQ ID:1362769, to the nucleotide sequence of GAM26 RNA of FIG. 26A, designated SEQ ID:20604. Yet a further function of GAM26 is therefore inhibition of (LOC90874). Accordingly, utilities of GAM26 include diagnosis and treatment of diseases and clinical conditions with which LOC90874 is associated.

[2567] Reference is now made to LOC91050 BINDING SITE. LOC91050 is a target gene of GAM26, corresponding to GAM26-TARGET GENE of FIG. 26A. LOC91050 BINDING SITE is a binding site found in an untranslated region of LOC91050, corresponding to BINDING SITE of FIG. 26A. FIG. 26D illustrates the complementarity of the nucleotide sequence of LOC91050 BINDING SITE, designated SEQ ID: 1364688, to the nucleotide sequence of GAM26 RNA of FIG. 26A, designated SEQ ID:20604. Another function of GAM26 is therefore inhibition of (LOC91050). Accordingly, utilities of GAM26 include diagnosis and treatment of diseases and clinical conditions with which LOC91050 is associated.

[2568] Reference is now made to LOC91050 BINDING SITE. LOC91050 is a target gene of GAM26, corresponding to GAM26-TARGET GENE of FIG. 26A. LOC91050 BINDING SITE is a binding site found in an untranslated region of LOC91050, corresponding to BINDING SITE of FIG. 26A. FIG. 26D illustrates the complementarity of the nucleotide sequence of LOC91050 BINDING SITE, designated SEQ ID:1364726, to the nucleotide sequence of GAM26 RNA of FIG. 26A, designated SEQ ID:20604. Yet another function of GAM26 is therefore inhibition of (LOC91050). Accordingly, utilities of GAM26 include diagnosis and treatment of diseases and clinical conditions with which LOC91050 is associated.

[2569] Reference is now made to LOC91050 BINDING SITE. LOC91050 is a target gene of GAM26, corresponding to GAM26-TARGET GENE. of FIG. 26A. LOC91050 BINDING SITE is a binding site found in an untranslated region of LOC91050, corresponding to BINDING SITE of FIG. 26A. FIG. 26D illustrates the complementarity of the nucleotide sequence of LOC91050 BINDING SITE, designated SEQ ID:1364727, to the nucleotide sequence of GAM26 RNA of FIG. 26A, designated SEQ ID:20604. An additional function of GAM26 is therefore inhibition of (LOC91050). Accordingly, utilities of GAM26 include diagnosis and treatment of diseases and clinical conditions with which LOC91050 is associated.

[2570] Reference is now made to LOC91300 BINDING SITE. LOC91300 is a target gene of GAM26, corresponding to GAM26-TARGET GENE of FIG. 26A. LOC91300 BINDING SITE is a binding site found in an untranslated region of LOC91300, corresponding to BINDING SITE of FIG. 26A. FIG. 26D illustrates the complementarity of the nucleotide sequence of LOC91300 BINDING SITE, designated SEQ ID:1367936, to the nucleotide sequence of GAM26 RNA of FIG. 26A, designated SEQ ID:20604. A further function of GAM26 is therefore inhibition of (LOC91300). Accordingly, utilities of GAM26 include diagnosis and treatment of diseases and clinical conditions with which LOC91300 is associated.

[2571] Reference is now made to LOC91300 BINDING SITE. LOC91300 is a target gene of GAM26, corresponding to GAM26-TARGET GENE of FIG. 26A. LOC91300 BINDING SITE is a binding site found in an untranslated region of LOC91300, corresponding to BINDING SITE of FIG. 26A. FIG. 26D illustrates the complementarity of the nucleotide sequence of LOC91300 BINDING SITE, designated SEQ ID: 1367936, to the nucleotide sequence of GAM26 RNA of FIG. 26A, designated SEQ ID:20604. Yet a further function of GAM26 is therefore inhibition of (LOC91300). Accordingly, utilities of GAM26 include diagnosis and treatment of diseases and clinical conditions with which LOC91300 is associated.

[2572] Reference is now made to LOC91978 BINDING SITE. LOC91978 is a target gene of GAM26, corresponding to GAM26-TARGET GENE of FIG. 26A. LOC91978 BINDING SITE is a binding site found in an untranslated region of LOC91978, corresponding to BINDING SITE of FIG. 26A. FIG. 26D illustrates the complementarity of the nucleotide sequence of LOC91978 BINDING SITE, designated SEQ ID:1375053, to the nucleotide sequence of GAM26 RNA of FIG. 26A, designated SEQ ID:20604. Another function of GAM26 is therefore inhibition of (LOC91978). Accordingly, utilities of GAM26 include diagnosis and treatment of diseases and clinical conditions with which LOC91978 is associated.

[2573] Reference is now made to LOC92181 BINDING SITE. LOC92181 is a target gene of GAM26, corresponding to GAM26-TARGET GENE of FIG. 26A. LOC92181 BINDING SITE is a binding site found in an untranslated region of LOC92181, corresponding to BINDING SITE of FIG. 26A. FIG. 26D illustrates the complementarity of the nucleotide sequence of LOC92181 BINDING SITE, designated SEQ ID: 1376487, to the nucleotide sequence of GAM26 RNA of FIG. 26A, designated SEQ ID:20604. Yet another function of GAM26 is therefore inhibition of (LOC92181). Accordingly, utilities of GAM26 include diagnosis and treatment of diseases and clinical conditions with which LOC92181 is associated.

[2574] Reference is now made to LOC92299 BINDING SITE. LOC92299 is a target gene of GAM26, corresponding to GAM26-TARGET GENE of FIG. 26A. LOC92299 BINDING SITE is a binding site found in an untranslated region of LOC92299, corresponding to BINDING SITE of FIG. 26A. FIG. 26D illustrates the complementarity of the nucleotide sequence of LOC92299 BINDING SITE, designated SEQ ID:1377998, to the nucleotide sequence of GAM26 RNA of FIG. 26A, designated SEQ ID:20604. An additional function of GAM26 is therefore inhibition of (LOC92299). Accordingly, utilities of GAM26 include diagnosis and treatment of diseases and clinical conditions with which LOC92299 is associated.

[2575] Reference is now made to FIG. 27A, which is a simplified diagram providing a conceptual explanation of the mode by which a novel bioinformatically detected gene, referred to here as GAM27 modulates expression of target genes thereof, the function and utility of which target genes is known in the art.

[2576] GAM27 (Genomic Address Messenger 27) is a novel bioinformatically detected regulatory, non protein coding, micro RNA (miRNA) gene. The method by which GAM27 was detected is described hereinabove with reference to FIGS. 6-15.

[2577] GAM27 GENE and GAM27-TARGET GENE are two human genes contained in the human genome.

[2578] GAM27 GENE encodes a GAM27 PRECURSOR RNA. Similar to other miRNA genes, and unlike most ordinary genes, the RNA transcribed by GAM27, GAM27 PRECURSOR RNA, does not encoded a protein.

[2579] GAM27 PRECURSOR RNA folds onto itself, forming GAM27 FOLDED PRECURSOR RNA. As FIG. 27 illustrates, GAM27 FOLDED PRECURSOR RNA forms a ‘hairpin structure’, folding onto itself. As is well known in the art, this ‘hairpin structure’, is typical of RNA encoded by miRNA genes, and is due to the fact that the nucleotide sequence of the first half of the RNA encoded by a miRNA gene is an accurate or partial inversed-reversed sequence of the nucleotide sequence of the second half thereof. By “inversed-reversed” is meant a sequence which is reversed and wherein each nucleotide is replaced by a complimentary nucleotide, as is well known in the art (e.g. ATGGC is the inversed-reversed sequence of GCCAT).

[2580] An enzyme complex designated DICER COMPLEX, ‘dices’ the GAM27 FOLDED PRECURSOR RNA into a single stranded ˜22 nt long RNA segment, designated GAM27 RNA. As is known in the art, ‘dicing’ of a hairpin structured RNA precursor product into short a ˜22 nt RNA segment is catalyzed by an enzyme complex comprising an enzyme called Dicer together with other necessary proteins.

[2581] GAM27-TARGET GENE encodes a corresponding messenger RNA, designated GAM27-TARGET RNA. GAM27-TARGET RNA comprises three regions, as is typical of mRNA of a protein coding gene: a 5′ untranslated region, a protein coding region and a 3′ untranslated region, designated 5′UTR, PROTEIN CODING and 3′UTR respectively.

[2582] GAM27 RNA binds complimentarily to a BINDING SITE, located on an untranslated region of GAM27-TARGET RNA. This complimentarily binding is due to the fact that the nucleotide sequence of GAM27 RNA is an accurate or a partial inversed-reversed sequence of the nucleotide sequence of BINDING SITE. It is appreciated that while FIG. 27A depicts the BINDING SITE on the 3′UTR region, this is meant as an example only—the BINDING SITE may be located on the 5′UTR region as well.

[2583] The complimentary binding of GAM27 RNA to BINDING SITE inhibits translation of GAM27-TARGET RNA into GAM27-TARGET PROTEIN. GAM27-TARGET PROTEIN is therefore outlined by a broken line.

[2584] It is appreciated that GAM27-TARGET GENE in fact represents a plurality of target genes of GAM27. The mRNA of each of this plurality of target genes of GAM27 comprises a BINDING SITE, having a nucleotide sequence which is at least partly complementary to GAM27 RNA, and which when bound by GAM27 RNA causes inhibition of translation of one of a plurality of target proteins of GAM27. The plurality of target genes of GAM27 and their respective binding sites, are described hereinbelow with reference to FIG. 27D.

[2585] It is appreciated by one skilled in the art that the mode of translational inhibition illustrated by FIG. 27 with specific reference to translational inhibition exerted by GAM27 on one or more target genes of GAM27, is in fact common to other known miRNA genes. As mentioned hereinabove with reference to the background section, although a specific complimentary binding site has been demonstrated only for miRNA genes Lin-4 and Let-7, all other recently discovered miRNA genes are also believed by those skilled in the art to modulate expression of other genes by complimentary binding, although specific complimentary binding sites of these genes have not yet been found (Ruvkun G., ‘Perspective: Glimpses of a tiny RNA world’, Science 294, 779 (2001)).

[2586] Reference is now made to FIG. 27B which shows the nucleotide sequence of GAM27 PRECURSOR RNA of FIG. 27A, designated SEQ ID:4, and a probable nucleotide sequence of GAM27 RNA of FIG. 27A, designated SEQ ID:20605. The nucleotide sequence of SEQ ID:20605, which is highly likely (over 0.887508%) to be identical or highly similar to that of GAM27, is marked by an underline within the sequence of GAM27 PRECURSOR RNA.

[2587] Reference is now made to FIG. 27C, which shows the secondary folding of GAM27 PRECURSOR RNA, forming a ‘hairpin structure’ designated GAM27 FOLDED PRECURSOR RNA, both of FIG. 27A. A probable (>0.887508%) nucleotide sequence of GAM27 RNA, designated SEQ ID:20605 of FIG. 27B, is marked by an underline on GAM27 FOLDED PRECURSOR RNA. It is appreciated that the complimentary base-paring is not perfect, with ‘bulges’, as is well known in the art with respect to the RNA folding of all known miRNA genes.

[2588] Reference is now made to FIG. 27D, which is a table showing binding sites found in untranslated regions of a plurality of target genes of GAM27, each binding site corresponding to BINDING SITE of FIG. 27A, and their complementarity to SEQ ID:20605, which is highly likely (>0.887508%) to be identical or highly similar to the nucleotide sequence of GAM27 RNA of FIG. 27A.

[2589] It is appreciated that the functions, and accordingly the utilities, of GAM27 correlate with, and may be deduced from, the identity of the target genes which GAM27 binds and inhibits, and the function of these target genes, as elaborated hereinbelow.

[2590] Reference is now made to DEC1 BINDING SITE. deleted in esophageal cancer 1 (DEC1) is a target gene of GAM27, corresponding to GAM27-TARGET GENE of FIG. 27A. DEC1 BINDING SITE is a binding site found in an untranslated region of DEC1, corresponding to BINDING SITE of FIG. 27A. FIG. 27D illustrates the complementarity of the nucleotide sequence of DEC1 BINDING SITE, designated SEQ ID:131107, to the nucleotide sequence of GAM27 RNA of FIG. 27A, designated SEQ ID:20605.

[2591] a function of GAM27 is therefore inhibition of deleted in esophageal cancer 1 (DEC1), a gene which encodes a Protein that acts as a tumor suppressor associated with esophageal cancer. and is associated with esophageal cancer. Accordingly, utilities of GAM27 include diagnosis and treatment of the abovementioned diseases and clinical conditions.

[2592] The function of DEC1 has been established by previous studies. Loss of heterozygosity (LOH) is often shown at 9q31 in esophageal squamous cell carcinomas (133239) as well as in squamous cell carcinomas of developmentally related tissues such as bladder (109800), lung (211980), and head and neck. Miura et al. (1996) delineated a region commonly deleted in esophageal squamous cell carcinomas to a 200-kb segment at 9q32. Nishiwaki et al. (2000) sequenced overlapping clones in this commonly deleted region and identified a possible candidate gene, which they named ‘deleted in esophageal cancer-1’ (DEC1). The DEC1 gene encodes a deduced 70-amino acid protein. Northern blot analysis detected a 1.4-kb DEC1 transcript in all tissues tested, with highest expression in prostate and testis. DEC1 expression was lower than normal and often absent in more than half of the esophageal carcinomas examined. Furthermore, DEC1 cDNA was able to exert growth suppressive activity in vitro. Although expression was reduced, no genetic alteration was detected in the DEC1 gene in any of the cancers examined.

[2593] Full details of the abovementioned studies are described in the following publications, the disclosure of which are hereby incorporated by reference:

[2594] iura, K.; Suzuki, K.; Tokino, T.; Isomura, M.; Inazawa, J.; Matsuno, S.; Nakamura, Y.: Detailed deletion mapping in squamous cell carcinomas of the esophagus narrows a region containing a putative tumor suppressor gene to about 200 kilobases on distal chromosome 9q. Cancer Res. 56: 1629-1634, 1996. PubMed ID: 8603412 2. Nishiwaki, T.; Daigo, Y.; Kawasoe, T.; Nakamura, Y.: Isolation and mutational analysis of a novel human cDNA, DEC1 (deleted in esophageal cancer 1), derived from the tumor suppressor locus in 9q32. Genes Chromosomes Cancer 27: 169-176, 2000.

[2595] Further studies establishing the function and utilities of DEC1 are found in John Hopkins OMIM database record ID 604767, and in references numbered 1604-1605 listed hereinbelow.

[2596] Reference is now made to HD BINDING SITE. huntingtin (Huntington disease) (HD) is a target gene of GAM27, corresponding to GAM27-TARGET GENE of FIG. 27A. HD BINDING SITE is a binding site found in an untranslated region of HD, corresponding to BINDING SITE of FIG. 27A. FIG. 27D illustrates the complementarity of the nucleotide sequence of HD BINDING SITE, designated SEQ ID:193353, to the nucleotide sequence of GAM27 RNA of FIG. 27A, designated SEQ ID:20605.

[2597] Yet another function of GAM27 is therefore inhibition of huntingtin (Huntington disease) (HD), a gene which encodes a Enzyme that is associated with Huntington disease (HD). Accordingly, utilities of GAM27 include diagnosis and treatment of the abovementioned diseases and clinical conditions.

[2598] The function of HD has been established by previous studies. Relative to the mechanisms by which the mutant huntingtin protein cause neurodegeneration, Panov et al. (2002) showed that lymphoblast mitochondria from patients with HD have a lower membrane potential and depolarize at lower calcium loads than do mitochondria from controls. They found a similar defect in brain mitochondria from transgenic mice expressing full-length mutant huntingtin, and this defect preceded the onset of pathologic or behavioral abnormalities by months. By electron microscopy, they identified N-terminal mutant huntingtin on neuronal mitochondrial membranes, and by incubating normal mitochondria with a fusion protein containing an abnormally long polyglutamine repeat, they reproduced the mitochondrial calcium defect seen in human patients and transgenic animals. Thus, mitochondrial calcium abnormalities occur early in HD pathogenesis and may be a direct effect of mutant huntingtin on the organelle.

[2599] Animal model experiments lend further support to the function of HD. To distinguish between ‘loss-of-function’ and ‘gain-of-function’ models of HD, Duyao et al. (1995) inactivated the mouse Hdh by gene targeting. Mice heterozygous for Hdh inactivation were phenotypically normal, whereas homozygosity resulted in embryonic death. Homozygotes displayed abnormal gastrulation at embryonic day 7.5 and were resorbing by day 8.5. Thus, they concluded that huntingtin is critical early in embryonic development, before the emergence of the nervous system. That Hdh inactivation does not mimic adult HD neuropathology suggested to the authors that the human disease involves a gain of function.

[2600] It is appreciated that the abovementioned animal model for HD is acknowledged by those skilled in the art as a scientifically valid animal model, as can be further appreciated from the publications sited hereinbelow.

[2601] Full details of the abovementioned studies are described in the following publications, the disclosure of which are hereby incorporated by reference:

[2602] Duyao, M. P.; Auerbach, A. B.; Ryan, A.; Persichetti, F.; Barnes, G. T.; McNeil, S. M.; Ge, P.; Vonsattel, J.-P.; Gusella, J. F.; Joyner, A. L.; MacDonald, M. E.: Inactivation of the mouse Huntington's disease gene homolog Hdh. Science 269: 407-410, 1995. PubMed ID: 7618107 204. Panov, A. V.; Gutekunst, C.-A.; Leavitt, B. R.; Hayden, M. R.; Burke, J. R.; Strittmatter, W. J.; Greenamyre, J. T.: Early mitochondrial calcium defects in Huntington's disease are a direct effect of polyglutamines. Nature Neurosci. 5: 731-736, 2002.

[2603] Further studies establishing the function and utilities of HD are found in John Hopkins OMIM database record ID 143100, and in references numbered 1606-1704 listed hereinbelow.

[2604] Reference is now made to HPN BINDING SITE. hepsin (transmembrane protease, serine 1) (HPN) is a target gene of GAM27, corresponding to GAM27-TARGET GENE of FIG. 27A. HPN BINDING SITE is a binding site found in an untranslated region of HPN, corresponding to BINDING SITE of FIG. 27A. FIG. 27D illustrates the complementarity of the nucleotide sequence of HPN BINDING SITE, designated SEQ ID:201170, to the nucleotide sequence of GAM27 RNA of FIG. 27A, designated SEQ ID:20605.

[2605] An additional function of GAM27 is therefore inhibition of hepsin (transmembrane protease, serine 1) (HPN), a gene which encodes a Enzyme that is a cell surface serine protease. Accordingly, utilities of GAM27 include diagnosis and treatment of the abovementioned diseases and clinical conditions.

[2606] The function of HPN has been established by previous studies. Hepsin is a cell surface serine protease. From cDNA libraries prepared from human liver and hepatoma cell line mRNA, Leytus et al. (1988) isolated cDNA clones coding for a serine protease called hepsin. The proteolytic enzymes of the serine protease family exist as single- or 2-chain zymogenes that are activated by a specific and limited proteolytic cleavage. They contain 3 principal active-site amino acids, his, asp, and ser, that participate in peptide bond hydrolysis. Among the best-studied serine proteases are those found in plasma. These enzymes are involved in processes such as blood coagulation, fibrinolysis, and complement activation. Tsuji et al. (1991) showed that the hepsin mRNA is 1.85 kb in size and present in most tissues, with the highest level in liver. It is present in the plasma membrane in a molecular orientation of type II membrane-associated proteins, with its catalytic subunit (C-terminal half) at the cell surface and its N terminus facing the cytosol. Hepsin is not found in cytosol. See also TMPRSS2 (602060), a related serine protease.

[2607] Animal model experiments lend further support to the function of HPN. To determine the functional importance of hepsin, Wu et al. (1998) generated hepsin-deficient mice by homologous recombination. The homozygous deficient mice were viable and fertile, and grew normally. In functional assays, including tail bleeding time, plasma clotting times, and tissue factor- or LPS-induced disseminated intravascular coagulation models, no significant difference was found between hepsin −/− and wildtype littermates. Liver weight and serum concentrations of liver-derived proteins and enzymes were similar. Serum concentrations of bone-derived alkaline phosphatase were approximately 2-fold higher in hepsin −/− mice of both sexes when compared with wildtype littermates. No obvious abnormalities were found in major organs in hepsin −/− mice on histologic examination. The results indicated that hepsin is not essential for embryonic development and normal hemostasis.

[2608] It is appreciated that the abovementioned animal model for HPN is acknowledged by those skilled in the art as a scientifically valid animal model, as can be further appreciated from the publications sited hereinbelow.

[2609] Full details of the abovementioned studies are described in the following publications, the disclosure of which are hereby incorporated by reference:

[2610] eytus, S. P.; Loeb, K. R.; Hagen, F. S.; Kurachi, K.; Davie, E. W. A novel trypsin-like serine protease (hepsin) with a putative transmembrane domain expressed by human liver and hepatoma cells. Biochemistry 27: 1067-1074, 1988. PubMed ID: 2835076 3. Tsuji, A.; Torres-Rosado, A.; Arai, T.; Le Beau, M. M.; Lemons, R. S.; Chou, S.-H.; Kurachi, K.: Hepsin, a cell membrane-associated protease: characterization, tissue distribution, and gene localization. J. Biol. Chem. 266: 16948-16953, 1991.

[2611] Further studies establishing the function and utilities of HPN are found in John Hopkins OMIM database record ID 142440, and in references numbered 1074 and 1705-1707 listed hereinbelow.

[2612] Reference is now made to C20orf11 BINDING SITE. C20orf11 is a target gene of GAM27, corresponding to GAM27-TARGET GENE of FIG. 27A. C20orf11 BINDING SITE is a binding site found in an untranslated region of C20orf11, corresponding to BINDING SITE of FIG. 27A. FIG. 27D illustrates the complementarity of the nucleotide sequence of C20orf11 BINDING SITE, designated SEQ ID:468069, to the nucleotide sequence of GAM27 RNA of FIG. 27A, designated SEQ ID:20605. A further function of GAM27 is therefore inhibition of (C20orf11). Accordingly, utilities of GAM27 include diagnosis and treatment of diseases and clinical conditions with which C20orf11 is associated.

[2613] Reference is now made to FAF1 BINDING SITE. FAF1 is a target gene of GAM27, corresponding to GAM27-TARGET GENE of FIG. 27A. FAF1BINDING SITE is a binding site found in an untranslated region of FAF1, corresponding to BINDING SITE of FIG. 27A. FIG. 27D illustrates the complementarity of the nucleotide sequence of FAF1 BINDING SITE, designated SEQ ID:552947, to the nucleotide sequence of GAM27 RNA of FIG. 27A, designated SEQ ID:20605. Yet a further function of GAM27 is therefore inhibition of (FAF1). Accordingly, utilities of GAM27 include diagnosis and treatment of diseases and clinical conditions with which FAF1 is associated.

[2614] Reference is now made to FLJ23878 BINDING SITE. FLJ23878 is a target gene of GAM27, corresponding to GAM27-TARGET GENE of FIG. 27A. FLJ23878 BINDING SITE is a binding site found in an untranslated region of FLJ23878, corresponding to BINDING SITE of FIG. 27A. FIG. 27D illustrates the complementarity of the nucleotide sequence of FLJ23878 BINDING SITE, designated SEQ ID:662582, to the nucleotide sequence of GAM27 RNA of FIG. 27A, designated SEQ ID:20605. Another function of GAM27 is therefore inhibition of (FLJ23878). Accordingly, utilities of GAM27 include diagnosis and treatment of diseases and clinical conditions with which FLJ23878 is associated.

[2615] Reference is now made to ODZ2 BINDING SITE. ODZ2 is a target gene of GAM27, corresponding to GAM27-TARGET GENE of FIG. 27A. ODZ2 BINDING SITE is a binding site found in an untranslated region of ODZ2, corresponding to BINDING SITE of FIG. 27A. FIG. 27D illustrates the complementarity of the nucleotide sequence of ODZ2 BINDING SITE, designated SEQ ID:900303, to the nucleotide sequence of GAM27 RNA of FIG. 27A, designated SEQ ID:20605. Yet another function of GAM27 is therefore inhibition of (ODZ2). Accordingly, utilities of GAM27 include diagnosis and treatment of diseases and clinical conditions with which ODZ2 is associated.

[2616] Reference is now made to LOC144231 BINDING SITE. LOC1144231 is a target gene of GAM27, corresponding to GAM27-TARGET GENE of FIG. 27A. LOC144231 BINDING SITE is a binding site found in an untranslated region of LOC144231, corresponding to BINDING SITE of FIG. 27A. FIG. 27D illustrates the complementarity of the nucleotide sequence of LOC144231 BINDING SITE, designated SEQ ID:1069942, to the nucleotide sequence of GAM27 RNA of FIG. 27A, designated SEQ ID:20605. An additional function of GAM27 is therefore inhibition of (LOC144231). Accordingly, utilities of GAM27 include diagnosis and treatment of diseases and clinical conditions with which LOC144231 is associated.

[2617] Reference is now made to LOC158156 BINDING SITE. LOC158156 is a target gene of GAM27, corresponding to GAM27-TARGET GENE of FIG. 27A. LOC158156 BINDING SITE is a binding site found in an untranslated region of LOC158156, corresponding to BINDING SITE of FIG. 27A. FIG. 27D illustrates the complementarity of the nucleotide sequence of LOC158156 BINDING SITE, designated SEQ ID: 1187897, to the nucleotide sequence of GAM27 RNA of FIG. 27A, designated SEQ ID:20605. A further function of GAM27 is therefore inhibition of (LOC158156). Accordingly, utilities of GAM27 include diagnosis and treatment of diseases and clinical conditions with which LOC158156 is associated.

[2618] Reference is now made to FIG. 20625, which is a simplified diagram describing a novel bioinformatically detected viral regulatory gene, referred to here as GR1, which encodes an ‘operon-like’ cluster of novel miRNA-like genes, each modulating expression of a plurality of target host genes, the function and utility of which target genes is known in the art.

[2619] GR1 GENE (Genomic Record 1 Gene) is a novel bioinformatically detected viral regulatory, non protein coding, RNA gene. The method by which GR1 was detected is described hereinabove with reference to FIGS. 6-15.

[2620] GR1 GENE encodes an RNA molecule, typically several hundred nucleotides long, designated GR1 PRECURSOR RNA.

[2621] GR1 PRECURSOR RNA folds spatially, as illustrated by GR1 FOLDED PRECURSOR RNA, into a plurality of what is known in the art as ‘hair-pin’ structures. The nucleotide sequence of GR1 PRECURSOR RNA comprises a plurality of segments, the first half of each such segment having a nucleotide sequence which is at least a partial inversed-reversed sequence of the second half thereof, thereby causing formation of a plurality of ‘hairpin’ structures, as is well known in the art.

[2622] GR1 FOLDED PRECURSOR RNA is naturally processed by cellular enzymatic activity, into at least 2 separate hairpin shaped RNA segments, each corresponding to GAM PRECURSOR RNA, designated GAM27 PRECURSOR and GAM26 PRECURSOR respectively.

[2623] The above mentioned GAM precursors, are diced by Dicer of FIG. 8, yielding short RNA segments of about 22 nucleotides in length, each corresponding to GAM RNA of FIG. 8, designated GAM27 and GAM26 respectively.

[2624] GAM26 binds complimentarily to a binding site located in an untranslated region of GAM26-TARGET RNA, which binding site corresponds to BINDING SITE of FIG. 26A, thereby inhibiting translation of GAM26-TARGET RNA into GAM26-TARGET PROTEIN, both of FIG. 26A. The target genes of GAM26 and their respective functions, and accordingly the function and utility of GAM26 are described hereinabove with reference to FIG. 26D.

[2625] GAM27 binds complimentarily to a binding site located in an untranslated region of GAM27-TARGET RNA, which binding site corresponds to BINDING SITE of FIG. 27A, thereby inhibiting translation of GAM27-TARGET RNA into GAM27-TARGET PROTEIN, both of FIG. 27A. The target genes of GAM27 and their respective functions, and accordingly the function and utility of GAM27 are described hereinabove with reference to FIG. 27D.

[2626] Additional 27243 novel genes disclosed by the present invention are described with reference to FIGS. 28 through 20624 and 20626 through 27260, which Figs. and description thereof is enclosed in computer readable form.

[2627] It is appreciated by persons skilled in the art that the present invention is not limited by what has been particularly shown and described hereinabove. Rather the scope of the present invention includes both combinations and subcombinations of the various features described hereinabove as well as variations and modifications which would occur to persons skilled in the art upon reading the specifications and which are not in the prior art.

### BIBLIOGRAPHY

[2628] Bibliography
[2629] 1. Peytavi, R.; Hong, S. S.; Gay, B.; d'Angeac, A. D.; Selig, L.; Benichou, S.; Benarous, R.; Boulanger, P.: HEED, the product of the human homolog of the murine eed gene, binds to the matrix protein of HIV-1. J. Biol. Chem. 274: 1635-1645, 1999.
[2630] 2. Rietzler, M.; Bittner, M.; Kolanus, W.; Schuster, A.; Holzmann, B.: The human WD repeat protein WAIT-1 specifically interacts with the cytoplasmic tails of beta-7-integrins. J. Biol. Chem. 273: 27459-27466, 1998.
[2631] 3. Schumacher, A.; Lichtarge, O.; Schwartz, S.; Magnuson, T.: The murine Polycomb-group gene eed and its human orthologue: functional implications of evolutionary conservation. Genomics 54: 79-88, 1998.
[2632] 4. Sewalt, R. G. A. B.; van der Vlag, J.; Gunster, M. J.; Hamer, K. M.; den Blaauwen, J. L.; Satijn, D. P. E.; Hendrix, T.; van Driel, R.; Otte, A. P.: Characterization of interactions between the mammalian Polycomb-group proteins Enx1/EZH2 and EED suggests the existence of different mammalian Polycomb-group protein complexes. Molec. Cell. Biol. 18: 3586-3595, 1998.
[2633] 5. Wang, J.; Mager, J.; Chen, Y.; Schneider, E.; Cross, J. C.; Nagy, A.; Magnuson, T.: Imprinted X inactivation maintained by a mouse Polycomb group gene. Nature Genet. 28: 371-375, 2001.
[2634] 6. Matesic, L. E.; Yip, R.; Reuss, A. E.; Swing, D. A.; O'Sullivan, T. N.; Fletcher, C. F.; Copeland, N. G.; Jenkins, N. A.: Mutations in Mlph, encoding a member of the Rab effector family, cause the melanosome transport defects observed in leaden mice. Proc. Nat. Acad. Sci. 98: 10238-10243, 2001.
[2635] 7. Silvers, W. K.: The Coat Colors of Mice. New York: Springer, 1979.
[2636] 8. Ammar, D. A.; Eadie, D. M.; Wong, D. J.; Ma, Y.-Y.; Kolakowski, L. F., Jr.; Yang-Feng, T. L.; Thompson, D. A.: Characterization of the human type 2 neuropeptide Y receptor gene (NPY2R) and localization to the chromosome 4q region containing the type 1 neuropeptide Y receptor gene. Genomics 38: 392-398, 1996.
[2637] 9. Gerald, C.; Walker, M. W.; Vaysse, P. J.-J.; He, C.; Branchek, T. A.; Weinshank, R. L.: Expression cloning and pharmacological characterization of a human hippocampal neuropeptide Y/peptide YY Y2 receptor subtype. J. Biol. Chem. 270: 26758-26761, 1995.
[2638] 10. Lutz, C. M.; Frankel, W. N.; Richards, J. E.; Thompson, D. A.: Neuropeptide Y receptor genes on human chromosome 4q31-q32 map to conserved linkage groups on mouse chromosomes 3 and 8. Genomics 41: 498-500, 1997.
[2639] 11. Rose, P. M.; Fernandes, P.; Lynch, J. S.; Frazier, S. T.; Fisher, S. M.; Kodukula, K.; Kienzle, B.; Seethala, R.: Cloning and functional expression of a cDNA encoding a human type 2 neuropeptide Y receptor. J. Biol. Chem. 270: 22661-22664, 1995.
[2640] 12. Bertilsson, G.; Heidrich, J.; Svensson, K.; Asman, M.; Jendeberg, L.; Sydow-Backman, M.; Ohlsson, R.; Postlind, H.; Blomquist, P.; Berkenstam, A.: Identification of a human nuclear receptor defines a new signaling pathway for CYP3A induction. Proc. Nat. Acad. Sci. 95: 12208-12213, 1998.
[2641] 13. Blumberg, B.; Sabbagh, W., Jr.; Juguilon, H.; Bolado, J., Jr.; van Meter, C. M.; Ong, E. S.; Evans, R. M.: SXR, a novel steroid and xenobiotic-sensing nuclear receptor. Genes Dev. 12: 3195-3205, 1998.
[2642] 14. Lehmann, J. M.; McKee, D. D.; Watson, M. A.; Willson, T. M.; Moore, J. T.; Kliewer, S. A.: The human orphan nuclear receptor PXR is activated by compounds that regulate CYP3A4 gene expression and cause drug interactions. J. Clin. Invest. 102: 1016-1023, 1998.
[2643] 15. Synold, T. W.; Dussault, I.; Forman, B. M.: The orphan nuclear receptor SXR coordinately regulates drug metabolism and efflux. Nature Med. 7: 584-590, 2001.
[2644] 16. Watkins, R. E.; Wisely, G. B.; Moore, L. B.; Collins, J. L.; Lambert, M. H.; Williams, S. P.; Willson, T. M.; Kliewer, S. A.; Redinbo, M. R.: The human nuclear xenobiotic receptor PXR: structural determinants of directed promiscuity. Science 292: 2329-2333, 2001.
[2645] 17. Xie, W.; Barwick, J. L.; Downes, M.; Blumberg, B.; Simon, C. M.; Nelson, M. C.; Neuschwander-Tetri, B. A.; Brunt, E. M.; Guzelian, P. S.; Evans, R. M.: Humanized xenobiotic response in mice expressing nuclear receptor SXR. Nature 406: 435-439, 2000.
[2646] 18. Zhang, J.; Kuehl, P.; Green, E. D.; Touchman, J. W.; Watkins, P. B.; Daly, A.; Hall, S. D.; Maurel, P.; Relling, M.; Brimer, C.; Yasuda, K.; Wrighton, S. A.; Hancock, M.; Kim, R. B.; Strom, S.; Thummel, K.; Russell, C. G.; Hudson, J. R., Jr.; Schuetz, E. G.; Boguski, M. S.: The human pregnane X receptor: genomic structure and identification and functional characterization of natural allelic variants. Pharmacogenetics 11: 555-572, 2001.
[2647] 19. Alexander, J. M.; Bikkal, H. A.; Zervas, N. T.; Laws, E. R., Jr.; Klibanski, A.: Tumor-specific expression and alternate splicing of messenger ribonucleic acid encoding activin/transforming growth factor-beta receptors in human pituitary adenomas. J. Clin. Endocr. Metab. 81: 783-790, 1996.
[2648] 20. Roijer, E.; Miyazono, K.; Astrom, A.-K.; Geurts van Kessel, A.; ten Dijke, P.; Stenman, G.: Chromosomal localization of three human genes encoding members of the TGF-beta superfamily of type I serine/threonine kinase receptors. Mammalian Genome 9: 266-268, 1998.
[2649] 21. Su, G. H.; Bansal, R.; Murphy, K. M.; Montgomery, E.; Yeo, C. J.; Hruban, R. H.; Kern, S. E.: ACVR1B (ALK4, activin receptor type 1B) gene mutations in pancreatic carcinoma. Proc. Nat. Acad. Sci. 98: 3254-3257, 2001.
[2650] 22. ten Dijke, P.; Ichijo, H.; Franzen, P.; Schulz, P.; Saras, J.; Toyoshima, H.; Heldin, C.-H.; Miyazono, K.: Activin receptor-like kinases: a novel subclass of cell-surface receptors with predicted serine/threonine kinase activity. Oncogene 8: 2879-2887, 1993.
[2651] 23. Xu, J.; Matsuzaki, K.; McKeehan, K.; Wang, F.; Kan, M.; McKeehan, W. L.: Genomic structure and cloned cDNAs predict that four variants in the kinase domain of serine/threonine kinase receptors arise by alternative splicing and poly(A) addition. Proc. Nat. Acad. Sci. 91: 7957-7961, 1994.
[2652] 24. Zhou, Y.; Sun, H.; Danila, D.C.; Johnson, S. R.; Sigai, D. P.; Zhang, X.; Klibanski, A.: Truncated activin type I receptor Alk4 isoforms are dominant negative receptors inhibiting activin signaling. Molec. Endocr. 14: 2066-2075, 2000.
[2653] 25. Makino, K.; Kuwahara, H.; Masuko, N.; Nishiyama, Y.; Morisaki, T.; Sasaki, J.; Nakao, M.; Kuwano, A.; Nakata, M.; Ushio, Y.; Saya, H.: Cloning and characterization of NE-dlg: a novel human homolog of the Drosophila discs large (dig) tumor suppressor protein interacts with the APC protein. Oncogene 14: 2425-2433, 1997.
[2654] 26. Smith, S. A.; Holik, P.; Stevens, J.; Mazoyer, S.; Melis, R.; Williams, B.; White, R.; Albertsen, H.: Isolation of a gene (DLG3) encoding a second member of the discs-large family on chromosome 17q12-q21. Genomics 31: 145-150, 1996.
[2655] 27. Stathakis, D. G.; Lee, D.; Bryant, P. J.: DLG3, the gene encoding human neuroendocrine Dlg (NE-Dlg), is located within the 1.8-Mb dystonia-parkinsonism region at Xq13.1. Genomics 49: 310-313, 1998.
[2656] 28. Higuchi, M.; Maas, S.; Single, F. N.; Hartner, J.; Rozov, A.; Burnashev, N.; Feldmeyer, D.; Sprengel, R.; Seeburg, P. H.: Point mutation in an AMPA receptor gene rescues lethality in mice deficient in the RNA-editing enzyme ADAR2. Nature 406: 78-81, 2000.
[2657] 29. Lai, F.; Chen, C.-X.; Carter, K. C.; Nishikura, K.: Editing of glutamate receptor B subunit ion channel RNAs by four alternatively spliced DRADA2 double-stranded RNA adenosine deaminases. Molec. Cell. Biol. 17: 2413-2424, 1997.
[2658] 30. Melcher, T.; Maas, S.; Herb, A.; Sprengel, R.; Seeburg, P. H.; Higuchi, M.: A mammalian RNA editing enzyme. Nature 379: 460-463, 1996.
[2659] 31. Mittaz, L.; Scott, H. S.; Rossier, C.; Seeburg, P. H.; Higuchi, M.; Antonarakis, S. E.: Cloning of a human RNA editing deaminase (ADARB1) of glutamate receptors that maps to chromosome 21 q22.3. Genomics 41: 210-217, 1997.
[2660] 32. O'Connell, M. A.; Gerber, A.; Keller, W.: Purification of human double-stranded RNA-specific editase 1 (hRED1) involved in editing of brain glutamate receptor B pre-mRNA. J. Biol. Chem. 272: 473-478, 1997.
[2661] 33. Villard, L.; Tassone, F.; Haymowicz, M.; Welborn, R.; Gardiner, K.: Map location, genomic organization and expression patterns of the human RED1 RNA editase. Somat. Cell Molec. Genet. 23: 135-145, 1997.
[2662] 34. Yang, J.-H.; Sklar, P.; Axel, R.; Maniatis, T.: Purification and characterization of a human RNA adenosine deaminase for glutamate receptor B pre-mRNA editing. Proc. Nat. Acad. Sci. 94: 4354-4359, 1997.
[2663] 35. Benovic, J. L.; Stone, W. C.; Huebner, K.; Croce, C.; Caron, M. G.; Lefkowitz, R. J.: cDNA cloning and chromosomal localization of the human beta-adrenergic receptor kinase. FEBS Lett. 283: 122-126, 1991.
[2664] 36. Harding, V. B.; Jones, L. R.; Lefkowitz, R. J.; Koch, W. J.; Rockman, H. A.: Cardiac beta-ARK1 inhibition prolongs survival and augments beta blocker therapy in a mouse model of severe heart failure. Proc. Nat. Acad. Sci. 98: 5809-5814, 2001.
[2665] 37. Penn, R. B.; Benovic, J. L.: Structure of the human gene encoding the beta-adrenergic receptor kinase. J. Biol. Chem. 269: 14924-14930, 1994.
[2666] 38. Rockman, H. A.; Chien, K. R.; Choi, D.-J.; Iaccarino, G.; Hunter, J. J.; Ross, J., Jr.; Lefkowitz, R. J.; Koch, W. J.: Expression of a beta-adrenergic receptor kinase 1 inhibitor prevents the development of myocardial failure in gene-targeted mice. Proc. Nat. Acad. Sci. 95: 7000-7005, 1998.
[2667] 39. Spurney, R. F.; Flannery, P. J.; Garner, S.C.; Athirakul, K.; Liu, S.; Guilak, F.; Quarles, L. D.: Anabolic effects of a G protein-coupled receptor kinase inhibitor expressed in osteoblasts. J. Clin. Invest. 109: 1361-1371, 2002.
[2668] 40. Carr, D. W.; Hausken, Z. E.; Fraser, I. D.; Stofko-Hahn, R. E.; Scott, J. D: Association of the type II cAMP-dependent protein kinase with a human thyroid RII-anchoring protein: cloning and characterization of the RII-binding domain. J. Biol. Chem. 267: 13376-13382, 1992.
[2669] 41. Carr, D. W.; Stofko-Hahn, R. E.; Fraser, I. D.; Bishop, S. M.; Acott, T. S.; Brennan, R. G.; Scott, J. D.: Interaction of the regulatory subunit (RII) of cAMP-dependent protein kinase with RII-anchoring proteins occurs through an amphipathic helix binding motif. J. Biol. Chem. 266: 14188-14192, 1991.
[2670] 42. Rubino, D.; Driggers, P.; Arbit, D.; Kemp, L.; Miller, B.; Coso, O.; Pagliai, K.; Gray, K.; Gutkind, S.; Segars, J.: Characterization of Brx, a novel Dbl family member that modulates estrogen receptor action. Oncogene 16: 2513-2526, 1998.
[2671] 43. Sterpetti, P.; Hack, A. A.; Bashar, M. P.; Park, B.; Cheng, S.-D.; Knoll, J. H. M.; Urano, T.; Feig, L. A.; Toksoz, D.: Activation of the Lbc Rho exchange factor proto-oncogene by truncation of an extended C terminus that regulates transformation and targeting. Molec. Cell. Biol. 19: 1334-1345, 1999.
[2672] 44. Toksoz, D.; Williams, D. A.: Novel human oncogene 1bc detected by transfection with distinct homology regions to signal transduction products. Oncogene 9: 621-628, 1994.
[2673] 45. Maric, S.C.; Crozat, A.; Janne, O. A.: Structure and organization of the human S-adenosylmethionine decarboxylase gene. J. Biol. Chem. 267: 18915-18923, 1992.
[2674] 46. Maric, S.C.; Crozat, A.; Louhimo, J.; Knuutila, S.; Janne, O. A.: The human S-adenosylmethionine decarboxylase gene: nucleotide sequence of a pseudogene and chromosomal localization of the active gene (AMD1) and the pseudogene (AMD2). Cytogenet. Cell Genet. 70: 195-199, 1995.
[2675] 47. Pulkka, A.; Ihalainen, R.; Suorsa, A.; Riviere, M.; Szpirer, J.; Pajunen, A.: Structures and chromosomal localizations of two rat genes encoding S-adenosylmethionine decarboxylase. Genomics 16: 342-349, 1993.
[2676] 48. Radford, D. M.; Eddy, R.; Haley, L.; Henry, W. M.; Pegg, A. E.; Pajunen, A.; Shows, T. B.: Gene sequences coding for S-adenosylmethionine decarboxylase are present on human chromosome 6 and the X and are not amplified in colon neoplasia. Cytogenet. Cell Genet. 49: 285-288, 1989.
[2677] 49. Radford, D. M.; Nakai, H.; Pegg, A. E.; Shows, T. B.: Mapping genes for rate-limiting enzymes in polyamine biosynthesis. (Abstract) Am. J. Hum. Genet. 41: A35 only, 1987.
[2678] 50. Adler, M. J.; Coronel, C.; Shelton, E.; Seegmiller, J. E.; Dewji, N. N.: Increased gene expression of Alzheimer disease beta-amyloid precursor protein in senescent cultured fibroblasts. Proc. Nat. Acad. Sci. 88: 16-20, 1991.
[2679] 51. Ancolio, K.; Dumanchin, C.; Barelli, H.; Warter, J. M.; Brice, A.; Campion, D.; Frebourg, T.; Checler, F.: Unusual phenotypic alteration of beta amyloid precursor protein (beta-APP) maturation by a new val715-to-met beta-APP-770 mutation responsible for probable early-onset Alzheimer's disease. Proc. Nat. Acad. Sci. 96: 4119-4124, 1999.
[2680] 52. Baek, S. H.; Ohgi, K. A.; Rose, D. W.; Koo, E. H.; Glass, C. K.; Rosenfeld, M. G.: Exchange of N-CoR corepressor and Tip60 coactivator complexes links gene expression by NF-kappa-B and beta-amyloid precursor protein. Cell 110: 55-67, 2002.
[2681] 53. Bakker, E.; van Broeckhoven, C.; Haan, J.; Voorhoeve, E.; van Hul, W.; Levy, E.; Lieberburg, I.; Carman, M. D.; van Ommen, G. J. B.; Frangione, B.; Roos, R. A. C.: DNA diagnosis for hereditary cerebral hemorrhage with amyloidosis (Dutch type). Am. J. Hum. Genet. 49: 518-521, 1991.
[2682] 54. Balbin, M.; Abrahamson, M.; Gustafson, L.; Nilsson, K.; Brun, A.; Grubb, A.: A novel mutation in the beta-protein coding region of the amyloid beta-protein precursor (APP) gene. Hum. Genet. 89: 580-582, 1992.
[2683] 55. Bales, K. R.; Verina, T.; Cummins, D. J.; Du, Y.; Dodel, R. C.; Saura, J.; Fishman, C. E.; DeLong, C. A.; Piccardo, P.; Petegnief, V.; Ghetti, B.; Paul, S. M.: Apolipoprotein E is essential for amyloid deposition in the APP(V717F) transgenic mouse model of Alzheimer's disease. Proc. Nat. Acad. Sci. 96: 15233-15238, 1999.
[2684] 56. Blanquet, V.; Goldgaber, D.; Turleau, C.; Creau-Goldberg, N.; Delabar, J.; Sinet, P. M.; Roudier, M.; de Grouchy, J.: In situ hybridization of the beta amyloid protein (APP) cDNA to the vicinity of the interface of 21q21 and q22 in normal and Alzheimer's disease individuals. (Abstract) Cytogenet. Cell Genet. 46: 582 only, 1987.
[2685] 57. Bucciantini, M.; Giannoni, E.; Chiti, F.; Baroni, F.; Formigli, L.; Zurdo, J.; Taddei, N.; Ramponi, G.; Dobson, C. M.; Stefani, M.: Inherent toxicity of aggregates implies a common mechanism for protein misfolding diseases. Nature 416: 507-511, 2002.
[2686] 58. Calhoun, M. E.; Wiederhold, K.-H.; Abramowski, D.; Phinney, A. L.; Probst, A.; Sturchler-Pierrat, C.; Staufenbiel, M.; Sommer, B.; Jucker, M.: Neuron loss in APP transgenic mice. Nature 395: 765-766, 1998.
[2687] 59. Campion, D.; Dumanchin, C.; Hannequin, D.; Dubois, B.; Belliard, S.; Puel, M.; Thomas-Anterion, C.; Michon, A.; Martin, C.; Charbonnier, F.; Raux, G.; Camuzat, A.; Penet, C.; Mesnage, V.; Martinez, M.; Clerget-Darpoux, F.; Brice, A.; Frebourg, T.: Early-onset autosomal dominant Alzheimer disease: prevalence, genetic heterogeneity, and mutation spectrum. Am. J. Hum. Genet. 65: 664-670, 1999.
[2688] 60. Cao, X.; Sudhof, T. C.: A transcriptively active complex of APP with Fe65 and histone acetyltransferase Tip60. Science 293: 115-120, 2001.
[2689] 61. Carter, D.; Campion, D.; d'Amato, T.; Jay, M.; Brice, A.; Bellis, M.; Mallet, J.; Agid, Y.: No mutation in codon 713 of the amyloid precursor gene in schizophrenic patients. Hum. Molec. Genet. 2: 321, 1993.
[2690] 62. Carter, D. A.; Desmarais, E.; Bellis, M.; Campion, D.; Clerget-Darpoux, F.; Brice, A.; Agid, Y.; Jaillard-Serradt, A.; Mallet, J.: More missense in amyloid gene. (Letter) Nature Genet. 2: 255-256, 1992.
[2691] 63. Chartier-Harlin, M.-C.; Crawford, F.; Houlden, H.; Warren, A.; Hughes, D.; Fidani, L.; Goate, A.; Rossor, M.; Roques, P.; Hardy, J.; Mullan, M.: Early-onset Alzheimer's disease caused by mutations at codon 717 of the beta-amyloid precursor protein gene. Nature 353: 844-846, 1991.
[2692] 64. Cheng, S. V.; Nadeau, J. H.; Tanzi, R. E.; Watkins, P. C.; Sacchi, N.; Neve, R. L.; Gusella, J. F.: Synteny in man and mouse of DNA markers from the chromosomal region linked to familial Alzheimer's disease and Down syndrome. (Abstract) Am. J. Hum. Genet. 41: A161 only, 1987.
[2693] 65. Citron, M.; Oltersdorf, T.; Haass, C.; McConlogue, L.; Hung, A. Y.; Seubert, P.; Vigo-Pelfrey, C.; Lieberburg, I.; Selkoe, D. J.: Mutation of the beta-amyloid precursor protein in familial Alzheimer's disease increases beta-protein production. Nature 360: 672-674, 1992.
[2694] 66. Citron, M.; Vigo-Pelfrey, C.; Teplow, D. B.; Miller, C.; Schenk, D.; Johnston, J.; Winblad, B.; Venizelos, N.; Lannfelt, L.; Selkoe, D. J.: Excessive production of amyloid beta-protein by peripheral cells of symptomatic and presymptomatic patients carrying the Swedish familial Alzheimer disease mutation. Proc. Nat. Acad. Sci. 91: 11993-11997, 1994.
[2695] 67. Citron, M.; Westaway, D.; Xia, W.; Carlson, G.; Diehl, T.; Levesque, G.; Johnson-Wood, K.; Lee, M.; Seubert, P.; Davis, A.; Kholodenko, D.; Motter, R.; Sherrington, R.; Perry, B.; Yao, H.; Strome, R.; Lieberburg, I.; Rommens, J.; Kim. S.; Schenk, D.; Fraser, P.; St George Hyslop, P.; Selkoe, D. J.: Mutant presenilins of Alzheimer's disease increase production of 42-residue amyloid beta-protein in both transfected cells and transgenic mice. Nature Med. 3: 67-72, 1997.
[2696] 68. Coon, H.; Hoff, M.; Holik, J.; Delisi, L. E.; Crowe, T.; Freedman, R.; Shields, G.; Boccio, A. M.; Lerman, M.; Gershon, E. S.; Gejman, P. V.; Leppert, M.; Byerley, W.: C to T nucleotide substitution in codon 713 of amyloid precursor protein gene not found in 86 unrelated schizophrenics from multiplex families. Am. J. Med. Genet. 48: 36-39, 1993.
[2697] 69. Cras, P.; van Harskamp, F.; Hendriks, L.; Ceuterick, C.; van Duijn, C. M.; Stefanko, S. Z.; Hofman, A.; Kros, J. M.; Van Broeckhoven, C.; Martin, J. J.: Presenile Alzheimer dementia characterized by amyloid angiopathy and large amyloid core type senile plaques in the APP 692ala-gly mutation. Acta Neuropath. 96: 253-260, 1998.
[2698] 70. De Jonghe, C.; Esselens, C.; Kumar-Singh, S.; Craessaerts, K.; Serneels, S.; Checler, F.; Annaert, W.; Van Broeckhoven, C.; De Strooper, B.: Pathogenic APP mutations near the gamma-secretase cleavage site differentially affect A-beta secretion and APP C-terminal fragment stability. Hum. Molec. Genet. 10: 1665-1671, 2001.
[2699] 71. De Jonghe, C.; Zehr, C.; Yager, D.; Prada, C.-M.; Younkin, S.; Hendriks, L.; Van Broeckhoven, C.; Eckman, C. B.: Flemish and Dutch mutations in amyloid beta precursor protein have different effects on amyloid beta secretion. Neurobiol. Dis. 5: 281-286, 1998.
[2700] 72. Delabar, J.-M.; Goldgaber, D.; Lamour, Y.; Nicole, A.; Huret, J.-L.; de Grouchy, J.; Brown, P.; Gajdusek, D.C.; Sinet, P.-M.: Beta-amyloid gene duplication in Alzheimer's disease and karyotypically normal Down syndrome. Science 235: 1390-1392, 1987.
[2701] 73. DeMattos, R. B.; Bales, K. R.; Cummins, D. J.; Paul, S. M.; Holtzman, D. M.: Brain to plasma amyloid-beta efflux: a measure of brain amyloid burden in a mouse model of Alzheimer's disease. Science 295: 2264-2267, 2002.
[2702] 74. Di Luca, M.; Pastorino, L.; Bianchetti, A.; Perez, J.; Vignolo, L. A.; Lenzi, G. L.; Trabucchi, M.; Cattabeni, F.; Padovani, A.: Differential level of platelet amyloid beta precursor protein isoforms: an early marker for Alzheimer disease. Arch. Neurol. 55: 1195-1200, 1998.
[2703] 75. Dineley, K. T.; Xia, X.; Bui, D.; Sweatt, J. D.; Zheng, H.: Accelerated plaque accumulation, associative learning deficits, and up-regulation of alpha-7 nicotinic receptor protein in transgenic mice co-expressing mutant human presenilin 1 and amyloid precursor proteins. J. Biol. Chem. 277: 22768-22780, 2002.
[2704] 76. Dodart, J.-C.; Bales, K. R.; Gannon, K. S.; Greene, S. J.; DeMattos, R. B.; Mathis, C.; DeLong, C. A.; Wu, S.; Wu, X.; Holtzman, D. M.; Paul, S. M.: Immunization reverses memory deficits without reducing brain A-beta burden in Alzheimer's disease model. Nature Neurosci. 5: 452-457, 2002.
[2705] 77. Duff, K.; Eckman, C.; Zehr, C.; Yu, X; Prada, C.-M.; Perez-tur, J.; Hutton, M.; Buee, L.; Harigaya, Y.; Yager, D.; Morgan, D.; Gordon, M. N.; Holcomb, L.; Refolo, L.; Zenk, B.; Hardy, J.; Youndkin, S.: Increased amyloid-beta-42(43) in brains of mice expressing mutant presenilin 1. Nature 383: 710-713, 1996.
[2706] 78. Eckman, C. B.; Mehta, N. D.; Crook, R.; Perez-tur, J.; Prihar, G.; Pfeiffer, E.; Graff-Radford, N.; Hinder, P.; Yager, D.; Zenk, B.; Refolo, L. M.; Prada, C. M.; Younkin, S. G.; Hutton, M.; Hardy, J.: A new pathogenic mutation in the APP gene (1716V) increases the relative proportion of A-beta-42(43). Hum. Molec. Genet. 6: 2087-2089, 1997.
[2707] 79. Farlow, M.; Murrell, J.; Ghetti, B.; Unverzagt, F.; Zeldenrust, S.; Benson, M.: Clinical characteristics in a kindred with early-onset Alzheimer's disease and their linkage to a G-to-T change at position 2149 of the amyloid precursor protein gene. Neurology 44: 105-111, 1994.
[2708] 80. Fernandez-Madrid, I.; Levy, E.; Marder, K.; Frangione, B.: Codon 618 variant of Alzheimer amyloid gene associated with inherited cerebral hemorrhage. Ann. Neurol. 30: 730-733, 1991.
[2709] 81. Games, D.; Adams, D.; Alessandrini, R.; Barbour, R.; Berthelette, P.; Blackwell, C.; Carr, T.; Clemens, J.; Donaldson, T.; Gillespie, F.; Guido, T.; Hagoplan, S.; and 22 others: Alzheimer-type neuropathology in transgenic mice overexpressing V717F beta-amyloid precursor protein. Nature 373: 523-527, 1995.
[2710] 82. Gervais, F. G.; Xu, D.; Robertson, G. S.; Vaillancourt, J. P.; Zhu, Y.; Huang, J.; LeBlanc, A.; Smith, D.; Rigby, M.; Shearman, M. S.; Clarke, E. E.; Zheng, H.; Van Der Ploeg, L. H. T.; Ruffolo, S.C.; Thornberry, N. A.; Xanthoudakis, S.; Zamboni, R. J.; Roy, S.; Nicholson, D. W.: Involvement of caspases in proteolytic cleavage of Alzheimer's amyloid-beta precursor protein and amyloidogenic A-beta peptide formation. Cell 97: 395-406, 1999.
[2711] 83. Goate, A.; Chartier-Harlin, M.-C.; Mullan, M.; Brown, J.; Crawford, F.; Fidani, L.; Giuffra, L.; Haynes, A.; Irving, N.; James, L.; Mant, R.; Newton, P.; Rooke, K.; Roques, P.; Talbot, C.; Pericak-Vance, M.; Roses, A.; Williamson, R.; Rossor, M.; Owen, M.; Hardy, J.: Segregation of a missense mutation in the amyloid precursor protein gene with familial Alzheimer's disease. Nature 349: 704-706, 1991.
[2712] 84. Gotz, J.; Chen, F.; van Dorpe, J.; Nitsch, R. M.: Formation of neurofibrillary tangles in P301L tau transgenic mice induced by A-beta42 fibrils. Science 293: 1491-1495, 2001.
[2713] 85. Grabowski, T. J.; Cho, H. S.; Vonsattel, J. P. G.; Rebeck, G. W.; Greenberg, S. M.: Novel amyloid precursor protein mutation in an Iowa family with dementia and severe cerebral amyloid angiopathy. Ann. Neurol. 49: 697-705, 2001.
[2714] 86. Graffagnino, C.; Herbstreith, M. H.; Roses, A. D.; Alberts, M. J.: A molecular genetic study of intracerebral hemorrhage. Arch. Neurol. 51: 981-984, 1994.
[2715] 87. Haan, J.; Lanser, J. B. K.; Zijderveld, I.; van der Does, I. G. F.; Roos, R. A. C.: Dementia in hereditary cerebral hemorrhage with amyloidosis—Dutch type. Arch. Neurol. 47: 965-967, 1990.
[2716] 88. Haass, C.; Lemere, C. A.; Capell, A.; Citron, M.; Seubert, P.; Schenk, D.; Lannfelt, L.; Selkoe, D. J.: The Swedish mutation causes early-onset Alzheimer's disease by beta-secretase cleavage within the secretory pathway. Nature Med. 1: 1291-1296, 1995.
[2717] 89. Hendriks, L.; van Duijn, C. M.; Cras, P.; Cruts, M.; Van Hul, W.; van Harskamp, F.; Warren, A.; McInnis, M. G.; Antonarakis, S. E.; Martin, J.-J.; Hofman, A.; Van Broeckhoven, C.: Presenile dementia and cerebral haemorrhage linked to a mutation at codon 692 of the beta-amyloid precursor protein gene. Nature Genet. 1: 218-221, 1992.
[2718] 90. Hsiao, K.; Chapman, P.; Nilsen, S.; Eckman, C.; Harigaya, Y.; Younkin, S.; Yang, F.; Cole, G.: Correlative memory deficits, A-beta elevation, and amyloid plaques in transgenic mice. Science 274: 99-103, 1996.
[2719] 91. Janus, C.; Pearson, J.; McLaurin, J.; Mathews, P. M.; Jiang, Y.; Schrmidt, S. D.; Chishti, M. A.; Home, P.; Heslin, D.; French, J.; Mount, H. T. J.; Nixon, R. A.; Mercken, M.; Bergeron, C.; Fraser, P. E.; St George-Hyslop, P.; Westaway, D.: A-beta peptide immunization reduces behavioural impairment and plaques in a model of Alzheimer's disease. Nature 408: 979-982, 2000.
[2720] 92. Jarrett, J. T.; Berger, E. P.; Lansbury, P. T.: The carboxy terminus of the beta amyloid protein is critical for the seeding of amyloid formation: implications for the pathogenesis of Alzheimer's disease. Biochemistry 32: 4693-4697, 1993.
[2721] 93. Jenkins, E. C.; Devine-Gage, E. A.; Robakis, N. K.; Yao, X.-L.; Brown, W. T.; Houck, G. E., Jr.; Wolfe, G.; Ramakrishna, N.; Silverman, W. P.; Wisniewski, H. M.: Fine mapping of an Alzheimer disease-associated gene encoding beta-amyloid protein. Biochem. Biophys. Res. Commun. 151: 1-8, 1988.
[2722] 94. Jones, C. T.; Morris, S.; Yates, C. M.; Moffoot, A.; Sharpe, C.; Brock, D. J. H.; St. Clair, D.: Mutation in codon 713 of the beta amyloid precursor protein gene presenting with schizophrenia. Nature Genet. 1: 306-309, 1992.
[2723] 95. Kamal, A.; Almenar-Queralt, A.; LeBlanc, J. F.; Roberts, E. A.; Goldstein, L. S. B.: Kinesin-mediated axonal transport of a membrane compartment containing beta-secretase and presenilin-1 requires APP. Nature 414: 643-648, 2001.
[2724] 96. Kamal, A.; Stokin, G. B.; Yang, Z.; Xia, C.-H.; Goldstein, L. S.: Axonal transport of amyloid precursor protein is mediated by direct binding to the kinesin light chain subunit of kinesin-1. Neuron 28: 449-459, 2000.
[2725] 97. Kamino, K.; Orr, H. T.; Payami, H.; Wijsman, E. M.; Alonso, M. E.; Pulst, S. M.; Anderson, L.; O'dahl, S.; Nemens, E.; White, J. A.; Sadovnick, A. D.; Ball, M. J.; Kaye, J.; Warren, A.; McInnis, M.; Antonarakis, S. E.; Korenberg, J. R.; Sharma, V.; Kukull, W.; Larson, E.; Heston, L. L.; Martin, G. M.; Bird, T. D.; Schellenberg, G. D.: Linkage and mutational analysis of familial Alzheimer disease kindreds for the APP gene region. Am. J. Hum. Genet. 51: 998-1014, 1992.
[2726] 98. Kaneko, I.; Yamada, N.; Sakuraba, Y.; Kamenosono, M.; Tutumi, S.: Suppression of mitochondrial succinate dehydrogenase, a primary target of beta-amyloid, and its derivative racemized at ser residue. J. Neurochem. 65: 2585-2593, 1995.
[2727] 99. Kang, J.; Lemaire, H.-G.; Unterbeck, A.; Salbaum, J. M.; Masters, C. L.; Grzeschik, K.-H.; Multhaup, G.; Beyreuther, K.; Muller-Hill, B.: The precursor of Alzheimer's disease amyloid A4 protein resembles a cell-surface receptor. Nature 325: 733-736, 1987.
[2728] 100. Karlinsky, H.; Vaula, G.; Haines, J. L.; Ridgley, J.; Bergeron, C.; Mortilla, M.; Tupler, R. G.; Percy, M. E.; Robitaille, Y.; Noldy, N. E.; Yip, T. C. K.; Tanzi, R. E.; Gusella, J. F.; Becker, R.; Berg, J. M.; Crapper McLachlan, D. R.; St. George-Hyslop, P. H.: Molecular and prospective phenotypic characterization of a pedigree with familial Alzheimer's disease and a missense mutation in codon 717 of the beta-amyloid precursor protein gene. Neurology 42: 1445-1453, 1992.
[2729] 101. Korenberg, J. R.; Pulst, S.-M.; Neve, R. L.; West, R.: The Alzheimer amyloid precursor protein maps to human chromosome 21 bands q21.105-q21.05. Genomics 5: 124-127, 1989.
[2730] 102. Kumar-Singh, S.; De Jonghe, C.; Cruts, M.; Kleinert, R.; Wang, R.; Mercken, M.; De Strooper, B.; Vanderstichele, H.; Lofgren, A.; Vanderhoeven, I.; Backhovens, H.; Vanmechelen, E.; Kroisel, P. M.; Van Broeckhoven, C.: Nonfibrillar diffuse amyloid deposition due to a gamma-42-secretase site mutation points to an essential role for N-truncated A-beta-42 in Alzheimer's disease. Hum. Molec. Genet. 9: 2589-2598, 2000.
[2731] 103. Lashuel, H. A.; Hartley, D.; Petre, B. M.; Walz, T.; Lansbury, P. T., Jr.: Amyloid pores from pathogenic mutations. Nature 418: 291 only, 2002.
[2732] 104. Levy, E.; Carman, M. D.; Fernandez-Madrid, I. J.; Power, M. D.; Lieberburg, I.; van Duinen, S. G.; Bots, G. T. A. M.; Luyendijk, W.; Frangione, B.: Mutation of the Alzheimer's disease amyloid gene in hereditary cerebral hemorrhage, Dutch type. Science 248: 1124-1126, 1990.
[2733] 105. Lewis, J.; Dickson, D. W.; Lin, W.-L.; Chisholm, L.; Corral, A.; Jones, G.; Yen, S.-H.; Sahara, N.; Skipper, L.; Yager, D.; Eckman, C.; Hardy, J.; Hutton, M.; McGowan, E.: Enhanced neurofibrillary degeneration in transgenic mice expressing mutant tau and APP. Science 293: 1487-1491, 2001.
[2734] 106. Lorenzo, A.; Yuan, M.; Zhang, Z.; Paganetti, P. A.; Sturchler-Pierrat, C.; Staufenbiel, M.; Mautino, J.; Vigo, F. S.; Sommer, B.; Yankner, B. A.: Amyloid beta interacts with the amyloid precursor protein: a potential toxic mechanism in Alzheimer's disease. Nature Neurosci. 3: 460-464, 2000.
[2735] 107. Lovett, M.; Goldgaber, D.; Ashley, P.; Cox, D. R.; Gajdusek, D. C.; Epstein, C. J.: The mouse homolog of the human amyloid beta protein (AD-AP) gene is located on the distal end of mouse chromosome 16: further extension of the homology between human chromosome 21 and mouse chromosome 16. Biochem. Biophys. Res. Commun. 144: 1069-1075, 1987.
[2736] 108. Luyendijk, W.; Bots, G. T. A. M.: Hereditary cerebral haemorrhage. (Letter) Scand. J. Clin. Lab. Invest. 46: 391 only, 1986.
[2737] 109. Luyendijk, W.; Bots, G. T. A. M.; Vegter-van der Vlis, M.; Went, L. N.; Frangione, B.: Hereditary cerebral haemorrhage caused by cortical amyloid angiopathy. J. Neurol. Sci. 85: 267-280, 1988.
[2738] 110. Majocha, R. E.; Benes, F. M.; Reifel, J. L.; Rodenrys, A. M.; Marotta, C. A.: Laminar-specific distribution and infrastructural detail of amyloid in the Alzheimer disease cortex visualized by computer-enhanced imaging of epitopes recognized by monoclonal antibodies. Proc. Nat. Acad. Sci. 85: 6182-6186, 1988.
[2739] 111. Mant, R.; Asherson, P.; Gill, M.; McGuffin, P.; Owen, M.: Schizophrenia scepticism. (Letter) Nature Genet. 2: 12 only, 1992.
[2740] 112. Maruyama, K.; Tomita, T.; Shinozaki, K.; Kume, H.; Asada, H.; Saido, T. C.; Ishiura, S.; Iwatsubo, T.; Obata, K.: Familial Alzheimer's disease-linked mutations at val717 of amyloid precursor protein are specific for the increased secretion of A-beta-42(43). Biochem. Biophys. Res. Commun. 227: 730-735, 1996.
[2741] 113. Masters, C. L.; Simms, G.; Weinman, N. A.; Multhaup, G.; McDonald, B. L.; Beyreuther, K.: Amyloid plaque core protein in Alzheimer disease and Down syndrome. Proc. Nat. Acad. Sci. 82: 4245-4249, 1985.
[2742] 114. Meziane, H.; Dodart, J.-C.; Mathis, C.; Little, S.; Clemens, J.; Paul, S. M.; Ungerer, A.: Memory-enhancing effects of secreted forms of the beta-amyloid precursor protein in normal and amnestic mice. Proc. Nat. Acad. Sci. 95: 12683-12688, 1998.
[2743] 115. Miravalle, L.; Tokuda, T.; Chiarle, R.; Giaccone, G.; Bugiani, O.; Tagliavini, F.; Frangione, B.; Ghiso, J.: Substitutions at codon 22 of Alzheimer's A-beta peptide induce diverse conformational changes and apoptotic effects in human cerebral endothelial cells. J. Biol. Chem. 275: 27110-27116, 2000.
[2744] 116. Morgan, D.; Diamond, D. M.; Gottschall, P. E.; Ugen, K. E.; Dickey, C.; Hardy, J.; Duff, K.; Jantzen, P.; DiCarlo, G.; Wilcock, D.; Connor, K.; Hatcher, J.; Hope, C.; Gordon, M.; Arendash, G. W.: A-beta peptide vaccination prevents memory loss in an animal model of Alzheimer's disease. Nature 408: 982-985, 2000.
[2745] 117. Morgan, D.; Diamond, D. M.; Gottschall, P. E.; Ugen, K. E.; Dickey, C.; Hardy, J.; Duff, K.; Jantzen, P.; DiCarlo, G.; Wilcock, D.; Connor, K.; Hatcher, J.; Hope, C.; Gordon, M.; Arendash, G. W.: A-beta peptide vaccination prevents memory loss in an animal model of Alzheimer's disease. Nature 408: 982-985, 2000. Note: Erratum Nature 412: 660 only, 2001.
[2746] 118. Mullan, M.; Crawford, F.; Axelman, K.; Houlden, H.; Lilius, L.; Winblad, B.; Lannfelt, L.: Nature Genet. 1: 345-349, 1992.
[2747] 119. Mullan, M.; Crawford, F.; Axelman, K.; Houlden, H.; Lilius, L.; Winblad, B.; Lannfelt, L.: A pathogenic mutation for probable Alzheimer's disease in the APP gene at the N-terminus of beta-amyloid. Nature Genet. 1: 345-347, 1992.
[2748] 120. Multhaup, G.; Schlicksupp, A.; Hesse, L.; Beher, D.; Ruppert, T.; Masters, C. L.; Beyreuther, K.: The amyloid precursor protein of Alzheimer's disease in the reduction of copper(II) to copper (I). Science 271: 1406-1409, 1996.
[2749] 121. Murrell, J.; Farlow, M.; Ghetti, B.; Benson, M. D.: A mutation in the amyloid precursor protein associated with hereditary Alzheimer's disease. Science 254: 97-99, 1991.
[2750] 122. Naruse, S.; Igarashi, S.; Kobayashi, H.; Aoki, K.; Inuzuka, T.; Kaneko, K.; Shimizu, T.; Iihara, K.; Kojima, T.; Miyatake, T.; Tsuji, S.: Mis-sense mutation val-to-ile in exon 17 of amyloid precursor protein gene in Japanese familial Alzheimer's disease. (Letter) Lancet 337: 978-979, 1991.
[2751] 123. Natte, R.; Maat-Schieman, M. L. C.; Haan, J.; Bornebroek, M.; Roos, R. A. C.; van Duinen, S. G.: Dementia in hereditary cerebral hemorrhage with amyloidosis-Dutch type is associated with cerebral amyloid angiopathy but is independent of plaques and neurofibrillary tangles. Ann. Neurol. 50: 765-772, 2001.
[2752] 124. Olson, J. M.; Goddard, K. A. B.; Dudek, D. M.: A second locus for very-late-onset Alzheimer disease: a genome scan reveals linkage to 20p and epistasis between 20p and the amyloid precursor protein region. Am. J. Hum. Genet. 71: 154-161, 2002.
[2753] 125. Olson, J. M.; Goddard, K. A. B.; Dudek, D. M.: The amyloid precursor protein locus and very-late-onset Alzheimer disease. Am. J. Hum. Genet. 69: 895-899, 2001.
[2754] 126. Patterson, D.; Gardiner, K.; Kao, F.-T.; Tanzi, R.; Watkins, P.; Gusella, J. F.: Mapping of the gene encoding the beta-amyloid precursor protein and its relationship to the Down syndrome region of chromosome 21. Proc. Nat. Acad. Sci. 85: 8266-8270, 1988.
[2755] 127. Peacock, M. L.; Murman, D. L.; Sima, A. A. F.; Warren, J. T., Jr.; Roses, A. D.; Fink, J. K.: Novel amyloid precursor protein gene mutation (codon 665asp) in a patient with late-onset Alzheimer disease. Ann. Neurol. 35: 432-438, 1994.
[2756] 128. Prelli, F.; Levy, E.; van Duinen, S. G.; Bots, G. T. A. M.; Luyendijk, W.; Frangione, B.: Expression of a normal and variant Alzheimer's beta-protein gene in amyloid of hereditary cerebral hemorrhage, Dutch type: DNA and protein diagnostic assays. Biochem. Biophys. Res. Commun. 170: 301-307, 1990.
[2757] 129. Robakis, N. K.; Ramakrishna, N.; Wolfe, G.; Wisniewski, H. M.: Molecular cloning and characterization of a cDNA encoding the cerebrovascular and the neuritic plaque amyloid peptides. Proc. Nat. Acad. Sci. 84: 4190-4194, 1987.
[2758] 130. Robakis, N. K.; Wisniewski, H. M.; Jenkins, E. C.; Devine-Gage, E. A.; Houck, G. E.; Yao, X.-L.; Ramakrishna, N.; Wolfe, G.; Silverman, W. P.; Brown, W. T.: Chromosome 21q21 sublocalisation of gene encoding beta-amyloid peptide in cerebral vessels and neuritic (senile) plaques of people with Alzheimer disease and Down syndrome. (Letter) Lancet I: 384-385, 1987.
[2759] 131. Sandbrink, R.; Masters, C. L.; Beyreuther, K.: Beta A4-amyloid protein precursor mRNA isoforms without exon 15 are ubiquitously expressed in rat tissues including brain, but not in neurons. J. Biol. Chem. 269: 1510-1517, 1994.
[2760] 132. Schellenberg, G. D.; Anderson, L.; O'dahl, S.; Wisjman, E. M.; Sadovnick, A. D.; Ball, M. J.; Larson, E. B.; Kukull, W. A.; Martin, G. M.; Roses, A. D.; Bird, T. D.: APP(717), APP(693), and PRIP gene mutations are rare in Alzheimer disease. Am. J. Hum. Genet. 49: 511-517, 1991.
[2761] 133. Schenk, D.; Barbour, R.; Dunn, W.; Gordon, G.; Grajeda, H.; Guido, T.; Hu, K.; Huang, J.; Johnson-Wood, K.; Khan, K.; Kholodenko, D.; Lee, M.; and 13 others: Immunization with amyloid-beta attenuates Alzheimer-disease-like pathology in the PDAPP mouse. Nature 400: 173-177, 1999.
[2762] 134. Schmaier, A. H.; Dahl, L. D.; Rozemuller, A. J. M.; Roos, R. A. C.; Wagner, S. L.; Chung, R.; Van Nostrand, W. E.: Protease nexin-2/amyloid-beta protein precursor: a tight-binding inhibitor of coagulation factor IXa. J. Clin. Invest. 92: 2540-2545, 1993.
[2763] 135. Senior, K.: Alzheimer's and prion disease: do they share a pathogenic mechanism? Lancet 355: 1434 only, 2000.
[2764] 136. Sisodia, S. S.; Gallagher, M.: A role for the beta-amyloid precursor protein in memory? Proc. Nat. Acad. Sci. 95: 12074-12076, 1998.
[2765] 137. Smith, R. P.; Higuchi, D. A.; Broze, G. J., Jr.: Platelet coagulation factor XI(a)-inhibitor: a form of Alzheimer amyloid precursor protein. Science 248: 1126-1128, 1990.
[2766] 138. St. George-Hyslop, P.; Crapper McLachlan, D.; Tuda, T.; Rogaev, E.: Alzheimer's disease and possible gene interaction. (Letter) Science 263: 537 only, 1994.
[2767] 139. Sturchler-Pierrat, C.; Abramowski, D.; Duke, M.; Wiederhold, K.-H.; Mistl, C.; Rothacher, S.; Ledermann, B.; Burki, K.; Frey, P.; Paganetti, P. A.; Waridel, C.; Calhoun, M. E.; Jucker, M.; Probst, A.; Staufenbiel, M.; Sommer, B.: Two amyloid precursor protein transgenic mouse models with Alzheimer disease-like pathology. Proc. Nat. Acad. Sci. 94: 13287-13292, 1997.
[2768] 140. Sugarman, M. C.; Yamasaki, T. R.; Oddo, S.; Echegoyen, J. C.; Murphy, M. P.; Golde, T. E.; Jannatipour, M.; Leissring, M. A.; LaFerla, F. M.: Inclusion body myositis-like phenotype induced by transgenic overexpression of beta-APP in skeletal muscle. Proc. Nat. Acad. Sci. 99: 6334-6339, 2002.
[2769] 141. Suzuki, N.; Cheung, T. T.; Cai, X.-D.; Odaka, A.; Otvos, L., Jr.; Eckman, C.; Golde, T. E.; Younkin, S. G.: An increased percentage of long amyloid beta protein secreted by familial amyloid beta protein precursor (beta-APP-717) mutants. Science 264: 1336-1340, 1994.
[2770] 142. Tang, M. X.; Jacobs, D.; Stem, Y.; Marder, K.; Schofield, P.; Gurland, B.; Andrews, H.; Mayeux, R.: Effect of oestrogen during menopause on risk and age of onset of Alzheimer's disease. Lancet 348: 429-432, 1996.
[2771] 143. Tanzi, R.; St. George-Hyslop, P.; Haines, J.; Neve, R.; Polinsky, R.; Conneally, P. M.; Gusella, J. F.: Genetic linkage analysis of the Alzheimer's associated amyloid beta protein gene with familial Alzheimer's disease and chromosome 21. (Abstract) Cytogenet. Cell Genet. 46: 703 only, 1987.
[2772] 144. Tanzi, R. E.; Bird, E. D.; Latt, S. A.; Neve, R. L.: The amyloid beta protein gene is not duplicated in brains from patients with Alzheimer's disease. Science 238: 666-669, 1987.
[2773] 145. Tanzi, R. E.; St. George-Hyslop, P. H.; Haines, J. L.; Polinsky, R. J.; Nee, L.; Foncin, J.-F.; Neve, R. L.; McClatchey, A. I.; Conneally, P. M.; Gusella, J. F.: The genetic defect in familial Alzheimer's disease is not tightly linked to the amyloid beta-protein gene. Nature 329: 156-157, 1987.
[2774] 146. Tanzi, R. E.; Vaula, G.; Romano, D. M.; Mortilla, M.; Huang, T. L.; Tupler, R. G.; Wasco, W.; Hyman, B. T.; Haines, J. L.; Jenkins, B. J.; Kalaitsidaki, M.; Warren, A. C.; McInnis, M. C.; Antonarakis, S. E.; Karlinsky, H.; Percy, M. E.; Connor, L.; Growdon, J.; Crapper-McLachlan, D. R.; Gusella, J. F.; St. George-Hyslop, P. H.: Assessment of amyloid beta-protein precursor gene mutations in a large set of familial and sporadic Alzheimer disease cases. Am. J. Hum. Genet. 51: 273-282, 1992.
[2775] 147. Van Broeckhoven, C.; Backhovens, H.; Raeymaekers, P.; Wehnert, A.; Horsthemke, B.; Beyreuther, K.; Genthe, A.; Barton, A.; Hardy, J.; Irving, N.; Williamson, R.; Vandenberghe, A.: Linkage study between the amyloid gene and familial Alzheimer disease. (Abstract) Cytogenet. Cell Genet. 46: 708 only, 1987.
[2776] 148. Van Broeckhoven, C.; Haan, J.; Bakker, E.; Hardy, J. A.; Van Hul, W.; Wehnert, A.; Vegter-Van der Vlis, M.; Roos, R. A. C.: Amyloid beta protein precursor gene and hereditary cerebral hemorrhage with amyloidosis (Dutch). Science 248: 1120-1122, 1990.
[2777] 100. van Duijn, C. M.; Hendriks, L.; Cruts, M.; Hardy, J. A.; Hofman, A.; Van Broeckhoven, C.: Amyloid precursor protein gene mutation in early-onset Alzheimer's disease. (Letter) Lancet 337: 978 only, 1991.
[2778] 101. van Duinen, S. G.; Castano, E. M.; Prelli, F.; Bots, G. T. A. B.; Luyendijk, W.; Frangione, B.: Hereditary cerebral hemorrhage with amyloidosis in patients of Dutch origin is related to Alzheimer disease. Proc. Nat. Acad. Sci. 84: 5991-5994, 1987.
[2779] 102. van Leeuwen, F. W.; de Kleijn, D. P. V.; van den Hurk, H. H.; Neubauer, A.; Sonnemans, M. A. F.; Sluijs, J. A.; Koycu, S.; Ramdjielal, R. D. J.; Salehi, A.; Martens, G. J. M.; Grosveld, F. G.; Burbach, J. P. H.; Hol, E. M.: Frameshift mutants of beta-amyloid precursor protein and ubiquitin-B in Alzheimer's and Down patients. Science 279: 242-247, 1998.
[2780] 103. Van Nostrand, W. E.; Wanger, S. L.; Suzuki, M.; Choi, B. H.; Farrow, J. S.; Geddes, J. W.; Cotman, C. W.; Cunningham, D. D.: Protease nexin-II, a potent antichymotrypsin, shows identity to amyloid beta-protein precursor. Nature 341: 546-549, 1989.
[2781] 104. Walsh, D. M.; Klyubin, I.; Fadeeva, J. V.; Cullen, W. K.; Anwyl, R.; Wolfe, M. S.; Rowan, M. J.; Selkoe, D. J.: Naturally secreted oligomers of amyloid beta protein potently inhibit hippocampal long-term potentiation in vivo. Nature 416: 535-539, 2002.
[2782] 105. Wattendorff, A. R.; Bots, G. T. A. M.; Went, L. N.; Endtz, L. J.: Familial cerebral amyloid angiopathy presenting as recurrent cerebral haemorrhage. J. Neurol. Sci. 55: 121-135, 1982.
[2783] 106. Weggen, S.; Eriksen, J. L.; Das, P.; Sagi, S. A.; Wang, R.; Pietrzik, C. U.; Findlay, K. A.; Smith, T. E.; Murphy, M. P.; Bulter, T.; Kang, D. E.; Marquez-Sterling, N.; Golde, T. E.; Koo, E. H.: A subset of NSAIDs lower amyloidogenic A-beta-42 independently of cyclooxygenase activity. Nature 414: 212-216, 2001.
[2784] 107. Wilson, C. A.; Doms, R. W.; Zheng, H.; Lee, V. M.-Y.: Presenilins are not required for A-beta-42 production in the early secretory pathway. Nature Neurosci. 5: 849-855, 2002.
[2785] 108. Wyss-Coray, T.; Lin, C.; Yan, F.; Yu, G.; Rohde, M.; McConlogue, L.; Masliah, E.; Mucke, L.: TGF-beta-1 promotes microglial amyloid-beta clearance and reduces plaque burden in transgenic mice. Nature Med. 7: 612-618, 2001.
[2786] 109. Xu, H.; Gouras, G. K.; Greenfield, J. P.; Vincent, B.; Naslund, J.; Mazzarelli, L.; Fried, G.; Jovanovic, J. N.; Seeger, M.; Relkin, N. R.; Liao, F.; Checler, F.; Buxbaum, J. D.; Chait, B. T.; Thinakaran, G.; Sisodia, S. S.; Wang, R.; Greengard, P.; Gandy, S.: Estrogen reduces neuronal generation of Alzheimer beta-amyloid peptides. Nature Med. 4: 447-451, 1998.
[2787] 110. Yamatsuji, T.; Matsui, T.; Okamoto, T.; Komatsuzaki, K.; Takeda, S.; Fukumoto, H.; Iwatsubo, T.; Suzuki, N.; Asami-Odaka, A.; Ireland, S.; Kinane, T. B.; Giambarella, U.; Nishimoto, I.: G protein-mediated neuronal DNA fragmentation induced by familial Alzheimer's disease-associated mutants of APP. Science 272: 1349-1352, 1996.
[2788] 111. Yan, S. D.; Chen, X.; Fu, J.; Chen, M.; Zhu, H.; Roher, A.; Slattery, T.; Zhao, L.; Nagashima, M.; Morser, J.; Migheli, A.; Nawroth, P.; Stern, D.; Schmidt, A. M.: RAGE and amyloid-beta peptide neurotoxicity in Alzheimer's disease. Nature 382: 685-691, 1996.
[2789] 112. Yoshikai, S.; Sasaki, H.; Doh-ura, K.; Furuya, H.; Sakaki, Y. Genomic organization of the human amyloid beta-protein precursor gene. Gene 87: 257-263, 1990.
[2790] 113. Yoshioka, K.; Miki, T.; Katsuya, T.; Ogihara, T.; Sakaki, Y.: The 717-val-to-ile substitution in amyloid precursor protein is associated with familial Alzheimer's disease regardless of ethnic groups. Biochem. Biophys. Res. Commun. 178: 1141-1146, 1991.
[2791] 114. Zabel, B. U.; Salbaum, J. M.; Multhaup, G.; Master, C. L.; Bohl, J.; Beyreuther, K.: Sublocalization of the gene for the precursor of Alzheimer's disease amyloid A4 protein on chromosome 21. (Abstract) Cytogenet. Cell Genet. 46: 725-726, 1987.
[2792] 115. Zeldenrust, S. R.; Murrell, J.; Farlow, M.; Ghetti, B.; Roses, A. D.; Benson, M. D.: RFLP analysis for APP 717 mutations associated with Alzheimer's disease. J. Med. Genet. 30: 476-478, 1993.
[2793] 149. Avner, P.; Bucan, M.; Amaud, D.; Lehrach, H.; Rapp, U.: A-raf oncogene localizes on mouse X chromosome to region some 10-17 centimorgans proximal to hypoxanthine phosphoribosyltransferase gene. Somat. Cell Molec. Genet. 13: 267-272, 1987.
[2794] 150. Beck, T. W.; Huleihel, M.; Gunnell, M.; Bonner, T. I.; Rapp, U. R.: The complete coding sequence of the human A-raf-1 oncogene and transforming activity of a human A-raf carrying retrovirus. Nucleic Acids Res. 15: 595-609, 1987.
[2795] 151. Huebner, K.; ar-Rushdi, A.; Griffin, C. A.; Isobe, M.; Kozak, C.; Emanuel, B. S.; Nagarajan, L.; Cleveland, J. L.; Bonner, T. I.; Goldsborough, M. D.; Croce, C. M.; Rapp, U.: Actively transcribed genes in the raf oncogene group, located on the X chromosome in mouse and human. Proc. Nat. Acad. Sci. 83: 3934-3938, 1986.
[2796] 152. Lee, J.-E.; Beck, T. W.; Brennscheidt, U.; DeGennaro, L. J.; Rapp, U. R.: The complete sequence and promoter activity of the human A-raf-1 gene (ARAF1). Genomics 20: 43-55, 1994.
[2797] 153. Mark, G. E.; Seeley, T. W.; Shows, T. B.; Mountz, J. D.: Pks, a raf-related sequence in humans. Proc. Nat. Acad. Sci. 83: 6312-6316, 1986.
[2798] 154. Popescu, N.C.; Mark, G. E.: Localization of the pKs gene, a raf related sequence on human chromosomes X and 7. Oncogene 4: 517-519, 1989.
[2799] 155. Conway, K. E.; McConnell, B. B.; Bowring, C. E.; Donald, C. D.; Warren, S. T.; Vertino, P. M.: TMS1, a novel proapoptotic caspase recruitment domain protein, is a target of methylation-induced gene silencing in human breast cancers. Cancer Res. 60: 6236-6242, 2000.
[2800] 156. Martinon, F.; Hofmann, K.; Tschopp, J.: The pyrin domain: a possible member of the death domain-fold family implicated in apoptosis and inflammation. Curr. Biol. 10: R118-R120, 2001.
[2801] 157. Masumoto, J.; Taniguchi, S.; Ayukawa, K.; Sarvotham, H.; Kishino, T.; Niikawa, N.; Hidaka, E.; Katsuyama, T.; Higuchi, T.; Sagara, J.: ASC, a novel 22-kDa protein, aggregates during apoptosis of human promyelocytic leukemia HL-60 cells. J. Biol. Chem. 274: 33835-33838, 1999.
[2802] 158. McConnell, B. B.; Vertino, P. M.: Activation of a caspase-9-mediated apoptotic pathway by subcellular redistribution of the novel caspase recruitment domain protein TMS1. Cancer Res. 60: 6243-6247, 2000.
[2803] 159. Stimson, K. M.; Vertino, P. M.: Methylation-mediated silencing of TMS1/ASC is accompanied by histone hypoacetylation and CpG island-localized changes in chromatin architecture. J. Biol. Chem. 277: 4951-4958, 2002.
[2804] 160. Hai, T.; Liu, F.; Coukos, W. J.; Green, M. R.: Transcription factor ATF cDNA clones: an extensive family of leucine zipper proteins able to selectively form DNA-binding heterodimers. Genes Dev. 3: 2083-2090, 1989.
[2805] 161. Karpinski, B. A.; Morle, G. D.; Huggenvik, J.; Uhler, M. D.; Leiden, J. M.: Molecular cloning of human CREB-2: an ATF/CREB transcription factor that can negatively regulate transcription from the cAMP response element. Proc. Nat. Acad. Sci. 89: 4820-4824, 1992.
[2806] 162. Tanaka, T.; Tsujimura, T.; Takeda, K.; Sugihara, A.; Maekawa, A.; Terada, N.; Yoshida, N.; Akira, S.: Targeted disruption of ATF4 discloses its essential role in the formation of eye lens fibres. Genes Cells 3: 801-810, 1998.
[2807] 163. Tsujimoto, A.; Nyunoya, H.; Morita, T.; Sato, T.; Shimotohno, K. Isolation of cDNAs for DNA-binding proteins which specifically bind to a tax-responsive enhancer element in the long terminal repeat of human T-cell leukemia virus type 1. J. Virol. 65: 1420-1426, 1991.
[2808] 164. Barnard, R.; Kelly, G.; Manzetti, S. O.; Harris, E. L.: Neither the New Zealand genetically hypertensive strain nor Dahl salt-sensitive strain has an A1079T transversion in the alpha-1 isoform of the Na(+),K(+)-ATPase gene. Hypertension 38: 786-792, 2001.
[2809] 165. Chehab, F. F.; Kan, Y. W.; Law, M. L.; Hartz, J.; Kao, F.-T.; Blostein, R.: Human placental Na+,K+-ATPase alpha subunit: cDNA cloning, tissue expression, DNA polymorphism, and chromosomal localization. Proc. Nat. Acad. Sci. 84: 7901-7905, 1987.
[2810] 166. Dahl, L. K.; Heine, M.; Tassinari, L.: Role of genetic factors in susceptibility to experimental hypertension due to chronic excess salt ingestion. Nature 194: 480-482, 1972.
[2811] 167. Dahl, L. K.; Heine, M.; Thompson, K.: Genetic influence of the kidneys on blood pressure: evidence from chronic renal homografts in rats with opposite predispositions to hypertension. Circ. Res. 40: 94-101, 1974.
[2812] 168. Glorioso, N.; Filigheddu, F.; Troffa, C.; Soro, A.; Parpaglia, P. P.; Tsikoudakis, A.; Myers, R. H.; Herrera, V. L. M.; Ruiz-Opazo, N.: Interaction of alpha-1-Na,K-ATPase and Na,K,2Cl-cotransporter genes in human essential hypertension. Hypertension 38: 204-209, 2001.
[2813] 169. Herrera, V. L. M.; Ruiz-Opazo, N.: Alteration of alpha-1 Na+,K(+)-ATPase 86R-beta(+) influx by a single amino acid substitution. Science 249: 1023-1026, 1990.
[2814] 170. Herrera, V. L. M.; Xie, H. X.; Lopez, L. V.; Schork, N.J.; Ruiz-Opazo, N.: The alpha-1 Na,K-ATPase gene is a susceptibility hypertension gene in the Dahl salt-sensitive-HSD rat. J. Clin. Invest. 102: 1102-1111, 1998.
[2815] 171. James, P. F.; Grupp, I. L.; Grupp, G.; Woo, A. L.; Askew, G. R.; Croyle, M. L.; Walsh, R. A.; Lingrel, J. B.: Identification of a specific role for the Na,K-ATPase alpha-2 isoform as a regulator of calcium in the heart. Molec. Cell 3: 555-563, 1999.
[2816] 172. Kawakami, K.; Ohta, T.; Nojima, H.; Nagano, K.: Primary structure of the alpha-subunit of human Na,K-ATPase deduced from cDNA sequence. J. Biochem. 100: 389-397, 1986.
[2817] 173. Kent, R. B.; Fallows, D. A.; Geissler, E.; Glaser, T.; Emanuel, J. R.; Lalley, P. A.; Levenson, R.; Housman, D. E.: Genes encoding alpha and beta subunits of Na,K-ATPase are located on three different chromosomes in the mouse. Proc. Nat. Acad. Sci. 84: 5369-5373, 1987.
[2818] 174. Ovchinnikov, Y. A.; Monastyrskaya, G. S.; Broude, N. E.; Allikmets, R. L.; Ushkaryov, Y. A.; Melkov, A. M.; Smirnov, Y. V.; Malyshev, I. V.; Dulubova, I. E.; Petrukhin, K. E.; Gryshin, A. V.; Sverdlov, V. E.; Kiyatkin, N. I.; Kostina, M. B.; Modyanov, N. N.; Sverdlov, E. D.: The family of human Na+,K+-ATPase genes: a partial nucleotide sequence related to the alpha-subunit. FEBS Lett. 213: 73-80, 1987.
[2819] 175. Ruiz-Opazo, N.; Barany, F.; Hirayama, K.; Herrera, V. L. M.: Confirmation of mutant alpha-1 Na,K-ATPase gene and transcript in Dahl salt-sensitive/JR rats. Hypertension 24: 260-270, 1994.
[2820] 176. Shull, M. M.; Lingrel, J. B.: Multiple genes encode the human Na+,K+-ATPase catalytic subunit. Proc. Nat. Acad. Sci. 84: 4039-4043, 1987.
[2821] 177. Sverdlov, E. D.; Broude, N. E.; Sverdlov, V. E.; Monastyrskaya, G. S.; Grishin, A. V.; Petrukhin, K. E.; Akopyanz, N. S.; Modyanov, N. N.; Ovchinnikov, Y. A.: Family of Na+,K+-ATPase genes: intra-individual tissue-specific restriction fragment length polymorphism. FEBS Lett. 221: 129-133, 1987.
[2822] 178. Yang-Feng, T. L.; Schneider, J. W.; Lindgren, V.; Shull, M. M.; Benz, E. J., Jr.; Lingrel, J. B.; Francke, U.: Chromosomal localization of human Na+,K+-ATPase alpha- and beta-subunit genes. Genomics 2: 128-138, 1988.
[2823] 179. Brandt, P.; Ibrahim, E.; Bruns, G. A. P.; Neve, R. L.: Determination of the nucleotide sequence and chromosomal localization of the ATP2B2 gene encoding human Ca(2+)-pumping ATPase isoform PMCA2. Genomics 14: 484-487, 1992.
[2824] 180. Olson, S.; Wang, M. G.; Carafoli, E.; Strehler, E. E.; McBride, O. W.: Localization of two genes encoding plasma membrane Ca(2+)-transporting ATPases to human chromosomes 1q25-32 and 12q21-23. Genomics 9: 629-641, 1991.
[2825] 181. Kozel, P. J.; Friedman, R. A.; Erway, L. C.; Yamoah, E. N.; Liu, L. H.; Riddle, T.; Duffy, J. J.; Doetschman, T.; Miller, M. L.; Cardell, E. L.; Shull, G. E.: Balance and hearing deficits in mice with a null mutation in the gene encoding plasma membrane Ca(2+)-ATPase isoform 2. J. Biol. Chem. 273: 18693-18696, 1998.
[2826] 182. Richards, F. M.; Phipps, M. E.; Latif, F.; Yao, M.; Crossey, P. A.; Foster, K.; Linehan, W. M.; Affara, N. A.; Lerman, M. I.; Zbar, B.; Ferguson-Smith, M. A.; Maher, E. R.: Mapping the von Hippel-Lindau disease tumour suppressor gene: identification of germline deletions by pulsed field gel electrophoresis. Hum. Molec. Genet. 2: 879-882, 1993.
[2827] 183. Street, V. A.; McKee-Johnson, J. W.; Fonseca, R. C.; Tempel, B. L.; Noben-Trauth, K.: Mutations in a plasma membrane Ca(2+)-ATPase gene cause deafness in deafwaddler mice. Nature Genet. 19: 390-394, 1998.
[2828] 184. Wang, M. G.; Yi, H.; Hilfiker, H.; Carafoli, E.; Strehler, E. E.; McBride, O. W.: Localization of two genes encoding plasma membrane Ca(2+)-ATPases isoforms 2 (ATP2B2) and 3 (ATP2B3) to human chromosomes 3p26-p25 and Xq28, respectively. Cytogenet. Cell Genet. 67: 41-45, 1994.
[2829] 185. Goppelt, A.; Stelzer, G.; Lottspeich, F.; Meisterernst, M.: A mechanism for repression of class II gene transcription through specific binding of NC2 to TBP-promoter complexes via heterodimeric histone fold domains. EMBO J. 15: 3105-3116, 1996.
[2830] 186. Inostroza, J. A.; Mermeistein, F. H.; Ha, I.; Lane, W. S.; Reinberg, D.: Dr1, a TATA-binding protein-associated phosphoprotein and inhibitor of class II gene transcription. Cell 70: 477-489, 1992.
[2831] 187. Kamada, K.; Shu, F.; Chen, H.; Malik, S.; Stelzer, G.; Roeder, R. G.; Meisterernst, M.; Burley, S. K.: Crystal structure of negative cofactor 2 recognizing the TBP-DNA transcription complex. Cell 106: 71-81, 2001.
[2832] 188. Kaplan, J.; Gerber, S.; Larget-Piet, D.; Rozet, J.-M.; Dollfus, H.; Dufier, J.-L.; Odent, S.; Postel-Vinay, A.; Janin, N.; Briard, M.-L.; Frezal, J.; Munnich, A.: A gene for Stargardt's disease (fundus flavimaculatus) maps to the short arm of chromosome 1. Nature Genet. 5: 308-311, 1993.
[2833] 189. Mermelstein, F.; Yeung, K.; Cao, J.; Inostroza, J. A.; Erdjument-Bromage, H.; Eagelson, K.; Landsman, D.; Levitt, P.; Tempst, P.; Reinberg, D.: Requirement of a corepressor for Dr1-mediated repression of transcription. Genes Dev. 10: 1033-1048, 1996.
[2834] 190. Purello, M.; Di Pietro, C.; Rapisarda, A.; Viola, A.; Corsaro, C.; Motta, S.; Grzeschik, K.-H.; Sichel, G.: Genomic localization of the human gene encoding Dr1, a negative modulator of transcription of class II and class III genes. Cytogenet. Cell Genet. 75: 186-189, 1996.
[2835] 191. Rozet, J.-M.; Gerber, S.; Perrault, I.; Camuzat, A.; Calvas, P.; Viegas-Pequignot, E.; Molina-Gomes, D.; Le Paslier, D.; Chumakov, I.; Munnich, A.; Kaplan, J.: Structure and physical mapping of DR1, a TATA-binding protein-associated phosphoprotein gene, to chromosome 1p22.1 and its exclusion in Stargardt disease (STGD). Genomics 36: 554-556, 1996.
[2836] 192. Willy, P. J.; Kobayashi, R.; Kadonaga, J. T.: A basal transcription factor that activates or represses transcription. Science 290: 982-984, 2000.
[2837] 193. Yeung, K.; Kim, S.; Reinberg, D.: Functional dissection of a human Dr1-DRAP1 repressor complex. Molec. Cell. Biol. 17: 36-45, 1997.
[2838] 194. Jang, W.; Weber, J. S.; Bashir, R.; Bushby, K.; Meisler, M. H.: Aup1, a novel gene on mouse chromosome 6 and human chromosome 2p13. Genomics 36: 366-368, 1996.
[2839] 195. Satterwhite, E.; Sonoki, T.; Willis, T. G.; Harder, L.; Nowak, R.; Arriola, E. L.; Liu, H.; Price, H. P.; Gesk, S.; Steinemann, D.; Schlegelberger, B.; Oscier, D. G.; Siebert, R.; Tucker, P. W.; Dyer, M. J. S.: The BCL11 gene family: involvement of BCL11A in lymphoid malignancies. Blood 98: 3413-3420, 2001.
[2840] 196. Jadayel, D. M.; Osborne, L. R.; Coignet, L. J. A.; Zani, V. J.; Tsui, L.-C.; Scherer, S. W.; Dyer, M. J. S.: The BCL7 gene family: deletion of BCL7B in Williams syndrome. Gene 224: 35-44, 1998.
[2841] 197. Meng, X.; Lu, X.; Li, Z.; Green, E. D.; Massa, H.; Trask, B. J.; Morris, C. A.; Keating, M. T.: Complete physical map of the common deletion region in Williams syndrome and identification and characterization of three novel genes. Hum. Genet. 103: 590-599, 1998.
[2842] 198. Barbany, G.; Hoglund, M.; Simonsson, B.: Complete molecular remission in chronic myelogenous leukemia after imatinib therapy. (Letter) New Eng. J. Med. 347: 539-540, 2002.
[2843] 199. Budarf, M.; Canaani, E.; Emanuel, B. S.: Linear order of the four BCR-related loci in 22q11. Genomics 3: 168-171, 1988.
[2844] 200. Castellanos, A.; Pintado, B.; Weruaga, E.; Arevalo, R.; Lopez, A.; Orfao, A.; Sanchez-Garcia, I.: A BCR-ABL(p190) fusion gene made by homologous recombination causes B-cell acute lymphoblastic leukemias in chimeric mice with independence of the endogenous bcr product. Blood 90: 2168-2174, 1997. 1. Brunning, R. D.: Philadelphia chromosome positive leukemia. Hum. Path. 11: 307-309, 1980.
[2845] 201. Chissoe, S. L.; Bodenteich, A.; Wang, Y.-F.; Wang, Y.-P.; Burian, D.; Clifton, S. W.; Crabtree, J.; Freeman, A.; Iyer, K.; Jian, L.; Ma, Y.; McLaury, H.-J.; Pan, H.-Q.; Sarhan, O. H.; Toth, S.; Wang, Z.; Zhang, G.; Heisterkamp, N.; Groffen, J.; Roe, B. A.: Sequence and analysis of the human ABL gene, the BCR gene, and regions involved in the Philadelphia chromosomal translocation. Genomics 27: 67-82, 1995.
[2846] 202. Court Brown, W. M.; Doll, R.: Mortality from cancer and other causes after radiotherapy for ankylosing spondylitis. Brit. Med. J. 2: 1327-1332, 1965.
[2847] 203. Croce, C. M.; Huebner, K.; Isobe, M.; Fainstain, E.; Lifshitz, B.; Shtivelman, E.; Canaani, E.: Mapping of four distinct BCR-related loci to chromosome region 22q11: order of BCR loci relative to chronic myclogenous leukemia and acute lymphoblastic leukemia breakpoints. Proc. Nat. Acad. Sci. 84: 7174-7178, 1987.
[2848] 204. Daley, G. Q.; Van Etten, R. A.; Baltimore, D.: Induction of chronic myelogenous leukemia in mice by the P210(bcr/abl) gene of the Philadelphia chromosome. Science 247: 824-830, 1990.
[2849] 205. de Klein, A.; Geurts van Kessel, A.; Grosveld, G.; Bartram, C. R.; Hagemeijer, A.; Bootsma, D.; Spurr, N. K.; Heisterkamp, N.; Groffen, J.; Stephenson, J. R.: A cellular oncogene is translocated to the Philadelphia chromosome in chronic myelocytic leukaemia. Nature 300: 765-767, 1982.
[2850] 206. Demiroglu, A.; Steer, E. J.; Heath, C.; Taylor, K.; Bentley, M.; Allen, S. L.; Koduru, P.; Brody, J. P.; Hawson, G.; Rodwell, R.; Doody, M.-L.; Carnicero, F.; Reiter, A.; Goldman, J. M.; Melo, J. V.; Cross, N.C. P.: The t(8;22) in chronic myeloid leukemia fuses BCR to FGFR1: transforming activity and specific inhibition of FGFR1 fusion proteins. Blood 98: 3778-3783, 2001.
[2851] 207. Diekmann, D.; Brill, S.; Garrett, M. D.; Totty, N.; Hsuan, J.; Monfries, C.; Hall, C.; Lim, L.; Hall, A.: Bcr encodes a GTPase-activating protein for p21(rac). Nature 351: 400-402, 1991.
[2852] 208. Druker, B. J.; Sawyers, C. L.; Kantarjian, H.; Resta, D. J.; Reese, S. F.; Ford, J. M.; Capdeville, R.; Talpaz, M.: Activity of a specific inhibitor of the BCR-ABL tyrosine kinase in the blast crisis of chronic myeloid leukemia and acute lymphoblastic leukemia with the Philadelphia chromosome. New Eng. J. Med. 344: 1038-1042, 2001.
[2853] 209. Druker, B. J.; Talpaz, M.; Resta, D. J.; Peng, B.; Buchdunger, E.; Ford, J. M.; Lydon, N. B.; Kantarjian, H.; Capdeville, R.; Ohno-Jones, S.; Sawyers, C. L.: Efficacy and safety of a specific inhibitor of the BCR-ABL tyrosine kinase in chronic myeloid leukemia. New Eng. J. Med. 344: 1031-1037, 2001.
[2854] 210. Emanuel, B. S.; Selden, J. R.; Wang, E.; Nowell, P. C.; Croce, C. M.: In situ hybridization and translocation breakpoint mapping. I. Non-identical 22q11 breakpoints for the t(9;22) of CML and the t(8;22) of Burkitt lymphoma. Cytogenet. Cell Genet. 38: 127-131, 1984.
[2855] 211. Erikson, J.; Griffin, C.; ar-Rushdi, A.; Valtieri, M.; Hoxie, J.; Finan, J.; Emanuel, B. S.; Rovera, G.; Nowell, P. C.; Croce, C. M.: Heterogeneity of chromosome 22 breakpoint in Philadelphia-positive (Ph+) acute lymphocytic leukemia. Proc. Nat. Acad. Sci. 83: 1807-1811, 1986.
[2856] 212. Feinberg, A. P.: Genomic imprinting and gene activation in cancer. Nature Genet. 4: 110-113, 1993.
[2857] 213. Fioretos, T.; Heisterkamp, N.; Groffen, J.: No evidence for genomic imprinting of the human BCR gene. Blood 83: 3441-3444, 1994.
[2858] 214. Fitzgerald, P. H.: Evidence that chromosome band 22q12 is concerned with cell proliferation in chronic myeloid leukemia. Hum. Genet. 33: 269-274, 1976.
[2859] 215. Ganesan, T. S.; Rassool, F.; Guo, A.-P.; Th'ng, K. H.; Dowding, C.; Hibbin, J. A.; Young, B. D.; White, H.; Kumaran, T. O.; Galton, D. A. G.; Goldman, J. M.: Rearrangement of the bcr gene in Philadelphia chromosome-negative chronic myeloid leukemia. Blood 68: 957-960, 1986.
[2860] 216. Goldman, J. M.; Melo, J. V.: Targeting the BCR-ABL tyrosine kinase in chronic myeloid leukemia. (Editorial) New Eng. J. Med. 344: 1084-1086, 2001.
[2861] 217. Gorre, M. E.; Mohammed, M.; Ellwood, K.; Hsu, N.; Paquette, R.; Rao, P. N.; Sawyers, C. L.: Clinical resistance to STI-571 cancer therapy caused by BCR-ABL gene mutation or amplification. Science 293: 876-883, 2001.
[2862] 218. Griffin, C. A.; McKeon, C.; Israel, M. A.; Gegonne, A.; Ghysdael, J.; Stehelin, D.; Douglass, E. C.; Green, A. A.; Emanuel, B. S.: Comparison of constitutional and tumor-associated 11;22 translocations: nonidentical breakpoints on chromosomes 11 and 22. Proc. Nat. Acad. Sci. 83: 6122-6126, 1986.
[2863] 219. Groffen, J.; Stephenson, J. R.; Heisterkamp, N.; de Klein, A.; Bartram, C. R.; Grosveld, G.: Philadelphia chromosomal breakpoints are clustered within a limited region, bcr, on chromosome 22. Cell 36: 93-99, 1984.
[2864] 220. Grossman, A.; Silver, R. T.; Arlin, Z.; Coleman, M.; Camposano, E.; Gascon, P.; Benn, P. A.: Fine mapping of chromosome 22 breakpoints within the breakpoint cluster region (bcr) implies a role for bcr exon 3 in determining disease duration in chronic myeloid leukemia. Am. J. Hum. Genet. 45: 729-738, 1989.
[2865] 221. Grosveld, G.; Verwoerd, T.; van Agthoven, T.; de Klein, A.; Ramachandran, K. L.; Heisterkamp, N.; Stam, K.; Groffen, J.: The chronic myelocytic cell line K562 contains a breakpoint in bcr and produces a chimeric bcr/c-abl transcript. Molec. Cell. Biol. 6: 607-616, 1986.
[2866] 222. Haas, O. A.: Are ABL and BCR imprinted? No definitive answers, but more questions. Leukemia 9: 740-745, 1995.
[2867] 223. Haas, O. A.; Argyriou-Tirita, A.; Lion, T.: Parental origin of chromosomes involved in the translocation t(9;22). Nature 359: 414-416, 1992.
[2868] 224. Hariharan, I. K.; Adams, J. M.: cDNA sequence for human bcr, the gene that translocates to the abl oncogene in chronic myeloid leukaemia. EMBO J. 6: 115-119, 1987.
[2869] 225. Heisterkamp, N.; Jenster, G.; ten Hoeve, J.; Zovich, D.; Pattengale, P. K.; Groffen, J.: Acute leukaemia in bcr/abl transgenic mice. Nature 344: 251-253, 1990.
[2870] 226. Heisterkamp, N.; Stam, K.; Groffen, J.; de Klein, A.; Grosveld, G.: Structural organization of the bcr gene and its role in the Ph-1 translocation. Nature 315: 758-761, 1985.
[2871] 227. Hermans, A.; Heisterkamp, N.; von Lindern, M.; van Baal, S.; Meijer, D.; van der Plas, D.; Wiedemann, L. M.; Groffen, J.; Bootsma, D.; Grosveld, G.: Unique fusion of bcr and c-abl genes in Philadelphia chromosome positive acute lymphoblastic leukemia. Cell 51: 33-40, 1987.
[2872] 228. Huettner, C. S.; Zhang, P.; Van Etten, R. A.; Tenen, D. G.: Reversibility of acute B-cell leukaemia induced by BCR-ABL1. Nature Genet. 24: 57-60, 2000.
[2873] 229. Jacobs, A.: Benzene and leukemia. Brit. J. Haemat. 72: 119-121, 1989.
[2874] 230. Justice, M. J.; Siracusa, L. D.; Gilbert, D. J.; Heisterkamp, N.; Groffen, J.; Chada, K.; Silan, C. M.; Copeland, N. G.; Jenkins, N. A.: A genetic linkage map of mouse chromosome 10: localization of eighteen molecular markers using a single interspecific backcross. Genetics 125: 855-866, 1990.
[2875] 231. Klein, G.: Specific chromosomal translocations and the genesis of the B-cell-derived tumors in mice and men. Cell 32: 311-315, 1983.
[2876] 232. Koeffler, H. P.; Golde, D. W.: Chronic myelogenous leukemia—new concepts. New Eng. J. Med. 304: 1201-1209 and 1269-1274, 1981.
[2877] 233. Kohno, S.-I.; Sandberg, A. A.: Chromosomes and causation of human cancer and leukemia. XXXIX. Usual and unusual findings in Ph(1)-positive CML. Cancer 46: 2227-2237, 1980.
[2878] 234. Laurent, E.; Talpaz, M.; Kantarjian, H.; Kurzrock, R.: The BCR gene and Philadelphia chromosome-positive leukemogenesis. Cancer Res. 61: 2343-2355, 2001.
[2879] 235. Lillicrap, D. A.; Sterndale, H.: Familial chronic myeloid leukaemia. (Letter) Lancet II: 699, 1984.
[2880] 236. Lim, Y.-M.; Wong, S.; Lau, G.; Witte, O. N.; Colicelli, J.: BCR/ABL inhibition by an escort/phosphatase fusion protein. Proc. Nat. Acad. Sci. 97: 12233-12238, 2000.
[2881] 237. Litz, C. E.; Copenhaver, C. M.: Paternal origin of the rearranged major breakpoint cluster region in chronic myeloid leukemia. Blood 83: 3445-3448, 1994.
[2882] 238. Maru, Y.; Witte, O. N.: The BCR gene encodes a novel serine/threonine kinase activity within a single exon. Cell 67: 459-468, 1991.
[2883] 239. Melo, J. V.; Yan, X.-H.; Diamond, J.; Goldman, J. M.: Lack of imprinting of the ABL gene. (Letter) Nature Genet. 8: 318-319, 1994.
[2884] 240. Melo, J. V.; Yan, X.-H.; Diamond, J.; Goldman, J. M.: Balanced parental contribution to the ABL component of the BCR-ABL gene in chronic myeloid leukemia. Leukemia 9: 734-745, 1995.
[2885] 241. Mes-Masson, A.-M.; McLaughlin, J.; Daley, G. Q.; Paskind, M.; Witte, O. N.: Overlapping cDNA clones define the complete coding region for the P210(c-abl) gene product associated with chronic myclogeneous leukemia cells containing the Philadelphia chromosome. Proc. Nat. Acad. Sci. 83: 9768-9772, 1986.
[2886] 242. Mills, K. I.; MacKenzie, E. D.; Birnie, G. D.: The site of the breakpoint within the bcr is a prognostic factor in Philadelphia-positive CML patients. Blood 72: 1237-1241, 1988.
[2887] 243. Mittelman, F.; Levan, G.: Clustering of aberrations to specific chromosomes in human neoplasms. III. Incidence and geographic distribution of chromosome aberrations in 856 cases. Hereditas 89: 207-232, 1978.
[2888] 244. Nowell, P. C.; Hungerford, D. A.: A minute chromosome in human chronic granulocytic leukemia. Science 132: 1497, 1960.
[2889] 245. Nowell, P. C.; Hungerford, D. A.: Chromosome studies on normal and leukemic human leukocytes. J. Nat. Cancer Inst. 25: 85-109, 1960.
[2890] 246. Olavarria, E.; Craddock, C.; Dazzi, F.; Marin, D.; Marktel, S.; Apperley, J. F.; Goldman, J. M.: Imatinib mesylate (STI571) in the treatment of relapse of chronic myeloid leukemia after allogeneic stem cell transplantation. Blood 99: 3861-3862, 2002.
[2891] 247. Pegoraro, L.; Matera, L.; Ritz, J.; Levis, A.; Palumbo, A.; Biagini, G.: Establishment of a Ph(1)-positive human cell line (BV173). J. Nat. Cancer Inst. 70: 447-451, 1983.
[2892] 248. Perrotti, D.; Cesi, V.; Trotta, R.; Guerzoni, C.; Santilli, G.; Campbell, K.; Iervolino, A.; Condorelli, F.; Gambacorti-Passerini, C.; Caligiuri, M. A.; Calabretta, B.: BCR-ABL suppresses C/EBP-alpha expression through inhibitory action of hnRNP E2. Nature Genet. 30: 48-58, 2002.
[2893] 249. Prakash, O.; Yunis, J. J.: High resolution chromosomes of the t(9;22) positive leukemias. Cancer Genet. Cytogenet. 11: 361-367, 1984.
[2894] 250. Priest, J. R.; Robison, L. L.; McKenna, R. W.; Lindquist, L. L.; Warkentin, P. I.; LeBien, T. W.; Woods, W. G.; Kersey, J. H.; Coccia, P. F.; Nesbit, M. E., Jr.: Philadelphia chromosome positive childhood acute lymphoblastic leukemia. Blood 56: 15-22, 1980.
[2895] 251. Rowley, J. D.: A new consistent chromosomal abnormality in chronic myelogenous leukemia identified by quinacrine fluorescence and Giemsa staining. Nature 243: 290-293, 1973.
[2896] 252. Rubin, C. M.; Carrino, J. J.; Dickler, M. N.; Leibowitz, D.; Smith, S. D.; Westbrook, C. A.: Heterogeneity of genomic fusion of BCR and ABL in Philadelphia chromosome-positive acute lymphoblastic leukemia. Proc. Nat. Acad. Sci. 85: 2795-2799, 1988.
[2897] 253. Saglio, G.; Storlazzi, C. T.; Giugliano, E.; Surace, C.; Anelli, L.; Rege-Cambrin, G.; Zagaria, A.; Velasco, A. J.; Heiniger, A.; Scaravaglio, P.; Gomez, A. T.; Gomez, J. R.; Archidiacono, N.; Banfi, S.; Rocchi, M.: A 76-kb duplicon maps close to the BCR gene on chromosome 22 and the ABL gene on chromosome 9: possible involvement in the genesis of the Philadelphia chromosome translocation. Proc. Nat. Acad. Sci. 99: 9882-9887, 2002.
[2898] 254. Savage, D. G.; Antman, K. H.: Imatinib mesylate—a new oral targeted therapy. New Eng. J. Med. 346: 683-693, 2002.
[2899] 255. Sawyers, C. L.: Chronic myeloid leukemia. New Eng. J. Med. 340: 1330-1340, 1999.
[2900] 256. Schaefer-Rego, K.; Dudek, H.; Popenoe, D.; Arlin, Z.; Mears, J. G.; Bank, A.; Leibowitz, D.: CML patients in blast crisis have breakpoints localized to a specific region of the BCR. Blood 70: 448-455, 1987.
[2901] 257. Shtivelman, E.; Gale, R. P.; Dreazen, O.; Berrebi, A.; Zaizov, R.; Kubonishi, I.; Miyoshi, I.; Canaani, E.: bcr-abl RNA in patients with chronic myelogenous leukemia. Blood 69: 971-973, 1987.
[2902] 258. Shtivelman, E.; Lifshitz, B.; Gale, R. P.; Canaani, E.: Fused transcript of abl and bcr genes in chronic myelogenous leukaemia. Nature 315: 550-554, 1985.
[2903] 259. Skorski, T.; Nieborowska-Skorska, M.; Nicolaides, N.C.; Szczylik, C.; Iversen, P.; Iozzo, R. V.; Zon, G.; Calabretta, B.: Suppression of Philadelphia-1 leukemia cell growth in mice by BCR-ABL antisense oligodeoxynucleotide. Proc. Nat. Acad. Sci. 91: 4504-4508, 1994.
[2904] 260. Stam, K.; Heisterkamp, N.; Grosveld, G.; de Klein, A.; Verma, R. S.; Coleman, M.; Dosik, H.; Groffen, J.: Evidence of a new chimeric bcr/c-abl mRNA in patients with chronic myelocytic leukemia and the Philadelphia chromosome. New Eng. J. Med. 313: 1429-1433, 1985.
[2905] 261. Stam, K.; Heisterkamp, N.; Reynolds, F. H., Jr.; Groffen, J.: Evidence that the phi gene encodes a 160,000-dalton phosphoprotein with associated kinase activity. Molec. Cell. Biol. 7: 1955-1960, 1987.
[2906] 262. Swan, D.C.; McBride, O. W.; Robbins, K. C.; Keithley, D. A.; Reddy, E. P.; Aaronson, S. A.: Chromosomal mapping of the simian sarcoma virus one gene analogue in human cells. Proc. Nat. Acad. Sci. 79: 4691-4695, 1982.
[2907] 263. Tanabe, T.; Kuwabara, T.; Warashina, M.; Tani, K.; Taira, K.; Asano, S.: Oncogene inactivation in a mouse model: tissue invasion by leukaemic cells is stalled by loading them with a designer ribozyme. Nature 406: 473-474, 2000.
[2908] 264. Teyssier, J. R.; Bartram, C. R.; Deville, J.; Potron, G.; Pigeon, F.: C-abl oncogene and chromosome 22 ‘bcr’ juxtaposition in chronic myelogenous leukemia. New Eng. J. Med. 312: 1393-1394, 1985.
[2909] 265. Tkachuk, D.C.; Westbrook, C. A.; Andreeff, M.; Donlon, T. A.; Cleary, M. L.; Suryanarayan, K.; Homge, M.; Redner, A.; Gray, J.; Pinkel, D.: Detection of bcr-abl fusion in chronic myelogeneous leukemia by in situ hybridization. Science 250: 559-562, 1990.
[2910] 266. Verhest, A.; Monsieur, R.: Philadelphia chromosome-positive thrombocythemia with leukemic transformation. (Letter) New Eng. J. Med. 308: 1603, 1983.
[2911] 267. Verma, R. S.; Dosik, H.: Heteromorphisms of the Philadelphia (Ph-1) chromosome in patients with chronic myelogenous leukaemia (CML). I. Classification and clinical significance. Brit. J. Haemat. 45: 215-222, 1980.
[2912] 268. Lloyd, S. L.; Sargent, C. A.; Chalmers, J.; Lim, E.; Habeebu, S. S. M.; Affara, N. A.: An X-linked zinc finger gene mapping to Xq21.1-q21.3 closely related to ZFX and ZFY: possible origins from a common ancestral gene. Nucleic Acids Res. 19: 4835-4841, 1991.
[2913] 269. Lynch, R. A.; Piper, M.; Bankier, A.; Bhugra, B.; Surti, U.; Liu, J.; Buckler, A.; Dear, P. H.; Menon, A. G.: Genomic and functional map of the chromosome 14 t(12;14) breakpoint cluster region in uterine leiomyoma. Genomics 52: 17-26, 1998.
[2914] 270. Kaname, T.; Miyauchi, T.; Kuwano, A.; Matsuda, Y.; Muramatsu, T.; Kajii, T.: Mapping basigin (BSG), a member of the immunoglobulin superfamily, to 19p13.3. Cytogenet. Cell Genet. 64: 195-197, 1993.
[2915] 271. Kanekura, T.; Miyauchi, T.; Tashiro, M.; Muramatsu, T.: Basigin, a new member of the immunoglobulin superfamily: genes in different mammalian species, glycosylation changes in the molecule from adult organs and possible variation in the N-terminal sequences. Cell Struct. Funct. 16: 23-30, 1991.
[2916] 272. Kuno, N.; Kadomatsu, K.; Fan, Q.-W.; Hagihara, M.; Senda, T.; Mizutani, S.; Muramatsu, T.: Female sterility in mice lacking the basigin gene, which encodes a transmembrane glycoprotein belonging to the immunoglobulin superfamily. FEBS Lett. 425: 191-194, 1998.
[2917] 273. Miyauchi, T.; Kanekura, T.; Yamaoka, A.; Ozawa, M.; Miyazawa, S.; Muramatsu, T.: Basigin, a new, broadly distributed member of the immunoglobulin superfamily, has strong homology with both the immunoglobulin V domain and the beta-chain of major histocompatibility complex class II antigen. J. Biochem. 107: 316-323, 1990.
[2918] 274. Miyauchi, T.; Masuzawa, Y.; Muramatsu, T.: The basigin group of the immunoglobulin superfamily: complete conservation of a segment in and around transmembrane domains of human and mouse basigin and chicken HT7 antigen. J. Biochem. 110: 770-774, 1991.
[2919] 275. Naruhashi, K.; Kadomatsu, K.; Igakura, T.; Fan, Q.-W.; Kuno, N.; Muramatsu, H.; Miyauchi, T.; Hasegawa, T.; Itoh, A.; Muramatsu, T.; Nabeshima, T.: Abnormalities of sensory and memory functions in mice lacking Bsg gene. Biochem. Biophsy. Res. Commun. 236: 733-737, 1997.
[2920] 276. Simon-Chazottes, D.; Matsubara, S.; Miyauchi, T.; Muramatsu, T.; Guenet, J.-L.: Chromosomal localization of two cell surface-associated molecules of potential importance in development: midkine (Mdk) and basigin (Bsg). Mammalian Genome 2: 269-271, 1992.
[2921] 277. Spring, F. A.; Holmes, C. H.; Simpson, K. L.; Mawby, W. J.; Mattes, M. J.; Okubo, Y.; Parsons, S. F.: The Ok(a) blood group antigen is a marker for the M6 leukocyte activation antigen, the human homolog of OX-47 antigen, basigin and neurothelin, an immunoglobulin superfamily molecule that is widely expressed in human cells and tissues. Europ. J. Immun. 27: 891-897, 1997.
[2922] 278. Gundelfinger, E.: Personal Communication. Madgeburg, FRG. Jan. 8, 1999.
[2923] 279. Hashida, H.; Goto, J.; Zhao, N.; Takahashi, N.; Hirai, M.; Kanazawa, I.; Sakaki, Y.: Cloning and mapping of ZNF231, a novel brain-specific gene encoding neuronal double zinc finger protein whose expression is enhanced in a neurodegenerative disorder, multiple system atrophy (MSA). Genomics 54: 50-58, 1998.
[2924] 280. Ishikawa, K.; Nagase, T.; Nakajima, D.; Seki, N.; Ohira, M.; Miyajima, N.; Tanaka, A.; Kotani, H.; Nomura, N.; Ohara, O.: Prediction of the coding sequences of unidentified human genes. VIII. 78 new cDNA clones from brain which code for large proteins in vitro. DNA Res. 4: 307-313, 1997.
[2925] 281. tom Dieck, S.; Sanmarti-Vila, L.; Langnaese, K.; Richter, K.; Kindler, S.; Soyke, A.; Wex, H.; Smalla, K.-H.; Kampf, U.; Franzer, J.-T.; Stumm, M.; Garner, C. C.; Gundelfinger, E. D.: Bassoon, a novel zinc-finger CAG/glutamine-repeat protein selectively localized at the active zone of presynaptic nerve terminals. J. Cell Biol. 142: 499-509, 1998.
[2926] 282. Winter, c.; tom Dieck, S.; Boeckers, T. M.; Bockmann, J.; Kampf, U.; Sanmarti-Vila, L.; Langnaese, K.; Altrock, W.; Stumm, M.; Soyke, A.; Wieacker, P.; Garner, C. C.; Gundelfinger, E. D.: The presynaptic cytomatrix protein Bassoon: sequence and chromosomal localization of the human BSN gene. Genomics 57: 389-397, 1999.
[2927] 283. Yoshida, Y.; Matsuda, S.; Ikematsu, N.; Kawamura-Tsuzuku, J.; Inazawa, J.; Umemori, H.; Yamamoto, T.: ANA, a novel member of Tob/BTG1 family, is expressed in the ventricular zone of the developing central nervous system. Oncogene 16: 2687-2693, 1998.
[2928] 284. Barbosa, M. D. F. S.; Barrat, F. J.; Tchernev, V. T.; Nguyen, Q. A.; Mishra, V. S.; Colman, S. D.; Pastural, E.; Dufourcq-Lagelouse, R.; Fischer, A.; Holcombe, R. F.; Wallace, M. R.; Brandt, S. J.; de Saint Basile, G.; Kingsmore S. F.: Identification of mutations in two major mRNA isoforms of the Chediak-Higashi syndrome gene in human and mouse. Hum. Molec. Genet. 6: 1091-1098, 1997.
[2929] 285. Barbosa, M. D. F. S.; Nguyen, Q. A.; Tchernev, V. T.; Ashley, J. A.; Detter, J. C.; Blaydes, S. M.; Brandt, S. J.; Chotai, D.; Hodgman, C.; Solari, R. C. E.; Lovett, M.; Kingsmore, S. F.: Identification of the homologous beige and Chediak-Higashi syndrome genes. Nature 382: 262-265, 1996.
[2930] 286. Barrat, F. J.; Auloge, L.; Pastural, E.; Dufourcq Lagelouse, R.; Vilmer, E.; Cant, A. J.; Weissenbach, J.; Le Paslier, D.; Fischer, A.; de Saint Basile, G.: Genetic and physical mapping of the Chediak-Higashi syndrome on chromosome 1q42-43. Am. J. Hum. Genet. 59: 625-632, 1996.
[2931] 287. Dufourcq-Lagelouse, R.; Lambert, N.; Duval, M.; Viot, G.; Vilmer, E.; Fischer, A.; Prieur, M.; de Saint Basile, G.: Chediak-Higashi syndrome associated with maternal uniparental isodisomy of chromosome 1. Europ. J. Hum. Genet. 7: 633-637, 1999.
[2932] 288. Faigle, W.; Raposo, G.; Tenza, D.; Pinet, V.; Vogt, A. B.; Kropshofer, H.; Fischer, A.; de Saint-Basile, G.; Amigorena, S.: Deficient peptide loading and MHC class II endosomal sorting in a human genetic immunodeficiency disease: the Chediak-Higashi syndrome. J. Cell Biol. 141: 1121-1134, 1998.
[2933] 289. Fukai, K.; Oh, J.; Karim, M. A.; Moore, K. J.; Kandil, H. H.; Ito, H.; Burger, J.; Spritz, R. A.: Homozygosity mapping of the gene for Chediak-Higashi syndrome to chromosome 1 q42-q44 in a segment of conserved synteny that includes the mouse beige locus (bg). Am. J. Hum. Genet. 59: 620-624, 1996.
[2934] 290. Jackson, 1. J.: Homologous pigmentation mutations in human, mouse and other model organisms. Hum. Molec. Genet. 6: 1613-1624, 1997.
[2935] 291. Jenkins, N. A.; Justice, M. J.; Gilbert, D. J.; Chu, M.-L.; Copeland, N. G.: Nidogen/entactin (Nid) maps to the proximal end of mouse chromosome 13 linked to beige (bg) and identifies a new region of homology between mouse and human chromosomes. Genomics 9: 401-403, 1991.
[2936] 292. Karim, M. A.; Nagle, D. L.; Kandil, H. H.; Burger, J.; Moore, K. J.; Spritz, R. A.: Mutations in the Chediak-Higashi syndrome gene (CHS1) indicate requirement for the complete 3801 amino acid CHS protein. Hum. Molec. Genet. 6: 1087-1089, 1997.
[2937] 293. Karim, M. A.; Suzuki, K.; Fukai, K.; Oh, J.; Nagle, D. L.; Moore, K. J.; Barbosa, E.; Falik-Borenstein, T.; Filipovich, A.; Ishida, Y. Kivrikko, S.; Klein, C.; and 8 others: Apparent genotype-phenotype correlation in childhood, adolescent, and adult Chediak-Higashi syndrome. Am. J. Med. Genet. 108: 16-22, 2002.
[2938] 294. Kunieda, T.; Ide, H.; Nakagiri, M.; Yoneda, K.; Konfortov, B.; Ogawa, H.: Localization of the locus responsible for Chediak-Higashi syndrome in cattle to bovine chromosome 28. Anim. Genet. 31: 87-90, 2000.
[2939] 295. Nagle, D. L.; Karim, M. A.; Woolf, E. A.; Holmgren, L.; Bork, P.; Misumi, D. J.; McGrail, S. H.; Dussault, B. J., Jr.; Perou, C. M.; Boissy, R. E.; Duyk, G. M.; Spritz, R. A.; Moore, K. J.: Identification and mutation analysis of the complete gene for Chediak-Higashi syndrome. Nature Genet. 14: 307-311, 1996.
[2940] 296. Perou, C. M.; Moore, K. J.; Nagle, D. L.; Misumi, D. J.; Woolf, E. A.; McGrail, S. H.; Holmgren, L.; Brody, T. H.; Dussault, B. J., Jr.; Monroe, C. A.; Duyk, G. M.; Pryor, R. J.; Li, L.; Justice, M. J.; Kaplan, J.: Identification of the murine beige gene by YAC complementation and positional cloning. Nature Genet. 13: 303-308, 1996.
[2941] 297. Halford, S.; Wilson, D. I.; Daw, S.C. M.; Roberts, C.; Wadey, R.; Kamath, S.; Wickremasinghe, A.; Burn, J.; Goodship, J.; Mattei, M.-G.; Moorman, A. F. M.; Scambler, P. J.: Isolation of a gene expressed during early embryogenesis from the region of 22q11 commonly deleted in DiGeorge syndrome. Hum. Molec. Genet. 2: 1577-1582, 1993.
[2942] 298. Lamour, V.; Lecluse, Y.; Desmaze, C.; Spector, M.; Bodescot, M.; Aurias, A.; Osley, M. A.; Lipinski, M.: A human homolog of the S. cerevisiae HIR1 and HIR2 transcriptional repressors cloned from the DiGeorge syndrome critical region. Hum. Molec. Genet. 4: 791-799, 1995.
[2943] 299. Llevadot, R.; Scambler, P.; Estivill, X.; Pritchard, M.: Genomic organization of TUPLE1/HIRA: a gene implicated in DiGeorge syndrome. Mammalian Genome 7: 911-914, 1996.
[2944] 300. Lorain, S.; Quivy, J.-P.; Monier-Gavelle, F.; Scamps, C.; Lecluse, Y.; Almouzni, G.; Lipinski, M.: Core histones and HIRIP3, a novel histone-binding protein, directly interact with WD repeat protein HIRA. Molec. Cell. Biol. 18: 5546-5556, 1998.
[2945] 301. Magnaghi, P.; Roberts, C.; Lorain, S.; Lipinski, M.; Scambler, P. J.: HIRA, a mammalian homologue of Saccharomyces cerevisiae transcriptional co-repressors, interacts with Pax3. Nature Genet. 20: 74-77, 1998.
[2946] 302. Mattei, M.-G.; Halford, S.; Scambler, P. J.: Mapping of the Tuple1 gene to mouse chromosome 16A-B1. Genomics 23: 717-718, 1994.
[2947] 303. Roberts, C.; Daw, S.C. M.; Halford, S.; Scambler, P. J.: Cloning and developmental expression analysis of chick Hira (Chira), a candidate gene for DiGeorge syndrome. Hum. Molec. Genet. 6: 237-245, 1997.
[2948] 304. Wilming, L. G.; Snoeren, C. A. S.; van Rijswijk, A.; Grosveld, F.; Meijers, C.: The murine homologue of HIRA, a DiGeorge syndrome candidate gene, is expressed in embryonic structures affected in human CATCH22 patients. Hum. Molec. Genet. 6: 247-258, 1997.
[2949] 305. Ackerman, M. J.; Clapham, D. E.: Ion channels—basic science and clinical disease. New Eng. J. Med. 336: 1575-1586, 1997.
[2950] 306. Chioza, B.; Wilkie, H.; Nashef, L.; Blower, J.; McCormick, D.; Sham, P.; Asherson, P.; Makoff, A. J.: Association between the alpha-1A calcium channel gene CACNA1A and idiopathic generalized epilepsy. Neurology 56: 1245-1246, 2001.
[2951] 307. Denier, C.; Ducros, A.; Durr, A.; Eymard, B.; Chassande, B.; Toumier-Lasserve, E.: Missense CACNA1A mutation causing episodic ataxia type 2. Arch. Neurol. 58: 292-295, 2001.
[2952] 308. Diriong, S.; Lory, P.; Williams, M. E.; Ellis, S. B.; Harpold, M. M.; Taviaux, S.: Chromosomal localization of the human genes for alpha-1A, alpha-1B, and alpha-1E voltage-dependent Ca(2+) channel subunits. Genomics 30: 605-609, 1995.
[2953] 309. Ducros, A.; Denier, C.; Joutel, A.; Cecillon, M.; Lescoat, C.; Vahedi, K.; Darcel, F.; Vicaut, E.; Bousser, M.-G.; Tournier-Lasserve, E.: The clinical spectrum of familial hemiplegic migraine associated with mutations in a neuronal calcium channel. New Eng. J. Med. 345: 17-24, 2001.
[2954] 310. Ducros, A.; Denier, C.; Joutel, A.; Vahedi, K.; Michel, A.; Darcel, F.; Madigand, M.; Guerouaou, D.; Tison, F.; Julien, J.; Hirsch, E.; Chedru, F.; Bisgard, C.; Lucotte, G.; Despres, P.; Billard, C.; Barthez, M. A.; Ponsot, G.; Bousser, M. G.; Toumier-Lasserve, E.: Recurrence of the T666M calcium channel CACNA1A gene mutation in familial hemiplegic migraine with progressive cerebellar ataxia. Am. J. Hum. Genet. 64: 89-98, 1999.
[2955] 311. Dunlap, K.; Luebke, J. I.; Turner, T. J.: Exocytotic Ca(2+) channels in mammalian central neurons. Trends Neurosci. 18: 89-98, 1995.
[2956] 312. Fletcher, C. F.; Lutz, C. M.; O'Sullivan, T. N.; Shaughnessy, J. D, Jr.; Hawkes, R.; Frankel, W. N.; Copeland, N. G.; Jenkins, N. A.: Absence epilepsy in tottering mutant mice is associated with calcium channel defects. Cell 87: 607-617, 1996.
[2957] 313. Friend, K. L.; Crimmins, D.; Phan, T. G.; Sue, C. M.; Colley, A.; Fung, V. S. C.; Morris, J. G. L.; Sutherland, G. R.; Richards, R. I.: Detection of a novel missense mutation and second recurrent mutation in the CACNA1A gene in individuals with EA-2 and FHM. Hum. Genet. 105: 261-265, 1999.
[2958] 314. Guida, S.; Trettel, F.; Pagnutti, S.; Mantuano, E.; Tottene, A.; Veneziano, L.; Fellin, T.; Spadaro, M.; Stauderman, K. A.; Williams, M. E.; Volsen, S.; Ophoff, R. A.; Frants, R. R.; Jodice, C.; Frontali, M.; Pietrobon, D.: Complete loss of P/Q calcium channel activity caused by a CACNA1A missense mutation carried by patients with episodic ataxia type 2. Am. J. Hum. Genet. 68: 759-764, 2001.
[2959] 315. Hess, E. J.: Migraines in mice? Cell 87: 1149-1151, 1996.
[2960] 316. Hoffman, E. P.; Gardner, K.: Ion channels—molecular divining rods hit their clinical mark. New Eng. J. Med. (Editorial) 336: 1599-1600, 1997.
[2961] 317. Ishikawa, K.; Tanaka, H.; Saito, M.; Ohkoshi, N.; Fujita, T.; Yoshizawa, K.; Ikeuchi, T.; Watanabe, M.; Hayashi, A.; Takiyama, Y.; Nishizawa, M.; Nakano, I.; Matsubayashi, K.; Miwa, M.; Shoji, S.; Kanazawa, I.; Tsuji, S.; Mizusawa, H.: Japanese families with autosomal dominant pure cerebellar ataxia map to chromosome 19p13.1-p13.2 and are strongly associated with mild CAG expansions in the spinocerebellar ataxia type 6 gene in chromosome 19p 13.1. Am J. Hum. Genet. 61: 336-346, 1997.
[2962] 318. Jodice, C.; Mantuano, E.; Veneziano, L.; Trettel, F.; Sabbadini, G.; Calandriello, L.; Francia, A.; Spadaro, M.; Pierelli, F.; Salvi, F.; Ophoff, R. A.; Frants, R. R.; Frontali, M.: Episodic ataxia type 2 (EA2) and spinocerebellar ataxia type 6 (SCA6) due to CAG repeat expansion in the CACNA1A gene on chromosome 19p. Hum. Molec. Genet. 6: 1973-1978, 1997.
[2963] 319. Kim, J.-S.; Yue, Q.; Jen, J. C.; Nelson, S. F.; Baloh, R. W.: Familial migraine with vertigo: no mutations found in CACNA1A. Am. J. Med. Genet. 79: 148-151, 1998.
[2964] 320. Kors, E. E.; Terwindt, G. M.; Vermeulen, F. L. M. G.; Fitzsimons, R. B.; Jardine, P. E.; Heywood, P.; Love, S.; van den Maagdenberg, A. M. J. M.; Haan, J.; Frants, R. R.; Ferrari, M. D.: Delayed cerebral edema and fatal coma after minor head trauma: role of the CACNA1A calcium channel subunuit gene and relationship with familial hemiplegic migraine. Ann. Neurol. 49: 753-760, 2001.
[2965] 321. Kraus, R. L.; Sinnegger, M. J.; Glossmann, H.; Hering, S.; Striessnig, J.: Familial hemiplegic migraine mutations change alpha(1A)Ca(2+) channel kinetics. J. Biol. Chem. 273: 5586-5590, 1998.
[2966] 322. Kraus, R. L.; Sinnegger, M. J.; Koschak, A.; Glossmann, H.; Stenirri, S.; Carrera, P.; Striessnig, J.: Three new familial hemiplegic migraine mutants affect P/Q-type Ca(2+) channel kinetics. J. Biol. Chem. 275: 9239-9243, 2000.
[2967] 323. Lehmann-Hom, F.; Jurkat-Rott, K.: Voltage-gated ion channels and hereditary disease. Physiol. Rev. 79: 1317-1372, 1999.
[2968] 324. Matsuyama, Z.; Kawakami, H.; Maruyama, H.; Izumi, Y.; Komure, O.; Udaka, F.; Kameyama, M.; Nishio, T.; Kuroda, Y.; Nishimura, M.; Nakamura, S.: Molecular features of the CAG repeats of spinocerebellar ataxia 6 (SCA6). Hum. Molec. Genet. 6: 1283-1287, 1997.
[2969] 325. Ophoff, R. A.; Terwindt, G. M.; Vergouwe, M. N.; van Eijk, R.; Oefner, P. J.; Hoffman, S. M. G.; Lamerdin, J. E.; Mohrenweiser, H. W.; Bulman, D. E.; Ferrari, M.; Haan, J.; Lindhout, D.; van Ommen, G.-J. B.; Hofker, M. H.; Ferrari, M. D.; Frants, R. R.: Familial hemiplegic migraine and episodic ataxia type-2 are caused by mutations in the Ca(2+) channel gene CACNL1A4. Cell 87: 543-552, 1996.
[2970] 326. Riess, O.; Schols, L.; Bottger, H.; Nolte, D.; Viera-Saecker, A. M. M.; Schimming, C.; Kreuz, F.; Macek, M., Jr.; Krebsova, A.; Macek, M., Sr.; Klockgether, T.; Zuhlke, C.; Laccone, F. A.: SCA6 is caused by moderate CAG expansion in the alpha(1A)-voltage-dependent calcium channel gene. Hum. Molec. Genet. 6: 1289-1293, 1997.
[2971] 327. Sasaki, H.; Kojima, H.; Yabe, I.; Tashiro, K.; Hamada, T.; Sawa, H.; Hiraga, H.; Nagashima, K.: Neuropathological and molecular studies of spinocerebellar ataxia type 6 (SCA6). Acta. Neuropath. 95: 199-204, 1998.
[2972] 328. Scoggan, K. A.; Chandra, T.; Nelson, R.; Hahn, A. F.; Bulman, D. E.: Identification of two novel mutations in the CACNA1A gene responsible for episodic ataxia type 2. (Letter) J. Med. Genet. 38: 249-253, 2001.
[2973] 329. Terwindt, G. M.; Ophoff, R. A.; Haan, J.; Frants, R. R.; Ferrari, M. D.: Familial hemiplegic migraine: a clinical comparison of families linked and unlinked to chromosome 19. Cephalalgia 16: 153-155, 1996.
[2974] 330. Thibault, O.; Landfield, P. W.: Increase in single L-type calcium channels in hippocampal neurons during aging. Science 272: 1017-1019, 1996.
[2975] 331. Toru, S.; Murakoshi, T.; Ishikawa, K.; Saegusa, H.; Fujigasaki, H.; Uchihara, T.; Nagayama, S.; Osanai, M.; Mizusawa, H.; Tanabe, T.: Spinocerebellar ataxia type 6 mutation alters P-type calcium channel function. J. Biol. Chem. 275: 10893-10898, 2000.
[2976] 332. Trettel, F.; Mantuano, E.; Calabresi, V.; Veneziano, L.; Olsen, A. S.; Georgescu, A.; Gordon, L.; Sabbadini, G.; Frontali, M.; Jodice, C.: A fine physical map of the CACNA1A gene region on 19p13.1-p13.2 chromosome. Gene 241: 45-50, 2000.
[2977] 333. Vahedi, K.; Denier, C.; Ducros, A.; Bousson, V.; Levy, C.; Chabriat, H.; Haguenau, M.; Tournier-Lasserve, E.; Bousser, M. G.: CACNA1A gene de novo mutation causing hemiplegic migraine, coma, and cerebellar atrophy. Neurology 55: 1040-1042, 2000.
[2978] 334. Yue, Q.; Jen, J. C.; Nelson, S. F.; Baloh, R. W.: Progressive ataxia due to a missense mutation in a calcium-channel gene. Am. J. Hum. Genet. 61: 1078-1087, 1997.
[2979] 335. Zhuchenko, O.; Bailey, J.; Bonnen, P.; Ashizawa, T.; Stockton, D. W.; Amos, C.; Dobyns, W. B.; Subramony, S. H.; Zoghbi, H. Y.; Lee, C. C.: Autosomal dominant cerebellar ataxia (SCA6) associated with small polyglutamine expansions in the alpha(1A)-voltage-dependent calcium channel. Nature Genet. 15: 62-69, 1997.
[2980] 336. Berchtold, M. W.; Egli, R.; Rhyner, J. A.; Hameister, H.; Strehler, E. E.: Localization of the human bona fide calmodulin genes CALM1, CALM2, and CALM3 to chromosomes 14q24-q31, 2p21.1-p21.3, and 19q13.2-q13.3. Genomics 16: 461-465, 1993.
[2981] 337. Chin, D.; Winkler, K. E.; Means, A. R.: Characterization of substrate phosphorylation and use of calmodulin mutants to address implications from the enzyme crystal structure of calmodulin-dependent protein kinase 1. J. Biol. Chem. 272: 31235-31240, 1997.
[2982] 338. Drum, C. L.; Yan, S.-Z.; Bard, J.; Shen, Y.-Q.; Lu, D.; Soelaiman, S.; Grabarek, Z.; Bohm, A.; Tang, W.-J.: Structural basis for the activation of anthrax adenylyl cyclase exotoxin by calmodulin. Nature 415: 396-402, 2002.
[2983] 339. Koller, M.; Schnyder, B.; Strehler, E. E.: Structural organization of the human CaMIII calmodulin gene. Biochim. Biophys. Acta 1087: 180-189, 1990.
[2984] 340. Kretsinger, R. H.; Rudnick, S. E.; Weissman, L. J.: Crystal structure of calmodulin. J. Inorganic Biochem. 28: 289-302, 1986.
[2985] 341. McPherson, J. D.; Hickie, R. A.; Wasmuth, J. J.; Meyskens, F. L.; Perham, R. N.; Strehler, E. E.; Graham, M. T.: Chromosomal localization of multiple genes encoding calmodulin. (Abstract) Cytogenet. Cell Genet. 58: 1951 only, 1991.
[2986] 342. Pegues, J. C.; Friedberg, F.: Multiple mRNAs encoding human calmodulin. Biochem. Biophys. Res. Commun. 172: 1145-1149, 1990.
[2987] 343. Rhyner, J. A.; Ottiger, M.; Wicki, R.; Greenwood, T. M.; Strehler, E. E.: Structure of the human CALM1 calmodulin gene and identification of two CALM1-related pseudogenes CALM1P1 and CALM1P2. Europ. J. Biochem. 225: 71-82, 1994.
[2988] 344. Scambler, P. J.; McPherson, M. A.; Bates, G.; Bradbury, N. A.; Dormer, R. L.; Williamson, R.: Biochemical and genetic exclusion of calmodulin as the site of the basic defect in cystic fibrosis. Hum. Genet. 76: 278-282, 1987.
[2989] 345. Schumacher, M. A.; Rivard, A. F.; Bachinger, H. P.; Adelman, J. P.: Structure of the gating domain of a Ca(2+)-activated K+ channel complexed with Ca(2+)/calmodulin. Nature 410: 1120-1124, 2001.
[2990] 346. Sen Gupta, B.; Detera-Wadleigh, S. D.; McBride, O. W.; Friedberg, F.: A calmodulin pseudogene on human chromosome 17. Nucleic Acids Res. 17: 2868 only, 1989.
[2991] 347. Sen Gupta, B.; Friedberg, F.; Detera-Wadleigh, S. D.: Molecular analysis of human and rat calmodulin complementary DNA clones: evidence for additional active genes in these species. J. Biol. Chem. 262: 16663-16670, 1987.
[2992] 348. Baumann, C. A.; Ribon, V.; Kanzaki, M.; Thurmond, D.C.; Mora, S.; Shigematsu, S.; Bickel, P. E.; Pessin, J. E.; Saltiel, A. R.: CAP defines a second signalling pathway required for insulin-stimulated glucose transport. Nature 407: 202-207, 2000.
[2993] 349. Joazeiro, C. A. P.; Wing, S. S.; Huang, H.; Leverson, J. D.; Hunter, T.; Liu, Y.-C.: The tyrosine kinase negative regulator c-Cbl as a RING-type, E2-dependent ubiquitin-protein ligase. Science 286: 309-312, 1999.
[2994] 350. Jones, C.; Penny, L.; Mattina, T.; Yu, S.; Baker, E.; Voullaire, L.; Langdon, W. Y.; Sutherland, G. R.; Richards, R. I.; Tunnacliffe, A.: Association of a chromosome deletion syndrome with a fragile site within the proto-oncogene CBL2. Nature 376: 145-149, 1995.
[2995] 351. Jones, C.; Slijepcevic, P.; Marsh, S.; Baker, E.; Langdon, W. Y.; Richards, R. I.; Tunnacliffe, A.: Physical linkage of the fragile site FRA11B and a Jacobsen syndrome chromosome deletion breakpoint in 11q23.3. Hum. Molec. Genet. 3: 2123-2130, 1994.
[2996] 352. Langdon, W. Y.; Hartley, J. W.; Klinken, S. P.; Ruscetti, S. K.; Morse, H. C., III: v-cbl, an oncogene from a dual-recombinant murine retrovirus that induces early B-lineage lymphomas. Proc. Nat. Acad. Sci. 86: 1168-1172, 1989.
[2997] 353. Mastick, C. C.; Brady, M. J.; Saltiel, A. R.: Insulin stimulates the tyrosine phosphorylation of caveolin. J. Cell Biol. 129: 1523-1531, 1995.
[2998] 354. Petrelli, A.; Gilestro, G. F.; Lanzardo, S.; Comoglio, P. M.; Migone, N.; Giordano, S.: The endophilin-CIN85-Cbl complex mediates ligand-dependent downregulation of c-Met. Nature 416: 187-190, 2002.
[2999] 355. Savage, P. D.; Shapiro, M.; Langdon, W. Y.; Geurts van Kessel, A. D.; Seuanez, H. N.; Akao, Y.; Croce, C.; Morse, H. C., III; Kersey, J. H.: Relationship of the human protooncogene CBL2 on 11q23 to the t(4;11), t(11;22), and t(11;14) breakpoints. Cytogenet. Cell Genet. 56: 112-115, 1991.
[3000] 356. Soubeyran, P.; Kowanetz, K.; Szymkiewicz, I.; Langdon, W. Y.; Dikic, I.: Cbl-CIN85-endophilin complex mediates ligand-induced downregulation of EGF receptors. Nature 416: 183-187, 2002.
[3001] 357. Thien, C. B. F.; Walker, F.; Langdon, W. Y.: RING finger mutations that abolish c-Cbl-directed polyubiquitination and downregulation of the EGF receptor are insufficient for cell transformation. Molec. Cell 7: 355-365, 2001.
[3002] 358. Wei, S.; Rocchi, M.; Archidiacono, N.; Sacchi, N.; Romeo, G.; Gatti, R. A.: Physical mapping of the human chromosome 11q23 region containing the ataxia-telangiectasia locus. Cancer Genet. Cytogenet. 46: 1-8, 1990.
[3003] 359. Yoon, C. H.; Lee, J.; Jongeward, G. D.; Sternberg, P. W.: Similarity of sli-1, a regulator of vulval development in C. elegans, to the mammalian proto-oncogene c-cbl. Science 269: 1102-1105, 1995.
[3004] 360. Hu, M. C.-T.; Qiu, W. R.; Wang, Y.-P.; Hill, D.; Ring, B. D.; Scully, S.; Bolon, B.; DeRose, M.; Luethy, R.; Simonet, W. S.; Arakawa, T.; Danilenko, D. M.: FGF-18, a novel member of the fibroblast growth factor family, stimulates hepatic and intestinal proliferation. Molec. Cell. Biol. 18: 6063-6074, 1998.
[3005] 361. Ohbayashi, N.; Hoshikawa, M.; Kimura, S.; Yamasaki, M.; Fukui, S.; Itoh, N.: Structure and expression of the mRNA encoding a novel fibroblast growth factor, FGF-18. J. Biol. Chem. 273: 18161-18164, 1998.
[3006] 362. Whitmore, T. E.; Maurer, M. F.; Sexson, S.; Raymond, F.; Conklin, D.; Deisher, T. A.: Assignment of fibroblast growth factor 18 (FGF18) to human chromosome 5q34 by use of radiation hybrid mapping and fluorescence in situ hybridization. Cytogenet. Cell Genet. 90: 231-233, 2000.
[3007] 363. Abitbol, M.; Menini, C.; Delezoide, A.-L.; Rhyner, T.; Vekemans, M.; Mallet, J.: Nucleus basalis magnocellularis and hippocampus are the major sites of FMR-1 expression in the human fetal brain. Nature Genet. 4: 147-153, 1993.
[3008] 364. Abrams, M. T.; Kaufmann, W. E.; Rousseau, F.; Oostra, B. A.; Wolozin, B.; Taylor, C. V.; Lishaa, N.; Morel, M.-L.; Hoogeveen, A.; Reiss, A. L.: FMR1 gene expression in olfactory neuroblasts from two males with fragile X syndrome. Am. J. Med. Genet. 82: 25-30, 1999.
[3009] 365. Allingham-Hawkins, D. J.; Babul-Hirji, R.; Chitayat, D.; Holden, J. J. A.; Yang, K. T.; Lee, C.; Hudson, R.; Gorwill, H.; Nolin, S. L.; Glicksman, A.; Jenkins, E. C.; Brown, W. T.; and 27 others: Fragile X premutation is a significant risk factor for premature ovarian failure: the international collaborative POF in fragile X study—preliminary data. Am. J. Med. Genet. 83: 322-325, 1999.
[3010] 366. Ashley, C. T.; Sutcliffe, J. S.; Kunst, C. B.; Leiner, H. A.; Eichler, E. E.; Nelson, D. L.; Warren, S. T.: Human and murine FMR-1: alternative splicing and translational initiation downstream of the CGG-repeat. Nature Genet. 4: 244-251, 1993.
[3011] 367. Ashley, C. T., Jr.; Wilkinson, K. D.; Reines, D.; Warren, S. T. FMR1 protein: conserved RNP family domains and selective RNA binding. Science 262: 563-566, 1993.
[3012] 368. Bachner, D.; Steinbach, P.; Wohrle, D.; Just, W.; Vogel, W.; Hameister, H.; Manca, A.; Poustka, A.: Enhanced Fmr-1 expression in testis. (Letter) Nature Genet. 4: 115-116, 1993.
[3013] 369. Backes, M.; Genc, B.; Schreck, J.; Doerfler, W.; Lehmkuhl, G.; von Gontard, A.: Cognitive and behavioral profile of fragile X boys: correlations to molecular data. Am. J. Med. Genet. 95: 150-156, 2000.
[3014] 370. Bell, J.; Haldane, J. B. S.: The linkage between the genes for colour-blindness and haemophilia in man. Proc. Roy. Soc. London 123B: 119-150, 1937.
[3015] 371. Bell, M. V.; Hirst, M. C.; Nakahori, Y.; MacKinnon, R. N.; Roche, A.; Flint, T. J.; Jacobs, P. A.; Tommerup, N.; Tranebjaerg, L.; Froster-Iskenius, U.; Kerr, B.; Turner, G.; Lindenbaum, R. H.; Winter, R.; Pembrey, M.; Thibodeau, S.; Davies, K. E.: Physical mapping across the fragile X: hypermethylation and clinical expression of the fragile X syndrome. Cell 64: 861-866, 1991.
[3016] 372. Beresford, R. G.; Tatlidil, C.; Riddell, D.C.; Welch, J. P.; Ludman, M. D.; Neumann, P. E.; Greer, W. L.: Absence of fragile X syndrome in Nova Scotia. J. Med. Genet. 37: 77-79, 2000.
[3017] 373. Blomquist, H. K.; Bohman, M.; Edvinsson, S. O.; Gillberg, C.; Gustavson, K.-H.; Holmgren, G.; Wahlstrom, J.: Frequency of the fragile X syndrome in infantile autism: a Swedish multicenter study. Clin. Genet. 27: 113-117, 1985.
[3018] 374. Blomquist, H. K.; Gustavson, K.-H.; Holmgren, G.; Nordenson, I.; Sweins, A.: Fragile site X chromosomes and X-linked mental retardation in severely retarded boys in a northern Swedish county: a prevalence study. Clin. Genet. 21: 209-214, 1982.
[3019] 375. Bontekoe, C. J. M.; Bakker, C. E.; Nieuwenhuizen, I. M.; van der Linde, H.; Lans, H.; de Lange, D.; Hirst, M. C.; Oostra, B. A.: Instability of a (CGG)₉₈ repeat in the Fmr1 promoter. Hum. Molec. Genet. 10: 1693-1699, 2001.
[3020] 376. Bowen, P.; Biederman, B.; Swallow, K. A.: The X-linked syndrome of macro-orchidism and mental retardation: further observations. Am. J. Med. Genet. 2: 409-414, 1978.
[3021] 377. Brookwell, R.; Turner, G.: High resolution banding and the locus of the Xq fragile site. Hum. Genet. 63: 77, 1983.
[3022] 378. Brown, V.; Jin, P.; Ceman, S.; Darnell, J. C.; O'Donnell, W. T.; Tenenbaum, S. A.; Jin, X.; Feng, Y.; Wilkinson, K. D.; Keene, J. D.; Darnell, R. B.; Warren, S. T.: Microarray identification of FMRP-associated brain mRNAs and altered mRNA translational profiles in fragile X syndrome. Cell 107: 477-487, 2001.
[3023] 379. Brown, W. T.; Gross, A.; Chan, C.; Jenkins, E. C.; Mandel, J. L.; Oberle, I.; Arveiler, B.; Novelli, G.; Thibodeau, S.; Hagerman, R.; and 18 others: Multilocus analysis of the fragile X syndrome. Hum. Genet. 78: 201-205, 1988.
[3024] 380. Brown, W. T.; Gross, A. C.; Chan, C. B.; Jenkins, E. C.: Genetic linkage heterogeneity in the fragile X syndrome. Hum. Genet. 71: 11-18, 1985.
[3025] 381. Bundey, S.: Julia Bell, MRCS LRCP FRCP (1879-1979): Steamboat lady, statistician and geneticist. J. Med. Bio. 4: 8-13, 1996.
[3026] 382. Camerino, G.; Mattei, M. G.; Mattei, J. F.; Jaye, M.; Mandel, J. L.: Close linkage of fragile X-linked mental retardation syndrome to haemophilia B and transmission through a normal male. Nature 306: 701-707, 1983.
[3027] 383. Cantu, J. M.; Scaglia, H. E.; Gonzalez-Diddi, M.; Hemandez-Jauregui, P.; Morato, T.; Moreno, M. E.; Giner, J.; Alcantar, A.; Herrera, D.; Perez-Palacios, G.: Inherited congenital normofunctional testicular hyperplasia and mental deficiency. Hum. Genet. 41: 331-339, 1978.
[3028] 384. Cantu, J. M.; Scaglia, H. E.; Medina, M.; Gonzalez-Diddi, M.; Morato, T.; Moreno, M. E.; Perez-Palacios, G.: Inherited congenital normofunctional testicular hyperplasia and mental deficiency. Hum. Genet. 33: 23-33, 1976.
[3029] 385. Carmi, R.; Meryash, D. L.; Wood, J.; Gerald, P. S.: Fragile-X syndrome ascertained by the presence of macro-orchidism in a 5-month-old infant. Pediatrics 74: 883-886, 1984.
[3030] 386. Cavalli-Sforza, L.; Menozzi, P.; Piazza, A.: The History and Geography of Human Genes. Princeton: Princeton Univ. Press, 1994.
[3031] 387. Chakravarti, A.: Fragile X founder effect? Nature Genet. 1: 237-238, 1992.
[3032] 388. Chiurazzi, P.; Pomponi, M. G.; Pietrobono, R.; Bakker, C. E.; Neri, G.; Oostra, B. A.: Synergistic effect of histone hyperacetylation and DNA demethylation in the reactivation of the FMR1 gene. Hum. Molec. Genet. 8: 2317-2323, 1999.
[3033] 389. Chiurazzi, P.; Pomponi, M. G.; Willemsen, R.; Oostra, B. A.; Neri, G.: In vitro reactivation of the FMR1 gene involved in fragile X syndrome. Hum. Molec. Genet. 7: 109-113, 1998.
[3034] 390. Choo, K. H.; George, D.; Fillby, G.; Halliday, J. L.; Leversha, M.; Webb, G.; Danks, D. M.: Linkage analysis of X-linked mental retardation with and without fragile-X using factor 1X gene probe. (Letter) Lancet II: 349, 1984.
[3035] 391. Crawford, D.C.; Meadows, K. L.; Newman, J. L.; Taft, L. F.; Pettay, D. L.; Gold, L. B.; Hersey, S. J.; Hinkle, E. F.; Stanfield, M. L.; Holmgreen, P.; Yeargin-Allsopp, M.; Boyle, C.; Sherman, S. L.: Prevalence and phenotype consequence of FRAXA and FRAXE alleles in a large, ethnically diverse, special education-needs population. Am. J. Hum. Genet. 64: 495-507, 1999.
[3036] 392. Crawford, D.C.; Meadows, K. L.; Newman, J. L.; Taft, L. F.; Scott, E.; Leslie, M.; Shubek, L.; Holmgreen, P.; Yeargin-Allsopp, M.; Boyle, C.; Sherman, S. L.: Prevalence of the fragile X syndrome in African-Americans. Am. J. Med. Genet. 110: 226-233, 2002.
[3037] 393. Crawford, D.C.; Wilson, B.; Sherman, S. L.: Factors involved in the initial mutation of the fragile X CGG repeat as determined by sperm small pool PCR. Hum. Molec. Genet. 9: 2909-2918, 2000.
[3038] 394. Cremers, F. P. M.; Pfeiffer, R. A.; van de Pol, T. J. R.; Hofker, M. H.; Kruse, T. A.; Wieringa, B.; Ropers, H. H.: An interstitial duplication of the X chromosome in a male allows physical fine mapping of probes from the Xq13-q22 region. Hum. Genet. 77: 23-27, 1987.
[3039] 395. Daker, M. G.; Chidiac, P.; Fear, C. N.; Berry, A. L.: Fragile X in a normal male: a cautionary tale. Lancet I: 780, 1981.
[3040] 396. Dar, H.; Schaap, T.; Bait-Or, H.; Borochowitz, Z.; Gelman-Kohan, Z.; Chemke, T.; Chaki, R.; Cohen, H.; Falik-Borenstein, Z.; Chemke, J.: Ethnic distribution of the fragile X syndrome in Israel: evidence of founder chromosomes(?). Israel J. Med. Sci. 31: 323-325, 1995.
[3041] 397. Darnell, J. C.; Jensen, K. B.; Jin, P.; Brown, V.; Warren, S. T.; Darnell, R. B.: Fragile X mental retardation protein targets G quartet mRNAs important for neuronal function. Cell 107: 489-499, 2001.
[3042] 398. Davids, J. R.; Hagerman, R. J.; Eilert, R. E.: Orthopaedic aspects of fragile-X syndrome. J. Bone Joint Surg. 72A: 889-896, 1990.
[3043] 399. Davies, K. E.; Mattei, M. G.; Mattei, J. F.; Veenema, H.; McGlade, S.; Harper, K.; Tommerup, N.; Nielsen, K. B.; Mikkelsen, M.; Beighton, P.; Drayna, D.; White, R.; Pembrey, M. E.: Linkage studies of X-linked mental retardation: high frequency of recombination in the telomeric region of the human X chromosome (fragile site/linkage/recombination/X chromosome). Hum. Genet. 70: 249-255, 1985.
[3044] 400. De Boulle, K.; Verkerk, A. J. M. H.; Reyniers, E.; Vits, L.; Hendrickx, J.; Van Roy, B.; Van Den Bos, F.; de Graaff, E.; Oostra, B. A.; Willems, P. J.: A point mutation in the FMR-1 gene associated with fragile X mental retardation. Nature Genet. 3: 31-35, 1993.
[3045] 401. de Vries, B. B. A.; Fryns, J.-P.; Butler, M. G.; Canziani, F.; Wesby-van Swaay, E.; van Hemel, J. O.; Oostra, B. A.; Halley, D. J. J.; Niermeijer, M. F.: Clinical and molecular studies in fragile X patients with a Prader-Willi-like phenotype. J. Med. Genet. 30: 761-766, 1993.
[3046] 402. de Vries, B. B. A.; Robinson, H.; Stolte-Dijkstra, I.; Tjon Pian Gi, C. V.; Dijkstra, P. F.; van Doom, J.; Halley, D. J. J.; Oostra, B. A.; Turner, G.; Niermeijer, M. F.: General overgrowth in the fragile X syndrome: variability in the phenotypic expression of the FMR1 gene mutation. J. Med. Genet. 32: 764-769, 1995.
[3047] 403. Devys, D.; Biancalana, V.; Rousseau, F.; Boue, J.; Mandel, J. L.; Oberle, I.: Analysis of full fragile X mutations in fetal tissues and monozygotic twins indicate that abnormal methylation and somatic heterogeneity are established early in development. Am. J. Med. Genet. 43: 208-216, 1992.
[3048] 404. Devys, D.; Lutz, Y.; Rouyer, N.; Bellocq, J.-P.; Mandel, J.-L.: The FMR-1 protein is cytoplasmic, most abundant in neurons and appears normal in carriers of a fragile X premutation. Nature Genet. 4: 335-340, 1993.
[3049] 405. Dombrowski, C.; Levesque, S.; Morel, M. L.; Rouillard, P.; Morgan, K.; Rousseau, F.: Premutation and intermediate-size FMR1 alleles in 10 572 males from the general population: loss of an AGG interruption is a late event in the generation of fragile X syndrome alleles. Hum. Molec. Genet. 11: 371-378, 2002.
[3050] 406. Dreesen, J. C. F. M.; Geraedts, J. P. M.; Dumoulin, J. C. M.; Evers, J. L. H.; Pieters, M. H. E. C.: RS46 (DXS548) genotyping of reproductive cells: approaching preimplantation testing of the fragile-X syndrome. Hum. Genet. 96: 323-329, 1995.
[3051] 407. Dutch-Belgian Fragile X Consortium: Fmr1 knockout mice: a model to study fragile X mental retardation. Cell 78: 23-33, 1994.
[3052] 408. Eberhart, D. E.; Malter, H. E.; Feng, Y.; Warren, S. T.: The fragile X mental retardation protein is a ribonucleoprotein containing both nuclear localization and nuclear export signals. Hum. Molec. Genet. 5: 1083-1091, 1996.
[3053] 409. Eichler, E. E.; Nelson, D. L.: Genetic variation and evolutionary stability of the FMR1 CGG repeat in six closed human populations. Am. J. Med. Genet. 64: 220-225, 1996.
[3054] 410. Eichler, E. E.; Richards, S.; Gibbs, R. A.; Nelson, D. L.: Fine structure of the human FMR1 gene. Hum. Molec. Genet. 2: 1147-1153, 1993.
[3055] 411. Escalante, J. A.; Grunspun, H.; Frota-Pessoa, O.: Severe sex-linked mental retardation. J. Genet. Hum. 19: 137-140, 1971.
[3056] 412. Faust, C. J.; Verkerk, A. J. M. H.; Wilson, P. J.; Morris, C. P.; Hopwood, J. J.; Oostra, B. A.; Herman, G. E.: Genetic mapping on the mouse X chromosome of human cDNA clones for the fragile X and Hunter syndromes. Genomics 12: 814-817, 1992.
[3057] 413. Feng, Y.; Absher, D.; Eberhart, D. E.; Brown, V.; Malter, H. E.; Warren, S. T.: FMRP associates with polyribosomes as an mRNP, and the 1304N mutation of severe fragile X syndrome abolishes this association. Molec. Cell 1: 109-118, 1997.
[3058] 414. Filippi, G.; Arslanian, A.; Dagna-Bricarelli, F.; Pierluigi, M.; Grasso, M.; Rinaldi, A.; Rocchi, M.; Siniscalco, M.: Premutation for the Martin-Bell syndrome analyzed in a large pedigree segregating also for G6PD-deficiency. I. A working hypothesis on the nature of the FRAX-mutations. Am. J. Med. Genet. 40: 387-394, 1991.
[3059] 415. Filippi, G.; Rinaldi, A.; Archidiacono, N.; Rocchi, M.; Balazs, I.; Siniscalco, M.: Linkage between G6PD and fragile-X syndrome. Am. J. Med. Genet. 15: 113-119, 1983.
[3060] 416. Follette, P. J.; Laird, C. D.: Estimating the stability of the proposed imprinted state of the fragile-X mutation when transmitted by females. Hum. Genet. 88: 335-343, 1992.
[3061] 417. Froster-Iskenius, U.; Schulze, A.; Schwinger, E.: Transmission of the marker X syndrome trait by unaffected males: conclusions from studies of large families. Hum. Genet. 67: 419-427, 1984.
[3062] 418. Fryns, J. P.: The fragile X syndrome: a study of 83 families. Clin. Genet. 26: 497-528, 1984.
[3063] 419. Fryns, J. P.: Personal Communication. Leuven, Belgium May 28, 1993.
[3064] 420. Fryns, J. P.; Van Den Berghe, H.: Transmission of fragile(X)(q27) from normal male(s). Hum. Genet. 61: 262-263, 1982.
[3065] 421. Fu, Y.-H.; Kuhl, D. P. A.; Pizzuti, A.; Pieretti, M.; Sutcliffe, J. S.; Richards, S.; Verkerk, A. J. M. H.; Holden, J. J. A.; Fenwick, R. G., Jr.; Warren, S. T.; Oostra, B. A.; Nelson, D. L.; Caskey, C. T.: Variation of the CGG repeat at the fragile X site results in genetic instability: resolution of the Sherman paradox. Cell 67: 1047-1058, 1991.
[3066] 422. Fulchignoni-Lataud, M. C.; Olchwang, S.; Serre, J. L.: The fragile X CGG repeat shows a marked level of instability in hereditary non-polyposis colorectal cancer patients. Europ. J. Hum. Genet. 5: 89-93, 1997.
[3067] 423. Gedeon, A. K.; Baker, E.; Robinson, H.; Partington, M. W.; Gross, B.; Manca, A.; Korn, B.; Poustka, A.; Yu, S.; Sutherland, G. R.; Mulley, J. C.: Fragile X syndrome without CCG amplification has an FMR1 deletion. Nature Genet. 1: 341-344, 1992.
[3068] 424. Gerald, P. S.: Personal Communication. Boston, Mass. Aug. 12, 1983.
[3069] 425. Gerald, P. S.: X-linked mental retardation and an X-chromosome marker. (Editorial) New Eng. J. Med. 303: 696-697, 1980.
[3070] 426. Giannelli, F.; Morris, A. H.; Garrett, C.; Daker, M.; Thurston, C.; Smith, C. A. B.: Genetic heterogeneity of X-linked mental retardation with fragile X: association of tight linkage to factor 1X and incomplete penetrance in males. Ann. Hum. Genet. 51: 107-124, 1987.
[3071] 427. Giraud, F.; Ayme, S.; Mattei, J. F.; Mattei, M. G.: Constitutional chromosomal breakage. Hum. Genet. 34: 125-136, 1976.
[3072] 428. Glover, T. W.: FUdR induction of the X-chromosome fragile site: evidence for the mechanism of folic acid and thymidine inhibition. Am. J. Hum. Genet. 33: 234-242, 1981.
[3073] 429. Goldman, A.; Krause, A.; Jenkins, T.: Fragile X syndrome occurs in the South African black population. (Editorial) S. Afr. Med. J. 87: 418-420, 1997.
[3074] 430. Goodman, R. M.; Strauss, S.; Friedman, E.; Chaki, R.: Ovarian size in the fragile X mental retardation syndrome. Am. J. Med. Genet. 26: 17-18, 1987.
[3075] 431. Gould, E. L.; Loesch, D. Z.; Martin, M. J.; Hagerman, R. J.; Armstrong, S. M.; Huggins, R. M.: Melatonin profiles and sleep characteristics in boys with fragile X syndrome: a preliminary study. Am. J. Med. Genet. 95: 307-315, 2000.
[3076] 432. Greenberg, J. H.; Turner, C. G., II; Zegura, S. L.: The settlement of the Americas: a comparison of the linguistic, dental, and genetic evidence. Curr. Anthrop. 27: 477-497, 1986.
[3077] 433. Greenough, W. T.; Klintsova, A. Y.; Irwin, S. A.; Galvez, R.; Bates, K. E.; Weiler, I. J.: Synaptic regulation of protein synthesis and the fragile X protein. Proc. Nat. Acad. Sci. 98: 7101-7106, 2001.
[3078] 434. Griffiths, M. J.; Strachan, M. C.: A single lymphocyte culture for fragile X induction and prometaphase chromosome analysis. J. Med. Genet. 28: 837-839, 1991.
[3079] 435. Haataja, R.; Vaisanen, M.-L.; Li, M.; Ryynanen, M.; Leisti, J.: The fragile X syndrome in Finland: demonstration of a founder effect by analysis of microsatellite haplotypes. Hum. Genet. 94: 479-483, 1994.
[3080] 436. Hagerman, R. J.; Leehey, M.; Heinrichs, W.; Tassone, F.; Wilson, R.; Hills, J.; Grigsby, J.; Gage, B.; Hagerman, P. J.: Intention tremor, parkinsonism, and generalized brain atrophy in male carriers of fragile X. Neurology 57: 127-130, 2001.
[3081] 437. Hagerman, R. J.; Synhorst, D. P.: Mitral valve prolapse and aortic dilatation in the fragile X syndrome. Am. J. Med. Genet. 17: 123-131, 1984.
[3082] 438. Hagerman, R. J.; Van Housen, K.; Smith, A. C. M.; McGavran, L.: Consideration of connective tissue dysfunction in the fragile X syndrome. Am. J. Med. Genet. 17: 111-121, 1984.
[3083] 439. Hanzlik, A. J.; Osemlak-Hanzlik, M. M.; Hauser, M. A.; Kumit, D. M.: A recombination-based assay demonstrates that the fragile X sequence is transcribed widely during development. Nature Genet. 3: 44-48, 1993.
[3084] 440. Harvey, J.; Judge, C.; Wiener, S.: Familial X-linked mental retardation with an X chromosome abnormality. J. Med. Genet. 14: 46-50, 1977.
[3085] 441. Hecht, F.; Cannizzaro, L. A.; Hecht, B. K.: Gene symbols for fragile sites: a proposal. (Letter) Hum. Genet. 82: 394, 1989.
[3086] 442. Hecht, F.; Glover, T. W.: Antibiotics containing trimethoprim and the fragile X chromosome. (Letter) New Eng. J. Med. 308: 285-286, 1983.
[3087] 443. Hecht, F.; Jacky, P. B.; Sutherland, G. R.: The fragile X chromosome: current methods. Am. J. Med. Genet. 11: 489-495, 1982.
[3088] 444. Hinds, H. L.; Ashley, C. T.; Sutcliffe, J. S.; Nelson, D. L.; Warren, S. T.; Housman, D. E.; Schalling, M.: Tissue specific expression of FMR-1 provides evidence for a functional role in fragile X syndrome. Nature Genet. 3: 36-43, 1993.
[3089] 445. Hirst, M.; Grewal, P.; Flannery, A.; Slatter, R.; Maher, E.; Barton, D.; Fryns, J.-P.; Davies, K.: Two new cases of FMR1 deletion associated with mental impairment. Am. J. Hum. Genet. 56: 67-74, 1995.
[3090] 446. Hirst, M. C.; Barnicoat, A.; Flynn, G.; Wang, Q.; Daker, M.; Buckle, V. J.; Davies, K. E.; Bobrow, M.: The identification of a third fragile site, FRAXF, in Xq27-q28 distal to both FRAXA and FRAXE. Hum. Molec. Genet. 2: 197-200, 1993.
[3091] 447. Hirst, M. C.; Knight, S. J. L.; Christodoulou, Z.; Grewal, P. K.; Fryns, J. P.; Davies, K. E.: Origins of the fragile X syndrome mutation. J. Med. Genet. 30: 647-650, 1993.
[3092] 448. Hofker, M. H.; Bergen, A. A. B.; Skraastad, M. I.; Carpenter, N.J.; Veenema, H.; Connor, J. M.; Bakker, E.; van Ommen, G. J. B.; Pearson, P. L.: Efficient isolation of X chromosome-specific single copy probes from a cosmid library of a human X/hamster hybrid-cell line: mapping of new probes close to the locus for X-linked mental retardation. Am. J. Hum. Genet. 40: 312-328, 1987.
[3093] 449. Howard-Peebles, P. N.; Stoddard, G. R.: Familial X-linked mental retardation with a marker X chromosome and its relationship to macroorchidism. Clin. Genet. 17: 125-128, 1980.
[3094] 450. Hundscheid, R. D. L.; Sistermans, E. A.; Thomas, C. M. G.; Braat, D. D. M.; Straatman, H.; Kiemeney, L. A. L. M.; Oostra, B. A.; Smits, A. P. T.: Imprinting effect in premature ovarian failure confined to paternally inherited fragile X premutations. Am. J. Hum. Genet. 66: 413-418, 2000.
[3095] 451. Hundscheid, R. D. L.; Thomas, C. M. G.; Braat, D. D. M.; Oostra, B. A.; Smits, A. P. T.: Reply to the letters from Murray et al. and Vianna-Morgante and Costa. (Letter) Am. J. Hum. Genet. 67: 256-258, 2000.
[3096] 452. ISCN: An International System for Human Cytogenetic Nomenclature (1978). Cytogenet. Cell Genet. 21: 309-404, 1978.
[3097] 453. Jacky, P. B.; Dill, F. J.: Expression in fibroblast culture of the satellited-X chromosome associated with familial sex-linked mental retardation. Hum. Genet. 53: 267-269, 1980.
[3098] 454. Jacobs, P. A.: Personal Communication. Honolulu, Hi. 1982.
[3099] 455. Jacobs, P. A.: The fragile X syndrome. (Editorial) J. Med. Genet. 28: 809-810, 1991.
[3100] 456. Jacobs, P. A.; Glover, T. W.; Mayer, M.; Fox, P.; Gerrard, J. W.; Dunn, H. G.; Herbst, D. S.: X-linked mental retardation: a study of 7 families. Am. J. Med. Genet. 7: 471-479, 1980.
[3101] 457. Jacobs, P. A.; Hunt, P. A.; Mayer, M.; Wang, J.-C.; Boss, G. R.; Erbe, R. W.: Expression of the marker(X)(q28) in lymphoblastoid cell lines. Am. J. Hum. Genet. 34: 552-557, 1982.
[3102] 458. Jakala, P.; Hanninen, T.; Ryynanen, M.; Laakso, M.; Partanen, K.; Mannermaa, A.; Soininen, H.: Fragile-X: neuropsychological test performance, CGG triplet repeat lengths, and hippocampal volumes. J. Clin. Invest. 100: 331-338, 1997.
[3103] 459. Jenkins, E. C.; Brown, W. T.; Brooks, J.; Duncan, C. J.; Rudelli, R. D.; Wisniewski, H. M.: Experience with prenatal fragile X detection. Am. J. Med. Genet. 17: 215-239, 1984.
[3104] 460. Jenkins, E. C.; Brown, W. T.; Duncan, C. J.; Brooks, J.: Demonstration of the fragile X chromosome in amniotic fluid cells. (Abstract) Clin. Res. 30: 292A, 1982.
[3105] 461. Jin, P.; Warren, S. T.: Understanding the molecular basis of fragile X syndrome. Hum. Molec. Genet. 9: 901-908, 2000.
[3106] 100. Johnson, V. P.; Carpenter, N.J.; Skorey, P. A.: Martin-Bell syndrome segregating in a large kindred with normal transmitting males: clinical, cytogenetic, and linkage study. Am. J. Med. Genet. 38: 275-282, 1991.
[3107] 101. Kaiser-McCaw, B.; Hecht, F.; Cadien, J. D.; Moore, B. C.: Fragile X-linked mental retardation. Am. J. Hum. Genet. 7: 503-505, 1980.
[3108] 102. Kenneson, A.; Zhang, F.; Hagedorn, C. H.; Warren, S. T.: Reduced FMRP and increased FMR1 transcription is proportionally associated with CGG repeat number in intermediate-length and premutation carriers. Hum. Molec. Genet. 10: 1449-1454, 2001.
[3109] 103. Khalifa, M. M.; Reiss, A. L.; Migeon, B. R.: Methylation status of genes flanking the fragile site in males with the fragile-X syndrome: a test of the imprinting hypothesis. Am. J. Hum. Genet. 46: 744-753, 1990.
[3110] 104. Khandjian, E. W.; Corbin, F.; Woerly, S.; Rousseau, F.: The fragile X mental retardation protein is associated with ribosomes. Nature Genet. 12: 91-93, 1996.
[3111] 105. Kinnell, H. G.: Fragile-X disorder associated with antisocial personality. (Letter) Lancet II: 1104, 1982.
[3112] 106. Kirchgessner, C. U.; Warren, S. T.; Willard, H. F.: X inactivation if the FMR1 fragile X mental retardation gene. J. Med. Genet. 32: 925-929, 1995.
[3113] 107. Kirkilionis, A. J.; Chudley, A. E.; Greenberg, C. R.; Yan, D. L.; McGillivray, B.; Hamerton, J. L.: Transmission of the fra(X) haplotype from three nonpenetrant brothers to their affected grandsons. Am. J. Med. Genet. 43: 588-591, 1992.
[3114] 108. Klauck, S. M.; Munstermann, E.; Bieber-Martig, B.; Ruhl, D.; Lisch, S.; Schmotzer, G.; Poustka, A.; Poustka, F.: Molecular genetic analysis of the FRM-1 gene in a large collection of autistic patients. Hum. Genet. 100: 224-229, 1997.
[3115] 109. Knight, S. J. L.; Flannery, A. V.; Hirst, M. C.; Campbell, L.; Christodoulou, Z.; Phelps, S. R.; Pointon, J.; Middleton-Price, H. R.; Barnicoat, A.; Pembrey, M. E.; Holland, J.; Oostra, B. A.; Bobrow, M.; Davies, K. E.: Trinucleotide repeat amplification and hypermethylation of a CpG island in FRAXE mental retardation. Cell 74: 127-134, 1993.
[3116] 110. Kooy, R. F.; Reyniers, E.; Verhoye, M.; Sijbers, J.; Bakker, C. E.; Oostra, B. A.; Willems, P. J.; Van Der Linden, A.: Neuroanatomy of the fragile X knockout mouse brain studied using in vivo high resolution magnetic resonance imaging. Europ. J. Hum. Genet. 7: 526-532, 1999.
[3117] 111. Krawczun, M. S.; Jenkins, E. C.; Brown, W. T.: Analysis of the fragile-X chromosome: localization and detection of the fragile site in high resolution preparations. Hum. Genet. 69: 209-211, 1985.
[3118] 112. Kruyer, H.; Mila, M.; Glover, G.; Carbonell, P.; Ballesta, F.; Estivill, X.: Fragile X syndrome and the (CGG)ₙ mutation: two families with discordant MZ twins. Am. J. Hum. Genet. 54: 437-442, 1994.
[3119] 113. Kunst, C. B.; Leeflang, E. P.; Iber, J. C.; Amheim, N.; Warren, S. T.: The effect of FMR1 CGG repeat interruptions on mutation frequency as measured by sperm typing. J. Med. Genet. 34: 627-631, 1997.
[3120] 114. Kunst, C. B.; Zerylnick, C.; Karickhoff, L.; Eichler, E.; Bullard, J.; Chalifoux, M.; Holden, J. J. A.; Torroni, A.; Nelson, D. L.; Warren, S. T.: FMR1 in global populations. Am. J. Hum. Genet. 58: 513-522, 1996.
[3121] 115. Lachiewicz, A. M.; Dawson, D. V.; Spiridigliozzi, G. A.: Physical characteristics of young boys with fragile X syndrome: reasons for difficulties in making a diagnosis in young males. Am. J. Med. Genet. 92: 229-236, 2000.
[3122] 116. Laggerbauer, B.; Ostareck, D.; Keidel, E.-M.; Ostareck-Lederer, A.; Fischer, U.: Evidence that fragile X mental retardation protein is a negative regulator of translation. Hum. Molec. Genet. 10: 329-338, 2001.
[3123] 117. Laird, C. D.: Possible erasure of the imprint on a fragile X chromosome when transmitted by a male. Am. J. Med. Genet. 38: 391-395, 1991.
[3124] 118. Laird, C. D.: Proposed mechanism of inheritance and expression of the human fragile X syndrome of mental retardation. Genetics 117: 587-599, 1987.
[3125] 119. Laird, C. D.; Jaffe, E.; Karpen, G.; Lamb, M.; Nelson, R.: Fragile sites in human chromosomes as regions of late-replicating DNA. Trends Genet. 3: 274-281, 1987.
[3126] 120. Laird, C. D.; Lamb, M. M.; Thorne, J. L.: Two progenitor cells for human oogonia inferred from pedigree data and the X-inactivation imprinting model of the fragile-X syndrome. Am. J. Hum. Genet. 46: 696-719, 1990.
[3127] 121. Langenbeck, U.; Schmidtke, J.; Bartels, I.; Hansmann, I.; Knuppel, H.: Mean corpuscular hemoglobin is increased in Martin-Bell syndrome. Hum. Genet. 66: 365-366, 1984.
[3128] 122. Larsen, L. A.; Armstrong, J. S. M.; Gronskov, K.; Hjalgrim, H.; Brondum-Nielsen, K.; Hasholt, L.; Norgaard-Pedersen, B.; Vuust, J.: Analysis of FMR1 (CGG)ₙ alleles and FRAXA microsatellite haplotypes in the population of Greenland: implications for the population of the New World from Asia. Europ. J. Hum. Genet. 7: 771-777, 1999.
[3129] 123. Larsen, L. A.; Vuust, J.; Nystad, M.; Evseeva, I.; Van Ghelue, M.; Tranebjaerg, L.: Analysis of FMR1 (CGG)ₙ alleles and DXS548-FRAXAC1 haplotypes in three European circumpolar populations: traces of genetic relationship with Asia. Europ. J. Hum. Genet. 9: 724-727, 2001.
[3130] 124. Laval, S. H.; Blair, H. J.; Hirst, M. C.; Davies, K. E.; Boyd, Y.: Mapping of FMR1, the gene implicated in fragile X-linked mental retardation, on the mouse X chromosome. Genomics 12: 818-821, 1992.
[3131] 125. Lejeune, J.; Legrand, N.; Lafourcade, J.; Rethore, M.-O.; Raoul, O.; Maunoury, C.: Fragilite du chromosome X et effets de la trimethoprime. Ann. Genet. 25: 149-151, 1982.
[3132] 126. Lewis, H. A.; Musunuru, K.; Jensen, K. B.; Edo, C.; Chen, H.; Darnell, R. B.; Burley, S. K.: Sequence-specific RNA binding by a Nova KH domain: implications for paraneoplastic disease and the fragile X syndrome. Cell 100: 323-332, 2000.
[3133] 127. Limprasert, P.; Jaruratanasirikul, S.; Vasiknanonte, P.: Unilateral macroorchidism in fragile X syndrome. (Letter) Am. J. Med. Genet. 95: 516-517, 2000.
[3134] 128. Linden, M. G.; Tassone, F.; Gane, L. W.; Hills, J. L.; Hagerman, R. J.; Taylor, A. K.: Compound heterozygous female with fragile X syndrome. Am. J. Med. Genet. 83: 318-321, 1999.
[3135] 129. Loesch, D. Z.; Hay, D. A.: Clinical features and reproductive patterns in fragile X female heterozygotes. J. Med. Genet. 25: 407-414, 1988.
[3136] 130. Lubs, H.; Travers, H.; Lujan, E.; Carroll, A.: A large kindred with X-linked mental retardation, marker X and macroorchidism. Am. J. Med. Genet. 17: 145-157, 1984.
[3137] 131. Lubs, H. A.; Watson, M.; Breg, R.; Lujan, E.: Restudy of the original marker X family. Am. J. Med. Genet. 17: 133-144, 1984.
[3138] 132. Lubs, H. A., Jr.: A marker X chromosome. Am. J. Hum. Genet. 21: 231-244, 1969.
[3139] 133. Lugenbeel, K. A.; Peier, A. M.; Carson, N. L.; Chudley, A. E.; Nelson, D. L.: Intragenic loss of function mutations demonstrate the primary role of FMR1 in fragile X syndrome. Nature Genet. 10: 483-485, 1995.
[3140] 134. Malter, H. E.; Iber, J. C.; Willemsen, R.; de Graaff, E.; Tarleton, J. C.; Leisti, J.; Warren, S. T.; Oostra, B. A.: Characterization of the full fragile X syndrome mutation in fetal gametes. Nature Genet. 15: 165-169, 1997.
[3141] 135. Mandel, J.-L.; Hagerman, R.; Froster, U.; Brown, W. T.; Jenkins, E. C.; Jacobs, P.; Turner, G.; Lubs, H.; Neri, G.: Fifth International Workshop on the Fragile X and X-Linked Mental Retardation. Am. J. Med. Genet. 43: 5-27, 1992.
[3142] 136. Martin, J. P.; Bell, J.: A pedigree of mental defect showing sex-linkage. J. Neurol. Psychiat. 6: 154-157, 1943.
[3143] 137. Martin, R. H.; Lin, C. C.; Mathies, B. J.; Lowry, R. B.: X-linked mental retardation with macro-orchidism and marker-X chromosomes. Am. J. Med. Genet. 7: 433-441, 1980.
[3144] 138. Mattei, J. F.; Mattei, M. G.; Aumeras, C.; Auger, M.; Giraud, F.: X-linked mental retardation with the fragile X: a study of 15 families. Hum. Genet. 59: 281-289, 1981.
[3145] 139. McCabe, E. R. B.; de la Cruz, F.; Clapp, K.: Workshop on Fragile X: future research directions. Am. J. Med. Genet. 85: 317-322, 1999.
[3146] 140. McConkie-Rosell, A.; Lachiewicz, A. M.; Spiridigliozzi, G. A.; Tarleton, J.; Schoenwald, S.; Phelan, M. C.; Goonewardena, P.; Ding, X.; Brown, W. T.: Evidence that methylation of the FMR-1 locus is responsible for variable phenotypic expression of the fragile X syndrome. Am. J. Hum. Genet. 53: 800-809, 1993.
[3147] 141. Meijer, H.; de Graaff, E.; Merckx, D. M. L.; Jongbloed, R. J. E.; de Die-Smulders, C. E. M.; Engelen, J. J. M.; Fryns, J.-P.; Curfs, P. M. G.; Oostra, B. A.: A deletion of 1.6 kb proximal to the CGG repeat of the FMR1 gene causes the clinical phenotype of the fragile X syndrome. Hum. Molec. Genet. 3: 615-620, 1994.
[3148] 142. Meryash, D. L.; Cronk, C. E.; Sachs, B.; Gerald, P. S.: An anthropometric study of males with the fragile-X syndrome. Am. J. Med. Genet. 17: 159-174, 1984.
[3149] 143. Mila, M.; Castellvi-Bel, S.; Gine, R.; Vazquez, C.; Badenas, C.; Sanchez, A.; Estivill, X.: A female compound heterozygote (pre- and full mutation) for the CGG FMR1 expansion. Hum. Genet. 98: 419-421, 1996.
[3150] 144. Mila, M.; Sanchez, A.; Badenas, C.; Brun, C.; Jimenez, D.; Villa, M. P.; Castellvi-Bel, S.; Estivill, X.: Screening for FMR1 and FMR2 mutations in 222 individuals from Spanish special schools: identification of a case of FRAXE-associated mental retardation. Hum. Genet. 100: 503-507, 1997.
[3151] 145. Mingroni-Netto, R. C.; Angeli, C. B.; Auricchio, M. T. B. M.; Leal-Mesquita, E. R.; Ribeiro-dos-Santos, A. K. C.; Ferrari, I.; Hutz, M. H.; Salzano, F. M.; Hill, K.; Hurtado, A. M.; Vianna-Morgante, A. M.: Distribution of CGG repeats and FRAXAC1I/DXS548 alleles in South American populations. Am. J. Med. Genet. 111: 243-252, 2002.
[3152] 146. Morales, J.; Hiesinger, P. R.; Schroeder, A. J.; Kume, K.; Verstreken, P.; Jackson, F. R.; Nelson, D. L.; Hassan, B. A.: Drosophila fragile X protein, DFXR, regulates neuronal morphology and function in the brain. Neuron 34: 961-972, 2002.
[3153] 147. Morton, J. E.; Bundey, S.; Webb, T. P.; MacDonald, F.; Rindl, P. M.; Bullock, S.: Fragile X syndrome is less common than previously estimated. J. Med. Genet. 34: 1-5, 1997.
[3154] 148. Morton, N. E.; Macpherson, J. N.: Population genetics of the fragile-X syndrome: multiallelic model for the FMR1 locus. Proc. Nat. Acad. Sci. 89: 4215-4217, 1992.
[3155] 149. Mulley, J. C.; Yu, S.; Gedeon, A. K.; Donnelly, A.; Turner, G.; Loesch, D.; Chapman, C. J.; Gardner, R. J. M.; Richards, R. I.; Sutherland, G. R.: Experience with direct molecular diagnosis of fragile X. J. Med. Genet. 29: 368-374, 1992.
[3156] 150. Mulligan, L. M.; Phillips, M. A.; Forster-Gibson, C. J.; Beckett, J.; Partington, M. W.; Simpson, N. E.; Holden, J. J. A.; White, B. N.: Genetic mapping of DNA segments relative to the locus for the fragile-X syndrome at Xq27.3. Am. J. Hum. Genet. 37: 463-472, 1985.
[3157] 151. Murray, A.; Ennis, S.; Morton, N.: No evidence for parent of origin influencing premature ovarian failure in fragile X premutation carriers. (Letter) Am. J. Hum. Genet. 67: 253-254, 2000.
[3158] 152. Murray, A.; Webb, J.; Grimley, S.; Conway, G.; Jacobs, P.: Studies of FRAXA and FRAXE in women with premature ovarian failure. J. Med. Genet. 35: 637-640, 1998.
[3159] 153. Nolin, S. L.; Lewis, F. A., III; Ye, L. L.; Houck, G. E., Jr.; Glicksman, A. E.; Limprasert, P.; Li, S. Y.; Zhong, N.; Ashley, A. E.; Feingold, E.; Sherman, S. L.; Brown, W. T.: Familial transmission of the FMR1 GCC repeat. Am. J. Hum. Genet. 59: 1252-1261, 1996.
[3160] 154. Nussbaum, R. L.; Ledbetter, D. H.: Fragile X syndrome: a unique mutation in man. Annu. Rev. Genet. 20: 109-145, 1986.
[3161] 155. Oberle, I.; Rousseau, F.; Heitz, D.; Kretz, C.; Devys, D.; Hanauer, A.; Boue, J.; Bertheas, M. F.; Mandel, J. L.: Instability of a 550-base pair DNA segment and abnormal methylation in fragile X syndrome. Science 252: 1097-1102, 1991.
[3162] 156. Oostra, B. A.; Chiurazzi, P.: The fragile X gene and its function. Clin. Genet. 60: 399-408, 2001.
[3163] 157. Opitz, J. M.; Sutherland, G. R.: International workshop on the fragile X and X-linked mental retardation. Am. J. Med. Genet. 17: 5-94, 1984.
[3164] 158. Opitz, J. M.; Westphal, J. M.; Daniel, A.: Discovery of a connective tissue dysplasia in the Martin-Bell syndrome. Am. J. Med. Genet. 17: 101-109, 1984.
[3165] 159. Oudet, C.; Mornet, E.; Serre, J. L.; Thomas, F.; Lentes-Zengerling, S.; Kretz, C.; Deluchat, C.; Tejada, I.; Boue, J.; Boue, A.; Mandel, J. L.: Linkage disequilibrium between the fragile X mutation and two closely linked CA repeats suggests that fragile X chromosomes are derived from a small number of founder chromosomes. Am. J. Hum. Genet. 52: 297-304, 1993.
[3166] 160. Park, V.; Howard-Peebles, P.; Sherman, S.; Taylor, A.; Wulfsberg, E.: Policy statement: American College of Medical Genetics. Fragile X syndrome: diagnostic and carrier testing. Am. J. Med. Genet. 53: 380-381, 1994.
[3167] 161. Parrish, J. E.; Oostra, B. A.; Verkerk, A. J. M. H.; Richards, C. S.; Reynolds, J.; Spikes, A. S.; Shaffer, L. G.; Nelson, D. L. Isolation of a GCC repeat showing expansion in FRAXF, a fragile site distal to FRAXA and FRAXE. Nature Genet. 8: 229-235, 1994.
[3168] 162. Peier, A. M.; McIlwain, K. L.; Kenneson, A.; Warren, S. T.; Paylor, R.; Nelson, D. L.: (Over)correction of FMR1 deficiency with YAC transgenics: behavioral and physical features. Hum. Molec. Genet. 9: 1145-1159, 2000.
[3169] 163. Pellissier, M.-C.; Voelckel, M.-A.; Piquet, C.; Mattei, M.-G.; Mattei, J.-F.: Transmission of mental retardation with fragile X site by two normal transmitter brothers. Am. J. Med. Genet. 38: 367-369, 1991.
[3170] 164. Pembrey, M. E.; Winter, R. M.; Davies, K. E.: A premutation that generates a defect at crossing over explains the inheritance of fragile X mental retardation. Am. J. Med. Genet. 21: 709-717, 1985.
[3171] 165. Pieretti, M.; Zhang, F.; Fu, Y.-H.; Warren, S. T.; Oostra, B. A.; Caskey, C. T.; Nelson, D. L.: Absence of expression of the FMR-1 gene in fragile X syndrome. Cell 66: 817-822, 1991.
[3172] 166. Poustka, A.; Dietrich, A.; Langenstein, G.; Toniolo, D.; Warren, S. T.; Lehrach, H.: Physical map of human Xq27-qter: localizing the region of the fragile X mutation. Proc. Nat. Acad. Sci. 88: 8302-8306, 1991.
[3173] 167. Purrello, M.; Alhadeff, B.; Esposito, D.; Szabo, P.; Rocchi, M.; Truett, M.; Masiarz, F.; Siniscalco, M.: The human genes for hemophilia A and hemophilia B flank the X chromosome fragile site at Xq27.3. EMBO J. 4: 725-729, 1985.
[3174] 168. Pyeritz, R. E.; Stamberg, J.; Thomas, G. H.; Bell, B. B.; Zahka, K. G.; Bernhardt, B. A.: The marker Xq28 syndrome (fragile X syndrome) in a retarded man with mitral valve prolapse. Johns Hopkins Med. J. 151: 231-237, 1982.
[3175] 169. Quan, F.; Grompe, M.; Jakobs, P.; Popovich, B. W.: Spontaneous deletion in the FMR1 gene in a patient with fragile X syndrome and cherubism. Hum. Molec. Genet. 4: 1681-1684, 1995.
[3176] 170. Quan, F.; Zonana, J.; Gunter, K.; Peterson, K. L.; Magenis, R. E.; Popovich, B. W.: An atypical case of fragile X syndrome caused by a deletion that includes the FMR1 gene. Am. J. Hum. Genet. 56: 1042-1051, 1995.
[3177] 171. Ramos, F. J.; Emanuel, B. S.; Spinner, N. B.: Frequency of the common fragile site at Xq27.2 under conditions of thymidylate stress: implications for cytogenetic diagnosis of the fragile-X syndrome. Am. J. Med. Genet. 42: 835-838, 1992.
[3178] 172. Reiss, A. L.; Aylward, E.; Freund, L. S.; Joshi, P. K.; Bryan, R. N.: Neuroanatomy of fragile X syndrome: the posterior fossa. Ann. Neurol. 29: 26-32, 1991.
[3179] 173. Reiss, A. L.; Freund, L.; Tseng, J. E.; Joshi, P. K.: Neuroanatomy in fragile X females: the posterior fossa. Am. J. Hum. Genet. 49: 279-288, 1991.
[3180] 174. Reiss, A. L.; Lee, J.; Freund, L.: Neuroanatomy of fragile X syndrome: the temporal lobe. Neurology 44: 1317-1324, 1994.
[3181] 175. Reyniers, E.; Vits, L.; De Boulle, K.; Van Roy, B.; Van Velzen, D.; de Graaff, E.; Verkerk, A. J. M. H.; Jorens, H. Z. J.; Darby, J. K.; Oostra, B.; Willems, P. J.: The full mutation in the FMR-1 gene of male fragile X patients is absent in their sperm. Nature Genet. 4: 143-148, 1993.
[3182] 176. Richards, B. W.; Sylvester, P. E.; Brooker, C.: Fragile X-linked mental retardation: the Martin-Bell syndrome. J. Ment. Defic. Res. 25: 253-256, 1981.
[3183] 177. Richards, R. I.; Holman, K.; Friend, K.; Kremer, E.; Hillen, D.; Staples, A.; Brown, W. T.; Goonewardena, P.; Tarleton, J.; Schwartz, C.; Sutherland, G. R.: Evidence of founder chromosomes in fragile X syndrome. Nature Genet. 1: 257-260, 1992.
[3184] 178. Richards, R. I.; Holman, K.; Kozman, H.; Kremer, E.; Lynch, M.; Pritchard, M.; Yu, S.; Mulley, J.; Sutherland, G. R.: Fragile X syndrome: genetic localisation by linkage mapping of two microsatellite repeats FRAXAC1 and FRAXAC2 which immediately flank the fragile site. J. Med. Genet. 28: 818-823, 1991.
[3185] 179. Richards, R. I.; Holman, K.; Kozman, H.; Kremer, E.; Lynch, M.; Pritchard, M.; Yu, S.; Mulley, J.; Sutherland, G. R.: Fragile X syndrome: genetic localisation by linkage mapping of two microsatellite repeats FRAXAC1 and FRAXAC2 which immediately flank the fragile site. J. Med. Genet. 28: 818-823, 1991.
[3186] 180. Richards, R. I.; Sutherland, G. R.: Dynamic mutations: a new class of mutations causing human disease. Cell 70: 709-712, 1992.
[3187] 181. Rocchi, M.; Archidiacono, N.; Rinaldi, A.; Filippi, G.; Bartolucci, G.; Fancello, G. S.; Siniscalco, M.: Mental retardation in heterozygotes for the fragile-X mutation: evidence in favor of an X inactivation-dependent effect. Am. J. Hum. Genet. 46: 738-743, 1990.
[3188] 182. Rodewald, L.; Miller, D.C.; Sciorra, L.; Barabas, G.; Lee, M.-L. Central nervous system neoplasm in a young man with Martin-Bell syndrome—fra(X)-XLMR. Am. J. Med. Genet. 26: 7-12, 1987.
[3189] 183. Rousseau, F.; Heitz, D.; Biancalana, V.; Blumenfeld, S.; Kretz, C.; Boue, J.; Tommerup, N.; Van Der Hagen, C.; DeLozier-Blanchet, C.; Croquette, M.-F.; Gilgenkrantz, S.; Jalbert, P.; Voelckel, M.-A.; Oberle, I.; Mandel, J.-L.: Direct diagnosis by DNA analysis of the fragile X syndrome of mental retardation. New Eng. J. Med. 325: 1673-1681, 1991.
[3190] 184. Rousseau, F.; Heitz, D.; Mandel, J.-L.: The unstable and methylatable mutations causing the fragile X syndrome. Hum. Mutat. 1: 91-96, 1992.
[3191] 185. Rousseau, F.; Heitz, D.; Oberle, I.; Mandel, J.-L.: Selection in blood cells from female carriers of the fragile X syndrome: inverse correlation between age and proportion of active X chromosomes carrying the full mutation. J. Med. Genet. 28: 830-836, 1991.
[3192] 186. Rousseau, F.; Heitz, D.; Tarleton, J.; MacPherson, J.; Malmgren, H.; Dahl, N.; Bamicoat, A.; Mathew, C.; Mornet, E.; Tejada, I.; Maddalena, A.; Spiegel, R.; Schinzel, A.; Marcos, J. A. G.; Schorderet, D. F.; Schaap, T.; Maccioni, L.; Russo, S.; Jacobs, P. A.; Schwartz, C.; Mandel, J. L.: A multicenter study on genotype-phenotype correlations in the fragile X syndrome, using direct diagnosis with probe StB12.3: the first 2,253 cases. Am. J. Hum. Genet. 55: 225-237, 1994.
[3193] 187. Russo, S.; Briscioli, V.; Cogliati, F.; Macchi, M.; Lalatta, F.; Larizza, L.: An unusual fragile X sibship: female compound heterozygote and male with a partially methylated full mutation. Clin. Genet. 54: 309-314, 1998.
[3194] 188. Ruvalcaba, R. H. A.; Myhre, S. A.; Roosen-Runge, E. C.; Beckwith, J. B.: X-linked mental deficiency megalotestes syndrome. J.A.M.A. 238: 1646-1650, 1977.
[3195] 189. Schrander-Stumpel, C.; Gerver, W.-J.; Meyer, H.; Engelen, J.; Mulder, H.; Fryns, J.-P.: Prader-Willi-like phenotype in fragile X syndrome. Clin. Genet. 45: 175-180, 1994.
[3196] 190. Sherman, S. L.: Premature ovarian failure among fragile X premutation carriers: parent-of-origin effect? (Editorial) Am. J. Hum. Genet. 67: 11-13, 2000.
[3197] 191. Sherman, S. L.; Jacobs, P. A.; Morton, N. E.; Froster-Iskenius, U.; Howard-Peebles, P. N.; Nielsen, K. B.; Partington, M. W.; Sutherland, G. R.; Turner, G.; Watson, M.: Further segregation analysis of the fragile X syndrome with special reference to transmitting males. Hum. Genet. 69: 289-299, 1985.
[3198] 192. Siomi, H.; Choi, M.; Siomi, M. C.; Nussbaum, R. L.; Dreyfuss, G.: Essential role for KH domains in RNA binding: impaired RNA binding by a mutation in the KH domain of FMR1 that causes fragile X syndrome. Cell 77: 33-39, 1994.
[3199] 193. Siomi, H.; Siomi, M. C.; Nussbaum, R. L.; Dreyfuss, G.: The protein product of the fragile X gene, FMR1, has characteristics of an RNA-binding protein. Cell 74: 291-298, 1993.
[3200] 194. Sittler, A.; Devys, D.; Weber, C.; Mandel, J.-L.: Alternative splicing of exon 14 determines nuclear or cytoplasmic localisation of fmr1 protein isoforms. Hum. Molec. Genet. 5: 95-102, 1996.
[3201] 195. Smeets, H. J. M.; Smits, A. P. T.; Verheij, C. E.; Theelen, J. P. G.; Willemsen, R.; van de Burgt, I.; Hoogeveen, A. T.; Oosterwijk, J. C.; Oostra, B. A.: Normal phenotype in two brothers with a full FMR1 mutation. Hum. Molec. Genet. 4: 2103-2108, 1995.
[3202] 196. Smits, A. P. T.; Dreesen, J. C. F. M.; Post, J. G.; Smeets, D. F. C. M.; de Die-Smulders, C.; Spaans-van der Bijl, T.; Govaerts, L. C. P.; Warren, S. T.; Oostra, B. A.; van Oost, B. A.: The fragile X syndrome: no evidence for any recent mutations. J. Med. Genet. 30: 94-96, 1993.
[3203] 197. Snow, K.; Doud, L. K.; Hagerman, R.; Pergolizzi, R. G.; Erster, S. H.; Thibodeau, S. N.: Analysis of a CGG sequence at the FMR-1 locus in fragile X families and in the general population. Am. J. Hum. Genet. 53: 1217-1228, 1993.
[3204] 198. Snyder, F. F.; Lin, C. C.; Harasym, C. A.; Jamro, H. K.; Kushnig, M. L.; Lowe, J. K.; O'Brien, S. I.: Evidence for close association between the fragile X(q27-28) chromosome site and glucose-6-phosphate dehydrogenase (G6PD) but not with hypoxanthine-guanine phosphoribosyltransferase (HPRT). (Abstract) Cytogenet. Cell Genet. 37: 587, 1984.
[3205] 199. Soysa, P.; Senanayahe, M.; Mikkelsen, M.; Poulsen, H.: Martin-Bell syndrome fra(X)(q28) in a Sri Lankan family. J. Ment. Defic. Res. 26: 251-257, 1982.
[3206] 200. Steinbach, P.: Mental impairment in Martin-Bell syndrome is probably determined by interaction of several genes: simple explanation of phenotypic differences between unaffected and affected males with the same X chromosome. Hum. Genet. 72: 248-252, 1986.
[3207] 201. Stoll, C.: Problems in the diagnosis of fragile X syndrome in young children are still present. Am. J. Med. Genet. 100: 110-115, 2001.
[3208] 202. Storm, K.; Handig, I.; Reyniers, E.; Oostra, B. A.; Kooy, R. F.; Willems, P. J.: Incomplete EcoRI digestion may lead to false diagnosis of fragile X syndrome. Hum. Genet. 102: 54-56, 1998.
[3209] 203. Subramanian, P. S.; Nelson, D. L.; Chinault, A. C.: Large domains of apparent delayed replication timing associated with triplet repeat expansion at FRAXA and FRAXE. Am. J. Hum. Genet. 59: 407-416, 1996.
[3210] 204. Sun, Y. J.; Baumer, A.: Nonrandom X inactivation and selection of fragile X full mutation in fetal fibroblasts. Am. J. Med. Genet. 86: 162-164, 1999.
[3211] 205. Sutherland, G. R.: Personal Communication. Adelaide, Australia Nov. 3, 1993.
[3212] 206. Sutherland, G. R.: Fragile sites on human chromosomes: demonstration of their dependence on the type of tissue culture medium. Science 197: 265-266, 1977.
[3213] 207. Sutherland, G. R.: Heritable sites on human chromosomes. VII. Children homozygous for the BrdU-requiring fra10q25 are phenotypically normal. Am. J. Hum. Genet. 33: 946-949, 1981.
[3214] 208. Sutherland, G. R.: Heritable fragile sites on human chromosomes. II. Distribution, phenotypic effects, and cytogenetics. Am. J. Hum. Genet. 31: 136-148, 1979.
[3215] 209. Sutherland, G. R.: Personal Communication. Adelaide, Australia 6/1989.
[3216] 210. Sutherland, G. R.; Ashford, P. L. C.: X-linked mental retardation with macro-orchidism and the fragile site at Xq27 or 28. Hum. Genet. 48: 117-120, 1979.
[3217] 211. Sutherland, G. R.; Baker, E.: Characterisation of a new rare fragile site easily confused with the fragile X. Hum. Molec. Genet. 1: 111-113, 1992.
[3218] 212. Sutherland, G. R.; Gedeon, A.; Kornman, L.; Donnelly, A.; Byard, R. W.; Mulley, J. C.; Kremer, E.; Lynch, M.; Pritchard, M.; Yu, S.; Richards, R. I.: Prenatal diagnosis of fragile X syndrome by direct detection of the unstable DNA sequence. New Eng. J. Med. 325: 1720-1722, 1991.
[3219] 213. Sved, J. A.; Laird, C. D.: Population genetic consequences of the fragile X syndrome, based on the X-inactivation imprinting model. Am. J. Hum. Genet. 46: 443-451, 1990.
[3220] 214. Sved, J. A.; Laird, C. D.: The X-inactivation imprinting model can explain the incidence of the fragile-X syndrome of mental retardation in mother-offspring pairs. Brain Dysfunction 1: 245-254, 1988.
[3221] 215. Szabo, P.; Purrello, M.; Rocchi, M.; Archidiacono, N.; Alhadeff, B.; Filippi, G.; Toniolo, D.; Martini, G.; Luzzatto, L.; Siniscalco, M.: Cytological mapping of the human glucose-6-phosphate dehydrogenase gene distal to the fragile-X site suggests a high rate of meiotic recombination across this site. Proc. Nat. Acad. Sci. 81: 7855-7859, 1984.
[3222] 216. Tamanini, F.; Bontekoe, C.; Bakker, C. E.; van Unen, L.; Anar, B.; Willemsen, R.; Yoshida, M.; Galjaard, H.; Oostra, B. A.; Hoogeveen, A. T.: Different targets for the fragile X-related proteins revealed by their distinct nuclear localizations. Hum. Molec. Genet. 8: 863-869, 1999.
[3223] 217. Tarleton, J.; Richie, R.; Schwartz, C.; Rao, K.; Aylsworth, A. S.; Lachiewicz, A.: An extensive de novo deletion removing FMR1 in a patient with mental retardation and the fragile X syndrome phenotype. Hum. Molec. Genet. 2: 1973-1974, 1993.
[3224] 218. Thibodeau, S. N.; Dorkins, H. R.; Faulk, K. R.; Berry, R.; Smith, A. C. M.; Hagerman, R.; King, A.; Davies, K. E.: Linkage analysis using multiple DNA polymorphic markers in normal families and in families with fragile X syndrome. Hum. Genet. 79: 219-227, 1988.
[3225] 219. Thode, A.; Laing, S.; Partington, M. W.; Turner, G.: Is there a fragile(X) negative Martin-Bell syndrome?. Am. J. Med. Genet. 30: 459-471, 1988.
[3226] 220. Toledano-Alhadef, H.; Basel-Vanagaite, L.; Magal, N.; Davidov, B.; Ehrlich, S.; Drasinover, V.; Taub, E.; Halpern, G. J.; Ginott, N.; Shohat, M.: Fragile X carrier screening and the prevalence of premutation and full-mutation carriers in Israel. Am. J. Hum. Genet. 69: 351-360, 2001.
[3227] 221. Tommerup, N.; Poulsen, H.; Brondum-Nielsen, K.: 5-Fluoro-2-prime-deoxyuridine induction of the fragile site on Xq28 associated with X-linked mental retardation. J. Med. Genet. 33: 234-242, 1981.
[3228] 222. Turner, G.; Brookwell, R.; Daniel, A.; Selikowitz, M.; Zilibowitz, M.: Heterozygous expression of X-linked mental retardation and X-chromosome marker fra(X)(q27). New Eng. J. Med. 303: 662-664, 1980.
[3229] 223. Turner, G.; Daniel, A.; Frost, M.: X-linked mental retardation, macro-orchidism, and the Xq27 fragile site. J. Pediat. 96: 837-841, 1980.
[3230] 224. Turner, G.; Eastman, C.; Casey, J.; McLeay, A.; Procopis, P.; Turner, B.: X-linked mental retardation associated with macro-orchidism. J. Med. Genet. 12: 367-371, 1975.
[3231] 225. Turner, G.; Till, R.; Daniel, A.: Marker X chromosomes, mental retardation and macro-orchidism. (Letter) New Eng. J. Med. 299: 1472, 1978.
[3232] 226. Turner, G.; Webb, T.; Wake, S.; Robinson, H.: Prevalence of fragile X syndrome. Am. J. Med. Genet. 64: 196-197, 1996.
[3233] 227. Uchida, I. A.; Joyce, E. M.: Activity of the fragile X in heterozygous carriers. Am. J. Hum. Genet. 34: 286-293, 1982.
[3234] 228. van den Ouweland, A. M. W.; Deelen, W. H.; Kunst, C. B.; Uzielli, M.-L. G.; Nelson, D. L.; Warren, S. T.; Oostra, B. A.; Halley, D. J. J.: Loss of mutation at the FMR1 locus through multiple exchanges between maternal X chromosomes. Hum. Molec. Genet. 3: 1823-1827, 1994.
[3235] 229. Van Roy, B. C.; De Smedt, M. C.; Raes, R. A.; Dumon, J. E.; Leroy, J. G.: Fragile X trait in a large kindred: transmission also through normal males. J. Med. Genet. 20: 286-289, 1983.
[3236] 230. Verheij, C.; Bakker, C. E.; de Graaff, E.; Keulemans, J.; Willemsen, R.; Verkerk, A. J. M. H.; Galjaard, H.; Reuser, A. J. J.; Hoogeveen, A. T.; Oostra, B. A.: Characterization and localization of the FMR-1 gene product associated with fragile X syndrome. Nature 363: 722-724, 1993.
[3237] 231. Verheij, C.; de Graaff, E.; Bakker, C. E.; Willemsen, R.; Willems, P. J.; Meijer, N.; Galjaard, H.; Reuser, A. J. J.; Oostra, B. A.; Hoogeveen, A. T.: Characterization of FMR1 proteins isolated from different tissues. Hum. Molec. Genet. 4: 895-901, 1995.
[3238] 232. Verkerk, A. J. M. H.; Pieretti, M.; Sutcliffe, J. S.; Fu, Y.-H.; Kuhl, D. P. A.; Pizzuti, A.; Reiner, O.; Richards, S.; Victoria, M. F.; Zhang, F.; Eussen, B. E.; van Ommen, G.-J. B.; Blonden, L. A. J.; Riggins, G. J.; Chastain, J. L.; Kunst, C. B.; Galjaard, H.; Caskey, C. T.; Nelson, D. L.; Oostra, B. A.; Warren, S. T.: Identification of a gene (FMR-1) containing a CGG repeat coincident with a breakpoint cluster region exhibiting length variation in fragile X syndrome. Cell 65: 905-914, 1991.
[3239] 233. Vianna-Morgante, A. M.; Costa, S. S.: Premature ovarian failure is associated with maternally and paternally inherited premutation in Brazilian families with fragile X. (Letter) Am. J. Hum. Genet. 67: 254-255, 2000.
[3240] 234. Vincent, J. B.; Gurling, H. M. D.: Point mutation in intron 10 of FMR1 is unlikely to be a cause of fragile X syndrome. (Letter) Hum. Mutat. 12: 431 only, 1998.
[3241] 235. Voelckel, M. A.; Mattei, M. G.; N'Guyen, C.; Philip, N.; Birg, F.; Mattei, J. F.: Dissociation between mental retardation and fragile site expression in a family with fragile X-linked mental retardation. Hum. Genet. 80: 375-378, 1988.
[3242] 236. Vogel, F.; Crusio, W. E.; Kovac, C.; Fryns, J.-P.; Freund, M. Selective advantage of fra (X) heterozygotes. Hum. Genet. 86: 25-32, 1990.
[3243] 237. Wallace, D.C.; Torroni, A.: American Indian prehistory as written in the mitochondrial DNA: a review. Hum. Biol. 64: 403-416, 1992.
[3244] 238. Wang, Y.-C.; Li, S.-Y.: Response to Vincent and Gurling. (Letter) Hum. Mutat. 12: 432 only, 1998.
[3245] 239. Wang, Y.-C.; Lin, M.-L.; Lin, S. J.; Li, Y.-C.; Li, S.-Y.: Novel point mutation within intron 10 of FMR-1 gene causing fragile X syndrome. Hum. Mutat. 10: 393-399, 1997.
[3246] 240. Warren, S. T.; Glover, T. W.; Davidson, R. L.; Jagadeeswaran, P.: Linkage and recombination between fragile X-linked mental retardation and the factor IX gene. (Letter) Hum. Genet. 69: 44-46, 1985.
[3247] 241. Warren, S. T.; Knight, S. J. L.; Peters, J. F.; Stayton, C. L.; Consalez, G. G.; Zhang, F. P.: Isolation of the human chromosomal band Xq28 within somatic cell hybrids by fragile X site breakage. Proc. Nat. Acad. Sci. 87: 3856-3860, 1990.
[3248] 242. Warren, S. T.; Zhang, F.; Licameli, G. R.; Peters, J. F.: The fragile X site in somatic cell hybrids: an approach for molecular cloning of fragile sites. Science 237: 420-423, 1987.
[3249] 243. Warren, S. T.; Zhang, F. P.; Sutcliffe, J. S.; Peters, J. F.: Strategy for molecular cloning of the fragile X site DNA. Am. J. Med. Genet. 30: 613-623, 1988.
[3250] 244. Weaver, D. D.; Sherman, S. L.: A counseling guide to the Martin-Bell syndrome. (Letter) Am. J. Med. Genet. 26: 39-44, 1987.
[3251] 245. Webb, T.; Jacobs, P. A.: Fragile Xq27.3 in female heterozygotes for the Martin-Bell syndrome. J. Med. Genet. 27: 627-631, 1990.
[3252] 246. Webb, T. P.; Bundey, S.; Thake, A.; Todd, J.: The frequency of the fragile X chromosome among schoolchildren in Coventry. J. Med. Genet. 23: 396-399, 1986.
[3253] 247. Wheater, R. F.; Roberts, S. H.: An improved lymphocyte culture technique: deoxycytidine release of a thymidine block and use of a constant humidity chamber for slide making. J. Med. Genet. 24: 113-115, 1987.
[3254] 248. Willemsen, R.; Anar, B.; De Diego Otero, Y.; de Vries, B. B. A.; Hilhorst-Hofstee, Y.; Smits, A.; van Looveren, E.; Willems, P. J.; Galjaard, H.; Oostra, B. A.: Noninvasive test for fragile X syndrome, using hair root analysis. Am. J. Hum. Genet. 65: 98-103, 1999.
[3255] 249. Willemsen, R.; Mohkamsing, S.; De Vries, B.; Devys, D.; van den Ouweland, A.; Mandel, J. L.; Galjaard, H.; Oostra, B.: Rapid antibody test for fragile X syndrome. Lancet 345: 1147-1148, 1995.
[3256] 250. Willemsen, R.; Smits, A.; Mohkamsing, S.; van Beerendonk, H.; de Haan, A.; de Vries, B.; van den Ouweland, A.; Sistermans, A.; Galjaard, H.; Oostra, B. A.: Rapid antibody test for diagnosing fragile X syndrome: a validation of the technique. Hum. Genet. 99: 308-311, 1997.
[3257] 251. Winter, R. M.; Pembrey, M. E.: Analysis of linkage relationships between genetic markers around the fragile X locus with special reference to the daughters of normal transmitting males. Hum. Genet. 74: 93-97, 1986.
[3258] 252. Wohrle, D.; Hennig, I.; Vogel, W.; Steinbach, P.: Mitotic stability of fragile X mutations in differentiated cells indicates early post-conceptional trinucleotide repeat expansion. Nature Genet. 4: 140-142, 1993.
[3259] 253. Wohrle, D.; Kotzot, D.; Hirst, M. C.; Manca, A.; Korn, B.; Schmidt, A.; Barbi, G.; Rott, H.-D.; Poustka, A.; Davies, K. E.; Steinbach, P.: A microdeletion of less than 250 kb, including the proximal part of the FMR-1 gene and the fragile-X site, in a male with the clinical phenotype of fragile-X syndrome. Am. J. Hum. Genet. 51: 299-306, 1992.
[3260] 254. Wohrle, D.; Salat, U.; Hameister, H.; Vogel, W.; Steinbach, P.: Demethylation, reactivation, and destabilization of human fragile X full-mutation alleles in mouse embryocarcinoma cells. Am. J. Hum. Genet. 69: 504-515, 2001.
[3261] 255. Yamauchi, M.; Nagata, S.; Seki, N.; Toyama, Y.; Harada, N.; Niikawa, N.; Masuno, I.; Kajii, T.; Hori, T.: Prenatal diagnosis of fragile X syndrome by direct detection of the dynamic mutation due to an unstable DNA sequence. Clin. Genet. 44: 169-172, 1993.
[3262] 256. Yeshaya, J.; Shalgi, R.; Shohat, M.; Avivi, L.: Replication timing of the various FMR1 alleles detected by FISH: inferences regarding their transcriptional status. Hum. Genet. 102: 6-14, 1998.
[3263] 257. Yu, S.; Mulley, J.; Loesch, D.; Turner, G.; Donnelly, A.; Gedeon, A.; Hillen, D.; Kremer, E.; Lynch, M.; Pritchard, M.; Sutherland, G. R.; Richards, R. I.: Fragile-X syndrome: unique genetics of the heritable unstable element. Am. J. Hum. Genet. 50: 968-980, 1992.
[3264] 258. Yu, S.; Pritchard, M.; Kremer, E.; Lynch, M.; Nancarrow, J.; Baker, E.; Holman, K.; Mulley, J. C.; Warren, S. T.; Schlessinger, D.; Sutherland, G. R.; Richards, R. I.: Fragile X genotype characterized by an unstable region of DNA. Science 252: 1179-1181, 1991.
[3265] 259. Zhang, Y. Q.; Bailey, A. M.; Matthies, H. J. G.; Renden, R. B.; Smith, M. A.; Speese, S. D.; Rubin, G. M.; Broadie, K.: Drosophila fragile X-related gene regulates the MAP1B homolog Futsch to control synaptic structure and function. Cell 107: 591-603, 2001.
[3266] 260. Zhong, N.; Dobkin, C.; Brown, W. T.: A complex mutable polymorphism located within the fragile X gene. Nature Genet. 5: 248-253, 1993.
[3267] 261. Zoll, B.; Arnemann, J.; Krawczak, M.; Cooper, D. N.; Pescia, G.; Wahli, W.; Steinbach, P.; Schmidtke, J.: Evidence against close linkage of the loci for fraXq of Martin-Bell syndrome and for factor IX. Hum. Genet. 71: 122-126, 1985.
[3268] 462. Hoshino, S.; Miyazawa, H.; Enomoto, T.; Hanaoka, F.; Kikuchi, Y.; Kikuchi, A.; Ui, M.: A human homologue of the yeast GST1 gene codes for a GTP-binding protein and is expressed in a proliferation-dependent manner in mammalian cells. EMBO J. 8: 3807-3814, 1989.
[3269] 463. Kikuchi, Y.; Shimatake, H.; Kikucki, A.: A yeast gene required for the G1-to-S transition encodes a protein containing an A-kinase target site and GTPase domain. EMBO J. 7: 1175-1182, 1988.
[3270] 464. Ozawa, K.; Murakami, Y.; Eki, T.; Yokoyama, K.; Soeda, E.; Hoshino, S.; Ui, M.; Hanaoka, F.: Mapping of the human GSPT1 gene, a human homolog of the yeast GST1 gene, to chromosomal band 16p 13.1. Somat. Cell Molec. Genet. 18: 189-194, 1992.
[3271] 465. Nakamura, T.; Alder, H.; Gu, Y.; Prasad, R.; Canaani, O.; Kamada, N.; Gale, R. P.; Lange, B.; Crist, W. M.; Nowell, P. C.; Croce, C. M.; Canaani, E.: Genes on chromosomes 4, 9, and 19 involved in 11q23 abnormalities in acute leukemia share sequence homology and/or common motifs. Proc. Nat. Acad. Sci. 90: 4631-4635, 1993.
[3272] 466. Rubnitz, J. E.; Morrissey, J.; Savage, P. A.; Cleary, M. L.: ENL, the gene fused with HRX in t(11;19) leukemias, encodes a nuclear protein with transcriptional activation potential in lymphoid and myeloid cells. Blood 84: 1747-1752, 1994.
[3273] 467. Thirman, M. J.; Levitan, D. A.; Kobayashi, H.; Simon, M. C.; Rowley, J. D.: Cloning of ELL, a gene that fuses to MLL in a t(11;19)(q23;p13.1) in acute myeloid leukemia. Proc. Nat. Acad. Sci. 91: 12110-12114, 1994.
[3274] 468. Tkachuk, D.C.; Kohler, S.; Cleary, M. L.: Involvement of a homolog of Drosophila trithorax by 11q23 chromosomal translocations in acute leukemias. Cell 71: 691-700, 1992.
[3275] 469. Bibel, M.; Barde, Y.-A.: Neurotrophins: key regulators of cell fate and cell shape in the vertebrate nervous system. Genes Dev. 14: 2919-2937, 2000.
[3276] 470. Bothwell, M.: p75(NTR): a receptor after all. Science 272: 506-507, 1996.
[3277] 471. Carter, B. D.; Lewin, G. R.: Neurotrophins live or let die: does p75(NTR) decide? Neuron 18: 187-190, 1997.
[3278] 472. Ip, N.Y.; Stitt, T. N.; Tapley, P.; Klein, R.; Glass, D. J.; Fandl, J.; Greene, L. A.; Barbacid, M.; Yancopoulos, G. D.: Similarities and differences in the way neurotrophins interact with the Trk receptors in neuronal and normeuronal cells. Neuron 10: 137-149, 1993.
[3279] 473. Knezevich, S. R.; McFadden, D. E.; Tao, W.; Lim, J. F.; Sorensen, P. H. B.: A novel ETV6-NTRK3 gene fusion in congenital fibrosarcoma. Nature Genet. 18: 184-187, 1998.
[3280] 474. Lamballe, F.; Klein, R.; Barbacid, M.: TRKC, a new member of the TRK family of tyrosine protein kinases, is a receptor for neurotrophin-3. Cell 66: 967-979, 1991.
[3281] 475. McGregor, L. M.; Baylin, S. B.; Griffin, C. A.; Hawkins, A. L.; Nelkin, B. D.: Molecular cloning of the cDNA for human TrkC (NTRK3), chromosomal assignment, and evidence for a splice variant. Genomics 22: 267-272, 1994.
[3282] 476. Segal, R. A.; Goumnerova, L. C.; Kwon, Y. K.; Stiles, C. D.; Pomeroy, S. L.: Expression of the neurotrophin receptor TrkC is linked to a favorable outcome in medulloblastoma. Proc. Nat. Acad. Sci. 91: 12867-12871, 1994.
[3283] 477. Valent, A.; Danglot, G.; Bernheim, A.: Mapping of the tyrosine kinase receptors trkA (NTRK1), trkB (NTRK2) and trkC (NTRK3) to human chromosomes 1q22, 9q22 and 15q25 by fluorescence in situ hybridization. Europ. J. Hum. Genet. 5: 102-104, 1997.
[3284] 478. De Windt, L. J.; Lim, H. W.; Bueno, O. F.; Liang, Q.; Delling, U.; Braz, J. C.; Glascock, B. J.; Kimball, T. F.; del Monte, F.; Hajjar, R. J.; Molkentin, J. D.: Targeted inhibition of calcineurin attenuates cardiac hypertrophy in vivo. Proc. Nat. Acad. Sci. 98: 3322-3327, 2001.
[3285] 479. Fuentes, J. J.; Genesca, L.; Kingsbury, T. J.; Cunningham, K. W.; Perez-Riba, M.; Estivill, X.; de la Luna, S.: DSCR1, overexpressed in Down syndrome, is an inhibitor of calcineurin-mediated signaling pathways. Hum. Molec. Genet. 9: 1681-1690, 2000.
[3286] 480. Giri, P.; Higuchi, S.; Kincaid, R. L.: Chromosomal mapping of the human genes for the calmodulin-dependent protein phosphatase (calcineurin) catalytic subunit. Biochem. Biophys. Res. Commun. 181: 252-258, 1991.
[3287] 481. Guerini, D.; Klee, C. B.: Cloning of human calcineurin A: evidence for two isozymes and identification of a polyproline structural domain. Proc. Nat. Acad. Sci. 86: 9183-9187, 1989.
[3288] 482. Leinwand, L. A.: Calcineurin inhibition and cardiac hypertrophy: a matter of balance. Proc. Nat. Acad. Sci. 98: 2947-2949, 2001.
[3289] 483. Malleret, G.; Haditsch, U.; Genoux, D.; Jones, M. W.; Bliss, T. V. P.; Vanhoose, A. M.; Weitlauf, C.; Kandel, E. R.; Winder, D. G.; Mansuy, I. M.: Inducible and reversible enhancement of learning, memory, and long-term potentiation by genetic inhibition of calcineurin. Cell 104: 675-686, 2001.
[3290] 484. Mansuy, I. M.; Mayford, M.; Jacob, B.; Kandel, E. R.; Bach, M. E.: Restricted and regulated overexpression reveals calcineurin as a key component in the transition from short-term to long-term memory. Cell 92: 39-49, 1998.
[3291] 485. Musaro, A.; McCullagh, K. J. A.; Naya, F. J.; Olson, E. N.; Rosenthal, N.: IGF-1 induces skeletal myocyte hypertrophy through calcineurin in association with GATA-2 and NF-ATc1. Nature 400: 581-585, 1999.
[3292] 486. Rothermel, B. A.; McKinsey, T. A.; Vega, R. B.; Nicol, R. L.; Mammen, P.; Yang, J.; Antos, C. L.; Shelton, J. M.; Bassel-Duby, R.; Olson, E. N.; Williams, R. S.: Myocyte-enriched calcineurin-interacting protein, MCIP1, inhibits cardiac hypertrophy in vivo. Proc. Nat. Acad. Sci. 98: 3328-3333, 2001.
[3293] 487. Seitz, D. P.; Pasha, M. K.; Singh, B.; Chu, A.; Sharma, R. K.: Localization and characterization of calcineurin in bovine eye. Invest. Ophthal. Vis. Sci. 43: 15-21, 2002.
[3294] 488. Semsarian, C.; Wu, M.-J.; Ju, Y.-K.; Marciniec, T.; Yeoh, T.; Allen, D. G.; Harvey, R. P.; Graham, R. M.: Skeletal muscle hypertrophy is mediated by a Ca(2+)-dependent calcineurin signalling pathway. Nature 400: 576-581, 1999.
[3295] 489. Wang, M. G.; Yi, H.; Guerini, D.; Klee, C. B.; McBride, O. W. Calcineurin A alpha (PPP3CA), calcineurin A beta (PPP3CB) and calcineurin B (PPP3R1) are located on human chromosomes 4, 10q21-q22 and 2p16-p15 respectively. Cytogenet. Cell Genet. 72: 236-241, 1996.
[3296] 490. Winder, D. G.; Mansuy, I. M.; Osman, M.; Moallem, T. M.; Kandel, E. R.: Genetic and pharmacological evidence for a novel, intermediate phase of long-term potentiation suppressed by calcineurin. Cell 92: 25-37, 1998.
[3297] 491. D'Arcangelo, G.: Personal Communication. Nutley, N.J. Jun. 2, 1995.
[3298] 492. D'Arcangelo, G.; Homayouni, R.; Keshvara, L.; Rice, D. S.; Sheldon, M.; Curran, T.: Reelin is a ligand for lipoprotein receptors. Neuron 24: 471-479, 1999.
[3299] 493. D'Arcangelo, G.; Miao, G. G.; Chen, S.-C.; Soares, H. D.; Morgan, J. I.; Curran, T.: A protein related to extracellular matrix proteins deleted in the mouse mutant reeler. Nature 374: 719-723, 1995.
[3300] 494. DeSilva, U.; D'Arcangelo, G.; Braden, V. V.; Chen, J.; Miao, G. G.; Curran, T.; Green, E. D.: The human reelin gene: isolation, sequencing, and mapping on chromosome 7. Genome Res. 7: 157-164, 1997.
[3301] 495. Green, M. C.: Catalog of mutant genes and polymorphic loci.In: Lyon, M. F.; Searle, A. G.: Genetic Variants and Strains of the Laboratory Mouse. Oxford: Oxford Univ. Press (pub.) (2nd ed.): 1989.
[3302] 496. Hack, I.; Bancila, M.; Loulier, K.; Carroll, P.; Cremer, H.: Reelin is a detachment signal in tangential chain-migration during postnatal neurogenesis. Nature Neurosci. 5: 939-945, 2002.
[3303] 497. Hiesberger, T.; Trommsdorff, M.; Howell, B. W.; Goffinet, A.; Mumby, M. C.; Cooper, J. A.; Herz, J.: Direct binding of reelin to VLDL receptor and apoE receptor 2 induces tyrosine phosphorylation of disabled-1 and modulates tau phosphorylation. Neuron 24: 481-489, 1999.
[3304] 498. Hirotsune, S.; Takahara, T.; Sasaki, N.; Hirose, K.; Yoshiki, A.; Ohashi, T.; Kusakabe, M.; Murakami, Y.; Muramatsu, M.; Watanabe, S.; Nakao, K.; Katsuki, M.; Hayashizaki, Y.: The reeler gene encodes a protein with an EGF-like motif expressed by pioneer neurons. Nature Genet. 10: 77-83, 1995.
[3305] 499. Hong, S. E.; Shugart, Y. Y.; Huang, D. T.; Al Shahwan, S.; Grant, P. E.; Hourihane, J. O.; Martin, N. D. T.; Walsh, C. A.: Autosomal recessive lissencephaly with cerebellar hypoplasia is associated with human RELN mutations. Nature Genet. 26: 93-96, 2000. Note: Erratum: Nature Genet. 27: 225 only, 2001.
[3306] 500. Hourihane, J. O.; Bennett, C. P.; Chaudhuri, R.; Robb, S. A.; Martin, N. D. T.: A sibship with a neuronal migration defect, cerebellar hypoplasia and congenital lymphedema. Neuropediatrics 24: 43-46, 1993.
[3307] 501. Impagnatiello, F.; Guidotti, A. R.; Pesold, C.; Dwivedi, Y.; Caruncho, H.; Pisu, M. G.; Uzunov, D. P.; Smalheiser, N. R.; Davis, J. M.; Pandey, G. N.; Pappas, G. D.; Tueting, P.; Sharma, R. P.; Costa, E.: A decrease of reelin expression as a putative vulnerability factor in schizophrenia. Proc. Nat. Acad. Sci. 95: 15718-15723, 1998.
[3308] 502. Magdaleno, S.; Keshvara, L.; Curran, T.: Rescue of ataxia and preplate splitting by ectopic expression of reelin in reeler mice. Neuron 33: 573-586, 2002.
[3309] 503. Royaux, I.; Lambert de Rouvroit, C.; D'Arcangelo, G.; Demirov, D.; Goffinet, A. M.: Genomic organization of the mouse reelin gene. Genomics 46: 240-250, 1997.
[3310] 504. Trommsdorff, M.; Gotthardt, M.; Hiesberger, T.; Shelton, J.; Stockinger, W.; Nimpf, J.; Hammer, R. E.; Richardson, J. A.; Herz, J.: Reeler/Disabled-like disruption of neuronal migration in knockout mice lacking the VLDL receptor and ApoE receptor 2. Cell 97: 689-701, 1999.
[3311] 505. Yip, J. W.; Yip, Y. P. L.; Nakajima, K.; Capriotti, C.: Reelin controls position of autonomic neurons in the spinal cord. Proc. Nat. Acad. Sci. 97: 8612-8616, 2000.
[3312] 506. Bunn, R. C.; Jensen, M. A.; Reed, B. C.: Protein interactions with the glucose transporter binding protein GLUT1 CBP that provide a link between GLUT1 and the cytoskeleton. Molec. Biol. Cell 10: 819-832, 1999.
[3313] 507. De Vries, L.; Lou, X.; Zhao, G.; Zheng, B.; Farquhar, M. G.: GIPC, a PDZ domain containing protein, interacts specifically with the C terminus of RGS-GAIP. Proc. Nat. Acad. Sci. 95: 12340-12345, 1998.
[3314] 508. Von Kap-Herr, C.; Kandala, G.; Mann, S. S.; Hart, T. C.; Pettenati, M. J.; Setaluri, V.: Assignment of PDZ domain-containing protein GIPC gene (C19 orf3) to human chromosome band 19p13.1 by in situ hybridization and radiation hybrid mapping. Cytogenet. Cell Genet. 89: 234-235, 2000.
[3315] 509. Hoege, C.; Pfander, B.; Moldovan, G.-L.; Pyrowolakis, G.; Jentsch, S.: RAD6-dependent DNA repair is linked to modification of PCNA by ubiquitin and SUMO. Nature 419: 135-141, 2002.
[3316] 510. Koken, M. H. M.; Smit, E. M. E.; Jaspers-Dekker, I.; Oostra, B. A.; Hagemeijer, A.; Bootsma, D.; Hoeijmakers, J. H. J.: Localization of two human homologs, HHR6A and HHR6B, of the yeast DNA repair gene RAD6 to chromosomes Xq24-q25 and 5q23-q31. Genomics 12: 447-453, 1992.
[3317] 511. Lench, N.J.; Thompson, J.; Markham, A. F.; Robinson, P. A.: (CGG) trinucleotide repeat polymorphism in the 5-prime region of the HHR6B gene: the human homolog of the yeast DNA repair gene RAD6. Hum. Genet. 96: 369-370, 1995.
[3318] 512. Roest, H. P.; van Klaveren, J.; de Wit, J.; van Gurp, C. G.; Koken, M. H. M.; Vermey, M.; van Roijen, J. H.; Hoogerbrugge, J. W.; Vreeburg, J. T. M.; Baarends, W. M.; Bootsma, D.; Grootegoed, J. A.; Hoeijmakers, J. H. J.: Inactivation of the HR6B ubiquitin-conjugating DNA repair enzyme in mice causes male sterility associated with chromatin modification. Cell 86: 799-810, 1996.
[3319] 513. Roller, M. L.; Lossie, A. C.; Koken, M. H. M.; Smit, E. M. E.; Hagemeijer, A.; Camper, S. A.: Localization of sequences related to the human RAD6 DNA repair gene on mouse chromosomes 11 and 13. Mammalian Genome 6: 305-306, 1995.
[3320] 514. Kang, H.; Sun, L. D.; Atkins, C. M.; Soderling, T. R.; Wilson, M. A.; Tonegawa, S.: An important role of neural activity-dependent CaMKIV signaling in the consolidation of long-term memory. Cell 106: 771-783, 2001.
[3321] 515. Raman, V.; Blaeser, F.; Ho, N.; Engle, D. L.; Williams, C. B.; Chatila, T. A.: Requirement for Ca(2+)/calmodulin-dependent kinase type IV/Gr in setting the thymocyte selection threshold. J. Immun. 167: 6270-6278, 2001.
[3322] 516. Sikela, J. M.; Adamson, M. C.; Wilson-Shaw, D.; Kozak, C. A.: Genetic mapping of the gene for Ca(2+)/calmodulin-dependent protein kinase IV (Camk-4) to mouse chromosome 18. Genomics 8: 579-582, 1990.
[3323] 517. Sikela, J. M.; Law, M. L.; Kao, F.-T.; Hartz, J. A.; Wei, Q.; Hahn, W. E.: Chromosomal localization of the human gene for brain Ca(2+)/calmodulin-dependent protein kinase type IV. Genomics 4: 21-27, 1989.
[3324] 518. Wei, F.; Qiu, C.-S.; Liauw, J.; Robinson, D. A.; Ho, N.; Chatila, T.; Zhuo, M.: Calcium-calmodulin-dependent protein kinase IV is required for fear memory. Nature Neurosci. 5: 573-579, 2002.
[3325] 519. Wu, H.; Kanatous, S. B.; Thurmond, F. A.; Gallardo, T.; Isotani, E.; Bassel-Duby, R.; Williams, R. S.: Regulation of mitochondrial biogenesis in skeletal muscle by CaMK. Science 296: 349-352, 2002.
[3326] 520. Wu, J. Y.; Ribar, T. J.; Cummings, D. E.; Burton, K. A.; McKnight, G. S.; Means, A. R.: Spermiogenesis and exchange of basic nuclear proteins are impaired in male germ cells lacking Camk4. Nature Genet. 25: 448-452, 2000.
[3327] 521. Cherif-Zahar, B.; Raynal, V.; Gane, P.; Maffei, M.-G.; Bailly, P.; Gibbs, B.; Colin, Y.; Cartron, J.-P.: Candidate gene acting as a suppressor of the RH locus in most cases of Rh-deficiency. Nature Genet. 12: 168-173, 1996.
[3328] 522. Han, X.; Sterling, H.; Chen, Y.; Saginario, C.; Brown, E. J.; Frazier, W. A.; Lindberg, F. P.; Vignery, A.: CD47, a ligand for the macrophage fusion receptor, participates in macrophage multinucleation. J. Biol. Chem. 275: 37984-37992, 2000.
[3329] 523. Lindberg, F. P.; Bullard, D.C.; Caver, T. E.; Gresham, H. D.; Beaudet, A. L.; Brown, E. J.: Decreased resistance to bacterial infection and granulocyte defects in IAP-deficient mice. Science 274: 795-798, 1996.
[3330] 524. Lindberg, F. P.; Lublin, D. M.; Telen, M. J.; Veile, R. A.; Miller, Y. E.; Donis-Keller, H.; Brown, E. J.: Rh-related antigen CD47 is the signal-transducer integrin-associated protein. J. Biol. Chem. 269: 1567-1570, 1994.
[3331] 525. Mawby, W. J.; Holmes, C. H.; Anstee, D. J.; Spring, F. A.; Tanner, M. J. A.: Isolation and characterization of CD47 glycoprotein: a multispanning membrane protein which is the same as integrin-associated protein (IAP) and the ovarian tumour marker OA3. Biochem. J. 304: 525-530, 1994.
[3332] 526. Miller, Y. E.; Daniels, G. L.; Jones, C.; Palmer, D. K.: Identification of a cell-surface antigen produced by a gene on human chromosome 3 (cen-q22) and not expressed by Rh(null) cells. Am. J. Hum. Genet. 41: 1061-1070, 1987.
[3333] 527. Oldenborg, P.-A.; Zheleznyak, A.; Fang, Y.-F.; Lagenaur, C. F.; Gresham, H. D.; Lindberg, F. P.: Role of CD47 as a marker of self on red blood cells. Science 288: 2051-2054, 2000.
[3334] 528. Bunnell, B.; Heath, L. S.; Adams, D. E.; Lahti, J. M.; Kidd, V. J.: Elevated expression of a p58 protein kinase leads to changes in the CHO cell cycle. Proc. Nat. Acad. Sci. 87: 7467-7471, 1990.
[3335] 529. Cornelis, S.; Bruynooghe, Y.; Denecker, G.; Van Huffel, S.; Tinton, S.; Beyaert, R.: Identification and characterization of a novel cell cycle-regulated internal ribosome entry site. Molec. Cell 5: 597-605, 2000.
[3336] 530. Eipers, P. G.; Barnoski, B. L.; Han, J.; Carroll, A. J.; Kidd, V. J.: Localization of the expressed human p58 protein kinase chromosomal gene to chromosome 1p36 and a highly related sequence to chromosome 15. Genomics 11: 621-629, 1991.
[3337] 531. Eipers, P. G.; Lahti, J. M.; Kidd, V. J.: Structure and expression of the human p58(clk-1) protein kinase chromosomal gene. Genomics 13: 613-621, 1992.
[3338] 532. Gururajan, R.; Lahti, J. M.; Grenet, J.; Easton, J.; Gruber, I.; Ambros, P. F.; Kidd, V. J.: Duplication of a genomic region containing the Cdc2L1-2 and MMP21-22 genes on human chromosome 1p36.3 and their linkage to D1Z2. Genome Res. 8: 929-939, 1998.
[3339] 533. Lahti, J. M.; Valentine, M.; Xiang, J.; Jones, B.; Amann, J.; Grenet, J.; Richmond, G.; Look, A. T.; Kidd, V. J.: Alterations in the PITSLRE protein kinase gene complex on chromosome 1p36 in childhood neuroblastoma. Nature Genet. 7: 370-375, 1994.
[3340] 534. White, P. S.; Maris, J. M.; Beltinger, C.; Sulman, E.; Marshall, H. N.; Fujimori, M.; Kaufman, B. A.; Biegel, J. A.; Allen, C.; Hilliard, C.; Valentine, M. B.; Look, A. T.; Enomoto, H.; Sakiyama, S.; Brodeur, G. M.: A region of consistent deletion in neuroblastoma maps within human chromosome 1p36.2-36.3. Proc. Nat. Acad. Sci. 92: 5520-5524, 1995.
[3341] 535. Xiang, J.; Lahti, J. M.; Grenet, J.; Easton, J.; Kidd, V. J.: Molecular cloning and expression of alternatively spliced PITSLRE protein kinase isoforms. J. Biol. Chem. 269: 15786-15794, 1994.-
[3342] 536. Plon, S. E.; Leppig, K. A.; Do, H.-N.; Groudine, M.: Cloning of the human homolog of the CDC34 cell cycle gene by complementation in yeast. Proc. Nat. Acad. Sci. 90: 10484-10488, 1993.
[3343] 537. Astuto, L. M.; Bork, J. M.; Weston, M. D.; Askew, J. W.; Fields, R. R.; Orten, D. J.; Ohliger, S. J.; Riazuddin, S.; Morell, R. J.; Khan, S.; Riazuddin, S.; Kremer, H.; and 15 others: CDH23 mutation and phenotype heterogeneity: a profile of 107 diverse families with Usher syndrome and nonsyndromic deafness. Am. J. Hum. Genet. 71: 262-275, 2002.
[3344] 538. Bolz, H.; von Brederlow, B.; Ramirez, A.; Bryda, E. C.; Kutsche, K.; Nothwang, H. G.; Seeliger, M.; Cabrera, M. C.-S.; Vila, M. C.; Molina, O. P.; Gal, A.; Kubisch, C.: Mutation of CDH23, encoding a new member of the cadherin gene family, causes Usher syndrome type ID. Nature Genet. 27: 108-112, 2001.
[3345] 539. Bork, J. M.; Peters, L. M.; Riazuddin, S.; Bernstein, S. L.; Ahmed, Z. M.; Ness, S. L.; Polomeno, R.; Ramesh, A.; Schloss, M.; Srisailpathy, C. R. S.; Wayne, S.; Bellman, S.; and 16 others: Usher syndrome ID and nonsyndromic autosomal recessive deafness DFNB12 are caused by allelic mutations of the novel cadherin-like gene CDH23. Am. J. Hum. Genet. 68: 26-37, 2001.
[3346] 540. Di Palma, F.; Holme, R. H.; Bryda, E. C.; Belyantseva, I. A.; Pellegrino, R.; Kachar, B.; Steel, K. P.; Noben-Trauth, K.: Mutations in Cdh23, encoding a new type of cadherin, cause stereocilia disorganization in waltzer, the mouse model for Usher syndrome type ID. Nature Genet. 27: 103-107, 2001.
[3347] 541. von Brederlow, B.; Bolz, H.; Janecke, A.; La O Cabrera, A.; Rudolph, G.; Lorenz, B.; Schwinger, E.; Gal, A.: Identification and in vitro expression of novel CDH23 mutations of patients with Usher syndrome type ID. Hum. Mutat. 19: 268-273, 2002.
[3348] 542. Chalmers, I. J.; Hofler, H.; Atkinson, M. J.: Mapping of a cadherin gene cluster to a region of chromosome 5 subject to frequent allelic loss in carcinoma. Genomics 57: 160-163, 1999.
[3349] 543. Shimoyama, Y.; Gotoh, M.; Terasaki, T.; Kitajima, M.; Hirohashi, S.: Isolation and sequence analysis of human cadherin-6 complementary DNA for the full coding sequence and its expression in human carcinoma cells. Cancer Res. 55: 2206-2211, 1995.
[3350] 544. Suzuki, S.; Sano, K.; Tanihara, H.: Diversity of the cadherin family: evidence for eight new cadherins in nervous tissue. Cell Regul. 2: 261-270, 1991.
[3351] 545. Araujo, H.; Danziger, N.; Cordier, J.; Glowinski, J.; Chneiweiss, H.: Characterization of PEA-15, a major substrate for protein kinase C in astrocytes. J. Biol. Chem. 268: 5911-5920, 1993.
[3352] 546. Bera, T. K.; Guzman, R. C.; Miyamoto, S.; Panda, D. K.; Sasaki, M.; Hanyu, K.; Enami, J.; Nandi, S.: Identification of a mammary transforming gene (MAT1) associated with mouse mammary carcinogenesis. Proc. Nat. Acad. Sci. 91: 9789-9793, 1994.
[3353] 547. Condorelli, G.; Vigliotta, G.; lavarone, C.; Caruso, M.; Tocchetti, C. G.; Andreozzi, F.; Cafieri, A.; Tecce, M. F.; Formisano, P.; Beguinot, L.; Beguinot, F.: PED/PEA-15 gene controls glucose transport and is overexpressed in type 2 diabetes mellitus. EMBO J. 17: 3858-3866, 1998.
[3354] 548. Danziger, N.; Yokoyama, M.; Jay, T.; Cordier, J.; Glowinski, J.; Chneiweiss, H.: Cellular expression, developmental regulation, and phylogenic conservation of PEA-15, the astrocytic major phosphoprotein and protein kinase C substrate. J. Neurochem. 64: 1016-1025, 1995.
[3355] 549. Estelles, A.; Yokoyama, M.; Nothias, F.; Vincent, J.-D.; Glowinski, J.; Vernier, P.; Chneiweiss, H.: The major astrocytic phosphoprotein PEA-15 is encoded by two mRNAs conserved on their full length in mouse and human. J. Biol. Chem. 271: 14800-14806, 1996.
[3356] 550. Hwang, S.; Kuo, W.-L.; Cochran, J. F.; Guzman, R. C.; Tsukamoto, T.; Bandyopadhyay, G.; Myambo, K.; Collins, C. C.: Assignment of HMAT1, the human homolog of the murine mammary transforming gene (MAT1) associated with tumorigenesis, to 1q21.1, a region frequently gained in human breast cancers. Genomics 42: 540-542, 1997.
[3357] 551. Wolford, J. K.; Bogardus, C.; Ossowski, V.; Prochazka, M.: Molecular characterization of the human PEA15 gene on 1 q21-q22 and association with type 2 diabetes mellitus in Pima Indians. Gene 241: 143-148, 2000.
[3358] 552. Best, J. L.; Presky, D. H.; Swerlick, R. A.; Burns, D. K.; Chu, W.: Cloning of a full-length cDNA sequence encoding a cdc2-related protein kinase from human endothelial cells. Biochem. Biophys. Res. Commun. 208: 562-568, 1995.
[3359] 553. Bullrich, F.; MacLachlan, T. K.; Sang, N.; Druck, T.; Veronese, M. L.; Allen, S. L.; Chiorazzi, N.; Koff, A.; Heubner, K.; Croce, C. M.; Giordano, A.: Chromosomal mapping of members of the cdc2 family of protein kinases, cdk3, cdk6, PISSLRE, and PITALRE, and a cdk inhibitor, p27-Kip1, to regions involved in human cancer. Cancer Res. 55: 1199-1205, 1995.
[3360] 554. Fong, Y. W.; Zhou, Q.: Stimulatory effect of splicing factors on transcriptional elongation. Nature 414: 929-933, 2001.
[3361] 555. Garriga, J.; Mayol, X.; Grana, X.: The CDC2-related kinase PITALRE is the catalytic subunit of active multimeric protein complexes. Biochem. J. 319: 293-298, 1996.
[3362] 556. Grana, X.; De Luca, A.; Sang, N.; Fu, Y.; Claudio, P. P.; Rosenblatt, J.; Morgan, D. O.; Giordano, A.: PITALRE, a nuclear CDC2-related protein kinase that phosphorylates the retinoblastoma protein in vitro. Proc. Nat. Acad. Sci. 91: 3834-3838, 1994.
[3363] 557. Liu, H.; Rice, A. P.: Genomic organization and characterization of promoter function of the human CDK9 gene. Gene 252: 51-59, 2000.
[3364] 558. Nguyen, V. T.; Kiss, T.; Michels, A. A.; Bensaude, O.: 7SK small nuclear RNA binds to and inhibits the activity of CDK9/cyclin T complexes. Nature 414: 322-325, 2001.
[3365] 559. Yang, Z.; Zhu, Q.; Luo, K.; Zhou, Q.: The 7SK small nuclear RNA inhibits the CDK9/cyclin T1 kinase to control transcription. Nature 414: 317-322, 2001.
[3366] 560. Hirai, H.; Roussel, M. F.; Kato, J.-Y.; Ashmun, R. A.; Sherr, C. J.: Novel INK4 proteins, p19 and p18, are specific inhibitors of cyclin D-dependent kinases CDK4 and CDK6. Molec. Cell. Biol. 15: 2672-2681, 1995.
[3367] 561. Okuda, T.; Hirai, H.; Valentine, V. A.; Shurtleff, S. A.; Kidd, V. J.; Lahti, J. M.; Sherr, C. J.; Downing, J. R.: Molecular cloning, expression pattern, and chromosomal localization of human CDKN2D/INK4d, an inhibitor of cyclin D-dependent kinases. Genomics 29: 623-630, 1995.
[3368] 562. Caloca, M. J.; Garcia-Bermejo, M. L.; Blumberg, P. M.; Lewin, N. E.; Kremmer, E.; Mischak, H.; Wang, S.; Nacro, K.; Bienfait, B.; Marquez, V. E.; Kazanietz, M. G.: Beta-2-chimaerin is a novel target for diacylglycerol: binding properties and changes in subcellular localization mediated by ligand binding to its C1 domain. Proc. Nat. Acad. Sci. 96: 11854-11859, 1999.
[3369] 563. Leung, T.; How, B.-E.; Manser, E.; Lim, L.: Cerebellar beta-2-chimaerin, a GTPase-activating protein for p21 Ras-related Rac is specifically expressed in granule cells and has a unique N-terminal SH2 domain J. Biol. Chem. 269: 12888-12892, 1994.
[3370] 564. Leung, T.; How, B.-E.; Manser, E.; Lim, L.: Germ cell beta-chimaerin, a new GTPase-activating protein for p21rac, is specifically expressed during the acrosomal assembly stage in rat testis. J. Biol. Chem. 268: 3813-3816, 1993.
[3371] 565. Yuan, S.; Miller, D. W.; Barnett, G. H.; Hahn, J. F.; Williams, B. R.: Identification and characterization of human beta 2-chimaerin: association with malignant transformation in astrocytoma. Cancer Res. 55: 3456-3461, 1995.
[3372] 566. Anand, R.; Lindstrom, J.: Chromosomal localization of seven neuronal nicotinic acetylcholine receptor subunit genes in humans. Genomics 13: 962-967, 1992.
[3373] 567. Boulter, J.; O'Shea-Greenfield, A.; Duvoisin, R. M.; Connolly, J. G.; Wada, E.; Jensen, A.; Gardner, P. D.; Ballivet, M.; Deneris, E. S.; McKinnon, D.; Heinemann, S.; Patrick, J.: Alpha3, alpha5 and beta4: three members of the rat neuronal nicotinic acetylcholine receptor-related gene family form a gene cluster. J. Biol. Chem. 265: 4472-4482, 1990.
[3374] 568. Duga, S.; Solda, G.; Asselta, R.; Bonati, M. T.; Dalpra, L.; Malcovati, M.; Tenchini, M. L.: Characterization of the genomic structure of the human neuronal nicotinic acetylcholine receptor CHRNA5/A3/B4 gene cluster and identification of novel intragenic polymorphisms. J. Hum. Genet. 46: 640-648, 2001.
[3375] 569. Elliott, K. J.; Ellis, S. B.; Berckhan, K. J.; Urrutia, A.; Chavez-Noriega, L. E.; Johnson, E. C.; Velicelebi, G.; Harpold, M. M.: Comparative structure of human neuronal alpha(2)-alpha(7) and beta(2)-beta(4) nicotinic acetylcholine receptor subunits and functional expression of the alpha(2), alpha(3), alpha(4), alpha(7), beta(2), and beta(4) subunits. J. Molec. Neurosci. 7: 217-228, 1996.
[3376] 570. Eng, C. M.; Kozak, C. A.; Beaudet, A. L.; Zoghbi, H. Y.: Mapping of multiple subunits of the neuronal nicotinic acetylcholine receptor to chromosome 15 in man and chromosome 9 in mouse. Genomics 9: 278-282, 1991.
[3377] 571. Flora, A.; Schulz, R.; Benfante, R.; Battaglioli, E.; Terzano, S.; Clementi, F.; Fornasari, D.: Transcriptional regulation of the human alpha5 nicotinic receptor subunit gene in neuronal and non-neuronal tissues. Europ. J. Pharm. 393: 85-95, 2000.
[3378] 572. Fornasari, D.; Chini, B.; Tarroni, P.; Clementi, F.: Molecular cloning of human neuronal nicotinic receptor alpha(3)-subunit. Neurosci. Lett. 111: 351-356, 1990.
[3379] 573. Groot Kormelink, P. J.; Luyten, W. H. M. L.: Cloning and sequence of full-length cDNAs encoding the human neuronal nicotinic acetylcholine receptor (nAChR) subunits beta-3 and beta-4 and expression of seven nAChR subunits in the human neuroblastoma cell line SH-SY5Y and/or IMR-32. FEBS Left. 400: 309-314, 1997.
[3380] 574. Khakh, B. S.; Zhou, X.; Sydes, J.; Galligan, J. J.; Lester, H. A.: State-dependent cross-inhibition between transmitter-gated cation channels. Nature 406: 405-410, 2000.
[3381] 575. Mihovilovic, M.; Roses, A. D.: Expression of mRNAs in human thymus coding for the alpha-3 subunit of a neuronal acetylcholine receptor. Exp. Neurol. 111: 175-180, 1991.
[3382] 576. Raimondi, E.; Rubboli, F.; Moralli, D.; Chini, B.; Formasari, D.; Tarroni, P.; De Carli, L.; Clementi, F.: Chromosomal localization and physical linkage of the genes encoding the human alpha-3, alpha-5, and beta-4 neuronal nicotinic receptor subunits. Genomics 12: 849-850, 1992.
[3383] 577. Rempel, N.; Heyers, S.; Engels, H.; Sleegers, E.; Steinlein, O. K.: The structures of the human neuronal nicotinic acetylcholine receptor beta-2- and alpha-3-subunit genes (CHRNB2 and CHRNA3). Hum. Genet. 103: 645-653, 1998.
[3384] 578. Xu, W.; Gelber, S.; Orr-Urtreger, A.; Armstrong, D.; Lewis, R. A.; Ou, C.-N.; Patrick, J.; Role, L.; De Biasi, M.; Beaudet, A. L.: Megacystis, mydriasis, and ion channel defect in mice lacking the alpha-3 neuronal nicotinic acetylcholine receptor. Proc. Nat. Acad. Sci. 96: 5746-5751, 1999.
[3385] 579. Watanabe, T. K.; Shimizu, F.; Nagata, M.; Kawai, A.; Fujiwara, T.; Nakamura, Y.; Takahashi, E.; Hirai, Y.: Cloning, expression, and mapping of CKAP1, which encodes a putative cytoskeleton-associated protein containing a CAP-GLY domain. Cytogenet. Cell Genet. 72: 208-211, 1996.
[3386] 580. Burrows, N. P.; Nicholls, A. C.; Richards, A. J.; Luccarini, C.; Harrison, J. B.; Yates, J. R. W.; Pope, F. M.: A point mutation in an intronic branch site results in aberrant splicing of COL5A1 and in Ehlers-Danlos syndrome type II in two British families. Am. J. Hum. Genet. 63: 390-398, 1998.
[3387] 581. Burrows, N. P.; Nicholls, A. C.; Yates, J. R. W.; Gatward, G.; Sarathachandra, P.; Richards, A.; Pope, F. M.: The gene encoding collagen alpha-1(V) (COL5A1) is linked to mixed Ehlers-Danlos syndrome type I/II. J. Invest. Derm. 106: 1273-1276, 1996.
[3388] 582. Caridi, G.; Pezzolo, A.; Bertelli, R.; Gimelli, G.; Di Donato, A.; Candiano, G.; Ghiggeri, G. M.: Mapping of the human COL5A1 gene to chromosome 9q34.3. Hum. Genet. 90: 174-176, 1992.
[3389] 583. De Paepe, A.; Nuytinck, L.; Hausser, I.; Anton-Lamprecht, I.; Naeyaert, J.-M.: Mutations in the COL5A1 gene are causal in the Ehlers-Danlos syndromes I and II. Am. J. Hum. Genet. 60: 547-554, 1997.
[3390] 584. Fichard, A.; Kleman, J.-P.; Ruggiero, F.: Another look at collagen V and XI molecules. Matrix Biol. 14: 515-531, 1994.
[3391] 585. Giunta, C.; Steinmann, B.: Compound heterozygosity for a disease-causing G1489D and disease-modifying G530S substitution in COL5A1 of a patient with the classical type of Ehlers-Danlos syndrome: an explanation of intrafamilial variability? Am. J. Med. Genet. 90: 72-79, 2000.
[3392] 586. Greenspan, D. S.; Byers, M. G.; Eddy, R. L.; Cheng, W.; Jani-Sait, S.; Shows, T. B.: Human collagen gene COL5A1 maps to the q34.2-q34.3 region of chromosome 9, near the locus for nail-patella syndrome. Genomics 12: 836-837, 1992.
[3393] 587. Greenspan, D. S.; Northrup, H.; Au, K.-S.; McAllister, K. A.; Francomano, C. A.; Wenstrup, R. J.; Marchuk, D. A.; Kwiatkowski, D. J.: COL5A1: fine genetic mapping and exclusion as candidate gene in families with nail-patella syndrome, tuberous sclerosis 1, hereditary hemorrhagic telangiectasia, and Ehlers-Danlos syndrome type II. Genomics 25: 737-739, 1995.
[3394] 588. Loughlin, J.; Irven, C.; Hardwick, L. J.; Butcher, S.; Walsh, S.; Wordsworth, P.; Sykes, B.: Linkage of the gene that encodes the alpha-1 chain of type V collagen (COL5A1) to type II Ehlers-Danlos syndrome (EDS II). Hum. Molec. Genet. 4: 1649-1651, 1995.
[3395] 589. Mattei, M. G.; Bruce, B.; Karsenty, G.: Mouse alpha-1 type V collagen gene maps to the [A2-B] region of chromosome 2. Genomics 16: 786-788, 1993.
[3396] 590. Nicholls, A. C.; McCarron, S.; Narcisi, P.; Pope, F. M.: Molecular abnormalities of type V collagen in Ehlers Danlos syndrome (Abstract) Am. J. Hum. Genet. 55 (suppl.): A233, 1994.
[3397] 591. Nicholls, A. C.; Oliver, J. E.; McCarron, S.; Harrison, J. B.; Greenspan, D. S.; Pope, F. M.: An exon skipping mutation of a type V collagen gene (COL5A1) in Ehlers-Danlos syndrome. J. Med. Genet. 33: 940-946, 1996.
[3398] 592. Schwarze, U.; Atkinson, M.; Hoffman, G. G.; Greenspan, D. S.; Byers, P. H.: Null alleles of the COL5A1 gene of type V collagen are a cause of the classical forms of Ehlers-Danlos syndrome (types I and II). Am. J. Hum. Genet. 66: 1757-1765, 2000.
[3399] 593. Takahara, K.; Hoffman, G. G.; Greenspan, D. S.: Complete structural organization of the human alpha-1(V) collagen gene (COL5A1): divergence from the conserved organization of other characterized fibrillar collagen genes. Genomics 29: 588-597, 1995.
[3400] 594. Takahara, K.; Sato, Y.; Okazawa, K.; Okamoto, N.; Noda, A.; Yaoi, Y.; Kato, I.: Complete primary structure of human collagen alpha-1(V) chain. J. Biol. Chem. 266: 13124-13129, 1991.
[3401] 595. Takahara, K.; Schwarze, U.; Imamura, Y.; Hoffman, G. G.; Toriello, H.; Smith, L. T.; Byers, P. H.; Greenspan, D. S.: Order of intron removal influences multiple splice outcomes, including a two-exon skip, in a COL5A1 acceptor-site mutation that results in abnormal pro-alpha-1(V) N-propeptides and Ehlers-Danlos syndrome type I. Am. J. Hum. Genet. 71: 451-465, 2002.
[3402] 596. Wenstrup, R. J.; Florer, J. B.; Willing, M. C.; Giunta, C.; Steinmann, B.; Young, F.; Susic, M.; Cole, W. G.: COL5A1 haploinsufficiency is a common molecular mechanism underlying the classical form of EDS. Am. J. Hum. Genet. 66: 1766-1776, 2000.
[3403] 597. Wenstrup, R. J.; Langland, G. T.; Willing, M. C.; D'Souza, V. N.; Cole, W. G.: A splice-junction mutation in the region of COL5A1 that codes for the carboxylpropeptide of pro-alpha-1 (V) chains results in the gravis form of the Ehlers-Danlos syndrome (type I). Hum. Molec. Genet. 5: 1733-1736, 1996.
[3404] 598. Chen, H.; Jawahar, S.; Qian, Y.; Duong, Q.; Chan, G.; Parker, A.; Meyer, J. M.; Moore, K. J.; Chayen, S.; Gross, D. J.; Glaser, B.; Permutt, M. A.; Fricker, L. D.: Missense polymorphism in the human carboxypeptidase E gene alters enzymatic activity. Hum. Mutat. 18: 120-131, 2001.
[3405] 599. Cool, D. R.; Normant, E.; Shen, F.; Chen, H.-C.; Pannell, L.; Zhang, Y.; Loh, Y. P.: Carboxypeptidase E is a regulated secretory pathway sorting receptor: genetic obliteration leads to endocrine disorders in Cpe(fat) mice. Cell 88: 73-83, 1997.
[3406] 600. Hall, C.; Manser, E.; Spurr, N. K.; Lim, L.: Assignment of the human carboxypeptidase E (CPE) gene to chromosome 4. Genomics 15: 461-463, 1993.
[3407] 601. Manser, E.; Fernandez, D.; Loo, L.; Goh, P. Y.; Monfries, C.; Hall, C.; Lim, L.: Human carboxypeptidase E: isolation and characterization of the cDNA, sequence conservation, expression and processing in vitro. Biochem. J. 267: 517-525, 1990.
[3408] 602. Naggert, J. K.; Fricker, L. D.; Varlamov, O.; Nishina, P. M.; Rouille, Y.; Steiner, D. F.; Carroll, R. J.; Paigen, B. J.; Leiter, E. H.: Hyperproinsulinaemia in obese fat/fat mice associated with a carboxypeptidase E mutation which reduces enzyme activity. Nature Genet. 10: 135-142, 1995.
[3409] 603. Fish, K. J.; Cegielska, A.; Getman, M. E.; Landes, G. M.; Virshup, D. M.: Isolation and characterization of human casein kinase I-epsilon (CKI), a novel member of the CKI gene family. J. Biol. Chem. 270: 14875-14883, 1995.
[3410] 604. Graves, P. R.; Haas, D. W.; Hagedorn, C. H.; DePaoli-Roach, A. A.; Roach, P. J.: Molecular cloning, expression, and characterization of a 49-kilodalton casein kinase I isoform from rat testis. J. Biol. Chem. 268: 6394-6401, 1993.
[3411] 605. Kusuda, J.; Hidari, N.; Hirai, M.; Hashimoto, K.: Sequence analysis of the cDNA for the human casein kinase 1-delta (CSNK1D) gene and its chromosomal localization. Genomics 32: 140-143, 1996.
[3412] 606. Good, P. J.; Chen, Q.; Warner, S. J.; Herring, D.C.: A family of human RNA-binding proteins related to the Drosophila Bruno transcriptional regulator. J. Biol. Chem. 275: 28583-28592, 2000.
[3413] 607. Roberts, R.; Timchenko, N. A.; Miller, J. W.; Reddy, S.; Caskey, C. T.; Swanson, M. S.; Timchenko, L. T.: Altered phosphorylation and intracellular distribution of a (CUG)ₙ triplet repeat RNA-binding protein in patients with myotonic dystrophy and in myotonin protein kinase knockout mice. Proc. Nat. Acad. Sci. 94: 13221-13226, 1997.
[3414] 608. Timchenko, L. T.; Miller, J. W.; Timchenko, N. A.; DeVore, D. R.; Datar, K. V.; Lin, L.; Roberts, R.; Caskey, C. T.; Swanson, M. S.: Identification of a (CUG)ₙ triplet repeat RNA-binding protein and its expression in myotonic dystrophy. Nucleic Acids Res. 24: 4407-4414, 1996.
[3415] 609. Timchenko, L. T.; Timchenko, N. A.; Caskey, C. T.; Roberts, R.: Novel proteins with binding specificity for DNA CTG repeats and RNA CUG repeats: implications for myotonic dystrophy. Hum. Molec. Genet. 5: 115-121, 1996.
[3416] 610. Arahata, K.; Hayashi, Y. K.; Mizuno, Y.; Yoshida, M.; Ozawa, E.: Dystrophin-associated glycoprotein and dystrophin co-localisation at sarcolemma in Fukuyama congenital muscular dystrophy. (Letter) Lancet 342: 623-624, 1993.
[3417] 611. Campanelli, J. T.; Roberds, S. L.; Campbell, K. P.; Scheller, R. H.: A role for dystrophin-associated glycoproteins and utrophin in agrin-induced AChR clustering. Cell 77: 663-674, 1994.
[3418] 612. Cao, W.; Henry, M. D.; Borrow, P.; Yamada, H.; Elder, J. H.; Ravkov, E. V.; Nichol, S. T.; Compans, R. W.; Campbell, K. P.; Oldstone, M. B. A.: Identification of alpha-dystroglycan as a receptor for lymphocytic choriomeningitis virus and Lassa fever virus. Science 282: 2079-2081, 1998.
[3419] 613. Cohn, R. D.; Henry, M. D.; Michele, D. E.; Barresi, R.; Saito, F.; Moore, S. A.; Flanagan, J. D.; Skwarchuk, M. W.; Robbins, M. E.; Mendell, J. R.; Williamson, R. A.; Campbell, K. P.: Disruption of Dag1 in differentiated skeletal muscle reveals a role for dystroglycan in muscle regeneration. Cell 110: 639-648, 2002.
[3420] 614. Cote, P. D.; Moukhles, H.; Lindenbaum, M.; Carbonetto, S.: Chimaeric mice deficient in dystroglycans develop muscular dystrophy and have disrupted myoneural synapses. Nature Genet. 23: 338-342, 1999.
[3421] 615. Gee, S. H.; Montanaro, F.; Lindenbaum, M. H.; Carbonetto, S.: Dystroglycan-alpha, a dystrophin-associated glycoprotein, is a functional agrin receptor. Cell 77: 675-686, 1994.
[3422] 616. Gorecki, D.C.; Derry, J. M. J.; Barnard, E. A.: Dystroglycan: brain localisation and chromosome mapping in the mouse. Hum. Molec. Genet. 3: 1589-1597, 1994.
[3423] 617. Hayashi, Y. K.; Ogawa, M.; Tagawa, K.; Noguchi, S.; Ishihara, T.; Nonaka, I.; Arahata, K.: Selective deficiency of alpha-dystroglycan in Fukuyama-type congenital muscular dystrophy. Neurology 57: 115-121, 2001.
[3424] 618. Henry, M. D.; Campbell, K. P.: A role for dystroglycan in basement membrane assembly. Cell 95: 859-970, 1998.
[3425] 619. Ibraghimov-Beskrovnaya, O.; Ervasti, J. M.; Leveille, C. J.; Slaughter, C. A.; Sernett, S. W.; Campbell, K. P.: Primary structure of dystrophin-associated glycoproteins linking dystrophin to the extracellular matrix. Nature 355: 696-702, 1992.
[3426] 620. Ibraghimov-Beskrovnaya, O.; Milatovich, A.; Ozcelik, T.; Yang, B.; Francke, U.; Campbell, K. P.: Dystroglycan: tissue distribution, human muscle cDNA, genomic structure and chromosome mapping. (Abstract) Am. J. Hum. Genet. 51 (suppl.): A130 only, 1992.
[3427] 621. Ibraghimov-Beskrovnaya, O.; Milatovich, A.; Ozcelik, T.; Yang, B.; Koepnick, K.; Francke, U.; Campbell, K. P.: Human dystroglycan: skeletal muscle cDNA, genomic structure, origin of tissue specific isoforms and chromosomal localization. Hum. Molec. Genet. 2: 1651-1657, 1993.
[3428] 622. Ma, J.; Nastuk, M. A.; McKechnie, B. A.; Fallon, J. R.: The agrin receptor: localization in the postsynaptic membrane, interaction with agrin, and relationship to the acetylcholine receptor. J. Biol. Chem. 268: 25108-25117, 1993.
[3429] 623. Matsumura, K.; Nonaka, I.; Campbell, K. P.: Abnormal expression of dystrophin-associated proteins in Fukuyama-type congenital muscular dystrophy. Lancet 341: 521-522, 1993.
[3430] 624. Matsumura, K.; Tome, F. M. S.; Collin, H.; Azibi, K.; Chaouch, M.; Kaplan, J.-C.; Fardeau, M.; Campbell, K. P.: Deficiency of the 50K dystrophin-associated glycoprotein in severe childhood autosomal recessive muscular dystrophy. Nature 359: 320-322, 1992.
[3431] 625. Matsumura, K.; Tome, F. M. S.; Ionasescu, V.; Ervasti, J. M.; Anderson, R. D.; Romero, N. B.; Simon, D.; Recan, D.; Kaplan, J.-C.; Fardeau, M.; Campbell, K. P.: Deficiency of dystrophin-associated proteins in Duchenne muscular dystrophy patients lacking COOH-terminal domains of dystrophin. J. Clin. Invest. 92: 866-871, 1993.
[3432] 626. Michele, D. E.; Barresi, R.; Kanagawa, M.; Saito, F.; Cohn, R. D.; Satz, J. S.; Dollar, J.; Nishino, I.; Kelley, R. I.; Somer, H.; Straub, V.; Mathews, K. D.; Moore, S. A.; Campbell, K. P.: Post-translational disruption of dystroglycan-ligand interactions in congenital muscular dystrophies. Nature 418: 417-422, 2002.
[3433] 627. Moore, S. A.; Saito, F.; Chen, J.; Michele, D. E.; Henry, M. D.; Messing, A.; Cohn, R. D.; Ross-Barta, S. E.; Westra, S.; Williamson, R. A.; Hoshi, T.; Campbell, K. P.: Deletion of brain dystroglycan recapitulates aspects of congenital muscular dystrophy. Nature 418: 422-425, 2002.
[3434] 628. Rambukkana, A.; Yamada, H.; Zanazzi, G.; Mathus, T.; Salzer, J. L.; Yurchenco, P. D.; Campbell, K. P.; Fischetti, V. A.: Role of alpha-dystroglycan as a Schwann cell receptor for Mycobacterium leprae. Science 282: 2076-2078, 1998.
[3435] 629. Sealock, R.; Froehner, S.C.: Dystrophin-associated proteins and synapse formation: is alpha-dystroglycan the agrin receptor? Cell 77: 617-619, 1994.
[3436] 630. Spear, P. G.: A welcome mat for leprosy and Lassa fever. Science 282: 1999-2000, 1998.
[3437] 631. Tinsley, J. M.; Blake, D. J.; Zuellig, R. A.; Davies, K. E.: Increasing complexity of the dystrophin-associated protein complex. Proc. Nat. Acad. Sci. 91: 8307-8313, 1994.
[3438] 632. Williamson, R. A.; Henry, M. D.; Daniels, K. J.; Hrstka, R. F.; Lee, J. C.; Sunada, Y.; Ibraghimov-Beskrovnaya, O.; Campbell, K. P.: Dystroglycan is essential for early embryonic development: disruption of Reichert's membrane in Dag1-null mice. Hum. Molec. Genet. 6: 831-841, 1997.
[3439] 633. Yamada, H.; Denzer, A. J.; Hori, H.; Tanaka, T.; Anderson, L. V. B.; Fujita, S.; Fukuta-Ohi, H.; Shimizu, T.; Ruegg, M. A.; Matsumura, K.: Dystroglycan is a dual receptor for agrin and laminin-2 in Schwann cell membrane. J. Biol. Chem. 271: 23418-23423, 1996.
[3440] 634. Yamada, H.; Saito, F.; Fukuta-Ohi, H.; Zhong, D.; Hase, A.; Arai, K.; Okuyama, A.; Maekawa, R.; Shimizu, T.; Matsumura, K.: Processing of beta-dystroglycan by matrix metalloproteinase disrupts the link between the extracellular matrix and cell membrane via the dystroglycan complex. Hum. Molec. Genet. 10: 1563-1569, 2001.
[3441] 635. Andreev, J.; Simon, J.-P.; Sabatini, D. D.; Kam, J.; Plowman, G.; Randazzo, P. A.; Schlessinger, J.: Identification of a new Pyk2 target protein with Arf-GAP activity. Molec. Cell. Biol. 19: 2338-2350, 1999.
[3442] 636. Anagnou, N. P.; Antonarakis, S. E.; O'Brien, S. J.; Modi, W. S.; Nienhuis, A. W.: Chromosomal localization and racial distribution of the polymorphic human dihydrofolate reductase pseudogene (DHFRPI). Am. J. Hum. Genet. 42: 345-352, 1988.
[3443] 637. Anagnou, N. P.; Antonarakis, S. E.; O'Brien, S. J.; Nienhuis, A. W.: Chromosomal localization and racial distribution of the polymorphic hDHFR-psi-1 pseudogene. (Abstract) Clin. Res. 33: 328A only, 1985.
[3444] 638. Anagnou, N. P.; Antonarakis, S. E.; O'Brien, S. J.; Nienhuis, A. W.: A novel form of human polymorphism involving the hDHFR-psi-1 pseudogene identifies three RFLPs. Nucleic Acids Res. 15: 5501 only, 1987.
[3445] 639. Anagnou, N. P.; O'Brien, S. J.; Shimada, T.; Nash, W. G.; Chen, M.-J.; Nienhuis, A. W.: Chromosomal organization of the human dihydrofolate reductase genes: dispersion, selective amplification and a novel form of polymorphism. Proc. Nat. Acad. Sci. 81: 5170-5174, 1984.
[3446] 640. Blakley, R. L.; Sorrentino, B. P.: In vitro mutations in dihydrofolate reductase that confer resistance to methotrexate: potential for clinical application. Hum. Mutat. 11: 259-263, 1998.
[3447] 641. Chen, M.-J.; Shimada, T.; Moulton, A. D.; Harrison, M.; Nienhuis, A. W.: Intronless human dihydrofolate reductase genes are derived from processed RNA molecules. Proc. Nat. Acad. Sci. 79: 7435-7439, 1982.
[3448] 642. Craik, C. S.; Rutter, W. J.; Fletterick, R.: Splice junctions: association with variation in protein structure. Science 220: 1125-1129, 1983.
[3449] 643. Erbe, R. W.: Inborn errors of folate metabolism. New Eng. J. Med. 293: 753-757 and 807-812, 1975.
[3450] 644. Funanage, V. L.; Myoda, T. T.; Moses, P. A.; Cowell, H. R.: Assignment of the human dihydrofolate reductase gene to the q11-q22 region of chromosome 5. Molec. Cell. Biol. 4: 2010-2016, 1984.
[3451] 645. Hoffbrand, A. V.; Tripp, E.; Jackson, B. F. A.; Luck, W. E.; Frater-Schroder, M.: Hereditary abnormal transcobalamin II previously diagnosed as congenital dihydrofolate reductase deficiency. (Letter) New Eng. J. Med. 310: 789-790, 1984.
[3452] 646. Killary, A. M.; Leach, R. J.; Moran, R. G.; Fournier, R. E. K. Assignment of genes encoding dihydrofolate reductase and hexosaminidase B to Mus musculus chromosome 13. Somat. Cell Molec. Genet. 12: 641-648, 1986.
[3453] 647. Maurer, B.; Barker, P. E.; Masters, J. N.; D'Eustachio, P.; Ruddle, F. H.; Attardi, G.: Chromosomal location of the normal human DHFR gene and of its amplified copies in methotrexate resistant cell variants. (Abstract) Cytogenet. Cell Genet. 37: 534 only, 1984.
[3454] 648. Maurer, B. J.; Barker, P. E.; Masters, J. N.; Ruddle, F. H.; Attardi, G.: Human dihydrofolate reductase gene is located in chromosome 5 and is unlinked to the related pseudogenes. Proc. Nat. Acad. Sci. 81: 1484-1488, 1984.
[3455] 649. Maurer, B. J.; Carlock, L.; Wasmuth, J.; Attardi, G.: Assignment of human dihydrofolate reductase gene to band q23 of chromosome 5 and of related pseudogene psiHD1 to chromosome 3. Somat. Cell Molec. Genet. 11: 79-85, 1985.
[3456] 650. Myoda, T. T.; Funanage, V. L.: Personal Communication. Wilmington, Del. Oct. 7, 1983.
[3457] 651. Singer, M. J.; Mesner, L. D.; Friedman, C. L.; Trask, B. J.; Hamlin, J. L.: Amplification of the human dihydrofolate reductase gene via double minutes is initiated by chromosome breaks. Proc. Nat. Acad. Sci. 97: 7921-7926, 2000.
[3458] 652. Tauro, G. P.; Danks, D. M.; Rowe, P. B.; Van der Weyden, M. B.; Schwarz, M. A.; Collins, V. L.; Neal, B. W.: Dihydrofolate reductase deficiency causing megaloblastic anemia in two families. New Eng. J. Med. 294: 466-470, 1976.
[3459] 653. Walters, T. R.: Congenital megaloblastic anemia responsive to N(5)-formyltetrahydrofolic acid administration. J. Pediat. 70: 686-687, 1967.
[3460] 654. Barlow, G. M.; Chen, X.-N.; Shi, Z. Y.; Lyons, G. E.; Kumit, D. M.; Celle, L.; Spinner, N. B.; Zackai, E.; Pettenati, M. J.; Van Riper, A. J.; Vekemans, M. J.; Mjaatvedt, C. H.; Korenberg, J. R.: Down syndrome congenital heart disease: a narrowed region and a candidate gene. Genet. Med. 3: 91-101, 2001.
[3461] 655. Schmucker, D.; Clemens, J. C.; Shu, H.; Worby, C. A.; Xiao, J.; Muda, M.; Dixon, J. E.; Zipursky, S. L.: Drosophila Dscam is an axon guidance receptor exhibiting extraordinary molecular diversity. Cell 101: 671-684, 2000.
[3462] 656. Yamakawa, K.; Huo, Y.-K.; Haendel, M. A.; Hubert, R.; Chen, X.-N.; Lyons, G. E.; Korenberg, J. R.: DSCAM: a novel member of the immunoglobulin superfamily maps in a Down syndrome region and is involved in the development of the nervous system. Hum. Molec. Genet. 7: 227-237, 1998.
[3463] 657. Fuentes, J.-J.; Pritchard, M. A.; Planas, A. M.; Bosch, A.; Ferrer, I.; Estivill, X.: A new human gene from the Down syndrome critical region encodes a proline-rich protein highly expressed in fetal brain and heart. Hum. Molec. Genet. 4: 1935-1944, 1995.
[3464] 658. Fuentes, J. J.; Pritchard, M. A.; Estivill, X.: Genomic organization, alternative splicing, and expression patterns of the DSCR1 (Down syndrome candidate region 1) gene. Genomics 44: 358-361, 1997.
[3465] 659. Kingsbury, T. J.; Cunningham, K. W.: A conserved family of calcineurin regulators. Genes Dev. 14: 1595-1604, 2000.
[3466] 660. Rothermel, B.; Vega, R. B.; Yang, J.; Wu, H.; Bassel-Duby, R.; Williams, R. S.: A protein encoded within the Down syndrome critical region is enriched in striated muscles and inhibits calcineurin signaling. J. Biol. Chem. 275: 8719-8725, 2000.
[3467] 661. Strippoli, P.; Petrini, M.; Lenzi, L.; Carinci, P.; Zannotti, M.: The murine DSCR1-like (Down syndrome candidate region 1) gene family: conserved synteny with the human orthologous genes. Gene 257: 223-232, 2000.
[3468] 662. Yang, J.; Rothermel, B.; Vega, R. B.; Frey, N.; McKinsey, T. A.; Olson, E. N.; Bassel-Duby, R.; Williams, R. S.: Independent signals control expression of the calcineurin inhibitory proteins MCIP1 and MCIP2 in striated muscles. Circ. Res. 87: 61e-68e, 2000.
[3469] 663. Ishibashi, T.; Bottaro, D. P.; Michieli, P.; Kelley, C. A.; Aaronson, S. A.: A novel dual specificity phosphatase induced by serum stimulation and heat shock. J. Biol. Chem. 269: 29897-29902, 1994.
[3470] 664. Kwak, S. P.; Dixon, J. E.: Multiple dual specificity protein tyrosine phosphatases are expressed and regulated differentially in liver cell lines. J. Biol. Chem. 270: 1156-1160, 1995.
[3471] 665. Martell, K. J.; Kwak, S.; Hakes, D. J.; Dixon, J. E.; Trent, J. M.: Chromosomal localization of four human VH1-like protein-tyrosine phosphatases. Genomics 22: 462-464, 1994.
[3472] 666. Bui, T. D.; Beier, D. R.; Jonssen, M.; Smith, K.; Dorrington, S. M.; Kaklamanis, L.; Kearney, L.; Regan, R.; Sussman, D. J.; Harris, A. L.: cDNA cloning of a human dishevelled DVL-3 gene, mapping to 3q27, and expression in human breast and colon carcinomas. Biochem. Biophys. Res. Commun. 239: 510-516, 1997.
[3473] 667. Klingensmith, J.; Nusse, R.; Perrimon, N.: The Drosophila segment polarity gene dishevelled encodes a novel protein required for response to wingless signal. Genes Dev. 8: 118-130, 1994.
[3474] 668. Pizzuti, A.; Amati, F.; Calabrese, G.; Mari, A.; Colosimo, A; Silani, V.; Giardino, L.; Ratti, A.; Penso, D.; Calza, L.; Palka, G.; Scarlato, G.; Novelli, G.; Dallapicolla, B.: cDNA characterization and chromosomal mapping of two human homologs of the Drosophila dishevelled polarity gene. Hum. Molec. Genet. 5: 953-958, 1996.
[3475] 669. Semenov, M. V.; Snyder, M.: Human dishevelled genes constitute a DHR-containing multigene family. Genomics 42: 302-310, 1997.
[3476] 670. Ellison, J.; Passage, M.; Yu, L.-C.; Yen, P.; Mohandas, T. K.; Shapiro, L.: Directed isolation of human genes that escape X inactivation. Somat. Cell Molec. Genet. 18: 259-268, 1992.
[3477] 671. Ellison, J. W.; Ramos, C.; Yen, P. H.; Shapiro, L. J.: Structure and expression of the human pseudoautosomal gene XE7. Hum. Molec. Genet. 1: 691-696, 1992.
[3478] 672. Becker, W.; Weber, Y.; Wetzel, K.; Eirmbter, K.; Tejedor, F. J.; Joost, H.-G.: Sequence characteristics, subcellular localization, and substrate specificity of DYRK-related kinases, a novel family of dual specificity protein kinases. J. Biol. Chem. 273: 25893-25902, 1998.
[3479] 673. Cerretti, D. P.; Lyman, S. D.; Kozlosky, C. J.; Copeland, N. G.; Gilbert, D. J.; Jenkins, N. A.; Valentine, V.; Kirstein, M. N.; Shapiro, D. N.; Morris, S. W.: The genes encoding the Eph-related receptor tyrosine kinase ligands LERK-1 (EPLG1, Epl1), LERK-3 (EPLG3, Ep13), and LERK-4 (EPLG4, Epl4) are clustered on human chromosome 1 and mouse chromosome 3. Genomics 33: 277-282, 1996.
[3480] 674. Cerretti, D. P.; Nelson, N.: Characterization of the genes for mouse LERK-3/Ephrin-A3 (Ep13), mouse LERK-4/Ephrin-A4 (Epl4), and human LERK-6/Ephrin-A2 (EPLG6): conservation of intron/exon structure. Genomics 47: 131-135, 1998.
[3481] 675. Bruick, R. K.; McKnight, S. L.: A conserved family of prolyl-4-hydroxylases that modify HIF. Science 294: 1337-1340, 2001.
[3482] 676. Dupuy, D.; Aubert, I.; Duperat, V. G.; Petit, J.; Taine, L.; Stef, M.; Bloch, B.; Arveiler, B.: Mapping, characterization, and expression analysis of the SM-20 human homologue, C1orf12, and identification of a novel related gene, SCAND2. Genomics 69: 348-354, 2000.
[3483] 677. Epstein, A. C. R.; Gleadle, J. M.; McNeill, L. A.; Hewitson, K. S.; O'Rourke, J.; Mole, D. R.; Mukherji, M.; Metzen, E.; Wilson, M. I.; Dhanda, A.; Tian, Y.-M.; Masson, N.; Hamilton, D. L.; Jaakkola, P.; Barstead, R.; Hodgkin, J.; Maxwell, P. H.; Pugh, C. W.; Schofield, C. J.; Ratcliffe, P. J.: C. elegans EGL-9 and mammalian homologs define a family of dioxygenases that regulate HIF by prolyl hydroxylation. Cell 107: 43-54, 2001.
[3484] 678. Morris, M. E.; Viswanathan, N.; Kuhlman, S.; Davis, F. C.; Weitz, C. J.: A screen for genes induced in the suprachiasmatic nucleus by light. Science 279: 1544-1547, 1998.
[3485] 679. Patwardhan, S.; Gashler, A.; Siegel, M. G.; Chang, L. C.; Joseph, L. J.; Shows, T. B.; Le Beau, M. M.; Sukhatme, V. P.: EGR3, a novel member of the Egr family of genes encoding immediate-early transcription factors. Oncogene 6: 917-928, 1991.
[3486] 680. Tourtellotte, W. G.; Milbrandt, J.: Sensory ataxia and muscle spindle agenesis in mice lacking the transcription factor Egr3. Nature Genet. 20: 87-91, 1998.
[3487] 681. Koesters, R.; Adams, V.; Betts, D.; Moos, R.; Schmid, M.; Siermann, A.; Hassam, S.; Weitz, S.; Lichter, P.; Heitz, P. U.; von Knebel Doeberitz, M.; Briner, J.: Human eukaryotic initiation factor EIF2C1 gene: cDNA sequence, genomic organization, localization to chromosomal bands 1q34-p35, and expression. Genomics 61: 210-218, 1999.
[3488] 682. Martinez, J.; Patkaniowska, A.; Urlaub, H.; Luhrmann, R.; Tuschi, T.: Single-stranded antisense siRNAs guide target RNA cleavage in RNAi. Cell 110: 563-574, 2002.
[3489] 683. Brass, N.; Heckel, D.; Sahin, U.; Pfreundschuh, M.; Sybrecht, G. W.; Meese, E.: Translation initiation factor eIF-4gamma is encoded by an amplified gene and induces an immune response in squamous cell lung carcinoma. Hum. Molec. Genet. 6: 33-39, 1997.
[3490] 684. Gradi, A.; Imataka, H.; Svitkin, Y. V.; Rom, E.; Raught, B.; Morino, S.; Sonenberg, N.: A novel functional human eukaryotic translation initiation factor 4G. Molec. Cell. Biol. 18: 334-342, 1998.
[3491] 685. Imataka, H.; Gradi, A.; Sonenberg, N.: A newly identified N-terminal amino acid sequence of human eIF4G binds poly(A)-binding protein and functions in poly(A)-dependent translation. EMBO J. 17: 7480-7489, 1998.
[3492] 686. Imataka, H.; Sonenberg, N.: Human eukaryotic translation initiation factor 4G (eIF4G) possesses two separate and independent binding sites for eIF4A. Molec. Cell. Biol. 17: 6940-6947, 1997.
[3493] 687. Larola, G.; Cuesta, R.; Brewer, G.; Schneider, R. J.: Control of mRNA decay by heat shock-ubiquitin-proteasome pathway. Science 284: 499-502, 1999.
[3494] 688. Pyronnet, S.; Imataka, H.; Gingras, A.-C.; Fukunaga, R.; Hunter, T.; Sonenberg, N.: Human eukaryotic translation initiation factor 4G (eIF4G) recruits Mnk1 to phosphorylate eIF4E. EMBO J. 18: 270-279, 1999.
[3495] 689. Yan, R.; Rhoads, R. E.: Human protein synthesis initiation factor eIF-4-gamma is encoded by a single gene (EIF4G) that maps to chromosome 3q27-qter. Genomics 26: 394-398, 1995.
[3496] 690. Yan, R.; Rychlik, W.; Etchison, D.; Rhoads, R. E.: Amino acid sequence of the human protein synthesis initiation factor eIF-4-gamma. J. Biol. Chem. 267: 23226-23231, 1992.
[3497] 691. Imataka, H.; Olsen, H. S.; Sonenberg. N.: A new translational regulator with homology to eukaryotic translation initiation factor 4G. EMBO J. 16: 817-825, 1997.
[3498] 692. Levy-Strumpf, N.; Deiss, L. P.; Berissi, H.; Kimchi, A.: DAP-5, a novel homolog of eukaryotic translation initiation factor 4G isolated as a putative modulator of gamma interferon-induced programmed cell death. Molec. Cell. Biol. 17: 1615-1625, 1997.
[3499] 693. Shaughnessy, J. D., Jr.; Jenkins, N. A.; Copeland, N. G.: cDNA cloning, expression analysis, and chromosomal localization of a gene with high homology to wheat eIF-(iso)₄F and mammalian eIF-4G. Genomics 39: 192-197, 1997.
[3500] 694. Yamanaka, S.; Poksay, K. S.; Arnold, K. S.; Innerarity, T. L.: A novel translational repressor mRNA is edited extensively in livers containing tumors caused by the transgene expression of the apoB mRNA-editing enzyme. Genes Dev. 11: 321-333, 1997.
[3501] 695. Koettnitz, K.; Kappel, B.; Baumruker, T.; Hauber, J.; Bevec, D. The genomic structure encoding human initiation factor eIF-5A. Gene 144: 249-252, 1994.
[3502] 696. Koettnitz, K.; Wohl, T.; Kappel, B.; Loftspeich, F.; Hauber, J.; Bevec, D.: Identification of a new member of the human eIF-5A gene family. Gene 159: 283-284, 1995.
[3503] 697. Steinkasserer, A.; Jones, T.; Sheer, D.; Koettnitz, K.; Hauber, J.; Bevec, D.: The eukaryotic cofactor for the human immunodeficiency virus type 1 (HIV-1) rev protein, eIF-5A, maps to chromosome 17p12-p 13: three eIF-5A pseudogenes map to 10q23.3, 17q25, and 19q13.2. Genomics 25: 749-752, 1995.
[3504] 698. Arany, Z.; Newsome, D.; Oldread, E.; Livingston, D. M.; Eckner, R.: A family of transcriptional adaptor proteins targeted by the E1A oncoprotein. Nature 374: 81-84, 1995.
[3505] 699. Arany, Z.; Sellers, W. R.; Livingston, D. M.; Eckner, R.: E1A-associated p300 and CREB-associated CBP belong to a conserved family of coactivators. (Letter) Cell 77: 799-800, 1994.
[3506] 700. Eckner, R.; Ewen, M. E.; Newsome, D.; Gerdes, M.; DeCaprio, J. A.; Lawrence, J. B.; Livingston, D. M.: Molecular cloning and functional analysis of the adenovirus E1A-associated 300-kD protein (p300) reveals a protein with properties of a transcriptional adaptor. Genes Dev. 15: 869-884, 1994.
[3507] 701. Gayther, S. A.; Batley, S. J.; Linger, L.; Bannister, A.; Thorpe, K.; Chin, S.-F.; Daigo, Y.; Russell, P.; Wilson, A.; Sowter, H. M.; Delhanty, J. D. A.; Ponder, B. A. J.; Kouzarides, T.; Caldas, C.: Mutations truncating the EP300 acetylase in human cancers. Nature Genet. 24: 300-303, 2000.
[3508] 702. Hasan, S.; Hassa, P. O.; Imhof, R.; Hottiger, M. O.: Transcription coactivator p300 binds PCNA and may have a role in DNA repair synthesis. Nature 410: 387-391, 2001.
[3509] 703. Hasan, S.; Stucki, M.; Hassa, P. O.; Imhof, R.; Gehrig, P.; Hunziker, P.; Hubscher, U.; Hottiger, M. O.: Regulation of human flap endonuclease-1 activity by acetylation through the transcriptional coactivator p300. Molec. Cell 7: 1221-1231, 2001.
[3510] 704. Ida, K.; Kitabayashi, I.; Taki, T.; Taniwaki, M.; Noro, K.; Yamamoto, M.; Ohki, M.; Hayashi, Y.: Adenoviral E1A-associated protein p300 is involved in acute myeloid leukemia with t(11;22)(q23;q13). Blood 90: 4699-4704, 1997.
[3511] 705. Lin, C. H.; Hare, B. J.; Wagner, G.; Harrison, S.C.; Maniatis, T.; Fraenkel, E.: A small domain of CBP/p300 binds diverse proteins: solution structure and functional studies. Molec. Cell 8: 581-590, 2001.
[3512] 706. Muraoka, M.; Konishi, M.; Kikuchi-Yanoshita, R.; Tanaka, K.; Shitara, N.; Chong, J.-M.; Iwama, T.; Miyaki, M.: p300 gene alterations in colorectal and gastric carcinomas. Oncogene 12: 1565-1569, 1996.
[3513] 707. Nakashima, K.; Yanagisawa, M.; Arakawa, H.; Kimura, N.; Hisatsune, T.; Kawabata, M.; Miyazono, K.; Taga, T.: Synergistic signaling in fetal brain by STAT3-Smad1 complex bridged by p300. Science 284: 479-482, 1999.
[3514] 708. Tini, M.; Benecke, A.; Um, S.-J.; Torchia, J.; Evans, R. M.; Chambon, P.: Association of CBP/p300 acetylase and thymine DNA glycosylase links DNA repair and transcription. Molec. Cell 9: 265-277, 2002.
[3515] 709. Weaver, B. K.; Kumar, K. P.; Reich, N.C.: Interferon regulatory factor 3 and CREB-binding protein/p300 are subunits of double-stranded RNA-activated transcription factor DRAF1. Molec. Cell. Biol. 18: 1359-1368, 1998.
[3516] 710. Yao, T. P.; Oh, S. P.; Fuchs, M.; Zhou, N.-D.; Ch'ng, L.-E.; Newsome, D.; Bronson, R. T.; Li, E.; Livingston, D. M.; Eckner, R.: Gene dosage-dependent embryonic development and proliferation defects in mice lacking the transcriptional integrator p300. Cell 93: 361-372, 1998.
[3517] 711. Cardoso, C.; Mignon, C.; Hetet, G.; Grandchamps, B.; Fontes, M.; Colleaux, L.: The human EZH2 gene: genomic organisation and revised mapping in 7q35 within the critical region for malignant myeloid disorders. Europ. J. Hum. Genet. 8: 174-180, 2000.
[3518] 712. Cardoso, C.; Timsit, S.; Villard, L.; Khrestchatisky, M.; Fontes, M.; Colleaux, L.: Specific interaction between the XNP/ATR-X gene product and the SET domain of the human EZH2 protein. Hum. Molec. Genet. 7: 679-684, 1998.
[3519] 713. Chen, H.; Rossier, C.; Antonarakis, S. E.: Cloning of a human homolog of the Drosophila enhancer of zeste gene (EZH2) that maps to chromosome 21q22.2. Genomics 38: 30-37, 1996.
[3520] 714. Dohner, K.; Brown, J.; Hehmann, U.; Hetzel, C.; Stewart, J.; Lowther, G.; Scholl, C.; Frohling, S.; Cuneo, A.; Tsui, L. C.; Lichter, P.; Scherer, S. W.; Dohner, H.: Molecular cytogenetic characterization of a critical region in bands 7q35-q36 commonly deleted in malignant myeloid disorders. Blood 92: 4031-4035, 1998.
[3521] 715. Laible, G.; Haynes, A. R.; Lebersorger, A.; O'Carroll, D.; Mattei, M.-G.; Denny, P.; Brown, S. D. M.; Jenuwein, T.: The murine polycomb-group genes Ezh1 and Ezh2 map close to Hox gene clusters on mouse chromosomes 11 and 6. Mammalian Genome 10: 311-314, 1999.
[3522] 716. Varambally, S.; Dhanasekaran, S. M.; Zhou, M.; Barrette, T. R.; Kumar-Sinha, C.; Sanda, M. G.; Ghosh, D.; Pienta, K. J.; Sewalt, R. G. A. B.; Otte, A. P.; Rubin, M. A.; Chinnaiyan, A. M.: The polycomb group protein EZH2 is involved in progression of prostate cancer. Nature 419: 624-629, 2002.
[3523] 717. Bartuski, A. J.; Kamachi, Y.; Schick, C.; Overhauser, J.; Silverman, G. A.: Cytoplasmic antiproteinase 2 (PI8) and bomapin (PI10) map to the serpin cluster at 18q21.3. Genomics 43: 321-328, 1997.
[3524] 718. Huber, R.; Carrell, R. W.: Implications of the three-dimensional structure of alpha 1-antitrypsin for structure and function of serpins. Biochemistry 28: 8951-8966, 1989.
[3525] 719. Sprecher, C. A.; Morgenstern, K. A.; Mathewes, S.; Dahlen, J. R.; Schrader, S. K.; Foster, D.C.; Kisiel, W.: Molecular cloning, expression, and partial characterization of two novel members of the ovalbumin family of serine proteinase inhibitors. J. Biol. Chem. 270: 29854-29861, 1995.
[3526] 720. Brockington, M.; Blake, D. J.; Prandini, P.; Brown, S.C.; Torelli, S.; Benson, M. A.; Ponting, C. P.; Estournet, B.; Romero, N. B.; Mercuri, E.; Voit, T.; Sewry, C. A.; Guicheney, P.; Muntoni, F.: Mutations in the fukutin-related protein gene (FKRP) cause a form of congenital muscular dystrophy with secondary laminin alpha-2 deficiency and abnormal glycosylation of alpha-dystroglycan. Am. J. Hum. Genet. 69: 1198-1209, 2001.
[3527] 721. Brockington, M.; Yuva, Y.; Prandini, P.; Brown, S.C.; Torelli, S.; Benson, M. A.; Herrmann, R.; Anderson, L. V. B.; Bashir, R.; Burgunder, J.-M.; Fallet, S.; Romero, N.; and 10 others: Mutations in the fukutin-related protein gene (FKRP) identify limb girdle muscular dystrophy 21 as a milder allelic variant of congenital muscular dystrophy MDC1C. Hum. Molec. Genet. 10: 2851-2859, 2001.
[3528] 722. Driss, A.; Amouri, C.; Hamida, C. B.; Souilem, N.; Gouider-Khouja, N.; Hamida, M. B.; Hentati, F.: A new locus for autosomal recessive limb girdle muscular dystrophy in a large consanguineous Tunisian family maps to chromosome 19q13.3. Neuromusc. Disord. 10: 240-246, 2000.
[3529] 723. Mercuri, E.; Sewry, C. A.; Brown, S.C.; Brockington, M.; Jungbluth, H. DeVile, C.; Counsell, S.; Manzur, A.; Muntoni, F.: Congenital muscular dystrophy with secondary merosin deficiency and normal brain MRI: a novel entity? Neuropediatrics 31: 186-189, 2000.
[3530] 724. Fong, G.-H.; Rossant, J.; Breitman, M. L.: Role of the Flt-1 receptor tyrosine kinase in regulating the assembly of vascular endothelium. Nature 376: 65-69, 1995.
[3531] 725. He, Y.; Smith, S. K.; Day, K. A.; Clark, D. E.; Licence, D. R.; Charnock-Jones, D. S.: Alternative splicing of vascular endothelial growth factor (VEGF)-R1 (FLT-1) pre-mRNA is important for the regulation of VEGF activity. Molec. Endocr. 13: 537-545, 1999.
[3532] 726. Imbert, A.; Rosnet, O.; Marchetto, S.; Ollendorff, V.; Birnbaum, D.; Pebusque, M.-J.: Characterization of a yeast artificial chromosome from human chromosome band 13q12 containing the FLT1 and FLT3 receptor-type tyrosine kinase genes. Cytogenet. Cell Genet. 67: 175-177, 1994.
[3533] 727. Kendall, R. L.; Wang, G.; Thomas, K. A.: Identification of a natural soluble form of the vascular endothelial growth factor receptor, FLT-1, and its heterodimerization with KDR. Biochem. Biophys. Res. Commun. 226: 324-328, 1996.
[3534] 728. Satoh, H.; Yoshida, M. C.; Matsushime, H.; Shibuya, M.; Sasaki, M.: Regional localization of the human c-ros-1 on 6q22 and flt on 13q12. Jpn. J. Cancer Res. 78: 772-775, 1987.
[3535] 729. Shalaby, F.; Rossant, J.; Yamaguchi, T. P.; Gertsenstein, M.; Wu, X.-F.; Breitman, M. L.; Schuh, A. C.: Failure of blood-island formation and vasculogenesis in Flk-1-deficient mice. Nature 376: 62-65, 1995.
[3536] 730. Wiesmann, C.; Fuh, G.; Christinger, H. W.; Eigenbrot, C.; Wells, J. A.; de Vos, A. M.: Crystal structure at 1.7 Angstrom resolution of VEGF in complex with domain 2 of the Flt-1 receptor. Cell 91: 695-704, 1997. Cell 91:695-704, 1997
[3537] 731. Wulff, C.; Wilson, H.; Rudge, J. S.; Wiegand, S. J.; Lunn, S. F.; Fraser, H. M.: Luteal angiogenesis: prevention and intervention by treatment with vascular endothelial growth factor trapA40. J. Clin. Endocr. Metab. 86: 3377-3386, 2001.
[3538] 732. Yoshida, M. C.; Satoh, H.; Matsushime, H.; Shibuya, M.; Sasaki, M.: Two ros-related protooncogenes, c-ros-1 and fit, are regionally mapped on human chromosomes 6q22 and 13q12, respectively. (Abstract) Cytogenet. Cell Genet. 46: 724 only, 1987.
[3539] 733. Scott, A. F.: Personal Communication. Baltimore, Md. Jan. 22, 2001.
[3540] 734. Zhu, H.; Kavsak, P.; Abdollah, S.; Wrana, J. L.; Thomsen, G. H.: A SMAD ubiquitin ligase targets the BMP pathway and affects embryonic pattern formation. Nature 400: 687-693, 1999.
[3541] 735. Danciger, M.; Farber, D. B.; Peyser, M.; Kozak, C. A.: The gene for the beta-subunit of retinal transducin (Gnb-1) maps to distal mouse chromosome 4, and related sequences map to mouse chromosomes 5 and 8. Genomics 6: 428-435, 1990.
[3542] 736. Hurowitz, E. H.; Melnyk, J. M.; Chen, Y.-J.; Kouros-Mehr, H.; Simon, M. I.; Shizuya, H.: Genomic characterization of the human heterotrimeric G protein alpha, beta, and gamma subunit genes. DNA Res. 7: 111-120, 2000.
[3543] 737. Levine, M. A.; Modi, W. S.; O'Brien, S. J.: Chromosomal localization of the genes encoding two forms of the G-protein beta polypeptide, beta-1 and beta-3, in man. Genomics 8: 380-386, 1990.
[3544] 738. Modi, W. S.; O'Brien, S. J.; Levine, M. A.: Chromosomal assignment of 2 GTP binding protein subunit genes: the alpha subunit of adenylyl cyclase (GNAS) and the beta 1 polypeptide (GNB). (Abstract) Cytogenet. Cell Genet. 58: 1860 only, 1991.
[3545] 739. Sparkes, R. S.; Cohn, V. H.; Cire-Eversole, P.; Blatt, C.; Amatruda, T. T.; Weiner, L. P.; Nesbitt, M.; Reed, R. R.; Lochrie, M. A.; Fournier, R. E. K.; Simon, M. I.: Mapping of genes encoding the subunits of guanine nucleotide-binding proteins (G-proteins) in the mouse. (Abstract) Cytogenet. Cell Genet. 46: 696 only, 1987.
[3546] 740. Sparkes, R. S.; Cohn, V. H.; Mohandas, T.; Zollman, S.; Cire-Eversole, P.; Amatruda, T. T.; Reed, R. R.; Lochrie, M. A.; Simon, M. I.: Mapping of genes encoding the subunits of guanine nucleotide-binding protein (G-proteins) in humans. (Abstract) Cytogenet. Cell Genet. 46: 696 only, 1987.
[3547] 741. Emstsson, S.; Betz, R.; Lagercrantz, S.; Larsson, C.; Ericksson, S.; Cederberg, A.; Carlsson, P.; Enerback, S.: Cloning and characterization of freac-9 (FKHL17), a novel kidney-expressed human forkhead gene that maps to chromosome 1p32-p34. Genomics 46: 78-85, 1997.
[3548] 742. Clevidence, D. E.; Overdier, D. G.; Peterson, R. S.; Porcella, A.; Ye, H.; Paulson, K. E.; Costa, R. H.: Members of the HNF-3/forkhead family of transcription factors exhibit distinct cellular expression patterns in lung and regulate the surfactant protein B promoter. Dev. Biol. 166: 195-209, 1994.
[3549] 743. Hellqvist, M.; Mahlapuu, M.; Blixt, A.; Enerback, S.; Carlsson, P.: The human forkhead protein FREAC-2 contains two functionally redundant activation domains and interacts with TBP and TFIIB. J. Biol. Chem. 273: 23335-23343, 1998.
[3550] 744. Hellqvist, M.; Mahlapuu, M.; Samuelsson, L.; Enerback, S.; Carlsson, P.: Differential activation of lung-specific genes by two forkhead proteins, FREAC-1 and FREAC-2. J. Biol. Chem. 271: 4482-4490, 1996.
[3551] 745. Larsson, C.; Hellqvist, M.; Pierrou, S.; White, I.; Enerback, S.; Carlsson, P.: Chromosomal localization of six human forkhead genes, freac-1 (FKHL5), -3 (FKHL7), -4 (FKHL8), -5 (FKHL9), -6 (FKHL10), and -8 (FKHL12). Genomics 30: 464-469, 1995.
[3552] 746. Pierrou, S.; Hellqvist, M.; Samuelsson, L.; Enerback, S.; Carlsson, P.: Cloning and characterization of seven human forkhead proteins: binding site specificity and DNA bending. EMBO J. 13: 5002-5012, 1994.
[3553] 747. Kondo, M.; Ji, L.; Kamibayashi, C.; Tomizawa, Y.; Randle, D.; Sekido, Y.; Yokota, J.; Kashuba, V.; Zabarovsky, E.; Kuzmin, I.; Lerman, M.; Roth, J.; Minna, J. D.: Overexpression of candidate tumor suppressor gene FUS1 isolated from the 3p21.3 homozygous deletion region leads to G1 arrest and growth inhibition of lung cancer cells. Oncogene 20: 6258-6262, 2001.
[3554] 748. Lerman, M. I.; Minna, J. D.: The 630-kb lung cancer homozygous deletion region on human chromosome 3p21.3: identification and evaluation of the resident candidate tumor suppressor genes. Cancer Res. 60: 6116-6133, 2000.
[3555] 749. Wang, Y.; Macke, J. P.; Abella, B. S.; Andreasson, K.; Worley, P.; Gilbert, D. J.; Copeland, N. G.; Jenkins, N. A.; Nathans, J.: A large family of putative transmembrane receptors homologous to the product of the Drosophila tissue polarity gene frizzled. J. Biol. Chem. 271: 4468-4476, 1996.
[3556] 750. Zhao, Z. Y.; Lee, C. C.; Baldini, A.; Caskey, C. T.: A human homologue of the Drosophila polarity gene frizzled has been identified and mapped to 17q21.1. Genomics 27: 370-373, 1995.
[3557] 751. Buhr, A.; Bianchi, M. T.; Baur, R.; Courtet, P.; Pignay, V.; Boulenger, J. P.; Gallati, S.; Hinkle, D. J.; Macdonald, R. L.; Sigel, E.: Functional characterization of the new human GABA(A) receptor mutation beta-3(R192H). Hum. Genet. 11: 154-160, 2002.
[3558] 752. Buxbaum, J. D.; Silverman, J. M.; Smith, C. J.; Greenberg, D. A.; Kilifarski, M.; Reichert, J.; Cook, E. H., Jr.; Fang, Y.; Song, C.-Y.; Vitale, R.: Association between a GABRB3 polymorphism and autism. Molec. Psychiat. 7: 311-316, 2002.
[3559] 753. Glatt, K.; Glatt, H.; Lalande, M.: Structure and organization of GABRB3 and GABRA5. Genomics 41: 63-69, 1997.
[3560] 754. Holopainen, I. E.; Metsahonkala, E.-L.; Kokkonen, H.; Parkkola, R. K.; Manner, T. E.; Nagren, K.; Korpi, E. R.: Decreased binding of [11C]flumazenil in Angelman syndrome patients with GABA-A receptor beta-3 subunit deletions. Ann. Neurol. 49: 110-113, 2001.
[3561] 755. Homanics, G. E.; DeLorey, T. M.; Firestone, L. L.; Quinlan, J. J.; Handforth, A.; Harrison, N. L.; Krasowski, M. D.; Rick, C. E. M.; Korpi, E. R.; Makela, R.; Brilliant, M. H.; Hagiwara, N.; Ferguson, C.; Snyder, K.; Olsen, R. W.: Mice devoid of gamma-aminobutyrate type A receptor beta3 subunit have epilepsy, cleft palate, and hypersensitive behavior. Proc. Nat. Acad. Sci. 94: 4143-4148, 1997.
[3562] 756. Knoll, J. H. M.; Cheng, S.-D.; Lalande, M.: Allele specificity of DNA replication timing in the Angelman/Prader-Willi syndrome imprinted chromosomal region. Nature Genet. 6: 41-46, 1994.
[3563] 757. Laposky, A. D.; Homanics, G. E.; Baile, A.; Mendelson, W. B.: Deletion of the GABA(A) receptor beta 3 subunit eliminates the hypnotic actions of oleamide in mice. Neuroreport 12: 4143-4147, 2001.
[3564] 758. Meguro, M.; Mitsuya, K.; Sui, H.; Shigenami, K.; Kugoh, H.; Nakao, M.; Oshimura, M.: Evidence for uniparental, paternal expression of the human GABA-A receptor subunit genes, using microcell-mediated chromosome transfer. Hum. Molec. Genet. 6: 2127-2133, 1997.
[3565] 759. Russek, S. J.; Farb, D. H.: Mapping of the beta-2 subunit gene (GABRB2) to microdissected human chromosome 5q34-q35 defines a gene cluster for the most abundant GABA-A receptor isoform. Genomics 23: 528-533, 1994.
[3566] 760. Saitoh, S.; Kubota, T.; Ohta, T.; Jinno, Y.; Niikawa, N.; Sugimoto, T.; Wagstaff, J.; Lalande, M.: Familial Angelman syndrome caused by imprinted submicroscopic deletion encompassing GABA(A) receptor beta(3)-subunit gene. (Letter) Lancet 339: 366-367, 1992.
[3567] 761. Scapoli, L.; Martinelli, M.; Pezzetti, F.; Carinci, F.; Bodo, M.; Tognon, M.; Carinci, P.: Linkage disequilibrium between GABRB3 gene and nonsyndromic familial cleft lip with or without cleft palate. Hum. Genet. 110: 15-20, 2002.
[3568] 762. Sinnett, D.; Wagstaff, J.; Glatt, K.; Woolf, E.; Kirkness, E. J.; Lalande, M.: High-resolution mapping of the gamma-aminobutyric acid receptor subunit beta-3 and alpha-5 gene cluster on chromosome 15q11-q13, and localization of breakpoints in two Angelman syndrome patients. Am. J. Hum. Genet. 52: 1216-1229, 1993.
[3569] 763. Tanabe, A.; Taketani, S.; Endo-Ichikawa, Y.; Tokunaga, R.; Ogawa, Y.; Hiramoto, M.: Analysis of the candidate genes responsible for non-syndromic cleft lip and palate in Japanese people. Clin. Sci. 99: 105-111, 2000.
[3570] 764. Wagstaff, J.; Chaillet, J. R.; Lalande, M.: The GABA(A) receptor beta-3 subunit gene: characterization of a human cDNA from chromosome 15q11q13 and mapping to a region of conserved synteny on mouse chromosome 7. Genomics 11: 1071-1078, 1991.
[3571] 765. Wagstaff, J.; Knoll, J. H. M.; Fleming, J.; Kirkness, E. F.; Martin-Gallardo, A.; Greenberg, F.; Graham, J. M., Jr.; Menninger, J.; Ward, D.; Venter, J. C.; Lalande, M.: Localization of the gene encoding the GABA(A) receptor beta-3 subunit to the Angelman/Prader-Willi region of human chromosome 15. Am. J. Hum. Genet. 49: 330-337, 1991.
[3572] 766. Garcia, J. A.; Zhang, D.; Estill, S. J.; Michnoff, C.; Rutter, J.; Reick, M.; Scott, K.; Diaz-Arrastia, R.; McKnight, S. L.: Impaired cued and contextual memory in NPAS2-deficient mice. Science 288: 2226-2230, 2000.
[3573] 767. Hogenesch, J. B.; Chan, W. K.; Jackiw, V. H.; Brown, R. C.; Gu, Y.-Z.; Pray-Grant, M.; Perdew, G. H.; Bradfield, C. A.: Characterization of a subset of the basic-helix-loop-helix-PAS superfamily that interacts with components of the dioxin signaling pathway. J. Biol. Chem. 272: 8581-8593, 1997.
[3574] 768. McNamara, P.; Seo, S.; Rudic, R. D.; Sehgal, A.; Chakravarti, D.; FitzGerald, G. A.: Regulation of CLOCK and MOP4 by nuclear hormone receptors in the vasculature: a humoral mechanism to reset a peripheral clock. Cell 105: 877-889, 2001.
[3575] 769. Reick, M.; Garcia, J. A.; Dudley, C.; McKnight, S. L.: NPAS2: an analog of clock operative in the mammalian forebrain. Science 293: 506-509, 2001.
[3576] 770. Rutter, J.; Reick, M.; Wu, L. C.; McKnight, S. L.: Regulation of Clock and NPAS2 DNA binding by the redox state of NAD cofactors. Science 293: 510-514, 2001.
[3577] 771. Zhou, Y.-D.; Barnard, M.; Tian, H.; Li, X.; Ring, H. Z.; Francke, U.; Shelton, J.; Richardson, J.; Russell, D. W.; McKnight, S. L.: Molecular characterization of two mammalian bHLH-PAS domain proteins selectively expressed in the central nervous system. Proc. Nat. Acad. Sci. 94: 713-718, 1997.
[3578] 772. Ikeda, M.; Ishida, O.; Hinoi, T.; Kishida, S.; Kikuchi, A.: Identification and characterization of a novel protein interacting with Ral-binding protein 1, a putative effector protein of Ral. J. Biol. Chem. 273: 814-821, 1998.
[3579] 773. Koshiba, S.; Kigawa, T.; Iwahara, J.; Kikuchi, A.; Yokoyama, S. Solution structure of the Eps 15 homology domain of a human POB1 (partner of RalBP1). FEBS Lett. 442: 138-142, 1999.
[3580] 774. Charlton, P.; Guida, L.; Copeland, N.; Jenkins, N.; Munroe, D.; Greenberg, F.; Fiedorek, F. T.; Nicholls, R. D.: Genetic approach to function of the neuropeptide galanin. (Abstract) Am. J. Hum. Genet. 53 (suppl.): A1137, 1993.
[3581] 775. Evans, H.; Baumgartner, M.; Shine, J.; Herzog, H.: Genomic organization and localization of the gene encoding human preprogalanin. Genomics 18: 473-477, 1993.
[3582] 776. Evans, H. F.; Shine, J.: Human galanin: molecular cloning reveals a unique structure. Endocrinology 129: 1682-1684, 1991.
[3583] 777. Harris, G. W.: Neural control of the pituitary gland. Physiol. Rev. 28: 139-179, 1948.
[3584] 778. Holmes, F. E.; Mahoney, S.; King, V. R.; Bacon, A.; Kerr, N.C. H.; Pachnis, V.; Curtis, R.; Priestley, J. V.; Wynick, D.: Targeted disruption of the galanin gene reduces the number of sensory neurons and their regenerative capacity. Proc. Nat. Acad. Sci. 97: 11563-11568, 2000.
[3585] 779. Lopez, F. J.; Merchenthaler, I.; Ching, M.; Wisniewski, M. G.; Negro-Vilar, A.: Galanin: a hypothalamic-hypophysiotropic hormone modulating reproductive functions. Proc. Nat. Acad. Sci. 88: 4508-4512, 1991.
[3586] 780. Lundkvist, J.; Land, T.; Kahl, U.; Bedecs, K.; Bartfai, T.: cDNA sequence, ligand binding, and regulation of galanin/GMAP in mouse brain. Neurosci. Lett. 200: 121-124, 1995.
[3587] 781. O'Meara, G.; Coumis, U.; Ma, S. Y.; Kehr, J.; Mahoney, S.; Bacon, A.; Allen, S. J.; Holmes, F.; Kahl, U.; Wang, F. H.; Kearns, I. R.; Ove-Ogren, S.; Dawbam, D.; Mufson, E. J.; Davies, C.; Dawson, G.; Wynick, D.: Galanin regulates the postnatal survival of a subset of basal forebrain cholinergic neurons. Proc. Nat. Acad. Sci. 97: 11569-11574, 2000.
[3588] 782. Rattan, S.: Role of galanin in the gut. Gastroenterology 100: 1762-1768, 1991.
[3589] 783. Schmidt, W. E.; Kratzin, H.; Eckart, K.; Drevs, D.; Mundkowski, G.; Clemens, A.; Katsoulis, S.; Schafer, H.; Gallwitz, B.; Creutzfeldt, W.: Isolation and primary structure of pituitary human galanin, a 30-residue nonamidated neuropeptide. Proc. Nat. Acad. Sci. 88: 11435-11439, 1991.
[3590] 784. Steiner, R. A.; Hohmann, J. G.; Holmes, A.; Wrenn, C. C.; Cadd, G.; Jureus, A.; Clifton, D. K.; Luo, M.; Gutshall, M.; Ma, S. Y.; Mufson, E. J.; Crawley, J. N.: Galanin transgenic mice display cognitive and neurochemical deficits characteristic of Alzheimer's disease. Proc. Nat. Acad. Sci. 98: 4184-4189, 2001.
[3591] 785. Wynick, D.; Small, C. J.; Bacon, A.; Holmes, F. E.; Norman, M.; Ormandy, C. J.; Kilic, E.; Kerr, N.C. H.; Ghatei, M.; Talamantes, F.; Bloom, S. R.; Pachnis, V.: Galanin regulates prolactin release and lactotroph proliferation. Proc. Nat. Acad. Sci. 95: 12671-12676, 1998.
[3592] 786. Bachner, D.; Sedlacek, Z.; Korn, B.; Hameister, H.; Poustka, A. Expression patterns of two human genes coding for different rab GDP-dissociation inhibitors (GDIs), extremely conserved proteins involved in cellular transport. Hum. Molec. Genet. 4: 701-708, 1995.
[3593] 787. Bienvenu, T.; des Portes, V.; Saint Martin, A.; McDonell, N.; Billuart, P.; Carrie, A.; Vinet, M.-C.; Couvert, P.; Toniolo, D.; Ropers, H.-H.; Moraine, C.; van Bokhoven, H.; Fryns, J.-P.; Kahn, A.; Beldjord, C.; Chelly, J.: Non-specific X-linked semidominant mental retardation by mutations in a Rab GDP-dissociation inhibitor. Hum. Molec. Genet. 7: 1311-1315, 1998.
[3594] 788. Chelly, J.: Breakthroughs in molecular and cellular mechanisms underlying X-linked mental retardation. Hum. Molec. Genet. 8: 1833-1838, 1999.
[3595] 789. D'Adamo, P.; Gulisano, M.; Oostra, B. A.; Chelly, J.; Toniolo, D.: GDI is responsible for X-linked mental retardation. (Abstract) Am. J. Hum. Genet. 61 (suppl.): A11 only, 1997.
[3596] 790. D'Adamo, P.; Menegon, A.; Lo Nigro, C.; Grasso, M.; Gulisano, M.; Tamanini, F.; Bienvenu, T.; Gedeon, A. K.; Oostra, B.; Wu, S.-K.; Tandon, A.; Valtorta, F.; Balch, W. E.; Chelly, J.; Toniolo, D.: Mutations in GDI1 are responsible for X-linked non-specific mental retardation. Nature Genet. 19: 134-139, 1998. Note: Erratum: Nature Genet. 19: 303 only, 1998.
[3597] 791. Des Portes, V.; Billuart, P.; Carrie, A.; Bachner, L.; Bienvenu, T.; Vinet, M. C.; Beldjord, C.; Ponsot, G.; Kahn, A.; Boue, J.; Chelly, J.: A gene for dominant nonspecific X-linked mental retardation is located in Xq28. Am. J. Hum. Genet. 60: 903-909, 1997.
[3598] 792. Gendrot, C.; Ronce, N.; Raynaud, M.; Ayrault, A.-D.; Dourlens, J.; Castelnau, P.; Muh, J.-P.; Chelly, J.; Moraine, C.: X-linked nonspecific mental retardation (MRX16) mapping to distal Xq28: linkage study and neuropsychological data in a large family. Am. J. Med. Genet. 83: 411-418, 1999.
[3599] 793. Hamel, B. C. J.; Kremer, H.; Wesby-van Swaay, E.; van den Helm, B.; Smits, A. P. T.; Oostra, B. A.; Ropers, H.-H.; Mariman, E. C. M.: A gene for nonspecific X-linked mental retardation (MRX41) is located in the distal segment of Xq28. Am. J. Med. Genet. 64: 131-133, 1996.
[3600] 794. Hoffman, G. R.; Nassar, N.; Cerione, R. A.: Structure of the Rho family GTP-binding protein Cdc42 in complex with the multifunctional regulator RhoGDI. Cell 100: 345-356, 2000.
[3601] 795. Matsui, Y.; Kikuchi, A.; Araki, S.; Hata, Y.; Kondo, J.; Teranishi, Y.; Takai, Y.: Molecular cloning and characterization of a novel type of regulatory protein (GDI) for smg p25A, a ras p21-like GTP-binding protein. Molec. Cell. Biol. 10: 4116-4122, 1990.
[3602] 796. Moraine, C.; Dessay, B.; Toutain, A.; Briault, S.; Gendrot, C.; Ronce, N.: X-linked mental retardation: linkage results in five unrelated families. (Abstract) Am. J. Hum. Genet. 55 (suppl.): A196 only, 1994.
[3603] 797. Sedlacek, Z.; Konecki, D. S.; Korn, B.; Klauck, S. M.; Poustka, A.: Evolutionary conservation and genomic organization of XAP-4, an Xq28 located gene coding for a human rab GDP-dissociation inhibitor (GDI). Mammalian Genome 5: 633-639, 1994.
[3604] 798. Sedlacek, Z.; Korn, B.; Konecki, D. S.; Siebenhaar, R.; Coy, J. F.; Kioschis, P.; Poustka, A.: Construction of a transcription map of a 300 kb region around the human G6PD locus by direct cDNA selection. Hum. Molec. Genet. 2: 1865-1869, 1993.
[3605] 799. Shisheva, A.; Sudhof, T. C.; Czech, M. P.: Cloning, characterization, and expression of a novel GDP dissociation inhibitor isoform from skeletal muscle. Molec. Cell. Biol. 14: 3459-3468, 1994.
[3606] 800. Bullrich, F.; Druck, T.; Kunapuli, P.; Gomez, J.; Gripp, K. W.; Schlegelberger, B.; Lasota, J.; Aronson, M.; Cannizzaro, L. A.; Huebner, K.; Benovic, J. L.: Chromosomal mapping of the genes GPRK5 and GPRK6 encoding G protein-coupled receptor kinases GRK5 and GRK6. Cytogenet. Cell Genet. 70: 250-254, 1995.
[3607] 801. Haribabu, B.; Snyderman, R.: Identification of additional members of human G-protein-coupled receptor kinase multigene family. Proc. Nat. Acad. Sci. 90: 9398-9402, 1993.
[3608] 802. Perez Jurado, L. A.; Wang, Y.-K.; Peoples, R.; Coloma, A.; Cruces, J.; Francke, U.: A duplicated gene in the breakpoint regions of the 7q11.23 Williams-Beuren syndrome deletion encodes the initiator binding protein TFII-I and BAP-135, a phosphorylation target of BTK. Hum. Molec. Genet. 7: 325-334, 1998.
[3609] 803. Roy, A. L.; Du, H.; Gregor, P. D.; Novina, C. D.; Martinez, E.; Roeder, R. G.: Cloning of an Inr- and E-box binding protein, TFII-I, that interacts physically and functionally with USF1. EMBO J. 16: 7091-7104, 1997.
[3610] 804. Yang, W.; Desiderio, S.: BAP-135, a target for Bruton's tyrosine kinase in response to B cell receptor engagement. Proc. Nat. Acad. Sci. 94: 604-609, 1997.
[3611] 805. Schaefer, L.; Ballabio, A.; Zoghbi, H. Y.: Cloning and characterization of a putative human holocytochrome c-type synthetase gene (HCCS) isolated from the critical region for microphthalmia with linear skin defects (MLS). Genomics 34: 166-172, 1996.
[3612] 806. Van den Veyver, I. B.; Subramanian, S.; Zoghbi, H. Y.: Genomic structure of a human holocytochrome c-type synthetase gene in Xp22.3 and mutation analysis in patients with Rett syndrome. Am. J. Med. Genet. 78: 179-181, 1998.
[3613] 807. Ludwig, A.; Zong, X.; Stieber, J.; Hullin, R.; Hofmann, F.; Biel, M.: Two pacemaker channels from human heart with profoundly different activation kinetics. EMBO J. 18: 2323-2329, 1999.
[3614] 808. Santoro, B.; Grant, S. G. N.; Bartsch, D.; Kandel, E. R.: Interactive cloning with the SH3 domain of N-src identifies a new brain specific ion channel protein, with homology to Eag and cyclic nucleotide-gated channels. Proc. Nat. Acad. Sci. 94: 14815-14820, 1997.
[3615] 809. Santoro, B.; Liu, D. T.; Yao, H.; Bartsch, D.; Kandel, E. R.; Siegelbaum, S. A.; Tibbs, G. R.: Identification of a gene encoding a hyperpolarization-activated pacemaker channel of brain. Cell 93: 717-729, 1998.
[3616] 810. Wainger, B. J.; DeGennaro, M.; Santoro, B.; Siegelbaum, S. A.; Tibbs, G. R.: Molecular mechanism of cAMP modulation of HCN pacemaker channels. Nature 411: 805-810, 2001.
[3617] 811. Betz, R.; Gray, S. G.; Ekstrom, C.; Larsson, C.; Ekstrom, T. J.: Human histone deacetylase 2, HDAC2 (human RPD3), is localized to 6q21 by radiation hybrid mapping. Genomics 52: 245-246, 1998.
[3618] 812. Inouye, C. J.; Seto, E.: Relief of YY1-induced transcriptional repression by protein-protein interaction with the nuclear phosphoprotein B23. J. Biol. Chem. 269: 6506-6510, 1994.
[3619] 813. Randhawa, G. S.; Bell, D. W.; Testa, J. R.; Feinberg, A. P.: Identification and mapping of human histone acetylation modifier gene homologues. Genomics 51: 262-269, 1998.
[3620] 814. Rountree, M. R.; Bachman, K. E.; Baylin, S. B.: DNMT1 binds HDAC2 and a new co-repressor, DMAP1, to form a complex at replication foci. Nature Genet. 25: 269-277, 2000.
[3621] 815. Yang, W.-M.; Inouye, C.; Zeng, Y.; Bearss, D.; Seto, E.: Transcriptional repression by YY1 is mediated by interaction with a mammalian homolog of the yeast global regulator RPD3. Proc. Nat. Acad. Sci. 93: 12845-12850, 1996.
[3622] 816. Yarden, R. I.; Brody, L. C.: BRCA1 interacts with components of the histone deacetylase complex. Proc. Nat. Acad. Sci. 96: 4983-4988, 1999.
[3623] 817. Zhang, Y.; Sun, Z.-W.; Iratni, R.; Erdjument-Bromage, H.; Tempst, P.; Hampsey, M.; Reinberg, D.: SAP30, a novel protein conserved between human and yeast, is a component of a histone deacetylase complex. Molec. Cell 1: 1021-1031, 1998.
[3624] 818. 't Hart, L. M.; Stolk, R. P.; Dekker, J. M.; Nijpels, G.; Grobbee, D. E.; Heine, R. J.; Maassen, J. A.: Prevalence of variants in candidate genes for type 2 diabetes mellitus in the Netherlands: the Rotterdam study and the Hoom study. J. Clin. Endocr. Metab. 84: 1002-1006, 1999.
[3625] 819. Abe, H.; Yamada, N.; Kamata, K.; Kuwaki, T.; Shimada, M.; Osuga, J.; Shionoiri, F.; Yahagi, N.; Kadowaki, T.; Tamemoto, H.; Ishibashi, S.; Yazaki, Y.; Makuuchi, M.: Hypertension, hypertriglyceridemia, and impaired endothelium-dependent vascular relaxation in mice lacking insulin receptor substrate-1. J. Clin. Invest. 101: 1784-1788, 1998.
[3626] 820. Almind, K.; Bjorbaek, C.; Vestergaard, H.; Hansen, T.; Echwald, S.; Pedersen, O.: Amino acid polymorphisms of insulin receptor substrate-1 in non-insulin-dependent diabetes mellitus. Lancet 342: 828-832, 1993.
[3627] 821. Almind, K.; Inoue, G.; Pedersen, O.; Kahn, C. R.: A common amino acid polymorphism in insulin receptor substrate-1 causes impaired insulin signaling: evidence from transfection studies. J. Clin. Invest. 97: 2569-2575, 1996.
[3628] 822. Araki, E.; Sun, X.-J.; Haag, B. L., III; Chuang, L.-M.; Zhang, Y.; Yang-Feng, T. L.; White, M. F.; Kahn, C. R.: Human skeletal muscle insulin receptor substrate-1: characterization of the cDNA, gene, and chromosomal localization. Diabetes 42: 1041-1054, 1993.
[3629] 823. Baroni, M. G.; D'Andrea, M. P.; Montali, A.; Pannitteri, G.; Barilla, F.; Campagna, F.; Mazzei, E.; Lovari, S.; Seccareccia, F.; Campa, P. P.; Ricci, G.; Pozzilli, P.; Urbinati, G.; Arca, M.: A common mutation of the insulin receptor substrate-1 gene is a risk factor for coronary artery disease. Arterioscler. Thromb. Vasc. Biol. 19: 2975-2980, 1999.
[3630] 824. Bohni, R.; Riesgo-Escovar, J.; Oldham, S.; Brogiolo, W.; Stocker, H.; Andruss, B. F.; Beckingham, K.; Hafen, E.: Autonomous control of cell and organ size by CHICO, a Drosophila homolog of vertebrate IRS1-4. Cell 97: 865-875, 1999.
[3631] 825. Clancy, D. J.; Gems, D.; Harshman, L. G.; Oldham, S.; Stocker, H.; Hafen, E.; Leevers, S. J.; Partridge, L.: Extension of life-span by loss of CHICO, a Drosophila insulin receptor substrate protein. Science 292: 104-106, 2001.
[3632] 826. Clausen, J. O.; Hansen, T.; Bjorbaek, C.; Echwald, S. M.; Urhammer, S. A.; Rasmussen, S.; Andersen, C. B.; Hansen, L.; Almind, K.; Winther, K.; Haraldsdottir, J.; Borch-Johnsen, K.; Pedersen, O.: Insulin resistance: interactions between obesity and a common variant of insulin receptor substrate-1. Lancet 346: 397-402, 1995.
[3633] 827. Esposito, D. L.; Mammarella, S.; Ranieri, A.; Loggia, F. D.; Capani, F.; Consoli, A.; Mariani-Costantini, R.; Caramia, F. G.; Cama, A.; Battista, P.: Deletion of gly723 in the insulin receptor substrate-1 of a patient with noninsulin-dependent diabetes mellitus. Hum. Mutat. 7: 364-366, 1996.
[3634] 828. Hribal, M. L.; Federici, M.; Porzio, O.; Lauro, D.; Borboni, P.; Accili, D.; Lauro, R.; Sesti, G.: The gly-to-arg(972) amino acid polymorphism in insulin receptor substrate-1 affects glucose metabolism in skeletal muscle cells. J. Clin. Endocr. Metab. 85: 2004-2013, 2000.
[3635] 829. Kido, Y.; Burks, D. J.; Withers, D.; Bruning, J. C.; Kahn, C. R.; White, M. F.; Accili, D.: Tissue-specific insulin resistance in mice with mutations in the insulin receptor, IRS-1, and IRS-2. J. Clin. Invest. 105: 199-205, 2000.
[3636] 830. Kulkarni, R. N.; Winnay, J. N.; Daniels, M.; Bruning, J. C.; Flier, S. N.; Hanahan, D.; Kahn, C. R.: Altered function of insulin receptor substrate-1-deficient mouse islets and cultured beta-cell lines. J. Clin. Invest. 104: R69-R75, 1999.
[3637] 831. Laakso, M.; Malkki, M.; Kekalainen, P.; Kuusisto, J.; Deeb, S. S.: Insulin receptor substrate-1 variants in non-insulin-dependent diabetes. J. Clin. Invest. 94: 1141-1146, 1994.
[3638] 832. Myers, M. G., Jr.; Sun, X. J.; White, M. F.: The IRS-1 signaling system. Trends Biochem. Sci. 19: 289-293, 1994.
[3639] 833. Nishiyama, M.; Inazawa, J.; Ariyama, T.; Nakamura, Y.; Matsufuji, S.; Furusaka, A.; Tanaka, T.; Hayashi, S.; Wands, J. R.: The human insulin receptor substrate-1 gene (IRS1) is localized on 2q36. Genomics 20: 139-141, 1994.
[3640] 834. Nishiyama, M.; Wands, J. R.: Cloning and increased expression of an insulin receptor substrate-1-like gene in human hepatocellular carcinoma. Biochem. Biophys. Res. Commun. 183: 280-285, 1992.
[3641] 835. Ogata, N.; Chikazu, D.; Kubota, N.; Terauchi, Y.; Tobe, K.; Azuma, Y.; Ohta, T.; Kadowaki, T.; Nakamura, K.; Kawaguchi, H.: Insulin receptor substrate-1 in osteoblast is indispensable for maintaining bone turnover. J. Clin. Invest. 105: 935-943, 2000.
[3642] 836. Ogihara, T.; Isobe, T.; Ichimura, T.; Taoka, M.; Funaki, M.; Sakoda, H.; Onishi, Y.; Inukai, K.; Anai, M.; Fukushima, Y.; Kikuchi, M.; Yazaki, Y.; Oka, Y.; Asano, T.: 14-3-3 protein binds to insulin receptor substrate-1, one of the binding sites of which is in the phosphotyrosine binding domain. J. Biol. Chem. 272: 25267-25274, 1997.
[3643] 837. Porzio, O.; Federici, M.; Hribal, M. L.; Lauro, D.; Accili, D.; Lauro, R.; Borboni, P.; Sesti, G.: The gly972-to-arg amino acid polymorphism in IRS-1 impairs insulin secretion in pancreatic beta cells. J. Clin. Invest. 104: 357-364, 1999.
[3644] 838. Stoffel, M.; Espinosa, R., III; Keller, S. R.; Lienhard, G. E.; Le Beau, M. M.; Bell, G. I.: Human insulin receptor substrate-1 gene (IRS1): chromosomal localization to 2q35-q36.1 and identification of a simple tandem repeat DNA polymorphism. Diabetologia 36: 335-337, 1993.
[3645] 839. Sun, X. J.; Rothenberg, P.; Kahn, C. R.; Backer, J. M.; Araki, E.; Wilden, P. A.; Cahill, D. A.; Goldstein, B. J.; White, M. F.: Structure of the insulin receptor substrate IRS-1 defines a unique signal transduction protein. Nature 352: 73-77, 1991.
[3646] 840. Carter, M. G.; Johns, M. A.; Zeng, X.; Zhou, L.; Zink, M. C.; Mankowski, J. L.; Donovan, D. M.; Baylin, S. B.: Mice deficient in the candidate tumor suppressor gene Hic1 exhibit developmental defects of structures affected in the Miller-Dieker syndrome. Hum. Molec. Genet. 9: 413-419, 2000.
[3647] 841. Chong, S. S.; Tanigami, A.; Roschke, A. V.; Ledbetter, D. H.: 14-3-3epsilon has no homology to LIS1 and lies telomeric to it on chromosome 17p13.3 outside the Miller-Dieker syndrome chromosome region. Genome Res. 6: 735-741, 1996.
[3648] 842. Grimm, C.; Sporle, R.; Schmid, T. E.; Adler, I.-D.; Adamski, J.; Schughart, K.; Graw, J.: Isolation and embryonic expression of the novel mouse gene Hic1, the homologue of HIC1, a candidate gene for the Miller-Dieker syndrome. Hum. Molec. Genet. 8: 697-710, 1999.
[3649] 843. Makos Wales, M.; Biel, M. A.; El Deiry, W.; Nelkin, B. D.; Issa, J.-P.; Cavenee, W. K.; Kuerbitz, S. J.; Baylin, S. B.: p53 activates expression of HIC-1, a new candidate tumour suppressor gene on 17p13.3. Nature Med. 1: 570-577, 1995.
[3650] 844. Anand, A.; Chada, K.: In vivo modulation of Hmgic reduces obesity. Nature Genet. 24: 377-380, 2000.
[3651] 845. Arlotta, P.; Tai, A. K.-F.; Manfioletti, G.; Clifford, C.; Jay, G.; Ono, S. J.: Transgenic mice expressing a truncated form of the high mobility group I-C protein develop adiposity and an abnormally high prevalence of lipomas. J. Biol. Chem. 275: 14394-14400, 2000.
[3652] 846. Ashar, H. R.; Cherath, L.; Przybysz, K. M.; Chada, K.: Genomic characterization of human HMGIC, a member of the accessory transcription factor family found at translocation breakpoints in lipomas. Genomics 31: 207-214, 1996.
[3653] 847. Ashar, H. R.; Schoenberg Fejzo, M.; Tkachenko, A.; Zhou, X.; Fletcher, J. A.; Weremowicz, S.; Morton, C. C.; Chada, K.: Disruption of the architectural factor HMGI-C: DNA-binding AT hook motifs fused in lipomas to distinct transcriptional regulatory domains. Cell 82: 57-65, 1995.
[3654] 848. Chau, K.-Y.; Patel, U. A.; Lee, K.-L. D.; Lam, H.-Y. P.; Crane-Robinson, C.: The gene for the human architectural transcription factor HMGI-C consists of five exons each coding for a distinct functional element. Nucleic Acids Res. 23: 4262-4266, 1995.
[3655] 849. Danforth, E., Jr.: Failure of adipocyte differentiation causes type II diabetes mellitus. Nature Genet. 26: 13 only, 2000.
[3656] 850. Friedmann, M.; Holth, L. T.; Zoghbi, H. Y.; Reeves, R.: Organization, inducible-expression and chromosome localization of the human HMG-I(Y) nonhistone protein gene. Nucleic Acids Res. 21: 4259-4267, 1993.
[3657] 851. Ishwad, C. S.; Shriver, M. D.; Lassige, D. M.; Ferrell, R. E.: The high mobility group I-C gene (HMGI-C): polymorphism and genetic localization. Hum. Genet. 99: 103-105, 1997.
[3658] 852. Kazmierczak, B.; Dal Cin, P.; Wanschura, S.; Bartnitzke, S.; Van den Berghe, H.; Bullerdiek, J.: Cloning and molecular characterization of part of a new gene fused to HMGIC in mesenchymal tumors. Am. J. Path. 152: 431-435, 1998.
[3659] 853. Kazmierczak, B.; Pohnke, Y.; Bullerdiek, J.: Fusion transcripts between the HMGIC gene and RTVL-H-related sequences in mesenchymal tumors without cytogenetic aberrations. Genomics 38: 223-226, 1996.
[3660] 854. Manfioletti, G.; Rustighi, A.; Mantovani, F.; Goodwin, G. H.; Giancotti, V.: Isolation and characterization of the gene coding for murine high-mobility-group protein HMGI-C. Gene 167: 249-253, 1995.
[3661] 855. Mine, N.; Kurose, K.; Nagai, H.; Doi, D.; Ota, Y.; Yoneyama, K.; Konishi, H.; Araki, T.; Emi, M.: Gene fusion involving HMGIC is a frequent aberration in uterine leiomyomas. J. Hum. Genet. 46: 408-412, 2001.
[3662] 856. Nucci, M. R.; Weremowicz, S.; Neskey, D. M.; Somberger, K.; Tallini, G.; Morton, C. C.; Quade, B. J.: Chromosomal translocation t(8;12) induces aberrant HMGIC expression in aggressive angiomyxoma of the vulva. Genes Chromosomes Cancer 32: 172-176, 2001.
[3663] 857. Petit, M. M. R.; Schoenmakers, E. F. P. M.; Huysmans, C.; Geurts, J. M. W.; Mandahl, N.; Van de Ven, W. J. M.: LHFP, a novel translocation partner gene of HMGIC in a lipoma, is a member of a new family of LHFP-like genes. Genomics 57: 438-441, 1999.
[3664] 858. Rohen, C.; Caselitz, J.; Stern, C.; Wanschura, S.; Schoenmakers, E. F.; Van de Ven, W. J.; Barnitzke, S.; Bullerdiek, J.: A hamartoma of the breast with an aberration of 12q mapped to the MAR region by fluorescence in situ hybridization. Genes Chromosomes Cancer 84: 82-84, 1995.
[3665] 859. Schoenmakers, E. F. P. M.; Huysmans, C.; Van de Ven, W. J. M. Allelic knockout of novel splice variants of human recombination repair gene RAD51B in t(12;14) uterine leiomyomas. Cancer Res. 59: 19-23, 1999.
[3666] 860. Schoenmakers, E. P. P. M.; Wanschura, S.; Mols, R.; Bullerdiek, J.; Van den Berghe, H.; Van de Ven, W. J. M.: Recurrent rearrangements in the high mobility group protein gene, HMGI-C, in benign mesenchymal tumours. Nature Genet. 10: 436-444, 1995.
[3667] 861. Xiang, X.; Benson, K. F.; Chada, K.: Mini-mouse: disruption of the pygmy locus in a transgenic insertional mutant. Science 247: 967-969, 1990.
[3668] 862. Zhou, X.; Benson, K. F.; Ashar, H. R.; Chada, K.: Mutation responsible for the mouse pygmy phenotype in the developmentally regulated factor HMGI-C. Nature 377: 771-774, 1995.
[3669] 863. Kobayashi, M.; Takamatsu, K.; Fujishiro, M.; Saitoh, S.; Noguchi, T.: Molecular cloning of a novel calcium-binding protein structurally related to hippocalcin from human brain and chromosomal mapping of its gene. Biochim. Biophys. Acta 1222: 515-518, 1994.
[3670] 864. Bogerd, H. P.; Fridell, R. A.; Madore, S.; Cullen, B. R.: Identification of a novel cellular cofactor for the Rev/Rex class of retroviral regulatory proteins. Cell 82: 485-494, 1995.
[3671] 865. Fritz, C. C.; Zapp, M. L.; Green, M. R.: A human nucleoporin-like protein that specifically interacts with HIV Rev. Nature 376: 530-533, 1995.
[3672] 866. Jones, T.; Sheer, D.; Bevec, D.; Kappel, B.; Hauber, J.; Steinkasserer, A.: The human HIV-1 Rev binding-protein hRIP/Rab (HRB) maps to chromosome 2q36. Genomics 40: 198-199, 1997.
[3673] 867. Kang-Decker, N.; Mantchev, G. T.; Juneja, S.C.; McNiven, M. A.; van Deursen, J. M. A.: Lack of acrosome formation in Hrb-deficient mice. Science 294: 1531-1533, 2001.
[3674] 868. Salcini, A. E.; Confalonieri, S.; Doria, M.; Santolini, E.; Tassi, E.; Minenkova, O.; Cesareni, G.; Pelicci, P. G.; Di Fiore, P. P.: Binding specificity and in vivo targets of the EH domain, a novel protein-protein interaction module. Genes Dev. 11: 2239-2249, 1997.
[3675] 869. Liu, J.; Shworak, N. W.; Sinay, P.; Schwartz, J. J.; Zhang, L.; Fritze, L. M.; Rosenberg, R. D.: Expression of heparan sulfate D-glucosaminyl 3-O-sulfotransferase isoforms reveals novel substrate specificities. J. Biol. Chem. 274: 5185-5192, 1999.
[3676] 870. Shworak, N. W.; Liu, J.; Petros, L. M.; Zhang, L.; Kobayashi, M.; Copeland, N. G.; Jenkins, N. A.; Rosenberg, R. D.: Multiple isoforms of heparan sulfate D-glucosaminyl 3-O-sulfotransferase: isolation, characterization, and expression of human cDNAs and identification of distinct genomic loci. J. Biol. Chem. 274: 5170-5184, 1999.
[3677] 871. Nagashima, M.; Shiseki, M.; Miura, K.; Hagiwara, K.; Linke, S. P.; Pedeux, R.; Wang, X. W.; Yokota, J.; Riabowol, K.; Harris, C. C.: DNA damage-inducible gene p331NG2 negatively regulates cell proliferation through acetylation of p53. Proc. Nat. Acad. Sci. 98: 9671-9676, 2001.
[3678] 872. Shimada, Y.; Saito, A.; Suzuki, M.; Takahashi, E.; Horie, M.: Cloning of a novel gene (ING1L) homologous to ING1, a candidate tumor suppressor. Cytogenet. Cell Genet. 83: 232-235, 1998.
[3679] 873. Albrecht, B.; Weber, K.; Pongs, O.: Characterization of a voltage-activated K-channel gene cluster on human chromosome 12p13. Receptors Channels 3: 213-220, 1995.
[3680] 874. Grupe, A.; Schroter, K. H.; Ruppersberg, J. P.; Stocker, M.; Drewes, T.; Beckh, S.; Pongs, O.: Cloning and expression of a human voltage-gated potassium channel: a novel member of the RCK potassium channel family. EMBO J. 9: 1749-1756, 1990.
[3681] 875. Klocke, R.; Roberds, S. L.; Tamkun, M. M.; Gronemeier, M.; Augustin, A.; Albrecht, B.; Pongs, O.; Jockusch, H.: Chromosomal mapping in the mouse of eight K(+)-channel genes representing the four Shaker-like subfamilies Shaker, Shab, Shaw, and Shal. Genomics 18: 568-574, 1993.
[3682] 876. Bardien-Kruger, S.; Wulff, H.; Arieff, Z.; Brink, P.; Chandy, K. G.; Corfield, V.: Characterisation of the human voltage-gated potassium channel gene, KCNA7, a candidate gene for inherited cardiac disorders, and its exclusion as cause of progressive familial heart block I (PFHBI). Europ. J. Hum. Genet. 10: 36-43, 2002.
[3683] 877. Kalman, K.; Nguyen, A.; Tseng-Crank, J.; Dukes, I. D.; Chandy, G.; Hustad, C. M.; Copeland, N. G.; Jenkins, N. A.; Mohrenweiser, H.; Brandriff, B.; Cahalan, M.; Gutman, G. A.; Chandy, K. G.: Genomic organization, chromosomal localization, tissue distribution, and biophysical characterization of a novel mammalian Shaker-related voltage-gated potassium channel, Kv1.7. J. Biol. Chem. 273: 5851-5857, 1998.
[3684] 878. McPherson, J. D.; Wasmuth, J. J.; Chandy, K. G.; Swanson, R.; Dethlefs, B.; Chandy, G.; Wymore, R.; Ghanshani, S.: Chromosomal localization of 7 potassium channel genes. (Abstract) Cytogenet. Cell Genet. 58: 1979 only, 1991.
[3685] 879. Su, K.; Kyaw, H.; Fan, P.; Zeng, Z.; Shell, B. K.; Carter, K. C.; Li, Y.: Isolation, characterization, and mapping of two human potassium channels. Biochem. Biophys. Res. Commun. 241: 675-681, 1997.
[3686] 880. Duprat, F.; Lesage, F.; Fink, M.; Reyes, R.; Heurteaux, C.; Lazdunski, M.: TASK, a human background K+ channel to sense external pH variations near physiological pH. EMBO J. 16: 5464-5471, 1997.
[3687] 881. Lesage, F.; Lazdunski, M.: Mapping of human potassium channel genes TREK-1 (KCNK2) and TASK (KCNK3) to chromosomes 1q41 and 2p23. Genomics 51: 478-479, 1998.
[3688] 882. Manjunath, N. A.; Bray-Ward, P.; Goldstein, S. A. N.; Gallagher, P. G.: Assignment of the 2P domain, acid-sensitive potassium channel OAT1 gene KCNK3 to human chromosome bands 2p24.1-p23.3 and murine 5B by in situ hybridization. Cytogenet. Cell Genet. 86: 242-243, 1999.
[3689] 883. Behrens, R.; Nolting, A.; Reimann, F.; Schwarz, M.; Waldschutz, R.; Pongs, O.: hKCNMB3 and hKCNMB4, cloning and characterization of two members of the large-conductance calcium-activated potassium channel beta subunit family. FEBS Lett. 474: 99-106, 2000.
[3690] 884. Brenner, R.; Jegla, T. J.; Wickenden, A.; Liu, Y.; Aldrich, R. W.: Cloning and functional characterization of novel large conductance calcium-activated potassium channel beta subunits, hKCNMB3 and hKCNMB4. J. Biol. Chem. 275: 6453-6461, 2000.
[3691] 885. Banfi, S.; Borsani, G.; Rossi, E.; Bernard, L.; Guffanti, A.; Rubboli, F.; Marchitiello, A.; Giglio, S.; Coluccia, E.; Zollo, M.; Zuffardi, O.; Ballabio, A.: Identification and mapping of human cDNAs homologous to Drosophila mutant genes through EST database searching. Nature Genet. 13: 167-174, 1996.
[3692] 886. Salinas, M.; Duprat, F.; Heurteaux, C.; Hugnot, J.-P.; Lazdunski, M.: New modulatory alpha subunits for mammalian Shab K(+) channels. J. Biol. Chem. 272: 24371-24379, 1997.
[3693] 887. Ahrendt, S. A.; Decker, P. A.; Alawi, E. A.; Zhu, Y.; Sanchez-Cespedes, M.; Yang, S. C.; Haasler, G. B.; Kajdacsy-Balla, A.; Demeure, M. J.; Sidransky, D.: Cigarette smoking is strongly associated with mutation of the K-ras gene in patients with primary adenocarcinoma of the lung. Cancer 92: 1525-1530, 2001.
[3694] 888. Almoguera, C.; Shibata, D.; Forrester, K.; Martin, J.; Amheim, N.; Perucho, M.: Most human carcinomas of the exocrine pancreas contain mutant c-K-ras genes. Cell 53: 549-554, 1988.
[3695] 889. Andreyev, H. J. N.; Tilsed, J. V. T.; Cunningham, D.; Sampson, S. A.; Norman, A. R.; Schneider, H. J.; Clarke, P. A.: K-ras mutations in patients with early colorectal cancers. Gut 41: 323-329, 1997.
[3696] 890. Bezicau, S.; Devilder, M.-C.; Avet-Loiseau, H.; Mellerin, M.-P.; Puthier, D.; Pennarun, E.; Rapp, M.-J.; Harousseau, J.-L.; Moisan, J.-P.; Bataille, R.: High incidence of N and K-Ras activating mutations in multiple myeloma and primary plasma cell leukemia at diagnosis. Hum. Mutat. 18: 212-224, 2001.
[3697] 891. Bollag, G.; Adler, F.; elMasry, N.; McCabe, P. C.; Connor, E., Jr.; Thompson, P.; McCormick, F.; Shannon, K.: Biochemical characterization of a novel KRAS insertion mutation from a human leukemia. J. Biol. Chem. 271: 32491-32494, 1996.
[3698] 892. Burmer, G. C.; Loeb, L. A.: Mutations in the KRAS2 oncogene during progressive stages of human colon carcinoma. Proc. Nat. Acad. Sci. 86: 2403-2407, 1989.
[3699] 893. Capon, D. J.; Seeburg, P. H.; McGrath, J. P.; Hayflick, J. S.; Edman, U.; Levinson, A. D.; Goeddel, D. V.: Activation of Ki-ras2 gene in human colon and lung carcinomas by two different point mutations. Nature 304: 507-513, 1983.
[3700] 894. Costa, R. M.; Federov, N. B.; Kogan, J. H.; Murphy, G. G.; Stem, J.; Ohno, M.; Kucherlapati, R.; Jacks, T.; Silva, A. J.: Mechanism for the learning deficits in a mouse model of neurofibromatosis type 1. Nature 415: 526-530, 2002.
[3701] 895. Cubilla, A. L.; Fitzgerald, P. J.: Cancer Res. 36: 2690-2698, 1976.
[3702] 896. Der, C. J.; Cooper, G. M.: Altered gene products are associated with activation of cellular ras-k genes in human lung and colon carcinomas. Cell 32: 201-208, 1983.
[3703] 897. Feig, L. A.; Bast, R. C., Jr.; Knapp, R. C.; Cooper, G. M.: Somatic activation of ras-K gene in a human ovarian carcinoma. Science 223: 698-701, 1984.
[3704] 898. Grimmond, S. M.; Raghavan, D.; Russell, P. J.: Detection of a rare point mutation in Ki-ras of a human bladder cancer xenograft by polymerase chain reaction and direct sequencing. Urol. Res. 20: 121-126, 1992.
[3705] 899. Hayashi, N.; Sugai, S.; Ito, I.; Nakamori, S.; Ogawa, M.; Nakamura, Y.: Ethnic difference in the pattern of K-ras oncogene mutations in human colorectal cancers. Hum. Mutat. 8: 258-261, 1996.
[3706] 900. Holland, E. C.; Celestino, J.; Dai, C.; Schaefer, L.; Sawaya, R. E.; Fuller, G. N.: Combined activation of Ras and Akt in neural progenitors induces glioblastoma formation in mice. Nature Genet. 25: 55-57, 2000.
[3707] 901. Hruban, R. H.; Goggins, M.; Parsons, J.; Kern, S. E.: Clin. Cancer Res. 6: 2969-2972, 2000.
[3708] 902. Hruban, R. H.; van Mansfield, A. D. M.; Offerhaus, G. J. A.; van Weering, D. H. J.; Allison, D.C.; Goodman, S. N., Kensler, T. W.; Bose, K. K.; Cameron, J. L.; Bos, J. L.: Am. J. Path. 143: 545-554, 1993.
[3709] 903. Hruban, R. H.; Wilentz, R. E.; Kern, S. E.: Am. J. Pathol. 156: 1821-1825, 2000.
[3710] 904. Hunter, A. G. W.; Clifford, B.; Cox, D. M.: The characteristic physiognomy and tissue specific karyotype distribution in the Pallister-Killian syndrome. Clin. Genet. 28: 47-53, 1985.
[3711] 905. Johnson, L.; Mercer, K.; Greenbaum, D.; Bronson, R. T.; Crowley, D.; Tuveson, D. A.; Jacks, T.: Somatic activation of the K-ras oncogene causes early onset lung cancer in mice. Nature 410: 1111-1116, 2001.
[3712] 906. Kozma, S.C.; Bogaard, M. E.; Buser, K.; Saurer, S. M.; Bos, J. L.; Groner, B.; Hynes, N. E.: The human c-Kirsten ras gene is activated by a novel mutation in codon 13 in the breast carcinoma cell line MDA-MB231. Nucleic Acids Res. 15: 5963-5971, 1987.
[3713] 907. Laghi, L.; Orbetegli, O.; Bianchi, P.; Zerbi, A.; Di Carlo, V.; Boland, C. R.; Malesci, A.: Common occurrence of multiple K-RAS mutations in pancreatic cancers with associated precursor lesions and in biliary cancers. Oncogene 21: 4301-4306, 2002.
[3714] 908. Lee, K.-H.; Lee, J.-S.; Suh, C.; Kim, S.-W.; Kim, S.-B.; Lee, J.-H.; Lee, M.-S.; Park, M.-Y.; Sun, H.-S.; Kim, S.-H.: Clinicopathologic significance of the K-ras gene codon 12 point mutation in stomach cancer: an analysis of 140 cases. Cancer 75: 2794-2801, 1995.
[3715] 909. Liu, E.; Hjelle, B.; Morgan, R.; Hecht, F.; Bishop, J. M.: Mutations of the Kirsten-ras proto-oncogene in human preleukaemia. Nature 330: 186-188, 1987.
[3716] 910. McBride, O. W.; Swand, D.C.; Tronick, S. R.; Gol, R.; Klimanis, D.; Moore, D. E.; Aaronson, S. A.: Regional chromosomal localization of N-ras, K-ras-1, K-ras-2 and myb oncogenes in human cells. Nucleic Acids Res. 11: 8221-8236, 1983.
[3717] 911. McCoy, M. S.; Toole, J. J.; Cunningham, J. M.; Chang, E. H.; Lowy, D. R.; Weinberg, R. A.: Characterization of a human colon/lung carcinoma oncogene. Nature 302: 79-81, 1983.
[3718] 912. McGrath, J. P.; Capon, D. J.; Smith, D. H.; Chen, E. Y.; Seeburg, P. H.; Goeddel, D. V.; Levinson, A. D.: Structure and organization of the human Ki-ras proto-oncogene and a related processed pseudogene. Nature 304: 501-506, 1983.
[3719] 913. Motojima, K.; Urano, T.; Nagata, Y.; Shiku, H.; Tsurifune, T.; Kanematsu, T.: Detection of point mutations in the Kirsten-ras oncogene provides evidence for the multicentricity of pancreatic carcinoma. Ann. Surg. 217: 138-143, 1993.
[3720] 914. Muller, R.; Slamon, D. J.; Adamson, E. D.; Tremblay, J. M.; Muller, D.; Cline, M. J.; Verma, I. M.: Transcription of c-one genes c-ras(Ki) and c-fms during mouse development. Molec. Cell. Biol. 3: 1062-1069, 1983.
[3721] 915. Nakano, H.; Yamamoto, F.; Neville, C.; Evans, D.; Mizuno, T.; Perucho, M.: Isolation of transforming sequences of two human lung carcinomas: structural and functional analysis of the activated c-K-ras oncogenes. Proc. Nat. Acad. Sci. 81: 71-75, 1984.
[3722] 916. O'Brien, S. J.; Nash, W. G.; Goodwin, J. L.; Lowry, D. R.; Chang, E. H.: Dispersion of the ras family of transforming genes to four different chromosomes in man. Nature 302: 839-842, 1983.
[3723] 917. O'Connell, P.; Leppert, M.; Hoff, M.; Kumlin, E.; Thomas, W.; Cai, G.; Law, M.; White, R.: A linkage map for human chromosome 12. (Abstract) Am. J. Hum. Genet. 37: A169 only, 1985.
[3724] 918. Ohashi, H.; Ishikiriyama, S.; Fukushima, Y.: New diagnostic method for Pallister-Killian syndrome: detection of i(12p) in interphase nuclei of buccal mucosa by fluorescence in situ hybridization. Am. J. Med. Genet. 45: 123-128, 1993.
[3725] 919. Otori, K.; Oda, Y.; Sugiyama, K.; Hasebe, T.; Mukai, K.; Fujii, T.; Tajiri, H.; Yoshida, S.; Fukushima, S.; Esumi, H.: High frequency of K-ras mutations in human colorectal hyperplastic polyps. Gut 40: 660-663, 1997.
[3726] 920. Peltomaki, P.; Knuutila, S.; Ritvanen, A.; Kaitila, I.; de la Chapelle, A.: Pallister-Killian syndrome: cytogenetic and molecular studies. Clin. Genet. 31: 399-405, 1987.
[3727] 921. Pfeifer, G. P.: A new verdict for an old convict. Nature Genet. 29: 3-4, 2001.
[3728] 922. Popescu, N.C.; Amsbaugh, S.C.; DiPaolo, J. A.; Tronick, S. R.; Aaronson, S. A.; Swan, D.C.: Chromosomal localization of three human ras genes by in situ molecular hybridization. Somat. Cell Molec. Genet. 11: 149-155, 1985.
[3729] 923. Porta, M.; Malats, N.; Jariod, M.; Grimalt, J. O.; Rifa, J.; Carrato, A.; Guamer, L.; Salas, A.; Santiago-Silva, M.; Corominas, J. M.; Andreu, M.; Real, F. X.: Serum concentrations of organochlorine compounds and K-ras mutations in exocrine pancreatic cancer. Lancet 354: 2125-2129, 1999.
[3730] 924. Pulciani, S.; Santos, E.; Lauver, A. V.; Long, L. K.; Aaronson, S. A.; Barbacid, M.: Oncogene in solid human tumors. Nature 300: 539-542, 1982.
[3731] 925. Rajagopalan, H.; Bardelli, A.; Lengauer, C.; Kinzler, K. W.; Vogelstein, B.; Velculescu, V. E.: RAF/RAS oncogenes and mismatch-repair status. (Letter) Nature 418: 934 only, 2002.
[3732] 926. Rodenhuis, S.; van de Wetering, M. L.; Mooi, W. J.; Evers, S. G.; van Zandwijk, N.; Bos, J. L.: Mutational activation of the K-RAS oncogene: a possible pathogenetic factor in adenocarcinoma of the lung. New Eng. J. Med. 317: 929-935, 1987.
[3733] 927. Sakaguchi, A. Y.; Zabel, B. U.; Grzeschik, K. H.; Law, M. L.; Ellis, R. W.; Skolnick, E. M.; Naylor, S. L.: Regional localization of two human cellular Kirsten ras genes on chromosomes 6 and 12. Molec. Cell. Biol. 4: 989-993, 1984.
[3734] 928. Santos, E.; Martin-Zanca, D.; Reddy, E. P.; Pierotti, M. A.; Della Porta, G.; Barbacid, M.: Malignant activation of a K-ras oncogene in lung carcinoma but not in normal tissue of the same patient. Science 223: 661-664, 1984.
[3735] 929. Schinzel, A.: Tetrasomy 12p (Pallister-Killian syndrome). J. Med. Genet. 28: 122-125, 1991.
[3736] 930. Shimizu, K.; Birnbaum, D.; Ruley, M. A.; Fasano, O.; Suard, Y.; Edlund, L.; Taparowsky, E.; Goldfarb, M.; Wigler, M.: Structure of the Ki-ras gene of the human lung carcinoma cell line Calu-1. Nature 304: 497-500, 1983.
[3737] 931. Sidransky, D.; Tokino, T.; Hamilton, S. R.; Kinzler, K. W.; Levin, B.; Frost, P.; Vogelstein, B.: Identification of RAS oncogene mutations in the stool of patients with curable colorectal tumors. Science 256: 102-105, 1992.
[3738] 932. Smit, V. T. H. B. M.; Boot, A. J. M.; Smits, A. M. M.; Fleuren, G. J.; Cornelisse, C. J.; Bos, J. L.: KRAS codon 12 mutations occur very frequently in pancreatic adenocarcinomas. Nucleic Acids Res. 16: 7773-7782, 1988.
[3739] 933. Soukup, S.; Neidich, K.: Prenatal diagnosis of Pallister-Killian syndrome. Am. J. Med. Genet. 35: 526-528, 1990.
[3740] 934. Speleman, F.; Leroy, J. G.; Van Roy, N.; De Paepe, A.; Suijkerbuijk, R.; Brunner, H.; Looijenga, L.; Verschraegen-Spae, M.-R.; Orye, E.: Pallister-Killian syndrome: characterization of the isochromosome 12p by fluorescent in situ hybridization. Am. J. Med. Genet. 41: 381-387, 1991.
[3741] 935. Takeda, S.; Ichii, S.; Nakamura, Y.: Detection of K-ras mutation in sputum by mutant-allele-specific amplification (MASA). Hum. Mutat. 2: 112-117, 1993.
[3742] 936. Weinberg, R. A.: Fewer and fewer oncogenes. Cell 30: 3-4, 1982.
[3743] 937. Wenger, S. L.; Boone, L. Y.; Steele, M. W.: Mosaicism in Pallister i(12p) syndrome. Am. J. Med. Genet. 35: 523-525, 1990.
[3744] 938. Wingo, P. A.; Ries, L. A. G.; Giovino, G. A.; Miller, D. S.; Rosenberg, H. M.; Shopland, D. R.; Thun, M. J.; Edwards, B. K.: Annual report to the nation on the status of cancer, 1973-1996, with a special section on lung cancer and tobacco smoking. J. Nat. Cancer Inst. 91: 675-690, 1999.
[3745] 939. Yanez, L.; Groffen, J.; Valenzuela, D. M.: c-K-ras mutations in human carcinomas occur preferentially in codon 12. Oncogene 1: 315-318, 1987.
[3746] 940. Zakowski, M. F.; Wright, Y.; Ricci, A., Jr.: Pericardial agenesis and focal aplasia cutis in tetrasomy 12p (Pallister-Killian syndrome). Am. J. Med. Genet. 42: 323-325, 1992.
[3747] 941. Zhang, J.; Marynen, P.; Devriendt, K.; Fryns, J.-P.; Van den Berghe, H.; Cassiman, J.-J.: Molecular analysis of the isochromosome 12p in the Pallister-Killian syndrome: construction of a mouse-human hybrid cell line containing an i(12p) as the sole human chromosome. Hum. Genet. 83: 359-363, 1989.
[3748] 942. Zhang, Z.; Wang, Y.; Vikis, H. G.; Johnson, L.; Liu, G.; Li, J.; Anderson, M. W.; Sills, R. C.; Hong, H. L.; Devereux, T. R.; Jacks, T.; Guan, K.-L.; You, M.: Wildtype Kras2 can inhibit lung carcinogenesis in mice. Nature Genet. 29: 25-33, 2001.
[3749] 943. Jiang, J. C.; Kirchman, P. A.; Zagulski, M.; Hunt, J.; Jazwinski, S. M.: Homologs of the yeast longevity gene LAG1 in Caenorhabditis elegans and human. Genome Res. 8: 1259-1272, 1998.
[3750] 944. Lee, S.-J.: Expression of growth/differentiation factor 1 in the nervous system: conservation of a bicistronic structure. Proc. Nat. Acad. Sci. 88: 4250-4254, 1991.
[3751] 945. Pan, H.; Qin, W.-X.; Huo, K.-K.; Wan, D.-F.; Yu, Y.; Xu, Z.-G.; Hu, Q.-D.; Gu, K. T.; Zhou, X.-M.; Jiang, H.-Q.; Zhang, P.-P.; Huang, Y.; Li, Y.-Y.; Gu, J.-R.: Cloning, mapping, and characterization of a human homologue of the yeast longevity assurance gene LAG1. Genomics 77: 58-64, 2001.
[3752] 946. Boehm, T.; Foroni, L.; Kaneko, Y.; Perutz, M. F.; Rabbitts, T. H.: The rhombotin family of cysteine-rich LIM-domain oncogenes: distinct members are involved in T-cell translocations to human chromosomes 11p15 and 11p13. Proc. Nat. Acad. Sci. 88: 4367-4371, 1991.
[3753] 947. Mao, S.; Neale, G. A. M.; Goorha, R. M.: T-cell oncogene rhombotin-2 interacts with retinoblastoma-binding protein 2. Oncogene 14: 1531-1539, 1997.
[3754] 948. Royer-Pokora, B.; Loos, U.; Ludwig, W.-D.: TTG-2, a new gene encoding a cysteine-rich protein with the LIM motif, is overexpressed in acute T-cell leukaemia with the t(11;14)(p13;q11). Oncogene 6: 1887-1893, 1991.
[3755] 949. Yamada, Y.; Pannell, R.; Forster, A.; Rabbitts, T. H.: The oncogenic LIM-only transcription factor Lmo2 regulates angiogenesis but not vasculogenesis in mice. Proc. Nat. Acad. Sci. 97: 320-324, 2000.
[3756] 950. Yamada, Y.; Warren, A. J.; Dobson, C.; Forster, A.; Pannell, R.; Rabbitts, T. H.: The T cell leukemia LIM protein Lmo2 is necessary for adult mouse hematopoiesis. Proc. Nat. Acad. Sci. 95: 3890-3895, 1998.
[3757] 951. Kim, D.-H.; Iijima, H.; Goto, K.; Sakai, J.; Ishii, H.; Kim, H.-J.; Suzuki, H.; Kondo, H.; Saeki, S.; Yamamoto, T.: Human apolipoprotein E receptor 2: a novel lipoprotein receptor of the low density lipoprotein receptor family predominantly expressed in brain. J. Biol. Chem. 271: 8373-8380, 1996.
[3758] 952. Kim, D.-H.; Magoori, K.; Inoue, T. R.; Mao, C. C.; Kim, H.-J.; Suzuki, H.; Fujita, T.; Endo, Y.; Saeki, S.; Yamamoto, T. T.: Exon/intron organization, chromosome localization, alternative splicing, and transcription units of the human apolipoprotein E receptor 2 gene. J. Biol. Chem. 272: 8498-8504, 1997.
[3759] 953. Edelhoff, S.; Ayer, D. E.; Zervos, A. S.; Steingrimsson, E.; Jenkins, N. A.; Copeland, N. G.; Eisenman, R. N.; Brent, R.; Disteche, C. M. Mapping of two genes encoding members of a distinct subfamily of MAX interacting proteins: MAD to human chromosome 2 and mouse chromosome 6, and MXI1 to chromosome 10 and mouse chromosome 19. Oncogene 9: 665-668, 1994.
[3760] 954. Eisenman, R. N.: Personal Communication. Seattle, Wash. Jul. 27, 1994.
[3761] 955. Shapiro, D. N.; Valentine, V.; Eagle, L.; Yin, X.; Morris, S. W.; Prochownik, E. V.: Assignment of the human MAD and MXI1 genes to chromosomes 2p12-p13 and 10q24-q25. Genomics 23: 282-285, 1994.
[3762] 956. Brubaker, K.; Cowley, S. M.; Huang, K.; Loo, L.; Yochum, G. S.; Ayer, D. E.; Eisenman, R. N.; Radhakrishnan, I.: Solution structure of the interacting domains of the Mad-Sin3 complex: implications for recruitment of a chromatin-modifying complex. Cell 103: 655-665, 2000.
[3763] 957. Jin, D.-Y.; Kozak, C. A.; Pangilinan, F.; Spencer, F.; Green, E. D.; Jeang, K.-T.: Mitotic checkpoint locus MAD1L1 maps to human chromosome 7p22 and mouse chromosome 5. Genomics 55: 363-364, 1999.
[3764] 958. Jin, D.-Y.; Spencer, F.; Jeang, K.-T.: Human T cell leukemia virus type 1 oncoprotein Tax targets the human mitotic checkpoint protein MAD1. Cell 93: 81-91, 1998.
[3765] 959. Luo, X.; Tang, Z.; Rizo, J.; Yu, H.: The Mad2 spindle checkpoint protein undergoes similar major conformational changes upon binding to either Mad1 or Cdc20. Molec. Cell 9: 59-71, 2002.
[3766] 960. Tsukasaki, K.; Miller, C. W.; Greenspun, E.; Eshaghian, S.; Kawabata, H.; Fujimoto, T.; Tomonaga, M.; Sawyers, C.; Said, J. W.; Koeffler, H. P.: Mutations in the mitotic check point gene, MAD1L1, in human cancers. Oncogene 20: 3301-3305, 2001.
[3767] 961. Blank, V.; Andrews, N.C.: The Maf transcription factors: regulators of differentiation. Trends Biochem. Sci. 22: 437-441, 1997.
[3768] 962. Jamieson, R. V.; Perveen, R.; Kerr, B.; Carette, M.; Yardley, J.; Heon, E.; Wirth, M. G.; van Heyningen, V.; Donnai, D.; Munier, F.; Black, G. C. M.: Domain disruption and mutation of the bZIP transcription factor, MAF, associated with cataract, ocular anterior segment dysgenesis and coloboma. Hum. Molec. Genet. 11: 33-42, 2002.
[3769] 963. Kim, J. I.; Li, T.; Ho, I. C.; Grusby, M. J.; Glimcher, L. H.: Requirement for the c-Maf transcription factor in crystallin gene regulation and lens development. Proc. Nat. Acad. Sci. 96: 3781-3785, 1999.
[3770] 964. Nishizawa, M.; Kataoka, K.; Goto, N.; Fujiwara, K. T.; Kawai, S. v-maf, a viral oncogene that encodes a ‘leucine zipper’ motif. Proc. Nat. Acad. Sci. 86: 7711-7715, 1989.
[3771] 965. Yoshida, M. C.; Nishizawa, M.; Kataoka, K.; Goto, N.; Fujiwara, K. T.; Kawai, S.: Localization of the human MAF protooncogene on chromosome 16 to bands q22-q23. (Abstract) Cytogenet. Cell Genet. 58: 2003 only, 1991.
[3772] 966. Iwata, T.; Kogame, K.; Toki, T.; Yokoyama, M.; Yamamoto, M.; Ito, E.: Structure and chromosome mapping of the human small maf genes MAFG and MAFK. Cytogenet. Cell Genet. 82: 88-90, 1998.
[3773] 967. Motohashi, H.; Katsuoka, F.; Shavit, J. A.; Engel, J. D.; Yamamoto, M.: Positive or negative MARE-dependent transcriptional regulation is determined by the abundance of small Maf proteins. Cell 103: 865-875, 2000.
[3774] 968. Peters, L. L.; Eicher, E. M.: The ubiquitous subunit of the globin enhancer-binding protein NF-E2 (Nfe2u) maps to mouse chromosome 5. Genomics 22: 490-491, 1994.
[3775] 969. Shavit, J. A.; Motohashi, H.; Onodera, K.; Akasaka, J.; Yamamoto, M.; Engel, J. D.: Impaired megakaryopoiesis and behavioral defects in mafG-null mutant mice. Genes Dev. 12: 2164-2174, 1998.
[3776] 970. Toki, T.; Itoh, J.; Kitazawa, J.; Arai, K.; Hatakeyama, K.; Akasaka, J.; Igarashi, K.; Nomura, N.; Yokoyama, M.; Yamamoto, M.; Ito, E.: Human small Maf proteins form heterodimers with CNC family transcription factors and recognize the NF-E2 motif. Oncogene 14: 1901-1910, 1997.
[3777] 971. Chui, D.; Oh-Eda, M.; Liao, Y.-F.; Panneerselvam, K.; Lai, A.; Marek, K. W.; Freeze, H. H.; Moremen, K. W.; Fukuda, M. N.; Marth, J. D.: Alpha-mannosidase-II deficiency results in dyserythropoiesis and unveils an alternate pathway in oligosaccharide biosynthesis. Cell 90: 157-167, 1997.
[3778] 972. Chui, D.; Sellakumar, G.; Green, R. S.; Sutton-Smith, M.; McQuistan, T.; Marek, K. W.; Morris, H. R.; Dell, A.; Marth, J. D.: Genetic remodeling of protein glycosylation in vivo induces autoimmune disease. Proc. Nat. Acad. Sci. 98: 1142-1147, 2001.
[3779] 973. Gasparini, P.; del Giudice, E. M.; Delaunay, J.; Totaro, A.; Granatiero, M.; Melchionda, S.; Zelante, L.; Iolascon, A.: Localization of the congenital dyserythropoietic anemia II locus to chromosome 20q11.2 by genomewide search. Am. J. Hum. Genet. 61: 1112-1116, 1997.
[3780] 974. Misago, M.; Liao, Y.-F.; Kudo, S.; Eto, S.; Mattei, M.-G.; Moremen, K. W.; Fukuda, M. N.: Molecular cloning and expression of cDNAs encoding human alpha-mannosidase II and a previously unrecognized alpha-mannosidase II(X) isozyme. Proc. Nat. Acad. Sci. 92: 11766-11770, 1995.
[3781] 975. Moremen, K. W.; Robbins, P. W.: Isolation, characterization, and expression of cDNAs encoding murine alpha-mannosidase II, a Golgi enzyme that controls conversion of high mannose to complex N-glycans. J. Cell Biol. 115: 1521-1534, 1991.
[3782] 976. Chang, H. Y.; Nishitoh, H.; Yang, X.; Ichijo, H.; Baltimore, D. Activation of apoptosis signal-regulating kinase 1 (ASK1) by the adapter protein Daxx. Science 281: 1860-1863, 1998.
[3783] 977. Geleziunas, R.; Xu, W.; Takeda, K.; Ichijo, H.; Greene, W. C.: HIV-1 Nef inhibits ASK1-dependent death signalling providing a potential mechanism for protecting the infected host cell. Nature 410: 834-838, 2001.
[3784] 978. Ichijo, H.; Nishida, E.; Irie, K.; ten Dijke, P.; Saitoh, M.; Moriguchi, T.; Takagi, M.; Matsumoto, K.; Miyazono, K.; Gotoh, Y.: Induction of apoptosis by ASK1, a mammalian MAPKKK that activates SAPK/JNK and p38 signaling pathways. Science 275: 90-94, 1997.
[3785] 979. Kim, D. H.; Feinbaum, R.; Alloing, G.; Emerson, F. E.; Garsin, D. A.; Inoue, H.; Tanaka-Hino, M.; Hisamoto, N.; Matsumoto, K.; Tan, M.-W.; Ausubel, F. M.: A conserved p38 MAP kinase pathway in Caenorhabditis elegans innate immunity. Science 297: 623-626, 2002.
[3786] 980. McDonald, P. H.; Chow, C.-W.; Miller, W. E.; Laporte, S. A.; Field, M. E.; Lin, F.-T.; Davis, R. J.; Lefkowitz, R. J.: Beta-arrestin 2: a receptor-regulated MAPK scaffold for the activation of JNK3. Science 290: 1574-1577, 2000.
[3787] 981. Nishitoh, H.; Saitoh, M.; Mochida, Y.; Takeda, K.; Nakano, H.; Rothe, M.; Miyazono, K.; Ichijo, H.: ASK1 is essential for JNK/SAPK activation by TRAF2. Molec. Cell 2: 389-395, 1998.
[3788] 982. Orth, K.; Palmer, L. E.; Bao, Z. Q.; Stewart, S.; Rudolph, A. E.; Bliska, J. B.; Dixon, J. E.: Inhibition of the mitogen-activated protein kinase kinase superfamily by a Yersinia effector. Science 285: 1920-1923, 1999.
[3789] 983. Rampoldi, L.; Zimbello, R.; Bortoluzzi, S.; Tiso, N.; Valle, G.; Lanfranchi, G.; Danieli, G. A.: Chromosomal localization of four MAPK signaling cascade genes: MEK1, MEK3, MEK4 and MEKK5. Cytogenet. Cell Genet. 78: 301-303, 1997.
[3790] 984. Wang, X. S.; Diener, K.; Jannuzzi, D.; Trollinger, D.; Tan, T.-H.; Lichenstein, H.; Zukowski, M.; Yao, Z.: Molecular cloning and characterization of a novel protein kinase with a catalytic domain homologous to mitogen-activated protein kinase kinase kinase. J. Biol. Chem. 271: 31607-31611, 1996.
[3791] 985. Xu, X.-N.; Screaton, G. R.; Gotch, F. M.; Dong, T.; Tan, R.; Almond, N.; Walker, B.; Stebbings, R.; Kent, K.; Nagata, S.; Stott, J. E.; McMichael, A. J.: Evasion of cytotoxic T lymphocyte (CTL) responses by Nef-dependent induction of Fas ligand (CD95L) expression on simian immunodeficiency virus-infected cells. J. Exp. Med. 186: 7-16, 1997.
[3792] 986. Tung, R. M.; Blenis, J.: A novel human SPS1/STE20 homologue, KHS, activates Jun N-terminal kinase. Oncogene 14: 653-659, 1997.
[3793] 987. Bhalla, U.S.; Ram, P. T.; Iyengar, R.: MAP kinase phosphatase as a locus of flexibility in a mitogen-activated protein kinase signaling network. Science 297: 1018-1023, 2002.
[3794] 988. Boulton, T. G.; Nye, S. H.; Robbins, D. J.; Ip, N.Y.; Radziejewska, E.; Morgenbesser, S. D.; DePinho, R. A.; Panayotatos, N.; Cobb, M. H.; Yancopoulos, G. D.: ERKs: a family of protein-serine/threonine kinases that are activated and tyrosine phosphorylated in response to insulin and NGF. Cell 65: 663-675, 1991.
[3795] 989. Cobb, M. H.; Boulton, T. G.; Robbins, D. J.: Extracellular signal-regulated kinases: ERKs in progress. Cell Regul. 2: 965-978, 1991.
[3796] 990. Di Cristo, G.; Berardi, N.; Cancedda, L.; Pizzorusso, T.; Putignano, E.; Ratto, G. M.; Maffei, L.: Requirement of ERK activation for visual cortical plasticity. Science 292: 2337-2340, 2001.
[3797] 991. Favata, M. F.; Horiuchi, K. Y.; Manos, E. J.; Daulerio, A. J.; Stradley, D. A.; Feeser, W. S.; Van Dyk, D. E.; Pitts, W. J.; Earl, R. A.; Hobbs, F.; Copeland, R. A.; Magolda, R. L.; Scherle, P. A.; Trzaskos, J. M.: Identification of a novel inhibitor of mitogen-activated protein kinase kinase. J. Biol. Chem. 273: 18623-18632, 1998.
[3798] 992. Forcet, C.; Stein, E.; Pays, L.; Corset, V.; Llambi, F.; Tessier-Lavigne, M.; Mehlen, P.: Netrin-1-mediated axon outgrowth requires deleted in colorectal cancer-dependent MAPK activation. Nature 417: 443-447, 2002.
[3799] 993. Khokhlatchev, A. V.; Canagarajah, B.; Wilsbacher, J.; Robinson, M.; Atkinson, M.; Goldsmith, E.; Cobb, M. H.: Phosphorylation of the MAP kinase ERK2 promotes its homodimerization and nuclear translocation. Cell 93: 605-615, 1998.
[3800] 994. Li, L.; Wysk, M.; Gonzalez, F. A.; Davis, R. J.: Genomic loci of human mitogen-activated protein kinases. Oncogene 9: 647-649, 1994.
[3801] 995. Owaki, H.; Makar, R.; Boulton, T. G.; Cobb, M. H.; Geppert, T. D.: Extracellular signal-regulated kinases in T cells: characterization of human ERK1 and ERK2 cDNAs. Biochem. Biophys. Res. Commun. 182: 1416-1422, 1992.
[3802] 996. Pleschka, S.; Wolff, T.; Ehrhardt, C.; Hobom, G.; Planz, O.; Rapp, U. R.; Ludwig, S.: Influenza virus propagation is impaired by inhibition of the Raf/MEK/ERK signalling cascade. Nature Cell Biol. 3: 301-305, 2001.
[3803] 997. Saba-El-Leil, M. K.; Malo, D.; Meloche, S.: Chromosomal localization of the mouse genes encoding the ERK1 and ERK2 isoforms of MAP kinases. Mammalian Genome 8: 141-142, 1997.
[3804] 998. Seger, R.; Krebs, E. G.: The MAPK signaling cascade. FASEB J. 9: 726-735, 1995.
[3805] 999. Stefanovsky, V. Y.; Pelletier, G.; Hannan, R.; Gagnon-Kugler, T.; Rothblum, L. I.; Moss, T.: An immediate response of ribosomal transcription to growth factor stimulation in mammals is mediated by ERK phosphorylation of UBF. Molec. Cell 8: 1063-1073, 2001.
[3806] 1000. Thomas, G.: MAP kinase by any other name smells just as sweet. Cell 68: 3-6, 1992.
[3807] 1001. Waskiewicz, A. J.; Flynn, A.; Proud, C. G.; Cooper, J. A.: Mitogen-activated protein kinases activate the serine/threonine kinases Mnk1 and Mnk2. EMBO J. 16: 1909-1920, 1997.
[3808] 1002. Avraham, S.; Jiang, S.; Ota, S.; Fu, Y.; Deng, B.; Dowler, L. L.; White, R. A.; Avraham, H.: Structural and functional studies of the intracellular tyrosine kinase MATK gene and its translated product. J. Biol. Chem. 270: 1833-1842, 1995.
[3809] 1003. Bennett, B. D.; Cowley, S.; Jiang, S.; London, R.; Deng, B.; Grabarek, J.; Groopman, J. E.; Goeddel, D. V.; Avraham, H.: Identification and characterization of a novel tyrosine kinase from megakaryocytes. J. Biol. Chem. 269: 1068-1074, 1994.
[3810] 1004. Klages, S.; Adam, D.; Class, K.; Fargnoli, J.; Bolen, J. B.; Penhallow, R. C.: Ctk: a protein-tyrosine kinase related to Csk that defines an enzyme family. Proc. Nat. Acad. Sci. 91: 2597-2601, 1994.
[3811] 1005. Sakano, S.; Iwama, A.; Inazawa, J.; Ariyama, T.; Ohno, M.; Suda, T.: Molecular cloning of a novel non-receptor tyrosine kinase, HYL (hematopoietic consensus tyrosine-lacking kinase). Oncogene 9: 1155-1161, 1994.
[3812] 1006. Zrihan-Licht, S.; Lim, J.; Keydar, I.; Sliwkowski, M. X.; Groopman, J. E.; Avraham, H.: Association of Csk-homologous kinase (CHK) (formerly MATK) with HER-2/ErbB-2 in breast cancer cells. J. Biol. Chem. 272: 1856-1863, 1997.
[3813] 1007. Becker, M. A.; Heidler, S. A.; Bell, G. I.; Seino, S.; Le Beau, M. M.; Westbrook, C. A.; Neuman, W.; Shapiro, L. J.; Mohandas, T. K.; Roessler, B. J.; Palella, T. D.: Cloning of cDNAs for human phosphoribosylpyrophosphate synthetases 1 and 2 and X chromosome localization of PRPS1 and PRPS2 genes. Genomics 8: 555-561, 1990.
[3814] 1008. Buchner, G.; Montini, E.; Andolfi, G.; Quaderi, N.; Cainarca, S.; Messali, S.; Bassi, M. T.; Ballabio, A.; Meroni, G.; Franco, B.: MID2, a homologue of the Opitz syndrome gene MID1: similarities in subcellular localization and differences in expression during development. Hum. Molec. Genet. 8: 1397-1407, 1999.
[3815] 1009. Shapiro, M. B.; Senaphthy, P.: RNA splice junctions of different classes of eukaryotes: sequence statistics and functional implications in gene expression. Nucleic Acids Res. 15: 7155-7174, 1987.
[3816] 1010. Kamberov, E.; Makarova, O.; Roh, M.; Liu, A.; Karnak, D.; Straight, S.; Margolis, B.: Molecular cloning and characterization of Pals, proteins associated with mLin-7. J. Biol. Chem. 275: 11425-11431, 2000.
[3817] 1011. Tseng, T.-C.; Marfatia, S. M.; Bryant, P. J.; Pack, S.; Zhuang, A.; O'Brien, J. E.; Lin, L.; Hanada, T.; Chishti, A. H.: VAM-1: a new member of the MAGUK family binds to human Veli-1 through a conserved domain. Biochim. Biophys. Acta 1518: 249-259, 2001.
[3818] 1012. Futamura, M.; Nishimori, H.; Shiratsuchi, T.; Saji, S.; Nakamura, Y.; Tokino, T.: Molecular cloning, mapping, and characterization of a novel human gene, MTA1-L1, showing homology to a metastasis-associated gene, MTA1. J. Hum. Genet. 44: 52-56, 1999.
[3819] 1013. Luo, J.; Su, F.; Chen, D.; Shiloh, A.; Gu, W.: Deacetylation of p53 modulates its effect on cell growth and apoptosis. Nature 408: 377-381, 2000.
[3820] 1014. Wade, P. A.; Gegonne, A.; Jones, P. L.; Ballestar, E.; Aubry, F.; Wolffe, A. P.: Mi-2 complex couples DNA methylation to chromatin remodelling and histone deacetylation. Nature Genet. 23: 62-66, 1999.
[3821] 1015. Zhang, Y.; Ng, H.-H.; Erdjument-Bromage, H.; Tempst, P.; Bird, A.; Reinberg, D.: Analysis of the NuRD subunits reveals a histone deacetylase core complex and a connection with DNA methylation. Genes Dev. 13: 1924-1935, 1999.
[3822] 1016. Copley, L. M.; Zhao, W. D.; Kopacz, K.; Herman, G. E.; Kioschis, P.; Poustka, A.; Taudien, S.; Platzer, M.: Exclusion of mutations in the MTMR1 gene as a frequent cause of X-linked myotubular myopathy. (Letter) Am. J. Med. Genet. 107: 256-258, 2002.
[3823] 1017. Kioschis, P.; Wiemann, S.; Heiss, N. S.; Francis, F.; Gotz, C.; Poustka, A.; Taudien, S.; Platzer, M.; Wiehe, T.; Beckmann, G.; Weber, J.; Nordsiek, G.; Rosenthal, A.: Genomic organization of a 225-kb region in Xq28 containing the gene for X-linked myotubular myopathy (MTM1) and a related gene (MTMR1). Genomics 54: 256-266, 1998.
[3824] 1018. Laporte, J.; Blondeau, F.; Buj-Bello, A.; Tentler, D.; Kretz, C.; Dahl, N.; Mandel, J.-L.: Characterization of the myotubularin dual specificity phosphatase gene family from yeast to human. Hum. Molec. Genet. 7: 1703-1712, 1998.
[3825] 1019. Laporte, J.; Hu, L. J.; Kretz, C.; Mandel, J.-L.; Kioschis, P.; Coy, J. F.; Klauck, S. M.; Poustka, A.; Dahl, N.: A gene mutated in X-linked myotubular myopathy defines a new putative tyrosine phosphatase family conserved in yeast. Nature Genet. 13: 175-182, 1996.
[3826] 1020. Berger, R.; Smit, G. P. A.; Schierbeek, H.; Bijsterveld, K.; le Coultre, R.: Mevalonic aciduria: an inborn error of cholesterol biosynthesis? Clin. Chim. Acta 152: 219-222, 1985.
[3827] 1021. Cuisset, L.; Drenth, J. P. H.; Simon, A.; Vincent, M. F.; van der Velde Visser, S.; van der Meer, J. W. M.; Grateau, G.; Delpech, M.; International Hyper-IgD Study Group: Molecular analysis of MVK mutations and enzymatic activity in hyper-IgD and periodic fever syndrome. Europ. J. Hum. Genet. 9: 260-266, 2001.
[3828] 1022. Drenth, J. P. H.; Cuisset, L.; Grateau, G.; Vasseur, C.; van de Velde-Visser, S. D.; de Jong, J. G. N.; Beckmann, J. S.; van der Meer, J. W. M.; Delpech, M.; International Hyper-IgD Study Group: Mutations in the gene encoding mevalonate kinase cause hyper-IgD and periodic fever syndrome. Nature Genet. 22: 178-181, 1999.
[3829] 1023. Drenth, J. P. H.; Haagsma, C. J.; van der Meer, J. W. M.; International Hyper-IgD Study Group: Hyperimmunoglobulinemia D and periodic fever syndrome: the clinical spectrum in a series of 50 patients. Medicine 73: 133-144, 1994.
[3830] 1024. Gibson, K. M.; Hoffmann, G.; Nyhan, W. L.; Sweetman, L.; Berger, R.; le Coultre, R.; Smit, G. P. A.: Mevalonate kinase deficiency in a child with cerebellar ataxia hypotonia and mevalonic aciduria. Europ. J. Pediat. 148: 250-252, 1988.
[3831] 1025. Gibson, K. M.; Hoffmann, G.; Nyhan, W. L.; Sweetman, L.; Brandt, I. K.; Wappner, R. S.; Bader, P. I.: Mevalonic aciduria: family studies in mevalonate kinase deficiency, an inborn error of cholesterol biosynthesis. J. Inherit. Metab. Dis. 10 (suppl. 2): 282-285, 1987.
[3832] 1026. Gibson, K. M.; Hoffmann, G. F.; Tanaka, R. D.; Bishop, R. W.; Chambliss, K. L.: Mevalonate kinase map position 12q24. Chromosome Res. 5: 150 only, 1997.
[3833] 1027. Hinson, D. D.; Rogers, Z. R.; Hoffmann, G. F.; Schachtele, M.; Fingerhut, R.; Kohlschutter, A.; Kelley, R. I.; Gibson, K. M.: Hematological abnormalities and cholestatic liver disease in two patients with mevalonate kinase deficiency. Am. J. Med. Genet. 78: 408-412, 1998.
[3834] 1028. Hinson, D. D.; Ross, R. M.; Krisans, S.; Shaw, J. L.; Kozich, V.; Rolland, M.-O.; Divry, P.; Mancini, J.; Hoffmann, G. F.; Gibson, K. M.: Identification of a mutation cluster in mevalonate kinase deficiency, including a new mutation in a patient of Mennonite ancestry. Am. J. Hum. Genet. 65: 327-335, 1999.
[3835] 1029. Hoffmann, G.; Gibson, K. M.; Brandt, I. K.; Bader, P. I.; Wappner, R. S.; Sweetman, L.: Mevalonic aciduria—an inborn error of cholesterol and nonsterol isoprene biosynthesis. New Eng. J. Med. 314: 1610-1614, 1986.
[3836] 1030. Hoffmann, G. F.; Charpentier, C.; Mayatepek, E.; Mancini, J.; Leichsenring, M.; Gibson, K. M.; Divry, P.; Hrebicek, M.; Lehnert, W.; Sartor, K.; Trefz, F. K.; Rating, D.; Bremer, H. J.; Nyhan, W. L.: Clinical and biochemical phenotype in 11 patients with mevalonic aciduria. Pediatrics 91: 915-921, 1993.
[3837] 1031. Houten, S. M; Koster, J.; Romeijn, G.-J.; Frenkel, J.; Di Rocco, M.; Caruso, U.; Landrieu, P.; Kelley, R. I.; Kuis, W.; Poll-The, B. T.; Gibson, K. M.; Wanders, R. J. A.; Waterham, H. R.: Organization of the mevalonate kinase (MVK) gene and identification of novel mutations causing mevalonic aciduria and hyperimmunoglobulinaemia D and periodic fever syndrome. Europ. J. Hum. Genet. 9: 253-259, 2001. Note: Erratum: Europ. J. Med. Genet. 9: 651 only, 2001.
[3838] 1032. Houten, S. M.; Kuis, W.; Duran, M.; de Koning, T. J.; van Royen-Kerkhof, A.; Romeijn, G. J.; Frenkel, J.; Dorland, L.; de Barse, M. M. J.; Huijbers, W. A. R.; Rijkers, G. T.; Waterham, H. R.; Wanders, R. J. A.; Poll-The, B. T.: Mutations in MVK, encoding mevalonate kinase, cause hyperimmunoglobulinaemia D and periodic fever syndrome. Nature Genet. 22: 175-177, 1999.
[3839] 1033. Houten, S. M.; Romeijn, G. J.; Koster, J.; Gray, R. G. F.; Darbyshire, P.; Smit, G. P. A.; de Klerk, J. B. C.; Duran, M.; Gibson, K. M.; Wanders, R. J. A.; Waterham, H. R.: Identification and characterization of three novel missense mutations in mevalonate kinase cDNA causing mevalonic aciduria, a disorder of isoprene biosynthesis. Hum. Molec. Genet. 8: 1523-1528, 1999.
[3840] 1034. Krisans, S. K.; Ericsson, J.; Edwards, P. A.; Keller, G. A.: Farnesyl-diphosphate synthase is localized in peroxisomes. J. Biol. Chem. 269: 14165-14169, 1994.
[3841] 1035. Mancini, J.; Philip, N.; Chabrol, B.; Divry, P.; Rolland, M.-O.; Pinsard, N.: Mevalonic aciduria in 3 siblings: a new recognizable metabolic encephalopathy. Pediat. Neurol. 9: 243-246, 1993.
[3842] 1036. Schafer, B. L.; Bishop, R. W.; Kratunis, V. J.; Kalinowski, S. S.; Mosley, S. T.; Gibson, K. M.; Tanaka, R. D.: Molecular cloning of human mevalonate kinase and identification of a missense mutation in the genetic disease mevalonic aciduria. J. Biol. Chem. 267: 13229-13238, 1992.
[3843] 1037. van der Meer, J. W. M.; Vossen, J. M.; Radl, J.; van Nieuwkoop, J. A.; Meyer, C. J. L. M.; Lobatto, S.; van Furth, R.: Hyperimmunoglobulinaemia D and periodic fever: a new syndrome. Lancet I: 1087-1090, 1984.
[3844] 1038. Suzuki, T.; Nishiyama, K.; Yamamoto, A.; Inazawa, J.; Iwaki, T.; Yamada, T.; Kanazawa, I.; Sakaki, Y.: Molecular cloning of a novel apoptosis-related gene, human Nap1 (NCKAP1), and its possible relation to Alzheimer disease. Genomics 63: 246-254, 2000.
[3845] 1039. Becker, D. M.; Fikes, J. D.; Guarente, L.: A cDNA encoding a human CCAAT-binding protein cloned by functional complementation in yeast. Proc. Nat. Acad. Sci. 88: 1968-1972, 1991.
[3846] 1040. Li, X.-Y.; Mattei, M. G.; Zaleska-Rutczynska, Z.; Hooft van Huijsduijnen, R.; Figueroa, F.; Nadeau, J.; Benoist, C.; Mathis, D.: One subunit of the transcription factor NF-Y maps close to the major histocompatibility complex in murine and human chromosomes. Genomics 11: 630-634, 1991.
[3847] 1041. Burden, S.; Yarden, Y.: Neuregulins and their receptors: a versatile signaling module in organogenesis and oncogenesis. Neuron 18: 847-855, 1997.
[3848] 1042. Busfield, S. J.; Michnick, D. A.; Chickering, T. W.; Revett, T. L.; Ma, J.; Woolf, E. A.; Comrack, C. A.; Dussault, B. J.; Woolf, J.; Goodearl, A. D. J.; Gearing, D. P.: Characterization of a neuregulin-related gene, Don-1, that is highly expressed in restricted regions of the cerebellum and hippocampus. Molec. Cell. Biol. 17: 4007-4014, 1997.
[3849] 1043. Carraway, K. L., III; Weber, J. L.; Unger, M. J.; Ledesma, J.; Yu, N.; Gassmann, M.; Lai, C.: Neuregulin-2, a new ligand of ErbB3/ErbB4-receptor tyrosine kinases. Nature 387: 512-516, 1997.
[3850] 1044. Chang, H.; Riese, D. J., II; Gilbert, W.; Stem, D. F.; McMahan, U. J.: Ligands for ErbB-family receptors encoded by a neuregulin-like gene. Nature 387: 509-512, 1997.
[3851] 1045. Ring, H. Z.; Chang, H.; Guilbot, A.; Brice, A.; LeGuern, E.; Francke, U.: The human neuregulin-2 (NRG2) gene: cloning, mapping and evaluation as a candidate for the autosomal recessive form of Charcot-Marie-Tooth disease linked to 5q. Hum. Genet. 104: 326-332, 1999.
[3852] 1046. Yamada, K.; Ichino, N.; Nishii, K.; Sawada, H.; Higashiyama, S.; Ishiguro, H.; Nagatsu, T.: Characterization of the human NTAK gene structure and distribution of the isoforms for rat NTAK mRNA. Gene 255: 15-24, 2000.
[3853] 1047. Ahuja, H. G.; Felix, C. A.; Aplan, P. D.: The t(11;20)(p15;q11) chromosomal translocation associated with therapy-related myelodysplastic syndrome results in an NUP98-TOP1 fusion. Blood 94: 3258-3261, 1999.
[3854] 1048. Arai, Y.; Hosoda, F.; Kobayashi, H.; Arai, K.; Hayashi, Y.; Kamada, N.; Kaneko, Y.; Ohki, M.: The inv(11)(p15q22) chromosome translocation of de novo and therapy-related myeloid malignancies results in fusion of the nucleoporin gene, NUP98, with the putative RNA helicase gene, DDX10. Blood 89: 3936-3944, 1997.
[3855] 1049. Borrow, J.; Shearman, A. M.; Stanton, V. P., Jr.; Becher, R.; Collins, T.; Williams, A. J.; Dube, I.; Katz, F.; Kwong, Y. L.; Morris, C.; Ohyashiki, K.; Toyama, K.; Rowley, J.; Housman, D. E.: The t(7;11)(p15;p15) translocation in acute myeloid leukaemia fuses the genes for nucleoporin NUP98 and class I homeoprotein HOXA9. Nature Genet. 12: 159-167, 1996.
[3856] 1050. Dash, A. B.; Williams, I. R.; Kutok, J. L.; Tomasson, M. H.; Anastasiadou, E.; Lindahl, K.; Li, S.; Van Etten, R. A.; Borrow, J.; Housman, D.; Druker, B.; Gilliland, D. G.: A murine model of CML blast crisis induced by cooperation between BCR/ABL and NUP98/HOXA9. Proc. Nat. Acad. Sci. 99: 7622-7627, 2002.
[3857] 1051. Enninga, J.; Levy, D. E.; Blobel, G.; Fontoura, B. M. A.: Role of nucleoporin induction in releasing an mRNA nuclear export block. Science 295: 1523-1525, 2002.
[3858] 1052. Fontoura, B. M.; Blobel, G.; Matunis, M. J.: A conserved biogenesis pathway for nucleoporins: proteolytic processing of a 186-kilodalton precursor generates Nup98 and the novel nucleoporin, Nup96. J. Cell Biol. 144: 1097-1112, 1999.
[3859] 1053. Hodel, A. E.; Hodel, M. R.; Griffis, E. R.; Hennig, K. A.; Ratner, G. A.; Xu, S.; Powers, M. A.: The three-dimensional structure of the autoproteolytic, nuclear pore-targeting domain of the human nucleoporin Nup98. Molec. Cell 10: 347-358, 2002.
[3860] 1054. Hussey, D. J.; Nicola, M.; Moore, S.; Peters, G. B.; Dobrovic, A.: The (4;11)(q21;p15) translocation fuses the NUP98 and RAP1GDS1 genes and is recurrent in T-cell acute lymphocytic leukemia. Blood 94: 2072-2079, 1999.
[3861] 1055. Jaju, R. J.; Fidler, C.; Haas, O. A.; Strickson, A. J.; Watkins, F.; Clark, K.; Cross, N.C. P.; Cheng, J.-F.; Aplan, P. D.; Kearney, L.; Boultwood, J.; Wainscoat, J. S.: A novel gene, NSD1, is fused to NUP98 in the t(5;11)(q35;p15.5) in de novo childhood acute myeloid leukemia. Blood 98: 1264-1267, 2001.
[3862] 1056. Jaju, R. J.; Haas, C. A.; Neat, M.; et al: A new recurrent translocation, t(5;11)(q35p15.5), associated with del(5q) in childhood acute myeloid leukemia. Blood 94: 773-780, 1999.
[3863] 1057. Mizuno, T.; Kaibuchi, K.; Yamamoto, T.; Kawamura, M.; Sakoda, T.; Fujioka, H.; Matsuura, Y.; Takai, Y.: A stimulatory GDP/GTP exchange protein for smg p21 is active on the post-translationally processed form of c-Ki-ras p21 and rhoA p21. Proc. Nat. Acad. Sci. 88: 6442-6446, 1991.
[3864] 1058. Nakamura, T.; Largaespada, D. A.; Lee, M. P.; Johnson, L. A.; Ohyashiki, K.; Toyama, K.; Chen, S. J.; Willman, C. L.; Chen, I.-M.; Feinberg, A. P.; Jenkins, N. A.; Copeland, N. G.; Shaughnessy, J. D., Jr.: Fusion of the nucleoporin gene NUP98 to HOXA9 by the chromosome translocation t(7;11)(p15;p15) in human myeloid leukaemia. Nature Genet. 12: 154-158, 1996.
[3865] 1059. Nakamura, T.; Yamazaki, Y.; Hatano, Y.; Miura, I.: NUP98 is fused to PMX1 homeobox gene in human acute myelogenous leukemia with chromosome translocation t(1;11)(q23;p15). Blood 94: 741-747, 1999.
[3866] 1060. Radu, A.; Moore, M. S.; Blobel, G.: The peptide repeat domain of nucleoporin Nup98 functions as a docking site in transport across the nuclear pore complex. Cell 81: 215-222, 1995.
[3867] 1061. Rosati, R.; La Starza, R.; Veronese, A.; Aventin, A.; Schwienbacher, C.; Vallespi, T.; Negrini, M.; Martelli, M. F.; Mecucci, C.: NUP98 is fused to the NSD3 gene in acute myeloid leukemia associated with t(8;11)(p11.2;p15). Blood 99: 3857-3860, 2002.
[3868] 1062. von Kobbe, C.; van Deursen, J. M. A.; Rodrigues, J. P.; Sitterlin, D.; Bachi, A.; Wu, X.; Wilm, M.; Carmo-Fonseca, M.; Izaurralde, E.: Vesicular stomatitis virus matrix protein inhibits host cell gene expression by targeting the nucleoporin Nup98. Molec. Cell 6: 1243-1252, 2000.
[3869] 1063. Daigo, Y.; Isomura, M.; Nishiwaki, T.; Tamari, M.; Ishikawa, S.; Kai, M.; Murata, Y.; Takeuchi, K.; Yamane, Y.; Hayashi, R.; Minami, M.; Fujino, M. A.; Hojo, Y.; Uchiyama, I.; Takagi, T.; Nakamura, Y.: Characterization of a 1200-kb genomic segment of chromosome 3p22-p21.3. DNA Res. 6: 37-44, 1999.
[3870] 1064. Tamari, M.; Daigo, Y.; Nakamura, Y.: Isolation and characterization of a novel serine threonine kinase gene on chromosome 3q22-21.3. J. Hum. Genet. 44: 116-120, 1999.
[3871] 1065. Kiefer, M. C.; Tucker, J. E.; Joh, R.; Landsberg, K. E.; Saltman, D.; Barr, P. J.: Identification of a second human subtilisin-like protease gene in the fes/fps region of chromosome 15. DNA Cell Biol. 10: 757-769, 1991.
[3872] 1066. Mbikay, M.; Seidah, N. G.; Chretien, M.; Simpson, E. M.: Chromosomal assignment of the genes for proprotein convertases PC4, PC5, and PACE 4 in mouse and human. Genomics 26: 123-129, 1995.
[3873] 1067. Nagase, T.; Kikuno, R.; Ishikawa, K.; Hirosawa, M.; Ohara, O.: Prediction of the coding sequences of unidentified human genes. XVI. The complete sequences of 150 new cDNA clones from brain which code for large proteins in vitro. DNA Res. 7: 65-73, 2000.
[3874] 1068. Sumoy, L.; Pluvinet, R.; Andreu, N.; Estivill, X.; Escarceller, M.: PACSIN 3 is a novel SH3 domain cytoplasmic adapter protein of the pacsin-syndapin-FAP52 gene family. Gene 262: 199-205, 2001.
[3875] 1069. Thuresson, A.-C.; Astrom, J.; Astrom, A.; Gronvik, K.-O.; Virtanen, A.: Multiple forms of poly(A) polymerases in human cells. Proc. Nat. Acad. Sci. 91: 979-983, 1994.
[3876] 1070. Yamauchi, T.; Sugimoto, J.; Hatakeyama, T.; Asakawa, S.; Shimizu, N.; Isobe, M.: Assignment of the human poly(A) polymerase (PAP) gene to chromosome 14q32.1-q32.2 and isolation of a polymorphic CA repeat sequence. J. Hum. Genet. 44: 253-255, 1999.
[3877] 1071. Amson, R.; Sigaux, F.; Przedborski, S.; Flandrin, G.; Givol, D.; Telerman, A.: The human protooncogene product p33pim is expressed during fetal hematopoiesis and in diverse leukemias. Proc. Nat. Acad. Sci. 86: 8857-8861, 1989.
[3878] 1072. Ark, B.; Gummere, G.; Bennett, D.; Artzt, K.: Mapping of the Pim-1 oncogene in mouse t-haplotypes and its use to define the relative map positions of the tcl loci t-0(t-6) and t-w12 and the marker tf (tufted). Genomics 10: 385-389, 1991.
[3879] 1073. Cuypers, H. T.; Selten, G.; Berns, A.; Geurts van Kessel, A. H. M.: Assignment of the human homologue of Pim-1, a mouse gene implicated in leukemogenesis, to the pter-q12 region of chromosome 6. Hum. Genet. 72: 262-265, 1986.
[3880] 1074. Dhanasekaran, S. M.; Barrette, T. R.; Ghosh, D.; Shah, R.; Varambally, S.; Kurachi, K.; Pienta, K. J.; Rubin, M. A.; Chinnaiyan, A. M.: Delineation of prognostic biomarkers in prostate cancer. Nature 412: 822-826, 2001.
[3881] 1075. Domen, J.; von Lindern, M.; Hermans, A.; Breuer, M.; Grosveld, G.; Berns, A.: Comparison of the human and mouse PIM-1 cDNAs: nucleotide sequence and immunological identification of the in vitro synthesized PIM-1 protein. Oncogene Res. 1: 103-112, 1987.
[3882] 1076. Laird, P. W.; van der Lugt, N. M. T.; Clarke, A.; Domen, J.; Linders, K.; McWhir, J.; Berns, A.; Hooper, M.: In vivo analysis of Pim-1 deficiency. Nucleic Acids Res. 21: 4750-4755, 1993.
[3883] 1077. Meeker, T. C.; Nagarajan, L.; ar-Rushdi, A.; Rovera, G.; Huebner, K.; Croce, C. M.: Characterization of the human PIM-1 gene: a putative proto-oncogene coding for a tissue specific member of the protein kinase family. Oncogene Res. 1: 87-101, 1987.
[3884] 1078. Pasqualucci, L.; Neumeister, P.; Goossens, T.; Nanjangud, G.; Chaganti, R. S. K.; Kuppers, R.; Dalla-Favera, R.: Hypermutation of multiple proto-oncogenes in B-cell diffuse large-cell lymphomas. Nature 412: 341-346, 2001.
[3885] 1079. Ragoussis, J.; Senger, G.; Mockridge, I.; Sanseau, P.; Ruddy, S.; Dudley, K.; Sheer, D.; Trowsdale, J.: A testis-expressed Zn finger gene (ZNF76) in human 6p21.3 centromeric to the MHC is closely linked to the human homolog of the t-complex gene tcp-11. Genomics 14: 673-679, 1992.
[3886] 1080. Saris, C. J. M.; Domen, J.; Berns, A.: The pim-1 oncogene encodes two related protein-serine/threonine kinases by alternative initiation at AUG and CUG. EMBO J. 10: 655-664, 1991.
[3887] 1081. Selten, G.; Cuypers, H. T.; Boelens, W.; Robanus-Maandag, E.; Verbeek, J.; Domen, J.; van Beveren, C.; Berns, A.: The primary structure of the putative oncogene pim-1 shows extensive homology with protein kinases. Cell 46: 603-611, 1986.
[3888] 1082. Zoghbi, H. Y.; Ballantyne, C. M.; O'Brien, W. E.; McCall, A. E.; Kwiatkowski, T. J., Jr.; Ledbetter, S. A.; Beaudet, A. L.: Deletion and linkage mapping of eight markers from the proximal short arm of chromosome 6. Genomics 6: 352-357, 1990.
[3889] 1083. Dickeson, S. K.; Helmkamp, G. M., Jr.; Yarbrough, L. R.: Sequence of a human cDNA encoding phosphatidylinositol transfer protein and occurrence of a related sequence in widely divergent eukaryotes. Gene 142: 301-305, 1994.
[3890] 1084. Dickeson, S. K.; Lim, C. N.; Schuyler, G. T.; Dalton, T. P.; Helmkamp, G. M., Jr.; Yarbrough, L. R.: Isolation and sequence of cDNA clones encoding rat phosphatidylinositol transfer protein. J. Biol. Chem. 264: 16557-16564, 1989.
[3891] 1085. Fitzgibbon, J.; Pilz, A.; Gayther, S.; Appukuttan, B.; Dulai, K. S.; Delhanty, J. D. A.; Helmkamp, G. M., Jr.; Yarbrough, L. R.; Hunt, D. M.: Localization of the gene encoding human phosphatidylinositol transfer protein (PITPN) to 17p13.3: a gene showing homology to the Drosophila retinal degeneration B gene (rdgB). Cytogenet. Cell Genet. 67: 205-207, 1994.
[3892] 1086. Hamilton, B. A.; Smith, D. J.; Mueller, K. L.; Kerrebrock, A. W.; Bronson, R. T.; van Berkel, V.; Daly, M. J.; Kruglyak, L.; Reeve, M. P.; Nemhauser, J. L.; Hawkins, T. L.; Rubin, E. M.; Lander, E. S.: The vibrator mutation causes neurodegeneration via reduced expression of PITP-alpha: positional complementation cloning and extragenic suppression. Neuron 18: 711-722, 1997.
[3893] 1087. Hay, J. C.; Martin, T. F. J.: Phosphatidylinositol transfer protein required for ATP-dependent priming of Ca(2+)-activated secretion. Nature 366: 572-575, 1993.
[3894] 1088. Vihtelic, T. S.; Goebl, M.; Milligan, S.; O'Tousa, J. E.; Hyde, D. R.: Localization of Drosophila retinal degeneration B, a membrane-associated phosphatidylinositol transfer protein. J. Cell Biol. 122: 1013-1022, 1993.
[3895] 1089. Wirtz, K. W. A.: Phospholipid transfer proteins. Annu. Rev. Biochem. 60: 73-99, 1991.
[3896] 1090. Bebenek, K.; Tissier, A.; Frank, E. G.; McDonald, J. P.; Prasad, R.; Wilson, S. H.; Woodgate, R.; Kunkel, T. A.: 5-prime-deoxyribose phosphate lyase activity of human DNA polymerase iota in vitro. Science 291: 2156-2159, 2001.
[3897] 1091. Johnson, R. E.; Washington, M. T.; Haracska, L.; Prakash, S.; Prakash, L.: Eukaryotic polymerases iota and zeta act sequentially to bypass DNA lesions. Nature 406: 1015-1019, 2000.
[3898] 1092. McDonald, J. P.; Rapic-Otrin, V.; Epstein, J. A.; Broughton, B. C.; Wang, X.; Lehmann, A. R.; Wolgemuth, D. J.; Woodgate, R.: Novel human and mouse homologs of Saccharomyces cerevisiae DNA polymerase eta. Genomics 60: 20-30, 1999.
[3899] 1093. Humphery-Smith, I.; Guyonnet, F.; Chastel, C.: Polypeptide cartography of Spiroplasma taiwanense. Electrophoresis 15: 1212-1217, 1994.
[3900] 1094. Tiranti, V.; Savoia, A.; Forti, F.; D'Apolito, M.-F.; Centra, M.; Rocchi, M.; Zeviani, M.: Identification of the gene encoding the human mitochondrial RNA polymerase (h-mtRPOL) by cyberscreening of the Expressed Sequence Tags database. Hum. Molec. Genet. 6: 615-625, 1997.
[3901] 1095. Wasinger, V. C.; Cordwell, S. J.; Cerpa-Poljak, A.; Yan, J. X.; Gooley, A. A.; Wilkins, M. R.; Duncan, M. W.; Harris, R.; Williams, K. L.; Humphery-Smith, I.: Progress with gene-product mapping of the Mollicutes: Mycoplasma genitalium. Electrophoresis 16: 1090-1094, 1995.
[3902] 1096. Chern, C. J.: Localization of the structural genes for hexokinase-1 and inorganic pyrophosphatase on region (pter-q24) of human chromosome 10. Cytogenet. Cell Genet. 17: 338-342, 1976.
[3903] 1097. Fisher, R.; Putt, W.; Harris, H.: Further studies on erythrocyte inorganic pyrophosphatase: an examination of different mammalian species and human-Chinese hamster hybrid cells. Ann. Hum. Genet. 38: 171-177, 1974.
[3904] 1098. Fisher, R. A.; Turner, B. M.; Dorkin, H. L.; Harris, H.: Studies on human erythrocyte inorganic pyrophosphatase. Ann. Hum. Genet. 37: 341-353, 1974.
[3905] 1099. McAlpine, P. J.; Mohandas, T.; Ray, M.; Wang, H.; Hamerton, J. L.: Assignment of the inorganic pyrophosphatase gene locus (PP) to chromosome 10 in man. Cytogenet. Cell Genet. 16: 201-203, 1976.
[3906] 1100. Snyder, F. F.; Hoo, J. J.; Shearer, J. E.; Heikkila, E. M.; Rudd, N. L.; Lin, C. C.: Gene dosage studies of inorganic pyrophosphatase (PP) and hexokinase (HK1) on human chromosome 10. (Abstract) Cytogenet. Cell Genet. 37: 588 only, 1984.
[3907] 1101. Snyder, F. F.; Lin, C. C.; Rudd, N. L.; Shearer, J. E.; Heikkila, E. M.; Hoo, J. J.: A de novo case of trisomy 10p: gene dosage studies of hexokinase, inorganic pyrophosphatase and adenosine kinase. Hum. Genet. 67: 187-189, 1984.
[3908] 1102. Van Cong, N.; Rebourcet, R.; Weil, D.; Pangalos, C.; Frezal, J. Localisation d'un locus de structure de la pyrophosphatase inorganique ‘erythrocytaire’ sur le chromosome 10 chez l'homme par la methode d'hypridation cellulaire homme-hamster. Comp. Rend. Acad. Sci. (Paris) 281: 435-438, 1975.
[3909] 1103. Beri, R. K.; Marley, A. E.; See, C. G.; Sopwith, W. F.; Aguan, K.; Carling, D.; Scott, J.; Carey, F.: Molecular cloning, expression and chromosomal localisation of human AMP-activated protein kinase. FEBS Lett. 356: 117-121, 1994.
[3910] 1104. Hardie, D. G.: Regulation of fatty acid and cholesterol metabolism by the AMP-activated protein kinase. Biochim. Biophys. Acta 1123: 231-238, 1992.
[3911] 1105. Hardie, D. G.; MacKintosh, R. W.: AMP-activated protein kinase: an archetypal protein kinase cascade? Bioessays 14: 699-704, 1992.
[3912] 1106. Minokoshi, Y.; Kim, Y.-B.; Peroni, O. D.; Fryer, L. G. D.; Muller, C.; Carling, D.; Kahn, B. B.: Leptin stimulates fatty-acid oxidation by activating AMP-activated protein kinase. Nature 415: 339-343, 2002.
[3913] 1107. Mu, J.; Brozinick, J. T., Jr.; Valladares, O.; Bucan, M.; Birnbaum, M. J.: A role for AMP-activated protein kinase in contraction- and hypoxia-regulated glucose transport in skeletal muscle. Molec. Cell 7: 1085-1094, 2001.
[3914] 1108. Stapleton, D.; Woollatt, E.; Mitchelhill, K. I.; Nicholl, J. K.; Fernandez, C. S.; Michell, B. J.; Witters, L. A.; Power, D. A.; Sutherland, G. R.; Kemp, B. E.: AMP-activated protein kinase isoenzyme family: subunit structure and chromosomal location. FEBS Lett. 409: 452-456, 1997.
[3915] 1109. Tsujikawa, M.; Kurahashi, H.; Tanaka, T.; Okada, M.; Yamamoto, S.; Maeda, N.; Watanabe, H.; Inoue, Y.; Kiridoshi, A.; Matsumoto, K.; Ohashi, Y.; Kinoshita, S.; Shimomura, Y.; Nakamura, Y.; Tan θ, Y.: Homozygosity mapping of a gene responsible for gelatinous drop-like corneal dystrophy to chromosome lp. Am. J. Hum. Genet. 63: 1073-1077, 1998.
[3916] 1110. Alzheimer's Disease Collaborative Group: The structure of the presenilin 1 (S182) gene and identification of six novel mutations in early onset AD families. Nature Genet. 11: 219-222, 1995.
[3917] 1111. Athan, E. S.; Williamson, J.; Ciappa, A.; Santana, V.; Romas, S. N.; Lee, J. H.; Rondon, H.; Lantigua, R. A.; Medrano, M.; Torres, M.; Arawaka, S.; Rogaeva, E.; and 10 others: A founder mutation in presenilin 1 causing early-onset Alzheimer disease in unrelated Caribbean Hispanic families. J.A.M.A. 286: 2257-2263, 2001.
[3918] 1112. Borchelt, D. R.; Thinakaran, G.; Eckman, C. B.; Lee, M. K.; Davenport, F.; Ratovitsky, T.; Prada, C.-M.; Kim, G.; Seekins, S.; Yager, D.; Slunt, H. H.; Wang, R.; Seeger, M.; Levey, A. I.; Gandy, S. E.; Copeland, N. G.; Jenkins, N. A.; Price, D. L.; Younkin, S. G; Sisodia, S. S.: Familial Alzheimer's disease-linked presenilin 1 variants elevate A-beta-1-42/1-40 ratio in vitro and in vivo. Neuron 17: 1005-1013, 1996.
[3919] 1113. Buckler, A. J.; Chang, D. D.; Graw, S. L.; Brook, J. D.; Haber, D. A.; Sharp, P. A.; Housman, D. E.: Exon amplification: a strategy to isolate mammalian genes based on RNA splicing. Proc. Nat. Acad. Sci. 88: 4005-4009, 1991.
[3920] 1114. Campion, D.; Brice, A.; Hannequin, D.; Tardieu, S.; Dubois, B.; Calenda, A.; Brun, E.; Penet, C.; Tayot, J.; Martinez, M.; Bellis, M.; Mallet, J.; Agid, Y.; Clerget-Darpoux, F.: A large pedigree with early-onset Alzheimer's disease: clinical, neuropathologic, and genetic characterization. Neurology 45: 80-85, 1995.
[3921] 1115. Clark, R. F.; Hutton, M.; Talbot, C.; Wragg, M.; Lendon, C.; Busfield, F.; Han, S. W.; Perez-Tur, J.; Adams, M.; Fuldner, R.; Roberts, G.; Karran, E.; Hardy, J.; Goate, A.: The role of presenilin 1 in the genetics of Alzheimer's disease. Cold Spring Harbor Symp. Quant. Biol. 61: 551-558, 1996.
[3922] 1116. Crook, R.; Verkkoniemi, A.; Perez-Tur, J.; Mehta N.; Baker, M.; Houlden, H.; Farrer, M.; Hutton, M.; Lincoln, S.; Hardy, J.; Gwinn, K.; Somer, M.; Paetau, A.; Kalimo, H.; Ylikoski, R.; Poyhonen, M.; Kucera, S.; Haltia, M.: A variant of Alzheimer's disease with spastic paraparesis and unusual plaques due to deletion of exon 9 of presenilin 1. Nature Med. 4: 452-455, 1998.
[3923] 1117. Cruts, M.; Van Broeckhoven, C.: Presenilin mutations in Alzheimer's disease. Hum. Mutat. 11: 183-190, 1998.
[3924] 1118. Cruts, M.; van Duijn, C. M.; Backhovens, H.; Van den Broeck, M.; Wehnert, A.; Serneels, S.; Sherrington, R.; Hutton, M.; Hardy, J.; St George-Hyslop, P. H.; Hofman, A.; Van Broeckhoven, C.: Estimation of the genetic contribution of presenilin-1 and -2 mutations in a population-based study of presenile Alzheimer disease. Hum. Molec. Genet. 7: 43-51, 1998.
[3925] 1119. Davis, J. A.; Naruse, S.; Chen, H.; Eckman, C.; Younkin, S.; Price, D. L.; Borchelt, D. R.; Sisodia, S. S.; Wong, P. C.: An Alzheimer's disease-linked PS1 variant rescues the developmental abnormalities of PS1-deficient embryos. Neuron 20: 603-609, 1998.
[3926] 1120. De Jonghe, C.; Cruts, M.; Rogaeva, E. A.; Tysoe, C.; Singleton, A.; Vanderstichele, H.; Meschino, W.; Dermaut, B.; Vanderhoeven, I.; Backhovens, H.; Vanmechelen, E.; Morris, C. M.; Hardy, J.; Rubinsztein, D.C.; St George-Hyslop, P. H.; Van Broeckhoven, C.: Aberrant splicing in the presenilin-1 intron 4 mutation causes presenile Alzheimer's disease by increased A-beta-42 secretion. Hum. Molec. Genet. 8: 1529-1540, 1999.
[3927] 1121. Dermaut, B.; Cruts, M.; Slooter, A. J. C.; Van Gestel, S.; De Jonghe, C.; Vanderstichele, H.; Vanmechelen, E.; Breteler, M. M.; Hofman, A.; van Duijn, C. M.; Van Broeckhoven, C.: The glu318-to-gly substitution in presenilin 1 is not causally related to Alzheimer disease. (Letter) Am. J. Hum. Genet. 64: 290-292, 1999.
[3928] 1122. De Strooper, B.; Annaert, W.; Cupers, P.; Saftig, P.; Craessaerts, K.; Mumm, J. S.; Schroeter, E. H.; Schrijvers, V.; Wolfe, M. S.; Ray, W. J.; Goate, A.; Kopan, R.: A presenilin-1-dependent gamma-secretase-like protease mediates release of Notch intracellular domain. Nature 398: 518-522, 1999.
[3929] 1123. De Strooper, B.; Saftig, P.; Craessaerts, K.; Vanderstichele, H.; Guhde, G.; Annaert, W.; Von Figura, K.; Van Leuven, F.: Deficiency of presenilin-1 inhibits the normal cleavage of amyloid precursor protein. Nature 391: 387-390, 1998.
[3930] 1124. Devi, G.; Fotiou, A.; Jyrinji, D.; Tycko, B.; DeArmand, S.; Rogaeva, E.; Song, Y.-Q.; Medieros, H.; Liang, Y.; Orlacchio, A.; Williamson, J.; St George-Hyslop, P.; Mayeux, R.: Novel presenilin 1 mutations associated with early onset of dementia in a family with both early-onset and late-onset Alzheimer disease. Arch. Neurol. 57: 1454-1457, 2000.
[3931] 1125. Donoviel, D. B.; Hadjantonakis, A.-K.; Ikeda, M.; Zheng, H.; St George Hyslop, P.; Bernstein, A.: Mice lacking both presenilin genes exhibit early embryonic patterning defects. Genes Dev. 13: 2801-2810, 1999.
[3932] 1126. Ettinger, S.; Weksler, M. E.; Zhou, X.; Blass, J.; Szabo, P.: Chromosomal fragility associated with familial Alzheimer's disease. Ann. Neurol. 36: 190-199, 1994.
[3933] 1127. Fox, N.C.; Kennedy, A. M.; Harvey, R. J.; Lantos, P. L.; Roques, P. K.; Collinge, J.; Hardy, J.; Hutton, M.; Stevens, J. M.; Warrington, E. K.; Rossor, M. N.: Clinicopathological features of familial Alzheimer's disease associated with the M139V mutation in the presenilin 1 gene: pedigree but not mutation specific age at onset provides evidence for a further genetic factor. Brain 120: 491-501, 1997.
[3934] 1128. Georgakopoulos, A.; Marambaud, P.; Efthimiopoulos, S.; Shioi, J.; Cui, W.; Li, H.-C.; Schutte, M.; Gordon, R.; Holstein, G. R.; Martinelli, G.; Mehta, P.; Friedrich, V. L., Jr.; Robakis, N. K.: Presenilin-1 forms complexes with the cadherin/catenin cell-cell adhesion system and is recruited to intercellular and synaptic contacts. Molec. Cell 4: 893-902, 1999.
[3935] 1129. Grilli, M.; Diodato, E.; Lozza, G.; Brusa, R.; Casarini, M.; Uberti, D.; Rozmahel, R.; Westaway, D.; St George-Hyslop, P.; Memo, M.; Ongini, E.: Presenilin-1 regulates the neuronal threshold to excitotoxicity both physiologically and pathologically. Proc. Nat. Acad. Sci. 97: 12822-12827, 2000.
[3936] 1130. Gustafson, L.; Brun, A.; Englund, E.; Hagnell, O.; Nilsson, K.; Stensmyr, M.; Ohlin, A.-K.; Abrahamson, M.: A 50-year perspective of a family with chromosome-14-linked Alzheimer's disease. Hum. Genet. 102: 253-257, 1998.
[3937] 1131. Handler, M.; Yang, X.; Shen, J.: Presenilin-1 regulates neuronal differentiation during neurogenesis. Development 127: 2593-2606, 2000.
[3938] 1132. Hartmann, D.: From Alzheimer's disease to skin tumors: the catenin connection. Proc. Nat. Acad. Sci. 98: 10522-10523, 2001.
[3939] 1133. Harvey, R. J.; Ellison, D.; Hardy, J.; Hutton, M.; Roques, P. K.; Collinge, J.; Fox, N.C.; Rossor, M. N.: Chromosome 14 familial Alzheimer's disease: the clinical and neuropathological characteristics of a family with a leucine-to-serine (L250S) substitution at codon 250 of the presenilin 1 gene. J. Neurol. Neurosurg. Psychiat. 64: 44-49, 1998.
[3940] 1134. Hull, M.; Fiebich, B. L.; Dykierek, P.; Schmidtke, K.; Nitzsche, E.; Orszagh, M.; Deuschl, G.; Moser, E.; Schumacher, M.; Lucking, C.; Berger, M.; Bauer, J.: Early-onset Alzheimer's disease due to mutations of the presenilin-1 gene on chromosome 14: a 7-year follow-up of a patient with a mutation at codon 139. Europ. Arch. Psychiat. Clin. Neurosci. 248: 123-129, 1998.
[3941] 1135. Johnson, K. A.; Lopera, F.; Jones, K.; Becker, A.; Sperling, R.; Hilson, J.; Londono, J.; Siegert, I.; Arcos, M.; Moreno, S.; Madrigal, L.; Ossa, J.; Pineda, N.; Ardila, A.; Roselli, M.; Albert, M. S.; Kosik, K. S.; Rios, A.: Presenilin-1-associated abnormalities in regional cerebral perfusion. Neurology 56: 1545-1551, 2001.
[3942] 1136. Kamal, A.; Stokin, G. B.; Yang, Z.; Xia, C.; Goldstein, L. S.: Axonal transport of amyloid precursor protein is mediated by direct binding to the kinesin light chain subunit of kinesin-I. Neuron 28: 449-459, 2000.
[3943] 1137. Kang, D. E.; Soriano, S.; Xia, X.; Eberhart, C. G.; De Strooper, B.; Zheng, H.; Koo, E. H.: Presenilin couples the paired phosphorylation of beta-catenin independent of Axin: implications for beta-catenin activation in tumorigenesis. Cell 110: 751-762, 2002.
[3944] 1138. Kopan, R.; Goate, A.: A common enzyme connects Notch signaling and Alzheimer's disease. Genes Dev. 14: 2799-2806, 2000.
[3945] 1139. Kovacs, D. M.; Fausett, H. J.; Page, K. J.; Kim, T.-W.; Moir, R. D.; Merriam, D. E.; Hollister, R. D.; Hallmark, O. G.; Mancini, R.; Felsenstein, K. M.; Hyman, B. T.; Tanzi, R. E.; Wasco, W.: Alzheimer-associated presenilins 1 and 2: neuronal expression in brain and localization to intracellular membranes in mammalian cells. Nature Med. 2: 224-229, 1996.
[3946] 1140. Kwok, J. B. J.; Taddei, K.; Hallupp, M.; Fisher, C.; Brooks, W. S.; Broe, G. A.; Hardy, J.; Fulham, M. J.; Nicholson, G. A.; Stell, R.; St. George Hyslop, P. H.; Fraser, P. E.; and 6 others: Two novel (M233T and R278T) presenilin-1 mutations in early-onset Alzheimer's disease pedigrees and preliminary evidence for association of presenilin-1 mutations with a novel phenotype. Neuroreport 8: 1537-1542, 1997.
[3947] 1141. Lambert, J.-C.; Mann, D. M. A.; Harris, J. M.; Chartier-Harlin, M.-C.; Cumming, A.; Coates, J.; Lemmon, H.; StClair, D.; Iwatsubo, T.; Lendon, C.: The −48 C/T polymorphism in the presenilin 1 promoter is associated with an increased risk of developing Alzheimer's disease and an increased A-beta load in brain. J. Med. Genet. 38: 353-355, 2001.
[3948] 1142. Leissring, M. A.; Akbari, Y.; Fanger, C. M.; Cahalin, M. D.; Mattson, M. P.; LaFerla, F. M.: Capacitative calcium entry deficits and elevated luminal calcium content in mutant presenilin-1 knockin mice. J. Cell Biol. 149: 793-797, 2000.
[3949] 1143. Lemere, C. A.; Lopera, F.; Kosik, K. S.; Lendon, C. L.; Ossa, J.; Saido, T. C.; Yamaguchi, H.; Ruiz, A.; Martinez, A.; Madrigal, L.; Hincapie, L.; Arango, J. C.; Anthony, D.C.; Koo, E. H.; Goate, A. M.; Selkoe, D. J.; Arango, J. C.: The E280A presenilin 1 Alzheimer mutation produces increased A-beta-42 deposition and severe cerebellar pathology. Nature Med. 2: 1146-1150, 1996.
[3950] 1144. Lewis, P. A.; Perez-Tur, J.; Golde, T. E.; Hardy, J.: The presenilin 1 C92S mutation increases A-beta-42 production. Biochem. Biophys. Res. Commun. 277: 261-263, 2000.
[3951] 1145. Li, J.; Xu, M.; Zhou, H.; Ma, J.; Potter, H.: Alzheimer presenilins in the nuclear membrane, interphase kinetochores, and centrosomes suggest a role in chromosome segregation. Cell 90: 917-927, 1997.
[3952] 1146. Li, Y.-M.; Lai, M.-T.; Xu, M.; Huang, Q.; DiMuzio-Mower, J.; Sardana, M. K.; Shi, X.-P.; Yin, K.-C.; Shafer, J. A.; Gardell, S. J.: Presenilin 1 is linked with gamma-secretase activity in the detergent solubilized state. Proc. Nat. Acad. Sci. 97: 6138-6143, 2000.
[3953] 1147. Li, Y.-M.; Xu, M.; Lai, M.-T.; Huang, Q.; Castro, J. L.; DiMuzio-Mower, J.; Harrison, T.; Lellis, C.; Nadin, A.; Neduvelil, J. G.; Register, R. B.; Sardana, M. K.; Shearman, M. S.; Smith, A. L:; Shi, X.-P.; Yin, K.-C.; Shafer, J. A.; Gardell, S. J.: Photoactivated gamma-secretase inhibitors directed to the active site covalently label presenilin 1. Nature 405: 689-694, 2000.
[3954] 1148. Lopera, F.; Ardilla, A.; Martinez, A.; Madrigal, L.; Arango-Viana, J. C.; Lernere, C. A.; Arango-Lasprilla, J. C.; Hincapie, L.; Arcos-Burgos, M.; Ossa, J. E.; Behrens, I. M.; Norton, J.; Lendon, C.; Goate, A. M.; Ruiz-Linares, A.; Rosselli, M.; Kosik, K. S.: Clinical features of early-onset Alzheimer disease in a large kindred with an E280A presenilin-1 mutation. J.A.M.A. 277: 793-799, 1997.
[3955] 1149. Matsubara-Tsutsui, M.; Yasuda, M.; Yamagata, H.; Nomura, T.; Taguchi, K.; Kohara, K.; Miyoshi, K.; Miki, T.: Molecular evidence of presenilin 1 mutation in familial early onset dementia. Am. J. Med. Genet. 114: 292-298, 2002.
[3956] 1150. Mercken, M.; Takahashi, H.; Honda, T.; Sato, K.; Murayama, M.; Nakazato, Y.; Noguchi, K.; Imahori, K.; Takashima, A.: Characterization of human presenilin 1 using N-terminal specific monoclonal antibodies: evidence that Alzheimer mutations affect proteolytic processing. FEBS Lett. 389: 297-303, 1996.
[3957] 1151. Moehlmann, T.; Winkler, E.; Xia, X.; Edbauer, D.; Murrell, J.; Capell, A.; Kaether, C.; Zheng, H.; Ghetti, B.; Haass, C.; Steiner, H.: Presenilin-1 mutations of leucine 166 equally affect the generation of the Notch and APP intracellular domains independent of their effect on A-beta(42) production. Proc. Nat. Acad. Sci. 99: 8025-8030, 2002.
[3958] 1152. Morelli, L.; Prat, M. I.; Levy, E.; Mangone, C. A.; Castano, E. M.: Presenilin 1 met146leu variant due to an A-T transversion in an early-onset familial Alzheimer's disease pedigree from Argentina. Clin. Genet. 53: 469-473, 1998.
[3959] 1153. Mullan, M.; Houlden, H.; Windelspecht, M.; Fidani, L.; Lombardi, C.; Diaz, P.; Rossor, M.; Crook, R.; Hardy, J.; Duff, K.; Crawford, F.: A locus for familial early-onset Alzheimer's disease on the long arm of chromosome 14, proximal to the alpha-1-antichymotrypsin gene. Nature Genet. 2: 340-342, 1992.
[3960] 1154. Nechiporuk, A.; Fain, P.; Kort, E.; Nee, L. E.; Frommelt, E.; Polinsky, R. J.; Korenberg, J. R.; Pulst, S.-M.: Linkage of familial Alzheimer disease to chromosome 14 in two large early-onset pedigrees: effects of marker allele frequencies on lod scores. Am. J. Med. Genet. 48: 63-66, 1993.
[3961] 1155. Ni, C.-Y.; Murphy, M. P.; Golde, T. E.; Carpenter, G.: Gamma-secretase cleavage and nuclear localization of ErbB-4 receptor tyrosine kinase. Science 294: 2179-2181, 2001.
[3962] 1156. Page, K.; Hollister, R.; Tanzi, R. E.; Hyman, B. T.: In situ hybridization analysis of presenilin 1 mRNA in Alzheimer disease and in lesioned rat brain. Proc. Nat. Acad. Sci. 93: 14020-14024, 1996.
[3963] 1157. Parimoo, S.; Patanjali, S. R.; Shukla, H.; Chaplin, D. D.; Weissman, S. M.: cDNA selection: efficient PCR approach for the selection of cDNAs encoded in large chromosomal DNA fragments. Proc. Nat. Acad. Sci. 88: 9623-9627, 1991.
[3964] 1158. Perez-Tur, J.; Froelich, S.; Prihar, G.; Crook, R.; Baker, M.; Duff, K.; Wragg, M.; Busfield, F.; Lendon, C.; Clark, R. F.; Roques, P.; Fuldner, R. A.; Johnston, J.; Cowburn, R.; Forsell, C.; Axelman, K.; Lilius, L.; Houlden, H.; Karran, E.; Roberts, G. W.; Rossor, M.; Adams, M. D.; Hardy, J.; Goate, A.; Lannfelt, L.; Hutton, M.: A mutation in Alzheimer's disease destroying a splice acceptor site in the presenilin-1 gene. Neuroreport 7: 297-301, 1995.
[3965] 1159. Pericak-Vance, M. A.; Bebout, J. L.; Gaskell, P. C., Jr.; Yamaoka, L. H.; Hung, W.-Y.; Alberts, M. J.; Walker, A. P.; Bartlett, R. J.; Haynes, C. A.; Welsh, K. A.; Earl, N. L.; Heyman, A.; Clark, C. M.; Roses, A. D.: Linkage studies in familial Alzheimer disease: evidence for chromosome 19 linkage. Am. J. Hum. Genet. 48: 1034-1050, 1991.
[3966] 1160. Poorkaj, P.; Sharma, V.; Anderson, L.; Nemens, E.; Alonso, M. E.; Orr, H.; White, J.; Heston, L.; Bird, T. D.; Schellenberg, G. D.: Missense mutations in the chromosome 14 familial Alzheimer's disease presenilin 1 gene. Hum. Mutat. 11: 216-221, 1998.
[3967] 1161. Qian, S.; Jiang, P.; Guan, X.-M.; Singh, G.; Trumbauer, M. E.; Yu, H.; Chen, H. Y.; Van der Ploeg, L. H. T.; Zheng, H.: Mutant human presenilin 1 protects presenilin 1 null mouse against embryonic lethality and elevates A-beta-1-42/43 expression. Neuron 20: 611-617, 1998.
[3968] 1162. Raux, G.; Gantier, R.; Thomas-Anterion, C.; Boulliat, J.; Verpillat, P.; Hannequin, D.; Brice, A.; Frebourg, T.; Campion, D.: Dementia with prominent frontotemporal features associated with L113P presenilin 1 mutation. Neurology 55: 1577-1578, 2000.
[3969] 1163. Reznik-Wolf, H; Treves, T. A.; Davidson, M.; Aharon-Peretz, J.; St. George Hyslop, P. H.; Chapman, J.; Korczyn, A. D.; Goldman, B.; Friedman, E.: A novel mutation of presenilin 1 in familial Alzheimer's disease in Israel detected by denaturing gradient gel electrophoresis. Hum. Genet. 98: 700-702, 1996.
[3970] 1164. Rogaev, E. I.; Sherrington, R.; Wu, C.; Levesque, G.; Liang, Y.; Rogaeva, E. A.; Ikeda, M.; Holman, K.; Lin, C.; Lukiw, W. J.; de Jong, P. J.; Fraser, P. E.; Rommens, J. M.; St. George-Hyslop, P.: Analysis of the 5-prime sequence, genomic structure, and alternative splicing of the presenilin-1 gene (PSEN1) associated with early onset Alzheimer disease. Genomics 40: 415-424, 1997.
[3971] 1165. Rozen, R.; Barton, D.; Du, J.; Hum, D. W.; MacKenzie, R. E.; Francke, U.: Chromosomal localization of the gene for the human trifunctional enzyme, methylenetetrahydrofolate dehydrogenase-methenyltetrahydrofolate cyclohydrolase-formyltetrahydrofolate synthetase. Am. J. Hum. Genet. 44: 781-786, 1989.
[3972] 1166. Russo, C.; Schettini, G.; Saido, T. C.; Hulette, C.; Lippa, C.; Lannfelt, L.; Ghetti, B.; Gambetti, P.; Tabaton, M.; Teller, J. K.: Presenilin-1 mutations in Alzheimer's disease. Nature 405: 531-532, 2000.
[3973] 1167. Schellenberg, G. D.; Bird, T. D.; Wijsman, E. M.; Orr, H. T.; Anderson, L.; Nemens, E.; White, J. A.; Bonnycastle, L.; Weber, J. L.; Alonso, M. E.; Potter, H.; Heston, L. L.; Martin, G. M.: Genetic linkage evidence for a familial Alzheimer's disease locus on chromosome 14. Science 258: 668-671, 1992.
[3974] 1168. Schellenberg, G. D.; Boehnke, M.; Wijsman, E. M.; Moore, D. K.; Martin, G. M.; Bird, T. D.: Genetic association and linkage analysis of the apolipoprotein CII locus and familial Alzheimer's disease. Ann. Neurol. 31: 223-227, 1992.
[3975] 1169. Schellenberg, G. D.; Payami, H.; Wijsman, E. M.; Orr, H. T.; Goddard, K. A. B.; Anderson, L.; Nemens, E.; White, J. A.; Alonso, M. E.; Ball, M. J.; Kaye, J.; Morris, J. C.; Chui, H.; Sadovnick, A. D.; Heston, L. L.; Martin, G. M.; Bird, T. D.: Chromosome 14 and late-onset familial Alzheimer disease (FAD). Am. J. Hum. Genet. 53: 619-628, 1993.
[3976] 1170. Scheuner, D.; Eckman, C.; Jensen, M.; Song, X.; Citron, M.; Suzuki, N.; Bird, T. D.; Hardy, J.; Hutton, M.; Kukull, W.; Larson, E.; Levy-Lahad, E.: Secreted amyloid beta-protein similar to that in the senile plaques of Alzheimer's disease is increased in vivo by the presenilin 1 and 2 and APP mutations linked to familial Alzheimer's disease. Nature Med. 2: 864-870, 1996.
[3977] 1171. Shen, J.; Bronson, R. T.; Chen, D. F.; Xia, W.; Selkoe, D. J.; Tonegawa, S.: Skeletal and CNS defects in presenilin-1-deficient mice. Cell 89: 629-639, 1997.
[3978] 1172. Sherrington, R.; Rogaev, E. I.; Liang, Y.; Rogaeva, E. A.; Levesque, G.; Ikeda, M.; Chi, H.; Lin, C.; Li, G.; Holman, K.; Tsuda, T.; Mar, L.; Foncin, J.-F.; Bruni, A. C.; Montesi, M. P.; Sorbi, S.; Rainero, I.; Pinessi, L.; Nee, L.; Chumakov, I.; Pollen, D.; Brookes, A.; Sanseau, P.; Polinsky, R. J.; Wasco, W.; Da Silva, H. A. R.; Haines, J. L.; Pericak-Vance, M. A.; Tanzi, R. E.; Roses, A. D.; Fraser, P. E.; Rommens, J. M.; St George-Hyslop, P. H.: Cloning of a gene bearing mis-sense mutations in early-onset familial Alzheimer's disease. Nature 375: 754-760, 1995.
[3979] 1173. Smith, M. J.; Kwok, J. B. J.; McLean, C. A.; Kril, J. J.; Broe, G. A.; Nicholson, G. A.; Cappai, R.; Hallupp, M.; Cotton, R. G. H.; Masters, C. L.; Schofield, P. R.; Brooks, W. S.: Variable phenotype of Alzheimer's disease with spastic paraparesis. Ann. Neurol. 49: 125-129, 2001.
[3980] 1174. Sorbi, S.; Nacmias, B.; Forleo, P.; Piacentini, S.; Sherrington, R.; Rogaev, E.; St George Hyslop, P.; Amaducci, L.: Missense mutation of S182 gene in Italian families with early-onset Alzheimer's disease. (Letter) Lancet 346: 439-440, 1995.
[3981] 1175. St. George-Hyslop, P.; Haines, J.; Rogaev, E.; Mortilla, M.; Vaula, G.; Pericak-Vance, M.; Foncin, J.-F.; Montesi, M.; Bruni, A.; Sorbi, S.; Rainero, I.; Pinessi, L.; Pollen, D.; Polinsky, R.; Nee, L.; Kennedy, J.; Macciardi, F.; Rogaeva, E.; Liang, Y.; Alexandrova, N.; Lukiw, W.; Schlumpf, K.; Tanzi, R.; Tsuda, T.; Farrer, L.; Cantu, J.-M.; Duara, R.; Amaducci, L.; Bergamini, L.; Gusella, J.; Roses, A.; Crapper McLachlan, D.: Genetic evidence for a novel familial Alzheimer's disease locus on chromosome 14. Nature Genet. 2: 330-334, 1992.
[3982] 1176. St. George-Hyslop, P. H.; Haines, J. L.; Farrer, L. A.; Polinsky, R.; Van Broeckhoven, C.; Goate, A.; Crapper McLachlan, D. R.; Orr, H.; Bruni, A. C.; Sorbi, S.; Rainero, I.; Foncin, J.-F.; Pollen, D.; Cantu, J. M.; Tupler, R.; Voskresenskaya, N.; Mayeux, R.; Growdon, J.; Fried, V. A.; Myers, R. H.; Nee, L.; Backhovens, H.; Martin, J. J.; Rossor, M.; Owen, M. J.; Mullan, M.; Percy, M. E.; Karlinsky, H.; Rich, S.; Heston, L.; Montesi, M.; Mortilla, M.; Nacmias, N.; Gusella, J. F.; Hardy, J. A.; other members of the FAD Collaborative Study Group: Genetic linkage studies suggest that Alzheimer's disease is not a single homogeneous disorder. Nature 347: 194-197, 1990.
[3983] 1177. St. George-Hyslop, P. H.; Levesque, G.; Levesque, L.; Rommens, J.; Westaway, D.; Fraser, P. E.: Two homologous genes causing early-onset familial Alzheimer's disease. Cold Spring Harbor Symp. Quant. Biol. 61: 559-564, 1996.
[3984] 1178. St. George-Hyslop, P. H.; Tanzi, R. E.; Polinsky, R. J.; Haines, J. L.; Nee, L.; Watkins, P. C.; Myers, R. H.; Feldman, R. G.; Pollen, D.; Drachman, D.; Growdon, J.; Bruni, A.; Foncin, J.-F.; Salmon, D.; Frommelt, P.; Amaducci, L.; Sorbi, S.; Piacentini, S.; Stewart, G. D.; Hobbs, W. J.; Conneally, P. M.; Gusella, J. F.: The genetic defect causing familial Alzheimer's disease maps on chromosome 21. Science 235: 885-890, 1987.
[3985] 1179. Struhl, G.; Adachi, A.: Requirements for Presenilin-dependent cleavage of Notch and other transmembrane proteins. Molec. Cell 6: 625-636, 2000.
[3986] 1180. Struhl, G.; Greenwald, I.: Presenilin is required for activity and nuclear access of Notch in Drosophila. Nature 398: 522-525, 1999.
[3987] 1181. Takahashi, Y.; Koizumi, K.; Takagi, A.; Kitajima, S.; Inoue, T.; Koseki, H.; Saga, Y.: Mesp2 initiates somite segmentation through the Notch signalling pathway. Nature Genet. 25: 390-396, 2000.
[3988] 1182. Takashima, A.; Sato, M.; Mercken, M.; Tanaka, S.; Kondo, S.; Honda, T.; Sato, K.; Murayama, M.; Noguchi, K.; Nakazato, Y.; Takahashi, H.: Localization of Alzheimer-associated presenilin 1 in transfected COS-7 cells. Biochem. Biophys. Res. Commun. 227: 423-426, 1996.
[3989] 1183. Tanzi, R. E.; St. George-Hyslop, P. H.; Gusella, J. F.: Molecular genetics of Alzheimer disease amyloid. J. Biol. Chem. 266: 20579-20582, 1991.
[3990] 1184. Thinakaran, G.; Borchelt, D. R.; Lee, M. K.; Slunt, H. H.; Spitzer, L.; Kim, G.; Ratovitsky, T.; Davenport, F.; Nordstedt, C.; Seeger, M.; Hardy, J.; Levey, A. I.; Gandy, S. E.; Jenkins, N. A.; Copeland, N. G.; Price, D. L.; Sisodia, S. S.: Endoproteolysis of presenilin 1 and accumulation of processed derivatives in vivo. Neuron 17: 181-190, 1996.
[3991] 1185. Trower, M. K.; Orton, S. M.; Purvis, I. J.; Sanseau, P.; Riley, J.; Christodoulou, C.; Burt, D.; See, C. G.; Elgar, G.; Sherrington, R.; Rogaev, E. I.; St. George-Hyslop, P.; Brenner, S.; Dykes, C. W.: Conservation of synteny between the genome of the pufferfish (Fugu rubripes) and the region on human chromosome 14 (14q24.3) associated with familial Alzheimer disease (AD3 locus). Proc. Nat. Acad. Sci. 93: 1366-1369, 1996.
[3992] 1186. Tysoe, C.; Whittaker, J.; Xuereb, J.; Cairns, N.J.; Cruts, M.; Van Broeckhoven, C.; Wilcock, G.; Rubinsztein, D.C.: A presenilin-1 truncating mutation is present in two cases with autopsy-confirmed early-onset Alzheimer disease. Am. J. Hum. Genet. 62: 70-76, 1998.
[3993] 1187. Van Broeckhoven, C.; Backhovens, H.; Cruts, M.; De Winter, G.; Bruyland, M.; Cras, P.; Martin, J.-J.: Mapping of a gene predisposing to early-onset Alzheimer's disease to chromosome 14q24.3. Nature Genet. 2: 335-339, 1992.
[3994] 1188. Verkkoniemi, A.; Somer, M.; Rinne, J. O.; Myllykangas, L.; Crook, R.; Hardy, J.; Viitanen, M.; Kalimo, H.; Haltia, M.: Variant Alzheimer's disease with spastic paraparesis: clinical characterization. Neurology 54: 1103-1109, 2000.
[3995] 1189. Wasco, W.; Pettingell, W. P.; Jondro, P. D.; Schmidt, S. D.; Gurubhagaratula, S.; Rodes, L.; DiBlasi, T.; Romano, D. M.; Guenette, S. Y.; Kovacs, D. M.; Growdon, J. H.; Tanzi, R. E.: Familial Alzheimer's chromosome 14 mutations. (Letter) Nature Med. 1: 848, 1995.
[3996] 1190. Wilson, C. A.; Doms, R. W.; Zheng, H.; Lee, V. M.-Y.: Presenilins are not required for A-beta-42 production in the early secretory pathway. Nature Neurosci. 5: 849-855, 2002.
[3997] 1191. Wittenburg, N.; Eimer, S.; Lakowski, B.; Rohrig, S.; Rudolph, C.; Baumeister, R.: Presenilin is required for proper morphology and function of neurons in C. elegans. Nature 406: 306-309, 2000.
[3998] 1192. Wolfe, M. S.; Xia, W.; Ostaszewski, B. L.; Diehl, T. S.; Kimberly, W. T.; Selkoe, D. J.: Two transmembrane aspartates in presenilin-1 required for presenilin endoproteolysis and gamma-secretase activity. Nature 398: 513-517, 1999.
[3999] 1193. Xia, X.; Qian, S.; Soriano, S.; Wu, Y.; Fletcher, A. M.; Wang, X.-J.; Koo, E. H.; Wu, X.; Zheng, H.: Loss of presenilin 1 is associated with enhanced beta-catenin signaling and skin tumorigenesis. Proc. Nat. Acad. Sci. 98: 10863-10868, 2001.
[4000] 1194. Ye, Y.; Lukinova, N.; Fortini, M. E.: Neurogenic phenotypes and altered Notch processing in Drosophila presenilin mutants. Nature 398: 525-529, 1999.
[4001] 1195. Yu, H.; Saura, C. A.; Choi, S.-Y.; Sun, L. D.; Yang, X.; Handler, M.; Kawarabayashi, T.; Younkin, L.; Fedeles, B.; Wilson, M. A.; Younkin, S.; Kandel, E. R.; Kirkwood, A.; Shen, J.: APP processing and synaptic plasticity in presenilin-1 conditional knockout mice. Neuron 31: 713-726, 2001.
[4002] 1196. Zhang, Z.; Hartmann, H.; Minh Do, V.; Abramowski, D.; Sturchler-Pierrat, C.; Staufenbiel, M.; Sommer, B.; van de Weterling, M.; Clevers, H.; Saftig, P.; De Strooper, B.; He, X.; Yanker, B. A.: Destabilization of beta-catenin by mutations in presenilin-1 potentiates neuronal apoptosis. Nature 395: 698-702, 1998.
[4003] 1197. Arch, E. M.; Goodman, B. K.; Van Wesep, R. A.; Liaw, D.; Clarke, K.; Parsons, R.; McKusick, V. A.; Geraghty, M. T.: Deletion of PTEN in a patient with Bannayan-Riley-Ruvalcaba syndrome suggests allelism with Cowden disease. Am. J. Med. Genet. 71: 489-493, 1997.
[4004] 1198. Backman, S. A.; Stambolic, V.; Suzuki, A.; Haight, J.; Elia, A.; Pretorius, J.; Tsao, M.-S.; Shannon, P.; Bolon, B.; Ivy, G. O.; Mak, T. W.: Deletion of Pten in mouse brain causes seizures, ataxia and defects in soma size resembling Lhermitte-Duclos disease. Nature Genet. 29: 396-403, 2001.
[4005] 1199. Birck, A.; Ahrenkiel, V.; Zeuthen, J.; Hou-Jensen, K.; Guldberg, P.: Mutation and allelic loss of the PTEN/MMAC1 gene in primary and metastatic melanoma biopsies. J. Invest. Derm. 114: 277-280, 2000. Di Cristofano and Pandolfi (2000) reviewed the multiple roles of PTEN in tumor suppression.
[4006] 1200. Bonneau, D.; Longy, M.: Mutations of the human PTEN gene. Hum. Mutat. 16: 109-122, 2000.
[4007] 1201. Cairns, P.; Okami, K.; Halachmi, S.; Halachmi, N.; Esteller, M.; Herman, J. G.; Jen, J.; Isaacs, W. B.; Bova, G. S.; Sidransky, D. Frequent inactivation of PTEN/MMAC1 in primary prostate cancer. Cancer Res. 57: 4997-5000, 1997.
[4008] 1202. Cantley, L. C.; Neel, B. G.: New insights into tumor suppression: PTEN suppresses tumor formation by restraining the phosphoinositide 3-kinase/AKT pathway. Proc. Nat. Acad. Sci. 96: 4240-4245, 1999.
[4009] 1203. Carethers, J. M.; Fumari, F. B.; Zigman, A. F.; Lavine, J. E.; Jones, M. C.; Graham, G. E.; Teebi, A. S.; Huang, H.-J. S.; Ha, H. T.; Chauhan, D. P.; Chang, C. L.; Cavenee, W. K.; Boland, C. R.: Absence of PTEN/MMAC1 germ-line mutations in sporadic Bannayan-Riley-Ruvalcaba syndrome. Cancer. Res. 58: 2724-2726, 1998.
[4010] 1204. Celebi, J. T.; Shendrik, I.; Silvers, D. N.; Peacocke, M.: Identification of PTEN mutations in metastatic melanoma specimens. J. Med. Genet. 37: 653-657, 2000.
[4011] 1205. Celebi, J. T.; Tsou, H. C.; Chen, F. F.; Zhang, H.; Ping, X. L.; Lebwohl, M. G.; Kezis, J.; Peacocke, M.: Phenotypic findings of Cowden syndrome and Bannayan-Zonana syndrome in a family associated with a single germline mutation in PTEN.J. Med. Genet. 36: 360-364, 1999.
[4012] 1206. Crackower, M. A.; Oudit, G. Y.; Kozieradzki, I.; Sarao, R.; Sun, H.; Sasaki, T.; Hirsch, E.; Suzuki, A.; Shioi, T.; Irie-Sasaki, J.; Sah, R.; Cheng, H.-Y. M.; and 13 others: Regulation of myocardial contractility and cell size by distinct PI3K-PTEN signaling pathways. Cell 110: 737-749, 2002.
[4013] 1207. Dahia, P. L. M.; Aguiar, R. C. T.; Alberta, J.; Kum, J. B.; Caron, S.; Sill, H.; Marsh, D. J.; Ritz, J.; Freedman, A.; Stiles, C.; Eng, C.: PTEN is inversely correlated with the cell survival factor Akt/PKB and is inactivated via multiple mechanisms in haematological malignancies. Hum. Molec. Genet. 8: 185-193, 1999.
[4014] 1208. Dahia, P. L. M.; FitzGerald, M. G.; Zhang, X.; Marsh, D. J.; Zheng, Z.; Pietsch, T.; von Deimling, A.; Haluska, F. G.; Haber, D. A.; Eng, C.: A highly conserved processed PTEN pseudogene is located on chromosome band 9p21. Oncogene 16: 2403-2406, 1998.
[4015] 1209. De Vivo, I.; Gertig, D. M.; Nagase, S.; Hankinson, S. E.; O'Brien, R.; Speizer, F. E.; Parsons, R.; Hunter, D. J.: Novel germline mutations in the PTEN tumour suppressor gene found in women with multiple cancers. J. Med. Genet. 37: 336-341, 2000.
[4016] 1210. Di Cristofano, A.; De Acetis, M.; Koff, A.; Cordon-Cardo, C.; Pandolfi, P. P.: Pten and p27(KIP1) cooperate in prostate cancer tumor suppression in the mouse. Nature Genet. 27: 222-224, 2001.
[4017] 1211. Di Cristofano, A.; Kotsi, P.; Peng, Y. F.; Cordon-Cardo, C.; Elkon, K. B.; Pandolfi, P. P.: Impaired Fas response and autoimmunity in Pten +/−mice. Science 285: 2122-2125, 1999.
[4018] 1212. Di Cristofano, A.; Pandolfi, P. P.: The multiple roles of PTEN in tumor suppression. Cell 100: 387-390, 2000.
[4019] 1213. Di Cristofano, A.; Pesce, B.; Cordon-Cardo, C.; Pandolfi, P. P. Pten is essential for embryonic development and tumour suppression. Nature Genet. 19: 348-355, 1998.
[4020] 1214. Eng, C.; Peacocke, M.: PTEN and inherited hamartoma-cancer syndromes. (Letter) Nature Genet. 19: 223 only, 1998.
[4021] 1215. Fackenthal, J. D.; Marsh, D. J.; Richardson, A.-L.; Cummings, S. A.; Eng, C.; Robinson, B. G.; Olopade, O. I.: Male breast cancer in Cowden syndrome patients with germline PTEN mutations. J. Med. Genet. 38: 159-164, 2001.
[4022] 1216. Forrest, M. S.; Edwards, S. M.; Hamoudi, R. A.; Dearnaley, D. P.; Arden-Jones, A.; Dowe, A.; Murkin, A.; Kelly, J.; Teare, M. D.; Easton, D. F.; Knowles, M. A.; Bishop, D. T.; Eeles, R. A.; CRC/BPG UK Familial Prostate Cancer Study Collaborators; EC Biomed Familial Prostate Cancer Study Collaborators: No evidence of germline PTEN mutations in familial prostate cancer. J. Med. Genet. 37: 210-212, 2000.
[4023] 1217. Funamoto, S.; Meili, R.; Lee, S.; Parry, L.; Firtel, R. A.: Spatial and temporal regulation of 3-phosphoinositides by PI 3-kinase and PTEN mediates chemotaxis. Cell 109: 611-623, 2002.
[4024] 1218. Gimm, O.; Attie-Bitach, T.; Lees, J. A.; Vekemans, M.; Eng, C.: Expression of the PTEN tumour suppressor protein during human development. Hum. Molec. Genet. 9: 1633-1639, 2000.
[4025] 1219. Groszer, M.; Erickson, R.; Scripture-Adams, D. D.; Lesche, R.; Trumpp, A.; Zack, J. A.; Kornblum, H. I.; Liu, X.; Wu, H.: Negative regulation of neural stem/progenitor cell proliferation by the Pten tumor suppressor gene in vivo. Science 294: 2186-2189, 2001.
[4026] 1220. Hansen, G. M.; Justice, M. J.: Pten, a candidate tumor suppressor gene, maps to mouse chromosome 19. Mammalian Genome 9: 88-90, 1998.
[4027] 1221. Iijima, M.; Devreotes, P.: Tumor suppressor PTEN mediates sensing of chemoattractant gradients. Cell 109: 599-610, 2002.
[4028] 1222. Kim, S. K.; Su, L.-K.; Oh, Y.; Kemp, B. L.; Hong, W. K.; Mao, L.: Alterations of PTEN/MMAC1, a candidate tumor suppressor gene, and its homologue, PTH2, in small cell lung cancer cell lines. Oncogene 16: 89-93, 1998.
[4029] 1223. Kong, D.; Suzuki, A.; Zou, T.-T.; Sakurada, A.; Kemp, L. W.; Wakatsuki, S.; Yokoyama, T.; Yamakawa, H.; Furukawa, T.; Sato, M.; Ohuchi, N.; Sato, S.; Yin, J.; Wang, S.; Abraham, J. M.; Souza, R. F.; Smolinski, K. N.; Meltzer, S. J.; Horii, A.: PTEN1 is frequently mutated in primary endometrial carcinomas. (Letter) Nature Genet. 17: 143-144, 1997.
[4030] 1224. Kurose, K.; Araki, T.; Matsunaka, T.; Takada, Y.; Emi, M.: Variant manifestation of Cowden disease in Japan: hamartomatous polyposis of the digestive tract with mutation of the PTEN gene. (Letter) Am. J. Hum. Genet. 64: 308-310, 1999.
[4031] 1225. Kurose, K.; Gilley, K.; Matsumoto, S.; Watson, P. H.; Zhou, X.-P.; Eng, C.: Frequent somatic mutations in PTEN and TP53 are mutually exclusive in the stroma of breast carcinomas. Nature Genet. 15 Oct. 2002. Note: Advance Electronic Publication.
[4032] 1226. Kurose, K.; Zhou, X.-P.; Araki, T.; Eng, C.: Biallelic inactivating mutations and an occult germline mutation of PTEN in primary cervical carcinomas. Genes Chromosomes Cancer 29: 166-172, 2000.
[4033] 1227. Kwabi-Addo, B.; Giri, D.; Schmidt, K.; Podsypanina, K.; Parsons, R.; Greenberg, N.; Ittmann, M.: Haploinsufficiency of the Pten tumor suppressor gene promotes prostate cancer progression. Proc. Nat. Acad. Sci. 98: 11563-11568, 2001.
[4034] 1228. Kwon, C.-H.; Zhu, X.; Zhang, J.; Knoop, L. L.; Tharp, R.; Smeyne, R. J.; Eberhart, C. G.; Burger, P. C.; Baker, S. J.: Pten regulates neuronal soma size: a mouse model of Lhermitte-Duclos disease. Nature Genet. 29: 404-411, 2001.
[4035] 1229. Lee, J.-O.; Yang, H.; Georgescu, M.-M.; Di Cristofano, A.; Maehama, T.; Shi, Y.; Dixon, J. E.; Pandolfi, P.; Pavletich, N. P.: Crystal structure of the PTEN tumor suppressor: implications for its phosphoinositide phosphatase activity and membrane association. Cell 99: 323-334, 1999.
[4036] 1230. Li, D.-M.; Sun, H.: PTEN/MMAC1/TEP1 suppresses the tumorigenicity and induces G1 cell cycle arrest in human glioblastoma cells. Proc. Nat. Acad. Sci. 95: 15406-15411, 1998.
[4037] 1231. Li, J.; Yen, C.; Liaw, D.; Podsypanina, K.; Bose, S.; Wang, S. I.; Puc, J.; Miliaresis, C.; Rodgers, L.; McCombie, R.; Bigner, S. H.; Giovanella, B. C.; Ittmann, M.; Tycko, B.; Hibshoosh, H.; Wigler, M. H.; Parsons, R.: PTEN, a putative protein tyrosine phosphatase gene mutated in human brain, breast, and prostate cancer. Science 275: 1943-1946, 1997.
[4038] 1232. Li, L.; Ernsting, B. R.; Wishart, M. J.; Lohse, D. L.; Dixon, J. E.: A family of putative tumor suppressors is structurally and functionally conserved in humans and yeast. J. Biol. Chem. 272: 29403-29406, 1997.
[4039] 1233. Liaw, D.; Marsh, D. J.; Li, J.; Dahia, P. L. M.; Wang, S. I.; Zheng, Z.; Bose, S.; Call, K. M.; Tsou, H. C.; Peacocke, M.; Eng, C.; Parsons, R.: Germline mutations of the PTEN gene in Cowden disease, an inherited breast and thyroid cancer syndrome. Nature Genet. 16: 64-67, 1997.
[4040] 1234. Longy, M.; Coulon, V.; Duboue, B.; David, A.; Larregue, M.; Eng, C.; Amati, P.; Kraimps, J.-L.; Bottani, A.; Lacombe, D.; Bonneau, D.: Mutations of PTEN in patients with Bannayan-Riley-Ruvalcaba phenotype. J. Med. Genet. 35: 886-889, 1998.
[4041] 1235. Marsh, D. J.; Coulon, V.; Lunetta, K. L.; Rocca-Serra, P.; Dahia, P. L. M.; Zheng, Z.; Liaw, D.; Caron, S.; Duboue, B.; Lin, A. Y.; Richardson, A.-L.; Bonnetblanc, J.-M.; and 25 others: Mutation spectrum and genotype-phenotype analyses in Cowden disease and Bannayan-Zonana syndrome, two hamartoma syndromes with germline PTEN mutation. Hum. Molec. Genet. 7: 507-515, 1998.
[4042] 1236. Marsh, D. J.; Dahia, P. L. M.; Caron, S.; Kum, J. B.; Frayling, I. M.; Tomlinson, I. P. M.; Hughes, K. S.; Eeles, R. A.; Hodgson, S. V.; Murday, V. A.; Houlston, R.; Eng, C.: Germline PTEN mutations in Cowden syndrome-like families. J. Med. Genet. 35: 881-885, 1998.
[4043] 1237. Marsh, D. J.; Dahia, P. L. M.; Zheng, Z.; Liaw, D.; Parsons, R.; Gorlin, R. J.; Eng, C.: Germline mutations in PTEN are present in Bannayan-Zonana syndrome. (Letter) Nature Genet. 16: 333-334, 1997.
[4044] 1238. Marsh, D. J.; Kum, J. B.; Lunetta, K. L.; Bennett, M. J.; Gorlin, R. J.; Ahmed, S. F.; Bodurtha, J.; Crowe, C.; Curtis, M. A.; Dasouki, M.; Dunn, T.; Feit, H.; and 20 others: PTEN mutation spectrum and genotype-phenotype correlations in Bannayan-Riley-Ruvalcaba syndrome suggest a single entity with Cowden syndrome. Hum. Molec. Genet. 8: 1461-1472, 1999.
[4045] 1239. Mutter, G. L.; Lin, M.-C.; Fitzgerald, J. T.; Kum, J. B.; Eng, C.: Changes in endometrial PTEN expression throughout the human menstrual cycle. J. Clin. Endocr. Metab. 85: 2334-2338, 2000.
[4046] 1240. Nelen, M. R.; Padberg, G. W.; Peeters, E. A.; Lin, A. Y.; van den Helm, B.; Frants, R. R.; Coulon, V.; Goldstein, A. M.; van Reen, M. M.; Easton, D. F.; Eeles, R. A.; Hodgsen, S.; and 10 others: Localization of the gene for Cowden disease to chromosome 10q22-23. Nature Genet. 13: 114-116, 1996.
[4047] 1241. Nelen, M. R.; van Staveren, W. C. G.; Peeters, E. A. J.; Ben Hassel, M.; Gorlin, R. J.; Hamm, H.; Lindboe, C. F.; Fryns, J.-P.; Sijmons, R. H.; Woods, D. G.; Mariman, E. C. M.; Padberg, G. W.; Kremer, H.: Germline mutations in the PTEN/MMAC1 gene in patients with Cowden disease. Hum. Molec. Genet. 6: 1383-1387, 1997.
[4048] 1242. Olschwang, S.; Serova-Sinilnikova, O. M.; Lenoir, G. M.; Thomas, G.: PTEN germ-line mutations in juvenile polyposis coli. (Letter) Nature Genet. 18: 12-14, 1998.
[4049] 1243. Penninger, J. M.; Woodgett, J.: PTEN—coupling tumor suppression to stem cells? Science 294: 2116-2118, 2001.
[4050] 1244. Raizis, A. M.; Ferguson, M. M.; Nicholls, D. T.; Goodisson, D. W.; George, P. M.: A novel 5-prime (40ˆ41insA) mutation in a patient with numerous manifestations of Cowden disease. J. Invest. Derm. 114: 597-598, 2000.
[4051] 1245. Ramaswamy, S.; Nakamura, N.; Vazquez, F.; Batt, D. B.; Perera, S.; Roberts, T. M.; Sellers, W. R.: Regulation of G1 progression by the PTEN tumor suppressor protein is linked to inhibition of the phosphatidylinositol 3-kinase/Akt pathway. Proc. Nat. Acad. Sci. 96: 2110-2115, 1999.
[4052] 1246. Reardon, W.; Zhou, X.-P.; Eng, C.: A novel germline mutation of the PTEN gene in a patient with macrocephaly, ventricular dilatation, and features of VATER association. J. Med. Genet. 38: 820-823, 2001.
[4053] 1247. Shugart, Y. Y.; Cour, C.; Renard, H.; Lenoir, G.; Goldgar, D.; Teare, D.; Easton, D.; Rahman, N.; Gusterton, R.; Seal, S.; Barfoot, R.; Stratton, M.; and 10 others: Linkage analysis of 56 multiplex families excludes the Cowden disease gene PTEN as a major contributor to familial breast cancer. J. Med. Genet. 36: 720-721, 1999.
[4054] 1248. Staal, F. J. T.; van der Luijt, R. B.; Baert, M. R. M.; van Drunen, J.; van Bakel, H.; Peters, E.; de Valk, I.; van Amstel, H. K. P.; Taphoorn, M. J. B.; Jansen, G. H.; van Veelen, C. W. M.; Burgering, B.; Staal, G. E. J.: A novel germline mutation of PTEN associated with brain tumours of multiple lineages. Brit. J. Cancer 86: 1586-1591, 2002.
[4055] 1249. Stambolic, V.; MacPherson, D.; Sas, D.; Lin, Y.; Snow, B.; Jang, Y.; Benchimol, S.; Mak, T. W.: Regulation of PTEN transcription by p53. Molec. Cell 8: 317-325, 2001.
[4056] 1250. Stambolic, V.; Suzuki, A.; de la Pompa, J. L.; Brothers, G. M.; Mirtsos, C.; Sasaki, T.; Ruland, J.; Penninger, J. M.; Siderovski, D. P.; Mak, T. W.: Negative regulation of PKB/Akt-dependent cell survival by the tumor suppressor PTEN. Cell 95: 29-39, 1998.
[4057] 1251. Steck, P. A.; Pershouse, M. A.; Jasser, S. A.; Yung, W. K. A.; Lin, H.; Ligon, A. H.; Langford, L. A.; Baumgard, M. L.; Hattier, T.; Davis, T.; Frye, C.; Hu, R.; Swedlund, B.; Teng, D. H. F.; Tavtigian, S. V.: Identification of a candidate tumour suppressor gene, MMAC1, at chromosome 10q23.3 that is mutated in multiple advanced cancers. Nature Genet. 15: 356-362, 1997.
[4058] 1252. Sutphen, R.; Diamond, T. M.; Minton, S. E.; Peacocke, M.; Tsou, H. C.; Root, A. W.: Severe Lhermitte-Duclos disease with unique germline mutation of PTEN. Am. J. Med. Genet. 82: 290-293, 1999.
[4059] 1253. Tamura, M.; Gu, J.; Matsumoto, K.; Aota, S.; Parsons, R.; Yamada, K. M.: Inhibition of cell migration, spreading, and focal adhesions by tumor suppressor PTEN. Science 280: 1614-1617, 1998.
[4060] 1254. Tsou, H. C.; Ping, X. L.; Xie, X. X.; Gruener, A. C.; Zhang, H.; Nini, R.; Swisshelm, K.; Sybert, V.; Diamond, T. M.; Sutphen, R.; Peacocke, M.: The genetic basis of Cowden's syndrome: three novel mutations in PTEN/MMAC1/TEP1. Hum. Genet. 102: 467-473, 1998.
[4061] 1255. Tsou, H. C.; Teng, D. H.-F.; Ping, X. L.; Brancolini, V.; Davis, T.; Hu, R.; Xie, X. X.; Gruener, A. C.; Schrager, C. A. Christiano, A. M.; Eng, C.; Steck, P.; Ott, J.; Tavtigian, S. V.; Peacocke, M.: The role of MMAC1 mutations in early-onset breast cancer: causative in association with Cowden syndrome and excluded in BRCA1-negative cases. Am. J. Hum. Genet. 61: 1036-1043, 1997.
[4062] 1256. Waite, K. A.; Eng, C.: Protean PTEN: form and function. Am. J. Hum. Genet. 70: 829-844, 2002.
[4063] 1257. Wen, S.; Stolarov, J.; Myers, M. P.; Su, J. D.; Wigler, M. H.; Tonks, N. K.; Durden, D. L.: PTEN controls tumor-induced angiogenesis. Proc. Nat. Acad. Sci. 98: 4622-4627, 2001.
[4064] 1258. Weng, L.-P.; Brown, J. L.; Eng, C.: PTEN coordinates G1 arrest by down-regulating cyclin D1 via its protein phosphatase activity and up-regulating p27 via its lipid phosphatase activity in a breast cancer model. Hum. Molec. Genet. 10: 599-604, 2001.
[4065] 1259. Weng, L.-P.; Brown, J. L.; Eng, C.: PTEN induces apoptosis and cell cycle arrest through phosphoinositol-3-kinase/Akt-dependent and -independent pathways. Hum. Molec. Genet. 10: 237-242, 2001.
[4066] 1260. Weng, L.-P.; Gimm, O.; Kum, J. B.; Smith, W. M.; Zhou, X.-P.; Wynford-Thomas, D.; Leone, G.; Eng, C.: Transient ectopic expression of PTEN in thyroid cancer cell lines induces cell cycle arrest and cell type-dependent cell death. Hum. Molec. Genet. 10: 251-258, 2001.
[4067] 1261. Weng, L.-P.; Smith, W. M.; Brown, J. L.; Eng, C.: PTEN inhibits insulin-stimulated MEK/MAPK activation and cell growth by blocking IRS-1 phosphorylation and IRS-1/Grb-2/Sos complex formation in a breast cancer model. Hum. Molec. Genet. 10: 605-616, 2001.
[4068] 1262. Weng, L.-P.; Smith, W. M.; Dahia, P. L. M.; Ziebold, U.; Gil, E.; Lees, J. A.; Eng, C.: PTEN suppresses breast cancer cell growth by phosphatase activity-dependent G1 arrest followed by cell death. Cancer Res. 59: 5808-5814, 1999.
[4069] 1263. Wishart, M. J.; Taylor, G. S.; Slama, J. T.; Dixon, J. E.: PTEN and myotubularin phosphoinositide phosphatases: bringing bioinformatics to the lab bench. Cell Biol. 13: 172-181, 2001.
[4070] 1264. Zhou, X.-P.; Kuismanen, S.; Nystrom-Lahti, M.; Peltomaki, P.; Eng, C.: Distinct PTEN mutational spectra in hereditary non-polyposis colon cancer syndrome-related endometrial carcinomas compared to sporadic microsatellite unstable tumors. Hum. Molec. Genet. 11: 445-450, 2002.
[4071] 1265. Zhou, X.-P.; Marsh, D. J.; Hampel, H.; Mulliken, J. B.; Gimm, O.; Eng, C.: Germline and germline mosaic PTEN mutations associated with a Proteus-like syndrome of hemihypertrophy, lower limb asymmetry, arteriovenous malformations and lipomatosis. Hum. Molec. Genet. 9: 765-768, 2000.
[4072] 1266. Zori, R. T.; Marsh, D. J.; Graham, G. E.; Marliss, E. B.; Eng, C.: Germline PTEN mutation in a family with Cowden syndrome and Bannayan-Riley-Ruvalcaba syndrome. Am. J. Med. Genet. 80: 399-402, 1998.
[4073] 1267. Zundel, W.; Schindler, C.; Haas-Kogan, D.; Koong, A.; Kaper, F.; Chen, E.; Gottschalk, A. R.; Ryan, H. E.; Johnson, R. S.; Jefferson, A. B.; Stokoe, D.; Giaccia, A. J.: Loss of PTEN facilitates HIF-1-mediated gene expression. Genes Dev. 14: 391-396, 2000.
[4074] 1268. Cates, C. A.; Michael, R. L.; Stayrook, K. R.; Harvey, K. A.; Burke, Y. D.; Randall, S. K.; Crowell, P. L.; Crowell, D. N.: Prenylation of oncogenic human PTP(CAAX) protein tyrosine phosphatases. Cancer Lett. 110: 49-55, 1996.
[4075] 1269. Montagna, M.; Serova, O.; Sylla, B. S.; Feunteun, J.; Lenoir, G. M.: A 100-kb physical and transcriptional map around the EDH17B2 gene: identification of three novel genes and a pseudogene of a human homologue of the rat PRL-1 tyrosine phosphatase. Hum. Genet. 96: 532-538, 1995.
[4076] 1270. Diamond, R. H.; Cressman, D. E.; Laz, T. M.; Abrams, C. S.; Taub, R.: PRL-1, a unique nuclear protein tyrosine phosphatase, affects cell growth. Cell. Biol. 14: 3752-3762, 1994.
[4077] 1271. Zeng, Q.; Hong, W.; Tan, Y. H.: Mouse PRL-2 and PRL-3, two potentially prenylated protein tyrosine phosphatases homologous to PRL-1. Biochem. Biophys. Res. Commun. 244: 421-427, 1998.
[4078] 1272. Peng, Y.; Genin, A.; Spinner, N. B.; Diamond, R. H.; Taub, R.: The gene encoding human nuclear protein tyrosine phosphatase, PRL-1: cloning, chromosomal localization, and identification of an intron enhancer. J. Biol. Chem. 273: 17286-17295, 1998.
[4079] 1273. Zhao, Z.; Lee, C.-C.; Monckton, D. G.; Yazdani, A.; Coolbaugh, M. I.; Li, X.; Bailey, J.; Shen, Y.; Caskey, C. T.: Characterization and genomic mapping of genes and pseudogenes of a new human protein tyrosine phosphatase. Genomics 35: 172-181, 1996.
[4080] 1274. Ahmad, F.; Azevedo, J. L., Jr.; Cortright, R.; Dohm, G. L.; Goldstein, B. J.: Alternations in skeletal muscle protein-tyrosine phosphatase activity and expression in insulin-resistant human obesity and diabetes. J. Clin. Invest. 100: 449-458, 1997.
[4081] 1275. Brown-Shimer, S.; Johnson, K. A.; Lawrence, J. B.; Johnson, C.; Bruskin, A.; Green, N. R.; Hill, D. E.: Molecular cloning and chromosome mapping of the human gene encoding protein phosphotyrosyl phosphatase 1B. Proc. Nat. Acad. Sci. 87: 5148-5152, 1990.
[4082] 1276. Charbonneau, H.; Tonks, N. K.; Kumar, S.; Diltz, C. D.; Harrylock, M.; Cool, D. E.; Krebs, E. G.; Fischer, E. H.; Walsh, K. A.: Human placenta protein-tyrosine-phosphatase: amino acid sequence and relationship to a family of receptor-like proteins. Proc. Nat. Acad. Sci. 86: 5252-5256, 1989.
[4083] 1277. Chernoff, J.; Schievella, A. R.; Jost, C. A.; Erikson, R. L.; Neel, B. G.: Cloning of a cDNA for a major human protein-tyrosine-phosphatase. Proc. Nat. Acad. Sci. 87: 2735-2739, 1990.
[4084] 1278. Di Paola, R.; Frittitta, L.; Miscio, G.; Bozzali, M.; Baratta, R.; Centra, M.; Spampinato, D.; Santagati, M. G.; Ercolino, T.; Cisternino, C.; Soccio, T. Mastroianno, S.; Tassi, V.; Almgren, P.; Pizzuti, A.; Vigneri, R.; Trischitta, V.: A variation in 3-prime UTR of hPTP1B increases specific gene expression and associates with insulin resistance. Am. J. Hum. Genet. 70: 806-812, 2002.
[4085] 1279. Elchebly, M.; Payette, P.; Michaliszyn, E.; Cromlish, W.; Collins, S.; Loy, A. L.; Normandin, D.; Cheng, A.; Himms-Hagen, J.; Chan, C.-C.; Ramachandran, C.; Gresser, M. J.; Tremblay, M. L.; Kennedy, B. P.: Increased insulin sensitivity and obesity resistance in mice lacking the protein tyrosine phosphatase-1B gene. Science 283: 1544-1548, 1999.
[4086] 1280. Forsell, P. K. A. L.; Boie, Y.; Montalibet, J.; Collins, S.; Kennedy, B. P.: Genomic characterization of the human and mouse protein tyrosine phosphatase-1B genes. Gene 260: 145-153, 2000.
[4087] 1281. Gu, H. F.; Almgren, P.; Lindholm, E.; Frittitta, L.; Pizzuti, A.; Trischitta, V.; Groop, L. C.: Association between the human glycoprotein PC-1 gene and elevated glucose and insulin levels in paired-sibling analysis. Diabetes 49: 1601-1603, 2000.
[4088] 1282. Haj, F. G.; Verveer, P. J.; Squire, A.; Neel, B. G.; Bastiaens, P. 1. H.: Imaging sites of receptor dephosphorylation by PTP1B on the surface of the endoplasmic reticulum. Science 295: 1708-1711, 2002.
[4089] 1283. Jia, Z.; Barford, D.; Flint, A. J.; Tonks, N. K.: Structural basis for phosphotyrosine peptide recognition by protein tyrosine phosphatase 1B. Science 268: 1754-1758, 1995.
[4090] 1284. Kaplan, R.; Morse, B.; Huebner, K.; Croce, C.; Howk, R.; Ravera, M.; Ricca, G.; Jaye, M.; Schlessinger, J.: Cloning of three human tyrosine phosphatases reveals a multigene family of receptor-linked protein-tyrosine-phosphatases expressed in brain. Proc. Nat. Acad. Sci. 87: 7000-7004, 1990.
[4091] 1285. Kennedy, B. P.; Ramachandran, C.: Protein tyrosine phosphatase-1B in diabetes. Biochem. Pharm. 60: 877-883, 2000.
[4092] 1286. Mok, A.; Cao, H.; Zinman, B.; Hanley, A. J. G.; Harris, S. B.; Kennedy, B. P.; Hegele, R. A.: A single nucleotide polymorphism in protein tyrosine phosphatase PTP-1B is associated with protection from diabetes or impaired glucose tolerance in Oji-Cree. J. Clin. Endocr. Metab. 87: 724-727, 2002.
[4093] 1287. Salmeen, A.; Andersen, J. N.; Myers, M. P.; Tonks, N. K.; Barford, D.: Molecular basis for the dephosphorylation of the activation segment of the insulin receptor by protein tyrosine phosphatase 1B. Molec. Cell 6: 1401-1412, 2000.
[4094] 1288. Tonks, N. K.; Diltz, C. D.; Fischer, E. H.: Purification of the major protein-tyrosine-phosphatases of human placenta. J. Biol. Chem. 263: 6722-6730, 1988.
[4095] 1289. Ahmad, F.; Goldstein, B. J.: Functional association between the insulin receptor and the transmembrane protein-tyrosine phosphatase LAR in intact cells. J. Biol. Chem. 272: 448-457, 1997.
[4096] 1290. Disteche, C. M.; Adler, D. A.; Tedder, T. F.; Saito, H.: Mapping of the genes for LYAM1, a new lymphocyte adhesion molecule, and for LAR, a new receptor-linked protein tyrosine phosphatase, to human chromosome 1 (Abstract) Cytogenet. Cell Genet. 51: 990 only, 1989.
[4097] 1291. Harder, K. W.; Saw, J.; Miki, N.; Jirik, F.: Coexisting amplifications of the chromosome 1p32 genes (PTPRF and MYCL1) encoding protein tyrosine phosphatase LAR and L-myc in a small cell lung cancer line. Genomics 27: 552-553, 1995.
[4098] 1292. Jirik, F. R.; Harder, K. W.; Melhado, I. G.; Anderson, L. L.; Duncan, A. M. V.: The gene for leukocyte antigen-related tyrosine phosphatase (LAR) is localized to human chromosome 1p32, a region frequently deleted in tumors of neuroectodermal origin. Cytogenet. Cell Genet. 61: 266-268, 1992.
[4099] 1293. Nam, H.-J.; Poy, F.; Krueger, N. X.; Saito, H.; Frederick, C. A.: Crystal structure of the tandem phosphatase domains of RPTP LAR. Cell 97: 449-457, 1999.
[4100] 1294. O'Grady, P.; Krueger, N. X.; Streuli, M.; Saito, H.: Genomic organization of the human LAR protein tyrosine phosphatase gene and alternative splicing in the extracellular fibronectin type-III domains. J. Biol. Chem. 269: 25193-25199, 1994.
[4101] 1295. Schaapveld, R. Q.; Schepens, J. T.; Robinson, G. W.; Attema, J.; Oerlemans, F. T.; Fransen, J. A.; Streuli, M.; Wieringa, B.; Hennighausen, L.; Hendriks, W. J.: Impaired mammary gland development and function in mice lacking LAR receptor-like tyrosine phosphatase activity. Dev. Biol. 188: 134-146, 1997.
[4102] 1296. Schaapveld, R. Q. J.; van den Maagdenberg, A. M. J. M.; Schepens, J. T. G.; Olde Weghuis, D.; Geurts van Kessel, A.; Wieringa, B.; Hendriks, W. J. A. J.: The mouse gene Ptprf encoding the leukocyte common antigen-related molecule LAR: cloning, characterization, and chromosomal localization. Genomics 27: 124-130, 1995.
[4103] 1297. Tsujikawa, K.; Kawakami, N.; Uchino, Y.; Ichijo, T.; Furukawa, T.; Saito, H.; Yamamoto, H.: Distinct functions of the two protein tyrosine phosphatase domains of LAR (leukocyte common antigen-related) on tyrosine dephosphorylation of insulin receptor. Molec. Endocr. 15: 271-280, 2001.
[4104] 1298. Chen, N. N.; Chang, C.-F.; Gallia, G. L.; Kerr, D. A.; Johnson, E. M.; Krachmarov, C. P.; Barr, S. M.; Frisque, R. J.; Bollag, B.; Khalili, K.: Cooperative action of cellular proteins YB-1 and Pur-alpha with the tumor antigen of the human JC polyomavirus determines their interaction with the viral lytic control element. Proc. Nat. Acad. Sci. 92: 1087-1091, 1995.
[4105] 1299. Gallia, G. L.; Johnson, E. M.; Khalili, K.: Pur-alpha: a multifunctional single-stranded DNA- and RNA-binding protein. Nucleic Acids Res. 28: 3197-3205, 2000.
[4106] 1300. Kennedy, G. C.; Rutter, W. J.: Pur-1, a zinc-finger protein that binds to purine-rich sequences, transactivates an insulin promoter in heterologous cells. Proc. Nat. Acad. Sci. 89: 11498-11502, 1992.
[4107] 1301. Ma, Z.-W.; Pejovic, T.; Najfeld, V.; Ward, D.C.; Johnson, E. M.: Localization of PURA, the gene encoding the sequence-specific single-stranded-DNA-binding protein Pur-alpha, to chromosome band 5q31. Cytogenet. Cell Genet. 71: 64-67, 1995.
[4108] 1302. Guzman-Rojas, L.; Sims, J. C.; Rangel, R.; Guret, C.; Sun, Y.; Alcocer, J. M.; Martinez-Valdez, H.: PRELI, the human homologue of the avian px19, is expressed by germinal center B lymphocytes. Int. Immun. 12: 607-612, 2000.
[4109] 1303. Allan, B. B.; Moyer, B. D.; Balch, W. E.: Rab1 recruitment of p115 into a cis-SNARE complex: programming budding COPII vesicles for fusion. Science 289: 444-448, 2000.
[4110] 1304. Wedemeyer, N.; Lengeling, A.; Ronsiek, M.; Korthaus, D.; Baer, K.; Wuttke, M.; Jockusch, H.: YAC contigs of the Rab1 and wobbler (wr) spinal muscular atrophy gene region on proximal mouse chromosome 11 and of the homologous region on human chromosome 2p. Genomics 32: 447-454, 1996.
[4111] 1305. Zahraoui, A.; Touchot, N.; Chardin, P.; Tavitian, A.: The human rab genes encode a family of GTP-binding proteins related to yeast YPT1 and SEC4 products involved in secretion. J. Biol. Chem. 264: 12394-12401, 1989.
[4112] 1306. Koda, T.; Kakinuma, M.: Molecular cloning of a cDNA encoding a novel small GTP-binding protein. FEBS Lett. 328: 21-24, 1993.
[4113] 1307. Scott, A. F.: Personal Communication. Baltimore, Md. May 14, 2001.
[4114] 1308. Zheng, J. Y.; Koda, T.; Arimura, Y.; Kishi, M.; Kakinuma, M.: Structure and expression of the mouse S10 gene. Biochim. Biophys. Acta 1351: 47-50, 1997.
[4115] 1309. Hakimi, M.-A.; Bochar, D. A.; Schmiesing, J. A.; Dong, Y.; Barak, O. G.; Speicher, D. W.; Yokomori, K.; Shiekhattar, R.: A chromatin remodelling complex that loads cohesin onto human chromosomes. Nature 418: 994-998, 2002.
[4116] 1310. Hauf, S.; Waizenegger, I. C.; Peters, J.-M.: Cohesin cleavage by separase required for anaphase and cytokinesis in human cells. Science 293: 1320-1323, 2001.
[4117] 1311. Hoque, M. T.; Ishikawa, F.: Human chromatid cohesin component hRad21 is phosphorylated in M phase and associated with metaphase centromeres. J. Biol. Chem. 276: 5059-5067, 2001.
[4118] 1312. McKay, M. J.; Troelstra, C.; van der Spek, P.; Kanaar, R.; Snut, B.; Hagemeijer, A.; Bootsma, D.; Hoeijmakers, J. H. J.: Sequence conservation of the rad21 Schizosaccharomyces pombe DNA double-strand break repair gene in human and mouse. Genomics 36: 305-315, 1996.
[4119] 1313. Nomura, N.; Nagase, T.; Miyajima, N.; Sazuka, T.; Tanaka, A.; Sato, S.; Seki, N.; Kawarabayasi, Y.; Ishikawa, K.; Tabata, S.: Prediction of the coding sequences of unidentified human genes. II. The coding sequences of 40 new genes (KIAA0041-KIAA0080) deduced by analysis of cDNA clones from human cell line KG-1. DNA Res. 1: 223-229, 1994.
[4120] 1314. Sadano, H.; Sugimoto, H.; Sakai, F.; Nomura, N.; Osumi, T.: NXP-1, a human protein related to Rad21/Scc1/Mcd1, is a component of the nuclear matrix. Biochem. Biophys. Res. Commun. 267: 418-422, 2000.
[4121] 1315. Sumara, I.; Vorlaufer, E.; Gieffers, C.; Peters, B. H.; Peters, J.-M.: Characterization of vertebrate cohesin complexes and their regulation in prophase. J. Cell Biol. 151: 749-761, 2000.
[4122] 1316. Bottorff, D.; Ebinu, J.; Stone, J. C.: RasGRP, a Ras activator: mouse and human cDNA sequences and chromosomal positions. Mammalian Genome 10: 358-361, 1999.
[4123] 1317. Ebinu, J. O.; Bottorff, D. A.; Chan, E. Y. W.; Stang, S. L.; Dunn, R. J.; Stone, J. C.: RasGRP, a Ras guanyl nucleotide-releasing protein with calcium- and diacylglycerol-binding motifs. Science 280: 1082-1086, 1998.
[4124] 1318. Kawasaki, H.; Springett, G. M.; Toki, S.; Canales, J. J.; Harlan, P.; Blumenstiel, J. P.; Chen, E. J.; Bany, I. A.; Mochizuki, N.; Ashbacher, A.; Matsuda, M.; Housman, D. E.; Graybiel, A. M.: A Rap guanine nucleotide exchange factor enriched highly in the basal ganglia. Proc. Nat. Acad. Sci. 95: 13278-13283, 1998.
[4125] 1319. Liao, X.; Ma, C.; Trask, B.; Massa, H.; Gilbert, D. J.; Staudt, L. M.; Jenkins, N. A.; Copeland, N. G.: LAF4 maps to mouse chromosome 1 and human chromosome 2q11.2-q12. Mammalian Genome 7: 467-468, 1996.
[4126] 1320. Ma, C.; Staudt, L. M.: LAF-4 encodes a lymphoid nuclear protein with transactivation potential that is homologous to AF-4, the gene fused to MLL in t(4;11) leukemias. Blood 87: 734-745, 1996.
[4127] 1321. Oh, J.; Takahashi, R.; Kondo, S.; Mizoguchi, A.; Adachi, E.; Sasahara, R. M.; Nishimura, S.; Imamura, Y.; Kitayama, H.; Alexander, D. B.; Ide, C.; Horan, T. P.; Arakawa, T.; Yoshida, H.; Nishikawa, S.; Itoh, Y.; Seiki, M.; Itohara, S.; Takahashi, C.; Noda, M.: The membrane-anchored MMP inhibitor RECK is a key regulator of extracellular matrix integrity and angiogenesis. Cell 107: 789-800, 2001.
[4128] 1322. Takahashi, C.; Sheng, Z.; Horan, T. P.; Kitayama, H.; Maki, M.; Hitomi, K.; Kitaura, Y.; Takai, S.; Sasahara, R. M.; Horimoto, A.; Ikawa, Y.; Ratzkin, B. J.; Arakawa, T.; Noda, M.: Regulation of matrix metalloproteinase-9 and inhibition of tumor invasion by the membrane-anchored glycoprotein RECK. Proc. Nat. Acad. Sci. 95: 13221-13226, 1998.
[4129] 1323. Applequist, S. E.; Selg, M.; Raman, C.; Jack, H.-M.: Cloning and characterization of HUPF1, a human homolog of the Saccharomyces cerevisiae nonsense mRNA-reducing UPF1 protein. Nucleic Acids Res. 25: 814-821, 1997.
[4130] 1324. Medghalchi, S. M.; Frischmeyer, P. A.; Mendell, J. T.; Kelly, A. G.; Lawler, A. M.; Dietz, H. C.: Rent1, a trans-effector of nonsense-mediated mRNA decay, is essential for mammalian embryonic viability. Hum. Molec. Genet. 10: 99-105, 2001.
[4131] 1325. Mendell, J. T.; ap Rhys, C. M. J.; Dietz, H. C.: Separable roles for rent1/hUpf1 in altered splicing and decay of nonsense transcripts. Science 298: 419-371, 2002.
[4132] 1326. Perlick, H. A.; Medghalchi, S. M.; Spencer, F. A.; Dietz, H. C.: Cloning and characterization of a human regulator of nonsense transcript stability. (Abstract) Am. J. Hum. Genet. 59 (suppl.): A32 only, 1996.
[4133] 1327. Perlick, H. A.; Medghalchi, S. M.; Spencer, F. A.; Kendzior, R. J., Jr.; Dietz, H. C.: Mammalian orthologues of a yeast regulator of nonsense transcript stability. Proc. Nat. Acad. Sci. 93: 10928-10932, 1996.
[4134] 1328. Sun, X.; Perlick, H. A.; Dietz, H. C.; Maquat, L. E.: A mutated human homologue to yeast Upfl protein has a dominant-negative effect on the decay of nonsense-containing mRNAs in mammalian cells. Proc. Nat. Acad. Sci. 95: 10009-10014, 1998.
[4135] 1329. Gibbs, P. E. M.; McGregor, W. G.; Maher, V. M.; Nisson, P.; Lawrence, C. W.: A human homolog of the Saccharomyces cerevisiae REV3 gene, which encodes the catalytic subunit of DNA polymerase zeta. Proc. Nat. Acad. Sci. 95: 6876-6880, 1998.
[4136] 1330. Morelli, C.; Mungall, A. J.; Negrini, M.; Barbanti-Brodano, G.; Croce, C. M.: Alternative splicing, genomic structure, and fine chromosome localization of REV3L. Cytogenet. Cell Genet. 83: 18-20, 1998.
[4137] 1331. Xiao, W.; Lechler, T.; Chow, B. L.; Fontanie, T.; Agustus, M.; Carter, K. C.; Wei, Y.-F.: Identification, chromosomal mapping and tissue-specific expression of hREV3 encoding a putative human DNA polymerase zeta. Carcinogenesis 19: 945-949, 1998.
[4138] 1332. Kang, H.-Y.; Yeh, S.; Fujimoto, N.; Chang, C.: Cloning and characterization of human prostate coactivator ARA54, a novel protein that associates with the androgen receptor. J. Biol. Chem. 274: 8570-8576, 1999.
[4139] 1333. Ueki, N.; Oda, T.; Kondo, M.; Yano, K.; Noguchi, T.; Muramatsu, M.: Selection system for genes encoding nuclear-targeted proteins. Nat. Biotech. 16: 1338-1342, 1998.
[4140] 1334. Ueki, N.; Seki, N.; Yano, K.; Masuho, Y.; Saito, T.; Muramatsu, M.: Isolation and characterization of a novel human gene (HFB30) which encodes a protein with a RING finger motif. Biochim. Biophys. Acta 232-236, 1999.
[4141] 1335. Ishikawa, K.; Nagase, T.; Suyama, M.; Miyajima, N.; Tanaka, A.; Kotani, H.; Nomura, N.; Ohara, O.: Prediction of the coding sequences of unidentified human genes. X. The complete sequences of 100 new cDNA clones from brain which can code for large proteins in vitro. DNA Res. 5: 169-176, 1998.
[4142] 1336. Nakamura, M.; Nagano, T.; Chikama, T.; Nishida, T.: Role of the small GTP-binding protein Rho in epithelial cell migration in the rabbit cornea. Invest. Ophthal. Vis. Sci. 42: 941-947, 2001.
[4143] 1337. Rao, P. V.; Deng, P.-F.; Kumar, J.; Epstein, D. L.: Modulation of aqueous humor outflow facility by the Rho kinase-specific inhibitor Y-27632. Invest. Ophthal. Vis. Sci. 42: 1029-1037, 2001.
[4144] 1338. Takahashi, N.; Tuiki, H.; Saya, H.; Kaibuchi, K.: Localization of the gene coding for ROCK II/Rho kinase on human chromosome 2p24. Genomics 55: 235-237, 1999.
[4145] 1339. Becker-Andre, M.; Andre, E.; DeLamarter, J. F.: Identification of nuclear receptor mRNAs by RT-PCR amplification of conserved zinc-finger motif sequences. Biochem. Biophys. Res. Commun. 194: 1371-1379, 1993.
[4146] 1340. Carlberg, C.; Hooft van Huijsduijnen, R.; Staple, J. K.; DeLamarter, J. F.; Becker-Andre, M.: RZRs, a new family of retinoid-related orphan receptors that function as both monomers and homodimers. Molec. Endocr. 8: 757-770, 1994.
[4147] 1341. Coste, H.; Rodriguez, J. C.: Orphan nuclear hormone receptor Rev-erb-alpha regulates the human apolipoprotein CIII promoter. J. Biol. Chem. 277: 27120-27129, 2002.
[4148] 1342. Giguere, V.; Beatty, B.; Squire, J.; Copeland, N. G.; Jenkins, N. A.: The orphan nuclear receptor ROR-alpha (RORA) maps to a conserved region of homology on human chromosome 15q21-q22 and mouse chromosome 9. Genomics 28: 596-598, 1995.
[4149] 1343. Giguere, V.; Tini, M.; Flock, G.; Ong, E.; Evans, R. M.; Otulakowski, G.: Isoform-specific amino-terminal domains dictate DNA-binding properties of ROR-alpha, a novel family of orphan hormone nuclear receptors. Genes Dev. 8: 538-553, 1994.
[4150] 1344. Hamilton, B. A.; Frankel, W. N.; Kerrebrock, A. W.; Hawkins, T. L.; FitzHugh, W.; Kusumi, K.; Russell, L. B.; Mueller, K. L.; van Berkel, V.; Birren, B. W.; Kruglyak, L.; Lander, E. S.: Disruption of the nuclear hormone receptor ROR-alpha in staggerer mice. Nature 379: 736-739, 1996.
[4151] 1345. Matysiak-Scholze, U.; Nehls, M.: The structural integrity of ROR-alpha isoforms is mutated in staggerer mice: cerebellar coexpression of ROR-alpha-1 and ROR-alpha-4. Genomics 43: 78-84, 1997.
[4152] 1346. Meyer, T.; Kneissel, M.; Mariani, J.; Fournier, B.: In vitro and in vivo evidence for orphan nuclear receptor ROR-alpha function in bone metabolism. Proc. Nat. Acad. Sci. 97: 9197-9202, 2000.
[4153] 1347. Ueda, H. R.; Chen, W.; Adachi, A.; Wakamatsu, H.; Hayashi, S.; Takasugi, T.; Nagano, M.; Nakahama, K.; Suzuki, Y.; Sugano, S.; Iino, M.; Shigeyoshi, Y.; Hashimoto, S.: A transcription factor response element for gene expression during circadian night. Nature 418: 534-539, 2002.
[4154] 1348. Zanjani, H. S.; Herrup, K.; Guastavino, J.-M.; Delhaye-Bouchaud, N.; Mariani, J.: Developmental studies of the inferior olivary nucleus in staggerer mutant mice. Develop. Brain Res. 82: 18-28, 1994.
[4155] 1349. Bhatt, R. R.; Ferrell, J. E., Jr.: The protein kinase p90 Rsk as an essential mediator of cytostatic factor activity. Science 286: 1362-1365, 1999.
[4156] 1350. Bonni, A.; Brunet, A.; West, A. E.; Datta, S. R.; Takasu, M. A.; Greenberg, M. E.: Cell survival promoted by the Ras-MAPK signaling pathway by transcription-dependent and -independent mechanisms. Science 286: 1358-1362, 1999.
[4157] 1351. Gross, S. D.; Schwab, M. S.; Lewellyn, A. L.; Maller, J. L.: Induction of metaphase arrest in cleaving Xenopus embryos by the protein kinase p90(Rsk). Science 286: 1365-1367, 1999.
[4158] 1352. Moller, D. E.; Xia, C. H.; Tang, W.; Zhu, A. X.; Jakubowski, M.: Human rsk isoforms: cloning and characterization of tissue-specific expression. Am. J. Physiol. 266: C351-C359, 1994.
[4159] 1353. Pende, M.; Kozma, S.C.; Jaquet, M.; Oorschot, V.; Burcelin, R.; Le Marchand-Brustel, Y.; Klumperman, J.; Thorens, B.; Thomas, G.: Hypoinsulinaemia, glucose intolerance and diminished beta-cell size in S6K1-deficient mice. Nature 408: 994-997, 2000.
[4160] 1354. Shima, H.; Pende, M.; Chen, Y.; Fumagalli, S.; Thomas, G.; Kozma, S.C.: Disruption of the p70(s6k)/p85(s6k) gene reveals a small mouse phenotype and a new functional S6 kinase. EMBO J. 17: 6649-6659, 1998.
[4161] 1355. Trivier, E.; De Cesare, D.; Jacquot, S.; Pannetier, S.; Zackai, E.; Young, I.; Mandel, J.-L.; Sassone-Corsi, P.; Hanauer, A.: Mutations in the kinase Rsk-2 associated with Coffin-Lowry syndrome. Nature 384: 567-570, 1996.
[4162] 1356. Lowe, D. G.; Capon, D. J.; Delwart, E.; Sakaguchi, A. Y.; Naylor, S. L.; Goeddel, D. V.: Structure of the human and murine R-ras genes, novel genes closely related to ras proto-oncogenes. Cell 48: 137-146, 1987.
[4163] 1357. Chan, A. M.-L.; Miki, T.; Meyers, K. A.; Aaronson, S. A.: A human oncogene of the RAS superfamily unmasked by expression cDNA cloning. Proc. Nat. Acad. Sci. 91: 7558-7562, 1994.
[4164] 1358. Drivas, G. T.; Shih, A.; Coutavas, E.; Rush, M. G.; D'Eustachio, P.: Characterization of four novel ras-like genes expressed in a human teratocarcinoma cell line. Molec. Cell. Biol. 10: 1793-1798, 1990.
[4165] 1359. Chen, M. S.; Huber, A. B.; van der Haar, M. E.; Frank, M.; Schnell, L.; Spillmann, A. A.; Christ, F.; Schwab, M. E.: Nogo-A is a myelin-associated neurite outgrowth inhibitor and an antigen for monoclonal antibody IN-1. Nature 403: 434-439, 2000.
[4166] 1360. Fournier, A. E.; GrandPre, T.; Strittmatter, S. M.: Identification of a receptor mediating Nogo-66 inhibition of axonal regeneration. Nature 409: 341-346, 2001.
[4167] 1361. GrandPre, T.; Li, S.; Strittmatter, S. M.: Nogo-66 receptor antagonist peptide promotes axonal regeneration. Nature 417: 547-551, 2002.
[4168] 1362. GrandPre, T.; Nakamura, F.; Vartanian, T.; Strittmatter, S. M.: Identification of the Nogo inhibitor of axon regeneration as a reticulon protein. Nature 403: 439-444, 2000.
[4169] 1363. Liu, B. P.; Fournier, A.; GrandPre, T.; Strittmatter, S. M.: Myelin-associated glycoprotein as a functional ligand for the Nogo-66 receptor. Science 297: 1190-1193, 2002.
[4170] 1364. Nagase, T.; Ishikawa, K.; Suyama, M.; Kikuno, R.; Hirosawa, M.; Miyajima, N.; Tanaka, A.; Kotani, H.; Nomura, N.; Oharo, O.: Prediction of the coding sequences of unidentified human genes. XII. The complete sequences of 100 new cDNA clones from brain which code for large proteins in vitro. DNA Res. 5: 355-364, 1998.
[4171] 1365. Prinjha, R.; Moore, S. E.; Vinson, M.; Blake, S.; Morrow, R.; Christie, G.; Michalovich, D.; Simmons, D. L.; Walsh, F. S.: Inhibitor of neurite outgrowth in humans. (Letter) Nature 403: 383-384, 2000.
[4172] 1366. Spillmann, A. A.; Bandtlow, C. E.; Lottspeich, F.; Keller, F.; Schwab, M. E.: Identification and characterization of a bovine neurite growth inhibitor (bNI-220). J. Biol. Chem. 273: 19283-19293, 1998.
[4173] 1367. Yang, J.; Yu, L.; Bi, A. D.; Zhao, S.-Y.: Assignment of the human reticulon 4 gene (RTN4) to chromosome 2p14-2p 13 by radiation hybrid mapping. Cytogenet. Cell Genet. 88: 101-102, 2000.
[4174] 1368. Jankowski, S. A.; De Jong, P.; Meltzer, P. S.: Genomic structure of SAS, a member of the transmembrane 4 superfamily amplified in human sarcomas. Genomics 25: 501-506, 1995.
[4175] 1369. Meltzer, P. S.; Jankowski, S. A.; Dal Cin, P.; Sandberg, A. A.; Paz, I. B.; Coccia, M. A.; Smith, S. H.: Identification and cloning of a novel amplified DNA sequence in human malignant fibrous histiocytoma derived from a region of chromosome 12 frequently rearranged in soft tissue tumors. (Abstract) Cytogenet. Cell Genet. 58: 1979 only, 1991.
[4176] 1370. Chang, J. T.; Esumi, N.; Moore, K.; Li, Y.; Zhang, S.; Chew, C.; Goodman, B.; Rattner, A.; Moody, S.; Stetten, G.; Campochiaro, P. A.; Zack, D. J.: Cloning and characterization of a secreted frizzled-related protein that is expressed by the retinal pigment epithelium. Hum. Molec. Genet. 8: 575-583, 1999.
[4177] 1371. Melkonyan, H. S.; Chang, W. C.; Shapiro, J. P.; Mahadevappa, M.; Fitzpatrick, P. A.; Kiefer, M. C.; Tomei, L. D.; Umansky, S. R.: SARPs: a family of secreted apoptosis-related proteins. Proc. Nat. Acad. Sci. 94: 13636-13641, 1997.
[4178] 1372. Barresi, R.; Di Blasi, C.; Negri, T.; Brugnoni, R.; Vitali, A.; Felisari, G.; Salandi, A.; Daniel, S.; Cornelio, F.; Morandi, L.; Mora, M.: Disruption of heart sarcoglycan complex and severe cardiomyopathy caused by beta sarcoglycan mutations. J. Med. Genet. 37: 102-107, 2000.
[4179] 1373. Bonnemann, C. G.; Modi, R.; Noguchi, S.; Mizuno, Y.; Yoshida, M.; Gussoni, E.; McNally, E. M.; Duggan, D. J.; Angelini, C.; Hoffman, E. P.; Ozawa, E.; Kunkel, L. M.: Beta-sarcoglycan (A3b) mutations cause autosomal recessive muscular dystrophy with loss of the sarcoglycan complex. Nature Genet. 11: 266-273, 1995. Note: Erratum: Nature Genet. 12: 110 only, 1996.
[4180] 1374. Bonnemann, C. G.; Passos-Bueno, M. R.; McNally, E. M.; Vainzof, M.; Moreira, E. S.; Marie, S. K.; Pavanello, R. C. M.; Noguchi, S.; Ozawa, E.; Zatz, M.; Kunkel, L. M.: Genomic screening for beta-sarcoglycan gene mutations: missense mutations may cause severe limb-girdle muscular dystrophy type 2E (LGMD 2E). Hum. Molec. Genet. 5: 1953-1961, 1996.
[4181] 1375. Bonnemann, C. G.; Wong, J.; Ben Hamida, C.; Ben Hamida, M.; Hentati, F.; Kunkel, L. M.: LGMD 2E in Tunisia is caused by a homozygous missense mutation in beta-sarcoglycan exon 3. Neuromusc. Dis. 8: 193-197, 1998.
[4182] 1376. Durbeej, M.; Cohn, R. D.; Hrstka, R. F.; Moore, S. A.; Allamand, V.; Davidson, B. L.; Williamson, R. A.; Campbell, K. P.: Disruption of the beta-sarcoglycan gene reveals pathogenetic complexity of limb-girdle muscular dystrophy type 2E. Molec. Cell 5: 141-151, 2000.
[4183] 1377. Fanin, M.; Hoffman, E. P.; Angelini, C.; Pegoraro, E.: Private beta- and gamma-sarcoglycan gene mutations: evidence of a founder effect in northern Italy. Hum. Mutat. 16: 13-17, 2000.
[4184] 1378. Lim, L. E.; Duclos, F.; Broux, O.; Bourg, N.; Sunada, Y.; Allamand, V.; Meyer, J.; Richard, I.; Moomaw, C.; Slaughter, C.; Tome, F. M. S.; Fardeau, M.; Jackson, C. E.; Beckmann, J. S.; Campbell, K. P.: Beta-sarcoglycan: characterization and role in limb-girdle muscular dystrophy linked to 4q12. Nature Genet. 11: 257-265, 1995.
[4185] 1379. Kanai, Y.; Hediger, M. A.: Primary structure and functional characterization of a high-affinity glutamate transporter. Nature 360: 467-471, 1992.
[4186] 1380. Lin, C. G.; Orlov, I.; Ruggiero, A. M.; Dykes-Hoberg, M.; Lee, A.; Jackson, M.; Rothstein, J. D.: Modulation of the neuronal glutamate transporter EAAC1 by the interacting protein GTRAP3-18. Nature 410: 84-88, 2001.
[4187] 1381. Smith, C. P.; Weremowicz, S.; Kanai, Y.; Stelzner, M.; Morton, C. C.; Hediger, M. A.: Assignment of the gene coding for the human high-affinity glutamate transporter EAAC1 to 9p24: potential role in dicarboxylic aminoaciduria and neurodegenerative disorders. Genomics 20: 335-336, 1994.
[4188] 1382. Beckwith, J. B.; Palmer, N. F.: Histopathology and prognosis of Wilms tumors: results from the First National Wilms' Tumor Study. Cancer 41: 1937-1948, 1978.
[4189] 1383. Biegel, J. A.; Allen, C. S.; Kawasaki, K.; Shimizu, N.; Budarf, M. L.; Bell, C. J.: Narrowing the critical region for a rhabdoid tumor locus in 22q11. Genes Chromosomes Cancer 16: 94-105, 1996.
[4190] 1384. Biegel, J. A.; Burk, C. D.; Parmiter, A. H.; Emanuel, B. S.: Molecular analysis of a partial deletion of 22q in a central nervous system rhabdoid tumor. Genes Chromosomes Cancer 5: 104-108, 1992.
[4191] 1385. Biegel, J. A.; Rorke, L. B.; Packer, R. J.; Emanuel, B. S.: Monosomy 22 in rhabdoid or atypical tumors of the brain. J. Neurosurg. 73: 710-714, 1990.
[4192] 1386. Bonnin, J. M.; Rubinstein, L. J.; Palmer, N. F.; Beckwith, J. B.: The association of embryonal tumors originating in the kidney and in the brain: a report of seven cases. Cancer 54: 2137-2146, 1984.
[4193] 1387. Burger, P. C.; Yu, I.-T.; Tihan, T.; Friedman, H. S.; Strother, D. R.; Kepner, J. L.; Duffner, P. K.; Kun, L. E.; Perlman, E. J.: Atypical teratoid/rhabdoid tumor of the central nervous system: a highly malignant tumor of infancy and childhood frequently mistaken for medulloblastoma: a pediatric oncology group study. Am. J. Surg. Path. 22: 1083-1092, 1998.
[4194] 1388. Douglass, E. C.; Valentine, M.; Rowe, S. T.; Parham, D. M.; Wilimas, J. A.; Sanders, J. M.; Houghton, P. J.: Malignant rhabdoid tumor: a highly malignant childhood tumor with minimal karyotypic changes. Genes Chromosomes Cancer 2: 210-216, 1990.
[4195] 1389. Muller, M.; Hubbard, S. L.; Fukuyama, K.; Dirks, P.; Matsuzawa, K.; Rutka, J. T.: Characterization of a pineal region malignant rhabdoid tumor. Pediat. Neurosurg. 22: 204-209, 1995.
[4196] 1390. Parham, D. M.; Weeks, D. A.; Beckwith, J. B.: The clinicopathologic spectrum of putative extrarenal rhabdoid tumors: An analysis of 42 cases studied with immunohistochemistry or electron microscopy. Am. J. Surg. Path. 18: 1010-1029, 1994.
[4197] 1391. Roberts, C. W. M.; Galusha, S. A.; McMenamin, M. E.; Fletcher, C. D. M.; Orkin, S. H.: Haploinsufficiency of Snf5 (integrase interactor 1) predisposes to malignant rhabdoid tumors in mice. Proc. Nat. Acad. Sci. 97: 13796-13800, 2000.
[4198] 1392. Sevenet, N.; Lellouch-Tubiana, A.; Schofield, D.; Hoang-Xuan, K.; Gessler, M.; Birnbaum, D.; Jeanpierre, C.; Jouvet, A.; Delattre, O.: Spectrum of hSNF5/INI1 somatic mutations in human cancer and genotype-phenotype correlations. Hum. Molec. Genet. 8: 2359-2368, 1999.
[4199] 1393. Sevenet, N.; Sheridan, E.; Amram, D.; Schneider, P.; Handgretinger, R.; Delattre, O.: Constitutional mutations of the hSNF5/INI1 gene predispose to a variety of cancers. Am. J. Hum. Genet. 65: 1342-1348, 1999.
[4200] 1394. Taylor, M. D.; Gokgoz, N.; Andrulis, I. L.; Mainprize, T. G.; Drake, J. M.; Rutka, J. T.: Familial posterior fossa brain tumors of infancy secondary to germline mutation of the hSNF5 gene. Am. J. Hum. Genet. 66: 1403-1406, 2000.
[4201] 1395. Turelli, P.; Doucas, V.; Craig, E.; Mangeat, B.; Klages, N.; Evans, R.; Kalpana, G.; Trono, D.: Cytoplasmic recruitment of INI1 and PML on incoming HIV preintegration complexes: interference with early steps of viral replication. Molec. Cell 7: 1245-1254, 2001.
[4202] 1396. Versteege, I.; Sevenet, N.; Lange, J.; Rousseau-Merck, M.-F.; Ambros, P.; Handgretinger, R.; Aurias, A.; Delattre, O.: Truncating mutations of hSNF5/INI1 in aggressive paediatric cancer. Nature 394: 203-206, 1998.
[4203] 1397. Weeks, D. A.; Beckwith, J. B.; Mierau, G. W.; Luckey, D. W.: Rhabdoid tumor of kidney: a report of 111 cases from the National Wilms' Tumor Study Pathology Center. Am. J. Surg. Path. 13: 439-458, 1989.
[4204] 1398. Ring, H. Z.; Vameghi-Meyers, V.; Wang, W.; Crabtree, G. R.; Francke, U.: Five SWI/SNF-related, matrix-associated, actin-dependent regulator of chromatin (SMARC) genes are dispersed in the human genome. Genomics 51: 140-143, 1998.
[4205] 1399. Wang, W.; Xue, Y.; Zhou, S.; Kuo, A.; Cairns, B. R.; Crabtree, G. R.: Diversity and specialization of mammalian SWI/SNF complexes. Genes Dev. 10: 2117-2130, 1996.
[4206] 1400. Haft, C. R.; de la Luz Sierra, M.; Barr, V. A.; Haft, D. H.; Taylor, S. I.: Identification of a family of sorting nexin molecules and characterization of their association with receptors. Molec. Cell. Biol. 18: 7278-7287, 1998.
[4207] 1401. Bondurand, N.; Girard, M.; Pingault, V.; Lemort, N.; Dubourg, O.; Goossens, M.: Human connexin 32, a gap junction protein altered in the X-linked form of Charcot-Marie-Tooth disease, is directly regulated by the transcription factor SOX10. Hum. Molec. Genet. 10: 2783-2795, 2001.
[4208] 1402. Bondurand, N.; Kuhlbrodt, K.; Pingault, V.; Enderich, J.; Sajus, M.; Tommerup, N.; Warburg, M.; Hennekam, R. C. M.; Read, A. P.; Wegner, M.; Goossens, M.: A molecular analysis of the Yemenite deaf-blind hypopigmentation syndrome: SOX10 dysfunction causes different neurocristopathies. Hum. Molec. Genet. 8: 1785-1789, 1999.
[4209] 1403. Bondurand, N.; Pingault, V.; Goerich, D. E.; Lemort, N.; Sock, E.; Le Caignec, C.; Wegner, M.; Goossens, M.: Interaction among SOX10, PAX3 and MITF, three genes altered in Waardenburg syndrome. Hum. Molec. Genet. 9: 1907-1917, 2000.
[4210] 1404. Hennekam, R. C. M.; Gorlin, R. J.: Confirmation of Yemenite (Warburg) deaf-blind hypopigmentation syndrome. Am. J. Med. Genet. 65: 146-148, 1996.
[4211] 1405. Herbarth, B.; Pingault, V.; Bondurand, N.; Kuhlbrodt, K.; Hermans-Borgmeyer, I.; Puliti, A.; Lemort, N.; Goossens, M.; Wegner, M.: Mutation of the Sry-related Sox10 gene in dominant megacolon, a mouse model for human Hirschsprung disease. Proc. Nat. Acad. Sci. 95: 5161-5165, 1998.
[4212] 1406. Inoue, K.; Tanabe, Y.; Lupski, J. R.: Myelin deficiencies in both the central and the peripheral nervous systems associated with a SOX10 mutation. Ann. Neurol. 46: 313-318, 1999.
[4213] 1407. Khong, H. T.; Rosenberg, S. A.: The Waardenburg syndrome type 4 gene, SOX10, is a novel tumor-associated antigen identified in a patient with a dramatic response to immunotherapy. Cancer Res. 62: 3020-3023, 2002.
[4214] 1408. Kuhlbrodt, K.; Herbarth, B.; Sock, E.; Hermans-Borgmeyer, I.; Wegner, M.: Sox10, a novel transcriptional modulator in glial cells. J. Neurosci. 18: 237-250, 1998.
[4215] 1409. Kuhlbrodt, K.; Schmidt, C.; Sock, E.; Pingault, V.; Bondurand, N.; Goossens, M.; Wegner, M.: Functional analysis of Sox10 mutations found in human Waardenburg-Hirschsprung patients. J. Biol. Chem. 273: 23033-23038, 1998.
[4216] 1410. Lane, P. W.; Liu, H. M.: Association of megacolon with a new dominant spotting gene (Dom) in the mouse. J. Hered. 75: 435-439, 1984.
[4217] 1411. Lee, M.; Goodall, J.; Verastegui, C.; Ballotti, R.; Goding, C. R.: Direct regulation of the microphthalmia promoter by Sox10 links Waardenburg-Shah syndrome (WS4)-associated hypopigmentation and deafness to WS2. J. Biol. Chem. 275: 37978-37983, 2000.
[4218] 1412. Pingault, V.; Bondurand, N.; Kuhlbrodt, K.; Goerich, D. E.; Prehu, M.-O.; Puliti, A.; Herbarth, B.; Hermans-Borgmeyer, I.; Legius, E.; Matthijs, G.; Amiel, J.; Lyonnet, S.; Ceccherini, I.; Romeo, G.; Smith, J. C.; Read, A. P.; Wegner, M.; Goossens, M.: SOX10 mutations in patients with Waardenburg-Hirschsprung disease. Nature Genet. 18: 171-173, 1998.
[4219] 1413. Pingault, V.; Girard, M.; Bondurand, N.; Dorkins, H.; Van Maldergem, L.; Mowat, D.; Shimotake, T.; Verma, I.; Baumann, C.; Goossens, M.: SOX10 mutations in chronic intestinal pseudo-obstruction suggest a complex physiopathological mechanism. Hum. Genet. 111: 198-206, 2002.
[4220] 1414. Pingault, V.; Puliti, A.; Prehu, M.-O.; Samadi, A.; Bondurand, N.; Goossens, M.: Human homology and candidate genes for the dominant megacolon locus, a mouse model of Hirschsprung disease. Genomics 39: 86-89, 1997.
[4221] 1415. Pingault, V., Guiochon-Mantel, A.; Bondurand, N.; Faure, C.; Lacroix, C.; Lyonnet, S.; Goossens, M.; Landrieu, P.: Peripheral neuropathy with hypomyelination, chronic intestinal pseudo-obstruction and deafness: a developmental ‘neural crest syndrome’ related to a SOX10 mutation. Ann. Neurol. 48: 671-676, 2000.
[4222] 1416. Potterf, S. B.; Furumura, M.; Dunn, K. J.; Arnheiter, H.; Pavan, W. J.: Transcription factor hierarchy in Waardenburg syndrome: regulation of MITF expression by SOX10 and PAX3. Hum. Genet. 107: 1-6, 2000.
[4223] 1417. Southard-Smith, E. M.; Angrist, M.; Ellison, J. S.; Agarwala, R.; Baxevanis, A. D.; Chakravarti, A.; Pavan, W. J.: The Sox10(Dom) mouse: modeling the genetic variation of Waardenburg-Shah (WS4) syndrome. Genome Res. 9: 215-225, 1999.
[4224] 1418. Southard-Smith, E. M.; Kos, L.; Pavan, W. J.: Sox10 mutation disrupts neural crest development in Dom Hirschsprung mouse model. Nature Genet. 18: 60-64, 1998.
[4225] 1419. Stock, D. W.; Buchanan, A. V.; Zhao, Z.; Weiss, K. M.: Numerous members of the Sox family of HMG box-containing genes are expressed in developing mouse teeth. Genomics 37: 234-237, 1996.
[4226] 1420. Touraine, R. L.; Attie-Bitach, T.; Manceau, E.; Korsch, E.; Sarda, P.; Pingault, V.; Encha-Razavi, F.; Pelet, A.; Auge, J.; Nivelon-Chevallier, A.; Holschneider, A. M.; Munnes, M.; Doerfler, W.; Goossens, M.; Munnich, A.; Vekemans, M.; Lyonnet, S.: Neurological phenotype in Waardenburg syndrome type 4 correlates with novel SOX10 truncating mutations and expression in developing brain. Am. J. Hum. Genet. 66: 1496-1503, 2000. Note: Erratum: Am. J. Hum. Genet. 66: 2020 only, 2000.
[4227] 1421. Warburg, M.; Tommerup, N.; Vestermark, S.; Parving, A.; Weismann, K.; Russell, B.; Thomsen, H. K.: The Yemenite deaf-blind hypopigmentation syndrome: a new oculo-dermato-auditory syndrome. Ophthal. Paediat. Genet. 11: 201-207, 1990.
[4228] 1422. Wright, E. M.; Snopek, B.; Koopman, P.: Seven new members of the Sox gene family expressed during mouse development. Nucleic Acids Res. 21: 744 only, 1993.
[4229] 1423. Jay, P.; Goze, C.; Marsollier, C.; Taviaux, S.; Hardelin, J.-P.; Koopman, P.; Berta, P.: The human SOX11 gene: cloning, chromosomal assignment and tissue expression. Genomics 29: 541-545, 1995.
[4230] 1424. Laudet, V.; Stehelin, D.; Clevers, H.: Ancestry and diversity of the HMG box superfamily. Nucleic Acids Res. 21: 2493-2501, 1993.
[4231] 1425. Benson, K. F.; Horwitz, M.; Wolff, J.; Friend, K.; Thompson, E.; White, S.; Richards, R. I.; Raskind, W. H.; Bird, T. D.: CAG repeat expansion in autosomal dominant familial spastic paraparesis: novel expansion in a subset of patients. Hum. Molec. Genet. 7: 1779-1786, 1998.
[4232] 1426. Burger, J.; Fonknechten, N.; Hoeltzenbein, M.; Neumann, L.; Bratanoff, E.; Hazan, J.; Reis, A.: Hereditary spastic paraplegia caused by mutations in the SPG4 gene. Europ. J. Hum. Genet. 8: 771-776, 2000.
[4233] 1427. Burger, J.; Metzke, H.; Paternotte, C.; Schilling, F.; Hazan, J.; Reis, A.: Autosomal dominant spastic paraplegia with anticipation maps to a 4-cM interval on chromosome 2p21-p24 in a large German family. Hum. Genet. 98: 371-375, 1996.
[4234] 1428. Errico, A.; Ballabio, A.; Rugarli, E. I.: Spastin, the protein mutated in autosomal dominant hereditary spastic paraplegia, is involved in microtubule dynamics. Hum. Molec. Genet. 11: 153-163, 2002.
[4235] 1429. Fonknechten, N.; Mavel, D.; Byrne, P.; Davoine, C.-S.; Cruaud, C.; Boentsch, D.; Samson, D.; Coutinho, P.; Hutchinson, M.; McMonagle, P.; Burgunder, J.-M.; Tartaglione, A.; and 10 others: Spectrum of SPG4 mutations in autosomal dominant spastic paraplegia. Hum. Molec. Genet. 9: 637-644, 2000.
[4236] 1430. Hazan, J.; Davoine, C. S.; Mavel, D.; Fonknechten, N.; Paternotte, C.; Fizames, C.; Cruaud, C.; Samson, D.; Muselet, D.; Vega-Czamy, N.; Brice, A.; Gyapay, G.; Heilig, R.; Fontaine, B.; Weissenbach, J.: A fine integrated map of the SPG4 locus excludes an expanded CAG repeat in chromosome 2p-linked autosomal dominant spastic paraplegia. Genomics 60: 309-319, 1999.
[4237] 1431. Hazan, J.; Fonknechten, N.; Mavel, D.; Paternotte, C.; Samson, D.; Artiguenave, F.; Davoine, C.-S.; Cruaud, C.; Durr, A.; Wincker, P.; Brottier, P.; Cattolico, L.; Barbe, V.; Burgunder, J.-M.; Prud'homme, J.-F.; Brice, A.; Fontaine, B.; Heilig, R.; Weissenbach, J.: Spastin, a new AAA protein, is altered in the most frequent form of autosomal dominant spastic paraplegia. Nature Genet. 23: 296-303, 1999.
[4238] 1432. Lindsey, J. C.; Lusher, M. E.; McDermott, C. J.; White, K. D.; Reid, E.; Rubinsztein, D.C.; Bashir, R.; Hazan, J.; Shaw, P. J.; Bushby, K. M. D.: Mutation analysis of the spastin gene (SPG4) in patients with hereditary spastic paraplegia. J. Med. Genet. 37: 759-765, 2000.
[4239] 1433. Nielsen, J. E.; Koefoed, P.; Abell, K.; Hasholt, L.; Eiberg, H.; Fenger, K.; Niebuhr, E.; Sorensen, S. A.: CAG repeat expansion in autosomal dominant pure spastic paraplegia linked to chromosome 2p21-p24. Hum. Molec. Genet. 6: 1811-1816, 1997.
[4240] 1434. Santorelli, F. M.; Patrono, C.; Fortini, D.; Tessa, A.; Comanducci, G.; Bertini, E.; Pierallini, A.; Amabile, G. A.; Casali, C.: Intrafamilial variability in hereditary spastic paraplegia associated with an SPG4 gene mutation. Neurology 55: 702-705, 2000.
[4241] 1435. Sauter, S.; Miterski, B.; Klimpe, S.; Bonsch, D.; Schols, L.; Visbeck, A.; Papke, T.; Hopf, H. C.; Engel, W.; Deufel, T.; Epplen, J. T.; Neesen, J.: Mutation analysis of the spastin gene (SPG4) in patients in Germany with autosomal dominant hereditary spastic paraplegia. Hum. Mutat. 20: 127-132, 2002.
[4242] 1436. Svenson, I. K.; Ashley-Koch, A. E.; Gaskell, P. C.; Riney, T. J.; Cumming, W. J. K.; Kingston, H. M.; Hogan, E. L.; Boustany, R.-M. N.; Vance, J. M.; Nance, M. A.; Pericak-Vance, M. A.; Marchuk, D. A.: Identification and expression analysis of spastin gene mutations in hereditary spastic paraplegia. Am. J. Hum. Genet. 68: 1077-1085, 2001.
[4243] 1437. Svenson, I. K.; Ashley-Koch, A. E.; Pericak-Vance, M. A.; Marchuk, D. A.: A second leaky splice-site mutation in the spastin gene. (Letter) Am. J. Hum. Genet. 69: 1407-1409, 2001.
[4244] 1438. Hughes, K. A.; Hurlstone, A. F. L.; Tobias, E. S.; McFarlane, R.; Black, D. M.: Absence of ST7 mutations in tumor-derived cell lines and tumors. Nature Genet. 29: 380-381, 2001.
[4245] 1439. Thomas, N. A.; Choong, D. Y. H.; Jokubaitis, V. J.; Neville, P. J.; Campbell, I. G.: Mutation of the ST7 tumor suppressor gene on 7q31.1 is rare in breast, ovarian and colorectal cancers. Nature Genet. 29: 379-380, 2001.
[4246] 1440. Vincent, J. B.; Herbrick, J.-A.; Gurling, H. M. D.; Bolton, P. F.; Roberts, W.; Scherer, S. W.: Identification of a novel gene on chromosome 7q31 that is interrupted by a translocation breakpoint in an autistic individual. Am. J. Hum. Genet. 67: 510-514, 2000.
[4247] 1441. Zenklusen, J. C.; Conti, C. J.; Green, E. D.: Mutational and functional analyses reveal that ST7 is a highly conserved tumor-suppressor gene on human chromosome 7q31. Nature Genet. 27: 392-398, 2001.
[4248] 1442. Zenklusen, J. C.; Rodriguez, L. V.; LaCava, M.; Wang, Z.; Goldstein, L. S.; Conti, C. J.: Novel susceptibility locus for mouse hepatomas: evidence for a conserved tumor suppressor gene. Genome Res. 6: 1070-1076, 1996.
[4249] 1443. Zenklusen, J. C.; Weitzel, J. N.; Ball, H. G.; Conti, C. J.: Allelic loss at 7q31.1 in human primary ovarian carcinomas suggests the existence of a tumor suppressor gene. Oncogene 11: 359-363, 1995.
[4250] 1444. Bose, H. S.; Pescovitz, O. H.; Miller, W. L.: Spontaneous feminization in a 46,XX female patient with congenital lipoid adrenal hyperplasia due to a homozygous frameshift mutation in the steroidogenic acute regulatory protein. J. Clin. Endocr. Metab. 82: 1511-1515, 1997.
[4251] 1445. Bose, H. S.; Sato, S.; Aisenberg, J.; Shalev, S. A.; Matsuo, N.; Miller, W. L.: Mutations in the steroidogenic acute regulatory protein (StAR) in six patients with congenital lipoid adrenal hyperplasia. J. Clin. Endocr. Metab. 85: 3636-3639, 2000.
[4252] 1446. Bose, H. S.; Sugawara, T.; Strauss, J. F., III; Miller, W. L.: The pathophysiology and genetics of congenital lipoid adrenal hyperplasia. New Eng. J. Med. 335: 1870-1878, 1996.
[4253] 1447. Calvo, R. M.; Asuncion, M.; Telleria, D.; Sancho, J.; Millan, J. L. S.; Escobar-Morreale, H. F.: Screening for mutations in the steroidogenic acute regulatory protein and steroidogenic factor-1 genes, and in CYP11A and dosage-sensitive sex reversal-adrenal hypoplasia gene on the X chromosome, gene-1 (DAX-1), in hyperandrogenic hirsute women. J. Clin. Endocr. Metab. 86: 1746-1749, 2001.
[4254] 1448. Caron, K. M.; Soo, S.-C.; Wetsel, W. C.; Stocco, D. M.; Clark, B. J.; Parker, K. L.: Targeted disruption of the mouse gene encoding steroidogenic acute regulatory protein provides insights into congenital lipoid adrenal hyperplasia. Proc. Nat. Acad. Sci. 94: 11540-11545, 1997.
[4255] 1449. Katsumata, N.; Kawada, Y.; Yamamoto, Y.; Noda, M.; Nimura, A.; Horikawa, R.; Tanaka, T.: A novel compound heterozygous mutation in the steroidogenic acute regulatory protein gene in a patient with congenital lipoid adrenal hyperplasia. J. Clin. Endocr. Metab. 84: 3983-3987, 1999.
[4256] 1450. Korsch, E.; Peter, M.; Hiort, O.; Sippell, W. G.; Ure, B. M.; Hauffa, B. P.; Bergmann, M.: Gonadal histology with testicular carcinoma in situ in a 15-year-old 46,XY female patient with a premature termination in the steroidogenic acute regulatory protein causing congenital lipoid adrenal hyperplasia. J. Clin. Endocr. Metab. 84: 1628-1632, 1999.
[4257] 1451. Lin, D.; Sugawara, T.; Strauss, J. F., III; Clark, B. J.; Stocco, D. M.; Saenger, P.; Rogol, A.; Miller, W. L.: Role of steroidogenic acute regulatory protein in adrenal and gonadal steroidogenesis. Science 267: 1828-1831, 1995.
[4258] 1452. Nakae, J.; Tajima, T.; Sugawara, T.; Arakane, F.; Hanaki, K.; Hotsubo, T.; Igarashi, N.; Igarashi, Y.; Ishii, T.; Koda, N.; Kondo, T.; Kohno, H.; Nakagawa, Y.; Tachibana, K.; Takeshima, Y.; Tsubouchi, K.; Strauss, J. F., III; Fujieda, K.: Analysis of the steroidogenic acute regulatory protein (StAR) gene in Japanese patients with congenital lipoid adrenal hyperplasia. Hum. Molec. Genet. 6: 571-576, 1997.
[4259] 1453. Okuyama, E.; Nishi, N.; Onishi, S.; Itoh, S.; Ishii, Y.; Miyanaka, H.; Fujita, K.; Ichikawa, Y.: A novel splicing junction mutation in the gene for the steroidogenic acute regulatory protein causes congenital lipoid adrenal hyperplasia. J. Clin. Endocr. Metab. 82: 2337-2342, 1997.
[4260] 1454. Sugawara, T.; Holt, J. A.; Driscoll, D.; Strauss, J. F., III; Lin, D.; Miller, W. L.; Patterson, D.; Clancy, K. P.; Hart, I. M.; Clark, B. J.; Stocco, D. M.: Human steroidogenic acute regulatory protein: functional activity in COS-1 cells, tissue-specific expression, and mapping of the structural gene to 8p11.2 and a pseudogene to chromosome 13. Proc. Nat. Acad. Sci. 92: 4778-4782, 1995.
[4261] 1455. Tee, M.-K.; Lin, D.; Sugawara, T.; Holt, J. A.; Guiguen, Y.; Buckingham, B.; Strauss, J. F., III; Miller, W. L.: T-to-A transversion 11 bp from a splice acceptor site in the human gene for steroidogenic acute regulatory protein causes congenital lipoid adrenal hyperplasia. Hum. Molec. Genet. 4: 2299-2305, 1995.
[4262] 1456. Chang, A. C.-M.; Janosi, J.; Hulsbeek, M.; de Jong, D.; Jeffrey, K. J.; Noble, J. R.; Reddel, R. R.: A novel human cDNA highly homologous to the fish hormone stanniocalcin. Molec. Cell. Endocr. 112: 241-247, 1995.
[4263] 1457. Chang, A. C.-M.; Jeffrey, K. J.; Tokutake, Y.; Shimamoto, A.; Neumann, A. A.; Dunham, M. A.; Cha, J.; Sugawara, M.; Furuichi, Y.; Reddel, R. R.: Human stanniocalcin (STC): genomic structure, chromosomal localization, and the presence of CAG trinucleotide repeats. Genomics 47: 393-398, 1998.
[4264] 1458. Jellinek, D. A.; Chang, A. C.; Larsen, M. R.; Wang, X.; Robinson, P. J.; Reddel, R. R.: Stanniocalcin 1 and 2 are secreted as phosphoproteins from human fibrosarcoma cells. Biochem. J. 350: 453-461, 2000.
[4265] 1459. Olsen, H. S.; Cepeda, M. A.; Zhang, Q.-Q.; Rosen, C. A.; Vozzolo, B. L.; Wagner, G. F.: Human stanniocalcin: a possible hormonal regulator of mineral metabolism. Proc. Nat. Acad. Sci. 93: 1792-1796, 1996.
[4266] 1460. Varghese, R.; Wong, C. K. C.; Deol, H.; Wagner, G. F.; DiMattia, G. E.: Comparative analysis of mammalian stanniocalcin genes. Endocrinology 139: 4714-4725, 1998.
[4267] 1461. Wagner, G. F.; Guiraudon, C. C.; Milliken, C.; Copp, D. H.: Immunological and biological evidence for a stanniocalcin-like hormone in human kidney. Proc. Nat. Acad. Sci. 92: 1871-1875, 1995.
[4268] 1462. Zhang, K.; Lindsberg, P. J.; Tatlisumak, T.; Kaste, M.; Olsen, H. S.; Andersson, L. C.: Stanniocalcin: a molecular guard of neurons during cerebral ischemia. Proc. Nat. Acad. Sci. 97: 3637-3642, 2000.
[4269] 1463. Zhang, K.; Westberg, J. A.; Paetau, A.; von Boguslawsky, K.; Lindsberg, P.; Erlander, M.; Guo, H.; Su, J.; Olsen, H. S.; Andersson, L. C.: High expression of stanniocalcin in differentiated brain neurons. Am. J. Path. 153: 439-445, 1998.
[4270] 1464. Colucci, F.; Schweighoffer, E.; Tomasello, E.; Turner, M.; Ortaldo, J. R.; Vivier, E.; Tybulewicz, V. L. J.; Di Santo, J. P.: Natural cytotoxicity uncoupled from the Syk and ZAP-70 intracellular kinases. Nature Immun. 3: 288-294, 2002.
[4271] 1465. Coopman, P. J. P.; Do, M. T. H.; Barth, M.; Bowden, E. T.; Hayes, A. J.; Basyuk, E.; Blancato, J. K.; Vezza, P. R.; McLeskey, S. W.; Mangeat, P. H.; Mueller, S.C.: The Syk tyrosine kinase suppresses malignant growth of human breast cancer cells. Nature 406: 742-747, 2000.
[4272] 1466. Inatome, R.; Yanagi, S.; Takano, T.; Yamamura, H.: A critical role for Syk in endothelial cell proliferation and migration. Biochem. Biophys. Res. Commun. 286: 195-199, 2001.
[4273] 1467. Ku, G.; Malissen, B.; Mattei, M.-G.: Chromosomal location of the Syk and ZAP-70 tyrosine kinase genes in mice and humans. Immunogenetics 40: 300-302, 1994.
[4274] 1468. Mocsai, A.; Zhou, M.; Meng, F.; Tybulewicz, V. L.; Lowell, C. A.: Syk is required for integrin signaling in neutrophils. Immunity 16: 547-558, 2002.
[4275] 1469. Muller, B.; Cooper, L.; Terhorst, C.: Molecular cloning of the human homologue to the pig protein-tyrosine kinase syk. Immunogenetics 39: 359-362, 1994.
[4276] 1470. Taniguchi, T.; Kobayashi, T.; Kondo, J.; Takahashi, K.; Nakamura, H.; Suzuki, J.; Nagai, K.; Yamada, T.; Nakamura, S.; Yamamura, H.: Molecular cloning of a porcine gene syk that encodes a 72-kDa protein-tyrosine kinase showing high susceptibility to proteolysis. J. Biol. Chem. 266: 15790-15796, 1991.
[4277] 1471. Toyabe, S.-I.; Watanabe, A.; Harada, W.; Karasawa, T.; Uchiyama, M.: Specific immunoglobulin E responses in ZAP-70-deficient patients are mediated by Syk-dependent T-cell receptor signalling. Immunology 103: 164-171, 2001.
[4278] 1472. Zioncheck, T. F.; Harrison, M. L.; Isaacson, C. C.; Geahlen, R. L.: Generation of an active protein-tyrosine kinase from lymphocytes by proteolysis. J. Biol. Chem. 263: 19195-19202, 1988.
[4279] 1473. Janz, R.; Sudhof, T. C.: Cellugyrin, a novel ubiquitous form of synaptogyrin that is phosphorylated by pp60(c-src). J. Biol. Chem. 273: 2851-2857, 1998.
[4280] 1474. Kedra, D.; Pan, H.-Q.; Seroussi, E.; Fransson, I.; Guilbaud, C.; Collins, J. E.; Dunham, I.; Blennow, E.; Roe, B. A.; Piehl, F.; Dumanski, J. P.: Characterization of the human synaptogyrin gene family. Hum. Genet. 103: 131-141, 1998.
[4281] 1475. Weinstat-Saslow, D. L.; Germino, G. G.; Somlo, S.; Reeders, S. T.: A transducin-like gene maps to the autosomal dominant polycystic kidney disease gene region. Genomics 18: 709-711, 1993.
[4282] 1476. Breschel, T. S.; McInnis, M. G.; Margolis, R. L.; Sirugo, G.; Corneliussen, B.; Simpson, S. G.; McMahon, F. J.; MacKinnon, D. F.; Xu, J. F.; Pleasant, N.; Huo, Y.; Ashworth, R. G.; Grundstrom, C.; Grundstrom, T.; Kidd, K. K.; DePaulo, J. R.; Ross, C. A.: A novel, heritable, expanding CTG repeat in an intron of the SEF2-1 gene on chromosome 18q21.1. Hum. Molec. Genet. 6: 1855-1863, 1997.
[4283] 1477. Castrop, J.; van Norren, K.; Clevers, H.: A gene family of HMG-box transcription factors with homology to TCF-1. Nucleic Acids Res. 20: 611 only, 1992.
[4284] 1478. Duval, A.; Busson-Leconiat, M.; Berger, R.; Hamelin, R.: Assignment of the TCF-4 (TCF7L2) to human chromosome band 10q25.3. Cytogenet. Cell Genet. 88: 264-265, 2000.
[4285] 1479. Corneliussen, B.; Thornell, A.; Hallberg, B.; Grundstrom, T.: Helix-loop-helix transcriptional activators bind to a sequence in glucocorticoid response elements of retrovirus enhancers. J. Virol. 65: 6084-6093, 1991.
[4286] 1480. Duval, A.; Gayet, J.; Zhou, X.-P.; Iacopetta, B.; Thomas, G.; Hamelin, R.: Frequent frameshift mutations of the TCF-4 gene in colorectal cancers with microsatellite instability. Cancer Res. 59: 4213-4215, 1999.
[4287] 1481. Henthorn, P.; Kiledjian, M.; Kadesch, T.: Two distinct transcription factors that bind the immunoglobulin enhancer mu-E5/kappa-E2 motif. Science 247: 467-470, 1990.
[4288] 1482. Henthorn, P.; McCarrick-Walmsley, R.; Kadesch, T.: Sequence of the cDNA encoding ITF-2, a positive-acting transcription factor. Nucleic Acids Res. 18: 678, 1990.
[4289] 1483. Duval, A.; Rolland, S.; Tubacher, E.; Bui, H.; Thomas, G.; Hamelin, R.: The human T-cell transcription factor-4 gene: structure, extensive characterization of alternative splicings, and mutational analysis in colorectal cancer cell lines. Cancer Res. 60: 3872-3879, 2000.
[4290] 1484. Korinek, V.; Barker, N.; Moerer, P.; van Donselaar, E.; Huls, G.; Peters, P. J.; Clevers, H.: Depletion of epithelial stem-cell compartments in the small intestine of mice lacking Tcf-4. Nature Genet. 19: 379-383, 1998.
[4291] 1485. Pscherer, A.; Dorflinger, U.; Kirfel, J.; Gawlas, K.; Ruschoff, J.; Buettner, R.; Schule, R.: The helix-loop-helix transcription factor SEF-2 regulates the activity of a novel initiator element in the promoter of the human somatostatin receptor II gene. EMBO J. 15: 6680-6690, 1996.
[4292] 1486. Korinek, V.; Barker, N.; Morin, P. J.; van Wichen, D.; de Weger, R.; Kinzler, K. W.; Vogelstein, B.; Clevers, H.: Constitutive transcriptional activation by a beta-catenin-Tcf complex in APC−/− colon carcinoma. Science 275: 1784-1787, 1997.
[4293] 1487. Morin, P. J.; Sparks, A. B.; Korinek, V.; Barker, N.; Clevers, H.; Vogelstein, B.; Kinzler, K. W.: Activation of beta-catenin-Tcf signaling in colon cancer by mutations in beta-catenin or APC. Science 275: 1787-1790, 1997.
[4294] 1488. Rodova, M.; Islam, M. R.; Maser, R. L.; Calvet, J. P.: The polycystic kidney disease-1 promoter is a target of the beta-catenin/T-cell factor pathway. J. Biol. Chem. 277: 29577-29583, 2002.
[4295] 1489. Meckelein, B.; Rohan de Silva, H. A.; Roses, A. D.; Rao, P. N.; Pettenati, M. J.; Xu, P.-T.; Hodge, R.; Glucksman, M. J.; Abraham, C. R.: Human endopeptidase (THOP1) is localized on chromosome 19 within the linkage region for the late-onset Alzheimer disease AD2 locus. Genomics 31: 246-249, 1996.
[4296] 1490. Papastoitsis, G.; Siman, R.; Scott, R.; Abraham, C. R.: Identification of a metalloprotease from Alzheimer's disease brain able to degrade the beta-amyloid precursor protein and generate amyloidogenic fragments. Biochemistry 33: 192-199, 1994.
[4297] 1491. Torres, M. P.; Prange, C.; Lennon, G.: Human endopeptidase 24.15 (THOP1) is localized on chromosome 19p13.3 and is excluded from the linkage region for late-onset Alzheimer disease. Genomics 53: 239-240, 1998.
[4298] 1492. Beckstead, R.; Ortiz, J. A.; Sanchez, C.; Prokopenko, S. N.; Chambon, P.; Losson, R.; Bellen, H. J.: Bonus, a Drosophila homolog of TIF1 proteins, interacts with nuclear receptors and can inhibit beta-FTZ-F1-dependent transcription. Molec. Cell 7: 753-765, 2001.
[4299] 1493. Klugbauer, S.; Rabes, H. M.: The transcription coactivator HTIF1 and a related protein are fused to the RET receptor tyrosine kinase in childhood papillary thyroid carcinomas. Oncogene 18: 4388-4393, 1999.
[4300] 1494. Le Douarin, B.; Zechel, C.; Garnier, J.-M.; Lutz, Y.; Tora, L.; Pierrat, B.; Heery, D.; Gronemeyer, H.; Chambon, P.; Losson, R.: The N-terminal part of TIF1, a putative mediator of the ligand-dependent activation function (AF-2) of nuclear receptors, is fused to B-raf in the oncogenic protein T18. EMBO J. 14: 2020-2033, 1995.
[4301] 1495. Thenot, S.; Henriquet, C.; Rochefort, H.; Cavailles, V.: Differential interaction of nuclear receptors with the putative human transcriptional coactivator hTIF1. J. Biol. Chem. 272: 12062-12068, 1997.
[4302] 1496. Venturini, L.; You, J.; Stadler, M.; Galien, R.; Lallemand, V.; Koken, M. H. M.; Maffei, M. G.; Ganser, A.; Chambon, P.; Losson, R.; de The, H.: TIF1-gamma, a novel member of the transcriptional intermediary factor 1 family. Oncogene 18: 1209-1217, 1999.
[4303] 1497. Zhong, S.; Delva, L.; Rachez, C.; Cenciarelli, C.; Gandini, D.; Zhang, H.; Kalantry, S.; Freedman, L. P.; Pandolfi, P. P.: A RA-dependent, tumour-growth suppressive transcription complex is the target of the PML-RAR-alpha and T18 oncoproteins. Nature Genet. 23: 287-295, 1999.
[4304] 1498. Apte, S. S.; Mattei, M.-G.; Olsen, B. R.: Cloning of the cDNA encoding human tissue inhibitor of metalloproteinases-3 (TIMP-3) and mapping of the TIMP3 gene to chromosome 22. Genomics 19: 86-90, 1994.
[4305] 1499. Ayyagari, R.; Griesinger, I. B.; Bingham, E.; Lark, K. K.; Moroi, S. E.; Sieving, P. A.: Autosomal dominant hemorrhagic macular dystrophy not associated with the TIMP3 gene. Arch. Ophthal. 118: 85-92, 2000.
[4306] 1500. Carrero-Valenzuela, R. D.; Klein, M. L.; Weleber, R. G.; Murphey, W. H.; Litt, M.: Sorsby fundus dystrophy: a family with the ser181cys mutation of the tissue inhibitor of metalloproteinases 3. Arch. Ophthal. 114: 737-738, 1996.
[4307] 1501. Felbor, U.; Stohr, H.; Amann, T.; Schonherr, U.; Weber, B. H. F.: A novel ser156cys mutation in the tissue inhibitor of metalloproteinase-3 (TIMP3) in Sorsby's fundus dystrophy with unusual clinical features. Hum. Molec. Genet. 4: 2415-2416, 1995.
[4308] 1502. Felbor, U.; Suvanto, E. A.; Forsius, H. R.; Eriksson, A. W.; Weber, B. H. F.: Autosomal recessive Sorsby fundus dystrophy revisited: molecular evidence for dominant inheritance. Am. J. Hum. Genet. 60: 57-62, 1997.
[4309] 1503. Forsius, H. R.; Eriksson, A. W.; Suvanto, E. A.; Alanko, H. I.: Pseudoinflammatory fundus dystrophy with autosomal recessive inheritance. Am. J. Ophthal. 94: 634-649, 1982.
[4310] 1504. Langton, K. P.; Barker, M. D.; McKie, N.: Localization of the functional domains of human tissue inhibitor of metalloproteinases-3 and the effects of a Sorsby's fundus dystrophy mutation. J. Biol. Chem. 273: 16778-16781, 1998.
[4311] 1505. Langton, K. P.; McKie, N.; Curtis, A.; Goodship, J. A.; Bond, P. M.; Barker, M. D.; Clarke, M.: A novel tissue inhibitor of metalloproteinases-3 mutation reveals a common molecular phenotype in Sorsby's fundus dystrophy. J. Biol. Chem. 275: 27027-27031, 2000.
[4312] 1506. Osman, M.; Tortorella, M.; Londei, M.; Quaratino, S.: Expression of matrix metalloproteinases and tissue inhibitors of metalloproteinases define the migratory characteristics of human monocyte-derived dendritic cells. Immunology 105: 73-82, 2002.
[4313] 1507. Stohr, H.; Roomp, K.; Felbor, U.; Weber, B. H. F.: Genomic organization of the human tissue inhibitor of metalloproteinases-3 (TIMP3). Genome Res. 5: 483-487, 1995.
[4314] 1508. Weber, B. H. F.; Vogt, G.; Pruett, R. C.; Stohr, H.; Felbor, U.: Mutations in the tissue inhibitor metalloproteinases-3 (TIMP3) in patients with Sorsby's fundus dystrophy. Nature Genet. 8: 352-356, 1994.
[4315] 1509. Wijesuriya, S. D.; Evans, K.; Jay, M. R.; Davison, C.; Weber, B. H. F.; Bird, A. C.; Bhattacharya, S. S.; Gregory, C. Y.: Sorsby's fundus dystrophy in the British Isles: demonstration of a striking founder effect by microsatellite-generated haplotypes. Genome Res. 6: 92-101, 1996.
[4316] 1510. Wilde, C. G.; Hawkins, P. R.; Coleman, R. T.; Levine, W. B.; Delegeane, A. M.; Okamoto, P. M.; Ito, L. Y.; Scott, R. W.; Seilhamer, J. J.: Cloning and characterization of human tissue inhibitor of metalloproteinases-3. DNA Cell Biol. 13: 711-718, 1994.
[4317] 1511. Audhya, T.; Schlesinger, D. H.; Goldstein, G.: Isolation and complete amino acid sequence of human thymopoietin and splenin. Proc. Nat. Acad. Sci. 84: 3545-3549, 1987.
[4318] 1512. Berger, R.; Theodor, L.; Shoham, J.; Gokkel, E.; Brok-Simoni, F.; Avraham, K. B.; Copeland, N. G.; Jenkins, N. A.; Rechavi, G.; Simon, A. J.: The characterization and localization of the mouse thymopoietin/lamina-associated polypeptide 2 gene and its alternatively spliced products. Genome Res. 6: 361-370, 1996.
[4319] 1513. Harris, C. A.; Andryuk, P. J.; Cline, S. W.; Mathew, S.; Siekierka, J. J.; Goldstein, G.: Structure and mapping of the human thymopoietin (TMPO) gene and relationship of human TMPO beta to rat lamin-associated polypeptide 2. Genomics 28: 198-205, 1995.
[4320] 1514. Hayashizaki, Y.; Shibata, H.; Hirotsune, S.; Sugino, H.; Okazaki, Y.; Sasaki, N.; Hirose, K.; Imoto, H.; Okuizumi, H.; Muramatsu, M.; Komatsubara, H.; Shiroishi, T.; Moriwaki, K.; Katsuki, M.; Hatano, N.; Sasaki, H.; Ueda, T.; Mise, N.; Takagi, N.; Plass, C.; Chapman, V. M.: Identification of an imprinted U2af binding protein related sequence on mouse chromosome 11 using the RLGS method. Nature Genet. 6: 33-40, 1994.
[4321] 1515. Kielkopf, C. L.; Rodionova, N. A.; Green, M. R.; Burley, S. K.: A novel peptide recognition mode revealed by the X-ray structure of a core U2AF35/U2AF65 heterodimer. Cell 106: 595-605, 2001.
[4322] 1516. Lalioti, M. D.; Gos, A.; Green, M. R.; Rossier, C.; Morris, M. A.; Antonarakis, S. E.: The gene for human U2 snRNP auxiliary factor small 35-kDa subunit (U2AF1) maps to the progressive myoclonus epilepsy (EPM1) critical region on chromosome 21q22.3. Genomics 33: 298-300, 1996.
[4323] 1517. Zhang, M.; Zamore, P. D.; Carmo-Fonseca, M.; Lamond, A. I.; Green, M. R.: Cloning and intracellular localization of the U2 small nuclear ribonucleoprotein auxiliary factor small subunit. Proc. Nat. Acad. Sci. 89: 8769-8773, 1992.
[4324] 1518. Pizutti, A.; Novelli, G.; Ratti, A.; Amati, F.; Mari, A.; Calabrese, G.; Nicolis, S.; Silani, V.; Marino, B.; Scarlato, G.; Ottolenghi, S.; Dallapiccola, B.: UFD1L, a developmentally expressed ubiquitination gene, is deleted in CATCH 22 syndrome. Hum. Molec. Genet. 6: 259-265, 1997.
[4325] 1519. Yamagishi, H.; Garg, V.; Matsuoka, R.; Thomas, T.; Srivastava, D.: A molecular pathway revealing a genetic basis for human cardiac and craniofacial defects. Science 283: 1158-1161, 1999.
[4326] 1520. Higashide, T.; Inana, G.: Characterization of the gene for HRG4 (UNC119), a novel photoreceptor synaptic protein homologous to unc-119. Genomics 57: 446-450, 1999.
[4327] 1521. Higashide, T.; McLaren, M. J.; Inana, G.: Localization of HRG4, a photoreceptor protein homologous to unc-119, in ribbon synapse. Invest. Ophthal. Vis. Sci. 39: 690-698, 1998.
[4328] 1522. Higashide, T.; Murakami, A.; McLaren, M. J.; Inana, G.: Cloning of the cDNA for a novel photoreceptor protein. J. Biol. Chem. 271: 1797-1804, 1996.
[4329] 1523. Swanson, D. A.; Chang, J. T.; Campochiaro, P. A.; Zack, D. J.; Valle, D.: Mammalian orthologs of C. elegans unc-119 highly expressed in photoreceptors. Invest. Ophthal. Vis. Sci. 39: 2085-2094, 1998.
[4330] 1524. Stoddart, K. L.; Jermak, C.; Nagaraja, R.; Schlessinger, D.; Bech-Hansen, N. T.: Physical map covering a 2 Mb region in human Xp11.3 distal to DX6849. Gene 227: 111-116, 1999.
[4331] 1525. Swanson, D. A.; Freund, C. L.; Ploder, L.; McInnes, R. R.; Valle, D.: A ubiquitin C-terminal hydrolase gene on the proximal short arm of the X chromosome: implications for X-linked retinal disorders. Hum. Molec. Genet. 5: 533-538, 1996.
[4332] 1526. Perelman, B.; Dafni, N.; Naiman, T.; Eli, D.; Yaakov, M.; Yang Feng, T. L.; Sinha, S.; Weber, G.; Khodaei, S.; Sancar, A.; Dotan, I.; Canaani, D.: Molecular cloning of a novel human gene encoding a 63-kDa protein and its sublocalization within the 11q13 locus. Genomics 41: 397-405, 1997.
[4333] 1527. Teitz, T.; Penner, M.; Eli, D.; Stark, M.; Bakhanashvili, M.; Naiman, T.; Canaani, D.: Isolation by polymerase chain reaction of a cDNA whose product partially complements the ultraviolet sensitivity of xeroderma pigmentosum group C cells. Gene 87: 295-298, 1990.
[4334] 1528. Zeng, Q.; Subramaniam, V. N.; Wong, S. H.; Tang, B. L.; Parton, R. G.; Rea, S.; James, D. E.; Hong, W.: A novel synaptobrevin/VAMP homologous protein (VAMP5) is increased during in vitro myogenesis and present in the plasma membrane. Molec. Biol. Cell 9: 2423-2437, 1998.
[4335] 1529. Bardwick, P. A.; Zvaifler, N.J.; Gill, G. N.; Newman, D.; Greenway, G. D.; Resnick, D. L.: Plasma cell dyscrasia with polyneuropathy, organomegaly, endocrinopathy, M protein, and skin changes: the POEMS syndrome. Report on two cases and a review of the literature. Medicine 59: 311-322, 1980.
[4336] 1530. Basu, S.; Nagy, J. A.; Pal, S.; Vasile, E.; Eckelhoefer, I. A.; Bliss, V. S.; Manseau, E. J.; Dasgupta, P. S.; Dvorak, H. F.; Mukhopadhyay, D.: The neurotransmitter dopamine inhibits angiogenesis induced by vascular permeability factor/vascular endothelial growth factor. Nature Med. 7: 569-574, 2001.
[4337] 1531. Carmellet, P.; Ferreira, V.; Breler, G.; Pollefeyt, S.; Kleckens, L.; Gertsenstein, M.; Fahrig, M.; Vandenhoeck, A.; Harpal, K.; Eberhardt, C.; Declercq, C.; Pawling, J.; Moons, L.; Collen, D.; Risau, W.; Nagy, A.: Abnormal blood vessel development and lethality in embryos lacking a single VEGF allele. Nature 380: 435-439, 1996.
[4338] 1532. Crow, R. S.: Peripheral neuritis in myelomatosis. Brit. Med. J. 2: 802-804, 1956.
[4339] 1533. Dantz, D.; Bewersdorf, J.; Fruehwald-Schultes, B.; Kern, W.; Jelkmann, W.; Born, J.; Fehm, H. L.; Peters, A.: Vascular endothelial growth factor: a novel endocrine defensive response to hypoglycemia. J. Clin. Endocr. Metab. 87: 835-840, 2002.
[4340] 1534. de Fraipont, F.; El Atifi, M.; Gicquel, C.; Bertagna, X.; Chambaz, E. M.; Feige, J. J.: Expression of the angiogenesis markers vascular endothelial growth factor-A, thrombospondin-1, and platelet-derived endothelial cell growth factor in human sporadic adrenocortical tumors: correlation with genotypic alterations. J. Clin. Endocr. Metab. 85: 4734-4741, 2000.
[4341] 1535. Ferrara, N.; Carver-Moore, K.; Chen, H.; Dowd, M.; Lu, L.; O'Shea, K. S.; Powell-Braxton, L.; Hillan, K. J.; Moore, M. W.: Heterozygous embryonic lethality induced by targeted inactivation of the VEGF gene. Nature 380: 439-442, 1996.
[4342] 1536. Folkman, J.: Angiogenesis in cancer, vascular, rheumatoid and other disease. Nature Med. 1: 27-31, 1995.
[4343] 1537. Fukumura, D.; Xavier, R.; Sugiura, T.; Chen, Y.; Park, E.-C.; Lu, N.; Selig, M.; Nielsen, G.; Taksir, T.; Jain, R. K.; Seed, B.: Tumor induction of VEGF promoter activity in stromal cells. Cell 94: 715-725, 1998.
[4344] 1538. Funatsu, H.; Yamashita, H.; Noma, H.; Mimura, T.; Yamashita, T.; Hori, S.: Increased levels of vascular endothelial growth factor and interleukin-6 in the aqueous humor of diabetics with macular edema. Am. J. Ophthal. 133: 70-77, 2002.
[4345] 1539. Gerber, H.-P.; Malik, A. K.; Solar, G. P.; Sherman, D.; Liang, X. H.; Meng, G.; Hong, K.; Marsters, J. C.; Ferrara, N.: VEGF regulates haematopoietic stem cell survival by an internal autocrine loop mechanism. Nature 417: 954-958, 2002.
[4346] 1540. Gerber, H.-P.; Vu, T. H.; Ryan, A. M.; Kowalski, J.; Werb, Z.; Ferrara, N.: VEGF couples hypertrophic cartilage remodeling, ossification and angiogenesis during endochondral bone formation. Nature Med. 5: 623-628, 1999.
[4347] 1541. Giordano, F. J.; Gerber, H.-P.; Williams, S.-P.; VanBruggen, N.; Bunting, S.; Ruiz-Lozano, P.; Gu, Y.; Nath, A. K.; Huang, Y.; Hickey, R.; Dalton, N.; Peterson, K. L.; Ross, J., Jr.; Chien, K. R.; Ferrara, N.: A cardiac myocyte vascular endothelial growth factor paracrine pathway is required to maintain cardiac function. Proc. Nat. Acad. Sci. 98: 5780-5785, 2001.
[4348] 1542. Helmlinger, G.; Endo, M.; Ferrara, N.; Hlatky, L.; Jain, R. K.: Formation of endothelial cell networks. Nature 405: 139-141, 2000.
[4349] 1543. Hofman, P.; van Blijswijk, B. C.; Gaillard, P. J.; Vrensen, G. F. J. M.; Schlingemann, R. O.: Endothelial cell hypertrophy induced by vascular endothelial growth factor in the retina: new insights into the pathogenesis of capillary nonperfusion. Arch. Ophthal. 119: 861-866, 2001.
[4350] 1544. Holash, J.; Maisonpierre, P. C.; Compton, D.; Boland, P.; Alexander, C. R.; Zagzag, D.; Yancopoulos, G. D.; Wiegand, S. J.: Vessel cooption, regression, and growth in tumors mediated by angiopoietins and VEGF. Science 284: 1994-1998, 1999.
[4351] 1545. Jin, K.; Zhu, Y.; Sun, Y.; Mao, X. O.; Xie, L.; Greenberg, D. A.: Vascular endothelial growth factor (VEGF) stimulates neurogenesis in vitro and in vivo. Proc. Nat. Acad. Sci. 99: 11946-11950, 2002.
[4352] 1546. Klein, M.; Vignaud, J.-M.; Hennequin, V.; Toussaint, B.; Bresler, L.; Plenat, F.; Leclere, J.; Duprez, A.; Weryha, G.: Increased expression of the vascular endothelial growth factor is a pejorative prognosis marker in papillary thyroid carcinoma. J. Clin. Endocr. Metab. 86: 656-658, 2001.
[4353] 1547. Mattei, M.-G.; Borg, J.-P.; Rosnet, O.; Marme, D.; Birnbaum, D.: Assignment of vascular endothelial growth factor (VEGF) and placenta growth factor (PIGF) genes to human chromosome 6p12-p21 and 14q24-q31 regions, respectively. Genomics 32: 168-169, 1996.
[4354] 1548. Millauer, B.; Shawver, L. K.; Plate, K. H.; Risau, W.; Ullrich, A.: Glioblastoma growth inhibited in vivo by a dominant-negative Flk-1 mutant. Nature 367: 576-579, 1994.
[4355] 1549. Miralles, G. D.; O'Fallon, J. R.; Talley, N.J.: Plasma-cell dyscrasia with polyneuropathy: the spectrum of POEMS syndrome. New Eng. J. Med. 327: 1919-1923, 1992.
[4356] 1550. Mueller, M. D.; Vigne, J.-L.; Minchenko, A.; Lebovic, D. I.; Leitman, D.C.; Taylor, R. N.: Regulation of vascular endothelial growth factor (VEGF) gene transcription by estrogen receptors alpha and beta. Proc. Nat. Acad. Sci. 97: 10972-10977, 2000.
[4357] 1551. Nakanishi, T.; Sobue, I.; Toyokura, Y.; Nishitani, H.; Kuroiwa, Y.; Satoyoshi, E.; Tsubaki, T.; Igata, A.; Ozaki, Y.: The Crow-Fukase syndrome: a study of 102 cases in Japan. Neurology 34: 712-720, 1984.
[4358] 1552. Niimi, H.; Arimura, K.; Jonosono, M.; Hashiguchi, T.; Kawabata, M.; Osame, M.; Kitajima, I.: VEGF is causative for pulmonary hypertension in a patient with Crow-Fukase (POEMS) syndrome. Intern. Med. 39: 1101-1104, 2000.
[4359] 1553. Oosthuyse, B.; Moons, L.; Storkebaum, E.; Beck, H.; Nuyens, D.; Brusselmans, K.; Van Dorpe, J.; Hellings, P.; Gorselink, M.; Heymans, S.; Theilmeier, G.; Dewerchin, M.; and 20 others: Deletion of the hypoxia-response element in the vascular endothelial growth factor promoter causes motor neuron degeneration. Nature Genet. 28: 131-138, 2001.
[4360] 1554. Poltorak, Z.; Cohen, T.; Sivan, R.; Kandelis, Y.; Spira, G.; Vlodavsky, I.; Keshet, E.; Neufeld, G.: VEGF145, a secreted vascular endothelial growth factor isoform that binds to extracellular matrix. J. Biol. Chem. 272: 7151-7158, 1997.
[4361] 1555. Shimpo, S.: Solitary myeloma causing polyneuritis and endocrine disorders. Nippon Rinsho 26: 2444-2456, 1968.
[4362] 1556. Soker, S.; Takashima, S.; Miao, H. Q.; Neufeld, G.; Klagsbrun, M.: Neuropilin-1 is expressed by endothelial and tumor cells as an isoform-specific receptor for vascular endothelial growth factor. Cell 92: 735-745, 1998.
[4363] 1557. Sone, H.; Kawakami, Y.; Sakauchi, M.; Nakamura, Y.; Takahashi, A.; Shimano, H.; Okuda, Y.; Segawa, T.; Suzuki, H.; Yamada, N.: Neutralization of vascular endothelial growth factor prevents collagen-induced arthritis and ameliorates established disease in mice. Biochem. Biophys. Res. Commun. 281: 562-568, 2001.
[4364] 1558. Springer, M. L.; Chen, A. S.; Kraft, P. E.; Bednarski, M.; Blau, H. M.: VEGF gene delivery to muscle: potential role for vasculogenesis in adults. Molec. Cell 2: 549-558, 1998.
[4365] 1559. Thurston, G.; Suri, C.; Smith, K.; McClain, J.; Sato, T. N.; Yancopoulos, G. D.; McDonald, D. M.: Leakage-resistant blood vessels in mice transgenically overexpressing angiopoietin-1. Science 286: 2511-2514, 1999.
[4366] 1560. Tischer, E.; Mitchell, R.; Hartman, T.; Silva, M.; Gospodarowicz, D.; Fiddes, J. C.; Abraham, J. A.: The human gene for vascular endothelial growth factor: multiple protein forms are encoded through alternative exon splicing. J. Biol. Chem. 266: 11947-11954, 1991.
[4367] 1561. Vincenti, V.; Cassano, C.; Rocchi, M.; Persico, M. G.: Assignment of the vascular endothelial growth factor gene to human chromosome 6p21.3. Circulation 93: 1493-1495, 1996.
[4368] 1562. Watanabe, O.; Maruyama, I.; Arimura, K.; Kitajima, I.; Arimura, H.; Hanatani, M.; Matsuo, K.; Arisato, T.; Osame, M.: Overproduction of vascular endothelial growth factor/vascular permeability factor is causative in Crow-Fukase (POEMS) syndrome. Muscle Nerve 21: 1390-1397, 1998.
[4369] 1563. Wei, M.-H.; Popescu, N.C.; Lerman, M. I.; Merrill, M. J.; Zimonjic, D. B.: Localization of the human vascular endothelial growth factor gene, VEGF, at chromosome 6p12. Hum. Genet. 97: 794-797, 1996.
[4370] 1564. Wong, A. K.; Alfert, M.; Castrillon, D. H.; Shen, Q.; Holash, J.; Yancopoulos, G. D.; Chin, L.: Excessive tumor-elaborated VEGF and its neutralization define a lethal paraneoplastic syndrome. Proc. Nat. Acad. Sci. 98: 7481-7486, 2001.
[4371] 1565. Wulff, C.; Wilson, H.; Largue, P.; Duncan, W. C.; Armstrong, D. G.; Fraser, H. M.: Angiogenesis in the human corpus luteum: localization and changes in angiopoietins, Tie-2, and vascular endothelial growth factor messenger ribonucleic acid. J. Clin. Endocr. Metab. 85: 4302-4309, 2000.
[4372] 1566. Ylikorkala, A.; Rossi, D. J.; Korsisaari, N.; Luukko, K.; Alitalo, K.; Henkemeyer, M.; Makela, T. P.: Vascular abnormalities and deregulation of VEGF in Lkb1-deficient mice. Science 293: 1323-1326, 2001.
[4373] 1567. Angrand, P.-O.; Apiou, F.; Stewart, A. F.; Dutrillaux, B.; Losson, R.; Chambon, P.: NSD3, a new SET domain-containing gene, maps to 8p12 and is amplified in human breast cancer cell lines. Genomics 74: 79-88, 2001.
[4374] 1568. Stec, I.; van Ommen, G.-J. B.; den Dunnen, J. T.: WHSC1L1, on human chromosome 8p11.2, closely resembles WHSC1 and maps to a duplicated region shared with 4p16.3. Genomics 76: 5-8, 2001.
[4375] 1569. Ichimura-Ohshima, Y.; Morii, K.; Ichimura, T.; Araki, K.; Takahashi, Y.; Isobe, T.; Minoshima, S.; Fukuyama, R.; Shimizu, N.; Kuwano, R.: cDNA cloning and chromosome assignment of the gene for human brain 14-3-3 protein eta chain. J. Neurosci. Res. 31: 600-605, 1992.
[4376] 1570. Muratake, T.; Hayashi, S.; Ichikawa, T.; Kumanishi, T.; Ichimura, Y.; Kuwano, R.; Isobe, T.; Wang, Y.; Minoshima, S.; Shimizu, N.; Takahashi, Y.: Structural organization and chromosomal assignment of the human 14-3-3-eta chain gene (YWHAH). Genomics 36: 63-69, 1996.
[4377] 1571. Tommerup, N.; Leffers, H.: Assignment of the human genes encoding 14-3-3 eta (YWHAH) to 22q12, 14-3-3 zeta (YWHAZ) to 2p25.1-p25.2, and 14-3-3 beta (YWHAB) to 20q13.1 by in situ hybridization. Genomics 33: 149-150, 1996.
[4378] 1572. Watanabe, M.; Isobe, T.; Ichimura, T.; Kuwano, R.; Takahashi, Y.; Kondo, H.; Inoue, Y.: Molecular cloning of rat cDNAs for the zeta and theta subtypes of 14-3-3 protein and differential distributions of their mRNAs in the brain. Molec. Brain Res. 25: 113-121, 1994.
[4379] 1573. Yaffe, M. B.; Rittinger, K.; Volinia, S.; Caron, P. R.; Aitken, A.; Leffers, H.; Gamblin, S. J.; Smerdon, S. J.; Cantley, L. C.: The structural basis for 14-3-3:phosphopeptide binding specificity. Cell 91: 961-971, 1997.
[4380] 1574. Zupan, L. A.; Steffens, D. L.; Berry, C. A.; Landt, M.; Gross, R. W.: Cloning and expression of a human 14-3-3 protein mediating phospholipolysis. J. Biol. Chem. 267: 8707-8710, 1992.
[4381] 1575. Cools, J.; Bilhou-Nabera, C.; Wlodarska, I.; Cabrol, C.; Talmant, P.; Bernard, P.; Hagemeijer, A.; Marynen, P.: Fusion of a novel gene, BTL, to ETV6 in acute myeloid leukemias with a t(4;12)(q11-q12;p13). Blood 94: 1820-1824, 1999.
[4382] 1576. Becker-Follmann, J.; Gaa, A.; Bausch, E.; Natt, E.; Scherer, G.; von Deimling, O.: High-resolution mapping of a linkage group on mouse chromosome 8 conserved on human chromosome 16Q. Mammalian Genome 8: 172-177, 1997.
[4383] 1577. Bigg, H. F.; Shi, Y. E.; Liu, Y. E.; Steffensen, B.; Overall, C. M.: Specific, high affinity binding of tissue inhibitor of metalloproteinases-4 (TIMP-4) to the COOH-terminal hemopexin-like domain of human gelatinase A. J. Biol. Chem. 272: 15496-15500, 1997.
[4384] 1578. Brooks, P. C.; Silletti, S.; von Schalscha, T. L.; Friedlander, M.; Cheresh, D. A.: Disruption of angiogenesis by PEX, a noncatalytic metalloproteinase fragment with integrin binding activity. Cell 92: 391-400, 1998.
[4385] 1579. Chen, L. Z.; Harris, P. C.; Apostolou, S.; Baker, E.; Holman, K.; Lane, S. A.; Nancarrow, J. K.; Whitmore, S. A.; Stallings, R. L.; Hildebrand, C. E.; Richards, R. I.; Sutherland, G. R.; Callen, D. F.: A refined physical map of the long arm of human chromosome 16. Genomics 10: 308-312, 1991.
[4386] 1580. Collier, I. E.; Bruns, G. A. P.; Goldberg, G. I.; Gerhard, D. S.: On the structure and chromosome location of the 72- and 92-kDa human type IV collagenase genes. Genomics 9: 429-434, 1991.
[4387] 1581. Corry, D. B.; Rishi, K.; Kanellis, J.; Kiss, A.; Song, L.; Xu, J.; Feng, L.; Werb, Z.; Kheradmand, F.: Decreased allergic lung inflammatory cell egression and increased susceptibility to asphyxiation in MMP2-deficiency. Nature Immun. 3: 347-353, 2002.
[4388] 1582. Devarajan, P.; Johnston, J. J.; Ginsberg, S. S.; Van Wart, H. E.; Berliner, N.: Structure and expression of neutrophil gelatinase cDNA: identity with type IV collagenase from HT1080 cells. J. Biol. Chem. 267: 25228-25232, 1992.
[4389] 1583. Fan, Y.-S.; Eddy, R. L.; Huhtala, P.; Byers, M. G.; Haley, L. L.; Henry, W. M.; Tryggvason, K.; Shows, T. B.: Collagenase type IV (CLG4) is mapped to human chromosome 16q21. (Abstract) Cytogenet. Cell Genet. 51: 996, 1989.
[4390] 1584. Huhtala, P.; Chow, L. T.; Tryggvason, K.: Structure of the human type IV collagenase gene. J. Biol. Chem. 265: 11077-11082, 1990.
[4391] 1585. Huhtala, P.; Eddy, R. L.; Fan, Y. S.; Byers, M. G.; Shows, T. B.; Tryggvason, K.: Completion of the primary structure of the human type IV collagenase preproenzyme and assignment of the gene (CLG4) to the q21 region of chromosome 16. Genomics 6: 554-559, 1990.
[4392] 1586. Irwin, J. C.; Kirk, D.; Gwatkin, R. B. L.; Navre, M.; Cannon, P.; Giudice, L. C.: Human endometrial matrix metalloproteinase-2, a putative menstrual proteinase: hormonal regulation in cultured stromal cells and messenger RNA expression during the menstrual cycle. J. Clin. Invest. 97: 438-447, 1996.
[4393] 1587. Itoh, T.; Tanioka, M.; Yoshida, H.; Yoshioka, T.; Nishimoto, H.; Itohara, S.: Reduced angiogenesis and tumor progression in gelatinase A-deficient mice. Cancer Res. 58: 1048-1051, 1998.
[4394] 1588. Kato, T.; Kure, T.; Chang, J.-H.; Gabison, E. E.; Itoh, T.; Itohara, S.; Azar, D. T.: Diminished corneal angiogenesis in gelatinase A-deficient mice. FEBS Lett. 508: 187-190, 2001.
[4395] 1589. Martignetti, J. A.; Al Aqeel, A.; Al Sewairi, W.; Boumah, C. E.; Kambouris, M.; Al Mayouf, S.; Sheth, K. V.; Al Eid, W.; Dowling, O.; Harris, J.; Glucksman, M. J.; Bahabri, S.; Meyer, B. F.; Desnick, R. J.: Mutation of the matrix metalloproteinase 2 gene (MMP2) causes a multicentric osteolysis and arthritis syndrome. Nature Genet. 28: 261-265, 2001.
[4396] 1590. McQuibban, G. A.; Gong, J.-H.; Tam, E. M.; McCulloch, C. A. G.; Clark-Lewis, I.; Overall, C. M.: Inflammation dampened by gelatinase A cleavage of monocyte chemoattractant protein-3. Science 289: 1202-1206, 2000.
[4397] 1591. Morgunova, E.; Tuuttila, A.; Bergmann, U.; Isupov, M.; Lindqvist, Y.; Schneider, G.; Tryggvason, K.: Structure of human pro-matrix metalloproteinase-2: activation mechanism revealed. Science 284: 1667-1670, 1999.
[4398] 1592. Nagase, H.; Barrett, A. J.; Woessner, J. F., Jr.: Nomenclature and glossary of the matrix metalloproteinases. Matrix Suppl. 1: 421-424, 1992.
[4399] 1593. Vu, T. H.: Don't mess with the matrix. Nature Genet. 28: 202-204, 2001.
[4400] 1594. Corti, O.; Finocchiaro, G.; Rossi, E.; Zuffardi, O.; DiDonato, S.: Molecular cloning of cDNAs encoding human carnitine acetyltransferase and mapping of the corresponding gene to chromosome 9q34.1. Genomics 23: 94-99, 1994.
[4401] 1595. Kalaria, R. N.; Harik, S. I.: Carnitine acetyltransferase activity in the human brain and its microvessels is decreased in Alzheimer's disease. Ann. Neurol. 32: 583-586, 1992.
[4402] 1596. van der Leij, F. R.; Huijkman, N.C. A.; Boomsma, C.; Kuipers, J. R. G.; Bartelds, B.: Genomics of the human carnitine acyltransferase genes. Molec. Genet. Metab. 71: 139-153, 2000.
[4403] 1597. Hattori, M.; Osterfield, M.; Flanagan, J. G.: Regulated cleavage of a contact-mediated axon repellent. Science 289: 1360-1365, 2000.
[4404] 1598. Lunn, C. A.; Fan, X.; Dalie, B.; Miller, K.; Zavodny, P. J.; Narula, S. K.; Lundell, D.: Purification of ADAM 10 from bovine spleen as a TNFalpha convertase. FEBS Lett. 400: 333-335, 1997.
[4405] 1599. Wolfsberg, T. G.; Primakoff, P.; Myles, D. G.; White, J. M.: ADAM, a novel family of membrane proteins containing a disintegrin and metalloprotease domain: multipotential functions in cell-cell and cell-matrix interactions. J. Cell Biol. 131: 275-278, 1995.
[4406] 1600. Yamazaki, K.; Mizui, Y.; Tanaka, I.: Radiation hybrid mapping of human ADAM10 gene to chromosome 15. Genomics 45: 457-459, 1997.
[4407] 1601. Kobayashi, S.; Akiyama, T.; Nata, K.; Abe, M.; Tajima, M.; Shervani, N.J.; Unno, M.; Matsuno, S.; Sasaki, H.; Takasawa, S.; Okamoto, H.: Identification of a receptor for Reg (regenerating gene) protein, a pancreatic beta-cell regeneration factor. J. Biol. Chem. 275: 10723-10726, 2000.
[4408] 1602. Saito, T.; Seki, N.; Yamauchi, M.; Tsuji, S.; Hayashi, A.; Kozuma, S.; Hori, T.: Structure, chromosomal location, and expression profile of EXTR1 and EXTR2, new members of the multiple exostoses gene family. Biochem. Biophys. Res. Commun. 243: 61-66, 1998.
[4409] 1603. Van Hul, W.; Wuyts, W.; Hendrickx, J.; Speleman, F.; Wauters, J.; De Boulle, K.; Van Roy, N.; Bossuyt, P.; Willems, P. J.: Identification of a third EXT-like gene (EXTL3) belonging to the EXT gene family. Genomics 47: 230-237, 1998.
[4410] 1604. Miura, K.; Suzuki, K.; Tokino, T.; Isomura, M.; Inazawa, J.; Matsuno, S.; Nakamura, Y.: Detailed deletion mapping in squamous cell carcinomas of the esophagus narrows a region containing a putative tumor suppressor gene to about 200 kilobases on distal chromosome 9q. Cancer Res. 56: 1629-1634, 1996.
[4411] 1605. Nishiwaki, T.; Daigo, Y.; Kawasoe, T.; Nakamura, Y.: Isolation and mutational analysis of a novel human cDNA, DEC1 (deleted in esophageal cancer 1), derived from the tumor suppressor locus in 9q32. Genes Chromosomes Cancer 27: 169-176, 2000.
[4412] 1606. Adams, P.; Falek, A.; Arnold, J.: Huntington disease in Georgia: age at onset. Am. J. Hum. Genet. 43: 695-704, 1988.
[4413] 1607. Almqvist, E.; Adam, S.; Bloch, M.; Fuller, A.; Welch, P.; Eisenberg, D.; Whelan, D.; Macgregor, D.; Meschino, W.; Hayden, M. R.: Risk reversals in predictive testing for Huntington disease. Am. J. Hum. Genet. 61: 945-952, 1997.
[4414] 1608. Almqvist, E.; Andrew, S.; Theilmann, J.; Goldberg, P.; Zeisler, J.; Drugge, U.; Grandell, U.; Tapper-Persson, M.; Winblad, B.; Hayden, M.; Anvret, M.: Geographical distribution of haplotypes in Swedish families with Huntington's disease. Hum. Genet. 94: 124-128, 1994.
[4415] 1609. Almqvist, E. W.; Elterman, D. S.; MacLeod, P. M.; Hayden, M. R.: High incidence rate and absent family histories in one quarter of patients newly diagnosed with Huntington disease in British Columbia. Clin. Genet. 60: 198-205, 2001.
[4416] 1610. Altherr, M. R.; Wasmuth, J. J.; Seldin, M. F.; Nadeau, J. H.; Baehr, W.; Pittler, S. J.: Chromosome mapping of the rod photoreceptor cGMP phosphodiesterase beta-subunit gene in mouse and human: tight linkage to the Huntington disease region (4p16.3). Genomics 12: 750-754, 1992.
[4417] 1611. Ambrose, C. M.; Duyao, M. P.; Bames, G.; Bates, G. P.; Lin, C. S.; Srinidhi, J.; Baxendale, S.; Hummerich, H.; Lehrach, H.; Altherr, M.; Wasmuth, J.; Buckler, A.; Church, D.; Housman, D.; Berks, M.; Micklem, G.; Durbin, R.; Dodge, A.; Read, A.; Gusella, J.; MacDonald, M. E.: Structure and expression of the Huntington's disease gene: evidence against simple inactivation due to an expanded CAG repeat. Somat. Cell Molec. Genet. 20: 27-38, 1994.
[4418] 1612. Andrew, S. E.; Goldberg, Y. P.; Kremer, B.; Squitieri, F.; Theilmann, J.; Zeisler, J.; Telenius, H.; Adam, S.; Almquist, E.; Anvret, M.; Lucotte, G.; Stoessl, A. J.; Campanella, G.; Hayden, M. R.: Huntington disease without CAG expansion: phenocopies or errors in assignment? Am. J. Hum. Genet. 54: 852-863, 1994.
[4419] 1613. Andrew, S. E.; Goldberg, Y. P.; Kremer, B.; Telenius, H.; Theilmann, J.; Adam, S.; Starr, E.; Squitieri, F.; Lin, B.; Kalchman, M. A.; Graham, R. K.; Hayden, M. R.: The relationship between trinucleotide (CAG) repeat length and clinical features of Huntington's disease. Nature Genet. 4: 398-403, 1993.
[4420] 1614. Aronin, N.; Chase, K.; Young, C.; Sapp, E.; Schwarz, C.; Matta, N.; Kornreich, R.; Landwehrmeyer, B.; Bird, E.; Beal, M. F.; Vonsattel, J.-P.; Smith, T.; Carraway, R.; Boyce, F. M.; Young, A. B.; Penney, J. B.; DiFiglia, M.: CAG expansion affects the expression of mutant huntingtin in Huntington's disease brain. Neuron 15: 1193-1201, 1995.
[4421] 1615. Auerbach, W.; Hurlbert, M. S.; Hilditch-Maguire, P.; Wadghiri, Y. Z.; Wheeler, V. C.; Cohen, S. I.; Joyner, A. L.; MacDonald, M. E.; Turbull, D. H.: The HD mutation causes progressive lethal neurological disease in mice expressing reduced levels of huntingtin. Hum. Molec. Genet. 10: 2515-2523, 2001.
[4422] 1616. Bamford, K. A.; Caine, E. D.; Kido, D. K.; Cox, C.; Shoulson, I.: A prospective evaluation of cognitive decline in early Huntington's disease: functional and radiographic correlates. Neurology 45: 1867-1873, 1995.
[4423] 1617. Barbeau, A.: Parental ascent in the juvenile form of Huntington's chorea. (Letter) Lancet II: 937 only, 1970.
[4424] 1618. Barinaga, M.: An intriguing new lead on Huntington's disease. Science 271: 1233-1234, 1996.
[4425] 1619. Barkley, D. S.; Hardiwidjaja, S.; Menkes, J. H.: Abnormalities in growth of skin fibroblasts of patients with Huntington's disease. Ann. Neurol. 1: 426-430, 1977.
[4426] 1620. Barnes, G. T.; Duyao, M. P.; Ambrose, C. M.; McNeil, S.; Perischetti, F.; Srinidhi, J.; Gusella, J. F.; MacDonald, M. E.: Mouse Huntington's disease gene homolog (Hdh). Somat. Cell Molec. Genet. 20: 87-97, 1994.
[4427] 1621. Bates, G. P.; Mangiarini, L.; Mahal, A.; Davies, S. W.: Transgenic models of Huntington's disease. Hum. Molec. Genet. 6: 1633-1637, 1997.
[4428] 1622. Bates, G. P.; Valdes, J.; Hummerich, H.; Baxendale, S.; Le Paslier, D. L.; Monaco, A. P.; Tagle, D.; MacDonald, M. E.; Altherr, M.; Ross, M.; Brownstein, B. H.; Bentley, D.; Wasmuth, J. J.; Gusella, J. F.; Cohen, D.; Collins, F.; Lehrach, H.: Characterization of a yeast artificial chromosome contig spanning the Huntington's disease gene candidate region. Nature Genet. 1: 180-187, 1992.
[4429] 1623. Baxendale, S.; Abdulla, S.; Elgar, G.; Buck, D.; Berks, M.; Micklem, G.; Durbin, R.; Bates, G.; Brenner, S.; Beck, S.; Lehrach, H.: Comparative sequence analysis of the human and pufferfish Huntington's disease genes. Nature Genet. 10: 67-76, 1995.
[4430] 1624. Behan, P. O.; Bone, I.: Hereditary chorea without dementia. J. Neurol. Neurosurg. Psychiat. 40: 687-691, 1977.
[4431] 1625. Bernardi, G.: The isochore organization of the human genome. Annu. Rev. Genet. 23: 637-661, 1989.
[4432] 1626. Bibb, J. A.; Yan, Z.; Svenningsson, P.; Snyder, G. L.; Pieribone, V. A.; Horiuchi, A.; Nairn, A. C.; Messer, A.; Greengard, P.: Severe deficiencies in dopamine signaling in presymptomatic Huntington's disease mice. Proc. Nat. Acad. Sci. 97: 6809-6814, 2000.
[4433] 1627. Bird, E. D.; Caro, A. J.; Pilling, J. B.: A sex related factor in the inheritance of Huntington's chorea. Ann. Hum. Genet. 37: 255-260, 1974.
[4434] 1628. Bloch, M.; Hayden, M. R.: Predictive testing for Huntington disease in childhood: challenges and implications. Am. J. Hum. Genet. 46: 1-4, 1990.
[4435] 1629. Bloch, M.; Hayden, M. R.: Preclinical testing in Huntington disease. (Letter) Am. J. Med. Genet. 27: 733-734, 1987.
[4436] 1630. Boehnke, M.; Conneally, P. M.; Lange, K.: Two models for a maternal factor in the inheritance of Huntington disease. Am. J. Hum. Genet. 35: 845-860, 1983.
[4437] 1631. Brackenridge, C. J.: The relation of type of initial symptoms and line of transmission to ages at onset and death in Huntington's disease. Clin. Genet. 2: 287-297, 1971.
[4438] 1632. Brackenridge, C. J.: Familial correlations for age at onset and age at death in Huntington's disease. J. Med. Genet. 9: 23-32, 1972.
[4439] 1633. Brackenridge, C. J.: Relationship of parental age of rigidity in Huntington's disease. J. Med. Genet. 11: 136-140, 1974.
[4440] 1634. Brackenridge, C. J.; Case, J.; Chiu, E.; Propert, D. N.; Teltscher, B.; Wallace, D.C.: A linkage study of the loci for Huntington's disease and some common polymorphic markers. Ann. Hum. Genet. 42: 201-211, 1978.
[4441] 1635. Brinkman, R. R.; Mezei, M. M.; Theilmann, J.; Almqvist, E.; Hayden, M. R.: The likelihood of being affected with Huntington disease by a particular age, for a specific CAG size. Am. J. Hum. Genet. 60: 1202-1210, 1997.
[4442] 1636. Brothers, C. R. D.: The history and incidence of Huntington's chorea in Tasmania. Proc. Roy. Aust. Coll. Physicians 4: 48-50, 1949.
[4443] 1637. Buetow, K. H.; Shiang, R.; Yang, P.; Nakamura, Y.; Lathrop, G. M.; White, R.; Wasmuth, J. J.; Wood, S.; Berdahl, L. D.; Leysens, N.J.; Ritty, T. M.; Wise, M. E.; Murray, J. C.: A detailed multipoint map of human chromosome 4 provides evidence for linkage heterogeneity and position-specific recombination rates. Am. J. Hum. Genet. 48: 911-925, 1991.
[4444] 1638. Bundey, S.: New mutations in Huntington's chorea. (Letter) J. Med. Genet. 20: 76-77, 1983.
[4445] 1639. Burke, J. R.; Enghild, J. J.; Martin, M. E.; Jou, Y.-S.; Myers, R. M.; Roses, A. D.; Vance, J. M.; Strittmatter, W. J.: Huntingtin and DRPLA proteins selectively interact with the enzyme GAPDH. Nature Med. 2: 347-350, 1996.
[4446] 1640. Byers, R. K.; Dodge, J. A.: Huntington's chorea in children: report of four cases. Neurology 17: 587-596, 1967.
[4447] 1641. Campbell, A. M. G.; Corner, B. D.; Norman, R. M.; Urich, H.: The rigid form of Huntington's disease. J. Neurol. Neurosurg. Psychiat. 24: 71-77, 1961.
[4448] 1642. Cariello, L.; de Cristofaro, T.; Zanetti, L.; Cuomo, T.; Di Maio, L.; Campanella, G.; Rinaldi, S.; Zanetti, P.; Di Lauro, R.; Varrone, S.: Transglutaminase activity is related to CAG repeat length in patients with Huntington's disease. Hum. Genet. 98: 633-635, 1996.
[4449] 1643. Caro, A.; Haines, S.: The history of Huntington's chorea. Update 91-95, 7/1975.
[4450] 1644. Chan, H. Y. E.; Warrick, J. M.; Gray-Board, G. L.; Paulson, H. L.; Bonini, N. M.: Mechanisms of chaperone suppression of polyglutamine disease: selectivity, synergy and modulation of protein solubility in Drosophila. Hum. Molec. Genet. 9: 2811-2820, 2000.
[4451] 1645. Chandler, J. H.; Reed, T. E.; Dejong, R. N.: Huntington's chorea in Michigan. Neurology 10: 148-153, 1960.
[4452] 1646. Chase, T. N.; Wexler, N. S.; Barbeau, A.: Huntington's Disease. Advances in Neurology. New York: Raven Press (pub.) 23: 1979.
[4453] 1647. Chen, S.; Ferrone, F. A.; Wetzel, R.: Huntington's disease age-of-onset linked to polyglutamine aggregation nucleation. Proc. Nat. Acad. Sci. 99: 11884-11889, 2002.
[4454] 1648. Cheng, S. V.; Martin, G. R.; Nadeau, J. H.; Haines, J. L.; Bucan, M.; Kozak, C. A.; MacDonald, M. E.; Lockyer, J. L.; Ledley, F. D.; Woo, S. L. C.; Lehrach, H.; Gilliam, T. C.; Gusella, J. F.: Synteny on mouse chromosome 5 of homologs for human DNA loci linked to the Huntington disease gene. Genomics 4: 419-426, 1989.
[4455] 1649. Chong, S. S.; Almqvist, E.; Telenius, H.; LaTray, L.; Nichol, K.; Bourdelat-Parks, B.; Goldberg, Y. P.; Haddad, B. R.; Richards, F.; Sillence, D.; Greenberg, C. R.; Ives, E.; Van den Engh, G.; Hughes, M. R.; Hayden, M. R.: Contribution of DNA sequence and CAG size to mutation frequencies of intermediate alleles for Huntington disease: evidence from single sperm analyses. Hum. Molec. Genet. 6: 301-309, 1997.
[4456] 1650. Clarke, G.; Collins, R. A.; Leavitt, B. R.; Andrews, D. F.; Hayden, M. R.; Lumsden, C. J.; McInnes, R. R.: A one-hit model of cell death in inherited neuronal degenerations. Nature 406: 195-199, 2000.
[4457] 1651. Coles, R.; Leggo, J.; Rubinsztein, D.C.: Analysis of the 5-prime upstream sequence of the Huntington's disease (HD) gene shows six new rare alleles which are unrelated to the age at onset of HD. J. Med. Genet. 34: 371-374, 1997.
[4458] 1652. Collins, F. S.; Richards, J. E.; Cole, J. L.; Gilliam, T. C.; Gusella, J. F.: Chromosome jumping from D4S10 (G8) toward the Huntington disease gene. (Abstract) Cytogenet. Cell Genet. 46: 597, 1987.
[4459] 1653. Connarty, M.; Dennis, N. R.; Patch, C.; Macpherson, J. N.; Harvey, J. F.: Molecular re-investigation of patients with Huntington's disease in Wessex reveals a family with dentatorubral and pallidoluysian atrophy. Hum. Genet. 97: 76-78, 1996.
[4460] 1654. Conneally, P. M.: Huntington disease: genetics and epidemiology. Am. J. Hum. Genet. 36: 506-526, 1984.
[4461] 1655. Conneally, P. M.; Haines, J. L.; Tanzi, R. E.; Wexler, N. S.; Penchaszadeh, G. K.; Harper, P. S.; Folstein, S. E.; Cassiman, J. J.; Myers, R. H.; Young, A. B.; Hayden, M. R.; Falek, A.; Tolosa, E. S.; Crespi, S.; Di Maio, L.; Holmgren, G.; Anvret, M.; Kanazawa, I.; Gusella, J. F.: Huntington disease: no evidence for locus heterogeneity. Genomics 5: 304-308, 1989.
[4462] 1656. Craufurd, D.; Dodge, A.; Kerzin-Storrar, L.; Harris, R.: Uptake of presymptomatic predictive testing for Huntington's disease. Lancet II: 603-605, 1989.
[4463] 1657. Critchley, M.: Great Britain and the early history of Huntington's chorea. Advances in Neurology. New York: Raven Press (pub.) 1: 1973.
[4464] 1658. Critchley, M.: The history of Huntington's chorea. (Editorial) Psych. Med. 14: 725-727, 1984.
[4465] 1659. Davies, S. W.; Turmaine, M.; Cozens, B. A.; DiFiglia, M.; Sharp, A. H.; Ross, C. A.; Scherzinger, E.; Wanker, E. E.; Mangiarini, L.; Bates, G. P.: Formation of neuronal intranuclear inclusions underlies the neurological dysfunction in mice transgenic for the HD mutation. Cell 90: 537-548, 1997.
[4466] 1660. Decruyenaere, M.; Evers-Kiebooms, G.; Boogaerts, A.; Cassiman, J.-J.; Cloostermans, T.; Demyttenaere, K.; Dom, R.; Fryns, J.-P.; Van den Berghe, H.: Prediction of psychological functioning one year after the predictive test for Huntington's disease and impact of the test result on reproductive decision making. J. Med. Genet. 33: 737-743, 1996.
[4467] 1661. De Rooij, K. E.; Dorsman, J. C.; Smoor, M. A.; den Dunnen, J. T.; Van Ommen, G.-J. B.: Subcellular localization of the Huntington's disease gene product in cell lines by immunofluorescence and biochemical subcellular fractionation. Hum. Molec. Genet. 5: 1093-1099, 1996.
[4468] 1662. DiFiglia, M.; Sapp, E.; Chase, K. O.; Davies, S. W.; Bates, G. P.; Vonsattel, J. P.; Aronin, N.: Aggregation of huntingtin in neuronal intranuclear inclusions and dystrophic neurites in brain. Science 277: 1990-1993, 1997.
[4469] 1663. Doggett, N. A.; Cheng, J.-F.; Smith, C. L.; Cantor, C. R.: The Huntington disease locus is most likely within 325 kilobases of the chromosome 4p telomere. Proc. Nat. Acad. Sci. 86: 10011-10014, 1989.
[4470] 1664. Dunah, A. W.; Jeong, H.; Griffin, A.; Kim, Y.-M.; Standaert, D. G.; Hersch, S. M.; Mouradian, M. M.; Young, A. B.; Tanese, N.; Krainc, D.: Sp1 and TAFII130 transcriptional activity disrupted in early Huntington's disease. Science 296: 2238-2243, 2002.
[4471] 1665. Durbach, N.; Hayden, M. R.: George Huntington: the man behind the eponym. J. Med. Genet. 30: 406-409, 1993.
[4472] 1666. Dure, L. S., IV; Landwehrmeyer, G. B.; Golden, J.; McNeil, S. M.; Ge, P.; Aizawa, H.; Huang, Q.; Ambrose, C. M.; Duyao, M. P.; Bird, E. D.; DiFiglia, M.; Gusella, J. F.; MacDonald, M. E.; Penney, J. B.; Young, A. B.; Vonsattel, J.-P.: IT15 gene expression in fetal human brain. Brain Res. 659: 33-41, 1994.
[4473] 1667. Duyao, M.; Ambrose, C.; Myers, R.; Novelletto, A.; Persichetti, F.; Frontali, M.; Folstein, S.; Ross, C.; Franz, M.; Abbott, M.; Gray, J.; Conneally, P.; and 30 others: Trinucleotide repeat length instability and age of onset in Huntington's disease. Nature Genet. 4: 387-392, 1993.
[4474] 1668. Duyao, M. P.; Auerbach, A. B.; Ryan, A.; Persichetti, F.; Bames, G. T.; McNeil, S. M.; Ge, P.; Vonsattel, J.-P.; Gusella, J. F.; Joyner, A. L.; MacDonald, M. E.: Inactivation of the mouse Huntington's disease gene homolog Hdh. Science 269: 407-410, 1995.
[4475] 1669. Dyer, R. B.; McMurray, C. T.: Mutant protein in Huntington disease is resistant to proteolysis in affected brain. Nature Genet. 29: 270-278, 2001.
[4476] 1670. Enna, S. J.; Bird, E. D.; Bennett, J. P., Jr.; Bylund, D. B.; Yamamura, H. I.; Iversen, L. L.; Snyder, S. H.: Huntington's chorea: changes in neurotransmitter receptors in the brain. New Eng. J. Med. 294: 1305-1309, 1976.
[4477] 1671. Erickson, R. P.: Chromosomal imprinting and the parent transmission specific variation in expressivity of Huntington disease. (Letter) Am. J. Hum. Genet. 37: 827-829, 1985.
[4478] 1672. Faber, P. W.; Barnes, G. T.; Srinidhi, J.; Chen, J.; Gusella, J. F.; MacDonald, M. E.: Huntingtin interacts with a family of WW domain proteins. Hum. Molec. Genet. 7: 1463-1474, 1998.
[4479] 1673. Falush, D.; Almqvist, E. W.; Brinkmann, R. R.; Iwasa, Y.; Hayden, M. R.: Measurement of mutational flow implies both a high new-mutation rate for Huntington disease and substantial underascertainment of late-onset cases. Am. J. Hum. Genet. 68: 373-385, 2001.
[4480] 1674. Farrer, L. A.; Conneally, P. M.: A genetic model for age at onset in Huntington disease. Am. J. Hum. Genet. 37: 350-357, 1985.
[4481] 1675. Farrer, L. A.; Conneally, P. M.; Yu, P.: The natural history of Huntington disease: possible role of ‘aging genes.’. Am. J. Med. Genet. 18: 115-123, 1984.
[4482] 1676. Farrer, L. A.; Cupples, L. A.; Wiater, P.; Conneally, P. M.; Gusella, J. F.; Myers, R. H.: The normal Huntington disease (HD) allele, or a closely linked gene, influences age at onset of HD. Am. J. Hum. Genet. 53: 125-130, 1993.
[4483] 1677. Ferrante, R. J.; Kowall, N. W.; Beal, M. F.; Richardson, E. P., Jr.; Bird, E. D.; Martin, J. B.: Selective sparing of a class of striatal neurons in Huntington's disease. Science 230: 561-563, 1985.
[4484] 1678. Folstein, S.; Abbott, M.; Moser, R.; Parhad, I.; Clark, A.; Folstein, M.: A phenocopy of Huntington's disease: lacunar infarcts of the corpus striatum. Johns Hopkins Med. J. 148: 104-108, 1981.
[4485] 1679. Folstein, S. E.; Abbott, M. H.; Franz, M. L.; Huang, S.; Chase, G. A.; Folstein, M. F.: Phenotypic heterogeneity in Huntington disease. J. Neurogenet. 1: 175-184, 1984.
[4486] 1680. Folstein, S. E.; Chase, G. A.; Wahl, W. E.; McDonnell, A. M.; Folstein, M. F.: Huntington disease in Maryland: clinical aspects of racial variation. Am. J. Hum. Genet. 41: 168-179, 1987.
[4487] 1681. Folstein, S. E.; Phillips, J. A., III; Meyers, D. A.; Chase, G. A.; Abbott, M. H.; Franz, M. L.; Waber, P. G.; Kazazian, H. H., Jr.; Conneally, P. M.; Hobbs, W.; Tanzi, R.; Faryniarz, A.; Gibbons, K.; Gusella, J.: Huntington's disease: two families with differing clinical features show linkage to the G8 probe. Science 229: 776-779, 1985.
[4488] 1682. Freeman, T. B.; Cicchetti, F.; Hauser, R. A.; Deacon, T. W.; Li, X.-J.; Hersch, S. M.; Nauert, G. M.; Sanberg, P. R.; Kordower, J. H.; Saporta, S.; Isacson, O.: Transplanted fetal striatum in Huntington's disease: phenotypic development and lack of pathology. Proc. Nat. Acad. Sci. 97: 13877-13882, 2000.
[4489] 1683. Froster-Iskenius, U. G.; Hayden, M. R.; Wang, H. S.; Kalousek, D. K.; Horsman, D.; Pfeiffer, R. A.; Schottky, A.; Schwinger, E.: A family with Huntington disease and reciprocal translocation 4;5. Am. J. Hum. Genet. 38: 759-767, 1986.
[4490] 1684. Gellera, C.; Meoni, C.; Castellotti, B.; Zappacosta, B.; Girotti, F.; Taroni, F.; DiDonato, S.: Errors in Huntington disease diagnostic test caused by trinucleotide deletion in the IT15 gene. (Letter) Am. J. Hum. Genet. 59: 475-477, 1996.
[4491] 1685. Gervais, F. G.; Singaraja, R.; Xanthoudakis, S.; Gutekunst, C.-A.; Leavitt, B. R.; Metzler, M.; Hackam, A. S.; Tam, J.; Vaillancourt, J. P.; Houtzager, V.; Rasper, D. M.; Roy, S.; Hayden, M. R.; Nicholson, D. W.: Recruitment and activation of caspase-8 by the huntingtin-interacting protein Hip-1 and a novel partner Hippi. Nature Cell Biol. 4: 95-105, 2002.
[4492] 1686. Gilliam, T. C.; Bucan, M.; MacDonald, M. E.; Zimmer, M.; Haines, J. L.; Cheng, S. V.; Pohl, T. M.; Meyers, R. H.; Whaley, W. L.; Allitto, B. A.; Faryniarz, A.; Wasmuth, J. J.; Frischauf, A.-M.; Conneally, P. M.; Lehrach, H.; Gusella, J. F.: A DNA segment encoding two genes very tightly linked to Huntington's disease. Science 238: 950-952, 1987.
[4493] 1687. Gilliam, T. C.; Tanzi, R. E.; Haines, J. L.; Bonner, T. I.; Faryniarz, A. G.; Hobbs, W. J.; MacDonald, M. E.; Cheng, S. V.; Folstein, S. E.; Conneally, P. M.; Wexler, N. S.; Gusella, J. F.: Localization of the Huntington's disease gene to a small segment of chromosome 4 flanked by D4S10 and the telomere. Cell 50: 565-571, 1987.
[4494] 1688. Giordani, B.; Berent, S.; Boivin, M. J.; Penney, J. B.; Lehtinen, S.; Markel, D. S.; Hollingsworth, Z.; Butterbaugh, G.; Hichwa, R. D.; Gusella, J. F.; Young, A. B.: Longitudinal neuropsychological and genetic linkage analysis of persons at risk for Huntington's disease. Arch. Neurol. 52: 59-64, 1995.
[4495] 1689. Goetz, I.; Roberts, E.; Comings, D. E.: Fibroblasts in Huntington's disease. New Eng. J. Med. 293: 1225-1227, 1975.
[4496] 1690. Goldberg, Y. P.; Andrew, S. E.; Theilmann, J.; Kremer, B.; Squitieri, F.; Telenius, H.; Brown, J. D.; Hayden, M. R.: Familial predisposition to recurrent mutations causing Huntington's disease: genetic risk to sibs of sporadic cases. J. Med. Genet. 30: 987-990, 1993.
[4497] 1691. Goldberg, Y. P.; Kalchman, M. A.; Metzler, M.; Nasir, J.; Zeisler, J.; Graham, R.; Koide, H. B.; O'Kusky, J.; Sharp, A. H.; Ross, C. A.; Jirik, F.; Hayden, M. R.: Absence of disease phenotype and intergenerational stability of the CAG repeat in transgenic mice expressing the human Huntington disease transcript. Hum. Molec. Genet. 5: 177-185, 1996.
[4498] 1692. Goldberg, Y. P.; Nicholson, D. W.; Rasper, D. M.; Kalchman, M. A.; Koide, H. B.; Graham, R. K.; Bromm, M.; Kazemi-Esfarjani, P.; Thornberry, N. A.; Vaillancourt, J. P.; Hayden, M. R.: Cleavage of huntingtin by apopain, a proapoptotic cysteine protease, is modulated by the polyglutamine tract. Nature Genet. 13: 442-449, 1996.
[4499] 1693. Goldberg, Y. P.; Rommens, J. M.; Andrew, S. E.; Hutchinson, G. B.; Lin, B.; Theilmann, J.; Graham, R.; Glaves, M. L.; Starr, E.; McDonald, H.; Nasir, J.; Schappert, K.; Kalchman, M. A.; Clarke, L. A.; Hayden, M. R.: Identification of an Alu retrotransposition event in close proximity to a strong candidate gene for Huntington's disease. Nature 362: 370-373, 1993.
[4500] 1694. Green, H.: Human genetic diseases due to codon reiteration: relationship to an evolutionary mechanism. Cell 74: 955-956, 1993.
[4501] 1695. Greenberg, L. J.; Martell, R. W.; Theilman, J.; Hayden, M. R.; Joubert, J.: Genetic linkage between Huntington disease and the D4S10 locus in South African families: further evidence against non-allelic heterogeneity. Hum. Genet. 87: 701-708, 1991.
[4502] 1696. Grosson, C. L. S.; MacDonald, M. E.; Duyao, M. P.; Ambrose, C. M.; Roffler-Tarlov, S.; Gusella, J. F.: Synteny conservation of the Huntington's disease gene and surrounding loci on mouse chromosome 5. Mammalian Genome 5: 424-428, 1994.
[4503] 1697. Gu, M.; Gash, M. T.; Mann, V. M.; Javoy-Agid, F.; Cooper, J. M.; Schapira, A. H. V.: Mitochondrial defect in Huntington's disease caudate nucleus. Ann. Neurol. 39: 385-389, 1996.
[4504] 1698. Gusella, J.; Tanzi, R. E.; Bader, P. I.; Phelan, M. C.; Stevenson, R.; Hayden, M. R.; Hofman, K. J.; Faryniarz, A. G.; Gibbons, K.: Deletion of Huntington's disease linked G8 (D4S10) locus in Wolf-Hirschhorn syndrome. Nature 318: 75-78, 1985.
[4505] 1699. Gusella, J. F.; Gibbons, K.; Hobbs, W.; Heft, R.; Anderson, M.; Rashtchian, R.; Folstein, S.; Wallace, P.; Conneally, P. M.; Tanzi, R.: The G8 locus linked to Huntington's disease. (Abstract) Am. J. Hum. Genet. 36: 139S, 1984.
[4506] 1700. Gusella, J. F.; McNeil, S.; Persichetti, F.; Srinidhi, J.; Novelletto, A.; Bird, E.; Faber, P.; Vonsattel, J.-P.; Myers, R. H.; MacDonald, M. E.: Huntington's disease. Cold Spring Harbor Symp. Quant. Biol. 61: 615-626, 1996.
[4507] 1701. Gusella, J. F.; Tanzi, R.; Anderson, M. A.; Ottina, K.; Wallace, M.; Conneally, P. M.: Linkage analysis of Huntington's disease using RFLPs. (Abstract) Cytogenet. Cell Genet. 37: 484-485, 1984.
[4508] 1702. Gusella, J. F.; Tanzi, R. E.; Anderson, M. A.; Hobbs, W.; Gibbons, K.; Raschtchian, R.; Gilliam, T. C.; Wallace, M. R.; Wexler, N. S.; Conneally, P. M.: DNA markers for nervous system diseases. Science 225: 1320-1326, 1984.
[4509] 1703. Gusella, J. F.; Wexler, N. S.; Conneally, P. M.; Naylor, S. L.; Anderson, M. A.; Tanzi, R. E.; Watkins, P. C.; Ottina, K.; Wallace, M. R.; Sakaguchi, A. Y.; Young, A. B.; Shoulson, I.; Bonilla, E.; Martin, J. B.: A polymorphic DNA marker genetically linked to Huntington's disease. Nature 306: 234-238, 1983.
[4510] 1704. Gutekunst, C.-A.; Levey, A. I.; Heilman, C. J.; Whaley, W. L.; Yi, H.; Nash, N. R.; Rees, H. D.; Madden, J. J.; Hersch, S. M.: Identification
[4511] 1705. Leytus, S. P.; Loeb, K. R.; Hagen, F. S.; Kurachi, K.; Davie, E. W.: A novel trypsin-like serine protease (hepsin) with a putative transmembrane domain expressed by human liver and hepatoma cells. Biochemistry 27: 1067-1074, 1988.
[4512] 1706. Tsuji, A.; Torres-Rosado, A.; Arai, T.; Le Beau, M. M.; Lemons, R. S.; Chou, S.-H.; Kurachi, K.: Hepsin, a cell membrane-associated protease: characterization, tissue distribution, and gene localization. J. Biol. Chem. 266: 16948-16953, 1991.
[4513] 1707. Wu, Q.; Yu, D.; Post, J.; Halks-Miller, M.; Sadler, J. E.; Morser, J.: Generation and characterization of mice deficient in hepsin, a hepatic transmembrane serine protease. J. Clin. Invest. 101: 321-326, 1998.
   and localization of huntingtin in brain and human lymphoblastoid cell lines with anti-fusion protein antibodies. Proc. Nat. Acad. Sci. 92: 8710-8714, 1995.

What is claimed is:

1. A bioinformatically detectable novel gene encoding substantially pure DNA wherein:
RNA encoded by said bioinformatically detectable novel gene is about 18 to about 24 nucleotides in length, and originates from an RNA precursor, which RNA precursor is about 50 to about 120 nucleotides in length;
a nucleotide sequence of a first half of said RNA precursor is a partial inversed-reversed sequence of a nucleotide sequence of a second half thereof;
a nucleotide sequence of said RNA encoded by said novel gene is a partial inversed-reversed sequence of a nucleotide sequence of a binding site associated with at least one target gene;
said novel gene cannot be detected by either of the following:
a visually discernable whole body phenotype; and
detection of 99.9% of RNA species shorter than 25 nucleotides expressed in a tissue sample; and
a function of said novel gene is bioinformatically deducible.

2. A bioinformatically detectable novel gene encoding substantially pure DNA wherein:
RNA encoded by said bioninformatically detectable novel gene comprises a plurality of RNA sections, each of said RNA sections being about 50 to about 120 nucleotides in length, and comprising an RNA segment, which RNA segment is about 18 to about 24 nucleotides in length;
a nucleotide sequence of a first half of each of said RNA sections encoded by said novel gene is a partial inversed-reversed sequence of nucleotide sequence of a second half thereof;
a nucleotide sequence of each of said RNA segments encoded by said novel gene is a partial inversed-reversed sequence of the nucleotide sequence of a binding site associated with at least one target gene; and
a function of said novel gene is bioinformatically deducible from the following data elements: said nucleotide sequence of said RNA encoded by said novel gene, a nucleotide sequence of said at least one target gene, and function of said at least one target gene.

3. A bioinformatically detectable novel gene encoding substantially pure DNA wherein:
RNA encoded by said bioinformatically detectable novel gene is about 18 to about 24 nucleotides in length, and originates from an RNA precursor, which RNA precursor is about 50 to about 120 nucleotides in length;
a nucleotide sequence of a first half of said RNA precursor is a partial inversed-reversed sequence of a nucleotide sequence of a second half thereof;
a nucleotide sequence of said RNA encoded by said novel gene is a partial inversed-reversed sequence of a nucleotide sequence of a binding site associated with at least one target gene;
a function of said novel gene is modulation of expression of said at least one target gene; and
said at least one target gene does not encode a protein.

4. A bioinformatically detectable novel gene encoding substantially pure DNA wherein:
said bioinformatically detectable novel gene does not encode a protein;
RNA encoded by said bioinformatically detectable novel gene is maternally transferred by a cell to at least one daughter cell of said cell;
a function of said novel gene comprises modulation of a cell type of said daughter cell; and
said modulation is bioinformatically deducible.

5. A bioinformatically detectable novel gene encoding substantially pure DNA wherein:
said bioinformatically detectable novel gene does not encode a protein;
a function of said novel gene is promotion of expression of said at lease one target gene; and
said at least one target gene is bioinformatically deducible.

6. A bioinformatically detectable novel gene according to claim 1 and wherein said function of said novel gene is bioinformatically deducible from the following data elements:
said nucleotide sequence of said RNA encoded by said bioinformatically detectable novel gene,
a nucleotide sequence of said at least one target gene; and
a function of said at least one target gene.

7. A bioinformatically detectable novel gene according to claim 1 and wherein said RNA encoded by said novel gene complementarily binds said binding site associated with said at least one target gene, thereby modulating expression of said at least one target gene.

8. A bioinformatically detectable novel gene according to claim 1 and wherein:
said binding site associated with at least one target gene is located in an untranslated region of RNA encoded by said at least one target gene.

9. A bioinformatically detectable novel gene according to claim 7 and wherein:
said function of said novel gene is selective inhibition of translation of said at least one target gene, which selective inhibition comprises complementary hybridization of said RNA encoded by said novel gene to said binding site.

10. A vector comprising the DNA of claim 1.

11. A method of selectively inhibiting translation of at least one gene, comprising introducing the vector of claim 10 into a cell.

12. A method according to claim 11 and wherein said introducing comprises utilizing RNAi pathway.

13. A gene expression inhibition system comprising:
the vector of claim 10; and
a vector inserter, functional to insert said vector of claim 10 into a cell, thereby selectively inhibiting translation of at least one gene.

14. A probe comprising the DNA of claim 1.

15. A method of selectively detecting expression of at least one gene, comprising using the probe of claim 14.

16. A gene expression detection system comprising:
the probe of claim 14; and
a gene expression detector functional to selectively detect expression of at least one gene.

The application's sequence listing, which the Patent Office published only in electronic form, follows.

SEQUENCE LISTING (1388402 sequences)

SEQ ID NO: 1 - RNA, 81 nt, Human
acuguggaaugccugcggggugauguugauauucuaauggaguuccugcucaaugucaccacagcaccagaauuucgucgu

SEQ ID NO: 2 - RNA, 65 nt, Human
ccaccaguccuugcacuguucugacacuuuccccaggaggaaaacaaguacaaagguuacggugg

SEQ ID NO: 3 - RNA, 119 nt, Human
cggccgccgaguuccgcggcuccgggagcgaagcgcgcaccugugaggcagacggcaccuccugcgaccgucgccgccaccgccgccgccgccgccgggcgccgaggggcuggcgggcg

SEQ ID NO: 4 - RNA, 109 nt, Human
cugcggagcccgcgucgcagcagcccggacaggaagauuggucuggauguggguccggucuuacagucgcgggccaggaugagggcagguugcgacagcgcgcacccgg

SEQ ID NO: 5 - RNA, 90 nt, Human
cugcagccaaguggaggugacugggugaugaauacaauguggaaagcauugauggucagccaggugccuucaccugcuauuuggaugcag

SEQ ID NO: 6 - RNA, 72 nt, Human
cggcgcuuccgcaaguuccugguguuguggcaaacuucgaugagaaugaccccaagaccuuugagggcguug

SEQ ID NO: 7 - RNA, 80 nt, Human
cuucuuaauucuuaauaaagcauuucuguguaaaagggucauuuccaaguacaagaaaaccuccacugaaagcuaagaag

SEQ ID NO: 8 - RNA, 67 nt, Human
augguaguaugagaaccguuugugauaauagaaacccagacugugcuuaaaugugcuagacuaccau

SEQ ID NO: 9 - RNA, 91 nt, Human
gguccgagcgcaggcagaacuugcccuggcccugggucuagggcgcugggcucugaggcugagagcugggugggaagugccuggcggggcc

SEQ ID NO: 10 - RNA, 66 nt, Human
cccagcuugagugaacugcacugugacaagcuugcauguggauccugagaacuucaagcuccuggg

SEQ ID NO: 11 - RNA, 63 nt, Human
gaaggugcugacuuccuugggagaugccauaaagcaccugggaugaucucaaggggcaccuuu

SEQ ID NO: 12 - RNA, 66 nt, Human
gcuggaggagaaacccugggaaggcuccugguugucuacccauggacccagagguucuuugacagc

SEQ ID NO: 13 - RNA, 66 nt, Human
cucuuaggccuaacaugagaucagguaagcaauauagaauaaaaccuuucucuuagccccaaagag

SEQ ID NO: 14 - RNA, 70 nt, Human
gagggaaaguaugcacaguccgugucaggguuagaaaacccugaaagagguaccugaguauagagaacuc

SEQ ID NO: 15 - RNA, 90 nt, Human
cacauauucauacaaaugacuuaguaaucuaauaugagaagugguccuucacuuauauuaggaacuugguaaauauuuguugaaugaaug

SEQ ID NO: 16 - RNA, 77 nt, Human
cuagaguaucaaacauuguuccaguaagaaguucaagaguacauuuagggcuaucuuaagaaauaugaauacuuugg

SEQ ID NO: 17 - RNA, 71 nt, Human
guagaaaaauaagagagugucuuuaaaaaaaauaaucaaaugcuuuuugaaagaccuguucucuucacugc

SEQ ID NO: 18 - RNA, 76 nt, Human
caguucauggaggggauacaagacggaauauuugguagacaauaaaguucacgcaagaagacccuuugguauacug

SEQ ID NO: 19 - RNA, 92 nt, Human
ggaagcuaaaccaggcacaguaacugacaccauguagguugauuauauuuugcaucucccugcaagucuguuuuauguuauuuauagcuucc

SEQ ID NO: 20 - RNA, 80 nt, Human
ugucacugagcgaguacagccccuggaaguggcuuuggaaacauugucuucugcagaggucugugcugggaucuaugaca

SEQ ID NO: 21 - RNA, 82 nt, Human
caaacuaguagacugaugagcuggauugcuuagauugauaacauuuacaaauaggaguccaguugacaugcuauuaauguug

SEQ ID NO: 22 - RNA, 95 nt, Human
gccaauggaauccagguaaaguacaaaaacgccaccuuuuauuguccugucuuauuucucgggaaggaggguucuacuuuacacauuucaugagc

SEQ ID NO: 23 - RNA, 72 nt, Human
agucugaagcuaacugacgauugcagcuaguuuaugauuauaucaguaguuguuccuuaguaagcuagggcu

SEQ ID NO: 24 - RNA, 66 nt, Human
gcugugaaacuggaggugaagccaaguuuaucaggucugaggcagggcgaccucaaguuacauggu

SEQ ID NO: 25 - RNA, 79 nt, Human
caccagccucucaccaccagagaugaccggaaauauguuuucucuucuuccuuccgugcaucaggggaagaggcuggug

SEQ ID NO: 26 - RNA, 101 nt, Human
uuuuuuuuuuuuuuuuuuuuuuuuuuuuuuucagaaaaaauaccaugccacuuuauguauuauuauguuggggaggaauauaacagggaacaagaagagaa

SEQ ID NO: 27 - RNA, 63 nt, Human
acgguuacggaugaucacacggaugcucauacgguuaugcggacacacacucacacgaacggu

SEQ ID NO: 28 - RNA, 74 nt, Human
cacggaugcucacacgcucacauggccacucaauaccgguauugaguggccaugugauugggaguucauucaug

SEQ ID NO: 29 - RNA, 75 nt, Human
gacggucacacggaagcucacacggacagucacacgcucacacggacggucacagggaugcucacacggacgguc

SEQ ID NO: 30 - RNA, 66 nt, Human
guuucagaaagaggaacagauaaccucaguccaacaugauuggagguuggcaaaaucuacugaagc

SEQ ID NO: 31 - RNA, 104 nt, Human
uuguuuuuuguuuauuugucuuuuugaaauagaguuucgcucuuguugcccaggccggagugugagacugcuucucaaaaacacaaaaccaaaccaaaaaacaa

SEQ ID NO: 32 - RNA, 76 nt, Human
ucuucuuuuuguauuuggcaucuauuuggcugcgguauucaggccucaucaacauagcugcgaagcugaaagcaga

SEQ ID NO: 33 - RNA, 67 nt, Human
uucuucaggccugcccugugacacucaaucacaguugacgucaggauggguacaaugucugcaagag

SEQ ID NO: 34 - RNA, 70 nt, Human
uguuaauuucuguaguacgauuuaaauguuuuacuucuuugauaaagcagaguacaauagaaaaaaaaca

SEQ ID NO: 35 - RNA, 73 nt, Human
aauaauugaaaaugucaaaauuauaugccauauacauuucugugggcuugaaaaugauaccauauagguuguu

SEQ ID NO: 36 - RNA, 84 nt, Human
gagaaucacuugaacccgggaggcagagguugcagugagccaagauugugccacugcacuccagccugggugacagccaaucuc

SEQ ID NO: 37 - RNA, 77 nt, Human
gcauauucuuacauauauuaacaguauuuuacaugcuuaaaaccuuaaaaauaauugaaaaugucaaaauuauaugc

SEQ ID NO: 38 - RNA, 86 nt, Human
uuugggaggcuaaggcaggcagaucaccugaggucaggaguucaagaccaaccuggucaacauggugaaacccugccccuacuaaa

SEQ ID NO: 39 - RNA, 65 nt, Human
guggcccacgugggcgggacggccgcaggcaugggguggcugugcugguccgacaccugggcuac

SEQ ID NO: 40 - RNA, 94 nt, Human
uaccuggaggaaaugagucaucggugauaagcaaagccacacacaauauuguugguucuuauugacugaauuuacuuugguugccuuuuaggug

SEQ ID NO: 41 - RNA, 111 nt, Human
ccccggcuggaucaggaggcgaccauauggcuuuucuuguuucacgugaagaaucuguugcgcugagagcaccaggagcagguagaagacccgggcagccauccugcgggg

SEQ ID NO: 42 - RNA, 65 nt, Human
uguaauaaaagcagcuuguuuucugcuugaacaauagcucugagagcaagaaggcuggaaaugca

SEQ ID NO: 43 - RNA, 61 nt, Human
cagaauucuugaucuugaaaacaagcaaauguaugccuuaaaaaaugaagagggaguucug

SEQ ID NO: 44 - RNA, 78 nt, Human
aggugcuauuuaacaugggaggagagcgugugcggcuccagcccagcccgcugcucacuuuccacccucucuccaccu

SEQ ID NO: 45 - RNA, 85 nt, Human
cucugaaacccuccuccacagcugcagcccauccucccggcucccuccuagucuguccugcguccucuguccccggguuucagag

SEQ ID NO: 46 - RNA, 89 nt, Human
cagcagugccacugcgucgggccagcgcucccccgacaaccccagguugcgggaaaagcagaguugacccagccaagaacagacugcug

SEQ ID NO: 47 - RNA, 83 nt, Human
ggagacugauccccucugaguccucugcccuuccaaggacacuaaugagccugggaggguggcagggaggaggggacagcuuc

SEQ ID NO: 48 - RNA, 65 nt, Human
uugugguuucuguuuguaauuuaagaagagcuauucaucacuguaauuauuauuauuuucuacaa

SEQ ID NO: 49 - RNA, 67 nt, Human
ccgguguaaauguugagccuuuuuggccuggcuuguuugcaaaggcccuggcaaacgucaacauugg

SEQ ID NO: 50 - RNA, 66 nt, Human
ucuccgagcucgccugcaucuacucggcccucauucugcacgacgaugaggugacagucacggagg

SEQ ID NO: 51 - RNA, 76 nt, Human
augcuuacaaagccaaauaaucgcagggcaaggcagauaaaggcaggcaggauagugacaguggcucggugagcau

SEQ ID NO: 52 - RNA, 72 nt, Human
uccuaaauuauugacagauagauagauagugaccaacuuaaggguaaucauauaugugacuaacauuuggga

SEQ ID NO: 53 - RNA, 88 nt, Human
guauugcuggguugauucuaguuguguguguccuaacucuggcucuuuuccuuacugugacgaaguaacugaaacaaccuggugcuac

SEQ ID NO: 54 - RNA, 80 nt, Human
ucucaagcucucgaccucacgaucugccugccucuaugucauuuucgaggcagguggaucacgaggucaggaguucgaga

SEQ ID NO: 55 - RNA, 64 nt, Human
auauacagauaaaugagaaguuucgauucugcaucaagcauuauucaaucucaccuucugauau

SEQ ID NO: 56 - RNA, 87 nt, Human
gaccuuugugaguuccagugguguucuuggcacucagagguucagcugaagucccgacuggugaggacaaguggagccacaaggguc

SEQ ID NO: 57 - RNA, 75 nt, Human
gggucuacgugugugauccuuaucguaagaacaauucacaguaucacauuuucacagaugaggacacugaggccc

SEQ ID NO: 58 - RNA, 78 nt, Human
cuuuggucuugggggugcagggcuuggugacgcggauggucuccuggcacugagcauuguagcgcgccuucuccaggg

SEQ ID NO: 59 - RNA, 83 nt, Human
caaaacaaaacaaaaaacuccccuuccucacugcccaauauaaaaggcaaauguguacauggcagaguuuguguguugucuug

SEQ ID NO: 60 - RNA, 92 nt, Human
ggugcagaggaaguggaaggcaucagacccuauguauuugcaguacaccugcacuuaaggcacucuguuauuuagacucaucuuacuguacc

SEQ ID NO: 61 - RNA, 60 nt, Human
uccauaaugcuacugucucacugaaacauuuaaauuuuacccuuuagacuguagccugga

SEQ ID NO: 62 - RNA, 77 nt, Human
aaauucugcauccacauugucauguccuucaaaaggauacagggcuugauuggaggacucuauaucuguaagaauuu

SEQ ID NO: 63 - RNA, 74 nt, Human
ggcagcagcagauccaauugcguuuucuuuuucauaagccuaaaagcaucgcgguguguuucagagcugcuucc

SEQ ID NO: 64 - RNA, 86 nt, Human
caggcuagucagcgccugguuccggugcugcaagcuccgcaaccucccucuccagcucggcacagcgcaggcgcucauccucccug

SEQ ID NO: 65 - RNA, 67 nt, Human
cugcauucucuugcgccaggcucugcuucuccucugacaggagcaucagcugccgcuccagauccag

SEQ ID NO: 66 - RNA, 74 nt, Human
ucuccagccugaaguucuccuccugcaacugcuccagcugggauugcagcagcagcagcuucuuggcagugaga

SEQ ID NO: 67 - RNA, 77 nt, Human
ccuguggacgaggcagaccacaacgugaaagaaggaccagccccuugaccguucuggcuggggaauuguccacgagg

SEQ ID NO: 68 - RNA, 72 nt, Human
ggcaagcagugacuccugagagacauuccccacucacuuugugugcucuuaaccuucugagugcugcuagcc

SEQ ID NO: 69 - RNA, 60 nt, Human
ucagguguugagacugagaugcguguucguauuuuuccacuuaucugucuugucagcugg

SEQ ID NO: 70 - RNA, 67 nt, Human
gaagauggauguggcugacuucgagugggugaugugguacaccuccuuucgcaacgucaucaucuuu

SEQ ID NO: 71 - RNA, 63 nt, Human
uccuccucccccuccuccucccgcugucaccacucaccgcucauaaccucaagggggugggga

SEQ ID NO: 72 - RNA, 74 nt, Human
uugagaagcgccgacgagaccggaucaauaacaguuugucugagcugagaaggcugguacccagugcuuuugag

SEQ ID NO: 73 - RNA, 79 nt, Human
guacauaagugucaugcagcaggacgucacuguuggaagaagucuccucaugaccauaucccuguuguccauuguguau

SEQ ID NO: 74 - RNA, 75 nt, Human
gagauguccucuauucuugaagagcguauucuuggagcugauaccucuguugaucuugaagaaacugggcguguc

SEQ ID NO: 75 - RNA, 73 nt, Human
gcugcggcugcagaaguaccgccugcggaguaacugcaaagaugcuguccgugcgcguugcugcggccguggu

SEQ ID NO: 76 - RNA, 87 nt, Human
guccuugaacuuggaaccugacaauguugguguugucguguuuggaaaugauaaacuaauuaaggaaggagauauagugaagaggac

SEQ ID NO: 77 - RNA, 71 nt, Human
ugcccgcguacaugggcugaggaauguucaagcagaagaaaugguagaguuuucuucaggcuuaaagggua

SEQ ID NO: 78 - RNA, 72 nt, Human
uaucgccuucguucccuauucauuuacauuuuugaaucaauagucuugugaaagggcacgaauaugggggua

SEQ ID NO: 79 - RNA, 76 nt, Human
ugaaugccgugcagcacgcuguugugaaaauggaugcgguuaaaucucaaacagacggacucugcaaggcauugca

SEQ ID NO: 80 - RNA, 65 nt, Human
ccaagcacauuacaggggaccugauugcuacacguucagaaugcguuugcugucauccugcuugg

SEQ ID NO: 81 - RNA, 69 nt, Human
gcaggccuggcacagccuuggcuuccacgccugagcgugagagcacgaguuaguuguaguccggcuugc

SEQ ID NO: 82 - RNA, 60 nt, Human
ggcacgugccugcugcuuccugagagcccggccucucccuccaguacuucuguuugugcc

SEQ ID NO: 83 - RNA, 80 nt, Human
gcagauuuguguuuuguuuucuuguuaucacugucacacagcuuauaacauguaugcuuuucagaauacaguugucuagc

SEQ ID NO: 84 - RNA, 71 nt, Human
aaugaguuaggcugcagaggacugguccgucuccucggcauaaacccuuugaaguuccuuuuccacucguu

SEQ ID NO: 85 - RNA, 122 nt, Human
guuuaguggcuucacgcagaaguuggcaggagcaugggcuucggaggccuauagcccgcagggauuaaagccugugguuuccacagaagcaccaccuaucauauuugccacaccaacuaaac

SEQ ID NO: 86 - RNA, 66 nt, Human
uccagaaagcugauggugugcccgucuaccugaaacgaggccugccugaccaaaugcuuuaccgga

SEQ ID NO: 87 - RNA, 73 nt, Human
aguauugccuauuugcaugggagaaaugauuucugaaguccgucuccugaaacaugcccuuaugcucuuugcu

SEQ ID NO: 88 - RNA, 68 nt, Human
cuaccuugccugcguuggcaucacacaagacguucgagcaguccauuuguaacgcauacuaaguguag

SEQ ID NO: 89 - RNA, 63 nt, Human
uauacuuuugcugcaagaaaauaaaaguuuucucuuuaucucuucauggcagaccuaagugug

SEQ ID NO: 90 - RNA, 70 nt, Human
agaaaauuauguguauccacaaccuaguuauuuuaaaaauuauguugacuaaauacaaaguuuguuuucu

SEQ ID NO: 91 - RNA, 91 nt, Human
auguaaagcaaaucuuagcuauauuuuaaaucauaaauaacauguucaagauacuuaacaauuuauuuaaaaucuaagauugcucuaacgu

SEQ ID NO: 92 - RNA, 63 nt, Human
guaugguacagaggaggccauuacagaagcaagcaccaagauggaauuuucugggccgaauac

SEQ ID NO: 93 - RNA, 79 nt, Human
ccuggccugcaacuucagccuuucucaaaaucggggcacggucaucguggagcgcugguggaagguaccgcuggccggg

SEQ ID NO: 94 - RNA, 70 nt, Human
gggccggaagccgcgccugcaccggcgacaucgcgucuauaagcugguggaggacacgaagcaucggccc

SEQ ID NO: 95 - RNA, 88 nt, Human
caggacccagugaggcacgacgugguuuacuagaaguggccgguuuccuggcagcuuuguaaauggacucuaaccucaguggaaucug

SEQ ID NO: 96 - RNA, 65 nt, Human; identical to SEQ ID NO: 42

SEQ ID NO: 97 - RNA, 79 nt, Human
guaucggcuaaacauccacugagcaccuccucuugcaguuagcauuagacuaagugcuuaaggacaaguaguuugaugc

SEQ ID NO: 98 - RNA, 66 nt, Human
ggaccuuguugcaccucguggcugcuuuguucacccgcagggcggccugugggcaccccgggguuc

SEQ ID NO: 99 - RNA, 78 nt, Human
cugggguguuuauggcaagucacuuugacagacauuauuguggcaaauguugucugacuuacuguuucaacaaaccag

SEQ ID NO: 100 - RNA, 80 nt, Human
ucuuguguugagacuucgugguggugcuaagaaaaggaagaagaagucuuacaccacucccaagaagaauaagcacaaga

SEQ ID NO: 101 - RNA, 74 nt, Human
gagcggacauuuaggaacuggaugaacuccuuggguguuaacccucgagucaaucauuuguacagugacuuauc

SEQ ID NO: 102 - RNA, 85 nt, Human
ggaugacauccagagggcagaaugcaugcugcagcaggcggagaggcugggcugccggcaguugucacagccacagauguugucc

SEQ ID NO: 103 - RNA, 62 nt, Human
ggcauggggagguucccggguaucuccgacacugggggggcccaggccgagcuccuugugcc

SEQ ID NO: 104 - RNA, 80 nt, Human
cuggcccgacgccgacggccucucaguggcucccggaggacccggcgggcccaguguuggagagcugaaggucaggccag

SEQ ID NO: 105 - RNA, 106 nt, Human
ggagcugaccgggagcugggggccacgggccuaggagcacccuggucagggcuaaggccauggccccgcccccagcgccacuggcugccagcaccccgucuccucc

SEQ ID NO: 106 - RNA, 78 nt, Human
cugggguguauauggcaagucacuuugacagacauuauaguggcaaauguugucugacuuacuguuucaacaaaccag

SEQ ID NO: 107 - RNA, 80 nt, Human; identical to SEQ ID NO: 100

SEQ ID NO: 108 - RNA, 117 nt, Human
gguauuucccaagucucugggugguuggaaggcuguggcuggucucaguuggguuacucaaugcccaggaggggcugagcaccagccauaucuuugcuugguucacaugaugauacc

SEQ ID NO: 109 - RNA, 62 nt, Human
ccauacugguauguguuucuccuggacaagacaucauggaacaaccacuccuaucuguaugg

SEQ ID NO: 110 - RNA, 90 nt, Human
gacuagccuugcuggucugagcacuggggugugcugcuguugacuccucagcugguuccugcccuuuugauguucagaucauuggcuguc

SEQ ID NO: 111 - RNA, 84 nt, Human
ggagcgggggcucagcucucuggaccggaaauaccuugaugggcuggaugugugccgcuuccccuugcuggaugcccuacgccc

SEQ ID NO: 112 - RNA, 64 nt, Human
ggccuuucagcuaacauucauggaugcaaaccacuacuggucuguggacggucugcugaaugcc

SEQ ID NO: 113 - RNA, 77 nt, Human
ggggcucugguucccggaucuccgugucccgcuccaccagcuucaggggcggcaugggguccgggggccuggccacc

SEQ ID NO: 114 - RNA, 104 nt, Human
uucaccaccauggagaaggcuggggcucauuugcaggggggagccaaaagggucaucaucucugcccccucugcugaugcccccauguucgucaugggugugaa

SEQ ID NO: 115 - RNA, 65 nt, Human
cuggccaacagccuugccugucaaggaaaguacacuccgagcggucaggcuggggcugcugccag

SEQ ID NO: 116 - RNA, 61 nt, Human
agaaagaccggguggcccugaaccaggaggugauggcuccagaggccaccaagaacuuuuu

SEQ ID NO: 117 - RNA, 76 nt, Human
gagaaacaaggcgaggaggaggaugcagaaaucauugucaagaucuuuguggaguuuuccauagccucugagacuc

SEQ ID NO: 118 - RNA, 63 nt, Human
gucucuggcagcuaaaggagaaggaagacgaggagcuguuucccgagucagagcggcagagau

SEQ ID NO: 119 - RNA, 82 nt, Human
ggggaccggucucaccgaaugcauccugucgggcaucaugucugugaacgggaagaaggugcugcacauggaccggaacccc

SEQ ID NO: 120 - RNA, 60 nt, Human
aggcuuagacugugggaaggauaaauugcaaaugcuucuuuaugguacccugguuggccu

SEQ ID NO: 121 - RNA, 62 nt, Human
auugaugccacuaggagucaauauugguguauauauuaaugauaggcucuuggggcaucgau

SEQ ID NO: 122 - RNA, 60 nt, Human
ggacuguucuacucagccucuguggaagaaaacuucccacagggcugcacuagcacagcc

SEQ ID NO: 123 - RNA, 63 nt, Human
auuucuggagggagacgggcacacacaaaguccaccuucaccauguccagaauuuccagaagu

SEQ ID NO: 124 - RNA, 91 nt, Human
ggcccgauuuacagggagaagcucggcaacguggagucgguuuaugucaucgacccugaagauguggcccuucucuuuaaguccgagggcc

SEQ ID NO: 125 - RNA, 61 nt, Human
auggagaguucaaagaccuaagccuugaugacuuuaagggaaauauuggugcuuucucuau

SEQ ID NO: 126 - RNA, 78 nt, Human
gcacucuugucagacuuaacuaagcagauucccgagauacggugugcuguuagaagguucuggucugcacuaagaggc

SEQ ID NO: 127 - RNA, 82 nt, Human
ggcugcuguaggacgguugcuccgagcgucgguugcccgacaugugagugccauuccuuggggcauuucugccacugcagcc

SEQ ID NO: 128 - RNA, 76 nt, Human
caaacaagaggacuguguuguggucuggggagaauguaaucauuccuuccacaacugcugcaugucccugugggug

SEQ ID NO: 129 - RNA, 89 nt, Human
ggggaugaauucuucaaauaggagccgauggaucugugguccuuugggacucaucaaagccuugguuuagcauuugucaguuuaucuuc

SEQ ID NO: 130 - RNA, 63 nt, Human
gagaguauuugugcgcgcauauacgguggguauaugugauguauugugggacaaaauauuuuu

SEQ ID NO: 131 - RNA, 73 nt, Human
uauaauguggggacaaaaaauauaccuauagaggagaaauuuauaagagccuuauaggggguaacauauuaua

SEQ ID NO: 132 - RNA, 88 nt, Human
caacucuauagaaagaaaggagauuauuacccagaauucacauguagugauuauuaaggacaauuuuuuuuuuuaacuaaaaaaguug

SEQ ID NO: 133 - RNA, 70 nt, Human
uccauugaaagugcuucaaggguaaucuuggguuucuagcaccuuaucuaugauguuucuuugcaaugga

SEQ ID NO: 134 - RNA, 69 nt, Human
uugaacucugauggcuguuaucaaaggaacuuuucuuguuuaaauugcugaugcaggaauuaaguuuaa

SEQ ID NO: 135 - RNA, 84 nt, Human
gcagagcuggggcugcgcggggccgggcgagcgggaccaggcgggagccauggaccgcuagggcccggccuagccccgcgaugc

SEQ ID NO: 136 - RNA, 61 nt, Human
gccggcgaguggccccagcguccucgcgcggcuguugccgcugcuggggcugcugcucggc

SEQ ID NO: 137 - RNA, 61 nt, Human
gcggggagcuggugccccuggcccgggccucaguggacuguguuugggaaccggacucugc

SEQ ID NO: 138 - RNA, 66 nt, Human
gcuugggcaccugggugcuggucacugcugcccgcccuggcuuccucaccaacucugugcccuggc

SEQ ID NO: 139 - RNA, 60 nt, Human
cccgacccgcgcccgggccugcgggcgacucgagcgggcccugcuggcugcggcugaggg

SEQ ID NO: 140 - RNA, 82 nt, Human
ugaauaccaacaauaucacugagcuagugacuauugggaaaugaacuaguuuugaugaagcuuagucugauaacugauuuca

SEQ ID NO: 141 - RNA, 74 nt, Human
ugguccgugaaaucugaaaaguucuaggguccgcaacaggaccuuuccgaggacgacauugggcgcguaggcca

SEQ ID NO: 142 - RNA, 65 nt, Human
uguguucccccuuauaaaguuugccaaaaggggggcugacccccuauuuuauaagaggccgcaca

SEQ ID NO: 143 - RNA, 61 nt, Human
ccuccaggcucaugaugguguugcuaaggaaucacagacaccuaaggugaguucugggcgg

SEQ ID NO: 144 - RNA, 67 nt, Human
gcagccgcuuuggaugcucuucggccugcacgggaccaucacgcagauccgcauccucggugagugc

SEQ ID NO: 145 - RNA, 60 nt, Human
gggcguaugccuuuccuggaggcggggacgauccggguaggagacaaagggcgagcuccc

SEQ ID NO: 146 - RNA, 70 nt, Human
agcccagaaagaguuaagaaggugcugggcgugguggcucauaccgguaaucccagcacuuuaggaggcu

SEQ ID NO: 147 - RNA, 65 nt, Human
agguggguggaucacuugcggucaggaguucgagaccagccuggccaacauggugaaaccugucu

SEQ ID NO: 148 - RNA, 61 nt, Human
agacaguagcucccuuaaaacacacacacacucuucaugguaugucacagaacuacagucu

SEQ ID NO: 149 - RNA, 71 nt, Human
uuguugcccaggcuggagugcaauggcacgaucuuagcucacugcaaccucugccucauggguugaagcaa

SEQ ID NO: 150 - RNA, 110 nt, Human
gguuccgucacccccucccagggaagcaggucugagcagcuuguccuggcuguguccaugucagagcaacggcccaagucugggucuggggggggaagugucauggagcc

SEQ ID NO: 151 - RNA, 64 nt, Human
gucauccucguccuccucugccuguggcugcugcgguggcggcagaggaggggaugagucugac

SEQ ID NO: 152 - RNA, 87 nt, Human
ccguguacaggcugcuauccacaccaccaaagacaaccguuccuccgcuggaacccugcugguggcugaaguagacgcuuaaaacgg

SEQ ID NO: 153 - RNA, 63 nt, Human
gccuggccgccgaugaggaacucuucaaugccaaucugccaguagaguuccugggugacaggc

SEQ ID NO: 154 - RNA, 91 nt, Human
ggcgguugaaggcguuguaggcugacuccaggucgaacagcaucugacgcaccugugagucguccagcucaucugacgccgacaugccgcu

SEQ ID NO: 155 - RNA, 72 nt, Human
guauauauaugauaaaugauuauaacgugugugucagugacaauauguagucuuugguuguuaguuauauac

SEQ ID NO: 156 - RNA, 72 nt, Human
cagaggaggcgacuguugauuugaaauuccuaaaaaugacguaguagucccggauccuuaguuggcuuccug

SEQ ID NO: 157 - RNA, 63 nt, Human
ccucaugggcugaugguuaucguggcucuuuccugccuucucuuuagcuauggaccagugagg

SEQ ID NO: 158 - RNA, 87 nt, Human
gagcauuuguuggaguauuuaggauuuaaucuccaaggcuaccauccagucuuggagugggguuuagccaacuccacacuggugcuc

SEQ ID NO: 159 - RNA, 65 nt, Human
ccuauauuaaacaaaucaauuagccaaacagaaaaaccuucaaaaauuauugauaaauuuauagg

SEQ ID NO: 160 - RNA, 79 nt, Human
ccuggggugaggggcccggguugcgggccguuccccuccuccgggguuggacuucgggcccggagccuccuccccuagg

SEQ ID NO: 161 - RNA, 65 nt, Human
gccggagaugggcccggcggauacuccucuuuuggggaagagguucaagcuggcccauggccggu

SEQ ID NO: 162 - RNA, 71 nt, Human
gcgagcuacagcuucaccaccacggcgagcgggaaaucgugcgcgacaucacaggggaagcugugguacgu

SEQ ID NO: 163 - RNA, 73 nt, Human
gcauggaagaggagcucgggaggacaggguuggggccuccagggucugacaccaccccacuccucuuccuagc

SEQ ID NO: 164 - RNA, 67 nt, Human
ggacaggcagcuuugaacagaggaaacaaaacuccaacuuccuccaaacuccuaugcaggcaggucc

SEQ ID NO: 165 - RNA, 66 nt, Human
ugagccucuccuggcucugucugcuggucuaggccaggguggggcugaucaagggcagagagcuca

SEQ ID NO: 166 - RNA, 61 nt, Human
ugggggaagaggaagagaggacagagaggccaaacaggccucuuccccuccucuucaccca

SEQ ID NO: 167 - RNA, 97 nt, Human
ccgcuugguuuuuuuugguaauuaaauauuguaugauuuaucugguucaaggaagaugcacuauucaguuaucuauugagaaauuauuuugcagugg

SEQ ID NO: 168 - RNA, 68 nt, Human
auaguauucuuugcaaaugugaaagcgagacauuauaucuucucuugcuugguguaacuaaucacugu

SEQ ID NO: 169 - RNA, 64 nt, Human
guggucaacaucgguacucuuggcaggaaagaaacacuguccuuccuucuccacauaaggccac

SEQ ID NO: 170 - RNA, 62 nt, Human
acuggacaaccccaaaaguggcgcuugaugccgauggcuaccgcgucuccaagggucacagu

SEQ ID NO: 171 - RNA, 72 nt, Human
gggguggggggcccaauaaggccuuagggaaaggacaggugccgagcccugcauguggagcccucccacccc

SEQ ID NO: 172 - RNA, 87 nt, Human
uccgccggucccaguccaggucucgcuggcgcuuuucuuccuggagccucagcuucuccuggauuugcugcuucuggacuaggcgga

SEQ ID NO: 173 - RNA, 71 nt, Human
uguauuaaauugugugaaauagucucccguggguugauuuguauagacuucauucauauauuuuuucugca

SEQ ID NO: 174 - RNA, 80 nt, Human
ccaagggagugcaauuuuucaucuuccaauggcggccucaaccuugaggcgaauccacuggcgaaagaugccuuucuagg

SEQ ID NO: 175 - RNA, 64 nt, Human
gcuaagauaguucagauugaucuuaggucaaugguaagaccuauguaguucaugaagucuuggc

SEQ ID NO: 176 - RNA, 65 nt, Human
uuucggcgcuggguccccaaagcagaauggagacggauagagugguggcucccagaaucccgaag

SEQ ID NO: 177 - RNA, 62 nt, Human
gaucacauuuuauuucauuacacuagaucacauuuugauuacugcauuuugaaaauguauuc

SEQ ID NO: 178 - RNA, 62 nt, Human
gugacaccacccaucuccaacauucagaugcccaggaugguaauggagguaaagugugucau

SEQ ID NO: 179 - RNA, 78 nt, Human
guucucaguuagguacaaaaugaacuaaauuaagccaaaaagggcagugcuaguguaaacaguaugaaacaugaagac

SEQ ID NO: 180 - RNA, 86 nt, Human
aggucuccuuaccuucugcuucccuuucugccugugacugaaugggcaugucaaggucuaguaggggauccaggaggaggaagccu

SEQ ID NO: 181 - RNA, 104 nt, Human
gggucagcaggaaguugcggcugaugagcagcucccggagcgguggggcggggccuccucuucuccaguuccaguacgcucaucagucguccuccugcugauuu

SEQ ID NO: 182 - RNA, 82 nt, Human
guuguucucagauaucaguucuucccaggugaacagcagugaaucugugacuucaccaaauggauuaaagucaaugagccac

SEQ ID NO: 183 - RNA, 79 nt, Human
cgugucuuaugagaucuagauacugauacucgccauguguuccuucacauggcucuggucuggucacauauucugcaug

SEQ ID NO: 184 - RNA, 62 nt, Human
gguaauuuuaucagcuauauauauauauaugagaauauauauauauuuuguuguuuuguacc

SEQ ID NO: 185 - RNA, 76 nt, Human
gcccugccaagcacagcguagaucuggaaagagcagaaugcuuuccuuuucagauguggcuggucauggaaggggc

SEQ ID NO: 186 - RNA, 62 nt, Human
ugcuacuauuuuauugcaggagguggggguguaugcaccgcacaccggggcuaugagaagca

SEQ ID NO: 187 - RNA, 75 nt, Human
agugccaucuagaugagauaccagggcauuucugaggauguuuuugccccgggccaccucacucuccguggcacu

SEQ ID NO: 188 - RNA, 65 nt, Human
cuggcauucaccuccgcaauccggcuuucccauucagccagggggaugcggcggccauaggucag

SEQ ID NO: 189 - RNA, 83 nt, Human
guuauuuuaugagccccaaauuuaggauuuacucuguuuucauccuagagggaggagaguucuauccagacucauguguugac

SEQ ID NO: 190 - RNA, 84 nt, Human
cauugauaguuuucaugaaucguggaaugauuuaucuuuucagaaacagauaaaugguuccgugauucaugaaaacuaccagug

SEQ ID NO: 191 - RNA, 63 nt, Human
guccuuugugguagacuacaugucauuuuguaguuuaacauaucauuuuuccauuuauaggau

SEQ ID NO: 192 - RNA, 100 nt, Human
aaacagacugggccaauguccacaaagaauuccuggucagcaccaccgauguccaaaggugcaauaucaaggaagggcaggcgugauggcuuauuuguuu

SEQ ID NO: 193 - RNA, 106 nt, Human
aaauggaaggauucagcuuucaguuaaaaaagaagaagaagaaauggcaaagagaaaaguuuuucaaauuucuuucuuuuuuaauuuagauugaguucauuuauuu

SEQ ID NO: 194 - RNA, 70 nt, Human
auuuuuauuuugguuuucuuacaaagguugacauuuuccauaacagguguaagaguguugaaaaaaaaau

SEQ ID NO: 195 - RNA, 77 nt, Human
cuaggggucuguaccgggcuggccugugccuaucaccucuuaugcacaccucccaaccccuguauucccaccccugg

SEQ ID NO: 196 - RNA, 93 nt, Human
gugcggcgugcacuggacuuugccgucggcgaguacaacaaagccagcaacgacauguaccacagccgcgcgcugcagguggugcgcgcccgc

SEQ ID NO: 197 - RNA, 75 nt, Human
uuggacguggagcugggccgaaccacguguaccaagacccagcccaacuuggacaacugccccuuccaugaccag

SEQ ID NO: 198 - RNA, 83 nt, Human
gcgauccagugcguagcguauugccuauccauugugaugcguacgcccaucauaacauuaggagaucgaaacgauaagaucgc

SEQ ID NO: 199 - RNA, 77 nt, Human
acagaaugcugucuuggaccaguauucaacuuguggggcaaccuaaauuugggaguauugcuuuuucuguauucugu

SEQ ID NO: 200 - RNA, 61 nt, Human
aucaauguagaacucagccuucuuggaaagaaaaaaaagaggcuccggguugacaaauggu

SEQ ID NO: 201 - RNA, 81 nt, Human
auccuugaaggaaaugacauugagcuuguuucaaauucagcggcuuugauucagcaagccacaacaguuaaaaacaaggau

SEQ ID NO: 202 - RNA, 101 nt, Human
gcuccgcccggugcccagcguuuucgcgccccaagagcaggaauaccagcaggccuuguugcugguggcggccuuggcggugccugggcuugggccugagc

SEQ ID NO: 203 - RNA, 62 nt, Human
uaugagaaugauccagaauuaggauccgaagagagaggaacuacuccuggauggacaucaua

SEQ ID NO: 204 - RNA, 77 nt, Human
uuaugaagacauacuggauggcaguggguacuucgaugugagggacaaggaggaccaguggauccggaucuucaugg

SEQ ID NO: 205 - RNA, 66 nt, Human
cugguuaacuucuugagcuauuucguggaacuuggaacacagccugccacccagugaaguguccag

SEQ ID NO: 206 - RNA, 62 nt, Human
gacuauggcaaggaccugauggagaaggucaagagcccagagcuucaggccgaggccaaguc

SEQ ID NO: 207 - RNA, 93 nt, Human
ucaccaucugcagccuugaaggagcuuugguucggagacaggcaaaggagccauguguggagagccugguuucucaguacuuccagaccguga

SEQ ID NO: 208 - RNA, 116 nt, Human
acugguuaacuucuugagcuauuucguggaacuuggaacacagccugccacccagugaaguguccagaccauugucuuccaaccccagcuggccucuagaacacccacuggccagu

SEQ ID NO: 209 - RNA, 62 nt, Human; identical to SEQ ID NO: 206

SEQ ID NO: 210 - RNA, 93 nt, Human; identical to SEQ ID NO: 207

SEQ ID NO: 211 - RNA, 116 nt, Human; identical to SEQ ID NO: 208

SEQ ID NO: 212 - RNA, 62 nt, Human; identical to SEQ ID NO: 206

SEQ ID NO: 213 - RNA, 93 nt, Human; identical to SEQ ID NO: 207

SEQ ID NO: 214 - RNA, 84 nt, Human
cagcucuucucuuuggacacaugggccuucuuagaggguucagucuaggacccggcucuccuggcccuguguugaggguagcug

SEQ ID NO: 215 - RNA, 79 nt, Human
uuuuucuuucuuuuuuaaaagaagaugguuucacuuuaauauaaugcuauuaucuuaagacuuaaaaaaaaaaaaaaaa

SEQ ID NO: 216 - RNA, 87 nt, Human
agggagaggggggggggggggggggcggagaaaaaagaaggugguuuguuuuuuuuuuuccccccccccaccccucccccuuuucuu

SEQ ID NO: 217 - RNA, 74 nt, Human
ggaggggaguuuguuuuuuuuuuuuucccccccggccccccccccggggaaaaaaaaaaaaagaaacccccccc

SEQ ID NO: 218 - RNA, 91 nt, Human
aagaugcuguccgugcgcguugcugcggccgugguccgcgcccuuccucggcgggccggacuggucuccagaaaugcuuuggguucaucuu

SEQ ID NO: 219 - RNA, 75 nt, Human; identical to SEQ ID NO: 74

SEQ ID NO: 220 - RNA, 87 nt, Human; identical to SEQ ID NO: 76

SEQ ID NO: 221 - RNA, 71 nt, Human; identical to SEQ ID NO: 77

SEQ ID NO: 222 - RNA, 60 nt, Human
guacuuaaucuuaaauacgcugaguacuaaaaaguguuuauuucuuauuucaguaagugc

SEQ ID NO: 223 - RNA, 68 nt, Human
gcuuuuggaauaccuaucagaguauauacacaugagguaguaacacucugguacagaucuccagaagu

SEQ ID NO: 224 - RNA, 73 nt, Human
uugcuggggucagcucguuacucaacuccaguugacauuuggaguauaggcaccauauuugcugaacuagcaa

SEQ ID NO: 225 - RNA, 72 nt, Human
ccaccaaaaugcuuacauccguguguaauaucccgagaaauuauggaaaauuauaacauagcauuaaggugg

SEQ ID NO: 226 - RNA, 80 nt, Human
gcuuuauuugagaacaggugaaucagcugaauuuguguguaaacggggauaucgucuuucaucacguucucacacauugc

SEQ ID NO: 227 - RNA, 69 nt, Human
gaccaauuuguucuaccuagcauuuuaacuaguuuuucugccagcuauguugaaugcacaaauucuguc

SEQ ID NO: 228 - RNA, 68 nt, Human
gcauguucauucauugcuacauaauuugguucuucuggaauauuuuuauguagcucuuggaguacagc

SEQ ID NO: 229 - RNA, 61 nt, Human
acucguuggaagggauguggccuggggcuggagugagcaggccgugucccugagucagagu

SEQ ID NO: 230 - RNA, 74 nt, Human
gccuagagugaugugccgccugcaggaccagggccucauccuguaccaccagcaccagcacagcugcugugagu

SEQ ID NO: 231 - RNA, 60 nt, Human
cccgccaggccuccauagagcugcccagcauggcuguggccaguaccaagagucgguggg

SEQ ID NO: 232 - RNA, 76 nt, Human
cgggcaugggaaguaugagaaggugcuugugggggggcccggcucccuaggcgucccaucucgcuuccugggucug

SEQ ID NO: 233 - RNA, 84 nt, Human
cgggugagguacaggcucagucugcggccaagacuccguccugcaaggauauuguggcuggagacaugagcaagaccccaucug

SEQ ID NO: 234 - RNA, 69 nt, Human
cucauuuuaauccugcagggcugccugccaguggaucuauccagcugcuuccuuguagccaagaaugag

SEQ ID NO: 235 - RNA, 91 nt, Human
uccugcucugugccucaaccuauucuccauaauagggagucuaauccuauuccuucccugccugaugaggauggugugaggaugaggagga

SEQ ID NO: 236 - RNA, 71 nt, Human
uguuuucagggagacugguauuuuugaagcugcuaucauuuucuauuucuuuauuaauuucuuuguaauca

SEQ ID NO: 237 - RNA, 79 nt, Human
acugauguucuucuacauuugaagaguucuccguaguacuacuuuauggaucugaacugaaguccuguagaauaucagu

SEQ ID NO: 238 - RNA, 61 nt, Human
cguacuguacuuacuagaacugcgcuagcuauauguuagauacugucgguaagacucuacg

SEQ ID NO: 239 - RNA, 89 nt, Human
uggccucaggcgagauagggugugacuucaaguccgguagacuauugacuggccgguccuuauacaguaaauucucgucucugugguca

SEQ ID NO: 240 - RNA, 68 nt, Human
gcaaaaucacucguuuuguagggaaagguugcuuuguuaaucaugcccuauggugggugauuaacugc

SEQ ID NO: 241 - RNA, 62 nt, Human
gcgcugaaugaugucacggcagucguugaacacacggcggauguucucaguguccacagcgc

SEQ ID NO: 242 - RNA, 72 nt, Human
uuuccuuuuucuguaggccgccuuaagcuuucuaaauuuggaacaucuaagcaagcugaagggaaaaggggg

SEQ ID NO: 243 - RNA, 85 nt, Human
agaggacagacuuaucuucagaacauuucagucauuccucaaaguggcuagaaacuugucagcaugaaucagaugagcagccucu

SEQ ID NO: 244 - RNA, 77 nt, Human
ccauuuccuuagaggggagucuucacccaaauuccccgugucuugaacaaguacacuuggguccccaggggagcugg

SEQ ID NO: 245 - RNA, 61 nt, Human
uuugaggcccguuuagauaccauggcagagacaaacagcauaucuuuaaauggaccuuuga

SEQ ID NO: 246 - RNA, 78 nt, Human; identical to SEQ ID NO: 99

SEQ ID NO: 247 - RNA, 65 nt, Human
gaagguuaagcuggcuguccugaaauauuauaagguggaugagaauggcaaaauuagucgccuuc

SEQ ID NO: 248 - RNA, 80 nt, Human; identical to SEQ ID NO: 100

SEQ ID NO: 249 - RNA, 90 nt, Human
ugaucaugacuuucaaaaauucaacuaccuagaaauaguuaccuccaguuuagcacauuuagguauuuggacauuuaaaguacuauuuca

SEQ ID NO: 250 - RNA, 74 nt, Human
uguguuuauagugacugaguaugaugcuuauagaaaauuaugccauauaugaucaacuauuaccauuaaacaua

SEQ ID NO: 251 - RNA, 79 nt, Human
gcugaucuccugccugauguuucugucucagagccaaggccaagaggcccagacagaguugccccaggcccggaucagc

SEQ ID NO: 252 - RNA, 78 nt, Human
guuuuuuuuuuuuuuuuuuuuuuuuuuuuugaaaaaugcccuuuuucuuuagggggaaaaaaacggggaaaaaaaaau

SEQ ID NO: 253 - RNA, 76 nt, Human
uugggauucuuuucacaaaaagggagguauugggaaauugguauugaagaacccuucuuggggggagaaaucccaa

SEQ ID NO: 254 - RNA, 112 nt, Human
auaugauguagaaauaccucgguggacaacauugcuaaaauggagauugccaccaaggagccaaugaaucccauuaaacaauauguccacaggauggaaagcuacgcuaugu

SEQ ID NO: 255 - RNA, 102 nt, Human
gauacaggagagucagaaacaaacuuauagugaugcguuggaagguuaaucgaaaacauccuuacgccuauuuaauguaguuaaccugauuuaucugauauu

SEQ ID NO: 256 - RNA, 65 nt, Human
ggagaagcuagaggaggaggccaagcuaaaggaacuuuuagagaaaggcugauuccaaucucucc

SEQ ID NO: 257 - RNA, 66 nt, Human
ggggaaaagcccgggaaaaaaccgggugcuaaaacgcguggugagaaaguccccgggaggugcucc

SEQ ID NO: 258 - RNA, 75 nt, Human
uacccuauagcuuguuuuauuagcauuccggauauucuuguccauauuucuaauauaaccggugcuauuaaggug

SEQ ID NO: 259 - RNA, 85 nt, Human
gcuaaugagguggaacaacuuguugcggaagaggaauuuuuacaagaagcuagaguugcaucuucccaaguucuccauuucuggc

SEQ ID NO: 260 - RNA, 71 nt, Human
ggagacgcaaccguguuuuucauucucccuaaccaaggcaaaaugagggagauugaagagguucugacucc

SEQ ID NO: 261 - RNA, 100 nt, Human
gauuccccuguccaugguggucggaaacugcgcauugaacagggugugcaagucauccuggacccagugcacagcguucggcucuuugacugguggcauc

SEQ ID NO: 262 - RNA, 125 nt, Human
ucccuugggggcagccucgaguguaguccauuaguaaucagauuccaguuuggacaggguggcuggauuguauaucucguuaguaauguacaugcucuucagguucuagggcuccuguuagggga

SEQ ID NO: 263 - RNA, 77 nt, Human
gaggaggaaauaagaugaucauugaggaggcgaaacgaucccuucacgaugcuuugugugucauccggaaccuccuc

SEQ ID NO: 264 - RNA, 86 nt, Human
ugauugugcaccacaggcguggacaaaaauagauaugcaagcaagcagcgauguggcacugaagaacaccugugagugggcgauca

SEQ ID NO: 265 - RNA, 71 nt, Human
ggcacaugcaggugguggagaccuugcugaagcacggagcaaacauccaugaccaacuuuaugauggagcc

SEQ ID NO: 266 - RNA, 63 nt, Human
ggugaugcugcugcgcggaccgaccgcgacgcugcgggaaacgaugggcacaacagcauuauu

SEQ ID NO: 267 - RNA, 72 nt, Human
cggucauaucgagacagaaaaagaccauuccucaucccagaagagggggucugauaagccauccuaugaccg

SEQ ID NO: 268 - RNA, 60 nt, Human
augugcagaggagaagaucccaccgagcacacugguugagauccaucugacugcugccau

SEQ ID NO: 269 - RNA, 103 nt, Human
aacauacagaagaagcaaggaaauuacaguuagaggucacaacugcccgaagccaguucuaaauuuuuaugaagccaauuucccugcaaaugucauggauguu

SEQ ID NO: 270 - RNA, 84 nt, Human
cacagaaucagaccaugacuaccuucaccuggaacaucaaccacgcccggcugauggugguggaggaacgauguguuuacugug

SEQ ID NO: 271 - RNA, 90 nt, Human
ccaagaccaacaggaugccacgcugggccgagcgacuauuuccugccaauguugcucacucgguguacguccuggaggacucuauugugg

SEQ ID NO: 272 - RNA, 81 nt, Human
ucuggcagcgguacccgaaucccuauagcaaacaugucuugacggaagacauaguacaccgggaggugaccccugaccaga

SEQ ID NO: 273 - RNA, 76 nt, Human
acugugaaaaagauauuuguugguggcauuaaagaagacacugaagaacaucaccuaagagauuauuuugaacagu

SEQ ID NO: 274 - RNA, 77 nt, Human
ggucgaaagugguucuuggaaaacuuuggugggugguccguggagggugguuucgguggggaaugacaaauucgguc

SEQ ID NO: 275 - RNA, 76 nt, Human
ggccaguugcucuaaguggauuggauaugguuggaguggcacagacuggaucugggcuagagagaggcgaugggcc

SEQ ID NO: 276 - RNA, 113 nt, Human
guggaaacauacagaagaagcaaggaaauuacaguuagaggucacaacugcccgaagccaguucuaaauuuuuaugaagccaauuucccugcaaaugucauggauguuauugc

SEQ ID NO: 277 - RNA, 78 nt, Human
uaguuaaaaagaaguggaaucuugaugagcugccuaaauuugagaagaauuuuuaucaagagcacccugauuuggcua

SEQ ID NO: 278 - RNA, 68 nt, Human
gacgaggaagaggaggagcaguugguucugguggaauuaucaggaauuauugauucagacuuccucuc

SEQ ID NO: 279 - RNA, 67 nt, Human
uuauauuugaagaaaauguugaacaugcugauacagaaggcaauaauaaaacagugcuaaaauauaa

SEQ ID NO: 280 - RNA, 61 nt, Human
acugugauagucaugauuuaaaguuaugaaacuuccauugcaaaauuacaacugagacagu

SEQ ID NO: 281 - RNA, 79 nt, Human
gauauauuuauuggaaaauacccaaauaauaaauuaucuauuauuuaauuuaauaugacuuuauauucuaaauuauguc

SEQ ID NO: 282 - RNA, 131 nt, Human
uaugacuuuauauucuaaauuauguccaguuggucuauaaguauuuaucccauuacauuuaccuaguuauuuuauuaauuguuuaccuagauuauuuauaaaaacugugauagucaugauuuaaaguuaug

SEQ ID NO: 283 - RNA, 77 nt, Human
gaguaacauacaaagcuauaauuaagaugaaguaaugaaagccaaaacauuaaaauuuuaaaacuugcuuguuacuu

SEQ ID NO: 284 - RNA, 72 nt, Human
uguggucuuaaacuucuguuuuacaaaauccaaaagguaaauacagaagaaaucaauacaauagagauuaua

SEQ ID NO: 285 - RNA, 76 nt, Human
gucacacagguuuuaagacuuugcaagaauugucaucaaaugauaugcuuuuacuucaacuuagaacuggaaugac

SEQ ID NO: 286 - RNA, 84 nt, Human
aaaagaaaaccaaagugguccacaaaacauucuccuuuccuucugaagguuuuacgaugcauuguuaucauuaaccagucuuuu

SEQ ID NO: 287 - RNA, 64 nt, Human
acuuuuuuaaugggucucaaaauucugugacaaauuuuuggucaaguuguuuccauuaaaaagu

SEQ ID NO: 288 - RNA, 89 nt, Human
ggccaauugaaacaaacaguucugagaccguucuuccaccacugauuaagagugggguggcagguauuagggauaauauucauuuagcc

SEQ ID NO: 289 - RNA, 92 nt, Human
caaaaucccuugacaaaagcgcauagguuauuucaaaccaggcauuguuuuuuauguaaccuguuuuaccgcaucuucucaggcagguuuug

SEQ ID NO: 290 - RNA, 67 nt, Human
cucaugagacucuucauuuuguccacuuugacaggaaaagugggaauguaugcagagcucucaaaag

SEQ ID NO: 291 - RNA, 62 nt, Human
cagugauguuuauaauguucugccagcagcuccuggaggcucuggcugaaggucugcagcug

SEQ ID NO: 292 - RNA, 69 nt, Human
gccuguccaaucagaggauccauuuuaugguugaugcgaauacaacgguaacccgaucccuugcauggc

SEQ ID NO: 293 - RNA, 87 nt, Human
guugcggcccggguuuagaagggauucaugggggccgggcugccggugcggcccgggcggccggggcuucugggcgugggccccaac

SEQ ID NO: 294 - RNA, 103 nt, Human
cuuaaauggccaauugaaacaaacaguucugagaccguucuuccaccacugauuaagagugggguggcagguauuagggauaauauucauuuagccuucugag

SEQ ID NO: 295 - RNA, 66 nt, Human
gggagucaaaaauuuuuagcuacuuuaacacuaaagucaaacuaaaguagcuucaaaaagacuucu

SEQ ID NO: 296 - RNA, 72 nt, Human
guuggagaguagaguuaagacaaggcccaguuuguguuagccgaccgucuuggcccaccucuaugacccagc

SEQ ID NO: 297 - RNA, 95 nt, Human
uacgcagguacacacguguaccugaguguguucaugagggcaucugguguccaugugucugaguguagccuuuguaucaugugugugugugugug

SEQ ID NO: 298 - RNA, 66 nt, Human
cgguggcugggcugacgcugcuggcugucggggucuacucagccaagaaugcgacagccgucacug

SEQ ID NO: 299 - RNA, 65 nt, Human
ggcuggcaccuuguuucggggaaggauuccgugccuuugugacagaccgggacaaagugacagcc

SEQ ID NO: 300 - RNA, 65 nt, Human
gugacagugcuggcuagugacggcagcuccacuccugcucgagcaacgguuaccaucaaugucac

SEQ ID NO: 301 - RNA, 68 nt, Human
guguauuuaucugagaaagauccugucaauacaaagauugcccuaauuacaguuucagauaaggacac

SEQ ID NO: 302 - RNA, 63 nt, Human
ucuuugcuuuaaauaauacuacugggcugauuacaguucagagguccuuagauagagaggaga

SEQ ID NO: 303 - RNA, 64 nt, Human
gggggugggcuuuggcaguggcggggguagcagcuccagcgucaaauuugucuccaccaccucc

SEQ ID NO: 304 - RNA, 60 nt, Human
ccaaaaccugaggcagaaaguggauaauuugugucaacacaucuggacaagcaggaaugg

SEQ ID NO: 305 - RNA, 94 nt, Human
ggaugaacaauagucugcaauuuccccuaagccaggccuugggauucggacuuuugaggaccuggguaguaguuaguugacaugcuauuuaucu

SEQ ID NO: 306 - RNA, 77 nt, Human
cgcugaacucaugcagacgcuccgauuucuuggacucuacagagaugagcaucaggauuuuauggaugagcaaaacg

SEQ ID NO: 307 - RNA, 65 nt, Human
gaggaguauaacccggaggugggcuacugcagggaccugaaccacaucgccgccuuguccuccuc

SEQ ID NO: 308 - RNA, 72 nt, Human
uuccugagggaggaugcauucugggcacuggugcaagcugcuggccagugagaagcacuccccugcaaggga

SEQ ID NO: 309 - RNA, 78 nt, Human; identical to SEQ ID NO: 99

SEQ ID NO: 310 - RNA, 80 nt, Human; identical to SEQ ID NO: 100

SEQ ID NO: 311 - RNA, 102 nt, Human
ccucucucugguguuggaugcuuugugugaguuugccuuuugaaguucccaucucuugcggauucuuccucuguccauuuagcacuuugucuggaggggagg

SEQ ID NO: 312 - RNA, 103 nt, Human
gcagaaaagcauggauccuugcacugcuucacacggaagauucuugguauguucuuuuggaaaucuccuuacugauccguaggcacgacucuucauuuucugu

SEQ ID NO: 313 - RNA, 63 nt, Human
gccgguuuggcaccauuugcucuuuauccaccuccuucugaaguuguaaugccaauaaccugu

SEQ ID NO: 314 - RNA, 70 nt, Human
gaugggcgucccaguucccuuucccauuccugagccugaugguuguaagaguggaauuaacugcccuauc

SEQ ID NO: 315 - RNA, 60 nt, Human
gucaaugucaccuucaccagcaauauucagucuaaaagcagcaaggccguggugcauggc

SEQ ID NO: 316 - RNA, 83 nt, Human
auucaucacauuggguugaaaaguuggaagauuuugcaucuuauugaaaagaauuuuucaaaaauguuucuguacaaaugaau

SEQ ID NO: 317 - RNA, 63 nt, Human
cgcuggcuggggucgggcuccaugcucuggaugggacugggccgucgcacacgccagccggug

SEQ ID NO: 318 - RNA, 70 nt, Human
uccuuuaaacugagucaucaucuuaguccaacuuaaugcaguucgauuacaauggcguaggauagaagga

SEQ ID NO: 319 - RNA, 60 nt, Human
uuagaaugcaucgucuuuuauuuuccaggcuuccugggaucagauaugacauugcacuaa

SEQ ID NO: 320 - RNA, 68 nt, Human
aagaggaaacagccccacugcauuugagaagguuaccauuuccuucgaaguuccugcuguugccccuu

SEQ ID NO: 321 - RNA, 78 nt, Human
gcuuugcuuuauaguuuuauuaauguguuuguguuggcuuugcauguuuucaaauauaugaaugaaaucaugcagagu

SEQ ID NO: 322 - RNA, 66 nt, Human
ugccuuuucacuuggauuauguuccugagauguauccgggauuauuguguguaggcuguaugggca

SEQ ID NO: 323 - RNA, 63 nt, Human
gucagccccccccgaccccgccuccuugaugaaggaagguugugauugguccggagaggcugc

SEQ ID NO: 324 - RNA, 62 nt, Human
ucggauccuggcucuuugcggucugggagggugggccuuaccuagacgccggaggggaccga

SEQ ID NO: 325 - RNA, 60 nt, Human
aucagcucuugaugccuuucuuuuaaauuaauuauagacagagagaggcauuuagcugau

SEQ ID NO: 326 - RNA, 69 nt, Human
cguuauccucucaggauucuuaucugggcacuaauuuauaaaccauuauauuuauucaggaggaccaug

SEQ ID NO: 327 - RNA, 93 nt, Human
gcggcgaacuucugcacacagcuccaguguuugcucuggaucucgaugacuuucucuagcguggccacugcguugauguugggcuuuugcugc

SEQ ID NO: 328 - RNA, 68 nt, Human
acauaagcauuucccaaguugcuauuaucuguuaauaacagugguuugauuaauuggauuggcugugu

SEQ ID NO: 329 - RNA, 87 nt, Human
uuuuuuuuuuuuuuuuuuuuuuguuuuuauaauguuuuauuauaaaaguaauauaugaucuuuauagaaaaauaaagaaaauaaaaa

SEQ ID NO: 330 - RNA, 81 nt, Human
cuguaugucuugugaugggacaguucauaauguaguugcuagaccacuuuacaaauuguucuugucaccagauguguucag

SEQ ID NO: 331 - RNA, 97 nt, Human
ugugacuuuggugccguuacuugugaaaaaucuauucuguugucuuugauguguccaagaaaauucguguaguuuacguaaaaauaucugacucaca

SEQ ID NO: 332 - RNA, 65 nt, Human
gaagagccuaaacaugguguucaauagucuacuaugaauuaaacaaucguguggagaagcuuuuc

SEQ ID NO: 333 - RNA, 81 nt, Human
gggacuguuuaacuuuagagacacuuuaaguuacgauacuggaggucuacuuugaaaccgauauuacagauuauuuuuccc

SEQ ID NO: 334 - RNA, 99 nt, Human
uggaaaagguguucaucuguacuauguugguggagagguguaugcggaaugccucagugacagcagcauauuuguacagaguaggaacugcaacuuuca

SEQ ID NO: 335 - RNA, 67 nt, Human
gggccagguccggacaagacagcacuccugaagcagaugggcaggaggugaucgaggagccuggccu

SEQ ID NO: 336 - RNA, 78 nt, Human
uggaugcagugacacaccagugggagcugcuggcugccccuugcagcccacuccccaaacuggcuacccaggcaucca

SEQ ID NO: 337 - RNA, 76 nt, Human
guucugggagcucugcaaaaucaguagcaagugcuggaaaaggcacaugccgaagauacucaagagcucccaagau

SEQ ID NO: 338 - RNA, 61 nt, Human
ugaccccauccauccaugaccagaggauuauuuuccugccuuggcagaggaggaggaguca

SEQ ID NO: 339 - RNA, 82 nt, Human
aaugugaacauuuauucauauuguuuugauuacccucguguuacuacaagauggcaauaaauacuaugggauuguuuguauu

SEQ ID NO: 340 - RNA, 60 nt, Human
gaucaugcuaaaaggagauaauauuacucugcuacaaagugucuccaacuagaaaugauc

SEQ ID NO: 341 - RNA, 61 nt, Human
guccugaaaaaauaagcaauuaucauaacaauuuguuauugauacuggagguuucauugac

SEQ ID NO: 342 - RNA, 78 nt, Human
uaaaagucuucaacaucuaauuuauaagcuuuacaaguauuuauuuuauaaggcuuagacagaauuauuggaguuuua

SEQ ID NO: 343 - RNA, 86 nt, Human
cugccucuggaguccuagagacccggauuuacucagcuaggagagaggauggaucacagggucuaaggguggccauucagagguag

SEQ ID NO: 344 - RNA, 69 nt, Human
uuucuucagcuuuuaaaaugccuguccaaguugcuuacugggauuagaagcagaaggcugacaaagaaa

SEQ ID NO: 345 - RNA, 75 nt, Human
guaaauauuuaacaaauauguuuguauucuucuauuuuuauacaaugaauauuaauacauauugcauuuauuuau

SEQ ID NO: 346 - RNA, 71 nt, Human
guucaauuguacaaaaccuaauuuguugucaaaaguaucaagcaauaaauuuuaaauauuguacagggaau

SEQ ID NO: 347 - RNA, 61 nt, Human
ccaguggaagaugcucaacaccuccuccuugcuggagcagcugaacgagcaguuuaacugg

SEQ ID NO: 348 - RNA, 60 nt, Human
cugugacggucccuguagaagucuccaggaagaacccuauauuuauggagaccguggcgg

SEQ ID NO: 349 - RNA, 69 nt, Human
aaacaucuccaggcuuugauuuuuguaccauggaaauuguauuuaaccauacaggguuuugguauguuu

SEQ ID NO: 350 - RNA, 72 nt, Human
cccuuuuuccccuuuaaaaaauuuuugugaaaaguuucuuaaaaaaaaaaaaaagugggaauuguuuguggg

SEQ ID NO: 351 - RNA, 67 nt, Human
gcaucagaguaaucuucaguguggaauguuaaauaacgcuuuuauacuguauuuuguacuaugaugu

SEQ ID NO: 352 - RNA, 62 nt, Human
auucaugaaaacauugaagccuauaauauaaauuuuuauuaccacuuucaauagucauuaau

SEQ ID NO: 353 - RNA, 80 nt, Human
gcaggugcaaccugggagugcgugaaugcguccacccacaggaggagcgcuccucaugcucugacaguucugcgacaagc

SEQ ID NO: 354 - RNA, 108 nt, Human
gcgcugcucaggcgucauggcucccgacgggcgcugcucccuggcgcgcucuguugaggcgccggccggcuggcgcaguccugugggcggcguggcgcuugcaagcgc

SEQ ID NO: 355 - RNA, 77 nt, Human
gaaagccuacugaauccgcucugcagaaucacaguguuuacucugaaauucauuuagugaaguaguggaaggcuauc

SEQ ID NO: 356 - RNA, 62 nt, Human
guuuucauccucuaguacugaagugcccucaaggggguaggcacuguauagcaggagaaaac

SEQ ID NO: 357 - RNA, 84 nt, Human
ucauguacaagaguucacaccugaugaauguagacacauuccuagagaacauuuaucaaugugaaaauuucuuuaauacacuga

SEQ ID NO: 358 - RNA, 70 nt, Human
ucauuuuacagaugaguuuaugcuagcugugccuuugcucagagaucauaaauuuaugugugaucuuuga

SEQ ID NO: 359 - RNA, 63 nt, Human
ccuuucaguucuguaccuaggccuccaaagcacuuuagccuguggggcuugccagaacucggg

SEQ ID NO: 360 - RNA, 93 nt, Human
cugcaggaagaagaugaucugauggccgugggugucugggaagcucuucguggccucaaugcccuccuuuauccucaucuuucuucuaugcag

SEQ ID NO: 361 - RNA, 60 nt, Human
gcuuacucguaaugaucuaguggggaaacaugauucauucacuuaaaauacugauuaagc

SEQ ID NO: 362 - RNA, 91 nt, Human
aagcugggggcacuggcuucugcucuugcucuuucuucuggaaacauuauucuguuccuuuggacaugggcaaggguccugucccuaacuu

SEQ ID NO: 363 - RNA, 62 nt, Human
cccugguacuccuuauguagugagugauagaugcucauggaaaauggggagaaaacuaaggg

SEQ ID NO: 364 - RNA, 81 nt, Human
uugaucuuaaccaguuucacuuguaccaagaccaaacuuucuuaccuuuccaugcagggaaacaggcaccaucaagaucaa

SEQ ID NO: 365 - RNA, 74 nt, Human
cugaucaauccuucuuuuucucuuuugcccacaauuuaagcaaguagaugugcagaagaaauggaaggauucag

SEQ ID NO: 366 - RNA, 64 nt, Human
guuaaaaaagaagaaaaaagaaauggcacaaagaaaguuuuuucaaauuucuuucuuuuuuaau

SEQ ID NO: 367 - RNA, 80 nt, Human
uuucaauuuuuauuuugguuuucuuacaaagguugacauuuuccauaacagguguaagaguguugaaaaaaaaauucaaa

SEQ ID NO: 368 - RNA, 75 nt, Human
acgugugucugugugugcguauccacacuaggggugcaagccucugggugugugugugugugugcgugcgugugu

SEQ ID NO: 369 - RNA, 90 nt, Human
agcaccagcucuugccccuaugcuggguaccaagggaguucuccuagcuguggcuucucuagguucuaggggugcaagccucuguguguu

SEQ ID NO: 370 - RNA, 68 nt, Human
uacuuaccaagguucuccacugcuuaccuuuuccagugggacaguacagugugagcccccgggaagua

SEQ ID NO: 371 - RNA, 92 nt, Human
uuugguuugguaacuuuuucauccauggcugagguugaugcugccauggcugcaagaccucauucaauugaugggagaguaguugagccaaa

SEQ ID NO: 372 - RNA, 67 nt, Human
ccucuucucucuucccuccaccagaucuggcauuuaagggcacgaugggagcgggagacaggagggg

SEQ ID NO: 373 - RNA, 82 nt, Human
uagugcacaaugguggaaggaggcgguucguauguccccaggggcggcaucccaaugccagaccuuccucccaugggcucug

SEQ ID NO: 374 - RNA, 84 nt, Human
acguaaauucuguuuguuauagaguuucuucaguuguuacccaagugucauccuagagaagucagaagaaucagaauccaucgu

SEQ ID NO: 375 - RNA, 63 nt, Human
auggugauuucaaucgcaauauuuuaaauugaugagaaugauuuguaaacaugaaguuacuau

SEQ ID NO: 376 - RNA, 78 nt, Human
uauuuguauuuuacuaugauaguugagaaauuuagccucuuagucauuuuuagcuguuauuguggaagaccucaaaua

SEQ ID NO: 377 - RNA, 88 nt, Human
gacggcaaauauucuggggugaaggaggucauaauggggaaacacuuuuuuuuccccuuuuuaacuuccugugcccaagcuugccuuc

SEQ ID NO: 378 - RNA, 77 nt, Human
uguugcuaucuaucacuuucauguaacaauggacuuaguguccauuaaacugccugagaagugguuugagccugaca

SEQ ID NO: 379 - RNA, 88 nt, Human
acuagcaucacuccuaaauaaugugaacuuguuuugauuuuuuguuugaggcagagucucucacaguguuccuaggcuggagugcagu

SEQ ID NO: 380 - RNA, 66 nt, Human
auggucuuggcucauucugggcucaagcaauccuuucgccuuagcccucucaguagcugggacuau

SEQ ID NO: 381 - RNA, 62 nt, Human
ccaugcucggcuaauuuuuaaaauauuuguagagauggggucuugcuauguugccgggcugg

SEQ ID NO: 382 - RNA, 64 nt, Human
gggcaccccagugucccgcuggcccagcaggagucacuguuggccucuggacacucaucggccu

SEQ ID NO: 383 - RNA, 62 nt, Human
guguauuugaaugacuauuuuauucguauuuaaaauaauacuauuaaguaagcauuuugcac

SEQ ID NO: 384 - RNA, 84 nt, Human
agcucuuccgccuggcgcggcuugaggaccagugcacugaguacauggccaaggucauugagaagcugguggagcgggaggacu

SEQ ID NO: 385 - RNA, 89 nt, Human
cguggaggcggugaaggaggaggcagcggcuguggcagcccggcaggagacggacucuaucccgcugguggacgacauccgcuuccacg

SEQ ID NO: 386 - RNA, 63 nt, Human
acaagucuugggaaguccaucugacucucugaaacaguuugucucugaccucccaggaagugu

SEQ ID NO: 387 - RNA, 61 nt, Human
uggcacauauaauaauuaacaacagcaaagaugcuugguuucuuguuucauguaauggcca

SEQ ID NO: 388 - RNA, 125 nt, Human
gccaaggcucugaguuugagguguccugugcccugacccuacaagaugccaagagaagaugcucacuucaucuaugguuaccccaagaaggggcacggccacucuuacaccacggcugaagaggc

SEQ ID NO: 389 - RNA, 63 nt, Human
ggguuugaucaucgggacagcaaagugucucuucaagagaaaaacugugaaccugugguuccc

SEQ ID NO: 390 - RNA, 67 nt, Human
auccucacaggcacuggacaauucaaaaaacguaaaguuguuuguuagaauacuggugcuuuuggau

SEQ ID NO: 391 - RNA, 62 nt, Human
aacugggcggagguggaggugcagugucaacuguggcucuguaacucuucaaaggcccaguu

SEQ ID NO: 392 - RNA, 99 nt, Human
ccagugggaguacucaaguccuaucuccauguuaguucuucaaucuaauauuaacuauauuuuggcaaguaauaugacuauaggguuugguuuccgggg

SEQ ID NO: 393 - RNA, 60 nt, Human
gccccagccaccauauaccccugcaguuugcacuuuaauugaugguaguucaguuggggu

SEQ ID NO: 394 - RNA, 63 nt, Human
ugcugugaucugauuggaggagggacaguuucugguacccauccucugauuuauacauaugca

SEQ ID NO: 395 - RNA, 91 nt, Human
uugcagugguuuuagugggugaaaaugucccaucugcaccaguacacaggcaggcauuaucauucuucaccuacuuuuuaaauaguggcaa

SEQ ID NO: 396 - RNA, 63 nt, Human
uuuuuauaaguauacugcauuuuuugagccuaucauuaauuagcuuaguaugaaagauaagaa

SEQ ID NO: 397 - RNA, 88 nt, Human
cugugggaugauugccacauacauggaacaccugggagugcuggaaauguacugggaucgaagugacaaaguguguuuucauucacag

SEQ ID NO: 398 - RNA, 66 nt, Human
uucagugacguacauggcucugguucuggacacaaaaucuguacuggagaggaaaugacugcugaa

SEQ ID NO: 399 - RNA, 75 nt, Human
ggcaguggcugauugacacccucuaugccuucaacaguggaaaacguagagcgguuccagacucugaagacugcc

SEQ ID NO: 400 - RNA, 68 nt, Human
ggggccagcagccugauuuagcagcuaaugaagccagcuucugagggaaaauucaguuguugugccuc

SEQ ID NO: 401 - RNA, 74 nt, Human
ggggcuagcaggacuucucggcgagggaguuuuuaacuuuggagaacuccucaugcacccugugcuggaguccc

SEQ ID NO: 402 - RNA, 69 nt, Human
aguuauggguauguauuauaauuucuaaaaugcaaauaaauauaaagaaaauaaauauaacccauaauu

SEQ ID NO: 403 - RNA, 63 nt, Human; identical to SEQ ID NO: 123

SEQ ID NO: 404 - RNA, 65 nt, Human
ccccacgcucaguccuggucaaaggcugccagaccuuucugagugcccccagggaggggcugggg

SEQ ID NO: 405 - RNA, 91 nt, Human; identical to SEQ ID NO: 124

SEQ ID NO: 406 - RNA, 66 nt, Human
gcggcugcagaauaccgccugcggaguaacugcaaagaugcuguccgugcgcguugcugcggccgu

SEQ ID NO: 407 - RNA, 87 nt, Human; identical to SEQ ID NO: 76

SEQ ID NO: 408 - RNA, 64 nt, Human
ucguaggccuucucgaugcacccagcgaucucaucccugauagugucgagcaggaugucaauga

SEQ ID NO: 409 - RNA, 72 nt, Human
ugaagaagguguagcucucggcggggauguuacccuuggccaggaacacuuuguuguagcugcccuccauca

SEQ ID NO: 410 - RNA, 91 nt, Human
uuguuggggcccaggacccacccucgcuucuuggcguagucugucaucuuuugggguguguugaagaagaggauccggguggccucaguga

SEQ ID NO: 411 - RNA, 101 nt, Human
agagggugggagccuaaggaagcgugggguagcagauggaguaauggucacgagguccagacccacucccaaagcucagacuugccaggcucccuuucucu

SEQ ID NO: 412 - RNA, 68 nt, Human
cuacgugccagcucuaguuuucagccuugggagguuuuauucugacuuccucugauuuuggcaugugg

SEQ ID NO: 413 - RNA, 68 nt, Human
caggcucgugggacuguacguggacccgcaaggccggagggcacgcgcgcaggagcucauguggccug

SEQ ID NO: 414 - RNA, 69 nt, Human
gagcaucgcaggcggaggggcagccucuagaccgugguaaaucccaaugaccccucgcuugcguuccuc

SEQ ID NO: 415 - RNA, 103 nt, Human
gccucuuguggucggaagcaccgagugugcuacuucuauccguggucguaccuugauggagcggaaggcagauuagacaucgaggcuuccggaaaacaaaggc

SEQ ID NO: 416 - RNA, 112 nt, Human
uccagagaacgaagccauuccacagagaguucacugagauuguguggucccggcagcgugcagggccuggcggugcucaugggacaggcucuguguaggcuacccuucuggg

SEQ ID NO: 417 - RNA, 104 nt, Human
ccaaaaccuggguguccucacugcugcccugaguccagccaugguuuucagggggacaguggacagggacucagaaauguggugggagggccucccuggcuugg

SEQ ID NO: 418 - RNA, 86 nt, Human
guguugcugagguguaucuagaggaucccgguaagagcgucugugauuacgggacagccugcugagaaauugcacugaagagaugc

SEQ ID NO: 419 - RNA, 64 nt, Human
cugguugauuaaugagggcaugggguggucccucaagaccuuccccuaccuuuuguggaaccag

SEQ ID NO: 420 - RNA, 88 nt, Human
gcugggugccaggggcaggggauccucaguauagccggugaacccugauaccaggagccugggccucccugaaccccuggcuuccagc

SEQ ID NO: 421 - RNA, 88 nt, Human
guggcucggcucagcugccuggguuguggccgcccuagcauccuguaugcccacagcuacuguaauccccgcugcugcuccgggccac

SEQ ID NO: 422 - RNA, 79 nt, Human
agugggggugaauucauguguaguacaagccgauagacagaccaguccuugcuugacgcacaagucugaaugcuccacu

SEQ ID NO: 423 - RNA, 72 nt, Human
gcaggaccccagcuuagugagcuccuugaugcugcuuacaugucucgaucccacuuaacuaucuugggcugu

SEQ ID NO: 424 - RNA, 74 nt, Human
gcucuugcaaucaagucugugauguauuaauaaugccuuauauauuguuuguagucauuuuaaguagcaugagc

SEQ ID NO: 425 - RNA, 99 nt, Human
guguuuuugcacauaauccauauuugcuguucaaguuaaucuagaaauuuauucaauucuguaugaacaccuggaagcaaaaucauagugcaaaaauac

SEQ ID NO: 426 - RNA, 67 nt, Human
auguauuuaacaaucaucugguugacaaaaaauguaucuuuaauacagucagcuuuaaauuacgcau

SEQ ID NO: 427 - RNA, 110 nt, Human
guccuggcaaagaugacaugccguucacacucauucaucacgcugcgugccuucugauugucauagaguggcauaggcguugaugugaccgucuccacaucuauugggac

SEQ ID NO: 428 - RNA, 67 nt, Human
uugauacggagucuugcucuguugcccgggcuggagugcagugggugacagagugagacccuguuga

SEQ ID NO: 429 - RNA, 88 nt, Human
caggagcuguaggggaggucucugccagugcgggcuggcccucagcccgucgcgagggggaagacagcuccccagccugcagcaccug

SEQ ID NO: 430 - RNA, 83 nt, Human
auaggcacguuuccauaacucccuguucccaagguuuggauaaccuaugcucauuuagcaggaacacuacacuacgugcuugu

SEQ ID NO: 431 - RNA, 83 nt, Human
gcccuuuucccacuuuuuuugcuuguuuaauuuuagagugacaaaacucagauccagcuuguggaugcucuuggggaaacagc

SEQ ID NO: 432 - RNA, 69 nt, Human
gcuggcgaucuuuuuuuuuuuuuuuuuuuuuuuuuuuuuuuuaaaaaaaaauuccccgaaauugcccgc

SEQ ID NO: 433 - RNA, 66 nt, Human
agguugaaagauuuauucaagaucccaaagcuggcaguugauggaucugggauuucaauccagccu

SEQ ID NO: 434 - RNA, 70 nt, Human
cauaguuuauauguauaugcacacauacauacauauauguuguguauaaauguacacuuuuuuagacaug

SEQ ID NO: 435 - RNA, 70 nt, Human; identical to SEQ ID NO: 434

SEQ ID NO: 436 - RNA, 64 nt, Human
gcaccagcacaggccuccaggguagcaucuuucuugcucuugcccaugagguucagguaggugc

SEQ ID NO: 437 - RNA, 73 nt, Human
ucaccuccgggaacaccugguuccccaucacucugugcagcagaggguggcgggacauguugcucaggaggga

SEQ ID NO: 438 - RNA, 60 nt, Human
agugaauaccacauuucaauugcugccaaugacacagccccugaaguuauuaauucuacu

SEQ ID NO: 439 - RNA, 73 nt, Human
ccacugaaaagaaauggagaaugaaaaauuuaccaaugaaauaauacauuauucauuaucuuucucagguugg

SEQ ID NO: 440 - RNA, 63 nt, Human
ggacauuggaaaugacauuaauaucuucuacuugauuagaaaaaguggaucuuuuccaaugcc

SEQ ID NO: 441 - RNA, 75 nt, Human
auuguggacuggcuggcucuguuauaacucuguccaaaaaguguauggaauauaacuuguaaagcuucccacaau

SEQ ID NO: 442 - RNA, 83 nt, Human
uaugcauguguuuaaaccaaauaccagaauagcuuuaacaauagagcuagcauaauaguauuuauuaaagaaucacaucugua

SEQ ID NO: 443 - RNA, 82 nt, Human
gauccaucuguguaguuucugaacagucagcgauuccagguuuuaaauaguuuguaaauuuucaguuucuacacacuuuauc

SEQ ID NO: 444 - RNA, 70 nt, Human
ggguggcauggggagcagcuagaacagugcagauucauccauaaucccuuucugcuguucaccaccaccc

SEQ ID NO: 445 - RNA, 130 nt, Human
auaguuuaugcuguaauaguuuaugcuguaauaguuuaugcuguaauaguuuaugcuauaauaguuuaugcuguaauaguuuaugcuguauaguuaugcuguaauaguuuaugcuguagcauaaacuauu

SEQ ID NO: 446 - RNA, 91 nt, Human
uuuguugaugcaacucuucuggaaggaaaaaaagagccaaaugaucagccucaucaauacugaccuggcuaaaaacaaaauucccaacaaa

SEQ ID NO: 447 - RNA, 75 nt, Human
cagggagaggcucuucugcguguagugguugugcagagccucaugcaucacggagcaugagaagacguuccccug

SEQ ID NO: 448 - RNA, 75 nt, Human
gccgucggaguccagcacgggaggcguggucuuguaguuguucuccggcugcccauugcucucccacuccacggc

SEQ ID NO: 449 - RNA, 66 nt, Human
acauugaagaguggaaguguucaagaacaguggcucacagacuuacauuuacugcuuuuaacgugu

SEQ ID NO: 450 - RNA, 77 nt, Human
cuuguugcuacagucuucuuuauuuucugcucacuauagagaaaggggaagcagaacaucuaagaaagagggacaag

SEQ ID NO: 451 - RNA, 114 nt, Human
gaguccucagguugaugcugcagagccugcgggugaacagaguugggccugaggagcugccuguugugggccagcugcuucgacugcugcuucagcaugcaccccucaggacuc

SEQ ID NO: 452 - RNA, 94 nt, Human
uuuuuuuuuuuuuuuuucaaaaagaauguuuauuuuaagcucuauguacagaagaacagaguauaaacguaaaaaggaacaaaggaaacaaaaa

SEQ ID NO: 453 - RNA, 68 nt, Human
auagcuuuacagcguaggaucauaccacuaccaaaagagcaguggacaauaagacuauacugagcuau

SEQ ID NO: 454 - RNA, 62 nt, Human
ggcucccauacuuagaauguuucuaguuaagguaauaaauuaggcaacccaagugugacucc

SEQ ID NO: 455 - RNA, 70 nt, Human
aaaacaagccaacaacugaauuguaccuauggccaguggguggcacuaaaauacauuugaggcuuguuuu

SEQ ID NO: 456 - RNA, 97 nt, Human
uuaaaacuuuguugcaaaacauguuugugacuacucuuaugcugcuuucauauaguaaaguuauaagaaaaacaaucauauauaugcaggguuuuaa

SEQ ID NO: 457 - RNA, 66 nt, Human
acauagugaaaccccaucucuacuaaaaauacaaaaaauuagcagggcgugguggugggcacaugu

SEQ ID NO: 458 - RNA, 86 nt, Human
gagaaucacuugaaccggagaggcggagguugcagugagccaaaaucaugccacugcacuccagcuugggagacagagugagacuu

SEQ ID NO: 459 - RNA, 94 nt, Human
gaggcagaaucgcuugaacccuggaggcggagguugcagugagcugagaucgcgccacugcacuccagcuugagugacagagugagacugucuc

SEQ ID NO: 460 - RNA, 86 nt, Human
aauuauuucacugauguuuucuucucucuucauuucuuucuuucuagaaauccauguucuaauucagaggcauuaauucauuaauu

SEQ ID NO: 461 - RNA, 68 nt, Human
gcuauuuaauuccuuuguauaugauauccucucuccucuccgggagcuuguacgaucucuuuguuagc

SEQ ID NO: 462 - RNA, 70 nt, Human
uuuucuccauuuuacugggaacucaguuuccuuucagucuaggaacccaguuccuuuuauccucagaaaa

SEQ ID NO: 463 - RNA, 66 nt, Human
cacggugaaaccccgucucuacuaaaacuacaaaaaauuagccgggcacaguggcgggcgccugug

SEQ ID NO: 464 - RNA, 65 nt, Human
gugaacccgggaggcagagcuugcagugagccaagaucaugccacugcacuccagccugggugac

SEQ ID NO: 465 - RNA, 95 nt, Human
uggccgggcgcgguggcucaagccuguaaucccagcacuuugggaggccgagguggguggaucacaagguccggagauugagaccauccuggcua

SEQ ID NO: 466 - RNA, 63 nt, Human
ccucccacuaccacccaaucugccugccacagcaaagugcaggcacccugggcccccuggagg

SEQ ID NO: 467 - RNA, 65 nt, Human
gcagggccugguuucucuuccuugaaggccuuuuacagauuucagcuuucacugggccuccaugc

SEQ ID NO: 468 - RNA, 71 nt, Human
gugaggaguuuuuuuaaaguuuucuuuuuuaaaaaaaaaaaaagaaaguuaaggacaaacggcaaacucac

SEQ ID NO: 469 - RNA, 67 nt, Human
uuaacuacuauuuagauuuuggggauaaaguuuuccugucuuuuuacauuaauacaauaauaguuaa

SEQ ID NO: 470 - RNA, 131 nt, Human
guugaauccguugacagugagcgguugcaauccgcuugacagugagcgguugcaauccgcuugacagugagcgguugcaauccguugacagugagcgguugcaauccgcuugacagugagcgguugcaauc

SEQ ID NO: 471 - RNA, 130 nt, Human
ugcaauccgcuugacagugagcgguugcaauccgcuugacagugagcgguugcaauccgcuugacagugagcgguugcaaauccgcuugacagugagcgguugcaauccgcuugacagugagcgguugca

SEQ ID NO: 472 - RNA, 130 nt, Human
ugcaauccgcuugacagugagcgguugcaauccgcuugacagugagcgguugcaauccgcuugacagugagcgguugcaauccgcuugacagugagcgguugcaaauccgcuugacagugagcgguugca

SEQ ID NO: 473 - RNA, 79 nt, Human
gcuugguuuuagggauugagaacuugccuugcagguuuccuuccucaaaaggagcagggcaguccuuucccuguugagu

SEQ ID NO: 474 - RNA, 109 nt, Human
ugauuaaucacacgcuaauauagauuacugccucuaacuuuguaaguguggcaaugacuucuuaauuaaagaaagaugcaggaguuaugucuaagcguucaguuuuuca

SEQ ID NO: 475 - RNA, 69 nt, Human
uguguauggccauguuucauucucaaauuuaauucuauaaauacaaauccuaaauacauggcuacagca

SEQ ID NO: 476 - RNA, 65 nt, Human
ccaccugccccugagggagaggaaaggugaaguauuccugccaccucucccuccaagggaagggg

SEQ ID NO: 477 - RNA, 69 nt, Human
uggcugaugggcaagggggcaaaguaaggacauuuuuggugcaaagacucccccugacccaccaggcca

SEQ ID NO: 478 - RNA, 110 nt, Human
cguaagucguguaucguuaagugcgugaucguugaaugacgugcaucuguugaaugguugaucgcugaaguacguugcaucgcuuaaguacguugcaucgcuuaaguacg

SEQ ID NO: 479 - RNA, 66 nt, Human
ugugccgccgcgcccagcccccacaaaaaaguuaaaaaaaccauaggugggggccgcggccccaca

SEQ ID NO: 480 - RNA, 74 nt, Human
cugaauccuuccauuucuucugcacaucuacuugcuuaaauugugggcaaaagagaaaaagaaggauugaucag

SEQ ID NO: 481 - RNA, 73 nt, Human
guagauggcugcucuaaaaagacaaaugaauggggaaagacaaucauugaauacaaaacaaauaagccaucac

SEQ ID NO: 482 - RNA, 64 nt, Human
cacaaucuucaaaauucuugcaacauuaaacauaguaaaaugccagaauauaaaaugaggugug

SEQ ID NO: 483 - RNA, 71 nt, Human
ggucacaggauugaggccagcauuacaguuuggggugauuuuucuuuuauuugcucccucacuuuguuucc

SEQ ID NO: 484 - RNA, 62 nt, Human
cgccucuuaucaagucagcacacaccuuuuccaaggauuuuacguugcggcuuguuagggug

SEQ ID NO: 485 - RNA, 68 nt, Human
uuaagcaucugcaauggugacuuccaccucaacuccuggcucaauacugauggaaguaaucugcuuaa

SEQ ID NO: 486 - RNA, 64 nt, Human
uguuuuguuguugugcacuguucgagguguaguuguggguuuuaguugguguagcagugggaua

SEQ ID NO: 487 - RNA, 73 nt, Human
aaucauguagcugccuuauaaucuuuggcuccagucuuuaggcugccaacacauuauauaugccuuacugauu

SEQ ID NO: 488 - RNA, 75 nt, Human
ugacacagucucuaagccucaagucauguuccuaccuacuuuaucauacuuuauguaggcaaauuguuuguguua

SEQ ID NO: 489 - RNA, 76 nt, Human
guucuaaaauguaauuaggauuauauugugauggcauaguauauuuuccuuccuuaaucuugaucuuauuaagagc

SEQ ID NO: 490 - RNA, 78 nt, Human
gauuucauaggugucuguuuucuuguacuguuagcagauucugacagaugugaugagaagaagaaugcauuggagauc

SEQ ID NO: 491 - RNA, 63 nt, Human
uugcuaaaguugaacaaucccgguacuguaccauaucaguccuuuguggguaguagguagcaa

SEQ ID NO: 492 - RNA, 60 nt, Human
gccaucccacaguuguuacugguuugucaagcauaagccaugcccuaacgacaggcuggc

SEQ ID NO: 493 - RNA, 74 nt, Human
agcaacccccagccuggagcauaagagaucaagauccaaugcuaaacuccaaugguucagugacugugguugcu

SEQ ID NO: 494 - RNA, 81 nt, Human
gaggagcaacucauggugccuccgcuuuguuuuaguucaucaaauuucuacgacucauuaggcacuuugccacugcucuuc

SEQ ID NO: 495 - RNA, 75 nt, Human
gcgugauggcagccuugcagagcuagaccugcacuuaacuugcagcugccucccgagccuccaagauguccacgc

SEQ ID NO: 496 - RNA, 70 nt, Human
ggcggcagggcgcugcaccgugcucccccggcucugcucgacagcagcacgcagugagagccucgccgcc

SEQ ID NO: 497 - RNA, 124 nt, Human
uuucccacgacacgauguucccuuucuacagcugcuggaggacuggacugcuacuacuacuccuggcuguggcagugagagaauccuggcagacagaagaaaaaacuugcgacuugguaggaga

SEQ ID NO: 498 - RNA, 75 nt, Human
guaugcaauuccugucuucaaaaaaguuaccucaucagguagaugagacuuauuaugaauaaaaggaaucaauac

SEQ ID NO: 499 - RNA, 73 nt, Human
gggaagugcaguacagucgugaugcuccucugcccccccggcaagaccucaacgccccugaccucuauauccc

SEQ ID NO: 500 - RNA, 97 nt, Human
gggcugcuguucggcagcgauggcuacuacguggcgcuggccuggaccucaucggcgcucauguacuucauugugcgcucuuugcggacagcagccc

SEQ ID NO: 501 - RNA, 82 nt, Human
cagaaaagaggguuugaugauaaggauggcuauaccuuggggagaacuuaguggaguugaagaucagccagaucccucucug

SEQ ID NO: 502 - RNA, 75 nt, Human; identical to SEQ ID NO: 74

SEQ ID NO: 503 - RNA, 71 nt, Human; identical to SEQ ID NO: 77

SEQ ID NO: 504 - RNA, 89 nt, Human
uguccuugaacuuggaaccugacaauguugguguugucguguuuggaaaugauaaacuaauuaaggaaggagauauagugaagaggaca

SEQ ID NO: 505 - RNA, 75 nt, Human
cugcaaagaugcuguccgugcgcguugcugcggcgugguccgcgcccuuccucggcgggccggacuggucuccag

SEQ ID NO: 506 - RNA, 75 nt, Human; identical to SEQ ID NO: 74

SEQ ID NO: 507 - RNA, 87 nt, Human; identical to SEQ ID NO: 76

SEQ ID NO: 508 - RNA, 71 nt, Human; identical to SEQ ID NO: 77

SEQ ID NO: 509 - RNA, 80 nt, Human
cugggcuucaaggaaggacaaaccaucaaguuguguaucgggaacauuacaaacaagaaaggaggugcuucuaagcccag

SEQ ID NO: 510 - RNA, 71 nt, Human
uucaaguggguaaagcaggaaucugagauuuccaaggaaucucaagaaauggaugcucguccuaaguugga

SEQ ID NO: 511 - RNA, 72 nt, Human
gcaccccgccccucacuugcuggcuaguaugcagcugcagaaacuuaauagccaguaucaggggauggcugc

SEQ ID NO: 512 - RNA, 92 nt, Human
gccccuggcggaggggccgcaggucaccggccccaucgagguccccgcggcccgagcagaggagcggaaggcgagcggccccccgaaggggc

SEQ ID NO: 513 - RNA, 105 nt, Human
ugggcaaggauuggcaccggcccugccugcgcugcgagcgcugcgggaagacacugacccccggcgggcacgcggagcacgacggccaugcccuuacuugccaca

SEQ ID NO: 514 - RNA, 68 nt, Human
cuguggucagucucaguguucccuucaggguccgccggcucacgcugggagaaugagagggacuucag

SEQ ID NO: 515 - RNA, 69 nt, Human
uggauaacuaacgcgugcuuaagccucugaggaccucauucacuaagaggacgaggcggcgcaagucca

SEQ ID NO: 516 - RNA, 85 nt, Human
uccucaaauacuacacauuuaaaggaacuguuaaacugaaaaagacuugacaauuuuugguaaauccguagcacagaaaugagga

SEQ ID NO: 517 - RNA, 60 nt, Human
aguaccgaucuccugaacagaacugcuguaauaaagcuucauauucaccagguccguauu

SEQ ID NO: 518 - RNA, 83 nt, Human
ccgaagcgugcaaggaaaaauaaaaacaaagauaaccuguaaaaauauaacaaaucuucacuaugcauauuacaacacuuugg

SEQ ID NO: 519 - RNA, 75 nt, Human
gccgucggaguccagcacgggaggcguggucuuguaguuguucuccggcuacccauugcucucccacuccacggc

SEQ ID NO: 520 - RNA, 63 nt, Human
ugugucauuuuuuaauauagcugauugacuucacagaaagcagcuuuuuugaauucuaauaca

SEQ ID NO: 521 - RNA, 74 nt, Human
gccgggggucuggcaggaaugggaggcauccagaacgagaaggagaccaugcaaagccugaacgaccgccuggc

SEQ ID NO: 522 - RNA, 93 nt, Human
ucguucugcagauugacaaugcccgucuugcugcugaugacuuuagagucaaguaugagacagagcuggcaugcgccagucuguggagaacga

SEQ ID NO: 523 - RNA, 90 nt, Human
uuuggggggaccgccaggguccagacacggagaacggucaaaaaagaaaaaaccggccuucggggacagaaaaaaggcauuuccccuaag

SEQ ID NO: 524 - RNA, 73 nt, Human
caccgcgcugcucgccccacaugcccucauggcuguuguuccagggggggcaguggggugggccggccuggug

SEQ ID NO: 525 - RNA, 73 nt, Human
ccucgaacuggcuguuccaggcggcgucgggcugguuguuccagggcgcgucgcguggccguuccagccgggg

SEQ ID NO: 526 - RNA, 128 nt, Human
gguggcugcucuggcggcugcugcuggccccaaggagccacggggugaggcuggucaaaccaaaggggcuuguuuggugggaucuggucguguggcccggggcccggggcggacagcugcaggauucu

SEQ ID NO: 527 - RNA, 63 nt, Human
aagauagaggcagaacugcaggacaucugcaaugauguucuggagcuguuggacaaauaucuu

SEQ ID NO: 528 - RNA, 69 nt, Human
ugaaggcagucacagaacaggggcaugaacucuccaacgaagagagaaaucugcucucuguugccuaca

SEQ ID NO: 529 - RNA, 102 nt, Human
gagcgcaagaggacacauggcguggcaaggugacgagugacggugcuccuguccaucaucucguguaccucagccgugccgcucccugugagaucuuggcuc

SEQ ID NO: 530 - RNA, 69 nt, Human
gcaaggcugaacuucccuagaccuaagagugccuuggagcgccuguacucaggggaucaccagcgaggc

SEQ ID NO: 531 - RNA, 87 nt, Human
ggcagagggcucucaggguccacgucaaggguccagcagucgucaccauugcucccuacgucacacuccggagggugucucaaugcc

SEQ ID NO: 532 - RNA, 61 nt, Human
acgcuuaacuguuguguaucuuuuuuguucuuuacaagaagugcagagggguuuuuugugu

SEQ ID NO: 533 - RNA, 79 nt, Human
gcuuuauugccuugcauucuaaugcaguuuguucuguaacucgagagccaguagcauuggauugauggaaguguagggu

SEQ ID NO: 534 - RNA, 74 nt, Human
cucagcuagguccugaaauugucgugcuguucuauggaacacagauggggagcugauuuucauagucccuugag

SEQ ID NO: 535 - RNA, 81 nt, Human
ggugucuugguucuagcuucugggccucuuguuuucuagaauuauuugauacaagaaaguucuggcacaaccacaggcacu

SEQ ID NO: 536 - RNA, 78 nt, Human
ggcugaguguaugauggcaugacuauagcucacuguaaccuugaacuccugggcucaagcaauccuccuaccucagcu

SEQ ID NO: 537 - RNA, 92 nt, Human
ugccucagccucccaaagcaccauuaaucuuuucaagcagggccucaaggaguaaggacaaagcuaauggguuaauggguggggggcaggca

SEQ ID NO: 538 - RNA, 60 nt, Human
gauaauaaauaugauauuuaaacgaugaaacuaaauggugaaaaucucuuguuuuuuauu

SEQ ID NO: 539 - RNA, 86 nt, Human
ucuguggccccaggcaaucuuuucauuaacauuauauccuaaaaauuauuaugcuaauguuaaaaauaaagaaauugggacucaga

SEQ ID NO: 540 - RNA, 69 nt, Human
acuuuugauagauacugaguuuuugcucauuugcuacaugaagcagaggcagaguauucuguguggggu

SEQ ID NO: 541 - RNA, 60 nt, Human
ggacaggaacacugaccccugaagucgagccugggggucuaacauaguggucauuugucc

SEQ ID NO: 542 - RNA, 80 nt, Human
uuagaaaagugcugccagaaacauccuugccaugcuucuguauguacuggugcuaguguuucuaucagauaaauuuuuag

SEQ ID NO: 543 - RNA, 63 nt, Human
gguccccugccccuggaggugcuuuaagagcagcguccagaugaagcucggacauuggggacc

SEQ ID NO: 544 - RNA, 61 nt, Human
caccagcuucccaucacgugucucgaucuucuucacaaccacggcccuggaggagcuggug

SEQ ID NO: 545 - RNA, 131 nt, Human
gccucaggugggucuccuguucccagugcuacccugcauagcggccuccuucccaggcucuggggcagcgcaggagggguaggcugggaggggcugccgcagcuguucacuugggcaggacgucagaggac

SEQ ID NO: 546 - RNA, 82 nt, Human
ugggagggcaagagaggaagagauggcagcuuuuuaagugaaauuuuaaucuuaucuaucuuuuguucauuuugagucccca

SEQ ID NO: 547 - RNA, 75 nt, Human
uuucuuaaucacuauugucagcuugguugcuacacauuuaauuacaauauaaaguugacauugaggaugaagaaa

SEQ ID NO: 548 - RNA, 68 nt, Human
gccugcauaggcuguagcaaaguuugcaccauaaaacagugggccagcguaauggggcuucauaaggc

SEQ ID NO: 549 - RNA, 107 nt, Human
ugaagaauuuaauuacuuuaccaaaggaggggucuaccuuguaacuagccagguucaaaguuaaaaguagggcaacuucaguucggguuaagugaucugaauucuca

SEQ ID NO: 550 - RNA, 103 nt, Human
cuuagauggccaauugaaacaaacaguucugagaccguucuuccaccacugauuaagagugggguggcagguauuagggauaauauucauuuagccuucugag

SEQ ID NO: 551 - RNA, 74 nt, Human
uauucuaaguauuccaaauaaguugacucauacaguguuuauucuuuuaugucuggcuuauuucacuuagcgua

SEQ ID NO: 552 - RNA, 64 nt, Human
agaaguuccuuauauauuauguauauuaaccccuuaucagauauaugauuuguaauuauuuucu

SEQ ID NO: 553 - RNA, 109 nt, Human
ggugucuuaccauguugccuaggcugguaggcuggucucacacuccugagcugaaaugaugcuccugacucagccuccacaacuagcugggauuacauagugagucacu

SEQ ID NO: 554 - RNA, 61 nt, Human
gugcccuaagcccagcuuuuaaccacuaaacuguaguuucuggcaucaaguauuagggcac

SEQ ID NO: 555 - RNA, 85 nt, Human
ggcuugcgauuccacuccgggcaggcuucaggcuaucugggacggagacugccaggcugaagccuguuccugcggaacgcaggcc

SEQ ID NO: 556 - RNA, 77 nt, Human
uuauucugauuuuuucauaaucaaaggucauaugauacuguauagacaagcuuuguagugaaguauaguagcaauaa

SEQ ID NO: 557 - RNA, 65 nt, Human
uuuauugcagccuuucuuuuccuauuucuuuuuuuuaaggguuaguauuaacaaauggcaaugag

SEQ ID NO: 558 - RNA, 69 nt, Human
uaagguguauaccuagucugugcugauuaguaaaaaaauaacacagccuuucagagugguagaucuuua

SEQ ID NO: 559 - RNA, 130 nt, Human
gaacgugcccugugcuaugucgugccugcagggacacgucggaucccgugggccucacaugccaggucaccaggucaccgucuccuuccaccccugcagugugcuguugugcacgucagggacgcuguuc

SEQ ID NO: 560 - RNA, 65 nt, Human
gcagacucaugcagcccuauggccgcucagaccaaggcgcagagaggcuaucagggcggcucugc

SEQ ID NO: 561 - RNA, 66 nt, Human
ggcccagcaguauugcucacgggggcuccagccgccggcguggcccucaugagcuacgccuggguc

SEQ ID NO: 562 - RNA, 111 nt, Human
gccgcucgccuccuccugccguccgcucggcucaggcgcgggcccuggcuaucuggcgguccucggucuccgcccugcccccggccggcggcagguaagggaggcggcggc

SEQ ID NO: 563 - RNA, 66 nt, Human
cgcuguuacuagaaccuacuacccugccuuugaacauuagagcauacuuuguaggacucugcagug

SEQ ID NO: 564 - RNA, 77 nt, Human
cucuucccuguaagaauuuaccuuccaaauguggcuuuuccaucaaaguucaaaagcacuguucaaacuggggagag

SEQ ID NO: 565 - RNA, 63 nt, Human
gauuagcacaugacuuaaaaggugcuguugcauaauaaaaagucaacaaagcaugugcaaauc

SEQ ID NO: 566 - RNA, 78 nt, Human
cugguuuguugaaacaguaagucagacaacauuugccacaauaaugucugucaaagugacuugccauaaacaccccag

SEQ ID NO: 567 - RNA, 94 nt, Human
uucuuucucuugugcuuauucuucuugggagugguguaagacuucuucuuccuuuucuuagcaccaccacgaagucucgacgcgagaugaagag

SEQ ID NO: 568 - RNA, 68 nt, Human
cugccaaucaggaagcuccccaagccucacuguccagaguuuuuauugggguuucuuuacauaggcag

SEQ ID NO: 569 - RNA, 84 nt, Human; identical to SEQ ID NO: 286

SEQ ID NO: 570 - RNA, 81 nt, Human
ggcgagccgcagguggauugucugaaaagcucucaacagacaugggcuuagcacgaaccauauauccauuggcggaucgcc

SEQ ID NO: 571 - RNA, 80 nt, Human
agaggcaaagcuagggcagcucuggggucugggugggaaaggggcaucugaucucaguugcugcucaaggcacagcugcu

SEQ ID NO: 572 - RNA, 64 nt, Human
gcuucauucuuuuagaggaaaaaguacauagaaaacuguugcuguucucuacaaagaugacggc

SEQ ID NO: 573 - RNA, 66 nt, Human
uguuuaaaugauaaauuaggauauguuucugaauaugaaauuaagaaacauccuucagauuaaaua

SEQ ID NO: 574 - RNA, 68 nt, Human
agccauccugucaagcgcugggauuguucugaucucugggagccuccagggcugacuccaguauggcu

SEQ ID NO: 575 - RNA, 102 nt, Human
uaggucccaacaguuuguguuuuccuuacugucccaguuuuauaucauuauucuuaguacuaaacagagugacaacagggagugacauuuguugaggaccua

SEQ ID NO: 576 - RNA, 87 nt, Human
uccuccugucuuggucuaaacauguugagauuacaggcuugagccaccaugcccagccugaaaaacuuuuaagacaagacauuagga

SEQ ID NO: 577 - RNA, 63 nt, Human
ucaacugucaccauagaaucuagugcauggucuaccugacgaccagacaauguugacuacuga

SEQ ID NO: 578 - RNA, 82 nt, Human
aggagacguccucuacauaaaagcuccaugugaaaagcuacuccuagucuuaacauuugcaguccuugugucacugucuucu

SEQ ID NO: 579 - RNA, 77 nt, Human
ggcuuagcugugagaagugguucucuuccucuggucccuucuggggacucuguuuccccauuucuugcugcuguguc

SEQ ID NO: 580 - RNA, 62 nt, Human
ccuuagacuauagacauaacuacaaagccagugcagcuuuguuuucuguauguuguuggggg

SEQ ID NO: 581 - RNA, 68 nt, Human
gauuuuaagaacuaauaacaucuugaguuauuuuuaauucagggggauguggaaagguuugcaauguc

SEQ ID NO: 582 - RNA, 79 nt, Human
ucaccauugcguuacagcuacccacaguauucagcacaacaacgugcuuuacagguuuggggcccaguagcaaagguga

SEQ ID NO: 583 - RNA, 70 nt, Human
uuaagugaugcgugaccguaaauauauauagugcuaaguccuuauuauuugaauucauaaaaucacuuaa

SEQ ID NO: 584 - RNA, 75 nt, Human
augcacagaguuagguaacaaaaauuccuaucagaguaaaaugacaaagcacagaaaaaccagauucuaaugcau

SEQ ID NO: 585 - RNA, 74 nt, Human
uuuauugacuacuuuaaguagaacaaacuaaauacauauuuaacaguuuugguucauuuauacaguacauuaaa

SEQ ID NO: 586 - RNA, 65 nt, Human
cagggacagaaggcagcucccuucccccaggaagggcaagaggagcaggugccuggcugucccug

SEQ ID NO: 587 - RNA, 61 nt, Human
gcaacagacucuuuauuuaaugugguuuaaaauacaucaaaaucaagucccuggcuguugu

SEQ ID NO: 588 - RNA, 72 nt, Human
ugugcaaggcggaaaggcuggggcagcagcuggagaaucagcucagcaggccuuggcccucccccguggaca

SEQ ID NO: 589 - RNA, 86 nt, Human
gguccggcugcccuugaccgguccgaccuggcguccuccccgauaagccgccccacgggccggucccccgggccacaccgccggcc

SEQ ID NO: 590 - RNA, 64 nt, Human
ucugguuuaaacagaucaugaacuaacugaaacucagcuagccagaaugaacaacacaaccgga

SEQ ID NO: 591 - RNA, 60 nt, Human
uguacugacaacagcaaaauguucacuguuacacaggaauauuacuguaguccaugugca

SEQ ID NO: 592 - RNA, 81 nt, Human
gugcugucuuaugguugcguggcgaguuucugcuucagaugcagagcacuguccagagcuuccuccaguggacaauagcau

SEQ ID NO: 593 - RNA, 113 nt, Human
uucugauuuccugucguaagauuuuuucuuuucauuuucuccagggaggguaaaucaauauaaccucuucucuagagaggaggugguuagguuggucuuaagcaguguuagaa

SEQ ID NO: 594 - RNA, 81 nt, Human; identical to SEQ ID NO: 592

SEQ ID NO: 595 - RNA, 113 nt, Human; identical to SEQ ID NO: 593

SEQ ID NO: 596 - RNA, 69 nt, Human
ggggccuuugaauuugaggucuaugggcgggucgaggaccaggaucugcucgugcuucgccguggcccc

SEQ ID NO: 597 - RNA, 69 nt, Human
ugggucaauaauuccacuguugggccucacacaguaccggugaggcacgguagucuucacuuugaaaca

SEQ ID NO: 598 - RNA, 66 nt, Human
auucagaaggagguuguucaguuuucaugaguugugugguucugagugaguuucuuaauccugagu

SEQ ID NO: 599 - RNA, 84 nt, Human
auucuuuuacauuugcugaagaaugcuuuauuuccaacuauguggucaauuuuggcagaagugugauuuggugcugagaagaau

SEQ ID NO: 600 - RNA, 94 nt, Human
acaaguuauugccacugcuacgguauauuucaagagauucuaugccagguauucucugaaaaguauagauccuguauuaauggcuccuacaugu

SEQ ID NO: 601 - RNA, 85 nt, Human
uuugaucgaggagcgcgguuaccggacgggcugggucuauggucgcuccgcgggccgcuccgccggcuggugcuuuuuuaucagg

SEQ ID NO: 602 - RNA, 76 nt, Human
guaugcuaugcuaauuuuuaaaaaguaacauaacacuaagaucacugaauuuuaaguauuagauuuucuggugugc

SEQ ID NO: 603 - RNA, 92 nt, Human
uauauuuuaugaaagccuguuuuuuuuuuuuaacaaaagugaucuauaugggcuauucaguuuuaguagaagaguaaagguaauaagauaug

SEQ ID NO: 604 - RNA, 82 nt, Human
uuauauuuucuauguaccucucuaaacuaaguucucaaaauucaaaugagcuaaaauaaaaggagggaaauugugaauguaa

SEQ ID NO: 605 - RNA, 89 nt, Human
gaggaacagccgguaaugcccucauggauggagcaucucagcugaugggagaaaacaggaccaugaccauucacaacggcauguucuuc

SEQ ID NO: 606 - RNA, 62 nt, Human
uuacuguggcuuaccaggugaauauuggauagaaauggaggacuggaaaggagacaaaguaa

SEQ ID NO: 607 - RNA, 72 nt, Human
auggacaguauuagccaucauugaggcacucugucgcacucaacauagggcguguuggcugagauuguccau

SEQ ID NO: 608 - RNA, 70 nt, Human
cggugauugcugguaugagggacaucuaaucuugguucgacuuuaaauuugcucucggaacccauuaccg

SEQ ID NO: 609 - RNA, 90 nt, Human
gugagcgcacauagugucucacgugacuacuaguaugccaccugcaugaggcauuaacuuuaaacauggucugcgggacaugccgcucau

SEQ ID NO: 610 - RNA, 88 nt, Human
acagcugccuguacaucaacaucuucucagaaugacccagaaguuaucaucgugggagcuggcgugcuuggcucugcuuggcagcugu

SEQ ID NO: 611 - RNA, 79 nt, Human
cugccuuucauggcuucuucugggccaaaucccccccugaaucagaaaauaaggagcagcucgaggccaggaggcgcag

SEQ ID NO: 612 - RNA, 70 nt, Human
ugcagccggugguaucauguacucaagaccuggcuuggagauacacggcaggucugaugccccgguugua

SEQ ID NO: 613 - RNA, 74 nt, Human
ccugaauauagggucuccuuaaacacaucugagcacugaccuggaugagugcacuugggagaccuggugacagg

SEQ ID NO: 614 - RNA, 83 nt, Human
gagcaacaccguguugagaacuggaggaagacaggguucuggugccagaagcucuucuccaaucuuuaaagccaggcuugcuc

SEQ ID NO: 615 - RNA, 83 nt, Human
guggaauaucaaagguagaggggugauucugugagacugauaggccugacuauucucaauucuccccacugcaguguucacgc

SEQ ID NO: 616 - RNA, 73 nt, Human
gcugguucagguaagggguccccgccuaccagauucacuguacacugggacgucagcaaacaccugaaccugu

SEQ ID NO: 617 - RNA, 62 nt, Human
gaagacagaccugaaauccaaugacugauguuuucuguugguggugguggugguuuuuuuuu

SEQ ID NO: 618 - RNA, 77 nt, Human
gucagguuggauuccaggaggaaugugaugauugccaugagaggcaaacacacauuauuuuaggagcccaaccugau

SEQ ID NO: 619 - RNA, 63 nt, Human
augacuguuggagaggagaauaaaaucaaaacugcaagaacccauuuuugucuucauaagcau

SEQ ID NO: 620 - RNA, 71 nt, Human
gagggcuugaagacuucucagaagagacacucacuacuggaguuaaaguuauaugaagucccugagcccuu

SEQ ID NO: 621 - RNA, 63 nt, Human
gauuaaugcagguguuauagaagccagaagagaaacugugucacccuaaagaagcauauaauc

SEQ ID NO: 622 - RNA, 63 nt, Human
ggugcugcugguaccaaaugugauuuuagcuccauucagggcccagggguaaccagcagugcc

SEQ ID NO: 623 - RNA, 63 nt, Human
auugagacgacauuguuccacaaaguccuuuaggaggggcgauugaacgagagucgucugaau

SEQ ID NO: 624 - RNA, 116 nt, Human
cagguaggucugucgcuucgaucggcaccuugucgcguacuuuuuccacacucugcgccagcagcgcgggggacgaaaggguggcgauaaacgccaacgauagauggcugagccug

SEQ ID NO: 625 - RNA, 75 nt, Human
acuacuauguuaucucagcaaauuaagcgaugguuuuaaacauaaccuucuuaaagcuauucaggauuuaguagu

SEQ ID NO: 626 - RNA, 60 nt, Human
ugaaaaugaaagcguccuuaacaccucauuacuuagagggguaacucuuucagaaauuca

SEQ ID NO: 627 - RNA, 66 nt, Human
auaaguaauaccugauuguuuccuuuucuguucuaguaacucacaggagauacguguuuuauuugu

SEQ ID NO: 628 - RNA, 92 nt, Human
cuaagaagaagcgaggugguugaauuuuggaagcacuucuugaaucggauuaacccaugcucuuauugaauuuuuucaucugcucuguuuag

SEQ ID NO: 629 - RNA, 79 nt, Human
cuauuaugaacacaugagaaugauuuuuuucucuuaaucauuauuaaggaaauauuuuaauuucauggucauauaaugg

SEQ ID NO: 630 - RNA, 84 nt, Human
cucuguuuaguuugauauuaaagcaaaauuaagaggucuuaguuuuuccuauagaacuuuuaauaugucaauucagaaauagag

SEQ ID NO: 631 - RNA, 87 nt, Human
auuuacacuuucccauguuacagcacaauauuucaauggaauauuucuugccauaaauaauaucuugcugauuuguagaagugaaau

SEQ ID NO: 632 - RNA, 74 nt, Human
guuuauguucuucaagguaaagaaaaaugacauaguaaaugauuguuuaaaauuuuuaaaauccagacauaaac

SEQ ID NO: 633 - RNA, 91 nt, Human
agugggccuaauccuuaugcgcguacccguucucccuuuggucagggcuauacccaaccugagaccugguuaucgauaaggagggcucucu

SEQ ID NO: 634 - RNA, 93 nt, Human
gauguaccaacaguaccagcaacaggccggcuauggugcacagcagccgcaggcuccaccucagcagccucaacaguaugguauucaguauuc

SEQ ID NO: 635 - RNA, 68 nt, Human
cuugaaucuuugaaugacuauuccaaguaagauucaacauuuuuacagaauuguucuucaucauuaag

SEQ ID NO: 636 - RNA, 79 nt, Human
aggccaaauuuccacuuucagcaguuuuauuucagcuguuagcccgaagaaagaagcugcugaaaacagaaguucaccu

SEQ ID NO: 637 - RNA, 77 nt, Human
gcaguacaugauuuuuaucuaacaacguuugauucuuucccagaauuaaaugcugcauuuaagaaagaugccacugc

SEQ ID NO: 638 - RNA, 68 nt, Human
uuguuuucccuaacaucaagaaugugagagaaccaccaccaauuugccuugauguuagacaaaaacag

SEQ ID NO: 639 - RNA, 91 nt, Human
uuugugaaugcuguguaugauaccuuacuuaauacuccucaagacguucagaagacaguauuaaagggaaucauuaacagccuguuacgag

SEQ ID NO: 640 - RNA, 67 nt, Human
cgccucacgcgaagucuacaaaugcaucaagaaagcggugaagcagaagcagauucggcgcggggug

SEQ ID NO: 641 - RNA, 75 nt, Human
gugugaggaccgaaauuugcccuaugucuauauccccucuaagacggaccugggugcagccgcacguccaagcgc

SEQ ID NO: 642 - RNA, 60 nt, Human
caggucgcgcugccgccgccacugcugccgcucaaacagcaggguggcgcgagcccccug

SEQ ID NO: 643 - RNA, 69 nt, Human
guauuaaauugugugaaauagucucccguggguugauuuguauagacuucauucauauauuuuuucugc

SEQ ID NO: 644 - RNA, 87 nt, Human; identical to SEQ ID NO: 172

SEQ ID NO: 645 - RNA, 81 nt, Human
gcugcuugagucaugcugaagagauaggcuucauagauuauauuuaagaaguugucaucauucugaaugagguacagcagu

SEQ ID NO: 646 - RNA, 130 nt, Human
cuauaaaaccauccagaccucucgauggccacuucugaaaacauccacggugaagggcagggcaggccuggcuguggagugggccagcugaguaccugggcgucacaagggaaaugguuggggauuaugg

SEQ ID NO: 647 - RNA, 71 nt, Human
uuuuuuuuguauguggauaauauuuauuuguaucuuaucuauagaacaaauauuuacagauacaaacggaa

SEQ ID NO: 648 - RNA, 87 nt, Human
gcuggcccucacucccgcuaggaugaucacuuuucaugguuauugcuccauuuagggucucuagaaggcagguaguguggugccggc

SEQ ID NO: 649 - RNA, 68 nt, Human
auguuuauugauuuggucuuggcuuauuguguaaaccauuuaauagccaaaagucagaauuuaaacau

SEQ ID NO: 650 - RNA, 74 nt, Human
cugaguagcagugaacucaggagcgggacagguccauucacccugaaauuccuccuuggucacugccuucucag

SEQ ID NO: 651 - RNA, 98 nt, Human
gcagaccagucuuccguggcaggcugagcgcuccagucuucaguagggaauugcugaauaggcacagagggcaccuguacaccuucagaccagucugc

SEQ ID NO: 652 - RNA, 78 nt, Human
ccaggggugggaauacagggggugggagguguacauaagaggugauaggcacaggccagcccgguacagaccccuagg

SEQ ID NO: 653 - RNA, 80 nt, Human
gcaagaagguaggagggagggcagagcguugucugagcaacaaaggccgccugcugccuucucugucugucuccuggugc

SEQ ID NO: 654 - RNA, 93 nt, Human
ggucauugugcccugccaagcacagcguagaucuggaaagagcagaauguuauccuuuucagauguggcuggucauggaaggggcaguugucc

SEQ ID NO: 655 - RNA, 68 nt, Human
cgggugguaaaguggcaacgcgaauuuggguaucuggucucccaaaaguacuugccgcucuaccccug

SEQ ID NO: 656 - RNA, 89 nt, Human
gcccuccuucuugagggggccagccugcgaugauggauuccgccaucaggucuuccgguaucguaaaacaucuccuuaaggaggcuggc

SEQ ID NO: 657 - RNA, 97 nt, Human
ggugccuuaacugagucaucuuuuuuccauuccauucaugaaagcaacauaagaaagccaagagugaaagggguaaaagaucacaguauaaaggucu

SEQ ID NO: 658 - RNA, 64 nt, Human
ucuuguuucucauugggacggugacuguguauaguggaaagcacagagccaaugagggacagga

SEQ ID NO: 659 - RNA, 94 nt, Human
agucggcggaagcccugcgcgcgcucagccugcagcugguggaugcgcugcaccagcguccggaucggggcgucuuuccagggccacgccggcu

SEQ ID NO: 660 - RNA, 78 nt, Human
cugcugagguucuggaguggcacaggaacaggaggagcaaaugacacugggucuuugugcugaggcaggacacagcgg

SEQ ID NO: 661 - RNA, 63 nt, Human
gggcccugcgccugaugagcugccaugaaaguggccgccucucacacuggcaggcgguggcuc

SEQ ID NO: 662 - RNA, 63 nt, Human
caggugcggaugcaggcggcggcgcgcgugcgccacagcgcuguccaccugcagcugcgccug

SEQ ID NO: 663 - RNA, 66 nt, Human
gggcgucacguugcaaugacuauccuagggugacaacagaauagaaacacagcauuaacggcgccc

SEQ ID NO: 664 - RNA, 64 nt, Human
cagcacaggagcguccaggcacugcagcucgucuggguagucggcgccagagcucccaguguug

SEQ ID NO: 665 - RNA, 73 nt, Human
ggcuuuuucuucuggggacagcaucaccccaggaaacaacuccuuggagcuguccauugcagaccacagggcc

SEQ ID NO: 666 - RNA, 62 nt, Human
gaaguccggguucaaauuccccgaauucggaauuggcggaaauuggccccgggaagggcuuc

SEQ ID NO: 667 - RNA, 75 nt, Human
cugggacuauaggugugugccacgaugcuggcuaauuuuuuuguauuagagaugugguuucaccacguugcccag

SEQ ID NO: 668 - RNA, 87 nt, Human
ucuuuugcuuuaaauuuaucuuuuuauacaagauauugauggauuaaacaauauccaagauaagaaucugaauuuuaauacagaaga

SEQ ID NO: 669 - RNA, 86 nt, Human
cgagauugagcaauaacaggucugugaugcccuuaguuguccggcccggacaacgacaggauugacagauugauagcucuuucucg

SEQ ID NO: 670 - RNA, 73 nt, Human
gacaguucaaaauuggccugauccauggccaucagguuauuccauggggagauauggccaguuuagcccuguu

SEQ ID NO: 671 - RNA, 68 nt, Human
guugcaaaggcaauuugauguggacauucuuaucucggaacacacacacaaauuugaagcauuugagc

SEQ ID NO: 672 - RNA, 65 nt, Human
ucuggcuggggauguucauauugugagaggagacuucgaugagaaucugaauuauccagaccaga

SEQ ID NO: 673 - RNA, 69 nt, Human
gcuaagugacacgugaaugauaaugugauagccggcuaucacauuaucaugguggagcugucaucuggu

SEQ ID NO: 674 - RNA, 76 nt, Human
ggaugugguugaugaagguuucccauaugguuucagggccaaaccaaggaagaaucuaacuuucagccucaugucc

SEQ ID NO: 675 - RNA, 74 nt, Human
guugaucuccagugaacucagauacuuguuuccacguccaggaaaccacaaacuaagcucuuugaagcaucagc

SEQ ID NO: 676 - RNA, 130 nt, Human
ccaggugugacaggauccaacccgcuggcaggaggaaggucacgaagcaggagguaagcccaacggccaauuccaugaucccaagcuuccccuccgggggcaacgaauggaucuuggcgcgcgggacugg

SEQ ID NO: 677 - RNA, 79 nt, Human
ggucaugauugcagaagaggugacuggaauugaaugacaugauccaggggaggccggccacaaaugcaguaacaugacc

SEQ ID NO: 678 - RNA, 78 nt, Human
ggaucauuuuauucucauuuaugcuuaaaauaaagauacaauucaaguuuuacaauucaguaugauuagacgugauuu

SEQ ID NO: 679 - RNA, 86 nt, Human
gcugauuuugggucccuuugugguacgugcuuuccuucguaguucaacaagugaagguuuauuacugaagauugauccauuguugc

SEQ ID NO: 680 - RNA, 64 nt, Human
gccgcgccauguccugcuuggcccgcugcagggcggccuccagcucggacaacuaggcguuggc

SEQ ID NO: 681 - RNA, 67 nt, Human
augucuuuaauuccucauaugcugacuuggcaauccauaugcagccuaaaaggugguugaaagaugu

SEQ ID NO: 682 - RNA, 64 nt, Human
aaauugugggagcuggaagagguagggggagacccagccauccuguucugacuucuagcaauuu

SEQ ID NO: 683 - RNA, 68 nt, Human
cauagcuauuuggcccuggccaugacuacaagcaaaagugggugcagauggcugggccaagggcugug

SEQ ID NO: 684 - RNA, 75 nt, Human
ggaguuaaacauuaugaggcugaugaauuugagauggcuaucaggcacuucgaacaagccuuaagagaauauuuc

SEQ ID NO: 685 - RNA, 69 nt, Human
cuuggccgcugcuuguaaucuuggaccagaacgcgauaguacccuuagagguuaccgagagccgccgag

SEQ ID NO: 686 - RNA, 81 nt, Human
gcucuugacgcguccgggcuauagcaguguggauuuuggauacacuuuccgauuccccugcucgcucauuagccuuauggc

SEQ ID NO: 687 - RNA, 73 nt, Human
ucaaaguugccguaacgggagcuggucucgggaaugacauuacguuucaaccagccuccgcaagcauauuuga

SEQ ID NO: 688 - RNA, 74 nt, Human
ucucuguugacuuuuucauuucauucauuauauuuuucaauuguauauuuaaaaaaugaacauauuaagagaga

SEQ ID NO: 689 - RNA, 81 nt, Human
agaguguaaguuagcaaaguauuaaauaaaauuucagggagccccuaaauuuauuuuuaagaacuuuagaacuaauucucu

SEQ ID NO: 690 - RNA, 75 nt, Human
augcaaacacugauuaacucaaauaucuuguaaguucauucauacauggccuuauuugaggcaguguauuuguau

SEQ ID NO: 691 - RNA, 82 nt, Human
uuucuauugaagccuaagcuuugaaugaagacaugcuucugaaaauaaagcagguuuucucuagucugcuuauuaauagaaa

SEQ ID NO: 692 - RNA, 79 nt, Human
gccucugccgcuccgccgucgccuccuccgcccgggccguucgcugcugcgcggggagagcgaggcggggcgccggggc

SEQ ID NO: 693 - RNA, 89 nt, Human
gcccggaugguggucaccuugcucauuacacguaaaccaggaguuaaauuugcgaaugcaccaugaguuagagugaagucuaucugagc

SEQ ID NO: 694 - RNA, 112 nt, Human
cagccaggccaggacccgggcuugccaagagcagaggcccucccagcaaccaggauaccaccacuuugggggcuuuguguacagagguccgggucugagaccucauaggcug

SEQ ID NO: 695 - RNA, 69 nt, Human
uccuggaaggcagcaagguuuuguggaucuagauucauuaggaaugucuucuugucagccaggccagga

SEQ ID NO: 696 - RNA, 64 nt, Human
caagaaagcucagcugguggugauugcacacgacguggaucccaucgagcugguugucuucuug

SEQ ID NO: 697 - RNA, 70 nt, Human
cacccgcuuugugaaauggccccgcuauaucagguugcagcggcagagagccauccucuauaagcggcug

SEQ ID NO: 698 - RNA, 100 nt, Human
ggcccuggaccgccaaacagcuacucagcugcuuaagcuggcccacaaguacagaccagagacaaagcaagagaagaagcagagacuguuggcccgggcc

SEQ ID NO: 699 - RNA, 60 nt, Human
cugcugcgcccuguccuccgucggcucugcgggcucccgggccuacagcggcugcggcag

SEQ ID NO: 700 - RNA, 62 nt, Human
gccuacuuggccuacaugccuucugcccgugaagcgauguuuccccucgaaaggccguaggc

SEQ ID NO: 701 - RNA, 93 nt, Human
uccgacccaagggggguacaugcaaggcuuccucuaguaaacaauuguagaaaguccaccugcccucguucacuuuuuaaacaucuggccgga

SEQ ID NO: 702 - RNA, 76 nt, Human
auuuuuaagaagaugccaauauaauuuuuguaagaaggcaguaaccuuucaucaugaucauaggcaguugaaaaau

SEQ ID NO: 703 - RNA, 70 nt, Human
uuuucuuaaaaaauaccagcaguuacucauggaauauauucugcguuuauaaaacuaguuuuuaagaaga

SEQ ID NO: 704 - RNA, 78 nt, Human
gcuaugcuaugaacacuaugggaucaggcugcccaagaaggggaagccugagccaaaccaugaguggacauuauuggc

SEQ ID NO: 705 - RNA, 82 nt, Human
guggucuucauaaacuauacugccuugugaugccucccuagaaaugagaggucucaauaccagcucagaccauguggaccgc

SEQ ID NO: 706 - RNA, 66 nt, Human
ugccgcaggagacauccucaaugauagccaugcugaggucauagccagaaggaguuuccaaaggua

SEQ ID NO: 707 - RNA, 75 nt, Human; identical to SEQ ID NO: 74

SEQ ID NO: 708 - RNA, 71 nt, Human; identical to SEQ ID NO: 77

SEQ ID NO: 709 - RNA, 71 nt, Human; identical to SEQ ID NO: 77

SEQ ID NO: 710 - RNA, 108 nt, Human
aguaacugcaaagaugcuguccgugcgcguugcugcggccgugguccgcgcccuuccucggcgggccggacuggucuccagaaaugcuuggguucaucuuucauugcu

SEQ ID NO: 711 - RNA, 75 nt, Human; identical to SEQ ID NO: 74

SEQ ID NO: 712 - RNA, 87 nt, Human; identical to SEQ ID NO: 76

SEQ ID NO: 713 - RNA, 67 nt, Human
agacugcaggugccgcacauugucaaguuagaaauacuccagguggguguuagcacugugguggucu

SEQ ID NO: 714 - RNA, 70 nt, Human
cugggacucagguguuuaaagaguuugugcuauagcuagguguggauagcuucugaucccuggguucugg

SEQ ID NO: 715 - RNA, 97 nt, Human
ggaaaaaaugcagauguauuucacucuccccggucagcucugcaucagguguuuucugagcaaaccaaggggguuuauagucaucugucgcauugcc

SEQ ID NO: 716 - RNA, 100 nt, Human
guaccaggccaguuauaaccagagcuuuucuagucagccucaccaaguagaacaaacagagcuucagcaagaacagcuucaaacagugguuggcacuuac

SEQ ID NO: 717 - RNA, 60 nt, Human
cccaauucggucguggguccagggugaacugacuuauucggguggaccgacagaccuggg

SEQ ID NO: 718 - RNA, 108 nt, Human
aguaacugcaaagaugcuguccgugcgcguugcugcggcgugguccgcgcccuuccucggcgggccggacuggucuccagaaaugcuuuggguucaucuuucauugcu

SEQ ID NO: 719 - RNA, 75 nt, Human; identical to SEQ ID NO: 74

SEQ ID NO: 720 - RNA, 71 nt, Human; identical to SEQ ID NO: 77

SEQ ID NO: 721 - RNA, 73 nt, Human
cggcgcuuccgcaaguuccugguguuuguggcaaacuucgaugagaaugaccccaagaccuuugagggcguug

SEQ ID NO: 722 - RNA, 63 nt, Human
ucuacaaagugccguccacugagacugaggccuuggcuuccaaucugaugggcauguuugaga

SEQ ID NO: 723 - RNA, 60 nt, Human
uguauacagaggugacucgcuaccuggacuucaaggugguggagggcagcuuugucuaca

SEQ ID NO: 724 - RNA, 63 nt, Human
ccccugcccucggccauugaacacugcacccuccacaggagccgcagaggcccgaggcaccgg

SEQ ID NO: 725 - RNA, 77 nt, Human
cgcuggagacccugcgccccugcccagcaccuccuccgugggcagcuccucggguggggccugcgggguucccugcg

SEQ ID NO: 726 - RNA, 76 nt, Human
aagaugcugcgugaaguacugagcagggugauaccgccagaccagcacccgggcgccguaaucacagcuguguuuu

SEQ ID NO: 727 - RNA, 63 nt, Human
guugcccaggcuggagugcaggggcucaaucugggcucaugcaacucugccuccgggguucac

SEQ ID NO: 728 - RNA, 79 nt, Human
uagccugggcgcucuccagaaaagcuacacuugagcugacacacaauuggggcacugaagaugaugcgacccagaguua

SEQ ID NO: 729 - RNA, 73 nt, Human
uucagacccucgaggauucggucauauuggaauugcuguuccugauguauacagugcuuguaaaagguuugaa

SEQ ID NO: 730 - RNA, 63 nt, Human
cagcucuucaagaccgagaggaaaaaagcaacggcuucuucccugacuuggugaaacaugcug

SEQ ID NO: 731 - RNA, 64 nt, Human
ggccagcccuggggccugcuucaagcucuuccaggaaaagcagaaguguggccacgggagggcc

SEQ ID NO: 732 - RNA, 106 nt, Human
ucaaccaggugcucuccaauaaagaccucaucaacuacaauaaguuugugcagagcugcaucgacuggaaccgugaggugcugaagcgggagcugggccuggcaga

SEQ ID NO: 733 - RNA, 82 nt, Human
ucaucaauggcgugcuguugccuggaggagaagguugcgguccugcuggagccgugcgccuccacugcaccuucauugauga

SEQ ID NO: 734 - RNA, 60 nt, Human
gguccagauuuacaaguguccucuggguacaugagagaggugucugugaaguuuuuggcc

SEQ ID NO: 735 - RNA, 90 nt, Human
uaucuguguuuugucccacaccgaccgacuggcagagagagaaagggacaucuuucaaugcagucaccgugguaugggcgaucacugaug

SEQ ID NO: 736 - RNA, 75 nt, Human
aauauggggauauuuaccuuuauuaagaaauuauacuaaacauugauguccuugaucauuuuauguucucauauu

SEQ ID NO: 737 - RNA, 72 nt, Human
gggcgggggacgauggcgagaggggagggggagcgaguucgcaucucuccuuuuccugguuagacucuguuc

SEQ ID NO: 738 - RNA, 76 nt, Human
uugauuuuuagagcaccaucacuuucacauuccugauucugauuuuguuugguuuguuggguuuucugaaacuuaa

SEQ ID NO: 739 - RNA, 83 nt, Human
uuguguucugaaagccuccgugcugcuggaucuuuggggggaaauacaggauccuucagcacugagguguuuaagauuugcaa

SEQ ID NO: 740 - RNA, 98 nt, Human
cccucucccggccagggagacggagcccauccacagugucagcuauggccauguggccgccugccagcuaaugggcccccacacccuggccuugaggg

SEQ ID NO: 741 - RNA, 83 nt, Human
gccaagaggucacgacuucccuccugccugcagccugggccaggacugcucugagauuugagggaaacauggacccuuuuggc

SEQ ID NO: 742 - RNA, 61 nt, Human
gccagacaccuccccucccagccagcgcccgggccuggacgagccccagggacagucuggc

SEQ ID NO: 743 - RNA, 78 nt, Human
ggaagagaucaugcagcuggugaaugccuacuuggccaaccccucccccgagaggcccugcagcagcucuucuccucc

SEQ ID NO: 744 - RNA, 60 nt, Human
cuuguuaagaguuauuuauaccaaauccuacaggggauuguguuugucacucuagaagag

SEQ ID NO: 745 - RNA, 76 nt, Human
cucuguguaccagaagaccaaugccgugucugagauuaaaaggguugguaaagacagcuucugggccaaagcagag

SEQ ID NO: 746 - RNA, 77 nt, Human
gcaccauggccagcuuccugaagggggcccaugugaccaucaacgcacgggccgaggaggauguggagccugagugc

SEQ ID NO: 747 - RNA, 61 nt, Human
ucuggacugcccaaauuuguccucaucaacuggacaggcgagggcgugaacgaugugcgga

SEQ ID NO: 748 - RNA, 120 nt, Human
cugaaagaccaaccacauuggccacacaggcuaucugaaccacgguugacugucucuccagauggaucccucugugcuucuggacggcaaggauggccaggcauguuauugggaucucag

SEQ ID NO: 749 - RNA, 83 nt, Human
gggcaacacccuuacacgcuagaugguuggggcacucaucacgcccugugcuucaaacccuaacggcuauggugugugugccc

SEQ ID NO: 750 - RNA, 94 nt, Human
gagugggaacacaggggagaguucaggacaccugguccccagcuccccauugccuggggcagcagcccucaauuucuccuugugcccuccccuc

SEQ ID NO: 751 - RNA, 80 nt, Human
uccaggugccaaauagccauaaccucgucuuggaacuguuauguggccucucugggguccagguuucuggucagccuggg

SEQ ID NO: 752 - RNA, 89 nt, Human
cguggcaauuucuuagagaucaagaauaaauuucuagcucgaagguuuaagcucuuagaacaagcucuggugauugaggaacagcugcg

SEQ ID NO: 753 - RNA, 84 nt, Human
gagacccccaaggaccugaaugaugagaaacagaagaaaaauauuaaacaacguuucauguuuaacauugcagauggugguuuu

SEQ ID NO: 754 - RNA, 69 nt, Human
agccugagauggggaugagggcagagagaggggagcccccucuuccacucaguuguuccuacucagacu

SEQ ID NO: 755 - RNA, 63 nt, Human
cagcguuagaugcccccacccaccuguacucuggagagacugugcugggaacauguaccacug

SEQ ID NO: 756 - RNA, 70 nt, Human
cuaucugucuuuaacaacugcugccaguugccuuuugugggguagcauacuuuuguuagcaaccgggugg

SEQ ID NO: 757 - RNA, 63 nt, Human
uguaggcaaccuucccucucuccuuggugaagaacaucccaagccagaaagaaguuaacuaca

SEQ ID NO: 758 - RNA, 76 nt, Human
gcccacugugacgaugucaccgaucuggacgucccugaagcagggggacagguguacagacauguucuuguggcgc

SEQ ID NO: 759 - RNA, 71 nt, Human
ugcaucuucaucuuggucaccacgccagagaggauccgaccucgaauggacacauuaccagugaaggggca

SEQ ID NO: 760 - RNA, 88 nt, Human
agauugucggacacgcgguaauugaugaacggcaggugagggagagcucugaucagccugguguucauuguccagaguccggcuguuu

SEQ ID NO: 761 - RNA, 75 nt, Human
uugguguagacuccaggccuguucuucugggcacagcauagccccaggagacaauuccuuggagcucuccauugg

SEQ ID NO: 762 - RNA, 83 nt, Human
aaagaaaaccaaagugguccacaaaacauucuccuuuccuucugaagguuuuacgaugcauuguuaucauuaacccagucuuu

SEQ ID NO: 763 - RNA, 66 nt, Human
gaagucaugauggaguuccaggggcccaugcccgccggcaugcugauugagcgcuccucagacuuc

SEQ ID NO: 764 - RNA, 101 nt, Human
gaauguggcuucauccuccggccccaugcgcugguggcagucacagaaugaugugaacccugucucucugcagcuggaccuggacaggagauuccagcuuc

SEQ ID NO: 765 - RNA, 85 nt, Human
ggcagaacacacagcaaggaaagguccuuucuggggaucaccccauuggcugaagaugagaccauucuuccucuuguguuuugcc

SEQ ID NO: 766 - RNA, 83 nt, Human
cccaccacugcgggcaucgaggacagcgccgccuaggaccacgaugcacaugggcgugcuccucacacccccgggaugguggg

SEQ ID NO: 767 - RNA, 73 nt, Human
cuaauaccugaaauauggaguaaccaaguaacaaauuuuuaaauuuaaaacugauacucauuucaguuauugg

SEQ ID NO: 768 - RNA, 78 nt, Human; identical to SEQ ID NO: 99

SEQ ID NO: 769 - RNA, 65 nt, Human; identical to SEQ ID NO: 247

SEQ ID NO: 770 - RNA, 80 nt, Human; identical to SEQ ID NO: 100

SEQ ID NO: 771 - RNA, 72 nt, Human
cccugccugcuagcuggggaccgcuccuuggcagaugucaucauccaugagaucucccacaguugguuuggg

SEQ ID NO: 772 - RNA, 89 nt, Human
ggcucaaugaagguuucaccauguacgcccagaggaggaucuccaccauccucuuuggcguugacccggacgacaccuauaaugagacc

SEQ ID NO: 773 - RNA, 64 nt, Human
ucaaaaacuaugcuuuaaaggaauuaaagucuuaugauccaaauuacuuucaggauguuuuuga

SEQ ID NO: 774 - RNA, 84 nt, Human; identical to SEQ ID NO: 286

SEQ ID NO: 775 - RNA, 89 nt, Human; identical to SEQ ID NO: 288

SEQ ID NO: 776 - RNA, 61 nt, Human
uuuuuuaaugggucucaaaauucugugacaaauuuuuggucaaguuguuuccauuaaaaag

SEQ ID NO: 777 - RNA, 61 nt, Human
gacggggucagcggaugguguaucggacauagggaaccucgacauccucgccgcucucguc

SEQ ID NO: 778 - RNA, 85 nt, Human
gguagaaggcaguggcaagagggguucagguagggggaugaugagggaacaccagacuuggcuaguugggccacugcuagaagcc

SEQ ID NO: 779 - RNA, 74 nt, Human
ucaugugauagugcaacaguuuggcuuugcggaaaaauuuuaaacaguccacaacuuugcaucuaaacuuaugg

SEQ ID NO: 780 - RNA, 75 nt, Human
uucuuuggcuucacucucacaaacuccuugaauuucuucucuuuauucuuuuccuugucuuuuguaguuggggaa

SEQ ID NO: 781 - RNA, 72 nt, Human
gaguugcugcagaggacaugacccccagcagaugucccguaggcaucaguccaguuauauccgcaguaucuc

SEQ ID NO: 782 - RNA, 87 nt, Human
gcucagcgcauggcucagcggauggggcacgacagcuagcaacaguuauugucuccagucuugucugcuguuucuaggcgcuugagu

SEQ ID NO: 783 - RNA, 130 nt, Human
agggggaccuugacuuuguuggccaccucucggaucagggccucugacaccgcguuugaagcauagcguugcuugcuguucaccuugaucacggggcccuuguggaauaaaggccggugguucuccucau

SEQ ID NO: 784 - RNA, 64 nt, Human
auugugaauagugccgcaauaaacauacgugugcaugugucuuuauagcagcaugauuuauaau

SEQ ID NO: 785 - RNA, 60 nt, Human
gagaaugaugguuuccaguuucauccaugucccuacaaaggacaugaacucaucauuuuu

SEQ ID NO: 786 - RNA, 69 nt, Human; identical to SEQ ID NO: 528

SEQ ID NO: 787 - RNA, 64 nt, Human; identical to SEQ ID NO: 287

SEQ ID NO: 788 - RNA, 80 nt, Human
cuucuucagugagacgggcgcuggcaagcacgugccccgggcuguguuuguagacuuggaacccacagucauugaugaag

SEQ ID NO: 789 - RNA, 84 nt, Human; identical to SEQ ID NO: 286

SEQ ID NO: 790 - RNA, 64 nt, Human; identical to SEQ ID NO: 287

SEQ ID NO: 791 - RNA, 89 nt, Human; identical to SEQ ID NO: 288

SEQ ID NO: 792 - RNA, 73 nt, Human
agugaggggcaggaugaaaucaucuaggguagguauuuagagggagggcgccgugcaaaauaaaauccucacu

SEQ ID NO: 793 - RNA, 62 nt, Human
gacguaccgugcggacgaguggaaggagaaauuuggccauuacaaagacacaggaauauguu

SEQ ID NO: 794 - RNA, 80 nt, Human
ggcugcguuagguggaagcagcggaggaaggagacgaaagggauugucauuuucaugucguggcuuuuuagaagacagcc

SEQ ID NO: 795 - RNA, 70 nt, Human
ugcaugagguuugguaacaggcaaagucaucugguuaacgugacugaugcaaaaaguccaggccugggca

SEQ ID NO: 796 - RNA, 77 nt, Human
uaggcaugugauuucagguuuuucguacugagaacauugagauuucaguuggaagacacccugaaaucuuaugagua

SEQ ID NO: 797 - RNA, 67 nt, Human
ccccaccgggaggggccacaaggaccugggccucggccaccaagcuuuguccccucucgcugugggg

SEQ ID NO: 798 - RNA, 61 nt, Human
acagcauuaaucuccuuguacaacugcagcagagcucuuaguguacagguacaugggcugu

SEQ ID NO: 799 - RNA, 73 nt, Human
agcuuugaagccagauauugaccucucucuagcugugaaauuucuagauggagucuucuuccaauuuaaggcu

SEQ ID NO: 800 - RNA, 71 nt, Human
gguuuaggauuuuuggaaugguauaugagcauugucuucaaccucaaguuccagcuucaucagccuuuacc

SEQ ID NO: 801 - RNA, 116 nt, Human
uuuuguuuuuguccaguaggucccaacagcgggcuuaaaauauucagcaaaucaugguguaaacagaugugcuuuccuccaggcuuuguuguuccauuuauguagcaaaggcagag

SEQ ID NO: 802 - RNA, 72 nt, Human
aaacaucauuuuaaaaugucuucagcauuuuuugaauagacguauucaaacauauucugaacauugauguuu

SEQ ID NO: 803 - RNA, 67 nt, Human
auuguaggcaaccuucccucucuccuuggugaagaacaucccaagccagaaagaaguuaacuacagu

SEQ ID NO: 804 - RNA, 85 nt, Human
cuucaguuugagaaacuaagcaguggucagcgucugugugagccagugggugauaggguggcaugacccuggagaguagcugagg

SEQ ID NO: 805 - RNA, 61 nt, Human
uggacuggcagucuuuaaagguugguacccuaacuugaugaaagaagauugucuuagucca

SEQ ID NO: 806 - RNA, 95 nt, Human
cuagcuuguuuguauagguagaaugauucaucucuccauuuuagauggcuagauguuuuguggaagaucuuagaauugccugccucauuugcugg

SEQ ID NO: 807 - RNA, 94 nt, Human
gguucuugcagauucccaaggaaaugucagaaaggcaaaauggccagcauuauccauuugcuuuuuuggguuuacugggugaauagcacuuucc

SEQ ID NO: 808 - RNA, 77 nt, Human
gagauuagggguacuggcucugaagacaaagcuuagauucaagcucagcucaccauuuauaccaguccccugauuuu

SEQ ID NO: 809 - RNA, 112 nt, Human
uuaugaaguucaaacagcaccacugguaaacgaaguucagauuucagagguggagacuguguacgcagccucacagcugaguggaugccguggugaaauguuuagaucauag

SEQ ID NO: 810 - RNA, 63 nt, Human
cugcaagugccguaagugggccugugacgucacaccgaccggcccgagguaucgcaugugcgg

SEQ ID NO: 811 - RNA, 98 nt, Human
ucuuaucaaaugcccuaaaauuauuaccacccaagagaaacaggaaaaagguuacauguuuuuguuuacugagaguaagaucaccugcaucuggaaga

SEQ ID NO: 812 - RNA, 77 nt, Human
uuucaauaaaaguuaugcacaaaugugaacaccugagauggagcugaacauuucuucacuuuguucuuuuucugaag

SEQ ID NO: 813 - RNA, 68 nt, Human
ccuguccuuacucccucuuuaagauugcguacccacugcagagugcugaagacgggguagccacgagg

SEQ ID NO: 814 - RNA, 85 nt, Human
uauucccagaggaugucagucccaaggaccaguagcugccaucaguuuggauucugaaaacuaacuggcaucaacacugggugua

SEQ ID NO: 815 - RNA, 75 nt, Human
uuggagccaggagccugccaugagguuuugagaacagagugcuguuuuagagcuggcagcagcaucucagcccaa

SEQ ID NO: 816 - RNA, 67 nt, Human
gauacccguuguacccuuacuugaaaguuucuaaucuuaaguuuuaugaaaugcaauaauauguauc

SEQ ID NO: 817 - RNA, 99 nt, Human
ggcccaggcugcccguuccucuccuucuccgccagucugcgcugcggcugccacggcucacaccagagggaugggguaggaggcgcaggcagccaggcc

SEQ ID NO: 818 - RNA, 85 nt, Human
uauguggaaaguagcccuucuggacagaaagaauauucgugguccaugugguuugagucuguuaagaaggacacuaaggcacaug

SEQ ID NO: 819 - RNA, 75 nt, Human
acuuacuucaaucuuguugagcucagaauaaacagauaucugagauuuuacaagcuuguaaaagauuuaucaagu

SEQ ID NO: 820 - RNA, 66 nt, Human
gagcuccagcacuucaauugaauauaauccucuauuauucuuuucuugauuuaauuucuguagcuc

SEQ ID NO: 821 - RNA, 81 nt, Human
cuccacuuccccaucccccuaagcccccacugccuuccuuagugauagcagucauaaaucucagggcaccguggaguggag

SEQ ID NO: 822 - RNA, 65 nt, Human
ggggaagggcauggguuaagguuaaggcuguaccauguacugcuucuccucacuauuacuucccu

SEQ ID NO: 823 - RNA, 61 nt, Human
auuugagaaggaggcugcugagaugggaaagggcuccuucaaguaugccugggucuuggau

SEQ ID NO: 824 - RNA, 80 nt, Human
aauuugcaacaguucuuuccccaggccacucgcagucuugcugugacucuccuguggggucccaugaacccuuccaaguu

SEQ ID NO: 825 - RNA, 68 nt, Human
cacaggccccguugcccauggcugucagccgggggcuccccccgcagcagccacagcagccgcuucug

SEQ ID NO: 826 - RNA, 68 nt, Human
gcagcagcagcuccagcagcagcaauugcagcagcagcaguuacugcagcuccagcagcugcuccagc

SEQ ID NO: 827 - RNA, 63 nt, Human
ggcugcucagaaaaggauaagaagugguuucuccuccccucuucccuuccucauccugcagcc

SEQ ID NO: 828 - RNA, 75 nt, Human; identical to SEQ ID NO: 74

SEQ ID NO: 829 - RNA, 87 nt, Human; identical to SEQ ID NO: 76

SEQ ID NO: 830 - RNA, 71 nt, Human; identical to SEQ ID NO: 77

SEQ ID NO: 831 - RNA, 109 nt, Human
aguaacugcaaagaugcuguccgugcgcguugcugcggccgugguccgcgcccuuccucggcgggccggacuggucuccagaaaugcuuuggguucaucuuucauugcu

SEQ ID NO: 832 - RNA, 75 nt, Human; identical to SEQ ID NO: 74

SEQ ID NO: 833 - RNA, 72 nt, Human
ggucugaaagcccccgguaucauuccucgaauuucagugcgggaaccaaugcagacugggcauuuaaaggcc

SEQ ID NO: 834 - RNA, 87 nt, Human; identical to SEQ ID NO: 76

SEQ ID NO: 835 - RNA, 71 nt, Human; identical to SEQ ID NO: 77

SEQ ID NO: 836 - RNA, 67 nt, Human
gcggcugcagaaguaccgccugcggaguaacugcaaagaugcuguccgugcgcguugcugcggccgu

SEQ ID NO: 837 - RNA, 87 nt, Human; identical to SEQ ID NO: 76

SEQ ID NO: 838 - RNA, 87 nt, Human
ucucuaggcaaaugccuucaaguuuuccaguucugagguaacuaguucaguuuguugggauggaagcaugaaggaaagggcuagaga

SEQ ID NO: 839 - RNA, 65 nt, Human
ccgucucguacugucgccgucaccgccgcggcuccggcccuggccccgauggcucugugcaacgg

SEQ ID NO: 840 - RNA, 130 nt, Human
cugcgugguguuucauccauuccuagaugagauucucauugggaagaucaaaggcugcagcccagaaggagugcacgucucucuaggcuucuucgaugacauucucauccccccagagucacugcagcag

SEQ ID NO: 841 - RNA, 87 nt, Human
gaagcggagcaggugugggugugggaguacgagacggaggaaggagcacacgaccucuacauggacaccggcgaggagauccgcuuc

SEQ ID NO: 842 - RNA, 84 nt, Human
gagggacucgcuggcagcagccccagccugaccgcucggaguguacuuuccuugacaggcaaggcuguuggccagggcucgcuu

SEQ ID NO: 843 - RNA, 61 nt, Human
ggucgccauggcaaucuccucaugagaaaacuucuguaugcaagcuuggccuggggugacc

SEQ ID NO: 844 - RNA, 128 nt, Human
ugacauacuccuccugcgcagccuucagguucuccuucuucccgccccaggccuucagggcagaggccugcagggcucggccguaggagaaggucagggcccagggcuucagcagggggcacuuguua

SEQ ID NO: 845 - RNA, 121 nt, Human
ccccgcugcgggcuagcuguuguguuuuuuguuuuuuucccccgggcgggcccgggcgguuggcguacugggcuggugggacggggaagugaacgccccaagcgacgcgguugcagcgggg

SEQ ID NO: 846 - RNA, 76 nt, Human
gcuggagccacagaauucguccugcaggaaucacggcgggacaucgucuccuguguggcagauggaucucuccggc

SEQ ID NO: 847 - RNA, 70 nt, Human
gcugggaagagcagaaccgggggcggagcaccugcaggcgcgggcgcgggccccaccagggcgauucggc

SEQ ID NO: 848 - RNA, 82 nt, Human
auguacgucguaguaacuucaggucuccaguuguguuaucauucagaacauaaucaucacaaagguaacaaaaaacguacau

SEQ ID NO: 849 - RNA, 93 nt, Human
gucauguaagaaauaagaaucaucaccuguacccauggaccguaaaaaccucccacuacgaguugugcagugauaauuuugacuuuugauggc

SEQ ID NO: 850 - RNA, 61 nt, Human
ccagggaccaccgcgcagaacaggaggaugaucccccucgcugugaugauucgguucuugg

SEQ ID NO: 851 - RNA, 108 nt, Human
cugggugcacagcaggcgggggcagccuggcaggaguaggggugucacggcuucuccagcuggacaucuccuauguugaggcugcccacauccugguaggugcccugg

SEQ ID NO: 852 - RNA, 61 nt, Human
cgaggggagcucguccuccuccaugaggcgcggcuuccgcuugggguugcgggccuccucg

SEQ ID NO: 853 - RNA, 104 nt, Human
gggugcugguggucgggguggaggagccggcgucgcugucucgcuugcgcuuccgugaugauuucuucugccggaccuccucuucgaucuccuccagcgugccc

SEQ ID NO: 854 - RNA, 74 nt, Human
uggccuugagccacugcuucuccgucagugagucgcuguaguccaccuccuugcgguggcgggagccacggccg

SEQ ID NO: 855 - RNA, 68 nt, Human
gcccaggcagagucucugcguuacaaacuccuaggagggcuugcugugcggagggccugcuauggugu

SEQ ID NO: 856 - RNA, 72 nt, Human
gccgaucaaauagccuagugagagucagugaagaaucccguucauaugcuuugccuaggacagguuuucggu

SEQ ID NO: 857 - RNA, 72 nt, Human
uacgggacuggccucuggaaagggugguagcccuggaaaagguaccucccacacuggagccgucuguccgug

SEQ ID NO: 858 - RNA, 71 nt, Human
ggcgugcacaccuucccggcuguccuacaguccucaggacucuacucccucagcagcguggugaccgugcc

SEQ ID NO: 859 - RNA, 81 nt, Human
ccugcaguaucucugagugugccuguacauauacauauaaaaaauuguaucauaaggaauuaacucaugagauuauggagg

SEQ ID NO: 860 - RNA, 68 nt, Human
cuucccuuuccuauucaguacacaccagucuuucuuugguguuuaccuaaugggcugaggaagggagg

SEQ ID NO: 861 - RNA, 112 nt, Human
ggagcuugagaaaucaccuagggcagccaagcuggggaagggaaguggcugugcauugcuguguguccuuuaaggcucuuugguccugguugauuuccucuuagaagguucc

SEQ ID NO: 862 - RNA, 72 nt, Human
gcuggcuuuggaucugaacuaauggguugucuaaguguugacauuucucauaauacauuacacauugcuagc

SEQ ID NO: 863 - RNA, 68 nt, Human
ggucuacgccaucuguuauuguccccugccucgccuggcagaucuggaggcgcugaaaguggcagacu

SEQ ID NO: 864 - RNA, 62 nt, Human
guucgccugugcccgcggugugccgcaaggagccuugcguccugggcgucgaugaggcgggc

SEQ ID NO: 865 - RNA, 101 nt, Human
uauaugccugauucauaguaaaauaccucuaauaaacacuguuuuauagaaaaccugacuucagugaauauuuuuguauuuuacaugggccaguuuauaua

SEQ ID NO: 866 - RNA, 85 nt, Human
uuaccagcuuaaaacacuucuuagggauuaaauauagauguaauuuuucaaaaucguuuuuaauuuaaacuguguuuuaguguaa

SEQ ID NO: 867 - RNA, 65 nt, Human
gaguacgggcugcaggcauacacugaagugaaaacugucacagucaaagugccucagaagaacuc

SEQ ID NO: 868 - RNA, 63 nt, Human
gauggaaaguucagcaagaucagcaacaaaaccaagaaaaaugauccuugcgugcugaauauc

SEQ ID NO: 869 - RNA, 71 nt, Human
ugagggccugggacucgucuuuacacuuucagaaucccugugugugccugaaaaaauauccuuugugcuca

SEQ ID NO: 870 - RNA, 73 nt, Human
acuggacuguuuguacgugaaacagaagaggcuaagcuuccuuuuuuuacacuuaugagacaaaaagugcagu

SEQ ID NO: 871 - RNA, 79 nt, Human
gauuaauuggauuugaggauaauuauuauuauuugguuuuuagauuugaaaaguagaauuuccauugagacaauugauu

SEQ ID NO: 872 - RNA, 74 nt, Human
gcagcuuaagguuuuuuuuuuuucuuuaaaaaaaauaggaauacaaggauuuacaaaaaaaccucacacagugc

SEQ ID NO: 873 - RNA, 91 nt, Human
ucuuguucaugggcaaaaggaggaagggaggugaggucuggguagagugcuuuucccaguccccugcuggcacuucuccaugaugacaagg

SEQ ID NO: 874 - RNA, 78 nt, Human
gcccuugcaaucucuaggucacuuucuccgcuuguagauuuugcgcgcaagccccagaaagacgcugggggcaggggu

SEQ ID NO: 875 - RNA, 62 nt, Human; identical to SEQ ID NO: 206

SEQ ID NO: 876 - RNA, 61 nt, Human
agagugacaaaauggugacagguagcugggaccuaggcuaucuuaccaugaagguuguuuu

SEQ ID NO: 877 - RNA, 79 nt, Human
cuccucacuggacucgccucucuccucuccuccccccaggaggaacuugaaaggaggguaaaaagacuaaaaugagggg

SEQ ID NO: 878 - RNA, 90 nt, Human
uccaucccuuccggcucccuaccccucacuuccaaggguucucucuccugcuugcgcuuaguguccuacaugggguugugaagcgaugga

SEQ ID NO: 879 - RNA, 78 nt, Human
gauacagccuugcucuguugcucaggcugaagugcacuggcgcaaucucccgucugggcgacagagcaagacucuguc

SEQ ID NO: 880 - RNA, 103 nt, Human
uugugcuugcuuaauagggccauuucucccuccuuggcaucaucaagcuguuuuugaagaaccuaagaaagauuaaauagccauuguuaaaaugcaggaauaa

SEQ ID NO: 881 - RNA, 70 nt, Human
ugacauucagaauuugggcauuuaagauguuaacugaccuagaaacaaaugcacuaagaaacaaauguca

SEQ ID NO: 882 - RNA, 64 nt, Human
augaaugagaucuguuuucuguggaguguacauacacaaacgcauugcaacauguuucauugau

SEQ ID NO: 883 - RNA, 67 nt, Human
ugcgcucuuagguagaauaucugugccagcccaugcuagcaccgguaugugcgacccuaauagcgca

SEQ ID NO: 884 - RNA, 87 nt, Human
gguaguugaugccaaccuugaagccaguggggcaccaauccacaagacuggaugcugcgcuugguuucgaugguggcaauggcagcc

SEQ ID NO: 885 - RNA, 105 nt, Human
uugugguccauggcgagcccaggccucagacaauggcugugguguugcucagacaugcacacagcucucuguaccuugagccaggucuccaccauggcaccacag

SEQ ID NO: 886 - RNA, 104 nt, Human
ccuggccgcccucuggcccuuccugggcaucguggcugaggugcuggugcuggucaccaucaucuucaucuacgagaagcgccggaagcccgaggacguccugg

SEQ ID NO: 887 - RNA, 80 nt, Human
cggcuccgagagcagguucuucgugaguuccucgcagggccggucagagcuacacauugagaaccugaacauggaggccg

SEQ ID NO: 888 - RNA, 65 nt, Human
accaugaaggcacccuugaaccauccaugauugcacagucugguguucuuggcuucccauuaggu

SEQ ID NO: 889 - RNA, 67 nt, Human
gcaaucgucaguaucaaaagcuccaaggccucuaugauagccuuaggcuacgaaacaucacuauugc

SEQ ID NO: 890 - RNA, 60 nt, Human
uggauauguugccaucaaugaccccuucauugaccucaacuacaugguuuacauguucca

SEQ ID NO: 891 - RNA, 82 nt, Human
ccagaagacuguggauggcccuccgggaaacuguggcgugauggccgcggggcucuccagaacaucaucccugcucuacugg

SEQ ID NO: 892 - RNA, 64 nt, Human
gcugugggcaggucaucccugagcugaacgggaagcucacuggauggcuuccgugucccacugc

SEQ ID NO: 893 - RNA, 65 nt, Human
ggcgucggaggggccccucaaggccuccugggguacacugagcaccacgggguuccucugacuuc

SEQ ID NO: 894 - RNA, 60 nt, Human
gggcucauuugcaggggggagccaaaagggucaucaucucugcccccucugcugaugccc

SEQ ID NO: 895 - RNA, 61 nt, Human
gucaagcgccuuuccugguugagaaaccacuuggguccccaaccagggggggcccucgggc

SEQ ID NO: 896 - RNA, 110 nt, Human
ugaauacacaacaaaggagguuuaccggaagaacuucuucaaugacuggcgaaaggaaauggcgguggaagaagagggaagucaucaagagccuggacaagugugauuca

SEQ ID NO: 897 - RNA, 72 nt, Human
gcggccaccgucaacaggagcacucggugccggagaacaugguagaggcaccucugucgggcagguggccgu

SEQ ID NO: 898 - RNA, 71 nt, Human
ggccgacguccgugagcucugcuccaaguaugccucccgcgaugaggcacgccgagcagggggcggcggcc

SEQ ID NO: 899 - RNA, 63 nt, Human
gucuuccagcagaccaucuccugcccggagggccugcggcuggugggguccgaagugggagac

SEQ ID NO: 900 - RNA, 71 nt, Human
cgggccacuuucucagccuccuucugcccguaauuuuccuucaggaucugguacuguucuggaguggcccg

SEQ ID NO: 901 - RNA, 108 nt, Human
gucagugccaauuuugccggucacacugggguccccaaagaagucaagguaaucauccugaaucugaaagaacucccccaucuccagcaggaucuucuuggcauuggc

SEQ ID NO: 902 - RNA, 61 nt, Human
accaucuuuccugcaauauaucgaaucucagguaagcacaucaugagaucaggaaagcggu

SEQ ID NO: 903 - RNA, 66 nt, Human
gagcucgaagugggccccagcccagacugccccccugccuguugccccugagcccaccuacugcuc

SEQ ID NO: 904 - RNA, 73 nt, Human
ggcggggacagcaguugcauggacagcuuuccuugugagccacaggucccucuggacauacugcugccuggcc

SEQ ID NO: 905 - RNA, 70 nt, Human
gggcuuggagcauuaaggccacgcccauagcugcauucuaugggggcccuaguuaugccuccucgggcuc

SEQ ID NO: 906 - RNA, 91 nt, Human
guuaacuuaaacauguuccccuuaaaugcacuugauggguguugaaauggucaaccuucuuaaaauuuuuaagaugaacuuaguucuuaac

SEQ ID NO: 907 - RNA, 65 nt, Human
ugauuugcuuggugaccgaauuacuagugacuaguuuacuaacuaggucauucaccgcaagguca

SEQ ID NO: 908 - RNA, 97 nt, Human
agaauuaggcagcuggacucaguuuagaugaucccaauuuuguuggcaacauccaaagcaucguaaucaggagccagucuaacauaugccuucuucu

SEQ ID NO: 909 - RNA, 104 nt, Human
ggccgucuccggagucgcaguguccucggccgccgaagagugggugaagugcggaacuuccuccuuuuguggcuguggacaccuuccacaccggcuuccuggcc

SEQ ID NO: 910 - RNA, 72 nt, Human
ggcuguggguggggccguggcugcgcaucucauacuuaucucccgggcacagcucggcccccucccgcagcc

SEQ ID NO: 911 - RNA, 63 nt, Human
gguguguggagaagaucaucuguguuauacuguaauaguugcuagaguaaucucacacacacc

SEQ ID NO: 912 - RNA, 75 nt, Human
uaccagagcauacauauaucaacaguaagauguaauuuuucauuacaucacugcuagaauauuuagcuuugugua

SEQ ID NO: 913 - RNA, 78 nt, Human
ggcugacaccagcugucgccaggagccggaccacagacgguaauguggugaucacagccagguggagcggugucugcc

SEQ ID NO: 914 - RNA, 68 nt, Human
gugagcuacaguaauguacgggcgccagguccgacgugccggggggugcgcugugcagcgaggcucgc

SEQ ID NO: 915 - RNA, 66 nt, Human
gggaacuuaggaagugagaagucagauuacccuaguccucuagggugcuuaaagcuaacuaguccc

SEQ ID NO: 916 - RNA, 75 nt, Human
uagauuugagaaaguaggagagacagauuucacauaguagagaacacuaacacucuucuuaguauuucaaauuua

SEQ ID NO: 917 - RNA, 88 nt, Human
guauuuaccucaaaccucuccucuugcacaaccaacccccguuauaaaaggaagugcaaaauggaauaaacugauuuuaagugaauac

SEQ ID NO: 918 - RNA, 88 nt, Human
caaggguguaguauuucauaccgccugaaaugaucagcauuggcacaaaucaaaauucagccgccuuugaaaugcaaaaauaccuuug

SEQ ID NO: 919 - RNA, 131 nt, Human
uugauugggucaaccuuugccuacgaaugcaguccuugaagucuugcagucucuuguuauguucauauucuuucuugacaaggguaguaaggaggucaugccuucuuagggcuucuucuauuucaucuugg

SEQ ID NO: 920 - RNA, 70 nt, Human
uuuguacaucucgcuuuucuucuggcauaguuacuuaggucucguaaucuuugcuuuagcaauguauaaa

SEQ ID NO: 921 - RNA, 69 nt, Human
accacgggguccaggccugugggccaaccaccaggaagcugugcaugcccacagcccgaggccccuggu

SEQ ID NO: 922 - RNA, 119 nt, Human
aggccgcagggagagggggaaagguccaaagcuguggagaaagaaggggcucccugucuccaggguuuguuuaagguuuucuccauggccuagggcccagccacuucccucacuggccu

SEQ ID NO: 923 - RNA, 76 nt, Human
aaagacaagcugucauugcaauaggauguuacaacauuauauugcauuaaaaaugauaccuaaaagcuugcucuuu

SEQ ID NO: 924 - RNA, 73 nt, Human
aagaaauaugcaaagaaaaaaagaaaaaugcagcaauugcguuaacacgacuuauuuucuuccuuauacucuu

SEQ ID NO: 925 - RNA, 88 nt, Human
ggaugggagugguggcucgugucuguaaucccaacaccucgggaggccaaagugcugggaccacaggcaggagccuucaugcccggac

SEQ ID NO: 926 - RNA, 71 nt, Human
gggccggugugagggcagguacagccgggucugggcuaugugcagagguuccuccuuguccuugauggccu

SEQ ID NO: 927 - RNA, 69 nt, Human
cucugaggcucauuuugcaguuguugaaauuguccccgcaguuuucaaucaugucugaaccaaucagag

SEQ ID NO: 928 - RNA, 95 nt, Human
cugcaagacugugcccuuccccuccugaaagaugucaucgcaacagauaaagaagacguugccuucaaagaccugggauguggccauucuugugg

SEQ ID NO: 929 - RNA, 87 nt, Human; identical to SEQ ID NO: 631

SEQ ID NO: 930 - RNA, 73 nt, Human
guuuauguucuucaagguaaagaaaaaugacauaguaaaugauuguuuaaaauuuuuaaauccagacauaaac

SEQ ID NO: 931 - RNA, 64 nt, Human
uauacagauaaaugagaaguuucgauucugcaucaagcauuauucaaucucaccuucugauaua

SEQ ID NO: 932 - RNA, 78 nt, Human
ugcgccuccggaugacaucugauucauucgugggaggaaauggauuguagaguaagguuuugucauuuggaaggggca

SEQ ID NO: 933 - RNA, 94 nt, Human
cacugugggggcggugagaacgcuguggacacugaggacgcugugggggcggugagggcgcuguggacgcggugaggacgcugugggggcggug

SEQ ID NO: 934 - RNA, 75 nt, Human
cgcugucggggccgugagacgcugucggggcggugaggacacugucggggcggugaggacgcuguggggacggug

SEQ ID NO: 935 - RNA, 106 nt, Human
ugaagaucgacauuuaaaaaaugagggugaagaaaagcuauaguggcauagaaaaaguuaaagcucaguuaguuuuuuuuuauuauuauuauuaaaaguuaauuca

SEQ ID NO: 936 - RNA, 85 nt, Human
ggauggggcagagcugagaagccaaggggggaagaguuggggcugaccucuucuucaccucgggccuuaaucacugaccaagucc

SEQ ID NO: 937 - RNA, 73 nt, Human
guauguauaagcaucagcccaagcaaagggucaaggaaauuagugcaugaaaggcuaaugcucauaaauauac

SEQ ID NO: 938 - RNA, 77 nt, Human
uucacucaggcgcgcuacuuggagaaagaagagaagugucucccuccucccagcauucggguaguggucacggugga

SEQ ID NO: 939 - RNA, 90 nt, Human
uggucuccuucaauucucauaccaccacuaauaucugagauguuauuacucauacuuuacagauaagcaaacugaggcuuggagagauua

SEQ ID NO: 940 - RNA, 60 nt, Human
caauugagaauuguugccugaaaaccaugugggagauuuaaauguauuaguuuuuauuug

SEQ ID NO: 941 - RNA, 68 nt, Human
uuucuucugugacauaaagacauuuugauaucguagaaccaauuuuuuauugugguaacggacaggaa

SEQ ID NO: 942 - RNA, 68 nt, Human
cugcagagcgagggcaugggccuaccguggggcuucugcugagccgaggggccagccccacucugcgg

SEQ ID NO: 943 - RNA, 63 nt, Human
uaagagauucuguugugauuauuugaauagcuuuauauuaauaaaagaagacaaaauuuuuua

SEQ ID NO: 944 - RNA, 96 nt, Human
uuucuuaucuaccuguuauauugugcuaauuuuucuauguaugugaugugaaaugaagacuauauauauggaauggaggugacagaaagaaagaaa

SEQ ID NO: 945 - RNA, 63 nt, Human; identical to SEQ ID NO: 527

SEQ ID NO: 946 - RNA, 63 nt, Human
ccggagcggaaguggcgaucggagcggaaguggagcuaccgccaccgccgccgccgauuccgg

SEQ ID NO: 947 - RNA, 69 nt, Human; identical to SEQ ID NO: 528

SEQ ID NO: 948 - RNA, 92 nt, Human
uucccaaugcuacacaaccagaaaguaagguguucuacuugaaaaugaaaggagauuauuuuagguaucuuucugaaguggcaucuggagaa

SEQ ID NO: 949 - RNA, 81 nt, Human
cgagcacaugauggcgauacgggagcucaaagugugccuucucggggacacugggguugggaaaucaagcaucgugugucg

SEQ ID NO: 950 - RNA, 61 nt, Human
gccggcggggcgcgggcgcggcggccccggaggaugcugcugagccccggcacugccuggc

SEQ ID NO: 951 - RNA, 115 nt, Human
cuaugggugcgguaucaucuaagagaauaagcauucuugaauauucuggacauguggcauggccuucuguaccaacucuucuagaugugcuugccuggugugccauggacccugg

SEQ ID NO: 952 - RNA, 78 nt, Human
gacugauacagucuguaagaucucuucgagagagcuguccaauuacagaucuauauacuuuucuucagaaggucaguc

SEQ ID NO: 953 - RNA, 78 nt, Human
cuuaugaguuagcuuucuugcuagcccccuagucggucaccaaacuaguaacuaguggggcuuaaugaaggucauaag

SEQ ID NO: 954 - RNA, 67 nt, Human
uguauagguaacuagguaacuuauuguggcccagauaaggcuuuaggaugccucagugcuuauguca

SEQ ID NO: 955 - RNA, 73 nt, Human
uuuuagguaagaauuagauuccuuauaaagaaguagugauaaaucuucauucuuguuuuguuuuuauuugaaa

SEQ ID NO: 956 - RNA, 78 nt, Human
gcggcacgcuguccagcagccugcuucgccccgucgucaacuuugagcuggaggagaagcaacuuuggcaguggccgc

SEQ ID NO: 957 - RNA, 96 nt, Human
gcucgccaagucgcugggguuagguggggcaagaguuucgccggcgcaucagcgcugcuucggacuguuugcaacguguuccagcgagcugggagc

SEQ ID NO: 958 - RNA, 69 nt, Human
gguugugacugcgagucgucugggggagggggacuuguuuucuuuccucuagagaccucgguugcaacu

SEQ ID NO: 959 - RNA, 77 nt, Human
gagggaggccaggcagcuggcugggcgguuauguuaaccgcugcaccaugacagcauuuagcagguuggcuuccuuc

SEQ ID NO: 960 - RNA, 75 nt, Human
ggucugggucucaucaaccaagcucuuuguucgggaaaguagucaugaggauaaaagcuggugggagccauggcu

SEQ ID NO: 961 - RNA, 98 nt, Human
uccacgaugaaaauucggaugucgcugaucccgugggcgggguaaaauucuuggacaagcuucccgccguuggaaaccggaauuugaauguuguugga

SEQ ID NO: 962 - RNA, 108 nt, Human
uuuuuuuuuuggugauauuccuucaauuuuuuugguuguuuuuauuuuuuuuuucauuaaaguccauugaucaucacaaaaacccaggaaaugcaacuaaggagaaaa

SEQ ID NO: 963 - RNA, 63 nt, Human
ccucugcucagaaauggaagaauuagccgaacauggcauauuucucccuccuaauaugcaagg

SEQ ID NO: 964 - RNA, 94 nt, Human
gcagccggggccuucucaacgccucaguaccucggcgggaccgccaugguucugcugcacgugaagcggggcggcgagagccaguuccugcugc

SEQ ID NO: 965 - RNA, 60 nt, Human
gggauucccggacugugagcggcuguuagugcgucgcagcugcuggcgauccggcgaccc

SEQ ID NO: 966 - RNA, 62 nt, Human
caauaauaaauccaaagaggagccaguuaccaugacucauccaggcacuggagauauuauug

SEQ ID NO: 967 - RNA, 64 nt, Human
ccguggcucucuagucuucgugucaauauccuuauuggugugaugauuauuucuucagccaugg

SEQ ID NO: 968 - RNA, 82 nt, Human
gauugccuugcugcagaggggaaacugcacguuuaaagagaaaauaucacgggccgcuuuccacaaugcaguugcuguaguc

SEQ ID NO: 969 - RNA, 60 nt, Human
gcaucgaccgcgggcgcuacgggcuugacucccccaaggccgagguccgcggccaggugc

SEQ ID NO: 970 - RNA, 63 nt, Human
ggcucgccgcgcuagcccugcugaccugcagccuguggccggcacgggcagacaacgcgagcc

SEQ ID NO: 971 - RNA, 129 nt, Human
cgggccgcuuuccacaaugcaguugcuguagucaucuacaauaauaaauccaaagaggagccaguuaccaugacucauccaggcacuggagauauuauugcugucaugauaacagaauugagggguacg

SEQ ID NO: 972 - RNA, 60 nt, Human; identical to SEQ ID NO: 969

SEQ ID NO: 973 - RNA, 90 nt, Human
gaaugucucaaagaaaauguccuugauuuaauuaugguccaagguggcugcuuugcacaagcuugucagugacaugaacuugaagacuuc

SEQ ID NO: 974 - RNA, 83 nt, Human
gcgagcagaccaugcguacgaguugaaaggauccuaaagaagucacuggauuuuuuauacuagacguucuuuggaaugagcgc

SEQ ID NO: 975 - RNA, 73 nt, Human
ucagaaccucgaggauucggucacuauuggaauugcuguuccugauguauaccgugcuugugacagguuugga

SEQ ID NO: 976 - RNA, 72 nt, Human
ccgugcgcguugcugcggccgugguccgcgcccuuccucggcgggccggacuggucuccagaaaugcuuugg

SEQ ID NO: 977 - RNA, 77 nt, Human
aagaguaggaugucugcugaagucauccaucagguugaagaagcacuugauacagaugagaaggagaugcugcucuu

SEQ ID NO: 978 - RNA, 109 nt, Human
cuuguuucggacuauagagugcugauggcagagauuggugaggauuuggauaacaucugauguguccucauuaauuuuccucaugaaggauuacaugggccgaggcaag

SEQ ID NO: 979 - RNA, 105 nt, Human
aauugauaaagccagaguggagacacagaaccacugguucaccuacaaugagacaaugacaguggagagugugacccaagcuguguccaaucuggcuuugcaguu

SEQ ID NO: 980 - RNA, 61 nt, Human
ucugggaccuuuguacagugugaugcucgagcaauuggcucugcuucagagggugcccaga

SEQ ID NO: 981 - RNA, 63 nt, Human
agcuaggauucucaaauggaaguguuauauauaauauguuaaaaacauuuugcuuuccuggcu

SEQ ID NO: 982 - RNA, 90 nt, Human
gaucccuuuaaauucaaauuugaaucauuugucauguaugauuauuucuguuaaguguacacaguauuuaagauggauauuugggggguc

SEQ ID NO: 983 - RNA, 103 nt, Human
guggcccucauccuucagaauguggaucugccgaauugaagaggccugauuucagcuccaccagaugcagauuuguguuuuguuuucuuguuaucacugucac

SEQ ID NO: 984 - RNA, 65 nt, Human
ccgcguuuccuuccaucccaaaguagaaagccguacucaggguacacggauagaacgagauccgg

SEQ ID NO: 985 - RNA, 73 nt, Human
cuuugugcuccagucgcuccuaacgcucccuggcccggcggggccgcgcaguuagggcaucugaggcggggag

SEQ ID NO: 986 - RNA, 82 nt, Human
gaauuggcaccuggauccaacaggcauuuagucaagcagaaagcaugugugaucgaagcccuuuagacgucgaggcaaauuc

SEQ ID NO: 987 - RNA, 83 nt, Human
gccggggccucauuuccaggucagccccgggccugacgcggcguugcgucccccgggagcugcgcuaggcgaacggcugcggc

SEQ ID NO: 988 - RNA, 69 nt, Human
ccagaaaggacaucacagguaaacugaaggacccugcgaacuuucaguauccugccgagucuguucugg

SEQ ID NO: 989 - RNA, 73 nt, Human
gagcccagccaaucagcgccccggacugcaccagagccauggucggcagaagagcacuugaucguacuggcuc

SEQ ID NO: 990 - RNA, 72 nt, Human
ggagaguuugcuuacacuuacgcugccauguaugacaaaggacccuuccggaguaagaaggcagugcuuucc

SEQ ID NO: 991 - RNA, 69 nt, Human
agaaugaauuuuggauauuguugagugguuuuucugcaucaauugggauaucauauggguuuucauuuu

SEQ ID NO: 992 - RNA, 62 nt, Human
gauguccuuuuauaaaguugaggaacuucucuucuguuccuacuuugcugagagucuccauc

SEQ ID NO: 993 - RNA, 69 nt, Human
ggauuacagcuaggaccuccagaacacugacaaaaagaaguggugcaguggaaauccuugccuuguucc

SEQ ID NO: 994 - RNA, 69 nt, Human
aggaaaggaggaagaaauguuuucuuaggggaauucgcuagguuuuaacgauuuguuucuccugcuccu

SEQ ID NO: 995 - RNA, 79 nt, Human
aguugguugcgggggagaggggagaauggaguagagucccuugguacaagcuccucuccccccucuuuucccaccaacu

SEQ ID NO: 996 - RNA, 61 nt, Human
cucucgggggcggagggggugccugugagcucucagccacuucccucccaacccuggugag

SEQ ID NO: 997 - RNA, 64 nt, Human; identical to SEQ ID NO: 175

SEQ ID NO: 998 - RNA, 67 nt, Human
agacgcucguuuucucaggacccaaggaaccaaaauugcuucugauggucucaagggucguguguuu

SEQ ID NO: 999 - RNA, 70 nt, Human
cugccugacuaacuuccauggcauggaucuuacccgugacaaaauguguuccauggucaaaaaauggcag

SEQ ID NO: 1000 - RNA, 80 nt, Human
cacgguauuguacacggucaucuguugaaacagauuucuuuuuuaacagaucuuaguuuaaaaaagucauagguacugug

SEQ ID NO: 1001 - RNA, 73 nt, Human
guucuguauaaacugguggacaguaaguuaguuccuuuguuuuaacuuauaagcccccacuucaccgcagaau

SEQ ID NO: 1002 - RNA, 73 nt, Human
guggcucggccaucaugcccaggaucugagcccacaucuggcaccagcucuaccaagggccugguugggccac

SEQ ID NO: 1003 - RNA, 130 nt, Human
auuacauggauccagcccaguucuccaauuccuucaugucgucguccuccucuucuuucuucuuggcggguuuugaugguagggcuauagagggaacauuugguagagggacuguuucggguccacugau

SEQ ID NO: 1004 - RNA, 69 nt, Human
cugccugccccacacacgcacacgccugcucgcugcgcaggccaccacagucugucugggcccagccag

SEQ ID NO: 1005 - RNA, 67 nt, Human
agucuuguauagcaauaugcuuggagaggagaauacuuaucucuggcgcacaucacuauauuuggcu

SEQ ID NO: 1006 - RNA, 71 nt, Human
ggauguccuccgagaggaagugagugagaucuuagaugaaaugagucacaaacugcgucuuggagccauuc

SEQ ID NO: 1007 - RNA, 71 nt, Human
aacuugaaagugaacaguaugacuuuccugauccagaacaguuuggcccacaucuguuuaaucuuccaguu

SEQ ID NO: 1008 - RNA, 66 nt, Human
uagaauaaauuaacaaguauuuuuucaaaaaaauguuuuguacaaaaauacugucaaaauuuccua

SEQ ID NO: 1009 - RNA, 73 nt, Human
uggagggaacauucugcuuuucaggcaccagcugugaagaagaaaccaacaguaacuaaaggcagaucuucua

SEQ ID NO: 1010 - RNA, 69 nt, Human
uuucaguacugacuguugguuuuggccuugcaagagcagaaaaucagaagcuggauuucaguacuggaa

SEQ ID NO: 1011 - RNA, 61 nt, Human
acuagaauguugaccucgagccgaggccuacuugcagcgcaccggaggagaggucucuagu

SEQ ID NO: 1012 - RNA, 80 nt, Human
gcuccgccuuuucuggguacuuacgguccugagucucaaguucgucuucgagaugcuguugugccagaagcuggcggagc

SEQ ID NO: 1013 - RNA, 78 nt, Human
gucugccccagccuuguuuuacucccugcauuccauauucuguuguuccggcuugcagcccacagggcuggagaagau

SEQ ID NO: 1014 - RNA, 84 nt, Human
ugucugucucuuuucggaagcggaauuuccucagcuuuucuguuagcucugggucuaccucgcacaccaccagggagucagaca

SEQ ID NO: 1015 - RNA, 97 nt, Human
agggcuaccaaguuccuccaggagccacauauacugccauugaggcucccaagggagagucugggguguaccuggugucugauggagaggcggcucu

SEQ ID NO: 1016 - RNA, 66 nt, Human
aucuggcugguuggacaagaugucuaagggacacaugucggcagaugucguugccaaucaauaggu

SEQ ID NO: 1017 - RNA, 88 nt, Human
gauaugguauugggagaaguagaucggugagcaggggagcaggguuugauccaccccugcuaucagacuucuucuguggagccauguu

SEQ ID NO: 1018 - RNA, 75 nt, Human
auagcaagucugaaaaauagaagauagucaaauauuguuuaugcuaagaacuguuuuuaauuuucagcuugaugu

SEQ ID NO: 1019 - RNA, 66 nt, Human
gaaagcauguagagcaguugugauuaguagaaaauacacugacaagaagauauuugcauuuauuuc

SEQ ID NO: 1020 - RNA, 86 nt, Human
ggugucuuuaguucaagcauguuaggaaauccucuuuauucuuaaauauagauacaugucugcauauaugauugaauuuuagagcc

SEQ ID NO: 1021 - RNA, 65 nt, Human
uagaaguaguuucugauuucccugaaugaaagauagugaucuuuuaggccuucauauaucuucua

SEQ ID NO: 1022 - RNA, 131 nt, Human
ugcagugaugcugccuacaccuccaccuccuuccccuucucccucaggcaaccccgacagacaguggcacuccugguccugcugucuugguuuugucuuggcucugggaggacucugaggggcagugcuca

SEQ ID NO: 1023 - RNA, 61 nt, Human
gccauccucuccuguaccuggguacagggucugcucugugucccgugugucaaccaauggc

SEQ ID NO: 1024 - RNA, 75 nt, Human; identical to SEQ ID NO: 74

SEQ ID NO: 1025 - RNA, 87 nt, Human; identical to SEQ ID NO: 76

SEQ ID NO: 1026 - RNA, 89 nt, Human
ggagaaucacuuaaauccagaaggcagagguugcagugagccaagaucacgccacugcucuccagcugggugacagugagugagacucc

SEQ ID NO: 1027 - RNA, 81 nt, Human
gggcaauggcucacaccuguaaucccagcacuuugggagacugaggcagagggaucacuugaggugaaagaguucaagucc

SEQ ID NO: 1028 - RNA, 93 nt, Human
acugggacugcugagauguccucuauucuugaagagcguauucuuggagcugauaccucuguugaucuugaagaaacugggcgugucuuaagu

SEQ ID NO: 1029 - RNA, 108 nt, Human; identical to SEQ ID NO: 710

SEQ ID NO: 1030 - RNA, 95 nt, Human
ggagccauuguggacguuccaguuggugaggagcugugggucguguaguugaugcccuugguaaugcuauugauggaaaggguccaauugguucc

SEQ ID NO: 1031 - RNA, 87 nt, Human; identical to SEQ ID NO: 76

SEQ ID NO: 1032 - RNA, 77 nt, Human
gcugauuucgaaugguaaacaaaucauacauauuaauguugcuuugaaacauuuuuuuguuguuguuuugagacggc

SEQ ID NO: 1033 - RNA, 76 nt, Human
ucacucuguugcccaggcuggagugcaguggcacuaucuugacucacugcaaccuccaccuccuggguuccaguga

SEQ ID NO: 1034 - RNA, 60 nt, Human
aagauccuucugcaagaaaucucuuuaccuaucaacucauuuauuugcccacuugaucuu

SEQ ID NO: 1035 - RNA, 74 nt, Human
agagaauccagcauccacuguucugcccaguauuuauccauugaccugugcucugucuggauccuaucuucucu

SEQ ID NO: 1036 - RNA, 65 nt, Human
ccauucuauucucuuagauuuuuugcuguaauuuuuagaacacuuccucuaggaguuucuaaugg

SEQ ID NO: 1037 - RNA, 66 nt, Human
ugccuagccuuaucaugaacuugagguucaaagaguuaaucccucuguucauuauugcuuuuugca

SEQ ID NO: 1038 - RNA, 83 nt, Human
cuguucccaugcuugagcuuccauggggaggaugcugagugagcaguuuccuaccccguggaucuagcaagccauggagacag

SEQ ID NO: 1039 - RNA, 75 nt, Human
cugaagacuccuggggcgcaaggcuaugggucagagaaaaacugggcuguggccggaccccaccugguucuuugg

SEQ ID NO: 1040 - RNA, 86 nt, Human
ggucauggcuggaguccugcaucuggucuaaggcuuugaugcuucagaaggcucauauuguagagcgggugugggaagcuguggcu

SEQ ID NO: 1041 - RNA, 79 nt, Human
gugcuggcuccugggugggcaggcccaggaccuucacaacaucugugaucuuggcaggcucugacaggcggagcagcau

SEQ ID NO: 1042 - RNA, 62 nt, Human
gcuccgauuuggcagccagaucuucaucgagcacguggccgauguggacaccuuguuggagu

SEQ ID NO: 1043 - RNA, 70 nt, Human
gcuggagccgucuacaucugcacggaagacgccuucccgcacaagcgccugcagcagcucauggcccagc

SEQ ID NO: 1044 - RNA, 82 nt, Human
gugccuucagagcccugugcugugcucacccggugccgaggcauggcggaccuggcgcagcacacggagccgauggagguac

SEQ ID NO: 1045 - RNA, 71 nt, Human
cagugagaccaguguccugaaucgacucugccggcucggcacagacuauauucgcuucacugaguucauug

SEQ ID NO: 1046 - RNA, 65 nt, Human
ccgugggaaugauccacgaacugcucuuggcucugagcggguacccuggguccauuuucaccugg

SEQ ID NO: 1047 - RNA, 125 nt, Human
gcgaccccuucccagcuucccguccgcuccgccgcagcgauugucucgguggguugauucggcacaaaccgcccgacccagggccggugcgcguguggaaggggaagcacuccccucguggucgc

SEQ ID NO: 1048 - RNA, 87 nt, Human; identical to SEQ ID NO: 76

SEQ ID NO: 1049 - RNA, 75 nt, Human
gcgugaccuggcagcuguagcuucugugggacuuccacugcucaggcgucaggcucagauagcugcuggccgcgu

SEQ ID NO: 1050 - RNA, 71 nt, Human
gggagaagggcuugaugccuuggggugggaggagagaccccuccccugggauccugcagcucuagucuccc

SEQ ID NO: 1051 - RNA, 63 nt, Human
cgucaggcuccugcaaccccaggcaugaaccaagguuucugaacuacugggcgggagccaacg

SEQ ID NO: 1052 - RNA, 103 nt, Human
gagaagaucaaagguggaauccacacagcagauaccaagacagcagggagugugugccucuugaugcaggucucaaugccguguguucucuuugcugcuucuc

SEQ ID NO: 1053 - RNA, 64 nt, Human
gaucggagccggccggagcacgccaggccugaggccucaacauuuaucuggacuggaaaugauu

SEQ ID NO: 1054 - RNA, 63 nt, Human
gugacauuaaaacaaggggauauuacccaaaaggggugggugaagugaugguucgaaugucac

SEQ ID NO: 1055 - RNA, 86 nt, Human
cuucccaggcccguggccaacccagcaguccuucccucagcugccuaggaggaagggacccagcugggucugggccacaagggagg

SEQ ID NO: 1056 - RNA, 62 nt, Human
ggagugagggcaggcgagccccaccccggccccggccccuccuggacucgccugcucgcuuc

SEQ ID NO: 1057 - RNA, 75 nt, Human
uaccuggaggccauucacaacuucguggaggucuuaaacgaauauuuccacaaugucugugaacuggaccuggug

SEQ ID NO: 1058 - RNA, 71 nt, Human
gcugguuuccuggccgaggcggagcugcugaaccugaggaagaucagcuccgacuuggacgggcacccggu

SEQ ID NO: 1059 - RNA, 61 nt, Human
gcugugcaagccuuggcaagccagcaccagcaacagccaucauugccaaggacuucaaggc

SEQ ID NO: 1060 - RNA, 63 nt, Human
guaugggaggccauggccuucgccagcaucuauaagcuggacaaccuuguggccauucuagac

SEQ ID NO: 1061 - RNA, 109 nt, Human
cugugcaccucgugguagaacucuuugggguucgccagcuguagcucauauuucauguuggggucaugccgaacacccaugaaguuguaguuccacgaggacugggcag

SEQ ID NO: 1062 - RNA, 65 nt, Human
gaaggucagauaugcagaugaacuucuuaagcacauucuugggaaggauguagguguagacaguc

SEQ ID NO: 1063 - RNA, 68 nt, Human
gcaggaggcagggaaacggucaggcauacagguccucccgauccgcagaguaaaccucccccuccugc

SEQ ID NO: 1064 - RNA, 103 nt, Human
acuguauauagggaguaauuagggaccuaaucuaguuucagugaagaaagaucccuuuacguuaauuuaggugcaucuaauaauucuuguucuguauaaaagu

SEQ ID NO: 1065 - RNA, 74 nt, Human
ggcucggugcuaaauauggagauauagcagugucaacacacaaguggucccuccauguugucacagcugauguc

SEQ ID NO: 1066 - RNA, 77 nt, Human
gcugacugcccgcccuuggcuccaucugcagaugucuucagagacgagauguacuuggaccagaaggagcagucggc

SEQ ID NO: 1067 - RNA, 122 nt, Human
gggugagguuuuuggggagcucaagggcuggucacuugcuguaggucuuagagccugguuccuggaggcuuaggagaucuucucuuagcccagauccagccgucaacuccuccucuucacuc

SEQ ID NO: 1068 - RNA, 61 nt, Human
uuuuuuuuucaccgcauguagauacuuuauugaagguaaguggcuauuuuagagaaaaaga

SEQ ID NO: 1069 - RNA, 60 nt, Human
aaaguuguucagaaacugauuccacaacucccaacucuggagaauuugcugaacaucuuu

SEQ ID NO: 1070 - RNA, 64 nt, Human
gcauuucuaugugauguggucaguaaaauuuauauugcaacugauaguacuccgguggauaugc

SEQ ID NO: 1071 - RNA, 72 nt, Human
uccuucuguaaauacccguuaccauauuuauccauuuguaauuaaauuaugguauuaacuugcuacagagga

SEQ ID NO: 1072 - RNA, 60 nt, Human
aguaucuauuuauuaaaugaaugcacaauugaaagagugaagauugaaugucuagauauu

SEQ ID NO: 1073 - RNA, 63 nt, Human
aacagugcuuuguaccggaucugcugaagcaucuguccagcugguauccugugaaaguuuguu

SEQ ID NO: 1074 - RNA, 80 nt, Human
acgagcuuuaguuuguuuucugguuuaaaaaauaaaaagguuucucuuaacaguauuuccagugacaaugcaagguaagu

SEQ ID NO: 1075 - RNA, 88 nt, Human
uuaugggauauugauuucuuguuuuuuuuccguaacauugucugcugcaauuuaaauaaaaauuacgacauuuuaagauauuucauag

SEQ ID NO: 1076 - RNA, 64 nt, Human
aggcugagagacugcuccccauugcagauuagcguauagucagaugggcuacaguuuuucuccu

SEQ ID NO: 1077 - RNA, 82 nt, Human
cugugaguuauaugugaugaaaaaguauagcuuucuugaauucaaauaagcaauggcaaagaucacauuuagaauuugacag

SEQ ID NO: 1078 - RNA, 99 nt, Human
aagucugcagauuuuuuuauuauggugcagcuuuuuuuuaauuauguuuuuaaaauuauacaguugaaaaauaugccauuucauaaagucugaggauuu

SEQ ID NO: 1079 - RNA, 84 nt, Human
cacuggugcuuucaucaucagaggucaaauuauuaugauaacuauuccauuaaguuugccaaacauuugucgugguuaccagug

SEQ ID NO: 1080 - RNA, 81 nt, Human
aggcuuguacauuaucucuaggugaagggauuccagguuaguuugcuuguaggaugauuucacagaagauaacagaggucu

SEQ ID NO: 1081 - RNA, 62 nt, Human
cccuaccacugaagaugaguuucuccucuguuacuacagcacagucugcgucuguggugggg

SEQ ID NO: 1082 - RNA, 92 nt, Human
cuguacaagguggggcugcgggacguuaaugacuacguguccuaugccugggucggggacagcaaggucuccugcagcgacaacugaaccag

SEQ ID NO: 1083 - RNA, 92 nt, Human
uaguaugugggguuuuuugguuuuguguuuuguuugguuucaacuuggaccaauucagaaauguauacggaaaaaaaugucuucacaaccua

SEQ ID NO: 1084 - RNA, 97 nt, Human
gcuacuuugcugguaaccuggcguccgguggggccgcuggggccaccucccuuugcuuugucuacccgcuggacuuugcuaggaccagguuggcugc

SEQ ID NO: 1085 - RNA, 81 nt, Human
gggcucuguaugggaggccauggccuucgccagcaucuauaagcuggacaaccuuguggccauucuagacaucaaucgccu

SEQ ID NO: 1086 - RNA, 61 nt, Human
ggggcaaacuuacucugggcaccuauaucucccuuauugccgagaacuccacaaaugcucc

SEQ ID NO: 1087 - RNA, 71 nt, Human
guaguauggcaucgaggagaauggagaccaaaccugugauaaccugucucaaaacccuccucaucaucuac

SEQ ID NO: 1088 - RNA, 65 nt, Human
uaugugcucaucggaacuggcaccacuauuguugucuuuggccuguuuggaugcuuugcuacaug

SEQ ID NO: 1089 - RNA, 76 nt, Human
accaguggaucgagcaggacauggagaaguacauccugagaggggaugagacguuugcuguccugagccgccuggu

SEQ ID NO: 1090 - RNA, 65 nt, Human
ccaccauuaagcaguucauggacaucuucucgcuaccggagaugcucugcuguccuguguggugg

SEQ ID NO: 1091 - RNA, 82 nt, Human
gggaaagaaugccaagaugguauuuucuuuuggcaagaugcuuugguugugcagucauugaagauacuuggcacuauuuucu

SEQ ID NO: 1092 - RNA, 61 nt, Human
ugaaagugucagcaucuuuaguucagcauccuuggcuguggaauauguagauucacuuuua

SEQ ID NO: 1093 - RNA, 92 nt, Human
uuucuuauucuguuuaccuggauuuuuauuucaauuuauaccuuauaugaaaaaauacaaaauucaaaaggauaagccagagacaugggaaa

SEQ ID NO: 1094 - RNA, 69 nt, Human
ucuuguguauggauauguguaaauguuaugacuccuugauaaaaaauuuauuauguccauuauucaaga

SEQ ID NO: 1095 - RNA, 71 nt, Human
gaaaauaauuggagauuuaugguaguaucagugguauuuuuuccauuuuuuuucucuccaacuauguuuuc

SEQ ID NO: 1096 - RNA, 75 nt, Human
gaauguuucuugaaauuggcgucaaacugucuuguauuucauuucuuuugcgaugccuaauugaaucgaaacuuc

SEQ ID NO: 1097 - RNA, 70 nt, Human
gguccacauagcuauaugauagacagccaccgcaacugucucgucucauaucacgaacagcaaagcgacc

SEQ ID NO: 1098 - RNA, 63 nt, Human
ucuuggugacaaaauauguuguguagaguucaggggagagugcgucauauguuguuccuagga

SEQ ID NO: 1099 - RNA, 77 nt, Human
gucgauuuaaaccauguagaaauaaguaugcaaaaagucugcauaacaaaacauacuuuuaacauguuuaaguagau

SEQ ID NO: 1100 - RNA, 60 nt, Human
agccgagccugaggcuggggaugguggcucaugccuguaaucccagcaccuugggaggcu

SEQ ID NO: 1101 - RNA, 84 nt, Human; identical to SEQ ID NO: 286

SEQ ID NO: 1102 - RNA, 103 nt, Human; identical to SEQ ID NO: 294

SEQ ID NO: 1103 - RNA, 79 nt, Human
ggcaacuucaggaugacaaaaaccaaagucucuucugcugggaaaucccaguacagaucguuucucaucucuaagugcc

SEQ ID NO: 1104 - RNA, 71 nt, Human
caguagccccauuucagacucccauuccaacauuuuucccaugcaggaugaacugacaguuguugcugcug

SEQ ID NO: 1105 - RNA, 63 nt, Human
ccuuucuauaugauuucaggaguucuugggucacagcaagaaucugauccuuguauacagagg

SEQ ID NO: 1106 - RNA, 94 nt, Human
aggugggcggcggccccuccaugcgcccgccgcugccguagcacguggcgcugaugcccgaguuacugcugggggggcaugggccguccuaccu

SEQ ID NO: 1107 - RNA, 97 nt, Human
cgcagccccagcccggccccccuggggacccuagagaggguguccuuucuguuuauccuucucuuugcuccaaauggcugcgcucucuaggggcgcg

SEQ ID NO: 1108 - RNA, 63 nt, Human
ggaggugggaggggagggccacacgaugcguugcugcgccccccgccuuccucucacuccucu

SEQ ID NO: 1109 - RNA, 77 nt, Human
gcccaucacagcagccaggagauguccucugaguaccgggaguaugcagacgaguuuuggcaagugcccuggugggc

SEQ ID NO: 1110 - RNA, 67 nt, Human
gcugucgcgccgcgcugcggggccaugauccggaacgggcgcggggcugcaggcggcgcagagcagc

SEQ ID NO: 1111 - RNA, 75 nt, Human
ucaguuaaaaaagaagaagaagaaauggcaaagagaaaguuuuuucaaauuucuuucuuuuuuaauuuagauuga

SEQ ID NO: 1112 - RNA, 71 nt, Human
ccgggacguggcuggucggccuucauuaacccucgggggguaccggcuggccacuucuuccaagguccugg

SEQ ID NO: 1113 - RNA, 79 nt, Human
uggauucuggauauauuauaaugagugacacuuugacagcggaugucauuggucgaagaguugaaguuaauggagaaca

SEQ ID NO: 1114 - RNA, 61 nt, Human
uuuuggaacagacuuucuuacugcaauuaagaaccgcuauguguuagaagauggaccagag

SEQ ID NO: 1115 - RNA, 100 nt, Human
ugaggcgagagaaucgcuugaacugggaggcagaaguugcagugagccaagaucguaucauugcacuccagccugggccacagagcgagacucugucuca

SEQ ID NO: 1116 - RNA, 72 nt, Human
aguauuugacugcuaaauucuccacauuauguaaccugauuaauuacauuuggguguaaagcaguaaaugcu

SEQ ID NO: 1117 - RNA, 61 nt, Human
ccugggaauuuucaacauggucuaauuauuuacucaaagacauagaugugaaaauuuuagg

SEQ ID NO: 1118 - RNA, 62 nt, Human
uuguauaguaauguuucagaccaucauccagcuuuggcugcugaaaucauacagcugugcaa

SEQ ID NO: 1119 - RNA, 69 nt, Human; identical to SEQ ID NO: 994

SEQ ID NO: 1120 - RNA, 79 nt, Human; identical to SEQ ID NO: 995

SEQ ID NO: 1121 - RNA, 61 nt, Human; identical to SEQ ID NO: 996

SEQ ID NO: 1122 - RNA, 67 nt, Human
gugggcagggguggcagaggacacgagcagccacugcccguacccccucuccucucuguaagcccau

SEQ ID NO: 1123 - RNA, 94 nt, Human
ucccccugcugucugcagccccuccccggggaguuggugcuuucuuuuccuuuuuauuuuuuuccagggggagggaggaaaggaaggaggggga

SEQ ID NO: 1124 - RNA, 71 nt, Human
gcccucguuuauucagcaaauauucauggagcccuuguaccaagcacggugcugagugaugcugugagggu

SEQ ID NO: 1125 - RNA, 87 nt, Human
ucuaccacaccaaugccuucauggucuuacaucuuguccucuuaacccugacuucucuagcccucaugaaugcuuuaguguggcaga

SEQ ID NO: 1126 - RNA, 75 nt, Human; identical to SEQ ID NO: 74

SEQ ID NO: 1127 - RNA, 106 nt, Human
guaacugcaaagaugcuguccgugcgcguugcugcggccgugguccgcgcccuuccucggcgggccggacuggucuccagaaaugcuuggguucaucuuucauugc

SEQ ID NO: 1128 - RNA, 87 nt, Human; identical to SEQ ID NO: 76

SEQ ID NO: 1129 - RNA, 71 nt, Human; identical to SEQ ID NO: 77

SEQ ID NO: 1130 - RNA, 63 nt, Human
agagaugcauggugguauuuaaguaguaugucaucauauuugaaaugccuuugugacauuuuu

SEQ ID NO: 1131 - RNA, 75 nt, Human
ggugagguggguggaucaccugaggucaggaguucaagaccagccuggccaacauggugaaaccccaucucuacu

SEQ ID NO: 1132 - RNA, 79 nt, Human
uuucuaaguuaaaaaagacacaugguccuuuauuuuuaagaaauagaauauguaaaaaguuuucucuuuuaauuugaaa

SEQ ID NO: 1133 - RNA, 79 nt, Human
acauagauggcugguacauugcugugcuggaaucacgccuaucuguauaguaaagaagccaagcccacagagacuaugu

SEQ ID NO: 1134 - RNA, 75 nt, Human
aauuuauguuguuuaguguuauauuccagacgugauaccaaaauuuuguugcaaauauaauggacaauauuuauu

SEQ ID NO: 1135 - RNA, 129 nt, Human
auaaccacaaaugacuuuaaaguucuggaugguaauuacggauuguggaccaguaauaaagggauuauuaaauguuauucgguuaaacagguuaaaguacaguaacaaauugggagucaaacuggggau

SEQ ID NO: 1136 - RNA, 73 nt, Human
ccuuaugugaguaugcaaauauauaaauuugaguaugcuugauuguauauuggaacucaacaugaucauaagg

SEQ ID NO: 1137 - RNA, 79 nt, Human
guacccuuaauugaguuacuacuaugguauuguuaauauuuucuacacuaaauaccauguggugucuuuauagguugac

SEQ ID NO: 1138 - RNA, 70 nt, Human
caugggaaacaaccugaaaaagcaggcaggccucccggucagggagccucugcugugcuggcuucccaug

SEQ ID NO: 1139 - RNA, 84 nt, Human; identical to SEQ ID NO: 286

SEQ ID NO: 1140 - RNA, 64 nt, Human; identical to SEQ ID NO: 287

SEQ ID NO: 1141 - RNA, 89 nt, Human; identical to SEQ ID NO: 288

SEQ ID NO: 1142 - RNA, 81 nt, Human; identical to SEQ ID NO: 201

SEQ ID NO: 1143 - RNA, 69 nt, Human
gccauugaugaccugcccuucaauaauuguuuuguaagaguugaugacccgggagagguugucacuggc

SEQ ID NO: 1144 - RNA, 70 nt, Human
guuaucauuguccucagucucacuggcgaguuuaaauaaaguccgccucuuguucucacacugaucaaac

SEQ ID NO: 1145 - RNA, 71 nt, Human
gggaaacuccgaggacagagggcuaaauccaugaaguuuguggauggccugaugauccacagcggagaccc

SEQ ID NO: 1146 - RNA, 67 nt, Human
guagagcuuuaugcugaaaagguggccacuagaggucugugugccauugcccaggcagagucucugc

SEQ ID NO: 1147 - RNA, 107 nt, Human
gauuccuuuuaauccuauagcuuuguguguuugugugugcauguauguguguuguugugugugugugcacgugcuuuauucacaaauuuauaaggguuucuaggguc

SEQ ID NO: 1148 - RNA, 110 nt, Human
ggcaaguguugucaugguaguacaggaggcaaaaccauuuauauuuugaacacuuacugcacugauaggauguuuugugguugagcugauuuuaguacuguagauagguc

SEQ ID NO: 1149 - RNA, 76 nt, Human
aguggcguucagccaaccgagauugagccauaacaggucugugaugaccuuagauguucggggcugcacgcgcgcu

SEQ ID NO: 1150 - RNA, 66 nt, Human
augacugggucagcgugugccuaaccuacgccggcaggcgcggguaaaccguugaaacccauucgu

SEQ ID NO: 1151 - RNA, 90 nt, Human
aaagaugcuguccgugcgcgugcugcggcgugguccgcgcccuuccucggcgggccggacuggucuccagaaaugcuuggguucaucuuu

SEQ ID NO: 1152 - RNA, 92 nt, Human
cucaaguggcuaaugacacaaucauuacagaaacguucaugauggguccgugcaaagaagaagcuggccugauuaugugguagucgcaagag

SEQ ID NO: 1153 - RNA, 75 nt, Human; identical to SEQ ID NO: 74

SEQ ID NO: 1154 - RNA, 71 nt, Human; identical to SEQ ID NO: 77

SEQ ID NO: 1155 - RNA, 67 nt, Human
accacugaagaaaagacgaaugcaaaggaagaaggagcuuaaugccaggaacagauuuugcaguggu

SEQ ID NO: 1156 - RNA, 77 nt, Human
ggaugauggcccaccgaugggcggguggcaacuucuuggaagcacuuacaccccacccgacguggccauuguaaucc

SEQ ID NO: 1157 - RNA, 72 nt, Human
gaaccaggccccagacaugcugcauagauuuuauggaaagaacucuucuuauguccaugggggauuggauuc

SEQ ID NO: 1158 - RNA, 60 nt, Human
auguuucaacuucuuuaguucaacccugugcuguggacugaucuugugcccaauuaacau

SEQ ID NO: 1159 - RNA, 71 nt, Human
gagagcuucagcuugcauauccuugggcagaaaacccugcuggauuccaguaagcucuuuauugaacucuu

SEQ ID NO: 1160 - RNA, 72 nt, Human
gcagcccugaagaaaucagguaaauuccgcuccagagacggcagagcugguggcgccauucuucagggcagc

SEQ ID NO: 1161 - RNA, 61 nt, Human
ggcgaccaucuuguauucaagugcugacaaccgugaugucauuuacuucagagauuuugcc

SEQ ID NO: 1162 - RNA, 70 nt, Human
gaagcacguggggccagguguccuguccauggcuaaugcugguccuaacaccaacggcucccaguucuuc

SEQ ID NO: 1163 - RNA, 84 nt, Human
ccacucaugaacccucacauccgcgugggccccuccugagcccccuugcuuguggcuaggcagccuaggauguggguucugugg

SEQ ID NO: 1164 - RNA, 70 nt, Human
ggcaggccuggaaguccccgugggucaagcauuugucuugacuugcuuuccucgcgggucuccagccucc

SEQ ID NO: 1165 - RNA, 64 nt, Human
agcagggccucauacuccugggccuggcgcugucccucugcccgggucugugccagcucugacu

SEQ ID NO: 1166 - RNA, 93 nt, Human
gccguggagugggagagcagcgggcagccggagaacaacuacaacaccacgccucccaugcuggacuccgacggcuccuucuuccucuacagc

SEQ ID NO: 1167 - RNA, 75 nt, Human
gucgacccagggaggaagaugaccaagaaccaggucagccugaccugccuggucaaaggcuucuaucccagcgac

SEQ ID NO: 1168 - RNA, 82 nt, Human
ugaaggguuucuaggaagguuuagcagugcuucaauuaucuuagcaucauucucagguucaucuuccuguaaacuacuuuca

SEQ ID NO: 1169 - RNA, 67 nt, Human
ugccaccacagguaccagcacuuaaauuugucagcaggcugaccaaagaguggccugucuguuggca

SEQ ID NO: 1170 - RNA, 101 nt, Human
uguauuauucaacuuuaaucuuuugcgaaauguuguauuuacugcuuaaaaucuagguggguggauauauucauguaugcauauauugauagauuaauaca

SEQ ID NO: 1171 - RNA, 75 nt, Human
ggaagauaacuguucuagauagcucuuuuuuuccaaaauucuugauuaagguuuggggaauuuagaauuaucucc

SEQ ID NO: 1172 - RNA, 107 nt, Human
uuauguuuuguuguuugauuuccuaguucauaacagaagggguuuuguaagcugaccuagcuugacaauccuuuuuggguuuuuugguuucaaacaugaucuuauaa

SEQ ID NO: 1173 - RNA, 100 nt, Human
gaagccgcuagacuuuuuuuccuccccucucaguagcacggaguccgaauuaauuggauuucauucacuggggaggaacaaaaacuaucugggcagcuuc

SEQ ID NO: 1174 - RNA, 69 nt, Human
ggcuuuacuucugucucgucugccccaaccgcuagccucggcuuggguaaggcgaggcggaauuaaacc

SEQ ID NO: 1175 - RNA, 86 nt, Human
aaacuuuuggcauuaaauugcaagaaaaaagaaauacaaauuaucacaauaaauuucagaaucuguuucuuuaguccaaauaguuu

SEQ ID NO: 1176 - RNA, 60 nt, Human
ggaaggcacaucauggcuugguaucuccgugcgagagcagcugcugccugguguacuccc

SEQ ID NO: 1177 - RNA, 80 nt, Human
caaaagguuuauugaaaugcauguagauaaauuaucaucagcauaaaacuguuauggaguuuucaacauggggucuuuug

SEQ ID NO: 1178 - RNA, 68 nt, Human
gaugcuuuugauaagugccaccuugguaauaaacuccauugagauggcccacgugacacuuguucauc

SEQ ID NO: 1179 - RNA, 75 nt, Human; identical to SEQ ID NO: 74

SEQ ID NO: 1180 - RNA, 87 nt, Human; identical to SEQ ID NO: 76

SEQ ID NO: 1181 - RNA, 71 nt, Human; identical to SEQ ID NO: 77

SEQ ID NO: 1182 - RNA, 120 nt, Human
aggugguguucaguugcugcucacaauaguugauaccccaggauuuggagaugcaguggauaauaguaauugcuggcagccuguuaucgacuacauugauaguaaauuugaggacuaccu

SEQ ID NO: 1183 - RNA, 90 nt, Human
ccauuggauauagaguuuaugaagcguuggcaugaaaaagugaaauaucaucccacuuauugccaaagcagacacacucgacaccagagg

SEQ ID NO: 1184 - RNA, 63 nt, Human
gucagaugccugauaacagggugcaguguuguuuauacuucauugcuccuucaggacauggac

SEQ ID NO: 1185 - RNA, 74 nt, Human
ugguagugggugaaucuggauugggaaagucgacauuaaucaacucauuauuccucacagauuuguauucucca

SEQ ID NO: 1186 - RNA, 85 nt, Human
ccagaugaagaagaucuagaacgacuucucuuucuguuccucucaggagaagaugaugaacuugaauaagaucuuuuucgugggg

SEQ ID NO: 1187 - RNA, 64 nt, Human
gcagaugaauauuaacgaaacccaaaccuuucgggugaccgugaucuuguucgucuuuuuuugc

SEQ ID NO: 1188 - RNA, 82 nt, Human
caucuguggauugugaaguuuaucuaguuguuuauaacuuuuuuuagcuaaauagaauggaaaacaucaaagugcauacgug

SEQ ID NO: 1189 - RNA, 120 nt, Human
ccggguucacaccauucuccugccucagccuccggaguagcugggacuacaggcgcccgccaccacgcccggcuauuuuguauuuuuaguagagacagggguuucaccguguuugccagg

SEQ ID NO: 1190 - RNA, 100 nt, Human
auacugaugauuuaaaaacaagcacaacaacguaaagaaucuuccucuauuucaggagaaaugauuuacugugaaguuauccuuuuaacaucuuuggugu

SEQ ID NO: 1191 - RNA, 95 nt, Human
cugggugaaccaggauggucgcuuucugucucguucaaugauccucuugcccugaucuuguucagacggugucucuccuguguacagcaccacag

SEQ ID NO: 1192 - RNA, 62 nt, Human
cagaagcaugcacaaagagauaaugugacagugcuacaauuaggucuuugucagacauucug

SEQ ID NO: 1193 - RNA, 80 nt, Human
guggcaaaaauaauauugugaaguucaauuucaacauguauguauaugaugauuuuuuucucaauuuugaauuaugcuac

SEQ ID NO: 1194 - RNA, 69 nt, Human
aaaggagggagcacgagucauggaggcgggaaguggugcaccugcagacuugcucugcuccaucacuuu

SEQ ID NO: 1195 - RNA, 65 nt, Human
gcagagaagaaagagaaaaguauucugcauaaucaauccugcagacacaauucuguauaaucugu

SEQ ID NO: 1196 - RNA, 69 nt, Human
gcuuuuuaugguuuaaaaucaauugguguauaaauuucaauuaacacccauaaagcuuagccauggggc

SEQ ID NO: 1197 - RNA, 72 nt, Human
cgcgaucagcggacccaucaaggcggaucuugaaagaaacaaggacgcucauacgauguuuccucuauggug

SEQ ID NO: 1198 - RNA, 90 nt, Human
cgcugcgguaggccguuuccgaggcagcaguugcggccgcuuuuagccccugagcggcgaucugcggacugccugcgagucucugcugug

SEQ ID NO: 1199 - RNA, 80 nt, Human
ucuucgcggaccccaacgccaagcagcgagcccugagccgacagccggaugcugccgggcacuuggcgggccucgacgga

SEQ ID NO: 1200 - RNA, 77 nt, Human
ggcagggaagaagauuccggaaugcagacucccugaaaucauguggguuuuuuuguugccgguuuuucccauaagcc

SEQ ID NO: 1201 - RNA, 78 nt, Human
ugaaaucuacauuagcagugcugugcaagauucuuacauaauucaagaccuaaaaccagccugcagugugagguuuca

SEQ ID NO: 1202 - RNA, 61 nt, Human
gcguugcugcggccgugguccgcgcccuuccucggcgggccggacuggucuccagaaaugc

SEQ ID NO: 1203 - RNA, 87 nt, Human; identical to SEQ ID NO: 76

SEQ ID NO: 1204 - RNA, 84 nt, Human
cuccuaccagaaagccauguucauauuucucagcaaugcuggagcagaaaggaucacagauguggcuuuggauuucuggaggag

SEQ ID NO: 1205 - RNA, 78 nt, Human
ggcaacgugagugccugugcgagguccaucuucauauuugaugaaauggauaagaugcaugcaggccucauagaugcc

SEQ ID NO: 1206 - RNA, 85 nt, Human
guucaccucaacuggauucggaaugugcugauuuccauuggacucaaguugaucucacuuauauucugagugccgggaggugaau

SEQ ID NO: 1207 - RNA, 77 nt, Human
ucaaggauagugaugaaggugugagacuuucgacaauaaacuuguuuaaaaguuucuguaccaauaucuuucccuga

SEQ ID NO: 1208 - RNA, 80 nt, Human
gcgggagcugggggugugccuccaggagcugcugauggcugacgggcggcccgggacugguggaucucccggcugaccgu

SEQ ID NO: 1209 - RNA, 60 nt, Human
gggccaaagagcagcaccagaacgcuguggggaagagcagcugggugcucgccagggccc

SEQ ID NO: 1210 - RNA, 68 nt, Human
ucucuggaaagaccagcguggagauugcugcgggacagugaaggacggaagcuggagaaggccagaga

SEQ ID NO: 1211 - RNA, 68 nt, Human
caaugggaagguugaugcucgaagugaccgaacuggggaggucaucuuuaaggacaauuuuucuucug

SEQ ID NO: 1212 - RNA, 98 nt, Human
ccucccagacugagcccccgaccuggcccagccuggcccguccccaauccagugggcuggccaggccaccugcaccagggaggacagcugcuggcagg

SEQ ID NO: 1213 - RNA, 65 nt, Human
uagggccagcuucaugcacuguaccuuguacagucauacaagauuucaugcucagaagugcccug

SEQ ID NO: 1214 - RNA, 68 nt, Human
uuguggacccacagugcuugaaaguucagcaagacucugaguacaagauaagcauuuuaugucuauaa

SEQ ID NO: 1215 - RNA, 95 nt, Human
uuugauuuaacacucucuuauuacugccuuaaauuuuuaaauaauuuuaccucuguguuuuaaaagugcaguaugaugggacacuuguugucaag

SEQ ID NO: 1216 - RNA, 77 nt, Human
cccagaggaugucagucccaaggaccaguagcugccaucaguuuggauucugaaaacuaacuggcaucaacacuggg

SEQ ID NO: 1217 - RNA, 75 nt, Human; identical to SEQ ID NO: 815

SEQ ID NO: 1218 - RNA, 114 nt, Human
ccccuggggaauugagcuugcgccccagguucaggcuugccgagggauaucacugccuuguucaggaagagaguccuuugcaaaaccuggggaauagcccagcuuccaaagggg

SEQ ID NO: 1219 - RNA, 64 nt, Human
gcuaccucugcugccacccucagcugccuuggggagugccucaacuuguuacagcagagugugc

SEQ ID NO: 1220 - RNA, 60 nt, Human
cugcuggcagagaugcauuccagagaugcacuccgcucuggaacucacucucagccacag

SEQ ID NO: 1221 - RNA, 64 nt, Human
ucaacauuuaccagacauccaaugacagccucaggggaaagcacccuugucuggggaguguugg

SEQ ID NO: 1222 - RNA, 74 nt, Human; identical to SEQ ID NO: 365

SEQ ID NO: 1223 - RNA, 63 nt, Human
ggaacuaaaagggauccagcuuugaauucuggugucucucaaaagccugauccugccaaaacc

SEQ ID NO: 1224 - RNA, 91 nt, Human
ugaugacuuccauauggacuuugacucagcuguggcuccucgggcaaaaucuguacggucaaagaaaccuauaaaguaccuggaagaguca

SEQ ID NO: 1225 - RNA, 78 nt, Human; identical to SEQ ID NO: 99

SEQ ID NO: 1226 - RNA, 80 nt, Human; identical to SEQ ID NO: 100

SEQ ID NO: 1227 - RNA, 78 nt, Human; identical to SEQ ID NO: 99

SEQ ID NO: 1228 - RNA, 80 nt, Human; identical to SEQ ID NO: 100

SEQ ID NO: 1229 - RNA, 97 nt, Human
agauaugauuagacuucguuaguaauguucaacuuuucacaaaagauggcugaagugccaucuuaacaaacuuacuggcagauugguuuuuauauuu

SEQ ID NO: 1230 - RNA, 69 nt, Human
auguuccauuuggcucuacacgcacaggugcgcagcacucauacgguggaacggccauauguugggcau

SEQ ID NO: 1231 - RNA, 60 nt, Human
ccacguggugaauuaauucacgguguaaagcaagcuuguaguguaugguguucaccaagg

SEQ ID NO: 1232 - RNA, 72 nt, Human
aggucaggcgugguggcgcacgccuauaaucccagcacuuugggaggcagagacggacguaucgcuugagcu

SEQ ID NO: 1233 - RNA, 68 nt, Human
gggguugagucccaauuuauccaauuaauuuggguuuaguuuugauauggauaagggagaccagcuuc

SEQ ID NO: 1234 - RNA, 78 nt, Human
uaaugcaaaauguggacuaugccagcuaugauugggaaaaauaauuuuucauacagcauuaucuauagauuuguauua

SEQ ID NO: 1235 - RNA, 72 nt, Human
cugggcauggugucuuaugccuguaaucccagcacuuugggaggcugaggcuggaggaucacaugaacccag

SEQ ID NO: 1236 - RNA, 83 nt, Human
gccaagauccauuaauuauuugggguugcaaaauggugguauucucauucugucguuugcuugccuuuauuagcuggaauggu

SEQ ID NO: 1237 - RNA, 89 nt, Human
uuaucugguuacccagugguacaguucauauaggaagggcaggauaaaugcuugauucuuugcucuuguacacuaaguuuuuaagauaa

SEQ ID NO: 1238 - RNA, 61 nt, Human
cuccaaacaagcagaaagggaagagaagcgaguccucggucuggugcugcugcgaggggag

SEQ ID NO: 1239 - RNA, 83 nt, Human
ggcccaggaucggcagggcugcuggcagaggaaucccagcugggguucccaugccaccaggcuccugcaggacuugcugggcc

SEQ ID NO: 1240 - RNA, 63 nt, Human
gguacuguugcagccgcugcagcugcugccacagcaguauugccggggcuccaacccaguacc

SEQ ID NO: 1241 - RNA, 87 nt, Human
gaggccccugggcugguggacguaccuggugggcacccugagccucaggcccugugcccugguggcagcccccagcaccaggaccuc

SEQ ID NO: 1242 - RNA, 72 nt, Human
cacccucaccaagguuaaaugccucccucucgguucauccugagaaagaugaguuaauccuuuuuggaggug

SEQ ID NO: 1243 - RNA, 104 nt, Human
ggccaccaagaccugggaacaagucaaaucaacaggcgguccuucgggucggaguggacaucggaugguggccuggaagagacaauugauccuguuugguggcu

SEQ ID NO: 1244 - RNA, 61 nt, Human
gggucuuuggaggggaguuugccucucccaacggagagcaguucuaccacuacaaggaucu

SEQ ID NO: 1245 - RNA, 65 nt, Human
ccaccaccuggagcccgaggaggugcucaaguacagcgaguucuucacgggcagcaagcuggugg

SEQ ID NO: 1246 - RNA, 84 nt, Human
gaccgaccgcggcugccccaguugaugagcggcguguccccucugcagcgcgcaccccggcggggcuuuggcugugacgcgguc

SEQ ID NO: 1247 - RNA, 77 nt, Human
uguucuuggugagaagggccggcggauucgggaacugacugcuguaguucagaagagguuuggcuuuccagagggca

SEQ ID NO: 1248 - RNA, 97 nt, Human
cuggagagcaugaucaagaagccccgccccacucgggcugaaggcagugauguggccaaugcaguccuggauggagccgacugaucaugcugucugg

SEQ ID NO: 1249 - RNA, 100 nt, Human
uguugauaugguguuugcgucauucauccgcaaggaucugauguccaugaaguuaggaagguccugggagagaagggaaagaacaucaagauuaucagca

SEQ ID NO: 1250 - RNA, 87 nt, Human
aacuuuaucuuucuacaaugaagaguggaauuucuauguuuaaggaauaagaagccacuauaucaaugguggggggguauuuaaguu

SEQ ID NO: 1251 - RNA, 77 nt, Human
gcucagagauguuggggauaaaguauacuggauuaauuuaucugguugaaauuacuauaagacgggggucucugagc

SEQ ID NO: 1252 - RNA, 66 nt, Human
uuaaguagaugggagaauauguuuaaaauauuaggaauccuagaccauauuuucaagucaucuuag

SEQ ID NO: 1253 - RNA, 65 nt, Human
uuguguuuuguuuucuuguuaucacugucacacagcuuauaacauguaugcuuuucagaauacag

SEQ ID NO: 1254 - RNA, 75 nt, Human; identical to SEQ ID NO: 74

SEQ ID NO: 1255 - RNA, 86 nt, Human
guccuugaacuuggaaccugacaauguugguguugucguuuuggaaaugauaaacuaauuaaggaaggagauauagugaagaggac

SEQ ID NO: 1256 - RNA, 71 nt, Human; identical to SEQ ID NO: 77

SEQ ID NO: 1257 - RNA, 70 nt, Human
cagaguccccuuucucagaaguacagcccuuccacagagaaaugccuggcugagauucaggggaucuuug

SEQ ID NO: 1258 - RNA, 76 nt, Human
ccaucuuucacugggaauugcgaaggggauaugccauuaugaaaacaggucccucccucauuccaaggagagaugg

SEQ ID NO: 1259 - RNA, 62 nt, Human
uccauguuccccggcgccacuacuccccuuccuaagggcgcgcuuaccccggggucuaugga

SEQ ID NO: 1260 - RNA, 82 nt, Human
agaaaggaagaggcaggcgccagggggaacccacuucguguuuugugacccucccuuuuaggugaagccccuuuuucuugcu

SEQ ID NO: 1261 - RNA, 67 nt, Human
ccuggcagacaggcgggcaaacagugagcgcccacccagaccggcugcugcgcccccuccugccagg

SEQ ID NO: 1262 - RNA, 78 nt, Human; identical to SEQ ID NO: 99

SEQ ID NO: 1263 - RNA, 65 nt, Human; identical to SEQ ID NO: 247

SEQ ID NO: 1264 - RNA, 80 nt, Human; identical to SEQ ID NO: 100

SEQ ID NO: 1265 - RNA, 86 nt, Human
ccguggcuuauggaguuaaggaaggucacgugagcaaacagaaguguuccuucugcuuuuuaccuucuuucuuucuauagcccugg

SEQ ID NO: 1266 - RNA, 70 nt, Human
ggucuggcaugaauucugccagucugaugauccacccaucauucuucaagaacagaaaacagugcuagcc

SEQ ID NO: 1267 - RNA, 63 nt, Human
ugcuuacuacaguggaugauggaauucaagcaauuguacauuguccugacacuggaaaagaca

SEQ ID NO: 1268 - RNA, 75 nt, Human; identical to SEQ ID NO: 74

SEQ ID NO: 1269 - RNA, 71 nt, Human; identical to SEQ ID NO: 77

SEQ ID NO: 1270 - RNA, 93 nt, Human
cugccacaaaaacagguaauacuuugaaaggagaugucuuggaacauuggaauguucucagauaucugguuguuaugugaucauguguggcag

SEQ ID NO: 1271 - RNA, 92 nt, Human
gacuauccaguugaugggcugccagaucuggggcaugcccaggaccucauggaugggcugccuccaggugacagcaaucagcuggccugguu

SEQ ID NO: 1272 - RNA, 82 nt, Human
cuagaugaguaacaaaaaaaugaaauaaguucuuggaaauuaagccauuuauuuuaauuugcuauuuuuuucaauguucuag

SEQ ID NO: 1273 - RNA, 83 nt, Human
uuggugaacuuuaguggacuucugugagauuguaguuguacuuuguaucucuaaaucuaaagauaguuuuuuaaaacucccaa

SEQ ID NO: 1274 - RNA, 65 nt, Human
gcuaaugucuguaaacccugcugaaucuguaacaaggccugcauugcucuaggguuugacauugc

SEQ ID NO: 1275 - RNA, 111 nt, Human
gcgcgcugcuggcucugugcggggcacuggcugccugcggguggcuccugggcgccgaagcccaggagcccggggcgcccgcggcgggcaugaggcggcgccggcggcugc

SEQ ID NO: 1276 - RNA, 60 nt, Human
ugcaugggaaugaggcuguuggacgagaacugcucauuuucuuggcccaguaccuaugca

SEQ ID NO: 1277 - RNA, 62 nt, Human
caccuuuacggccaaaccguccaccucgaccgauucuguggauauaguuuucccuguuggug

SEQ ID NO: 1278 - RNA, 73 nt, Human
caacuaauguuggaacuaugaaaagcucuucucuacuuuuaacaaagcuuagucacaaacaguuccccaguug

SEQ ID NO: 1279 - RNA, 98 nt, Human
gaaucuggggauugggagcugaugagucuuacucuguugcccaggcugcggugcaauggcgcgaucuuggcucacaguaaccuccaccucccggguuc

SEQ ID NO: 1280 - RNA, 90 nt, Human
ggauaguuugauuguagaaaucacaucccuucagucugccaaugugauaacugcccaagagaaagugaugccuacauucauagauaaucc

SEQ ID NO: 1281 - RNA, 71 nt, Human
gucaacagcagcuggaggaaaauggcaagaacuuggaaucaagauuagguuagaauaacacugcuguagac

SEQ ID NO: 1282 - RNA, 70 nt, Human
uugaaaguccgaaucugcaaguucaucucugagaaccgaauuuuacagccacuccagauuuguacuccaa

SEQ ID NO: 1283 - RNA, 61 nt, Human
cuauuauuauaaugcagauaugucagaucggaauaauuuacauuuacaaauuauaucauag

SEQ ID NO: 1284 - RNA, 91 nt, Human
uuuuuuuuuugaagcuugaaaauuuuauuuaauuguaucuuugauacauugaaagcugaguauuuuuaagacaaagguuucaggaagaaag

SEQ ID NO: 1285 - RNA, 90 nt, Human
acccgucccugauccuggccgcagcacagaugcccgcuuaccaggagcugguggaggaggcgauugccuauggccggaagcugggcgggu

SEQ ID NO: 1286 - RNA, 67 nt, Human
caccgagguccguaucugcccuguggaauucaaccccaacuucguggcgcguaugauaccuaaagug

SEQ ID NO: 1287 - RNA, 62 nt, Human
ccuuuucgggcgggauggugggccgggguccagugcuugccuaaacuccuccgcccugcagg

SEQ ID NO: 1288 - RNA, 85 nt, Human
gggauaugaggagaaugaggaguugcugaggaacaaugcaccaccugcugcuggaggugagaagcggacccaucacuugcuuccc

SEQ ID NO: 1289 - RNA, 92 nt, Human
gucucaaugccgcaggcaacuacuggucacccgggccagcugcagugucuggcugggguuaccguggccuggaguaccugcggcuccgagac

SEQ ID NO: 1290 - RNA, 61 nt, Human
cagagaauguggcuuaggcgccgguuauuauacacugcgauugguagagaccucaucuuug

SEQ ID NO: 1291 - RNA, 65 nt, Human
gaguuuguccaacgguuuucuugcuucgagcucacgaauccugcgggguuaccgcuggguggcuu

SEQ ID NO: 1292 - RNA, 70 nt, Human
agcaggcagaucaucugaggucaggaguucgagaccagccuggccaacauggugaaacccugucuuugcu

SEQ ID NO: 1293 - RNA, 102 nt, Human
ugaggcaggagaaucgcuugaacccaggaggcgaagguugcagugagccgagaucaugccuuugcccuccagccugggcaacgugagugaaacuccaucuca

SEQ ID NO: 1294 - RNA, 119 nt, Human
uuaaucgccuugcagcacaucccccuuucgccagcuggcguaauagcgaagaggccccgaccgaucgcccuucccaacaguugcgcagccugaauggcgaauggaaauguaagcguuaa

SEQ ID NO: 1295 - RNA, 119 nt, Human
ggggaugguuaaaaggggccuuuauuuuaaaauuccccccccuuuuggggaaaaaacaaauccccccggggggggggggggggucuauaaaaaaaaaaggaaauuuuguggugguuuuu

SEQ ID NO: 1296 - RNA, 75 nt, Human; identical to SEQ ID NO: 74

SEQ ID NO: 1297 - RNA, 71 nt, Human; identical to SEQ ID NO: 77

SEQ ID NO: 1298 - RNA, 67 nt, Human
ccugcaacuguacacugccucagccucccgaguagcugggacuacuggcacgugcaccaugcccagg

SEQ ID NO: 1299 - RNA, 74 nt, Human
gggcauuuagugcuauaaauuucccucuaaacacugcuucagcugugucccagagauuuugguacguugugucu

SEQ ID NO: 1300 - RNA, 82 nt, Human
auuuuucuaauauugcucaucuguguuugaaacauauacuucagaaaauguuaaggaaaaaauagaaaaggaaaagaaaaau

SEQ ID NO: 1301 - RNA, 65 nt, Human
cuuacuaaauucuaccgcuaagaagcuaugucaauuuuauacaaacuuuuuaacuaauuuaugag

SEQ ID NO: 1302 - RNA, 120 nt, Human; identical to SEQ ID NO: 1182

SEQ ID NO: 1303 - RNA, 63 nt, Human; identical to SEQ ID NO: 1184

SEQ ID NO: 1304 - RNA, 89 nt, Human
acguagacucggcguggagggugucguggacgccgccugguccgaccgcggccggguggccucagggcuccucauccaggagucugugu

SEQ ID NO: 1305 - RNA, 77 nt, Human
gaggccagagcaggguggacagguguccaggcuggugaugugcuucggaacgccauucuauccccaaacuuggucuc

SEQ ID NO: 1306 - RNA, 74 nt, Human
gccgagggcuggauggggccgugacaugggggcccggggggcugccgcaugugacccugguccagcgcuugugc

SEQ ID NO: 1307 - RNA, 84 nt, Human
caacgaaauaaaauauucucuucuccuaucuucuugacauuuugucacaucacaagaacauaacuaagagaguagcuuucguug

SEQ ID NO: 1308 - RNA, 66 nt, Human
guaguacuguaauggguuuggccaaauaucaucuuugaugaccucuccuaacucaucagcaccugc

SEQ ID NO: 1309 - RNA, 64 nt, Human
cgcuuucaucuuguaaaccugaauucuauuucgaguacuccagguuuauguuuaaaugacagug

SEQ ID NO: 1310 - RNA, 61 nt, Human
cuuuuacuuaauguguauuuugcauugugauauuuaaucaagacauuaacaugaguagaag

SEQ ID NO: 1311 - RNA, 82 nt, Human
guaagauggguaaagcaugccauuucuguuuucuugagauuuuuacuuuuuagaaacacacaugcuuccacugccaucugac

SEQ ID NO: 1312 - RNA, 80 nt, Human
auguggucaguggguugcaucuucggggagcugcugacucagaagccucuguuccccgggaagucagaaaucgaucagau

SEQ ID NO: 1313 - RNA, 75 nt, Human
ccccggucguggugacccugugguaccgcgccccagagcugcugcuuggugccaaggaauacuccacggccgugg

SEQ ID NO: 1314 - RNA, 60 nt, Human
gcugguguguaucggcccagggugacucaagacgucaaccugcugcugagccacgccggc

SEQ ID NO: 1315 - RNA, 64 nt, Human
gcccuuucaccuuauguguuuuucucuguccgaugaggagcaacggcaacaacggcgguagggc

SEQ ID NO: 1316 - RNA, 101 nt, Human
ggcagauaggaaguaugaagagguggcucguaaguuggugaucauugaaggagacuuggaacgcacagaggaacgagcugagcuggcagagucccguugcc

SEQ ID NO: 1317 - RNA, 71 nt, Human
uuaagggaaugugagcacaaugcauaaugucuuuaaaagagcaugucgugacugguacacauuucugguaa

SEQ ID NO: 1318 - RNA, 69 nt, Human
cugugcggcagggccuguuaugugucgugcugcgguucaucauggagaguggggccaaaggcugcgcag

SEQ ID NO: 1319 - RNA, 107 nt, Human
gcaguccccagcauacaggucucuuggcaguguauuccggagucugauguuggcucuaagacuuauaauuuguccaagaaaaaaaaccguuuugggggggaaaaggu

SEQ ID NO: 1320 - RNA, 63 nt, Human
gugaacguuuguggauggccugaugauccacacgcuggacauccuguuaacuacuacguugac

SEQ ID NO: 1321 - RNA, 63 nt, Human
ugcucagacagggugugcugggcaucaaggugaagaucaugcugcccugugacccaacuggua

SEQ ID NO: 1322 - RNA, 84 nt, Human
ugggaaagaaguucgaugaugaaaacuuuauccucaaagcauacggggaccaggucuacuauccaugggcaacuucuuggccca

SEQ ID NO: 1323 - RNA, 100 nt, Human; identical to SEQ ID NO: 1173

SEQ ID NO: 1324 - RNA, 64 nt, Human
uuuacuucugucucgucugccccaaccgcuagccucggcuuggguaaggcgaggcggaauuaaa

SEQ ID NO: 1325 - RNA, 75 nt, Human; identical to SEQ ID NO: 74

SEQ ID NO: 1326 - RNA, 60 nt, Human
gcugcagaaguaccgccugcggaguacugcaaagaugcuguccgugcgcguugcugcggc

SEQ ID NO: 1327 - RNA, 87 nt, Human; identical to SEQ ID NO: 76

SEQ ID NO: 1328 - RNA, 71 nt, Human; identical to SEQ ID NO: 77

SEQ ID NO: 1329 - RNA, 84 nt, Human; identical to SEQ ID NO: 286

SEQ ID NO: 1330 - RNA, 64 nt, Human; identical to SEQ ID NO: 287

SEQ ID NO: 1331 - RNA, 89 nt, Human; identical to SEQ ID NO: 288

SEQ ID NO: 1332 - RNA, 83 nt, Human
gugggagcgccggucucuauauggcggcggcucugucgggccuggcuguccggcucucgcgcucggccgccgcccgcuccuau

SEQ ID NO: 1333 - RNA, 82 nt, Human
gcagacguggauguccagcccuaugcguucacaagcaagucucuguuaguagggcacauggauuauaaguaucuacguuggc

SEQ ID NO: 1334 - RNA, 100 nt, Human; identical to SEQ ID NO: 1173

SEQ ID NO: 1335 - RNA, 70 nt, Human
ggcuuuacuucugucucgucugccccaaccgcuagccucggcuuggguaaggcgaggcggaauuaaaccc

SEQ ID NO: 1336 - RNA, 98 nt, Human
ccguagcagaaaaguauuccaauccucugccauuucuggggauuuaaucuccuugauuuugaagaaguagcccagggucaggaaagcuauggccaugg

SEQ ID NO: 1337 - RNA, 60 nt, Human
ggaguuguggugucguuugugagaugcuugaggguuucauucucugauacacacaagucc

SEQ ID NO: 1338 - RNA, 68 nt, Human
cuuuaaaccagagagugcauguuuuagcaggccacugaauuaaaauuuguggcuccuggauuucaaag

SEQ ID NO: 1339 - RNA, 79 nt, Human
ggcuugcacaggcuccacugccuguguggaguuugcucgugggugacgcugucacaggccgugaggugccuggugagcc

SEQ ID NO: 1340 - RNA, 69 nt, Human
aagguagacaagauagcucccagaaacucauccauuggaauuuucccuaggcacuugauuuugaaccuu

SEQ ID NO: 1341 - RNA, 78 nt, Human
uagccagaggauuggaggagcuuccucacauuaauuugcuguagagaaaagaauuuuuuuuccauuccuuccugguug

SEQ ID NO: 1342 - RNA, 68 nt, Human
gcaugugacugggguucuguuaaaagggcaggcuccucccuccuagcccugaagccccaggaaccugc

SEQ ID NO: 1343 - RNA, 63 nt, Human
uuuuuuuuuuuuuuuuuaaagcaaguaacuuuauuaucauuccuuuaaaaagaaccaaggaaa

SEQ ID NO: 1344 - RNA, 73 nt, Human
acuuauggucaucucucccacugaaaccaaggucuuuucaaauguggcuaaauggggaugaggagacacgggu

SEQ ID NO: 1345 - RNA, 69 nt, Human
gacuuucuuggugugugugcauucuuuaaagagccaaguugcuucggggaaacagccaggaaaaugguc

SEQ ID NO: 1346 - RNA, 64 nt, Human
uugucaaguguuuguuguagcuuaguauccauaagggaaacuuagacuauagacauaacuacaa

SEQ ID NO: 1347 - RNA, 67 nt, Human
agcccucaccgcccccaccuaccccaaccucaauggggaaggaaaggggccugagcugggcagggcu

SEQ ID NO: 1348 - RNA, 69 nt, Human
gucagccaagggaaaugguuggggauuauggcuucagcacucugccggagcacauuccugagcgcugac

SEQ ID NO: 1349 - RNA, 78 nt, Human; identical to SEQ ID NO: 99

SEQ ID NO: 1350 - RNA, 80 nt, Human; identical to SEQ ID NO: 100

SEQ ID NO: 1351 - RNA, 85 nt, Human
aauuuuccuuggacaacaccaaaaacacaguacucaaacggcauguuuuuuuuuuguuuuuuugguuucuuuuugagauggaauu

SEQ ID NO: 1352 - RNA, 73 nt, Human
cucuuguugcccaggcuggagugcaauggugcgaucuuggcucacugcaaccuccgccucccggguucaagag

SEQ ID NO: 1353 - RNA, 76 nt, Human
uuuuuuugagacggugucucacucugucgcccaggcuagagcgcaguggcaagagcgagacuccaucucaaaaaaa

SEQ ID NO: 1354 - RNA, 97 nt, Human
aguggguccuucagagcgugugggggauucucugccggcuugaugggcuagcuccucuaagccggcugcuggagacaucaccggcugagggacuccu

SEQ ID NO: 1355 - RNA, 60 nt, Human
cagcaguuuaaaaauuguccuuuuucuuaaagaggaagaaggcauuuucacacaaggcug

SEQ ID NO: 1356 - RNA, 76 nt, Human
ucagcuucagcuucagcuuggccucauucauuugaaaauaaaauguuuacaugaggccgcgccuguguccagcuga

SEQ ID NO: 1357 - RNA, 82 nt, Human
uuuuuugauauagaugaucuuacuuucuugaaagcuucuucaaaaugcuuaugacuaaccuugaguucaccuuagcaaaaga

SEQ ID NO: 1358 - RNA, 80 nt, Human
gcgccuaccucacagacggccaggagccagggagccccaggaugcuccgacugacaacccugcugcugggaccacggcgc

SEQ ID NO: 1359 - RNA, 84 nt, Human
cucgcccggggguacagucggugaaggaguccguccggggacccccugcgaagcugccucugcccacuggauuccgggucugag

SEQ ID NO: 1360 - RNA, 131 nt, Human
cuggagcgcagccuaggcuggggcugccccugcuggcguccgcgggacccagucuggcuucuguagcggggcagggcgggguccacgcagggcgcagaggcggggacgcggcccgcacggggggugcccag

SEQ ID NO: 1361 - RNA, 131 nt, Human
gcgauguuuccaucucuaaugccacucagcucaggagcaggcuucagacacugccuuuaucuuuacagaaagccaugggaagggaaaugucugagguagagcucagcguugggcaucauauggcuaaucac

SEQ ID NO: 1362 - RNA, 64 nt, Human
caguacuucaaggagaauggcuaugugaccaugucggugggaaaagucuuucacccugguacug

SEQ ID NO: 1363 - RNA, 61 nt, Human
cgcaggccaacucgaccacagaugcucugaacguucuucucaucaucguggaugaccugcg

SEQ ID NO: 1364 - RNA, 63 nt, Human
gggcuguuauggggauaagcuggugagguccccaaauauugaccaacuggcaucccacagccu

SEQ ID NO: 1365 - RNA, 94 nt, Human
ccuggccggccuccggcaguucuucaagcagcugcccagcccgcccuuccugccggccgccgggacagcagacugccgguaacgcgcggccggg

SEQ ID NO: 1366 - RNA, 63 nt, Human
gcaguuucuugggacauaggagcgcaaagaagcuacagccuggacuuaccaccacuaaacugc

SEQ ID NO: 1367 - RNA, 63 nt, Human
uuguuuuauucauaauuugucauguucugggauaccaaaaguaauaauggcugaacuuaacaa

SEQ ID NO: 1368 - RNA, 93 nt, Human
ggacauguagagugcuuuuguagugagcuaaccuugaucucuaaggacuaacuacccagguccaggucuucacuagggguacugacaguguuu

SEQ ID NO: 1369 - RNA, 87 nt, Human
uaguauuuccugaaauaacaaguuuagugcuuuaacuauggcuacaugugcuuaaggaauuugagccacuuauuuuugaagaugcug

SEQ ID NO: 1370 - RNA, 76 nt, Human
gaccuggguucuccccgagcccugaaguggaguaaagauguuuggcccaagaagggcuggggugcaaagccagguc

SEQ ID NO: 1371 - RNA, 74 nt, Human
ugaaguuaaguccguugaacgcgaaaaugacaguugaggcguuguuuucaaacuucgagcggcuuuugaauuca

SEQ ID NO: 1372 - RNA, 104 nt, Human
aguggcucuugaguuccucugcaguuucgacaauuaggauuggugucuuguaacuggacaucuucuagcauguggguuguacagaguauauucuggcugccgcu

SEQ ID NO: 1373 - RNA, 66 nt, Human
ccguacaaacugagauccuugguaccccuaaaaagauugccaauuuucuucaucuuugccauaugg

SEQ ID NO: 1374 - RNA, 63 nt, Human
gccucaaguuauuucaugcgcacagagggaagccaugugggguugcugaagaugccuugaggu

SEQ ID NO: 1375 - RNA, 64 nt, Human
ccacgccuggagcgccuucugcaaggcccuggccuaagacaggcuggcacagccccaggcuugg

SEQ ID NO: 1376 - RNA, 104 nt, Human
agcugucagaguacggcuccugggacgcuuuugcuuauuuuuuguacggcuuuuucgaguuggcuuaggcagaauucuccucugagcgauaaagacgacaugcu

SEQ ID NO: 1377 - RNA, 83 nt, Human
gccggcugccaucuaguuugacgcggauucucuugcccacaauuucgcuugggaagaccaaguccucaaggauggcaucgugc

SEQ ID NO: 1378 - RNA, 73 nt, Human
uucccacugaacuuuuucuccaauucgcguacuagccggacuuggauuuucuggaaagauuucaguugaggaa

SEQ ID NO: 1379 - RNA, 67 nt, Human
ccggcaguucuucaagcagcugcccagcccgcccuuccugccggccgccgggacagcagacugccgg

SEQ ID NO: 1380 - RNA, 63 nt, Human; identical to SEQ ID NO: 1366

SEQ ID NO: 1381 - RNA, 86 nt, Human
gcgcggccggggcgggagagacucagcaacgacccauaccucagacccgacggcccggagcggagcgcgcccugcccuggcgcagc

SEQ ID NO: 1382 - RNA, 61 nt, Human
ugaauucagugauaucccuauacacugccauuuaguggauagguuauuguacuuccauuca

SEQ ID NO: 1383 - RNA, 67 nt, Human
cucuggggacuggaaugcaggcaguggaagccccagauugacuuaaccuguugacagaucuucagag

SEQ ID NO: 1384 - RNA, 68 nt, Human
gugggaguaggggauggggagggcggggggcaggugcccucuccacucaccuucccagaaggccccac

SEQ ID NO: 1385 - RNA, 69 nt, Human
uggggcaacaucuguccuggccucagauugcccaagacaccauuugcucacggaggccaccaugcccca

SEQ ID NO: 1386 - RNA, 70 nt, Human
ccuaagucuauuuagccucacagaugacuuuagaaaucugguauuuucuacaucaggguacauagcgggg

SEQ ID NO: 1387 - RNA, 60 nt, Human
gagaaggccagguuuucuaccuaugggguuuuucuacccuagagaauacuagggcuucuu

SEQ ID NO: 1388 - RNA, 60 nt, Human
uagaauauguuucggugaugauuuggagauaaguacucaaaauuacauaguucauuucua

SEQ ID NO: 1389 - RNA, 62 nt, Human
auggagcaaugccaauaaaauuuuauaaguuaaaaaaguuacuuguuaaaggcagauuucau

SEQ ID NO: 1390 - RNA, 71 nt, Human
cagagcgagucacguacauuuaugaggcaagucagcugaaugcuugaaaucuagaugaauuugaagaucug

SEQ ID NO: 1391 - RNA, 66 nt, Human
guuguguuuacaagcauccauuuaaucaucuccaaaaaaaggauggauuuauuauuugaaacuaac

SEQ ID NO: 1392 - RNA, 76 nt, Human; identical to SEQ ID NO: 923

SEQ ID NO: 1393 - RNA, 73 nt, Human; identical to SEQ ID NO: 924

SEQ ID NO: 1394 - RNA, 88 nt, Human
aggccuucucuuuuucagaaacacgucugacuuuuuaaauucaucaaaagucccucaaagugccagggcuggagaagucccaaggccu

SEQ ID NO: 1395 - RNA, 94 nt, Human
gggucgucgccucguccagucucucuggguggccaugcuugguuuuauguaacucuggccuagggcaucccacugacucuaugaggagugaccc

SEQ ID NO: 1396 - RNA, 119 nt, Human
ucccuuuugugcuuaauuggucuuucgaaauguuuuuauuaaauucagccaguauuuauuuaauaaaugcuggcugaauuuaauaaaaacauuucaaaagaccacuaacacaaugggga

SEQ ID NO: 1397 - RNA, 94 nt, Human
ugguaacuaaguaauaucaggaaagaagaaauaaggaugcaagaugacaaacaaaaucuuuaugaaauacuuuugaucaugaacuuaucugcua

SEQ ID NO: 1398 - RNA, 80 nt, Human; identical to SEQ ID NO: 100

SEQ ID NO: 1399 - RNA, 62 nt, Human
auuugcuagaaucaagaaugauggauccauguucaguuggaguccagcuucguacuacaaau

SEQ ID NO: 1400 - RNA, 60 nt, Human
gguuuuaagacuuugcaagaauugucaucaaaugauaugcuuuuacuucaacuuagaacu

SEQ ID NO: 1401 - RNA, 61 nt, Human
caccaugucagccaggcgaacuccugaccucaggugauccgccugcucggcugccagagug

SEQ ID NO: 1402 - RNA, 102 nt, Human
ggagucucgcucuguugcccaggcuggagugcaauggcgugaucuuggcucacagcaacuuccggcuccuggguuuaagcgauuccccuuaagcgauucucc

SEQ ID NO: 1403 - RNA, 86 nt, Human
guccuugaacuuggaaccugacaauguugguguugucguguuggaaaugauaaacuaauuaaggaaggagauauagugaagaggac

SEQ ID NO: 1404 - RNA, 71 nt, Human; identical to SEQ ID NO: 77

SEQ ID NO: 1405 - RNA, 93 nt, Human
cuauuggccaaaagauccaugugcccaguggggaagagacuacgaugcagugccugaagucaccaugggguugguaggucgaugugccauuag

SEQ ID NO: 1406 - RNA, 86 nt, Human; identical to SEQ ID NO: 1403

SEQ ID NO: 1407 - RNA, 71 nt, Human; identical to SEQ ID NO: 77

SEQ ID NO: 1408 - RNA, 64 nt, Human
aggcuaaagcccggagcaggcucugccacccucuccauggcguaugccggcgcccgcuuugccu

SEQ ID NO: 1409 - RNA, 85 nt, Human
cccccccuuuuugggggaaaaaaagaaccuucccgauggccacccccccaaaacggaaaggcccuccccuucaaaaaaggggggg

SEQ ID NO: 1410 - RNA, 63 nt, Human
ggggugguggaaugguccuuccuuuaagccccggaaaagggauggacccacuuucuccacccc

SEQ ID NO: 1411 - RNA, 73 nt, Human
agccgcgugguucugggggaguuugggguucgcaauguccauacuacugacuuucccgguaacuauuccgguu

SEQ ID NO: 1412 - RNA, 69 nt, Human
guggucgucgugguuuuccuuguaguucguggucugagaccaggccucaaguggaaacggcgucaccau

SEQ ID NO: 1413 - RNA, 81 nt, Human
caccaggagccccuccggguagcuacuacccuggaccccccaauaguggagggcaguaugguagugggcuacccccuggug

SEQ ID NO: 1414 - RNA, 65 nt, Human
ggucagccaccuccaaguuccuacggugcccagcagccugggcuuuauggacaggguggcgcccc

SEQ ID NO: 1415 - RNA, 65 nt, Human
uggggguccugccccuggagggccuuauggaccaccagcugguggagggcccuauggacacccca

SEQ ID NO: 1416 - RNA, 71 nt, Human
augcuagggugagugguaggaaguuuuuucauaggagguguaugagugggucguagcggaaucggggguau

SEQ ID NO: 1417 - RNA, 67 nt, Human
cgccugagacuaguucggaccccccuucggcaaggucagaaggggguccggugggucucggcuagcg

SEQ ID NO: 1418 - RNA, 67 nt, Human
gaauucauaaaaacagggagguuaaaaguagggucugggugacaaaauauuguugguguaagaguuc

SEQ ID NO: 1419 - RNA, 72 nt, Human
ccaaaaauccaucucaucaccuagagagcauguacuggcagaacugucuaaagugacuauuuggaacucugg

SEQ ID NO: 1420 - RNA, 63 nt, Human
gcugccucucugcaaaguugaggcgguggagaacuacugaggacuucugagcagagagguggu

SEQ ID NO: 1421 - RNA, 80 nt, Human
guugacccacaagcucuaaaaaggaaaaggcuaauuuuuuugucacacagccugguucugauauggacuuggggaccagc

SEQ ID NO: 1422 - RNA, 65 nt, Human; identical to SEQ ID NO: 247

SEQ ID NO: 1423 - RNA, 68 nt, Human
ggagccaguuuggauuuuuaaccuccuuccccaccuucagaaaaacacuauucauccacacugguuuc

SEQ ID NO: 1424 - RNA, 80 nt, Human
ucuuguguggagacuucgugguggugcuaagaaaaggaagaagaagucuuacaccacucccaagaagaauaagcacaaga

SEQ ID NO: 1425 - RNA, 131 nt, Human
cgccucuucgugccagcgcuggacaaacccgagacggaccuacucagccaucuggaccggugcguggccuucaucggucaggcccgcgcugagggccgugcgguguuggugcacugucaugcaggagucag

SEQ ID NO: 1426 - RNA, 62 nt, Human
uggauaccucuagugcaauuuauaagcaauaucguuuacaaaagguuacagagaaguaucca

SEQ ID NO: 1427 - RNA, 75 nt, Human
agcuaacauacacauagugaagaaugcuuuccuuuaagacugggagcaaggcauucuuauucaacaauguuagcu

SEQ ID NO: 1428 - RNA, 63 nt, Human
ugaauuuuaucucagaaauuuuuuuacccaaaaggugcagaaaaacauaucugguaaaauuca

SEQ ID NO: 1429 - RNA, 131 nt, Human
acagaguuucaccauguuggccaggcuggucuugaacuccugaccuugugauccacccaccucggcucccagagugcugggauuacaggcaugagccaccacgcuugguaagaacaccuaaauuuuuaugu

SEQ ID NO: 1430 - RNA, 105 nt, Human
guggggacagagucucacuaugucacccaggcuggagugcaauggcaugaucucagcucacugcaaccuucgccuccuggguucaagcgauucuccugccuccgc

SEQ ID NO: 1431 - RNA, 62 nt, Human
ucaaaaucaaaucuauucagguuucuucacuguugagaacaccuaaauguuuuuauuuuuga

SEQ ID NO: 1432 - RNA, 131 nt, Human
uuuuuauguuucuuggcucaaaaaacccaguucauuuucuaauguugguccucacaagacggcuuaaugguggugagacagcacgggagaggaagaacugugguuguacuuggucaacucaggcaaagcga

SEQ ID NO: 1433 - RNA, 83 nt, Human
gagggugacaugccaugccgugccaaccauucguggucacagagucgucuggcaccgagcugaccgggcagggggcgcgccuc

SEQ ID NO: 1434 - RNA, 70 nt, Human
gaugcugcugugaacgauguggagaaaaauggcuucuagcugauaccauuccacguuaucaacaagcauu

SEQ ID NO: 1435 - RNA, 89 nt, Human
cauuaacaaaaacccgugauauugaagaacaagauguucucauauucauuugauuucaucuacuuauuuuuggugucauuuuauugaug

SEQ ID NO: 1436 - RNA, 71 nt, Human
gcccagacuuuccauuucccguaauuauuaggucagaaaaaugaaagcagcgggagggaacgcgguaaggc

SEQ ID NO: 1437 - RNA, 60 nt, Human
gugagacgguggcugccaguguugaguucgagcugacggugugccaagguccuguuuugc

SEQ ID NO: 1438 - RNA, 90 nt, Human
acccccacccuccuuccgauuucucuugaaggacaggccgcucaauuugaaaggcuucuugaaagagaauuucuucuucuucuugggggu

SEQ ID NO: 1439 - RNA, 110 nt, Human
agggccacucuccggccccgagggaguggauggcucuguagccuggggcccugccucuucuucugaggcugcacuagccucugcccccuuggccugggguuccuggcucu

SEQ ID NO: 1440 - RNA, 67 nt, Human
agguccaggcagugaccucacaaggacagcacaguuuuugcagcuuagagaucacccaccugccccu

SEQ ID NO: 1441 - RNA, 67 nt, Human
cgcugcccgcgacuccugagcacacucccauggcggguggcgugcucugggugggugugcggcagug

SEQ ID NO: 1442 - RNA, 61 nt, Human
ccuacuccucugucucaagaggaagcugauaacaaugaagauccuaguauagaggaggagg

SEQ ID NO: 1443 - RNA, 83 nt, Human
ucuucucaugcugaacaguucuccauccacagccaaagacacucuagacaauggcgauuauggagaaccagacuaugacugga

SEQ ID NO: 1444 - RNA, 68 nt, Human
cgucuacaauaaccucaacccccuuaguuacagaaaaacucugcaacaggcaguggaauggagagacg

SEQ ID NO: 1445 - RNA, 78 nt, Human
guacagagaugaggcagaguggagagaaacaacucuggcugagccagagucuccagccacuacuucuuauuccugggc

SEQ ID NO: 1446 - RNA, 68 nt, Human
gaccagacuuuuccagaagugccggacgucgggcggcgucuauaucaccuugaagaaguaugacgguc

SEQ ID NO: 1447 - RNA, 84 nt, Human
ucagcacuguggugagcuccaaggaagugaauaaguuucagauggcuuauucaaaccuccuuagagcuaacauggauggguuga

SEQ ID NO: 1448 - RNA, 66 nt, Human
caggggcgggggugggaaggcuccuuuggccuuggucccaccaaaggcuucaacccacagccccug

SEQ ID NO: 1449 - RNA, 85 nt, Human
ggggccucuauccacgaguucugcaucaaccugcggcagcucuacggggacagccgcaaguuccugcugcuuggucugaggcccu

SEQ ID NO: 1450 - RNA, 66 nt, Human
cuccccccgaggaccccgucggccggcgcauucccccccgcgacccgccgggaugccuugcuggag

SEQ ID NO: 1451 - RNA, 65 nt, Human
gagcuaacagcacgagaagccaguuggggacugcccccuccuggagcagcuccugggcugugcuc

SEQ ID NO: 1452 - RNA, 63 nt, Human
cucgauuugaagacucucccucguauguaaaaugggguaaacugagagauuaucagguccgag

SEQ ID NO: 1453 - RNA, 75 nt, Human
gcccgcagccucgaucgccagcggcgggagcaacagcagcaacaaaggcggccccgaaggcgucgcggcgcaggc

SEQ ID NO: 1454 - RNA, 63 nt, Human
gggggcaccugaaaaccuuauuaaaaaacauuccuguggccuccaaagggguuuugggucccc

SEQ ID NO: 1455 - RNA, 81 nt, Human
ugaagaaaaaaugcaaacugaccgggcaaauagauucgaguauuuauuaaagcagacagaacuuuuugcacauuucauuca

SEQ ID NO: 1456 - RNA, 64 nt, Human
agguggccgugaucgccuccauugugagcugugccaucauccugcucauguccauggccuuccu

SEQ ID NO: 1457 - RNA, 60 nt, Human
gcugaguggucuucaggguccccagugugcaaacuggugccaccacacgagaccuuuggc

SEQ ID NO: 1458 - RNA, 74 nt, Human
ucugaccagcacccacacucaggcucuggccgcaguguccugucauucgagucagguucugggggcugguuuga

SEQ ID NO: 1459 - RNA, 63 nt, Human; identical to SEQ ID NO: 123

SEQ ID NO: 1460 - RNA, 67 nt, Human
gccccuguuggaugcagugucucgggacuucgucaguguccugcacaggcgcaucaagaaggcgggc

SEQ ID NO: 1461 - RNA, 91 nt, Human; identical to SEQ ID NO: 124

SEQ ID NO: 1462 - RNA, 63 nt, Human
gccugcucaacagccucugggagugugaaaucuguucuauacguugaggcuuuauagagacgc

SEQ ID NO: 1463 - RNA, 69 nt, Human
uuggaguucuuucugauuuaugcagcugaaauaauaagagcaauaacauaagcagugagaaugagacaa

SEQ ID NO: 1464 - RNA, 64 nt, Human
ccuuuuuuuuuuaaugcuuaaaggcaauuguauucaguuccuuuccaugcagcacacaauaagg

SEQ ID NO: 1465 - RNA, 69 nt, Human
guaagugucuugcauagggguagagggaccuucuugaugaccuacagacugacuaaguagggggcguac

SEQ ID NO: 1466 - RNA, 64 nt, Human
aauguucuguguacaugucaauguagguuaggccagccaaaagacaaagcaaagcaucaacauu

SEQ ID NO: 1467 - RNA, 64 nt, Human
uuuuuuuuuuuagaagacuuuguuuauuaauaaaguaauucauuaugacuuuugaaaaaaaaag

SEQ ID NO: 1468 - RNA, 66 nt, Human
gcuuggccaaguaugcagacccuguggcugaccuccuagaccgcugggguguguuccgggcccggc

SEQ ID NO: 1469 - RNA, 128 nt, Human
guguggucguugauuuagaugaaacauuggugcacaguucguuuaagccuauuaguaaugcugauuuuauuguuccgguugaaaucgauggaacuguacaucagguguaugugcugaagcggccacau

SEQ ID NO: 1470 - RNA, 75 nt, Human
ugaguugagccuuggccagggguccggugcugucgcgggaaaccuccagccuuguucuucaaaccacucagcuca

SEQ ID NO: 1471 - RNA, 83 nt, Human
uguuuugcacugacuaguacugaauaauacaaccacucuuauuuaauguuaguauuauuuauuugacaacucagugucuaaca

SEQ ID NO: 1472 - RNA, 81 nt, Human
ccuucaaucagcaaaaauuaaaaagaaauccagagcuaucaagccaugaaggaauuuuuuuuuuuuuuuuuuuuuuggggg

SEQ ID NO: 1473 - RNA, 71 nt, Human
ggaaaaauggagaaaucaggagugaggcacuuaaaaaagauggcuaaaauuuucuggacuucaucaaagcc

SEQ ID NO: 1474 - RNA, 70 nt, Human
ucagcgaaugucaauuuauugagcauuacaccugaccaaaugucuuaauucaaccuuuacucaauccuga

SEQ ID NO: 1475 - RNA, 66 nt, Human
ucucccaaaguguugggauuacaggugugaggcacugcaccuggccuaauccacaaacugucuaga

SEQ ID NO: 1476 - RNA, 98 nt, Human
ucugaguguaaaaauaaaucucuuuguggcaugauucuauuacagaucacugguaugccugauuaaaguggacuacaauaaagauuacauacaccaga

SEQ ID NO: 1477 - RNA, 66 nt, Human
uggagacgaguucuuacuauguugcccaggcaagucucaaacuccuggguucaagcgacucuccca

SEQ ID NO: 1478 - RNA, 70 nt, Human
gucgcccaggccggagugcaguggugcgaucucagaucaguguaccauuugccucucgggcucaagcgau

SEQ ID NO: 1479 - RNA, 94 nt, Human
gggaguauaugcuaucaacaugacuugaugauauuaacuuugaccaccuggccaagacaguguuuccagguuucuguacuaugaaguuacucuc

SEQ ID NO: 1480 - RNA, 70 nt, Human
uccucccuuuccauacucuguucuuuggaaguuagucacuaaguccagcccacacucaaggaaggaggga

SEQ ID NO: 1481 - RNA, 74 nt, Human
ugugauuaaauugaggaacuugaguaggaagaauauccuggauuaucucagcaggcccaauauaauuaauuaca

SEQ ID NO: 1482 - RNA, 93 nt, Human
gcgucggggugcuggcagagaccgcggcgagggccggagcaggugcacuggccgcugcacacucgccgcuaggcucccggacaccgcuggcgc

SEQ ID NO: 1483 - RNA, 87 nt, Human
gggacugcagggacugcggcugggacaggcugcugcgccaggcggcccuggaccgccgcuucugccccuaagccgcccucgcagccc

SEQ ID NO: 1484 - RNA, 63 nt, Human
aaggauggggagcaagcuccagcucuguaacacaugguggaacuucuuuuagccccagaccuu

SEQ ID NO: 1485 - RNA, 84 nt, Human
agaaucgcuugaacccaggaggcugagguugcagugagccaagauugugccacuguacuccagcccgggugacagagugagacu

SEQ ID NO: 1486 - RNA, 81 nt, Human
cucuguaaagcgggcugaugacuguaccugccucacagauagcugggauggugcaugucaugugcucagcugggaacagug

SEQ ID NO: 1487 - RNA, 65 nt, Human
agaugggcuggguagagagcaggacuggagcuuccucaccaggguucugccucuggccccgaucu

SEQ ID NO: 1488 - RNA, 69 nt, Human
cuccauuggcucuuggugcccaccagccccuguuagaggaggcccagaggcucaagaggcaccauggag

SEQ ID NO: 1489 - RNA, 65 nt, Human
ugccuggcaccccagucugcacagccccgcacgcccugggggaguguaggauggggguggaggca

SEQ ID NO: 1490 - RNA, 112 nt, Human
ugggcggauggauucuacaagggcaagguggcuauucccaguguggggugguuuuccaacccaaaagcgccccagauguggggaacagcgaucgguggggaggagacggcca

SEQ ID NO: 1491 - RNA, 60 nt, Human
auguuuugaaugcauuacauuaccaaaaaaauuaauauugaaaugcaaaagucaaaauau

SEQ ID NO: 1492 - RNA, 71 nt, Human
cacggccauuugcucuuuuccuagacuagcuauggcugggccuggucaagcuuugggaggcugaggcugug

SEQ ID NO: 1493 - RNA, 80 nt, Human
gguaauuguagacuccaagcucaggauuacuacucccaaguaaugugaaucaagcauucugaguccaugaggucaauucc

SEQ ID NO: 1494 - RNA, 67 nt, Human
uaagaaucugucaugcagaggcuccaggggcaauuugcacuuggaaaaucucgcagacuaguacuua

SEQ ID NO: 1495 - RNA, 80 nt, Human; identical to SEQ ID NO: 1493

SEQ ID NO: 1496 - RNA, 67 nt, Human; identical to SEQ ID NO: 1494

SEQ ID NO: 1497 - RNA, 82 nt, Human
gaauaauuugcaguguuccacaaguccuuccugaucaaaguucuucucaggacaguaaggacaaggaaagguguaacgguuu

SEQ ID NO: 1498 - RNA, 75 nt, Human
guggugcugucugaaguuggcgcugcgguaguuggggucuccccagggcaucgaggcacauaucggacaaaccac

SEQ ID NO: 1499 - RNA, 90 nt, Human
aaauuuuugggggagcgggggaaggaguuaaugaaacuguauugcacaaugcucugaucaauccuucuuuuucucuuuugcccacaauuu

SEQ ID NO: 1500 - RNA, 88 nt, Human
agauuuuucaauuuuuauuuugguuuucuuacaaagguugacauuuuccauaacagguguaagaguguugaaaaaaaaauucaaauuu

SEQ ID NO: 1501 - RNA, 90 nt, Human
ggauucagcuuucaguuaaaaaagaagaagaagaaauggcaaagagaaaguuuuuucaaauuucuuucuuuuuuaauuuagauugaguuc

SEQ ID NO: 1502 - RNA, 61 nt, Human
cugcauagauuuuaaugagagcgucaggcagagcugugcuguugcucuccgggacuugcag

SEQ ID NO: 1503 - RNA, 63 nt, Human
guaggaugagaacauagcacaucgaaacccuaggaggucacugagcuaaugaucuaauccuac

SEQ ID NO: 1504 - RNA, 71 nt, Human
cccgggugcccgagggggcuuuggcccuguuugaauuuuugggaaaaggaaaccccuuuaggggcuccggg

SEQ ID NO: 1505 - RNA, 65 nt, Human
gagaaacagcagcugcgccugaaacucgccacuggccguacuuuuuaucugcaguugugucccuc

SEQ ID NO: 1506 - RNA, 75 nt, Human
gggagaggugauugauguacacaaccguguccgaauggugacagugggcaucgucugcaccagccccauccuccc

SEQ ID NO: 1507 - RNA, 66 nt, Human
guggagcugucuuaaacgaagagaaccaugagcaaugaaucuuguuuaccuuauuacacagcccac

SEQ ID NO: 1508 - RNA, 78 nt, Human
guggcugcagagcuccacagagaaggggaucagagugagacugggcucuacaagccuuugugauguaucugcagccac

SEQ ID NO: 1509 - RNA, 89 nt, Human
gauccucauguucacuacccuucaugcaugaaagacaaagcuacucagacaccuagcuguugggcagaagagggugcagaaaagagguc

SEQ ID NO: 1510 - RNA, 73 nt, Human
gcguucugcgucaugggggagugcugaucaacuaaaagagcagaucgccaaacugaggcagcaacuacaacgc

SEQ ID NO: 1511 - RNA, 82 nt, Human
uggcaaccauauaacaaucagucacacucaggcuacuggaucaaggucaguuccuaugccacugucaaauauaucagugcca

SEQ ID NO: 1512 - RNA, 71 nt, Human
auccuauagauacagcccugguaugaggccuuauaaugccagcuauaugcacaugcccuguauaaugggau

SEQ ID NO: 1513 - RNA, 60 nt, Human
uagcugaguacauguuggaugcugcuaggaauuugcaacccaauuuauauguaguagcug

SEQ ID NO: 1514 - RNA, 82 nt, Human
uugucuucuguagacuagacugggcauuaguuccuuaauaagagaggcaaugagugcaauauaauagucaugaagagggcag

SEQ ID NO: 1515 - RNA, 62 nt, Human; identical to SEQ ID NO: 966

SEQ ID NO: 1516 - RNA, 82 nt, Human; identical to SEQ ID NO: 968

SEQ ID NO: 1517 - RNA, 63 nt, Human; identical to SEQ ID NO: 970

SEQ ID NO: 1518 - RNA, 65 nt, Human
cggcugcagaaguaccgccugcggaguaacugcaaagaugcuguccgugcgcguugcugcggccg

SEQ ID NO: 1519 - RNA, 75 nt, Human; identical to SEQ ID NO: 74

SEQ ID NO: 1520 - RNA, 87 nt, Human; identical to SEQ ID NO: 76

SEQ ID NO: 1521 - RNA, 71 nt, Human; identical to SEQ ID NO: 77

SEQ ID NO: 1522 - RNA, 87 nt, Human
uagcuggcaugggacugguagugcaggcuggcucuuggaaaggaguauguauuccaggcugguuggcugcuguuccacugggagcug

SEQ ID NO: 1523 - RNA, 82 nt, Human
aucuggagaugcaaguuaaccgaaggugcucugccaagccaucagcgugagaaaaaaaaaccaccagaaguugccuccagau

SEQ ID NO: 1524 - RNA, 73 nt, Human
auucuauaaugaagauguuucaugaacuggggcacguauuugucaagaaacuucuuaucuucaugaacugaau

SEQ ID NO: 1525 - RNA, 74 nt, Human
agcagaacugcaacacaauuuaaaugucuguaaauuaggucacaaaagggaugcaaaauguuugcaguuugacu

SEQ ID NO: 1526 - RNA, 66 nt, Human
uaagauuuuagcaauacuuccaauauugauuuccuuaccaaauggaaucuagaagcuaaauuuuua

SEQ ID NO: 1527 - RNA, 64 nt, Human
uuguuaaaggaugacuaaaacucuucaaacccaguagcaggguuuacagaaaauucuagaacaa

SEQ ID NO: 1528 - RNA, 70 nt, Human
cuugaguccagaaaguggcaguugcagugaguggagaucgcgccacugcucuccagccuggguggcagag

SEQ ID NO: 1529 - RNA, 64 nt, Human
ugaucguaucuucaccaccaccgccuucagggaaccauuaauucugaagaugaagaacuagaca

SEQ ID NO: 1530 - RNA, 101 nt, Human
agggguuaaaggaguaaaggggaggaagagaaggauucauuucaugccuaccuguacagagacacuuucuugcuuucuacuuuuuuuuuuuuuuuuuuuuu

SEQ ID NO: 1531 - RNA, 96 nt, Human
guuuauuucuggaauuuucuguuuaauauuuugggaccucaguugaccaugaguaacacaaaccacagaaugcgaaacaguggauaagagagggac

SEQ ID NO: 1532 - RNA, 91 nt, Human
uguacauacuuucgccuaaaacaguucuguauauucuuuuguuaacgggguagcaaaagcauauaaaaagguuuuggggggaugcagugca

SEQ ID NO: 1533 - RNA, 77 nt, Human
gcuaccguguaugaggaacuuugauccuugcgggcaccauuccggaaguagaauuuagaggaagaaaauaccggagu

SEQ ID NO: 1534 - RNA, 90 nt, Human
gagaaggggaaguagaaacagcuggcgcccugccauggccugugaaccacagguggacccgggggccacuggcccauugccccccuccuc

SEQ ID NO: 1535 - RNA, 86 nt, Human
ggauguagucguucaacuaacggugacuuuuacaaaugagacggaaaaucauguaaacuguauccuuuaguuuuaucgcuguaucu

SEQ ID NO: 1536 - RNA, 90 nt, Human
ggcagcuccauccugccccaggcgaggcuacacucccagcgcaccuggaaagcgcuggacagcuucucccuggggcuggccagggcagcc

SEQ ID NO: 1537 - RNA, 120 nt, Human; identical to SEQ ID NO: 1182

SEQ ID NO: 1538 - RNA, 76 nt, Human
ugaggagaggagcgucaacagcagcaccaugguagcuaagaaccuugaaggcuaugugggauuugccaaucuccca

SEQ ID NO: 1539 - RNA, 73 nt, Human
ugguagugggugaaucuggaugggaaagucgacauuaaucaacucauuauuccucacagauuuguauucucca

SEQ ID NO: 1540 - RNA, 61 nt, Human
auagccuccuugggugucauggaucccagaccgauuaucauguaguaccggaggagacuau

SEQ ID NO: 1541 - RNA, 75 nt, Human; identical to SEQ ID NO: 74

SEQ ID NO: 1542 - RNA, 71 nt, Human; identical to SEQ ID NO: 77

SEQ ID NO: 1543 - RNA, 71 nt, Human
cucuacgguucuccaugcccccuccaguuugggggucuaaaccaaacaggagaggugcaggggaccaggag

SEQ ID NO: 1544 - RNA, 60 nt, Human
gggccagagaaagcacaaacauggauccagaaguccaaagaaaugcaguucguugcgccc

SEQ ID NO: 1545 - RNA, 66 nt, Human
cagcacuacagaaaaaauucaaacagguccccgaggcguuuugaaauucaucccaacuguaggcug

SEQ ID NO: 1546 - RNA, 61 nt, Human
ccagggcaggggaguaggggcuuagguguuuuaaaaacaccucuggcuuuucugauguugg

SEQ ID NO: 1547 - RNA, 70 nt, Human
gcauugugaguaaaucagauguugaauucuuuugccaagggaauuauagcugcagguucucucucacugc

SEQ ID NO: 1548 - RNA, 65 nt, Human
cucucaaccuugaaguccccacguaugaguucaccagugacgauauggugauuguugguuaagag

SEQ ID NO: 1549 - RNA, 71 nt, Human
gaauugaugauguauuugcaaacauuaaugugaaauaaauugaauuuaauguugaauacuuucaggcauuc

SEQ ID NO: 1550 - RNA, 73 nt, Human
ucaagucauaggcuucuuucagucuuuaugucaccucaggagacuuauuugagaggaagccuucuguacuuga

SEQ ID NO: 1551 - RNA, 60 nt, Human
ggugacaacaugcuggagccaagugcuaacaugccuugguucaagggauggaaagucacc

SEQ ID NO: 1552 - RNA, 92 nt, Human
auugugggaagauuaucucgauccuauuaugaacaguuuugcagauguuggaaacugaaacuaagagauaucgauugacuuaacccaacaau

SEQ ID NO: 1553 - RNA, 63 nt, Human
cucgucgaucucguucuccaugucuuccgugugcuggauacacuggcagagcucacagaugag

SEQ ID NO: 1554 - RNA, 65 nt, Human
gcugggcucaguagaagcagacggugugcagaaaggugcggccacucuucuccucgaacuccugc

SEQ ID NO: 1555 - RNA, 76 nt, Human
cgucuauaagccguuaccgcagacccgaacuaucacaauccuggguugucgaucugcguggcuggacuuauugaug

SEQ ID NO: 1556 - RNA, 60 nt, Human
uacagacuguaucgacaauaaugguuaugcuugaguaugcaugaucaugugucaucugua

SEQ ID NO: 1557 - RNA, 68 nt, Human
cuggaacagcccauuuuaucuuugaauggucuucugccagcccauuuugaggccagaggugcugucag

SEQ ID NO: 1558 - RNA, 78 nt, Human
gggugcgacugggcgugcucggagcucgcagacgcucggaggcauggcggcugcggagccggcgguccuugcgcuccc

SEQ ID NO: 1559 - RNA, 67 nt, Human; identical to SEQ ID NO: 1379

SEQ ID NO: 1560 - RNA, 61 nt, Human
gcaaguaguuauacucaggaagaacuucgacacuuacggguuucuucuguuugauacuggc

SEQ ID NO: 1561 - RNA, 62 nt, Human; identical to SEQ ID NO: 206

SEQ ID NO: 1562 - RNA, 93 nt, Human; identical to SEQ ID NO: 207

SEQ ID NO: 1563 - RNA, 71 nt, Human
agggccggggccggggacgccagcggcacgcggaagaagaagggcccggggccccuggccacggcguaccu

SEQ ID NO: 1564 - RNA, 79 nt, Human
gccuuauuggaggaauuguuccaucuucuguuguccugacuucuuuccaggugaugucaagaguuuuucuaauaugggc

SEQ ID NO: 1565 - RNA, 89 nt, Human
aaaauguuuuuggcuuugguuuuucuggggacugauaagugcuuuaagcaauguccauaccccgucaagacucccagcuuagucauuuu

SEQ ID NO: 1566 - RNA, 77 nt, Human
gauucucuuuucucuccccacccccugcccuuuguuaccaacaccaguuucccaggggguacaugaguuucugaauu

SEQ ID NO: 1567 - RNA, 83 nt, Human
gggcugcaaagcgagaagagagccgguggaguguacuugucccugacaggcugaccuaccugagucucugagcuuuucagucc

SEQ ID NO: 1568 - RNA, 60 nt, Human
aaugaguuucuuacucgggagcuggcugaagauggcuacucuggaguugaggugcgaguu

SEQ ID NO: 1569 - RNA, 68 nt, Human
cggcggcaagauggcagugcaaauauccaagaagaggaaguuugucgcugauggcaucuucaaagcug

SEQ ID NO: 1570 - RNA, 71 nt, Human; identical to SEQ ID NO: 1145

SEQ ID NO: 1571 - RNA, 67 nt, Human; identical to SEQ ID NO: 1146

SEQ ID NO: 1572 - RNA, 63 nt, Human
cagauuuguaugguuccaaagacacuuuugaugacgauucuuaacaauaacgauacaaauuug

SEQ ID NO: 1573 - RNA, 84 nt, Human
cucuggaguugggcuagaggccagacuucuuuugaaagguaccuccugggcuugaaggucuucuuccuggcucucuuuccugag

SEQ ID NO: 1574 - RNA, 106 nt, Human
gauucaucauuggacccccagaccucucacccaggaccccaagugugcaccuuugaagccauugucuucacuccugacugauagaucggggauccaauggugaguc

SEQ ID NO: 1575 - RNA, 71 nt, Human
ucaaugaucauguguuuuguccuccuaaacaguauaccaaaguuuguuuuuauaguugaggauuguauuga

SEQ ID NO: 1576 - RNA, 94 nt, Human
aaaggagauuaacguuauugauacuuggauaacuggcuaaucauauuaaaggacuaugugguuccagcucaacuuuuaauauauugucuccuuu

SEQ ID NO: 1577 - RNA, 67 nt, Human
gucagguuaauacuaucuuaaacacugagucagaaaaucauuacuguauagaaguugcuuuccugau

SEQ ID NO: 1578 - RNA, 71 nt, Human
ugaaauauauaugaugaaaagaauugagaaguucuaaauuaagacauuucaguuaagcucauaaaauuuca

SEQ ID NO: 1579 - RNA, 105 nt, Human
augguguuuugugacuuagaaguuuuaaguagucguucuuauaucuaagcauuuauuaauuuugguaagaacauuacuauacguuucugaugucacuuuuacugu

SEQ ID NO: 1580 - RNA, 61 nt, Human
gcuuuucaugugcauaaguugacucauuuguuuccuguuagcauuugaaacaccauauagc

SEQ ID NO: 1581 - RNA, 60 nt, Human
guacuuguauuuccugauuaaaacaaaguaacgucuguuuuacuauugaaguaagaguac

SEQ ID NO: 1582 - RNA, 72 nt, Human
uuugugugaaucagaccaucuaaauauaauauaaauuagagacugguacuuguauuuccugauuaaaacaaa

SEQ ID NO: 1583 - RNA, 81 nt, Human
gccaagugagucaaagugaugggccccugggcucauugggauguagacgcucugggaauuaucaccugcucguuccauggc

SEQ ID NO: 1584 - RNA, 77 nt, Human
guauauaggcugagcaagagguggugagguugaucggggguggcuggaucucacuuccucugcuggggccucggugc

SEQ ID NO: 1585 - RNA, 85 nt, Human
acuuguuuauacccucagacuuuuuuaauguuagguauuuguagcauuaggccaacauguauuaagcugagccagaugaauaagu

SEQ ID NO: 1586 - RNA, 68 nt, Human
gagaugaacuauguggucgggggcguggucucccaccgaaauguugucaacguccacaucuucgucuc

SEQ ID NO: 1587 - RNA, 77 nt, Human
guuacauggacggcaugaccgugggugucgugcgccaggugcggccaucgugggcccauuucaugccguccugaagc

SEQ ID NO: 1588 - RNA, 68 nt, Human
cccaauagcaggcgcacagggucucacuuaacauguacucugugccaagcacucugcuauuauauggg

SEQ ID NO: 1589 - RNA, 82 nt, Human
guaaacauuuugauguauacaauauggcuauauuauauuuuguuuuauaaaaucaagucauuguauauauuaugaugcaugc

SEQ ID NO: 1590 - RNA, 67 nt, Human
uccugaucagcuuuuaauaucugucacauaaaaauugaaauugaagaugguauauaagauuucagga

SEQ ID NO: 1591 - RNA, 74 nt, Human
acaggugcuuugacaguuuugaugaaagaugcaauaaaaccaaaccugaugcagacccuggaagggacaccugu

SEQ ID NO: 1592 - RNA, 67 nt, Human
agggccauuaccggcaggcgcaguuugacaucgcaguggccagcgagaucauggcggugcuggcccu

SEQ ID NO: 1593 - RNA, 93 nt, Human
cuuauuuuuucacaagccugguuauuugaggaugugcuuguaacguaugcuuucucuucuauuucucauagccaaugcuuguaccugaauagg

SEQ ID NO: 1594 - RNA, 94 nt, Human
ggaaggauuggagagccacuugaggucauauguuaagguauguaaaacacacuguucugaucacuuacaucuguggcucuccaguuuuccuucu

SEQ ID NO: 1595 - RNA, 64 nt, Human
gugcugauagcaucaucauuguucuacuacugcugugauaauaaugaaauguuuccauuuuuac

SEQ ID NO: 1596 - RNA, 63 nt, Human
aagagaaagcauacguuacaagcacauccucaaauaaccaggcuugugaaaaaauaaguccuu

SEQ ID NO: 1597 - RNA, 122 nt, Human
auagcuagccagaacaacuuaaaauucuucuuuaaacuuccacauugagucauauuauuuggaaaacccauuaaaagaaacauaauugaaggaauggaauuaaguaauuagugaauggcugu

SEQ ID NO: 1598 - RNA, 92 nt, Human
gaaggaaaacuggagagccacagauguaagugaucagaacaguguguuuuacauaccuuaacauaugaccucgaguggcucuccaauccuuc

SEQ ID NO: 1599 - RNA, 72 nt, Human
aggacacccagacugugucuaagggccaauucuuaacuccuaaggcuuguuugcauaacuaauggguguccu

SEQ ID NO: 1600 - RNA, 82 nt, Human
aguuauucauguacauuaugguaauuacacgaaggcuuuuaaaagcuuuaauucuugguaugaguugacaaaaagaauaauu

SEQ ID NO: 1601 - RNA, 65 nt, Human
agagaaaaaguaaccaagaaaauuaaaauauuuccccuugaagguuuuggaguauucuauucucu

SEQ ID NO: 1602 - RNA, 74 nt, Human
uugugacaggauccguuuucccaacucgaucaaaaacaauauugaugguagccaugaaaauuuuccaaacacag

SEQ ID NO: 1603 - RNA, 73 nt, Human
aaugacuaaaaagacuuauguggaaucuauacuugaagguauaaaacaguccaaacaagaaaacuuggacauu

SEQ ID NO: 1604 - RNA, 94 nt, Human; identical to SEQ ID NO: 1594

SEQ ID NO: 1605 - RNA, 70 nt, Human
uacuacugcugugauaauaaugaaauguuuccauuuuuacauauucuuugcuuuauucacuccuguggug

SEQ ID NO: 1606 - RNA, 70 nt, Human; identical to SEQ ID NO: 1605

SEQ ID NO: 1607 - RNA, 80 nt, Human
cuaguuuuauuaacuagacuuauaagaaggucuucguauacuaagcguaaccuuuuaucacacucacauaauaaaacuag

SEQ ID NO: 1608 - RNA, 67 nt, Human
guccaagcaacugggcugagguaaauggaccgguucuggguuccugacuucaguauaguaugugggc

SEQ ID NO: 1609 - RNA, 67 nt, Human
guugaaaaguacacaaacaagguauacaugguuaaauauuacacaaaaguaucccuuuacuuuucac

SEQ ID NO: 1610 - RNA, 71 nt, Human
uuacacauaaagaaaugacaaccucuggggcuugaaaaagccuccagacaaaguuaacuccuauguuguag

SEQ ID NO: 1611 - RNA, 63 nt, Human; identical to SEQ ID NO: 1596

SEQ ID NO: 1612 - RNA, 94 nt, Human; identical to SEQ ID NO: 1594

SEQ ID NO: 1613 - RNA, 64 nt, Human; identical to SEQ ID NO: 1595

SEQ ID NO: 1614 - RNA, 75 nt, Human
acuccugccucugggaucucuccagauauggucgcugcucaauggagagcuaccgggagaaccuggagcgggugu

SEQ ID NO: 1615 - RNA, 85 nt, Human
ugguggcugggggccagcugggcgagcugcacaacgggacacaguaucgugagguccgccaguucugcucgggcucuggccacca

SEQ ID NO: 1616 - RNA, 67 nt, Human
ugugcgcuucuacuuccucacucguguuuacuccgaguaccuugaggauguucuggaagagcugaca

SEQ ID NO: 1617 - RNA, 75 nt, Human; identical to SEQ ID NO: 74

SEQ ID NO: 1618 - RNA, 87 nt, Human; identical to SEQ ID NO: 76

SEQ ID NO: 1619 - RNA, 71 nt, Human; identical to SEQ ID NO: 77

SEQ ID NO: 1620 - RNA, 68 nt, Human
gcgcuggccgccgccgccuccuccaaagggggccggguccuggaggugggcuuuggcauggccaucgc

SEQ ID NO: 1621 - RNA, 85 nt, Human
aggugaaaucaaaauaaucuauacuaucuagaagacuuucuugaugcgcaguccagagaugucaugguguagaacuugaacaccu

SEQ ID NO: 1622 - RNA, 62 nt, Human
ucacucuugugcaggcgauguuucaauguuucauggggcaagaguuuaucucuggagaguga

SEQ ID NO: 1623 - RNA, 66 nt, Human
ucagagacugugugcuaaauauuaggcuacugugaucuuaggccaccugaggcacauacuaucuga

SEQ ID NO: 1624 - RNA, 89 nt, Human
ugagcucucauuuuuucaccuugacuggccaucuaacuuaaacaauuaauaaguguaauuuccaagcaggccuggaagacugggguuua

SEQ ID NO: 1625 - RNA, 63 nt, Human
uggacacauacuaaagcgccaaaagaccuuuaacauuuucugagagccaccgaguauuugcca

SEQ ID NO: 1626 - RNA, 92 nt, Human
gaugcuuuggaagacucauuauucagagcugcagcuggacugccuuagacaucugcauuucucuaucucugaaauaagggacuccgagcauc

SEQ ID NO: 1627 - RNA, 82 nt, Human
cacuuuucuggcagugaggaaaauauggaaaggaagugggaagaaguaaaugcugguggcugugacacucuccagggaagug

SEQ ID NO: 1628 - RNA, 124 nt, Human
guggagguggugauaugggauaggagguuucucauauacucuggagaagagaggcuaugugaaggcugggcucuggacuucagaggcggugauagaacacccagacgcaggucggcaacucuac

SEQ ID NO: 1629 - RNA, 66 nt, Human
guggcugugaaagaggaugcuuugguagcaagggggaucugucagacauuaauauucacauaccac

SEQ ID NO: 1630 - RNA, 75 nt, Human; identical to SEQ ID NO: 74

SEQ ID NO: 1631 - RNA, 60 nt, Human
acccagaccugucgcugagccucucuaccccaggucagacggacaggacagaucacaggu

SEQ ID NO: 1632 - RNA, 61 nt, Human
cuggaagauucaggagccugggcgggcuucgcuuacucucaccugcuucugaguugcccag

SEQ ID NO: 1633 - RNA, 64 nt, Human
gucccggcgaagagaagagacacauuguuggaaggcagcccaugacagcuucccuuccugggac

SEQ ID NO: 1634 - RNA, 66 nt, Human
gaucauacaauucagaacuuuaucuaaagacuguucucacaaauuaagauauucuaaaguaugauu

SEQ ID NO: 1635 - RNA, 70 nt, Human
ugggaugcuccauuugugaaauacuaugauuaaacauuuccaaguaauuuugcaaaaaaaaaagcaccca

SEQ ID NO: 1636 - RNA, 78 nt, Human
uucagcacauucuugugggcuucaaguugcaaguuuguuaauaauaauagcuauuccuuaaaaguuucaagagcugaa

SEQ ID NO: 1637 - RNA, 109 nt, Human; identical to SEQ ID NO: 831

SEQ ID NO: 1638 - RNA, 87 nt, Human; identical to SEQ ID NO: 76

SEQ ID NO: 1639 - RNA, 71 nt, Human; identical to SEQ ID NO: 77

SEQ ID NO: 1640 - RNA, 62 nt, Human
gaagggcucaauaaaguuuguguuuugccaaaaaaaaaaauacaaaaaaacccgggccuuuu

SEQ ID NO: 1641 - RNA, 74 nt, Human
cuucuccucagcuggagcagcagcaguggagggggcaggaccuccugcuggugcagcaccagcugcuggagcag

SEQ ID NO: 1642 - RNA, 64 nt, Human
gcauugaucuuauccuccgugacugucaccucaucgucgugcagaaugagggccgaguagaugc

SEQ ID NO: 1643 - RNA, 82 nt, Human
ggcuagguacgacgcuggguguggaaucggccgaggggaggucguuggagucacuuccgcgucaccagcuccugugccugcc

SEQ ID NO: 1644 - RNA, 70 nt, Human
uucugugguuaaaaauuugauugugcuuauuaaaaauggucaucuauguuuugcacuucagcuacgugaa

SEQ ID NO: 1645 - RNA, 70 nt, Human
uuuauuugaguucaaauauuuuugaaauauaaaaauugguuguauuuuuuaaagcuauaauucuuguaga

SEQ ID NO: 1646 - RNA, 85 nt, Human
ggaagagggugagcaugauugccuccugccuuggcuaacugugcccugcaugaauuggcuccugauuuucuugcccuccaguucc

SEQ ID NO: 1647 - RNA, 97 nt, Human
ggcucuuggcucugcucucuccucccucucaucuucugcccuccccucugcuauguggggaacaugaagaugaagggccuccugagugaguccggcu

SEQ ID NO: 1648 - RNA, 85 nt, Human
cugucagagaaaucugaguggaugacaaaaccugcaaucacgcacuuuaugcuauugugauguuuuuaaccagauuuuaugacag

SEQ ID NO: 1649 - RNA, 61 nt, Human
gaucaugaagagcuauggccacaccuuugaaaagcacugguggcaggaccuguucagaauc

SEQ ID NO: 1650 - RNA, 64 nt, Human
aacaaucaguuauaauguucuuuuuaagguuacuauaccuuuauuucaaauuauauuacauguu

SEQ ID NO: 1651 - RNA, 62 nt, Human
gucuucccauaaaaaauguggcuacauuuuccccccaaugacuacauacauagauggguagc

SEQ ID NO: 1652 - RNA, 116 nt, Human
ugaacuuuuaaaugacaaacuuuuggcucauaagaauggcaccuucaaaaggggcgauuuccacucagucucugguggcauuauuccaggcuaguuucaccaguuaaaaaccuuca

SEQ ID NO: 1653 - RNA, 75 nt, Human; identical to SEQ ID NO: 74

SEQ ID NO: 1654 - RNA, 61 nt, Human; identical to SEQ ID NO: 1202

SEQ ID NO: 1655 - RNA, 130 nt, Human
ucugaaagcccccgguaucauuccucgaauuucagugcgggaaccaaugcagacuggcauuaaggcuguggauagcuuggugccaaucggucguggucagcgugaaacugauuauggguggaccgacaga

SEQ ID NO: 1656 - RNA, 71 nt, Human; identical to SEQ ID NO: 77

SEQ ID NO: 1657 - RNA, 63 nt, Human
uaggagugucggguguuaaaaaacuagagcuuauuccuauuccaaaucuaucuugcgcuccug

SEQ ID NO: 1658 - RNA, 75 nt, Human
uuuuuuuuuuugaguuuuuccaaagauuuauugaagcaaaaccaaguugguuggauacuugcuggaaaaaaaaaa

SEQ ID NO: 1659 - RNA, 75 nt, Human; identical to SEQ ID NO: 74

SEQ ID NO: 1660 - RNA, 67 nt, Human
gcgucgcgguuuuguuggcuugggcaacagggaucccuggggcacuggggaaaaacuaaauggaugc

SEQ ID NO: 1661 - RNA, 60 nt, Human
agaaagaagaaggugguucauagaacagccacagccagaugaccacaaaacuucaguucu

SEQ ID NO: 1662 - RNA, 75 nt, Human
caggccaugcugagacaaagcagcugacagaaaugcuacccagcaucuuaaaccagcuuggugcggcauagucug

SEQ ID NO: 1663 - RNA, 87 nt, Human
gaugcuguccgugcgcguugcugcggccgugguccgcgcccuuccucggcgggccggacuggucuccagaaaugcuuuggguucauc

SEQ ID NO: 1664 - RNA, 88 nt, Human
ugggacugcugagauguccucuauucuugaagagcguauucuuggagcugauaccucuguugaucuugaagaaacugggcgugucuua

SEQ ID NO: 1665 - RNA, 81 nt, Human
acgagugugugugugcagauggggcuggauuugucugugugugaccuugagucuacgucuugugugugugaccaggcgcgu

SEQ ID NO: 1666 - RNA, 106 nt, Human
ggggcaggcaugacagucucacuguugcuacuuuuccucucagggcagccuauuacauuccccccaaaggccccugugguuaaccguggggcugucugucugucuc

SEQ ID NO: 1667 - RNA, 130 nt, Human
acauagagcuuaaauaauaucaaaaugcaaauauagauugggugcacuguuaagcugaauugcaaauuauggcaacacacacuggacugggguauacguugcuuugauaucaccauuuguuuguuuaugu

SEQ ID NO: 1668 - RNA, 73 nt, Human
uuuuguuuuucuuuuuuguacaaaaauaccagugcuuguuauacuaguuacuaaaagaagaagaaacucaaaa

SEQ ID NO: 1669 - RNA, 61 nt, Human
gaccuuaugugguucauuccuucaaucauuucaaacauugaaaguagggccuacauggguc

SEQ ID NO: 1670 - RNA, 80 nt, Human
ggugccaaaaguacccagcacaauacuuguauaauuuuuaguaccauacagaaguaaagucccaggaacuaugaagcacu

SEQ ID NO: 1671 - RNA, 78 nt, Human
uuuuuuuuuuuuuaaccaagucuuacagggauuauuuaacguguucccauguaucucacuuggggcuguauaaaaaaa

SEQ ID NO: 1672 - RNA, 72 nt, Human
uguuuccauuuuuacauauucuuugcuuuauucacuccugugguguguagggucauuauucaugugguugca

SEQ ID NO: 1673 - RNA, 72 nt, Human; identical to SEQ ID NO: 1599

SEQ ID NO: 1674 - RNA, 82 nt, Human; identical to SEQ ID NO: 1600

SEQ ID NO: 1675 - RNA, 86 nt, Human
ccccaagucagcccuccaucuguuuuccugauuuccuucaccuguaagauagagacaucacuacagaggucauuggguuguugggg

SEQ ID NO: 1676 - RNA, 80 nt, Human
uaguagcacagugcugacgacucagguggcuuugcugagugaguaccugccaccugcacacaguaagccuguguuaucua

SEQ ID NO: 1677 - RNA, 93 nt, Human; identical to SEQ ID NO: 1593

SEQ ID NO: 1678 - RNA, 62 nt, Human
cuucaauuauguuucuuuuaauggguuuccaaauaauaugacucauguggaaguuuaagaag

SEQ ID NO: 1679 - RNA, 94 nt, Human
ggaaggauuggagagccacuugaggucauguguuaagguauguaaaacacacuguucugaucacuuacaucuguggcucuccaguuuuccuucu

SEQ ID NO: 1680 - RNA, 70 nt, Human; identical to SEQ ID NO: 1605

SEQ ID NO: 1681 - RNA, 90 nt, Human
gaguuuaacuguguaauuuuuggccuaaauagcccugugaaguagauauuauuccaacuuuacagguuagggcaauuuggacuuggauuc

SEQ ID NO: 1682 - RNA, 80 nt, Human
gugguaaauauaaaugaguuucauuuuaaguaaacucauuuugugggauuugagauuuaaaaaugaaauuaauuuugcac

SEQ ID NO: 1683 - RNA, 85 nt, Human
ccgggcgagcugcugcugcgucugcugcggaugaucaucuugccgcugguggugugcagcuugaucggcggcgccgccagccugg

SEQ ID NO: 1684 - RNA, 90 nt, Human
cugagcuggauggaaagacagcaaagauguacagggguggcuuuggacuagcucaucucauggcucuggggcuggguccauggcuggcag

SEQ ID NO: 1685 - RNA, 82 nt, Human
gacugaaggaggaauaucagucccuuauccgguauguggagaacaacaagaaugcugacaacgauugguuccgacuggaguc

SEQ ID NO: 1686 - RNA, 86 nt, Human
cuugagagaagaaaaauuucagauuaauugccucaauuugacuagaauaucaaugaaccaggaaaacugaagcaccuucccuaaag

SEQ ID NO: 1687 - RNA, 94 nt, Human
gcuuuauuauggcugcuguuguccaacagaacgaccuaguauuugaauuugcuaguaacgucauggaggaugaacgacagcuuggugauccagc

SEQ ID NO: 1688 - RNA, 74 nt, Human
uuggguauacaauuacuccacagacagagcugaggguuuuuuacccaaaucagucacuggauuuugcugccuga

SEQ ID NO: 1689 - RNA, 123 nt, Human
agagguuuuaaaugauaccugggguuucuucccuucguggucuggagacucuaccuuuugugaguucccagaaagacucaauaugaagaaaccuauuuaucguugugaaagaugaacgccuuu

SEQ ID NO: 1690 - RNA, 74 nt, Human
gacccagaaugagcguuauaaggcugccaugcggagggcauuccacauccgguugauagcucggcgccuggguu

SEQ ID NO: 1691 - RNA, 78 nt, Human
guggaacggcucaccaacauccuugauggaggugcccagaacacugcacuccgcaggaaaguugagagcaucauccac

SEQ ID NO: 1692 - RNA, 107 nt, Human
uuacucugaauuagaaacauguuuaugauaauccuauuagaaaauuugauugauugauuaaagugucuuuuugggucgacaucccuagcguuucugauccugaguaa

SEQ ID NO: 1693 - RNA, 74 nt, Human
gguagagacgggguuucaccauguuggucaggauagucucaaucucuugaccuugugauccaccugccucagcc

SEQ ID NO: 1694 - RNA, 82 nt, Human
uuguaaacacguugagauuaaagaagguuuuaccagaucaaugggaaaauguucauuuaauaaacuuucuaacuguauacag

SEQ ID NO: 1695 - RNA, 67 nt, Human
agguggagggggcccacauuuuccuguagaaucuuugcauugaggugguuccggccaguuuccauuu

SEQ ID NO: 1696 - RNA, 72 nt, Human
ccaccuuaaugcuauguuauaauuuuccauaauuucucgggauauuacacacggauguaagcauuuuggugg

SEQ ID NO: 1697 - RNA, 75 nt, Human; identical to SEQ ID NO: 74

SEQ ID NO: 1698 - RNA, 87 nt, Human; identical to SEQ ID NO: 76

SEQ ID NO: 1699 - RNA, 99 nt, Human
ccuuuguuauaauugauaggauacaucuuggacauggaauuguuaagccaccucugagcaguguaugucaggacuuguucauuagguuggcagcagagg

SEQ ID NO: 1700 - RNA, 96 nt, Human
uauagcuuugggauuuugaauugguaaauauucaugaugugugaaaaaucaugauacauacuguacagucucagucccauaaaauuggauguugug

SEQ ID NO: 1701 - RNA, 60 nt, Human
uuacgaauggggugacaacuuaugauaaaaacuagagcuagugaauuagccuauuuguaa

SEQ ID NO: 1702 - RNA, 125 nt, Human
cagcuagucaccagaguugccauuuggggauuauauuuauuaacaauauuucauuaagugaucuuucacaguuagaguuaaggaaaucuugagugaaaauccuuaucccuuugguggaccuguug

SEQ ID NO: 1703 - RNA, 63 nt, Human
ccgagaagugcucccuuaggcacgcuugcuuagccccauuuccugagggagugaagucucugg

SEQ ID NO: 1704 - RNA, 101 nt, Human
gaaccgaugcacuggcaccuagacauguacaacaggaaccguguggauacaucccccacaccuguuucuuggcaugucauguguaugcagcucuucgguuu

SEQ ID NO: 1705 - RNA, 83 nt, Human
guaggaauccagucaauaccaagcuuggcuuccuggagucuuaggagauaggaagauaggagggccuugacccauuggccugc

SEQ ID NO: 1706 - RNA, 62 nt, Human
gcggcucccgcgcgcgcgcuccguggccgucgccgaggcgcgggggugggcgcggaagucgc

SEQ ID NO: 1707 - RNA, 91 nt, Human
gguuuaaugccuaguuaugcaacuugagugcuuuuuuauuuggcgaggaauaauucaggguguauauuuuuaaugccggguacuugaaacu

SEQ ID NO: 1708 - RNA, 72 nt, Human
guucuuuuauucauuuuuuauuugugacuguagugauaacuuuacagauggagaaagagugaauggaugaau

SEQ ID NO: 1709 - RNA, 76 nt, Human
cugggcccggaggucaccacgcaguacggcggccaauaccggacggugcacacugaguggacccagagggaccugg

SEQ ID NO: 1710 - RNA, 95 nt, Human
caaauguaaccauguuuucauaggauuuguggauucuguaaaagcaguucugcucaggauaaaugcaaguuuucaguguuuacgugguuuuuuug

SEQ ID NO: 1711 - RNA, 63 nt, Human
gaaacaauacuauucaucauuuccucaagagaaacaauuucucuggugcuaagguaggguuuu

SEQ ID NO: 1712 - RNA, 81 nt, Human
guuaaaaugucuauugggguccuuauuuaacucucaaaaggguuuuagaaguaaauagcagauucaacuauccauugaagc

SEQ ID NO: 1713 - RNA, 70 nt, Human
aauagaaacaauacuauucaucauuuccucaagagaaacaauuucucuggugcuaagguagguuuuuauu

SEQ ID NO: 1714 - RNA, 95 nt, Human; identical to SEQ ID NO: 1710

SEQ ID NO: 1715 - RNA, 81 nt, Human; identical to SEQ ID NO: 1712

SEQ ID NO: 1716 - RNA, 64 nt, Human
aagauguagcggguuuucuggugguggauccgaagaugggccacagagauuccacuuuccucuu

SEQ ID NO: 1717 - RNA, 61 nt, Human
augcagcacaaguucucauauccuugcuuuuuccauuuugcaaucagguuuuugucugcau

SEQ ID NO: 1718 - RNA, 93 nt, Human
gugcacucgaugaugcggcccacuuccagcuugcuuuugggcacgcggcagaugcaguucgucccgaaguuggugucccgugucugaaugcac

SEQ ID NO: 1719 - RNA, 79 nt, Human
ccggaaccugcucaucuggaucaagaagaauuugcuaaaagagcggccagaguuguucauccaggaagacagcgugcgg

SEQ ID NO: 1720 - RNA, 60 nt, Human
gaugccgacugggagcuacugggugagcuggacuaccagcuucaggaccaggacagcguc

SEQ ID NO: 1721 - RNA, 63 nt, Human
cggucgagcgcaguuaccgcgcggggcucugcuccaaagccgcgcuguuccugcugcuggccg

SEQ ID NO: 1722 - RNA, 63 nt, Human
gagcagcuacgaggagcagccgaccgugcgcuuccaacaccaggugcugcucguggccugcuc

SEQ ID NO: 1723 - RNA, 66 nt, Human
guacuccgagugcagcucauccugacuucuccuaucgaacaaccaggauggcgacccucgcgaugc

SEQ ID NO: 1724 - RNA, 69 nt, Human
cccaagcugggcccgcgacucgaaggugacugggauggugaucucguuggacugcguggcuagcuuggg

SEQ ID NO: 1725 - RNA, 87 nt, Human
uuuuuuuuuuuuuuuuuuuuuuuuuuuuuucaggugguugcuuugaacuuuauuugagaaaaacagaagauaaauguaucaaaagaa

SEQ ID NO: 1726 - RNA, 65 nt, Human
gauaaggaccuguuuggggcagcagggagcaaaaucuccuuuaacaaccaagcaguuccucauuc

SEQ ID NO: 1727 - RNA, 65 nt, Human
aauccuucuuuuucucuuuugcccacaauuuaagcaaguagaugugcagaagaaauggaaggauu

SEQ ID NO: 1728 - RNA, 70 nt, Human
ggaagggcaggcgugaugggcuuauuuguuuggaauucaaugauugucuuuccccaucauuuguccuuuu

SEQ ID NO: 1729 - RNA, 80 nt, Human; identical to SEQ ID NO: 367

SEQ ID NO: 1730 - RNA, 61 nt, Human
agccauccagcgucgcuguaaguuccucugucucagggcugaaguaccagcugagguggcu

SEQ ID NO: 1731 - RNA, 70 nt, Human
gggaaggggcuagagcccacaaucagacaugggcaacuagaguguggggugggggcucccaguuuguccc

SEQ ID NO: 1732 - RNA, 87 nt, Human
ugucucgggucuggggggauucgggggguucagcaguggcuccuaaagcagccaccggugccuccuccaucucccuguccucagaca

SEQ ID NO: 1733 - RNA, 67 nt, Human
aagaagcucaaacuccccaaaugcagcucccacuaucagugcuugauggauaaauguuuggcuucuu

SEQ ID NO: 1734 - RNA, 63 nt, Human
ugagucagggaaaucuuaaaaggauuauuaaucacaauacuauccauuuaaauuaacugauca

SEQ ID NO: 1735 - RNA, 71 nt, Human
gacccaucuguggugauguuccugacagcucacaaugcguguggcgugucugaggugcacgaagauggcuc

SEQ ID NO: 1736 - RNA, 67 nt, Human
acauuucugaaaugaccaaaguacacaaauggagaacagaugagugguugucagggguuagagaugu

SEQ ID NO: 1737 - RNA, 92 nt, Human
auguguggcucaggccgggcaugguggcucacgccuguaauccuagcacuuugggaccacgggcaugagccaccaugccuggccccauuuau

SEQ ID NO: 1738 - RNA, 77 nt, Human
guacagagaaaacugggaaaguuugaagaagauugauggauuguaucaaugucaauauccuaguuuugguauuguac

SEQ ID NO: 1739 - RNA, 81 nt, Human
gugauggaacugcucuguaucuugacuaugauggucgauacaugaacccacacucaggauacaauuggauagaacuaacac

SEQ ID NO: 1740 - RNA, 60 nt, Human
ccguuccaguucgagaucaccuucgagugcaucgaggaccugucugaagacuuggaaugg

SEQ ID NO: 1741 - RNA, 65 nt, Human
gcguaacuguugugcuaauuacugguaccuaucgaggacaagaauuauuagaguggcuauuaugu

SEQ ID NO: 1742 - RNA, 81 nt, Human
ggccagaauugcucaguugcauuugauccaggacuauagauuggaaaugggucaucauuguuuucuguugugauuauagcc

SEQ ID NO: 1743 - RNA, 63 nt, Human
ucacacucagaguggggcaauuccagcauuuauccuggcugcguuucauugcauugucuguga

SEQ ID NO: 1744 - RNA, 62 nt, Human
ccaugucaucagcguggacccuucagaccagaagaagacggcgugcuaugacauugacgugg

SEQ ID NO: 1745 - RNA, 64 nt, Human
ggaauacaucaauggggacaaguauuuccagcagauuuuugauuguccccggcugaaguuuucu

SEQ ID NO: 1746 - RNA, 78 nt, Human
ggacggcuuccaggugaaacggccuggggaccugagugugcgcugcacgcugcuccucaugcuggacuaccagccucc

SEQ ID NO: 1747 - RNA, 107 nt, Human
gacuacggcggccucguggucuucugcaucuucuuuggcaucuccuacggcauggugggggcccugcaguucgaggugcucauggccaucgugggcacccacaaguu

SEQ ID NO: 1748 - RNA, 88 nt, Human
gggugcacugugcuggaccaacccugauucugcuggggcuagcgggucuccauuaggaguggggugcuccguccggcacagugugucc

SEQ ID NO: 1749 - RNA, 105 nt, Human
gugcucgucgggcccccuucgggaggugagcgcugcgcccccaggcaguuccccacaccugcccuucccgucagacgcccgcuuugcgaggggggggacgcgcac

SEQ ID NO: 1750 - RNA, 113 nt, Human
ccgcuuugauuggcuccgaauccucuuggguccacauacggccaucacuccugccuggagcgaaugcgauuccaaugagaucuauacugucggacacacgcuuucaaagacgg

SEQ ID NO: 1751 - RNA, 60 nt, Human
gggggucguccuuggcacgcgcuggggagugcuaguccugaggcgagccgguagaucucc

SEQ ID NO: 1752 - RNA, 73 nt, Human
gguggcgucugccuucucauauggauuuguccguggguccgcggcuucguucuuaaggcaugauggcgccgcc

SEQ ID NO: 1753 - RNA, 84 nt, Human
ggggucuaugguggucgccaagucuuggugccggugccaggggaacugcuucuuggaaacaccuuugguggacaccguugcccu

SEQ ID NO: 1754 - RNA, 88 nt, Human
cccuaacauugaguuucaugugacuaugacauauucuacaaauuguuacaauaugaauaugguauggacaaauuauuuaaaguugggg

SEQ ID NO: 1755 - RNA, 63 nt, Human
acgauauuaggagagaaagaccccgagaguauugguuugggaauuucuuuuguacaagauugu

SEQ ID NO: 1756 - RNA, 70 nt, Human
uaauuuuaugugggauucugagguaucgagugaauugagguuuuaucuauagaaacaccuuugggaguua

SEQ ID NO: 1757 - RNA, 129 nt, Human
uguuuucguuauuauugacacacaaauuuauuuuuuaauuuuccaugagucuauguucaaaauuauuuguuuguuggacgcggauuucaagaaaaauagaagaagucuguggugcauaaagacgacaca

SEQ ID NO: 1758 - RNA, 77 nt, Human
gaguggcgacgacgguggagugguauaaugugggcgcggaaaguauagauugcggggugcuauucagguggucacuc

SEQ ID NO: 1759 - RNA, 64 nt, Human
ggagggaggguuucuggugacuacccgagaagaggggggggggcggcggagagugcuugcaucu

SEQ ID NO: 1760 - RNA, 95 nt, Human
ucucgaaggggggcgacaccagaacgacgguuuauggggggaguuucgaacccgugugagaaacccguuaugcauaggguguuuuauccccgaga

SEQ ID NO: 1761 - RNA, 61 nt, Human
ggugucaccacguuggccugaagacggcuuucaucaaaagcggcaccuacagggggacacc

SEQ ID NO: 1762 - RNA, 76 nt, Human; identical to SEQ ID NO: 758

SEQ ID NO: 1763 - RNA, 70 nt, Human
uccuugccaguuucucccagcaggacccucuucuuguuuugaaagauggucggcugcuuuuugguaggga

SEQ ID NO: 1764 - RNA, 71 nt, Human
ugcaucuucaucuuggucaccacgccagagaggauccgcccucgaauggacacauuaccagugaaggggca

SEQ ID NO: 1765 - RNA, 100 nt, Human
cuccuggaaguucgugcucggguucuugcugcacagcaugaagccgaucuggccgcugggguagguggugauggugcaguaggcauaggccaccacgggg

SEQ ID NO: 1766 - RNA, 82 nt, Human
gggcuggaggggccgaggcaccccgcaggcuccaagguccgagguccuggguggcaucagugguggcgccugggcucagcuc

SEQ ID NO: 1767 - RNA, 99 nt, Human
aagacuguacugcagaugcucagaaaguuaaaucucgcucucauauguaugcagguaugucuugagugucaggauuucuggguagcugcggcuggucuu

SEQ ID NO: 1768 - RNA, 129 nt, Human
uagccaacaaacccaagauacagugcagaucaccuuuccauuucuaaacaguguguagagagcauaguauugucugcaagagaugucagaauugggaggaguccguagcgcugguggagauguugguua

SEQ ID NO: 1769 - RNA, 61 nt, Human
cuuguggagacgggauggggaaaaauacugauucugugaaaauacccccuuucuccauuag

SEQ ID NO: 1770 - RNA, 82 nt, Human
gcagcuccaguaucccaaacuuucuaguccugcugauccucccagcaacgggguggaaacuggagggcagugucuggucugu

SEQ ID NO: 1771 - RNA, 63 nt, Human
ggagucuuuagauuuuuacaaauauaugaucauaucauuugcgaacaagaauauuuugacucu

SEQ ID NO: 1772 - RNA, 75 nt, Human
ggugaggcuaggaccuggcccagggcaacugucuccucaacagcauuugcgccuccauuccauuuaguuuccacc

SEQ ID NO: 1773 - RNA, 71 nt, Human
gucagaggaaaaggcacuuugaaccuccuguaacgaugcugagguuuggacauucugacccagccccugac

SEQ ID NO: 1774 - RNA, 131 nt, Human
gucauccauuuauuuauuaagaauuuacuaggcacuguauuaaacauuuuacauacuuaauuucauuuaauccuuaucaaagcugucauuauggggcacugucauucuguucacuuuauagaugagggugc

SEQ ID NO: 1775 - RNA, 77 nt, Human
uuguuugggucugaauuuuguuuuuaaaacuaagcuaaguuuaauguuuuuuaaaaugcuguuuggaauaugaauag

SEQ ID NO: 1776 - RNA, 74 nt, Human
ggaucucaaaagaugaagacuuuuguaaacgguguauucuuuggguacugugggauaaaagcagguugaaaucc

SEQ ID NO: 1777 - RNA, 64 nt, Human
ggggcuugcccuggcucucugucuccucccaucgggaggaacagagagccaggaccaaagcucc

SEQ ID NO: 1778 - RNA, 64 nt, Human
uucuuauauuguguguuaaucaucaaggaaucucuucucgauuaaaauacacacaucuuaagaa

SEQ ID NO: 1779 - RNA, 79 nt, Human
cucuucagccaggcaggcaggcaggcaggcauccucacugagugccucccaggugccaggucuguauugggcugaggag

SEQ ID NO: 1780 - RNA, 88 nt, Human
uggcaaguuacaccuaaccccuggcuccauggagguuacagugcacacagcaacuaccuccuaguggggguuuaguacauauuuguua

SEQ ID NO: 1781 - RNA, 76 nt, Human
gcucuagcucuuuuccugugguauuguaaugauugguuuauguuuaccuuccuuacuagacugugagcucaagagc

SEQ ID NO: 1782 - RNA, 77 nt, Human
ugucucacuaggguccccuccccaaggcucagcucuaagaccugcaccugcuucucuuggccccugcgugacagaca

SEQ ID NO: 1783 - RNA, 85 nt, Human
ccgcaaagugggucucauugcugccggcggaccuggaccgucuccgggcaccaagacugugccggacacagagacuagugugagg

SEQ ID NO: 1784 - RNA, 74 nt, Human
ccucuuccgugaggcgcgcugagacccggaccggcccuccugagaggaugccggugcgggcgcccgcggagagg

SEQ ID NO: 1785 - RNA, 89 nt, Human
gaaggguuuacgaugcauuguuaucauuaaccagucuuuuacuacuaaacuuaaauggccaauugaaacaaacaguucugaaaccguuc

SEQ ID NO: 1786 - RNA, 63 nt, Human
uccaugcaaugugagccguguggcaauccaauacagggccauacccgcgcuuauuuggcugga

SEQ ID NO: 1787 - RNA, 61 nt, Human; identical to SEQ ID NO: 776

SEQ ID NO: 1788 - RNA, 131 nt, Human
agauucgggcaaguccaccacuacuggccaucugaucuauaaaugcgguggcaucgacaaaagaaccauugaaaaauuugagaaggaggcugcugagaugggaaagggcuccuucaaguaugccugggucu

SEQ ID NO: 1789 - RNA, 62 nt, Human
gagcggucggugacagccucaagggcuucagcaccgcgcccauggcagagccagaccgacuc

SEQ ID NO: 1790 - RNA, 75 nt, Human
gcuggacgagcugaccuuggaagggguggcccgguacaugcagagcgaacgcugucgcagagucaucuguuuggu

SEQ ID NO: 1791 - RNA, 76 nt, Human
uagccgggcuggaacaggaggacuugguggaggcgcacggcaccuucuacacaucacacugcgucagcgcccgcug

SEQ ID NO: 1792 - RNA, 61 nt, Human
cgcaccccugaauuucuccgcaaauuuccugccggcaaggucccagcauuugagggugaug

SEQ ID NO: 1793 - RNA, 65 nt, Human
agcagccgagcggccauggagcugugcgggcuggggcugccccggccgcccaugcugcuggcgcu

SEQ ID NO: 1794 - RNA, 60 nt, Human
ucuaagagugaaguaggugugacuugaacuagauugcaugcuuccuccuuugcucuuggg

SEQ ID NO: 1795 - RNA, 100 nt, Human
cuggagggccugaauuucaaccucacggagauuccggaggcucagauccaugaaggcuccaggaacuccuccguaccucaacagcagacagccaguccag

SEQ ID NO: 1796 - RNA, 84 nt, Human
ggaggagggggucgggccuccgaggaaggccuagccgcugcugcugccaggaauuccagguuggaggggcggcaaccuccugcc

SEQ ID NO: 1797 - RNA, 76 nt, Human
uggccgggaggcugggcugggggagguaucucuucgaaggguccauccucaagccacgauaagagcuucugagcca

SEQ ID NO: 1798 - RNA, 77 nt, Human
gaggcagcccuggccaccuucggaacuuucccgucgaccaggccccccgggacucccagggcuccagggcccuccuc

SEQ ID NO: 1799 - RNA, 63 nt, Human
ucugugcacuugauaauaacccugcaggcguucugcgugaaccaggcuguuaagugcaccaga

SEQ ID NO: 1800 - RNA, 64 nt, Human
ugaguaugggguuccucugcagacuucagauucguuucugagauuuccuucgucccugacauca

SEQ ID NO: 1801 - RNA, 66 nt, Human
ugccaugcugugggcaccuucugcaggaccagccagguaggucaucuuggacggugccagcaggca

SEQ ID NO: 1802 - RNA, 67 nt, Human
ccaagcugggcccugagaucgagcgggcugaguguacaauccgcaugaaugaugcacccagcacugg

SEQ ID NO: 1803 - RNA, 86 nt, Human
gccccagggcagccucgugcgugugauccagcgagcgggccugguguuccccaacauggaagcauaugccggucucucccuggcgc

SEQ ID NO: 1804 - RNA, 81 nt, Human
gcgggcaaccuggccuccggcggugcggccggcgcgaccucccucugcuucguguacccgcuggauuucgccagaacccgc

SEQ ID NO: 1805 - RNA, 61 nt, Human
aggagaagcugugcuccgucgccuggaacuucgagcaggagauggcaaccgcgauccuccu

SEQ ID NO: 1806 - RNA, 67 nt, Human
cugguuugcuggggacgacgcuccccgagccguguuuccuuccaucgucgggcgccccagacaccag

SEQ ID NO: 1807 - RNA, 66 nt, Human
cguuucuaguaagaacuuggcaucaagucuaagaagaagggcuuuaccaaguacugcgcagaaaug

SEQ ID NO: 1808 - RNA, 96 nt, Human
ggaggugguggaggcugugaccauuguagagacaacaaccauggugguagugggcauugugggcuacguggaaacccucgaggccuccggaccuuc

SEQ ID NO: 1809 - RNA, 60 nt, Human; identical to SEQ ID NO: 1551

SEQ ID NO: 1810 - RNA, 79 nt, Human
uugucgucauuggacacguagauucgggcaaguccaccacuacuggccaucugaucuauaaaugcgguggcaucgacaa

SEQ ID NO: 1811 - RNA, 61 nt, Human
gcaucuaaugugauaaggcugcacguuuuauaucgauggucauucuuuauuguauuggugc

SEQ ID NO: 1812 - RNA, 74 nt, Human
gugaugagcacgacgggacgggcagauccauucaugcaaccgguaugagaucuccuuacccucuguugcaucau

SEQ ID NO: 1813 - RNA, 81 nt, Human
ggauggaguggcagcugaaggugcaggaacuggaccccgccgggcacaagucccugugcgugaacgaggugcccuccuucu

SEQ ID NO: 1814 - RNA, 66 nt, Human
uuucaggaguuggagaacggaguacauuuuuaaaauuuuuuguuccauucugaucaacuaaagaaa

SEQ ID NO: 1815 - RNA, 61 nt, Human
acccuuccuuggcaccauucuucuacacuuaaggauggaguuugggaccacauugaagggu

SEQ ID NO: 1816 - RNA, 63 nt, Human
cggcugcgaaguaccgccugcggaguacugcaaagaugcuguccgugcgcguugcugcggccg

SEQ ID NO: 1817 - RNA, 73 nt, Human
uuggugcauguaauaauguugaguggcagucaaaagucaugauuuuuaucuuaguucuucauuacugcauuga

SEQ ID NO: 1818 - RNA, 62 nt, Human
ggacccgacaaccauccugggagaauaucccauuagcaaucucaggagagcaagacccgucc

SEQ ID NO: 1819 - RNA, 81 nt, Human
cugaagguucagcauaguagcuacagacagagggcccggcuguugaaggaccagcucucccugggaaaugcugcacuucag

SEQ ID NO: 1820 - RNA, 131 nt, Human; identical to SEQ ID NO: 1788

SEQ ID NO: 1821 - RNA, 64 nt, Human
uuccauaauccuccucaucacugguaccuaugugggaccccuggugguggaggucauccaggaa

SEQ ID NO: 1822 - RNA, 93 nt, Human
gcauacucgcugcccgccggcucccucccccgcgucccugcgaccgccgcggcgaagauggccucaggagugcaaguagcugaugaaguaugu

SEQ ID NO: 1823 - RNA, 61 nt, Human
ggugacaacaugcuggagccaagugcuaacaugccuugguucaaagggauggaaagucacc

SEQ ID NO: 1824 - RNA, 79 nt, Human
gcugcccugucuugcguuccaguguuccagcuucugcgagaugacccucaaggcgagcgagggcgagagugggggcagc

SEQ ID NO: 1825 - RNA, 73 nt, Human
acuauugccagacccacuaccagugcuuguggucgugcugguaguugcagaacucuggguagcuggcgguggu

SEQ ID NO: 1826 - RNA, 105 nt, Human
gcugauagugugucuggauucugcaucugcugcaggaaggcugggagcuguggccgcaucugcuccugcagcugaggauuugcaguaaacagcgggcuauucagc

SEQ ID NO: 1827 - RNA, 60 nt, Human
ugggagaguauuuuagagacaauggcaaacaugcuuugaucaucuaugacgacuuaucca

SEQ ID NO: 1828 - RNA, 60 nt, Human
ugccuacaaugccuuucagauccgugcuggaaacucgcagggggacuuuuacauuaggca

SEQ ID NO: 1829 - RNA, 76 nt, Human
uggcuucuccugcagugauauugaugaguguagcuacuccagcuaccucugucaguaccgcugcgucaacgagcca

SEQ ID NO: 1830 - RNA, 81 nt, Human
ggagcggcggcgcccgcagcaaucacagcagugccgacgucguggguguuuggugugaggcugcgagccgccgcgaguucu

SEQ ID NO: 1831 - RNA, 65 nt, Human
gagcuaauacaugccgacgggcgcugacccccuucgcggagggggaugcgugcauuuaucagauc

SEQ ID NO: 1832 - RNA, 66 nt, Human
gauuaagccaugcaugucuaaguacgcacggccgguacagugaaacugcgaauggcucauuaaauc

SEQ ID NO: 1833 - RNA, 68 nt, Human
cucuggucuagauuuucauauaauguauuaaagacaaaguagugaacaucaaugaacaucugauagag

SEQ ID NO: 1834 - RNA, 63 nt, Human
agaugacguuuaugaucguaugcugcuagacuacuucuuuucuuaucaucaguucauccaucu

SEQ ID NO: 1835 - RNA, 60 nt, Human
gaacuuuuuuaaacaacaacauugucuacacguucaugacacauuuccuucuaaagguuc

SEQ ID NO: 1836 - RNA, 63 nt, Human
aggacuagccaggaccggagcgcucgucacuccaauugggugcuccugggucccacugguucu

SEQ ID NO: 1837 - RNA, 88 nt, Human
cacggugcugucgggcggcaccaccauguauccgggcauugccgacaggaugcagaaggagaucaccgcccuggcgcccagcaccaug

SEQ ID NO: 1838 - RNA, 72 nt, Human
cuuuugaauaaaagaucauucaacuaaaaauauuaaaauuuauuucacuggaugguaauguaaccuuaaaag

SEQ ID NO: 1839 - RNA, 91 nt, Human
cugcacuuauaguuuuaaaauaucguacacauaacauuaugauuucaguucuaaauguaaaccaugauuucuuuuuaaagacguauggcag

SEQ ID NO: 1840 - RNA, 66 nt, Human
gucuccgggguagcaggggcugcucugugcugggcugggccaguagggggcgcccucccugggagc

SEQ ID NO: 1841 - RNA, 80 nt, Human
guggcuguugaggggcgucuuccaaucucgcacagcugcguuggcuguagaagagaacggacggcgauggcgacggucgc

SEQ ID NO: 1842 - RNA, 95 nt, Human
gccaacaaaaaagacuuggaggaggcagaggggagacuugcagcuccucugcugaaacguuuaagccucuccacauccaaauugaacagccuggc

SEQ ID NO: 1843 - RNA, 131 nt, Human; identical to SEQ ID NO: 1788

SEQ ID NO: 1844 - RNA, 71 nt, Human
agggagagguggaggcccugcuggaucgauacuucgaggcugauccuccagggcagguggcugccuccccu

SEQ ID NO: 1845 - RNA, 63 nt, Human
cccggugcuggaaaggcgcccagggcccaagcgggaccugagccacgcgucgggcacaacggg

SEQ ID NO: 1846 - RNA, 76 nt, Human
gcggaucgugucucggcugcggcgauucgggacagugcucaccgagcacguggcggccgccgagcugggcgcgcgc

SEQ ID NO: 1847 - RNA, 72 nt, Human
ccaauaacucuauccucgggcggucgacauuuauucaacaagaaaaaaaccuuucgugguaccgacuauugg

SEQ ID NO: 1848 - RNA, 62 nt, Human
gagaauguauguaaaaguucugugacaguacagaaggaaaacaacuuuuuauguauagcuuc

SEQ ID NO: 1849 - RNA, 79 nt, Human; identical to SEQ ID NO: 1810

SEQ ID NO: 1850 - RNA, 67 nt, Human
cgugaagaaggcggcccgggucaucauagaaaaguacuacacgcgccugggcaacgacuuccacacg

SEQ ID NO: 1851 - RNA, 79 nt, Human; identical to SEQ ID NO: 1810

SEQ ID NO: 1852 - RNA, 63 nt, Human
ggugacaacaugcugggagccaagugcuaacaugccuuggguucaagggaugggaaagucacc

SEQ ID NO: 1853 - RNA, 79 nt, Human; identical to SEQ ID NO: 1810

SEQ ID NO: 1854 - RNA, 77 nt, Human
caaugucgauucuggacaucauuuuuuccaaaagucuuggaaaugacaggaaauauugaugaagcagaaugggagug

SEQ ID NO: 1855 - RNA, 89 nt, Human
gcaggucccgcuggugcuguggucgagugaccgggacuugugggcuccugcggccgacacucaugaaggccacaucaccagcgacuugc

SEQ ID NO: 1856 - RNA, 71 nt, Human
gcucuggcgcaugccguggcugccgguguuuuugucguuggcggcggcggcggcggcggcagcggcggagc

SEQ ID NO: 1857 - RNA, 80 nt, Human; identical to SEQ ID NO: 367

SEQ ID NO: 1858 - RNA, 67 nt, Human
ggcagacugccugcuggugccagaaugaugccaaagacauagaaaagucccagcaggagguugagcu

SEQ ID NO: 1859 - RNA, 68 nt, Human
uggcaguccucuggggcaguuuguugaaggccugggcuucgaaacugucucucaaggggagaaggcca

SEQ ID NO: 1860 - RNA, 75 nt, Human
gagugugguaguggauuagugaaagucuccucaggaaaucugaagucuguauauugauugagacuaucuaaacuc

SEQ ID NO: 1861 - RNA, 77 nt, Human
uguaugaauuaagcuguaaggccuguagcucugguuguauacuuuugcuuuucaaauuauaguuuaucuucuguaua

SEQ ID NO: 1862 - RNA, 67 nt, Human
ccaagcugggcccgcgacucgaaggugacugggauggugaucucguuggacugcguggcuagcuugg

SEQ ID NO: 1863 - RNA, 73 nt, Human
ggcagcaggggugggcauccgggcuaaggcuuuacuuggcggcagucucaucggauuuugcagcuucugggcc

SEQ ID NO: 1864 - RNA, 70 nt, Human
aaaugguugaauggguaacaugcauugaucaauacaacaaccaauaauauuuacugaauucaaacuauuu

SEQ ID NO: 1865 - RNA, 68 nt, Human
ugguuuuauuuuaacuuaaccuuugugaauacuucacaaaaauacacauacagaaguaaauaaaacua

SEQ ID NO: 1866 - RNA, 75 nt, Human
cugacugcccgcccuuggcuccaucugcagaugucuucagagacgagauguacuuggaccagaaggagcagucgg

SEQ ID NO: 1867 - RNA, 97 nt, Human
caggugaaaauggcagguuuuuguuuggaagguggggggagaugccacaaggugacuccccaccucccuugccucacagauuggccuguuuucccug

SEQ ID NO: 1868 - RNA, 72 nt, Human
gcaguugucaaauaccaggagggcaucagccgcaaacuccucugagcugguguaccuggacagggcaggggc

SEQ ID NO: 1869 - RNA, 71 nt, Human
uccagaaggaccucaucucugcaccucuuacuugaggagcaagaggagggaagggagaaagggauguagga

SEQ ID NO: 1870 - RNA, 72 nt, Human
gcauuaaaggauaauuuucucugugaauaagagcaaaauggucuucagagaaacagacuguucauuugaagc

SEQ ID NO: 1871 - RNA, 92 nt, Human
acuuggagaguuuggcccaggaguuccugaaccauauuuguuacuugugcucacucagguugaguucuguggccaguuuguauucucaaagu

SEQ ID NO: 1872 - RNA, 63 nt, Human
cuugggacucccuguagcagugccuggaaaaugguauguuuugcugcugcaggaauucucaag

SEQ ID NO: 1873 - RNA, 66 nt, Human
gggcagagggcaugugaaguaaccuaggaccugcuggucacccugggugaugugcugcccucguuc

SEQ ID NO: 1874 - RNA, 77 nt, Human; identical to SEQ ID NO: 1066

SEQ ID NO: 1875 - RNA, 69 nt, Human
acacgcacauucacaguaguucccagggcagcagaaaguacugaaaucccaccuuaugugaugaagugu

SEQ ID NO: 1876 - RNA, 96 nt, Human
cugugcagugaaaccaucuguuaccuguguugaucaagacuucaaaucccaaaagaacuuucaucauuaacaugacuugcagauuuugcugggcag

SEQ ID NO: 1877 - RNA, 71 nt, Human
gcgccuugugucgcgugcugcucuuccuuucgcaguucugcauucugucgggcggugagaaucgcaggcgc

SEQ ID NO: 1878 - RNA, 72 nt, Human
guguagcaggcuuccugcagacuguauagacugcacaacaaauuucuccuguaccuaugggaagccugucac

SEQ ID NO: 1879 - RNA, 79 nt, Human
cuggugcucccgaccccugguaggcccauccuccccgugcagacaggggagcaggcgccagcuaagaggagcaguccag

SEQ ID NO: 1880 - RNA, 115 nt, Human
gaugaagggagagagaggaggagagaggcaaguguuccaggcuagagaaauagagaccacgacccugaacuggagcauugacuuccuuucucucccuuucuccuuccuucccguc

SEQ ID NO: 1881 - RNA, 79 nt, Human
guuguuucuuuagcucuccuccaagacacuauggccaacugaagcccaaagccagcugagaggggagucugggaacugc

SEQ ID NO: 1882 - RNA, 66 nt, Human
aaggaacaugaagauuauuguggugcccggacggaacuauguggcaacuguggucgcaauguccuu

SEQ ID NO: 1883 - RNA, 84 nt, Human
ggauggcugaauuucuagaugaccaggaaacucgacugugugacaacugcaaaaaagaaauuccuguguuuaacuuuaccaucc

SEQ ID NO: 1884 - RNA, 69 nt, Human
cuggaaucacgauagaugaagauacaauagugucaucuacaggugcuuuaucuuuaaaaaaaguuccag

SEQ ID NO: 1885 - RNA, 67 nt, Human
cuggugcuaccaagaagucagauggaaacaauugauguuucuauugaagcugcuucuggugguaaag

SEQ ID NO: 1886 - RNA, 74 nt, Human
guuguuauuggugcaggaguaauagguguagaauuggguucaguuuggcaaagacuuggugcagaugugacagc

SEQ ID NO: 1887 - RNA, 65 nt, Human
agcgugucuggaaacgcaaacuaucauuaauuucauacuaguuguaccguaucuguaggcauccu

SEQ ID NO: 1888 - RNA, 66 nt, Human
ucuucgggaaaggugguggcggggcguccacuagguuuccuguccccugcugcuccuuccguaaga

SEQ ID NO: 1889 - RNA, 78 nt, Human; identical to SEQ ID NO: 99

SEQ ID NO: 1890 - RNA, 80 nt, Human
ucuuguguugagacuucgugguggugcuaagaaaaggaagaagaauucuuacaccacucccaagaagaauaagcacaaga

SEQ ID NO: 1891 - RNA, 81 nt, Human
gcugagugagccuccgccauccagcaugacaaacuguggccgaccgcagcugugccguggcacgauggcgaggaagccagc

SEQ ID NO: 1892 - RNA, 130 nt, Human
uugguuuuuuggcgauuucauuccauucuugaccaaagcuucucuuuaaguaguuuauuauggaaaauugucacacuaacuuaaaagacagggugagggagauauguaaauuguccacuagaaaauuaaa

SEQ ID NO: 1893 - RNA, 74 nt, Human
aauagaguaaaaaaaaaaaaguaggacacacauugcauauauagucagucuuauuugggcagaaggaaucuauu

SEQ ID NO: 1894 - RNA, 70 nt, Human
cagcaccauaacacuagacccagccuaacuguccugcaacaggggauggguaaaagggaugauggcgcug

SEQ ID NO: 1895 - RNA, 67 nt, Human
cuuagggaggaaggacuaggagggaaaacugggaaaacguacggugggcucugucuugcgucuugag

SEQ ID NO: 1896 - RNA, 72 nt, Human
aggaaucuaguggccaagaguuguaguuuagaaacaacccaucugaauacugcuuuuaccacuuugauaccu

SEQ ID NO: 1897 - RNA, 130 nt, Human
gaaaacaacauauagagaaauacuguagaaaccauugcuagugucuuaacuaggaaaagcaaguagacucaucaacaauccuuucaaaacaagaccuagagauaaacaguuuuuuccagugucaauuuuc

SEQ ID NO: 1898 - RNA, 63 nt, Human
accagaaaucuucaugcaaugaaaaauacuuuaauucaugaagcuuacuuuuuuuuuuuuggu

SEQ ID NO: 1899 - RNA, 87 nt, Human
gagucucgcucuugucacccaggcuggaaugcaguggcgccaucucagcucacugcaaccuccaucucccagguucaagcgauucuc

SEQ ID NO: 1900 - RNA, 62 nt, Human
gggugaaacaugaacauuugaggcugauucccuguggaaaaaucauucaaaucuauucacuc

SEQ ID NO: 1901 - RNA, 81 nt, Human
ucugauggcuguugcuuguuuuauuuuuuguccaagagaggugguguuggaccgagguagagaagacagugguacaccaga

SEQ ID NO: 1902 - RNA, 83 nt, Human
gugcuuauaaagugaaggggucauacaguugggccuucauuauuuugcugaauuaugugaugauucuuuugcuuucuacccac

SEQ ID NO: 1903 - RNA, 102 nt, Human
guuucagacaucaaggaguaucacugugcuuuccuccucuuuauaacugugcaggugggugugcagagaaauagcagagugaugguucgaugauacugaagc

SEQ ID NO: 1904 - RNA, 63 nt, Human
ggcucccggaucaaaggcugguggguguuccaucacuacguguccaccuuccugucgggaguc

SEQ ID NO: 1905 - RNA, 76 nt, Human
ggugacagaugcugccuucaacuuccugcuggucugguacuacugcacccugaccauccgggagagcauccucauc

SEQ ID NO: 1906 - RNA, 75 nt, Human; identical to SEQ ID NO: 1860

SEQ ID NO: 1907 - RNA, 77 nt, Human; identical to SEQ ID NO: 1861

SEQ ID NO: 1908 - RNA, 76 nt, Human
agauguagcuuuuguaauacuauuuugaccucuucugcucucauuugguuaauauuugcaugcaaugucuaaaucu

SEQ ID NO: 1909 - RNA, 92 nt, Human
aguuaauaaaucuauuauuguuuaaugucuuucuuugucucuuugcaguuuugacuuaaaguacuuuauguaagauaugacaguuuuugacu

SEQ ID NO: 1910 - RNA, 62 nt, Human
uuaaucauuaggaugucagcugacccuuguagaaagggcaaauugggaucuuggguuuuuaa

SEQ ID NO: 1911 - RNA, 69 nt, Human
gcauuuauaauuaucucauuuguuaaggcugagaagguuguuuuuauaauagguaauuauauugaaugc

SEQ ID NO: 1912 - RNA, 95 nt, Human
uauaugaaccuuuccccaagaagggcccuaggaaauugaugugggcuuuccucuuaaauauuaauuauuaguccugaaaggaaagguaacauaug

SEQ ID NO: 1913 - RNA, 73 nt, Human
cuucuaaaagacuuucuucgaaaccucaaagaaccucuucugaccuuucgccuuaacagagccuuuauggaag

SEQ ID NO: 1914 - RNA, 76 nt, Human
gacuguagacacaaacuguguaacuuccaugagccauuuccuuccugugcacauguauguguguuauuuuucaguc

SEQ ID NO: 1915 - RNA, 119 nt, Human
ggccuugugcagucagcuuaugcucagcccauugauuccaccacaucccugaucgaggggacguuaauuaccugucuuugugaauuaagcaguuuaugagcagcaaguuacugaggacc

SEQ ID NO: 1916 - RNA, 76 nt, Human
ccccuuccaggaagggccugguguugcagcugauccagucuuaccagcggaugccaggcaaugccauggugagggg

SEQ ID NO: 1917 - RNA, 69 nt, Human
augcuugagaaaugcccuuuuccugcuggcucagauuuagcccaaaaauggcauuugauuaaacagcau

SEQ ID NO: 1918 - RNA, 88 nt, Human
cuccugugagcccacauucaacauuuuuugauacauuugauccaucuuugguuucuacagaagaugaagaagauaggcuuagagagag

SEQ ID NO: 1919 - RNA, 68 nt, Human
ggcauugaagauccauaacuaucuucugaauuaucacagaaagaagaaaguuagaagaguuuaauguu

SEQ ID NO: 1920 - RNA, 72 nt, Human
guuugcaaacuaauucaaccauuuuacacagcauuaauuuuuuuuuuaacuggguugacauugggcugaaac

SEQ ID NO: 1921 - RNA, 61 nt, Human
ccagugaaguagugaaugcacggagagcuucuauucugcggcaggacagacacuccacugg

SEQ ID NO: 1922 - RNA, 64 nt, Human
uuaguuagcaugcugucggguauucguauuuuaaaguaauauuuuaaugggagcagcugauuga

SEQ ID NO: 1923 - RNA, 78 nt, Human
gagguccaguuucauucuucugcauguggguuagccaauuuuccuaacaccauuuauugauuaggguguccuuuccuc

SEQ ID NO: 1924 - RNA, 68 nt, Human
guaccaguaccaggcuauuuugguuacuauagcuuuguaguauaauuugaguuuggguaauaugguau

SEQ ID NO: 1925 - RNA, 60 nt, Human
guugccuuuuucagaaaucaguuaguuguaaauguguggcauuauuucuggauucucaau

SEQ ID NO: 1926 - RNA, 76 nt, Human
uccccacagccgccccacagccagucccggggcagguccuugggccgcgccgaccggcugcagccgcauguggaga

SEQ ID NO: 1927 - RNA, 64 nt, Human
ucgcccucgcggcaggcccggcugauggcguugaccacgcccgcggcgcucaccgcguggguga

SEQ ID NO: 1928 - RNA, 73 nt, Human
uggugcagcagaccuguaaaugucuucaaauucauuauuccucagaucgucaaguacaguccugauugcauca

SEQ ID NO: 1929 - RNA, 66 nt, Human
uugugguauccaacccaguugaccauucuuacaguauguaaccuggcaacuaaguggauuacccaa

SEQ ID NO: 1930 - RNA, 70 nt, Human
agaacuggaugggaauuuccacucuucacccucuaccuaggugacuuugagcaaguuauuuauccuuucu

SEQ ID NO: 1931 - RNA, 79 nt, Human
cucuuuuguauccuuauccguauaaugaggauaauaauauugucugugugauuggguuguugugaggauuaaaugagag

SEQ ID NO: 1932 - RNA, 115 nt, Human
ucaccaccuugguuuuguuuuauuuugcuucuuggucaagaaaggaggggagaacccagcgcaccccuccccccuuuuuuuaaacgcgugaugaagacagaaggcuccgggguga

SEQ ID NO: 1933 - RNA, 114 nt, Human
gugcucuucaugcaagguugcaaaccuaccaagaaugcauaauagucucacuuuuccccaauaaagagaugcgugugacuaguuuuggacuuuuaaccuuaauggggguugcau

SEQ ID NO: 1934 - RNA, 85 nt, Human
gaagaguuaaaaauaguacagaaaugugaaguuugguaucucuaaauguguuguacuugacuuucuuuuuuauuuuguuuuuuuu

SEQ ID NO: 1935 - RNA, 69 nt, Human
gugucugacaaaaauguaaacuguauaaacugaggaaccucagcuaaucaguauuacuuuguagaucac

SEQ ID NO: 1936 - RNA, 66 nt, Human
cucacaauuuuucuuuaaguuugaaacuauuucaaaaugaaguuauauaacuacaugaauugugag

SEQ ID NO: 1937 - RNA, 88 nt, Human
guggcccaugacaaucuuuuuccaauguggccuggggaagccaaaagauuggacaccccugguuacaggaagaaguuccuugugcuau

SEQ ID NO: 1938 - RNA, 82 nt, Human
acugacaguacccgacuguuuauuggaucuauugauuugaaaagaauuuguuaggauagaucuuaagcaguaaucugucagu

SEQ ID NO: 1939 - RNA, 64 nt, Human
cacaaaaugggacugcugaagaguggacaguuggaccuuacuuuggugaccccauacguuugug

SEQ ID NO: 1940 - RNA, 61 nt, Human
uagccauacacaugguaacauugacuauggagucuugugaaaguguaaugugcgauggcua

SEQ ID NO: 1941 - RNA, 75 nt, Human
augaagacgaguaugaaguaaauuugaaagacuuugagccacagcccgguaauaugucucauccucggccuuggu

SEQ ID NO: 1942 - RNA, 67 nt, Human
ggccauuaaaauccauaacugauuuccaagcugguguguucaaggcgaggacgguguguggguggcc

SEQ ID NO: 1943 - RNA, 77 nt, Human
uuaacagccuagaacuuuggugcacgugcccucuagccgaagucuucagcaagagggauucgcuggcuggguguuaa

SEQ ID NO: 1944 - RNA, 79 nt, Human
acuuccauguucugggugauggaaacugccaaaccuccugucagugaggacucuuuccgacugcccagaaagugggggu

SEQ ID NO: 1945 - RNA, 61 nt, Human
aaagaauaguuugguucuucaaaucuuaagagaauccacauaaaagaagaaacuauuuuuu

SEQ ID NO: 1946 - RNA, 64 nt, Human
ugugcaauggaauauaaauaucacaaaguuguuuaacuagacugcguguuguuuuucccguaua

SEQ ID NO: 1947 - RNA, 84 nt, Human
uuauguuuuaauauccuaggcaucugcuguaauaauauuuuagaaaauguuauuacagcagaugccuaggauauuaaaacauaa

SEQ ID NO: 1948 - RNA, 74 nt, Human
gcugcacuggugcaugaaggugaaguaaggaggcagcuacucccuccacaaauaagaauucgugcagcagcagu

SEQ ID NO: 1949 - RNA, 78 nt, Human
gagaguugcuugagcccaggaggcggagguuguagucagccagccacuguacucuagccugggcaacagagcucucuc

SEQ ID NO: 1950 - RNA, 66 nt, Human
aaagugagauuugucgcguuuuuuuaauauuuaguuuauauuaauaguuagacuuuaucucauuuu

SEQ ID NO: 1951 - RNA, 76 nt, Human
cuaguguauuuacuauuaugcgauugaauugcaguauuuaggauaguuacucauucguuucuuaguguaugacuag

SEQ ID NO: 1952 - RNA, 90 nt, Human
ucggauauauaucaauucuacagaguuuagauuauauauagguauuacaggugauaugauaugauagauuuuuguauugauguauuacga

SEQ ID NO: 1953 - RNA, 86 nt, Human
uuuuagaaaagaauaugacauuuuauuuucacuuauggacauacaguacaugaauuuagaaauaaaaucgucgcaggauucugaaa

SEQ ID NO: 1954 - RNA, 82 nt, Human
gcaugcgauuuguuaaucaugauggagucucagagcuuuugaagagcugaaccgauaugagaaagucuuaaccaguuguugc

SEQ ID NO: 1955 - RNA, 79 nt, Human
uuguaagauacuaaauuuaugcuguuuuaaaccauuauguucaugauaauuuguuacaguagccauagaaaucuaauaa

SEQ ID NO: 1956 - RNA, 89 nt, Human
cucggccuccccuucagcagcuuugaccacucuaaagcccacuacuaucgcuaugaugagcaguugaaccugugccuggagcggcugag

SEQ ID NO: 1957 - RNA, 77 nt, Human
ucacaugacaaugaagcagauauggcucucccgcugguucggcaagccauccccuuugcuuuuacaauacaguguga

SEQ ID NO: 1958 - RNA, 60 nt, Human
cgguugccauggaccagcagcaccuccuugauccgguccugcuggaagcccaugucacug

SEQ ID NO: 1959 - RNA, 67 nt, Human
ggugcugggggcucugcugggccuggccucaaccauggggagccccagcuccagugccuacugcacc

SEQ ID NO: 1960 - RNA, 70 nt, Human
gauaugcagcaaguuuaauaccugaagguuaacauaaaugacaacaggacacagaugcaaugcuacaguc

SEQ ID NO: 1961 - RNA, 70 nt, Human
gcauugcugaggaugagacucaaggcaggggucugcagcucugucacagaguguuaaugcucaacgaugc

SEQ ID NO: 1962 - RNA, 63 nt, Human
gccacuugacucgugucacaaagaauggaguaaacuaacaacucugaaagacaagaggguggc

SEQ ID NO: 1963 - RNA, 64 nt, Human
gcccagugcgggcgcagcggccccggcccuggaagcgccccggcggagcuggcccgcggugggc

SEQ ID NO: 1964 - RNA, 70 nt, Human
gccccgccucguggugccggcugguucuucgcgcucgcccgacuucccagcggccccgugcggcccgggc

SEQ ID NO: 1965 - RNA, 61 nt, Human
gcccugucgauuggggagcagcucacugaacuccuuguaguucucuccaccagcacggggu

SEQ ID NO: 1966 - RNA, 77 nt, Human; identical to SEQ ID NO: 1066

SEQ ID NO: 1967 - RNA, 122 nt, Human; identical to SEQ ID NO: 1067

SEQ ID NO: 1968 - RNA, 76 nt, Human
gucaggccaggggguugcaaauguggguacuuuccgugagaacucauaaggguaguuggggauuuccugaucugau

SEQ ID NO: 1969 - RNA, 94 nt, Human; identical to SEQ ID NO: 807

SEQ ID NO: 1970 - RNA, 76 nt, Human
guggaagaucuuagaauugccugccucauuugcugggaaaaaucagauaggaaguggccuuuaggggaucuuuuac

SEQ ID NO: 1971 - RNA, 77 nt, Human; identical to SEQ ID NO: 796

SEQ ID NO: 1972 - RNA, 91 nt, Human
gaugguuuuagaugauaaccacaggucuacaagagcguuuuuaguaaagugccuguguucauuguggacaaaguuauuauuuugcaacauc

SEQ ID NO: 1973 - RNA, 77 nt, Human; identical to SEQ ID NO: 1066

SEQ ID NO: 1974 - RNA, 70 nt, Human
ugcagggucugagaacaucagagugaaaaacauaauuuugucaaauaaacaugauguugucaagccugca

SEQ ID NO: 1975 - RNA, 61 nt, Human
uuacuaacguuaacaaaauuucuaauauauuugaagauguagaguuuuguguuaugagugg

SEQ ID NO: 1976 - RNA, 61 nt, Human; identical to SEQ ID NO: 1965

SEQ ID NO: 1977 - RNA, 77 nt, Human; identical to SEQ ID NO: 1066

SEQ ID NO: 1978 - RNA, 86 nt, Human
gcugccccauggcuaagcuuuauggguguuaauugaaauuuauacaccaauugauuuuaaaccauaaaaagcugaccacaggcagu

SEQ ID NO: 1979 - RNA, 74 nt, Human
uucuuuuuaaaaaaaccaauuuaaaaauaaaggcaaauaaccuaauuuuuauauaacucaaaguuuuuaaagaa

SEQ ID NO: 1980 - RNA, 77 nt, Human
agccaccuccgccaccccugccccgccgacccagcacaccuaggcagggccuguggggagugggcgccgggagugcu

SEQ ID NO: 1981 - RNA, 99 nt, Human
cugcaggucgacucggccgaguauggcugccucaaggcaucgcgcucuucacgcccgacgccuguggcucucagacccggccacguugagagccugcag

SEQ ID NO: 1982 - RNA, 112 nt, Human
gcagccccccgggcucggcgcuggcggcaguggcgagcggcggagaccucuucccggggcagccgguguccgaacugaucgcgcagcugcugcgcgcugagcccuacccugc

SEQ ID NO: 1983 - RNA, 66 nt, Human
gguggcgcugcugcgccugagcuggagcgagcucuucgugcugaacgcggcgcaggcggcgcugcc

SEQ ID NO: 1984 - RNA, 69 nt, Human
aucacagcugugccaguaauaaggaugcuaacaauuaauuuuaucaaaccuaacugugacagcugugau

SEQ ID NO: 1985 - RNA, 62 nt, Human
ucuucaaaaacaaauugcacugauaaaacaaaaacaaaaguauguuuuaaaugcuuugaagg

SEQ ID NO: 1986 - RNA, 68 nt, Human
ccaggcugcgggccaaccagagcugggaagauucgaacaccgaccucgucccggccccugcaguccgg

SEQ ID NO: 1987 - RNA, 67 nt, Human
cugguaaacaugaacuggacauuuguaagaauauauuucaauauauguacacccauuauguuuucag

SEQ ID NO: 1988 - RNA, 61 nt, Human
gcuacucagcugcuuaagcuggcccacaaguacagaccagagacaaagcaagagaagaagc

SEQ ID NO: 1989 - RNA, 72 nt, Human
ucacccgcuuugugaaauggccccgcuauaucagguugcagcggcagagagccauccucuauaagcggcuga

SEQ ID NO: 1990 - RNA, 68 nt, Human
cucacugcccuggagaaagagaggaaugacaccaccugucccguugcugacucuaaggcuuuuaugag

SEQ ID NO: 1991 - RNA, 131 nt, Human
gagaauacacaaaagagaauagauacuugaaaccacuggaaugacaguuuaucuggugauuuucuuauaaaguucuauuguuacuaguuuccuccucuaucuguacuguugcuucucuuugauuuugucuc

SEQ ID NO: 1992 - RNA, 62 nt, Human
gcugccagcccaacugcuccagugauaguuuuccaccacuucaccgagagccugggcucagc

SEQ ID NO: 1993 - RNA, 82 nt, Human
cuuuggaaaaacaguuagucuggagccuguggcccaggcccuucuguccccaggcaucaucccaacagcucauuuucccuag

SEQ ID NO: 1994 - RNA, 67 nt, Human
gccuguguccacagugcugugaucccgagggaaguccuccagucuaagucacagugcccugacaggu

SEQ ID NO: 1995 - RNA, 65 nt, Human
gccuucguucaagggucaggaauggaccagaacagauggguucuggaggccccugaacagagggc

SEQ ID NO: 1996 - RNA, 78 nt, Human
gguagugcagcuguggguggaggcuggggugucugcacgaagucaggccagcguccuccuccacagccugucacugcc

SEQ ID NO: 1997 - RNA, 82 nt, Human
cuuucugcauuuaauagguuagaauguaaauuaaaguguagcaauagcaacaaaauauuuauucuacuguaaaugacaaaag

SEQ ID NO: 1998 - RNA, 71 nt, Human
gccuugggacgugcccauuuuuacuguaaauuaugauuccguaacugacuuguaguaagcagguuucuggc

SEQ ID NO: 1999 - RNA, 83 nt, Human
ggcaugaguguuggaugccagcgaucagguaagggacaaauuuguggauugacccuuuguccugcacagcaccagacacuccc

SEQ ID NO: 2000 - RNA, 69 nt, Human
guucuggcugcugaggugcuuguccauggcaucgagagacccauaccgcgauauuucuuuagccggauc

SEQ ID NO: 2001 - RNA, 73 nt, Human
gucucugcaagcucuugagucccgccaagaugauauuuuaaaacgucuguaugaguugaaagcugcaguugau

SEQ ID NO: 2002 - RNA, 60 nt, Human
cacgaggccgacgccccaggcgugauccccgggauugugggggcugucguggucgccgug

SEQ ID NO: 2003 - RNA, 80 nt, Human
ugccaacgcagagccagcuguucagcguacucuuuuagagaaauagaagauugucggcagaaacagcccaggcguuggca

SEQ ID NO: 2004 - RNA, 62 nt, Human
auggugacaacaugcuggagccaagugcuaacaugccugguucagggauggacagucaccgu

SEQ ID NO: 2005 - RNA, 90 nt, Human
gcagaaaucuggauggccugaguuugaugacuccggggcaugggcccccauguucgagucccuccgcucuuggcaaaccgguucuucugu

SEQ ID NO: 2006 - RNA, 65 nt, Human
guggaccaggcuguugaagucuggaugcuucuacaaccacucuuccgaugaaaagccugggcugc

SEQ ID NO: 2007 - RNA, 86 nt, Human
aagguguccaggccacagucucaagggcuuucuagcagcuuggggcuccugaaagucuggcugacucugcuucucucggacaccuu

SEQ ID NO: 2008 - RNA, 76 nt, Human
ccugcucugggacagauuccgaagugggagugucauagaucaaucccguguccugaacuugggucccaucacacgg

SEQ ID NO: 2009 - RNA, 79 nt, Human
gugauguccggagauucggagcggcgauaucuggaucuaagucuccgcuccgaugugaagucuaucucugugacaccau

SEQ ID NO: 2010 - RNA, 105 nt, Human
aaugggcaacgugagguggagggaggcgggagaugaaauucuugguugaaacaauagucagaagaaaauaaucuucucauuuuuccucacuuuaguugauucauu

SEQ ID NO: 2011 - RNA, 73 nt, Human
gggacaagggagauggagguaagacagaugaacacaacacagucuuugcugaaggaggucaucccuuguaccc

SEQ ID NO: 2012 - RNA, 69 nt, Human
uacaguaaauauucauugcuguccuacuucaagccagucucaagggauauagaauugaaucagacugua

SEQ ID NO: 2013 - RNA, 82 nt, Human
aagagguggggagggauuacuuugaggcuugggaguuugagacuacucuggggcaaccauagccaagacccucccauuucuu

SEQ ID NO: 2014 - RNA, 76 nt, Human
ucauaucagugaauauuugcuaagaacaggaaagagaagucuuccuuucaaauagcuuauuguucauugggaauga

SEQ ID NO: 2015 - RNA, 64 nt, Human
ugguaggaaagcugcuuggaaauucauaaaggacgaacugggaagaauuuuauaagcgauacca

SEQ ID NO: 2016 - RNA, 69 nt, Human
acaaaaagauguaaauugugacaccaaacacauauguuauuggggguggacuaugugcagacuuuuugu

SEQ ID NO: 2017 - RNA, 95 nt, Human
gacugaguuuugcccuguugccuaggcuggagugcaauggcaugaucucggcucacugcaaccucugccuccuggguucaagugauucuccuguc

SEQ ID NO: 2018 - RNA, 65 nt, Human
agccaguggaucuuagcuugcugggcccuguggggaugggaucugcugagcuagaccacuuggcu

SEQ ID NO: 2019 - RNA, 61 nt, Human
ggcauucccggagacacugagcugugaaaaaaaaacugcugcagcuaacuuggggucugcc

SEQ ID NO: 2020 - RNA, 62 nt, Human
agcauuacauauuguagauuagcauuacagcauuaugcaauuucacacaauucauguuagcu

SEQ ID NO: 2021 - RNA, 68 nt, Human
guuuucuuuuuuuuucaaaauuugacacauuuauuuuauuuuugaguuucauuuuuacaagagaagac

SEQ ID NO: 2022 - RNA, 91 nt, Human; identical to SEQ ID NO: 124

SEQ ID NO: 2023 - RNA, 73 nt, Human
cuggugcaccuuaaggagcugaagccugugccauagccaaagcugguagccaggccauagcugaggucacgag

SEQ ID NO: 2024 - RNA, 82 nt, Human
uaggcgagcucagaucacaucauaccgcugggggucuucguaugauaucauguucugcaucccaaaucaaguggcucuccua

SEQ ID NO: 2025 - RNA, 85 nt, Human
uucacuugggcaggaagucagaggacucagacaccagcuucccaucgcgggucucgaucuucuucacaaccacggcccuggugga

SEQ ID NO: 2026 - RNA, 72 nt, Human; identical to SEQ ID NO: 225

SEQ ID NO: 2027 - RNA, 62 nt, Human
gagaacaggugaaucaguugaauuuguguguaaacggggauaucgucuuucaucacguucuc

SEQ ID NO: 2028 - RNA, 60 nt, Human
cauuggcgugauaauggauuuugcaucaaauaauuguaagggguuauccgagagccagug

SEQ ID NO: 2029 - RNA, 66 nt, Human
guacuacagauuuugccaguaagggggauuuuagacacccguaagugggcuaucaaauguuaguau

SEQ ID NO: 2030 - RNA, 62 nt, Human
caccacugggugcccgcuggcuacgcuugcaugggcgccaucuuugcuggcaccuuguggug

SEQ ID NO: 2031 - RNA, 65 nt, Human
ccgcccagucccggggaccgucccuaccgcgagggucugaggcgcggcugccccggggagggugg

SEQ ID NO: 2032 - RNA, 68 nt, Human
cagcugccuuaagccucugggcauugacguugauaucgauguggagcacggagggaaagaagccgcug

SEQ ID NO: 2033 - RNA, 81 nt, Human
gccaaaaugggaaaggaaaagacucauaucaacauugucgucauuggacacguagauucgggcaaguccaccacuacuggc

SEQ ID NO: 2034 - RNA, 60 nt, Human; identical to SEQ ID NO: 1551

SEQ ID NO: 2035 - RNA, 68 nt, Human
cguccaaaacucauccucuuccccaaggaagcccucgggccccaaagaaggggagacaguucugcuug

SEQ ID NO: 2036 - RNA, 60 nt, Human; identical to SEQ ID NO: 1551

SEQ ID NO: 2037 - RNA, 75 nt, Human; identical to SEQ ID NO: 74

SEQ ID NO: 2038 - RNA, 130 nt, Human
uacacuaaaagugguauauauauauauauauauacacuaaaagugguauauauauauacacuaaaagugguauauguauauauauacacuaaaagugguauauguauauauauacacuaaaagugguaua

SEQ ID NO: 2039 - RNA, 83 nt, Human
cggaggcugcggcugcagaaguaccgccugcggaguaacugcaaagaugcuguccgugcgcguugcugcggccgugguccgcg

SEQ ID NO: 2040 - RNA, 75 nt, Human
gagauguccucuauucuugaagagcguauucucggagcugauaccucuguugaucuugaagaaacugggcguguc

SEQ ID NO: 2041 - RNA, 87 nt, Human; identical to SEQ ID NO: 76

SEQ ID NO: 2042 - RNA, 71 nt, Human; identical to SEQ ID NO: 77

SEQ ID NO: 2043 - RNA, 75 nt, Human; identical to SEQ ID NO: 74

SEQ ID NO: 2044 - RNA, 87 nt, Human; identical to SEQ ID NO: 76

SEQ ID NO: 2045 - RNA, 71 nt, Human; identical to SEQ ID NO: 77

SEQ ID NO: 2046 - RNA, 87 nt, Human; identical to SEQ ID NO: 76

SEQ ID NO: 2047 - RNA, 75 nt, Human; identical to SEQ ID NO: 74

SEQ ID NO: 2048 - RNA, 87 nt, Human; identical to SEQ ID NO: 76

SEQ ID NO: 2049 - RNA, 71 nt, Human; identical to SEQ ID NO: 77

SEQ ID NO: 2050 - RNA, 68 nt, Human
ggagugcaaguagcugaugaaguaugucgcauuuuuuaugacaugaaaguucguaaaugcuccacacc

SEQ ID NO: 2051 - RNA, 60 nt, Human; identical to SEQ ID NO: 1551

SEQ ID NO: 2052 - RNA, 63 nt, Human
uguucuuuauuguccuaaaauugcauaguacuuuugauugugcacgcuuuuaaauagagagca

SEQ ID NO: 2053 - RNA, 64 nt, Human
gcgcucacuugucuucaggaagcucggagccuuugguggagccggggagaggaagggugggugc

SEQ ID NO: 2054 - RNA, 94 nt, Human; identical to SEQ ID NO: 807

SEQ ID NO: 2055 - RNA, 77 nt, Human; identical to SEQ ID NO: 796

SEQ ID NO: 2056 - RNA, 102 nt, Human
agcuggccuucaaccuggacuacuacacagagguucuaggaccucuccuaccugcuugaccaccuggauuucugacccuuucuuccgacacuaacgccagcu

SEQ ID NO: 2057 - RNA, 79 nt, Human
cggcgcggcuaccugccccguuuucccugugaguugaccugcuccgggccgcgggccgccaauggcaggggccgcuccg

SEQ ID NO: 2058 - RNA, 74 nt, Human
gcgugccaagcucgacccccuccgcggccacuacuuccucuucgacugcccaggccagguggagcucugcacgc

SEQ ID NO: 2059 - RNA, 71 nt, Human
gugcccuaaggccccuaacucuugcuggcuguuucuugaccccaagccaggguugggaguccucugggcau

SEQ ID NO: 2060 - RNA, 73 nt, Human
cuuuccuuuguccuggagccucagcagccauaaauuugaaucugcugucuuauuguuccaggacuucagaaag

SEQ ID NO: 2061 - RNA, 62 nt, Human
guggaagcuuguuuaauaucgcucuaccaucauccugaaaggcauaauaauuugaguuacac

SEQ ID NO: 2062 - RNA, 70 nt, Human
uucaagguaguauuaaguguccauauuucucaagccacauucaaggaaaucaugucuuaacuauuuugga

SEQ ID NO: 2063 - RNA, 60 nt, Human
uugcaugcaaguugcugagcugaagggaaagaugauccgcguacugguaaaaagcugcaa

SEQ ID NO: 2064 - RNA, 77 nt, Human
cuccuugcccaaauuugcccccugugugcuacaugaucggaugacucauaacucuaagggccugguuaagcaagcgg

SEQ ID NO: 2065 - RNA, 60 nt, Human
gggauaguuuuggcucccuuggaggcuauguaggcuugucccgggaaagagaacuguccu

SEQ ID NO: 2066 - RNA, 60 nt, Human; identical to SEQ ID NO: 1551

SEQ ID NO: 2067 - RNA, 61 nt, Human
uugucgucauuggacacguagauucgggcaaguccaccacuacuggccaucugaucuauaa

SEQ ID NO: 2068 - RNA, 61 nt, Human
ggugacaacaugcuggagccaagugcuaacaugccuugguucaagggauggcaaagucacc

SEQ ID NO: 2069 - RNA, 79 nt, Human; identical to SEQ ID NO: 1810

SEQ ID NO: 2070 - RNA, 79 nt, Human; identical to SEQ ID NO: 1810

SEQ ID NO: 2071 - RNA, 79 nt, Human; identical to SEQ ID NO: 1810

SEQ ID NO: 2072 - RNA, 70 nt, Human
cggagugucgguggugaugggcaucccgagcgugcggcgcgaggugcacucguaccugacugacacucug

SEQ ID NO: 2073 - RNA, 67 nt, Human
cuucuacccugacuucucccgccuccgagaguccuuuggggaccccaaggagagagucagguggagg

SEQ ID NO: 2074 - RNA, 68 nt, Human
gagaaggaugcgaagcacugugaccggcagaaagccaaccugcggauccgcuucaaaccgucccucuu

SEQ ID NO: 2075 - RNA, 61 nt, Human
guuaugucugggcuguagcuguggucacgugaagaugacagacgaugagcuuguguauaac

SEQ ID NO: 2076 - RNA, 60 nt, Human
ggugacaacaugcuggaaccaagugcuaacaugccuugguucaagggauggaaagucacc

SEQ ID NO: 2077 - RNA, 61 nt, Human; identical to SEQ ID NO: 2067

SEQ ID NO: 2078 - RNA, 65 nt, Human
ccgcagcgaaugaaggcgaacaacgcgagaaccccugaagccuggucccuucauccucgcugugg

SEQ ID NO: 2079 - RNA, 129 nt, Human
uuggacucagaggccggggcucugcgugguuugcuugggagguggagcugcagcgucagagcgccugugacugcguuccaugcggccuauguucacuacugcaguaaucucugggcgccuggguaccag

SEQ ID NO: 2080 - RNA, 61 nt, Human
ccaagggaucugcccaccauuccgggggucaccagcccuuccagugaugagccccccaugg

SEQ ID NO: 2081 - RNA, 73 nt, Human
cuuaggugaugugcuugggaaagucccucccccucuucccaagagacggacauacaagccacgucggccuagg

SEQ ID NO: 2082 - RNA, 81 nt, Human
ggguggugcucggcgacggcgugcagcucccgcccggggacuacagcacgacccccggcggcacgcucuucagcaccaccc

SEQ ID NO: 2083 - RNA, 79 nt, Human; identical to SEQ ID NO: 1810

SEQ ID NO: 2084 - RNA, 75 nt, Human
ucuuuuuuaaaugaauuaaauauugaaacacugugcaccauaguuuacaauauuauguuuccuauuaaaauaaga

SEQ ID NO: 2085 - RNA, 115 nt, Human
cugggucuugcugugcccucccaggcuuaguguucccucccucaaagacugacagccaucguucugcacggggcuuucugcauguaacgccagcuaagcauaguaagaaguccag

SEQ ID NO: 2086 - RNA, 65 nt, Human
gcugcugcgguugccauugcuucuugccuguucuggcaucaggcaccuggauugaguugcacagc

SEQ ID NO: 2087 - RNA, 77 nt, Human
aguugcugcagagggagaaggacaggcagugucguggccuggagcucauugccucagagaacuucugcagccgagcu

SEQ ID NO: 2088 - RNA, 64 nt, Human
cgguuuagcuguggugggucuuguccagccaagacuggcucauuugacuacgacagguggacug

SEQ ID NO: 2089 - RNA, 61 nt, Human
guggagugcaccugggguugggggcacugugcccccagcccccugcuccuuuggacucuac

SEQ ID NO: 2090 - RNA, 80 nt, Human
gcugggaccugcugagacucccccuggagcgggagcagaauggagacagccaccauucaggggacuggcgggggcccagc

SEQ ID NO: 2091 - RNA, 81 nt, Human
gguaggcgguggcuggcgguccgcccgagcccagcgcagugccagcuggugcgagcuuagggccuguugccaccgcaggcc

SEQ ID NO: 2092 - RNA, 65 nt, Human
gucuugcuaggccaggucuuccaggugguuaccggggucacauggauuucugggcggagcgagau

SEQ ID NO: 2093 - RNA, 84 nt, Human
aggaguaguauuugucaucaauccuguacauguagugauacaucgggacugcggguuauaagagagauggacggagacauuccu

SEQ ID NO: 2094 - RNA, 92 nt, Human
cuguggcggggugccuugcccuugugggaccgcccucuuuucggcacgaggucggguuaggguccugggacaagugcggcacgaggcggcgg

SEQ ID NO: 2095 - RNA, 93 nt, Human
ugauguguccuuugcuuuuggugcaguuauguugcuuacuaugcacuauacaauagacuacucauaacaacacauauauaaaaagacacacca

SEQ ID NO: 2096 - RNA, 83 nt, Human
ggagcuggaguucaggaggagucagaagaggcuuucagccuggucggggcugggccucaaggcuaaaguuuuacuuaggcucc

SEQ ID NO: 2097 - RNA, 71 nt, Human
ugucaggcucgggcucuggggccuacaaggagccagccauccucguggggccugagaaccucacccugaca

SEQ ID NO: 2098 - RNA, 71 nt, Human
uuuuauuuuuuuuuggcccccuuggaguuuuggguuucaaauuggggaaaaaguggguuauacggauagga

SEQ ID NO: 2099 - RNA, 71 nt, Human
cccggccuccacaggugccaaaacuaaucgggcagacccuaaaaagucugccagucgcccugggagucggg

SEQ ID NO: 2100 - RNA, 72 nt, Human
cccuuuguagaaucggcacccaauacgcgacgugggcgagcugccaugucacgucgggacucggacaaaggg

SEQ ID NO: 2101 - RNA, 73 nt, Human
cccacucuugaagaagaaggcggcuccuccgggguccaaggugguuggccgcgucuucucccucggaagcggg

SEQ ID NO: 2102 - RNA, 85 nt, Human
aagaggagauaccguagucuagaugucuugagguagaauauaugauggaccacauaguuuaagauuacaagguacuuucccucuu

SEQ ID NO: 2103 - RNA, 80 nt, Human
cucuuguacuugguugcaaacucagaucucuagucuagucuagucuagucuagucuagucaugugugacuguguacugag

SEQ ID NO: 2104 - RNA, 91 nt, Human
uauuuaaugucuuuuuaggaucauaaacauaaauaggucugugauauucaggccuucagaauuuaaggguuuuaaauauagcauucagaug

SEQ ID NO: 2105 - RNA, 62 nt, Human
uccaaugacucuuucuuuaacuuuuuugccccuccugaaguuccugagaguggagaucugga

SEQ ID NO: 2106 - RNA, 67 nt, Human
ucugagagaggcaggcucgcugcagaugggaacagggcuccucucacaguaugccugggcucuugga

SEQ ID NO: 2107 - RNA, 95 nt, Human
gcaguucuugugcuaugggugggagucuucuuccucaaguuucggcagcugugcugcugcuggaugggcugcuccucccagggcucaagggcugu

SEQ ID NO: 2108 - RNA, 62 nt, Human
ugcugcuucuaacagauggccaggaggugacaccgauuucagccauuugccaagguuuagca

SEQ ID NO: 2109 - RNA, 88 nt, Human; identical to SEQ ID NO: 1837

SEQ ID NO: 2110 - RNA, 62 nt, Human
gaagcaguuuuaagauucuugaaggcaaaauuugaaaaacagugaauacuucuaauuguuuc

SEQ ID NO: 2111 - RNA, 74 nt, Human
caguuaagcuuucaugguauguaauuuuccagccuuuugagaaaacaagcauacuauaagugagagcuguuuug

SEQ ID NO: 2112 - RNA, 78 nt, Human
gggugacaugugaucguuuaaauggcauuaagugaauaaagcacacaaacagugcuacucuugaacacuauuuuaccc

SEQ ID NO: 2113 - RNA, 66 nt, Human
uguuuucaccccaacuaucuggugcuauugaaugacuaauucagucccuaaaguucugugaaaaca

SEQ ID NO: 2114 - RNA, 64 nt, Human
ugcaagagaauauuggcaauggagacuucucuguguacagugccagcacccacaaguucuugua

SEQ ID NO: 2115 - RNA, 74 nt, Human
ccggguuggccugaaccugcuuuaugcucagacgguaucagauauugagcguggguggaucuuggucaccaagg

SEQ ID NO: 2116 - RNA, 67 nt, Human
aagauuaccuaggaacaguacgauuugggguuaucacaaauaaacaucuugcgaaacugguauccuu

SEQ ID NO: 2117 - RNA, 66 nt, Human
ggcgaaccugaaaaguuaggucaggcguugacugaagucuaugccaaggccaauagcuucaccguc

SEQ ID NO: 2118 - RNA, 72 nt, Human
gugcaagcccuguugugcuuguauauaauacauguacucucacagaccccaaaacagcugcuuuaaauguac

SEQ ID NO: 2119 - RNA, 64 nt, Human
uacucccuuaauagcuuuaaagacaugcucgccugagaguuaauuuuuggggaaaaagcaagua

SEQ ID NO: 2120 - RNA, 63 nt, Human
agcuaaugagaccaucuuuugcgagcuggggaaccccuucaaacggaaccagaggauggagcu

SEQ ID NO: 2121 - RNA, 100 nt, Human
gccacaccacuacggugaccaucguggaccagaugacacuugggcugcgcuagcuggaggacacauuuggcaaugaugggcagaacccguguggccuggc

SEQ ID NO: 2122 - RNA, 79 nt, Human
gcuguggcaggcgccagcaccagaccugaagcaccccgaacagcaggaccucuucaacuggugcugguacccccacagc

SEQ ID NO: 2123 - RNA, 64 nt, Human
ucucggagagcaggacaucgaauguaaagcgcagaugggacuucgacaggcuucuucucuggga

SEQ ID NO: 2124 - RNA, 89 nt, Human
ggcgcagcuggccugagcugggcgagagguggcagagggcagucauggccucugcugcccaauagccuuccuucuccaccagcggcgcc

SEQ ID NO: 2125 - RNA, 69 nt, Human
gucuugaacccaucuuucuauggcaugccugggcacacccacaccaugauccaugagauuggucacagc

SEQ ID NO: 2126 - RNA, 86 nt, Human
gagcaagauuuuugucucaaaaaaagaaaaaaaaaaaaaaaagaggacuuccuguacuuuaaguugauuuugauaauuauuugcuc

SEQ ID NO: 2127 - RNA, 62 nt, Human
ggcuuccuguauguggcugggcuugguggcucacaccuguaaucccagcacuuugggaggcc

SEQ ID NO: 2128 - RNA, 68 nt, Human
gugucacacuaaaggauucggauguagcuuugcccauuauugagaauuauaaggaucgguuguggcac

SEQ ID NO: 2129 - RNA, 70 nt, Human
gagacuacgggagggacagacacuucgggacucaaugcuuaaguauccagauagucaccagcccaggauc

SEQ ID NO: 2130 - RNA, 70 nt, Human
gacagaauuguacccuguaaccauaaauauguagaauuucuaccauaucaauaagguauaaguuucuguu

SEQ ID NO: 2131 - RNA, 63 nt, Human
uuugggccgcccucggcccccagaaaaguuuuucaaaaccucuuuugggcgccgggccccaga

SEQ ID NO: 2132 - RNA, 67 nt, Human; identical to SEQ ID NO: 1347

SEQ ID NO: 2133 - RNA, 69 nt, Human; identical to SEQ ID NO: 1348

SEQ ID NO: 2134 - RNA, 76 nt, Human
gaagcugaagaagccgcccugguugcacaugccgucggccaugacuguguaugcucuggugguggugucuuacuuc

SEQ ID NO: 2135 - RNA, 87 nt, Human
gaaggaaauaugaaaauuaggauuucagauguuugaacauaaaagauaauuuuaaacauugucaguaaucuauuucuuuuuuuuuuc

SEQ ID NO: 2136 - RNA, 83 nt, Human
caccuguaggaggccagguacaaguucgugcaaagugagaaagaucuuugugggcacgauaaugguaacucccucaucuggug

SEQ ID NO: 2137 - RNA, 66 nt, Human
gagaggcacccuggaucuuuugacgugguucacgugaaagaugccaauggacacaguuugcgacuc

SEQ ID NO: 2138 - RNA, 69 nt, Human
gcaugccauggcucgugguacccaaugaagcaucugaagcgguguggucagcuccaaagcuauggaugc

SEQ ID NO: 2139 - RNA, 60 nt, Human; identical to SEQ ID NO: 1551

SEQ ID NO: 2140 - RNA, 67 nt, Human
ucucaaucauugcuuugugcacgcggaucagguucgccuggacaugcgucauugcuauucauccaga

SEQ ID NO: 2141 - RNA, 75 nt, Human; identical to SEQ ID NO: 74

SEQ ID NO: 2142 - RNA, 87 nt, Human; identical to SEQ ID NO: 76

SEQ ID NO: 2143 - RNA, 72 nt, Human
augccaccaaggcccgggcccaugggcuggagguggagcccucagcccuggaacaaggcuucaggcaggcau

SEQ ID NO: 2144 - RNA, 83 nt, Human
cacaggauguucccuuuguuggcaaaaacauggacggaacuucugaaacaugugagagaaaccauaaagaggaauacuaugug

SEQ ID NO: 2145 - RNA, 84 nt, Human
uuuguuugugacuaugaaggguguggcaaggccuucaucagggacuaccaucugagccgccacauucugacucacacaggagaa

SEQ ID NO: 2146 - RNA, 62 nt, Human
acucguccaacugacaagcccuugcgcccugccucuccaggaugucuacaaaauuggugggu

SEQ ID NO: 2147 - RNA, 74 nt, Human
cuuccuuuuuccagaauuugaaauuguaauagaaacagaagaugagauuaugccugagguuguggaaaaggaag

SEQ ID NO: 2148 - RNA, 67 nt, Human
gauacacaauuuugucaguuuacuuacagugcauacucuuggguaguacuugugcugaccaaguauc

SEQ ID NO: 2149 - RNA, 63 nt, Human
uugagguucuggguauaacuuucuuugguccccuaauauuaaauuuuaccauuugagccuuga

SEQ ID NO: 2150 - RNA, 76 nt, Human
cuuaaacuuccuccaacuuucuucugcuacaagaauagaccagauuauguuagugaagaagaggaggaugaugaag

SEQ ID NO: 2151 - RNA, 72 nt, Human
agccucuucccgguuccauuucccaccucuggacacccauucuccaaccaaugaugugcagccgggacgguu

SEQ ID NO: 2152 - RNA, 65 nt, Human
caagcuggugaugcccaacuacccauucaucaacauucggucaaguggugugguuccucagagug

SEQ ID NO: 2153 - RNA, 61 nt, Human
uaguucaguucuuucaaggguuggaaaucgugccaaaugggauaacauugacgauggacua

SEQ ID NO: 2154 - RNA, 75 nt, Human
ggcugcggcugcagaaguaccgccugcggaguaacugcaaagaugcuguccgugcgcguugcugcggccgugguc

SEQ ID NO: 2155 - RNA, 87 nt, Human; identical to SEQ ID NO: 76

SEQ ID NO: 2156 - RNA, 71 nt, Human; identical to SEQ ID NO: 77

SEQ ID NO: 2157 - RNA, 76 nt, Human
gugcugaccccaggaggggaggggccggccaccaucaagacguuccggacgccggagcucccacccucuucagcac

SEQ ID NO: 2158 - RNA, 106 nt, Human
ggcgagugccucaauggaagcgguacuuucuggcuggcuugagguugauguauguggccuucaucuccucggccucaggguuccgcacaucuuugaaucgcucccc

SEQ ID NO: 2159 - RNA, 60 nt, Human
cuuuucaaggauaggcuuuauucugcaagcaaucaaauaauaaaucuauucugcuaagag

SEQ ID NO: 2160 - RNA, 97 nt, Human
gcugagugaacugcacugugacaagcugcauguggauccugagaacuucaagcuccugggaaaugugcuggugaccguuuuggcaauccauuucggc

SEQ ID NO: 2161 - RNA, 66 nt, Human; identical to SEQ ID NO: 12

SEQ ID NO: 2162 - RNA, 70 nt, Human
cugugucaggaaagucgcucagaugggaagccguguccggcuuuuaagaucgugauucuggaugaagcag

SEQ ID NO: 2163 - RNA, 75 nt, Human
uuuuuuuuugccauuugcuauguuuuauuuugcuaguagcuuauuaaacauaacaugcaaauaaucaaagagaaa

SEQ ID NO: 2164 - RNA, 99 nt, Human
cuaggcugucuuuggcgaggagggccccugcggaaucguggucuauauccccgauacauauucugccucacuggucuaccuuguucuacugcacccugg

SEQ ID NO: 2165 - RNA, 121 nt, Human
ggucuaccuuguucuacugcacccugguugucagcacccuccaucacuucucccugcacaggaggguuggaauacuguggucgacgcccauagggucuccgcauguaguaaggugggaacc

SEQ ID NO: 2166 - RNA, 61 nt, Human
gccauguacguugcuauccaggcugugcuaucccuguacggcucuggccguaccacuuggc

SEQ ID NO: 2167 - RNA, 86 nt, Human
uaaagaaaauguaauucgagcugguuagcuuaauuuugugccauucuuuaacauaagaguaagcucuauuaugaaauacaacuuua

SEQ ID NO: 2168 - RNA, 69 nt, Human
gaaaucacuuaaacuagcaauugcccuuauaaaguggaugauacacugggcuuuugcuuuugugcuuuu

SEQ ID NO: 2169 - RNA, 86 nt, Human
gaccaacaagaugauuuuagcguggacuaggacacuuaaccuaagaagaguuucacuuaaucauucaaaucacuaucugaaggguc

SEQ ID NO: 2170 - RNA, 64 nt, Human
uccugcagacggugagcagugagaagguccgcuccacuaaucucaacugcucagugauugcgga

SEQ ID NO: 2171 - RNA, 74 nt, Human; identical to SEQ ID NO: 365

SEQ ID NO: 2172 - RNA, 102 nt, Human
gaaacagacugggccaauguccacaaagaauuccuggucagcaccaccgauguccaaaggugcaauaucaaggaagggcaggcgugauggcuuauuuguuuu

SEQ ID NO: 2173 - RNA, 86 nt, Human
gauugugugcccccccgaggccgugccggcugccagcaggcccuucgucgcucgucagcgggccguuuccuccaaggcacgucguc

SEQ ID NO: 2174 - RNA, 75 nt, Human; identical to SEQ ID NO: 74

SEQ ID NO: 2175 - RNA, 84 nt, Human
gcguccggcugcggcugcagaaguaccgccugcggaguaacugcaaagaugcuguccgugcgcguugcugcggccgugguccgc

SEQ ID NO: 2176 - RNA, 87 nt, Human; identical to SEQ ID NO: 76

SEQ ID NO: 2177 - RNA, 71 nt, Human; identical to SEQ ID NO: 77

SEQ ID NO: 2178 - RNA, 60 nt, Human
acuagcaacucugugacuacauuuauuuuuauuuuuuuuagagacaggaucuugcuaugu

SEQ ID NO: 2179 - RNA, 99 nt, Human
gagacaggaucuugcuauguugcccaggcuagagagcaguggcuuuucacagacaaagucauaaugcccugcagucuugggcucaagcgauucucucuu

SEQ ID NO: 2180 - RNA, 67 nt, Human
auuauuaaauauauaagcagcuuccuaucuuuuaaauagauauuuaaaugacuuuauauaaaauaau

SEQ ID NO: 2181 - RNA, 99 nt, Human
ugaccuuuaaaauauuauauguuuaagguagggggggaugaaggggggaaugcccuuuuuauuuuucuucccauuuuaaaaauauguguuuucuaggca

SEQ ID NO: 2182 - RNA, 61 nt, Human
uguccucucuugacuucucagagaacagaagggguuccugagcagguagccuggggggaca

SEQ ID NO: 2183 - RNA, 76 nt, Human
cuggccaggcgguggguucucucuagcuuuaguucuacugcaacguucagagcaggcccauagucuuacaggccag

SEQ ID NO: 2184 - RNA, 78 nt, Human
uggaugaguacgaccccgaggacacguggcaggaugaagaguacuucggcagcuauggaacucugguauugcuuucua

SEQ ID NO: 2185 - RNA, 91 nt, Human
auuauuucuguguauauauguuccaaagaaaugcggcuuguauauucaugcuuuucaacuuuuugugauagacaguugauacacaaguagu

SEQ ID NO: 2186 - RNA, 80 nt, Human
cuguccgguugaaacacaacgcgaggaucgggcgugguggcucacgccuguaaucccagcacuuugggaggccgaggcag

SEQ ID NO: 2187 - RNA, 67 nt, Human
cuguuugguagaugcauguuuuuuguuacuuguaauguacaguauucaguucauuuucuuuuugcag

SEQ ID NO: 2188 - RNA, 62 nt, Human
gcugccgcguggcggacacgccagaaggaggaggccuggggcauggccgcguguguggcagc

SEQ ID NO: 2189 - RNA, 66 nt, Human
uaaggcagugaaauucacaaucugcaguuaaaauauaaaagcagcaauucuauguucauagucuug

SEQ ID NO: 2190 - RNA, 74 nt, Human
uaauugcaauggaguugacguuuucccuccuuuuugguuuuaggaggggaauuauuugaaucgugguguaauug

SEQ ID NO: 2191 - RNA, 65 nt, Human
cugccaucauggagcaccugcgggaauuccuguuaacaggccgugaggaccuucagccugugcag

SEQ ID NO: 2192 - RNA, 70 nt, Human
cucugccaauccugccaugcagcuugaccgcuucauccaggugugcacccagcugcaggugcugacagag

SEQ ID NO: 2193 - RNA, 76 nt, Human
gccuuccuccagcagcagggaggggaggacuggcugucucagaaucuuuuaaaagcccugcugucugaggaccugc

SEQ ID NO: 2194 - RNA, 78 nt, Human
ggacuuuuauuuccaccuguugacaggacagcaggaggacugccugcccuuccuggucugacgguugcuguguuguuc

SEQ ID NO: 2195 - RNA, 73 nt, Human
gaugucagaguuuauuuauuaccucuguuguucacaggaagaaacuagggguaucuuaaaaucuucugacauc

SEQ ID NO: 2196 - RNA, 98 nt, Human
auuuauuuuuuguuaucaaagagaauguccagaaacauugaguacuaaagaauuuguucauggcauuguuuuacaaaauuuucuaauggagagugaau

SEQ ID NO: 2197 - RNA, 85 nt, Human
agaugccaggcauguaugcaacagagaaaauccagcugcacagaaacccuguggaggagcagcucaguccagcgugaaggcgucu

SEQ ID NO: 2198 - RNA, 65 nt, Human
auauuuuucuagaaagaacauauuuggcauuuuaaaauaauguuaaaaacagcuuucucaaaugu

SEQ ID NO: 2199 - RNA, 100 nt, Human
ugcugcucuuugucagaauaugucagaaaacaaaacaaaaaaaguuuuaaaugcuaaagauuuuaaaaauuaguucucugaaauuucuguaaagccagua

SEQ ID NO: 2200 - RNA, 67 nt, Human
ugaacucucagucacguggaagccacgggacugcuccgaagccgccauaauaaaaucugauuguuca

SEQ ID NO: 2201 - RNA, 84 nt, Human
gucuucaaaaugggguuuauaguaucaagugaggcuguuugguucuucugaaaacacacucauuuucugacacaugggcuagac

SEQ ID NO: 2202 - RNA, 90 nt, Human
uaggcaccuauuaaaacaucacagaacagguuauauugugguuugaagaacuggauauuccccaauguuuuaacugaguuuaugugccua

SEQ ID NO: 2203 - RNA, 64 nt, Human; identical to SEQ ID NO: 1375

SEQ ID NO: 2204 - RNA, 61 nt, Human
cccaguagccucaagcagcaccaauggggaugacccugacaggugcccucaggggucuggg

SEQ ID NO: 2205 - RNA, 66 nt, Human
caagagaggaagagauggcagcuuuuuaagugaaauuuuaaucuuaucuaucuuuuguucauuuug

SEQ ID NO: 2206 - RNA, 83 nt, Human
caggggggugcgagcugguauggaugcccuccugggguuccugggggcucugcacauccagacuccaguuuguccacccccug

SEQ ID NO: 2207 - RNA, 76 nt, Human
gacuggugaggugggacccagcccaggccucgcuggcaccuccagcugccugccuauggucccacuggcauugcuc

SEQ ID NO: 2208 - RNA, 83 nt, Human
gagccggccagcccugacaguccaaaggguuccucgggagacagagaccgagccuccuguggcccuggccccugguccagcuc

SEQ ID NO: 2209 - RNA, 97 nt, Human
guaucauuucugauauaaaguuacuuaaaaaaauccagggucuuggggaauucacaaaucauaacuaggaagguaacuuuuauuaauuuaaugguac

SEQ ID NO: 2210 - RNA, 74 nt, Human
gaagguauuuguuuuucggucuuugaggaagaaccacaccguuuuccacaacgguugaacuaauuuccacuuuc

SEQ ID NO: 2211 - RNA, 108 nt, Human
uguguaagcauuccuuuuucucugcaaccucgccagcaucuguuuuuuguuuguuuuuugagacggaguuuugcuuuuguugccuggggcugggagugcaauggcacg

SEQ ID NO: 2212 - RNA, 67 nt, Human
aaguccuuuuagguggcccuuccaguugaggcaucuccuuagauuuaggccuuccucuuuugggcuu

SEQ ID NO: 2213 - RNA, 99 nt, Human
augguugucacuuucagauucuagcuugcuuggacuuucaguggcaacaaauggagccacugacaguacagguggcuucaucuugacuggugaccucau

SEQ ID NO: 2214 - RNA, 67 nt, Human
ggucacucauacuacagacacuuggccuaugacugucaucuaggucaucuggauccugaaguugauc

SEQ ID NO: 2215 - RNA, 62 nt, Human
guuugaaggaagggauuucaauuucuggcuguaaaauuggggguucuuguucuuccuuagac

SEQ ID NO: 2216 - RNA, 71 nt, Human
caaggagagagcugggcuuuccaaguuaccugaccuuaaagaugcugaagcuguucagaaguucuuccuug

SEQ ID NO: 2217 - RNA, 77 nt, Human
gacucugaggccuggagugugcucaccucucuaauccggaagaugggaagagcauuaaugcuggaggccacaagguu

SEQ ID NO: 2218 - RNA, 69 nt, Human
gaagcuaagcaacugcaucaucagccacauucaaucgaauuaauacuguuguccccaguccguaguuuu

SEQ ID NO: 2219 - RNA, 109 nt, Human
uugagacagacagggucuugcucuguugcccaggcugggaaugcaguggcgccaucuuggcucacugcaaccucugccucccggguucaaggcaagucuugcgucucag

SEQ ID NO: 2220 - RNA, 98 nt, Human
gauucuacauuauggugaguuguagaauuauuuaauuauauauuacaaaguaaugauaguagaaauaaaguacacaauaaauguaaugugcuagaauc

SEQ ID NO: 2221 - RNA, 102 nt, Human
aguaggcauacaauaaccuaaagaucucauagaaguauacugagagucuaaaauacauucuaguagugcaugucuuggugugcuuuuguuuguuugcuuucu

SEQ ID NO: 2222 - RNA, 76 nt, Human
cuugaaugauaagcuugccuugcucuuuggaaaaugaugauuguuauuacagaagugaaacaaacuucuauucagg

SEQ ID NO: 2223 - RNA, 70 nt, Human
gguggacagaaagaguuuguaugccgcaagacaauauuuuguucaguggugugcagacagaaauuucacc

SEQ ID NO: 2224 - RNA, 67 nt, Human
aggaagaaggauuacuaaauuagaucagauuuugcuaaauggaaauaauauaacaaugcugguuccu

SEQ ID NO: 2225 - RNA, 83 nt, Human
cuggguaauggugggucuuaauggaggcuggguggaccacugcccguccacucuucaacaggaggaacagcaugccaccacag

SEQ ID NO: 2226 - RNA, 78 nt, Human
gcucagccuuuuccccacucuuaaauacuguacuacuucacuguaagaacgaaagaauaguuaggauaccaauugagu

SEQ ID NO: 2227 - RNA, 77 nt, Human
ggguuccuguucacucuugacucuguggcaaauuguauuuacaguagaccgcugacguuucccaaguggacagaucc

SEQ ID NO: 2228 - RNA, 64 nt, Human
aaaauuauuacuguaagaaauaguuuuauaaacaaauuauauuuuuauucaguaauuuaauuuu

SEQ ID NO: 2229 - RNA, 66 nt, Human
aguauuucacuuuucucgaucacuaaacauaugcauauauuuuuaaaaaucaguaaaagcauuacu

SEQ ID NO: 2230 - RNA, 118 nt, Human
guaucagaggggccaguagagcuugggacagaacgacacagaaacuuggguguuaggguaacuugacuuauugcaccuaguauuuccagacuuucccacuucuuauacucuucuuuac

SEQ ID NO: 2231 - RNA, 82 nt, Human
uaaguguagacuuaauaccaugugacauuuaauccagauuguaaaugcucauuuaugguuaaugacauugaagguacauuua

SEQ ID NO: 2232 - RNA, 63 nt, Human
ucuguauuuuaaaggauccaacagaucaguauuuuuuccugugauggguuuuuugaaauuuga

SEQ ID NO: 2233 - RNA, 78 nt, Human
aaacauguucaccuaaaugcacuugauggguguugaaauguccacccuuucuuuaaauuuuuaagaugaaauuaguuu

SEQ ID NO: 2234 - RNA, 79 nt, Human
agaugucuuauuauuaaaguuaccuauuauuguuggaaauaaacuaauuuguauggguuuagaugguaacauggcauuu

SEQ ID NO: 2235 - RNA, 73 nt, Human
ggcuugauuugcuuggugaccgaauuacuaggugacuaguuuacuaacuaggucauucaaggaacgucaaguu

SEQ ID NO: 2236 - RNA, 68 nt, Human
agucuauuccagguagacaggccugcaggggguccaaccccuacaggccccucugucuggaauagacu

SEQ ID NO: 2237 - RNA, 62 nt, Human
uagaaagcagaccuguuucaggguucggggaagguuguucgauaugaacuggguccucucua

SEQ ID NO: 2238 - RNA, 63 nt, Human
ugacuucuuccuagaaagaauggaagaauguuuauguuagaacauuuuaucuauucuuuguca

SEQ ID NO: 2239 - RNA, 89 nt, Human
gcuggugggggauaaucugcagucuuacuuuuaaguuagaaacaccaauaaauuuaguauacagacgacagugaacuuucacuuacagc

SEQ ID NO: 2240 - RNA, 80 nt, Human
ggggaacacaggagcguaccacuacacuugggcugauuuuuuguaaauuuuguaggagacagggucucccuguguugccc

SEQ ID NO: 2241 - RNA, 63 nt, Human
cggcgcguggggcucgcgcggcccagucaugcucacgcccccccucgcgcgccucacgccccg

SEQ ID NO: 2242 - RNA, 63 nt, Human
gaaacguggaacgggauacaccaaagugguugaucaccaccaugccccagcccccgcguccuc

SEQ ID NO: 2243 - RNA, 67 nt, Human
gggcaccgcgagagcguacuuacaucggggucccgacaggugucccucccggcgccucguguugccc

SEQ ID NO: 2244 - RNA, 81 nt, Human
guuuuauaauuccuuaaaacagcugaaaauugggacaacauacuuuacgcaaugaacaguaguuaaauagggaaauaaaac

SEQ ID NO: 2245 - RNA, 60 nt, Human
cuguaguucuaaguauuaguaaauauuaaugguuaauuaguauuaaagauuaggcuauag

SEQ ID NO: 2246 - RNA, 74 nt, Human
gcagguucuggagaacacuucagugccagcauuaaccgauuagcugcugggcuguggggaguuuccagagaggc

SEQ ID NO: 2247 - RNA, 120 nt, Human
gagcaaagguuuuuaguaauugaauuucucugcaguaguccuucaagcacuugaauguaaaccuuuagcauuuauucguuuaaugacuacugauacgaaucucaagcagauuucuugcuc

SEQ ID NO: 2248 - RNA, 71 nt, Human
uuauguuucacugaguucugguuuguguagcuauauuuuauauagcuagauauuccucacagugaacauga

SEQ ID NO: 2249 - RNA, 90 nt, Human
uuggccccgcccgagaagagaagggcuuuuucagaaccgcucuuguugcuuuccaaaaagccggccgucuacaaacacggggggggccaa

SEQ ID NO: 2250 - RNA, 68 nt, Human
uuuuuugaaagccacuauuuuaugaaccaaguagaacaagauauuugaaauggaaacuauucaaaaaa

SEQ ID NO: 2251 - RNA, 85 nt, Human; identical to SEQ ID NO: 866

SEQ ID NO: 2252 - RNA, 71 nt, Human
uuguuaaccuuguaagauggauaauguguauaagaauguaggccuuaacuauuucacaugagucaaaacaa

SEQ ID NO: 2253 - RNA, 64 nt, Human
uauguugguuuagagaaagaaauuggauguaauuuuaugcaauuuacuuuuaaagacaaacaua

SEQ ID NO: 2254 - RNA, 71 nt, Human
ucacaaauggcagaacaguauguaaagcugguaacaccucgguuucagugcaccauguguuugcuuuguga

SEQ ID NO: 2255 - RNA, 64 nt, Human
ccagguucugaaaagaucaggagacuaguugaagucuugagaacugauguaauucguggccugg

SEQ ID NO: 2256 - RNA, 81 nt, Human
cuguuuuauaucucuuuuuuauaucucuuuggcguuucccuacagaaaagaaauuggacagaacagaauaauaugaagcag

SEQ ID NO: 2257 - RNA, 70 nt, Human
gcuuuuagagcagguguaugaucuuuggaggaggaggaugaauuugauagagagguacguuugcgggagc

SEQ ID NO: 2258 - RNA, 69 nt, Human
uuuguccuaaucugcugccagaauuaaagaccuauuuuuagaggauuuggcuuaaaaagcaagggcaaa

SEQ ID NO: 2259 - RNA, 81 nt, Human
ggucucuucagagcugcugugcccaguggugcuucaacugguaucuaugaggcccuagagcuccgggacaaugauaagacu

SEQ ID NO: 2260 - RNA, 72 nt, Human
ggguggcagcaccaggggacacaccugccaaacccaccagauggaggggcccucccuggucucuggccaccc

SEQ ID NO: 2261 - RNA, 70 nt, Human
agggagaagcuggugcuaccgucgccccugggacuucgaggcaggagaugggccaccgcccggcaucccu

SEQ ID NO: 2262 - RNA, 93 nt, Human
ccuuuccuuuucuggggggaaagggaaaauuuuugggggggauuuccccgagaaaaccccccuuuucaacuuuccuaccauaaaaaggggggg

SEQ ID NO: 2263 - RNA, 63 nt, Human
caguacagcuucuggcucuaugagcucugugaugucuacuuggagugccugaaaccuguacug

SEQ ID NO: 2264 - RNA, 61 nt, Human
gccucuggguuacccccuacccgggagcccuucgaaugcuuccuggaaggacccccgaggc

SEQ ID NO: 2265 - RNA, 86 nt, Human
ccugccaggugaaaggaaauauugcacuuucuguucucaugacuaaggggacaggaguuccagaagaaccuuucaagaugaucagg

SEQ ID NO: 2266 - RNA, 66 nt, Human
ggaaaguguauuuaacagaagauuaaaaauauaaauguagaagaucuguuuguuuauauauuuuuc

SEQ ID NO: 2267 - RNA, 77 nt, Human
gcacucuccgagucgcugaagccgcugcugucgcugacacugggcgcugcugcggccuuucaugcgcuccagggugc

SEQ ID NO: 2268 - RNA, 66 nt, Human
ucuagcucuuuugugucuccuaauuuagcuuucugaggagugacaguggcagagagaagagcuggg

SEQ ID NO: 2269 - RNA, 102 nt, Human
acucacaaagauauucucacuuagucaacuccugucaaaaugaaggugaacuggcauggcccgaucacuguccauaagggagaaaguggcucauuccugggu

SEQ ID NO: 2270 - RNA, 67 nt, Human
cuggguagaaguaugggugguuaucauuucaaaauuauugugauucucaccucccuccccaccucag

SEQ ID NO: 2271 - RNA, 73 nt, Human
gcaagguuaaaguggguaaucauaagcuccuuuuuaucaaugaaguuugaaguuuuucuauuuuucacuuugc

SEQ ID NO: 2272 - RNA, 91 nt, Human
agccuguccaucaugguguuaaccagcuaaaguuugcucgaagccuucaguccguugcagaggagcgagcugggacgccacugugggggcu

SEQ ID NO: 2273 - RNA, 115 nt, Human
gccugauaaagcgcgccuacugggcuacaaggccaagcaagguuacguuauauauaggauucguguucgccgugguggccgaaaacgcccaguuccuaagggugcaacuuacggc

SEQ ID NO: 2274 - RNA, 82 nt, Human
ggaaugaccugucacuauaauauacuguauguuuacauuuuauuuaaauuuaaucucuuauguauaggggugauaaccuucc

SEQ ID NO: 2275 - RNA, 75 nt, Human
uuuuagugauuauuaagcacuucugucagucuuugaaaaaagaacguauuuuuugugcuuugaagaucucugaag

SEQ ID NO: 2276 - RNA, 79 nt, Human
ccccugggaagaggccccgccuggagcacuaggcccccacccugcugcugccuuccagugcugucauuuucuucagggg

SEQ ID NO: 2277 - RNA, 89 nt, Human
cugugcucacucugguuuucugcucagggucugaagcagcugcugucucccuccucugcccccauccccuggcucuccccugggcacag

SEQ ID NO: 2278 - RNA, 78 nt, Human
gggagcaggcagccacacacgggccuugcaaccuugucagagaaaaggcgaacagggcccucacccugccugucuccc

SEQ ID NO: 2279 - RNA, 61 nt, Human; identical to SEQ ID NO: 1965

SEQ ID NO: 2280 - RNA, 77 nt, Human; identical to SEQ ID NO: 1066

SEQ ID NO: 2281 - RNA, 68 nt, Human
ggugagauguagcaguaaucagcucccagcgacguguguagcuggggcugccgcucgcaauauucacu

SEQ ID NO: 2282 - RNA, 65 nt, Human
gaggcugguggucuugagcuuuuggccuggaauuccagucugaauuuucaaauauucccugccuc

SEQ ID NO: 2283 - RNA, 67 nt, Human
gaguguccguugaaagcaauaaggaauuccagaacagaacugcacuucuugucccucucucacacuu

SEQ ID NO: 2284 - RNA, 61 nt, Human; identical to SEQ ID NO: 1965

SEQ ID NO: 2285 - RNA, 77 nt, Human; identical to SEQ ID NO: 1066

SEQ ID NO: 2286 - RNA, 122 nt, Human; identical to SEQ ID NO: 1067

SEQ ID NO: 2287 - RNA, 60 nt, Human
cacuggcugacucucccauaucugcaagagauucugcaggaacugggugugcacacggug

SEQ ID NO: 2288 - RNA, 67 nt, Human
gauuuggguuuuguugggguuuuuguuacuguuuuaaauuacaguaggcuucuauauauccuggauu

SEQ ID NO: 2289 - RNA, 75 nt, Human
aacagugaaaaauuaguuugguuagaagaaccaucuggaaacacaccagcuucugcuaccuucaugcucauuguu

SEQ ID NO: 2290 - RNA, 61 nt, Human; identical to SEQ ID NO: 1965

SEQ ID NO: 2291 - RNA, 77 nt, Human; identical to SEQ ID NO: 1066

SEQ ID NO: 2292 - RNA, 65 nt, Human
ggccugggagggcaugggucaagggcguccgggaagcuggagcucuuccugcugaccuuccggcc

SEQ ID NO: 2293 - RNA, 78 nt, Human
guugcccgagccguugccgucguaacuaggcguccuggaaguccacgucguuuaccguuuguaaggcgcuugcgcagc

SEQ ID NO: 2294 - RNA, 70 nt, Human
cacacaaugaaugaucaccugcaugucggcagccacgcucacggacagauccagguucaacaguuguuug

SEQ ID NO: 2295 - RNA, 77 nt, Human
ggcucggugcaggggccacccggagcggaguggggacuggcccgcccucccccaucgcccugccgccucuccgggcc

SEQ ID NO: 2296 - RNA, 61 nt, Human
gugcucacgacacaaccaaaugggcuuacaacagugggcaaaacgggcuugccaguggugc

SEQ ID NO: 2297 - RNA, 61 nt, Human; identical to SEQ ID NO: 1965

SEQ ID NO: 2298 - RNA, 77 nt, Human; identical to SEQ ID NO: 1066

SEQ ID NO: 2299 - RNA, 122 nt, Human; identical to SEQ ID NO: 1067

SEQ ID NO: 2300 - RNA, 90 nt, Human
agauggugguaacaguuggacacuauuucuuggcaaaaccguggaaaaacacguucuacaccagcagguggcaaauuguggccgccaucu

SEQ ID NO: 2301 - RNA, 71 nt, Human
gcucacaaucgagcacacgcgugugcacacacaugugcacagaucagugucagaagcaucgaccugcgagc

SEQ ID NO: 2302 - RNA, 61 nt, Human; identical to SEQ ID NO: 1965

SEQ ID NO: 2303 - RNA, 77 nt, Human; identical to SEQ ID NO: 1066

SEQ ID NO: 2304 - RNA, 87 nt, Human
agagucccacuuuguugcccaggcuggagugcaguaggcaugaucuuggcucacugcaaccuccaccuccuggguucaagcgauucu

SEQ ID NO: 2305 - RNA, 68 nt, Human
gagaugggguuucaccauguuggccaggcuggucuugaacuccugaccucaggugauccacccaccuc

SEQ ID NO: 2306 - RNA, 98 nt, Human
guucaggaaaaacuaaguucccauuacuuccagauuauuuuaaaauaaaaaaucaugaugacuugugaggaaaaggaagaacaugucagauccugagc

SEQ ID NO: 2307 - RNA, 77 nt, Human
ccaaagucuggggguuagaaagaaggaagcuugacccaaacaaaguuucauuuacaguauauacagucaggccuugg

SEQ ID NO: 2308 - RNA, 78 nt, Human
gggcgugagcugcaggaagcacauuuggcuuggcaggagcugucaggaaggggaagcggguuuccugcgauucugccu

SEQ ID NO: 2309 - RNA, 61 nt, Human; identical to SEQ ID NO: 1965

SEQ ID NO: 2310 - RNA, 77 nt, Human; identical to SEQ ID NO: 1066

SEQ ID NO: 2311 - RNA, 77 nt, Human; identical to SEQ ID NO: 1066

SEQ ID NO: 2312 - RNA, 122 nt, Human; identical to SEQ ID NO: 1067

SEQ ID NO: 2313 - RNA, 61 nt, Human; identical to SEQ ID NO: 1068

SEQ ID NO: 2314 - RNA, 61 nt, Human; identical to SEQ ID NO: 1965

SEQ ID NO: 2315 - RNA, 77 nt, Human
gcugacugcccgccccuggcuccaucugcagaugucuucagagacgagauguacuuggaccagaaggagcagucggc

SEQ ID NO: 2316 - RNA, 61 nt, Human
ccaacccaugaugggcaggagggcuaaucuugaggggccuuugugucaccaugggcuaugg

SEQ ID NO: 2317 - RNA, 67 nt, Human
cuguagagacagggagacagggcuuggggacguuccccucagcuugcugucaaguuaccuucugcag

SEQ ID NO: 2318 - RNA, 80 nt, Human
uaugauuuccacugugcccagccucagggcaucagcuucuucuggagcgcugugaaggcugggccacgcagaggagcaug

SEQ ID NO: 2319 - RNA, 62 nt, Human
cuaagauaguucagauugaucuuaggucaaugguaagaccuauguaguucaugaagucuugg

SEQ ID NO: 2320 - RNA, 69 nt, Human; identical to SEQ ID NO: 994

SEQ ID NO: 2321 - RNA, 79 nt, Human; identical to SEQ ID NO: 995

SEQ ID NO: 2322 - RNA, 85 nt, Human
gcacagggaaaucucaguuccucaaauaugcagcaaagauuacaccaagaucugugcugaccacaggaauuggaucuacuagugc

SEQ ID NO: 2323 - RNA, 75 nt, Human
uauuggcuagcuugugcccucaaguguuuggaauguaucuaguaaagcuugcuguggccauggugcuggcuggug

SEQ ID NO: 2324 - RNA, 74 nt, Human
gacugcgggacggacgguggacgcugggacgcguuuguagcuccggccccgccguuccgacccccgccgccguc

SEQ ID NO: 2325 - RNA, 113 nt, Human
gggagucugcuacaccauuuuugauuugggcuuccgcuuugauguggcaugguuccugacggagacuucgcccuucaugugguccaaccugggcauuggccuagcuaucuccc

SEQ ID NO: 2326 - RNA, 89 nt, Human
ggacccuuguggcuccacuuguccucaccagucgggacuucagcugaaccucugagugccaaggacaccacuggaacucacaaaggucu

SEQ ID NO: 2327 - RNA, 64 nt, Human
uauaucagaaggugagauugaauaaugcuugaugcagaaucgaaacuucucauuuaucuguaua

SEQ ID NO: 2328 - RNA, 63 nt, Human; identical to SEQ ID NO: 527

SEQ ID NO: 2329 - RNA, 69 nt, Human; identical to SEQ ID NO: 528

SEQ ID NO: 2330 - RNA, 68 nt, Human
cggcccaggguucacgcgggccggguagaggcucgagccgggacccccgagcgugaaccccggagccg

SEQ ID NO: 2331 - RNA, 70 nt, Human
agagcuuccucaucagguuacccagaagugggucccauccaccauccaggugugcuuggauguuaguucu

SEQ ID NO: 2332 - RNA, 77 nt, Human
ugggggagcgggggaaggaguuaaugaaacuguauugcacaaugcucugaucaauccuucuuuuucucuuuugccca

SEQ ID NO: 2333 - RNA, 80 nt, Human; identical to SEQ ID NO: 367

SEQ ID NO: 2334 - RNA, 65 nt, Human
caccaaauggcucccuuugcccaagugaaagccgaaaggucagcggcuggcuggggaggcaggug

SEQ ID NO: 2335 - RNA, 72 nt, Human
ccagaguucuuagagcuugugucuaaaggguaauuccccaacccuuccuuaugagcauuuuuagaacauugg

SEQ ID NO: 2336 - RNA, 85 nt, Human
guuccagguuuauuuaauuccaaaggugagaguuggagugagaugucuuccauaucuauaccuuugugcacaguugaaugggaac

SEQ ID NO: 2337 - RNA, 85 nt, Human
cagcucuccggucaucuuugcagguggucaggccuauaccauucaaggacaguaugccauuccacagccagauuugaccaagcug

SEQ ID NO: 2338 - RNA, 89 nt, Human
gaugucuggggcgcagaucaaaauugcgaacccaguggaaggaucuacugauaggcagguuaccaucacuggaucugcugcccagcauu

SEQ ID NO: 2339 - RNA, 110 nt, Human
cucucaccugaauuuugugguagaaagucuguauuuguuguugugagcguguuaaauugauaacaaaccaaacuacuugauagcuaaagcagauuguuucggguggggag

SEQ ID NO: 2340 - RNA, 69 nt, Human
ugugugugugaagucuuaaauguuuuauuagucuacagcuaaucaguuuauuguaauauuguauguaca

SEQ ID NO: 2341 - RNA, 68 nt, Human
gccacuuuccagcuccacuucaaauuccuuaaaauauaacugaaauugcuguggggaggggggagggc

SEQ ID NO: 2342 - RNA, 85 nt, Human
ggaaaauuaaacuuuaauuuauugacauugacauagcucuguguaaauagaauugcaacugucagguuuuguguucuuguuuucc

SEQ ID NO: 2343 - RNA, 68 nt, Human
uuucuuuuuuaauguccaaaagugggggaaagugcuauuuccuauuuucaccaaaauuggggaaggag

SEQ ID NO: 2344 - RNA, 86 nt, Human
gcccucgcccggccugucagcgcugcucuccgccgcagcuucagcaccucggcccagaacaaugcuaaaguagcugugcuaggggc

SEQ ID NO: 2345 - RNA, 63 nt, Human
aggagaagcugugcuacgucgcccuggacuuucgagcaggagauggcaccgccggauucuccu

SEQ ID NO: 2346 - RNA, 71 nt, Human
ggucccggugucccggaggcgcuguuccaggcuuccuuccuggguauggaaucuugcggguucccgagacc

SEQ ID NO: 2347 - RNA, 93 nt, Human
cauugcugucagggguguuggcuacuccgccagcuguugaaaaaaggagaaagaaagagagcaaacugagauccacacaccccacacaguaug

SEQ ID NO: 2348 - RNA, 65 nt, Human
gcuauuaggaugcaggccuugccagaacuaccacuggcaauacagguuuuggugcccugacaggc

SEQ ID NO: 2349 - RNA, 64 nt, Human
gguuggccugacaaauuaugcugcagcauaugguacuggccugcugcuggcccgcaggcuucuc

SEQ ID NO: 2350 - RNA, 62 nt, Human
guggaggugacuggugaugaauacaauguggaaagcauugauggucagccaggugccuucac

SEQ ID NO: 2351 - RNA, 89 nt, Human
aggguuuuaaacacuaaucacaaacuggaaugacuugacuucaaaaggcaacaaccuuaaagggccgucauuuccauuagguauucccu

SEQ ID NO: 2352 - RNA, 61 nt, Human
gguuuuuaaagacuaggauauugaaugugaaacauccguuuucauuguucacuucuaaacc

SEQ ID NO: 2353 - RNA, 69 nt, Human
uagugaaacauguacuuugagcuuauuguuuuuauucuguauuaaauauuuucaggguuuuaaacacua

SEQ ID NO: 2354 - RNA, 89 nt, Human
gaguuagaguugagcuccccuguagcccaggacuaugcuguagauaucaguaugauccugggguguggcaaaaacaauuuucuuuauuc

SEQ ID NO: 2355 - RNA, 79 nt, Human
ccugccccaucccuuccccagugcacucugaccuagcuagugccuggugcccagugaccugggggagccuggcugcagg

SEQ ID NO: 2356 - RNA, 122 nt, Human
cacuuacaaagucauuguuugaacuuggcucuuguuuaaccucuguaaaccucaguuuucuuguuuauucaguggggcuaauacuugaguuacuguaaacauuaaaugggaugauguaugug

SEQ ID NO: 2357 - RNA, 78 nt, Human
cuguaggaauugugugcauuccauucacacaguauuucuuuagggaugcugugaugauuugaauuacaaauccuacag

SEQ ID NO: 2358 - RNA, 92 nt, Human
ugugcaaggugaggacaggccccgaaugcuuaugaugcuuucacagaaugugucauaccgugccucgggguugaccacauagugcuugcaca

SEQ ID NO: 2359 - RNA, 73 nt, Human
caugauccaugucuucacugcuacagucuggcucaaaauaaaugccuucuuuauagaacaggaaggacucaug

SEQ ID NO: 2360 - RNA, 73 nt, Human
gcaucaauagcaacagaaaugggccccacaguugcaacugccuucaucagggccuucuccugcuuagggaugu

SEQ ID NO: 2361 - RNA, 61 nt, Human
auuucacugagauccagaaaguagcaauauaggacuuuuagggguauguauuaguguaaau

SEQ ID NO: 2362 - RNA, 75 nt, Human
uuuuuacugacaacuaauaaacacuguauguguacauauucauauacacuguggacuggagaaagucaguaugga

SEQ ID NO: 2363 - RNA, 93 nt, Human
uucugaagaauuaacccuuggucgcaauuacuugaaacuggacacgagacaagagccaagaacaaaauugcacaaggaaaccaacaauaagaa

SEQ ID NO: 2364 - RNA, 80 nt, Human
gcugucugguguugcauuagugaagauacucccuacaacuacauggguaccccagagacuaugacgaaucacuuuacagc

SEQ ID NO: 2365 - RNA, 64 nt, Human
uaugaauaaaugaacauuugcaauuuuaaaaucccaauucacuugccaauguugcaaauucaua

SEQ ID NO: 2366 - RNA, 77 nt, Human
ucaccuguaaaccugagucguacagaaagcugccugguauauccaaaagcuuuuuauuccuccugcucauauuguga

SEQ ID NO: 2367 - RNA, 74 nt, Human
gugaguccauggcuaaaucaaagcugccccugagaagagacuuaauccaagccugauuguacuaguggcaucac

SEQ ID NO: 2368 - RNA, 80 nt, Human
cacgguauuguacacggucaucuguugaaacagauuucuuuuuuaacagaucuuaguuuaaaaaagucuuagguacugug

SEQ ID NO: 2369 - RNA, 79 nt, Human
gcauaaucggucacucguauagaacaguauuguuucuauaauuugaagcuuucugaauggacggguucaggccugaugc

SEQ ID NO: 2370 - RNA, 73 nt, Human
guucuguauaaacugguggacaguaaguuaguuccuuuguuuuaacuuauaagccucaacuucaccgcagaau

SEQ ID NO: 2371 - RNA, 84 nt, Human; identical to SEQ ID NO: 286

SEQ ID NO: 2372 - RNA, 64 nt, Human; identical to SEQ ID NO: 287

SEQ ID NO: 2373 - RNA, 103 nt, Human; identical to SEQ ID NO: 294

SEQ ID NO: 2374 - RNA, 117 nt, Human
cuaauuuuugaggugcugauuuagaggcaaaauugcagaauaacaaagaaaugguauuucaaguuuuuuuuuuauaagcaauguaauuaugcuauucacaggggccucaagaauugg

SEQ ID NO: 2375 - RNA, 76 nt, Human
gagacucuaugucugcccguccaucagugaacucauuaaaacuugugcaguguugcuggagcuggccuggugucuc

SEQ ID NO: 2376 - RNA, 124 nt, Human
guucauuaauuuucagcuucgaagguggagggaacauucugcuuuucaggcaccagcugugaagaagaaaccaacaguaacuaaaggcagaucuucuaaaaaaggaacagaaaauggugugaau

SEQ ID NO: 2377 - RNA, 69 nt, Human; identical to SEQ ID NO: 1010

SEQ ID NO: 2378 - RNA, 67 nt, Human
acuuuuccuuuguuuuuuaacuacacacagauuucuaccucugggcucuuuaaaaaucaaagguagu

SEQ ID NO: 2379 - RNA, 68 nt, Human
gccuguccuuaccuccgccugcgagagccacagcaaggagcucagccagccgugguggggugcagagu

SEQ ID NO: 2380 - RNA, 67 nt, Human
ggucguguuuuccuccuggggccaaucacagaggcaauagugggaguccugggggaggggcauggcu

SEQ ID NO: 2381 - RNA, 95 nt, Human
uuuuagagagucaaaauggaaauaacacauuguccacauagcuacugugaaagcuguaauacagaguuauccuuuauuuugacacauuuuuaaaa

SEQ ID NO: 2382 - RNA, 64 nt, Human
ugguaacuacacuuuaugguauaggguucugacuaaccuuuauuaccccauaaguuuguuucca

SEQ ID NO: 2383 - RNA, 93 nt, Human
caugaguucauuacaauagugcugauaaaugccuugaccauauaauagcaaacaagggcaaaacauuuagugcacaauauuuuaauacacgug

SEQ ID NO: 2384 - RNA, 60 nt, Human
gguacagauuauuuuaaauaaaaacuacaauauuuuuagcaacaaaauaauaggaaugcc

SEQ ID NO: 2385 - RNA, 130 nt, Human
ggcaccgugacugugaucagcccccuggagcuuaugcggacaaagcugcaggcucagcaugugucguaccgggagcugggugccuguguucgaacugcaguggcucaggguggcuggcgcucacuguggc

SEQ ID NO: 2386 - RNA, 65 nt, Human
gguguccuggagccucuguaccugugcccaaauggugcccgcugugccaccugguuucaagaccc

SEQ ID NO: 2387 - RNA, 93 nt, Human
auggugcuaaggaaauuugcuaugcucuucgagcugaggguuauugggcugacuuuauugacccaucaucugguuuggcauuuuuuggaccau

SEQ ID NO: 2388 - RNA, 76 nt, Human
auucucuguugaugaccuuggaugcuguaaagugauucgucauagucucugggguacccauguaguuguagggagu

SEQ ID NO: 2389 - RNA, 62 nt, Human
uuagcagaaauauccauucauuugcuguacuauuuguauguaauauuuggguugaucuauaa

SEQ ID NO: 2390 - RNA, 75 nt, Human
guggagggaacauucugcuuuucaggcaccagcugugaagaagaaaccaacaguaacuaaaggcagaucuucuau

SEQ ID NO: 2391 - RNA, 67 nt, Human
aguuuaauuaggucccaguugucaauuuuuuuuguugcauuugcuuuugagggcuuagucauaaauu

SEQ ID NO: 2392 - RNA, 66 nt, Human
agucaguuacguugcuuccaaauaggugcugcuguugacguaauaucuuguggacgcaagcuuccu

SEQ ID NO: 2393 - RNA, 88 nt, Human
guucccaucuucaccuugguggcagcccuaccucugagauuuuaaggucuacggaaagugcaggcuuccaggagugaugagguggagc

SEQ ID NO: 2394 - RNA, 87 nt, Human
uuuuuuuuuuuuuuuugagauggggucucacucugucacccaggcuggaguacagagugagacuccgucucaaaaaaaaaaaaaaga

SEQ ID NO: 2395 - RNA, 131 nt, Human; identical to SEQ ID NO: 1788

SEQ ID NO: 2396 - RNA, 62 nt, Human
auggugacaacaugcuggagccaaguguaacauggcuuggucaagggauuggaagucaccgu

SEQ ID NO: 2397 - RNA, 61 nt, Human
aggucauugcucccuggaggaugccugaauucuacagacgguucaagggccgcaaugaccu

SEQ ID NO: 2398 - RNA, 71 nt, Human
gccugccaccgcugcccgagcccgacgcuauguccagcaaaggcuccgugguucuggccuacaguggcggc

SEQ ID NO: 2399 - RNA, 85 nt, Human
gcuacgaggcugggaauccuggagaacccccaagaaccaagcgccuccagggucucuacacgaaagaccaggacccagcaaaagc

SEQ ID NO: 2400 - RNA, 126 nt, Human
uccagcgcacuguaugaggaccgcuaccuccugggcaccucucuugccaggcccugcaucgcccgcaaacaaguggaaaucgcccagcgggagggggccaaguaugugucccacggcgccacagga

SEQ ID NO: 2401 - RNA, 85 nt, Human
ccugauguuaaugguagauuugagcguaugaauuuuuaaugcuggauauuuugaauuuugcgcauaauaggccuugacuuguagg

SEQ ID NO: 2402 - RNA, 68 nt, Human
auggacaaauacacagaggucucaagaccacggacuccuggucugagccauaaagacuguaacuccgu

SEQ ID NO: 2403 - RNA, 95 nt, Human
ggugguuccugcugcccucaaggucgugcgucugaagccuacaagaaaguuugccuaucuggggcgccuggcucacgagguuggcuggaaguacc

SEQ ID NO: 2404 - RNA, 83 nt, Human
ccggacucuccgucaugggcgugugcuugugauuccaggacuggcuacugcguacauccacagguucacuaacgggggcaagg

SEQ ID NO: 2405 - RNA, 107 nt, Human
ccauggccgcguauuucgccguaugggccucggucccgagucccgcauccaucugugcggaacuugcucacagggcuggugcggacgaacgcaucgaggcaccaugg

SEQ ID NO: 2406 - RNA, 60 nt, Human
ccucuuugacaauaggauaaaguuuuuuugaaaaaaaaaaaaaaaaaaauuggggggggg

SEQ ID NO: 2407 - RNA, 65 nt, Human
cugccaggcagcagcgaggauggugaccgagaagguggggaccacguccugguggcuguuggcag

SEQ ID NO: 2408 - RNA, 64 nt, Human
ggcugaagugcaguggugcaaacauggcacacugcagccuugccgugcacggcugcaaguagcu

SEQ ID NO: 2409 - RNA, 71 nt, Human
agucaguccugcugugggaagcccacacaucaguguguuggagcaaaguucacgaaggccaugggcugacu

SEQ ID NO: 2410 - RNA, 61 nt, Human
cuggacucgguucaccuuugacaccuggagagguggggaagccaggggguggggaguccag

SEQ ID NO: 2411 - RNA, 64 nt, Human
ccugcuuuauugcucagacggucucacgauauugaagcgugggguuggaucugggucaccaagg

SEQ ID NO: 2412 - RNA, 129 nt, Human
gcugcggggacucgcugagcagcggaaggggagcgugcagagccgcugcggcccucacaguccggagcccggccgugccgugccguagggaacaugcacuuuuccauucccgaaaccgagucccgcagc

SEQ ID NO: 2413 - RNA, 74 nt, Human
uauguuuucaggguaacaggaggaaaaaugcagcacaauuuuuuucucuugaaaggcacugucauuuaaacaua

SEQ ID NO: 2414 - RNA, 84 nt, Human
ucuuuuagguuuuucauaaaauauauucauuucucaauuuauaucaaauaagugauuauuuuacagcucuuaaaauuuggagga

SEQ ID NO: 2415 - RNA, 64 nt, Human
cuuuguaagaugcaaagagguuggaucaaguuuaaaugacugugcugccccuuucacaucaaag

SEQ ID NO: 2416 - RNA, 85 nt, Human
cgccaauguguucgccaccgggugggagaacguccguuugucccgggagauucugcuccggauguucgacgcccagggguuggcg

SEQ ID NO: 2417 - RNA, 99 nt, Human
gacacggggacauacaacgcaggcagcuucggacagguguggucuggagacauucacaucacgucgcggcgcugacggaguauacagaagccccguguc

SEQ ID NO: 2418 - RNA, 62 nt, Human
cuaaaagccaaacaugcgacaggaaaagacucauaucaacauugucgucauuggacacguag

SEQ ID NO: 2419 - RNA, 73 nt, Human
uaaggaagucagcacuuacauuacgaaaauuggguacaaccccgacaaaguagcauuuugugccauuuucuug

SEQ ID NO: 2420 - RNA, 81 nt, Human
cagcucugucucgaucugcuccucgaggucucgaaccucccgcaugauggugccuguguccucgauggucuggaugagcug

SEQ ID NO: 2421 - RNA, 98 nt, Human
ggaauauaaagaucuuguuucuucauauuucaaacaccaaauaguauuagucuacuacuaauaguguuagaacaccagauacaaagcuaaaauauucc

SEQ ID NO: 2422 - RNA, 70 nt, Human
guuuuccuuucuaacccacagcuuguuacaauaccagaaauauuaaaaaaccuuguguagauaggagaac

SEQ ID NO: 2423 - RNA, 62 nt, Human
agucucauguggcugcugcaccuccagauauaugcucucgaacaguguggccugaugaaacu

SEQ ID NO: 2424 - RNA, 128 nt, Human
gacaugaguuugugauggcacaauaugugaaugaauuucaggguaaugaugcaccuguugaacaagaaauuaacagugcagaaacuuacuuuugaaagugccagaguagagugugauacaaacauguc

SEQ ID NO: 2425 - RNA, 62 nt, Human
auuggauucauuuuaaaacuuaaguucuuucaagcuaacaaguuuaacugguuuguuccaau

SEQ ID NO: 2426 - RNA, 66 nt, Human
acagauuugaaggaaaaaauuuugauguaacaauuuuuuaaauaaaauuuuguuuuucuguaaugu

SEQ ID NO: 2427 - RNA, 69 nt, Human
gaaugaguaagaccuaguauugauaguacaacagugggacuauagucaguaauaauucauuauucguuu

SEQ ID NO: 2428 - RNA, 79 nt, Human
ccaugccguuaguaacgaggaacaucgagccaaggcaccugugccagucagacguugccuagcguuagaagcgagcugg

SEQ ID NO: 2429 - RNA, 62 nt, Human
gaagaagugucacuggaaggaaaucaagcagccgaaaagccuuucaggaaguuccaccauuc

SEQ ID NO: 2430 - RNA, 64 nt, Human
ugcgugaccaagaucagccuggcaaaugucauccgacagcugggccagacugaguacauaugca

SEQ ID NO: 2431 - RNA, 86 nt, Human
gggagggcgcgccggagggauauacccgggggcacagauuuccagagagcacauuuuuuuguucccggggcccggggcggucaacc

SEQ ID NO: 2432 - RNA, 68 nt, Human
gagaagaggagauggcgugauaccaacgagucaacaaacacucggguccuauacuucagccucuuuuc

SEQ ID NO: 2433 - RNA, 78 nt, Human
gggaaauuugccuuuaccacugaagauuaugacauguuugaaguguguuuugagagcaagggaacagggcggauaccu

SEQ ID NO: 2434 - RNA, 70 nt, Human
ggcccugguacagcggcugcccgaagcaaucucuauuugggacacauugacgucagguguaccaggugcc

SEQ ID NO: 2435 - RNA, 70 nt, Human
uccggugugcgcaguugccaggaucccuaucaugaacuugcgaugcaacaauucacccgugcaugccgga

SEQ ID NO: 2436 - RNA, 73 nt, Human
auuucuaaauuagagagguuaacaagacagaugauuacuaugccucaugugcugugugcucuuugaaaggaau

SEQ ID NO: 2437 - RNA, 70 nt, Human
ugcuuuguaacagacuugcgguuaauuaugcaaaugauaguuugugauaauugguccaguuuuacgaaca

SEQ ID NO: 2438 - RNA, 74 nt, Human
ccgccgugacguucggggugguuucaugagugugcgcguggggugagugcucgccgccgugacguucggggugg

SEQ ID NO: 2439 - RNA, 78 nt, Human
ggggcagucaguaggaacuguaacuaugucucugaugcaccacguguuuagacacagcacaguccuuuuuucuguucc

SEQ ID NO: 2440 - RNA, 85 nt, Human
uucugggggacuauguggacaggggcaagcaguccuuggagaccaucugccugcugcuggccuauaagaucaaguaccccgagaa

SEQ ID NO: 2441 - RNA, 90 nt, Human
cccccggaccccccccgggggacaaaagaggcgggcccuuuuuuuggccgggggggggggccuuuuuuaacccugggggggguuuugggg

SEQ ID NO: 2442 - RNA, 83 nt, Human
uggacgggggggcuacccuggcuucccugcugaaggagggcacccccugaguagggguccaaaccauaggccuccaaguuccg

SEQ ID NO: 2443 - RNA, 60 nt, Human
guguauauauuuacggggucuaugagauguuuugauagacaugcaacgugaaauaagcac

SEQ ID NO: 2444 - RNA, 131 nt, Human
caaugggugcucuucaugcaagguugcaaaccuaccaagaaugcauaauagucucacuuuuccccaauaaagagaugcgugugacuaguuuuggacuuuuaaccuuaauggggguugcaugucuccuauug

SEQ ID NO: 2445 - RNA, 75 nt, Human
gauccacaguccugcauuuacugccuuucacuuaaugauuuuggacagguuuuagagagccagggauguuggguc

SEQ ID NO: 2446 - RNA, 79 nt, Human
ggggccuuuauuugguuuugggcuuuagcuggauaauguuuuagugaugucagcuagugcaguucucaaaugggcugcc

SEQ ID NO: 2447 - RNA, 81 nt, Human
gauauguugaaggguauuuguuaauuuuacuuuucaaagauacuuuaaaacaguagagcuagcaaugacaccuugcauuuc

SEQ ID NO: 2448 - RNA, 84 nt, Human
ccaccaccaucaaggucaucauugucaucuaccuguccguggugggugcccuguugcucuacauggccuuccugaugcuggugg

SEQ ID NO: 2449 - RNA, 90 nt, Human
ggcuuugcuggcccagcaagccugauaagcaugaagcucuuaucuuugguggcuguggucggguguuugcuggugcccccagcugaagcc

SEQ ID NO: 2450 - RNA, 62 nt, Human
cuuguucuucucuuauaaaugacuuuugcacaacagaagcuuuuuauuuugaugaagucaag

SEQ ID NO: 2451 - RNA, 78 nt, Human
ggauuuugagaguuguuuauuuaucuggauacaaguucuguguuggacaggugauuugcaaguauuuucacccagucu

SEQ ID NO: 2452 - RNA, 81 nt, Human
uggcugacggucgcagcaaauccagcugcugcugcggcggcuguggcggcggcagcggcggugacugaggauagagagcca

SEQ ID NO: 2453 - RNA, 61 nt, Human
ggugacaacaugcuggagccaagugcuaacaugccuugguuucaagggauggaaagucacc

SEQ ID NO: 2454 - RNA, 79 nt, Human; identical to SEQ ID NO: 1810

SEQ ID NO: 2455 - RNA, 61 nt, Human
uaauauauuuaauagagagacgccagcaugaguggguggaccguauauauaaguacuauua

SEQ ID NO: 2456 - RNA, 63 nt, Human
uguuaacugaauaccacucuguaauugcaaaaaaaaaaaaaaguugcagcuguuugguugaca

SEQ ID NO: 2457 - RNA, 72 nt, Human
cggagugucgguggugauggugcaucccgagcgugcgugcgcgaggugcacucguaccugacugacacucug

SEQ ID NO: 2458 - RNA, 67 nt, Human; identical to SEQ ID NO: 2073

SEQ ID NO: 2459 - RNA, 68 nt, Human
gagaaggaugcgaaaaaacugugaccggaaaaaagcacacugcgacuccgauacaaccguaccuacuc

SEQ ID NO: 2460 - RNA, 79 nt, Human; identical to SEQ ID NO: 1810

SEQ ID NO: 2461 - RNA, 61 nt, Human
aggucauugcucccuggaggaugccugaauucuacaaccgguucaagggccgcaaugaccu

SEQ ID NO: 2462 - RNA, 78 nt, Human
auuagcaauagagcaauugaaauguuaggaggugaacuuggcagcaagauaccugugcaucccaacgaucauguuaau

SEQ ID NO: 2463 - RNA, 69 nt, Human
cagagcucaaaugauacuuuucccacagcaaugcacauugcugcugcaauagaaguucaugaaguacug

SEQ ID NO: 2464 - RNA, 71 nt, Human
cgcgcucgcgucccucgugcgggcuccagccgcagccuuagcuucggcucccggcuuggguggcgcggccg

SEQ ID NO: 2465 - RNA, 79 nt, Human; identical to SEQ ID NO: 1810

SEQ ID NO: 2466 - RNA, 62 nt, Human
aguccaacgucucugaugcgguggcucagagcacccguaucauuuauggaggcucugugacu

SEQ ID NO: 2467 - RNA, 75 nt, Human
guuuauaucuucacccuguaaugguugggaccaggccaaucccuucuccacuuacuauaaugguuggaacuaaac

SEQ ID NO: 2468 - RNA, 69 nt, Human
uucuggcauuuagaauuuuguuccauucauuugauuuguucaucugagaauuuuuuuuuuuugccugaa

SEQ ID NO: 2469 - RNA, 61 nt, Human; identical to SEQ ID NO: 2067

SEQ ID NO: 2470 - RNA, 70 nt, Human
cacagcuguuaugccagauggucaguuuaaagauaucagccugucugacuacaaaggaaaauauguugug

SEQ ID NO: 2471 - RNA, 66 nt, Human
aauuccaaaguauauucucuuuuauugggaacacauucaauuaauuaacauauuauuccuggaauu

SEQ ID NO: 2472 - RNA, 81 nt, Human
aguagccauggcggccaugaguuguugcggcggguuucgguuacugcgguggcagcucugucuggccggccccuuggcacu

SEQ ID NO: 2473 - RNA, 78 nt, Human
gcguuuuuugaaguuauugagauucuacauugcauugacugggauuccaguagcaauuuucauaacucuggugaaugu

SEQ ID NO: 2474 - RNA, 70 nt, Human
ggggccucccuccagcgcucuggggagccaggcuuugcuuggcuuccucagggccuggggaucuggcccu

SEQ ID NO: 2475 - RNA, 85 nt, Human
uccgaaagaagcuggugaucguuggggauggugccugugggaagaccugccuccucaucgucuucagcaaggaucaguuuccgga

SEQ ID NO: 2476 - RNA, 90 nt, Human
ggcaguucggcggucccgcgggucugucucuugcuucaacaguguuaggacggaacagauccggggacucucuuccagccuccgaccgcc

SEQ ID NO: 2477 - RNA, 68 nt, Human
caccucuuauagagguugauaggacugcuuggguccuccacuguccucugucaaucuaguuagacgug

SEQ ID NO: 2478 - RNA, 68 nt, Human
uguaggcuuuaagaauuuuauccuaauggccuuuauaggaccaaugcugauuuuuuuuuuaaagggca

SEQ ID NO: 2479 - RNA, 80 nt, Human
ccuuggaaauuccgccgcaauaagguuaccuucgaagcuaacaaaggagugaaucgaaugcgugggggaaauugccaagg

SEQ ID NO: 2480 - RNA, 75 nt, Human
ugagcgagggggucacgaacugguuccgugucaguccaguggaaggauacucauagacugugaaugauaaguuca

SEQ ID NO: 2481 - RNA, 68 nt, Human
gcacagcaggccuagguccucccacaccugcccccuaauaaagugggcgcgagaggaggcugcugugu

SEQ ID NO: 2482 - RNA, 88 nt, Human
ucgcugucgugacuacacagaguuacugggcacaaguuuaucuucuuccagauauccuuuucagaacacucaaagguucgacuaguga

SEQ ID NO: 2483 - RNA, 109 nt, Human
ggaagcacauacucagaccuguuuuguuaacuagaauucuuuaaaagcugaugccaaacaucuuuacagaggaacuguaguucacauccaccugucugacauugucccc

SEQ ID NO: 2484 - RNA, 63 nt, Human
uuucuguuauaaaaagaagugugaucuguuuuuuuagugauuuccuuuguuugggaauagaga

SEQ ID NO: 2485 - RNA, 63 nt, Human
gauuggcugcguuguuguaggccaacaugaugguggcaucuggcaaucaacuuaguagaaguc

SEQ ID NO: 2486 - RNA, 89 nt, Human
cccuuccccgggccacgguggccuugggucccugcccucccacccagguuugguuccucccggggcccccacuguggagauaagaaggg

SEQ ID NO: 2487 - RNA, 64 nt, Human
gcccugggguuggcggccucacccccucuggagggccggaggcaggagguggaaaccccagggc

SEQ ID NO: 2488 - RNA, 67 nt, Human
acccugucucccauucugagaaucuggguuagaacugcaacauacaaauuucuuuugggggaugggu

SEQ ID NO: 2489 - RNA, 60 nt, Human
uuuuaaguaccaaugauacuuaaaauuuccagaauggucuggggugucauuggcuugaaa

SEQ ID NO: 2490 - RNA, 83 nt, Human
cuuuuauuugaaggcagaaaacacccuauuuggggguucacucauaaucugcaacaguuuguuuguuuguuuuuaaaaaagag

SEQ ID NO: 2491 - RNA, 83 nt, Human
ggccgaguuguuugggggcgcugugcccacggggcccgggggcuccgccccggguuucaauggcguugccccucuacuuugcu

SEQ ID NO: 2492 - RNA, 66 nt, Human
ugcucgccguccccgccaugcugucucuagacuuuuggacgaugugcggcggaugaacaagcggca

SEQ ID NO: 2493 - RNA, 77 nt, Human
ccuaggauacugaugguugugaagacuguuucaaaugauuggaucuuugaaagcuucagcgugccuuaguuucuagg

SEQ ID NO: 2494 - RNA, 61 nt, Human
gacaauggacuuuuaaaacgugccacaauaagggguguauaacagguuccauuuuaauguc

SEQ ID NO: 2495 - RNA, 81 nt, Human
uugguccugguaugguccugggaaauuaaaccugauuggaggaacaaucaucauaacuuuacgggggacaauugggacgga

SEQ ID NO: 2496 - RNA, 88 nt, Human
uuuggaucuaucacugucaucauaaacugguucugcuugucauccacacaacacaggacuuaagacaaugggacugaugucaucugag

SEQ ID NO: 2497 - RNA, 79 nt, Human
cacgccauuccuucucucucugcagcaaggcaaauuucuaccucuagagacucugccauugucaggaaaggauuuagug

SEQ ID NO: 2498 - RNA, 83 nt, Human
accucaguuuccugaauagcuaggaccacaggcaugcaccaucaugccuggcuaauuuuuaaauauuuuguaggaaacugggu

SEQ ID NO: 2499 - RNA, 81 nt, Human
uugggggggggcauuaauuccuuauuuaaggauguuacugaguuggaauuaaaaggccccuccaaccauucaaccccccaa

SEQ ID NO: 2500 - RNA, 60 nt, Human
gauaccaagguaauuucugggcagguuuaaaaccuuuaaaaguugauagaauaacuguuc

SEQ ID NO: 2501 - RNA, 63 nt, Human
gugucuagauuugaaacuuuuuaauuaaggaugucuuaauuuuugacuuuuaaaaaugguuau

SEQ ID NO: 2502 - RNA, 131 nt, Human
gucacccaggcuagagugcaguggugugaucuuggcucacugcaaccucugccuccugggcccaagagauucuugggaggcggagguuggcagugagccgagaucagcccacuggacuccagccugaguac

SEQ ID NO: 2503 - RNA, 68 nt, Human
uaggacaggcucugggggggacagggcaccagguuggccgcuggcuuuuccucaggccucaggaccua

SEQ ID NO: 2504 - RNA, 70 nt, Human
ggagcacaugugccgccuggacauugauucaccacccaucacagcccggaacacuggcaucaucuguacc

SEQ ID NO: 2505 - RNA, 70 nt, Human
uguggcucgucugaacuucucucauggaacucaugaguaccaugcggagaccaucaagaaugugcgcaca

SEQ ID NO: 2506 - RNA, 94 nt, Human
aacaucuaccuacucaugacauggcaaauagucauuuuacaauaacaauacaguacaauaugaucgugcuacuuucauggcuaggaaugaaguu

SEQ ID NO: 2507 - RNA, 65 nt, Human
guuggguuucucuuucagagcuaccccuaaaggcauucacuuuauauucucugaagagaaccagc

SEQ ID NO: 2508 - RNA, 70 nt, Human
uuugaauucaaacucuuuggaaaacaugcauaauaaucuuaaugaucccauugacuaguuuaaauucaaa

SEQ ID NO: 2509 - RNA, 85 nt, Human
cauuuuaucuggaacaguuccucagccuuucugucucuugaccuuaauauuuuugaaagguacaggcaaguuauuuuguagaaug

SEQ ID NO: 2510 - RNA, 77 nt, Human
cuaguccagguucgaacccaggaucacagauugcauuuaguuguuaugucucuuuagucucauuuuaucuggaacag

SEQ ID NO: 2511 - RNA, 62 nt, Human
gaauuggacacuuuguccuucuuagguauaucacaucaagagggcauauggauguuggauuc

SEQ ID NO: 2512 - RNA, 65 nt, Human
ucccucaacauggauuuguuugauguuuccuccuaaggauucaaguuauaaauuuuucacaggga

SEQ ID NO: 2513 - RNA, 90 nt, Human
ggguguugagaacuuguaccauggacuucagaccgccuugcagccguaugcugcacaagcguguacacccccugggcagccucaaaaccc

SEQ ID NO: 2514 - RNA, 61 nt, Human
ucugcuccauagguuucuguuuuuaauuucaauguuaaauacaacuacaauaugagcgaga

SEQ ID NO: 2515 - RNA, 61 nt, Human
gcuggugggcgcguaccccaacuacaacgaggaggaggaggagcgccgcuacuaccgccgc

SEQ ID NO: 2516 - RNA, 75 nt, Human
acuugugcugagaauagugucugauuauacgacuuuuaagcaaaguggguguaauuaggugaaacacagccaggu

SEQ ID NO: 2517 - RNA, 73 nt, Human
ccagcaaguuucaccuggguuguauuuuaaauguuuuacaagaauguccaugugcuucccuaggcugagcugg

SEQ ID NO: 2518 - RNA, 85 nt, Human
gagggauguaacuauugaaucggauacaaggaucagaauggaaagaaacucacgaugaaauugaaccugguuuuguauauuuauc

SEQ ID NO: 2519 - RNA, 64 nt, Human
auaucagauuugaauuacagcugaguuacccacuugggagucaguuuuagauuggagcugguau

SEQ ID NO: 2520 - RNA, 101 nt, Human
cuuccuauaaaaguuuagcucucucuuuuugaaggaaauuucugggcaaacaacauuuugagaaagaaauucagauaugggaaaguaaagaucauggggag

SEQ ID NO: 2521 - RNA, 67 nt, Human
ggcuuuaagaaaccuggcuugugcaugugguuuacacauguugaaaaguaugaagauuaaugaagcc

SEQ ID NO: 2522 - RNA, 64 nt, Human; identical to SEQ ID NO: 2519

SEQ ID NO: 2523 - RNA, 100 nt, Human
cuuccuauaaaaguuugcucucucuuuuugaaggaaauuucugggcaaacaacauuuugagaaagaaauucagauaugggaaaguaaagaucauggggag

SEQ ID NO: 2524 - RNA, 67 nt, Human; identical to SEQ ID NO: 2521

SEQ ID NO: 2525 - RNA, 100 nt, Human; identical to SEQ ID NO: 2523

SEQ ID NO: 2526 - RNA, 67 nt, Human; identical to SEQ ID NO: 2521

SEQ ID NO: 2527 - RNA, 83 nt, Human
aggaggcggcagucugaagaggaugaguucagagucaagcaacuugaagauaacauucagaggucuaagucuuggccguuccu

SEQ ID NO: 2528 - RNA, 63 nt, Human
cccacucuuacagccucugucucuuuauuuucaaggaagaaagaggcagacugaaauagaagg

SEQ ID NO: 2529 - RNA, 79 nt, Human
ggugucucuggaagugucuauacagaugugugcugcugcugcugcugcuuucugccuuaaaauuucuggagccaacacc

SEQ ID NO: 2530 - RNA, 101 nt, Human
cuucccauaaaaguuugcucucucuuuuugaaggaaauuucugggcaaacaacauuucugagaaagaaauucagauaugggaaaguaaagaucauggggag

SEQ ID NO: 2531 - RNA, 67 nt, Human; identical to SEQ ID NO: 2521

SEQ ID NO: 2532 - RNA, 70 nt, Human
cacagccgggaccccgccagaagugcccggugcauuggcagugcccguccacgcaggucccguggccgug

SEQ ID NO: 2533 - RNA, 62 nt, Human
ggggacacucuucacugcaguuggacccgguccauccggcaucacagcggcagccggucucc

SEQ ID NO: 2534 - RNA, 62 nt, Human
ccaaacuguaaauacagaacuaggcacaucucaauguucugucucuguguuuacauuacugg

SEQ ID NO: 2535 - RNA, 62 nt, Human
gaaaauuaagcauucuucaacuuuucuaugggucuuaaaauucauggaauaugugcauuuuc

SEQ ID NO: 2536 - RNA, 62 nt, Human
uaugaaauguuaucaaggcagaaaacuacauuaauuucgacuuuaauaagauguaacucaua

SEQ ID NO: 2537 - RNA, 63 nt, Human
gucugcugccuuuuguuuagcuaagcccugcccacagagguugagucuauagaggcaguaggc

SEQ ID NO: 2538 - RNA, 71 nt, Human
ugcugagcuggggugggcuccacucaguucaagcuuaccagcugcuuuguuuaccuacucaagccucagca

SEQ ID NO: 2539 - RNA, 97 nt, Human
gguauaaucuagcagucuguggauuugauccuuccaccucauaaaaaaggcauaggugggcaguauaauugauuugcagggauaugcuagaauuacu

SEQ ID NO: 2540 - RNA, 78 nt, Human
uguccaguucccauuuugguccucauaaucaaaacagcuuaacaugacagucaucaccaguaauaguggcauuggaua

SEQ ID NO: 2541 - RNA, 80 nt, Human
guguaaugugguucuagugucgcugcguguucauccucucgagcuugucugucacguaggucacacuagacucugggcac

SEQ ID NO: 2542 - RNA, 102 nt, Human
uugucgagcucaucaggugguggaagauggauaugaauuuuuugcuaaacgacaguugguaaccuuauuuucagccccaaauuacuguggcgaguuugauaa

SEQ ID NO: 2543 - RNA, 60 nt, Human
gaggacaaaugaacaagacagaugagggagacauccucucugauauaagauacaguccuc

SEQ ID NO: 2544 - RNA, 98 nt, Human
aaauggcuuuaaagcuugguguuacuuuucuuaaguuguuuaauuauaguuaaggcaauuucaaaaaugcuccaaagaaauguggaaagggaccuuuu

SEQ ID NO: 2545 - RNA, 61 nt, Human
ucugacagggcccaugucccacaaggcugcuuggccucagugggugcuuggcugugcugga

SEQ ID NO: 2546 - RNA, 60 nt, Human
uugguguuacuuuucuuaaguuguuuaauuauaguuaaggcaauuucaaaaaugcuccaa

SEQ ID NO: 2547 - RNA, 62 nt, Human
auauucuucuacugauucagucagacacgaaauccaacugaauuacccgguagacugaauau

SEQ ID NO: 2548 - RNA, 64 nt, Human
gaaagcaagcuuuugccaaugaucuuuaauggaguuaaaauguuuaugguaauuguaaccuuuc

SEQ ID NO: 2549 - RNA, 69 nt, Human
cuccauaaucacaugagccaauuccuuauaagaaaucucuuuguguguauugguucuguuucucuggag

SEQ ID NO: 2550 - RNA, 77 nt, Human
ggauuuauacauacagagauuguaguauuuaguauaugaaauauuuugaauacacaucucugucagugugaaaauuc

SEQ ID NO: 2551 - RNA, 68 nt, Human
gugguuuuuagugcacuuaauauuagcuugcuuaaggcauacuuuuaaucaaguagaacaaaaacuau

SEQ ID NO: 2552 - RNA, 71 nt, Human
guuaugugaauuugaguuugcuguuuuaaauugcauuucuaugccauuuuuaguuuaaaaucuugcauggc

SEQ ID NO: 2553 - RNA, 65 nt, Human
cccaucuccagcccgggcuucaaacugcugcugagggggggcugggagccaggaauggggcuggg

SEQ ID NO: 2554 - RNA, 120 nt, Human
gggagcgggaucuaaggacuuacaugaaccucgaguucugacuuugguaaagucugacccuagucugcugcugaagucugaacuugggccucugaccuggggccuuugacuuccccuucc

SEQ ID NO: 2555 - RNA, 78 nt, Human
ggggugagggccgugccaaucccauccccacuguccucaagagggaccaggaaggacuaggcuacagaucagcacccc

SEQ ID NO: 2556 - RNA, 100 nt, Human; identical to SEQ ID NO: 1173

SEQ ID NO: 2557 - RNA, 70 nt, Human; identical to SEQ ID NO: 1335

SEQ ID NO: 2558 - RNA, 76 nt, Human
uccaagagauagcaaaucgagucuuaaauaauccggggagaaagacgcccggguagauuuguggugcagccuugga

SEQ ID NO: 2559 - RNA, 73 nt, Human; identical to SEQ ID NO: 721

SEQ ID NO: 2560 - RNA, 82 nt, Human; identical to SEQ ID NO: 119

SEQ ID NO: 2561 - RNA, 63 nt, Human; identical to SEQ ID NO: 722

SEQ ID NO: 2562 - RNA, 60 nt, Human; identical to SEQ ID NO: 723

SEQ ID NO: 2563 - RNA, 69 nt, Human
caauuuuaagcauuaucuugcaaaguagacauaggugguguuugauuugccauaauuaacuugaauuug

SEQ ID NO: 2564 - RNA, 75 nt, Human
cucgucaaaaaauauucacaguucauaaacuuuccuauuuauguauggagcagcaagacugaaacuguugaggag

SEQ ID NO: 2565 - RNA, 83 nt, Human
guagaagaagaugaauacaaagcuuucuacaaaucauuuucaaaggaaagugaugaccccauggcuuauauucacuuuacugc

SEQ ID NO: 2566 - RNA, 69 nt, Human
gggccggagccggcggcagugguggcagcgguaucgccgcccuagcucaccgcgccccuuuuccagccc

SEQ ID NO: 2567 - RNA, 79 nt, Human
ggccacuccugcaucuuuaccgucucagggacuuccaguugcugccccuucccagaggccguggcaugcggggauggcc

SEQ ID NO: 2568 - RNA, 71 nt, Human
gguugcugcugcccaaggaccgcggagucggacgcaggcagaccauguggacccuggugagcuggguggcc

SEQ ID NO: 2569 - RNA, 63 nt, Human; identical to SEQ ID NO: 527

SEQ ID NO: 2570 - RNA, 75 nt, Human; identical to SEQ ID NO: 74

SEQ ID NO: 2571 - RNA, 87 nt, Human; identical to SEQ ID NO: 76

SEQ ID NO: 2572 - RNA, 71 nt, Human; identical to SEQ ID NO: 77

SEQ ID NO: 2573 - RNA, 81 nt, Human
aggcuugagagugggaaggucugaguguagucaguguagcucagcugacuuacguaagucuugaggaccuugcuugagccu

SEQ ID NO: 2574 - RNA, 68 nt, Human
uugcuugaaccugggaggcggagguugcagugaaccgagacugcaccacuguacuacagcuugggcaa

SEQ ID NO: 2575 - RNA, 60 nt, Human
uuucuucauugaggaaaacugggauaaugacccauuuucacaggguuuuucuugaggaaa

SEQ ID NO: 2576 - RNA, 65 nt, Human; identical to SEQ ID NO: 1518

SEQ ID NO: 2577 - RNA, 75 nt, Human; identical to SEQ ID NO: 74

SEQ ID NO: 2578 - RNA, 87 nt, Human; identical to SEQ ID NO: 76

SEQ ID NO: 2579 - RNA, 71 nt, Human; identical to SEQ ID NO: 77

SEQ ID NO: 2580 - RNA, 78 nt, Human
accagaggaggacaucagauccugcauuauguacacugaucguuucugcagcugcagauucugcuguucgacucuggu

SEQ ID NO: 2581 - RNA, 81 nt, Human
cauauuugcucaacaaaaugaucaguuucagaaagugcuuucucucuguggacaugaggauuggauuagaggaguggaaug

SEQ ID NO: 2582 - RNA, 65 nt, Human
ucugcuuaucuuuuuugccaaauacugauguaccaauauuagcauguggcaaugaugauugcaga

SEQ ID NO: 2583 - RNA, 70 nt, Human
gccugggacuuggagaaaugggauuugaaauuccuccuggagaaagcucagaaucuguuuuuucccaagc

SEQ ID NO: 2584 - RNA, 69 nt, Human
uggaguaccuucuacugccucagugggcaaauccaaaaccccauuaguggcaaggaagaaaguguuccg

SEQ ID NO: 2585 - RNA, 79 nt, Human
ccaagaucacucaauuuaucaguaauggagcuuacuucaucagcuuccuugccugcuuuuauaaauuagguucuauugg

SEQ ID NO: 2586 - RNA, 60 nt, Human
uguagccagccccgucucaauccccugggcuaacaaaagaaucagaagaggcuggccaca

SEQ ID NO: 2587 - RNA, 78 nt, Human
ugcagaccaagguguccaaaugaggugacccagacuugagaggucguuugggcuuuaggaguggagcacguuucugcg

SEQ ID NO: 2588 - RNA, 78 nt, Human; identical to SEQ ID NO: 99

SEQ ID NO: 2589 - RNA, 65 nt, Human; identical to SEQ ID NO: 247

SEQ ID NO: 2590 - RNA, 80 nt, Human; identical to SEQ ID NO: 100

SEQ ID NO: 2591 - RNA, 73 nt, Human
gccauggcagugacagcgacggcucccagaguccccgcucucugccccccuccagcccugucaggcccauggc

SEQ ID NO: 2592 - RNA, 131 nt, Human; identical to SEQ ID NO: 1788

SEQ ID NO: 2593 - RNA, 75 nt, Human; identical to SEQ ID NO: 74

SEQ ID NO: 2594 - RNA, 96 nt, Human
ggagccauuguggacguuccaguuggugaggagcuguugggucguguaguugaugcccuugguaaugcuauugauggaaaggguccaauugguucc

SEQ ID NO: 2595 - RNA, 87 nt, Human; identical to SEQ ID NO: 76

SEQ ID NO: 2596 - RNA, 71 nt, Human; identical to SEQ ID NO: 77

SEQ ID NO: 2597 - RNA, 87 nt, Human; identical to SEQ ID NO: 76

SEQ ID NO: 2598 - RNA, 65 nt, Human; identical to SEQ ID NO: 1518

SEQ ID NO: 2599 - RNA, 71 nt, Human; identical to SEQ ID NO: 77

SEQ ID NO: 2600 - RNA, 65 nt, Human; identical to SEQ ID NO: 1518

SEQ ID NO: 2601 - RNA, 87 nt, Human; identical to SEQ ID NO: 76

SEQ ID NO: 2602 - RNA, 67 nt, Human
uuucuuuuauaauagaaugggcauguauuguaacaguuuuaugucaaaugaucugugcuguaggaaa

SEQ ID NO: 2603 - RNA, 75 nt, Human; identical to SEQ ID NO: 2275

SEQ ID NO: 2604 - RNA, 65 nt, Human; identical to SEQ ID NO: 1518

SEQ ID NO: 2605 - RNA, 75 nt, Human; identical to SEQ ID NO: 74

SEQ ID NO: 2606 - RNA, 87 nt, Human; identical to SEQ ID NO: 76

SEQ ID NO: 2607 - RNA, 87 nt, Human; identical to SEQ ID NO: 76

SEQ ID NO: 2608 - RNA, 75 nt, Human; identical to SEQ ID NO: 74

SEQ ID NO: 2609 - RNA, 71 nt, Human
ugcccgcguacaugggcugaggaauguucaagcagaagaagugguagaguuuucuucaggcuuaaagggua

SEQ ID NO: 2610 - RNA, 87 nt, Human; identical to SEQ ID NO: 76

SEQ ID NO: 2611 - RNA, 71 nt, Human; identical to SEQ ID NO: 77

SEQ ID NO: 2612 - RNA, 87 nt, Human; identical to SEQ ID NO: 76

SEQ ID NO: 2613 - RNA, 65 nt, Human; identical to SEQ ID NO: 1518

SEQ ID NO: 2614 - RNA, 75 nt, Human; identical to SEQ ID NO: 74

SEQ ID NO: 2615 - RNA, 87 nt, Human; identical to SEQ ID NO: 76

SEQ ID NO: 2616 - RNA, 71 nt, Human; identical to SEQ ID NO: 77

SEQ ID NO: 2617 - RNA, 65 nt, Human; identical to SEQ ID NO: 1518

SEQ ID NO: 2618 - RNA, 75 nt, Human; identical to SEQ ID NO: 74

SEQ ID NO: 2619 - RNA, 71 nt, Human; identical to SEQ ID NO: 77

SEQ ID NO: 2620 - RNA, 71 nt, Human; identical to SEQ ID NO: 77

SEQ ID NO: 2621 - RNA, 65 nt, Human; identical to SEQ ID NO: 1518

SEQ ID NO: 2622 - RNA, 75 nt, Human; identical to SEQ ID NO: 74

SEQ ID NO: 2623 - RNA, 87 nt, Human; identical to SEQ ID NO: 76

SEQ ID NO: 2624 - RNA, 65 nt, Human; identical to SEQ ID NO: 1518

SEQ ID NO: 2625 - RNA, 75 nt, Human; identical to SEQ ID NO: 74

SEQ ID NO: 2626 - RNA, 87 nt, Human; identical to SEQ ID NO: 76

SEQ ID NO: 2627 - RNA, 71 nt, Human; identical to SEQ ID NO: 77

SEQ ID NO: 2628 - RNA, 75 nt, Human; identical to SEQ ID NO: 74

SEQ ID NO: 2629 - RNA, 87 nt, Human; identical to SEQ ID NO: 76

SEQ ID NO: 2630 - RNA, 71 nt, Human; identical to SEQ ID NO: 77

SEQ ID NO: 2631 - RNA, 75 nt, Human; identical to SEQ ID NO: 74

SEQ ID NO: 2632 - RNA, 87 nt, Human; identical to SEQ ID NO: 76

SEQ ID NO: 2633 - RNA, 71 nt, Human; identical to SEQ ID NO: 77

SEQ ID NO: 2634 - RNA, 65 nt, Human; identical to SEQ ID NO: 1518

SEQ ID NO: 2635 - RNA, 75 nt, Human; identical to SEQ ID NO: 74

SEQ ID NO: 2636 - RNA, 87 nt, Human; identical to SEQ ID NO: 76

SEQ ID NO: 2637 - RNA, 71 nt, Human
ugcccgcguacaugggcugaggaaugcucaagcagaagaaaugguagaguuuucuucaggcuuaaagggua

SEQ ID NO: 2638 - RNA, 65 nt, Human; identical to SEQ ID NO: 1518

SEQ ID NO: 2639 - RNA, 75 nt, Human; identical to SEQ ID NO: 74

SEQ ID NO: 2640 - RNA, 96 nt, Human; identical to SEQ ID NO: 2594

SEQ ID NO: 2641 - RNA, 87 nt, Human; identical to SEQ ID NO: 76

SEQ ID NO: 2642 - RNA, 77 nt, Human
cugcugucuggugcccugugagcugugauugauugccuuuggucaguaaugcguucaggaguccacaccaggcacag

SEQ ID NO: 2643 - RNA, 85 nt, Human
aggcgcugguccccuucaaaagggcagggggaccgcaugggggcgucuuuuucuuaaccuuauugcaagggaauaccgugugccu

SEQ ID NO: 2644 - RNA, 67 nt, Human
gagcaauaggcguggucaugacaccgcuacaaaugugcuggcggcuuuauaccaucgcacguugguc

SEQ ID NO: 2645 - RNA, 65 nt, Human
ugaucaagauccuuacguuacucugaaagauacagaacaauaugaacgugaagauuucuugauua

SEQ ID NO: 2646 - RNA, 87 nt, Human; identical to SEQ ID NO: 76

SEQ ID NO: 2647 - RNA, 84 nt, Human
ucuucaaaagacugggacugcugagauguccucuauucuugaagagcguauucuuggagcugauaccucuguugaucuugaaga

SEQ ID NO: 2648 - RNA, 82 nt, Human
auuaucugccaguuaagauuauucuuaaaacucuggaugccauggcuuuuaauaaguuuaauguucuucacuggcacauagu

SEQ ID NO: 2649 - RNA, 70 nt, Human
guccguauggugauugaauaugccagauuacgaggaauucgaguccugccagaauuugauaccccugggc

SEQ ID NO: 2650 - RNA, 87 nt, Human; identical to SEQ ID NO: 76

SEQ ID NO: 2651 - RNA, 71 nt, Human; identical to SEQ ID NO: 77

SEQ ID NO: 2652 - RNA, 75 nt, Human; identical to SEQ ID NO: 74

SEQ ID NO: 2653 - RNA, 87 nt, Human; identical to SEQ ID NO: 76

SEQ ID NO: 2654 - RNA, 65 nt, Human; identical to SEQ ID NO: 1518

SEQ ID NO: 2655 - RNA, 75 nt, Human; identical to SEQ ID NO: 74

SEQ ID NO: 2656 - RNA, 87 nt, Human; identical to SEQ ID NO: 76

SEQ ID NO: 2657 - RNA, 71 nt, Human; identical to SEQ ID NO: 77

SEQ ID NO: 2658 - RNA, 90 nt, Human
cugguucucgccgccucacgcgaacucuacaaaugcaucaagaaagcggugaagcagaagcagauucggcgcggggugaaagagguucag

SEQ ID NO: 2659 - RNA, 73 nt, Human
gugugaggaccgaaauuugcccuaugucuauaucccucuaagacggaccugggugcagccgcaguccaagcgc

SEQ ID NO: 2660 - RNA, 87 nt, Human; identical to SEQ ID NO: 76

SEQ ID NO: 2661 - RNA, 85 nt, Human
cugggaccagggcuggugguagaacucagcccggcgcuccucuucaggguugccggcuacaucugucaucaccuugaggucccgg

SEQ ID NO: 2662 - RNA, 87 nt, Human
uagcaugaagucccucuggaucuugagcugguuuauggacucaaucgucucauggaucuuacuguccagagcacugaucuccugcug

SEQ ID NO: 2663 - RNA, 62 nt, Human
ccucuauucuugaagagcguauucuuggagcugauaccucuguugaucuugaagaaacuggg

SEQ ID NO: 2664 - RNA, 65 nt, Human; identical to SEQ ID NO: 1518

SEQ ID NO: 2665 - RNA, 87 nt, Human; identical to SEQ ID NO: 76

SEQ ID NO: 2666 - RNA, 71 nt, Human; identical to SEQ ID NO: 77

SEQ ID NO: 2667 - RNA, 77 nt, Human
ggcgucugcuggaguggcccaaugcuauaugucaguugagguucuaagacuuggaagccacagaaaugcagaaugcc

SEQ ID NO: 2668 - RNA, 85 nt, Human
uguuuuucuccucauccuguaccucuuuuuucauuaagaauccugccuggaaguuuaggucaaagaggcugcuuggagcaaaaua

SEQ ID NO: 2669 - RNA, 63 nt, Human
guccgcuucucgcccaacaggagcaacccuaucaucgucuccugugggugggacaagcugggc

SEQ ID NO: 2670 - RNA, 76 nt, Human
uguggguaucuccucagaugggcaguuugcccucucaggcuccugggauggaacccugcgccucugggaucucaca

SEQ ID NO: 2671 - RNA, 120 nt, Human
agcgagcgggcgccgggaagcgaggagacgcccgcgggaggcccagcugcucggagcaacuggcauggcccgagccauggccgccgcguggccgcugcugcugguggcgcuacuggugcu

SEQ ID NO: 2672 - RNA, 65 nt, Human
gucacuugucuggagcuugaagaaguggguauuccccuucccaccccaggcacuggaggagcggc

SEQ ID NO: 2673 - RNA, 99 nt, Human
ggauuuaacaaugggucacuaauugaaaauaaaaagacaaaaggaaaacaggaaauagggacuuuugucucuagaagguuaggggcauuuguugagucu

SEQ ID NO: 2674 - RNA, 68 nt, Human
ucuacuauauuuuacaaaaaaacaacugaacauuuuacacauguacaguauuuuucaguaaaagugga

SEQ ID NO: 2675 - RNA, 97 nt, Human
gcacuuugugccgcaccagcuccagccgguccuuguccucagccgccgccagguaugcgcuggacgcccgcuucuccugcugggcggccuccagugc

SEQ ID NO: 2676 - RNA, 73 nt, Human
gcuccuucugagacuuuaacuccuuggugagcaucagaaccuguugcuccaaggcugccacuuucuccugggc

SEQ ID NO: 2677 - RNA, 131 nt, Human
gggaggugggcccucgauguggccuuuuuguggaaggcgguguugacccuggggcuggugcuucucuacuacugcuucuccaucggcaucaccuucuacaacaaguggcugacaaagagcuuccauuuccc

SEQ ID NO: 2678 - RNA, 68 nt, Human
ggugaggacucugccuggggcucugcugaugguuccgaaucauggagcugcagagagcuccuccagcc

SEQ ID NO: 2679 - RNA, 72 nt, Human
aaaaugagacugucaaacuuuacaguauaaucaaaucaaauuacaaaguuagaugaccaguauucucauuuu

SEQ ID NO: 2680 - RNA, 71 nt, Human
ggccaagugcagcggcucaugccuauaaucccagcauuuugggaggccaaagcaggaggaucacuugagcc

SEQ ID NO: 2681 - RNA, 63 nt, Human
guauuuauaaucauuuacuuguagcgaacuguuuaaaguuaacacuuguuuaaauuuuuuuac

SEQ ID NO: 2682 - RNA, 63 nt, Human
uggucagcuggucccugcggguccuaccagccagcuucucuguagggcucucggccgcgucca

SEQ ID NO: 2683 - RNA, 129 nt, Human
acauacgaaguuaccaccucaagggaauaacagaagaacguugcacaauguaucuacgggguacgcgaguucaaacaaugugggcacagcaacuucacucuacacacucugaccaucgcuucaguaugu

SEQ ID NO: 2684 - RNA, 66 nt, Human
ccacgcucagcuccgacugggacggcgagcgcaccgcgccgcagugucuacuccggaucaagcggg

SEQ ID NO: 2685 - RNA, 64 nt, Human
guucguuguaccugauacuguugacaugacuaagauucaugcauugaucacaggcccauuugac

SEQ ID NO: 2686 - RNA, 112 nt, Human
ucuucugaauuaucacagaaagaagaaaguuagaagaguuuaauguuaaguguauuaaaaaucauauucuaauucuuuuaauuugguuaucugaguaugauaauauaggaga

SEQ ID NO: 2687 - RNA, 71 nt, Human
cagcccaagccugacuauggagcugcuguggcuuucuuugaggagacagcccgccagcugggccugggcug

SEQ ID NO: 2688 - RNA, 79 nt, Human
aagagaaaaugguacagcaguuacaagaggauguggacauggaagaugcuccuuaaaaaucucuguaaccauuucuuuu

SEQ ID NO: 2689 - RNA, 71 nt, Human
cauuugaaaaugcccuuguggauacuuggaacuguaaauuauuuuauuuuuuacauaaggucacuuaaaug

SEQ ID NO: 2690 - RNA, 70 nt, Human
ugcaucuacauaauaucagauauuacggauguuagauugcaucucaguguaaaucuuuaugauagaugua

SEQ ID NO: 2691 - RNA, 78 nt, Human; identical to SEQ ID NO: 1996

SEQ ID NO: 2692 - RNA, 70 nt, Human
uggaguauuucacacugaggacuaaucugcuaucuucauuccagucccuaccccucagugccugcucuca

SEQ ID NO: 2693 - RNA, 70 nt, Human
gugaguguauauaauguggauuguggcccuguguauuaugauauuugguaguuuguguuauauuauuuac

SEQ ID NO: 2694 - RNA, 68 nt, Human
ugguuguuguguuuccauuuuaguggauaaaauugguauuuugaacuaugaauggagacuaacgccca

SEQ ID NO: 2695 - RNA, 82 nt, Human
auguuuucauacuggguacuacugaaauuuugcagaugugugcaucuguuccauuuaaggugcccuuaaauguguugaaugu

SEQ ID NO: 2696 - RNA, 62 nt, Human
uguguugaauguuuauguguaauggcuaaaguaucuauauguaugugcauaaaacugucaca

SEQ ID NO: 2697 - RNA, 69 nt, Human
aguaaggauaggccccaaauguggacagauccucuuagucacaugagccucuuggggucuauuuucucu

SEQ ID NO: 2698 - RNA, 86 nt, Human
uuuuauuuuuuuuuugagacggaguuucgcucuucucacccaggcuggagugcaaagcgagacucugucucaaaaacaaaacaaaa

SEQ ID NO: 2699 - RNA, 77 nt, Human
cugggacccuguacacguauccugaaaacuggagggccuucaaggcucucaucgcugcucaguacagcggggcucag

SEQ ID NO: 2700 - RNA, 72 nt, Human
gccaugcagaccuggcacggcgguuccuggggggccuacgaguccagggaccccguggcgcaucuggacagc

SEQ ID NO: 2701 - RNA, 102 nt, Human
cacuacguugaccugaaggaccguccauucuuugccggccuggugaaauacaugcacucagggccgguaguugccauggucugggaggggcugaauguggug

SEQ ID NO: 2702 - RNA, 90 nt, Human
cuugugggagagauuaucaagcguuuugagcagaaaggauuccgccuuguuggucugaaauucaugcaagcuuccgaagaucuucucaag

SEQ ID NO: 2703 - RNA, 98 nt, Human
accuugguggagaacaagaaagcucagcugguggugauugcacaaccgacguggauucccaucgaggcugguuggucuucuuggccugccccuggggu

SEQ ID NO: 2704 - RNA, 101 nt, Human
ggcccuggacccgccaaacagcuacucagcugcuuaagcuggcccacaaguacagaccagagacaaagcaagagaagaagcagagacuguuggcccgggcc

SEQ ID NO: 2705 - RNA, 60 nt, Human
ggugaauccccuguuugagaaaaggccuaagaauuuuggcauuggacaggacauccagcc

SEQ ID NO: 2706 - RNA, 63 nt, Human
ggcagcacacuggagcaaaagaagaaaaaccagcacaauucaucuuauuaccacuuagcagcc

SEQ ID NO: 2707 - RNA, 78 nt, Human
gggugcuccuuggggcacgcagacgguugugaaccuccggggcuggggggaauggccugcggugucgacagggcaucc

SEQ ID NO: 2708 - RNA, 66 nt, Human
gcaggggcuggcacugaugggcgaggggaggaagugccucccuuagaaacuugggccaaacccugu

SEQ ID NO: 2709 - RNA, 64 nt, Human
gggugggggcuggggguugggaaaagccauuuccugagaaguguccggcuccugggucucacuc

SEQ ID NO: 2710 - RNA, 60 nt, Human
uaaguguauauaacaguauaguaaguuuuagaaauuuaagguauuacuaugguauucuug

SEQ ID NO: 2711 - RNA, 66 nt, Human
cccaucucugugacuuccuuggagacucacuuccuaaugaggagugagcuucaucgagaagauggg

SEQ ID NO: 2712 - RNA, 78 nt, Human
cuggccgaggagaagcgcgagggcuacgagcgucuccugaagaugcaaaaccagcguggcggccgcgcucucuuccag

SEQ ID NO: 2713 - RNA, 98 nt, Human
gugggguaaaagcccagacgccaugaaagcugccuuggcccugggagaacaagcugaaccaggccuuuugcaucuucaugcccuggguucugccccgc

SEQ ID NO: 2714 - RNA, 130 nt, Human
cggcuauuuuuuuuuucuauuuuaguagagaugggguuucaccauguuagucuugaggucaggaauuugagaccaggcugggcagcauuggugaaaccccgucucuacaaaaaaauacaaaaauuagccg

SEQ ID NO: 2715 - RNA, 86 nt, Human
uuuguuuuuguuuuuuuaauggucagauggauagaacaacacagguuuuguuuguuuguuuuaacuuuuaaaaaaauuauaauaga

SEQ ID NO: 2716 - RNA, 61 nt, Human
cuacacauuuaaaggaacuguuaaacugaaaaagacuugacaauuuuugguaaauccguag

SEQ ID NO: 2717 - RNA, 74 nt, Human
gcuggugacggcggcgggcacugcugagucacgugaaacacagguucccccacguuccccccacccccgccggc

SEQ ID NO: 2718 - RNA, 70 nt, Human
gccagccccugggguuuccaccuccugccuccggcccuccagaggggugaggccccaaccccagggcagc

SEQ ID NO: 2719 - RNA, 82 nt, Human
gccaugccaucgucagugaccccgaggcagguaacgcuguugacgugccaucgaggacugcugcacggucgcccuucauggc

SEQ ID NO: 2720 - RNA, 70 nt, Human
ccauccugucuuccucccagggucugguuggcggcuuuuuacucucaauaaaggauggauggauggaugg

SEQ ID NO: 2721 - RNA, 81 nt, Human
cggauggagcuugagcaacgccccgcccuuuguugagauuccccaacccugcuagccuuguaaacuccugagccuucaccg

SEQ ID NO: 2722 - RNA, 74 nt, Human
cgggauaauggggucucaaaagguuuuggaaguaguagauaccucuaaaagccaaggagcagcccuaguucucg

SEQ ID NO: 2723 - RNA, 64 nt, Human
gaguuguguacuuauaagaggaagcagaacuugcauggaggaguuugggaugggugcacaacuc

SEQ ID NO: 2724 - RNA, 66 nt, Human
uccugugggugguauucugauugggaagggauuuuuuucaauuguuuacauucuaccugagcaggg

SEQ ID NO: 2725 - RNA, 78 nt, Human; identical to SEQ ID NO: 99

SEQ ID NO: 2726 - RNA, 65 nt, Human; identical to SEQ ID NO: 247

SEQ ID NO: 2727 - RNA, 80 nt, Human; identical to SEQ ID NO: 100

SEQ ID NO: 2728 - RNA, 72 nt, Human
ccgcuucacuggcaccauggaugccuucgugaagaucgugaggcacgagggcaccaggacccucuggagcgg

SEQ ID NO: 2729 - RNA, 83 nt, Human
ccuucgagaugugcccuucucagcccuguacugguucaacuaugagcuggugaagagcuggcucaaugggcucaggccgaagg

SEQ ID NO: 2730 - RNA, 130 nt, Human; identical to SEQ ID NO: 2385

SEQ ID NO: 2731 - RNA, 65 nt, Human; identical to SEQ ID NO: 2386

SEQ ID NO: 2732 - RNA, 63 nt, Human
acuuuauuuuucuuacacuuuuaagguugaugaaaaaccuucauuucaauugaaaaguauggu

SEQ ID NO: 2733 - RNA, 88 nt, Human
gucaucaucaucaucaucgucaucaucaucaucuucacguuuucuuuucaaugcauuugaugauucauuggcaguauuuugugaugac

SEQ ID NO: 2734 - RNA, 68 nt, Human
uuagugguaauaagaauguuuuuggacccgauuaaugauggauuaaucagaacauucugaacugcuga

SEQ ID NO: 2735 - RNA, 74 nt, Human; identical to SEQ ID NO: 424

SEQ ID NO: 2736 - RNA, 86 nt, Human
gucgguagggggcagucuugcuuuauucauccuccaucucaaaaugaacuuggaauuaaauauuguaagauauguauaaugcuggc

SEQ ID NO: 2737 - RNA, 99 nt, Human; identical to SEQ ID NO: 425

SEQ ID NO: 2738 - RNA, 78 nt, Human; identical to SEQ ID NO: 99

SEQ ID NO: 2739 - RNA, 65 nt, Human
gcgacaugggccucuauaaaagguucuuaaaaccaucuugggggccggggggcccugaugguugc

SEQ ID NO: 2740 - RNA, 80 nt, Human; identical to SEQ ID NO: 100

SEQ ID NO: 2741 - RNA, 81 nt, Human
ggaggggcugggcucuaccccuuucuucuuuccauccagucuauugccagauccagagaaagcgcggaagcccagcucucc

SEQ ID NO: 2742 - RNA, 84 nt, Human
aaauccuguuuuacuaucucaacugugcuuaggcagcauuuuaacguuuaagucacagcugaaaauaaaaagaaaacaagauuu

SEQ ID NO: 2743 - RNA, 63 nt, Human
ugguggcaugugccuguagucccagcuacucaggaggcugaggcaggagaauugcuugaacca

SEQ ID NO: 2744 - RNA, 70 nt, Human
cucgaggaaaaaggcucgaaucuuauaaugagauacccuuugaacagaucucgauucgaaccggcccggg

SEQ ID NO: 2745 - RNA, 70 nt, Human
gcaugagaucuuugcgcguucgagguguuaccauaugcccguaagauuuuagaccgugcaauuauuaagc

SEQ ID NO: 2746 - RNA, 67 nt, Human
gaugaccuuucagaugcuuucucuggaacugaaccagagguucacaaaacaaguguaguagguuguu

SEQ ID NO: 2747 - RNA, 65 nt, Human
gcacagaaaucaaaaguguagcuaaugcuugauauguucaacugggagacacuauuuaucugugc

SEQ ID NO: 2748 - RNA, 65 nt, Human
caccuucaaugucacugucaccaagacugacaagacgcuagucuugcugaugggcaaagaaggug

SEQ ID NO: 2749 - RNA, 66 nt, Human
gggacucacugcugcaggauggggaauuuagcauggaucuucguaccaagagcaccgguggggccc

SEQ ID NO: 2750 - RNA, 90 nt, Human
uggcggacgggaccugucaggacgcggccaucgugggcuacaaggacucgcccuccgucugggccgccguccccgggaaaacguucguca

SEQ ID NO: 2751 - RNA, 101 nt, Human
gagagcaggcgcugggcaguguggaggucguuggagucacuuccgcgucaccagcuccugugccugccagucggugccccucccgcuccagccaugcucuc

SEQ ID NO: 2752 - RNA, 74 nt, Human
gucccugucauugguggccaugcugggaagaccaucaucccccugaucucucagcgcacccccaaggugggaac

SEQ ID NO: 2753 - RNA, 69 nt, Human
uggaggcaucgggcagccacuuucacuucuccugaagaacagccccuuggugagccgccugacccucua

SEQ ID NO: 2754 - RNA, 73 nt, Human
gcugggagccuugagagccaugugcaagaggacagauccuguuccugucaccauugcucucgauucacucagc

SEQ ID NO: 2755 - RNA, 83 nt, Human
ccaccaucaucugauuuucuagcugauguuguugggcuacaaacugaacaaagagcuggagaucugcccaagacaauggaagg

SEQ ID NO: 2756 - RNA, 67 nt, Human; identical to SEQ ID NO: 681

SEQ ID NO: 2757 - RNA, 71 nt, Human
agagggauguagccagauucuguggaccgccgucuuuuucacccuuaagaauccgucgcuaugauuucucu

SEQ ID NO: 2758 - RNA, 60 nt, Human
auuugcaauaaaugauucacuccuuagcuccaaaagcaaguccuuuaucaaaaugcaaau

SEQ ID NO: 2759 - RNA, 74 nt, Human
gagcaugaaagcagcaaggggguaaggaugcacacggagaucugacguucgcagggacuuccaugcucauguuc

SEQ ID NO: 2760 - RNA, 66 nt, Human
ccuuucuccguccuucauggaagcccugggagauaaccuggcuuccuggaguugauggaauaaagg

SEQ ID NO: 2761 - RNA, 76 nt, Human
auguaaacucgcguccgugcugcgugcccagaguaguggccgaauaccuuaacggggcugugcgcgaggagagcau

SEQ ID NO: 2762 - RNA, 78 nt, Human
ugcgcauucccaagucacgaugucacuguacauccgaucggagaugaggauacaugugugaugccacuggaugaugca

SEQ ID NO: 2763 - RNA, 72 nt, Human
gggcagcugagcgaugccaggaacaaagagaaccugcaaccgcagagcucugguguccaaggucaggugccc

SEQ ID NO: 2764 - RNA, 60 nt, Human
ggcggaucaccugaggucaggaguuugagaccagccugaccaauguggugaaaccccguc

SEQ ID NO: 2765 - RNA, 71 nt, Human
gggaguaaggcagggcagugugccacccccugcaagauggacccaggcagagugcccugaucuucccuccu

SEQ ID NO: 2766 - RNA, 63 nt, Human
ggaguggagggggcugcccacccucgcuguacacagcugggcccagauggccccuucugaucc

SEQ ID NO: 2767 - RNA, 68 nt, Human
uugcaaucugaacucgggccguuaaauauaccgcgggaacgguuggcaaauggcgaguuuuuuugcaa

SEQ ID NO: 2768 - RNA, 81 nt, Human
agaguggcuuugagaauuuuguaaggaacaaacauguuuuugguucuggaauauaggaggugcucaauaaaaguugacucu

SEQ ID NO: 2769 - RNA, 76 nt, Human
gauuuuaagaaaacuguaaaagccaagauuuuguaguaaugacacaaauguaacaaauagauguuuucuuaaaauu

SEQ ID NO: 2770 - RNA, 60 nt, Human
caggccugagaagcugcccuccuagggcccucccaguggccugucucucccagcggccug

SEQ ID NO: 2771 - RNA, 82 nt, Human
gccugucaccuaaaucuuaugcaacuuaucaaagaaaugcuucuacauucuuacaaagaccacuaggaagagguggcaaggu

SEQ ID NO: 2772 - RNA, 106 nt, Human
accauccaccaccgucuucuuuagaacacuguuuucugggaucugauguuaaccagccgucauugucucugucauacgugcugaagaacaugccguugugaauggu

SEQ ID NO: 2773 - RNA, 69 nt, Human
ggggacuauugcugugggaagaagggccugaucuucauacucaucuuccucauugaguaccaugacccc

SEQ ID NO: 2774 - RNA, 102 nt, Human
ggugacgcugcggggcgggcggacagacugcgggacggacgguggacgcugggacgcguuuguagcuccggccccgccguuccgacccccgccgccgucgcc

SEQ ID NO: 2775 - RNA, 69 nt, Human
ugugguccaaccugggcauuggccuagcuaucucccugucugugguuggggcagccuggggcaucuaua

SEQ ID NO: 2776 - RNA, 74 nt, Human
guugccaaggaaggcuuuuucugauuuuuugacaaaugaauuuuugcacacuuucauuggugucuuucggcaac

SEQ ID NO: 2777 - RNA, 64 nt, Human
aggcgggcggaucacgaggucaggagaucgaaaccauccuggcuaacacggugaaaccccgucu

SEQ ID NO: 2778 - RNA, 61 nt, Human
uguguccuugacuaaaaccauacguggcuauggaaaccauguuuguaguucugaauacaca

SEQ ID NO: 2779 - RNA, 60 nt, Human; identical to SEQ ID NO: 1551

SEQ ID NO: 2780 - RNA, 65 nt, Human
ugccccccgggccgucuuccccuccaucguggggcgccccaggcaccagggcgugauggggggca

SEQ ID NO: 2781 - RNA, 65 nt, Human
ccaggagcccgugagugugccccagacacugacuagcacgcuggagcacauugugggccagcugg

SEQ ID NO: 2782 - RNA, 93 nt, Human
gugaauugcuauauuguucaccagaaagacagaaguuaauccccagaugggaaauuucagauuuuucuuuugguuugcuuuuugguuuuucau

SEQ ID NO: 2783 - RNA, 62 nt, Human
ugggggguguugcuauguugcccggguugggucuugaacuccugacuucaagcaauccccca

SEQ ID NO: 2784 - RNA, 67 nt, Human
uuuuugcuuuggcaauuacauuuauguucuugggagcccagacacugauauaaauuuccagcaaaaa

SEQ ID NO: 2785 - RNA, 67 nt, Human
gcugugcggcucaaggagaagaagcuggugaaggaggucaucgccgucagcugugggccugcacagu

SEQ ID NO: 2786 - RNA, 72 nt, Human; identical to SEQ ID NO: 2728

SEQ ID NO: 2787 - RNA, 65 nt, Human; identical to SEQ ID NO: 2386

SEQ ID NO: 2788 - RNA, 86 nt, Human
aaggaucuaaacauugagauuuuuaaaucaagguuuugaguuggcacaauguuccuacuaagucaaguuucaauuagcacaucuuu

SEQ ID NO: 2789 - RNA, 61 nt, Human
augccaggaaaaggucucagguguagagggucuacauuucaggauaaauggucucuggcau

SEQ ID NO: 2790 - RNA, 68 nt, Human
cuaaagcuguauauuuaugaagaaaaggugauugucccuuuuuaugcauguguaggaucuuguuuuag

SEQ ID NO: 2791 - RNA, 61 nt, Human
gugguguuguuuuugguccugauaagaagcugaagcugucuauccucuacccagcuaccac

SEQ ID NO: 2792 - RNA, 85 nt, Human
ggaaauugacaucuaugcuaaccugucugaugaaaaggcuuucguguuuucagucgccuuggcagaaauaaauagaaaaauuauc

SEQ ID NO: 2793 - RNA, 105 nt, Human
uccuuguuuaccaaggaguauugucaguguuuaguguugggauauaaguaaguguauuugccaacaacaaaaaaaaacaaaaaaaugcuggauggauguuaagga

SEQ ID NO: 2794 - RNA, 60 nt, Human
auagagaaaacacugauugauaauaggcauuuuaguggucuuuuuaauguuuucugcugu

SEQ ID NO: 2795 - RNA, 79 nt, Human
aauguggucgaagauucaaaagcauguuaccuucaaccaagugaaaggcauuuucggcuucacugacagcgacugcauu

SEQ ID NO: 2796 - RNA, 62 nt, Human
gcauguaggucaccucauuccauuuauuuucacaaaguggcuccaggauguauuuaacgugc

SEQ ID NO: 2797 - RNA, 68 nt, Human
gcccugcagggagccagaccaaaaugagugcaacgaaccaaaucaucaucuuuccucaccgacagggc

SEQ ID NO: 2798 - RNA, 62 nt, Human
ucugauguggaccggucuuaauguacugacuucuuccucaggagagacagucgacaaucaga

SEQ ID NO: 2799 - RNA, 62 nt, Human
uggcaucaugcccggacagaccugaagaagaaucgggacuacccauagcuccaaagaugcca

SEQ ID NO: 2800 - RNA, 94 nt, Human
ucuuccgccguaucaggacgcugaaagggaaacuggccaggcagcacccagaggccuucagccauaucccagaggcauccuuccuggaggaaga

SEQ ID NO: 2801 - RNA, 64 nt, Human
caccgcgccgacguccccucggccugcgcucuccucccgcuuguccccuguguucgugcuggug

SEQ ID NO: 2802 - RNA, 66 nt, Human
gcacucuguucuuccgccgcuccgccgucgcguuucucugccggucgcaauggaagaagagaucgc

SEQ ID NO: 2803 - RNA, 86 nt, Human
gcccuccgcgcgccuacauuucucggugcuacugaugcccgcccacuucucauuugucgcaccgccguguucgcgccccgcgccgc

SEQ ID NO: 2804 - RNA, 89 nt, Human
uucguuuugaccacauauauaccaagccccuuagucuuagagauacccucugagacagagagccaagcuaaugugguagugaaaacgag

SEQ ID NO: 2805 - RNA, 86 nt, Human
cgauuuucuucuacauucauugaugccccuuguaauguuugcauacacuagaaaaugccuucaauuuguguuuuaccagaauuuug

SEQ ID NO: 2806 - RNA, 61 nt, Human
uaucuuucaucauuaaacauccuucuuuuucuauuguuuggguguaauuuuuguaaagaua

SEQ ID NO: 2807 - RNA, 60 nt, Human
cccugcuagccuuuaaguggaugguuucucuuagccaguucuuaauuuuuguuagggggg

SEQ ID NO: 2808 - RNA, 67 nt, Human
ggcgggguggggaauaaauauauuaagugccucuuggcauuugggguguuuaaacaauaacccggcc

SEQ ID NO: 2809 - RNA, 74 nt, Human
uaaaggugaccguaaggagucccuuggggaggauuugaaaauuuguccuucccaaaaguugcccggaaccuuug

SEQ ID NO: 2810 - RNA, 101 nt, Human
gaggccgucaaagugcacagcuuccccacacucaaguucuuuccugccagugccgacaggacggucauugauuacaacggggaacgcacgcugaugguuuu

SEQ ID NO: 2811 - RNA, 68 nt, Human
aucccuugugcugacgcgacgggaugccagcaagagcugguauaauuaucgucgcgcugaagagggau

SEQ ID NO: 2812 - RNA, 104 nt, Human
cgggcuuuucaaaaaggagggacacaaauuaaacccuuuccccuuuguuggacgcccccuuucaacauagggaggggauuugcuccuccacaagagaagcagcg

SEQ ID NO: 2813 - RNA, 96 nt, Human
cuacaugaagaagagagaagaggagaugcgugauaccaagagucaaaaaacucggguccuauacuucagcaucuuuucaaguucugucucaugugg

SEQ ID NO: 2814 - RNA, 70 nt, Human
ggauccuaccaacaggcccuccaggccgugggguuuugccaaaagaacccuuuggggggggccugggucc

SEQ ID NO: 2815 - RNA, 71 nt, Human
gguccuugccaucuccuuccaucugcccauuaacucucgcaagugccuccgugaggagauucacaaggacc

SEQ ID NO: 2816 - RNA, 72 nt, Human
aggaggagcagugagggauuuauuaaauggaguaaagccucaggauauagauuugccaccacugcuaccccu

SEQ ID NO: 2817 - RNA, 85 nt, Human
gaugcugaggugccuguaucauuggcacaggccagugcugaaccguagguggaguaggcugugccuucugaagcaguaucuauuc

SEQ ID NO: 2818 - RNA, 66 nt, Human
uugagauuacuacacuacggauugaugucaccacugauggaagacaugcugagguagaauuuacaa

SEQ ID NO: 2819 - RNA, 60 nt, Human
cauaggcuuugauucugugagcccaaauucacauauugaagaagaucaaagcaaacugug

SEQ ID NO: 2820 - RNA, 72 nt, Human
gcucacuagucacaggucuuuuagguccuucuggaugucccacaggguaucugcacuuuucuugagcugagc

SEQ ID NO: 2821 - RNA, 64 nt, Human
uuggguaauccacuuaguuuccagguaacauacguaagaauguccacuggguuggaaaccccaa

SEQ ID NO: 2822 - RNA, 61 nt, Human
gccaguuuaacugucuagcaaaaugcauuucauuuuaaaauuggauauugggagacuuggc

SEQ ID NO: 2823 - RNA, 64 nt, Human
guccauauuacccuucagcaccugagucccaagcugaggucucaacaugggugaugugaaggac

SEQ ID NO: 2824 - RNA, 66 nt, Human
gucacuuuaaacugaggaaacggcaaaugguguuuuaaagcucuuuguauuucuccaguuucugac

SEQ ID NO: 2825 - RNA, 60 nt, Human
cccugggguuggggccucaccccucuggagggccggaggcaggagguggaaaccccaggg

SEQ ID NO: 2826 - RNA, 66 nt, Human
uggcuuuuuuaaaacugguuuuauuuuaauuuuuauuauauuuucaguuuuuccauaaaggagcca

SEQ ID NO: 2827 - RNA, 68 nt, Human
cccugagcgcaagagccaagccgccagcgcugcgaugugggccacgcugccgcugcucugcgccgggg

SEQ ID NO: 2828 - RNA, 65 nt, Human
ccugcggucugguuccuccaucagggcgcuguggguauggcccugaggugaggggcaggccuggg

SEQ ID NO: 2829 - RNA, 60 nt, Human
gaggacauucaaaacccuccagccacagauggccagaaacuuugguuuguguuuguuuuc

SEQ ID NO: 2830 - RNA, 73 nt, Human
cuacuaggggggccgaugucgcguaucccuccugucaccuggaccaacgcguaaacgcggcccacuuuaguag

SEQ ID NO: 2831 - RNA, 64 nt, Human
guguguuuagggggggcguggcuagcgcccuuucccuuacgucacccccccucuuggucaccac

SEQ ID NO: 2832 - RNA, 67 nt, Human
gagcaagcggggcccgcgcagcuucaggguccgcaagggccggggcgccaagggcaucggcuuccuc

SEQ ID NO: 2833 - RNA, 73 nt, Human
gggcuggagguucgugcagaucaaggagauggucccggaguucgucgucccggaucugaccggcuucaagcuc

SEQ ID NO: 2834 - RNA, 80 nt, Human
gcgucguagcagccaugcccuagaccgucauacacuaaucuacuccuaaugaccaagaucuauugcacgauacaugacgc

SEQ ID NO: 2835 - RNA, 63 nt, Human
auuuggcucucuuauaucccaugcauauccaccaccaugauauguucccaccaguacccgaau

SEQ ID NO: 2836 - RNA, 72 nt, Human
ggaucgugccgcccgccuuucuugaccgucaucguuuggcucuccacauuuugcuuaccgugcucgcugucc

SEQ ID NO: 2837 - RNA, 84 nt, Human
uuuuuuuuuuuuugauuguuuugacaaguuuuuauugcgcaucaaauugcgucauuguuuuguuuagcauugaaaggaguuaaa

SEQ ID NO: 2838 - RNA, 78 nt, Human
cugggguguuuauggcaagucacuuugacagacauuauuguggcaaaugucgucugacuuacuguuucaacaaaccag

SEQ ID NO: 2839 - RNA, 72 nt, Human
guaccagcacuuaaauuugucagcaggcugaccaaagaguggccugucuguuggcauucaucggacaugggc

SEQ ID NO: 2840 - RNA, 84 nt, Human
ucccuucagcucuccagugaguuucaaguucagagcacuuucaguccuugucuuguuuaucuauuacugaaggguuucuaggga

SEQ ID NO: 2841 - RNA, 104 nt, Human
caauaaauaaauguggauuugugcucuuguauuuuuaaguggauuaaaaaacuuacuaccucaaaaaaaaaacaaacacaguaaacaaaacacacauuuuguug

SEQ ID NO: 2842 - RNA, 66 nt, Human
gccaucuuggcuccuguggaggccugcugggaacgggacuucuaaaaggaacuaugucuggaaggc

SEQ ID NO: 2843 - RNA, 73 nt, Human
ccucugccuugcccccagacccaccagccaggagccagaggagggaggcugaggggcggggacgaggaagagg

SEQ ID NO: 2844 - RNA, 78 nt, Human
cuuccagguccucaguacagaaccaccacgagggaaacccagaccuagguuuccggcgccgacucugaggcccgggag

SEQ ID NO: 2845 - RNA, 70 nt, Human
gucuuucacgccugucucacuccacacggugccccgaccccagggucccgaaagucccaggcuguuggac

SEQ ID NO: 2846 - RNA, 69 nt, Human
ccccagcuaccccuucuuugcagggcuaaggcccccaaacauagccccugccccggaggaagcuugggg

SEQ ID NO: 2847 - RNA, 75 nt, Human
cccguccguggcucgcucccggggcgggucuccgggugacuucgggggcucucgcucgggggucccgcgugccgg

SEQ ID NO: 2848 - RNA, 62 nt, Human; identical to SEQ ID NO: 1789

SEQ ID NO: 2849 - RNA, 75 nt, Human; identical to SEQ ID NO: 1790

SEQ ID NO: 2850 - RNA, 61 nt, Human
cccucauaccaacuguggacuuggaauaucagcagaguaguaggcacaguuguaaaaaggg

SEQ ID NO: 2851 - RNA, 68 nt, Human
gauuucgguaggcacagguguaggugagaagaugagaaagaaaugaugcugagggaccuagugaaauc

SEQ ID NO: 2852 - RNA, 94 nt, Human
guuauauucccagaggaugucagucccaaggaccaguagcugccaucaguuuggauucugaaaacuaacuggcaucaacacuggguguagaaac

SEQ ID NO: 2853 - RNA, 68 nt, Human
uugcccaggcuggagugugguggcacaaucacagcucauugcauccucaaucacccaggccuaagcaa

SEQ ID NO: 2854 - RNA, 89 nt, Human
cgcugguuccugcggcuucugcucagacaccaacgccagacggcgaugccucucggguggugacuccagcgcaggaacuugaagaagcg

SEQ ID NO: 2855 - RNA, 77 nt, Human
uccgauuggugaggcuguccuugggaaaugggugaaauugaaaaccaucaaaacaauuggacuucuuaaaaauugga

SEQ ID NO: 2856 - RNA, 131 nt, Human
ugagugaaagguguuuaugagaagucgaugacuccggaucuuaucauccaagaggacagcacagaauaguuaauuuugucccuggagggacuaggaugcuggacgucuuuuucugauacccgaucauuacg

SEQ ID NO: 2857 - RNA, 68 nt, Human
uggaaucucggagggccacuaaccgggguccuuucucaaggggguuccccagaggaacuccgauuuca

SEQ ID NO: 2858 - RNA, 60 nt, Human
gcacuauacaccaaagucaaucauuauaaagauucacgauggaaguugguucaauugugc

SEQ ID NO: 2859 - RNA, 84 nt, Human
gcuagcuaucugaugagucgcugugccauagcuugaucuauguuucuaucaaauaugguaaguauaaacuucauucauacuggc

SEQ ID NO: 2860 - RNA, 60 nt, Human
gcgccaugcucguccucagaagcgcccugacucgggcgcuggccucacggacgcuggcgc

SEQ ID NO: 2861 - RNA, 87 nt, Human
ggagucuaugaacuggccacuuuucagaugaaaccuggugggccagcucuguggggugaugcauuuaaaagggcaguucaaugcuuc

SEQ ID NO: 2862 - RNA, 87 nt, Human
uggguauggaaucuugcggcauccacgagaccaccuucaacuccaucaugaagugugacguggacauccgcaaagaccuguacgcca

SEQ ID NO: 2863 - RNA, 81 nt, Human
uauucuuggccucaauaucuaccaccuauuuuuuaaccagacaaauuugaauguaucaagauaauuuggggcaagagagua

SEQ ID NO: 2864 - RNA, 74 nt, Human
ggccacgugcugccccuccuggacaauaauuuagcaauaaauacugcgcagggcagggguagggcaccaaggcc

SEQ ID NO: 2865 - RNA, 68 nt, Human
ugccugcaagaggucaggccccugccgcccuacacgaaguugagcgcucgggccucaccccgcaucca

SEQ ID NO: 2866 - RNA, 62 nt, Human
ccauaugcacuuuugagcauuucuacagcaugcgauucuaagaguaaacccacccaauaugg

SEQ ID NO: 2867 - RNA, 63 nt, Human
acccgauuuuuuucaaccguggguauaaaagcugucaaugguaaaaaaaaaaaaaaauugggu

SEQ ID NO: 2868 - RNA, 131 nt, Human
cuaugaaaaagcaaagcacuaucacaaggaauauaggcagauguacagaacugaaauucgaauggcgaggauggcaagaaaagcuggcaacuucuauguaccugcagaacccaaauuggcguugucaucag

SEQ ID NO: 2869 - RNA, 70 nt, Human
uucuugccuggugucggugguuaguuucugcgacugugugggacugcugauaggaagaugucuucaggaa

SEQ ID NO: 2870 - RNA, 76 nt, Human
uauucauucugaugauggauguuugaguuguuuccaguaugggacaauuacaaaucgcucccuaucaggauuuaua

SEQ ID NO: 2871 - RNA, 65 nt, Human
uguggcguguaacaguaguuugcucauuuucauuguuuuauaaacuguuguauaaauaugcccca

SEQ ID NO: 2872 - RNA, 82 nt, Human
aacagaaagauauggggagcuugugagugauuauacuauguucauagaacagauuaauauagagauugacguauuauauguu

SEQ ID NO: 2873 - RNA, 76 nt, Human
cagguuccugcugcucaacagaugcuaagauuuuuccugagaaaaacaaggaaaaagcaguugauugcagaacuug

SEQ ID NO: 2874 - RNA, 81 nt, Human
ucuccguuacugacauuuacuccaagaaaaccauuagcaagaguaaggugcuagugguggaagagaauggcuggacggggg

SEQ ID NO: 2875 - RNA, 72 nt, Human
cuuauuguaacugacaacuguuuucaacuccaagagcuaaacuauuggcaguucauguuaaguuacagugag

SEQ ID NO: 2876 - RNA, 64 nt, Human
ugucagugaguggcucuugugccugcuguaaacauuacgccugcacuagggccaugugcuguca

SEQ ID NO: 2877 - RNA, 72 nt, Human
gagucugaaguuguuaccauggugaaauacugugcaaaaaguguuucucagaaugaugaugguuccagauuc

SEQ ID NO: 2878 - RNA, 89 nt, Human
gaggggaaaggagccccaaagagaagggacgcagggcaaaaaucaugcagccccagcaccccaccucugcgggcuggccaccuccccuc

SEQ ID NO: 2879 - RNA, 85 nt, Human
uauucaucacguuggguugaaaaguuggaagauuuugcaucuuauugaaaagaauuuuucaaaaauguuucuguacaaaugaaug

SEQ ID NO: 2880 - RNA, 62 nt, Human
caccugggcuauauuuuuuuuuaauuuuuaguagaauaaaagaauaauuuuauccucaggug

SEQ ID NO: 2881 - RNA, 63 nt, Human
uaagauuacaggcaugagccaccacaccugggcgcaaugugguccauuccuuuaauguccuua

SEQ ID NO: 2882 - RNA, 87 nt, Human
agcaacuggguucccauggcaugugguggccuuagaggagguguucagccugccaccgucggugcuuuggugcucugcccaggagcu

SEQ ID NO: 2883 - RNA, 64 nt, Human
agggucuuuccaacuguucuggucagugaggacccugacugcaaggaggaguucuggagacccu

SEQ ID NO: 2884 - RNA, 74 nt, Human
ggggggggacgcauauaggcgaaacccggcuggauaauaccccaaguugccuuaagugugggaaaaaccccccc

SEQ ID NO: 2885 - RNA, 69 nt, Human
uuauguuuauacacuguggugcuuuuacuuuuuauuuaaacuaaggcaaaaaaaugguguugaacguaa

SEQ ID NO: 2886 - RNA, 69 nt, Human
aaaagaauuauuuaugcauuccccuuaauugugugccuaacacguuuaacugccuuauuuuauuuuuuu

SEQ ID NO: 2887 - RNA, 63 nt, Human
uuugauucuucagcacuuaauagucugccuggcacuaagugcucaauaaauucugaacucaaa

SEQ ID NO: 2888 - RNA, 69 nt, Human
cagaaaugcuuccuggaauauuacgucagcuuggugcugacaguuuaacaagccuuaggaaguuagcug

SEQ ID NO: 2889 - RNA, 76 nt, Human
gaugucuuauuauuaaaguuaccuauuauuguuggaaauaaacuaauuguauggguuuagaugguaacauggcauu

SEQ ID NO: 2890 - RNA, 62 nt, Human
gcucuccgccgcagcuucagcaccucggcccagaacaaugcuaaaguagcugugcuaggggc

SEQ ID NO: 2891 - RNA, 70 nt, Human
cagcgcaaacuccucaacaacacucucggcaccacaagcguaggagagauggguuggcuuguuugcccug

SEQ ID NO: 2892 - RNA, 77 nt, Human
gauuaaagggagacaauggugucuuggaggcaaacuacaguuugcuguaagauaacuuuccgugcaucuuuuaaauc

SEQ ID NO: 2893 - RNA, 98 nt, Human
gguaccccaggaggaugccuuguaacugcucuuuggucaugauagugguaaugaauccauucauguaaaaugcaauaugucuguuaguuuggggcacc

SEQ ID NO: 2894 - RNA, 67 nt, Human
ccgaggaagcuaaggcugcguuggggugaggcccucacuucauccggcgacuagcuaccgcgcucgg

SEQ ID NO: 2895 - RNA, 69 nt, Human
gggcauuugaagucauggucaucaaaaagaaaugauuguuuuuugaaaagcuaaaugcuuaaaaugcuu

SEQ ID NO: 2896 - RNA, 67 nt, Human
gguuguugaguuuguuuuuaaacauuuuuauaaguucaugagaaaaaauauauaaauucuaagaacc

SEQ ID NO: 2897 - RNA, 63 nt, Human
uggacucuggggggacaccaaagaugcccugugaccacuuuugguguugcccgaguuagucca

SEQ ID NO: 2898 - RNA, 60 nt, Human; identical to SEQ ID NO: 1551

SEQ ID NO: 2899 - RNA, 69 nt, Human
cggggccaaaaaaggggggggguuuaaaccccccggagggggggcccccuuuuuuuuuugccgaccccg

SEQ ID NO: 2900 - RNA, 63 nt, Human
ggucaccccgccggccccgacgggcgcccuggcgcccggggguacccagaggcgggaaagacc

SEQ ID NO: 2901 - RNA, 73 nt, Human
uuuuuuuuuuuuuuuuuuucccgggcccacuuuuuuaauuuuuuuuggguugguuuaaaaaaaaaaaaaaaaa

SEQ ID NO: 2902 - RNA, 61 nt, Human
acggaucccaggagcccacacaugacauccugcagaugcucagugaccuccaggagucugu

SEQ ID NO: 2903 - RNA, 76 nt, Human
caugucuuaucccgcugaugauuaugagucugaggcggcuuaugaccccuacgcuuaucccagcgacuaugauaug

SEQ ID NO: 2904 - RNA, 62 nt, Human
uggcaaugaugcugucuuccugauuuuauacaaagaauuauacuacaggcacauauaugcca

SEQ ID NO: 2905 - RNA, 60 nt, Human
uccggauuuucggauucgucgacccacgcguccggucggcagcugugaggggguuccggg

SEQ ID NO: 2906 - RNA, 74 nt, Human
uccugcuuauuguaacugacaacuguuuucaacuccaagagcuaaacuauugggcaguucauguuaaguuagga

SEQ ID NO: 2907 - RNA, 65 nt, Human
gagaaaacugguuuuucuguuucuagcaaagauaguaaaggcuuagaaauaaaaucuguuuucuu

SEQ ID NO: 2908 - RNA, 75 nt, Human; identical to SEQ ID NO: 74

SEQ ID NO: 2909 - RNA, 87 nt, Human; identical to SEQ ID NO: 76

SEQ ID NO: 2910 - RNA, 88 nt, Human
uccaguggcgggacccaaugcagacuggcauuuaaggcugggggauagcuuuggugcccauuggcccgucggcccgccgugaacugga

SEQ ID NO: 2911 - RNA, 71 nt, Human; identical to SEQ ID NO: 77

SEQ ID NO: 2912 - RNA, 81 nt, Human
gagguuaucuugugguuuauuuuauauucuacuuaacuuuaacauuucugcagguagaauaaauauccuauuuaaagcuuu

SEQ ID NO: 2913 - RNA, 83 nt, Human; identical to SEQ ID NO: 1471

SEQ ID NO: 2914 - RNA, 75 nt, Human
cgaccucaacgucacccgccugucccacuuugaguacgucaagaaugaggaccuggagaagaucggcaugggucg

SEQ ID NO: 2915 - RNA, 80 nt, Human
gcagaggcugggaggcggcagaaugcagccagaggagggcacaggcuggcugcuggagcugcuguccgaggugcagcugc

SEQ ID NO: 2916 - RNA, 85 nt, Human
ucucucccugaccgcagccgcugggauuuggggcuccaugggggagagaucugcuuaccagcgccuggcugggggcgaggaggga

SEQ ID NO: 2917 - RNA, 61 nt, Human
ccauuuaaaaaugcuuggaacuauaugugaauaauuauacaaaguuccagaugcaacaugg

SEQ ID NO: 2918 - RNA, 63 nt, Human
caaggggaggaucaagugggggggugcaucucggucacccaucaacaugguuuuucacucuug

SEQ ID NO: 2919 - RNA, 73 nt, Human
ucuuuguuugaaaaucuauauaaaguacaacuugcuuuuagcaugauuauuuuccuaaauaaaaagacaaaga

SEQ ID NO: 2920 - RNA, 66 nt, Human
cuccucaccgccuggcuaccugaccuugguguugagcuucagguaugccacauagugugucaggag

SEQ ID NO: 2921 - RNA, 104 nt, Human
ggcagccacagguuucaacucccauuugugaauaaauuaaaugacucuuuacaaaaccaucagcagucuugguguaucacauuugguauuuagaaacuuuuguc

SEQ ID NO: 2922 - RNA, 91 nt, Human
augcaaaugucuucagguuagaaagccuuuauuuacuuuggaaaugaacaagaaaugccucugucuuagaaaccuggagauuauuugacgu

SEQ ID NO: 2923 - RNA, 69 nt, Human
ucaacuaaugcgacuuaugguagccaaggaagcccgcaauguuaccauggaaacugagugaaugguuga

SEQ ID NO: 2924 - RNA, 60 nt, Human
gcuaccuguacagaauggauuacauaugcaaaaauaaaaaucucaagaccacaggacagc

SEQ ID NO: 2925 - RNA, 61 nt, Human
ggggggagugaugcauggaaggaaaagccaccggccauggaaauuaguacagaaccccccc

SEQ ID NO: 2926 - RNA, 63 nt, Human
aguucuuggauugauagcaacaaaggcucaugcucccccuucccucccuaucuuugaagaacu

SEQ ID NO: 2927 - RNA, 86 nt, Human
uuggugaaguauuuuguuaccucagucuuguauucaaguugcuguauuuuuucagcuuguuacauugauaauaauuauuucaccaa

SEQ ID NO: 2928 - RNA, 67 nt, Human
caguuccuauuauguggugaaauuuuguaaauaaaugauuauacaaaacagucaccaccuagaacug

SEQ ID NO: 2929 - RNA, 68 nt, Human
gcuucaauuuucucauuuguaauuuaggggacuuacccauuuuuauaggauuuacuaggaaauuaagu

SEQ ID NO: 2930 - RNA, 61 nt, Human
cuggguguuagaauggugaccaagaguuaaccgagcuguguggugccuaucuccuguccag

SEQ ID NO: 2931 - RNA, 62 nt, Human
gucuggggaccacgcuuggggggcaacgccguuccgcaaguggacaguuaaaggccaaggac

SEQ ID NO: 2932 - RNA, 85 nt, Human
uggaaggcuucuuuuacccagcuggaagggacggauuccuggacuucuaugugacuuccagaaauggggaaguaggagcucucca

SEQ ID NO: 2933 - RNA, 71 nt, Human
cuuucuauuucacuggcccaggugggggggcggagaguaacuuugagucugugggccagugaaauauaaag

SEQ ID NO: 2934 - RNA, 65 nt, Human
gcugagcaggacgugcccuccacccugggacccaucucccagggucaccagcaugaaugcucggc

SEQ ID NO: 2935 - RNA, 96 nt, Human
aagaaggcaaagacuggggcagcagggaaguuuaaaaggggaaaauaaauguguuuccccauuauaccuccuucaccccagaauauuugccgucuu

SEQ ID NO: 2936 - RNA, 76 nt, Human
guggagcgagccaaaugaagaagagcugaucaaguucauguguggugaaaagcaguucucugaggagcgaauccgc

SEQ ID NO: 2937 - RNA, 71 nt, Human
uuggcuccacaaggaggcucaccagcucuucuuggaaccugaggugcuggacccagagucuguggagcuga

SEQ ID NO: 2938 - RNA, 64 nt, Human
aacaacuauggccggaaccuccucagcucucccucugcagaguucccuacccuaagagaauguu

SEQ ID NO: 2939 - RNA, 73 nt, Human
cagcuuguauaauguaaccguuugggguccgcuuuuaacuuggacuaguguaacuccuucaugcaauaaacug

SEQ ID NO: 2940 - RNA, 61 nt, Human
gccaugcugucuagucuugaagucccucauuuaaacagaggucaagcaauaggcgccuggc

SEQ ID NO: 2941 - RNA, 66 nt, Human
aagaccagucagugguugcuccuacccauucaguggccugagcagugggagcugcagaccagucuu

SEQ ID NO: 2942 - RNA, 72 nt, Human
gccagcaggggcuggcacugaugggcaaggggaggaagggccucccuuaaaaacuugggccaaacccugggc

SEQ ID NO: 2943 - RNA, 77 nt, Human
ggaaaaaccaccgggggggggcuggggguugggaaaagccauuuccugaaaaggguccggcuccggggucuaacucc

SEQ ID NO: 2944 - RNA, 61 nt, Human
ggcuugccuaaggccccgcaaaagucccugaaaaggcaggccugcggggcagggggcuguc

SEQ ID NO: 2945 - RNA, 82 nt, Human
agaacuggguuucuggggauaaggggaaaggccagcuugagucuuaccggaauugggcguggccccgucuucagagaguacu

SEQ ID NO: 2946 - RNA, 84 nt, Human
uuaccucacaggagcuuuggcaucccagcuugcuaggcucugaauuggcucaagcauugggugucacggcauccuuugagauaa

SEQ ID NO: 2947 - RNA, 64 nt, Human
ccccagccccugcgcccggcccgaacgagagguuccggagccccggcgcgggcggguucugggg

SEQ ID NO: 2948 - RNA, 85 nt, Human
guagacgcugcuggccagcccuccccagccgagguucucggcaccgccuugagagcuucagcugccccagggugugcagguuugc

SEQ ID NO: 2949 - RNA, 65 nt, Human
cggaggauuagagcaggcggugcgcugggggcgggagcagcgcggagcccggcucggccacaccg

SEQ ID NO: 2950 - RNA, 75 nt, Human
ggggccggcugggggccugagcgggaggccaucaucaaccuggccacccagcccaagaggcccauguccaucccc

SEQ ID NO: 2951 - RNA, 61 nt, Human
ggaaggcuggcaggggucuuuuuuucuauugcguaacuggaggaggccaccucggucuucc

SEQ ID NO: 2952 - RNA, 85 nt, Human
uacacauugaagagaacaaacagugggaguguuuauuccuuaagagagaauaaacugcagagauuaaaaguuuccuucgagugua

SEQ ID NO: 2953 - RNA, 67 nt, Human
agcacuguggcuuuugucagauggagugccggucugcagaggacugcucuuucgaauccacaguguu

SEQ ID NO: 2954 - RNA, 68 nt, Human
ugucauccaucuucccuggaagucucccaccggggagugaggugcuugucaggguucacuggguaaca

SEQ ID NO: 2955 - RNA, 71 nt, Human
cuccagggggcagcacucaagcgcaucuuaggaaugacagaguugcgucccucucgguugccaggcuggag

SEQ ID NO: 2956 - RNA, 62 nt, Human
guuuccacccuggagguugcugacacccugugcccucggugacuuccagccgguggacagac

SEQ ID NO: 2957 - RNA, 86 nt, Human
ucuccugcuucugggaccugccagcaccguguuuugugguuagcuccguucuugccaaccaagcaugagcucccagauucgucaga

SEQ ID NO: 2958 - RNA, 79 nt, Human
agucggcuucgguaaaggccaagaaaaagcggcguacaaaaaaauuccuccgcccaccggcaaaguaccgacaucgacu

SEQ ID NO: 2959 - RNA, 61 nt, Human
caccuuucaucucucugcucaggucuggccugcaggagcccgcagcaaggaguguguggug

SEQ ID NO: 2960 - RNA, 70 nt, Human
cagcgccagucugcugggccucccuuucuagcuacugcacaggccccagggaaggcuugcagacccgcug

SEQ ID NO: 2961 - RNA, 91 nt, Human
gcuagccaagggagcagcguugcgucucagaggguucuguugggcgcacaacacuucuguccuccgagggcugcagcuuccauaggcuagc

SEQ ID NO: 2962 - RNA, 78 nt, Human; identical to SEQ ID NO: 99

SEQ ID NO: 2963 - RNA, 65 nt, Human; identical to SEQ ID NO: 247

SEQ ID NO: 2964 - RNA, 80 nt, Human; identical to SEQ ID NO: 100

SEQ ID NO: 2965 - RNA, 76 nt, Human
cacggaccaccgcgggguccccggcaagccuggaagaguugugacucuuguugaagauccugcgguaugggaugug

SEQ ID NO: 2966 - RNA, 77 nt, Human
gggucccugaucuggaagguggauuuccccuaucaggacaagcuggucggauacaucaccaacuacagcaggcgcuu

SEQ ID NO: 2967 - RNA, 69 nt, Human
gggcauggggugcagcuagaacaguguagguucccucaauaaccccuuucugcuguucucccaugaucc

SEQ ID NO: 2968 - RNA, 66 nt, Human
agcaauuauauacaccuaauggcuuauucccuacaaaaugaacuauuaugggugucagaaaaggcu

SEQ ID NO: 2969 - RNA, 66 nt, Human
aaugagauucaggaaacauccugucagccuccugggaaagcauccuugucuccuuaguauuucauu

SEQ ID NO: 2970 - RNA, 62 nt, Human
uggauaauugggugccauuaacacaaacaggucacaauccugcuguuuucuagcccugucca

SEQ ID NO: 2971 - RNA, 63 nt, Human
ccauuuaaaaaugcuuggaacuauauguugaauaauuauacaaaguuccagauugcaacaugg

SEQ ID NO: 2972 - RNA, 61 nt, Human; identical to SEQ ID NO: 1092

SEQ ID NO: 2973 - RNA, 96 nt, Human
uuaugauugggaaagaaugccaagaugguauuuucuuuuggcaagaugcuugguugugcagucauugaagauaacuuggcacuauuuucugcauag

SEQ ID NO: 2974 - RNA, 83 nt, Human
gagcugugaucacugccacugcacuccagcccgggugacagagugagacccugucuggagugcaguggcagugaucacagcuc

SEQ ID NO: 2975 - RNA, 67 nt, Human
uguagucucagcuacucuagaaggcuaaggcaggaggauugcuugagcccaggagguggaggcugca

SEQ ID NO: 2976 - RNA, 84 nt, Human; identical to SEQ ID NO: 286

SEQ ID NO: 2977 - RNA, 64 nt, Human; identical to SEQ ID NO: 287

SEQ ID NO: 2978 - RNA, 103 nt, Human; identical to SEQ ID NO: 294

SEQ ID NO: 2979 - RNA, 127 nt, Human
uccagcagccuucuuguccacugcuuugaugacacccaccgcaacugucugucucauaucacgaacagcaaagcgacccaaagguggauagucugagaagcucucaacacacaugggcuugccagga

SEQ ID NO: 2980 - RNA, 68 nt, Human
acauuugcuaagacagcuggccuggaugcuucaaaaaguaucaugggaaaauaugucgggguuguugu

SEQ ID NO: 2981 - RNA, 61 nt, Human
gaaagugacuagaguugaaaccaaaagaauguaugaaccuugaugggaccugguuguuguc

SEQ ID NO: 2982 - RNA, 70 nt, Human
cuugugaagcacuuacugagugggaauaucugccaccuguuggaccccgcccacccaaaggauucguggg

SEQ ID NO: 2983 - RNA, 80 nt, Human
uggcacuccuaggcucuaucagacugaccccucgggcacauaccaugccuggaaggccaaugccauaggccggggugcca

SEQ ID NO: 2984 - RNA, 61 nt, Human
agcugcagacaucaggccaaggaccaagaggagcugugguuuuugugugaugaaaugugcu

SEQ ID NO: 2985 - RNA, 66 nt, Human
gcucugagcacaaccugcuaguuuggaaaccugaagccaggauuuucagaacgcuggcucuuaagc

SEQ ID NO: 2986 - RNA, 63 nt, Human
aaucuuugucagaugcaucguuugugaauauuuucucccacucugauugucuguuugcugauu

SEQ ID NO: 2987 - RNA, 70 nt, Human
ccacuucauaacugugaggacucugggauaaaucacuuaaguuuccugagugucauuuucuucucugugg

SEQ ID NO: 2988 - RNA, 107 nt, Human
uauguauggcuuacaaaacauguguuucuaaauuuaugaaauuauauguauguuuauacauucauucgugcuuucauuuagccaacauuuauuaaguuuuuuacaua

SEQ ID NO: 2989 - RNA, 66 nt, Human
aacaucaucaaaguucacuuguauuguacccuguaaaacuguguguggugugcuuucaaagauguu

SEQ ID NO: 2990 - RNA, 88 nt, Human
gccaguuugcuuuuauuuuugauuaaguaaauuccauguuguaauguuacagagagugugauuugguugugauauauauauauugugc

SEQ ID NO: 2991 - RNA, 64 nt, Human
uuacgcaagauaauuauuuagagacugauuacagucuuucucagauuuuuaguaaaugcaguaa

SEQ ID NO: 2992 - RNA, 88 nt, Human
ccacaaaaacagguauauacuuugaaaggagaugucuuggaacauuggaauguucucagauuucuugguuguaugugaucaugugugg

SEQ ID NO: 2993 - RNA, 111 nt, Human
ugucagcacugcacacccuccaggggacuuggaauacaauccuuuuuacuuuuuuuuuuuuuuuuuuuaagaaacggggucucucugucccccaggcuggagugcguggca

SEQ ID NO: 2994 - RNA, 70 nt, Human; identical to SEQ ID NO: 2504

SEQ ID NO: 2995 - RNA, 70 nt, Human; identical to SEQ ID NO: 2505

SEQ ID NO: 2996 - RNA, 62 nt, Human
gcggugcgcucggccuauuccugccccgaggggcgucugguaggcaccccgcccucucccgc

SEQ ID NO: 2997 - RNA, 76 nt, Human
cucucccuugacccaagccacgaacgagcuggagggaaucugcgguacuuugagcaguuauuggaggaagagagag

SEQ ID NO: 2998 - RNA, 105 nt, Human
gguggcugcuaugacaucgucaucuuaaaggaagcgguaucuagacacugcaaacaaacgcaaauucugguuuaauguuucagaagacauuuuaaaguagccacu

SEQ ID NO: 2999 - RNA, 74 nt, Human
uaccuguucuggaugagauuccccucuuuuuuuauugugaaguugaagauaagaguccguuuucggggugggua

SEQ ID NO: 3000 - RNA, 91 nt, Human
gaagaaaaaaauaauaguuuuaaggaaaucuacagaagggaaucugaacuucauuucccacuuuauuuuugcgagucuguuguguaucuuc

SEQ ID NO: 3001 - RNA, 70 nt, Human
gguuuaaugcagucaaugaaacaagaugccacacaaagagggaaccaaugucagcugcuauauuacuacc

SEQ ID NO: 3002 - RNA, 79 nt, Human
aguaggauuauuguccaaaggcuuuuauuuaggggaaacgggguaauuaaaacagcagcuuuagggauagcuucuuacu

SEQ ID NO: 3003 - RNA, 79 nt, Human
aagacuagggauuaucuacaccuucacuuugggcaauagcuauuuccuaaaggaauggaaaaaggugauuuugcuacuu

SEQ ID NO: 3004 - RNA, 130 nt, Human
uauaaaauuaaauccaaauuuuauuaaggauuucagguuacauacuucaaauuucuagaauggaauggaaucauuuuggaacuggaaaaauggcauaaacacugacgucccuuaaaacuucaauuuuaua

SEQ ID NO: 3005 - RNA, 76 nt, Human
agacaacagaauagauuuuucacaaguaacggcaccaaagucacaugcuggaauuuguaaggaaacgagguuguuu

SEQ ID NO: 3006 - RNA, 64 nt, Human
uuaugaacugucccaucacaagacauacaguuggcuuucuugugagucagauauuuuuacguaa

SEQ ID NO: 3007 - RNA, 67 nt, Human
uuggggaagguauuaaacaaaaagaccaauaaguaucuccucucgccuuucccccuacccuccccaa

SEQ ID NO: 3008 - RNA, 98 nt, Human
ucccccgccccccgggagggggaaugggauauugauuuucaacccgaaaggagaaguugucccuucuuccucccccgcucagagggaaggugggaggg

SEQ ID NO: 3009 - RNA, 79 nt, Human
aaaugggaugguugcgccuuugcuggaacauguacaaacuuuuuuuugucauuaaacaauauagguauaacaacuauuu

SEQ ID NO: 3010 - RNA, 87 nt, Human
agauuaaaaucauaaugcaugacuaaaaacuccuuggauuuauuucccauuuuaaaauuuuuagcgguaaguucagauuuauaaucu

SEQ ID NO: 3011 - RNA, 118 nt, Human
ccgcuggaucaacgauguggaagacagcuacgggcagcaguggaccuaugagcagaggaaaaucguggaguucaccugccacacagccuucuucgucaguaucgugguggugcagugg

SEQ ID NO: 3012 - RNA, 66 nt, Human
ucaugaagagacagcccagaaaucccaaaacagacaaacuugugaaugagcggcugaucagcaugg

SEQ ID NO: 3013 - RNA, 80 nt, Human
ugucaccauccucugcauugacuugggcacugacaugguuccugccaucucccuggcuuaugagcaggcugagagugaca

SEQ ID NO: 3014 - RNA, 62 nt, Human
cccuuuaauggcauugccacagcgggucccauugucugcaaguuugucgugaugcugaaggg

SEQ ID NO: 3015 - RNA, 65 nt, Human
cugugcgucuguggcaaacguggucuggugacagcaaccaaugaucccaccauuuggacacgcag

SEQ ID NO: 3016 - RNA, 81 nt, Human
cgacgguuacucugguuacugggcccgcgccgcgcuggcgagagccgccgcccgcgagggaugcuggugaggaagccgucg

SEQ ID NO: 3017 - RNA, 62 nt, Human
ggccucuaaaucuuuagguuggggcugcauugcccuggagccgcacucuugaguccgaggcc

SEQ ID NO: 3018 - RNA, 76 nt, Human; identical to SEQ ID NO: 758

SEQ ID NO: 3019 - RNA, 71 nt, Human; identical to SEQ ID NO: 1764

SEQ ID NO: 3020 - RNA, 71 nt, Human; identical to SEQ ID NO: 1145

SEQ ID NO: 3021 - RNA, 67 nt, Human; identical to SEQ ID NO: 1146

SEQ ID NO: 3022 - RNA, 70 nt, Human
agauguguuaggaaugucaacagagcaaggagaaaaaaggcaguccuggaaucacauucuuagcacaccu

SEQ ID NO: 3023 - RNA, 63 nt, Human
gugauuccuuuccuaaaaguguaagaaagcauagagauuuguucguauuuagaaugggaucac

SEQ ID NO: 3024 - RNA, 75 nt, Human
cccgcguauagcuucuggccugagcuuggccuggauuguuggacgaguucuuuaugcuuauggcuauuacacggg

SEQ ID NO: 3025 - RNA, 66 nt, Human
gagcccaccagaacacguuggaaguguauccucccuucuuauuuuuucuagcuguuggagguguuu

SEQ ID NO: 3026 - RNA, 84 nt, Human
uuugugcuucuaacuggugcugccagcuuuauaaugguggcccaccuagccaucaauguuuccaaggcccgcaagaaguacaaa

SEQ ID NO: 3027 - RNA, 62 nt, Human
agcgggauggcugcagccaaggagcugggggagggccgggcucagggcuagcccuuuccgcu

SEQ ID NO: 3028 - RNA, 100 nt, Human
cuuggcccacauccaggcuacccccagcccgcuucuccccugcuuagcccagggaggagacaguagaggugaugggggcagccgggagggaggggccaag

SEQ ID NO: 3029 - RNA, 65 nt, Human
ugaggcugggggcacagggaggagcugcccaggugcaguuaccauugcucagugacagagccuca

SEQ ID NO: 3030 - RNA, 61 nt, Human
ccagaggcuugguuuuauugugcaguuuucuuuguccucaaugagaugccauaagcugugg

SEQ ID NO: 3031 - RNA, 66 nt, Human; identical to SEQ ID NO: 2708

SEQ ID NO: 3032 - RNA, 64 nt, Human; identical to SEQ ID NO: 2709

SEQ ID NO: 3033 - RNA, 90 nt, Human
gccuuggcggauaugcucggggcccucggcgcagaggaacuuagccucgauucucuuccugaggggcuucuuaacuuuuccaagccaggc

SEQ ID NO: 3034 - RNA, 82 nt, Human
gcguggugggaggcuggggcuggugccugcggacagcuccagauggaaucccaggccacggugcuucuaguguccccccagc

SEQ ID NO: 3035 - RNA, 65 nt, Human
gcacccggguugucagcacccuccaucauuucucccugcacaggaggguuggaauacuggggugu

SEQ ID NO: 3036 - RNA, 74 nt, Human
gggcaaggagggccccuggggaaucguggucuauauccccgauaaauauucugccucacgggucuaccuuguuc

SEQ ID NO: 3037 - RNA, 63 nt, Human
aggccugggccgcuuccugcaagaaaacaagcagcuucugcacgacgcacuggcccaggaccu

SEQ ID NO: 3038 - RNA, 64 nt, Human
cuggaugaaggacgagcgugugcccaagaaccuggccacgcagcuggacuccgccuucauccgg

SEQ ID NO: 3039 - RNA, 63 nt, Human
ucggaggugucugagguugccaucagccagggcgaggucacccuggcccucaggaaccuccgg

SEQ ID NO: 3040 - RNA, 75 nt, Human
aguggaaauuagcagaaauauccauucauuugcuguacuauuuguauguaauauauggguugaucuauaaacacu

SEQ ID NO: 3041 - RNA, 93 nt, Human; identical to SEQ ID NO: 2387

SEQ ID NO: 3042 - RNA, 76 nt, Human; identical to SEQ ID NO: 2388

SEQ ID NO: 3043 - RNA, 66 nt, Human
acguucauggucggugugaugagagacugagaugugaauugcucaguagagaguuggcgguggcgu

SEQ ID NO: 3044 - RNA, 60 nt, Human
ucccagaguguacuuagaaacaugaaaacuucuuugaaagggagcugaucacuuuuggga

SEQ ID NO: 3045 - RNA, 99 nt, Human
ugaaccuuaccuaaauaaugaaagccagccagauucauuuuccacggcacaugguuuccuguggguaagauguguuuauuugguuuugguacaaguuca

SEQ ID NO: 3046 - RNA, 63 nt, Human
cugggcaucguggcugaggugcuggugcuggucaccaucaucuucaucuacgagaagcgccgg

SEQ ID NO: 3047 - RNA, 79 nt, Human
gcccgaggacguccuggaugaugacgacgccggcucugaacccugaagagcagcgggcagcaccagaaugaccaagggc

SEQ ID NO: 3048 - RNA, 70 nt, Human
gauuauauaucguccauauguaauuauaucugugguaaaauauaaagauaugcauuuuggggacauaguc

SEQ ID NO: 3049 - RNA, 76 nt, Human
guuuuuuaagguuuuggaaguaacaaagggauacauacagcaagauccacuuacauaguuuuaaaacaugcaaaac

SEQ ID NO: 3050 - RNA, 71 nt, Human
ucaaggaaaggcaggaggaagagugcucuggguggggggagguucacagggugcuuggacuguaccuauga

SEQ ID NO: 3051 - RNA, 71 nt, Human
gucaucuuucuccuccucuugguugguuuacaagaguagugaauacuucaguuauggacagaaagaaagac

SEQ ID NO: 3052 - RNA, 66 nt, Human
gaagguuaagcuggcucguccugaaauauuauaagguggaugagaauggcaaaauuagucgccuuc

SEQ ID NO: 3053 - RNA, 80 nt, Human; identical to SEQ ID NO: 100

SEQ ID NO: 3054 - RNA, 74 nt, Human
cccgagccuggcgaccaugcaggagucgcugcgggugaagcagcuggccgaagagcagaagcgucgggagaggg

SEQ ID NO: 3055 - RNA, 84 nt, Human
cucucuuuuuuuguaauuagaauacuguuuggacuugcucaacaagaccuuaucuuaacaaaaaguaacuuauagaaaagggag

SEQ ID NO: 3056 - RNA, 66 nt, Human
cugaggcuagauaagauaaccaguuaguggguccacugaccuuuaggacaguagucuauccguaag

SEQ ID NO: 3057 - RNA, 61 nt, Human
gaauagcuccaaacccuaaguguaaauauuuuuguccacacaaauaggcacacauauauuc

SEQ ID NO: 3058 - RNA, 64 nt, Human
ugcugcaggcugucaugcucaacaaaacgcucccaccugguuuggguaugcaaggcacugcgca

SEQ ID NO: 3059 - RNA, 127 nt, Human
gauaucguagggggcggcgcggcggguggggugcgcguugggcauuauugggggugcgcagaacgagcgcgcuccgcaggucgagcgucgcguaugcguaucuugcucgcugucguccucuacuguc

SEQ ID NO: 3060 - RNA, 70 nt, Human
ugucguggaauuugaguauaugugcgaauaucaaauuaauguuagauguuugucacuucaauccacuaca

SEQ ID NO: 3061 - RNA, 99 nt, Human; identical to SEQ ID NO: 1699

SEQ ID NO: 3062 - RNA, 62 nt, Human
uuuacgaauggggugacaacuuaugauaaaaacuagagcuagugaauuagccuauuuguaaa

SEQ ID NO: 3063 - RNA, 64 nt, Human
aucuugucccuccuuuccugauugcucuuggcugaguaucuauggugguaggagaguacaggau

SEQ ID NO: 3064 - RNA, 60 nt, Human
gccaucagcuccuugggacugaugaacagagucagaagcccaaaggaauugcacuguggc

SEQ ID NO: 3065 - RNA, 87 nt, Human
gcuggagcccagcaugcuggggagugcggucagcuccacacaguaguccccacguggcccacucccggcccaggcugcuuuccgugu

SEQ ID NO: 3066 - RNA, 62 nt, Human
ugucauuuuaaacauugguaggccuugguacaugaugcuggauuaccucucuuaaaaugaca

SEQ ID NO: 3067 - RNA, 71 nt, Human
auuggcauauuucaggaccauaguuucuuguuaacauauggauaacuauuucuaauaugaaauaugcuuau

SEQ ID NO: 3068 - RNA, 69 nt, Human; identical to SEQ ID NO: 1724

SEQ ID NO: 3069 - RNA, 71 nt, Human
uuacaggugguugcuuugaacuuuauuugagaaaaacagaagauaaauguaucaaaagaacacacaggugg

SEQ ID NO: 3070 - RNA, 100 nt, Human
accuuuguaaggagaugguggauggauuaagaauaaccuuugauuacacucucccguugguuuuacucuaucccuaugaacaagcucaguauaaaaaggu

SEQ ID NO: 3071 - RNA, 61 nt, Human
agaacaguaacucuagaaaucccugaaguucugaagaggcagcuggaggaugauuguuacu

SEQ ID NO: 3072 - RNA, 82 nt, Human
cuuuucagccaaugagaggccucgucaccaucacgcuaugccacaugccagcaugaacgugccuuauaucccagcagaaaag

SEQ ID NO: 3073 - RNA, 99 nt, Human
cuagguacccauaagaaaaaagauucauucucugugaaaacuguaggaaucuguuguuguuuucauuugaauaugcucuacuucugcucuaguauuugg

SEQ ID NO: 3074 - RNA, 64 nt, Human; identical to SEQ ID NO: 175

SEQ ID NO: 3075 - RNA, 80 nt, Human; identical to SEQ ID NO: 100

SEQ ID NO: 3076 - RNA, 77 nt, Human
gcuuggccuaugacaggucaccguguguaaaucuuucccaauaaaguguugcacaaaggcauccuguccgugcaggu

SEQ ID NO: 3077 - RNA, 76 nt, Human
ggggaaacugaggugcgggugcgcgggccuggggacggccgucccauggcuuccaucugagccaccucgggacccc

SEQ ID NO: 3078 - RNA, 61 nt, Human
gauuuuaguauucuuuaaaauagucucacuuaucuuaauuguucauuaaagaucuauaauc

SEQ ID NO: 3079 - RNA, 66 nt, Human
gucaaaugcuucuuguggggguguguguguguguguguguguguguguacaugccggggcauuugc

SEQ ID NO: 3080 - RNA, 74 nt, Human; identical to SEQ ID NO: 365

SEQ ID NO: 3081 - RNA, 102 nt, Human; identical to SEQ ID NO: 2172

SEQ ID NO: 3082 - RNA, 77 nt, Human
uucaguuaaaaaagaagaagaagaaauggcaaagagaaaguuuuuucaaauuucuuucuuuuuuaauuuagauugag

SEQ ID NO: 3083 - RNA, 80 nt, Human; identical to SEQ ID NO: 367

SEQ ID NO: 3084 - RNA, 86 nt, Human
agagaaaacagcugggccccggggacaccuaccaucaagacgcggagacugguagcggccccgaacggcuaggcucuuugauaucu

SEQ ID NO: 3085 - RNA, 69 nt, Human
uuucagguaggugaagcagagaaagaaggcagcauacgucagcauuuucuucucugcacuuauaaggaa

SEQ ID NO: 3086 - RNA, 68 nt, Human; identical to SEQ ID NO: 813

SEQ ID NO: 3087 - RNA, 75 nt, Human; identical to SEQ ID NO: 815

SEQ ID NO: 3088 - RNA, 103 nt, Human
ccccuucuccuccuccucuuccucuucagucuccaacgacucugcccccgaugguccucguggguuggguuguuuuggggggguugugcugggggggaggggg

SEQ ID NO: 3089 - RNA, 86 nt, Human
gccguggcucuuccaggcguccgugugaggguucgugaccaggagacaaugcaggucucgggccucgguggugccugggucucggc

SEQ ID NO: 3090 - RNA, 73 nt, Human
gaagaaaaacucagauuggauaugggauuggucaagucggccggaaaauauuccccccaaggaguuccucuuu

SEQ ID NO: 3091 - RNA, 104 nt, Human
ucauuugcuggccaucggauuggggaucuauauuggaaggcgucugacaaccucuaccagcaccuuuugaugaagaacuggagucugacuugguucguuagugg

SEQ ID NO: 3092 - RNA, 61 nt, Human
cacuuauugugcauucuccuuguggauuuuuggucaccuaaggaaaugcauuugaugagug

SEQ ID NO: 3093 - RNA, 67 nt, Human
uucucuguguaauuggcaaggcuguaccaauguugugcugaugcaagccuuuuucaguucaagagaa

SEQ ID NO: 3094 - RNA, 61 nt, Human
cuccucuccccucacccuccugccccuggccacugcaggaucaggaggggagaagaaggag

SEQ ID NO: 3095 - RNA, 68 nt, Human
cuuggcucuggggugugcugggagggucaccaggucccuuuuccuuccugugcccucugaaagcuaag

SEQ ID NO: 3096 - RNA, 79 nt, Human
ggcaccagcucuuugggccuaggauacugccgggccccccaaggggguccccagcaaccaggccuggccuccugguguc

SEQ ID NO: 3097 - RNA, 105 nt, Human
ucugcugccucccaggcugcugggacugggcugguuuuguccuugaaguggucaggauacaggacaagggcagccccaccccauccagccugggcuccccgcaga

SEQ ID NO: 3098 - RNA, 62 nt, Human
ugguccaccuuucuuaaaauuuuucucaggaauggacuuaaguucuuaagaaaggauaacca

SEQ ID NO: 3099 - RNA, 74 nt, Human
uucaagcgaaggucaagcuguaaacuuuaagacauguucacccuuaaaagugccacuuugaaugguuguuugaa

SEQ ID NO: 3100 - RNA, 91 nt, Human
cucuugauaaucugauuuaacacaaauuuccucauugaguuucuccucaugaagaaacggccucagugagguaaaucggaaugcacaggag

SEQ ID NO: 3101 - RNA, 71 nt, Human
uagaacuauugaaugguacaguuugagaucuucgaaaccaucaggacugaucauuuucuggcuacuuucua

SEQ ID NO: 3102 - RNA, 63 nt, Human; identical to SEQ ID NO: 123

SEQ ID NO: 3103 - RNA, 91 nt, Human; identical to SEQ ID NO: 124

SEQ ID NO: 3104 - RNA, 60 nt, Human
gcacugcaugguaucugcacucagcaguuuacaccugcuaggguguucaaaggucagugc

SEQ ID NO: 3105 - RNA, 74 nt, Human
gucuucaucaguauuauccauauuuaaaacgaggugacagaaagccaaaguuaauuauggggcuggacagggac

SEQ ID NO: 3106 - RNA, 89 nt, Human
cgaaguuccaugucaugucuucaguuguagaaguuuuuccucuuuaagguaaagcgaccaacuugaacuuucucuggcaacacgauucg

SEQ ID NO: 3107 - RNA, 130 nt, Human
uuccccaguguuacggaggguccuugaggcaggagugaaaauugggucuggggguuaguccugggguggaggucugggcacgccgggucggacccccuccaucuucgguuuugcacaccccgcuuuccag

SEQ ID NO: 3108 - RNA, 126 nt, Human
uuuccgggucuguuccuccuugagccguuucaaaacagcuuugugcucacucuuugggguagucuccagcaggugauuucuuaaugcuuuguacugucugguuuggauuuugcagguauccugaaa

SEQ ID NO: 3109 - RNA, 81 nt, Human
uuuuuuucccaagcuucggagagcuaucauuuccaacuaguacuuuaauugcugugauuucguucaggugggggaagaaaa

SEQ ID NO: 3110 - RNA, 75 nt, Human
gaucaguuugucucggugaaaaguaaacuuugaaagcuuuccagaguguugaaucuuccaccagaaaacuugauc

SEQ ID NO: 3111 - RNA, 74 nt, Human
gcacuuccguagagguggacauggcgugcggcuuucgccgcgcuauugcuugccagguauggaucccggagugc

SEQ ID NO: 3112 - RNA, 61 nt, Human
aacugugcauguccuucaugguaggugagcaccagucuccaugaucaaaaaugccccaguu

SEQ ID NO: 3113 - RNA, 79 nt, Human
caccuuccaugauugcuuuugagggaaaagcuacaguggccacauuucagauguucacuuuugcaauuuguggagggug

SEQ ID NO: 3114 - RNA, 83 nt, Human
gcugguaagcucauccauuagcugcguccuucagcuauuccuuuagauuggaggaaguggauaugaagauggauugauucagc

SEQ ID NO: 3115 - RNA, 60 nt, Human
acgacggcaguuagagacgaggcguuucaggugaacuguauguaguguuacuccggacgu

SEQ ID NO: 3116 - RNA, 62 nt, Human; identical to SEQ ID NO: 2890

SEQ ID NO: 3117 - RNA, 80 nt, Human
agaacaaguuguuaaaacauuuaauauuauauaggauauugcuaauuguguauauguugguuuaauuaauaauauguacu

SEQ ID NO: 3118 - RNA, 101 nt, Human
cugugguaguuggaaacaaaucauaauguauuauuuaaauguuuaacaucauugcauaacagcguuuauuauacaguggcagauuucuuuagcugccacag

SEQ ID NO: 3119 - RNA, 88 nt, Human
ugauaaauguaccccucucagucugcaguauugaguugucuaaaguauaugugcagucuugcuuacaaggagggguuaccauguauca

SEQ ID NO: 3120 - RNA, 64 nt, Human; identical to SEQ ID NO: 175

SEQ ID NO: 3121 - RNA, 67 nt, Human
uuucggcgcugggucgccaaagcagaauggagacggauagagugggugggcucccagaaucccgaag

SEQ ID NO: 3122 - RNA, 77 nt, Human
ggagguuguauuccuuuuauauugcugagaaaacuaguuaaaugaucagauucuuggcuguuaaggaaacaauuuuc

SEQ ID NO: 3123 - RNA, 91 nt, Human
ucaugaauccuucugucugacuaacucaauaacuuucuauaaaagccaauggaauucaaauaggagcuaggagacaacaaguuauauauga

SEQ ID NO: 3124 - RNA, 64 nt, Human
ucuaauucauagcaaccauaucugcuuuauccuaggugaggguagcaguccacaauggaauaga

SEQ ID NO: 3125 - RNA, 65 nt, Human
acaggaccagguggagcaguuccuggcccggcacaaggggccaggccugcagcacguggggcugu

SEQ ID NO: 3126 - RNA, 77 nt, Human
cccgagcugggccucgaaaugacagcaggguuugggcuugggggacugaggcuuacagcccugcaggcccagccggg

SEQ ID NO: 3127 - RNA, 66 nt, Human
guggaggccacugaggggguggcaacugcuggaggccaguuccuggcucccccuggggcauacuac

SEQ ID NO: 3128 - RNA, 78 nt, Human
gacucauguuuauuagggagugagggagcacaaagggaggucuccuugcccuuguucuccuuaacacagcucagaguc

SEQ ID NO: 3129 - RNA, 77 nt, Human
ccagaacaaccugcagcagacuccacuccacuuggcugugaucaccaaccagccagaaauugcugaggcacuucugg

SEQ ID NO: 3130 - RNA, 85 nt, Human
cuccauccauccugaagguaccaauacaauggcacacgugucuacacuuaggcucuuauuccuggcuaccuggggauucgugggg

SEQ ID NO: 3131 - RNA, 99 nt, Human
gaggacggggacucguuccugcacuuggccaucauccaugaagaaaaggcacugaccauggaagugauccgccaggugaagggagaccuggccuuccuc

SEQ ID NO: 3132 - RNA, 68 nt, Human
agacaagcuuguagugaaguauaguagcaauaauuucuguaccugaucaaguuuauugcagccuuucu

SEQ ID NO: 3133 - RNA, 68 nt, Human
ccguuauugaauaucuauuaguguuuaauauagaagagcuuaauaaaccgcuaauccgaaaauaaugg

SEQ ID NO: 3134 - RNA, 76 nt, Human
ugauccuguucucuuccacucugccagcaguuccuuuuguacugcuucugguaguucauagaaaacuugaggauca

SEQ ID NO: 3135 - RNA, 69 nt, Human
ggguggggggcauccauauagucacuccagguuuauggaggguucuucuacuauuaggacuuuucgcuu

SEQ ID NO: 3136 - RNA, 92 nt, Human
guaacgucggggcauucaggauagucagagaaaguguuguuggaaguacguuagauuuacgcugaugaauaugauagugcaguggauguugc

SEQ ID NO: 3137 - RNA, 61 nt, Human
agaaccuuccccuugcuuagccaacucuauuuccccuccuugaggaagacgggaggauucu

SEQ ID NO: 3138 - RNA, 64 nt, Human
ugcagcugaggcaauacuccaacagggugaaagcacucaaucugguucccauguuucuccugca

SEQ ID NO: 3139 - RNA, 61 nt, Human
gccccagcuguguggccucaagccagccuuccgcuccuugaagcuggucuccacacagugc

SEQ ID NO: 3140 - RNA, 84 nt, Human
gucagggaaaucaugcagccaucaggacacaggcuccgggacgucgagcaucauccucuccuggcugaaaaugacaacuaugac

SEQ ID NO: 3141 - RNA, 69 nt, Human
guccugcauuguggcuguuuucugcuuucauccgugucagugcagcagcagcuucauccagugcacaac

SEQ ID NO: 3142 - RNA, 65 nt, Human
uguucauuuacacuucugccuucaucuagcaauuuacgaacagcauuaacauccccaucugaaca

SEQ ID NO: 3143 - RNA, 60 nt, Human
cuuuuaauaaaugaauuuuaauuguuaacaaaccuaauaaguggaagaauuuguuaagag

SEQ ID NO: 3144 - RNA, 101 nt, Human
gagaucggagucucacucuguugccuaggcucggagugcaguggcgcgaucuuggcucacugcaaccuccgccuucuggguucaagcgauucuccugccuc

SEQ ID NO: 3145 - RNA, 75 nt, Human
gucucacacaugacaugugaaaaucugacucaaaguucuuuaucuugaagcuguguuuauauguuccgugugcac

SEQ ID NO: 3146 - RNA, 78 nt, Human
auuugcauuugucuauaucuaauaaauguuuauuuuugcuugacacuuuauacuaguuacuuaggugagugcuuaaau

SEQ ID NO: 3147 - RNA, 69 nt, Human
ucuacaaauuguucacuggcauguauuaacgagaugauaauaaggccccugauauucauauuuguauga

SEQ ID NO: 3148 - RNA, 74 nt, Human
aggcuggagcaguggugcgcucucggcacugcaaccucugucugccaguuucaaguaguucuccugcccagccu

SEQ ID NO: 3149 - RNA, 60 nt, Human
ggccaauacuuuauaagcaaaguuuaaacaacuaauuuaauauuugauaagguuuugguu

SEQ ID NO: 3150 - RNA, 71 nt, Human
aguucuuguguguucguaucuuuauuuauucccuaguuugcagaacugucugaauaaaggauacaaggauu

SEQ ID NO: 3151 - RNA, 77 nt, Human
ucccacguuuguuccagaggaauuuaacuuucuguauuuuuccaacauuaaaauccacaucaauagcacacguguga

SEQ ID NO: 3152 - RNA, 81 nt, Human
ugcaucugguuugagggauccuuugaaaaucucauauuguuucgaguuuucauuacuuccauacaaagcaauccugaugua

SEQ ID NO: 3153 - RNA, 64 nt, Human
uuuccccuuaaauuggucagcauagugccccauuuuggggcauccuucaucuggacaagggaaa

SEQ ID NO: 3154 - RNA, 62 nt, Human
uguccagcaacuucaucacuggggcacaaugagcuguucuucacauuugaguguccuggaca

SEQ ID NO: 3155 - RNA, 70 nt, Human
gguuuguauguguguguauauauguaaauauguauguauguguguacguauguauauacacauacacucu

SEQ ID NO: 3156 - RNA, 73 nt, Human
uauacaaauucucauucaauauuaugucaacuaucagguauaguaugaaucuaccauuauguauauuuguaug

SEQ ID NO: 3157 - RNA, 102 nt, Human
ccgaggcgcgcguggggccacugccguggcggcggcugcccuccucacacucggcuccgcgccgccuccggccaccgugcgcucccgcguggggcgccucgg

SEQ ID NO: 3158 - RNA, 74 nt, Human
ggacaugguaaccugguccacggagggcggccgccacccucgcguagcuuuccugugguuuuccaggacugucc

SEQ ID NO: 3159 - RNA, 80 nt, Human
gggagggcugggggcucuucccuggaggaagcggcuccgcuucgcuggcgccgcuuuuuagcuuggacuucaguccuccc

SEQ ID NO: 3160 - RNA, 95 nt, Human
uccggaguaacggucuucauuagcuuggaguggcgcagguccgugacagcaccgcgagaccugugcgacagugggcugaugcucguuucucuggg

SEQ ID NO: 3161 - RNA, 88 nt, Human
ccucucaagucgagagagcaagauccaguauuuuuuuuuagaaagauccaaauuuuuuaagugccuuuguucacuuggcauuuagagg

SEQ ID NO: 3162 - RNA, 70 nt, Human
cuauacaguuuuuuuauccuuuuagauuuauuuuuuaaaaaaacauuuuauacaaggagaaacugaauag

SEQ ID NO: 3163 - RNA, 76 nt, Human; identical to SEQ ID NO: 1089

SEQ ID NO: 3164 - RNA, 114 nt, Human
agacgaggaggugauugagcuguauggggguacccagcacaucccacuauaccagaugaguggcuucuauggcaagggucccuccauuaagcaguucauggacaucuucucgcu

SEQ ID NO: 3165 - RNA, 90 nt, Human
gcccaugggaaacagcuguuccucaucaccaacaguccuuucagcuucguagacaaggggaugcggcacauggugggucccgauuggcgc

SEQ ID NO: 3166 - RNA, 80 nt, Human
cauuauuuuguacauuuuguauauacugggacagcgugaaacacuggaauccuucauggacgagggcauauacaaugaug

SEQ ID NO: 3167 - RNA, 66 nt, Human
gcucccagggguaccugguggugaggcucuccaugaugauccacccagccgccuucacucuggagc

SEQ ID NO: 3168 - RNA, 73 nt, Human
guuccaggcccugaaaagacccgacgacacagcuuuccaaauaguggaacuucggauuuuuucuaacuggggc

SEQ ID NO: 3169 - RNA, 80 nt, Human; identical to SEQ ID NO: 100

SEQ ID NO: 3170 - RNA, 62 nt, Human
uuagguaucuagcuucaucaggcauauuuuagaaauggacugccuaauaucuauuuaccuaa

SEQ ID NO: 3171 - RNA, 70 nt, Human; identical to SEQ ID NO: 1335

SEQ ID NO: 3172 - RNA, 62 nt, Human
ugcuguggcucuagacacuaaaggaccugagauccgaacugggcucaucaagggcagcggca

SEQ ID NO: 3173 - RNA, 78 nt, Human; identical to SEQ ID NO: 2712

SEQ ID NO: 3174 - RNA, 64 nt, Human
gagugucacaccuuugcuuauggccugcaaugccuacgagcuaagugucaagaugaagacccuc

SEQ ID NO: 3175 - RNA, 70 nt, Human
ucucucugccggaagucuuuggcccuuuugggacagacauuuuccuuggccucuucuuuccggcaggaga

SEQ ID NO: 3176 - RNA, 82 nt, Human
ccuuuggcccacauaugguucugucccggugagcucuguugucagaggcucacgggacagaaccacaugcuagggucuaggg

SEQ ID NO: 3177 - RNA, 65 nt, Human
gagggagagugcguggggagccaugcucaccguggcaaacacaggaaccccaugacucgccccuc

SEQ ID NO: 3178 - RNA, 73 nt, Human
cucuuguugaccaggcuggagugcaauggcgcgaucucggcucacuguaaccucugccucccggguucaagag

SEQ ID NO: 3179 - RNA, 62 nt, Human
gaaggaauuuuaagaguaguuaucuuuauacagugaagcuaaauauaauuuucaguuucuuc

SEQ ID NO: 3180 - RNA, 64 nt, Human
caguauuaaauaauccuggcauuauagggaaaaaaccuccuagaaguuagauuauuugcuacug

SEQ ID NO: 3181 - RNA, 61 nt, Human
auagaaguauacugagagucuaaaauacauucuaguagugcaugucuuggugugcuuuugu

SEQ ID NO: 3182 - RNA, 88 nt, Human
guuugcuuucuaaaagaacuaaugaaucuguauauuguaaacuguggguguuuuacaugucaauucauuuuuuuaauggaaagaaaau

SEQ ID NO: 3183 - RNA, 61 nt, Human
cgguuucugcgggccaagcacggugcgcaaagagcgcguggugcggcccgacucggagcug

SEQ ID NO: 3184 - RNA, 65 nt, Human
gagcuuccaguacagaccacgaggccuuccugggcaaggaggacuccaagaacuucgacgagcuc

SEQ ID NO: 3185 - RNA, 99 nt, Human; identical to SEQ ID NO: 1699

SEQ ID NO: 3186 - RNA, 60 nt, Human; identical to SEQ ID NO: 1701

SEQ ID NO: 3187 - RNA, 92 nt, Human
agcagaauuccagacaagaacuacaggucagaaauggaagggaugucggaaaucuaaucuaaaccucugacuuucuagacuaggaagcugcu

SEQ ID NO: 3188 - RNA, 60 nt, Human
auaaaauaaugauccuauauacuuuuaauacaaaaucacauauguagggcaucacuuuau

SEQ ID NO: 3189 - RNA, 60 nt, Human
cgguggcgcccgcgggccccgggcgacuccgccucggccgcccuggacgagcugucacug

SEQ ID NO: 3190 - RNA, 70 nt, Human
ggcucccaauguugacguuggccagggcguuugcaaacaagccaggccaaaaaggcucaacauuuacacc

SEQ ID NO: 3191 - RNA, 72 nt, Human; identical to SEQ ID NO: 2728

SEQ ID NO: 3192 - RNA, 130 nt, Human; identical to SEQ ID NO: 2385

SEQ ID NO: 3193 - RNA, 65 nt, Human; identical to SEQ ID NO: 2386

SEQ ID NO: 3194 - RNA, 127 nt, Human
acauauaucuaacucaugauuacaaaacuuuuagagacaacuagguuaaauauuucauguuuugggcuaagggaaaaggaauucaugaucucguuaaaggaaguucaaagucaacacuggauauugu

SEQ ID NO: 3195 - RNA, 87 nt, Human
uuuuuuuccugcauuucucauuuuuauuugacagaaaaaguugcucuugcuguacagauuuuaaaaaaccaaaaugccuuuaagaaa

SEQ ID NO: 3196 - RNA, 61 nt, Human; identical to SEQ ID NO: 587

SEQ ID NO: 3197 - RNA, 87 nt, Human; identical to SEQ ID NO: 631

SEQ ID NO: 3198 - RNA, 65 nt, Human
cagccacuucaucauccgucagaagccagaccuuuuccuggauuugacauccagugggguuccug

SEQ ID NO: 3199 - RNA, 68 nt, Human
gcaucgauuaaauccacagucagccauaauaacuccucagacauguuaugcuggggccgugucgaugu

SEQ ID NO: 3200 - RNA, 62 nt, Human
gagcaucccugagagcaccagcacuucugaccuagcgggugagcccagugcugaaggggcuu

SEQ ID NO: 3201 - RNA, 75 nt, Human
guuggugaccucagauacacuguucagaaguacucaaaguauuccuuuuuucucacauuugagagucacucuagc

SEQ ID NO: 3202 - RNA, 65 nt, Human
aagauauuaaugaaaacuaauugaaaguacgcacacuucucauguaggaacaaaauuaaaauuuu

SEQ ID NO: 3203 - RNA, 77 nt, Human
aggaagaaaggaauaaggaacuuuuuacugggaacuauuuuccaucucuaggaaaaagugcuucuuccccucccccu

SEQ ID NO: 3204 - RNA, 93 nt, Human
caucaagaggucaugauugcagaagaggugacuggaauugaaugacaugauccaggggaggccggccacaaaugcaguaacaugaccaggaug

SEQ ID NO: 3205 - RNA, 61 nt, Human
ggugugacaaggucagcccgcugcaaggagaaggucacgaacaggggguaagcccaacgcc

SEQ ID NO: 3206 - RNA, 75 nt, Human
aggaaaaaauagaagucuacugaauuaauuuuuuaaaagaaaagagaucagauuaaauauuucuuuguuuuuccu

SEQ ID NO: 3207 - RNA, 75 nt, Human
ccuggcuauggaaaagugauguggguagccaauuuuauaaaauguuggcuuucuggauuuuuauccggagugagg

SEQ ID NO: 3208 - RNA, 95 nt, Human
gcagauuuuaaaauauaguaacauccauuuuuuucccuugaaagugauucucuuauaaaaaaugaaaguggaguuuaagguauaucaaaucgugu

SEQ ID NO: 3209 - RNA, 72 nt, Human
ggcugaggucucuugaaauugcuaaagggaaauuuuucuaugguaaugcucuuacggauauaaaccucaguu

SEQ ID NO: 3210 - RNA, 62 nt, Human
uaugcagagaugaguuaguguuucuggacguggagaccuuuuaaauggcucaucugugugua

SEQ ID NO: 3211 - RNA, 73 nt, Human
cugucccccuaccccaagucccccagucccucaaaggagggcagggaguggggacuugcaggaagcaggacag

SEQ ID NO: 3212 - RNA, 67 nt, Human
uagugauuguuucucuucacccccaacauuuccguuuaccaaggucgaguuggagagaaauucauug

SEQ ID NO: 3213 - RNA, 66 nt, Human
guauuucuaguucuagaucccugaggaaucaccacacugacuuccacaaugguugaacuaguuuac

SEQ ID NO: 3214 - RNA, 61 nt, Human
agaggagauccaggcuaaauuuucuggcccuucaggaaggcuggcaccucuggcucucccu

SEQ ID NO: 3215 - RNA, 69 nt, Human
aaucauuuauuauggucagcuuguuuuacauguccccuaucaugagaaaugcuaucaacaucugugauu

SEQ ID NO: 3216 - RNA, 81 nt, Human; identical to SEQ ID NO: 949

SEQ ID NO: 3217 - RNA, 61 nt, Human; identical to SEQ ID NO: 950

SEQ ID NO: 3218 - RNA, 64 nt, Human
ugaccaaaacugugccuuguggaaaugaacuucacaaguuccucaucugggacacugcugguca

SEQ ID NO: 3219 - RNA, 64 nt, Human
gcuggagcgagggugcaccauaacguuccaagugggacagauacuggcgauccuuaacgauagc

SEQ ID NO: 3220 - RNA, 60 nt, Human
ucucuguccucugcaucuggaugagugcacuuuuccuuggugugggagugagggcagagg

SEQ ID NO: 3221 - RNA, 64 nt, Human
ggagagcccgucgcgggagugcaaggagcuggacggccucuggagcuuccgcgccgacuucucu

SEQ ID NO: 3222 - RNA, 64 nt, Human
ggagcagugguaccggcggccgcugugggagucaggccccaccguggacaugccaguucccucc

SEQ ID NO: 3223 - RNA, 69 nt, Human
aaugcaaauuuucugguagguaucucuuuuuuugcuaugaugauuccaacuuaucagagaccucccauu

SEQ ID NO: 3224 - RNA, 88 nt, Human
aguacuuguuuuucucugauaagacucaggaauucugaaaugugaaauugucucaauucuuucucuuguagcaugaaucaaauguauu

SEQ ID NO: 3225 - RNA, 76 nt, Human
uuaugacuauagaauauaauuuggcauaugauucauauuacauauguauucauuuuauuuuuaaaauaguuuauaa

SEQ ID NO: 3226 - RNA, 81 nt, Human
agaaggauuucagcaaauuuggagcagggcuguuugcucuuuuguggauauugugccugucaggauucuugaaguuuuuuu

SEQ ID NO: 3227 - RNA, 64 nt, Human
cuuuucuggggauucaucaucuaugacacacacucacugaugcauaaacuggucaccugaagag

SEQ ID NO: 3228 - RNA, 78 nt, Human
ccugcgcacgcgucgcagccaucuccgcgcacagugguggccaccgcgacuggugcugaagugucggcgugugccggg

SEQ ID NO: 3229 - RNA, 67 nt, Human
gggcccugagauggggucugaccucaguuccugcggggaacuucaccagugaccccagucagugccc

SEQ ID NO: 3230 - RNA, 64 nt, Human
ucuuuaacacagugucccauugaaauuuuaauuuuuagagaauuuaugaaucacuguuucaaga

SEQ ID NO: 3231 - RNA, 84 nt, Human
gaugucaauguaaauuuugaaaaauccaaacuuacauucaguugucucggaggaagugauaauuuuaagcauuuaaaugacauc

SEQ ID NO: 3232 - RNA, 61 nt, Human
gucccccugccccguucacaaugcagccugcuucugcaaaaggugguacgaucgaagggac

SEQ ID NO: 3233 - RNA, 69 nt, Human
cgggccaggggcugucucgcacaucggaguacuaaaggcauuagaggaggcggggguccccuggaccug

SEQ ID NO: 3234 - RNA, 115 nt, Human
agacacuaacggccagugaguuggagucucagggcaggguggcaguuucccuugagcaaagcagccagacguugaacuguguuuccuuucccugggcgcagggugcagggugucu

SEQ ID NO: 3235 - RNA, 83 nt, Human
ucuccuccaugugucuuggcaggcacucauuucuguggcugucggcagagggaauguucuggagcugccaaggagggaggaga

SEQ ID NO: 3236 - RNA, 65 nt, Human
gggcaggaaggcgggcucgacuuucucuuuuugccagcgggagcugaagcccguccuuagcgccc

SEQ ID NO: 3237 - RNA, 62 nt, Human
aguaggucuuaagugucaucuggcaucuucuuucuguagccagguaacucuuaaaucuuauu

SEQ ID NO: 3238 - RNA, 90 nt, Human
ucagccugcugaacaguuccuuuuucagagacauagauaccauccaaaaauuuccugauauccuuguuuuuaacuguuguggcuggcuga

SEQ ID NO: 3239 - RNA, 80 nt, Human
guaagaagcauccucaagcucccaguuaaguaacuugacuacuuuuauuugggaauuucagacuauagaagcucucuuau

SEQ ID NO: 3240 - RNA, 81 nt, Human
uauguccagauucugugaccacuaguuacuguaucagaacucaucagguacccacuuauaaauagcacugaucuggcugua

SEQ ID NO: 3241 - RNA, 72 nt, Human
agugucgacagggggaaaugauuguuuuuugagccccagaaucauaugaucaaaccuauagucugucgugcu

SEQ ID NO: 3242 - RNA, 82 nt, Human
cuucggggaagagaggaaauaggauugagauagaauacaaaagggauuucagcuaugucugauuuuuuuucuuauaaagaag

SEQ ID NO: 3243 - RNA, 84 nt, Human; identical to SEQ ID NO: 286

SEQ ID NO: 3244 - RNA, 61 nt, Human; identical to SEQ ID NO: 776

SEQ ID NO: 3245 - RNA, 76 nt, Human; identical to SEQ ID NO: 758

SEQ ID NO: 3246 - RNA, 71 nt, Human; identical to SEQ ID NO: 1764

SEQ ID NO: 3247 - RNA, 101 nt, Human
cccucuucuuguuuugaaagauggucggcugcuuuugguaggcacgcucagucugaauguccgccaucuucccggccgccugaaaaaaagcgggggggggg

SEQ ID NO: 3248 - RNA, 76 nt, Human; identical to SEQ ID NO: 758

SEQ ID NO: 3249 - RNA, 76 nt, Human
ggcccucagaggcuccucccuaucuccuggcuaguuaccacuaggcuaccaggucucuaggggccugagagaggcc

SEQ ID NO: 3250 - RNA, 65 nt, Human
cagggagcucccaguccugggagaggcugaaggcaaagcagcagaggacucggagcucacacuug

SEQ ID NO: 3251 - RNA, 64 nt, Human
gacuuguguuugaaucccaguuccaucacuuccugcugugagaucuugggcaaaucacuuaguc

SEQ ID NO: 3252 - RNA, 75 nt, Human
ggcgagagaagaaggaauggguugagaaacugacugaaguguucuaucagcgucugaugccuucuucccuuugcc

SEQ ID NO: 3253 - RNA, 63 nt, Human
guagacagagcguaaaaggagaugguguggcguacauugcggcaucccuccggauucugcugc

SEQ ID NO: 3254 - RNA, 71 nt, Human; identical to SEQ ID NO: 1145

SEQ ID NO: 3255 - RNA, 67 nt, Human; identical to SEQ ID NO: 1146

SEQ ID NO: 3256 - RNA, 68 nt, Human
ccccaucuugaagcugggggcuccacagccugggcugccuuuacaggaugcccucucaggaucagggg

SEQ ID NO: 3257 - RNA, 116 nt, Human
gugaggaacauaaccucuuacaauugaaauauuuagaaauauaauccugauuuucacucugccuaaggauuuccacgaauugaaaauuuuuacugaugggaagguuuguuuuuuac

SEQ ID NO: 3258 - RNA, 85 nt, Human
uucugacccaugagaaagggaaaauuuacggagugauaauuuucacauaggugugaauuuauccauuauauaggcauggucagga

SEQ ID NO: 3259 - RNA, 78 nt, Human; identical to SEQ ID NO: 99

SEQ ID NO: 3260 - RNA, 80 nt, Human; identical to SEQ ID NO: 100

SEQ ID NO: 3261 - RNA, 61 nt, Human
cccugggguuggggccucaccccucuggagggccuggaggcaggagguggaaaccccaggg

SEQ ID NO: 3262 - RNA, 65 nt, Human
ucauguuccccgugacaggugggccugaggggucggcgugaccccuccccagcaugguagcauga

SEQ ID NO: 3263 - RNA, 70 nt, Human
gggaaacuccgaggacagagggcuaaauccaugaaguuguggauggccugaugauccacagcggagaccc

SEQ ID NO: 3264 - RNA, 71 nt, Human
ccagguucaagcgauucuccugccucagccuccuaaguggcugguauuacaggagugugccauuagccugg

SEQ ID NO: 3265 - RNA, 65 nt, Human
gguaucgugugucuggaauaucugauauagggguuaucuuaaucaucuuuuuauaacacgguuuc

SEQ ID NO: 3266 - RNA, 76 nt, Human
gcuaccggaccugccugggagccagugaagggcgagucagggcacgcguccuggaggcugccagcguccuuguagc

SEQ ID NO: 3267 - RNA, 60 nt, Human
uuucugcauagacucacuuguuaaauagcaguucuguugagaguggaguuacugcaggga

SEQ ID NO: 3268 - RNA, 61 nt, Human
gaaggugcugacuuccuugggagaugccauaaagcaccuggaugaucucaagggcaccuuu

SEQ ID NO: 3269 - RNA, 62 nt, Human
ggcgccgucgggccccagagaaaaaguuuuuaaaccccauucuguuggggcccgggggggcc

SEQ ID NO: 3270 - RNA, 72 nt, Human
ggcuuccuggcagaagauggugacuggaguggccagugcccuguccuccagauaccacugagcucacuggcc

SEQ ID NO: 3271 - RNA, 87 nt, Human
guuaaagccuaggcuagcaauuuuuuuuaguugcaacuaaguaagauauacuacaaacuaaggaugcugcuagacuaaggaauaaac

SEQ ID NO: 3272 - RNA, 63 nt, Human
ugaaaaugucacccagagauauuaaaauaauuuuuaaaguuuaauucuggucaaaaguuuuua

SEQ ID NO: 3273 - RNA, 77 nt, Human
uaacuguaguuuuaauaagcaugacauuauuugauaaguauauaacauuuacaucauuucaaaaaauacugccguua

SEQ ID NO: 3274 - RNA, 67 nt, Human
uuuucuuuuuuguuuguuuuuguuauugauauuaaacaguguaaucuuugcaagcguauauugaaga

SEQ ID NO: 3275 - RNA, 100 nt, Human; identical to SEQ ID NO: 1173

SEQ ID NO: 3276 - RNA, 70 nt, Human; identical to SEQ ID NO: 1335

SEQ ID NO: 3277 - RNA, 76 nt, Human
uccaagagauagcaaaucgagucuuaaauaauccggggagaaagacgcccggguagauuugaggugcagccuugga

SEQ ID NO: 3278 - RNA, 130 nt, Human
augcuacugugugaauagaaaguaagauaauauguuugaagguguuuccaaaacugggaagugauauacaaaugugaaggggucauuuuuauuuauucaggucuuuuuaguugaugucaucuaguagugu

SEQ ID NO: 3279 - RNA, 86 nt, Human
gggaaaagaacaauauauccaaauaaaagaccuagaaggagacaguaaucuucccuagguuugcauuuguuuacucuauuuuuccc

SEQ ID NO: 3280 - RNA, 70 nt, Human
cauucugagucuuucuggaugaacuuggcuauaucugaaaucugcuaucugagugaggacuccaagaaug

SEQ ID NO: 3281 - RNA, 85 nt, Human
gguuugucugaucauugcucgugcaguuugaguacuggauacucccuuauuccaguugcuugcaccacgcccuggucuuggaacc

SEQ ID NO: 3282 - RNA, 76 nt, Human
ccugcuggguggggccaggcauaaccuggggauagcugucccuaaccucaaugacaagggcacccacccuggcugg

SEQ ID NO: 3283 - RNA, 73 nt, Human
gcgaggagcugaggaggggcacaguucuauugccaccaccaccagggcugugccccuggccgccagugggugc

SEQ ID NO: 3284 - RNA, 66 nt, Human
auccacaguugguugaauuuguggauguggaacccauggauacagagggccaacuguauuuaggau

SEQ ID NO: 3285 - RNA, 61 nt, Human
ccagaauaugugaauaagcagacagaaagaaucuuuugaugucgauguucaacuauuuugg

SEQ ID NO: 3286 - RNA, 61 nt, Human
gguuucuugaagaccuagaacauagaagaaugccuaguuaaaaaaaaaaaucaaugaaacu

SEQ ID NO: 3287 - RNA, 84 nt, Human
ugugcaaucccuaauauaauguaaaugcuauguaaucguuguuauacuguauuguuuuuauuuguauuauguuuuauugucaua

SEQ ID NO: 3288 - RNA, 61 nt, Human
acggcguggagugcagcgacgucaaguucuuccagcuggccgcgcagugguccucgcacgu

SEQ ID NO: 3289 - RNA, 69 nt, Human
gguuuuaagcucaggagggccugcguaaaccaaugugguacacuaguuggcccgaacuugguauaaacc

SEQ ID NO: 3290 - RNA, 73 nt, Human
ugugauggcuaaguccuggacuggcuuaaugguaagauuguaacuaccaguaaguuuuuggcuuggucucaua

SEQ ID NO: 3291 - RNA, 61 nt, Human
agugaaaugguuaaaaauauuuauccuguuagaauaggcugcaucuuuuuaacaacucauu

SEQ ID NO: 3292 - RNA, 69 nt, Human
gcaagauugcagcaagaucaugugcauacacaguucuuuuuguuuuugugugugugugcugucgcuugu

SEQ ID NO: 3293 - RNA, 75 nt, Human
uuuacauuguuuaccaagcuguagugcuuuaagaccacuacuuaaaaagcaaaauaaacuugguuuacauuuaaa

SEQ ID NO: 3294 - RNA, 66 nt, Human
gacacccaaggaggcuauugagggcaccuacauugacaagaaaugccccuucacugguaauguguc

SEQ ID NO: 3295 - RNA, 71 nt, Human
gcggauccucucuggcguggugaccaagaugaagaugcagaggaccauugucauccgccgagacuaucugc

SEQ ID NO: 3296 - RNA, 60 nt, Human
agauacagaucucuucagcucaccaaaacucauauauuugcuuucugaaggauuucaucu

SEQ ID NO: 3297 - RNA, 71 nt, Human
agucacccuuuaaaagaacauuaaauaauaauaauauuaauuauauaugauguauauuaaauauucugacu

SEQ ID NO: 3298 - RNA, 73 nt, Human
agauuauagcaacaauggaguugggaaguugguauggccuauaauuguccuaaguuccagaaugaaaagaucu

SEQ ID NO: 3299 - RNA, 65 nt, Human
auuugauaauagagaagggaguuuuauggaaguuucuuugaagauuucuuuuuuccauuucgaau

SEQ ID NO: 3300 - RNA, 61 nt, Human
gcaagaauggaaagggcaggucagcaagggaggagcuggcugccaggagacaaaggcuugc

SEQ ID NO: 3301 - RNA, 108 nt, Human
acuuacggcaagccuguccaucaugguguuaaccagcuaaaguuugcucgaagccuucaguccguugcagaggagcgagcuggaacgccacuguggggcucugagagu

SEQ ID NO: 3302 - RNA, 85 nt, Human
cugaauucuuacuggguuggugaagauuccacauaccaaauuuuuugagguuauccucauugauccauuccauaagagcuaucag

SEQ ID NO: 3303 - RNA, 93 nt, Human
gcgccgacugggcuacaaggccaagcaagguuacguuauauauaggauucguguucgccgugguggccgaaaacgcccaguuccuaagggugc

SEQ ID NO: 3304 - RNA, 93 nt, Human
gauacugcaaaagugagaaggagauaauagauacuuugcucugaauuuggcauccagaguuaacauuucuccccucacucccuugcugguguc

SEQ ID NO: 3305 - RNA, 102 nt, Human
uaggauauauaaauguugcaagccauuauugcugaaugguucuuuaguuauuaacuagacccaaaucaaagaccaguggauuuaugauauuuauaguucuug

SEQ ID NO: 3306 - RNA, 98 nt, Human
ccaauuccugaauucaguaagcaaguuacaauucaaaaaggaagaagaguaaaaaccuuuuauugacagugacuuugccacugaauucaagggaaugg

SEQ ID NO: 3307 - RNA, 74 nt, Human
gucuaucaguggauggcauaauuaacuuuucgcauauuuugggcuuagaggucggauuaccauccgugguuuac

SEQ ID NO: 3308 - RNA, 65 nt, Human
gugcccucuuucuaagcuuaccaucuaugaaucucacagguuuagacuccauauuaaggggguac

SEQ ID NO: 3309 - RNA, 66 nt, Human
uccagccuugaccaucucugccuuggucauguuauagaccauuuaguguaauuaugguauguuggg

SEQ ID NO: 3310 - RNA, 74 nt, Human
ccucucccauggcuagggaaaauggcacaguuggguccuauuucagaugcuaaagaaaacccuuaugggcgagg

SEQ ID NO: 3311 - RNA, 78 nt, Human
gagguggguacuggcaucacugaugacaaugaagaugaaaauucagccaaucagauugcaggcaaaauacccaacuuu

SEQ ID NO: 3312 - RNA, 76 nt, Human
gggguggaugaagcgcauggccuacaguggaccacuccaagacgugguucccugggugccacgggucacacaucuc

SEQ ID NO: 3313 - RNA, 87 nt, Human
ugagagcugcauucagugcaaccagagacccuuucguuccaaccaggggccaguggggcuggugacgaagcuggcuggagcucugca

SEQ ID NO: 3314 - RNA, 70 nt, Human
aggggugggaucacagcaucucagguccucuagaggggaaauagggggaaugccuaggaacccuguccuu

SEQ ID NO: 3315 - RNA, 81 nt, Human
gcaauaggcgggugggugcgugcuuccucccugccccagggcuucucccugaggcugguaggugggccccucgcuuucugc

SEQ ID NO: 3316 - RNA, 67 nt, Human
uugaagggugcaaagugauuaaggcucugcugggagaauuaaggacccugauccuugcgcucugcaa

SEQ ID NO: 3317 - RNA, 87 nt, Human
ccuauaaauacuuacuucaguuaccagguaaaccaagugagaaccaaauuuucacaggcauuuacucauggcugaaaguuccagagg

SEQ ID NO: 3318 - RNA, 70 nt, Human
ggcaucgggaagagccuaaguccacauuauaaaauaggaaguggaugcggguacaguuacucccgggacc

SEQ ID NO: 3319 - RNA, 61 nt, Human
uugaacuauuagcuugugaaguuuaaauccaaauggagaaagacucaaagaaacaguccaa

SEQ ID NO: 3320 - RNA, 79 nt, Human; identical to SEQ ID NO: 1103

SEQ ID NO: 3321 - RNA, 73 nt, Human
uccuuggcguggcacccaacucaccccagcaccguggcuguggguuccaaagggggagauaucaugcucugga

SEQ ID NO: 3322 - RNA, 71 nt, Human
cucccugaccccagucuuggcucaugcugaggugugcaccucugccccugaccccugggcuggccugggag

SEQ ID NO: 3323 - RNA, 77 nt, Human
gggggaaagccugguuuuggcugcuuugaggcuuucauugaaagcaaaugaggcagaaaggccccggccccaccccc

SEQ ID NO: 3324 - RNA, 78 nt, Human; identical to SEQ ID NO: 99

SEQ ID NO: 3325 - RNA, 65 nt, Human; identical to SEQ ID NO: 247

SEQ ID NO: 3326 - RNA, 80 nt, Human; identical to SEQ ID NO: 100

SEQ ID NO: 3327 - RNA, 125 nt, Human
guauuuuauagcacuaaaauauuaauacagccagaaauauuaucaauugguccaagauuucuguuuauaaaaugucuagacugcuaauugaagaaauguugcuguauaaguaauagcuacaauac

SEQ ID NO: 3328 - RNA, 82 nt, Human
gggagauggcuuccgcucaugcaacaggcagguuugggaguuagaggucaaaagcagcugccugaaugaguuguuguuuccu

SEQ ID NO: 3329 - RNA, 78 nt, Human; identical to SEQ ID NO: 99

SEQ ID NO: 3330 - RNA, 65 nt, Human; identical to SEQ ID NO: 247

SEQ ID NO: 3331 - RNA, 80 nt, Human; identical to SEQ ID NO: 100

SEQ ID NO: 3332 - RNA, 71 nt, Human
ccggguagagggauugagccaagaggugagggugcacgucuucccuccuggucccagcuccccaagccugg

SEQ ID NO: 3333 - RNA, 109 nt, Human
gagcagcgauggaccauguagugcaugggcagugugcgacauccugcucucucacauaccguaucgauagcgcaaccuucucacacuacaaauuggcgaucugcuccuc

SEQ ID NO: 3334 - RNA, 63 nt, Human
uacacucaagcgcggucguaccugcucgugccuucuggagcacaugccgcgagcuugugugua

SEQ ID NO: 3335 - RNA, 68 nt, Human
agaauuuuuggcuuauuuauuuaaaaaaagucaaccuuauacauaaauagaauaaaaacaagaacucu

SEQ ID NO: 3336 - RNA, 131 nt, Human
uccccccaacaaaaggauagugucacaugcucaaaccauuuaagucuugcaguguaguuacccucuguuguuacugcuacauucuaaacauaagguucucauuguguguuccuauaccuaaauaaaaaaca

SEQ ID NO: 3337 - RNA, 85 nt, Human
aggagaaggaauuucagguggguuuaagucagagcuaguuccccaacagaaagaucauuugaaaccaguuuuuaucccuucucuu

SEQ ID NO: 3338 - RNA, 93 nt, Human
gaauauugcauguagaguucgacgcuggacaucugugaagaccaaccugggcuuuuuggguguguugccucuauccuucccauguucuuguuc

SEQ ID NO: 3339 - RNA, 81 nt, Human
uauaaaccugcuaucuugagguccuggucuuuuaaaaauuuuuuuuaauuuaaagcuuuuccaccgagguuuuaguuugug

SEQ ID NO: 3340 - RNA, 61 nt, Human
gggaacugggcaucaucgacagugccuucggccagagcggcaaguucaagauccacauccc

SEQ ID NO: 3341 - RNA, 74 nt, Human
auguuauugguauagugaaaagaagaccagauuuugaacuagaucuggauucucuuuuuaguaacucagggcau

SEQ ID NO: 3342 - RNA, 69 nt, Human
uauauauugugauuuaugcuuuaagaaaaugcauacuuuuuucuaaugaagaguaguucauaauauaua

SEQ ID NO: 3343 - RNA, 65 nt, Human
ugugacuauaaguaaugaacccaauuccacaaaccacaugucaaaauuagucuuauuacuucaca

SEQ ID NO: 3344 - RNA, 69 nt, Human; identical to SEQ ID NO: 1875

SEQ ID NO: 3345 - RNA, 70 nt, Human
guagcaggcuuccugcagacuguauagacugcacaacaaauuucuccuguaccuaugggaagccugucac

SEQ ID NO: 3346 - RNA, 66 nt, Human
acaguagggggaagguguggcucauugacuuuaauccauuuggugaagucacagauucacugcugu

SEQ ID NO: 3347 - RNA, 66 nt, Human
acgcucacaagcuaauagacuuccuuaagcugaagagaaaucagcaggaggacgacugaugagcgu

SEQ ID NO: 3348 - RNA, 77 nt, Human
cugggaagaacugauaucugagaacaacuuaaacggcgauuuuagugaaguugacgcucaagagcaggauuccccag

SEQ ID NO: 3349 - RNA, 84 nt, Human; identical to SEQ ID NO: 374

SEQ ID NO: 3350 - RNA, 63 nt, Human; identical to SEQ ID NO: 375

SEQ ID NO: 3351 - RNA, 78 nt, Human; identical to SEQ ID NO: 376

SEQ ID NO: 3352 - RNA, 116 nt, Human
uuuuguucaaaagauuugaagcaagaccuugcaaagacucuuaacauuacuguucagcuugcuuagauuguguuaacaguucauuuaacaaagauccguuuuaacucugaacaaaa

SEQ ID NO: 3353 - RNA, 67 nt, Human
ggagucuucugcuggagguuccuucacugugcgugcugaccauggugagcccauuggcagggguacc

SEQ ID NO: 3354 - RNA, 95 nt, Human
cccaagcuucucucuguccccuucccuccaagcucugucucuuaaguuauuuaaauuauggcuggggucggggagggguacaggggggcacuggg

SEQ ID NO: 3355 - RNA, 66 nt, Human
ucgggacggauguggucucccacauacaaagguccaacuguugggaacgacgcguauccguucugg

SEQ ID NO: 3356 - RNA, 79 nt, Human
guuguauaaucaucaaagccauucaucuccauaacucuuuucaucuuguaaaacugaaacucuguacccauuaaacaac

SEQ ID NO: 3357 - RNA, 72 nt, Human
uguugagugcagaugaaggguuguaugaggccccauccugggagggcuguacaccuucuuggcacagcagca

SEQ ID NO: 3358 - RNA, 92 nt, Human
uucuagagcugauuugauggacaauggagagagcuuucccugugauuauaaaaaaggaagcuagcugcucuacggucaucuuugcuuaagag

SEQ ID NO: 3359 - RNA, 72 nt, Human
guggcgaguauggugcggaggcccuggagaggauguuccuguccuuccccaccaccaagaccuacuucccgc

SEQ ID NO: 3360 - RNA, 79 nt, Human
aaaauucccacuuaauugaauacuuagaaaaaaauggccaguggcgauugaaagguauauuaaaauuaagggcaguuuu

SEQ ID NO: 3361 - RNA, 130 nt, Human
cugcugaaagucuacagucugugaauauaccaauuccccuuuacaacugaugcagaucauuaugaaauacuggaaggcauacccuacaauuuaggaauugguguggcugccacugcuaugcucucaauug

SEQ ID NO: 3362 - RNA, 69 nt, Human
gaggccagcccacucgccccagccgccgccaugaaggccguggugcagcgcgucacccgggccagcguc

SEQ ID NO: 3363 - RNA, 95 nt, Human
cgaaaggcccggaccgaucgcccuucccaacaguugcgcaaccugaauggccauuggaaauuggaagcgguuuauuugguauuccgggucuuuug

SEQ ID NO: 3364 - RNA, 71 nt, Human
ugcucuggugugugaaggucgguggguuaacugugugccuacugaaccuggcaaauaaacaucacccugca

SEQ ID NO: 3365 - RNA, 107 nt, Human
ggcccaugacugccccugccccagugccauuggccgccccacccgcaccacuggcuggggguccggggguccggccagugcaggcacccuggggcaguagcagggcc

SEQ ID NO: 3366 - RNA, 61 nt, Human
guggcgaggaguccgagccguugggggcauccaggcccagcugcugggagaccuuggccac

SEQ ID NO: 3367 - RNA, 90 nt, Human
cccugcagcaccacaaccuccugggucugcucugugagugguuucuauccagggcagcauugaagucaggugguuccggaacggccaggg

SEQ ID NO: 3368 - RNA, 69 nt, Human
ggguuggugagagcuucacagugcagcggcgaguugagccuaaggugacuguguauccuucaaagaccc

SEQ ID NO: 3369 - RNA, 65 nt, Human
caaaacucccgccuuaccugcgguggcagcacugacaugcugccacgggcccggcgggauuuuug

SEQ ID NO: 3370 - RNA, 62 nt, Human; identical to SEQ ID NO: 206

SEQ ID NO: 3371 - RNA, 92 nt, Human
ucaccaucugcagccuugaaggagcuugguucggagacaggcaaaggagccauguguggagagccugguuucucaguacuuccagaccguga

SEQ ID NO: 3372 - RNA, 72 nt, Human
cggaguuucacucuugcugugcaaagagacugguggcauuuugccccugcuccagagaucuguggaacuuug

SEQ ID NO: 3373 - RNA, 61 nt, Human
cccccacaacuacagccgccaaaauaaccagcaugguguuguaacauccccccaguggggg

SEQ ID NO: 3374 - RNA, 77 nt, Human
cuugaguuggggacaugagugagaacuggggguuuugaggaguaacccuugugaacacauguacuccagcagccagg

SEQ ID NO: 3375 - RNA, 92 nt, Human
gguauuuguccucagccucuccccagagucccugggaguguuucuguuauuguggagggaauaggggaucuggggacagggugggacguacc

SEQ ID NO: 3376 - RNA, 63 nt, Human
uccccauggugaccugugaccugcucccugagacaggggaggccaggcaggucacggugggga

SEQ ID NO: 3377 - RNA, 66 nt, Human
ggaaacuugcuggauaugauguaccgggagccagcacgaugguccuacacauuccagacauuuucc

SEQ ID NO: 3378 - RNA, 74 nt, Human
aacucuggugggucugauacagguagcaauguaauuugaaaucaguugaauuuccuguuuuucucucauagguu

SEQ ID NO: 3379 - RNA, 70 nt, Human
gaggacauuuuaaggaaaaaaagggcuuuaaaaaaauggagaauaauaauaauuuccuuugugugaacuc

SEQ ID NO: 3380 - RNA, 73 nt, Human
caugaaaaaggcauuacuauuguucuggucuaaguacucuaacaggacgaugauuucuaacccuagcaucaug

SEQ ID NO: 3381 - RNA, 73 nt, Human
uuuauuuguaucaaggcauuuaaaaugaauauauguaacauguaccuaaguuuuaaaagcauaauaaaaugaa

SEQ ID NO: 3382 - RNA, 69 nt, Human
agacaccucucucauguacccagaggacacuuguaaaucuggaccaaguacgaauacacagaguggucu

SEQ ID NO: 3383 - RNA, 61 nt, Human
gcuuaacccauuuucaagcaaaacaguucucaggaaaugucaugauugccggggugaaggc

SEQ ID NO: 3384 - RNA, 123 nt, Human
uuuuggcucguccaucagugaucugccauaccacugugacugcauugaaagaugucccuuucucucucugccagucggucggugugggacaaaacacagauauacagcagauagcggccaaaa

SEQ ID NO: 3385 - RNA, 95 nt, Human
ccagguuaaauaaggguuccaaaaauucucugguccgggauuuuaaccuucgcuggaaucugucacacguuuggaacccucaaguguccaccugg

SEQ ID NO: 3386 - RNA, 62 nt, Human
ggcgcguacauggguaauuaagguuuaaaaauaugcgcuaggccucuggcuugugugcgccu

SEQ ID NO: 3387 - RNA, 78 nt, Human
ugggcuuaacucagggagacuuuguacauuucaggcaauuacgcuuuuggacgcaagguuuuaucucaggcaagcgca

SEQ ID NO: 3388 - RNA, 65 nt, Human; identical to SEQ ID NO: 1518

SEQ ID NO: 3389 - RNA, 75 nt, Human; identical to SEQ ID NO: 74

SEQ ID NO: 3390 - RNA, 64 nt, Human
guuggucugaaagcccccgguaucauuccucgaauuucagugccgggaaccaaugcagacuggc

SEQ ID NO: 3391 - RNA, 89 nt, Human; identical to SEQ ID NO: 504

SEQ ID NO: 3392 - RNA, 72 nt, Human
aaucaagcugugaaggagcgagcccagggcguggugcugaaagugcucacaaacuucaagagcagugagauu

SEQ ID NO: 3393 - RNA, 89 nt, Human
cgcuguccucgcgcuuccgccggguggacaucgacgaauuugacgagaacaaauuuguggacgagcaggaggaggcggcggcggcggcg

SEQ ID NO: 3394 - RNA, 74 nt, Human
uggaggaauuuccugguuuuggcuauaaauuauguggaccuuuuuuaagcagccaaaacagaagauuuccuuua

SEQ ID NO: 3395 - RNA, 73 nt, Human
augaaugcuagggggaucccgcguuagaugaccgauagucuaauuaaugcaaaaccccccccuugcaccccau

SEQ ID NO: 3396 - RNA, 85 nt, Human
caggggaccuggaaguuggaacaauuuugcuccugggacaccgaggggcuuacgucgaagauucgccagacuuuugggccuccug

SEQ ID NO: 3397 - RNA, 83 nt, Human
uagggggaauggacauaugcgggguacgggcaccaggcacauauacuguggagccccccccgcgaauuuccugcgacccccug

SEQ ID NO: 3398 - RNA, 91 nt, Human
auguucaagaaauccucuagcaggucuagcaucuggucaucugggaaaagaugaguacacgaugcccacccuccuuaagguucuugagcau

SEQ ID NO: 3399 - RNA, 92 nt, Human
cugcagcagcaauaauuucccagaugcucugauuagggcacugccaucauacaugccauuaggcaucuuaggagcucccauugcagccacag

SEQ ID NO: 3400 - RNA, 84 nt, Human
caugucaguuaucaagagacucaacagaugcagaugaaguuucagcaaguucgugagcagauggaggcagagauagcucacuug

SEQ ID NO: 3401 - RNA, 63 nt, Human
caugacaacagacacauugacauggguggguuuacccgccaagcgucgauggucuucugugug

SEQ ID NO: 3402 - RNA, 65 nt, Human
cagcgacaguguaagccugaaucucuugcuuuucaucaucauuuuaggaucaacacuguauguug

SEQ ID NO: 3403 - RNA, 94 nt, Human
ggcgugucacaaccacugcaacacaaaaaaucuugcaaucucaugcuuguuuuauaaaugugaucccaugguuugaaguaguggguuacaugcu

SEQ ID NO: 3404 - RNA, 83 nt, Human
ggcccagggaucggcagggcugcuggcagaggaaucccagcugggguucccaugccccaggcuccugcaggacuugcugggcc

SEQ ID NO: 3405 - RNA, 86 nt, Human
gccugguaccggcggaugucgguggucuacgggaucggcaccuggucugugugggcucacugcuuuacuauagccgggacaauggc

SEQ ID NO: 3406 - RNA, 64 nt, Human; identical to SEQ ID NO: 2415

SEQ ID NO: 3407 - RNA, 90 nt, Human
gacgcuucaccccaaugguaaccgcuaauuaggggucgcacaaaaauugcgcccuucacagguacaaacacauucggggggggagggguc

SEQ ID NO: 3408 - RNA, 90 nt, Human
ucuaugagcaucuucaacaauauuccuacaguuguaugaguggcauguggccauuugugauguagccgaauauaggaagugugccaaaga

SEQ ID NO: 3409 - RNA, 78 nt, Human
gaagaaagaccugcaccugccugauccgaugggcaaagguggccuuuggaaggggcguuguccaguuccucuuucuuc

SEQ ID NO: 3410 - RNA, 81 nt, Human
uguucuccucaucuggaaaauaauuuggcuguauaaucgugguauucaggaaguuagggcagguguuuagguggaagagca

SEQ ID NO: 3411 - RNA, 88 nt, Human
cuccugaaagucauccucgccagucccggcguucaauguccaucaauggcggucuaaugcuggggaaaaaagguggcauugcaaggag

SEQ ID NO: 3412 - RNA, 78 nt, Human
cucgcuauauggggaagggugucucaaaggcuguugagcacaucaauaaaacuaugugcgccugcccugguuagcaag

SEQ ID NO: 3413 - RNA, 72 nt, Human
uugccgucugccaaagcuggugccguugagaaggggguccccuguacgccacaucgcugacugugguggcaa

SEQ ID NO: 3414 - RNA, 71 nt, Human
gggucaagccagcaccugaugaaacuuccuucagugaggccuugcugaagaggaaucaggaccuggcuccc

SEQ ID NO: 3415 - RNA, 61 nt, Human
gucuuggguugagccccaaaccggguuguguguuaggguauugugugggaaaacccaagau

SEQ ID NO: 3416 - RNA, 60 nt, Human
gcucagucaauagugucacagguauuaagccauuucggaauuuggcacuuuuuucugggu

SEQ ID NO: 3417 - RNA, 60 nt, Human
guuacaccaaauauucguagucugguugcccgaauauaacuaauaguauuaggauguagc

SEQ ID NO: 3418 - RNA, 101 nt, Human
aguguauuaaaaaucauauucuaauucuuuuaauuugguuaucugaguaugauaauauaggagagcucagauaacaagaaaaggcaauugguuagaacacu

SEQ ID NO: 3419 - RNA, 68 nt, Human; identical to SEQ ID NO: 1919

SEQ ID NO: 3420 - RNA, 72 nt, Human; identical to SEQ ID NO: 1920

SEQ ID NO: 3421 - RNA, 109 nt, Human
uggaagcagaggcagggcaacauuaaguagcuuacauaacucacacgguaauuugugcaguugggagauguucagcuucagucccuggccaauugcccguucuuuucca

SEQ ID NO: 3422 - RNA, 89 nt, Human
agcguaaaucacauuuacuuuuuucuacauaacuuuucuaaccacaaaaaaagaaaaugguuuaaaagaagagaugagauaucuuugcu

SEQ ID NO: 3423 - RNA, 65 nt, Human
gcuguauaugguauccugaagcaccugcccuucaagacagaaugcuuguaccacauuuaugcagc

SEQ ID NO: 3424 - RNA, 73 nt, Human
guuccacgcaccgccuuugaguuggacacagauggcaaccccuuugaccaggacaucuacgggcgcgaggagc

SEQ ID NO: 3425 - RNA, 66 nt, Human
cgcuucagucuccugcucggacagcuucucuucugacagaacugacauccagggcgauacggagcg

SEQ ID NO: 3426 - RNA, 69 nt, Human
guguaaaauuucucccgggcacuggagucuugcuccgcguaguaacucuccaagccuucugggaugcac

SEQ ID NO: 3427 - RNA, 84 nt, Human
uuuugggggucggcagcaaguuuuauuugcaaagcagcauuagcaaacagaagcaauugcaccguaaaugaguaaccucuaaag

SEQ ID NO: 3428 - RNA, 61 nt, Human
cagcugucacaacuuguguugagcaagcaguagcauuugcuuccucccaacaaggcagcug

SEQ ID NO: 3429 - RNA, 85 nt, Human
gguuagggaaaaccaugggguaagggacgggacucacuucucuuuuuaguugagggccuucuuaguuaccacauuuacucuggcc

SEQ ID NO: 3430 - RNA, 79 nt, Human
ggucuuucuuggucaagugguccagcauccuggcgucuacaaggcacuccaugaaguagcugcgguacugggggaggcc

SEQ ID NO: 3431 - RNA, 73 nt, Human
uuuccaguucuuuccggucauaauuuaaccuucucaggcacauaauuccacacuggaaacuguuucugugaaa

SEQ ID NO: 3432 - RNA, 73 nt, Human
gggaggagcuagcucucugccuucucagccaauugaaaucguggaaaccaaugggcuucagcuagccucuccc

SEQ ID NO: 3433 - RNA, 76 nt, Human
uuuuuuuuuuuuucggaccagacucuuuuuauuguuuuguuuuuuauaaacaagucucagguggaaaaagaaagaa

SEQ ID NO: 3434 - RNA, 86 nt, Human
cuccagucccaagcaagccuccaggcccugaguguucugaugccugaaggguagucauaggucccgagguggagucggggguggag

SEQ ID NO: 3435 - RNA, 69 nt, Human
gcuggggucccauaggauguccucauaugggcuuagaacugggcccgacagccauccuugagccccagu

SEQ ID NO: 3436 - RNA, 62 nt, Human
uauguauauauuuaacacacacaucuuaaaaauagcuccagaugacagaacaguauugcaua

SEQ ID NO: 3437 - RNA, 81 nt, Human
gucucauuauucugcccaggcugaucucaaaccccuaagcucaaguguuccaauugccucagcuuccugaauagcugggac

SEQ ID NO: 3438 - RNA, 60 nt, Human
aagcagcuagggaauucuuuauuuaguaauguccuaacauaaaaguucacauaacugcuu

SEQ ID NO: 3439 - RNA, 60 nt, Human
ggugacaacaugcuggagccaagugcuaacaugccuugguucaggggaugggaagucacc

SEQ ID NO: 3440 - RNA, 61 nt, Human
cugggaauaaacuggaagcugggucucuuuguugcuauguuuuuuuguuugaaguucccag

SEQ ID NO: 3441 - RNA, 61 nt, Human
ggaguugcucagaggcucacaugggcacccccauugguucgugugagcagcugcccagccc

SEQ ID NO: 3442 - RNA, 72 nt, Human
ggcuggggcucauuugcaggggggagccaaaagggucaucaucucugcccccucugcugaugcccccauguu

SEQ ID NO: 3443 - RNA, 117 nt, Human
gggaagcuugucaucaauggaaaucccaucaccaucuuccaggagcgagaucccuccaaaaucaaguggggcgaugcuggcgcugaguacgucguggaguccacuggcgucuucacc

SEQ ID NO: 3444 - RNA, 62 nt, Human
ggggauccugggguaccuggggcaccggggguuuccucugauuccaccagggaccauucucc

SEQ ID NO: 3445 - RNA, 82 nt, Human
ucagcaggacuaugagauugaauguagcuuuaacuuucuggagaaagagaaguauaagugaacuuguagucuuauuuguuga

SEQ ID NO: 3446 - RNA, 77 nt, Human
uucugguucuucacagacagaaagcccaucaucaaaauauaguggguuuuuuuucugagguuucucaggaccaugaa

SEQ ID NO: 3447 - RNA, 84 nt, Human
ggcacgguuuuuauacauacguacauauauauauauaaacacacacauagguauauaugaauaaacaaaaaugaaaucccugcu

SEQ ID NO: 3448 - RNA, 104 nt, Human
uggauuuauuaaauauuuucuguggugugaagugacuuauuaaauccacagacauugagugacuucuuacaacauccacauaagaauuuguuguaaugaguuca

SEQ ID NO: 3449 - RNA, 79 nt, Human
ccaggaggggaaacaggcacgcucauuucggcaacacacaacgcgcaagggauagagcgggcuuauaaacccucugugg

SEQ ID NO: 3450 - RNA, 62 nt, Human
gauugguugugguuaaugaauauguucaaguuuugaauuuuaauaguaacuccaauucaguu

SEQ ID NO: 3451 - RNA, 65 nt, Human
gcucauuauugacuacuuagcugaguucaauuccacaccagcugucuuuacaaugauaacugagc

SEQ ID NO: 3452 - RNA, 60 nt, Human
ggauuuuacuaauggacauuuucaucaaauauguaugagaaugcacauuucuauaaauuc

SEQ ID NO: 3453 - RNA, 68 nt, Human
ucuccugggcuucucagugucucgccggcgggguucggccugagcuggauugacauagcccuugggga

SEQ ID NO: 3454 - RNA, 61 nt, Human
caguucggcuuccgcgaaaacgacucuugcuguccacauagccagccgugaagccaaacug

SEQ ID NO: 3455 - RNA, 90 nt, Human
gaagccaaacugcaggccucugcccuccccuaaauguccuccuaggaugcagucacucgggaggaagaugugccuguuaccaagugcuuc

SEQ ID NO: 3456 - RNA, 64 nt, Human
gucugggucgaacguuucagcaugccacagaccaaauugaguaaagaaaugucguacuccagau

SEQ ID NO: 3457 - RNA, 63 nt, Human
guuuggcaaggcaucauaacaaccaacuugacuugugggaugcccccccuuuucaaaccaagc

SEQ ID NO: 3458 - RNA, 66 nt, Human
cccccggcccgggucaggccgugggagccgcuauuaucugcguucucugccaaagacucguggggg

SEQ ID NO: 3459 - RNA, 76 nt, Human
gcuggugcucauggcacuuccuccuugcuucccaccccuggcagcagggaagggcuuugccugacaacaccccagc

SEQ ID NO: 3460 - RNA, 88 nt, Human
gcugcuggagcagcugccuucaggcccugcgccgccuccggaguccauggccggcacgcgcuggguacucggggcgcugcuccggggc

SEQ ID NO: 3461 - RNA, 75 nt, Human
gggcugcggcuguaacugcagcagcugccggcgcaccggcgccgccugccugcccuucuacuccgccgcuggcuc

SEQ ID NO: 3462 - RNA, 82 nt, Human
guaugaauuggccccguccaaguuagaagaggaaguggaugaugucuuucucauucgagcucaaggacugcccuggucaugc

SEQ ID NO: 3463 - RNA, 61 nt, Human
gcgacgggcaggacgccccguucgccuagcgcgugcucaggaguugguguccugccugcgc

SEQ ID NO: 3464 - RNA, 64 nt, Human
gucucucaagcugaccagcgagcucaaguuccaucaagaaugcugucgccggugugcgcgagac

SEQ ID NO: 3465 - RNA, 116 nt, Human
gacuccaaaugauguuauggucauucuguuuuucugauacgagaauagauggucuugagaaccuagaauauucaugccuuuaugaaucuagaaugacuuuaauuagguaugggguc

SEQ ID NO: 3466 - RNA, 69 nt, Human
guccugcgccgucagcacaagccacgcuucagacacaagaggcccaagagcuucugcuaggugcagggc

SEQ ID NO: 3467 - RNA, 63 nt, Human
cgggagaaguucguggaaagcccugaaaacagaguuggcuggcaaagggcugagguucucucg

SEQ ID NO: 3468 - RNA, 60 nt, Human; identical to SEQ ID NO: 2705

SEQ ID NO: 3469 - RNA, 72 nt, Human; identical to SEQ ID NO: 1989

SEQ ID NO: 3470 - RNA, 61 nt, Human; identical to SEQ ID NO: 1988

SEQ ID NO: 3471 - RNA, 72 nt, Human; identical to SEQ ID NO: 1989

SEQ ID NO: 3472 - RNA, 122 nt, Human
uucgggggucucccuggcaaggggucccagggccuggagccaaggcccagccaaaagcacgcagcaucaaaacauguuuuuagugggaagcuccaggcccugcccuccccgggggccucgag

SEQ ID NO: 3473 - RNA, 60 nt, Human
gcgccggcccugaccccgacgcucugcccgcaggcaucaagauccccgagggcugcgugc

SEQ ID NO: 3474 - RNA, 64 nt, Human
aggugaguugugacugauugcuuuuccugcagcgcacgugagcaguaucagccaucucucuccu

SEQ ID NO: 3475 - RNA, 83 nt, Human
gugagcuagcagcuuuuuaaucuaccuggaacuaaggccaaaaauuaucagcccuuucguucuggaaggagagcugaucucau

SEQ ID NO: 3476 - RNA, 63 nt, Human
gugccugguaauggaauaauagggucggcgaugccgccaagauuccagaguaagucaggucgc

SEQ ID NO: 3477 - RNA, 66 nt, Human
auuauuucacagauaaugagaccuuaauaacaaauaggcguaaaaaaauuuucacauugaaaugau

SEQ ID NO: 3478 - RNA, 61 nt, Human
cacuuccuuugcccuuccuccugccuuucucaacugucccaaggagggggccucauuugug

SEQ ID NO: 3479 - RNA, 79 nt, Human
ggcuuggaccuauauggccaugcucuggcucuacccuugggaagccugaucccgguguguggcccagcuuguucaggcc

SEQ ID NO: 3480 - RNA, 84 nt, Human
gugcugugugucaccaacuggucuucuaauuuggaaggaguuggaaaggccuuuuuguugaugaaaaguuggaaacaguggcac

SEQ ID NO: 3481 - RNA, 66 nt, Human
uuuguuaaaccaaucacagcgguggguggaaagcaugaauuuuccccucggcagugggguaacgga

SEQ ID NO: 3482 - RNA, 104 nt, Human
ccuugaaagcucugcaucaugggcagugagcucagugguaucuggaggacagggcacuggccacuccagucaccaucuucugccaggaagccugcaccucaggg

SEQ ID NO: 3483 - RNA, 80 nt, Human
gggacugcuuccggauccguuacagaaaaggaggaggugcaguucaccaccguccucugcuccaagauccagcaggaccc

SEQ ID NO: 3484 - RNA, 73 nt, Human
uucagcaagguucuggcgcaggugcagcacccccugcugcugcuuaccucagcguucacaggccugugcagaa

SEQ ID NO: 3485 - RNA, 60 nt, Human
gccccaaccuccuggcuuggucuccgcuuguuguuggcuaccuaguuccagguugagggc

SEQ ID NO: 3486 - RNA, 68 nt, Human
ggaccaacugauaccucgcuauguagcuuuacuccuuuauccucuagguggcguauuagaauggugcc

SEQ ID NO: 3487 - RNA, 62 nt, Human
uauaagaauaugcugccaauuucugucauugucuuugaccuaucuguuuguguauccuaaua

SEQ ID NO: 3488 - RNA, 65 nt, Human
ugcucacagggugugacuggcccacuaucuaggguagugagccuauuuuguggccccugugugca

SEQ ID NO: 3489 - RNA, 66 nt, Human
ggguuucugcgggugaaccaguuaaggguuuucuucugcuuuuacuucucgccuaugcucaagccu

SEQ ID NO: 3490 - RNA, 66 nt, Human
gagacggaguuucaccauguuggccaggauggucucgaucucuugaccucaugauccacccgccuc

SEQ ID NO: 3491 - RNA, 79 nt, Human
cucugucuccuauagaugcagacagugaggauggagacugggucaucuggaugucacaucuggcaccugggaaacagag

SEQ ID NO: 3492 - RNA, 62 nt, Human
gcaggagccccaggagcugagcgaggacccucauguccaugcuguguccugacugggucugc

SEQ ID NO: 3493 - RNA, 70 nt, Human
gucccagaucacugccgcugaaccuguagggaccuuauaguacaaauuagaugcagcguagaucagggac

SEQ ID NO: 3494 - RNA, 81 nt, Human
gaaguugccucagguuacgaggucuuggcacaauuauauguguaauuguguuauccaggauuuuccaagcuucgguacuuc

SEQ ID NO: 3495 - RNA, 63 nt, Human
acuauucaaauuaauaauacuuaguuuuagaauguuuauuuuauguagucauuaauuuuuagu

SEQ ID NO: 3496 - RNA, 62 nt, Human
auuuccuguguacagagaaucacauguauauucacaaugaagcaaucgugugcaccagaaau

SEQ ID NO: 3497 - RNA, 72 nt, Human
agaugaaauaauguucugucacgugaaauauuuaaguauauaguauauuuauacucuagaacaugcacauuu

SEQ ID NO: 3498 - RNA, 91 nt, Human
cugcucuuccaaagcuccugcgucuguuuuuaaagggccuggggaaaaauacugccuaggaaaaugccaaaauggaauuaggagagaguag

SEQ ID NO: 3499 - RNA, 105 nt, Human
gaggccagcauucguucuauguuuguguuaggagcagcggucuccagaauguauugaaggggccacaaguguuauuaaaguuaaauggauggacugcuggacuuu

SEQ ID NO: 3500 - RNA, 99 nt, Human
gcuuuuaccuaugggaguaaauccguggaagaaguuuugcucaauguaugcuaacaugaagcagcuuucuguuuucaguuuauucccucagauauuagu

SEQ ID NO: 3501 - RNA, 71 nt, Human
uagaguacagugucuuaaaauauucauguuuuacuuggauaucuagaagauaaaaggcauucuguauuuua

SEQ ID NO: 3502 - RNA, 90 nt, Human
ccuaaauuacaaaugcauucagaacaaauauaccuuucuccuuuuuuauuauaaaacagauacaagguaaaauucaaaugcagcaguagg

SEQ ID NO: 3503 - RNA, 81 nt, Human
ccugugguucuuucuccugcugguggcagcuacaggaugcguuccuucccgaggugcagcuuucaggaguuugggcccagg

SEQ ID NO: 3504 - RNA, 65 nt, Human
cucggagugggguugggacguuuucacucccaguggaaacgccaacuauaaccccucccuccgag

SEQ ID NO: 3505 - RNA, 64 nt, Human
uuguugaaggcuucggagacccuguucccucaccugcagugucucuggguggcucuucagucga

SEQ ID NO: 3506 - RNA, 80 nt, Human; identical to SEQ ID NO: 174

SEQ ID NO: 3507 - RNA, 65 nt, Human
uuucggcgcugggucgccaaagcagaauggagacggauagagugguggcucccagaaucccgaag

SEQ ID NO: 3508 - RNA, 70 nt, Human
cauuacugauuaucaaauagcauagaaaccacuuccauacauuucaagaugcucuucaguacucagaaug

SEQ ID NO: 3509 - RNA, 62 nt, Human
ccgcuaccggcugguaucgaacaagcugaagaagcgguuccugcggaagccgaacguggcgg

SEQ ID NO: 3510 - RNA, 67 nt, Human
ggccggcgagcaguucggacagcugggccgggagcugcgcgcccaggagugucugcccuacgcggcc

SEQ ID NO: 3511 - RNA, 60 nt, Human; identical to SEQ ID NO: 1551

SEQ ID NO: 3512 - RNA, 79 nt, Human; identical to SEQ ID NO: 1810

SEQ ID NO: 3513 - RNA, 83 nt, Human
ggaggcagacaggugaaugaguacuuaaaaauaucaggggcaucuugacauuuuuucacgaucacuuuauuuccaaugucuuc

SEQ ID NO: 3514 - RNA, 73 nt, Human
gaggcggagcuugcagugagccgagauugcaccacugcacuccagccugggcgacagagcaagacuccgucuc

SEQ ID NO: 3515 - RNA, 81 nt, Human
guugugaacauacguccagugguaccaugugccaaaaauucauaagauacgugguuaccccuauagcaaguguuacacaau

SEQ ID NO: 3516 - RNA, 60 nt, Human
ucacagggguuuccccgggcuguuggcaaaccuaaggccaaguuaggcauuccccugugg

SEQ ID NO: 3517 - RNA, 61 nt, Human
caggaggguauuccacuuuauguggauuaguauuuguccuuauuauguggaguccuuccug

SEQ ID NO: 3518 - RNA, 75 nt, Human
aauagggaucaaguuuuaaauccuccuccuucccuuuuuucuggagucuugagggccagaguuuuuguuuuuguu

SEQ ID NO: 3519 - RNA, 66 nt, Human
gcugccccaguguaugucuugccuucuccgcgucauuguuggaagaggagagaugcaucgagcagu

SEQ ID NO: 3520 - RNA, 60 nt, Human
ucugaugcugucaguuugaccgagcugguuuugcuuauggucaugcugcaauuuguuaga

SEQ ID NO: 3521 - RNA, 60 nt, Human
gagcaacaaguaacuccaaagugucagaaaauaguuaacauucaaaaaaacuuguuucuc

SEQ ID NO: 3522 - RNA, 61 nt, Human
aaugacaccguugauugagcuugucagcagagcugaaagagacagucgacggaugugcauu

SEQ ID NO: 3523 - RNA, 63 nt, Human
gcucuggucaguuacuuucacuaucucaaucuucgagcaaguaguuaggguuaacuaccaagu

SEQ ID NO: 3524 - RNA, 64 nt, Human; identical to SEQ ID NO: 287

SEQ ID NO: 3525 - RNA, 66 nt, Human
gaaauaaucuacuccaaagccuucauuccauaaagggaacuaaagcuuaaaacaguaggaguuuuc

SEQ ID NO: 3526 - RNA, 71 nt, Human
cccaaaacuauuguuuguguuucuguguuucauauucagugauuuaauacaguaucaugggcugagguggg

SEQ ID NO: 3527 - RNA, 90 nt, Human
gcucccucccucagccccugucucugccaggugccuccucucagucaggcuucagagcagcccuggagacaggagggccauguuacaagc

SEQ ID NO: 3528 - RNA, 90 nt, Human
uguaccuauaaauauaugcugucugucaguguacaguaugguacaaacuccuuuucuggcacacuuaaaaugcaagcaaucuaugggaca

SEQ ID NO: 3529 - RNA, 71 nt, Human
cuggcugggcugugagcgcugcgggaagacacuggacccccgguguggcacgcggagcuagcgacggucag

SEQ ID NO: 3530 - RNA, 63 nt, Human
gaguaccucccaucuagaucauuaggcauccaauuagcaaugaauuucuucaaucuuuaacuc

SEQ ID NO: 3531 - RNA, 61 nt, Human; identical to SEQ ID NO: 823

SEQ ID NO: 3532 - RNA, 66 nt, Human
cauugucgucauuggacacguagauucgggcaaguccaccacuacuggccaucugaucuauaaaug

SEQ ID NO: 3533 - RNA, 63 nt, Human
cacucguagaggcaguguccuggaugaaaugccguuugcaggaggugccaucucuucacagug

SEQ ID NO: 3534 - RNA, 97 nt, Human
uggggggaugaccaguacagacaugccaguuaaguuuauacuagugggaucccaaauccaaagcaguguacguggugauauggucagugacuaacca

SEQ ID NO: 3535 - RNA, 66 nt, Human
gggcuuccccagugucuuugggggucugugaaaaagaggauccucugagguuuacugggagggcuc

SEQ ID NO: 3536 - RNA, 72 nt, Human
uccccaaagcccuucuucacuuuguguccccuugcugcgaucauggagaguuaaagaggcuuccuugggaga

SEQ ID NO: 3537 - RNA, 84 nt, Human
cccgaugucuuuuuuuuuacuguggaaauaggaucggaagagaguaacauuuuuuuuuuaauccugauaaagaagauuguuggg

SEQ ID NO: 3538 - RNA, 84 nt, Human
gucaggcagaggugacgccaggagaugauuuaaaggugaaaaugacaagguuuccaccccucaaaccuuggcuccuuuucugac

SEQ ID NO: 3539 - RNA, 93 nt, Human
guauuguuucuggauaucaagauguuaaauauauuucuugcuauugugauaugacaagagacuuaacuuaucuugcucugucuuccacuguac

SEQ ID NO: 3540 - RNA, 71 nt, Human
uaccuuaaauuuaaaauauuuuuugcuauauaaacuuuaacaguuauuaaacaguguuuucuuuuugggua

SEQ ID NO: 3541 - RNA, 84 nt, Human
acgauguugauguccaaauugaccaggaguccuaacuugcugaagacauagcugguuggagucgagaucuaucauggagaucgu

SEQ ID NO: 3542 - RNA, 111 nt, Human
aguccucagagcaagagaugaccuuaucacagaccuacuaaaugaagcaaaacagagacucagcaaggugguaaaagauacaaccagguaccaagugcugcuggauggacu

SEQ ID NO: 3543 - RNA, 71 nt, Human
auuucccaauuuuuaaagccaagauacuugacaaggauuuaagaucuuaagggguccgaggggaggggaau

SEQ ID NO: 3544 - RNA, 62 nt, Human
ucgaucuguagcucccuaugccaaggguggcaaaauugggcuuuugguggugcuggaguugg

SEQ ID NO: 3545 - RNA, 63 nt, Human
gggacucgccgccaucucaggucucuuggcuuugccaggcccaccggagaaaacugacgaccc

SEQ ID NO: 3546 - RNA, 71 nt, Human
gcaaucguggcgcguguccaguagcgcaggcguauucggaugucgucucgcaugggacaggcacacgaugc

SEQ ID NO: 3547 - RNA, 82 nt, Human
uagccgcgugcgcgaggagugcggcccucuaucuggaggcggugaauacagacacaucgcugcaggccugguacuguggcug

SEQ ID NO: 3548 - RNA, 60 nt, Human
agugagagaguugauggauauuaccuagucugccauuacuggacaucauucuuuuuuacu

SEQ ID NO: 3549 - RNA, 85 nt, Human
ucaccgcuaaugaaagcugggcacugcaaauguucugcuaugcuccagaaaucagaaguugccagcuuuuauaucuagacuguga

SEQ ID NO: 3550 - RNA, 70 nt, Human
uuuuaaaauuuuaugauuuaugaguuuagaaaaaaucucuuuuggacuuuaagcauauguuauuuuagga

SEQ ID NO: 3551 - RNA, 68 nt, Human
gcaccuuuuuuuuauuuauuuuuggcuagggaguuuaucccuuuuucgaauuauuuuuaagaagaugc

SEQ ID NO: 3552 - RNA, 64 nt, Human
ucuuaaaaaauaccagcaguuacucauggaauauauucugcguuuauaaaacuaguuuuuaaga

SEQ ID NO: 3553 - RNA, 64 nt, Human
gcgagagugugcguuugugugugugaauguaugcguuuugcccacaguaaauguacaacuucgc

SEQ ID NO: 3554 - RNA, 68 nt, Human
uuuaaauaaaauucacuuuaugaaucaauaagugaaauggcaaaaaggagagguggauauuauuuaaa

SEQ ID NO: 3555 - RNA, 66 nt, Human
cauugaguugaaggauagcaguguaccgugauuucgauggaacaaagaauagaguucaaguugaug

SEQ ID NO: 3556 - RNA, 96 nt, Human
ggcacccagaucggaaacaccaugagagcacuuuaucuguagguccuuugggccagcaauuugggcucacaaauggacaccucugagcugagggcu

SEQ ID NO: 3557 - RNA, 68 nt, Human
ucgucacgccgcggacgccucaacagacgcucuauaagaccacucaggcuggacgacgagcgccacga

SEQ ID NO: 3558 - RNA, 67 nt, Human
cugcaaguccagccagaguguuuuauaucgcgucaacaauaagaacuacuuagguugguaccagcag

SEQ ID NO: 3559 - RNA, 60 nt, Human
ggucacaaagaggcuuucaccagcggcgaagcagucgcucagacggccccaaccguggcc

SEQ ID NO: 3560 - RNA, 109 nt, Human
agaguuggaaaacgggauguugcacgugugucuuaaaagagcaagcuguagaaauuuggauagaauguuaagaagaggagagauuguggagaucugguuuggugacuuu

SEQ ID NO: 3561 - RNA, 66 nt, Human
cuucugaucauggacuuuccacauggccaaaauuuacuggaucauuggaagaaucacuuucagggg

SEQ ID NO: 3562 - RNA, 97 nt, Human
ugucugaaggaaacauugggaucuucugugauauggaugggaaaugcagucucaucaggaaucauuugguuugggucccuugucuugguaauugaua

SEQ ID NO: 3563 - RNA, 102 nt, Human
guuacacugaucaugggucugaccaucauuacagaggaaagagagaugauuucuucuaaugaagacaggaaucaugaugacuggagccaugacuaugauaac

SEQ ID NO: 3564 - RNA, 79 nt, Human
cagugaacccuguuguggacccgguguuggcaguugggacccucucagcaccgauauggacggacgacagcaugcacug

SEQ ID NO: 3565 - RNA, 70 nt, Human
uggccagcaguuuuuaggucugucaguacugcacugcaagaauggcagauuuugggaucucugcuggcca

SEQ ID NO: 3566 - RNA, 70 nt, Human
aggagucagaaaaccaccgauucuguuuuauuguaauaugucagucgaauaauugaacccgggaacuccu

SEQ ID NO: 3567 - RNA, 73 nt, Human
ggagagaaaagaaagccaaaccguucccuggguggaaaaauaucgcccaaauguguggaugaaguugcuuucc

SEQ ID NO: 3568 - RNA, 72 nt, Human
caggccgagaagaacguggagaagaaaauggaaaauaacagaggucucaagaaccauggacuccugggucug

SEQ ID NO: 3569 - RNA, 64 nt, Human
ggcggaccagugcgagguaugcugccccuaagaaacaagcgaggccaggccgcucuggaccguc

SEQ ID NO: 3570 - RNA, 63 nt, Human
ucuggggcgccuggucacgagguugggcuggcaaguaccaggcaguugacaggccacccuggg

SEQ ID NO: 3571 - RNA, 62 nt, Human
cauuucgauuucagaauuuacuuagauucagaagaagaaucgaaguggagaucugugaagug

SEQ ID NO: 3572 - RNA, 98 nt, Human
gguggcuauugcuauagcaaugauguggaguggcauuuccuuaaguuucauuaaauguuuuccauaucuagcauauuauauucaaguaagugguuauu

SEQ ID NO: 3573 - RNA, 60 nt, Human
ugguggccgucgcugccaggcacaagugucccgccgcaucuccuucagcgcgagccaccg

SEQ ID NO: 3574 - RNA, 68 nt, Human
ucuggcgcuggcgcggcuccaagaaggcauccgcauuugcuaccagcggcggccgcggcggagccagg

SEQ ID NO: 3575 - RNA, 62 nt, Human
gguacugcaacaagugagcaucauucacugcaaccuugaaguggucagguucaaccaguacu

SEQ ID NO: 3576 - RNA, 67 nt, Human
cuuuccuuaaaaaaauuggguacacccccaacacggaagcauuuggggccaauuucugguuggaaag

SEQ ID NO: 3577 - RNA, 60 nt, Human
aucucugacuuauugauuauggaaccugucaaguaguuuucaacucucccagugagggau

SEQ ID NO: 3578 - RNA, 65 nt, Human
gccugaucauccuacugcagggccuccagggccggguaaccacuguggaccugcgggaugagagc

SEQ ID NO: 3579 - RNA, 83 nt, Human
uacaucugacuuuauucccaguccucuuauccugugaaggcugguacacuagggaaaggggauauuuaaaaaugucaagugug

SEQ ID NO: 3580 - RNA, 75 nt, Human
ugacuuuggaucuaaucaagauagggaaagaucaaaagauuuauuucugaagcuugcuacaguuuucuaggguca

SEQ ID NO: 3581 - RNA, 63 nt, Human
gguacaguccugucccauuggcauggauauuuauuguuccacauguugggaaaaccaugugcc

SEQ ID NO: 3582 - RNA, 69 nt, Human
uguguuccgucuuuaugcugucacuugcaaacacuuuagcuuugcuaguucuuguauuagaucuucaua

SEQ ID NO: 3583 - RNA, 80 nt, Human
uuauguuauuagguguaaagaaaguguaugcugugccuguuuugguacugcgagcaguucuuccaauucgaugaauauaa

SEQ ID NO: 3584 - RNA, 61 nt, Human
ggugacaacaugcuggagccaagugcuaacaugccuugguucaagggcauggaaagucacc

SEQ ID NO: 3585 - RNA, 79 nt, Human; identical to SEQ ID NO: 1810

SEQ ID NO: 3586 - RNA, 98 nt, Human
gugagagcgguaagauggcggcggcggcggugguggaguuccagagagcccagucucuacucagcaccgaccgggaggccuccaucgacauccuccac

SEQ ID NO: 3587 - RNA, 63 nt, Human
gccagguuccacagcugcaguugagcccuacaaguccauccucaaccaccaguacaaccuggc

SEQ ID NO: 3588 - RNA, 68 nt, Human
gcagcagguggcgcagaugcagcugaaguacuacaacuccgacgugcaccgcgccgccuuugugcugc

SEQ ID NO: 3589 - RNA, 66 nt, Human
cugguaaacaugaccuggacauuuguaagaauauauuuaauauauguacacccauuauguuuucag

SEQ ID NO: 3590 - RNA, 66 nt, Human
ccgucacaggcuuugauucugauaacucuucuggggaauuuucagaggcaaaucagaaagucacgg

SEQ ID NO: 3591 - RNA, 62 nt, Human
cgcgggccuacggggcgggggcggggcggcagugagcucggccggcaaccgagggacccgcg

SEQ ID NO: 3592 - RNA, 71 nt, Human
uccagaucuucagugucuauuggauuuuuccaagagaaaguuuguaaaauuccuuacacuguagaugugga

SEQ ID NO: 3593 - RNA, 82 nt, Human
cugaaacgcuacaccaggcaaauucuuaguccuacugugaaaucgauggggucuuggaaaauggacugggacuguguuucag

SEQ ID NO: 3594 - RNA, 97 nt, Human
cacuuuaaaaaucgaccuugcagauuuugacaaaaauagccguuaugcacaauauacgaauuucaaaguuggagaugacaagaauuucuacgaagug

SEQ ID NO: 3595 - RNA, 62 nt, Human
ccgcucugacaaugggcagggaaauuucggcgcucgaggacugugcccaggagcagaugcgg

SEQ ID NO: 3596 - RNA, 67 nt, Human
augaggaagagggaagugaaaauggacuuuuuggggagauauuuagagucuucaaacucuauuucau

SEQ ID NO: 3597 - RNA, 62 nt, Human
gugucacuguagaccccaaauaccaucccaagauuaucgggagaaaagggggcaguaauuac

SEQ ID NO: 3598 - RNA, 79 nt, Human; identical to SEQ ID NO: 1810

SEQ ID NO: 3599 - RNA, 60 nt, Human; identical to SEQ ID NO: 1551

SEQ ID NO: 3600 - RNA, 81 nt, Human
ccaacugcauuuuauuuuucggcagauuuuccucacccuaaaacuaagcgugcugcuucugcaaaagauuuuuguagaugg

SEQ ID NO: 3601 - RNA, 93 nt, Human
ggcauggaggacgccuucaacaagggacgggccaauuucucagggaugucggagaggaaugaccuguuucuuucugaaguguuccaccaagcc

SEQ ID NO: 3602 - RNA, 82 nt, Human
guguuaugacagggagaacuggacauggaggcccacaguuuguggcagaucauccuuuucuuuuucuuauuaugcauaagau

SEQ ID NO: 3603 - RNA, 93 nt, Human; identical to SEQ ID NO: 3204

SEQ ID NO: 3604 - RNA, 67 nt, Human
ucuuggcgcgcggcacugggagccgcgggccgagccugucaagccccgcagcagcagcgcgucagga

SEQ ID NO: 3605 - RNA, 96 nt, Human
gagcuguuugaagcuaccagucugagcccuauugacuauuuuuuucaggcucugaauagcucuagggaucucagcaggggugggaggaaacagcuc

SEQ ID NO: 3606 - RNA, 74 nt, Human
gcgggcgcggggauauagggucgaagccccacucguaacgggguggauuuuucuauguagcccuuggguugugc

SEQ ID NO: 3607 - RNA, 70 nt, Human
gucuaauccuuuuuguagucacucauaggccagacuuagggcuaggaugaugauuaauaagagggaugac

SEQ ID NO: 3608 - RNA, 81 nt, Human
ugcggccgauggcgggcugcgggcaagcgucacccugcugggugccgggcugcugcugagccugcugccggcccugcugcg

SEQ ID NO: 3609 - RNA, 61 nt, Human
gcaggaacggagguuccucaugagagugcuggacuccuacggggaugacuaccgggccagc

SEQ ID NO: 3610 - RNA, 66 nt, Human
uucaccauugugcuggaggaugagggcagccagggcacggaugcccccaccccaggcaaugcggag

SEQ ID NO: 3611 - RNA, 83 nt, Human
ccaacgucuguucauggcugugguuuuaaaagagucccucaacagaugcucuauuuaauaaccaguuuguuccucagaugugg

SEQ ID NO: 3612 - RNA, 70 nt, Human
cuccuguguagucucugguuguucacauuccaaaaugauguuuacuguuuuccaagggaguguucaggag

SEQ ID NO: 3613 - RNA, 65 nt, Human
gcuagaggccuuugcuagcugcuacagguagguccacacugucgcaggcugcucugucucuuagc

SEQ ID NO: 3614 - RNA, 131 nt, Human
cuggaucugcaaugauagaauuggccugccacagacauugguauuuaaguugaagagcagaauucacaaugauucugcugcagagagcuuuaauggcaaugagacucuggggcacaguucaauugcuucag

SEQ ID NO: 3615 - RNA, 62 nt, Human
uuuaggggaagucagacuaaucccugggugcacuucgagagaaagguuggaccucgccugag

SEQ ID NO: 3616 - RNA, 60 nt, Human
augcugcagugcccuucauugcacgauccccuuccagggccugggugagcaccgcagcau

SEQ ID NO: 3617 - RNA, 66 nt, Human
uguccaugugagcauguauuucuugagggggccucuaacacugugcccaugugcucauauguaaua

SEQ ID NO: 3618 - RNA, 90 nt, Human
ugucccguucaucaauuucuccucugcagggugagcuguggugcccgcagccaaacuggguuccaguuaggggcaguagaguuggggaca

SEQ ID NO: 3619 - RNA, 65 nt, Human
gugugugcaagugugcagguuccuuuguauguauguguacgugugggaaccuguguuugucauau

SEQ ID NO: 3620 - RNA, 104 nt, Human
uaacaccagauuaguguguuaccccaaaugaacgguucuagcccucuauuaaggaaauaaaggggaccauaaggcauuuugggcugcuuaugggcuguguguua

SEQ ID NO: 3621 - RNA, 85 nt, Human
cagagagaugaggggcagcaucagugcagcuggcaggcagaacccaaauucugcaggcccaggacagugggcuccccuuucucug

SEQ ID NO: 3622 - RNA, 60 nt, Human
gccccagcuguguggccucaagcagccuuccgcuccuugaagcuggucuccacacagugc

SEQ ID NO: 3623 - RNA, 61 nt, Human
aucaucauaauagaccaguuaacccaggaguccuaauguuuuaaaacaucauuguggugau

SEQ ID NO: 3624 - RNA, 96 nt, Human
aacucauuacaaggcccagaagacgaugauucagaaggauucgaacucuuuguccaaauccuucugaaucaucgucuucugggcuuguaaugaguu

SEQ ID NO: 3625 - RNA, 62 nt, Human
ccuuccaaguaaguccaacgaaaggccauggaccacaugggaugauaugggaugauggaagg

SEQ ID NO: 3626 - RNA, 62 nt, Human
ucucaggccaguugcagccuucucagccaaacgccgaccaaggaaaacucacuaccaugaga

SEQ ID NO: 3627 - RNA, 96 nt, Human
uugcagugauuugcuuuugccuccuaggaucaccugugccauaccaguuaaacaggcugauucuggaaguucugaggaaaagcagcuuuacaacaa

SEQ ID NO: 3628 - RNA, 79 nt, Human
ccacuuagucucaacccggaaugaaauaugacugaggacucucagagaaacuuucguucaguauauuaugagaaagugg

SEQ ID NO: 3629 - RNA, 60 nt, Human
aaaauaagaguuauauaguaaauccagaaaaaaauucaaauagcugugaaacuagauuuu

SEQ ID NO: 3630 - RNA, 63 nt, Human
gcugugaaacuagauuuuccuauaaaugaucuugaauuuaguuuacaaucaaguauuuauagu

SEQ ID NO: 3631 - RNA, 64 nt, Human
gugggaaaacugcuugacagaauucacauacuccgagguauaugcaguucugagucugugccac

SEQ ID NO: 3632 - RNA, 89 nt, Human
aaaguuuuuuuggggguaaaaaaggcaaccaccuuaggcaaauuucuugaaaaaaaggggcaaagucuuuaaccccccaguuaaauuuu

SEQ ID NO: 3633 - RNA, 73 nt, Human
aaucccauuuugggguuuuccauccggaauuuuuguuuuuaauaaggguucaguuucuuuuuccccagggauu

SEQ ID NO: 3634 - RNA, 71 nt, Human
uuuuuccuugaaaucauaaagguugggccuuugacauaaaaaucccuucccuucccaaaauucaggaaaaa

SEQ ID NO: 3635 - RNA, 60 nt, Human
aucaucggcucucuggguuuuaccauuuucaucugguguuucucucuugggggcuuugau

SEQ ID NO: 3636 - RNA, 61 nt, Human
ccaguccucucgccguuuuccugcuuguccuugugcuugagaucgguuccgcaggagcugg

SEQ ID NO: 3637 - RNA, 61 nt, Human
ugauggugcuugugccgcuccuuguggcccuuaugcuugggcccggccgcgcucaccguca

SEQ ID NO: 3638 - RNA, 62 nt, Human
ugaguaauguggugcagaguguuucagcagugaagcugacagcaaaggcacagacauucuca

SEQ ID NO: 3639 - RNA, 63 nt, Human
gccuuacuauuucuucucuaagaggauggcuuaucaucccuuacucaaaacaaaaucgaaggc

SEQ ID NO: 3640 - RNA, 71 nt, Human
ggagguaugcagcgacuagauucuguccuguugcacugacccaagcaaucagacucuugcagcagaucucc

SEQ ID NO: 3641 - RNA, 61 nt, Human
uaaaacuuucaugccauagaccaggggugacccaauccaacaacagcagagacagguuuua

SEQ ID NO: 3642 - RNA, 70 nt, Human
gagaugcuguuuauuuaucaagguuuacauguacaaaauaauaauaaaucauaguaaugaauugcaucuu

SEQ ID NO: 3643 - RNA, 60 nt, Human
uggccaaugguuuacuuuuuguuucucuuuagaaugaaaugguguaacccuauaaagcca

SEQ ID NO: 3644 - RNA, 95 nt, Human
uuuuaauuuaaaacaauuuauuucaaagggaacaauuaaggggagacuccucuauuuuuuccguaucugaucuuuguaauaauguuugauuaaga

SEQ ID NO: 3645 - RNA, 76 nt, Human
gccggacaugucuuccagguacaccagcugcguaccgcgcacguuggacaacagcuccugguauucggucagcggc

SEQ ID NO: 3646 - RNA, 63 nt, Human
gucgagcauggcaccgcggaugcgcugcguggcgaaugucucgaacugcacgcccugcucggc

SEQ ID NO: 3647 - RNA, 89 nt, Human; identical to SEQ ID NO: 3422

SEQ ID NO: 3648 - RNA, 70 nt, Human
ugagcuguauaugguauccugaagcaccugcccuucaagacagaaugcuuguaccacauuuaugcagcca

SEQ ID NO: 3649 - RNA, 72 nt, Human
cuacucaaggaaagucaguaaucguuuuagccccuaaucuguuagagccguauggugagcagccuugaguag

SEQ ID NO: 3650 - RNA, 61 nt, Human
cgaguggaauagcucccgccugaucagcaagacuaucaagcaggccaagcgcuccaacucg

SEQ ID NO: 3651 - RNA, 95 nt, Human
gggagugggugagaaaucuuuauggcuuuucggugcgccccgacggugcguuuuauuuucaggugcccaucgaggugucgcucgcccgcaucgcc

SEQ ID NO: 3652 - RNA, 64 nt, Human
agcagaacaguaagcuuccagaggaaaccuacacuucuauccuuugggccuggccuguucuguu

SEQ ID NO: 3653 - RNA, 73 nt, Human
gucggcuuuuauuauuccuaaacaaaagagcuuuauuuucucaugaguagguuuuagaguuuuaauuguugac

SEQ ID NO: 3654 - RNA, 61 nt, Human
ccaaggugagccgggcaccaguggggccaauggaaccauuagaguccuccguuccucuugg

SEQ ID NO: 3655 - RNA, 77 nt, Human
ucgcggagaugucagugccugauggaguggccggggcgggugccuucacgucagcuccagaaucacugucagggcga

SEQ ID NO: 3656 - RNA, 90 nt, Human
uuuuuggggaaaauuguucuguuuguuuuaauuaaaccgacugaagaagccaagacacagauggaaagagacuaagaacaagacuggaaa

SEQ ID NO: 3657 - RNA, 75 nt, Human
cuugauacuucucucguuguugaacagagaaaaaauauaccagccuccucuggaagcagcgagggaaaauuuaag

SEQ ID NO: 3658 - RNA, 93 nt, Human
uaggaucccaucucagucacacagaaucugcuuuguuuucagauuaugaaccacaaagauacacacgaacugucuugauuugaagggagccua

SEQ ID NO: 3659 - RNA, 68 nt, Human
aaaaguauuaauuuccauuuuuaacuaguuuagaugguuuucccuugggcuuaaaauggaaagcuuuu

SEQ ID NO: 3660 - RNA, 108 nt, Human
ccuacucuccauuaugauuacuuuuucucuauuucucuguccaucuacuaggaaaauggguguugcuaggaaaugggaaaaggggauccacaguaaggucgggauagg

SEQ ID NO: 3661 - RNA, 62 nt, Human
uguguguaugugugugugugcgcgugcauguguguguaucuguaucuauaucauacagcaua

SEQ ID NO: 3662 - RNA, 72 nt, Human
aauuuuuauuuugguuuucuuacaaagguugacauuuuccauaacagguguaagaguguugaaaaaaaaauu

SEQ ID NO: 3663 - RNA, 75 nt, Human
cugaucaauccuucuuuuucucuuuugcccacaauuuaagcaaguagaugugcagaagaaaugggaaggauucag

SEQ ID NO: 3664 - RNA, 63 nt, Human
cugcccuccaucuaaaggcgcugcuugauuuugaggauaaagauggagacaaggugguggcag

SEQ ID NO: 3665 - RNA, 63 nt, Human; identical to SEQ ID NO: 123

SEQ ID NO: 3666 - RNA, 65 nt, Human; identical to SEQ ID NO: 404

SEQ ID NO: 3667 - RNA, 61 nt, Human
gaucuguaaguaacuucacauuaaaaaaugaaauauuuuuuaauuuaaagcuuacucuguc

SEQ ID NO: 3668 - RNA, 70 nt, Human
gaggagcaaccucuggagccaucgcgauugauuccucccaucccaagauggcuucuggguuccacuccuu

SEQ ID NO: 3669 - RNA, 87 nt, Human; identical to SEQ ID NO: 76

SEQ ID NO: 3670 - RNA, 63 nt, Human
gucggucugaaagcccccgguaucauuccucgaauuucagugcgggaaccaaugcagacuggc

SEQ ID NO: 3671 - RNA, 71 nt, Human; identical to SEQ ID NO: 77

SEQ ID NO: 3672 - RNA, 61 nt, Human
auguuauuuugggcauuugcaguuuucuucccugcugcauguaaugucucagaaucaacau

SEQ ID NO: 3673 - RNA, 89 nt, Human
uaugaagagagagaugaaauuuagugaacagaauugaaaaggugcucauaauuucacuaugcaaacuuaccccagucucuaaaaaagua

SEQ ID NO: 3674 - RNA, 67 nt, Human
agaaucuugccuuucuccuucaggcucauauaaacuauuggcugacaccguggaggguaaagauucu

SEQ ID NO: 3675 - RNA, 106 nt, Human
gguuuuuuucauaugacgcccuauaaagcugaaguccuggauuaagauguuucgagucaagaaacauagaagaaucuugccuuucuccuucaggcucauauaaacu

SEQ ID NO: 3676 - RNA, 61 nt, Human
ucagagcucugcugaauuccacugucauuacuucugacugaacuuugggcagaugcucuga

SEQ ID NO: 3677 - RNA, 70 nt, Human
gacuuacaaacucuucuuaaucauuaucaaucucgguuuuuuuguggugcaguggaaggaaaaauagguc

SEQ ID NO: 3678 - RNA, 68 nt, Human
gggaccucuuauucucaaauagugacauauucuccguagucacaguuucagaacugaguaaggauccu

SEQ ID NO: 3679 - RNA, 84 nt, Human
ucauuguaaagauugccuuuguucugucuaaaagucuggagaaaucccaaagacuuuuccuauguacuaggcauuuuauuuuga

SEQ ID NO: 3680 - RNA, 61 nt, Human
cucauugagccugacuguucugcuccauaaaauaggguaauaaaggucaaacaucagugag

SEQ ID NO: 3681 - RNA, 74 nt, Human
ggagucaaaaggcccagagucugagucccagcccugagcacuuaggagccuucugacuuaggguuugucacucc

SEQ ID NO: 3682 - RNA, 63 nt, Human
ucccaauggcauuucagaagugagcaguggaauuuuccugccauccuaauaagagcccuggga

SEQ ID NO: 3683 - RNA, 62 nt, Human
aaaagguuuuaguuuauuuuucccaaaugcuuguauugguaacauuuucuguauuaccuuuu

SEQ ID NO: 3684 - RNA, 71 nt, Human
guuuucccaauacuuuagaaaaauuacuaaucauuaauaagucgauuuuauacucaaaguaauggccuaac

SEQ ID NO: 3685 - RNA, 67 nt, Human
gagcaagcggggcccgcgcagcuucaggggccgcaagggccggggcgccaagggcaucggcuuccuc

SEQ ID NO: 3686 - RNA, 73 nt, Human; identical to SEQ ID NO: 2833

SEQ ID NO: 3687 - RNA, 120 nt, Human
gagccccuuggcaauacgggcacgagcacgcuucccaagcuuggggugggcaauguaggcaagucgaucgagcuugcggcugacacccuuugggaucuugggcuuaaccuccuugggcuu

SEQ ID NO: 3688 - RNA, 77 nt, Human
gccucggcacgugcacucauggccuuggaauuguuggccugcaucuucuuuaggcccuuuuuguugugcuucuuggc

SEQ ID NO: 3689 - RNA, 63 nt, Human
caaaauaaccauuugagcgcuuggcacaaaacuauuuuugccaaagccuuuacgguccuuuug

SEQ ID NO: 3690 - RNA, 70 nt, Human
ccuccccuuagaaagcugacugggaauugcaagucgacuggugcuuccccucugagauucuggggguggg

SEQ ID NO: 3691 - RNA, 62 nt, Human
ggcuuacccgggcuccgacagcggcugcaggucuccaaguugcggccgcuggagcccgagcc

SEQ ID NO: 3692 - RNA, 68 nt, Human
uccguguucugcaccaguauuguggcucaagacuccagaggccacauuuaccauggucggaauuugga

SEQ ID NO: 3693 - RNA, 71 nt, Human
aagcuuucaucuccagccuucuccauagcucuguggagggcagagaguugagggaaggaagaauggagcuu

SEQ ID NO: 3694 - RNA, 65 nt, Human
gugucgcccggucagguggugcgcucccggucacuagggguguacacgugaaguugggugaacac

SEQ ID NO: 3695 - RNA, 66 nt, Human
gccccguggcccggggaagggggcugggauugcgccagccccggauaccuggacugcuuagugggc

SEQ ID NO: 3696 - RNA, 92 nt, Human
gugggaccuucuguuuggcaggcuuccucucccuugccuggucaugguuuucuggugagaagaguguuccuggccuugcuggagguucccau

SEQ ID NO: 3697 - RNA, 60 nt, Human
uuuuuuuuuuuaugauagccaaaagcaauuuauuauaguuuagccucaaaaaaauaaaaa

SEQ ID NO: 3698 - RNA, 94 nt, Human
cugcaagacugugcccuuccccuccugaaagaugucaucgcaacagauaaagaggacguugccuucaaagaccuggauguggccauucuugugg

SEQ ID NO: 3699 - RNA, 72 nt, Human
gccagcaaagacugccucuucgccaucguggggaacaaaguggaccucacugaggagggggccuuggcgggc

SEQ ID NO: 3700 - RNA, 121 nt, Human
ggacaugaacguggggaagacgucgcugcugcagcgguauauggagcggcgcuucccggacacggucagcacggugggcggcgccuucuaccugaagcaguggcgcuccuacaacaucucc

SEQ ID NO: 3701 - RNA, 73 nt, Human
agcgagaucguggcuggacuggagaagaugccugcccgccgggcuuccuuaucccaccccagagacaucggcu

SEQ ID NO: 3702 - RNA, 93 nt, Human
uacaccugcaacgugaaggcucgauccugcgagaaggaaguggucucugcccagccugccaccuuccuggcccguagcccucacgugggugug

SEQ ID NO: 3703 - RNA, 62 nt, Human
gaggaauauuuuucgccgauacucuucacagcggaugaaggauuggcaggagauuauagcuc

SEQ ID NO: 3704 - RNA, 76 nt, Human
ggcacugcagccugaaauggcagagucuggugcugacgauccgcgagaagaucaaugcugccauccaggacaugcc

SEQ ID NO: 3705 - RNA, 99 nt, Human; identical to SEQ ID NO: 1699

SEQ ID NO: 3706 - RNA, 62 nt, Human; identical to SEQ ID NO: 3062

SEQ ID NO: 3707 - RNA, 65 nt, Human
gcggugggagcagcagccaaguccgcgggaaaccgagcugcucgggccugcccugcaccccccgc

SEQ ID NO: 3708 - RNA, 65 nt, Human
uuuuuuuuuuugagguuugcaauuuuauuaagaaaacaaaaauucaaccuauacaaaaaggaaaa

SEQ ID NO: 3709 - RNA, 100 nt, Human
cgggucccuggucugggccaugucuggcugugaugcuugggagggagacuguuguucccggagaugcggcgcgcaggacaaggagcauccaagauaccug

SEQ ID NO: 3710 - RNA, 65 nt, Human
gcggccucgcugccgcaucccaggcuaagcgcugcgcgcaaagccgugcggagauuggaggccgc

SEQ ID NO: 3711 - RNA, 65 nt, Human
uugcagaaguaaacuggcaaggauuuuuugugcaugucacauuaaaaucaucaccuacuuuucaa

SEQ ID NO: 3712 - RNA, 64 nt, Human
cugcaggucuagucagagccucgugcaugauaauggauacaacuauuuggauugguaccugcag

SEQ ID NO: 3713 - RNA, 77 nt, Human
ccccccccauaugccgccccggagcuguuucagggcaagaaguacgacgggccggagguggacaucuggagccuggg

SEQ ID NO: 3714 - RNA, 64 nt, Human
gaaccucuugcuggaugccgaggccaacaucaagauugcugacuuuggcuucagcaacgaguuc

SEQ ID NO: 3715 - RNA, 64 nt, Human
augggcgcauggggaugauuaacucuuucauguucgagggagccaauaauagucuuuaucucau

SEQ ID NO: 3716 - RNA, 60 nt, Human
ucgggggcaguuuugggggugucuagcaaagaccuggaaggccuucccgguuaacccuga

SEQ ID NO: 3717 - RNA, 83 nt, Human
uccucaaguuccuccagcuuuuuaugucugauaugccaaagccugccuucaugaagcagaaccuggaugagcuuggaauagga

SEQ ID NO: 3718 - RNA, 80 nt, Human
cugaaguuuugcugccuguuaauuaccauuuggaugcuuuaaaacccuacaggugauuccaaugugcagccaagguugag

SEQ ID NO: 3719 - RNA, 67 nt, Human
gcuuguucuguucuaccagugucuugacaguuaaucaugaucuuugcacaguagaugcagaacuagu

SEQ ID NO: 3720 - RNA, 79 nt, Human
cucaagguucccugggcauccugcccacccaagcugacugcuaaggucaucgauacggagcaggagcccaggccuagag

SEQ ID NO: 3721 - RNA, 89 nt, Human
gugagggccugccugggcccgugucauagucccugccccaggccgacggccugcaggucucgggggugacgcucgcuaggcgcuuucac

SEQ ID NO: 3722 - RNA, 68 nt, Human
ggacacuauuccucccugcagcccuugcccacccccuugggccaugaggaauucaggcagcugugucc

SEQ ID NO: 3723 - RNA, 66 nt, Human
caacaugaagguccucuuacuuauuccgccuucacuaggcaaggacgagggcaccuacacguguug

SEQ ID NO: 3724 - RNA, 93 nt, Human
ugccuaguggaccagagccuucgucuggacugccgccaugagaauaccagcaguucacccauccaguacgaguucagccugacccgugagaca

SEQ ID NO: 3725 - RNA, 81 nt, Human
acgaguugagauugggcaguugguuuuuaggauuucuucauacggcucuaagaaaacggacucuccccacagucuuucugu

SEQ ID NO: 3726 - RNA, 78 nt, Human; identical to SEQ ID NO: 99

SEQ ID NO: 3727 - RNA, 80 nt, Human; identical to SEQ ID NO: 100

SEQ ID NO: 3728 - RNA, 84 nt, Human
acacacuuucuaugcauacaaauuuugugaauucccaaaguaugcuuuggaauuggucauagucuuuucguaucaugagugugu

SEQ ID NO: 3729 - RNA, 131 nt, Human
cuguccuccucagugcuuuuuaaugaaauuucaccugccccuuguguuccugcuuuggauaguuuuugcuccuaagcauuggcauucuucuauuguaugguauguauuuauagcaauuguaggauggucug

SEQ ID NO: 3730 - RNA, 60 nt, Human
gaaauccucucggaguccgcuuucauauugagucacgcgagacucccacucgaggaucuc

SEQ ID NO: 3731 - RNA, 65 nt, Human
gaguaaaggagugucucaagguacuugaucacgugguucuugaaguccuuggauuucucuuucuc

SEQ ID NO: 3732 - RNA, 81 nt, Human
ugcgaagggccaggugucgggcgcuguuucucguuuucaucauauagacaaaacagcccugcugcaaagauggucaacgua

SEQ ID NO: 3733 - RNA, 65 nt, Human
caucucacuaagugcugaucaguuuugauucaguuggaguagagcacauagguucuuuggagaug

SEQ ID NO: 3734 - RNA, 81 nt, Human
ucaugucacuuguaauauuuuaggucaucuaauccaaucaacaaagguauauugacucuguauuugaagcauuugucauga

SEQ ID NO: 3735 - RNA, 65 nt, Human
gcggcucaucccagauggcuguugggucaaguacauccccagucguggcccucuggacaaguggc

SEQ ID NO: 3736 - RNA, 114 nt, Human
gcaguguugggagugcuguuggaaagcugagccugagagacagauugaggaaggagauuuacucgguguuuguuucugugucacagcuuuccguccauuuaacucuugaucugu

SEQ ID NO: 3737 - RNA, 72 nt, Human
augaacuaugugguuugaaucggauguagaccauuaguacuacuacuugagcuaaacuucugcaugguucau

SEQ ID NO: 3738 - RNA, 79 nt, Human
uucugcugauuuuaaauauacaauacaucauacauacuuuacaagcaaguuaaauggagauaaaguugaaaucauagaa

SEQ ID NO: 3739 - RNA, 68 nt, Human
cgaaaggggacagaacguaaagguguaccaauaccauccuuaacaccagaaaguuauccaacaguucg

SEQ ID NO: 3740 - RNA, 78 nt, Human
caucuuugacuuuggcuccauguuucaggaugcgugugaacucgauguaauugaaauuccccuuuuugucaauaggug

SEQ ID NO: 3741 - RNA, 68 nt, Human
gcucuuuccuucuguauauaccauggucuuacuuuccaacucuguacagauuuauuuauuggaggagc

SEQ ID NO: 3742 - RNA, 68 nt, Human
gcuggaacuuuuggaccugggucauaggcugaaccuguuauggacccccaaauucugagaguuccugc

SEQ ID NO: 3743 - RNA, 96 nt, Human
gggcuuuaccggguucucggaguacgggggguuacgcacuacuauucaauagguuaagcuuguccaccuggcaugucuccguuuuuuccauugcuc

SEQ ID NO: 3744 - RNA, 75 nt, Human
uacugauacaaguuugauacaugcaauuguugggaggaaagauuccucagaaggcacaaagagcuguauugugua

SEQ ID NO: 3745 - RNA, 71 nt, Human
ggggggggcgcgcgcgcaaaagagaagacucccccgcggggggcgcccacaaugucgcgcgcgcgaccccc

SEQ ID NO: 3746 - RNA, 66 nt, Human
acuggugcagagaaccauugcaagacuucgccuaaagaaaauuuuuaguggugucuuuguaaaagu

SEQ ID NO: 3747 - RNA, 68 nt, Human
gcaccuggggaaguuuggcgucauuugcuuggaagaccucauucaugaaauugccuucccagggaagc

SEQ ID NO: 3748 - RNA, 74 nt, Human
gggggugcugugaugcgugaggcagccgggggaggcccggaguccgagacugcuugagcgcugcgcacaccccu

SEQ ID NO: 3749 - RNA, 60 nt, Human
aaugagaccauccauuacauguacaaacacaaaauguaccgaaagaugguguucuacauu

SEQ ID NO: 3750 - RNA, 82 nt, Human
gucguggguguuuggugugaggcugcgagccgccgcgaguucucacggucccgccggcgccaccaccgcggucacucaccgc

SEQ ID NO: 3751 - RNA, 65 nt, Human
gcuuuggcuccgaggggucccgagcgcggaugcgugaggauuaugacagcguggagcaggauggc

SEQ ID NO: 3752 - RNA, 90 nt, Human
ucgcugacagguccucugauuguccaaguguacucuucaagauuccaguuuggacagugcagccuuggaacaaauuaggacuggggguga

SEQ ID NO: 3753 - RNA, 63 nt, Human
ucucuuagcgguaucaugggugguaacauugacguggccaacuaaacauguaccauugaggga

SEQ ID NO: 3754 - RNA, 99 nt, Human
gccccuagcgccguucgcgccgcuaggccuggcuucugaggcgguugcggugcucggucgccgccuaggcggggcagggugcgagcaggggcuucgggc

SEQ ID NO: 3755 - RNA, 64 nt, Human
uaguugugguuuguccaaacaucaucaauuguaucuuaucaugucuggaucgauccugcgauua

SEQ ID NO: 3756 - RNA, 91 nt, Human
ugaaacauaaaugaaugcaauuguuuguuguuaacuuguauauugcagcauuauaaugguuacaaauaaagcaauagcaucacaaauuuca

SEQ ID NO: 3757 - RNA, 78 nt, Human
gguuaaguuucccuggggggccacccaaaucgggggaacccccggcaaaauaaagggcccccuugggggggaaaaacc

SEQ ID NO: 3758 - RNA, 106 nt, Human
uuuuuuuuuuuuuuuuuuuuuuuuuuuuuuuuuuuuuuuuuuuuuuuucccuuugggggaauuaauuaaaacaggcaauuuaaaaaaccccaaaaaaaaaaaaaaa

SEQ ID NO: 3759 - RNA, 70 nt, Human
gaguuggcguuuccuguucuggggugcuacugccaaacguuaugguacuuagagucgggaugcacaacuu

SEQ ID NO: 3760 - RNA, 74 nt, Human
gcugauuuccucaguuccauuuugaggaauggggaaggcuauucuaaagaaaaaaaugggauuguuuucucggc

SEQ ID NO: 3761 - RNA, 68 nt, Human
uuaguguuuuuggauuuuuagaauucacuacauaaauuguaaguaauugugggucucaaaaacacuag

SEQ ID NO: 3762 - RNA, 68 nt, Human
cagagcucaaaugauacuuuucccacagcaaugcacauugcugcugcauagaaguucaugaaguacug

SEQ ID NO: 3763 - RNA, 67 nt, Human
gcucgcguccccucgugcgggcuccagccgcagccuuagcuucggcucccggcuuggguggcgcggc

SEQ ID NO: 3764 - RNA, 75 nt, Human
ggaugggacguacucauacucaggaugcuguuccccuuacucuugggcaggaauuuaggugguuauguuccaccc

SEQ ID NO: 3765 - RNA, 72 nt, Human
gggggggucagugggcauguacacccugacgucaucgugggccuguuccuccaugccggcauuguccuuccc

SEQ ID NO: 3766 - RNA, 86 nt, Human
gugcacgccaauguguucggcaucaaggacugggugacgccguacaagaucgcggugcuggugcugcugaacgagaugagccgcac

SEQ ID NO: 3767 - RNA, 107 nt, Human
uuuuuugagauggagucucacucugucgcccaggcuggaaugcagugagcagagaucgcaccacugcacuccagccugggcaagagugagacugugucgucaaaagg

SEQ ID NO: 3768 - RNA, 77 nt, Human
gagcgcccugggucuuguuuugguguuucgcuuuucuguaaggauuaagcagauagggagaagggaaaaggggccuc

SEQ ID NO: 3769 - RNA, 69 nt, Human; identical to SEQ ID NO: 2463

SEQ ID NO: 3770 - RNA, 76 nt, Human
gccgcgcuguugccgcggcuuguuauucuuaaaauggcgccgcuagaccuggacaaguauguggaaauagcgcggc

SEQ ID NO: 3771 - RNA, 99 nt, Human
gagcagcaggucccgcuggugcuguggucgagugaccgggacuugugggcuccugcggccgacacucaugaaggccacaucaccagcgacuugcagcuc

SEQ ID NO: 3772 - RNA, 76 nt, Human
gcgcgcucgcguccccucgugcgggcuccagccgcagccuuagcuucggcucccggcuuggguggcgcggccgugc

SEQ ID NO: 3773 - RNA, 61 nt, Human
gcucaaaugauacuuuucccacagcaaugcacauugcugcugcaauagaaguucaugaagu

SEQ ID NO: 3774 - RNA, 126 nt, Human
cuggucaugggcugagaucaggcccucaaucuccucgaugguauggacgaugaacauguccuggagguccuccauggcgcucuccauccaguuguugaagggggccgcgcgcuuggcguauuccag

SEQ ID NO: 3775 - RNA, 75 nt, Human
ggcaccagcugcugcaccuucucccacuuggcaguugaugauuugcggggugacggugguguagggguugcugcc

SEQ ID NO: 3776 - RNA, 68 nt, Human
ugcuuuacugcugugguccauguagugacaacuaaguuacuuugaaaggcucuacaaaguuccaagca

SEQ ID NO: 3777 - RNA, 67 nt, Human
ggugcugcuuccagagacuuccuugggguugcaaccuggggaagccacaucccacuggauccacacc

SEQ ID NO: 3778 - RNA, 96 nt, Human
agcaaagggggaagaauugaaagagagagagaagaaagaauacagagagcuuaccuuuugccuuucuguugauguuacaucucuucuuccuauguu

SEQ ID NO: 3779 - RNA, 61 nt, Human
augugcuucuaugagauuuacuccaacacaaauaggacugaauuuauuguggaaguaacau

SEQ ID NO: 3780 - RNA, 60 nt, Human
ccaugaagcuggugaccauguuugacaagcucuccaggaacagagucauccagccaaugg

SEQ ID NO: 3781 - RNA, 67 nt, Human; identical to SEQ ID NO: 3777

SEQ ID NO: 3782 - RNA, 62 nt, Human
gguggggcacacagcggggggcgccagguuuuccuugucccccagcugcucugccccuuucc

SEQ ID NO: 3783 - RNA, 64 nt, Human
gaaauuccaucgaucugucaugggccccaaagguuccagaauccagcagauuacucgggauuuc

SEQ ID NO: 3784 - RNA, 127 nt, Human
gccaaaggcugcgagguuguggugucugggaaacuccgaggacagagggcuaaauccaugaaguuuguggauggccugaugauccacagcggagacccuguuaacuacuacguugacacugcugugc

SEQ ID NO: 3785 - RNA, 67 nt, Human; identical to SEQ ID NO: 1146

SEQ ID NO: 3786 - RNA, 83 nt, Human
cagcucagcaguagaaagguucuuggacagggugccaggacacacgcuggggcugcugucacaggacaaucuuaaaggagcug

SEQ ID NO: 3787 - RNA, 64 nt, Human
gcauuauauucuacaaguaucacaguaacauaccuugacuuuugauacugguuucucauaaugc

SEQ ID NO: 3788 - RNA, 62 nt, Human
ccucaucaccgucgccaugcccggaggucugcuucucggggacguggcucccaacuuugagg

SEQ ID NO: 3789 - RNA, 131 nt, Human
gagcuucagcuugcucaggaucugcccgcggaucgccucgauccucuugcgcaugaacugguccauaucgagugugcugcagguagacaggcugagcgcgaccgugaccagaugcaggaucagaaaagcgc

SEQ ID NO: 3790 - RNA, 83 nt, Human
gagugugcugcagguagacaggcugagcgcgaccgugaccagaugcaggaucagaaaagcgcucagcacacaguagugcauuu

SEQ ID NO: 3791 - RNA, 102 nt, Human
guuuuuaaaagucagaauaaaaaaaaagaaaucaacaauucucaaaguauagaucaaggagaguuguuugguuuuuuguuguuguuguuuuugaugcgaaac

SEQ ID NO: 3792 - RNA, 70 nt, Human
cauuggacgcaacaaagacgccaagauguaguuguauacaacaauguugguucuuucgucugcuacagug

SEQ ID NO: 3793 - RNA, 68 nt, Human
cgcagccggaugggugccggccaagucuuaaacaccaaggagggccuggcacugcguuuaccggugug

SEQ ID NO: 3794 - RNA, 130 nt, Human
aaaacaugucugauauuuuaauuauuuauuuucaauuaaaggucauaguuaaaauaaauucuacagauuuuuuaaaugugugauuuguucuuuaaaaauuaguaauuaguuguuagauagcuaucauuuu

SEQ ID NO: 3795 - RNA, 62 nt, Human
cuucaugggggaaauguaacagugacacuauuccacaacaaaauuacuuagauuucaugagg

SEQ ID NO: 3796 - RNA, 75 nt, Human
acauauuuuccuuccacaauauggauuugugucauuuaaacugaagaaguugaucuugugugaugacagguaugu

SEQ ID NO: 3797 - RNA, 79 nt, Human
gaaggcgucuuucagagucaucuauccucuuggcaugccaaugcaagaggaaagcauuccucaaaccaaagaaaucuuc

SEQ ID NO: 3798 - RNA, 64 nt, Human
ucauuccuccuccugcccacaccuaccucccuuuaaauauuuuagguugcagaagcacagcuga

SEQ ID NO: 3799 - RNA, 78 nt, Human
uguacugacuacuuucuucacacaucaguugcccuuuaugaucucaguucauaaacucuuugugguauguagcaauca

SEQ ID NO: 3800 - RNA, 72 nt, Human
cugcaucaaagguagacuuucgcacagguugugagguuggagucacaguguuauuuguuguaccugauguag

SEQ ID NO: 3801 - RNA, 74 nt, Human
gaugcucccaaacauccuauaugcauccauggaaauuuaaagauccuggaauagcgucuuccaugugggacauc

SEQ ID NO: 3802 - RNA, 86 nt, Human
ggucuguuuacagagugugguaauuucguucuuuagauuugcagaauuuauaaagaaagaaaauuacagccugcacacccaagacc

SEQ ID NO: 3803 - RNA, 61 nt, Human; identical to SEQ ID NO: 347

SEQ ID NO: 3804 - RNA, 74 nt, Human
gcugcggcgggagcucgacgaaucccuccaggucgcugagagguugaccaggaaauacaacgagcugcuaaagu

SEQ ID NO: 3805 - RNA, 104 nt, Human
cagggccugcggucuggccccaugagucuccuuccguccucagcgggcagggaacaccucuggcuuguagaagggacggcucaguggcugcaccgacgguccug

SEQ ID NO: 3806 - RNA, 102 nt, Human; identical to SEQ ID NO: 2701

SEQ ID NO: 3807 - RNA, 90 nt, Human; identical to SEQ ID NO: 2702

SEQ ID NO: 3808 - RNA, 68 nt, Human
uauacauauauacauauuauguaugguuguaaauucauacacuuaucacaugaauguguuacuguaua

SEQ ID NO: 3809 - RNA, 67 nt, Human
ucauauuuagaaaauguaaaugucuguagcacuuucuugcaguuaauuugaaaacuuuggaugcuga

SEQ ID NO: 3810 - RNA, 88 nt, Human
cucuccgaaugucuuuuuuuaagugaauaucaaugcuucuuuugucaucuccguaucugaucauuucaugagcaaagucaucgguggg

SEQ ID NO: 3811 - RNA, 104 nt, Human
ugaacuuuuuuccuaguacccauucuagcuguaacacgaagggcuccgacuggugaucccaaagcccccucuaguucgaaaacugacuaguacggaagagucca

SEQ ID NO: 3812 - RNA, 63 nt, Human
uuugauaguaagugagcguuuauuuuauucaccauaaaauauuugcaucucuuacuccucaga

SEQ ID NO: 3813 - RNA, 68 nt, Human
gcaauguaauuugaaaucaguugaauuuccuguuuuucucucauagguucaacuacucaauuucaugc

SEQ ID NO: 3814 - RNA, 69 nt, Human
guaaauaacaacuggucauuaccuuauugaguuuagaaaacuuucaaguucgugacauauguuaauugc

SEQ ID NO: 3815 - RNA, 69 nt, Human
guucugaauaacuuuauugcaagucacauaaucuugguuuagacuugacgcaacgggagguuacagagc

SEQ ID NO: 3816 - RNA, 66 nt, Human; identical to SEQ ID NO: 1526

SEQ ID NO: 3817 - RNA, 64 nt, Human; identical to SEQ ID NO: 1527

SEQ ID NO: 3818 - RNA, 64 nt, Human
ugauucuggcacaggaaauggucuccaaaaucucaaaauaucagaucucuaccuugucaaguca

SEQ ID NO: 3819 - RNA, 70 nt, Human
agacauuauacaguggcacguugcuuauaguuaaguuguugagucagcuuuuccauugcauacaauguuu

SEQ ID NO: 3820 - RNA, 80 nt, Human
gagcugcuagccaacaaagguagcuaacucugagcgugagucaugcuaacaucguggaaagccuggauaggcugcgucuc

SEQ ID NO: 3821 - RNA, 82 nt, Human
guugccugacggggauuagacuggagucacuauagcgauaaauggccugucauacuuuccuuugauuucccaggguuucaac

SEQ ID NO: 3822 - RNA, 67 nt, Human
guauuuuauuaguauuuuuccggugaacagaagauuuguuggauuuaaacauuuacuaagacaguac

SEQ ID NO: 3823 - RNA, 76 nt, Human
uauuugcaaaauaaacaauuauaaaaaaagaacauaagagagaaugguacuuaauuacuugugugguuugcaaaua

SEQ ID NO: 3824 - RNA, 69 nt, Human
gccccgcggggagcccgcgggcucgucaccacacacaacgugcgcucgagcacacgggcuacacggggc

SEQ ID NO: 3825 - RNA, 63 nt, Human
gcgcccuuggcggccccugcgccugcagcccuuguugcucccugcgggccccgccgaggccgc

SEQ ID NO: 3826 - RNA, 85 nt, Human
guagaucuugaagugauaaggaagggucaucauaaucauguggggcccauuuugcccuuucuuguuucuuuucucuagggucagc

SEQ ID NO: 3827 - RNA, 62 nt, Human
gccauccacaccugccaguucccugcauccuuucagccccuggccaggugucaccuccuggc

SEQ ID NO: 3828 - RNA, 67 nt, Human
ggagucugugucgggggagggcugccgucgagcccgccgucgccucgccccugaacuguuagacucc

SEQ ID NO: 3829 - RNA, 67 nt, Human
agagaguacacaccaaucauccauaccgcacaacgaugugccuaauuguaucuugggucguacuccu

SEQ ID NO: 3830 - RNA, 72 nt, Human
uaucggacuagcacuauaagaucagcguaucggccacggacauacgcugcauuaucuagugauagacuagua

SEQ ID NO: 3831 - RNA, 61 nt, Human
caaggaacuucaggcacauggugcugaugaguuauuaaagaggguguacgggaguuucuug

SEQ ID NO: 3832 - RNA, 76 nt, Human; identical to SEQ ID NO: 2761

SEQ ID NO: 3833 - RNA, 65 nt, Human
gugaugggcuagcacuuauaucgggugauucgauuuacaccgcguauaacuuuccagcccagaac

SEQ ID NO: 3834 - RNA, 66 nt, Human
guaaugaucucagagacugcgguuuauugaauauaccuuaguaggcguugaucaugagucaggagc

SEQ ID NO: 3835 - RNA, 65 nt, Human
uguacuaacuggucaucaagugguccaugcuuuuaagauggcugacauggaucuauuugaguaca

SEQ ID NO: 3836 - RNA, 80 nt, Human
cuucuucagugaaacgggugcuggcaagcaugugccccgggcaguguuuguagacuuggaacccacagucauugaugaag

SEQ ID NO: 3837 - RNA, 81 nt, Human
ccccagcuggauagagggaacuggccuuuccuagggacaccuaggcuuacccuccugccucccuucccugcugugcugggg

SEQ ID NO: 3838 - RNA, 95 nt, Human
gugcugagguacaagcccccgccgagcgaauguaacccggccuuggacgacccgacgccggacuacaugaaccugcugggcaugaucuucagcau

SEQ ID NO: 3839 - RNA, 77 nt, Human
cgcucacauuccaggcccuuguccugcaggcugccgcgggcggacacgccagaggaggaggccggggaauggccgcg

SEQ ID NO: 3840 - RNA, 113 nt, Human
guuuccacaguuucggacgcaguauauccgccggcgcagccagcugcugcgggagaaugccaaugcugggcaccccccagcgcugcgucggcaguaccugaggcuucgggggc

SEQ ID NO: 3841 - RNA, 108 nt, Human
gggugauugccggccggccagggcugaagggcuuugccagggacuuaaaccaguugaagcaccuuggggccuuguaacccugggaguaccguuuaauggcgggcaucc

SEQ ID NO: 3842 - RNA, 74 nt, Human
guaacagguggggcuggcuacauuggcagccacacggugcuggagcugcuggaggcuggcuacuugccuguggu

SEQ ID NO: 3843 - RNA, 78 nt, Human
ggggaaucugcaguaggucugccggcgauggaguggugggcuagcucgccgcuucggcucuggcugcuguuguuccuc

SEQ ID NO: 3844 - RNA, 72 nt, Human
uuuugggaagggggaccugcuguuuggccaauuuauccuacaggucuuggacggugggaccucuucagagaa

SEQ ID NO: 3845 - RNA, 92 nt, Human
agcuauaccggaaaagcggcaugucaaaaauacuuuagguucuacauagaucucuuucucucuuuuguuuuguuuguuuguuuguuaaaguu

SEQ ID NO: 3846 - RNA, 62 nt, Human
gcuuuuaaaaguuguuuugaaaagacaaucauuuuuuguuuuuuuuuuaacuuucuuguggc

SEQ ID NO: 3847 - RNA, 61 nt, Human
cagaaagcuggcaaagaaaaagaugguacaaaaagaaaaucuuuaucugacagugaaucug

SEQ ID NO: 3848 - RNA, 60 nt, Human
cugacaaaccaagaaggauugccagaggucuugauccugaaagaauaauuggugccacag

SEQ ID NO: 3849 - RNA, 62 nt, Human
gaugcugacaauacuugggaaccugaagaaaauuuagauuguccagaauugauugaagcguu

SEQ ID NO: 3850 - RNA, 79 nt, Human
cggggggagccgagacugagcuuuccugucuuuccuuuuuucugagagauucaaagccuccacgacucuguuucccccg

SEQ ID NO: 3851 - RNA, 77 nt, Human
uuugcacuaagucauuugcacucguuggaguuguggagacggccuugagucucaguacgagugugcgugagugugag

SEQ ID NO: 3852 - RNA, 62 nt, Human
gccuucugguaacugaauauuaccuucuguaggaaaagguggaaaauaagcaucuagaaggu

SEQ ID NO: 3853 - RNA, 98 nt, Human
ucuucaaacauuuaaaucaagcuuuggacuaauuaugcuaauuugugaguucugaucacuuuugagcucugaagcuuugaaucauucagugguggaga

SEQ ID NO: 3854 - RNA, 72 nt, Human
caccaugguggguccaggaugggucuccaucucuuggacuugugauccacucggcugggccucccaaaggug

SEQ ID NO: 3855 - RNA, 70 nt, Human
ugugauuuuucagaauucccagaguuuacucauucuuguuauuaaacucuagccaguugacaucuucgca

SEQ ID NO: 3856 - RNA, 67 nt, Human
cccagaagaacucaagucagaaucagccaaagagaaguggaggccauucugcuugaaguuuaauggg

SEQ ID NO: 3857 - RNA, 70 nt, Human
cggauguuuuaagaaaauggcagacaaaccagacaugggggaaaucgccagcuucgauaaggccaagcug

SEQ ID NO: 3858 - RNA, 69 nt, Human
ggccauucugggcgugccugucccugagggccuagauaaaggggacaggccgcacgccuauuuuggacc

SEQ ID NO: 3859 - RNA, 78 nt, Human; identical to SEQ ID NO: 99

SEQ ID NO: 3860 - RNA, 80 nt, Human; identical to SEQ ID NO: 100

SEQ ID NO: 3861 - RNA, 85 nt, Human
cacauagaauaccccuuccuaucagcucgcucugauuuagccuuaauuuguuaaauuuuuuagagaugaaugaagugcugcugug

SEQ ID NO: 3862 - RNA, 100 nt, Human
gagagaaaaccuggccccaggacugaguggccguggcuuuucuccacaaauaaaaaaaaggccgcgggcgcgcaaaccggaggggucuggaaacaauuuc

SEQ ID NO: 3863 - RNA, 67 nt, Human
gcagcaggagaguguuaggagaugaaaucugagacauaggcaagaaucaguccacauaggccuuugu

SEQ ID NO: 3864 - RNA, 83 nt, Human
uauccugggcuacuguauggagaauauguuguagagacaggcaaaagucuagguaggacauaaugguagcuuagacuaggaua

SEQ ID NO: 3865 - RNA, 70 nt, Human
auagaaaaaagagaagaugagaaucaggaagagcucuuuacuuucacaaucccuuuacuuuaauuucugu

SEQ ID NO: 3866 - RNA, 64 nt, Human
ggguguuaacuaaugcacucaauagugaucacaaagaauacaggaagugccaaguucaaugccu

SEQ ID NO: 3867 - RNA, 74 nt, Human
gaagacaaauugaagggagagaugauggaucuccaacauggcagccuuuuccuuagaacaccaaagauugucuc

SEQ ID NO: 3868 - RNA, 63 nt, Human
aggaauuauaaacuaacuuuaauuacuucaacaggaagaauuucaaacuauguuguaauucuu

SEQ ID NO: 3869 - RNA, 84 nt, Human
aucuaauuaauauauucugacuaacauaaucauccaaagauaaaaguauuugugauggcaaauggacagaacaaucauuuaggu

SEQ ID NO: 3870 - RNA, 84 nt, Human
gggaugagcucagcuaggcaaacaaguccagagagagcagcacuggggcuauacaucugggccuaaugccgcccugcuccuccc

SEQ ID NO: 3871 - RNA, 64 nt, Human
uuguaauccaugaaaaagaccaagguccugguccuugggcacauucuggucuccuggguuguga

SEQ ID NO: 3872 - RNA, 73 nt, Human
ggggccaacggcagcacgcucugggagagaccuguggcccaagacguggcccucguggagugugcugugcccc

SEQ ID NO: 3873 - RNA, 74 nt, Human
gagggguccauacggcgucguucuggauucccgucguaacuuaaagggaaacuuucacaauguccggagcccuu

SEQ ID NO: 3874 - RNA, 67 nt, Human
gggccuuucauguagaggaaccacaccaggaguucuaggcugugaccugcaggcaagugaguggccc

SEQ ID NO: 3875 - RNA, 65 nt, Human
aacaucuuucugauaacauuauuauguugccuucuuguuucucacuuugauauuuaaaagauguu

SEQ ID NO: 3876 - RNA, 66 nt, Human
cuguuugaaugugcugguaacugcuuugcuucuugaguagagccaccaccaccauagcccagccag

SEQ ID NO: 3877 - RNA, 100 nt, Human
ggaaucuuggcguucagcagagucagggauggguccauuauaugauccaugaaccagaaccucacaucuugcuguuccggcgcccacuacccaagaaacc

SEQ ID NO: 3878 - RNA, 81 nt, Human
uaagcugagugugaccccagaagccacgaugugcucuguauccagaacacacuuggcagauggaggaagcaucugaguuug

SEQ ID NO: 3879 - RNA, 68 nt, Human
cgcugcgucccagcgacucugcggggguuucgucgaggcccggcaggcuugggucgggagacgcggcg

SEQ ID NO: 3880 - RNA, 67 nt, Human
gcuuucauuugaagaacauuuucaauuuucaauucuuuucucuuuugggggugugauuauauguugu

SEQ ID NO: 3881 - RNA, 69 nt, Human
uguaaucauuuggcuucaauucugggugccuucagggggcuaaggcucuagaugaguuucuugguuaua

SEQ ID NO: 3882 - RNA, 80 nt, Human
gccccuugaccccagcuagggccucagggacuuucgggccuuuuccaaaauuuccucccugaucuugggguagucggggu

SEQ ID NO: 3883 - RNA, 65 nt, Human
accuauaaagugaaauagaacuuauuuaaacugacuaguaauucuguaacuuuuauuuuacaggu

SEQ ID NO: 3884 - RNA, 62 nt, Human
acugcaacacaauuuaaaugucuguaaauuaggucacaaaagggaugcaaaauguuugcagu

SEQ ID NO: 3885 - RNA, 66 nt, Human; identical to SEQ ID NO: 1526

SEQ ID NO: 3886 - RNA, 64 nt, Human; identical to SEQ ID NO: 1527

SEQ ID NO: 3887 - RNA, 62 nt, Human
cuguacacugacggccuacaagcugacccccaguggcuacgaauggggccgccagaacacag

SEQ ID NO: 3888 - RNA, 71 nt, Human
uucauggucccugcccaguccucguggaacuacaacuuucaaugggugaucgggcaugaccccaacaugaa

SEQ ID NO: 3889 - RNA, 64 nt, Human
guccuaccgacuccugccuggcagcuggaggagcccagguuccagcacaaaggagucuguggac

SEQ ID NO: 3890 - RNA, 64 nt, Human
ucuguccuuucccagcucgcaggccuuggaaccccgcccagggccccgcugagggaggcacagg

SEQ ID NO: 3891 - RNA, 73 nt, Human
gucauuuauuuauacaauaggcuuggucaaaaaguguuuuucagaccucgguauuccuaaugugggaugugac

SEQ ID NO: 3892 - RNA, 94 nt, Human
guguacuuuucaauccuguguaauguuuaauucuugcaacugaaucaaaacaguguuaaauuauggcaauauugcacuuggggaaugaguacau

SEQ ID NO: 3893 - RNA, 61 nt, Human
uaaauuuuuacauucaucauggcuacagguagaacuggggaggggggaauguaauuuuuua

SEQ ID NO: 3894 - RNA, 86 nt, Human
uuuuauuuuuaguagcaaauuuggauguagacugacagacauagcugaaugucuuaauaaauuuaaauuugaagauaaaaaaaaaa

SEQ ID NO: 3895 - RNA, 71 nt, Human
gcagcacaaaggcggcgcggugcacaucggaguuguaguacuucagcugcaucugcgccaccugcugcugu

SEQ ID NO: 3896 - RNA, 81 nt, Human
ggcuuuuauguuuuuguugcauuuauguuuuugcagucaaugugaauucuuacgaauguacaacacaaacuguaugaagcc

SEQ ID NO: 3897 - RNA, 61 nt, Human
uugcuuuuguuacagcuauuguccaaggagauacuuuagaagauauauauaaccaaugcaa

SEQ ID NO: 3898 - RNA, 98 nt, Human
cucucaguguccacccugucccuguaucucccauggaagaugaauaaugucagguguucuuugggucaaaggccccagggcagucuggaggcuuagag

SEQ ID NO: 3899 - RNA, 79 nt, Human
guuaggcuucugaggggucaggcagaauaugguguccauaucuuccauagcucugcagauucuugggaugaagucaagc

SEQ ID NO: 3900 - RNA, 61 nt, Human
acuacuccugaggaugcuacucccgagcccggagaggacccacgcgugacccgggccaagu

SEQ ID NO: 3901 - RNA, 90 nt, Human
gaugaguuucugaggaucagcacugccaguggagaugggcgucacuacugcuacccucauuucaccugcgcuguggacacugagaacauc

SEQ ID NO: 3902 - RNA, 80 nt, Human; identical to SEQ ID NO: 788

SEQ ID NO: 3903 - RNA, 79 nt, Human
ggagaucauugaccuuguguuggaccgaauucgcaagcuggcugaccagugcaccggucuucagggcuucuugguuuuc

SEQ ID NO: 3904 - RNA, 66 nt, Human
ggcagcgaguccucagggcgcccgggagccaccagucugcucucgggcucuacucagacuagcgcc

SEQ ID NO: 3905 - RNA, 124 nt, Human
gugggcucggccaucagcaggcccgguggguuggccgggcuggcccucccaggcugccuuucucucuggucgcggcuggcccgccccggcuccaccgcgcaauucaugcuggugccgcgcccgc

SEQ ID NO: 3906 - RNA, 61 nt, Human
ugugauuccaggaggagagccaggccugcccugcccugcuggcuuccugacuggagagaca

SEQ ID NO: 3907 - RNA, 61 nt, Human
acaaucacuuggacuuuaucugggcaauggaugccccucaagaaguuuacaaugacauugu

SEQ ID NO: 3908 - RNA, 64 nt, Human
uguuugacaugcagugcuucuuucuguaauuuugacuuuagaaauauauuggcaucaacaaaca

SEQ ID NO: 3909 - RNA, 77 nt, Human
gaaaaaaugugaagacugaaaggugugauuuuucaauucuccucccaguuaccgaaucacccucuuauuuuuuuuuc

SEQ ID NO: 3910 - RNA, 81 nt, Human
gaugagaauuuccucuuuuaaauaauguuauuugaacaccacauauuuuagauuaucuuauuugaaaguaucaguuccauu

SEQ ID NO: 3911 - RNA, 95 nt, Human
ccccuccauggcgacggcggccggggccgcuaggacugaagcaccucgccggaggacgaggcugguggcgacgggcugucggcugucgugagggg

SEQ ID NO: 3912 - RNA, 76 nt, Human
ccgucucucugcuugguuaggguuagugucccgccgggcacaucacccuaugaauggagccacugagauagacugg

SEQ ID NO: 3913 - RNA, 76 nt, Human
gccgcgugacgcaccaugauucucgcgaccugcaggagaagccucgagcggggcgagggccgaggucgugacgggc

SEQ ID NO: 3914 - RNA, 89 nt, Human
ggcaguucggcggucccgcgggucugucucuugcuucaacaguguuggacggaacagauccggggacucucuuccagccuccgaccgcc

SEQ ID NO: 3915 - RNA, 65 nt, Human
gccggccugcuuucccaucugucuaucuaucuggcuggcagggaaggaaagaauugcaugugggu

SEQ ID NO: 3916 - RNA, 89 nt, Human
uagaguaaaaccaagcuggcccaagguguucugcaggcuguaaugcaguuuacucagagugcauuuuuuuuuuugguucaaugauuuua

SEQ ID NO: 3917 - RNA, 82 nt, Human
uguuuaacuuuguaagaugcaaagagguuggaucaaguuuaaaugacugugcugccccuuucacaucaaagaauacuggaca

SEQ ID NO: 3918 - RNA, 75 nt, Human
caugggagacaaucgggacacacacacacauucauacaagugagcugcguguggcaucccgaggagcaacccgug

SEQ ID NO: 3919 - RNA, 62 nt, Human
gcgcucgucgucgaccaacggacccggcaugugcaaggccggcuucgacgggacgacgaugc

SEQ ID NO: 3920 - RNA, 61 nt, Human
ucagaaggauuccuaugugggcgacagaggcccagagcaagagaggcauccucaccacuga

SEQ ID NO: 3921 - RNA, 80 nt, Human
aagagaaaaugguacagcaguuacaagaggauguggacauggaagaugcuccuuaaaaaucucuguaaccauuuucuuuu

SEQ ID NO: 3922 - RNA, 80 nt, Human
cagucacuacuuauuugcauuauuccugcauauucagugaaugugaggucauauuugguauuguauuagaaguaguguug

SEQ ID NO: 3923 - RNA, 63 nt, Human
uacuuaaauaagccaauacuuagaucuacuguaaggcagaugcuaauuauaaggcauuaagua

SEQ ID NO: 3924 - RNA, 66 nt, Human
uuacuuuaagguucgcuguauguuugccuuggacaaaaaggcuaccuaccacgugcuauccaguaa

SEQ ID NO: 3925 - RNA, 72 nt, Human
cuguguacgccgccagcugggugagcauggggcagccccaguggccaccggagcugugugagcaagugacag

SEQ ID NO: 3926 - RNA, 63 nt, Human
ugcccacagcugcuggacagccagagccaucaccuguagcacugguugccagugcugugugua

SEQ ID NO: 3927 - RNA, 65 nt, Human; identical to SEQ ID NO: 247

SEQ ID NO: 3928 - RNA, 80 nt, Human; identical to SEQ ID NO: 100

SEQ ID NO: 3929 - RNA, 71 nt, Human
ccacaacuagucugacauuguuggcaguuaaaaucuuauuuugaauuguaaauuaguuaaauuuuaugugg

SEQ ID NO: 3930 - RNA, 82 nt, Human
gcauuaaagauuuauaagaaaauuauucaaacugauuuuuuauaaaaugaaguaugauuuuaaacuuauugauuccucuugc

SEQ ID NO: 3931 - RNA, 73 nt, Human
gcuuguguaaaauaaucuucugacaucaguaauuuaaugagauugcuguagguuucagcauuaaacacaaugu

SEQ ID NO: 3932 - RNA, 61 nt, Human
uuggcgcuuguugaaaacgagcuuucuuucccaugauagugcuucguuuuugaaguguuga

SEQ ID NO: 3933 - RNA, 67 nt, Human; identical to SEQ ID NO: 1347

SEQ ID NO: 3934 - RNA, 66 nt, Human
gcuggcaggagcaucccugagcuggaccgggaggccucucuggccuggggcugcucccugcccggc

SEQ ID NO: 3935 - RNA, 69 nt, Human; identical to SEQ ID NO: 1348

SEQ ID NO: 3936 - RNA, 88 nt, Human
cuucaagccguggcugcacccggagcagagcccguugccgagccuggcgcugucggagcugucggugcagcaugcggacucacuggag

SEQ ID NO: 3937 - RNA, 73 nt, Human
ggagcggaugggcggcgcgggcggcgagggcagcgacgacgacaccucgcucaccugagcgccgcaccgcuuc

SEQ ID NO: 3938 - RNA, 63 nt, Human
gggacggagacaggaccgggcgagcccuggggcggcggccgcuccugcacuuucuccccuccc

SEQ ID NO: 3939 - RNA, 86 nt, Human
guggcaucgaauauggcaagauuugaugggcuacaauauggucacagaugugacauugauguguccacugaagccauguaugcugc

SEQ ID NO: 3940 - RNA, 60 nt, Human
ggcauggcuagcaagccccuucauguuagaaggcugcagaaggcuuugagagacuggguc

SEQ ID NO: 3941 - RNA, 130 nt, Human
ucuuaaaaggacugagcagggggaggaacauuuaagcugauggaaguggaaguggaaguugcuguacauuggcagcaaggccuccgaguuagcuuuugaaugcaguuaacugguuucucuuaacugugga

SEQ ID NO: 3942 - RNA, 74 nt, Human
caugucccugcuccucugugagguggacaugcgagagguaucuugucggccugugaggucggacgagggagaug

SEQ ID NO: 3943 - RNA, 63 nt, Human
cucacuuuccgcucucucuccaugccggagacgggcccggggggaguguuagccgugugugag

SEQ ID NO: 3944 - RNA, 111 nt, Human
gcgcgggcaggccgcccccgccgcuccggacgccgaccaugagcagccauggcaacagccuguuccuucgggagagcggccagcggcugggccgggugggcuggcugcagc

SEQ ID NO: 3945 - RNA, 95 nt, Human
uuuguggucacaugcuuuagccauacacauggguaacauugacuaugggagucuugugaaaguguaaaugugcgaugggcuauguaggacauaaa

SEQ ID NO: 3946 - RNA, 60 nt, Human
uauuuuaauauuuauaaacuugggguuguauaaucuauugcaauaaaaaauauuaggaua

SEQ ID NO: 3947 - RNA, 70 nt, Human
aagcagggacaaccugggccauuccugaggccuuauccugcaccaggcacuuccuccuugucaucugcuu

SEQ ID NO: 3948 - RNA, 73 nt, Human
gaguuuuauuggguuuguugaaguaugacuugagaauaaugcauaccuggguucaaaccacaugcugaagcuc

SEQ ID NO: 3949 - RNA, 66 nt, Human
ccauguuggauaagggaucagccguugaugcccaacccaucaaaggauuuucccaucgcucccugg

SEQ ID NO: 3950 - RNA, 74 nt, Human; identical to SEQ ID NO: 365

SEQ ID NO: 3951 - RNA, 102 nt, Human; identical to SEQ ID NO: 2172

SEQ ID NO: 3952 - RNA, 102 nt, Human
guuuuuauuuuucaauuuuuauuuugguuuucuuacaaagguugacauuuuccauaacagguguaagaguguugaaaaaaaaauucaaauuuuugggggagc

SEQ ID NO: 3953 - RNA, 77 nt, Human; identical to SEQ ID NO: 3082

SEQ ID NO: 3954 - RNA, 100 nt, Human
auguaagcgcuggucauuuuucuucugggguuuacugaucaguguggugauuuuaacuucauuuaguaauuacucuaggagauuuuaccuugacuuauau

SEQ ID NO: 3955 - RNA, 79 nt, Human; identical to SEQ ID NO: 2369

SEQ ID NO: 3956 - RNA, 73 nt, Human
guucuguauaaacugggggacaguaaguuaguuccuuuguuuuaacuuauaagccucaacuucaccgcagaau

SEQ ID NO: 3957 - RNA, 87 nt, Human
ugaauagacuauauggaaauuguauaaaauguuauuaccuuuuaucgguaguagcuuaaacagcacuauaucacuaauugcuauuca

SEQ ID NO: 3958 - RNA, 74 nt, Human
gguuuuuauuuauucacaaaguuguuaacauuaaaauuugaccuuuggaaauauaaggaaauauuuuagaaauc

SEQ ID NO: 3959 - RNA, 66 nt, Human
uccccugguuucuugucggcugugcuugauucuugaacagguaaccacuugagaggaugccggcga

SEQ ID NO: 3960 - RNA, 98 nt, Human
ggacauacccuauagaauuacuaaccuuacugccccuuguagaauauguauuaaucauucuacauuaacagaaaauaaugguucuuacuggaaugucu

SEQ ID NO: 3961 - RNA, 102 nt, Human
ugggcacuggucuccuggaaagugggcgccauuaccuugcugccagccgcgccuucguugucggcauuugugaccuggcccgccuggguccaccagagccca

SEQ ID NO: 3962 - RNA, 67 nt, Human
ggacagugugguggcaacauugaaagccucguacccuggccugcaguuugaaaucauugcuaugucc

SEQ ID NO: 3963 - RNA, 63 nt, Human
ggagaagaaugaaguggaccugguuguucacuccuugaaggaccugcccacugugcuuccucc

SEQ ID NO: 3964 - RNA, 69 nt, Human
aacguguucgacccgccgccgcaagaaugauuuaucuguaaaauacgugucgguguggucacaaccguu

SEQ ID NO: 3965 - RNA, 90 nt, Human
aggagcaucccgcggaugccagaccaggcucaugucgcgccugccgggcggccagugcagggccgggccgaggucgccuccgccgcuccu

SEQ ID NO: 3966 - RNA, 68 nt, Human
uuuuuuuuuuucucaacaagcuuucacuggacaggugcuggguaaaagcuuguugagaaaauaaaaaa

SEQ ID NO: 3967 - RNA, 106 nt, Human
aaggucaccugcgcagccugguccugggggacaacugccucucagagaacuacgaagagacggcagccgcccuccacgcccugccgggccugcggaggcuggacuu

SEQ ID NO: 3968 - RNA, 74 nt, Human
ccucuccuggagagccucagccugcacagcugccaccuggagcgcaucagccgcggcgccuuccaggagcaagg

SEQ ID NO: 3969 - RNA, 68 nt, Human
gugggaaggaauaaaaaugugugcgaggucucuggugacagaguaauggcucgccgacauccacccac

SEQ ID NO: 3970 - RNA, 61 nt, Human
acaucacuagucuuucugaaacugcugaagauauuauugcuaaagaaagagaacagaaugu

SEQ ID NO: 3971 - RNA, 71 nt, Human
cgaaugcugcagaacuaaaaaaaaagaggucaccaaggugcugcuuuuuucacaaaugaaccagcuugucg

SEQ ID NO: 3972 - RNA, 97 nt, Human
uccauauuugauugaauauccuauagacccuguuacacaagaauuuaagaucgaugaagaaugugguaacaaauucuggggaaguucuugauuuggg

SEQ ID NO: 3973 - RNA, 76 nt, Human
aagauauauuuuucaguuauuuuauuuuuucuaaaaacaauagaaaaaaaucaacuuuaaaaagcaaaauguacuu

SEQ ID NO: 3974 - RNA, 77 nt, Human
guuuuauuaaaguuauuuacauuuaauggcaauauuuacagagaaacauuguguaaaucuuaaaauuuuuuaaaaac

SEQ ID NO: 3975 - RNA, 76 nt, Human
cuucuguccaccuguccugcagaggagucguuuccagcccggcugccccaggaugggugaguucaacgagaagaag

SEQ ID NO: 3976 - RNA, 77 nt, Human
gcuccucaucaucuuucugcuggagaucaucgcugguauccucgccuacgccuacuaccagcagcugaacacggagc

SEQ ID NO: 3977 - RNA, 78 nt, Human; identical to SEQ ID NO: 99

SEQ ID NO: 3978 - RNA, 80 nt, Human; identical to SEQ ID NO: 100

SEQ ID NO: 3979 - RNA, 64 nt, Human
cugaaacaaaaagcauuguuguuugccaugauacaagugcacuguggcaaugcccguugcucag

SEQ ID NO: 3980 - RNA, 63 nt, Human
caguuuaauaguaacuuuauuuauuuuaaaaaaaaggaaacacaauuaguuacuguuaaacug

SEQ ID NO: 3981 - RNA, 69 nt, Human
gcacccauuuguacauauaggucauucauacaucacauuuuaaauuggggacugugugugcuggugugu

SEQ ID NO: 3982 - RNA, 77 nt, Human
uccuccaucccagcauagagaauggggacucccugaguaaugggaguucuuucauguccucugcuugggguggggga

SEQ ID NO: 3983 - RNA, 67 nt, Human
agaaggugcugacuuccuuggggagaugccauuaaagcaccugggaugaucucaaggggcaccuuuu

SEQ ID NO: 3984 - RNA, 105 nt, Human
ggggcaaggugaauguggaagaugcuggaggagaaacccugggaaggcuccugguugucuacccauggacccagagguucuuugacagcuuuggcaaccuguccu

SEQ ID NO: 3985 - RNA, 104 nt, Human
aucuuggccaggcuggucuuaaacuccugaccuugugauccacccgccucaccuccuaaagugcugagauuacagggcaugaggccaccaugcccggccaagau

SEQ ID NO: 3986 - RNA, 68 nt, Human
gagugcaguggcaugaucucggcucaccgcaaacucugccccccggguucaagcaacuuuccugccuc

SEQ ID NO: 3987 - RNA, 65 nt, Human
gccauucauuuucauuaacacauauauucuguccugcaauacuggagagguggaaugugucuggc

SEQ ID NO: 3988 - RNA, 84 nt, Human
gguucauggggaaaaacauuaaaauuaaaaaguccaaucaauuauagagguggcuuuaacacuuaaaguuuucucccucaaacc

SEQ ID NO: 3989 - RNA, 66 nt, Human
uuuuuuuuuuuuuucacuuuuauaaacugcauuuauuguacagaguacucugaaaaaagaaaaaaa

SEQ ID NO: 3990 - RNA, 68 nt, Human
uagugaacacuggaaagauuuauuaaagaauuauauuuguguauacuuuauaaauuagucccucauua

SEQ ID NO: 3991 - RNA, 65 nt, Human
uguguuaauuuuaguagaaucaggcacugcucgcagaaggaacacagauuguagagauuaacaua

SEQ ID NO: 3992 - RNA, 69 nt, Human
uuuuucucauuucugucgugcuuggaaaacuaguaaauauuaugucuaagaaaacaaaaaagagaaaaa

SEQ ID NO: 3993 - RNA, 64 nt, Human
gucuguccccgaggguacgucgcccgccacagacuguguccaugacccaccccagcagauagac

SEQ ID NO: 3994 - RNA, 90 nt, Human
uuccagggcccggggccgguggggcuuucggcucgaugggcggcaaggacuucgagcagccucucgccauuucccgcgucacuccuggaa

SEQ ID NO: 3995 - RNA, 81 nt, Human
uuucccgcgucacuccuggaagcaaggcggcucuagcuaauuuauguauuggagauguaaucacagccauugauggggaaa

SEQ ID NO: 3996 - RNA, 131 nt, Human
cagcugccggucuuggcaucuucgaaguaaggagaguuuuagaugcuucuggauguucaaugcuagcaccuuuacagacuggagcagcucgauuuucuucguauuuacuuucaagagcaagaaaagugcug

SEQ ID NO: 3997 - RNA, 65 nt, Human
cuggacuuggaugggcccgaguugggggcaacaccccgggcauuggggcuuuccagcucucacag

SEQ ID NO: 3998 - RNA, 62 nt, Human
gagcaagaaaagugcugggcucccacuuauuuucucccugugguguuccggaguucuugcuc

SEQ ID NO: 3999 - RNA, 116 nt, Human
gcgggcggagcuggcccugccucugccuggccggcgccgcagucggcgcgggccgugcccgccgccgccaacugcccugagcgcuugcugaggccgagggagacgucggggccugc

SEQ ID NO: 4000 - RNA, 88 nt, Human
uacagaaugcuagggaggcaauuugguuaccugcaauggcugcuuuugccagcgaggccaccauucauuggucaucuugguauuugug

SEQ ID NO: 4001 - RNA, 82 nt, Human
agaaucuccuuuuuucagggccauaaugacaugauguaaaaauuugcuuuaaaccauucaugcccuuaaauagcuagauuuu

SEQ ID NO: 4002 - RNA, 63 nt, Human
uucuuuuuccucccuauccuuuccuguaagcaccuguuuuuccauggaauggggguuaaugag

SEQ ID NO: 4003 - RNA, 80 nt, Human
gagaaugggaagauugugggguauguccuggccaaaauggaagaggacccagaugaugugccccauggacauaucaccuc

SEQ ID NO: 4004 - RNA, 92 nt, Human
uuggcugugaagcguucccaccggcgccucggucuggcucagaaacugauggaccaggccucucgagccaugauagagaacuucaaugccaa

SEQ ID NO: 4005 - RNA, 73 nt, Human
ccaccaaaaugcuuacauccguguguaauaucccgagaaauuauggaacaauuauaacauagcauuaaggugg

SEQ ID NO: 4006 - RNA, 62 nt, Human; identical to SEQ ID NO: 2027

SEQ ID NO: 4007 - RNA, 61 nt, Human
aguauccuaagaucagcugggcaugguggcuuacaacuguaaucccagcacuugggagacu

SEQ ID NO: 4008 - RNA, 80 nt, Human
ggcuguggugguugaaaguaauuaauuuaugacauaguaucugagacuuaaauuugcuguguccuuuuggcuuuucagcc

SEQ ID NO: 4009 - RNA, 68 nt, Human
uuaggauaacauugcugucggaggucacgcaagcuaacggcaagugugucuaucaguagugguccugg

SEQ ID NO: 4010 - RNA, 94 nt, Human
gguuuucugcuccuugguccugggugucagcagccgaagcuucuuuucguuccuuggcgaggcuuuugauggggcucgggacauguggagagcc

SEQ ID NO: 4011 - RNA, 69 nt, Human
ucaggcugccaaugaauggggcaggaguggcaaagaccccaaucacuuccgaccugcuggccugccuga

SEQ ID NO: 4012 - RNA, 71 nt, Human
uccucuucacucugcucucaggagaucuggcugugaggcccucaggccagggauacaaagcggggagaggg

SEQ ID NO: 4013 - RNA, 75 nt, Human
caggacacagcauuguugguuuugccauguacuauuuuaccuaugacccguggauuggcaaguuauuguaucuug

SEQ ID NO: 4014 - RNA, 68 nt, Human
gucugaagagaguucagaguuauaaaugcuuacaaugacuuuuuaaauuguacucuuucuuuuuaggc

SEQ ID NO: 4015 - RNA, 93 nt, Human
ucgcugcagcagcaugcacuucuugguagcagaauggaaugaaccauccaucaacuucuauaaaagaagaggugcuucugaucuguccaguga

SEQ ID NO: 4016 - RNA, 88 nt, Human
gguuuaaaaugguauuagguuggagggauuugggcgguaagagaauguuauagcugaauuaucccuuuucuuggacuauuggaggacc

SEQ ID NO: 4017 - RNA, 80 nt, Human
ggccacgcaacacuuccuccccaagccaaggagaaguaucacuuuuagaggcagaggagcggaaggcagugggugugacc

SEQ ID NO: 4018 - RNA, 79 nt, Human
ugccauuuguuaaagacuguuggagcagaacuacugagaaaaaccaggcauuguaucuucaguugucaucaaguucgca

SEQ ID NO: 4019 - RNA, 63 nt, Human
gguccugguguacaauaauacauccauuguucaggaugagauucuugcucaccgucuggggcu

SEQ ID NO: 4020 - RNA, 70 nt, Human
guaucggaaccaaggagaugaaaaaggcacagagauagauacucuacaguuucgucuccaggucagaugc

SEQ ID NO: 4021 - RNA, 71 nt, Human
cuguggccuaccaggugaauauuggcuuggaaaugauaaaauuagccagcuuaccaggaugggacccacag

SEQ ID NO: 4022 - RNA, 89 nt, Human; identical to SEQ ID NO: 605

SEQ ID NO: 4023 - RNA, 81 nt, Human
ggcugguuaacaucagaucccagaaaacaguguucuaaagaagacggugguggauggugguauaauagaugucaugcagcc

SEQ ID NO: 4024 - RNA, 71 nt, Human
agacugggcaauauagcaagaccccaucucuaaaaaauuaggcaugguggugcaugccuguauucccagcu

SEQ ID NO: 4025 - RNA, 61 nt, Human
cuuccaaaaauaucuagguuuguccucauuuuacaaaugaggaaacuaaacucuguggaag

SEQ ID NO: 4026 - RNA, 72 nt, Human; identical to SEQ ID NO: 1989

SEQ ID NO: 4027 - RNA, 78 nt, Human; identical to SEQ ID NO: 99

SEQ ID NO: 4028 - RNA, 65 nt, Human; identical to SEQ ID NO: 247

SEQ ID NO: 4029 - RNA, 80 nt, Human; identical to SEQ ID NO: 100

SEQ ID NO: 4030 - RNA, 63 nt, Human
caauugugacauaauucaaugacucuuugacaaacucaucagcagucuugguuaucacauuug

SEQ ID NO: 4031 - RNA, 66 nt, Human; identical to SEQ ID NO: 2920

SEQ ID NO: 4032 - RNA, 120 nt, Human
gaaauguucaggaugagaccuuucugccuugauuccauauguuucagaauuagcugugucaucuugacuacggaggugauguuacaauggaugaggcucuggauuucauccggugcguuc

SEQ ID NO: 4033 - RNA, 128 nt, Human
ggggucagcaccuggaugaugacuucuuuugcuuuauauuccucuugcagggccuuggaaaaugcgcacacaaacgccuuggaagcugaguacauggaguagagaggccaaggaaacagggcuauccc

SEQ ID NO: 4034 - RNA, 64 nt, Human
uucuuauaucgucguuaaucaucaaggaaucucuucucgauuaaaauacacacgaucuuaagaa

SEQ ID NO: 4035 - RNA, 114 nt, Human
cucauggagaauuuagaaucgccugucuacuuguguuucauuauucuucuaagacguauuuugaauaauuaccugcaaguuguuggaauagguacuucucgaaauucuuaagag

SEQ ID NO: 4036 - RNA, 72 nt, Human
accauuuuaaaacgggcacaaauaucucuaaggcgcauagugcuuuucaccaguaggccuuugugaaguggu

SEQ ID NO: 4037 - RNA, 66 nt, Human
auacgcuuagugcaguauuuauccaauucacacaaagugcgggaucagugguuuaaacaagcguau

SEQ ID NO: 4038 - RNA, 87 nt, Human
guugggaacaucccuuuaaaguuaaguaagcuuaaagaaaacaauuuuuaguaagagugaaauagauuucccaggggugaacgcaac

SEQ ID NO: 4039 - RNA, 78 nt, Human; identical to SEQ ID NO: 99

SEQ ID NO: 4040 - RNA, 65 nt, Human; identical to SEQ ID NO: 247

SEQ ID NO: 4041 - RNA, 80 nt, Human; identical to SEQ ID NO: 100

SEQ ID NO: 4042 - RNA, 84 nt, Human
aucggggaagggucagggcuucuguggaacuuggaacgugccaggaccaccugcaaaagccaggugcguugaucauucucagau

SEQ ID NO: 4043 - RNA, 69 nt, Human
cugguguguguuccagcagugagacgguguuauugugaagguggcauucaucugcggagccaaaaccag

SEQ ID NO: 4044 - RNA, 67 nt, Human
gugcacccgcugccucaucaccuucgcagauuccaaguuccaggagcgucacaugaagcgggagcac

SEQ ID NO: 4045 - RNA, 62 nt, Human
ggauucuuuuugcaugaccugagguguguauggguccaggucauauguagacaugagggucc

SEQ ID NO: 4046 - RNA, 73 nt, Human
gcugcuggucagcgcugcauggcucuuucaacagcaguccuugugggagaagccaagaaguggcugccagagc

SEQ ID NO: 4047 - RNA, 60 nt, Human
caaaauguaggguuauaauaauguuaacauggacaugaucuucuuuauaauucuacuuug

SEQ ID NO: 4048 - RNA, 94 nt, Human
uguaagcagcaucauggagguuugaagaugccgcauuuggauuggaugaauuccaaauucugcuugcuugcuuuuuaauauugauaugcuuaua

SEQ ID NO: 4049 - RNA, 65 nt, Human
guuccucguaauuuucgcuuguuggaagaacuugaagaaggacaaaaaggaguaggcgacgguac

SEQ ID NO: 4050 - RNA, 78 nt, Human
uuagcuggggccuugaagaugaugaagauaugacacuuacaagguggacaggcaugauuauugggccaccaaggcugg

SEQ ID NO: 4051 - RNA, 75 nt, Human
ggccgggcgcgguggcucacgccuguaauuccagcacuuugggaggauuacaggcaugagucaccauacccggcc

SEQ ID NO: 4052 - RNA, 82 nt, Human
caacuuuucagguggagagccauuucuucaagaccggggagaauaccugggcaaguuggugagguucugcaaaguagaguug

SEQ ID NO: 4053 - RNA, 64 nt, Human
cuuugugcugccccuugaggaagcaaagagaggauugcuuuugcuuaaggaagcugguauggag

SEQ ID NO: 4054 - RNA, 61 nt, Human
uccgggagaggugguuccagaauuauggugaguauuuggacauucucgcuaucuccuguga

SEQ ID NO: 4055 - RNA, 80 nt, Human; identical to SEQ ID NO: 100

SEQ ID NO: 4056 - RNA, 77 nt, Human
ccucgagacuaguucucucucucucccucgggccgaauucggcacgagggcucaccgagaccagccucaucucgggg

SEQ ID NO: 4057 - RNA, 98 nt, Human
cuacggccugagccacggccuaaccucccgccagugguggcuggaugugguccugcagaccuuccaccuggcggguguccaggaugcucaggcuguag

SEQ ID NO: 4058 - RNA, 76 nt, Human
gcugugccacugacucacugugaccuugggaucuugugcugugaagacauuucccaagugcuucauguuagccagc

SEQ ID NO: 4059 - RNA, 68 nt, Human
ggagguggagcccucagcccuggaacaaggcuucaggcaggcauacagggcucagagccacagcuucc

SEQ ID NO: 4060 - RNA, 100 nt, Human
gguugcgcagagguggucuuauccagcucagcuuccccugggacccaccgugggaccugaggcagaacugggguggacuuggccuccuccauggcacacc

SEQ ID NO: 4061 - RNA, 76 nt, Human
auguaugucuuuugggauguauuauaugccuagcuuuauaaucaguauaaauuuuaauuauuccaggaauaugcau

SEQ ID NO: 4062 - RNA, 70 nt, Human
gaucacaucuuugucacuggaugcuacuugaagagggaguacuuuguaaccacuuugauaugcuguuauc

SEQ ID NO: 4063 - RNA, 67 nt, Human
caccaccaccccaccuaugggcuugggcacagccagagccugggugcagucaaagggcaggcuggug

SEQ ID NO: 4064 - RNA, 81 nt, Human
ccauugaaaaauuugagaaggaggcugcugagaugggaaagggcuccuuucaaguauugccugggucuuggauuaaacugg

SEQ ID NO: 4065 - RNA, 79 nt, Human
uugucgucauuggacacguagauucgggcaaguccaccacuacugggcaucugaucuauaaaugcgguggcaucgacaa

SEQ ID NO: 4066 - RNA, 102 nt, Human
gcgaacguugggaacauuuuaggguuuaaugaacuuugucauaaguaacagacgauacguucuuaaagcacaguucuuggauccaccaauacaacguucagc

SEQ ID NO: 4067 - RNA, 94 nt, Human
ccgcggggguucccacggugguccacccaaacugggggaggguuagccccacggagaaggguugugggccccauugggaacaaaauccucgugg

SEQ ID NO: 4068 - RNA, 109 nt, Human
gcuacuuccgacagucgcucagcuaccuggaggcuuacaaccccagugacggcaccuggcuccgguuggcggaccugcaggugccgcggagcggcuggcggugcguggu

SEQ ID NO: 4069 - RNA, 66 nt, Human
caccugggccugccccaguggcaauaugccuucaccagcuauggcauuagcccacaggccaaggug

SEQ ID NO: 4070 - RNA, 66 nt, Human
cuucaacaagcucccugucucgcccaaaggaucugaaggccguuccaagcgagggugcuucugagg

SEQ ID NO: 4071 - RNA, 103 nt, Human
ugagaagaguuuugccauucugaagaggcgagccuguggaacuguuuaagguccuguucccagaagaauaaaaguuucucauuauggcauuaaacucuauuua

SEQ ID NO: 4072 - RNA, 60 nt, Human
cuggggcuggugcugaaagaagagcccacagcugacuucauggugcuacaauaaccucag

SEQ ID NO: 4073 - RNA, 83 nt, Human
gcauucuuccuauuuaaagcugcaucgcuugaaaaaaguuuucgcagacugugcuggagcuggugcugaaaaaggggguuugc

SEQ ID NO: 4074 - RNA, 64 nt, Human
ucauucuuauuguuuuauuagggcaauuugucucaauaaaagcccaggaagaagacgaggauga

SEQ ID NO: 4075 - RNA, 92 nt, Human
uuccugccagaaugcgcacagaacauaagucagccaagugugucgugccaggggauacuuugacuuugguuugcugcugcugcugcuagggg

SEQ ID NO: 4076 - RNA, 80 nt, Human
gcccugguauccccggcacuccuggaucccacggccugccaggcagggacgggagagauggugucaaaggagacccuggc

SEQ ID NO: 4077 - RNA, 67 nt, Human
ggcucugugugugggucgcugauuucuuggagccugaaaagaaggagcagcgacuggacccagagcc

SEQ ID NO: 4078 - RNA, 131 nt, Human
uggcaugauccaagagauccagcaggcugcugagcgccuggagcggaacuuuguggacagccggcagcucaagguaugugccaccugcuuugaccucucggucagccugcugcgugucuuggagaugacua

SEQ ID NO: 4079 - RNA, 88 nt, Human
cagggcaaacaaccaggucggccuggcccccguggcuuaagccuaagucucuucagccaccucccaggaagaucuggccucuguccug

SEQ ID NO: 4080 - RNA, 62 nt, Human
cgaaucuggagagcuuuggauccugggugaugucuucauccgccaguacuuuaccgucuucg

SEQ ID NO: 4081 - RNA, 61 nt, Human
caggggguggggaaggcggugcuucuugagccccacuuagcaacuggucacucauccucug

SEQ ID NO: 4082 - RNA, 64 nt, Human
cucuuucauccuguagucaggcagauaggccacaaaggugcugccaaggaccaggaugauggag

SEQ ID NO: 4083 - RNA, 62 nt, Human
ccuguguccguguguucucauuguucagcuuccgcuuacaagugagaacaugugguguuugg

SEQ ID NO: 4084 - RNA, 63 nt, Human
gcauuagcuaguuauccugaugcucuccccgcuacggccccugcaucaggccccagugugugu

SEQ ID NO: 4085 - RNA, 82 nt, Human
gugcggguuuguuacauagguaaacgugucccauggugguuugcugcaccuaucaacguaucaccuagguauuaagccccac

SEQ ID NO: 4086 - RNA, 70 nt, Human
guguggccgaugugucuauugaagauucugugaucucacucucaggagaccauugcaucauuggccgcac

SEQ ID NO: 4087 - RNA, 77 nt, Human
uguguagacgugaagccuuguuugaagagcuguauuuagaaugccuagcuacuuguuugcaaauuugugucuacuca

SEQ ID NO: 4088 - RNA, 83 nt, Human
uguuuaguggcaucagcccuaauccaucugaugcuuuuucauuauuaggcauguuggagacuugggcaaugugacugcugaca

SEQ ID NO: 4089 - RNA, 77 nt, Human
guuaucauggcucuaucuuaauuaauuagaaaauauguguguuuaauucuuugagaauuaaaauagagaauauuaac

SEQ ID NO: 4090 - RNA, 76 nt, Human
aaugaucauuuuccucucgugguaugggcagacuggaucaggaacucagacaaauaugaauguaaaugaagucauu

SEQ ID NO: 4091 - RNA, 70 nt, Human
cagagcucaaaugauacuuuucccacaggcaaugcacauugcugcugcaauagaaguucaugaaguacug

SEQ ID NO: 4092 - RNA, 76 nt, Human
ugucuucugcccauccagcaugggaagugggucccacgugaagggggcccaccacccacuuugggagcugaaggca

SEQ ID NO: 4093 - RNA, 76 nt, Human
cuguuaaguccguguggcuuuuucuuacuuuggauucauuuauccuguacuccauguagcucgcaugguuagagag

SEQ ID NO: 4094 - RNA, 100 nt, Human
gagaggauguuaucccccauagccagaaaccaggguggcuuccaaaagaaaaggguagcauucggugacucugcuuuaggccuugaggaugaaucuuuuc

SEQ ID NO: 4095 - RNA, 60 nt, Human
uaaggucuucgaaccuuauguuagggguuggaggucuuggugugaggaaggaagacuuua

SEQ ID NO: 4096 - RNA, 100 nt, Human; identical to SEQ ID NO: 1173

SEQ ID NO: 4097 - RNA, 70 nt, Human; identical to SEQ ID NO: 1335

SEQ ID NO: 4098 - RNA, 76 nt, Human; identical to SEQ ID NO: 3277

SEQ ID NO: 4099 - RNA, 62 nt, Human; identical to SEQ ID NO: 206

SEQ ID NO: 4100 - RNA, 111 nt, Human
cccuccccagacuucgccuuccucuuuuuaagcugguuuaugaaaaagaccuagaagaucuugauucauuuuuaccauucuuuccauagggagaagagaaagaugauuggg

SEQ ID NO: 4101 - RNA, 69 nt, Human
uuguaauggaugacuacgagagagauacuuugcugaaaagacuuuccccuauugauuaucuauugacag

SEQ ID NO: 4102 - RNA, 104 nt, Human
cuccuguggagcuugcaugguucccuuucauacuacgaccauaauuaaaaccacuaauucucuuuuaaaaugcugcaggaugccauguaggcaucugucuggag

SEQ ID NO: 4103 - RNA, 68 nt, Human
gacaagggugccucuaaaagcuugacagggccuugacugcacaauucgagcugaauuugccccuuguc

SEQ ID NO: 4104 - RNA, 68 nt, Human
uuguacuagcaaaagggucugaucaaaggucuccuguggagcuugcaugguucccuuucauacuacga

SEQ ID NO: 4105 - RNA, 80 nt, Human
ccauuaagucaguuucgaucuucaaacugugccuuguuuuuuaaaagauaagaugcuagaaauucaaugggauuuggugg

SEQ ID NO: 4106 - RNA, 74 nt, Human
cuuugcaagcacagcaagucccuguaauaagauaggcacaacugucugauccagguacgcacgaguuggcaaag

SEQ ID NO: 4107 - RNA, 65 nt, Human
ggaaauauguuaucuucugcaauuccagaaauagguucuguuguccggaagguucuuauacaucc

SEQ ID NO: 4108 - RNA, 78 nt, Human
guguuuugacaguuuauuuugaaggucauuuuaaaaacaaaguuaaagacaaucugagaaaaaaauugcacagaauac

SEQ ID NO: 4109 - RNA, 69 nt, Human
acgcaccugcuauuucaccauacuauggagaauacagcuaaugaagugguggcagaagcuuggccgugu

SEQ ID NO: 4110 - RNA, 74 nt, Human
gcucguauuuauuggaaaagcagaacaguaugcaccuguagggguguagcuuccaugguucuccaagcacgggc

SEQ ID NO: 4111 - RNA, 81 nt, Human
ccuuucgccagcuggcguaauaucgaagaggcccgcaccgaucgcccuucccaacaguugcgcauccugaauggcgaaugg

SEQ ID NO: 4112 - RNA, 86 nt, Human
gagcggcuggccgccugcggggccgaggccgcggcguacggcaggugcgugcaggccuccacggccccgggcggccgcggauccuc

SEQ ID NO: 4113 - RNA, 64 nt, Human
ucuugugaaauuucugguacuuuguauauaaaauacauaaaacaauagauuagaaaucaaaaga

SEQ ID NO: 4114 - RNA, 62 nt, Human
ugauuauuugcauguuauguuuaauaagcuacuagcaaaauaaaacauagcaaauggcauca

SEQ ID NO: 4115 - RNA, 84 nt, Human
agccuuacguggaccucgccgcucgcuggcggucacgauugugagcccuccagacaauuuuuaagguugagucuaaguaaggcu

SEQ ID NO: 4116 - RNA, 60 nt, Human
gccaccuuccugucucucugugcuaaacauucaggacaguguuccacaggcagaucuggc

SEQ ID NO: 4117 - RNA, 60 nt, Human
ucauuucacauaaggcccuuaauauagauaaguaacauuuggccuuuuggugucucguga

SEQ ID NO: 4118 - RNA, 79 nt, Human
cccccacgccgaggcuuuggagugaacagcccgcuuggcuguggcaucucaguccuauuuuugaguuuuuuuguggggg

SEQ ID NO: 4119 - RNA, 64 nt, Human
gaucucaagggcaccuuuugcccagcugagugaacugcacuguggacaagcugcaugugggauc

SEQ ID NO: 4120 - RNA, 66 nt, Human; identical to SEQ ID NO: 12

SEQ ID NO: 4121 - RNA, 86 nt, Human
ccugauguggggacucuccuuucuuuuuaggucuauucaugugggugggcaggaaggaugugaggacucuaggucuccaguucagg

SEQ ID NO: 4122 - RNA, 82 nt, Human
aggacaacauuuaauuauuuugcaaagaaacuaagagcuaaagauguaauuuuucuugcaauuguaaucuuuugugucuccu

SEQ ID NO: 4123 - RNA, 130 nt, Human
gguagcacauucucaauacguuuacagagggugcaagagacauugcuuuuggaagccaugucugaauauaaggccuccuuuuuaauguugggcacccguggucaaaccguacuuguagccuuuuguuacc

SEQ ID NO: 4124 - RNA, 65 nt, Human
ucccuuuauuacuguuguagucccucacuuggauauaccucuguuuucacgauagaaauaaggga

SEQ ID NO: 4125 - RNA, 79 nt, Human
aucagaaauuuuggaaaucaaaggacagaacugggaagaacaagugaauagucugccugaaguuuucagaaaagcuggu

SEQ ID NO: 4126 - RNA, 61 nt, Human
uaguuaucgaagcuuucaccagacuaccauaccugugugaaggcgacauguauaaugacua

SEQ ID NO: 4127 - RNA, 62 nt, Human
gcaucaggggcuaggcucuggcugggcccggaggcugagacuaaggcuuucgacccuggugc

SEQ ID NO: 4128 - RNA, 65 nt, Human
uccauguggaugcugccucagacaaaggcagugagccuucccugccaaagugcccaucccauggg

SEQ ID NO: 4129 - RNA, 100 nt, Human
uggucacuguuagcccaugaacacgugugggccucggucacguggcuuugaagggcagucugaccaggcuagaccacacgugccgugacaggcggugcca

SEQ ID NO: 4130 - RNA, 68 nt, Human
gcuccuccauuuccuugaaaacugaacgauuauuaaaaauagauuaaacuucgcuggaaaugaguagc

SEQ ID NO: 4131 - RNA, 72 nt, Human
ggucgcggagauggaauuggagcagagagaagggaccauggcagccgugggcuuugaggaguucucagcgcc

SEQ ID NO: 4132 - RNA, 66 nt, Human
cuggccauuuggggaaaucgcaugccgucucaccggcuuccucuucuaccucaacauguacgccag

SEQ ID NO: 4133 - RNA, 80 nt, Human
gucccucaagcuccgcaggccccucuacgcacaccauggccugugccuuccuguggguggugguggcuguggccauggac

SEQ ID NO: 4134 - RNA, 85 nt, Human
cacgccaugaccuucacugcugucucagagaaggaugaucaggauggugcuuucacaaaauggagaguggagaauucauggggug

SEQ ID NO: 4135 - RNA, 67 nt, Human
gguuaccugugcaugacagaugaggggugcucugaguaugucuacgaaguggugguggacaggaacc

SEQ ID NO: 4136 - RNA, 74 nt, Human
aaauauugugcaccauauggaaguacugccuuauaugauaaggauaaaguuaaauugguagguguauaacauuu

SEQ ID NO: 4137 - RNA, 61 nt, Human
ccuaauugacugagggaaugcugguacuguuagaaaguaucagugaaagaauuagucuggg

SEQ ID NO: 4138 - RNA, 65 nt, Human
gacagccuauugugggaccucgugaucauguaagugauacuuaauaaauucccuuuauaucuguc

SEQ ID NO: 4139 - RNA, 71 nt, Human
ggcccgaguucuuagauagccuacaucuuucucccaugcuggaugcuuccugccuuugaacaucggacucc

SEQ ID NO: 4140 - RNA, 64 nt, Human
ucuaucaucuauccuauuaguucugucccucuaagagaacccugacuaauacaguggccaugga

SEQ ID NO: 4141 - RNA, 89 nt, Human; identical to SEQ ID NO: 2239

SEQ ID NO: 4142 - RNA, 95 nt, Human
cggagagugcuuggguggugggugcuggaggauuuccaguucugaacacguauuuauauuggaaagagaccagaaccgaagcucggcacuccccg

SEQ ID NO: 4143 - RNA, 88 nt, Human
cucucucuuccagcugcagaugccacacuguccucugcuucccggggacgagggggugggcgggacuggguacagguugggaggggag

SEQ ID NO: 4144 - RNA, 73 nt, Human
gccccucaagucggguaugaaggagcuggccguguuccgggagaaggucacugagcagcaccggcagaugggc

SEQ ID NO: 4145 - RNA, 69 nt, Human
ggcgcaaaagacaaagccagcccacucccugccauugucagguacuggggcccauggcaauucagcguc

SEQ ID NO: 4146 - RNA, 67 nt, Human
caggccugugggcugagccaggcggucuacucgcccagauaggcagccccugggcagccacguucug

SEQ ID NO: 4147 - RNA, 62 nt, Human
ucagcaguuuaaaaauuguccuuuuucuuaaagaggaagaaggcauuuucacacaaggcugg

SEQ ID NO: 4148 - RNA, 76 nt, Human; identical to SEQ ID NO: 1356

SEQ ID NO: 4149 - RNA, 80 nt, Human
gaauuuggggaggacacaguccagggcggaacucuauccaucugucugucugucugucugugucuaucucccuaucuguc

SEQ ID NO: 4150 - RNA, 76 nt, Human
gagaucucuuggugccucuuccucuucuuacaaggaccgcaguccuguuggguuagagccccacccuuaggauuuc

SEQ ID NO: 4151 - RNA, 80 nt, Human
agaggaaaaagcaaguugcuccagaaaaaccuguaaagaaacaaaagacaggugagacuucgagagcccugucaucuucu

SEQ ID NO: 4152 - RNA, 61 nt, Human
gcuagagccgagcgaagcgaugccuaaaucaaaggaacuuguuucuucaagcucuucuggc

SEQ ID NO: 4153 - RNA, 79 nt, Human
ucuuuuuacauuggcuuuuguuuucuaaauguucuccaagcuauuguauguuuggauugcagaagaauuuguaagauga

SEQ ID NO: 4154 - RNA, 75 nt, Human; identical to SEQ ID NO: 74

SEQ ID NO: 4155 - RNA, 87 nt, Human; identical to SEQ ID NO: 76

SEQ ID NO: 4156 - RNA, 71 nt, Human; identical to SEQ ID NO: 77

SEQ ID NO: 4157 - RNA, 67 nt, Human
acagccucagcagccaagacuguuuagcugaguuguucugccggcggcuucuugcuccuuuggcugu

SEQ ID NO: 4158 - RNA, 65 nt, Human
ccgguugccaauguaugcuuguacuccaggcuccuuggaguuauacagguaugaaauggccaugg

SEQ ID NO: 4159 - RNA, 66 nt, Human
ccugaggccacagcggcccccaucucaucuuccuccuaccugaucugggcauguggaucaucuagg

SEQ ID NO: 4160 - RNA, 77 nt, Human
ggcauauuaaauacauauuaaggaguacauauuuuccuauuuaguauacaaaguacuucauaaauaugaauuauguu

SEQ ID NO: 4161 - RNA, 86 nt, Human
uuucuguucacaccagcuuguuucaguuuaguauauuucuuucugucuacauuuauacuuacugauaaauucacugugaucaggaa

SEQ ID NO: 4162 - RNA, 69 nt, Human
ggaaugaaacuggggucuucaaaguggguugugacaaucuggcaaccuuugaaacccuuugcuuauucc

SEQ ID NO: 4163 - RNA, 67 nt, Human
cggcggcaagauggcagugcaaauauccaagaagaggaaguugucgcugauggcaucuucaaagcug

SEQ ID NO: 4164 - RNA, 71 nt, Human; identical to SEQ ID NO: 1145

SEQ ID NO: 4165 - RNA, 67 nt, Human; identical to SEQ ID NO: 1146

SEQ ID NO: 4166 - RNA, 82 nt, Human
agccaaaauguacaagaccacaccggaugucaucuuuguauuuggauucagaacucauuuggugguggcaagacaacuggcu

SEQ ID NO: 4167 - RNA, 70 nt, Human
ggauuaaguacauaggucuuuauuuaaacacugauuuuuuuuuuaaauauauacacacaaaacuuaguuc

SEQ ID NO: 4168 - RNA, 61 nt, Human
ggcuucaugauauacaccaauuccaaaauaaaacaaucaaauggucccgguguagaaugcc

SEQ ID NO: 4169 - RNA, 72 nt, Human
ggaagagauggcccaugagacugaucuauaguaaaacacucuaagaaaugcaguccaauuuuauacacuucc

SEQ ID NO: 4170 - RNA, 98 nt, Human
cccugccauccagacagucccccugcccccagggcaaccaguucuccuaugcucuaugagguugucuaugaggcaggggcccuggagaggaugcaggg

SEQ ID NO: 4171 - RNA, 81 nt, Human
uuauggugccugauuccugcauggucagugagcugcccuuugaugcucaugcccacauccugcccagagcaggcaccguag

SEQ ID NO: 4172 - RNA, 96 nt, Human
gcucaccccuggaggacggccggcucucuauagcaccagggcucacguggggaacccgggugccauggagcgacaggacggcagauaggggcgagc

SEQ ID NO: 4173 - RNA, 62 nt, Human
ggaggggguuugcuggggaacuggcgccaucgccgggacuccagaaccgcagaagccucccc

SEQ ID NO: 4174 - RNA, 84 nt, Human
ggccccaggacgccaggguggccggcugcugggccacgugcuguccguggugagcccugccgcugucccauggcccagggagcc

SEQ ID NO: 4175 - RNA, 63 nt, Human
uccccaaauuaucccagacaggcagcuccguggaggugacaaggugagagggagaggagggga

SEQ ID NO: 4176 - RNA, 99 nt, Human
acaccuggaaguauuagauacauguuuaaaauaucuuuuauagguuuuauauaaaaaugucugaguaugauuaugugugaaaguucugauaccaguugu

SEQ ID NO: 4177 - RNA, 75 nt, Human
aucuaauguguguguauauauguauguguguauguguguguauauauagauguauauauauacacacacagagau

SEQ ID NO: 4178 - RNA, 72 nt, Human
guggugaaaguagucuuguuuuaugaggaugucugcauuaaagcaguaaaauaagcuuuccauuuuauucau

SEQ ID NO: 4179 - RNA, 74 nt, Human
ccaugcaggcuacuccauguuuggggcuggccucaccguaggccugucuaaccucuucuguggagucugcgugg

SEQ ID NO: 4180 - RNA, 65 nt, Human
gcccucccucuggcugaagacugagaagcauuaaggaugcuucuggauuucugcagcggcagggc

SEQ ID NO: 4181 - RNA, 69 nt, Human; identical to SEQ ID NO: 2967

SEQ ID NO: 4182 - RNA, 63 nt, Human
uguguaauuucuggucagugauuccagguuuuaaauaauuuguaaguguucaguuucuacaca

SEQ ID NO: 4183 - RNA, 72 nt, Human
gggaaacuccgaggacagagggcuaaauccaugaaguuuguggauggccugaugauccacagcuggagaccc

SEQ ID NO: 4184 - RNA, 89 nt, Human
cacggguggaaggcguccggcgagcacucguugcacggcccacucguccgugcguucaggcagcucgacaaggaacguguccauccgug

SEQ ID NO: 4185 - RNA, 98 nt, Human
uccuagaaccugaacauuuggcuuggcaggugcgaaacguaucuagaagcuuuacuggagccagcacucgacgcaaaauguccuuuaggucccuagga

SEQ ID NO: 4186 - RNA, 60 nt, Human
augugaaccuuuguauuuuugcuccuaauuuuggacucagugaaaguguacuguuuacau

SEQ ID NO: 4187 - RNA, 76 nt, Human
cagaugcccccagucccuguguguucugcaagacuugcucuugaggaggaagaugcaccucacuaaggcucaucug

SEQ ID NO: 4188 - RNA, 66 nt, Human
ucccaagaguucugcugcaucagccagugaggacaagaguucuucagugcgguucagcucaaggga

SEQ ID NO: 4189 - RNA, 83 nt, Human
uuuaguuccucaggaacagagaacuuugcaaugaugaucucaacucugcaucaucuggugacuccugauucugcaggacuaag

SEQ ID NO: 4190 - RNA, 77 nt, Human
gacgauuuacgaccuuugguggcucuguacuccuuuuaaacgcauccaaggagucaguugccuuccugguacgcguc

SEQ ID NO: 4191 - RNA, 97 nt, Human
gccaugugucugaccccaucggguacgacgagaugucgucgacggguaucccuugugccgcgucuccauuugaccauuguuuagucaguacuauggu

SEQ ID NO: 4192 - RNA, 62 nt, Human
gugguucccaguauuaacagucgugcaguuggccaacguacgugaggugugcuugggacugu

SEQ ID NO: 4193 - RNA, 62 nt, Human; identical to SEQ ID NO: 1277

SEQ ID NO: 4194 - RNA, 62 nt, Human
uugaugacuaaagaaaccugcugcacaucaaugccucuggccagcaggucagugguaaucaa

SEQ ID NO: 4195 - RNA, 67 nt, Human
uugguccauaucuccaugcauggcggauacagugaaaucucgagcaugcaucuucucggugagccag

SEQ ID NO: 4196 - RNA, 93 nt, Human
gcuuguguuaguuucagggagggguguauauuuugauaaaaaaaauacuugacuuuguaauucuguauauucuauaccaauuuauagccgggc

SEQ ID NO: 4197 - RNA, 81 nt, Human
uuauauguggauauuuuuuaaguggacuuguaugcugauaauucuagaccaaaguaaauauggcagaauauuuauacauga

SEQ ID NO: 4198 - RNA, 78 nt, Human
uugaauugauaauuagaauauugaauaagcaauccuaugauccacuaauuuguuuuaucaguuaauaauauuaaucaa

SEQ ID NO: 4199 - RNA, 64 nt, Human
aggggaggggaugucucaccgggcugggggugagaauccccaaccccagggacuccccuucccu

SEQ ID NO: 4200 - RNA, 60 nt, Human
gguccugcugugccagaaacccuuaagaaaaagcgaaggaauuucgcagagcugaagauc

SEQ ID NO: 4201 - RNA, 70 nt, Human
agcugcggggccacccuccgggcagaucgguaauagagcccuccgucuggugggaugcgcacccccugcu

SEQ ID NO: 4202 - RNA, 128 nt, Human
cccccugcugccuguggaaaaugcgggggccauacauggugacgcgcugcaccuccauucaagccaagcugcagaagcaccguggaccuggccaaggccguucugcuggagaaaaggcaugcuggggg

SEQ ID NO: 4203 - RNA, 86 nt, Human
ccuggugucccucgacucugacagugauggggagcugggauccagauacuccuccggguauucaucugcagagcaggugaaccagg

SEQ ID NO: 4204 - RNA, 61 nt, Human
gacucuucagggaaaaggucagugaaguuuaacaagggcuauacugcucuuagccagaguc

SEQ ID NO: 4205 - RNA, 76 nt, Human
gcgacgcggagcccagcgggcgcgcgugcgguugucuaccccgugacgcggcccagcggggcucgggaccgcgcgc

SEQ ID NO: 4206 - RNA, 113 nt, Human
aguagguuaccauuuugaggcaguuggauauaaauuauguaaauauguaugauuaugauuuuuauaaauggcauaacaugaguguacuaacuaccuucuaugcuggccaugcu

SEQ ID NO: 4207 - RNA, 75 nt, Human
gauuuucuggagguaugacaauaguauuuuuuuaugcucagauuaaaaaucagcuuuucaccucuccaguuuuuc

SEQ ID NO: 4208 - RNA, 64 nt, Human
gcugaacuuggauuucuaguucaugaagaaaucucucccaauacccauuuauccuauuuuuagc

SEQ ID NO: 4209 - RNA, 64 nt, Human
ucuuuaaaaaguuaaauguuuuuuuaaucuucaagaaaucaugcuacacuuaacuucuccuaga

SEQ ID NO: 4210 - RNA, 89 nt, Human
agaaauaucgccuuacccuuugugauuaaugguacaaucauaauagauaugaugaauccaaacguggugagggggaggucuuuauaucu

SEQ ID NO: 4211 - RNA, 84 nt, Human
aucuacugggcgccugucacccaggaacucuacuggcagauuggcauugaagaguuccucaucggcggcaggccuccggcuggu

SEQ ID NO: 4212 - RNA, 94 nt, Human
gccccgucuucagcgucuaccucagcaaccagcagggcuccagcgggggagcgguugucuuugggggcuguggauagcagccuguacacggggc

SEQ ID NO: 4213 - RNA, 64 nt, Human
gacaacuguccuuagugugagaaaauguccagauuucucauccucuggccaauggaagguuguc

SEQ ID NO: 4214 - RNA, 66 nt, Human
guggagguucaaagagaauguggaagauggccgagcaaguaucuaucaaucugucguuaccaacac

SEQ ID NO: 4215 - RNA, 83 nt, Human
caguguguguggcagucagaaaaacccauaucuaguuuucaacuucaccucugguguuuuuauggcuuaaccuuauaucauug

SEQ ID NO: 4216 - RNA, 62 nt, Human
acagacauaucuaggagcccugaauagaggcgcagucugccucaccuccugaaugaagcugu

SEQ ID NO: 4217 - RNA, 78 nt, Human
cacaggguggcuugacaaauauuaacuugguuccccagcaauaaacugagucuuccagggucaagucauugccuucug

SEQ ID NO: 4218 - RNA, 72 nt, Human
uaguaauuuagaggugauucauuaaauuaauagauuauuauuauuuucuacaauaguuauucugaauuacug

SEQ ID NO: 4219 - RNA, 86 nt, Human
uuuaaagaauaauuuggaaaauuuuaaacuaauacuuauuaucaaguaauaaagucaucaaaaauuaccagaaauaauucuuuaag

SEQ ID NO: 4220 - RNA, 64 nt, Human
gagagaaaaggggaggaugccacuggagucauccucuucaaugccacuauccuucccaucucuc

SEQ ID NO: 4221 - RNA, 68 nt, Human
gcuggauagucuggagcagcuuagugugucuggggcagaccgaccaccuucuaucuuugagugccagc

SEQ ID NO: 4222 - RNA, 93 nt, Human
uguauucuucacugguuugccaauuggucagguccccagcgugaacguuuccuagaggaccuggguagcuaaggcagugccagaaaaauuaca

SEQ ID NO: 4223 - RNA, 63 nt, Human
gaaugagcugcuaaauccugaagaugaccucuuaccagggaagauucgagacagcaaucguuc

SEQ ID NO: 4224 - RNA, 92 nt, Human
ggugucacagagguugaaguuaauaaguuuccagugguugcagucaugucaacagggaaugagcugcuaaauccugaagaugaccucuuacc

SEQ ID NO: 4225 - RNA, 100 nt, Human
ucaggaacaugguuaccccacgaucaacuuggguauuguaggagacaacccagaugacuuacucaaugccuugaauugagggguauucagucgugcuuga

SEQ ID NO: 4226 - RNA, 65 nt, Human
aaaggagggauaaauacugaagggauuuacuaaacaaauguccaucacagaguuuuccuuuuuuu

SEQ ID NO: 4227 - RNA, 79 nt, Human
aggcuggaaugaagugguaugaucucaguugaaugcaaccuccaccuccuagguucaagcgauucucaugccucagccu

SEQ ID NO: 4228 - RNA, 70 nt, Human
ggaaaaugggagaugauuaagaguugguguggccuagucacaccaaaauguauuuauuacauccugcucc

SEQ ID NO: 4229 - RNA, 81 nt, Human
gcaugauggugaaacggugaccaggacaccucggucuggcuaacaaggguucuaaaaacuuggacacggugccgucaacgc

SEQ ID NO: 4230 - RNA, 73 nt, Human
ucaucuuuguccuuaaauuaaccuuugcucuugagagcaaaagagggaaagacaggggaacaucaaagcauga

SEQ ID NO: 4231 - RNA, 74 nt, Human
uccauucuuaaaaucaagcacaaaaucugacaaugaaacauauccagggguuguguguccccaucugaucugga

SEQ ID NO: 4232 - RNA, 61 nt, Human
ucugaaaacuacaccgcuguggcccagacugugaaccugcuggccgaguggcucauucaga

SEQ ID NO: 4233 - RNA, 69 nt, Human
ugaagaaggagagaccccagcguggcuggaacagaugauugcacauaccacguggcgggaccuuuuuua

SEQ ID NO: 4234 - RNA, 78 nt, Human
ccuuacagugagggcuauacaugguagccaguugaauuuauggaaucuaccaacuguuuagggcccugauuugcuggg

SEQ ID NO: 4235 - RNA, 84 nt, Human
gacuuugguagacacaggcauuggcaugaccaaagcugaucucauaaauaauuugggaaccauugccaagucugguacuaaagc

SEQ ID NO: 4236 - RNA, 67 nt, Human; identical to SEQ ID NO: 3353

SEQ ID NO: 4237 - RNA, 65 nt, Human
cugcggcccgugcgcacccgcgagcucagcacguaguugggguccaggucgucgccgcccugcag

SEQ ID NO: 4238 - RNA, 72 nt, Human
gacuuauuucuucuuggacacacccacggugcggccacggcggccaguggucuugucgaagaggaagugguc

SEQ ID NO: 4239 - RNA, 81 nt, Human
gagcgcguaguaucggcccgccaggucgccguccaggcuggacagggcuuccaccgcgagcuucucgauggcgcggcgcuc

SEQ ID NO: 4240 - RNA, 82 nt, Human
gccacguguugcucagacagggugugcugggcaucaaggugaagaucaugcugcccuggggaaccaacugguaagauguggc

SEQ ID NO: 4241 - RNA, 71 nt, Human; identical to SEQ ID NO: 1145

SEQ ID NO: 4242 - RNA, 66 nt, Human
cgaaucugugcgcguagagcguccguccagcaggcuugacuggugaugacggcgucgcagcauucg

SEQ ID NO: 4243 - RNA, 74 nt, Human
cuguaucgauaugguuccuuuuccgucaccacuggacauuguccaggguauugaaagugccugagauccugcag

SEQ ID NO: 4244 - RNA, 88 nt, Human
ggcuagugccagccugugcauacccaguccagccuguccagcugguucugcacagauacugaaugggugugucggggacauacuggcc

SEQ ID NO: 4245 - RNA, 68 nt, Human
ggcuugauaccaacagccuggcaguggucagaagccagcuuaucauugccuggucaaggaagcaggcc

SEQ ID NO: 4246 - RNA, 61 nt, Human
ugagcugacuguguccugccaaggcaguggcugcccaaggaagccugcauaggagaucuca

SEQ ID NO: 4247 - RNA, 68 nt, Human
ugggcaggguccgcugaucgugggcaucuugcugguguugauggcuguggucuaugcaucucugaaua

SEQ ID NO: 4248 - RNA, 60 nt, Human
uaauuuaacucuauguuguccgccguguagacauccgaggucauuuguugcguugaauua

SEQ ID NO: 4249 - RNA, 66 nt, Human
ggccgggcagcauucuggggcuuguaacacuugguuggugggcgagagccagcaggagguccggcc

SEQ ID NO: 4250 - RNA, 82 nt, Human; identical to SEQ ID NO: 1766

SEQ ID NO: 4251 - RNA, 69 nt, Human
acaucuuuggaaaugaugagauuauuuccuguguuaaaaaaaaaaaaaaucuuaaauuuccuacaaugu

SEQ ID NO: 4252 - RNA, 82 nt, Human
ggcagucuagaauaccagaaacaucuacuuggguagcuuggugccauuauccuguggaaucugauaugucugguagcauguc

SEQ ID NO: 4253 - RNA, 80 nt, Human
uccugauguuugggacagcguaucuguaccagugcucuaaauaacaaaagcuagggugacaaguacauguuccuuuggga

SEQ ID NO: 4254 - RNA, 69 nt, Human
cuucaggaaccuggccucggaauccaauggaaagaccaggacauugagaaucuguaccaaaaccugggg

SEQ ID NO: 4255 - RNA, 66 nt, Human
ggacucaguggccuuugaggauguggcugugaacuucacccaggaggagugggcuuugcugagucc

SEQ ID NO: 4256 - RNA, 100 nt, Human
acagccuaagcugagugugaccccagaagccacgaugugcucuguauccagaacacacuuggcagauggaggaagcaucugaguuugagaccauggcugu

SEQ ID NO: 4257 - RNA, 66 nt, Human; identical to SEQ ID NO: 3876

SEQ ID NO: 4258 - RNA, 76 nt, Human
uggucccuaaaacccaucugaugucugaaucugaauggaggaaucuuggcguucagcagagucagggaugggucca

SEQ ID NO: 4259 - RNA, 73 nt, Human
agcacgcuacaacgggcaucgcuggacuagcaacuuguccugcuaucccucaaugugacgcagugagcgugcu

SEQ ID NO: 4260 - RNA, 99 nt, Human
aggcacugagcgcgaguuccugaggccuugugaugacugccuguugaagaucaccaaguccgacggcauccggggccuguaccagugccuucagugucu

SEQ ID NO: 4261 - RNA, 60 nt, Human
ggcuaguagaggcgguguguaucggccgaggcgucuccggcugucuaccguuccgcugcc

SEQ ID NO: 4262 - RNA, 68 nt, Human
gcugcuggggagcagagagggacccucuaucgcuggcuucagggggugccuugggucccuucaguagc

SEQ ID NO: 4263 - RNA, 77 nt, Human
gggcgugagugcaggaagcacauuuggcuuggcaggagcugucaggaaggggaagcggguuuccugcgauucugccu

SEQ ID NO: 4264 - RNA, 115 nt, Human
uccccugggcuggccuggcugacggcagcugcaaggggaugcgcacugcaggaggaccuggguggugcuauacuucacagcagcagcaaaagaggucagcugacagccuggugga

SEQ ID NO: 4265 - RNA, 77 nt, Human; identical to SEQ ID NO: 1216

SEQ ID NO: 4266 - RNA, 74 nt, Human
uagaaacaugcuugccuuauguaucagaggacaugcucagcagauccaagagauauauuuggcaacuuuuucua

SEQ ID NO: 4267 - RNA, 60 nt, Human
ccaucacggacuuccugggaaaaucagauccauuucuggaguucuuccgccaggugaugg

SEQ ID NO: 4268 - RNA, 62 nt, Human
ucagagucuccuaaagagcccgaacagcugaggaagcucuucauuggaggguugagcuuuga

SEQ ID NO: 4269 - RNA, 71 nt, Human
uugucacauaugccacuguggaggagguggaugcagcuaugcaugcaaggccacacaagguggauggacag

SEQ ID NO: 4270 - RNA, 92 nt, Human
acccgucccugauccuggccgcaggcacagaugcccgcuuaccaggagcuggguggaggaggcgauugccuauggccggaagcugggcgggu

SEQ ID NO: 4271 - RNA, 66 nt, Human
gcgcagaccccucggucuugcuaugucugagcucacccgugaagcgucagaggauggaguccgcgc

SEQ ID NO: 4272 - RNA, 62 nt, Human
ggccgaguauccaucagaaguagacgcaaggucucuccuuugauaaagaugcgaugguggcc

SEQ ID NO: 4273 - RNA, 60 nt, Human
gugccgaggcgggugugacccucaucuccccauuuuguugggcgcauccuugauuggcau

SEQ ID NO: 4274 - RNA, 62 nt, Human
gugguggccgacacgggcgacuuccacgccaucgacgaguacaagccccaggaugcuaccac

SEQ ID NO: 4275 - RNA, 71 nt, Human
gggguggaggggguggugcuggugcugcacugggcugacugcggcgcugacgcagcguuuccccccauccc

SEQ ID NO: 4276 - RNA, 82 nt, Human
uaucugcaggguccuuuccauuccuauuuagagggaguccuggcuccaugacccccucccgaguggacuguccaagcagaua

SEQ ID NO: 4277 - RNA, 65 nt, Human
ugugucccagcuaguucacuccuuucgccgugcgugguggaggcuggccucucuggcugggugca

SEQ ID NO: 4278 - RNA, 65 nt, Human
gcucuucucgcggauccaguguuccguuuccagcccccaaucucagagcggagccgacagagagc

SEQ ID NO: 4279 - RNA, 81 nt, Human
uacgcggcgcagcgcggcaguccugauggcccggcauggguuaccgcugcugccccugcugucgcuccuggucggcgcgug

SEQ ID NO: 4280 - RNA, 87 nt, Human
ugucucugaugagcugagaaacaaagccacccagccaaugaagucuguacucugguggcuuccaguggaaaaggcauuuuggaggca

SEQ ID NO: 4281 - RNA, 64 nt, Human
gaugagccccagccuagccugcuccaaagccacugacacaugcauguuuagcccuuggcccauc

SEQ ID NO: 4282 - RNA, 65 nt, Human
gauggggcccugggaaugaacuggcugcagacccuccuccaucccacacccccaggggcuccauc

SEQ ID NO: 4283 - RNA, 102 nt, Human
gaggugguggugcagagacucuuccaggucaaagggcggcgugugguccgugccaccgagguaccuguguccugggagagcuucaacaauggcgacugcuuc

SEQ ID NO: 4284 - RNA, 89 nt, Human
gcggaguggccgggcccgagugcacgugucugaggagggcacugagcccgaugcgaugcuccaggugcugggccccaagccggcucugc

SEQ ID NO: 4285 - RNA, 81 nt, Human
gcuucgagucggccaccuuccuaggcuacuucaagucuggccugaaguacaagaaaggagguguggcaucaggauucaagc

SEQ ID NO: 4286 - RNA, 79 nt, Human
ggagcgugcucgaccuuucucuccaguggagauuugccaaccugcccaacaaugccaagcuggagauggugcccgcuuc

SEQ ID NO: 4287 - RNA, 77 nt, Human
cucuuugaagcguuuuccaacaguauagaucucaugaaucaaauccuccaugcagaugaugccguauuuaccaagag

SEQ ID NO: 4288 - RNA, 76 nt, Human
gagcaaucaaagcguuaucugucaaagcaauucgcuucuuauugauuuugccauaaccacgcuuguagauuaguuc

SEQ ID NO: 4289 - RNA, 64 nt, Human
gaucguggcuggacuggagaagaugccugcccgccgggcuuccuuaucccaccccagagacauc

SEQ ID NO: 4290 - RNA, 93 nt, Human; identical to SEQ ID NO: 3702

SEQ ID NO: 4291 - RNA, 66 nt, Human
auuuuauuauacuuaaaugaacucaaguacaagaaacaaaguuaaaauauguaaguauaauaaaau

SEQ ID NO: 4292 - RNA, 72 nt, Human
cggcucccaauguugacguuggccagggccuuugcaaacaagccaggccaaaaaggcucaacauuuacaccg

SEQ ID NO: 4293 - RNA, 73 nt, Human
gcaguggagggggcaggaccuccugcuggugcagcaccagcugcuggagcagguccaccggccccuacauugc

SEQ ID NO: 4294 - RNA, 129 nt, Human
aggcugacacucucaaaggucuucucggauggaagucuccggcuccagucgucuguccacuaagcgagaggcgaguugcgagggaggcugcgggggcgggcggacguauguugagacccuaugcagccu

SEQ ID NO: 4295 - RNA, 85 nt, Human
gaguugcgagggaggcugcgggggcgggcggacguauguugagacccuaugcagccuccugcucucccgagggcuccugcggcuc

SEQ ID NO: 4296 - RNA, 60 nt, Human
cgccugccagcuggagcuauucacuuccagcgugaaagggagggacucacagcugcaggg

SEQ ID NO: 4297 - RNA, 68 nt, Human
gcugcuucugggacuccuguuacccgcaagucugaccggcggugucgggagccugaaccuggaggagc

SEQ ID NO: 4298 - RNA, 62 nt, Human
uaaauuucaacuaaugcaauagacuuaaaauauagccuauggaauacugugauugaaguuug

SEQ ID NO: 4299 - RNA, 66 nt, Human
gguucugguguuuggcgucggaauuaaacaaccaccaugucgagcaaaaaggcaaagaccaagacc

SEQ ID NO: 4300 - RNA, 80 nt, Human
augggggccuccuuaaauacacaccagcagucaaguggaggaaaacuugaacaauaaugagucgcuucuugggucucuau

SEQ ID NO: 4301 - RNA, 81 nt, Human
uaagcuauauauauaauauaauuacauauauaugcacauguauauauaguguguacauauauguguguauauauauacuua

SEQ ID NO: 4302 - RNA, 89 nt, Human
ucauauuacaaacugcucuuccauauuuauguaccauauuauaccuuuuaauuaugguaaauaauauaaugggaauucuaauaauauga

SEQ ID NO: 4303 - RNA, 77 nt, Human
cccagaaacuuucaggagaggcaagcagauucacugacccccacguguaucuuuauguguaaugaagguuuuauggg

SEQ ID NO: 4304 - RNA, 78 nt, Human
ggcauucuuuugaaaugugcaacaaaauaaaaaccucugaaccuguuuugacacugcaaacucaguggaugacaugcc

SEQ ID NO: 4305 - RNA, 68 nt, Human
gugugcacagaugaacgaaguuauggcagaguuagcuaaagaacucccucaaguuucauuugugaagc

SEQ ID NO: 4306 - RNA, 131 nt, Human
ugaaccuguuuugacacugcaaacucaguggaugacaugccagcccauuggaagcugaagguguuccugaaguaucugaaaaauaugaaauuagcucuguucccacuuuucuguuuuuucaagaauucuca

SEQ ID NO: 4307 - RNA, 100 nt, Human; identical to SEQ ID NO: 698

SEQ ID NO: 4308 - RNA, 60 nt, Human; identical to SEQ ID NO: 2705

SEQ ID NO: 4309 - RNA, 72 nt, Human; identical to SEQ ID NO: 1989

SEQ ID NO: 4310 - RNA, 89 nt, Human
cccgggauccacgggaggcggcggccgcagccuggagauuccccagggacccccccggagccgccgcgucucccauggacuugcccggg

SEQ ID NO: 4311 - RNA, 130 nt, Human
gccucugacucgagcauuauggggagccaggagcccgaaacggccgagugcugcagcucccgggggccccuucuccccuggaaaaggccucucggcggguccuggccguggugcuagaagaugucauggc

SEQ ID NO: 4312 - RNA, 74 nt, Human
ggagcuccagcgucaaaucgcucagccaggagaugagaugcaccauccggcugcuggacgacucggagaucucc

SEQ ID NO: 4313 - RNA, 63 nt, Human
ggcgagcaccgcgccggcccugagccucccgcucgcuccccacggccgcggugcauguucgcc

SEQ ID NO: 4314 - RNA, 92 nt, Human
guguguccgcaggcgcccgacgcugccgaugucccggggcugagccgcgcccaggugucccggacagugcgugcgagcguguguguccgcgc

SEQ ID NO: 4315 - RNA, 82 nt, Human; identical to SEQ ID NO: 705

SEQ ID NO: 4316 - RNA, 75 nt, Human
ugcuaugaacacuaugggaucaggcugcccaagaaggggaagccugagccaaaccaugaguggacauuauuggca

SEQ ID NO: 4317 - RNA, 99 nt, Human
uuaaaaaaaucugaguaauugucaaauauuaaaagaaagauauucuuccuguaaggaauacaguuuuuagucaaaguggccauuacauccucuuuuuaa

SEQ ID NO: 4318 - RNA, 76 nt, Human
uugagaaaguuguugugguguuguaugccaagaaaauucuuuuuauuggugccuauauuguaacaauuauuuuuaa

SEQ ID NO: 4319 - RNA, 61 nt, Human
gagcuuaagugaaggcaguuuuuauggcguuuguaguaaauucuguaaaauacuuugguuu

SEQ ID NO: 4320 - RNA, 70 nt, Human
gccccaacguggggaugcgcauuccacacgguggaacaggcaccacagaaagguugggcgacguuggggc

SEQ ID NO: 4321 - RNA, 75 nt, Human; identical to SEQ ID NO: 74

SEQ ID NO: 4322 - RNA, 77 nt, Human
gcccccgguaucauuccucgaauuucagugcgggaaccaaugcagacuggcauuaaggcuguggauaagcugggugc

SEQ ID NO: 4323 - RNA, 87 nt, Human; identical to SEQ ID NO: 76

SEQ ID NO: 4324 - RNA, 71 nt, Human; identical to SEQ ID NO: 77

SEQ ID NO: 4325 - RNA, 65 nt, Human
ugguuaacaguaacagcagcacagacccaaacuugauaaaacuuugggacuuguuauuuggacua

SEQ ID NO: 4326 - RNA, 86 nt, Human
uuuguauuuuugagacuggaaacugauaaaaauuucugauuaggaaacuuugagaauagagucuuucuucuuuccaaaauaacaaa

SEQ ID NO: 4327 - RNA, 75 nt, Human; identical to SEQ ID NO: 74

SEQ ID NO: 4328 - RNA, 87 nt, Human; identical to SEQ ID NO: 76

SEQ ID NO: 4329 - RNA, 73 nt, Human
guggucugaaagcccccgguaucauuccucgaauuucagugcgggaaccaaugcagacuggcauuuaggcugu

SEQ ID NO: 4330 - RNA, 71 nt, Human; identical to SEQ ID NO: 77

SEQ ID NO: 4331 - RNA, 75 nt, Human; identical to SEQ ID NO: 74

SEQ ID NO: 4332 - RNA, 67 nt, Human; identical to SEQ ID NO: 836

SEQ ID NO: 4333 - RNA, 87 nt, Human; identical to SEQ ID NO: 76

SEQ ID NO: 4334 - RNA, 71 nt, Human; identical to SEQ ID NO: 77

SEQ ID NO: 4335 - RNA, 75 nt, Human; identical to SEQ ID NO: 74

SEQ ID NO: 4336 - RNA, 87 nt, Human; identical to SEQ ID NO: 76

SEQ ID NO: 4337 - RNA, 71 nt, Human; identical to SEQ ID NO: 77

SEQ ID NO: 4338 - RNA, 65 nt, Human
ggggacucagaaagggaagcagagugggcuguugaugucuggaaagcucccucaccagagugccc

SEQ ID NO: 4339 - RNA, 96 nt, Human
gugggucacacagcaucaugggggaugagcuggggcuggagucggcuguaucugacaccagacccuccauucaagcucccuugaugaaacgcccac

SEQ ID NO: 4340 - RNA, 83 nt, Human
agaugugggaugucaguacuggcaugugccuuaugacccucgugggucaugauaacuggguacguggaguucuguuccauucu

SEQ ID NO: 4341 - RNA, 68 nt, Human
agcaacaaaggaaugcaaggcugagcuccgagagcaugagcaaugugguagaaugcauuuccugggcu

SEQ ID NO: 4342 - RNA, 73 nt, Human
ucucugaagcaacaggaucugagacuaaaaaaagugguaaaccugggccauucuugcugucuggauccagaga

SEQ ID NO: 4343 - RNA, 75 nt, Human
agucccggcggcggcccagccucaguuccagcgccaacgccagcaccggcugcggcuccgguucccgcugcggcu

SEQ ID NO: 4344 - RNA, 83 nt, Human
ccgcccuggcccaccgcugucaacauggcccgcgccgcccgcgaccuggcugauguuagcagcccgggaggccgaacgggagg

SEQ ID NO: 4345 - RNA, 77 nt, Human
gcugggcuuggcugcugcaccaugacccuggaggcgauccgcuacucgcggggcucccuggcagauccuagaccagc

SEQ ID NO: 4346 - RNA, 95 nt, Human
gcuugucucaugccucgccguggagcugcagugcuggugcgccuggggugaccugggacucgccugcugcucuguggccuucgugcgcgacaagc

SEQ ID NO: 4347 - RNA, 67 nt, Human
gagaacaucaaugguguaccgccucauuugggacaucccuuccacuggggugggcaugagcguucuu

SEQ ID NO: 4348 - RNA, 64 nt, Human
ggccagguucucgcucuggucgugucugucaaaccggcacggucugaucgcggaaauuauggcc

SEQ ID NO: 4349 - RNA, 85 nt, Human
ggacucuauagaggggcacgccggggcuauuuaggacuaucaguuggcgaauuuuccuggggacucccuuuuaguacuggagucc

SEQ ID NO: 4350 - RNA, 67 nt, Human
auggagaggaggagguggagacuuuugccuuucaggcagaaauugcccaacucaugucccucaucau

SEQ ID NO: 4351 - RNA, 81 nt, Human
cuuugguagacacaggcauuggcaugaccaaagcugaucucauaaauaauuugggaaccauugccaagucugguacuaaag

SEQ ID NO: 4352 - RNA, 73 nt, Human
guggauucgugugugugugugugugugugugucuuguauaugugugcgcagagugcaucauuucagacucuac

SEQ ID NO: 4353 - RNA, 78 nt, Human
guggggcagaggccaggaggggaccuggugugucaccuggcccacagcuggucaucccucaggccacccugacccuac

SEQ ID NO: 4354 - RNA, 78 nt, Human
gaggagcggagcggcacagccucccacccucccggcugguguuagugcccggacggcgggcucugcgcuccgccccuc

SEQ ID NO: 4355 - RNA, 66 nt, Human
guccccggcagcgguuggcgaguggggaccgaacccccgguucuccaugaucccgcuggccggggc

SEQ ID NO: 4356 - RNA, 76 nt, Human
uuccgcugugaggaucugcccgaccugcacgaauacgccucgauaaacagggccgugccgcagaugcccaccggaa

SEQ ID NO: 4357 - RNA, 73 nt, Human
agaagugaucguuccagcauucuuggccuaggcuuauugccagcgcaaauauaagaugacugaaugaaacucu

SEQ ID NO: 4358 - RNA, 66 nt, Human
gggauguugcaugccauuggauuuugaagcucuaagugaguucaaugugcugugccaugacaugcc

SEQ ID NO: 4359 - RNA, 88 nt, Human
ggccuaaagaggacugugcauuuuugcuauuuaaaggaaucacaaaugaucauacuuaagugagcaaaauugacaaguuuuacuagcu

SEQ ID NO: 4360 - RNA, 94 nt, Human
aggcagggcagugcccagcuccauguaaguccaucugucugggucccugagacccaagaugcagcaguguguggagcagggggccgcccugccu

SEQ ID NO: 4361 - RNA, 66 nt, Human
ugcccugcagggacugcagcugcagagacccaccgagguacuccgcguaggcccgugacgugggca

SEQ ID NO: 4362 - RNA, 64 nt, Human; identical to SEQ ID NO: 1375

SEQ ID NO: 4363 - RNA, 61 nt, Human; identical to SEQ ID NO: 2204

SEQ ID NO: 4364 - RNA, 129 nt, Human
cgcugacgccguguuuccucuuucggccgcgcuggugaacaggacccgucgccaugggccgugugauccguggacagaggaagggcgccgggucuguguuccgcgcgcacgugaagcaccguaaaggcg

SEQ ID NO: 4365 - RNA, 113 nt, Human
agguaggaaugagguauagaaaagagauagcaucuucuuuggcacaagacuaguggcuuaccgcuuaccuuagaguuuuguuuuuuuuuuuucaaacccaucaaaaucuacuu

SEQ ID NO: 4366 - RNA, 60 nt, Human
cuagcccaucauuaccugugaacugcaguggggcagucauggcaaauagaauugggcugg

SEQ ID NO: 4367 - RNA, 84 nt, Human
cggggaggguggagaaaucaucguuacagacauggacaccauugagaagucaaaucugaaucgacaguuucuuuuccggcccug

SEQ ID NO: 4368 - RNA, 63 nt, Human
gaugucacgaaguuaaagucugacacggcugcugcagcugugcgccaaaugaauccacauauc

SEQ ID NO: 4369 - RNA, 88 nt, Human
ggcaggcacucagcccuuggaggugcuggaggcugugcagcgcagccuggugcugcagcgaccacagaccugggcugacugcgugacc

SEQ ID NO: 4370 - RNA, 68 nt, Human
ccuaacuauccaggagaucgcugcgcuggccagguccucccugcaugguauuucccagguggugaagg

SEQ ID NO: 4371 - RNA, 115 nt, Human
gguguggggaagcauuaaaggacugacugaaggccugcauggauuccauguucaugaguuuggagauaauacagcaggcuguaccagugcagguccucacuuuaauccucuaucc

SEQ ID NO: 4372 - RNA, 70 nt, Human; identical to SEQ ID NO: 4086

SEQ ID NO: 4373 - RNA, 77 nt, Human
gaucaauuuuaucaaucuuuucagagaaucaacuucuagcuuugcugauuuucucuauuauuuguccuuuauugauu

SEQ ID NO: 4374 - RNA, 65 nt, Human
uuacuguuuuuucuauguuugauauaccguuguguuacaauugccaaugguauucaguacaguaa

SEQ ID NO: 4375 - RNA, 81 nt, Human
gggcuguggugucuguccgcuuucaggaagacauuauuucaauauggaauaagacugccagugaccaagcaaccacagccc

SEQ ID NO: 4376 - RNA, 70 nt, Human
guggcaaguggauuauucggcugcggaagggcuuggccucccguugcugggagaaucucauuuuggccau

SEQ ID NO: 4377 - RNA, 90 nt, Human
accucagcuggagcuggccauggugccccacuaugguggcaucaaccgaguucgggugucauggcugggugaagagccuguggcuggggu

SEQ ID NO: 4378 - RNA, 62 nt, Human
cccaggcugagagcgcccagagcaacagacugaugaugcuucggaugcacaaucugcauggg

SEQ ID NO: 4379 - RNA, 80 nt, Human; identical to SEQ ID NO: 174

SEQ ID NO: 4380 - RNA, 66 nt, Human
uuucggcgcugggucgcccaaagcaaaauggaaacggauagagugguggcucccagaaucccgaag

SEQ ID NO: 4381 - RNA, 79 nt, Human
aagggcaaagcaaagugagaaacaguuaccugggcaauucagaugccagauaacuggccccgauuucugcuucguccuu

SEQ ID NO: 4382 - RNA, 86 nt, Human
agacagagagaaaaguaacggguugauguuugacucucucagcauuuugagucuggcuucccaauuccugacuugacuuuuugucu

SEQ ID NO: 4383 - RNA, 95 nt, Human
gcagacugcuccagugucuccaucgaggcugggggacagcugcugcccccacuggagacagcggacuguccuucaguagaagacagguggucugc

SEQ ID NO: 4384 - RNA, 65 nt, Human
gucuggguguagugucauuuuaaguauuuggggugggaugagggagagagagcagcuccacagac

SEQ ID NO: 4385 - RNA, 78 nt, Human
uaucuucuuucauuauggagggagguuuggcagauggagaaccugaucgaacuucgcuucuuggugauagcaaagaug

SEQ ID NO: 4386 - RNA, 99 nt, Human
cugcuccaaggccuggccacaugcagacaggaggaagcugagcucgacauuaggccucaaggcugccaucugucuuguagggccuggccuugugggcag

SEQ ID NO: 4387 - RNA, 74 nt, Human
gcauccucuccaccugauuccaaaugcuguugguggcuggcccugccuccgaugcagggggggugggggggggc

SEQ ID NO: 4388 - RNA, 89 nt, Human
gggaggucacacugcccgucggaccuuggcaugcuccauucagcugaccugcugaggacaggcaucgccgagacuccuuggguccuccc

SEQ ID NO: 4389 - RNA, 78 nt, Human
ccgugaccgccaccgccacuucccagguagcccagcagccuccagccgcugccgccccuggggaacaggccgucgcgg

SEQ ID NO: 4390 - RNA, 73 nt, Human
ccucgacuguccccaugcaguaccagcaaagaccgcccagugucccagccuagccuuguggggagcaaagagg

SEQ ID NO: 4391 - RNA, 107 nt, Human
gggagccagcaagcaggaugauaucgaagagcuggagaccaaggccgugggaaugucuaacgauggccgcuuucucaaguuugacaucgaaaucggcagaggcuccu

SEQ ID NO: 4392 - RNA, 102 nt, Human
acuccggggcguuuccgggcuguucgcuccugcuuggcaaugucgcgagaaagguuuucgccuccuguuucagcggugacggcucuuggguuuucucggggu

SEQ ID NO: 4393 - RNA, 73 nt, Human; identical to SEQ ID NO: 4293

SEQ ID NO: 4394 - RNA, 95 nt, Human
gcugccggacgcggugcuagucgccggaugaagugagggccucacccccacgcagccuuagcuuucucgggaggaccgagcaccuuggcggcagc

SEQ ID NO: 4395 - RNA, 87 nt, Human
uuucagaugugcuucgcuuuugaaugucuguaucuaacuaaugagggaugcaaaauaaccaagaaguuaaaagcguaagaucuggaa

SEQ ID NO: 4396 - RNA, 76 nt, Human
ucuguguccagcccuugcagagagcuuuguccucugacaucagcuaccacacaggcucauucucaacuggcacaga

SEQ ID NO: 4397 - RNA, 75 nt, Human
gccgucggaguccaucaugggagguguggucuuguaguuguucuccggcugcccauugcucucccacuccacggc

SEQ ID NO: 4398 - RNA, 89 nt, Human; identical to SEQ ID NO: 2239

SEQ ID NO: 4399 - RNA, 70 nt, Human
ggcuugauuuguuggugaccgaauuacuagugacuaguuuacuaacuaggucauucaaggaagucaaguu

SEQ ID NO: 4400 - RNA, 75 nt, Human
uuaaacaugucaccuaaaugcacuugaugguguugaaaugugcaccuucuuaaauuuuaagaugacuuaguuuaa

SEQ ID NO: 4401 - RNA, 81 nt, Human
uuagaugucuuauuauuaaaguuaccuauuauuguggaaauaaacuaauuguauggguuuagaugguaacauggcauuuga

SEQ ID NO: 4402 - RNA, 62 nt, Human
gauuuaaauaauaugugucuuguuugcagcccugaaugcaaagaauucauagcaguuaauuc

SEQ ID NO: 4403 - RNA, 87 nt, Human
uacccagacuuaaugguauuguucuugcauuggccaaagugaaaauuuuuuuuucuuuggaaaucuaguuuggaauaagucugggug

SEQ ID NO: 4404 - RNA, 93 nt, Human
uuugacccuuuugagauggaacuuucauaaaguuucuuggcaguaguuuauuugcuucaaauaaacuuauuugaaaaguugucucaagucaaa

SEQ ID NO: 4405 - RNA, 79 nt, Human
ucuugugugagacuucgugguggugcuaagaaaaggaagaagaagucuuacaccacucccaagaagaauaagcacaaga

SEQ ID NO: 4406 - RNA, 88 nt, Human
gggcgguaaguuggauuucgaugaaccggucccugaaguugugcucccucugggacuccauccuucaucucuccaaucucaccagccu

SEQ ID NO: 4407 - RNA, 81 nt, Human
gggggcggcgcacugauuccgggccccagagaacugccuaucaguggcaggggggucaaauccuucacugcugccgcuccc

SEQ ID NO: 4408 - RNA, 72 nt, Human
aucuuuguauguaaaacuuuaacugauuucugucauucaucaaugaguagaaguaaauacauuauaguugau

SEQ ID NO: 4409 - RNA, 62 nt, Human
auugcauuuuaugcuuuaaguacgaaaggguuugugccaauauucacuacguauuaugcagu

SEQ ID NO: 4410 - RNA, 75 nt, Human
uccuagaaaucuaauuauucaguuauucaugacaauauuuuuuuaacaguaagaaauucugagugucuucuugga

SEQ ID NO: 4411 - RNA, 78 nt, Human
cgagugugugcuggagaaggccuggcucgcauggaguuguuucuuuuguugugugccauuuugcagcauuuuaauuug

SEQ ID NO: 4412 - RNA, 77 nt, Human
gcccuacauggaugacugugguggcaugagauucagcgguucaucacccucgugcccuccaaccugccccaugaagc

SEQ ID NO: 4413 - RNA, 61 nt, Human
uuccugaaugaaaauggaaaguucaaguacagugacuauuucaagccauuuuccacaggaa

SEQ ID NO: 4414 - RNA, 61 nt, Human
gguguugaagacauggauacuggggaaacaccuucugagaccaaaaugucaaaauaauacc

SEQ ID NO: 4415 - RNA, 82 nt, Human
uugugaacagauuaaggauaaauauaugcagaaucgguggugcgucuguguguguguuucuccaauccuugauccguaacaa

SEQ ID NO: 4416 - RNA, 69 nt, Human
aaggcgggguuucaccauguuggccaggcuggucucaaacuccugaccucaaguggauaugccugccuu

SEQ ID NO: 4417 - RNA, 85 nt, Human
gaauaaaagccucuugagccaaggaauuuugaagggccugcaaguauagggucugcuaagcuuccuucagcaaagggguuuauuc

SEQ ID NO: 4418 - RNA, 100 nt, Human
gugggguaaaaccccagacgcaugaaagcugcauggcccuggagaaaaagcugaaccaggcccuuuguggaucuucaugcccugggguuucugcccgcac

SEQ ID NO: 4419 - RNA, 66 nt, Human
gacuauuuaaaaacugguacaacaggucucuacaacgccaagaucuaacuaaggcuuuaaaagguc

SEQ ID NO: 4420 - RNA, 80 nt, Human; identical to SEQ ID NO: 100

SEQ ID NO: 4421 - RNA, 87 nt, Human
ugcaaauuacuuucaaauacauuuugacauuaaagucaggcaauucacuuggaagaauguuauaaugaaugucacugaauuuuugua

SEQ ID NO: 4422 - RNA, 82 nt, Human
uggaaaggagacaaaguaaaggcucacuauggaggauucacuguacagaaugaagccaacaaauaccagaucucagugaaca

SEQ ID NO: 4423 - RNA, 63 nt, Human; identical to SEQ ID NO: 722

SEQ ID NO: 4424 - RNA, 60 nt, Human; identical to SEQ ID NO: 723

SEQ ID NO: 4425 - RNA, 89 nt, Human
ccugggccugcccacucccacgcccuucaccaaugccguccagcugcugcugacgcugaagcuggugagccuggccagugaaguccagg

SEQ ID NO: 4426 - RNA, 95 nt, Human
gugcccgcccuggccccacggcagaaucagcuucuggguccaucggaggauccgagugugaauucccugcaagaacguggggagagugugggcgc

SEQ ID NO: 4427 - RNA, 66 nt, Human
agauguggcuggucggguauugacauccaagagugccuaggguguaacuaugauuauggcaaaucu

SEQ ID NO: 4428 - RNA, 71 nt, Human
gaugaggcagauaggaugauugacaugggcuugagccagauguccagaagauccuggagcacaugccuguc

SEQ ID NO: 4429 - RNA, 101 nt, Human
ugguggcaucuccagagaagaccaggcuucaggcugcgcauggguugugagauugugauugcuaccccugggcguuugauugaugugcuggagaaccgcua

SEQ ID NO: 4430 - RNA, 131 nt, Human; identical to SEQ ID NO: 1788

SEQ ID NO: 4431 - RNA, 61 nt, Human; identical to SEQ ID NO: 823

SEQ ID NO: 4432 - RNA, 61 nt, Human
ggugacaacaugcuggagccaagugcuaacaugccuugguuccaagggauggacagucacc

SEQ ID NO: 4433 - RNA, 79 nt, Human; identical to SEQ ID NO: 1810

SEQ ID NO: 4434 - RNA, 64 nt, Human
cccucccaaaggcggcaagcuccuucccgggagauggacggcagcggagccgcagaggggcggg

SEQ ID NO: 4435 - RNA, 76 nt, Human
gcguucugacgcuuuguacgcucugcguucccaugggccaggaacgcggaugggagacaacacagccucgggaugc

SEQ ID NO: 4436 - RNA, 60 nt, Human
ggugacaacaugcuggagccaagugcuaacaugcuugguucagggauggcacacgucacc

SEQ ID NO: 4437 - RNA, 87 nt, Human
caccagccgccuccaccaugccgccgaaguucgaccccaacgagaucaaagucguauaccugaggugcaccggaggugaagucggug

SEQ ID NO: 4438 - RNA, 100 nt, Human
ggcuuggugccccccggguggggguccccgggggcccccuccucagucuccuugggacccugggccuucucggggcacccccauuuuuggggccaaagcc

SEQ ID NO: 4439 - RNA, 72 nt, Human
ucaacaguggugcuguggaaugcccagccaguuaagcacaaaggaaaacauuucaauaacaggaucauuuga

SEQ ID NO: 4440 - RNA, 69 nt, Human
uuuguugccuccaaaacucauguugaaaauuaauuccuaauggcaauauugagaggugggguuuuuaag

SEQ ID NO: 4441 - RNA, 71 nt, Human
ugagagaauagcaucuuugugggggauuuuuuuuauauauauuucuagacaauaaagauuguuguuuuuca

SEQ ID NO: 4442 - RNA, 69 nt, Human
ggagcagcggcgcuugaggacccggggagacccucaagaaucgacccaucaggacgccagagcugcuuc

SEQ ID NO: 4443 - RNA, 84 nt, Human
ggggagccgccugccccuggcgcugcccccggccucccaggguugcucuucagggggcggcggcggcggcggcggcggcuccuc

SEQ ID NO: 4444 - RNA, 70 nt, Human
gcugaguaaacuauaacuguuaaacuuaaguuccagcuuuucucaaguuaguuauaggauguacuuaagc

SEQ ID NO: 4445 - RNA, 61 nt, Human
gugcuuaagggcuuccggaacggggcugucuauggagccaaaauccgggccccucacgcgc

SEQ ID NO: 4446 - RNA, 61 nt, Human
ggccuggacaacuucggggacuuugacugggucaucgagaaccauggaguugaacagcgcc

SEQ ID NO: 4447 - RNA, 65 nt, Human
gugacgcagacgguccgcguuguagcguuggagcagagccgacagcagcggggcuggguguucac

SEQ ID NO: 4448 - RNA, 64 nt, Human
uccgcuccagacuuuagucacuagguucuaggagugagcuggggccugcugagguggggguggg

SEQ ID NO: 4449 - RNA, 80 nt, Human
caggaccauagaugauacaugucagugcuguggaaugugcauucucugaguguuguuuugugguaucauugucuuuccug

SEQ ID NO: 4450 - RNA, 62 nt, Human
guuugaucugucagccaguacucccauuaaauucaguguaguuucacuugauagaaucagau

SEQ ID NO: 4451 - RNA, 67 nt, Human
uguuagcagcagcuucauccuccuucugauuaaaguaaguagaaaugggauguuuuguuuaauaaca

SEQ ID NO: 4452 - RNA, 64 nt, Human
gauuucauacuggagagaaaccuuacaaaugugaagaaugugacaaagcuuucaguuucaaauc

SEQ ID NO: 4453 - RNA, 64 nt, Human
ggugucagcgcugucgggggccacggccggcauccucggccucaccggccucuacggcuucauc

SEQ ID NO: 4454 - RNA, 109 nt, Human; identical to SEQ ID NO: 831

SEQ ID NO: 4455 - RNA, 75 nt, Human; identical to SEQ ID NO: 74

SEQ ID NO: 4456 - RNA, 87 nt, Human; identical to SEQ ID NO: 76

SEQ ID NO: 4457 - RNA, 64 nt, Human
uguguccuccaccaugcacucaccccuagcccugguuagcugacagucagcuguggggaacaca

SEQ ID NO: 4458 - RNA, 99 nt, Human
ggucguccagggagaacuuccuuuccagggcuccauccuccagguaucggaauuccguauggguccaggguggaaaacuucucuagaauauaggcagcc

SEQ ID NO: 4459 - RNA, 67 nt, Human
cgguggcuccacaagcgcguaacacggccgcggcggcgcccugccgacccgcgucuuuguggccccg

SEQ ID NO: 4460 - RNA, 65 nt, Human
gcccagguucacaagugugcaucuuuuggcuucggcgacccuuugcgcaaacacaccaccugggc

SEQ ID NO: 4461 - RNA, 66 nt, Human
ggccaucugaucuauaaaugcgguggcaucgacaaaagaaccauugaaaaauuugagaaggaggcu

SEQ ID NO: 4462 - RNA, 60 nt, Human
ggugacaacaugcuggagccaagugcuaacaugccugugguucagggauggaaagucacc

SEQ ID NO: 4463 - RNA, 77 nt, Human
gcgcccccuuggcgccggguguccugccgcugcuugcgcagcggcccuuguuucuucuuacccguuguuaggggcgc

SEQ ID NO: 4464 - RNA, 87 nt, Human
ggagcagauacgguauuuacaugaggaauuccagaguccuggucagcuccagguuggcugaaggcuugaugucgacugaugugaucc

SEQ ID NO: 4465 - RNA, 69 nt, Human
ugaaugaccgggcggggguuauaguacgaacuugacuggccgucguuuuacaccugcguaugucguuca

SEQ ID NO: 4466 - RNA, 75 nt, Human
ugguggaaaaggguguauugacaacagagaaacagaacuuccuacuuuuugacaugacaacacauccccucacca

SEQ ID NO: 4467 - RNA, 82 nt, Human
gagcauuguuuuucucuagauaauuuuauauuuuugaguauaccccacuuccaaguguuuuuuguuuuguuuugcuuuguuu

SEQ ID NO: 4468 - RNA, 64 nt, Human
agccauggccaguacagugguagcaguuggacugaccaugcugcugagggauugcaggccgguu

SEQ ID NO: 4469 - RNA, 61 nt, Human
guaauguauaugagguacuaagcuuuuauaaauaaaauggcucagagcuacaauuuauuac

SEQ ID NO: 4470 - RNA, 94 nt, Human
cugagucagcgcacgaucacugucgggguguacgaagcggccaagcugcucaacgucgaccccgauaacgugguguugugccugcuggcggcgg

SEQ ID NO: 4471 - RNA, 63 nt, Human
gcucucucccugggcgaccugcaguuugcaauaugacuuuggaggaauucucggcuggagagc

SEQ ID NO: 4472 - RNA, 72 nt, Human
gguuuucacaugccaucaucuuuaauucucccagcaauggguccacgggguggccaugggauggggauuacc

SEQ ID NO: 4473 - RNA, 85 nt, Human
uuagagggaaggucuagaauuuccgugcuccuuauaaaauuaccuugaauggauuuuaagaggguaaugaaaccuuccuuucuga

SEQ ID NO: 4474 - RNA, 71 nt, Human
gcauggaggugugcaacccuaaaaaaucuucgggugacaaccuggacauugucaggagcacaccuuugugc

SEQ ID NO: 4475 - RNA, 82 nt, Human
cgugggaacugguguucugcauugcaguagguauuugaaaccaauuucuaauagguaguuuuuauagaacuaaguuccugug

SEQ ID NO: 4476 - RNA, 78 nt, Human
ggcgggaggacaauauuauucauucgauuuuuccuucgacauccauagugaaucagugaguaauaauuaaucaacgcc

SEQ ID NO: 4477 - RNA, 69 nt, Human
guaauuaaucauguuccgucuguggugcaaaaacauuaauucaugcaucucaagaauaacauuaguuau

SEQ ID NO: 4478 - RNA, 73 nt, Human
uuuaaacgaguggccgggagcaaucugccaccugcuggggaggcagagacccugcaauggccaccucuuuaaa

SEQ ID NO: 4479 - RNA, 75 nt, Human
ggaacuauuuggucaucuuuugagaaaaaaauauacaaagaagucaucuuuucauuaaguggauucccugguucc

SEQ ID NO: 4480 - RNA, 60 nt, Human
ugacacaggggccgcgcuguugagaguacaccuuagagcucgguuugcaacgcuguguca

SEQ ID NO: 4481 - RNA, 99 nt, Human
ggcggccgcgggccccccauugguucuaggguacaccguuggccccaugcggugguucccacaagagaacaccccgggggccaaggacacaagguggcu

SEQ ID NO: 4482 - RNA, 70 nt, Human
cacaacacgcugucuucacagccaaaggggugcgcgagggcaucagaguggaucggugaagugugucgug

SEQ ID NO: 4483 - RNA, 76 nt, Human
ccgacggcccacgggacaucacguaagcgcagacacgcugaccgucaggaacggauggucccacauggguugcagg

SEQ ID NO: 4484 - RNA, 66 nt, Human
gagucuauccaaaaucaccaccaccgugggccuaaacaucgcgcacuguggaugugggaaaggcuc

SEQ ID NO: 4485 - RNA, 100 nt, Human
guauuuugacaaaauacgaaguggagauuuacacuacauuguacaagggaaugaaagugucacggguaaaaacucuaaaagguuaauuucugucaaaugc

SEQ ID NO: 4486 - RNA, 64 nt, Human
guuguucuguuagucgcuaacuuaguaagugcuuuucuuauagaaccccuucugacugagcaau

SEQ ID NO: 4487 - RNA, 85 nt, Human
auuagcuggcagccuccagaggugauccaacaguaucugucaggggguauguguggcuaugaccuggauggcugcccagucuggu

SEQ ID NO: 4488 - RNA, 62 nt, Human
ccucaagcaucucuggaagccugcuguggaggccuauggagaguuucucugcauguuugagg

SEQ ID NO: 4489 - RNA, 61 nt, Human
ggguggcggcgaggacgagucugugcuccaucagcugccgcacccgccgccucccgccccc

SEQ ID NO: 4490 - RNA, 79 nt, Human
gguuggguugucccugggcggccaccuccagaagagaagcgggcaaugacugggggggacguccagaaugagcuggacu

SEQ ID NO: 4491 - RNA, 67 nt, Human
augaaauaccaaaguaauucuugaaaggcugguugaaccaccagaaaggaguuauugggggaaucau

SEQ ID NO: 4492 - RNA, 63 nt, Human
ggauugaaacugucucaggaccuugaugaucuugcuauucucuaccuggccacaguucaagcc

SEQ ID NO: 4493 - RNA, 99 nt, Human
ugccuguguccugucgcaagaggugaguccgucuugugggugcugcugucugggugccugugccucaggggauucgccuucuguacaggaagcaaggca

SEQ ID NO: 4494 - RNA, 85 nt, Human
gcggggaacaccaauggcgggguacuugaagcugguguguguuuccuuucagcgucaaggguuccacacuguugggagucgcugc

SEQ ID NO: 4495 - RNA, 77 nt, Human
gcugguguguguuuccuuucagcgucaaggguuccacacuguugggagucgcugcaagaaucggacaggcgcugagc

SEQ ID NO: 4496 - RNA, 75 nt, Human
gugcagaaggucaacgccgcaggcacagaucccagcucuccuguuggcuucgugcuugggguagaucuucuucac

SEQ ID NO: 4497 - RNA, 85 nt, Human
guguuuuaauauauuuacugcauuguuucucaauggaccagucaccagagacuaauuauugcacuuaaauauuugccugagauac

SEQ ID NO: 4498 - RNA, 79 nt, Human
caaguuccagccuccaugcccacagcagccaugaccaguaacuggcuagccccagggaagggagagccucaggagucug

SEQ ID NO: 4499 - RNA, 62 nt, Human
acacacacagagagagcagaggggggagacacacucucacacucucucucucugcugugugu

SEQ ID NO: 4500 - RNA, 72 nt, Human
cagaggguuacacauacucaacucacagccagacggguacuccguggcuguggugugugugcacacucucug

SEQ ID NO: 4501 - RNA, 69 nt, Human
ggcaagacagggacuagcagccagagccaguaaugccuuccugguuugcucugagggguccugucuucc

SEQ ID NO: 4502 - RNA, 64 nt, Human
gcggcucaucccagauggcuguggggucaaguacauccccagucguggccucuggacaaguggc

SEQ ID NO: 4503 - RNA, 91 nt, Human
auccuggcccaucgugcugcugccccacgguucgguaccacacgaauggugcgcugccggccgcggcuucagccuggauggagcucagggu

SEQ ID NO: 4504 - RNA, 69 nt, Human
ccuucgcuagucuccguauggcccgugccaacgcccggcucuucggcauacgggcaaaaagagccaagg

SEQ ID NO: 4505 - RNA, 67 nt, Human
guccagaggccgcauaucugcuggauggcugaccugcaacgagucauccagacuggccccagaggac

SEQ ID NO: 4506 - RNA, 84 nt, Human
ccugcucaguguuuggcaucugguggcuaagcuggucuucagaguucaagacagcuucauucucaugccuggcaccuugguagg

SEQ ID NO: 4507 - RNA, 62 nt, Human
gucucuuugggcggaagacaggucaggccccuggauacucuuacacagccgccaauaagaac

SEQ ID NO: 4508 - RNA, 105 nt, Human
ggaguuucuuccaaacuucaccaucuggauacugguguuucuuuacagauuccuccuucauuucuguugaguagccgggauccuugggaggcauguaggaagccc

SEQ ID NO: 4509 - RNA, 62 nt, Human
aaugcaacagauaguucuuccacauccaaucauaagcaggaugucggcauuucugcugcauu

SEQ ID NO: 4510 - RNA, 65 nt, Human
gaagcgcagcggaacucgaccggauccaacccaguuaguuacuuccugucuagaguuguagcuuc

SEQ ID NO: 4511 - RNA, 64 nt, Human
ggaggcgagacccccuaguaacagaggcgguggcuacugcugcggccacuggguuucggccucu

SEQ ID NO: 4512 - RNA, 82 nt, Human
gaguuagcgguggguggaggagggggccuuggcaucuucucuuuaugucucugagcugugccuucgccaccccuucuggguc

SEQ ID NO: 4513 - RNA, 82 nt, Human
uuuguggggacauuggucugucggugccaguacauccuccuccaugaugacuucccuauggacaaccucaucucccugcuca

SEQ ID NO: 4514 - RNA, 69 nt, Human
gguguaaauguugagccuuuuuggccuggcuuguuugcaaaggcccuggcaacgucaacauugggagcc

SEQ ID NO: 4515 - RNA, 66 nt, Human; identical to SEQ ID NO: 50

SEQ ID NO: 4516 - RNA, 72 nt, Human
uccuguggccuucaauugucuucagagguggaugagaaaaagacaccauuugugaggggguguggcacggga

SEQ ID NO: 4517 - RNA, 92 nt, Human
ccccagaugcaaugcgaucacagggucguuaccaucuucuuuauuaauuggucaacauuuugugugauccagcauuugagugacacuggugg

SEQ ID NO: 4518 - RNA, 68 nt, Human
ccugaguugggacagcccuggagcuggacagacccagccaucaucacagguauuccagcgucuucagg

SEQ ID NO: 4519 - RNA, 64 nt, Human
uuccaauacuuagaaaauuauuguuugucugugcgcauaauaaugaauaauuuggguagaggaa

SEQ ID NO: 4520 - RNA, 64 nt, Human
cgaugccgucacggggcucaguggcagcgggccugccuaugcauucauggcucuggacgcauug

SEQ ID NO: 4521 - RNA, 79 nt, Human
cgccccugcgcuguccgcccuuccccuagcguuacuuccggucccucgcugaggggguucgugcggcucccaggaggcg

SEQ ID NO: 4522 - RNA, 96 nt, Human
cuuuuaagcacaguaauagaggugaguauuauuagcauccaacccaaaaacaaaucuuuggccugucauccugaaagcccacugcuggcuugaagg

SEQ ID NO: 4523 - RNA, 81 nt, Human
cucccagcccagaacuuccagaugcccuggcaccucuagggaccaacugggacucauuauggaagaauggggugagaggag

SEQ ID NO: 4524 - RNA, 67 nt, Human
gguggaagaggacuggugucugucuguccuccgcuccuaccaggcagaacacgggcccgacuucccc

SEQ ID NO: 4525 - RNA, 129 nt, Human
ugguggaugucgauacaauccuggguuguccgaguccugugaaugucacuuucuggcauaaauguaauauccacacuuuagugauguccacaggaaacgcaaacucauguuacuuacuacgcuuugcua

SEQ ID NO: 4526 - RNA, 66 nt, Human
ggaggaguugcgcgcgcugugccgugugcaagcgcugcggcagggcuccgagaccucggcuccucc

SEQ ID NO: 4527 - RNA, 71 nt, Human
ggaaagcuccacacaccauaggcaguggugcuaaaugcaacagaagccuuagugcgaacuggaacuucucc

SEQ ID NO: 4528 - RNA, 83 nt, Human
ggaggcugggaggccgcccccagccgcugcuacccacgcagagccgggcuggcuucgcgggggcggcgggcggcccgagcccc

SEQ ID NO: 4529 - RNA, 92 nt, Human
uguguaccggcacgcccaccgaggcucuggcguccuuuugacuacauuuguccgggagggcaaggucgagccguuggagggugccguggcca

SEQ ID NO: 4530 - RNA, 91 nt, Human
cgcccggccauggcugcgguggcgcugaugccaccgccgcugcugcugcugcugcuguuggcgucgccgcccgccgccuccgcgccguccg

SEQ ID NO: 4531 - RNA, 78 nt, Human
cugggagcugcgugcugcuggcccugugggggagcccuggggcuguaccacacggcgcgguggcaccugcgcgcccag

SEQ ID NO: 4532 - RNA, 81 nt, Human
cuaguguaggguuuuuugacucccuuuagugaaaaacuuguuaagggugguauauuaaugggaaauggagagacuaccugg

SEQ ID NO: 4533 - RNA, 87 nt, Human
gaagacuugguuuguugaauaugacaaugaaaucuguguguaucagauuuuuauugaagcauucaucagcagccucaaccaguuuuc

SEQ ID NO: 4534 - RNA, 87 nt, Human
uaaacauuucaugggagacaauaucauaaggguaaagagguagaaucacuuucagacuuagaauaauguugauucccaagugcuuua

SEQ ID NO: 4535 - RNA, 91 nt, Human; identical to SEQ ID NO: 3000

SEQ ID NO: 4536 - RNA, 63 nt, Human; identical to SEQ ID NO: 3401

SEQ ID NO: 4537 - RNA, 131 nt, Human
cgcgugccccgcccgcuggagcaccugccaccgaggcgcgcguggggccacugccguggcggcggcugcccuccucacacucggcuccgcgccgccuccggccaccgugcgcucccgcguggggcgccucg

SEQ ID NO: 4538 - RNA, 105 nt, Human
uccggaguaaacggcucuucauuagcuuggaguggccgcaggucccgugaccagcaccccgcgagacccugugcgacagcugggcugaugcuccguuucucuggg

SEQ ID NO: 4539 - RNA, 65 nt, Human
ggaggucaugaaaccgccguagcgcuuguccuugggcgggcugccccagcggaagugcuccaucc

SEQ ID NO: 4540 - RNA, 65 nt, Human
aggccagugucagggucggaguggccuggcucuuagcacugaccgaccauugccauuucuggccu

SEQ ID NO: 4541 - RNA, 71 nt, Human
ccucucagcuaguuggcgggggugcuggacuggacucuuguucacuuuaccuucugccaaaugcagagagg

SEQ ID NO: 4542 - RNA, 73 nt, Human; identical to SEQ ID NO: 2436

SEQ ID NO: 4543 - RNA, 69 nt, Human
uacaaagcaaauaagauauacugagccucaacagauugccugcuccucagagucucuccuauuuuugua

SEQ ID NO: 4544 - RNA, 70 nt, Human; identical to SEQ ID NO: 2437

SEQ ID NO: 4545 - RNA, 130 nt, Human
ggcucaugcauguaaucccagcacuuugggaggcugaggugggcggaucacgaggucagggguuugagaccagccuuaagugaucaacccgccgaggccucccaaggugcuaggaucacaaccgugagcc

SEQ ID NO: 4546 - RNA, 124 nt, Human
cagacugagagaaugcagaagagggcugaacgauucaauguaccugugagcuuggagaguaagaaagcugcucgggcagcuagguuugggauuucuucaguuccaacaaaaggucugucaucug

SEQ ID NO: 4547 - RNA, 71 nt, Human
uuucuucaguuccaacaaaaggucugucaucugauaacaaaccuaugguuaacuuggauaagcugaaggaa

SEQ ID NO: 4548 - RNA, 116 nt, Human; identical to SEQ ID NO: 208

SEQ ID NO: 4549 - RNA, 62 nt, Human; identical to SEQ ID NO: 206

SEQ ID NO: 4550 - RNA, 93 nt, Human; identical to SEQ ID NO: 207

SEQ ID NO: 4551 - RNA, 73 nt, Human
acggacacgguuguuuacaccagcaaaucguuccuugccgaaaagcaaaacugguuccagcagcuuguacugu

SEQ ID NO: 4552 - RNA, 66 nt, Human
gcgggcgcgguucaaauauuuccaggggccgcccguucaccuugaugagaccauugccgcguuugc

SEQ ID NO: 4553 - RNA, 67 nt, Human
cuugcaaagcauucacuuaauauuuuaguugaaacaaacuuaaaagguauauggguuuucggugaag

SEQ ID NO: 4554 - RNA, 87 nt, Human
gaccuuugugaguuccagugguguccuuggcacucagagguucagcugaagucccgacuggugaggacaaguggagccacaaggguc

SEQ ID NO: 4555 - RNA, 64 nt, Human; identical to SEQ ID NO: 931

SEQ ID NO: 4556 - RNA, 86 nt, Human
gccagcgccugagcauccccgucaugguggucacccugggaccccacgcgggaccagugcuucggggaccgcuuucagccgccugc

SEQ ID NO: 4557 - RNA, 75 nt, Human
ccaggugaggaagugaucccaaaagaugaaaauggaaaaauacuauuugacacaguggaucucugugccacgugg

SEQ ID NO: 4558 - RNA, 71 nt, Human
gccgugggagaaguguaaagaugcaggauugggccaaguccaucgggguguuccaacuuucaaccgcaggc

SEQ ID NO: 4559 - RNA, 89 nt, Human
caguugguauuugagucuccuagaaucuuucaguccauuuuuuauagaaucauauauuugauaaauaggggaaauuuauguaucuuaug

SEQ ID NO: 4560 - RNA, 88 nt, Human
gagacuucuuucuucagccuuugucuagaauguucuuacucuuuuuaacauugagcaauuuucauuuuccaguugguauuugagucuc

SEQ ID NO: 4561 - RNA, 87 nt, Human
uuugagauggaguuacccuguuguugcccaggccuaaauuacacuaauuauucuuugcauuuuuuggcuaauuccuccugucucaaa

SEQ ID NO: 4562 - RNA, 85 nt, Human
gauagaucaguugcuauauuuucugguguagggucuuucuuauuuagugagaucuagggauaccacagaaaugguucagucuauc

SEQ ID NO: 4563 - RNA, 110 nt, Human
gugccaauacaggacuaauugucagccuagaaaaggaacuugcuccauuguuugaagaacugagacaaguuguggaaguuucuuaaucugacagugguuucaguguguac

SEQ ID NO: 4564 - RNA, 102 nt, Human
ggauuuuagucuguaacaaaguugucgcuauugugcuucauccguucagcugaacaggaggauggauacagccgcgaggcuaaaaaacggauuuccucuucc

SEQ ID NO: 4565 - RNA, 81 nt, Human
ggugauaagugucgcuuucuacguauugcaggugguguuggaauuaccuguuggauuuuagucuguaacaaaguugucgcu

SEQ ID NO: 4566 - RNA, 66 nt, Human
uucuuggacuuuaugagauagucuuauaagaaucacgauuuucuacaccugucauugagccaagaa

SEQ ID NO: 4567 - RNA, 65 nt, Human
uguccucugccaugcgaccgcucaguuaucacacugcacugcuguuggguugcauguggaguaca

SEQ ID NO: 4568 - RNA, 71 nt, Human
cucgagcccagccucucccugccaaagcccaacucccagggcucuggaaauggugaggcgaggggcuugag

SEQ ID NO: 4569 - RNA, 63 nt, Human
gaacgcccacccacgaaggcccagggcgccagacggccccgaaaaggcgcucggggagcguuu

SEQ ID NO: 4570 - RNA, 68 nt, Human
cuaaaaguuuauccuuuauguguguuaaaauugcaauucuauaucagaaaugaaggaaacacuuucag

SEQ ID NO: 4571 - RNA, 81 nt, Human
uguuauguuauuaaaucaaaacaaaacacaagguacggauuacuucacuguccuuuaucuugauugguuucuuacaaaaca

SEQ ID NO: 4572 - RNA, 60 nt, Human
augccucagugauaagaaagaugccuccuugugucucacuguuuucuagcacugaaacau

SEQ ID NO: 4573 - RNA, 68 nt, Human
gcucuguaacuuaggacaucacuugauuaaaauuauagucuccaaauauaguguuuuaggaaaagggc

SEQ ID NO: 4574 - RNA, 68 nt, Human
gcgucguccgagugagcagcggugcuggccgugugggacccgggcccgcuuagcaccauggacggggu

SEQ ID NO: 4575 - RNA, 66 nt, Human
ggguucaaagccuuuauugggucagggcuugcuccagagcucaggggccagguaggucaggagccu

SEQ ID NO: 4576 - RNA, 78 nt, Human
aggucuugcaggaagcuugacaaaugcccucagcaauggccugcugucugggggccuguugggcauucuggaaaaccu

SEQ ID NO: 4577 - RNA, 63 nt, Human
aagcugggcccgcgacucaaaggggacugggauggggaucucguuggacugcguggcuagcuu

SEQ ID NO: 4578 - RNA, 66 nt, Human
gaggcacagccaggggcggcagcaggggggggcauccgggcuaaggcuuuacuuggcggcagucuc

SEQ ID NO: 4579 - RNA, 91 nt, Human
uuuuuuuuuuuuuuuuuuuuuuuuuuuuuuuugacaggggguugcuuugaacuuuauuugaaaaaaacaaaaaauaaauguuucaaaaaaa

SEQ ID NO: 4580 - RNA, 71 nt, Human
gugucuuagugcuucauucuauugguuuauuggaacauguaauaaauaggaguagugauguauuaaaacac

SEQ ID NO: 4581 - RNA, 78 nt, Human
gaaccuuauugugcucuuguuggcuccuauuauuggauuuuccaucgugccguuggaguugcagcgcacauuuuguuu

SEQ ID NO: 4582 - RNA, 84 nt, Human; identical to SEQ ID NO: 135

SEQ ID NO: 4583 - RNA, 61 nt, Human; identical to SEQ ID NO: 136

SEQ ID NO: 4584 - RNA, 85 nt, Human
ggcccucauuuuguauuuuuuaaauuuggguuuuauugaaagugauuucuuguggaaagcucagaauguaaaaauauuauggguc

SEQ ID NO: 4585 - RNA, 75 nt, Human
uucuuauagucuccuaacauuugucucuagccuuugccuuuguacaaucacagauauccuauggagauuuaagga

SEQ ID NO: 4586 - RNA, 77 nt, Human
ccaaguuuaauuuauaggcuuucguggacuucuggaagucaacugacuucgaaguuaggacagcauggggggauugg

SEQ ID NO: 4587 - RNA, 92 nt, Human
gaguagcuaugacaaugaggaguuuuaagagugagaaaacacaaugucuaugagaacauggacuucucuuuuagaggcuccaugagcuacuc

SEQ ID NO: 4588 - RNA, 64 nt, Human
gguuaugaggguugguuaagguacgagaggcacaaagugaaagaagccuucacuacuuuaaacc

SEQ ID NO: 4589 - RNA, 61 nt, Human
ccuguggcauuuuccuuauugaauauuaacauaaguacacacugugagacucugcuacagg

SEQ ID NO: 4590 - RNA, 73 nt, Human
cuguuguggaagaaaagcaaaucgugacgagaaaauggcucuguuaucacaggucugcacguuuacauaacag

SEQ ID NO: 4591 - RNA, 88 nt, Human
cgcugggcaggacgacaaacacgagacgccacuguggaaugagcaacuucggagcacggggugacuugcuugggaccgugcccacgug

SEQ ID NO: 4592 - RNA, 84 nt, Human
gacugccucaggugacgggccgugagaggggacgggucaggagccuucccaagccuucuccucagcccgacacccauggccauc

SEQ ID NO: 4593 - RNA, 65 nt, Human
ggcuaggaugccagacacagccauuugcagaaaucaggcacagugacugcagcucacguccagcc

SEQ ID NO: 4594 - RNA, 91 nt, Human
cucaguucugccuccugacuaugacaguaaucccacccagcucaacuaugguguggcaguuacugauguggaccaugauggggacuuugag

SEQ ID NO: 4595 - RNA, 79 nt, Human
ggccacguacaccgacaaguuguucaaguuccgcaauaaccggugggaagacauccugagcgaugaggucaacguggcc

SEQ ID NO: 4596 - RNA, 95 nt, Human
ggcggcggggccgaugagcgggauggauggcuccgagcgcugaccccggcauguccaggauguuaccguuccugcugucugcucugguuucugcc

SEQ ID NO: 4597 - RNA, 72 nt, Human
ggggcugggagcaagcauggcggcggcgccggcggcagauggcggcagcgaagcgcccgcuucccacgcccc

SEQ ID NO: 4598 - RNA, 78 nt, Human
ccccugcuguauccugcaucauuagaaaaaucaaagccauuggugggaucauucugacagccagucacaacccagggg

SEQ ID NO: 4599 - RNA, 60 nt, Human
auacuuguauuuugugguggcaaauguuugguagaacuguaauuagaaaaauacaaguau

SEQ ID NO: 4600 - RNA, 102 nt, Human
guuucauggaaguuguuuauaaaauucaaagguauuucauuuaggugaaaagucuuauuuauuaaagugguuugaauaaaguagaucaaaacuuccagagau

SEQ ID NO: 4601 - RNA, 79 nt, Human
cuggcggccggcgggcacagccggcucauuguucugcacuacaaccacucgggccggcuggccgggcgcggggggccgg

SEQ ID NO: 4602 - RNA, 66 nt, Human
gcggucgcgacgcugggucuacuauugccuggugaacaucacgcugagugaccugcucacgggcgc

SEQ ID NO: 4603 - RNA, 69 nt, Human
ggcugucgguggccgccagcugccugguggugcuggagaacuugcuggugcuggcggccaucaccagcc

SEQ ID NO: 4604 - RNA, 76 nt, Human
cugccggaaguuuaccagcucacuuucggcgucgcgcccgccuccguggagcaggccggaaguggcuuuccggcag

SEQ ID NO: 4605 - RNA, 67 nt, Human
cggaccgcuggaucgugccgggcgggggcauggagcccgaggaggagccgggcggugcggcgguccg

SEQ ID NO: 4606 - RNA, 85 nt, Human
gacacggaccuacgaccccgagggguucaagaagcgggcggcgaugccugugcuuccggagcgagcgcgaggacgagguccuguu

SEQ ID NO: 4607 - RNA, 64 nt, Human
gguuggccacacagcagcgagaggcgagaggaggcugccucgaggaugaagugcaaacccaacc

SEQ ID NO: 4608 - RNA, 89 nt, Human; identical to SEQ ID NO: 2239

SEQ ID NO: 4609 - RNA, 86 nt, Human
ccgucgucagggauagcaaaagcccuggucagggacuguccuccaguuugccggaaccagguacagugaaguuauccugacaccgg

SEQ ID NO: 4610 - RNA, 63 nt, Human
guugaugaucccaccuugagggagaagcgguugcagcuguuucaucucuuguggacagugagc

SEQ ID NO: 4611 - RNA, 75 nt, Human
ucguguucagcaucagccucuucccugcccugugguuccuugccaaaaaacccuggacggaguauguggacauga

SEQ ID NO: 4612 - RNA, 107 nt, Human
guaacugcaaagaugcuguccgugcgcguugcugcggccgugguccgcgcccuuccucggcgggccggacuggucuccagaaaugcuuuggguucaucuuucauugc

SEQ ID NO: 4613 - RNA, 85 nt, Human
uccuugaacuuggaaccugacaauguugguguugucguguuuggaaaugauaaacuaauuaaggaaggagauauagugaagagga

SEQ ID NO: 4614 - RNA, 128 nt, Human
aauagcugggauuauaggugcccaccaccaggcugggcuaauuuuguauuuuuagcugaaacccagucucuacuaagauacgaaaauuagcugggugugguggugugugccuguggucccagcuacuu

SEQ ID NO: 4615 - RNA, 85 nt, Human
gagaaucgcuugaaccuggaggcggagguugcagugagcagagauugcaccauugcacuccagccugggcaacagagcgagacuc

SEQ ID NO: 4616 - RNA, 68 nt, Human
ugauguauguuaauugucagaaacugcugaaugccuuguuuaguugucacaaacaaauucacauauca

SEQ ID NO: 4617 - RNA, 67 nt, Human
uuccuuuuuuccugcuuuuuuuuuuuuuuguuaaaacauacugggagaaaguaaagaaaaacuggaa

SEQ ID NO: 4618 - RNA, 97 nt, Human
cauuagucuuuuauuauaaccauauugaauggggucgcuuugccaaaaggagaaaucauuucuuaaaucaguaugaguuauagcauaaagauggaug

SEQ ID NO: 4619 - RNA, 76 nt, Human
gagaaagcagucuggccuuugagaaggaagccuggcuugccaggugccauccucaauguauccggccucuucucuc

SEQ ID NO: 4620 - RNA, 60 nt, Human
uguuuaacgaacuuuauauaucuuuuuaacaguauaaaaagagagcuuuaguaaguaaca

SEQ ID NO: 4621 - RNA, 75 nt, Human; identical to SEQ ID NO: 74

SEQ ID NO: 4622 - RNA, 80 nt, Human; identical to SEQ ID NO: 887

SEQ ID NO: 4623 - RNA, 91 nt, Human
gacggccaugcuggucugcaagucagaguccgugccaccugucacugacugggccugguacaagaucacugacucugaggacaaggcccuc

SEQ ID NO: 4624 - RNA, 109 nt, Human; identical to SEQ ID NO: 831

SEQ ID NO: 4625 - RNA, 87 nt, Human; identical to SEQ ID NO: 76

SEQ ID NO: 4626 - RNA, 67 nt, Human
gucugaaagcccccgguaucauuccucgaauuucagugcgggaaccaaugcagacuggcauuaaggc

SEQ ID NO: 4627 - RNA, 64 nt, Human; identical to SEQ ID NO: 4082

SEQ ID NO: 4628 - RNA, 103 nt, Human
gccaaagaagaagacaagucgcauguuccagacguccaaaacgggguccuugucauaaccaugggagucuggguucuucucauacaaguuuucguccucgggu

SEQ ID NO: 4629 - RNA, 67 nt, Human; identical to SEQ ID NO: 1261

SEQ ID NO: 4630 - RNA, 64 nt, Human
gcuggccgagguguguuugguggccggggccgaggugggaucccgggcacaggcagaggccagc

SEQ ID NO: 4631 - RNA, 65 nt, Human
uccgguuagaaauguuacuugguguuuuuugcuuuugugaaacggccgucccaaagcuggcugga

SEQ ID NO: 4632 - RNA, 74 nt, Human
aacuccgccuggcccugccugcaguacuggccagagccaggccggcagcaauauggccucauggagguggaguu

SEQ ID NO: 4633 - RNA, 61 nt, Human
cuggcggcuggucuacgauuacgggugcaccuccaucgucaugcucaaccagcugaaccag

SEQ ID NO: 4634 - RNA, 75 nt, Human; identical to SEQ ID NO: 74

SEQ ID NO: 4635 - RNA, 71 nt, Human; identical to SEQ ID NO: 77

SEQ ID NO: 4636 - RNA, 75 nt, Human
cuccgagcagauuaugagauugcaaguaaagaaagagaccuguuuuuugaauuagaugcaauggaucacuuggag

SEQ ID NO: 4637 - RNA, 78 nt, Human
cugccaccgccugccugagagaagucgucgcggccgaccccgucgccuccgccggcuaccauguccgcccaggcgcag

SEQ ID NO: 4638 - RNA, 123 nt, Human
ggaccagcucaugggcacggcucgggacggagacgaaaccagacagagggucaaguuuacagaugaccgugucugcaagagucaccuucuggacugcugcccccaugacauccuggcugggac

SEQ ID NO: 4639 - RNA, 87 nt, Human
caggaguccagacaaaagacgggugauuuugcucagguugguagcaacagagguaaugagaaguaguuggauuuuggauauauuuug

SEQ ID NO: 4640 - RNA, 61 nt, Human
uggggaguucuuuccagugcccgaguccauucucacauccaugaagaagguaaaaucccua

SEQ ID NO: 4641 - RNA, 69 nt, Human
agcaugagagagaucugucuaugggaccaguggcuuggauucugccacacccauaaauccuuguguguu

SEQ ID NO: 4642 - RNA, 70 nt, Human
cuuuuuuuaauuugcauuuuuuuucauuuggggccaaaaguccagugaaauuguaagcuucaauaaaagg

SEQ ID NO: 4643 - RNA, 84 nt, Human
uucuagcugccuggggcuggcccugcucagacaaaucugcucccugggcaucuuuggccaggcuucugcccucugcagcuggga

SEQ ID NO: 4644 - RNA, 77 nt, Human
cgcccacugugacgaugucaccgaucuggacgucccugaagcagggggacagguguacagacauguucuugugggcg

SEQ ID NO: 4645 - RNA, 74 nt, Human
gccgacccuccaaguuagcugacuucugggggaacaacaacgagauccucagugggcuggacauggaggaaggc

SEQ ID NO: 4646 - RNA, 70 nt, Human
guuugauccucgcccuguuuccaaaaacgcguacaggcucaucuuggcagccaacagggaugaauucuac

SEQ ID NO: 4647 - RNA, 102 nt, Human
ggggcccacuuugcugucauccgccgaucgucccuggagaagaacccguaccaggcugugcaccaaugggccuucucugcgggguugagccuggugggccuc

SEQ ID NO: 4648 - RNA, 70 nt, Human
gucccgugccccacacucugagucugcccuauccacagcugcugggccucucuguggccaccauggugac

SEQ ID NO: 4649 - RNA, 68 nt, Human
guuacacguuuuccuccaaggagccucggacguugucacggguuuggggucggggacagagcggugac

SEQ ID NO: 4650 - RNA, 64 nt, Human
caagaacacuccuugggcguccuugcuguuuuguuugugaagcuuucuaugcccaguguuccug

SEQ ID NO: 4651 - RNA, 72 nt, Human; identical to SEQ ID NO: 3649

SEQ ID NO: 4652 - RNA, 71 nt, Human
gcuggugcagcgcucgcccuggcugaugaugcggaugggcauccucggccgugggcugcaggaguaccagc

SEQ ID NO: 4653 - RNA, 65 nt, Human
gggcugcucccugcaugaggaggacacccagagacaugagaccuaccaccagcaggggcagugcc

SEQ ID NO: 4654 - RNA, 64 nt, Human
uuuucaauuauccuaagugucuucauuccaucacucuucuuggagaacuucucaauauuggaaa

SEQ ID NO: 4655 - RNA, 78 nt, Human; identical to SEQ ID NO: 99

SEQ ID NO: 4656 - RNA, 65 nt, Human; identical to SEQ ID NO: 247

SEQ ID NO: 4657 - RNA, 80 nt, Human; identical to SEQ ID NO: 100

SEQ ID NO: 4658 - RNA, 78 nt, Human; identical to SEQ ID NO: 99

SEQ ID NO: 4659 - RNA, 65 nt, Human; identical to SEQ ID NO: 247

SEQ ID NO: 4660 - RNA, 80 nt, Human; identical to SEQ ID NO: 100

SEQ ID NO: 4661 - RNA, 103 nt, Human
auacaaaaaauuugcagggcgugguggugcgggccuguggucucagccuccugggcugcugggacuacaggcaccugcccccacaucuggcuaauuuuuguau

SEQ ID NO: 4662 - RNA, 64 nt, Human
ccacuuaaagaauuuacaggccgggcgagguggcucacaccuguaguccuaguucuuugggagg

SEQ ID NO: 4663 - RNA, 63 nt, Human; identical to SEQ ID NO: 2263

SEQ ID NO: 4664 - RNA, 60 nt, Human
gcaagacauguuacuagcacuuugagaaugagucuccuguugagcugguaggauguaagc

SEQ ID NO: 4665 - RNA, 66 nt, Human
gggagaggggauucacaaggugaagaacuggaaccccagcuucccuccagccucuccuccauuccc

SEQ ID NO: 4666 - RNA, 60 nt, Human
gucucuauauuaugucuucauuuaguggugucuuccaugugaacagcauaaguuuggagc

SEQ ID NO: 4667 - RNA, 62 nt, Human
gucuuagguaaauaauguacucucuuaauauguuaauacucaugagaauugggaucugaugc

SEQ ID NO: 4668 - RNA, 74 nt, Human; identical to SEQ ID NO: 4312

SEQ ID NO: 4669 - RNA, 92 nt, Human; identical to SEQ ID NO: 4314

SEQ ID NO: 4670 - RNA, 60 nt, Human; identical to SEQ ID NO: 2705

SEQ ID NO: 4671 - RNA, 72 nt, Human; identical to SEQ ID NO: 1989

SEQ ID NO: 4672 - RNA, 77 nt, Human
cuuuuaaugggaucggcaugagcaaaagcucccucagaguuacgaccgaguuaaauaucagagaguccacgugaaag

SEQ ID NO: 4673 - RNA, 81 nt, Human
gccggccugggugcuuaccagcugucucaggauccaaggaacguuuggguuuuccuagcuacaucugguaccuuggcuggc

SEQ ID NO: 4674 - RNA, 130 nt, Human
ggagaucgugccagugggcuccagcuugggugacaagagugaaacuccaucucaaaaaaagaaaagaaaagaauguuuauucuaugucauuuuaagcuaaugaagggagcuuucuuuuggagaaauuucu

SEQ ID NO: 4675 - RNA, 88 nt, Human
gucucaccugcugaccucugagagccucaguuuucucgucuauaaaauggggauacaaaugacugccucacaggauuguuugggaggc

SEQ ID NO: 4676 - RNA, 75 nt, Human; identical to SEQ ID NO: 74

SEQ ID NO: 4677 - RNA, 87 nt, Human; identical to SEQ ID NO: 76

SEQ ID NO: 4678 - RNA, 60 nt, Human
auagcaacgucauggugaagguggccacucagccggcugacaauccccuugacguucuau

SEQ ID NO: 4679 - RNA, 102 nt, Human; identical to SEQ ID NO: 2701

SEQ ID NO: 4680 - RNA, 87 nt, Human
cguuucgggugcuggcggcugcagccggaguucaaaccuaagcagcuggaaggaaccauggccaacugugagcguaccuucauugcg

SEQ ID NO: 4681 - RNA, 90 nt, Human; identical to SEQ ID NO: 2702

SEQ ID NO: 4682 - RNA, 109 nt, Human; identical to SEQ ID NO: 831

SEQ ID NO: 4683 - RNA, 75 nt, Human; identical to SEQ ID NO: 74

SEQ ID NO: 4684 - RNA, 87 nt, Human; identical to SEQ ID NO: 76

SEQ ID NO: 4685 - RNA, 75 nt, Human; identical to SEQ ID NO: 74

SEQ ID NO: 4686 - RNA, 87 nt, Human; identical to SEQ ID NO: 76

SEQ ID NO: 4687 - RNA, 64 nt, Human
cggcugcagaaguaccgccugcggaguaacugcaaagaugcuguccgugcgcgugcugcggccg

SEQ ID NO: 4688 - RNA, 75 nt, Human; identical to SEQ ID NO: 74

SEQ ID NO: 4689 - RNA, 71 nt, Human; identical to SEQ ID NO: 77

SEQ ID NO: 4690 - RNA, 91 nt, Human; identical to SEQ ID NO: 124

SEQ ID NO: 4691 - RNA, 89 nt, Human
ccccggagccccaaggagccccucaucaguggcuggcucuucuuccgcuacauggcaaucgggggcuaugugggugcagccaccguggg

SEQ ID NO: 4692 - RNA, 93 nt, Human
gagccauuguggacguuccaguuggugaggagcugugggucguguaguugaugcccuugguaaugcuauugauggaaaggguccaauugguuc

SEQ ID NO: 4693 - RNA, 61 nt, Human
gcguugcugcggacgugguccgcgcccuuccucggcgggccggacuggucuccagaaaugc

SEQ ID NO: 4694 - RNA, 81 nt, Human
guauucuuggagcugauaccucuguugaucuugaagaaacugggcgugucuuaaguauuggugaugguauugcccgcguac

SEQ ID NO: 4695 - RNA, 87 nt, Human; identical to SEQ ID NO: 76

SEQ ID NO: 4696 - RNA, 80 nt, Human
ccccucagcacccugccuugucuccaggagguccgaagcucugugggaccucuugggggcaagguggggugaggccgggg

SEQ ID NO: 4697 - RNA, 82 nt, Human
gggcugcggcagggacucggccucugggagguuuaccucgcccccacuugugcccccagcucagccccccugcacgcagccc

SEQ ID NO: 4698 - RNA, 87 nt, Human
ggggaaggggcuagcagguguguaaacagaggguuccaucaggcuggggcagguggccgccuuccgcacacuugaggaacccucccc

SEQ ID NO: 4699 - RNA, 122 nt, Human
cucgugugacaucuugcccgccccucagcacccugccuugucuccaggagguccgaagcucugugggaccucugugggggccaagguuggggugaggccggggaguagggaggucaggcggg

SEQ ID NO: 4700 - RNA, 93 nt, Human
ggaggggaaggggcuagcagguguguaaacagaggguuccaucaggcuggggcagguggccgccuuccgcacacuugaggaacccuccccucu

SEQ ID NO: 4701 - RNA, 93 nt, Human
ggggcacuggccacugagcccccuuggagaagucagaggggaguggagaaggccacuguccggccuggcuucuggggacaguggcuggucccc

SEQ ID NO: 4702 - RNA, 60 nt, Human
ugccuggugcugccaguaagggcgagggcacuccucauacuuacugccggcugccccgca

SEQ ID NO: 4703 - RNA, 130 nt, Human
guccaauuaguggagucugggggagacuugguagagccuggagggucucugaggcucucuuguucagccucuggguucgacuucagagcuuuugaaaugaguuggguccgccacacuccagggaaggggc

SEQ ID NO: 4704 - RNA, 72 nt, Human
ugcgcgagagagggggcucgaggugcuuuuccuauauggggccgagggacaauggucaccgucucuucagca

SEQ ID NO: 4705 - RNA, 62 nt, Human
gcaggacuugcccuguugccaccaaauguucucgguaugucacaugcaagucucuuuucugc

SEQ ID NO: 4706 - RNA, 81 nt, Human
uguaccugggaaagcucaguggugggugacacaauucgcuucauuauuguucgcguaaccugcugauccuuucccgggaca

SEQ ID NO: 4707 - RNA, 74 nt, Human
acagugccagcuuacuuuaaugacucucagcgucaggcuaccaaagaugcuggaacuauugcuggucucaaugu

SEQ ID NO: 4708 - RNA, 96 nt, Human
ccaccaacacaguuuucgaugccaaacgucugauuggacgcagauuugaugaugcuguuguccagucugauaugaaacauuggcccuuuauggugg

SEQ ID NO: 4709 - RNA, 64 nt, Human
gccagaaauuauccagcaaaucuaucagggauccuaaucagaacgugaaaugcaagauaguggu

SEQ ID NO: 4710 - RNA, 74 nt, Human
ggaggcgcggugaggagucaggcuuaaaacuuguuggaggggaguaaccaggccugcuccucucgcucuccucc

SEQ ID NO: 4711 - RNA, 61 nt, Human
accucagaguccacuugcuguguagcuaaaucauauaacagggucacaguaacuggggggu

SEQ ID NO: 4712 - RNA, 87 nt, Human
aggagcgccauggauuacuacagaaaauaugcagcuaucuuucuggucacauugucgguguuucugcauguucuccauuccgcuccu

SEQ ID NO: 4713 - RNA, 96 nt, Human
cuccugggagguugcgggguggggaugaaaagucccaauccucuaauccugccuuggucuuuugcugccaguccccauccugaagcuaccuagggg

SEQ ID NO: 4714 - RNA, 78 nt, Human
ggaguuucuaaguguauacgaggaaaugaggucaaagaccaaauauauauauuucacuauaucacacuuacaaacuuu

SEQ ID NO: 4715 - RNA, 67 nt, Human
gguggggaagacugaagaaguguuaacugaaaacaggugacacagagucaccaguuuuccgagaacc

SEQ ID NO: 4716 - RNA, 102 nt, Human
uuguuaguguugguuaaguuguugcuuggaagugagaaguugcuuagaaacuuuccaaagugcuuagaacuuuaaggugcaaacagacaaacuaacaaacaa

SEQ ID NO: 4717 - RNA, 70 nt, Human
gguaaaucuggcugcugcugucagugcaccgacuucucguuuccgauugcuggccguaguucuaguuucc

SEQ ID NO: 4718 - RNA, 81 nt, Human
cgccgcggggaugcugagcuucggcgggcggcuggacguuccuaagcagagcucgcagcguggcuugacggcccgcgagcg

SEQ ID NO: 4719 - RNA, 106 nt, Human
gcggcuggguacauggcgucuguuucucagccagcgggagccgcguggccuggguaagccacgacagcaccgucugccuggcugaugccgacaagaagauggccgu

SEQ ID NO: 4720 - RNA, 61 nt, Human
ucacagacaacagccugguggcagcgggccacgacugcuucccggugcuguucaccuauga

SEQ ID NO: 4721 - RNA, 60 nt, Human
ggcacugacuaagcgaggcucagagcuuccauaucaaauuccucagcuuuguucugugcc

SEQ ID NO: 4722 - RNA, 63 nt, Human
ggcccccgcuggcuugccaagcuuggggaauuccagagaggggcaguuaguauuaguggggcc

SEQ ID NO: 4723 - RNA, 92 nt, Human
uucuuaaagaauaacaguaaacauuccaauguccaaaucuugguuagucuuccacuauauugcuuggauguuucuuugguguugguuaagga

SEQ ID NO: 4724 - RNA, 70 nt, Human
uagcauuugaaagacaguauaauugagauuaagaaugccucaauucaaacucugacucuaucagauucua

SEQ ID NO: 4725 - RNA, 101 nt, Human
uuaaguuuuaggguuauuguaaagauguacagcaguuaaaagagucucuggcacauagaaagcacuauauaaaaguuguauauuauuauuucuagacuuga

SEQ ID NO: 4726 - RNA, 69 nt, Human
uuucaugccuuaaauuccucuauaaaacgagaacgauaaaaguacuuaacuuguagaguuauugugaaa

SEQ ID NO: 4727 - RNA, 61 nt, Human
agcaaacugagacuuaaucaaagaacuugcuacauauucccaguuggaucucagaauugcu

SEQ ID NO: 4728 - RNA, 76 nt, Human
gaaaccaagacuacuaugugccacucauuucucucuucuauugggaauuguaaauguauauaggaguguguguuuc

SEQ ID NO: 4729 - RNA, 66 nt, Human
ugggagguaugcauaucauuacagccagagggcacacugugguaauaaucguguaagauaccccca

SEQ ID NO: 4730 - RNA, 68 nt, Human
uuggaugaggcccgcacacauuauggagggcaauuuucucuacugauuaaaagguuaauuucauccaa

SEQ ID NO: 4731 - RNA, 63 nt, Human
ccuuaaaucauguggcuuaaaagcagugagaaucacugucguauuagggucauugugaauagg

SEQ ID NO: 4732 - RNA, 76 nt, Human
cccgccccugcccguugcagcccccccuagcucuccccuaagaggagccguucggggucgggggucgggggucggg

SEQ ID NO: 4733 - RNA, 97 nt, Human
ggccugcagcgaagggcuggccgggccugcugagcugcuguucugcaugacucagugguuuucggagagggcccuguuggcuuuauugagugaggcc

SEQ ID NO: 4734 - RNA, 106 nt, Human
gcagauguguacagaugcuaaacuguugggaaaaugcugcuuaugagacaucucugcuucuugagaccugaaucugcaaauguugagcacuguaccuuacaaaagc

SEQ ID NO: 4735 - RNA, 67 nt, Human
uggcauucguucacgucagacacuugugaugauaaaguaugguacucugugaguggacugaugacca

SEQ ID NO: 4736 - RNA, 63 nt, Human
uggagaaucuccucaagggcucagcugcgaaacaccugucacucaaccaggagauuuacucca

SEQ ID NO: 4737 - RNA, 71 nt, Human
ucauguuaauacauuagcauucuagccgcauggugucugcuggcacuuucugagaugauugauugacauga

SEQ ID NO: 4738 - RNA, 78 nt, Human
uuuucaauugacucacuggauaucuugguaugugaaucagaggauaaagagacuauuguuccaugucagaauugaaaa

SEQ ID NO: 4739 - RNA, 85 nt, Human
agagguagcuacccggaugcaguccuuugggaugaagacuauaggguaugaccccaucauuuccccagaggucucaggcuccuuu

SEQ ID NO: 4740 - RNA, 62 nt, Human
aagccuaauuuuccuuuucuaauucugguagcuauuaccaggaauuuuugaaaguuuuguuu

SEQ ID NO: 4741 - RNA, 125 nt, Human
uagcucucuggcauacaggccaaugacuucauaccagccagccuauaccacggauggcacaaucuccaugccgguaucuuagcacaacuggucuucagcacuggggccuauaguucagacagcug

SEQ ID NO: 4742 - RNA, 71 nt, Human
ucagcacuggggccuauaguucagacagcugcucagcggaagaggguuugcacuggaggccccucucuuga

SEQ ID NO: 4743 - RNA, 66 nt, Human
uuuuguuuuuuuuucucagcauuaccaaacuuauuuauuaagagguucugaggaaauuguucagag

SEQ ID NO: 4744 - RNA, 84 nt, Human
ugucccgguucgacgcucuagcccugcgagcagccgacgccggaagucucuacugcuccccgcuggcgcgcaggaccgcgggca

SEQ ID NO: 4745 - RNA, 69 nt, Human
ucagugugaagccuucaucaauagcaagcacuuuuuaagggaguaaaaguuguuaaaggcaaacgucga

SEQ ID NO: 4746 - RNA, 64 nt, Human
cggcgacauuguggacuuggcuucagugagguagaagaccaugauggagaaggugauguggcug

SEQ ID NO: 4747 - RNA, 61 nt, Human
gaaacaaaaaagaugcaaaaagcaauuaucaacaugauguuuguuaaaauccagugguuuc

SEQ ID NO: 4748 - RNA, 69 nt, Human
uucaccugauccugaaaguccagaugauucugaaagcgauucagagucagagaaagaagaaucugugaa

SEQ ID NO: 4749 - RNA, 74 nt, Human
cauauccugaacugagauaugcaaaauacucauuuucaaguuauggaaauguguuuguggcauauaggacugug

SEQ ID NO: 4750 - RNA, 78 nt, Human
ggucuguguguguagugagaguguguagccacuauuauaacuggaauuuaauuuacauucauaaacuacuauauuucc

SEQ ID NO: 4751 - RNA, 63 nt, Human
ucauuguaauaauuuuuuagaguuuaauuuguaaagcuuagcaaauaaaaucuuguacuauga

SEQ ID NO: 4752 - RNA, 68 nt, Human
acuguacauaccaguuguuucuacaauugaaacuuuacaauauggaaaauacauuggcuuuguacagu

SEQ ID NO: 4753 - RNA, 77 nt, Human
augugaguuggggaaguguaaaaguuuacacuuuuguuugaagcaaaaggacuuucagagcauuuuccaauucacau

SEQ ID NO: 4754 - RNA, 65 nt, Human
cagaaauucuaguuuuugaaagagaugcggaucagcucaauuuuagaacaaguaugggaaaguug

SEQ ID NO: 4755 - RNA, 75 nt, Human
uagugguggcauauagauuuuaacauauggacaacaauauuuuauacuacuaaauuucugaaauuaccacuacug

SEQ ID NO: 4756 - RNA, 101 nt, Human
uuuaucccaaaauacuauuuaaugacagaaaguucuuaacauuuagaaaauauuuuaaauuuguaggugcuuaauuuugccacccaguauucauggauaaa

SEQ ID NO: 4757 - RNA, 66 nt, Human
cuaaguauuccaaauaaguugacucauacaguguuuauucuuuuaugucuggcuuauuucacuuag

SEQ ID NO: 4758 - RNA, 71 nt, Human
guguuguagcguguauccaaauuucauuuauuuuuaaggcugaauaauaucccauuguacguacauaacac

SEQ ID NO: 4759 - RNA, 83 nt, Human
aggauaauaggacaagacaaauuacagauugucucagagaaaacaaaugaguuacucucucggacaagcuguagguccuaccu

SEQ ID NO: 4760 - RNA, 89 nt, Human
cuuauuuuuaaaauacuuugcgccuugcuuugauaauuuguauuauguauccaaacugaaauuaucugcuuucugcauuagaauguaag

SEQ ID NO: 4761 - RNA, 105 nt, Human; identical to SEQ ID NO: 979

SEQ ID NO: 4762 - RNA, 73 nt, Human
cccacugauggagcccagcagcauugagaaaauuguagagauugaugcucacauagguugugccaugaguggg

SEQ ID NO: 4763 - RNA, 61 nt, Human; identical to SEQ ID NO: 980

SEQ ID NO: 4764 - RNA, 96 nt, Human
gaagauaaugggcuuuuggaagcacugauuguuuaaagauacaaaaaaucuuguauuuuuuuuugguguguguuuacaaguaguaaauuuauuuuc

SEQ ID NO: 4765 - RNA, 70 nt, Human
gacacuuuaugggggcagaauggaacaagcuccaagaauguagauacugauucuuucuccauaaaguguu

SEQ ID NO: 4766 - RNA, 61 nt, Human
aguggcaaagguugaauaaaagaguuucuucuccaacuuacuuccuucuguuaaugucauu

SEQ ID NO: 4767 - RNA, 60 nt, Human
ggccaucgcuacuacaauuuuagaauugcugggcaauuuuuucugcacacugggauggcu

SEQ ID NO: 4768 - RNA, 70 nt, Human
uugggcguccuggggcugaggauccgggucaccggugagggaccauuuuccaucgccagcgacuucccaa

SEQ ID NO: 4769 - RNA, 65 nt, Human
cauggaaucuauagaucuguuugggaaaaccuaguaucuuaaacaacaaguccuuucaauccaug

SEQ ID NO: 4770 - RNA, 77 nt, Human
uccucaggcccuuuaacccuugcagaucggauggagaaagcugccagcacguucuagggaugggggcagauugagga

SEQ ID NO: 4771 - RNA, 65 nt, Human
cgccuccuaaaagaacaccaggccaagcagaaugaacgcaaggagcugcaggaaaagaggaggcg

SEQ ID NO: 4772 - RNA, 72 nt, Human
caaggaauggaaguaugauuuuccaacccaaauuagaaauggaaacuugggugauuguuucuccccuccuug

SEQ ID NO: 4773 - RNA, 80 nt, Human
ggcaccccuggccgggcaccugaugcuucagcaaacagcuguuccuuggcauagaccagcgccaggccaguguggguguc

SEQ ID NO: 4774 - RNA, 104 nt, Human
gggucggcaggaaguugcggcugaugagcagcucccggagcgguggggcggggccuccucuucuccaguuccaguacgcucaucagucguccuccugcugauuu

SEQ ID NO: 4775 - RNA, 82 nt, Human; identical to SEQ ID NO: 182

SEQ ID NO: 4776 - RNA, 70 nt, Human
uaauuuauugaaaggagaugcugcaacaguucuugauuuagcagcaguuauucucuuguuuacauaguua

SEQ ID NO: 4777 - RNA, 73 nt, Human
gauccacaguccugcauuuacugccuuucacuuaaugauuuuggacagguuuuagagagccaggauguugguc

SEQ ID NO: 4778 - RNA, 65 nt, Human
ggguggugaagagugcaugcuccgaggcaguuucgaguucuggugcugccacuuacuugcugccu

SEQ ID NO: 4779 - RNA, 78 nt, Human
cucaguugcugcuggguuaaagggagcacaugugauauaugcuccugaacgauccuuuauaccuucuggcguacuggg

SEQ ID NO: 4780 - RNA, 75 nt, Human
gcauggccaggcuggccagggcgugggcaagugguguccuguggcaccuccauccuccugcccagccggcugugu

SEQ ID NO: 4781 - RNA, 64 nt, Human
gaaucacgugauguuucccaggcacuguggucccacaaaaucauaagugucuucacagucuuuc

SEQ ID NO: 4782 - RNA, 69 nt, Human
uccauacuccaaggccaaaguucuugaucuggagaguuuucuagagaugagaagcaaagggaaugugga

SEQ ID NO: 4783 - RNA, 61 nt, Human
cacuguucuacaugagaauaauguuuuaaaaccaauggaaaugaagcucucuagaacagug

SEQ ID NO: 4784 - RNA, 84 nt, Human
gguuggucuggcugccgcucuuauauuucugaaaugcuugucauuaaaacugaaguauauaaaguuugggcacuuagagcaauu

SEQ ID NO: 4785 - RNA, 86 nt, Human
acauuauugaggaaaauuaauaucacagcauaaccccacccuuuacauuuugugcagugauuauuuuuuaaagucuucuuucaugu

SEQ ID NO: 4786 - RNA, 73 nt, Human
auuaauucaauuaaaaccauuaccuuaaaauuuuuuucuuucgaaguguggugucuuuuauauuugaauuagu

SEQ ID NO: 4787 - RNA, 66 nt, Human
aguugagaguaagaaauaugagagaacacaugaaugaacgcucuuuagcagacauggacuccaacu

SEQ ID NO: 4788 - RNA, 67 nt, Human
ccgagugagcaccuuccccuucaucucaggugauguuuccuggcagaaggcauuuacaaucucucgg

SEQ ID NO: 4789 - RNA, 108 nt, Human
cuguugcucaggcuggucucaaacuccugcauucaagcaaugugcuggacucugucucccaaagugcuggcauuguaggugugagcagccacugugccuggccaauag

SEQ ID NO: 4790 - RNA, 71 nt, Human
gucacccuggcuggaggugcaguggcgugaucucagcucacugcagucuugaccucccaggcccaggugac

SEQ ID NO: 4791 - RNA, 94 nt, Human
augggaagaauuacuguggccuaccaggugaauauuggcuuggaaaugauaaaauuagccagcuuaccaggaugggacccacagaacuuuugau

SEQ ID NO: 4792 - RNA, 89 nt, Human; identical to SEQ ID NO: 605

SEQ ID NO: 4793 - RNA, 84 nt, Human
cgauaacuuuuucaccaguauugcacuucuugauaagcucaguucaauggaacaucaggcaacagguacagugagaaaggaucg

SEQ ID NO: 4794 - RNA, 88 nt, Human
auccgccucacagacaguugcguccagaggcuuuuggaaaucaccgaagggucagaauuccucaggcugcaaguggagggagguggau

SEQ ID NO: 4795 - RNA, 87 nt, Human
ucccuggccgaggggcaggcuccucacggccucccugggaccccaggcgcgucgggaggcgucguccuccagccccgaggccggcga

SEQ ID NO: 4796 - RNA, 109 nt, Human
gcugagggcugcagccccccuggccugggcauugggugccucuuagggaucuugccugggugcccuaaggggucacccgguguccguccuggagggccgcagagucagc

SEQ ID NO: 4797 - RNA, 130 nt, Human
ggacaaggaauggggcaagcuggggcagcgcggaaggcagugcuguuuucaggaggccugaccucuguggccagaguccccgucagcaccgcuuacugcaggccaagaugccucccacacuccagaaucc

SEQ ID NO: 4798 - RNA, 68 nt, Human
uauuuuugugccuggagccaugugaaaaaaaccaacuuuaguucuuuuauccuaaaggaccaaaaaua

SEQ ID NO: 4799 - RNA, 92 nt, Human
cagguucagccuaugacccagguccaaaaguuccagccuucucugccaccuccagagcuagcuucagguucuggucaaagagcucacaccug

SEQ ID NO: 4800 - RNA, 113 nt, Human
uguacagaguuggaaaguaagaccauggcauauacagaaggaaagagcacaguguuaaggcucaggaaucaguacaagucaucagggucagcauucucccacuuucaagugca

SEQ ID NO: 4801 - RNA, 64 nt, Human
acaggcaugagccacugcgcccagccuggaaguuaauuuuuaugguuguguauguguugcuugu

SEQ ID NO: 4802 - RNA, 71 nt, Human
uagagaugggguuucaacuuguuggccaggcuggucuugaacuccuggccccaggugauccacccacuuua

SEQ ID NO: 4803 - RNA, 104 nt, Human
uugagacaagagucucgcucuguugcccaggcuggagugcaauggcucaaucucagcucacugcauccuccaccucccagguucaagugauucucaugucucag

SEQ ID NO: 4804 - RNA, 124 nt, Human
aauuggucuguugggguauuaaaugaauuugugacuuaggauauuuucauuuaugauggguuuaucaggaaguaaccccaugguaaguugaggcauaucuguauauauuuaaaccuaauuaauu

SEQ ID NO: 4805 - RNA, 100 nt, Human
ggcagggaccaaccccuaaucccuccccagcggcaagccccucuuuucagagugggcagaggguugccuauggugggcacuaggaaugagguccccugcc

SEQ ID NO: 4806 - RNA, 65 nt, Human; identical to SEQ ID NO: 1518

SEQ ID NO: 4807 - RNA, 75 nt, Human; identical to SEQ ID NO: 74

SEQ ID NO: 4808 - RNA, 87 nt, Human; identical to SEQ ID NO: 76

SEQ ID NO: 4809 - RNA, 71 nt, Human; identical to SEQ ID NO: 77

SEQ ID NO: 4810 - RNA, 99 nt, Human
gcccugggcuuucuacacccuucacgucagcagucggcacugagucccuggcaccaggcucuggcgcucugcugggugggagggugggccauggagggc

SEQ ID NO: 4811 - RNA, 65 nt, Human
guggcgcucugggucgccuggcuguggaaugacccuguucucaggaagaaguacccgggugucau

SEQ ID NO: 4812 - RNA, 72 nt, Human; identical to SEQ ID NO: 3392

SEQ ID NO: 4813 - RNA, 76 nt, Human
gguggacgggcuccugcggcaaggggacaugcuucgggcauuccaugcagccuugcggaacucucccgucaacacc

SEQ ID NO: 4814 - RNA, 110 nt, Human
uggcccggaacacgcuguccucgcgcuuccgccggguggacaucgacgaauuugacgagaacaaauuuguggacgagcaggaggaggcggcggcggcggcggcggagcca

SEQ ID NO: 4815 - RNA, 78 nt, Human; identical to SEQ ID NO: 99

SEQ ID NO: 4816 - RNA, 80 nt, Human
ucuuguguugcgacuucgugguggugcuaagaaaaggaagaagaagucuuacaccacucccaagaagaauaagcacaaga

SEQ ID NO: 4817 - RNA, 76 nt, Human
gacaaguuucaaaggaagaacauuuaugacucaugccacaaaagcuauuuauagauggcuucuuucugauuauguc

SEQ ID NO: 4818 - RNA, 75 nt, Human
gcauggacaaaauugaaacuaucaacuuucaugaaguuaaggaaguugcgggaaucaaguuugguguuaccaugc

SEQ ID NO: 4819 - RNA, 104 nt, Human
ucacguccuaggagccgcauguucaugauugagaucgcaggcgugaagcuuuuguacacuggugauuucucaagacaagaacguuggcacuuaauuggagguga

SEQ ID NO: 4820 - RNA, 79 nt, Human
ccugauucugggcaucuucaugaccauucugcucgucaucaucccaguguuggucguccaggcccagcgauagaucagg

SEQ ID NO: 4821 - RNA, 82 nt, Human
aaaugguuaacucauaaugaauuauaaaacuuugauaguuacauuguacuaucauuuaugaggcauuuauuuuucauuauuu

SEQ ID NO: 4822 - RNA, 66 nt, Human
agaaacaaaagcaggugcugaaucaugaaaaccucaauuauuuuuagcaugccucuuaauuuuucu

SEQ ID NO: 4823 - RNA, 66 nt, Human
uccccugguuucuugucgucugugcuugauucuugaacagguaaccacuugagaggaugccggcga

SEQ ID NO: 4824 - RNA, 91 nt, Human
auauguaauagaaaauggauaaaaauauuuaagcauagcacacauaguauuacuuuuuugaaauuuuuacuuuaguauauauauuacauau

SEQ ID NO: 4825 - RNA, 84 nt, Human
ccaugccuauccaggugcugaagggccugaccaucacucauuaagaacagaggaggcugccuguuacuccugguguuggcgugg

SEQ ID NO: 4826 - RNA, 64 nt, Human
agugguagcuuuucacuaggaucucuggguacauagcagauuuaaguugacuaaggcaaacacu

SEQ ID NO: 4827 - RNA, 69 nt, Human
aucuuccaguuguucauagucagauugucaugccuugauaaguucauguccugacugggccugggagau

SEQ ID NO: 4828 - RNA, 72 nt, Human
gccuuuaacaaaguccugugaaauuaaauuucuuacuuucaaagauugugauccaggagaagugaauaaggc

SEQ ID NO: 4829 - RNA, 81 nt, Human
ucccuacaguugugccaugcauuuaagcgagugguauugcaggaaguccauucuggcucugguggauggacagccuuggga

SEQ ID NO: 4830 - RNA, 60 nt, Human
cccguggggugguaacagugaagagaccuuagagcccuuucuaugcuguucaaaaauggg

SEQ ID NO: 4831 - RNA, 66 nt, Human
ggcgccaaggucucacuaugcucacaccuguaaucccaggcuuugaggaagagggaucugggcacc

SEQ ID NO: 4832 - RNA, 70 nt, Human
gggucuggguaggaaggaaaguggggaaaggugaaaggacagggaaucuuuuccuuucugcuuacaaccu

SEQ ID NO: 4833 - RNA, 73 nt, Human
ugaagagccagaagugaagagugacuaguacaaauuauaaaaagccacuagacucuucacuguuagcuuuuua

SEQ ID NO: 4834 - RNA, 92 nt, Human
acuggucuaucaguccagacgggggccuuuggucaaauauucuucugauuacuuccaagcccccucugacuacagauacuaccccuaccagu

SEQ ID NO: 4835 - RNA, 61 nt, Human
cuaggcaaugugguacaugcuauacaggcaacugagcagagcauucaugccacugaccugg

SEQ ID NO: 4836 - RNA, 67 nt, Human
ggcaucaacaaagagaaauggcgaacgagggcugcucaccacuacuacuauucucuucugcugagcc

SEQ ID NO: 4837 - RNA, 95 nt, Human
gagccccuccacagaaggccccccucuuccccgacacgaggucaccgcuuuuuucucuguguggggcacaugugggggggcuucuggggcggcuc

SEQ ID NO: 4838 - RNA, 71 nt, Human
ucucucucucuaucucuucuccacacgccgaucucgccgauguguguauagccucucuuuagagagagaga

SEQ ID NO: 4839 - RNA, 73 nt, Human
uguguggggagagcucucccaccacacagagugugccugugaaacucugucucuucucuguucuccccccaca

SEQ ID NO: 4840 - RNA, 76 nt, Human
uuuaaagagguggccauugcagggucucugccuccccagcagguguggcagaugccucccggccacucguuuuaaa

SEQ ID NO: 4841 - RNA, 85 nt, Human
cuacagccaugucacuccuggcgacccuggggcuggaugcuggacagggcccugcucccagcuagugggcugggauggcucguag

SEQ ID NO: 4842 - RNA, 91 nt, Human
gggaaacuccccccggccccugccccccuggcucccuaugagguccuugggggaugcccuggagggcgggcuuccaguggggggagagccc

SEQ ID NO: 4843 - RNA, 84 nt, Human
ccagauccagugauugacuuggcaugaaaaugagaaaaugcagacagaccucaacauucaacaacauccauacagcacugcugg

SEQ ID NO: 4844 - RNA, 79 nt, Human
gaagaggaagauuugugcagaccaagagcaccacagacuacaacugcccagcuucaucuaaauacuuguuaaccucuuu

SEQ ID NO: 4845 - RNA, 101 nt, Human
agcuguuuguguaacuucccuuaacuguguaguagcugucuguguaacucuccuuaccugugcagcugcagguaugucuuagguaagcacaaaguacagcu

SEQ ID NO: 4846 - RNA, 87 nt, Human
acaugagggaggaaaauuaauaucacagcaguaacggcacccuuuacauuaugugcagugauuauuuuuuaaagucuucuuucaugu

SEQ ID NO: 4847 - RNA, 106 nt, Human
cuaucuuuucaucucauuaauucaauuaaaaccauuaccuuaaaauggguuucuuucgaaguguggugucuuuuauauuugaauuaguaacuguaugaagucauag

SEQ ID NO: 4848 - RNA, 69 nt, Human
uucuuuaaaucauuuaucuggauuuuuauguuuuauuagcauuuucaagaagacggauuaucuagagaa

SEQ ID NO: 4849 - RNA, 74 nt, Human; identical to SEQ ID NO: 1525

SEQ ID NO: 4850 - RNA, 66 nt, Human; identical to SEQ ID NO: 1526

SEQ ID NO: 4851 - RNA, 64 nt, Human; identical to SEQ ID NO: 1527

SEQ ID NO: 4852 - RNA, 83 nt, Human
cacugcuugaauacacugagacccggaaucaguuccuugaugagcucauggagcuugagaucuucuuagcccagagagcagug

SEQ ID NO: 4853 - RNA, 60 nt, Human
ucagcugcaacaccuguuuaugauccuggccucaccaagguauguggaccgagugacuga

SEQ ID NO: 4854 - RNA, 62 nt, Human
aggaaagaaaauacuagcuuggaguccagcuucucccaagucuccuugcuccuucuucuccu

SEQ ID NO: 4855 - RNA, 96 nt, Human
gcugggcauagaaagaaaucagaggcuacaccgaaaucaucuaaauaggaauagugaauaccuuugauaguuuugauugccaucuuuuugcuuagc

SEQ ID NO: 4856 - RNA, 61 nt, Human
aaauguuuaauaaaucauauauacacauagaaauuuuuauguuggauucuuacuuacauuu

SEQ ID NO: 4857 - RNA, 91 nt, Human
auguauaguggcacaauuugucuucauucugauggagggggagaaggaagauuuuccccuccaucuguuucuagagagccuacugcugcau

SEQ ID NO: 4858 - RNA, 60 nt, Human
cugaaaagccagaaaaugaaaaucagacuaauucucagucuucggauuucuucuuuucag

SEQ ID NO: 4859 - RNA, 80 nt, Human
ggauugcuccauuaaguuagacuaugauacuuaguuuauaaacagauuauaccaucauagcuauuuaagagaagcccucc

SEQ ID NO: 4860 - RNA, 93 nt, Human
ggaaaaauauuuuucuguuggauuguaggaagagaagauaaacaaaguaguuaguaucuuccauuuuaauaauugguuuggaaauauuuuuuc

SEQ ID NO: 4861 - RNA, 60 nt, Human
ccacgacaucucgggagauacuucaggggauuaccggaagauacugcugaagaucugugg

SEQ ID NO: 4862 - RNA, 63 nt, Human
gcagcgaaaccgaccuccuggacaucagaucagaguauaagcggauguacggcaagucgcugu

SEQ ID NO: 4863 - RNA, 60 nt, Human
ccaguucgaggcugcugcgcgcccugcgcuaugugcuggcaaaucaguggucagagcugg

SEQ ID NO: 4864 - RNA, 60 nt, Human
ucaccugggccgcacccuugggcucuaugggaaggaccagcaaggaggcagcccuagugg

SEQ ID NO: 4865 - RNA, 74 nt, Human; identical to SEQ ID NO: 1641

SEQ ID NO: 4866 - RNA, 99 nt, Human
gagacagacucucacugugucgcccagguuggagugcaguggcgugaucuccacuuacugcaaccucugccucccggguucaagugauucuccugccuc

SEQ ID NO: 4867 - RNA, 74 nt, Human; identical to SEQ ID NO: 1693

SEQ ID NO: 4868 - RNA, 80 nt, Human
aaggaagugagggcagcggcugucuucuguucaggacuauucuguuugcuucacuuccccggccuggcaaucacuuccuu

SEQ ID NO: 4869 - RNA, 75 nt, Human
aguuugaucauuugcagaaaguggagcaccgcaaaaccugugaggguuaccauuaucuuaaacccuggucaagcu

SEQ ID NO: 4870 - RNA, 69 nt, Human
cugaggggucccugcaucuguugagauucccuacugugaaaucaggggacugacaggugaugucugcag

SEQ ID NO: 4871 - RNA, 60 nt, Human
gcuuuggucucugcuggacagcccuugggggagcagggaguccagcagggccaguccugc

SEQ ID NO: 4872 - RNA, 68 nt, Human
cgggugagccccaaggagaagaccguaccaaugaaagaaaucaacgcuugcuccugacagcucauccg

SEQ ID NO: 4873 - RNA, 62 nt, Human
gccaucugcggguccagauccaacaguaauugacuauugaaggcuugcgggcccacaguggu

SEQ ID NO: 4874 - RNA, 71 nt, Human
gugguuagugucuaugcucagaauccaaugcggagagagucucguccucugguucagacuguaguaaccac

SEQ ID NO: 4875 - RNA, 67 nt, Human
agccuggacuagaauuucuucuggguauuacagagacaaguuuaucacagaaauuuuuuuccuggcu

SEQ ID NO: 4876 - RNA, 73 nt, Human
ggugaucgaggaguucuacaaccauacauggguccaccgcuauggggagagcauccugcccaccacgcucacc

SEQ ID NO: 4877 - RNA, 93 nt, Human
cugcaggaagaagaagaucugauggccgugggugucugggaagcucuucguggccucaaugcccuccuuuauccucaucuuucuucuaugcag

SEQ ID NO: 4878 - RNA, 96 nt, Human
ggcuuuacaggaggugacuuaaguucaaaggaggccuguuagucuaauccaacauggguguccuuuggacauaagaagauaccagcacugugugcc

SEQ ID NO: 4879 - RNA, 80 nt, Human
gucgucgcgcgcccuaguggccccgaaaaagccuucagaaacacuuguugagggcaccggcggcccagagguagacagac

SEQ ID NO: 4880 - RNA, 75 nt, Human
acaccacacccagccaggucugaugaguuuuuaaggugcaaaugggaguuuuucaggcugugugggaaguggugu

SEQ ID NO: 4881 - RNA, 61 nt, Human
gcuguaaagcaugcugggcccacaucugcuuugaugcuucucaagcccaggauggugcagc

SEQ ID NO: 4882 - RNA, 98 nt, Human
guuuuuuuuuauuuauuuugguuuggagacggaguuucacuccagccugggugacagagcaaaaaaacuccgucuaaaaaacgaaaaccaaagagaac

SEQ ID NO: 4883 - RNA, 60 nt, Human
gcuugcgcauucccaagucagaugucguguacaccgauuggaaacaggauaagugugagc

SEQ ID NO: 4884 - RNA, 84 nt, Human
acccaggugaccaccguugaaggugccuaugauugaagcguuaggcuguuaacaugcacgcacuguagacgcuggccacugggu

SEQ ID NO: 4885 - RNA, 82 nt, Human
cugggggcucugguucccggaucuccgugucccgcuccaccagcuucaggggcggcaugggguccgggggccuggccaccgg

SEQ ID NO: 4886 - RNA, 69 nt, Human
auauugcgaaaaaauauuuuuacaauuuacagucuugucugacauuugguaaauagcuaauugugauau

SEQ ID NO: 4887 - RNA, 67 nt, Human
gccggcgggccggugagcucacuagcugacccggcaggucaggaucuggcuuagcggcgccgcgagc

SEQ ID NO: 4888 - RNA, 62 nt, Human
ggagcgcggcuugaggagggcggggccgccccgcaggcccgccaguguccucagcugccucc

SEQ ID NO: 4889 - RNA, 117 nt, Human
ggugagcucacuagcugacccggcaggucaggaucuggcuuagcggcgccgcgagcuccagugcgcgcacccguggccgccucccagcccucuuugccggacgagcucugggccgcc

SEQ ID NO: 4890 - RNA, 93 nt, Human
uguucaaaguacucaagaugaauuugaggaacuuacaaugucucagaaaaauggugggaauguucuucagaugauguaugagaaaccugaacg

SEQ ID NO: 4891 - RNA, 94 nt, Human
caccgcccacccauuuaggugcccuauagugugggguugauaugaagaaaugcagaucccuacccccccacaccucagugguugaggggcugug

SEQ ID NO: 4892 - RNA, 65 nt, Human
ucucggugugauugaugccccucaaaacucucguugcaguugggggguagagguugacacuguga

SEQ ID NO: 4893 - RNA, 83 nt, Human
aauuuggcuaaacuuaaaagcaagcuggguuccucuggggauauaaauaagcauuggacugggaggaaacagcuggccaaauu

SEQ ID NO: 4894 - RNA, 67 nt, Human
gcugcagagggagaaggacaggcagugucguggccuggagcucauugccucagagaacuucugcagc

SEQ ID NO: 4895 - RNA, 81 nt, Human
gguggugccaaguguaucccucgcguuuaaagaggggauggucacacuauuccaagaaacuggggcaggcagggaaccacc

SEQ ID NO: 4896 - RNA, 91 nt, Human
uuuauauguguugaaaaccaaaaugacaucuuuuuaaagcuuauccauaaaaaaaaauagaugucuuuuauaguggaaaaacacaugggga

SEQ ID NO: 4897 - RNA, 62 nt, Human
ggaccgaaguagucuucauucaaggaacuaugaaauucaagaaugagagcuagaucgugacc

SEQ ID NO: 4898 - RNA, 63 nt, Human
gaggcccuguaugacaucugcuuccgcacccugaagcugaccacccccaccuacggggaccuc

SEQ ID NO: 4899 - RNA, 101 nt, Human
ggggacuacaauggccacgucggucuggguguuaagugcuccaaggagguggcaccgccauccguggggccaucauccuggccaagcucuccaucgucccc

SEQ ID NO: 4900 - RNA, 97 nt, Human
uccgcggagguuucggcaguggcauccggggccggggucgcggccguggacggggccggggccgaggccgcggagcucgcggaggcaaggccgagga

SEQ ID NO: 4901 - RNA, 65 nt, Human
cccgaaacacggcacugggggacugcagcccugcugaccaggcuguccuccuagcccugucaggg

SEQ ID NO: 4902 - RNA, 119 nt, Human
ucagcagcacaaaucccuuuuauuaaccaucuuccuuuucucgaguauacacaaguagaaaagaaacagugaaguaccccgauagggaggguggggagaggaugggagggggcuccuga

SEQ ID NO: 4903 - RNA, 65 nt, Human
gcguggaggcuucguuuucuauuuauuuacauuauugggcuuucuuuugugagcggaccuuuugu

SEQ ID NO: 4904 - RNA, 87 nt, Human
aaagucuagaaauagccccaacuguaccuagaaaucuacuguaugauaacagugguaucucuaaauacugaggcauauauggacuuu

SEQ ID NO: 4905 - RNA, 78 nt, Human
cugaaguuuccuguuuaaaaacugguaauaccuuuaagaagauuuuuuaaagacuagaaaaaguucggcugauuucag

SEQ ID NO: 4906 - RNA, 87 nt, Human
uucaggaaguacaagaagauaauaaggguucuucuaucacgaaaggggaagaggccuaaaaauuccuucgcauuguaaauucaggaa

SEQ ID NO: 4907 - RNA, 60 nt, Human
ccaaguguguguugugagguguguuccgagaaggaauuccuucacagagucgcguacugg

SEQ ID NO: 4908 - RNA, 64 nt, Human
uccauagcccugguuuggggcccggguucguuguuuccccggggcuucccagcuggguggugga

SEQ ID NO: 4909 - RNA, 62 nt, Human
caggauuucacugcgcuaaccaggaugggucucgaucuccugaccucgugauugaaauucug

SEQ ID NO: 4910 - RNA, 86 nt, Human
cauauagucugcacaauucaauaugaacguuuuauuuccaacaaguauguagguucacuguuccaugacuugugcauaacaauaug

SEQ ID NO: 4911 - RNA, 73 nt, Human
auaugcaacuauauuucauguuguaauacaaaggauuaaacuacaaaagugaaaauuaaaagucauugcauau

SEQ ID NO: 4912 - RNA, 75 nt, Human
aagccauguucacagcauauuauuucugugacuggauuguugauagugacagagaugaccuaaaauuaauggcuu

SEQ ID NO: 4913 - RNA, 90 nt, Human
gaggguugaaguuuaaccuuauuuuggguuuguguaaauugugaaaacaauauuaacuagaugcagcauggguuaaacgcucacaucuuc

SEQ ID NO: 4914 - RNA, 129 nt, Human
ucaggagccucuugggggugcucuggugccgccagccucuccgcucucuccaugcuguggagcaggugagggcagcagcgaggcacagggucagggcuacgggacguucgcauagaggaggcgacguga

SEQ ID NO: 4915 - RNA, 76 nt, Human
gguucgggccaagcggggcacagcccagggcuucgggaugcccgaggugggccaucacacucugcuggagccaacc

SEQ ID NO: 4916 - RNA, 60 nt, Human
ucuuugugagucugaaguauugcccaaagcggaggagcgagaaccacggacucgaaggga

SEQ ID NO: 4917 - RNA, 89 nt, Human
agcaagaaaauggcuggaagagcugucuuguuggcaggaccuccuggaacuggcaagacagcucuggcucuggcuauugcucaggagcu

SEQ ID NO: 4918 - RNA, 64 nt, Human
uggcuuaugggcgggccccggggggacaggauauucugucauggaugggccgucaaugaagcca

SEQ ID NO: 4919 - RNA, 64 nt, Human
uacugugccuuuagguugccuggagaaauuacgaaaugauacaaggaaguuagaaagcagagug

SEQ ID NO: 4920 - RNA, 68 nt, Human
gagcugguguaaccauugggcgggccgcugaggccgcccgccgguggggcccgcuuguucaccgguuu

SEQ ID NO: 4921 - RNA, 73 nt, Human
gaucagacagaucacagcuacggugacauuucugccacuguuggaaguuucuuguucauuugaucugcugauu

SEQ ID NO: 4922 - RNA, 69 nt, Human
uggccauggcgcugcagcucucccgggagcagggaaucacccugcgcgggagcgccgaaaucguggccg

SEQ ID NO: 4923 - RNA, 88 nt, Human
gggacaguuuggugcugcagugaauuaauuacguaggcaaucgagacucuaauaaggauauuuugcuccagcaauuccugauuguccc

SEQ ID NO: 4924 - RNA, 67 nt, Human
acugcuagagccgagcgaagcgaugccuaaaucaaaggaacuuguuucuucaagcucuucuggcagu

SEQ ID NO: 4925 - RNA, 66 nt, Human
gauuagacucaccaauuuauuuuguuuuucuccuucugugggagaagaucuuugggaguaagaauc

SEQ ID NO: 4926 - RNA, 68 nt, Human
gcacugcuccugaucccugcugcccucgccucuuucauccuggcuuggcaccggaguggaguucgugc

SEQ ID NO: 4927 - RNA, 70 nt, Human
acuuccccaggugccuccagcgcacucgcgacaauauucggcguuaaaaaggggcgauauacgggggagu

SEQ ID NO: 4928 - RNA, 60 nt, Human
caagcuucuaugggccaaagucacgcaggugccaagucuagugguggcagggaagacuug

SEQ ID NO: 4929 - RNA, 91 nt, Human
uggacacagacuugccaggcagccuggggcagagugaagagaagcccgugccugcugcgccugugcccagcccugguggacccugugccca

SEQ ID NO: 4930 - RNA, 71 nt, Human
cuugggucgcuugcuguucgugauaugagacagacaguugcggugggugucaucaggagcagguggacaag

SEQ ID NO: 4931 - RNA, 62 nt, Human
uagcuggaggcaugggcaaggggggucccagguaguaaacuccccaggucggcugagggcua

SEQ ID NO: 4932 - RNA, 74 nt, Human
cuagcagaguagaaauaagaggccaggauucagcaccagguaggcuggauuccuucuuagguggcucaagcugg

SEQ ID NO: 4933 - RNA, 76 nt, Human
uauggggcuggucucaucauaucuaaagaacugcccagcuuuuacgcauuuugaaugugguggaaccagcugcaua

SEQ ID NO: 4934 - RNA, 61 nt, Human; identical to SEQ ID NO: 387

SEQ ID NO: 4935 - RNA, 72 nt, Human
aacaaaugcuuccaggugaaaaaacugaucagcuauauagagucacucaguuuuuaauaaaggccauuuguu

SEQ ID NO: 4936 - RNA, 88 nt, Human
uuucaugcuuugaacgaucagacaagcuuuacauucuaccuaugguguucagaaauugaggcuaacauugaaauaucaaagcauuaaa

SEQ ID NO: 4937 - RNA, 79 nt, Human
cccuccuuuauuccccaucccccaacuugagaacagggugacaccugagcucacucgggcuuagggagucuaagggggg

SEQ ID NO: 4938 - RNA, 72 nt, Human
uuucacagacucuaagucguaaaacucuguuacaaaggaaaugauugagaaaaugaauucgagucuuugaaa

SEQ ID NO: 4939 - RNA, 70 nt, Human
ccugaggagaagugcuguguggugggcacucuguucaaggccaugccgcugcagcccuccauccugcggg

SEQ ID NO: 4940 - RNA, 109 nt, Human
cugguggauguggugacgggcagcuuggggacgacaggggagcacgugcagcgccgcccacgucucccggguuaucccucgcuggcaccuccucagccacagcacccag

SEQ ID NO: 4941 - RNA, 70 nt, Human
gagggaugcagcucccaaaauguauaaggaagaaggccuaaaagcauucuacaaggggguugcuccucuc

SEQ ID NO: 4942 - RNA, 69 nt, Human
gcuuugaacguacuguugaagcacuguacaaguuugugguuccuaagccccgcagugaauguucaaagc

SEQ ID NO: 4943 - RNA, 71 nt, Human
augugguccaaccugggcauuggccuagcuaucucccugucugugguuggggcagccuggggcaucuauau

SEQ ID NO: 4944 - RNA, 74 nt, Human; identical to SEQ ID NO: 4179

SEQ ID NO: 4945 - RNA, 66 nt, Human
ccgugggagucugcuacaccauuuuugauuugggcuuccgcuuugauguggcaugguuccugacgg

SEQ ID NO: 4946 - RNA, 83 nt, Human
ggccuccuggcucccucugcugguguuguuggggccuggccggcggguccaggcgggaccggcuguggugugccuucguggcc

SEQ ID NO: 4947 - RNA, 68 nt, Human
gagacgggguuucaccauguuggccagacuguucucgaacuacugaccucagguaauccacccgccuc

SEQ ID NO: 4948 - RNA, 103 nt, Human
uugagacagagucuugcucugucacccaggcuggacuccaguggcacaaucucagcucacugcaaccuccgccuccuggguucaggcaaaucuccugccucaa

SEQ ID NO: 4949 - RNA, 76 nt, Human
caggcugaucaacuaugccaccaauggugccaaguuccugaagcggcacauguaugauguggccaguggccgccug

SEQ ID NO: 4950 - RNA, 85 nt, Human
ucaggaccccaagggggagcugcagggccagaaugugcugaccguccgguacucgcuggagcugacugcugcccgcuuggcuugg

SEQ ID NO: 4951 - RNA, 72 nt, Human; identical to SEQ ID NO: 3359

SEQ ID NO: 4952 - RNA, 84 nt, Human
ucgaccugagccacggcucugcccagguuaagggccacggcaagaagguggccgacgcgcugaccaacgccguggccacgugga

SEQ ID NO: 4953 - RNA, 63 nt, Human
aaguuucugaguuagccauuucuuuuucuucuuugaaucagugauuugguuuuucuuucacuu

SEQ ID NO: 4954 - RNA, 93 nt, Human
agagaaucugccuaagugggaauuaaaauggcuaaaguuuuaaccucaauuauuuugaaaccagaacauuuuccccacuauagacgauuuucu

SEQ ID NO: 4955 - RNA, 60 nt, Human
uggcucaagcuauccucccgccucugccucacuaagagcugggauuacaggccugagcca

SEQ ID NO: 4956 - RNA, 61 nt, Human
ggucaggcaggcugguccguggaacuuaaucagugggggccuggucagagaggacuugauc

SEQ ID NO: 4957 - RNA, 82 nt, Human
cccagauccacaugcgggaggcccugcagcaaauggacaaugccguguauacguucgagacccuccugcaccaggagcuggg

SEQ ID NO: 4958 - RNA, 68 nt, Human
ccaacaaagauuucagggauuuugucagggagaaaaaguaucggacagaagcugagauguuuggaugg

SEQ ID NO: 4959 - RNA, 72 nt, Human
gacagcagagauggugaagggccugugcgggaggcgacagugaaacccuuugccaucgacauauuuccuguc

SEQ ID NO: 4960 - RNA, 81 nt, Human; identical to SEQ ID NO: 4279

SEQ ID NO: 4961 - RNA, 87 nt, Human; identical to SEQ ID NO: 4280

SEQ ID NO: 4962 - RNA, 88 nt, Human
gaugaguuuuccccacuaaagaaugcugauagucagaaugggaaagacaacccuacuacugcaaggcaugcuuugaugucccuucauc

SEQ ID NO: 4963 - RNA, 74 nt, Human
gcugcaauccauggugaugucgcgucaugcaugcacugacuaugagugcccugcacuacugacaauggagcagc

SEQ ID NO: 4964 - RNA, 69 nt, Human
ggacaggcucugcccaggaagagcugccgccuccuggcacagcaaacguuccaggccugggcccuguuc

SEQ ID NO: 4965 - RNA, 60 nt, Human
ccagugaaguguccagaccauugucuuccaaccccagcuggccucuagaacacccacugg

SEQ ID NO: 4966 - RNA, 62 nt, Human; identical to SEQ ID NO: 206

SEQ ID NO: 4967 - RNA, 92 nt, Human; identical to SEQ ID NO: 3371

SEQ ID NO: 4968 - RNA, 68 nt, Human
cccggccucguugcccccuggcgacccucagcucaucgcuaucaucguggggcagcucaagagcaggg

SEQ ID NO: 4969 - RNA, 75 nt, Human
cuccagcaaacgacaaccaacugcacgauggucugaggcagagugugguucagucagggaggucagaagcuggag

SEQ ID NO: 4970 - RNA, 63 nt, Human; identical to SEQ ID NO: 123

SEQ ID NO: 4971 - RNA, 65 nt, Human; identical to SEQ ID NO: 404

SEQ ID NO: 4972 - RNA, 91 nt, Human; identical to SEQ ID NO: 124

SEQ ID NO: 4973 - RNA, 93 nt, Human
ugcagugucucgggacuucgucaguguccugcacacggacuguagugccgaaaaaacaaagagacaugcaggccaucacgcccagacaaugca

SEQ ID NO: 4974 - RNA, 127 nt, Human
agguguuuguauuuccuagagaaucuguuacugaucauguaaacuugaucacaccgcuggagaagccucuacagaacuuuaccuuguguuuucgagccuauagugaucucucucgugccuacagccu

SEQ ID NO: 4975 - RNA, 62 nt, Human; identical to SEQ ID NO: 1277

SEQ ID NO: 4976 - RNA, 62 nt, Human; identical to SEQ ID NO: 4194

SEQ ID NO: 4977 - RNA, 67 nt, Human; identical to SEQ ID NO: 4195

SEQ ID NO: 4978 - RNA, 70 nt, Human
gcaguguaggugguuugaccagaggcgccgacaugcccggugccugccuccccacggccgcgugugcugc

SEQ ID NO: 4979 - RNA, 71 nt, Human
ucaaguucugagauuuuugcucccugaccuaaaauccugugggaauaauugauuucucaucuuuuacuugg

SEQ ID NO: 4980 - RNA, 64 nt, Human; identical to SEQ ID NO: 1375

SEQ ID NO: 4981 - RNA, 61 nt, Human; identical to SEQ ID NO: 2204

SEQ ID NO: 4982 - RNA, 64 nt, Human; identical to SEQ ID NO: 175

SEQ ID NO: 4983 - RNA, 98 nt, Human
gugggguaaaaccccagacgccaugaaagcugccauggcccuggagaaaaagcugaaccaggcccuuuuggaucuucaugcccuggguucugccccgc

SEQ ID NO: 4984 - RNA, 66 nt, Human; identical to SEQ ID NO: 4291

SEQ ID NO: 4985 - RNA, 94 nt, Human
ccgcacuuccagggccuaugcaggaugugcagguggcguucgcgcuccgccgaggugcgaaacuugccuuugcaguaggggcaacggaaggcgg

SEQ ID NO: 4986 - RNA, 65 nt, Human
auguuuuccaacuacuuuugauaacuaagaaauauuauauucugaaaaaaguucauacuaaauau

SEQ ID NO: 4987 - RNA, 62 nt, Human
caagcagaguggggaugucaccugcaacuugcacggauugccggguggcccccagcugucug

SEQ ID NO: 4988 - RNA, 66 nt, Human
gacaaugccgcugcacugccuacuuugagggaucgaggugugaggugaacaagugcagccgcuguc

SEQ ID NO: 4989 - RNA, 71 nt, Human
gucggcacugcagcaaauuggcggcuccuguaccaugaacagcaaaaugaugccugagugccagugcccac

SEQ ID NO: 4990 - RNA, 79 nt, Human
agcauauguuacuuaccuuguuauuaaauauuucuugaaaagcaaauuuuaaugguuuaauuuuauguggacguauguu

SEQ ID NO: 4991 - RNA, 94 nt, Human
gcauuugguuuuaaaauuuuuaugcuaauauaaaugcucaaguaauuuaaaauauugaaagcaucccuguugguauaaauuucugaguaaaugc

SEQ ID NO: 4992 - RNA, 74 nt, Human
gccuuugaaauggcuuugcuaaaaugcucccgccacaaaguuguaggaaaugggaagaggagucaacuagaggc

SEQ ID NO: 4993 - RNA, 106 nt, Human
gagggaaaauuugucgaagaggagggauugcggcaauuaaagagagggaagaagaggaagagaggucccgucguuguuuguuuuucuuucuuuacaaauuucuguc

SEQ ID NO: 4994 - RNA, 97 nt, Human
uuagcuucagggagaaacaagaacuuuuccaaaagucaggaucuucgaaacgugagaaauugaugauugcaaaggugaaauuucggauugaagguaa

SEQ ID NO: 4995 - RNA, 69 nt, Human
cucauggacagcuucgaugcuuuuggaagcauucaccaucuuccaguucaaagucgugucuuucaugag

SEQ ID NO: 4996 - RNA, 64 nt, Human
cuggggacggggccuuccgcgagucucccaccucucgggggacugcagggagaggcgucuccag

SEQ ID NO: 4997 - RNA, 131 nt, Human; identical to SEQ ID NO: 2677

SEQ ID NO: 4998 - RNA, 66 nt, Human
cagggggccuggccacaugagggaguccacagaaaaccuucccuccuggcccacccagguccccug

SEQ ID NO: 4999 - RNA, 83 nt, Human
guagguucucugcagggcccaaggucaacggaacauuccaggccgacuuuccucugggcccugccacccacggaggaaccuac

SEQ ID NO: 5000 - RNA, 85 nt, Human
uccuuccuccucuucuuuucuccuucaucgguggugcugcacaaaagaaaugcuguuguaauugaccaagaccuugggggaacga

SEQ ID NO: 5001 - RNA, 66 nt, Human
uuuccgugacucuccauacgaguggucaaacucgagugacccacugcuuguuucugucacaggaaa

SEQ ID NO: 5002 - RNA, 79 nt, Human
aguacgagcugggcgcagcgcuguacaucggcugggcggccaccgcgcugcucaugguagggcggcugccucuugugcu

SEQ ID NO: 5003 - RNA, 69 nt, Human
aguuuuuuucuuccauuucaggugucgugaaaacuaccccuaaaagccaaaaugggaaaggaaaagacu

SEQ ID NO: 5004 - RNA, 61 nt, Human; identical to SEQ ID NO: 823

SEQ ID NO: 5005 - RNA, 79 nt, Human; identical to SEQ ID NO: 1810

SEQ ID NO: 5006 - RNA, 107 nt, Human
cacuccggccuggccuguaguuugacccugagcuggugcuggucucgugcaggauuugacucagccaucggggacccugaggggcaaaugcaggccacgccagagug

SEQ ID NO: 5007 - RNA, 70 nt, Human
acauuguuaaggucaugauguacagagcagucacuuucaacuuuguuaaauuaauaaaacaugacaaugu

SEQ ID NO: 5008 - RNA, 78 nt, Human
ggaagagagauggagucacauggauuuuuggugggcauuauucugaacuuucguauccaaguuagucccccuuauucc

SEQ ID NO: 5009 - RNA, 61 nt, Human
auccuuuuuaaauguaauguggcagauugugaagggugguugcuaauuagagaagaaggau

SEQ ID NO: 5010 - RNA, 98 nt, Human
gacuauuugaaaagccaggaguaaauuacaagucuugacaauggugccaugucugccagucagggcaguguucugcugauggcacugauucaucaguc

SEQ ID NO: 5011 - RNA, 62 nt, Human
caaccagcuuagaaaaauaaucaugguagacaccuuaguucauucuucuaauaagccuguug

SEQ ID NO: 5012 - RNA, 60 nt, Human
aggguagagcugucucucagguuauaaccucucagguggaggccugagcccucagacccu

SEQ ID NO: 5013 - RNA, 73 nt, Human
ccucaagcucccauggaccugugggcggggaguuaaaucccuguuccaucucgccuguucccagaguuugagg

SEQ ID NO: 5014 - RNA, 62 nt, Human; identical to SEQ ID NO: 206

SEQ ID NO: 5015 - RNA, 93 nt, Human; identical to SEQ ID NO: 207

SEQ ID NO: 5016 - RNA, 65 nt, Human
gcuaggagcugccaaggccucuugagugugacaucacagguuagaggcccugcugagcugcuagc

SEQ ID NO: 5017 - RNA, 80 nt, Human
ggaagcugggcucuugccaugccaguagcuugcuuacgaccuugggcaagucacuuuuuccucucugggguccugugucc

SEQ ID NO: 5018 - RNA, 86 nt, Human
cuggagcgcggaccuggacaagugcauggacugcgcgucuugcagggcgcgaccgcacagcgacuucugccugggcugcgcugcag

SEQ ID NO: 5019 - RNA, 71 nt, Human
ccacaccacuaugcaaccuuucugauauuccuccuguuggcauaaagagcaaagcaguugugguuccaugg

SEQ ID NO: 5020 - RNA, 72 nt, Human
agacagggggcacaugccaaacaccacagggcaucagaugcugcucugugugcucacaaguguucccugucu

SEQ ID NO: 5021 - RNA, 60 nt, Human
cagaagcgagcaacugaagcgaaggggcuuccuaaggugccccuuccaggcuugucucug

SEQ ID NO: 5022 - RNA, 60 nt, Human
uuucuaaccaucacaauucagugaaguacaaaacacugaguuacaggcugugggaagaga

SEQ ID NO: 5023 - RNA, 116 nt, Human
gcuuugggcccucggccgacuuucccaggcagugcaggcuagcccaguccaggagugugcagccuggcuugggucgagcucugucacaucuggauaagcaacugggggcugagagu

SEQ ID NO: 5024 - RNA, 115 nt, Human
uuuauuaccucccagacugagcccccgaccuggcccagccuggcccguccccaauccaaugggcuggccaggccaccugcaccagggaggacagcugcuggcagggacuaauaaa

SEQ ID NO: 5025 - RNA, 68 nt, Human
acgaaugggagguguuauuagaauuguuaauaauauuugauuuaaacugugauacuuagccaggaugu

SEQ ID NO: 5026 - RNA, 62 nt, Human
ggggaucaugaaacagcccaauuagcauuaagcugcauguuaaaauugugguaaugaugccu

SEQ ID NO: 5027 - RNA, 62 nt, Human; identical to SEQ ID NO: 206

SEQ ID NO: 5028 - RNA, 92 nt, Human; identical to SEQ ID NO: 3371

SEQ ID NO: 5029 - RNA, 111 nt, Human
ggcaggcuagagauuucacccauuuugugggcuggaguuaccaguagcuccagcaguuacccugaagagagauugggcuucagccuucagcaggugguucucucccaugcc

SEQ ID NO: 5030 - RNA, 67 nt, Human
ggccugcaggagcuucugcugcugaccccaugcugaguggccaguggggagcggcgcccggcaggcu

SEQ ID NO: 5031 - RNA, 73 nt, Human
uacgaggccuggguugcggugaggcugucaguggauccgugcuuugucggccagcguuucugcagucuuugua

SEQ ID NO: 5032 - RNA, 65 nt, Human
guuucagcacugauggaggcagccuggccaccgggggccgggaucggagucuccucugcugggac

SEQ ID NO: 5033 - RNA, 68 nt, Human
cauuuaauagguuagaauguaaauuaaaguguagcaauagcaacaaaauauuuauucuacuguaaaug

SEQ ID NO: 5034 - RNA, 61 nt, Human
ccaaucuuaccauggacacugaaauucgcauagaguguaaggcguacggugagaacauugg

SEQ ID NO: 5035 - RNA, 71 nt, Human
ggggaguauggggagcauuaucaaggaguaagggggacccauucgaugaaacacuucugcaacaaaucccc

SEQ ID NO: 5036 - RNA, 80 nt, Human
ggugggggccaucuuuauugggcgguggugggaggggguucccaccuaagcccugugcuauaaagagccggccguccucc

SEQ ID NO: 5037 - RNA, 69 nt, Human
uaccaucuugagcaaguuggucacgaggaaaaccaauuauuugauggcuuucacaugcucauucaggua

SEQ ID NO: 5038 - RNA, 70 nt, Human
augucuuauuauuaaaguuaccuauuauuguuggaaauaaacuaauuuguauggguuuagaugguaacau

SEQ ID NO: 5039 - RNA, 71 nt, Human
ggcuugauuugcuuggugaccgaauuacuagugacuaguuuacuaacuaggucauucaaggaagucaaguu

SEQ ID NO: 5040 - RNA, 60 nt, Human
guuggggugugagagguuuucucgcucuagggagauucuucaagcaaucacuaugucaac

SEQ ID NO: 5041 - RNA, 76 nt, Human
uccacaugcguguggcagcccaaggcuuuguuguaggagcaaugacuguugguaugggcuauuccauguaucggga

SEQ ID NO: 5042 - RNA, 73 nt, Human
auguauuauuuuaacuaacaaaggcauauuauacauuuuuuucauauauaaacuuuggaauaggauuuuacau

SEQ ID NO: 5043 - RNA, 85 nt, Human
guaguaaauuuuuaguauuuuuuagauugaauuuguaucauauuugcuagcaaauugaguauaaagaguagcauauuuuuacuac

SEQ ID NO: 5044 - RNA, 64 nt, Human
uacccaugugucaaaguuuuaugcuaaauucugaauagaauaguuguaacucccacucugggua

SEQ ID NO: 5045 - RNA, 90 nt, Human
gagguuuuuauucacaaaguugauggucugucugaugaucacaaaauagaaacacagagggacauucaucaaagggccaaugaugaccuu

SEQ ID NO: 5046 - RNA, 65 nt, Human
ggaugacuacauggaggcuuuaacaagacuucacauuacuguuucuaaagccuacaaaguuaacc

SEQ ID NO: 5047 - RNA, 96 nt, Human
uucaauauuugaagccuuuaguaagguggugcagaaacucauuccacaacugccgaccuuggaaaaccuauuaaauaucuuuauaucaguauugaa

SEQ ID NO: 5048 - RNA, 64 nt, Human
auucagcggcaguggugcuuucccgaaucucagaaugccuguuaaaagaucacugaaguuggau

SEQ ID NO: 5049 - RNA, 81 nt, Human
auucauuugauccuucagaaaucacaaggaagaagaaguguuauaacuuauucuccaacaacuggaacuugucaaaugagu

SEQ ID NO: 5050 - RNA, 65 nt, Human
ggaauaaaaauaacaacucuuugugggcgcggcguuuugggcccgagaagagguuuuuuuaaacc

SEQ ID NO: 5051 - RNA, 74 nt, Human
uauuguuuauguauugucuauggcugcuuuugugcuucauacagcaguguugacaaguuaugacagagacagua

SEQ ID NO: 5052 - RNA, 60 nt, Human
uuuuuuuuuaauuuuaaaacauuuuuauuauaaaauacaaauaaaaacauugagaaaaga

SEQ ID NO: 5053 - RNA, 83 nt, Human; identical to SEQ ID NO: 3611

SEQ ID NO: 5054 - RNA, 70 nt, Human; identical to SEQ ID NO: 3612

SEQ ID NO: 5055 - RNA, 65 nt, Human; identical to SEQ ID NO: 3613

SEQ ID NO: 5056 - RNA, 78 nt, Human; identical to SEQ ID NO: 660

SEQ ID NO: 5057 - RNA, 75 nt, Human
cccuugguagaugggugcacaaugacgaccuggggaacaacugagaaaccaaggugugaaucuguugaccauggg

SEQ ID NO: 5058 - RNA, 67 nt, Human
gguggacaagucagacuaugacaugguggauuaucugaaugagcuaugggaaagcugcuuggaagcc

SEQ ID NO: 5059 - RNA, 68 nt, Human
cccuggagccacgcguugucuucaucaaaaagucccagcuggagcuuggggugcacuugugugguggg

SEQ ID NO: 5060 - RNA, 72 nt, Human
ccugcaugggguguuuguggccgagguggaggaugacaguccugccaaggguccugacggccucgugccagg

SEQ ID NO: 5061 - RNA, 75 nt, Human
gugcaguaccgcccugaggaguucacgaaggccaagggccugccuggugacagcuucuacaucagggcccuguac

SEQ ID NO: 5062 - RNA, 61 nt, Human
cauccacagcuuaccccauucuguacagagcucaccgggauuauucaagccaugguggaug

SEQ ID NO: 5063 - RNA, 60 nt, Human
gcuaaauggccggaccauggagauugagucuaccuuucacauguauguccagccuguagu

SEQ ID NO: 5064 - RNA, 101 nt, Human
ggccaucuuugaacuccuggacuauauugugaacgagccaccuccuaagcugcccaacgguguguucacccccgacuuccaggaguuugucaauaaaugcc

SEQ ID NO: 5065 - RNA, 66 nt, Human
gggccucacuuguccaccuuccagcagauguggauuagcaagcaggaguacagacgagucgggccc

SEQ ID NO: 5066 - RNA, 85 nt, Human
ggguauggaaucuugcggcauccacgagaccaccuucaacuccaucaugaagugugacguggacauccgcaaagaccuguacgcc

SEQ ID NO: 5067 - RNA, 100 nt, Human
gaggaaggagauucugcuaguaaaaaggagugggggaagaauggccauugggagacaacaagcagacucaaccaggccucuuuguuggcuuccuuuccuc

SEQ ID NO: 5068 - RNA, 111 nt, Human
gagggacaggcacuugagcuuggucacagucagaaggguggaggggagucagccgucagccccuccaccaagcugccacucagugaccaggccugucugccucucacccuc

SEQ ID NO: 5069 - RNA, 84 nt, Human
ggcugccuccgguaaccacaguccugccacugucccuuccucccuaggaugacgcggcauggcaagaacugcaccgcaggggcc

SEQ ID NO: 5070 - RNA, 94 nt, Human
caggaacugcgcuucgcuuccgagauccugugcacaggcaccugccaaauacacgguguaugacgcaaagggauaugugaagccccagaacuug

SEQ ID NO: 5071 - RNA, 91 nt, Human
aaacgugcaaauguauuguagagacuuuaugauuagaauggcauauauuuaugaaacuuaaagaugaauguuuuauugaauuuguagguuu

SEQ ID NO: 5072 - RNA, 61 nt, Human
guagacaaaaauaacacaauaacaggagacuuccauaagcuuguguauuauguuagucuau

SEQ ID NO: 5073 - RNA, 70 nt, Human; identical to SEQ ID NO: 1335

SEQ ID NO: 5074 - RNA, 76 nt, Human; identical to SEQ ID NO: 3277

SEQ ID NO: 5075 - RNA, 70 nt, Human
uuuuuuuccuccccucucaguagcacggaguccgaauuaauuggauuucauucacuggggaggaacaaaa

SEQ ID NO: 5076 - RNA, 74 nt, Human
gguuuugaaaauguacaauauguauaauuuuuaaaauguuuuauuauuuugaaaauaauguuguaauucaugcc

SEQ ID NO: 5077 - RNA, 76 nt, Human
uugaccuuuucuuccuggacuauugaaaucaagcuuauuggauuaagugauauuucuauagcgauugaaagggcaa

SEQ ID NO: 5078 - RNA, 125 nt, Human
ccagcccggguguucugaaauuggcgacuucaaauugcuguucuuuuggaauuagaccuuaagguagguuuuaagauucaaggggaacgaauuuaagaggguugguuaggggcaaacgggcgcgg

SEQ ID NO: 5079 - RNA, 65 nt, Human
accuggccacuuguacccgggucccgcggagaucgggggcccgaaagggcacaaaggggucacgu

SEQ ID NO: 5080 - RNA, 62 nt, Human
gagguaucugcugcgccugagaugaguaaacugucguuucgggcgcgggcgcuagacgccuc

SEQ ID NO: 5081 - RNA, 76 nt, Human; identical to SEQ ID NO: 4356

SEQ ID NO: 5082 - RNA, 83 nt, Human
ccacuuuauuauggaugauccagcaggaaacaguuacuugcagaauguguaugcgccugaagaugauccugagaugaaggugg

SEQ ID NO: 5083 - RNA, 89 nt, Human
gguuacccuaacagcuaaugauaagacaaguguuuccuucuccucccucccgggacaaggugucauauacaaugucauuguuugggacc

SEQ ID NO: 5084 - RNA, 68 nt, Human
guaugaugucuaucaguauuuucugccugagaaugaccucacugaggagauguugcugaagcaucugc

SEQ ID NO: 5085 - RNA, 71 nt, Human
uuccugcgcucuacgguuuuccaugcccccuccaguuugggggucuaaaccaaacaggaaaggugcagggg

SEQ ID NO: 5086 - RNA, 87 nt, Human
agaggaagcgggaggagcugagcaacguacuggccgccaugaggaaagcugcugccaaugaaagacugagccccuccccugcccucu

SEQ ID NO: 5087 - RNA, 62 nt, Human
ggcgucugaccaaacacaccaaguucgugcgggacaugauucgggagguguguggcuuugcc

SEQ ID NO: 5088 - RNA, 64 nt, Human
uauggccgugggccucaacaagggccacaaagugaccaagaacgugagcaagcccaggcacaug

SEQ ID NO: 5089 - RNA, 80 nt, Human; identical to SEQ ID NO: 2364

SEQ ID NO: 5090 - RNA, 64 nt, Human
uaugaauaaaugaacauuugcaauuuuaaaaucccaaaucacuugccaauguugcaaauucaua

SEQ ID NO: 5091 - RNA, 64 nt, Human
ccaagucugacccacucugcguccuuuuacaggaugugggagggggcagcugggcugagcuugg

SEQ ID NO: 5092 - RNA, 94 nt, Human
gcuggagugcacucgcgcgggggguaauucggggucuggguucuggugccugcgcagcuuuccccgauggcccacugcgugaccuugguucagc

SEQ ID NO: 5093 - RNA, 81 nt, Human
ggacugaacgggugcggaacugcucaagcccugaguucuccaagacucuacaugcuugaguaccgcuuauugagacagucc

SEQ ID NO: 5094 - RNA, 83 nt, Human
cacuuuacaacuuucaauaauagccuguaauuuauauuuacugugugaauuuuuaguccuauauuuuaauaauuuguaaauug

SEQ ID NO: 5095 - RNA, 75 nt, Human
ggaaauggaagugaaacccaguucggugacugcagccgcaaguccuguguaccagauuucagaacuuauauuucc

SEQ ID NO: 5096 - RNA, 71 nt, Human
uggagagaaaaacaaugcauucauuguugccagcuuugaaaauaaagaugagaacaaggaugagaucucca

SEQ ID NO: 5097 - RNA, 71 nt, Human
augaaccauaaugcugcuucuugugcaugucugcucugauauacgucgaacaauguagcagccacugucau

SEQ ID NO: 5098 - RNA, 62 nt, Human
caggucgagguggugcaucuaucuauggcaaacaguuugaagaugaacuucauccagacuug

SEQ ID NO: 5099 - RNA, 82 nt, Human
gguccacauucacuuucccguggaagguucaggaagcgacaccguuguuaucaggggcccuuccucggauguggagaaggcc

SEQ ID NO: 5100 - RNA, 64 nt, Human; identical to SEQ ID NO: 696

SEQ ID NO: 5101 - RNA, 100 nt, Human; identical to SEQ ID NO: 698

SEQ ID NO: 5102 - RNA, 60 nt, Human; identical to SEQ ID NO: 2705

SEQ ID NO: 5103 - RNA, 72 nt, Human; identical to SEQ ID NO: 1989

SEQ ID NO: 5104 - RNA, 79 nt, Human
gcacgacgacggucgcuggucgcugcaguccgaggcgcaccggcgcuacuucggcggcaccgaggaccgccuguccugc

SEQ ID NO: 5105 - RNA, 117 nt, Human
gccacgacgggcgccugguggcgcgccccgagccggccacuggcuacacgcuggaguuccgcuccggcaagguggccuuccgcgacugcgagggccguuaccuggcgccgucggggc

SEQ ID NO: 5106 - RNA, 67 nt, Human
ucuacagcgucacccguaagcgcuacgcgcaccugagcgcgcggccggccgacgagaucgccgugga

SEQ ID NO: 5107 - RNA, 67 nt, Human
gcugcguaagcaauaugacuugauuucggaaucagaacacaagcacauacugaaggcacuacgcagc

SEQ ID NO: 5108 - RNA, 87 nt, Human
uacucugcugacagagcauuuccuugggugaucauaguuucgagguagaguuuaugaucaucucauaagcuuugucuagaaggagua

SEQ ID NO: 5109 - RNA, 91 nt, Human
guccuucuucaccgacgaugacaagcaagaccaccucagcuggggaguggaaccuugucgauuaagaacggaguuggacagaaugaagugc

SEQ ID NO: 5110 - RNA, 78 nt, Human
guguuaaaggaagguucugaauauagagucaaaauucacuucaaagugaacagggauauugugucaggccugaaauac

SEQ ID NO: 5111 - RNA, 84 nt, Human
ucagcacaccuacaggacuggggugaaaguggauaaagcaacauuuaugguuggcagcuauggaccucggccugaggaguauga

SEQ ID NO: 5112 - RNA, 60 nt, Human
uguggaggaggaugacgaugaugagcuggacagcaagcucaauuauaagccuccaccaca

SEQ ID NO: 5113 - RNA, 106 nt, Human
gccgucuccgccucgggguccgccgggggcgcccugcugagcgcuacccacgugcgucgcgccaccucgcgggcgaccccgcggccaaggcccccggcggagcggc

SEQ ID NO: 5114 - RNA, 83 nt, Human
guuugcagacucugugggaauuguuuuucaucuguuucuaugguugucaaaugaauucuucacccacccuacaguuugcuaac

SEQ ID NO: 5115 - RNA, 69 nt, Human
ugucuucaguauuaggucuccaacucuuguaaaaaguuuauauguaggauaaaaaccuuuuagaggaca

SEQ ID NO: 5116 - RNA, 65 nt, Human
aguuuggguuuguuuuuguuuuaacuauuuugaagguuaggugagaugggcaaauaggcuuaacu

SEQ ID NO: 5117 - RNA, 78 nt, Human; identical to SEQ ID NO: 99

SEQ ID NO: 5118 - RNA, 65 nt, Human; identical to SEQ ID NO: 247

SEQ ID NO: 5119 - RNA, 80 nt, Human; identical to SEQ ID NO: 100

SEQ ID NO: 5120 - RNA, 73 nt, Human
gucauuuugguuuacaauggaaacucggggaauucaaaauuaacauccugugcccggugagcuucuuauagac

SEQ ID NO: 5121 - RNA, 86 nt, Human
uucccacuggaacuuuuucuccaauucgggguacuagccgggacugggauuuucugggaaagauucucaguuggaggaacggggaa

SEQ ID NO: 5122 - RNA, 60 nt, Human
ggcaccccagacaccuuccuucaacccagggcggguuggacaggguuccccugugguucc

SEQ ID NO: 5123 - RNA, 62 nt, Human
agcauccagagucugguguccuuuaaucaguuggcagguucaaccuggaggccacuggagcu

SEQ ID NO: 5124 - RNA, 86 nt, Human; identical to SEQ ID NO: 1403

SEQ ID NO: 5125 - RNA, 71 nt, Human; identical to SEQ ID NO: 77

SEQ ID NO: 5126 - RNA, 84 nt, Human
uccuugaacuuggaaccugacaauguugguguugucguguuggaaaugauaaacuaauuaaggaaggagauauagugaagagga

SEQ ID NO: 5127 - RNA, 91 nt, Human
uggcuaugacacaaucauuuaccagaaacguuuccaugauggguccuguugaaaggaggaaagcugucuggauuuaugugugccaugguca

SEQ ID NO: 5128 - RNA, 101 nt, Human; identical to SEQ ID NO: 5064

SEQ ID NO: 5129 - RNA, 89 nt, Human
ccacuuuguuggcccuuccagugggauuaucgagcauguuguuuuuucauagugccuuuuuccuuauuucaaggguugcuucugagugg

SEQ ID NO: 5130 - RNA, 100 nt, Human
ugaggcaggagaaucgcuugaaccugggaaguggagguugagugagccgggaccgugccauuguacuccagccugugugacagagcgagauuccgucuca

SEQ ID NO: 5131 - RNA, 63 nt, Human
guugaccuaaacugugaaugagcuauccauuuuuaccuacacgauaguauugagcaagucaac

SEQ ID NO: 5132 - RNA, 82 nt, Human
uggggaaaaggucagaaagaccuccugacuccauguuacaguagacaaaacaaguuggacucuuuuggaccuauaaacccua

SEQ ID NO: 5133 - RNA, 76 nt, Human
agcuuguacaaauuucaagaaaauaagaagauaccuaaagguuuuuagcuaaggaaaauaagauuuguaaauaguu

SEQ ID NO: 5134 - RNA, 62 nt, Human
agucuauuaaagaauucaacuaugcaaauuugugucuauuuaacaugaggcucuuuaagacu

SEQ ID NO: 5135 - RNA, 86 nt, Human
ucagaaccaauaauuaggauagauuuuaugcucucuucauuacauugugaagugucuuguguagucauauucuauuguuggaauga

SEQ ID NO: 5136 - RNA, 94 nt, Human
gcgugguucugaugaaguugaacugguuuguguugcaggucucucucgagaauggguacguguccuaaaggauuccaucaaagugaaccuucgc

SEQ ID NO: 5137 - RNA, 131 nt, Human
gcuucuggugacacacagcugggauuagcccagggcuugugcgaaacccuggacuuccggccaggaaggcacggaagagggcauggguguugccgggcccgggugggggcucagcuuuggucaccaggggc

SEQ ID NO: 5138 - RNA, 72 nt, Human
aucgugccuuagcaaacaucuucgugugagcuacuucgugagcccacauguauguguuuguugaggggcgau

SEQ ID NO: 5139 - RNA, 67 nt, Human
uacaucuuagaaucuuucugugguauauaauuaucucauuuuuuaccacauaauauuuuauaaugug

SEQ ID NO: 5140 - RNA, 98 nt, Human
ggauccucucuuggacuuuagcucuccaucucugcugaggggauaugaagguauuugcauuucuccuguuaaugaagggauuaaguucauaagauucc

SEQ ID NO: 5141 - RNA, 74 nt, Human; identical to SEQ ID NO: 2717

SEQ ID NO: 5142 - RNA, 62 nt, Human
gcuucuguuugugcacaaguaacacgacgacugaaaucugcaacuacugcaaagacgcgggc

SEQ ID NO: 5143 - RNA, 82 nt, Human
gacgcauuuaacaugcaaaugagacaacggaaaggcacucucucuguuaacuuuguugaucucuauguuguauguagugguc

SEQ ID NO: 5144 - RNA, 71 nt, Human
gagcuuugggagagauggccgauaauggagucuggauaaugaauaggcccggcauaugguuccccaaacuc

SEQ ID NO: 5145 - RNA, 65 nt, Human
gugucccuaaaaugugucgcgcgagggaaugguagcagaccucgagaaggcuuuggauuugacac

SEQ ID NO: 5146 - RNA, 64 nt, Human
ucuguaugcuuugagcaagaucguggccagcaaaggagguuugaaauggucaccaaagagaaga

SEQ ID NO: 5147 - RNA, 84 nt, Human
gggaauuuugauaugaaaagaaacuagucauuuauuuauacaauaggcuuggcucaaaaguguuuuucagaccucgguauuccu

SEQ ID NO: 5148 - RNA, 61 nt, Human; identical to SEQ ID NO: 3893

SEQ ID NO: 5149 - RNA, 87 nt, Human
uuuuauuuuuaguagcaaauuuggauguagacugacagacauagcugaaugucuuaauaaauuuaaauuugaagauuaaaaaaaaaa

SEQ ID NO: 5150 - RNA, 81 nt, Human
gaugaguggcuuuucgagggaccuggcacguacaucccccggaaggaaguggaggucguggagaucauucaggccaccauc

SEQ ID NO: 5151 - RNA, 60 nt, Human
gggcaugagggacuagagcgcauuggauucccaaguguuacucaaguguucucagagucc

SEQ ID NO: 5152 - RNA, 65 nt, Human
gauguccuucccucccuaauaacuguaaauauauaaauaugucagguuaaagggaaaagguguuc

SEQ ID NO: 5153 - RNA, 81 nt, Human
ggcagcguggcgggaacggcugcuucuccucugcccagggcccuguucuuggugggacucggcugccccuccucugcugcc

SEQ ID NO: 5154 - RNA, 76 nt, Human
accagcuggauaaggacaucaauaccuucucuaugcgugucagggagugguacggguaucacuuuccggagcuggu

SEQ ID NO: 5155 - RNA, 61 nt, Human
gcacgaggacugguccauuaucaucuucaccaacacgugcaagaccugccagauucugugc

SEQ ID NO: 5156 - RNA, 65 nt, Human
aaggcuucgucugccaaacagagacucaagugugccagucuccaaaaauuuggagaaagagcuuu

SEQ ID NO: 5157 - RNA, 123 nt, Human
cuuuuaugccccggaacuccuuuucuuugcuaaaagguauaaagcugcuuuuacagaauguugccaagcugcugauaaagcugccugccuguugccaaagcucgaugaacuucgggaugaagg

SEQ ID NO: 5158 - RNA, 77 nt, Human
uggagaucugcuugaaugugcugaugacagggcggaccuugccaaguauaucugugaaaaucaagauucgaucucca

SEQ ID NO: 5159 - RNA, 60 nt, Human
gaagcaggagccggugaaaccugaagaaggcagagauauggcaaacaggauuggcgcuuu

SEQ ID NO: 5160 - RNA, 64 nt, Human
ucuucagcuacccgccuucgucuccgaguuugcgacucgcggaccggcguccccggcgcgaaga

SEQ ID NO: 5161 - RNA, 79 nt, Human
ugugcccacaguguuugagaacuauguggcagauaucgagguggauggaaagcagguagaguuggcuuugugggacaca

SEQ ID NO: 5162 - RNA, 78 nt, Human
cugggguguuuauggcaagucacuuugacagacauuauuguggcaaauguuguccgacuuacuguuucaacaaaccag

SEQ ID NO: 5163 - RNA, 80 nt, Human; identical to SEQ ID NO: 100

SEQ ID NO: 5164 - RNA, 60 nt, Human
acaagacuugcauagaaaaauaagauauuauauuuuguuuguauguauuuagagauuugu

SEQ ID NO: 5165 - RNA, 72 nt, Human
ggauacuuauagacagacuuauuggacaauuaugauuuuugcagagaaccagaaucagggucuguuuauucc

SEQ ID NO: 5166 - RNA, 71 nt, Human
uacuaagucugaagaugggcauuaugcaagaacagauuaugcagagaaugcuaacaaauuagaagaaagug

SEQ ID NO: 5167 - RNA, 81 nt, Human
gccccucucugcccagggaaggcaccgcccucaaagacaaggcuuggccgggcagugaccuucccugagcggagggguggc

SEQ ID NO: 5168 - RNA, 72 nt, Human
ccgugcgcguagcugcggccgugguccgcgcccuuccucggcgggccggacuggucuccagaaaugcuaugg

SEQ ID NO: 5169 - RNA, 86 nt, Human
guggucucccgcgcgggacggagggacuggccggagcuggcgcuuucucagcacuagaucuggacuccgacccggcgccagaauac

SEQ ID NO: 5170 - RNA, 84 nt, Human
ugccugccaagccaguggcucagcuucucuuauggugacauucugcaugucauuaaugccucugaugaugagugguggcaggca

SEQ ID NO: 5171 - RNA, 108 nt, Human; identical to SEQ ID NO: 710

SEQ ID NO: 5172 - RNA, 75 nt, Human; identical to SEQ ID NO: 74

SEQ ID NO: 5173 - RNA, 79 nt, Human
gcccccgguaucauuccucgaauuuccagugcgggaaccaaugcagacuggcauuaaggcuguggauaagcuggguggc

SEQ ID NO: 5174 - RNA, 87 nt, Human; identical to SEQ ID NO: 76

SEQ ID NO: 5175 - RNA, 71 nt, Human; identical to SEQ ID NO: 77

SEQ ID NO: 5176 - RNA, 89 nt, Human
cauccacccaggaggaggcacuggcaggcugggagcccaugggaguaauuggccucauccugccaaccacauucuccuuccuugagaug

SEQ ID NO: 5177 - RNA, 71 nt, Human
cuaugugaaugggaagugguuaaagccugaacacagaaauucagugccuugccaggaucccaucacaggag

SEQ ID NO: 5178 - RNA, 89 nt, Human
gcggcugcuguggacccuggaaucccuggugacugggcgggcuguucgagagguucgagacggggacguccagcuggcccagcagcugc

SEQ ID NO: 5179 - RNA, 65 nt, Human
gagggugaaugcugcugagcccacccagagguuguuggaguucagcggggcagcuugucucccuu

SEQ ID NO: 5180 - RNA, 70 nt, Human; identical to SEQ ID NO: 999

SEQ ID NO: 5181 - RNA, 61 nt, Human
auuucauuuacuucaauaaucuagaguuaauguuuuaaucucacuguaauguuaaugaaau

SEQ ID NO: 5182 - RNA, 92 nt, Human
cauuucauaucuaccucccaaagauauuccuguagauucagucuuacacacuuaauuugacuuggaauugucuuaaggaugcuuuugaauug

SEQ ID NO: 5183 - RNA, 131 nt, Human
uuauuuaaccaaucaaaucagagucaccuuaauguuuaucuuuuauuuuuuuacugaguagaaaaagaauuauuuaaaaauaaaugugagcacagguugucauacuuugaauaucaagaugaaaauaauga

SEQ ID NO: 5184 - RNA, 63 nt, Human
cuccacuuccaguugcaugggacucuccccacauuaagaguuccaauagcugguucuauagag

SEQ ID NO: 5185 - RNA, 64 nt, Human
ugaaauacagcauuuuuguugccaauguuucguaccagcagaaucuucugggugcuguauuuga

SEQ ID NO: 5186 - RNA, 60 nt, Human
ugggcguaauccuuguucuccucuggaguaaagaggauuuggaauauggaaggcacucca

SEQ ID NO: 5187 - RNA, 62 nt, Human
cuuacagcugagaccuguuccugcaagccagcugccuugucugaacagaacguagugguagg

SEQ ID NO: 5188 - RNA, 85 nt, Human
ggagcagugagcacagcaguucuggcuugcuguccaaagcaugggauucuggagugcagccagagcccugcugaguuccugcuuc

SEQ ID NO: 5189 - RNA, 65 nt, Human
ucugcuacugggcucagucccaggccuuuucuugggcuuucgggacuggcugaggccuagacaga

SEQ ID NO: 5190 - RNA, 68 nt, Human
acagcagccuccacugcccgaccugggagggacggcgagggacugggaugggcagcugagcugugggu

SEQ ID NO: 5191 - RNA, 81 nt, Human
gcuucugacacaggacggucguggagaagaugcccuggaggagccacuugggcuuguuuuuccaccagaccccgaagaagu

SEQ ID NO: 5192 - RNA, 74 nt, Human
ccaaugggagguuuguguacagucagugaaauugaagaacauuuaugucauuaauggacuuacauagcuauugg

SEQ ID NO: 5193 - RNA, 84 nt, Human
guauuuuuuauguuggcacgaauuggagaccugagccaguaaaagcagacgcugggcucuaagagauacagaugugaaggauau

SEQ ID NO: 5194 - RNA, 105 nt, Human
agacaaggccucgcucugucacccagggcuggagugcaguggguguggaucaauaccucacugcagccuccaacuccuggggcucagggcaauccuuccuugucu

SEQ ID NO: 5195 - RNA, 83 nt, Human
gggggaguuguggugcuucugggucucugggccccgccugcuggccugggaugcccucauguugggaagcauuccgugccccc

SEQ ID NO: 5196 - RNA, 72 nt, Human
ggcuuggugagggccaccaccccacuguggggggcuaacuuuccggguggugaaaaagcccuccucauugcc

SEQ ID NO: 5197 - RNA, 71 nt, Human
ucacccgcuugugaaauggccccgcuauaucagguugcagcggcagagagccauccucuauaagcggcuga

SEQ ID NO: 5198 - RNA, 65 nt, Human; identical to SEQ ID NO: 1245

SEQ ID NO: 5199 - RNA, 76 nt, Human
ccggggcggccucgcgggugacuccgggcuccguggcugucccggaccccaccucuucccugccgcccgccaccgg

SEQ ID NO: 5200 - RNA, 84 nt, Human; identical to SEQ ID NO: 1246

SEQ ID NO: 5201 - RNA, 61 nt, Human
gaccaaggccagcuucucugugguggggauggugaagucccugacgcggagcuccaugguc

SEQ ID NO: 5202 - RNA, 86 nt, Human
gggcgugcuagcaguucgcccggugguucacguacuacuggagcucaccaagaucgcagucaccguggcggucuguaguagugccc

SEQ ID NO: 5203 - RNA, 74 nt, Human
ggugcugcugugcugggccacgcgccuggaaggagaccaacauggcgcugcacccagauaccucugcagccacc

SEQ ID NO: 5204 - RNA, 83 nt, Human
gguguggcucacggccaucgugcuguucugcuagguucuauguguaccgcucagaguggcaugaaggucuacaacuccacacu

SEQ ID NO: 5205 - RNA, 63 nt, Human
augggguugggaucacaauauggucugguccaaucugcaucuuguugugucccaagacccuau

SEQ ID NO: 5206 - RNA, 81 nt, Human
caguucugauggggcuccaacagccaggcugugguccuuugacguuccucaccuguugccaaccuaucccguagugaacug

SEQ ID NO: 5207 - RNA, 72 nt, Human
gagcugcugggucccucaucucccucaucuauuauagauugacuuacagcagggagagaaucucuuuagcuc

SEQ ID NO: 5208 - RNA, 65 nt, Human; identical to SEQ ID NO: 2386

SEQ ID NO: 5209 - RNA, 72 nt, Human
uagagauguaugcagauguguccauauuauguccauauuuacauuugaauagccaugauguaugcaucucug

SEQ ID NO: 5210 - RNA, 62 nt, Human; identical to SEQ ID NO: 3062

SEQ ID NO: 5211 - RNA, 90 nt, Human
ccuuccgcuugcgcugugagcugaggcgguguaugugcggcaauaacaugucaaccccgcugcccgccaucgugcccgccgcccggaagg

SEQ ID NO: 5212 - RNA, 70 nt, Human
gugaagaauggcauuccuucuaacagaauuauuucgggaggguuuucucagggaggagcuuuaucuuuau

SEQ ID NO: 5213 - RNA, 65 nt, Human
cuagaaggagaaucugugguuuucgccugauagaccacagggccaaucaccacagcuucuuguag

SEQ ID NO: 5214 - RNA, 85 nt, Human
cgugagcuucuuauagacaccagaaaaaguuucaaccuuguguuccacauuguucugcuguucuuuguccaaaugaaccuuuaug

SEQ ID NO: 5215 - RNA, 79 nt, Human
agcaugacugacacgucugaccccugagaagguggucucugccuuccuaaaggugucaucuguguucaaggacgaagcu

SEQ ID NO: 5216 - RNA, 87 nt, Human
gugaggauggcagugcaggaugcaguagaugcccugaugcagaagugcuuucaacuccucguccuucaacuccaacaccuuccucac

SEQ ID NO: 5217 - RNA, 100 nt, Human; identical to SEQ ID NO: 698

SEQ ID NO: 5218 - RNA, 60 nt, Human; identical to SEQ ID NO: 2705

SEQ ID NO: 5219 - RNA, 72 nt, Human; identical to SEQ ID NO: 1989

SEQ ID NO: 5220 - RNA, 130 nt, Human
uggcccuccaggcccccgcccccaucccguccacguugcugugucgugaggugcagcgggucacccuguggcccguccugugacccauauuuagccguguuugggacuccgugucuucaaugguuuguua

SEQ ID NO: 5221 - RNA, 99 nt, Human; identical to SEQ ID NO: 2179

SEQ ID NO: 5222 - RNA, 80 nt, Human
cauguggcuugcucaguguuuaauugcaaguuuucaaucuuggacuuugaaaacaggauuaaaccguuaguauucgugug

SEQ ID NO: 5223 - RNA, 93 nt, Human
gacauuuaaaaaaugaggugaaagaaagcuauaguggcauagaaaaaguauaaagcucaguuaguuuuuuuauuauuauuauuauuaaaaguu

SEQ ID NO: 5224 - RNA, 70 nt, Human
gaugugaccuaccagauuucagaacauguguuaauaguauauaugccacugaaaacuuagguccuguauc

SEQ ID NO: 5225 - RNA, 88 nt, Human
gccucuucugaaggaaaagacaguguaguccugcaaaacaucuugaggacuacuguucgaagauuuuuggaagaauacugagaacggc

SEQ ID NO: 5226 - RNA, 84 nt, Human
cuaacaaucgcagccaugguaacagcuccaaauugcuuuucacaugugccacauggagcugaagaggcugccuugacuuguugg

SEQ ID NO: 5227 - RNA, 90 nt, Human
gagaucacuuuacccucaucagcauuuacaaggcuuaccaagacacaacucugaauucuagcagugaguacuguguggaaaagugguguc

SEQ ID NO: 5228 - RNA, 64 nt, Human; identical to SEQ ID NO: 3180

SEQ ID NO: 5229 - RNA, 74 nt, Human
uggaaguuacuuuaguucauuuaauuuuaauuuuauauuuugugaauauuuuaagaacuguagagcugcuuuca

SEQ ID NO: 5230 - RNA, 81 nt, Human
cgcccguccggcgcacgcuccgccuccgucaguuggcuccgcugucgggugcgcggcguggagcggcagccggucuggacg

SEQ ID NO: 5231 - RNA, 61 nt, Human
ggagggggcgggcggggggcgccgaccgcggccugaggcccggccccuccccucucccucc

SEQ ID NO: 5232 - RNA, 95 nt, Human
guuuuguuuuguuuuuuuuuugacggaguuugggcucugucacuccagcuggagugcagugucgagacuuacaccugggaacaacagaucacugc

SEQ ID NO: 5233 - RNA, 77 nt, Human
ucuggaggcugggagguccaagaucaaggugccagcagacauggugucuggugagggccgucuuccuggcuugcagg

SEQ ID NO: 5234 - RNA, 122 nt, Human
ccugcggaguaacugcaaagaugcuguccgugcgcguugcugcggccgugguccgcgcccuuccucggcgggccggacuggucuccagaaaugcuugggguucaucuuucauugcugcaagg

SEQ ID NO: 5235 - RNA, 106 nt, Human
ggcuuaaaggguauguccuugaacuuggaaccugacaauguuggugugucguguuggaaaugauaaacuaauuaaggaaggagauauagugaagaggacaggagcc

SEQ ID NO: 5236 - RNA, 126 nt, Human
guuggucugaaagcccccgguaucauuccucgaauuucagugcgggaaccaaugcagacuggcauaaagcugggauagcuggggugcccauugggcguggcaggugaaccgguaauugggaccgac

SEQ ID NO: 5237 - RNA, 71 nt, Human
gccuggagcaaauucuucuccucugcucuacgccaccucaggcagcagggacagggcaaagggcuccaggc

SEQ ID NO: 5238 - RNA, 60 nt, Human
gugacuccugcgggcgcccccacuucuuuuugggggugggagggccaggcgucggguuau

SEQ ID NO: 5239 - RNA, 68 nt, Human
agcugaugcugugugcugccagaugaccaggagcuccucaagggcugugccugcgcccagaagcagcu

SEQ ID NO: 5240 - RNA, 63 nt, Human
cucgagggucuguauaucacagagccaaagacaauucaggaacugcugugcagccccucagag

SEQ ID NO: 5241 - RNA, 109 nt, Human; identical to SEQ ID NO: 831

SEQ ID NO: 5242 - RNA, 128 nt, Human
ggugggauugcuugguggccuuggucguggucggugacugguuuggggccggcgccggaaccccugguuuggccucuuuccgaaguuccguggucuugaaaaacggcgguuuggcuuggcaaccugcc

SEQ ID NO: 5243 - RNA, 87 nt, Human; identical to SEQ ID NO: 76

SEQ ID NO: 5244 - RNA, 75 nt, Human; identical to SEQ ID NO: 74

SEQ ID NO: 5245 - RNA, 86 nt, Human; identical to SEQ ID NO: 1403

SEQ ID NO: 5246 - RNA, 71 nt, Human; identical to SEQ ID NO: 77

SEQ ID NO: 5247 - RNA, 65 nt, Human; identical to SEQ ID NO: 247

SEQ ID NO: 5248 - RNA, 80 nt, Human; identical to SEQ ID NO: 100

SEQ ID NO: 5249 - RNA, 93 nt, Human
agaucuaugauuuucauauauauacgaucuuucaucuuucauauacauaugaaaaucacagauccgauucauauauaugaaaaucauagaucu

SEQ ID NO: 5250 - RNA, 72 nt, Human
ccaggaacgaaaaugacggaacgggugcuggaggccucaggguugcccacuucccgugcuccaaguuucugg

SEQ ID NO: 5251 - RNA, 110 nt, Human
ccguguuugaggcagggcagugcccagcuccauguaaguccaucugucugggucccugagacccaagaugcagcaguguguggagcagggggccgcccugccugacccgg

SEQ ID NO: 5252 - RNA, 74 nt, Human
uuuuuuuuuuugggcuuucaaaaugugaacuuauaauaacaggucaaagugugggggucccccaggaacgaaaa

SEQ ID NO: 5253 - RNA, 82 nt, Human
cggcuccgagaagcagguucuucgugaguuccucgcaagggccggucagagcuacacauugagaaccugaacauggaggccg

SEQ ID NO: 5254 - RNA, 61 nt, Human
cuuccuccccgagcccaugggcacggccaacauccagcuccacgggccucccagagugaag

SEQ ID NO: 5255 - RNA, 80 nt, Human; identical to SEQ ID NO: 788

SEQ ID NO: 5256 - RNA, 79 nt, Human; identical to SEQ ID NO: 3903

SEQ ID NO: 5257 - RNA, 70 nt, Human
gucgcggccgaccccgucgccuccgccggcuaccauguccgcccaggcgcagaugcgggcccugcuggac

SEQ ID NO: 5258 - RNA, 100 nt, Human
ucaugggcacggcucgggacggagacgaaaccagacagagggucaaguuuacagaugaccgugucugcaagagucaccuucuggacugcugcccccauga

SEQ ID NO: 5259 - RNA, 60 nt, Human
gcagguauuuagaggugguucugucaggugaagucugaggagccaaagcuauguaugugc

SEQ ID NO: 5260 - RNA, 75 nt, Human
ucagcgcacgccacagggccaguuuuggcuggagaggccugaagcagagccagagcagguccaggugaguucuga

SEQ ID NO: 5261 - RNA, 76 nt, Human
ucucuggccgguuccgaaaagugaggaucagguaguggguggcugauugcacaaguuuagaacccaggauuaggga

SEQ ID NO: 5262 - RNA, 65 nt, Human
guaugaagcuaguugauuuccaguugcacuauuuccaguugccucugaaguucacagggcaauac

SEQ ID NO: 5263 - RNA, 78 nt, Human
caaugugcaacugacaucugcuagugaugaucugguaauauacaaccuguccaguagccgaacaguuuguuuuuauug

SEQ ID NO: 5264 - RNA, 82 nt, Human; identical to SEQ ID NO: 1938

SEQ ID NO: 5265 - RNA, 61 nt, Human; identical to SEQ ID NO: 1940

SEQ ID NO: 5266 - RNA, 73 nt, Human
ugaugcacaaaaugggacugcugaagaguggacaguuggaccuuacuuuggugaccccauacauuugugguca

SEQ ID NO: 5267 - RNA, 66 nt, Human
ccgaccuggcccagccuggcccguccccaauccagugggcuggccaggccaccugcaccagggagg

SEQ ID NO: 5268 - RNA, 98 nt, Human
ccucggccgacuuucccaggcagugcaggcuagcccaguccaggagugugcagccuggcuugggucgagcucugucacaucuggauaagcaacugggg

SEQ ID NO: 5269 - RNA, 67 nt, Human
gaagaggcagaccagcuuuauuuuugaacccaaucacugggugcccaacuaugacucugcuaucuuc

SEQ ID NO: 5270 - RNA, 68 nt, Human
uccuucucgggugccaaaguccugcaggccuccgacuggggagcagcgagacaagcagccgugaggga

SEQ ID NO: 5271 - RNA, 95 nt, Human
ugccgcucacagaguccggacaggaugucuuugauggagaagcccgccuugacagccaccacgcaggaugucccauccgggagaugaaugcagca

SEQ ID NO: 5272 - RNA, 89 nt, Human; identical to SEQ ID NO: 288

SEQ ID NO: 5273 - RNA, 79 nt, Human
ccgggugcggcuccaccccuuccacgucauccgcaucaacaagauguuguccugugcuggggcugacaggugagcuugg

SEQ ID NO: 5274 - RNA, 62 nt, Human
ggaggcugcccgaauuugugccaauaaguacaugguaaaaaguuguggcaaagauggcuucc

SEQ ID NO: 5275 - RNA, 66 nt, Human
gucucgcuucugccgaggugucccugaugccaagauucgcauuuuugaccuggggcggaaaaaggc

SEQ ID NO: 5276 - RNA, 70 nt, Human
gcugacuggggaagccauauuuacaucauccuguuuccuugaugaguccugugccugcccccucuccagc

SEQ ID NO: 5277 - RNA, 71 nt, Human
uaggaagucugagaaugaccuuuacuuuccuauuguuuguuaggagaguuuaacuucaaacuccaacccug

SEQ ID NO: 5278 - RNA, 79 nt, Human
agggagcuugucagaucacaccuuuuugccuuggaaauccuacagauuuccuguacgccuucauaucugauucuucccu

SEQ ID NO: 5279 - RNA, 70 nt, Human
auggaaggaugaagcggagaaagugccuucgagacauucacacauuucucuggacucagucuguuaacau

SEQ ID NO: 5280 - RNA, 67 nt, Human
ucuugcauucauuacauucaaaaggcauuucugcagugggaagucuccuguguguuaugaagcuaga

SEQ ID NO: 5281 - RNA, 74 nt, Human
ucaucagguucggaugagucucauguggcugcugcaccuccagauauaugcucucgaacaguguggccugauga

SEQ ID NO: 5282 - RNA, 66 nt, Human
gggauuacaggcguugagucaccgugcccggccaguacccacuucucuuaaugcucuaugaguucc

SEQ ID NO: 5283 - RNA, 102 nt, Human
ugagauggaauuucacucuuguuacccaggcuggagugcaauggcgcaaucucagcucacugcaaccuccaccuccuggguucaagugauucuccugccuca

SEQ ID NO: 5284 - RNA, 69 nt, Human; identical to SEQ ID NO: 3814

SEQ ID NO: 5285 - RNA, 69 nt, Human; identical to SEQ ID NO: 3815

SEQ ID NO: 5286 - RNA, 112 nt, Human
gagugacugggacuccaggugcgugccaccaagccaaacuucccuuucaguucuugacauuccuuuucugcuuuguaucaugcaucuccccagaucuccccuaacuucauuc

SEQ ID NO: 5287 - RNA, 70 nt, Human
ggaggcucucuguguugcccaagcuggacuugaacucuugggcuccagcaguccucccacaugagccucc

SEQ ID NO: 5288 - RNA, 77 nt, Human
gggccagcagacuaucuaggaagcaggaguagcaugacuuuaaagugauucucugugccaaucucugcaacugguuc

SEQ ID NO: 5289 - RNA, 71 nt, Human
caggggcgaguauccguugcugugucggagacacuaguccccgacaccgagacagccagcccucuccccug

SEQ ID NO: 5290 - RNA, 83 nt, Human
cgcggcgggagagcgugucccgccggcccugaacgccaugagccuggguccccgccgcgcccgcuccgcuccgacugccgucg

SEQ ID NO: 5291 - RNA, 70 nt, Human
guugaugccgcugagcucccccaacgccgccgccaccgccuccgacauggacaagaacagcggcuccaac

SEQ ID NO: 5292 - RNA, 80 nt, Human
uauuagguggugcauaaguaaugugguuuugccaugacuuuuauggcaaaaccugcaauuacuuuugcaccaacuuaaua

SEQ ID NO: 5293 - RNA, 87 nt, Human
uuugcaaucuaaagguaugaaucaaauagguacuuugaagcauuuaucaaguguaagcuauugaagugcauguauuuaaaaggcgaa

SEQ ID NO: 5294 - RNA, 75 nt, Human
acagagccacuggcacaagugcccuuagugcugccacacucccuggcagccaggugcccuggugcccaccccugu

SEQ ID NO: 5295 - RNA, 60 nt, Human
ggauggggagguugggggggcaggagcuucugucccccacauuccaugcaccuccccucu

SEQ ID NO: 5296 - RNA, 87 nt, Human
uggguauggaaucuugcggcauccacgagacaccuucaacuccacucaugaagugugacguggacauccgcaaagaccuguacgcca

SEQ ID NO: 5297 - RNA, 72 nt, Human; identical to SEQ ID NO: 3359

SEQ ID NO: 5298 - RNA, 79 nt, Human
cagcucuuaucugaaaacuacaccgcuguggcccagacugugaaccugcuggccgaguggcucauucagacagguguug

SEQ ID NO: 5299 - RNA, 69 nt, Human; identical to SEQ ID NO: 4233

SEQ ID NO: 5300 - RNA, 72 nt, Human
ugauucuggagaaggagaggaugaugcggagguucagcaagaaugccugcauaaauuuuccacccgggauua

SEQ ID NO: 5301 - RNA, 84 nt, Human
gcugaaacggcugugggaggcugggcccugggacgcccucucauagcguccagcgauccagacaaauaggagagccgugacggc

SEQ ID NO: 5302 - RNA, 78 nt, Human
aaggaguuuuucucguagugauucucaaagucuugguaggcauucgaacugguccuuucacuuugagauucuuuucuu

SEQ ID NO: 5303 - RNA, 62 nt, Human; identical to SEQ ID NO: 484

SEQ ID NO: 5304 - RNA, 70 nt, Human
gauggaaguaaucugcuuaacaaucucagaaggacugugcaagucaaugagucgcuugugaauucucauc

SEQ ID NO: 5305 - RNA, 80 nt, Human
guacucugcccgugugggcacuguccugggccagcgauuucugcugccagcugagaacaacaagccccaaagacagguac

SEQ ID NO: 5306 - RNA, 120 nt, Human
agcuggucagauacaaauaauagugacuucacaguuuaguaauuauaauggguacuuguuaacauuugguacuaaauuauguugcugcaaaguaauuaaaauuaguaucuagagcuaguu

SEQ ID NO: 5307 - RNA, 78 nt, Human
uggugaauuaucauuuauuuuguacuguguuaggcagcucuguaguugcuacauuuaaccaaauaagucaauuugcua

SEQ ID NO: 5308 - RNA, 64 nt, Human
uuccaacauacucaccucuucccauaaucccuuuccaacugcaugggagguucuaagacuggaa

SEQ ID NO: 5309 - RNA, 75 nt, Human
ggccuaaagcaagguguguauuuguuauucugaaauuguuuugcaucuggacaaauacuaaauaucccaguggcc

SEQ ID NO: 5310 - RNA, 62 nt, Human
uuaugcguuuaguuugacuuauuuuuaacaaaauauuagaaguuaugcuuuaaaauguuuaa

SEQ ID NO: 5311 - RNA, 61 nt, Human; identical to SEQ ID NO: 3214

SEQ ID NO: 5312 - RNA, 65 nt, Human
gaugcuccacagauaauccuaagagguuuucauuacauuuagccuaaucuggaagaucuggcauu

SEQ ID NO: 5313 - RNA, 64 nt, Human
uaccucaagcagagagagggcuucaggccaccccacuucuggcucuuuccaguccuagcaggua

SEQ ID NO: 5314 - RNA, 70 nt, Human
ggagcagcggcggcuugaggacccggggagacccucaagaaucgacccaucaggacgccagagcugcuuc

SEQ ID NO: 5315 - RNA, 84 nt, Human
ggggagccgccugccccuggcgcugcccccggccucccaggguugcucuucauggggcggcggcggcggcggcggcggcuccuc

SEQ ID NO: 5316 - RNA, 63 nt, Human
ucccucuaacacauucuucccuucuucacaaacggcccaugucagacgaaggcucaaggggga

SEQ ID NO: 5317 - RNA, 73 nt, Human
gaauuggcuugacauaauaaauauaaacauaagggcaauuuaaacauuggcaguaguuuauguaagucaauuc

SEQ ID NO: 5318 - RNA, 80 nt, Human; identical to SEQ ID NO: 174

SEQ ID NO: 5319 - RNA, 64 nt, Human; identical to SEQ ID NO: 175

SEQ ID NO: 5320 - RNA, 66 nt, Human
uuucggcgcugggucgcccaaagcagaauggagacggauagagugguggcucccagaaucccgaag

SEQ ID NO: 5321 - RNA, 98 nt, Human
ggacucgguccccgagcugcgcuggcugcccgugcugcggcacuacgacuuggacuuggugcgcgccgcgauggcgcaagucaucggggacagagucc

SEQ ID NO: 5322 - RNA, 62 nt, Human; identical to SEQ ID NO: 3691

SEQ ID NO: 5323 - RNA, 97 nt, Human
caccaacacaguuuuugaugccaaacgucugauuggacgcagauuugaugaugcuguaguccagucugauaugaaacauuggcccuuuaugguggug

SEQ ID NO: 5324 - RNA, 80 nt, Human
ucuuccauugacauaaaaauagucucaggcuugugugggaaaauuaaguauauagauacuauugcauuuaucaagggaga

SEQ ID NO: 5325 - RNA, 65 nt, Human
cuguccagagcuuccuccagugggacaauuagcauauuuguucgcaaaggagguuggaaggacag

SEQ ID NO: 5326 - RNA, 67 nt, Human
gaucuauuuuuuuucaaaccaggugucugagcugggugaauuccagccuggggagaggacuuugauc

SEQ ID NO: 5327 - RNA, 111 nt, Human
ucugauuuccugucguaagauuuuuucuuuucauuuucuccagggaggguaaaucaauauaaccucuucucuagagaggaggugguuagguuggucuuaagcaguguuaga

SEQ ID NO: 5328 - RNA, 61 nt, Human
ggccugccacuggucauggguagcuagagcugcuggcuucccuguggcuuagcugguggcc

SEQ ID NO: 5329 - RNA, 85 nt, Human
uguuacugggcugugguccuguacccagaggucccagggaucggcuccuggccccucgggugacccuucccacacaccagccaca

SEQ ID NO: 5330 - RNA, 85 nt, Human
cucccugaguagcuuaauaaucaaccuucugaguuauuuauuucgcaauucagagacuucuugauuuggacccauugcuggggag

SEQ ID NO: 5331 - RNA, 78 nt, Human
ggguagacuauuucaguggaaaaaucuggaacucaagggcuguuguucagauucuuuuguaccacguugguggucccc

SEQ ID NO: 5332 - RNA, 93 nt, Human
cauccggauuucccaccagaguguggaacccggggucaugaugcacacugaacauucaagauucuggcacacagccuggugguguuccgagug

SEQ ID NO: 5333 - RNA, 87 nt, Human
ucaucaggccaugguggcagcuguugccuccgcgugcgcaguacagcaggugccaggcuucccaaacagcuccaacccgggugguga

SEQ ID NO: 5334 - RNA, 67 nt, Human
gaauuuccuguaccguuuucuguuuuugccaaauuucuacuuaacagcaucaccuuauaggauucuc

SEQ ID NO: 5335 - RNA, 71 nt, Human
ugucccugcaaagaugacacuccucuccaaggugcuugugagguacagggauguuguuguugcugggugca

SEQ ID NO: 5336 - RNA, 86 nt, Human
ccagggcccaaggacucagaagaggugcccaccaagacuggacggaagucgaugacgauggcacaacggugacucgcggggcaugg

SEQ ID NO: 5337 - RNA, 66 nt, Human
ggggcugcugcaccgcguuuccauagcagcauguccuacggaaacccagcacguguguagagccuc

SEQ ID NO: 5338 - RNA, 66 nt, Human
gucaucucugguuauuguuuuuuccuuguguuuuaaaggggacaaaaaaaaaaaagggauugugac

SEQ ID NO: 5339 - RNA, 74 nt, Human
ugcugggcccccgcccccggcucccccgcacgcaugcauccacugcggccggaggaggccauggagcccgagua

SEQ ID NO: 5340 - RNA, 90 nt, Human
cacugcuuuuauuuaguuugauauguuucuuuacagaaugcagaaaacacaucuuaaaaucauauagaaggaaauaaaaacacaucagug

SEQ ID NO: 5341 - RNA, 85 nt, Human
ucgccuccaguugcuauggaacagggcauucugggcagccacgucucugcauggagugcccaauggguggaguugcuaggggcga

SEQ ID NO: 5342 - RNA, 72 nt, Human
uuuggaaggccuuucaaaagccucaccugggaacauugggaauugguuaauuuuuugaugaggucauccgga

SEQ ID NO: 5343 - RNA, 65 nt, Human
ggauggauaacauaguuguuucucuggggaccaccagacuucuugaagugacuugugucccaucu

SEQ ID NO: 5344 - RNA, 60 nt, Human
gguucggauauggguaguaugacggcgggggaguuguaacagcacacugcauuccgggcc

SEQ ID NO: 5345 - RNA, 105 nt, Human
gugcucguagggagguacacauagucgguugcucccggcaccaaggccgcaggcggcggucggugcagggcgccccgcuggcguaguaguccaucccgcgcagac

SEQ ID NO: 5346 - RNA, 69 nt, Human
uugggguugaagaguuuauuuauugcucugcccccuuggcacagcaagcccaggcucuaccagcaacga

SEQ ID NO: 5347 - RNA, 69 nt, Human
accuauuaaagucuugugucggagaguugaaauauuaaaugaacacagaggagagaaguuaaacagggu

SEQ ID NO: 5348 - RNA, 65 nt, Human
ucacauaaguggaaagaaaaagacauuuaaggauguggaaaucuucuucgaagccauggaauuga

SEQ ID NO: 5349 - RNA, 63 nt, Human
uuggaccauaauagauuuuuaauuuuacagggugaaguugaacaaaugcuaugaugaaaccaa

SEQ ID NO: 5350 - RNA, 104 nt, Human
uugagacagagucuugcucugucacccaggauggaaugcaguggcaccaucucggcucacugcaaccuucgccuucccagguucaagcaauucuccugucucag

SEQ ID NO: 5351 - RNA, 88 nt, Human
cugugacugagucggcccauucuguuuagaaauauauuuuaaauguuuaguaauugacaugugugguuguccuugauuaaguucacag

SEQ ID NO: 5352 - RNA, 101 nt, Human
gaaaaaaaacuacauaauuucuaccagggccauauuagcagugaaacauuuuaaacugcagaaauugugguuuugguucagaaacaaguuguauauuuuuc

SEQ ID NO: 5353 - RNA, 91 nt, Human
agguuggugucugugaaaagcugacagagaugugagaggucccacccugaggccaacaaagacucugcagcucuggcagaaccacuaagcu

SEQ ID NO: 5354 - RNA, 67 nt, Human
uuuauucccagcaccuaccauugugccccccuuauaauagacaguaaugguauagugaaugaaugaa

SEQ ID NO: 5355 - RNA, 84 nt, Human
cccuguacauaaaauguauuugguuuuguuggagagugucagacugauacucuccaacaaaaccaaauacauuucguauggagg

SEQ ID NO: 5356 - RNA, 72 nt, Human
ccgugcgcguugcugcggccgugguccgcgcccuuccucggcgggccggacuggucuccagaaaugcugugg

SEQ ID NO: 5357 - RNA, 87 nt, Human; identical to SEQ ID NO: 76

SEQ ID NO: 5358 - RNA, 74 nt, Human
aaaaccuaacuugcgcagaaaacaagaugagauuggcauggcuuuauuuguuuuuuucguauaguuuagguuuu

SEQ ID NO: 5359 - RNA, 60 nt, Human
acguggacauccgcaaagaccuguacgccaacacagugcugucuggcggcaccaccaugu

SEQ ID NO: 5360 - RNA, 64 nt, Human
cucgacucgaggcuuacaaaccgggcacacggucgccggugaccgcagcucgguggcgagcgag

SEQ ID NO: 5361 - RNA, 87 nt, Human
ggccuuggauggccauggugguuucucuacauagucuuuccacuuaugagaugcguuguacaggaauguccuggccauccuaaggcc

SEQ ID NO: 5362 - RNA, 90 nt, Human
guggaucggcggcuccauccuggccucgcuguccaccuuccagcagauguggaucagcaagcaggaguaugacgaguccggccccuccau

SEQ ID NO: 5363 - RNA, 76 nt, Human
ggaucaggugauagccccggaauguacagugucuuggugcaccaagaugccuucuaaaggcugacauaccuggacc

SEQ ID NO: 5364 - RNA, 76 nt, Human
uuauuagagggaugggacaguuuuccauauccuugcuguggagcucuggaacacucucuaaauuucccucuauuaa

SEQ ID NO: 5365 - RNA, 67 nt, Human
auugccaacugauggaaugugccucugcugacuuguacccaggccagcccacaccacagacugcagu

SEQ ID NO: 5366 - RNA, 64 nt, Human
gaagcucuguagaacuuaggcuacaagacuacaaccuguaucacuuaaggaaguuauuaugcuc

SEQ ID NO: 5367 - RNA, 70 nt, Human
gccccccacccucuguuuauuaaggccacauggagccagccugggaggaacagggcuaggauggaggggc

SEQ ID NO: 5368 - RNA, 72 nt, Human
cauuugaauugguagaccgaguaaugaagaggcagcccucccuaaugugcauggacaucauccaauucauug

SEQ ID NO: 5369 - RNA, 98 nt, Human
gucaacuacaucuaucguucagacagaguacuguggacugcugagaauguccucuauucuugaaguagcguauucuuggagcugauaccucuguugau

SEQ ID NO: 5370 - RNA, 89 nt, Human; identical to SEQ ID NO: 504

SEQ ID NO: 5371 - RNA, 76 nt, Human; identical to SEQ ID NO: 5041

SEQ ID NO: 5372 - RNA, 81 nt, Human; identical to SEQ ID NO: 201

SEQ ID NO: 5373 - RNA, 65 nt, Human
cuuggaugguaucuaugucucugaacccaggaacuguucagcaggcugaugaacuacgaucuaag

SEQ ID NO: 5374 - RNA, 64 nt, Human
ggucucuuguugaaauccgaaauuucuugggugaaaaauacauccgcaggguucggaugagacc

SEQ ID NO: 5375 - RNA, 71 nt, Human
ccagccucuuuaaggagauguguuaccgauaccgggaagaccugauggcgggaaucaucaucgcaggcugg

SEQ ID NO: 5376 - RNA, 61 nt, Human
agccaguuuauaaaguggaaguauuaggagauucauaaaucuucuauauugagaauuggcu

SEQ ID NO: 5377 - RNA, 81 nt, Human
uuuuaaaauuucaaauugguuuuucuacuaguagauuguguuucuagagaaagauacaagggcauaggugauuguuuaggg

SEQ ID NO: 5378 - RNA, 71 nt, Human
aggguccaguuuauguugcaugucaguuuccuauuucauuacuucaagcaugcagugguaugaaugauccu

SEQ ID NO: 5379 - RNA, 102 nt, Human
ugaagauauaccaaauguagcaguuuauccucauaaugggaaugauagacuuaaaauauuucccauauuauggggaaaaaacugcauguugggguaucuaca

SEQ ID NO: 5380 - RNA, 82 nt, Human
uuuuggcuauucucaaggaaacccuuguauucuugugaaaaugaacagaauaauuggauuaaagccugaaggagugccaagg

SEQ ID NO: 5381 - RNA, 67 nt, Human; identical to SEQ ID NO: 1146

SEQ ID NO: 5382 - RNA, 75 nt, Human
ucucuguaaugugccugugccuguggccagaggggagcccccugaccgugcugugggagagcacauugacagaga

SEQ ID NO: 5383 - RNA, 74 nt, Human
ggucuuuuaaagcauuuuagcaguagcuauguaaaaaaaguuaaugguuauuauuccuaaauuuucauaagacc

SEQ ID NO: 5384 - RNA, 127 nt, Human
uguauauaugagguuaguuaagcugcauuuaguuaggaacauuuaauuuuuaccuaaaugauccuuuuuuucauccagagguagagauuuuuauugucauuaugaauguuacuccccauuuagucca

SEQ ID NO: 5385 - RNA, 69 nt, Human
aggaguucugcugggcgucgcgaaggagcuucuccucccgccgcuuccguaaccucucuuugaauuccu

SEQ ID NO: 5386 - RNA, 73 nt, Human
ucccucuugcgcuguaugacaucguccucaaaccacucggccugauuggaaacccagaacauagccacaggga

SEQ ID NO: 5387 - RNA, 84 nt, Human
uggugauagcauuacuauagagauggcgcagcggggauggcaccauauguuccucgugccuauccuggugguacucuagaacca

SEQ ID NO: 5388 - RNA, 86 nt, Human
cuggggggcuucggcagaacccggagaccaccauggccucauuugggccacaagugaaaaacaugguucaggcuggagccuuccgg

SEQ ID NO: 5389 - RNA, 77 nt, Human
gcgggcggcagcccggcuggggucucgggaaggggcgggucgcgcagggaccugggagccgggcaggggccgcucgc

SEQ ID NO: 5390 - RNA, 63 nt, Human
cuugcguuccuuucguugcuuucuugaggucuuuuucuucucauacaggccaugucuugcaag

SEQ ID NO: 5391 - RNA, 64 nt, Human
gaguucugaauccaaauacaaagaugacauccgguguggucuuguacauuuuggcuaguuuuuc

SEQ ID NO: 5392 - RNA, 66 nt, Human
gugaggcgagggaaagagcggauuauugaguuugaugcccagaaucagaucaacccauagucucac

SEQ ID NO: 5393 - RNA, 75 nt, Human
uucagguugaaagucacaaacaguagccuuuuugagaaaccucaaacaauggaauaaaagauuuuauaaccugaa

SEQ ID NO: 5394 - RNA, 68 nt, Human
gacugauauuaaccagccagguaaauugaacgacaauguggcauuagguauuuggcuguuuauugguc

SEQ ID NO: 5395 - RNA, 61 nt, Human
gaguuguuuucauaacugacagcauggugaauccauuugagucaaagugaagaauuuccuc

SEQ ID NO: 5396 - RNA, 60 nt, Human
uacuaugguuuugcaauaugauugaugguaaaagagugaugucauauugauacuagagua

SEQ ID NO: 5397 - RNA, 89 nt, Human; identical to SEQ ID NO: 288

SEQ ID NO: 5398 - RNA, 94 nt, Human
uuuuuuuucucauuuaacuuuuuuaaugggucucaaaauucugugacaaauuuuuggucaaguuguuuccauuaaaaaguacugauuuuaaaaa

SEQ ID NO: 5399 - RNA, 73 nt, Human
ccugggaaacugguuuguauauccugugacccaaagcauccacuuccucaaagguguagccaggaggcucagg

SEQ ID NO: 5400 - RNA, 61 nt, Human
gaagcuaggcaccugcccauuuccuugggaguaaagcugaugguguagguggucuggcuuu

SEQ ID NO: 5401 - RNA, 62 nt, Human
guugucugcuuuuaaaaguacuguguaauuucuaaauuacuauuuuucaaaaucaggcuaac

SEQ ID NO: 5402 - RNA, 101 nt, Human
ggcgccuagggcugcggcagggacucggccucugggagguuuaccucgcccccacuugugcccccagcucagccccccugcacgcagcccgacuagcaguc

SEQ ID NO: 5403 - RNA, 80 nt, Human
acgucgugaacgcccgccuccagugaauguaaugggacuguuucacugcgcccucagcuggcaagcaggucuuaggacgu

SEQ ID NO: 5404 - RNA, 69 nt, Human
agccacguguccucauuuguguccucucauuggcuggcugggcuggggguacugggggacaaacaagcu

SEQ ID NO: 5405 - RNA, 64 nt, Human
cacagggauacuccauuguccccuccucuggcugucccuuggagaggcacuuuggauccuugug

SEQ ID NO: 5406 - RNA, 82 nt, Human
ccauuccaacggagucaguugggacuacaagccacucauuguuaaacacuuagugcuuuuaaaccaacuugcggaauacagg

SEQ ID NO: 5407 - RNA, 61 nt, Human
gaagcccuagaggugucucuaaucacuagaaagauuaaugacccuuuugcuuuaggguuuu

SEQ ID NO: 5408 - RNA, 64 nt, Human
ggaucugggcccugcacauauaccaucucuggcuccagggaaugugagguaugaaccaugaucc

SEQ ID NO: 5409 - RNA, 67 nt, Human
uucacuuucccguggaagguucaggaagcgacaccguuguuaucaggggcccuuccucggaugugga

SEQ ID NO: 5410 - RNA, 73 nt, Human
gcugacgccggcuagggaggagcagcccccacaacaucgauccaagagggggagcucagugggcggcgugugc

SEQ ID NO: 5411 - RNA, 110 nt, Human
cccacagccuaagcugagugugaccccagaagccacgaugugcucuguauccagaacacacuuggcagauggaggaagcaucugaguuugagaccauggcuguuacaggg

SEQ ID NO: 5412 - RNA, 66 nt, Human; identical to SEQ ID NO: 3876

SEQ ID NO: 5413 - RNA, 83 nt, Human
auucaucacguuggguugaaaaguuggaagauuuugcaucuuauugaaaagaauuuuucaaaaauguuucuguacaaaugaau

SEQ ID NO: 5414 - RNA, 65 nt, Human
gcgcuggcuggggucgggcuccaugcucuggaugggacugggccgucgcacacgccagccggugc

SEQ ID NO: 5415 - RNA, 78 nt, Human
guggaguuugugccucggcagcugggccugacggagcgccggguccacaucagccaucugcuggcccacacgcgcuac

SEQ ID NO: 5416 - RNA, 62 nt, Human
ugucaucugcaagaagugccauggggcuggaggggccucagccugcucacgcugugaugaca

SEQ ID NO: 5417 - RNA, 76 nt, Human
aguggcguucagccacccgagauugagcaauaacaggucugugaugcccuuagauguccggggcugcacgcgcgcu

SEQ ID NO: 5418 - RNA, 89 nt, Human
gaugguuuagugaggcccucggaucggccccgccggggucggcccacggcccuggcggagcgcugagaagacggucgaacuugacuauc

SEQ ID NO: 5419 - RNA, 65 nt, Human
agacuccuugcggggcuucaguugcaucuaaauagaugugagaguugaaagaccuauaaggggcu

SEQ ID NO: 5420 - RNA, 76 nt, Human; identical to SEQ ID NO: 5199

SEQ ID NO: 5421 - RNA, 84 nt, Human; identical to SEQ ID NO: 1246

SEQ ID NO: 5422 - RNA, 65 nt, Human
agggccgggcgugcuggagccugggaaaugccuacguguccauggggcgcccagucgcaggcccu

SEQ ID NO: 5423 - RNA, 90 nt, Human
agaucgggaggacuguggccagcaauuaacaccauguagacuuccuuaguucuuaagugguugaauucgcugcuuguucuguaacguucu

SEQ ID NO: 5424 - RNA, 75 nt, Human; identical to SEQ ID NO: 74

SEQ ID NO: 5425 - RNA, 71 nt, Human; identical to SEQ ID NO: 77

SEQ ID NO: 5426 - RNA, 87 nt, Human; identical to SEQ ID NO: 76

SEQ ID NO: 5427 - RNA, 71 nt, Human; identical to SEQ ID NO: 77

SEQ ID NO: 5428 - RNA, 67 nt, Human
cccguuaagucccccaaagaugagauuuaccugugagauguuucaucccaacaucuacccugauggg

SEQ ID NO: 5429 - RNA, 73 nt, Human
gggaggcauugaucaugggcccagaagacaccugcuuugaguuugguguuuuuccugccauccugaguuuccc

SEQ ID NO: 5430 - RNA, 63 nt, Human
uuccauccuccacgcgccaggcgaugaccccaugggcuacgagagcagcgcggagcgguggag

SEQ ID NO: 5431 - RNA, 77 nt, Human
cacggcccccguggccaccauggccuucugaccccaccuccacucugcuagccacagguggcugugauggggccgug

SEQ ID NO: 5432 - RNA, 65 nt, Human
gcgcgucugggacaucgugcggcacuacgggacacaccacuuccgaggcucgcccggugucgugc

SEQ ID NO: 5433 - RNA, 71 nt, Human
aacucggguauuagguuggcuaaccacaagcuuagcggcggcggggauuauucaacacaaguaauugaguu

SEQ ID NO: 5434 - RNA, 84 nt, Human; identical to SEQ ID NO: 5126

SEQ ID NO: 5435 - RNA, 87 nt, Human; identical to SEQ ID NO: 76

SEQ ID NO: 5436 - RNA, 68 nt, Human
cgauuggcggcggaaauauguguagaagcgcgcucaaccgcgcgggcgaauaacagggcugccagucg

SEQ ID NO: 5437 - RNA, 77 nt, Human
gcuccaacccgggaaagaggguaacucccggcggaggggucccacccggcugguaaacccaucaacccggagggagc

SEQ ID NO: 5438 - RNA, 67 nt, Human
ggcagcucuucggccgcauccccaugcgcuucucggugcugaugcagaugcguuucgacgggcugcu

SEQ ID NO: 5439 - RNA, 85 nt, Human
ggccugaaccgggugcugggccugggccugggcugccugcgccucaccgaggccgacuaccugagcucgcaccugaccgagggcc

SEQ ID NO: 5440 - RNA, 71 nt, Human
ggcuaagugccagcuccucuuugcccucaaggugcuccacaugaugcccgaggagaagcugguugagggcc

SEQ ID NO: 5441 - RNA, 70 nt, Human
ggguggaggcgaugcgccuagggccgggcuggagccacucgugccacgccaugcuguacgccgccaaccc

SEQ ID NO: 5442 - RNA, 70 nt, Human
gugaagauuuaauggauauuuauuaguuccccaaauuaauacuuuuauaauuucuuacgccugucuuuac

SEQ ID NO: 5443 - RNA, 61 nt, Human; identical to SEQ ID NO: 5062

SEQ ID NO: 5444 - RNA, 60 nt, Human; identical to SEQ ID NO: 5063

SEQ ID NO: 5445 - RNA, 84 nt, Human; identical to SEQ ID NO: 384

SEQ ID NO: 5446 - RNA, 70 nt, Human
acggucauucugguagguagggguagggccagagcaaggaguccugguuugugaaccaccagcuggccgu

SEQ ID NO: 5447 - RNA, 60 nt, Human
ccugcuguuuucugaagcauuccuaaggaaccuuagagugugggagagagaaauagcagg

SEQ ID NO: 5448 - RNA, 80 nt, Human
uccuuaaccuaguccaacccuuuuauuuuacaguuagggaaaccuaagcugagagaggagauggaaaccugguuguagga

SEQ ID NO: 5449 - RNA, 69 nt, Human
cuguggugagcuccaaggaagugaauaaguuucagauggcuuauucaaaccuccuuagagcuaacaugg

SEQ ID NO: 5450 - RNA, 89 nt, Human
gcgucgccgcgaaugguguuguuggagagcgagcaguuccugacggagcugaccagacuuuuccagaagugccggacgucgggcagcgu

SEQ ID NO: 5451 - RNA, 60 nt, Human
uauaucaccuugaagaaguaugacggucgaaccaaacccauuccaaagaaagguacugug

SEQ ID NO: 5452 - RNA, 63 nt, Human
gugauaccucuguugaucuugaagaaagcugggcgugucuuaagauauuggugaugguauugc

SEQ ID NO: 5453 - RNA, 89 nt, Human; identical to SEQ ID NO: 504

SEQ ID NO: 5454 - RNA, 63 nt, Human
caaguaguucaauggcuagcuuuucucauuaucccaaugagaucaagugcuaggacuggauug

SEQ ID NO: 5455 - RNA, 96 nt, Human
gucugaaaagugccaggggcaauuucuucacaguauuucacaugcaaaggggaaaggaaggaaggggagaaggaagccccaugcugcuuuuaaggc

SEQ ID NO: 5456 - RNA, 60 nt, Human
aagguccaaauaguggccaagcugggacugagaucucgaguuuggguuuguuuggguuuu

SEQ ID NO: 5457 - RNA, 81 nt, Human
guuguucuuucccucguguccaugacuuuucucugccauuagcagggaagugugcggagggcuuccagggaaucaagugac

SEQ ID NO: 5458 - RNA, 109 nt, Human; identical to SEQ ID NO: 831

SEQ ID NO: 5459 - RNA, 75 nt, Human; identical to SEQ ID NO: 74

SEQ ID NO: 5460 - RNA, 71 nt, Human; identical to SEQ ID NO: 77

SEQ ID NO: 5461 - RNA, 67 nt, Human
gugggauggugaccacuaugaugcccugagggacugccucaaggccaucucccuaaacccaugccac

SEQ ID NO: 5462 - RNA, 64 nt, Human
aacaucuuucugauaacauuauuauguugccuucuguuucucacuuugauauuuaaaagauguu

SEQ ID NO: 5463 - RNA, 81 nt, Human; identical to SEQ ID NO: 3878

SEQ ID NO: 5464 - RNA, 74 nt, Human
cgccugacgggcccggcggcggcugagccgcgcugcgcagccgacgcgggaaugaagcgggcgcugggcaggcg

SEQ ID NO: 5465 - RNA, 66 nt, Human
gaggaagcggaccgagcccgucgccuuggagcaugagcgcugcgccgccgcgggcucguccuccuc

SEQ ID NO: 5466 - RNA, 61 nt, Human
gaguuccccuauuuccauugcauuugaaaaaaacccaacaggauccaaggguuuugaauuc

SEQ ID NO: 5467 - RNA, 73 nt, Human
uugccauuccauuucucaucaaacuauguccugggaauacaggccaaacuugauuuuucuuggaauuucguaa

SEQ ID NO: 5468 - RNA, 63 nt, Human
auagguuuaugguuugguuucuccuacuuaguucaagucagagaaagaaaaaccaauaucuau

SEQ ID NO: 5469 - RNA, 63 nt, Human
uccuauuggccuucuuuaaaucccuaugagauggcuuaaaaaggaugucacuggccaagagga

SEQ ID NO: 5470 - RNA, 130 nt, Human
acaaaucuuacaaaggggggugcuucuggguauuuagguccacauucuauuuuaaggcuguauauucggcuuucauaaauuguucuuggaggcccaauuaucaucccuguccaucuuguaagugucaugu

SEQ ID NO: 5471 - RNA, 79 nt, Human
gaauugcuuuuauuucgguaugcauccacauuucagcauuuagugguccugaacagcaaguggaaagacgcagcaauuu

SEQ ID NO: 5472 - RNA, 80 nt, Human
ggauucaagguucuuuuuguuccaguugucagauuccaaacuagaccccaauggauugcaaggaugaccaaaugaaagcc

SEQ ID NO: 5473 - RNA, 69 nt, Human
gggaucugcugugcacaccggguuccuucuuaaucccugcugaggaucuugggaagcagcagcagcacc

SEQ ID NO: 5474 - RNA, 104 nt, Human
guggagcugcucacucugccaugugcucccugaccugaaggaggaggauggcagccucagccuggauggugcagacagcacuggcgugguggccaagcucucac

SEQ ID NO: 5475 - RNA, 65 nt, Human
guuuugccccaggaugugggccgcauugucaaggcgaauuccacuaguuaacugagggacaaggc

SEQ ID NO: 5476 - RNA, 63 nt, Human
ucucccuggaccagcccgguggcacccuggaucugacccugauccgugcccgccuccaggaga

SEQ ID NO: 5477 - RNA, 64 nt, Human
gcagaagaacauagacaaauaugucgcucuugggacacaaggugcugacauguauacuugcugc

SEQ ID NO: 5478 - RNA, 60 nt, Human
guggcucuguucaucuuauucgccagccaaaguaggaacagcguaagaggagagagacac

SEQ ID NO: 5479 - RNA, 61 nt, Human
cggaggugucugagguugccaucagccagggcgaggucacccuggcccucaggaaccuccg

SEQ ID NO: 5480 - RNA, 128 nt, Human
ccugcuggugcuucucucaccucugacgcccuugacuguagucacccugcuccaggccuccaaugugccugcuguggugguggggaggguggguaccaggagcaagggacaagaugugugggggcagg

SEQ ID NO: 5481 - RNA, 85 nt, Human
gugugcuacugggggaggcaugggaaagagcuccggugacagaagccaagguucaauucuccccuagauucuccagggagcacgc

SEQ ID NO: 5482 - RNA, 63 nt, Human
caguuuguacagcuuugcuaaaucgugcuuugaaccaagaacaagucauugcugugcacauug

SEQ ID NO: 5483 - RNA, 68 nt, Human
gccagaacagagaacuugaguguauucgcagagaucaaagagagaguaggcacgucaaaaguuuuggu

SEQ ID NO: 5484 - RNA, 76 nt, Human
guagcugauggauucaagguuguggcacguucuggaaacauaguagcaggcauagcaaaugaaucuaaaaaguuau

SEQ ID NO: 5485 - RNA, 61 nt, Human
ggauaacuuuuguuccaccacccauagguucaccugugucuguccucacugcgaaugaucc

SEQ ID NO: 5486 - RNA, 67 nt, Human
ugcugaggacucccaagcguacugcucaucaucgauauguuuggugaucacagcuacuuucucagca

SEQ ID NO: 5487 - RNA, 93 nt, Human
auaucuagaauagcccaaucuuauagugccagaaaguagcacaguaguugccaagggcugggaggaagaagagaauugggaggugauagcuau

SEQ ID NO: 5488 - RNA, 61 nt, Human
gauuucaagcucucuuguaaaaagcaaaauccuaguguauuuucucaaggaccuuggaauu

SEQ ID NO: 5489 - RNA, 70 nt, Human
uacaaaguaauacgcuuuccucucucccuaaaaaaaauagcuggagaccuugaaaacauuguacuaugug

SEQ ID NO: 5490 - RNA, 87 nt, Human; identical to SEQ ID NO: 76

SEQ ID NO: 5491 - RNA, 100 nt, Human
agagucuggagacugggagccuucacuucggccuccgauugguggcgcauaggguguaaccaauaggaaaccccuaaaggguacuuaaaccccagauuuu

SEQ ID NO: 5492 - RNA, 60 nt, Human
gcuacuguuuuccccaaaguggaacauagcccagggccuccaccagucgauaaacagugc

SEQ ID NO: 5493 - RNA, 125 nt, Human
gcucuggagccgcucccucagggcauccaggagucucuaaacaacucuuccccuggggauuuagaggaaguugucaagauggaaccugaagaugcuacagaggaaaucaguggauuucuuugagc

SEQ ID NO: 5494 - RNA, 75 nt, Human; identical to SEQ ID NO: 74

SEQ ID NO: 5495 - RNA, 72 nt, Human
gcugcggcugcagaaguaccgccugcggaguaacugcaaagaugcuguccgugcgcgugcugcggccguggu

SEQ ID NO: 5496 - RNA, 72 nt, Human
augauuggagacaaaguuuauguccauuacaaaggaaaauugucaaauggaaagaaguuugauuccagucau

SEQ ID NO: 5497 - RNA, 76 nt, Human
gaagaaaggagagauaugccauuuacugugcaaaccagaauaugcauauggcucggguggcagucucccuaaauuc

SEQ ID NO: 5498 - RNA, 60 nt, Human
ucgaaugcaacucucuuuugagauugagcuccuugacuuccaaaggagagauuuauuuga

SEQ ID NO: 5499 - RNA, 98 nt, Human
cggcgcccgccggggauccggacgcagggccgaggcggcagcgcgcucgcagcccgcgcccccggccgaccccgacggcagccccgguggagcggccg

SEQ ID NO: 5500 - RNA, 72 nt, Human
cgggagcgcuggcggcagcagaacguuaacggcgccuucgccgagcugaggaagcugcugccgacgcacccg

SEQ ID NO: 5501 - RNA, 77 nt, Human
ccagcagcccgcucuggccggggccgacuggcagcuccuaguggagaccucgggcaucagcaucuaccggcugcugg

SEQ ID NO: 5502 - RNA, 60 nt, Human
gguguguguauacagcgcggaauaauguauuacuuaaucaucgcgcgcgagaaccacacc

SEQ ID NO: 5503 - RNA, 67 nt, Human
ggugcgcggggccggggcggagcagucgcguuccccgcgugugagcccccacccaucccugugcgcc

SEQ ID NO: 5504 - RNA, 84 nt, Human
gaagaaauggucugaauauuguuacugccgcugauuuguguuuuuuuugacauaguuuguguggaguaagagaguuucaucuuc

SEQ ID NO: 5505 - RNA, 65 nt, Human
aacaccccaugccaucugacagaugggaaccuaggggaccccuucgucagagaaucugggagguu

SEQ ID NO: 5506 - RNA, 127 nt, Human
guguuugggagcucacgugugcaugugugugcauacacaugcaggcauaugugucgugugggcguguuugcaagugugcgugugugucuugugugugcaggccccauacuugggcuccuauuaaagc

SEQ ID NO: 5507 - RNA, 83 nt, Human
gcucucagccuuaguaaggaagcacguggaggagggacggaggagguucccuugcugggcaugcuucguagagggccaggagc

SEQ ID NO: 5508 - RNA, 74 nt, Human
uauguucugaauagauuugcugauuguugaguauguuuugcuuacacuuaaggccaaauucuuccuugaagaug

SEQ ID NO: 5509 - RNA, 77 nt, Human
uuuaguucacuuguuuuuccucuuuguguuaaggcuaucauucagagggcaaacaguucccgguguugugaauugaa

SEQ ID NO: 5510 - RNA, 72 nt, Human
ucauuagugcauuucuuccugcugaucacuguaaacaugugaaucaguuuccauuucuuaugcaggucauga

SEQ ID NO: 5511 - RNA, 71 nt, Human
uuuggauguauaauaguuuagcaagauguuacuuuuguaagacaucagauguucaaaaaagugcauccgaa

SEQ ID NO: 5512 - RNA, 62 nt, Human
gcagacgucagaacgaugaagaggcaggcggaugugaaacucuucaaguauaucuggaaagc

SEQ ID NO: 5513 - RNA, 71 nt, Human
guucuuaagguugaagugugguucagggccagugcaauauuaguggacagcacuuaguagcuguggaggac

SEQ ID NO: 5514 - RNA, 78 nt, Human; identical to SEQ ID NO: 99

SEQ ID NO: 5515 - RNA, 65 nt, Human; identical to SEQ ID NO: 247

SEQ ID NO: 5516 - RNA, 80 nt, Human; identical to SEQ ID NO: 100

SEQ ID NO: 5517 - RNA, 71 nt, Human; identical to SEQ ID NO: 77

SEQ ID NO: 5518 - RNA, 75 nt, Human; identical to SEQ ID NO: 74

SEQ ID NO: 5519 - RNA, 87 nt, Human; identical to SEQ ID NO: 76

SEQ ID NO: 5520 - RNA, 71 nt, Human; identical to SEQ ID NO: 77

SEQ ID NO: 5521 - RNA, 76 nt, Human
gagauguccucuauucuugaagagcguauucuuggagcugauaccucugaugaucuugaagaaagcugggcguguc

SEQ ID NO: 5522 - RNA, 87 nt, Human; identical to SEQ ID NO: 76

SEQ ID NO: 5523 - RNA, 71 nt, Human; identical to SEQ ID NO: 77

SEQ ID NO: 5524 - RNA, 74 nt, Human
gccucccggauccaggcguccgggaucugcgccaccagaaccuagccuccugcagaccuccgccaucugggggc

SEQ ID NO: 5525 - RNA, 84 nt, Human
gcggcacgcccgggaggcuuucucuggcugguaaccgcuacucccggacaccagaccaccgccuuccguacacagggugcccgc

SEQ ID NO: 5526 - RNA, 92 nt, Human
cagccaaagagucuacuucagaagcggaggcacugggaguccgguuugggauugccaggcugugguugugagucugagcuugugagcggcug

SEQ ID NO: 5527 - RNA, 89 nt, Human
ggugcucugggcacugcaggggugcuggcuggacugcgguuaccgcagcgcggaacccccuaggcgaccccgcgcuggccgggagcacu

SEQ ID NO: 5528 - RNA, 94 nt, Human
aacuucagaucagacugaggauguccuggaggcuguagcugcaaagcuggaucuuccagaugacuugauuggauacuuuagucuauucuuaguu

SEQ ID NO: 5529 - RNA, 86 nt, Human
acugcugagauguccucuauucuugaagagcguauucuuggagcugauaccucugugaucuugaagaaacugggcgugucuuaagu

SEQ ID NO: 5530 - RNA, 108 nt, Human; identical to SEQ ID NO: 710

SEQ ID NO: 5531 - RNA, 120 nt, Human
cccgguaucauuccucgaauuucagugcgggaaccaaugcagacuggcauuaaggcuguggauagcuuggugccaauggucguggucagcgugaacugauuuuggugacgacagacuggg

SEQ ID NO: 5532 - RNA, 127 nt, Human
auaccucuguugaucuugaagaaagcugggcgugucuuaaguauggugaugguauugcccgcguacaugggcugaggaauguucaagcagaagaaaugguagaguuuucuucaggcuuaaaggguau

SEQ ID NO: 5533 - RNA, 95 nt, Human; identical to SEQ ID NO: 1030

SEQ ID NO: 5534 - RNA, 85 nt, Human; identical to SEQ ID NO: 4613

SEQ ID NO: 5535 - RNA, 85 nt, Human; identical to SEQ ID NO: 5439

SEQ ID NO: 5536 - RNA, 60 nt, Human
aacaaguaaaaaguuagacaaauguuacaaaauaaccuuuucaauagccaguugcuuguu

SEQ ID NO: 5537 - RNA, 73 nt, Human
cccaacuuuaauuuugaaugcauuuccagaguggccaugccuagagggcagaugcagagcaggugguaguggg

SEQ ID NO: 5538 - RNA, 85 nt, Human
ccaaugcuacacaaccagaaaguaagguguucuacuugaaaaugaaaggagauuauuuuagguaucuuucugaaguggcaucugg

SEQ ID NO: 5539 - RNA, 69 nt, Human; identical to SEQ ID NO: 528

SEQ ID NO: 5540 - RNA, 63 nt, Human
cuuccuuugguuucugccggccucgggcuucugcggcccgauguggcaggcgccgcgagagag

SEQ ID NO: 5541 - RNA, 78 nt, Human
ucaagucugacguguggucuuuuggaaucuuacucacagagcuggucaccaaaggaagagugccauacccaggcauga

SEQ ID NO: 5542 - RNA, 70 nt, Human
gggggguccccagguuaguaaacuccccaggugggcugagggcuagggcugagccucaggugggucuccu

SEQ ID NO: 5543 - RNA, 73 nt, Human
ucccaguugcuacccugcauagcggccuccuucccaggcucugguggcagcgcauggagggguagugcuggga

SEQ ID NO: 5544 - RNA, 90 nt, Human
ggcugugggaagcgauuugcgauguucaccuccacgauauuugcugugguuggauucuugggagcuggauacucguuuaucaucucagcc

SEQ ID NO: 5545 - RNA, 66 nt, Human
ccuuccagccugcgcuuccucuggugguucuugugccuagcccaggaggggacgccguugagaagg

SEQ ID NO: 5546 - RNA, 71 nt, Human
cucucauucaguacgucgaagacgggauuggccaugaguuuaguggccgcuuuuuccaugacagaagagag

SEQ ID NO: 5547 - RNA, 85 nt, Human
gauggucugaugcuacaggacuugguuucagcuaagcugauuucagauuacacuguuaccgagaucccugauaccauuaaugauc

SEQ ID NO: 5548 - RNA, 67 nt, Human
cacaacagaaaguaagguguucuacuugaaaaugaaaggagauuauuuuagguaucuuucugaagug

SEQ ID NO: 5549 - RNA, 69 nt, Human; identical to SEQ ID NO: 528

SEQ ID NO: 5550 - RNA, 60 nt, Human
ccuggaucggauagguggucuucccaugccuccuuggagaagccgagccgaguauccagg

SEQ ID NO: 5551 - RNA, 61 nt, Human
cuguggcaggggaggacagaacuuugauccuuaccucccaaccucugucuacucaccacag

SEQ ID NO: 5552 - RNA, 92 nt, Human
ggagggccagugacccagcccaggcugcugaccguccugcuccaggcuagaguccagagguucaagagccugggcuguguccauaccccacc

SEQ ID NO: 5553 - RNA, 67 nt, Human
cccccucagauguuccugcagugcugaaauucauccuacagaaguaaccgcaaaacucuagaggggg

SEQ ID NO: 5554 - RNA, 76 nt, Human
cuaacccugcuguccuuuuuauuguuuuuaauuaauauuuuuguuuuaauugauagcaaaauaguuuauggguugg

SEQ ID NO: 5555 - RNA, 90 nt, Human
ucaucaacauggauaugacauuucacaacagugacuaguugaaucccuuguaacguaguaguugucugcucuuuguccauguguuaauga

SEQ ID NO: 5556 - RNA, 62 nt, Human
gcaggggcccagaacaccugcucucaccugagccccaggugaaggggcccgggaacaccugc

SEQ ID NO: 5557 - RNA, 88 nt, Human
gcucucacugagcccaggugaaggggcccggaacaccugucucacugagcccaggugaaggggcccggaacaccuggcucaccugagc

SEQ ID NO: 5558 - RNA, 114 nt, Human
ggggcgcuguccuccaucugacggugaccuugccugauugaagcuggccagcuguggguccgccugaccgcucucgguuccccgcggugucaccgcguuggggacaguugcccc

SEQ ID NO: 5559 - RNA, 71 nt, Human
ggugggcucuucgggggccggccggcgcggccuaccuguggccgcgcacguuggccccgggggggcccgcu

SEQ ID NO: 5560 - RNA, 75 nt, Human
ccauucccgauacaccuuacuuacuguguguuggcccagccagagugaggaaggaguuggccacauuggagaugg

SEQ ID NO: 5561 - RNA, 61 nt, Human
ucccuggugugcuccuggaaggaagaucuuggggacccccccaccggagcacaccuaggga

SEQ ID NO: 5562 - RNA, 76 nt, Human; identical to SEQ ID NO: 273

SEQ ID NO: 5563 - RNA, 103 nt, Human
ugaugagagccugaggagccauuugagcaauggggaacgcucacggacugugugguaaugagagauccaaacaccaagcgcuccaggggcuuggguugucaca

SEQ ID NO: 5564 - RNA, 71 nt, Human
uggaugcagcuaugaaugcaaggccacacaagguggauggaagaguguggaaccaaagagagcugucucca

SEQ ID NO: 5565 - RNA, 84 nt, Human
ccaaccaaauuucugcauucgagucuuaaccauauuuaaguguuacugugguucaaagaaguaugauucugaguaggggguugg

SEQ ID NO: 5566 - RNA, 91 nt, Human
ccguggguccgauuagccuuuucucugccuugcuugcuugagcuucagcggaauucgaaauggcuggcgguaaggcuggaaaggacuccgg

SEQ ID NO: 5567 - RNA, 73 nt, Human
gaacuggcaggaaaugcaucaaaagacuuaaagguaaagcguauuaccccucgucacuugcaacuugcuauuc

SEQ ID NO: 5568 - RNA, 80 nt, Human
ggggugacuggucucaaacaacuguuggucauugugacugccaauuauaguaccaacuuugguugccagacuuuuccccu

SEQ ID NO: 5569 - RNA, 76 nt, Human
ccuagaccccgcguuguccgauguucaugaguuccgcagaagggguuuauucccacacggcacccgcgccucuugg

SEQ ID NO: 5570 - RNA, 66 nt, Human
gggaucggcggcuuucgguuuauccucaucaguugaccauagaagagcugacgaccgcucgaugcu

SEQ ID NO: 5571 - RNA, 88 nt, Human
guggcgguugagacuugaagagccaagaaacccacguuaccgcaugaaacucguuaagugauagcucgccuucgaauuuuagcgccac

SEQ ID NO: 5572 - RNA, 66 nt, Human
gccaaccuugaagccaguggggcaccaauucacaaacuggaugcugcgcuugguuuugaugguggc

SEQ ID NO: 5573 - RNA, 65 nt, Human
uuggggaccacgucaccacgguacaacaggcagcaagcccuguuuuuaccauggcagggucacaa

SEQ ID NO: 5574 - RNA, 78 nt, Human
acauuaacaugauaauaccaacauguauuuggucaaagucuaaacacuuuuuugauaaaauacauuuuauguuaaugu

SEQ ID NO: 5575 - RNA, 68 nt, Human
gcacucaaaguagaauuauaaagaagaucauguccauguuaacauuauuauaacccuacauuuugugc

SEQ ID NO: 5576 - RNA, 68 nt, Human
uuggaaguuaacuuaugcacgcuuaacuaucuuaacaagcuuugagugcaagagauugaagaguucaa

SEQ ID NO: 5577 - RNA, 90 nt, Human
cacaaucuggagacauggaggcagcuguggcggguguuagagaugucugacaucguccugcuuaucacugauauccgacauccaguugug

SEQ ID NO: 5578 - RNA, 60 nt, Human
ucagugcugaguuguuggagcuggacauccgggagguguaucagccuggcucaguucugg

SEQ ID NO: 5579 - RNA, 72 nt, Human
ugagccaagaggaacggagcuuccaagacuaucuugggaagauucauggggcuuacuccucugagaaacuca

SEQ ID NO: 5580 - RNA, 61 nt, Human
cagcgcggugcacucgcgcgaacacggccuggaggugcugggccucgugcgggucccgcug

SEQ ID NO: 5581 - RNA, 76 nt, Human
gcuggaggacggccugaaccgggugcugggccugggccugggcugccugcgccucaccgaggccgacuaccugagc

SEQ ID NO: 5582 - RNA, 67 nt, Human; identical to SEQ ID NO: 5438

SEQ ID NO: 5583 - RNA, 70 nt, Human; identical to SEQ ID NO: 5441

SEQ ID NO: 5584 - RNA, 94 nt, Human
ccacccucuugcauuggccaguggaggaagaucuuugaugaugaaccaacuaucauuagaagagcuuuuuacucuuugggcaauuauauugugg

SEQ ID NO: 5585 - RNA, 64 nt, Human
gccacugaggugagugggggucuccagcaccugcccccagcccaucacccuguguaccaguggc

SEQ ID NO: 5586 - RNA, 117 nt, Human
aggagacccgugucauguuugagaagauagcgaaauacauuggggagaaucuucaacugcugguggaccggcccgauggcaccuacuguuuccgucugcacaacgaccggguguacu

SEQ ID NO: 5587 - RNA, 61 nt, Human
gcucuggauuaccuugcaccuuaugccaaguauaaaguuuggauaaagccuggugcagagc

SEQ ID NO: 5588 - RNA, 88 nt, Human
guccuugaacuuggaaccugacaauguugguguagucguguauggaaaugauaaacuaauuaagugaaggagauauagugaagaggac

SEQ ID NO: 5589 - RNA, 96 nt, Human
ugacuugcugagauguccgucuauucuugaagagcgguauucuuggagcugauaccucuguugaucuugaagaaaguugggcgugucuauaaguua

SEQ ID NO: 5590 - RNA, 90 nt, Human
ggcggggagugggaaaggguccggggcggagugccguugguuaaggagaagccaaaaauguuugccaagggaacugagaucacccaugcu

SEQ ID NO: 5591 - RNA, 82 nt, Human
guucaauaucaucgccucucucuuaugacuacaacccaaaccuggaagcuacaugagccagagauguggggaagugcuggac

SEQ ID NO: 5592 - RNA, 102 nt, Human; identical to SEQ ID NO: 2701

SEQ ID NO: 5593 - RNA, 90 nt, Human; identical to SEQ ID NO: 2702

SEQ ID NO: 5594 - RNA, 60 nt, Human
ucuggagcugugagucucccuguacgguguacaucccgacauugauaaauguucuccagg

SEQ ID NO: 5595 - RNA, 60 nt, Human
uucugcauacaaguuggcaggaacauuauacauggcagugauucuguggagagugcagag

SEQ ID NO: 5596 - RNA, 74 nt, Human
cggcgcuuccgcaaguuccugguguuuguggcaaacuucgaugagaaugaccccaagaccuuugaggggcguug

SEQ ID NO: 5597 - RNA, 82 nt, Human; identical to SEQ ID NO: 119

SEQ ID NO: 5598 - RNA, 63 nt, Human; identical to SEQ ID NO: 722

SEQ ID NO: 5599 - RNA, 60 nt, Human; identical to SEQ ID NO: 723

SEQ ID NO: 5600 - RNA, 83 nt, Human
gcgggcggcgcggugcaaccucggccgaggccuuccuagccgccggcuacggggucccuguucuuguaucgcgcucgcucugc

SEQ ID NO: 5601 - RNA, 104 nt, Human; identical to SEQ ID NO: 114

SEQ ID NO: 5602 - RNA, 76 nt, Human
ccagcugugugugaggaggaccugaugcccgaggaugaccagcgggccacgcgcaaccucuucauugguaaccugg

SEQ ID NO: 5603 - RNA, 72 nt, Human
cucccgcuacacggaggcuaccaguacgagcagcgcucgcugucccccgucgcugccccgccccugcgggag

SEQ ID NO: 5604 - RNA, 73 nt, Human
gccgugggacugucccgggagcgggcccuggacuacuacgggcuguacgacgaccgugggcgccccuaugugc

SEQ ID NO: 5605 - RNA, 64 nt, Human
aucuccuacgccugcuaguccugcaucgaacagagcuguuaccccuucuagugaggcuaaagau

SEQ ID NO: 5606 - RNA, 72 nt, Human
gggggaacguggucaucaguggucagugggguuccaagauuauccccuaaaacucauagacccaggucuccc

SEQ ID NO: 5607 - RNA, 81 nt, Human
gaccucaagucaucugcccgccuuggccacccaaagugcugagauuacaggggugagccacugcgcccugacuuggagguu

SEQ ID NO: 5608 - RNA, 66 nt, Human
cccccuaaaauauaaucaccgacuuuacaaacugaaggaagcagguuuuggaaggcgggaaggggg

SEQ ID NO: 5609 - RNA, 85 nt, Human
ggaucacagauggagaagugucaaacaaggaugguugcgggcaagagggcugcacccuaucuuggagaccuucucccaggugucc

SEQ ID NO: 5610 - RNA, 73 nt, Human
guaugagggaagggagguggaagcucauaucccaccccaggggguuuugaggaucuuuucccuucucucucac

SEQ ID NO: 5611 - RNA, 105 nt, Human
guaugcuggagcagaggacuuugagaaauggaggucauguggacagcaguguugacuaccugccucuaccacaguacuccuucuauauagucacuugcuagcuac

SEQ ID NO: 5612 - RNA, 63 nt, Human
uuuuuuuuuacaacuuuaaauacggaauauaaauaaauuuuacauuuaaaaaauagaaggaaa

SEQ ID NO: 5613 - RNA, 62 nt, Human
ucuuaaagaaauuggacagcauaugaagacaggacaucacauaugaaugcacgauaugaaga

SEQ ID NO: 5614 - RNA, 74 nt, Human; identical to SEQ ID NO: 365

SEQ ID NO: 5615 - RNA, 89 nt, Human
uggguuuuauuuuucaauuuuuauuuugguuuucuuacaaagguugacauuuuccauaacagguguaagaguguugaaaaaaaaauuca

SEQ ID NO: 5616 - RNA, 77 nt, Human; identical to SEQ ID NO: 3082

SEQ ID NO: 5617 - RNA, 99 nt, Human
ccgcgaccaaccugcucuugaaugacacggcuuaacacagggaacuucuuguuucuucucuuaagcuggaccucacugucggcaugugcugguucgcgg

SEQ ID NO: 5618 - RNA, 62 nt, Human
ccauugcucagugacaguaucuuaaagcuuguccagagcuugaaggaccacacagguagugg

SEQ ID NO: 5619 - RNA, 100 nt, Human
ggcuaugcaggauggcugcagccuaggagcugguggaggcucggcucaugcuagccucuacgucuucugagaucuggcgugucguacuauccuguaugcc

SEQ ID NO: 5620 - RNA, 78 nt, Human; identical to SEQ ID NO: 99

SEQ ID NO: 5621 - RNA, 80 nt, Human; identical to SEQ ID NO: 100

SEQ ID NO: 5622 - RNA, 63 nt, Human
gaaaugggcuucuggagcccacaccaugaguuauccuugggaacgggguucuccguccauuuc

SEQ ID NO: 5623 - RNA, 76 nt, Human
uuuuuuuuuuuuuugaugacucccagucucguuuuauugccgcugacaacuuugggggaaacagauaaaaaaaaag

SEQ ID NO: 5624 - RNA, 60 nt, Human
ccccuuuuuuuuugaaaaagggcgccccucaauaggggcgcuauuauaaaaaaggggggg

SEQ ID NO: 5625 - RNA, 129 nt, Human
cggagaccucacccuguaccaguccaauaccauccugcgucaccugggccgcacccuugggcucuaugggaaggaccagcaggaggcagcccugguggacauggugaaugacggcguggaggaccuccg

SEQ ID NO: 5626 - RNA, 65 nt, Human; identical to SEQ ID NO: 1518

SEQ ID NO: 5627 - RNA, 75 nt, Human; identical to SEQ ID NO: 74

SEQ ID NO: 5628 - RNA, 87 nt, Human; identical to SEQ ID NO: 76

SEQ ID NO: 5629 - RNA, 71 nt, Human; identical to SEQ ID NO: 77

SEQ ID NO: 5630 - RNA, 69 nt, Human
acuaugccauaugguuuuucagaaacaugauacuucauguaauaaugaauaauccagacagguacaagu

SEQ ID NO: 5631 - RNA, 72 nt, Human
ucaguaaauaugguaauauaggaacaaacuuaggcucauaagccuuuuaacuuuuuacauaaucuuuaauga

SEQ ID NO: 5632 - RNA, 72 nt, Human
cagagauaugcuauauaugauauacauaugauacauaucauauguauguauaugauacauauauaauuucug

SEQ ID NO: 5633 - RNA, 61 nt, Human
cccggauccucagucgugcgggagucugggaggccuggcuuccucaggggugagguuuggg

SEQ ID NO: 5634 - RNA, 84 nt, Human
cugcccaggcugcccgccagguccacuuaugccgaggagucuuccccuugcuuuaccgugaaccuccagaagccaucugggcag

SEQ ID NO: 5635 - RNA, 72 nt, Human
gaucgccgggugcaauuuggcauugaaaguggaaagcuccguggcuuccuccguguuggagaccuggugauu

SEQ ID NO: 5636 - RNA, 70 nt, Human; identical to SEQ ID NO: 3612

SEQ ID NO: 5637 - RNA, 87 nt, Human
gccccaacgucuguucauggcugugguuuuaaaagagucccucaacagaugcucuauuuaauaaccaguuuguuccucagauguggc

SEQ ID NO: 5638 - RNA, 96 nt, Human
ggccuacagggggcaccccuggucuugaugccucaagcccagcauuucuggguccccucugcaagcucagagagcagggaggcuucugguagugcu

SEQ ID NO: 5639 - RNA, 83 nt, Human; identical to SEQ ID NO: 1471

SEQ ID NO: 5640 - RNA, 73 nt, Human; identical to SEQ ID NO: 4762

SEQ ID NO: 5641 - RNA, 112 nt, Human
cuuuaauugauaaagccagaguggagacacagaaccacugguucaccuacaaugagacaaugacaguggagagugugacccaagcuguguccaaucuggcuuugcaguuugg

SEQ ID NO: 5642 - RNA, 85 nt, Human
gaugcagauccaggugccaugucucgucccuuuggaguagcauuauuauuuggaggaguugaugagaaaggaccccagcuguuuc

SEQ ID NO: 5643 - RNA, 61 nt, Human; identical to SEQ ID NO: 980

SEQ ID NO: 5644 - RNA, 101 nt, Human
aucccgacgugugugccgggugcgcugcgucgugucgagccgugcgaagcacggugcguacgucuccaugacgccguggcuaguggcgcgcacggagggau

SEQ ID NO: 5645 - RNA, 86 nt, Human
gccacccgucacugucuucucuucaucccuaucgucgacagacgcaucgauucgcgguaagacaguggagggaaggucguaauggc

SEQ ID NO: 5646 - RNA, 87 nt, Human; identical to SEQ ID NO: 76

SEQ ID NO: 5647 - RNA, 78 nt, Human
gaauauuuccacaaugucugugaacuggaccugguguucaacuucuacaagguuuacacggucguggacgagauguuc

SEQ ID NO: 5648 - RNA, 77 nt, Human
auugguuccaagacgcguaggcgaguuggucugaaagcccccgguaucauuccucgaaucucagugcgggaaccaau

SEQ ID NO: 5649 - RNA, 87 nt, Human; identical to SEQ ID NO: 76

SEQ ID NO: 5650 - RNA, 71 nt, Human; identical to SEQ ID NO: 77

SEQ ID NO: 5651 - RNA, 85 nt, Human
guccuugaacuuggaaccugacaauguugguguugucguguuuggaaaugauaaacuaauuaaggaaggagauagugaagaggac

SEQ ID NO: 5652 - RNA, 129 nt, Human
ugcggaguuaacugcaaagaugcuguccgugcgcguugcugcggccgugguccgcgcccuuccucggcgggccggacuggucuccagaaaugcuuuggguucaucuuucauugcugcaaggaacuucca

SEQ ID NO: 5653 - RNA, 75 nt, Human; identical to SEQ ID NO: 2289

SEQ ID NO: 5654 - RNA, 70 nt, Human
acaauuuuguauggaaugcuagauggccaagccucagccuuugguccagugcaacccuugccucgcuugu

SEQ ID NO: 5655 - RNA, 65 nt, Human
ggccagggcguugagaaaaggugacucuccugaggccaaaccuuugcaucucagaagcccuggcu

SEQ ID NO: 5656 - RNA, 66 nt, Human; identical to SEQ ID NO: 12

SEQ ID NO: 5657 - RNA, 131 nt, Human
cagcuuuggugggggaacugguucuggguucaccucccugcucauggaacgucucucaguugauuauggcaagaaauccaagcuggaguucuccauuuacccggcaccccagguuuccacagcuguaguug

SEQ ID NO: 5658 - RNA, 70 nt, Human
gcaaggaagaugcugccaauaacuaugcccgagggcacuacaccauuggcaaggagaucauugaccuugu

SEQ ID NO: 5659 - RNA, 61 nt, Human
ugaagagaauguuccuuaucugaguuguaauagccuacuuguaggucuauauuuaucuuca

SEQ ID NO: 5660 - RNA, 62 nt, Human
uuucuuguaauaucaaaauauauguauauguacuaaguuuauuuugcaaguguuucaaggaa

SEQ ID NO: 5661 - RNA, 102 nt, Human; identical to SEQ ID NO: 2701

SEQ ID NO: 5662 - RNA, 90 nt, Human; identical to SEQ ID NO: 2702

SEQ ID NO: 5663 - RNA, 73 nt, Human
ggagcgcaccuucaucgccaucaagccggacggcgugcagcgcggccuggugggcgagaucaucaagcgcuuc

SEQ ID NO: 5664 - RNA, 61 nt, Human
ccaucacggacuuccugggaaaaucagauccauuucuggaguucuuccgccagggugaugg

SEQ ID NO: 5665 - RNA, 96 nt, Human
gcggggcggaggcacucgcgcgggggguaauucggggucuggguucuggugccgcgcagcuuuccccgauggcccacugcgugaccuugguucagc

SEQ ID NO: 5666 - RNA, 78 nt, Human
ggacugaacgggugcggaacugcucaagcccugaguucuccaagacucuacagcuugaguaccgcuuugagacagucc

SEQ ID NO: 5667 - RNA, 64 nt, Human
ucggcuccaagucugacccacucugcauccuuuuacaggaugugggagggggcagcugggcuga

SEQ ID NO: 5668 - RNA, 68 nt, Human
ugcauuuccucauccuguucucucugucauagaucuaccuguucuuaacagagggaugagaaaaagua

SEQ ID NO: 5669 - RNA, 74 nt, Human
uggggcugagaggcgagacacugauggcacucuuacuucugucagcugccgcaaagucucguccacuugcugca

SEQ ID NO: 5670 - RNA, 69 nt, Human
gagaugcagcagaaguugguggagcugucggcugagaacgagaagcugcaccagcgcguggagcagcuc

SEQ ID NO: 5671 - RNA, 82 nt, Human
gcagggcagcccaccccgcccacgucgccggagccgccgcgcagcagccccaggcagacccccgcgcccggccccgcccugu

SEQ ID NO: 5672 - RNA, 69 nt, Human
gaggagcaacccccuuguagaaugcuuuuaggccuucuuccuuauacauucucgggagcugcaucccuc

SEQ ID NO: 5673 - RNA, 73 nt, Human
uccagcuauguaaccugcuacaaauguuacaaccagcugcucuggcuuugaacauucacugcggggcuuagga

SEQ ID NO: 5674 - RNA, 71 nt, Human
uguuggcauaaccuggcuggguaugaauucgaaccuuagcagcuuccauacgagccaggccaaugucagca

SEQ ID NO: 5675 - RNA, 61 nt, Human
ggauaacagcaauguucagggaacaaaggagauaacuuuaaacucugacgugccgugagcc

SEQ ID NO: 5676 - RNA, 69 nt, Human
gugaagauuucauggacacuuaucacuuccccaaucaauacccuugggauuuccuaugccugucuuuac

SEQ ID NO: 5677 - RNA, 62 nt, Human
ggcuggagcuugacacgguugagaaucccugaugcucaacccguauuuucuggcuaccaguu

SEQ ID NO: 5678 - RNA, 77 nt, Human
gugcaccugugugcgcaggcauccgaguccaugucacgugcuggcacggcaaucgccauccuuucacaacaggucac

SEQ ID NO: 5679 - RNA, 72 nt, Human
uuccagcaacuggucacugcagcagcgcacucacauggcggugggcgcucgggcugaccucaccuucuggaa

SEQ ID NO: 5680 - RNA, 65 nt, Human
gaaacauaaauucaacuuuguaaaaaucuuuugaagcauagauaauauuguuugguaaauguuuc

SEQ ID NO: 5681 - RNA, 66 nt, Human
uacuggcuauuaauauucaggguaaauaggaaucauucagaaauguugagucuguacuaaacagua

SEQ ID NO: 5682 - RNA, 90 nt, Human
uuuaaagacccuccuauucuauaaaacuuugcauguagaggcuuuguuaacuuucucucucuaagguuuaaauaggaguggugauuugaa

SEQ ID NO: 5683 - RNA, 96 nt, Human
uaauuacuguaagccagaaugauugcugaaaugucaaaauguaagauugaaugaggcuauuuaaacauuuuaguauauuuugucuuacugaaauug

SEQ ID NO: 5684 - RNA, 81 nt, Human
cccaaggcugcgcaaagugacacacugagucgcccauccacgggcgccaagaccugcuucaccuuuugcuacgcggccggg

SEQ ID NO: 5685 - RNA, 64 nt, Human
ugucgacauccguggaggauggccagauccccgaggucaucuucuacaccuaggcuguccgaca

SEQ ID NO: 5686 - RNA, 85 nt, Human
guccgugaauuuuaaacuaggguaccgccgcccauuauaggggcuuuugggcgccuaaagcggauugaaccauguguuaccgggc

SEQ ID NO: 5687 - RNA, 62 nt, Human
uucuuugggacaaaccuugaaaauguuuauuucaaaaaaacaaaaggcuuugcacaagagaa

SEQ ID NO: 5688 - RNA, 60 nt, Human
auuuuugggucuccggucacugccacuucacgcuuggcacacccaaacaaacccaaggau

SEQ ID NO: 5689 - RNA, 83 nt, Human
ucccccaggggguaaaggaagugguaucuuugacgaaucaacccccgugcagacucgacagcaccugaacccaccuggaggga

SEQ ID NO: 5690 - RNA, 62 nt, Human; identical to SEQ ID NO: 5011

SEQ ID NO: 5691 - RNA, 61 nt, Human
uuaggaaaggagaucaacauuuucaaauuagauguuucaacugugcuccuguuugucuuga

SEQ ID NO: 5692 - RNA, 81 nt, Human
uugcgcuuuccuuucugucaagaagcaguuugaagaauuaacccuuggugaauuuuugaaacuggacagagaaagagccaa

SEQ ID NO: 5693 - RNA, 80 nt, Human
gaggagguggcggcgcuggagcuccucccggggaccagcgacccggggagcgagcacgucgcuccgcaccgcucuuccuc

SEQ ID NO: 5694 - RNA, 62 nt, Human
ggcuccgcccccacccugccugcccccucgcuggagcaacgcaagcaggaggcgggggaguc

SEQ ID NO: 5695 - RNA, 79 nt, Human
aaguuguugauauucuuugaguuuacaaguuaauccuuauuggagaugugccaauauacaguuagaauaucauuaauuu

SEQ ID NO: 5696 - RNA, 67 nt, Human
uaaauaugugcaguuauuaucacaugaagaaacgcaguguggucgggcuguaauauuaccauauuug

SEQ ID NO: 5697 - RNA, 103 nt, Human
agucuauacacuguggccucaaccucccagacagggcagagaacugugggcagcucguuugcuuucuaggcuggcuggagaggugggagcucauugauagacu

SEQ ID NO: 5698 - RNA, 73 nt, Human
gcuccugucccucuugcuuuauagcuagcugcccggggaccaagguacaggugaaagcaagguagcagcuugc

SEQ ID NO: 5699 - RNA, 77 nt, Human
guccaaagccacacugaaaacagaggcagagacauguacucuggugugaucucuuguccucagugucucuucugggc

SEQ ID NO: 5700 - RNA, 85 nt, Human
ggcuccucauuuaccaccuuuucccacugucugcauugguaacucuuuugaagacaccccuuuaauugcuauuugaaccugggcc

SEQ ID NO: 5701 - RNA, 77 nt, Human
auuccaagugcuccaaggguaacucauaaagucaaggggccaaucggcggcccaaugggcccuccaagaguuggaau

SEQ ID NO: 5702 - RNA, 61 nt, Human
ccccuuuuuggacacuuauacaaggugugggaaacccacugguaccagugcaagaaugggg

SEQ ID NO: 5703 - RNA, 84 nt, Human
cgccccuggcccucccgggcucuucucuggcccggggcucacaguagcuccgaggccccgaggcccggcggggcggcgggggcg

SEQ ID NO: 5704 - RNA, 73 nt, Human
gcagaguccaggcgcgcccggaggccguggcgcucgcgcgggacuuucgagccucgggcccggccuggcaugc

SEQ ID NO: 5705 - RNA, 62 nt, Human
gcgucgccgcgccgcagggccagcaucacgcucuggcucugcaucucgcggcgccgcgacgc

SEQ ID NO: 5706 - RNA, 90 nt, Human
gccgccccccgaggagagcugcccggccaagcccguggcccccgggcccugcuucgggggccgcaccuuggaggagaucuggagggcggc

SEQ ID NO: 5707 - RNA, 80 nt, Human
uugggacaggccuuccgcccggaggaaugaacaagugucagucgaguguuuacagauccggccaggaccccggcccccaa

SEQ ID NO: 5708 - RNA, 73 nt, Human
auauacaucgcaauuucuuuguacaauaggugagaaaaaucugcaguauagaagaauagaggcagagaaauau

SEQ ID NO: 5709 - RNA, 116 nt, Human
gaaagccuggugggaccacagggguugccauucagcuacugacaaggucagcaucauugcuuucagcuggccuuuuaguacaguuuuucuggugaccuugugcugaucaaacuuuc

SEQ ID NO: 5710 - RNA, 61 nt, Human
guuaagaagcaugguucugacuuuccuaaacugggguuucuagagcccaagcuccauuagc

SEQ ID NO: 5711 - RNA, 74 nt, Human
uaaguaguaaguauaccuuaaucaccugagguucugguaaauauuagguauuauaaagguugcuuucacacuua

SEQ ID NO: 5712 - RNA, 71 nt, Human
aacgucaucagcuuccuaaccauguuuaagaggaauaacuucaugaacauuuugcccugaacugaagaguu

SEQ ID NO: 5713 - RNA, 65 nt, Human
gcgcgccuucgggcccucucgagaaaaagccuuucucuuaagagccacucucucgguuggcgcgc

SEQ ID NO: 5714 - RNA, 73 nt, Human
cguuccuucccagccucagcccacggcaggggugcagccccaucuuucugcuguaggcugggcuacagggacg

SEQ ID NO: 5715 - RNA, 66 nt, Human
cucagcuuuuacucauguuuagauaaugugauauagcuguucuagauauuugagauuaggguugag

SEQ ID NO: 5716 - RNA, 77 nt, Human
uauuguuguuaaucacuuacugugccuaauuuauaaauuaaacuuuauuguagguauguauaggaaaaauaauagua

SEQ ID NO: 5717 - RNA, 61 nt, Human
gguggagcgguucauuuauuuggaaacuaugacaugaaaaccaaauuugaaaacucacauc

SEQ ID NO: 5718 - RNA, 63 nt, Human; identical to SEQ ID NO: 527

SEQ ID NO: 5719 - RNA, 79 nt, Human
augcuacacaaccagaaaguaagguguucuacuugaaaaugaacaggagauuauuuuagguaucuuucugaaguggcau

SEQ ID NO: 5720 - RNA, 63 nt, Human
ggggguuggagcuaccgccaccgccgcgccgauuccggagccgggguagucgccgccgccgcc

SEQ ID NO: 5721 - RNA, 69 nt, Human; identical to SEQ ID NO: 528

SEQ ID NO: 5722 - RNA, 62 nt, Human
aaggcucuuguagguaacucuccuccagucggugauucagggacccagccuccuucugccuu

SEQ ID NO: 5723 - RNA, 71 nt, Human
uuaugguaagcaaaauaaauuguauuuuuccauccuuggggaggauaaaggaacucuuugcacugcuauaa

SEQ ID NO: 5724 - RNA, 106 nt, Human
cggauuauccccauaccccacccauucccgauacaccuuacuuacuguguguuggcccagccagagugaggaaggaguuuggccacauuggagauggcgguagcug

SEQ ID NO: 5725 - RNA, 67 nt, Human
gacucccuggugugcuccuggaaggaagaucuugcgggacccccccaccggagcacaccuagggauc

SEQ ID NO: 5726 - RNA, 62 nt, Human
ucuuugcccgucuccuggggaccccccaacgaaauguggaguccucgggggccgugcacuga

SEQ ID NO: 5727 - RNA, 74 nt, Human
cucugacaacaguggcuggacugaaauccgccgggaagccugggucuccucuagcuuauuuggugucuccagag

SEQ ID NO: 5728 - RNA, 88 nt, Human
ggucggacgucguggauccgcgggucugucucuugcuucaacaguguuggacggaacagauccggggacucucuuccagccuccgacc

SEQ ID NO: 5729 - RNA, 71 nt, Human
gucgaacagccuggucaauuuguaccugcaggccguccuacaccuaccucucucugggcuucuauuucgac

SEQ ID NO: 5730 - RNA, 85 nt, Human
ucuccugcuucugggaccugccagcaccguuuuugugguuagcuccuucuugccaaccgaaccaugagcucccagauucgucaga

SEQ ID NO: 5731 - RNA, 86 nt, Human
cggacagacauuugguauggaucacuggucauuccuacgucaccuaugggccacuggccaauggugccaccagauguuuuuguuug

SEQ ID NO: 5732 - RNA, 83 nt, Human
ucaugcccagaugugcagaucucauggaaccaauggugauugacuugugguggcaugagcucaugcaaugaggcaggggauga

SEQ ID NO: 5733 - RNA, 89 nt, Human
ugugagcccgaguggugugaugccugaggacccacucuucauccuguacaccaguggcuccacaggcaaacccaagggugugguucaca

SEQ ID NO: 5734 - RNA, 63 nt, Human; identical to SEQ ID NO: 527

SEQ ID NO: 5735 - RNA, 90 nt, Human
uucccaaugcuacacaaccagaaaguaagguguucuacuugaaaaugaaaggagauuauuuuagguaucuuucugaaguggcaucuggag

SEQ ID NO: 5736 - RNA, 72 nt, Human
ccaacaggaugccacgcugggccgagcgacuauuuccugccaauguugcucacucgguguacguccuggagg

SEQ ID NO: 5737 - RNA, 81 nt, Human; identical to SEQ ID NO: 272

SEQ ID NO: 5738 - RNA, 97 nt, Human
gaguccacuggugcccaguaacacccuccgugggaccaccuugggaagcaugugccgcggaguccaccacgggggguccugggucccgggagggcuc

SEQ ID NO: 5739 - RNA, 78 nt, Human; identical to SEQ ID NO: 99

SEQ ID NO: 5740 - RNA, 80 nt, Human; identical to SEQ ID NO: 100

SEQ ID NO: 5741 - RNA, 60 nt, Human
gcacaagauuuucuuauugaagguguuacuaccuuugcacaaagugaaaucucugagugu

SEQ ID NO: 5742 - RNA, 112 nt, Human
gagcaucaccugggaauuugcuagaaaugcaaauucacaggccucacucccaaccugaaucaaauucuggggugggguccaggaaucuguucuaacaagccaggugauuuuu

SEQ ID NO: 5743 - RNA, 67 nt, Human
caagaacaacacaccucuauuuguggucgccgccucgcgugcccccugcgagaagauguuguuuuug

SEQ ID NO: 5744 - RNA, 62 nt, Human
uaguuuucauacguauauuauacaccgaggguguuaacuacucguggugagcguguaaauua

SEQ ID NO: 5745 - RNA, 66 nt, Human
gaggcgggcagaucacaaggucaggagaucgagaccauccuggcuaacacagugaaaccccaucuc

SEQ ID NO: 5746 - RNA, 76 nt, Human; identical to SEQ ID NO: 2134

SEQ ID NO: 5747 - RNA, 65 nt, Human
gcuuggacuagaauuucuucuugguauuaaagagacaaguuuaucacagaauuuuuuuuccuggc

SEQ ID NO: 5748 - RNA, 73 nt, Human
gcgggggggcccccaggacggucacggugagaccuaggcccacaaagggggguccaaaaagagaaaacuccgc

SEQ ID NO: 5749 - RNA, 95 nt, Human
ggauaucuuaauccuuccacauacagauauccuuauauccacaggaggccauguggaauauaaggauaucuguauguggaaggauuaagaucucc

SEQ ID NO: 5750 - RNA, 62 nt, Human
cauguguuguauaaaauguuguuggaauucagguggacgaaagacaagauaaucaauacaug

SEQ ID NO: 5751 - RNA, 78 nt, Human
ggggucaaguacauucccagucguggccucuggacaaguggcgggcccugacucaugaggguuccaaugugcugcccc

SEQ ID NO: 5752 - RNA, 65 nt, Human
gucucgcuucugccgaggugucccugaugccaagauucgcauuuugaccuggggcggaaaaaggc

SEQ ID NO: 5753 - RNA, 72 nt, Human
cugugacuaguauguugaguccuguaaguaggagagugauauuugaucaggagaacgugguuacuagcacag

SEQ ID NO: 5754 - RNA, 65 nt, Human
gagaaugggggaugguguaugaacaugaggguguuuucucgugugaaugaggguuuuauguuguu

SEQ ID NO: 5755 - RNA, 76 nt, Human
ucugcaccucccagccuggagaggagccugugacuugcccuguuccuuggcuccucaggcugggguaagguguggg

SEQ ID NO: 5756 - RNA, 68 nt, Human
ccauuuuuauuucgcuaugcagaaacauacauucaccaugggcugugaugcaggugaucguguaaugg

SEQ ID NO: 5757 - RNA, 72 nt, Human
uuucucagcuaugacacagagacagggggcaauucacuuguaccucuccuguccugcucaacauuugggaga

SEQ ID NO: 5758 - RNA, 70 nt, Human
uuaagacuccugacccccaaguggcaugcagcccccaugcccaccgggaccuggucagcacagaucuuga

SEQ ID NO: 5759 - RNA, 87 nt, Human
aggaccuggaggucaggugugaaugcuguaucggcacagggaauaaauauccuggcgucuggagccuucaccucuccgucaaguccu

SEQ ID NO: 5760 - RNA, 63 nt, Human
ggguuuuuguggcuuuguucaaugcuuccacucuagggcaggcagagcagucuauacucuccc

SEQ ID NO: 5761 - RNA, 80 nt, Human
uucccuuuuuccuuccucagguuuugucucuuccuguguuguccccagcaagggagagacugugggguggauugggagaa

SEQ ID NO: 5762 - RNA, 84 nt, Human
gccacaguggggcaccaugguggagugccagcgucacaccuacggggacgucgaggcgccuaagccaaggcgcccucugugcgc

SEQ ID NO: 5763 - RNA, 73 nt, Human
uccuggcugcagaugaguccacugggagcauugccaagcggcugcaguccauuggcaccgagaacaccgagga

SEQ ID NO: 5764 - RNA, 82 nt, Human
gccacaugaaagccguagaauuugaccuugcgaagacucgaguagucguaaagggcaaggguccaaauggcucgcaaauugc

SEQ ID NO: 5765 - RNA, 62 nt, Human
gccccgguaucuuccucgaauucaggccggaccaugcacggcuuaagggggauaacuugggc

SEQ ID NO: 5766 - RNA, 61 nt, Human; identical to SEQ ID NO: 1202

SEQ ID NO: 5767 - RNA, 64 nt, Human
gaugcuugugacuuccucuugugaugucuuaugaugaacaaagucagaucuggucagaaguauu

SEQ ID NO: 5768 - RNA, 61 nt, Human
aucaucuguaccauuggcccaugcuucccugaucaguggagacuguugaaugugagaugau

SEQ ID NO: 5769 - RNA, 66 nt, Human
gccacucucaaaaucacgcugugauaacgccuacauggaacagugugacugagaacauccuguggc

SEQ ID NO: 5770 - RNA, 86 nt, Human
cccggcgggaggaagcugucaagcgccaggggggccuucgggggcucccggguuaaggcugggguuugccacggcuuccuaguggg

SEQ ID NO: 5771 - RNA, 76 nt, Human
ucugagcucguccgcgcauggcuucaucguccuccagaggccgcacuccacuaccugcguuauuggacgacucagg

SEQ ID NO: 5772 - RNA, 88 nt, Human
cuggccacaccgaccagacagacccagccuugaucuugcuaugacucucuaucacugggccugccucaacuguaacgcugcugcccag

SEQ ID NO: 5773 - RNA, 63 nt, Human
gcacacucuaguaccccuuugcauaccaacaaaccaugguacccacaucgccacuuuuccugc

SEQ ID NO: 5774 - RNA, 98 nt, Human
accuggaggcccaggcccuguugggaaggagccgggcagcagugucccacugaguguggaugcugagugugugcccaugggucggggccuucucaggu

SEQ ID NO: 5775 - RNA, 62 nt, Human
ggggcccccugugacccuggagagugucccucucucagggaugccacaaccaugggggcccc

SEQ ID NO: 5776 - RNA, 92 nt, Human
uggagcguggcgaacaggugcucugggccuggcgcugcugcugcugcucggccucggacuaggccuggaggccgccgcgagcccgcuuucca

SEQ ID NO: 5777 - RNA, 77 nt, Human
ggggucaguacaucccccagucguggcccucuggacaguggcgggccugccucaugagggcuccaaugugcugcccc

SEQ ID NO: 5778 - RNA, 66 nt, Human; identical to SEQ ID NO: 5275

SEQ ID NO: 5779 - RNA, 65 nt, Human
uggggccaauuuuguaacucagaucuugcugagaccaggagcaucugauuuaacaggaaguuuca

SEQ ID NO: 5780 - RNA, 79 nt, Human
uucggugcuuuuaccuaccuacaacgagcgcgagaaccugccgcucaucguguggcugcuggugaaaagcuucuccgag

SEQ ID NO: 5781 - RNA, 72 nt, Human
gagcucauauuuuaugcagaugaucagucaacacauaagcaaguguugacacuguacaaucccuaugaguuu

SEQ ID NO: 5782 - RNA, 70 nt, Human
ggaaaacggcaaaauuguguacguugauguaccgccgagaggugggacuuugaccugcaauuagguuucc

SEQ ID NO: 5783 - RNA, 77 nt, Human
agguccgcgcugugucccguguuuucugcgugagaggaaaagaugcuagaaccacaggagaauggcgugauugaccu

SEQ ID NO: 5784 - RNA, 64 nt, Human
cuuccagccuuaaggcauguauuugauaaggcaaaauucaaagguaaaggucaugaggcugaag

SEQ ID NO: 5785 - RNA, 71 nt, Human
accgcgagguuuuuccuagggcugucugggcuggucuacgggucgucccggcugccuuucaugccuccggu

SEQ ID NO: 5786 - RNA, 113 nt, Human
gcuucucugcuccccugggugaugggugggcccagaagguggcagucccacaccuuguccucccaccucccugaaacuguccauugcuuuuauagggugagguaagugacagc

SEQ ID NO: 5787 - RNA, 98 nt, Human
gggcuggggugggguggguggggucgggugguggagaggccuuagcuguccuggcuggugccccucccaggcuccuuuucacccugcccccugggccu

SEQ ID NO: 5788 - RNA, 63 nt, Human
augcccgugagcgagcugacugacaagcuggggcuacagcacuuacgcagccgcacgugguau

SEQ ID NO: 5789 - RNA, 79 nt, Human
cuccccccauggccaggccuugcuccuguucugccugauguucccugguugugggccugggcuuggcucuggggagggg

SEQ ID NO: 5790 - RNA, 72 nt, Human
guccccggcgggguuggccagugaaaaaccuuauaucagguagaacaaauaggucggacaccggcgggaggc

SEQ ID NO: 5791 - RNA, 70 nt, Human; identical to SEQ ID NO: 5314

SEQ ID NO: 5792 - RNA, 66 nt, Human
aaaaacuuuacaaaaaauggcagcaaaggguaguuuucaucugggugucuuucauuuaaaguuuuu

SEQ ID NO: 5793 - RNA, 60 nt, Human
ugcugccgaugaccaagcacgccuuauugaccccgaaggcugcgacgcugcacggcacca

SEQ ID NO: 5794 - RNA, 71 nt, Human
cugguugugggggagggaaaagcggcaaaaggggauuauucaaaguaccgaaaaccuucucccgggaucag

SEQ ID NO: 5795 - RNA, 62 nt, Human
guugcaguuuuccggcagcaugguaguaugagauaguauguugugucucuggaauaugugau

SEQ ID NO: 5796 - RNA, 80 nt, Human
aagguaaauagccaugggugggccuacaaaauucccugucaaugacuuggggaugacccugugggcacccuaugguccuu

SEQ ID NO: 5797 - RNA, 67 nt, Human
guugugcaccgccggccucguuugaaccaaucagccguccagcgggacuggcccgcgggugcacaau

SEQ ID NO: 5798 - RNA, 70 nt, Human
aagagggggcaacucaaggagggacacaugacuaagcaagaaaaugugacucugugagcugaccccgcuu

SEQ ID NO: 5799 - RNA, 63 nt, Human
ccgcgguggcuuccgaggagguuucgagcauguggcauucgagggccggggucgcggccgugg

SEQ ID NO: 5800 - RNA, 62 nt, Human
cugaggccugggugguuaacacaacauggcggaugacgccgcgugcagcuaagggggcccgg

SEQ ID NO: 5801 - RNA, 78 nt, Human
ggcucauggaguguuaaagugcauccacaggaggauggccaccggccaucacguggugagccaaucauaccauggacc

SEQ ID NO: 5802 - RNA, 73 nt, Human
uccuaguggugcgggcacacacacccugcacgccacacaccaccuacaggguggccgugagccgcacccagga

SEQ ID NO: 5803 - RNA, 105 nt, Human
gcaaaauauucuacaguuuaaugguuuuuuugaggacccucauauuuuauaaguuuauaauaaagugucuuaaguuucuuaaaaguaucaacuguuuucguuugu

SEQ ID NO: 5804 - RNA, 72 nt, Human
guguaugggucaauaguuuacuuuuuauuaucuccgaccagcugauaaaagacaauaauuaaauacauacau

SEQ ID NO: 5805 - RNA, 61 nt, Human
ugcgggccgucacacggagcccggagacaacugccuaugcgcacuggaaggaacgcccgca

SEQ ID NO: 5806 - RNA, 61 nt, Human
gccaaguuucgucccguuuugcaagggcccaaggggggauauagcaagcgggggguaaggc

SEQ ID NO: 5807 - RNA, 60 nt, Human
cacgaaaauguacccaguauuccuagguaguggccuaauuuuaccaauuguacacacgug

SEQ ID NO: 5808 - RNA, 61 nt, Human
ugggcucaucauucccuuggagccuggaaggccgggugcuccaggggcgugacaacgucca

SEQ ID NO: 5809 - RNA, 60 nt, Human
gcauggcugacaaauugcucgacacaaccugcagaaggucaauggggcaggaggccaugc

SEQ ID NO: 5810 - RNA, 76 nt, Human
gcgcagcgggugaagcuaucaagcccagagagagacguggagagggacgucuuccuguauagagcguaccuggcgc

SEQ ID NO: 5811 - RNA, 75 nt, Human
caacgagauuuggucguaguggggcgccuuggucaccagggcugcuuuuaacucuggguaaaguggauauuguug

SEQ ID NO: 5812 - RNA, 61 nt, Human
gccaucacugccaccagaagacuguggauggccccuccggggaaaacuguggcgugauggc

SEQ ID NO: 5813 - RNA, 88 nt, Human
ccuggcacucuagugcacccaggagucuggacaggagggcagugcugcugcaugcagccccaguauuuaccugggguaagaugccagg

SEQ ID NO: 5814 - RNA, 99 nt, Human
gcuuggcagcaaggugccuuagcuaagcuuccucucaacccuggucaggaagccugggaggguugggguggcugcauagcggacccggggucuucaagc

SEQ ID NO: 5815 - RNA, 90 nt, Human
ggagaaagcaagccccuccacacugcguccuagaccggauauugagguuggugucucaggcccagugccccggaggagcgggcugucucc

SEQ ID NO: 5816 - RNA, 64 nt, Human
guacccuucugcugagcagucuaaccccuaugccuguauaugcucacuguucaccaguaccuac

SEQ ID NO: 5817 - RNA, 67 nt, Human
ugucuacgacagcucucaauugcccagucaugaccgucagcugggauaaccauugcccuacuggaua

SEQ ID NO: 5818 - RNA, 60 nt, Human
ggcuggcaguuccaguuggcgccgaacucggggacaccuuccggcuucugggguccagcc

SEQ ID NO: 5819 - RNA, 66 nt, Human
ggggccucuagugggcaccuuuauuuuuagauuuuuccugaacauggcggucucgccucugguccc

SEQ ID NO: 5820 - RNA, 85 nt, Human
ggugacucagugcucaggaucuuauggcuccuuccuccagcuugggggacucuuaaaggggcugggguagagacuaagaguugcc

SEQ ID NO: 5821 - RNA, 63 nt, Human
acuguguucagcugccacaggccuggaggaguuuccuggccugucacgugagguuggaucagu

SEQ ID NO: 5822 - RNA, 65 nt, Human; identical to SEQ ID NO: 4540

SEQ ID NO: 5823 - RNA, 71 nt, Human; identical to SEQ ID NO: 4541

SEQ ID NO: 5824 - RNA, 70 nt, Human
gugcacgcuuggccacccuugccauuucugcucccagagucucaggcuccccuucugacccagugugcgc

SEQ ID NO: 5825 - RNA, 60 nt, Human
gccucugagagaagcagcugggggcccucacccugcaucgucuugcgucucuuggcaggc

SEQ ID NO: 5826 - RNA, 62 nt, Human
gugacugccugguuaagaucuacaaaucugaugggauuaagggccuguaccaaggcuuuaac

SEQ ID NO: 5827 - RNA, 61 nt, Human
ucugugcaggguauuaucaucuaccgagccgcuacuucgguaucuaugacacugcaaggga

SEQ ID NO: 5828 - RNA, 72 nt, Human
ggguugcuuauguuaacuuuccaaauguacauuaacuccgguuuagaauuuggggggaaaauuuggcaauuu

SEQ ID NO: 5829 - RNA, 60 nt, Human
uuaaccauggacauggaucuucuuuauaauucuaauuugaagugcugucuccauggucgg

SEQ ID NO: 5830 - RNA, 77 nt, Human
uuauucaaaaucaacaucuuggguccgaauuugaacuucuuccaaucucuuggcacuucaaggguuguuaagaauag

SEQ ID NO: 5831 - RNA, 90 nt, Human
ccacccaagggcuacuuccugaccaagaucuuccacccgaacgugggcgccaauggcgagaucugcgucaacgugcucaagagggacugg

SEQ ID NO: 5832 - RNA, 73 nt, Human
gccggcggcccagcggcggccggagccggucggccuggccugggcugaagcuccucccgagcugggccccggc

SEQ ID NO: 5833 - RNA, 65 nt, Human; identical to SEQ ID NO: 1245

SEQ ID NO: 5834 - RNA, 76 nt, Human; identical to SEQ ID NO: 5199

SEQ ID NO: 5835 - RNA, 82 nt, Human
ucuacaccugggaggcuugcgacgaugcuugcuggaggauagaaaaaguucccaaaguuugccggcugcaagugagugugga

SEQ ID NO: 5836 - RNA, 63 nt, Human
ggaagauugaauauuuaucuagagaauacaaagacccacauguaaaugauagguauuaucucc

SEQ ID NO: 5837 - RNA, 64 nt, Human
uauauguacccacuuagucauguaagugcauauacacauacacacacaugaguguagacaugug

SEQ ID NO: 5838 - RNA, 69 nt, Human
ugacccaaaucucuuccacaagacuuaaaaccaaauucagggacaaauggauagagaagaaaaggguca

SEQ ID NO: 5839 - RNA, 75 nt, Human; identical to SEQ ID NO: 4496

SEQ ID NO: 5840 - RNA, 88 nt, Human; identical to SEQ ID NO: 2733

SEQ ID NO: 5841 - RNA, 68 nt, Human; identical to SEQ ID NO: 2734

SEQ ID NO: 5842 - RNA, 75 nt, Human
uuuuucgaaugaaugacaacuuuauuuuucuuacacuuuuaaggcugaugaaaaaccuucauuucaauugaaaag

SEQ ID NO: 5843 - RNA, 88 nt, Human
ccagaagaaacugagaagcaugacggacaaguacaggcugcaccugucaguggccgaccuccucuuugucaucacgcuucccuucugg

SEQ ID NO: 5844 - RNA, 69 nt, Human
gccaucguccacgccaccaacagucagaggccaaggaagcuguuggcugaaaagguggucuauguuggc

SEQ ID NO: 5845 - RNA, 63 nt, Human
guugaugccguggcaaacugguacuuugggaacuuccuaugcaaggcaguccaugucaucuac

SEQ ID NO: 5846 - RNA, 77 nt, Human
aacuuuaaugauuauuuauucagacccuggaaaaccacacuauaaaauagggcacuggaucacaaguucguuugguu

SEQ ID NO: 5847 - RNA, 103 nt, Human
ucucacucuccuacuagacuuuucauugaaaaguuaggcaggaaaaaggaaaggaaucccaauuugcugccagcucugaugagagaucagguggggggagaga

SEQ ID NO: 5848 - RNA, 60 nt, Human
uuuuuuuuuuuuuuuuaaaaauagagccuaagggccuguauuuuaaugagaaaaaaaaaa

SEQ ID NO: 5849 - RNA, 65 nt, Human
cuggauugaagguaugagucaccacgccuggccacacacacuuuuaauaaugcuucauaaaccag

SEQ ID NO: 5850 - RNA, 84 nt, Human; identical to SEQ ID NO: 286

SEQ ID NO: 5851 - RNA, 89 nt, Human; identical to SEQ ID NO: 288

SEQ ID NO: 5852 - RNA, 66 nt, Human
gaaaaguuaaagcgaugccauuaguugaagaaacuucuuuacuggaagauucgucagugacuuuuc

SEQ ID NO: 5853 - RNA, 70 nt, Human
ggccgcgcucgggcgccccucgcgcagcgcuccaugcccguguggugcugccgcugcucccuggccgguc

SEQ ID NO: 5854 - RNA, 62 nt, Human
ugugguaauaauaggaaauggacccucaggaauaugccuuucuuauauguuaucaggcuaca

SEQ ID NO: 5855 - RNA, 64 nt, Human; identical to SEQ ID NO: 287

SEQ ID NO: 5856 - RNA, 89 nt, Human; identical to SEQ ID NO: 288

SEQ ID NO: 5857 - RNA, 102 nt, Human; identical to SEQ ID NO: 2172

SEQ ID NO: 5858 - RNA, 77 nt, Human; identical to SEQ ID NO: 3082

SEQ ID NO: 5859 - RNA, 80 nt, Human; identical to SEQ ID NO: 367

SEQ ID NO: 5860 - RNA, 79 nt, Human
ccggaaccugcucaucuggaucaagaagaauuugcuaaaagagcggccagaguuguucauccagggagacagcgugcgg

SEQ ID NO: 5861 - RNA, 72 nt, Human
cuucaucuccacucugcacggcggcugagggcccuucucugggccugggcacccuuagaggggagaacgaag

SEQ ID NO: 5862 - RNA, 60 nt, Human; identical to SEQ ID NO: 1720

SEQ ID NO: 5863 - RNA, 73 nt, Human
uucaguuauugugcuuguuucaaaaugcuuuaaaauuaguuccugcauuguauugagagacauaucaacugaa

SEQ ID NO: 5864 - RNA, 88 nt, Human
ggagaaucacuugaacccaggaggcagagguugcagugagcugagauggugccacugcacuacagccugggcaacagagugagacucc

SEQ ID NO: 5865 - RNA, 82 nt, Human
uuaguagugcauuuuauuuauucuaaguugcauacuuuuuacuuuuuaaacaucugugcaauugaauggaucucacaacuga

SEQ ID NO: 5866 - RNA, 88 nt, Human
accccgcccgggaaggcagccgcaccauggagucuuccaguucaucuaacucuuauuucuccguuggcccaaccagucccagcgcugu

SEQ ID NO: 5867 - RNA, 71 nt, Human; identical to SEQ ID NO: 1006

SEQ ID NO: 5868 - RNA, 64 nt, Human
uagaagagaggaggcaugucagugacuugaaauuugcaaugaaaugcuacacaccucuugucua

SEQ ID NO: 5869 - RNA, 67 nt, Human
gcuuccuucgucuaccacucugugccagcuccaacagaccuggcaacuaauaggacuagaaggaggc

SEQ ID NO: 5870 - RNA, 65 nt, Human
gugcaccauuugauaauacccuggaccaaguuggcuacaagucagggggugauaugugugugcac

SEQ ID NO: 5871 - RNA, 60 nt, Human
aaguggcccugauaaugcguugaaagcuaauucguuugcagccguguauuugggccaguu

SEQ ID NO: 5872 - RNA, 67 nt, Human
gcugagcucauaugcuaagacagagcuggggucucagacuccagaaaguagucgcagugaagccagc

SEQ ID NO: 5873 - RNA, 82 nt, Human; identical to SEQ ID NO: 5835

SEQ ID NO: 5874 - RNA, 68 nt, Human; identical to SEQ ID NO: 1986

SEQ ID NO: 5875 - RNA, 91 nt, Human
ccugcacagccaugcccgggcaagaacucaggacgcugaauggcucucagaugcuccugguguugcuggugcucucguggcugccgcaugg

SEQ ID NO: 5876 - RNA, 62 nt, Human
gcggcgucagcucagccuugcaagaccccaggcgcccgcgcugcaccugcgacugucgccgc

SEQ ID NO: 5877 - RNA, 81 nt, Human
ccgccucaaugauguuugcaaaggagcugaagcuggugucccgggcgcccagcgaaugaaccgauggucgacaugaagugg

SEQ ID NO: 5878 - RNA, 80 nt, Human
gcucagccuguaauucuggaauuucgggaggccgaggcaggaagauuccuugagcacaggaguuccagaccagccugggc

SEQ ID NO: 5879 - RNA, 73 nt, Human
ggggcgcgcccugcggcccccggagaaaggccuuuucagaaccccucuccgguguggggcgcccgcgggcccc

SEQ ID NO: 5880 - RNA, 72 nt, Human
cguggggaucagcguaggugagcuguggccuuuugcgaggugcugcagccauagcuacgugcguucgcuacg

SEQ ID NO: 5881 - RNA, 60 nt, Human
cuuggaggagucacccaggagucauuugaucuuaugauuaaagaaaauccauccucucag

SEQ ID NO: 5882 - RNA, 87 nt, Human; identical to SEQ ID NO: 76

SEQ ID NO: 5883 - RNA, 109 nt, Human
agaucggucaguuugaugcucgaugaaugcugggaauucagaggaaugucuucaccuuauacuuggauuugcucucuucccauuucugaucguguauagcuuucgauuu

SEQ ID NO: 5884 - RNA, 65 nt, Human
gcuuacaguaguuccccuuaucuucgggagauacauuccaaggcccccagugaacuccugaaagc

SEQ ID NO: 5885 - RNA, 63 nt, Human
gugucacacagcaaaaugacaauaaaaucuagggauccaaucagaugcagagaauguggauac

SEQ ID NO: 5886 - RNA, 90 nt, Human
guuggaagagaaaaugguacagcaguuacaagaggauguggacauggaagaugcuccuuaaaaaucucuguaaccauuucuuuuauguac

SEQ ID NO: 5887 - RNA, 86 nt, Human
gauauauuagaguauagacuacaaggagagcugcuaauauuaagauauauagacuucucugcaugauauuuacacucuauauaauc

SEQ ID NO: 5888 - RNA, 61 nt, Human
gguuuuucuaugagaugagaauuaugaacacuucauauagguaaauuccauagguugagcu

SEQ ID NO: 5889 - RNA, 63 nt, Human
acuuugggaaaauuauuuauuucuccccacgggguucagacaaguaauuucacauuucauugu

SEQ ID NO: 5890 - RNA, 77 nt, Human
guacagagauugcuuuuuaauggauuucuauaaguaguauuaauaggaaaaagcauauaauacaaucuacucuguau

SEQ ID NO: 5891 - RNA, 98 nt, Human
uguggugccugguggagaccuggccaagguacagagagcugugugcaugcugagcaacaccacagccauugcugaggccugggcucgccuggaccaca

SEQ ID NO: 5892 - RNA, 84 nt, Human
gccucucugcauggcugggggagucagggcagagcuuacuuuaaaaaagaauguucgauuugauacuuaaacuugaggagaggc

SEQ ID NO: 5893 - RNA, 60 nt, Human
uggccagucaaggguccacagggugccagccucucacccucagaauaaagacaucagcca

SEQ ID NO: 5894 - RNA, 78 nt, Human
ucauuguggcuuugguucaaaaggaaacacuacauuugcucacagaugauucuucugaaugcuccccgaacuacuuga

SEQ ID NO: 5895 - RNA, 70 nt, Human
ugggauguaguuuuuacccagguucuauccaaaucuaugugggcaugaguuggguuauaacuggauccua

SEQ ID NO: 5896 - RNA, 63 nt, Human
ugcgaggcucagacgaggaucacucgagcccacgcuuuagugaacacucugggcccccuagua

SEQ ID NO: 5897 - RNA, 63 nt, Human
ggccaaacagaaauucaagugaauuguccuccugcaguuacugagaauaaaacuguuacagcu

SEQ ID NO: 5898 - RNA, 61 nt, Human
gggaucccuaaauguaucugugauauuuggcuuucuaaauaugauacucuggggaggaacc

SEQ ID NO: 5899 - RNA, 71 nt, Human
aacuggugauuguuggugauggagccuguggaaacgacaugcuugcucauagucuucagcaaggaccaguu

SEQ ID NO: 5900 - RNA, 99 nt, Human
agauuuaacaauuuagcauggacauguacuuguagacaggauucaaagcaguuaagaaugucucugccaagucgacaaacagcuauuauuguuaacccu

SEQ ID NO: 5901 - RNA, 78 nt, Human
gacauuguucuuauggcacaagcucuagagaagcuguuuaugcagaaauuaucucagaugccacaagaagagcaaguc

SEQ ID NO: 5902 - RNA, 89 nt, Human
ucaacuucaguaucuacaaaaaguuguccuaaaggauuuauggaagcauaguuuuucauggcccuuucaacguccuguggaugcuguga

SEQ ID NO: 5903 - RNA, 67 nt, Human; identical to SEQ ID NO: 4715

SEQ ID NO: 5904 - RNA, 69 nt, Human
aaacaguaggaagagcuugcuuguuuuaacagaacauuuauuuguacacauuaagcucuuuagauguuu

SEQ ID NO: 5905 - RNA, 85 nt, Human
aacaaauaugggaaguaaauuugaaauuaagaaaaaugaauagaauuuauuacaugcuuugagguuggguauguuucccuuuguu

SEQ ID NO: 5906 - RNA, 86 nt, Human
guuuccgugauuuuuugaguuauuuuaaaacuuauuuuuuaaucaugguuuuaaaacuucucauacugaaaauuuuuauuagaaac

SEQ ID NO: 5907 - RNA, 75 nt, Human; identical to SEQ ID NO: 74

SEQ ID NO: 5908 - RNA, 87 nt, Human; identical to SEQ ID NO: 76

SEQ ID NO: 5909 - RNA, 117 nt, Human
ugaggagcuguugggucguguaguugaugcccuugguaaugcuauugauggaaaggguccaauugguuccaagacgcguaggcgaguuggucugaaagcccccgguaucauuccucg

SEQ ID NO: 5910 - RNA, 74 nt, Human; identical to SEQ ID NO: 365

SEQ ID NO: 5911 - RNA, 77 nt, Human; identical to SEQ ID NO: 3082

SEQ ID NO: 5912 - RNA, 80 nt, Human
cuauuucucuauguuuauucuaguuaaggaaauguugagggcaagccaccaaauuaccuaggcugagguuagagagaugg

SEQ ID NO: 5913 - RNA, 68 nt, Human
ggacuuagaaguaguauguuauuccugguuaagcaggcaugcuugcccuggagcagcuauuuuaagcc

SEQ ID NO: 5914 - RNA, 68 nt, Human
gcucaaccucuuuguucaguauguguaaccuugaagcuaauugguacuacuggauaucugacuggagc

SEQ ID NO: 5915 - RNA, 68 nt, Human
uccguggcugcucauucuugccuacuuuacucucccacugaagcagguuagcgugaaggugguaugga

SEQ ID NO: 5916 - RNA, 97 nt, Human
auauaaaccugguugcuagcauucugugaaaucagugaagagacuggaguucucucagugcacacacugauuuuucacuuagucccuagguuucugu

SEQ ID NO: 5917 - RNA, 61 nt, Human
gucggggcugcuugcuaacuccaggaacagguuuaaguuuuugaaacugaaguaggccuac

SEQ ID NO: 5918 - RNA, 79 nt, Human
gugcacaaccaaaaaauggagggaaacugaagcaagaauucgaauuaagagacuuuuuccauucccucacgguuugcac

SEQ ID NO: 5919 - RNA, 104 nt, Human
ggcaucaucacugcuaucaucauuaacagcguaaauuauacaagcauauuuaaugcugaguuuaauuuaauauguaauacauaugguaaugguaggguaauacc

SEQ ID NO: 5920 - RNA, 70 nt, Human
guauaucuaauaaguguuuuucauauuauuuccacguaagggaaauaagguaguacuuuucuuuuuauau

SEQ ID NO: 5921 - RNA, 91 nt, Human
gaaagauauauucgaauuguaaagaugcuuuuucucaugcauugaaauuauacauuauuuguagggaauugcaugcuuuuuuuuuuuuuuc

SEQ ID NO: 5922 - RNA, 73 nt, Human
gggacuacgggugugcacuccucgccuggcuaauuucaauuuuugguacaggcaggaucuugccaccuugccc

SEQ ID NO: 5923 - RNA, 100 nt, Human
uugcucgggcgcccaggcuggagucacaggggcaugaucugggcucacuucagccuugacuggggcccaagugauccuccuaccugagccuucugaguaa

SEQ ID NO: 5924 - RNA, 76 nt, Human; identical to SEQ ID NO: 758

SEQ ID NO: 5925 - RNA, 71 nt, Human; identical to SEQ ID NO: 1764

SEQ ID NO: 5926 - RNA, 64 nt, Human
ggcuagguacgaggcuggguugugcagcucugugcugccagucggugccccucccgcuccagcc

SEQ ID NO: 5927 - RNA, 69 nt, Human
gaaguugagaaaugugacagaggcauuuagaguauggacuuuucuuuucuuuuucuuuuucuuuuuuuc

SEQ ID NO: 5928 - RNA, 103 nt, Human
gggcagaauacucuaaaaacuugauaaaaugaaauauagauuuaauuuaugaaccuuccaucaugauguuguguaugcuucuuuuggauccucauucucaccc

SEQ ID NO: 5929 - RNA, 89 nt, Human; identical to SEQ ID NO: 1509

SEQ ID NO: 5930 - RNA, 66 nt, Human
ucgcccgugugcagagcggacaaggcaaaaucucagcaaguucggaccucuaguacaauaaggcga

SEQ ID NO: 5931 - RNA, 78 nt, Human
cagggacaggccagcugauauuggccauuggcacaggaucuugucugucugggaaagauaucggugagacuguuucug

SEQ ID NO: 5932 - RNA, 90 nt, Human
ccuggcauggacagaagccaggggacacauccacccagugaacuggacuguggccaugaacccaggguaucagguccaaacucugccagg

SEQ ID NO: 5933 - RNA, 69 nt, Human
cuggagaucucugguuccccggggagucugagagcuucgaggaugcccauguggagcacagaucuccag

SEQ ID NO: 5934 - RNA, 69 nt, Human
gguggcauggagccucuccgggugcucaucuuacucuugucacagagucuguccggagcccacaacacc

SEQ ID NO: 5935 - RNA, 79 nt, Human
uggcgggccagucccugcaggugucuugccccuaugacuccaugaagcacugggggaggcgcaaggccuggugccgcca

SEQ ID NO: 5936 - RNA, 67 nt, Human
acaggugguugcuuugaacuuuauuugagaaaaacagaagauaaauguaucaaaagaacacacaggu

SEQ ID NO: 5937 - RNA, 64 nt, Human
caggggugggcauccgggcuaaggcuuuacuuggcggcagucucaucggauuuugcagcuucug

SEQ ID NO: 5938 - RNA, 69 nt, Human; identical to SEQ ID NO: 1724

SEQ ID NO: 5939 - RNA, 64 nt, Human
cgccauccuuggucuugaccgucagcucguccggggcgaagugguugacauccagggacacgcg

SEQ ID NO: 5940 - RNA, 63 nt, Human
ugaugguguuggugucgcgugcuguggagcauccgagugugccagagucuccagaauccguca

SEQ ID NO: 5941 - RNA, 66 nt, Human
uuuuccuuauccaauguacucacgggauuauguuuauguucggcgguauaguguggaucaggaaaa

SEQ ID NO: 5942 - RNA, 60 nt, Human
caggaggcgucaucccguguggcgggacuagguggggugaucagauaggccguccuccug

SEQ ID NO: 5943 - RNA, 62 nt, Human
agguuacaacuagaggcuuguggaaugagacguaaaaagucuauuaacaagaaagguaaucu

SEQ ID NO: 5944 - RNA, 70 nt, Human
gaugaaccagcuucgaggcaagaaguccugcgcacacgggucguaggcagguccgcugggcuggaacauc

SEQ ID NO: 5945 - RNA, 81 nt, Human
gcucagcgccgcacccggaagaugaggcucgccgugggagcccugacuggucugcgccgucaacuggggcugggucugggc

SEQ ID NO: 5946 - RNA, 73 nt, Human
ggcagcugugccccuugugcggaugggacggacuucccccagcugugucaacuguguccaggguguggcuguc

SEQ ID NO: 5947 - RNA, 66 nt, Human
cauuuauuaauacagcgaaagaaauuuaugaaaaaauucaagaaggagucuuugacauuaauaaug

SEQ ID NO: 5948 - RNA, 62 nt, Human
ggcgacacagguguugguaaaucaugcuuauugcuacaguuuacagacaagagguuucagcc

SEQ ID NO: 5949 - RNA, 71 nt, Human
cggaguugagaaacugcaaggaacacaaaagacucaaacaacagaguucgagggucuacuugcuaacucug

SEQ ID NO: 5950 - RNA, 69 nt, Human
cguuccagugcauuaugaugagcccguuugucagccuagaagaaugggagaaagaacacauuaggaaug

SEQ ID NO: 5951 - RNA, 78 nt, Human
gaaucgcuccugcagcagagccaacaugcccaucacucggaugcgcaugagacccuggcuagagaugcagauuaauuc

SEQ ID NO: 5952 - RNA, 73 nt, Human
cacucaguucugacucuagagaccagagaggugacguaagacuucuuccuuaagaaucugggacuaccaagug

SEQ ID NO: 5953 - RNA, 61 nt, Human
ccuggcacagaaucugggaauuuguauuucuggcgaguuuccaauugaugcugaugcuggg

SEQ ID NO: 5954 - RNA, 84 nt, Human
ggcagcuuuaauaugagaagauauuuacacuuuuaccuucgcugauugaaaauacccuuagcuuauauauucuuucaagcugcu

SEQ ID NO: 5955 - RNA, 90 nt, Human; identical to SEQ ID NO: 1285

SEQ ID NO: 5956 - RNA, 63 nt, Human
gugguggccgauacggggcgaguuccacgccaucgacgaguacaagccccaggaugcuaccac

SEQ ID NO: 5957 - RNA, 73 nt, Human
ucauggcagugauucaguaaacaagugcugaaaaagaaaucagccuaugguuuaagccugaagaacugguuga

SEQ ID NO: 5958 - RNA, 70 nt, Human
ggcaaggaaagcuccaaauccaugacagucgaagucucugcuccuucaggaauaggacgucuuccucucc

SEQ ID NO: 5959 - RNA, 63 nt, Human
ggcguggugggcguggcccccacuggcaucccagcugcuguggaagguaucguccccagcgcc

SEQ ID NO: 5960 - RNA, 73 nt, Human
gcucgguccuggcggcuguuauggccgcgccaccgggcgugggccuugggguggcccuccguuggggccgggc

SEQ ID NO: 5961 - RNA, 65 nt, Human
uuuugggggcucuggguguggcgguugccguagcugaaauggcugcaccaugucggccuucgaga

SEQ ID NO: 5962 - RNA, 72 nt, Human
agucccggagauccgugauguaacaaggauugagcgaaucggugcccacucccacauccggggacuggggcu

SEQ ID NO: 5963 - RNA, 92 nt, Human
uguacuucaggacccgaagacccggacucucuggcaagggacuggggccaagcccaguaagaggucugaccggcgaaagucuugaggguaca

SEQ ID NO: 5964 - RNA, 71 nt, Human
auccgguguacauacaacccacauauugggggcuaccaaugccccuuuggggguugguacaagcagcggau

SEQ ID NO: 5965 - RNA, 63 nt, Human
guaggauuagaucauuagcucagugaccuccuaggguuucgaugugcuauguucucauccuac

SEQ ID NO: 5966 - RNA, 101 nt, Human
augcucuuccggcagcugcaucaggagcugcccucucaugggguacccuugauaaaccaucucuagagaggacaucccugcugggcugcugugcagaguau

SEQ ID NO: 5967 - RNA, 62 nt, Human
ggucagcaucuauggaacccaccacaaccccacaguguggccugacuccaagguguacaacc

SEQ ID NO: 5968 - RNA, 71 nt, Human
cugcggcuccgggcugguggccacgcgaggguguccgcccucuucgaccugccuggauuuuugugcugcag

SEQ ID NO: 5969 - RNA, 70 nt, Human
ugugaaccaauacauugaaaguugguguugucauguaagugacugcuguagcuuuucugagugccucaca

SEQ ID NO: 5970 - RNA, 105 nt, Human; identical to SEQ ID NO: 979

SEQ ID NO: 5971 - RNA, 62 nt, Human
cuugguucuacagccauugggauccagacaucagagggugugugccuagcuguggagaagag

SEQ ID NO: 5972 - RNA, 62 nt, Human
ggugccaugucucgucccuuuggaguagcauuauuauuuggaggaguugaugagaaaggacc

SEQ ID NO: 5973 - RNA, 81 nt, Human
cggacacaucacagguauugacugggcucccaagagcgaccgcauugucacuuguggggcagaccgcaaugccuaugucug

SEQ ID NO: 5974 - RNA, 68 nt, Human
caguucgugguguuggcgggccugaggaguaugaacggugccuuagcguuuguggacacuucggacug

SEQ ID NO: 5975 - RNA, 64 nt, Human
cggauaucugugucuuucuaccacgucaaaaacaacgggaagauugaacucaucaagauguucg

SEQ ID NO: 5976 - RNA, 68 nt, Human
ggagugaccuggagcacugugggggacgggacuccgccugcuguucccgcgcugagcuacaggacucc

SEQ ID NO: 5977 - RNA, 92 nt, Human
caccaucuacuagggcauuauuaugcgagaauuuucgauaacaagguguugaccacgauuauaucuuaauauucuugccuuuccccguggug

SEQ ID NO: 5978 - RNA, 74 nt, Human
ggggaccaggggaagggggaggaggggaagugaggccccagccccacuaccccuccccgcccaccccuuucccc

SEQ ID NO: 5979 - RNA, 78 nt, Human
caugugucaugggaggaauguagugggaaguaauugaaucaugggggcaguuaccccaaugcuauucucgugauagug

SEQ ID NO: 5980 - RNA, 60 nt, Human
ccuccaagcgcaaauuccgcaccaaggucauggacuuggugcacgacuggcgaagggggg

SEQ ID NO: 5981 - RNA, 90 nt, Human
gcccccuuguuuuuugugggccuguucaccauaggccagaauugggcccacccaaauggccucauggguggccggguuaggaaaaggggc

SEQ ID NO: 5982 - RNA, 65 nt, Human; identical to SEQ ID NO: 5179

SEQ ID NO: 5983 - RNA, 62 nt, Human
ggggcguaagggcuggguuuggccauacaagguuggcuacgcccucaaucccugaccguucc

SEQ ID NO: 5984 - RNA, 97 nt, Human
ucccacugcuucuaaaggaaguccugggcaggagguggcuuuggugguugguuccaaaguugaaaaugcuugcaguuugaccuuagaagaaguggga

SEQ ID NO: 5985 - RNA, 115 nt, Human
ugauggccccaacagguucugggcuucaguggagcccuacugugcugacaucaccagcgaggagguccgcacacuugaggaguuacugaagcccccaagaagaugaggcugagca

SEQ ID NO: 5986 - RNA, 69 nt, Human
uggaagggaaggcaggacaugggccgggcccuggcccaggacggcccaaauccaaaaaccuucagccca

SEQ ID NO: 5987 - RNA, 65 nt, Human
cuccccgaaaagaagaccgcagugccagcagcggggcugagggcgacguguccucugaacgggag

SEQ ID NO: 5988 - RNA, 81 nt, Human
cuggagcagcugcguaaaacauacaggccggagcuuaucaaagauggcaaguuuggggccuacaugcaggugcacauucag

SEQ ID NO: 5989 - RNA, 62 nt, Human
cccuggaagagggacuccaaugggcauugccccuccggggaaugcggacuccucccccuggg

SEQ ID NO: 5990 - RNA, 61 nt, Human; identical to SEQ ID NO: 1238

SEQ ID NO: 5991 - RNA, 83 nt, Human; identical to SEQ ID NO: 3404

SEQ ID NO: 5992 - RNA, 109 nt, Human
ggugaugaccccacaaggaagagguacuguugcagccgcugcagcugcugccacagccaguauugccggggcuccaacccaguacccaccuggccguggggguccuccc

SEQ ID NO: 5993 - RNA, 96 nt, Human
ccggcggagagcgaccucgggguuaagggguggggcugacgucaggagccaagauggcggcgguggucgcacucuccuugaggcgccgguugccgg

SEQ ID NO: 5994 - RNA, 76 nt, Human
gcagcaguaucugcaguccauagaagagcgugagaaacuggacgggcucuacgagugcauucucugugccugcugu

SEQ ID NO: 5995 - RNA, 76 nt, Human
cuuaggagaucggagagccaagacugugacacccuuucuggggcucugugguuccuggcgucuccaagcuucuggg

SEQ ID NO: 5996 - RNA, 68 nt, Human
uccggaaaagugaguuuuaaacaaguagauuaugcuaaucuuaucagaaaaaaacgacaugguccggg

SEQ ID NO: 5997 - RNA, 88 nt, Human
gcgaaucagggacccucgggcgcguucggacugucgagggcguguccaaacccgaaacacgcgaccaggucgaggcgagacuguucgc

SEQ ID NO: 5998 - RNA, 72 nt, Human
ccagcuucccuacuccuacccuggcccuuuuauacuaggacuccuuaggaggagugagacaggugauaaugg

SEQ ID NO: 5999 - RNA, 79 nt, Human
uccuuaacagaugaacuauccacagaaggaagagggauccgucucuuaaguaauugguuaguuaacacugaauuuugga

SEQ ID NO: 6000 - RNA, 77 nt, Human
ugaccccaacccauccugccagggcagggccuaucuuccugccucuggaagacuuguugcagguggguaguggguca

SEQ ID NO: 6001 - RNA, 68 nt, Human
aaccuggggacgcauagccaaggggaagcgcgacucacaacggcgcgacuucuugaguucuccagguu

SEQ ID NO: 6002 - RNA, 93 nt, Human
aguggcagguaccgcaguuugugcugaaugauauguaugggguaaaucaguuuuuuucuuauagaauuucggcguuuugcugcaacugccacu

SEQ ID NO: 6003 - RNA, 124 nt, Human
gguauuaagccauuuggaaauugccacuuuuuucuggguaaccuguuuuagguucagcucuaccgccauuuagacacacgacgguaccuuuauagaaguaacaccaauauccuaggugguugcc

SEQ ID NO: 6004 - RNA, 89 nt, Human; identical to SEQ ID NO: 3914

SEQ ID NO: 6005 - RNA, 86 nt, Human
gagacccccacggacaugcccaugaacuugcccucgugccgaauucggcacgaggcugcgaaccacgugggucccgggcgcguuuc

SEQ ID NO: 6006 - RNA, 73 nt, Human
ggcuucguguggaauaucacugucgcugaguacccagucuuggcacaguugaugcugacuuuuccuccgagcu

SEQ ID NO: 6007 - RNA, 72 nt, Human; identical to SEQ ID NO: 3442

SEQ ID NO: 6008 - RNA, 117 nt, Human; identical to SEQ ID NO: 3443

SEQ ID NO: 6009 - RNA, 70 nt, Human
ggucguaugggcgccggucaccaggcugcuuuuaacucugguaaaguggauauuguugccaucaaugacc

SEQ ID NO: 6010 - RNA, 65 nt, Human
uuccacccauggcaaauuccauggcaccgucaaggcugagaacgggaagcuugucaucaauggaa

SEQ ID NO: 6011 - RNA, 106 nt, Human
cuuccuccucgggacucuacucaaggccgaccggcggaauagauuuugguaccauauagccgcucggaaaaaaaaccggcucuggggggaagggggaggcgggaag

SEQ ID NO: 6012 - RNA, 76 nt, Human
ggcuggguggcugcaucggaggcguucagcugcuucaagaugaagcugaacaucuccuucccagccacuggcugcc

SEQ ID NO: 6013 - RNA, 65 nt, Human
ccucacaaaagcaagccccagcccagcccccgcugagggaagggcugucaacaaugagccugagg

SEQ ID NO: 6014 - RNA, 66 nt, Human
gcgagugccggguggugcacggcgaaaugagacuguucgugagugcuggcgucccggguugcuugc

SEQ ID NO: 6015 - RNA, 64 nt, Human
ucugccgauauuuuuuuuuguuaucuggcugggagcaagaugaccucacuaaccaguggcugga

SEQ ID NO: 6016 - RNA, 70 nt, Human
ggucaccagauggaggcauggucuucccuugaauucaauuugaguggaaucucuaagugcuuugaugacc

SEQ ID NO: 6017 - RNA, 66 nt, Human
agacaaugacuuuuguaaggauugguacuaucuaucuaucauuccuuauugacauguacauugucu

SEQ ID NO: 6018 - RNA, 65 nt, Human
gaaagcuuuuuuuuaacaggaaaagauaccaaugccugcugguaccaccuuuucaauuggcuauc

SEQ ID NO: 6019 - RNA, 78 nt, Human
uugaaguggcuugaaaaaggcaagauugacuuuuaugacauuggauaaaaucuacaaaucagcccucgaguuauucaa

SEQ ID NO: 6020 - RNA, 99 nt, Human
ccuuuggagaaagccaauggucgagcagauccagugaguucccacggccuuggagcuugcuggccgcgucaaaucaacgaccaaaggacaagacggagg

SEQ ID NO: 6021 - RNA, 79 nt, Human; identical to SEQ ID NO: 3720

SEQ ID NO: 6022 - RNA, 63 nt, Human
gguugcugugucuagggugaaguaggcaaaacguugccuuaaacugggccugaagacgguucc

SEQ ID NO: 6023 - RNA, 71 nt, Human
ugcugcuucuuggcuggcuugcuuuggcagucacugccacuggccuugccuuuggcacauggaagcaugca

SEQ ID NO: 6024 - RNA, 79 nt, Human
gcuggaacugaagcuggggcugcagccugggccuugguuugauccuuggccuuggccuuggccuuggccuuuggccggc

SEQ ID NO: 6025 - RNA, 79 nt, Human
gggcuuuacgagggccuugauagccucggcacgugcacucauggccuuggcauuguuggccugcaucuucuuuaggccc

SEQ ID NO: 6026 - RNA, 100 nt, Human
cagcaaagauugccuuguccccaagagccuccucgauccucaugaguugguuguauuuggccagacgcuccgagcggcagggggcgccagucuugaucug

SEQ ID NO: 6027 - RNA, 97 nt, Human
ggccuucuucucaacggacugugcaauccucuugggguuggugacugucaagucaucccccacaaucuggauguucacccccgagaggaaggagguc

SEQ ID NO: 6028 - RNA, 69 nt, Human
guguccucagucuccccagagcgguggcucaccaucaccccccagccauuagacugagccaguuugcac

SEQ ID NO: 6029 - RNA, 83 nt, Human
caucauggauucaucccuuacccgccggggacagaucugcugguaucagaagccgggcguggguuuggaugccaucaaugaug

SEQ ID NO: 6030 - RNA, 87 nt, Human
gccaaggaaacaggaugcugauagucuccagcgggccuggacugugggcugguguguggaacugcugcaagcuuucuuccugguggc

SEQ ID NO: 6031 - RNA, 62 nt, Human
gcccuauuaccugaaccugaucgagcucuuccugcagaguuccuaucagacugagauugggc

SEQ ID NO: 6032 - RNA, 60 nt, Human
guuuaacuuuauuuuaagcuucuauuacauuguaauuaauaauaauauacuaaguuaagc

SEQ ID NO: 6033 - RNA, 70 nt, Human
cagcaccgaggcgcugugccucgccaucucuaggaacuccgagcagauggccagccacagcgcagugcug

SEQ ID NO: 6034 - RNA, 82 nt, Human
gcagccagucacggcgucaggugucggcccgucgguagcugcugcagacaugcgggucgcccauacccgugacagugguugc

SEQ ID NO: 6035 - RNA, 67 nt, Human; identical to SEQ ID NO: 1806

SEQ ID NO: 6036 - RNA, 62 nt, Human
gggagaagcugugguacgucgccuggauuucgagcaggggauggcccccgccgaauucuccu

SEQ ID NO: 6037 - RNA, 63 nt, Human
uguggauauugauuacuuuuaaauggauuagcaaguuuauuucaguauuucugauugucuaua

SEQ ID NO: 6038 - RNA, 76 nt, Human; identical to SEQ ID NO: 758

SEQ ID NO: 6039 - RNA, 71 nt, Human; identical to SEQ ID NO: 1764

SEQ ID NO: 6040 - RNA, 72 nt, Human
ggggcccugugccuuccugaagugcuggcagaccagaggcaccuccuucaggaccuuagagagguauucccc

SEQ ID NO: 6041 - RNA, 97 nt, Human
guacugccugcccggggcuuaggaggguggcaccggugcugggacacacgggacuguguccucgccaacccccgaccugcccccugccagccagugc

SEQ ID NO: 6042 - RNA, 88 nt, Human
guccuggacauaucggaguaggggguggucagacaucacaggagcugucaacuccugcggaaugggccaacucacucgguggcaggac

SEQ ID NO: 6043 - RNA, 70 nt, Human
ucuccccgcaguccuacccagccuuuuaaccugcuaaaggagaggcugugguuuuagcaccuuggggaga

SEQ ID NO: 6044 - RNA, 68 nt, Human
uguuucaugacugguaacagaguagucucgaggggauccuuggagaaccuguucugacuuuagaagca

SEQ ID NO: 6045 - RNA, 64 nt, Human
gaagaagaauuggccaucuuaaaaagcggguaaaaaaccuggguuaggguguguguucaccuuc

SEQ ID NO: 6046 - RNA, 67 nt, Human
agcgcaggcccacuucccccaguucuccuacucggcagggaggccugaggcggggguggacugcgcu

SEQ ID NO: 6047 - RNA, 66 nt, Human
uucgggcugugcaaggaggggaucaaggacggugccaccaugaagaccuuuugcggcacaccugag

SEQ ID NO: 6048 - RNA, 69 nt, Human
cgugaaaaagggcgguuucugcgcucccuuggcucggaugcgcgcgggguuggcugccuauuuuucucg

SEQ ID NO: 6049 - RNA, 63 nt, Human
auaauucugucucauacuuuggcguuguaauuggugaccuuuguauuggugacgcaaaauugu

SEQ ID NO: 6050 - RNA, 74 nt, Human
gucgccuguugaguagacauggugggcuuuuuacaacggggugaaugaauccaugucuuaaccagcagguguac

SEQ ID NO: 6051 - RNA, 66 nt, Human
guguguacacggguccuuuuuugcaaugaaauacaugguuaugacuugaauccaaaguguauacac

SEQ ID NO: 6052 - RNA, 62 nt, Human
aaaaagguccugguucacccuggagagucaccuuuccugggccaccggauuugggccuuuuu

SEQ ID NO: 6053 - RNA, 60 nt, Human
ccguggagagugacgagacuaggcggcucucuugccuggcuccuggcacuugacuccagg

SEQ ID NO: 6054 - RNA, 67 nt, Human
gacagaagaugguccagaagcuggcccuguacgaggauggggcccuggacagucugcagcugcuguc

SEQ ID NO: 6055 - RNA, 63 nt, Human
gguguggggugugggguguuccccggcaucagcacagcuaugaacauugaacaaccucucacc

SEQ ID NO: 6056 - RNA, 78 nt, Human
aaggguuugccacuuaaccuucgacacgggagggaaaauaaagaauucccuuucacuaagaacacacggcaaacuguu

SEQ ID NO: 6057 - RNA, 78 nt, Human
acgcauccuacaagcaauaguuauggggaucugauggugcaacaaagauccaauaucuacugaucuucgauggagugu

SEQ ID NO: 6058 - RNA, 83 nt, Human
ggagaaauuguugggggcuucagggguccaccacgaugaccuuuauaaacucccggguuucccccugaucccgcaaccuuucc

SEQ ID NO: 6059 - RNA, 61 nt, Human
aguuuguccucuccuuuuauccaagcaggaagauucuauauccugaugguagagacagacu

SEQ ID NO: 6060 - RNA, 68 nt, Human
gcccugggacuugcuagcccaaagaaggaggaugugguuaaucuguuucaccugguuuguccuaaggc

SEQ ID NO: 6061 - RNA, 64 nt, Human
gcagauguggauuagcaagcaggaguacgacgagucgggccccuccaucguccaccgcaaaugc

SEQ ID NO: 6062 - RNA, 80 nt, Human
ggugcugucgggcggcaccaccauguauccgggcauugccgacagaugcagaaggagaucaccgcccugggcccagcacc

SEQ ID NO: 6063 - RNA, 87 nt, Human; identical to SEQ ID NO: 2862

SEQ ID NO: 6064 - RNA, 66 nt, Human
uucaaauauuuccauuuuuuaaaccucuagaauauuauccggacauuuaaaauauugauauuugag

SEQ ID NO: 6065 - RNA, 62 nt, Human
ccggcggauucuuggaggaacccccucggggggccucaugggacccuccgaaauaacgccgg

SEQ ID NO: 6066 - RNA, 79 nt, Human
gaaguuggagcaggggugggcggaggucaccuaaccaaucaauggaaggcaacucacaccugcuccaagccucagcuuu

SEQ ID NO: 6067 - RNA, 84 nt, Human
gccaccaggccaaccugcauauaagaucgaaguaaguuaaauacucaccuaacuaauacgagagguaaucagauggucuagggc

SEQ ID NO: 6068 - RNA, 79 nt, Human; identical to SEQ ID NO: 1810

SEQ ID NO: 6069 - RNA, 60 nt, Human
aggcccuauuggacaaauuugguggggagcauaauccaccaucaauauaucuggaggccu

SEQ ID NO: 6070 - RNA, 65 nt, Human
uuguuguuuuguuuaucuuucucuuucaguuuuagaucgcuaaggcauuuuagauaaggcaacag

SEQ ID NO: 6071 - RNA, 60 nt, Human; identical to SEQ ID NO: 1551

SEQ ID NO: 6072 - RNA, 74 nt, Human
gcugccgaggcucggggcgcgcgcaguuggcgucugccagugccaagacugugccgcccccacagccgaggcgc

SEQ ID NO: 6073 - RNA, 61 nt, Human
guauauuagccaagcuacaggaagcaguagaagcuaaucuuggaaccgcuaugaccuauac

SEQ ID NO: 6074 - RNA, 73 nt, Human
guccaguuucuuuucaauauaggauaggugaaaauggugaucccaaagccuucuuaauagagauuuccuggac

SEQ ID NO: 6075 - RNA, 79 nt, Human; identical to SEQ ID NO: 1810

SEQ ID NO: 6076 - RNA, 60 nt, Human; identical to SEQ ID NO: 1551

SEQ ID NO: 6077 - RNA, 66 nt, Human; identical to SEQ ID NO: 3532

SEQ ID NO: 6078 - RNA, 60 nt, Human; identical to SEQ ID NO: 1551

SEQ ID NO: 6079 - RNA, 60 nt, Human; identical to SEQ ID NO: 1551

SEQ ID NO: 6080 - RNA, 67 nt, Human
ccgcugugccgggucccagccccaagccagagcagcauggguggcccgggacaccagacaagugcgg

SEQ ID NO: 6081 - RNA, 98 nt, Human
ccaccauggugcggccgguggccgagagcggggccaccaagaccagccgcgucuacggcuucaucggccucugcuggcugcuggccgcgcugcugggg

SEQ ID NO: 6082 - RNA, 66 nt, Human; identical to SEQ ID NO: 4602

SEQ ID NO: 6083 - RNA, 69 nt, Human; identical to SEQ ID NO: 4603

SEQ ID NO: 6084 - RNA, 67 nt, Human
gucgggggcccgcaccuuccgucuggcgcccugcccagugguuccuacgggagggccugcucuucac

SEQ ID NO: 6085 - RNA, 89 nt, Human
gagcuccgguagcccgccgcuggaggagcuguucgcccggggcgggcccuugcggaccuuccucgagcgccaggcggggucugaagccc

SEQ ID NO: 6086 - RNA, 68 nt, Human
gaugaaaaugauuugauccuggaaguaacugcaggaguuggaggucaggaggcaauguuguuuacauc

SEQ ID NO: 6087 - RNA, 64 nt, Human
gcugccgguggcucuggccccgccgggccguuggcccagcccgccggcccugagcuccgguagc

SEQ ID NO: 6088 - RNA, 88 nt, Human
cuguaacuaaugauggggccaccaucuuaagcaugauggauguugaucaucagaugccaagcugaugguggaacuguccaagucucag

SEQ ID NO: 6089 - RNA, 65 nt, Human
cccuaaauaccccagcgggcuccgggggguuaccaaccccaguaaaacccgcggggugaaccggg

SEQ ID NO: 6090 - RNA, 73 nt, Human
augaguaguagcccuuuugaaaaugauagaccaaccuuauuucucugacagccaacaggguuaugauacuuau

SEQ ID NO: 6091 - RNA, 80 nt, Human
ggcggcgcccccuccggagggacuggggcgccgaacucacccccagggggggggccggaacguccccgggggggcccgcc

SEQ ID NO: 6092 - RNA, 66 nt, Human
aacggauugcggccuuuuugugucacgcucucgacgcugcguggcgaaaaaagaugccacuccguu

SEQ ID NO: 6093 - RNA, 104 nt, Human
cggugaggguggcuuucuccggcuuccuuagaaggcuugccgaggcagaucagacccaguuggcgaugcugucggggaugcugcugggaaaguguacccugccg

SEQ ID NO: 6094 - RNA, 101 nt, Human
ugauuaucgucgucuaugcagacacacucuucugauauccugguggcguaggcaugguaugcuugcgcccguggaggaacgcugcauagaugauggugacg

SEQ ID NO: 6095 - RNA, 62 nt, Human
gggauugacgaguaagguauaaaggaguuuggggucacaggaaucuuuaauuuaucaacacc

SEQ ID NO: 6096 - RNA, 63 nt, Human
ggguccgucuucuuccugcugcugccgggaccuucugcggccgaugagaagaagaaggggccc

SEQ ID NO: 6097 - RNA, 72 nt, Human
ugaagcacuacgggccuggcugggugagcauggccaacgcaggcaaagacaccaacgggucccaguucuuca

SEQ ID NO: 6098 - RNA, 61 nt, Human
gagggcccaggauuuuggauccccagcccugugacaaggguuccuguccaguuucccccuc

SEQ ID NO: 6099 - RNA, 83 nt, Human
gccaguacaacccggucaaacagcagcuagugcguuacgcccaccagcuguuacagcuguugucggacuggcucggugcuggu

SEQ ID NO: 6100 - RNA, 131 nt, Human
ggcuuagagcacagccccgaggcgccgucuaccaggccccguccccucccccggcuccugucggccugggcagcauggccguauuccggucgggucuccuggugcugacgacgccgcuggccucccuagcc

SEQ ID NO: 6101 - RNA, 69 nt, Human
cuccagagcuccuauagggcaagacacuguuucucauauauuucuggauccuuggagcuuagcucggag

SEQ ID NO: 6102 - RNA, 80 nt, Human
auacucuggucauuuuucaagccauguuuuauuguaucuguuuucuacuuuaugugagcaagguuugcuguccaaggugu

SEQ ID NO: 6103 - RNA, 60 nt, Human; identical to SEQ ID NO: 1551

SEQ ID NO: 6104 - RNA, 67 nt, Human
gcucuucgugauaaugagacuuccuggguacaaaccgggauugaauccuuaugaacggaguuaaagc

SEQ ID NO: 6105 - RNA, 63 nt, Human
ugggacaagagccacagguauuggaagaagucuucaagaaaauauugccuauggccugaccca

SEQ ID NO: 6106 - RNA, 71 nt, Human
ggccaucugaucuaucaaaugcgguggcaucgacagaagagaagcccauugaaaaauuugagaaggaggcu

SEQ ID NO: 6107 - RNA, 64 nt, Human
caugggcggugaaacccgagugaaugggccgggaacggcuuuuggcaagugggaauggccgaug

SEQ ID NO: 6108 - RNA, 60 nt, Human
gcuacacagagagaaaacccacggcggcaaaaaugagggguagagagagaaagguggagc

SEQ ID NO: 6109 - RNA, 63 nt, Human
ucccagcacuuuguggagugccugaugugcaagcgcgggacuccacgggaagggcuccaggga

SEQ ID NO: 6110 - RNA, 73 nt, Human
ggaaggucacgugcgacaaaaguucuggaggccuuuugaaaggcacaccgagcaugugguucgcaccacuucu

SEQ ID NO: 6111 - RNA, 61 nt, Human
augaagucauauugugaugguaggcaaaguugguucacuucaucagaagaugacuauucau

SEQ ID NO: 6112 - RNA, 60 nt, Human
gugguguuguuuugguccugauaagaagcugaagcugucuauccucuacccagcuaccac

SEQ ID NO: 6113 - RNA, 66 nt, Human
aggcaaaagagaaauccucagacacauucugaaggauccggacauggucugggacuucuggagccu

SEQ ID NO: 6114 - RNA, 77 nt, Human
gaagaugguaacugggaucucguuggaaauaacacccccauuuucuucaucagggaucccauauuguuuccaucuuu

SEQ ID NO: 6115 - RNA, 67 nt, Human
gcggaacgggcagauuugccugcugaggguggagacccacgagccgaggccuccugcaguguucugc

SEQ ID NO: 6116 - RNA, 86 nt, Human
gcgggcucucucacgccgcggccucacccggcggugcuucggcaggcggccggcgcggggcgcaggcggcgcggccaugggcucgc

SEQ ID NO: 6117 - RNA, 68 nt, Human
ggcacggcauggagaagaucuggaggcccaaccgaguguucagccugcaggaccucugcugccgggcc

SEQ ID NO: 6118 - RNA, 97 nt, Human
ggggauccucuugguguaugacaucaccaaccgcugguccuuugacggcaucgaccgcuggaucaaggagaucgaugagcaugcacccggagucccc

SEQ ID NO: 6119 - RNA, 73 nt, Human
cgggcugcgcgcacagcucagaccucguaacgcgacgggccccccacugccgacaucugcgccccgccgaccg

SEQ ID NO: 6120 - RNA, 72 nt, Human
cuggguucaagccauccucccaccucagccucccaaaaugcugggauuacaggcaugagccacuguacccag

SEQ ID NO: 6121 - RNA, 107 nt, Human
ggccaguaaaucuuagcaggugcaaacuucauucaaauguuuggagucauaaauguuauguuucuuuuuguuguauuaaaaaaaaaaccugaauagugaauauugcc

SEQ ID NO: 6122 - RNA, 69 nt, Human
aacugaaggacaucgcauguuuaaaaugugggaacauuguagguuaucaugugauuguuccauguaguu

SEQ ID NO: 6123 - RNA, 70 nt, Human
cccccccccggggggggggggggggguguuuuuuucucuuuaaaaaaaccccuccccgcccggggggggg

SEQ ID NO: 6124 - RNA, 61 nt, Human
gauguuucacagccaggcaguuuaugauauuaacagacuagacuccacagguguaaacguc

SEQ ID NO: 6125 - RNA, 67 nt, Human
aaaaaguugucucuagagaaaauacuauuacaaucuaagcaugauucucuguggagacuaauuuuuu

SEQ ID NO: 6126 - RNA, 60 nt, Human
ggaaaagaaaaaaauugaacuguaagcuuuaaugauuacuuuaaauuuguuuuauuuucc

SEQ ID NO: 6127 - RNA, 78 nt, Human
gguuuucaagcaugcaaaacaguuuauuguaacuuacugaaaaauauuaacaauuaauugugaauacaugcuguuacc

SEQ ID NO: 6128 - RNA, 73 nt, Human
uauuucugaucgauauuuuuguguaauaagcauggaaaugaacuuuauacacaccacuguguugucagagaua

SEQ ID NO: 6129 - RNA, 80 nt, Human
gcagaaccccagccccaccugccuggagcgcguuugauuuggacucgacuguuguggugauggaggggggcuggaucugu

SEQ ID NO: 6130 - RNA, 71 nt, Human
gauacuguggccagaugccuuauugagauguugccugcuaucaaagcagauucaagggguuggcugguguc

SEQ ID NO: 6131 - RNA, 67 nt, Human
gacauguacuauacauaguaaggcguccuaugcaucuacgugcauaauagcguguauagugcaucuc

SEQ ID NO: 6132 - RNA, 61 nt, Human
aucggggucauugcuauuccccucugauauucaacccuauagaaggagccuggacucugau

SEQ ID NO: 6133 - RNA, 69 nt, Human
uccacacuuccugggaggucagagacaacuguuucagaagagucagaugggcuucccaagacuugugga

SEQ ID NO: 6134 - RNA, 81 nt, Human
caccuaguucuaguaaccaucagcuuguggccaaucuuaucucauccauacaucucuccagcuaccaucucuuacuaagug

SEQ ID NO: 6135 - RNA, 73 nt, Human
gugucguugcauguaacaagucuuuuuuacaauuuuauucuaugcuguaugaaauucaguuauaugaguauac

SEQ ID NO: 6136 - RNA, 115 nt, Human
aagcauauaucugcuuuuuuuuauuuugcaauucucuguauucuaugucuuuaaaaauuugaucuugacauugaaugucacagaguuguguuuuuuuaaaaagugauuuagacuu

SEQ ID NO: 6137 - RNA, 77 nt, Human
cauuuugacuuuguuggcauaaugucaguaacauacauauuccagugguuuuauggacaggcaauuuagucauuaug

SEQ ID NO: 6138 - RNA, 74 nt, Human
gauccgacauuuuuuguauucuuuaagauuuuacaccuaaaaaaucucuccuaucccaaaaauaaugugggauc

SEQ ID NO: 6139 - RNA, 71 nt, Human
gggacucuggcuaaggcucuucauuuccccuggagcaggggcagaagugaggaggggagggucggagucuc

SEQ ID NO: 6140 - RNA, 69 nt, Human
agcaggacgggcggcgcucugcuacuggucccguuaagccagaguagcccaagcccugaagucacugcu

SEQ ID NO: 6141 - RNA, 73 nt, Human
uuuagccuggguugccugugguuauauaauauggcaaaauucuacugaagacacaugguauaaaaugguaaaa

SEQ ID NO: 6142 - RNA, 60 nt, Human
aauuggauuauuagauuguuuuucguauuaaguugucuaagcuauuuacuuauucuaguu

SEQ ID NO: 6143 - RNA, 62 nt, Human
cauuuggcaaugugcucccuguggcaaccaugccugaaggguacaaucguguugcuugcuug

SEQ ID NO: 6144 - RNA, 68 nt, Human
ggcaugucauccgaaaagucaggacucccagacucagucccucacacuucuccgccgccuacaaugcc

SEQ ID NO: 6145 - RNA, 63 nt, Human; identical to SEQ ID NO: 527

SEQ ID NO: 6146 - RNA, 72 nt, Human
gcuuaccaggaagcauuugaaauuaguaagaacagaaaugcagccuacacacccaauucgucuuggucuggc

SEQ ID NO: 6147 - RNA, 90 nt, Human; identical to SEQ ID NO: 5735

SEQ ID NO: 6148 - RNA, 62 nt, Human
aggugucugucccuaaagaacugguggcacuuaugagugcuauucgugauggagaaacaccu

SEQ ID NO: 6149 - RNA, 131 nt, Human
gcguugggcuguaggucgcugugcugugugaucccccagagccaugcccgagauaguggauaccuguucguuggccucuccggcuuccgucugccggaccaagcaccugcaccugcgcugcagcgucgacu

SEQ ID NO: 6150 - RNA, 88 nt, Human
ugcucuccaguggcucacuccugaacagacuucugggaaggaacacccauaucucuuuagucagugccaggccauccacugcagagca

SEQ ID NO: 6151 - RNA, 86 nt, Human
aggcuucugcaaugugauccuggcugaaagcgcagcugagaaccacaacgguuaucagggugcuugggcugguaucuggcaggcuu

SEQ ID NO: 6152 - RNA, 65 nt, Human
cuggaggcuaguacacuccauuccuggggaaguaucgccccuauauguggguacgcuguugccag

SEQ ID NO: 6153 - RNA, 69 nt, Human
ucagcccaagguagcagcccacagugugccgagaggcuagccuuguggucugucaggcuuugggacuga

SEQ ID NO: 6154 - RNA, 74 nt, Human
gcaaagcguugccuucgaacagaacgcccgugguccuucucauuuagcguucacaguuccccgggcgccuuugc

SEQ ID NO: 6155 - RNA, 64 nt, Human
gcucugaugucauaaugaucggaaaaaaugaucuaaaaucaccguaacuucagaacaucagagu

SEQ ID NO: 6156 - RNA, 72 nt, Human
gugcaguguacaaugugaaguauuauuuauugcuaaaguccaugcuuugagucuuuacagaaaagccugcau

SEQ ID NO: 6157 - RNA, 70 nt, Human
cuucugcaauccaaacguuacuuagacugcaagcuacaaagccaccaaggccagucuuuguuaaaagaag

SEQ ID NO: 6158 - RNA, 87 nt, Human
uugugaagaaccaucgaaaccuguuuguucccagcccacccccaguggaugggaugcauaaugccagcaaguuuuguuuaacagcaa

SEQ ID NO: 6159 - RNA, 75 nt, Human
ggauugaguaugucuuucuuguuuuuccuggucuugaugaccuugaugugacuaugaauuacagaucucaacucc

SEQ ID NO: 6160 - RNA, 75 nt, Human
uuuauuuuuucaaauuauagaaguuguagaugcaaaauaugccauuuuauuaaaaaaaaacuaugaaaaauuaaa

SEQ ID NO: 6161 - RNA, 69 nt, Human
cccagcagugagccuaggcuugugugucucucuggucacagucuuucccuuacucccucuaaugcuggg

SEQ ID NO: 6162 - RNA, 76 nt, Human
ucucuuguccccuccuuuggcugccauuuuccaaugcaaugauaaggucugacagcugguagaggcagacaucuga

SEQ ID NO: 6163 - RNA, 79 nt, Human
ugaugaaugcaaagacuuuuauuuguccagaugacagaagaaugugaagaaacuggucauuugaaaucuagcuccauca

SEQ ID NO: 6164 - RNA, 128 nt, Human
cagcccuuugcucggcugcaccagcgggagauccaggugaugaugggcagccugguguaccugcggcugggcuuggagaagucacccuacugccaccugcuggacagcagacacugggcagagaucug

SEQ ID NO: 6165 - RNA, 61 nt, Human
ucaagcugcaccgacugcacuucauccgccucuuggcaggaggccccgcgaagcagcugga

SEQ ID NO: 6166 - RNA, 89 nt, Human
aaggauucagucaaacuaagcagguacucaugccagguacuccuuucucuacccacauccauguuugaaugcuauugccugugaucuuu

SEQ ID NO: 6167 - RNA, 90 nt, Human
caguccucugggcuggaggccuguguuccuucccauaagcagggccuggugggguguauggggcagaacauaggccuccacaccaaacug

SEQ ID NO: 6168 - RNA, 70 nt, Human
gccaggcaacccuguucaaucgccccagcagugaccugguucuaugugugggggagugaacugcugcggc

SEQ ID NO: 6169 - RNA, 70 nt, Human
guccucucugucuuuucuguccaugccagggaaauguauugcuggugcuagagggagaggaaacguggac

SEQ ID NO: 6170 - RNA, 83 nt, Human
cugcggugcaggucgaccagggccugggagcgcugcuggucccggagcuccuccagccgcugccagcccugcuccugcagcag

SEQ ID NO: 6171 - RNA, 61 nt, Human
gcgaccgggaccauaugauagaccaauaggaggaagaggggguuauuauggagcugggcgu

SEQ ID NO: 6172 - RNA, 62 nt, Human
augccuuaacauguggaguguaccguggggccucacuagccucuaacucccugugucugcau

SEQ ID NO: 6173 - RNA, 76 nt, Human
cucugcugcccuuucugugccccccagguucuaucuccccgucacacccgaggccuggcuucaggagggagcggag

SEQ ID NO: 6174 - RNA, 84 nt, Human
gcugcugcugcuccccagcccaccagugccuggccagccugccacccauucccuggacagggcuguggagauggcuccggcggc

SEQ ID NO: 6175 - RNA, 81 nt, Human
gggaugcacggccucgugggggccgggccguccuccagccccgcugcucccugugccagcccccuugucgcugucgguccc

SEQ ID NO: 6176 - RNA, 74 nt, Human
cccugucgaaaacacgaaaauacuggcgggugaagacaucacccaggauccaaagcuuuucaaauucggugggg

SEQ ID NO: 6177 - RNA, 79 nt, Human
ggucaugcccuggaagccaaugaugcaacuucccucucucuucaagaaguaugcacugggugggacgggguacuggacu

SEQ ID NO: 6178 - RNA, 63 nt, Human
ucaagcuggugauggcugagcagcugaccaccaugucgacaucugaguucucgcuggcuucga

SEQ ID NO: 6179 - RNA, 65 nt, Human
augaugaacaguaugcuugggagucuucugcuggagguuccuucacugugcgugcugaccauggu

SEQ ID NO: 6180 - RNA, 88 nt, Human
uucucaguucauaggcuaucccaucacccuuuauuuggagaaggaacgagagaaggaaauuagugaugaugaggcagaggaacgagaa

SEQ ID NO: 6181 - RNA, 68 nt, Human
gggggguguggcacucucuguggucaucgcugccaggaacugaccaccuagguggcugccacccccuc

SEQ ID NO: 6182 - RNA, 87 nt, Human
uuccaacaagacgauccacgcagagcucucaaagcuggugaagaagcaugcggcgcagcggagcacggagaccgccuuguaccggaa

SEQ ID NO: 6183 - RNA, 78 nt, Human; identical to SEQ ID NO: 99

SEQ ID NO: 6184 - RNA, 81 nt, Human
ucuuguguugagacuucgugguggugcuaagaaaaggauagaagaagucuuacaccacucccaagaagaauaagcacaaga

SEQ ID NO: 6185 - RNA, 70 nt, Human
uccauccaguugggcagcagggaaaggcuaggugggcccagccugcccuuccuuccuccagcuggcugga

SEQ ID NO: 6186 - RNA, 90 nt, Human
ucuuuuguuguuuguuuuguuuuuuuuuucugagggaagccuuagcuuaauguaugccgguccuucaaaagacaugauagcaauuugaga

SEQ ID NO: 6187 - RNA, 74 nt, Human
aguuagcaguggggauggcagcaguagaaggaaucacuguuucuccuaggagucugaaggccucgcugcuuucu

SEQ ID NO: 6188 - RNA, 65 nt, Human
gcucuaggggaauccugugguuauguagagacuccauguccuggugugaugagcaggaucagagu

SEQ ID NO: 6189 - RNA, 67 nt, Human
accuggugccugagcucgaugggguccgcaucuucucccgcagcacccacgaguuccugcaugaggu

SEQ ID NO: 6190 - RNA, 75 nt, Human
gauggcugucuccuucaccuaccgacaccuggcacucuucacagacacaggcuacaucuggauggggacagcauc

SEQ ID NO: 6191 - RNA, 81 nt, Human
cccagccuggacccccgaggaggcggccuccuuuucaaaagugggagggggcagggccugaaguguugggggcagccuggg

SEQ ID NO: 6192 - RNA, 110 nt, Human
ccuccugcgcagccuucagguucuccuucuucccgccccaggccuucagggcaaaggccugcagggcucggccguaggagaaggucagggcccagggcuucagcaggggg

SEQ ID NO: 6193 - RNA, 73 nt, Human
gcaggaggcucaugggugguugcugaaugaagaacagaaucuuggugcuuuguggcucaccacagccaucugu

SEQ ID NO: 6194 - RNA, 68 nt, Human
cgcucgucaccaggacccaaggaaccaaaauugcaucugauggucucaagggucguguguuugaagug

SEQ ID NO: 6195 - RNA, 70 nt, Human; identical to SEQ ID NO: 999

SEQ ID NO: 6196 - RNA, 82 nt, Human
gccaagaggcuguccaggagcugcccaguggguccucauggccugcgggauaccucaagugcucccggaggcagccuaggac

SEQ ID NO: 6197 - RNA, 72 nt, Human
ggcucgucccggagucagaaaaggcaggucaacuacccaaggcggccaaaggcccuuccugucuccagagcc

SEQ ID NO: 6198 - RNA, 61 nt, Human
uccguuggccacauugggccacugugcaccacagugccaguccccagguggccagggcgga

SEQ ID NO: 6199 - RNA, 110 nt, Human
ccuccugcgcagccuuaagguucuccuucuucccgccccaggccuucagggcaaaggccugcagggcucggccguaggagaaggucagggcccaaggcuucagcaggggg

SEQ ID NO: 6200 - RNA, 73 nt, Human
acuguuaauauuaaaaggaacauaauaaaauggcccaguccaacuaaaacaguccuugagucuauuggucagu

SEQ ID NO: 6201 - RNA, 61 nt, Human
gaugugguaagugaacuggaacacugguguuccccagugggucaucagcuacauauacauc

SEQ ID NO: 6202 - RNA, 63 nt, Human
ggcaaugaggguuggacaggcagauaauacacauauauucuuuaacuuugcaaacccauuguc

SEQ ID NO: 6203 - RNA, 96 nt, Human
ucacaugaugauccagcgcuuugagaggccauauacuguuaacaagaacaugucuauauccuuuuuuaaggcuuacuggacaaucaaacauaguga

SEQ ID NO: 6204 - RNA, 64 nt, Human
aguuuccuuuuuggaaaauggucuacauucagaaaugucuuagaacaagcauuuaaaaaaaacu

SEQ ID NO: 6205 - RNA, 79 nt, Human
agauuuucaagaucagauuccaccgguuuaguaguuuucaguggaggagccaguggaauuugggcucauuuggaaaucu

SEQ ID NO: 6206 - RNA, 127 nt, Human
caugcuuugucaagugcaguggauacgacagcuuuggggugccaauaguuauagguccugccuggauuguagggaaaguacaccucacaggaaaguggagcuacugacuaguugaauugauggcaug

SEQ ID NO: 6207 - RNA, 78 nt, Human
ggucgcaucgacggaaguggacccagucgaagcagagcaaccugacgcgacuuuagggaaagaaacgucggugucacu

SEQ ID NO: 6208 - RNA, 118 nt, Human
cucuuccgggcaaaauggcgaugggacuaaugugcggacgccgggagcuucugcgcuugcuacaguccgggcgucggguccacagcgucgcagggcccucgcaaugugcuugggaaag

SEQ ID NO: 6209 - RNA, 69 nt, Human
gcugcauguacagucuuugcccgcugcugauuuuccucuccaucgugaacgggcagcgacgagugcagc

SEQ ID NO: 6210 - RNA, 102 nt, Human
ucugcuaucucuuuugcagaaguccagguucaggccccuccuguuguugcugcaaucccucaccacagcaguaccugagguggcuucuggagagacugcaga

SEQ ID NO: 6211 - RNA, 69 nt, Human
aacacaguaaaaaaaaaaauuuuugggcgggccugggcccuggaaaagguuuuuaaacaccacuguguu

SEQ ID NO: 6212 - RNA, 76 nt, Human; identical to SEQ ID NO: 758

SEQ ID NO: 6213 - RNA, 71 nt, Human; identical to SEQ ID NO: 1764

SEQ ID NO: 6214 - RNA, 64 nt, Human
cugucaaacugguugauaaucaaagaaaagguugguuagaauaaguaaaauuucaguuagaaag

SEQ ID NO: 6215 - RNA, 70 nt, Human
ccuccacuuuuuuuaaucggaacaccuccauuugauuacauaugggguaugggauugaugagggcauggg

SEQ ID NO: 6216 - RNA, 61 nt, Human
uuucugucaagaagcaguuugaagaauuaacccuuggugaauuuuugaaacuggacagaga

SEQ ID NO: 6217 - RNA, 97 nt, Human
aaacauuacugcuuaaaaguggcuaagaaauauuuugcauguaauaaauauauuucauguuuagguuaacaggcaccaucuugagagcaguuuguuu

SEQ ID NO: 6218 - RNA, 65 nt, Human
gaaaacaagggguuuauaucugaguauaucauuaaauguuuuucuucauauagcacccaaacuuc

SEQ ID NO: 6219 - RNA, 73 nt, Human
guuucaauauuuugguuuauuuuuucuuccagauugaaaggagcaauuuaaauaauuaucaggauauagaaac

SEQ ID NO: 6220 - RNA, 72 nt, Human
uacaguuuauauucuuaauuccccauucaauaaaauaucgauugccaauuuaauaaaaguaaaugaacugua

SEQ ID NO: 6221 - RNA, 79 nt, Human
ggacuuccagaguucaguuccuucuggcagagagguaucuuucuccaugccauauggaugugacucaaaugaggggucc

SEQ ID NO: 6222 - RNA, 79 nt, Human; identical to SEQ ID NO: 2369

SEQ ID NO: 6223 - RNA, 74 nt, Human; identical to SEQ ID NO: 365

SEQ ID NO: 6224 - RNA, 102 nt, Human; identical to SEQ ID NO: 2172

SEQ ID NO: 6225 - RNA, 77 nt, Human; identical to SEQ ID NO: 3082

SEQ ID NO: 6226 - RNA, 80 nt, Human; identical to SEQ ID NO: 367

SEQ ID NO: 6227 - RNA, 71 nt, Human
cccggcccggaauggaaugggauucacgcgacugcaccaggugggcaauuuguugaucucagggcacgugg

SEQ ID NO: 6228 - RNA, 71 nt, Human
ggcggugagccccugugcaccguggacgugugagggagguggcacgggccagggcgcgggggccgccagcc

SEQ ID NO: 6229 - RNA, 73 nt, Human
gaccuugcugaugugcaugugagggggaaugagguguguauaugccuaacuccugacugaccauucaaguguc

SEQ ID NO: 6230 - RNA, 72 nt, Human
gaggaagcuggggaaagugguuagggagggagacggaggcaagacugagaaaucucugcauccccagaacuc

SEQ ID NO: 6231 - RNA, 71 nt, Human
gcaacccagcucuuuuaucaugaggagagguagccaugcugacucaugaacagguggaggaaagggguagc

SEQ ID NO: 6232 - RNA, 79 nt, Human
uaguuaccaccagcuuggccuagaaucucauugaacgcaacuugacuaguuaugacagagaggaccagggugagaacua

SEQ ID NO: 6233 - RNA, 87 nt, Human
ucuggcagcggagcugcaggccugaggaaacaugcucaguucaugcacauguguugacccauguuucagaugcagucugaugccagg

SEQ ID NO: 6234 - RNA, 99 nt, Human
auauacuucauacaguguauuucucccuuuaauuauauuccgguaggagguggaauaccuccuuggcuaugaggggcagauguauuugaugaacugugu

SEQ ID NO: 6235 - RNA, 62 nt, Human
ugacaaagccauuacuuuuauuagaaacaaauaaugcuucucaagguguuggcaacauguca

SEQ ID NO: 6236 - RNA, 68 nt, Human
auggugaacaaccaugcuggagccaaagugcuaacaugccuugguucaaggggauggaaagucaccgu

SEQ ID NO: 6237 - RNA, 89 nt, Human; identical to SEQ ID NO: 288

SEQ ID NO: 6238 - RNA, 84 nt, Human
ccauggaccgccuguacuuugugauggaguacgugaaugggggcgaccucauguaucacauccagcaagucggccgguucaagg

SEQ ID NO: 6239 - RNA, 61 nt, Human
gaagcggguguuggcccugccugggaagccgcccuuccugacccagcuccacuccugcuuc

SEQ ID NO: 6240 - RNA, 62 nt, Human
cuuaauagggaacauacauacagcuauguaacugugaauaauuguauauaucucuaguuaag

SEQ ID NO: 6241 - RNA, 80 nt, Human
agauaaagauugugaugugcugguugguuauaaagcuguguaucggaucagcuuugccauggccaucuuuuucuuugucu

SEQ ID NO: 6242 - RNA, 73 nt, Human
gguuggcucuuucuacaucccugggggcuauuucagcucagucuggucugucgucggcaugauaggggccgcc

SEQ ID NO: 6243 - RNA, 75 nt, Human; identical to SEQ ID NO: 74

SEQ ID NO: 6244 - RNA, 73 nt, Human; identical to SEQ ID NO: 75

SEQ ID NO: 6245 - RNA, 71 nt, Human; identical to SEQ ID NO: 77

SEQ ID NO: 6246 - RNA, 73 nt, Human
cuggaucuuuacgaaguauuccggacccuucauguucuggaaagcaggccgggccugggauagaagaguucag

SEQ ID NO: 6247 - RNA, 68 nt, Human
gcaggaauugaagcuuuuacagcuggagacugagaaguaggcaucuguacuguaaaccuuugaccugu

SEQ ID NO: 6248 - RNA, 88 nt, Human; identical to SEQ ID NO: 2733

SEQ ID NO: 6249 - RNA, 68 nt, Human; identical to SEQ ID NO: 2734

SEQ ID NO: 6250 - RNA, 60 nt, Human
agccucagugcucuugacauuuuggaccauacaguucuuuacuguggggagcuauagguu

SEQ ID NO: 6251 - RNA, 63 nt, Human
uuuauuaauaaucacccaaacuuugaaauaauccaauuguccuuaaacuggugaauggauaaa

SEQ ID NO: 6252 - RNA, 62 nt, Human; identical to SEQ ID NO: 4909

SEQ ID NO: 6253 - RNA, 85 nt, Human
cauauagucugcacaauucaauaugaacguuuuauuuccaacaaguauguaguucacuguuccaugacuugugcauaacaauaug

SEQ ID NO: 6254 - RNA, 83 nt, Human
gcacuuuuaacuuuucgccauggaacaacgacccuaaagaaaggauaaaagggggcaguugccaugcuggaacgugaaaaggc

SEQ ID NO: 6255 - RNA, 70 nt, Human
ggcucugcuccucacauugccaguuaaucuucgugugacuacaguaccuggaaaaacggggacagcagcc

SEQ ID NO: 6256 - RNA, 77 nt, Human
uggauuccggaugacacacacagucaccaccaucaguuaccugaaccuggccguggcugacuucuguuucaccucca

SEQ ID NO: 6257 - RNA, 63 nt, Human
cagcagaggcuggggugacucauggauagagaugaugugugugaucuuauuucggcccagcug

SEQ ID NO: 6258 - RNA, 60 nt, Human
cccauuaaggcggcagcaguggaugaaguugauacauucuuugaagugcuuuucgauggg

SEQ ID NO: 6259 - RNA, 118 nt, Human
ucuuauuucggcccagcugauccaggucuuuggcaucaaugaaguuuccgagguagaguccaggaaguaccgagggaaccaagggaggccagcuuggguaugagaggggagaggagga

SEQ ID NO: 6260 - RNA, 64 nt, Human; identical to SEQ ID NO: 696

SEQ ID NO: 6261 - RNA, 100 nt, Human; identical to SEQ ID NO: 698

SEQ ID NO: 6262 - RNA, 60 nt, Human; identical to SEQ ID NO: 2705

SEQ ID NO: 6263 - RNA, 72 nt, Human; identical to SEQ ID NO: 1989

SEQ ID NO: 6264 - RNA, 78 nt, Human; identical to SEQ ID NO: 99

SEQ ID NO: 6265 - RNA, 80 nt, Human; identical to SEQ ID NO: 100

SEQ ID NO: 6266 - RNA, 126 nt, Human
gacacccuuccucgccuguuggugcuggcccuuggggagcuggagcccagcaugcuggggagugcggucagcuccacacaguaguccccacguggcccacucccggcccaggcugcuuuccguguc

SEQ ID NO: 6267 - RNA, 71 nt, Human
guguggcuucggcagggucagccuugcgggugcuuguggacguggguggcuauggcagccggagccucuac

SEQ ID NO: 6268 - RNA, 66 nt, Human
ccaggucuuguagcagcgccuccucgagaagccaacagagcaguaagcgcagcagccggagugugg

SEQ ID NO: 6269 - RNA, 79 nt, Human
cccuaccagaggagguaccgggagcgccgugacagcgauacauaccggugugaagagcggagcccauccuuuggagagg

SEQ ID NO: 6270 - RNA, 67 nt, Human
ggaggagguccuacagucgggaacaugaagggagacugcgauacccgucccgaagggagccuccccc

SEQ ID NO: 6271 - RNA, 60 nt, Human
aucguggggcuugugggaaaugguggggagugccaauggccguaaauuaugugucgcgau

SEQ ID NO: 6272 - RNA, 66 nt, Human
ggugugcguuggaugguugacccaguauccugugaggacugugcuggcuacaugugaugcugcacu

SEQ ID NO: 6273 - RNA, 100 nt, Human
ucgucaauggaagaaccgccuuucggggcguuggaccuuccaauucccggucagauggagaaccagcgcaguacccgagaaaagggucgcccguugacga

SEQ ID NO: 6274 - RNA, 82 nt, Human
ggaagaggaagaugaggaagaagaugaggacagugacucuggaucagaugaggaagagggagaagcugaggcuuccucuucc

SEQ ID NO: 6275 - RNA, 80 nt, Human
agccagagggaucgaaauggaaaucagcugagaucaccgcaagaggaggcguuacagcgauuggucaaucucuauggacu

SEQ ID NO: 6276 - RNA, 70 nt, Human
gcugguggggccaggaguggaacugcucuugacaccccgagagccagcccugcccuuggaaccagacagc

SEQ ID NO: 6277 - RNA, 61 nt, Human
ggccuacaggcagcuguggcccagcaggacacucugauggaagcccgguucccugagggcc

SEQ ID NO: 6278 - RNA, 80 nt, Human; identical to SEQ ID NO: 100

SEQ ID NO: 6279 - RNA, 70 nt, Human
gccauggcuucauggcauucagugauuagugguaaugguaaacacugguguguuuugaaguugaaugugc

SEQ ID NO: 6280 - RNA, 87 nt, Human
ggcugcguuuuuuuuaguuuggcagguguagacuuuuuaaguugggcuuuagaaaaucuggguuagccugaagaaaaugccucagcc

SEQ ID NO: 6281 - RNA, 78 nt, Human
uaagcuagcaaugaaugcuagggugggaagcuggugagccaguggccauuagauaaauaccuuucaagugugagcuua

SEQ ID NO: 6282 - RNA, 60 nt, Human
gcuucccacacuucugacucggacguuccuuccgagugucacuagagguggacgugaagc

SEQ ID NO: 6283 - RNA, 76 nt, Human
uccuccuugcuggagcagcugaacgagcaguauaacugggugucccggcuggcaaaaccucacgcaaggcgaagga

SEQ ID NO: 6284 - RNA, 68 nt, Human
cgggagucgagcagugauucuugggagcugcucauuuuagcugccugucccagcucugcucccucccg

SEQ ID NO: 6285 - RNA, 79 nt, Human
cucugcucccucccgcugagguaauguggccacggcccccggcugccacgacuguccuucucucguggaggaggcggag

SEQ ID NO: 6286 - RNA, 61 nt, Human
cugagguuccaagcaugcuuguccuaagcucaggucccugcuggugccuggaccaccucgg

SEQ ID NO: 6287 - RNA, 73 nt, Human
cuuccuccauccugagguuuggggggagaugcagugaaccugcaaauuccccaauuugaaagggugcuggagg

SEQ ID NO: 6288 - RNA, 67 nt, Human
ucuuuuaaauccagucaaagccgccuuaaauuuccggaggugguuuuucccccuguuaagaaaaaga

SEQ ID NO: 6289 - RNA, 66 nt, Human
uacagugaaaccccaugucugcuaaaauuacaaaaaauuagcugggcgugguggugcacgccugua

SEQ ID NO: 6290 - RNA, 72 nt, Human
ucuuuaggugugguuuuugucauguagcaguuuuuauguagaucuauauauaaaaguccacaccuccucaga

SEQ ID NO: 6291 - RNA, 82 nt, Human
aggaggacgcgcugcccggccagaaaacggaguucaagguggacuccgacgaccaguggggagaguacuccugcgucuuccu

SEQ ID NO: 6292 - RNA, 91 nt, Human; identical to SEQ ID NO: 4623

SEQ ID NO: 6293 - RNA, 64 nt, Human; identical to SEQ ID NO: 287

SEQ ID NO: 6294 - RNA, 131 nt, Human
ucuuuuacuacuaaacuuaaauggccaauugaaacaaacaguucugagaccguucuuccaccacugauuaagagugggguggcagguauuagggauaauauucauuuagccuucugagcuuucugggcaga

SEQ ID NO: 6295 - RNA, 64 nt, Human
gagccaagccgccagcgcugcgaugugggccacgcugccgcugcucugcgccggggccuggcuc

SEQ ID NO: 6296 - RNA, 80 nt, Human
cccuaguccgccuucguucaagggucaggaauggaccagaacagauggguucuggaggccccugaacaggagggcuaugg

SEQ ID NO: 6297 - RNA, 67 nt, Human; identical to SEQ ID NO: 1994

SEQ ID NO: 6298 - RNA, 78 nt, Human; identical to SEQ ID NO: 1996

SEQ ID NO: 6299 - RNA, 71 nt, Human
acacugguauaaaacacaguuuaaacaauuagaaaaaugaaaacugauaccacuuuaugccucuauagugu

SEQ ID NO: 6300 - RNA, 79 nt, Human
ggauuguugaacuuguuaccagcaccaugcuuuucagcaacauuucagcggaguuggaaacauuuuuuacagcaaaacc

SEQ ID NO: 6301 - RNA, 70 nt, Human
ggcuuuuccauaccaccuucaacgcuaaccugcuucagugggagaguaaaguaggcaagaaugagcagcc

SEQ ID NO: 6302 - RNA, 75 nt, Human; identical to SEQ ID NO: 74

SEQ ID NO: 6303 - RNA, 107 nt, Human; identical to SEQ ID NO: 4612

SEQ ID NO: 6304 - RNA, 89 nt, Human; identical to SEQ ID NO: 504

SEQ ID NO: 6305 - RNA, 62 nt, Human
caaucacauuauuauuccuaguuaugcaucaugguuugauuauaacuguauucaugugauug

SEQ ID NO: 6306 - RNA, 71 nt, Human
cggcgugcucuuccugaguucuucaauggaaaaaacaaauccaagacuccagaaauauacuuggcauaucg

SEQ ID NO: 6307 - RNA, 72 nt, Human
cuuacaaaguauaucuaaggauuauucugcugaagauucaguuuaagaguuuccuugggagaacuaaguaag

SEQ ID NO: 6308 - RNA, 80 nt, Human
gcagcacccaccuccaaccucgggccagugucuucaggcuuuacuggggaccugcgagcuggccuaaugugguggccugc

SEQ ID NO: 6309 - RNA, 60 nt, Human
ugauuuuuauuaauuucauaacugggaaauuccaugugaaagugaaacaagcaugaguca

SEQ ID NO: 6310 - RNA, 77 nt, Human
gggacuuggagaagccugcccugccaggccuggaggcacaucccugccaaggcucagcaucuucuccagcagguccu

SEQ ID NO: 6311 - RNA, 88 nt, Human
cuugguuguagagcuguguugaaauccauuuuggugguugguuuuuaacccaaacucagugcauuuuuaaaauaguuaagaauccaag

SEQ ID NO: 6312 - RNA, 99 nt, Human
gaggcaggagaaucacuugaacccgggaggcggagguugcagugagccgagaucgcaccauugcacuccagucugggcaacagagugagauuccuucuc

SEQ ID NO: 6313 - RNA, 72 nt, Human
ugagaauacacauuguauguuucugugcacaugacagugugugugugugcacguacauacuguauagucuua

SEQ ID NO: 6314 - RNA, 65 nt, Human
gcagucgccgggcugcccgcgcugggcuucaccggcgccggcaucgcggccaacucgguggcugc

SEQ ID NO: 6315 - RNA, 61 nt, Human
cucagcugcuuaagcuggcccacaaguacagaccagagacaaagcaagagaagaagcagag

SEQ ID NO: 6316 - RNA, 60 nt, Human; identical to SEQ ID NO: 2705

SEQ ID NO: 6317 - RNA, 72 nt, Human; identical to SEQ ID NO: 1989

SEQ ID NO: 6318 - RNA, 72 nt, Human
gccuuuuaaacuggagaguuaagucauaaucccuccuggcuuugugugaauagcuugcuccacuuugcuggc

SEQ ID NO: 6319 - RNA, 67 nt, Human
gggugaacaccaugcguugggugugaagguggcuaggaugccauaaugaaccaacugggacucaccc

SEQ ID NO: 6320 - RNA, 60 nt, Human
ucuucauggagauugcagcugacaaacugcugagccugccaaugcaacagccacggaaga

SEQ ID NO: 6321 - RNA, 64 nt, Human
gggcgacuacgcgugcggcccgcacggcuacggcgccauccccgccgcgcccccgccgccgccc

SEQ ID NO: 6322 - RNA, 61 nt, Human
gaaauggaaagguuggcaggcagcucccacugcgcacuuguuaaacccugaaguccaguuc

SEQ ID NO: 6323 - RNA, 70 nt, Human
uaccuggauaauacacccguuuugccucgugccgaauucggcacgagaacauauggguuaaaucucggua

SEQ ID NO: 6324 - RNA, 71 nt, Human
cuggauugcaguggcccaaucugggcucaugaaaccucugggucccggucaagugguucuucugccuucag

SEQ ID NO: 6325 - RNA, 60 nt, Human
gggagaaacuucuuuuuuuacccuuuuucauaggcgugccuuaaaagagauaauuuuccc

SEQ ID NO: 6326 - RNA, 61 nt, Human
ucccgaguuagcgugggauacacgggugcacgcaccccccacgcccagcuuaauuugcgga

SEQ ID NO: 6327 - RNA, 74 nt, Human
gcgaucuacacugagacaaggaaguuggaaaagccgaguaguuauaccagaagaucagggucucacagacucgc

SEQ ID NO: 6328 - RNA, 74 nt, Human
gucuguccagaucuuccaucuuaugcgccagcuugcagcagguuaaggacagcagcaggaugaagcuggaugac

SEQ ID NO: 6329 - RNA, 70 nt, Human
ccuacccuauguuaucucaaguuagggaaaugagagcccauuucccuaacuugagauaacauaggguagg

SEQ ID NO: 6330 - RNA, 74 nt, Human
gaaauuaaccaagguuuuauugacugccauguaugucccaugaugcaguuucugaagccaacauggcuuauuuc

SEQ ID NO: 6331 - RNA, 76 nt, Human
ucaucuguuaaucccagguguccucauguugcugaaauauuuagauagcuaaaauaucccuuaauuucacagauga

SEQ ID NO: 6332 - RNA, 81 nt, Human
uuuucauucuuacaguggucuuuucaugggagugaaugaguuacucuccacuggugauuagguaauacuguagaaugaaga

SEQ ID NO: 6333 - RNA, 98 nt, Human
cccaggcuagccagccuuuuaacaacaucuuuugggguacaauuagaaucuaaguguuugcagccauaugugucauguagaagaugccuagcccuggg

SEQ ID NO: 6334 - RNA, 61 nt, Human; identical to SEQ ID NO: 347

SEQ ID NO: 6335 - RNA, 103 nt, Human
gcggcucagccucgagcgugacuaucacagccugugcgagcggcagcccauugggcgccugcuguuccgagaguucugugccacgaggccggagcugagccgc

SEQ ID NO: 6336 - RNA, 63 nt, Human
ucgcaaaggcaaaagcaagaaauggcggcagaugcuccaguucccucacaucagccagugcga

SEQ ID NO: 6337 - RNA, 87 nt, Human
ggggcagccugcaacccccaaaggccgguguugggcuuccaaaugcuucaggccuggggccagaaagggguuacaaaagguugcccu

SEQ ID NO: 6338 - RNA, 70 nt, Human
gggguggggggucuguuuggcaacuggggugaagggauugcccucccccugcugggauccccccaacccc

SEQ ID NO: 6339 - RNA, 80 nt, Human
ugcucugcuuuuaaauuucugaacuucuucaauacaaauuaaaauaguacuggagucuuuugggaggccaauagcuagca

SEQ ID NO: 6340 - RNA, 72 nt, Human
gagcccagccaaucagcgccccggacugcaccagagccauggucggcagaagagcacugaucguacuggcuc

SEQ ID NO: 6341 - RNA, 81 nt, Human
ucucuugacucuguguacauccuacccacuuuuuggcccuccccacaagugugccugugggcaauuacacagggcguauga

SEQ ID NO: 6342 - RNA, 78 nt, Human
gaauuuagcuguucuuuauugacauggaauuugggguggcgaggguagccacacccuccaggaggaugagguagguuc

SEQ ID NO: 6343 - RNA, 84 nt, Human
cggugcuguguccuggagcuuuauuuggggaguuucacccagaauggugggagaaaccucccaggugccagguaccccgcaucg

SEQ ID NO: 6344 - RNA, 80 nt, Human
acagcacaaacccuaaaguccaugugcagucuccauguacaaguauaaaagucuguuucaggacaacccuggguugcugu

SEQ ID NO: 6345 - RNA, 65 nt, Human
agacuacucccagcuaauacuuuacugucauuauaucuuugaaauuaguacuuaugggacuggcu

SEQ ID NO: 6346 - RNA, 101 nt, Human
caucugaaguugcaccucuuauguaaccgaauccauuuacuacaccaaaaauuagcuuacaaaaggugucuggcguauacaaaaggaaguguccugagaug

SEQ ID NO: 6347 - RNA, 77 nt, Human
ccugcuaacgauguuccuuaugccuaauugucugaaucuucucauacauucuaggauuucauguuucguuacaaagg

SEQ ID NO: 6348 - RNA, 73 nt, Human
auaucuaggcugaauguaaaaucccuuauguuguaucaauggggguaaaaacuauuuuauuugccuaugauau

SEQ ID NO: 6349 - RNA, 61 nt, Human
gaaauuaaugaugcagacaacuugguguggucuuugaacagcucucugcaguauuuuuuuu

SEQ ID NO: 6350 - RNA, 66 nt, Human
ccuggucuguagccacccuccugggcccggcuccauauggcuaagggggcuggcgagcugaccagg

SEQ ID NO: 6351 - RNA, 116 nt, Human
gaggaaacugaggccucaagcguggagggguagagugaagaguagaacccaggucugaugccaaagcugcuuucuucucugccuccuccucacgcaacucacaccuccuuuucuuc

SEQ ID NO: 6352 - RNA, 74 nt, Human
acugaggccugugaaucuaagaggguugagcaugaaggacaugcgcagccuuaacaagggggcacaggccaggu

SEQ ID NO: 6353 - RNA, 71 nt, Human
cugggcaugguggcgcgcgccugcaucucagcuacucaagaggcugaggcaggagaaucacuugaacccgg

SEQ ID NO: 6354 - RNA, 62 nt, Human
gccacuggcucccugcacugugugugcugcacagaggaugguagguaggggcucagugccgc

SEQ ID NO: 6355 - RNA, 65 nt, Human
gugagaucaccuugccccauaauuuccaugcuuccuuugugugcaggggcaaaggcgauuaucac

SEQ ID NO: 6356 - RNA, 69 nt, Human
ggcucccaauguugacguuggccagggcuuugcaaacaagccaggccaaaaaggcucaacauuuacacc

SEQ ID NO: 6357 - RNA, 79 nt, Human
aauucugggagauuaggaaaaaagcuucugaaaugaagguuauuucagaaguaauuuuuaugggagagcuuccagaauu

SEQ ID NO: 6358 - RNA, 64 nt, Human
acaagaaaaagaaucuuuaccuuuacccuuucucuuggaggaauauuugacuucuuauucuugu

SEQ ID NO: 6359 - RNA, 86 nt, Human
gccaggcuuggcagugcuaagugcauugucccuuuuaauccucgcaugaacucuuuggaauagguacuauaggugcugagccuggc

SEQ ID NO: 6360 - RNA, 68 nt, Human
cuuaaugccuuauauuacuuccuuaucauagugaguagagcaugagagaauguauugugugcauugag

SEQ ID NO: 6361 - RNA, 131 nt, Human
gugcgaucucggcucacugcaaucuccgccucccagaaucaagcgagucucaugccucagcuacuugggagauugaggcagagaauugcuugaacccgggaggcggagguugcagugagccgagauggcgc

SEQ ID NO: 6362 - RNA, 67 nt, Human
accauuguccauuucuacauguuauucgcuuguuacccucaaguuggauacaaguucuggcauuggu

SEQ ID NO: 6363 - RNA, 72 nt, Human; identical to SEQ ID NO: 1696

SEQ ID NO: 6364 - RNA, 69 nt, Human
cgggcaaaggcaccgucaccuuuccaauccuucaucgacuuucaugacuagagagacgggcugacaccg

SEQ ID NO: 6365 - RNA, 104 nt, Human
agagaagggacgggguggcugggcagucagggaaggagggucgcccggauccgacauuuuggagagauuccuucacucuccuguccccccuaccucccuucucu

SEQ ID NO: 6366 - RNA, 85 nt, Human
gcuaggcugagaccuauggugguggcagggguggcuguugagccugaacuuccaguacuccugcccuuccuucuguuuaccuggc

SEQ ID NO: 6367 - RNA, 96 nt, Human; identical to SEQ ID NO: 5638

SEQ ID NO: 6368 - RNA, 63 nt, Human; identical to SEQ ID NO: 527

SEQ ID NO: 6369 - RNA, 90 nt, Human; identical to SEQ ID NO: 5735

SEQ ID NO: 6370 - RNA, 119 nt, Human
cgccccccgggggccuggcuggaaccgccgggguccgcagggccucaggccggcccuacugucgugccugggucuugcgaccccauggaaacuggaauagcagagacuccggaggggcg

SEQ ID NO: 6371 - RNA, 77 nt, Human
caggcaguguugcuccugagccaucuucuuaaccaccacaccguggggccaccauagaggaucuggagcucagccug

SEQ ID NO: 6372 - RNA, 63 nt, Human
gccgcuccgcucugggugguucaaucccaaccagggguugggauguccugccugcggaggggc

SEQ ID NO: 6373 - RNA, 69 nt, Human
gucauaagauugggugggcaaugaccacacaugaguccuguauggagcagugucucagccacuugugac

SEQ ID NO: 6374 - RNA, 84 nt, Human; identical to SEQ ID NO: 286

SEQ ID NO: 6375 - RNA, 64 nt, Human; identical to SEQ ID NO: 287

SEQ ID NO: 6376 - RNA, 89 nt, Human
ggccaauugaaacaaacaguucugagaccguucuuccaccacugauuaaaagugggguggcagguauuagggauaauauucauuuagcc

SEQ ID NO: 6377 - RNA, 78 nt, Human
gccucuaauaucuuugggacaccugaagaaaaucaagcuucuugggccaagucagcaggugccaagucuagugguggc

SEQ ID NO: 6378 - RNA, 61 nt, Human
gcuuucagaagcuugucccuggcugcccacagugaagcacgagggacagagcgacugcagc

SEQ ID NO: 6379 - RNA, 61 nt, Human
gagagucugguauuacacuggaggaucacaaacuguauuuucuuguuauaaauggcuccuc

SEQ ID NO: 6380 - RNA, 66 nt, Human
ugacuauaaaauguaauacaagggcauauuagggggagaaugccuuuguuuuuucuuuuguuguua

SEQ ID NO: 6381 - RNA, 63 nt, Human
aucuguuggaugcuugcggcggugcugcacuccaugugccacuguugcuuggcccugacugau

SEQ ID NO: 6382 - RNA, 76 nt, Human
gcagcgugugcuugacccagugucgucuugugcucugugcuggguacugcaugaugcuucugucuauccaugcugc

SEQ ID NO: 6383 - RNA, 61 nt, Human
gccgggaugcaugugggccgugggccggcggugggcugugggccugcgcugcguccugugc

SEQ ID NO: 6384 - RNA, 78 nt, Human; identical to SEQ ID NO: 99

SEQ ID NO: 6385 - RNA, 65 nt, Human; identical to SEQ ID NO: 247

SEQ ID NO: 6386 - RNA, 80 nt, Human; identical to SEQ ID NO: 100

SEQ ID NO: 6387 - RNA, 79 nt, Human
cuccuuccuccagggaggccucagcaucagugucuguggacguagucucugaagagugcuucagcugauggggaaggag

SEQ ID NO: 6388 - RNA, 67 nt, Human
gauggcgucacuuuccugccaacuuucucguugccucuccuugaaagcagaagaagugccagcccuc

SEQ ID NO: 6389 - RNA, 79 nt, Human
aaguuagaaguuuuuuuuugguggugguuauuuuaaauuuuuaacaaauauaaacaccagcagauacuauuacuugcuu

SEQ ID NO: 6390 - RNA, 73 nt, Human
uacaguuaaaaacuuuucaaaauuaauacauuguuaauuauuggaccaguuuugaaguugggguuuaacugua

SEQ ID NO: 6391 - RNA, 81 nt, Human
ccaagcugguuuggaacuccuggccucaagcaaucugcccgccccagccucccaaagugcuaggagcauaagccagcaugg

SEQ ID NO: 6392 - RNA, 74 nt, Human
cugucaaguucuguucauagcucccugcagccuugaacuucuggccucaguuucccaagugacuaggacuauag

SEQ ID NO: 6393 - RNA, 85 nt, Human
uguaccauuguuguuuuagacauaaugcuacugcacacuucauagacuacaguacaguauaguauaaauacaacuuuugugugca

SEQ ID NO: 6394 - RNA, 69 nt, Human
caggggggguugucugaagcggccucugagggaggcaaacacuucuucuucaggcugcugccuucucug

SEQ ID NO: 6395 - RNA, 67 nt, Human
gucaaagcuguccagaccuugcuugcuuuuguccaauuuggcuuucucugggucucugugcuuuggc

SEQ ID NO: 6396 - RNA, 91 nt, Human
gcuuauaucuagcaugccuguuuugggguggucccugggguugugggauuucccaggggcuacccuuuccugcucuuggcuagauaucugc

SEQ ID NO: 6397 - RNA, 71 nt, Human
gucuuguuuuuuucaguaauguccuguuugcccuucuuaucagcaucuaucuagcuacauucugacaggau

SEQ ID NO: 6398 - RNA, 79 nt, Human
gggucucuuuuuuucaucuagguaaaccggagcaaauaaaaccuauugaagaguucuccugaugauugaaugaguuccc

SEQ ID NO: 6399 - RNA, 90 nt, Human
ggugcagcagucagcagcaaagugaaagcuguucagaacuacuggauuuuccaguggaagcuuugacaucauuaacucugucucugcauc

SEQ ID NO: 6400 - RNA, 124 nt, Human
ccucaaccucccaggcucaagcaaaccucccacuucagccccccaguuauucaggugcagcagcucacaucuguaaucccaaggaggcugaggugggaggauuuuuugagcccgugaguucagg

SEQ ID NO: 6401 - RNA, 73 nt, Human
gaugggaaugagccaccucagauguggagggcccugaagaauccauauaggagggcaggcucuucacucccuc

SEQ ID NO: 6402 - RNA, 90 nt, Human
auguacaugcucaggguugucccccaguagaagugaugggcugcuuugagccguucuuacugaugucuggucugaucccuggguggucau

SEQ ID NO: 6403 - RNA, 61 nt, Human
cuagaguucuuuccccuucucuugaauuuccucauauaucaugaagccucagaaacacugg

SEQ ID NO: 6404 - RNA, 69 nt, Human
uggaaaaaccagugauauguuuagcuguauuaacuaauuacagaaucuaaugcauaacuggucuuuuua

SEQ ID NO: 6405 - RNA, 64 nt, Human
uccaucacauaugguagagauauauauuuauauauauuuauauauaauuucuuuugugguugga

SEQ ID NO: 6406 - RNA, 69 nt, Human
uggccucccacccagcucagagaccuggugaggaccacccauaagggcugugcagaggguuagaggcca

SEQ ID NO: 6407 - RNA, 92 nt, Human
uucuauuuuuuucuuacuaaugccuucucuucucccugccccuguggccuaggcccagguucuagggcagguacagugaggggugaauggaa

SEQ ID NO: 6408 - RNA, 61 nt, Human
gccccguucagccaugucguccggcauccauguagcgcuggugacuggaggcaacaagggc

SEQ ID NO: 6409 - RNA, 81 nt, Human
gcuuggcaucgugcgcgaccugugccggcuguucucgggggacguggugcucacggcgcgggacgugacgcggggccaggc

SEQ ID NO: 6410 - RNA, 85 nt, Human
augaggcucccaauguugacguuggccagggccuuugcaaacaagccaggccaaaaaggcucaacauuuacaccggcugcuuuau

SEQ ID NO: 6411 - RNA, 106 nt, Human
aaauggaaggauucagcuuucaguuaaaaaagaagaagaagaaauggcaaagagaaaguuuuuucaaauuucuuucuuuuuuaauuuagauugaguucauuuauuu

SEQ ID NO: 6412 - RNA, 90 nt, Human; identical to SEQ ID NO: 1499

SEQ ID NO: 6413 - RNA, 68 nt, Human
uuuuuuuuuugguuuucuuacaaagguugacauuuuccauaacagguguaagaguguugaaaaaaaaa

SEQ ID NO: 6414 - RNA, 65 nt, Human
auugaaagauuuuauuuuggugccucuugacaaucagagagcuucagcauguaaaauuuucuagu

SEQ ID NO: 6415 - RNA, 84 nt, Human
ugauuuugguuuucuuuauaauuuucuguauuuucuaaaaugucuaaaacaacgaaguauuaaaagugagaagaaaaugaguua

SEQ ID NO: 6416 - RNA, 60 nt, Human
ugugguauggaauaaacuucccauuuaccauggauaauuuucaaccuuuuccuuaccuca

SEQ ID NO: 6417 - RNA, 66 nt, Human
ugauagaauaggaaaauuuuaacauuuuuguuucuaaggauaguuuuaauuuucuuauuuuuuuca

SEQ ID NO: 6418 - RNA, 98 nt, Human
ugagagauguguaguuaauuuaguaauucuguuucaugagauaugaucuguuaugcuagugguuuaauaggcuugcuauguaaguagaacguggcuca

SEQ ID NO: 6419 - RNA, 65 nt, Human
uuucuguuuuucuaaaugacccgugguacuuaauagguguacuaaaauuguguugggagcaggga

SEQ ID NO: 6420 - RNA, 106 nt, Human
uaggcuacuuuuaccguggaauauauaguauagagaugcaaaacuuaaauguuuacaucaauuuauauugaaugucacauaauuucauggaaggaaagguagcuug

SEQ ID NO: 6421 - RNA, 93 nt, Human
uuuuuuugcacuuaaccacuaaaucuuuauugaauuuuuauuguaacagcaaugcaauauuagcaaauagagagaaauauagagugaagagaa

SEQ ID NO: 6422 - RNA, 63 nt, Human
gagagacacucagaauggacgaucuaaaguuccuuccagcuuccaaauucugggcugguuuuc

SEQ ID NO: 6423 - RNA, 62 nt, Human
gccuaggugagucucacucugaccuaugagagcggagaacacugagauaucuugcccauggc

SEQ ID NO: 6424 - RNA, 71 nt, Human
gcugucguuuuuuccuugacacuuguaggcuccucuucauguuuacauaaccucagugggaaaacgccagc

SEQ ID NO: 6425 - RNA, 127 nt, Human
gucuacgauggggcugccguuacagccuuccucccggggcucuggagacgcgccagcucuuugacaccucuccugcgcucggggucccgccacgaggagguucuucaaggccugcgcgcccacggac

SEQ ID NO: 6426 - RNA, 79 nt, Human
auuucauccagaauuaagcaaaguauuuguuacugcacacacagaucauaagugcucugcugcacuguacaucugaaau

SEQ ID NO: 6427 - RNA, 63 nt, Human
ugaugagcagaacaaagauuugagaagcacuuucccugcaucugguucagacucugcucauca

SEQ ID NO: 6428 - RNA, 78 nt, Human
gggcuuccccucggccuccaggugaggcugcccauugcaggcacugggcaggccugaccuugcuggggcucauggccc

SEQ ID NO: 6429 - RNA, 130 nt, Human
auucuccuauuauuauaaugcagauauuucauacuggaauaauuuacauuuacaaauuauaucauagaaaaauaauuuuaucgcuaaauguaaacagguugggguacuucauccaaaauaagaagaaaau

SEQ ID NO: 6430 - RNA, 62 nt, Human
gaaucuagcacuuucauauuuuaaagcugauauuuuagcaauauuuugauaaaacuuuauuc

SEQ ID NO: 6431 - RNA, 68 nt, Human
uuuauuaaaagaucaugauauugauaagaaugcauuuuaauuuacaagguaucauuucagagagugaa

SEQ ID NO: 6432 - RNA, 66 nt, Human
aaaggcaugagaaacagucaucucaauaaaugcaagacaugagcauaaaagagguucucugccuuu

SEQ ID NO: 6433 - RNA, 83 nt, Human
uuuggcccguguagcuucccuuugagggugugugacuugccaucugcaaaagucauggccaaaacaggaacuaacaggccaaa

SEQ ID NO: 6434 - RNA, 66 nt, Human
auucugguauagaagacauuaaggaagcauuugucacucucuuuaguaagucuaugaucuuggaau

SEQ ID NO: 6435 - RNA, 103 nt, Human
uugccgccgugcgcuuggccacacuuaacaucauccccgcuaacuacaguccuucagguuuugcaauagauagauuuaaaguuuggaauaggcauugcaguga

SEQ ID NO: 6436 - RNA, 79 nt, Human
gagaugcaguuaaaauucuagaauaauuaaaagccacaaagugaaacuguuguucuggggcccuauguuguagauucuc

SEQ ID NO: 6437 - RNA, 64 nt, Human
uuuuuuuuuacauuuugugauaacuuuuucuucucuuuagaaaaaaaaaauauguacaaaaaaa

SEQ ID NO: 6438 - RNA, 70 nt, Human
aagggggcuuggaccugugacucaguuccacauuuuggauugcauacuggaaaagaagccaagucuucuu

SEQ ID NO: 6439 - RNA, 64 nt, Human
gaagucuccuauuugaucagguuauuuccugggacuuggcaaaaaucugauugguggggaucuc

SEQ ID NO: 6440 - RNA, 77 nt, Human
uaggaccuaguggacaucugguauuaauuuaaucucaggaaaaacaagaaauuaacccagagagagucuggguucug

SEQ ID NO: 6441 - RNA, 72 nt, Human
gguuguuuuuaaaaaagcucuucuguuuaaaacauauuuguaaaacaagauuuggaugacauggaagcaauc

SEQ ID NO: 6442 - RNA, 70 nt, Human
cggagcuuggaccccgauuggcugcaaugcugaacuuuaaucuucagcaacuuuguggccccaagugccg

SEQ ID NO: 6443 - RNA, 69 nt, Human; identical to SEQ ID NO: 6356

SEQ ID NO: 6444 - RNA, 63 nt, Human
cagaccccacccugcccucacaucaggcucuuccgguacugacugugcgggguggucugucug

SEQ ID NO: 6445 - RNA, 96 nt, Human
uuuuuuuuuuuuuuuuuuuuuuuuuuuuuugcgugguugguuuuuauuaauuaucuggauaacagcaaaaaaacugaaaauaaagagagagagaga

SEQ ID NO: 6446 - RNA, 93 nt, Human
gccaugauuaugagacuuccccagccauguggaacuguuaaguccaauuaaacaucuuuuucuucuuagucccagguuguucucauucguggc

SEQ ID NO: 6447 - RNA, 75 nt, Human
guccaacacugaaaccgccugaccgcugcugucuuugugcuugcagaaaaucacggugggcacaaaauuuuggac

SEQ ID NO: 6448 - RNA, 71 nt, Human
ggcuuuuccauucaaacuuugucauuuguuucuuuaaguucaagaaagacaaaaucuacacuggaaauccc

SEQ ID NO: 6449 - RNA, 89 nt, Human
ugaggcaguauauaagagucauggaaaaagacagagaaaaaaaacagacaaaucaguugucaguauccauggccucugauucugucuca

SEQ ID NO: 6450 - RNA, 60 nt, Human
aggacagagccaaacaggaacagaggcugcccaacucccuucuguacugagcucuguuuu

SEQ ID NO: 6451 - RNA, 80 nt, Human
ggagaggcgaggaccgguaucuggagacuggggacggaagcggggagcucagaccgggauccauucucuccucgccuccc

SEQ ID NO: 6452 - RNA, 65 nt, Human; identical to SEQ ID NO: 4901

SEQ ID NO: 6453 - RNA, 119 nt, Human
ucagcagcacaaaucccuuuuauuaaccaucuucccuuucucgaguauacacaaguagaaaagaaacagugaaguaccccgauagggaggguggggagaggaugggagggggcuccuga

SEQ ID NO: 6454 - RNA, 81 nt, Human
ugcauaguuaaaaaaaugaagcgagauggcaguuugugcaguaauaucugcccuucgaaguucaugcaaccaacuaaugca

SEQ ID NO: 6455 - RNA, 75 nt, Human
uguuugccacugacgacauuccacacccuauuaucaucuguacauauggggguggggggggcggcgggggggaca

SEQ ID NO: 6456 - RNA, 60 nt, Human
cucuugcuuuccuuugaggcagcugcugucuuuuuacacagcucucgucuaagcaauggg

SEQ ID NO: 6457 - RNA, 60 nt, Human
guaggcaugacuaagggguaaggguugacuauucuugagcuaccucaccaacuugccuau

SEQ ID NO: 6458 - RNA, 60 nt, Human
ggcaguauuacaggaaccuggcagccgcacuggccgcccagaaacgucaguggugcugcc

SEQ ID NO: 6459 - RNA, 64 nt, Human
gggcggcagguaacgagucauugccucucacgccaccuggaaggcuggacuacuuccuccuccc

SEQ ID NO: 6460 - RNA, 65 nt, Human; identical to SEQ ID NO: 586

SEQ ID NO: 6461 - RNA, 95 nt, Human
uuuuuuuuuuuuuuuaaggcaacagacucuuuauuuaaugugguuuaaaauacaucaaaaucaagucccuggcuguugugaauacccaaaggaga

SEQ ID NO: 6462 - RNA, 74 nt, Human
ccaggagcuacacaccuucgaggugaccggccaggaaacggucgcccagaucaaggcucauguagccucacugg

SEQ ID NO: 6463 - RNA, 71 nt, Human
gcauugcccggaagaucaagucgugcuccuggcaggcgcgcccuggaggaugaggccacucugggcagugc

SEQ ID NO: 6464 - RNA, 84 nt, Human
cucugucuccugaguagcuggaauuacaggcaugagccacugcacacugcuuacgcuuugaucucagcacaaccaggcuaggag

SEQ ID NO: 6465 - RNA, 74 nt, Human
gcugaucuauuuuuaauuuuuuaauauuuguauuuuuaaauuuuaaauuuuauuuuuauuuugauuagaacagu

SEQ ID NO: 6466 - RNA, 69 nt, Human
gguccaacugugucacccaggcacaacugcugauuacuacagcuucgaucuccugggcugaaguggucc

SEQ ID NO: 6467 - RNA, 102 nt, Human
auacaggacuaauugucagccuagaaaaggaacuugcuccauuguuugaagaacugagacaaguuguggaaguuucuuaaucugacagugguuucagugugu

SEQ ID NO: 6468 - RNA, 81 nt, Human
gcuuugcgaccugguuucuuauccacuuuugcccuugcaacagaccaaggaagcaaacuuggacuuuccaaaaauaaaagu

SEQ ID NO: 6469 - RNA, 78 nt, Human
gacaaguuucaaaggaagaacauguaugacucauggccacaaaaggcuauuuauagauggcuucuuucugauuauguc

SEQ ID NO: 6470 - RNA, 102 nt, Human
uugggccccaacgcagcuuggaucggugcuggggcaaaccacacguggaccuucuuggcccacggaugcuccuggguuaccggccggaugcuaggggcccga

SEQ ID NO: 6471 - RNA, 97 nt, Human
gcgauguccucugcagcuuccagcuugcgcagcucgaucaggccauccccugcaguggccagugaguuggcaaucagcucagcugccuuggagucgc

SEQ ID NO: 6472 - RNA, 96 nt, Human
gugauuuuaccuuuauuuccuucacuuuaagccaaucaugaaauuucacagugauuucuggggugggagcagaaggaaggcuguguuaagaaucau

SEQ ID NO: 6473 - RNA, 66 nt, Human
gcccccugagagccuggcgcagcugggacuccccagaaauucacugccagcucuuaaauauggggu

SEQ ID NO: 6474 - RNA, 61 nt, Human
gcuggauaugcaaacccuaagggaauuaugagaauaacccuguccacgguuacaauccagc

SEQ ID NO: 6475 - RNA, 84 nt, Human
gggaugucaguggcgcugagcaguagcuuuaagucccagaaaagccuuuucuuacuaugcaaacccacucgugccuggaugccc

SEQ ID NO: 6476 - RNA, 74 nt, Human
acagaguuuugucuuuucuaauccuuguuagacuacugauuuaaaagaaggaaaaaaaaaagcccaacuccugu

SEQ ID NO: 6477 - RNA, 87 nt, Human
cuucaggcaguaaaccaacagcucacaaaggagaaagagcacuaccagguguuagagugaaguaauugggaaacuguucauuugagg

SEQ ID NO: 6478 - RNA, 66 nt, Human; identical to SEQ ID NO: 6473

SEQ ID NO: 6479 - RNA, 61 nt, Human
gcccugauuaaacacucaccccuucaggagaacccagaguuauagaagggaugucaguggc

SEQ ID NO: 6480 - RNA, 61 nt, Human; identical to SEQ ID NO: 6474

SEQ ID NO: 6481 - RNA, 64 nt, Human; identical to SEQ ID NO: 2519

SEQ ID NO: 6482 - RNA, 100 nt, Human; identical to SEQ ID NO: 2523

SEQ ID NO: 6483 - RNA, 67 nt, Human; identical to SEQ ID NO: 2521

SEQ ID NO: 6484 - RNA, 64 nt, Human
cgaguugggaggggcggaaggcugaaccuccagcuugagccggacaagccgauucccagcguug

SEQ ID NO: 6485 - RNA, 64 nt, Human
cuccccaggagcccaucauggcgacgcccccuaagcgggcgucgcgguggaggccacgggggag

SEQ ID NO: 6486 - RNA, 61 nt, Human
gaggguagagaugaacugugugugaggccaaacuggaucggucaacauggucuucccccuc

SEQ ID NO: 6487 - RNA, 64 nt, Human; identical to SEQ ID NO: 2519

SEQ ID NO: 6488 - RNA, 99 nt, Human
cuuccuauaaaguuugcucucucuuuuugaaggaaauuucugggcaaacaacauuuugagaaagaaauucagauaugggaaaguaaagaucauggggag

SEQ ID NO: 6489 - RNA, 67 nt, Human; identical to SEQ ID NO: 2521

SEQ ID NO: 6490 - RNA, 64 nt, Human; identical to SEQ ID NO: 2519

SEQ ID NO: 6491 - RNA, 100 nt, Human
cuuccuaucaaaguuugcucucucuuugugaaggaaauuucugggcaaacaacauuuugagaaagaaauucagauaugggaaaguaaagaucauggggag

SEQ ID NO: 6492 - RNA, 100 nt, Human; identical to SEQ ID NO: 2523

SEQ ID NO: 6493 - RNA, 67 nt, Human; identical to SEQ ID NO: 2521

SEQ ID NO: 6494 - RNA, 62 nt, Human
uaucagauuugaauuacagcugaguuacccacuugggagucaguuuuagauuggagcuggua

SEQ ID NO: 6495 - RNA, 69 nt, Human
uccgagggcgagcuccagaaaaguuuugcaaucuggagauaaggagcuugaugggcagcuagacuugga

SEQ ID NO: 6496 - RNA, 80 nt, Human
uauccaauauugauucuuuguuuuacagcucauaaugaucagaaaauauacauuuaaaaugaaagucaaagaaaaggaua

SEQ ID NO: 6497 - RNA, 67 nt, Human
cacaccccugaguacaguggagguuuaggagguuuggaucuccacguuuaaguacugccaaggugug

SEQ ID NO: 6498 - RNA, 68 nt, Human
uugucugccaaaucuuccuuacgugucaugaguuguuccaaggugacugugguggaagauaaugacaa

SEQ ID NO: 6499 - RNA, 81 nt, Human
ggggccagagacccaccucgcuacuuggcguacucagucaucuugaaggguguguuagaagaagaggauccggguggccuc

SEQ ID NO: 6500 - RNA, 73 nt, Human
ugaagaagguguagcucucggcggggauguuacccuuggaccaggaacacuuuguuguagcugcccuccauca

SEQ ID NO: 6501 - RNA, 86 nt, Human
gugggaggagaaggggaaguauguuuuggggggcugcuuccugucugaguaagcccucaggagccucugcuccccugugaacccac

SEQ ID NO: 6502 - RNA, 61 nt, Human
ucccuuccccagaucugcuccuccccuuucacaggugggaucggcacucagggggucugga

SEQ ID NO: 6503 - RNA, 81 nt, Human
ugccuucucaggaaagcuggugucugauuuuggccaucaggacucugacgucucuuuggucuuguugauuuccucugggca

SEQ ID NO: 6504 - RNA, 85 nt, Human
gcagucuggauucguguuuauugaagccaguaauuagagacaucuuuuuuucccaggacuagaaagcaagguuccacaugacugc

SEQ ID NO: 6505 - RNA, 94 nt, Human
guauuuuuaguagagacgggguuucaccauguuggccaggcuggucucgaacuccugaccucaggugaucuaccugccuuggcucccaaaguac

SEQ ID NO: 6506 - RNA, 69 nt, Human
aaacuuugccggauucuuuugaaauucgaucuuuuuccagauugaaauuaguaauaucuguagaaguuu

SEQ ID NO: 6507 - RNA, 72 nt, Human; identical to SEQ ID NO: 1989

SEQ ID NO: 6508 - RNA, 85 nt, Human
ggguagauguuuucuuggcagccauauuuguaggcacugcuggauacuuuaguguuagaaguggcuauuaagagacgaguuuccc

SEQ ID NO: 6509 - RNA, 65 nt, Human; identical to SEQ ID NO: 1518

SEQ ID NO: 6510 - RNA, 75 nt, Human; identical to SEQ ID NO: 74

SEQ ID NO: 6511 - RNA, 87 nt, Human; identical to SEQ ID NO: 76

SEQ ID NO: 6512 - RNA, 71 nt, Human; identical to SEQ ID NO: 77

SEQ ID NO: 6513 - RNA, 62 nt, Human
guuguuuuaccuguggugacuuucagauuuagggagagauuuagagauaucacauggacaac

SEQ ID NO: 6514 - RNA, 82 nt, Human
accacccacaggcugguauugacauccuucuugggccgggccuuuuuggccaaauguaggauggauggcccuuggggguggu

SEQ ID NO: 6515 - RNA, 84 nt, Human
uugaccccaucaacgcacugcagggcugccauggaagggccuaugagugaccacccuuggauggaggccuggcaggaggggcaa

SEQ ID NO: 6516 - RNA, 69 nt, Human
cuccuggaguggauccggcgcaccauccccuggcuggaggaccgugugccccaaaagacuauccaggag

SEQ ID NO: 6517 - RNA, 68 nt, Human
cagcuguaacuaaguauauacauguaggcuuuucuagaaaaguacagaaccaauuuagaaagcagaug

SEQ ID NO: 6518 - RNA, 69 nt, Human
cuccaguaguauugagguuaaaaugauucagcauuuagacuuuaaaaauuaccucaauguuccucggag

SEQ ID NO: 6519 - RNA, 66 nt, Human
uuauaaccuugauugaagcccuguugaagaguaacugcuuugccagcaucuauuccaucucuauaa

SEQ ID NO: 6520 - RNA, 67 nt, Human
gggagcaaccaaacuucuggggcauguguauuuuuaaaccuacgucucccgggucucuguugcucuc

SEQ ID NO: 6521 - RNA, 75 nt, Human
aguucacuauauagagcuauugaaagaguucugagcagaguuuuaucagguagguagcaguauguagagugaauu

SEQ ID NO: 6522 - RNA, 105 nt, Human
ucagaaggucacgcaacagaugcuguguuaggagcaugaggguagauauaugggccauuugugauguucaggauacggcugauuugauucuugguguccaucuga

SEQ ID NO: 6523 - RNA, 98 nt, Human
aauugaaagacuucagugaacaaggauuuacuucagcguauucagcagcuagauuucagauuacacaaagugaguaacugugccaaauucuuaaaauu

SEQ ID NO: 6524 - RNA, 63 nt, Human
gguguggguuuuuggcauguagcaguuuuuaugguaagaucuauauauaaaaagucccacacc

SEQ ID NO: 6525 - RNA, 80 nt, Human
ggugggagaugaggaaugggaucagauaucgaggguggguaauucuccauaaacugauuuagaggauucuugcuaacacc

SEQ ID NO: 6526 - RNA, 61 nt, Human
ucuuuauucauaaucacaggccacaggggugagaccugagguuuggguucuguggugaagg

SEQ ID NO: 6527 - RNA, 70 nt, Human; identical to SEQ ID NO: 3648

SEQ ID NO: 6528 - RNA, 74 nt, Human; identical to SEQ ID NO: 1525

SEQ ID NO: 6529 - RNA, 66 nt, Human; identical to SEQ ID NO: 1526

SEQ ID NO: 6530 - RNA, 61 nt, Human
auguuuuauuucacuggaaaauucuguaaagaacuaaaucugguucccuugaagaaaacau

SEQ ID NO: 6531 - RNA, 80 nt, Human
cugacucuaaggcccugugggaugaaaagcagguauccaaaagaacucugcuuggcccucugauacggccuugaggucag

SEQ ID NO: 6532 - RNA, 68 nt, Human
ggggugagcuggggaggcuucugcgguucuggagucccggcgauggcgccaguuccccagcaaacccc

SEQ ID NO: 6533 - RNA, 73 nt, Human
ccaaggagaacuucaguugcuugacucguuuggaucacaaccgagcuaaagcucaaauugcucuuaaacuugg

SEQ ID NO: 6534 - RNA, 94 nt, Human
cugcaagacugugcccuuccccuccugaaagaugucaucgcaacagauaaagaagacguugccuucaaagaccuggauguggccauucuugugg

SEQ ID NO: 6535 - RNA, 60 nt, Human
gaagucaguuaagguuauuguuguggguaauccagccaauaccaacugccugacugcuuc

SEQ ID NO: 6536 - RNA, 84 nt, Human
gaaaaucaauucuaaaaacugugugacauacaacaugacaucuuaauguaacaugacuguauguguggacuggaguugauuuuc

SEQ ID NO: 6537 - RNA, 67 nt, Human
cucucaggaagcgugguaaucucucaauggcuggccuccggaguugucacucaggcucccuuguaag

SEQ ID NO: 6538 - RNA, 80 nt, Human
ccucgaguggcuccgaauguuugaucagcaagaaauucagguauuaauuucuggugcacaaguucccauaagccuagagg

SEQ ID NO: 6539 - RNA, 61 nt, Human
accauaaggauuuuuccucgaacuugggcaagucgucgguuugcgagaucguccuuauggu

SEQ ID NO: 6540 - RNA, 82 nt, Human
gggaaacacguauucaggccggcgcggguugguacauccuagggcauaccaggggacucuggucgguuacugauacggcacc

SEQ ID NO: 6541 - RNA, 68 nt, Human
uuuugggaagaaccaugguggauagacuagagcuuaguucuuuguggcacgguggguucucgccaaaa

SEQ ID NO: 6542 - RNA, 97 nt, Human
cgcagccccagcccggccccccuggggacccuagagaggguguccuuucuguuuauccuucucuuugcuccagauggcugcgcucucuaggggcgcg

SEQ ID NO: 6543 - RNA, 84 nt, Human
ggugcgcgguguguuccagccucaguccuccuggguucuuuauccacaggcaucuggggguggaugugacggcagacuugcacc

SEQ ID NO: 6544 - RNA, 84 nt, Human
ccacuugauguucagugaagagaaccagaaaaagucuguagagcaguaccaucugggucucaucaaaaaggagaaauaacgugg

SEQ ID NO: 6545 - RNA, 66 nt, Human
cgugugaacagcuacuacucuugguaucgcaacuacgggcaccuggaguugauucagcugcagcug

SEQ ID NO: 6546 - RNA, 69 nt, Human
cagccgaggagcaggcgcggccgcggcgccauauugcggcccucagcggccgcgaccgagucauggcug

SEQ ID NO: 6547 - RNA, 112 nt, Human
cucccuucauugcaucugaggacuuguuuucuuuuucuuuauuuuuaauccucuuaguuuuaaauauauugccuagagacucaguuacuacccaguugugguuucucgggag

SEQ ID NO: 6548 - RNA, 68 nt, Human
ggaaacuggaaaaaggcuucuugaaguaaauguucugaguggagcuacuaggaugucuuccagccucc

SEQ ID NO: 6549 - RNA, 125 nt, Human
guaaagcaaugucugccuaguuuauuguccaguuaacuuuagugaccuuuuaaaaguuggcauuguaaauaaaacaacuugcaaaaaaguuuucuggaauagaauuaacaaaauauuaucuuuau

SEQ ID NO: 6550 - RNA, 92 nt, Human
ggaggucagcuaccaggaagauccaugaucugggcauuggcagaugccugccaucacagccaggaagaugccucugaccugggugcaucucc

SEQ ID NO: 6551 - RNA, 64 nt, Human
ggcagcccugggccuugguuugauuaccuccccugggggaugcuggucagacccagagguuguc

SEQ ID NO: 6552 - RNA, 65 nt, Human
uccauuaagcaguucauggacaucuucucgcuaccggagauggcucugcuguccuguguggugga

SEQ ID NO: 6553 - RNA, 79 nt, Human
gggacaugguggggaucccuggccuagguguucaaggugguggcauccugaacuuccagcaguucccuagcccgguucc

SEQ ID NO: 6554 - RNA, 61 nt, Human
cgcggcuacuacaaccagagcgaggccgggucucacacccuccaguggauguauggcugcg

SEQ ID NO: 6555 - RNA, 71 nt, Human
gggcacgugcguggaguggcuccgcagauaccuggagaacgggaaggagacgcugcagcgcgcggaaaacc

SEQ ID NO: 6556 - RNA, 78 nt, Human
gggcgccuccuccgcggguaugaccaguccgccuacgacggcaaggauuacaucgcccuugaacgaggaccugcgcuc

SEQ ID NO: 6557 - RNA, 67 nt, Human
uucagagaaauccuauuuauaauuaugaucugaacuuauucuaugauuagcaaauauaucaucugaa

SEQ ID NO: 6558 - RNA, 64 nt, Human
gcaaacagggaaaaauauauuuuuuucauaaaguacugaauguuaacuuuuuucaucuguuugu

SEQ ID NO: 6559 - RNA, 111 nt, Human
ucuuuccaaaauuuacaaauauacaauauauuuauaguauuaccuucagacaacuucagugcaaagauauacauauaguacauugugauaauuauuuguaaaaauaugaga

SEQ ID NO: 6560 - RNA, 67 nt, Human
gagaaauuuuaguuauaaauuagugaaguguuaggauuuaaauuuuacuuagaaauuaaaacuucuc

SEQ ID NO: 6561 - RNA, 88 nt, Human; identical to SEQ ID NO: 95

SEQ ID NO: 6562 - RNA, 65 nt, Human; identical to SEQ ID NO: 42

SEQ ID NO: 6563 - RNA, 60 nt, Human
ggauuaauaggucccccgcuuuguuugacaccggucugcacgggagaccaaaacgagucc

SEQ ID NO: 6564 - RNA, 70 nt, Human
cuggccccggguucccguggcuaccgggcgcggccgcccccgcgccgcaggccgggaccccgguggccag

SEQ ID NO: 6565 - RNA, 63 nt, Human
cgcucgcaagaccaccagcgcccagagccccagucugaggcuggcgccgggggucugcgggcg

SEQ ID NO: 6566 - RNA, 70 nt, Human
ggcuagcgggagccggcacaagagggucgaggagccaggaaccccaaacguccggcgccaggcgcuagcc

SEQ ID NO: 6567 - RNA, 68 nt, Human
aaaaaaaaaauggcacucugauuaaacugcauuacagccugcaggacaccuugggccagcuugguuuu

SEQ ID NO: 6568 - RNA, 69 nt, Human
cuuccuucaccaacaugcaaguucuuuccuucccugccagccagauagauagacagaugggaaaggcag

SEQ ID NO: 6569 - RNA, 73 nt, Human
gccaugucuuaagagcgggaagaaaaggcagcaaacaggcucuaucuccacaggcucuggggacagugacggc

SEQ ID NO: 6570 - RNA, 81 nt, Human
ugaaagaagaacuacuugugaagggcaaacaguuuaguucaagaaagcaaggcuaugcaauaccacagcaaacuucauuca

SEQ ID NO: 6571 - RNA, 70 nt, Human
uuccgagugaaauguguccagacagcaggagagaucuacuuaucugugagacugaagagccuccuuggaa

SEQ ID NO: 6572 - RNA, 74 nt, Human
gcaugagccacugugacuugcccagaucacauuucuacuacccuauagaauggauguaaauuaccugcuugugc

SEQ ID NO: 6573 - RNA, 72 nt, Human
gcuuuuaacuuggacuaguguaacuccuucaugcaauaaacugaaaagagccaugcugucuagucuugaagu

SEQ ID NO: 6574 - RNA, 63 nt, Human
cagaugggcucuuugggcuuugggagcuggcuucaccuggcuacucccgagucuggcccucug

SEQ ID NO: 6575 - RNA, 104 nt, Human
cggaggggcccgcuccggggacagucuugcccacccugggcuuugcgggggcccucgcggaaggcccggcggccgcgcuguguccccgugcgacacgccccccg

SEQ ID NO: 6576 - RNA, 74 nt, Human; identical to SEQ ID NO: 2058

SEQ ID NO: 6577 - RNA, 65 nt, Human
ggccuguuaucuccuuuugcgcgacacggucucagcuguuccgccugaggcgagugacgcuggcc

SEQ ID NO: 6578 - RNA, 72 nt, Human
gcggccgcauuccugcaggggaugacugugaauggcuucaucaacacagucaucaccucccuggagcgccgc

SEQ ID NO: 6579 - RNA, 61 nt, Human; identical to SEQ ID NO: 3268

SEQ ID NO: 6580 - RNA, 66 nt, Human; identical to SEQ ID NO: 12

SEQ ID NO: 6581 - RNA, 84 nt, Human
ggcaccuuugcccaagcugagugaacugcacugugacaagcugcauguggauccugagaacuucaagcuccugggaaaugugcu

SEQ ID NO: 6582 - RNA, 70 nt, Human; identical to SEQ ID NO: 194

SEQ ID NO: 6583 - RNA, 90 nt, Human; identical to SEQ ID NO: 1501

SEQ ID NO: 6584 - RNA, 81 nt, Human; identical to SEQ ID NO: 4694

SEQ ID NO: 6585 - RNA, 98 nt, Human
ugcaaagaugcuguccgugcgcguugcugcggccgugguccgcgcccuuccucggcgggccggacuggucuccagaaaugcuuuggguucaucuuuca

SEQ ID NO: 6586 - RNA, 89 nt, Human; identical to SEQ ID NO: 504

SEQ ID NO: 6587 - RNA, 79 nt, Human; identical to SEQ ID NO: 995

SEQ ID NO: 6588 - RNA, 69 nt, Human
gggcagggguggcagaagacacgagcagccacugcccguacccccucuccucucuguaagcccaugccc

SEQ ID NO: 6589 - RNA, 67 nt, Human
ccuggggcaggaacaagcuccagccuuccuccacauggcuugagguaaucagcaccccuaccccagg

SEQ ID NO: 6590 - RNA, 69 nt, Human
gccacuuagcugagccagccagcucugccucccuccccaaagagugcuuuuggcuggccagaggguggc

SEQ ID NO: 6591 - RNA, 67 nt, Human
ggucagugagaggggggcagcaggggugcuccccacggcaguccugcugcggccuucccuccuggcc

SEQ ID NO: 6592 - RNA, 74 nt, Human
ggugugagcucugaggaguccugaacccugggugcagcauccuagcauccugggaguccuuuucugcccacacu

SEQ ID NO: 6593 - RNA, 60 nt, Human
uuuuuuuuuuuuuugucaagcaugucagacaauaaaguccuuuguuaaaaaggggaaaaa

SEQ ID NO: 6594 - RNA, 65 nt, Human
cccucccgggugccccgagaugcuggccgguaacacuucuuccucuacaagcacacccaugaggg

SEQ ID NO: 6595 - RNA, 79 nt, Human
ggaugucugugucaggcauguuaacuucaaacaaaaucugagaucggcuuuuuccauugacauucuuagcacagcaccc

SEQ ID NO: 6596 - RNA, 108 nt, Human
cuuguuucggacuauagagugcugauggcagagauuggugaggauuuggauaaaucugauguguccucauuaauuuuccucaugaaggauuacaugggccgaggcaag

SEQ ID NO: 6597 - RNA, 62 nt, Human
agcaaccagccugggagccuucgacguaggcgcugugggcgaaggaaaaggccuggccugcu

SEQ ID NO: 6598 - RNA, 106 nt, Human
ccaggaacgcugcagaggcggguuggccggggggcgcugccgcccaaggcccgaggcagcggcgcgggaucggccaaagcacccgccgccaguucggcgggucugg

SEQ ID NO: 6599 - RNA, 88 nt, Human
ccugggccugccacucccacgcccuucaccaaugccguccagcugcugcugacgcugaagcuggugagccuggccagugaaguccagg

SEQ ID NO: 6600 - RNA, 61 nt, Human
gcccgcccggggucccugaccguggcuucuuccccggccugaucugcgcagcccggcgggc

SEQ ID NO: 6601 - RNA, 65 nt, Human
ggcggcaagcgggcugggacugcucggccgccuccugcccggcgagcagcucagaccaugucgcc

SEQ ID NO: 6602 - RNA, 84 nt, Human
uagugguucuucuuaucuccauccccaucggcuuccucuuuaagaaagccgguccugggcugaagagauggggagcagccgcug

SEQ ID NO: 6603 - RNA, 78 nt, Human; identical to SEQ ID NO: 99

SEQ ID NO: 6604 - RNA, 65 nt, Human
uguggcauacauaauguagaguuuucaaggguaccuuaaagaacaucuauaaauacauacacaca

SEQ ID NO: 6605 - RNA, 60 nt, Human
cguggggcuguggccacccuuucaaacuccuuucugaaugcuuguggcaucugccccaug

SEQ ID NO: 6606 - RNA, 67 nt, Human
ccuccucccgucacuccacgcagcuggcagagagcacagugaucaccagcgugagugguggaggagg

SEQ ID NO: 6607 - RNA, 61 nt, Human
cagugugcacgugggaaccuguccccaggcuggagcauaggggcaugaucccagcucacug

SEQ ID NO: 6608 - RNA, 67 nt, Human
gagugaggaauguuuggguggcgucaagguugguaagcggcgcgcgccgcucgagcucucccgcauc

SEQ ID NO: 6609 - RNA, 91 nt, Human
ugaauggccgcucgccgagugcuguuugcaaacuuaggaacccccucgcgcggggccuagcggggguacguggcgcaugcgguaacacuca

SEQ ID NO: 6610 - RNA, 74 nt, Human
ugucagauguguccuuguuaauauacucgaaguuccucuagcuugugggagauguuagagcuaacacauuugca

SEQ ID NO: 6611 - RNA, 70 nt, Human
guuucaagaguucagauauacagauaaagcaauuuaaaaaaagcuuuucuuauucuaaggcuuuugauac

SEQ ID NO: 6612 - RNA, 78 nt, Human
cugcagcggcucgucuacuccaugugcucccucugccaggaggagaaugaagacaugguacaagaugcgcugcagcag

SEQ ID NO: 6613 - RNA, 106 nt, Human
ccaguuguucaauuuccagagacagcuuauauaccuccagggccauuuucacaucccucuggguuugggagacacugcaugaguccuuuggccugugagcaccugg

SEQ ID NO: 6614 - RNA, 70 nt, Human
gaaaaaaaauuugugcuuuguguguugaaaagcaaaaacaugagccacacagaggaugauuaauaauuuc

SEQ ID NO: 6615 - RNA, 96 nt, Human
aaaugcagguuuacaaagaugagcaggugguggugauaaaggauaaauacccaaaggcccguuaccauuggcuggucuuaccguggaccuccauuu

SEQ ID NO: 6616 - RNA, 65 nt, Human
uucauuugaaaguuuucauuuccuuuuuaaaaugugaaugauuagguauguaaacuuuaugugaa

SEQ ID NO: 6617 - RNA, 126 nt, Human
gaauauucaaaauacacuuuuaccccacuccauucugucauuauuuacacauauguacaagaaaaaugaaagagucucuguguaugugugugugugcgagugugugugguuuguguuguuguuuuc

SEQ ID NO: 6618 - RNA, 68 nt, Human
ggugaccugguguugcacugcauggagggcauuggccgccagcuucucaagcgcaguggcagguuguu

SEQ ID NO: 6619 - RNA, 71 nt, Human
acaauucuauuaccauauaagguuucccaaauccuuacccagcuuaguucucuugggaagcucuuaauugu

SEQ ID NO: 6620 - RNA, 95 nt, Human
ugggacuuccagaacuuggaguaacuuggaguugauucccauuuuccuuuggaggugacuggcaaaugcaaucuuuaggaagcuccucugaccca

SEQ ID NO: 6621 - RNA, 65 nt, Human
ugccagauuccuuuuaucaucugcgaggaaaagagaagcaggaugaggaagagugagggaaggcg

SEQ ID NO: 6622 - RNA, 84 nt, Human
cagggcauuccgcagggcaucugccuccuggcugccgcucagacugaggagccaggagaccccaccgcccagcguguugcccug

SEQ ID NO: 6623 - RNA, 68 nt, Human
cgcucuuccaccgaggguggcgucaucuccccccgaagguccuuggucagcagccucgaggaagagug

SEQ ID NO: 6624 - RNA, 72 nt, Human
ugcccagcuccacaagcgccugcagcgccuccacgucaccggcgugggcagcagcacaggccaggcugggca

SEQ ID NO: 6625 - RNA, 65 nt, Human
acaggcgugcaccacugugcucggauuauuuuugaauuuucaguagagacaggguuuugccaugu

SEQ ID NO: 6626 - RNA, 76 nt, Human
gccucccaaagugauugcagauuacaggugugagccacugcgccuggccuaugguuuggaguuaauguaaugaggc

SEQ ID NO: 6627 - RNA, 69 nt, Human
ugcugcccaggcugggaugcaguggcgugaucucggcucacugcaaccucugccuccugggcucaagca

SEQ ID NO: 6628 - RNA, 65 nt, Human
accucuagaaaccccaauccuucaucuacauaaaauuuccaggcauguuuauuaaguucuagggu

SEQ ID NO: 6629 - RNA, 64 nt, Human
gcuccucagugggaagacagaagcaccagaguggcuucaaaggugaguccucaacugacagagc

SEQ ID NO: 6630 - RNA, 67 nt, Human
ggcucccaugcuucccagaauggccgcuaucuguggaguucuguggaggacaggccuaguuugagcc

SEQ ID NO: 6631 - RNA, 85 nt, Human
uggagaaggacuucauuggcuuucugcucuucaacgccacacaacguguccuuggagaagacagcacaauggggcucuaucuuca

SEQ ID NO: 6632 - RNA, 68 nt, Human
aauguguuucuucaguuaugucugugcuguauagaacugucacuaacauuaaagaaagaggacacauu

SEQ ID NO: 6633 - RNA, 68 nt, Human
guaucuuuuuuacauuuuccugaugagaauauaaauuugaaauauucucaguaagugauuaaaaguac

SEQ ID NO: 6634 - RNA, 79 nt, Human
uucugauaauuuugguguaaacaaaaaugauauuuaauuuuuauuaaaucaaguuuaccuaucaaauucccuuuuagaa

SEQ ID NO: 6635 - RNA, 80 nt, Human
uugaaaaauguaacuuuuauucugaacauguaguauuuaucuuuauuagcaauuuuuuucauaauauaagcaugccucaa

SEQ ID NO: 6636 - RNA, 70 nt, Human
cauuugcuccuauguaaccucugcugaaccaugaccccaaggucuaaggagaaaccacauaggauaaaug

SEQ ID NO: 6637 - RNA, 91 nt, Human
ggccacccagauccauuuuuguuuuugagucuggcuuuucuguggcugaagauauaccgcagucagcagguaauggcuggauuugggcgcc

SEQ ID NO: 6638 - RNA, 74 nt, Human; identical to SEQ ID NO: 1690

SEQ ID NO: 6639 - RNA, 70 nt, Human
gccaccuaugacgcagccacccaggaguuugugauacacagccccacgcugacugccaccaaaugguggc

SEQ ID NO: 6640 - RNA, 78 nt, Human; identical to SEQ ID NO: 1691

SEQ ID NO: 6641 - RNA, 73 nt, Human
gagaguggccuggcccuggagccuuuuucuagucuuuucagaauagaauaugggccuggaggcuccacuucuu

SEQ ID NO: 6642 - RNA, 91 nt, Human
aacaugugaauacuaccaaguuucuguccccaaagucaggcaucacugcuagucuuuugggacagaugggacagauguucacuuuaauguu

SEQ ID NO: 6643 - RNA, 75 nt, Human
caggugcacucuauucaagugcaaggauaucagaaguuuuugcaucaacaaauuuucgagauggaguucacucug

SEQ ID NO: 6644 - RNA, 75 nt, Human
ugacuuuuccaaccugcuuaguuuaacaaauuauauuccaguuuuaaucauuguaaaaaaagcaccuggaguuca

SEQ ID NO: 6645 - RNA, 96 nt, Human
caggaacacaaauagaccacauauuacucuuuaauuagauuuguuuuacaauauguucuugucaacgagcuaugucaaacuguuuguuuaaaccug

SEQ ID NO: 6646 - RNA, 72 nt, Human
gggggaggggaagaagcacuuuuucuagagauggaaaauaguuccaguaaaaaguucuuauuccuuucuucu

SEQ ID NO: 6647 - RNA, 72 nt, Human
uaaaauuacauggcucuuaggaaugacgccaaacaugcaacauuuuaagaguaauauuaaacaguaauuuug

SEQ ID NO: 6648 - RNA, 73 nt, Human
acugaggccugugaaucuaagaggguugagcaugaaggacaugcgcagccuuaaaagggggcacaggccaggu

SEQ ID NO: 6649 - RNA, 89 nt, Human
gagaaucacuugaacccgggagguggagguugcagugagccaagaucgugccauugcacuccagccuggugacaaagcaagacugucuc

SEQ ID NO: 6650 - RNA, 95 nt, Human
acagggucucacucugucacccaagcaggaaugccauggcgugaucuccacucacugaaugcaaucucugcuuccuggguucaaguggaucuugu

SEQ ID NO: 6651 - RNA, 81 nt, Human
gccgcuguccuguggugggugcaaauugguaugcucuguucacgcagaaacccagcaguguguaccugcuguaggcaaggc

SEQ ID NO: 6652 - RNA, 65 nt, Human
gcaccuaacugacuuccagagucucuguagaaaccuuaacucaucuggaguuaucagggagcugc

SEQ ID NO: 6653 - RNA, 74 nt, Human
uggagcuucucgcaagguguuugggagcagaggauggagcaccaacuacuaguucugcucaguaacacccucca

SEQ ID NO: 6654 - RNA, 85 nt, Human
uuucugauggcugcuaugugucugacacugugccaugaucuguaggagaaacaagugaacaggggacaaucucagccuuuaggaa

SEQ ID NO: 6655 - RNA, 95 nt, Human
gagauacauaauuacucagucauggaaaagugacuuagcaguauugugaaaaaacaggaguguuagguggcuguaacucaguaagaugugauuuc

SEQ ID NO: 6656 - RNA, 93 nt, Human
ggcguuuuuggcuccauuuaacagaagaaggaccauagugaucauuuaaucucuaugagucugucuuaucuucuggaaaaggggccuaacacc

SEQ ID NO: 6657 - RNA, 74 nt, Human
uauuccauuucaagaaaguacgacuaucagcagccacaaaaccaagcugacagugugcaacucucauuggaaug

SEQ ID NO: 6658 - RNA, 61 nt, Human
ccaccgcggggcccagguucccaagaggucccacaccagaccuucccggcccagccugugg

SEQ ID NO: 6659 - RNA, 68 nt, Human
gggacuaggccccagagggaggcgauggucugcgaggcucccguguucccggcugguuguccugucuc

SEQ ID NO: 6660 - RNA, 60 nt, Human
ccgggguggcgccggccggggcgggggagcccaaaagaccggcugccgccugcuccccgg

SEQ ID NO: 6661 - RNA, 90 nt, Human
ggguggcgaagguggcauacccccuggggcugugugugggcguguucaucuauguugccuacaucaaguggcaccgggccaccgccaccc

SEQ ID NO: 6662 - RNA, 62 nt, Human
gugaaugaaaaaagguauccguuaugaaacuuccagaaaaacgaacuacauuuuucagccgc

SEQ ID NO: 6663 - RNA, 75 nt, Human; identical to SEQ ID NO: 1860

SEQ ID NO: 6664 - RNA, 66 nt, Human
uguaaugauuggugccuguuuccucauugacuucauguuuuuugaaagcacuggcagccaggaaca

SEQ ID NO: 6665 - RNA, 77 nt, Human; identical to SEQ ID NO: 1861

SEQ ID NO: 6666 - RNA, 84 nt, Human; identical to SEQ ID NO: 286

SEQ ID NO: 6667 - RNA, 78 nt, Human
uacacagcacagaggcacgggcaccaugggagagggcagcacuccugccuucugaggggaucuuggccucacggugua

SEQ ID NO: 6668 - RNA, 64 nt, Human
accauugccauuucuacauguuauucgcuugguacccucaaguggauacaagucuggcauuggu

SEQ ID NO: 6669 - RNA, 72 nt, Human; identical to SEQ ID NO: 1696

SEQ ID NO: 6670 - RNA, 80 nt, Human; identical to SEQ ID NO: 788

SEQ ID NO: 6671 - RNA, 79 nt, Human; identical to SEQ ID NO: 3903

SEQ ID NO: 6672 - RNA, 69 nt, Human
uuuuuuuuuuuuuucccauuuuuggaaaauauuuauuaaaaaacuagugaauggggcaaaaaaacaaaa

SEQ ID NO: 6673 - RNA, 65 nt, Human
acguaggcaagcaucagcccuagggcucagcugauccuuggcuggggggcuggcagcuuccaugu

SEQ ID NO: 6674 - RNA, 79 nt, Human
uugagugugcagcucacaacagacaucaggaucacuguccaggaguguccuggguuaaccuuuguuggcugggccucag

SEQ ID NO: 6675 - RNA, 68 nt, Human
gcuuuuuaaaggauaguucucucugguuaucaagcauauuuugccaucagggaaacauauuuuaaagc

SEQ ID NO: 6676 - RNA, 67 nt, Human
ugcacaaggaugauacaaaguaucugggcuagauucacaacuauuccaauuacuaucucuuccugca

SEQ ID NO: 6677 - RNA, 61 nt, Human
uuagucauuuuaguuguucccuuuguaugccaaaaauggaagacagcuguuugugcacuaa

SEQ ID NO: 6678 - RNA, 130 nt, Human; identical to SEQ ID NO: 3794

SEQ ID NO: 6679 - RNA, 64 nt, Human
auuagauucugggguaguuuccuuugguguucucaaauuaagacuuuuccaaaacaugucugau

SEQ ID NO: 6680 - RNA, 63 nt, Human
uguaacagugacacuauuccacaacaaaauuacuuagauuucaugaggaaacauguauuugca

SEQ ID NO: 6681 - RNA, 63 nt, Human
auacaggaugauaguucgugugacaaacacagauaucauuugucagauugcuuaugcccguau

SEQ ID NO: 6682 - RNA, 90 nt, Human
aucuaugaaggccaaguggaggugacuggugaugaauacaauguagaaagcauugauggucagccaggugccuucaccugcuauauggau

SEQ ID NO: 6683 - RNA, 92 nt, Human
cuggaaauguauuccauuucaagaaaguacgacuaucagcagccacaaaaccaagcugacagugugcaacucucauuggaaugaaaccucag

SEQ ID NO: 6684 - RNA, 76 nt, Human
gcaacagaaguaauuguuucaagcuccugauucuuucuacuaaaucaugaacagcuuuaaaaacauuucugucugc

SEQ ID NO: 6685 - RNA, 76 nt, Human; identical to SEQ ID NO: 758

SEQ ID NO: 6686 - RNA, 71 nt, Human; identical to SEQ ID NO: 1764

SEQ ID NO: 6687 - RNA, 83 nt, Human
cagaguccuagaggcaggcuucuauggcugauguggugacuucauucguuaggaacugagaugccuucuuucuugcugcucug

SEQ ID NO: 6688 - RNA, 79 nt, Human
uacuuguauuuccauugcuugaauguaagagucagaugauguuuuaauugaaauaaaauucuaggcuggaugcaaugug

SEQ ID NO: 6689 - RNA, 63 nt, Human
caggacgaaaaucagguaguuggugaagucaggaaacugauugaguuguuugaguucauccug

SEQ ID NO: 6690 - RNA, 84 nt, Human
cagggggugggaagcucugauagugugccuucacguuguucuugaggaugaggccacugagagagcgcguuggcucaucuucug

SEQ ID NO: 6691 - RNA, 62 nt, Human
gacugugagucuuugagcagcugcaggaccugcugcaagcccugcucgucuggcugccaguc

SEQ ID NO: 6692 - RNA, 84 nt, Human; identical to SEQ ID NO: 286

SEQ ID NO: 6693 - RNA, 89 nt, Human; identical to SEQ ID NO: 288

SEQ ID NO: 6694 - RNA, 61 nt, Human; identical to SEQ ID NO: 776

SEQ ID NO: 6695 - RNA, 66 nt, Human; identical to SEQ ID NO: 4822

SEQ ID NO: 6696 - RNA, 83 nt, Human
gguuaacucauaaugaauuauaaaacuuugauaguuacauuguacuaucauuuaugaggcauuuauuuuucauuauuuacacc

SEQ ID NO: 6697 - RNA, 66 nt, Human; identical to SEQ ID NO: 4823

SEQ ID NO: 6698 - RNA, 97 nt, Human
aauaauuuuuagagaaaaugauguaaugaaaaauuguaccaugaauuaggagcauaguuuuuuccauuuaaacgucaccauuacuuaaaagaugauu

SEQ ID NO: 6699 - RNA, 82 nt, Human
caggagaagucuaauccacagguuacaccuauguuugauaugauauaaguucucuuugcguaggccacuggguuuucuccug

SEQ ID NO: 6700 - RNA, 86 nt, Human
augugcccacauguagccuggcaguccaaagaccaagaaucaacuugcaaaucugccauuaaacugcugugcgacuucaggcauau

SEQ ID NO: 6701 - RNA, 71 nt, Human
caugaacacgugugggccucggucaccuggcuuugagggcagucugaccaggcuagaccacacgugccgug

SEQ ID NO: 6702 - RNA, 62 nt, Human; identical to SEQ ID NO: 4127

SEQ ID NO: 6703 - RNA, 74 nt, Human; identical to SEQ ID NO: 1525

SEQ ID NO: 6704 - RNA, 99 nt, Human
ucucuuuucauauuauaagauuuuagcaauacuuccaauauugauuuccuuaccaaauggaaucuagaagcuaaauuuuuaaaaauuguuaaaggauga

SEQ ID NO: 6705 - RNA, 76 nt, Human
ggaauagagaaaugacaaauaauauaucauauagaucacaggaucauauauguguuacucauauagcucagguucc

SEQ ID NO: 6706 - RNA, 93 nt, Human
ucuaugcuuaaggaagucaaaauaauaucacuuuaggggcuaggaacaacuauuuuaaacucuaaagauuacauacuaucuuaguaucaugga

SEQ ID NO: 6707 - RNA, 72 nt, Human
cuuaccuaucuagauagcgcugcccagaggaagaggcgcucucccugccccucagcaagcugggauaauaag

SEQ ID NO: 6708 - RNA, 77 nt, Human; identical to SEQ ID NO: 2307

SEQ ID NO: 6709 - RNA, 68 nt, Human; identical to SEQ ID NO: 4262

SEQ ID NO: 6710 - RNA, 78 nt, Human; identical to SEQ ID NO: 2308

SEQ ID NO: 6711 - RNA, 78 nt, Human; identical to SEQ ID NO: 99

SEQ ID NO: 6712 - RNA, 65 nt, Human; identical to SEQ ID NO: 247

SEQ ID NO: 6713 - RNA, 80 nt, Human; identical to SEQ ID NO: 100

SEQ ID NO: 6714 - RNA, 77 nt, Human
cguggaccuucccuguggccuguacccgucccucaacagagacaggcaauuaccagcgcccaggcuguuguccgacg

SEQ ID NO: 6715 - RNA, 77 nt, Human
uaucuuaguguuauuucacagcuaacauucauuuaauacauuuuauugacaaugaugaugugucagacgcuguucua

SEQ ID NO: 6716 - RNA, 64 nt, Human
uuccugcaacuaaaggcauauuuaaaauauuguagcaauuuagauucuccagauaguguaggaa

SEQ ID NO: 6717 - RNA, 63 nt, Human
gggggaacuggagcaggcucugauaagggaauaaacuuguuaaaggaaacauccagggccccu

SEQ ID NO: 6718 - RNA, 83 nt, Human
uucagcauaacguuuauggacaaaauguauauaguauaucuuauauucuauauguauuuuaucacauaguaaggaaugcugag

SEQ ID NO: 6719 - RNA, 100 nt, Human; identical to SEQ ID NO: 698

SEQ ID NO: 6720 - RNA, 60 nt, Human; identical to SEQ ID NO: 2705

SEQ ID NO: 6721 - RNA, 72 nt, Human; identical to SEQ ID NO: 1989

SEQ ID NO: 6722 - RNA, 78 nt, Human; identical to SEQ ID NO: 99

SEQ ID NO: 6723 - RNA, 65 nt, Human; identical to SEQ ID NO: 247

SEQ ID NO: 6724 - RNA, 80 nt, Human; identical to SEQ ID NO: 100

SEQ ID NO: 6725 - RNA, 64 nt, Human; identical to SEQ ID NO: 696

SEQ ID NO: 6726 - RNA, 100 nt, Human; identical to SEQ ID NO: 698

SEQ ID NO: 6727 - RNA, 60 nt, Human; identical to SEQ ID NO: 2705

SEQ ID NO: 6728 - RNA, 72 nt, Human; identical to SEQ ID NO: 1989

SEQ ID NO: 6729 - RNA, 62 nt, Human
cucggggaggccgccgggccggccuccgagacuccggcgggcaccgagucgccucacucgag

SEQ ID NO: 6730 - RNA, 65 nt, Human
gaccaccaggcuguuguguacaauguuugaaagacuuuaauuuguaccaguuaccuuugugaguc

SEQ ID NO: 6731 - RNA, 88 nt, Human
ucuuuaguguuuuuuguuguuucugauaguaacucacuucucucucaccugaaguuaaaauucuggagaagcgacauaucauaaaaga

SEQ ID NO: 6732 - RNA, 80 nt, Human; identical to SEQ ID NO: 353

SEQ ID NO: 6733 - RNA, 62 nt, Human
gcuggggagagcccccucggggggcaucggucaagcugcugaacccccugcucaccgccagc

SEQ ID NO: 6734 - RNA, 66 nt, Human
aguugaaaaagaagaagaaauaaauggcaaagagaaaguuuuuucaaauuucuuucuuuuuuaauu

SEQ ID NO: 6735 - RNA, 63 nt, Human
auccuucuuuuucucuuuugcccacaauuuaagcaaguagaugugcagaagaaauggaaggau

SEQ ID NO: 6736 - RNA, 102 nt, Human
gaaacagacugggccaauguccacaaagaauuccuggucagcaccaccgauguccaaaggugcauuuucaaggaagggcaggcgugauggcuuauuuguuuu

SEQ ID NO: 6737 - RNA, 102 nt, Human; identical to SEQ ID NO: 3952

SEQ ID NO: 6738 - RNA, 74 nt, Human; identical to SEQ ID NO: 365

SEQ ID NO: 6739 - RNA, 102 nt, Human; identical to SEQ ID NO: 2172

SEQ ID NO: 6740 - RNA, 77 nt, Human; identical to SEQ ID NO: 3082

SEQ ID NO: 6741 - RNA, 80 nt, Human; identical to SEQ ID NO: 367

SEQ ID NO: 6742 - RNA, 72 nt, Human; identical to SEQ ID NO: 3662

SEQ ID NO: 6743 - RNA, 74 nt, Human; identical to SEQ ID NO: 365

SEQ ID NO: 6744 - RNA, 75 nt, Human
ucaguuaauaaagaagaagaagaaauggcaaagagaaaguuuuuucaaauuucuuucuuuuuuaauuuagauuga

SEQ ID NO: 6745 - RNA, 123 nt, Human
ucauuuauuugaaacagacugggccaauguccacaaagaauuccuggucagcaccaccgauguccaaaggugcaauaucaaggaagggcaggcgugauggcuuauuuguuuuguauucaauga

SEQ ID NO: 6746 - RNA, 130 nt, Human
aguccaggacuguuuuccuacagcgugccucaaaaguguuguagagggcaggauucuacauucacagccuguuccaucuacgagauuuuccagaugcuacuugugguagacauuccuaacucaugguacu

SEQ ID NO: 6747 - RNA, 77 nt, Human
cuuaaguguguuuugugugugugcccacacguagacaaauguguacggugcacacacacagugcaucauuuuuuaag

SEQ ID NO: 6748 - RNA, 68 nt, Human
ccgccgcucaggguuuuuagaacuucagccauaaaaaugggcagaauuuuccuugaucauaucggugg

SEQ ID NO: 6749 - RNA, 66 nt, Human
cugagaagcacuguuuugaaaaagugcauuagacgauucuguucauauuuaugcagugccucugag

SEQ ID NO: 6750 - RNA, 70 nt, Human
acguucaucggcaucucaucaaucugaguggaauaguacugcucgauaucucugaggaugcggaugucgu

SEQ ID NO: 6751 - RNA, 63 nt, Human
uaucgaccugaucucccaauucuguguauguacaauucucuguuauuagggagaucauagaua

SEQ ID NO: 6752 - RNA, 65 nt, Human
cuggauucggaaugugcugauuuccauuggacucaaguugaucucacuuauauucugagugccgg

SEQ ID NO: 6753 - RNA, 76 nt, Human
auuacagguguaggccgcugugccagcugaguucacuuuuuaacaucugucugaggcggucaugagacacuguagu

SEQ ID NO: 6754 - RNA, 89 nt, Human
ggcccuucuguaauccaucccuugaguuuuuuuuuuuuuaaaugaauuuuuaauuuaaaaaauguauguauuggaauagagacaggguc

SEQ ID NO: 6755 - RNA, 61 nt, Human; identical to SEQ ID NO: 200

SEQ ID NO: 6756 - RNA, 63 nt, Human
cgucuccgaguuugcgacucgcggaccggcguccccggcgcgaagaggcuggacucggauucg

SEQ ID NO: 6757 - RNA, 76 nt, Human
ugugcccacagguugagaacuauguggcagauaucgagguggauggaaagcagguagaguuggcuugugggacaca

SEQ ID NO: 6758 - RNA, 66 nt, Human
ucuauaaaugcagauaugugugugcgcuucuauguauggaugcuuacauguacaugcauagguaga

SEQ ID NO: 6759 - RNA, 78 nt, Human
guaacucuucucuuguaccaggaagcagcuguaggugggguaaugggaucugucuccuggugcagaggggcagcuuau

SEQ ID NO: 6760 - RNA, 130 nt, Human
uggcccugacccagcucuucucccugguggcccucaacugccuucagccucagcuccagcuggggaggagggugaagagcagcuugagucagacugaggaaugcaagagaggugcuggccguccuuguca

SEQ ID NO: 6761 - RNA, 84 nt, Human; identical to SEQ ID NO: 286

SEQ ID NO: 6762 - RNA, 64 nt, Human; identical to SEQ ID NO: 287

SEQ ID NO: 6763 - RNA, 89 nt, Human; identical to SEQ ID NO: 288

SEQ ID NO: 6764 - RNA, 85 nt, Human
uggcggugggucaguggcagagggccaugguuuccauguuaaggaagcggacgugcaucuuggucucaaugucgauccccugcca

SEQ ID NO: 6765 - RNA, 85 nt, Human
uugggauuuaacuuuuuuaaugggucugaaaauucugugacaaauuuuuggucaaguuguuuccauuaaaaaguacugauuuuaa

SEQ ID NO: 6766 - RNA, 61 nt, Human
cuucaucuuggucaccacgccagagaggauccgcccucgaauggacacauuaccagugaag

SEQ ID NO: 6767 - RNA, 76 nt, Human; identical to SEQ ID NO: 758

SEQ ID NO: 6768 - RNA, 94 nt, Human; identical to SEQ ID NO: 1365

SEQ ID NO: 6769 - RNA, 63 nt, Human; identical to SEQ ID NO: 1366

SEQ ID NO: 6770 - RNA, 64 nt, Human
guagaggugagaacaaagcugcgugugugcaaaugugugugcugggcucagggacucacucugc

SEQ ID NO: 6771 - RNA, 63 nt, Human
ugucaaaaccucaaauucuugcuggggcaguuugugacaagaggcagggaugcuggaaugaca

SEQ ID NO: 6772 - RNA, 80 nt, Human
gacuccaccuucucccuggaccagcccgguggcacccuggaucugacccugauccgugcccgccuccaggagaaguuguc

SEQ ID NO: 6773 - RNA, 98 nt, Human
gagccugccuggugcuggccugaguucccaggagcugucugguggcccuggugauggccccugaggcuggagcccccauggccagcccagccuggcuc

SEQ ID NO: 6774 - RNA, 65 nt, Human
cuugccaguuucucccagcaggacccucuucuuguuuugaaagauggucggcugcuuuugguagg

SEQ ID NO: 6775 - RNA, 76 nt, Human; identical to SEQ ID NO: 758

SEQ ID NO: 6776 - RNA, 72 nt, Human; identical to SEQ ID NO: 2728

SEQ ID NO: 6777 - RNA, 65 nt, Human
ggggcugugguuaccucucucuucaugacaccccugugacguggugaagguucgccugcagucuc

SEQ ID NO: 6778 - RNA, 97 nt, Human
aagaaggcaaagacuggggccagcagggaaguuuaaaaggggaaaauaaauguguuuccccauuauaccuccuucaccccagaauauuugccgucuu

SEQ ID NO: 6779 - RNA, 76 nt, Human; identical to SEQ ID NO: 2936

SEQ ID NO: 6780 - RNA, 64 nt, Human
guucaguuccaaggagucccagcggggcaugggcuacaugccccaacguggccuggaggugaac

SEQ ID NO: 6781 - RNA, 72 nt, Human
acucugcuagcucaagauucacaauguugaaagcccuuuuccuaacuaugcugacucuggcgcuggucaagu

SEQ ID NO: 6782 - RNA, 66 nt, Human
gaagcucugagacaugugagaaggucuaguauucuacuagaacuggaagauugcucuccgaguuuc

SEQ ID NO: 6783 - RNA, 65 nt, Human
auggauuaauagaguuggaguuuuauuuuuaagaaaaauucacaagcuaacuuccacuaauccau

SEQ ID NO: 6784 - RNA, 62 nt, Human
acuauuaugaucaaggauauggaaauuacaauagugccuaugguggugaucaaaacuauagu

SEQ ID NO: 6785 - RNA, 92 nt, Human
aggaggagauguuaaaguaacccaucuugcaggacgacauugaagauuggucuucuguugaucuaagaugauuauuuuguaaaagacuuucu

SEQ ID NO: 6786 - RNA, 92 nt, Human
aggugcaaggacguguugaacuagcucucugcagccuccuuggaggaugugauccuaugggagggguaggaguauucagguccuugacaucu

SEQ ID NO: 6787 - RNA, 82 nt, Human
gcaucgcaggcuuaucuugcauuuugauuuuaugauucugauauucauguugaugucaugcuguaugauucuauugcuuugc

SEQ ID NO: 6788 - RNA, 94 nt, Human
gggcucggcgcuggcggcaguggcgagcggcggagaccucuucccggggcagccgguguccgaacugaucgcgcagcugcugcgcgcugagccc

SEQ ID NO: 6789 - RNA, 66 nt, Human; identical to SEQ ID NO: 1983

SEQ ID NO: 6790 - RNA, 64 nt, Human
cccuagccuugcuuguuaaauuuuuuuuuuuuuuuuuuuuaagaauuucugggaaggguacugg

SEQ ID NO: 6791 - RNA, 70 nt, Human
ggaaguagcucuuuuuuuguuuuuuguuuuuuuuauugggagagaagcgggguuauaaagagagucuucc

SEQ ID NO: 6792 - RNA, 107 nt, Human
uggugcugacuauccaguugaugggcugccagaucuggggcaugcccaggaccucauggaugggcugccuccaggugacagcaaucagcuggccugguuugauacug

SEQ ID NO: 6793 - RNA, 67 nt, Human
agaauuucuacagacauacgcaguaggucuaugccaguccuuuugugaacuuuuaacggaaauuacu

SEQ ID NO: 6794 - RNA, 92 nt, Human
ggccgucgcgacucuggccucugaaacacuaccacugcuggcgcugaccuucaucacagacaacagccugguggcagcgggccacgacugcu

SEQ ID NO: 6795 - RNA, 105 nt, Human
gguggcacggcugcgggcgcgggccuagacucgcugcacaaagaacagcgucagccagaucucggugcucagcggcggcaggccaagugcucgcaguucugcacc

SEQ ID NO: 6796 - RNA, 74 nt, Human
uaagguuagaaaucauauaucuguauaaucuacaaugaagcuguagauagucuacauuaugauauucuaucuua

SEQ ID NO: 6797 - RNA, 69 nt, Human
caggggacagucaaggauguuuugaguguacuguuucuaccaacaaaaacuaaaaacaaaugucaacug

SEQ ID NO: 6798 - RNA, 63 nt, Human
ggaaaaugaacacuuaaauugugguauacucacacagaauacuauagagcaaguaaaccaucc

SEQ ID NO: 6799 - RNA, 65 nt, Human
ucagacacuguauguagaaagcuucaaaaaaugaaacaguauguuuggagaacauacauguguga

SEQ ID NO: 6800 - RNA, 71 nt, Human
caguaauuaauauuaggaaacauuacagcccuuaaccuagauuaauauguauaccugguauuaauaaaaug

SEQ ID NO: 6801 - RNA, 82 nt, Human
caucugggacuugaccaaaguuguucuguuuuguuuuuuuaacugaaaguaacagaaggaccuuucuuaaaugugacagaug

SEQ ID NO: 6802 - RNA, 80 nt, Human; identical to SEQ ID NO: 509

SEQ ID NO: 6803 - RNA, 119 nt, Human
gggagcucuuugcucaggcaccaguagaacaauauccugguauugcuguggagacggugacagauucuagccgcuacuauguaauccggauccaggaugguacugggcgcagugcuuuc

SEQ ID NO: 6804 - RNA, 71 nt, Human; identical to SEQ ID NO: 510

SEQ ID NO: 6805 - RNA, 83 nt, Human
agggcaggggagagcaaggggcuuuggggucgaccuccugggggaggguagcccuggggccccgcugugcccucacucgcccu

SEQ ID NO: 6806 - RNA, 87 nt, Human
gggccgucggggccaucucccucccggagucgcuggccagucagcucccucuugaacuccagggggaaggcccucgccgacucgucc

SEQ ID NO: 6807 - RNA, 68 nt, Human
ccaaaaaacagcauaagaauuaaaaacaguuauauuccaauguuuuuaauacuugguucacauuuugg

SEQ ID NO: 6808 - RNA, 62 nt, Human
ccugcccagaaauaaaagcuuuguucugagagaaauugaaaagcuggaaaauauggaguagg

SEQ ID NO: 6809 - RNA, 70 nt, Human
gaugcucuccccagggauccgacggcgcugcggaggcggcagcgauguaugggauccuaaagaaagcauc

SEQ ID NO: 6810 - RNA, 63 nt, Human
gcugcagguugccccaccgagggcauuuuuccgcaccgagggggcggggggcagaaugcacgc

SEQ ID NO: 6811 - RNA, 73 nt, Human
aggggguggggggucuguugggcaacuggggugaagggauugcccucccccugcugggauccccccagccccu

SEQ ID NO: 6812 - RNA, 60 nt, Human
ggccagccggagggccuccaggucccgccgcagcgccuggcgcucagccuccagcucgcc

SEQ ID NO: 6813 - RNA, 68 nt, Human
ggucuggcaggaagggggcagccugcaacccccaagggcagguguggggcugccacagccgcuuggcc

SEQ ID NO: 6814 - RNA, 101 nt, Human
aggcuguggacggggaggagcugcacgauggaacccgugugaggugucuucugggaccuugccggccucccgggccagcugccccagccuuguccaugccu

SEQ ID NO: 6815 - RNA, 111 nt, Human
gccagcgccccuacgcaacguggaguacuaccagagcaacuauguguucguguuccugggccucauccuguacuguguggugacguccccuauguugcugguggcucuggc

SEQ ID NO: 6816 - RNA, 74 nt, Human
agcaaaaggaugggguuccuaacuuugauuucuaaggacuuuuaggcuucucauauaaggccccguuuuaggcu

SEQ ID NO: 6817 - RNA, 106 nt, Human
ggagaaacagacaggaggggggaaggaaccaaacuguuuucuaaggaucgguugucugcaugaagaaauuucgguuucccuccaaccgcccccuccucgauucucc

SEQ ID NO: 6818 - RNA, 69 nt, Human; identical to SEQ ID NO: 528

SEQ ID NO: 6819 - RNA, 65 nt, Human
ggacgugugaaggagcacggggagcacgacucgaauaccacucccgaaggauccgcacgcagucc

SEQ ID NO: 6820 - RNA, 72 nt, Human
gggaagggguggcgcgauaagugaggcgggacgacuuagccguuucagcgugauccgugcgcaucccucucc

SEQ ID NO: 6821 - RNA, 65 nt, Human
cccuugguuccagcgucauggaucaugucugcuugguccgagugagccgcguguggaaccaaggg

SEQ ID NO: 6822 - RNA, 71 nt, Human
cuuuauaaaaugaucuaacuacuuauauuugugcugcaucgcguuacaucuguuuuuauuucacuaugaag

SEQ ID NO: 6823 - RNA, 87 nt, Human
ucuuugaguaaaugaagauucagacuuuguaauauuauugcccuuaagugcaaugcuaaaaaaaacguugauuuucaagcuuagaga

SEQ ID NO: 6824 - RNA, 76 nt, Human
ugcaguuagugggugauuugcuauuuuucuuaguaguuaaaaaauggaacuaaauagugaauauacauacacugca

SEQ ID NO: 6825 - RNA, 83 nt, Human
cagccaguaagugguggagaauuguacaaugaggugccgggcacggugguucaugccuguagucccagcacuuugggaggcug

SEQ ID NO: 6826 - RNA, 98 nt, Human
ccacggcggcggcccugggagcagagguggagcgaccccauuacgcuaaagaugaaaggcugggguuggcuggcccugcuucugggggcccugcuggg

SEQ ID NO: 6827 - RNA, 85 nt, Human
ccgggacaccccguguguggcaggcggcgaagcgcucuggagaaucccggacagcccugcucccugcagccagguguaguuucgg

SEQ ID NO: 6828 - RNA, 103 nt, Human
ugaggcaggagaaucacuugaacccgggagguggagcuugcggugagccgagaucgcgccauugcacuccaggccugggcaacaagagugaaacuccaucuca

SEQ ID NO: 6829 - RNA, 76 nt, Human
cccgcggggcccgugacuggugcugggcuucagccaugaagacccucauagccgccuacuccgggguccugcgcgg

SEQ ID NO: 6830 - RNA, 104 nt, Human
ggaccugcagcugucgcgcgaggggucugggagauggggccacuggauccagcauccucuccguacuccaggaccucuucucugucaccuggcucaauaggucc

SEQ ID NO: 6831 - RNA, 87 nt, Human
gguggaaaagcauguacaggucaucucagugcuccaguuggguacuaguccuuccuuguacugggaguggccugcagugccauccuc

SEQ ID NO: 6832 - RNA, 61 nt, Human
gagguacuagguuuugacaagcuugcaucaugcgugaguauaagcuagucguucuuggcuc

SEQ ID NO: 6833 - RNA, 79 nt, Human
gccuuuugcuuuugauuuuaauauaaauacuuauuuuagcuuuauaaguuauugaauguuugauacaaaggauggaggc

SEQ ID NO: 6834 - RNA, 75 nt, Human
gcgaggcugaacgccugacgucaaggcgacaucgccaaaccucgcccagauucaggcguguaaaccagccggagc

SEQ ID NO: 6835 - RNA, 76 nt, Human
cggagaugccuacauagaagagugacagcagcuagacuaaauguuuaacugcugaacuaguuccucagguauccug

SEQ ID NO: 6836 - RNA, 74 nt, Human
ggagcccgcagcggaggaggggccgcgggcgggaggcgcugcgaggcgcugcuggcccucgggcugcgggagcc

SEQ ID NO: 6837 - RNA, 65 nt, Human
ggcccucgggcugcgggagccgggcuaggacgccgagcggugacuccccgccgcucccgggggcc

SEQ ID NO: 6838 - RNA, 62 nt, Human
ugggagauuggaugacuguuacagauccaggucugucuucaggaaagcaaaacuaucucuca

SEQ ID NO: 6839 - RNA, 81 nt, Human
gccuuuguacccaaugacgguugcuugaacuuuauugaggaaaaugaugaaguucugguugcuggauuuggucgcaaaggu

SEQ ID NO: 6840 - RNA, 78 nt, Human
ggaguugaagccaaacagccaaauucugccauuaggaaguguguaaggguccagcugaucaagaauggcuuuaaaauc

SEQ ID NO: 6841 - RNA, 101 nt, Human
uacuuuguuugacuuggugaacuuaauuugcauuuaugccauuauaccuccuaauuuuuagugaaauucaaaaagaccucaccaaucauacuaacaaggua

SEQ ID NO: 6842 - RNA, 64 nt, Human
cuucuucagcagcccaagcugucaggaucucuuaaguuuuugggacauuuauaugcugcagaag

SEQ ID NO: 6843 - RNA, 61 nt, Human
ucacugaugucuccuuagggaucucuucaaaugagcaggaccaaggaucagacaaagguga

SEQ ID NO: 6844 - RNA, 73 nt, Human
gcucacaaucucugucaucggcugauccaaccguuccuugagcuuggcagcuggcaugaagaaggaauagagc

SEQ ID NO: 6845 - RNA, 65 nt, Human
gcuugcucuaguagccggucugcagaaggaacugucauaguuucacugcccggagguuggagugc

SEQ ID NO: 6846 - RNA, 91 nt, Human
cugcaucugccuccugcggggccuggacagggagggggccagaccacagcggacccuccuccggucauugugcgggccucugaggcugugg

SEQ ID NO: 6847 - RNA, 97 nt, Human
gauggguuggggcgguucuuagagcugagucuuggggccaagggucccugggucugggcugggagacucagucagaaauagguauugcuuauccauc

SEQ ID NO: 6848 - RNA, 67 nt, Human
gggaacucccucggagugccaggaaaggucugucaggcuccucuccgaaguggccauccgagguccc

SEQ ID NO: 6849 - RNA, 69 nt, Human
acuagagaccauccgcucagugggcuacuacagaaacaucuaucagcccccugagggcaaugccucagu

SEQ ID NO: 6850 - RNA, 85 nt, Human
ccuaugacgagacggcaggcaugcugaagaccaucaaccuacagaaugagggcuucaccugcaccauccgcuaccgucagauugg

SEQ ID NO: 6851 - RNA, 76 nt, Human
cuggccgcagggugauauacaaguauggcaaacugucaaagcuggcagagacgcucuaugacaccaccaaggucag

SEQ ID NO: 6852 - RNA, 76 nt, Human
gcagacaaaaugaaagaaaaugagagcagaaaguaagcauuuccagccuaucuaauuucuuuaguuuucuauuugc

SEQ ID NO: 6853 - RNA, 62 nt, Human
gucauuuuggguugccgugcucccaaaacauuuuaaaugaaaguauuggcauucaaaaagac

SEQ ID NO: 6854 - RNA, 63 nt, Human
uaauccuguauauaaaauaaaaaguccacaaugaguuuggggcauauuuuaauggauggauua

SEQ ID NO: 6855 - RNA, 69 nt, Human
gcgcuuccgcaaguuccugguguuuguggcaaacuucgaugagaaugaccccaagaccuuugagggcgu

SEQ ID NO: 6856 - RNA, 63 nt, Human; identical to SEQ ID NO: 722

SEQ ID NO: 6857 - RNA, 60 nt, Human; identical to SEQ ID NO: 723

SEQ ID NO: 6858 - RNA, 86 nt, Human
cgggggaguuguggugcuucugggucucugggccccgccugcuggccugggaugcccucauguugggaagcauuccgugccccccg

SEQ ID NO: 6859 - RNA, 67 nt, Human
gauugaccucccugaagcccaagccaaucugucccagcuccgggaucacuugggacaggaggucauc

SEQ ID NO: 6860 - RNA, 61 nt, Human
ggcguugaccggcgagaaccuggagcagcugcuguugcaccugaaggugcuguaugacgcc

SEQ ID NO: 6861 - RNA, 79 nt, Human
cucgagcggcucgagguggugcuggcugaaggcauccgugcgaaggugcuuucgggguccgcugcugcugcucugugag

SEQ ID NO: 6862 - RNA, 76 nt, Human
guccgggacucagggacuugguggccacgcagcuguccauagggagguugaaugguugcugcacuuugguccggau

SEQ ID NO: 6863 - RNA, 66 nt, Human
cggcaggcagccagcgaggccugcuucuacaacuccgacuacguggcagcccgugggcgccuggcg

SEQ ID NO: 6864 - RNA, 63 nt, Human
uacuuagaguaguaugagcaagcaugggcgccccaaacuuccauacuucacgcuaucuaagug

SEQ ID NO: 6865 - RNA, 79 nt, Human
ucgaugagcacgaugcaauucuucaccagggucuugguacgaaccagcucguuauuagaugcauuguagacaacaucga

SEQ ID NO: 6866 - RNA, 80 nt, Human
aggccuccccucuauccuuaucugucuggucgagucauuccgggccgagugggcaccaucaugggacgggcaggaggucu

SEQ ID NO: 6867 - RNA, 105 nt, Human
gugguuacguuuuccacaggguaaugcauuugcaaggacaucaauccucuuccucuggguggcucucuuugauggaugcauuuccaugaugaaaugacaaggcac

SEQ ID NO: 6868 - RNA, 88 nt, Human
gcaggguucucagcagugaugggagggcaggggaagagauguaaaggcuuugagacuggguucccaucgcuggaaaagaaggcucugu

SEQ ID NO: 6869 - RNA, 67 nt, Human
uugauagaaaauuuguccucaguuguagguuacucuuaaagcagcuuagauugcauguuuucuucag

SEQ ID NO: 6870 - RNA, 66 nt, Human
guggaagugggcuacaacguaguacgugucguggaguacgaugucgagugaugaguuugcuaauac

SEQ ID NO: 6871 - RNA, 85 nt, Human
auuaaucucuuuauccauugcugaacgacugugacuauucaguaacgaaguaauaguaauuaauuaguaugguauaaucuuuaau

SEQ ID NO: 6872 - RNA, 63 nt, Human
gaaucgucucacccgcaguaaccacugaacgucaaucagcccuccaugggguucuuucgauuu

SEQ ID NO: 6873 - RNA, 82 nt, Human
uggugaaguauuuuguuaccucagucuuguaucaaguugcuguauuuuucagcuuguuacauugauaauaauuauuucacua

SEQ ID NO: 6874 - RNA, 69 nt, Human
gcaggcgcagugagucagugccggucggucuugugggcugaggggcagcggcuuagcuccggcgucugc

SEQ ID NO: 6875 - RNA, 79 nt, Human; identical to SEQ ID NO: 5273

SEQ ID NO: 6876 - RNA, 66 nt, Human; identical to SEQ ID NO: 5275

SEQ ID NO: 6877 - RNA, 66 nt, Human
cccugaagccgagaaauguggaaaagcgagauugucuuugaccauuugcuauggacauugucaggg

SEQ ID NO: 6878 - RNA, 73 nt, Human
ccugaaugagaaugucugcgguauuucccgaaauaaguaucccucaaggaugauacuguggaccucacucagg

SEQ ID NO: 6879 - RNA, 90 nt, Human
gaaaggaucaggcuucccuaugaacugcagaaaaugccuaauggaagugcaggaguucaggugcgguacuuagaggaagagagaccuuuu

SEQ ID NO: 6880 - RNA, 71 nt, Human
ucgagaccaucgccaaugaguacagcgacagguguaccccggccuguauaucauugggaucaagaacucga

SEQ ID NO: 6881 - RNA, 70 nt, Human; identical to SEQ ID NO: 4167

SEQ ID NO: 6882 - RNA, 64 nt, Human
aacuuaaacgaaaauugaacauucugacucgaccgaguggaauauuggugaacgauacuaaguu

SEQ ID NO: 6883 - RNA, 75 nt, Human
cccagaggagucgauuccgaagcccgucacacucgcuucaaggacgacgacggcgacgaggaggacgaaaauggg

SEQ ID NO: 6884 - RNA, 64 nt, Human
uacagauucuauucaugaacaaugcuauuucaaagcaauaucaucaagaaauagaggaauugua

SEQ ID NO: 6885 - RNA, 75 nt, Human; identical to SEQ ID NO: 74

SEQ ID NO: 6886 - RNA, 93 nt, Human
gcuguugggucguguaguugaugcccuugguaaugcuauugauggaaaggguccaauugguuccaagacgcguaggcgaguuggucugaaagc

SEQ ID NO: 6887 - RNA, 71 nt, Human; identical to SEQ ID NO: 77

SEQ ID NO: 6888 - RNA, 89 nt, Human; identical to SEQ ID NO: 504

SEQ ID NO: 6889 - RNA, 70 nt, Human
cagcaugcacacagcucucuguaccuuggccaggucuccaccaggcaccacagugggaggcugguaguug

SEQ ID NO: 6890 - RNA, 63 nt, Human
gcauuggugaucucugcuacagaaagcuguucaugguaggcuuucucagcagagaugacaggc

SEQ ID NO: 6891 - RNA, 68 nt, Human
ugccaaccuugaagccaguggggcaccaauccacaaacuggaugcugcgcuugguuuugaugguggca

SEQ ID NO: 6892 - RNA, 85 nt, Human; identical to SEQ ID NO: 3621

SEQ ID NO: 6893 - RNA, 130 nt, Human
augcuugucugauguuguacugagcagauacgaaggaguaggaaggagaaagaaugauucucgcacugucuuaaaauuccuaaugugucucugaccucagcaccuuaauuuuaaauaaucagaguugcau

SEQ ID NO: 6894 - RNA, 66 nt, Human
ggcucuauuacucaggauuggaauucugcugcccuugacuaaggcugccugccgcugagaugagcc

SEQ ID NO: 6895 - RNA, 70 nt, Human
acugugauucaugguaucaagacagugucuacuauauugauacccuuggaagaauuaugaauuuaacagu

SEQ ID NO: 6896 - RNA, 70 nt, Human
uuauuauuucgagaacaauuguagagcuaauacaccuguugcaauuggguuguuuuugauucaaugauaa

SEQ ID NO: 6897 - RNA, 85 nt, Human
uuuaacuaucaaguaagcuuagugaaaaucuccuuaauaugcaaaauaaucauguaagcaugggggauaagccuugguaguugaa

SEQ ID NO: 6898 - RNA, 70 nt, Human; identical to SEQ ID NO: 6185

SEQ ID NO: 6899 - RNA, 75 nt, Human
agggaguaaagauaaucugggcugcuccauaagacagaacaggguagcgggguacuaggcagauuuuagcaaccu

SEQ ID NO: 6900 - RNA, 95 nt, Human
uucagauucuuuucuacauguaugaugaugaagacaguuccuuaaugugaagaauucugucuguuaacauucagucagguuggaauggaucugaa

SEQ ID NO: 6901 - RNA, 95 nt, Human
ucaucaggcauggaacuaucaaaacgacuggcuucaaaaaacaaguuacucuuuacuugacauuugaaggggcgaugaccacuccugccugucga

SEQ ID NO: 6902 - RNA, 61 nt, Human
uccuuuucccauacucaauauaaaagacagcaguucuaagggaagaguagacagggaagga

SEQ ID NO: 6903 - RNA, 79 nt, Human
cacuggauggucuggauucgguucuuggcugggacaaacucgggcugaagcuucaauguggauucauaccacaccagug

SEQ ID NO: 6904 - RNA, 85 nt, Human
ccagagcuuggcauugugcaagauguuggccaggcuaaucaggggcacauccuucaucugguguggcgcauagugcagagccugg

SEQ ID NO: 6905 - RNA, 64 nt, Human
cccgccggccgcuuccgcucccggcgcaggcgcugcagcuuggccagagcggagggggcucggg

SEQ ID NO: 6906 - RNA, 65 nt, Human
cccguggaugugcaaguuguggagagaaggagcaccggguuccugcccagcacugugcuugcggg

SEQ ID NO: 6907 - RNA, 61 nt, Human
gaaggaggcacagaccggggaaauaugacagccgucauuuccaguucucuguguugucuuu

SEQ ID NO: 6908 - RNA, 98 nt, Human
gauguuaaggugaacuugucacuugguauguagguccgacucccaucccagagguggcagugggccuuggcucaagaucaaguuugaacuaaaauauu

SEQ ID NO: 6909 - RNA, 78 nt, Human
ggaggagaggcugguggucuugagcuuuuggccuggaauuccagucugaauuuucaaauauucccugccuccaacccc

SEQ ID NO: 6910 - RNA, 67 nt, Human
cucaacacuuaaauucauaaaauuaagaccauguaaggguauguuuuuagagaaauggaaguuugag

SEQ ID NO: 6911 - RNA, 71 nt, Human
gagagaaagauggucgucuccagcagagaaagugaacagcauuuguuggaaggugauggcucucccuccuc

SEQ ID NO: 6912 - RNA, 60 nt, Human
guaacguaaaguguauucuguacauaauuuacaaauaaaacauuuuauuuuaauuguuac

SEQ ID NO: 6913 - RNA, 79 nt, Human; identical to SEQ ID NO: 728

SEQ ID NO: 6914 - RNA, 73 nt, Human
uucagacccucgaggauucggucauaucggaauugcuguuccugauguauacagugcuuguaaaagguuugaa

SEQ ID NO: 6915 - RNA, 81 nt, Human
cgggcgcaggguguccgagccgcugccugugcuuccgcaccaccgugcgcugcaugcaucugcugcuggaggccgugcccg

SEQ ID NO: 6916 - RNA, 83 nt, Human
gagcgggcgugcauaugcgguggcgggugggguggaagggggagauccugcugcacuggccgccaaguaugaggggcgagcuc

SEQ ID NO: 6917 - RNA, 101 nt, Human
gggcgagcucgguggugacgcgcggcccucacgugacccagagcugcagagcgacgcagccuucggugcagucgucacucgcgucuggcuaccagcucccc

SEQ ID NO: 6918 - RNA, 61 nt, Human
aacucaguuucuaagguucucuggaguccccuuggucagcagagagucuguucacuugguu

SEQ ID NO: 6919 - RNA, 85 nt, Human
caugcuguuggauuggcaccugcugcacacgcuacagauccggggcuucaugcugcugacucuuugcuuguggccaguccccaug

SEQ ID NO: 6920 - RNA, 67 nt, Human
ggcugacauggcuuuagauccuguuuaugauuugguaucuuauugucacaaaguuguuccgucaguc

SEQ ID NO: 6921 - RNA, 62 nt, Human
cucaacacacuagcgcgcaguccgagagggccggagaucgggacucgcgccacugugauggg

SEQ ID NO: 6922 - RNA, 69 nt, Human
gggcggguggcguuccggcacuauugugaugaggcgccccucuaccuacaauaaccucgucgcccgccc

SEQ ID NO: 6923 - RNA, 74 nt, Human
ggugauagcgugcuuccgcacggcgagcccgcauaaaugauccgccgggcgauauacgagcgauguuuaucacc

SEQ ID NO: 6924 - RNA, 76 nt, Human
cagaucccggaaugccugaaccaacuguuuugagccuacuuuggggauaacaggauuauuuggucuucuggauuug

SEQ ID NO: 6925 - RNA, 64 nt, Human
cuauaugagggaggaccggauuuauacauuuccagaaugaagcccgggguuuaaccugguuuag

SEQ ID NO: 6926 - RNA, 87 nt, Human
gcugugguugcuguaagggguccucccugcgccacacggccgucgccauggugaagcugagcaaagaggccaagcagagacuacagc

SEQ ID NO: 6927 - RNA, 100 nt, Human
ugggacaucauucagucacuagguuggauggcacaaggcucuucacagacgcaucuguagcagaguggaucuuguacuaacuuaugauagaaguguauca

SEQ ID NO: 6928 - RNA, 81 nt, Human
aaaguccuacgugacugauuuuaaacauugugauaaaauuaauuuucaguauaauaguugaauguguuaagauaggauuuu

SEQ ID NO: 6929 - RNA, 71 nt, Human
aguaccguuuuugagguucaguccuuaaacauuugcuuuaagaaaacaggcuugaauuucacaaugcugcu

SEQ ID NO: 6930 - RNA, 72 nt, Human
gaaaauuuucucccuuuuccuuuuucuuaagaaugaacuuucuuggcccuggagaacaaaaaaaaaauuuuc

SEQ ID NO: 6931 - RNA, 68 nt, Human
gagaugggguuucaccauguuggccaggcucgucucgaacuccugacuucaggugauccacccaucuc

SEQ ID NO: 6932 - RNA, 95 nt, Human
aggggacaacugugcuggugcugucuuuugcaggauguguuuaccacaucuaaugcaacuauuuucagacuuuacaguuuguaguguuaaccucu

SEQ ID NO: 6933 - RNA, 89 nt, Human
auuuggaucaucuguugagacgggugcgugaaaaguacuugugggguggaggucacgcgcuugucgcucguaauuauagauguacggau

SEQ ID NO: 6934 - RNA, 70 nt, Human
gcccgcucauaaggggauggccauggcuagguuuauagauaguugggugguugguguaaaugagugaggc

SEQ ID NO: 6935 - RNA, 63 nt, Human
guugucgugcagguagaggcuuacuagaagugugaaaacguaggcuuggauuaaggcgacagc

SEQ ID NO: 6936 - RNA, 71 nt, Human
gucuggaccugggacccacugcagauuauguuuuuccugacuuaacugagaaggcagguuccauugaagac

SEQ ID NO: 6937 - RNA, 71 nt, Human
caucuccuacaauaggaaguaagguagaagagauagugauuaauaauacacguuuccuaaugugggauaug

SEQ ID NO: 6938 - RNA, 89 nt, Human
uuagaaaggcuaguuuuagcuuccuuuguggcucccuggugcaaaacaauuagcaguuaugcaauggaccugauucuaguuuauucuaa

SEQ ID NO: 6939 - RNA, 76 nt, Human
caaagcgggccgcccgagcguccacuccaagccugagcauccacacaauuccagugggcccucggugccugcugug

SEQ ID NO: 6940 - RNA, 84 nt, Human; identical to SEQ ID NO: 286

SEQ ID NO: 6941 - RNA, 103 nt, Human; identical to SEQ ID NO: 294

SEQ ID NO: 6942 - RNA, 65 nt, Human
gaggugauugggggagcagacaaguaccacuccgugugucggcucugcuacuucaagaaggccuc

SEQ ID NO: 6943 - RNA, 64 nt, Human
gauaugcuauaguuuagagucucauuaggaagcgcuaccguucaugcuuuacucugugcaucuc

SEQ ID NO: 6944 - RNA, 120 nt, Human
gguggggaccccgggccgcauccuggcgcucgugcggaauaggagcuucagccuaaagaaugugaagcacuuugugcuggacgagugugacaagaugcuggagcagcugggcuccccucc

SEQ ID NO: 6945 - RNA, 65 nt, Human
aaacuauguacaagcuacaaaauagcaucucuuucaugguauguuugaguguguaauuuuaguuu

SEQ ID NO: 6946 - RNA, 82 nt, Human; identical to SEQ ID NO: 5380

SEQ ID NO: 6947 - RNA, 60 nt, Human; identical to SEQ ID NO: 723

SEQ ID NO: 6948 - RNA, 93 nt, Human
ggccaugugagccaccgcugccagcacagagcguccuucccccuguagacuagugcccguaggacguaccuguugccccagcugacuguggcc

SEQ ID NO: 6949 - RNA, 75 nt, Human
uggaaagcggaguuccuaacaggauaaaaguucccccaucaguucccccaguaccuccaagcaaguagcuuucca

SEQ ID NO: 6950 - RNA, 63 nt, Human
ccgggucacccugguuugugaguugccccgggaccauucaccauggaccuuauggagaucugg

SEQ ID NO: 6951 - RNA, 60 nt, Human; identical to SEQ ID NO: 5112

SEQ ID NO: 6952 - RNA, 63 nt, Human
caucacgccagucauuuuauuuccaucaucauccuugugaagaaauggaagucuggagaggug

SEQ ID NO: 6953 - RNA, 66 nt, Human
gcauuuuccaaagcaaacccaacccucgugauuauuucuagccagggugaagcuaaggaagguagc

SEQ ID NO: 6954 - RNA, 73 nt, Human
aaaugagaguggccacaagucuucuacagucuccuuagagagcucuagagggguuggaugguccuauuuauuu

SEQ ID NO: 6955 - RNA, 92 nt, Human
cuuguacccugaaaucuucugcugucccaccuugacugccccaaacuuggacugucucagccuugccaggguuauaguaggcaggucacagg

SEQ ID NO: 6956 - RNA, 68 nt, Human
cuguaaucccagcuacucgggaggcugaggcagaagaauugcuugaaccugagaggcggagguuacag

SEQ ID NO: 6957 - RNA, 62 nt, Human
guggguccagggggccaaugcuaguauagaggcugugaaggcccugaacucugggagcccac

SEQ ID NO: 6958 - RNA, 68 nt, Human
uaaacaaagaagcagguggugaggacgugcuggucaaaaggaagcagucacaucaaguguuuaguuua

SEQ ID NO: 6959 - RNA, 111 nt, Human
gccugacccuuaacgcccucggagcggccuucuuauuuuucuugaugauguugaugccccacgggguuuugggggcugcagcacugucauccuugcucccugcgggcaggu

SEQ ID NO: 6960 - RNA, 89 nt, Human
gcuucuugcugaucagagcuugguuggcacagccgggguccucgcccucggcccugcuguucucccggaucgcucugauccagcccagc

SEQ ID NO: 6961 - RNA, 80 nt, Human; identical to SEQ ID NO: 4151

SEQ ID NO: 6962 - RNA, 61 nt, Human
gcuagagcugagcgaagcgaugccuaaaucaaaggaacuuguuucuucaagcucuucuggc

SEQ ID NO: 6963 - RNA, 79 nt, Human; identical to SEQ ID NO: 4153

SEQ ID NO: 6964 - RNA, 92 nt, Human
ggcuguuucacaggccuggccacgcucucacggaaccacuggcaucagauggugaagugacugcuacccgguugccaucuguugaacagacu

SEQ ID NO: 6965 - RNA, 84 nt, Human
ugcuggcuuuuauguaugauaccuaaucagagcauugaccagaaaaauugaaaguguucugaggcacauagcagaggagcugca

SEQ ID NO: 6966 - RNA, 61 nt, Human
uuuccugcuuguauuggcguauaucguuccuccugagcagcaacccacaguagguaggaaa

SEQ ID NO: 6967 - RNA, 112 nt, Human
aggcucugagcagucaggguggaugggaaguggggggccauugccuucucggaguucaggacagaagguucuggccuccugucuuagccuuccugggcugugucuggagccu

SEQ ID NO: 6968 - RNA, 91 nt, Human
guuagaguugaggguacugaggcccaaggcuguccugcuccaugucacccaguuggucagggggcugcuggcugagccccaaugcucugac

SEQ ID NO: 6969 - RNA, 65 nt, Human
cguggagcugggccgaaccacguguaccaagacccagcccaacuuggacaacugccccuuccaug

SEQ ID NO: 6970 - RNA, 123 nt, Human
caguucacccaggcccuggaccgccaaacagcuacucagcugcuuaagcuggcccacaaguacagaccagagacaaagcaagagaagaagcagagacuguuggcccgggccgagaagaagcug

SEQ ID NO: 6971 - RNA, 60 nt, Human; identical to SEQ ID NO: 2705

SEQ ID NO: 6972 - RNA, 72 nt, Human; identical to SEQ ID NO: 1989

SEQ ID NO: 6973 - RNA, 95 nt, Human
cgcgggcuagggagcgugggauuccggacugugagcggcuguuagugcgucgcagcugcuggcgauccggcgacccucggccggcaggacccgcg

SEQ ID NO: 6974 - RNA, 71 nt, Human
gagcuggaggagcucacggugcagguggcccgggucuauaaugggcggcucaaggugcagcgccucugcuc

SEQ ID NO: 6975 - RNA, 61 nt, Human
gcccgccaagggaacugaaaaaaaaccgaaagaaagcuuuucaaaaauuaccguggggggc

SEQ ID NO: 6976 - RNA, 69 nt, Human
caaauugcgcuuaagaaaaauacuacgagaauugagaauuuuuuaacguaacuuccuaaguguaagaug

SEQ ID NO: 6977 - RNA, 70 nt, Human
gggagaagggggcgagccugcgggcggaagaggaagcaaggcccucuuccuccacgucucaccccagccc

SEQ ID NO: 6978 - RNA, 63 nt, Human
gggccaucggcuggccugccagauccccaacacaaaggacacgaggauacgcagcaagagccc

SEQ ID NO: 6979 - RNA, 110 nt, Human
guguugaccguuccucuccccuguacauagcccgagccaguccugagugggugacuccugagugggugacgcgcagacgggauuucucaggucauuuguauggucgacau

SEQ ID NO: 6980 - RNA, 76 nt, Human
accaaggacacugaccccaagcuguccugccuagcguccagcgucuucuaggaggguggggucugccuguccuggu

SEQ ID NO: 6981 - RNA, 66 nt, Human
ggcugguugccucaagcucuucucugccucauaaacggauccagagaaggcugguugccuuaagcu

SEQ ID NO: 6982 - RNA, 82 nt, Human; identical to SEQ ID NO: 6291

SEQ ID NO: 6983 - RNA, 87 nt, Human
ccucuggcccuuccugggcaucguggcugaggugcuggugcugggucaccaucaucuucaucuacgagaagcgccggaagcccgagg

SEQ ID NO: 6984 - RNA, 121 nt, Human
gcuggaggacugcuucaccuuccugggcaaucuuccuggccaucauccucuuccccuuuggguucauuugcuguuuugccuugaggaagcgacgaugccccaacuguggagccaccuucgc

SEQ ID NO: 6985 - RNA, 64 nt, Human; identical to SEQ ID NO: 6321

SEQ ID NO: 6986 - RNA, 60 nt, Human
ugucucuucugguggagcugugccuggcccuguaggcccagguuuggcuggaaggugaca

SEQ ID NO: 6987 - RNA, 66 nt, Human
uuggagacgggaguggcccuucggcucccgagcucccucuggggacggcuggcucacugucuccag

SEQ ID NO: 6988 - RNA, 103 nt, Human
acgucuaacuaacuuaaaugaaguauaauaaaugaguucauaugaaaaggcuuccucuauggacacuuagauauauuguaacuauugaaguuaccugggaugu

SEQ ID NO: 6989 - RNA, 95 nt, Human
uccaguauugagaccaguucacuagaagaaacaaacauuucugccaugcagacccaaaaaguuauuaguuggugaauauguauuuucucuuugga

SEQ ID NO: 6990 - RNA, 76 nt, Human
uuaguuucaacaccagauugaaaugguuugccaucugcuucguauguggcguuuucuuuucuauucuuggaacugg

SEQ ID NO: 6991 - RNA, 71 nt, Human
ggucacgaccacggugcuggugaggagagaucaccauggagccaauuucucgugccgcacugaacuggacc

SEQ ID NO: 6992 - RNA, 61 nt, Human
cacucaccaccaacuaugcccccgggugaaugugccggaggcccuagaacaaggugaagug

SEQ ID NO: 6993 - RNA, 101 nt, Human
cuggugacggggccauggacugaagggugaccaaagugcauaguguguccucccacggagaacgcgccaaaggguagccccgggcguguccuguacggcag

SEQ ID NO: 6994 - RNA, 79 nt, Human
gggaggggugcgcagcaaugugcgugacaaaugacggacucugucuugaguguugcgccucggcuccggacccgcuccc

SEQ ID NO: 6995 - RNA, 87 nt, Human
cccagagccagagcugcuugugcgcugguaccagaugggugcuuaccagccauuacuuccgggcacaugcccacuugggacacuggg

SEQ ID NO: 6996 - RNA, 101 nt, Human
gccguguggacaggggacaacacugccgagugggaccauuugaagaucucuauuccuaugugucucagcuuggggcuggugggacuuuccuucuguggggc

SEQ ID NO: 6997 - RNA, 70 nt, Human
gccuugggccagcgauauucuuagguugccuucugguaaacccucuuauaucaggggccaucggaaaggc

SEQ ID NO: 6998 - RNA, 70 nt, Human
uccuggucaugaaggcccugugggugcagaacccucaggaugugaauaccuucaauauagaugaucagga

SEQ ID NO: 6999 - RNA, 71 nt, Human
caugaccacaguccaugccaucacugccacccagaagacuguggauggccccuccgggaaacuguggcgug

SEQ ID NO: 7000 - RNA, 78 nt, Human
ggucguaugggcgcuggucacaggcugcuuuaacucugguaaaguggauauugugccaucaaugaccccuucaugacc

SEQ ID NO: 7001 - RNA, 65 nt, Human
uggggcucauuugcaggggggagccaaaagggucaucaucucugcccccucugcugaugccccca

SEQ ID NO: 7002 - RNA, 130 nt, Human; identical to SEQ ID NO: 2385

SEQ ID NO: 7003 - RNA, 71 nt, Human
agcccaggugaccuucucugaggagucugcaguuccugagaggagcuggcgccucaggccauaccugggcu

SEQ ID NO: 7004 - RNA, 86 nt, Human
guaucugcagccauccugaaccccaguugccaggccugcgugagagcaguggcagcggcguggaggaagaccaugaaugcguguac

SEQ ID NO: 7005 - RNA, 61 nt, Human
cacagcaacucccuguuuccugcauauuucuugcaggucucugaagaugucgaugucugug

SEQ ID NO: 7006 - RNA, 69 nt, Human
aagguauaguaguugguggguaaauagaaacccuguuguacucuguugcugacuaauugugguuaccuu

SEQ ID NO: 7007 - RNA, 106 nt, Human
guggguacaaggaagccugguugaagucuuuuccuugagaggccuggauuuguucacauauucagauuucaacuggcuuuauaacagguuuccuuaugugccucau

SEQ ID NO: 7008 - RNA, 81 nt, Human
aggaagacacauagguggguuuauguuucaccucauuuggaacaaaagaggacagaagcagaccacucugugcaccaaccu

SEQ ID NO: 7009 - RNA, 83 nt, Human
cugaaguaugggugccuugaggaaaagcaguuacacaguugaguugcaagcugaauuggcuguguucaaggcaugcccuuuag

SEQ ID NO: 7010 - RNA, 68 nt, Human
cuguaauuccagcuacucgggaggcugaggcaagagaaucgcuugaauccgguagguggagguugcag

SEQ ID NO: 7011 - RNA, 70 nt, Human
agaccaaaacagacagacaaguccagcagaagcagaugcaccugacaaaaauggauguauuaauuggucu

SEQ ID NO: 7012 - RNA, 63 nt, Human
gagaauguuaucuagacagcagugcacuccccuaagucucugcucaaaaaaaaaacaauucuc

SEQ ID NO: 7013 - RNA, 65 nt, Human
aucagucuuaucaccuuucucuugguuuccauucauuugucucuccagagagugggaaggcugau

SEQ ID NO: 7014 - RNA, 64 nt, Human
cacuuguaauccccccuguacuuaccuacucacauuggagaguucugaggccggaguaacugug

SEQ ID NO: 7015 - RNA, 86 nt, Human
gaaauagaacaaaauaguaugugccguagguagcuuaagaaagucucagauauuuuguugcugaucaaauacuguuuuuuuguggc

SEQ ID NO: 7016 - RNA, 66 nt, Human
gcaaugccagguucaguagccguccccccggaaaggggugaccuuuaugcucgugcuugauguugc

SEQ ID NO: 7017 - RNA, 70 nt, Human
ccccaggaguccacugauuucucaucuuccucccaagaggcauuugcagcuucugcagugggcagugggg

SEQ ID NO: 7018 - RNA, 61 nt, Human
ucgaggagguggcccuguauucccagccccugucguuggcaguggaggggccacaucugga

SEQ ID NO: 7019 - RNA, 70 nt, Human
ugcucagaacacaugaagugcagcaccacagaacaaacgggagcccgaagcaggcacaaaugcaugagca

SEQ ID NO: 7020 - RNA, 65 nt, Human
ggguagguuuccuauuugaaacaguggaaucauguuuccagugauaaaguuuaaugaccucaucc

SEQ ID NO: 7021 - RNA, 66 nt, Human
gacuuguucaucuuguuuuuccuuggcuucaacagccuccaauucuucaauaaauguagccaaguc

SEQ ID NO: 7022 - RNA, 68 nt, Human
gauggacucuuucuuuuuaauguguccagcucuuguucuuuuucauuucuuagccugcagaguucauc

SEQ ID NO: 7023 - RNA, 75 nt, Human
uuuuucuuuucugccucugcuuucauuucuaugguuauucguggaaugacucuuugaccacgcggagaaggcaaa

SEQ ID NO: 7024 - RNA, 97 nt, Human
uuccggagcauaugauuagaguuggauuaguuaccacuggauggaacuaucgucuucucagguagcaaauuccucccuguaaaaaucuguuuaggaa

SEQ ID NO: 7025 - RNA, 75 nt, Human
ccaaucccagccaaagaaugcuccuguuaccuucauuguggauggagcaguagucaaguuuggccaggguuuugg

SEQ ID NO: 7026 - RNA, 65 nt, Human
ggagaccugaaggcauugaacgacaguacaggaagaaaugugcaaaguguggacugccgcucuuc

SEQ ID NO: 7027 - RNA, 101 nt, Human
uuuuucccgacccccuuuuuuuuuaaaaaaggggcccccaaaggggggccuuuuaaaaauuaggcccgggcccccuuuuuaaaacccgggggggggaaaaa

SEQ ID NO: 7028 - RNA, 62 nt, Human
gaaggaguuucuuccaaacuucaccaucuggauacugguguuucuuuacagauuccuccuuc

SEQ ID NO: 7029 - RNA, 69 nt, Human
gccuagacuuaggggcacuaguuucagaaaaaaaugaaacuauauauauuuccauguuuuuuccaaggc

SEQ ID NO: 7030 - RNA, 79 nt, Human
auucugaguuguuggugccugcccuuccccugaaucuaagaacugauuaguggguuagacugcaacagcagcucaggau

SEQ ID NO: 7031 - RNA, 74 nt, Human
gagcaaucaaagcguuaucugcaaagcaauucgcuucuuauugauuuugccauaaccacgcuuggagauaguuc

SEQ ID NO: 7032 - RNA, 73 nt, Human
ggacggaggcaauaaauacugauggccaagcggggcuccuggcugggcccaaguggggugggugaggcugucc

SEQ ID NO: 7033 - RNA, 80 nt, Human; identical to SEQ ID NO: 788

SEQ ID NO: 7034 - RNA, 62 nt, Human; identical to SEQ ID NO: 1277

SEQ ID NO: 7035 - RNA, 62 nt, Human; identical to SEQ ID NO: 4194

SEQ ID NO: 7036 - RNA, 67 nt, Human; identical to SEQ ID NO: 4195

SEQ ID NO: 7037 - RNA, 71 nt, Human
ggcaacgacguguuacccguggggaauuagcaggcgcucugaacgcaugcacggaggacacgcccauugcc

SEQ ID NO: 7038 - RNA, 74 nt, Human
gggggcgcgcuuuuuuacguuuccgcaaaagaccacccuuuucauccgcgggcaaacuauaggcguaugcuccc

SEQ ID NO: 7039 - RNA, 131 nt, Human
ugggggggcuuuccaaauuggagaaccaaucuuuccuuuccgcguuuggacucacuuuggcggcaccgcuaaccacaacgaggcggcgggaaugaggcgggugaggcaaccaauuuggggccccgaaccca

SEQ ID NO: 7040 - RNA, 88 nt, Human
ggagaaucacuugaacccgggaggcaaagguugcagugagcugagaucgugccacuguacugcagccugggagacagagugagacucc

SEQ ID NO: 7041 - RNA, 99 nt, Human
ggcaccucuagaaguauacgugugugucuccaaccaggugucagaagccagauauguuugacaaccacucugucuggaggccugcacacuuaugguguc

SEQ ID NO: 7042 - RNA, 61 nt, Human
ggccaucaccaugcaguucacuuuugcagugcccacuuuaaaggagugcugguggaugguc

SEQ ID NO: 7043 - RNA, 61 nt, Human
guccugcacaaucaaauccgugacacuggagcagugggcugugagcugcuuguugcaggac

SEQ ID NO: 7044 - RNA, 72 nt, Human; identical to SEQ ID NO: 3662

SEQ ID NO: 7045 - RNA, 68 nt, Human
gauggcuuauuuguuuuguauucaaugauugucucuccccauucauuugucuuuuuagagcagccauc

SEQ ID NO: 7046 - RNA, 90 nt, Human; identical to SEQ ID NO: 1501

SEQ ID NO: 7047 - RNA, 77 nt, Human; identical to SEQ ID NO: 2332

SEQ ID NO: 7048 - RNA, 64 nt, Human; identical to SEQ ID NO: 287

SEQ ID NO: 7049 - RNA, 89 nt, Human; identical to SEQ ID NO: 288

SEQ ID NO: 7050 - RNA, 85 nt, Human; identical to SEQ ID NO: 866

SEQ ID NO: 7051 - RNA, 62 nt, Human
gaggcgggcagaucacgaggucaggagaucgagaccauccugacacggugaaacccugucuc

SEQ ID NO: 7052 - RNA, 72 nt, Human
gucuucuaugaaaaggcugauaaugggcugggcgcgguggcucacgccuguaaucccagcacuuugggaggc

SEQ ID NO: 7053 - RNA, 72 nt, Human; identical to SEQ ID NO: 3662

SEQ ID NO: 7054 - RNA, 74 nt, Human; identical to SEQ ID NO: 365

SEQ ID NO: 7055 - RNA, 102 nt, Human; identical to SEQ ID NO: 2172

SEQ ID NO: 7056 - RNA, 77 nt, Human
uucaguuaaaaaagaggaagaagaaauggcaaagagaaaguuuuuucaaauuucuuucuuuuuuaauuuagauugag

SEQ ID NO: 7057 - RNA, 92 nt, Human
gcccauuuaauugaaaguauauaguaaugaaaagccuuauaacgucgggccucuagcaaugcgauuauauagcaaugauuauaaagcugggc

SEQ ID NO: 7058 - RNA, 93 nt, Human
ucccugacccuccuuuuuguuugccaaucuggauauuaucuaaacaacacaauuagacuaauaugcccuauggcuggaaauugagacuaggga

SEQ ID NO: 7059 - RNA, 63 nt, Human
cccuggagcuggggggcaagaaccccuauaacguggacgaacauugcgacccccagaacgggg

SEQ ID NO: 7060 - RNA, 89 nt, Human
gcgguggcugguucugcuacuuaauggcggcaagacugguuggcccugacuacgucugugaagcccgagaugcaggaagguguggccgc

SEQ ID NO: 7061 - RNA, 91 nt, Human
aggaaaaacuuauggcauguauagugagguuaaggacuugcaugucccucgcgaugguuuccuuccccuuauucuuacugcucaguguccu

SEQ ID NO: 7062 - RNA, 62 nt, Human
gaucucguuggcgcccguaauccgcuaccaggaagccuagggagguauacgagggacgaguc

SEQ ID NO: 7063 - RNA, 96 nt, Human
agccauccuaggggucuggugugagggaaucaagaagaaccaaacaagggcugggcuugguggcucacgccuguaaucccaucacuuugggaggcu

SEQ ID NO: 7064 - RNA, 66 nt, Human
agguggguggaucgccugaggucaggaguucaagaccagccuggccaacauggugaaacuccaucu

SEQ ID NO: 7065 - RNA, 72 nt, Human
ccgggcauaguggugcaugccuguaaucccagcuauuugggaggcugaggcacaagaaucacuugaacuugg

SEQ ID NO: 7066 - RNA, 88 nt, Human
agguauaauucagagacuguccuuugcaaaggaaaugaccagcauuucaacuguaugucuuccuggaaggguagauucugcuauaucu

SEQ ID NO: 7067 - RNA, 65 nt, Human
aucuucugguucaaagaacacaucagaugcaaggauaauaucuuguggugguagagccagaagau

SEQ ID NO: 7068 - RNA, 67 nt, Human
ccauuuguagaguaaagcuucaagugaccagucagcacuccuaacuugauaaguagaccacaauugg

SEQ ID NO: 7069 - RNA, 73 nt, Human
ggcaaacagacuugaccaucuucagacccacugcauucucaagcugaaguggucugcucauaguuugugugcc

SEQ ID NO: 7070 - RNA, 84 nt, Human
ggcgccuaugggcaggcggugcgcuaccagggccgcgcgcaggccgugcugcagcaguaccaacaccugcccucguuccgcgcc

SEQ ID NO: 7071 - RNA, 70 nt, Human
guucaucucagcaacagacaccauccggaagaugaagaacgauuuccggaagauggaggaugagauggac

SEQ ID NO: 7072 - RNA, 75 nt, Human; identical to SEQ ID NO: 74

SEQ ID NO: 7073 - RNA, 71 nt, Human; identical to SEQ ID NO: 77

SEQ ID NO: 7074 - RNA, 67 nt, Human
gcaguuauuuuuaaaacuuuauuuuaaaaauaugagcaucuauuuuaaaaguuuugauaauuauugc

SEQ ID NO: 7075 - RNA, 62 nt, Human
gcaguuuuaauucugaagacaaauaucuucauggaaaucuauuuguaagcuucugagauugc

SEQ ID NO: 7076 - RNA, 80 nt, Human
uauaccaauuccccuuuacaacugaugcagaucauuaugaaauacuggaaggcauacccuacaauuuaggaauuggugug

SEQ ID NO: 7077 - RNA, 66 nt, Human; identical to SEQ ID NO: 6981

SEQ ID NO: 7078 - RNA, 86 nt, Human
agaacuauugagaaauugauuaaugacaugagggcacaacacuaauuacuggcccgcuguuggcauugggguucuuaacuaguucu

SEQ ID NO: 7079 - RNA, 78 nt, Human
gcauuauuuuauccuauaucucacugaauuuuaagaaauaacauuaguauuagaaaaacuaggaaaaaagauaaaugc

SEQ ID NO: 7080 - RNA, 84 nt, Human; identical to SEQ ID NO: 286

SEQ ID NO: 7081 - RNA, 61 nt, Human
gucucaugagcuaugcacaaaugucuuuaucaauuuacauuucaaauauaguuuuaaugac

SEQ ID NO: 7082 - RNA, 61 nt, Human
guaaaccuuaguagagaugcgacucacggagaccaaaaguaaaaaucucuuuaccguuuac

SEQ ID NO: 7083 - RNA, 72 nt, Human; identical to SEQ ID NO: 5020

SEQ ID NO: 7084 - RNA, 60 nt, Human; identical to SEQ ID NO: 5021

SEQ ID NO: 7085 - RNA, 82 nt, Human
caggagcccguggccacagccaugccaucgucggugaccccgaggcagcucacgcgguugucguggccagcgaggacuccug

SEQ ID NO: 7086 - RNA, 77 nt, Human
cccaaggccccguggcccggggaagggggcugggauugcgccagccccgcagcccuggccuguagugugggcauggg

SEQ ID NO: 7087 - RNA, 94 nt, Human
gugaggggagcugugccuggauccugccuccaagucacaugagcacuagcucauaguggcagggugggggugggaggggcaggucuaaacucac

SEQ ID NO: 7088 - RNA, 72 nt, Human
gucugggccagaugcccugccaggaaagggacauggacccacgugcuugaggccuggcagcugggccaagac

SEQ ID NO: 7089 - RNA, 66 nt, Human
gggugagaggcuggugguugccucccguccugggcaggcugcagccucaugccaugucucucuccc

SEQ ID NO: 7090 - RNA, 99 nt, Human
ugaugggcacauggacaggcugcagagggcuccagguucugggccccuggcugagaaggggaggauccuguccuggcuguagccuuccugccccaauca

SEQ ID NO: 7091 - RNA, 77 nt, Human
cccgaggaaagcacuguugagaugaugguagagcaaaucaaucuaccagcguucuuuugaguucuguggacuuuggg

SEQ ID NO: 7092 - RNA, 61 nt, Human
cgcccacguccaccucugguuuggggacaaaagcuuguccuggaauuguaaagaugugucg

SEQ ID NO: 7093 - RNA, 72 nt, Human
gcagagguacugagccauaacagagaggcgacuacgcuguuugcuuccuguauuggcugcaagucucucugc

SEQ ID NO: 7094 - RNA, 98 nt, Human
ucuucgcuugaguucuucucugaaauuauaugcaaagaguugugggucuucaucacacauuuuucuguauacaucacagaggcucuuaaagugugaga

SEQ ID NO: 7095 - RNA, 68 nt, Human
uggagagcuggcggggcgaagaguagggucuaugucugccaacucuaacagccugcccgugcuuucca

SEQ ID NO: 7096 - RNA, 83 nt, Human
gcguuggcagcggaugcgggaagccggacucugggcgucauguacuacaaguuuaguggcuucacgcagaaguuggcaggagc

SEQ ID NO: 7097 - RNA, 72 nt, Human
gucagagcucauucgacaguuaaagccauuguuuaaagaaauggugcuuugcucuguguuugugcuccugau

SEQ ID NO: 7098 - RNA, 79 nt, Human
ucauuguuaaauuaaaauuuuuuuuuuuacuuggauggcuuaacauuuuugcaagaaaaauaggaagauaugaagauga

SEQ ID NO: 7099 - RNA, 70 nt, Human
ucccuggagguucuggaugaaggcugaacacaggcuuguuaaugucagucugugcugaggaccucaggga

SEQ ID NO: 7100 - RNA, 63 nt, Human
uggcgcugacugugggagggaccaucuacugccugaucgcccucuacauggcuucgcagccca

SEQ ID NO: 7101 - RNA, 102 nt, Human
caggcgagcaagacaguauacuuaagggguugcaaagcuugggacuggaaauuguuuaguucuugaaacaaaauacuucuuuaagguugcuuuugcuguuug

SEQ ID NO: 7102 - RNA, 63 nt, Human; identical to SEQ ID NO: 527

SEQ ID NO: 7103 - RNA, 69 nt, Human; identical to SEQ ID NO: 528

SEQ ID NO: 7104 - RNA, 91 nt, Human
uucccaaugcuacacaaccagaaaguaagguguucuacuugaaaaugaaaggacgauuauuuuagguaucuuucugaaguggcaucuggag

SEQ ID NO: 7105 - RNA, 65 nt, Human
ccggugcugcgcgcugggcugagguuauggcucgcuucgcggccaggcugggcgcgcagggccgg

SEQ ID NO: 7106 - RNA, 81 nt, Human
gcgggcggcgcggugcaaccucggccgaggccuuccuagccgccggcuacggguccuguucuuguaucgcgcucgcucugc

SEQ ID NO: 7107 - RNA, 78 nt, Human
ucuguugcaggcugcggcccaggcacucaauccgcuaggcccuucugcgauguuuuaccuggcugcggcugugucaga

SEQ ID NO: 7108 - RNA, 67 nt, Human; identical to SEQ ID NO: 1261

SEQ ID NO: 7109 - RNA, 76 nt, Human
uggccaagggccgcggccgcggaggccugcagcagcagaagcagcagaaaggccgcggcaugggcggcgcuggccg

SEQ ID NO: 7110 - RNA, 75 nt, Human
ggccaccaacacauggcccagccagugcugcugggcucugguuucuguguucuggugaggccaugggguggggcc

SEQ ID NO: 7111 - RNA, 86 nt, Human
uuguccuucauauacugcuccugaaaaaugcucaagucuuccaaaaccauucaucuugucaucuuuccagcuuccuguguagacaa

SEQ ID NO: 7112 - RNA, 101 nt, Human
uauguuucuaaaaaaguuuaguucuaaagaucagagaaaaagcaugacacaaagcguuuugacuauuuuaugaauaugugaauugaaagagaauguacaua

SEQ ID NO: 7113 - RNA, 91 nt, Human
guguuucuaaaccuaaaaccuaucuucuuucauaucucucauugcuaggugugaauauaagaagaacuuaaagguagaggcauaggaagac

SEQ ID NO: 7114 - RNA, 70 nt, Human
cacauccugggcuauuggacucucuguagcagauuuggcagagaguauaaugaagaaucuuaggcgggug

SEQ ID NO: 7115 - RNA, 69 nt, Human
cguuugaagaagagugcagauacacuuugggggauccaaaaggagcugcaauuuuaaagucuucugaug

SEQ ID NO: 7116 - RNA, 99 nt, Human
ggcacugucuuugcccgcauggccccugagcagaagacagagcuggugugcgagcuacagaagcuucaguacugcgugggcaugugcggagacggugcc

SEQ ID NO: 7117 - RNA, 61 nt, Human
gggcccaccuuugguaucauugugaagcacuuccccaagcugcugcccaagguccuggucc

SEQ ID NO: 7118 - RNA, 61 nt, Human
ucauucuuuggaacacuacaucuuggaaacaggugcagaacucuaguuuuccacaguuuga

SEQ ID NO: 7119 - RNA, 64 nt, Human
cauccuggagcaucucccgccaagucuccuguccagaccuaagcugagagaacacuccacgaug

SEQ ID NO: 7120 - RNA, 77 nt, Human; identical to SEQ ID NO: 3323

SEQ ID NO: 7121 - RNA, 79 nt, Human
cucugugaccgacggccggggccuucugacggucugaggucuugcuugggccagucaccuccugucacgguccgcggag

SEQ ID NO: 7122 - RNA, 71 nt, Human
gaggagcgguagcuuuugggaagcaggacguucucaccaggagagcguccucucgagauuucugcucccuc

SEQ ID NO: 7123 - RNA, 79 nt, Human
gggcuucuugggcgcaggucggagcugggugggccggcuccccggccccuggcuugggcgaccauguccgcauccgccc

SEQ ID NO: 7124 - RNA, 75 nt, Human
gcgcagaguuacuuccaguagcuggguccucauuccacgaggagcccaaauauaggaagauaggcgacucugggc

SEQ ID NO: 7125 - RNA, 76 nt, Human
ggcaggcauucacccucaggaccaggcaagugcagagucagcaguccuguuccuggguauggaguccuguccugcc

SEQ ID NO: 7126 - RNA, 86 nt, Human
uuggacagggacgacauucaggagccaaacaggccgcaagagcaacuggcagauccaaggucccguggaugacugucuuugaacaa

SEQ ID NO: 7127 - RNA, 62 nt, Human; identical to SEQ ID NO: 1277

SEQ ID NO: 7128 - RNA, 62 nt, Human; identical to SEQ ID NO: 4194

SEQ ID NO: 7129 - RNA, 67 nt, Human; identical to SEQ ID NO: 4195

SEQ ID NO: 7130 - RNA, 72 nt, Human
aacagaucucaaagaucucaucauuuuugacaaacagucaucacaaaggaugagacagaauuugaaauuguu

SEQ ID NO: 7131 - RNA, 85 nt, Human
cugcuacgcuccagccagccccuaacugguccccagaagcggcgcugcuacagggaccaggagcugcugcgaacugcgcuggcgg

SEQ ID NO: 7132 - RNA, 64 nt, Human
ggcucguccuugggcgcggggcuucaucauggacacgcucucggcccaggccgcgaaacaagcc

SEQ ID NO: 7133 - RNA, 65 nt, Human
ugcagaccuggcuuagaggaccccuaaggcugaggggucacuuccagaacugaguccgguccgca

SEQ ID NO: 7134 - RNA, 81 nt, Human
uugcacuggucccuggagagagggcguccccugcaggagagcuucaugcgccugguggaggccuguggggacucggagcaa

SEQ ID NO: 7135 - RNA, 67 nt, Human
uccaccguaaccuuuguacuuguuuuccuccuggggaaagugucaaaacagugcaaggacugguggg

SEQ ID NO: 7136 - RNA, 71 nt, Human
uuauuggucugaauucauuuuagguuacuuuaacauuuuaauuuccuguaacuguccaugagagaauauaa

SEQ ID NO: 7137 - RNA, 63 nt, Human; identical to SEQ ID NO: 1366

SEQ ID NO: 7138 - RNA, 86 nt, Human; identical to SEQ ID NO: 1381

SEQ ID NO: 7139 - RNA, 79 nt, Human
ggacuuuuccuuuccugcuuuucacuugaagguucccugugcaaccgacggaaagaucggggaaacuccggaaguauuc

SEQ ID NO: 7140 - RNA, 66 nt, Human
gucgcgcgcaaauuucuggugagcgccacaugacaauuuggcacacucuauccgaaauuugccgac

SEQ ID NO: 7141 - RNA, 92 nt, Human; identical to SEQ ID NO: 6794

SEQ ID NO: 7142 - RNA, 108 nt, Human
gguggcacggcugcgggcgcgggccuagacucgcugcacaagaacagcgucagccagaucucggugcucagcggcggcaagggccaagugcucgcaguucugaccacu

SEQ ID NO: 7143 - RNA, 60 nt, Human
aggcuugccagcccccucccucuuaauuuaauuccugaaguuuuugggggggccaagccu

SEQ ID NO: 7144 - RNA, 85 nt, Human
gcguuaugucaccaugcaguugccagugugauuagugccuaggggucuccauuuagcagaaaugguaaugacagugauauaaugc

SEQ ID NO: 7145 - RNA, 65 nt, Human
auaagaucuaaagaguuaccuggcuacagaaagaagaugccagaugacacuuaagaccuacuugu

SEQ ID NO: 7146 - RNA, 73 nt, Human
gcaucguggccucagcuggcucuguagaggagcugcccgaagaagcggcuggugcagagccgcgagggugugc

SEQ ID NO: 7147 - RNA, 90 nt, Human
ggaaaauggccuuccugaagcugaguccacuuuugaguaguggccauaggaccaguugagucaagagucauggauccaggggggccaucc

SEQ ID NO: 7148 - RNA, 70 nt, Human
guuuagccagcucucccggcaguagcaaggccaccugugguuugaaucuuucuggaagaaaugguggagc

SEQ ID NO: 7149 - RNA, 80 nt, Human; identical to SEQ ID NO: 174

SEQ ID NO: 7150 - RNA, 64 nt, Human; identical to SEQ ID NO: 175

SEQ ID NO: 7151 - RNA, 66 nt, Human
uuucggcgcugggucgcccaaagcagaauggagacggauagagugguggaucccagaaucccgaag

SEQ ID NO: 7152 - RNA, 101 nt, Human
cggaacgcguguuguugggacucugggacugcucgugcgagcaaucuguuccguaaacggaugcaagcacgguggguugaguguucaacccaugcguuuug

SEQ ID NO: 7153 - RNA, 105 nt, Human
gaacaucuaagagguuggaacgccugggccuuacgccauugggaagccuacggagcggaaaggcacauucacaccguguggggccccggguagccccucuuguuc

SEQ ID NO: 7154 - RNA, 60 nt, Human
gccguaaguugccauuggccuuugggagauuggaaccagggcuccacggcaauuuguagc

SEQ ID NO: 7155 - RNA, 91 nt, Human
uugacaaacaccgucauguacccagucgauacucggacgccgagagcacggugccccaguagcaagcccggcccgugaugcucgauuucaa

SEQ ID NO: 7156 - RNA, 77 nt, Human
cauguacccaggggagauuccagccagacacccgccccccgggccuggcuaagaaguugcuuccuguugccagcaug

SEQ ID NO: 7157 - RNA, 60 nt, Human; identical to SEQ ID NO: 231

SEQ ID NO: 7158 - RNA, 64 nt, Human
gggaaguaugagaaggugcuuguggaagggggcccggcucccuaggcgucccaucucgcuuccu

SEQ ID NO: 7159 - RNA, 69 nt, Human
gccaacaaauguuuuugcauucacaccaauugcugguuuugaaaucguacucuucaaagguauuugugc

SEQ ID NO: 7160 - RNA, 77 nt, Human
uagccgugauguccgggggccguguacaucauguuaccgugggguggggucugcauuggcugcugggcauauggcug

SEQ ID NO: 7161 - RNA, 65 nt, Human
uugacauuguaggcuggcgcuggcaucagguucacacucauguucaugcccucuugcaucguuaa

SEQ ID NO: 7162 - RNA, 63 nt, Human
ccggguccccuucagcaaggagggcggcccacugcucugcuggugcuggaaggaggaccccgg

SEQ ID NO: 7163 - RNA, 129 nt, Human
ucugccuuuucaccuacgcagccccagcccggccccccuggggacccuagagaggguguccuuucuguuuauccuucucuuugcuccagauggcugcgcucucuaggggcgcgauguguguguggugga

SEQ ID NO: 7164 - RNA, 84 nt, Human; identical to SEQ ID NO: 286

SEQ ID NO: 7165 - RNA, 89 nt, Human; identical to SEQ ID NO: 288

SEQ ID NO: 7166 - RNA, 61 nt, Human; identical to SEQ ID NO: 776

SEQ ID NO: 7167 - RNA, 105 nt, Human
gcuuggagccucccccagagguguggcaggugcugaagacccaccccggagacccccgcuuccagugcagucucuggcaucucuauccccuaugaggcaccacgu

SEQ ID NO: 7168 - RNA, 75 nt, Human
guuugaccuggccuggcaguacgggcccugcaccgggaucacacggcugcagcgcuggugucgggccaagcagau

SEQ ID NO: 7169 - RNA, 75 nt, Human
agccacauuuugggguuguggugcguauaccauuugcgcgcaagagcgcaugguggcccggcccccuauauggcu

SEQ ID NO: 7170 - RNA, 65 nt, Human
gcuaauuauugccccuaaguugcgaccuaaauuugauuuuggaaccgaucuuguaauaagaaagu

SEQ ID NO: 7171 - RNA, 65 nt, Human
uccuugugggagcagcuauggcaaguccaccuccuugcauugucauaggucacauuccacaagga

SEQ ID NO: 7172 - RNA, 71 nt, Human
cucagcgguauucuggugcuuauggugccucaguuucugaugaagaauugcaccacgacagaguagcugag

SEQ ID NO: 7173 - RNA, 60 nt, Human
gccgggucaccuucgaggcggacgagaaugagaacaucaccguggugaagggcauccggc

SEQ ID NO: 7174 - RNA, 81 nt, Human
acugcuucaaggacaucgugaacaugcugaugcaccaugacagguucaagguguuugcagacuaugaagccuacaugcagu

SEQ ID NO: 7175 - RNA, 60 nt, Human
cucaacggggcccucaccaucggcaccauggacggcgccaacguggagauggccgaggag

SEQ ID NO: 7176 - RNA, 66 nt, Human
gaguggaccaagaaggucaucaggaacaucgccugcucgggcaaguucuccagugaccggaccauc

SEQ ID NO: 7177 - RNA, 62 nt, Human
ugucagugccugauggaguggccggggcgggugccuucacgucagcuccagaaucacuguca

SEQ ID NO: 7178 - RNA, 105 nt, Human
cuggugcuucagugcugaacaaauggcagaugaacccauaugacagaggaucugcuuuugcaauugggucagauggucuuuguugucaaagcagagaaguaaagg

SEQ ID NO: 7179 - RNA, 82 nt, Human
gauggguguaaugccugagauugcacaagcuguggaagagauggauuggcuccucccaacugauauccaggcugaaucuauc

SEQ ID NO: 7180 - RNA, 60 nt, Human
ucuaccaugcaggccuuuuuggaccuagguacugacaaguuuggauuuggcuuuggugga

SEQ ID NO: 7181 - RNA, 77 nt, Human
ccuugcuguccucugggcuucuccucugacccaggucacccuguggcaggccaugggcccucaggauguuucaaagg

SEQ ID NO: 7182 - RNA, 112 nt, Human
aauauuccugggaguggugggcaauuagccugucuauggcuuaggaucuguuuccaugcuugcuuccugagcuucuucuaccucugagaguuuuucaucauuuuccaauguu

SEQ ID NO: 7183 - RNA, 60 nt, Human
gggugcuggaaucacuuuugccaaaggcaucauauccuugggcgaauuuuuccggaaucc

SEQ ID NO: 7184 - RNA, 78 nt, Human
uuccuaccacuuaagaauaaaaaaugcauuuuaauaaaaacaaaucuauacugaagucauuuuccuuugugagaggaa

SEQ ID NO: 7185 - RNA, 74 nt, Human; identical to SEQ ID NO: 365

SEQ ID NO: 7186 - RNA, 72 nt, Human
gccaauguccacaaagaauuccuggucagcaccaccgauguccaaagguggcaauaucaaggaagggcaggc

SEQ ID NO: 7187 - RNA, 75 nt, Human; identical to SEQ ID NO: 1111

SEQ ID NO: 7188 - RNA, 80 nt, Human; identical to SEQ ID NO: 367

SEQ ID NO: 7189 - RNA, 88 nt, Human
gauggggcucauggcugucugccaagguucauccaugaaucuuuuauugauaucuuuuggcuuaauuuagaauacuauuagcacuauc

SEQ ID NO: 7190 - RNA, 83 nt, Human; identical to SEQ ID NO: 3404

SEQ ID NO: 7191 - RNA, 60 nt, Human
cuuuuuuugcuggguauuauuucaagaaccaagguuccuagauaacaucuagucuuagag

SEQ ID NO: 7192 - RNA, 72 nt, Human
ggggaaagauguccucaucugcucaggcacucauccaugccccgccuccaagcagugugaugucgacucccu

SEQ ID NO: 7193 - RNA, 81 nt, Human
uccggggucuuaucuuacauggagagccuccaguuucucuuuaugggugcucucuucuuccaugaucuuucuuaucccgga

SEQ ID NO: 7194 - RNA, 81 nt, Human
agcuccccaaccccgaaucagugacucggaaagugaggaucccccaaggaacccggccagugauucggaaaaugaggagcu

SEQ ID NO: 7195 - RNA, 66 nt, Human
cagaacugcagaaugacuccuuccauucagacagccauauggacagaaaaaaguuucacaguucug

SEQ ID NO: 7196 - RNA, 75 nt, Human
gauacauuuggauucuucucaacuuugaaacuguuuagcacaguuccauuguauuauauaagaagacacuguauc

SEQ ID NO: 7197 - RNA, 72 nt, Human
ugugaugauuugauucagguauagcccaaauuaguaaggggcuuuagcuguaaacugaaaacaauauucaca

SEQ ID NO: 7198 - RNA, 93 nt, Human
uaugauuugauuuuauauacacauauguauacauauuauauauaaauauauauguguauacauauauguguguauaucuaugaaucaaacaua

SEQ ID NO: 7199 - RNA, 73 nt, Human; identical to SEQ ID NO: 4293

SEQ ID NO: 7200 - RNA, 70 nt, Human
ggcucccaauguugacguuggccagggccuuugcaaacaagccaggccaaaaaagcucaacauuuacacc

SEQ ID NO: 7201 - RNA, 60 nt, Human
gcagcuccugcaucucaucaaacucggaauggaaaacgaugacaccgcaguucaguaugc

SEQ ID NO: 7202 - RNA, 67 nt, Human; identical to SEQ ID NO: 1379

SEQ ID NO: 7203 - RNA, 86 nt, Human
gcgcggccggggcgggagagacucagcaacgacccauaccucagacccgacgggccggagcggagcgcgcccugcccuggcgcagc

SEQ ID NO: 7204 - RNA, 69 nt, Human
ggcaagaaggugcugacuuccuugggagaugccauaaagcaccuggaugaucucaagggcaccuuugcc

SEQ ID NO: 7205 - RNA, 97 nt, Human
aguucugugcuggugggucauauguuggugaagauuguccccaguggauggucccuaucacaaucucuacuagugaagaccccaaccaggccaaacu

SEQ ID NO: 7206 - RNA, 99 nt, Human
cucagugugggccauccaucugagguugaugagauauuugaugcuauaucauauagcaaaggugcaucugucauccgaaugcugcaugacuacauuggg

SEQ ID NO: 7207 - RNA, 76 nt, Human
cugugaugaauaccuggaccaaacaaaugggauuuccccucauuuauguggaagcugaacagguagaagaugacag

SEQ ID NO: 7208 - RNA, 79 nt, Human
cucuuacucccuuuuccccucaaaggagaacuguguuuaugaaacuguaguuuugccuuuggaugaaagggcauuugag

SEQ ID NO: 7209 - RNA, 87 nt, Human
gaacuccaggccucaagugaaccucccgccuuugccucccaaaguguugggauuauagguaugagucuccuugccuggccuagauuc

SEQ ID NO: 7210 - RNA, 71 nt, Human
ccgccguaauauagaacgucccggcccauacuuaugcucgcgccguaauggccgguacuaugcuccggcgg

SEQ ID NO: 7211 - RNA, 82 nt, Human
gccagguggguuucagggcgcugagaaagccgcuggucggucggcgaccgucaggguuuuccagggugggaauccgcggggu

SEQ ID NO: 7212 - RNA, 66 nt, Human
gccucacugccggcgucuacgagucagccaaagucuugaacguguaaguguagacgcggcccaggc

SEQ ID NO: 7213 - RNA, 75 nt, Human; identical to SEQ ID NO: 74

SEQ ID NO: 7214 - RNA, 67 nt, Human; identical to SEQ ID NO: 836

SEQ ID NO: 7215 - RNA, 77 nt, Human
ggaauuuggcugaggagcagcuuuagguauggauugaugacuaagucaagcuacuuccugagcuucucucagauucc

SEQ ID NO: 7216 - RNA, 81 nt, Human
aaguggaaauggcuguauuugcuuuacaauguuuucagcuggaaagcugagggcuggaaucaucugaagccuuguucacuu

SEQ ID NO: 7217 - RNA, 65 nt, Human
ccaggaaaugaaugagcuuggguaauggagcucucugaagcugaggccauuuuuacaagaacugg

SEQ ID NO: 7218 - RNA, 88 nt, Human
ccucucuuuucuaggggggaugugacccuuugaaaaaaauuuuuuuaagaagggggggggguguauauuucgccccaggagagagagg

SEQ ID NO: 7219 - RNA, 71 nt, Human
uuuggucccugcgccuuugaaggggggggggggucauaagguuucccccuuuuuuaaggguuuuaaccaaa

SEQ ID NO: 7220 - RNA, 92 nt, Human
gggggggcgggaaaaaaaaaaaaccggggccccuucucuuguuccaggaaaaaagggcccccuggggagagggguccuuuuucccccccccu

SEQ ID NO: 7221 - RNA, 65 nt, Human
uuuuuuugggaaaaaaacaaaauuuuuugggggcccccaaaaaaauuuuuuuuuucccggaaaaa

SEQ ID NO: 7222 - RNA, 79 nt, Human
cgccaggugcuuauuaggccgugcuccaaagucaucguccgguuucucacugugaugaugaagcaugguuacauuggcg

SEQ ID NO: 7223 - RNA, 67 nt, Human
gcccggcaaccaauggugagaaguuucucgaaggcacgucccgccgggaagcugguuuuacccgggc

SEQ ID NO: 7224 - RNA, 77 nt, Human
gcccucaaccggcggccgcgccaugcugcgggguaacacccgcggggcgguauggagagcggcacacgccggggggc

SEQ ID NO: 7225 - RNA, 63 nt, Human
gguaagcaggaaauuagaugaucuucauuaagacuccauggguguaucugagcuccugcugcc

SEQ ID NO: 7226 - RNA, 60 nt, Human
ccuuaaaaaaaaaaaaggcaaccaccccccaggggaaacucgugccaaggaaauuugggg

SEQ ID NO: 7227 - RNA, 63 nt, Human
uggggguccugccccuggagggccuuggaccaccagcugguggagggcccuauggacacccca

SEQ ID NO: 7228 - RNA, 73 nt, Human; identical to SEQ ID NO: 721

SEQ ID NO: 7229 - RNA, 63 nt, Human; identical to SEQ ID NO: 722

SEQ ID NO: 7230 - RNA, 60 nt, Human; identical to SEQ ID NO: 723

SEQ ID NO: 7231 - RNA, 60 nt, Human
auuggugugcccguguaacguuuaggaacaaguguguuuauacaacguuuggggaccaau

SEQ ID NO: 7232 - RNA, 72 nt, Human
ggcuaaccuuacccauguuggccacgaauuacuguuggaauucgaugguuaagaaaggggcgugagggggcc

SEQ ID NO: 7233 - RNA, 94 nt, Human; identical to SEQ ID NO: 4360

SEQ ID NO: 7234 - RNA, 128 nt, Human
ugagucaccgaagagugauaaucccaggcaguacagaaugagcucagcugagguugugcaauggguugugaaugacgaugaaguuguggaucaccucugguucugagacacucuguucuugguguuca

SEQ ID NO: 7235 - RNA, 67 nt, Human
ccaugcgcuacaagucccaggacccccggaauccugcacaaugaccugcuuuguagcucuccaaugg

SEQ ID NO: 7236 - RNA, 66 nt, Human
ccgaaacaagcuuucaccgacguggccacuggcucccugggccaguguccucggggccgcuugugg

SEQ ID NO: 7237 - RNA, 72 nt, Human
gcugguuuccuggccgaggcggagcugcugaaccugaggaagaucagcuccgacuuuggacgggcacccggu

SEQ ID NO: 7238 - RNA, 60 nt, Human
ccuggcuccucucaguuaugucaaaugauuauagaacuuggcauuuuacuagggagcagg

SEQ ID NO: 7239 - RNA, 75 nt, Human
gaggcccagaggguuggacauacuaggaauucugucauccccaguggcugauccuuuaaccccuucucaggucuc

SEQ ID NO: 7240 - RNA, 63 nt, Human
uucuuuuugguuuugacaucauucauuuccaccugggaauuucuggugccaugccagaaagaa

SEQ ID NO: 7241 - RNA, 87 nt, Human
cuagccaaaauguacaagaccacaccggaugucaucuuuguauuuggauucagaacucauuuggugguggcaagacaacuggcuuag

SEQ ID NO: 7242 - RNA, 88 nt, Human
uguuggugcuggcaaaaagccgaaggaguaaaggugcugcaaugauguuagcuguggccacuguggauuuuucgcaagaacauuaaua

SEQ ID NO: 7243 - RNA, 79 nt, Human
cacaaaagaaauauuauuacaagguuucagagguagccaauugcauucuuuuggaaaucuacuguacuguuucaaugug

SEQ ID NO: 7244 - RNA, 72 nt, Human
caccuuauaaguucugauuuauuuucuuacucauuaugcuguguucuaaauaaaucaugaaugagaagagug

SEQ ID NO: 7245 - RNA, 63 nt, Human
gaggaaacgaugaacaaaaacuaaucuaauugccagguuagaauucauuauuuaauuuaccuc

SEQ ID NO: 7246 - RNA, 62 nt, Human
gaguuacuagcgacuaguggucagcggccgccuugguggcccgcuauagucguuagccgcuc

SEQ ID NO: 7247 - RNA, 60 nt, Human
ggucguuacaacgcaauuccuuugucgcgaugccacacaggacuaugcguaaccacgcuc

SEQ ID NO: 7248 - RNA, 71 nt, Human
gcgugggcggaaucacuugagcccaggaguuugagaucagccugggcaauauagugagaccucgucuaugu

SEQ ID NO: 7249 - RNA, 66 nt, Human
gguaagauuaccaguguaggcugggagugguggcucaccccuguaaucccaacgcuuugagaggcc

SEQ ID NO: 7250 - RNA, 66 nt, Human
gcugucaaagaaccucuggguccauggguagacaaccaggagccuucccaggguuucuccuccagc

SEQ ID NO: 7251 - RNA, 82 nt, Human
ggauugccaaaacggucaccagcacauuucccaggagcuugaaguucucaggauccacaugcagcuugucacagugcaguuc

SEQ ID NO: 7252 - RNA, 69 nt, Human
ggcaaaggugcccuugagaucauccaggugcuuuauggcaucucccaaggaagucagcaccuucuugcc

SEQ ID NO: 7253 - RNA, 66 nt, Human
gcggccgcagacaguccgggagcaccagcucgcuaucaagcagcuggacgccccgcgugaggccgu

SEQ ID NO: 7254 - RNA, 60 nt, Human
auaacaaauacuccguccuuuugccauugguggcuaaagaaggaaaacuccauuuguugu

SEQ ID NO: 7255 - RNA, 82 nt, Human
caccguccggucagagaagcuaagaagggccccuggagaaguuugcuucccuggagguaagcggcccucagacuggaugaug

SEQ ID NO: 7256 - RNA, 61 nt, Human
ugggggucucgcuauguugaugaggcuggucucgagcuccuggccucaagugauccuccca

SEQ ID NO: 7257 - RNA, 83 nt, Human
gagcuuuuuagagaaguggaacguugguacccuuggauuugccugguuucugauuuucuauuguagucuuuaaguggagguuc

SEQ ID NO: 7258 - RNA, 79 nt, Human
ugauaccuuacagugcuacauuaucuccuuucaggauuucauaucugccgaugauuuuuguagucuugucagggcauca

SEQ ID NO: 7259 - RNA, 83 nt, Human
gagcuuuuuagagaagugugaacguuggacccuuggauuugccugguuucugauuuucuuuuguugucuuuaaguggagguuc

SEQ ID NO: 7260 - RNA, 88 nt, Human
guugguguggacagacgauaagcuccaccauuaccccugaagcuuguggacuggggccauuugggugaggggcuuguuacacaccgac

SEQ ID NO: 7261 - RNA, 73 nt, Human
cucgaauuucagugcgggaaccaaugcagacuggcauuaaagcuguggauagcuuggugcccaauuggucggg

SEQ ID NO: 7262 - RNA, 75 nt, Human; identical to SEQ ID NO: 74

SEQ ID NO: 7263 - RNA, 96 nt, Human; identical to SEQ ID NO: 2594

SEQ ID NO: 7264 - RNA, 71 nt, Human; identical to SEQ ID NO: 77

SEQ ID NO: 7265 - RNA, 78 nt, Human; identical to SEQ ID NO: 99

SEQ ID NO: 7266 - RNA, 80 nt, Human; identical to SEQ ID NO: 100

SEQ ID NO: 7267 - RNA, 99 nt, Human
aacuuggauuuuucuuuuuauuaaugcaguauguucuuuuuauucaaguaugaacuuguugagaaacuauaguaauaugauuuuuaagagauuuauguu

SEQ ID NO: 7268 - RNA, 63 nt, Human
auaauuauacaaaaugaugccaugacaaaauuccacagcaucagucuuaguuuguauaguugu

SEQ ID NO: 7269 - RNA, 78 nt, Human; identical to SEQ ID NO: 99

SEQ ID NO: 7270 - RNA, 65 nt, Human; identical to SEQ ID NO: 247

SEQ ID NO: 7271 - RNA, 80 nt, Human; identical to SEQ ID NO: 100

SEQ ID NO: 7272 - RNA, 87 nt, Human; identical to SEQ ID NO: 76

SEQ ID NO: 7273 - RNA, 71 nt, Human
ugcccgcguacaugggcugaggaauguucaagcagaagaaaugguagaguuuucuuuaggcuuaaagggua

SEQ ID NO: 7274 - RNA, 73 nt, Human
aauggaauggaaucuccaggagugaggguuuccauggaagccagcacuauccuuggggacaccacugaccauu

SEQ ID NO: 7275 - RNA, 72 nt, Human
gcuguuaauuuuuaugauuuuccuacuacaaagauacucaucuauauuuugaggguggaaaauuaaaauagc

SEQ ID NO: 7276 - RNA, 130 nt, Human
guacagauaaggaauugagcgcagaaaaguugugacuugcucaaguuuucaggguuagaaaguggcaaagaccuaauucuaaaaaggcuuuauaauuacagauuuugugcucuuaucuuuuauucuauac

SEQ ID NO: 7277 - RNA, 87 nt, Human; identical to SEQ ID NO: 4680

SEQ ID NO: 7278 - RNA, 72 nt, Human
cuggaucuaugaaugacaggagggcagaccacauuguuuucacauccauuuccccuccuucccaugggccag

SEQ ID NO: 7279 - RNA, 80 nt, Human
agggggggggggacaucaacuuggaggccaggguuggaaaaucaggccugaccaacaguugugugaaccccuuauucucu

SEQ ID NO: 7280 - RNA, 61 nt, Human
uaagucuuuuauuuauuuuuuuuuugggucuauccuaagggaccaguaaauaaugaucuua

SEQ ID NO: 7281 - RNA, 65 nt, Human
cuugcugcuguggugacucaaaaacaaacacagaaguguugugcauacuuaaagcucaguacaag

SEQ ID NO: 7282 - RNA, 70 nt, Human
gaggaacccaaucugcuucuguuguggcaccagagguuugcuuuguugcugaaucuauaguugcuuccuc

SEQ ID NO: 7283 - RNA, 67 nt, Human
ggacuugcagagagaguuuucuacuggaauguaagagguuuugaaggcucucuuuucugcaaaggcc

SEQ ID NO: 7284 - RNA, 67 nt, Human
ugugcagcaauuuuccuacaaacuuuccgguuuaauucggaacugaacaguggaauuccaaagcaca

SEQ ID NO: 7285 - RNA, 74 nt, Human
auggucaacggcgcuacagaacaaagggcgagcucuaaagaguccagcucauccucuucccgaccucugaucgu

SEQ ID NO: 7286 - RNA, 70 nt, Human
ccagacugccucccagccagagugcgcacuuacagcagaccggagcacuggccaguggagguucucaugg

SEQ ID NO: 7287 - RNA, 86 nt, Human
cugugagacaaccauuggcugcaaggacccggcccagggacaacuccugaaagagcugaugcagacaccaaacuuccguaucacag

SEQ ID NO: 7288 - RNA, 91 nt, Human
ggcugaggccuuugcgcguacaggaaaguccauugagcagcuggagaaagaguugcuggaugggcagaaacugcaggggccccagacagcc

SEQ ID NO: 7289 - RNA, 80 nt, Human
gauugaguucacaccucagcagauugaagaguucaaggagccuucaugcuguucgacgacaccaagugugagaugagauc

SEQ ID NO: 7290 - RNA, 73 nt, Human
uacaagaugauggacuugaacuuccugccaugcucagacauuccagacaggacaaggaccauuaggacuugug

SEQ ID NO: 7291 - RNA, 70 nt, Human
gaagaacgaguaaccugaaaugaaggagcgagaaucccacccucagccccccaacagcuuccucagcuuc

SEQ ID NO: 7292 - RNA, 73 nt, Human
gcaggugcgcuccgggaugaagugcagggaggcaaacucuggcuggguuccuguaaacauccaucgcagcugc

SEQ ID NO: 7293 - RNA, 105 nt, Human
cugagaugccuuuaguggaacucuucuccucagaaccauguagagucuaccugacuccaggugguacuuuuaagguauccaggagaccuuuagauuugcucucag

SEQ ID NO: 7294 - RNA, 73 nt, Human
ucucuccaaguugucaggaaaccucugguuccccauucuccuggcgguacagcaagcacugacagugaguaga

SEQ ID NO: 7295 - RNA, 78 nt, Human; identical to SEQ ID NO: 99

SEQ ID NO: 7296 - RNA, 80 nt, Human; identical to SEQ ID NO: 100

SEQ ID NO: 7297 - RNA, 74 nt, Human
acaaugucuuuaauuccucauaugcugacuuggcaauccauaugcagccuaaaaggugguugaaagaugucugu

SEQ ID NO: 7298 - RNA, 78 nt, Human
ccacacacacuuuugccaguucccccuggugaaccauaauacacacgugggagacagcuggcaucaucugagucuugg

SEQ ID NO: 7299 - RNA, 61 nt, Human
guccagcaaaagguugccaaagaguuuauggacagaccuggaauccaaccgcacaauggac

SEQ ID NO: 7300 - RNA, 83 nt, Human
guuguuggaccagaagcaccucuggcugcugggaucguugggaaccugaggucugcaggagugcaaugcuauggcccaacagc

SEQ ID NO: 7301 - RNA, 82 nt, Human
ggguccacucuccugccugcugggaccuauggaaggggcuuccuggccaaggcccccucuuccagaggaggagcagggaucu

SEQ ID NO: 7302 - RNA, 75 nt, Human
gacgugcuggaacagggagugcuucagcagguggacaaugccauccaugaggccagccgugccucccagcucguu

SEQ ID NO: 7303 - RNA, 62 nt, Human
ggcaguagagccuagcgcccaggcccuugagcugcagggucuggguguggacgucuaugacc

SEQ ID NO: 7304 - RNA, 61 nt, Human
uaguucaaucaaccuucuagaauuuuuguaauauaacuucaaguauguaaugauuuaauua

SEQ ID NO: 7305 - RNA, 80 nt, Human
uuaccacauggagcauuucacaguuucaaagaaguuuuccuuauuuuaaaacugcaagaaaaugcuacacuugaugguag

SEQ ID NO: 7306 - RNA, 91 nt, Human
ccggaucccugccuagcgcggcccaaccuuuacuccagagaucauggcugccgaggaugugguggcgacuggcgcgacccaagcgaucugg

SEQ ID NO: 7307 - RNA, 65 nt, Human
ugcugcugcuuggccucugcaucuuccugcucuacaagaucgugcgcggggaccagccggcggca

SEQ ID NO: 7308 - RNA, 68 nt, Human
caggccuggaugugaguugaccuuugauuuugaaugaccacagucacgguugaaagcauucaggucug

SEQ ID NO: 7309 - RNA, 76 nt, Human
gccugggccagcugcuuggagagaccccgcagagccugcaggauccggcggugucugcccagcgucuccuccaggu

SEQ ID NO: 7310 - RNA, 83 nt, Human
ggaaucuggcaggaagcauccagggcccagccucugucaggccuggcuuggccugggggccccagcugcuucuuccauugucu

SEQ ID NO: 7311 - RNA, 62 nt, Human
guagagacaggguuucaccauguuggccaggauggucucgaucuuuugaccuugugaucugc

SEQ ID NO: 7312 - RNA, 104 nt, Human
uggugcccaagcccagccuugcccacagcccuuccagcugccucgccaggcggagcugcugcaucuccaggaagggcugagggggaaccucugggcugggcuca

SEQ ID NO: 7313 - RNA, 69 nt, Human
uuauuuuguauaacuuuuauucuuagauuauauuacaaugugucagucucaaguauaacuacaauauaa

SEQ ID NO: 7314 - RNA, 62 nt, Human
acauacuugaacuuacacugggcaaauguuguuuacuacaguccaaaugaaguuaaaguggu

SEQ ID NO: 7315 - RNA, 80 nt, Human
ggagcgaggcagcgcgcccggcucccgcgccauggggcggcugguggcugugggcuugcuggggaucgcgcuggcgcucc

SEQ ID NO: 7316 - RNA, 66 nt, Human
uuguuuuuucgguugggcaugcugcuuaccgcaggaugauggaagcgacggcccguacaaagacag

SEQ ID NO: 7317 - RNA, 86 nt, Human
aggaacgauucacaggacaaacaaacccaauuuuuaagaaguuuauuugaaacucuuccuggucggguccagugugaaauguuacu

SEQ ID NO: 7318 - RNA, 63 nt, Human
cuauuagaggcugaaacuauugaagaacaagaaucuccagugaacuguuuuagaaaauuaugg

SEQ ID NO: 7319 - RNA, 70 nt, Human
ucacggaacaaugcuucaacacguuagaacgaucagaaauguugcuucuacuuuugaggcgcuucccuga

SEQ ID NO: 7320 - RNA, 72 nt, Human
gcaucaauagcaacagaaaugggccccacaguugcaacugccuucaucaaggccuucuccugcuuaagaugu

SEQ ID NO: 7321 - RNA, 66 nt, Human
ggcaugcuggccaaccuaguggagcagaacaucuccgugcggcggcgcaaggggucagcaucggcc

SEQ ID NO: 7322 - RNA, 84 nt, Human; identical to SEQ ID NO: 286

SEQ ID NO: 7323 - RNA, 61 nt, Human; identical to SEQ ID NO: 776

SEQ ID NO: 7324 - RNA, 91 nt, Human
cgucgagauguuuuuaaccagcgcguuucucaccggcuucucauuucacuguuuguacuccgggaucgggcacggagaagacauccuggcg

SEQ ID NO: 7325 - RNA, 60 nt, Human
gcgccgccuccuugaaacuuagcgcucugacccagagucugaccaggguacggcaggcgc

SEQ ID NO: 7326 - RNA, 61 nt, Human
gucguccccacagcuccggaagugcuuggcgccguugcgucacuuccggaucggggucgac

SEQ ID NO: 7327 - RNA, 64 nt, Human
uuggggcgaagcggcagcggaggcggcgggccgacgccggucaagcccgcgcugcuuccuccag

SEQ ID NO: 7328 - RNA, 75 nt, Human
aagcugagggugauuagacaaguugacaaguuguuuugaaagaggcaacuggcuuaguacaaaaauccauaguuu

SEQ ID NO: 7329 - RNA, 91 nt, Human
uuuuuuagcaagacaagguguuuuuauugaggucucaggaauugcaauuugggagacagauucagcuagaagccacuuguguucugaagag

SEQ ID NO: 7330 - RNA, 75 nt, Human
uuuguacaguuuaaacaacagcugaaagaacuaaagaagcaauguggucuucaagcugacagagaagcugacgga

SEQ ID NO: 7331 - RNA, 61 nt, Human; identical to SEQ ID NO: 3139

SEQ ID NO: 7332 - RNA, 110 nt, Human
gguuccgucacccccucccagggaagcaggucugagcagcuuguccuggcuguguccaugucagagcaacggcccaagucugggucugggggggaaggugucauggagcc

SEQ ID NO: 7333 - RNA, 61 nt, Human
guaccucagugugcaaaagugcuuugaagguuguccaggugagccaggcauacuaaggcac

SEQ ID NO: 7334 - RNA, 106 nt, Human
gaagcacguaauguuuaaaauguguuguuuuucacaaguaauuuaaguauagcauuauuauuauuugguacuugagucaaagacgacauuuagauucuucagcuuu

SEQ ID NO: 7335 - RNA, 65 nt, Human
ggaacaccauaggaguugccaucagagauaacacccauggacacaaacucucccucugggguucc

SEQ ID NO: 7336 - RNA, 80 nt, Human
gucccugcuucccgacaccagccucauggaauaugcaacaacuccuguaccccaguccacgguguucuggcagcagggac

SEQ ID NO: 7337 - RNA, 110 nt, Human
cugugcaccucgugguagaaacucuuugggguucgccagcuguagcucauauuucauguuggggucaugccgaacacccaugaaguuguaguuccacgaggacugggcag

SEQ ID NO: 7338 - RNA, 118 nt, Human; identical to SEQ ID NO: 3011

SEQ ID NO: 7339 - RNA, 75 nt, Human; identical to SEQ ID NO: 74

SEQ ID NO: 7340 - RNA, 87 nt, Human; identical to SEQ ID NO: 76

SEQ ID NO: 7341 - RNA, 79 nt, Human
ucagugcgggaaccaaugcagacuggcauuaaggcuguggauagcuuggugccaauuggucguggucagcgugaacuga

SEQ ID NO: 7342 - RNA, 71 nt, Human; identical to SEQ ID NO: 77

SEQ ID NO: 7343 - RNA, 74 nt, Human
ccaugcaggcuacuccauguuuggggcuggcaucaccguaggccugucuaaccucuucuguggagucugcgugg

SEQ ID NO: 7344 - RNA, 66 nt, Human; identical to SEQ ID NO: 4945

SEQ ID NO: 7345 - RNA, 69 nt, Human
gcccuuaugugguccaaccugggcauuggccuagcuaucucccugucugugguuggggcagccuggggc

SEQ ID NO: 7346 - RNA, 80 nt, Human
gcgggggcggacagacugcgggacggacgguggacgcugggacgcguuuguagcuccggccccgccguuccgacccccgc

SEQ ID NO: 7347 - RNA, 104 nt, Human
uucugugaggcuguggccaucuacggcaucaucauggcaauugucauuagcaacauggcugagccuuucagugccacagaccccaaggccaucggccaucggaa

SEQ ID NO: 7348 - RNA, 68 nt, Human
cagccggcagccagcggcaguggaucgaccccguucugcggccguugaguaguuuucaauuccgguug

SEQ ID NO: 7349 - RNA, 62 nt, Human
cggccccgcagcagcuccaagaaggaaccaagagaccgaggccuucccgcugcccggacccg

SEQ ID NO: 7350 - RNA, 67 nt, Human
ugucccucugcgcuugcuccccgcauccaugcccaggaaucgggacacauuacggcaggcaaggaca

SEQ ID NO: 7351 - RNA, 88 nt, Human
ggcaugcaguaacuguucaaauaauguuuguuuaauugacggguuuuaagcucgauaacuuagcuaagcccuuugcacagucuaagcc

SEQ ID NO: 7352 - RNA, 98 nt, Human
uuuuuuuuuugucuuuauucauuuauuuauuuauucauucauuuugugcccuucugggaaugaaccaggacuauuugaauggaaagagaaaaaaaaaa

SEQ ID NO: 7353 - RNA, 105 nt, Human
guuggauuugcaaaccuccccaaucaaguucaccgaaaaucagugaaaaaagguuuugaguucacacugaugguggucggugaaucaggucuaggaaaauccgac

SEQ ID NO: 7354 - RNA, 63 nt, Human
guuucugauagacacuagaaaggacaaguuugaucuugugauaaauugauuaauguuagaagc

SEQ ID NO: 7355 - RNA, 75 nt, Human
gcuccugaaaaguacaucaagucuaaagugaaccagcuaacucauuaagacuggaaucaugagcaacaauggagc

SEQ ID NO: 7356 - RNA, 68 nt, Human
ggcuccggcuccacacuggcacguagugggcggaucgcgccggcgcugaguaggaaggagcuucagcc

SEQ ID NO: 7357 - RNA, 73 nt, Human
acacagaccacuaagaacaauaacuuuaacaaaauaagcauuugcuucaaaguuauuuuuuagucgcuggugu

SEQ ID NO: 7358 - RNA, 61 nt, Human
cugauauaagguccagguugauucacuccaaaggguguuaucuuacgaggacagucauuag

SEQ ID NO: 7359 - RNA, 65 nt, Human
cugucuguucauauguugguuaugacuuuuacauuaaaauaucauuuaaacgaaugagcaaucag

SEQ ID NO: 7360 - RNA, 64 nt, Human
guauaaacagaguuacaacuaaauuuggauaaaaauguucaauaauuaacucuagcacguauac

SEQ ID NO: 7361 - RNA, 64 nt, Human
agcuuuuauuuauuuuuuagcaaugacauuaacaagauuuugccagguuauaaaaaugagggcu

SEQ ID NO: 7362 - RNA, 72 nt, Human
caucccuaacacaaauccagggacuuuguuucuuaaccuuaaaauuggaaacacuucuugcuaccagggaug

SEQ ID NO: 7363 - RNA, 75 nt, Human
ccuggagagggcggcaugauccuagugggccgaggucaaccgccagggucaaacggaacacaacccacucucagg

SEQ ID NO: 7364 - RNA, 87 nt, Human
acaaccacaauaaauauaaagauauauguguaagguuucaaaacagcauauacuacauaauaccauuuuuguaaauaacauguuugu

SEQ ID NO: 7365 - RNA, 67 nt, Human
uaugauuacacauagaaggcuaaaagauaugucaaaauauuaacaaaauuucuguagucaaaucaua

SEQ ID NO: 7366 - RNA, 77 nt, Human
ggaaaauugcaaugaucaaguuucuuuuuuauuuuuuuuuuacuuagaaaagcaaauauguguuuuguaauaaaucc

SEQ ID NO: 7367 - RNA, 120 nt, Human
ggccccaccugaggcacagcgcugacucaucacggugguaccaguaggucagccaucuggaaacagaaguggcccuaaugggccaaaaugugguaagacucgcuggccucaggcagggcc

SEQ ID NO: 7368 - RNA, 66 nt, Human
uccaguaaauuggaaugacucaucaucaggacagcaauuagggauuggucauauagguggacagga

SEQ ID NO: 7369 - RNA, 63 nt, Human
agaaauuccuucacaaaauuugggguaaaaacccuuacaaggcaauuuugugggcgaguuucu

SEQ ID NO: 7370 - RNA, 84 nt, Human; identical to SEQ ID NO: 286

SEQ ID NO: 7371 - RNA, 64 nt, Human; identical to SEQ ID NO: 287

SEQ ID NO: 7372 - RNA, 89 nt, Human; identical to SEQ ID NO: 288

SEQ ID NO: 7373 - RNA, 70 nt, Human; identical to SEQ ID NO: 7282

SEQ ID NO: 7374 - RNA, 67 nt, Human; identical to SEQ ID NO: 7283

SEQ ID NO: 7375 - RNA, 67 nt, Human; identical to SEQ ID NO: 7284

SEQ ID NO: 7376 - RNA, 73 nt, Human
aaauugauguuuggcuuuuuuuuccuccacgauuaaaaaaguaggggaaaaaaacccaccucaacuucgauuu

SEQ ID NO: 7377 - RNA, 73 nt, Human
aggagaaauaaauuugguauaaaauauguagaguauaaucuuacuauuuuuguauaauauuagaauuuauccu

SEQ ID NO: 7378 - RNA, 79 nt, Human
ugccugauguauuuacucgugaucuucauucaugcuuggggacagagugagugggauuuaugaguuacuguacucagca

SEQ ID NO: 7379 - RNA, 63 nt, Human
auuuaccaaaccagucuguacaaaccuuacagccagaagggaaaaaaauagcuugugguaaau

SEQ ID NO: 7380 - RNA, 67 nt, Human
cauauauuuauugcaaauacuuaaaauucuuauguaaaaugauuuucuauauuugugaaaaaauaug

SEQ ID NO: 7381 - RNA, 73 nt, Human
cuuuuuaaaugguguugacaccaacuucucuguacauacccucaauuccaauguuaacaauuccuuuaaaaag

SEQ ID NO: 7382 - RNA, 76 nt, Human; identical to SEQ ID NO: 4817

SEQ ID NO: 7383 - RNA, 80 nt, Human
gauuucucaagacaagaagauaggcacuuaauggcagcugaaauuccuaauauuaagccugauauucuuaucauugaauc

SEQ ID NO: 7384 - RNA, 75 nt, Human
uacaugacauuccaauauacuaugcaucaucuuuuggcccaagaauuggaugggcaguguaccagaacauaugua

SEQ ID NO: 7385 - RNA, 62 nt, Human
aaauagaaaauuauauaaucugaagaguauuuuuucucguucaauuucuauaacauuuauuu

SEQ ID NO: 7386 - RNA, 87 nt, Human
cagaagauggcaaagaaugaauuucaauuauuaugaucaccacuauugauuuaauaugacuucuucaauuggaugugcuaucuucug

SEQ ID NO: 7387 - RNA, 79 nt, Human
auauacuuaaaauguuauuugauaaauuugcccuucuauuauuugauccccagucacauaauauauuuaugccugauau

SEQ ID NO: 7388 - RNA, 76 nt, Human
gcuaauuucacauuaguggauuuggcuguuacuauuugaacccuagcugcugccuuccuccuacuucuguguuagc

SEQ ID NO: 7389 - RNA, 62 nt, Human
guugagcaucuguugcacuaagugcuuucuauauucaguaaucuuuuguaacaagccucaac

SEQ ID NO: 7390 - RNA, 91 nt, Human
caguguggucaguguuaccauccauacugugucaguauuaagaucacuaaagugguucuuagcaaagguuggaggugucuugagugcacug

SEQ ID NO: 7391 - RNA, 69 nt, Human
cugccuagacccuccauugcagacaguucccaaaggaggcuggaagugcaaaugguguguuuggugcag

SEQ ID NO: 7392 - RNA, 96 nt, Human
gauauguguguaguuuguggcaguuuuggccaaggagcagaaggaagauuacuugccuguucucaguguggucaguguuaccauccauacuguguc

SEQ ID NO: 7393 - RNA, 72 nt, Human
ggaagguaucuguaauccucuauucguggcgauucuuccacguacuuaguagaguuaaggcaaaaacuuacc

SEQ ID NO: 7394 - RNA, 61 nt, Human
gaggaccaagauguggaaaggagccagugaacuugcugacugagaaggcaccuuggaacuc

SEQ ID NO: 7395 - RNA, 120 nt, Human
gcaccuuccuguggauccgggugcagcaguucacgucucggcggguggagcugcucaucuucucccaccugcacgagcucucacugcgcuggcaccuggggcgccgcacaggggaggugc

SEQ ID NO: 7396 - RNA, 68 nt, Human
ggccuggacuguuaccaguuacgucuuccucaaguuccuccagggggguggcacuggcaguacaggcu

SEQ ID NO: 7397 - RNA, 87 nt, Human
cagcuuucuggaaguauuauagaaaaagaagguuuaucuaacauuaaguuaaagguagaagacuuuuugaaucucuccacacagcug

SEQ ID NO: 7398 - RNA, 94 nt, Human; identical to SEQ ID NO: 1365

SEQ ID NO: 7399 - RNA, 61 nt, Human
guccagccugggccauagagugagacucugucucaaaaaaggaaagaaaaauaggcugggc

SEQ ID NO: 7400 - RNA, 60 nt, Human
acacaaacaugcaauucccucucugcagaauaaucugcaauuugguauaaauguuagugu

SEQ ID NO: 7401 - RNA, 64 nt, Human
cgucucaguggcugcccgcaugcucaagguggcccggcugcuugaggugccagucaugcugacg

SEQ ID NO: 7402 - RNA, 81 nt, Human
ucuuguguugagacuucgugguggugcuaagaaaaggaacgaagaagucuuacaccacucccaagaagaauaagcacaaga

SEQ ID NO: 7403 - RNA, 78 nt, Human; identical to SEQ ID NO: 99

SEQ ID NO: 7404 - RNA, 65 nt, Human; identical to SEQ ID NO: 247

SEQ ID NO: 7405 - RNA, 80 nt, Human; identical to SEQ ID NO: 100

SEQ ID NO: 7406 - RNA, 73 nt, Human
ggccaggcggacgaaccccuccucagugcuuggucaucuuggccgggcucgggggguauccgaccuucaggcc

SEQ ID NO: 7407 - RNA, 126 nt, Human
uguucaccacgcccccgaagcgagagaguucaaguugauguugacgaugacaucguuggccgccacccgacacucgaugucgcugcaaucaucuucuucaacgccuuugucguugcugguagaaca

SEQ ID NO: 7408 - RNA, 73 nt, Human
cgucgggcccgguucgagguggcugacgaggacaagcagucccggcugcgcuaccagaaccuggagaacgaug

SEQ ID NO: 7409 - RNA, 99 nt, Human
gauggagcccaggccucuccggagccggaugggggagucggcaccagggauuccagccgaacuuccauccgcagcucccagugguccuucagcaccauc

SEQ ID NO: 7410 - RNA, 69 nt, Human
agcacaggcccaauucuucccugccuuuuaucacccugucagcugggaguaucuuuucuaccuguggcu

SEQ ID NO: 7411 - RNA, 82 nt, Human; identical to SEQ ID NO: 1077

SEQ ID NO: 7412 - RNA, 77 nt, Human
gguaucuugguuaugacaaagucauuacaaaugugacuaagucauuacaaaugugacugagucauuaccaguggacc

SEQ ID NO: 7413 - RNA, 69 nt, Human
cacgucuccggccacgcccuguucacagagacaccccaugacaugacagcacggacgggcgaggacgug

SEQ ID NO: 7414 - RNA, 93 nt, Human
ccugcuccuuccgcggcagcggcucccccuccuacucgcuggagauccaguggugguauguacggagccaccgggacuggaccgacaagcagg

SEQ ID NO: 7415 - RNA, 80 nt, Human
ggggcccagaugugaggcggcggcgcccccggcccgagagcgcacgaugggggccccgcucgccguagcgcugggcgccc

SEQ ID NO: 7416 - RNA, 61 nt, Human; identical to SEQ ID NO: 1238

SEQ ID NO: 7417 - RNA, 82 nt, Human
ggcccaggaucggcagggcugcuggcagaggaaucccagcugggguucccaugccccaggcuccugcaggacuugcugggcc

SEQ ID NO: 7418 - RNA, 86 nt, Human
gcugccccuucagagcagggaaacacgggcuggugccuuucuucaccugcauggcagcuugcuucccuggcaguggagagggcagc

SEQ ID NO: 7419 - RNA, 67 nt, Human
guggccagaagccucguuccuccugacucuuccugcagguggcucaggaaggauucagccuggccac

SEQ ID NO: 7420 - RNA, 94 nt, Human
ucagccuuggucaucugcgauggagcgcuuucucagaacuguaggacauagaacugugcacaggaacagcuuccagagccgaaaaccagguuga

SEQ ID NO: 7421 - RNA, 72 nt, Human
acccuagcuaacauccuacagaauggugaaagacugaguguuuuuccccuauaauaggaaacaagcaagggu

SEQ ID NO: 7422 - RNA, 62 nt, Human
caguuuauucuauaucacuuuauaacuuaauaaagcuguuuaagaaaaauguuaguaagcug

SEQ ID NO: 7423 - RNA, 72 nt, Human
ugcacuggauguucuagccgguucuguuccacguugcacuggauguucuagccgguucugauccacguugca

SEQ ID NO: 7424 - RNA, 85 nt, Human; identical to SEQ ID NO: 3621

SEQ ID NO: 7425 - RNA, 125 nt, Human
gcugaacugcgaaugauacuuuaugaagaugauucaguacaaguacaauauguugaugguuccacauugcaacuuucucccuguggcucugaauuuuuauuugaaaagucaccaccuguuucagc

SEQ ID NO: 7426 - RNA, 75 nt, Human
uaccuucugaaagaaaaaagcauaucuucauugacauaacagaagugagauggcccagucuugauacagauggua

SEQ ID NO: 7427 - RNA, 84 nt, Human; identical to SEQ ID NO: 286

SEQ ID NO: 7428 - RNA, 89 nt, Human; identical to SEQ ID NO: 6376

SEQ ID NO: 7429 - RNA, 94 nt, Human; identical to SEQ ID NO: 5398

SEQ ID NO: 7430 - RNA, 61 nt, Human; identical to SEQ ID NO: 544

SEQ ID NO: 7431 - RNA, 60 nt, Human
gcggccuccuucccaggcucuggggcagcgcaagagggguaggcugggaggggcugccgc

SEQ ID NO: 7432 - RNA, 92 nt, Human
ggcaugggcaagggggguccccagguaguaaacuccccaggugggcugagggcuagggcugaaccucaggugggucuccuguucccagugcu

SEQ ID NO: 7433 - RNA, 85 nt, Human
accguggguaggcucccagcauggcgcgaguuuacugcagacgugguggugacccgugagugugcugcuggagccuccacgcggu

SEQ ID NO: 7434 - RNA, 95 nt, Human
gucgacgaucagacaagguuggcuugugcgcagucuggcccaugagcucagucagccagagugaagcagcaucgcaggaccuugugcugacagac

SEQ ID NO: 7435 - RNA, 70 nt, Human
gauguauauauuauucugcaagcuuucauacugacuacuacaguauuuuuugguuugacuguguauacuc

SEQ ID NO: 7436 - RNA, 75 nt, Human
gcgccguccuggucacggccccgcggggcagccaugccuggccgucugcugcggggccuguggcagcgauggcgc

SEQ ID NO: 7437 - RNA, 69 nt, Human
ggaaggcggccgagcgcggcccccucuccucccgggccggggcgggcccgaggccucgauccgccuucc

SEQ ID NO: 7438 - RNA, 73 nt, Human
ggggaccuccuuccagcucuacgcgccucucauucagagaggugaggucaggaaaggggaaggacgaagcccc

SEQ ID NO: 7439 - RNA, 73 nt, Human; identical to SEQ ID NO: 2359

SEQ ID NO: 7440 - RNA, 76 nt, Human
cugggccugagggagggcuggagucgcacgcgcuuuguccuuagcgccugucugcucuccucuaacuaggacccag

SEQ ID NO: 7441 - RNA, 63 nt, Human
ucuccgugcucuggggccgggccucgcugcuuagcagcggccucuagcuccgucucccgggga

SEQ ID NO: 7442 - RNA, 86 nt, Human
aagaugauucugacagugaaaagcagcaacaaauucaucacaucaagaacuuguaugccuucaaccucuucugccagaagcguuuu

SEQ ID NO: 7443 - RNA, 60 nt, Human
gcccacagacuacagaaagcaguugcaguaucccaacccauugccugugcucuccggggc

SEQ ID NO: 7444 - RNA, 66 nt, Human
aaauguaagacguuaaaguguugcuuacaggaggguaaaugcaaacaucaccaaugccuuacauuu

SEQ ID NO: 7445 - RNA, 102 nt, Human
cugcucuggcauaggaauacuugaauagcuugguuaaaugaagggauggccaggagauguuacuuuuccaagcuauucaggcacuccuuaugucagagacag

SEQ ID NO: 7446 - RNA, 76 nt, Human
guggcucauugcuuaggugcccagguuuuucaggugcaauuaaaauuuagaacuaccacacaaaggcauuggcugc

SEQ ID NO: 7447 - RNA, 63 nt, Human; identical to SEQ ID NO: 3037

SEQ ID NO: 7448 - RNA, 63 nt, Human; identical to SEQ ID NO: 3039

SEQ ID NO: 7449 - RNA, 67 nt, Human
uucuaguuacauuacaaaaauuaaucuuaggucucuaccucacauauauauaaaaaugaacucagaa

SEQ ID NO: 7450 - RNA, 86 nt, Human
uuuggaaggcugaagcggguagaucaccugaggccaggaguucgaaaccagccuggccaacauggugaaaccccgucccuacuaaa

SEQ ID NO: 7451 - RNA, 96 nt, Human
gagcugcggcgcgggccauuucugagcaguggagguuucaaguaauccacuaacaaccaguuccaaauucugucaucaaauccugugcugcuguuc

SEQ ID NO: 7452 - RNA, 60 nt, Human
ggauguaggcaucuugguggugcuuggcaaaguacagcauguuguccagagccaacaucc

SEQ ID NO: 7453 - RNA, 68 nt, Human
cuugcacgccugaagagacucggucacggagccaaucugguugacuuugagcaggaggcaguugcagg

SEQ ID NO: 7454 - RNA, 60 nt, Human
ggugggggacacaggugcgcagcugcacagagucagcagcagcagccugcuccccgcacu

SEQ ID NO: 7455 - RNA, 84 nt, Human; identical to SEQ ID NO: 286

SEQ ID NO: 7456 - RNA, 89 nt, Human; identical to SEQ ID NO: 288

SEQ ID NO: 7457 - RNA, 67 nt, Human
cccagcuuacaacacccgugguccuuucacaucaggcuccgggcuguuccacuuucuguaggguggg

SEQ ID NO: 7458 - RNA, 74 nt, Human; identical to SEQ ID NO: 365

SEQ ID NO: 7459 - RNA, 102 nt, Human; identical to SEQ ID NO: 2172

SEQ ID NO: 7460 - RNA, 77 nt, Human; identical to SEQ ID NO: 3082

SEQ ID NO: 7461 - RNA, 80 nt, Human; identical to SEQ ID NO: 367

SEQ ID NO: 7462 - RNA, 80 nt, Human
gacauuauuauauuaccaauagcugauuuuuuuuuccauucugggaccuaaaaugcuuacagguacuagcaguacauguc

SEQ ID NO: 7463 - RNA, 71 nt, Human
agaaaaaugauacuucucuuuuuuugcuguuccaccaaauacaauucaaaugcuuuuuguuuuauuuuuuu

SEQ ID NO: 7464 - RNA, 76 nt, Human
auggugcuauaauaaauaaacuucaacacucuuuaugauaacaacacuguguuauauucuuugaauccuagcccau

SEQ ID NO: 7465 - RNA, 75 nt, Human
guuuugcuccuugagagcagauuggcugaugccccugcaaccccagcccaagcucugccucaaagaccgagugac

SEQ ID NO: 7466 - RNA, 60 nt, Human; identical to SEQ ID NO: 5112

SEQ ID NO: 7467 - RNA, 77 nt, Human
cuacaggacacaauguggcugaccugguggugauacucaagauucugccaacguuggaagcuguugcugcccugggg

SEQ ID NO: 7468 - RNA, 71 nt, Human; identical to SEQ ID NO: 3414

SEQ ID NO: 7469 - RNA, 60 nt, Human
uugauagucaacuguggagcauugucauuuacauccacaacuuccacaagaacuguacaa

SEQ ID NO: 7470 - RNA, 98 nt, Human
ccaccagucaagggugggaauagggugggaggggguuggcuuuaaaaguuauauguacaagccaucccguaccagacccuuggccuccugacaggugg

SEQ ID NO: 7471 - RNA, 63 nt, Human
gacaaggucauugugcccugccacgggacaacguaaaucuggaaagagcagaauggcuuccuc

SEQ ID NO: 7472 - RNA, 60 nt, Human
gcuacuauuuuauugcaggagguggggguguaugcaccgcacaccggggcuaugagaagc

SEQ ID NO: 7473 - RNA, 88 nt, Human
aagauccaggagcagcucugccugguccaggacuccaaucguccaugauguuccugcuaugacuaggcagacuguaucccugagucuu

SEQ ID NO: 7474 - RNA, 71 nt, Human
aaguugcccgcuguguaagaaaaagccaagagacugcuuuugagugacauuuauuuagcagcuaguaacuu

SEQ ID NO: 7475 - RNA, 80 nt, Human; identical to SEQ ID NO: 174

SEQ ID NO: 7476 - RNA, 64 nt, Human; identical to SEQ ID NO: 175

SEQ ID NO: 7477 - RNA, 92 nt, Human
gagccauuguggacguuccauuggugagagcuguugggucguguaguugaugcccuugguaaugcuauugauggaaaggguccaauugguuc

SEQ ID NO: 7478 - RNA, 70 nt, Human
gagacucuuccaggucaaagggcggcgugugguccgugccagcgagguaccuguguccugggagagcuuc

SEQ ID NO: 7479 - RNA, 129 nt, Human
gcagcaccgugagguccagugcuucgagugcggccaccuuccuaggcuacuucaagucuggccugaaguacaagaaaggagguguggcaucaggauucaagcacgugguacccaacgaggugguggugc

SEQ ID NO: 7480 - RNA, 109 nt, Human
ggacaacgagcggaguggccgggcccgagugcacgugucugaggagggcacugagcccgaggcgaugcuccaggugcugggccccaagccggcucugccugcagguacc

SEQ ID NO: 7481 - RNA, 70 nt, Human
ggucuccaauggugcagggaccauguccgucucccucguggcugaugagaaccccuucgcccagggggcc

SEQ ID NO: 7482 - RNA, 72 nt, Human
gcagagccagaggcgguguugucacggacuaaugugaaaucucuucccguggcgcgcauccucugacucugc

SEQ ID NO: 7483 - RNA, 70 nt, Human
gcucagccagcccuuggaggcucagagcagcuggcccaggcuccagcucgccuccaguggaagcccgagc

SEQ ID NO: 7484 - RNA, 87 nt, Human
gcucugcucuaggacugccucccacugcggccccucaccugacuucaggguauggggagggagggagccagugcuccaagggcaggc

SEQ ID NO: 7485 - RNA, 66 nt, Human
gggaccaggugucgcgcagagaugugccucauucugugccuccuucugugccucuaccauguuccc

SEQ ID NO: 7486 - RNA, 88 nt, Human
uccuuuuccucuuuuccuuccuccucuuuggaauuuuccugggaccuacagaauaaagggggggauggacaggggguuuucaaaagga

SEQ ID NO: 7487 - RNA, 74 nt, Human
gccccgccccugccgccggaauccugaagcccaaggucugcccgggggcgguccggcggcgccggcgauggggc

SEQ ID NO: 7488 - RNA, 78 nt, Human
agacccagugccugugacuuugaguaguuuguucuaaauguggugacaaacaagucauuucuguaagacauugggucu

SEQ ID NO: 7489 - RNA, 65 nt, Human
ccggcaaguugcuaacugugcguuucucccuucuuagaaugaaugucucccccaaaacuggcugg

SEQ ID NO: 7490 - RNA, 65 nt, Human
gaggaugaaagaggaccugggagcggcaacuuuguucugguuuguuguuuucucuucccuaccuc

SEQ ID NO: 7491 - RNA, 65 nt, Human
gccugcccauuuuguagugcaguugaggagagcucaggggcugucagaaugcugugugggaaggu

SEQ ID NO: 7492 - RNA, 78 nt, Human
ugaaaagugcuccccaucaucugaagaagcagcaccugguaacaggcauggccauucagaggguacuuagcauuuuca

SEQ ID NO: 7493 - RNA, 63 nt, Human
ugcuuuguccaucagguccuaaaagugucucucacuuguaauuccacagaagugaauaaagca

SEQ ID NO: 7494 - RNA, 73 nt, Human
cuggggcuaccucucuacagcuguuuccucagaggggaaaaaucuuggaggaccagaugggugggagcucugg

SEQ ID NO: 7495 - RNA, 83 nt, Human
guggacuuaaccauugcaaagcacacugucuuucucagcguucucugcaagucaguagguguuaguaugguugcaaaguucac

SEQ ID NO: 7496 - RNA, 72 nt, Human
uguugaggguggggagaaaagacuuuaagggaggagagccaucuauuuuguuccuaaagccaccucucagca

SEQ ID NO: 7497 - RNA, 71 nt, Human
ugaaauuuuauuguguaaaguuuauagaaguaugacuaguauuccuuuguacaaaguacacaacgguuuua

SEQ ID NO: 7498 - RNA, 66 nt, Human
ugucuccaaaaguccuugaaggauuuuaggaaguuguuaaaagucuugaaacgauguuugggggca

SEQ ID NO: 7499 - RNA, 70 nt, Human
cugagugccaaguggaagacaacauuugaucccaagaaaacagaauggaacccuuucacuucaaacucag

SEQ ID NO: 7500 - RNA, 65 nt, Human
uaaaagugcccaugaugaauagcaagaaaguacccuguggcccauuucaugugaccaaacuuuug

SEQ ID NO: 7501 - RNA, 80 nt, Human
agcuuacugccagcaccaacugccucucacaggcuggggugaucaugggacugggaaggaggggugugggcgguagagcu

SEQ ID NO: 7502 - RNA, 83 nt, Human
caggggggugcgagcugguauggaugcccuccuggguuuccugggggcucugcacuuccagacuccaguuuguccacccccug

SEQ ID NO: 7503 - RNA, 76 nt, Human
ggacccgggggacuggggaggcucuggccggcguaguccuugccgccagccuucacagcggguucucugagggucu

SEQ ID NO: 7504 - RNA, 78 nt, Human
ucggccucccaaagugcuggaauuacaggugugagccacugugcccggccaccugccuccuuuauuuugggaggccga

SEQ ID NO: 7505 - RNA, 76 nt, Human
uucagcauuuaggggguuccuggugagggcucaggagagaucugggcccagagccagccacacuccuuguguugag

SEQ ID NO: 7506 - RNA, 97 nt, Human
ccgcccagccccagguggguaguggggaggagagcuggcauuccuccagguggcaaauggcgacucuauacucuccgcccgccccagggcuggaugg

SEQ ID NO: 7507 - RNA, 89 nt, Human
ccguacugcagagcuuacacaaaauugaagaauguuaauguucgaguuuucuuaucuuguguuuagagguuguuuuuugcagaucuugg

SEQ ID NO: 7508 - RNA, 74 nt, Human
cuccuccaggagaccauaagauagaucccccauccucucagcccuauucccaugccucccucucauuggaggag

SEQ ID NO: 7509 - RNA, 89 nt, Human
aaaacugcuuugcacgugacacaagcugaccucaagagcuccacguuuuggcuucgagcaaguuuuggugcuacuguuuuugcaguuuu

SEQ ID NO: 7510 - RNA, 96 nt, Human
aguucugcuagaauuauugagauauuuauacaugcagaguuacuuuauuaauauuuguaauucaugcauaagaguauuuuaaugauaguuauaacu

SEQ ID NO: 7511 - RNA, 81 nt, Human
agccugcagugugugcguggcaguuugguuuauugguagugucgucucagcagcgugccacauggccaccaucugcgggcu

SEQ ID NO: 7512 - RNA, 85 nt, Human
cucucccugcccaggggcugggccacucugcccgcucuuccugggaggaaacaugggcagaggggcccauggugggaggggagag

SEQ ID NO: 7513 - RNA, 76 nt, Human
acagucuacuuauuuuuugucccuuuuauauccuauuuuaggcaaaaugauaaaacccagaaaauaacaggaaugu

SEQ ID NO: 7514 - RNA, 86 nt, Human
ccuagaccuuuacaucacauagaacuauaaaacagguuuccauaaaauucauuccacauuguagucaacggauguaugauccuagg

SEQ ID NO: 7515 - RNA, 62 nt, Human
ccccaucagggauggucacaguccagccacaggggcgacucugcccaucagucccccugggg

SEQ ID NO: 7516 - RNA, 68 nt, Human
ccucaggaaaacgugguccccaccuggagcuucccucgguugcccuggcccuugaccccguccugagg

SEQ ID NO: 7517 - RNA, 97 nt, Human
cugacagggagcagcaggaagcugccagcccacugccuccaugcggguccuuggagggcaaacgggggagcggcgcuuccucagcucccgcggucag

SEQ ID NO: 7518 - RNA, 84 nt, Human
ucuuguucaacauaggguagguggcagccacggguccaacucgcuugaggcugggcccugggcgcuccauuuuguguuccagga

SEQ ID NO: 7519 - RNA, 65 nt, Human
cccucacagcugcucucuggcagagguuggcauagccuaggagcagcugcaauugcaccugaggg

SEQ ID NO: 7520 - RNA, 74 nt, Human
gagucaagcccaagagcucccuuggcccuguuccccacucccuccacuggccucugcuguuccugucuuugcuc

SEQ ID NO: 7521 - RNA, 91 nt, Human
gggguggguggggugcuuuguuagggcugucuggcuuucacuucuuguuuuugagcugauuggccagccaguccaggccuucguacagccc

SEQ ID NO: 7522 - RNA, 103 nt, Human
ggaauuuuggguuauacuacgauucuggacugaaaugguaugcagguaugacuuaaaagccauagguauacugggcaccauuugagcacguauagccacuucc

SEQ ID NO: 7523 - RNA, 67 nt, Human
uuugccuuagagauuauaguaguagaacucagauuuauagugugacaugcuguucuggaagagcaaa

SEQ ID NO: 7524 - RNA, 61 nt, Human
cuauaacaggaacaaggauuccgugcuauuaucaucucuggaggaccuaauucuguguaug

SEQ ID NO: 7525 - RNA, 95 nt, Human
ggaugcuggugcucaguacgggaaagucauagaccgaagagugagggaacuguucgugcagucugcaaauuuuccccuuggaaacaccagcauuu

SEQ ID NO: 7526 - RNA, 76 nt, Human
ugugaaaguagauuuuuauuacagagcaaauuuuucuaucaauucaaugcuuuaaauaaaacaacauaauaccaua

SEQ ID NO: 7527 - RNA, 112 nt, Human
cccauugggcgccaacuacuguguggaacugccauaagcgaccgugcagccagagagggguucguauuauugucuuuauuucguucacacaguacagcugauuucgaauggg

SEQ ID NO: 7528 - RNA, 64 nt, Human
gggaaauuuucuucauuuuuaauuuacagcagaaagaauauaaagcauucagaaaacauuuucc

SEQ ID NO: 7529 - RNA, 64 nt, Human
ugcaugguuuccagcagcugaguucuucaacagauccauugauucaaucgaugcuuuacaugca

SEQ ID NO: 7530 - RNA, 62 nt, Human
aggccuaacuuugggugguguagauacagaucaaaaugaauucucaaaccagagaugggcuu

SEQ ID NO: 7531 - RNA, 95 nt, Human
guggaaugggccuaaaguagugacaagguagucacagacuucuggaggaggguacuugggcuggugucuaccuggcauauuuaggaacauuccau

SEQ ID NO: 7532 - RNA, 67 nt, Human
gggcugccggggcuggcgcagcucaagagccgcgagucguacgugcugugcuacgacccgcgcaccc

SEQ ID NO: 7533 - RNA, 76 nt, Human; identical to SEQ ID NO: 273

SEQ ID NO: 7534 - RNA, 88 nt, Human
aggcuaagucagagucuccuaaagagcccgaacagcugaggaagcucuucauuggaggguugagcuuugaaacaacugaugagagccu

SEQ ID NO: 7535 - RNA, 76 nt, Human
ccuccggacuuucaaaugcuugcugaaccuuccaaaauacuuccucuagguggcagcgcaggaauaucucuggaag

SEQ ID NO: 7536 - RNA, 80 nt, Human; identical to SEQ ID NO: 788

SEQ ID NO: 7537 - RNA, 129 nt, Human
agcaugcucaguuaaauuugaauuucagacaaauaaugaaugcuuuuacuguaaauauaugccaaauauugcaugaaacauucuuaacgugaaauuguuucucugaaauucaaacuuaacugggcaucu

SEQ ID NO: 7538 - RNA, 84 nt, Human
caccaggcaggcagguuaaguuccuugaugcccuccuuuggaaagaaguggagggugagggaaaaaggacuuccauuucaggug

SEQ ID NO: 7539 - RNA, 73 nt, Human
agugccucuucccucccccugcgaacgcuagaauccgaaccaagugagcccagaacgaaggaacacgggcgcu

SEQ ID NO: 7540 - RNA, 68 nt, Human
cucugcgcaggcuccgcacgcagcuaggucaucaggaugggcuagcugcgugcggagccugcgcagag

SEQ ID NO: 7541 - RNA, 70 nt, Human
gccaccggggucugcgauggcacgccagugcuggagccgcagccaggcgaggccacucgacucccggggc

SEQ ID NO: 7542 - RNA, 96 nt, Human
gcaggcccaaccgccgccagcaccauggccagcaccauuuccgccuacaaggagaagaugaaggagcugucggugcugucgcucaucugcuccugc

SEQ ID NO: 7543 - RNA, 103 nt, Human
gcucaucugcuccugcuucuacacacagccgcaccccaauaccgucuaccaguacggggacauggaggugaagcagcuggacaagcgggccucaggccagagc

SEQ ID NO: 7544 - RNA, 61 nt, Human
guccccuucugaccuguccccagagagcccuaugcucuccuccccacccaagaagaaggac

SEQ ID NO: 7545 - RNA, 78 nt, Human
ccggggagauaguguacuuuguggccuccguagccgugcuauacagcguggaggagcagaggcagcgacacuaccugg

SEQ ID NO: 7546 - RNA, 60 nt, Human
gccacgggacagguggcgggaaccacuaaggaagggaagccgcugccgccccacgugcgc

SEQ ID NO: 7547 - RNA, 117 nt, Human
cccaccagcuucuggcaggagcagcuccccuccuggccuccccucccuucgggggugugaaaugaaaugauggaguggaaggcgcuggcuggggucgggcuccaugcucuggauggg

SEQ ID NO: 7548 - RNA, 65 nt, Human; identical to SEQ ID NO: 5414

SEQ ID NO: 7549 - RNA, 85 nt, Human
uauucaucacauuggguugaaaaguuggaagauuuugcaucuuauugaaaagaauuuuucaaaaauguuucuguacaaaugaaug

SEQ ID NO: 7550 - RNA, 85 nt, Human
uuuuuuuuuuugcagggagaauaauguuuauugagaauggcucauuacaaacaaaauauauauaaaaucucugcaaugcaaaaga

SEQ ID NO: 7551 - RNA, 61 nt, Human
gaaggcugaguacugggcacucucaucucucacuggugagaauguccgagaauucuucuuc

SEQ ID NO: 7552 - RNA, 90 nt, Human; identical to SEQ ID NO: 5706

SEQ ID NO: 7553 - RNA, 80 nt, Human; identical to SEQ ID NO: 5707

SEQ ID NO: 7554 - RNA, 65 nt, Human
ucugcgggcgccagcagcuccuccugcucccgggcgcgaggcagcagcugccggcguucugcggg

SEQ ID NO: 7555 - RNA, 75 nt, Human
ccccuaaugauucuagaugaccaaaacuaacaaacugaaaucgggguguugaaccaaaugggauuuguuuggggg

SEQ ID NO: 7556 - RNA, 61 nt, Human
uuucuuucauugcccgugaugugacagacaaccgggcauuugguuacguguguggaggaga

SEQ ID NO: 7557 - RNA, 78 nt, Human; identical to SEQ ID NO: 99

SEQ ID NO: 7558 - RNA, 65 nt, Human; identical to SEQ ID NO: 247

SEQ ID NO: 7559 - RNA, 80 nt, Human; identical to SEQ ID NO: 100

SEQ ID NO: 7560 - RNA, 83 nt, Human
ccugaagcugcagaguguggaauacgugguguucgaugaagcugaccggcuuuuugaaauggguuucgcagagcagcugcggg

SEQ ID NO: 7561 - RNA, 102 nt, Human
gagcuggcccugcagacccugaaguucacuaaggagcuaggcaaguucacuggccucaagacugcccugauccuggguggagacaggauggaagaccaguuu

SEQ ID NO: 7562 - RNA, 65 nt, Human
gggcaguggcaagacagccugcuuccuccucccaauguucgagcggcucaagacccacagugccc

SEQ ID NO: 7563 - RNA, 71 nt, Human
uuugcagcccugcacgaaaaucccgacauaauuauugccacgcccggacgguuggugcauguggcugugga

SEQ ID NO: 7564 - RNA, 74 nt, Human
gagaagcuguuccagaaccucaggacccucaugacuccuuauagggucaccuucgagucaccccuggagcucuc

SEQ ID NO: 7565 - RNA, 92 nt, Human
gcagaugaucgagacguacuuugacuuccgguuguaucgccuguggaagagccgccagcacucgaagcugcuggacuuugacgacguccugu

SEQ ID NO: 7566 - RNA, 129 nt, Human
ggcgagaacgaccguggcgucucuuuuaccuuuggagccgaggugguggccaaguuccuccacaagcacgacuuggaccucaucugccgagcacaccaggugguagaagacggcuacgaguucuuugcc

SEQ ID NO: 7567 - RNA, 68 nt, Human
guggaaaguacgggcaguucaguggccugaacccuggaggccgacccaauaacccacccgcauuccgc

SEQ ID NO: 7568 - RNA, 88 nt, Human
uguggcgaguuugacaaugcuggcgccaaugaugaguguggaccgagacccucauugugcucuuuccagauccucaagcccgccgaca

SEQ ID NO: 7569 - RNA, 61 nt, Human; identical to SEQ ID NO: 1363

SEQ ID NO: 7570 - RNA, 63 nt, Human; identical to SEQ ID NO: 1364

SEQ ID NO: 7571 - RNA, 69 nt, Human
ccaccuguuuuuguccacggggaguuuguuguaaaggaaaaaggacccgucggauuccaacacgggagg

SEQ ID NO: 7572 - RNA, 85 nt, Human
ggaaacagggaaagguuuuuuugcguguagggguugugcaaacccuaaugcauaacggagcaugaaaagacuuuccccuguugcc

SEQ ID NO: 7573 - RNA, 112 nt, Human
ggcaggguguacaccugggguuuucggggcugcccuuuuguuuuggaaaugguuuuuucgaugggggcugggagggcuuuguuggaaaccuuugaucuuguacuucuuugcc

SEQ ID NO: 7574 - RNA, 66 nt, Human
ggguaccugccaagcuuuuuuuugcaaccggaaaagcccggggagcggggguuugccggccguccc

SEQ ID NO: 7575 - RNA, 62 nt, Human
gggggaggggccggacgcuugcccgccuucguggagaaggguguuuggaugggcccuccucc

SEQ ID NO: 7576 - RNA, 73 nt, Human; identical to SEQ ID NO: 721

SEQ ID NO: 7577 - RNA, 76 nt, Human
cagggaaagagggaaauguuguauuaugugggucuuggggccucuaaccaucaguauaggguuuuuucuuuccuug

SEQ ID NO: 7578 - RNA, 77 nt, Human
ucuuaagucacauggcuucugucuuggaaauuuuaccuuuaaaagauuauuuaagacaggaaccaggaggcuuggga

SEQ ID NO: 7579 - RNA, 61 nt, Human
cacagagggcuugcugagggcagggcugcugcuccgcagagaacagacuuggcccucugug

SEQ ID NO: 7580 - RNA, 99 nt, Human
gccaccguguaaggugugggcacggugcucuucaggaguucacaacgggacagcgguuguauuguucuuuuugcaucgugguuuuuccuauaggugggc

SEQ ID NO: 7581 - RNA, 62 nt, Human
accucgaagagcuuuccugagcaaguggcagaagaugcgauugacuggggcgacuuuggggu

SEQ ID NO: 7582 - RNA, 70 nt, Human
auuggcugguggacagaaggcacugcagccugaaauggcagagucuggugcugacgauccgcgagaagau

SEQ ID NO: 7583 - RNA, 79 nt, Human
cagagccugcacccuugcccccucagagcucugcugcagggccugcgugagcuuuuaccacugggcgaugguggcugug

SEQ ID NO: 7584 - RNA, 70 nt, Human
ggcggcgugggcguggccgcugcccugugucucuguagccuccugcuguggccgacccgccugcgacgcu

SEQ ID NO: 7585 - RNA, 103 nt, Human
gggacuggguguggccguguaugcagcggcugugcugcugggugcuggcugugccaccauccucgucaccucgcuggccaugacggccgaccucaucgguccc

SEQ ID NO: 7586 - RNA, 63 nt, Human
auagauauugguuuuucuuucucugacuugaacuaaguaggagaaaccaaaccauaaaccuau

SEQ ID NO: 7587 - RNA, 84 nt, Human
uuaaaacccugaaaacacaugauccuuguugacucugcuugguugaagcaggaaagaauggucuugauggucagaaaguuuuaa

SEQ ID NO: 7588 - RNA, 71 nt, Human; identical to SEQ ID NO: 1145

SEQ ID NO: 7589 - RNA, 70 nt, Human
cuucauucaguuuuuuguccacagcaguggcauuuaaauuacuguacuuuaagacauggaauugcuggag

SEQ ID NO: 7590 - RNA, 70 nt, Human
gaaaauaucuaauucuaagucuugaguucuucucaucagaccauagcaggauuuaacauuuaacauuuuu

SEQ ID NO: 7591 - RNA, 64 nt, Human
ccaaucacguuguauuagguagcccuugggaagagagccaucauauuuuauacacauguuuugg

SEQ ID NO: 7592 - RNA, 63 nt, Human
uccuacuugggcgugcgggagaaagaaaaaggcgccugcgauucuacccgcgcuugagcgggg

SEQ ID NO: 7593 - RNA, 62 nt, Human
uguagccuuccgcccugguauuuggggggaugaccagcccaggcguuggguguuagucugca

SEQ ID NO: 7594 - RNA, 91 nt, Human; identical to SEQ ID NO: 4623

SEQ ID NO: 7595 - RNA, 62 nt, Human; identical to SEQ ID NO: 6729

SEQ ID NO: 7596 - RNA, 60 nt, Human
gcagcaggccgcggcccaccugcugggcccgccccaccacccgggccugccgccugaggc

SEQ ID NO: 7597 - RNA, 69 nt, Human
gccugggagagcugaaggggacgccggcugcggcgcugagccccccagagccggcgcccucucccgggc

SEQ ID NO: 7598 - RNA, 77 nt, Human
gcugagaugugccgagaccuggccccagagguggagaaacugcuccugcagcccagucccuacgugcgcaagaaggc

SEQ ID NO: 7599 - RNA, 76 nt, Human
ugacugcagugcacaugauccggaaggucccugaacucuccagugucuuccucccacccugugcccaacugcuuca

SEQ ID NO: 7600 - RNA, 65 nt, Human
uggggccccccauccuuugcuucaggucuauggacagaagaauugaaaaucggaugggaacccca

SEQ ID NO: 7601 - RNA, 77 nt, Human
cagcugcugagccguccgcuaucugcaguggugcugaaacgaccggagauacugacagaugagagccucagcagcug

SEQ ID NO: 7602 - RNA, 63 nt, Human; identical to SEQ ID NO: 527

SEQ ID NO: 7603 - RNA, 90 nt, Human; identical to SEQ ID NO: 5735

SEQ ID NO: 7604 - RNA, 84 nt, Human
cgccgggcaggcgcugggcaggggguagcggccgcggugcagcugcuggucacccugagcuuccugcggcgcgucgucgaggcg

SEQ ID NO: 7605 - RNA, 64 nt, Human
cuuucugggcagaagauggccacuguucaauaaaagacugucauguggagcccuguccagagag

SEQ ID NO: 7606 - RNA, 98 nt, Human
gcggggucgcagcugccggguguuggggaaagagucgccugccuccggaccggagugcagaccucugacccuggagucgcucggccgcugggaaccgu

SEQ ID NO: 7607 - RNA, 66 nt, Human
cucgggcuaagcagauuguguggaaugguccuguggggguauuugaaugggaagcuuuugcccggg

SEQ ID NO: 7608 - RNA, 73 nt, Human
ggcuucuggcauaccugcuggcuggaugggcuuggacugugguccugaaagcagcaagaaguaugcugaggcu

SEQ ID NO: 7609 - RNA, 77 nt, Human; identical to SEQ ID NO: 2642

SEQ ID NO: 7610 - RNA, 83 nt, Human
cuugaaacgcuuugucaugcuucuucaguaccauggauuugaaaugaacucauccuugcugugagcauccaggagcccuugag

SEQ ID NO: 7611 - RNA, 70 nt, Human
gggcuacuuccugaccaagaucuuccacccgaacgugggcgccaauggcgagaucugcgucaacgugcuc

SEQ ID NO: 7612 - RNA, 80 nt, Human; identical to SEQ ID NO: 100

SEQ ID NO: 7613 - RNA, 67 nt, Human
cucagugggcuccccaggccccacagguggguccaagagagacggggccggaggggugcaagcuggg

SEQ ID NO: 7614 - RNA, 64 nt, Human
ggccagggaagcccgacgugguggggcgcugccucccgcuccguggccuccuuccucccuggcc

SEQ ID NO: 7615 - RNA, 66 nt, Human
ucaguccccacaggcccaugacccaggcggaggccagccgucacaggugcagcucguggguuuuga

SEQ ID NO: 7616 - RNA, 106 nt, Human
aagaugcauuuucauuuuaaacugucuccuggccuguggauuuguggaauggacaguuuguggguuuuaauuuauuugugaggagucggggcugagaaggcauuuu

SEQ ID NO: 7617 - RNA, 62 nt, Human
cuccccacugcccaucugcccccgaauuuccugccaagcucuggggagugggguggggggag

SEQ ID NO: 7618 - RNA, 91 nt, Human
auuauacccuuuaaacagagagaguuuauauaaaggccucuauagaggggugacaauuuuauaaacaauuuucuuuaaaacggguguuaau

SEQ ID NO: 7619 - RNA, 73 nt, Human
gcgcguuccccgguuuucuuuguuccaaggggggccccuauauauagggggggccggauuuuuauuagcgcgc

SEQ ID NO: 7620 - RNA, 62 nt, Human
gggccuaaccgggagaauagugaacuuucuguggaacauuuuuuuuuuuccccgggggaccc

SEQ ID NO: 7621 - RNA, 66 nt, Human
ggggagaaccaccucucgcuuaccuuggggaacucuuucggggagagggagacccuuuuucuucuc

SEQ ID NO: 7622 - RNA, 65 nt, Human
acaggugcacaccaccccacccagcuaauuuuuguauuuuuaguagagaugggguuucaacuugu

SEQ ID NO: 7623 - RNA, 61 nt, Human
acuucaguuuccaugaaauaaacaaugacuauauaaaauuccaccuuucugaaacugcagu

SEQ ID NO: 7624 - RNA, 70 nt, Human
ugaccucaggugaagcucaggugaaaguuucuuucccaagcagcccaucuguguuccaucaagagaguca

SEQ ID NO: 7625 - RNA, 72 nt, Human
ggcguagacgaguuaaguccuggucugcguggaggucgacgacuccguccagacuacggaccugucuggguc

SEQ ID NO: 7626 - RNA, 64 nt, Human
ggcucacuuugagggcaagccuucucggaucgaggcuucuucauggccgcucagaucgugagcc

SEQ ID NO: 7627 - RNA, 78 nt, Human
ccggaacauuggggggcaaacauaagggcaagguuauaggcugacaucuuguucuugucuugguucuuugcugucugg

SEQ ID NO: 7628 - RNA, 80 nt, Human
gugcugggucuccuccuggugagggcaggaaucuacccgguuccguuucugagacuuugccagcugaaaggacuuaguau

SEQ ID NO: 7629 - RNA, 80 nt, Human
ucuugaccauauaccuuggaguugaauauuguuuucauacugcugugguuugaauguucccuccaacacucauguugaga

SEQ ID NO: 7630 - RNA, 73 nt, Human
acuuucaaaaauucaacuaccuagaaauaguuaccuccaguuuagcacauuuagguauuuggacauuuaaagu

SEQ ID NO: 7631 - RNA, 63 nt, Human
gaugcugaauggagaugcuaucaagacccuauaggaugauuacagcacauaccucucagaauc

SEQ ID NO: 7632 - RNA, 69 nt, Human
gcuuccaauuuguuaucaggugacucuggaguaugccaguuugagugaaccuagagacaaaugcucugc

SEQ ID NO: 7633 - RNA, 74 nt, Human
uuacauuuucuuuuacuaaaaaagagacauagaagccgaugagucuuuuuggaucuuggacaaagaaaaugugg

SEQ ID NO: 7634 - RNA, 61 nt, Human; identical to SEQ ID NO: 3030

SEQ ID NO: 7635 - RNA, 61 nt, Human; identical to SEQ ID NO: 776

SEQ ID NO: 7636 - RNA, 89 nt, Human
cucugagaugcugggcccugggcuucuacccugcggagaucacacugaccuggcagcgggauggggaggaccagacccaggacacggag

SEQ ID NO: 7637 - RNA, 77 nt, Human
cuggccugguucuccuuggagcugugaucacuggagcuguggucgcugcugugauguggcaggaggaaacagaucag

SEQ ID NO: 7638 - RNA, 67 nt, Human
gagauacaccugccaugugcagcaugagggucugccaagccccucacccugagaugggagccaucuu

SEQ ID NO: 7639 - RNA, 75 nt, Human
ggagggcacgugcguggaguggcuccgcagauaccuggagaacgggaaggagacgcugcagcgcacggacccccc

SEQ ID NO: 7640 - RNA, 62 nt, Human
gcaggaagcucuuuagcccacagcagauucugcaugccagccuggcaacugaggggaccugc

SEQ ID NO: 7641 - RNA, 63 nt, Human
caccuggguagcugagagagacagaagguaaaauugcggaguugcucucuccgggcucagaug

SEQ ID NO: 7642 - RNA, 73 nt, Human
cgaggagagacuguuuaaagucagcaagaaugaggagaaaccugugcaaaugauguuuaagcaaucuacuuug

SEQ ID NO: 7643 - RNA, 60 nt, Human
guucuggugaaugcugucuauuucagaggaaacugggaugaacaguuugacaaggagaac

SEQ ID NO: 7644 - RNA, 77 nt, Human
ccugcgcgcccucgacgucaauguggccuugcgcaaaaucgccaacuugcugaagccagacaaagagaucgugcagg

SEQ ID NO: 7645 - RNA, 65 nt, Human
gcacuuuuaggaacuacaucauggacuuccagguugggaaggaguuugaggaggaucugacaggc

SEQ ID NO: 7646 - RNA, 62 nt, Human
gcugcaccuggagaugagaguggaagguguggucugcaagcaaguauucaagaaggugcagu

SEQ ID NO: 7647 - RNA, 98 nt, Human
ucccgcccgcuuguggccaacuggcuccagucacucccggaaaugccagucgacuucacuggguacuggaagauguuggucaacgagaauuucgagga

SEQ ID NO: 7648 - RNA, 87 nt, Human; identical to SEQ ID NO: 76

SEQ ID NO: 7649 - RNA, 72 nt, Human
gguuccuguuguuaucuguaccuaaguuacucaguucugagugcaugucugguacagauaacaacaggagcc

SEQ ID NO: 7650 - RNA, 86 nt, Human
cucugcggcuuuccuugaccucugacccgccgaccacgcuugaucccgggccgcggggccaggaagucggaguuugagccccggag

SEQ ID NO: 7651 - RNA, 83 nt, Human
cuuccaaccucuccggccucagccuacaggaggcacagcagauucucaacguguccaagcugagcccugaggagguccagaag

SEQ ID NO: 7652 - RNA, 75 nt, Human
gcccugaagauuucaugacaucuacccagcuggauucucuucccuggccaagucucugagaucuucucccagggc

SEQ ID NO: 7653 - RNA, 77 nt, Human
agccgcuccacucgcauguccacugucucagagcuucgcaucacggcucaggagaaugacauggagguggagcugcu

SEQ ID NO: 7654 - RNA, 85 nt, Human
gggcccagaagaaaauguagguagucuuaggguuagguagcagcugucaggaacuugccccugcccauaagauccuaaagggccc

SEQ ID NO: 7655 - RNA, 80 nt, Human
guccauuccauccgaggcaagucuucugaaaaccugugaacucaguucggaggaaauccugucucgugaacgaaguggac

SEQ ID NO: 7656 - RNA, 60 nt, Human
gcuuauaggaugguaucuuagucugcuucagcugcuaaaacagaauaccauaaauuaggu

SEQ ID NO: 7657 - RNA, 62 nt, Human
ggcgugguggcuuaugccuguguucccaaagugcugggauuacaggcaugagccaccgcgcc

SEQ ID NO: 7658 - RNA, 69 nt, Human
uauaauuugcagcuuaauguauaacuauuuuguccuaacaauucaaauauauuuuuauuccagauugua

SEQ ID NO: 7659 - RNA, 93 nt, Human
gcccacgugguaucaaauauugaaaugcauccguguaacauauaaaucuguuguuaaaggauuguugugauuuggcgcaugaaauaugugggc

SEQ ID NO: 7660 - RNA, 97 nt, Human
gaucaucagacagauggccacucaugugaaaauugauuugugcauaaauguaaggaauaugugcucucauuggguaaucucaucugcuuuggugguu

SEQ ID NO: 7661 - RNA, 84 nt, Human; identical to SEQ ID NO: 384

SEQ ID NO: 7662 - RNA, 89 nt, Human; identical to SEQ ID NO: 385

SEQ ID NO: 7663 - RNA, 62 nt, Human
agaucagauuguuacugugucuaucuaggaaaaggaagacaaaagaaacuccauuuugaucu

SEQ ID NO: 7664 - RNA, 71 nt, Human
cgucugggaugugaggagccccucugcccggcugcccagucugggaagugaggagcgccucuucccggccg

SEQ ID NO: 7665 - RNA, 78 nt, Human
acuguggccuggacaacuucggggacuuugacugggucaucgagaaccauggaguugaacagcgccuggaggagcagu

SEQ ID NO: 7666 - RNA, 72 nt, Human
ggccgugacgcagacgguccgcguuguagcguuggagcagagccgacagcagcggggcuggguguucacgcc

SEQ ID NO: 7667 - RNA, 85 nt, Human
gcguacaacuccuccuccagcuccagcucccgagucucccgcaccaggaagauguccuggcagagcuugaggaugcgguccacgc

SEQ ID NO: 7668 - RNA, 103 nt, Human
gcuggcggccuuggacggggcaguggcucccccggccugaggagugccgccccuuguggccacgcugcccagcaggccggcuccuucccucucgggcgccagc

SEQ ID NO: 7669 - RNA, 121 nt, Human
guagaggaagaugagcuuggcguacaacuccuccuccagcuccagcucccgagucucccgcaccaggaagauguccuggcagagcuugaggaugcgguccacgcacggcagcuccucgaac

SEQ ID NO: 7670 - RNA, 66 nt, Human
uuuuccauuuguauaaauaaaacauuuuuuaauuaaaaaaaaaaacucuacaguacacguggggga

SEQ ID NO: 7671 - RNA, 86 nt, Human; identical to SEQ ID NO: 1403

SEQ ID NO: 7672 - RNA, 60 nt, Human
gacauugugccucgauaguggcagcuuucaauugcaaucaaugcccuucgagaauguguc

SEQ ID NO: 7673 - RNA, 76 nt, Human
gauagcucuauguuggcgucguaugagacggauguaugaccuggcauuuaucaccuagacgcugauacgugccguc

SEQ ID NO: 7674 - RNA, 60 nt, Human
ccaucacuguacuuaaacuccagaaagaaaaagcuaggaaacagaaguagagaggaaugg

SEQ ID NO: 7675 - RNA, 93 nt, Human
ugaguugagugcucagaauucuaccuauaaaugucuaaauauuaagcaggcuaauguuuauacugggcuagauuuaaaaagguacucaagcca

SEQ ID NO: 7676 - RNA, 67 nt, Human
ggucagcagcuuuaccgcccgcucugcucuccacugcggagacuggggcuccggcagaggcuggacc

SEQ ID NO: 7677 - RNA, 73 nt, Human; identical to SEQ ID NO: 2359

SEQ ID NO: 7678 - RNA, 73 nt, Human; identical to SEQ ID NO: 2360

SEQ ID NO: 7679 - RNA, 128 nt, Human
ucauaacucuuuucacucucaucuuccuugggcaagcuuggcugauccucuuugcuaggcuuacugauugacucguauggaggaacagauggguuuuggugcagcagauguuuuggguaggguggugg

SEQ ID NO: 7680 - RNA, 78 nt, Human
uggcaucacagucacauuugaagcgguucccucaggaaaaggacuggguugaacaguuugaauuggcugugguaucca

SEQ ID NO: 7681 - RNA, 77 nt, Human; identical to SEQ ID NO: 7160

SEQ ID NO: 7682 - RNA, 65 nt, Human
uugacauuguaggcuggcgcuggcaucagguucacacucauguucaugccucuuugcaucguuaa

SEQ ID NO: 7683 - RNA, 69 nt, Human
gaauggcuucgguuauugccuuuccuugguguacucgcacuucuuggcuaccuugcaguucguccauuc

SEQ ID NO: 7684 - RNA, 82 nt, Human
uugugucuuacuaaagcagcuuauuguagguguggcguucuaaaacguuuccugccugcgaugguucacaaaauaaacacaa

SEQ ID NO: 7685 - RNA, 66 nt, Human; identical to SEQ ID NO: 4822

SEQ ID NO: 7686 - RNA, 66 nt, Human; identical to SEQ ID NO: 4823

SEQ ID NO: 7687 - RNA, 84 nt, Human; identical to SEQ ID NO: 286

SEQ ID NO: 7688 - RNA, 64 nt, Human; identical to SEQ ID NO: 287

SEQ ID NO: 7689 - RNA, 89 nt, Human; identical to SEQ ID NO: 288

SEQ ID NO: 7690 - RNA, 82 nt, Human; identical to SEQ ID NO: 4821

SEQ ID NO: 7691 - RNA, 66 nt, Human; identical to SEQ ID NO: 4822

SEQ ID NO: 7692 - RNA, 66 nt, Human; identical to SEQ ID NO: 4823

SEQ ID NO: 7693 - RNA, 74 nt, Human
cuuugcaagcacagcaagucccuguaauaagauaggcacaacugucugauccagguaggcacgaguuggcaaag

SEQ ID NO: 7694 - RNA, 75 nt, Human
ugcauuaaucuucucauuuucuacuauucucucaacguugucugugagaccguacucagagugaggauuucugca

SEQ ID NO: 7695 - RNA, 78 nt, Human
auacuuuaauagaaccaaaguugcagauauuggaauguauggaaguaucucagucucugcauaagaggauuaaaguau

SEQ ID NO: 7696 - RNA, 68 nt, Human
guuuguacucuaaggagcccagaucauaaugcagugcauuuccuuagcccuuagaguuucuugcaaac

SEQ ID NO: 7697 - RNA, 63 nt, Human
gcggaaacgugccggagauugcuguguaccuggcuuugaagcaacuccucaguacguuuuggc

SEQ ID NO: 7698 - RNA, 83 nt, Human
uguucuuguguucuuugccuuauucaucauuuuuaaggcuuaucuaauuaacuguguuuggaacugguauaaauacaucaaca

SEQ ID NO: 7699 - RNA, 80 nt, Human
cuuucagagcuuuggucccuguaaugcccgucuuuccuguguccaggaauaaccuuugcuacuaggcaguccucugaaag

SEQ ID NO: 7700 - RNA, 69 nt, Human
aggugcugaggaguuccggaaccccaaggcauccuugcgugugcggcucugugaccuccugagccaccu

SEQ ID NO: 7701 - RNA, 61 nt, Human
uccccuggugaacauacuggaggcccacacgagccuaacaggcugugucuuuaccaaggga

SEQ ID NO: 7702 - RNA, 64 nt, Human; identical to SEQ ID NO: 287

SEQ ID NO: 7703 - RNA, 77 nt, Human; identical to SEQ ID NO: 3082

SEQ ID NO: 7704 - RNA, 82 nt, Human; identical to SEQ ID NO: 1770

SEQ ID NO: 7705 - RNA, 68 nt, Human
gguuuuguaugucaaggaggaguuuaaggccuuuccgaccaccuuguguuccccuuuucugcgcagcc

SEQ ID NO: 7706 - RNA, 60 nt, Human
gagacuggccugucacuggggugccauuguucagcugcagcagcccguucagcccaucuc

SEQ ID NO: 7707 - RNA, 96 nt, Human
agugucguggacucuucuguggcaggacuuggaggcugucccuagcgcacagggggcaucaggaaacuuggccacagaagaccuggucuacaugcu

SEQ ID NO: 7708 - RNA, 62 nt, Human
ugagauuugguggggacacagccaaaccauaucauuuugccccuggucccucccaaaucuca

SEQ ID NO: 7709 - RNA, 67 nt, Human
ggagagaagguuuuuuuuuuuuuuaacauucugaagauggugcugugucaagaaggaccuuuuuuuu

SEQ ID NO: 7710 - RNA, 62 nt, Human
ucuaguauguaaauguuacuugaaucugugcuucauaauaguguguggcauguaugugcaga

SEQ ID NO: 7711 - RNA, 63 nt, Human
agguacucuguggauauccccuuggacaaaacugucgucaauaaggaugucuucagagauccu

SEQ ID NO: 7712 - RNA, 66 nt, Human
gauacaagacaggcaagaacaagugguucuuccagaaacugcgguuuuagaugcuuuguuuugauc

SEQ ID NO: 7713 - RNA, 73 nt, Human
gggcggccgcucuagaggauccaagcuuacguacgcgugcaugcgacgucauagcucuucuauagugucaccu

SEQ ID NO: 7714 - RNA, 76 nt, Human
ugaagccaagcuccgccuucugagcaguuuugauuucuuccuuacugaugccagaauuaggcggcucuuacccuca

SEQ ID NO: 7715 - RNA, 69 nt, Human
gaaaacaaacauucaugucuuguuuaaagguaauuuaaaugccacuaaggaaagcagauguuuaauuuc

SEQ ID NO: 7716 - RNA, 72 nt, Human
gaguauauauuaaauucuauauaaaauauuuuaaaaauauuuuccaauguugaaaauuuuaauguagcacuu

SEQ ID NO: 7717 - RNA, 64 nt, Human
uucccuucaaguacugcauaaaagcugauccacauuguuuaaauuucuuguguaauuuugggaa

SEQ ID NO: 7718 - RNA, 100 nt, Human
aacaagaaauccagcugaggagccaguggcaacuucugcagcccuuucuuacuuuccuguugcauuugcugagucuguucucuugagucaauaucuuguu

SEQ ID NO: 7719 - RNA, 79 nt, Human
caccacaaagggaaagugaaagcauuggaggaggauaauuugagugaguccucuucugagagcuuucucuggagugaug

SEQ ID NO: 7720 - RNA, 67 nt, Human
ccagguguggguccucacacaagccagggguccauaugagcccgcagcuucauggcccagaaucugg

SEQ ID NO: 7721 - RNA, 74 nt, Human
ggugcugucgggcggaccaccauguauccgggcauugcugacaggaugcagaaggagaucaccgccuggcgccc

SEQ ID NO: 7722 - RNA, 62 nt, Human
ugcguagcauuugcugcauggguuaauugagaauagaaauuugccccuggcaaaugcacaca

SEQ ID NO: 7723 - RNA, 87 nt, Human; identical to SEQ ID NO: 2862

SEQ ID NO: 7724 - RNA, 74 nt, Human
accgugccagagagaucgugauuggugagucugguugaguccugaucaccaguaucuuuuuucugaaggcaggu

SEQ ID NO: 7725 - RNA, 117 nt, Human
gugcagcugcugcgguccuugcccagcucguucuccaccagcacgcuguaaucgccgcuguccuugagcgugcagguggggaugacgagggugcacacgccgcugguggaguuguac

SEQ ID NO: 7726 - RNA, 72 nt, Human
gaugacgugcuggaacucagagagguugaugguuccaucccugucaaugucagacuccuccaggauguuguc

SEQ ID NO: 7727 - RNA, 64 nt, Human
gguuccgucaucaucaaagucaaagaugcggaaggcauaaugggacuugaugucuggcguggcu

SEQ ID NO: 7728 - RNA, 63 nt, Human
ugagcugcuucaucucagacgcacuaagccguguguccucgcccucucccgugaggcaguuca

SEQ ID NO: 7729 - RNA, 68 nt, Human
gucugacuucucugacuggucuaguuuuaaugccagcaguaccccuggaccagaggagguagacaggc

SEQ ID NO: 7730 - RNA, 102 nt, Human
cccggcagggugggaggcagcaggggucagccugggcaggaaccucucccaacucuguccagguguucagaccucuuggcccaaccugcucaccccaccggg

SEQ ID NO: 7731 - RNA, 122 nt, Human
ggaguagcugggauugcaggugugcgccaccacgccuggcugauuuuuguauuuuucguggagaccgaguuucaccauguuggccaggcuggucucgaacuccugaccucaggugauccucc

SEQ ID NO: 7732 - RNA, 128 nt, Human
uuuuuauuuuauuuuuuggauggagucucacucugucgcccaggcuggaacacagugagcugacaucgugccacugcacucuagucugggugacagagcaagacuccaucucaaaaaaaaaacaaaag

SEQ ID NO: 7733 - RNA, 72 nt, Human; identical to SEQ ID NO: 4935

SEQ ID NO: 7734 - RNA, 88 nt, Human; identical to SEQ ID NO: 4936

SEQ ID NO: 7735 - RNA, 88 nt, Human
auacaggccucugccucggccgcaggcccuucagucaccgucgccucgucucccugacuguccgcaggccugggcagcauggccguau

SEQ ID NO: 7736 - RNA, 66 nt, Human
ccucggcggcccggcuggugaaucacacacucuauguucaccugcagccgggcaugagccuggagg

SEQ ID NO: 7737 - RNA, 62 nt, Human
gagggcccaggauuuuuggauccccagcccugugacaaggguuccuguccaguuucccccuc

SEQ ID NO: 7738 - RNA, 87 nt, Human
gucgccgcuguggggcagcgccuggcgggcggcccgcgggcgggucgccuccccuccuguagcccacacccuucuuaaagcggcggc

SEQ ID NO: 7739 - RNA, 62 nt, Human
agcauccacauggugacaggucuggaccccgagaaguugaucagccugcacacaguggagcu

SEQ ID NO: 7740 - RNA, 60 nt, Human
cagauugacacccugaguggcuucuccagagaaaugaaaucauugcaguaccucaaccug

SEQ ID NO: 7741 - RNA, 63 nt, Human
ugcugaagaagguggaaggcuuggaggaucugagcaaucucaccaccuugcaucuucgagaca

SEQ ID NO: 7742 - RNA, 61 nt, Human; identical to SEQ ID NO: 3057

SEQ ID NO: 7743 - RNA, 72 nt, Human
ggguucacagcaguaggggcugggcuuccagcaggcucaugauucaggccuuaacccuugcccugggagccc

SEQ ID NO: 7744 - RNA, 64 nt, Human; identical to SEQ ID NO: 3058

SEQ ID NO: 7745 - RNA, 108 nt, Human
gcacugcucuggcauaggaauacuugaauagcuugguuaaaugaagggauggccaggagauguuacuuuuccaagcuauucaggcacuccuuaugucagagacagcgu

SEQ ID NO: 7746 - RNA, 85 nt, Human
caggagaaagaaagaaagagaugccugguuuucacagacugguuccuguggcugggaugacugcauccuuuuuuuuuuuuuuuug

SEQ ID NO: 7747 - RNA, 79 nt, Human
ugaccauccugcaggccccgagcccggcccccuccaccaucccugggaccccggcggggcuccgguccugagaucuuca

SEQ ID NO: 7748 - RNA, 78 nt, Human
cucauucacucagcagcauucaccaagcccuacugugugcauuggcugggcaaggggugguguuggggguagagugag

SEQ ID NO: 7749 - RNA, 87 nt, Human
gguggugaccuggaagguguuguaggcauagucacagaaggugaccaccuuuugugcacgcucccggccacgcaugagguucacgcc

SEQ ID NO: 7750 - RNA, 66 nt, Human
aucugggugcaaaagcccaggguuaggaaccguaggcaugcugcgccccaaggcuuugacccaggu

SEQ ID NO: 7751 - RNA, 86 nt, Human
ccuucugcuguguauguaugccaaggagaccgugggcuuuggaaugcucaaggccaaggcccaggcuuuggugcaguaccuggagg

SEQ ID NO: 7752 - RNA, 73 nt, Human
ggaucacugcuggccuacucugguuacggggacacugacgcccgggucaccgcugccauagccaguaacaucu

SEQ ID NO: 7753 - RNA, 67 nt, Human
agauuaauccaucuauuuucugcauucauauuacaaacugcagaugcucugugugauuuguacaucu

SEQ ID NO: 7754 - RNA, 70 nt, Human
cuucucucucuucuguacacagcacaauuuuacuccagggacuuucacgguggcugugugagaguagaag

SEQ ID NO: 7755 - RNA, 71 nt, Human
gucaaaaagcagucaucuauucauugaauuuuacagcaaacccaccucaaagaguauuugaacuuguugac

SEQ ID NO: 7756 - RNA, 70 nt, Human
gaggaagacaccccuucagauaaugauaguggcaucuguaugagcccagaguccuaucuggggucuccuc

SEQ ID NO: 7757 - RNA, 66 nt, Human
gaagcucucuugggcugcuaagaugggccuuggaacacaccgcgcguuauagcccaagaggguuuu

SEQ ID NO: 7758 - RNA, 72 nt, Human
uugcaggaauugaagcuuuuacagcuggagacugagaaguaggcaucuguacuguaaaccuuugaccuguga

SEQ ID NO: 7759 - RNA, 75 nt, Human
uuuuuccaaugaaugacaacuuuauuuuucuuacacuuuuaaggcugaugaaaaaccuucauuucaauugaaaag

SEQ ID NO: 7760 - RNA, 93 nt, Human
gagccauuguggacguuccaguuggugaggagcuguugggucguguaguugaugcccuugguaaugcuaugauggaaaggguccaauugguuc

SEQ ID NO: 7761 - RNA, 89 nt, Human; identical to SEQ ID NO: 504

SEQ ID NO: 7762 - RNA, 77 nt, Human
aaaugcggccgcaauucgagcucacuuggccaauucgcccuauagugagucguauuacaauucacuggccgucguuu

SEQ ID NO: 7763 - RNA, 76 nt, Human
ugggcuggaggccuguguuccuucccauaagcagggccugugggguguauggggcagaacauaggccuccacacca

SEQ ID NO: 7764 - RNA, 79 nt, Human
aaaaugcggccgcaauucgagcucacuuggccaauucgcccuauagugagucguauuacaauucacuggccgucguuuu

SEQ ID NO: 7765 - RNA, 81 nt, Human
ccuuucgccagcuggcguaauagcgaagaggcccgcaccgaucgcccuucccaacaguugcgcagccugaauggcgaaugg

SEQ ID NO: 7766 - RNA, 66 nt, Human
aggcagaaaucuuccuggaugaaaagaaacaaguucuaugguccacaaaggcggaagaugaugucu

SEQ ID NO: 7767 - RNA, 78 nt, Human
uugcccggcccgauucuuaggcuccaggagucuuuggcaacacagagaccuuuaaacagcagaagagucggauggcaa

SEQ ID NO: 7768 - RNA, 69 nt, Human
agggaaugaacacugauugaauaccuaugcacuuauaacuugguaucauucaaugcucacaauaacccu

SEQ ID NO: 7769 - RNA, 85 nt, Human; identical to SEQ ID NO: 6366

SEQ ID NO: 7770 - RNA, 96 nt, Human; identical to SEQ ID NO: 5638

SEQ ID NO: 7771 - RNA, 70 nt, Human
ggacuggcuuccagacauccacucacagcaugucuccucguguccaggaucucugggagauacucagucc

SEQ ID NO: 7772 - RNA, 63 nt, Human
agagccggcugggagaggcggcgucaggguggguccugcgccugcccuuuccgcgccggcuuu

SEQ ID NO: 7773 - RNA, 69 nt, Human
ggcagaccccgauccugcugcgccgccuucaagggggaccgccggccgcgagccagguugggauuugcu

SEQ ID NO: 7774 - RNA, 75 nt, Human
ggccuuuguccccgaggccgcgccgggagcucccaagcgcacuccugggccggaccucggcgcgggacaaaagcc

SEQ ID NO: 7775 - RNA, 71 nt, Human
ggugccuggucaaucaguccucgggauggcagccaucaacccgugggccuccuggggugaccuuacggacc

SEQ ID NO: 7776 - RNA, 79 nt, Human
uaauagaauauguuuauuaggaacuacauguguaauuuucauauggagauugaacgguuauccauagcauuuuuuauug

SEQ ID NO: 7777 - RNA, 69 nt, Human
ugguaaaucgccuuuauagcucgcuuuuuauuuauuguaacacauaaagguaagauggcugauuuacua

SEQ ID NO: 7778 - RNA, 93 nt, Human
uucuuuuggcacugucucaauaugcaaagcguguuaauugcaaaauaccugugcagaaaacauuguguguauaagaucuaaagccuaaaagga

SEQ ID NO: 7779 - RNA, 80 nt, Human
caaaucggugccacccggccgugacaaauccuaguagauucugugcauguggagcggccgcgaagaggugacaccguuug

SEQ ID NO: 7780 - RNA, 62 nt, Human
ggcuguguccuuauuuuauuuuauuuuuuuguagaauguaaaaagucauuuuagaugccacc

SEQ ID NO: 7781 - RNA, 110 nt, Human
gaccacuguaaucccagcgcccaaggaaggccacuucucaacuggcagaacuucugaaguuuagaauuggaauuacuuccuuacuagugucuuuuggcuuaaauuuuguc

SEQ ID NO: 7782 - RNA, 108 nt, Human
gggaaagaggaacaggagugccagacuccuggucuuuccaguuuagaaaaggcucugugccaaggagggaccacaggagcugggaccugccugccccugucuuuuccc

SEQ ID NO: 7783 - RNA, 74 nt, Human
ccacccccacccccugggggcaccuggcaauguccggagacauuuuugguugucacaacaggaggaacgggugg

SEQ ID NO: 7784 - RNA, 69 nt, Human
gagauggguuucacaccaugcuguccaggcuggucuuguauuccugggcucaagugacccucccaccuc

SEQ ID NO: 7785 - RNA, 74 nt, Human
agccuucaucgucuggcuggccaacggggacacccuccgugucuucaagaugaccaagcgggaggaugggggcu

SEQ ID NO: 7786 - RNA, 70 nt, Human
gaggacuucccuaaaaagcacaaggcgccugucaucgacauuggcauuugcuaacacagggaaguuuauc

SEQ ID NO: 7787 - RNA, 62 nt, Human
ugaacaacacacacgcugcuguaucucccugugggcagauuugguagccucguguggguuua

SEQ ID NO: 7788 - RNA, 75 nt, Human
acuuuauuaaaugcuguaaaaucuaaauacgauccuguuggaugugaaugggucuaguccaguuuauuuuaaagu

SEQ ID NO: 7789 - RNA, 84 nt, Human
ccagugcaccccagcuccggggcagaagaggcagccugcagaucucugcugccgggaaagagcuccugaaguuguggggucugg

SEQ ID NO: 7790 - RNA, 68 nt, Human
gcagggagaggcgucuccaguggcagccuugggucacuuccauagcucccccagcggcuucucugugc

SEQ ID NO: 7791 - RNA, 70 nt, Human
uuccaacugauuaccauuuacagugaucacaaugaaacugcucagaguuaucacugaacuucaguaagaa

SEQ ID NO: 7792 - RNA, 74 nt, Human
aggguaguaauuucucauaauauggauaaagcucugaaagaaguguucgacuacaguuauagagauuacauucu

SEQ ID NO: 7793 - RNA, 60 nt, Human
auugccagacagcugcaccacagacugagucacguggaugugguuaaaguugucugcaau

SEQ ID NO: 7794 - RNA, 64 nt, Human
gacuucgccgccgccuggugccggcuggccgcgaccucagccgcccgccgcccgccggggaguc

SEQ ID NO: 7795 - RNA, 63 nt, Human
ggccgccuuccugcuggggauccuguuugcccucgucugccggagcccgcgcgcccagccgcc

SEQ ID NO: 7796 - RNA, 80 nt, Human
uccccgacagguguccucucccggaaucggggucugaaccccgccaagcucugcaggggaggaagcaccugggucgggga

SEQ ID NO: 7797 - RNA, 78 nt, Human; identical to SEQ ID NO: 99

SEQ ID NO: 7798 - RNA, 65 nt, Human; identical to SEQ ID NO: 247

SEQ ID NO: 7799 - RNA, 80 nt, Human; identical to SEQ ID NO: 100

SEQ ID NO: 7800 - RNA, 61 nt, Human
uugagaaccugaagaaaacuuagauuuuccugaguucauugaacuauuucuuaauccucaa

SEQ ID NO: 7801 - RNA, 131 nt, Human
ugacuccagcucagucggugaugaugagcucguccaccccccagucuucauagcucccaucuggcagguaacggcgaaugaugauggggaucuuucgggccuugaguuccuucauggcaaugagcagagga

SEQ ID NO: 7802 - RNA, 79 nt, Human
uagccugggcgcucuccagaaaagcuacacuugaacugacacacaauuggggcacugaagaugaugcgacccagaguua

SEQ ID NO: 7803 - RNA, 73 nt, Human; identical to SEQ ID NO: 729

SEQ ID NO: 7804 - RNA, 62 nt, Human
uuuucacucugcuucuuggcuuaugaggauaaaaaugacaucccuaaagaaaaagaugaaaa

SEQ ID NO: 7805 - RNA, 67 nt, Human; identical to SEQ ID NO: 1379

SEQ ID NO: 7806 - RNA, 63 nt, Human; identical to SEQ ID NO: 1366

SEQ ID NO: 7807 - RNA, 81 nt, Human
gcggccggggcgggagagacucagcaacgacccauaccucagacccgacggcccggagcggagcgcgcccugcccuggcgc

SEQ ID NO: 7808 - RNA, 75 nt, Human
cuuuuccgacuuccuuccauccgaguagagugacccugggccggucacucagcgggggacacaggaagggcugag

SEQ ID NO: 7809 - RNA, 79 nt, Human
gaucuguggcugcugcauuuugggcuuugggaucuaccugcugauccacaacaacuucggagugcucuuccauaaccuc

SEQ ID NO: 7810 - RNA, 85 nt, Human
agggaggggcugggggggggcaugaauggagucagggagucggccuuucacagaacaggaaaccucccccgccccugugcccccu

SEQ ID NO: 7811 - RNA, 62 nt, Human
uuccgaccagauucagcugggagccgggccaggcuuuagguuggggaaugggaaugaaggga

SEQ ID NO: 7812 - RNA, 78 nt, Human
uuuuuuuuuuuuuguuucuaaaagauguuuauuuuccuuaagaguaaaaaacagucauugcauucagaaaaaaaaaaa

SEQ ID NO: 7813 - RNA, 60 nt, Human
gcuagaugguaugaaaacuuauuaggaaccuuuuuguuuuugagaccauugcauucuggc

SEQ ID NO: 7814 - RNA, 66 nt, Human
ggacagcauuauuaggaacccuguaguaugauauuuaacaauauaggcuucaagaagggcuggucc

SEQ ID NO: 7815 - RNA, 131 nt, Human
ugucugauguguucuuccuuuagucaucauguuaggucuguguacccuaaaucagcauauuacucauaaaucauuaauuaauauaagcauaggaaauggucuuaaaagauacugcauucauucaucagaua

SEQ ID NO: 7816 - RNA, 75 nt, Human
agaggaaggaggaguucagagguuccccagggaagaaggcccggggcuugcacugcaccccagacaguuuccuuu

SEQ ID NO: 7817 - RNA, 60 nt, Human
gccauccggaagcggcucuuguucaggacguggacgcaaccagggccggcugggagcggc

SEQ ID NO: 7818 - RNA, 64 nt, Human
uguggcuuaugaauguucuaaucagguguggaaggagcugacacacggagagucacaggcuaua

SEQ ID NO: 7819 - RNA, 68 nt, Human
agccuuuauugggucagggcuugcuccagagcucaggggccagguaggucaggagccuugggauggcu

SEQ ID NO: 7820 - RNA, 66 nt, Human
gcggggcccgggcggcggcgcuagcagauccagcggauaaaagcggucgaagaagccggguugcgc

SEQ ID NO: 7821 - RNA, 82 nt, Human
ggagcuggagaggugcaggcccagggcgucguccgagugagcagcggugcuggccgugugggacccgggcccgcuuagcacc

SEQ ID NO: 7822 - RNA, 79 nt, Human; identical to SEQ ID NO: 6595

SEQ ID NO: 7823 - RNA, 86 nt, Human
uauaaucuagccacaguguggcuauaaugaggcacggcuuauugcagcuggaaaucaauuauccucacgcugagguggggauucua

SEQ ID NO: 7824 - RNA, 73 nt, Human
ugacuuuugguuuuugucuuuguuuuuaaucauggucccaaaggcagaaggcaguauuuuaucuacuaaguca

SEQ ID NO: 7825 - RNA, 69 nt, Human
gaaggaauaaaggaucuucuugggaaaaaaguguuuaccacaccugauaaguugccauuguucaccuuc

SEQ ID NO: 7826 - RNA, 70 nt, Human
uaccagagucauuucuaucaaaagauauauuucaggauccgggauaauuugaccauaugacuuccuggug

SEQ ID NO: 7827 - RNA, 96 nt, Human
uugcagaacuuacuacuguuuaauacuuuguagaaggaggaauauuuaaacacaaaucuuguuucaggaaagugcuccauagaaaguaaguugcgg

SEQ ID NO: 7828 - RNA, 87 nt, Human
uauuuaagaucacucuaggauccccaaauuuauaguaacuuaauaacuuaaaguucuuuuguaaacuccuauagcugcucuuguaua

SEQ ID NO: 7829 - RNA, 97 nt, Human
aaaugacauaguaaaugauuguuuaaaauuuuuaaauccagacauaaacauauggcuucauuauuaacauccuguauaguccauuacuaaauuauuu

SEQ ID NO: 7830 - RNA, 68 nt, Human
gaugcauucuuaauauuguuuuggucagcuggaauacagcagaaaaauuaacacaguugagaaauauc

SEQ ID NO: 7831 - RNA, 87 nt, Human
ggaccuaaacccuuuuacgccucuuguaggcauucggauuccugaucaugcuuuuaugcaagacuuggcucagauguuugagggucc

SEQ ID NO: 7832 - RNA, 71 nt, Human
ugaggggcuccugaaagaccuacugccaggaccagugacccuggugauggaacgcucggaggagcucaaca

SEQ ID NO: 7833 - RNA, 81 nt, Human
aggaguagagaagggggacaggaguuagggggccccuguguagggguauagggcuccugcaucccucugggaucugagccu

SEQ ID NO: 7834 - RNA, 122 nt, Human
gaguccggcgagugccucaauggaagcgguacuuucuggcuggcuugagguugauguauguggccuucaucuccucggccucaggguuccgcacaucuuugaaucgcuccccuuuggugcuc

SEQ ID NO: 7835 - RNA, 70 nt, Human
gcuccccuuuggugcucacuaccugguugucgauguaucggaucagcuucuugggggccuccuugggagc

SEQ ID NO: 7836 - RNA, 79 nt, Human
ggccgcaugcuggagguaaaguccaugguucccuggccccgugcuggaaaacgugagaggucagacuccuaagguggcc

SEQ ID NO: 7837 - RNA, 112 nt, Human
ggguugcugaucagacugcgagcagcaggggggcugccacuggcagagcuggaagcauguagaucagagauggcagcagcagcugcaggcgcucggggcuguccagcagccu

SEQ ID NO: 7838 - RNA, 69 nt, Human
guccugcagcugcagcugagacugcggcggagacugcgcgagcgugaggagaagcuggggccgcaggac

SEQ ID NO: 7839 - RNA, 73 nt, Human
caugcuauugaaugcaucuuguuuauaacugucuucuaaauauugaauagaaauaaagcguuuuuacaguaug

SEQ ID NO: 7840 - RNA, 71 nt, Human
ccagccuggugaugcagcaggugucacagaaggacccugucccagcugguccugcuccacugcuaggaugg

SEQ ID NO: 7841 - RNA, 67 nt, Human
uuuuuuuugugaaaaacaauuaugggaaauuauuuuugcuuuuccaaaauuaugacaacaaagaaaa

SEQ ID NO: 7842 - RNA, 61 nt, Human
gucgguagucaggguacuggguacacggauguucuuuguacuguucuuuggucuguugcgc

SEQ ID NO: 7843 - RNA, 61 nt, Human
uuuguaauuaucuuuuaaugagcucucaucuuggagagauacauucugaaauauuuacaga

SEQ ID NO: 7844 - RNA, 79 nt, Human
aguguccuauaauucuauugaaaguuuuuaauauuuauugaauuauuuuguuacugucuguaguguuuuguggaguacu

SEQ ID NO: 7845 - RNA, 85 nt, Human
cucuucaguguguugacuucuauccuguuaacacuguaauaucuuuaaaugauguacaggcagaugaaaccaggucacuggggag

SEQ ID NO: 7846 - RNA, 69 nt, Human; identical to SEQ ID NO: 1094

SEQ ID NO: 7847 - RNA, 63 nt, Human; identical to SEQ ID NO: 6444

SEQ ID NO: 7848 - RNA, 91 nt, Human
gacucagaauccggcggagaccgaggggggguccuuggccuuucgcuucccaucucccagucccugaaccucugccagaagcuccugaguc

SEQ ID NO: 7849 - RNA, 92 nt, Human
gagaucaaaggggaaugggacuaagacugcagagcccuggcucccccacugccugccaauugccugcgguuuguggucucuuccacuuucuc

SEQ ID NO: 7850 - RNA, 99 nt, Human
cagcgucugugccggcuccaggugccugccucugggugugugagugggagacuuugcucccuggccucauccuagagaggccccuggugccuagugcug

SEQ ID NO: 7851 - RNA, 103 nt, Human
cggcggccgaagaggcuggcagguggcgccguggggugggugcuccuggugagaggaguccacuccgugcgugcgggcggaggccggcccccgagagccgccg

SEQ ID NO: 7852 - RNA, 63 nt, Human
ucugaucugguggaauauaguaguauggagaccauccuuccuauuaugaaccagguauacaga

SEQ ID NO: 7853 - RNA, 93 nt, Human; identical to SEQ ID NO: 6421

SEQ ID NO: 7854 - RNA, 69 nt, Human
gacugaaaggccuugcuauaacaggagagcuucaaaaacugacuuacuaaugcagcagggacuuuuauc

SEQ ID NO: 7855 - RNA, 70 nt, Human
gccacucuuccaagccucuuggugcacaguaaccuauugcugaaagcuuuugaacagcugagaaaguggc

SEQ ID NO: 7856 - RNA, 61 nt, Human
ggggccucuggugccacuggcauaguauauacuaacaucauucugccagguaggaagcccc

SEQ ID NO: 7857 - RNA, 74 nt, Human; identical to SEQ ID NO: 365

SEQ ID NO: 7858 - RNA, 102 nt, Human; identical to SEQ ID NO: 2172

SEQ ID NO: 7859 - RNA, 102 nt, Human; identical to SEQ ID NO: 3952

SEQ ID NO: 7860 - RNA, 77 nt, Human; identical to SEQ ID NO: 3082

SEQ ID NO: 7861 - RNA, 85 nt, Human; identical to SEQ ID NO: 814

SEQ ID NO: 7862 - RNA, 68 nt, Human; identical to SEQ ID NO: 2853

SEQ ID NO: 7863 - RNA, 60 nt, Human
cuccucgcuccgugcucgcaggugccuccuccuggacggcggcagcggcggcgcgaggag

SEQ ID NO: 7864 - RNA, 76 nt, Human; identical to SEQ ID NO: 3277

SEQ ID NO: 7865 - RNA, 64 nt, Human; identical to SEQ ID NO: 1324

SEQ ID NO: 7866 - RNA, 78 nt, Human
acuguagagggaauugccgggugugccccauggauuggaggacaaguuugcgaucacaagggccggcacuucugcagu

SEQ ID NO: 7867 - RNA, 63 nt, Human
gguuuccgaacaccgaaauuuggucggaaguaaacuggccgucuaaaacgggcuucacaaacc

SEQ ID NO: 7868 - RNA, 92 nt, Human
gagcuuucugggcagacuuggugaccuugccagcuccagcagccuucuuguccacuggcuuuggaugacacccaccggcaacugucuggcuc

SEQ ID NO: 7869 - RNA, 69 nt, Human; identical to SEQ ID NO: 1724

SEQ ID NO: 7870 - RNA, 85 nt, Human
agguucuggguccggggcgaggggcccaucuucuucuacacugggaacgagggcgacgugugggccuucgccaacaacucggccu

SEQ ID NO: 7871 - RNA, 80 nt, Human
gcuggcggccgagcggggggcucuacuggucuucgcggagcaccgcuacuacgggaagucgcugccguucggugcgcagu

SEQ ID NO: 7872 - RNA, 94 nt, Human
ucauggauaacugugaggagcuaaucccugaauaucugaacuucauuagaggggugguagacucggaggaucucccucuaaacauaucccguga

SEQ ID NO: 7873 - RNA, 66 nt, Human
uuuugaaaguuaucaggaagaauugggucaaagaaaugcuuagaacucuuuacugaacuggcggaa

SEQ ID NO: 7874 - RNA, 123 nt, Human
cccgguaucauuccucgaauuucagugcgggaaccaaugcagacuggcauuaaggcuguggauagcuuggugccaauaggucgugguccagcgugaacugaucaucggugacgacagacuggg

SEQ ID NO: 7875 - RNA, 75 nt, Human; identical to SEQ ID NO: 74

SEQ ID NO: 7876 - RNA, 67 nt, Human; identical to SEQ ID NO: 836

SEQ ID NO: 7877 - RNA, 87 nt, Human; identical to SEQ ID NO: 76

SEQ ID NO: 7878 - RNA, 60 nt, Human
aacauugccauccuguguguauguauauguauauguauacuuuuuucacuggcuuauguu

SEQ ID NO: 7879 - RNA, 73 nt, Human
agucuccuaaggauaccuauuuucuuuaugaauauucugaacauguguaaaauggcccuauuuuuaacagacu

SEQ ID NO: 7880 - RNA, 62 nt, Human
ccgaccgcucccauggcccccggcugcacugccacaggccccaccacccaccacgacggcgg

SEQ ID NO: 7881 - RNA, 89 nt, Human
gguuuaaacaagauuggaaggaacaauuuaaaagcacucauguauaauugauaugucaaguuacuaaucauuccucuauucauuaaacc

SEQ ID NO: 7882 - RNA, 88 nt, Human
agagucucacucugucaccuaggcugaagugcaguggcgugaucucagcucacugcagccuccaccucccggguucaagugauucucu

SEQ ID NO: 7883 - RNA, 73 nt, Human
gaagaaugaguuuacaguauggauagcuccuccuagauuucaaggggaguaaauuccccccucucauuuuguc

SEQ ID NO: 7884 - RNA, 79 nt, Human
gcacaggagucuucacgaugugcgccucaggcuggcucucucaaauuucugggcccucagggcgccuccucuccugugc

SEQ ID NO: 7885 - RNA, 61 nt, Human
uuguuggccaggcuggucucgaacuccugaccucaagugaucugccugccucggccuccaa

SEQ ID NO: 7886 - RNA, 63 nt, Human
cacuugaggcaugucacaagggcuggggcgucagcgucgugguuggaguagcugcuucaggug

SEQ ID NO: 7887 - RNA, 74 nt, Human
ccugaaccugagucuguggcgaccagaacacagagggcuggagcugcugccugcucacacagaacuaggucggg

SEQ ID NO: 7888 - RNA, 73 nt, Human
uagggaagaucuaggagaagaggaagaacaguaagccacugcuucuuggaaaaucuucugggggucugaccug

SEQ ID NO: 7889 - RNA, 76 nt, Human
ugggagcugugucccuuuccucuugaccccgugaagauuccuagggcgggguggggaggagggggcacaguaccua

SEQ ID NO: 7890 - RNA, 78 nt, Human
ugguguggcgucagcccuaugugcgccccggaagugaugugaagcagugagggcaaaauggguugacgcgaagcacca

SEQ ID NO: 7891 - RNA, 61 nt, Human
cauuaaguuuguguuagucuuuauuaaaaacaaaaaauaacuaaaauuucagacagcgaug

SEQ ID NO: 7892 - RNA, 73 nt, Human
accagguccaguucacagacauuguggaaauauucguuuaagaccuccacgaaguugugaauggccuccaggu

SEQ ID NO: 7893 - RNA, 65 nt, Human
ggggaagcgagcaggcgaguccaggaggggccggggccgggguggggcucgccugcccucacucc

SEQ ID NO: 7894 - RNA, 66 nt, Human
guggcccaaacccagcugggucccuuccuccuaggcagcugagggaaggacugcuggguuggccac

SEQ ID NO: 7895 - RNA, 63 nt, Human
cacccugccuugucuccaggagguccgaagcucugugggaccucuugggggcaagguggggug

SEQ ID NO: 7896 - RNA, 101 nt, Human; identical to SEQ ID NO: 5402

SEQ ID NO: 7897 - RNA, 72 nt, Human
ggcuggggcagguggccgccuuccacacacuugaggaacccuccccucucccucggugacaucuugcccgcc

SEQ ID NO: 7898 - RNA, 97 nt, Human
agaauuaggcagcuggacucaguuuagaugaucccaauuuuguuggcaacauccaaagcaucguaaucaggagccagucgaacauaugccuucuucu

SEQ ID NO: 7899 - RNA, 62 nt, Human
gugucuucggccgccggaaggggggugcguccggaucuucuucuuuuuguggcuguggacac

SEQ ID NO: 7900 - RNA, 70 nt, Human
guaauacacaacauacuuuuauguuucuuuuauagguaucuaucuaauaaaaguuuauuuguguaugugc

SEQ ID NO: 7901 - RNA, 71 nt, Human
uuucauuuaaaaaaugguuucagcaaauaugaaaauagaaaguccguuauuuguccauuuguaauaugaga

SEQ ID NO: 7902 - RNA, 83 nt, Human
ccaugccugaagcuaaaaauauauacggguuuuugaaugcagcagccaauaaauuccauuuuguguggugguuuaggcuaugg

SEQ ID NO: 7903 - RNA, 63 nt, Human
cggagcaccugucuucauugccucucccuucugcagccugaaaggaggauguucaggacucug

SEQ ID NO: 7904 - RNA, 90 nt, Human
cugggcugggcuaggcugggccuagcuguagagacacaccuaaguuccguucucuguuuggaggcugcacccagccugaguccccaccag

SEQ ID NO: 7905 - RNA, 76 nt, Human; identical to SEQ ID NO: 4396

SEQ ID NO: 7906 - RNA, 72 nt, Human
auuugccaaguauguaucugauccacacaaaucccuagaaagguuuucuguguagucuucauuaacgcaaau

SEQ ID NO: 7907 - RNA, 74 nt, Human
aaggcugggggugggaagauggaauacugaccuaauguauaaaacuuaaaacaauucuccaauccccucuccuu

SEQ ID NO: 7908 - RNA, 80 nt, Human
cauugcuaaguguacugcugccgaaguugccccaguuccaugggguucgugucuuuggcaucaacaaauacugagggaug

SEQ ID NO: 7909 - RNA, 61 nt, Human
gaagagaagagauuggcaaauggggcuccugggcccaguccugcuaguggcaaguuucuuu

SEQ ID NO: 7910 - RNA, 65 nt, Human
gggcauggggaaggcacugaaacagaggacuauaaaacauccuucucuuauucuccauacugucu

SEQ ID NO: 7911 - RNA, 65 nt, Human
cuuuucugguggauucaucaucuaugacacacacucacugaugcauaaacuggucaccugaagag

SEQ ID NO: 7912 - RNA, 131 nt, Human
gacuguguauacucuacaaucuaagaaggauuucagcaaauuuggagcagggcuguuugcucuuuuguggauauugugccugucaggauucuugaaguuuuuuuuuuaauagugagauaauggaguugguc

SEQ ID NO: 7913 - RNA, 60 nt, Human
guguuggcagcaggugccucucagcuggugcuggacagaaggggcuugcaguauuugcac

SEQ ID NO: 7914 - RNA, 68 nt, Human
uccaaacccgguacauugucaguugcuuuccucgguucaccugcagucggcgauccaccagguucuga

SEQ ID NO: 7915 - RNA, 75 nt, Human
caguucuugguacucacagauuucagccuuugguguuuuuuaaucuuacccaaacuguaugucagcaccccacug

SEQ ID NO: 7916 - RNA, 63 nt, Human
gacaauaaacuaaauaaauauucuguaugauguuuuaacagaccauugaaaaacaguauaguc

SEQ ID NO: 7917 - RNA, 61 nt, Human
gacggcgcuacgcacggaccgacgggaagguuuuccaguuucuuaaugcgaaaugcgaguc

SEQ ID NO: 7918 - RNA, 130 nt, Human
aaaggaucccgccuugaauggacccauuaccagugaaggggcauuucuuggcaaauguagggccccuaauaagccucuuugguggcuuugagcccaaaccgguggucuuggaguaccgcgggagcuucuu

SEQ ID NO: 7919 - RNA, 76 nt, Human; identical to SEQ ID NO: 758

SEQ ID NO: 7920 - RNA, 83 nt, Human; identical to SEQ ID NO: 2490

SEQ ID NO: 7921 - RNA, 61 nt, Human
agacaaccacauaccugccuucuaauauccugcgauaguggaggcuaaauuuaaauugucu

SEQ ID NO: 7922 - RNA, 77 nt, Human
uuugaacuauguugggccaauccaauucuucccucuuggaaucugaaauugggauuggagacagguaguaaaucagg

SEQ ID NO: 7923 - RNA, 67 nt, Human
ccaaauaaugauaaaaauagauguauccucuguaaaaaucuggacuaaacuauucagucauucaugg

SEQ ID NO: 7924 - RNA, 90 nt, Human
ggguggccucucccuggagcugagcccacccugggggacccuggaucaugccccuuugcccccagcccuugguuugcagggaggccgccu

SEQ ID NO: 7925 - RNA, 80 nt, Human
acaggcugcuauaaaugcgcuugauggccucggcuucuuccuugucaaggaugccuuucuccacauaagcaucagcuugu

SEQ ID NO: 7926 - RNA, 61 nt, Human
agcggacagguccagaagccccccggaaccgcacuguucaccuuuaucugaccaaaccgcu

SEQ ID NO: 7927 - RNA, 65 nt, Human
gauuggacucuaucauaugugucaaauccaagcuuaaacaauuugacagugugguucaucugauc

SEQ ID NO: 7928 - RNA, 61 nt, Human
ggacagugacucuggggcugggaugugacuucgugcugggcccccccaggugaagcuguuc

SEQ ID NO: 7929 - RNA, 73 nt, Human
gaguugagccuuggccagggguccggugcugucgcgggaaaccuccagccuuguucuucaaaccacucagcuc

SEQ ID NO: 7930 - RNA, 83 nt, Human; identical to SEQ ID NO: 1471

SEQ ID NO: 7931 - RNA, 98 nt, Human; identical to SEQ ID NO: 6908

SEQ ID NO: 7932 - RNA, 78 nt, Human; identical to SEQ ID NO: 6909

SEQ ID NO: 7933 - RNA, 104 nt, Human
aaugacccguucuggaaucagcuucucucauuuucuuucccugcaccaacuagcagugaguugaaacucuuggaggaagcaaccauuucagucugcaggucauu

SEQ ID NO: 7934 - RNA, 61 nt, Human
ucggcgaucuuccuaaaaaugaguacuugaaaaaguuaucaggcacggaaucuaucucuga

SEQ ID NO: 7935 - RNA, 72 nt, Human
cagugucccauugucaucuacucagucucuaauagggcuaaggagcaugauaguaucuauuuauaagcacug

SEQ ID NO: 7936 - RNA, 65 nt, Human
gccagaaauuccacacagcauuguuauccaucaugggcauuacuagcaacacuggaguggcuggu

SEQ ID NO: 7937 - RNA, 60 nt, Human
uuuccuacuguagaaggcauggaucuaccccauuuagauuuacugucuauaccauugaaa

SEQ ID NO: 7938 - RNA, 84 nt, Human; identical to SEQ ID NO: 286

SEQ ID NO: 7939 - RNA, 89 nt, Human; identical to SEQ ID NO: 288

SEQ ID NO: 7940 - RNA, 61 nt, Human; identical to SEQ ID NO: 776

SEQ ID NO: 7941 - RNA, 71 nt, Human
uguuuuauuugguucaaaauauaaagggcagguuagagggcuacacagaaaaaaggcuaaaaauaaagaca

SEQ ID NO: 7942 - RNA, 86 nt, Human
ugucuggcaauggucauccagcuuucacagaguaaucuaucuuaagauauaguuuagggaggcaaaaucaaugacucaagaggaca

SEQ ID NO: 7943 - RNA, 62 nt, Human
cugagcuucgcaucaucagcaccaucacgagagaaguggagccugaaggggacggggcugag

SEQ ID NO: 7944 - RNA, 67 nt, Human
gcaaaacagcuguagguggccucccugacaacagacacucagcccuccccacccuagcucuccuugc

SEQ ID NO: 7945 - RNA, 65 nt, Human
gugguccuggcacgugggccaccagucuucugaaugaagaguugagucccgggucaggaguccac

SEQ ID NO: 7946 - RNA, 93 nt, Human
ccggccuugccagacggaagcuccuuguccccgacugcagcacaggcccuggcugugggacauaagcaaagauuuggugcuggaugaggaagg

SEQ ID NO: 7947 - RNA, 72 nt, Human
ccaggagccugcaugugcuuuggccauuucacauaugagguuuggucacugguccaggaaacagguucuugg

SEQ ID NO: 7948 - RNA, 81 nt, Human
uucauugguacaaacaucuuucauacacaauaggcuaugauaaaaugaggcauauggguguauaacuacaguauuaaugga

SEQ ID NO: 7949 - RNA, 66 nt, Human
accauuguccauuucuacauguuauucgcuuguuacccucaaguugauacaaguucuggcauuggu

SEQ ID NO: 7950 - RNA, 72 nt, Human; identical to SEQ ID NO: 1696

SEQ ID NO: 7951 - RNA, 60 nt, Human
gcugggacuugucuuucgggguucuuuguaggcccggggggaggcaucaaaguccacggu

SEQ ID NO: 7952 - RNA, 82 nt, Human
ggugagacagggagucccggcugcccuguggccccauucuguuguggaggcuucgcugggagcugagaacacccugcugucc

SEQ ID NO: 7953 - RNA, 63 nt, Human
uuuuuuuuuaguacaagugguuuauuucucuuccaggugaggccgcauguauauaagcaaagg

SEQ ID NO: 7954 - RNA, 91 nt, Human
ggaucuuccaauucuucugauuuuaggaaauucuguugcgugcuaaccuugaacacaugcuagccucccuuucucagauuuggaaagaucu

SEQ ID NO: 7955 - RNA, 60 nt, Human
guaauaguuauuucucuaaaaugaaacauauauuucauuuuauauauauauauauauuac

SEQ ID NO: 7956 - RNA, 87 nt, Human
acuguauuuuuacuauacuguugcuauguuuggauacauaccacuguguuuaaguugccuacaguauucagcccaguaacauacagu

SEQ ID NO: 7957 - RNA, 65 nt, Human
uuuuuugagauggaauuuugcucuugcugcccaggcugggguugcaauggugagaucucaaaaaa

SEQ ID NO: 7958 - RNA, 62 nt, Human
cagcccugugccuuugcuagagaaccgacaaucaaacccuuuucuguggaggaucaaggcug

SEQ ID NO: 7959 - RNA, 73 nt, Human
cucaacuggauucggaaugugcugauuuccauuggacucaaguugaucucacuuauauucugagugccgggag

SEQ ID NO: 7960 - RNA, 77 nt, Human; identical to SEQ ID NO: 1207

SEQ ID NO: 7961 - RNA, 76 nt, Human
cauuacuggguauuuagcagauauucaaucaauauuuguuggaugcauaucaaucugcuaagugccugaaguugug

SEQ ID NO: 7962 - RNA, 62 nt, Human
gagauguaaaagagcuugucacgccugugcacagcgcagucggaggagagucagaaugucuc

SEQ ID NO: 7963 - RNA, 63 nt, Human
uuccucagcuagugcaauuuauuuuucuuaguauggggcaggaguuaauauggccagaaggaa

SEQ ID NO: 7964 - RNA, 64 nt, Human; identical to SEQ ID NO: 287

SEQ ID NO: 7965 - RNA, 64 nt, Human; identical to SEQ ID NO: 287

SEQ ID NO: 7966 - RNA, 89 nt, Human; identical to SEQ ID NO: 288

SEQ ID NO: 7967 - RNA, 84 nt, Human; identical to SEQ ID NO: 286

SEQ ID NO: 7968 - RNA, 64 nt, Human; identical to SEQ ID NO: 287

SEQ ID NO: 7969 - RNA, 131 nt, Human; identical to SEQ ID NO: 6294

SEQ ID NO: 7970 - RNA, 64 nt, Human; identical to SEQ ID NO: 287

SEQ ID NO: 7971 - RNA, 131 nt, Human
ucuuuuacuacuaaacuuaaauggccaauugaaacaaacaguucugagaccguucuuccaccacugauuaaaagugggguggcagguauuagggauaauauucauuuagccuucugagcuuucugggcaga

SEQ ID NO: 7972 - RNA, 69 nt, Human
cugccugacuaacuccauggcauggaucuuacccgugacaaaauguguuccauggucaaaaaauggcag

SEQ ID NO: 7973 - RNA, 78 nt, Human
uuuuggcucucugaccagcaccauggcgguuggcaagaacaagcgccuuacgaaagggcggcaaaaagggagccaaga

SEQ ID NO: 7974 - RNA, 63 nt, Human
gucuucaggugauggcagaggaggggacccaagagggggccccccacugaagacauuggggac

SEQ ID NO: 7975 - RNA, 82 nt, Human
caggccugggggggccagcccgaggcgcugucuggagcucacccaguccccaccaggcgaugaccucgccccccaggaccug

SEQ ID NO: 7976 - RNA, 103 nt, Human
cgcgcccaccgccgccacccccaggagcgcuggcggcuggaguaccucauggaguuggacggcggccggcugcggccuggugugcggggugugcgggggcgcg

SEQ ID NO: 7977 - RNA, 109 nt, Human
cucggccuccgcugcuggagcccccuccucucaggaucucagccccccagacguaaaggaagaggcuggcugggucccugagaggcccgggcccgcagaggaggaggag

SEQ ID NO: 7978 - RNA, 70 nt, Human
acucuucuucuuuugugagucuucuuuuauuucuuguuuuagaggguuggauuuugauuuggagaggagu

SEQ ID NO: 7979 - RNA, 61 nt, Human
gccauagcuccuggaguuggauuuucagugacuucauugaaaauuaaaacguuucuauggc

SEQ ID NO: 7980 - RNA, 84 nt, Human; identical to SEQ ID NO: 286

SEQ ID NO: 7981 - RNA, 64 nt, Human; identical to SEQ ID NO: 287

SEQ ID NO: 7982 - RNA, 89 nt, Human; identical to SEQ ID NO: 288

SEQ ID NO: 7983 - RNA, 71 nt, Human
cccggcccucccugcccuccauucagggagaaaccucuccuucccgugugagaagggccagaggguccagg

SEQ ID NO: 7984 - RNA, 70 nt, Human
ucccaaguccagcgugaagggccacagccccucuuggcugccaagcacgcagaucccauggacauugggg

SEQ ID NO: 7985 - RNA, 73 nt, Human
ccucacaccuggaccaaaugagcugaagcugauaaaaagaaaaccuagcugcuuauuuauuucaccguggagg

SEQ ID NO: 7986 - RNA, 64 nt, Human
agaugcugacaauacuugggaaccugaagaaaauuuagauuguccagaauugauugaagcguuu

SEQ ID NO: 7987 - RNA, 103 nt, Human
gucucucaugaaauggaaagauucagaugaggcagacuuggugcuggcgaaagaggcaaauaugaaguguccucaaauguaaugcuuuuuaugaacgagagac

SEQ ID NO: 7988 - RNA, 63 nt, Human
ucagaaagcuggcaaagaaaaagaugguacaaaaagaaaaucuuuaucugacagugaaucuga

SEQ ID NO: 7989 - RNA, 95 nt, Human
uuauuuacaaugcuagaaauacagacuuaccuuacaucaauuuuguccuaaaccgaauuucucaggauuacugugguuucuuucauucugauuga

SEQ ID NO: 7990 - RNA, 91 nt, Human
uugcuaccagucuaaucuugccuuaaauguuaaguuauuuuuugaacuauauaaauauaaacauauaaacaccagaugaugacuggaguag

SEQ ID NO: 7991 - RNA, 69 nt, Human
gcaguggcaagagggguucagguagggggaugaugagggaacaccagacuuggcuaguugggccacugc

SEQ ID NO: 7992 - RNA, 73 nt, Human; identical to SEQ ID NO: 6844

SEQ ID NO: 7993 - RNA, 61 nt, Human
uuuuuuuuuuuuugggaguuauuaauucuuuauuaggauucagguuucaaacaagguagaa

SEQ ID NO: 7994 - RNA, 64 nt, Human
cugccggccgccgagcuggugcaggccugccgccuggugugccugcgcuggaaggagcuggugg

SEQ ID NO: 7995 - RNA, 94 nt, Human
ggaggagcgugcggaggaccagcaggaggaggaggcggcggcgccgcgcguaccuggacgagcugccgagccgcugcugcugcgcgugcuggcc

SEQ ID NO: 7996 - RNA, 71 nt, Human
ggggauaggggcagucgaaagggcuuggguucaaaaaaagcccagcugcuuuuucuccugccgcugccucc

SEQ ID NO: 7997 - RNA, 61 nt, Human
cguuuuuuaaacguuaauaaugugauuuucaguaaaguggcaggaucagcauugaagaaug

SEQ ID NO: 7998 - RNA, 118 nt, Human
ggggagcgugcaagugccucucgagcgcuacguggagccucgccuucugcacagacucucggagggccggggcuggauggagcaacugagugggcguggaugucuuugcaugguuccc

SEQ ID NO: 7999 - RNA, 87 nt, Human
ccgagguccgucgcaagguugcccagguccgggccgccguggaggguggugaggcgccggggcccacugagugaggacggagcuggg

SEQ ID NO: 8000 - RNA, 92 nt, Human
cgcuugaggggauuauaauuucuuuaaaaagaggggaggggagaggccauggccgucccagucaagaaaaggaagaugaacuucucagagcg

SEQ ID NO: 8001 - RNA, 66 nt, Human
cgguaucguagauagaccuggcugggaggagaggcaagcaguaaaucgagacuuggccaugaaccg

SEQ ID NO: 8002 - RNA, 60 nt, Human
cuuggccucgagcaagccuggccuauccccuguagggggugggugaggggcgaggcugag

SEQ ID NO: 8003 - RNA, 60 nt, Human
gagguggagaucaucguggaggagcuggagcugaagaagcaccugcuggugaaccacuuc

SEQ ID NO: 8004 - RNA, 77 nt, Human
gugggcacccugccaccagaagccagcugacgccgcauccaaccaugaaaucguccgcccucugccccgcagcccac

SEQ ID NO: 8005 - RNA, 109 nt, Human
aggcuuggcuuuguuacuuuugaugaccaugauccuguggauaaaaucguauugcagaaauaccauaccaucaaauggucauaaugcagaaguaagaaaggcuuugucu

SEQ ID NO: 8006 - RNA, 91 nt, Human
uugguuuguaacuuuuucauccauggcugagguugaugcugccaugggcugcaagaccucauucaaauugaugggagaguaguugagccaa

SEQ ID NO: 8007 - RNA, 64 nt, Human
uggggaaaugguuccuuuccguuaagcccccagggaaaacggaagggaaccuuacuuucuucca

SEQ ID NO: 8008 - RNA, 61 nt, Human; identical to SEQ ID NO: 1988

SEQ ID NO: 8009 - RNA, 60 nt, Human; identical to SEQ ID NO: 2705

SEQ ID NO: 8010 - RNA, 67 nt, Human; identical to SEQ ID NO: 6859

SEQ ID NO: 8011 - RNA, 79 nt, Human
gcggaggccgagcugggccagggccgccagccgcucaggugguagccacgccagagcggggucgccucugggccucugu

SEQ ID NO: 8012 - RNA, 61 nt, Human; identical to SEQ ID NO: 6860

SEQ ID NO: 8013 - RNA, 74 nt, Human
ucucuuguucgugguggaucuuucucagccugagccguggacucaaguugacgauuuaaaauaugaacuggaga

SEQ ID NO: 8014 - RNA, 75 nt, Human
cacagucuuugacaauaguagcuuacuaagacugcucagaaugaguaagcuuuaggaaacuacuaaaaugcugug

SEQ ID NO: 8015 - RNA, 60 nt, Human
gaauaacaaaauccguucucucucuucacuugacagaagcauuaacugaauuuguuuuuc

SEQ ID NO: 8016 - RNA, 69 nt, Human
ggaagggguaaacccagguuccucuucuugagucaaucuccagaaugggacauggguucaucuccaucc

SEQ ID NO: 8017 - RNA, 78 nt, Human
gacucucgccggccgcgcgaacccguuugagcucgguauccuagugcacacgccuugcaagcgacggcgccaugaguc

SEQ ID NO: 8018 - RNA, 62 nt, Human
uguugaaacaucguggugcacauuuguuuaaaccaaaaaaaaaaacacacccaccaccaaca

SEQ ID NO: 8019 - RNA, 75 nt, Human
ccugugaagcagaccucuccagggggaggugaguuaagccuuuccagccacuggacgaguaagucaaugcauggg

SEQ ID NO: 8020 - RNA, 81 nt, Human
gccaucaauuucaacuagaaaggagcuaaagccauagagacaauauagccagagggcucaacaacuaaugaguuggguggc

SEQ ID NO: 8021 - RNA, 78 nt, Human
guguuugcugaugguuucccauuuuaggauagggcucaucaaaagccagucagacuaaaggaagaauuagauggaugc

SEQ ID NO: 8022 - RNA, 68 nt, Human
cccaccaguccuugcacuguucugacacuuuccccaggaggaaaacaaaguacaaagguuacgguggg

SEQ ID NO: 8023 - RNA, 65 nt, Human
cagcuugcuuucugaccaugggcccugagccugagucuguacccggguccgugggaaguuggcug

SEQ ID NO: 8024 - RNA, 86 nt, Human
uccaucaccguggugcugcagguugucagcgaugccggcucucuccuggccuguugucugaaugccgccugcauggcauuggugga

SEQ ID NO: 8025 - RNA, 91 nt, Human
acauaguuccugucaaaaucccaguaagauauuugaauagauacagacaagauuauuccaaaguuuauacgggaagacaaaggaacuaagu

SEQ ID NO: 8026 - RNA, 78 nt, Human
gugauccugugaucaugaucgggaaggcuuaacaugguaaagaugucaaaucuccccaaauugauguauagguauaac

SEQ ID NO: 8027 - RNA, 68 nt, Human
uccccugugaagggcacaagguugggccugggguuggcuuggcacuuggggggccguuggcuugggga

SEQ ID NO: 8028 - RNA, 75 nt, Human
ggccuguggugcgguuugguggauuuggggcgcaccaccuccgcccuaaccccaaccccaacguguccccaggcc

SEQ ID NO: 8029 - RNA, 64 nt, Human
ggcacuuggaagaagccgaggagggggagggccgagcccaacgaguuggcagcuccagggggcc

SEQ ID NO: 8030 - RNA, 63 nt, Human
gugggugcugcgccacaugacgcaggcggggggacgaacacacaugcgcgacgcagcgccgac

SEQ ID NO: 8031 - RNA, 66 nt, Human
ggcagucacuucccaugagggccuggcccacccgcugcaguugcccuaaggaaaaauaaagcugcc

SEQ ID NO: 8032 - RNA, 92 nt, Human
ugcggugcuccccagaaaaggggaaggggcaguggggugagaagguccuggcuccccuucucccggccuuccucugccuggggcccacugca

SEQ ID NO: 8033 - RNA, 93 nt, Human
uggccuuugggacucaaaacacaggaucugacuggugggcacaauaccaucuugaacgcccacaaaaagguuugguuuuguugccaaagggca

SEQ ID NO: 8034 - RNA, 72 nt, Human; identical to SEQ ID NO: 4169

SEQ ID NO: 8035 - RNA, 70 nt, Human
uagguaucacuacuacauuuuacauaaaagggaaguaucaauaaacuuuagaaaguaguaaauucaccug

SEQ ID NO: 8036 - RNA, 105 nt, Human
acccccgcgaagacucuggcgccuccugcaggcgucccgaucgcaggcugcgugggaggggguacugcagggucggguaugcugcuggaggccgguuuugggggu

SEQ ID NO: 8037 - RNA, 130 nt, Human
cucgcucaggcgcgcgcaccacgcccagcuaauuuuguauuuuugguagagccuggccaacaugacaaaaccccaccucuacuaaaauacaaaaaauuagccgggcaugauggcgcggcugaggcacgag

SEQ ID NO: 8038 - RNA, 66 nt, Human
gaucuguacccgacacagacgggccgaggcaagccugaggcugacaguuggugagagggacggauu

SEQ ID NO: 8039 - RNA, 81 nt, Human
aaaauaaaaagcaguugggacuaagauagcuaauuccaaauaucugugucuaaacaauuuuaaaaacuguuuauuuauuuu

SEQ ID NO: 8040 - RNA, 130 nt, Human; identical to SEQ ID NO: 783

SEQ ID NO: 8041 - RNA, 89 nt, Human
cugugcucccugugcacucucagaccccaccucuucguugucauagagugugaccaugcgcacgugaggcucuguggccagggagccag

SEQ ID NO: 8042 - RNA, 62 nt, Human
agggaaaggacugcccugcuccuuuugaggaaggaaaccugcaaggcaaguucucaaucccu

SEQ ID NO: 8043 - RNA, 63 nt, Human
ugugaaugucaaccaguuuuugcuuuauauuccuucaaaaacauuccacccuggucauucaca

SEQ ID NO: 8044 - RNA, 68 nt, Human
cccggcagcaccccuagcaaauaggucuguaucaaagauucuguacagcugguuuugggggugaaggg

SEQ ID NO: 8045 - RNA, 76 nt, Human
gggagaauccccuaagcuccagggcccagggucuaaccugagaggucggggcugcaggaagcugggggaggcuccc

SEQ ID NO: 8046 - RNA, 63 nt, Human
gcccguguacacaugcuguguggagccgcugauggugaccgcgcagaccaccucgccaugggc

SEQ ID NO: 8047 - RNA, 69 nt, Human; identical to SEQ ID NO: 528

SEQ ID NO: 8048 - RNA, 90 nt, Human; identical to SEQ ID NO: 5735

SEQ ID NO: 8049 - RNA, 65 nt, Human
cgcuuucgcuccgcguucgcgcuuucgaccagaggggggggggcgcaccucgcuuaccgaaagug

SEQ ID NO: 8050 - RNA, 79 nt, Human
ggcccagcggccucuuuccuacguaccucggacugacggggcggucugacaagugccguggguugggcuucgccgggcu

SEQ ID NO: 8051 - RNA, 63 nt, Human
guaaaggccccauuguaacgcaaggugccauucccgcauacucgacauuacucuugccuuugc

SEQ ID NO: 8052 - RNA, 81 nt, Human
caaaugauuccaauguacaguuuauacugacaaugacugaacagaagucacaauguuagcacacacacaugaggaacuuug

SEQ ID NO: 8053 - RNA, 79 nt, Human
ggcuuuuuagcuugagacucuauccugagauuuugaugugguaggucuagggugaggcauaggcauuuuuuaaaaagcu

SEQ ID NO: 8054 - RNA, 64 nt, Human
gguuuguuuuuuuuuuuuuuggaccggaaaaaauucuuuuuauuacgaguugaacagaugaacc

SEQ ID NO: 8055 - RNA, 83 nt, Human
cugaccuggccuggccccccgcgggcauggagcccgcccgcaaugcgagcagcgccacccgcccugggcagagccaggcacag

SEQ ID NO: 8056 - RNA, 62 nt, Human
ggaugccgucuggagcccuggaugccccaccaugguggcgcccaugggccccccguggcucc

SEQ ID NO: 8057 - RNA, 61 nt, Human
ggggcgcgcaaagccacgaaaagcaaacuuuuugauguuucugguccauggggugcgcccc

SEQ ID NO: 8058 - RNA, 100 nt, Human
ccucuuaucuggcugcaguguugcggaggccaggaggagaugguaccccuuagggcagccuugcuucaggaccgacugcagcacccgguugggcaggagg

SEQ ID NO: 8059 - RNA, 92 nt, Human
gcggccuucuuccaugaacagaagggcaggcugcuguucauggagguguccucagaaagguagcccugugucuucuggguggacaggccagc

SEQ ID NO: 8060 - RNA, 79 nt, Human
uaaaauguaaacgugaaaaaaaggauggaauaaaagucccuacuuauuucuacuuaagaugucaugugauaauauuuua

SEQ ID NO: 8061 - RNA, 82 nt, Human
cucacuccacgucuugucauaccugaucggcccugcgggucccucacuggagggugggucucucacugggcggggggaggag

SEQ ID NO: 8062 - RNA, 89 nt, Human
cugccaaagguaccggggccgugacgaacugagggaagauuccccugugggagucuuggguuucgucaugcccguggaccuugaggcag

SEQ ID NO: 8063 - RNA, 89 nt, Human
gcagucugaguuuacuuaugccugcuuuuguuagacuaucuugacugacaggauuauugguacauuugggcaggcuggguuuuggaagc

SEQ ID NO: 8064 - RNA, 77 nt, Human
ggguucgggugaugaugguuccacgucagcggcccuccgccucuuggguuugcgugacgguuccacgucaccgaccc

SEQ ID NO: 8065 - RNA, 96 nt, Human
guuaguuuuuggaguguggguuuuguuuuguuuuuugaauuuuuuauuuuguucuacucgguuuuauucuuauugcucaggcuugagugcacuggc

SEQ ID NO: 8066 - RNA, 61 nt, Human
ugacgguuccacgucaccgacccuccgccucuuggguucgggugaugaugguuccacguca

SEQ ID NO: 8067 - RNA, 85 nt, Human
gccaagggagagccgggcuuccgaggacccccggguccauacggacgugcgggguacaagggagagauuggcuuuccuggacggc

SEQ ID NO: 8068 - RNA, 78 nt, Human
ggagccgggaagaugccaaggcugggcuaugggaugagggcgaaaugaccgggaccagcaaggagcucccagggcacc

SEQ ID NO: 8069 - RNA, 63 nt, Human
gggcgaacgaggcuccccgggacccaagggugagaagggugaaccgggcagcaucuucagccc

SEQ ID NO: 8070 - RNA, 67 nt, Human; identical to SEQ ID NO: 2283

SEQ ID NO: 8071 - RNA, 98 nt, Human; identical to SEQ ID NO: 6908

SEQ ID NO: 8072 - RNA, 78 nt, Human; identical to SEQ ID NO: 6909

SEQ ID NO: 8073 - RNA, 80 nt, Human
gcagacggcagaaugccuccaaaggugacuucagagcugcuucggcagcugagacaagccaugaggaacucugaguaugu

SEQ ID NO: 8074 - RNA, 84 nt, Human
ggacgugacgggcggcuacguuucucacaggcugccaaggcaagauggacgagcaacguggacacguuaugaacgaucgggucc

SEQ ID NO: 8075 - RNA, 60 nt, Human
ccaggguugcugugaacagcuuuagauauuuguuuuugcacagccacacugcggccuugg

SEQ ID NO: 8076 - RNA, 79 nt, Human
uccugcuacaacaccucccuuugcauuucguugagcauacugugcaacaacucgagacaacagagaccaaagagcaggg

SEQ ID NO: 8077 - RNA, 60 nt, Human
gaccugcgggacaagauucuuggugccaccauugagaacuccaggauuguccugcagauc

SEQ ID NO: 8078 - RNA, 120 nt, Human
cagcucaaggggaagaaagucacggacaaguucacugagagcgucuacguccuggccaacgagccauccguggcccuguaccggcugcaggagcaugugcgucgcucccuccccgagcug

SEQ ID NO: 8079 - RNA, 62 nt, Human
cuccgggcuuccggugccgugucccgguucgcucggccgcggucgcuauggaggagccggag

SEQ ID NO: 8080 - RNA, 73 nt, Human
ucuacacuguggaguacgccugcagcgccgugaagaaccugguggacagcagcgucuacuuccgcagcgugga

SEQ ID NO: 8081 - RNA, 81 nt, Human
uuaguuaacaaagaaguggaaucuugaugagcugccuaaauuugagaagaauuuuuaucaagagcacccugauuuggcuag

SEQ ID NO: 8082 - RNA, 70 nt, Human
cgcgccgccgcuucgggccucugguugggaguccuguccggccugacuuaggccgagcgcggcgugcgcg

SEQ ID NO: 8083 - RNA, 73 nt, Human
gcggucucccgccuggcccacgcccaccaugcgcauccaccccuguggcggccgggccggguuggggggcugu

SEQ ID NO: 8084 - RNA, 92 nt, Human
ggugguguuaauuggugucuguuuuugcccuguggccuuagggugcccuuccugucccuucuuucagaaacagucauucuguaauaauagcu

SEQ ID NO: 8085 - RNA, 98 nt, Human
ucuuguuucuugauggucaguucguauggaaugcaccugcaaggguaccuccuugucugaaagucgugcuuuaaaccuaacuuaauuaagagacgaga

SEQ ID NO: 8086 - RNA, 94 nt, Human
gaagaucaguguugguacagaugcaaaguacugaaaaucaucagcguugaaaagugucuggugagguacauugacuauggaaauacugaaauuc

SEQ ID NO: 8087 - RNA, 82 nt, Human
gaaaguaagauuaucuccagccaaaaugucaaccaagaauucuacagaucuaguugaauauguugacaagagucaugcuuuu

SEQ ID NO: 8088 - RNA, 67 nt, Human
caaaauuaacccggcauucccaguuuaauugcugcgugcacggcgggcgcugccgggucaaauuuug

SEQ ID NO: 8089 - RNA, 62 nt, Human
ggugagaaggggucugcggccucgucuccagccgagggcgggaggcgccucgccccuacacc

SEQ ID NO: 8090 - RNA, 68 nt, Human
gcugcugggauuguugggaaccugaggucugcaggagugcgaugcuuuggcccaacagcagaagcggc

SEQ ID NO: 8091 - RNA, 71 nt, Human
gcuuucaccaaaccugaagaagccugcagcuucauuuugagugcagacuucccugcuuagguugugaaggc

SEQ ID NO: 8092 - RNA, 69 nt, Human
ggcccucucagggcccuaggagccuuuguguguccugcucacauugucuccagggccucggacagggcc

SEQ ID NO: 8093 - RNA, 75 nt, Human
guacagaacauaugacugaguuucuggagucccacaggccagcguuggaguccugacaccucaguauagcugugc

SEQ ID NO: 8094 - RNA, 71 nt, Human
auggcugauggcaacgaggaucugcgggcugacgacuugccugggccagccuucgagagcuaugaguccau

SEQ ID NO: 8095 - RNA, 61 nt, Human
ccgccgccgcccggcuccgcucgcggccccucugucugcaggcgugccccggcggcggcgg

SEQ ID NO: 8096 - RNA, 78 nt, Human
cggggacugcaggaggcggggcagacgggcugcaagagggagccggcccgacgcggaccgcuucccugcagugccccg

SEQ ID NO: 8097 - RNA, 76 nt, Human
gaggcugggaaacgcgagcgcaggcggcagagaggccucaacgccgucccuuucgccaccgccuuuuccuugccuc

SEQ ID NO: 8098 - RNA, 90 nt, Human
ggcaccccgggguguggccagaggacuucggcgacgcuuccccgagaguagccccccuccucaacccagaaaagacaaccccgcggggcu

SEQ ID NO: 8099 - RNA, 67 nt, Human
ggcccggcccgcagcccgagcaggaagcgccggcgcuaggcuggccccugcgcugccagcuggagcc

SEQ ID NO: 8100 - RNA, 60 nt, Human
cacagaucuggguccccacagugacaugaugauugugacuggaccggaagcggguuagug

SEQ ID NO: 8101 - RNA, 66 nt, Human
gcaccauuuucuccuaagucuuauuccaagcuaagcaggcuuaagguuacaguggaaagugagagc

SEQ ID NO: 8102 - RNA, 74 nt, Human
aaggauuuauuaaaaaaccaguaagacacuacuacaucaugacacugucacacugggcuuuuaacacaagacuu

SEQ ID NO: 8103 - RNA, 116 nt, Human
uuccauucagggacuugauacaaaaaauuuaguuugaacugcuauuagcagguggcaggagccaccuucaaaugaaucuucaaauuggaaaauacugcuucaccaccuguugggga

SEQ ID NO: 8104 - RNA, 63 nt, Human
acuuuuuuaaugggucucaaauucugugacaaauuuuuggucaaguuguuuccauuaaaaagu

SEQ ID NO: 8105 - RNA, 82 nt, Human
gguuuuacgaugcauuguuaucauuaaccagucuuuuacuacuaaacuuaaauggccaauugaaacaaacaguucugagacc

SEQ ID NO: 8106 - RNA, 72 nt, Human; identical to SEQ ID NO: 4935

SEQ ID NO: 8107 - RNA, 88 nt, Human; identical to SEQ ID NO: 4936

SEQ ID NO: 8108 - RNA, 100 nt, Human
guaagacauaugaagaauuggaucagagauuucuaugacagugcgggaaagcagcacugagaaacuuuugauuguuuucaauuucuucuuuuauguucac

SEQ ID NO: 8109 - RNA, 76 nt, Human
uagcucucccacaccaucaaguggcccucauaacuggaguagaguuccugguugcuuuucauaagagggagaguua

SEQ ID NO: 8110 - RNA, 94 nt, Human
cugggcacguaggccucccgcagugagaugaggaucgggucggcaucccgcccgcucacccacuccucagccuccagggcugccucgggcccgg

SEQ ID NO: 8111 - RNA, 113 nt, Human
gugaggaaagcugggcgcuggcuucggccugggccugggacgggugggggugggaacugaccccugcgcugccucagaggcucugggcagccagcuagcccgguucuccaugc

SEQ ID NO: 8112 - RNA, 84 nt, Human; identical to SEQ ID NO: 5301

SEQ ID NO: 8113 - RNA, 109 nt, Human
cguugcccacccaccccacagcccagagugggggcugaacaagcacccagcaggggggcuaaacaagccaauucauuucccaucccugagugggucgggggaggcagcg

SEQ ID NO: 8114 - RNA, 83 nt, Human
ggggcacguggcaggaaggggaggcaaggccaaggcaggggauucccccaccggccgccccccaaaccccuacccaaggcccc

SEQ ID NO: 8115 - RNA, 73 nt, Human
gaaagcucauaauaaaauagacuuuuaaaauuacaaauaaaaucuguacaucaaggauauuuuuaaggcuuuc

SEQ ID NO: 8116 - RNA, 73 nt, Human
uggcucauuucggcuuguaggaccaucucuucuuuucucaagggaaaagugucaaucagguugaacagggcca

SEQ ID NO: 8117 - RNA, 75 nt, Human
aaauaauuuuauaauauccaucuugauuucauuguugacccaacaaucauucaggagcagguuauuuaacuauuu

SEQ ID NO: 8118 - RNA, 69 nt, Human
ggucauuuuuuucuucugcugcguuugaguuugguguguucucucucuuuaguuccuugaggcgugacc

SEQ ID NO: 8119 - RNA, 76 nt, Human
cugacagauuucuucccucuucccuccccaucacccaccucagugauaacacauuacugauagaggaagucauuag

SEQ ID NO: 8120 - RNA, 61 nt, Human
uagcaaguucauaaguuuccaaaaaggaagcccauacauaacaguggagguguuuugucua

SEQ ID NO: 8121 - RNA, 84 nt, Human
uuuaauaacugggggcuauuuuaucagcuugccuauuaaaggacuaugguaaguauagaaucuuaaugguugccaguuaguaaa

SEQ ID NO: 8122 - RNA, 60 nt, Human
aaugcuuacauacuuuugaauuuguaccugcaaaaaucguauacaaguuaugagagcauu

SEQ ID NO: 8123 - RNA, 62 nt, Human
auaaucauauauuauauaaaaauucugauucaugcaucagauuacauaaauuauacaauugu

SEQ ID NO: 8124 - RNA, 65 nt, Human
cuagaggacuuuaacaugcuguaggugauuucccaugaccacagcuguaggauugccagauuuag

SEQ ID NO: 8125 - RNA, 62 nt, Human
gcgcagcgagcgccggaagcggaggaguaccgacucuuccagcgucucgggcuccuugcagc

SEQ ID NO: 8126 - RNA, 92 nt, Human
gcgccgggggcugcgggagcgucagcugcugugggaacgccaauuuuaguggaagugucaccggcggugggagcggcggcagcuguuggggc

SEQ ID NO: 8127 - RNA, 121 nt, Human
uuaguuucuauauaucagacaaaaaagaaaugcuucagcagugcuucuguauuauaggagagaaaaaguuacagaagaugcuuccugauguauuaaagaacuguucaauagaagaaauuaa

SEQ ID NO: 8128 - RNA, 72 nt, Human
ccuucccugcuugccugcucccucacgccccugcucugcguguuggaugugaaaaggaugucagggacuagg

SEQ ID NO: 8129 - RNA, 70 nt, Human
guggaggguccacccaccccagguagcccaggugaggccccugggucccccugucacucaggcuguccac

SEQ ID NO: 8130 - RNA, 79 nt, Human; identical to SEQ ID NO: 6903

SEQ ID NO: 8131 - RNA, 85 nt, Human
ccagagcuuggcauugugcaagauguuggccaggcuaaucaggggcacauccuucaucugguguggcgcauagugcaaagccugg

SEQ ID NO: 8132 - RNA, 72 nt, Human
ccauugccacguagacauugcccagagugaagugguucacagcaaaguguggugcgaucucuacugccaugg

SEQ ID NO: 8133 - RNA, 64 nt, Human
aggggcugcggucucugcaaugaaauguggccucuugccaaucuccccggaggcgcuuucccuu

SEQ ID NO: 8134 - RNA, 91 nt, Human
cugggagugaaucaggccggcuucaccuuacacucugcaauuuaugcugcacgcccggacgugaagugcgucgugcacauucacaccccag

SEQ ID NO: 8135 - RNA, 72 nt, Human
ggccuaaaagcaagguucuuauucuccggaaccaugggccucgugucaguuggagagagcguugaggaggcc

SEQ ID NO: 8136 - RNA, 62 nt, Human
aggauguauuuuguaguauauugggguaauuccucaauuaaaguaagucgcauuaauauccu

SEQ ID NO: 8137 - RNA, 75 nt, Human
ccacugcuucaugagcucaaaucuguuuuuucuagcuaagagaccacaggccaaagaacuaaagggcaagcaggg

SEQ ID NO: 8138 - RNA, 72 nt, Human
guuuaucaauuccaucauaauuauuuacuguugacuugaggcucaaguuagaauucuuaugugguagauuac

SEQ ID NO: 8139 - RNA, 68 nt, Human
gcagcacaaaggcggcgcggugcacaucggaguuguaguacuuuaacugcauuugcgccaccugcugc

SEQ ID NO: 8140 - RNA, 66 nt, Human; identical to SEQ ID NO: 4249

SEQ ID NO: 8141 - RNA, 82 nt, Human; identical to SEQ ID NO: 1766

SEQ ID NO: 8142 - RNA, 98 nt, Human
ccucuccuacauugagcacaucuuugagaucucccgccguccugaccuacucacuauggugguugacuacagaacccgugugcugaagaucucugagg

SEQ ID NO: 8143 - RNA, 85 nt, Human
gucggccugcaaggaagacauccccagcgaaaagagugaggagaucacuacuggcagugccugguuuagcuuccuggagagccac

SEQ ID NO: 8144 - RNA, 74 nt, Human
ccucauuucuucuauuuaaaaaaaagccucuuucagugcaaguggggugccaaggauguagaauaaauaagagg

SEQ ID NO: 8145 - RNA, 66 nt, Human
ggccaggaucagugcacagggaggaagcgcucacggacgcuccgcuccagcccgggcauccuggcc

SEQ ID NO: 8146 - RNA, 60 nt, Human
gcugcucgccccacaugcccucauggcuguuguuccagggggggcaguggggugggccgu

SEQ ID NO: 8147 - RNA, 79 nt, Human
ggcccucgaacuggcuguuccaggcggcgucgggcugguuguuccagggcgcgucgcgcuggccguuccagccgggguc

SEQ ID NO: 8148 - RNA, 78 nt, Human
guccagagaugaggcagaguggagagaaacaacucuggcugagccagagucuccagccacuacuucuuauuccugggc

SEQ ID NO: 8149 - RNA, 70 nt, Human
ggcagcacaaaggcggcgcggugcacgucggaguuguaguacuucagcugcaucugcgccaccugcugcu

SEQ ID NO: 8150 - RNA, 82 nt, Human; identical to SEQ ID NO: 1766

SEQ ID NO: 8151 - RNA, 80 nt, Human
acuuccccuucucccugcuggggcugcuggcccuggccaucgggcucuggggccuggcugucaaggggucucugggaagu

SEQ ID NO: 8152 - RNA, 116 nt, Human
ggcgccugugcugggggcuuucuguuccagcgucaaggauggaggagggggagaggagccccuuacugucccaggaaacugcaggccagaagccccucucugugcacaggccaccc

SEQ ID NO: 8153 - RNA, 93 nt, Human
cgaauuucagugcgggaaccaaugcagacuggcauuaacggcuguggauagcuuggugccaauuggucguggucagcgugaacugauuauucg

SEQ ID NO: 8154 - RNA, 67 nt, Human; identical to SEQ ID NO: 836

SEQ ID NO: 8155 - RNA, 87 nt, Human; identical to SEQ ID NO: 76

SEQ ID NO: 8156 - RNA, 69 nt, Human
ccgacacacagccaggcgcuaggcucccugcggaccucgggaagggggaagagcgucaacaauuuacgg

SEQ ID NO: 8157 - RNA, 85 nt, Human; identical to SEQ ID NO: 45

SEQ ID NO: 8158 - RNA, 70 nt, Human
ccugaaggugacguuccucaucacccgccucacggggccagcccugcagugggugauccccuacaucagg

SEQ ID NO: 8159 - RNA, 80 nt, Human; identical to SEQ ID NO: 887

SEQ ID NO: 8160 - RNA, 70 nt, Human
cuuccugggcaucguggcugaggugcuggugcuggucaccaucaucuucaucuacgagaagcgccggaag

SEQ ID NO: 8161 - RNA, 62 nt, Human
cgccgcccaggccccugcgugggcuggacgcgucagccccacacauuagccucgcugcggcg

SEQ ID NO: 8162 - RNA, 90 nt, Human; identical to SEQ ID NO: 3033

SEQ ID NO: 8163 - RNA, 82 nt, Human; identical to SEQ ID NO: 3034

SEQ ID NO: 8164 - RNA, 60 nt, Human
cgcgcgcggacgagucgaaggaucggacagagugaacacgucgucgacacgccgggagcg

SEQ ID NO: 8165 - RNA, 64 nt, Human
cugggcagcgagcucagguagagcagagccacaacggacucaacuccacccacuaccucuccag

SEQ ID NO: 8166 - RNA, 77 nt, Human
gcccuugacuguagucacccugcuccaggccuccaaugugccugcuguggugguggggaggguggguaccagggagc

SEQ ID NO: 8167 - RNA, 68 nt, Human
ucaucugaauuuauauggauuuaccucauucuuuuuaaaagcuacauaguauuccacggcacagguga

SEQ ID NO: 8168 - RNA, 67 nt, Human; identical to SEQ ID NO: 1379

SEQ ID NO: 8169 - RNA, 63 nt, Human; identical to SEQ ID NO: 1366

SEQ ID NO: 8170 - RNA, 86 nt, Human; identical to SEQ ID NO: 1381

SEQ ID NO: 8171 - RNA, 71 nt, Human
gggaaacuccgaggacagagggcuaaauccaugaagucuguggauggccugaugauccacagcggagaccc

SEQ ID NO: 8172 - RNA, 67 nt, Human; identical to SEQ ID NO: 1146

SEQ ID NO: 8173 - RNA, 131 nt, Human
cacuaacauauacgccccauucccugcugaggccuguccccaccucaccccuugguugucgaugguguggaacauuggggugaggggcaaaaugccuaagcagagcuggagggaggcaaaugggacuggug

SEQ ID NO: 8174 - RNA, 71 nt, Human
ccgcgguccgggcgccaugcgggcaucgcugcugcugucggugcugcggcccgcagggcccguggccgugg

SEQ ID NO: 8175 - RNA, 71 nt, Human
gcuggagacucugagcugccggcgcgcggcaacaaccaacagcggcgcgccggcccaacaucggaugcagc

SEQ ID NO: 8176 - RNA, 61 nt, Human
uccccggucccgccccucggagacuccucuggcugcucuggggguucgccggggccgggga

SEQ ID NO: 8177 - RNA, 77 nt, Human
caguugaugggcugccagaucuggggcaugcccaggaccucauggaugggcugccuccaggugacagcaaucagcug

SEQ ID NO: 8178 - RNA, 87 nt, Human
gcccagggagaaccccuuggauaucgccaggaugauccuagcuaucguucuuuucacucugguggauauggccaggaugccuugggu

SEQ ID NO: 8179 - RNA, 77 nt, Human
uacuuugaaacggagaugucuuggaacauuggaaugucucagauuucugguuguuauguggaucuguguggaaagug

SEQ ID NO: 8180 - RNA, 106 nt, Human; identical to SEQ ID NO: 6411

SEQ ID NO: 8181 - RNA, 61 nt, Human; identical to SEQ ID NO: 4783

SEQ ID NO: 8182 - RNA, 84 nt, Human; identical to SEQ ID NO: 4784

SEQ ID NO: 8183 - RNA, 85 nt, Human
aauuuguacugucugcggcauuuuuuauaauauuguauauagugacuugacaaauauuguauuacuguacauagagagacagguu

SEQ ID NO: 8184 - RNA, 101 nt, Human
ugaaggcccggugggaaaagaccacgauccuccuugacgaguuuuguuuuucaaaauggugcaauaauuuaaguggcaucuucucucccaccgggucuaca

SEQ ID NO: 8185 - RNA, 61 nt, Human
aggcccgagccgcgggagucgagcgaagacagcgccgaggccgcgguuucccccugggccu

SEQ ID NO: 8186 - RNA, 101 nt, Human
cggcugcgcgggucgcggugcugugaggucugcgggcgcuggcaaauccggcccaggauguagagcuggcagugccugacggcgcgucugacgcggaguug

SEQ ID NO: 8187 - RNA, 66 nt, Human
ggguggugggagaaggaggaggcggcgaaucacuuauaaauggcgccgaagcaggacccgaagccu

SEQ ID NO: 8188 - RNA, 74 nt, Human; identical to SEQ ID NO: 365

SEQ ID NO: 8189 - RNA, 102 nt, Human; identical to SEQ ID NO: 2172

SEQ ID NO: 8190 - RNA, 78 nt, Human
uucaguuaaaaaaagaagaagaagaaauggcaaagagaaaguuuuuucaaauuucuuucuuuuuuaauuuagauugag

SEQ ID NO: 8191 - RNA, 63 nt, Human
cuguuucucauuucaucagccuugggacuugaacagcaggucacuccauuugaaaacuagcag

SEQ ID NO: 8192 - RNA, 75 nt, Human
ugucuuggaaaggccaaagagaaugcacuguauacugccauuguaucaaauguuuugggcaccuuuuucagggca

SEQ ID NO: 8193 - RNA, 81 nt, Human; identical to SEQ ID NO: 7833

SEQ ID NO: 8194 - RNA, 70 nt, Human; identical to SEQ ID NO: 7835

SEQ ID NO: 8195 - RNA, 69 nt, Human
agccucaaagcuuggccagggcugaagguaccacacgguugugggugaggcaggcuaagcgggauggcu

SEQ ID NO: 8196 - RNA, 100 nt, Human
cuuggcccacauccaggcuacccccagcccgcuucuccccugcuuagcccagggaggagacaguaaaggugaugggggcagccgggagggaggggccaag

SEQ ID NO: 8197 - RNA, 65 nt, Human; identical to SEQ ID NO: 3029

SEQ ID NO: 8198 - RNA, 72 nt, Human
gacaccaucuccucccccaaggaagacacagcccuucgaugugaaccuaggagggugggaauggcuuauguc

SEQ ID NO: 8199 - RNA, 80 nt, Human
gguacuacggucuauuucucaaccuuaggcaguaauagacaucacaaacugccaugguuuugcacuaugauuauaauacc

SEQ ID NO: 8200 - RNA, 64 nt, Human
guuagugugucuaaaacaaggagguuuaaggcaauauggaacuguaucccguugaugcacuaac

SEQ ID NO: 8201 - RNA, 66 nt, Human; identical to SEQ ID NO: 2189

SEQ ID NO: 8202 - RNA, 68 nt, Human
cucgggaacucaucagccgcaucaaacagagugaacuuucugccaagaugcgggagugguuuucagag

SEQ ID NO: 8203 - RNA, 61 nt, Human
aacgcuccccgaggcacuuuucggggccgucuggcgcccugggccuucgugggugggcguu

SEQ ID NO: 8204 - RNA, 68 nt, Human
gguggugucuuccggcuucugcugcuggcuggcaaaacuguaguaguuguuggggcccaggacccacc

SEQ ID NO: 8205 - RNA, 72 nt, Human
ugaagaagguguaucucucggcggggauguuacccuuggccaagaacacuuuguugaagcugcccuucauca

SEQ ID NO: 8206 - RNA, 74 nt, Human
uggguguguugaagaagaggauccggguggccucagugaaaaggauuuucucguaggccuucucaaugcaccca

SEQ ID NO: 8207 - RNA, 67 nt, Human; identical to SEQ ID NO: 3685

SEQ ID NO: 8208 - RNA, 63 nt, Human
gugcaccugagccguggaggggcugaaguccagaucuuugcuccugacgucccucagaugcac

SEQ ID NO: 8209 - RNA, 85 nt, Human
ucuauuuucaaccucaaagaaaguuggagaggacuccugcauaugcuguaaaggguguccucucagauuuacugaucgaaauaga

SEQ ID NO: 8210 - RNA, 64 nt, Human
uuccuucuuacugcccuguccucugccuuggaagaggcuuugggaauaguucauagggaaggga

SEQ ID NO: 8211 - RNA, 65 nt, Human
gaaaucuaugauaguguggguggagauaaaccaguuuaggauagccacuucacuauucacauuuu

SEQ ID NO: 8212 - RNA, 72 nt, Human
ggugauuugcccucauuuaacgguagcuggaguaagucaaaccacagagagcccuuacaaagacuaagcacc

SEQ ID NO: 8213 - RNA, 101 nt, Human
uugagauggaguuuugcucuuguuccccaggcuggagugcaaaggugcggucuuggcucacugcacuccagccugggauacagagcgagacccugucucaa

SEQ ID NO: 8214 - RNA, 68 nt, Human
uuuguaauugaagaaaaauugagaaaguagaaagcauauuaaguuaaaauuuuacuuuauaauauaaa

SEQ ID NO: 8215 - RNA, 84 nt, Human
auccaauaaaccaaauuacaaucugcugcuucuucucauuuucaaauacuauaaagauucacacuguuaaaggguuuuuugggu

SEQ ID NO: 8216 - RNA, 80 nt, Human
uagaacuucuaucugauuaaucauuguuuggugaauuaucuuuucacuuccuacuuaggcuaggccaggugguaguuuua

SEQ ID NO: 8217 - RNA, 83 nt, Human; identical to SEQ ID NO: 3611

SEQ ID NO: 8218 - RNA, 70 nt, Human; identical to SEQ ID NO: 3612

SEQ ID NO: 8219 - RNA, 65 nt, Human; identical to SEQ ID NO: 3613

SEQ ID NO: 8220 - RNA, 84 nt, Human
ccccuccuugaagcugauggugaaugugugcggacacacucucugugaaaguuguguagauuuacuguuugugagaggagcugg

SEQ ID NO: 8221 - RNA, 68 nt, Human
gggaagaagauuuuccuagucuaagagaauacaaugauuucuuggaagaaguggaagaaauuguuuuc

SEQ ID NO: 8222 - RNA, 68 nt, Human
ggugaccuggcaugugaggcccacgggauccgacgugucccugcaggcacgacauagcacagggcacc

SEQ ID NO: 8223 - RNA, 75 nt, Human
agagcagccaauggcacaagucuuuacaauuaauuaaaaaaauaaaucauucugaagauacugcauuugcucucu

SEQ ID NO: 8224 - RNA, 79 nt, Human
gcagccuccugagguagguaaccuuguuuacugauggggaacaaggcaguguucuuuaccaaaucucagggcggguagc

SEQ ID NO: 8225 - RNA, 74 nt, Human
cugugucuuugguuuuaagaguaaauucuaguuaacaugaccuucagaaacuccuggaaacaucugaggcgcag

SEQ ID NO: 8226 - RNA, 82 nt, Human
ggguggcgucauggaauggguguggucuaagccaggucuccagauaagggcauucugccucuuccuucucuugucgccucuc

SEQ ID NO: 8227 - RNA, 62 nt, Human
ggugacucaggaccacgcugacuagggcuccuucaaggcccugagcugauguccuguguccu

SEQ ID NO: 8228 - RNA, 90 nt, Human
ccccugggcugccuugaguccugcugcagcucccucacagugcuucggacuagguacugggggcuggggcgcaggucgagagcccagggg

SEQ ID NO: 8229 - RNA, 61 nt, Human
gucgaguuccugacaagccacccaguagauuuuccgcugucugucuuggaggaggaucgac

SEQ ID NO: 8230 - RNA, 70 nt, Human
gggccgacgggggagacggagccccaggaguguugaagccuggaaauccccuccccuucccccucccccc

SEQ ID NO: 8231 - RNA, 73 nt, Human
agguugaagugaccagagauugcgccauugcacuccagccugggugacaagagcaaccggucuacaacaaucu

SEQ ID NO: 8232 - RNA, 83 nt, Human
aucugagugagugugugcuuauaaagguccuuugaucaauaaugugacagaacgaggguaguaacauauacucaauaacaggu

SEQ ID NO: 8233 - RNA, 87 nt, Human
cauggcuuauguguauaauccagcccuuuuggaggucaggauggaagaucgcuugaaccugggaguuugagguugcacugagucaug

SEQ ID NO: 8234 - RNA, 91 nt, Human
cggcuccaggcggcgagcugagguugggagccuggcuuuccccuccgagaggguucaggugccucugccauagcuucugucgccugugcug

SEQ ID NO: 8235 - RNA, 100 nt, Human
ggcugagggggcggggcccggcgcuucguccaaucaggggcgcugggcggggccugccgaguguccaucggggagggcgaaggcccugcucuccucgguu

SEQ ID NO: 8236 - RNA, 80 nt, Human
uuuugcuagauauuuuacuguauauuuuuucaaugacuauuucuaacacgacucauagaugaaguaaaaguuugguagaa

SEQ ID NO: 8237 - RNA, 80 nt, Human; identical to SEQ ID NO: 367

SEQ ID NO: 8238 - RNA, 73 nt, Human
aggaguaaaggcauaggccccucaugaccugcagggaccccagccacugccucugggcuuggcuugagcuccu

SEQ ID NO: 8239 - RNA, 64 nt, Human
gcagccagcauauguggaagaauaauacaaagcuuuuuuuuuucuucuaauaugucugugcagc

SEQ ID NO: 8240 - RNA, 61 nt, Human
guuuucccccuccccuguguccucugucaccuuggugaugaggccagagugaugugaagac

SEQ ID NO: 8241 - RNA, 67 nt, Human
caacuuuuuuucuuuguuguuuaaauauaaacagaaguguaccuuuuauaauaaaaaaaagaaguug

SEQ ID NO: 8242 - RNA, 64 nt, Human
ccaccauguaaaagugagcucagacgucucuaaaaaauguuuccuuuauaaaagcacauggcgg

SEQ ID NO: 8243 - RNA, 78 nt, Human
cucuuaguuuugauuugaggcaucccguaaaguuguaguugcagaaucccaaacuaggcuacauuucaaaauucaggg

SEQ ID NO: 8244 - RNA, 100 nt, Human
gccaagcugucuucaugguguauuccucuuacuggugcaccuaauagugacaauacauuagccaccaguggcaaagaaugcguucuauguggagaguggc

SEQ ID NO: 8245 - RNA, 62 nt, Human
uauucauucuguauuuugcaagccucgaaacauacgugaaguuggcuuugaauacaugaaua

SEQ ID NO: 8246 - RNA, 95 nt, Human
ucgaaaccaucauuuagcaucauuugggaaagucaagcagugugugaauuuugugauuggacuuuugaaauuaggugggcugauuaauuuuuuga

SEQ ID NO: 8247 - RNA, 75 nt, Human; identical to SEQ ID NO: 448

SEQ ID NO: 8248 - RNA, 110 nt, Human
ggcaggguguacaccugugguucucggggcugcccuuuggcuuuggagaugguuuucucgaucggggcugggagggcuuuguuggagaccuugcacuuguacuccuugcc

SEQ ID NO: 8249 - RNA, 68 nt, Human; identical to SEQ ID NO: 6247

SEQ ID NO: 8250 - RNA, 88 nt, Human; identical to SEQ ID NO: 2733

SEQ ID NO: 8251 - RNA, 68 nt, Human; identical to SEQ ID NO: 2734

SEQ ID NO: 8252 - RNA, 73 nt, Human
uuuucgaaugaaugacaacuuuauuuuucuuacacuuuuaaggcugaugaaaaaccuucauuucaauugaaaa

SEQ ID NO: 8253 - RNA, 89 nt, Human; identical to SEQ ID NO: 288

SEQ ID NO: 8254 - RNA, 61 nt, Human; identical to SEQ ID NO: 776

SEQ ID NO: 8255 - RNA, 73 nt, Human
uccuuguggucgguggugacgauggugaaguacacguacuugcccgugcgcuccacgcaguccaccuugagga

SEQ ID NO: 8256 - RNA, 60 nt, Human
auugcucagacaccugugaacagucuugauacaugcaagauguuugccaaacuuuguaau

SEQ ID NO: 8257 - RNA, 65 nt, Human
auaagaauauaggaauacauacaaucuauauacauauauuuauugcaaauacuuaaaauucuuau

SEQ ID NO: 8258 - RNA, 73 nt, Human; identical to SEQ ID NO: 7381

SEQ ID NO: 8259 - RNA, 87 nt, Human
gccagaagggaaaaaaauagcuugugguuaauaagucaauuuucuuuuaaaauaaaaaauaaaccccaaaacuauuccccuuauugc

SEQ ID NO: 8260 - RNA, 60 nt, Human
uuuuuuuuuuuauuuucacuuuuaaugaucuuuuacuuaauaauaaaaugaaaaauaaga

SEQ ID NO: 8261 - RNA, 60 nt, Human; identical to SEQ ID NO: 7400

SEQ ID NO: 8262 - RNA, 65 nt, Human; identical to SEQ ID NO: 4986

SEQ ID NO: 8263 - RNA, 65 nt, Human
augcuuguauuuggagccuuugggcacauuacuucccagcucacuagugcugagauuacaggcau

SEQ ID NO: 8264 - RNA, 83 nt, Human
ccacugcgcccagccccagauaauuuuuuuucuuuuuuuuuugagacagauucucgcuuugucaccaggcuggagugcagugg

SEQ ID NO: 8265 - RNA, 83 nt, Human
gcuguguugcccaggccggucacaaaaagaggggcuuuaucuaauguccucuguuuguauguauuugaagugggcgauaaagc

SEQ ID NO: 8266 - RNA, 70 nt, Human
acauuuucagaaccuccaauguggaugaccuggguauaaucucaaaaaaucgaugggacugaagaauugu

SEQ ID NO: 8267 - RNA, 75 nt, Human
cucaggguugucccccaguagaagugaugggcugcuuugagccguucuuacugaugucuggucugauccccuggg

SEQ ID NO: 8268 - RNA, 87 nt, Human
auauauguuuucuuuuuaagcuagcuaaagaaaauacucuugaucgggguuaguucuuaaagcaaaaaacagaagaaaaguauguau

SEQ ID NO: 8269 - RNA, 60 nt, Human
cauguuauaccuggaaaggaccgugggcacuaaucugcacuuuguuccagguaauccaug

SEQ ID NO: 8270 - RNA, 75 nt, Human
caggcacugaaucgaugguaauaauguugucuuuuuuuuucccggcaaacuuucugcuuucgguccagagcucug

SEQ ID NO: 8271 - RNA, 65 nt, Human
ccuucucgaggaggacggggauggccucccuguuguggugcuccuuguggccuuccuugaggagg

SEQ ID NO: 8272 - RNA, 81 nt, Human
ggaggugguggaccuuguugcugcuggccuccuugucgggguggucccugucugagggccaucauucugguucccaccacc

SEQ ID NO: 8273 - RNA, 78 nt, Human
ggguugagauugcuguccucccaaaggugaugucgguccugacgcuccucaucuaugaacugcucagagucuccuccc

SEQ ID NO: 8274 - RNA, 78 nt, Human
auaccaauuccccuuuacaacugaugcagaucauuaugaaauacuggaaggcauacccuacaauuuaggaauuggugu

SEQ ID NO: 8275 - RNA, 98 nt, Human
ucugcccugcauguaccuggugguguuugucuguggucugguggggaacucucuggugcuggucauauccaucuucuaccauaaguugcagagccuga

SEQ ID NO: 8276 - RNA, 66 nt, Human
aggguggggccagcccccaacacagacacugcacccaggaacacaugagcaucugguccacgcccu

SEQ ID NO: 8277 - RNA, 71 nt, Human
uuuuuuuuuuuuuucacccaacaugcaucggauuuacuugaguuccaaauguguuugaggaaaggagagaa

SEQ ID NO: 8278 - RNA, 82 nt, Human
aagcuuugucuuaaugugaacuuuugaguacauuuuaaugggcuuucuauuuuuaaaaacucaaaaucauuagguggggcuu

SEQ ID NO: 8279 - RNA, 69 nt, Human
cuaagagcaaaagagaaucauaaauucugcaaaguaguugcacuccaugauuuuaaaaaaaccucuugg

SEQ ID NO: 8280 - RNA, 67 nt, Human
gcaauccgcucgccguggucucccaaaaugcuaggauuacaggcaugagccaccgugaccggcuugc

SEQ ID NO: 8281 - RNA, 74 nt, Human
ggguuucgccauguugccucggcuggucuaggcuggucuggaccuaggcuggucucaacauggacucugaacuc

SEQ ID NO: 8282 - RNA, 62 nt, Human
ggcaagaggcucagugguaucuggaggacagggcacuggcacugcagucaccaucuucugcc

SEQ ID NO: 8283 - RNA, 118 nt, Human
gcaggcagaucugggagcuguuugauuucuuucugcuuugcaucaaauucuacucccauuuacugcugaagagaagcagagcuuucugaacuauccaaaaguuuccauuguugucugc

SEQ ID NO: 8284 - RNA, 66 nt, Human
aacucgguuaaaugugaucauauugauucuuaagacagugauucaaauggcaccuagaauuaaguu

SEQ ID NO: 8285 - RNA, 61 nt, Human
aauaaaauuucucaaacuauaucaauaucuaaagugcauauauuuuuuaagaaagauuauu

SEQ ID NO: 8286 - RNA, 62 nt, Human
aauucucaaaggugcuagaacaaaucguccacuucuacaguguucucguauccaacagaguu

SEQ ID NO: 8287 - RNA, 61 nt, Human
cuauuuuuuauuugcaacuacaugauuucacacaauucucuuaaacaacgacauaaaauag

SEQ ID NO: 8288 - RNA, 82 nt, Human
gcuuuaugggcaucuccccaagggaaggucagcaccuucuuugccaugugcccuugacuuugggggguugcccaugaugggc

SEQ ID NO: 8289 - RNA, 65 nt, Human
gacgucagcgcaaagaugcucagggaugccuaugcgaaaggaaccaugggaaagaauaugauguc

SEQ ID NO: 8290 - RNA, 61 nt, Human
uuaggcaucgccuugcuagguagacuauccaccuugaaguuagauccuaggugaugccugg

SEQ ID NO: 8291 - RNA, 74 nt, Human
uuuaugguguuggcaguggaaaaauugaggauuugagacaucagaccaucacaauguccacucuaagacaugaa

SEQ ID NO: 8292 - RNA, 60 nt, Human; identical to SEQ ID NO: 969

SEQ ID NO: 8293 - RNA, 63 nt, Human
gcugcagaggggaaacugcacguuuaaagagaaaauaucacgggccgcuuuccacaaugcagu

SEQ ID NO: 8294 - RNA, 63 nt, Human; identical to SEQ ID NO: 970

SEQ ID NO: 8295 - RNA, 61 nt, Human
gaauuugagcuugucuuuuugcccuugggcuuccugcccuggaguccucaggcuucuuuuc

SEQ ID NO: 8296 - RNA, 76 nt, Human
auuuuuggucauuacuugaaaauuaauaaguuugaaaucacuacucuuagaaauggaagaaagugaugacucuaau

SEQ ID NO: 8297 - RNA, 64 nt, Human
gccuaucucagcguguaggcaagaaauucgaaagagaagaugacccagcaaaccaaugguaggc

SEQ ID NO: 8298 - RNA, 76 nt, Human
uguauuuguuuuacuguauauuuaaauacacacauguguguauguauguguguaucuguuccugcuaacaaaagca

SEQ ID NO: 8299 - RNA, 131 nt, Human
agccggcgucgaggcggggcgcgggaacgacggcggccauggcgggcucggggcccgggugucgcagguggugcuugugucccgaggugccauccgccaccuucuucacugcgcugcucucgcugcugguu

SEQ ID NO: 8300 - RNA, 63 nt, Human
agcuuuaaugacguuccauaccaaauauucaagaguauaugcaggcccuggaacuagaaggcu

SEQ ID NO: 8301 - RNA, 81 nt, Human
ggacaauuacaaauguuguaauaugcauaugguggaaauauuaaauuucccauuauauaauauauuacaugggaauugucc

SEQ ID NO: 8302 - RNA, 69 nt, Human
gcuugauuugcuuggugaccgaauuacuagugacuaguuuacuaacuaggucauucaaggaagucaagu

SEQ ID NO: 8303 - RNA, 109 nt, Human
ggagcaaugacuguugguaugggcuauuccauguaucgggaauucugggcaaaaccuaagccuuagaagaagagaugcugucuuggucuuguuggcaggagcuugcuuu

SEQ ID NO: 8304 - RNA, 77 nt, Human
aauggaaaccaugcaauuaccugccuuaguucuuuugucauaaaaacaaucacuugguuggucguauuguagcuauu

SEQ ID NO: 8305 - RNA, 125 nt, Human
agcuagcuaauucuuguuuucugauuuaaagcacuuuuaaaucuuauccugcccccuaaaaacaaaagguuuugaucacaaggggaaauuuaagauuguuaacccuguuuuucagaagggcuacu

SEQ ID NO: 8306 - RNA, 85 nt, Human
gcaaaauucaaacuuauagugguaaagaaacagguuguucacuugcugaggugcaaaaauucuuaagacuucuguuugaaauugc

SEQ ID NO: 8307 - RNA, 89 nt, Human
uuauacagcaaacaauuucuucaauuagcagucuagacauuucuauaaacagaaaucuuggacaauugauaauauuucugacuguauaa

SEQ ID NO: 8308 - RNA, 106 nt, Human
agaaucugaaagccucuuucuuuucaggcuugaugacucuucuaagguauuuguuaugccucucuucuggguuuuucguuuugccuuaucaaguagcucaaauucu

SEQ ID NO: 8309 - RNA, 92 nt, Human
cacagcucuguuuagucucuugcucuuaauacguauagcaucuuccuucuccuguugugcuaaucuaaagaacgaaucaauucggagcugug

SEQ ID NO: 8310 - RNA, 88 nt, Human; identical to SEQ ID NO: 2733

SEQ ID NO: 8311 - RNA, 68 nt, Human; identical to SEQ ID NO: 2734

SEQ ID NO: 8312 - RNA, 73 nt, Human; identical to SEQ ID NO: 8252

SEQ ID NO: 8313 - RNA, 71 nt, Human
cuuauuaggcaaguuaggugcacugaaucuaaccuuuaagguugacaugggcucaaacuuggccuaaaaag

SEQ ID NO: 8314 - RNA, 62 nt, Human
gacauaucuuguauucauuaaaaauauuuuaauuuaaaauauucugauuucuaaaguguguu

SEQ ID NO: 8315 - RNA, 67 nt, Human
gauuuuuuacaauacauacuucuggaacuuugagauuugagaaagcuuccauguauauugauaaauc

SEQ ID NO: 8316 - RNA, 119 nt, Human
uuaauuaucacauuuaaaacuuauauuaaguguaaauuccaguggcuuuaccucacuugaaaaauuaguggggauaagccauuuuguuuugugauauuaaauuuaacuaugauaguuaa

SEQ ID NO: 8317 - RNA, 77 nt, Human; identical to SEQ ID NO: 7086

SEQ ID NO: 8318 - RNA, 86 nt, Human
agaaaaccaguauucuaaacacauuuucuuuaugugacauauucuugugcgucuauguaaugagaauuuuuaaaaaauuguuuucu

SEQ ID NO: 8319 - RNA, 73 nt, Human
auuuaaauuauuuuccuuucuggacuuccaaguccacuuggcaauuuuacuuaggaaaauaucaugcguaaau

SEQ ID NO: 8320 - RNA, 70 nt, Human
cucuguugcucagcaggaaugcagugguacaaucacgacucacuauacccuugaacuucugggcucaggg

SEQ ID NO: 8321 - RNA, 63 nt, Human
guggcuucacgcaauccccacaccucagccuuccaaagugcugggauuacagguguaagccac

SEQ ID NO: 8322 - RNA, 67 nt, Human
acugcaucaggacaguuguccacacaugcuucauguugagggacaguugccuccuucagaugccagu

SEQ ID NO: 8323 - RNA, 63 nt, Human
cacacauucaauauccaacaaauagaguaauaaacguuuguugcuaguguuauugauauugug

SEQ ID NO: 8324 - RNA, 90 nt, Human
ucauuuuacaaggauauauuaaugauauuauuguuauaugugaaaguuuacaguugacagauguuuucuuuauauauuaauguaauauga

SEQ ID NO: 8325 - RNA, 88 nt, Human
gggcuuccgguuagggccggggauaggcucaguccucuagaagagugagccucuguucuaaauccuccggccuucccuggucgugccc

SEQ ID NO: 8326 - RNA, 127 nt, Human
ucggugcugcccugggccgcgagccuucaucccucuccccagcgcuguggugcaagcugucuugugggcgacagcgugccaucaugcugcuggagggccagaaggugaucccacgggcgaacacugg

SEQ ID NO: 8327 - RNA, 81 nt, Human
cuuccuggcggaacuuauucucccagacgcucagccugggcagccagaaggagcgucugcuggacgagcugaccuuggaag

SEQ ID NO: 8328 - RNA, 62 nt, Human; identical to SEQ ID NO: 1789

SEQ ID NO: 8329 - RNA, 68 nt, Human
gagcaggaagaauguacuucugagauucggcagucacucacugacgagccuccccuguaugccugcuc

SEQ ID NO: 8330 - RNA, 111 nt, Human
gauacuuugauuacugcaggaggaacaacgcuuauccuugcaaauauucaacaagguucuguuucagggauaggaacuguuaauacuuccgccaccagcaaucaagauauc

SEQ ID NO: 8331 - RNA, 70 nt, Human
acaugugguguuugguuuccugcuccucuguaaguuugcugaggauaauggcuuccagcuucauccaugu

SEQ ID NO: 8332 - RNA, 84 nt, Human
ugugcgguuuuuuuacauagguaaacgugucccauggugguuugcugcaccuaucaaccuaucaccuagguauuaagccccaca

SEQ ID NO: 8333 - RNA, 79 nt, Human; identical to SEQ ID NO: 6903

SEQ ID NO: 8334 - RNA, 85 nt, Human; identical to SEQ ID NO: 6904

SEQ ID NO: 8335 - RNA, 72 nt, Human; identical to SEQ ID NO: 8132

SEQ ID NO: 8336 - RNA, 74 nt, Human
uuugggagucuggaagcguacuuuauugguuuaggauuuaaacaucuaauaaaaccaauaaaagaucucccaga

SEQ ID NO: 8337 - RNA, 63 nt, Human; identical to SEQ ID NO: 123

SEQ ID NO: 8338 - RNA, 65 nt, Human; identical to SEQ ID NO: 404

SEQ ID NO: 8339 - RNA, 91 nt, Human; identical to SEQ ID NO: 124

SEQ ID NO: 8340 - RNA, 61 nt, Human
gcuggagaugcgcuuggggccgcgcuggaagggcgaggcccuggagcaggccaucaucagc

SEQ ID NO: 8341 - RNA, 63 nt, Human
gguuuugugggggauaggagggaggaaaaggucgucuuccccauucaguccccuuuggaagcu

SEQ ID NO: 8342 - RNA, 78 nt, Human; identical to SEQ ID NO: 2712

SEQ ID NO: 8343 - RNA, 67 nt, Human
guucuugagcagugcguacaugguugugcgaguuugugucaaacuugcuguaggucugcuugaggau

SEQ ID NO: 8344 - RNA, 82 nt, Human
gcaguugucacaaaaacucacucaucaacuucuuagugaauuugacaggcaagaagaugacauucacuuagugacauuaugu

SEQ ID NO: 8345 - RNA, 95 nt, Human
guaaguugguucuguuuugagcuucacugaggaagcacagcuguugguugaaguauuaguaugcuguguccuucauaagcacagagccaugguac

SEQ ID NO: 8346 - RNA, 82 nt, Human
gucuuuaaaaccacagaacauuuaauauacaugaacaucuguuuauguguuuagugcuacuucugugaauucauuuagaggc

SEQ ID NO: 8347 - RNA, 86 nt, Human
aucaaugauuauguggcaaagcaaacgaagggcaagauuguggacuugcuuaagaaccucgauagcaaugcggucgugaucauggu

SEQ ID NO: 8348 - RNA, 66 nt, Human
ggugccacgguggcccccagcagcagaagggacuuuaccuuugaccucuacagggccuuggcuucc

SEQ ID NO: 8349 - RNA, 75 nt, Human
aaacaggugaaccagggccagcaauauuguacaaagcucuuaugcuucugccaguagcaaccguucucuauguuu

SEQ ID NO: 8350 - RNA, 65 nt, Human
cuccugggggaguggugaggaggcauuuuuccuaaggcuucaccucuucccuucaucuccagggg

SEQ ID NO: 8351 - RNA, 121 nt, Human
ucuucccuucaucuccaggggucauccccucaccuuauugggcaaaacugcaucaaucuccuuuugcaguuucugcuggacaucagggugaguggccaguucauauaaagugaaggaaaga

SEQ ID NO: 8352 - RNA, 62 nt, Human
cuccucugcagcugauuggcucuggaguguggccagaagccucucuccugcaauuaaaggag

SEQ ID NO: 8353 - RNA, 71 nt, Human
gguuccccuacuucuuggugagguucacugugauauacaacgacacagauggcaagcaagaagcgggagcu

SEQ ID NO: 8354 - RNA, 63 nt, Human
aaauauauaugucucuuuaaauuuaaaucuucauuuagaugguaauuacauauccuuauauuu

SEQ ID NO: 8355 - RNA, 62 nt, Human
agcaaagaaauauuaauauagugcugcauaguuuggccaagcauacucaucauuucuuuguu

SEQ ID NO: 8356 - RNA, 82 nt, Human
aggucugguucagguguccagagucucaaggggcuggggcccagcccagcucucuucggcugagacucccgccagaaccccu

SEQ ID NO: 8357 - RNA, 86 nt, Human
gggcugcuggucuggcccacccugggccgcuggggagccugcugcugccacagcugcaaggaccaggccaagagaucgcacagccc

SEQ ID NO: 8358 - RNA, 65 nt, Human
guguguccguggggccugccuugccuucugccucccugcagcugagguggcuaggcuugacacac

SEQ ID NO: 8359 - RNA, 94 nt, Human
uacacaggugcaucagacguguggacaugcagacacagacacacggagcauggguacaucaccgcgugucggcacguccagccgcacucgugug

SEQ ID NO: 8360 - RNA, 82 nt, Human
gccucagccucucaaguagcugggacuacaggcaugugccaacacacccagcuaauuuuugcacuuucaguagagauggggu

SEQ ID NO: 8361 - RNA, 66 nt, Human
gugauacacuacuugagagauggauuguugcgcuuucuucuacagucuuuacaaggaguagauuau

SEQ ID NO: 8362 - RNA, 64 nt, Human
guggugccucuucucucuuuugacuuaaggauguugucccuuaaggaaaccuggaggcuacuac

SEQ ID NO: 8363 - RNA, 60 nt, Human
ugaaucugagugaauuguaccuauuucugaugaugucggucuugcaaagcgacagauuca

SEQ ID NO: 8364 - RNA, 66 nt, Human
ucucuaucuguccaccaucuugccuugcccuuccuggggcugaggcagacaaaggaaagguaauga

SEQ ID NO: 8365 - RNA, 74 nt, Human
guagagacggggucuuguuauguuccacaggcuggucuugaacuccugggaccaagcaauccucccaccucugc

SEQ ID NO: 8366 - RNA, 99 nt, Human
uggcugcaugauaguaagaguauggcugagccugucuugcagaucauccaguaccuguacaggccaggcuacacuguucuccagcacucucuguagcca

SEQ ID NO: 8367 - RNA, 96 nt, Human
uuauuccacuucggagaccgccccccuugucccucagaugcauccaaaucaggaguuagggaucauacuccacugugguccugaauuauagaauaa

SEQ ID NO: 8368 - RNA, 83 nt, Human; identical to SEQ ID NO: 3611

SEQ ID NO: 8369 - RNA, 70 nt, Human; identical to SEQ ID NO: 3612

SEQ ID NO: 8370 - RNA, 65 nt, Human; identical to SEQ ID NO: 3613

SEQ ID NO: 8371 - RNA, 61 nt, Human
uuuuuuucauaagcacaaaaaauuuauucugaauaaaucacuuuacaauuacugaaaaaga

SEQ ID NO: 8372 - RNA, 71 nt, Human
ccacauucuuauucucccacaucccuacccacguuugagcuggaaaggaugucccuacccuaggcaugagg

SEQ ID NO: 8373 - RNA, 70 nt, Human
gugaugaugucacuaguacuaccuuucuaguauuuacauacuuaaaaguaguaacuagaacaguuaucac

SEQ ID NO: 8374 - RNA, 82 nt, Human
gcccagccccuggcagcacccacgaugcgggaccugccucucaccagccuggcccuaguggggucugcccugggggcucugc

SEQ ID NO: 8375 - RNA, 104 nt, Human
gcccucagagcagaggagccagcugugggcaccaguggccucaucuuccgagaagacuuggacuggccuccaggcagcccacaagagccucugugccugguggc

SEQ ID NO: 8376 - RNA, 65 nt, Human
gggggcucuaagcgccuaugagcaggccuuccugggggccgugcagagggcccgcuggggccccc

SEQ ID NO: 8377 - RNA, 82 nt, Human
caaacugguuuucugguuuuccaucugguaccuuauauaaucuaaaccaauuaagaauuagcuuccagguuaacccgguuug

SEQ ID NO: 8378 - RNA, 61 nt, Human
ugcucauagacccccuugucucuagcacuuggaguccuuagagaugggaaucuugacagca

SEQ ID NO: 8379 - RNA, 91 nt, Human
uugcuuccucuugagugcaacggaaagggcuaucagauaucugcacguuugugcaauuuauagcuccuccauuacacuucuucauaagcaa

SEQ ID NO: 8380 - RNA, 64 nt, Human
uuuuuuuaauuuaaaauucuuacuguuuauuuauauauugcauagcucaaaaaguuugaaaaaa

SEQ ID NO: 8381 - RNA, 65 nt, Human
cuaaaaaaacagauuggcuucaaagaaaacacuaaggaagacccacagagcuguauuaauuuuag

SEQ ID NO: 8382 - RNA, 119 nt, Human
uaguaaaaauaaucauaugccaacaggggaauugaaccacuuucuaaaucauaguaugaacucaucucuucagauacuugguaaguggucaaagcuuguuuuuauaauuacuuucacug

SEQ ID NO: 8383 - RNA, 72 nt, Human
uuuuuuuuuacuugacaucagcaacuucguguuuauacugcaccuugguuguugaugucaaguaaaaaaaaa

SEQ ID NO: 8384 - RNA, 67 nt, Human; identical to SEQ ID NO: 2785

SEQ ID NO: 8385 - RNA, 72 nt, Human
ccguccccuaacccccaguccucacuguccuguuuucuuaggcacugagggaucugaguaggucugggaugg

SEQ ID NO: 8386 - RNA, 105 nt, Human
ccuugucuccugguugccucucuugccccuuguccugaaagcccagcgaacacagaaagggguggggcagggucuauggggacgaaaggcagccgggguccgagg

SEQ ID NO: 8387 - RNA, 65 nt, Human
uggggaaggggaggguguucagaggcagcaccaccacacagucaccccucccucccucuuuccca

SEQ ID NO: 8388 - RNA, 84 nt, Human
gccacuguccucgcagccugggccagcugggggaacaauguaggguuuguugcuuaggggucccaggcuugcggggggguuggc

SEQ ID NO: 8389 - RNA, 62 nt, Human
ggagagguggagggcacccuuuguggaggaggaccccuaaacaggaugcccuccaccucucc

SEQ ID NO: 8390 - RNA, 71 nt, Human
ggccgcgauacaccagcacgcgcacggcgacaccgcgaccacgggaccuggccgagcacaaaccugcggcu

SEQ ID NO: 8391 - RNA, 60 nt, Human
ucccaagccugccaacgugaauggcuugcagaaucagucagcaggccagcggccuuggga

SEQ ID NO: 8392 - RNA, 91 nt, Human
gcacugggagugggcuccucggggucgggcaucugcugucgcugccucggccccgggcagagccgggccgcccgggggcccgucuuagugu

SEQ ID NO: 8393 - RNA, 75 nt, Human
agaggaggaaauggggugugaugggucaaaggcaggaaagguaagccaugguccucaaaccaaagagcccucucu

SEQ ID NO: 8394 - RNA, 85 nt, Human
uaaauucagcagcaugugguuuuuggaaaucagcccacaagauaagaacacugcaaccaaacucauaacuaauacugcuaauuua

SEQ ID NO: 8395 - RNA, 64 nt, Human
gacauggcagcugguuuucccuacaacaagugcuccaaaagagcaaggcagaaguugcgauguc

SEQ ID NO: 8396 - RNA, 60 nt, Human
agagcuuuaagcuacuuuuccaguaguuugccacuuucuccgagguaguuuggcugcucu

SEQ ID NO: 8397 - RNA, 80 nt, Human
uuuuuuaaaaaacaaaucaauguaaggacugaaguugaaguagcaauguaauaaaguuaauuuguuuauuuuuuaaaaaa

SEQ ID NO: 8398 - RNA, 75 nt, Human
gaggcaugggggaugguccaaucauggccugcucuaguaacgcaucugccagguugagaauaucccagguggcuc

SEQ ID NO: 8399 - RNA, 64 nt, Human
uggcuugcuucagguugaccaccuucauuauuucacucugaucagguggcagcgguggcggcca

SEQ ID NO: 8400 - RNA, 65 nt, Human
cagagaauugccugagcaaacuggaaacugguauacauuaauuucuugcucuccaacauucuuug

SEQ ID NO: 8401 - RNA, 79 nt, Human
guaaaacaauggccauacucuguugaggaccaccaaggaaacuaucuuuuuacuuggucauuaacaaaugccuuuuuau

SEQ ID NO: 8402 - RNA, 94 nt, Human
uuccuuuggcagcauuacuuuugauaagaagucuccaaauaaaauacaaaauuuuggcacagacauuuuaaucuugucaagacaauguaaggaa

SEQ ID NO: 8403 - RNA, 68 nt, Human
ccgguccucagaauacgaaaagugaacaugugaagaagacuuuguuuuugaguauuccugaaagcagg

SEQ ID NO: 8404 - RNA, 61 nt, Human
gcagcauagaagaugcucaguguccuggauuaccagauuuaauugaagaaaaucauguugu

SEQ ID NO: 8405 - RNA, 65 nt, Human
auguggcugaagaaagacaaagaauuauuacugguggaaauaaaacugacaucuuaaggcuacau

SEQ ID NO: 8406 - RNA, 60 nt, Human
ccgcacucuuuuucuucaggccgaccauuuggaagaacuuuuuguggucgaaagagucgg

SEQ ID NO: 8407 - RNA, 68 nt, Human
agaaguucaucccuccugcucuuacuguuuccggcccuggaggagaaugagggaggagaggguuuucu

SEQ ID NO: 8408 - RNA, 73 nt, Human
guuuucagcuucccuaagggacuggcauaggguuuguggggucaaugccaggaaccugggggaaacuggaugc

SEQ ID NO: 8409 - RNA, 76 nt, Human
cagcagcuauugcuauucaauggagacgguggccaccauuuccccugcaucgucucuccuacguaaucagucccug

SEQ ID NO: 8410 - RNA, 88 nt, Human
ugguaguuuugauuaaacucucuacucugauuuaacuguucucucuuccauuugaaaaaucagaguacuuuuuaaucagucuuugcua

SEQ ID NO: 8411 - RNA, 72 nt, Human
uccuccgcagaagguuggugggggguccagucugugauccuuggugcugugugccccacuccaaccugggga

SEQ ID NO: 8412 - RNA, 79 nt, Human
ccucucauauggugcugcaugcccaagauuuuaauguccagacacugaagaacaucuacuaccaucaacaccauccagg

SEQ ID NO: 8413 - RNA, 66 nt, Human
auccuuuugggcauguuccccauuuuuugcuuagcuccaauuagugugggccuaacccaaggggau

SEQ ID NO: 8414 - RNA, 64 nt, Human
ugucuguggcaaaaguuuaaucagaggaaauucuuucccagucugucgauuuaugccucagcca

SEQ ID NO: 8415 - RNA, 131 nt, Human
aggcaaggcuccugacuuccuucuugccggcucaacuucuccgacucuaccagcugaugcucuucacccugccagggaccccuguuuucagcuacggggaugagauuggccuggaugcagcugcccuuccu

SEQ ID NO: 8416 - RNA, 66 nt, Human
cagucaugcugugggaugaguccagcuucccugacaucccaggggcuguaagugccaacaugacug

SEQ ID NO: 8417 - RNA, 84 nt, Human
ucagcuggugcagcuggaguuugucucaggcaaggcuccugacuuccuucuugccggcucaacuucuccgacucuaccagcuga

SEQ ID NO: 8418 - RNA, 74 nt, Human
guagucuccacuggagaaguuaauugaugaguaguagccuacaacucaggcucuagcuucuccaggaacacuac

SEQ ID NO: 8419 - RNA, 68 nt, Human
gucuacauaaaugaagagcucaagaugacaucagucccauuugucuuaaguccugguguuguguggau

SEQ ID NO: 8420 - RNA, 118 nt, Human
ucuuaaguccugguguuguguggaugacaagcagaaggcaguuaugaugacaggugauagauccaaaauaauugccacauuuguuaacauuuuuccauuucuaaaccauccuuaaaga

SEQ ID NO: 8421 - RNA, 88 nt, Human
gcgucgccgcgaugguguuguuggagagcgagcaguuccugacggagcugaccagacuuuuccagaagugccggacgucgggcagcgu

SEQ ID NO: 8422 - RNA, 84 nt, Human; identical to SEQ ID NO: 1447

SEQ ID NO: 8423 - RNA, 64 nt, Human
ucuauaucaccuugaagaaguaugacggucgaaccaaacccauuccaaagaaagguacugugga

SEQ ID NO: 8424 - RNA, 89 nt, Human
gugcguuuucucuugugggcagggguggggguaacaaggugcuuggugaggagcuccugagacucauuguccaggagaaggaaugucac

SEQ ID NO: 8425 - RNA, 87 nt, Human; identical to SEQ ID NO: 76

SEQ ID NO: 8426 - RNA, 71 nt, Human; identical to SEQ ID NO: 77

SEQ ID NO: 8427 - RNA, 79 nt, Human
augaaacaauaaaacaaaacaaaagucauuucaaacaaagcuguuguuuugaaaacucuugcuuucuuuugguguccau

SEQ ID NO: 8428 - RNA, 76 nt, Human
gggaaggagcuccccccacugcccauccugcccgcuuuguggcggguagagucagugacagggaggcagcccuccu

SEQ ID NO: 8429 - RNA, 77 nt, Human
guguauauagagugagcugauuugggcucaggaaaaccuagucgcuuguugcucucgucugugacauuuuuguacac

SEQ ID NO: 8430 - RNA, 70 nt, Human
cugagaagccucaucaggaggccuguccuggagaugagcuuggcacaggucacuugcacauaggucucgg

SEQ ID NO: 8431 - RNA, 73 nt, Human
gcaguccgucuucaagguccagauaacaugagaaaugaagcuucucacaucguuguuggggaugacggacugu

SEQ ID NO: 8432 - RNA, 71 nt, Human
aaaaaucaauggcaacagguugggacacagcuauuucaaaggguagaaugccuauaccuacauugguuuuu

SEQ ID NO: 8433 - RNA, 76 nt, Human
uccacaaaucuuagcuauaauaacaagaugacagauuuugaucguuuuaaaguuaugaaggcaaagaaaaugagga

SEQ ID NO: 8434 - RNA, 109 nt, Human
cgggcaucggcuuccaguccgcggagggcgaggcggcguggacagcggcccggcacccagcgccccgccgcccgcaagccgcgcgcccguccgccgcgccccgagcccg

SEQ ID NO: 8435 - RNA, 66 nt, Human
cugggcugggcuaggcaugggcggcucugggaggacccuuccuuaguccccucucccaccacucag

SEQ ID NO: 8436 - RNA, 67 nt, Human
ggcuguggggggaugagcucacucugguccccucagaccuguggcuccaaggaaucuucccacggcc

SEQ ID NO: 8437 - RNA, 74 nt, Human
guacaggaaugcuuggagugucuuuucuguuauuuauagugauucucuuaaggcacaccugcugccuguuuugc

SEQ ID NO: 8438 - RNA, 78 nt, Human
uguuuauuucucuaauauuaugucaguuuauucucuuuaauggacuguaaaaaaauguaaucacaagagugccaaaua

SEQ ID NO: 8439 - RNA, 70 nt, Human
ccccccgccgcggccccggcgaggcccgcaagaagcccagcgaggaggaggcugcgguggcggcgggggg

SEQ ID NO: 8440 - RNA, 88 nt, Human
uuccugcuggccaccauccuugggaccgccugccuggccauugcgagcggcaucuaccuacuggcggcugugcguggcgagcagugga

SEQ ID NO: 8441 - RNA, 130 nt, Human
cacuggcggaagaggcuuggugccggggccuggggcucugagggaaauugaggcccugcaguuaguuugcgggaacucagcuccuccagccccaccucccagcauggugcccuaccauucaucuccaugg

SEQ ID NO: 8442 - RNA, 67 nt, Human
gcgugaacccagaagaagcagacucagccuucagccuccuggccaccugcuccuucuaugaccaugc

SEQ ID NO: 8443 - RNA, 73 nt, Human; identical to SEQ ID NO: 7929

SEQ ID NO: 8444 - RNA, 75 nt, Human
agucgauuccugauaaggugaauaagcuugauuguuuggucacaaguguuuuauucaacuuauucaggaacgauu

SEQ ID NO: 8445 - RNA, 62 nt, Human
uuuucacucuacuucuuggcuuaugaggauaaaaaugacaucccuaaagaaaaagaugaaaa

SEQ ID NO: 8446 - RNA, 70 nt, Human
cccggagacccgccccggcccgguccacauucuccccaggaagccggacucuauggggcgggacccuggg

SEQ ID NO: 8447 - RNA, 97 nt, Human
agguuuguucauuuucuauagcauuacugaaguguccguaugccuugauaauccuaucaauguuuggaucaucucagugggggaaaugacuuaauuu

SEQ ID NO: 8448 - RNA, 64 nt, Human
uuugcccagcuaacuugccaucucaguuuccccgauuagaaaagguggguggccagcgggugga

SEQ ID NO: 8449 - RNA, 80 nt, Human
gaugcaggcuggacaggaggacucaccaccugagcuggggauacucagguccuggggugcugaggaaauggggcugcauc

SEQ ID NO: 8450 - RNA, 116 nt, Human
uacucucaucuggagagggugcuguugggguguacucucaucuggagagggugcuguugggguguacucucaucuggagagggugcuguugggggcacucccaucuggagagggug

SEQ ID NO: 8451 - RNA, 61 nt, Human
uuggggguggacccccgugggccugagggugcaucccuggggcuggugggugcaccccugg

SEQ ID NO: 8452 - RNA, 61 nt, Human; identical to SEQ ID NO: 1363

SEQ ID NO: 8453 - RNA, 63 nt, Human
ggagaauggcuaugugaccaugucggugggaaaagucuuucacccugguacugcuccaugucc

SEQ ID NO: 8454 - RNA, 63 nt, Human; identical to SEQ ID NO: 1364

SEQ ID NO: 8455 - RNA, 66 nt, Human
ggucauacaggauacaguaugggacaaacagcugacgcagaaaaucccagaugucucuguaggucc

SEQ ID NO: 8456 - RNA, 64 nt, Human
uaguguccuguagaaacuguuccagcucagggaaaggggagaugcugcggauauacaggaucug

SEQ ID NO: 8457 - RNA, 69 nt, Human
gccgccucgucaccuccaguugggugccucuggguucccacuggcucugcccagguggggugggguggc

SEQ ID NO: 8458 - RNA, 80 nt, Human; identical to SEQ ID NO: 4017

SEQ ID NO: 8459 - RNA, 79 nt, Human; identical to SEQ ID NO: 4018

SEQ ID NO: 8460 - RNA, 118 nt, Human
cuucuuagcugucaccugccgaggcuucugggcacucaggcagugcaccccugggcagagccccuuaaagcugcugucgcuagaugcccaugguccagggccuggugggcgugagagg

SEQ ID NO: 8461 - RNA, 75 nt, Human; identical to SEQ ID NO: 74

SEQ ID NO: 8462 - RNA, 71 nt, Human; identical to SEQ ID NO: 77

SEQ ID NO: 8463 - RNA, 66 nt, Human
cugucaucaucauaacauuauuuauuguaaauguaguaauuuggguauuuaauauuaagaugacag

SEQ ID NO: 8464 - RNA, 77 nt, Human
cuuucagaaccgaacccaauccugaggcugacuccucuacggaaaaugaggacaggacgggggugagggaaugagag

SEQ ID NO: 8465 - RNA, 84 nt, Human
gcccggcuccucaggaagaaaaccgcuggcccuucccgagugugccggccgagggccgaggggccgugcaaauggggagagggc

SEQ ID NO: 8466 - RNA, 65 nt, Human
ggagggaaauggaugaaucuggcucguuuuaaaaucacguuuucugacgaauccuuugccccuuc

SEQ ID NO: 8467 - RNA, 79 nt, Human
guggagugcaggccagagcagggugugcguagccccagcacccagguucuucugucagacccugugaccugcgagcugc

SEQ ID NO: 8468 - RNA, 65 nt, Human
agagcaggagaagcagagguuaugacaguuaugcagacuuucccccuccuuuuucucuuuucucu

SEQ ID NO: 8469 - RNA, 64 nt, Human
gagcagccaugggugauguuuggugguaaaaaaccuacaggcguuuggggucccaugauuguuc

SEQ ID NO: 8470 - RNA, 60 nt, Human
caccaaaauccuggagaaaaacauuuuauuaauuuaggggaacaagauagaacacuggug

SEQ ID NO: 8471 - RNA, 66 nt, Human
gugcuucauuguguuuucucagaaacuaaucaaaagauuacagaguccuacacaauuuggagacac

SEQ ID NO: 8472 - RNA, 67 nt, Human; identical to SEQ ID NO: 1379

SEQ ID NO: 8473 - RNA, 63 nt, Human; identical to SEQ ID NO: 1366

SEQ ID NO: 8474 - RNA, 86 nt, Human; identical to SEQ ID NO: 1381

SEQ ID NO: 8475 - RNA, 64 nt, Human
cucuagucccauccaaaaaaaguuggcuucguuucugcagcucaauucacagaucagacuggag

SEQ ID NO: 8476 - RNA, 75 nt, Human
cuuuuuuuucuuuuucucuuuguguuguaugugguuguggcuuuaaauuaaaccaaagaaaaaaagaaaaagaag

SEQ ID NO: 8477 - RNA, 75 nt, Human
guaagcgcuucaucgccucugcugugcauauacuggguaggcuagugugacauugagggagucguugugcugcac

SEQ ID NO: 8478 - RNA, 75 nt, Human
auguguaccuugaugacccccuccagcccgagcccagcccagugggguggcuggguggcaggguagggaacacgu

SEQ ID NO: 8479 - RNA, 97 nt, Human
gcggggcggaggcacucgcgcggggggucauucggggucuggguucuggugccugcgcagcuuuccccgauggcccacugcgugaccuugguucagc

SEQ ID NO: 8480 - RNA, 64 nt, Human
ucggcuccaagucugacccacucugcguccuuuuacaggaugugggagggggcagcugggcuga

SEQ ID NO: 8481 - RNA, 64 nt, Human; identical to SEQ ID NO: 696

SEQ ID NO: 8482 - RNA, 69 nt, Human
ugucuggugauuaguucugugacuguguuuuaccugggccagcaugccauggaaugccaucaccggaua

SEQ ID NO: 8483 - RNA, 78 nt, Human
caggaucucaggauucguagaucccagauuauauuugccuuuaugcuuuaaaaauuagucauugauccuggaguucug

SEQ ID NO: 8484 - RNA, 69 nt, Human
cuccgccugccauaaagcugccuaggugccugacccaggcugcaggacagcugaaggcagagaucgggg

SEQ ID NO: 8485 - RNA, 120 nt, Human
gauggguguuuauugggauuaacacuugugaaaagaugguggagagggcagucaacugcuauguggcccaagaaugccucagccaccagguggugcucccaucagccagaauugcccauc

SEQ ID NO: 8486 - RNA, 69 nt, Human
gcucccaucagccagaauugcccaucaugguguccacugugcuuuuguagcccccuggcagaugggagc

SEQ ID NO: 8487 - RNA, 61 nt, Human
ugccgcacucgcuacagccagggcagcaagcccugccuggaaagaggauguggguggugca

SEQ ID NO: 8488 - RNA, 63 nt, Human; identical to SEQ ID NO: 7379

SEQ ID NO: 8489 - RNA, 67 nt, Human; identical to SEQ ID NO: 7380

SEQ ID NO: 8490 - RNA, 73 nt, Human; identical to SEQ ID NO: 7381

SEQ ID NO: 8491 - RNA, 68 nt, Human
cacaaaggagucuguggacaggcaggggcagaauccuggagggagcgccugagccaccaucccaugug

SEQ ID NO: 8492 - RNA, 72 nt, Human
ggagcucaacccucggcggccugauucccagggguccaagcacccucauucucugagucaggguugggcacc

SEQ ID NO: 8493 - RNA, 82 nt, Human
ggcggggucauugcaugacagcaagaaggcacgagguccccucaucuguccuuucccagcucgcaggccuuggaaccccgcc

SEQ ID NO: 8494 - RNA, 64 nt, Human; identical to SEQ ID NO: 3889

SEQ ID NO: 8495 - RNA, 63 nt, Human
gaagcuguccgcauuuauguggcaucgguccaagcaucccugggccagucgugcgacagacuc

SEQ ID NO: 8496 - RNA, 75 nt, Human; identical to SEQ ID NO: 74

SEQ ID NO: 8497 - RNA, 87 nt, Human; identical to SEQ ID NO: 76

SEQ ID NO: 8498 - RNA, 71 nt, Human; identical to SEQ ID NO: 77

SEQ ID NO: 8499 - RNA, 68 nt, Human; identical to SEQ ID NO: 6247

SEQ ID NO: 8500 - RNA, 88 nt, Human; identical to SEQ ID NO: 2733

SEQ ID NO: 8501 - RNA, 75 nt, Human; identical to SEQ ID NO: 5842

SEQ ID NO: 8502 - RNA, 73 nt, Human
gcaugcugacgagguuuggagaaucgaaacuggcuccgugggcaguuuccuaaaaugugccuccucgaguugc

SEQ ID NO: 8503 - RNA, 90 nt, Human; identical to SEQ ID NO: 3033

SEQ ID NO: 8504 - RNA, 82 nt, Human; identical to SEQ ID NO: 3034

SEQ ID NO: 8505 - RNA, 86 nt, Human
gacucaaugugcaacugacaucugcuagugaugaucugguaauauacaaccuguccaguagccgaacaguuuguuuuuauuguguu

SEQ ID NO: 8506 - RNA, 66 nt, Human; identical to SEQ ID NO: 12

SEQ ID NO: 8507 - RNA, 80 nt, Human
gcagaauugaagaugggaaguucauugggacugugucuuggaaaagcaccaaguucgucucaguuguuccuguuuuuugc

SEQ ID NO: 8508 - RNA, 70 nt, Human
uauguuugggucuuugauccauuuuggguucacuuuugcauaugugaguucgggaucauucuuuuacaua

SEQ ID NO: 8509 - RNA, 64 nt, Human; identical to SEQ ID NO: 287

SEQ ID NO: 8510 - RNA, 89 nt, Human; identical to SEQ ID NO: 288

SEQ ID NO: 8511 - RNA, 80 nt, Human; identical to SEQ ID NO: 174

SEQ ID NO: 8512 - RNA, 64 nt, Human; identical to SEQ ID NO: 175

SEQ ID NO: 8513 - RNA, 66 nt, Human
uuucggcgcugggucgcccaaagcagaauggagacggauagagugguggcuuccagaaucccgaag

SEQ ID NO: 8514 - RNA, 81 nt, Human; identical to SEQ ID NO: 5607

SEQ ID NO: 8515 - RNA, 76 nt, Human
gagucucuguugccuaggcuggagugcaguggugugaucuugguucacugcaacaccuccuggguucaagugauuc

SEQ ID NO: 8516 - RNA, 67 nt, Human; identical to SEQ ID NO: 1862

SEQ ID NO: 8517 - RNA, 65 nt, Human
uuuuuuuuuuuuuuuuuuugacaggggguugcuuugaacuuuauuugaaaaaaacagaagauaaa

SEQ ID NO: 8518 - RNA, 84 nt, Human; identical to SEQ ID NO: 286

SEQ ID NO: 8519 - RNA, 64 nt, Human; identical to SEQ ID NO: 287

SEQ ID NO: 8520 - RNA, 96 nt, Human
guggguuuuagugcaguccuucaagccacaauuuagauugcccuucggugugcuccagauuguugguucauauuaaaggacuguuuuaagauuugc

SEQ ID NO: 8521 - RNA, 84 nt, Human
uccacggacaacgaaaauccaccccgaauccaaaaauucagacauggaauggugguaggauuucacaguaaaguuagucuggga

SEQ ID NO: 8522 - RNA, 67 nt, Human
cagcaauuccuggacucggggguauuuuggucacagggugguuuugguuuaggggguuuguuuguug

SEQ ID NO: 8523 - RNA, 92 nt, Human
cugaggaugggcaacccccaggucugcagcuccagguacauaucacgcgcacagccugggcagccuggcccucaccggucgcccacucccag

SEQ ID NO: 8524 - RNA, 66 nt, Human
cuguuucuccuguuggcucacagggcugaaaggggcuuuuguccuccugggucagggagaacgcgg

SEQ ID NO: 8525 - RNA, 84 nt, Human
gggguuucauguaaugacuacaucagaaaguucuagcuuaucaaucauuaucuuuagaauucuaaugugguacacauauguccc

SEQ ID NO: 8526 - RNA, 61 nt, Human
uacugguuuauuucaggaaagcuaucucggccauggcuuccucugaacacacaaaccagug

SEQ ID NO: 8527 - RNA, 80 nt, Human; identical to SEQ ID NO: 174

SEQ ID NO: 8528 - RNA, 64 nt, Human
gcuaagauaguucaaauugaucuuaggucaaugguaagaccuauguaguucaugaagucuuggc

SEQ ID NO: 8529 - RNA, 66 nt, Human; identical to SEQ ID NO: 7151

SEQ ID NO: 8530 - RNA, 111 nt, Human
gugaccuacaagucucuuuauuugcccuccauuauagacugagcuguuaauaacauuuaaugagcucacauggauucacuggcuaauaaagaagaauagaguugaggacau

SEQ ID NO: 8531 - RNA, 66 nt, Human
uucuuaauuuuuuuaagucaaauuggauagaaacauccaauuggugguuuuuaaaacugguaagaa

SEQ ID NO: 8532 - RNA, 64 nt, Human
aaacaaaguucacuuuauuacauuaauuuuacacacuaaaauaauaugaaaugcagacuuguuu

SEQ ID NO: 8533 - RNA, 107 nt, Human
ugaguucggucacagacuugauguuuuugaaaguugucaccaguuuauugucaccuuccaacugaaccacugucuugacuuucuccccugucauugucuccagcuca

SEQ ID NO: 8534 - RNA, 71 nt, Human
uuccggcagaccgauugccuucaugaaggcuucaaaguuuuccuggcucugcaguuggguacuugccggag

SEQ ID NO: 8535 - RNA, 95 nt, Human
aucagcacuccucgcucuucggccuguggacucagacuggaauuuacaccauugaacuccuggguuuuggcuuggcauggugggcucaugcugau

SEQ ID NO: 8536 - RNA, 111 nt, Human
caauuuuauauguucacuugacuggaucaugggguacugagauagaugggaaaacauuauuucugggugugucuguggggauguuuccggaagagauuagcauuugaauug

SEQ ID NO: 8537 - RNA, 89 nt, Human
aagcgaacuuugugccuguccuagaagugaaaauuguucaguccaagaaacugauguuauuugauuuauuuaaaggcuaaaauuuguuu

SEQ ID NO: 8538 - RNA, 75 nt, Human
caaaaaagaccugcgcugcgaacccuccaccagcuaccggagggaggagggaggaugcgcuguggguuguuuuug

SEQ ID NO: 8539 - RNA, 77 nt, Human
cggcacugccacccuuuuggcauuguugccaccauugacugguggcgauggagagcugccaauugggcuggcggccg

SEQ ID NO: 8540 - RNA, 69 nt, Human
ggagggggcugcccacguuuuaguaacacuuugugguccugcuggcaacggaaucgcggcggcaccucc

SEQ ID NO: 8541 - RNA, 65 nt, Human
ggcuuaaacuugguuucgucacuucgggcacuuugguuuuuuguuccgugaccuucugaguggcu

SEQ ID NO: 8542 - RNA, 71 nt, Human
augcagguccagagccaacugcaguccuguccaaucccauagguacaagggccuggcuccucuuccugugu

SEQ ID NO: 8543 - RNA, 67 nt, Human
gcuccagcagcgagggguucgcguuacuuaggaacagcagcucuuuuuucccuucuucuguaggagc

SEQ ID NO: 8544 - RNA, 88 nt, Human
uucucauguugaagccaauuguuuuccaaauaauacugaauacaacuuucaaauuccuuuggguuauaguuggaaaccaggaugggaa

SEQ ID NO: 8545 - RNA, 64 nt, Human
gaugauggaugaguuugaggugaacauacaugucccggcaccugagcugcagucugacaucauc

SEQ ID NO: 8546 - RNA, 67 nt, Human
ugagugucacuguagaccccaaauaccaucccaagauuaucgggagaaagggggcaguaauuaccca

SEQ ID NO: 8547 - RNA, 85 nt, Human
acacacuuucuaugcauacaaauuuugugaauucccaaaguaugcuuuggaauuggucauaagucuuuucguaucaugagugugu

SEQ ID NO: 8548 - RNA, 66 nt, Human
acggcccaagggcuggagcuguaugagaacacucggaccccuaccagcuccagaccuuuguccugu

SEQ ID NO: 8549 - RNA, 73 nt, Human
aggucacgcacacggugcuggugaggagagaucaccauggagccaauuucucgugccgcacugaacuggaccu

SEQ ID NO: 8550 - RNA, 82 nt, Human
uuuuaguuguuuuagggcuuuuuauugaauagaaaaaauauaaacaauguuguagaguaaugagaaauccuccacacugaaa

SEQ ID NO: 8551 - RNA, 86 nt, Human
gagugcagggaugguccaggaggaggacuggaagcugcaggauggcugcagggggccguggacccuccugggccugaagcucacuc

SEQ ID NO: 8552 - RNA, 70 nt, Human
ccgaagaacaguguuuauugcccuaacggugauuagccuuguggggacaguucuauucuuucucauucgg

SEQ ID NO: 8553 - RNA, 109 nt, Human; identical to SEQ ID NO: 831

SEQ ID NO: 8554 - RNA, 74 nt, Human
aagagacagcuuuacagggccaugucagaauaugucaaagaaauauauuuuuggguaaaguacuucuguuucuu

SEQ ID NO: 8555 - RNA, 85 nt, Human
acuagagucagguugaaauuuggugucuuauugcuacaaagucuguuuugucagucuugggaucucuuuuaaugcuaacgcuggu

SEQ ID NO: 8556 - RNA, 67 nt, Human
gucuuuaguggagccucuccuggcucagggagaagaccuggaaagggagggggauucacuacaggac

SEQ ID NO: 8557 - RNA, 70 nt, Human; identical to SEQ ID NO: 8149

SEQ ID NO: 8558 - RNA, 82 nt, Human; identical to SEQ ID NO: 1766

SEQ ID NO: 8559 - RNA, 127 nt, Human
ugaucuuagaucacuaaagccucagacuccugggcucaagugauccucccagccucaaccuccuaaguagcugaggcaggagaaucacuugaacccacgaggcaaaguuugcagugagccgagaucg

SEQ ID NO: 8560 - RNA, 78 nt, Human
cacaugcagcagagcacacgaaugugugugugccaaggccccagaggcuggaugcccacauaugugcugaugcaugug

SEQ ID NO: 8561 - RNA, 66 nt, Human
cuuuuuuuuuuuuuuugaaugcucaguaucuauuuauuaaaugaaugcacaauugaaagagugaag

SEQ ID NO: 8562 - RNA, 67 nt, Human
ucucugucuucuucuugauagagaaacagcaugguuuccuagacugaauugaagaaugaaggugaga

SEQ ID NO: 8563 - RNA, 89 nt, Human
uucuucuuucuucaaauaucaccauugauuucuguggauauccuuagggugacacucuggaaaucuuggaugaaaguuaggaaguagaa

SEQ ID NO: 8564 - RNA, 64 nt, Human
cccggcagggcuggucagaggggcacagccaccgccugugccugccccucucuggcccacuggg

SEQ ID NO: 8565 - RNA, 66 nt, Human
cugcgaugauuucugugaaaauuuugcuguagcgaugcaccauuguuucacagaauuuccaagcag

SEQ ID NO: 8566 - RNA, 81 nt, Human
gcugcaggaaggugcucucgcacgggggcgucuugaggacgggcagccccucccagccccgguguggagucccgaggcagc

SEQ ID NO: 8567 - RNA, 73 nt, Human
augcacggucagccaauuuuauuuaucuuaagcaucagcugguucaauaaguccccaaucugguugccggcau

SEQ ID NO: 8568 - RNA, 61 nt, Human
gaggugucuccuugcuggcagagugcgcucacgcgagggcuggcugugaugaacacaucuc

SEQ ID NO: 8569 - RNA, 64 nt, Human
ggccugcaggcgcugugaggucccaggccggucuuggcggccgagagccccugcacucaaggcc

SEQ ID NO: 8570 - RNA, 66 nt, Human
uauguuuuugauaauuuuuauuuuugaagcuuaaauguguuucuucugaaagcuguuaaagaugua

SEQ ID NO: 8571 - RNA, 64 nt, Human; identical to SEQ ID NO: 287

SEQ ID NO: 8572 - RNA, 84 nt, Human; identical to SEQ ID NO: 286

SEQ ID NO: 8573 - RNA, 64 nt, Human; identical to SEQ ID NO: 287

SEQ ID NO: 8574 - RNA, 89 nt, Human; identical to SEQ ID NO: 288

SEQ ID NO: 8575 - RNA, 76 nt, Human
cagccuaacuuccuagugugcaucaggcaagaugagcaggcaccaucauguaaagagcaccuugggguguaggcug

SEQ ID NO: 8576 - RNA, 99 nt, Human
cuuggugaccaggguacaagccccugaugagcuugccauggcagccaaggacaccuggugccggaggaacgacaggggccugcaaaggggacauccgag

SEQ ID NO: 8577 - RNA, 96 nt, Human
gcuguagcauagguccugcucuguggauggggaaagccagggggcacauacguccccaugccgcccccuccaaagacuccucgcuggugcugaggc

SEQ ID NO: 8578 - RNA, 69 nt, Human
gucccucuccacguucuggguaugauggaguuugaggcuaugacuccucucugguuuagggggugggac

SEQ ID NO: 8579 - RNA, 67 nt, Human
uugcucgcagggcucauucugcauggaucuguguuucaggaugcugcaaggacaacucugcgggcag

SEQ ID NO: 8580 - RNA, 76 nt, Human
agccgcagucuguauggccuggggggcuccaagaggaucuccauuggagggggcagcugugccaucaguggcggcu

SEQ ID NO: 8581 - RNA, 60 nt, Human
gccgccgggaguggauucgguuucggugguggagccggcaucggcuucggucuggguggu

SEQ ID NO: 8582 - RNA, 74 nt, Human
ggagccacagcagcagccgccgggguuucagugccagcucagccaggcucccuggggucagccgcucuggcuuc

SEQ ID NO: 8583 - RNA, 66 nt, Human
ggccuugcugguggcuuugggggcccuggcuucccugugugccccccuggaggcauccaagagguc

SEQ ID NO: 8584 - RNA, 71 nt, Human; identical to SEQ ID NO: 4541

SEQ ID NO: 8585 - RNA, 70 nt, Human; identical to SEQ ID NO: 5824

SEQ ID NO: 8586 - RNA, 96 nt, Human
gccccccuacuuccgcuuccugacacucauggccuuccacgucuuccuccaagagaagguggaccugccacugguggaggugggcauuggcggggc

SEQ ID NO: 8587 - RNA, 79 nt, Human; identical to SEQ ID NO: 6903

SEQ ID NO: 8588 - RNA, 63 nt, Human
uuuuuuuuuuuuuuuuuuuuuuuuuuuuagagcaugaguaaagagaaagagagaaggaagaag

SEQ ID NO: 8589 - RNA, 77 nt, Human
agggaggagggacucugguagcuccaggaaccagguugggaggccagcuugcccaucagucaccggagccugucccu

SEQ ID NO: 8590 - RNA, 69 nt, Human
auaggcggcagaccccagguggugcguggacagacccuguccacagcgccuggcucccgugcugccugu

SEQ ID NO: 8591 - RNA, 67 nt, Human
ggucccaguccugaaauauacaaaguggcgccucccacugggcaguggucacugggcugcacggucc

SEQ ID NO: 8592 - RNA, 86 nt, Human
gaugucaaugcugccauugccaccaucaaaaccaagcgcacauccaguuuguggauuggugccccacuggcuucaagguuggcauc

SEQ ID NO: 8593 - RNA, 98 nt, Human; identical to SEQ ID NO: 5891

SEQ ID NO: 8594 - RNA, 79 nt, Human; identical to SEQ ID NO: 728

SEQ ID NO: 8595 - RNA, 77 nt, Human; identical to SEQ ID NO: 3129

SEQ ID NO: 8596 - RNA, 99 nt, Human; identical to SEQ ID NO: 3131

SEQ ID NO: 8597 - RNA, 85 nt, Human
gccguuagcuugugggagaacgugcuucuuauuccugggcaggcuucaaggaacagcuugcacaugugcccgcuaaacugaccgc

SEQ ID NO: 8598 - RNA, 64 nt, Human
gguuuccagcugcaacggcuccacuuugcaggcuugcaggguguauaccugcgcauugggaacu

SEQ ID NO: 8599 - RNA, 131 nt, Human
uggugagauuucggacaaguggcaguacauccggcugauggacaguguggcacugaaggggggccguggagugcuuccaugguccagaagugcaagcugugugcaagagaaaauuccaucgagauuuuaag

SEQ ID NO: 8600 - RNA, 86 nt, Human
uuuaagcaagcaccaucaagccuuacaaugcugaagacaaugagaacuucaagacaauaguggaguuugagugccggggccuugaa

SEQ ID NO: 8601 - RNA, 66 nt, Human; identical to SEQ ID NO: 1008

SEQ ID NO: 8602 - RNA, 78 nt, Human; identical to SEQ ID NO: 8274

SEQ ID NO: 8603 - RNA, 61 nt, Human
cuuaauugaauacuuagaaaaaaauggccaguggccgauugaaagguauauuaaaauuaag

SEQ ID NO: 8604 - RNA, 67 nt, Human
ggaaagcuggcggggccgaaaaguagggucuaugucugccaacucuaacagccugcccgugcuuucc

SEQ ID NO: 8605 - RNA, 82 nt, Human
ucaguacauuuuaaaagcuccacaaguaauuugauguucagccaaggaugagaauuagugguuuagcccuuaaaacuucuga

SEQ ID NO: 8606 - RNA, 65 nt, Human
agucugaaauauucgauucaauugcaaacuuugaguguaguuuuugaaaagauguuauuuagacu

SEQ ID NO: 8607 - RNA, 72 nt, Human
aggaaucgccacacugucuuccacaaugguugaaaucauuuacacucccaagaacagugugaaagcauuccu

SEQ ID NO: 8608 - RNA, 63 nt, Human
gcauuucucugauaaccagugaugaugagcauuuuuucauaugucugcuggcugcauaaaugu

SEQ ID NO: 8609 - RNA, 62 nt, Human
uccugacuuuuuaaugauugccauucuaacuggcgugagaugguaucucauugugguuuuga

SEQ ID NO: 8610 - RNA, 64 nt, Human
uugucagauggauagauugcaaaaauuuucacccauucuguagguugccuguucacucugauga

SEQ ID NO: 8611 - RNA, 85 nt, Human
cugugaaauccagucugugccacuggccuuugggcugacugggcaacgguugcugggagugccuaucauuguacaggcuucacag

SEQ ID NO: 8612 - RNA, 81 nt, Human
gaguccugaggagcgugaugcccgcacaguuuucuguaugcaguuagcugcccgaauucggccucgagaucuggaggacuu

SEQ ID NO: 8613 - RNA, 80 nt, Human
ucugcuguaggcaagguucgcgauguacguaucauuucagaucggaacucacgucguucuaagggcauugccuacgugga

SEQ ID NO: 8614 - RNA, 70 nt, Human; identical to SEQ ID NO: 4167

SEQ ID NO: 8615 - RNA, 61 nt, Human
ggcuucaugauauacaccaauuccacaauaaaacaaucauaugguccagguguauaaugcc

SEQ ID NO: 8616 - RNA, 63 nt, Human
caucgcagcugcaaauaaucagaagccaaggccaggccaucgauuugacacugcaggcagaug

SEQ ID NO: 8617 - RNA, 76 nt, Human
cucacaucaaacggagcugggagucgcuuuugcguguguccgcaguuugaaguguccucuccgaaggugaaguggg

SEQ ID NO: 8618 - RNA, 79 nt, Human
gaagaacgaguaaccugaaaugaaggagcgagaaucccacccucagccccccaacagcuuccucagcuucuuuuucuuc

SEQ ID NO: 8619 - RNA, 73 nt, Human
gcaggugcgcuccgggaugaagugcagggaggcaaacucuggcuggguuccuguaaacacccaucgcagcugc

SEQ ID NO: 8620 - RNA, 60 nt, Human; identical to SEQ ID NO: 2924

SEQ ID NO: 8621 - RNA, 90 nt, Human
gcaucuggguuauuuuuauuuucuuugcuuuggucuauacaaaaaaaccaauaaccaaaaacauaaagcgauaauaauaaaacacucugc

SEQ ID NO: 8622 - RNA, 118 nt, Human
uauauauauauacacacauauauauacguauauauguguauauauauauacacauauauacguauauguguguauauauauacacauauacguauauauauguguauauauacguaua

SEQ ID NO: 8623 - RNA, 73 nt, Human
uuucuaauaaauguaaaaagcuuaguuuuguuuuauaacuuauagaggauaauuuuuauuaacuuguuagaga

SEQ ID NO: 8624 - RNA, 92 nt, Human
ucucccucaggaccagcugucaguccccaggcccugagguggugccugcauccuaggucuguggggcauuacuggugucacucugagggaga

SEQ ID NO: 8625 - RNA, 86 nt, Human
gagaagggggccacggcuucucacaggguggggcgggccugguguacccuccccgaaagcacuggagaagggggccacggcuucuc

SEQ ID NO: 8626 - RNA, 93 nt, Human
uauauuugugaaauucauccacacugauguguauaacuguuauccauuuccauuguuguauagcauuccaccacaugaauacaccacaauaua

SEQ ID NO: 8627 - RNA, 77 nt, Human
ccggguguggucaccgaaguccggcuaucccggccaugccgccuaccgcgacuucacaccuacgaccaugacaccgg

SEQ ID NO: 8628 - RNA, 66 nt, Human
gcccgcgcggguuaccggacgcaauguggcaccggaagccaaggcgccguacgaccccgagcgugc

SEQ ID NO: 8629 - RNA, 88 nt, Human
agcaucauggagguuugaagaugccgcaugcggagucggaugaauuccaaauacugcguugcuggcgugguuuaauacucgauaugcu

SEQ ID NO: 8630 - RNA, 62 nt, Human
gucuccacguaugauguaucugagccgguugcuccacagguagcucuagcauggguggggac

SEQ ID NO: 8631 - RNA, 62 nt, Human
aucuaaguuaacagugugcugugccaccaaugaaaauaacaaaacaaagugacaaaauggau

SEQ ID NO: 8632 - RNA, 64 nt, Human
gauacuuccacgaagcuggcuaaggagguguggccacaggccagguaugccacguggacguguc

SEQ ID NO: 8633 - RNA, 72 nt, Human
ucccauuuucacccuggguuggugacugcauuaguuugcuaggguugccauaacaaaguaguacagaugggg

SEQ ID NO: 8634 - RNA, 80 nt, Human
augucauuuuuagagggaaauaguguaucugcuauggggaagacaaaucauggaaagccauuucucuuuaaaaaaaacau

SEQ ID NO: 8635 - RNA, 74 nt, Human
cugaucaauccuucuuuuucucuuuugcccacaauuuaagcaaguaaaugugcaaaagaaauggaaggauucag

SEQ ID NO: 8636 - RNA, 102 nt, Human; identical to SEQ ID NO: 2172

SEQ ID NO: 8637 - RNA, 77 nt, Human; identical to SEQ ID NO: 3082

SEQ ID NO: 8638 - RNA, 96 nt, Human
uuuuauuuuucaauuuuuauuuugguuuucuuacaaagguugacauuuuccauaacagguguaagaguguugaaaaaaaaauucaaauuuuuaggg

SEQ ID NO: 8639 - RNA, 69 nt, Human
ccuugcacaucugacauggcuaagcaggcucaggugccccuggcagcagucaucaaaccgcuggcaagg

SEQ ID NO: 8640 - RNA, 95 nt, Human
guuacuggaguacggggccaggugccacccuuagucacuaccaacuuccuggugaaagaccaagggaaugcaaguccccgauacauccgauguac

SEQ ID NO: 8641 - RNA, 63 nt, Human
cuucaaaagugaaucacuguggaccaagcaccagaaacaucgucccaaagauucaucuugaag

SEQ ID NO: 8642 - RNA, 87 nt, Human
agggcucgggggcggggaggccccuccggcggggcgugccugggugguccggcagaggcggaggccugcuccgagccugugagcccu

SEQ ID NO: 8643 - RNA, 94 nt, Human
gcgcacguccagguaacgcgcuucaaggggccgcggcucggagcugggggaccccgggccgcccugcccauacgagugcgagcguggagagcgc

SEQ ID NO: 8644 - RNA, 80 nt, Human
ggauccggguccccgaccaaaggccgacacccgagaggugcgcucggacccggccggucccccgaggguggcucggaucc

SEQ ID NO: 8645 - RNA, 67 nt, Human
aucgcagacuuucucaacucguucgccuacucagcaggaagacaaugaggaugaagaccuuuaugau

SEQ ID NO: 8646 - RNA, 67 nt, Human
ggugcagcgggagauucaccaggacugggcuaaccgggaguacauugagauaaucaccagcagcauc

SEQ ID NO: 8647 - RNA, 73 nt, Human
aaagccacagguaagaauucucauuugcuaaauuacaaugauuggugcaaauuaugccuaugacauuggcuuu

SEQ ID NO: 8648 - RNA, 91 nt, Human
cuuuuuuaaguuugaacagaaggguugaucaaaauguguuuugucuguuuuaggcuugaugauucacgcuucucuuuaaacugccuuaaag

SEQ ID NO: 8649 - RNA, 71 nt, Human
uauggcauucuguuuaauacacgaaagguuuccacuugauauacauuguguuaaaacagaagauagccaua

SEQ ID NO: 8650 - RNA, 94 nt, Human
ucuguuucugaaaccagacuuuguuaauuaacaguuuuaaaauauuaauuaguuuugacaucuuguaaauuuuaggucaaaaauacaguccaga

SEQ ID NO: 8651 - RNA, 62 nt, Human
ccacgacacuucggcaauuuggaaggacccaggauuggguccaaggguuucggacaacgugg

SEQ ID NO: 8652 - RNA, 97 nt, Human
ccgcuauaaagggguuagcaagucagucaucaaaacaauguccaucauggauuuugaaaaggugaaucuugaauuaauagaggccuuauuagagugg

SEQ ID NO: 8653 - RNA, 80 nt, Human; identical to SEQ ID NO: 100

SEQ ID NO: 8654 - RNA, 86 nt, Human
guagaguuaagccuggcaggagcgugcucuguugcacuaaaugugugguggcaggccccucaaagccgugguuggaauaaucuuac

SEQ ID NO: 8655 - RNA, 78 nt, Human
auuguugagauuauaauaucaauaacuuacugcaguuuugagugagcuacuuagugcaugguauuauaaaacaacgau

SEQ ID NO: 8656 - RNA, 131 nt, Human
gugguucacgccuguaaucccagcacauugggaggccggggcggguggaucaccugauggucucgaucuccugaccuugagauccgccuaccucggccucccagaguacugggauuaugggcgugagccac

SEQ ID NO: 8657 - RNA, 65 nt, Human
ugggugguccuuggucccuuugaauuuguauccuaaaguuuuacauuuauuuuaaguacccccca

SEQ ID NO: 8658 - RNA, 69 nt, Human
auggcugucuuuuggaggucauuuuuuugagccuaucucgggucucuaagggcaaacuccagcagccau

SEQ ID NO: 8659 - RNA, 76 nt, Human
aguggucgagcggcguaucaaccucgcgugauaaaguucucaggacguggguguauccugcgacugcgcgacugcu

SEQ ID NO: 8660 - RNA, 88 nt, Human
ccugggaauuccuauguaugucccuuuccaaaccgaggggguggggguucacccgcguauugcagggacguacuuggaauuugccggg

SEQ ID NO: 8661 - RNA, 89 nt, Human
agcuccauuuacagaacuguugcuuuuuugcaguugucuuuguucuugaaaaaccaguaacugcuucugcauaccuuuuguguagagcu

SEQ ID NO: 8662 - RNA, 81 nt, Human
ggagcugacuggguguugcugaagcaaauguuggacuuuguguuagauagucuugcauaucuuaaucgacauucccagccc

SEQ ID NO: 8663 - RNA, 88 nt, Human
uagugaaauauugaggcagcaauuuuuuacaaaaaggucauccucugcucuauucguuaccuuguuauugcugucucaacauuuacua

SEQ ID NO: 8664 - RNA, 87 nt, Human
ucggcaguggcauccggggccgggggucgcggccguggcacggggccggggccgaggccgucggagcucgcggaggcauagugccga

SEQ ID NO: 8665 - RNA, 68 nt, Human
cuggguuauggugagaaacauaguuaaauaacugacauuuuagaaauauguuuuuaccuauuacuuag

SEQ ID NO: 8666 - RNA, 99 nt, Human
guauuuucuucauggcaagucuugugcaguucauuggugauuaguaauaauaauaagauugcuguuuauuaacucuguauaugcuugccugauuugugc

SEQ ID NO: 8667 - RNA, 108 nt, Human
uuuuuuuccuuuuagaauguaucucuuugauuaauaaaagcuuugaauuaaaucucauauuuugaaauaaaguauugaaaauugagguauauuuuucacuaaagaaaa

SEQ ID NO: 8668 - RNA, 79 nt, Human
agguaauguuacguagacgucauuccucuugugacuuacuuccauuuugcauuucauaugaacgucuggauaacagccu

SEQ ID NO: 8669 - RNA, 72 nt, Human
uugaauuuguuuuauuguagauuuguuacuggagcacuagugaagucaguaaccuaacugcaauuuguuuag

SEQ ID NO: 8670 - RNA, 76 nt, Human; identical to SEQ ID NO: 758

SEQ ID NO: 8671 - RNA, 71 nt, Human; identical to SEQ ID NO: 1764

SEQ ID NO: 8672 - RNA, 71 nt, Human
gagauuugcaaauuuaaaaaaaugaagaaucaaacuauauuuucuuuucuguuuuuuugaaacagagucuc

SEQ ID NO: 8673 - RNA, 61 nt, Human
uuuuuugaaauuugaaauggcagauuuauuaaguauuuuuaagccaucaaguuacaaaagg

SEQ ID NO: 8674 - RNA, 77 nt, Human
ugcuuugucguucaguugguuacuucuuuuaauguauucaaaaauguugaacacauacagaacugaauuaagaagca

SEQ ID NO: 8675 - RNA, 60 nt, Human
ugcuuuuaagaaccaaggacaaauuuucaguauugaagaagacaacauacauaaaaagca

SEQ ID NO: 8676 - RNA, 68 nt, Human
guccuuccaguggucgaggaagacauguccaguguguccacaucauacuucuucuucagcugggggau

SEQ ID NO: 8677 - RNA, 83 nt, Human
gugcacucaaagcagcugcucccgcgcacgugugcuaggaagucuggcgcaccugggcagaucacguugucagccaguagcac

SEQ ID NO: 8678 - RNA, 62 nt, Human
guucuugucagugagaggggucacaaaguguggugacaggagccucugacgggacgacuaac

SEQ ID NO: 8679 - RNA, 95 nt, Human
guggcgaccuagaggaucccuuagcuguguauuacaggacaaucacugaaucaugugcucuguaaucaagauagugaucuuccagaaggagccac

SEQ ID NO: 8680 - RNA, 61 nt, Human
gcagaauacuuuguggccugaaguucaaaaacuauaugggcacgguuaugaaauauuuugu

SEQ ID NO: 8681 - RNA, 64 nt, Human
gcagguaaaucaugugcucuguaaucaagauagugaucuuccagaaggcagccacugucccugc

SEQ ID NO: 8682 - RNA, 70 nt, Human
gguuuugaguaucagcagguggccuuucagcccuccauacuuacugagccucccacugaggaucaucuuc

SEQ ID NO: 8683 - RNA, 71 nt, Human
ccaccaucauacuuuuuuuuuuuuuugcuuuuaaaaaguggagguggaaaaaaaaaaaaaacugaaggugg

SEQ ID NO: 8684 - RNA, 66 nt, Human
ggacccuugacucuguucccuucaagaucacacacauaggucaccacuggggaccagucaaaggcc

SEQ ID NO: 8685 - RNA, 89 nt, Human
uuuuuuuuuuggacaggcaaaggaaugcuuuaauugaggucacaggcaucacaggggucugcucagcuuccucgccaccagggagaaaa

SEQ ID NO: 8686 - RNA, 66 nt, Human; identical to SEQ ID NO: 7949

SEQ ID NO: 8687 - RNA, 72 nt, Human; identical to SEQ ID NO: 1696

SEQ ID NO: 8688 - RNA, 61 nt, Human
aguuaucucuaccagugguucucaaacuuuagacuuuuugagaaucaccugguggguugcu

SEQ ID NO: 8689 - RNA, 92 nt, Human
cuuuuguuacauagagauuuaaagaaaaagaaaguaguaccuuaguauguaccgcauccuucuuuuccucagccacccuaucauaacagaag

SEQ ID NO: 8690 - RNA, 82 nt, Human
gacugauaaacaggggccagaaaccugcauuuuuaacauggagcccaagugauuuugauccagguggcccccaaauccaguu

SEQ ID NO: 8691 - RNA, 66 nt, Human; identical to SEQ ID NO: 4249

SEQ ID NO: 8692 - RNA, 84 nt, Human; identical to SEQ ID NO: 286

SEQ ID NO: 8693 - RNA, 89 nt, Human; identical to SEQ ID NO: 288

SEQ ID NO: 8694 - RNA, 80 nt, Human
gcuuccaugagucacaugcuucccuuauggguccucacaacaguccaacgaguuagguuuguguguacgguuauggaagc

SEQ ID NO: 8695 - RNA, 64 nt, Human
gugcuccgccgcuguccauugaagcucccgugccaaaaagugcucacaggccagcugcggacac

SEQ ID NO: 8696 - RNA, 106 nt, Human; identical to SEQ ID NO: 6411

SEQ ID NO: 8697 - RNA, 73 nt, Human
gugauggcuuauuuguuuuguauucaaugauugucuuuccccauucauuugucuuuuuagagcagccaucuac

SEQ ID NO: 8698 - RNA, 77 nt, Human
ugggggagcgagggaaggaguuaaugaaacuguauugcacaaugcucugaucaauccuucuuuuucucuuuugccca

SEQ ID NO: 8699 - RNA, 64 nt, Human
cuaaucuuuuuuuuuucacuuggaauuauguugaauguuucauuuugacaaaaaaguagacuag

SEQ ID NO: 8700 - RNA, 77 nt, Human
ccauaaucuucauagcaaacuugaaaauugaaaaaaaaaauucacauuuccuuauuugcuuauguacuaccccaugg

SEQ ID NO: 8701 - RNA, 93 nt, Human
gcuaaguggggcugaaaucaacaaaaggucuuggacuguuggcucagaaaucauccuagaaagcccgcccuguugauaucugucaugcuuagc

SEQ ID NO: 8702 - RNA, 100 nt, Human
gaguucaagaccagucugggcaacacagugaaaccccaucucuacaaaagauacaaaaauuagcagaugugguagcgugugccuauggucccagcuacuc

SEQ ID NO: 8703 - RNA, 100 nt, Human
ugaggugggaggcucccuugagccaggaggucaaggcugcagugagcugugaucaugccacugcaguccagcccgggcgacagagugagaccccaucuca

SEQ ID NO: 8704 - RNA, 80 nt, Human
ccaggcucuucuggacaaguacaaugcugagaagccuaagaaugcgauucacaccuuugugcaguccggaucucacuugg

SEQ ID NO: 8705 - RNA, 68 nt, Human
uuuuuauuuugguuuucuuacaaagguugacauuuuccauaacagguguaagaguguugaaaaaaaaa

SEQ ID NO: 8706 - RNA, 63 nt, Human
ccggaguaggagcaaugaucagaugggugcacagaccagugccaaucugaacauuguuaaugg

SEQ ID NO: 8707 - RNA, 65 nt, Human
guuuucuuuauuacggauucaaagacuuauuuugaaaguuggaaggagaagggagggaagagagc

SEQ ID NO: 8708 - RNA, 64 nt, Human
acuuaaggaccaagauuuaauaaaaguaauaauuuuuauugcuucuccaaggucauucuuaagu

SEQ ID NO: 8709 - RNA, 60 nt, Human
ugagacaaauguuguacuucaguaugcaggugcuuuauggguacuucucaucuuguguca

SEQ ID NO: 8710 - RNA, 84 nt, Human
uucuaaauguugacauauuucauuauauaauaucaaaaaaaucacauuaucauauacauuaaaauaccaccagcaguaucagaa

SEQ ID NO: 8711 - RNA, 78 nt, Human
uugaagggauaggcucacuuuguuaauauuugagaacauaccauccauagaaccauagcuugucaguuguucuuucaa

SEQ ID NO: 8712 - RNA, 84 nt, Human; identical to SEQ ID NO: 286

SEQ ID NO: 8713 - RNA, 89 nt, Human; identical to SEQ ID NO: 288

SEQ ID NO: 8714 - RNA, 94 nt, Human; identical to SEQ ID NO: 5398

SEQ ID NO: 8715 - RNA, 99 nt, Human
guucuagcucagguaguagucguacuucuucucggucuucuucuccuaaaaggaaaaagagacacaguaggaguagaucuccaacaaucaaagcuagac

SEQ ID NO: 8716 - RNA, 60 nt, Human
ggcugcaccaccagcucucccaguggggugcguucuggugggaggguaggaggugcagcc

SEQ ID NO: 8717 - RNA, 80 nt, Human
cuauuucucuauguuuauucuaguuaaggaaauguugagggcaagccaccaaauuaccuaggcugagguuagagagauug

SEQ ID NO: 8718 - RNA, 64 nt, Human
gggaagacguuuucuuuaucgcccugagaagaucuaccccagggagaaucugagacaucuugcc

SEQ ID NO: 8719 - RNA, 83 nt, Human
guaucuggggaugaaaaaggaguaguuuucuguuacugguuuaacagaaaugacagccagcaccucuuuauagaacccaggac

SEQ ID NO: 8720 - RNA, 97 nt, Human
uuuucugucuuacuuguucaccucaucaugaagauuuaguagccauuggcuacaaggauggcauaguggugauaauugacaucaguaagaaaggaga

SEQ ID NO: 8721 - RNA, 65 nt, Human
gccagugucauuuuauagcaaauugccauuuucuucaaaguguggcaguaucuugugacuuuggu

SEQ ID NO: 8722 - RNA, 82 nt, Human
gucagaaaacgcucuuguuaccacucauguucuucauuucuuuauucagaaaugcugacuauaucaucaaccaguuuucugc

SEQ ID NO: 8723 - RNA, 109 nt, Human
uauaucaucaaccaguuuucugccaauuaucuagcuuuuugucaugaagccuuuauacaugaaaaaguuaucacuuguauuuggaucaauaauguaaguuuaugauaug

SEQ ID NO: 8724 - RNA, 72 nt, Human
caauauuccaaauuauagguugagagaaugugacuaugaagaaaguauucuaaccaacuaaaaaaaauauug

SEQ ID NO: 8725 - RNA, 84 nt, Human; identical to SEQ ID NO: 286

SEQ ID NO: 8726 - RNA, 89 nt, Human; identical to SEQ ID NO: 288

SEQ ID NO: 8727 - RNA, 94 nt, Human; identical to SEQ ID NO: 5398

SEQ ID NO: 8728 - RNA, 68 nt, Human
uguagauugucaacaucgaauugaugggaucauacuuuugagcuccauacauggguguuauuucugca

SEQ ID NO: 8729 - RNA, 102 nt, Human; identical to SEQ ID NO: 2172

SEQ ID NO: 8730 - RNA, 63 nt, Human
guuaaaaaagaagaagaagaaauggcaaagagaaaguuuuuucaaauuucuuucuuuuuuaau

SEQ ID NO: 8731 - RNA, 62 nt, Human; identical to SEQ ID NO: 1277

SEQ ID NO: 8732 - RNA, 62 nt, Human; identical to SEQ ID NO: 4194

SEQ ID NO: 8733 - RNA, 67 nt, Human; identical to SEQ ID NO: 4195

SEQ ID NO: 8734 - RNA, 68 nt, Human
aagcagugaguggcccgugaacaugcgucgguuuugucuuucgacgcucaaggucugggcgccugcuu

SEQ ID NO: 8735 - RNA, 61 nt, Human
cagggccuggaguccugggggagcucagccagcucugccuuucucagggccuggaguccug

SEQ ID NO: 8736 - RNA, 81 nt, Human
ccugccccucugccugugcuccuggcaguguggcuucccggugcucaccugcacagcaguuaacagcagaggccgagcggg

SEQ ID NO: 8737 - RNA, 95 nt, Human
ggggcagggcuuuggggcugugaugcucugggaagccagcuuggguccugggucuacagagggcccuggccccggagcccagccagcucugccuc

SEQ ID NO: 8738 - RNA, 82 nt, Human
cccuuaaaugccuuauaaaagaccauccauccagucugcgcuuuugacugugugcaaguaucaguaauaaugcuuuuggggg

SEQ ID NO: 8739 - RNA, 71 nt, Human
aggauggguaccaggccugagauugugggaguggcauuacccucugggagucucgggcagaucaccaucuu

SEQ ID NO: 8740 - RNA, 63 nt, Human
cgucgaugguguugauagauggugacuuuuucagcccacaugagcaacaccaccacaaugaug

SEQ ID NO: 8741 - RNA, 79 nt, Human; identical to SEQ ID NO: 2369

SEQ ID NO: 8742 - RNA, 64 nt, Human
gcagccggagcacaggaacaccagcggccucuccuccgcagccgccgccuccuccuccagcugc

SEQ ID NO: 8743 - RNA, 84 nt, Human; identical to SEQ ID NO: 286

SEQ ID NO: 8744 - RNA, 89 nt, Human; identical to SEQ ID NO: 288

SEQ ID NO: 8745 - RNA, 64 nt, Human
cacacggauaaccuuuggaguacgugacaacaacuuugucaccuaugacaccagcuucugcgug

SEQ ID NO: 8746 - RNA, 122 nt, Human
uagagcuucacagugccagggggcaggcugucguugcagagcucuguaguuagcgcaggucguagaccaaaccugugccacauccaugggugcaaugagggcagguccccuauccaucucug

SEQ ID NO: 8747 - RNA, 70 nt, Human
agaauuaaaaaucugcaucuuccacuauuuucaauauauuaagagaaauaagugcagcauuuuugcaucu

SEQ ID NO: 8748 - RNA, 81 nt, Human; identical to SEQ ID NO: 4673

SEQ ID NO: 8749 - RNA, 62 nt, Human
ggcuacgcagcacugguugcuucuggugggaucauuggcuauguaaaagcaggcagcgugcc

SEQ ID NO: 8750 - RNA, 79 nt, Human
gcauaguuaaaaaaaugaagcgagauggcaguuugugcaguaauaucugcccuucgaaguucaugcaaccaacuaaugc

SEQ ID NO: 8751 - RNA, 66 nt, Human; identical to SEQ ID NO: 1008

SEQ ID NO: 8752 - RNA, 60 nt, Human
uuuuuuuuuuuuuuuuucacgauaagguggauguuuauuuaaaacaaaaauaagaagaga

SEQ ID NO: 8753 - RNA, 62 nt, Human; identical to SEQ ID NO: 1277

SEQ ID NO: 8754 - RNA, 62 nt, Human; identical to SEQ ID NO: 4194

SEQ ID NO: 8755 - RNA, 67 nt, Human; identical to SEQ ID NO: 4195

SEQ ID NO: 8756 - RNA, 76 nt, Human
ccugugggcuuucuacaguaucccacugugucugguaugugucaauuuaugggauuacugagaauugccucuaagg

SEQ ID NO: 8757 - RNA, 69 nt, Human
uagggaaagcugguacgccugcagguaccgguccggaauucccgggucgacccacgcguccgcacccua

SEQ ID NO: 8758 - RNA, 62 nt, Human; identical to SEQ ID NO: 4194

SEQ ID NO: 8759 - RNA, 67 nt, Human; identical to SEQ ID NO: 4195

SEQ ID NO: 8760 - RNA, 92 nt, Human
agugacugucacccacacuuugauuguguugccaggacacaggcagauauuuuuuguuuuuguuucugggagcguguggguucuuaaacacu

SEQ ID NO: 8761 - RNA, 68 nt, Human
ggacaguaauaccuggcuuuaucauaugccugacagcauugcugcauaguaccagaguuaagcugucc

SEQ ID NO: 8762 - RNA, 98 nt, Human
uugggaaucuccaggugaccuaauccucauugguggcuugauguuugcugguaucuuccaaacucaguucccagacuagauugauaccuggagcccag

SEQ ID NO: 8763 - RNA, 85 nt, Human
cagccuggacgagagcauccuccucaaguggacaaaaggcuucaaggcaucuggcugcgagggcgaggacguggugacccugcug

SEQ ID NO: 8764 - RNA, 65 nt, Human
gcauuggugaucuuugcuacagaaagcuguucaugguaggcuuucucagcagagaugacaggggc

SEQ ID NO: 8765 - RNA, 78 nt, Human
guugaugccaaccuugaagccaguggggcaccaauccacaaacuggaugcugcgcuugguuuugaugguggcaauggc

SEQ ID NO: 8766 - RNA, 87 nt, Human
gccagucugcccagcugcaguacucacgccccaugggggaucuuggucuguuuuucuugugggagccuaguggagagcagacguggc

SEQ ID NO: 8767 - RNA, 78 nt, Human
ugcauuucgccauguugcccagcacucaagcaaucauccuaccucagccucccaaguagcugggauuacaggcaugua

SEQ ID NO: 8768 - RNA, 67 nt, Human; identical to SEQ ID NO: 1379

SEQ ID NO: 8769 - RNA, 72 nt, Human
gcaggugcgcuccgggaugaagugcagggaggcaaacucuggcuggguuccuguaaaauccaucgcagcugc

SEQ ID NO: 8770 - RNA, 81 nt, Human
gggaaggccagaggcaggcuuagcuucgggcggcagcggucuggggcugcucggacuggagcugcuugccaagguauuccc

SEQ ID NO: 8771 - RNA, 92 nt, Human
gggugggagggaggauggugcgucauuuaacauuaaauugccucucucuacaguauguggcugagcaucauggaccuuccucccucugcccc

SEQ ID NO: 8772 - RNA, 60 nt, Human; identical to SEQ ID NO: 7400

SEQ ID NO: 8773 - RNA, 78 nt, Human
aagccuuuuccucuacucucuuccuuguucugaaucauuucuucuucucaggccaaaguagccaugguaaggaggcuu

SEQ ID NO: 8774 - RNA, 85 nt, Human
agcugagacugacgggugauguugcucauaggcuccagcucugcauaagaccuuggcuuggagaccucccucucagucaacagcu

SEQ ID NO: 8775 - RNA, 73 nt, Human
cacuugugugaauuaguuuauaaguauacaugaaauauauuuuaaaaaaacauuauaaaaaauucauacagug

SEQ ID NO: 8776 - RNA, 76 nt, Human
cauacacuauacaagguuuguugaauacuaguuucuuuggaaccauagggaaagcuuugcucugggucaguguaug

SEQ ID NO: 8777 - RNA, 85 nt, Human
gucugaauugucaaauaguucuaaagugcauucuugcagcuaauaaauagcagcauuuguuuauaaaaccuuaagaaauucagac

SEQ ID NO: 8778 - RNA, 98 nt, Human
gaggaaauguuucaccuaaauauauuauggucaaugaaaaaaccggacuuuagaguaaaugugauaaccaaguagauuuguggaaccuuuauuuccuu

SEQ ID NO: 8779 - RNA, 60 nt, Human
aaaggaggggggcaggcauggcccugauuccuuauuaagggccccccacccuccaccuuu

SEQ ID NO: 8780 - RNA, 78 nt, Human
cagggggggcccccaaagggacauuuuuaacgggggggggauucgccccggccgggcuccuaagggaggcuaccccug

SEQ ID NO: 8781 - RNA, 77 nt, Human
gacccaucuuggcaauggauaugacccccaaagucaccagaucacgaggggucccaagucuagcccggacgaggguc

SEQ ID NO: 8782 - RNA, 73 nt, Human
uccgugcgcguugcugcggccgugguccgcgcccuuccucggcgggccggacuggucuccagaaaugcuuggg

SEQ ID NO: 8783 - RNA, 84 nt, Human; identical to SEQ ID NO: 286

SEQ ID NO: 8784 - RNA, 64 nt, Human; identical to SEQ ID NO: 287

SEQ ID NO: 8785 - RNA, 89 nt, Human; identical to SEQ ID NO: 288

SEQ ID NO: 8786 - RNA, 73 nt, Human
agcuggcagugccagggcugugaaccgugugccugcgaccgcacaacucccucagcccacagugcaaccaguu

SEQ ID NO: 8787 - RNA, 71 nt, Human
caggcuguaaucugucucugcuggggugaagggacggagggagacagaugagaaaugagaacacagaccug

SEQ ID NO: 8788 - RNA, 93 nt, Human
gucacuucagcccagcccagggagccccugcccagcacaagccucaugcacaguagcaguguuaagaugggcccuugggcugggugcaguggc

SEQ ID NO: 8789 - RNA, 103 nt, Human
uugagacaggagaaucgcuugaacccagguguuggagguugcacugagcugagauugcgccacugcacuccagccugggugacaaagcgagacugugucucaa

SEQ ID NO: 8790 - RNA, 101 nt, Human
aggccugccgucaugucuaagucagagucuccuaaagagcccgaacagcuaaggaagcucuucauuggaggguugagcuuugaaacaacugaugacagccu

SEQ ID NO: 8791 - RNA, 83 nt, Human
agccaucugagauacccaaguaguagaauccuuucaagcacugguuacuggugaugaauuuuguuuuguacugucacagagcu

SEQ ID NO: 8792 - RNA, 64 nt, Human; identical to SEQ ID NO: 5090

SEQ ID NO: 8793 - RNA, 81 nt, Human
aaagggcaagaauaucacggcaugggcaugaguagcuugaaacugcugaaguauguccuguuuuucuucaacuugcucuuu

SEQ ID NO: 8794 - RNA, 79 nt, Human; identical to SEQ ID NO: 7809

SEQ ID NO: 8795 - RNA, 99 nt, Human
gagacaggagaaucacuugaaccggggagguggaggcugcaaugagccaagaucacgccacugcacuccaaccugggcaacagagugagacuucgucuc

SEQ ID NO: 8796 - RNA, 97 nt, Human
gucacgauggcucaugccuguaaucccagcuacucaggaggauugcuugacccugagagguggagguugcagugagcucagaucacaccaucgcaac

SEQ ID NO: 8797 - RNA, 81 nt, Human
ucuuugaugauuaaaauauuuuagaaaucugaauuacaaauccgcaguauaaagaugaaaaaugucacuucaguaaaaaga

SEQ ID NO: 8798 - RNA, 131 nt, Human
aaaauuuaccuuuaaguauuuacuuuaaaaaauuuaauggcuuaacucgaacuugaagacacauacuucaacuguccuuauuguccauuaaacugauaauuuugauuuuucuugcuuuuauagauuuuacu

SEQ ID NO: 8799 - RNA, 69 nt, Human
aaagugcuaaauaaauagaucuacauuuuguacauauuuauauaaaauuuaccuuuaaguauuuacuuu

SEQ ID NO: 8800 - RNA, 60 nt, Human
uuuaauggcuuaacucgaacuugaagacacauacuucaacuguccuuauuguccauuaaa

SEQ ID NO: 8801 - RNA, 96 nt, Human; identical to SEQ ID NO: 5665

SEQ ID NO: 8802 - RNA, 78 nt, Human; identical to SEQ ID NO: 5666

SEQ ID NO: 8803 - RNA, 95 nt, Human
gagagacauacaaggacagugggucauggguaguaccagccucaaauucccacaggcucauacucagacaauuguauuacugccuuauguuuuuu

SEQ ID NO: 8804 - RNA, 91 nt, Human
gcaguuaaauacauuuuguauacaugaagcuuagauuaauucccaucaucaucaucuccuguuuuuauaugugucccuauguguuucaugc

SEQ ID NO: 8805 - RNA, 62 nt, Human
gugcuauuaaagaauauguguuccuuuuuauuauauuaucagauacuuauguuuaauuguac

SEQ ID NO: 8806 - RNA, 86 nt, Human
ggguucaguguaguguguucucuaccgaaaugguuauauacagaugguauggaaaugguuuuaaaggauuacucauaaacuauccc

SEQ ID NO: 8807 - RNA, 63 nt, Human
agaggacuguguuguggucuggggagaauguaaucauuccuuccacaacugcugcaugucccu

SEQ ID NO: 8808 - RNA, 65 nt, Human
gagaacuccuccugcaugacaaacuucucuccuuuagcaguucugauagcaacaacaggaaucuc

SEQ ID NO: 8809 - RNA, 79 nt, Human
ugggauagguucagacuucagguaucucuucagauugccaucaaaguaauccugcaggaaccucuccagagccuuccca

SEQ ID NO: 8810 - RNA, 66 nt, Human
ugggucuuugcugagcuucucgccaaguucuuuauacuugggcuccagguucuuacagugaccaca

SEQ ID NO: 8811 - RNA, 90 nt, Human
gggaagcacugucugugaggucucuaacuagcuguauugaaaaugauaaaugauccuagaggcuaguauuaucucguugacauuuuucuc

SEQ ID NO: 8812 - RNA, 111 nt, Human
agcuuugccacauucugcacagacguggacucugggaccguggugugcagauguuuucucauggccgaguuaucccugaaccaucuugugcagccuuuaugagggcaagcu

SEQ ID NO: 8813 - RNA, 82 nt, Human
guuaguaccacuuagggcuacaaggacccuggguucuucugucagaggaauuggguucagguuucaggcuuuaggguguaac

SEQ ID NO: 8814 - RNA, 67 nt, Human
gcugcuuacccuucccggaaccacaagauugucaaugccaaucaaaucuuucuugaguucgugcagc

SEQ ID NO: 8815 - RNA, 87 nt, Human
gguucaaauguaagucccuccgaugccuucuuucugcuccccgcgcagugcauagugaggccacugcugcuuacccuucccggaacc

SEQ ID NO: 8816 - RNA, 69 nt, Human
ggucuuugcggauguccacgucacacuucaugauggaguugaagguaguuucguggaugccacaggacu

SEQ ID NO: 8817 - RNA, 65 nt, Human; identical to SEQ ID NO: 6774

SEQ ID NO: 8818 - RNA, 76 nt, Human; identical to SEQ ID NO: 758

SEQ ID NO: 8819 - RNA, 62 nt, Human
caccuuuacgggcaaaccguccaccucgaccgauucuguggauauaguuuucccuguuggug

SEQ ID NO: 8820 - RNA, 62 nt, Human; identical to SEQ ID NO: 4194

SEQ ID NO: 8821 - RNA, 67 nt, Human; identical to SEQ ID NO: 4195

SEQ ID NO: 8822 - RNA, 86 nt, Human
gcaggcaggcaaggugacgggacuggaagcccuuuucagagccuuggaggagcugguccguccacaagcaaugagugccacucugc

SEQ ID NO: 8823 - RNA, 76 nt, Human
ugcaggggauggauaaacagggaaacacugugcauuccucacagccaacaguguaggucuuggugaagccccggcg

SEQ ID NO: 8824 - RNA, 75 nt, Human; identical to SEQ ID NO: 8270

SEQ ID NO: 8825 - RNA, 99 nt, Human
uuaaaccuuugaucucccacaccaaaagagaaaauaauauuuauauggaaguaauuuuauuuuaguguuugugauuuauuguggagagcagguguuuaa

SEQ ID NO: 8826 - RNA, 85 nt, Human
agggucaugaucaaaauuuuuuggguaccaguauuuagcaacaauauagguaauuuuagagaguauaauuuuggauccugauucu

SEQ ID NO: 8827 - RNA, 74 nt, Human
aagcucuuauugcaaaagacauuaaugagaccagaaaauaucuaccuggcuagcuuuuguaguagguaugguuu

SEQ ID NO: 8828 - RNA, 65 nt, Human
gacauugugaauuuaaccucucccgaucugggauuuaccccaugggaguggccguucacuuaauc

SEQ ID NO: 8829 - RNA, 81 nt, Human
guugaagcugauguuacuagugguagauugguucauacgaugcacggaggggucaaugugucaaagacaucgguuaucaac

SEQ ID NO: 8830 - RNA, 106 nt, Human
gggagcggcuaggccgggacgcccgugguccucaccccuugagcugcuuuggagacucggcugccagagggagggccaugggccgaggccuggcauucacguuccc

SEQ ID NO: 8831 - RNA, 73 nt, Human
gugcccacagugccccggacacauuucacaccucaggcucgugguggugcaggggacaagaggcugugggugc

SEQ ID NO: 8832 - RNA, 71 nt, Human
uucccgugggcccccgagacccgccuagauggaggaagcgcugcugggcgcccucuuaccgcucacgggga

SEQ ID NO: 8833 - RNA, 62 nt, Human
uguucaaggcaauggcuuuuuaaaucuuggcuaucuaaaauuuuuucccuuuguuuugaaua

SEQ ID NO: 8834 - RNA, 74 nt, Human
cuggguaucaccagcggaggcugcagagcagcaaugauugcugccuguuguuuccucuggaagcugcgacccag

SEQ ID NO: 8835 - RNA, 61 nt, Human
gauuugauauguucuuugucuuaaucuuagccaagaaaacaaacaggaccaacuucaaauc

SEQ ID NO: 8836 - RNA, 63 nt, Human
gucauugaucaugacaucaacaauagguacuugaucaauuuuugguguauugauuucaaugac

SEQ ID NO: 8837 - RNA, 72 nt, Human
ugcuucucaaggcugcuggaggugccucuucgucauaugaaggucacccguucccagggcuccuaaguggca

SEQ ID NO: 8838 - RNA, 99 nt, Human
cuaagauguuaccaguuucuuauuuuuacacauucuuuuuauugaagucccuuuuuauguugcugaauuguauauuaauguaaaaaagguuuguaguag

SEQ ID NO: 8839 - RNA, 61 nt, Human
gcuuauucucuccccaacauuucuaauuucguuuucauuuucuguuagagagaggauaugu

SEQ ID NO: 8840 - RNA, 60 nt, Human; identical to SEQ ID NO: 2705

SEQ ID NO: 8841 - RNA, 72 nt, Human; identical to SEQ ID NO: 1989

SEQ ID NO: 8842 - RNA, 71 nt, Human
auuuagaggaauugaaaguuaaagcaucucccauaacaaaugauggggaagaugaauuuguuccuucagau

SEQ ID NO: 8843 - RNA, 60 nt, Human
ggaagauucugcuucuguuuuuucaccaucauuuggucugaaacagacagauaaaguucc

SEQ ID NO: 8844 - RNA, 68 nt, Human
gggauuucucuacaggcuggcccgaaccaguuguuuugucuugcgggucugucagguuuggaaagucc

SEQ ID NO: 8845 - RNA, 78 nt, Human
agaggucagaauggcaggcaggggguggggaaggcggugcuucuugagccccacuuagcaacuggucacucauccucu

SEQ ID NO: 8846 - RNA, 79 nt, Human
ggcagcuggaucuugcuggggucgaagcaguuggauuccaugaugggaaggccauuggcucuucgguauuucacaagcc

SEQ ID NO: 8847 - RNA, 90 nt, Human
agcauguggccaggggugcaggguggcggggggucagcagcaugucccugggcaggcccugggcacccugucuccccuggucucacugcu

SEQ ID NO: 8848 - RNA, 70 nt, Human
gcugaugguccaauaaggggggugugagccccgcagggacuggcccgcaccugccuuggauguuuucagc

SEQ ID NO: 8849 - RNA, 64 nt, Human
ugcuguuccaguucuggucaagggccuugggggcuggccccccaccaggccuucuagagcagca

SEQ ID NO: 8850 - RNA, 66 nt, Human; identical to SEQ ID NO: 4822

SEQ ID NO: 8851 - RNA, 83 nt, Human; identical to SEQ ID NO: 6696

SEQ ID NO: 8852 - RNA, 66 nt, Human; identical to SEQ ID NO: 4823

SEQ ID NO: 8853 - RNA, 77 nt, Human
uuuacaccugaaagaaacuucauacuuguguguucuguuccccaucucagagcaagauuaugaagagaaggucuaaa

SEQ ID NO: 8854 - RNA, 61 nt, Human; identical to SEQ ID NO: 1363

SEQ ID NO: 8855 - RNA, 63 nt, Human; identical to SEQ ID NO: 1364

SEQ ID NO: 8856 - RNA, 102 nt, Human; identical to SEQ ID NO: 2701

SEQ ID NO: 8857 - RNA, 90 nt, Human; identical to SEQ ID NO: 2702

SEQ ID NO: 8858 - RNA, 88 nt, Human
gcacgagggggugcuggcggcugcagccggaguucaaaccuaagcagcuggaaggaaccauggccaacugugagcguaccuucauugc

SEQ ID NO: 8859 - RNA, 67 nt, Human; identical to SEQ ID NO: 6560

SEQ ID NO: 8860 - RNA, 80 nt, Human; identical to SEQ ID NO: 7925

SEQ ID NO: 8861 - RNA, 76 nt, Human
uugaugaagucucucaucuuugaaaggccauaaucuucuuuauuucccuuuuugucauguuucuucaaccauucaa

SEQ ID NO: 8862 - RNA, 65 nt, Human; identical to SEQ ID NO: 7133

SEQ ID NO: 8863 - RNA, 71 nt, Human
ggccaucuuuaccgugcagcuggaugacguaccugaacggacgggccgugcagcaccgugagguccaggcu

SEQ ID NO: 8864 - RNA, 71 nt, Human
gguguaaauguugagccuuuuuggccuggcuuguuugcaaaggcccuggcaaacgucaacauugggaagcc

SEQ ID NO: 8865 - RNA, 66 nt, Human; identical to SEQ ID NO: 50

SEQ ID NO: 8866 - RNA, 81 nt, Human
cugggguguuuauggcaagucacuuugacagacauuauuguggcaaauguuguccugacuuaccuguuuccaacaaaccag

SEQ ID NO: 8867 - RNA, 65 nt, Human; identical to SEQ ID NO: 247

SEQ ID NO: 8868 - RNA, 80 nt, Human; identical to SEQ ID NO: 100

SEQ ID NO: 8869 - RNA, 67 nt, Human
gggcacauuggugguauuuugguauguggccacuggcccuaaacaacugaccauuucuacccugccu

SEQ ID NO: 8870 - RNA, 105 nt, Human
ggggccggcuuggcuggguggggaccucaagucugagggugaggauggcugaaucuaccucgcuuaugucucagggacggucacccauuaccuaaggaugacccc

SEQ ID NO: 8871 - RNA, 84 nt, Human; identical to SEQ ID NO: 286

SEQ ID NO: 8872 - RNA, 64 nt, Human; identical to SEQ ID NO: 287

SEQ ID NO: 8873 - RNA, 65 nt, Human; identical to SEQ ID NO: 2

SEQ ID NO: 8874 - RNA, 79 nt, Human; identical to SEQ ID NO: 995

SEQ ID NO: 8875 - RNA, 96 nt, Human
ggcagcggcagcagcggcagcaguagcagccccucccacagcugugggcucccucucgggggcggagggggugccugugagcucucagccacuucc

SEQ ID NO: 8876 - RNA, 97 nt, Human
gcccaugcugauuaaaauuuugcuaccaagaagugggaugccuuuguaccaaauaccuaaaaauguggaaauggcuuuguaacuguugguaaugggu

SEQ ID NO: 8877 - RNA, 89 nt, Human
ggagucuucacucucuugcccaggcuggagugcaguggcacaaucuuggcccacugcaaccuccgccuccuggcuucaagugauacucc

SEQ ID NO: 8878 - RNA, 81 nt, Human
agggaaauggccuucccgccggacgaaggcuuaucugccugacaggcugugacucuucucucaaccuugggcuucuucccu

SEQ ID NO: 8879 - RNA, 95 nt, Human
ccacccccacgauucgguaugaugcugccggcacagcugggauacacacggcucccccaggccugagcugcuucacuagggaauccugcggcagg

SEQ ID NO: 8880 - RNA, 78 nt, Human
gcacauguuggaggagagagccuugggagccacugccacuccaguccugccaccacccuugucuuccucugcaagugc

SEQ ID NO: 8881 - RNA, 89 nt, Human; identical to SEQ ID NO: 288

SEQ ID NO: 8882 - RNA, 94 nt, Human; identical to SEQ ID NO: 5398

SEQ ID NO: 8883 - RNA, 74 nt, Human
ccaggucuaucuguccaauacuuugugucuaggguagaggucccuaacccuggcugcacauuggaagcaccugg

SEQ ID NO: 8884 - RNA, 72 nt, Human
gaauuccugaggcccgagccacacccuaaaccaauuucaucagaaucucugggugggacggagccuggauuc

SEQ ID NO: 8885 - RNA, 77 nt, Human
gacauccaauuuuguucaggucccuuuuaauggcacuuaauaaauauacauucugagaccuggcagaacaggcuguc

SEQ ID NO: 8886 - RNA, 72 nt, Human
cagauuagaaaaacugagguuauggcacugacuuaggcaccccccagcaaggcaacccagggacuacaacug

SEQ ID NO: 8887 - RNA, 63 nt, Human; identical to SEQ ID NO: 123

SEQ ID NO: 8888 - RNA, 99 nt, Human
ccaagaacuuuuuggccccguguuggaugcagugucucgggacuucgucaguguccugcacaggucgcaucaagaaggcgggcuccggaacuuacucgg

SEQ ID NO: 8889 - RNA, 65 nt, Human; identical to SEQ ID NO: 404

SEQ ID NO: 8890 - RNA, 91 nt, Human; identical to SEQ ID NO: 124

SEQ ID NO: 8891 - RNA, 105 nt, Human; identical to SEQ ID NO: 979

SEQ ID NO: 8892 - RNA, 73 nt, Human; identical to SEQ ID NO: 4762

SEQ ID NO: 8893 - RNA, 62 nt, Human
cuugguucuacagccauggggauccagacaucagagggugugugccuagcuguggagaagag

SEQ ID NO: 8894 - RNA, 72 nt, Human
ggacccaucugggaccuuuguacagugugaugcucgagcaauuggcucuguucagagggugcccagagcucc

SEQ ID NO: 8895 - RNA, 74 nt, Human
ggugaguugggugccgguggagucguguagguccucagaauccccgcguagccgcugcuccuccuacccucgcc

SEQ ID NO: 8896 - RNA, 76 nt, Human
guguuuggaacugcuaccgauacaucaaugguaggaacuccucugauguccugguuuauguuaccagcaaugacac

SEQ ID NO: 8897 - RNA, 74 nt, Human
uccuguacgauuggggauauaacgggcuucacuaacuuucccuaggcauugaaacuucccccaaaucugaugga

SEQ ID NO: 8898 - RNA, 71 nt, Human; identical to SEQ ID NO: 1007

SEQ ID NO: 8899 - RNA, 79 nt, Human; identical to SEQ ID NO: 8750

SEQ ID NO: 8900 - RNA, 66 nt, Human; identical to SEQ ID NO: 1008

SEQ ID NO: 8901 - RNA, 75 nt, Human; identical to SEQ ID NO: 6455

SEQ ID NO: 8902 - RNA, 102 nt, Human
cuggaggcuguggggcagguacaguugcuguuggugcagguggucuauuaagaauaccuggcgcugaaacagccugugcuugagucauuggaggaauuccag

SEQ ID NO: 8903 - RNA, 61 nt, Human; identical to SEQ ID NO: 3654

SEQ ID NO: 8904 - RNA, 77 nt, Human; identical to SEQ ID NO: 3655

SEQ ID NO: 8905 - RNA, 65 nt, Human
ccagucacguugaauuuaugguucguccaaaugaauuuacgagcaguaagugguuuuguuguugg

SEQ ID NO: 8906 - RNA, 64 nt, Human
gaaugguaaacaguaaaagaguaauuacaugaaaagcuccauauuuugcauguuucaacuguuc

SEQ ID NO: 8907 - RNA, 70 nt, Human
ggaucaucagucauacugugaagccaacgaugccaaaaaauugcuuguugucuucauaguauuuguuucc

SEQ ID NO: 8908 - RNA, 75 nt, Human
cuguggaaaaacuaagggaugcuuuagauauggcaaaccaggcuguaaugcagagaccugugacuauuuccucag

SEQ ID NO: 8909 - RNA, 64 nt, Human
gacuccuccuacggcaccuucgcgggggaguucuacgaccugcgcuaccugucggaggaggguu

SEQ ID NO: 8910 - RNA, 65 nt, Human
guuuguuuuauaguacaguguaugcggccaugugcugcauaacacuguuucagucaagaaugaac

SEQ ID NO: 8911 - RNA, 72 nt, Human
aagaaaggacgggguuucuaguugcuaagauuugccaaacauggcuacaaaacugguaaacaaaccuuucuu

SEQ ID NO: 8912 - RNA, 69 nt, Human
gcaucaugggagugacagggccacuggcaagacuuuuugccagucagccuaguucuucuuuuaagaugc

SEQ ID NO: 8913 - RNA, 68 nt, Human
gguccuauguucagccccuaaacgaauggcacaaugccaccaauuuugggauuccugaguuugguucc

SEQ ID NO: 8914 - RNA, 63 nt, Human
auggugacaacaugcuggagccaagugcuaacaugccuugguucagggauggaacgucaccgu

SEQ ID NO: 8915 - RNA, 81 nt, Human
acucaguuuuauugacuuccagcauuucccccuggaucugagcucagcccagcugguuuugguucgucucugaggcucagu

SEQ ID NO: 8916 - RNA, 81 nt, Human
acaaaauagacacuuuuggauuuucccgucuuuuccaacaccaaggaugagauuaucaaaagauguguuaaauuaauuugu

SEQ ID NO: 8917 - RNA, 69 nt, Human
aaggaccaaggaugggagguuuuaaagcaggaaacagcaguuguugaaaacguccccauuuugggacuu

SEQ ID NO: 8918 - RNA, 93 nt, Human
gauuguacuguauggggacuccaauugcuuggaugacagucaccgacagaaggacugcuuugggcuucuggaugcccuccuccaguacacauc

SEQ ID NO: 8919 - RNA, 60 nt, Human
ucgucaucuucagugacgguacaacacuucuguuaugagaagagugaaguuuuaugauga

SEQ ID NO: 8920 - RNA, 76 nt, Human
uggggugacgccgccuagccucagucacucugggaaccgccagcgcccucccaguggagcaggcucagucacucca

SEQ ID NO: 8921 - RNA, 81 nt, Human
cugggguuguuuauggccaagucacuuugacagacauuauugugggcaaauguugucugacuuacuguuucaacaaaccag

SEQ ID NO: 8922 - RNA, 80 nt, Human; identical to SEQ ID NO: 100

SEQ ID NO: 8923 - RNA, 77 nt, Human
uugguucccuuccagucucuucccccuuucuaucccaaucaccaauagaaaugcuaacaucccugccugguagccag

SEQ ID NO: 8924 - RNA, 86 nt, Human
uacugccaaaacuuuaaauaucucaagagcauaccacauuuuaaacacauuauggucauguagcuauuucaauauuccugggagug

SEQ ID NO: 8925 - RNA, 84 nt, Human
uccugagcuucuucuaccucugagaguuuuucaucauuuuccaauguuugcugaaguucauggaugguacuaagaagaacauga

SEQ ID NO: 8926 - RNA, 78 nt, Human; identical to SEQ ID NO: 7184

SEQ ID NO: 8927 - RNA, 60 nt, Human; identical to SEQ ID NO: 7400

SEQ ID NO: 8928 - RNA, 65 nt, Human; identical to SEQ ID NO: 4986

SEQ ID NO: 8929 - RNA, 64 nt, Human; identical to SEQ ID NO: 8200

SEQ ID NO: 8930 - RNA, 66 nt, Human; identical to SEQ ID NO: 2189

SEQ ID NO: 8931 - RNA, 71 nt, Human
cuugaccaggcucggaggucgccccgaucgaaacagugaccgggacauggggugccccguuuaaggucagg

SEQ ID NO: 8932 - RNA, 71 nt, Human
uuuuauuucugaacugacucccaguuauguucuugggauauagauauggggggaaagcuuagaacauggaa

SEQ ID NO: 8933 - RNA, 65 nt, Human
gcggcggcuuucuucgcuuucuucgguguuuucuuagcgcucuucuucggaguugcgccgccagc

SEQ ID NO: 8934 - RNA, 81 nt, Human
gagcuuaaguacccgccagugagcagugagagggaacggagccgcuaugucgcaguguuccaggaccaguacggagaguuc

SEQ ID NO: 8935 - RNA, 101 nt, Human
auuacucauauuuaagagaucuaggaaugaggagucucugauccccuuucuucaaaucagagcuuuaauuucauagacgcucucucucucucugugguaau

SEQ ID NO: 8936 - RNA, 80 nt, Human
gugaugucugcguaacgagucuuuauaccaucuaguuuuuccuggauaaguaacaccuccucaccuauggaagauagcac

SEQ ID NO: 8937 - RNA, 65 nt, Human
ugucuucuguacaucuuacuggguuuaauuaaaaaaaaagaaaaaacucuguuguacaaagggca

SEQ ID NO: 8938 - RNA, 60 nt, Human
gcugcucgccccacaugcccucauggcuguuguuccagggggggcaguggggugggccgc

SEQ ID NO: 8939 - RNA, 60 nt, Human
gguggcgucgggcugguuguuccagggcgcgucgcgcuggccguuccagccggggucacc

SEQ ID NO: 8940 - RNA, 61 nt, Human; identical to SEQ ID NO: 3609

SEQ ID NO: 8941 - RNA, 66 nt, Human; identical to SEQ ID NO: 3610

SEQ ID NO: 8942 - RNA, 82 nt, Human
gggguggaucagggcucuaucacuugguccccaccucaccuugguggggccagagugagccccuuccugccacagucacccc

SEQ ID NO: 8943 - RNA, 94 nt, Human
gugacugacgaggagaucuccccacagcuuaguuguagugagccagacgaggcagcuuauggaaccuggggggguucucuccauuugucaccgc

SEQ ID NO: 8944 - RNA, 68 nt, Human
cggggacuggauugacaguauccuggccuucucaaggucccugcacagcuugcuugucgaugucccug

SEQ ID NO: 8945 - RNA, 104 nt, Human
gcaucaauacuaucuggagauaauucuucuaagggacaaacugcaggacauaagggauccugaacagucagugguggaggaguucucggugagguaguaguugu

SEQ ID NO: 8946 - RNA, 74 nt, Human
ggaagugggcagcaagaucuacguggaugaugggcuuauuucucuccaggugaagcagaaaggugccgacuucc

SEQ ID NO: 8947 - RNA, 63 nt, Human
ugcagauuucauauauuucugaaucaaaaacaccuuugucuucacaguaugaguuagaaugca

SEQ ID NO: 8948 - RNA, 72 nt, Human; identical to SEQ ID NO: 5753

SEQ ID NO: 8949 - RNA, 84 nt, Human; identical to SEQ ID NO: 286

SEQ ID NO: 8950 - RNA, 89 nt, Human; identical to SEQ ID NO: 288

SEQ ID NO: 8951 - RNA, 84 nt, Human; identical to SEQ ID NO: 286

SEQ ID NO: 8952 - RNA, 89 nt, Human; identical to SEQ ID NO: 288

SEQ ID NO: 8953 - RNA, 94 nt, Human
uuuuuuuuuucauuuaacuuuuuuaaugggucucaaaauucugugacaaauuuuuggucaaguuguuuccauuaaaaaguacugauuuuaaaaa

SEQ ID NO: 8954 - RNA, 84 nt, Human; identical to SEQ ID NO: 286

SEQ ID NO: 8955 - RNA, 89 nt, Human; identical to SEQ ID NO: 288

SEQ ID NO: 8956 - RNA, 94 nt, Human; identical to SEQ ID NO: 5398

SEQ ID NO: 8957 - RNA, 74 nt, Human; identical to SEQ ID NO: 365

SEQ ID NO: 8958 - RNA, 68 nt, Human
gauggcuuauuuguuuuguauucaaugauugucuuuccccauucauuugucuuuuuagagcagccauc

SEQ ID NO: 8959 - RNA, 71 nt, Human
gccaauguccacaaagaauuccuggucagcaccaccgauguccaaaggugcaauaucaaggaagggcaggc

SEQ ID NO: 8960 - RNA, 90 nt, Human; identical to SEQ ID NO: 1501

SEQ ID NO: 8961 - RNA, 82 nt, Human
ucagcuuucaguuaaaaaagaagaagaagaaauggcaaagagaaaguuuuuucaaauuucuuucuuuuuuaauuuagauuga

SEQ ID NO: 8962 - RNA, 77 nt, Human; identical to SEQ ID NO: 8698

SEQ ID NO: 8963 - RNA, 74 nt, Human
aagaauucuaagaacacuacuagaagcauuuguucccuccuagucaaugcuucauacuuuuucuugggauucuu

SEQ ID NO: 8964 - RNA, 60 nt, Human
ggugaccccgaggcagcucacgcgguugucguggccagcgaggacuccugcacggucgcc

SEQ ID NO: 8965 - RNA, 86 nt, Human
uggcaucccagauguugcaguugaagucgucguagccagcgagcagcagccguccgcugcgcgagaaggcaacagaggugaugcca

SEQ ID NO: 8966 - RNA, 80 nt, Human
gagcuggagagauguuagaagauggcucugagagauuccucugcgaaucuguuuuuagcuaucaaguggcauccacgcuu

SEQ ID NO: 8967 - RNA, 78 nt, Human
gguggggggcgaacacgccgcgguccucgucgugugaaguaagaacucugcuagagaggaaauggcugcuucaucauc

SEQ ID NO: 8968 - RNA, 64 nt, Human
ugguggggucaguggaaguucugucacuggaucugguuucagugucucagaccuugccccacca

SEQ ID NO: 8969 - RNA, 71 nt, Human
gaccgucacggccauggaugugguguacgcgcugaaacgccagggucgcacccuuuaugguuucggcgguu

SEQ ID NO: 8970 - RNA, 105 nt, Human
agauucgcauugaaaauagucauucugaauccuauugauuauccaaaaauccaggcugauuugucuuuuaucagagguaggauccuguuuuauaguauagaaucu

SEQ ID NO: 8971 - RNA, 65 nt, Human
augauguaaagaaugcuucuuguucauuacaugggagucaugaugaucaagaaucuggauaucau

SEQ ID NO: 8972 - RNA, 111 nt, Human
aaaguuauuuuggguguaaguggugaaugaaugugaaggccuaggacauuacuguacacuacuauagacuuuauaaacauuguacacuuagacuacacuaaacauaauuuu

SEQ ID NO: 8973 - RNA, 70 nt, Human
gccccauucccaugauaauccauuaaucuaucaauccuugaauagauuaauccaaucaccucuuaagggc

SEQ ID NO: 8974 - RNA, 65 nt, Human
gcugagaaguccaagguugagggccacaucaggucagggucuucuugcugguagggacucucugc

SEQ ID NO: 8975 - RNA, 60 nt, Human
ggcaucauauggugggggcgcugagcaugcuagcucaggucuucaucuucuuacaaagcc

SEQ ID NO: 8976 - RNA, 94 nt, Human
auacauguaagauuuguuauauauccuuaguuuuaaaaaaucacuaucaccugaccuuauuuaaccuuaauuauacuuguuuuucuuacugugu

SEQ ID NO: 8977 - RNA, 78 nt, Human
gccguugagcugguacaccguccggaaggcauuggccauacccgacagccggccgcugauguuggccagcgagagggc

SEQ ID NO: 8978 - RNA, 78 nt, Human
ggucuuacagacguccaggggggucgguggcggccgcggcgagggccccggccagcccgccugagaugaugugggacu

SEQ ID NO: 8979 - RNA, 80 nt, Human
guggauggacuggaaggggauguucauggucagcugcgugguguagcuccgguagaaggccccaacccucgguccuccac

SEQ ID NO: 8980 - RNA, 60 nt, Human
uggcgguggagggcaucugguagaugacacgcgccuggaugccuuugaaguagccggcca

SEQ ID NO: 8981 - RNA, 79 nt, Human
uucugcucuguucuuuguuuuauguuuaacugcuguuucuaauugcagguguauuacagauacaaauaagaguacagaa

SEQ ID NO: 8982 - RNA, 61 nt, Human
caugcucaagugaaaguuguaaaaauaucauaagacaugaauuuuugugaacaggagugug

SEQ ID NO: 8983 - RNA, 63 nt, Human
uaguaaacaacuguauaaagcaccacuuauuacucagaguuaggucgcauagaguggaugcua

SEQ ID NO: 8984 - RNA, 71 nt, Human
uccgauucuucucaaagugcacuguguuaagccuaguguaagguagcauaauagaaaaguggagaauucga

SEQ ID NO: 8985 - RNA, 66 nt, Human
gcguuuggagaacaucuucuugcuccuuuuccggaaacgagauaauggacacagagucccagacgu

SEQ ID NO: 8986 - RNA, 82 nt, Human
gagcacgcuucccaagcuuggggugggcaauguaggcaagucgaucgagcuugcggcugacacccuuugggaucuugggcuu

SEQ ID NO: 8987 - RNA, 79 nt, Human; identical to SEQ ID NO: 6024

SEQ ID NO: 8988 - RNA, 79 nt, Human; identical to SEQ ID NO: 6025

SEQ ID NO: 8989 - RNA, 71 nt, Human
cagagaucagaauacgaagcuuccucucagcaucaugggaggagauaaaauaauucauucuauggucuuug

SEQ ID NO: 8990 - RNA, 86 nt, Human
gaauucugaucauaccaguuuccaucaggauuuaucagaucugaaacauccugcagauaagcugguugacaaucccacagcaguuc

SEQ ID NO: 8991 - RNA, 78 nt, Human
gacaaucccacagcaguucuuuuuuuuuuuccuuuuucuuuuuagauuuuuuuaaacagagaacaaagggauucacuc

SEQ ID NO: 8992 - RNA, 98 nt, Human
gugcuccuuuuugauauagauaaaauauuuaaugcuucuauuuacaucugcucauguagguuuuacaauauuccauguauauccaauguggaugguac

SEQ ID NO: 8993 - RNA, 69 nt, Human
uuuucccccaucccccuccaaagucuugauagccaagcguuauuuugggggguaggaaacgggugaaaa

SEQ ID NO: 8994 - RNA, 61 nt, Human
uuuuguuuugucuauaugugcggcuuuucagaagaaauuuaaucagugugacagaaaaaaa

SEQ ID NO: 8995 - RNA, 66 nt, Human
gccaaccuugaagccaguggggcaccaauccacaaacuggaugcugcgcuugguuuugaugguggc

SEQ ID NO: 8996 - RNA, 69 nt, Human
ugggaaccacgucaccacgguacaacaggcagcaagccauguauuuaccauggggagggucacauuuca

SEQ ID NO: 8997 - RNA, 63 nt, Human
gaaaacauaguguuuuuuguguuaucaacaaaaaucagcacaaucccacacaauaaugucuuc

SEQ ID NO: 8998 - RNA, 74 nt, Human
caagaggcucacugaugugcacuuggcaaugacgcuauugucaaaagaacacagaauuuauuuguagcagcuug

SEQ ID NO: 8999 - RNA, 65 nt, Human; identical to SEQ ID NO: 5312

SEQ ID NO: 9000 - RNA, 70 nt, Human; identical to SEQ ID NO: 314

SEQ ID NO: 9001 - RNA, 79 nt, Human; identical to SEQ ID NO: 1103

SEQ ID NO: 9002 - RNA, 67 nt, Human; identical to SEQ ID NO: 1862

SEQ ID NO: 9003 - RNA, 69 nt, Human
uacaggugguugcuuugaacuuuauuugagaaaaacagaagauaaauguaucaaaagaacacacaggug

SEQ ID NO: 9004 - RNA, 81 nt, Human
ccggugacacagcggcccuugacauugugcgaaacugauuuagccacauaaaauaaagggcuuuacaauguguccacacgg

SEQ ID NO: 9005 - RNA, 80 nt, Human; identical to SEQ ID NO: 788

SEQ ID NO: 9006 - RNA, 75 nt, Human
gcgaugauggacgcguguguucaacuaucacagcuucccaccugcauacucuuugaaaccaccacgacaugucgc

SEQ ID NO: 9007 - RNA, 96 nt, Human
gggggaacugguucuggggucacuccugcucauggaacgucucucagugauuauggcaagcaguccaagcggagucuccauuuaccaagcgccccc

SEQ ID NO: 9008 - RNA, 117 nt, Human
auauugguaugcuuauacacuuacacuuuaugcacaaaauguaggguuauaauaauguuaccauggacaugaucuuucuuuauaauucuacuuugagugcugucuccauguugaugu

SEQ ID NO: 9009 - RNA, 64 nt, Human
gggcauuccugaagcugacagcauucgggccgagaugucucgcuccguggccuuagcugugcuc

SEQ ID NO: 9010 - RNA, 71 nt, Human; identical to SEQ ID NO: 8959

SEQ ID NO: 9011 - RNA, 90 nt, Human; identical to SEQ ID NO: 1501

SEQ ID NO: 9012 - RNA, 80 nt, Human; identical to SEQ ID NO: 367

SEQ ID NO: 9013 - RNA, 86 nt, Human
gcuucccacuggcacccugaaaccugcccaggcugggccgccagcgucguccacaggccuuggccagcgggggcccucagggaagc

SEQ ID NO: 9014 - RNA, 71 nt, Human
gcuuguugaucucucugugucguucuuugguuacgauuuccucuaggaccucgccaucucccuuaauaagc

SEQ ID NO: 9015 - RNA, 68 nt, Human
cagagaugguuucaucgacaaggaagauuugcaugauaugcuugcuucauuggggaagaauccaacug

SEQ ID NO: 9016 - RNA, 66 nt, Human; identical to SEQ ID NO: 5320

SEQ ID NO: 9017 - RNA, 64 nt, Human; identical to SEQ ID NO: 7119

SEQ ID NO: 9018 - RNA, 71 nt, Human; identical to SEQ ID NO: 3322

SEQ ID NO: 9019 - RNA, 77 nt, Human; identical to SEQ ID NO: 3323

SEQ ID NO: 9020 - RNA, 77 nt, Human
gauauucugguuauucauuaugcagaagguauagggguuaguccuugcuauauuaugcuugguuauaauuuuucauc

SEQ ID NO: 9021 - RNA, 84 nt, Human
gcgccagguuucaauuucuaucgccuauacuuuauuggguaaaugguuccgguaagguugucagguaguaagguggacgugggu

SEQ ID NO: 9022 - RNA, 62 nt, Human
gcuagguuuagccuacuauggguguuaaauuuuuuacucucucuacaagguuuuuuccuagu

SEQ ID NO: 9023 - RNA, 60 nt, Human
caaaugccagugguuuaauucaguggaguucaaaccucauuccuauaucauugcagugug

SEQ ID NO: 9024 - RNA, 86 nt, Human
gggguguaugguaagcaaaauaaauuguauuuuuccauccuuggggaggauaaaggaacucuuugcacugcuauaauaaacagccc

SEQ ID NO: 9025 - RNA, 81 nt, Human
ggugauucauggacccagccuccuucugccuugcggcuuugccuuuuaaagguccucagggugcucuccauguaucuugcc

SEQ ID NO: 9026 - RNA, 88 nt, Human
gaguuuguuaucuggggucgugugauaaacucuuguggaauaaacacguuuacaguuuauuauuuuacuccucccauguuacauccuc

SEQ ID NO: 9027 - RNA, 83 nt, Human
cugcggccgggcggcucggcggggccagcagcaggagcaguaagcucagcgccccgcgcggcccugcaagggaagcgccgcag

SEQ ID NO: 9028 - RNA, 83 nt, Human
gcacgcucggggcggccggccagccaggcgcgcagcggcacaaggcggcagucgcagcgccagggguuggcgcccaggugugc

SEQ ID NO: 9029 - RNA, 72 nt, Human
guucuucaauuuugugcccuucucuagugccagccauugugguaggcccugaagaacacccucauggagagc

SEQ ID NO: 9030 - RNA, 95 nt, Human
uuuagcaguacaaaaucuuugacuaugaccaugggacacagacaugaguuuauguuuugguuuguuguggucuggggaucauguacuuuucuaaa

SEQ ID NO: 9031 - RNA, 104 nt, Human
uugagacagaguuuugcucuuguugcccaggcugaaaugcaguggcgugaucucggcucacugcaaccucugccuccuggguucaagcgauucuucugccucag

SEQ ID NO: 9032 - RNA, 71 nt, Human
acaugagggugcacaugucaaguacuuagcuaaaaucaacaaagugaggacugugaagauaacuuucaugu

SEQ ID NO: 9033 - RNA, 76 nt, Human
ggagcuauuaaauuuugauguugccucaguuauuuucauuaauaacuuuugcuaaaauuuaccuuuuaaaaguucu

SEQ ID NO: 9034 - RNA, 89 nt, Human
ccuccgugcagucccggguagagagcccggucccugcgcuagucgauuugugcaguaggaaaggaggcugcaggggaucugcgccgggg

SEQ ID NO: 9035 - RNA, 89 nt, Human
ugcuuccucuugagugcaacggaaagggcuaucagauaucugcacguuugugcaauuuauagcuccuccauuacacuucuucauaagca

SEQ ID NO: 9036 - RNA, 80 nt, Human
cccgacaggccucccggcucucccgcccucccucccgagacacgagccgaacugggcgucaggucggggagccggucggg

SEQ ID NO: 9037 - RNA, 82 nt, Human
ccgccgccgccgccgcccccugcagccacucucccgccucuaccgccgcgggagcugcaucguccacuccggucggcggugg

SEQ ID NO: 9038 - RNA, 91 nt, Human
cgcggagccucauggggguuggaguccccaagguuuccuuugugcgcaguauuggcggggccuuggacuaccacucccacaaggcaccgcg

SEQ ID NO: 9039 - RNA, 84 nt, Human
agaaaagcuagauuuuucguauacuuugaaauaaugugucacaacagauuguaugcagaaauagauaugaaaauccugcugucu

SEQ ID NO: 9040 - RNA, 65 nt, Human
gcuauguuagagauuugcauauguaaaacauugccauucuucuacuaaauguuucuuguuauggc

SEQ ID NO: 9041 - RNA, 79 nt, Human
gggaggggcggggggccuggccccagggcgguggugcgggaugccgccgccuccgggccgcguccguucuccaccuucc

SEQ ID NO: 9042 - RNA, 104 nt, Human
uuugauacuggugaugacugcacaaccaauauugaaaaccauugacuaguaacuacacuuuuaaugagugaauuuuaugguaugugaguuuuaucucaaucaaa

SEQ ID NO: 9043 - RNA, 66 nt, Human
cuuuaaggacagacaaaaauaaggacgacuauuuaaaguuucagauauuggucuguuucacuaaag

SEQ ID NO: 9044 - RNA, 70 nt, Human
gcaugugcaucuguggugaagaaaugaggaauuaguuaugccugcugcuaguugacuacaguaaauaugc

SEQ ID NO: 9045 - RNA, 63 nt, Human; identical to SEQ ID NO: 386

SEQ ID NO: 9046 - RNA, 61 nt, Human; identical to SEQ ID NO: 387

SEQ ID NO: 9047 - RNA, 67 nt, Human
gagcauggaacguucugccauuuguuuguguccucuuuuauuucguugagcagugguuucguaguuc

SEQ ID NO: 9048 - RNA, 69 nt, Human
gaggcagagguugcacugagcugagaucgugccacugcacuccagcuugggcaacagcgacucugucuc

SEQ ID NO: 9049 - RNA, 65 nt, Human
gggcgggcacaucacuugaggccaggaguucaagaccagccuggccaacauagugaaacccgucu

SEQ ID NO: 9050 - RNA, 74 nt, Human; identical to SEQ ID NO: 365

SEQ ID NO: 9051 - RNA, 102 nt, Human; identical to SEQ ID NO: 2172

SEQ ID NO: 9052 - RNA, 77 nt, Human; identical to SEQ ID NO: 3082

SEQ ID NO: 9053 - RNA, 74 nt, Human
aucauuuuuaaacuuuguuuauuuguagauuaaaauguaaugcauuacaauuuuaacaaucacuuaaaaaugau

SEQ ID NO: 9054 - RNA, 65 nt, Human
ccgcucaccuauagccaauauaagcagucaccauccaggugcugcuggacaggcucguguagcgg

SEQ ID NO: 9055 - RNA, 73 nt, Human
ggccgugcagcagugcauugaggcugcaggacaugagcaccagccagacaugcagaagagucugcucagggcc

SEQ ID NO: 9056 - RNA, 87 nt, Human
uccuggacagauuuccacccgacagcuucgugcacaugugucaggaccugcgugugcucaaugcuguucgggacuaucacaucggga

SEQ ID NO: 9057 - RNA, 63 nt, Human
auuucacagucuuggcccuucacauccugcccccugagcaguggagagccacacgugugaaau

SEQ ID NO: 9058 - RNA, 67 nt, Human
ggaagcuugccgacaaagcccugaaaaaccuuccaggaggaguuucauugccagugggagaccuucu

SEQ ID NO: 9059 - RNA, 66 nt, Human; identical to SEQ ID NO: 12

SEQ ID NO: 9060 - RNA, 72 nt, Human
ucuucaagggcaccuuuugcccagcuugagugaacugcacuguugacaagcugcaugugggauccuugagga

SEQ ID NO: 9061 - RNA, 74 nt, Human
augggccagaaggacuccuacgugggcgacgaggcccagagcaagcguggcauccugacccugaaguaccccau

SEQ ID NO: 9062 - RNA, 71 nt, Human
cuucacccacguaauguauguccugcaagcugucccacaguuguggggcacgucucgguugucgggugaag

SEQ ID NO: 9063 - RNA, 75 nt, Human
cugacgaagccauugaaacagaugaucugaccauuaagcuggugaucaaggcacuccuggaagugguucagucag

SEQ ID NO: 9064 - RNA, 80 nt, Human
gaaaaagaagaaaacgaaaagaagaaacaaaagaaagcaucaugaugaauaaaaugucuuugcuuguaauuuuuaaauuc

SEQ ID NO: 9065 - RNA, 92 nt, Human
gacuuugauggcacuccuaggcucuaucagacugaccccucgggcacauaccaugccuggaaggccaaugccauaggccggggugccaaguc

SEQ ID NO: 9066 - RNA, 84 nt, Human
aaaagaaaaccaaagugguccacaaaacauucuccuuuccuucugaagguuuuacgaugcauuguuaucauugaccagucuuuu

SEQ ID NO: 9067 - RNA, 72 nt, Human
guacaguacuuugaauuuuagcacauugcauaguaguuuuaaguaugucuaauuuaaacguauaauauguac

SEQ ID NO: 9068 - RNA, 84 nt, Human; identical to SEQ ID NO: 286

SEQ ID NO: 9069 - RNA, 71 nt, Human
cagaagccguucuucacuugccuucugcagcuccacuugagcuuccugaaugccuuuccgaaccacuucug

SEQ ID NO: 9070 - RNA, 64 nt, Human
cugcuuggugcgagugcccgagggcguuggaggcagcgugacuccugcaccuugugcuuuguag

SEQ ID NO: 9071 - RNA, 129 nt, Human
cguauaacugaaaguuggggaagaccaccaggucaguggaguggagagguuuuguauauggucuucuuugaagaaacuuacuucuugcaagcccuggcaucuuccaauuggcuguccuaguaguggacg

SEQ ID NO: 9072 - RNA, 61 nt, Human
ggaccagacuguacuguggccauguacacaaaggcaugcaccacaucccagcucugcugcc

SEQ ID NO: 9073 - RNA, 68 nt, Human
agccucccaccacgcucacugccuggcuugaaaaaguuaagaagccccucaggaagagaaucgaggcu

SEQ ID NO: 9074 - RNA, 86 nt, Human
uucaggccacccugcucauggcccuuccuggccgccugccacaccgcaagcucgcuggggggacacuagaagcaccguggccuggg

SEQ ID NO: 9075 - RNA, 90 nt, Human
uagcugggauuacaggugugugccaccacgcucggcuacuuuuuguauuuuuuuuaguagagaugggguuucaccauguuguccaggcug

SEQ ID NO: 9076 - RNA, 61 nt, Human
uggucucaagugauccacccaccuuggccucccaaagugccgggauuacagacaugagcca

SEQ ID NO: 9077 - RNA, 103 nt, Human
uugaggcagagucucacucugucacccaggcuggagcgcagugacaugaucucugcucacugcaaccuccaccuccuggguucaagagauucucgugccucag

SEQ ID NO: 9078 - RNA, 70 nt, Human
gauaucuaacagcaauaccugaucacuacuucgcacuaguuucucgguacuaugcauaugguccaauauc

SEQ ID NO: 9079 - RNA, 72 nt, Human
gggaaugauagcauugaaggacucggggauaucuaacagcaauaccugaucacuacuucgcacuaguuucuc

SEQ ID NO: 9080 - RNA, 75 nt, Human; identical to SEQ ID NO: 5382

SEQ ID NO: 9081 - RNA, 60 nt, Human
ccucauucgccauuaucagauccacacagaagugaaacaguaugaaugcaaagaaugugg

SEQ ID NO: 9082 - RNA, 68 nt, Human
cuggggagaggccuuacguaugcaaugagugugggaagcgcuucagccagacgucaaacuucacccag

SEQ ID NO: 9083 - RNA, 102 nt, Human
ugggaaagcuuucuuucugaguucauaccuuauucgacaccagaaaauccacacuggagagagaguguaugaauguaaggaaugugggaaagcguuucucca

SEQ ID NO: 9084 - RNA, 88 nt, Human
agggaauagaucuguucugaguguccccaaaaaaguuguccuaggaacugauguggagaaguuacagggagacugauuuccauuccuu

SEQ ID NO: 9085 - RNA, 72 nt, Human
gaaucugaguuuuuaaucaguaaagucugauguuuugauaacuugauguuuugaugguagacucuugaguuc

SEQ ID NO: 9086 - RNA, 72 nt, Human
ggaugaagccucugugggaucuuugggcuuggggcugaauuucucaggcauaaauaccuaauggccuugucu

SEQ ID NO: 9087 - RNA, 61 nt, Human
ggucgcugguggauugugggguccgccuggaguggggccccgaugaucgacaacagucacc

SEQ ID NO: 9088 - RNA, 72 nt, Human
cuucuucuuugccagggagcucagagccaaguuauacuaaugauuaagggaccuaagacaggcaggaggggg

SEQ ID NO: 9089 - RNA, 69 nt, Human
ggaaugagaauaccugaaaccaaaccguuaacaaggaaugguagugaaguuaaggaguuagcucauucu

SEQ ID NO: 9090 - RNA, 90 nt, Human
gaaaggucgaagauaugaggcggugaaguggauggugguguuugccauuggagucugcacuggccuggugggucucuuuguggacuuuuu

SEQ ID NO: 9091 - RNA, 72 nt, Human
ggggugcagggggucucugugcugcugcugcagguggugcugcugcugcggugagcgugagacccgcacccc

SEQ ID NO: 9092 - RNA, 86 nt, Human
cuauguaugagagaauaaaguauuuuggaaaaacaaacggauaauucuuuaaauccagaacuacuuuuuaucuucugauaucauag

SEQ ID NO: 9093 - RNA, 79 nt, Human
gcagugaaucuuugcuggucauagaaagaagugagaugccuuuucacauaaaguuauuacuaguaucgguuaccacugc

SEQ ID NO: 9094 - RNA, 79 nt, Human
gcauaaguugacguggacauuugucagguuuucaugaacuucucaaagauaucauacauuaauccaucuuagcaaaugc

SEQ ID NO: 9095 - RNA, 82 nt, Human
aagaguaguuuggacccacaauauugcauuacugauuuauucacuaccuuagcagcauguaguauacagacauucugcucuu

SEQ ID NO: 9096 - RNA, 83 nt, Human
uaauguucauaacuggugauucauuacacuggauguacaaacccucuugcaugaauuaauguuuuucccuguuuugaauauua

SEQ ID NO: 9097 - RNA, 82 nt, Human
uuccuuuuugaguuguuuuguuuuuauuuuuaaaugaaguuuccaucuguacacguuaagaaaauaaacaaaacaacaggaa

SEQ ID NO: 9098 - RNA, 81 nt, Human
gcauguuuaauuguccaggauuugcagauguaaacaugaaaaugaaucuuucauuugguagaccgacaaacuguaacaugc

SEQ ID NO: 9099 - RNA, 61 nt, Human
gguggacuuguggguaggcaugugcagacacacaugugagaacauuccugcaaagucuccc

SEQ ID NO: 9100 - RNA, 71 nt, Human; identical to SEQ ID NO: 4802

SEQ ID NO: 9101 - RNA, 104 nt, Human; identical to SEQ ID NO: 4803

SEQ ID NO: 9102 - RNA, 80 nt, Human
aaaauucccacuuaauugaauacuuagaaaaaaauggccaguggccgauugaaagguauauuaaaauuaagggcaguuuu

SEQ ID NO: 9103 - RNA, 130 nt, Human; identical to SEQ ID NO: 3361

SEQ ID NO: 9104 - RNA, 103 nt, Human
gaagcuucaugcacuuaaagaaguauuuuuagaauaagaauuugcauacuuaccuagugaaacuuuucuagaauuauuuuucacucuaagucauguauguuuc

SEQ ID NO: 9105 - RNA, 87 nt, Human
gugcaguuaugaauuguuaacauguuaauacacaguugcuuuauuucagauguguuugucuugacucacuaacaguuccuucugcau

SEQ ID NO: 9106 - RNA, 91 nt, Human
cuugaacuucagaaaguaucagguaaucagcagauuguaggacagccucagauugcuauuacuggacaugaucaggggcuguuaguucaag

SEQ ID NO: 9107 - RNA, 82 nt, Human
gacacucuugaugaccugauagcagcugugaguaccagagugcccacugguuccaacaguucuucucagaccacagaguguc

SEQ ID NO: 9108 - RNA, 72 nt, Human; identical to SEQ ID NO: 3359

SEQ ID NO: 9109 - RNA, 73 nt, Human
gcaguucagagaaggcugcagucagcuaccuugaccuaggggcugaagccuuaacuucccacucugauucugc

SEQ ID NO: 9110 - RNA, 88 nt, Human
gggggcugcagaacuggaauucuggucuaggacaagacaagugccagccagcguucucuaucuuuauccggaauccucugcucacccu

SEQ ID NO: 9111 - RNA, 79 nt, Human
gcccugagcaggaagaugugccacuuccuagcaggcgcaaggccugugcggaagaaacgccgcucccugccaccagggc

SEQ ID NO: 9112 - RNA, 75 nt, Human
ccuggacuuguuguugcagcugaggcacagcaaugacuuggggcuguggcugcuguauuuguagcugaggacggg

SEQ ID NO: 9113 - RNA, 66 nt, Human
gggaugaaacaguaacuugauuuaaaguuuguccugaugaaagaguuugaguugaagacuguaccu

SEQ ID NO: 9114 - RNA, 91 nt, Human
gcuuuacuccagccuccuuguggaaacccagcucuccugucucccagugaagacuuggaugggcagccaucagggaaggcugggucccagc

SEQ ID NO: 9115 - RNA, 80 nt, Human
ggugaccaacuuauacucaacuugaauaaacaucagcucugaucggauccagcugaugaacucugggauaggcugguucc

SEQ ID NO: 9116 - RNA, 64 nt, Human
gugaagggcuugggauucguggcagcugaguccucacugaccaaggauugcccuugugcuuuac

SEQ ID NO: 9117 - RNA, 97 nt, Human
uggugacugauuccaaaucuaccagcuaacacauccaccaccacugcgggcaggcaagugacuagaaggcaaguuguggacuuggccucagggacca

SEQ ID NO: 9118 - RNA, 71 nt, Human
ccccucauuaggaugcaucacuggccucgugcaccggcuucaccagcacugcacccuaaucaaaacagggg

SEQ ID NO: 9119 - RNA, 62 nt, Human
acugaggcugcccgcugugcuaacuaaaggcacacggcauguucucucuuugcagcuuuugu

SEQ ID NO: 9120 - RNA, 64 nt, Human; identical to SEQ ID NO: 8200

SEQ ID NO: 9121 - RNA, 66 nt, Human; identical to SEQ ID NO: 2189

SEQ ID NO: 9122 - RNA, 73 nt, Human
uaauugcaauggaguugacguuucccuccuuuuugguuuuaggaggggaauuauuugaaucgugguguaauug

SEQ ID NO: 9123 - RNA, 60 nt, Human
cgccuucucugucccccagaacagaacaaacucuuguucucugugguuggggaaaaggug

SEQ ID NO: 9124 - RNA, 97 nt, Human
aaucauauuuuagaaucaggaacgaagauucagggaaugucugucacauuuuauggcaucccaccuggacagaauauccgauuugaagauugugauu

SEQ ID NO: 9125 - RNA, 65 nt, Human
gcaagaggacaacagucuaucacucuuaaacaauaaacaggguaagacugaaaaaaaccucgugc

SEQ ID NO: 9126 - RNA, 73 nt, Human
uuggcuugcagccgcaucacuucugucucugauccaucuucacauggcauuuucucugugucucugcauccaa

SEQ ID NO: 9127 - RNA, 60 nt, Human
acuguccucauggagcuuacagacuaauuacauaaaguaagagcuaaaacugaugacagu

SEQ ID NO: 9128 - RNA, 65 nt, Human
aguguaccccuauaacccuuuggcuuuuuucagagaaagacuucagccaaauugucccuuucacu

SEQ ID NO: 9129 - RNA, 75 nt, Human
uguaugcauuuccucugguuuuauuauucaaauuaagaaaauacuuaaaaauuuuuugguaacagcuugcaugca

SEQ ID NO: 9130 - RNA, 110 nt, Human
uuuuuuuuuuuuuuuuaauaagaauuacaaagacaaugacauccucagcucccucucaccccaaguaugccauugucuuuguaauucuuauuaaaauacuaaagcaaaaa

SEQ ID NO: 9131 - RNA, 97 nt, Human
uggcaacuuagagguggggagcagagaauucucuuauccaacaucaacaucuuggucagauuugaacucuucaaucucuugcacucaaagcuuguua

SEQ ID NO: 9132 - RNA, 94 nt, Human
uguaagcagcaucauggagguuugaagaugccgcauugggaugggaugaauuccaaauucugcuugcuggcuuuuuaauauugauaugcuuaua

SEQ ID NO: 9133 - RNA, 66 nt, Human
gagcccagaagugcugaggugacgaggaagcccaaggcugcuguuccuucugugaacaagaggccc

SEQ ID NO: 9134 - RNA, 75 nt, Human; identical to SEQ ID NO: 448

SEQ ID NO: 9135 - RNA, 110 nt, Human
ggcaggguguacaccuguggcucucggggcugcccuuuggcuuuggagaugguuuucucgauggaggacgggaggccuuuguuggagaccuugcacuuguacuccuugcc

SEQ ID NO: 9136 - RNA, 96 nt, Human
agggagcugggggguggcugagggcucaggcugcuugggguggaccucucucugggccgccaggcuuucagcuccaucccugcccuccaguuuccu

SEQ ID NO: 9137 - RNA, 66 nt, Human; identical to SEQ ID NO: 12

SEQ ID NO: 9138 - RNA, 70 nt, Human
gaggguaucuaggccaauuuauucagcuggaaaucaaucuguccagggcuggaccaggcgccucccccuc

SEQ ID NO: 9139 - RNA, 83 nt, Human
gcccagggcucggcgggcuggucagguggcggcagcagcaaggcugcgcucccggccagcaggaugugccauaugcugugggu

SEQ ID NO: 9140 - RNA, 63 nt, Human
aucuguguaacuagaacacuugacuaaaauuauauaauuuuuacaacgcuucacugcauagau

SEQ ID NO: 9141 - RNA, 75 nt, Human
augaacauaauuuauuuguaauuggaacaaagccccaaaguagcaguuuuguucuaccagguaauuaaugcucau

SEQ ID NO: 9142 - RNA, 81 nt, Human
guucguagguuauaaauucuguuaguugcuaagaagcauuuuuaaaauuauguacuauagcucuuuauucagcagacgaac

SEQ ID NO: 9143 - RNA, 64 nt, Human
cggaccgcgcucucgauuucugccgcgucccgccucuaggacgcggaguccgugugcgguuccg

SEQ ID NO: 9144 - RNA, 91 nt, Human
ggggaugaaugaaggugcuggguugcaggguugaaaaagucucccgcuuuuccguuccuacagucccgguucugccuuuguguggugcccc

SEQ ID NO: 9145 - RNA, 88 nt, Human
gcuggcuuuuacagggaggugucugggauuccucauuagcaaucaaaacuuaauuacugggaugcagaguccuuacuuuaucgccagc

SEQ ID NO: 9146 - RNA, 60 nt, Human
uaggcauuucugaagugcacuuuuuugaaacaucauuuugcuaacucucagcagugucua

SEQ ID NO: 9147 - RNA, 67 nt, Human
ucagaaugccuuggucauaguguuguugcaaaauugaccauacagguggcccauguauaaaaucuga

SEQ ID NO: 9148 - RNA, 79 nt, Human
gcgcaucgucgagggcauccucaagcggccuccugacgagcagcggcuguacaaggaugaccaacucuuggaugauggc

SEQ ID NO: 9149 - RNA, 63 nt, Human
gggcuggccuuccgggcagaugacaccuuugaggcccugugcaucgagcccguuuuccagccc

SEQ ID NO: 9150 - RNA, 88 nt, Human
ccuggggagaagcuucugcugggcagcucgugcaauuguugccauuugaaaacccuugcuugauguucaguguuuauuauccuccagg

SEQ ID NO: 9151 - RNA, 78 nt, Human
ggagcccuugauguccugcaaaugaaggaggaggauguccuuaaguuccuugcagcaggaacccacuuagguggcacc

SEQ ID NO: 9152 - RNA, 66 nt, Human
gagcuuucaaggauaggcuuuauucugcaagcaauacaaauaauaaaucuauucugcugagagauc

SEQ ID NO: 9153 - RNA, 88 nt, Human
agcuucugaaagccucaaacaucugugagugugcuaagagccgauccuuagguauuuuauacacucuaugcugagucaguuaggaguu

SEQ ID NO: 9154 - RNA, 83 nt, Human
cugaaccuugagauccuuucacuagaauacacagggaaaagagaaaaagcuugcccuugugaaaggugaguuucauuguuuag

SEQ ID NO: 9155 - RNA, 67 nt, Human
uaccccugcagauccguagguauuaaggaugaccuuaggaagucucacacuguagccacaaagggug

SEQ ID NO: 9156 - RNA, 83 nt, Human
aggaccucaaagagggagucacagccugggcucggggagcucccaggucugggcucccugaguggcugcaucucuucucuccu

SEQ ID NO: 9157 - RNA, 88 nt, Human
caccucguucugcucaccuggccuggcaggcugugcuugguucacacuaccagccuggaucccacaccugccacgggugaaccaggug

SEQ ID NO: 9158 - RNA, 109 nt, Human
gccacugcacacagucaggcaugcaggcugcugcaguggggcgggcagcuccaggugcuggaacagacacuggcucucugugaggcuguggcuugaccaugugcauggc

SEQ ID NO: 9159 - RNA, 96 nt, Human
gcggcaggcggccuccccgaagggccagcgcuggccacgcaggugguaggcgauccgcgggggcagcgccagggccagcaggaggucagcagccgc

SEQ ID NO: 9160 - RNA, 75 nt, Human; identical to SEQ ID NO: 1111

SEQ ID NO: 9161 - RNA, 80 nt, Human; identical to SEQ ID NO: 367

SEQ ID NO: 9162 - RNA, 72 nt, Human
ugcagaagucucccugggaguaauuuuggugaagucagcuuuugccuuuuucaucacaggcaggcuuuagua

SEQ ID NO: 9163 - RNA, 111 nt, Human
agaaguucccccuacccuugcugcauuuacuuuugcuuuaaagagagagaauucuucacuauaaaucuuuuuuuaauaaaaaaucccccagcagccaggaacggggcuucu

SEQ ID NO: 9164 - RNA, 62 nt, Human
agcugaaucucaggguaagacuccccauaaaugugcagaaaaucugcccugaaauuccaguu

SEQ ID NO: 9165 - RNA, 90 nt, Human
uuuuuucacugggacaguugcuuuuauuaucuucauuuacaaaugaaacuguggaacagaaaguaauauggccaauuauuaguggagaaa

SEQ ID NO: 9166 - RNA, 64 nt, Human
gcacccuugaaaaaagcuuugccuccuucaucacgagcaaucuuccgccagcagucaagcgugc

SEQ ID NO: 9167 - RNA, 68 nt, Human
gauggcuuauuuguuuuguauucaaugauuggcuuuccccauucauuugucuuuuuagagcagccauc

SEQ ID NO: 9168 - RNA, 61 nt, Human
acaaugucauuguaaacuucuugaggggcauccauugcccagauaaaguccaagugauugu

SEQ ID NO: 9169 - RNA, 64 nt, Human; identical to SEQ ID NO: 3180

SEQ ID NO: 9170 - RNA, 82 nt, Human
uauagcguaaugcuguguuuauuaagccagggauugugggacuucccccaggcaacuaaaccugcaggaugaaaaugcuaua

SEQ ID NO: 9171 - RNA, 74 nt, Human; identical to SEQ ID NO: 5229

SEQ ID NO: 9172 - RNA, 61 nt, Human; identical to SEQ ID NO: 8603

SEQ ID NO: 9173 - RNA, 67 nt, Human; identical to SEQ ID NO: 7074

SEQ ID NO: 9174 - RNA, 62 nt, Human; identical to SEQ ID NO: 7075

SEQ ID NO: 9175 - RNA, 80 nt, Human; identical to SEQ ID NO: 7076

SEQ ID NO: 9176 - RNA, 91 nt, Human
ggccgacgggcugcaaaagauggugccccugcucaacaagaacaaccccaaguuccuggccaucaccaccgacugccugcagcuccuggcc

SEQ ID NO: 9177 - RNA, 77 nt, Human
gcuauaaauccagaacgggaaguguccagcaagccuacucugacuucugacuuguuuuuguuuucuggauuuuuagc

SEQ ID NO: 9178 - RNA, 60 nt, Human
uuauuguuuccccuucuaaagcucaagaucauuucuuuccaguuuuuggggaaauggugg

SEQ ID NO: 9179 - RNA, 67 nt, Human; identical to SEQ ID NO: 1347

SEQ ID NO: 9180 - RNA, 125 nt, Human
cucuggccugggguugcucccugcccggcaggcugcuguuuggcagcuggagguggcaagagcugcuggugcugccagggcguguugggcaggaaugaucucccagggcagcccugaggaaaggg

SEQ ID NO: 9181 - RNA, 70 nt, Human; identical to SEQ ID NO: 4167

SEQ ID NO: 9182 - RNA, 64 nt, Human
cauuaaacugaaagcaccauggcauaaagucuaguaacauuauccucaaaagcuuuuuccaaug

SEQ ID NO: 9183 - RNA, 63 nt, Human
ugucccucuguucaacaauacaguccuuuuuaauuauuugagaguuuaucugacagagacaca

SEQ ID NO: 9184 - RNA, 67 nt, Human
gacggacaacccaucgugugaacuauagaguuugugaacaaauuuauauuggguucauaguggcguc

SEQ ID NO: 9185 - RNA, 87 nt, Human
uccugcgaguuccccuaaguucuuagaggacugcuuugccuuuugaucugagaguugcaaaguucccuaaagaauggcccuugugga

SEQ ID NO: 9186 - RNA, 97 nt, Human; identical to SEQ ID NO: 6471

SEQ ID NO: 9187 - RNA, 71 nt, Human
cccugccuagcacuucucuucuggccauggacuaaguacaguggcacuguuugaggaccaguguuccgggg

SEQ ID NO: 9188 - RNA, 80 nt, Human
guaaaaacaagugaacuuugcaugaggaaagaggcuccaugucucacagccagcuaugcccacauugcacuugcuuuugc

SEQ ID NO: 9189 - RNA, 61 nt, Human
cugggcaggccugggggcuguguggggaguggcauccaugugggccucugguccugcccag

SEQ ID NO: 9190 - RNA, 72 nt, Human
ggcugaggcagggggaucaugaggucaggagaucgagaccauccuggcuaacacugaaaccccgucucuacc

SEQ ID NO: 9191 - RNA, 80 nt, Human
ugugccacugcacuccagccugggcaacagagugagacccugucucuaaaauaaauaaauaggccgggcgcgguggcuca

SEQ ID NO: 9192 - RNA, 67 nt, Human
ugcuccugcugcagggccucggcgugcugccuguucucgcugugccacaucugcagcucauucugca

SEQ ID NO: 9193 - RNA, 96 nt, Human
ugcuguaacuccaucuuaacaaguaaccccaaauuauacccaccugaaagaccuuuguggguuguggaaaaccuggaagauggcugagagacagua

SEQ ID NO: 9194 - RNA, 64 nt, Human; identical to SEQ ID NO: 7119

SEQ ID NO: 9195 - RNA, 71 nt, Human; identical to SEQ ID NO: 3322

SEQ ID NO: 9196 - RNA, 77 nt, Human; identical to SEQ ID NO: 3323

SEQ ID NO: 9197 - RNA, 65 nt, Human
ccaaaacuguagaaagagauaaagcuguuaauagagacauggguaucccuuuuuaucaggucagg

SEQ ID NO: 9198 - RNA, 107 nt, Human
gaguuucaagaaaaaaauuaaaggccaaaacugucuuacauuaccauugcuguuucugcaaucuucaacaaaccaaaauuuucucuguaauugugaaaaaagaacuc

SEQ ID NO: 9199 - RNA, 83 nt, Human
guaacugaauaguggaacucagaaagacauccuauucagaaggaucucucaugauaauaguuuccuucacuauuguaguauac

SEQ ID NO: 9200 - RNA, 67 nt, Human; identical to SEQ ID NO: 1862

SEQ ID NO: 9201 - RNA, 73 nt, Human
aaggguccauucaacauauagcagcuuauaucuaaauauguacagguauguauguuuucacaguuagaucuuu

SEQ ID NO: 9202 - RNA, 69 nt, Human
gagacaggguuucaucauguuggcgcaggcuagucucaaacugcugaccucaggugauuugcccgccuc

SEQ ID NO: 9203 - RNA, 66 nt, Human
ucagugucccagaauuuaaaauuuccuugcacuuuacagcaaagauacauauuguggcucuacuga

SEQ ID NO: 9204 - RNA, 86 nt, Human
cugucuuugcccggggaagguauccuccgaugacgagcuguccgacaguacccggaugaaguugucggaguccccaucggaggcag

SEQ ID NO: 9205 - RNA, 73 nt, Human; identical to SEQ ID NO: 4293

SEQ ID NO: 9206 - RNA, 70 nt, Human
ggcucccaauguugacguuggccagggcauuugcaaacaagccaggccaaaaaggcucaacauuuacacc

SEQ ID NO: 9207 - RNA, 101 nt, Human
aguuccugagcgacagguggaugcugcagaagggcuuucugaaggaggaggaccucacggagaagaagcccugguguguggcaccuccguguucaggagcu

SEQ ID NO: 9208 - RNA, 62 nt, Human
aaaucacauuucuuuuuaucauguaaacuuguaccaaagacuuaugaauagauuuaugaauu

SEQ ID NO: 9209 - RNA, 66 nt, Human; identical to SEQ ID NO: 915

SEQ ID NO: 9210 - RNA, 85 nt, Human
uuuuuuuuuuuuuguacuagaugcuauuuauuaaacuguagacaggagauaaauacuuuauuucaaaagugcaaagaagggaaga

SEQ ID NO: 9211 - RNA, 60 nt, Human
augcauguauccuuacccccaugggaaaauguugguguguucucaaggguaugcaugugu

SEQ ID NO: 9212 - RNA, 77 nt, Human
uuuucugugaaccaugcacgugcuggcacuggccucaggagacagugcccugccuuggcugucagguccacggagaa

SEQ ID NO: 9213 - RNA, 71 nt, Human
cuaccugaggcgucuccagaacagcucagcgccccaaggagcuggaauucgagguaggccggccucggugg

SEQ ID NO: 9214 - RNA, 65 nt, Human
uuggaggggagcguggggagggcgagugcugguaaaucucugcaccucacccugaucuccuccaa

SEQ ID NO: 9215 - RNA, 62 nt, Human
agcagcaggcgggcgccaugcuucucuugcacacgagcagaacucucugcccgcaucaugcu

SEQ ID NO: 9216 - RNA, 89 nt, Human
cagaucaaugccuggggguacagggcaggggacaguagauauguccccugauaaugcaucaccuucccuaaacaucccaacauggucug

SEQ ID NO: 9217 - RNA, 87 nt, Human
ggcugcaucaaaggcugccaggaagccccgugccacuccagugcccaggguaccagaagggcuccaccaggcagucccccaccaguc

SEQ ID NO: 9218 - RNA, 72 nt, Human
cgggggcaauggcaucgugggagcgcagguagucaaggacgaggauugugugcugcuuuagauuuggcccug

SEQ ID NO: 9219 - RNA, 66 nt, Human
gacugaacuggccucuguguucuaaugguugagccucagaguacauauuuggggugcgguuugguu

SEQ ID NO: 9220 - RNA, 92 nt, Human
guucugcacauguguauguucugccauuuccaggacgaaaaggagguugugcuaaagggaaaggaggaucgaugcacauguaugccaagaac

SEQ ID NO: 9221 - RNA, 63 nt, Human
gaugaaaaaauuuagacuguaaccgcacaccauauguaaucccagcuuuucuaauuuuacaac

SEQ ID NO: 9222 - RNA, 81 nt, Human
gggaguacgugaggaaaggauuccacucaaguauaaucagcaauacucuauugaaugaaaccauaacuccacuucacuccc

SEQ ID NO: 9223 - RNA, 61 nt, Human
uccuguagcaucaguagaacuauuuuugaaaauauuacaaacaugcuuaugaugcauagga

SEQ ID NO: 9224 - RNA, 77 nt, Human
aauacauaagauuauuccaugauuaaaagcccaaaucuaauaaccuuaagcuacauuaguggaucucuuuucauauu

SEQ ID NO: 9225 - RNA, 74 nt, Human; identical to SEQ ID NO: 1525

SEQ ID NO: 9226 - RNA, 66 nt, Human; identical to SEQ ID NO: 1526

SEQ ID NO: 9227 - RNA, 68 nt, Human
ggucugaaaccuccuccacccuacagaaaauaugauuggaucucgggacuugaggauuuucuuauacc

SEQ ID NO: 9228 - RNA, 85 nt, Human
cagaaaaauaaaugucuaucaguacuuucuguuugaaaaagaagcccauuugagacccagaaggaagacugaggcacagauucug

SEQ ID NO: 9229 - RNA, 63 nt, Human
gacuugcuuauuucacuugauguuauguuucugaguuacuaauauuggguauagauguaaguc

SEQ ID NO: 9230 - RNA, 83 nt, Human
acucugaagaugaucagacagggcaagcgaaauuggucauucucgcuaacacugcccagcuuugaggagaucugaaauagagu

SEQ ID NO: 9231 - RNA, 63 nt, Human
uaugcuauguuggcuaaacuggugucaucacuacaguggcauaauauugacuggcacagcaug

SEQ ID NO: 9232 - RNA, 100 nt, Human; identical to SEQ ID NO: 3028

SEQ ID NO: 9233 - RNA, 64 nt, Human
ugugaaugggaagugguuaaagccugaacacagaaauucagugccuugccaggaucccaucaca

SEQ ID NO: 9234 - RNA, 100 nt, Human
guccaugaguggagacccgucagagcccaggagccggaaagcagccuugcucccaggcaacgucugcuucucgggguccucggucagcuucauucguggc

SEQ ID NO: 9235 - RNA, 65 nt, Human; identical to SEQ ID NO: 476

SEQ ID NO: 9236 - RNA, 69 nt, Human
uggcugaugggcaagggggcaaagucaggacaucuuuggugcaaagacucccccugacccaccaggcca

SEQ ID NO: 9237 - RNA, 62 nt, Human
uguuuaguaaagacaauuucgcucauacaaaacaacaguuuacaacaaucgagugcuggaca

SEQ ID NO: 9238 - RNA, 61 nt, Human
cgcagccauugccaaugcuuuucgacgaauucugcuagcugaggugccaacuauggcugug

SEQ ID NO: 9239 - RNA, 63 nt, Human; identical to SEQ ID NO: 4019

SEQ ID NO: 9240 - RNA, 70 nt, Human
ucuuacacaaugaaaaaauacuugcagauaauuagcauuaagaaugcaaauauauuuuuacuguggaaga

SEQ ID NO: 9241 - RNA, 71 nt, Human
uuacuguuuuauuuauaccaugcauagcucaaaaagagagauaaaaugaaguguuaacaggaagucaguaa

SEQ ID NO: 9242 - RNA, 98 nt, Human
aacagacugggccaauguccacaaagaauuccuggucagcaccaccgauguccaaaggugcaauaucaaggaagggcaggcgugauggcuuauuuguu

SEQ ID NO: 9243 - RNA, 63 nt, Human; identical to SEQ ID NO: 8730

SEQ ID NO: 9244 - RNA, 102 nt, Human; identical to SEQ ID NO: 3952

SEQ ID NO: 9245 - RNA, 65 nt, Human
ucacugcgcccgcucauaaggggauggccauggcuagguuuauagauaguuggguggcgcgguga

SEQ ID NO: 9246 - RNA, 77 nt, Human
uuaaugguugauauugcuaggguggcgcuuccaauuaggugcaugaguagguggccugcaguaauguuagcgguuag

SEQ ID NO: 9247 - RNA, 63 nt, Human
uuuuauggcuaagcuuagacucauaucuuuaaacaaaagaacaagaguugaagaucuaugaaa

SEQ ID NO: 9248 - RNA, 72 nt, Human
ccagguucaaaggauucucgugccucagccuccugaguagcugggacuacaggcaugugacucuaugccugg

SEQ ID NO: 9249 - RNA, 64 nt, Human
uggggcagugucucucacccagucuggaaugcaacagcguggucucggcucacugcaacuucca

SEQ ID NO: 9250 - RNA, 65 nt, Human
gcauugaucuuauccuccgugacugucaccucaucgucgugcagaauugagggccgaguagaugc

SEQ ID NO: 9251 - RNA, 69 nt, Human; identical to SEQ ID NO: 6356

SEQ ID NO: 9252 - RNA, 84 nt, Human
aaccuucuguuacucccugggagaaaggcgcugagcguggcaugcaggugucuuugcuguguuuuucuccacuucuaaaugguu

SEQ ID NO: 9253 - RNA, 91 nt, Human
auagggaacaguuuugcccuggaacagaguuacagauacacaaucaagaguguucuugcugaugcucggggucugaagacugucuuccuau

SEQ ID NO: 9254 - RNA, 81 nt, Human
caguuuacaaaacaagugcaaauuaccaaacucaaagcuuauuugaguagaaugggcucaugggcaaugugauguucccug

SEQ ID NO: 9255 - RNA, 67 nt, Human; identical to SEQ ID NO: 1379

SEQ ID NO: 9256 - RNA, 79 nt, Human
gcaagagcacccguaacuguaaccuauccuuuaucugaggagaagaaaaggacagggcauacuuucagguuccgcuugc

SEQ ID NO: 9257 - RNA, 89 nt, Human
gccaugcaugcuccucucagggacucuggcugggccaggaccaccagcacacacacgugucuagccacccagacagggccaugaaaggc

SEQ ID NO: 9258 - RNA, 104 nt, Human
gccaugcaugcuccucucagggacucuggcugggccaggaccaccagcacacacacgugucuagccacccagacagggccaugaaaggcacacuuuuuucuggc

SEQ ID NO: 9259 - RNA, 88 nt, Human
agugccaucucucucaaggccaacaucccugagguggaagcuguccucaacaccgacaggaguuuggugugugaugggaagaggggcu

SEQ ID NO: 9260 - RNA, 69 nt, Human
auagggcuggaaaacgcugaaaaugacugcuuucacugaggucaaggauuguaauauugccagcuuugu

SEQ ID NO: 9261 - RNA, 62 nt, Human
cccgacccacagucaggcccagggccacaccacguuuuuggaguucuugggaaaggguuggg

SEQ ID NO: 9262 - RNA, 66 nt, Human
acaacagguaggauguggguaggauuuggccugugggccauuguuugccauugccugcuuuggugu

SEQ ID NO: 9263 - RNA, 128 nt, Human
uagagugcgguggcgugaucugggcucacugcaaccugcgccagcugcucgggaggcugaagcaagagaauugcuugaacccgggaggcggagguugcagugagccgagauggcgccauugcacucua

SEQ ID NO: 9264 - RNA, 65 nt, Human
guuuucaucucaguuacugauuaaacuacucuuaaaaguuuuccucuagauuguauauugaaaau

SEQ ID NO: 9265 - RNA, 72 nt, Human
uccauucccgcuuuucagaaguaacgauaguuggugguuugugcuuccaaggccuauaacauaggggguggg

SEQ ID NO: 9266 - RNA, 113 nt, Human
uguauauugaaaaugcugaauuauuguaaucuaucuuguaagaucuucuuacuuguacacuaaagcaccuuaguuuaucuuacggaauugcagugauagcuauucugaguaca

SEQ ID NO: 9267 - RNA, 95 nt, Human
cucugcacagcagcccagcagggauguccucucuagagaugguuuaucaaggguaccccaugagagggcagcuccugaugcagcugccggaagag

SEQ ID NO: 9268 - RNA, 72 nt, Human
uuuuuuuuuuaaucagaaugcuguuuauugacaagauagggugucacaaauacaucauuuauagggagagag

SEQ ID NO: 9269 - RNA, 73 nt, Human
aagcaaaauuacaaauaccagccuacucacaugaaaauuuuucauguuuacgcugauauauaucugagugcuu

SEQ ID NO: 9270 - RNA, 67 nt, Human
cguguuuuugugaacacaaauucuccacaaaugggggagguacccuagaagggagcacaauuacacg

SEQ ID NO: 9271 - RNA, 81 nt, Human
gcugaggcaggagacuggcgugaacccaggaggcggaccuuguagugagccgagaucgcgccacugugcuccagccugggc

SEQ ID NO: 9272 - RNA, 78 nt, Human
gugguuaaacgugagacccugggggccaaaagguguggggaccacaaggagaagacucucgggggaacaaugagccac

SEQ ID NO: 9273 - RNA, 75 nt, Human
guagggagcacccgcgugccagucacucgagacggcucuucgagcacuggccuacuggcacucggcgcuucguac

SEQ ID NO: 9274 - RNA, 104 nt, Human; identical to SEQ ID NO: 6365

SEQ ID NO: 9275 - RNA, 93 nt, Human
aaccaacagcaacugaaccacuauuuaagaaagucaguccaugggaaacaucuacuucuagcuuuuuuccuauuuuggcuccggccguugguu

SEQ ID NO: 9276 - RNA, 64 nt, Human
aggcccugugccuggcacuugugcugacuggaucccacagucggcgucuugucccacaggaccu

SEQ ID NO: 9277 - RNA, 87 nt, Human
gcuuccuugucuuuugccucauaucgucagguagcuaguuucgguucagcugcuccucccagacaguuugaugcaucucaauucagc

SEQ ID NO: 9278 - RNA, 65 nt, Human; identical to SEQ ID NO: 247

SEQ ID NO: 9279 - RNA, 80 nt, Human; identical to SEQ ID NO: 100

SEQ ID NO: 9280 - RNA, 68 nt, Human
uuucacaucuguaauuuuaauaugauuuaaaaaauccagguuauagaaaaacauaaagacagaagaaa

SEQ ID NO: 9281 - RNA, 69 nt, Human
caccauguuggccaggcgguccugaacuccugaccucaggcgauccgccugccucggccucccaaagug

SEQ ID NO: 9282 - RNA, 89 nt, Human
ggagucucgcucuuuuugcccaggcuggugugcaguggugcagucuuggcucacugcaaccucugccuccugcguucaagugauucucu

SEQ ID NO: 9283 - RNA, 68 nt, Human
gcgcuuccgcaaguuccugguguuguggcaaacuucgaugagaaugaccccaagaccuuugagggcgu

SEQ ID NO: 9284 - RNA, 95 nt, Human
ggcgcucuaccgacugaugacuaccuggaccagcccugccuugagacgucaacggaucaaguguacagugaguccuggccgguauggaagagccc

SEQ ID NO: 9285 - RNA, 71 nt, Human
ggcggcgguggcggcggcgacugcugcggugaaggaggaggaggagccgagcgggcgcuggcaccgaggcc

SEQ ID NO: 9286 - RNA, 82 nt, Human; identical to SEQ ID NO: 119

SEQ ID NO: 9287 - RNA, 60 nt, Human; identical to SEQ ID NO: 723

SEQ ID NO: 9288 - RNA, 75 nt, Human
agagggucguuucuggcaggaacggagugguugguagucucaggcgccaggcguccugccagguaugcccgcucu

SEQ ID NO: 9289 - RNA, 61 nt, Human
ccccuccagcccccaugugcucugagccagucccaacacuggcugaguuggcugcgagggg

SEQ ID NO: 9290 - RNA, 84 nt, Human
aacuguuacagauuaauacagaaaaacaggaaaugguuaaaagauuuuuacaagcauuuuaaaaaagaggugaucugaaugguu

SEQ ID NO: 9291 - RNA, 109 nt, Human; identical to SEQ ID NO: 831

SEQ ID NO: 9292 - RNA, 75 nt, Human; identical to SEQ ID NO: 74

SEQ ID NO: 9293 - RNA, 71 nt, Human; identical to SEQ ID NO: 77

SEQ ID NO: 9294 - RNA, 115 nt, Human
uguaucuuuuugguggggggagucauaugaacaaguaacugaagcauuuggggauaaaaugauuaacuagcucugaagauaacuuaucauagauuuuuuauuucauugagauaua

SEQ ID NO: 9295 - RNA, 117 nt, Human
cugcccguuuucccccaucucagggccuggcugaggcagggcaggcaggagagaggccccugagggcggguuucaggcccugggccaggcacucagauggggugcacgaacugguag

SEQ ID NO: 9296 - RNA, 77 nt, Human
ggaggaagcaccccugccccagggucccgaaggccccagaggacccauaucccccuggggcaguugguugccccucc

SEQ ID NO: 9297 - RNA, 62 nt, Human
guagcuaagaguuacaggacagaaggauaauauauauucuguuuuauaauuaguaaaguuac

SEQ ID NO: 9298 - RNA, 66 nt, Human
gcaucuucuacuaguguguuaguagauggauucacagauccuucaaauaacaaaaguagauucugc

SEQ ID NO: 9299 - RNA, 99 nt, Human; identical to SEQ ID NO: 334

SEQ ID NO: 9300 - RNA, 61 nt, Human
gacacuuaggaucuacagcuguuaucauguugaccucagaaguaagcuuggauugaguguc

SEQ ID NO: 9301 - RNA, 66 nt, Human; identical to SEQ ID NO: 6268

SEQ ID NO: 9302 - RNA, 85 nt, Human
caggaggccaugagccaaggaaugcaagcagccucuggaaguugaaaacgacccaagugcucaguccuacagcugcauggaacug

SEQ ID NO: 9303 - RNA, 69 nt, Human
ccagccagcugacagauugacuucagcacuaugacaucaaagagcccacccaaggcuguuacuggaagg

SEQ ID NO: 9304 - RNA, 60 nt, Human
ccagauugccucguuaaauccuuaaccuuggugaaaugguuugggaaaaugcaggucugg

SEQ ID NO: 9305 - RNA, 112 nt, Human
cuugguggggcugguuagcgagucauuguauguagagguggaguaaaggcagcacaggugcagucgugaacaugcuuccgcauagaagguggcaaauaagcuccucccugag

SEQ ID NO: 9306 - RNA, 65 nt, Human
ggguuuuaaguaugccaaugaggagaguugccaaagucaucucuaacucaggcaucucuggaucc

SEQ ID NO: 9307 - RNA, 65 nt, Human
uuacuugcaacaaggaggacacuggggauaauuccucaaagcagcaccuccuggaacgaagguga

SEQ ID NO: 9308 - RNA, 67 nt, Human; identical to SEQ ID NO: 5269

SEQ ID NO: 9309 - RNA, 81 nt, Human
cuguggaccugaauguugaucccucgcuucagauugacauaccugaugcguucagugagagagacaaagucaaauuuacag

SEQ ID NO: 9310 - RNA, 86 nt, Human
ggcccugcgguuggcggccuccucguggagcggagcaaggccaggcggccccugcucgagucccgcgucgccauggccgcgguucc

SEQ ID NO: 9311 - RNA, 61 nt, Human
guuucagagcccagaguuuucuguuacaaggcaacaugaagacuuuguguggcuacaugac

SEQ ID NO: 9312 - RNA, 70 nt, Human
accacaaacuaugcuucaacaccuucuucaacuucgaggacaugcaggagaucaccaagcacuuuguggu

SEQ ID NO: 9313 - RNA, 76 nt, Human
ggccuucugcauguagugauccggggcucccccaaggggaaccgcccagccauccucaccuaccaugaugugggcc

SEQ ID NO: 9314 - RNA, 86 nt, Human
gaauaaaauuaaauuguuuuaaaugagauaggaagugaaaaauaaccugguacaucccuuuugccucuuaaaaccuuuuuauauuc

SEQ ID NO: 9315 - RNA, 73 nt, Human
gagcaaaagaaauauuaaaauuuuacgucuaaaaaauaaguuuuauuagugaauaucaaguuuugauuuguuu

SEQ ID NO: 9316 - RNA, 131 nt, Human
ccaaagcaaaguguuuaugaugccuaucggaaguacugugagagucuugccuguugccgcccacucagcacagccaacuuuggcaagaucaucagagagaucuucccugacaucaaagcucgaaggcuugg

SEQ ID NO: 9317 - RNA, 64 nt, Human
gggcagaucucgcgagcaacgcgguaaaaauauugcuucggugggugacgcgguacagcugccc

SEQ ID NO: 9318 - RNA, 68 nt, Human
gcaccccuccccucuuggcagccagugggcaagaaccuuacccuacgcugccagguggaggguggggc

SEQ ID NO: 9319 - RNA, 71 nt, Human; identical to SEQ ID NO: 6991

SEQ ID NO: 9320 - RNA, 81 nt, Human; identical to SEQ ID NO: 8793

SEQ ID NO: 9321 - RNA, 64 nt, Human
gcugaaugaguauguggcuaagggucugaccgacagcauccaccguuaccacucagacaauagc

SEQ ID NO: 9322 - RNA, 81 nt, Human
ggaucuguggcugcugcauuuugggcuuugggaucuaccugcugauccacaacaacuucggagugcucuuccauaaccucc

SEQ ID NO: 9323 - RNA, 81 nt, Human
ccuuccugacucggcuugggggaacugcggccagugaagaggcuccggugugucuccucuuccuugauugugucugggagg

SEQ ID NO: 9324 - RNA, 67 nt, Human
cugaggcugagggcccucugccugccugauucaucuguagcugaggauaaauggcuuucagcccugg

SEQ ID NO: 9325 - RNA, 72 nt, Human
ggaacacgauggcuggacuaugucagggcucgucuucgaaagugcagugacauuucaguauucgugacaucc

SEQ ID NO: 9326 - RNA, 65 nt, Human
ugcuccaggcugggcauucagaugugguccggguagacacuauggaugagcugcccagccuugca

SEQ ID NO: 9327 - RNA, 80 nt, Human
uggaugcagugacacaccaguagggagcuagcuggcugccccuugcagcccacuccccaaacuggcuacccaggcaucca

SEQ ID NO: 9328 - RNA, 82 nt, Human
ccuuaauguguguguuuauuuacaaguacuaaaucugaagaacaguaaaauaggaaauagccguauauguacacaucugagg

SEQ ID NO: 9329 - RNA, 71 nt, Human
gagggccgggccacaagucagcggugcugcuucugcaaaaagcccggcugagggugcccgcccggaccguc

SEQ ID NO: 9330 - RNA, 86 nt, Human
guaucucuuccgucuguuuguccauucuuuuaacacugggcuuuggcuucacuucacagguaggaggcugggcacaaaagggauac

SEQ ID NO: 9331 - RNA, 72 nt, Human
cagccauuguccuuuucaccagcucuacaugugcuggguccauggaaauagagcugugguuguacaaggcug

SEQ ID NO: 9332 - RNA, 73 nt, Human
cccgaggguugccaguuccaccuccucuuguacaggaucuugguacaggggcugguaggaguacgcaguuggg

SEQ ID NO: 9333 - RNA, 75 nt, Human
ugggccuguuguggaguacgcuuuggacugagaagcaucgaggcuauaggacgcagcuguugccaugacggccca

SEQ ID NO: 9334 - RNA, 65 nt, Human
uucaagaauguuagaaguucaagccagaaguuucuuucaggguuuuggucuaucucauuugggaa

SEQ ID NO: 9335 - RNA, 80 nt, Human; identical to SEQ ID NO: 6866

SEQ ID NO: 9336 - RNA, 60 nt, Human
gcccaucauuggcaucaugggagggccccccauauggggugcuggcaucauaccaagggc

SEQ ID NO: 9337 - RNA, 84 nt, Human; identical to SEQ ID NO: 286

SEQ ID NO: 9338 - RNA, 89 nt, Human; identical to SEQ ID NO: 288

SEQ ID NO: 9339 - RNA, 94 nt, Human; identical to SEQ ID NO: 5398

SEQ ID NO: 9340 - RNA, 77 nt, Human; identical to SEQ ID NO: 3082

SEQ ID NO: 9341 - RNA, 65 nt, Human
ccucaugagcaagguugcagaucgguccuuccucagcuccuugauuugugaccuugaccaagggg

SEQ ID NO: 9342 - RNA, 67 nt, Human
ggaagaaagcaaaagggacugaacuagccucugguaggauugcagggguccagccuugccuguuucc

SEQ ID NO: 9343 - RNA, 67 nt, Human
cgcagcgagcuggcugcacuugcuccgcagcgauacuauggaggagcacggugcaagcugcguugcg

SEQ ID NO: 9344 - RNA, 61 nt, Human
gccggauggcugacuguauuucaauugggcaugucaaaguccaauggcagcgucuaucggc

SEQ ID NO: 9345 - RNA, 79 nt, Human
gcuucugcuaggggcuguguacagagugcaaaugucugauuuaccacacuaaaguucuauuguaucccuaugugaaagc

SEQ ID NO: 9346 - RNA, 74 nt, Human
gggugacucgcguaccgugcggcuugcugacaggagcugcggcgggcccugggccgcaugguggagcggaaccu

SEQ ID NO: 9347 - RNA, 73 nt, Human
agcauguggccuccccgucccuuccccgguggcgaacccagugacccagggacacguggggugugcugcugcu

SEQ ID NO: 9348 - RNA, 62 nt, Human; identical to SEQ ID NO: 6172

SEQ ID NO: 9349 - RNA, 71 nt, Human
cucccccacccacaggcccagccuccucggucuccugucucguugcugcuucugccugugcugugggggag

SEQ ID NO: 9350 - RNA, 66 nt, Human
ggagauggcuccggcggcuuggggaaaagccaaauugccaaaacucaagucaccucaguaccaucc

SEQ ID NO: 9351 - RNA, 80 nt, Human
gggaugcacggccucgugggggccgggccguccuccagccccgcugcucccuggccagcccccuugucgcugucgguccc

SEQ ID NO: 9352 - RNA, 68 nt, Human; identical to SEQ ID NO: 6247

SEQ ID NO: 9353 - RNA, 68 nt, Human; identical to SEQ ID NO: 2734

SEQ ID NO: 9354 - RNA, 75 nt, Human; identical to SEQ ID NO: 5842

SEQ ID NO: 9355 - RNA, 76 nt, Human
cuggagaccucggcucaagucuuugcccugcugccgacgcauugugucaccuugggcaaggacuucgcaucuccag

SEQ ID NO: 9356 - RNA, 66 nt, Human
ccuccccgggggguguggcuaagggacgaggcaguucucguccagagcccagguaauccgggcggg

SEQ ID NO: 9357 - RNA, 61 nt, Human
cggcugcgguacggcguguggucccagcgguucagcugagguagggacgugccguaggccg

SEQ ID NO: 9358 - RNA, 61 nt, Human
guaggcaaccuucccucucuccuuggugaagaacaucccaagccagaaagaaguuaacuac

SEQ ID NO: 9359 - RNA, 62 nt, Human
ccuuuuugguucucagccucucucgaaauagcgugggacaucgaggcacccugcaaauuagg

SEQ ID NO: 9360 - RNA, 80 nt, Human
gcugcugucuauguugaugaccauaacugggauguauaauauuuacagacaacucuaaguuauguucacauggauuaugu

SEQ ID NO: 9361 - RNA, 67 nt, Human
guacaucauugauuuuuuuuuuuuuuuuuuuuuuugugggaaaaaagagaauuugugccucgugugc

SEQ ID NO: 9362 - RNA, 60 nt, Human
agauccuccugugccuucuucuucuucuuggguuuuucuucuugaauuacagggggguuu

SEQ ID NO: 9363 - RNA, 78 nt, Human
uuuuuuuuuuuuuuuuuuacaguuuaaaggggucucauuuauugucacggguccaaauguacaaaaaaaauuagaaaa

SEQ ID NO: 9364 - RNA, 111 nt, Human
ccgcaggucaggagggaaagcagggcucagagggcaucguggcccaggcaggguccuaccugggggucaggagcaccuuggucuugaugauugaucggauugauagaaugg

SEQ ID NO: 9365 - RNA, 82 nt, Human
cugggagugcugggggacagguaccccccggugguccuauggcaggaugagaagggagggacuuggcucccccagagcccgg

SEQ ID NO: 9366 - RNA, 78 nt, Human
ggugggggagcgagucugggaagauuggcuuugacucucuguugccagaggagaugccaucccagcacggcccccacu

SEQ ID NO: 9367 - RNA, 75 nt, Human
acuggugggccugggcuucugagguggccuccugcccugaucagggacccuccccgcuuuccugggccucucagu

SEQ ID NO: 9368 - RNA, 81 nt, Human
cuuuucucucugcuagauggauguugaugcacuggaggucuuuuagccugcccuugcauggcgccugcuggaggaggagag

SEQ ID NO: 9369 - RNA, 61 nt, Human
gucuucuuuaauagaguaucuuucaaacacaacuuugcuagaaacugguccaaagaucgac

SEQ ID NO: 9370 - RNA, 63 nt, Human
uuauuuuaaugcacaguaugagaaaugaacuuuuuuaaaucaacugauuuguauggaaaauga

SEQ ID NO: 9371 - RNA, 64 nt, Human
cgaggcagcgagcgacccccagcaucccgcggccuccgaaggggccgccgccgccgccgccucg

SEQ ID NO: 9372 - RNA, 73 nt, Human
acaauaauuauuggccuacuuaauacuccagugccuugagauaguuggacauauuuuaggaagauuuuauugu

SEQ ID NO: 9373 - RNA, 61 nt, Human
guguuuugauuaguccugucacuguuuuuauuuaaaaugcagugucagcaaaccgaaaugc

SEQ ID NO: 9374 - RNA, 64 nt, Human
ucuuuuuuaguaacagaguacucguauacuuaucacuguaugcacucauugggucuaagggaga

SEQ ID NO: 9375 - RNA, 85 nt, Human
aaaagguuucucuuaacaguauuuccagugacaaugcaagguaaguauaucaaaggaaaucaacaguugugcuugggggcuuuuu

SEQ ID NO: 9376 - RNA, 127 nt, Human
gugaauguuuuucucuucagcugaucuaaaaaugaaagccagauaucuuauguagaaauauuuugauaauauuuuuacagugagcuuucccauguuuuuaugucuuaaguuucuuugcugcguuuau

SEQ ID NO: 9377 - RNA, 74 nt, Human
ggucagaaaagccccaaagaaaaaggcuuuuucaguagauaacauguugggccgaucagggcuucaguuagauc

SEQ ID NO: 9378 - RNA, 76 nt, Human; identical to SEQ ID NO: 758

SEQ ID NO: 9379 - RNA, 63 nt, Human
ucuucaucuuggucaccacgccagagaggauccgcccucgaauggacacauuaccagugaagg

SEQ ID NO: 9380 - RNA, 74 nt, Human
ccucagauaaaaccucaauuacugguaauuguacauuuccaucaauaucccuuuuaaagagguuuauucugagg

SEQ ID NO: 9381 - RNA, 72 nt, Human
ggcaaucuugaacuucuauugaacuuggaaagcggucaagacucacuccauaauaagaaguuaaggacuguc

SEQ ID NO: 9382 - RNA, 60 nt, Human
guugucaaucguuuuaaaugguuucacuuuauuugugaaaaauaaagccaaaaugccaac

SEQ ID NO: 9383 - RNA, 79 nt, Human
auguuuugaagcaggccauugagcugaguccugauaaccaauacgucaagguucucuugggccugaaacugcagaagau

SEQ ID NO: 9384 - RNA, 118 nt, Human
gaaacaaaccugcaagaaauuuucaaauccauacaguauugaguauucugaacuugacugugaggaaggguggacacaacugaaguguggaagaaaugaaagggcgaagguguguuuu

SEQ ID NO: 9385 - RNA, 74 nt, Human
gcugaaggagagcaguuuguugaagaagccuuggaaaagucuccuugccaaacagauguccuccgcagugcagc

SEQ ID NO: 9386 - RNA, 75 nt, Human
acggagggucaguggaaaugggaccuugguugugacaaagccugagaaugucauguugauccauccaccccucgu

SEQ ID NO: 9387 - RNA, 66 nt, Human
ggccauggcugcucccgucaucugcuccugcaucauucgugauuggucagcggcauuaucuuggcc

SEQ ID NO: 9388 - RNA, 90 nt, Human
ucuugaucuuuauugcuaugugugaaaacuuggcuuccucacugaacggugaggaauggauuuaaagcaugagcuuuaguaguaucaaga

SEQ ID NO: 9389 - RNA, 86 nt, Human
uucauucuucauacacuggccuuggcauccuguggaauuugacccaacuagcagcuagucagucugucagugagcagaagagugaa

SEQ ID NO: 9390 - RNA, 65 nt, Human
ucaagacccauauauuccgacaguuucaguaauaugaagauuucggaaauucuaaaagguuuuga

SEQ ID NO: 9391 - RNA, 96 nt, Human; identical to SEQ ID NO: 9136

SEQ ID NO: 9392 - RNA, 72 nt, Human
gagggacgcugcuucuccccugcccacgucuccaaggccugaaaggcaggguucuguggaacagcauuucuc

SEQ ID NO: 9393 - RNA, 68 nt, Human
uggggccucacgcaaccuugguguuugguuaaauuugugccuuggcuccuguugcguuuaggcaccca

SEQ ID NO: 9394 - RNA, 128 nt, Human
gaucacugacucccugaagccgagacacugaauccaggaggcggagacugugcugauaagaccuaucugcuucaauuuccgcuugaguggccucccuugucaacugcugggccagggacuugguuuuc

SEQ ID NO: 9395 - RNA, 70 nt, Human
guggagcugucggaggccaggcuccgggacgugcugcagcgcgccgggcccucucucccacuuuuuccau

SEQ ID NO: 9396 - RNA, 106 nt, Human; identical to SEQ ID NO: 6411

SEQ ID NO: 9397 - RNA, 77 nt, Human; identical to SEQ ID NO: 2332

SEQ ID NO: 9398 - RNA, 80 nt, Human; identical to SEQ ID NO: 367

SEQ ID NO: 9399 - RNA, 73 nt, Human; identical to SEQ ID NO: 7713

SEQ ID NO: 9400 - RNA, 75 nt, Human
uucgccagcuggcguaauagcgaagaggcccgcaccgaucgcccuucccaacaguugcgcagccugaauggcgaa

SEQ ID NO: 9401 - RNA, 85 nt, Human
gcccccagcagcgccggcgggcuaagcccagggccgggcagacggccgggcgagggggcagcgcgcugcuggcucugugcggggc

SEQ ID NO: 9402 - RNA, 115 nt, Human
aagacaguaugaguaaugauaauuuuuagaggcauuaggaucuugauugaaauucuggcucuguuguauccuguugugaugucacuguaagaauugugcauuuaauauugaucuu

SEQ ID NO: 9403 - RNA, 63 nt, Human
gcagcucuuugaaauaaaagugauuuuaguuccuaggacuauuuguuauacuuuuggagcugu

SEQ ID NO: 9404 - RNA, 67 nt, Human
gggaauuuuugaacacuuuugcuuuaacaguuauuagcacuauugauuauuuuguuaaaauuuuccc

SEQ ID NO: 9405 - RNA, 75 nt, Human
ugcauauuuuaacaucugaaaucagaaagugucuuuacuggguuuuugguuuuagaaacauaaaauaauaaugua

SEQ ID NO: 9406 - RNA, 68 nt, Human; identical to SEQ ID NO: 8913

SEQ ID NO: 9407 - RNA, 85 nt, Human
cucacuauagggaaagcugguacgccugcagguaccgguccggaauucccgggucgacccacgcguccgcaaauacugccaugag

SEQ ID NO: 9408 - RNA, 73 nt, Human; identical to SEQ ID NO: 7713

SEQ ID NO: 9409 - RNA, 105 nt, Human
uucauguuuuuguauuauguaucuuuuuguaugguaaagacuauauuuuguacuuaaccagauauauuuuuaccccagauggggauauucuuuguaaaaaaugaa

SEQ ID NO: 9410 - RNA, 90 nt, Human
uuggucagucacucucagccauagcacuuuguucacuguccugugucagagcacugagcuccacccuuuucugagaguuauuacagccag

SEQ ID NO: 9411 - RNA, 82 nt, Human
aagagacuguccuucccucaauguauauucuuggcacccuuguugaaaaugaguucacaauagauguauggauuuguuucuu

SEQ ID NO: 9412 - RNA, 75 nt, Human
gccauuaucugucuuuuuugguuucauauaaauuuuaggauugguuuuauauuacugugaagacgguuauuuggc

SEQ ID NO: 9413 - RNA, 71 nt, Human
gcgacgagcugguacgccugcagguaccgguccggaauucccgggucgacccacgcguccgauucuucugc

SEQ ID NO: 9414 - RNA, 78 nt, Human
ggcaauacugugcuguuuugguuaccauagauuucuaguauaauuugaaguuaggugauuugauucuccaguuuuguu

SEQ ID NO: 9415 - RNA, 80 nt, Human
ugaaaaugaguucacaauagauguauggauuuguuucuugguucucuauucuauuuuauuggucuaggugcuuauuuuua

SEQ ID NO: 9416 - RNA, 69 nt, Human
agggaaagcugguacgccugcagguaccgguccggaauucccgggucgacccacgcguccgcuuuugcu

SEQ ID NO: 9417 - RNA, 61 nt, Human
auguuccuuguagaaaaccuaucuccauacuccuuucuggauuuuuguuuauaggggagau

SEQ ID NO: 9418 - RNA, 86 nt, Human
cugcuugaauggauguauuuugucuguauguaaagauuuaacuacguaaauguugacauauuaauuagaugguuuguuucaagcag

SEQ ID NO: 9419 - RNA, 72 nt, Human
gcaaaagagucuugccaaggaagaaagcagcuugaaggaaagaaagagaagauccuuggaagaauuguuugc

SEQ ID NO: 9420 - RNA, 73 nt, Human
gcuacugcuccagaagcugcugcagcgaagacgcaagggagcugcggaggaagagcagcaggacagcgguagu

SEQ ID NO: 9421 - RNA, 71 nt, Human
ggccagcagaguggccucagauguuccugcaccuggcccaggagcccaggacagaggucaaaucuagggcc

SEQ ID NO: 9422 - RNA, 77 nt, Human
guggccggggcgcggccuggucucggcgguggccuguaagaaggccuguaugcugggccagugagagcaguggccgc

SEQ ID NO: 9423 - RNA, 81 nt, Human
ugcgcaucacugugggcguggauggcuccguguacaagcugcaccccagcuucaaggagcgguuccaugccagcgugcgca

SEQ ID NO: 9424 - RNA, 74 nt, Human; identical to SEQ ID NO: 365

SEQ ID NO: 9425 - RNA, 102 nt, Human; identical to SEQ ID NO: 2172

SEQ ID NO: 9426 - RNA, 77 nt, Human; identical to SEQ ID NO: 3082

SEQ ID NO: 9427 - RNA, 75 nt, Human
uaggggagggacuuuguucaggaagaaauccgugucuccaaccacacuaucuacccaucacagaccccuuuccua

SEQ ID NO: 9428 - RNA, 85 nt, Human
agguucagcugaagucccgacuggugaggacaaguggagccacaaggguccagacguaaagcaggaggcagacccagcuggagcu

SEQ ID NO: 9429 - RNA, 67 nt, Human; identical to SEQ ID NO: 4553

SEQ ID NO: 9430 - RNA, 64 nt, Human; identical to SEQ ID NO: 931

SEQ ID NO: 9431 - RNA, 75 nt, Human
ugacccacacagcuggccacuugcuggucaugcucugaaacuuugcaucagggcuguaccagcuggucaggguca

SEQ ID NO: 9432 - RNA, 74 nt, Human
gguuguacuuggccaagcgcucagaucggcaaggggcaccagucuugaucugcccagugcacagccccacaacc

SEQ ID NO: 9433 - RNA, 81 nt, Human
guucacggccuugcgauccucuuuggguuggucacugugagaucaucccccacuaccuggauuccugcacuggcugugaac

SEQ ID NO: 9434 - RNA, 60 nt, Human
uugcacgccugaagagacucggucacggagccaaucugguugacuuugagcaggaggcag

SEQ ID NO: 9435 - RNA, 89 nt, Human
aagucgccauaguguuugcagaaauuuuuaaaauuaaaaaaacuaaaagguuuuuuuaaaaaaaguuucaagacaggaaguggugacuu

SEQ ID NO: 9436 - RNA, 69 nt, Human
ggaaaauacaggauuugcaggauuggaaaccuguaaagggaaggccaacuuuuuguaucuguggguucc

SEQ ID NO: 9437 - RNA, 72 nt, Human
guaugcagaaagaauagcuggcagagauaacaaaugacaacuaggauugauuuuuguaacauuuaagcauac

SEQ ID NO: 9438 - RNA, 66 nt, Human
ucucguuguaaccuguauauuaaucauacaaauccaaacuuaauuuguaguaucaggacagugaga

SEQ ID NO: 9439 - RNA, 82 nt, Human
ugaaaaugauagguuuucuaguauggaauuauccuuuuauuauugcaauaaacuccacuuuaccaugcucugucauuauuua

SEQ ID NO: 9440 - RNA, 91 nt, Human
uuuuaaagauuuuauauuauuuuuaaagauuuaaauuauaugaaaauguuuuuucaaaggucuauuaaugugauuuuuuuaaucuuuaaaa

SEQ ID NO: 9441 - RNA, 64 nt, Human
cagucauaguggaucuggcacguggguguuuagguaacaaucacuuuuuggaauugacugacug

SEQ ID NO: 9442 - RNA, 60 nt, Human
cuggcccugaaggauggagaugguagugguagugcugcaaugcaccaucagagggauaag

SEQ ID NO: 9443 - RNA, 65 nt, Human
auauacauagauacauuuacauauuuauauauaaauuuaaauguuuaguuuauauaaauguauau

SEQ ID NO: 9444 - RNA, 65 nt, Human
gaaggauauaaaaagaaaacuuaaaggcccucuucucauuauuaacaguuucuuauguauccuuc

SEQ ID NO: 9445 - RNA, 100 nt, Human; identical to SEQ ID NO: 698

SEQ ID NO: 9446 - RNA, 60 nt, Human; identical to SEQ ID NO: 2705

SEQ ID NO: 9447 - RNA, 72 nt, Human; identical to SEQ ID NO: 1989

SEQ ID NO: 9448 - RNA, 73 nt, Human
cuccuuguuccagggaacacucauuucccuacaggugaucuuggggagagacuguucccaggcaacccuggag

SEQ ID NO: 9449 - RNA, 79 nt, Human
ucagcgcacaaaucuguccagggcagauggccgggcccccgugggcuuggccuucgccuccuuaugaugcugcugcuga

SEQ ID NO: 9450 - RNA, 65 nt, Human; identical to SEQ ID NO: 8905

SEQ ID NO: 9451 - RNA, 64 nt, Human; identical to SEQ ID NO: 8906

SEQ ID NO: 9452 - RNA, 70 nt, Human; identical to SEQ ID NO: 8907

SEQ ID NO: 9453 - RNA, 94 nt, Human; identical to SEQ ID NO: 807

SEQ ID NO: 9454 - RNA, 77 nt, Human
guggaagaucuuaaaauugccugccucauuugcugggaaaaaucagauaggaaguggccuuuaggggauacuuuuac

SEQ ID NO: 9455 - RNA, 77 nt, Human; identical to SEQ ID NO: 796

SEQ ID NO: 9456 - RNA, 70 nt, Human
ccaucuuacguauguguuaaguuucucucucuguugauuacaaggcaagcuccaaacauuaaaaugaugg

SEQ ID NO: 9457 - RNA, 65 nt, Human
uagggccaaacuuuuguagguuggacaaaacacauuuuauucaacccauauuuacugggauccua

SEQ ID NO: 9458 - RNA, 75 nt, Human
ucaaguccaugaaccacaugaauuaccuccccagccaggaggauaugccucauaaccaguucaucaagaugauga

SEQ ID NO: 9459 - RNA, 105 nt, Human
ucuuuuccaucgccuucaucacuguccuuaucuucaaggucuacauguucaagugcguguggcggugcuacagauugaucaagugcaugaacucgguggaggaga

SEQ ID NO: 9460 - RNA, 70 nt, Human
accucuucaaaaagcgaugcuaccaccuaauaguuuucaaggaaaaguggcauucauuacugggggaggu

SEQ ID NO: 9461 - RNA, 79 nt, Human
cgaggagacucaacaugaagcuaccggccaggguuuucuuuacucuggggucccggcugcccuguggccucgcuccucg

SEQ ID NO: 9462 - RNA, 70 nt, Human
gagugcggcugacgggccccggguguuccgagugguggacagcauggaggaugaggugcagcggcggcuc

SEQ ID NO: 9463 - RNA, 63 nt, Human
gcacugggagcuuacugcggagggcgaggagauugcccgggagggcagccaugaggcccgugu

SEQ ID NO: 9464 - RNA, 95 nt, Human
auuguauauuuauauauaaucgccuuuuuguauaugucuuagucucuucaggcugcuauaacaaaauuccuucgacuguguaauuuauaaacaau

SEQ ID NO: 9465 - RNA, 75 nt, Human
gcaaaugguuagccugguaucagcagaaaccagggaaagccccuaagguccugaucuaugaggcuuccacuuugc

SEQ ID NO: 9466 - RNA, 65 nt, Human
ucccagcuuccagaugcgacauccagaugacccagucuccaucuuccgugucugcaucuguggga

SEQ ID NO: 9467 - RNA, 61 nt, Human
gaggugcgcuguguuccagugcgcacagugucacgcagugcucgccgacucggugcaccuc

SEQ ID NO: 9468 - RNA, 74 nt, Human
uugaagguucacucaaaggcagcuaucucuuaaaaacaaaagccauaguaaaugcaucagagauggauauucaa

SEQ ID NO: 9469 - RNA, 80 nt, Human; identical to SEQ ID NO: 174

SEQ ID NO: 9470 - RNA, 64 nt, Human; identical to SEQ ID NO: 175

SEQ ID NO: 9471 - RNA, 66 nt, Human
uuucggcucugggucgcccaaagcagaauggagacggauagagugguggcucccagaaucccgaag

SEQ ID NO: 9472 - RNA, 60 nt, Human
gauauugcuuucauaauuuauacuaacauaaaauaauauuuuucacuguuuugcaauguc

SEQ ID NO: 9473 - RNA, 74 nt, Human
uuaauuucuguauugcagcuagaggaaguccaaagaaaacuuggauuugcucuuucugacaucucggugguuag

SEQ ID NO: 9474 - RNA, 78 nt, Human; identical to SEQ ID NO: 5110

SEQ ID NO: 9475 - RNA, 84 nt, Human; identical to SEQ ID NO: 5111

SEQ ID NO: 9476 - RNA, 60 nt, Human; identical to SEQ ID NO: 5112

SEQ ID NO: 9477 - RNA, 65 nt, Human; identical to SEQ ID NO: 1245

SEQ ID NO: 9478 - RNA, 130 nt, Human
ccuugucagcagccuuuucuucgcuggagcccacggauucugaaguccugccaaugcugggaacccaggcagcgucaauccccccaguccugggagguagaaacaugggauggguagaagaggcccgggg

SEQ ID NO: 9479 - RNA, 84 nt, Human
gagggaggacucugcagucuuauccaggcucuccucggcaucgcugccuucaagggucucuccaucuuuaaaggguccucccuc

SEQ ID NO: 9480 - RNA, 72 nt, Human
guguggucgaagcuucugaagcugccuacaaggaagccuuugaaaucagcaaagagcagaugcaaaccacgc

SEQ ID NO: 9481 - RNA, 72 nt, Human
guuaaagcuuaccgggagaagauugagaaggagcuggagacaguuugcaaugauguccugucucugcuugac

SEQ ID NO: 9482 - RNA, 115 nt, Human
uccggcugggccuggcccucaacuucuccguguucuacuaugagauccagaaugcaccugagcaagccuggcucuuagccaaacaagccuucgaugaugccauagcugagcugga

SEQ ID NO: 9483 - RNA, 61 nt, Human
aggagacccagucaggacacagcauggacaugagaguccucgcucagcuccuggggcuccu

SEQ ID NO: 9484 - RNA, 81 nt, Human
gcucuguuucccaggugccagaugugacauccagaugacccagucuccauccucacugucugcaucuguaggagacagagu

SEQ ID NO: 9485 - RNA, 72 nt, Human
gucccugaucuaugcugcauccaguuugcaaaguggggucccaucaaaguucagcggcaguggaucugggac

SEQ ID NO: 9486 - RNA, 61 nt, Human
cagauucuauucagacuucaucaguuuuuucauuacugaucuuuuucuguuccaggaucug

SEQ ID NO: 9487 - RNA, 70 nt, Human
uccaagaagcacauugcauuuggcucacaugucuccuuagucucauguggucugugauuguuucucagga

SEQ ID NO: 9488 - RNA, 84 nt, Human; identical to SEQ ID NO: 286

SEQ ID NO: 9489 - RNA, 89 nt, Human; identical to SEQ ID NO: 288

SEQ ID NO: 9490 - RNA, 61 nt, Human; identical to SEQ ID NO: 776

SEQ ID NO: 9491 - RNA, 93 nt, Human
cuuuacugaagcucacuggguguccaucaaucacaaaguggcguaugcagccugugaaggguuugcugggggccaagcguggugucaguagag

SEQ ID NO: 9492 - RNA, 100 nt, Human
gcucacugggcacaugcaccagguacaugcacuggguacccgugagacagaggcuacuugggggauacagggucaauguggcugaguagugccuuugggc

SEQ ID NO: 9493 - RNA, 66 nt, Human
ugccugggggaacacagaugucaccggguuacaggggaaggaacaacuguguaaagacccugggua

SEQ ID NO: 9494 - RNA, 91 nt, Human
ugccuuugggcuaagcccuggcugucuacaagcccgcaguaccauuaguguacaacggagacugccuacuggggcccguucccugcaggca

SEQ ID NO: 9495 - RNA, 78 nt, Human
ggguccuaggagaaaaaguccuacuuuucuggguccccaggugcaagcaccucccggagacuguuucucccauggccu

SEQ ID NO: 9496 - RNA, 64 nt, Human
gccgcucgccccaggccugggcccgcuccuguagcggcuggccggccagggagcccacaguggc

SEQ ID NO: 9497 - RNA, 73 nt, Human
ggcugcaggcuucggcguucagugauugucgcugggcacaggggcggcgcugaugcccacggcagccugcacc

SEQ ID NO: 9498 - RNA, 64 nt, Human; identical to SEQ ID NO: 287

SEQ ID NO: 9499 - RNA, 88 nt, Human
ggaguggggcuaggggcugggcgggguggugggggagcggaugcucacauuucucuuuuucacccucugcccagcugggccuugcucu

SEQ ID NO: 9500 - RNA, 68 nt, Human; identical to SEQ ID NO: 9318

SEQ ID NO: 9501 - RNA, 68 nt, Human
gcggucccaagggcuggagcuguuugagaacaccucggcccccuaccagcuccagaccuuuguccugc

SEQ ID NO: 9502 - RNA, 71 nt, Human; identical to SEQ ID NO: 6991

SEQ ID NO: 9503 - RNA, 78 nt, Human
agaagcuucugcaauucucaaaucucugggaagcuuccaucaguggucucagucuauagugggaaagcaggugcuucu

SEQ ID NO: 9504 - RNA, 80 nt, Human
gagcugugggaaagaaggucaaagcagccuccagcuauaucucagucugaaggucaaagucacguuguucuucauagcuc

SEQ ID NO: 9505 - RNA, 82 nt, Human; identical to SEQ ID NO: 9328

SEQ ID NO: 9506 - RNA, 60 nt, Human
cagacuacuuccuauaaauuucuccugggaaaccugccuuuguauguggaaguauaccug

SEQ ID NO: 9507 - RNA, 108 nt, Human
cugaaaccuuuaaccaugccaaugucucacacugguuucucgugcccaccagcuuguaauggagggauacaauuggugucaugaucggaaugugguuaccauuuucag

SEQ ID NO: 9508 - RNA, 67 nt, Human
caugcgggaugcccagggacggcuggacagcacgcgugggcugcugugcggccugggcgcuggcgug

SEQ ID NO: 9509 - RNA, 65 nt, Human
gcucccugcucuacgguuccauccccaaggcggccgucagguuuggaauguucgaguuccucagc

SEQ ID NO: 9510 - RNA, 79 nt, Human
ccagaagcagcuccagggcccccgagaaagagccgcccaaccagagcaggucgagucccgggcgcucaccuguuucggg

SEQ ID NO: 9511 - RNA, 72 nt, Human
cggugcuggggaagucggaggagugggcggacaaccaccugccccuuacggaugccgaacuggcccgcaucg

SEQ ID NO: 9512 - RNA, 82 nt, Human
ggcugcggcagcacgccuaugagcacucgcugggcaagcuucgagccaccaagcagagggcacaggaggcucugcugcagcu

SEQ ID NO: 9513 - RNA, 87 nt, Human; identical to SEQ ID NO: 76

SEQ ID NO: 9514 - RNA, 79 nt, Human
cgcuaccaagcgguguggucccagcaugggggguccuacuacaugauaucgcgcucgcugggacccgaguuuggaggcg

SEQ ID NO: 9515 - RNA, 68 nt, Human
aggacagaggccggaggcaggcggcuuagacgcucgcagugcccgugccaccugcccugcccugcccu

SEQ ID NO: 9516 - RNA, 69 nt, Human
gcugugcuugcugcucuguguguugcgcccgugcuuggaugugugcgauguugcuguugcuggugcggu

SEQ ID NO: 9517 - RNA, 92 nt, Human
ggcugagcugugcgugggcugcugcgcggagugugcuguuccugcuugcccgcccugcacaccccugagcugccugugccgccugcugggcc

SEQ ID NO: 9518 - RNA, 78 nt, Human; identical to SEQ ID NO: 99

SEQ ID NO: 9519 - RNA, 65 nt, Human; identical to SEQ ID NO: 247

SEQ ID NO: 9520 - RNA, 80 nt, Human; identical to SEQ ID NO: 100

SEQ ID NO: 9521 - RNA, 97 nt, Human; identical to SEQ ID NO: 7898

SEQ ID NO: 9522 - RNA, 80 nt, Human
ggguguugaacuuggccacaucaaugucauacagcuucuucacagccuguuuaaucuggugcuuguuggcuuuaacaucc

SEQ ID NO: 9523 - RNA, 65 nt, Human
uccggagucgcagugucuucggccgccggaaggugggugacgugcggaucuuguagcaaccugga

SEQ ID NO: 9524 - RNA, 78 nt, Human
caccuacggugaaaagaaagaugaauccuagggcucagagcacugcagcagaucauuucauauugcuuccguggagug

SEQ ID NO: 9525 - RNA, 87 nt, Human
guggggauagcgauaauuaugguagcggaggugaaauaugcucgugugucuacgucuauuccuacuguaaauauauggugugcucac

SEQ ID NO: 9526 - RNA, 70 nt, Human
ccgaguugggggagggggccaccgagccacgagcaggaguggcuuuugucccucauccuuguuuacucgg

SEQ ID NO: 9527 - RNA, 60 nt, Human
gccagcccccauuucgagcggggcuucucccugcgccgagccugacaaaaugggggcggc

SEQ ID NO: 9528 - RNA, 64 nt, Human
gcggcgcgggccugcagggccugccgggcgcacguggcggccucgggccugggagccgggccgc

SEQ ID NO: 9529 - RNA, 65 nt, Human
auuuaauuuuucuuuuuggaaaauguauguauacauacacacaguuuccauaaaaaaacauagau

SEQ ID NO: 9530 - RNA, 74 nt, Human
gcuucccuguaacuucccuguaauucugugggucccuuguagccacagagaaggcagcaaucaguaggggaagu

SEQ ID NO: 9531 - RNA, 74 nt, Human
ggcugagguggguggaucacaaggucaagagauggagacaauccuggccaacauggugaaaccucaucucuacu

SEQ ID NO: 9532 - RNA, 100 nt, Human
cuuggcccacauccaggcuacccccagcccguuuuuccccuguuuagcccagggaggaaacaguaaaggugaugggggcagccgggagggaggggccaag

SEQ ID NO: 9533 - RNA, 131 nt, Human; identical to SEQ ID NO: 6294

SEQ ID NO: 9534 - RNA, 91 nt, Human
ccggccucugagcaagacagugcgcuucaacgugcucaaggucaccaaggcugccggcaccaagaagcaguuccagaaguucugaggcugg

SEQ ID NO: 9535 - RNA, 66 nt, Human; identical to SEQ ID NO: 3294

SEQ ID NO: 9536 - RNA, 71 nt, Human; identical to SEQ ID NO: 3295

SEQ ID NO: 9537 - RNA, 81 nt, Human
ggcaaagacggccauagggugcucugaguuuugggauggucacaugacacaauccagcacuugaaccuggggccucgugcc

SEQ ID NO: 9538 - RNA, 61 nt, Human
gugccaacuuguguuuuguguuucaaaguuccagaagcaaaaacaaaaaaaguucggguac

SEQ ID NO: 9539 - RNA, 64 nt, Human; identical to SEQ ID NO: 287

SEQ ID NO: 9540 - RNA, 94 nt, Human
aaauguaggaagguuucaaagacauuuuggaagaaagaggaaaucagagucugauuuuuaaaaauucguuuuuguagcugaagcuucuucauuu

SEQ ID NO: 9541 - RNA, 69 nt, Human
cccaaaaauuauuauagaugagagaauugaaugugacauaaguucuacuauacgcgugacuucuuuggg

SEQ ID NO: 9542 - RNA, 96 nt, Human
ggccaccucccugacccucauauuuguaaggccguuucugggucuuugccaccaggagcuccuuggaauaucacaggccuuaggcuggaagagguu

SEQ ID NO: 9543 - RNA, 68 nt, Human
ucaugcaaaggaagccuaguuccuucagacacuucuuguuugacacugucuugccuucuucugcauga

SEQ ID NO: 9544 - RNA, 63 nt, Human
aaggccucucggagucaccaggagcuccaccgggagcugcucaugaaccacagaaggggccuu

SEQ ID NO: 9545 - RNA, 100 nt, Human
cugaccagcgaagagagagagcuguagggccagcugccgggcucaggccacugcccacccuggccuggacagccuccuucagcccuucuguaccuggcag

SEQ ID NO: 9546 - RNA, 65 nt, Human
cuucccuucccaaggacucgaccugagaaccgccauguacucggagauccagagggagcgggcag

SEQ ID NO: 9547 - RNA, 62 nt, Human
gcaccgccggcggaaccagcucaucaagaagaagaaggaggagcuggaagccaagcggcugc

SEQ ID NO: 9548 - RNA, 79 nt, Human
ggugaaggugccugaggagccuguguuacucaucacugcuugcugggggguggagcagguuucuaauuggugcuucacc

SEQ ID NO: 9549 - RNA, 68 nt, Human
gaggugccggugggccuguguugcugcgauuuuagucugugcugggaggcagggcuccgcugcgccuc

SEQ ID NO: 9550 - RNA, 76 nt, Human
auuuggacuucuuuacagcuuaagcucauuugcuauuuuugaugcaauguucuuaaaggcaauagaugucccagau

SEQ ID NO: 9551 - RNA, 70 nt, Human
caggcagaccacauuaggcauuaccaguacauucaaaaacuguaccucauauauguauguaucuucccug

SEQ ID NO: 9552 - RNA, 71 nt, Human
agcuaugaaggacaccuacuagaaagcuccacacuugaaggguucucuuaaggugguaacauuuuauggcu

SEQ ID NO: 9553 - RNA, 85 nt, Human
gagaaaccuuuuuaaaaaauggagaugaauguuacaguauuggacaacccgaacugcuuuucaaaaccagaggaaggagguucuu

SEQ ID NO: 9554 - RNA, 77 nt, Human
ugugaugggcucauuguaguucugacaggaaaauaaugcuauacucuuucugguaacuuacuugaaucuuuaucaua

SEQ ID NO: 9555 - RNA, 61 nt, Human
uuugucuuagucuuuuuuuaaagauauaauuuuaauaccuuuaauugucaucuaagauaaa

SEQ ID NO: 9556 - RNA, 82 nt, Human
ccucuugaauaagcucucugccuccuccucccuuucucccuuguggggaaauguuuggaggcaucacuggcauucgaugggg

SEQ ID NO: 9557 - RNA, 80 nt, Human
ggacauaccagugcaguauguugaaugucuguuucuucguuccucgguucucucauuccacaagugcauagguuaugucu

SEQ ID NO: 9558 - RNA, 68 nt, Human
cucaguaucucugauuucugaagauguacaaaaaaauauagcuucauauaucuggaaugagcacugag

SEQ ID NO: 9559 - RNA, 88 nt, Human
ggagaaucgcuugaacccggggggcagagguugcagugagcugaguuugcgccacugcacucuagccugggggagaaagugaaacucc

SEQ ID NO: 9560 - RNA, 85 nt, Human
guuuuuuugguaaagaaaaaauauuuguucuuauguauugaagaaguguacuuuuauauaaugauuuuuuaaaugcccaaaggac

SEQ ID NO: 9561 - RNA, 79 nt, Human
ugaauucagugagauacaaaaagcuccuucuguauuggagaauuccgauggagugaauacaugugauauccugaauuca

SEQ ID NO: 9562 - RNA, 91 nt, Human
ugccugauguccaaagugagcgauacgaauagucucugcaaguagaagugacgagcuggggguguauguacguagcgauggcucgguggca

SEQ ID NO: 9563 - RNA, 89 nt, Human
gcgucgccgcgacugguguuguuggagagcgagcaguuccugacggagcugaccagacuuuuccagaagugccggacgucgggcagcgu

SEQ ID NO: 9564 - RNA, 84 nt, Human; identical to SEQ ID NO: 1447

SEQ ID NO: 9565 - RNA, 87 nt, Human
agucuuguguagagaucuauaaaaucucagggcaauuuacagaauacggaaacauugucuuagaaacacuauucucuccacauuccu

SEQ ID NO: 9566 - RNA, 61 nt, Human
cugagggaaguauaccuguccugccagccuuggucucuggcagggaagguccuuccaacag

SEQ ID NO: 9567 - RNA, 62 nt, Human
gcaacagcaucaccuggaaugaauuccuuuagaacauacugucuuggaaaucugaagccugc

SEQ ID NO: 9568 - RNA, 74 nt, Human
guccagggaaagagcaguaagggucagaagagaaagagccugguguucucacugccuccugccuuccuuaugac

SEQ ID NO: 9569 - RNA, 67 nt, Human
ggcaaagcuggggauuggccagcugacaugcucaggaaguaaaaucggcuuguuaucuccgugggcc

SEQ ID NO: 9570 - RNA, 60 nt, Human
gaagacgaggcugacuauuucugucaaucaacagacaggagugguccuuauccgguuuuc

SEQ ID NO: 9571 - RNA, 66 nt, Human
gcggagggaccaagcugaccguccuaagucagcccaaggcugcccccucggucacucucuucccgc

SEQ ID NO: 9572 - RNA, 70 nt, Human
ugguggugaguaaagacgcugagaggcccucaggaucccugagcgauucucuggcuccagcucaggauca

SEQ ID NO: 9573 - RNA, 65 nt, Human
cuucaaagcucucacaggaagcguuaauacagaguauggaucguguagaucgagaaauugcgaag

SEQ ID NO: 9574 - RNA, 67 nt, Human
gaggcaaacuugaugcuccauccucuccaauuccggggcccccauguggaguugaucaaaaugcuuc

SEQ ID NO: 9575 - RNA, 62 nt, Human
uccaagugauuuauugaugagacaucggcaaacaagcagaagacgcucauaaaaauuuugga

SEQ ID NO: 9576 - RNA, 69 nt, Human
uguaauuguuaaaugugcaugacuuaaauguuaaaauccuguauuuuaagauagucuucugcaguuaca

SEQ ID NO: 9577 - RNA, 68 nt, Human
gcagcacgucaucugcgacaagguggggcugcagaagauccccaaggugucagagaagaccaagcugc

SEQ ID NO: 9578 - RNA, 69 nt, Human
cagugugacaagugccgggagaucuugucuguggacuguuccaccaacaaccccucccaggcuaagcug

SEQ ID NO: 9579 - RNA, 61 nt, Human; identical to SEQ ID NO: 347

SEQ ID NO: 9580 - RNA, 61 nt, Human
gggagcucgacgaaucccuccaggucgcugagagguugaccaggaaauacaacgagcugcu

SEQ ID NO: 9581 - RNA, 87 nt, Human
ggaguuuugcacuaucaccaggcuggagugcaguggugcgaucucggcucaccgcaaccuccaccucccagguucaagcaauucucc

SEQ ID NO: 9582 - RNA, 60 nt, Human
aacaaaaaguacuaaaugaaucccuauauuuccauuauaguauuuauguauuuuuauguu

SEQ ID NO: 9583 - RNA, 71 nt, Human
cauucuagggaaagaauacaggcggaugacacuuguguuacaguguuauuuuaacuguauuaccuggaaug

SEQ ID NO: 9584 - RNA, 92 nt, Human
gggggcgccugaguacuccccauaguuugccagcucguuugacacccccuagaucacagaugguaucgcuguacacgacagaggcgccaccc

SEQ ID NO: 9585 - RNA, 104 nt, Human
uuuauauguuuucuauuaguaauuuccuuugcacuaugcuuuauuuuaaucaaguuuggaauugagucaaagucacaucauaagcauacuggaaaaccuauaag

SEQ ID NO: 9586 - RNA, 64 nt, Human; identical to SEQ ID NO: 1375

SEQ ID NO: 9587 - RNA, 92 nt, Human
uuuuuuuuuuuuuuuuuaaaaaggacauauuaaauguauuuaaaucugggcuuuucuguacuuaauuuuucuucuaaaaaaaaguuuaaaaa

SEQ ID NO: 9588 - RNA, 94 nt, Human
cggccgucgggugugagcugcgccgaccgcucugaggguucguggcccaccgcuccuucgcggucccugccgccaccguacacgcucagcgucg

SEQ ID NO: 9589 - RNA, 67 nt, Human
gggaaagcugguacgccugcagguaccgguccggaauucccgggucgacccacgcguccgcuggccc

SEQ ID NO: 9590 - RNA, 69 nt, Human
gccaagguuuguacacgacucccaucuaggcugaaaaccuagaaguggaccuuguguugugugcauggu

SEQ ID NO: 9591 - RNA, 71 nt, Human
gcccaaagccaggcugagacaguccucauauccucuugagccaaacuguuugggucucguugcuucauggu

SEQ ID NO: 9592 - RNA, 67 nt, Human
gguggcuauucccaguguggggugguuuuccaacccaaaagcgccccagauguggggaacagcgauc

SEQ ID NO: 9593 - RNA, 96 nt, Human
cucuugacagaucuuggucucaacaauaaauucguuggggaagugucuaaucuuccagcauuuaucaauggcacguuuguugaaacccagcaagag

SEQ ID NO: 9594 - RNA, 69 nt, Human
gaguaucccauaaaccuuaauguuaaagucauauuguaaaucucugacuucuuauuaccaaggacacuc

SEQ ID NO: 9595 - RNA, 71 nt, Human
ggaaggacuuucuguuauugcaaaguugguaaauaaagaugccaagguuacuaacaucacgaauuuccucc

SEQ ID NO: 9596 - RNA, 67 nt, Human; identical to SEQ ID NO: 8241

SEQ ID NO: 9597 - RNA, 64 nt, Human; identical to SEQ ID NO: 8242

SEQ ID NO: 9598 - RNA, 64 nt, Human; identical to SEQ ID NO: 287

SEQ ID NO: 9599 - RNA, 89 nt, Human; identical to SEQ ID NO: 288

SEQ ID NO: 9600 - RNA, 116 nt, Human
cgguauuuaacuuuuuggcaaaauagaagcuuuggucauagccauaguucuuuaaaaauuuuuuuaaagagguuaucucugauuaaaacaauauuuuuagcaagugccucgugccg

SEQ ID NO: 9601 - RNA, 91 nt, Human
ccuuuuauccuucgaauaggauuagauguuuaaaaaaaaguucuucugugggaacuaauauuugauauuuuaaccuaccagaguaaacagg

SEQ ID NO: 9602 - RNA, 66 nt, Human
gcaggugaaagugaagucacagaaacgucucgguguuuuuuuucugcugauuuacaucuuuccugc

SEQ ID NO: 9603 - RNA, 70 nt, Human
uugccaaccugagucgggaugcggaggauauuggggguuucuuccaugacccugacaagcagguugucaa

SEQ ID NO: 9604 - RNA, 61 nt, Human
uuuuuuuuuuuuuuuucagcaucaugaacauuuauuaugauuauuuuauuuaaaaaaaaag

SEQ ID NO: 9605 - RNA, 80 nt, Human
gagguuggaagaaugacacgggcucaggacacagagugaggacucaugucuaaugagcaccggccaaaacuuccaucuuc

SEQ ID NO: 9606 - RNA, 83 nt, Human
ggcuaccucggaccugaacagcugccugacugccugaaagguugugaugugguaguuauuccggcuggaguccccagaaagcc

SEQ ID NO: 9607 - RNA, 74 nt, Human
ucuggaggcaucgggcagccacuuucacuucuccugaagaacagccccuuggugagccgccugacccucuauga

SEQ ID NO: 9608 - RNA, 65 nt, Human
aggcagggcaccugggggaugcuggggccaucggcucucagauggcaacucccagggcccagucu

SEQ ID NO: 9609 - RNA, 66 nt, Human
gguucuguacaggagaaaggacucacaggagggagggacacugucuucagggggcucucuggagcc

SEQ ID NO: 9610 - RNA, 61 nt, Human; identical to SEQ ID NO: 823

SEQ ID NO: 9611 - RNA, 70 nt, Human
ucaaaaacaugauuacagggacaucucaggcugacugugcuguccugauuguugcugcugguguugguga

SEQ ID NO: 9612 - RNA, 64 nt, Human; identical to SEQ ID NO: 175

SEQ ID NO: 9613 - RNA, 66 nt, Human
uuucggcgcugggucgcccaaagcagaauggagacggauagagugguggcucccaaaaucccgaag

SEQ ID NO: 9614 - RNA, 61 nt, Human
agggugcaaugaauguguuacuuucguauucccaguaacuaccuuuccucaccugcucccu

SEQ ID NO: 9615 - RNA, 73 nt, Human
auuucccccuccuuugggugaauuccucucuugauuagcucaggaacggaaugugauccaaucugggcaaaau

SEQ ID NO: 9616 - RNA, 60 nt, Human
gaaaccuacuuugaaguuauccccacuauuauuauggggguuaaggagcuaguagauuuc

SEQ ID NO: 9617 - RNA, 100 nt, Human
gccaagcauauguucuucacagagcccacaucuguauuuuguggugauuuauuggaauccuauaugagagugugcuuuacugagaaugauuaugcugggu

SEQ ID NO: 9618 - RNA, 71 nt, Human
cagacaccagcuucccaucacgugucucgaucuucuucacaaccacggcccuggaggagcuggugcggcug

SEQ ID NO: 9619 - RNA, 60 nt, Human; identical to SEQ ID NO: 7431

SEQ ID NO: 9620 - RNA, 92 nt, Human
ggcaugggcaagggggguccccagguaguaaacuccccaggugggcugagggcuagggcugagccucaggugggucuccuguucccagugcu

SEQ ID NO: 9621 - RNA, 66 nt, Human
aaagaaguaugaggaauacuugaccaauaaccaaaguauaguuauuuauuuguuaaugacuucuuu

SEQ ID NO: 9622 - RNA, 66 nt, Human
caaauguaguuguauuucaagguuugguccaaagaccagagaaucccuaaguaggaagacaguuug

SEQ ID NO: 9623 - RNA, 71 nt, Human
uuauugcccauucugggaguguugagcguuuuaaguuugcuaugcuuguaaaaaucaaugaauggcaaugg

SEQ ID NO: 9624 - RNA, 66 nt, Human
aucuucucagaaaaccaaaccaaaggcagccaugaaaacccguguucuguacgugguugagaaggu

SEQ ID NO: 9625 - RNA, 101 nt, Human; identical to SEQ ID NO: 3418

SEQ ID NO: 9626 - RNA, 68 nt, Human; identical to SEQ ID NO: 1919

SEQ ID NO: 9627 - RNA, 81 nt, Human; identical to SEQ ID NO: 5988

SEQ ID NO: 9628 - RNA, 69 nt, Human
ggcgccgccccacucgccccagccgccgccaugaaggccguggugcagcgcgucacccgggccagcguc

SEQ ID NO: 9629 - RNA, 106 nt, Human
cugugagacugaagagccuccuuggaacgaacuaauccugaaagaagaacuacuugugaagggcaaacaguuuaguucaagaaagcaaggcuaugcaauaccacag

SEQ ID NO: 9630 - RNA, 73 nt, Human
gccaugucuuaagagcgggaagaaaaagcagcaaacaggcucuaucuccacaggcucuggggacagugacggc

SEQ ID NO: 9631 - RNA, 117 nt, Human
ccucucucugugugggaccaggacaguggcuuaagucuccacuccaggaaagaaucaaaguuucuagaguugugagaaaaccagagaguggcuguccugauucuucacugugagggg

SEQ ID NO: 9632 - RNA, 104 nt, Human
ugagaaaaaagagggccauuuaaaggggccuggggcaccaaacaauggaaccuuuggaaacggaacccggggacccucgaaaaaaaacuggucccucgugcuua

SEQ ID NO: 9633 - RNA, 69 nt, Human
ggagcgccuggucggagccugugucgcugcugacgccuagcgaccuggacccccucauccugacgcucu

SEQ ID NO: 9634 - RNA, 61 nt, Human
gcccuguugccgaccgaggacugaccacucgaccagguucuggguugacaaauaucagggu

SEQ ID NO: 9635 - RNA, 84 nt, Human
acgugcccucgcgggucuugaggcuguagauggagcagauguuguccaaccccccacaggccacaaaguucccugagggcgcgu

SEQ ID NO: 9636 - RNA, 78 nt, Human
cccaggaggagcgcagcgggauggcguggaccuuguuggugguguagcugucccagaugaugagcuucccauccuggg

SEQ ID NO: 9637 - RNA, 74 nt, Human
cuggggcucaccgcaauccuuccaacucucagccuccacagguagcuggggauaacggggcugugagccacugg

SEQ ID NO: 9638 - RNA, 75 nt, Human
gagcuuaucauuuaaccagucccaaccccauaagugucgccuagcccagagggucggccugggggaaccgagcuc

SEQ ID NO: 9639 - RNA, 77 nt, Human
guugggagcuucuugcaauguggacuccuggagaugacugggucaagcuccuggauaguuaacguagcgaucuuggc

SEQ ID NO: 9640 - RNA, 64 nt, Human
gggcgcuugggcuggggggcccuuguugcggcaucacgugcauaaggugaacucgguggcgccc

SEQ ID NO: 9641 - RNA, 109 nt, Human
ccgcgguggcuuccgcggagguuucggcaguggcauccggggccggggucgcggccguggacuggggccuggggccgaggccgcggagcucgcggaggcaaggccgagg

SEQ ID NO: 9642 - RNA, 67 nt, Human
gucuugugcccacacugagccagcaaaguccugcugucacacccacaagcuccuugggggacaggac

SEQ ID NO: 9643 - RNA, 65 nt, Human; identical to SEQ ID NO: 2198

SEQ ID NO: 9644 - RNA, 87 nt, Human
cuuugucagaauaugucagaaaacaaaacaaaaaaaguuuuaaaugcuaaagauuuuaaaaauuaguucucugaaauuucuguaaag

SEQ ID NO: 9645 - RNA, 90 nt, Human
gagcacgggcucaugugacaccagccccgacaccgucucgcccucccugagccccggcuucgaggaccugucccaugugcagccugucuc

SEQ ID NO: 9646 - RNA, 94 nt, Human; identical to SEQ ID NO: 2800

SEQ ID NO: 9647 - RNA, 67 nt, Human
gccagaaacuauauuuguucaaauauauugaaaagguauaagaauacaaauagauauuaacaguggc

SEQ ID NO: 9648 - RNA, 63 nt, Human
uccuuuaaagugauuuugucaugaaagagucaucugaaaugacucucgugauggaggaaagga

SEQ ID NO: 9649 - RNA, 66 nt, Human
cggcugcccaggcccugccuuggcaugugugucuccagagcgugcccggccaggccaucccagccg

SEQ ID NO: 9650 - RNA, 74 nt, Human
gccggagcgcgcggggccggaagaggcgggcggccaguggagguccgcagaguuugggcgccaggcgagacggc

SEQ ID NO: 9651 - RNA, 77 nt, Human
auguguguguguguauauacacacacauauauaaauuagaauuugcagauauuauguguauauauauacacacauau

SEQ ID NO: 9652 - RNA, 68 nt, Human
ucuaaaccuuugccaucaccaucuauguguccaacaucaacacugugaugaaguuguuccuguuuagg

SEQ ID NO: 9653 - RNA, 60 nt, Human
agugcgauuuucaacacguauagugaaaaaauuuauuuuuuauuaaaauugcguuguacu

SEQ ID NO: 9654 - RNA, 72 nt, Human
auuauuagagacaagaguaccaaagcgguguguguuuuuugugugugugguuuggcugucguuuguggugau

SEQ ID NO: 9655 - RNA, 65 nt, Human
ugugugggcgcugcuuccaggauaaggagacugaggcuuagagagaggaggcagcccccuccaca

SEQ ID NO: 9656 - RNA, 66 nt, Human; identical to SEQ ID NO: 3532

SEQ ID NO: 9657 - RNA, 76 nt, Human
ggugucggcuccgucaaccacuuuugugcaccuguccccacgaggacacauggacaauagugcgacugcugagacc

SEQ ID NO: 9658 - RNA, 67 nt, Human
aaaaaccccgcacuguggcaacuucuucucuuuuucagccuagaaaugucuguguuaagugguuuuu

SEQ ID NO: 9659 - RNA, 74 nt, Human
guuugacugaauucuucaaaaaugucaaugucauagaagacaaagaaagguuguggaaauguuucagauuaaau

SEQ ID NO: 9660 - RNA, 113 nt, Human
gauuccauaagaggccuggaaaagcucaguucugccucagagaguccacguccagaagagcauggacuggagaagcucaguggggaaagcugggaaaagcugggagaggaguc

SEQ ID NO: 9661 - RNA, 84 nt, Human
ucaaucaaugaaaugcaaagcgcacaaguaggcuccagggucccccagggcagaauugaugugugauugcagcacugggauuga

SEQ ID NO: 9662 - RNA, 64 nt, Human
gcccaagcccuagcugauugguacagccccaugugauccccguaacagacaggguuccuguggu

SEQ ID NO: 9663 - RNA, 62 nt, Human
guauuugaggaacuugucugacuuuaagugugagguucuaggagaccaaguaacacagauau

SEQ ID NO: 9664 - RNA, 64 nt, Human
guucgagggugcgccgugucuuuugcgugguaccagcggugacaugacgggguacacuccggau

SEQ ID NO: 9665 - RNA, 64 nt, Human
ccccccugggaagggaugcagagacggggagcuucucuguauccccuuacaggcaggacagggg

SEQ ID NO: 9666 - RNA, 93 nt, Human
gggacugcaagggcgggcuguauugagaaggauggcccccuggugugaugagcuuggggccucaucugcucaccgugcacgcccuggaguccu

SEQ ID NO: 9667 - RNA, 61 nt, Human
uuggagaccgaccaagccucucuguugggcaggacuugagggguugggccugugucuccag

SEQ ID NO: 9668 - RNA, 61 nt, Human; identical to SEQ ID NO: 6171

SEQ ID NO: 9669 - RNA, 79 nt, Human
cuguggugggacggccaaaagacaggcggggggccuacacuccaaagcuugagaaggaaauggccgcaauuuaccgaag

SEQ ID NO: 9670 - RNA, 65 nt, Human
cuuucuugauuaguaucuacaaggcacuuaaugcacauuuucagugaggaagcugauggagagag

SEQ ID NO: 9671 - RNA, 62 nt, Human
guucucuagaaguauguuacuggcucuuaaaagauuucacaaaaauacgcuuugaggagaau

SEQ ID NO: 9672 - RNA, 64 nt, Human
agacgcucuuugugcuagggugaugucaauuggacagauucucccuuucuucacaaugggcucu

SEQ ID NO: 9673 - RNA, 90 nt, Human; identical to SEQ ID NO: 1501

SEQ ID NO: 9674 - RNA, 77 nt, Human; identical to SEQ ID NO: 2332

SEQ ID NO: 9675 - RNA, 80 nt, Human; identical to SEQ ID NO: 367

SEQ ID NO: 9676 - RNA, 68 nt, Human
agaauuugcauacuuaccuagugaaacuuuucuagaauuauuuuucacucuaagucauguauguuucu

SEQ ID NO: 9677 - RNA, 63 nt, Human
uuugauuauuugcauguuauguuuaauaagcuacuagcaaaauaaaacauagcaaauggcaaa

SEQ ID NO: 9678 - RNA, 90 nt, Human
cuucaucugguguugagacuucgggguggugcuaagaaaaggaagaagaagucuuacaccacucccaagaagaacaagcauaagaggaag

SEQ ID NO: 9679 - RNA, 65 nt, Human
gguuaaguuggcugugcugaaauacuauaagguggaugaaaauggcaaaauuagccgacuucguc

SEQ ID NO: 9680 - RNA, 78 nt, Human
guuuucaugggaagccacuuugacaggcauuacuguggcaaguguugucugacuuacugcuucaacaaaccagaagac

SEQ ID NO: 9681 - RNA, 92 nt, Human
cauggccaagcggcugagccaaauugggguggaaaacacagaggagaaccgccggcuguaccgccaguccauguucagugcugaugaccgug

SEQ ID NO: 9682 - RNA, 60 nt, Human
gaugauaaugguguucccuucguccgaaccauccaggauaagggcaucgucgugggcauc

SEQ ID NO: 9683 - RNA, 66 nt, Human
ucagaacgcugugcccaauacaagaaggauggugcugacuuuugccaaaguggcgcugugugcuga

SEQ ID NO: 9684 - RNA, 87 nt, Human
aagguaaugcucauuuagacugacacagguaugaaaauuccaaucccuucuuuucacuaucauuguaucugacacacacaucaccuu

SEQ ID NO: 9685 - RNA, 90 nt, Human
cugguacuccucauggggcuugaccauuaucacacagguggggcgcuuggagcugcgcugcacccaggucccgucuuagaggggauauag

SEQ ID NO: 9686 - RNA, 80 nt, Human
aguucuccaaaagacaaaacagaacaauuauuauaacaaaauaauuaugguugaaaugucugugguuccuuggaaaugcu

SEQ ID NO: 9687 - RNA, 89 nt, Human
cugugaauacuauuuggagggucccuggucagacauuuaaauaucaaacuuaagaacugacauggagccuuugauuaguuuauauacag

SEQ ID NO: 9688 - RNA, 65 nt, Human
ucauuucuaccaauaauuucagauguuuaaugggacuuugaaaagauaggaaaaaauagaaauga

SEQ ID NO: 9689 - RNA, 80 nt, Human
gagaaaaauaaaaagauccaugaaugucaucuuuuaucuuuuauuuucaguuggcugauguuggaauuuuuguucuuguc

SEQ ID NO: 9690 - RNA, 68 nt, Human
cggccgcggccaaucggagccgcucuugcugcgacgcagcggucggaagcggagcaaggucgaggccg

SEQ ID NO: 9691 - RNA, 67 nt, Human; identical to SEQ ID NO: 3685

SEQ ID NO: 9692 - RNA, 60 nt, Human
uuaucuguaagcucucagcacugaucauggccugugggugugcaacaaguuuggggauaa

SEQ ID NO: 9693 - RNA, 63 nt, Human
ccuccggcuugagcucaccaccuaccucuuuggccaggacccuugaccagccaggccugaagg

SEQ ID NO: 9694 - RNA, 66 nt, Human; identical to SEQ ID NO: 3532

SEQ ID NO: 9695 - RNA, 60 nt, Human
guggaaccacgcugcuugaggcucuggacgugcauuccuagcagcaaaguccgguuccau

SEQ ID NO: 9696 - RNA, 82 nt, Human
ugucacuguuggacgauuggcagaauggauguccucaaaacccggaaugggggccaccauuugguccaggucaacgguuaca

SEQ ID NO: 9697 - RNA, 61 nt, Human
uguggggugcccccgaugggaggcugucccaucucccaguccccaucucuuuuuccccaca

SEQ ID NO: 9698 - RNA, 60 nt, Human; identical to SEQ ID NO: 1551

SEQ ID NO: 9699 - RNA, 77 nt, Human
gggaccauuggaccucgaggggcacggggaagcgccuauuauaaccccugugaaccccugagggauacaugggaucc

SEQ ID NO: 9700 - RNA, 103 nt, Human
cgagguuguggugucugggaaacuccgaggacagagggcuaaauccaugaaguuuguggauggcugaugauccacagcggagacccuguuaacuacuacguug

SEQ ID NO: 9701 - RNA, 67 nt, Human; identical to SEQ ID NO: 1146

SEQ ID NO: 9702 - RNA, 76 nt, Human
uguucuuggugagaagggccggcggauucgggaacugacugcuguaguucagaagagguuggcuuuccagagggca

SEQ ID NO: 9703 - RNA, 78 nt, Human
uaagauucugcugaggagcccccgcuggucccucugggcaugcugugcucggacggaaagcggggcugcggguccuug

SEQ ID NO: 9704 - RNA, 86 nt, Human
accccagccuuucugcagaugucccuaagguagagguguggaacgggagcuggccuggcugaaggagcaucugucccagcuggagu

SEQ ID NO: 9705 - RNA, 88 nt, Human
gcuacaacuucugaagggucucaaugccaggaagccucccgcuccuaaacagcguguucgcuucuugcugggccccauggaaggcagc

SEQ ID NO: 9706 - RNA, 61 nt, Human
caccuugggaaggggguuccuggugguccugugacaaccagagacccccaggcccaaggug

SEQ ID NO: 9707 - RNA, 67 nt, Human
ggcagguguuugaggaggcccugcacagggucccaggacugcaccagggccucaucagcaaccugcu

SEQ ID NO: 9708 - RNA, 65 nt, Human
ggugacaacaugcuggcagccaagugcuaacaugccuuggcuucaagggcauggaacacgucacc

SEQ ID NO: 9709 - RNA, 80 nt, Human; identical to SEQ ID NO: 174

SEQ ID NO: 9710 - RNA, 64 nt, Human; identical to SEQ ID NO: 175

SEQ ID NO: 9711 - RNA, 65 nt, Human
uuucggcgcugggucgccaaagcagaauggagacggauagagugguggaucccagaaucccgaag

SEQ ID NO: 9712 - RNA, 61 nt, Human
uucguuuguuauuuguguuuguggcuugucuuaugucgugauagcacaagugccagucgga

SEQ ID NO: 9713 - RNA, 73 nt, Human
ugaucuuacuggacauuuuaugguucaaguauucaacuagcuuauuagaauacucccuaaaugcaguagauua

SEQ ID NO: 9714 - RNA, 63 nt, Human
gagccugccucccucuuggccucucauccauuggcucaugcagggcaggggugaggcagguuu

SEQ ID NO: 9715 - RNA, 63 nt, Human
uacuguguuucucuuuugggggagcuuaacugcuuguugcucccugucgucugcaccauagua

SEQ ID NO: 9716 - RNA, 72 nt, Human; identical to SEQ ID NO: 1989

SEQ ID NO: 9717 - RNA, 73 nt, Human
gcgcugaggccggcggaggcgguguccgagcccacgacgguggcguuugacgugcggcccggcggcgucgugc

SEQ ID NO: 9718 - RNA, 72 nt, Human
guuuucuaccugggcugacguugccuuguccggaggggcuugcaggguggcugaagcccuggggcagagaac

SEQ ID NO: 9719 - RNA, 86 nt, Human
ggcuugcaggagcuuucgggacacuuugagaaccagaaggugauguacggcuucugcagugucaaggacucccaagcugcucugcc

SEQ ID NO: 9720 - RNA, 95 nt, Human
aggagagggaagaggugauaugagccuccucugugcucugacagagaaauguccaauuccagaucaaaggcaucauugccacccucuccucuccu

SEQ ID NO: 9721 - RNA, 73 nt, Human; identical to SEQ ID NO: 2843

SEQ ID NO: 9722 - RNA, 78 nt, Human; identical to SEQ ID NO: 2844

SEQ ID NO: 9723 - RNA, 70 nt, Human; identical to SEQ ID NO: 2845

SEQ ID NO: 9724 - RNA, 89 nt, Human
ggccaaggcagucgccagggcuucuuguccccaccuucugaaccuucuucaaacaguaguacaagcuccccucagccagccugccugcc

SEQ ID NO: 9725 - RNA, 60 nt, Human
gguguuggcgggggcggagggcaggggaacgggauccuucucccgcugcccaccaacacc

SEQ ID NO: 9726 - RNA, 63 nt, Human
gcaggugucaccagccgccaucaagaagaccauccuggacaaggugaagcuggacuccccugc

SEQ ID NO: 9727 - RNA, 81 nt, Human
ccucuagguaaagguuccaaggcaugccccaagagcaccuccuccucacccuucuggggacauuccuguagcaaccagagg

SEQ ID NO: 9728 - RNA, 60 nt, Human
gaccccagaugaggccuccagucaccucugguaacgucccccaggcaaagcucugagguc

SEQ ID NO: 9729 - RNA, 64 nt, Human
gaugguguaaaugguaaacgugauaucaugagacauuccugauaucucacaccaacacauuauu

SEQ ID NO: 9730 - RNA, 63 nt, Human
uccuuuauugaaaauauugggauagcacugcauuacauauagucaauauccauaaaugaaggg

SEQ ID NO: 9731 - RNA, 69 nt, Human
gcgggcguuuucguggcggaauggcguccucacugagcgcucagccaccaccgcgggacucgcgcucgc

SEQ ID NO: 9732 - RNA, 79 nt, Human
aggccugcucucggggaggguaccgugcauccuugcagauggaaacgccuucaugcuggaccaggccgagggcaggccu

SEQ ID NO: 9733 - RNA, 61 nt, Human
uuuuuuuuuuugaaguucaccggaaccccucaaauauuccugggaacuucaaacaaaaaaa

SEQ ID NO: 9734 - RNA, 107 nt, Human
ggauggaugagcagagggagcggguacuggcagcaacuccggcccuaggcagaggguucgauacucccagccugaguugcagggccugcccuucugcucucccagcc

SEQ ID NO: 9735 - RNA, 73 nt, Human
ggugaagguuuuaucagagcccagggcagacucaguggcuuccuauccagggcucuucccacagcucgucacc

SEQ ID NO: 9736 - RNA, 67 nt, Human
ucugcccacucccauccucuccccaagcucccauuucuccagggcuugucccugcggugugggcaga

SEQ ID NO: 9737 - RNA, 68 nt, Human
cagguccagcccuggggcaaguaacuggaaggguuuauaggcccccugaauaaaggcuauggcgcuug

SEQ ID NO: 9738 - RNA, 89 nt, Human
ccccaccaaacuaaaugaucaggucauuggaggugaagggguucaugacugcuggacagagaaugaaauaucauguuuauuuggugggg

SEQ ID NO: 9739 - RNA, 69 nt, Human
ggcugccuaauuaacugcuuugugcauguuccuaucuggagacagugcugagggguuagggccagagcc

SEQ ID NO: 9740 - RNA, 108 nt, Human
gggucuaaugcuauuccaaaagguuacuucucaaauuagggaaaccugggaauuugaagcgauacagguccagcccuggggcaaguaacuggaaggguuuauaggccc

SEQ ID NO: 9741 - RNA, 64 nt, Human
ggaccugucaccccaccauggagaaaagagucuuuugguucuuuuuaacauaagugauuaguuu

SEQ ID NO: 9742 - RNA, 61 nt, Human
cucugaugccaggaaugccaccaguuaugccaggcaugccaccuggauuggcucaucagag

SEQ ID NO: 9743 - RNA, 62 nt, Human
gccacugucacaggauccuuagggugucacuucaccagcuggagacuucuguggccaguggc

SEQ ID NO: 9744 - RNA, 113 nt, Human
ucugucacucauaguccggaaacucauggaucugucagaacuacgaccauucucuaaaccagaaauagcacugacagaagcccugaggcuuuuggcugaugaggauugggaga

SEQ ID NO: 9745 - RNA, 66 nt, Human
uuucauucugagauacugaacacaaaguugcuugcaacaaauuuugcaguuguucaagaggugaaa

SEQ ID NO: 9746 - RNA, 76 nt, Human
cuggccagcggaaaguuuuauuuaccuguuucaagaggaaugauaaacgugaaguaaaaguugcccaguuggcugg

SEQ ID NO: 9747 - RNA, 81 nt, Human
cagggcagaagcaugaaaggacaccaaccacgagugacacacuauacuauggcuguccugugucacaugcuauuuggccug

SEQ ID NO: 9748 - RNA, 72 nt, Human
ggaggccaagguggaucaccugaggucaggaguucgagaccagccugaccaacauggugaaaccccgucucu

SEQ ID NO: 9749 - RNA, 75 nt, Human
ccuggaggccgaguggaaacuggcagucccaaacccggaaggacggccaccuagauccagccaccgguacacagg

SEQ ID NO: 9750 - RNA, 60 nt, Human; identical to SEQ ID NO: 1551

SEQ ID NO: 9751 - RNA, 79 nt, Human; identical to SEQ ID NO: 1810

SEQ ID NO: 9752 - RNA, 68 nt, Human
uaggaaugaacagaaagaauuauaaauuuaagugaaacucaaguuguaugccaaaaauaacauuccua

SEQ ID NO: 9753 - RNA, 68 nt, Human
cccggacccgcagggcugccugguuccuggaagucuucccagucuucccagccagcccgggcccuggg

SEQ ID NO: 9754 - RNA, 61 nt, Human
ccgagcccagacugucagguccgagcacagugcagguuauggucugacguugggccuuugg

SEQ ID NO: 9755 - RNA, 75 nt, Human; identical to SEQ ID NO: 2950

SEQ ID NO: 9756 - RNA, 96 nt, Human
uccucgucaacagcaaccuggucugcagggugucugacuuuggccugucccgcgugcuggaggacgacccuaagaaccggaugcugcuuauggaga

SEQ ID NO: 9757 - RNA, 61 nt, Human
aagcuccacacauggcagucacggcgucugaugaagaaaacgugagguggccaugaugcuu

SEQ ID NO: 9758 - RNA, 66 nt, Human; identical to SEQ ID NO: 3532

SEQ ID NO: 9759 - RNA, 65 nt, Human
ggugacaacaugcuggagaccaacuugcuaacaaugccuugguccacggcgaugcgcaagucacc

SEQ ID NO: 9760 - RNA, 62 nt, Human
gcugacacgggaugcaguacagcaccgauuucacaguucgcuuaugcaauccuggagucagc

SEQ ID NO: 9761 - RNA, 70 nt, Human
ucucccgcaguccuacccagccuuuuaacuugcuaaaaggagaggcuguguuuuuagcaucuuugggaga

SEQ ID NO: 9762 - RNA, 62 nt, Human
caagauucuugauacugcacucucuaagauuggagagaaaagccuguuuaccaaggagcuug

SEQ ID NO: 9763 - RNA, 67 nt, Human
cccuggaggagaucuaucucuucugccugcccauuaaggaaucagagaucauugauuucuuccuggg

SEQ ID NO: 9764 - RNA, 108 nt, Human
acaagcugcugucuuugcaccuugguccuuggccaagccuccccuugccacgggggcaugggaugaccugugaacgagacagggugcaggagucacagcauagcuggu

SEQ ID NO: 9765 - RNA, 77 nt, Human
gagacuggauggcuuuucauugacaugguagagaggaaauggaucaaauccaccaaugaaaucaaagcuguccucuu

SEQ ID NO: 9766 - RNA, 63 nt, Human
gauggacucauuuccugguccuuaaagaugcagccucuuaagggcuccuugauggaugccauc

SEQ ID NO: 9767 - RNA, 64 nt, Human
gccaggcccagccucauaagccacaacuugggaacaacgugcacaugggauccaugggcuuggc

SEQ ID NO: 9768 - RNA, 66 nt, Human
cuugcuuugaguuggaagcgguuugcauuuacgccuguaaauguauucauucuuaauuuauguaag

SEQ ID NO: 9769 - RNA, 73 nt, Human
uagaaauguuuaagauugaagauguccaauauuuuuaaaacuggacauuaccauauacagguagacauuucua

SEQ ID NO: 9770 - RNA, 62 nt, Human
uuuuuuuuuuugagcaugaaaauaaaucuuuauuuucaguuauuacccaccaauaagagaaa

SEQ ID NO: 9771 - RNA, 85 nt, Human
agacaguuauucaguugagacauguauuacaucauuucuuacuuuucaaggaaaaacauguuuuacaacuugaguuuaucugucu

SEQ ID NO: 9772 - RNA, 77 nt, Human
gcugcacagcugggagaaacaggugucuucacaaugccuggggaaaggugagagauaaggcuucacuagcauacagu

SEQ ID NO: 9773 - RNA, 66 nt, Human
uuuaagcauuucauggggugagaggggagaucugugcagggggaagcuuacuacagaagugagaaa

SEQ ID NO: 9774 - RNA, 92 nt, Human
guuuccuucauuguuuuuggaaauuuuguuuugguuuauaaaacauagaaauagccaacacuuaaagcaaacauucaaaaccccaaggugac

SEQ ID NO: 9775 - RNA, 77 nt, Human
gcccgcguggccuucuccucguaggacucccaaacucguucacucugcguuuauccacaggauaaagccacgcuggu

SEQ ID NO: 9776 - RNA, 79 nt, Human
gggcucagcccccuucccccacgucacgucugcaucacuacugugggugagccuggacggacgggggcuggggcugccc

SEQ ID NO: 9777 - RNA, 68 nt, Human
caggugaaggcaccuggcugaccaucaaugcuuuccacauuguauucaucaccagucaccuccacuug

SEQ ID NO: 9778 - RNA, 66 nt, Human
uuuuuuuuuuuuuuuuuaguugcuguucauaaguuuauuaucuauaucugaaaaaaucauagaaaa

SEQ ID NO: 9779 - RNA, 64 nt, Human
auauauacuuuuauauauguguaaauauuaaauauauauguucacauaaauauaaauuauauau

SEQ ID NO: 9780 - RNA, 68 nt, Human
ucaacugaaagaguuuaggaacuuacucacugaacaguaguauaacaguuaucuuacuuaacagcuga

SEQ ID NO: 9781 - RNA, 67 nt, Human
cagcaccacagucucuauggugggagccuuaaaagggcccccuucuugcuucccuaucugucgucug

SEQ ID NO: 9782 - RNA, 61 nt, Human
cccgcgcgcccggugcagggagcccgaguccagcggguuaccuggcggcgggcgggcgcgg

SEQ ID NO: 9783 - RNA, 71 nt, Human
cggggguucggggggaugcccaggcccggugagcucgcucuccgccugggcacuugggcuccgggcccuug

SEQ ID NO: 9784 - RNA, 77 nt, Human
gggggggacuuuggcgacccgggucagccggccgcccccugggcugcuggugggcgucgggcggcggcuccuccccc

SEQ ID NO: 9785 - RNA, 81 nt, Human
gcugauuagcagauauccacaaacauagcuaugaaguucugacugggauaaccuugcuguuugucuauuuugcagucuugc

SEQ ID NO: 9786 - RNA, 88 nt, Human
uugcuguuugucuauuuugcagucuugcuaaauuuguuuguucuuguugugauuugguuuuuguugcuuucuggaauuuaggcaguga

SEQ ID NO: 9787 - RNA, 75 nt, Human; identical to SEQ ID NO: 9063

SEQ ID NO: 9788 - RNA, 68 nt, Human
gaagaaaacgaaaagaagaaacaaaagaaagcaucaugaugaauaaaaugucuuugcuuguaauuuuu

SEQ ID NO: 9789 - RNA, 63 nt, Human
aguggcucacaccugugcacgguggcuccuagcacuuugggaggccgaaguggguggauugcu

SEQ ID NO: 9790 - RNA, 72 nt, Human
gguugaagauaacgaggcagugggcugacuggugaaaacuaaaucaucuuuuguccuucaaagucuugggcc

SEQ ID NO: 9791 - RNA, 130 nt, Human
ugggcaacauggcggaacccaucucugcuaagaauacaaaaaaucagcuggaacugcaggcaccugccaccaagccccggcugauuuuuuuguauuuuuugguagagacaggguuucgccauguuggccg

SEQ ID NO: 9792 - RNA, 64 nt, Human
gaguucuacauugauugauaccacaauuuugaucuaacaucacuguguucauucuaaacuucuc

SEQ ID NO: 9793 - RNA, 68 nt, Human
uauauaugcauguguaugcauagacaccuaucuaaaucuaguuguguguguguguguguguguguaua

SEQ ID NO: 9794 - RNA, 84 nt, Human; identical to SEQ ID NO: 286

SEQ ID NO: 9795 - RNA, 89 nt, Human; identical to SEQ ID NO: 288

SEQ ID NO: 9796 - RNA, 94 nt, Human; identical to SEQ ID NO: 5398

SEQ ID NO: 9797 - RNA, 60 nt, Human
caccaguggccaucugagguguuucccuggcucugaagggguaggcacgauggccaggug

SEQ ID NO: 9798 - RNA, 89 nt, Human; identical to SEQ ID NO: 288

SEQ ID NO: 9799 - RNA, 92 nt, Human
caugcagcuaauuuuuguauuuuuaguagagaucggauuucaccauguuggccagucuggucucgaacuccuggccuaaagugaucugccug

SEQ ID NO: 9800 - RNA, 73 nt, Human
ugugugugaugagaacauguuugggccaauuaagauauuauacuucacaaauacuugcuuuauauuuacacca

SEQ ID NO: 9801 - RNA, 64 nt, Human; identical to SEQ ID NO: 287

SEQ ID NO: 9802 - RNA, 92 nt, Human
uaagcaccagaucauaugggauguggaaauacuggcuucaguguaagcuucacucuauuccaggguucacacucaacaauugaugguguuug

SEQ ID NO: 9803 - RNA, 70 nt, Human
ugucucaaagcagcccaggggccugaaauacccugauucaccuacaguguuccccugggcucagcaggca

SEQ ID NO: 9804 - RNA, 80 nt, Human
uuuuucauuuccuuaccuccuugccauaaucuuaacaaguaacaguaaaguauauggcaaggagguaaggaaaugaaaaa

SEQ ID NO: 9805 - RNA, 84 nt, Human; identical to SEQ ID NO: 286

SEQ ID NO: 9806 - RNA, 94 nt, Human; identical to SEQ ID NO: 5398

SEQ ID NO: 9807 - RNA, 93 nt, Human
acaagaucacagacaggguaagaagggggagagaggaaauuuacaauuccucauaaauaguuccuuauuuacagagauuguuagugauuaugu

SEQ ID NO: 9808 - RNA, 66 nt, Human
cacaaacguaggggcuuuccaugugcagggcacagugcuggacacugaggccucugcccuccagug

SEQ ID NO: 9809 - RNA, 66 nt, Human
ucugccuuucuuuggaacguuguccuggacuucaguccauccaguacuucuuuccagaacuucaga

SEQ ID NO: 9810 - RNA, 65 nt, Human
gugaggucugaggaggagacguuggcgggcgcaccccugugcagccucauacucaccuuccucgc

SEQ ID NO: 9811 - RNA, 62 nt, Human
uugagugguuuauuuuugccuuuuuuuuuuuuuaaagaaaauacagugaagacacuaagcaa

SEQ ID NO: 9812 - RNA, 105 nt, Human
uaguucuccccauacauaccccaagucacccuucucuuuccucgaaggcucaagguuuucgugaucuuuucagcuguacuuuauggaguauguucuugaguucug

SEQ ID NO: 9813 - RNA, 92 nt, Human
aauuucccuuucgccagcugccguaauagccaagaggcccgaaccgaucgcccuucccaacaguugcgcagccugaaugcggaauggaaauu

SEQ ID NO: 9814 - RNA, 76 nt, Human
uugcuugaacccaggaggcggagauugcagugagccaagaucacuccacugcacuccagccugggcaacagagcaa

SEQ ID NO: 9815 - RNA, 87 nt, Human
cuauugaguacaaaggcuguuacuugaaagaacacacugcuugguuggugauggaauauugcuuaggcucagccucugauuuauuag

SEQ ID NO: 9816 - RNA, 77 nt, Human
gcaggaaauauucuucuaacagagccaggucagguaaaacuagcugauuuuggaucugcuucaaugguuucuccugc

SEQ ID NO: 9817 - RNA, 62 nt, Human
guaucaugcuguuuuguuuacugcagcccuguaguauaguggggaguuagguagugugaugc

SEQ ID NO: 9818 - RNA, 86 nt, Human
guggagaagggguccaguuucaaucuucugcauauagcuagccaguuguccuugcaccauuguugaacagggaauccuuuccccau

SEQ ID NO: 9819 - RNA, 85 nt, Human
guugaagaucagauagcuauagguguguggucuuauuucuggguccucuauuguguuccauuugucugcgugucuguguuugugc

SEQ ID NO: 9820 - RNA, 100 nt, Human
gcagguugguacuacuucugauuaggcagaaaacaccaggauuccuuaagugauccuugaaaugguuauuguuuucugccuugucacauuugccaccugu

SEQ ID NO: 9821 - RNA, 73 nt, Human
gugugugugcuaggagcuggagcgcuagcacucuucaggugacaauucucaacuccauuuccuccacaugcau

SEQ ID NO: 9822 - RNA, 76 nt, Human
acugugaaaaagauaucuguugguggcauuaaagaagacacugaagaacaucaccuaagagauuauuuugaacagu

SEQ ID NO: 9823 - RNA, 70 nt, Human
ucugagugaauagauggcggcauggagggauaccaaacacuccaauccccaacgcgaucucaaguucaga

SEQ ID NO: 9824 - RNA, 131 nt, Human
cucuuguccacgguuagccugcuguagaggaagaaggagccgucggaguccagcaacgggaggcguggucuuguaguuuguucuccggcugcccauugcucucccacuccaacgggcgauugucgcugggg

SEQ ID NO: 9825 - RNA, 68 nt, Human
gaagccuuugaccaggcagggucaggcugaccugguucuuggucaucuccuccugggauugggcuauc

SEQ ID NO: 9826 - RNA, 71 nt, Human
gcaaggaccccugcaaguguuggucgggggccucgagcugccugagcugacacgaggggaggggucugugu

SEQ ID NO: 9827 - RNA, 73 nt, Human
gcuggaaaacgccgaaaugcuucccaacuaucugaaaagauguuguacuugaggaacacucgguguuccaagc

SEQ ID NO: 9828 - RNA, 71 nt, Human
uuuuuuuuuuuuacaccuaccaauucaauucagucauguuucugcuuuauugggcagauaaagagaagaaa

SEQ ID NO: 9829 - RNA, 75 nt, Human; identical to SEQ ID NO: 9431

SEQ ID NO: 9830 - RNA, 85 nt, Human
aaaaucauaaggacaaaaaucugcugaugcugugagauaaaaccgaugauucugcagucaauuuguuuuguaccugugugguuuu

SEQ ID NO: 9831 - RNA, 72 nt, Human
gcauauagaaaggcaguccugggaccuccuguucuucagaauauacaggucuuuaaacuguaaucagguagc

SEQ ID NO: 9832 - RNA, 63 nt, Human
caucuuuggguauuugaauagcaagcgcucuuuuuugaguggcgcugcuuaaaaaccgagaug

SEQ ID NO: 9833 - RNA, 85 nt, Human
gcccaccugaggauagauuauuggauaauugucauuauuuucuuucauaaaauauugucauuucuccauuuucuuuuucagcggu

SEQ ID NO: 9834 - RNA, 82 nt, Human
uccaaguaauggaucccugauggauucaccauaguuacaugacuaugucgugaauuauacauuucuuguccacauauuugga

SEQ ID NO: 9835 - RNA, 78 nt, Human; identical to SEQ ID NO: 5302

SEQ ID NO: 9836 - RNA, 62 nt, Human; identical to SEQ ID NO: 484

SEQ ID NO: 9837 - RNA, 70 nt, Human; identical to SEQ ID NO: 5304

SEQ ID NO: 9838 - RNA, 63 nt, Human
ccccagccaaagaugacagcagaacaacauaauuuacacugugauuuaucuuuuugcugaggg

SEQ ID NO: 9839 - RNA, 71 nt, Human
acuuugauuuacuuagauauguauguaacaacagugaauguacauuaagaugaagucaaguguugcaaagu

SEQ ID NO: 9840 - RNA, 73 nt, Human
gcuuuuaacacuguuugggaaaaaaaguuguucacauuggugaagggaagcaguccgaacauauguuaacagu

SEQ ID NO: 9841 - RNA, 85 nt, Human
ucagacaguugagccauuaaaaacaagaccacagaagcuuuauuuuaaaaaggcauuggcucuugaacugauggcugaaaaauga

SEQ ID NO: 9842 - RNA, 60 nt, Human
uuauaaagguaccacucacuacauuacaaaauagucucuaacauaaaauugccuuaauaa

SEQ ID NO: 9843 - RNA, 60 nt, Human
ggaugucucauucuagagugacagccaaaaggguaucucacccuagagugacagcuaucc

SEQ ID NO: 9844 - RNA, 60 nt, Human
gggccaguuuauauacugcuauuacacuauuuauuucuauagcuacaugugcuuuggccc

SEQ ID NO: 9845 - RNA, 63 nt, Human
gucacuuaaauuuguucuuuguuuagccugaaaaccuuuauggcucaagaucagauuccugac

SEQ ID NO: 9846 - RNA, 85 nt, Human; identical to SEQ ID NO: 866

SEQ ID NO: 9847 - RNA, 71 nt, Human; identical to SEQ ID NO: 2252

SEQ ID NO: 9848 - RNA, 64 nt, Human; identical to SEQ ID NO: 287

SEQ ID NO: 9849 - RNA, 84 nt, Human; identical to SEQ ID NO: 286

SEQ ID NO: 9850 - RNA, 64 nt, Human; identical to SEQ ID NO: 287

SEQ ID NO: 9851 - RNA, 89 nt, Human; identical to SEQ ID NO: 288

SEQ ID NO: 9852 - RNA, 82 nt, Human
cagaugugucaggcgaggacugucuugcuguuuggugacucaagccuagaaagcuagacaggaaaucagcugagaccauuug

SEQ ID NO: 9853 - RNA, 79 nt, Human
caugcccagggccgcgugugcccccagaggugcucuuggaggagggugccagggggaagagcgauggguccugugggug

SEQ ID NO: 9854 - RNA, 62 nt, Human
cuggucagggcgccugauuuccacgacaccgucaccgguucggggaaguaguccuugaccag

SEQ ID NO: 9855 - RNA, 104 nt, Human
ugucgcugacgaaugaugacaagacaagcgaagaucagggccacacacacgacagccccuucgaacuuccaaaauaagcguuguuccaucaaagcugagcggca

SEQ ID NO: 9856 - RNA, 73 nt, Human
uuuuuuuuuaaccauuuuacucuuuuuauucugcucauuaaugaucugaaagaagaagauggggaaaagggga

SEQ ID NO: 9857 - RNA, 106 nt, Human
ggggcgaguccacuggugcccaguaacacccuccgugggaccaccuugggaagcaugugccgcggaguccaccacgggggguccugggucccgggagggcuccuuc

SEQ ID NO: 9858 - RNA, 77 nt, Human
uuuguucauaaucccaaacaagggcccugcuggcagcaacaggacagguggggccaggacagggaagcuggagcagg

SEQ ID NO: 9859 - RNA, 81 nt, Human; identical to SEQ ID NO: 2741

SEQ ID NO: 9860 - RNA, 78 nt, Human
ugucgacuccucaugcuggacuugucuuucggguucuuuguagcccaggggagcaucaaaguccacguucaugucaca

SEQ ID NO: 9861 - RNA, 81 nt, Human
cugggguguuuauggcaagucacuuugacagacauuaugguggcaaaauguggucugacuuacuuguuucaaacaaaccag

SEQ ID NO: 9862 - RNA, 80 nt, Human; identical to SEQ ID NO: 100

SEQ ID NO: 9863 - RNA, 78 nt, Human
cucucaccccauucuuccauaaugagucccaguuggucccuagaggugccagggcaucuggaaguucugggcugggag

SEQ ID NO: 9864 - RNA, 95 nt, Human
ggaguggggugcagugaguggccucaaaguugugcagaugcuuccgagccagaaacaaagccagcugccgccguccaucugcacucauguccucc

SEQ ID NO: 9865 - RNA, 62 nt, Human
uguccucccccacgcuccaggggaagucgggcccguguucugccugguaggagcggaggaca

SEQ ID NO: 9866 - RNA, 70 nt, Human; identical to SEQ ID NO: 4167

SEQ ID NO: 9867 - RNA, 100 nt, Human
ggaacuugaggcuuccugucuccuccaugggccccaccagucacagggacaugaaauccguggcuggaggagggagaggggagagcaggagccacacacc

SEQ ID NO: 9868 - RNA, 74 nt, Human
cgcggccagcaguuaccugagccugaggcccgagcuagugcacgucccacagaagcuacagcugccaggucacg

SEQ ID NO: 9869 - RNA, 65 nt, Human
auauuggccaaaaggagacagucuuggaggugcugcuuacuguugaacuuccuuuuggaauguau

SEQ ID NO: 9870 - RNA, 85 nt, Human
cuguucuuucuuccucuucugucuacugcaugcaggcccggaagcugagcguuagucaaagguacaggaagggaaaagagaagag

SEQ ID NO: 9871 - RNA, 74 nt, Human
ugaugcagagggagcaggagcugagguggagacggccacugccucucucacccucuguuccaucccucugcuca

SEQ ID NO: 9872 - RNA, 67 nt, Human
aguuauaccuccggugacaaucauccaaguaggccugaaacgucuugggugauugaaccggauagcu

SEQ ID NO: 9873 - RNA, 87 nt, Human
agcuuuguacuaacaucaaaaguuuuaugauuaggaguugagaauuuauacagucuucagaauguaaaagaaaguguuauaaaagcu

SEQ ID NO: 9874 - RNA, 84 nt, Human; identical to SEQ ID NO: 286

SEQ ID NO: 9875 - RNA, 89 nt, Human; identical to SEQ ID NO: 288

SEQ ID NO: 9876 - RNA, 94 nt, Human; identical to SEQ ID NO: 5398

SEQ ID NO: 9877 - RNA, 67 nt, Human
ugagaugcuaaauacauauaucacuuugcacuuagaugucaauagauauaucgaacguaagcgucca

SEQ ID NO: 9878 - RNA, 89 nt, Human
gcggugcuggccgacuucgcgucgcccuuccacgagcgccacuuccacuacgaggagcaccuggagcgcaugaagcggcgcagcagcgc

SEQ ID NO: 9879 - RNA, 60 nt, Human
ggaaggcccucaaauaaagcuauuauuuuuauuaauuguaucaugcuuuauaggcucucc

SEQ ID NO: 9880 - RNA, 63 nt, Human
gcaggaacuggauauagcaccgucuuucccuccccauccccgaggcugugcuuccaguuuugc

SEQ ID NO: 9881 - RNA, 84 nt, Human
gguggacacuucugccacccuauucuguagccccagacagagauggggaaacauaugccuggagugacagagccuuccuccacc

SEQ ID NO: 9882 - RNA, 78 nt, Human
cugggguguuuauggcaagucacuuugacagacauuauuguggcaaauguugucugacuuacuguuucaaccaaccag

SEQ ID NO: 9883 - RNA, 64 nt, Human
gaagguuaagcuggcuguccugaaauauuauaagguggaugagaauggcaaauuagucgccuuc

SEQ ID NO: 9884 - RNA, 80 nt, Human; identical to SEQ ID NO: 100

SEQ ID NO: 9885 - RNA, 77 nt, Human
aauguaaugacaacaauuuaggcaucauaaaauacugaacuauugugacuuuauacuuagaauugcugucuuacauu

SEQ ID NO: 9886 - RNA, 96 nt, Human
guauggugucuucacuuauuauguauguuuaucuguauguauauuccuuauuuugucauauauguagagaaaauugcaugacuugaggcaucauau

SEQ ID NO: 9887 - RNA, 79 nt, Human
gcgucaugacugcuguacagcuagggugcguuuggccgacugccguaauucuuaauguucgcugcugcaguuaugccgc

SEQ ID NO: 9888 - RNA, 63 nt, Human; identical to SEQ ID NO: 1364

SEQ ID NO: 9889 - RNA, 68 nt, Human
uauagucaaguuacuuauuaaaaaaaaaacacauuuuggccauuuuuuuuacagugaacaauucuaua

SEQ ID NO: 9890 - RNA, 62 nt, Human
uuuuuuuuuuuuaaagauuuuaaaguagaugauuuuauucuaguaacuggcuacaagagaaa

SEQ ID NO: 9891 - RNA, 88 nt, Human
gcgcaggucgguagugaggggaucgugcuggaucgucuggugcagcaucagggccagcaaucccgcgcgguuugucaugguugugcgc

SEQ ID NO: 9892 - RNA, 83 nt, Human
ugaguggaggaacggacacacgggcaccgggcggcucccccaucuggaaugcaggguguaagggguccgggccaggaggcuca

SEQ ID NO: 9893 - RNA, 79 nt, Human; identical to SEQ ID NO: 8060

SEQ ID NO: 9894 - RNA, 100 nt, Human; identical to SEQ ID NO: 3028

SEQ ID NO: 9895 - RNA, 65 nt, Human; identical to SEQ ID NO: 3029

SEQ ID NO: 9896 - RNA, 104 nt, Human
cgcaucccauauugcaaagagaggacagcccaugguaucggaagaaauucuggcggagagcacuguacuugggguccuucucucgcaucuggcgguagggaucg

SEQ ID NO: 9897 - RNA, 64 nt, Human
uugccugaagaagcauuuauuagcaugcagggcccaugcuagaggcuccuuauuuccagggcaa

SEQ ID NO: 9898 - RNA, 73 nt, Human
uggcugucuucccccucaguguuuaggaacgucuccaagacgucugaagacaaccuugaggagggagcaguua

SEQ ID NO: 9899 - RNA, 76 nt, Human
ggagugcaauggcgcgaucuuggcucacugcaaccuccgccucccagguacaagugauucuccugccucagccucc

SEQ ID NO: 9900 - RNA, 82 nt, Human
auguagccagagcaauggugauguucuuauugcucccugaauucaggucuauugcauggacaucaggauuccucugggacau

SEQ ID NO: 9901 - RNA, 101 nt, Human
ggucuuguacuacuuccaagauugugcuaauuagugacaaacauugggcuuucccuucaauguuauggucuuuaugaaaacaaacaggauaguucagggcc

SEQ ID NO: 9902 - RNA, 82 nt, Human
cccaucucaaacguccuugcuacucugugauuguagaauaucugaucaaccuucugggagcgagaaaguaguugugaauggg

SEQ ID NO: 9903 - RNA, 95 nt, Human
guauuuuuaguggagauaggguuucaccauguuggccaggcuggucuugaauuccuggccucaggugauccgccugucucagccccccaaagugc

SEQ ID NO: 9904 - RNA, 68 nt, Human
acaacccaguaaccauucuguccaauuugaugucauuugcaauaugggcuauguagcuacugguaugu

SEQ ID NO: 9905 - RNA, 75 nt, Human
uugaguuuuuaaucaaguacagcacuucaugagaauuauacauuuguucccauucagauucuucuugauacuuaa

SEQ ID NO: 9906 - RNA, 77 nt, Human
gccccuauggggcccacaugggugguaacagcagcaggacaccuuuuccaaagcuguccaccagccccacuaggggc

SEQ ID NO: 9907 - RNA, 62 nt, Human
ggaguaccagaucagggcagagacuucccagcuggguaaggcaugcuuugagggaagacucc

SEQ ID NO: 9908 - RNA, 87 nt, Human
uuuuuuuuuuuuuuuuuuuuuaagaacuuauuuuuauuuuauuuuagaacuuaaaaauaaauuuuuaagaacuaaaaaagggaaaga

SEQ ID NO: 9909 - RNA, 103 nt, Human
aaggggagguuuuugcaaauucccaaggaaaugucaaaaaggcaaaauggccaccauuauccauuugcuuuuuuggguuuacugggggaaaaacacuuuccuu

SEQ ID NO: 9910 - RNA, 77 nt, Human
uaggcaugugauuucagguuuuucguacugaaaacauugaaauuucaguuggaaaacccccugaaauuuuaugagua

SEQ ID NO: 9911 - RNA, 131 nt, Human
agagcaagcacaaagaccggauauuuguggugccaccgcaguugcagaaaggaaugucagucagaaaugaauuguguuucagucacucugcaugguugcugccacgcauggaacauuuuuaggccaacuuu

SEQ ID NO: 9912 - RNA, 63 nt, Human; identical to SEQ ID NO: 7225

SEQ ID NO: 9913 - RNA, 66 nt, Human
gaggcaggcggaucacaaggucaggagaucgagaccaucuuggcuagcacggugaaacccugucuc

SEQ ID NO: 9914 - RNA, 79 nt, Human
gcuagaaggggccugggaggcggggcuggaccuuccugcaagucgcagcuccaccccucacuaacuguuggcccucagc

SEQ ID NO: 9915 - RNA, 66 nt, Human; identical to SEQ ID NO: 4988

SEQ ID NO: 9916 - RNA, 60 nt, Human
uccccuccugaaagaugucaucgcaacagauaaagaagacguugccuucaaagaccugga

SEQ ID NO: 9917 - RNA, 103 nt, Human; identical to SEQ ID NO: 5697

SEQ ID NO: 9918 - RNA, 73 nt, Human
gcuccugucccucuugcuuuauagcuagcugcccggagaccaagguacaggugaaagcaagguagcagcuugc

SEQ ID NO: 9919 - RNA, 98 nt, Human
uggcagugauccuuuucuuugcaaaguacugucucuuugguuccaguaaguuggaccaccacaugacaucauuuucccuggaaccuggucacugacua

SEQ ID NO: 9920 - RNA, 60 nt, Human
aguuuaaaagcaguuuccauguguuuucguuucugauaccuggaauacugcauuuuuacu

SEQ ID NO: 9921 - RNA, 60 nt, Human
gguaucuggcacauaauaggugaccacaacaagcuuagucccuuauguuuucaguauauu

SEQ ID NO: 9922 - RNA, 67 nt, Human
ccaccugcucuuguccacggugagcuugcuguagaggaagaaggagccgucggaguccagcacgggg

SEQ ID NO: 9923 - RNA, 92 nt, Human
cucccacuccacggggaugucgcugggauagaagccuuugaccaggcaggucaggcuugacugguucuugucagcucauccccggauggggg

SEQ ID NO: 9924 - RNA, 67 nt, Human
uugccggccgucgcacucauuuacccggagacagggagaggcucuucugcguguagugguugugcag

SEQ ID NO: 9925 - RNA, 99 nt, Human
agggggacaacacccugauccgcaucauggucucccggagugaguuggacaugcucgacauucgggagaucuuccggaccaaguaugagaagucccucu

SEQ ID NO: 9926 - RNA, 77 nt, Human
cagcaugaucaagaaugacaccucuggcgaguacaagaagacucugcugaagcugucugggggagaugaugaugcug

SEQ ID NO: 9927 - RNA, 74 nt, Human
ggcagcgcagguggccuaucagaugugggaacuuagugcaguggcccgaguagagcugaagggaacugugcgcc

SEQ ID NO: 9928 - RNA, 61 nt, Human; identical to SEQ ID NO: 387

SEQ ID NO: 9929 - RNA, 73 nt, Human; identical to SEQ ID NO: 7069

SEQ ID NO: 9930 - RNA, 80 nt, Human
caccucgcagucauucuugcggcuugcgcgcccuuguagacagccggggccuucgugagaccgcuuguuuucugcaggug

SEQ ID NO: 9931 - RNA, 60 nt, Human
cagagaagagaaaaaugcaggacacuggcucaguagugccuuugcauugguuuggcuuug

SEQ ID NO: 9932 - RNA, 81 nt, Human; identical to SEQ ID NO: 4673

SEQ ID NO: 9933 - RNA, 92 nt, Human
ccuccucuuccucuucagucuccaacgacucugcccccgaugguccucguggguuggguuguuuuggggggguugugcugggggggaggggg

SEQ ID NO: 9934 - RNA, 73 nt, Human; identical to SEQ ID NO: 4293

SEQ ID NO: 9935 - RNA, 63 nt, Human
gcuugauuuuuauuccuaaugaaauggggauccauugaaggaauaggaaaagaggagucaggu

SEQ ID NO: 9936 - RNA, 80 nt, Human
uuggauguggcuggcucacacucuagaggacaaucuguccuacucaaaguccauggagcuaaaaguugauuuucauccaa

SEQ ID NO: 9937 - RNA, 67 nt, Human; identical to SEQ ID NO: 1862

SEQ ID NO: 9938 - RNA, 71 nt, Human
gagguagcugugguuguauuucacccaggagagugguccuuugggaugcaaggcaguuguucuaauaccuc

SEQ ID NO: 9939 - RNA, 62 nt, Human
aaggccugcuguuucuggagugaagucugccuaauucuggagugaaauauuagcaggaccuu

SEQ ID NO: 9940 - RNA, 68 nt, Human
cucagaguaggucauucugguuugcccuaugccaugugguaagaagccagucagccugcccauuugag

SEQ ID NO: 9941 - RNA, 64 nt, Human
uuugaucugaacuuaaaagaggaagaaaggauuaugucuugagcuccuaaaacuucaacucaaa

SEQ ID NO: 9942 - RNA, 93 nt, Human
gcuagccacagggaaguugagaaaagagggaaacggggauaacagaagcuaaaaauguccugaguggccuggaagaagaccccugaggugggc

SEQ ID NO: 9943 - RNA, 67 nt, Human
gaggaaauuacuagcacugccuaaacauucagaagucugugacacaguuuaggucuaggguugucuc

SEQ ID NO: 9944 - RNA, 70 nt, Human
gccaaggaacagaguagauucaacagcauauuaaaguaauuuaguuaacccugaguaauuacuaacuugc

SEQ ID NO: 9945 - RNA, 80 nt, Human
gggaauaaaaauccauauuucuuaauaauuuauguauagcccaacuuuuagaacauagaauauuaucaauuuggcuuccc

SEQ ID NO: 9946 - RNA, 118 nt, Human
aaagcgacccaaagguggauagucugagaagcucucaacacacaugggcuugccaggaaccauaucaacaaugggagcaucaccagacuucaagaauuuagggccaucuuccagcuuu

SEQ ID NO: 9947 - RNA, 64 nt, Human; identical to SEQ ID NO: 287

SEQ ID NO: 9948 - RNA, 131 nt, Human; identical to SEQ ID NO: 6294

SEQ ID NO: 9949 - RNA, 67 nt, Human
ccuccuggagcuggagcuuggugagugggcugcuggugaucacggagggcuccgggcucuguauggg

SEQ ID NO: 9950 - RNA, 78 nt, Human
gucugaaacauuuuacuucauauuacacauacuuuucuuuuaaaaaaggcagaaacauugaaggaaacaacacucaac

SEQ ID NO: 9951 - RNA, 74 nt, Human; identical to SEQ ID NO: 365

SEQ ID NO: 9952 - RNA, 102 nt, Human; identical to SEQ ID NO: 2172

SEQ ID NO: 9953 - RNA, 77 nt, Human; identical to SEQ ID NO: 3082

SEQ ID NO: 9954 - RNA, 79 nt, Human
uuucaauuuuuauuuugguuuucuuacaaagguugacauuuuccauaacagguguaagaguguugaaaaaaaauucaaa

SEQ ID NO: 9955 - RNA, 91 nt, Human
gacagagaggcagccaagacuccugcacauuuccucaucugucugacacccccuuccagaaccagaaagugugcugagcucggccucuguc

SEQ ID NO: 9956 - RNA, 64 nt, Human
uguucacuagacuauguuuucuauucauuucuuuaaaaugaaaaaggagaauuucaagucagca

SEQ ID NO: 9957 - RNA, 64 nt, Human; identical to SEQ ID NO: 287

SEQ ID NO: 9958 - RNA, 89 nt, Human; identical to SEQ ID NO: 288

SEQ ID NO: 9959 - RNA, 74 nt, Human
ccugcccaggccgggccucccgccgccggaggucgccgcgaccaccgaggagggagccguggccgaggacgagg

SEQ ID NO: 9960 - RNA, 66 nt, Human
cccacagcggagucugugucuuuuagcuacagaggagguuccuuguugcuaaagaugaccuguggg

SEQ ID NO: 9961 - RNA, 66 nt, Human
cugugugguugggugugcguucuucuuugaacuccugcaugaacaccuuuccaaugaccacauaag

SEQ ID NO: 9962 - RNA, 78 nt, Human
cggauucuuggcgaggaugugcuugucuuggaugauguacucguacgucgucagcaagacguugaacuucccacuccg

SEQ ID NO: 9963 - RNA, 130 nt, Human
ccgugaggccaagaauccccaggucagagaacacgaggcuugccaccaucuuggaaguggccugccgccauuuuggaaguggcccaccaccaucuugggagcucucggagcaaggaccccuggcaucugg

SEQ ID NO: 9964 - RNA, 84 nt, Human
gguugagagaggaagcaaacacggaggaauggauuugacaacccacauguccgugacucaaugcaagcaaggccuuucacaacc

SEQ ID NO: 9965 - RNA, 90 nt, Human
ucaaagcugaggcuuggagcaggugugaguugccuuccauugauugguuaggugaccuccgcccaccccugcuccaacuuccauaguuga

SEQ ID NO: 9966 - RNA, 65 nt, Human
cuucaagaguucauguuaacuucuuuucuggaaacuuccuuuucuuaguuguuguauucuugaag

SEQ ID NO: 9967 - RNA, 80 nt, Human
gccugggccaugaagagcuugccuaaguuuugggcagugaacuccuugauguucuggcaguaaguguuuaucuggccugc

SEQ ID NO: 9968 - RNA, 91 nt, Human
uagggaagaaaacaaguauuaguaucaguuaucuuagaaauggcaucuaaacuagaaugacauuugcucaguaugauauguucuuucccua

SEQ ID NO: 9969 - RNA, 74 nt, Human; identical to SEQ ID NO: 365

SEQ ID NO: 9970 - RNA, 77 nt, Human; identical to SEQ ID NO: 3082

SEQ ID NO: 9971 - RNA, 74 nt, Human; identical to SEQ ID NO: 365

SEQ ID NO: 9972 - RNA, 102 nt, Human; identical to SEQ ID NO: 2172

SEQ ID NO: 9973 - RNA, 77 nt, Human; identical to SEQ ID NO: 3082

SEQ ID NO: 9974 - RNA, 79 nt, Human; identical to SEQ ID NO: 9954

SEQ ID NO: 9975 - RNA, 60 nt, Human
cauccaaguuaucgaagacauacugcuagaauuugcacaguauuuuagauuacuugguug

SEQ ID NO: 9976 - RNA, 87 nt, Human
cgggguugcgaccaggcagcuguaggugccauucggaccagcacaaccgcaggaccugugacaucaacaagccuguccguggcucug

SEQ ID NO: 9977 - RNA, 66 nt, Human
cuguuugaucuuucuccagcacacgaaagccagguccaccagcagugcaaugagacagacagacag

SEQ ID NO: 9978 - RNA, 81 nt, Human
uauucuuggccucaauaucuaccaccuauuuuuuaaccagacaaguuugaauguagcaagauaauuuggggcaagagagua

SEQ ID NO: 9979 - RNA, 75 nt, Human
uuuuuuuuugccaguugcuauguuuuauuuugcuaguagcuuauuaaacauaacaugcaaauaaucaaagagaaa

SEQ ID NO: 9980 - RNA, 60 nt, Human
accuuaugauaauuuauuagguuauacuuuccuuuauggccuuuauuuaucuuauauggu

SEQ ID NO: 9981 - RNA, 63 nt, Human
ugugacccuaucucagaaagagggaguuaggauauugacuuuuuuggggagguggguguugua

SEQ ID NO: 9982 - RNA, 79 nt, Human
agggcagaacuauaccgggugccugacaagagcacuugcuacagguucuacagcaccagagguacuuaguaaaagcccu

SEQ ID NO: 9983 - RNA, 78 nt, Human
cuaggaauaucaggcucucagaagcugccugugaggaugaagauucagccucagaaggucuaggugagcuuuuccugg

SEQ ID NO: 9984 - RNA, 72 nt, Human
agcagguuuaaaaggugcucaguuagagauucuaaccaauuaaguggugaauuauaaaauuucuuuccugcu

SEQ ID NO: 9985 - RNA, 75 nt, Human
uuauggggacaugagaauuacugcgaaaauaaauagaauguccuuuuguaaaagcagcaauaucaugucuuguaa

SEQ ID NO: 9986 - RNA, 65 nt, Human; identical to SEQ ID NO: 7001

SEQ ID NO: 9987 - RNA, 85 nt, Human
aguacaagggcuaucugguaucuguagauggcuacaugaacaugcagcuugcaaauacagaagaauacauagauggagcuugucu

SEQ ID NO: 9988 - RNA, 72 nt, Human
ugagagaauagcaucuuugugggggauuuuuuuuauauauauuucuagacaauaaagauuuguuguuuuuca

SEQ ID NO: 9989 - RNA, 80 nt, Human
gcacauuugugucuuggguuaucuguggggugagaaaccuccucacuuccaaucccagcuaucuggguacaaucuggugu

SEQ ID NO: 9990 - RNA, 103 nt, Human
guggggcggcguggguggggcgcagcuggauaugcacguggugaugucuccuagcuccccccgcuguaugcuccggucagugcucugccaugacgugucccac

SEQ ID NO: 9991 - RNA, 90 nt, Human
guggucuggcugucggcgagggguagaggugggugcaggacuggcccccgagucugcaccgaccucuucagggcagggagcucagaccau

SEQ ID NO: 9992 - RNA, 94 nt, Human
aagcagaauuccagacaagaacuacaggucagaaauggaagggaugucggaaaucuaaucuaaaccucugacuuucuagacuaggaagcugcuu

SEQ ID NO: 9993 - RNA, 60 nt, Human; identical to SEQ ID NO: 3188

SEQ ID NO: 9994 - RNA, 70 nt, Human
aaggaguaguugugagcucuauucuaaauaaaauacucuaagaauuuauuucucucugcagcuauuucuu

SEQ ID NO: 9995 - RNA, 75 nt, Human
uguuauuguugcuguuguuaauuacaaaaguucagucuuuuuguuuugguagauuagcuuuaaguaacaauuaca

SEQ ID NO: 9996 - RNA, 71 nt, Human
cucccucuuuuuugauuuacugguacauuuuuaaaauaauaaaucugccauaaaaugcauuauaucuggag

SEQ ID NO: 9997 - RNA, 61 nt, Human
aguuagagacaaaaggaugcugacaaauacuuaacuaggagcacuauuuguuuacugcacu

SEQ ID NO: 9998 - RNA, 84 nt, Human; identical to SEQ ID NO: 2859

SEQ ID NO: 9999 - RNA, 102 nt, Human; identical to SEQ ID NO: 2701

SEQ ID NO: 10000 - RNA, 87 nt, Human; identical to SEQ ID NO: 4680

SEQ ID NO: 10001 - RNA, 90 nt, Human; identical to SEQ ID NO: 2702

SEQ ID NO: 10002 - RNA, 60 nt, Human; identical to SEQ ID NO: 5595

SEQ ID NO: 10003 - RNA, 78 nt, Human; identical to SEQ ID NO: 99

SEQ ID NO: 10004 - RNA, 65 nt, Human; identical to SEQ ID NO: 247

SEQ ID NO: 10005 - RNA, 80 nt, Human; identical to SEQ ID NO: 100

SEQ ID NO: 10006 - RNA, 66 nt, Human
gagacgggguuucaccauguuggucaggcugguccaguacuccugaccucgugauccgcccgccuc

SEQ ID NO: 10007 - RNA, 66 nt, Human
ugaggacagagguugcggcucucguaacccagggcugggauugcggggggcgcgaccucuuucuca

SEQ ID NO: 10008 - RNA, 76 nt, Human
caucaggccgaaucaggguguugaccuuggccacaucaaugucauacagcuucuucacagccuguuuaaucuggug

SEQ ID NO: 10009 - RNA, 78 nt, Human
acaucaagacaauguauacuauuucaaauauauccauacauaaucaaauauagcuguaguacauguuuucauuggugu

SEQ ID NO: 10010 - RNA, 61 nt, Human; identical to SEQ ID NO: 6530

SEQ ID NO: 10011 - RNA, 61 nt, Human
gagaaggaggguaagagugcauugccccauucuagcucuguugcuaccuuaccucugacuc

SEQ ID NO: 10012 - RNA, 100 nt, Human
ggcccugugggaugaaaagcagguauccaaaagaacucugcuuggcccucugauacggccuugaggucaacccuggugccugcuuucuggcccacagacc

SEQ ID NO: 10013 - RNA, 74 nt, Human
gcuucauccuguuccacaauccugaguauaacaagaacaccucgaaguuugaugggacaagacucuaugaaagc

SEQ ID NO: 10014 - RNA, 94 nt, Human
cagggggugugccugccugcgccuuucgcuuccuccucgguccugcguggucucgagcugggugagcgagcgggcgggcugguaggcuggccug

SEQ ID NO: 10015 - RNA, 62 nt, Human
gaguggucggcugggcagagugcacgcugcuuggcgccgcaggcugaucccgccguccacuc

SEQ ID NO: 10016 - RNA, 72 nt, Human; identical to SEQ ID NO: 8911

SEQ ID NO: 10017 - RNA, 69 nt, Human; identical to SEQ ID NO: 8912

SEQ ID NO: 10018 - RNA, 68 nt, Human; identical to SEQ ID NO: 8913

SEQ ID NO: 10019 - RNA, 71 nt, Human; identical to SEQ ID NO: 1007

SEQ ID NO: 10020 - RNA, 79 nt, Human; identical to SEQ ID NO: 8750

SEQ ID NO: 10021 - RNA, 66 nt, Human; identical to SEQ ID NO: 1008

SEQ ID NO: 10022 - RNA, 75 nt, Human; identical to SEQ ID NO: 6455

SEQ ID NO: 10023 - RNA, 77 nt, Human
agaauagggaguuuucacacguuucuugaucuuuucaccugauccugauuugccaucuuguguugacucaccuaucu

SEQ ID NO: 10024 - RNA, 97 nt, Human
cagacaguucauuccuauaucuuuagacaccaugguuguagcagugccuccuucugcaagguaaacagcagugcuggauuuggaaugaacugcccug

SEQ ID NO: 10025 - RNA, 61 nt, Human; identical to SEQ ID NO: 3057

SEQ ID NO: 10026 - RNA, 85 nt, Human
ggaaugcugcaaaaauacucuaguucaacaaagaguuaugaucacaaaauaauuuuuauccauucuacaguguuucagaauuacc

SEQ ID NO: 10027 - RNA, 66 nt, Human
ucugguauguuucuuauagcaaacuguuguucaugcaacacuugugcucaaaggggaaggcacagg

SEQ ID NO: 10028 - RNA, 79 nt, Human
aaauguggaauacuggcaguguaaaagucuuaaacuaacuuuaaagcuaacaaaucaaaggcacaguauuaacacauuu

SEQ ID NO: 10029 - RNA, 77 nt, Human
cuauagggaaagcugguacgccugcagguaccgguccggaauucccgggucgacccacgcguccgcauuaccuguag

SEQ ID NO: 10030 - RNA, 98 nt, Human
guaaguuacugacaagccucagcaaacccaaagauguuaacaguauuuuaagaaguugcugcagauuccuuuggccacuguauuuguuaauuucuugc

SEQ ID NO: 10031 - RNA, 64 nt, Human
guuuagucauaucuaucuaaucagaucuucuuuugggaggauuugauguaaguuacugacaagc

SEQ ID NO: 10032 - RNA, 116 nt, Human
cagccccaccgguuucgucgcaguccugaggcaggugcguguuggcugugcuguggucagccuggcgcugcccugaguccacuugucccuccacagaacgaaugacucugggguug

SEQ ID NO: 10033 - RNA, 86 nt, Human
gacugacagaggaccuuguugcaccucguggcugcuuuguucacccgcagggcggccugugggcaccccgggguuccccuucaguc

SEQ ID NO: 10034 - RNA, 66 nt, Human
gcuguaguguugcuggugagagugucuuuuaguaugcuaauacauuauaauuagcacauaauaagc

SEQ ID NO: 10035 - RNA, 91 nt, Human
uuuuuuuuuuuuuugaccgagucucacucugucucccauugcacuccagccuggaugauagagcaagacuccaucucaaaaaaagagaaag

SEQ ID NO: 10036 - RNA, 73 nt, Human; identical to SEQ ID NO: 7713

SEQ ID NO: 10037 - RNA, 98 nt, Human
uacgacucacuauagggaaagcugguacgccugcagguaccgguccggaauucccgggucgacccacgcguccgaaacugucccccauagagguugua

SEQ ID NO: 10038 - RNA, 81 nt, Human
uuuguaugucuucuuuugagagaugucuauucaaauacuuugcccauuuuuugauuggauuauuagauuuuuacccacaaa

SEQ ID NO: 10039 - RNA, 125 nt, Human
uacagcugcuacuuuaccuucuuguaaccugguguaauuacaugguauuuuuaagcauuaugcaauuugagccuuaggacaauuaugcaaauuagguauggcagagggugguagcccuuacugua

SEQ ID NO: 10040 - RNA, 118 nt, Human
cgccuugcagcacaucccccuuucgccagcuggcguaauagcgaagaggcccgcaccgaucgcccuucccaacaguugcgcagccugaauggcgaaugggacgcgcccuguagcggcg

SEQ ID NO: 10041 - RNA, 73 nt, Human; identical to SEQ ID NO: 7713

SEQ ID NO: 10042 - RNA, 61 nt, Human
ccaguuaaacugcucguucagcugcuccagcaaggaggagguguugagcaucuuccacugg

SEQ ID NO: 10043 - RNA, 69 nt, Human
acacaccacauuuucuuuauccacucguugguugauagcaucuaauguucaucagagauauuggugugu

SEQ ID NO: 10044 - RNA, 108 nt, Human
aauugauaaaagccagaguuggagacacagaaccacugguucaccuaccaaugagacaaugacaguggagagugugacccaagcuguguccaaucuggcuuugcaguu

SEQ ID NO: 10045 - RNA, 62 nt, Human; identical to SEQ ID NO: 5971

SEQ ID NO: 10046 - RNA, 63 nt, Human
ggaaucgggugucucaggaaccuugagcccauuccacagggcaggacaacugaggucgccucc

SEQ ID NO: 10047 - RNA, 64 nt, Human
ggugcaggcucgucuugaucugcgcgugcauguuugccgcccggaacuggcucgggcacgcgcc

SEQ ID NO: 10048 - RNA, 78 nt, Human
cugggguguuuauggcaagucacuuugacagacauuauguguggaaauguggucugacuuacuguuucaacaaaccag

SEQ ID NO: 10049 - RNA, 65 nt, Human; identical to SEQ ID NO: 247

SEQ ID NO: 10050 - RNA, 75 nt, Human
cugggguguuuauggcaagucacuugacagacauuauguggcaaugucgucugacuuacuguuucaacaaaccag

SEQ ID NO: 10051 - RNA, 65 nt, Human; identical to SEQ ID NO: 247

SEQ ID NO: 10052 - RNA, 80 nt, Human; identical to SEQ ID NO: 100

SEQ ID NO: 10053 - RNA, 62 nt, Human
aaugcaucagaagaagaaaugucaggaaaaaaagcauuguauuuauuucugaaugauguauu

SEQ ID NO: 10054 - RNA, 68 nt, Human
gccucaaggacuuucucauguaauucuaugauuaaagaaaaaggucgaggguuaagcaaggucgaggu

SEQ ID NO: 10055 - RNA, 83 nt, Human
cuagaagccuugguaccuuccucauaguguaaagccacggguggacgcagcaugagacuagaggcuggggaaccuggcuauag

SEQ ID NO: 10056 - RNA, 89 nt, Human
gcaccccuugcagcuccagcuccagcuccagcuccagccaugacugaaagaugcacagguacagcuggggucacggcuacagagggugc

SEQ ID NO: 10057 - RNA, 63 nt, Human
gcuaaggaucugggauuggcacaagacucugcuaccagcacaaagagcccaauccuucuuggc

SEQ ID NO: 10058 - RNA, 64 nt, Human
gcugcucgaugacccguuugccucguggauaaugccgcacauauucuccaacaucgugagcagc

SEQ ID NO: 10059 - RNA, 81 nt, Human; identical to SEQ ID NO: 8770

SEQ ID NO: 10060 - RNA, 64 nt, Human
gcaccugggggaccacgaagccagcuaccacucgcugugccacggcucacccccaacggucugc

SEQ ID NO: 10061 - RNA, 71 nt, Human
gggaggaaggaaguuccgcaaguucaucgggcaggcggcuuuggagcgaaugcggaauccaacuuucuucc

SEQ ID NO: 10062 - RNA, 77 nt, Human
ggugccaagguaggggacagggccugggggugguuuugagggcaggcugccugggguguuguccucuucuugggauc

SEQ ID NO: 10063 - RNA, 66 nt, Human
guuggugacuuugguguaucgagcauggagaccgcacagucccauugaacaccuuuccucacugac

SEQ ID NO: 10064 - RNA, 65 nt, Human
cccuccaguccccaaaccaguccucggcccugcagccagguuucuggucaguggacagugguggg

SEQ ID NO: 10065 - RNA, 103 nt, Human; identical to SEQ ID NO: 294

SEQ ID NO: 10066 - RNA, 78 nt, Human
ucuuaaaucaguuuguguacugacagccaaaaaugaauuccauuuuggugauuccaccucauggacugaguucuggga

SEQ ID NO: 10067 - RNA, 64 nt, Human
ugacuuucagguggggcaaucagugaaauucaguuuaggucacuguuugucagcuuaaaauuca

SEQ ID NO: 10068 - RNA, 69 nt, Human
ugcccacuagcuaauguaaacaccaaagaaccauuaccugcuuauugguguauaacuugcuucugggua

SEQ ID NO: 10069 - RNA, 72 nt, Human; identical to SEQ ID NO: 7666

SEQ ID NO: 10070 - RNA, 64 nt, Human; identical to SEQ ID NO: 4448

SEQ ID NO: 10071 - RNA, 78 nt, Human
ucggaagcacaucaugggccagaauguugcagaauacaugcgcuacuuaauggaagaagaugaagaugcuuacaaaga

SEQ ID NO: 10072 - RNA, 68 nt, Human
gagaggcguggaguauaaccuauauauaagugugguauaaaacuuauagaguucuccgagugcuuuuc

SEQ ID NO: 10073 - RNA, 82 nt, Human
aggaccaguagccacuuuaacuuuuuggggcugggcuuaaccuaaaguugcaggcucagcucuccuaugcugcugcuggccu

SEQ ID NO: 10074 - RNA, 67 nt, Human
cuguuugauuuuucaugauguagaucacauaccggaaagugaucgcaacuauuauggauguggacag

SEQ ID NO: 10075 - RNA, 83 nt, Human
gccagcgcuugcaguuugcauuuuaugugguugagcagguugguacccaacccuuuaaucgagccaugcuuuucaacguuggc

SEQ ID NO: 10076 - RNA, 73 nt, Human; identical to SEQ ID NO: 4762

SEQ ID NO: 10077 - RNA, 62 nt, Human; identical to SEQ ID NO: 5971

SEQ ID NO: 10078 - RNA, 79 nt, Human
aaggcgcaaacccgccacguucuggaaacuauccgcaagugaucgagacggcggguggcacgauggcggaugugaccuu

SEQ ID NO: 10079 - RNA, 68 nt, Human
uauucccgcuggcagcaggcaccgcuggcccccuucguucccggcacgcuggcugauggcguggugua

SEQ ID NO: 10080 - RNA, 67 nt, Human
uuauuaccgacuggaaaaauuacgccgcgauuaacgaaaucuacgccgaguuuuuuccgggugauaa

SEQ ID NO: 10081 - RNA, 75 nt, Human; identical to SEQ ID NO: 74

SEQ ID NO: 10082 - RNA, 87 nt, Human; identical to SEQ ID NO: 76

SEQ ID NO: 10083 - RNA, 71 nt, Human; identical to SEQ ID NO: 77

SEQ ID NO: 10084 - RNA, 73 nt, Human
ucgcuguagggcaggcugaagggguagaggggucuguaacgugaguccugccagagcagcuuguccuccagga

SEQ ID NO: 10085 - RNA, 83 nt, Human
ugacaccuuccucgaagggugggcgugggccuaaggcucccaagucggccaggggcucggccuggcucagaagaggugcuuca

SEQ ID NO: 10086 - RNA, 61 nt, Human
agaaaggucuuucaggaaauucgguaccauauuagcuggcaacuuugggaguacucuuuuu

SEQ ID NO: 10087 - RNA, 130 nt, Human
cagcuguuaucaccugcuaguugugugagccugagcaaguuacucuaccaaucuguggcucaguguccucaucuauagaauggggagaguaacaauagccaccucauagggcagcggugaagauucagug

SEQ ID NO: 10088 - RNA, 86 nt, Human
gccucacccuuagaaguuccaccuccuaggcugggcacgguggcgcacaccuguaaucccagcacuuuacuucgggagggugaggc

SEQ ID NO: 10089 - RNA, 66 nt, Human
gguggaucaccuaaggucaggaguuggugaccagccugacuaacauggugaaacucugacucuacu

SEQ ID NO: 10090 - RNA, 64 nt, Human; identical to SEQ ID NO: 287

SEQ ID NO: 10091 - RNA, 66 nt, Human; identical to SEQ ID NO: 6432

SEQ ID NO: 10092 - RNA, 83 nt, Human; identical to SEQ ID NO: 6433

SEQ ID NO: 10093 - RNA, 84 nt, Human; identical to SEQ ID NO: 286

SEQ ID NO: 10094 - RNA, 89 nt, Human; identical to SEQ ID NO: 288

SEQ ID NO: 10095 - RNA, 73 nt, Human
cccaauuacaggauuauacgguaccaucacaucauuuguggaaauuggggugacuguauagcuugggauuggg

SEQ ID NO: 10096 - RNA, 60 nt, Human
gcuccuaccaacgaggauaugaauauaucgugagauugcacaugucaugugaguuggagc

SEQ ID NO: 10097 - RNA, 76 nt, Human
ugucacagugggauuugguggaaaacuauuuggcagcagauggaaaaucuacaacauggagugucagacugggaca

SEQ ID NO: 10098 - RNA, 81 nt, Human
uuuuuuuuuuuuuuuuugguuacaaagcgguuuaauagagauuuauuuccaaggcuuguuuuccaugaaacagucaaaaaa

SEQ ID NO: 10099 - RNA, 77 nt, Human
gagggauggccagagcugcuggagauggagggcugcaugcccccgaagccauuuuaggguggcuguggcucuuccuc

SEQ ID NO: 10100 - RNA, 92 nt, Human
ggggcugaggaggaggagcagggggugcugcguggaaggugcugcagguccuugcacgcugugucgcgccucuccuccucggaaacagaacc

SEQ ID NO: 10101 - RNA, 68 nt, Human
ucccacagcacauccuacccggaagaccagccucagaggguccuucuggaaccagcugucuguggaga

SEQ ID NO: 10102 - RNA, 63 nt, Human
agggaccaucaccgccccgagcgugcgcacacagaaccggucggaaggcgagaacuggucucu

SEQ ID NO: 10103 - RNA, 61 nt, Human
uggggcacugaggcccgggauguaggcacuggacagcaacaacccaggcauuugggcccca

SEQ ID NO: 10104 - RNA, 62 nt, Human
gaacaaacguccuuuucauuuugguuuagaaauagaaacgugguaaaaggaggcgacuguuu

SEQ ID NO: 10105 - RNA, 76 nt, Human
ugccuuuuccagacugccagcgcggagcacuaguuugacuuugggugcucuucaaauagcuggcauugauaaggca

SEQ ID NO: 10106 - RNA, 74 nt, Human; identical to SEQ ID NO: 6462

SEQ ID NO: 10107 - RNA, 72 nt, Human
gcauugcccggaagaucaagucgugcuccuggcaggcgcgccccuggaggaugaggccacucugggcagugc

SEQ ID NO: 10108 - RNA, 80 nt, Human; identical to SEQ ID NO: 367

SEQ ID NO: 10109 - RNA, 77 nt, Human; identical to SEQ ID NO: 7086

SEQ ID NO: 10110 - RNA, 60 nt, Human; identical to SEQ ID NO: 8964

SEQ ID NO: 10111 - RNA, 86 nt, Human; identical to SEQ ID NO: 8965

SEQ ID NO: 10112 - RNA, 66 nt, Human
gaagguuaagcuggcugguccugaaauauuauaagguggaugagaauggcaaaauuagucgccuuc

SEQ ID NO: 10113 - RNA, 64 nt, Human
gggcggcucuggccccggagaaaaguuuuuuacccccccuccgguuugggggcgcggggccccc

SEQ ID NO: 10114 - RNA, 80 nt, Human; identical to SEQ ID NO: 100

SEQ ID NO: 10115 - RNA, 62 nt, Human
ggcaaucugaaguacuccuguuggugcgaaaggcgauauugggggugcgaaagccuauugcc

SEQ ID NO: 10116 - RNA, 62 nt, Human
ugauuugcuuggugaccgaauuacuagugacuaguuuacuaacuaggucauucaggcaguca

SEQ ID NO: 10117 - RNA, 62 nt, Human
gccuccccacuucccacauccccugaauucuucgugaaggggauggccuaauaugggaaugc

SEQ ID NO: 10118 - RNA, 66 nt, Human; identical to SEQ ID NO: 4249

SEQ ID NO: 10119 - RNA, 82 nt, Human; identical to SEQ ID NO: 1766

SEQ ID NO: 10120 - RNA, 74 nt, Human; identical to SEQ ID NO: 365

SEQ ID NO: 10121 - RNA, 102 nt, Human; identical to SEQ ID NO: 2172

SEQ ID NO: 10122 - RNA, 77 nt, Human; identical to SEQ ID NO: 3082

SEQ ID NO: 10123 - RNA, 80 nt, Human; identical to SEQ ID NO: 367

SEQ ID NO: 10124 - RNA, 63 nt, Human
cacgaccggcuuggcucgggacccucggcucggccgccgccggccgcccuucagccgguccug

SEQ ID NO: 10125 - RNA, 65 nt, Human
ugcaguuucuugggacauaggagcgcaaagaagcuacagccuggacuuaccaccacuaaacugcg

SEQ ID NO: 10126 - RNA, 68 nt, Human; identical to SEQ ID NO: 7914

SEQ ID NO: 10127 - RNA, 83 nt, Human
gauggaacacaugaaaucuuugguucacagacuauuuacaaucuugcauuuagaagagucucagaaaaagagagagcaccauu

SEQ ID NO: 10128 - RNA, 95 nt, Human
gcucauucggaagccaaaaccaguggacuccugugggcuggauuggcacugcuguccauucaggguggggcacuggccuggcucacguggugggu

SEQ ID NO: 10129 - RNA, 90 nt, Human; identical to SEQ ID NO: 6402

SEQ ID NO: 10130 - RNA, 61 nt, Human; identical to SEQ ID NO: 6403

SEQ ID NO: 10131 - RNA, 69 nt, Human; identical to SEQ ID NO: 6404

SEQ ID NO: 10132 - RNA, 93 nt, Human
agccuccagucccaagcaagccuccaggcccugaguguucugaugccugaaggguagucauaggucccgagguggagucggggguggagugcu

SEQ ID NO: 10133 - RNA, 62 nt, Human; identical to SEQ ID NO: 3436

SEQ ID NO: 10134 - RNA, 61 nt, Human
aacagagcacuguacuuuuuuuuuuuuuuuuuuuuuuuaagagacaggguauugcucuguu

SEQ ID NO: 10135 - RNA, 79 nt, Human
cagaagccucugaugcuuuccccuggcagguccaucuuucugaucuaauccugggggugcauccauugucagaggucug

SEQ ID NO: 10136 - RNA, 95 nt, Human
gcagcccaacauccuuucucuggggagaagagcaaaugcaugcaaugcaauguauuuucuuuucaaaaagaggaaggcuucuuugggccaaaugc

SEQ ID NO: 10137 - RNA, 69 nt, Human; identical to SEQ ID NO: 2697

SEQ ID NO: 10138 - RNA, 86 nt, Human; identical to SEQ ID NO: 2698

SEQ ID NO: 10139 - RNA, 96 nt, Human
gaucuugagggcuguugucuauacuucucgugguuccacacccaugaacgaacuugggggcucugcgaggggggcgagaugaugacccuuuugguc

SEQ ID NO: 10140 - RNA, 60 nt, Human
gccaucacgccacaguuucccggaggggccauccacagucuucuggguggcagugauggc

SEQ ID NO: 10141 - RNA, 90 nt, Human
gggcccaggcuucuuccuuggugguggagacccccguugacucacgaacguuuuucgggccgggucucggccgccggauugggagggucc

SEQ ID NO: 10142 - RNA, 60 nt, Human
ccgugguccgguuucgcguccccguuggggucccgagggggguucggaggcgucuggcgg

SEQ ID NO: 10143 - RNA, 64 nt, Human
gcaugcugaugaucuugaggcugugucuacucucauggucgcacccugaggaacugcggcucgc

SEQ ID NO: 10144 - RNA, 78 nt, Human
aggucauuuuauauguccauaccuagaagacagugcaauacuuugagagcaccugggucuacaggacauauugcaucu

SEQ ID NO: 10145 - RNA, 65 nt, Human
ucaucuacuaaaguacaacaggaauucuucugaagcagauuauucuagucuuaugcuagagauga

SEQ ID NO: 10146 - RNA, 75 nt, Human
uguagcaugaaucaaauguauuuauuaauagcacuuaugacuauagaauauaauuggcauaugauucauauuaca

SEQ ID NO: 10147 - RNA, 87 nt, Human
ucuaucuggucuuugcaagcagucuucagguuaaagauacuucuaacagguuacaguacauuuccucuguauguaaauucagauggg

SEQ ID NO: 10148 - RNA, 64 nt, Human
uuuaguuuguuucuguacuuuuaaauuccaacuuaaaauuaugagguuucagaaauauauugaa

SEQ ID NO: 10149 - RNA, 89 nt, Human
gcuugaugacagacaguuucccucuccauuacucuccugggaauucugauucucugacggugguauagaccucuccuggcuguucaagu

SEQ ID NO: 10150 - RNA, 69 nt, Human
uugccaaaugcaucaaagguauuauauggucagaggauaauugugcacuaugucgccuuuggguagcaa

SEQ ID NO: 10151 - RNA, 71 nt, Human
ugcauucaaaguuaucgguauuaccagcuaucauuguuuugggguuucucugcuaauucuauuggcaugca

SEQ ID NO: 10152 - RNA, 105 nt, Human
guucucacguaaccuguaacauaagcauuucccaaguugcuauuaucuguuaauaacagugguuugauuaauuggauuggcuguguggauguggaacggaagagc

SEQ ID NO: 10153 - RNA, 70 nt, Human
uuuuuguuuuuaaaauguuuuauuauaaaaguaauauaugaucuuuauagaaaaauaaagaaaauaaaaa

SEQ ID NO: 10154 - RNA, 64 nt, Human; identical to SEQ ID NO: 6321

SEQ ID NO: 10155 - RNA, 78 nt, Human
uccuagguuuucuuauggcagcugacagcgugggcaaggcugcccacauguaccucgccacaacaggaagggcugaga

SEQ ID NO: 10156 - RNA, 106 nt, Human; identical to SEQ ID NO: 6411

SEQ ID NO: 10157 - RNA, 77 nt, Human; identical to SEQ ID NO: 2332

SEQ ID NO: 10158 - RNA, 80 nt, Human; identical to SEQ ID NO: 367

SEQ ID NO: 10159 - RNA, 71 nt, Human
uguguguguguguacaguguguauauauauacauacauacauauauauauacacacacacacacacacaca

SEQ ID NO: 10160 - RNA, 77 nt, Human
agagcaagaugaacagaaucuguauucucaaagagcacauagccaaacccuuugccgaugccugucauuuugucucu

SEQ ID NO: 10161 - RNA, 64 nt, Human
agaugaggucucagaugcgagaucaacucuaauacgaaauccaucugcaaucugggccccauuu

SEQ ID NO: 10162 - RNA, 68 nt, Human
uuaaauuuuucuuuauuaacagaacgcaugacucugaguuuucuccccaugaguucagaauuauuuaa

SEQ ID NO: 10163 - RNA, 104 nt, Human
gugcacagccccacaaccaggucagcgaugaagguaucuucagucucccccgaaccgaugaagacaccauugacgccccaaccauuggccugggcagcuugcac

SEQ ID NO: 10164 - RNA, 60 nt, Human
ugcacgccugaagagacucggucacggagccaaucuggguugacuuuugagcaggaggca

SEQ ID NO: 10165 - RNA, 60 nt, Human
cccucuuggugacccccccaucuggaguuaaggcuccaagcagcaagugacagaggaggg

SEQ ID NO: 10166 - RNA, 63 nt, Human
cugugaaaauauagaaaaacuccuuacuguaauuacugggaaccacaaaguuaauuuuuacag

SEQ ID NO: 10167 - RNA, 64 nt, Human
gccauuuuaagcaauaaaaauuggcaugugggugcaugccuguaaucccugcuacuuaggaggc

SEQ ID NO: 10168 - RNA, 71 nt, Human
gagucuaaagguuggaguguggggguggugggggaucccccaccugggucuggacugcaugaggaagacuc

SEQ ID NO: 10169 - RNA, 60 nt, Human
gcagcgcggagccugggcggcggcuuuucuccgaaggugcagacgcccggcccgugcugc

SEQ ID NO: 10170 - RNA, 87 nt, Human
gucgguggggcggggacgcgagguguggauggggggucgccuugaccucugccucagccaguagcgcagucucggccucgccguuac

SEQ ID NO: 10171 - RNA, 63 nt, Human
gaaauuucagaccuuugacaucagugugguugugcugauugccagguucauaauugugauuuc

SEQ ID NO: 10172 - RNA, 66 nt, Human
gccuugcacacucauuacauuuguaagguuucucuccaguaugaauuuuccgaugucgugcaaggu

SEQ ID NO: 10173 - RNA, 63 nt, Human
guugcauuuguaguuucuaucccauaugaauuguccaauguugugcuagguaugaaaugcgac

SEQ ID NO: 10174 - RNA, 90 nt, Human
aagguguuugucaguuguuucauaaaccagauugaggaggacaaacugcucugccaauuucuggauuucuuuauuuucagcaaacacuuu

SEQ ID NO: 10175 - RNA, 78 nt, Human
aagucucaaggccugacagacagaagggcuuggagauuuuuuuucuuuacaauucagucuucagcaacuugagagcuu

SEQ ID NO: 10176 - RNA, 73 nt, Human
gacugugaggagggugcuaucgaggaaaucagcuugaaccacagucgcuguaccucugcaccccuggaaaguc

SEQ ID NO: 10177 - RNA, 77 nt, Human
gcauguaggggguccggcaugggcguccuggcacuugacgcuuaccucguccguagucuggugggccucuguagugc

SEQ ID NO: 10178 - RNA, 61 nt, Human
aagaauuaaacuaaugagaaccgaggcaggcggacugacucagauuuuaauuuugauuuuu

SEQ ID NO: 10179 - RNA, 72 nt, Human
auagguaucacuacuacauuuuacauaaaagggaaguaucaauaaacuuuagaaaguaguaaauucaccugu

SEQ ID NO: 10180 - RNA, 72 nt, Human; identical to SEQ ID NO: 4169

SEQ ID NO: 10181 - RNA, 129 nt, Human
cacacccagcuaauucuucuauuuuugguagagaugggguuucaccauguuggccaggcuggucucaaacuccugaacucaagugaucuucccgccucagccucccaaagugcugggauuacaggugug

SEQ ID NO: 10182 - RNA, 119 nt, Human
gcaaggcgaggggucauugggauuuaccagguuuagaggcugcccgucccccuggaugcucagcaggcagaacccagaaggguagcccacacagagccugucccugagcaccgccaggc

SEQ ID NO: 10183 - RNA, 104 nt, Human
ggugaaauagauuaugaagcaaugugugaagcuuucggauggcuuaaugggagcagaucugagaaauauguucgcaauucgugcugaucaugauuuguaguacc

SEQ ID NO: 10184 - RNA, 72 nt, Human
guaccaggaagacuucaugaaagcagucagaaaaaguggugauucuagaaggcuggagucuaaauuggguac

SEQ ID NO: 10185 - RNA, 82 nt, Human
caaagugcagcuggccaugcagaccuacgagaugguggauaaaccacauucgaaggcuugaugcagaccuggcgcgcuugug

SEQ ID NO: 10186 - RNA, 62 nt, Human
cugcagaguacaucuccacggugaagacgcugucuccagaccagcgcguggagcgccugcag

SEQ ID NO: 10187 - RNA, 73 nt, Human
caugggaaagcgggaccaccagaaggagugaugaucaacgaucucaugauaaaucuggaugcucgcucucaug

SEQ ID NO: 10188 - RNA, 89 nt, Human
gguagcaucgagucucugcgaacauuccuuuuaaccuaugucuuacaaaggcccaaccuucaaaaguauguucgggaacagauucuacu

SEQ ID NO: 10189 - RNA, 60 nt, Human
cccggaggccaaagcagaugcugcaccagaggcuggucagaacccgggagggccugcggg

SEQ ID NO: 10190 - RNA, 71 nt, Human
ugggguccucaugagcaagugcggggugcuggaggucagcagcugccugggcugggaggcaaggacaccca

SEQ ID NO: 10191 - RNA, 86 nt, Human
aggaacgauucacaggacaaacaaacccaauuuuuaagaaguuuauuugaaacucuuccuggucgaguccagugugaaauguuacu

SEQ ID NO: 10192 - RNA, 75 nt, Human
gcugcuguacgacauguuugugaauuucccagaccagccggugguguggagagaaaucagcauuauuacaucagc

SEQ ID NO: 10193 - RNA, 112 nt, Human
ggccgcuucgggcuggcggcuggagagcgcucgggucaugucugcccagggggacugcgaguuccuggugcagcgagcccgggaguuggugccgcaagaccugugggcagcc

SEQ ID NO: 10194 - RNA, 66 nt, Human; identical to SEQ ID NO: 3294

SEQ ID NO: 10195 - RNA, 71 nt, Human; identical to SEQ ID NO: 3295

SEQ ID NO: 10196 - RNA, 76 nt, Human
aucuguaaaugggauucguaauccuugcagugcuugguaggggacaaagaggauucauucaaacccuaggacagau

SEQ ID NO: 10197 - RNA, 97 nt, Human
gaggaagggagcuggggcuucgaggggaccugcacauucaguccugugcugggugcuggagacucgucccuccccacugcccccucugcccauccuc

SEQ ID NO: 10198 - RNA, 61 nt, Human
ggccagcugaucgcucccuccuagccccagagggguggcugggcagggccaugucacggcu

SEQ ID NO: 10199 - RNA, 80 nt, Human
gcucugagcaggcagcagggagcagcucuggugacgcuucaugugguagccucacucuccauucucugccccucucgugc

SEQ ID NO: 10200 - RNA, 78 nt, Human
agcggaagauggagaaccgugauuaccgggaugcacaggaguuugcugcugauguacggcuuauguucuccaacugcu

SEQ ID NO: 10201 - RNA, 65 nt, Human
gaugaaccacuagaaccagggccuuuaccagucucuacugccaugcccccuggcuuggucaaauc

SEQ ID NO: 10202 - RNA, 69 nt, Human
gcuauaaguacaaucccccagaucacgauguuguggcaauggcacgaaagcuacaggauguauuugagu

SEQ ID NO: 10203 - RNA, 67 nt, Human
accaucccauauauauaaccauauccauauauauauauauauauaucccacauauauaugggauggu

SEQ ID NO: 10204 - RNA, 94 nt, Human
cauguauauguauguguguguguauauauguguauauauguauacacacacacacauauauauauauauauacacacacacacauauauauaug

SEQ ID NO: 10205 - RNA, 72 nt, Human
ugucagguuucaauguucuuggaccucagggccuucguccucuccaaucuaaaugcagagagacauuugaca

SEQ ID NO: 10206 - RNA, 63 nt, Human
uuuuuuuuuuuuuugcaagaaccggucacuuaucaguaaccauuuuuauuuaaaaagaugaaa

SEQ ID NO: 10207 - RNA, 69 nt, Human
cccgcccagggcaggccagucucgugggccugggccugggcauggacauggcccagcucugagggcggg

SEQ ID NO: 10208 - RNA, 60 nt, Human
gagaggcgugugucccagugccuccaguucacaagggagccugggucgacaugcucuuuc

SEQ ID NO: 10209 - RNA, 71 nt, Human
guggagccagcccaguaguacguaacguggcauggucuuccacgcaaccgggcgacugcugggugauucac

SEQ ID NO: 10210 - RNA, 65 nt, Human
uggugaguggggcucaaacaaaacauaagggaagagacugagacaaaugugggcccuccugauca

SEQ ID NO: 10211 - RNA, 60 nt, Human
gccgugcgcgggccucggacccucagagaggcgaggguucgaagggcacgaguucgaggc

SEQ ID NO: 10212 - RNA, 61 nt, Human
guaacuuagagaaauagccacauucaaugcacuuaaugaaauccuguuuucuuuggaguac

SEQ ID NO: 10213 - RNA, 93 nt, Human
uagcauaaacacagcuaaacauaguguuaaacacugauagcaucaguaccuguucuaauugcaucaguguuuaccucucagucuagcaugcua

SEQ ID NO: 10214 - RNA, 85 nt, Human
cagugguauuuguggcguaucuggcgcuugucaguguggggcccaggccugaugagccaccagcccagcacccgaaugccugcug

SEQ ID NO: 10215 - RNA, 68 nt, Human
ucagacugcgggucacguugagagccaacaccaugggcucgguuccggcugaaaacccgccaguguga

SEQ ID NO: 10216 - RNA, 106 nt, Human
gccaguucuuugugacccucgcccccacccaguggcuugacggcaaacacaccauuuuuggccgagugugucagggcauaggaauggugaaucgcgugggaauggu

SEQ ID NO: 10217 - RNA, 77 nt, Human
cuuggacucuuccgugucugcuacagagcaagugcgcacucagugucugcuauaacgcgucacuggagaaacccaag

SEQ ID NO: 10218 - RNA, 71 nt, Human
uuuuuucaugcauuacugcguuuauuucucucuaaaaccuuaugaaguaaaaacuaacuagcaaggggaaa

SEQ ID NO: 10219 - RNA, 92 nt, Human
aaaaguuauuuuauaaauaaagggaacuuccaggcuuucagucuuuaagaaaagcuaaggcuuguuuggcuuuuuguuuauuuuuagguuuu

SEQ ID NO: 10220 - RNA, 100 nt, Human
agccccagggcucgacgccugucccguuccuggucaaugagaccccaggcccaauaggcuuauaggccagugagcccaggccccuacaagcccugaagcu

SEQ ID NO: 10221 - RNA, 83 nt, Human
gcuauuuuugcuguuuggcagauggugaggggucacucuggcuguccucuggcuccuccuccugcagcggcagcuuggguggc

SEQ ID NO: 10222 - RNA, 74 nt, Human; identical to SEQ ID NO: 365

SEQ ID NO: 10223 - RNA, 102 nt, Human; identical to SEQ ID NO: 2172

SEQ ID NO: 10224 - RNA, 77 nt, Human; identical to SEQ ID NO: 3082

SEQ ID NO: 10225 - RNA, 80 nt, Human; identical to SEQ ID NO: 367

SEQ ID NO: 10226 - RNA, 64 nt, Human; identical to SEQ ID NO: 3889

SEQ ID NO: 10227 - RNA, 64 nt, Human; identical to SEQ ID NO: 3890

SEQ ID NO: 10228 - RNA, 69 nt, Human
uuugacuuuuuuuuuauuuggaaaagagacaguugaaucccuuuucuuuaccagcauaaggcagucagg

SEQ ID NO: 10229 - RNA, 83 nt, Human; identical to SEQ ID NO: 2490

SEQ ID NO: 10230 - RNA, 81 nt, Human
gaugccuugcagggugagccggcgcucugcagcuugguccucacacaccagcgggccuccggaaucacccuggcacgcauc

SEQ ID NO: 10231 - RNA, 74 nt, Human
gggacacaaucuugccuuccaugccccagccacucucucacugcggaaucaccaaggagggaaagaugaguccc

SEQ ID NO: 10232 - RNA, 84 nt, Human; identical to SEQ ID NO: 286

SEQ ID NO: 10233 - RNA, 64 nt, Human; identical to SEQ ID NO: 287

SEQ ID NO: 10234 - RNA, 89 nt, Human; identical to SEQ ID NO: 288

SEQ ID NO: 10235 - RNA, 71 nt, Human
gggguuauauuucuaagugauuuacaauuucuguuucuaaaauuguugggauuuagaaauguuucaauucc

SEQ ID NO: 10236 - RNA, 78 nt, Human
auaucccaaaugcugcuugcuucaaacaggcacccucggugcugccuccucugaggcuggcaguuccuuccuggauau

SEQ ID NO: 10237 - RNA, 67 nt, Human
gagcuggcuccugggcccacagcugugccugggaauaguccaggcugugccugcagaggagcugcuc

SEQ ID NO: 10238 - RNA, 75 nt, Human
caccugauuuuuaagcuuugacaccugcacauuuuaaguuuccaugucuaguauuuguacaaacuaaaugaggug

SEQ ID NO: 10239 - RNA, 69 nt, Human
cauuaaaguuaacugguccaacucugucauuuuacagaugaagaaaccaagacccugaaaaguuuaaug

SEQ ID NO: 10240 - RNA, 60 nt, Human; identical to SEQ ID NO: 7400

SEQ ID NO: 10241 - RNA, 62 nt, Human; identical to SEQ ID NO: 9119

SEQ ID NO: 10242 - RNA, 64 nt, Human; identical to SEQ ID NO: 8200

SEQ ID NO: 10243 - RNA, 66 nt, Human; identical to SEQ ID NO: 2189

SEQ ID NO: 10244 - RNA, 73 nt, Human; identical to SEQ ID NO: 9122

SEQ ID NO: 10245 - RNA, 62 nt, Human
cacgggccauacggagacuagcgaagguuugaaauucuucucuuccucagugaugacucgag

SEQ ID NO: 10246 - RNA, 67 nt, Human; identical to SEQ ID NO: 6606

SEQ ID NO: 10247 - RNA, 74 nt, Human; identical to SEQ ID NO: 365

SEQ ID NO: 10248 - RNA, 104 nt, Human
ugaaacagacugggccaauguccacaaagaauuccuggucagcaccaccgauguccaaaggugcaauaucaaggaagggcaggcgugauggcuuauuuguuuug

SEQ ID NO: 10249 - RNA, 77 nt, Human; identical to SEQ ID NO: 3082

SEQ ID NO: 10250 - RNA, 119 nt, Human
cucuuuagguauuagagccucuuagaugagguaucguuuacugcaaagaaaaaaaauuguuauaauuuugccauaaguuaugccuauuuagauggcuguauaacugguacuuugaagag

SEQ ID NO: 10251 - RNA, 106 nt, Human
aaauggaaggauucagcuuucaguuaaaaaagaagaagaagaaauggcaaagagaaaguuuuuucaaauuucuuucuuuuuuaauuuaaauugaguucauuuauuu

SEQ ID NO: 10252 - RNA, 63 nt, Human
auccuucuuuuucucuuuugcccacaauuuaagcaaguagaugugcaaaagaaauggaaggau

SEQ ID NO: 10253 - RNA, 94 nt, Human
guccucugccuccaccgccccgggaucuccuugcgcucgguccucuacguggagucaccuaugcagaggaauuccacggggcgggggcgaggac

SEQ ID NO: 10254 - RNA, 81 nt, Human
ugcgggggucuuuauggcagacaauccccggcugagcgcuuggccagaguuucugugaugcuagaaucuggacugccugcg

SEQ ID NO: 10255 - RNA, 84 nt, Human; identical to SEQ ID NO: 286

SEQ ID NO: 10256 - RNA, 89 nt, Human; identical to SEQ ID NO: 288

SEQ ID NO: 10257 - RNA, 94 nt, Human; identical to SEQ ID NO: 5398

SEQ ID NO: 10258 - RNA, 84 nt, Human
cauuuagaaaauuacuacaaaguaaaacaugugaggaauagaaauguuuuuuucaugaacauuuuguaccaauucaucauuaug

SEQ ID NO: 10259 - RNA, 66 nt, Human
gaauggaucuguuuuccaagagauucugagaaauuuuguauucagcaguuggaaagcucucuauuc

SEQ ID NO: 10260 - RNA, 81 nt, Human
aggucuggaggggccauggggcaguccugggugugggacaccgucgggguuugacccaggguugucuccccuccagagccu

SEQ ID NO: 10261 - RNA, 89 nt, Human
gagguggagugacugagaagagaaaaccaggucuuaagcgugagaaucgcggacaagaaguacuaccccagcucccaggacuccagcuc

SEQ ID NO: 10262 - RNA, 76 nt, Human
guuuucgcugugaacauucccuugaucucaucaaguucugagcgggucaauggggcaacacgguuagcgggagagc

SEQ ID NO: 10263 - RNA, 130 nt, Human
ccucuaagggguauaccuggcccggggcguggccaccacuggugucauacauugcgcguucauucuccuuggcaauuuggacaacaauacgugguggcauuucucuuguccacuggguaaccuuuuggug

SEQ ID NO: 10264 - RNA, 80 nt, Human
guagagaggguguuucaccauguuggccagguuggucucgaauuccugaccucaagugauccgcucgcucgccucucuac

SEQ ID NO: 10265 - RNA, 75 nt, Human
gaaacaaaugcuuccaggugaaaaaacugaucagcuauauagagucacucaguuuuuaauaaaggccauuuguuc

SEQ ID NO: 10266 - RNA, 75 nt, Human; identical to SEQ ID NO: 8223

SEQ ID NO: 10267 - RNA, 79 nt, Human; identical to SEQ ID NO: 8224

SEQ ID NO: 10268 - RNA, 81 nt, Human
gcugacuccuauggaaggccuaccaaaugaggaaauuucaggaauuugcuaaugcgugggaggauugaaaauguaggcagc

SEQ ID NO: 10269 - RNA, 79 nt, Human
cauuuguuucacuguguucaauuuugaguuuccuaacauccauucuacaggucaaucaaaauacaaaggcgugcaaaug

SEQ ID NO: 10270 - RNA, 66 nt, Human; identical to SEQ ID NO: 2266

SEQ ID NO: 10271 - RNA, 72 nt, Human; identical to SEQ ID NO: 5861

SEQ ID NO: 10272 - RNA, 99 nt, Human
augugcuuaaauaacgcugaauuauaauuagccacacaaauaaugagaguuuuauuuuuuuuuuucuggcucacuccaaaucagccuguuaagguauau

SEQ ID NO: 10273 - RNA, 75 nt, Human
gacauacuacaaagagauuuuuuuaaguuuaaaaaaaguuuggaucuuuuggauuucuuuuuuuuuuuuuugguc

SEQ ID NO: 10274 - RNA, 72 nt, Human; identical to SEQ ID NO: 5861

SEQ ID NO: 10275 - RNA, 67 nt, Human
gggcacauggauugggauaaauucaucagcagcuuggucaggcugggaugccaauguucucgugccc

SEQ ID NO: 10276 - RNA, 74 nt, Human
cacugccaccacuuggccuggcguggccacguucuuacucaucuggagccaggcaaggcaaagugaugguggug

SEQ ID NO: 10277 - RNA, 62 nt, Human
ggcgcuccgaggccgcugguguggugcgaggacggcagcccgggccgaggcgucaggucgcc

SEQ ID NO: 10278 - RNA, 61 nt, Human
gugugugcguccggacucuggagcccagcgggaagcuagcaccagccugggccgcacacac

SEQ ID NO: 10279 - RNA, 61 nt, Human
cuaauuuaguuggcccuucuuucagcacuucuauuaacauuucucugaaauagcuauuuag

SEQ ID NO: 10280 - RNA, 64 nt, Human
uuguauaacuuuuauucuuagauuauauuacaaugugucagucucaaguauaacuacaauauaa

SEQ ID NO: 10281 - RNA, 70 nt, Human
ucaggccaucugggcguauacgugcaagucacagggaaugcgauggcuuggcuugggcucagaggccuga

SEQ ID NO: 10282 - RNA, 76 nt, Human
aagcuuuccugacaagaaaaaaacauguuugguaaacaaaagaucauguguauuucuccuugcagguuaaaaguuu

SEQ ID NO: 10283 - RNA, 101 nt, Human
gaucacuacucuuggaaucaaagauaaauccaaauacugcauaucagaaacaacaggcaaguaguuguuuaucuuuaauuugaaagacuucaucugugauc

SEQ ID NO: 10284 - RNA, 71 nt, Human
ucaggccaucugggcguauacgugcaagucacagggaaugccgauggcuuggcuugggcucagaggccuga

SEQ ID NO: 10285 - RNA, 96 nt, Human
gccccccuacuuccgcuuccugacacucauggccuuccacgucuuccuccaagagaagguggaccuggcagugguggaggugggcauuggcggggc

SEQ ID NO: 10286 - RNA, 69 nt, Human
gucagguuaaaaggcuuugcacagcuauuguucacauuuacagccuuggcucaaacccuggucucugac

SEQ ID NO: 10287 - RNA, 92 nt, Human
gacuguccgucaagcaggcagcggggauguagcucucucugcccugggcaagaauagcacuucccguuaaaagccagcagccggcgucaguc

SEQ ID NO: 10288 - RNA, 85 nt, Human
ucucucucagguuuuaaauguugcaaauguaauuguggcucaucaaugcagcuaucaaugcaacuuuauauuccuugaggggaga

SEQ ID NO: 10289 - RNA, 88 nt, Human
aaaucuagccagagcccuucacugccaugauagcuggggcuucaccagucugucuacuguggugaucuguagacuucugguuguauuu

SEQ ID NO: 10290 - RNA, 70 nt, Human
uaauaaaaauuuaauucacauucaauuaaaaaaaaaacaauaugaguaaugugaaauugaguuuuuguua

SEQ ID NO: 10291 - RNA, 61 nt, Human
caggcagguuugccaagcugcugugcgccuccagcucugcguccauugguugaaaugccug

SEQ ID NO: 10292 - RNA, 65 nt, Human
gcugugacuugaaccagccagggcccuuuccccuacccuuggaaggaagauggugaucagacagc

SEQ ID NO: 10293 - RNA, 65 nt, Human
uccccagguauuaauuuucaaugguacuaauaacuuaucccaaugguaaaaaaugcagccgggga

SEQ ID NO: 10294 - RNA, 62 nt, Human
gccgcaggagggcucggccgugcugcgggaaaugcucucggucggccuaggcuuucugcugc

SEQ ID NO: 10295 - RNA, 77 nt, Human
gcgcgagggacgugcgcgaugcgcucggucugaggguuacccgggcucucggcccguuccucgcguucccucgacgu

SEQ ID NO: 10296 - RNA, 78 nt, Human
gacuuaauauuuuuuccuugauaagguaauuuuaguuucccccacuuugauaacuguagcaaugaacuuuuagaaguc

SEQ ID NO: 10297 - RNA, 62 nt, Human
uuuauuuuuuuaauacaauagcugccagcaauacacugguguugauguuccagagaaaagaa

SEQ ID NO: 10298 - RNA, 76 nt, Human
acccgugccggccagcgcaccagguucaaggcauuuguugcuaucggggacuacaaugugccacgucggucugggu

SEQ ID NO: 10299 - RNA, 98 nt, Human
ccgcguguggcuuccgcggagguuucggcaguggcauccggggccggggucgcuggccguggacgguggccuggggccgaggccugcggagcucgcgg

SEQ ID NO: 10300 - RNA, 68 nt, Human
cucccuuccuuuuuucaccguguucaggauaaauuaucuugguuuuguuucuggagggaaaagggcag

SEQ ID NO: 10301 - RNA, 69 nt, Human
ggcccugacuugaaucucaaucacauuucugcacacaguaccuuggacagaagucaugaugauggggcc

SEQ ID NO: 10302 - RNA, 93 nt, Human
auaccauauugagauuauaauauucuugcagucuaaauuuaagcuauuguuuaaacuuuugcauuguaaaaagaaaaguucaugugugugugu

SEQ ID NO: 10303 - RNA, 75 nt, Human
cuuuauuaaagugaaacuacuacuucaauauaugcagaaaacaacauauuggauauuuucaccucugggauaaag

SEQ ID NO: 10304 - RNA, 103 nt, Human
guguaucauagauaauccuaaaacaauauaacaaucauuuaacccaaagucaaugcccuuuaaauggaauguaucuuugucauuauuuggcuaugaaauauac

SEQ ID NO: 10305 - RNA, 81 nt, Human
uggugugacuuuauuuggggucuguuuggaucuuucuauauuccccuggucccuuuguuuauccuacauaugucuucacua

SEQ ID NO: 10306 - RNA, 65 nt, Human
gaaaauugccuuaauaucauuguuggcuaaauagaauaggggacaugcauauuaaggaaaagguc

SEQ ID NO: 10307 - RNA, 95 nt, Human; identical to SEQ ID NO: 3838

SEQ ID NO: 10308 - RNA, 61 nt, Human
ugcuccuucaucagcuuugccaacucucggagcucggaggacacgaagcaaaugaugagua

SEQ ID NO: 10309 - RNA, 63 nt, Human
aguuucucagaaugcuucuuucuugucuuuaugugaagauauuuccuuuuccauucagaaacu

SEQ ID NO: 10310 - RNA, 85 nt, Human
ggcccugggcguggcugucauaggcaucgacgaggggcaguuuuucccugacaucguggaguucugcgaggccauggccaacgcc

SEQ ID NO: 10311 - RNA, 63 nt, Human
cccagguugugggggcagcccugaauuuuuuuuuaagcaaauucccccuuuccccaaccuggg

SEQ ID NO: 10312 - RNA, 76 nt, Human
ugcuacgaggaggucaaggaccgcugcacccuggcagagaagcuggggggcagugccgucaucucccuggagggca

SEQ ID NO: 10313 - RNA, 75 nt, Human
aaguucauucuagcaguaauuuaucagaggucacucauccucuauuaaauuauuaaucuaaucaccuuugaacuu

SEQ ID NO: 10314 - RNA, 93 nt, Human; identical to SEQ ID NO: 6421

SEQ ID NO: 10315 - RNA, 68 nt, Human
guuuugcaauucuucugcacuuucccaccaagcugggaucugggugagucuagagauauuugugaaau

SEQ ID NO: 10316 - RNA, 65 nt, Human
gcuggaucucccccgcuguugaucauacucaaaguguuucaccgcccugccuagaucuauaccgc

SEQ ID NO: 10317 - RNA, 79 nt, Human
uguauaaaccgcgcaccauacagacagcacauuaccccacccccguauuuccacacuuauaugugcacggacuuguaua

SEQ ID NO: 10318 - RNA, 69 nt, Human
ggagggacuuccagcuccuagucguguggguugcaggccguccugucccagggcugggggacuuccuuc

SEQ ID NO: 10319 - RNA, 60 nt, Human
aagacuccuuuucagaagcagccuguugcugauugccuccuuccuucuguaaggcuucuu

SEQ ID NO: 10320 - RNA, 66 nt, Human
ucuguuacaagacuuucaauaucagccuucaugcucuuaauuugauuuucuuuuucuucuaacuga

SEQ ID NO: 10321 - RNA, 75 nt, Human
cuuggggcuucacuguggcugacaagaguauuauuacuaccuacaccucguacagcacacaaccagaaccuagag

SEQ ID NO: 10322 - RNA, 66 nt, Human
gucuuuguccacuuucaguuugcaauaccacuaggagagaaaaggucuggaugaagggaugaagau

SEQ ID NO: 10323 - RNA, 66 nt, Human
gugaacucugcccuaaaguccuccuuccagcauuuggaagcauuccaccaugaggagcagguuuac

SEQ ID NO: 10324 - RNA, 63 nt, Human
caauuugaaauuuuacaggaaccaagauucaagcuccuuaggugcuacuguauuuuuauguug

SEQ ID NO: 10325 - RNA, 81 nt, Human
uuuuuuuuuuuuuuuuuuuacgaccaaacaucacaaacacuuuauuugugguuaccaguuauuuuuacagagaauaaagaa

SEQ ID NO: 10326 - RNA, 67 nt, Human
auacuuuaaaauuauaggaauaaucucagugaauucagugaaugugcaaccuaaaucaaccaaguau

SEQ ID NO: 10327 - RNA, 62 nt, Human
aagaacuugauuuugcuagcagaaauuuuuaccccauucucaagcuucuauaaacaguucuu

SEQ ID NO: 10328 - RNA, 77 nt, Human
uguucugagaaagcaggcaaagucccugccuacaggguucccccacguaccugcaggacaccgucugucuuacggca

SEQ ID NO: 10329 - RNA, 61 nt, Human
gugcccuggggcuuuccaaaggcaccucgcaugccuguuuggagccugucagccccagcac

SEQ ID NO: 10330 - RNA, 61 nt, Human
guguuugauacuaguuuguuuauguacccccaccaggggaaaaacaaaacccaccaaaaac

SEQ ID NO: 10331 - RNA, 68 nt, Human
accgcgucggacgucgaaguguuuaaggcggguuucccaggccuggaaugcuaaaccaacggcccggu

SEQ ID NO: 10332 - RNA, 68 nt, Human; identical to SEQ ID NO: 6567

SEQ ID NO: 10333 - RNA, 81 nt, Human
aguaguucuuugaugugaaaggggcagcacagucauuuaaacuugauccaaccucuuugcaucuuacaaaguuaaacagcu

SEQ ID NO: 10334 - RNA, 84 nt, Human
auccuuaaacacugugcugaagacuacugugacucuguccuuuuuagacucaacauacauggucucaucaucccuauaauggau

SEQ ID NO: 10335 - RNA, 66 nt, Human
cccacagcggcgucugugucuuucagcuccagaggagguucccuguggcuaaagaggaccuguggg

SEQ ID NO: 10336 - RNA, 87 nt, Human
accaguaagggguucccugacaccuacacaaaauguggaaauaaagaguuuggcaauugguagaguaaaucccuuuggaaagcuggu

SEQ ID NO: 10337 - RNA, 68 nt, Human
cuucuacccugacuucucccgccuccgagaguccuuuggggaccccaagggagagagucagguggagg

SEQ ID NO: 10338 - RNA, 61 nt, Human
gagccugaagacauacagcacuucaccuggagaagccuacugcgcgagauucucugggcuc

SEQ ID NO: 10339 - RNA, 66 nt, Human
gcugguacgccugcagguaccgguccggaauucccgggucgacccacgcguccgacagcaaccagc

SEQ ID NO: 10340 - RNA, 77 nt, Human
auugcuuucaguuucuucuuuagguucuugauuuuuuugucuaucucaggguccccagaaauugacugagagacagu

SEQ ID NO: 10341 - RNA, 89 nt, Human
cguggugugcucuguggggcaggaguaggugccaaaucuggacucuugucacuucuugcuuccugcuuugcagcuuucuuagcuucaug

SEQ ID NO: 10342 - RNA, 65 nt, Human
uaucguuuccugauugugguuucauauucugaggugguuccucuucaugcaauuuggaauuggug

SEQ ID NO: 10343 - RNA, 63 nt, Human
gguauuuuaaauauacaguaggaacauuuauuuuaacacuucuaaaagauauuucuccaugcc

SEQ ID NO: 10344 - RNA, 80 nt, Human
agguaucugugacucuugggccucugcucuggugggaacuuacuucucuauagcccacugagccccgagacagagaaccu

SEQ ID NO: 10345 - RNA, 62 nt, Human
cuccaggcuuucagaauaauuguuuguucccaaauuccuguucccugaucaacuuccuggag

SEQ ID NO: 10346 - RNA, 67 nt, Human
gaguggguggcagugagguggcccagacccucgccauggagacuuugcauccaccgccucccagcuc

SEQ ID NO: 10347 - RNA, 67 nt, Human
uggaaguuaugacagacuucgaacuacauguacuuuguaaacaguaccgacacauuaauaacuuuca

SEQ ID NO: 10348 - RNA, 61 nt, Human
ucuuccagaagugugauugggaauaaauaugccucuccuuuuuauauuauuucuaggaaga

SEQ ID NO: 10349 - RNA, 76 nt, Human; identical to SEQ ID NO: 5154

SEQ ID NO: 10350 - RNA, 74 nt, Human
gagcggcacgaggguuacggcagcacuuuuauuuuuccuuacacaaugacguguugcuggggccuaauguucuc

SEQ ID NO: 10351 - RNA, 79 nt, Human
uagcaugaggugugugcauuugccaggggcaaauuucuauucucaauuaacccaugcagcaaaugcuacgcaucugcug

SEQ ID NO: 10352 - RNA, 64 nt, Human; identical to SEQ ID NO: 1642

SEQ ID NO: 10353 - RNA, 68 nt, Human
cgggcgugguggugcgugccuguagucccagcuacucaggaggcugaggcaugaaucgcuugaaccug

SEQ ID NO: 10354 - RNA, 102 nt, Human
cuucauggcacugaacuugucguggucggggccaauccaugagccccaggugccaaggcuggugggagagcccccgaccacgacaaguucagugccaugaag

SEQ ID NO: 10355 - RNA, 66 nt, Human
gugauucuggcacaggaaauggucuccaaaaucucaaaauaucagaucucuaccuugucaagucau

SEQ ID NO: 10356 - RNA, 67 nt, Human; identical to SEQ ID NO: 3353

SEQ ID NO: 10357 - RNA, 64 nt, Human
ccuaaucgacuucuuccaugcgagacgcauccucaucgcccucgagaggggggaucucaucagg

SEQ ID NO: 10358 - RNA, 65 nt, Human
uucacaaugggguggucaagggugaucuucagguggcuuuugggcaucauauaccccauggugga

SEQ ID NO: 10359 - RNA, 84 nt, Human; identical to SEQ ID NO: 286

SEQ ID NO: 10360 - RNA, 64 nt, Human; identical to SEQ ID NO: 287

SEQ ID NO: 10361 - RNA, 103 nt, Human; identical to SEQ ID NO: 294

SEQ ID NO: 10362 - RNA, 65 nt, Human
gcaaacuugcaugccaugugacccgugugcaaauccauacaagggcauugccggcgcuuauuugc

SEQ ID NO: 10363 - RNA, 60 nt, Human
ccugggugcuguggaagguaguagauucuggacaagggaugauggugugguacugccagg

SEQ ID NO: 10364 - RNA, 75 nt, Human
gcgggcaggugagaguguacugucuggugaucuggggcuacuguagaaggugguagauuucucacucaggccugc

SEQ ID NO: 10365 - RNA, 63 nt, Human
ccagacaaccuuagccaaaccauuuacccaaauaaaguauaggcgauagaaauugaaaccugg

SEQ ID NO: 10366 - RNA, 65 nt, Human
ccaaccaaaaggaggccccaugugggcuggaaaacagcccccagaaagggucaauugaagggugg

SEQ ID NO: 10367 - RNA, 93 nt, Human
ggcagagggcucuccuaauggguucacagugagauuucuuugaagaaaaagcuucaguugagcucaguaacaucuuagcgagaaccaagugcc

SEQ ID NO: 10368 - RNA, 60 nt, Human
uuggaaaagguucuagggcagggaaaaugcacccauuuccccuuuucccuuuuuuuccaa

SEQ ID NO: 10369 - RNA, 67 nt, Human
gcugugggcaaggucaucccugagcugaacgggaagcucacuggcaugggcuuucgugucccacugc

SEQ ID NO: 10370 - RNA, 61 nt, Human
agcucgccuucugguccagguucgggaagcgcucgcgggccgucaagccacgcggcgagcu

SEQ ID NO: 10371 - RNA, 91 nt, Human
gccaccaggcgguggucugugaugaaggucagggccacgcagggguagguucacagaggccaggagucgcagacggcaacuucuggugggc

SEQ ID NO: 10372 - RNA, 64 nt, Human
uuuuuuuuuucaauaaaggaaagcuuuaagaaaagggcacguauuccuggaauagguaagaaaa

SEQ ID NO: 10373 - RNA, 63 nt, Human
aucauguccaccccugcagauccuuggaaaagaaaauguuuauguugcaggguauugcauggu

SEQ ID NO: 10374 - RNA, 63 nt, Human
gcgggggagcagagaugauccgagccgcgccgccgccgcuguuccugcugcugcugcugcugc

SEQ ID NO: 10375 - RNA, 94 nt, Human
gucuacuuuggcuacuaccaugggcuucugggggaacagggcuauggccuucucuuccagaaaccacugggugguccucaaaaccaaagugggc

SEQ ID NO: 10376 - RNA, 62 nt, Human
ggccgaagcggacaggggaguauccuucgaaggugcaucucagccgcuagaagccuugagcc

SEQ ID NO: 10377 - RNA, 90 nt, Human
aucuuagccauucaugauagcuauaaacccgaauuccacagugaugacucugggguugaauuuauugagcuagauauugaugagccagau

SEQ ID NO: 10378 - RNA, 66 nt, Human
ccggguuccccccuguuaaccaccugggcaaaauuucacuucccuuccuaacagggaggggcgcgg

SEQ ID NO: 10379 - RNA, 61 nt, Human
acauaaaugggauggauaauuaucguauauaagaugugauucucuuuuuuauccuuaaugu

SEQ ID NO: 10380 - RNA, 76 nt, Human
gugugcauaaacuucuaucuccauguugguggccuauacgggcacccaugugaccaaggaacguugccuugcacac

SEQ ID NO: 10381 - RNA, 79 nt, Human
auguuaugaaaaagcaauagugugguccuggcuaugacaauccuauaaaagccagagaacacugugauuaagggaacau

SEQ ID NO: 10382 - RNA, 69 nt, Human
uggauaacaguauaauagcauuuacaauauuucacucuuuguucucuuaaugucuuauauaguuauuua

SEQ ID NO: 10383 - RNA, 70 nt, Human
caugguaaacugaccaauugcagugagucuuuauagcccucccugcuccuugcagucauuuauugccaug

SEQ ID NO: 10384 - RNA, 67 nt, Human
cuuuuaaaaucccaugccaaacugucacuuuuucccuuaaaaaguggauaaacccaucuuuugaaag

SEQ ID NO: 10385 - RNA, 62 nt, Human
gaagcacagaagcaaagcccaggcagaaccaugcuaaccuuacagcuuagccucuguccuuu

SEQ ID NO: 10386 - RNA, 60 nt, Human
uuaaaucugguuauaugugggacuucaacagcucaauuuuuccacaauuuccacuuuuaa

SEQ ID NO: 10387 - RNA, 66 nt, Human
auuuuuuuuggauaguuuaaaacauuuugaucacagauuucaacagaguuuuaggcugaaaaaaau

SEQ ID NO: 10388 - RNA, 97 nt, Human
ucuuccaaugacuguaaaucuuuuucuauucuguaguauuuuucugauucucagggcaugaaaacauuaugggaaaaaaaaggauuuucuacgaaga

SEQ ID NO: 10389 - RNA, 64 nt, Human
gaaggacauauacauaauuagccugagcuaggguugaggaagaaaauugaguugaagugccuuu

SEQ ID NO: 10390 - RNA, 62 nt, Human; identical to SEQ ID NO: 1277

SEQ ID NO: 10391 - RNA, 62 nt, Human; identical to SEQ ID NO: 4194

SEQ ID NO: 10392 - RNA, 67 nt, Human; identical to SEQ ID NO: 4195

SEQ ID NO: 10393 - RNA, 61 nt, Human
cccagugucaggaugguaauucuuauucuuucguucaguuaaguuuuucccuucaucuggg

SEQ ID NO: 10394 - RNA, 69 nt, Human
acccuuuccaacauuucuccaaaaguuauccuucucccaguuuaacugcuaaaaugccauugguagggu

SEQ ID NO: 10395 - RNA, 60 nt, Human
auucaucuguacuucaauaucuaguuuccauagcaacugagaugcaguuugcaggugggu

SEQ ID NO: 10396 - RNA, 78 nt, Human
cagaguauaugggggccucugccaccccccaggcugggacuggggccugugaccuugagaaccucaucucacauucug

SEQ ID NO: 10397 - RNA, 60 nt, Human
gggagggggcaggcacaugcuccucguagaacaagaguggguuucuucccugacccuccc

SEQ ID NO: 10398 - RNA, 70 nt, Human
ccaauggcacauggacugguguuagcaaggaagggacccuuuguuuagaacgggucagaugggccguggg

SEQ ID NO: 10399 - RNA, 70 nt, Human
cuggauuuucuuugguuggcaauauuuuuuauacaauuuuaaucuuguugcuuguuaucagucuguucag

SEQ ID NO: 10400 - RNA, 65 nt, Human
ggcugcacccagucauuuuggccuccauuguggacagcuacgagagacgcaacgagggugcugcc

SEQ ID NO: 10401 - RNA, 73 nt, Human
gucccggcggcggcccagccucaguuccagcgccaacgccagcaccggcugcggcuccgguucccgcugcggc

SEQ ID NO: 10402 - RNA, 85 nt, Human
gcgaccacaacuaccaagagcuacauccuuagagcgcucgggcagcugaugcucuuuguggauggaaugcugggggugguggcgc

SEQ ID NO: 10403 - RNA, 83 nt, Human
uccgugcuccaaguuuauaauugcuauaggaaauaaugcaguagcauuucugucaucauuuguuaugaauucaggagucuggg

SEQ ID NO: 10404 - RNA, 103 nt, Human
gauuuucaguacuguaguugcccuggacauugaguacaguucagccuuacucuguuuuuaaguaguuguguugucaauuucaugcuuuuaaguccugaugauc

SEQ ID NO: 10405 - RNA, 71 nt, Human
ggagaugggagaaaaaagauaccagggauaauuaaaauccacagcaguuucaucaguuuccucauccaucc

SEQ ID NO: 10406 - RNA, 82 nt, Human
cggguacucaggaggcugaggcaggaggaucauuugaauccgggagguguccucucuaccuuaguaggcacagaguacacug

SEQ ID NO: 10407 - RNA, 82 nt, Human
cuccaggccgggugugguggcucacacuuguaaucccagaacuuugggaggccaagacgagcagaucaccugaggccaggag

SEQ ID NO: 10408 - RNA, 77 nt, Human
ugcguagagguguuuguaguauucucugauggaaguuuguauuuccugugggauugguggugauauccccuuuauca

SEQ ID NO: 10409 - RNA, 75 nt, Human
gcauaauuugcuauaaaauguacuuauuggaauacuauuuauauaggagguaagagaacacuguggggaauaugc

SEQ ID NO: 10410 - RNA, 64 nt, Human
ggaaaggccaguuagcuauccaaccaccgucuaccccuacgcuucauccuggcuccuggauucc

SEQ ID NO: 10411 - RNA, 63 nt, Human
ggcaagggaguggugccuggguuuucugacaaaaucuauacucagaccaacauguccccugcc

SEQ ID NO: 10412 - RNA, 60 nt, Human
uuauugagguauaauuuacauaccauaaaacccacagguuguaaguuuacauuuuaauga

SEQ ID NO: 10413 - RNA, 82 nt, Human
cagcuggaagauggacgcaccgugucuggcuaucgaauccguaaugaugguacuauguagcuggugugcugacuuguaguug

SEQ ID NO: 10414 - RNA, 78 nt, Human
cggaaaacagcuggaagauggucguacccugucugacuacaacauccagaaagaguccaccuugcagcuggugcuccg

SEQ ID NO: 10415 - RNA, 84 nt, Human
gcccggccgugcacccagccugcggcagagagggcggcgucccccacaaagccugccaggcugagcccuugcaauggccguggc

SEQ ID NO: 10416 - RNA, 79 nt, Human
aguuuauuacauuuggaaaaucuacuguacagggaaaaacccauuggauuaaguagaguuuugccaaaagcaaaagacu

SEQ ID NO: 10417 - RNA, 64 nt, Human
ccuggccuuggauggaggcgcucagagccagcucugcccaagacaccccucgucaauuuccagg

SEQ ID NO: 10418 - RNA, 60 nt, Human
cagugagagggggcucugcuccaggcucagggaaugggguugggggccccaccucaucug

SEQ ID NO: 10419 - RNA, 86 nt, Human; identical to SEQ ID NO: 3434

SEQ ID NO: 10420 - RNA, 62 nt, Human
uauguauauauuuaacacacacaucuuaaaaauagcuccagaugaccgaacaguauugcaua

SEQ ID NO: 10421 - RNA, 66 nt, Human; identical to SEQ ID NO: 98

SEQ ID NO: 10422 - RNA, 70 nt, Human
gggcagugcacagaugacagcccucccucacugcccugugugcuggcuaccgcauguccugugccagccu

SEQ ID NO: 10423 - RNA, 102 nt, Human
augucaauucuauuuacugcaggagccuaguaccuggcacagaguagguacucauaauauuuacucaggccgggugugguggcucaugccuuguuauugcau

SEQ ID NO: 10424 - RNA, 69 nt, Human
gcuuuguuucuguugaguguggguuuucuuaauaucugccuccuccacucaguauaaguuccacaaggc

SEQ ID NO: 10425 - RNA, 112 nt, Human
uccaguuuuauccugacugauucuuuucuguuguccuuuguuuucuuucuccucuucuagaucucuaaaugaucuuugggggugggagugagagaacgacgucaguccugga

SEQ ID NO: 10426 - RNA, 65 nt, Human
guucaaucagggguuucucacucucuuccuucagggagagcccagcgaguuuccuucguaugagc

SEQ ID NO: 10427 - RNA, 81 nt, Human
ucugagauguacagucauccuggauccucuuuagcuccuccucaaaugaugcuaaauauuucagguacacagcaucucggg

SEQ ID NO: 10428 - RNA, 78 nt, Human; identical to SEQ ID NO: 566

SEQ ID NO: 10429 - RNA, 95 nt, Human
uucuuucucuugugcuuauucuucuugggagugguguaagacuucuucuuccuuuucuuaagcaccaccacgaagucucaacacaagaugaagag

SEQ ID NO: 10430 - RNA, 67 nt, Human
cagcaucugguccuuuugcugugacccaccccaucccggagcuggucgggucuggcuggaugugcug

SEQ ID NO: 10431 - RNA, 66 nt, Human
gagugccucgcucgguaacugcuugguccugaacauucucucguuucaggaacugaugagguucuc

SEQ ID NO: 10432 - RNA, 74 nt, Human; identical to SEQ ID NO: 4231

SEQ ID NO: 10433 - RNA, 60 nt, Human
aggaccuugugguagcagggaccaugcuucauucguggcuguguccccaucugagggccu

SEQ ID NO: 10434 - RNA, 69 nt, Human
ggcucaacaguuuucucgggggaguucagugaccuuuugguggccacccucuguucucaccugugaguu

SEQ ID NO: 10435 - RNA, 73 nt, Human
ucacuuacauagccccacucagcugcuucggaaagcgugacgaagcaguaguccucaguguguguguaaguga

SEQ ID NO: 10436 - RNA, 111 nt, Human
gucgucguuguagucuuuuugcccaaggcuguuguguuuuuagaggugcuaucuccaguuccuugcacuccuguuaacaagcaccucagcgagagcagcagcagcgauagc

SEQ ID NO: 10437 - RNA, 62 nt, Human
caccucuuaucaagucagcacacaccuuuuccaaggauuuuacguugcggcuuguuagggug

SEQ ID NO: 10438 - RNA, 71 nt, Human
gcgcgcgggcuuccugaccgacuuguuccucggcgagagcgaacagcggugagucaggagcaggagcgugc

SEQ ID NO: 10439 - RNA, 62 nt, Human
guagugauucucaaagucuugguacgcauuccaacugguccuuucacuuugagauucuuuac

SEQ ID NO: 10440 - RNA, 65 nt, Human
gggccccucugcggauggagccccaggugcaacagggcccauggucaucuguggagggacagccc

SEQ ID NO: 10441 - RNA, 65 nt, Human
gaacuagaagaagaaugggucaaacugccaacaagugcuccuagaccuacucgauuucuucguuc

SEQ ID NO: 10442 - RNA, 65 nt, Human
ucuuugagucucgacagaacgcuguucuauaugaagccaaacuaauugcuguggagauuuacaga

SEQ ID NO: 10443 - RNA, 75 nt, Human
gaagauggucgugaauuaggcuacgcuuacagagcccuuucuggagacguggccuuaaauauacacagagucuuc

SEQ ID NO: 10444 - RNA, 74 nt, Human; identical to SEQ ID NO: 1690

SEQ ID NO: 10445 - RNA, 70 nt, Human; identical to SEQ ID NO: 6639

SEQ ID NO: 10446 - RNA, 92 nt, Human
guaugcacagacagaguugggacaugggacauaucuucagggccuggagacugaagccaccuaugacgcagccacccaggaguuugugauac

SEQ ID NO: 10447 - RNA, 99 nt, Human
uggagacuugggacggucagccacccaugcccugguccaggcccagcugaucugcucaggagccaggcggggcaugcacgcuuuuauugugccaauccg

SEQ ID NO: 10448 - RNA, 89 nt, Human
agcuauauccuccuuuugaaaaaugguaaauaacucuuaaaacuucugagaguugcauuuuuauuuuuuagaagguuaaauguguaguu

SEQ ID NO: 10449 - RNA, 84 nt, Human; identical to SEQ ID NO: 286

SEQ ID NO: 10450 - RNA, 89 nt, Human; identical to SEQ ID NO: 288

SEQ ID NO: 10451 - RNA, 94 nt, Human; identical to SEQ ID NO: 5398

SEQ ID NO: 10452 - RNA, 82 nt, Human
ugcacaugauauuaugaacaauacaaaugcauuauuuuuaucauuaauaguuuaaucauuaauuaucucauaagucaaugca

SEQ ID NO: 10453 - RNA, 78 nt, Human
uggauuuuuauggacucuuuauuaggguauuaagauauugaaaauaauacacguaaaccacaaaagaguagcauucca

SEQ ID NO: 10454 - RNA, 64 nt, Human; identical to SEQ ID NO: 7818

SEQ ID NO: 10455 - RNA, 83 nt, Human
uagccucaaaauuuuaauauaaaaaaguguaugcauauauacacacacaaacaugcacaaauuauuuaacuuauuuuggguua

SEQ ID NO: 10456 - RNA, 74 nt, Human
ucacaggucuguaaguuaaggcuaugguugcucuauuaccauaugccaaucaauacuuuaacugcauucuguga

SEQ ID NO: 10457 - RNA, 67 nt, Human
uuuugaaugacaauauauggaguagcaaaaacaguuaaaaugacuucucuuuaagaguuauucagaa

SEQ ID NO: 10458 - RNA, 67 nt, Human
gggaggcuggagccaggugagugugacaggucacagauggcucucaggccaccugccuucagcuccu

SEQ ID NO: 10459 - RNA, 94 nt, Human
uucggguucuagccagaagcccuggggccugucucuugccucuucuuguagcaugagacacccuuggcagguguggcugugaagauguaucgaa

SEQ ID NO: 10460 - RNA, 83 nt, Human
guaacagcaguggaaauaagaaucguccuuucauuuccugaguuggccucaggaaaggaggaugaaauuagauuugcaguuac

SEQ ID NO: 10461 - RNA, 85 nt, Human
ugcuaguuguauauaaaauuuaaucucaccgaauguacaguuuucaaauuucacguguauauuaaggaacugaugcaucugagca

SEQ ID NO: 10462 - RNA, 70 nt, Human
gcagaugaguuacuagaaagcuuccuggaggguuuucacgaugaaagcacccaggugcagcucacucugc

SEQ ID NO: 10463 - RNA, 64 nt, Human
aacaugguaauuacuaaauuaugaggcuuugcuuauaguuugcuuuuaaguagaaaaacauguu

SEQ ID NO: 10464 - RNA, 103 nt, Human
aagacuaagguuucgagagcauuccuacucacaguaguaagaaaucugucagauaggaaucuaacuauugauagugagauugugaaagcaaccuuaaaguuuu

SEQ ID NO: 10465 - RNA, 76 nt, Human
cuuaaaguuuugaagaagacugaugagacuaggugcuuugcuuccuuucaucagguaucuuucuguggcauuugag

SEQ ID NO: 10466 - RNA, 100 nt, Human
uggccauggcaucuccucaugagaaaacuucugagugcagcauggccuggggugacauguugggcuucagcaaggugcuuccagguagauguggugguca

SEQ ID NO: 10467 - RNA, 72 nt, Human
cuguucaccuugucacagggcuaugucuuggcucuuggcuaagacuuuaagggcccacacagcagagaacag

SEQ ID NO: 10468 - RNA, 93 nt, Human
ggagaggcaccacucagaggcaggcccggcugcacaaguccucccugcugggccuggucacugcagcugccccucccuggcuggcuccucucu

SEQ ID NO: 10469 - RNA, 71 nt, Human
uuuuuuuuuuuuuucacacucagaauuuaauuucuccaaaaguuguuucuguguuugauucauguagaaaa

SEQ ID NO: 10470 - RNA, 120 nt, Human
gaaagucuacagucugugaauauaccaauuccccuuuacaacugaugcagaucauuaugaaauacuggaaggcauaaccuacaauuuaggaauugguguggcugccacuguuacgcucuc

SEQ ID NO: 10471 - RNA, 82 nt, Human
aauucgagguugccugaaaagcuggguguccuugcuccuuuuccuggaagccaauauacccaguuuuuacucaguuugaauu

SEQ ID NO: 10472 - RNA, 73 nt, Human
gacagaacucugcuuccagcgcugugugccagcuugcaccaccgagcucuggacgcugaggaggaggccuguc

SEQ ID NO: 10473 - RNA, 65 nt, Human
accacgccuggcuaauuuuugaauuuuugguagagacgggguuuuaccguguuggccaggcuggu

SEQ ID NO: 10474 - RNA, 71 nt, Human
gaccucaagugaucugcaugccucaccucccagaguguugggaauacaggcaugagccaccacacccgguc

SEQ ID NO: 10475 - RNA, 60 nt, Human
gcuccgccccucucuggguucaggcgauucucuugccucagccuuccgaguagcuggagc

SEQ ID NO: 10476 - RNA, 71 nt, Human
cauguugaaugcacaaaagcaacagguccaguuuaugcuaaaggaauuugaagcacgcaggcaacagcaug

SEQ ID NO: 10477 - RNA, 80 nt, Human
cugagguuacuguggcucggcaaaggcagcuagaggaaucugcaagucaucuggccugcuuccaggcugcagaaucccag

SEQ ID NO: 10478 - RNA, 66 nt, Human
aaggauaccaggaugguuaccaggaugacuaccgucaucaugagaguuaucaccauggauacccuu

SEQ ID NO: 10479 - RNA, 68 nt, Human
cacacggcuggguaccgggguccgggaauucuucgggaugucaaauccugguauccuuccccaaugug

SEQ ID NO: 10480 - RNA, 70 nt, Human
gagcagaaauauguaaccuuagacucagccaguuuccucugcagcugcuaaaacuacauguggccagcuc

SEQ ID NO: 10481 - RNA, 70 nt, Human
gaggaguuuccuaaaaguucauaacagugccauugucuuuauaugaacauagacuagagaaaccguccuc

SEQ ID NO: 10482 - RNA, 66 nt, Human
uccaucauaauucuaaucuaacaauggaagauuugcccauuuacacuuuugagacuuuuuggugga

SEQ ID NO: 10483 - RNA, 61 nt, Human
caaauuauauucuggaaauugcaguauuaagugccuuuuccucuccaugaauauuaaauug

SEQ ID NO: 10484 - RNA, 88 nt, Human
uuaagacccacucuguuuaaaaauauauauucuauguaugcguauauggaauugaaaugucauuauuguaaccuagaaagugccuuga

SEQ ID NO: 10485 - RNA, 63 nt, Human
cagagagauaguauauauuuuaacaacuugaaauucauagguguuaauagauuccucuuuuug

SEQ ID NO: 10486 - RNA, 84 nt, Human
gaugauuauguguucaguuguuuuaccuauuagacuguaaacuccuuauaaucuaguaaaggcauagauuauauuuuauucauc

SEQ ID NO: 10487 - RNA, 75 nt, Human
cgcgagcgaaagacgccagccgagucagagcggacauacucgcucccguccggcccggguccccaaccccucgug

SEQ ID NO: 10488 - RNA, 64 nt, Human
gccagagaauccagaaccacaugaguccgcugaagaacucgcucuggaacaccugggaucuggu

SEQ ID NO: 10489 - RNA, 91 nt, Human
uaacccuacaauugauaaaucuuauaccauuuuagguauuuaaugagauacuuagaaauacuaagaaaaaaaaucaguauucaaaggguua

SEQ ID NO: 10490 - RNA, 94 nt, Human
uagaaaggaaucuccuaaaccucaaaaagaacauuuauguuagccuacugcuaacaucaugcuuaaugggagaaaacuggaugguuccuuccua

SEQ ID NO: 10491 - RNA, 78 nt, Human
cuguguaauuuuuggccuaaauagcccugugaaguagauauuauuccaacuuuacagguuagaaaauuugaggcacag

SEQ ID NO: 10492 - RNA, 73 nt, Human
uuuagauuucuggugguaaauauaaaugaguuucauuuuaaguaaacucauuuugugggauuugagauuuaaa

SEQ ID NO: 10493 - RNA, 65 nt, Human; identical to SEQ ID NO: 2198

SEQ ID NO: 10494 - RNA, 99 nt, Human
ugcugcucuuugucagaauaugucagaaaacaaaacaaaaaaguuuuaaaugcuaaagauuuuaaaaauuaguucucugaaauuucuguaaagccagua

SEQ ID NO: 10495 - RNA, 80 nt, Human
auagcccaaaggcucugcaguauucccuccaauggccaaggauuccgugugucaucugcaggagugaguaggccugcugu

SEQ ID NO: 10496 - RNA, 98 nt, Human
ucucccaaucaugucucauuacguaaagacagguacaugcaaacacuuuuaguuuacaucccucauucacaguguaaagcaggaaauggugugggaga

SEQ ID NO: 10497 - RNA, 70 nt, Human
uguguugaugcauuuucacuucuguggucauaggaaauggacuggucuaaagagagugaggcgcaacaca

SEQ ID NO: 10498 - RNA, 80 nt, Human; identical to SEQ ID NO: 10495

SEQ ID NO: 10499 - RNA, 85 nt, Human
guccuauaguguugaugcauuuucacuucugugguccuaggaaauggacuggucuaaagagagugaggcacaacacaagcagggc

SEQ ID NO: 10500 - RNA, 98 nt, Human
ucucccaaucaugucucuuuacguaaagacaguaacaugcaaacacuuuuaguuuacaucccucauucacaguguaaagcaggaaauggugugggaga

SEQ ID NO: 10501 - RNA, 62 nt, Human; identical to SEQ ID NO: 3062

SEQ ID NO: 10502 - RNA, 72 nt, Human
uccaaauauguuauauuaaaaccuuguuccuuggcaauuucacuaagcagcuggauguaaucuguauuugga

SEQ ID NO: 10503 - RNA, 66 nt, Human
cucaucgucguggugauugugggagcccugcucaugggucuccacaugagccagaaacacacggag

SEQ ID NO: 10504 - RNA, 72 nt, Human
ugguucuggagaugagcauuggggcgccggaagcccagcaacgccuggcccugagugagcaccugguuacca

SEQ ID NO: 10505 - RNA, 84 nt, Human; identical to SEQ ID NO: 286

SEQ ID NO: 10506 - RNA, 67 nt, Human
agcaggagcauccaugaaauugaacgcaggaccuuccaugauccuggcacagauuucagcuccuacu

SEQ ID NO: 10507 - RNA, 65 nt, Human
ugaugucuuugaccugagguauagaguuguccucuaaaaucuuugcauaaggcauagggacauca

SEQ ID NO: 10508 - RNA, 84 nt, Human
ugcagugccagcaaguauuucaaauaaauuucaacgacuugauauucaaguccaaacuaaauauuuaauguuuucuuuauugca

SEQ ID NO: 10509 - RNA, 68 nt, Human
uguacaaaaauaccugcuguugcuuuagaaaucguuuuccuuuaugaauagucaggucuugcaguaca

SEQ ID NO: 10510 - RNA, 80 nt, Human; identical to SEQ ID NO: 8216

SEQ ID NO: 10511 - RNA, 131 nt, Human; identical to SEQ ID NO: 7801

SEQ ID NO: 10512 - RNA, 63 nt, Human
uuuuuuuuuuuuuuuugaaaguugaauauuuuauuauuuacacauauaaagugagaaugaaaa

SEQ ID NO: 10513 - RNA, 60 nt, Human; identical to SEQ ID NO: 7400

SEQ ID NO: 10514 - RNA, 62 nt, Human; identical to SEQ ID NO: 9119

SEQ ID NO: 10515 - RNA, 64 nt, Human; identical to SEQ ID NO: 8200

SEQ ID NO: 10516 - RNA, 66 nt, Human; identical to SEQ ID NO: 2189

SEQ ID NO: 10517 - RNA, 73 nt, Human; identical to SEQ ID NO: 9122

SEQ ID NO: 10518 - RNA, 101 nt, Human
uucaucccucaguagcugcgaccaaauaagguguaguacuuggcaggguucuugccacagacacauuuggcuccaggcugcaguucacagagugguuugaa

SEQ ID NO: 10519 - RNA, 80 nt, Human
cauccccaaggagaacuucaguugcuugacucguuggaucacaacgagcuaaagcucaaauugcucuuaaacuuggugug

SEQ ID NO: 10520 - RNA, 94 nt, Human; identical to SEQ ID NO: 6534

SEQ ID NO: 10521 - RNA, 60 nt, Human; identical to SEQ ID NO: 6535

SEQ ID NO: 10522 - RNA, 62 nt, Human
acagucuucagggauacacuuguccaggggcuuaaugaggcuggugaugaccuugaagcugu

SEQ ID NO: 10523 - RNA, 64 nt, Human
ggcauuugcgggcucauuugcugucaagcuuuuucaaagcaugggauggcaggagaaagaugcc

SEQ ID NO: 10524 - RNA, 68 nt, Human
guauuggagaaggcauuugaagaugaaaugaaaaagcuucuccucuuccuuaaagccuuuuccgaaac

SEQ ID NO: 10525 - RNA, 88 nt, Human
uuggcgaugcugucggggauucugcugggcaacugggcacccugcccgccaccauccucaccagucucuucaccgacagcuuagucaa

SEQ ID NO: 10526 - RNA, 73 nt, Human
aggcuuuguccccuguccuuuggcgaaggaguggaguuugaccccuuaccaccaaaggaaguaagguacaccu

SEQ ID NO: 10527 - RNA, 92 nt, Human
gcggcacgagggcagcggccccggcccgcgucugcgccccucgcugucccgcgaccccggcgcgggugccucgggccccccucgcgcgccgc

SEQ ID NO: 10528 - RNA, 69 nt, Human
ggcugagccuacaggaugugcccgagcucguggacgcgaagaagaagggcgacggcguccuggacagcc

SEQ ID NO: 10529 - RNA, 72 nt, Human; identical to SEQ ID NO: 2728

SEQ ID NO: 10530 - RNA, 130 nt, Human; identical to SEQ ID NO: 2385

SEQ ID NO: 10531 - RNA, 80 nt, Human
gccgacaaggagcgccuggccauccugggcauccacaaugagguguccaagauuguccagaccuaccacgucaauauggc

SEQ ID NO: 10532 - RNA, 74 nt, Human
ggcaccaaccccuacacaaccaucacgccucaggagaucaauggcaaaugggaccacgugcggcagugggugcc

SEQ ID NO: 10533 - RNA, 75 nt, Human
ggggguggaguucgaugugcugccugccuuugaugcccugggaucaguugacuggcggcuauaaaccuaaccccc

SEQ ID NO: 10534 - RNA, 62 nt, Human
ggggcucauuugcaggggggagccaaaagggucaucaucucugcccccucugcugaugcccc

SEQ ID NO: 10535 - RNA, 60 nt, Human; identical to SEQ ID NO: 890

SEQ ID NO: 10536 - RNA, 74 nt, Human
ugagcucaagcaaucugcccaccuuagccucccaaagugcugggauuacaggcgugagcaccaugccgagccca

SEQ ID NO: 10537 - RNA, 89 nt, Human; identical to SEQ ID NO: 288

SEQ ID NO: 10538 - RNA, 61 nt, Human; identical to SEQ ID NO: 776

SEQ ID NO: 10539 - RNA, 64 nt, Human
aaugcaauccuaagagcuaauguggacuuuucuuuuuccaugaaaugucuuuaaaggaugaauu

SEQ ID NO: 10540 - RNA, 130 nt, Human
aaguggacaaggccgagcaggagcuccgcguggcccagacagaguuugaccggcaagcagaagugacccgucucuugcuggagggaaucaguagcacucacgugaaccaccugcgcugccuccacgaguu

SEQ ID NO: 10541 - RNA, 78 nt, Human
gcccugcuggcugaugagcucaucacugucuacagccugccuggcauggacccugacuggcucauuggcgagagaggc

SEQ ID NO: 10542 - RNA, 68 nt, Human
guuggugacacguuguuccaagugggggagaaucacccccauucugucccugccccuagucaccuaac

SEQ ID NO: 10543 - RNA, 72 nt, Human
gagaaccuagagaggaucgggacggcuugugauuucucucccgagacaacgaucucucucuucuccuaucuc

SEQ ID NO: 10544 - RNA, 63 nt, Human
gggcgacgaccccaaaaagaggagggccccagaauuuaacuccuuuuuaccauuuuacagucc

SEQ ID NO: 10545 - RNA, 65 nt, Human
aggacaugugggguuucuugcucacccccacucuugugggacgcggccugugcccugauuuuccu

SEQ ID NO: 10546 - RNA, 103 nt, Human
gcaauacucccaccccagccucucgaguagcugggauuacaggcgugugccaccaugccuggcuaauuuuuguauuuguagagaugggguuuugccauguugc

SEQ ID NO: 10547 - RNA, 62 nt, Human
ucccaaaguacugggaucacgggcaugagcuaucaucacgcccggccccaucucuuugaggg

SEQ ID NO: 10548 - RNA, 70 nt, Human
agcuaagcaauaggguaggccuaauuccacccguuaguaccuuaaaaaauacacccuauaugugagagcu

SEQ ID NO: 10549 - RNA, 75 nt, Human
ggaagggugacaggaauagagaugugacauuaacuaguuggaacuaaaugcauacaugauuuugguuacucuucu

SEQ ID NO: 10550 - RNA, 71 nt, Human
uuccccggcaagguuuuauguacauauguagucuuucuuuauccuacuuuaauacucauuuugcuacagaa

SEQ ID NO: 10551 - RNA, 77 nt, Human
aggaauauaggcagauguacagaacugaaauucgaauggcgaggauggcaagaaaagcuggcaacuucuauguaccu

SEQ ID NO: 10552 - RNA, 60 nt, Human
gaacccaaaugggcguugucaucagaaucagagguaucaauggagugagcccaaagguuc

SEQ ID NO: 10553 - RNA, 63 nt, Human
uuguacaugaccuaaagaguauauucccagaagcugcuggucagacacauuuagggaugacag

SEQ ID NO: 10554 - RNA, 91 nt, Human
gcgucaguugcggggagcccuucggagaugaggguuuccacgagcgcgagggccgccccuacugccgccgggacuuccugcagcuguucgc

SEQ ID NO: 10555 - RNA, 66 nt, Human
cauuuacauuucuaaguaguuguauaguagaagcaggaagcucuuauugcuuauuuggucguaaug

SEQ ID NO: 10556 - RNA, 91 nt, Human
uaauuuguaaaaugucuaaaaguuuaaugauacuucugauguuucggaacagucauuucaccuacuauuucugaauauauuuugcaaauug

SEQ ID NO: 10557 - RNA, 62 nt, Human
uauuuauuuccuauguguuaauaugaagaucagaaauuauuuuuugcacuuuggcauaaaua

SEQ ID NO: 10558 - RNA, 68 nt, Human
gagaugggauuucaccauguuggccaggccugucuugaacucuugaccucaagugauccacccaccuc

SEQ ID NO: 10559 - RNA, 75 nt, Human
ucagugugugguauuugaaauuuaauaaguuauuuccaucgugggaauuuuuagacuuaaagauagcaucacuga

SEQ ID NO: 10560 - RNA, 78 nt, Human
acucuuccgcgccucgaggaacccgaucagcuguugccaacauugcccuggcugaaggccuuacucgaguggaggagu

SEQ ID NO: 10561 - RNA, 64 nt, Human
aggagcgccucuaugccuaccaccugucccgugccgccugguacggaggccuggcugugcugcu

SEQ ID NO: 10562 - RNA, 66 nt, Human
auugcuccuaacuggaagaucucacuuuccccuugugggguaggaaccgaugccagugggagggau

SEQ ID NO: 10563 - RNA, 60 nt, Human
cguuuugguugcauuucauuuuuggagaacuuaauuaacgugagauuggcaauugaaaug

SEQ ID NO: 10564 - RNA, 75 nt, Human
gaaaaaaauguagaaccauuuggaaaaaugaaauuuaguaguuccaaguuucaaagaaaugucaacauuuuauuc

SEQ ID NO: 10565 - RNA, 102 nt, Human
gugguuaaguuaaugaauaguuuuuguuuuaucagaauggcaacagacagaaguacuuuguagagauugacuuccuaagcuacuuaagacaacuugcaccac

SEQ ID NO: 10566 - RNA, 67 nt, Human; identical to SEQ ID NO: 7380

SEQ ID NO: 10567 - RNA, 73 nt, Human; identical to SEQ ID NO: 7381

SEQ ID NO: 10568 - RNA, 61 nt, Human
agaagauuccuguaucuggcuauguagcugcuggcuauauguguccuguggcauuccuucu

SEQ ID NO: 10569 - RNA, 67 nt, Human
cagauuugucaaacuccuucaguucagauugcagagguaacugaucugaagaaugugcuuguauuug

SEQ ID NO: 10570 - RNA, 68 nt, Human
ugcugcuccauaagcaccauaucuuccacaauacuaucuuguguaaguucaucaucaaaaggaaagua

SEQ ID NO: 10571 - RNA, 68 nt, Human
gccgaagcucugugcccugggugugcagugauaucaaacacaugcuccuagguagacggaaaauuggu

SEQ ID NO: 10572 - RNA, 66 nt, Human
gugcuggucaugugagggucucugugagugacuggaggucuggacaggacccacgaggagacagac

SEQ ID NO: 10573 - RNA, 68 nt, Human
ucuuaguauaguguuaggucagacacggcuaccaacgauuccaccuguccugacccauuucuauagga

SEQ ID NO: 10574 - RNA, 90 nt, Human
aagcgcaggaagaguccuggggggaccgcggcgggcgggagaccguuggcgccggcgcuuccucuuaaucccggcuuguucccgacgcuu

SEQ ID NO: 10575 - RNA, 89 nt, Human
ggcgucaugucucccgaugggcgcugcuccguggcgcgcucuguugaggcgccggccggcuggcgcaguccugugggcggcguggcgcu

SEQ ID NO: 10576 - RNA, 66 nt, Human
acuagaacgacugagcgugagaguugagagucccugcuguguacuagaacgacugagcgugagagu

SEQ ID NO: 10577 - RNA, 68 nt, Human
agucccugcuguguacuagaacgacugagcgugagaguugagagucccugcuguguacuagaacgacu

SEQ ID NO: 10578 - RNA, 66 nt, Human
cccugcuguguacuagaacgacugagcgugagaguugagagucccugcuguguacuagaacgaggg

SEQ ID NO: 10579 - RNA, 81 nt, Human
cuccaggcaugggaacuuaacagaugagguuaagaaccguagacaguuuaaaauccauuuauguugcuuucacagcuggag

SEQ ID NO: 10580 - RNA, 77 nt, Human
gccaguacacaguucauucuaccugugagaguauaagaguugaaauauuuuuuaauaccagugaacugguauugcgc

SEQ ID NO: 10581 - RNA, 81 nt, Human
ggggcugagcaaugauagaauuucuagggcugggaagcagaacccuuaagucucugcccucccaauucuauuacucucccu

SEQ ID NO: 10582 - RNA, 60 nt, Human
uucuuugccucuccauucccucagacuaaaaggcuccugaguugaccaagagaaagagaa

SEQ ID NO: 10583 - RNA, 106 nt, Human
ucguaucccucgguccggcggcggcggcggcggcggcgguagcggaggagacgguuucaggccuccggugcggcugcaaugcugagcucccgggccgaggcggcga

SEQ ID NO: 10584 - RNA, 77 nt, Human
ucucucccauccccuugacacucuucccuucaguuuccaucuugaacuucgugguuuuaagcacagaccuggggaga

SEQ ID NO: 10585 - RNA, 82 nt, Human
ggaccggaagccuggaacuuggagagcugaggcaacagagaggcugcgugcagaagugagccaucaucgcaggaagccggcc

SEQ ID NO: 10586 - RNA, 77 nt, Human
cuguacuguauuuauguugcuauggggcaaaagagauccacuguugcccaguugggugaagagacuuacagaugcag

SEQ ID NO: 10587 - RNA, 75 nt, Human; identical to SEQ ID NO: 74

SEQ ID NO: 10588 - RNA, 87 nt, Human; identical to SEQ ID NO: 76

SEQ ID NO: 10589 - RNA, 71 nt, Human; identical to SEQ ID NO: 77

SEQ ID NO: 10590 - RNA, 77 nt, Human
acaucugacaucaccugcagcuuccuuauaacaugcccacugggcagagaggaugagaggcaggagagcaccagugu

SEQ ID NO: 10591 - RNA, 71 nt, Human
ucacaacuggggacauggcccaaauugcacuagcauuuacucugugccaaggcaaccagcuuccagaguga

SEQ ID NO: 10592 - RNA, 78 nt, Human; identical to SEQ ID NO: 99

SEQ ID NO: 10593 - RNA, 65 nt, Human; identical to SEQ ID NO: 247

SEQ ID NO: 10594 - RNA, 80 nt, Human; identical to SEQ ID NO: 100

SEQ ID NO: 10595 - RNA, 84 nt, Human
caugggauggggaaguacggcaggugucuaagcaugccuucagccucaagcaguuggacaacccugcucgaaucccucccugug

SEQ ID NO: 10596 - RNA, 81 nt, Human
ggcuuuuucuuagugccucugugcauuugggugauguucuauuuacauggccuguguaaaucuccauugggaagucaugcc

SEQ ID NO: 10597 - RNA, 65 nt, Human
cgcccaccgagcgcugcaaccgccgcaagugccgcaaggcccugcgccaguucuucgaccgggug

SEQ ID NO: 10598 - RNA, 80 nt, Human
ucagggacaggggcagacccgguggucagcgccaagagcaaccauugccuggaugcugccaaggccugcaaccugaauga

SEQ ID NO: 10599 - RNA, 102 nt, Human
uggagcauccaccuggggcugaccgagggugaggaguucuacgaagccucccccuaugagccggugaccucccgccucucggacaucuucaggcuugcuuca

SEQ ID NO: 10600 - RNA, 75 nt, Human
guaguuauguauuagaggcagaaggccauagggaugaccccaccuggcuuuuggucuucauuuuugcauaucagc

SEQ ID NO: 10601 - RNA, 69 nt, Human
ucugugucuccaccugguucgugaacagcucgggucuuccagaauccagccagccaguccaagugcaga

SEQ ID NO: 10602 - RNA, 89 nt, Human
agggucuugcucuguagcccaggcugaagugcaguggugggcacgaucauagcucacugcagccuugaacucugggcuucagugauccu

SEQ ID NO: 10603 - RNA, 75 nt, Human; identical to SEQ ID NO: 74

SEQ ID NO: 10604 - RNA, 67 nt, Human; identical to SEQ ID NO: 836

SEQ ID NO: 10605 - RNA, 87 nt, Human
guccuugaacuuggaaccugacaauguugguguugucguguuuggaaaugauuaacuaauuaaggaaggagauauagugaagaggac

SEQ ID NO: 10606 - RNA, 71 nt, Human; identical to SEQ ID NO: 77

SEQ ID NO: 10607 - RNA, 92 nt, Human
uccaggucggcuggagucagggcaccuucuaaccuuacacuuuuaaaggacacaugguccuugguuucuuccagcuucaaucgagccugaga

SEQ ID NO: 10608 - RNA, 60 nt, Human
cugugagaucugcaaugucaaggucaacucggagguccaacugaaacagcacaucuccag

SEQ ID NO: 10609 - RNA, 70 nt, Human
ugugcucugugcaagguggcugugaacucccugucccagcuugaggcacauaacaaagguacuaagcaca

SEQ ID NO: 10610 - RNA, 69 nt, Human
gggguggagcaggugggcgacaugaucgaucgccuuuucgacaccucugccugagccugcugcuagccc

SEQ ID NO: 10611 - RNA, 63 nt, Human
cuuguuguuggcugaauugaucccuagggcacacuuugcaauuuuacuugagccacugacuag

SEQ ID NO: 10612 - RNA, 69 nt, Human
acacuuuauuuucaacuagaaaggugcaaacauguaacuuuuuggucacacucucaacaaauaaacugu

SEQ ID NO: 10613 - RNA, 88 nt, Human; identical to SEQ ID NO: 4936

SEQ ID NO: 10614 - RNA, 115 nt, Human
gggcugccuggggcgugcaaaagcugcugugugagcaaaacgcugccgugaagacauuccaggcggcuuccaggaagcggcuguaugugcugacacgcauguggacaggcagucu

SEQ ID NO: 10615 - RNA, 72 nt, Human
ucaagacugguguuuccuagagcuuuccauuggcaaaugcugccuccuggaacugagggacaaagguuuuga

SEQ ID NO: 10616 - RNA, 74 nt, Human; identical to SEQ ID NO: 6796

SEQ ID NO: 10617 - RNA, 91 nt, Human
uguaguacuuaaaauucaacauauguaacguuauucucaaacuucauuaaaauaauaaauauacaaguuauguuuaauaugaguaacugca

SEQ ID NO: 10618 - RNA, 84 nt, Human; identical to SEQ ID NO: 286

SEQ ID NO: 10619 - RNA, 89 nt, Human; identical to SEQ ID NO: 288

SEQ ID NO: 10620 - RNA, 94 nt, Human; identical to SEQ ID NO: 5398

SEQ ID NO: 10621 - RNA, 68 nt, Human; identical to SEQ ID NO: 6247

SEQ ID NO: 10622 - RNA, 88 nt, Human; identical to SEQ ID NO: 2733

SEQ ID NO: 10623 - RNA, 68 nt, Human; identical to SEQ ID NO: 2734

SEQ ID NO: 10624 - RNA, 75 nt, Human; identical to SEQ ID NO: 5842

SEQ ID NO: 10625 - RNA, 92 nt, Human
cgacucacuauagggaaagcugguacgccugcagguaccgguccggaauucccgggucgacccacgcguccgguuuuccugcgcaggagccg

SEQ ID NO: 10626 - RNA, 91 nt, Human
gguucgguaccacacgaaggugcgcgccggccgcggcuucagccuggaggagcucaggguggccggcauucacaagaagguggcccggacc

SEQ ID NO: 10627 - RNA, 65 nt, Human
cuuguagcuccacuccggggaacggacucgccgggacugacaguugccggaagugaggcugcggg

SEQ ID NO: 10628 - RNA, 65 nt, Human
gcguccggggagaagagcggagcgugugagcaguacugcggccuccucuccucuccuaaccucgc

SEQ ID NO: 10629 - RNA, 69 nt, Human
guccaggccauguauaucuggaucgaugguacuggagaaggacugcgcugcaagacccggacccuggac

SEQ ID NO: 10630 - RNA, 63 nt, Human
caaaagaaaaccuagguucuuuuuauuacucuauucuaguaagaacagaaagguuaucuuuug

SEQ ID NO: 10631 - RNA, 83 nt, Human
cacagcaggcuuuuacggugauugcugauugggaagaucucuuucucccuuacggcgucauucaugucaaggcccggucugug

SEQ ID NO: 10632 - RNA, 65 nt, Human
ccuaguucuaaagccugauuuaguauugucagugggcaacaggcauuaggcucuaucaagcuggg

SEQ ID NO: 10633 - RNA, 77 nt, Human; identical to SEQ ID NO: 3082

SEQ ID NO: 10634 - RNA, 80 nt, Human; identical to SEQ ID NO: 367

SEQ ID NO: 10635 - RNA, 102 nt, Human; identical to SEQ ID NO: 2701

SEQ ID NO: 10636 - RNA, 69 nt, Human
augggccucuguucuaaacugaaguucuuuuaaugagaagauagagaacagauuagaaauacggcccau

SEQ ID NO: 10637 - RNA, 62 nt, Human
agaggaucccgguuuuacaauagucagaguuauucuguuuguuuaaaaaauaagaaaccucu

SEQ ID NO: 10638 - RNA, 63 nt, Human
gccuagucuuuuccauaaaaugaauaagaaguacauuugguggaguuugagaccagccugggc

SEQ ID NO: 10639 - RNA, 82 nt, Human
uuagagauguuggaaguuguuguuuuuccugucuaaugucuuguauaucauuaggaaguuguccagaaacuugcgucucuga

SEQ ID NO: 10640 - RNA, 91 nt, Human
gauuugaugauuauguugugauagaguuggcuuucugagucccauugauggcagugaaggcuauauuucagucaaaaacauccauuauauc

SEQ ID NO: 10641 - RNA, 69 nt, Human
cucacggaucuugcugaugagcagcgugcccaugccugagcccgugccgccgcccagcgagugcgugag

SEQ ID NO: 10642 - RNA, 73 nt, Human
ggagguggugaccccacucauggcggcggacaccaggugguugagguccccguaggugggcguugucagcuuc

SEQ ID NO: 10643 - RNA, 61 nt, Human
gcugccaaggggaugccgcacugcaggaggaccugggguggugcuauaccuucacagcagc

SEQ ID NO: 10644 - RNA, 68 nt, Human; identical to SEQ ID NO: 4262

SEQ ID NO: 10645 - RNA, 78 nt, Human; identical to SEQ ID NO: 2308

SEQ ID NO: 10646 - RNA, 66 nt, Human
guugagguggcugcugacccugggucucaucuccugaauuccuuaaccuccucaugccgccucggc

SEQ ID NO: 10647 - RNA, 75 nt, Human
cugaccuugcagcuucuccuucucuccagaccagcgauugccgguugaggaaaaacgcuugaagggcaaggacag

SEQ ID NO: 10648 - RNA, 70 nt, Human
cuucagguccucuuccuucugcaucagaauguccucagagucagaacaggauuaaagagagggccaggag

SEQ ID NO: 10649 - RNA, 61 nt, Human
gagacuguuucgaaacaccuguguuaggacccacccuacaccuacuggaucagaaugucuc

SEQ ID NO: 10650 - RNA, 66 nt, Human
agaggggccacggggcgcccauguacaaaacuacguguucccgccauagccccuuggauucccucu

SEQ ID NO: 10651 - RNA, 62 nt, Human
cuucucagaaaaccaaaccaaaggcagccaugaaaacccguguucuguacgugguugagaag

SEQ ID NO: 10652 - RNA, 75 nt, Human
accacguuuguuucgacgccggaccgcguaagagacgaugauguugggcacggaagguggagagggauucguggu

SEQ ID NO: 10653 - RNA, 95 nt, Human
cagagaaacuaugggacacagauauguugaaguauucaagucaaacaacguugaaauggauuggguguugaagcauacugguccaaauaguccug

SEQ ID NO: 10654 - RNA, 64 nt, Human
ucuucucaggguuggaaaucgugccaaaugggauaacauugccggugugacuuccaggggagga

SEQ ID NO: 10655 - RNA, 84 nt, Human
gcccucugccugccccuaacgcccaacuccaugccugccucagucaugguuuguuuuugcuucuggaagggguagauggagggu

SEQ ID NO: 10656 - RNA, 63 nt, Human
uggagagccugugguccucagggaugggagaggcacccacaggacccgagggcagcaggacca

SEQ ID NO: 10657 - RNA, 76 nt, Human
uuuauuuguguuucuaaugagaaaggaagguuagagguccacugaucuaaaccagcggucucaauggacagaugaa

SEQ ID NO: 10658 - RNA, 61 nt, Human
ggcaucucucggggaggaucagccucggcauuaugagcaacaggggauccuaaagagugcc

SEQ ID NO: 10659 - RNA, 63 nt, Human
gguauaacauuaucuuaccuugcuagauuuagacucuaucuuagguauggaaauguauggacc

SEQ ID NO: 10660 - RNA, 68 nt, Human
gucuggaucauucaauuuaguaguuacauauccaccaccuuauguugcuaaauaacuguuucuagcac

SEQ ID NO: 10661 - RNA, 89 nt, Human
gggccgagauuagagcucgaaugggcauugggcucggcucggagaaugcugccgggcccugcaacugggacgaagcugauaucggaccc

SEQ ID NO: 10662 - RNA, 79 nt, Human
uuuggugaaguaccuuuuggcuaaagaccagacgaagauucccaucaagcgcucggacaugcugaaggacaucaucaaa

SEQ ID NO: 10663 - RNA, 73 nt, Human; identical to SEQ ID NO: 2833

SEQ ID NO: 10664 - RNA, 99 nt, Human
accugggaagggcccuccucacccuugguucucucaguuucacucuuaguccuccugagggccacaggaccacuggugucaggcaggcucuuggcaggu

SEQ ID NO: 10665 - RNA, 67 nt, Human
ggaccacuguucuggaguuaugcaauuaaacacuggacaauugcaauuaaacauggacagaaaaucc

SEQ ID NO: 10666 - RNA, 73 nt, Human
gucaugugaugcucaaucagcaaaccagggauuggcuucauccugggaaaaagcuaucugggugcaacaagac

SEQ ID NO: 10667 - RNA, 61 nt, Human
cuagagcaagccucaauaaguuuauuuuauuaccuuggaauucuuugaugguggugucuag

SEQ ID NO: 10668 - RNA, 103 nt, Human
uuucugagaugaagucuugcucuuucacccaugcuguagugcaguggcgccaucucggcucacugcacuccagccugggugacagagugagacuccuuaaaaa

SEQ ID NO: 10669 - RNA, 64 nt, Human; identical to SEQ ID NO: 7119

SEQ ID NO: 10670 - RNA, 77 nt, Human
gggggaaagccugguuuuggcugcuuugaggcuuucauugaaagcaaaugaggcagaaaggucccggcaccaccccc

SEQ ID NO: 10671 - RNA, 69 nt, Human
aagaguacugaaacaaggacuucuugucagaaacagcuucuggaaucuuggguuuuguuuuuguuuuuu

SEQ ID NO: 10672 - RNA, 87 nt, Human
auucuucaaauguucccucagugauccuuuuacucuccuugucacuuauuugggagaaauaggggcacaugagauaagaagaagaau

SEQ ID NO: 10673 - RNA, 67 nt, Human
gccggcuuuuucgcggggggaaagaaacaaaggccugcauuccccccuucuaaaagggaaagccggc

SEQ ID NO: 10674 - RNA, 68 nt, Human
ggguuuccaucuaacuuuagcuccaggguaaaaucccgaacaguccaaauaaagucuggaagaaacuc

SEQ ID NO: 10675 - RNA, 79 nt, Human
ugggugaagauauaagaacagaaguugucugauugcauaaggaaaugccuuuccagauuuucuucuggcacuucgccca

SEQ ID NO: 10676 - RNA, 82 nt, Human
gcuugcacugguuggccagguccuccauccuguuggaugguaaagccucgggauugauggacggacauggcccaguggaggc

SEQ ID NO: 10677 - RNA, 65 nt, Human
gaaaggauucugcuuguagauugcuuauuucuugcuccaaauuuauaaauuaacccauuucuuuc

SEQ ID NO: 10678 - RNA, 62 nt, Human
caguuacaauauuugaucuaagaacauucacuuuccaacugaucagaaaguaaaggugacug

SEQ ID NO: 10679 - RNA, 65 nt, Human
ggccccggguucccguggcuaccgggcgcggcgcccccgcgccgcaggccgggaccccgguggcc

SEQ ID NO: 10680 - RNA, 79 nt, Human; identical to SEQ ID NO: 1810

SEQ ID NO: 10681 - RNA, 63 nt, Human
gauacuaccauccuggcuggacuguccaagaccagaggaugaucgagacaggacaaugggauc

SEQ ID NO: 10682 - RNA, 60 nt, Human
auuaguauaaagccugcccuguugugugaagaagcauuuggacugcuuaaguuggcuaau

SEQ ID NO: 10683 - RNA, 75 nt, Human
ggugcucagcagcgagaggacgcgucacucugccguucugcagggugacgcccuccccguaccucgcugagagcc

SEQ ID NO: 10684 - RNA, 129 nt, Human
gagccacacguugcuucuucccuguguucccagcuggagggacaugagugucccugggccgucgucuccggacggggcccugacacggccacccuacugccuggaggccggggagccgacgccugguuu

SEQ ID NO: 10685 - RNA, 64 nt, Human
ucacaguuggguuuaacagaugacuuuggauuuucaaaaaaguguggguggccgugacuugugg

SEQ ID NO: 10686 - RNA, 75 nt, Human
cuucgcauuaguuucucgugacuaugcauaugauccaauaucaaaggaaaugauagcauugaaggacucgugagg

SEQ ID NO: 10687 - RNA, 72 nt, Human; identical to SEQ ID NO: 9079

SEQ ID NO: 10688 - RNA, 98 nt, Human
cacagacgaacaggcaaggggcuagggaagaagaggggacccaugucuucggaaauacaagggacuucugcaauccauggagaaugccaaauaaugug

SEQ ID NO: 10689 - RNA, 71 nt, Human
cgggguuaaccacuggcagaaagaaggguguacauugcgccuggacgccuaccccaguggaaaagaccgcg

SEQ ID NO: 10690 - RNA, 64 nt, Human
gauuuuauggguuuuaaguggggaaguaaucccauguacuuauuucuuaaauaccuaggaaguu

SEQ ID NO: 10691 - RNA, 61 nt, Human
acccaggaggcggaagugugcaagugagccaagaucacaccacgugcacuucagccugggu

SEQ ID NO: 10692 - RNA, 65 nt, Human
cugcuagagccgagcgaagcgaugccuaaaucaaaggaacuuguuucuucaagcucuucuggcag

SEQ ID NO: 10693 - RNA, 61 nt, Human
cuguguucugaccuugcuggggugacuguuauacuccauuagcuuugcaggauggacacag

SEQ ID NO: 10694 - RNA, 104 nt, Human
gaguggcgaauucgggcacgaggggucccgcgggucugucucuugcuucacaguguuuggacggaacagauccggggacucucuuccagccuccgaccgcccuc

SEQ ID NO: 10695 - RNA, 69 nt, Human
gcugggcugggcgaguaucucuucgaaaagcucacucucaagcacgacuaagagccuucugagcccagc

SEQ ID NO: 10696 - RNA, 66 nt, Human
ccuuggagaccugaugcgguuauuaguacgaacgugucacuccauagccagauucaauuuucaagg

SEQ ID NO: 10697 - RNA, 69 nt, Human
gaaucucauuaauccauucaugcgcgucacuaauuagaugacgaggcauuuggcuaccuuaagagaguc

SEQ ID NO: 10698 - RNA, 72 nt, Human
ucuuaauuuuaaagacccaacuugccaaaauguuggcugcguacuccacuggucugucuuuggauaauagga

SEQ ID NO: 10699 - RNA, 90 nt, Human
agaggcaugaccugacugcacuguugcugacuacuacucugccaaucggcuacccucgacucagcaccacauugccucauuucuuccucu

SEQ ID NO: 10700 - RNA, 83 nt, Human
gcuggaaaucccauccuuccgggguggaagugagcugcucccggccuuggagcucauacccgugccggcaggaauacaccagc

SEQ ID NO: 10701 - RNA, 96 nt, Human
ggccuccagguucaugccagggaugcugucacaagacucaaagucuucagggaauuugccgacuuggaaggcauccaugggcacccuggugaggcc

SEQ ID NO: 10702 - RNA, 67 nt, Human
ggcagcauuggaaccaucgauggaaaaaauauuuaaaauugaucagaugggaagaugguuuguugcu

SEQ ID NO: 10703 - RNA, 69 nt, Human; identical to SEQ ID NO: 8302

SEQ ID NO: 10704 - RNA, 60 nt, Human; identical to SEQ ID NO: 5040

SEQ ID NO: 10705 - RNA, 127 nt, Human
ggaagccgucagccaagucgccacauuucucugcaaaaugucauagcuuauauuaauguacaguauuccaugguaugcugccuuccguuguaaguagcagaucucuccgugacuugacacggcuacu

SEQ ID NO: 10706 - RNA, 71 nt, Human; identical to SEQ ID NO: 5378

SEQ ID NO: 10707 - RNA, 102 nt, Human
gcgcgcucguucgggaucgccgagggggcugagauagugaauuccuaagaagaaaauaauggaugcauauuaguuguucucuaaguggacucaacagugugc

SEQ ID NO: 10708 - RNA, 61 nt, Human
cucucgggggggccgggaacaacugggugcgccuccgacgugugacuuuuucccccggggg

SEQ ID NO: 10709 - RNA, 74 nt, Human
guacuggagagacauuaagaagacuggagugguguuuggugccagccuauuccugcugcuuucauugacaguau

SEQ ID NO: 10710 - RNA, 62 nt, Human
cuggaugaagagccgaauagcaagcuguucaaagauacguaucuugcuaucucuauuuccag

SEQ ID NO: 10711 - RNA, 69 nt, Human
gcgucugaggcaccggguggucgggcugugauagaccaaggcugaucacgcggcaccaccucaagaagc

SEQ ID NO: 10712 - RNA, 81 nt, Human
gcuccgggggaaagaucaaccggccccgaacggagcugaagaagaagcuguucaaacgccggcggguguugaaucgggagc

SEQ ID NO: 10713 - RNA, 60 nt, Human
cugguguggguuuuuacuguggcacgagaguggggccagagugagaguuuccacacucag

SEQ ID NO: 10714 - RNA, 77 nt, Human
ggcuuauuaguuauauaagugaaauuucuagggagcagagcaggcuucucacacaauuccagaaugacuagagagcc

SEQ ID NO: 10715 - RNA, 81 nt, Human
caacggucagacgagucgacacguggcagaaaucaucaucuccucguggaggugaugguugucaugugugggucaccguug

SEQ ID NO: 10716 - RNA, 67 nt, Human
gcagggcagccccauccugggucuggagcuucccuagacccaggcaccaugcacaggcauucccugc

SEQ ID NO: 10717 - RNA, 60 nt, Human
agcuccaguggacaaaagaaggaauccacguucuagauuuggccauuugaugauggagcu

SEQ ID NO: 10718 - RNA, 95 nt, Human
ccaaauuucgugaagaaccagguugcuguguugcagugcuguguugcccggauggggcagggcccugugcugguugccucgcuugaugaaugugg

SEQ ID NO: 10719 - RNA, 84 nt, Human
guucacagaggaacuuaagaaguauggagugacgacuugugguucgaguugugugaugcuacauaugauaaagcuccaguggac

SEQ ID NO: 10720 - RNA, 91 nt, Human; identical to SEQ ID NO: 7954

SEQ ID NO: 10721 - RNA, 84 nt, Human; identical to SEQ ID NO: 286

SEQ ID NO: 10722 - RNA, 64 nt, Human; identical to SEQ ID NO: 287

SEQ ID NO: 10723 - RNA, 89 nt, Human; identical to SEQ ID NO: 288

SEQ ID NO: 10724 - RNA, 83 nt, Human
guagaguaguuacuggggagugcugaaggcuccaugugagacaaguuaaaauggguauguagguuucuccaguuacauucugc

SEQ ID NO: 10725 - RNA, 77 nt, Human
gcugacaauuaaugcuaguccucaggauuuaaaaaauaaucuuaacucaaaguccaaugcaaaaacauuaagucggu

SEQ ID NO: 10726 - RNA, 65 nt, Human; identical to SEQ ID NO: 1727

SEQ ID NO: 10727 - RNA, 71 nt, Human; identical to SEQ ID NO: 8959

SEQ ID NO: 10728 - RNA, 76 nt, Human
ucaguuaaaaaagaagaagaagaaauggcaaagagaaaguuuuuucaaauuucuuucuuuuuuuaauuuagauuga

SEQ ID NO: 10729 - RNA, 84 nt, Human; identical to SEQ ID NO: 286

SEQ ID NO: 10730 - RNA, 64 nt, Human; identical to SEQ ID NO: 287

SEQ ID NO: 10731 - RNA, 89 nt, Human
ggccaauugaaacaaacaguucugauaccguucuuccaccacugauuaagagugggguggcagguauuagggauaauauucauuuagcc

SEQ ID NO: 10732 - RNA, 84 nt, Human; identical to SEQ ID NO: 286

SEQ ID NO: 10733 - RNA, 64 nt, Human; identical to SEQ ID NO: 287

SEQ ID NO: 10734 - RNA, 89 nt, Human; identical to SEQ ID NO: 288

SEQ ID NO: 10735 - RNA, 81 nt, Human
gccacggugaugggcagcccaaaggcuacguaugugcaagcugccucaguggucuccuugagcugguucuucaccuguggc

SEQ ID NO: 10736 - RNA, 60 nt, Human
cccaacuggaagcccgagaagucugucccaucauugacuucuuauacugcuucuucuggg

SEQ ID NO: 10737 - RNA, 66 nt, Human
ggaucauacgaaaucaauuuacacacggucuguaauugacccuguuccugcaccaguuggugauuc

SEQ ID NO: 10738 - RNA, 69 nt, Human
cgguggggauagcgaugauuaugguagcggaggugaaauaugcucgugugucuacgucuauuccuacug

SEQ ID NO: 10739 - RNA, 80 nt, Human
ggacauaguggaagugagcuacaacguuaguacgugucguguaguacgaugucuagugaugaguuugcuaauacaaugcc

SEQ ID NO: 10740 - RNA, 93 nt, Human
ggacugcauccuaccaccaacucguccaacugacaagcccuugcggcugccucuccaggaugucuacgaaauuggugguauuggaacuguucc

SEQ ID NO: 10741 - RNA, 74 nt, Human; identical to SEQ ID NO: 365

SEQ ID NO: 10742 - RNA, 77 nt, Human; identical to SEQ ID NO: 3082

SEQ ID NO: 10743 - RNA, 80 nt, Human; identical to SEQ ID NO: 367

SEQ ID NO: 10744 - RNA, 101 nt, Human
cugcucaucagacagguccgucaaaaucuuugaugugcgcaauggagggcagauccuuaucgccgaccucaggggucaugaggguccuguguggcaagugg

SEQ ID NO: 10745 - RNA, 67 nt, Human
ggccugauccuggccugugggagcucggauggggccaucucccugcugacuuacaccggggaaggcc

SEQ ID NO: 10746 - RNA, 67 nt, Human
ugcugaggacucccaagcguacugcucaucaucguuauguuuggugaucacaguuacuuucucagca

SEQ ID NO: 10747 - RNA, 69 nt, Human
cggcucaccugcaaaacaaaacaccagcaauaucagauggauggcagugaugcaggcacaaugcagcug

SEQ ID NO: 10748 - RNA, 62 nt, Human
gcucaggaauguuaaguggcuucaggagucguguggacagcacgauuaccuggguuccuggc

SEQ ID NO: 10749 - RNA, 75 nt, Human; identical to SEQ ID NO: 345

SEQ ID NO: 10750 - RNA, 60 nt, Human
uuguacaaaaccuaauuuguugucaaaaguaucaagcaauaaauuuuaacuauuguacag

SEQ ID NO: 10751 - RNA, 109 nt, Human
uacuauuucuagcaucugagauccaggucaguugugauuaauuuuucucuguauuaugcaauguauuuuccugcuuuucaugccucucuacuggaugcuagacauugua

SEQ ID NO: 10752 - RNA, 81 nt, Human
ugagguuuuccagcuaggguggugggaacaggcccuacccuagguccugugucagcaccacuguuccuucuaaucuucuca

SEQ ID NO: 10753 - RNA, 99 nt, Human
gaggcaaggacuugcucuguuacccaggcuaaagugcaguggcgcaaucauagcucacugcagccuugaacuccugggcucaagagcucuucccgccuc

SEQ ID NO: 10754 - RNA, 60 nt, Human
ugucggguagcuggaacuacacagguguguaccaccacaucugguaccaccacacccaca

SEQ ID NO: 10755 - RNA, 67 nt, Human
gugccuugcagggcgcugugagguccaggccggucuuggcgccgagagccccugcacuccaggccac

SEQ ID NO: 10756 - RNA, 60 nt, Human
ccuaccgcgugcucaaugggcucugcuugagcaagggcaccccugagugugacgggaagg

SEQ ID NO: 10757 - RNA, 84 nt, Human
gggggcacggaugcggaugagggcgaguggcccuggcagguaagccugcaugcucugggccagggccacaucugcggugcuucc

SEQ ID NO: 10758 - RNA, 82 nt, Human
uuaucuuauuagggaguuguaugucaguguauaaaacauacugugugguauaacaggcuuaauaaauucuuuaaaaggauaa

SEQ ID NO: 10759 - RNA, 86 nt, Human
aaguuaguuuccuuucuucaucuuuuuuuuuuuauuaaguaaucagugacuugaaaaauagcagauugguauaaggauuguaacuu

SEQ ID NO: 10760 - RNA, 84 nt, Human
gagauuaagcauucauccugaaauguacacuugaauaguuugaaauucaacacaaguguauauuuuuagugaagacauuuucuc

SEQ ID NO: 10761 - RNA, 64 nt, Human
accuugguggagggguggugaccaucgaaaggagcaagagcaagaucaccgugacauccgaggu

SEQ ID NO: 10762 - RNA, 90 nt, Human
auuaaccaggacgaagaagaggaggaagacgaggauuaaauuucauuuaucuggaaaauuucguaugaguucugaauaaaacuggggaau

SEQ ID NO: 10763 - RNA, 71 nt, Human
acauuuggauccaccagcaugaaaauaggggauuuugccuuccaugcuuaugcacugggggucccaggugu

SEQ ID NO: 10764 - RNA, 82 nt, Human
gccugggguuccucacacuuuucagacaaaagggaagggcugucacagcucccccggccugagucagugucaggauccaggu

SEQ ID NO: 10765 - RNA, 77 nt, Human
caugcugguuuaaauucagaaggaaauagauuaaggaaauauauauauuuucuucuaaaacuuauuaaauuagugug

SEQ ID NO: 10766 - RNA, 79 nt, Human
ccaguuccuacaacgugcaguagggcggcgguagcucuugugucuguggacucugcucagcuguguccguaggagucgg

SEQ ID NO: 10767 - RNA, 63 nt, Human
gucugugcuuuauuauggccuuguuuauauaucacugagguauacuaugccauguaaauagac

SEQ ID NO: 10768 - RNA, 61 nt, Human
acugaaacugaaagggaaaacccacaaucuugggugaaacuccuuccucagcugguucagu

SEQ ID NO: 10769 - RNA, 87 nt, Human
agaggaagcgggaggagcugagcaacguacuggccgccaugaggaaagcugcgugccaagaaagacugagccccuccccugcccucu

SEQ ID NO: 10770 - RNA, 76 nt, Human; identical to SEQ ID NO: 758

SEQ ID NO: 10771 - RNA, 60 nt, Human
ggugcccucaauagccuccuugggugucuugaagccccagaccgauguucuuguaguacc

SEQ ID NO: 10772 - RNA, 71 nt, Human; identical to SEQ ID NO: 1764

SEQ ID NO: 10773 - RNA, 93 nt, Human
cuaucuacaaacagaauauaacaaaaggaaaaugugacuuaagaagugaucucagguccauagcucuucgguucuuccaaauuuguagaucag

SEQ ID NO: 10774 - RNA, 61 nt, Human
guguuuggguaacauaugcaccaaaaagaauccacauggaagcaauaagugacccaaacau

SEQ ID NO: 10775 - RNA, 75 nt, Human
uuuuuuuuuuuuuccaauucauauagucuuguauuauauacauauuaacagucuaugcaaugaaaaauaaagaaa

SEQ ID NO: 10776 - RNA, 108 nt, Human
gcauccuugagccauuucucuguguaauacaggcuuuagauuagugccuuauauugguuuugguuuggggcacuggaugucgcagcuacugcuaugguuucaggaggc

SEQ ID NO: 10777 - RNA, 73 nt, Human
guucuguuuuguuucuguuuucugugucuagugccaauuagcuaaaucagggagaaagaaaugaucacaugac

SEQ ID NO: 10778 - RNA, 84 nt, Human
uucauccuguaaaaguaagcauguagaaggaggaaguugugcuaaaaugccuuuguuuuuuuguuauuauuuucuuagccagaa

SEQ ID NO: 10779 - RNA, 64 nt, Human
acacuggcugaaggaaaauuuguauuauuucaauuauuuuuauguacagaaaacucaacagugu

SEQ ID NO: 10780 - RNA, 97 nt, Human
aagggacuuuauuuuggagagccagcaaaccaagaagaugguggacuaauguccuaaagaaccgucuuaaaauuaugcgggcuuugccuugucuuuu

SEQ ID NO: 10781 - RNA, 77 nt, Human
caaaaacaguuagcuguuuacaugcuuccccuuuaaucccagaguuaguuuugcaaacggcaugauuccuguuuuug

SEQ ID NO: 10782 - RNA, 101 nt, Human
uguuuaggucgggggaaaggaaggggcugacaaccgcagacaucuggacaccagcaaggguccaggggagguuugcagaacuucuuuguccuuggcuaaca

SEQ ID NO: 10783 - RNA, 66 nt, Human
aaaggcaugagaaacagucaucucaauaaaugcaagacaugagcauaaaagagguucucggccuuu

SEQ ID NO: 10784 - RNA, 83 nt, Human; identical to SEQ ID NO: 6433

SEQ ID NO: 10785 - RNA, 63 nt, Human
acccucuacgccugggagggggccugcgucuggauccccugcaccuacagagcccuagauggu

SEQ ID NO: 10786 - RNA, 74 nt, Human; identical to SEQ ID NO: 10013

SEQ ID NO: 10787 - RNA, 94 nt, Human
ggcugaaggaaaauuuguauuauuucaauuauuuuuauguacagaaaacucaacaguguacauuuaacccaguuuaguggcaaguucuuuagcc

SEQ ID NO: 10788 - RNA, 63 nt, Human
ucuugccuuucccuugauaaugcaguaagggacccccauuuuacgacacagggcagggcaaga

SEQ ID NO: 10789 - RNA, 65 nt, Human
guccccuuaacuaauccugaccuuaaccuauauaccaauggaaguucaguuguggagaaugggac

SEQ ID NO: 10790 - RNA, 62 nt, Human
cguaauguggcuacugguaagguaaaacggauaaaugccccagaccaaaacagcucgcaacg

SEQ ID NO: 10791 - RNA, 86 nt, Human
ccugccggcaaacuuagccuugcugcccagcuccucuucaauucugaggagcugguuguacuuggcaagcgcucagaucggcaagg

SEQ ID NO: 10792 - RNA, 71 nt, Human
gcacuagauuguaaagacugggguggaccucuuucuuaauguccaauguccuuugucuuaagauuuggugc

SEQ ID NO: 10793 - RNA, 67 nt, Human
ucucauuagaccuaacagaaugaaguuaauuuuuauaauuucuacguuuugagacuggguuaugaga

SEQ ID NO: 10794 - RNA, 105 nt, Human
uuauuuuaccuucuuguauaagcacugugcuaaaauugcagacacuaggaccaugucuugguuuuugcaauaaugcuagcagaguacacacaagaagaaaaguaa

SEQ ID NO: 10795 - RNA, 61 nt, Human
uuuaaugcagguacuguuacaauacaacugauguguuuuguugucguucccccugcuuaaa

SEQ ID NO: 10796 - RNA, 63 nt, Human
ccagucaccagccucaggacagauacaaagcugucuggcuuaucuucuucaugcugggucugg

SEQ ID NO: 10797 - RNA, 64 nt, Human
cucaguauuucacaaaccgccuggacaugucccagaauguguccuuggucacugcugaacugag

SEQ ID NO: 10798 - RNA, 67 nt, Human
ccacauguacuucugugcuuagaacauuuuuacggaccuaagcgcuggagacguugcugcaugucgg

SEQ ID NO: 10799 - RNA, 119 nt, Human
cagcucaaggggaagaaaguacggacaaguucacugagagcgucuacguccuggccaacgagccauccguggcccuguaccggcugcaggagcaugugcgucgcucccuccccgagcug

SEQ ID NO: 10800 - RNA, 73 nt, Human
ucuacacuguggaguacgccugcagcgccguggagaaccugguggacagcagcgucuacuuccgcagcgugga

SEQ ID NO: 10801 - RNA, 79 nt, Human
aguuucucuggaguauuugcgcuggaaguuucuaaucaaaaccauuagacuuugaguuucacaaacuccucuugaagcu

SEQ ID NO: 10802 - RNA, 62 nt, Human
gggguaaggagcaaauggaauaggggauaaagccuuuucaucuguuuagucauuuuacaccc

SEQ ID NO: 10803 - RNA, 111 nt, Human
agaucggucguuuuugaugcucgaugaaugcugggaauucagaggaaugucuucacuuauacuuggauuugcucucuucccauuucgugaucguaguauagcuuucgauuu

SEQ ID NO: 10804 - RNA, 68 nt, Human
ggcuuacaguaguucccccuuaucuucgggagauacauuccaaggcccccagugaacuccugaaagcu

SEQ ID NO: 10805 - RNA, 72 nt, Human
uauugccgugcuguguaggggcuaacaauggacacccagaaggacguucaaccuccaaagcagcaaccaaug

SEQ ID NO: 10806 - RNA, 111 nt, Human
ugcuagaagggaggguggguagacagccaccagccuuguuuauaaauucaaacaaaauaagaaucugcuagaagggaggguggguagacgccacccgccccgucacaggca

SEQ ID NO: 10807 - RNA, 83 nt, Human
uguuguuaccugucuuccauaaauaccauaguuaaauguuuugugugcauacauguucguauuugucuauaaagguauugaua

SEQ ID NO: 10808 - RNA, 129 nt, Human
uuggaaaugguuuauaaagaggcuuuacagucgcaugucauucagcaggagggaauauacuggucuuuaugauuacaugaaauaugcugugaagcuacagacuccauuauaaguaaacccaugguucaa

SEQ ID NO: 10809 - RNA, 61 nt, Human
uuugguuuguuuggucaugugaguuacccacaaguuguauaguuccaugaaacaagcuaaa

SEQ ID NO: 10810 - RNA, 65 nt, Human
aaugauuacggauacuaguauaagagaucagguucguccuuuaguguaguguaugguuaaucauu

SEQ ID NO: 10811 - RNA, 70 nt, Human
gcccgcucauaaggggauggccauggccagguuuauagauaguugggugguugguguaaaugagugaggc

SEQ ID NO: 10812 - RNA, 77 nt, Human; identical to SEQ ID NO: 9246

SEQ ID NO: 10813 - RNA, 69 nt, Human
guguuuuagaagcauuugcgguggacaauggaaggcccggcuucaucguauuccuguuugcugauccac

SEQ ID NO: 10814 - RNA, 97 nt, Human
uuuuuuuuuuuuuuuuuuaccaguagccuauuucagauuuauuaaaaaacacauagguaacgagucagagcuuuggcuaggaaugauuuggaaaaga

SEQ ID NO: 10815 - RNA, 64 nt, Human
ggggagaagcagccgugcugccaggucacccagaccuccagacagccggcuagccccacugccc

SEQ ID NO: 10816 - RNA, 77 nt, Human
ggugucguuuagaucaggguaaggcagucaggcggguguucaccacugccuuuucuuccucugagcgugagaacacu

SEQ ID NO: 10817 - RNA, 63 nt, Human; identical to SEQ ID NO: 123

SEQ ID NO: 10818 - RNA, 91 nt, Human; identical to SEQ ID NO: 124

SEQ ID NO: 10819 - RNA, 60 nt, Human
guuuuuaaaaauuguuauaauuaaguaaaaauaaagcugaauugugucaaaaaaaaaaac

SEQ ID NO: 10820 - RNA, 88 nt, Human
agcagcaagcagaaagaacuuauuaaaauauccuuucuuuacacaauuagauuaguauuuugcuucaugucuucauugcuuguuagcu

SEQ ID NO: 10821 - RNA, 61 nt, Human
cauuuauucuuaaaaucuacuuguuucauagaaacuuuaguaauaaccagaauaauucaug

SEQ ID NO: 10822 - RNA, 110 nt, Human
aagaaauaguuuuaaguaacuuuuuauagcaagaugauacaaugguaugaguguaaucuaaacuuccuuguuguauuaccuuguaugcuguuacuuuuauuuuauuccuu

SEQ ID NO: 10823 - RNA, 77 nt, Human
gcuucagggaaggggcgggcgugucgccgccucuggcaucgccuccgguugccuuacaccacgccuucaccugcagu

SEQ ID NO: 10824 - RNA, 107 nt, Human
gcccgcccaggccgacaacgacucccggcaugcagugcuuugcgccgggcacgcucugcgccugcgugcugcgcgcugcccgcuggggcucgaaguuccgggagggu

SEQ ID NO: 10825 - RNA, 93 nt, Human
gggccagaggaggcgguccugguagggagugcguaccaggguggagucgcuguccggucgcgcuucacuucugcuccgcccucccugcucccc

SEQ ID NO: 10826 - RNA, 88 nt, Human
gucucacugagccuuagucgucggcaggucccaggcgcgaaguuucucggccuggaggagggggucgcgcgaagugccagaugcaggc

SEQ ID NO: 10827 - RNA, 66 nt, Human; identical to SEQ ID NO: 1526

SEQ ID NO: 10828 - RNA, 69 nt, Human
agacuuggagucaucuggacugcagagaaggaacuccucugaagcaagcuccggagacuucuuagaucu

SEQ ID NO: 10829 - RNA, 82 nt, Human
ggggccuguggcaaaagaacugagcggacugccaucuggacccucugccggaucagguccuccucccccuccaccaggcccc

SEQ ID NO: 10830 - RNA, 66 nt, Human; identical to SEQ ID NO: 3532

SEQ ID NO: 10831 - RNA, 104 nt, Human
cggggacuacaauggccacgucggucuggguguuaagugcuccaaggagguggccaccgccauccguggggccaucauccuggccaagcucuccaucguccccg

SEQ ID NO: 10832 - RNA, 130 nt, Human
ggggaaccgcgguggcuuccgcggagguuucggcaguggcauccggggccggggucgcggccguggacggggccggggccgaggccgcggagcucgcggaggcaaggccgaggauaaggaguggaugccc

SEQ ID NO: 10833 - RNA, 62 nt, Human
aguguagcaaaucgugauguaaauuuuuuacugcuggucauggucaaaaaguaagauacgcu

SEQ ID NO: 10834 - RNA, 112 nt, Human
guauaaggcagguuuuauagaaccauuuagauucaacauuaaugguagaguggcauuuuaccaaaaaaauggguguauuugauuugggugcuguaaggcaauuugcuaggac

SEQ ID NO: 10835 - RNA, 61 nt, Human
uugugggugauugcaauuuuuuaaugaaaugcauuagaacaucuaagcacgucaccuacag

SEQ ID NO: 10836 - RNA, 66 nt, Human; identical to SEQ ID NO: 3532

SEQ ID NO: 10837 - RNA, 60 nt, Human; identical to SEQ ID NO: 1551

SEQ ID NO: 10838 - RNA, 79 nt, Human; identical to SEQ ID NO: 1810

SEQ ID NO: 10839 - RNA, 68 nt, Human
cugguuuugcuggggacgacgcuccccgagccguguuuccuuccaucgucgggcgccccagacaccag

SEQ ID NO: 10840 - RNA, 66 nt, Human; identical to SEQ ID NO: 2802

SEQ ID NO: 10841 - RNA, 102 nt, Human
ugaagauccucacugagcgaggcuacagcuucaccaccacggccgagcgggaaaucgugcgcgacaucaaggagaagcugugcuacgucgcccuggacuucg

SEQ ID NO: 10842 - RNA, 73 nt, Human
ggauccgcugccaguccccacugaggaaggaaacccccuccucaaacacuaucgggggcccgcaggggaugcc

SEQ ID NO: 10843 - RNA, 63 nt, Human
uccccaccgugaccugccuggccuccccugucucagggagcaggucacaggucaccaugggga

SEQ ID NO: 10844 - RNA, 60 nt, Human; identical to SEQ ID NO: 1551

SEQ ID NO: 10845 - RNA, 81 nt, Human
guauggaaucuugcgggauccaaggagaccaccuucaacuccaucaugaagugggacguggacauccggcaaggacuguac

SEQ ID NO: 10846 - RNA, 103 nt, Human
agugguagcaaggacccuucaaaaaaugauacaugcaaaaguugcugggcauauuggauuuuacccaucauaggcgcuguucucuuagguuuccuguaccgcu

SEQ ID NO: 10847 - RNA, 60 nt, Human; identical to SEQ ID NO: 1551

SEQ ID NO: 10848 - RNA, 116 nt, Human
cuguugguucuuucuccugacuccugugguuuugcuaauggcacuuuacagacuccauggagaugucagguggaccaucuucuagggcccagcaggaguagggaaugugccaacag

SEQ ID NO: 10849 - RNA, 92 nt, Human
gcaugcccacugagagccugaaggaggagcuggcuaccugaagaagaacccgaggaggagcauggaaugccugagaggccagugggcggagc

SEQ ID NO: 10850 - RNA, 73 nt, Human
gggcuccugcggcaucgggggcggcaucgggggcggcuccagccgcaucuccuccguccuggccggagggucc

SEQ ID NO: 10851 - RNA, 61 nt, Human
gguggugaugggcuucuggugggcagugagacggugaccaugcagaaccucaacgaccgcc

SEQ ID NO: 10852 - RNA, 103 nt, Human; identical to SEQ ID NO: 5697

SEQ ID NO: 10853 - RNA, 73 nt, Human; identical to SEQ ID NO: 9918

SEQ ID NO: 10854 - RNA, 81 nt, Human
agaagauaaagcaaguugucugacuuaauuuaggauaaauucucagugauuguuucaaagauuucuuuagcuuucucuucu

SEQ ID NO: 10855 - RNA, 81 nt, Human
gccuauuucuaguuuuguauuuuaaaaaguuuucauuaaaauguuguuugaggaucaggaaaaacaacuaagauacuaggc

SEQ ID NO: 10856 - RNA, 62 nt, Human
ggacgagaagaauggccccccuccucccaacaugaccaccaacgagaggagagucaucgucc

SEQ ID NO: 10857 - RNA, 67 nt, Human; identical to SEQ ID NO: 4894

SEQ ID NO: 10858 - RNA, 72 nt, Human; identical to SEQ ID NO: 9079

SEQ ID NO: 10859 - RNA, 62 nt, Human
auggcugccgucccgaucccagucauacaccuccaccuugaugguccgaucguagucgccgu

SEQ ID NO: 10860 - RNA, 88 nt, Human
uuuuuuuggguuuaccaccucauagauguugaauuggcucugcccacgggccagcucccgguaacugguggugaacuccccaaugaag

SEQ ID NO: 10861 - RNA, 69 nt, Human; identical to SEQ ID NO: 6516

SEQ ID NO: 10862 - RNA, 76 nt, Human
uccuaagucuucuuccauccagucaagccagaagaugcccaggggaguagggagguuuggggagggagguuuaggg

SEQ ID NO: 10863 - RNA, 65 nt, Human
uggcacgccugcuguggagcccgcgccggcauauccugcagugggacuccaccggauccuugcca

SEQ ID NO: 10864 - RNA, 65 nt, Human
gccagaacagacuguucucugcagugaaucugagccuucaagauucauguaggacaugauuuggc

SEQ ID NO: 10865 - RNA, 62 nt, Human
guaaaccccacaaaccacaggcuauuccaaaguacagagagcugagaaagaagggauguugc

SEQ ID NO: 10866 - RNA, 64 nt, Human
ucacuuuucaggaguccuugggguuuuccacuaagauuuggaagcuaagaaucuccugggguga

SEQ ID NO: 10867 - RNA, 66 nt, Human
uuucugucucgcccuuuuaguccugaaaucuaugggcuucagucucucaaaggugugagagggaaa

SEQ ID NO: 10868 - RNA, 76 nt, Human
cucgccaaggacuuugcaauauauuuuuccgccuuuucuggaaggauuucgcugcuucccgaaggucuuggacgag

SEQ ID NO: 10869 - RNA, 60 nt, Human
cuggucacgaacccucacacggacgccuggaacgagccacggcuugguggagguggccag

SEQ ID NO: 10870 - RNA, 85 nt, Human
gaauguggacccagacagcgugguccucugccucuuggccauugacgaggaggaggaggaugacaucgcccugcaaauccacuuc

SEQ ID NO: 10871 - RNA, 102 nt, Human
gacaucaacaucgugcgggugucgggcaugcagcgccuggcgcagcuccugggagagccggccgagacccaggcaccaccgaggcccgagaccugcauuguc

SEQ ID NO: 10872 - RNA, 79 nt, Human
cuggcagcgcuucaagucaugguccccaucaugcaggaucucaggcuccacgaugggcacaaugccauucugcuggcag

SEQ ID NO: 10873 - RNA, 89 nt, Human
ugaccauguugggcuucagcaaggugcuuccagguagaugugguggucacucagagccuuguagacagcagccagcaccuucucgguca

SEQ ID NO: 10874 - RNA, 75 nt, Human
agggguguaggugucccuuuugguaaaaaaugggcuagggcauuuuuaaccuuagggcgaaaccuuuuaaucacu

SEQ ID NO: 10875 - RNA, 77 nt, Human
uuaaugguugauauugcuaggguggcgcuuccaauuaggugcaugaguagguggcccgcaguaauguuagcgguuag

SEQ ID NO: 10876 - RNA, 91 nt, Human
gcuuuuuuuaaaaaaauuguaacaaaaaggaguuaucgcauaaacagaucaugaauuauucuuagcaaauuacacuuuuuuuucuuaaagc

SEQ ID NO: 10877 - RNA, 83 nt, Human
uuuuuuuuuuuguacagagccuguauuuagugcaauaaguuuaaaaaauuugcucugaaauauuuacuuuacauuaacaaaaa

SEQ ID NO: 10878 - RNA, 76 nt, Human
aaugaccauuuuuccauuuucuuucuaggaaauuaaacccuuuuaauucuuaucuaccuucuacauaaugguuauu

SEQ ID NO: 10879 - RNA, 105 nt, Human
gagacuuucuaaaguguacuuaaaacauaguaguuuuuuaccuuucacaaaacugaguuacaagaauacuuuuguuuuacagugcaucccuuccgaggaagucuc

SEQ ID NO: 10880 - RNA, 60 nt, Human
gcaguuuugucuaaacuguucaaaaaaaaaacuaugaacagaguucaaauacaggacugu

SEQ ID NO: 10881 - RNA, 78 nt, Human
gggaggaaaagcuaugaaacuguauagggcuguauauauacuugucucagcuuaaugcaggaaauuggcuuacuuucc

SEQ ID NO: 10882 - RNA, 74 nt, Human
ggacgcucuccagaaauuacaucggugugcgugggcacuacgugugcaagagugaaccgggagggacaacgucc

SEQ ID NO: 10883 - RNA, 68 nt, Human
uuagcuccuugguugucgaacguccuguggggaaaaacuuaggggaagaaaugauaaggggggguugg

SEQ ID NO: 10884 - RNA, 65 nt, Human
agcagcuauuaccaaaaaaggcauauacuuccaguccugugcuccaucugccuuaauucuuugcu

SEQ ID NO: 10885 - RNA, 61 nt, Human
ccugagaaacugguggcuuugaacacuugguguggacuacuguguuauccgggauaucagg

SEQ ID NO: 10886 - RNA, 63 nt, Human
ggcaagagcaucuguucgaccuuagacauggcaagaugaaagcuaaguccagugcucgcugcc

SEQ ID NO: 10887 - RNA, 63 nt, Human
ucccucugcuggaccugaaugguacugaugcuguugagagccaucugguccucagacauggga

SEQ ID NO: 10888 - RNA, 72 nt, Human
gaggagcgcagcaccaccaccaucaaggucaucauugucaucuaccuguccguggugggugcccuguugcuc

SEQ ID NO: 10889 - RNA, 90 nt, Human
ggcuuugcuggggcagcaagccugauaagcaugaagcucuuaucuuugguggcuguggucggguguuugcuggugcccccagcugaagcc

SEQ ID NO: 10890 - RNA, 62 nt, Human
gaggcacaaucuaaauacuaaaaaugauuaugaaaucuugaguugagcugauugaugcccuc

SEQ ID NO: 10891 - RNA, 76 nt, Human
guauugcuauuuguuuaaagcacucacauaaauccauuucacccaaaaaggaaacauaaagugcuucuagcaguac

SEQ ID NO: 10892 - RNA, 64 nt, Human
ggaggggccauccacagucuucuggguggcagugauggcauggacuguggucaugaguccuucc

SEQ ID NO: 10893 - RNA, 60 nt, Human
gccccagcagccccugcagccuccaggcccucucgccgggccacagcguagggcuggggu

SEQ ID NO: 10894 - RNA, 101 nt, Human
gggauccacagugucaaggaacuuaaauauaauguaucauaccaacccaaguaaaccaaguacgaaaaauauucauauaaaguuguucacacguagguccu

SEQ ID NO: 10895 - RNA, 69 nt, Human
uggcaaacaggacaguggacucaucucggugauaggcuguagaugcuaacacuggccaauucaaugcca

SEQ ID NO: 10896 - RNA, 92 nt, Human
augauucaauuaucuccaccuggccccacccuugacaccuggggauuauuacaauuaaaggugaaauuugggugggaacacagccaaaucau

SEQ ID NO: 10897 - RNA, 68 nt, Human
uuauuuuuaaccuguagagagaccuuaaggauuuuacuucauaagggguuugauuaugggaaagauaa

SEQ ID NO: 10898 - RNA, 76 nt, Human
ucuggaguccuaaggcugguuggcgagaacuagcaggguccugcaaguuauagguuauucagcccaggauacuggg

SEQ ID NO: 10899 - RNA, 64 nt, Human
uggacuauggccaggaugaagaggcagugaagaagcugacaguaaauccuggcaccaaagucca

SEQ ID NO: 10900 - RNA, 64 nt, Human
cagcagcguuuaacccgugugggcuuugaggauugccaaacgggauaaagacuuuaagcgccug

SEQ ID NO: 10901 - RNA, 61 nt, Human
gaccggggcaagggcacacaggaacggcuuaagguuccuccccuuguaggaccaaccgguc

SEQ ID NO: 10902 - RNA, 95 nt, Human
ccaccaggacuuaucucagaaaauugcugaccgccugggccuggagcuaggcaagguggugacuaagaaauucagcaaccaggagaccugugugg

SEQ ID NO: 10903 - RNA, 71 nt, Human
ucugaguggaggaacugcacuauggucucaccugaugcugguguagcuaagagagugaccuccauugcaga

SEQ ID NO: 10904 - RNA, 85 nt, Human
gccuuguggacuaccugcggucuaggggucggucagugcugggcggagacugucuccucaaguucucgcuagaugucugcgaggc

SEQ ID NO: 10905 - RNA, 80 nt, Human
ggcgggccuuuuuccuugcgucccaagcugcacccuucgggccgucucucuugggaccaccuguuggggccuggggagcc

SEQ ID NO: 10906 - RNA, 79 nt, Human
uccuucucugggaaaucuacuccuuugggcgagugccuuauccaagaauuccccugaaggacgucgucccucgggugga

SEQ ID NO: 10907 - RNA, 63 nt, Human
cagugcugggcagccagggccuaguggugucauuggccaucuccugacugcccuaaggcucug

SEQ ID NO: 10908 - RNA, 83 nt, Human
uuucaggucgugauaaugagcuccuaugaaagaaugcaauauaaugacccgcuuuucuagaaaguucauaaucagcucuggaa

SEQ ID NO: 10909 - RNA, 63 nt, Human
uuucauuaacacauauauuccguccugcaauacuggagagguggaaugugucuggcacagaaa

SEQ ID NO: 10910 - RNA, 68 nt, Human
ggagcuggcccugggcagcaacaagcugggugaugugggcauggcggagcugugcccagggcugcucc

SEQ ID NO: 10911 - RNA, 63 nt, Human
ggcucaggacccuguggaucugggaguguggcaucacugccaagggcugcggggaucugugcc

SEQ ID NO: 10912 - RNA, 100 nt, Human
uagggaaagcugguacgccugcagguaccgguccggaauucccgggucgacccacgcguccgguccgugugcugugccagggccugaaggacucccccug

SEQ ID NO: 10913 - RNA, 69 nt, Human
aguauuccuaagcaugauagaaaaaaaguauggacuacauagaaacaucugacagcaagaggaaccacu

SEQ ID NO: 10914 - RNA, 90 nt, Human
cccacgcguccguggccaucugaucuauaaaugcgguggcaucgacaaaagaaccauugaaaaauuugagaaggaggcugcugagauggg

SEQ ID NO: 10915 - RNA, 74 nt, Human
gcaagcauuucagacaggcauuccuuacauuagaaaaaugugaagaggaguugccauguuuaucagaauuuugc

SEQ ID NO: 10916 - RNA, 60 nt, Human
gaaauuuaaaauauacaugauagacacaaucaccacguuaugaauccuuuuuuuaauuuc

SEQ ID NO: 10917 - RNA, 65 nt, Human
ccuucuguugacucuacagacaccacauggcuugcauccagccagucugucuuguaacauguagg

SEQ ID NO: 10918 - RNA, 88 nt, Human
ggcacccucggcugugccuccucugaggcuggcaguuccuuccuggauaugcaaggucaagagcggagggggaagcagagagagugcc

SEQ ID NO: 10919 - RNA, 67 nt, Human
cuaucaucaucuagcaccuguccgguuccccacgugagccuugggcaggacgcugcaguguugaugg

SEQ ID NO: 10920 - RNA, 73 nt, Human
uggacucugaguaugaggcaggcuguucugagguccccguggggugagccugucuguccucccucagagccca

SEQ ID NO: 10921 - RNA, 68 nt, Human
aauguguccucuuucuuuaauguuagugacaguucuauacagcacagacauaacugaagaaacacauu

SEQ ID NO: 10922 - RNA, 85 nt, Human
uauguauuguacuuuuaaucacuuacugagaauauuucaaauuuauauucucaucaggaaaauguaaaaaagauacugauauaua

SEQ ID NO: 10923 - RNA, 68 nt, Human
cguggucaccuucgaguagagaggcccgcccgcccaccgugggcagugccacccgcagaugacacgcg

SEQ ID NO: 10924 - RNA, 79 nt, Human
guaccaugaaugcgcuaaagcuggacuccaugacuguaccggaggcggcacaggguaccagcgacuaguaugauggugc

SEQ ID NO: 10925 - RNA, 60 nt, Human
guggacccauacgcaugcgccucuuaugccugggaagcaguaugcaagauauggaaccac

SEQ ID NO: 10926 - RNA, 72 nt, Human
gggaagaccugcagugcacgguuucuuccaggcugagguaccuggaucuuggguucuucacugcagggaccc

SEQ ID NO: 10927 - RNA, 67 nt, Human
ggggcgucccgggcacaccacggucuccuggagcacaaaggcggccaaaacagccgcgggcgacccc

SEQ ID NO: 10928 - RNA, 62 nt, Human
gggacaucccgaggaaaggcugcguguacggaucacgggcacagccagccgcggggcguccc

SEQ ID NO: 10929 - RNA, 70 nt, Human
uugucgaucugcuagcucccuaugccaaggguggaaaaauugggcuuuuugguggugcuggagucggcaa

SEQ ID NO: 10930 - RNA, 73 nt, Human
ggggacagcgaccugcagcuggaacgcaucaacguguacuacaaugaggccaccggcggcaaguacgugcccc

SEQ ID NO: 10931 - RNA, 61 nt, Human
ccggcccggggaggacaagucgcugccaccuuugugcugccgacgugauucccugggacgg

SEQ ID NO: 10932 - RNA, 67 nt, Human
ccagacgagacuauuuuucacaagcgcggaguaguugucuccccuuuuguuauguaaaaaugugugg

SEQ ID NO: 10933 - RNA, 91 nt, Human
guuuggccguaaggugccgugcgugaauugugcuugugcccuccacacggguucgugggcacuccggacgugauuaaccagccggccagac

SEQ ID NO: 10934 - RNA, 67 nt, Human
gguaugucgggggaagcaacaaagcaugggcaacuggcuuaaugacgccugcuuuccuuccugugcc

SEQ ID NO: 10935 - RNA, 77 nt, Human
guguuccagugggggacugguuuggcaucauguggacgacgguugugcccugggcagacucuuccauuguuuuucac

SEQ ID NO: 10936 - RNA, 79 nt, Human; identical to SEQ ID NO: 1810

SEQ ID NO: 10937 - RNA, 70 nt, Human
gcagccaagcauuugauacuggagaaaguuucagaagaugaagaacuucggaagagaaugcucauucugc

SEQ ID NO: 10938 - RNA, 125 nt, Human
ggcaccuuggagaacugagaacuugggaccucuauuuuguugacuuuggagauacuggaggauugccacuggaggaccuucaggggucucaggagugaauuccuuaagccuuccauuuccaagcc

SEQ ID NO: 10939 - RNA, 95 nt, Human
cuuccuguggcccuucaaauugucuucuccacgagguggaaugaagaaaaaagaccacccauuugguagaagguggagaugcuggcaacagggag

SEQ ID NO: 10940 - RNA, 67 nt, Human
gaucaacaggcuuauuagaagaaugaauaaggugucuaccaugauuauuuuucuaagcugguggguu

SEQ ID NO: 10941 - RNA, 82 nt, Human
gcagguucacaaggcaggcggucugcguggcacugaagucagggacagucaccaacagcacugucugguccucaggaccugc

SEQ ID NO: 10942 - RNA, 68 nt, Human
guccugccucaaagagaagcugccagaaauaaacaggaguccccauuggcacacaguggggcagugac

SEQ ID NO: 10943 - RNA, 60 nt, Human; identical to SEQ ID NO: 1551

SEQ ID NO: 10944 - RNA, 60 nt, Human; identical to SEQ ID NO: 1551

SEQ ID NO: 10945 - RNA, 70 nt, Human; identical to SEQ ID NO: 2072

SEQ ID NO: 10946 - RNA, 66 nt, Human
ucgguugcacgcagcugagcaggagagccucaagcgcuccaaggagcucaaccuggugcuggacga

SEQ ID NO: 10947 - RNA, 66 nt, Human
uugaguccuuuaugaaauucauaaauaaagaauuguucuuucuuugugguuuuaauaagaguucaa

SEQ ID NO: 10948 - RNA, 108 nt, Human
ccacuugcaauuauuugaggaacuccgccgccuggcgcccauuaccagcgaccccacagaagccaccgccgugggugccguggaggccuccuucaagugcugcagugg

SEQ ID NO: 10949 - RNA, 60 nt, Human
uccuguuagcaagaacaauguacuucaguuuccucaaccuggaaguacagaugcagagga

SEQ ID NO: 10950 - RNA, 62 nt, Human
cugaaacuacggaucuuccgacuucuggauguucguccgucugucuugucugcgguugucag

SEQ ID NO: 10951 - RNA, 69 nt, Human
gagaccuuguaucaaucagcugacuguucugaugccaaugaugccuugauaguguugauacaucuucuc

SEQ ID NO: 10952 - RNA, 68 nt, Human
guguguagacaguauguuagggccuagcucaaaauuuugaagcugagucaauucaagauaaugcgcau

SEQ ID NO: 10953 - RNA, 101 nt, Human
uaccagaaucuuuuauuugcaaagagaaacuaggggaaaauguagccaacauauacaaagaucuucagaaacucucucgccucuuuaaagaccagcuggug

SEQ ID NO: 10954 - RNA, 67 nt, Human
cuuuucucugccuugcuugcuugagcuucagcggaauucgaaauggcuggcgguaaggcuggaaagg

SEQ ID NO: 10955 - RNA, 73 nt, Human; identical to SEQ ID NO: 5567

SEQ ID NO: 10956 - RNA, 74 nt, Human
ccugggacagcaggugccaggcuucccaacagcuccaacccggguggugauugcccggcccacuccuccacagg

SEQ ID NO: 10957 - RNA, 62 nt, Human
cugcagggcgccggucuaggguaccaaugccucguuggcccagauggugagcggccuugugg

SEQ ID NO: 10958 - RNA, 65 nt, Human
ggcgaugccugguguccugccuuucuccaaggcuugacugacuucuugcaggcacaccgcacgcc

SEQ ID NO: 10959 - RNA, 78 nt, Human
agaagaugguaacugggaucucguuggaaauaacacccccauauucuucaucagggaucccauauuguuccaucuuuu

SEQ ID NO: 10960 - RNA, 87 nt, Human
acaccuguccagcugugagcucugcuugguccgaauaaaguccucugggggcucccugggcccugauggcuagccuggcgcgggugu

SEQ ID NO: 10961 - RNA, 61 nt, Human
cccaguggagcagccaucagagcccagugcuaugggcuuugugcuuaguauccagccuggg

SEQ ID NO: 10962 - RNA, 91 nt, Human
gugaggcugcaggaagaggcaggugugaguugaccacguuccucccuccucaggucaugcucugcaagcauuccaucuuuuucagcuccau

SEQ ID NO: 10963 - RNA, 88 nt, Human
ugauagaauuuauccgcuccagacuuuagucacuagguucuaggagugagcuggggccugcugagguggggguggggcugacucugca

SEQ ID NO: 10964 - RNA, 73 nt, Human; identical to SEQ ID NO: 8252

SEQ ID NO: 10965 - RNA, 65 nt, Human
guguauuauuguuuauugaagcauagccuauuaccauguagcuuaguggcucaaaagcagcacac

SEQ ID NO: 10966 - RNA, 62 nt, Human
augggagcuuaauuucguucagcacaccauaaaaguuguggcagaguaaagauuauuccugu

SEQ ID NO: 10967 - RNA, 74 nt, Human
gccuucucucuccuggugcaaaauggcaacucuuaaggagaaaacucauugcaccagcuugcggaagaagaggc

SEQ ID NO: 10968 - RNA, 61 nt, Human
ggcuggacccaauggcacugccacgcuaucgaauuggcagaacccaacgggggcaacagcc

SEQ ID NO: 10969 - RNA, 79 nt, Human
uggcgacgccagugugccuguguggaguggucgugaagcgcgcaguguucacuccaggcuggacccaauggcacugcca

SEQ ID NO: 10970 - RNA, 62 nt, Human
gggcccgcuuagccaaagcguuuugccccgguuucucggguuucucgccuuuggccgggccc

SEQ ID NO: 10971 - RNA, 63 nt, Human; identical to SEQ ID NO: 123

SEQ ID NO: 10972 - RNA, 77 nt, Human
uugacuaguuuucuuucuuuugcuaccucaacaccaaacaauaugggauuagugagaaaugaacuucaacugguuga

SEQ ID NO: 10973 - RNA, 105 nt, Human
gacacucugagcaguugcuagaagucccacacugauaccuagucaugucgcguagacacugucuggguacuguugcagauuagcuugugauuguagagacguguu

SEQ ID NO: 10974 - RNA, 61 nt, Human
caccugcagcgaaaauuaacccuucuggaucaaaagaacagacuggcuuccccugcagaug

SEQ ID NO: 10975 - RNA, 90 nt, Human
gaugagcuugccaucauugcugaauuuaaguccuguccacucacaaguucgaucauacugcaucuuaaagguagcaaauggccucuuauc

SEQ ID NO: 10976 - RNA, 68 nt, Human
agaucgauggaauuucugggguauagcacauucuaaugucaccugagcuuccagguccucaaugaucu

SEQ ID NO: 10977 - RNA, 64 nt, Human
agggcacccgcagcugcccccuuuguuccuuucucggguggggggacagagacuggggggcccu

SEQ ID NO: 10978 - RNA, 75 nt, Human
ggccugagaacaugguucgcaucgcuuugcagcuggacgauggcucgagguugcaggacucuuucuguucaggcc

SEQ ID NO: 10979 - RNA, 62 nt, Human
agcacaggaagcggaugacagaggaauccccuuuccuccaggucaccuuggcuugcugaguu

SEQ ID NO: 10980 - RNA, 89 nt, Human
guauaauuggcuuacagaucugaucgcuaagaaaaaacuuuuuugggguugucucuugugguuuugguccucuauguugcagaucgugc

SEQ ID NO: 10981 - RNA, 70 nt, Human
cccggguuuuauuucucucuuucuugaguggacuguuucccuauaauuaaaagagguggugaguccuggg

SEQ ID NO: 10982 - RNA, 74 nt, Human
guucaagcgcuuguccaaccuccuuagucugacucagugcauucuaacugggggggacaucucgugcaggggac

SEQ ID NO: 10983 - RNA, 74 nt, Human
aggccccuaugcugcgcuuugaggcuccgauucucggaaucgcugggaccggcuucauucccuuuggugggccu

SEQ ID NO: 10984 - RNA, 74 nt, Human
gggcagcucucugcacaguuggagcagguacacuaacuacugccgcaaugaugaaccgcagaacauguugaccc

SEQ ID NO: 10985 - RNA, 74 nt, Human; identical to SEQ ID NO: 8144

SEQ ID NO: 10986 - RNA, 66 nt, Human; identical to SEQ ID NO: 8145

SEQ ID NO: 10987 - RNA, 86 nt, Human
gacaaaggauaauggggacguuugacaggacugcauucagauggugacugacauccagacugcuguacggaccaauccacuuuguc

SEQ ID NO: 10988 - RNA, 89 nt, Human
ucagccaguauucugcaauugcuauccacaugaugaugcacauggaaccaaggagaucugugcgcugggugggucugugaugcgguuga

SEQ ID NO: 10989 - RNA, 71 nt, Human
gcacgcuccugcuccugacucaccgcuguucgcucucgccgaggaacaagucggucaggaagcccgcgcgc

SEQ ID NO: 10990 - RNA, 85 nt, Human
ucuucggcggugggaccaagcugaccguccuaggucagcccaaggcugcccccucggucacucuguucccgcccuccucugagga

SEQ ID NO: 10991 - RNA, 74 nt, Human
ugcccgucuuucuugguucaccuuaucgggggugggccuccggcagggaacggccugggacaacugggggggca

SEQ ID NO: 10992 - RNA, 60 nt, Human
uugcggcauccacgagaccaccuucaacuccaucaugaagugugacguggacauccgcaa

SEQ ID NO: 10993 - RNA, 63 nt, Human
cccgguacccgugugcucccggcggugggugagcccgaacuuucugucuggacgggugugggg

SEQ ID NO: 10994 - RNA, 61 nt, Human
cgcggcuacuacaaccagagcgaggacgggucucacacccuccaguggauguauggcugcg

SEQ ID NO: 10995 - RNA, 64 nt, Human
gcgaucccgcccguggcggggugccagccccccgaagggcgucacgccacccgggcgggcgagc

SEQ ID NO: 10996 - RNA, 64 nt, Human
agcaauuuuugguucugaagauguaggcucuagcuccuacguugcuguggacauauugauugcu

SEQ ID NO: 10997 - RNA, 61 nt, Human
cugcugauugggggaaauaauuuucacacuauccugaauuuugugccugucuaauaagcag

SEQ ID NO: 10998 - RNA, 79 nt, Human
ggaacauacuugccuggagauagccuuugcgauauuuaaauguccguggauacagaaaucucugcaggcaaguugcucc

SEQ ID NO: 10999 - RNA, 70 nt, Human
ugaggaguacaagcuaauuuuucuguagaauguuccucaacauuuuucugauaauucugcuaguuccuca

SEQ ID NO: 11000 - RNA, 67 nt, Human
ccaugguugcuuuuaaaaucuuguauuugguaucuugucauuuacaauaccuugagucuaggccugg

SEQ ID NO: 11001 - RNA, 85 nt, Human
acacucagugggaguggaccggcgaucacaagaggggcagaugaugcaucaccuuucccaccugcacggaaaaaucccagggugu

SEQ ID NO: 11002 - RNA, 77 nt, Human
ggaaacuggggccuucuuugaguacuagugaguaagacauuuugcaacagugcugaguaugaaaggcccuggucucu

SEQ ID NO: 11003 - RNA, 92 nt, Human
uuauuuuugacaggaacuguuuuuaauccaugugguuagucuuuggcaacaagcugacugguggauauagaacgaggguugguuagcgguga

SEQ ID NO: 11004 - RNA, 64 nt, Human; identical to SEQ ID NO: 7119

SEQ ID NO: 11005 - RNA, 71 nt, Human; identical to SEQ ID NO: 3322

SEQ ID NO: 11006 - RNA, 77 nt, Human; identical to SEQ ID NO: 3323

SEQ ID NO: 11007 - RNA, 91 nt, Human
guggucuggagggcugguggugugccgggccccauguuucacuguccggccgggcuguuuuggggccccuuuccccggccuugugggccgc

SEQ ID NO: 11008 - RNA, 67 nt, Human
gcuguaggguaacuuuugaaguagauauauuaccugguucugcuauccuuagucauaacucugcggu

SEQ ID NO: 11009 - RNA, 99 nt, Human
aauguugcuagugcuccuuaggccuuuaagcuauaaacucagcaaggaaugucugcauuuuaucucuuuaagguaccaccagggggguaugacagcauu

SEQ ID NO: 11010 - RNA, 64 nt, Human
aggugaguugugacugauugcuuuuccugcagcgcacgugagcaguaucagccauuuuuuuccu

SEQ ID NO: 11011 - RNA, 83 nt, Human; identical to SEQ ID NO: 3475

SEQ ID NO: 11012 - RNA, 64 nt, Human
gugccugguaauggaauaauagggucggcgaugcccgccaagauuccaaaguaagucaggucgc

SEQ ID NO: 11013 - RNA, 85 nt, Human
gccugcaccguugccaggcguauggggcugccugugcugacugcugccuugcccgggacccuuacugugccugggauggccaggc

SEQ ID NO: 11014 - RNA, 86 nt, Human
ggagcucaugcuggaggagguggaggucuucaaggauccagcacccgucaagaccaugaccaucucuucuaagaggcaacaacucu

SEQ ID NO: 11015 - RNA, 64 nt, Human
uuuccugggcacagaccggggacagugcagaaggucauugugcugcccaaggaugaccaggaga

SEQ ID NO: 11016 - RNA, 66 nt, Human
aacgaaggugauuaaaagaccuugaaauccaugacgcagggagaaugggucauuuaaagccuaguu

SEQ ID NO: 11017 - RNA, 93 nt, Human; identical to SEQ ID NO: 10132

SEQ ID NO: 11018 - RNA, 62 nt, Human; identical to SEQ ID NO: 10420

SEQ ID NO: 11019 - RNA, 62 nt, Human
cagggcuuuauugaaccaaggcccuaacagaugacucagcagggccuucaagcacagcccug

SEQ ID NO: 11020 - RNA, 61 nt, Human; identical to SEQ ID NO: 3057

SEQ ID NO: 11021 - RNA, 72 nt, Human; identical to SEQ ID NO: 7743

SEQ ID NO: 11022 - RNA, 64 nt, Human; identical to SEQ ID NO: 3058

SEQ ID NO: 11023 - RNA, 61 nt, Human
auucuaugccuaauacucacacgcaacauuucuuguacuuuguaaguccguuugcgagaau

SEQ ID NO: 11024 - RNA, 67 nt, Human
ucuucgggaaaggugguggcggggcguccacuagguuuccuguccccgugcugcuccuuccguaaga

SEQ ID NO: 11025 - RNA, 63 nt, Human
uguaaacgguaaagagauuuuuacuuuuggucuccgugagucgcaucucuacuaagguuuaca

SEQ ID NO: 11026 - RNA, 91 nt, Human
ggaguguggcgugcggccggggcauggcgacuuccucuucacuggccacaugcacuucggggaggcgcggcucggcugugccccacgcuuc

SEQ ID NO: 11027 - RNA, 71 nt, Human
cuggggaggugugcucugcucucaaccucugcgagucucuccagaagcaccuagcagagcugaaucaccag

SEQ ID NO: 11028 - RNA, 69 nt, Human
ugcgggacuccuccaggcugccaucagaggggccccggcggcccacgugguagugggagauguucugca

SEQ ID NO: 11029 - RNA, 67 nt, Human
uguugcugggcaccccgcaaugaccucagucccacgacaguuauugucccgaagggcgcccggaaca

SEQ ID NO: 11030 - RNA, 77 nt, Human
ggagaacuuuugugucuagcucagggauuguuaacgcaccaaucagcacccugucaaaacggaccaaucaacucucu

SEQ ID NO: 11031 - RNA, 74 nt, Human
ucagcacucugugucuagcucaggguuuguaaauauaccaaucaacacucugugucuagcuaaucuagugggga

SEQ ID NO: 11032 - RNA, 61 nt, Human
uguuggugaaagugucuguucccuaaguuuaucauacagaaacuccaaacguuugcuggca

SEQ ID NO: 11033 - RNA, 63 nt, Human
cacagcagcagcuucagcgggaaugcguccauccugagcccucugcugcaggugccugaugug

SEQ ID NO: 11034 - RNA, 73 nt, Human; identical to SEQ ID NO: 3872

SEQ ID NO: 11035 - RNA, 99 nt, Human
ccgcuuggugggcaucaucuccuccaugggacauugauuuucucaaagacggaggaacaugagugucugcuuggagagagauaaugacugccggggcgg

SEQ ID NO: 11036 - RNA, 94 nt, Human
gggacucgcgguaccucagagcugccgagcgggcguguggggcccuggcucuggggaagcuuggcgcugcucgccgguggcucuggcgggcccc

SEQ ID NO: 11037 - RNA, 80 nt, Human
ucgcgugcgggauguuuugugagggcaaggcccggcaugguugcugcgguaucccaaucacagacacaggccggaugggg

SEQ ID NO: 11038 - RNA, 61 nt, Human
ccccgacccgacaagggaccaugggcgcgaccuacgcucguggaacccuaggggcaagggg

SEQ ID NO: 11039 - RNA, 108 nt, Human
uguucuugcuaccaaggcucucaaccaccaugauugcgcuagcacagccucgcgauagucacgcuucacggcgcaucguggggaugacugagcacggaggcgaggaca

SEQ ID NO: 11040 - RNA, 81 nt, Human
ccuccuuguggaguaggaaaacauaagcuugaagaaggaagcuuuaaagaaagguggucguucucgcccgcaauuuagagg

SEQ ID NO: 11041 - RNA, 63 nt, Human
caugaaucacgacuguggacgacaaugugccugugguggucaauguuccauucccgauucaug

SEQ ID NO: 11042 - RNA, 121 nt, Human
gaggcuuaaccaacgauaacggcggcgacggcgaaaccucggagcucgcagggcgggggcaauggcccgggccuuggagauggagaauucucaguuguguaagcuguucaucggcggccuc

SEQ ID NO: 11043 - RNA, 67 nt, Human
gcucuuuguacgugauggccauauaauagugagaacuguggcugcagggccgaaccaugaucgaggc

SEQ ID NO: 11044 - RNA, 79 nt, Human
gugaccuacuccaaugugugaggauggcuggacugccugcaugugccugccucgccccaugccuguggacuggaaacac

SEQ ID NO: 11045 - RNA, 62 nt, Human
gugaugcugaagcuguggcuggugucccuguggaggauucggugcuggccccgguugcccac

SEQ ID NO: 11046 - RNA, 60 nt, Human
ggagccuggguccggauagguacucaaagcuggcagcgaagcuuccucuggcucggcucc

SEQ ID NO: 11047 - RNA, 68 nt, Human
gaagguuaacgcuggcuguccugaaauauuauaagguggaugacgaaugggcaaaauuagucgccuuc

SEQ ID NO: 11048 - RNA, 80 nt, Human
ucuuguguugagacuucgugguggugcuaagaaaaggaagaagaaaucuuacaccacucccaagaagaauaagcacaaga

SEQ ID NO: 11049 - RNA, 66 nt, Human
agggcgacuacgcgugcggcccgcacggcuacggcgccauccccgccgcgcccccgccgccgcccu

SEQ ID NO: 11050 - RNA, 77 nt, Human
uacacccagcucucuuuuucuaauguaaauguuguguacaauaguuuuauuugauuaagcuucaggacuguuuugua

SEQ ID NO: 11051 - RNA, 61 nt, Human
ccuggcugcacugaauucuccaggcugggugcagagugguuagcuguccgguugggccagg

SEQ ID NO: 11052 - RNA, 89 nt, Human
gcggccgcgggccaggcugucacucagguuccugucaaggucaggacauucagcagaaccugugucaggccgcugaggccccgcgcagc

SEQ ID NO: 11053 - RNA, 78 nt, Human
gcugccaaagggcugguucagggagcuaaccauggccacaaugaagucaucaggucccaugaucagcaccugggcagc

SEQ ID NO: 11054 - RNA, 66 nt, Human; identical to SEQ ID NO: 1526

SEQ ID NO: 11055 - RNA, 76 nt, Human
caccaugcgggccucagguggcagagaggcccagccucacaggccuguggccccacacaccagucccagcaaggug

SEQ ID NO: 11056 - RNA, 68 nt, Human
cugagucccucugggcagcagcucccuucuccaccccaccccagcacccgucccaaauguggccucag

SEQ ID NO: 11057 - RNA, 72 nt, Human
ccuggggucguuuggaaacuuugaaagcacugguagaacuggauguugauauagaagcuuugaacuuccggg

SEQ ID NO: 11058 - RNA, 64 nt, Human
ggcaaaauauggugugaaucugaaugaaaaaaccaccagaggguacacacucuuacauugugcu

SEQ ID NO: 11059 - RNA, 105 nt, Human
gugucacuugugcuuugcucuugucccacgugucuuccacuuugcauaugagccgugaacugugcauagugcugggauggaggggaguguugggcaugugaucac

SEQ ID NO: 11060 - RNA, 113 nt, Human
uguauuuauuuauuuauuuauuuuauuuguuuuucauucaucccauuaaucauuuccccauaacucaaugggaugaaugaaaaaaaaaaaaaaaaaaaaaaaaaaaaaauagg

SEQ ID NO: 11061 - RNA, 63 nt, Human
gcuaccugaauaaacuaccagugaaaagcgaauaucccucuauaaaacuggugguggaguggc

SEQ ID NO: 11062 - RNA, 61 nt, Human; identical to SEQ ID NO: 347

SEQ ID NO: 11063 - RNA, 80 nt, Human; identical to SEQ ID NO: 788

SEQ ID NO: 11064 - RNA, 77 nt, Human
aaguuguaaauuccuccuccucaaaaccccaaauuaaugacaaucaggggaaaaggcauauacaauauuugcaacuu

SEQ ID NO: 11065 - RNA, 70 nt, Human
auuuguuuacaugggaaagaauuauauacucuaaaaauauuggcuauaguuccucugauguauaauaaau

SEQ ID NO: 11066 - RNA, 91 nt, Human
ucugaccucaacuccaaaggagcuuuggcuucccugggccccagucggugacuucaggcaaaggcaaguuuugcuucugaguucccauaga

SEQ ID NO: 11067 - RNA, 106 nt, Human
aggaggcggagcucgggugguaacgccagcgacggggaguggcuauaaauacagaugaagcuucgcuggcuugccggccccuaaccugcugugcaccccacuuccu

SEQ ID NO: 11068 - RNA, 60 nt, Human
cugagcuuguuuuccugcaacuagacagccccaucugggggugacgggagacagugacag

SEQ ID NO: 11069 - RNA, 90 nt, Human
ggcaucagauucucauaaggagcgugcaaccuacaucccucgugugugcaguucacaauagggcucgugcugcuaugagaaucuaaugcc

SEQ ID NO: 11070 - RNA, 61 nt, Human
cugaguuuggcaucaauauggugaccuuccaggagcaagggacaaccagcggccaagccag

SEQ ID NO: 11071 - RNA, 77 nt, Human
gcaacagagucugucggcgggagcuccccauccccacacuguggcuagacagaguucuuucucagaugcucucuugc

SEQ ID NO: 11072 - RNA, 64 nt, Human
gaaggggugaccacccccuugggccuucugggggaacucucccuuggggguggcuugcccccac

SEQ ID NO: 11073 - RNA, 71 nt, Human
gaggucgaggugauugggggagcagacaaguaccacuccgugugucggcucugcuacuucaagaaggccuc

SEQ ID NO: 11074 - RNA, 67 nt, Human
ccuggcuggagugcccugccuggagggagcccuccuggcugggggcaagagcuccacaauggccagg

SEQ ID NO: 11075 - RNA, 90 nt, Human; identical to SEQ ID NO: 1534

SEQ ID NO: 11076 - RNA, 77 nt, Human
gcgggaggcgugcugggcgcggggcugcggugcccagaggcugcggcauuaggggcucggcgcccccgaccuuccgc

SEQ ID NO: 11077 - RNA, 68 nt, Human
cgccugccugagagaagucgucgcggccgaccccgucgccuccgccggcuaccauguccgcccaggcg

SEQ ID NO: 11078 - RNA, 66 nt, Human
augagucccccccucuugucuccccccccugaaauugggcaugggggugcggugguggggggccau

SEQ ID NO: 11079 - RNA, 97 nt, Human
cgcuguaagcuucugcuggggauaggaauucuggugcuccugaucaucgugauucugggggugcccuugauuaucuucaccaucaaggccaacagcg

SEQ ID NO: 11080 - RNA, 74 nt, Human
ggaguuuuuuuuugcgggggggggguugccuuuuuuucuggggggcccuuuguaccuuccaaaaaauuaaaccc

SEQ ID NO: 11081 - RNA, 71 nt, Human
gauggggcaacggcugagggugggggcaguguguaaggcaccuuuugcggucagcccagccacacuccauc

SEQ ID NO: 11082 - RNA, 67 nt, Human
uugucuccucuccaauccuugagcacccugauaugcaacaugggggguaaucagaaggaggaggcag

SEQ ID NO: 11083 - RNA, 81 nt, Human
cugccauugcccacuuacuacacccugcccaaugccaccguggcuccugaaacgcgggcaguaaucaaguggaugaagcgg

SEQ ID NO: 11084 - RNA, 63 nt, Human
gcuguguuucgcuggcucagcacugucuaugcuggcaguaaucuggccaugcaggacaccagc

SEQ ID NO: 11085 - RNA, 66 nt, Human; identical to SEQ ID NO: 3294

SEQ ID NO: 11086 - RNA, 97 nt, Human
ggcugucuagaagagucaguuguugcaccacuagugucuguuuuauuucuacauggguguuaugggcgaugcaaaccugauuuucuucgaaucggcc

SEQ ID NO: 11087 - RNA, 66 nt, Human
gucguuacaaaaaguuuuuuuuucuuuuaaauaaauucacacaaagaaagagaaauagaaagcgac

SEQ ID NO: 11088 - RNA, 60 nt, Human
uugagaugggcacguggaagucaaaggguuucucuuuuuuuuuuuuuuuuccccuuuuag

SEQ ID NO: 11089 - RNA, 61 nt, Human
accuugaugaugcuuggaagguuccgggaagcucuuggagaugcacaacagucagugaggu

SEQ ID NO: 11090 - RNA, 77 nt, Human
cauggaauaugagaaaauagcagaaacagauuuugagaagcgagauuuucggaagguuguuuucugcauggaccgug

SEQ ID NO: 11091 - RNA, 79 nt, Human
ucguuauccagaagcacagucuguggcuagugacauucuacgaauggauuccaccaaugcagaugcucuguauguacga

SEQ ID NO: 11092 - RNA, 60 nt, Human
aagcuuccuuuugacacagcugggaccauccuuauauaguuaguuuuaaaaaucuugcuu

SEQ ID NO: 11093 - RNA, 77 nt, Human
gggacccucaagagagcauggagaguguggggugugccuggauaggcccccuuugcaggcagucuuuugagagucuc

SEQ ID NO: 11094 - RNA, 94 nt, Human
cuuuuuguuucauuuaaugaaauuuugauguguugaacugcuuuccuggugucagagaaacaugagaccaucgcucaauaauggaaauaaaaag

SEQ ID NO: 11095 - RNA, 71 nt, Human
gguugggggggaaggaacccaguugggaaugaaggaaguuuccagaaaccaaccgggcccaccgucuaacc

SEQ ID NO: 11096 - RNA, 71 nt, Human; identical to SEQ ID NO: 1145

SEQ ID NO: 11097 - RNA, 88 nt, Human; identical to SEQ ID NO: 2733

SEQ ID NO: 11098 - RNA, 74 nt, Human
uccuccaaggaagugauaauaguggcaacauuuaaaagauaaaaugggaguuauuaggagaugauuggugagga

SEQ ID NO: 11099 - RNA, 68 nt, Human; identical to SEQ ID NO: 6891

SEQ ID NO: 11100 - RNA, 73 nt, Human
uuggggaacacgucaccacgguacaacaggcagcaagccauguauuuaccauggcgaggucacauuucaccaa

SEQ ID NO: 11101 - RNA, 107 nt, Human
uuacuguuccauuuugcaacauccugcaacaccauccugggagacaagagcauuaccgagcuuggcuuucacgggggaggguuguauucaguaaaaaagaauaguaa

SEQ ID NO: 11102 - RNA, 83 nt, Human
uuucaauuugacaauguccggcccuugaaauuucauacccggugggaaaauuuuaaauggccgggaccuugguugguuugaga

SEQ ID NO: 11103 - RNA, 64 nt, Human
gcauacauugacaaucuaggguauauaugcuauguauguuucuuauugcuaugucuauauaugu

SEQ ID NO: 11104 - RNA, 83 nt, Human
ccaacgucuguucauggcugugguuuuaaaagagucccucaacagaugcucuauuuaauaaccaguuuguaccucagaugugg

SEQ ID NO: 11105 - RNA, 70 nt, Human; identical to SEQ ID NO: 3612

SEQ ID NO: 11106 - RNA, 65 nt, Human; identical to SEQ ID NO: 3613

SEQ ID NO: 11107 - RNA, 61 nt, Human
gaaaccaaguaauugccaauauucacacaacugguuugugguagaaccaagacuugaauuc

SEQ ID NO: 11108 - RNA, 70 nt, Human
aacacauucccgguggauagaauugcuaaauugugugaaauagguuagaauucuucuuuaaauuaugguu

SEQ ID NO: 11109 - RNA, 93 nt, Human
cuggaccuuuuguccuauguguguggauuccagggcaacucuagcaucagagcaaaagccuuggguuucucgcauucaguggccuaucuccag

SEQ ID NO: 11110 - RNA, 90 nt, Human
gucugauuucugaauguaaaguuguuguguuuuuuuaaauaguaguuuguaguauuuuaaagaaagaacagaucgaguucuaauuaugau

SEQ ID NO: 11111 - RNA, 60 nt, Human
uuugcauagcuguuuaauguuaagucaugacaauuuauuuuucuuggcaugcuauguaaa

SEQ ID NO: 11112 - RNA, 77 nt, Human
aaagcuuuucuuaauguaacuuugaguacauuuuaaugccuucuauuuuuaaaacucaaaaucauuaguugggcuuu

SEQ ID NO: 11113 - RNA, 74 nt, Human
caccuuuuaaauauuuaauucuuauguggacuuauuuccagaaaacuuggugauaauucuugagacaaaaggug

SEQ ID NO: 11114 - RNA, 63 nt, Human
cugccuggauauauuucuacucuugaccaaaguuuguaaagaacaauauaagauuucggguag

SEQ ID NO: 11115 - RNA, 79 nt, Human
cugggguguuuauggcaagucacuuuugacagacauuauuguggcaaauguugucugacuuacuguuucaacaaaccag

SEQ ID NO: 11116 - RNA, 65 nt, Human; identical to SEQ ID NO: 247

SEQ ID NO: 11117 - RNA, 80 nt, Human; identical to SEQ ID NO: 100

SEQ ID NO: 11118 - RNA, 75 nt, Human
ggggagccauaaucugcaacuucauuuucccccauagaagagaaaaaagagcaccaccauuauuaccaccucccc

SEQ ID NO: 11119 - RNA, 68 nt, Human
uccucuuuauuuccuccguuccaaugagaggccuauggcugcucuccaaucccgggaagugaguggga

SEQ ID NO: 11120 - RNA, 118 nt, Human
cuggacagggcuggagagaagcaagggggcuggggagaguggccgguccagcggguagccgccgggggcacgcaucuccagcagcggcaccucaguguggcuugggggucgugucuag

SEQ ID NO: 11121 - RNA, 67 nt, Human
gacuggauggcuuggggaugcagaauuggaucuagaauaaagaaucuguuacuucgaguugcuaguu

SEQ ID NO: 11122 - RNA, 62 nt, Human
gggagucauugaacuucagcucuggaaaggauguuguuaccaaguucaguuugugaauugcc

SEQ ID NO: 11123 - RNA, 66 nt, Human
ggguaaugaguaggugagagggucuggaggaagccucccuacugcuggagccucuacuuauuaccc

SEQ ID NO: 11124 - RNA, 69 nt, Human
ggccguguaggcagaggcacgagacagauaucaguucgggaccgcaccacgccagcguacccaaaggcc

SEQ ID NO: 11125 - RNA, 74 nt, Human
ggggcggcugguggccugagcgggaggccaucaucaaccuggccacccagcccaagaggcccaugugcaucccc

SEQ ID NO: 11126 - RNA, 72 nt, Human
guggggcuggaagaaaagagcaucgacuugauuucuccaaccacucaucccucuuuuucuuucuucccccac

SEQ ID NO: 11127 - RNA, 78 nt, Human; identical to SEQ ID NO: 8274

SEQ ID NO: 11128 - RNA, 60 nt, Human
caguuuuaauucugaagacaaauaucuucauggaaaucuauuuguaagcuucugagauug

SEQ ID NO: 11129 - RNA, 63 nt, Human
ccuuauuugaauacuuagaaaaaaauggccaguggccgauugaaagguauauuaaaauuaagg

SEQ ID NO: 11130 - RNA, 60 nt, Human
gugcacuccagccugugugagcagagcgagacucuggccucacuacagaugagaaugcau

SEQ ID NO: 11131 - RNA, 65 nt, Human
gugguggcacaugccuguagcuccagccauuugggaggcugagguaugauaauugccugaaccau

SEQ ID NO: 11132 - RNA, 85 nt, Human
ggaggguguguuuaaggugcuuuuguccuuccaauugggcacucuucucucuccuuggacauacagcacucucagaucacuuuuu

SEQ ID NO: 11133 - RNA, 65 nt, Human
ccuuucuguuucccccccccagaggguaaaaggcccccuguucggggaacccucccgcuaaaagg

SEQ ID NO: 11134 - RNA, 81 nt, Human
gggcgugggcagcaaacaggucuuuccgugggcugugugaagaagacacaccuuuugacaacacuguuugggcccaacccc

SEQ ID NO: 11135 - RNA, 75 nt, Human
uucguugacgcuugcccccaaggguuccggguaccccaacacagaaggggugcccgucgccgggcacgcagggaa

SEQ ID NO: 11136 - RNA, 78 nt, Human
ggcaaguugguccuugcuggcugauccagcuuccccgucagcauauggugagcaguucggugagaggaccacacuucc

SEQ ID NO: 11137 - RNA, 61 nt, Human
uccucuaugaaguuaaaugacugguucaguguuaacacugcuagugagcgacagagaugga

SEQ ID NO: 11138 - RNA, 61 nt, Human
ugccggaaaggcuucccgugagacuggauaagaaaucaaaaaucuggugaaauugccggca

SEQ ID NO: 11139 - RNA, 112 nt, Human
gcuacugggcauaguccccuggaacuggugggucacuuggaagggaugcccuuugucauggacuugcccuucuggaaauuaccccgagagccagggaaggggcucagugagc

SEQ ID NO: 11140 - RNA, 63 nt, Human
ggaaguguggugcagcugagccacaaagcaaacuuuggugcgagccacagugcaucacuuucc

SEQ ID NO: 11141 - RNA, 62 nt, Human
ugggaagcuuucuaaacuccaacugagucccaccagcuuuaauuauuccucuagcucuccca

SEQ ID NO: 11142 - RNA, 73 nt, Human
caguuucuagagucuguugccaacauguuugcagcugcucagcagcucucgcagaacaucaguucagaaacug

SEQ ID NO: 11143 - RNA, 61 nt, Human
gaagugggucagauugcaguguguaguuuuggagaaucuguaaagcuguuacacccauuuc

SEQ ID NO: 11144 - RNA, 72 nt, Human
uuuucucacgugguuucuagcuucuucagacucagcccaaauuaggaagugcagaagccaugauggugaaaa

SEQ ID NO: 11145 - RNA, 84 nt, Human
acucaauaagaaucuuuuauaucaaguaaaaugaaaguugaugauagaauaucaaauagugaauuugauaugaaaucuaagagu

SEQ ID NO: 11146 - RNA, 72 nt, Human
uuuucaagucucugggaggccaguggcagcagcaggucuguguuucaccuucuucccaugugagcuuggaaa

SEQ ID NO: 11147 - RNA, 129 nt, Human
guuuaaaacuuugcugcuuuuuuuacauaaagccugugccuuuccuagaaaguuaagauguaaauguauucucacauguaaauuugaaaguucaggggucuauuaugaaaugauacacauguuuuaaau

SEQ ID NO: 11148 - RNA, 62 nt, Human
ugacauguugccaacaccuugagaagcauuauuuguuucuaauaaaaguaauggcuuuguca

SEQ ID NO: 11149 - RNA, 62 nt, Human; identical to SEQ ID NO: 5011

SEQ ID NO: 11150 - RNA, 77 nt, Human
gagcaaucaaagcguuaucugucaaagcaauuccgcuucuuauugauuuugccauaaccacgcuuguagauuaguuc

SEQ ID NO: 11151 - RNA, 67 nt, Human
agugacccagaauacaccaucaucaugaaaaaucuuuagguuucccaguggaguaaagaaagucacu

SEQ ID NO: 11152 - RNA, 65 nt, Human
ggcuuguggaccaguaacugucaauggcuaaaaccaccgaauaggagccaaugacuccacaaguc

SEQ ID NO: 11153 - RNA, 80 nt, Human; identical to SEQ ID NO: 9102

SEQ ID NO: 11154 - RNA, 78 nt, Human
auaccaauuccccuuuacaacugaugcagaucauuaugaaauacuggaaggcauacccuacacuuuaggaauuggugu

SEQ ID NO: 11155 - RNA, 62 nt, Human; identical to SEQ ID NO: 7075

SEQ ID NO: 11156 - RNA, 71 nt, Human
ccuuuauguacuaucucuagaaguaaaauaguaaaaacuauauaagauagauauauaugaguagaacaagg

SEQ ID NO: 11157 - RNA, 71 nt, Human
guucaauuguacaaaaccuaauuuguugucaaaaguaucaagcaauaaauuuuaacuauuguacagggaau

SEQ ID NO: 11158 - RNA, 84 nt, Human; identical to SEQ ID NO: 286

SEQ ID NO: 11159 - RNA, 70 nt, Human
cauuucuucuauucuagcaauauuugaagugcuggcacuagagauguugucuggugagcaagcagagaug

SEQ ID NO: 11160 - RNA, 74 nt, Human
ggcgucguuuuucuucuuccagggcucguuuuuuggcuuccauuucccguucccuggauucgagcagccgcguc

SEQ ID NO: 11161 - RNA, 74 nt, Human; identical to SEQ ID NO: 365

SEQ ID NO: 11162 - RNA, 77 nt, Human; identical to SEQ ID NO: 3082

SEQ ID NO: 11163 - RNA, 61 nt, Human
guggcugcuuggauuuaaauuaauucaaauuaaauaaauuuaaauuccauuccucagucac

SEQ ID NO: 11164 - RNA, 70 nt, Human; identical to SEQ ID NO: 6934

SEQ ID NO: 11165 - RNA, 60 nt, Human
guugccgcgcagguagaggcuuacuagaagugugaaaacguaggcuuggauuaaggcgac

SEQ ID NO: 11166 - RNA, 72 nt, Human
ucauuuguuuugagguuaguuugauuagucauugguggguggugauuaagucgguggugaugagauauuugg

SEQ ID NO: 11167 - RNA, 77 nt, Human; identical to SEQ ID NO: 9246

SEQ ID NO: 11168 - RNA, 84 nt, Human; identical to SEQ ID NO: 286

SEQ ID NO: 11169 - RNA, 89 nt, Human; identical to SEQ ID NO: 288

SEQ ID NO: 11170 - RNA, 94 nt, Human; identical to SEQ ID NO: 5398

SEQ ID NO: 11171 - RNA, 87 nt, Human
acaaauacauaaggcauagaaugguuuacuggcaaauagcagugugaauacucuauaggccuaacuucauuuuuacuuauuuuuugu

SEQ ID NO: 11172 - RNA, 90 nt, Human
auuuauguagcaugccacuaaaagaggcagaaaauuuuuccuuuaacuuaaauuugaauuugucuugauguuuguuugcuuuuuguaggu

SEQ ID NO: 11173 - RNA, 71 nt, Human
ucaggaauccuugguaguuuaacucuggaaguuuuagugggacuuugggaaacaaauacuauuuguucugg

SEQ ID NO: 11174 - RNA, 65 nt, Human
aggugaggagguggagagacagcccacccccguguccaccgugaccccuguccccacacugaccu

SEQ ID NO: 11175 - RNA, 81 nt, Human
ucgugcgcaucguugcuggccuggcuguccuggcuguccuagcuguccuaggagcuaugguggcuguugugauguguagga

SEQ ID NO: 11176 - RNA, 86 nt, Human
ugccugugugggacugagaugcaggauuucuucacaccucuccuuugugacuucaagagccucuggcgucucuuucugcaaaggca

SEQ ID NO: 11177 - RNA, 79 nt, Human; identical to SEQ ID NO: 5860

SEQ ID NO: 11178 - RNA, 72 nt, Human; identical to SEQ ID NO: 5861

SEQ ID NO: 11179 - RNA, 61 nt, Human
gaugccgacugggagcuacugggugagcuggacuaccagccuucaggaccaggacagcguc

SEQ ID NO: 11180 - RNA, 61 nt, Human
gccugccuucuucccugcucuguccccuaagcucccuccaggcagggaaaagaggccaggu

SEQ ID NO: 11181 - RNA, 60 nt, Human
acugcgggucacguugagagccaacaccaugggcucgguuccggcugaaaacccgccagu

SEQ ID NO: 11182 - RNA, 85 nt, Human; identical to SEQ ID NO: 10214

SEQ ID NO: 11183 - RNA, 73 nt, Human
cgucuuggcucucuccgcuucguccuuaccagacuucgcacuuugugaggcgguucaauggugaagccaagug

SEQ ID NO: 11184 - RNA, 72 nt, Human
ugaggaagcagggccccggguggccaagcgggcugagcaaugcccuggaggcugaauggggucucguccuca

SEQ ID NO: 11185 - RNA, 76 nt, Human
cccgcuacgacauggaccgcuuuggcguggucuuccgcgccagcccgcgccaguccgacgucaugaucguggccgg

SEQ ID NO: 11186 - RNA, 70 nt, Human
ggccaagcuggaugaccucgucaacugggcccgccggaguucucuguggcccaugaccuucggccuggcc

SEQ ID NO: 11187 - RNA, 85 nt, Human
gagaugagggggcacauuuaaaucuguguauguccagaguccgugaggauugggaaucagucuaaagcugugcucgcuucuccuc

SEQ ID NO: 11188 - RNA, 89 nt, Human
ucuuaguaaccuaauguaguuacuuacuucuuuuauccuacuacauauauaauagaaccauuauaguaacgucaaugugguuauuaaga

SEQ ID NO: 11189 - RNA, 63 nt, Human
gggggggggaaaauuuuuuuuuuuucucucuccgccaaaaaaaaauuuuuuuuuccccccccc

SEQ ID NO: 11190 - RNA, 63 nt, Human
cgaacacagggaaaguuccagauuauggucucuuggugacccuggccauggcccugaugggug

SEQ ID NO: 11191 - RNA, 64 nt, Human
ucauuguggggcucauuuugagauuaccauucuggggacaaccuucagaugagaacugcuuuga

SEQ ID NO: 11192 - RNA, 85 nt, Human
ccaggugcgguggcacacgccuguagucccagcuacucaggaggcagaggcuacagcgaaccaacaucacugcacuccagccugg

SEQ ID NO: 11193 - RNA, 66 nt, Human
gaccaccuuucucaguugugccucuagauccagggauuuuaaggaaaauuaggagaaauaaugauc

SEQ ID NO: 11194 - RNA, 60 nt, Human
ggccgaggcagggugaucacuugaaggcaggaguucgagaccauccuggccaacauaguc

SEQ ID NO: 11195 - RNA, 69 nt, Human
gguguguauaaagauggggggagcuucgcugaacguuaagguguaguaaaggcaccuccuuguauuccc

SEQ ID NO: 11196 - RNA, 69 nt, Human
aacgggagugggcacagaaagccuucuccuggcaacaggacaagggcugcccgcguguccagcccuguu

SEQ ID NO: 11197 - RNA, 77 nt, Human
cucuccuggcgcugauagguggguccaagcagaguugaucagucccugccugcccugccuaggucuagccaggggag

SEQ ID NO: 11198 - RNA, 95 nt, Human
guagaguacauaaucagugccacacagaggcagggcgugucugagagacuaaugccuguccugccucuggccuguguccuggguguguaccauac

SEQ ID NO: 11199 - RNA, 66 nt, Human
auaaacguguucuuuugagaagugucuguucauauccuucgcccacuuuuugaugggguuguuugu

SEQ ID NO: 11200 - RNA, 89 nt, Human
ggcugggucaaaugguauuucuggcucuagauccuugaggaauugccacacugucuuccacaaggguugaacuaauuuacccucccgcc

SEQ ID NO: 11201 - RNA, 78 nt, Human; identical to SEQ ID NO: 99

SEQ ID NO: 11202 - RNA, 65 nt, Human; identical to SEQ ID NO: 247

SEQ ID NO: 11203 - RNA, 80 nt, Human; identical to SEQ ID NO: 100

SEQ ID NO: 11204 - RNA, 129 nt, Human
cacaggugacgacaguagcagggucucagcugggagggucccgucugguucuggaccuccauccucucuuuuagccuccagaggcggcuccucuccacuuggauuauccgggcagagcucguccuugug

SEQ ID NO: 11205 - RNA, 90 nt, Human
gaggguccccucgggcucuggaucuccauccucuccuuuaaccuccacagguggcgggggugguggggccucagcugggaggguccccuc

SEQ ID NO: 11206 - RNA, 66 nt, Human
gccuuguaucucuguccccgggaggcuccuccuugccuucggcacuggcgggcagagagacaaggu

SEQ ID NO: 11207 - RNA, 83 nt, Human
auccagcaagaugcaagccuucagaaucugggauguuaaccagaagaccuucuaucugaggaacaaccaacuaguugcuggau

SEQ ID NO: 11208 - RNA, 64 nt, Human
gaauggaaaucugcagaggccuccggagucaccuaaucacucuccuccucuuccuguuccauuc

SEQ ID NO: 11209 - RNA, 110 nt, Human
gucugcagcagcauggccugccugcacaaacccuaggugcaauguccuaauaccuuguuagggucuuuguauucaaguuugaagcugggagggccuggcuacugaagggc

SEQ ID NO: 11210 - RNA, 84 nt, Human; identical to SEQ ID NO: 286

SEQ ID NO: 11211 - RNA, 89 nt, Human; identical to SEQ ID NO: 288

SEQ ID NO: 11212 - RNA, 94 nt, Human; identical to SEQ ID NO: 5398

SEQ ID NO: 11213 - RNA, 84 nt, Human; identical to SEQ ID NO: 286

SEQ ID NO: 11214 - RNA, 89 nt, Human; identical to SEQ ID NO: 288

SEQ ID NO: 11215 - RNA, 94 nt, Human; identical to SEQ ID NO: 5398

SEQ ID NO: 11216 - RNA, 89 nt, Human; identical to SEQ ID NO: 288

SEQ ID NO: 11217 - RNA, 113 nt, Human
gaaggaggcacuauggccuugucugggaucucagauuuuggcaacaucucagccacagcgggugaaaacuacagugucgucuccugggucccaaggagggccagugcaacuuc

SEQ ID NO: 11218 - RNA, 79 nt, Human
guguuauuuuuauuuucuuugcuuuggucuauacaaaaaaaccaauaaccaaaaacauaaagcgauaauaauaaaacac

SEQ ID NO: 11219 - RNA, 62 nt, Human
ucugcuuggaccucccccagccccccacaccaugugcgggaaaugggggggucugaaacagg

SEQ ID NO: 11220 - RNA, 62 nt, Human; identical to SEQ ID NO: 793

SEQ ID NO: 11221 - RNA, 80 nt, Human; identical to SEQ ID NO: 794

SEQ ID NO: 11222 - RNA, 66 nt, Human
ugcugcuaugaaaucagauagcaacaacgacaacauuauuagguuuugaacuaugauuuaguagca

SEQ ID NO: 11223 - RNA, 66 nt, Human
uuaagacaaagcaauuuuaauacuaggugcacaccacaugcccuugcugcaaacugcuuuucuuga

SEQ ID NO: 11224 - RNA, 74 nt, Human
uuacugaauggugcugguaaauacuacacaaauuuuuuuugucacguugcaaccuuuuguuuccaauuuaguga

SEQ ID NO: 11225 - RNA, 100 nt, Human
cuacggccugagccacggccuuaaccucccgccaagugguggcuggaugugguccugcagaccuuccaccuggcggguguccaggaugcucaggcuguag

SEQ ID NO: 11226 - RNA, 80 nt, Human
gagguggucuuauccagcucagcuuccccugggacccaccgugggaccugaggcagaacugggguggacuuggccuccuc

SEQ ID NO: 11227 - RNA, 65 nt, Human; identical to SEQ ID NO: 1518

SEQ ID NO: 11228 - RNA, 87 nt, Human; identical to SEQ ID NO: 76

SEQ ID NO: 11229 - RNA, 85 nt, Human; identical to SEQ ID NO: 4613

SEQ ID NO: 11230 - RNA, 60 nt, Human
aagcugguacgccugcagguaccgguccggaauucccgggucgacccacgcguccgguuu

SEQ ID NO: 11231 - RNA, 66 nt, Human
gugucuggaaaaauucaccgugagccugaaccacaagcuggacagccaugcggagcuucuagaugc

SEQ ID NO: 11232 - RNA, 102 nt, Human; identical to SEQ ID NO: 3961

SEQ ID NO: 11233 - RNA, 68 nt, Human
aggagcaaccucuggagccaucgcgauugauuccucccaucccaagauggcuucuggguuccacuccu

SEQ ID NO: 11234 - RNA, 65 nt, Human
cccaaacaccacggauaacaccccucccccuuuuuuggaggcugacugauaccuggacuucuggg

SEQ ID NO: 11235 - RNA, 90 nt, Human
cucuguuguucaccuuuugcuuuuugcacuguuuguucucuuaucuggauuuugagcuuagugcuaggacugagaggcugcaccauaggg

SEQ ID NO: 11236 - RNA, 78 nt, Human; identical to SEQ ID NO: 99

SEQ ID NO: 11237 - RNA, 65 nt, Human; identical to SEQ ID NO: 247

SEQ ID NO: 11238 - RNA, 80 nt, Human; identical to SEQ ID NO: 100

SEQ ID NO: 11239 - RNA, 70 nt, Human
gaaauuuuauuacugugauuaagaacauucuguaaaacuugagauacaccauucauuguaggaaaauuuc

SEQ ID NO: 11240 - RNA, 61 nt, Human
ugcugccaccauuuuucucagacuucggaggaguauuuugcugcugagacucaggcaugca

SEQ ID NO: 11241 - RNA, 62 nt, Human
agaucagacuguuacugugucuauguagaaaaaggaagacauaagaaacuccauuuugaucu

SEQ ID NO: 11242 - RNA, 87 nt, Human
agagaaucauacauuuguuauauugucacaucugccuugagucuuucaacuauaagugacagcuauuuccuaaucaauguguucuuu

SEQ ID NO: 11243 - RNA, 82 nt, Human
uucugguagcaggaugggauggagaaagagacuguguuccaaguauugauauguuuguuuucucaucccaaaauuaucagag

SEQ ID NO: 11244 - RNA, 61 nt, Human
gcgcuccugcuggugaggccccagacauaccugacaaagugucugagcgaagcacgagugu

SEQ ID NO: 11245 - RNA, 74 nt, Human
ggggaacgacggaaccacaucuaggccacaaaggagaacagaggagacagauggaggacccagaacgauacacc

SEQ ID NO: 11246 - RNA, 86 nt, Human
auggcaggaugacggauggcaacgaagcagcuggagaaggacuucagccugcaucgaagaaguacugccaaggucauccgugucau

SEQ ID NO: 11247 - RNA, 87 nt, Human
gccgcacagccagaugcgccugacugccgcgugcgccagaagaagggcgcacugauggagauccaggugaacggaggcacugcuggc

SEQ ID NO: 11248 - RNA, 61 nt, Human
cccagcaggcaugacggccgcacgcgcaccggcgcgcuggugcguggccgucaccugcggg

SEQ ID NO: 11249 - RNA, 68 nt, Human
cugagcccccgcuccuccucugcggugagaugccagagccguggcggagcgaggaggagugggcucag

SEQ ID NO: 11250 - RNA, 90 nt, Human
cuggaggucuccacucuggucagcaaguauccagacaaucagggaugaccacaucgggugcgcugcuggcuguugcguggggacccccag

SEQ ID NO: 11251 - RNA, 78 nt, Human
gacaccgccgggacaaagcugauugucucucccugcagccacacaguggcucccuaucacgcugccaccggaccuguc

SEQ ID NO: 11252 - RNA, 64 nt, Human
ggcuccugcacgacagcgcacuuuccuuccggacgcccggcaggcagcgccccggcagggugcc

SEQ ID NO: 11253 - RNA, 99 nt, Human
gaacuugauuuucauuaauccagagcugcagcaccagagauaauuucaaucaacucuuuugugaugacagcuuggcggguacgguugaaugucaauguc

SEQ ID NO: 11254 - RNA, 80 nt, Human
uucuugguaauuuugcagcacgucagcaucaauaucgucauagauacucaugcugucagcacuugcaacgguauuaaggg

SEQ ID NO: 11255 - RNA, 77 nt, Human
gcauugggcaagaagauggaugcagggaggaccaugaagcugcuaguuuucccggacaucgacugaggcccaguugc

SEQ ID NO: 11256 - RNA, 67 nt, Human
gguggaugguauuugacacguguauccacgggucauaaccugaagugcuguaucaauuuaccccacc

SEQ ID NO: 11257 - RNA, 76 nt, Human
agccuuuuaacagcagaaaauuauccgguagcaaauugucuuagggaaauuacuacacuguuguaacaaaagggcu

SEQ ID NO: 11258 - RNA, 77 nt, Human
auguugaacuuucuuccuugaaucagcguuagagucaaauguggguuuaaugugaaugcuaaaugaauaugcgacau

SEQ ID NO: 11259 - RNA, 100 nt, Human
gcaagugacuaaguguucauuaccuuuugguuagcguugcuaucacuguagcugugcugccuuaacaucgagaguugaguuguggacuuagucauugagu

SEQ ID NO: 11260 - RNA, 66 nt, Human
gugugcaguguaaauaguguaauugugcauauauauguguauagcagcauggacuuacuuucacac

SEQ ID NO: 11261 - RNA, 71 nt, Human
gccgccacuuggcucauuacagcaguacuaguaugggggugggaggggugaggcuguggagugaaggcggc

SEQ ID NO: 11262 - RNA, 65 nt, Human
gucugucuagccccaaagagccugguuuucucaguaucaguguagcuccuggggacuucauaggc

SEQ ID NO: 11263 - RNA, 105 nt, Human
uuaugguccccacaaccacggccgucuuguuuucccggccaggaagcuucaucuuccggaucauccgggaaagggacagaggcggccgguuggugcgacucauaa

SEQ ID NO: 11264 - RNA, 72 nt, Human
gcuuucaccagcuuuacccaaacgccuuuugucuuccgaagucaccugugugaaggggacaguggugcaagu

SEQ ID NO: 11265 - RNA, 63 nt, Human; identical to SEQ ID NO: 1366

SEQ ID NO: 11266 - RNA, 86 nt, Human; identical to SEQ ID NO: 1381

SEQ ID NO: 11267 - RNA, 63 nt, Human
aagacuccaugcccaagugccuguaauccccccccucaaggcccuguuuauguugggagucuu

SEQ ID NO: 11268 - RNA, 61 nt, Human
ggagaggggugacccugaguggagcucugagacagaugcucucguugggucacgccuuucc

SEQ ID NO: 11269 - RNA, 72 nt, Human; identical to SEQ ID NO: 3662

SEQ ID NO: 11270 - RNA, 74 nt, Human; identical to SEQ ID NO: 365

SEQ ID NO: 11271 - RNA, 102 nt, Human; identical to SEQ ID NO: 2172

SEQ ID NO: 11272 - RNA, 77 nt, Human; identical to SEQ ID NO: 3082

SEQ ID NO: 11273 - RNA, 81 nt, Human
ggaaugcuccuggcaacuaugggaauacggggugccugaaaggccauccuugaaacaccuuaacccuguugccgccauucc

SEQ ID NO: 11274 - RNA, 63 nt, Human
ccccacaaggaagagguacuguugcagccgcugcagcugcugccacagacaguauugccgggg

SEQ ID NO: 11275 - RNA, 83 nt, Human; identical to SEQ ID NO: 3404

SEQ ID NO: 11276 - RNA, 71 nt, Human
guaccacacuggacguggggguccucccccagcuaugggccgaggagcacccccuccaggcaugauggugc

SEQ ID NO: 11277 - RNA, 73 nt, Human
cugaaucuccccucacccucgcagggacccucugaggaggguauucccccauuuugcaggggagggaauucag

SEQ ID NO: 11278 - RNA, 83 nt, Human
cgcagcgucuccacaaugggguggucaggguugaucuccaggugcuuuuuggccaucauauagcccaugguggaguugucccg

SEQ ID NO: 11279 - RNA, 76 nt, Human
agggucauggcuaagucauuugauucaguagaaaagagauuauaaauacaugaagggcuacuuaacucaugucccu

SEQ ID NO: 11280 - RNA, 86 nt, Human
acguuccccuguugccaccuguuuuuguccacggggagcuugcuguaaaagaaaaaggaccccucggaauccaacacgggaggcgu

SEQ ID NO: 11281 - RNA, 89 nt, Human
cccacuccacggggaugucguugggauaaaagccuuugaccaggcagguaaggcugaccugguuuuuggucaacucaucccgggauggg

SEQ ID NO: 11282 - RNA, 108 nt, Human
ggcaggguguacaccugugguucucggggcugcccuuuggcuuuggagauguuuucucgaugggggcuggaagggcuuuguuggaaaccugcacuuguacuucuugcc

SEQ ID NO: 11283 - RNA, 67 nt, Human
cugaagcuggggcugcagccugggccuugguuugauccuuggccuuggccuuggccuuggccuuugg

SEQ ID NO: 11284 - RNA, 79 nt, Human; identical to SEQ ID NO: 6025

SEQ ID NO: 11285 - RNA, 63 nt, Human
ucccaagcuuggggugggcaauguaggcaagucgaucgagcuugcggcugacacccuuuggga

SEQ ID NO: 11286 - RNA, 75 nt, Human; identical to SEQ ID NO: 74

SEQ ID NO: 11287 - RNA, 87 nt, Human; identical to SEQ ID NO: 76

SEQ ID NO: 11288 - RNA, 71 nt, Human; identical to SEQ ID NO: 77

SEQ ID NO: 11289 - RNA, 66 nt, Human
cugugugagagguauuuuaagaagagaguguguugacgcaccuuuucuaucauacacaauauauag

SEQ ID NO: 11290 - RNA, 72 nt, Human
cagucuccaacuccuggccucaagggauccucacaucuuagccuccagaauagcuaggaguaggaguagcug

SEQ ID NO: 11291 - RNA, 65 nt, Human
ugauucucuuuauaucugauuuuuuuuuuuaaacagcuaaaauguaaguauguaucucagaguca

SEQ ID NO: 11292 - RNA, 70 nt, Human
uguucuggaacuuucccauuaaccuucugcauuuagaaggaauuauagauguugagugcuccaguaaaca

SEQ ID NO: 11293 - RNA, 107 nt, Human
cucccugggucugcguucccucccucugggccugacugagccugcucauuguuuucccuuuauuacacaggacagccaggggaggagggggggccaagcccugggag

SEQ ID NO: 11294 - RNA, 71 nt, Human
gaauguuuucuaccagugugcuuggguuugccaugcaugcgaggcugaguugcuguaggcgucuugcauuc

SEQ ID NO: 11295 - RNA, 103 nt, Human
ggugggcgugagaggauagguggcagggcagaaacugggcagcccugacuugauagcagcagggggagcucccaagcugccaagccccugccuccagccuucc

SEQ ID NO: 11296 - RNA, 65 nt, Human
cauguggggacucaacacugacccagaucacagcugggcuggacccaguggggagaauccagaug

SEQ ID NO: 11297 - RNA, 69 nt, Human
gggaccugguuagucuuggggcagagaguaucuacuugggcacucucuuccaagaaagaccuugucucc

SEQ ID NO: 11298 - RNA, 86 nt, Human
gcuggcgugccugggcagcacccucggggguagcagcuacuccagcugcuacagcuuuggcucuggugguggcuauggcacgcagc

SEQ ID NO: 11299 - RNA, 70 nt, Human
aacugaacaagaggaguauguauucccgugugccagagugccaggucaccacauacuauuauguuggguu

SEQ ID NO: 11300 - RNA, 80 nt, Human
caagcggaggugacccugagaguguggcuggggaguaugggcggcacucccucuacaaaaugcuugguuacuucagccug

SEQ ID NO: 11301 - RNA, 63 nt, Human
cgggucuucgccaacauccuccucuacauccagaggaccaagagcauguuccagaggaccacg

SEQ ID NO: 11302 - RNA, 60 nt, Human
gaggaggcgauagacuuucuucguugcaaucccaaaaucuggaauguucauaguguccuc

SEQ ID NO: 11303 - RNA, 78 nt, Human; identical to SEQ ID NO: 99

SEQ ID NO: 11304 - RNA, 80 nt, Human; identical to SEQ ID NO: 100

SEQ ID NO: 11305 - RNA, 64 nt, Human; identical to SEQ ID NO: 287

SEQ ID NO: 11306 - RNA, 131 nt, Human; identical to SEQ ID NO: 6294

SEQ ID NO: 11307 - RNA, 73 nt, Human
gcaucaauagcaacagaaaugggccccaccagugcaacugccuucaucaaggccuucuucugcuuaaggaugu

SEQ ID NO: 11308 - RNA, 69 nt, Human
cgggugguaaaguggcaacggcgaauuuggguaucuggucucccaaaaguacuugccgcucuaccccug

SEQ ID NO: 11309 - RNA, 84 nt, Human
gcucauucaguucaaugcuguggaaaccgagccuguaggugacagcaucagcuacuggccugguaucagcagcugagccugagc

SEQ ID NO: 11310 - RNA, 87 nt, Human
ucugcaauggcugccaggcggaucacuccuccacuggagccaucccgcuccauggccaaagcgagagcauuggcagugaauugcaga

SEQ ID NO: 11311 - RNA, 85 nt, Human; identical to SEQ ID NO: 5538

SEQ ID NO: 11312 - RNA, 71 nt, Human; identical to SEQ ID NO: 1145

SEQ ID NO: 11313 - RNA, 67 nt, Human; identical to SEQ ID NO: 1146

SEQ ID NO: 11314 - RNA, 79 nt, Human
cucgcuauauggggaacgggugucucaaaggcuguugagcacaucaauaaacacuauugcgccugcccugguuagcaag

SEQ ID NO: 11315 - RNA, 75 nt, Human
ggucucuccccucacagugucucuuuaacaauuuucuuggcacagauaaucgcaucugugaggucaucagugacc

SEQ ID NO: 11316 - RNA, 70 nt, Human
uggcuaaguugguugcuuuuuggugauuagucaaagagaccaaaucccauauccucguccgacuccuccg

SEQ ID NO: 11317 - RNA, 67 nt, Human
gaccuuuguuccuuaaagcaauaacugacaauucuuuguaguucucuguggggaguaacaagggcuc

SEQ ID NO: 11318 - RNA, 118 nt, Human
auguaacauuuuccugggccuugacuacagggggcuuugugacauaacugaaugcccauaaccaugguaauguuacucuucuccugccuggucucugcucacagggaaauugugacau

SEQ ID NO: 11319 - RNA, 90 nt, Human
gacucuccucuuuuucucaggccccacauauuuggguauugugacauacccaaaugugacacugggcucaacaccuaagggacgggaguu

SEQ ID NO: 11320 - RNA, 70 nt, Human
uuggacaccacaaauuguggguauugucaaauauugcuggauccuguacccauguuaugugacucuccaa

SEQ ID NO: 11321 - RNA, 65 nt, Human; identical to SEQ ID NO: 9128

SEQ ID NO: 11322 - RNA, 74 nt, Human
auaagaaaaucaaagacaaugacauccucagcucccucucaccccaaguaugccauugucuuuguaauucuuau

SEQ ID NO: 11323 - RNA, 75 nt, Human; identical to SEQ ID NO: 9129

SEQ ID NO: 11324 - RNA, 106 nt, Human
aaauggaaggauucagcuuucaguuaaaaaagaagaaaaagaaauggcaaagagaaaguuuuuucaaauuucuuucuuuuuuaauuuagauugaguucauuuauuu

SEQ ID NO: 11325 - RNA, 80 nt, Human; identical to SEQ ID NO: 367

SEQ ID NO: 11326 - RNA, 124 nt, Human
ggcugcuagaggggauuaguuccggagacugagacuguuggcuccaccuccaagcugagcuaggguggagggcagggugggcaggaagugacaggaaguuaagcuguuccucucccuggcugcu

SEQ ID NO: 11327 - RNA, 68 nt, Human
ucugcucagccuuaacuucucaacuuugccuuagcacaggguuucuguagggagugggggcugcuaga

SEQ ID NO: 11328 - RNA, 73 nt, Human
acuguguuaguaacucuuuaugaauauugucuaaaaacuaaauaagauauucauguaaagugauuaucacagu

SEQ ID NO: 11329 - RNA, 80 nt, Human
accacggccgucuuguuuucccggccaggaagcuucaucuuccggaucauccgggaaagggacagaggcggccgguuggu

SEQ ID NO: 11330 - RNA, 63 nt, Human
aggguuaguuuuuguagccucggcuggcccgucggccucuggcacgcucgaacuuccggcccu

SEQ ID NO: 11331 - RNA, 60 nt, Human
cagcaagaaucuucaguaccagaggugccugauguugcacauuugccacuugagaagcug

SEQ ID NO: 11332 - RNA, 94 nt, Human
uaccagggaauucauccggugacuuagggugaaguugguguaccuguguugguuaacagauuaauccuaaugguacuggauuaaaguuccggua

SEQ ID NO: 11333 - RNA, 64 nt, Human
gcugggcucagaaggcucuuagucgugcuugagagugagccuuucgaagagauacucgcccagc

SEQ ID NO: 11334 - RNA, 63 nt, Human
ccauccugggcagagcuguaugaggcccaaguaccgggcaccccagggucugcucaggugugg

SEQ ID NO: 11335 - RNA, 97 nt, Human
cgagugugccucggcaggagggcuugacuuucuucggcacagagcuagccccagugcggucaacaggagucgggccucucugcuaagaacauacuug

SEQ ID NO: 11336 - RNA, 78 nt, Human; identical to SEQ ID NO: 376

SEQ ID NO: 11337 - RNA, 85 nt, Human
agagacguuuggcugucugguguugggcgaaacauuuuuuaagcaaaauuuuuaccggcuucagcagaggcgcaagcgcgacucu

SEQ ID NO: 11338 - RNA, 87 nt, Human
ucacacguaaauggguucaaauucuggagaucacgguuacaacaagcgugguccguacagaguaacuugauaaccuguguacugugg

SEQ ID NO: 11339 - RNA, 77 nt, Human
gagucuccucuguuguaacucgugcuacuaguaaauuguuugcuguaacuugaagauuuaccacgggaagggaauuc

SEQ ID NO: 11340 - RNA, 74 nt, Human
gcagugucgaagauagcaacuucaucagggugucuauagcggaacccauccagaguaccuauggaagacaaugu

SEQ ID NO: 11341 - RNA, 60 nt, Human; identical to SEQ ID NO: 1551

SEQ ID NO: 11342 - RNA, 70 nt, Human
ggaauggaagcggagaacgcgggcagcuauucccuucagcaagcucaagcuuuuuauacguuuccauuuc

SEQ ID NO: 11343 - RNA, 81 nt, Human
aacccagcagcucuccauguccacagcugauuuccagaggauggaagaagucaggaaacuugggacaccgcugcugagguu

SEQ ID NO: 11344 - RNA, 67 nt, Human
gcuagcauaaguuugagggugaugcacaggggcucacaccuguaaucccaaccuuugagauagcagc

SEQ ID NO: 11345 - RNA, 100 nt, Human
aaacuuuucacuuuagagguagcuugccaucucucaggagcccucaccauuguguccauucacuguguauagauggcagaacuuuugaggugcaauguuu

SEQ ID NO: 11346 - RNA, 119 nt, Human
uaagaauacgcuuuuccuaacaggcuacuccuuccuguagagcagaaauuguauuuugcacgaacaugcaguuauugaagauuaggaucaaggauagacaagguauaguaguuaucuua

SEQ ID NO: 11347 - RNA, 94 nt, Human
augggaacagcaagauggcaaaagcuugcugagugguacagcgccagccuggguaguggccuccccagcaaguugcaugucacuagcuuccugu

SEQ ID NO: 11348 - RNA, 72 nt, Human
gggugccccucgaggacugcucugagaucaacugcaugauccgggugaagaagcaggucugggugggcagcc

SEQ ID NO: 11349 - RNA, 73 nt, Human
gguagggaaauugguauacauaaaagugaucagacgaaggucauaggucacaagucugauauaagucccuguc

SEQ ID NO: 11350 - RNA, 63 nt, Human
ucuugggcagugcugguaguaggguguaugaauuaucuauugccaaaacaacacugcccgaga

SEQ ID NO: 11351 - RNA, 63 nt, Human; identical to SEQ ID NO: 8208

SEQ ID NO: 11352 - RNA, 81 nt, Human
ucaggcaagcaacuauaccaauaugcugagggccuugaaaauaaucauccucauuuuaaagggaaauaguggaaagccuga

SEQ ID NO: 11353 - RNA, 66 nt, Human
cuguacggccccaccaacuuugcccccguggucacccacguggccaggaaugcagcggccgugcag

SEQ ID NO: 11354 - RNA, 90 nt, Human
gucaacgcugccaagcuccccauguccaucauuaucgucggcgugggccaggcagaguucgacgccaugguggagcuggauggcgacgac

SEQ ID NO: 11355 - RNA, 78 nt, Human
ugcggaucuccucccgggggaagcuggcugaacgcgacaucguccaguuuguacccuuccgggacuacguggaccgca

SEQ ID NO: 11356 - RNA, 72 nt, Human
gccugcucuagagcgcuuccugcggagacuucaggugcugaaguccacaggggauguggccggagggcgggc

SEQ ID NO: 11357 - RNA, 85 nt, Human
gcgugggucucuaccucugucuccacccgcaagugcuggagaucuuuggcuuugagggggcugaugcggaggacgugaucuacgu

SEQ ID NO: 11358 - RNA, 62 nt, Human
gguuugugauccugagagucuugcuggaggcuggcgagggacucguuaccaucacucccacc

SEQ ID NO: 11359 - RNA, 83 nt, Human
uucagagcugguaucggagcggggagaccugggauagcaaguucagcaccaucgccuccagcuacgaagagugccgggcugag

SEQ ID NO: 11360 - RNA, 64 nt, Human
cgaaguagugaucagguauugcuguuagauauccccgaguccuucaaugcuaucauucccuuug

SEQ ID NO: 11361 - RNA, 123 nt, Human
uuggaucauaugcauaguaccgagaaacuagugcgaaguagugaucagguauugcuguuagauauccccgaguccuucaaugcuaucauucccuuugauauuggaccauaugcauaguaccga

SEQ ID NO: 11362 - RNA, 68 nt, Human
uuccacuggccggcggucaccguggggacugggcccuugcgguacccaacuuaaucggccuuguggaa

SEQ ID NO: 11363 - RNA, 70 nt, Human
uuggccaauuccaauuuagacuucgagcaagcuuaugcaugcggucggaauuccagcuuaauuuggccaa

SEQ ID NO: 11364 - RNA, 74 nt, Human
ggauggaccucuuuauaaaguugguugcugcaaaauccaguucuuccaaaagccacuuuauuuaggguuuauuc

SEQ ID NO: 11365 - RNA, 72 nt, Human
gagaaugauagcauugaaggacucggggauaucuaacagcaauaccugaucacuacuucacacuacuuucuc

SEQ ID NO: 11366 - RNA, 71 nt, Human
ggaaaugauagcauugaaggacucggggauaucuaacagcaauaccugaucgcuacuucacacuaguuucu

SEQ ID NO: 11367 - RNA, 72 nt, Human
gggaaugauagcauugaaggacucggggauaucuaacagcaauaccugaucacuacuucacacuaguuucuc

SEQ ID NO: 11368 - RNA, 108 nt, Human
gauuuaaguguauaacaauuaagugaaauccggagaaauugcacuggaaaccgagccagcagugcagucacuuuggggaaaugcacauaacugauuauggucuaaguc

SEQ ID NO: 11369 - RNA, 67 nt, Human
guuaauauuucuuacugguucugcaggggucugugugccuggaguaggucaguaaagaaagguuagc

SEQ ID NO: 11370 - RNA, 73 nt, Human
guucacacauuuuuuuuuuugcuuuuguacuuuggauuauuuucaacaucagcagaaauuaaaacuaaugaac

SEQ ID NO: 11371 - RNA, 70 nt, Human
uuuugucaaaauguaaauucuaccuucugcaaauagauaauucaacauguaaauuuauguauaaacaaga

SEQ ID NO: 11372 - RNA, 106 nt, Human
cauaugguccaauaucaaagggaaugauagcauugaaggacucggggauaucuaacagcaauaccugaucacuacuucgcacuaguuucucgguacuacgcauaug

SEQ ID NO: 11373 - RNA, 75 nt, Human
cuucgcacuaguuucucgguacuaugcauaugauccaauaucaaaggaaaugauagcauugaaggacucgugagg

SEQ ID NO: 11374 - RNA, 72 nt, Human; identical to SEQ ID NO: 9079

SEQ ID NO: 11375 - RNA, 81 nt, Human
cccccaaugcagcucgugauuuggaaacucaccaucgggcaggcaagugguuccgguuuaagagaugggcauuuagagggg

SEQ ID NO: 11376 - RNA, 61 nt, Human
agcagaggcggucccuggacacgccccagucccuggcaucgcuguccucccgcuccucgcu

SEQ ID NO: 11377 - RNA, 82 nt, Human
gcugucgcccccaagcucgccccuggacacgcccuuccucccugccucacgggacucgccgcuggcgcagcuggcggacagc

SEQ ID NO: 11378 - RNA, 69 nt, Human
gcagcuguaccuccaggcuuuggagaaagagggcagccucuugucaaagcaggaagaguccaaagcugc

SEQ ID NO: 11379 - RNA, 62 nt, Human
cuggggggagagccuggccuggcccgcgucauacaacgggguggggucagcccucuucccgg

SEQ ID NO: 11380 - RNA, 78 nt, Human
gcaugucuuaucccgcugaugauuaugagucugaggcggcuuaugaccccuacgcuuaucccagcgacuaugauaugc

SEQ ID NO: 11381 - RNA, 69 nt, Human
uucauucccuuggguagacaaaauccaacauucaacgacaguuggagguauacaccaagcggaggugaa

SEQ ID NO: 11382 - RNA, 67 nt, Human
gugggcgucuuccaugaccuugaccucguagccggugaggaacuucaucucuauggauuucgcccgc

SEQ ID NO: 11383 - RNA, 66 nt, Human
ugagaugccagaaucgaaaaggcucaucagaggcgaaggccucgcccaggaugaggauggcaucca

SEQ ID NO: 11384 - RNA, 60 nt, Human
cugcucugcuucucugcggcgccgccagacauggucgguucgcuggagagaggcgagcgg

SEQ ID NO: 11385 - RNA, 64 nt, Human
ucagcaccgacaagccgcaacgagggacaggcggaccgcugggcccagcugcggcgggggcugg

SEQ ID NO: 11386 - RNA, 68 nt, Human; identical to SEQ ID NO: 9652

SEQ ID NO: 11387 - RNA, 81 nt, Human
gcggcugggguggcagggccgguguuucugugcugauuucaggguacaggacacuguuggcuuuagagaccaccaggcugu

SEQ ID NO: 11388 - RNA, 60 nt, Human; identical to SEQ ID NO: 7596

SEQ ID NO: 11389 - RNA, 69 nt, Human; identical to SEQ ID NO: 7597

SEQ ID NO: 11390 - RNA, 88 nt, Human
uauuuucaauacuguuagagaguucgguuaacuuagcuaccuuagucuguagcuuuuuugcauucucuaauuuaucuucuugaaaaua

SEQ ID NO: 11391 - RNA, 86 nt, Human
acuacugaaguucugcagaacaguaucgagcuugaauuugggggucucgcaguaauuuaugcucuuugcuuuugccuuuucauagu

SEQ ID NO: 11392 - RNA, 79 nt, Human
aguuuaucacucauggugauuugguuuacucuggagaguaaaauauccggugugucaggcaugacaugaaugguggucu

SEQ ID NO: 11393 - RNA, 61 nt, Human
guguauuuguaaucacuggcaaugucucuagaggcucuugcagccuuuauugcaauggcau

SEQ ID NO: 11394 - RNA, 60 nt, Human; identical to SEQ ID NO: 1551

SEQ ID NO: 11395 - RNA, 79 nt, Human; identical to SEQ ID NO: 1810

SEQ ID NO: 11396 - RNA, 64 nt, Human
ccuugggaaccccaggucaaaaagggcccgaaugacaacuugggaaaaacuugggggcccaggg

SEQ ID NO: 11397 - RNA, 65 nt, Human
gaacaggacccgucgccaugggccgugugauccguggacagaggaagggcgccgggucuguguuc

SEQ ID NO: 11398 - RNA, 80 nt, Human
caucuggauuguuaagaccacagcaacuggcacauucgaccaaguucuuagggugaagucucaguaggccaguccaggug

SEQ ID NO: 11399 - RNA, 87 nt, Human
gagggcucacccuccugcacaaggaaugaacuacaggacaugaucucaaacaccuacagaugcaucuugcaggaagcgugcacccuu

SEQ ID NO: 11400 - RNA, 80 nt, Human
ccggaagcagcugcaagacagcagagaagcugccaauauccaguuagcagaugacuuugcuggcaagcagaggaagucgg

SEQ ID NO: 11401 - RNA, 71 nt, Human; identical to SEQ ID NO: 8989

SEQ ID NO: 11402 - RNA, 78 nt, Human; identical to SEQ ID NO: 8991

SEQ ID NO: 11403 - RNA, 98 nt, Human; identical to SEQ ID NO: 8992

SEQ ID NO: 11404 - RNA, 75 nt, Human
ccccugacauugaccuccuacccugaccccugccugaccaagccaugucugaacaggaggcucaagccccagggg

SEQ ID NO: 11405 - RNA, 80 nt, Human
cugagugcagguuaggcaggugaagugucuccccgcaaaccaagcuagagugccccaccugcucggcccugccuucucgg

SEQ ID NO: 11406 - RNA, 95 nt, Human
cuuuaucucuggcuguucgucccaucguccaccguggcaccagcucccucagccagccaggaugggaccagcgacugagagagccagaggcagag

SEQ ID NO: 11407 - RNA, 91 nt, Human
ggauccagcacauccaggcuucuccuccucacgaggaaccaguggugacagcugaggccaugugaguaggauccugaaugaggcuuuaucu

SEQ ID NO: 11408 - RNA, 73 nt, Human
ccaauccccacauuuaaaauggaauguuugguuuauuuaaaguaaauaggcuauuuuuucuuacugggucugg

SEQ ID NO: 11409 - RNA, 66 nt, Human
ccacuggugaauucaacuggaagcuccuucuauagucugaagaauaccaucugaaagaacuagugg

SEQ ID NO: 11410 - RNA, 61 nt, Human
cacaaauugccugaaaacuuccuuaagcagcuucacuuuauugucaggauaucgcuuugug

SEQ ID NO: 11411 - RNA, 75 nt, Human
cagcugucgcugucuucuugcguccgaagaccugcaccgacugcagcggacccuuggacggcagcgcggcggcug

SEQ ID NO: 11412 - RNA, 79 nt, Human
guacuguagcgugcgcggcucaaucaucuccaggggccgcccguucaccuugaugagaccauugccgcguuugcagugc

SEQ ID NO: 11413 - RNA, 89 nt, Human
cuugugggagauuuaucaagcguuuugagcagaaaggauuccgccuuguuggucugaaauucaugcaagcuuccgaagaucuucucaag

SEQ ID NO: 11414 - RNA, 66 nt, Human
gaggcaugcguguucguggcugcacgguugcuccugguuuguagcccagcagacaggacacuccuc

SEQ ID NO: 11415 - RNA, 84 nt, Human
ggacgcagccuccagaugaauguacuccccaugcaguucuuccagcagagcugugggccagcagccagcacuggaggcugcucc

SEQ ID NO: 11416 - RNA, 62 nt, Human
uuuuuuauguuuccucauuuauuauaaacacaaguucgcagguaaauagagggucuaaaaaa

SEQ ID NO: 11417 - RNA, 61 nt, Human
uugcaggagcugggcugcuuggaucagagguuccauggucugaacugcuccacucugguga

SEQ ID NO: 11418 - RNA, 61 nt, Human
ugguccgccuugaacacgcguggaacuaaaauucgcggcacacucgguugaagacggguca

SEQ ID NO: 11419 - RNA, 74 nt, Human; identical to SEQ ID NO: 521

SEQ ID NO: 11420 - RNA, 64 nt, Human
ggggcccaauaugaacgaagcuggcucggagaaccgagaagaagcuaaaacaagaccugguccc

SEQ ID NO: 11421 - RNA, 81 nt, Human
cgaauggaccacuggagggguucaaagguucgcgucccaguacgggaaugagccucuuugaucucuuccggggcuuuuucg

SEQ ID NO: 11422 - RNA, 75 nt, Human
ggagcgcccuuugggguuggaagcaccccccgacagucggugggagggugauauggcgaccuauuuugggcgccc

SEQ ID NO: 11423 - RNA, 65 nt, Human
ggcuaguuuaggcguugucccuuugccgagacagcgguuugcgagaggaaaauuccaaguaggcc

SEQ ID NO: 11424 - RNA, 91 nt, Human
gcccuuuguucccaggacuuuaaggcaaauauuaaaaauuauugcaaaauuaagaauauacuguuugugauuaaauguccuuggaauuugc

SEQ ID NO: 11425 - RNA, 73 nt, Human
uuaggcugaaacauaugaaauugcugcauuuguaguuuaaaaacugucagcaguuucauaugguuccaccuaa

SEQ ID NO: 11426 - RNA, 80 nt, Human
gcgacgauuuucaaguuggaaccggucaauccgggggaaggggugcccccguuuuaaacccguauccaaugauucguugc

SEQ ID NO: 11427 - RNA, 114 nt, Human
ggcgguucucuggaggcugagugccguuugcggugcccuaggaggccgagcucuguugcuucgaacuccaguggucagaccugcucauaucucagcauuucuucaggaccgacc

SEQ ID NO: 11428 - RNA, 76 nt, Human
gggccuuuauuugguuuuggcuuuagcugauaauguuuuagugaugucagcuagugcaguucucaaauggcugccu

SEQ ID NO: 11429 - RNA, 80 nt, Human
cccgauccggcagcucauuuaaauagagcucaucacaacaacaguguugguggugaagugaguagcugcaggacccuggg

SEQ ID NO: 11430 - RNA, 65 nt, Human
ucuucucuguaguggauguacuacagcucccaaauaaaugcuguagaugcaaauggcaaagaaga

SEQ ID NO: 11431 - RNA, 104 nt, Human
aagucugaaacauuuuacuucauauuacacauacuuuucuuuuaaaaaaggcagaaacauugaaggaaacaacacucaacaugaaagaaccuugugccggaguu

SEQ ID NO: 11432 - RNA, 67 nt, Human; identical to SEQ ID NO: 9949

SEQ ID NO: 11433 - RNA, 81 nt, Human; identical to SEQ ID NO: 645

SEQ ID NO: 11434 - RNA, 66 nt, Human; identical to SEQ ID NO: 3532

SEQ ID NO: 11435 - RNA, 65 nt, Human
augcaauuaucuaauacaguagaaucuaccuaccuauucaaugcuguuuaauuauggauuugcau

SEQ ID NO: 11436 - RNA, 73 nt, Human
gcuucauuacugaaguagcuacauuagcgaaaacaguguuauuuuuguugcaguuacaaagcuaccaggaagc

SEQ ID NO: 11437 - RNA, 71 nt, Human
ugcuucuuuauuaaugauuauaaaucaggaucuagcagcaggucuaguaacuucugucguuuugagaagca

SEQ ID NO: 11438 - RNA, 70 nt, Human
uuggcagcagcacccacaggguggcuaucacaggcuuugcaggcccucccguugggugauggcuugccaa

SEQ ID NO: 11439 - RNA, 65 nt, Human; identical to SEQ ID NO: 476

SEQ ID NO: 11440 - RNA, 60 nt, Human
guuuaguaaauacaauuucgcucauacaaaacaacaguuuacaacaaucgagugcuggac

SEQ ID NO: 11441 - RNA, 69 nt, Human; identical to SEQ ID NO: 9236

SEQ ID NO: 11442 - RNA, 60 nt, Human
aucugccacuuugugagcucaucaucagucccaaguggaacuagacucacagaccuagau

SEQ ID NO: 11443 - RNA, 65 nt, Human
ugccaugaccccagcacuuggccagcacugugcuacguugcuggucacagcugggccaucugcca

SEQ ID NO: 11444 - RNA, 82 nt, Human
uuuauucaucuuccaugugccugcugagucucagacucccuuucuuuccaucagcucuggcagccucaucaagaugacugaa

SEQ ID NO: 11445 - RNA, 60 nt, Human
ccggcccggggaggacaagucgcugccaccuuuggcugccgacgugauucccugggacgg

SEQ ID NO: 11446 - RNA, 102 nt, Human
ggaaaugggagaaacucccaggcaggaacaccuuuugcugugauggccgcgucaugauggcccggcaaaagggcauuuucuaccugacccuuuuccucaucc

SEQ ID NO: 11447 - RNA, 63 nt, Human
guugucgugcagguagaggcuuacuaaaagugugaaaacguaggcuuggauuaaggcgacagc

SEQ ID NO: 11448 - RNA, 77 nt, Human
uuaaugguugauauugcuaggguggcgcuuccaauuaggugcaugaauagguggccugcaguaauguuagcgguuag

SEQ ID NO: 11449 - RNA, 61 nt, Human; identical to SEQ ID NO: 1238

SEQ ID NO: 11450 - RNA, 75 nt, Human; identical to SEQ ID NO: 345

SEQ ID NO: 11451 - RNA, 71 nt, Human; identical to SEQ ID NO: 346

SEQ ID NO: 11452 - RNA, 66 nt, Human
cauuccugagggguuggccucaugacccaaagacacccauuaggccccagcuccaacauugggaug

SEQ ID NO: 11453 - RNA, 68 nt, Human
gugccaggcucuuuuucacaaccagcucucaggggaacucuugugggaacucacagagaggacugcac

SEQ ID NO: 11454 - RNA, 70 nt, Human
caaguccccuacaauugucuuacaagugucuuauguccagagaacauguaagaugagugcuagagacuug

SEQ ID NO: 11455 - RNA, 69 nt, Human
cugagcuuguaacuccagagcaggaccauguagucacuacucauuuaugcuuuuaauuacaccacucgg

SEQ ID NO: 11456 - RNA, 61 nt, Human; identical to SEQ ID NO: 823

SEQ ID NO: 11457 - RNA, 60 nt, Human; identical to SEQ ID NO: 1551

SEQ ID NO: 11458 - RNA, 89 nt, Human
ccgaaucaguggugggaacgacaaacaagguuuccccaugaagcagggugucuugacccauggccguguccgccugcuacugaguaagg

SEQ ID NO: 11459 - RNA, 60 nt, Human
gucugaucagucgaacuaagauuuuugaguacacauaauaagaucaggacucugaaagac

SEQ ID NO: 11460 - RNA, 80 nt, Human
cuuagaggcggucagaagcaggagcaggaacggaggcgagcaaguccgucguagaggcuccgugcggagagagccgaagg

SEQ ID NO: 11461 - RNA, 131 nt, Human; identical to SEQ ID NO: 1788

SEQ ID NO: 11462 - RNA, 83 nt, Human
cuuuaucaaaaacaugauuacagggacaucucaggcugacugugcuguccugauuguugcugcugguguuggugaauuugaag

SEQ ID NO: 11463 - RNA, 60 nt, Human; identical to SEQ ID NO: 1551

SEQ ID NO: 11464 - RNA, 60 nt, Human; identical to SEQ ID NO: 1551

SEQ ID NO: 11465 - RNA, 79 nt, Human; identical to SEQ ID NO: 1810

SEQ ID NO: 11466 - RNA, 65 nt, Human; identical to SEQ ID NO: 247

SEQ ID NO: 11467 - RNA, 80 nt, Human; identical to SEQ ID NO: 100

SEQ ID NO: 11468 - RNA, 79 nt, Human; identical to SEQ ID NO: 1810

SEQ ID NO: 11469 - RNA, 63 nt, Human
cgggggagaggggcaaaugccuccgggacugacacuccaggcagcuuugccuucucuccccug

SEQ ID NO: 11470 - RNA, 60 nt, Human
uuugcccuuuuucccuuuucuccaugcuuaauggugugaggcgucaggagagaggccaag

SEQ ID NO: 11471 - RNA, 77 nt, Human
guuccaaauguugaugcaugugguuaauguugcauuagagcacuuugcaauugcauaauucauuaauguuugugagc

SEQ ID NO: 11472 - RNA, 75 nt, Human; identical to SEQ ID NO: 2275

SEQ ID NO: 11473 - RNA, 77 nt, Human
gccaucaaugucaaugacuccgucaccaagagcaguuugacaaccucuauggcugccgggagucccucauagauggc

SEQ ID NO: 11474 - RNA, 73 nt, Human
ggcaucucugaggagaccacgacugggguccacaacucuacaagaugauggccaaugggauccucaaggugcc

SEQ ID NO: 11475 - RNA, 63 nt, Human
gccagagcgauauauucaucuggagaaccuuuuggccaggucuuacuuugauccucgugaggc

SEQ ID NO: 11476 - RNA, 78 nt, Human
uacgggcucugaaauugccagacaaaacccucauugaccucuaugaacagguuguucuggaauugauagagcuccgug

SEQ ID NO: 11477 - RNA, 94 nt, Human
uggacagcauugagagcuuucgugagucugacauuaacagauggccuauuggugauacugugucuccagggcuauacgggcucugaaauugcca

SEQ ID NO: 11478 - RNA, 131 nt, Human; identical to SEQ ID NO: 1788

SEQ ID NO: 11479 - RNA, 60 nt, Human; identical to SEQ ID NO: 1551

SEQ ID NO: 11480 - RNA, 77 nt, Human
ccgugcagacaguggccuuaucacuccgggaggcuuuucaucagugccugcuggaauggagaccccugaacucaugg

SEQ ID NO: 11481 - RNA, 62 nt, Human
ccuaggaagcgaacuuaugaacagauaaagguggaugaaaaugaaaacuguuccucucuggg

SEQ ID NO: 11482 - RNA, 62 nt, Human
gguggggugagggggcgaggccgcagcuagggcggcgaaacucuccuccccucggccccacc

SEQ ID NO: 11483 - RNA, 67 nt, Human
ggggagagcuuguucagcuuuucauccuccuuuucccggaugguagaaccggguacaagcuuuccuc

SEQ ID NO: 11484 - RNA, 80 nt, Human
guuggggcacccaaagacaaccaugcucucggugaaggcgccgagguccuggcauuguuucugguucucuucgucuuggc

SEQ ID NO: 11485 - RNA, 67 nt, Human
ggucugcggcucgggguccaugucagugcagaagcucacgcgcuggcacagcucggucagcagcgcu

SEQ ID NO: 11486 - RNA, 86 nt, Human
auuuaccaugagauugcacauauagauguaauuauaaaacaauguucauaguuacuuaauuaucuaaaaaucacacgaggguaagu

SEQ ID NO: 11487 - RNA, 85 nt, Human
cagaacuguggagaaugaacugaacacaaagugaaagaaaaugaggagaacacuuuguauuuaccccaaaaucuuuucaguugug

SEQ ID NO: 11488 - RNA, 98 nt, Human
ggaggagccuuagcccuggauuccaaggcccauccacccggugaucagcacugagcaccgaggauucaccauggaacuggggcuccacuggguuuucc

SEQ ID NO: 11489 - RNA, 131 nt, Human
agauucgggcaaguccaccacuacuggccaucugaucuauaaaugcgguggcaucgacaaaagaaccauugaaaaguuugagaaggaggcugcugagaugggaaagggcuccuucaaguaugccugggucu

SEQ ID NO: 11490 - RNA, 61 nt, Human
ggugacaacaugcuggagccaagugcuaacaugccuugguucaagggauggaaaagucacc

SEQ ID NO: 11491 - RNA, 70 nt, Human
caccuacacagaggcugugcagacgguggaccccuucaaggccacaggcaagccccacacucugugggug

SEQ ID NO: 11492 - RNA, 62 nt, Human
ugccaaguuucaugaggacaacggacagcuggacgaugcccgugucauccuggagcaaggca

SEQ ID NO: 11493 - RNA, 70 nt, Human; identical to SEQ ID NO: 4086

SEQ ID NO: 11494 - RNA, 68 nt, Human; identical to SEQ ID NO: 6194

SEQ ID NO: 11495 - RNA, 70 nt, Human; identical to SEQ ID NO: 999

SEQ ID NO: 11496 - RNA, 67 nt, Human
uuggaggcagagaggcaugcaggcgggguccuaggagccccugcuucuccaggccucuugccuuuga

SEQ ID NO: 11497 - RNA, 62 nt, Human; identical to SEQ ID NO: 2890

SEQ ID NO: 11498 - RNA, 131 nt, Human; identical to SEQ ID NO: 1788

SEQ ID NO: 11499 - RNA, 60 nt, Human; identical to SEQ ID NO: 1551

SEQ ID NO: 11500 - RNA, 66 nt, Human
cucugagccauggcuucccauagacacucaggucccuccagcuacaaggugggcaccauggcggag

SEQ ID NO: 11501 - RNA, 74 nt, Human
guucugugccaaacaccuguguggaaugccgcaagcccaucggugcggacuccaaggaggugcacuauaagaac

SEQ ID NO: 11502 - RNA, 104 nt, Human
gccgccccggcaucuggaucggcuggggcgucaggggccgccccggagucgggaucggcuggggcgucaggggccgccccggagucuagaucugcuggggcggc

SEQ ID NO: 11503 - RNA, 107 nt, Human
ucuucugugguugcccggagugaggauggugaugaggcuguaugggcuagucugacagugugaugcgguaaugauggccuggacgcuagggaagcgaucaccggaga

SEQ ID NO: 11504 - RNA, 65 nt, Human
agggucuggacugcauucuaacaccaaucggucaacugaaagccuugggcugcucuccggaugcu

SEQ ID NO: 11505 - RNA, 79 nt, Human; identical to SEQ ID NO: 1810

SEQ ID NO: 11506 - RNA, 70 nt, Human
ggccuccaguggaagugcacaggcacucccaauguuguuaaugcucugucuuccauuuguucuggaaucc

SEQ ID NO: 11507 - RNA, 65 nt, Human
uucuguaccagguuuaaauguagucuucuggagaaguauuuuugacauugagcucugggacagga

SEQ ID NO: 11508 - RNA, 87 nt, Human
uuugacguggugcaauuuugaugagaugucucuggggacacgaggaugcccuaaugaugcugacuugucaugguugcagcauuugaa

SEQ ID NO: 11509 - RNA, 82 nt, Human
ucaaggugugcucugcgcaaagacacucucugcucuagcuucuggagcucacguucauguugugccucuguuugcaucuuga

SEQ ID NO: 11510 - RNA, 72 nt, Human; identical to SEQ ID NO: 10467

SEQ ID NO: 11511 - RNA, 91 nt, Human
gagaggcaccacucacaggcaggcccggcugcacaaguccucccugcugggccuggucacugcagcugccccucccuggcuggcuccucuc

SEQ ID NO: 11512 - RNA, 71 nt, Human
uuuuuuucagaagucacacucagaauuuaauuucuccaaaaguuguuucuguguuugauucauguagaaaa

SEQ ID NO: 11513 - RNA, 67 nt, Human
aauaucucucuaucucaugguauagugucucguccaagccucuaugcuagcccucaucauagauguu

SEQ ID NO: 11514 - RNA, 115 nt, Human
accuuggugguaagaacuuuagcuccagggaacuugaggcagaggcccuguuguggucuguguugacagcaaccgcaccuguccacgucaugcuccugaacuugaccaccaaggu

SEQ ID NO: 11515 - RNA, 61 nt, Human
gaugcugaccagagagucuaucccggaccuauucccguccuaugcauucacaguuggcauc

SEQ ID NO: 11516 - RNA, 64 nt, Human
ggggggccacccguuuuccaaaauuucguucaaaguuucaaguuggaauccugguggucccacc

SEQ ID NO: 11517 - RNA, 84 nt, Human; identical to SEQ ID NO: 286

SEQ ID NO: 11518 - RNA, 89 nt, Human; identical to SEQ ID NO: 288

SEQ ID NO: 11519 - RNA, 65 nt, Human
uccagaaagcugauggugugcccgucuaccugaaacgaggcugccugaccaaaugcuuuaccgga

SEQ ID NO: 11520 - RNA, 71 nt, Human
ucggcggcugcacugcggaugagaccggugcgacucaugaagguguucgucacccgcaggauacccgccga

SEQ ID NO: 11521 - RNA, 73 nt, Human; identical to SEQ ID NO: 2360

SEQ ID NO: 11522 - RNA, 90 nt, Human
guaauuuaguuuaaaugaagggaaaucuuuuuaaauguuaugacaacauacucccaagaagaaccuuuucuucaguuaaguuaauuauac

SEQ ID NO: 11523 - RNA, 84 nt, Human; identical to SEQ ID NO: 286

SEQ ID NO: 11524 - RNA, 89 nt, Human; identical to SEQ ID NO: 288

SEQ ID NO: 11525 - RNA, 94 nt, Human; identical to SEQ ID NO: 5398

SEQ ID NO: 11526 - RNA, 66 nt, Human; identical to SEQ ID NO: 8995

SEQ ID NO: 11527 - RNA, 71 nt, Human
ugggaaccacgucaccacgguacaacaggcagcaagccauguauuuaccauggcgaggguacauuucacca

SEQ ID NO: 11528 - RNA, 61 nt, Human
guaccgaagauguuaguuaauagauauuuuaguggauaaucugucaucugacauccaguau

SEQ ID NO: 11529 - RNA, 74 nt, Human
uggcuggguugaauccggugcuugucgguacagguccuuaugacacaaaagcaccguaaaagaggcuccagcua

SEQ ID NO: 11530 - RNA, 66 nt, Human; identical to SEQ ID NO: 1008

SEQ ID NO: 11531 - RNA, 75 nt, Human; identical to SEQ ID NO: 6455

SEQ ID NO: 11532 - RNA, 61 nt, Human; identical to SEQ ID NO: 347

SEQ ID NO: 11533 - RNA, 93 nt, Human
ugcgggucaccacgguggcuucccacacuucugacucggacguuccuuccggugucacugagguggucgugaagcucuuugacucugauccca

SEQ ID NO: 11534 - RNA, 62 nt, Human
uuuuuuaaugggucucaaaauucugugacaaauuuuugggucaaguuguuuccauuaaaaag

SEQ ID NO: 11535 - RNA, 62 nt, Human
uccaguucauauuguuccagagucauguaacaucaagggggggacacaaaauaugauaggga

SEQ ID NO: 11536 - RNA, 98 nt, Human
ugucuucaauagaaaguucaaauauuuccauuuuuuaaaccucuagaauauuauccggacauuuaaaauauugauauuugaguuuacauuaaaggaca

SEQ ID NO: 11537 - RNA, 77 nt, Human
uuuaaauauaguuugacugauuguggggguacuuacggacagauuucuuuaccaaguaccaguuucuuauauuuaaa

SEQ ID NO: 11538 - RNA, 105 nt, Human
agcuggcuaccgacuccaccuucucccuggaccagcccgguggcacccuggaucugacccugauccgugcccgccuccaggagaaguugucaccucccuacagcu

SEQ ID NO: 11539 - RNA, 71 nt, Human
aagugaaguaaguaccugagaaugcuguuacagaugcuguuucugcuauucauugaguaaaguuucaacuu

SEQ ID NO: 11540 - RNA, 60 nt, Human
aaaaugggguuggguuuuuuggucuucgacgcuccggggucuggggggcccucccauuuu

SEQ ID NO: 11541 - RNA, 95 nt, Human; identical to SEQ ID NO: 8737

SEQ ID NO: 11542 - RNA, 94 nt, Human
uauauagggaguaauuagggaccuaaucuaguuucagugaagaaagaucccuuuacguuaauuuaggugcaucuaauaauucuuguucuguaua

SEQ ID NO: 11543 - RNA, 77 nt, Human
cucaugaugcuguugucuuucacccaaaauuuguagggaagacccuagaaacccuggcaggagaagagugugguggg

SEQ ID NO: 11544 - RNA, 84 nt, Human; identical to SEQ ID NO: 286

SEQ ID NO: 11545 - RNA, 89 nt, Human; identical to SEQ ID NO: 288

SEQ ID NO: 11546 - RNA, 61 nt, Human; identical to SEQ ID NO: 776

SEQ ID NO: 11547 - RNA, 67 nt, Human
uauuugaacauuacugauaauguugaacaacuuuucauguuuauuaguuauuagguuucuucaagug

SEQ ID NO: 11548 - RNA, 91 nt, Human
cagggagaggaaaggaggggcaaagaggugagggacaggggggacaauggcuuucccucuguccccugccagcucccccagcugcacccug

SEQ ID NO: 11549 - RNA, 72 nt, Human
ccugacuccugggucucggcuucccguauccagcacaaggauggguucucugucgcagagccuggagucugg

SEQ ID NO: 11550 - RNA, 64 nt, Human
gccuggucuugccccucuggagugacacccagguguacuuagauggagacggguaagcaauggc

SEQ ID NO: 11551 - RNA, 75 nt, Human
ggagucuggccucaccugugccuggucuccugcaggggcuucagcgugacgucuggugggcaaagccggaucuuc

SEQ ID NO: 11552 - RNA, 95 nt, Human
ugagugugacggaugugacggggccugggcaccaggguacaguagaacuuuaggcugggacucuggggccugcucccagcuccacgucagauuca

SEQ ID NO: 11553 - RNA, 87 nt, Human
gaguugggagcuuggauaggcuacaacccauuugccccauugaaggucgacuggguggagcccgcacucaggcugaauucccacuuc

SEQ ID NO: 11554 - RNA, 66 nt, Human
guggcugagacagaagcuccuggugcugggaagccuugccguugggagucuccuguaucuagucgc

SEQ ID NO: 11555 - RNA, 89 nt, Human
guguauauguguauauauauguacguaacacauauacauauauauacacauauauguguguauauauacauauauauacauguacacac

SEQ ID NO: 11556 - RNA, 69 nt, Human
ugcauguugagugccgucugcuuucggucccgucauuaucucuguauagacccaguuggcaaucaugca

SEQ ID NO: 11557 - RNA, 84 nt, Human
caaaggaaauacuguguuagaauuuucuaguaggacucuuuaaaccuuuuggggaaagcuaucagauaauucgcaguaccuuug

SEQ ID NO: 11558 - RNA, 86 nt, Human
gaagaggaacacuucagugaggaccaguacuugguugcagucaggaaaaauucacaaagucaguucucgaucaagguuaccucuuc

SEQ ID NO: 11559 - RNA, 63 nt, Human
gcccuuuguaccccauauggagccgguaaggguuacaggcaggaaggggguaugaucuggggc

SEQ ID NO: 11560 - RNA, 75 nt, Human
ggucucacugaccccacaaggggcucuggagcugggauggccccagaggguuucccaaguuggggugaggaggcc

SEQ ID NO: 11561 - RNA, 62 nt, Human
cgcauccguccgcagcuucaugaacguggccaaguccaugcucacauucugcugacugagcg

SEQ ID NO: 11562 - RNA, 65 nt, Human
gcagggggcauguucccguuuacugagcgcgaguucucuugggguggaacggggaccacccgugc

SEQ ID NO: 11563 - RNA, 63 nt, Human
ccagauuaguccaagaauuuuugugauggaagcuauuuuccacacauccuauguacuaaaugg

SEQ ID NO: 11564 - RNA, 76 nt, Human
uauagggaaagcugguacgccugcagguaccgguccggaauucccgggucgacccacgcguccgguucucgcugug

SEQ ID NO: 11565 - RNA, 74 nt, Human
ggggaaaugacuggcccaaggggacaagacgcaucuuaagaugucaaguccuggacccuucccugcaaggcccc

SEQ ID NO: 11566 - RNA, 78 nt, Human; identical to SEQ ID NO: 99

SEQ ID NO: 11567 - RNA, 80 nt, Human; identical to SEQ ID NO: 100

SEQ ID NO: 11568 - RNA, 110 nt, Human
ccuccccugcugaaucugagccacagugugaucccagcuuuaaaggagaugcaggagaaaauacggcauugcuagaagccggucgaggagugagcucucggucauggagg

SEQ ID NO: 11569 - RNA, 63 nt, Human
cuacuaaaauagaguguguagcaugaacaguguguugcuucagacuauuacaaagacaagugg

SEQ ID NO: 11570 - RNA, 78 nt, Human; identical to SEQ ID NO: 99

SEQ ID NO: 11571 - RNA, 65 nt, Human; identical to SEQ ID NO: 247

SEQ ID NO: 11572 - RNA, 80 nt, Human; identical to SEQ ID NO: 100

SEQ ID NO: 11573 - RNA, 62 nt, Human
auguuuucgaucuugaugcuauagagaacagccauguuccccugauagcaagaaaaagacgu

SEQ ID NO: 11574 - RNA, 60 nt, Human
aucuaaggggggugggaagguuaacaaaaccauuuuuuuuacauguccaucccccugggu

SEQ ID NO: 11575 - RNA, 70 nt, Human
gcuaggcagccagaaaccugcggaaaaugguagcgauggcggcugggccgagugggugucuggugccggc

SEQ ID NO: 11576 - RNA, 85 nt, Human
cuuugccucccgaagaguuaagauuacaggauuugagcaccauacagggcccuacaguuccuugauuagcaucuuaaggggaaag

SEQ ID NO: 11577 - RNA, 60 nt, Human
gcugauagguuuaggauacacucagacucuaaagcagguauuaaacugaacacugucagc

SEQ ID NO: 11578 - RNA, 70 nt, Human
gggggagcucaucggcuacucugaacgcggccaaggugccggccgacaccgaggugguuugugcuccccc

SEQ ID NO: 11579 - RNA, 72 nt, Human
uuggauggguccugugggaggagcaccucaaaccgaauauggaguuuucagccaaaaagagcccacuuucaa

SEQ ID NO: 11580 - RNA, 68 nt, Human
auuaauuauagugcacacaauauauauaaaucaaaaacgauuauauguuauuauaaaagcuaauuagu

SEQ ID NO: 11581 - RNA, 66 nt, Human
uucugaaaacacuucugucccuaacgaaucuaacaagauucuuguuaauaaagauguaccucagaa

SEQ ID NO: 11582 - RNA, 70 nt, Human
ucuuucgagccaauaugaacacuggggacccuucuaagcccaagaguguuauucucaaggcuuuaaaaga

SEQ ID NO: 11583 - RNA, 108 nt, Human
uagucagcauauagcgauccuggaaugagccucuguaucaucuggucacggaaguacgugguaugcaagaagccccggaggcuauccuauccaaagcuguagagauug

SEQ ID NO: 11584 - RNA, 62 nt, Human
gcaggugccagcacggugguuaaaggggagaaguccucuuccuguuuugugguggccccugu

SEQ ID NO: 11585 - RNA, 66 nt, Human
aacucccugugggcucccuuuggggguguggcccaccugcacaucggaggccucacaucgggaguu

SEQ ID NO: 11586 - RNA, 66 nt, Human
aaaauuuuuaaagaaaguuuggacacucauaaagcauuuggguuuuaaacuuauuuuacgaauuuu

SEQ ID NO: 11587 - RNA, 78 nt, Human; identical to SEQ ID NO: 99

SEQ ID NO: 11588 - RNA, 65 nt, Human; identical to SEQ ID NO: 247

SEQ ID NO: 11589 - RNA, 80 nt, Human; identical to SEQ ID NO: 100

SEQ ID NO: 11590 - RNA, 68 nt, Human
ggggugagcuggggaggcuucugcgguucuggagucccggcaauggccccaguuccccagcaaacccc

SEQ ID NO: 11591 - RNA, 65 nt, Human
cucccaaagugcugggauugccggugugagccaccgcgcccggcgauuuagcaaauuuuugguag

SEQ ID NO: 11592 - RNA, 60 nt, Human
gagguuucccguguuggccaggauggucuggaucuccugaccucgugauccacucaucuc

SEQ ID NO: 11593 - RNA, 60 nt, Human
cagggaauuaccucgcgaacacguuuccaaaaaacaaaacaugugcgcgcggauuaacug

SEQ ID NO: 11594 - RNA, 69 nt, Human
ggcuagaugguauugggaauaauaccucacaguucugaaggaccacacuauuuccaagcccagaaugcu

SEQ ID NO: 11595 - RNA, 93 nt, Human
gguaggaggaucgcuugaguccaggagguugagguugcagugagcuugugccacuguacuccagccugagugacagagcgagacccuguugcc

SEQ ID NO: 11596 - RNA, 62 nt, Human
ucaagggggucuccuacggaugacagcuccauagcuggagugggacaaccagacccgauuga

SEQ ID NO: 11597 - RNA, 65 nt, Human
acgaaggugauuaacggaccuggaaauccaugacgcagggagaauggggucauuuaaagccuagu

SEQ ID NO: 11598 - RNA, 69 nt, Human
caaaaaaacugguuggcggccggcaagaaaaacuuuucaaaccacuugugggggcgggccaggggauug

SEQ ID NO: 11599 - RNA, 61 nt, Human
gcagugugagaccuaguugcauuaccccaagaguguagcuguuuucgcuuuuauguacugc

SEQ ID NO: 11600 - RNA, 77 nt, Human
ggugucuguuccagugcucucgcgagggccuucuucuuuucgggguuggcaaggcgagggcacccuggccggacacu

SEQ ID NO: 11601 - RNA, 63 nt, Human; identical to SEQ ID NO: 6096

SEQ ID NO: 11602 - RNA, 60 nt, Human
ucgaagggggagaacccuuggcaaccggcaaggaguagggcaaaggacaucuuccuuuga

SEQ ID NO: 11603 - RNA, 71 nt, Human
ugaagcacuacgggccuggcugggugagcauggccaacgcaggcaaagacaccaacggguccaguucuuca

SEQ ID NO: 11604 - RNA, 77 nt, Human
gacugacaacugugagacaugcacuugcuacgaaacagaaauuucauguugcacccuuguuucuacaccuguggguu

SEQ ID NO: 11605 - RNA, 68 nt, Human
uggccucuaauagucaaugauuguguagccaaugccuuauucagguuaaaacagcauuuuggaggcca

SEQ ID NO: 11606 - RNA, 65 nt, Human; identical to SEQ ID NO: 247

SEQ ID NO: 11607 - RNA, 80 nt, Human; identical to SEQ ID NO: 100

SEQ ID NO: 11608 - RNA, 65 nt, Human; identical to SEQ ID NO: 4540

SEQ ID NO: 11609 - RNA, 71 nt, Human; identical to SEQ ID NO: 4541

SEQ ID NO: 11610 - RNA, 78 nt, Human
ggaauuuggcugaggagcagcuuuagguauggauugaugacuaagucaagcuacuuccugagcuucucucagauuucc

SEQ ID NO: 11611 - RNA, 90 nt, Human
augggcuucgacggggcuuaauagcccuugccccacugaaugcugcuacgcgcagaaucccgggcuugggagcccccaaaaauggcccau

SEQ ID NO: 11612 - RNA, 70 nt, Human
gccagccgagcaccugcagcugcuggaggaagcugccaaggagguagcugaugaggugacccggcccggc

SEQ ID NO: 11613 - RNA, 74 nt, Human; identical to SEQ ID NO: 9061

SEQ ID NO: 11614 - RNA, 66 nt, Human; identical to SEQ ID NO: 2802

SEQ ID NO: 11615 - RNA, 101 nt, Human
ugaagauccucacugagcgaggcuacagcuucaccaccacggccgagcgggaaaucgugcgcgacaucaggagaagcugugcuacgucgcccuggacuucg

SEQ ID NO: 11616 - RNA, 81 nt, Human
cacauugauuuucaguaugacucugauggcucucacgacugccuuugaaccgccugacgagcuaugcauacugaacaagug

SEQ ID NO: 11617 - RNA, 61 nt, Human
gccucuccuggggccacuguugggggugggagugagcccaccacagaggccacaggcaggc

SEQ ID NO: 11618 - RNA, 81 nt, Human
ggcacuggucagcugggagguguccauucaucauggggaagacucagaacacaugggugcaucaucacgcugcccagggcc

SEQ ID NO: 11619 - RNA, 69 nt, Human
cugguuccagaaccgccguuccaaguucaagaaacucuacaagaccggggaggugccgcuggagcacag

SEQ ID NO: 11620 - RNA, 83 nt, Human
augcugauacguuaagcuaugcaucacuuucaguuucauucaaucucaaaguacuguaaucccagcguugcguuaccaagugu

SEQ ID NO: 11621 - RNA, 61 nt, Human
ggugacaacaugcuggagccaagugcuaacauggccuugguucaagggauggaaagucacc

SEQ ID NO: 11622 - RNA, 69 nt, Human
gcuuccuuagcuuaccaaguauucacaaggaaauucucuuguaccucuuuuugguuggcuaggggaagc

SEQ ID NO: 11623 - RNA, 72 nt, Human
gucuagcuuuacuugcuccccgccggcucaggcgcucgggcgcuggggcuuucgccgcugcagaagcuggau

SEQ ID NO: 11624 - RNA, 64 nt, Human
aaaaaaaaagguggcaguuguuugguggacuuccggauggcuucuaaguaauuccaauuuuuuu

SEQ ID NO: 11625 - RNA, 87 nt, Human
ugaguaugggugggcccuucccauaggccugaaauuuuccuccuggaggggagaagccagucuggggcuugggcccauuuggauuca

SEQ ID NO: 11626 - RNA, 80 nt, Human
aucacuaggagccaagagaacagugagaucuggaugucauuacacgaauauacacccuuuuuuuccuucucuuccaggau

SEQ ID NO: 11627 - RNA, 123 nt, Human
ugguuuucuuaaaguuuuugucucaauuugggauuacuguccuuaggguaacguggacucauuccagagaccaaaccuucagcagcugcccaaauucuacucuguccacuuuuccacagacca

SEQ ID NO: 11628 - RNA, 87 nt, Human
agcuguaaauuauguuggagcagggacuguggaguuuauuauggacucaaaacauaauuucuguuucauggagaugaauacaaggcu

SEQ ID NO: 11629 - RNA, 81 nt, Human
gaauuucaagaacaguuagagucagcacggagagaagcuaagaagucuuucaaugaugaugcuaugcugaucgagaaguuu

SEQ ID NO: 11630 - RNA, 62 nt, Human
ccaucugugguccggcuccuggugacagcuggugccagacccauggcgcuggaccgcccugg

SEQ ID NO: 11631 - RNA, 79 nt, Human
ggccggaaagggucagcucgggggaacuguggggaccugcgagccccgcaaguguugaccggcuucucccgccccggcc

SEQ ID NO: 11632 - RNA, 71 nt, Human
guggcaagaggaacacaaggacugcccagaaaaaccggggcaagcuucugggcaaaggccccuguugccgc

SEQ ID NO: 11633 - RNA, 69 nt, Human
uccagcagggggggcgggagcucuacaucuacaacaaccuacggcagacaccgcuccaccuggcuguga

SEQ ID NO: 11634 - RNA, 131 nt, Human; identical to SEQ ID NO: 6294

SEQ ID NO: 11635 - RNA, 61 nt, Human; identical to SEQ ID NO: 776

SEQ ID NO: 11636 - RNA, 76 nt, Human
uccaggaccucaaugaccgcuucgccagcuucaucgagcgcgugcacgagcuggagcagcagaacaagguccugga

SEQ ID NO: 11637 - RNA, 80 nt, Human
ggaggaucuauucuccggucauuccugguagauauuuggaauaaaauaaucaccugacgugauuggguagaucacauucc

SEQ ID NO: 11638 - RNA, 66 nt, Human
uacauaaucaguuuauaagauaaaaguacuaauuaaaagacuauaucuguagaaacuuuauuugua

SEQ ID NO: 11639 - RNA, 60 nt, Human
uauugauugcguggcccaugugaugcugugauauucagcccagcugucgcuuuaucagug

SEQ ID NO: 11640 - RNA, 64 nt, Human; identical to SEQ ID NO: 287

SEQ ID NO: 11641 - RNA, 71 nt, Human
guaccccucucagucugcaguauugaguuguuuaaaguauaugugcagucuugcuuacaaggagggguuac

SEQ ID NO: 11642 - RNA, 65 nt, Human; identical to SEQ ID NO: 1727

SEQ ID NO: 11643 - RNA, 64 nt, Human
caucauuagagcccugguagaaugacagccuuuuucagguugccagucuccucauccauguaug

SEQ ID NO: 11644 - RNA, 71 nt, Human; identical to SEQ ID NO: 8959

SEQ ID NO: 11645 - RNA, 75 nt, Human; identical to SEQ ID NO: 1111

SEQ ID NO: 11646 - RNA, 70 nt, Human
auagaaaaaugagcuuugccaucaucagaaacguaaauuuuaaugccugugcaauugccauuaauuuuau

SEQ ID NO: 11647 - RNA, 67 nt, Human
ggugggcaaugaugagacuguggcacucacagccuuugugaccaucgcccuucaucaugggcuggcc

SEQ ID NO: 11648 - RNA, 67 nt, Human
uggcccaggagcagguacgaggcucgccugagaaacugcaggagacaucuaacuggcuucuguccca

SEQ ID NO: 11649 - RNA, 129 nt, Human
ccaguucacccaggcccuggaccgccaaacagcugcucagcugcuuaagcuggcccacaaguacagaccagagacaaagcaagagaagaagcagagacuguuggcccgggccgagaagaaggcugcugg

SEQ ID NO: 11650 - RNA, 60 nt, Human; identical to SEQ ID NO: 2705

SEQ ID NO: 11651 - RNA, 69 nt, Human; identical to SEQ ID NO: 988

SEQ ID NO: 11652 - RNA, 72 nt, Human; identical to SEQ ID NO: 6340

SEQ ID NO: 11653 - RNA, 72 nt, Human; identical to SEQ ID NO: 990

SEQ ID NO: 11654 - RNA, 81 nt, Human
auaguacugaacccuuuaucaacuauguuuuuucagucuacaaccaaggcggcuacuaagugacuaaggggcagguaguau

SEQ ID NO: 11655 - RNA, 73 nt, Human
ugagauuucaucacucaggauggcuugugauuuauuuuauuuuauucuuuuuuuuuuuugagauggagucuca

SEQ ID NO: 11656 - RNA, 88 nt, Human
cgccccuguugacagauggagauugggcagcagggccuugcugcauuguuaucugcuguuccgacuugguuugucuuguccaagggug

SEQ ID NO: 11657 - RNA, 82 nt, Human
acaccuucgaauuaagcacauuccucgauuccagcaaagcaccgcaacaugaccgaaaugagcuuccugagcagcgaggugu

SEQ ID NO: 11658 - RNA, 79 nt, Human
gccuaggucucuuagaugauuaccuggagguggccaagcacuucaaaccucauggguucuccagcgacaaggcuaaggc

SEQ ID NO: 11659 - RNA, 66 nt, Human
ggcuccuccgaauggcuggcuguggauggguuggucagucccuccaacaacagcaaggaggaugcc

SEQ ID NO: 11660 - RNA, 70 nt, Human
aguaauuuagaggugauucauuaaauuaauagauuauuauuauuuucuacaauaguuauucugaauuacu

SEQ ID NO: 11661 - RNA, 78 nt, Human; identical to SEQ ID NO: 4217

SEQ ID NO: 11662 - RNA, 106 nt, Human; identical to SEQ ID NO: 6411

SEQ ID NO: 11663 - RNA, 63 nt, Human
acauguauugaagcccuguagaaugacacgcuuuugucagaugcgcgggaugcucaugcaugu

SEQ ID NO: 11664 - RNA, 66 nt, Human
auggcucauuuguuuagaauacaaugauugucuguccgcauucauguuggcuuauagagcggccau

SEQ ID NO: 11665 - RNA, 75 nt, Human
gggccaauguccacaaagaauuccuggucagcaccaccgauguccaaaggugcaauaucaaggaagggcaggccu

SEQ ID NO: 11666 - RNA, 77 nt, Human; identical to SEQ ID NO: 2332

SEQ ID NO: 11667 - RNA, 80 nt, Human; identical to SEQ ID NO: 367

SEQ ID NO: 11668 - RNA, 64 nt, Human; identical to SEQ ID NO: 287

SEQ ID NO: 11669 - RNA, 77 nt, Human
cagagcucaacuuaugugcuucgggcugggcacugguguguuucugaagcucugaagcucauucgaaggugagccug

SEQ ID NO: 11670 - RNA, 73 nt, Human
ugcagugcucugggaacucauuacugggucaagacaagaugucaccuggugaugaaaucccaucauauacuca

SEQ ID NO: 11671 - RNA, 73 nt, Human
acauuuauagagguuauaaggaucuuggcucuagaacaaauuuuugaaauuaggaucauuuuaccauggaugu

SEQ ID NO: 11672 - RNA, 65 nt, Human
uacauauacuuaccauacauuuuguaaaaaacacauuuuuuaaagaaauagggauggguauggug

SEQ ID NO: 11673 - RNA, 61 nt, Human
ucuuacagaaauguuuaaacaacccaaaauacaugaauaaaaaugacauuucuuuguagga

SEQ ID NO: 11674 - RNA, 62 nt, Human
uauguucgaugccugucaaguucaugucuagcugucaauuugugaauacggcaucgaggaua

SEQ ID NO: 11675 - RNA, 64 nt, Human
cugcauaguauuugggcuccacuucacugaucugaaaguugaggguguuggaauagaggugcag

SEQ ID NO: 11676 - RNA, 62 nt, Human
gagccaggcccuuuuccucgcgacaggccuuuccugagcucggaggggaauugccuuugcuc

SEQ ID NO: 11677 - RNA, 130 nt, Human
ggggggggaggaggggauggggcaggcuuuaggaggcugagucggaggccucugagcuguccuugacaucugggcucuuuggggucucgcugaccucgcugagguccuugcuguccccaccacuauccuc

SEQ ID NO: 11678 - RNA, 60 nt, Human
guuccgaugaugcaaaaggccaauccaaugggaaagauggccagguggcgaauucgggac

SEQ ID NO: 11679 - RNA, 78 nt, Human
uacagacaauacccagagaugugaauacagcugugauggaguugcucaucauggcuuacgcacugaagacugccugug

SEQ ID NO: 11680 - RNA, 130 nt, Human
ucuuuuacuacuaaacuuaaauggccaauugaaacaaacaguucugagaccguucuuccaccacugauuaagagugggguggcagguauuaggguaauauucauuuagccuucugagcuuucugggcaga

SEQ ID NO: 11681 - RNA, 62 nt, Human
gguacaagaaucgggcuugucgggggaggguuaccucccugugaaaggcaggcucgggugcc

SEQ ID NO: 11682 - RNA, 62 nt, Human
cgggagcuggaagaaugggggcaaaaaccccaggcccccauucuccaacccccaagcucuug

SEQ ID NO: 11683 - RNA, 64 nt, Human
ggcgaagccgggagugugggcgcggcugggguccugggcccgcgcgcugcuccgggacuacgcc

SEQ ID NO: 11684 - RNA, 64 nt, Human
gggaacacuacuguuugaugaucugugauuggaugaacugaucgaucucaguugguaacauccc

SEQ ID NO: 11685 - RNA, 72 nt, Human
guuagaugugguguuuauucaaguuuguugaaucauguuugacauacuguaaauacguuauuugagucuagc

SEQ ID NO: 11686 - RNA, 61 nt, Human
ggugcacuguggucuugccccuuggcacuggccaagagaaugaagcacccagucucguacc

SEQ ID NO: 11687 - RNA, 86 nt, Human
gacagagucccucagacggccuugggccaguaagcacccuggagagcugggcaccucgaggagcgucuggggagccucauacuguc

SEQ ID NO: 11688 - RNA, 92 nt, Human
gccccaucagggauggucacaguccacgccacaggggcugacucugcccaaucaugucccccugguggcagcgaccagauccuggcuggggc

SEQ ID NO: 11689 - RNA, 79 nt, Human
uuacaguagcuucuuaacauaggggucaagauccagggccaccuucugaucccucauuuaugcggcaccaguacuguga

SEQ ID NO: 11690 - RNA, 62 nt, Human
uuccgccggccuguuggcaccgcaacaggggaucccuucccagcgaauuacaggcggcggaa

SEQ ID NO: 11691 - RNA, 86 nt, Human
guaucugccagcagaauggcauggugcccaucguggagccugagauccucccugauggggaccaugacuugaagcgcugccaguau

SEQ ID NO: 11692 - RNA, 84 nt, Human; identical to SEQ ID NO: 6965

SEQ ID NO: 11693 - RNA, 68 nt, Human
gcacacauguccccagcauuuucucaccuggauaaagcccauaagcugcgucucaggcugggcucagc

SEQ ID NO: 11694 - RNA, 84 nt, Human
gcucucuuuaucuuucucucucacucauguaugcauacaugcacagagaugcauacacaggugccuaugcaaguacauuuaagc

SEQ ID NO: 11695 - RNA, 60 nt, Human
cagaagugauuugcuccuuaaaggggcuguuccuugcccagaaaaggugucacacuuuug

SEQ ID NO: 11696 - RNA, 85 nt, Human
gcugacacgauggagaagguaugugcaggggacuccuggagggggacgagguuuucagcacagccuucauguucucgugcucagc

SEQ ID NO: 11697 - RNA, 63 nt, Human
uauuuugguguuguggagacucagucugugaagcuaaucagauugccucauauuaccauaaua

SEQ ID NO: 11698 - RNA, 60 nt, Human; identical to SEQ ID NO: 1551

SEQ ID NO: 11699 - RNA, 62 nt, Human
gaggggcccaucaccauguugacgcugcuggaugacugggugucacugguauugccccccuc

SEQ ID NO: 11700 - RNA, 67 nt, Human
gcucgguggcaucagggggcucacauggcucugagaggugccgaguggccugacuggcagcccuggc

SEQ ID NO: 11701 - RNA, 86 nt, Human
guccggaaaugacuagcucucuggaaaagcuccucuugccgaugaggaagcucaugguggagcugguagaugagcccacgcuggac

SEQ ID NO: 11702 - RNA, 67 nt, Human; identical to SEQ ID NO: 3685

SEQ ID NO: 11703 - RNA, 73 nt, Human; identical to SEQ ID NO: 2833

SEQ ID NO: 11704 - RNA, 85 nt, Human
cuaggacagcuuugcucuuccugccccuuauaggagcccucacaguucaucuuccugguggcgcagaugagugaggcacccuugg

SEQ ID NO: 11705 - RNA, 87 nt, Human
gucacaggggcaggaucauccaugucaccuucuuccacuuccacaucgugucccaguaacacacauggagcugccaccuccugugac

SEQ ID NO: 11706 - RNA, 62 nt, Human; identical to SEQ ID NO: 3849

SEQ ID NO: 11707 - RNA, 63 nt, Human; identical to SEQ ID NO: 7988

SEQ ID NO: 11708 - RNA, 63 nt, Human
agauuccgggugcuguacgucuuuguggacauccggauagacacuacacaccuccuggacucu

SEQ ID NO: 11709 - RNA, 70 nt, Human
cagccacugcccuugcccuggucagcaccauucagguuggugucgaccuugcaggcagcggcaggagcug

SEQ ID NO: 11710 - RNA, 66 nt, Human
gccccuguccccuggagagauucuggggguugacauccccccgacuguccagagaagguuggaggc

SEQ ID NO: 11711 - RNA, 130 nt, Human
uauggcaaaagggaucguuaggaucaaaugccaucagaguuuuggagauugcguagcucuucauggucauuggggggugcaauugacgcagcuugguauggucgcuaaagccagguagggguugccaugg

SEQ ID NO: 11712 - RNA, 66 nt, Human; identical to SEQ ID NO: 3532

SEQ ID NO: 11713 - RNA, 61 nt, Human
ggugacaacaugcuggagccaagugcuaacaugccuugggucacagggauggaaagucacc

SEQ ID NO: 11714 - RNA, 73 nt, Human
cucuaccugguuggaaggcugugucguucggagagccugagcucgcggagaugggggcaggccgccgguaggg

SEQ ID NO: 11715 - RNA, 92 nt, Human
gagcaucacuacuccguguguaccuguuagaugacauguucauaaacccauguaccugauaucgaucgguaccugcgagaugugugucgcuc

SEQ ID NO: 11716 - RNA, 101 nt, Human
ugcgaagccgagcagaacggcaauccagggauuccucuaaugguaggauagagcuuuuugccugaauuuucggcauuggcgucuucuguauccguaucgua

SEQ ID NO: 11717 - RNA, 68 nt, Human; identical to SEQ ID NO: 3588

SEQ ID NO: 11718 - RNA, 74 nt, Human
cucggaguaaucgccugcauuggggagaagcuagaugaaagggaagcuggcaucacugagaagguguuuucgag

SEQ ID NO: 11719 - RNA, 90 nt, Human
gacuucgcccggcagaagcuagaucccaagauugcuguggcugcgcagaacugcuacaaagugacuaauggggcuuuuacuggggagauc

SEQ ID NO: 11720 - RNA, 69 nt, Human
agcuugugcuuauagaguguguauuaucuaagugaaauagaugccaccgcauaccuaccagcauaaucu

SEQ ID NO: 11721 - RNA, 60 nt, Human
aguaaauauuaauaugaucacuuacacuauauucaagaguaguuucauguaguacuuauu

SEQ ID NO: 11722 - RNA, 68 nt, Human
uuuaaaucucagcaaacauauuucuuucuuguggcaaucuuguuuuuaagaaaguacauggauuuaag

SEQ ID NO: 11723 - RNA, 67 nt, Human
gucgguggggacggggguccugggcugggcagagccugggcuggggccacacuaguccccaccaggc

SEQ ID NO: 11724 - RNA, 67 nt, Human
ugggggcagggcuucaaccggcacccagggcucacuccagcgggcagggcugcccuguaacagacca

SEQ ID NO: 11725 - RNA, 63 nt, Human
caggugugggcuguguggucuggcaggaguccuuagggcuauggcccaugugugcacauccug

SEQ ID NO: 11726 - RNA, 69 nt, Human
cgcaggugaucccgcagggauaccucagaguuuccaaagaggcagaccuugagguucccaucagcugug

SEQ ID NO: 11727 - RNA, 74 nt, Human
cuuuauuugugcgcugugagggugaaggcaaucuaucaucaacuuuucuuucccugauaugcuccagaauaaag

SEQ ID NO: 11728 - RNA, 66 nt, Human
ccagaggaagagcgcuucgagcuucuucaaggaacuuagagaagagcggcauugugcuccuucugg

SEQ ID NO: 11729 - RNA, 60 nt, Human
cggacaggacaacggcggcgcccggaaauccaaagaauucgcuccccuuugucaaggccg

SEQ ID NO: 11730 - RNA, 73 nt, Human
uugcugcugcaguuccucccucuucccuaaagaacaauagggaacaaguagaagugguagaauuucacagcaa

SEQ ID NO: 11731 - RNA, 65 nt, Human
gcgagaaggugugcauggaucugccaaauuuuauauuucagauuuguggaagguuacuuuuucgc

SEQ ID NO: 11732 - RNA, 73 nt, Human
gaaaauucuacuucaaaggaaaguuauaucacagaugauauuggaauaucgacuuggaaggagcagacuuuuc

SEQ ID NO: 11733 - RNA, 68 nt, Human
ugaguccugccuucuuuguggaacugguucccaacaaaguuggagaaacaaagggcccgcagguuuca

SEQ ID NO: 11734 - RNA, 64 nt, Human
ggcucuuguguucacuuuaaaacccauuggucuuacagggauucaggugaaauuccaaggugcc

SEQ ID NO: 11735 - RNA, 78 nt, Human
gaggaagauuucggaggcacaggaaacuuuuuaccagcaggugaagcagcugucagaggcuccuguggauuuggccuc

SEQ ID NO: 11736 - RNA, 62 nt, Human
cugagaauuucucuugcaugccuuagcuuuacagcuuuugcauuccuguggauuauucucag

SEQ ID NO: 11737 - RNA, 80 nt, Human
aguuguggaacugagucuauauacuggugaguuuaugggguugccuccccaguucuuauuagacucacagguuuauaacu

SEQ ID NO: 11738 - RNA, 62 nt, Human
caggccuucuucucuuaaucacaagauccuuucaggcauuuacucuugagggaacaggucug

SEQ ID NO: 11739 - RNA, 130 nt, Human
ggaacgagauggcgguucucuggaggcugagugccguuugcggugcccuaggaggccgagcucuguugcuucgaacuccaguggucagaccugcucauaucucagcauuucuucaggaccgaccuauccc

SEQ ID NO: 11740 - RNA, 68 nt, Human
uugccucugcuugucaugccauuaagcucccaaauaaggaagaaacucacagauaaguccauuggugg

SEQ ID NO: 11741 - RNA, 67 nt, Human
agucuucacuucaauaagcacacaauguuguuucauuuuaguggcuuugggguaguuuaugaagacu

SEQ ID NO: 11742 - RNA, 86 nt, Human
ucuuuucaguaauuucauccucuuuaucuaccuguucuauuuugcguuuuuuagaacagguuggaaguguggagucaccagaagga

SEQ ID NO: 11743 - RNA, 73 nt, Human
uucucuucuuccugagcucagaacauuuuggucauaaucaugagcuuagaaauguucugaagggaguacagga

SEQ ID NO: 11744 - RNA, 91 nt, Human
uuuguuucauuauuuggaacucaauaauagagacuuuaaguacaaauugugagucuaggagaauuuuugauuuccacagaugagaaauaaa

SEQ ID NO: 11745 - RNA, 69 nt, Human
cucuucaucaguacaccacugugagccgacugaaaugauaaucacuugaagcuaucauuggugggagag

SEQ ID NO: 11746 - RNA, 75 nt, Human
gugugccagacuuccguugagucacauauagacaggaccaaaacauacgugacucuuguuagccacuggcaacau

SEQ ID NO: 11747 - RNA, 60 nt, Human
ggagcggggaagcgaagugcgagagaccccggaccccagcgcugucucuucccgccgccc

SEQ ID NO: 11748 - RNA, 72 nt, Human
gaauccuucacuccaguuaauggcacugcucacuuccugccucugcugccaccaucacugugugaagcuuuc

SEQ ID NO: 11749 - RNA, 63 nt, Human
caauuaauacuuugaagaauuugacuguuagguuuaaagacaguuuucccaaaguucauauug

SEQ ID NO: 11750 - RNA, 60 nt, Human
guacagggagaucuggaguucuguuuccuccuguuggauucuagaacuccauguuaguac

SEQ ID NO: 11751 - RNA, 66 nt, Human
caccuacagucccagcuacuaggcagguugaaaaucgcuugagccugggaggcagaggcuguagug

SEQ ID NO: 11752 - RNA, 63 nt, Human
ugugcgagugaugggaaggcgggcauuauggcccuaugggcuuuuaaccuguacccgugcaca

SEQ ID NO: 11753 - RNA, 87 nt, Human
ucaaggccccaaggugaggcaaaucccuggaaggcuugaacccugcaguucagucucccgggguaaucacuccccaauaagcaguga

SEQ ID NO: 11754 - RNA, 63 nt, Human
uggggcacugaggcccggggauguaggcacuggacagcagcaacccaggcauucugugcccca

SEQ ID NO: 11755 - RNA, 70 nt, Human
gguuggggauuauggcuucagcacucugccggagcacauuccugagcgcugacaacguggagcccucacc

SEQ ID NO: 11756 - RNA, 87 nt, Human
gcucacaauuuugcuggcuagaagguugggcauccggugaaagccucaggcugcuuccauucauagcaaagggcagccagugugugc

SEQ ID NO: 11757 - RNA, 68 nt, Human
ugcuggcucaagugugauaaggaugagcacaaccacaaagauaucauuuuuaaugacaagagcuagua

SEQ ID NO: 11758 - RNA, 64 nt, Human
guagaauccaggcguuuaguuggaucauaucauaaguauccaugaagaaaacgucaugaucugc

SEQ ID NO: 11759 - RNA, 71 nt, Human
ugcaauccuugguuccagaacccagcaauuccuaucaucacaauuguuucaagucuuauccaagcccugua

SEQ ID NO: 11760 - RNA, 101 nt, Human
gggcugaaauacacccguggucuccggaagcgccucaggguugggaagauggggaaacuccagccgggcauccacuccagaccggggguguggcucaaccc

SEQ ID NO: 11761 - RNA, 62 nt, Human
uuuggcauugaacuaaaugcugagguuuuuccuagccuggaagugagagguuuggugccgaa

SEQ ID NO: 11762 - RNA, 67 nt, Human
cguucagcaaggacccaagagcgcggggcgauaacccaccuaugcucaggggaacccucgcuaaacg

SEQ ID NO: 11763 - RNA, 84 nt, Human
ugcacuggcaccuagacauguacaacaggaaccguguggauacaucccccacaccuguuucuguggcauggucauguguaugca

SEQ ID NO: 11764 - RNA, 60 nt, Human
cugcaggagaagauggcggucuccacaggaguuaaaguuccucguaauuuucgcuugugg

SEQ ID NO: 11765 - RNA, 109 nt, Human
gcaaguuccuuuauuuuugaaugggaaugccuuacagaauuuaaaagaaacuuuaaacguggauguuuugguacaacuuauagaaaagguaaaggaaaccccaacaugc

SEQ ID NO: 11766 - RNA, 60 nt, Human
ccaugacacaguucugucuuggccagggaccuggcugguggagagguggaaguugcaugg

SEQ ID NO: 11767 - RNA, 61 nt, Human
gcuggagccggaggccgggcgcggaguuggucuccgccgcccgaggucagccgcuccgcgc

SEQ ID NO: 11768 - RNA, 64 nt, Human
ugaugcgcaaggccauccgagggcaccuggaaaacaacccagcucuggagaaacugcugccuca

SEQ ID NO: 11769 - RNA, 67 nt, Human
cuccucuggacuuuucgguucccuccccuguuguaacuaggggagggugagugucuguguaggggag

SEQ ID NO: 11770 - RNA, 81 nt, Human
cuuggacuuccccucccagcucguguacggucucccaccucuggagccccauccccgcgcugguggggggauaauucuagg

SEQ ID NO: 11771 - RNA, 71 nt, Human; identical to SEQ ID NO: 1145

SEQ ID NO: 11772 - RNA, 67 nt, Human; identical to SEQ ID NO: 1146

SEQ ID NO: 11773 - RNA, 78 nt, Human; identical to SEQ ID NO: 99

SEQ ID NO: 11774 - RNA, 80 nt, Human; identical to SEQ ID NO: 100

SEQ ID NO: 11775 - RNA, 65 nt, Human
cggagggucugggaaggguggcguuggcccguucugacagaggccucccuggccagguccauccg

SEQ ID NO: 11776 - RNA, 64 nt, Human
guccaagguucacucguuagccccucagcgucagcucaagcugggugguccgguccccuuggac

SEQ ID NO: 11777 - RNA, 113 nt, Human
uuucuaacacuggccucagcacuaguucccugagacuuccuuagguugucauggaaaccagccacaccuggagaggcaucagggcccacugggcuuguggugggaucgagaga

SEQ ID NO: 11778 - RNA, 63 nt, Human; identical to SEQ ID NO: 8208

SEQ ID NO: 11779 - RNA, 81 nt, Human
ucuuguguugagacuucgugguggugcuaagaaaaggaagaagaaagucuuacaccacucccaagaagaauaagcacaaga

SEQ ID NO: 11780 - RNA, 87 nt, Human
ggggcugugaugucagccacugaggguguugugcucacguucgagggcccagcacaaaaauccuuguaugacaucucaugcugaccc

SEQ ID NO: 11781 - RNA, 61 nt, Human
ucuccaacaauaaccacugguccuugguucacuacuuacuccagaaagacauauacggaga

SEQ ID NO: 11782 - RNA, 70 nt, Human
gucucagggacaccauguagagaauuuggucucgauucagaaaagagaaagagccagugguuguugagac

SEQ ID NO: 11783 - RNA, 80 nt, Human
ggccccacguggaguuuuuccgagcucaccguauugggagaggacccguuuguuaguauucgggagaaaaacguggcgcc

SEQ ID NO: 11784 - RNA, 85 nt, Human
gagaaaccuuuuuaaaaaauggagaugaauguuacagaauuggacaacccgaacugcuuuucaaaaccagaggaaggagguucuu

SEQ ID NO: 11785 - RNA, 73 nt, Human
uuuuuugcuuucaggaaagguuuauuguggugagugccuucuguacagucgacugcaaaugaaacgcagagga

SEQ ID NO: 11786 - RNA, 64 nt, Human
ccuccaaagccgaaacagaccagagauaguacuuucauggagaaguuacaugcgguagaugagg

SEQ ID NO: 11787 - RNA, 70 nt, Human
gcccauggaugacagucucauugcauuucgaacgcguucuaagaugccccugaaagauguuccccugggc

SEQ ID NO: 11788 - RNA, 66 nt, Human
agacuuaaaugggucacagugacgacauguuaacaacgucccuguuugguccugaaauuuaagucu

SEQ ID NO: 11789 - RNA, 70 nt, Human
ucaaggagauugucguucauccagaacucuugcagcucuguuagauggcugauauuuucaaucuuuuuga

SEQ ID NO: 11790 - RNA, 90 nt, Human
ggaccuuuguaggagaggcuaauauguuuaaguagaagauauuacugauagcauuuuccccaugcuccuacauaaaaaauaaauauuucc

SEQ ID NO: 11791 - RNA, 65 nt, Human
ggcagaaaugcaggaguguagcaagcaucauuuuagauggcuaugguuccucuuccgcaucuguc

SEQ ID NO: 11792 - RNA, 68 nt, Human
cgucacucgccgagguuccuugggucauggugccagccugacugagaagaggacgcucccgggagacg

SEQ ID NO: 11793 - RNA, 61 nt, Human
ggcaucagcaguccuuaaaggccugagcuugcaacacucaggcaggacucggcugagggcc

SEQ ID NO: 11794 - RNA, 68 nt, Human
cuugaucaugggguggaauuuuguguaucugggcuucaugggaugcauaaaauuuuccaguugguaag

SEQ ID NO: 11795 - RNA, 65 nt, Human
aauggcuagcaaacauggagaacaccacagugaugaauccacagagcuuuucuccaugagcuauu

SEQ ID NO: 11796 - RNA, 61 nt, Human
ggaccuuucucuuuauaggaacgaugcuagaaucaccuauuuaauaaagacgaaaggguuc

SEQ ID NO: 11797 - RNA, 74 nt, Human
uuuucccauucuuggccacuuuaauucagaagaagguuuuuuuuccuuauuuucagggccaaacccggggagga

SEQ ID NO: 11798 - RNA, 62 nt, Human
ggcccgggggaccggggcuucggacaacccaggggcuccggggccacgguccuaaacgggcc

SEQ ID NO: 11799 - RNA, 67 nt, Human
cuuguaugaaagaggaaucauacgugggacaguaguuuuacguaguaaaauuuucuuuaucaucaag

SEQ ID NO: 11800 - RNA, 67 nt, Human
guaugguccuugaggagcgaaggcuagugaagcugaauaaaaugccgaauaucgacgaggaccgugc

SEQ ID NO: 11801 - RNA, 64 nt, Human
cuucccuucaguguccggguugggauacaggaaaaucgggacuuuggccuggcacggggggggg

SEQ ID NO: 11802 - RNA, 78 nt, Human
ucaacucccugccaagaaaaauguagaugcaauucuggaggaguaugcaaauugcaagaaaucgcagggaaauguuga

SEQ ID NO: 11803 - RNA, 109 nt, Human
aagaagaaaaccaaacaagaugucuggacucuuuuaaauggaagcaaagaugacuuccucauauaugauagauguggccgucuuguauaucaucuugguuugccuuuuu

SEQ ID NO: 11804 - RNA, 63 nt, Human
uucuuauauuguuguuaaucaucaaggaaucucuucucgauuaaaauacacacaucuuaagaa

SEQ ID NO: 11805 - RNA, 64 nt, Human
cuuagcucuugggaugcaggcucagcccgcuggagcaugagcucuguguguaccgagaacuggg

SEQ ID NO: 11806 - RNA, 63 nt, Human
ggugaggcaaaucccuggaaggguugaacccugcaguucagucucccgggguuaucacucccc

SEQ ID NO: 11807 - RNA, 61 nt, Human
uggggcacugaggcccgggauguaugcacuggacagcagcaacccaggcauuugugcccca

SEQ ID NO: 11808 - RNA, 64 nt, Human; identical to SEQ ID NO: 287

SEQ ID NO: 11809 - RNA, 75 nt, Human
guaagcuaugugaguuuuacaaugcuuuuaaacugucauauuuccuguugagcacuuuaacuggcacauucuuau

SEQ ID NO: 11810 - RNA, 78 nt, Human
cauuuccagauuuauuuccaauuucaguuucaaaacaaacugaccugaaauuuuuaguauuuacuaucugugacaaug

SEQ ID NO: 11811 - RNA, 76 nt, Human
ugauauuuaaaacauuuaugugguaaaauaaucucauuugauuauggauaucauaaauagaauauaaaagauauua

SEQ ID NO: 11812 - RNA, 60 nt, Human
auauaugcauguguauacacacacgcacauaaaugcauguguauuaucacacacauauau

SEQ ID NO: 11813 - RNA, 61 nt, Human
uuagacacgaagaucugagugcuagguauauucauuucugcugagguguuuuugugucuaa

SEQ ID NO: 11814 - RNA, 74 nt, Human
cuccuuguuccagggaacacucaguuucccuacaggugaucuuggggagagacuguucccaggcaacccuggag

SEQ ID NO: 11815 - RNA, 91 nt, Human
gggcccuucaccucccacuccugugcgcugcuuccggcuucuguauggacuuacucuccaggccaucgaagcucgcgcgccucaccggccc

SEQ ID NO: 11816 - RNA, 63 nt, Human
ucaagccccggacagggucuuacaucaacuauuacgacaugaacgcggccaaugugggcugga

SEQ ID NO: 11817 - RNA, 60 nt, Human; identical to SEQ ID NO: 1551

SEQ ID NO: 11818 - RNA, 68 nt, Human
guucccgcaucuggaguucaggaguauucggggaaaccucaacacccggcuucggaagcuggacgagc

SEQ ID NO: 11819 - RNA, 68 nt, Human; identical to SEQ ID NO: 10839

SEQ ID NO: 11820 - RNA, 74 nt, Human
ggggagcaauuccagagaaggccuaacuuccaacagcccaggcuuuucaugaacuauucuggucguuguuucuc

SEQ ID NO: 11821 - RNA, 82 nt, Human
augcgugacgccaucccgcagcucauccagcuggaccaggcgaagccccuggccgcugugcugaaggaggugugcgacgcgu

SEQ ID NO: 11822 - RNA, 60 nt, Human
ugagagcgucugcuugauaauggauucugaauuaaugcauaguauaguaggaagcuauca

SEQ ID NO: 11823 - RNA, 92 nt, Human
ccaacucguccaacugacaagcccuugcgccugccucuuccgggaugccuacaaaauuggugggauugggacugucucuguuggccgaaugg

SEQ ID NO: 11824 - RNA, 60 nt, Human; identical to SEQ ID NO: 1551

SEQ ID NO: 11825 - RNA, 66 nt, Human; identical to SEQ ID NO: 3532

SEQ ID NO: 11826 - RNA, 60 nt, Human
ggugacaacaugcuggagcccagugcuaacaugccuugguucaagggauggaaagucacc

SEQ ID NO: 11827 - RNA, 60 nt, Human; identical to SEQ ID NO: 1551

SEQ ID NO: 11828 - RNA, 131 nt, Human; identical to SEQ ID NO: 1788

SEQ ID NO: 11829 - RNA, 60 nt, Human; identical to SEQ ID NO: 1551

SEQ ID NO: 11830 - RNA, 60 nt, Human
ccuucuagaugcuuauuuuccaccuuuuccuacagaagguaauauucaguuaccagaagg

SEQ ID NO: 11831 - RNA, 86 nt, Human
agccuggcccauggaggcauguucagggaucagcacuacugugcuucuuggaggaggugggacuugagcuggacccaugggaggcu

SEQ ID NO: 11832 - RNA, 77 nt, Human
cccugcauuccacucaucagcuucacaaguagguuuucaccuggucauagcuaugccuaacuacagggagugcuggg

SEQ ID NO: 11833 - RNA, 72 nt, Human
agccaaagcuuguuuccuuuuucuucccauccugaguucagugugaaguauagggaagaacaacaccaggcu

SEQ ID NO: 11834 - RNA, 68 nt, Human
caucuucucagucacuuaacacaaaucaggacacucuguaugcucaccacgguguaggagaugagaug

SEQ ID NO: 11835 - RNA, 131 nt, Human; identical to SEQ ID NO: 1788

SEQ ID NO: 11836 - RNA, 61 nt, Human; identical to SEQ ID NO: 823

SEQ ID NO: 11837 - RNA, 60 nt, Human; identical to SEQ ID NO: 1551

SEQ ID NO: 11838 - RNA, 60 nt, Human; identical to SEQ ID NO: 1551

SEQ ID NO: 11839 - RNA, 61 nt, Human; identical to SEQ ID NO: 823

SEQ ID NO: 11840 - RNA, 60 nt, Human; identical to SEQ ID NO: 1551

SEQ ID NO: 11841 - RNA, 66 nt, Human; identical to SEQ ID NO: 4461

SEQ ID NO: 11842 - RNA, 102 nt, Human
ggggacuacaauggccacgucggucuggguguuaagugcuccaaggagguggccaccgccauccguggggccaucauccuggccaagcucuccaucgucccc

SEQ ID NO: 11843 - RNA, 62 nt, Human
guggcauucggggccggggucgcggccguggacggggccggggccgaggccgcggagcucgc

SEQ ID NO: 11844 - RNA, 82 nt, Human
aguaccaaggauccuuacucaguucugaaacugugacuacggagaauaugucacuauuugagaauaagaggucccaccugcu

SEQ ID NO: 11845 - RNA, 66 nt, Human
gagguacacugaagauaaagcaaaaggcaacaagcauuuuuacaagcagaucaucccaguuaccuu

SEQ ID NO: 11846 - RNA, 60 nt, Human
gagagaggccagguaggccucauccugcuguugucucagcacuugggucugguuucuuuc

SEQ ID NO: 11847 - RNA, 62 nt, Human
ggguguucucucguaaagccugugagaccccuguuccucagguuuguuuguagagcaugccc

SEQ ID NO: 11848 - RNA, 63 nt, Human
caguaaacauuccaauguccaaaucuggguuagucuuccacuuuauggcugggauguuucuug

SEQ ID NO: 11849 - RNA, 61 nt, Human
guucucagcuggcuggaaaaauugguugacauuuucuuuugguaguuguuucuuaaagaau

SEQ ID NO: 11850 - RNA, 97 nt, Human
cuugagacuuguguagacucugaugcucguaggugacacauaguaaccuuccuggugcucuggcaaccucgcagugucaugguggcaucuuuccaag

SEQ ID NO: 11851 - RNA, 86 nt, Human
ggucgccgacugcucuggggaaggagaaguccugcagggaugugacaguggcuuugguuugcuccuuggucggccccagccugacc

SEQ ID NO: 11852 - RNA, 85 nt, Human
gugcucuucagugcacgaugcugcaccgggaacuucgcuuggcccuggaagcugguuugaugugcacgucggcuugagugagugc

SEQ ID NO: 11853 - RNA, 71 nt, Human
caccucuuugggcgauuugcggggcccaagcccguguugggggcccucgcuguguguugucuucuggggug

SEQ ID NO: 11854 - RNA, 64 nt, Human; identical to SEQ ID NO: 287

SEQ ID NO: 11855 - RNA, 79 nt, Human; identical to SEQ ID NO: 1810

SEQ ID NO: 11856 - RNA, 60 nt, Human; identical to SEQ ID NO: 1551

SEQ ID NO: 11857 - RNA, 60 nt, Human; identical to SEQ ID NO: 1551

SEQ ID NO: 11858 - RNA, 76 nt, Human
uugucgucauuggacacguagauucgggcaaguccaccacuacuggccaucugaucuauaaaugcgguggcgucga

SEQ ID NO: 11859 - RNA, 75 nt, Human
agagaagauucccggagaguaaauccucuuuccaaucccgaggaacaagcauugucucucuggcaagauccaucu

SEQ ID NO: 11860 - RNA, 97 nt, Human
cuggagugauguuagcagacccagcuuagaguucuucuuucuuucuuaagcccuuugcucugggaggaagaucuccagcuucagcucacacucacag

SEQ ID NO: 11861 - RNA, 63 nt, Human
ggcaguccuacaaccaguauucucagagauaccaucagagaacaaaacuaauguuaauaugcc

SEQ ID NO: 11862 - RNA, 66 nt, Human
ggcgcuauauauggauccaauggcaagaucaucaugacagaucugcgcgcgaucgauaucagcgcu

SEQ ID NO: 11863 - RNA, 62 nt, Human
ggguggguggaggcccacaaggaauugacgacaucuuauguguagggcuggaagcauuaccc

SEQ ID NO: 11864 - RNA, 60 nt, Human; identical to SEQ ID NO: 1551

SEQ ID NO: 11865 - RNA, 79 nt, Human; identical to SEQ ID NO: 1810

SEQ ID NO: 11866 - RNA, 63 nt, Human; identical to SEQ ID NO: 1098

SEQ ID NO: 11867 - RNA, 131 nt, Human; identical to SEQ ID NO: 1788

SEQ ID NO: 11868 - RNA, 60 nt, Human; identical to SEQ ID NO: 1551

SEQ ID NO: 11869 - RNA, 81 nt, Human
gggcaaauuaaaaacauaauuuuuuuuauaacuacacagaaaccuguauguuuuuuaaaaaauuaucuuguuuauuuguuu

SEQ ID NO: 11870 - RNA, 89 nt, Human
ugggcagguagguaggggcagugaacuggagugggacagcuggaugaugaggcuccccgacccauacagggccuccccuagccuggcca

SEQ ID NO: 11871 - RNA, 75 nt, Human
gcucggaacugccgacccgagugcuucccgcagagggcugguggugggagcggagugggucgggcggggccgagc

SEQ ID NO: 11872 - RNA, 85 nt, Human
gugcaggccugcuuuggccgcucaagggaauaccagcucaacgacucagcugccuacuaccugaacgaccuggagcguauugcac

SEQ ID NO: 11873 - RNA, 64 nt, Human
gaaggaggcgccuccacuggacgagggcugcuaucucgaccauuuuccgcaccucuccaucuuc

SEQ ID NO: 11874 - RNA, 60 nt, Human
ggugacaacaugcuuggagccaagugcuaacaugccuuggucaagggauggaaagucacc

SEQ ID NO: 11875 - RNA, 79 nt, Human; identical to SEQ ID NO: 1810

SEQ ID NO: 11876 - RNA, 86 nt, Human
caugaagggauguugaauuuuuaucaaaagcuuuuuccucaccuauggagaggaucauauaguuuuuguuuuuaauucuguuuaug

SEQ ID NO: 11877 - RNA, 94 nt, Human
uauuacguugaaugagaguagugagagugggcauccuugucuugucaaaguucucaaggagaaugcuuccaguuuuuacucauucagcaugaug

SEQ ID NO: 11878 - RNA, 64 nt, Human; identical to SEQ ID NO: 287

SEQ ID NO: 11879 - RNA, 76 nt, Human
gcaugcugguggucauccuggcagcugguggguggccugguaugcugcccacucagcuugagacucacccucaugc

SEQ ID NO: 11880 - RNA, 79 nt, Human
gugaccugagaauccauuuaaccucucggucuagaaccuccuucuggaaagugagguauuaauacuugacucauguuau

SEQ ID NO: 11881 - RNA, 80 nt, Human
ccacgugaaggggcguaaaggcccuuauucccacaaauccuccggguaaaguggccccuuuuagaagccccagaaagugg

SEQ ID NO: 11882 - RNA, 95 nt, Human
uggcuacacuaaaaaaugaccugggaagccaaaggucagcucaaaagagaauuugauuaauuccugguuuuccagacgauuguuugguggacaca

SEQ ID NO: 11883 - RNA, 78 nt, Human
accccagaaguuccaaccugugccuuauaucuugaagaaaauuuuccaggaucgcgaggcagcagcgaccacuggggu

SEQ ID NO: 11884 - RNA, 82 nt, Human
gguggugauucucaaacuugaucaggugcaaccuucucggaaacgggaagcagcauuccugucccaaguuucuuguaaaacc

SEQ ID NO: 11885 - RNA, 68 nt, Human
cuuuugaggucagaggguuuguguauccaucauuuugagaaaugcagcugcucggcugucccuaggag

SEQ ID NO: 11886 - RNA, 84 nt, Human
ggccagaggggaguuccugggugcuccacaugccuguccuaggcuuuuggacaugcuggcccccagaucugccccuccauggcu

SEQ ID NO: 11887 - RNA, 89 nt, Human
uggcuuucgccaguagcugaggacgcccuuguccaucauacgguagaguugaacacagagguggaucaggcugagugccaggaagacca

SEQ ID NO: 11888 - RNA, 102 nt, Human
accugacaacuggcccuaauacuucauucaaguucgcuauaguuuuggucccucaaucccagacauaugcauaauuggauaaguagaagggaaguguaaggu

SEQ ID NO: 11889 - RNA, 65 nt, Human
uggucaaagcuuaacauuugaaaccugauuuuaaaauuucaguuuaguaagugacaggcugacca

SEQ ID NO: 11890 - RNA, 130 nt, Human
agcaugcucaguuaaauuugaauuucagacaaacaaugaaugcuuuuacuguaaauauaugccaaauauugcaugaaacauucuuaacgugaaauuguuucucugaaauucaaacuuaacugggcaucuu

SEQ ID NO: 11891 - RNA, 60 nt, Human
agguuaaguuccuugaugcccuccuuuggaaagaaguggagggugagggaaaaaggacuu

SEQ ID NO: 11892 - RNA, 71 nt, Human
gaagucauuuuuuuucuugucauuccuuuuguaguaaguugcuguuuggauaaaaguugaugugugauuuu

SEQ ID NO: 11893 - RNA, 83 nt, Human
uuugcagcuaacuacuauguguagacagguuuuauauuauaaaguaugcauucuuaucaccuaguauauaguuaguuuguaga

SEQ ID NO: 11894 - RNA, 68 nt, Human
uguuuuuuauguuaaacuuguaucccuuuaaaaacugaaggaaauuacaaaaaaaaaacaaaaaaaca

SEQ ID NO: 11895 - RNA, 65 nt, Human
uucugguguaucaaagcacaugacuaaaaugaaaucaugguaucugugaauuuuauaagcuagaa

SEQ ID NO: 11896 - RNA, 62 nt, Human
gcuuuccuuuccaagaggaauccucggcagauaaacguggacuguccucuacagaaggaagc

SEQ ID NO: 11897 - RNA, 67 nt, Human
gaaugcagaaaaugaguaucagacagcaauuagugaaaacuaucaaacaaugucagauaccacauuc

SEQ ID NO: 11898 - RNA, 66 nt, Human
acgaggcgggugaaggcuguggguguccuggcgucccugggccaccugucagccccucguccuggu

SEQ ID NO: 11899 - RNA, 95 nt, Human
acucacggcgugucccucugaccagguggacggcgaguacagguaccgcugcggcacuugugagaagaccuuccgcaucgagagcgcgcuggagu

SEQ ID NO: 11900 - RNA, 97 nt, Human
gggugguggaggucagagucauaacagacacaggcguggagucgcccgggcagcacgucgggggcucggcaucuguggacucugcgcugggccaucu

SEQ ID NO: 11901 - RNA, 77 nt, Human
ccccagccagaaucgacgugagugugaugaccgccccggucgugaagacauaccagcucaacagguucaauuugggg

SEQ ID NO: 11902 - RNA, 70 nt, Human
guucccgagcacggucgggaugaccgggaucaggaagaaccacaccaucacgaucccgugcgcggugaac

SEQ ID NO: 11903 - RNA, 60 nt, Human
guuguauaacucggccgugaccagugccccgcggggcguaaucagguucagccgaacgac

SEQ ID NO: 11904 - RNA, 82 nt, Human
acuaucugacaagagauaaccucugggugguuugucacuauggugaagugacaaaugacuuuggucauugcugaaagguggu

SEQ ID NO: 11905 - RNA, 61 nt, Human
gaucaacaagaagauuuauaagauguggcaggguuaccuuaucaaggacggaagguugauc

SEQ ID NO: 11906 - RNA, 63 nt, Human
gaugaccuaaguucuugaccacucaaguuggcauggcgguucaagacaugaugagaggaaguu

SEQ ID NO: 11907 - RNA, 72 nt, Human
ccggauggaacguacucugugcuuauaucaucacagagcuuggaugaaagagagcgagaagaguucuauagg

SEQ ID NO: 11908 - RNA, 63 nt, Human
aaggggaguuuaaacaaguggaugcuuuuaauguccuguauguugacuuauguaauucccuuu

SEQ ID NO: 11909 - RNA, 63 nt, Human
ccagauaucgguggguggcauuaacagaagacacugaagaacauuaccuaagagauuaucugg

SEQ ID NO: 11910 - RNA, 81 nt, Human
gcgccacugucagcuuagaaggggccuuagggaaccuggcaggaggagucccugaggccaacucuuccugauuuauuuugc

SEQ ID NO: 11911 - RNA, 101 nt, Human
gaggagaaguacuaaaacuuuauaaaaaucugcuguaucuuggacgagacuaucuaaaaggagcagacuauuuuaaaaagcguuugaagaacauuuuccuu

SEQ ID NO: 11912 - RNA, 67 nt, Human
ugcucaauuuugauaccaaaccauagcacauuuagcuauacuaccggaucauacaauuaacugagca

SEQ ID NO: 11913 - RNA, 61 nt, Human
agcacacuguaggaacuguagaccccaaguugaaaacuuguucuauggaaccaaaguagcu

SEQ ID NO: 11914 - RNA, 119 nt, Human
cucuuuagguauuagagccucuuagaugagguauaauuuacugcaaagaaaaaaaauuguuauaauuuugccauaaguuaugccuauuuagauggcuguauaacugguacuuugaagag

SEQ ID NO: 11915 - RNA, 67 nt, Human
guuguagcaguaaaauacauuuuguuaccaugaaucuuugaaaacaaaagaacuucacugagacaau

SEQ ID NO: 11916 - RNA, 79 nt, Human; identical to SEQ ID NO: 1810

SEQ ID NO: 11917 - RNA, 69 nt, Human
uuguuuuuaauuuauuuugucauauuuuuguaaaacggcagaaaugcaauaaaaacuauauuucaacag

SEQ ID NO: 11918 - RNA, 72 nt, Human
ggaucguggcgcgcauggcccuggugccgcgcacccuggaggcgcgcggacuggacgccacgccgcugaucc

SEQ ID NO: 11919 - RNA, 84 nt, Human
acgaggaggucccuagucaggaccgagcaggggaguaggauaggaauccccgccgcaccuuuguacgagccugaccccuuccgu

SEQ ID NO: 11920 - RNA, 76 nt, Human
gccccgagcgcgccuggaagccccgggcaaccggccagggccgggcacaggugggguccgucaggccgcccggggc

SEQ ID NO: 11921 - RNA, 60 nt, Human
guugccaccgaggaggcggcggcccugcgucuggaacgccguugccaccgaggaggcggc

SEQ ID NO: 11922 - RNA, 83 nt, Human
ggccuucuauccugggcugcaacauccuucgaguugaauauuccuuacugaucuauguuagcguuccuggauccaagaagguc

SEQ ID NO: 11923 - RNA, 92 nt, Human
uucucagaugggcgggugucugucucugcucgaauugacagaaaaggauucugugaaggugaugagauuuccauccaugcugacuuugagaa

SEQ ID NO: 11924 - RNA, 82 nt, Human
gaacuugaagaauugaaacaaauuguucccaaagaaucccucguuuacuucuuaauaggaaagguuuacaagaaguuagguc

SEQ ID NO: 11925 - RNA, 108 nt, Human
uuugugaagaugauugggaaaucaaauaaguaaaaacgcugggucaaaacuuuaaaaauuuuggcuacuuuaagguuuuucuuugccuuuuucagucugcuuuacaag

SEQ ID NO: 11926 - RNA, 63 nt, Human
ccagcuuuccugccagaguucugccgaggcccaccagcuggucuuaugguaaaguuaagcugg

SEQ ID NO: 11927 - RNA, 73 nt, Human
gcugccacacagagggcuugcuuccaguugccacaugugagaaaggcugagagagcuuucucgugggcaccgc

SEQ ID NO: 11928 - RNA, 64 nt, Human
gggcaccgcaacgggcaaacaugagccccgcuggcucauacaugugcuccugcaucaggugcuc

SEQ ID NO: 11929 - RNA, 62 nt, Human
ugagcuuggugaauauaacuucagagcuucguuauacaaguuuuuaucuuuuaucaaguuua

SEQ ID NO: 11930 - RNA, 81 nt, Human
aucaacuuccaauaccugcugccugucucccugacccaugaaucuggcaacguuaggcacagucagacauggacaguugau

SEQ ID NO: 11931 - RNA, 106 nt, Human
gcuuggagccucccccagagguguggcaggugcugaagacccaccccggagacccccgcuuccagugcagucucuuggcaucucuauccccuaugaggcaccacgu

SEQ ID NO: 11932 - RNA, 75 nt, Human; identical to SEQ ID NO: 7168

SEQ ID NO: 11933 - RNA, 65 nt, Human
ggccucggugacugccugguuaagaucuacaaaucugaugcggaucaagggccuguaccaaggcu

SEQ ID NO: 11934 - RNA, 64 nt, Human; identical to SEQ ID NO: 7014

SEQ ID NO: 11935 - RNA, 86 nt, Human; identical to SEQ ID NO: 7015

SEQ ID NO: 11936 - RNA, 88 nt, Human
gagggggcaagucacaugggcagagauagccgugugagcagucucagcucaagcugccccccauuucuguaacccuccuagcccccuu

SEQ ID NO: 11937 - RNA, 73 nt, Human
uguugcuauuuccuaaccugcaggcagaaccugaaagggcauuuuggcuccggggcauccuggauuuagaaca

SEQ ID NO: 11938 - RNA, 91 nt, Human
ggagaaucacuugagcccaggaggcggagguugcagugggagccaagauaacgccauugcacuccagccugggcgacaagagugagacucu

SEQ ID NO: 11939 - RNA, 95 nt, Human
ggccgggcaugguggcucacaccuauaaucccagcacuuugggaagccgaggugaguggaucaucugaggucaggaguuugagaccagccuggcc

SEQ ID NO: 11940 - RNA, 66 nt, Human
ggcauguggcagguccauaugacaugaaagagacugaaaaauauuuauacuauguggccacaugcc

SEQ ID NO: 11941 - RNA, 64 nt, Human
uuucugcuguauauuacacuggcuacuacuuaguccuauguaugcuucuaguauauuacagaaa

SEQ ID NO: 11942 - RNA, 69 nt, Human
gagaaugggggaggugugugacagccaugcuggacucagaagcaggugucauaaacugccccagcucuu

SEQ ID NO: 11943 - RNA, 86 nt, Human
ggagaaucacuugaacccaggaggcagagguugcagugggccaagauugcaacacugcacuccagccugggcaagagcgagacucc

SEQ ID NO: 11944 - RNA, 73 nt, Human
aucauaauucuggagggaagcucuuggaggcugugagucucccuguacaguguuaccauccccgacaucugau

SEQ ID NO: 11945 - RNA, 102 nt, Human; identical to SEQ ID NO: 2701

SEQ ID NO: 11946 - RNA, 87 nt, Human; identical to SEQ ID NO: 4680

SEQ ID NO: 11947 - RNA, 90 nt, Human; identical to SEQ ID NO: 2702

SEQ ID NO: 11948 - RNA, 60 nt, Human; identical to SEQ ID NO: 5595

SEQ ID NO: 11949 - RNA, 103 nt, Human
ccuuuccugauuuugcauguucucauucccaaaguagucuaccuuaguuuacacucaaagguagcacuuguugaaacuacaugacagaaacaggcugcaaagg

SEQ ID NO: 11950 - RNA, 70 nt, Human
gcugaauuauaauuagccacacaaauaaugagaguuuuauuuuuuuuuuucuggcucacuccaaaucagc

SEQ ID NO: 11951 - RNA, 64 nt, Human; identical to SEQ ID NO: 3714

SEQ ID NO: 11952 - RNA, 122 nt, Human
gacaucuggagccugggagucauccuguacacccucgucagcggcuccugcccuucgagggcacaaccucaagagcuggggagcgaguacucagagggaaguacgggucccuuccuaauguc

SEQ ID NO: 11953 - RNA, 60 nt, Human
auccaacacuucugucuucagggagaguacagcuuguugugggggauggaagaaugggau

SEQ ID NO: 11954 - RNA, 84 nt, Human
ggaggcauauguggcuuuggcugcucucaccaacagcaauaugacugcuaaaagaaccaacccaggacagagccacaaucuucc

SEQ ID NO: 11955 - RNA, 79 nt, Human
guaucucuguuuacuauccucuuggcucuugguggaauugaauucaucuugugucuuauucaaguaauaaauggagugc

SEQ ID NO: 11956 - RNA, 77 nt, Human
cugggguguuuauggcaagucacuuugacagacauuauuguggcaaaugugucugacuuacuguuucaacaaaccag

SEQ ID NO: 11957 - RNA, 65 nt, Human; identical to SEQ ID NO: 247

SEQ ID NO: 11958 - RNA, 80 nt, Human; identical to SEQ ID NO: 100

SEQ ID NO: 11959 - RNA, 76 nt, Human
ccggagcccccgcccccacgcacacauuacuccaacauuggaggccaacgagagugaggagguccggcaguuccgg

SEQ ID NO: 11960 - RNA, 90 nt, Human
agguuuuucuaagagaaagguccucaaagauucagugugcuugguuacugguauucuuagcaggaucuucuguucuuuuauauuacaccu

SEQ ID NO: 11961 - RNA, 76 nt, Human
uauuggugccuucuuucaucaugccuuuuaaaucuaaggguuacugguauaugcuuuuagaagaauugugucaaua

SEQ ID NO: 11962 - RNA, 61 nt, Human
gguccgucuucuuccugcugcugccgggaccuucugcggccgaugagaagaagaaggggcc

SEQ ID NO: 11963 - RNA, 68 nt, Human
ccgcuuaauuuuuuaccugaaaaaccggauuugauucaagugggguucgcagguagaagaaguaacgg

SEQ ID NO: 11964 - RNA, 71 nt, Human
gaaggccuguguuguuaaucuuuaucugugagaggaucucugugagauacgauaugauaaacaggcacuuu

SEQ ID NO: 11965 - RNA, 80 nt, Human
aacaugaauguguugagucauccucuccugguaauggcaguaaggaggcugggaugaggguggagcaccacucaacuguu

SEQ ID NO: 11966 - RNA, 72 nt, Human
gcuggauugauuguaucauggugauuuaugaucacuauaaucauuaucuauaauugcccaaauccaauuagc

SEQ ID NO: 11967 - RNA, 61 nt, Human
caucuccugugggcuuguuggguauagaagcuacucuaagacccaaccagauaccaugaug

SEQ ID NO: 11968 - RNA, 61 nt, Human
ccaugaugccacuguuaauucuguuugcucuucuaauuaaccuaagcuaguguguaugugg

SEQ ID NO: 11969 - RNA, 101 nt, Human
cuggacaccaguagguagugucaagccagagauucggggcaguagauaaauguucauuuuacugaugcacuuuaguuuuuggucuguuaccuguuuuccag

SEQ ID NO: 11970 - RNA, 65 nt, Human
gauaaggaccuguuuggugcagcagggagcaaaaucuccuuuaacaaccaagcaguuccucauuc

SEQ ID NO: 11971 - RNA, 84 nt, Human
ugucccaagcaaggauagggaaggggaagugguugagccucuggagaucauuguaaccaauccugucagaccugguuuggggca

SEQ ID NO: 11972 - RNA, 84 nt, Human; identical to SEQ ID NO: 286

SEQ ID NO: 11973 - RNA, 89 nt, Human; identical to SEQ ID NO: 288

SEQ ID NO: 11974 - RNA, 61 nt, Human; identical to SEQ ID NO: 776

SEQ ID NO: 11975 - RNA, 76 nt, Human
uggggugguacuguugucaccugccuccaggacuuucccugugauaaacuggugacacgccucacauuucacccca

SEQ ID NO: 11976 - RNA, 87 nt, Human
cugauauuauccugggauaacgauaugugguacaauacucuuauuugagauauuaaacacuucauuauaaaauagguuuuguauuag

SEQ ID NO: 11977 - RNA, 75 nt, Human
gauuuugcccagcuaaaggccaacguuaaguguucagaacacauuuaagauaggcuaggcuaagcugggauguuc

SEQ ID NO: 11978 - RNA, 70 nt, Human
uugacuuaugguuuuucaacuuuauaauggggcaaaagcaauacacauucaguuaaaaacuguacuucaa

SEQ ID NO: 11979 - RNA, 126 nt, Human
agcuggcuucuacacggccauuugggaaccagaagucccuauucuuagauacuuaauccuuuagggggcuguugugaaugggaaugggguauaucauuuugacaugugguuggaugggggcaaguu

SEQ ID NO: 11980 - RNA, 78 nt, Human
cggucuccuacuucauaacuugaguucggggauuucacgggggauaaucugggggcgggguauagggguaggguaccg

SEQ ID NO: 11981 - RNA, 102 nt, Human
uccugggucccaggaagauugagggaggggaugcugcagauguggaaguccaguuuucuuaccaccuugucagaauuuuuucccuucucuggggucccagga

SEQ ID NO: 11982 - RNA, 67 nt, Human
uucugugaccuuacuaaacguugggaauaaguucuaguaggaucaacauuggauaaaggucacggga

SEQ ID NO: 11983 - RNA, 64 nt, Human
auaagaucuaagaguuaccuggguacagaaagaagaugccagaugacacuuaagaacuacuugu

SEQ ID NO: 11984 - RNA, 81 nt, Human; identical to SEQ ID NO: 201

SEQ ID NO: 11985 - RNA, 62 nt, Human
cauccgcaggguucggaugagaccagguguugcuuguucaguaucucaagcccagaaagaug

SEQ ID NO: 11986 - RNA, 63 nt, Human
guggacuggugggggcugggcguggucauguacgagaugaugugcggucgccugcccuucuac

SEQ ID NO: 11987 - RNA, 63 nt, Human
acaacuaaguuaaaauguugaugugaguuuuauuucacauggauggaauaaacuugugguugu

SEQ ID NO: 11988 - RNA, 64 nt, Human
gaggucccagcacauguguuuucaagaggccacuaggcauucuucacugagugcugcugacuuc

SEQ ID NO: 11989 - RNA, 76 nt, Human
gggugugggaugcuucgccaggucaugugcuauauugucucauuuuuguaguacuuuuacacguuguaugacaccc

SEQ ID NO: 11990 - RNA, 65 nt, Human
uccguuauuuuaaugcgcuacacccacagaaauguuuaagugggcacaagggcuuaauuuaugga

SEQ ID NO: 11991 - RNA, 100 nt, Human; identical to SEQ ID NO: 698

SEQ ID NO: 11992 - RNA, 60 nt, Human; identical to SEQ ID NO: 2705

SEQ ID NO: 11993 - RNA, 72 nt, Human; identical to SEQ ID NO: 1989

SEQ ID NO: 11994 - RNA, 76 nt, Human
agcagggcccgagcuggaagcgcaaggcagccgccgccgugccgcuccucccuugcccucaggccaggucccugcu

SEQ ID NO: 11995 - RNA, 88 nt, Human
cgcugggcugugcggugcggagggugaugaggaugucuggugacagccgugcggacaccacuccucucugcagcacugccucccagcg

SEQ ID NO: 11996 - RNA, 99 nt, Human
gaauuagaaacccauccuucaagcacaauaaucaucacagacuugaguuugcuuccuaaagcaaaggcuccggguuuguuuggaaaauuuuucugauuu

SEQ ID NO: 11997 - RNA, 95 nt, Human
gcggcugcaucuuccugucagcccugguuuccauggugacuggcgucacgcagccacccgaguauggcugaccuuccugcagagagaggagccgc

SEQ ID NO: 11998 - RNA, 63 nt, Human
gagagagagagagagagagagagagagagagagauucucucccccagacgugaugucucucuc

SEQ ID NO: 11999 - RNA, 97 nt, Human
guaggccgccgccgaacgagccgccuagucgaccgugauuggagucguccucccucaucccgucagcagcuagcgcucgugcggucggucguccugc

SEQ ID NO: 12000 - RNA, 60 nt, Human
cccugggaugcgaagcuuucuuugagccuuggcacagaguauggaaguagcuccgagagg

SEQ ID NO: 12001 - RNA, 83 nt, Human; identical to SEQ ID NO: 3404

SEQ ID NO: 12002 - RNA, 70 nt, Human
gguaugagaacuccuaugggucccccaauggggauccccccuuggaagagggacuccaauggggcaugcc

SEQ ID NO: 12003 - RNA, 60 nt, Human; identical to SEQ ID NO: 8077

SEQ ID NO: 12004 - RNA, 72 nt, Human
cugccucuucuccugcuggcagguacacuucuucaggcuguguccucugugcagguagguaggggauggcag

SEQ ID NO: 12005 - RNA, 90 nt, Human
ucauggucucagcgaauagcggcccuuagggcuggccccuuacaugugugagugcccagggcugaggguggcuggccaccugaguccuga

SEQ ID NO: 12006 - RNA, 69 nt, Human
cugcucuuugacacugcuuuugguacccuggguggccuauuucaggugguuuuuagugucugcaagcgg

SEQ ID NO: 12007 - RNA, 67 nt, Human
gucacccgcuauccugccaacucuaucguggucguaggaggcuguccugucugcaggguuggggugc

SEQ ID NO: 12008 - RNA, 75 nt, Human
ggaccaguuggggcggaaagggaaaaccgccuggccggccaguugcaaaggccuuuucgccgcgaauaagggucc

SEQ ID NO: 12009 - RNA, 80 nt, Human
uggguccccgggggcccuuggggggaaccaaaaacuugacaagucaccccucccccgaaggaaaaacccccgugggucca

SEQ ID NO: 12010 - RNA, 64 nt, Human
ggggcgggugcuagugacccugggccuggcucucagccgcccagggccccuccacaccagcccc

SEQ ID NO: 12011 - RNA, 67 nt, Human; identical to SEQ ID NO: 1146

SEQ ID NO: 12012 - RNA, 62 nt, Human
gacacaucgcugacuuggcuggcaacucugaagucauccugccagucccggcguucaauguc

SEQ ID NO: 12013 - RNA, 61 nt, Human; identical to SEQ ID NO: 776

SEQ ID NO: 12014 - RNA, 69 nt, Human
cugugaggcuguggccaucuacggcaucaucauggcaauugucauuagcaacauggcugagccuuucag

SEQ ID NO: 12015 - RNA, 97 nt, Human
gccaucggaacuaccaugcaggcuacuccauguuuggggcuggccucaccguaggccugucuaaccucuucuguggagucugcgugggcaucguggc

SEQ ID NO: 12016 - RNA, 76 nt, Human
gcgggacggacgguggacgcugggacgcguuuguagcuccggccccgccguuccgagcccccgccgccgucgccgc

SEQ ID NO: 12017 - RNA, 84 nt, Human; identical to SEQ ID NO: 286

SEQ ID NO: 12018 - RNA, 64 nt, Human; identical to SEQ ID NO: 287

SEQ ID NO: 12019 - RNA, 89 nt, Human; identical to SEQ ID NO: 288

SEQ ID NO: 12020 - RNA, 75 nt, Human
cuggggcuguuaaauuacauuuuauuggcauaagguugcacugcaaucugccaguaucacauaaugauaauccag

SEQ ID NO: 12021 - RNA, 129 nt, Human; identical to SEQ ID NO: 5625

SEQ ID NO: 12022 - RNA, 94 nt, Human
guggggcccgugggcagcugggcaacuggauguccccagcugauuuccagcgagcuguggaugagagguuuccaggcugcaugcagggccgcac

SEQ ID NO: 12023 - RNA, 74 nt, Human
uggcaggacccgcuggugcuggacggagcagcugaccacagacugagauccucaucacgggacaccuuccgcca

SEQ ID NO: 12024 - RNA, 82 nt, Human; identical to SEQ ID NO: 6291

SEQ ID NO: 12025 - RNA, 116 nt, Human
gcuccggcggcccccggcgcccggcuguugcggcucccgguggagcggggccugugcaugugccgcugagcccggagcgcgccggcuggaccgaggcugcugcgggccgccguggc

SEQ ID NO: 12026 - RNA, 68 nt, Human; identical to SEQ ID NO: 813

SEQ ID NO: 12027 - RNA, 81 nt, Human
gguuugaauaugaaggcacaccacugaaauggcauuauccaauugguuugcuauuugaucuucuugcaucaaguucagcuc

SEQ ID NO: 12028 - RNA, 75 nt, Human
gugugguuuggacgaauuccaacuuguuucacgcuauaucaggaugagauaacugaaagggaagcagaaccauac

SEQ ID NO: 12029 - RNA, 91 nt, Human
cuggccacauaugccccugucaucucugcugagaaagccuaccaugaacagcuuucuguagcagagauuaccaaugcuugcuuugagccag

SEQ ID NO: 12030 - RNA, 65 nt, Human
uaggucaaauuguguccuccaucacugcuucccugagauuugauggagcccugaauguugaccug

SEQ ID NO: 12031 - RNA, 72 nt, Human
uggugaaaugugaccucgccaugguaaauacauggcuugcugccuguuguaccguggugacgugguuuccca

SEQ ID NO: 12032 - RNA, 61 nt, Human
gggaggugaagaauaaaaggaugggagguaauucaucacuguccuuccacuaaucacuccc

SEQ ID NO: 12033 - RNA, 74 nt, Human
uuguuacugcuuccauuuuaggacacuuuaagugcaaacccagaugccuaaaauaaggacaaaugcagucacaa

SEQ ID NO: 12034 - RNA, 87 nt, Human
gcccucaccugcuugcuccuaaaugugauccugcuuacuguaacuucuuaagacacuaucagugcguuguuccaugaaggcgagggc

SEQ ID NO: 12035 - RNA, 72 nt, Human
gcuuuucacgggagguuuaaagucagccagagcaagcuggcccuucucuucaucaaaucccaggugaacugc

SEQ ID NO: 12036 - RNA, 71 nt, Human
gaaagaauaguagcaaacaguggcuuauuucuucauuucucaguaaucauuguaaaucuuuuuuuuuuuuc

SEQ ID NO: 12037 - RNA, 68 nt, Human
gauuaucauucuugccucucccuuugucacaguguugucgugaagaucagauauguaugaaugcaguc

SEQ ID NO: 12038 - RNA, 62 nt, Human
aaguaggcuauaggacuggacauuuggauauuucaucaguucaaauaguccugggcgugcuu

SEQ ID NO: 12039 - RNA, 75 nt, Human
gcaccacagcaaggauuaucaugugcccuccagagacauacucucagguggaugcgagaaauauccagcuguugc

SEQ ID NO: 12040 - RNA, 69 nt, Human
ggggagaaggaaggggagcgaggagaggaagcucucucuccucucccugcuuccccuucaccauucccc

SEQ ID NO: 12041 - RNA, 66 nt, Human
ugauuaauuucuuaggccuauuuaagauacauauuuauauaguucuuaacgguuuuucucugauca

SEQ ID NO: 12042 - RNA, 62 nt, Human
acuuugaucucuggucauucggugaccuugaaggaugcuggaagacucagaguccccagagu

SEQ ID NO: 12043 - RNA, 61 nt, Human
cacuggccgaacucucggucucgggucuugaguggggcccgcagccgaagaguugcaggug

SEQ ID NO: 12044 - RNA, 63 nt, Human
ccacggcccgauguucucaaagcccugcucgccgcaggugguucuggagcagccgggcggagg

SEQ ID NO: 12045 - RNA, 61 nt, Human
agugcaauguugauucugcuuuaccacauauguauuuuagaaagaugucagcuuuguugcu

SEQ ID NO: 12046 - RNA, 61 nt, Human
ccuuuauugaaaauauugggauagcacugcauuacauauagucaauauccauaaaugaagg

SEQ ID NO: 12047 - RNA, 62 nt, Human
cugccaguaugcuguuagucaagaguccucaguaggagaacuugagugaaacguacacccag

SEQ ID NO: 12048 - RNA, 64 nt, Human; identical to SEQ ID NO: 9729

SEQ ID NO: 12049 - RNA, 73 nt, Human
uaguaucauggacuaaacuaggucagagugaaguauaugcaaaaugaccauuuuguuuuuuuccauuuuauua

SEQ ID NO: 12050 - RNA, 61 nt, Human
aggcuggacuuggggccgugcggggcccagagugcuccugccgguucccgagggcuggcuu

SEQ ID NO: 12051 - RNA, 107 nt, Human
uuugcugcuucugaacauugaugcuucgugucucuugcggggguggggcauuaggaggccucuuggcgaccgcggggggagggagcacgaaguccaggggcggcggg

SEQ ID NO: 12052 - RNA, 63 nt, Human
ccacuucuuucuucucucuucgguccuccccguggaaccguaauguauacgaaaaucuagugg

SEQ ID NO: 12053 - RNA, 62 nt, Human
guaugaaagggggaaacaaagaacagccuuuuagguaaggcuuuucaguaccugccucgugc

SEQ ID NO: 12054 - RNA, 71 nt, Human
uuguuuuucuauuuuagugguuaaaauguaugcaauuuuagcacccaucuacaaaaguuagauguuaauaa

SEQ ID NO: 12055 - RNA, 61 nt, Human
cuccgaggacagagggcuaaauccaugaaguuuguggauggccugaugauccacagcggag

SEQ ID NO: 12056 - RNA, 67 nt, Human; identical to SEQ ID NO: 1146

SEQ ID NO: 12057 - RNA, 105 nt, Human
gaucacaaugcggccaaagguguagagcugcuucccuucgugucgcuucccaaugacgggcaugaagacaauguugugcuccucagccuuggucucaaugagguc

SEQ ID NO: 12058 - RNA, 61 nt, Human
guuacaucuuggaaccugagccauggagguggcgccaccucccugaggagaaagguguggc

SEQ ID NO: 12059 - RNA, 63 nt, Human
ucagguugagagugagcugcugugagccagugacaacuacugcuacaacuugcuguuacuuga

SEQ ID NO: 12060 - RNA, 74 nt, Human; identical to SEQ ID NO: 521

SEQ ID NO: 12061 - RNA, 75 nt, Human
cagccuacgaggucugcuauggccuggucaacgaugacaaccgaccuauugggcccaugaagaaagugcugguug

SEQ ID NO: 12062 - RNA, 74 nt, Human
ucaucccugacaucccuaucguggacgcccagagcggggcaggacuacgacagcuuccuuauguacagcgauga

SEQ ID NO: 12063 - RNA, 76 nt, Human
ccaucugccgugugacuggugggaugaacgguaaaggcagaccgagaugaauccucaccauaugcugcuauguugg

SEQ ID NO: 12064 - RNA, 77 nt, Human
ggaccucagguggcugaaggagacgaauguauuuggugucugccauaucuuugcauccuucaaugacacuuuugucc

SEQ ID NO: 12065 - RNA, 73 nt, Human
gugucaagccagagauucggggcaguagauaaauguucauuuuacugaugcacuuuaguuuuuggucuguuac

SEQ ID NO: 12066 - RNA, 85 nt, Human
gaagugaaaauguuuuacaaucucuagguuuggcuaguucucuuaacacugguuaaauuaacauugcauaaacacuuuucaaguc

SEQ ID NO: 12067 - RNA, 111 nt, Human
uuguuucuuaagaaaacacacucuuuuuuacaaauuacuuuuaaauauuaacucaaaaguugagauuuuggggugguggugugccaagacauuaauuuuuuuuuuaaacaa

SEQ ID NO: 12068 - RNA, 64 nt, Human
cucagccucaggauuucgugcuuguaccugcccaggugcugguccacguacuccuguagcucag

SEQ ID NO: 12069 - RNA, 85 nt, Human
gcugugcccgcucccguuccagcucugccugggugcugcgggagaagucccggagcuucugguggaucugggcccaggaugcagc

SEQ ID NO: 12070 - RNA, 82 nt, Human
ggcccuguggcucugauguuccccccugggaggcuccaccgggucucuuuuuuggggaugagagcagugccccaggcccgcc

SEQ ID NO: 12071 - RNA, 72 nt, Human
gggcggcugcacgaaggaugaacgguuuguggcagaggugaccugccuggacccccugaggcgcagccgccu

SEQ ID NO: 12072 - RNA, 84 nt, Human
guguuggguggcaaggucuaugugaucggaggcuuugacggcuuacagagaaucaacaacguggagaccuacgaccccuuucac

SEQ ID NO: 12073 - RNA, 75 nt, Human
ggagugcaguggcgugaucucggcucacugcagccucgccuccugggcucaagugauucuccugccucugccucc

SEQ ID NO: 12074 - RNA, 84 nt, Human; identical to SEQ ID NO: 286

SEQ ID NO: 12075 - RNA, 103 nt, Human; identical to SEQ ID NO: 294

SEQ ID NO: 12076 - RNA, 101 nt, Human
ugagacggagucucgcuuugucacccuggcuggagugcaguggcaugaucucagcucacugcaaccucugccucccggguucaagugauucucccgccuca

SEQ ID NO: 12077 - RNA, 65 nt, Human
ccuuccacagugucagagacuucagcuacucuuacaagcaauaguaccacuggcacuucuauagg

SEQ ID NO: 12078 - RNA, 78 nt, Human
guugaugaagaugaaccuacuguaguaccaaccacuucugcaagaauggaaucacaagcuacuagcgcuuccauuaac

SEQ ID NO: 12079 - RNA, 74 nt, Human; identical to SEQ ID NO: 365

SEQ ID NO: 12080 - RNA, 75 nt, Human; identical to SEQ ID NO: 1111

SEQ ID NO: 12081 - RNA, 111 nt, Human
uugaaacagacugggccaauguccacaaagaauuccuggucagcaccaccgauguccaaaggugcaauaucaaggaagggcaggcgugauggcuuauuuguuuguauucaa

SEQ ID NO: 12082 - RNA, 68 nt, Human
uuuuuauuuuggguuucuuacaaagggugacauuuuccauaacagguguaagaguguugaaaaaaaaa

SEQ ID NO: 12083 - RNA, 84 nt, Human; identical to SEQ ID NO: 286

SEQ ID NO: 12084 - RNA, 64 nt, Human; identical to SEQ ID NO: 287

SEQ ID NO: 12085 - RNA, 89 nt, Human; identical to SEQ ID NO: 288

SEQ ID NO: 12086 - RNA, 98 nt, Human; identical to SEQ ID NO: 6333

SEQ ID NO: 12087 - RNA, 74 nt, Human
gugcagucuuugggcuaaggcagggcaggauaugcaaguggagauauugccuugcacagaaguuuuuacuguau

SEQ ID NO: 12088 - RNA, 82 nt, Human
gaaaggcaagcgcuccaaggauuuuuugauuccuuuuggcuuuggccaagaaaaugaaauuauugagaacagccagccuuuc

SEQ ID NO: 12089 - RNA, 102 nt, Human
agcuuuugaucuauucaauccaaacuucaagucuaccugucaacgguuuguggagaaguacacugagcuacagaaacuuggagaaacagaugaagagaaguu

SEQ ID NO: 12090 - RNA, 63 nt, Human
agggagcaucuucucucggacucgggaccugguucgggccggggugcugaaggagaagccccu

SEQ ID NO: 12091 - RNA, 85 nt, Human
ccuguacaaugcugcuggcuucaaagcccggaccaaggcucgaagccgugugcgggacaagcgggcagacauccugugaagcagg

SEQ ID NO: 12092 - RNA, 83 nt, Human
uugguccguauuuuuaacagaagacagugcaacaacuggucuccaccaguauugucacuuuauuuuuuuaaugacaaaaccaa

SEQ ID NO: 12093 - RNA, 99 nt, Human
uuuuuuuugauacagagucucacucugucaccucaggcugagauugaaccguggcacuccagccuggugugacagagcgagacuuuaucucaauaaaaa

SEQ ID NO: 12094 - RNA, 70 nt, Human
gaaauggagaaucugguuugcuuuauuauucccucaaauugaaggaauaaaaauacaacccuuucauuuu

SEQ ID NO: 12095 - RNA, 75 nt, Human
agggcuccugcggcaucgggggcggcaucgggggcggcuccagccgcaucuccuccguccuggccggaggguccu

SEQ ID NO: 12096 - RNA, 84 nt, Human
auuuaggauucucugugugaugaccuuggaugcuguaaagugauucgucauagucucugggguacccauguaguuguagggagu

SEQ ID NO: 12097 - RNA, 89 nt, Human
gggaaugugucuuauucauaucuugaauaacguuggacccucacuguguaggugggauuagcuguaccagggugauuggauggauuucc

SEQ ID NO: 12098 - RNA, 66 nt, Human
uuuuucccaaauuaacuuguguccaaaaaaaaaaaaauuggggggcggaaaaaaaagggggggaga

SEQ ID NO: 12099 - RNA, 102 nt, Human
uauaugccugauucauaguaaaauaccucuaauaaacauuguuuuauagaaaaccugacuucagugaauauuuugguauuuuacagugggccaguuuauaua

SEQ ID NO: 12100 - RNA, 69 nt, Human
uguuaaccuuguaagauggauaauguguauaagaauguaggccuuaacuauuucacaugagucaaaaca

SEQ ID NO: 12101 - RNA, 70 nt, Human
uaagucaacaccguucuucauguaguacuucuccagcuuggccagaaugugcuugccauagguguacuua

SEQ ID NO: 12102 - RNA, 75 nt, Human
aucuagccuugcugaauguaacauguauacuuggucuugaauucauuguacugauauuaaacaugcaugcuggau

SEQ ID NO: 12103 - RNA, 66 nt, Human
caggucaaagguuuacaguacagaugccuacuucucagucuccagcuguaaaagcuucaauuccug

SEQ ID NO: 12104 - RNA, 88 nt, Human
gucaucacaaaauacugccaaugaaucaucaaaugcauugaaaagaaaacgugaagaugaugaugaugacgaugaugaugaugaugac

SEQ ID NO: 12105 - RNA, 66 nt, Human; identical to SEQ ID NO: 4461

SEQ ID NO: 12106 - RNA, 62 nt, Human
ggugacaacaugcuggagccaagugcuaacaugccuugguucaccggcauggacaagucacc

SEQ ID NO: 12107 - RNA, 61 nt, Human
aggaggaaggagaacuggcuugcuagcauaccacacaauagauugucaaauucuucuuacu

SEQ ID NO: 12108 - RNA, 71 nt, Human
cacacauuaaaguguaggcuccauaauagcuagcuauuuuguauucuucauggugcccggcacagugugug

SEQ ID NO: 12109 - RNA, 80 nt, Human; identical to SEQ ID NO: 11429

SEQ ID NO: 12110 - RNA, 65 nt, Human; identical to SEQ ID NO: 11430

SEQ ID NO: 12111 - RNA, 68 nt, Human; identical to SEQ ID NO: 6194

SEQ ID NO: 12112 - RNA, 67 nt, Human
caugaugaagauccugugaacucuggcguggaugcuuggaccccacgcgugguguuccuucuccaug

SEQ ID NO: 12113 - RNA, 102 nt, Human
ggaagcucaugcagagucuggagcucgugggcccucaggcgccuuucuuguccuugguguggagggacucaguggccuccgggacccugucugggcaucucc

SEQ ID NO: 12114 - RNA, 83 nt, Human
gagccaggcacuaaauggacugcucaugucugcugucaugaagcauggcagcagcaucacacgccucuuuguggugucugcuc

SEQ ID NO: 12115 - RNA, 80 nt, Human
gucugcgaaugacugcagauuaauuucacugacugacaggcugccgugggaagucagcuggagaucuggagacagcagac

SEQ ID NO: 12116 - RNA, 108 nt, Human; identical to SEQ ID NO: 851

SEQ ID NO: 12117 - RNA, 67 nt, Human
cuucucguucugccaucguuuccugaacagcagcagcgucccaggcaccaccgcgcagaacaggagg

SEQ ID NO: 12118 - RNA, 66 nt, Human
agaugguguaaaugguaaacgugauaucaugagacauuccugauaucucacaccaacacauuauuu

SEQ ID NO: 12119 - RNA, 61 nt, Human; identical to SEQ ID NO: 12046

SEQ ID NO: 12120 - RNA, 73 nt, Human; identical to SEQ ID NO: 12049

SEQ ID NO: 12121 - RNA, 66 nt, Human
ccugugucacaaugggcaaggagcucagagucucugggccucugauuuccccaucuguauuacagg

SEQ ID NO: 12122 - RNA, 68 nt, Human
cccuccgccccuaucaugggggacacaggcacagggcaaguuucuguaaauuccucugggguagaggg

SEQ ID NO: 12123 - RNA, 87 nt, Human
uucccccgcagcucacggcacucagcuuacuugagaguugaccauagacucccggguggcaucaagugacucaagcaguggugggga

SEQ ID NO: 12124 - RNA, 60 nt, Human
aggaaaaacaaaacaaagaaauaagggucuuuuuuuuuuuuuuuuuuuuuuuuuuuuuuu

SEQ ID NO: 12125 - RNA, 128 nt, Human
ggagagggcaaucuuggccuuuaucucgugaggcuagggaggguccuccuccaucuuucuacagagauuacuuggcugccuuaaugacauuccccucccaccucuccuuuggaggcuucuccuucucc

SEQ ID NO: 12126 - RNA, 61 nt, Human
acaacuacggaccuuggucccggccuuuauggacuauuauuggaccaacuccgaaaguugu

SEQ ID NO: 12127 - RNA, 69 nt, Human
gagaguguguguuaucuucauaacccagggcuuuagcacagggccugggauuuauuacgcaacacucuc

SEQ ID NO: 12128 - RNA, 61 nt, Human
gacuuccuugguccuuuuaguaugaacugggauggguacuucuuaugcuagauaggguguc

SEQ ID NO: 12129 - RNA, 75 nt, Human
gccggugggggguacaccaggggccaaccgggauaaaauugcgggaaacaaaacuggguuuugcccuucacaggu

SEQ ID NO: 12130 - RNA, 79 nt, Human
gucaguauguuaaacauugaaguuagggggagggugcauauguuacuauugcuuucaauuuauccacuguguuucugac

SEQ ID NO: 12131 - RNA, 69 nt, Human
uuuuauuuucuuugcuuuggucuauacaaaaaaaccaauaaccaaaaacauaaagcgauaauaauaaaa

SEQ ID NO: 12132 - RNA, 69 nt, Human
gggugggugggacagagggagagagcaaugcacuccagcuccucccggagcccuuagagagacucacuc

SEQ ID NO: 12133 - RNA, 131 nt, Human
gggaggaagugaagggcaccuaagggcuggaccgcuggggggcagucagggccugcauggccuuuuguguggacacaggggguuccaggccaccccugcccccagcagcugagggaccuugagcaagaccc

SEQ ID NO: 12134 - RNA, 67 nt, Human
cacuggcacucacagucaccaacaggucuggggaacccugggugaugaaggaguggggcugccggug

SEQ ID NO: 12135 - RNA, 101 nt, Human
ggcgugcaaggcgaugggcugcuuccucagcugagagccgaguuggaugugggcuccuucagcagcugacagggagucugcccaaaguugcugauaaugcc

SEQ ID NO: 12136 - RNA, 90 nt, Human
uguacaccaucacugacaaccucugcgaagaaugccuugaguucguccaggugcuggaagaugcuaggugaguuaguguccaggcgugca

SEQ ID NO: 12137 - RNA, 79 nt, Human
ccugaggugguuuuguuuuguuuugucuuugaggauuuguggaccucugaaguagagccauucaaaaugccaguucagg

SEQ ID NO: 12138 - RNA, 86 nt, Human
gagucucgcucuguugcccaggcuggagugcaguggcaugaucucggcucacugcaaccucugccuccuggguucaagcgauucuc

SEQ ID NO: 12139 - RNA, 79 nt, Human
ggucuugaucuccugaccucgugauccacccaccuuggccucccaaagugcuggcguuacagguaugagucaccgcacc

SEQ ID NO: 12140 - RNA, 79 nt, Human; identical to SEQ ID NO: 6903

SEQ ID NO: 12141 - RNA, 85 nt, Human; identical to SEQ ID NO: 6904

SEQ ID NO: 12142 - RNA, 72 nt, Human; identical to SEQ ID NO: 8132

SEQ ID NO: 12143 - RNA, 105 nt, Human
cugugcauuuuaggauguugaguagcaacccuggccucuacccacuagaagcugguagguagcauguccuccuccccuacuugugacaaccaaaaaugucuccag

SEQ ID NO: 12144 - RNA, 95 nt, Human
gccccacccucuccuugaucaucuuccucugcagugguguuucucaaccucagcacuacugacauucggagcuggauaauucuuuggggugaggu

SEQ ID NO: 12145 - RNA, 66 nt, Human
uagagauaacuuuuaaaaacaacagugacaacaacaaaauuucuguucuuagaauuucugucucug

SEQ ID NO: 12146 - RNA, 61 nt, Human
acuuggucccuaagucagcaagaggaacauuaucugucaauucuagcgaugggauucaagu

SEQ ID NO: 12147 - RNA, 95 nt, Human
cagaagucauuuguggaaacgggcauugugagaaggcguuaccauuaguuacaaauguuacugcuagaacggagugaacggcacaggugaaaaug

SEQ ID NO: 12148 - RNA, 77 nt, Human
gagguucuauuguauccuuggccagaaacugggugaaaagaauaagcagacaauuuuuggagauacugaggaauuuc

SEQ ID NO: 12149 - RNA, 82 nt, Human
auccccauguagaaguguugucuucuacugcuugccacguacaagugugaaaugccaaggugagacucguacacuuggggau

SEQ ID NO: 12150 - RNA, 103 nt, Human
ugcaaugguuuuuaccccucaugaaggucagagguggacuauuuguacacauacacacaugcacacccucucacguccuccagaggcugaaagaccaucagca

SEQ ID NO: 12151 - RNA, 74 nt, Human
cugaucaauccuucuuuuucucuuuugcccacaauuuaagcaaguaaaugugcagaagaaauggaaggauucag

SEQ ID NO: 12152 - RNA, 75 nt, Human; identical to SEQ ID NO: 1111

SEQ ID NO: 12153 - RNA, 77 nt, Human
ccuuuguaaucuuauugucuccugaguaaauauacacauaaauguuuggggauucauugcugcuagauuauaucagg

SEQ ID NO: 12154 - RNA, 67 nt, Human
ggcuagcuuuucuuacuucaguuuuuauagaacaccaacuaaauuugaaaguaugaagucucuagcc

SEQ ID NO: 12155 - RNA, 62 nt, Human
aauugaaaauagucauuuugaauccuauugauuauucaaaaauucaggcugauuugucuuuu

SEQ ID NO: 12156 - RNA, 61 nt, Human
gagaaugaaaagaguugauuuuggaccucggaccuugccguggcuaaaucuuuaccuucuc

SEQ ID NO: 12157 - RNA, 93 nt, Human
gccaaaaugucugucaaugucaaccgcagcgugucagaccaguucuaucgcuacaagaugccccgucugauugccaagguugagggcaaaggc

SEQ ID NO: 12158 - RNA, 71 nt, Human
gguugagggcaaaggcaauggaaucaagacaguuauagucaacaugguugacguugcaaaggcgcuuaauc

SEQ ID NO: 12159 - RNA, 75 nt, Human
gucaggccgguuuaaucggccgaggguucagucagagcuagaacauuccagaggucgcccagcuccggcgcugac

SEQ ID NO: 12160 - RNA, 125 nt, Human
cggcuagguacgaggcuggguucacggaggcugcggcugcagaaguaccgccugcggaguaacugcaaagaugcuguccgugcgcguugcugcggccgugguccgcgcccuuccucggcgggccg

SEQ ID NO: 12161 - RNA, 75 nt, Human; identical to SEQ ID NO: 74

SEQ ID NO: 12162 - RNA, 87 nt, Human; identical to SEQ ID NO: 76

SEQ ID NO: 12163 - RNA, 79 nt, Human
aguauacuuuuggacaaucugcagcuauaaaaauauacacauacaaaaguacagcuacagauuguccacacaguauacu

SEQ ID NO: 12164 - RNA, 63 nt, Human
cucccaagagagacuuguuugggccuuuuguggugucaguggaauggauagguaacuugggug

SEQ ID NO: 12165 - RNA, 60 nt, Human
ugucauuuuuguuuuaagaguuggggggaguaucuauaguaaaguugaauaaaggggaca

SEQ ID NO: 12166 - RNA, 79 nt, Human
auaauaguguaaaucagauauaauugagggcuauauggcaguaaaacugcuagugccaguuuucuuguuugccuguuau

SEQ ID NO: 12167 - RNA, 60 nt, Human
uccagaguuuauaaagucaaauauucaguaggcauagacuggaauagauaaauucaugga

SEQ ID NO: 12168 - RNA, 90 nt, Human
cucuaccggcccguugcuguggcucuagacacuaaaggaccugagauccgaacugggcucaucaagggcagcggcacugcagagguggag

SEQ ID NO: 12169 - RNA, 85 nt, Human
cugugucggacgaaggacauccaggaucugaagucggggucgagcaggaugucgacuaugguguuugcgucauucauccgcacag

SEQ ID NO: 12170 - RNA, 61 nt, Human
gguggcuccuugggcagcaacgaacgggugugaaccuuccuggggcugcuguggacuugcc

SEQ ID NO: 12171 - RNA, 72 nt, Human
ucugcaaggugguggaagugggcagcaagaucuacguggaugaugggcuuauuucucuccaggugaagcaga

SEQ ID NO: 12172 - RNA, 74 nt, Human
gaacaacacaucaaagaugcauuuguauguucauauaacacuaauaggacaauacaaaguaucuucacggucuc

SEQ ID NO: 12173 - RNA, 108 nt, Human
cagucgcucccgcaggucauaacuggccgaugggcuccagggccggcuuuucuccccagcgagucgggaggcccgggcccgggggcugggggagcugcuggagugcug

SEQ ID NO: 12174 - RNA, 90 nt, Human
ccucuuccuccucuuccuccucuuccucauccacuccagcuccccccuccuccuggaugggagggguccccucggagggaggagcagagg

SEQ ID NO: 12175 - RNA, 66 nt, Human
ggagaacuuugccuucuguggggucccugagggggggggcuccacagguucugccucagauucucc

SEQ ID NO: 12176 - RNA, 65 nt, Human
guccaggucugcagaacccagcaucugggccuccgccucaucugugggcaccugcugcucuggac

SEQ ID NO: 12177 - RNA, 88 nt, Human
ggugucuccucagaugauaacaguuuucauugacggcuacuaugaggaacccauggaugugguggcacuguuuggucugaggggcauc

SEQ ID NO: 12178 - RNA, 75 nt, Human
accaggauggucgcuuucugucucguucaaugauccucuugcccugaucuuguucagacggugucucuccugugu

SEQ ID NO: 12179 - RNA, 67 nt, Human; identical to SEQ ID NO: 9781

SEQ ID NO: 12180 - RNA, 89 nt, Human
gcauggaauccacugcauucaaucgggaugcauuuuaccacgcuguaugggguauacuguauucaaucacgcugcauggaauucacugc

SEQ ID NO: 12181 - RNA, 60 nt, Human
aggcgacggggaggccugggcucugacucuagcugggccagcuaacccucugugucgccu

SEQ ID NO: 12182 - RNA, 78 nt, Human
cuuccggccgccgguucauuagcgugaagauguuggagcgccgcuuggacugcuuucggauggguguggggguggagg

SEQ ID NO: 12183 - RNA, 86 nt, Human
uggcuaagccuuuguuaaaccaaucacagcgguggguggaaagcaugaauuuuccccucggcagugggguaacggaaaaagagccg

SEQ ID NO: 12184 - RNA, 68 nt, Human
ccuugaugaagggaugggaccugugggcauccuucagcugggacagguaucgguuugucaccucaggg

SEQ ID NO: 12185 - RNA, 95 nt, Human
gggggcuugcccaggugcugggacaggacgaugagguugaccagcgucucuggguagccacuauccuugucuagcgccuccugcagcaggcccuc

SEQ ID NO: 12186 - RNA, 69 nt, Human
acagaaauguuuuuaaagcuguucaugauuuaguagaaagaaucaggagcuugaaacaauuacuucugu

SEQ ID NO: 12187 - RNA, 61 nt, Human
cugugucaaggccuuuugagccacuuggagauguaauuuaaaaaggcaaaacaaugcacag

SEQ ID NO: 12188 - RNA, 101 nt, Human
ucuuuuucugagguuucauuccaaugagaguugcacacugucagcuugguuuuguggcugcugauagucguacuuucuugcuauucacaacaagaaaaaga

SEQ ID NO: 12189 - RNA, 75 nt, Human
cucccucaaugccacccugaccccacggcuggagaacccugugcuuauguggugggcagggcacuguugauggag

SEQ ID NO: 12190 - RNA, 63 nt, Human
cugaauguuuucccaaaucaccuaaauaucgguuugcuuuuuguuuugggggagaggauuuag

SEQ ID NO: 12191 - RNA, 87 nt, Human
gcucaaaggaucuguggugcuggaggucuacacgccucucaggacagcgugucaggaaccucagagcagcuucacaucugccaaagc

SEQ ID NO: 12192 - RNA, 78 nt, Human
aaaaugcggccgcaauucgagcucacuuggccaauucgcccuauagugagucguauuacaauucacuggccgcguuuu

SEQ ID NO: 12193 - RNA, 71 nt, Human
aucaauuucuucaaauagcuugcuuacaugauaaucaauuagccaaccaugagucauuuaggaauagugau

SEQ ID NO: 12194 - RNA, 101 nt, Human
cccaacagccuccugugccugcuucccugugugucgggguccuccagggagcugacccagagguggaggccacggaggcaggcucucuggggacugucggg

SEQ ID NO: 12195 - RNA, 102 nt, Human
cauuacugcagcgggcaugaaaaccggcaggguguuaggcucauggccugaagagaagucacaucaccagccgauguuuucaugcaaaaggcaaucgugaug

SEQ ID NO: 12196 - RNA, 63 nt, Human
cauuuuagaguaucuuggcaaaauggugagaggaucucacuuucccaauaucacucuguaaug

SEQ ID NO: 12197 - RNA, 82 nt, Human
ggcuuuuccuaaucucuuuggucuuuggaagugggcaggguuucucaaaccaagugucuuccaugggccauuggcaaaggcu

SEQ ID NO: 12198 - RNA, 62 nt, Human
gugaauuaaugagcaaucggaaagacucaaagcauuuuguacuccacaguucauuucuucac

SEQ ID NO: 12199 - RNA, 80 nt, Human; identical to SEQ ID NO: 6866

SEQ ID NO: 12200 - RNA, 65 nt, Human
gaguugacaauuuuauuuucacauuucccaauacaaaggaaaacugcaucuuuuuugucccacuu

SEQ ID NO: 12201 - RNA, 72 nt, Human; identical to SEQ ID NO: 8911

SEQ ID NO: 12202 - RNA, 69 nt, Human; identical to SEQ ID NO: 8912

SEQ ID NO: 12203 - RNA, 68 nt, Human; identical to SEQ ID NO: 8913

SEQ ID NO: 12204 - RNA, 67 nt, Human
ccgaaagcugagugccgccggggucccuugggggggccucugguuuaggcgcccgaaaggcuuuggg

SEQ ID NO: 12205 - RNA, 103 nt, Human
gggcgagggugcacacuucggaccucuacaagcugucagccccaaggcagcucuuccuggggggcccagcuugaggaaccuguggcggugcugugcuucuccc

SEQ ID NO: 12206 - RNA, 71 nt, Human; identical to SEQ ID NO: 1145

SEQ ID NO: 12207 - RNA, 67 nt, Human; identical to SEQ ID NO: 1146

SEQ ID NO: 12208 - RNA, 81 nt, Human
cacaagcuaaaucucaaaauaaaacuguuacuuuaauaccuuaauaagucucagaacuuuagauaggauguuggcuuagug

SEQ ID NO: 12209 - RNA, 72 nt, Human
ugaugguaaacugaauggaaguaaggacuuuuuuuuguuuuuuacaguaacuuuccaugaagucucaccuca

SEQ ID NO: 12210 - RNA, 84 nt, Human; identical to SEQ ID NO: 286

SEQ ID NO: 12211 - RNA, 97 nt, Human
ucuggauuaucuacaaguguuugcuauuuacaaugugaaguuugcgaagugccgcguggauuuuuaugugaaacaagcauuucuguuacgguucagg

SEQ ID NO: 12212 - RNA, 81 nt, Human; identical to SEQ ID NO: 8793

SEQ ID NO: 12213 - RNA, 64 nt, Human; identical to SEQ ID NO: 9321

SEQ ID NO: 12214 - RNA, 84 nt, Human
gucagcagaucccagugaaggguuuuguguguuuaggccucauuucuuugucuuuuuccuacuccguuccuggcauuugcugau

SEQ ID NO: 12215 - RNA, 60 nt, Human; identical to SEQ ID NO: 8363

SEQ ID NO: 12216 - RNA, 71 nt, Human
uuuggguggcauagagguuuuguauugagggccagugaugauguuuugauauuuauuuccugcuacuuaaa

SEQ ID NO: 12217 - RNA, 68 nt, Human
gccaugugcucccugaccugaaggaggaggauggcagccucagccuggauggugcagacagcacuggc

SEQ ID NO: 12218 - RNA, 70 nt, Human
ugaagaggcuuugauuucuuucucuuuaucaggauauucuuccaccucugaggagaacauuaacucuuca

SEQ ID NO: 12219 - RNA, 79 nt, Human
cugguaaccuggcguccgguggggccgcuggggccaccucccuuugcuuugucuacccgcuggacuuugcuaggaccag

SEQ ID NO: 12220 - RNA, 92 nt, Human
gggaucauugauuguguggugagaaucccuaaggagcagggcuuccucuccuucuggagggguaaccuggccaacgugauccguuacuuccc

SEQ ID NO: 12221 - RNA, 82 nt, Human
uccgcaugucccuucgcgggaaggcuguggugcugaugggcaagaacaccaugaugcgcaaggccauccgagggcaccugga

SEQ ID NO: 12222 - RNA, 64 nt, Human; identical to SEQ ID NO: 11768

SEQ ID NO: 12223 - RNA, 72 nt, Human
cacagugcaggaugggcacuccgugauggccccugccggccuccugcgcggaccugccagcccugucuugug

SEQ ID NO: 12224 - RNA, 108 nt, Human
guaugccugugagauuaaaggcagagaagugaguugggccacuucugggccuggauuuuaggacuuagguguggcccuuccacaccccuuucccaguccauaggcugc

SEQ ID NO: 12225 - RNA, 66 nt, Human
gugaacaagcauuuggaccgagccucuuucuuucagaaacgggaagucuaacaguuauguuuucac

SEQ ID NO: 12226 - RNA, 95 nt, Human
uuuuuuuuuuuuuuugccuuuugggauggccccaucuguuuauuuuaaaagaaaaaaauuaaaauagagccaacaaaugcaauuaagaaaaaaaa

SEQ ID NO: 12227 - RNA, 80 nt, Human
aaaaugcggccggaauucgagcucacuuggccaauucgcccuauagggaggccggauuacaauucacuggccggcguuuu

SEQ ID NO: 12228 - RNA, 92 nt, Human
ccgguaaauuuuggaaaaaucgcggaaaauuuuugguaaacagucaauuuuuuacccaaagcccgaaucggaaaauccuuuuaauuaaccgg

SEQ ID NO: 12229 - RNA, 61 nt, Human
gucuuccugcucuguucugaauacuucauacucugcuguauaaaugagagagaacgaagac

SEQ ID NO: 12230 - RNA, 60 nt, Human
cuaaccuucgugugcuucguucaauccuggaaaaccugagaagcaaaauacaaaaguuag

SEQ ID NO: 12231 - RNA, 71 nt, Human
ugucucagcucaaauggaauauugucgcaccccaugcacugucaguugcaauauuccuguggugucuggca

SEQ ID NO: 12232 - RNA, 77 nt, Human
caagcacuggacuggaauuuugagagaggcauuuacagacgcugauaacuuuggaauccaguucccuuuagaccuug

SEQ ID NO: 12233 - RNA, 75 nt, Human; identical to SEQ ID NO: 1860

SEQ ID NO: 12234 - RNA, 64 nt, Human
cgcggcgccccuagccggcccugcgccggggucuccgagggccggcccggcggggggcgccgcg

SEQ ID NO: 12235 - RNA, 82 nt, Human
ggccaggacugcgcucaggaucccgccccggagcccccagcccgggggagagggggagggaaguugggacgaagcccaggcc

SEQ ID NO: 12236 - RNA, 99 nt, Human
gccugcugcuguacuucaucagaaaacaccuucagcugcugcaggaagggcucuuugugguaguuggggugcacauuaucauaguugggcacuacaggc

SEQ ID NO: 12237 - RNA, 62 nt, Human
gccaguaugagagccuggaacacaugacccucaccuguuccuccaaggucugcucuuuuggc

SEQ ID NO: 12238 - RNA, 87 nt, Human
uuguguaccgccugcugcgcucgcccaugugcgaguaccuggugaauuucuugcacaaguugcggcagcugccugagcgauacauga

SEQ ID NO: 12239 - RNA, 73 nt, Human
ucacccgcuuugugaaauggccccgcuauaucagguugcagcggcagagagccauuccucuauaagcggguga

SEQ ID NO: 12240 - RNA, 78 nt, Human; identical to SEQ ID NO: 99

SEQ ID NO: 12241 - RNA, 65 nt, Human; identical to SEQ ID NO: 247

SEQ ID NO: 12242 - RNA, 80 nt, Human; identical to SEQ ID NO: 100

SEQ ID NO: 12243 - RNA, 77 nt, Human
cugagcuaggaauucccuuggaagagguuccuccagaaggaauuaauuauuuaacacgaauucacuacaaagcucag

SEQ ID NO: 12244 - RNA, 75 nt, Human
auguuucuugugacacuccccacaauggaaaaauuaccgaauuaaaccuguuuuauggauggcagcuuggagcau

SEQ ID NO: 12245 - RNA, 69 nt, Human
uccuugugauguuuguauggacuuugacaauauguaaauauguguaaagccaguuuuuaugauuaagga

SEQ ID NO: 12246 - RNA, 82 nt, Human
uuaaugugaauagcaaauucugguauaucgugacuaacgcuuaagaaugccugucuuugagaggaagguguuauaauauuaa

SEQ ID NO: 12247 - RNA, 74 nt, Human
gaaauaccuggcaccugauggagcauggacuuuugcuaacuugcaacagaaucaccuaauggggccagguuuuc

SEQ ID NO: 12248 - RNA, 84 nt, Human
ggguuggcugguuucaugguggguugguucaugagcagccuccuguucuaugaggcuuuucaacaguuucacauccagcugccc

SEQ ID NO: 12249 - RNA, 73 nt, Human
cgccccggcccggugcagcaccaccagcguguccaggaagcccucccgggcagcgucgugcacgggucgggug

SEQ ID NO: 12250 - RNA, 88 nt, Human
gcuccaaggccaccuaguacuuugagaaaguuauacagacaaccaagucaggcuuccucaaucuagcagucuauugccaaaaaggagc

SEQ ID NO: 12251 - RNA, 60 nt, Human
gggcucaggcaguucucucaccuuggcccuccaaagugcugagauuacacgcaugagucc

SEQ ID NO: 12252 - RNA, 67 nt, Human
gugucuuggccuucacgagcagccucuggacggccuuguagaggaggcugaagugcuugacaagcac

SEQ ID NO: 12253 - RNA, 72 nt, Human
uccccccccagucucggagagcaacagaaaaaagcucuguaauucaguguuccaaccaccgccggggaggga

SEQ ID NO: 12254 - RNA, 64 nt, Human
cagggacaaccauccucucccuguguccccugccccccacacugagggaaugucuguguccuug

SEQ ID NO: 12255 - RNA, 65 nt, Human
ucccaccccaggaagcuacaagagacaggcuguccuguccccacaacucucccuggguccuggga

SEQ ID NO: 12256 - RNA, 72 nt, Human
acguguauccccucccaagggcuaguuuuuuuguuugaauaaauagggggccaugggagggggauuucacgu

SEQ ID NO: 12257 - RNA, 66 nt, Human
caaaacuguaaaauucauugcuuguggaauucacuuuaucuuucuacauucucagaggcaguuuug

SEQ ID NO: 12258 - RNA, 77 nt, Human
gcuuuuaaugccagaagaaaaguuaccagaauuuauaauuuauaguaauuuuuugaucuuuuuuuugccuuaagagu

SEQ ID NO: 12259 - RNA, 84 nt, Human; identical to SEQ ID NO: 286

SEQ ID NO: 12260 - RNA, 89 nt, Human; identical to SEQ ID NO: 288

SEQ ID NO: 12261 - RNA, 61 nt, Human; identical to SEQ ID NO: 776

SEQ ID NO: 12262 - RNA, 66 nt, Human
ggucgcgggaacaagaggacaucugggcgcaaaauuccccacguuuuccucuucuccucuucggcc

SEQ ID NO: 12263 - RNA, 71 nt, Human
ugaaaaaaaagcacacccuuuuaagacuacuuuaugaggcacuugugguuguagagagugaugcugcuuca

SEQ ID NO: 12264 - RNA, 67 nt, Human
agcaaucaaagguuuucgcaauucuccagugggaguaaaccacagacuacgagggaguuugacagcu

SEQ ID NO: 12265 - RNA, 63 nt, Human
cacacaggggcuuaagagaaggccaaaguuucuugauuuuuuuuauuucuuuugagaugugug

SEQ ID NO: 12266 - RNA, 93 nt, Human
ggacuucuuuccuagguuucuuuacagaacggguuggggucgagaaagauuccgaagaucaguuacgcuguuuuaaaaccuaggugggaguuu

SEQ ID NO: 12267 - RNA, 77 nt, Human
ggagaauccccaaaauuuucagauaguggccuaaaaaaauuuuauuugcucacugguugucauucuggguauucccc

SEQ ID NO: 12268 - RNA, 61 nt, Human
uucugugucgugaauagcauuuuaaugaccucuguggucacauuaagcaaacaacauaggg

SEQ ID NO: 12269 - RNA, 78 nt, Human
gcugcgaauucauggcaucuauuguccauacaguagcgggaauuuccauacagugggcaggcauucccaucucguggc

SEQ ID NO: 12270 - RNA, 73 nt, Human
ggcguugggggcgcccgauauccuguggggggaaggguuucccgguucccuuuugggggccccuuuauuugcc

SEQ ID NO: 12271 - RNA, 62 nt, Human
ggggguccgggcgggguguaaacuggugccgcgguguguuguuugccccccggcugaucucc

SEQ ID NO: 12272 - RNA, 77 nt, Human
aggaucuucggaacugaugaagcaucacauaggucggugagcuagccuaggauguaagcaggagccgguugauaccu

SEQ ID NO: 12273 - RNA, 68 nt, Human
cgaguccuggccuugucuguggagacggauuacaccuuccacuugcugaacaggucaaggccuucuug

SEQ ID NO: 12274 - RNA, 96 nt, Human
gacaauggcagcaucuacaacccugaaguugcuugauaucacagaggaaacucugcauucucgcuuccuggaggguguccgcaaugugccaguguc

SEQ ID NO: 12275 - RNA, 64 nt, Human; identical to SEQ ID NO: 11768

SEQ ID NO: 12276 - RNA, 63 nt, Human
aagaagccgcccugguugcacaugccgucggcaugacuguguaugcucuggugguggugucuu

SEQ ID NO: 12277 - RNA, 61 nt, Human
ucuggugaaaaaccaggaggguauugaagguggacuaaaauuuccuucugggauuaacaga

SEQ ID NO: 12278 - RNA, 83 nt, Human
ggaagccuuccccacacugccaaagccgcacacaggagcugugggagccuguggccacaaggucuguguugaggagggcugcc

SEQ ID NO: 12279 - RNA, 69 nt, Human
aagcagcaucauggagguuggaagaugccgcauuuggaugggaugaauuccaaauucuguugcuugcuu

SEQ ID NO: 12280 - RNA, 66 nt, Human
uaugugauaugcuuauacacuuacacuuuaugcacaaaaauguaggguuauaauaauguuaacaug

SEQ ID NO: 12281 - RNA, 78 nt, Human
gcggaagagauugaugugaaagucucguggcggcgggaccuugcuacgaggggcccuuuugcgggaguuuuugucagc

SEQ ID NO: 12282 - RNA, 65 nt, Human
guggccauggcuagagggguaaaaaauucaggacaucccccaggugcugccucagccagggcugc

SEQ ID NO: 12283 - RNA, 85 nt, Human
gugugcgcugccucuggcauccuagagacccggauuuacucagcuaggagagaggauggaucacagggucuaaggguggccauuc

SEQ ID NO: 12284 - RNA, 67 nt, Human
agagauaauucaaaaaggaaaacuauauauaaaagugguauaucaaguuugucucugaaauauuucu

SEQ ID NO: 12285 - RNA, 113 nt, Human
cugguggucgguggguuugaggccuaugaaggggugcugcaguugguggaggcucgcgggccgcuacgaagggagcucugcaucgucaugugugucaucccaggcaccaucag

SEQ ID NO: 12286 - RNA, 92 nt, Human
agacagugagagaaagauuuauaaaggcaucauucaaaaggauuuuuacauuugggugugccuuacucgauuacaaaaauuucaaaccaucu

SEQ ID NO: 12287 - RNA, 69 nt, Human; identical to SEQ ID NO: 3815

SEQ ID NO: 12288 - RNA, 64 nt, Human; identical to SEQ ID NO: 8200

SEQ ID NO: 12289 - RNA, 66 nt, Human; identical to SEQ ID NO: 2189

SEQ ID NO: 12290 - RNA, 79 nt, Human
uccuggaagauggcuuuggcguacugaugcaagaggcggcucauguaccagugcugccacgggagcagcccuuccagga

SEQ ID NO: 12291 - RNA, 69 nt, Human
gucuuccucacccuguccgugacguggauuggugcugcaccccucauccugucucggauugugggaggc

SEQ ID NO: 12292 - RNA, 62 nt, Human
uucccccuucagaaggugaccaaguuccaugcuguggugcuggacgccuggcacggggggaa

SEQ ID NO: 12293 - RNA, 63 nt, Human
ucacuucuaggaauacuaguauaucgcucacaccucauguccucccuacuaugccuagaagga

SEQ ID NO: 12294 - RNA, 63 nt, Human
ggagacauugugcaucuuaguuugggguuauauaauuacaaagaugacccugugcaaguuuuc

SEQ ID NO: 12295 - RNA, 72 nt, Human
ucaaaucacauuuguaagggaacuauuauguccauguuugcacauacucguccacugugugugaucaccuga

SEQ ID NO: 12296 - RNA, 73 nt, Human
gaggcgcgauauuuggcauuuuuaauuuagguuuguuuuauuuaaguuuaauguuaauuccaugcuguguuuc

SEQ ID NO: 12297 - RNA, 60 nt, Human
gcggccgagggggagggccgggggagcggacgucgccucugcuggucucccaccucccgc

SEQ ID NO: 12298 - RNA, 60 nt, Human
acaggaaggguccuagguagggggagguuccuccucccuugaaacccugggccacucugu

SEQ ID NO: 12299 - RNA, 93 nt, Human
gcaccccacccuccagcccccaggaaugcaggcgcucaaagccuguggcuaggcugcccgaagcgcgugccgcaguucuucuggagugggagc

SEQ ID NO: 12300 - RNA, 103 nt, Human
cagggugcugcuggcaguggagaccugggggugcggguccugggcugagcagggcucccgaggugcaucugcaggagcugggccgucugccaguggcucccug

SEQ ID NO: 12301 - RNA, 61 nt, Human
cugucuccggccgcccuggugcugccuguguccaugagcggugcuggggggucgggggcag

SEQ ID NO: 12302 - RNA, 74 nt, Human
gaccuuucuguccuuguccacgggccugcacucugggucucgcaggcccgagggcaaggguggcccugaagguc

SEQ ID NO: 12303 - RNA, 60 nt, Human
gagcucggaccgaaucggcaggcacaggaugacuggcgaugugggcucuguuuuggguuc

SEQ ID NO: 12304 - RNA, 61 nt, Human
guauuagaggcaccgccugccagugacacauguuuaacggccgcgguacccuaaaccgugc

SEQ ID NO: 12305 - RNA, 70 nt, Human
gcccugagugucucuuuugauuccaaauugauagaugcuaugaguguggcgaaaaaagggacaucuaugc

SEQ ID NO: 12306 - RNA, 82 nt, Human
aucucagccgcccucugccucuuggguuugcgugguuuuucugccucagccuccugaguaccuaagggaggugucuugagau

SEQ ID NO: 12307 - RNA, 66 nt, Human
gcgugacgguuccacaucaccgacccuccgccucuuggguucgggugaugaugguuccacgucagc

SEQ ID NO: 12308 - RNA, 61 nt, Human
ugacgguuccacgucaccgacccucugccucuuggguucgggugaugaugguuccacguca

SEQ ID NO: 12309 - RNA, 60 nt, Human
gaccaaacacugugacaaagcagaguucuucaguucugaaaauguuaaaguguuugaguc

SEQ ID NO: 12310 - RNA, 93 nt, Human
gugaugcuuggaagcauuuucugugcuuugaucacuaugcuaggacacauuaggauuggucauggaaauagaaugcaccaccaugagcaucau

SEQ ID NO: 12311 - RNA, 107 nt, Human
aagauauucagauacucuucuaugccaggaagcacaaaagacuuguugagauugccucaguucaguagaucuuccuuggcagccaggcauaggugguuucuugucuu

SEQ ID NO: 12312 - RNA, 67 nt, Human
gcacagagaaaugagguccccagucuacguaggaagcugcuggaugaggacucuuuuuucgagcggc

SEQ ID NO: 12313 - RNA, 70 nt, Human
ggaaggagcuggcuuuguggggcugcaaaggacuuuuaaguccugccuguacugaaguucacagcccacc

SEQ ID NO: 12314 - RNA, 68 nt, Human
ccgggcgugguggcuccuguaaucccagcuacucggaaggcugaggcaggagaaucacuugaacccgg

SEQ ID NO: 12315 - RNA, 71 nt, Human
gugaacaggacuuguuuuuauccuguacucuagggcacacuguauuacagggaaauaagaacacugaucau

SEQ ID NO: 12316 - RNA, 75 nt, Human
caucucuacagucuucacaugccccacuccagccgugugguagcacgccuugcuugugacccugggauagagaug

SEQ ID NO: 12317 - RNA, 119 nt, Human
gauguuaaguagguuccucucaaccccagcacuaauuugagaggaaaaacuauuaaggauaccguuccuuucucccuuccuguacuuaaauugauguugaaggaaauuacuagaauauu

SEQ ID NO: 12318 - RNA, 66 nt, Human
uggcuuuucaagcuaugucauaccugccucccagagguacuuggaaaauauuggcuugacagcaca

SEQ ID NO: 12319 - RNA, 76 nt, Human
aguagccugcccccaugcccagcuaauuuuuguauuuuuaguagagaugggauuucaccauguuggccaggcugcu

SEQ ID NO: 12320 - RNA, 92 nt, Human
gccacuucuucuuauuggagugugagcacuaggagcagggaccuuuccauggugcuugcuguguuauacccugcacccagaacuuaguaggc

SEQ ID NO: 12321 - RNA, 101 nt, Human
ugagauggagucucacuuugucacccaggcuggagugcaguggugugauaucggcucacugcaaccuccaccucccggguucaagugauucuccugccuca

SEQ ID NO: 12322 - RNA, 76 nt, Human
ccuugcagaugaugaugcuagacuacuacaacuggaaacccagggaaaucaaaguugcuacaacuaucuguauagg

SEQ ID NO: 12323 - RNA, 131 nt, Human
agguuagagagcgggaccuucuucgaguuacuggagaugugcgagaucgagaucuccuucgggugaccggagauguucuggaucuugaucuucugcgagugauaggcgaaguucuugcuucgagaucgccu

SEQ ID NO: 12324 - RNA, 72 nt, Human
ucacuggggaugcucuugaccgggaucuucgucgagucacugaaguccuggaccuugaccgucuccggcuga

SEQ ID NO: 12325 - RNA, 80 nt, Human; identical to SEQ ID NO: 174

SEQ ID NO: 12326 - RNA, 64 nt, Human; identical to SEQ ID NO: 175

SEQ ID NO: 12327 - RNA, 65 nt, Human; identical to SEQ ID NO: 3507

SEQ ID NO: 12328 - RNA, 63 nt, Human
ggugucugucagggugggcacaggguccucuccaaaccugcuucucccucccuggucaggccu

SEQ ID NO: 12329 - RNA, 75 nt, Human
uggcugguccuacuucucugccccaccaaugggggacuugaauguggcagagaauacagucagucagggcagcca

SEQ ID NO: 12330 - RNA, 74 nt, Human
ccuacuucagagugucccugagccaugacugcuugacuccacagauggcuucaggaagacagcacagaagaggg

SEQ ID NO: 12331 - RNA, 65 nt, Human
gcaacuggggaagguauuuauugauccacaccauuuucuuggauuuucuauccuccccagggggc

SEQ ID NO: 12332 - RNA, 63 nt, Human
gaauuacaauuugacaugagauuuggguguggauacagagcugaaccaugucaaggguaguuc

SEQ ID NO: 12333 - RNA, 62 nt, Human
gagagagugaagugggagggcugcaaggcuuuuaaacaaccagaucccacaagcgcucacuc

SEQ ID NO: 12334 - RNA, 131 nt, Human
agcuucacgcucuuugucauccuggacuucuucccgcucaucgcccacuauuaccucaccacucuggaugaggcugaugaggcaggcaagcggauuuuugguccccggguggggaacgagcugugcgaggu

SEQ ID NO: 12335 - RNA, 71 nt, Human; identical to SEQ ID NO: 1764

SEQ ID NO: 12336 - RNA, 101 nt, Human
cgcggcgcuggccgacugggcgucgcccuuccacgagcgccacuuccacuacgaggagcaccuggagcgcaugaagcggcgcagcagcgccagugucagcg

SEQ ID NO: 12337 - RNA, 76 nt, Human
ggagagugcagauucacuugaugggaacagcuacagcuccagcgaugaaaaacugaauucugcaacagacucuacc

SEQ ID NO: 12338 - RNA, 62 nt, Human; identical to SEQ ID NO: 9237

SEQ ID NO: 12339 - RNA, 62 nt, Human
gaaagggcuuugagaaaaggcuuugaauaaaacuagucauccaccuagccaaagauccuuuc

SEQ ID NO: 12340 - RNA, 61 nt, Human
gcaagugccuccggacauguggaucacaggcuacuagaaaccacgaguucccuccauuugu

SEQ ID NO: 12341 - RNA, 76 nt, Human
ggguccacuaucauuuaauuucccuugaaccugcucugcuaguuuaaucugcuaauaugaaaguuaauuaagaccu

SEQ ID NO: 12342 - RNA, 61 nt, Human
uuugcuaacugguaaauacuauuuacaagaagauucaaccuaaucaauaucacuuaucaaa

SEQ ID NO: 12343 - RNA, 65 nt, Human
guggugaagacaggccgagugaugcuuugggagaccaauccagcagauucaaagccaggcaccau

SEQ ID NO: 12344 - RNA, 71 nt, Human
ucccaaccauaggcuucaauguagaaacaguggaauauaagaacaucuguuucacagucugggacguggga

SEQ ID NO: 12345 - RNA, 123 nt, Human
ucgcacaauguuuuuauaguuaccagaguguacagauuuugcacauauuuuauuaaauuuuccccugauuacaaauuuugcuauggucugaaucucuguguacaccccaaauucauauguuga

SEQ ID NO: 12346 - RNA, 65 nt, Human
ugcugugcuuauaaaagaggccccugagagcauguuugcuccuuccuccaugugaggacacagca

SEQ ID NO: 12347 - RNA, 71 nt, Human
ggcggcugaggcggcauggaucucagcgagcuggagagagacaauacaggccgcugucgccugaguucgcc

SEQ ID NO: 12348 - RNA, 118 nt, Human
ggacuaugcauaugguccaauaucaaagggaaugauagcauugaaggacucggggauaucuaacagcaauaccugaucacuacuucgcacuaguuucucgguacuaugcauauggucc

SEQ ID NO: 12349 - RNA, 72 nt, Human
gggaaugauagcauugaaggacucggggauaucuaacagcaauaccugaucacuacuucgcacuaaguucuc

SEQ ID NO: 12350 - RNA, 72 nt, Human
gggaggauagcauucgaaggacucggggauaucuaacagcaauaccugaucacuacuucgcacuaguuucuc

SEQ ID NO: 12351 - RNA, 73 nt, Human
auagcauugaaggacucguggauaucuaacagcaauaccugaucacuacuucgcacuaguuucucgguacuau

SEQ ID NO: 12352 - RNA, 71 nt, Human
gagggauagcauucgaaggacucggggauaucuaacagcaauaccugaucacuacuucgcacuaguuucuc

SEQ ID NO: 12353 - RNA, 72 nt, Human; identical to SEQ ID NO: 9079

SEQ ID NO: 12354 - RNA, 83 nt, Human
cccagcugccggcagugcugguucuccaacagaguggugucuagauuuaucagaguaacgagaagacaaacuccggcacuggg

SEQ ID NO: 12355 - RNA, 63 nt, Human
cugauuaaagugccuucagccaagaccaucucucccuccuggugaagugugacuucgaauuag

SEQ ID NO: 12356 - RNA, 73 nt, Human
gccaagagccaucugaagccaccucucugccuguuccucccaagaggccaggguggccacggguggugagggc

SEQ ID NO: 12357 - RNA, 83 nt, Human
guguagagugggccucuggaguccggcugccuggguucaaguccaggcuccccuacucggggcacaggggugcugcucugggc

SEQ ID NO: 12358 - RNA, 65 nt, Human
guuuccucucuggcaaaauggugauugugaugauuaaguuauauccauuugagagaugaggaaac

SEQ ID NO: 12359 - RNA, 69 nt, Human
uagguaggcacacagagauacauagacagauaggcccagggguucacugccgcucugucugcaaaccug

SEQ ID NO: 12360 - RNA, 66 nt, Human
uuuuugaaggguuugaauacauauaacauaacacauagaauguacucgggauuuuuccuacaaaaa

SEQ ID NO: 12361 - RNA, 67 nt, Human
gccggugggaggaaaagagguaucuucuaaaauagagauaguucacauuauuucccucaucuuaggc

SEQ ID NO: 12362 - RNA, 60 nt, Human
uguacauaguagguugcucaccaauuucugaugacuggugaugcaaaaccugcggaguca

SEQ ID NO: 12363 - RNA, 65 nt, Human
aucuucucucccagcuuugagguuucggggcucuggaaaggccucugggaugcuggccuuaagau

SEQ ID NO: 12364 - RNA, 63 nt, Human
cuggggaacucacacgcugacccccgaggagccuugguuuccucccuggcagauaguccccag

SEQ ID NO: 12365 - RNA, 66 nt, Human
gaugguguuaagcuguacaccccaggacaguuuauccugucugaggaguaaguguacaaugugauc

SEQ ID NO: 12366 - RNA, 86 nt, Human
gggacuuuuucuuuggggauucgguccgggugguuucucccuuggugguuuguucacucguuuuuguuucccuuugggauuuuccc

SEQ ID NO: 12367 - RNA, 66 nt, Human
augaacaaguaugcuuggggagucuucuugcuggaggguucccuucacuguugcgugcuugaccau

SEQ ID NO: 12368 - RNA, 85 nt, Human
uuugaaaagaacacuuuuuggggcagccuucaaaaagguucauacauaccaacgggcuuucuuaaaauuggguucuaauguuaaa

SEQ ID NO: 12369 - RNA, 68 nt, Human
cccgaugcacuuugagggguguuggagaggggacucccccacucgcacuuaacucaacggcucucggg

SEQ ID NO: 12370 - RNA, 72 nt, Human
ccaaggagaacuucaguuugcuugacucguuuggaucacaacgagcuaaagcucagauugucuuaaacuugg

SEQ ID NO: 12371 - RNA, 94 nt, Human; identical to SEQ ID NO: 6534

SEQ ID NO: 12372 - RNA, 60 nt, Human; identical to SEQ ID NO: 6535

SEQ ID NO: 12373 - RNA, 66 nt, Human; identical to SEQ ID NO: 11222

SEQ ID NO: 12374 - RNA, 66 nt, Human; identical to SEQ ID NO: 11223

SEQ ID NO: 12375 - RNA, 130 nt, Human
aucucggcucauugcaagcucugccuccuggguucacgccauucuccugacucagccucccgaguagcugggaggcugaagcaggagaaucacuugaacccaggagguagagguugcagugagucgagau

SEQ ID NO: 12376 - RNA, 67 nt, Human
gcagagaggagcuguaacguguccaaggucacacagccugggaauuggguccuggucuccucugugc

SEQ ID NO: 12377 - RNA, 66 nt, Human
uugucuucuaguacagucugcaggguucaccuuuucccugacucagucuucuccuaagagugacaa

SEQ ID NO: 12378 - RNA, 87 nt, Human
cuaauaauuuuuagacagaagcaggacauugugugcaauauguuguagcaacuguggauuuuguguugcucuucugaagguuguugg

SEQ ID NO: 12379 - RNA, 62 nt, Human
ugcucaauugaauaucugugcuuacuaaguaccugcuuauuaagaccuuuuuuucuugagua

SEQ ID NO: 12380 - RNA, 80 nt, Human
ggauggauauaucacccacuggucagaaaggguuacugucacugauguugcaguuguccaggaucaacgggauaccaucc

SEQ ID NO: 12381 - RNA, 76 nt, Human
agugcgcagccuagaucccucacaugcacaguucacaguaggguuugcgcugcuaugagaaucuaaggcugccacu

SEQ ID NO: 12382 - RNA, 72 nt, Human
gguuccuaauaggccauggacccccacagacggguacuagucugcagccuguggaccccagcccuaggggcc

SEQ ID NO: 12383 - RNA, 66 nt, Human; identical to SEQ ID NO: 11638

SEQ ID NO: 12384 - RNA, 60 nt, Human; identical to SEQ ID NO: 11639

SEQ ID NO: 12385 - RNA, 81 nt, Human
acuuguauuugcugagccagugguauuaacucaugcauaaaacaaauuucgguuugcuauuucuucuagcaaauuucaagu

SEQ ID NO: 12386 - RNA, 118 nt, Human
guaagggagaauguaaaacaucaacucagccaggcuuuuguuuucugcagcaauaauaaagggccuccugcacuuagcaaaaaucugucuuaacuuuguagugcauuucuuccauuac

SEQ ID NO: 12387 - RNA, 95 nt, Human
gcgccuccgcuacuuccagggcuacgcgcgcuccgcgcagcucaggcuggcaccgcuguacgcgagcgcgcgcgcccucuggcugcugguggcgc

SEQ ID NO: 12388 - RNA, 68 nt, Human
gaagaaaauacauaaccagggacaccaaacaguuggauuuuuuguuuagugguuguugauuuggcuuc

SEQ ID NO: 12389 - RNA, 83 nt, Human
uuagggaauauuuugaggguuuuuauugcuucaguaguuucaaacuauuuugugucuauguaaguuggcuuuuauucuccuga

SEQ ID NO: 12390 - RNA, 111 nt, Human
ggagguggcagcggcagcuguuuuggccugugucucccugaucguucaagcucauacaugguuaaugauuaaugaggcagugugguguggcaguauccagcugccacuucc

SEQ ID NO: 12391 - RNA, 70 nt, Human; identical to SEQ ID NO: 5007

SEQ ID NO: 12392 - RNA, 85 nt, Human; identical to SEQ ID NO: 6504

SEQ ID NO: 12393 - RNA, 89 nt, Human; identical to SEQ ID NO: 2239

SEQ ID NO: 12394 - RNA, 60 nt, Human
ggugccagucaagggaugaguggggucuggaaucuagccucacgagggggauguggcacc

SEQ ID NO: 12395 - RNA, 72 nt, Human
ucuugagaagugggugagggcaugcaaauguaaaaaaguaagguguguucugggaucuacuaguucuugaga

SEQ ID NO: 12396 - RNA, 67 nt, Human
ugcuggguggaccagcguguuugcuccaggcuauguugaaauaguaugcagguuggucagggcagua

SEQ ID NO: 12397 - RNA, 84 nt, Human; identical to SEQ ID NO: 286

SEQ ID NO: 12398 - RNA, 89 nt, Human; identical to SEQ ID NO: 288

SEQ ID NO: 12399 - RNA, 94 nt, Human; identical to SEQ ID NO: 5398

SEQ ID NO: 12400 - RNA, 64 nt, Human
gcaucuuucuaagcucuccagacaacauuuccugaugucucccugggcagagcuaggacagggc

SEQ ID NO: 12401 - RNA, 62 nt, Human
gaggccccuaauccagacagguagccaacacuaccuggauuuuaggacuggauuuuagccuc

SEQ ID NO: 12402 - RNA, 64 nt, Human
ggucaguugcuagccucuaauaugauuuguuuaaauuacaguggacucagcccugcaacugcuc

SEQ ID NO: 12403 - RNA, 74 nt, Human
uuguuggauucuuauuggcaucacucaccagagaaggaaaaauggaugaugauucaagacaguggaagagacag

SEQ ID NO: 12404 - RNA, 64 nt, Human; identical to SEQ ID NO: 8200

SEQ ID NO: 12405 - RNA, 66 nt, Human; identical to SEQ ID NO: 2189

SEQ ID NO: 12406 - RNA, 67 nt, Human
accacauuagcuuggcucucugucucagaggguaucucuaagacuaggggcuugguauauauguggu

SEQ ID NO: 12407 - RNA, 80 nt, Human
guauccacagucacuguaagcauccaguaggcaggaagauggcuuugggcaguggcuggaugaaagcagauuugagauac

SEQ ID NO: 12408 - RNA, 61 nt, Human
uggggcugagagaugaagugagauuaaaguacuacucagcuuuugggucaucuggguccca

SEQ ID NO: 12409 - RNA, 63 nt, Human
auugcaagguaauauguaauaguaguguuuguaagauacucuugucuaauauuaacuaguagu

SEQ ID NO: 12410 - RNA, 78 nt, Human
ggauaguuggaacuaauguacagaacuaaauuuuuuaaacuuuauuugcuguuaaauucugugaaguuucaguuaucu

SEQ ID NO: 12411 - RNA, 62 nt, Human
uugauuuguacagucauaauuuguuaaaaugacuucauuuaacauucacugauguagauuaa

SEQ ID NO: 12412 - RNA, 80 nt, Human; identical to SEQ ID NO: 9102

SEQ ID NO: 12413 - RNA, 60 nt, Human
aauuuaaaaauaagucuauguuuucacauugauuuuaaaaaaauauagcauguuugaauu

SEQ ID NO: 12414 - RNA, 68 nt, Human
gaguaaaaaaguguuucauaaguaaugugauccaucacauucugccagccaaaauucuuugccugcuc

SEQ ID NO: 12415 - RNA, 82 nt, Human
aaggcgccagagcugaagaccagccccuagaagccacaccccugcccuucuagcagcuacggguccucuggcuccgggccuu

SEQ ID NO: 12416 - RNA, 66 nt, Human
guagauguaaccggugcccccuccccguugugacugagggcgaguguuauaccuggcugcgugugc

SEQ ID NO: 12417 - RNA, 68 nt, Human
guauuuaagcuaaauugccuuuuaaauuccuucaagcuugguucauugaggugguuaaguauaaaugc

SEQ ID NO: 12418 - RNA, 66 nt, Human; identical to SEQ ID NO: 4249

SEQ ID NO: 12419 - RNA, 74 nt, Human
ggguccggugcggcuccggaaguagucgugcccuuugcuggggcauucagagacagaguuucaccgugguaccc

SEQ ID NO: 12420 - RNA, 78 nt, Human
uaaguacuuucccuucucucacaccugugguugcgugggcuugccuuaugaccaacugaaagagugggaaaaagcuug

SEQ ID NO: 12421 - RNA, 74 nt, Human; identical to SEQ ID NO: 365

SEQ ID NO: 12422 - RNA, 102 nt, Human; identical to SEQ ID NO: 2172

SEQ ID NO: 12423 - RNA, 77 nt, Human; identical to SEQ ID NO: 3082

SEQ ID NO: 12424 - RNA, 96 nt, Human
caguaggccagcaccgugucgcgcagcgccagguucucgggcagugccuuggcccaguagcccggccgcgugaccagguccgggcaggcguacuug

SEQ ID NO: 12425 - RNA, 85 nt, Human
gcgggccgcccacggccacgccgcaguggaagagcaccggcucgccgucguucacgcuguagaacacgcggccguggcggucggc

SEQ ID NO: 12426 - RNA, 69 nt, Human
ucaauuuuuauuuuuuauuuuuuuuauuauuaaaugauguggucuauggaaaaaaaaauaaaaaucuga

SEQ ID NO: 12427 - RNA, 63 nt, Human
gacacccaccgcaacugucugucucauaucacgaacagcaaagcgacccaaagguggauaguc

SEQ ID NO: 12428 - RNA, 64 nt, Human
cagcgguuggaucauuuucauugcugugaaauacaccacaauggauuuaugcauucaaccguug

SEQ ID NO: 12429 - RNA, 84 nt, Human
ugggucguuucccguuuggcaagaugaugaagaaagcugguaugagcauucuuucacacgucuuuucuugggcauauguacuca

SEQ ID NO: 12430 - RNA, 62 nt, Human
gagcccucugagaggcccagguccuaaagcagcuucugccugggcugaggucuugggggcuu

SEQ ID NO: 12431 - RNA, 65 nt, Human
gccucccagucuccucuuccaacucuguccuguuugaugauggccucagggagacaagggauggc

SEQ ID NO: 12432 - RNA, 68 nt, Human
ggggccggggaccccugccgcgcccccguacccggacggugauggggcgaggaggggugcugggcccc

SEQ ID NO: 12433 - RNA, 77 nt, Human
cauuacuuggcaaacacgguauaaaacaaguuuaaacaauuagaaaaaugaaaacgauaccauuaugccucauagug

SEQ ID NO: 12434 - RNA, 77 nt, Human
ggauuguugaacuguuaccagcaccaugcuuucagcaacauuucagcggaguuggaaacauuuuuuacagcaaaacc

SEQ ID NO: 12435 - RNA, 70 nt, Human; identical to SEQ ID NO: 6301

SEQ ID NO: 12436 - RNA, 64 nt, Human
cauagguuauuggggaacaggugguguucaguuacaugagcaaguucuuuaguggggaucugug

SEQ ID NO: 12437 - RNA, 60 nt, Human
ugcucucaggagugcaacgagguaaaagcaagaagcucuauucaacgcauuuuuuaggua

SEQ ID NO: 12438 - RNA, 98 nt, Human
caggggcagcuccgguggcggcccacaggacaccagccccaucuugcagguguaggacaggugguaguugcaagggcaccgucacuccauugucccug

SEQ ID NO: 12439 - RNA, 63 nt, Human
ccccacagacgauucccuguccccugccucaugcuccggcaggguacaggcucgcaccugggg

SEQ ID NO: 12440 - RNA, 77 nt, Human
ggagguggcagguguaggaucaucuggugagcaaguagagucaccaagucuggaugaccacuacccccacuaccccc

SEQ ID NO: 12441 - RNA, 130 nt, Human
agcauggaauuuaaguuuuguauuuugaacaaaaauagcaacaucuguuuucuguauggcaaagaaaaacuaaaucccagacuuuuauuuuuaaccacagaaaccaucacuucuuucuaaauuauuugcu

SEQ ID NO: 12442 - RNA, 64 nt, Human
ucuguuauauagaaaguuaacauuucaggagcacaauuauuuccugauuucaaauaugaacaga

SEQ ID NO: 12443 - RNA, 94 nt, Human
ccgaggaccuccugaccccgcgguggcagcugggaccgcgcuacgcggcuaagcaguucgcgcguuacggcgccgccuccggggugguccccgg

SEQ ID NO: 12444 - RNA, 69 nt, Human
cuggccccggguucccguggcuaccgggcgcggcgcccccgcgccgcaggccgggaccccgguggccag

SEQ ID NO: 12445 - RNA, 67 nt, Human
gcagagaguuggcaggugccucugccccacuggagcagaugauaggcucggccuggucacucucugc

SEQ ID NO: 12446 - RNA, 94 nt, Human
guaggcacuuaggauggcaccaugccagacacggguugaguugaugggcaauuuggaugguugcuggaguggugagcgcauuagaaggcacugc

SEQ ID NO: 12447 - RNA, 84 nt, Human
ccagcgcccaaggaaggccacuucucaacuggcagaacuucugaaguuuagaauuggaauuacuuccuuacuagugucuuuugg

SEQ ID NO: 12448 - RNA, 83 nt, Human
gggaaaggaaugccugggagugggggugcaggcgggcagcacugagggacccugccccgccccuccccccaggccccuuuccc

SEQ ID NO: 12449 - RNA, 93 nt, Human
uccauuguuuaaaaauaagucuuggaaacuauaguauuguagcuguucucuaacagcaccaauuaugacgggaaccaggaacuaugaaguggg

SEQ ID NO: 12450 - RNA, 72 nt, Human
acuccucgcuuacgagcuccacagcacaaagggcaucaaaagacuguugugagaggaacgcaagcgaggggu

SEQ ID NO: 12451 - RNA, 68 nt, Human
cacccacuccacggugcgcacaucaaggacguccacgcccauacucgcuguacaccgugacgugugug

SEQ ID NO: 12452 - RNA, 75 nt, Human
ugggguauuaccagguuaagaggcugcccgucccccuggaugcucagcaggcugaacccagaaggguaagcccca

SEQ ID NO: 12453 - RNA, 64 nt, Human
gcugcacaacucccucauuggcaccaagggccgucugauccgcuccaucauggaggagugcggc

SEQ ID NO: 12454 - RNA, 60 nt, Human
cccauuuuaaucaauuugaaagguuaauuuaaaccucuagaggugaaugagcaacauggg

SEQ ID NO: 12455 - RNA, 104 nt, Human
uguagccauuauguaaauaaaguuucauauguaccuguuuauuugggcagauuaaguccaacauaugaauguauauaucgcauaacuauguuagaauggucaua

SEQ ID NO: 12456 - RNA, 68 nt, Human
gaauccagcagcacaucaaaauccaccaugaucaagucagcuucaucccugggaugcaaggcugguuc

SEQ ID NO: 12457 - RNA, 69 nt, Human
cggcgacgccaaggaccaggaguaggggcacccgcgggccuccgcugcccgacgcuucuguucggcccg

SEQ ID NO: 12458 - RNA, 68 nt, Human
ccgcgccaucaacaucgcgcugcagguggcugccaauaccuccaccguggagcuuguugaugagcugg

SEQ ID NO: 12459 - RNA, 98 nt, Human
ucuucgcaugcuugaguacugggaccucgggaccagagccauuguuaagaaaaaggccuuguuucccugggaagcccaaaggacuuuugcauugaggg

SEQ ID NO: 12460 - RNA, 62 nt, Human
cagucucuaguuagaucgacaugguuuauaaauuccuacacuuuguaaaucuaaagagaaug

SEQ ID NO: 12461 - RNA, 96 nt, Human
gacacuggcaacauugcggacacccuccaggaagcgagaaugcagaguuuccucugugauaucaagcacuucaggguuguagaugcugccauuguc

SEQ ID NO: 12462 - RNA, 63 nt, Human
ggagaagggggagauguugagcauguucagcaacguggcuucgcuggcucccacuuugucucc

SEQ ID NO: 12463 - RNA, 64 nt, Human
agccagauuugcagcuacgaaaucaucacuccagacgugcccuuuacuguugacaaagaugguu

SEQ ID NO: 12464 - RNA, 61 nt, Human
gaggggaagcaguacgacagcauuuugaggguggaggccguggaugccgacugcuccccuc

SEQ ID NO: 12465 - RNA, 66 nt, Human
gcugaccgucacugccuaugacugugggaacgaaaagagccacagaagauguuggugaagaucagc

SEQ ID NO: 12466 - RNA, 60 nt, Human; identical to SEQ ID NO: 7325

SEQ ID NO: 12467 - RNA, 72 nt, Human
guggagcagauaaccauuguuucucggccgcuaucuggucagaggggagcugggccgggaaauucugccuac

SEQ ID NO: 12468 - RNA, 64 nt, Human; identical to SEQ ID NO: 7327

SEQ ID NO: 12469 - RNA, 63 nt, Human
gaaagagacuuguccucuggucccugucucugaaaggacaccagauggcuaaauauuucauuc

SEQ ID NO: 12470 - RNA, 62 nt, Human
ggcuccugugucuucucacucuugguauuccugcuugugcaggagccuguguacacagggcc

SEQ ID NO: 12471 - RNA, 64 nt, Human
gucugccucugccucuugcucacccugcuggcuccugguggguuucaucccaggcagaguugac

SEQ ID NO: 12472 - RNA, 76 nt, Human
gccucacuggcuggguucaaaaagggaggggccaggcacaguggcucacgccuguaaucccggcacuuugggaggc

SEQ ID NO: 12473 - RNA, 67 nt, Human
cucugacaggccucaccagaggugccaccuacaacaucauaguggaggcacugaaagaccagcagag

SEQ ID NO: 12474 - RNA, 75 nt, Human
gacaagaagcucucucucagacaaccaucucaugggccccauuccaggacacuucugaguacaucauuucauguc

SEQ ID NO: 12475 - RNA, 74 nt, Human
gucgugcgugccccaacgaaggggggaaacaacccagacgggaagacccccaauaguggagagggccgcaucac

SEQ ID NO: 12476 - RNA, 106 nt, Human
ccuaagguuuuguuguguucuguugaaggugccauuuuaaauuuuauuuuuauuacuuuuuuuguagaugaacuugagcucuguaacuuacaccuggaauguuagg

SEQ ID NO: 12477 - RNA, 62 nt, Human
uuccgagaaugccgaggaguugucguuuuuagcuuuguguuuacuuuuuggcuggagcggag

SEQ ID NO: 12478 - RNA, 87 nt, Human
uugguagugccccaccucccgcccucaccugcagagaaacgcgcuccuuggcggacacugggggaggagaggaagaagcgcggcuaa

SEQ ID NO: 12479 - RNA, 83 nt, Human
ggagcgccgcccuccucccgaaaccggccggggcgaguggcugcaagaagcugcgguuuggcccgcgggagaggggggcuucc

SEQ ID NO: 12480 - RNA, 65 nt, Human
ucagcgaacuguguuuugaagauuugagggaagggcugaccucaggauuuuauacuaguugcuga

SEQ ID NO: 12481 - RNA, 85 nt, Human
uccauaacagcagacaaaauuggaagcaagagugauuuuggaggagucacacuuagauguuucccuuaccuauuucuguucugga

SEQ ID NO: 12482 - RNA, 76 nt, Human
uuuaaaaaucuuacuucucgugacaguccuacaugaaaaauuaaaaaucacaaggauucauggauggaaaacugag

SEQ ID NO: 12483 - RNA, 82 nt, Human
agagcugcauucagugcaaccagagacccuuucguuccaaccaggagccaguggggcuggugacgaagcuggcuggagcucu

SEQ ID NO: 12484 - RNA, 71 nt, Human
gggcuccuggggugggggccgccugaggcugcccguugcugcaguccgggucggccuuugccuucuucacc

SEQ ID NO: 12485 - RNA, 67 nt, Human
ccugccccgccccaccccacugggcuuagguuaucuucgugccuuaguaucucgggcccacugcagg

SEQ ID NO: 12486 - RNA, 70 nt, Human
ccuucacccucaagcgcugcagaagcaugaggugagggccugcagcgcucuguaccguuuaggguguugg

SEQ ID NO: 12487 - RNA, 84 nt, Human
gggagccuggcaggccuggcccagcggccagggugaguguucucagaccccgggcagcuggugguucuccagggccagguaccc

SEQ ID NO: 12488 - RNA, 65 nt, Human; identical to SEQ ID NO: 5213

SEQ ID NO: 12489 - RNA, 62 nt, Human
gaacauggagagugccaagaucaccaucaggugccgcuuccuuccuguggcuuuccaucuuc

SEQ ID NO: 12490 - RNA, 84 nt, Human; identical to SEQ ID NO: 10334

SEQ ID NO: 12491 - RNA, 66 nt, Human; identical to SEQ ID NO: 10335

SEQ ID NO: 12492 - RNA, 64 nt, Human
ugcccuguucucuccuuccuugcccucuucuuggaauuggaaguauuuuucaaagacagaggca

SEQ ID NO: 12493 - RNA, 95 nt, Human
cucagcucagagccuuccgcuuccagggccaaccccagccccguuugcugcguuguguaagggcuuggggucuuagaagcugcucuuuagcccag

SEQ ID NO: 12494 - RNA, 98 nt, Human
gccgugacucuagcacucucagucgcuguacaguuucuauggugugaaugaacuucccuccuaguugcugauggcgcugguaccugcuggcccauggc

SEQ ID NO: 12495 - RNA, 65 nt, Human
ccaugaacuaagaggccagaaggcaaguauugccuuuccuucauaugguuugaugugguacaugg

SEQ ID NO: 12496 - RNA, 68 nt, Human
cugguagcauucaguguaccauaccuauguggaaagaacuccguaggggacacaugaggugcuggcag

SEQ ID NO: 12497 - RNA, 66 nt, Human; identical to SEQ ID NO: 6380

SEQ ID NO: 12498 - RNA, 80 nt, Human
gaggaucccuugugcuagguggaguggauggaugaucuaggcucacuacaaucuccaccucccagguucaagcgauucuc

SEQ ID NO: 12499 - RNA, 83 nt, Human
gccucagucuccugaguagcugggguuacaggugccugccaccaaguccagcuaauuuuuguauuuuuagguagagauggggu

SEQ ID NO: 12500 - RNA, 69 nt, Human
uuugaaggagaaacagagcagaagcgacaccuguuggggguuguggaucuguuuguuucugcagucaga

SEQ ID NO: 12501 - RNA, 70 nt, Human
ugggugccaggagaggggaaggaccuuugucugggcguuaccaagggcuggaaacuuuaccugguaccua

SEQ ID NO: 12502 - RNA, 98 nt, Human
accauggcguccuccgcggccggcugcguggugaucguuggcaguggagucauugggcgaagcugggccaugcuguuugccaguggaggcuuccaggu

SEQ ID NO: 12503 - RNA, 120 nt, Human
agguucucugaaaggcucccugaguguggaagagcagcugucacucaucagugguugucccaauauccaagaagcaguagagggugccaugcacauucaggaauguguuccagaagaucu

SEQ ID NO: 12504 - RNA, 68 nt, Human
gaacugaagaagaagauuuuggcucaguuagauuccaucauugaugaucgagugaucuuaagcaguuc

SEQ ID NO: 12505 - RNA, 60 nt, Human
cagcaaugugagacuggccagugcuuuuccccuucguccauucccagucacaugauguug

SEQ ID NO: 12506 - RNA, 82 nt, Human
ggacugucuuguccacaugugaggaaagaugaaaaaaaaaacauuaauuccaagcuuagauaggugaaaauaaaaacagucc

SEQ ID NO: 12507 - RNA, 74 nt, Human; identical to SEQ ID NO: 1525

SEQ ID NO: 12508 - RNA, 93 nt, Human
cugugggccagaaagcaggcaccagggcugaccucaaggccguaucagagggccaagcagaguucuuuuggauaccugcuuuucaucccacag

SEQ ID NO: 12509 - RNA, 73 nt, Human
ugcuaaauguuuucuucaagggaaccagauuuaguucuuuacagaauuuuccagugaaauaaaacauguugua

SEQ ID NO: 12510 - RNA, 66 nt, Human
gcagcgugcgucucuggcugcagguguggucuucggcaucuagcggccuggguuguuaccagcugu

SEQ ID NO: 12511 - RNA, 74 nt, Human; identical to SEQ ID NO: 521

SEQ ID NO: 12512 - RNA, 94 nt, Human
ucguucugcagauugacaaugcccgucuugcugcugaugacuuuagagucaaguaugagacagagcugggcaugcgccagucuguggagaacga

SEQ ID NO: 12513 - RNA, 104 nt, Human
ucucuugcccucugucauccuagcaguguggaugguugguugggaucuucgugucccgucucagcacacucgagcucugaagugacagugaggaagggcaggga

SEQ ID NO: 12514 - RNA, 68 nt, Human; identical to SEQ ID NO: 6194

SEQ ID NO: 12515 - RNA, 68 nt, Human
aaggcuuagaggcuggaccagcauuguugggcaaggacugacucuccaaggguuuaguucuuggcuuu

SEQ ID NO: 12516 - RNA, 85 nt, Human
gcagcugaaggcuaggcgccacugggccuggaauucgccacaggacggaucuuacagaggcaaguggucccuggaccucucuugc

SEQ ID NO: 12517 - RNA, 63 nt, Human
gcccaccuggcacgggccagcucggauaucgugucccuggcagggcccagugcugggccgggc

SEQ ID NO: 12518 - RNA, 101 nt, Human
ggcucuguuuccuccuuccuuccuuggcucuguccuuuugcugacuuccucuuccuuagccagcagaacucacccuggggucggggcaguggggaggggcc

SEQ ID NO: 12519 - RNA, 66 nt, Human
agcucuuaucuuugguggcuguggucggguguuugcuggugcccccagcugaagccaacaagaguu

SEQ ID NO: 12520 - RNA, 84 nt, Human; identical to SEQ ID NO: 2448

SEQ ID NO: 12521 - RNA, 63 nt, Human
gcgauccuucaacgugccuggucugaggggcaucgccuuucuauccacuagcguucggaccgc

SEQ ID NO: 12522 - RNA, 84 nt, Human
gaauuuuuuauacaguuacuaguuuaaugggugaaaaauaguauuguuuuaauuuucaugucauuaauagugaaguuaauauuc

SEQ ID NO: 12523 - RNA, 67 nt, Human
gaggugggcggaucaccugaggccgggaguuugggaccagcugggccggcauggagaaacccaucuc

SEQ ID NO: 12524 - RNA, 87 nt, Human
cuggggguguugccacaaaaguagacaugcgggcacuucugggaagaugaacgggucaguuuuuguaagaagggguaacaaaccuag

SEQ ID NO: 12525 - RNA, 60 nt, Human
gccuccaucugggccucucuggucaaaaccacuuuuuugagucaggggcccagccuaggc

SEQ ID NO: 12526 - RNA, 60 nt, Human
cuguuucagacccccccauuucccgcacaugguguggggggcugggggagguccaagcag

SEQ ID NO: 12527 - RNA, 79 nt, Human
guguuuuauuauuaucgcuuuauguuuuugguuauugguuuuuuuguauagaccaaagcaaagaaaauaaaaauaacac

SEQ ID NO: 12528 - RNA, 78 nt, Human
cuggugauuaaggaagauggacacauggucacugcccgacaggagccucgccucgugcucaucuccaucauuuaugag

SEQ ID NO: 12529 - RNA, 74 nt, Human
gcaguggagggggcaggaccuccugcuggugcagcaccagcugcugguagcagguccaccggccccuacauugc

SEQ ID NO: 12530 - RNA, 64 nt, Human; identical to SEQ ID NO: 1642

SEQ ID NO: 12531 - RNA, 70 nt, Human
ggcucccaauguugacguuggccagggcuuuugcaaacaagccaggccaaaaaggcucaacauuuacacc

SEQ ID NO: 12532 - RNA, 70 nt, Human
uuacuuuucaccagcaucuuuacuauaauuaccaaaaacauguauauaaaagaaugaaauggaaaaauaa

SEQ ID NO: 12533 - RNA, 89 nt, Human
gugugugcagacagagaagaagccuuuaaagaaaaagauguucaaagacuuaugcgacagauuuuagaagguguucacuuuuuacacac

SEQ ID NO: 12534 - RNA, 78 nt, Human
guuaugauccuauaagcauggcaacagauauguggagcauuggaguguuaacauaugucaugcuuacaggaauaucac

SEQ ID NO: 12535 - RNA, 97 nt, Human
uuacacacucgugauguaguucaucugugauugugaagccucagaauauucugguugacaagugaaucuccaugugggugacauuaagauuguguga

SEQ ID NO: 12536 - RNA, 71 nt, Human
ggaagagguauaccugucucuaaaggaagcgcacgucaguuuccaaacagaagcaagagguggaacccucc

SEQ ID NO: 12537 - RNA, 92 nt, Human
uccuguccagcugcucuauccagugucccgauucagcaaugucaaaucccuccagcaccuuugcagauuccggauacgacagcucgucagga

SEQ ID NO: 12538 - RNA, 68 nt, Human; identical to SEQ ID NO: 10215

SEQ ID NO: 12539 - RNA, 64 nt, Human
aaauaugguaauauuacagcccgacacacugcguuucuucaugugauaauaacugcacauauuu

SEQ ID NO: 12540 - RNA, 89 nt, Human; identical to SEQ ID NO: 288

SEQ ID NO: 12541 - RNA, 61 nt, Human; identical to SEQ ID NO: 776

SEQ ID NO: 12542 - RNA, 79 nt, Human
cugaggaugccaaggacuucuucaagaggcagauagauuuucuaaccaagcagauggagaaaaccaaacagcucuucag

SEQ ID NO: 12543 - RNA, 63 nt, Human
ucuuggcuuccacguccauugcucagcucacagugguacagaccaaguauguggaagccaagg

SEQ ID NO: 12544 - RNA, 70 nt, Human
uguaugucccugggaagcugcaugauguggaacacgugcucaucgaugugggaacuggguacuauguaca

SEQ ID NO: 12545 - RNA, 84 nt, Human
gggggguagagauaggaucucacuauguugcccaggcuagccuugaacuccuggccucaagugauccuccugccucagccuccc

SEQ ID NO: 12546 - RNA, 63 nt, Human
ccgcaucagcuccucgagcuucucccgagugggcagcagcaacuuucgcgguggccugugcgg

SEQ ID NO: 12547 - RNA, 88 nt, Human
uccaggccgugcgcacccaggagaaggagcagaucaagacccucaacaacaaguuugccuccuucauagacaagguacgguuccugga

SEQ ID NO: 12548 - RNA, 71 nt, Human
ccucgggacacaugguuaucucagugauaccuugaagaagcugaagauaacagcuguggacaagacugagg

SEQ ID NO: 12549 - RNA, 67 nt, Human
ugcuuggauggucugcuucaagcccgugguucaaaauaauacggaaacaagugaaaaaguccaagca

SEQ ID NO: 12550 - RNA, 74 nt, Human
ccgaggagaagcgcgagggcuacgagcgucuccugaagaugcaaaaccagcguggcggcgcgcucucuuccagg

SEQ ID NO: 12551 - RNA, 65 nt, Human
ucugggaccugccagcaccguuuugugguuagcuccuucuugccaaccaaccaugagcucccaga

SEQ ID NO: 12552 - RNA, 67 nt, Human
aaaggucguuuuguguuuugaguugaaauggguuguuccuugcccagaaacuggaagaagggucuuu

SEQ ID NO: 12553 - RNA, 96 nt, Human
cuagagcuuuuguugaugauaugaaugaucuggauucagugaguucaguggucauuuaauccaguccuaccucucauacagcagacagauagauag

SEQ ID NO: 12554 - RNA, 89 nt, Human; identical to SEQ ID NO: 288

SEQ ID NO: 12555 - RNA, 85 nt, Human; identical to SEQ ID NO: 11784

SEQ ID NO: 12556 - RNA, 62 nt, Human
guguugcaauuuuacuguaaguuugaaacugucaauacaaaaaguuacaaagaauuguuuau

SEQ ID NO: 12557 - RNA, 129 nt, Human
cuaccuuuaagaugcaguaugaucgaacuugugaguggacaggacuuaaauucagcaaugauggcaagcucauccucauuuccaccaacggcagcuucauucgucugauugaugcauucaaaggagugg

SEQ ID NO: 12558 - RNA, 64 nt, Human
ggaucccagcgagcgcagguaucauacgagaaggcgagauaccggacugugugccgggggaucc

SEQ ID NO: 12559 - RNA, 88 nt, Human
agugagaaaugggacccugccuuacugccaaccuacuguuugaggagccagaaguugacaugaaguugcaaggucaccuuuucaagcu

SEQ ID NO: 12560 - RNA, 89 nt, Human
gacaucuugauuauugugacaacucuagaccugccugcuuuaucuaauguaaucaugcucaaugucuacagguuguuuaauaaucaguc

SEQ ID NO: 12561 - RNA, 78 nt, Human
guuaagcagcacuuauguagacugcauuuccaaauguguugagcacucagaguguagucaacaguaaguucuuuuaau

SEQ ID NO: 12562 - RNA, 60 nt, Human
uugcuucuaugauacagagaugucuaaaaacuucaaauggacauguuuguaguuuagcga

SEQ ID NO: 12563 - RNA, 84 nt, Human
gggaccuggcauggggcuggaaggggggauggaacagcgccuuccagcgucccaguagccuccccugacguccuucuggguccu

SEQ ID NO: 12564 - RNA, 83 nt, Human
auggccgaggagaagcgcgagggcuacgagcgucuccugaagaugcaaaaccagcguggcggccgcgcucucuuccaggacau

SEQ ID NO: 12565 - RNA, 63 nt, Human
ccaucucugugacuuccuggagacucacuuccuagaugagaagugagcuuucagaagaggugg

SEQ ID NO: 12566 - RNA, 72 nt, Human
cccagagccaugaaagcugcauggccuggagaaaaagcugaaccaggccuuuguggaucuucaugcccuggg

SEQ ID NO: 12567 - RNA, 61 nt, Human
uccccgaaggucccaccauccccgcaggaacucccuggauggagggggccgaucccgggga

SEQ ID NO: 12568 - RNA, 100 nt, Human
guuccucucccagcuccaucucuuucccuagggaccaggcacucauauggcggggugggguccuagccucaguuugaagaagugggggcuggagcggggu

SEQ ID NO: 12569 - RNA, 66 nt, Human
cccagccgagauguccagauguugcuuuagaccugaagggcagcucgggagguccaguaggcuggg

SEQ ID NO: 12570 - RNA, 81 nt, Human
ccugcccagugcugaguugucuucgagguuggcgcuccuccaggaaagcgauuggcugcguggaguuuagaaugggaaagg

SEQ ID NO: 12571 - RNA, 63 nt, Human
ccucccacuaccacccaaucugccugccacagaaaagugcaggccccuuggccccccuggagg

SEQ ID NO: 12572 - RNA, 60 nt, Human
gcgggcaggggcuacagggcauccagaauguggucaaucuuggugaccaguuccugccgc

SEQ ID NO: 12573 - RNA, 62 nt, Human
gcuccuugaccugugcauacagcuucugcauuuucguucacucugucgcaaagaucaagagc

SEQ ID NO: 12574 - RNA, 69 nt, Human; identical to SEQ ID NO: 3814

SEQ ID NO: 12575 - RNA, 69 nt, Human
guuuuguauaacuuuauugcaagucacauaaucuugguuuagacuugacgcaacgggagguuacagagc

SEQ ID NO: 12576 - RNA, 60 nt, Human
acuucggaacccagggcaggcucuaccacuagccuagggcuugucgugugucccugaagu

SEQ ID NO: 12577 - RNA, 63 nt, Human
cguugaagccacgcccucuuucccaccaacccucuggucucauccacacaggguggcucuuug

SEQ ID NO: 12578 - RNA, 75 nt, Human
gggggcggcugggggccugagcgggaggccaucaucaaccuggccacccagcccaagaggcccauguccaucccc

SEQ ID NO: 12579 - RNA, 66 nt, Human
uccaucgggcagccagaggcccagcgucuccgaugacacugagcaccuggugaauggccggaugga

SEQ ID NO: 12580 - RNA, 72 nt, Human
ucuuaacuugauuauauuugcaaagacccuauuuccaaauaaggucacaugcacagguacugaaaauuagga

SEQ ID NO: 12581 - RNA, 67 nt, Human
uucauguggcauuuuccucuccuuauaagaacaccaguuauacuagguuagagcucacccucaugaa

SEQ ID NO: 12582 - RNA, 65 nt, Human
ggugagcuugcuggacuugcuugucggacuggcugagaagcccggucacguuguccagcuccacc

SEQ ID NO: 12583 - RNA, 79 nt, Human
gccaggccuccucauccaaguacauccuggauccucuuucucucugguuuccagguacucaggaacuaggccauuuggc

SEQ ID NO: 12584 - RNA, 74 nt, Human
gguacaguugguggcuaucaaauuaggacucaguaauuacuugugucacugagugaaagcugcucauugcugcc

SEQ ID NO: 12585 - RNA, 71 nt, Human
ccauugagcagucacaucgcugggaucaaguaagccuucaaaaauaugcucccagagauacaagccaaugg

SEQ ID NO: 12586 - RNA, 65 nt, Human
ucaucuccuucccaaggauuccauucuucacuuuccaaaguggacuguucuugcggcgauuuuga

SEQ ID NO: 12587 - RNA, 88 nt, Human
caucacauguaaacccagcuaacagaaaaauacauucacaagcguuguugguggugguguguauggugugcuaugggucaaugugcug

SEQ ID NO: 12588 - RNA, 65 nt, Human
gaaggaaggguguuauuacggaaaaagcuaacggcacgacguuuauuuuucccccacaaucuuuc

SEQ ID NO: 12589 - RNA, 65 nt, Human
ucuguagcaaguuaauaccauaauuuaauuacaaauggauaaauaugguaacggguauuuacaga

SEQ ID NO: 12590 - RNA, 86 nt, Human
cagggcagccuggcccagcaggucaaggcgccacagggggccaucagguccagcuggcgcaggccggcaggggagggucugcucug

SEQ ID NO: 12591 - RNA, 98 nt, Human; identical to SEQ ID NO: 1212

SEQ ID NO: 12592 - RNA, 82 nt, Human
uuucuauagagaggcuuucacuuuugaguucuuugaguuuaaagauugcuuuucuugaaaugcucuuuuuuuaauguagaaa

SEQ ID NO: 12593 - RNA, 78 nt, Human
aaguuuacuuuguaaacaaacaacugugaggcaaucuagaggguuagcgagccucacuuuaguuuccggagugggcuu

SEQ ID NO: 12594 - RNA, 63 nt, Human
cacucauuaaaaacacuuaacacauccaauuaaagguucugcaaagucuucugcuggugggug

SEQ ID NO: 12595 - RNA, 62 nt, Human
guaggaauggcaguacaauacaaaguaaucucuccuaauuuauuucuuguacaucuuucuac

SEQ ID NO: 12596 - RNA, 102 nt, Human
ucuugcuuugcacaucaaugguucaaaauuuauagcugcagaauauucucaagucaugaauauuaggugucugucaaucuuggccuaaaacguaaaauaaga

SEQ ID NO: 12597 - RNA, 63 nt, Human; identical to SEQ ID NO: 1366

SEQ ID NO: 12598 - RNA, 86 nt, Human; identical to SEQ ID NO: 1381

SEQ ID NO: 12599 - RNA, 60 nt, Human
aguggacagggggaucuuccaagucuggaaaguugaacaggagaugaccuucaggccauu

SEQ ID NO: 12600 - RNA, 86 nt, Human
ggcaaucuuuucgaaguauggcgaaaugugggcugcucuguucauaagggcuugccuucguucaguauguuaaugagagaaaugcc

SEQ ID NO: 12601 - RNA, 66 nt, Human
guggccgcuucaguaggcagcgagcaucugugguggggggagcugcugcaguuccugaacggccac

SEQ ID NO: 12602 - RNA, 66 nt, Human
accauuggccauuucuacauguuauucgcuuguuacccucaaguugauacaaguucuggcauuggu

SEQ ID NO: 12603 - RNA, 72 nt, Human; identical to SEQ ID NO: 1696

SEQ ID NO: 12604 - RNA, 82 nt, Human
guuugaguucaaagauggagcgaggguggauauggugggaaggggcacacggguucucacgcaacaacggaggaaggcaggc

SEQ ID NO: 12605 - RNA, 81 nt, Human
cugccgugcccggaauuccaccagcucucggaagaagacucugaagucgaagaugggggugucacaguuccgaggcagcag

SEQ ID NO: 12606 - RNA, 64 nt, Human
cugcuccagcuccauaaggaagcacucgaugucgucauagaggcuguuggcgcuggacaggcag

SEQ ID NO: 12607 - RNA, 85 nt, Human
gccaggguuccagcuucaccaggaccaggcucuucuccuugggccucccagcugacagguccugcccgaagcccagguagauggu

SEQ ID NO: 12608 - RNA, 77 nt, Human; identical to SEQ ID NO: 3082

SEQ ID NO: 12609 - RNA, 81 nt, Human
auugcacuguggauacauaucuauguuuacgcgcuauuagaacagaaggcgcuguauauagaaauguugcuuugaagcaau

SEQ ID NO: 12610 - RNA, 83 nt, Human
cccuuucgccagcuggcguaauagcgaagaggcccgcaccgaucgcccuucccaacaguugcgcagccugaauggcgaauggg

SEQ ID NO: 12611 - RNA, 93 nt, Human; identical to SEQ ID NO: 11109

SEQ ID NO: 12612 - RNA, 89 nt, Human
gauuucugaauguaaaguuguuguguuuuuuuuuaaauaguaguuuguaguauuuuaaagaaagaacagaucgaguucuaauuaugauc

SEQ ID NO: 12613 - RNA, 71 nt, Human; identical to SEQ ID NO: 1145

SEQ ID NO: 12614 - RNA, 67 nt, Human; identical to SEQ ID NO: 1146

SEQ ID NO: 12615 - RNA, 69 nt, Human
cgcucacucuucuauagugggucaccauuaggucaagccacagagaguuacccguacagagagugugcg

SEQ ID NO: 12616 - RNA, 82 nt, Human
gcguaauaguaguagauugucguccuaguuagucgcuggugguaagcgauagcucagagagaggucacuacuacuaguuagu

SEQ ID NO: 12617 - RNA, 69 nt, Human
gcccuacagcucccaggauguguucgggaaccuacagcgggaacacggacugggcaaggcggugguggu

SEQ ID NO: 12618 - RNA, 79 nt, Human
ggcgcggggaagacccgggagggcagugggugaggaggucgguugaguggcccccuccccugccuuucucuccguagcc

SEQ ID NO: 12619 - RNA, 63 nt, Human
uuugcggaucaggaccaguuugacauggugagugaugcugaccuucaaguccuagauggcaaa

SEQ ID NO: 12620 - RNA, 82 nt, Human
cccuuucgccagcuggcguaauagcgaagaggccgcaccgaucgcccuucccaacaguugcgcagccugaauggcgaauggg

SEQ ID NO: 12621 - RNA, 60 nt, Human
guguuggaaaaucuacuacagggaacaaaagcaacacaucuuucucagugguuccaacac

SEQ ID NO: 12622 - RNA, 125 nt, Human
gccuucuaauuauuuuggugggugggaguggguagauaaugauagcacauaacauaagaccaucuuuaacuuuaauuagauuagaauaaaccaaauccaagcucacauguaauuaagcagaaagc

SEQ ID NO: 12623 - RNA, 74 nt, Human
ugugauagaauauucauuugguuuugaugugcuagagaaacugguacacauuauaaaauguaucagaugacaca

SEQ ID NO: 12624 - RNA, 78 nt, Human
uuucaagauuuuaaaagauguauaagguuaaguuugcaaauauaauggaaaugcuguauaucuuuugaagugaugaaa

SEQ ID NO: 12625 - RNA, 61 nt, Human
agcucugcacucaugauucuguggcucucuguccaucuggccacaguucagaagccaggcu

SEQ ID NO: 12626 - RNA, 67 nt, Human
cagguaugucaaggggucaguguaggguaggugcuaaaagugaaacuggucccucugaggucaccug

SEQ ID NO: 12627 - RNA, 63 nt, Human
guggcuguuucacaguuuggugagauguuuggggucaucucaccaaagaacaaaccagaccac

SEQ ID NO: 12628 - RNA, 61 nt, Human
gugggaaaucaggggucucacagccuucagagcugagagcccugaacagagauuuacccac

SEQ ID NO: 12629 - RNA, 62 nt, Human
aggccccugaaggcaaggccagggagacgguggagaaucugccuccccugccuuuggacccu

SEQ ID NO: 12630 - RNA, 76 nt, Human
ccugcuggcccuccugacggcggcccugacacagagccucgggcagcccagggcaagcugagagauggccagaagg

SEQ ID NO: 12631 - RNA, 61 nt, Human
cugcuccaucccaggaccuuaaccagcgcucccuggagcacucugaggggccugugggcag

SEQ ID NO: 12632 - RNA, 60 nt, Human
gccuaggucuggugucuucaaauuggauucacuuuuuauacauacagacacucccuuggc

SEQ ID NO: 12633 - RNA, 74 nt, Human
gggcgagaugggcggaucacaaggucaggagauggagaccauccuggcuaacauggugaaaccccgucucuacu

SEQ ID NO: 12634 - RNA, 62 nt, Human
augaaaaucuuucugauguugugucuauaagcagccuugaugggauauguuagaagugucau

SEQ ID NO: 12635 - RNA, 75 nt, Human; identical to SEQ ID NO: 1470

SEQ ID NO: 12636 - RNA, 83 nt, Human; identical to SEQ ID NO: 1471

SEQ ID NO: 12637 - RNA, 83 nt, Human
uuacccauuuguaacucuaaaaacaggaaaaauaucaguuggcaaaugcaaucuuuuuuuuuuuuuaagcuaaagguggguga

SEQ ID NO: 12638 - RNA, 72 nt, Human
ggaacagggagggccugugucuggccaggcugagguuccagaucuguugccaucauggccccuucagggucc

SEQ ID NO: 12639 - RNA, 69 nt, Human
uauagaauuaucuaaauguuucuugagggagaaaaagccagccgaucaagacauucggauaauuuuuua

SEQ ID NO: 12640 - RNA, 68 nt, Human
uuguacagaccuuaguaaagucuucaauuuaauaaaaaucaaaaagccaaaacuaaaaggucaagcaa

SEQ ID NO: 12641 - RNA, 103 nt, Human
aagucucuauuuauaauccucccaccuccaccucccaaguagcugggacuauaggcacaugcuaccacaccuggcuuaaaggugcaguuuuaauggcagauuu

SEQ ID NO: 12642 - RNA, 64 nt, Human
auagccacugcuaauuguaucgaucauuuugcccuguuacaacuuuagaauuuuaguagucuau

SEQ ID NO: 12643 - RNA, 64 nt, Human
gggccaucuucaaguucaguccauguguccucucauuucuggaccuaggcugauggaguggccc

SEQ ID NO: 12644 - RNA, 81 nt, Human
cuuucacucagcuucggagcuguggcugccggugugugcccagucuggcuucggcucccacggguccugggcgggugggag

SEQ ID NO: 12645 - RNA, 90 nt, Human
ggcaauggacgcuaccccagaugggucagcuucggaggccugcccaaggcuccugaucaggcggccgucugguccaaucagcaucuugcc

SEQ ID NO: 12646 - RNA, 65 nt, Human
ggcaccccucccgucgaccccacaguucagugugaacaccgagcgcucguccagggaaggcugcc

SEQ ID NO: 12647 - RNA, 99 nt, Human
ggcuugagccagccucaggucucgaacauggcacagcuggugcacagcacuuucucguacaugucacugcaguccacgaggccacacaggguacaggcc

SEQ ID NO: 12648 - RNA, 131 nt, Human
cagcuggagcugagacccccaccaggcucauggcccuucccuacucaguuccugaaacuccacccucaagccgagcucgggaggcugaggcggggaggaucgcuugaggccaggaguucaagaucagccug

SEQ ID NO: 12649 - RNA, 67 nt, Human
cuggggagugggcgccaucaucccuauucuacagagggaaacugaggcagagaggcccacugucugg

SEQ ID NO: 12650 - RNA, 65 nt, Human
uuugaacuggggaugccuggcuccugucuguuuucuuagccacuccccacacaccccaggucaga

SEQ ID NO: 12651 - RNA, 66 nt, Human
aguaaugacuuccagaaguauuuuggcaaucccaucuucuauugagggaccaagaugucuauuacu

SEQ ID NO: 12652 - RNA, 72 nt, Human
gagaagcagguagcucaguauugcugaugagaguggcuguuccaagcaucaguaggccuggaaucucuucuc

SEQ ID NO: 12653 - RNA, 131 nt, Human; identical to SEQ ID NO: 12648

SEQ ID NO: 12654 - RNA, 67 nt, Human; identical to SEQ ID NO: 12649

SEQ ID NO: 12655 - RNA, 65 nt, Human; identical to SEQ ID NO: 12650

SEQ ID NO: 12656 - RNA, 77 nt, Human
ucaugaaguucaagccugacuguguaaacguugaagagguccuuccacacaugguugucuuggcuuccacuacauga

SEQ ID NO: 12657 - RNA, 111 nt, Human
cagcuuuucuaauuuacaaccaguuaagaauuacaauauccaaagaaaguauuuuaaaauauauaugcucacugguaagugauuuucuacucaaauaaauaggaaaauuug

SEQ ID NO: 12658 - RNA, 81 nt, Human; identical to SEQ ID NO: 9222

SEQ ID NO: 12659 - RNA, 61 nt, Human; identical to SEQ ID NO: 9223

SEQ ID NO: 12660 - RNA, 72 nt, Human
ccaaguucauugagguaucuaaagaggcccggaagcgguuccugggcccccugcaccccuccuucaaccugg

SEQ ID NO: 12661 - RNA, 63 nt, Human
ccgcgagaagacguggaacaucucguucgcgggcugcggcuuccucggcgucuacuacgucgg

SEQ ID NO: 12662 - RNA, 84 nt, Human
ggcgucuacuacgucggcguggccuccugccuccgcgagcacgcgcccuuccugguggccaacgccacgcacaucuacggcgcc

SEQ ID NO: 12663 - RNA, 76 nt, Human
gaacgcauuaucauuuagauauuaugggcauuacucaucuauuuucauaauuuucagcuacaaaauauaugccuuc

SEQ ID NO: 12664 - RNA, 73 nt, Human
gugccacuuuaugauggggauaugagaaaugcauuguuaggcaguuucaucaugcaaacaucauagaguguac

SEQ ID NO: 12665 - RNA, 69 nt, Human
ugauacuauuauaaaugguauuguuuuaaauuuuuauuuucuaauuauagcaacuuguauguagaguca

SEQ ID NO: 12666 - RNA, 67 nt, Human
cgggugugcugcucggcuagcggcggcggcggcggcccagucgguguaugccuucucggcgcgcccg

SEQ ID NO: 12667 - RNA, 81 nt, Human
cugacauugaaagaccugcugucucaaagggucaaguugugcuaaggcgccccuucuaccccggugguuuggcaauugcag

SEQ ID NO: 12668 - RNA, 60 nt, Human
ggcuaugggaggugcuaugggcauaaacaacagaggugccaugcccccugcuccugugcc

SEQ ID NO: 12669 - RNA, 65 nt, Human
cauuuaagccugaaauuguccugugaagugaaguaugaucggacagccucuuuucagcuuuuaug

SEQ ID NO: 12670 - RNA, 130 nt, Human
gaagccccgguggcaagagucugaagcaggaaggaugacuguagccuguggauuguacugcaguaggaaacuguccuagcaaggcuccacuuugccccagcaucucuccccucagcccugucuccucuuc

SEQ ID NO: 12671 - RNA, 70 nt, Human
uuguggcucuugcaaggucacaggauuggaauacagagccaagccaccccaggacaugcaagagccucag

SEQ ID NO: 12672 - RNA, 131 nt, Human
cugucaccucaucgucgugcagaaugagggccgaguagaugcaggcgagcucggagacagaggccauggcgcgggccaguguagggcuggcgcugccggacgcggugcuagucgccgggaugaagugaggg

SEQ ID NO: 12673 - RNA, 74 nt, Human; identical to SEQ ID NO: 1641

SEQ ID NO: 12674 - RNA, 75 nt, Human
gcucccaauguugacguuggccagggccuuugcaaacaagccaggccaaaaaggcucaacauuuacaccggcugc

SEQ ID NO: 12675 - RNA, 119 nt, Human
ggccaccuccugguccagucaccaccugcagccucggcagggcagguacaggggccaccucggaugggagccugggucccugccuccgcucugccccuggguggcugggaggagaggcc

SEQ ID NO: 12676 - RNA, 106 nt, Human; identical to SEQ ID NO: 6411

SEQ ID NO: 12677 - RNA, 74 nt, Human; identical to SEQ ID NO: 365

SEQ ID NO: 12678 - RNA, 103 nt, Human
gaaacagacugggccaauguccacaaagaauuccuggucagcaccacccgauguccaaaggugcaauaucaaggaagggcaggcgugauggcuuauuuguuuu

SEQ ID NO: 12679 - RNA, 62 nt, Human
auauauuuuuuaauuuuacaccugaacacaaagaaauguggucacuaaaaauaaaaguauau

SEQ ID NO: 12680 - RNA, 61 nt, Human
guacccaucucauacccaaggugugacacaucgaauuauauugucuuacaucacuugguac

SEQ ID NO: 12681 - RNA, 131 nt, Human
ugcuuauuuguuuuacaaccuguaucaucaaacucucucucuaaacuuuaaaaugcuguauaaauaugauacuuuugaggagagagugugcucagaacuuagacgggauuugguaggccaaguaugcuaag

SEQ ID NO: 12682 - RNA, 92 nt, Human
gagauguggccgagacugcgcuggcauccagcaggucgcugggugacuucugggcagcuggcuugccugcgaguaucucucuguuauuccuc

SEQ ID NO: 12683 - RNA, 73 nt, Human
gcauccagcaugaugcccugcucguccagcucuucuccaacgcggccggacaugugcuucagaaccuggaugc

SEQ ID NO: 12684 - RNA, 81 nt, Human
cagcuaugccgacuuugucugguuuuugaucucugaggaagacaaaaaaacaccgaccagcaucgaguacugguuccgcug

SEQ ID NO: 12685 - RNA, 68 nt, Human
cccugacaugcaucuucgucucuccauccuggcuuggaucuagaggcagaaaagugcagaaggaaggg

SEQ ID NO: 12686 - RNA, 61 nt, Human
gcagugccgaaggcuggacagcauggccaucgaggcccugcccuuccaggacugccucugc

SEQ ID NO: 12687 - RNA, 64 nt, Human
aacauucguccagaucccauuuuacagaaaagaaacuacaggaguggccauuugcaccuauguu

SEQ ID NO: 12688 - RNA, 60 nt, Human
cuccggaaaaccauuggccgccuggcaagucaagugcaagaacgcggcagguggcuggag

SEQ ID NO: 12689 - RNA, 60 nt, Human
cuccucucuguguugucugggcccuuguuuacaagcacgcguuacccuuccugaggggag

SEQ ID NO: 12690 - RNA, 67 nt, Human
gucugcagugugccugggcacagcucacgggcaguggguggaccuaacugcccaggcaggcgaugac

SEQ ID NO: 12691 - RNA, 80 nt, Human
accugaaccucugucuucgaccaacugaagcaacuugggauuaauugcuugauuagcuucacgaagcacagagauaaggu

SEQ ID NO: 12692 - RNA, 66 nt, Human
agguggguggaucaccugaggucaggagcucgagaccagccuggccaacauggugaaaccccaucu

SEQ ID NO: 12693 - RNA, 74 nt, Human
gugcuuuccuacaaaauggaauuggaggccgggcgcaguggcucacgccuguaaucccagcacuuugggaggcc

SEQ ID NO: 12694 - RNA, 64 nt, Human; identical to SEQ ID NO: 7119

SEQ ID NO: 12695 - RNA, 71 nt, Human; identical to SEQ ID NO: 3322

SEQ ID NO: 12696 - RNA, 77 nt, Human
gggggaaagccugguuuuggcugcuuugaggcuuucauugaaagcaaaugaggcagaaaggccccggucccaccccc

SEQ ID NO: 12697 - RNA, 90 nt, Human
agagaucgagcaaucaaagcguuaucugucaaagcaauucggcuccuacugauuuugccaaaaccacgcuuguagauuaguucaauuacu

SEQ ID NO: 12698 - RNA, 62 nt, Human; identical to SEQ ID NO: 5011

SEQ ID NO: 12699 - RNA, 77 nt, Human; identical to SEQ ID NO: 4287

SEQ ID NO: 12700 - RNA, 65 nt, Human
cccucuuccggcaacuugucugugcaccuuaaauuccagccucacaaauauucagcugggaaggg

SEQ ID NO: 12701 - RNA, 72 nt, Human
gcagaacuugggucucuauggggcaguggaccaaccggcccagaacuuuguccucagagcccaguuugaugc

SEQ ID NO: 12702 - RNA, 102 nt, Human
ggugaggcagacgccugaacagggacuugaguggauuggauggauuuuuccuggagaggggaguacugaauacaaugagaaguucaagggcagggccacacu

SEQ ID NO: 12703 - RNA, 62 nt, Human
guagacaaguccuccagcacagccuauauggagcucacuaggcugacaucugaggacucugc

SEQ ID NO: 12704 - RNA, 74 nt, Human
guccuacaaggcuucuggcuacaucuucacaaguuaugauauagacugggugaggcagacgccugaacagggac

SEQ ID NO: 12705 - RNA, 104 nt, Human
caucaacgagaagcugugcuacguugcccugggauucgagcaggagaugggcaacgccggaucuccucuccucugggggacgacgcuacgcagcuugccggaug

SEQ ID NO: 12706 - RNA, 66 nt, Human; identical to SEQ ID NO: 2802

SEQ ID NO: 12707 - RNA, 74 nt, Human
agccgcaccaacgagacagguggagcugcaggagcugaaugaccgcuucgccaacuacaucgacaaggugcgcu

SEQ ID NO: 12708 - RNA, 80 nt, Human
uguuggagcaguaugacaagcuacaagauggcagcaucaaaaugaagccucugaugggggugauauacgugccuuuaaca

SEQ ID NO: 12709 - RNA, 74 nt, Human
ccggucccggugcucgcgggggagcggcccaggcucgguuguucugggccgucgcccgguguucaccgggcugg

SEQ ID NO: 12710 - RNA, 67 nt, Human
cuacuugagcacgagcauggccucugugccauccuuggcggucaaguagaggccaugugugagguag

SEQ ID NO: 12711 - RNA, 72 nt, Human
cuggcuggagggcuuggcccagcuucuggccccacuagcccccugagguccaugcagcccugugccagccag

SEQ ID NO: 12712 - RNA, 67 nt, Human
gcaggaucugcccaacguugaaggucagugugauggcauaaaagaaauuagaguuggcacuuccugc

SEQ ID NO: 12713 - RNA, 70 nt, Human
agcugucuugcgcacaaucaaagcugccacaggguuccucgcagcagcucugccaguagcgcaagcagcu

SEQ ID NO: 12714 - RNA, 82 nt, Human
ggagucccggacgaagacgcugccauuggacuugacugccaugaaauacgucagccaucggcuccguaaccguguggccucc

SEQ ID NO: 12715 - RNA, 65 nt, Human
gugcagcaggauguugccugauaugguccuauaugugacgcuguugggcuugaacuuccccugcc

SEQ ID NO: 12716 - RNA, 64 nt, Human
cuagugccugggcuugcucacguucuuggucacuuuguggcccuuguugaggcccacggcauag

SEQ ID NO: 12717 - RNA, 65 nt, Human; identical to SEQ ID NO: 4540

SEQ ID NO: 12718 - RNA, 71 nt, Human; identical to SEQ ID NO: 4541

SEQ ID NO: 12719 - RNA, 71 nt, Human
ccugucaagaaagacguuuuccaaaaugcuuuaguuuugcaaauauuuacgauguccuuguuagggacagg

SEQ ID NO: 12720 - RNA, 71 nt, Human
cuucagaugagcuccucucuuuccaaaggcagguuaacacggguuaggaaggagauuaggagacucugaag

SEQ ID NO: 12721 - RNA, 79 nt, Human
gauuggcagacccgggaccucuuacagcccccaggcauguggaucuugccgaauccugaagagguccaucuuggcaguc

SEQ ID NO: 12722 - RNA, 68 nt, Human
gcagcagguggcgcagaugcagcugaaguacuacaacuccgacgugcaccgcgccgccuuggugcugc

SEQ ID NO: 12723 - RNA, 74 nt, Human
ggcucuucgcccaccaaccagguguuacaagccccagaaugcugcccggccugcccugguuggggcggacuguc

SEQ ID NO: 12724 - RNA, 66 nt, Human
accaaugcauuuccuggagaauauaucccuacugucuuugacaauuauucugccaaaugucauggu

SEQ ID NO: 12725 - RNA, 75 nt, Human
gcggagggcgaggcggcguggacagcggccccggcacccagcgccccgccgcccgcaagccgcgcgcccguccgc

SEQ ID NO: 12726 - RNA, 101 nt, Human
gcuuccuaucucagcgcccugccgccgccgccgcggccagcgagcggcccuguaugcaggccaucaagugugugguggugggagacggagcuguaggguac

SEQ ID NO: 12727 - RNA, 75 nt, Human
ggaaaaccggugaaucugggcuuaugggauacagcuggacaagaagauucaugaccagauuacgcccccuaaucc

SEQ ID NO: 12728 - RNA, 67 nt, Human
agagacugcuugcaauccuugacuagugguaccuccuuccaucuccaaaaccagcaaggcagccucu

SEQ ID NO: 12729 - RNA, 60 nt, Human; identical to SEQ ID NO: 11068

SEQ ID NO: 12730 - RNA, 90 nt, Human; identical to SEQ ID NO: 11069

SEQ ID NO: 12731 - RNA, 73 nt, Human
ggggaguggcuauaaauacagaugaagcuucgcuggcuugccggccccuaaccugcugugcaccccacuuccu

SEQ ID NO: 12732 - RNA, 131 nt, Human
uaguuaucagucaccaccagaccauuauuggcgguuagaauuccagaaacggugaauagaaguucaucuucuauuuugucuucauggaauauaucacucugguaaacagcugguucuaaauaugaugguua

SEQ ID NO: 12733 - RNA, 67 nt, Human; identical to SEQ ID NO: 1379

SEQ ID NO: 12734 - RNA, 63 nt, Human; identical to SEQ ID NO: 1366

SEQ ID NO: 12735 - RNA, 61 nt, Human; identical to SEQ ID NO: 2204

SEQ ID NO: 12736 - RNA, 125 nt, Human
cccaggcuagacugcaguggugcaaucucagcucacugcaaucucugucuccuggguuccagcgauucuccugggaggcggagguugcagugagcugagaccgcagcacugcacgcuaggcuggg

SEQ ID NO: 12737 - RNA, 74 nt, Human; identical to SEQ ID NO: 365

SEQ ID NO: 12738 - RNA, 77 nt, Human; identical to SEQ ID NO: 3082

SEQ ID NO: 12739 - RNA, 80 nt, Human; identical to SEQ ID NO: 367

SEQ ID NO: 12740 - RNA, 83 nt, Human; identical to SEQ ID NO: 1471

SEQ ID NO: 12741 - RNA, 64 nt, Human; identical to SEQ ID NO: 8239

SEQ ID NO: 12742 - RNA, 70 nt, Human
cucauggcuuugagaagccccuagacagugccaugagugcugaggaggauaccgaugucagaggcaggag

SEQ ID NO: 12743 - RNA, 103 nt, Human
cucaucaugaacugucggccacaguucuuuaccacagauuccaugaccuccagggcauacaaggcgacguguggguucugucguugacuuucuucuugauggg

SEQ ID NO: 12744 - RNA, 60 nt, Human
cuaugacaccuauguucgcuacugggacuucacgcaccagcguccggaaaugugucaugg

SEQ ID NO: 12745 - RNA, 68 nt, Human
gguguuguacggcugugggaccggcgucaaagggccugccugcacgccuucccgcugacgucgacucc

SEQ ID NO: 12746 - RNA, 80 nt, Human
gcccagggucccagaaccuugagucagggcuuagcugggagcugaccuaucuccagagaguccauucuggucccucaggc

SEQ ID NO: 12747 - RNA, 63 nt, Human; identical to SEQ ID NO: 3039

SEQ ID NO: 12748 - RNA, 78 nt, Human
cuacaugaugagccgucacugagaugaugcuggcaugcaaucgcuucugucaacaggugggauggguucaaagugugg

SEQ ID NO: 12749 - RNA, 85 nt, Human
gcacacauugagacuaugauucucuuuuuaguuacuucaauucuucugcuuaugauaacgacaggagaaaguuucaauccagugc

SEQ ID NO: 12750 - RNA, 92 nt, Human; identical to SEQ ID NO: 8126

SEQ ID NO: 12751 - RNA, 68 nt, Human
gcaggcggcgcgaauucacuagugauugugagcugagaucgcacccaaacaauccuagugaagccugu

SEQ ID NO: 12752 - RNA, 74 nt, Human
ggcaaggauugaagccagaggcuugggaaaaagagcaaaccucugauacuccaaguucaaacugcuuccuagcu

SEQ ID NO: 12753 - RNA, 64 nt, Human
gugagaggccacgucuauucugauuuuaucaagacaaagacccaaaauaccuagaccuucacac

SEQ ID NO: 12754 - RNA, 63 nt, Human
auggacagcaggcuaaaagggcacacuguaacacacccccacuuaggcuccugcacuguccau

SEQ ID NO: 12755 - RNA, 67 nt, Human
gccaucaaaagugcaauucaggccgggugugguggcucacaccuguaaucccagcacuuugggaggc

SEQ ID NO: 12756 - RNA, 74 nt, Human
gcuggcugggcgggacugaccgauaccucaugaagauccucacugagcgagguacaguucacaccacggcgagc

SEQ ID NO: 12757 - RNA, 78 nt, Human
gaguauggggugacaaaaauuaguuccuggugcuuaaugaaacuuucugccacugauuuuauauauuaccccgugcuu

SEQ ID NO: 12758 - RNA, 89 nt, Human
uugagggcuacacaaaacauuuacauuucauucuaacauaaugaauauaauagguuguggaaaguggguaaacuaaauguagccuucag

SEQ ID NO: 12759 - RNA, 68 nt, Human
uuugucaauaaguauucauuggaauauauguaaaugugccuugccgguuauugaaacuuaucuacaaa

SEQ ID NO: 12760 - RNA, 104 nt, Human
gccuugagauugugccauaucaaaccuagcuccugagagucuuuccagcuuaaagucacauccuagagcuucccaggagcaggucugggaucuaaauuucgggc

SEQ ID NO: 12761 - RNA, 60 nt, Human
gguagguacuacuccucucauuauauaugugaauaaauggaggaagauaaguaacuugcc

SEQ ID NO: 12762 - RNA, 81 nt, Human
cuccucaccugcuccuugaaugacagcgccacagaggucacagggcaccgcuggcugaaggggggcguggugcugaaggag

SEQ ID NO: 12763 - RNA, 91 nt, Human; identical to SEQ ID NO: 4623

SEQ ID NO: 12764 - RNA, 78 nt, Human
gcucuggagagguuccugcaggauuacuuugauggcaaucugaagagauaccugaagucugaaccuaucccagagagc

SEQ ID NO: 12765 - RNA, 69 nt, Human
gcugauugaacuuuaugccccuugguguggucauuguaagaaccuggagcccaaguauaaagaauuggc

SEQ ID NO: 12766 - RNA, 94 nt, Human
gcagccggggccuucucaacgccucaguaccucggcgggaccgccaugguucugcugcacgugaagcggggcgacgagagccaguuccugcugc

SEQ ID NO: 12767 - RNA, 61 nt, Human; identical to SEQ ID NO: 1988

SEQ ID NO: 12768 - RNA, 60 nt, Human; identical to SEQ ID NO: 2705

SEQ ID NO: 12769 - RNA, 72 nt, Human; identical to SEQ ID NO: 1989

SEQ ID NO: 12770 - RNA, 62 nt, Human
guggcugggacaagcuggucaagguauggaaccuggcuaacugcaagcugaagaccaaccac

SEQ ID NO: 12771 - RNA, 78 nt, Human; identical to SEQ ID NO: 10541

SEQ ID NO: 12772 - RNA, 63 nt, Human
ggcaggugcccccaucccccccgcauucuggccuaggcaggagaggaugggcgcagcccugcc

SEQ ID NO: 12773 - RNA, 78 nt, Human
gaggggugacaaguguguuugagcuggaagugccugcgcgcaggccuuuucucauggcaugaccuugacucaccuuuu

SEQ ID NO: 12774 - RNA, 70 nt, Human
ugccuguuccgugcauguggucauaaaucaaaaccauaaucaggguccaugagcauaacacgcacgggca

SEQ ID NO: 12775 - RNA, 62 nt, Human
gacuuagagguuuuaacguaaagaaaaugguuccgcuaauuguauagaaccucucagcaguc

SEQ ID NO: 12776 - RNA, 61 nt, Human
ggccuaguuuucuucuguggugaucuauuaaauaaaaacacuauauuaagauaaauuggcc

SEQ ID NO: 12777 - RNA, 90 nt, Human
uaggaguagaaaugugacuaagauguuugaacaaauaacauauggaaugcuaaacauauggaaugcuaaacguaugccauuuuucuccug

SEQ ID NO: 12778 - RNA, 110 nt, Human
cgucggcggccggcugcaggucggccaggagcuccugcucuaccuuggcgcccccggcgccaucucggaccuggaggaggaccugggccgccuaggcaagacagucgacg

SEQ ID NO: 12779 - RNA, 68 nt, Human
cuuuaauagacagagugggagaugccaaagacaagguucgagaugaagcucagacucugauauugaag

SEQ ID NO: 12780 - RNA, 65 nt, Human
uuuaagugccuuuguggacagauuaucaacacgcuuuaaauccuauguagcaauggguauuugaa

SEQ ID NO: 12781 - RNA, 60 nt, Human
cggcgcauucgucuuccgagcgcuacugccagcugaugccgggagcuaacuaccgcgccg

SEQ ID NO: 12782 - RNA, 91 nt, Human
ggccggggccggggccggggcccugacguccccgcggggcccugggaccgcgaggaggacggcuuggggccuggagcccgcggcuguggcc

SEQ ID NO: 12783 - RNA, 61 nt, Human
cugagaucucuugacaugaaccggaacaucaagccgggucccaggguugacgaauucgcag

SEQ ID NO: 12784 - RNA, 71 nt, Human
gcagccgggccugaggcugagagcauguaccagaucaaguaugaggagcugcagagccugggcugggaagc

SEQ ID NO: 12785 - RNA, 77 nt, Human
cugcuaggcccccgcuuucaggagugggguggugccaaugcuccacucagaaccuggacugcggggucccugagcag

SEQ ID NO: 12786 - RNA, 69 nt, Human
gcuggaggcgaggugcacgcgaggcucuccacagcccaggaaggcagacugucacccugcucuccgagc

SEQ ID NO: 12787 - RNA, 100 nt, Human
cauguauaaaggucgauuguaagacugggguauuaaaucaguggucaaggggucaugaacuuuuuaauaacuaugguugggccaguugacuaauauuuug

SEQ ID NO: 12788 - RNA, 97 nt, Human
ucuccauguuugccucuaaauucagaacagcucccaucaagauccuagcaggacuuuuguguaacugcugguucugaagugaggguggagguggaga

SEQ ID NO: 12789 - RNA, 78 nt, Human
ccugcuggcccuccugacggcggcccugacacagagccucguggcagcccaggccaagcugagcagauggccagaagg

SEQ ID NO: 12790 - RNA, 61 nt, Human; identical to SEQ ID NO: 12631

SEQ ID NO: 12791 - RNA, 100 nt, Human
gcacugugcaaggagcuccccaagggcccggagcaggugcccgugccaagaucccgccagggcaaugccugggggcccaugaggagcgccucgcagaggc

SEQ ID NO: 12792 - RNA, 105 nt, Human
ggcagguggaggugcaucaagagcccggggcagcggugcccagaggccaggaggccccugaaggcaaggccacgggagacugguggagaaucugccuccccugcc

SEQ ID NO: 12793 - RNA, 72 nt, Human
augcugauaaaguuauaaaaguugcaagucacuguacuauuuaaguggcaacugccaaaagugauucagcgu

SEQ ID NO: 12794 - RNA, 66 nt, Human
ccgggcaugguggcaggugcugcagucccagcuacugggagaucacgccacugcacuccagccugg

SEQ ID NO: 12795 - RNA, 71 nt, Human
uauaucuauuuaaucuauuuauaauauccugcuaaacagagagaaaacaguaaguuggaaaauaacauaua

SEQ ID NO: 12796 - RNA, 93 nt, Human
agccgggcaugguggcucacaccuguaaucccagcacuuugggaggccaagguggguggaucacaaggucaggagaucgagaccauccuggcu

SEQ ID NO: 12797 - RNA, 63 nt, Human
uuguuuuaaugauuaauguaaagggucugaaauaucugcauauuuaaaaauuauuagaagcaa

SEQ ID NO: 12798 - RNA, 102 nt, Human
aggggagguucuugcaaauucccaaggaaaugucaaaaaggcaaaauggccagcauuauccauuugcuuuuuuggguuuacugggugaauagcacuuuccuu

SEQ ID NO: 12799 - RNA, 95 nt, Human; identical to SEQ ID NO: 806

SEQ ID NO: 12800 - RNA, 77 nt, Human
uaggcaugugauuucagguuuuucuuucugagaacauugagauuucacuuggaagacucccugaaaucuuaugagua

SEQ ID NO: 12801 - RNA, 83 nt, Human
aaagauauggcuuuauugauauguaaugugcauaccauaaauucuuugauuuaaaguguacaauucaguguuguuguuucuuu

SEQ ID NO: 12802 - RNA, 76 nt, Human
gugaucugagucuggcuucuuucauuuacauguuuauuuuguuuuguuuuuuugaaauggagucucacucugucac

SEQ ID NO: 12803 - RNA, 78 nt, Human
gugcuggaauuacaggccaucuaaaucuuuuaucucagguuugccuugugacaaaaggagggguacuuuuucuggcau

SEQ ID NO: 12804 - RNA, 69 nt, Human
guuacccuggcuggagugcagugacgugaucacggcucacugcggccacaaccuuccagcuuaggugau

SEQ ID NO: 12805 - RNA, 61 nt, Human; identical to SEQ ID NO: 9580

SEQ ID NO: 12806 - RNA, 102 nt, Human
gaaacagacugggccaauguccacaaagaauuccuggucagcaccaccgauguccuaaggugcaauaucaaggaagggcaggcgugauggcuuauuuguuuc

SEQ ID NO: 12807 - RNA, 75 nt, Human; identical to SEQ ID NO: 1111

SEQ ID NO: 12808 - RNA, 77 nt, Human; identical to SEQ ID NO: 2332

SEQ ID NO: 12809 - RNA, 80 nt, Human; identical to SEQ ID NO: 367

SEQ ID NO: 12810 - RNA, 74 nt, Human
guguugggcugugacuggccugccagguguuugccucccucugcaacaccagccuguuacuaacagccuagugc

SEQ ID NO: 12811 - RNA, 61 nt, Human; identical to SEQ ID NO: 776

SEQ ID NO: 12812 - RNA, 62 nt, Human
auucagaguccugcaccaagccccagagaugguuuuggugggucuugguggggcccaggaau

SEQ ID NO: 12813 - RNA, 70 nt, Human
gcauggccagggagggcaaauggaaaggcaaccacucucugccgguccugggcuuaucccugcaaugugc

SEQ ID NO: 12814 - RNA, 67 nt, Human
cuuucaauagacaguguugaggaccaucuugccuggagcaaggauaucaaugcuuacaauugugaag

SEQ ID NO: 12815 - RNA, 60 nt, Human
gugguguuguuuugguccugauaggaagcugaagcugucuauccucuacccagcuaccac

SEQ ID NO: 12816 - RNA, 77 nt, Human
cuaugccuuaaacugugcaaucugccacaagugagcucaagaaaagaaaacuugucacauguaugguuuucccauag

SEQ ID NO: 12817 - RNA, 79 nt, Human
cagcacccaccucggacuuggcuguggacgguuggugcaagugcauccugcagggcuggcugugcgcagcugugggcug

SEQ ID NO: 12818 - RNA, 67 nt, Human
uucaaguaaaaacccuuucuccuuccuggggccucggcuccuggagggcuggagggucucgucugag

SEQ ID NO: 12819 - RNA, 95 nt, Human
gggaacggaaggaggaaugcuggacuggaggccccuggagccagauggcaagagggugacagcuuccuuuccuguguguacucuguccaguuccu

SEQ ID NO: 12820 - RNA, 69 nt, Human
ugcccagaggacucccaaaccuggcuuggggucaagaaacagccagcaagaguuaggggccuuagggca

SEQ ID NO: 12821 - RNA, 63 nt, Human; identical to SEQ ID NO: 123

SEQ ID NO: 12822 - RNA, 66 nt, Human
ccccacgcucaguccuggucaaaggcugccagaccuuucugagugcccccagggagggugcugggg

SEQ ID NO: 12823 - RNA, 91 nt, Human; identical to SEQ ID NO: 124

SEQ ID NO: 12824 - RNA, 73 nt, Human
guuaaacugaauauacaauuguucccuaggcaaccaacuuuugcuuauaacuacaauuuaauuucacguugac

SEQ ID NO: 12825 - RNA, 60 nt, Human
ugcuuuuucuuuaaggagcugauguugcaccuaaacauuccaacccuuaaagcuaaaaca

SEQ ID NO: 12826 - RNA, 68 nt, Human
gaauuggugaacggaagaguccuuauguugcaguaugcuguauaguaauggccuucagcauccucuuc

SEQ ID NO: 12827 - RNA, 65 nt, Human
ggaacaggauguuuaacucuuuuaucuccgaacauugaaugagauaaauuuccagaugcuguucu

SEQ ID NO: 12828 - RNA, 60 nt, Human
aaaaaagacugaauuuccuggcuuacuugcauauacagacugggauuuuuuuuuuuuuuu

SEQ ID NO: 12829 - RNA, 83 nt, Human
gugggggcgcucaauaacuuggauaccggucggcauggucacaacacccgacagugcucuucgccagaaguuggcggcccuac

SEQ ID NO: 12830 - RNA, 60 nt, Human
guguacaugugguuugcgguaacaccacccaaaggcaaaaauucccaaacccaguuacac

SEQ ID NO: 12831 - RNA, 64 nt, Human
ucacccugucgcacuucaccguggggauaacggggucuaccauggucuagaagugcacugguga

SEQ ID NO: 12832 - RNA, 63 nt, Human
ucccuuuccugaccuuuagucuuucacuuccaauuuguggaaugauauuuuaggaauaacgga

SEQ ID NO: 12833 - RNA, 69 nt, Human
acuucgggcugugcaaggaggggaucaaggacggugccaccaugaagaccuuuugcggcacaccugagu

SEQ ID NO: 12834 - RNA, 60 nt, Human
gagacugaugugcgggucgccugccuucuaaaaccaaggacagagaagcaaacagagcuc

SEQ ID NO: 12835 - RNA, 70 nt, Human
ggccacaggccgcuacuacgccaugaagauccucaagaaggaagucaucguggccaaggacgagguggcc

SEQ ID NO: 12836 - RNA, 103 nt, Human
cuguccugcggccaggucgaggugauugggggagcagacaaguaccacuccgugugucggcucugcuacuucaacgaaggccucaggccagccugccgggcgg

SEQ ID NO: 12837 - RNA, 97 nt, Human
gagaacugccagugcaggaaagccaggggacgccgugguggcaggaagcucuuugccccacacagauucugcauggccccugcaacugacggaccuc

SEQ ID NO: 12838 - RNA, 63 nt, Human
ggaagaccguaauuguggcugcacuggaugggaccuuccagaggaagccauuuggggccaucc

SEQ ID NO: 12839 - RNA, 85 nt, Human; identical to SEQ ID NO: 10310

SEQ ID NO: 12840 - RNA, 70 nt, Human
cugccuuuuaauauuugcauugaauucuagauaauuucuucuaucuuugguucacaaauucucucugcgg

SEQ ID NO: 12841 - RNA, 66 nt, Human
gcauuaauuaguuuuggucaucguauuuuuucacaucuugaaguauuucauucaacucugcuaugu

SEQ ID NO: 12842 - RNA, 78 nt, Human
ugcaugggauuugaauuucuuaaaucuaaggauggugggcuuucaucaauccuagaaaauugugucauuaucucauca

SEQ ID NO: 12843 - RNA, 60 nt, Human
caccaggaguccacauuccaggagcugugcgacggggcugcuggaggagucggacuggug

SEQ ID NO: 12844 - RNA, 63 nt, Human
gcgagccgggcacaaagagacacguagcacagagcaugccacguacaagcaaagacccgacgu

SEQ ID NO: 12845 - RNA, 74 nt, Human
ggagccaggacagggcgaggggccggaggcucggggaugccgaggucaguaccacgcccgacccgccuggcacc

SEQ ID NO: 12846 - RNA, 103 nt, Human
gcggccucauuugcugucaagcuuuucaaagcauggauggcagaaaacagaugccaacucugucacucgucuaugagaaaagccaacuuagacaagaggcugc

SEQ ID NO: 12847 - RNA, 76 nt, Human; identical to SEQ ID NO: 1089

SEQ ID NO: 12848 - RNA, 114 nt, Human; identical to SEQ ID NO: 3164

SEQ ID NO: 12849 - RNA, 90 nt, Human; identical to SEQ ID NO: 3165

SEQ ID NO: 12850 - RNA, 66 nt, Human
ccauccauucacuguucagcuguacugugauuuaguuuuuacaccguuaaaacccugaguggaugg

SEQ ID NO: 12851 - RNA, 84 nt, Human
uugugaacagauuaaggauaaauauaugcagaaucgguuggugcgucuuguguguguguuucuccaauccuugauccguaacaa

SEQ ID NO: 12852 - RNA, 80 nt, Human
aucacuaggagccaagagaacggugagaucuguaugucauuacacgaauauacacccuuuuuuuccuucucuuccaggau

SEQ ID NO: 12853 - RNA, 78 nt, Human
ggaggauacugcugcagucuugggaguuauaauagcagccacuugcaugggccuuacuucuauaacaggcaauccacu

SEQ ID NO: 12854 - RNA, 77 nt, Human
gcuuuuggguaggaccccacgauuuaggguaacuguuaucaucagcugccauuucugauagggucuaccacaucugu

SEQ ID NO: 12855 - RNA, 83 nt, Human
guuugguaggagugcucaugguucugucauucuuggaccucuccuggcugagcucugauucccugugagcacgaugcugaugc

SEQ ID NO: 12856 - RNA, 65 nt, Human
gcaagugaaugucuugcugaaugugucuagggguucaucuucaguaaucgacauuccacuagugc

SEQ ID NO: 12857 - RNA, 66 nt, Human
uuaacuucaugacauguagacauucaaaacuugagccuuggauguuccuguggaccugacaguuaa

SEQ ID NO: 12858 - RNA, 64 nt, Human
auccuggaccucagcaucaucaagcaccucuuuacugguccuuguccucuccaaacaccaggau

SEQ ID NO: 12859 - RNA, 75 nt, Human
cuacacagacuucuauuccucucggagcaugcuaccaacgucggaaucauguucagggacaaggagaaugcgugg

SEQ ID NO: 12860 - RNA, 84 nt, Human
ggccgugggggcgggcagggggcggggccgggccugaccacagcggccgaguucaguccugcucuccgcacgccaccuuaggcc

SEQ ID NO: 12861 - RNA, 63 nt, Human
acuuggcuaaugagccaagcauugagcgaauuaucaguccucgacauggcucuaacgacaggu

SEQ ID NO: 12862 - RNA, 61 nt, Human
auccaaagauguaguagacuacagugaggaaaauuuugcaauuguauuugcugcuaugggu

SEQ ID NO: 12863 - RNA, 74 nt, Human
guccugugaguuuacuggggauauucuccgaacaccggugucugaggauaugcuuggucggguauucaauggau

SEQ ID NO: 12864 - RNA, 101 nt, Human
uucucugcugcugggcuaccacacaaugagauugcagcucagaucugucgccaggcugguuugguaaagaaauccaaagauguaguagacuacagugagga

SEQ ID NO: 12865 - RNA, 77 nt, Human
gaguccuaccgcuucuacucaagcucccugcuggucauuuaugauggcaaggagcggcccgaagugguccuggacuc

SEQ ID NO: 12866 - RNA, 69 nt, Human
uggccaggugguggcuccugcagccuggagcugaugugcaguggccucugugagccccagccugagcca

SEQ ID NO: 12867 - RNA, 69 nt, Human
cgcucgucaccaggacccaaggaaccaaaagugcaucugauggucucaagggucguguguugugaagug

SEQ ID NO: 12868 - RNA, 70 nt, Human
guguuccauggucaaaaaauggcagacaaugauugaagcucacguugaugucaagacuaccgaugguuac

SEQ ID NO: 12869 - RNA, 91 nt, Human
ugcauuuagaaagauucaagcugauuacugaagauguucaggguaaaaacugccugacuaacuuccaugggcauggaucuuacccgugaca

SEQ ID NO: 12870 - RNA, 83 nt, Human
agucucugaccagccugaacgugucuuaugucacuuguuuggaaaugaugugauugaagauuucagagaggucauuggaggcu

SEQ ID NO: 12871 - RNA, 93 nt, Human
ggccccagaaaaauauguacuagguacgagccuggcuuguuuauuuucgagucaccgggcucugcugucgacuguucaacacuucugugggcu

SEQ ID NO: 12872 - RNA, 78 nt, Human
gugugaguggcuuugcaggccugguggugggagagccucaggcucccuccuucuucguuccugaccaugcccuugggc

SEQ ID NO: 12873 - RNA, 86 nt, Human
ucagucugccugcgggcucuguuggcaucccuugcccugacacugggcaccuuguggccccuagcaggcccaccuuggcacaccga

SEQ ID NO: 12874 - RNA, 61 nt, Human
uggcaggugguauuggggucccucagcccaccugggccgugaccucaaguguccacugcug

SEQ ID NO: 12875 - RNA, 72 nt, Human
gcaaggaaugaugcuagccaauaacuaugcccgagggcacuacaccauuggcaaggagaucauugaccuugu

SEQ ID NO: 12876 - RNA, 66 nt, Human
ucgcaaggcuggcugaccaguugcaccggucuucagggcuaucuugguuuuccacagcuauuggga

SEQ ID NO: 12877 - RNA, 104 nt, Human
ugggagggggaacuugguucuuggguuccacgucccugcucauggaacggucucucagaugauuauaggcaggaaauccaagcauggaguucuccaauuacccg

SEQ ID NO: 12878 - RNA, 68 nt, Human
aguuauccaauagcuacugaaauacaagauggaagguauccucucuguaccauagcuaaaggauugcu

SEQ ID NO: 12879 - RNA, 64 nt, Human
cagcuuaaauucucuggguuuuguuuugaaauaccaaauaaauuucuuccuucuuuaaaugcug

SEQ ID NO: 12880 - RNA, 72 nt, Human
gcugaugggguacacacgguggagccaacggaggccggggacuacaagcugugcuuugacaacuccuucagc

SEQ ID NO: 12881 - RNA, 65 nt, Human
ccuuauuucugagaauuugggccccagcuguuuugccuuugacucccugaccuccagagccaagg

SEQ ID NO: 12882 - RNA, 96 nt, Human
cuuccugagcccaaucacgucaugcugaaccaccuauacgcgcugucuaucaaggauggagugauggugcucagcgcaacccaccgguacaagaag

SEQ ID NO: 12883 - RNA, 60 nt, Human
auuaaacugacacucgauucuguagccggcucugccaagagacaguggcgucggggugau

SEQ ID NO: 12884 - RNA, 64 nt, Human
cucugcaauuuaugcugcacgcccggacguaaagugcgucgugcacauucacaccccagcaggg

SEQ ID NO: 12885 - RNA, 74 nt, Human; identical to SEQ ID NO: 365

SEQ ID NO: 12886 - RNA, 77 nt, Human; identical to SEQ ID NO: 3082

SEQ ID NO: 12887 - RNA, 86 nt, Human
accuucgcauucagaauuugaccaucuuggugagaaacauuaagaccuacuaccagagauggggugaugauuaugaugaagaaggu

SEQ ID NO: 12888 - RNA, 70 nt, Human
ccugacuauguacauggauuuaguggacggcaucuuuuugaaccaaauuaugcugcaaauagaucccagg

SEQ ID NO: 12889 - RNA, 63 nt, Human
uccugcagagccgcuggugaccugggugaaaacuuuuggcccguuuggaagcggcacgcagga

SEQ ID NO: 12890 - RNA, 63 nt, Human
gcagucccugucccuuggcaccaggagucccuguagccuggcuagguaaggaaagggaguugc

SEQ ID NO: 12891 - RNA, 79 nt, Human
gguccugguagggagugcguagcaggcuggagucgcuguccggucgcgcuucacuucugcuccgcccucccugcucccc

SEQ ID NO: 12892 - RNA, 113 nt, Human
ccugagggcugugggguggaaugagcuggaaggccgugaugccaucuucaagcaguuucauuucaaagacuucaacagggccuuuggguucaugacaagaguugcccugcagg

SEQ ID NO: 12893 - RNA, 72 nt, Human
ccuuuguuucuaaucuccucucagucuguacuacuacuacuacacuaacaugacuuugguuuuggggaaagg

SEQ ID NO: 12894 - RNA, 65 nt, Human
caucuuucacuggaauugcaaagggauagccauaugaaacagcuccuccucauccaagagagaug

SEQ ID NO: 12895 - RNA, 82 nt, Human; identical to SEQ ID NO: 8961

SEQ ID NO: 12896 - RNA, 77 nt, Human; identical to SEQ ID NO: 8698

SEQ ID NO: 12897 - RNA, 80 nt, Human; identical to SEQ ID NO: 367

SEQ ID NO: 12898 - RNA, 68 nt, Human; identical to SEQ ID NO: 4262

SEQ ID NO: 12899 - RNA, 78 nt, Human; identical to SEQ ID NO: 2308

SEQ ID NO: 12900 - RNA, 130 nt, Human
ugguuguaacauuagcagggggaagacagcugcuuagaagcauggugggaagcagauguggugaagugccguacuguucugcuuacaaagauggggaugucuaagaucguguuuacuaccugauagccua

SEQ ID NO: 12901 - RNA, 65 nt, Human; identical to SEQ ID NO: 247

SEQ ID NO: 12902 - RNA, 79 nt, Human; identical to SEQ ID NO: 4405

SEQ ID NO: 12903 - RNA, 78 nt, Human
ccugaaagaccgaccauucuucccugggcuggugaaguacaugaacucagggccgguuguggccauggucugggaggg

SEQ ID NO: 12904 - RNA, 90 nt, Human
gauucaguaaaaagugcugaaaaagaaaucagccuaugguuuaagccugaagaacugguugacuacaagucuugugcucaugacuggguc

SEQ ID NO: 12905 - RNA, 65 nt, Human
guggugaagacaggccgagugaugcuuggggagaccaauccagcagauucaaagccaggcaccau

SEQ ID NO: 12906 - RNA, 66 nt, Human; identical to SEQ ID NO: 8995

SEQ ID NO: 12907 - RNA, 73 nt, Human
ugggaaccacgucaccacgguacaacaggcagcaaagccauguauuuaccauggcgagggucacauuucacca

SEQ ID NO: 12908 - RNA, 102 nt, Human; identical to SEQ ID NO: 2172

SEQ ID NO: 12909 - RNA, 93 nt, Human
uuuuucaauuuuuauuuugguuuucuuacaaagguugacauuuuccauaacagguguaagaguguugaaaaaaaaauucaaauuuuuggggga

SEQ ID NO: 12910 - RNA, 64 nt, Human; identical to SEQ ID NO: 287

SEQ ID NO: 12911 - RNA, 65 nt, Human; identical to SEQ ID NO: 247

SEQ ID NO: 12912 - RNA, 64 nt, Human
acuuucaggguaaugaugcaccuguugaacaagacauuacagugcagaaacuuacuuugaaagu

SEQ ID NO: 12913 - RNA, 62 nt, Human
gggacugcuucacagaagaaaagccugguucauaaaaacuuugccugaugucuagcagaacc

SEQ ID NO: 12914 - RNA, 72 nt, Human
gcgacaagagcgaauugauugacagaugguagacucuggaccuucugugaaguggauaucaaucauuguggu

SEQ ID NO: 12915 - RNA, 64 nt, Human
gagcacaaauccacauuuauuuauugauuuuucguuaguuuaaauccuugagggguacagcauc

SEQ ID NO: 12916 - RNA, 89 nt, Human
cgagauguguaaucauaagcaucugcgaauggaagcaucaaaacggaugaugaacugaaucgcagggugacuugugcuugguuauuuug

SEQ ID NO: 12917 - RNA, 62 nt, Human
gcuugaaccagagucgugguaaauacagcguaccaucgcagcgcaaacuugaccugcaaagc

SEQ ID NO: 12918 - RNA, 72 nt, Human
ggcuuggccauggcggcuggugcugauaaccauuucuuggcagaagugcccgccaaagcuguggcccuaguc

SEQ ID NO: 12919 - RNA, 65 nt, Human
gugggagugggagcguuuccuaagcuccacugaagauaagagcccaacccaaccccuccccccac

SEQ ID NO: 12920 - RNA, 72 nt, Human
ucaccaccacagagagccagcaaggccuucaggaagucuccggaggugucacccucaauggcuugguggaga

SEQ ID NO: 12921 - RNA, 86 nt, Human
ucagagucuucucaucugugccagcacccuucauggauuuguaaaguuugucggcaaagaagagaggcuuguucuugacacuuuga

SEQ ID NO: 12922 - RNA, 83 nt, Human
ucaucaucaucaucgucaucaucaucaucuucacguuuucuuuucaaugcauuugaugauucauuggcaguauuuugugauga

SEQ ID NO: 12923 - RNA, 68 nt, Human
uaugugguauauuuauguauguguguguauagacacacauauacuccuaaauuaaauauauuuguaua

SEQ ID NO: 12924 - RNA, 80 nt, Human
ugacaaguuuuuguuuguauccaauuacagaguuccauaagacuaugauuugaauauugugguacaacuuaaauuuggca

SEQ ID NO: 12925 - RNA, 65 nt, Human; identical to SEQ ID NO: 12919

SEQ ID NO: 12926 - RNA, 72 nt, Human; identical to SEQ ID NO: 12920

SEQ ID NO: 12927 - RNA, 108 nt, Human
gcucauccuuaguggaguuguuugacgauuuggagaagagcaagauuugaucuuaugaacauuaucacggaaucuuuuccagaguucugaacuuucauuaaugauggc

SEQ ID NO: 12928 - RNA, 63 nt, Human
gcugauauuuuaaaauggcugguaauuauguuuuuaauauccggcauuaugaaauaucucagc

SEQ ID NO: 12929 - RNA, 91 nt, Human
cucuucuucccauggcuuuacuguggcgauaaaagucacaggaauggacuccuggaugcaucacucaagucaaagccuggaaaccugagag

SEQ ID NO: 12930 - RNA, 70 nt, Human
gaaggcgggacccggcagaauggcuccuguggaagacaggugggcagaagaaaaggggcguucugccauc

SEQ ID NO: 12931 - RNA, 93 nt, Human
ggauauuuugugacaucgguggcucgaucauccuuaagcaacugaaguuaaaauuguugacggaaaaggcacuuaaauguuacuuucaugucc

SEQ ID NO: 12932 - RNA, 70 nt, Human
uccaggguuaguuuuuguagccucggcuggcccgucggccuuuggcacgcucgaacuuccggcccuugga

SEQ ID NO: 12933 - RNA, 131 nt, Human
uggcacgcucgaacuuccggcccuuggagcggacguaggguuugguguggcugugcgggguuccuggggccuugccgaaaugccgguacaccuuuuggcccuugcgaggaccggagagcaggacagugcca

SEQ ID NO: 12934 - RNA, 105 nt, Human; identical to SEQ ID NO: 11263

SEQ ID NO: 12935 - RNA, 81 nt, Human
ggcucugaagucagcgguuguaugaagcugugggcacaguacgugggacacagcauggaggacugugacugaugcagagcu

SEQ ID NO: 12936 - RNA, 61 nt, Human
gcgguggagguagagacgcugaccuggcuaagcuuaggagucucaggucuccccgggccgc

SEQ ID NO: 12937 - RNA, 87 nt, Human
gcugacgagcgggucuggcucagagcagcguccacccucggcccucacaggccccgcugcccugccgccagggcuugagcuugcagu

SEQ ID NO: 12938 - RNA, 67 nt, Human
gugucccccaggcuggaaugcaguggcacgaucucggcucacugcaagcuccgccuccuggguucau

SEQ ID NO: 12939 - RNA, 68 nt, Human
cacaggcuggcagccuucagucugauccaccagaucagagcuuucuaaaucugagcucucagccugug

SEQ ID NO: 12940 - RNA, 85 nt, Human
uugaaagcgaugcugaguccuguuuucaaaaguguccuguuuggguuuucuuggugaagagcagaauuucaagugaaguaaucga

SEQ ID NO: 12941 - RNA, 98 nt, Human
ggagcuggaggaccuggagcaccugcagcuggacuucuggcgggggccugcccacccuggcucccccaucgacguccgagugcccuuccccagcaucc

SEQ ID NO: 12942 - RNA, 60 nt, Human
ccacuucuuuguggagagaauauuuaaaauccuuuuuuuuuuuuuggcaaugaauucugg

SEQ ID NO: 12943 - RNA, 72 nt, Human
guuuggcccaggcggaagugcaggguugugaucaagguccagggaacccucgugccucuccgggguucaagc

SEQ ID NO: 12944 - RNA, 60 nt, Human
auauugauuucugcccucagcuucaaauaaaguaaauugaaaugggaacaauaucaauau

SEQ ID NO: 12945 - RNA, 63 nt, Human
gugucuugauauauuuauaaauaugugauuaucauuuauuuuuaaaauaauuuaucaaaaaac

SEQ ID NO: 12946 - RNA, 77 nt, Human
aaucuguuuaccagacauauagcagccgggcagggagucuucauagccuguugcgucaugugauuccauuccagauu

SEQ ID NO: 12947 - RNA, 83 nt, Human
gugggcgagagaggcacagcacaguccuccggcuugguagguuucaagcucuuuugacugggcuggcgcugacauuugcccuc

SEQ ID NO: 12948 - RNA, 65 nt, Human; identical to SEQ ID NO: 247

SEQ ID NO: 12949 - RNA, 80 nt, Human; identical to SEQ ID NO: 100

SEQ ID NO: 12950 - RNA, 64 nt, Human
gugucccugugucuccccagguaguaauaaggauguccuuuuccuccagguauacaguggguac

SEQ ID NO: 12951 - RNA, 64 nt, Human
aaguaguuguuccccuugcucugaaagggccacggcuuuuguggagugauggguaacgaugcuu

SEQ ID NO: 12952 - RNA, 62 nt, Human
uaguguuucagucggugacgucacucacucugagacggugacgucacucacucugagaccua

SEQ ID NO: 12953 - RNA, 66 nt, Human
ggauggcauagucaauccaacaauaagaaaagauuugaaaacuggaccgaaauucuacugcugucc

SEQ ID NO: 12954 - RNA, 121 nt, Human
ccagccaaugaagucuguacucugguggcuuccaguggaaaaggcauuuuggaggcagccugcagguccuggcucuggcauccgagagagacuggagcacccaguguuacacgugagcugg

SEQ ID NO: 12955 - RNA, 100 nt, Human
uucaaggaauacgugccuuugucuuagaauggcuuucauuuauugaacgauaccagaagaaauguggcccccauuaaggcacuauggcgugguucaugaa

SEQ ID NO: 12956 - RNA, 100 nt, Human
gugugaaggcucuaagagacauugaaccuggagaagaaauuucuuguuauuauggagauggguucuuuggagaaaauaaugaguucugcgaguguuacac

SEQ ID NO: 12957 - RNA, 73 nt, Human
ugcgaaagacggggcacuggugcuuuuaaauccagagugggacugccugcgccugcuccuguuaucaauagca

SEQ ID NO: 12958 - RNA, 60 nt, Human
uugaggagaacaugcuacuuagacauggagaaaacgacuucagugucauguacuccacaa

SEQ ID NO: 12959 - RNA, 69 nt, Human
aggcccagggccccggaggagcgggccuguccuccacuuagggucggcucucccaccugccccucuccu

SEQ ID NO: 12960 - RNA, 63 nt, Human
gggucugugucacagugaccucccagagccccaagcucgggccucccacuuaaacacaggccc

SEQ ID NO: 12961 - RNA, 72 nt, Human
agugacuuuauucgacaugguuaguguccuagggaauuaaguuuuuuggggcagaacuagguaccaagcacu

SEQ ID NO: 12962 - RNA, 74 nt, Human
ccuugugaaaguuauaauguaguaggagaugggguaaacaacuaucugauguacauauucaacugucacugagg

SEQ ID NO: 12963 - RNA, 67 nt, Human
cuucucccuggaccagcccgguggcacccuggaucugacccugauccgugcccgccuccaggagaag

SEQ ID NO: 12964 - RNA, 79 nt, Human
gcccaggaugugggccgcauguucaagcaauucaacaaguuaacugaggacaaggcagacgugcaguccaucaucgggu

SEQ ID NO: 12965 - RNA, 112 nt, Human
ggaguggagcugcucacucugccaugugcucccugaccugaaggaggaggauggcagccucagccuggauggugcagacagcacuggcgugguggccaagcucucaccagcc

SEQ ID NO: 12966 - RNA, 61 nt, Human
aggcgggaguuuggggagguccaggaagcugaguucugggcugcagccccacaccucuccu

SEQ ID NO: 12967 - RNA, 73 nt, Human
cggagggcugccgggacgaagaggcuacaucuacacagggcgguguaggggaagcccgucucuucgaccuccg

SEQ ID NO: 12968 - RNA, 105 nt, Human
uccggaagggagaugaauccccgcccaggaggggggaguagggcgggggagaacuuguccuugaccuggucuuuggcgucagggauuuacucccuuaaucccgga

SEQ ID NO: 12969 - RNA, 120 nt, Human
cugaugauauucugaauucucccuauagaaaccaaauagaacuaaaauuuuauaaaucuccccuauaccauaauuuagaguauauuguuugauuuucuucuacuuuucuauuguuguuag

SEQ ID NO: 12970 - RNA, 68 nt, Human
uauauacguguauauguguauauauacauauauacauauauacauauauauacauauacauauauaua

SEQ ID NO: 12971 - RNA, 110 nt, Human
uaucuucuauauauauguauacauauauacauauaaaaauuauauauaccaaaauuuauauauauauaaauuucuucuguguuuuguauacauuauguuaccugaugaua

SEQ ID NO: 12972 - RNA, 77 nt, Human
caagaaucaagcugugaaggagcgagcccagggcguggugcugaaagugcucacaaacuucaagagcagugagauug

SEQ ID NO: 12973 - RNA, 110 nt, Human; identical to SEQ ID NO: 4814

SEQ ID NO: 12974 - RNA, 75 nt, Human; identical to SEQ ID NO: 74

SEQ ID NO: 12975 - RNA, 87 nt, Human; identical to SEQ ID NO: 76

SEQ ID NO: 12976 - RNA, 71 nt, Human; identical to SEQ ID NO: 77

SEQ ID NO: 12977 - RNA, 87 nt, Human
ugguuuuggccaauccuuuaaccgaaaacguucagguuggucucuguaaaaaaacguucgcggauuuuugguuggggcaacaaacca

SEQ ID NO: 12978 - RNA, 64 nt, Human
gaaacaggacaaaggagaauucaugacaugaucaagaaaccccuucuccuaacccccuauguuc

SEQ ID NO: 12979 - RNA, 103 nt, Human
uugagaaggagucucgcucugucacccaggcuggagugcaauggcacgaucucggcucacugcaaccucugccuccuggguucaagcgauucucuugccucag

SEQ ID NO: 12980 - RNA, 84 nt, Human; identical to SEQ ID NO: 286

SEQ ID NO: 12981 - RNA, 89 nt, Human; identical to SEQ ID NO: 288

SEQ ID NO: 12982 - RNA, 61 nt, Human; identical to SEQ ID NO: 776

SEQ ID NO: 12983 - RNA, 131 nt, Human
uuguuuguuuguuuuuuuaaauggagucuuguucugucccccaggcuagagugcaguggugcaaucuuggcucacugcauuccagccugggugacagagugagauucugucucaaauaaauaaauaaauaa

SEQ ID NO: 12984 - RNA, 82 nt, Human
gcuccguggauguucuggaccuguagcguguucccaaaggagagcuuguggaugacaugcgucaugucuggguucugugggu

SEQ ID NO: 12985 - RNA, 94 nt, Human
uacagcggcugcgucucucuguguacuugaccgugauggggcugaggucguagcggaaccagauugcagggaugaugcggcccguguggcugua

SEQ ID NO: 12986 - RNA, 74 nt, Human
caagcaaucccccuguugggguugggaacgggcaagcgcguggcaaagccccccaaagaacaagggaaaaauug

SEQ ID NO: 12987 - RNA, 65 nt, Human
cagauuuugucucuucauuuuggccguuaguauccuaaguggccuugugaucaugaggguuucug

SEQ ID NO: 12988 - RNA, 68 nt, Human
gcuguccugacuuucugcugagcuggcacugcuacuggggcuuccggucuggcuuccaaaaggacugu

SEQ ID NO: 12989 - RNA, 72 nt, Human; identical to SEQ ID NO: 9079

SEQ ID NO: 12990 - RNA, 72 nt, Human; identical to SEQ ID NO: 9079

SEQ ID NO: 12991 - RNA, 60 nt, Human
ggcguuaaaaauugguuucucguguaaauuuuguuaaacccgucaauuuuuaaccuggcc

SEQ ID NO: 12992 - RNA, 66 nt, Human
ggucgcagaggagacaccgccguaguugccgguacaucggggauuucuggcucuuuccucuucgcc

SEQ ID NO: 12993 - RNA, 81 nt, Human
cuuuucucucugcuagauggauguugaugcaccggaggucuuuuagccugcccuugcauggcgccugcuggaggaggagag

SEQ ID NO: 12994 - RNA, 62 nt, Human
uauuguagcauugcugucugcaagggagccccuagccccuggcagacauagcugcuucagug

SEQ ID NO: 12995 - RNA, 63 nt, Human
ggaggguaccggggcacccccagcugcccauggcuggacuugcccuuugacaaggggcccucc

SEQ ID NO: 12996 - RNA, 95 nt, Human
ggccgggcucgguggcucacgccugucauccaacaccuugagaaagccgaggugggcggaucacuugaggucgggaguuugagaccagccuggcc

SEQ ID NO: 12997 - RNA, 67 nt, Human
cugauguuguagaagcauuucucacuguccucaaaaaagggaaaccaggugaaauuuauaacaucgg

SEQ ID NO: 12998 - RNA, 76 nt, Human
gucugaaauggaaaauuggguugauuauguuaaugauagacccaccaaugacaugagauacccaaugccgucagac

SEQ ID NO: 12999 - RNA, 68 nt, Human
cagcugcucaggaucacuguucccagguggggcacacagcucugcauaguacuugauuuugggcucug

SEQ ID NO: 13000 - RNA, 101 nt, Human
auauguauaauauuauaauauacauauaauauauauuauauguauaauauuauaauauacauauaauauauaugauauguauauuaucauauuauacauau

SEQ ID NO: 13001 - RNA, 80 nt, Human
ggcacuuuuguuaaguauuaacuuguacagucacagggucccacaauaggcugucugcaaguugaggagcaaggagagcc

SEQ ID NO: 13002 - RNA, 61 nt, Human
gccgaugugucuacucgaagauucugugaucucacucucaggagaccauugcaucauuggc

SEQ ID NO: 13003 - RNA, 84 nt, Human
cauuuuuuuggcccgcaugaccuaguuucccaggcuauucauaucuacccuguucaacuacuggcuucgggaaugaaggaagug

SEQ ID NO: 13004 - RNA, 62 nt, Human
cuaugcaguacaaagugguuguccccaaaauuggaaacauauuagaucuuuguacagcauag

SEQ ID NO: 13005 - RNA, 79 nt, Human
gauccuuuuaguuacuugacacuuccauugcccaugaaaaaagaacgcaccuuggaaguuuacuuaguuagaauggauc

SEQ ID NO: 13006 - RNA, 111 nt, Human
gaugauaguuacugauauauacaaucauagauuucacagaauauucgcuauggaugaaaaccuuaguaguauuauggaacgggaugauauuuaugugucgaaauuaacauc

SEQ ID NO: 13007 - RNA, 88 nt, Human
gucagccuaagagaaaaauucagacacucgaguuauacccaccauacauggucaucacuuacggucagcccuuucuuaugcgcuguac

SEQ ID NO: 13008 - RNA, 63 nt, Human
ccaaggacagcagcgggcagcauguggacgugagccccaccagccagcgccugcagcuccugg

SEQ ID NO: 13009 - RNA, 63 nt, Human
ccuuuugacaagugggauggcaaggaccuggaggaccugcagauccucaucaaggucaaaggg

SEQ ID NO: 13010 - RNA, 68 nt, Human
ggugccaucaacauugaaaacggcaaggccaacuccgugcgcaaugccgucacucaggaguuuggacc

SEQ ID NO: 13011 - RNA, 60 nt, Human
gucccugacacugcccgcuacuacaagaaacauggcaucagguggguggugaucggagac

SEQ ID NO: 13012 - RNA, 69 nt, Human; identical to SEQ ID NO: 9578

SEQ ID NO: 13013 - RNA, 61 nt, Human; identical to SEQ ID NO: 347

SEQ ID NO: 13014 - RNA, 61 nt, Human; identical to SEQ ID NO: 9580

SEQ ID NO: 13015 - RNA, 77 nt, Human
ccuaggccuggagccccuggcacccagcucagcucccacccugggcccugggugcugcuggcuuuauuuggcuuagg

SEQ ID NO: 13016 - RNA, 76 nt, Human
gccccaggagggccugcccaucucagcccucgccacguccuggugcucauugguacggcgggguuuccugggcugc

SEQ ID NO: 13017 - RNA, 69 nt, Human; identical to SEQ ID NO: 9578

SEQ ID NO: 13018 - RNA, 61 nt, Human; identical to SEQ ID NO: 347

SEQ ID NO: 13019 - RNA, 61 nt, Human; identical to SEQ ID NO: 9580

SEQ ID NO: 13020 - RNA, 64 nt, Human
guagccgcuggccggcgcgcagcaggagcguccguggccacugaacugcgcugccagugcuugc

SEQ ID NO: 13021 - RNA, 62 nt, Human
uaauauuuuagguguaaaauaauuaaggguaugauuaacucuaccugcacacuguccuauua

SEQ ID NO: 13022 - RNA, 65 nt, Human
acacugguuuuccaaucggcgucuaaagaccacguuccuugccuuucgauuggcaacaccggugu

SEQ ID NO: 13023 - RNA, 69 nt, Human
cgguaagcacggcacuagcucacgauggccaguagccaacuggucccccuugaaacggcugucuugccg

SEQ ID NO: 13024 - RNA, 67 nt, Human
auugucuuuggaagcucaaggaucaaagugacguagaaacuguugcagugaagccaacagagacaau

SEQ ID NO: 13025 - RNA, 71 nt, Human
ccggaucgaaguaacacaggaaucucagcgggaauuugagaagaauguaauccaagugaugucgauacugg

SEQ ID NO: 13026 - RNA, 62 nt, Human
guuaucugcuuccuacugcuguauggcccuuugccuaacacucacaacaaaagcuaaguaau

SEQ ID NO: 13027 - RNA, 69 nt, Human
cagacugcuucgggcugccgaggaccuucugggcccccacauuaaugaggcagccaccuggcgagucug

SEQ ID NO: 13028 - RNA, 61 nt, Human
gaggaguucaacgaucuccuggaccuggacuuuauucucuccaauucgcugagccauccuc

SEQ ID NO: 13029 - RNA, 60 nt, Human
uccuccuauggcagggaguccgcaucccccauaccgacggaccccuucaaccugggcgga

SEQ ID NO: 13030 - RNA, 89 nt, Human
augauccaucuguguaguuuccugaacagucagcgauuccagguuuuaacauaguuuguaaacuuuucaguuucuacacacuuuaucau

SEQ ID NO: 13031 - RNA, 62 nt, Human
caucgucaccaaggcacgggggaagaguggaccacucuucaacuuugauguucaugacgaug

SEQ ID NO: 13032 - RNA, 68 nt, Human
cgguugcucagugacgccacuguggagaaggaugagucccaugcaggcaagguggugcugaggagcug

SEQ ID NO: 13033 - RNA, 70 nt, Human
gaaccuccgucacauggcccuggauaugggcaaugagaucgauacacagaaucgccagaucgacagguuc

SEQ ID NO: 13034 - RNA, 75 nt, Human
gcugggaagugguuaagugugcccacccguguucuccuccaaaugcuugucgggcaagauuagcuccuuucaugc

SEQ ID NO: 13035 - RNA, 91 nt, Human
cucuuugaaacacugccaugccuacguccaucagcuacuaaaugauucgcaaauguacugacugcacuuauauaugcaguggccuaccgag

SEQ ID NO: 13036 - RNA, 61 nt, Human
ggggaugaugccucuacucucuaaucuacuucagaucuuggcacugagucacaucauuccc

SEQ ID NO: 13037 - RNA, 61 nt, Human
guuuuguucauucauuuggcccaaaaucacguguaggauuggggauguggauauuuaagac

SEQ ID NO: 13038 - RNA, 90 nt, Human
ugggcggccggacggucguggggcaggguugggggucugugcucagcugauaacugccaugcacuguacugcacacgucccuagagccua

SEQ ID NO: 13039 - RNA, 78 nt, Human
auccuggcuggaauucguguagugcuucacguggcaugucacggacuugccgucugggcacuguguggccggcagggu

SEQ ID NO: 13040 - RNA, 63 nt, Human
ggccggucagugugcacgugagguucgcuucugaaccuaagagcagguccucgagggccgguc

SEQ ID NO: 13041 - RNA, 66 nt, Human
cuacccccaccaccacuuccugagaugagaugucuagguauaggaggauguggcuguugggguuag

SEQ ID NO: 13042 - RNA, 65 nt, Human
cccgaaacacggcacugggggaacuggagccugcugaccaggcuguccuccuagcccugucaggg

SEQ ID NO: 13043 - RNA, 61 nt, Human
gcggcuggggcccucuuucccgaugggcgcaguuuguuucggggcuccgggcccuagaggc

SEQ ID NO: 13044 - RNA, 71 nt, Human
uuguuuguuuuaacaugguaggguucugaccucaaauauuuguuaggucugcuacucaaaugaacuuacag

SEQ ID NO: 13045 - RNA, 67 nt, Human
gcuagccaggaacauggacugaaguauccagcgcucauugggaauuuaguuaagugccagguggagc

SEQ ID NO: 13046 - RNA, 67 nt, Human
cguuaacacugcaaccaaucugggaaaagccccccagcugccacagaacacuugacagugcuaaucg

SEQ ID NO: 13047 - RNA, 90 nt, Human
cgaggcugguguugugaagauccuggugucgcaugggccgcgcccgccguguuaccgguauuguaagaacaagccguacccaaagucucg

SEQ ID NO: 13048 - RNA, 83 nt, Human
ggggucaaguacaucccagucguggcccucuggacaaguggcgggccccugcacuccaugagggcuucccaaugugcugcccc

SEQ ID NO: 13049 - RNA, 66 nt, Human; identical to SEQ ID NO: 5275

SEQ ID NO: 13050 - RNA, 60 nt, Human
gugcuggggcugacaggcuccaaacaggcaugcgaggugccuuuggaaagccccaggcac

SEQ ID NO: 13051 - RNA, 68 nt, Human
gagguuuagucaaaaagaccaaagcccaugucaucaucagacuccucggauucuucuuucuuugcuuc

SEQ ID NO: 13052 - RNA, 71 nt, Human
gcaguggagggggcaggaccuccucuggugcagcaccacuguaggagcagguccaccggccccuacauugc

SEQ ID NO: 13053 - RNA, 70 nt, Human; identical to SEQ ID NO: 3190

SEQ ID NO: 13054 - RNA, 121 nt, Human
caagaggaguugcacccuuccagacuugcggaugaguagcuugccaaccugacccucugucaggucagccaggguacaagcauucucugccaauuuggcuucucggucuuucuccugcuug

SEQ ID NO: 13055 - RNA, 67 nt, Human
ccuguccguccucgcccugcaccucugucuugauaggcuugauguccuggguggguggcuggccagg

SEQ ID NO: 13056 - RNA, 107 nt, Human
ggcuggccagggagggugucuggcagcugcagaaacagcaguuccucuuccuuggugaggcucagcucccucagcagcucugccacagauacauccuucgggaggcc

SEQ ID NO: 13057 - RNA, 82 nt, Human
augacccucacucgcgccaguggaggugacaucccuaggaaagaaacggauuugucuccagcugacgggcuggaggguucau

SEQ ID NO: 13058 - RNA, 91 nt, Human
gggguagauuuucgcugcaguguuccccgagccuguuagacgcagcgcgccgggagacugagagaggaaaggauagaggaagugcugcccu

SEQ ID NO: 13059 - RNA, 65 nt, Human
gauguggaugguggccucacccagauugacaaguaccuguacuccucugaggacuacauuaaguc

SEQ ID NO: 13060 - RNA, 131 nt, Human; identical to SEQ ID NO: 1788

SEQ ID NO: 13061 - RNA, 80 nt, Human
gccgacccccaagaggccauuaacuguuugaugcgagcaaucgagaucuacacagacaugggccgauucacgauugcggc

SEQ ID NO: 13062 - RNA, 77 nt, Human
gugaagaacucgcaguccuucuucucuggccucuuuggaggcucauccaaaauagaggaagcaugcgaaaucuacgc

SEQ ID NO: 13063 - RNA, 83 nt, Human
gggcuuuggccugaauucaggaagugguccccugauuccaaacacaggcuggguccgggggacgauugggauggccagaaucc

SEQ ID NO: 13064 - RNA, 72 nt, Human
ggagcagggccugacugcgcaggauucacagauuaaucucuugagguccuggaugccucaucccuuaguuuc

SEQ ID NO: 13065 - RNA, 62 nt, Human
gccgccccgagguuaauccacuuacacagaccacgugugaguuacagccgggguauucaggc

SEQ ID NO: 13066 - RNA, 67 nt, Human
accgcgggccgccgcuccugcucauagcgcaguuccugcuggcgccucagcuccucgcgcucacggu

SEQ ID NO: 13067 - RNA, 62 nt, Human
ggcggcccgcuuggcuuccggccaauaggcaucaucucgccgguccaggucguagggccgcc

SEQ ID NO: 13068 - RNA, 79 nt, Human; identical to SEQ ID NO: 10269

SEQ ID NO: 13069 - RNA, 114 nt, Human
uagagcaagugcagccauaagugguaagaaaugaaugaguauggcuguguuccaauuacaauuauuauggauggauauacucguauuuccuaugucagauggaaucuugcucug

SEQ ID NO: 13070 - RNA, 62 nt, Human
ugcccaggcuggagugcagugacgccaucuugauucacugcaaccuccgccucccaggguca

SEQ ID NO: 13071 - RNA, 64 nt, Human; identical to SEQ ID NO: 287

SEQ ID NO: 13072 - RNA, 75 nt, Human
augaaucagucacuugcacaauuaauccucuuggcaucauacaaacuggguuuuaauggcaaaugaugacaucau

SEQ ID NO: 13073 - RNA, 76 nt, Human
cuagucaccugggacccaggccuuggcugcaggaacagacuuuuuccaucggcuuuuccagggcccaggugaagag

SEQ ID NO: 13074 - RNA, 80 nt, Human; identical to SEQ ID NO: 174

SEQ ID NO: 13075 - RNA, 64 nt, Human; identical to SEQ ID NO: 175

SEQ ID NO: 13076 - RNA, 72 nt, Human
auuuaaucuuuaacaagcuuaugaaguuaguauuuuuauuuuauuuagacgaggcauagucaaggauuagau

SEQ ID NO: 13077 - RNA, 82 nt, Human
guuuugauagucugaggcugggccucugccuuugugaaguugaagagccaggagcuacucagcaacaauugauuuuugaaac

SEQ ID NO: 13078 - RNA, 60 nt, Human; identical to SEQ ID NO: 9570

SEQ ID NO: 13079 - RNA, 68 nt, Human
ggcggagggaccaagcugaccguccuaagucagcccaaggcugcccccucggucacucucuucccgcc

SEQ ID NO: 13080 - RNA, 83 nt, Human
caguauugggauaauuggcaacaugugaauaaggucugaauauuagauuguaauucuguaucaauguuaauuuccugguuuug

SEQ ID NO: 13081 - RNA, 96 nt, Human
ccuccccucaccccugaggaccaaauagggguggcagagccaaacccucgcugggcgucugugaccaaagccuaagaagccagggguggggccggg

SEQ ID NO: 13082 - RNA, 68 nt, Human
gagguguacugugccguuccccgcuguuugcugccuguggcacuggaccggggggcuggccgacucuc

SEQ ID NO: 13083 - RNA, 87 nt, Human
ggaguuguauaugucaagucauuuccucaguccaggaaggauauuuugaaagauuggguagaaaugugccguggugugcaacaaucc

SEQ ID NO: 13084 - RNA, 60 nt, Human
uucugaugaacugcacuacuuggaggucuaccugacagaugaguuugcuaaaggaaggaa

SEQ ID NO: 13085 - RNA, 62 nt, Human
uuggucugcuagccuagagguuucaguuccaaagggaggaaugcuuccggcaggagacacaa

SEQ ID NO: 13086 - RNA, 108 nt, Human
acagauguaggcagaagaccaggaguagggagagcugagacuagggauaaacaaaggggcaggaauccuggagagaagccccgugcuccacucacugacugcgucugu

SEQ ID NO: 13087 - RNA, 130 nt, Human
ggaacucagauaaucaucccuuuccagaaaguucugagcagccugggagcagcagggaaggagaagucagcucuauuccaggggcuccacagaacuaaugagguuggggagggaagcuuaaaagauagcc

SEQ ID NO: 13088 - RNA, 62 nt, Human
accccagaacauuuaagguguaugagaacucgggacgucaaauauguagaaaugaagagggu

SEQ ID NO: 13089 - RNA, 101 nt, Human
auagacuacgaucagagcugccaucugugguuuuccagggugacgcaagagaacaagcuugugugcuuuuuggacaccauaaaggaguugauacagucugu

SEQ ID NO: 13090 - RNA, 65 nt, Human
ggauuauacuccgagggggacaggggguugaaaacgguucuguccaaacagggggcauauaaucc

SEQ ID NO: 13091 - RNA, 78 nt, Human
cuggggcguuuauggcaagucacuuugacagacauuauuguggcaaauguugucugacuuacuguuucaacaaaccag

SEQ ID NO: 13092 - RNA, 65 nt, Human; identical to SEQ ID NO: 247

SEQ ID NO: 13093 - RNA, 80 nt, Human; identical to SEQ ID NO: 100

SEQ ID NO: 13094 - RNA, 80 nt, Human
caacgucuugauuaacuugcuuaaggaaugucacaaaaaucacaacauucugaaauuuuuugguuauuguaaugauguug

SEQ ID NO: 13095 - RNA, 67 nt, Human
cucccaccucagccuccugaguagcuaggacgacaguaccguagaaaacaggaccaagagcagggag

SEQ ID NO: 13096 - RNA, 84 nt, Human
gcuacccgccuucgucuccgaguuugcgacucgcggaccggguccccggcgcgaagaggcuggacucggauucguugccugagc

SEQ ID NO: 13097 - RNA, 79 nt, Human; identical to SEQ ID NO: 5161

SEQ ID NO: 13098 - RNA, 61 nt, Human
ccugucggcaaugccaggguacaugguggugccgccagacagcacuguguuggcguacagg

SEQ ID NO: 13099 - RNA, 70 nt, Human; identical to SEQ ID NO: 3612

SEQ ID NO: 13100 - RNA, 74 nt, Human
guagcugcuagaggccuuugcuagcugcuacagguagguccacacugucgcaggcugcucugucucuuagcccc

SEQ ID NO: 13101 - RNA, 73 nt, Human
agauagggcuuuccccauccuuuugcuuuuuuuaggcaacccuuucacaaaaccagggaaggggaaccugucu

SEQ ID NO: 13102 - RNA, 75 nt, Human
ucaguuaaaaaagaagaagaagaaauggcaaagagaaagguuuuucaaauuucuuucuuuuuuaauuuagauuga

SEQ ID NO: 13103 - RNA, 80 nt, Human
uuucaauuuuuauuuuggguuucuuacaaagguugacauuuuccauaacagguguaagaguguugaaaaaaaaauucaaa

SEQ ID NO: 13104 - RNA, 78 nt, Human
gccuugaaccugagggggauuccacagcuguuuggaggcaucugcuguugauacugcuggaauccagaguggugaggc

SEQ ID NO: 13105 - RNA, 85 nt, Human
guauaaaaccuccuuuauggguuuguugugaacacagugcagggcacauuuauaauaagagcucagucaaugguagguuucaugc

SEQ ID NO: 13106 - RNA, 87 nt, Human; identical to SEQ ID NO: 2862

SEQ ID NO: 13107 - RNA, 108 nt, Human; identical to SEQ ID NO: 7745

SEQ ID NO: 13108 - RNA, 64 nt, Human
guaauauuugucaugauaauuuugugugacaucaucagagaaaauguuagacguuaaguguugc

SEQ ID NO: 13109 - RNA, 76 nt, Human; identical to SEQ ID NO: 7446

SEQ ID NO: 13110 - RNA, 61 nt, Human
ccuagaagucugcggucugaggcucuuuggguucagacacacuguucuaggcuucuguagg

SEQ ID NO: 13111 - RNA, 62 nt, Human; identical to SEQ ID NO: 4127

SEQ ID NO: 13112 - RNA, 64 nt, Human
agccucccaaagugcugggauuacaggcgugagccacugugcccagcuauuuuuuuggagggcu

SEQ ID NO: 13113 - RNA, 69 nt, Human; identical to SEQ ID NO: 5449

SEQ ID NO: 13114 - RNA, 68 nt, Human
gaccagacuuuuccagaagugccggacgucgggcagcgucuauaucaccuugaagaaguaugacgguc

SEQ ID NO: 13115 - RNA, 63 nt, Human
gggaaaaggguaugaacggcccuggccauggguuccgaccauuuugucagggaaacccggccc

SEQ ID NO: 13116 - RNA, 78 nt, Human
gacacccccccuaagauggcuaucucuuugcucccaaaccacgugugaugaggcaggaugggcagcucaggugguguc

SEQ ID NO: 13117 - RNA, 70 nt, Human
uuacugggcaacuucauacugccagagggguugggaccagcagcuccacuccccacuguaggccaaguag

SEQ ID NO: 13118 - RNA, 73 nt, Human
cuguuuuaugauucuuaauaguuacuugguuuaaaucacauuugauacuauccuucugaaaagucugagacag

SEQ ID NO: 13119 - RNA, 66 nt, Human
guggagacgggguuucaccauguuggccaggauggucucaaucuccugacccugcgaucugcccac

SEQ ID NO: 13120 - RNA, 63 nt, Human; identical to SEQ ID NO: 527

SEQ ID NO: 13121 - RNA, 72 nt, Human
gcuuaccaggaagcauuugaaauuaguaagaaagaaaauugcagcuacacacccaauucgucuuggucuggc

SEQ ID NO: 13122 - RNA, 90 nt, Human; identical to SEQ ID NO: 5735

SEQ ID NO: 13123 - RNA, 74 nt, Human
auaacaugauuuaagguugaaauggcuuuagaaucauuuggguuugaggguguguuauuuugagucaugaaugu

SEQ ID NO: 13124 - RNA, 61 nt, Human
ucauaaccaaauaaaguuuuuugaaggccauggcuuuucacacaguuauuuuauuuuauga

SEQ ID NO: 13125 - RNA, 102 nt, Human; identical to SEQ ID NO: 2701

SEQ ID NO: 13126 - RNA, 90 nt, Human; identical to SEQ ID NO: 2702

SEQ ID NO: 13127 - RNA, 72 nt, Human
gcagagaaggagaucggcuuguggguucacccugaggaacugguagauuacacgagcugugcucagaacugc

SEQ ID NO: 13128 - RNA, 70 nt, Human
gugggugaacacuggaaggcccccggcugaagauccaccaacgacaucaagaaccuuccagcgcacucac

SEQ ID NO: 13129 - RNA, 67 nt, Human; identical to SEQ ID NO: 1146

SEQ ID NO: 13130 - RNA, 61 nt, Human
cugcaaguuugacuggaccggucccaacugcgagcggaagaaaccaccagugauucggcag

SEQ ID NO: 13131 - RNA, 65 nt, Human
gaaucacauaaaauugugugugcacguucauguacacaugugcacacauguaaccucugugauuc

SEQ ID NO: 13132 - RNA, 66 nt, Human
cucugagccuuauagauuacauauccuuagcuaaaaacugcugcauuuggagucuaaggaaaggag

SEQ ID NO: 13133 - RNA, 64 nt, Human
gaugcaauaguuagagaaaaccagguguaauuucagaauucacugucuccauuuguauugcauu

SEQ ID NO: 13134 - RNA, 76 nt, Human
ugugcagaagacuccuuggcuguguggaggauucuuguaauuggucugaguuuucugugucugagauuucuguaua

SEQ ID NO: 13135 - RNA, 69 nt, Human
agcagucuguacuuugugauaaguaagagcagaagagcagcauuuacauccagccuaacaacagacucu

SEQ ID NO: 13136 - RNA, 60 nt, Human
cgguaacuuuauuacacuggaaaaccauuaauauaggaaguuuuccacaaauacuuacug

SEQ ID NO: 13137 - RNA, 81 nt, Human
uaguucuauuuauauuuuugcaaaugucaggaucucauucuuuuuuaugccugaacaguacugcauuguguauauggacua

SEQ ID NO: 13138 - RNA, 62 nt, Human
uuuuacucucuaucuccaugaguucaauuguuuuaauuuuuggcuccuacaaaugagugaaa

SEQ ID NO: 13139 - RNA, 81 nt, Human; identical to SEQ ID NO: 13137

SEQ ID NO: 13140 - RNA, 64 nt, Human
uuuuacucucuaucuccaugagcuucaaguugucuuaauuuuuggcuccuacaaaugagugaaa

SEQ ID NO: 13141 - RNA, 60 nt, Human
ggauauggggugcaagucgaguucgggaccacgcuuggggaagugcgccagaaacuaucc

SEQ ID NO: 13142 - RNA, 65 nt, Human
cuaugagucuuaugagaagaccacccggaccucagauguggguggcuauuacuaugagaagauag

SEQ ID NO: 13143 - RNA, 62 nt, Human
gggaagacaccuggugacuuuagcuaugccuaucaaaagccugaggaaacaaccaggucccc

SEQ ID NO: 13144 - RNA, 85 nt, Human
guggcuacuccuaugagaccauugggaaaacuaccaagaccccugaagauggugacuauuccuaugaaauuauugagaagaccac

SEQ ID NO: 13145 - RNA, 70 nt, Human
uccccacgugccuguggcaaggucuguggugaagcagagauuaucaaggcuuuccagaggcagaggagga

SEQ ID NO: 13146 - RNA, 63 nt, Human
ugaggcagucacagcuugaagugugacgcuuagugugucacugauguuggagcugggcucuca

SEQ ID NO: 13147 - RNA, 69 nt, Human
ccaugaggcugauuccuuccuucuucucuucccuccuucguucauucaugggaaagucagugcguaugg

SEQ ID NO: 13148 - RNA, 63 nt, Human
aguuugcagccaucggccccacuacggcucgcgcgcuggccgcccagggccuuccuguaagcu

SEQ ID NO: 13149 - RNA, 65 nt, Human
ccagccccauggcugcugcugagucagccaccuagcgcuggccccaugcagccucccugggcugg

SEQ ID NO: 13150 - RNA, 64 nt, Human
ccucugguuucuugggagucgggcagggaccugcaggaggcuuucccagcaggugcacagaagg

SEQ ID NO: 13151 - RNA, 72 nt, Human
aacgagaacggguauagaagaagagagaagacuugugcgauaguucacucuuucuagaagaggacucucguu

SEQ ID NO: 13152 - RNA, 63 nt, Human
uggcugaugacagaggcccuagacgugguccugaggaaugauagguucucucgucgugaggca

SEQ ID NO: 13153 - RNA, 84 nt, Human
aauauaucaugccacucuccccuggccugcaagguuucaacugaaaaguguccugccagaaguauuggagcuccaucguauauu

SEQ ID NO: 13154 - RNA, 84 nt, Human
caaacuggaagaaucacauuaccugacuuccuuuagcauuucuuguagaacacgucugguguggauaaaaucacucagcuuuug

SEQ ID NO: 13155 - RNA, 91 nt, Human
ggcugaggggcuccaguuugcaaccucuauaagugaaucucaacauucuuucauaauagguaaagguugucucaacuacagcuauccagcc

SEQ ID NO: 13156 - RNA, 82 nt, Human
ggugcugggucauaauaugauggugacucugauuuccuguggaucugugaaguucaguauuauacuuauuuucuccaguacc

SEQ ID NO: 13157 - RNA, 77 nt, Human; identical to SEQ ID NO: 2550

SEQ ID NO: 13158 - RNA, 68 nt, Human; identical to SEQ ID NO: 2551

SEQ ID NO: 13159 - RNA, 71 nt, Human; identical to SEQ ID NO: 2552

SEQ ID NO: 13160 - RNA, 100 nt, Human
accgagcuccgucgucucguuuccggcggucgcgcgcucuuuucucgggacgggagaggccguguagcgucgccguuacuccgaggagauaccagucggu

SEQ ID NO: 13161 - RNA, 81 nt, Human
cccugcccccagccgucuuucuggggcuugcgcgcaaaaucuacaagcggagaaagugaccuagagauugcaagggcgggg

SEQ ID NO: 13162 - RNA, 92 nt, Human
gugucugcaacgggccacuccagaacaguaccagauccugaaggaaaauuacgggcagaaggaggcugagaaaguggcccgggugaaggcgc

SEQ ID NO: 13163 - RNA, 98 nt, Human
ugccaagaagauccugcuggagaugggggaguucuuucagauucaggaugauuaccuugaccucuuuggggaccccagugugaccggcaaaauuggca

SEQ ID NO: 13164 - RNA, 115 nt, Human
gggcgcgcuggagcugcugcaggcggcggccggcucgggcuuggcagccuacgcggugugggcgcugcugcuccagcccggcuuccggcgcgugccgcugcggcugcaggugccc

SEQ ID NO: 13165 - RNA, 65 nt, Human
ggugaugacgguaagagcaagugucccaugaaugugauuuccuggguucucacugucuuugcacc

SEQ ID NO: 13166 - RNA, 81 nt, Human
gugcuguuagcccgcuccuuggaaguuagacauaugaagaauuggaucagagauuucuaugacagugcgggaaagcagcac

SEQ ID NO: 13167 - RNA, 75 nt, Human
gagguaucucugcauuagccagauuggacauauguaaagggacaucaguauaucuggaucaucagauugugcuuc

SEQ ID NO: 13168 - RNA, 76 nt, Human
uugcugacgcagcaucucagggcucaaagcucacacaacaagccaauauacagagagaaugcucgcggcuuagcgg

SEQ ID NO: 13169 - RNA, 63 nt, Human
gcuggugccugccuugcugcugugagugccaauggugcccaccuugcugcugugagugccagu

SEQ ID NO: 13170 - RNA, 78 nt, Human
uuauuuacaagagcagggugccuuggaagcagcccacggcuguuaguucauagacccugucugcucugaaguagauga

SEQ ID NO: 13171 - RNA, 62 nt, Human
uuccacaccuucacaaucccaucucuagaagcaguuacgaugaagcccuguguggucuggaa

SEQ ID NO: 13172 - RNA, 74 nt, Human
ccggacaagccuaucacccaguauccacaugcgguggggaagaacacccuccucauugcugggcuccaggccgg

SEQ ID NO: 13173 - RNA, 63 nt, Human
guugggaaaucaucucuaaaucccauccucuuucgagguguugggaugguggccgauccugau

SEQ ID NO: 13174 - RNA, 83 nt, Human
gccgcgcccccuuggcgccggguguccugccgcugcuugcgcagcggcccuuguuucuucuuacccguuguuaggggcgcagc

SEQ ID NO: 13175 - RNA, 78 nt, Human
guuuagagaguucggcaugcuuacaggcaguuauuguucuagguguuagcuuucuggguguacggagcagcucuaagc

SEQ ID NO: 13176 - RNA, 85 nt, Human; identical to SEQ ID NO: 5538

SEQ ID NO: 13177 - RNA, 72 nt, Human
uaguaaagaauagaaaugcagcuacacacccaauucgucuuggucuggccuaaaauuucucagucuuuacua

SEQ ID NO: 13178 - RNA, 71 nt, Human
uacuguaccuuuucuguguuuagauacacaaacacuuuguguuacaauugucuacaguauucgguacagua

SEQ ID NO: 13179 - RNA, 70 nt, Human
caugcaggcgagcuggucaucgccucgccggagggccagcuggaggugcagacggucaucgucuagcaug

SEQ ID NO: 13180 - RNA, 70 nt, Human
gccugacagagcagguggccaugacgcuggccucggccaucagcgagggcacugugcuugccgcccgggc

SEQ ID NO: 13181 - RNA, 76 nt, Human
ucugcgggguccuggccgggcagggacagggcagaggacucugagcgccccacccaugccugccuggccugguaga

SEQ ID NO: 13182 - RNA, 95 nt, Human
caggggugagcgcucagagcaggaaggggaugaugggcaugcgcaggggcggguagucccggaacuccuucagguagcugcggugcuugccccug

SEQ ID NO: 13183 - RNA, 87 nt, Human
gaggcaacacagcaguuaagaauugagauaaagugccagucugccaguuagaauccugugucucacuauuuuaacacucugugccuc

SEQ ID NO: 13184 - RNA, 79 nt, Human
gccaaaggauucccagcucaagucaaagugaaauuuaaaacugcaacaucaaaaucaucuugaguuacuccuuuaaggu

SEQ ID NO: 13185 - RNA, 64 nt, Human
gcugcugccguaauagcucauucuuugcugugcccuuagggauccaggugaguuuuguaguagu

SEQ ID NO: 13186 - RNA, 60 nt, Human
gucacccgggagcggagguugcgugagcaggauugugcgacugacuccagccugggugac

SEQ ID NO: 13187 - RNA, 85 nt, Human; identical to SEQ ID NO: 2661

SEQ ID NO: 13188 - RNA, 89 nt, Human
uuagcaugaagucccucuggaucuugagcugguuuauggacucaaucgucucauggaucuuacuguccagagcacugaucuccugcugg

SEQ ID NO: 13189 - RNA, 63 nt, Human
ggcagugcuggguccuuuccaccauggcaccuaagaaagcaaagaagagagccgggggcugcc

SEQ ID NO: 13190 - RNA, 83 nt, Human
ugggcagcccuggggggacaaggggcaccucgaguacagaaacuacaacaggaggaacccaucccgaagagccaggguuacca

SEQ ID NO: 13191 - RNA, 81 nt, Human
uauguguaauuauuuuggauuucucagaaguugaaugcuacguacauacuuuuaauccccacaaaguauaauaaauacaug

SEQ ID NO: 13192 - RNA, 96 nt, Human
ucuugccucuuauuuacauucuccaaacucacuauccauucagcuuguguuagaaggaaugcuaaaaguauggggaguuguaguaugggaccaaga

SEQ ID NO: 13193 - RNA, 69 nt, Human
ucugggucucuaaaagccacccucaguuuauaccaacugaucaggaaauagguggcgacagggccuuga

SEQ ID NO: 13194 - RNA, 85 nt, Human
cgagcggcgcgaggcccggguugagcgggaggcgcgaucgguccggucagguggcuccccgcggcgggccgggcccgacgucucg

SEQ ID NO: 13195 - RNA, 61 nt, Human
auguguguucuuuagauguuacaaacauuaauguuucuucuaucauuuuuguuacauauau

SEQ ID NO: 13196 - RNA, 81 nt, Human
ccggguuauggucggguuucuauugggaaugcucuuugugcuuuugggcaucugaauggaagcuuuacauagaaccuuagg

SEQ ID NO: 13197 - RNA, 73 nt, Human
gggaucuuguuccacugauuacucucucugacgaguccaucaccugcaacuuaaaugaacaagcuuacauccc

SEQ ID NO: 13198 - RNA, 74 nt, Human
ugcuuuagauuagacugucaugucucagugucuaucuguacuauauuacuuugauauucagagaaucuaaagca

SEQ ID NO: 13199 - RNA, 81 nt, Human
uugcuuaaaacuguacucuuuugcaaauuaacaauuuuaucacugauucagaguuaaaaagaagacuaacuuuucaagcaa

SEQ ID NO: 13200 - RNA, 61 nt, Human
cuuauccagagcuuuguuugaguucucauagucaaugagggcuuuggugcgucuguauaag

SEQ ID NO: 13201 - RNA, 62 nt, Human
acaucgauacagugucacgcucgugagugacaggcggagcgcgaggaugaggcgaaugaugu

SEQ ID NO: 13202 - RNA, 63 nt, Human
gcgcggggcggcgaggggggcggagggcaggcagacgccaacggacacgcaaugcgacgcagc

SEQ ID NO: 13203 - RNA, 64 nt, Human
gcucuauuuguauuacccagaugacugaagcuuaagagaaggcagggaaguauacaagcagagc

SEQ ID NO: 13204 - RNA, 67 nt, Human
cuguaaugaacaaggaauauucaaaaucauaauaauaauggguaaacuuugccuggagcguggacag

SEQ ID NO: 13205 - RNA, 91 nt, Human
gugauuuuuuuggucuuauuauguauuuccugaaauaauuaacuuccauauaaguuguuuuagcuaaauaauaagcacuuuaauugagcgc

SEQ ID NO: 13206 - RNA, 64 nt, Human
cuugcgcuuacuuuggagccuucaucaggguuuggugaaaaaggcgguauauaagcugagcaag

SEQ ID NO: 13207 - RNA, 113 nt, Human
aaagacaaacugcuguggccauuguguguaacuuauucucaaaagaacuuuuguuaguuaagauuaguguuuuuuaagaaugagaauaugaaaauugucacaguuuucucuuu

SEQ ID NO: 13208 - RNA, 64 nt, Human
guacauagaaauaaucauuugcacuaagcaugguacuagagcagaagagcaguuuuaaauguau

SEQ ID NO: 13209 - RNA, 74 nt, Human
ugcuuagucuaacucaaaagauccuuuuucauuuguuaccaaaaauguauuaggucccuguugaaggcuaggca

SEQ ID NO: 13210 - RNA, 76 nt, Human
uugaguucauaaucuggucaugugggaauugcuaucuuugugauuuugauuauuucuuccagauuauuuuauucaa

SEQ ID NO: 13211 - RNA, 119 nt, Human
uuuauggcuuagaguccuccugucuucccuuuucaccccucuagucccuccuccguccauuucuugaagggaacuaugagugugauagaagguggaguggggauucccuguggccugaa

SEQ ID NO: 13212 - RNA, 74 nt, Human
ucagugucagucugcuuugcaaucuuuacuuaaguccuagguaaccauuuugucaucuagcaagcuugccuuga

SEQ ID NO: 13213 - RNA, 73 nt, Human
uccauaaucugcuaguuuugcauguacuuauaugaacaacagugcaguaaguugaaaacucaguaucuaugga

SEQ ID NO: 13214 - RNA, 88 nt, Human
uguauugcuauaugggugccaagauugaauaugaagaacccgaguguuuguaguauuauaguuuuaagcaaaucuguguggugauaca

SEQ ID NO: 13215 - RNA, 62 nt, Human
ggugccacagugaauaaaagagaaaguagacagcuuuugcuggaagauucaacuaaagugcc

SEQ ID NO: 13216 - RNA, 94 nt, Human
gugggacaaauauuaacaaagcaugauuuaaauauauauauauuuaaugugugauauguuuguauauauauuuaaacacaugcaauuguucuac

SEQ ID NO: 13217 - RNA, 80 nt, Human
uuucuggaccaugaaagugucaccaaauucaaagaacauuucugaauguacauccagugacaucuguuaugcaaaagagg

SEQ ID NO: 13218 - RNA, 86 nt, Human; identical to SEQ ID NO: 8924

SEQ ID NO: 13219 - RNA, 78 nt, Human; identical to SEQ ID NO: 7184

SEQ ID NO: 13220 - RNA, 63 nt, Human
caugccuuacgaaccaugccuuccucaguauccacacauaaacgggcaguguuuuaaaacaug

SEQ ID NO: 13221 - RNA, 84 nt, Human
auugauuucauguaaucuuugauguacuucuuguaggcuucuuuugugaaacuuguuucccugcagagaugguuccaugacaau

SEQ ID NO: 13222 - RNA, 65 nt, Human
gauuaccuuaacgucagaauucccuaauauuaugaaggaauuagaugaaucaaggcuaggugauu

SEQ ID NO: 13223 - RNA, 69 nt, Human
gucacugcuagcugucaccauugcccuggucccaccagaccagccugagguccagcuguccagcaugac

SEQ ID NO: 13224 - RNA, 73 nt, Human
ggagccugagagguggaggaguucugaucccccguuacuuccuagcauuuucuccucuugccuuaaaaguucc

SEQ ID NO: 13225 - RNA, 60 nt, Human; identical to SEQ ID NO: 1551

SEQ ID NO: 13226 - RNA, 79 nt, Human; identical to SEQ ID NO: 1810

SEQ ID NO: 13227 - RNA, 64 nt, Human
ucgucuuuaaacccugcguggcaaucccugacgcaccgccgugaugcccaggaagacagggcga

SEQ ID NO: 13228 - RNA, 66 nt, Human
ccagcagccgagaagaggcccagcagcugugggaggcugaaaaggucaaaaugcggcaaauccugg

SEQ ID NO: 13229 - RNA, 64 nt, Human
agccagguauucucuacugccgcugauggucaaaccgcaaguggaaauuaaagugugucaggcu

SEQ ID NO: 13230 - RNA, 91 nt, Human; identical to SEQ ID NO: 5566

SEQ ID NO: 13231 - RNA, 72 nt, Human
ggcgggccgguuagcggcgacggggagggugggcucguggugcccccccuuuuguugugguuaacgcucgcc

SEQ ID NO: 13232 - RNA, 78 nt, Human; identical to SEQ ID NO: 8274

SEQ ID NO: 13233 - RNA, 61 nt, Human; identical to SEQ ID NO: 8603

SEQ ID NO: 13234 - RNA, 69 nt, Human
caugcugagaaacugaugaagcugcagaaccaacgagguggccgaaucuuccuucaggauaucaaggug

SEQ ID NO: 13235 - RNA, 74 nt, Human
gcuuaccaucuaaacuaaauuaggcaaauaguaaugucccuuuugccaaaacguggugguuagagaugaugggc

SEQ ID NO: 13236 - RNA, 75 nt, Human
ggcaguguucggguaucagaaaucacuuaaacuagcaauuggccuuauaaagugaugauacacugggcuuuugcc

SEQ ID NO: 13237 - RNA, 80 nt, Human; identical to SEQ ID NO: 788

SEQ ID NO: 13238 - RNA, 128 nt, Human
gccaagguccccaccacggggguccccagugcaccccagcuccggggcagaagaggcagccugcagaucucugcugccgggaaagagcuccugaaguuguggggucuggacuccgcuggggacagggc

SEQ ID NO: 13239 - RNA, 70 nt, Human; identical to SEQ ID NO: 7791

SEQ ID NO: 13240 - RNA, 60 nt, Human
uccugagucagguagugcagugguuguaaagugcagcauauucauuuccaagcuagaggg

SEQ ID NO: 13241 - RNA, 62 nt, Human
aggagaugcuuauuauuuguugaaggauuuugcacucaccauuaaaucuaucaguguuuccu

SEQ ID NO: 13242 - RNA, 65 nt, Human
gaaugugaagacucucaacucguaucucauuugaugagcugcaaggaaggaagaguagcaauuuc

SEQ ID NO: 13243 - RNA, 87 nt, Human
gucugggaacuuugaugaugauuugcuucgacuagaaacuccaaaccauguuacucuaggcacaaucggugucaaucgcucucaggc

SEQ ID NO: 13244 - RNA, 60 nt, Human; identical to SEQ ID NO: 1551

SEQ ID NO: 13245 - RNA, 60 nt, Human
uuuacaguauguacacgcggugacacuccacacaggucgcagacacguggacgcagugag

SEQ ID NO: 13246 - RNA, 61 nt, Human
agcggacagguccagaagccccccggaacggcacuguucaccuuuaucugaccaaaccgcu

SEQ ID NO: 13247 - RNA, 67 nt, Human
uguuucucuuuuuuuaaacaugucucacauagaguaucuccgaaugcagcuauguaaaagagaacca

SEQ ID NO: 13248 - RNA, 106 nt, Human; identical to SEQ ID NO: 6411

SEQ ID NO: 13249 - RNA, 85 nt, Human
ugggccaauguccacaaagaauuccuggucagcaccaccgauguccaaaggugcaauaucaaggaagggcaggcgugauggcuua

SEQ ID NO: 13250 - RNA, 80 nt, Human; identical to SEQ ID NO: 367

SEQ ID NO: 13251 - RNA, 74 nt, Human
acugccauccgcgggucgggggaacugcagggccuccugggaucaggcuuuucugccagcagcgagaugacagu

SEQ ID NO: 13252 - RNA, 85 nt, Human
cagggccacauccacgggggccucccaagggcugcggggccaguggccucucaggcagggaggacucaggacuacaugugcccug

SEQ ID NO: 13253 - RNA, 62 nt, Human
ggucuccucaauggcauacagcagcuucucucucagcuguucguagcucuuguagggugguc

SEQ ID NO: 13254 - RNA, 78 nt, Human; identical to SEQ ID NO: 5666

SEQ ID NO: 13255 - RNA, 69 nt, Human
ucgcgcgggggguaauucggggucuggguucuggugccgcgcagcuuuccccgauggcccacugcguga

SEQ ID NO: 13256 - RNA, 64 nt, Human; identical to SEQ ID NO: 8480

SEQ ID NO: 13257 - RNA, 77 nt, Human
ccaaacaccaauggcucucaguucuuccugacaugugacaagacagacuggcuggauggcaagcaugugguguuugg

SEQ ID NO: 13258 - RNA, 105 nt, Human
ccacaauggcacugggggcaaguccaucuaugggaagaaguucgaugaugaaaacuuuauccucaagcauacgggaccaggucuacuauccauggccaacucugg

SEQ ID NO: 13259 - RNA, 80 nt, Human; identical to SEQ ID NO: 887

SEQ ID NO: 13260 - RNA, 70 nt, Human
cuuccugggcuucguggcugaggugcuggugcuggucaccaucaucuucaucuacgagaagcgccggaag

SEQ ID NO: 13261 - RNA, 69 nt, Human
gucugcaagucagaguccgugccaccugucacugacugggccugguacaagaucacugacucugaggac

SEQ ID NO: 13262 - RNA, 72 nt, Human
cuggggugaggcgggcagcgcuacgcgugggguaggaccaucuuacgcugggaccccgccaaggagccccag

SEQ ID NO: 13263 - RNA, 65 nt, Human
ggcucugcuccgagguguguuuguaguugcugcuaagcgaacgcccuuuggagcuuacggaggcc

SEQ ID NO: 13264 - RNA, 66 nt, Human
cacgugguggacagugggccgcaaagaaccuacguggaugauucgcgguccucuacucuccacgug

SEQ ID NO: 13265 - RNA, 93 nt, Human
ggccaggcuggucuugaacuccugaccuugugauccacccaccucggccucccagagugcugggauuacaggcaugagccaccacgcuuggcu

SEQ ID NO: 13266 - RNA, 62 nt, Human
ggcucaaaaaccaguuccauuucuaauguuguccucacaagaaggcuaauugguggugagac

SEQ ID NO: 13267 - RNA, 80 nt, Human; identical to SEQ ID NO: 367

SEQ ID NO: 13268 - RNA, 60 nt, Human
caccagccuuccuguauagacacuaaauuguuagcaagaguguugagcuaguuccuggug

SEQ ID NO: 13269 - RNA, 103 nt, Human
gccauucauuguacaguugcaggaaugagagugauuuuaugaugugguacauugggaccauguucuaaaaccuuggguuucugagucugcuuuuugaguaggu

SEQ ID NO: 13270 - RNA, 61 nt, Human; identical to SEQ ID NO: 6766

SEQ ID NO: 13271 - RNA, 81 nt, Human
gagcuucuccuugccaguuucucccagcaggacccucuucuuguuuugaaagauggucggcugcuuuugguaggcacgcuc

SEQ ID NO: 13272 - RNA, 76 nt, Human; identical to SEQ ID NO: 758

SEQ ID NO: 13273 - RNA, 66 nt, Human
uguaggugcccucaauagccuccuugggugucuugaagcccagaccgauguucuuguaguaccgcg

SEQ ID NO: 13274 - RNA, 60 nt, Human
ucaaguuuguauucaguacaguugucauucacuucuuagacaaagaauugacaggcuuga

SEQ ID NO: 13275 - RNA, 67 nt, Human
uaauucacauaccacacaauucauguaucuaaaguauacaguucuguaguucugugguuguugguua

SEQ ID NO: 13276 - RNA, 72 nt, Human
uguguuggcaaaggcuguuaauaguaguuaaguguuaagacugcuuuucuuuaacguuuucaugguaaugca

SEQ ID NO: 13277 - RNA, 84 nt, Human; identical to SEQ ID NO: 286

SEQ ID NO: 13278 - RNA, 89 nt, Human; identical to SEQ ID NO: 288

SEQ ID NO: 13279 - RNA, 61 nt, Human
uuuuuuaaugggucucaaaauucugggacaaauuuuuggucaaguuguuuccauuaaaaag

SEQ ID NO: 13280 - RNA, 82 nt, Human
aaaaguaaugugagucugucuaaccauauuuuccuaacucaacaguaggaucaugaugguaaggcaaaugcaaguuauuuuu

SEQ ID NO: 13281 - RNA, 81 nt, Human
gcaaauacuuuugaccucuugugaugagucagaacuaaaacuuaauucuuugacuuucacauuuuuuaaaaaguguauugc

SEQ ID NO: 13282 - RNA, 77 nt, Human
cggcugggagcuugaacuugccuggguuggcuuccacuauaccgauggucucuuccagguccucgaggucccacucg

SEQ ID NO: 13283 - RNA, 70 nt, Human
accacgggguccagugccugugggccaaccaccaggaagcugugcaugcccacagcccgaggccccuggu

SEQ ID NO: 13284 - RNA, 85 nt, Human
ggaaagguccagagcuguggagaaagaaggggcucccugucuccaggguuuguuuaagguuuucuccauggccuagggcccagcc

SEQ ID NO: 13285 - RNA, 73 nt, Human
acuuccuguccuuacucccucuuuaagauugcguacccacugcagagugcugaagacgggguagccacgaggu

SEQ ID NO: 13286 - RNA, 77 nt, Human
cuuggagccaggagccugccaugagguuuugagaacagagugcuguuuuagagcuggcagcagcaucucagcccaag

SEQ ID NO: 13287 - RNA, 115 nt, Human
ggaaacuuaaaccaaagucuauuuuccuauuuaagaaaacuggacucugggccaggugcaguggcucagaguccaguuuucuuaaaugggaaacuuaaaccaaagucuauuuucc

SEQ ID NO: 13288 - RNA, 60 nt, Human
ugguuagaucauauagcuaaugaauuaggcagggagcuauuuuuugaagaugaugaacua

SEQ ID NO: 13289 - RNA, 90 nt, Human
ggggaugaauucuucaaauaggagccgauggaucugugguccuuugggacucaucaaagccuugguuuagcauuugucaguuuuaucuuc

SEQ ID NO: 13290 - RNA, 70 nt, Human
caccaccgccacuucgucauccgcagaggccaggucuugcgggagauugcugaagaguauggcgggggug

SEQ ID NO: 13291 - RNA, 81 nt, Human
gacaaggaccaggaccugaucaccaucauuggaaaggaggacgccguccgagaggcacagaaggagcuggaggccuugauc

SEQ ID NO: 13292 - RNA, 73 nt, Human
ucggcaaggggggcggcaaaauucgcaaggugcgcgacagcacuggagcacgugucaucuucccugcggcuga

SEQ ID NO: 13293 - RNA, 77 nt, Human
ggucaccacgccagagaggauccgcccucgaauggacacauuaccagugaaggggcauuucuuggcaauguggugcc

SEQ ID NO: 13294 - RNA, 64 nt, Human
gcuuacuaaaagggggaaaacguaggcuuggauuaaggcgacagcgauuucuaggauagucagu

SEQ ID NO: 13295 - RNA, 104 nt, Human
ccgacaagaaagccgaggcuggggcugggucagcaaccgaauuccaguuuagaggcggauuuggucguggacguggucagccaccucaguaaaauuggacgagg

SEQ ID NO: 13296 - RNA, 77 nt, Human
gaaggaacaguuugccuggagacauuucuacugguaccuuaccaaugaggguauccaguaucuccgugauuaccuuc

SEQ ID NO: 13297 - RNA, 63 nt, Human
gccacccuacgccguagccguccagagacuggcaggccucggcuaaaggucuggagggugagc

SEQ ID NO: 13298 - RNA, 83 nt, Human; identical to SEQ ID NO: 1377

SEQ ID NO: 13299 - RNA, 73 nt, Human; identical to SEQ ID NO: 1378

SEQ ID NO: 13300 - RNA, 64 nt, Human
caccauugauauuguauuuagaagguuucaggugggugaaaccuccuauuccaugcguaaggug

SEQ ID NO: 13301 - RNA, 68 nt, Human
cuucugcauguuucccauauuacagacuugagacuguccucauucccauauguaauagacauccaaag

SEQ ID NO: 13302 - RNA, 67 nt, Human
agcagggcggcaaugguguagcggcgggggccggagucguuggcugugaauaccaccucugcaugcu

SEQ ID NO: 13303 - RNA, 85 nt, Human
uccuccgaaccagcauccccaccaucaacauggagaacaagaccacgugguucucuguggacauugacucggagcugguggagga

SEQ ID NO: 13304 - RNA, 115 nt, Human
uggcuggugcugguggccgugggugcagggcugcuguugcuggggcugaucauccuccugcuguggaagugcggcuucuucaagcgagcccgcacucgcgcccuguaugaagcua

SEQ ID NO: 13305 - RNA, 64 nt, Human
gcuacuucagcugcuuaagcuggcccacaaguacagaccagagacaaagcaaagaggaagaagc

SEQ ID NO: 13306 - RNA, 72 nt, Human; identical to SEQ ID NO: 1989

SEQ ID NO: 13307 - RNA, 68 nt, Human; identical to SEQ ID NO: 1620

SEQ ID NO: 13308 - RNA, 65 nt, Human; identical to SEQ ID NO: 6942

SEQ ID NO: 13309 - RNA, 63 nt, Human; identical to SEQ ID NO: 12838

SEQ ID NO: 13310 - RNA, 85 nt, Human; identical to SEQ ID NO: 10310

SEQ ID NO: 13311 - RNA, 85 nt, Human; identical to SEQ ID NO: 5547

SEQ ID NO: 13312 - RNA, 99 nt, Human; identical to SEQ ID NO: 1699

SEQ ID NO: 13313 - RNA, 91 nt, Human; identical to SEQ ID NO: 1972

SEQ ID NO: 13314 - RNA, 60 nt, Human; identical to SEQ ID NO: 1701

SEQ ID NO: 13315 - RNA, 93 nt, Human
caguucugggcaaaccagaauuugacuuuuaguaaggaaaaagaagaauuuauucacucaagacuaaaaacuaaaggccugggcugagaacug

SEQ ID NO: 13316 - RNA, 60 nt, Human; identical to SEQ ID NO: 12526

SEQ ID NO: 13317 - RNA, 76 nt, Human; identical to SEQ ID NO: 5199

SEQ ID NO: 13318 - RNA, 78 nt, Human
aggggaugagggggaagaggagcugccuuuuggaggcccccuucaccugcagcuaugaugcccuuccccuucuccccu

SEQ ID NO: 13319 - RNA, 100 nt, Human
cuuauccccauucuacuccccugcuaugcaagugccccuguggcuuguccccaacccccucagcaacaaagcucagcuggggaacgagaguaauuugaag

SEQ ID NO: 13320 - RNA, 77 nt, Human
gcuugaagucagcgucuuccauuccagaaagacccccauucuuccuuuggggguaugauguggaagcugguuucagc

SEQ ID NO: 13321 - RNA, 85 nt, Human
gcuaucuggauuuuaaagugacugaagggagcuuugucuauaaggguggaaaaaucuacaagguuccuuccacugaagcagaagc

SEQ ID NO: 13322 - RNA, 64 nt, Human
ggcaucuagccuaaugggauuguuugaaaaacgucgcuucaggaaauuccuagguguaugugcc

SEQ ID NO: 13323 - RNA, 70 nt, Human
ugcgagauguguauaagaaauucgauugcgggucaagacguuauagauuuuacugguccaugcucuugca

SEQ ID NO: 13324 - RNA, 86 nt, Human
ucugcuggcuucacggccuguucuguucucuuaggcuccacaugagggcacaggggugugggagcggguggggaggucgaggcggg

SEQ ID NO: 13325 - RNA, 71 nt, Human
gcagggaccccugcaaguguuggucgggggccucgagcugccugagcugacacgaggggaggggucugugu

SEQ ID NO: 13326 - RNA, 97 nt, Human
uuuugagcacaaaaccaccggggaucuagccuguggcaccccggagaugacacgaggcucacaugacucuagacacuugguggaaagugaggcgaga

SEQ ID NO: 13327 - RNA, 77 nt, Human; identical to SEQ ID NO: 1216

SEQ ID NO: 13328 - RNA, 68 nt, Human; identical to SEQ ID NO: 813

SEQ ID NO: 13329 - RNA, 74 nt, Human; identical to SEQ ID NO: 4266

SEQ ID NO: 13330 - RNA, 80 nt, Human; identical to SEQ ID NO: 3013

SEQ ID NO: 13331 - RNA, 68 nt, Human
aggguaaugaguaggugagagggucuggaggaagccucccuacugcuggagccucuacuuauuacccu

SEQ ID NO: 13332 - RNA, 61 nt, Human
uggguggccaggcuggucuugaacuccugaucucaggugauccacccgccucagccuccca

SEQ ID NO: 13333 - RNA, 65 nt, Human
ggcagcaggccacagggcagaacugaccaucugggcaccgcguuccagccaccagcccugcuguu

SEQ ID NO: 13334 - RNA, 73 nt, Human
gcuuggaggugaaacuugugcuuguauccccagccacgaagagcuggaccagcuucaaguacauguccacagc

SEQ ID NO: 13335 - RNA, 61 nt, Human
uugcaggaaggccucuucccugauggccgcgucuucauggaaguaggagagaagacuguaa

SEQ ID NO: 13336 - RNA, 71 nt, Human
gacaacauggcugugugcuucagcggcuuccugggcacguaggagcagcuguaagugccauugccguuguc

SEQ ID NO: 13337 - RNA, 62 nt, Human
gggguggcugccagcucccacauucacccugaaggggcuguuggggaugcugacgccucccc

SEQ ID NO: 13338 - RNA, 64 nt, Human
guccacagacuccuuugugcuggaaccugggcuccuccagcugccaggcaggagucgguaggac

SEQ ID NO: 13339 - RNA, 75 nt, Human; identical to SEQ ID NO: 10265

SEQ ID NO: 13340 - RNA, 88 nt, Human
uuucaugcuuugaacgaucagacaagcuuuacauucuaccuaugguguucagaaauugaggcuaacauugaaauaucaaagcguuaaa

SEQ ID NO: 13341 - RNA, 61 nt, Human; identical to SEQ ID NO: 280

SEQ ID NO: 13342 - RNA, 79 nt, Human; identical to SEQ ID NO: 281

SEQ ID NO: 13343 - RNA, 131 nt, Human; identical to SEQ ID NO: 282

SEQ ID NO: 13344 - RNA, 61 nt, Human; identical to SEQ ID NO: 544

SEQ ID NO: 13345 - RNA, 60 nt, Human
gcggccuccuucccaggcucuggggcagcgcaggagggguaggcugggaggggcugccgc

SEQ ID NO: 13346 - RNA, 110 nt, Human
uguagcuggaggcaugggcaagggggguccccagguaguaaacuccccaggugggcugagggcuagggcugagccucaggugggucuccuguucccagugcuacccugca

SEQ ID NO: 13347 - RNA, 61 nt, Human; identical to SEQ ID NO: 6766

SEQ ID NO: 13348 - RNA, 75 nt, Human
aguccuagcccugcugagugugacaugcaaagcuucgacccacagcaggaagucucacaguucugggcuaggacu

SEQ ID NO: 13349 - RNA, 71 nt, Human
gcucuguuuucaggaaaguuaucuggaggcucuucuuccuuuagccucucccauggcuuucaauguggggc

SEQ ID NO: 13350 - RNA, 130 nt, Human
guuaauuauucaagggggugucucugccaagagaaagucaccuguggagaagaguucugugucuggacuuggagcacagccacggaugcugucaucugcuuccucuuggcacacacccuugauccaaggc

SEQ ID NO: 13351 - RNA, 77 nt, Human
ggaaagguucggccccuuucgguuuuuuuuaaaaaaaaaauuuuucaaaagccggggcuagggguuggguaaauucc

SEQ ID NO: 13352 - RNA, 84 nt, Human; identical to SEQ ID NO: 13153

SEQ ID NO: 13353 - RNA, 84 nt, Human; identical to SEQ ID NO: 13154

SEQ ID NO: 13354 - RNA, 62 nt, Human
cuaucagaauaccaaugacauucuucacagaaauagaaaaaagaaucaugaaauuuauaugg

SEQ ID NO: 13355 - RNA, 79 nt, Human
ggcugccagaugggaccucacugacccagacguuccgggcccgggaacagcuggcagcugugaggcucuauguggagcu

SEQ ID NO: 13356 - RNA, 67 nt, Human
ugggacucgugccuucugcuguucucauuguggccaagaaaugucccagcugagggccuuuguccca

SEQ ID NO: 13357 - RNA, 80 nt, Human
cucuugccucagucuuccaaauagcugggacuagaggcacaugccacugggcccagccuauuugcaaaacuuuuguagag

SEQ ID NO: 13358 - RNA, 81 nt, Human
gcuggaguacaggaguucugggcuguagugcgcuauggcacaaucauagcucacugcagccucuaccuccugggcuccagc

SEQ ID NO: 13359 - RNA, 64 nt, Human
cucuagaagcuagcucccggcagcaugucagcaaaugaacaggacagcgagcuggccucuggag

SEQ ID NO: 13360 - RNA, 97 nt, Human
guauuugacucgaccuuggaacacuggcccugagacucagggguuuaacauuucaccucccugaauucccauccagaaaucucaggcgagcagauau

SEQ ID NO: 13361 - RNA, 62 nt, Human
gugcaucagccggcuugaguuuguucaauaucaaagcugaaaacuagcgaggucugcuguac

SEQ ID NO: 13362 - RNA, 66 nt, Human
uaaauaugugcaguuauuaucacaugaagaaacgcagugugucgggcuguaauauuaccauauuug

SEQ ID NO: 13363 - RNA, 68 nt, Human
acccguccgagcgcccgggggccgcuggcgggagccggcggcacgcgggggccccggggcggcugggu

SEQ ID NO: 13364 - RNA, 76 nt, Human
gccgcccucgccgccgccgucgccgccgcggagcagaucaauaggcgaacgcggagcacagcgcagcgcgggcggc

SEQ ID NO: 13365 - RNA, 83 nt, Human
ccuuauuuuuucuguauaugaauuuguuaauauaaaaaaaucuacuuagaaaauuauaaaaacaucacuacagugucauaagg

SEQ ID NO: 13366 - RNA, 62 nt, Human
gugcugcagaugcaucccaauaaucaggguggccucaaaacccugucuguccucuguagcac

SEQ ID NO: 13367 - RNA, 75 nt, Human
acccuggaaacuacaagccccaacgucacucaauacuuucuccggugcuucaugacaaggggcugcuucuggggu

SEQ ID NO: 13368 - RNA, 66 nt, Human; identical to SEQ ID NO: 3532

SEQ ID NO: 13369 - RNA, 70 nt, Human
aucagaaccgcgggccuagacuuguagcggaaguguuuauuucacgccgguuuuagucccgacaacuggu

SEQ ID NO: 13370 - RNA, 61 nt, Human
gccaaucccaugccaacaaaccacggagcucacuccagugggucagacguaggugacaagc

SEQ ID NO: 13371 - RNA, 72 nt, Human
uauagguggcaccaaucuugacuauccagauggaacaguacaucuauacaaggaaaagugauggcaucuaua

SEQ ID NO: 13372 - RNA, 61 nt, Human
ggcucuauuccguucgcugguucgccaccucaggggaacgauggccauggaguccacagcc

SEQ ID NO: 13373 - RNA, 63 nt, Human
caauacccuggcaguucuggcccucccgacgcgggaaccaaacccacgaaccacagggcguug

SEQ ID NO: 13374 - RNA, 62 nt, Human
cgggacaggccacggcagaggcugagugucacaggacucgggagacccugccuccguucccg

SEQ ID NO: 13375 - RNA, 79 nt, Human
uuucugaacguggugggauucccgcugaaccacuucugcaagcagcuggugaagcucuacuacccgccccguccggagg

SEQ ID NO: 13376 - RNA, 65 nt, Human
gaaguuuauuguccauagagacuuaaaggcagaaaaccugcucuuggaugcuugauaugaacauc

SEQ ID NO: 13377 - RNA, 104 nt, Human
gugcacagccccacaaccaggucagcgaugaagguaucuucagucuaccccauaacgaugaguacaccaugacgccccaaccauuggccugggccagcuugcac

SEQ ID NO: 13378 - RNA, 89 nt, Human
guucacggccuuggcgaucaucuuagagaguuggucacugugacgaucgaucccccgacuacacuggauauccugcacuggcugugaac

SEQ ID NO: 13379 - RNA, 62 nt, Human
caggcuugugaaaggaaccaucugguuauaaagugguggcagauuucacgaaaucuagccug

SEQ ID NO: 13380 - RNA, 74 nt, Human
ucagccccagagagucgaugggggacacugacaaaccaaucacaaaguuaggugccauuagcucuuagggagga

SEQ ID NO: 13381 - RNA, 61 nt, Human; identical to SEQ ID NO: 12464

SEQ ID NO: 13382 - RNA, 62 nt, Human
gccagauuugcagcuacgaaaucaucacuccagacgugcccuuuacuguugacaaagauggu

SEQ ID NO: 13383 - RNA, 68 nt, Human
gcugaccgucacugccuaugacugugggaagaacaagagccacagaagauguuucggugaagaucagc

SEQ ID NO: 13384 - RNA, 61 nt, Human
agcagcugcacgccguggagaucagcgcggugcacucgcgcgaccacggccuggaggugcu

SEQ ID NO: 13385 - RNA, 87 nt, Human
cuccccugggccggaagacugggaauuccugcuaaguguggcuucuagagugucagugaguaccccgaucuugacugccuaggggag

SEQ ID NO: 13386 - RNA, 61 nt, Human
uggaucuggcggcgcugcugccgcgccgccucugccgcgguccuagcgccgcucggcuuca

SEQ ID NO: 13387 - RNA, 66 nt, Human
auggugacacacaugcuggagccaagugcuaacaugccuugguucaagggauggaaagucaaccgu

SEQ ID NO: 13388 - RNA, 127 nt, Human
ggcaaaucauaugauggcaaaaauugagggcuuaacagcugaauuugugaacuuagagugccucaguuuaauaaauguaggcuugaucucaguuucaaaucuccccaagcugcuauaugacaaagcu

SEQ ID NO: 13389 - RNA, 81 nt, Human
ggcucgucgcugccgagcgccgcaccaggacgugcgccggcuccgccguacaaaccuuccgaggcccucgcugcgcaagcc

SEQ ID NO: 13390 - RNA, 60 nt, Human
ucccauccuccgugcccccgcuuaccuacucgcgacuggguacgcaccccaggacccgga

SEQ ID NO: 13391 - RNA, 61 nt, Human
uuaucuugaaugagccuaaagaaaagcuguugaaagcuauaauggacucgucccgggauaa

SEQ ID NO: 13392 - RNA, 60 nt, Human; identical to SEQ ID NO: 1551

SEQ ID NO: 13393 - RNA, 79 nt, Human; identical to SEQ ID NO: 1810

SEQ ID NO: 13394 - RNA, 62 nt, Human
ggcggacaacagucuucacggccacugaacggaaccgugauucgacuacgucaagcuccgcc

SEQ ID NO: 13395 - RNA, 79 nt, Human
ucccagaccuaaucuaacacagaacgaaggaacuugagagagacacaguuuuguaucagguggcauagcgucuguugga

SEQ ID NO: 13396 - RNA, 70 nt, Human
accauuuccauucuuaucccuaguuuucagguggaaucacuagaaaguuaagaugggcuugaaauaaggu

SEQ ID NO: 13397 - RNA, 63 nt, Human
agcccagcaggcucguaccaaagucacagcaguaaugcuauguacugcagagucugaugagcu

SEQ ID NO: 13398 - RNA, 89 nt, Human
ugaaaguaugauucaaugugcaaauacagguaggucuucagcauaagcugaaauauaugcauguaaaaacuuugacaucuuuuuuuuua

SEQ ID NO: 13399 - RNA, 64 nt, Human
uaggucaaauguguccuccaucacugcuucccugagauuugauggagcccugaauguugaccug

SEQ ID NO: 13400 - RNA, 60 nt, Human
ugucucuuaucauguugguggagguggccgcagccauugcuggcuauguguuuagagaua

SEQ ID NO: 13401 - RNA, 64 nt, Human
uuuaaaccggauuuauuuuuuucacgaccgaaaacaggagauggucuggagguccggucuuaaa

SEQ ID NO: 13402 - RNA, 131 nt, Human
acgugcacaagagugugacgacuuagggaguggaguggcacagaccuaugggcuuggcuugccaaguggggaccaugacggugucacuucuaucuguggccucccgaacuggcaugcgugaaccaacaugu

SEQ ID NO: 13403 - RNA, 61 nt, Human; identical to SEQ ID NO: 11490

SEQ ID NO: 13404 - RNA, 79 nt, Human; identical to SEQ ID NO: 1810

SEQ ID NO: 13405 - RNA, 77 nt, Human
ggugaugcccaagauggaccagauaacaucacaugaaggccguuucuggaaugaagucugacuccuccaguuucacc

SEQ ID NO: 13406 - RNA, 85 nt, Human
uguacuauuuguuuaaugaaugcauaugagguguuuuuauuccaacaagaaaauuauucguacgcgauuauugaaugaauagaca

SEQ ID NO: 13407 - RNA, 63 nt, Human
guguagacgguacaagugacaauagcaauauagaaaauguaaauccacaauguaccauagcac

SEQ ID NO: 13408 - RNA, 86 nt, Human
ugugcaucccagcaguaagcaacaauggcugauccagaagguacagacggggagggcacggguuguaacggcugguuuuauguaca

SEQ ID NO: 13409 - RNA, 85 nt, Human
cgcacaucguggugagcuggaugaucgcgcagaccgugacggccguggccggcgugguguccuaccccuucgacacggugcggcg

SEQ ID NO: 13410 - RNA, 78 nt, Human
gucagcacuuacauuaagaaaauuggcuacaaccccgacacaguagcauuugugccaauuucugguuggaauggugac

SEQ ID NO: 13411 - RNA, 79 nt, Human; identical to SEQ ID NO: 1810

SEQ ID NO: 13412 - RNA, 79 nt, Human; identical to SEQ ID NO: 1810

SEQ ID NO: 13413 - RNA, 66 nt, Human
guuugauuuuuauaacuuuccugugaucugggauagaauacaaaaagaaaguaaaaaaaaaaaagc

SEQ ID NO: 13414 - RNA, 61 nt, Human
uagcaccacuugaggaaggggauauauuuaaguucaaagucccuaagcaggugguuuacua

SEQ ID NO: 13415 - RNA, 70 nt, Human
ccaugcuccuccuggcaccuuuuacucugcccaagcaguggcagcccaguccaaaaggugccugccaugg

SEQ ID NO: 13416 - RNA, 61 nt, Human
ggcggcugugauacagguacuuggacaccuuucuguccugaugcugguggcauaggcuggc

SEQ ID NO: 13417 - RNA, 79 nt, Human
guuguucucauagcagggccagaauucugauuggcuuugggaugagcucuuuguccauugguguugcggggggaauaac

SEQ ID NO: 13418 - RNA, 67 nt, Human
agcaguuuucucuuaacacaccccuuaauggcccaugaugagguuucagagcugagagacagcuguu

SEQ ID NO: 13419 - RNA, 74 nt, Human
ggugguuaguuucugcgacuugugugggacugcugauaggaagaugucuucaggaaaugcuaaaauugggcacc

SEQ ID NO: 13420 - RNA, 60 nt, Human
uucaggccuuccaguucacugacaaacauggggaacguguguccagcugguggaacugga

SEQ ID NO: 13421 - RNA, 71 nt, Human
cuugaauguugaaugucaccguaugcgugaaauuauauauuucgggguagugugagcuuuuaauguuuaag

SEQ ID NO: 13422 - RNA, 97 nt, Human
ucagaaauagaauugagccaguuuuuaucagcagcaauauuuucagguaauagggguucccaaauucuguuggguuuuaacugguggauguuaauga

SEQ ID NO: 13423 - RNA, 62 nt, Human
gguguuuauuguggguuacagaucauaagugagugaauagauguaauuccuugaugcacacc

SEQ ID NO: 13424 - RNA, 69 nt, Human
gggggacccuggaaaaguuuaccgcaacaccuggguuccaaaccggccgcggugcuaaggagggccccc

SEQ ID NO: 13425 - RNA, 77 nt, Human
ugagaaggcaaacauguucagaagucaaguaacuggaaaaauaaaccuccuuggccugauagaaaugaucuuacuca

SEQ ID NO: 13426 - RNA, 60 nt, Human
uggcucaagcacaaaccaauuuguguuguucugauucaauaauugguuucuggguggcca

SEQ ID NO: 13427 - RNA, 64 nt, Human
uguugguguggugauguuugugcuuuuaugauuucauauuugugcaugcagaucgaaaacaaua

SEQ ID NO: 13428 - RNA, 68 nt, Human
cacccaggauaguaucuuuguacaucauaggacuagucacuugugcuuucauggauacugccugggug

SEQ ID NO: 13429 - RNA, 69 nt, Human
gcggacggaaggcuggauggaugguaccauugacuggguugaguacacguagaccaagcaauccgaagc

SEQ ID NO: 13430 - RNA, 84 nt, Human
cgaaaagcuauggcaaauaucagugagcgugugggaacugagaaacgaagucggggcuguacacucacucuaacaagcgaaucg

SEQ ID NO: 13431 - RNA, 73 nt, Human
gugacuuugaugauuugaaaggagaacuagaugaauauguccaaaaauaccucccuggaaaaauuaaagucau

SEQ ID NO: 13432 - RNA, 60 nt, Human; identical to SEQ ID NO: 1551

SEQ ID NO: 13433 - RNA, 84 nt, Human; identical to SEQ ID NO: 286

SEQ ID NO: 13434 - RNA, 89 nt, Human; identical to SEQ ID NO: 288

SEQ ID NO: 13435 - RNA, 94 nt, Human; identical to SEQ ID NO: 5398

SEQ ID NO: 13436 - RNA, 84 nt, Human; identical to SEQ ID NO: 286

SEQ ID NO: 13437 - RNA, 64 nt, Human; identical to SEQ ID NO: 287

SEQ ID NO: 13438 - RNA, 62 nt, Human
aagggaacucagaguccggcagcauccuccauaugcugaacgcagguacucugggcccccuu

SEQ ID NO: 13439 - RNA, 66 nt, Human
cacuguaggaggcacagggacgcugacuaggaaagccagguauuguccaagguuucuccccaugug

SEQ ID NO: 13440 - RNA, 82 nt, Human
cugcuuuguaaggcauugagauguuuauguguauguguaucuaaagcacagcacuuaauucuuuaccuugucuaugaugcag

SEQ ID NO: 13441 - RNA, 72 nt, Human
ggugcgugacgucucagaagaagggauucacucaguacuacuguacccccacuucgugacuagaauugcacc

SEQ ID NO: 13442 - RNA, 61 nt, Human
gggcagacaggcugcuuaaccugcuucuggaggugagcgagcggguagcggaccuugaccc

SEQ ID NO: 13443 - RNA, 77 nt, Human
aagaaccacuuggccagaagugucccccagaugcuuuuuuuuuuuuuuuuuugggaaacaguuuggcucugguucuu

SEQ ID NO: 13444 - RNA, 64 nt, Human
cagcccacgccuggggagccugccuggggccaugugaccauggccucucccugggaacgggcug

SEQ ID NO: 13445 - RNA, 72 nt, Human
ggguuggaucagaguggacaguuugaacgauaaaccauuuugcauucuucauucccuaucuuuuaacaaccc

SEQ ID NO: 13446 - RNA, 65 nt, Human
gguuuuuauacaauucuuuauuuagguaacaaguugguuauguucacugcauuguaugaaacauc

SEQ ID NO: 13447 - RNA, 65 nt, Human
auucagguuaacucccaauucaugcauuaccaugguaauuuagggaacauggggauaacuuggau

SEQ ID NO: 13448 - RNA, 71 nt, Human
cacuuuaggaggccgaggcgggcaggugaucaccugaggcgggaguugagaccagccuggccaauauggug

SEQ ID NO: 13449 - RNA, 60 nt, Human
gcgagcagucugaaugccagaauggauaaccguuuugcuacagcauuuguaauugcuugu

SEQ ID NO: 13450 - RNA, 85 nt, Human
aaaaauaugguaaauauucagaauguggucgcaggugaguaauauguuuucuguagccaaagugaauuuaguuuauuuuauuuuu

SEQ ID NO: 13451 - RNA, 61 nt, Human
ggcucucugggaauugucucggaugcaucuggugugucugauagucacuucuauuucagcc

SEQ ID NO: 13452 - RNA, 78 nt, Human
ucucuuaaguuguuuuauuaaguuaauuugucuuacugaccauauaauuuagaacaaaaagcagcuguacuaaagagg

SEQ ID NO: 13453 - RNA, 60 nt, Human
ccgccacuucgucauccgcagaggccaggucuugcgggagauugcugaagaguauggcgg

SEQ ID NO: 13454 - RNA, 83 nt, Human
ggacaaggaccaggaccugaucaccaucauuggaaaggaggacgccguccgagaggcacagaaggagcuggaggccuugaucc

SEQ ID NO: 13455 - RNA, 82 nt, Human
uccucaucggcaaggggggcggcaaaauucgcaaggugcgcgacagcacuggagcacgugucaucuucccugcggcugagga

SEQ ID NO: 13456 - RNA, 69 nt, Human
gcucucugaugcaggguaggugcaaccagcucuugugaucggguugggaccugccaugcaucuuggggc

SEQ ID NO: 13457 - RNA, 79 nt, Human; identical to SEQ ID NO: 1810

SEQ ID NO: 13458 - RNA, 79 nt, Human
caccguggugcugcagguugucagcgaugccggcucucuccuggccuguugucugaaugccgccugcauggcauuggug

SEQ ID NO: 13459 - RNA, 63 nt, Human
gcugauguccagcaccaaggggcucuacucagacacugagcuccagcagugccuggcugcggc

SEQ ID NO: 13460 - RNA, 96 nt, Human
cauuaaacauggugcauauuugacugugggacucgaaaaucuguugaucgacugguuuuuugcagcuuaacuucaaaugcaauccuggguuuuuug

SEQ ID NO: 13461 - RNA, 98 nt, Human
ugccuuagaaaucuacuugacaaacagauacugaacacucauccauggcuuaauccacaaauguuagaguguauuucugaaacuagcagacuagggua

SEQ ID NO: 13462 - RNA, 73 nt, Human
uggguagcagggugaucuaacauuauacauccuggaaguuguuugaugcaagaaaggccucucuugcugucca

SEQ ID NO: 13463 - RNA, 80 nt, Human; identical to SEQ ID NO: 4151

SEQ ID NO: 13464 - RNA, 61 nt, Human; identical to SEQ ID NO: 4152

SEQ ID NO: 13465 - RNA, 80 nt, Human
uuagaaugcagauucucagcccccucccagacauggugaagucagaagcucucagggagggacucagcaaaugauucuaa

SEQ ID NO: 13466 - RNA, 68 nt, Human
gauggcugcucuaaaaagacaaaugaauggggaaagacaaucauugaauacaaaacaaauaagccauc

SEQ ID NO: 13467 - RNA, 64 nt, Human
cugcuguucuugcccaagagugugucugacuaugacggcaaacugagcaacuucaaaacagcag

SEQ ID NO: 13468 - RNA, 68 nt, Human
guuugaugaaggccggaacaacuuugaaggggaggucaccaaggagaaccugcuggacuuuaucaaac

SEQ ID NO: 13469 - RNA, 67 nt, Human
ugggaagaacuuugaagacguggcuuucgaugagaaaaaaaacgucuauguggaguucuaugcccca

SEQ ID NO: 13470 - RNA, 71 nt, Human
cacgaaauaaauaaaccggaggaacuccaggaaaacuugggaaucuucaaugcaaucuuuuuauuuuugug

SEQ ID NO: 13471 - RNA, 62 nt, Human
ccuggaauaauuuugggaaauuugcguguagaggacggggguuucaccgggguuagcccagg

SEQ ID NO: 13472 - RNA, 86 nt, Human
cuguaaggaagaaccugcugucugccagagaggauaagcugcccaucucagcagcugucuaaaagaaggcaggugucucuuuaaag

SEQ ID NO: 13473 - RNA, 65 nt, Human
uccaucgggcagccagaggccagcgucuccgaugacacugagcaccuggugaauggccggaugga

SEQ ID NO: 13474 - RNA, 65 nt, Human
ugccuucccgggcagcaccaacucccugcacaggaugaccacgaccagugcugcugccuauggca

SEQ ID NO: 13475 - RNA, 65 nt, Human
cacugcaccgaucagauaucuuuuaagaaacggcucucauugaaaaaguccuggugggaauagug

SEQ ID NO: 13476 - RNA, 77 nt, Human
cugggggcuuuagcuguuggcagcuaugguguucuuaauccauuucacauaguuguagaccuugguguagacuccag

SEQ ID NO: 13477 - RNA, 62 nt, Human
uagacuccaggcuuggucuucugggcacagccaucaccccaggagacaacuccuuggagcug

SEQ ID NO: 13478 - RNA, 73 nt, Human
ugaauccuugccucccucaaggaagcccacacagaacauguugcugguaaucuuuccaggguaggaggcuuca

SEQ ID NO: 13479 - RNA, 62 nt, Human
cauucuguaugugacuauuuauauaacauuagauaauuaaauagugagacauaaauagagug

SEQ ID NO: 13480 - RNA, 64 nt, Human
uucauuucagcaauguuacauauuugauugaaagucuucaauuuguuaacagagcaaauuugaa

SEQ ID NO: 13481 - RNA, 84 nt, Human
cccaagauggugaugcugcugcugcugcuuuccgcacuggcuggccucuucggugcggcagagggacaagcauuucaucuuggg

SEQ ID NO: 13482 - RNA, 65 nt, Human
ggcugauucugcaucuggaaacugccuucaucuugaaagaaaagcuccaggucccuucuccagcc

SEQ ID NO: 13483 - RNA, 68 nt, Human
cgguguccgaggaccuggggcuggugcauuuucgguuguugcugaucugucucaggacucugacacug

SEQ ID NO: 13484 - RNA, 78 nt, Human
gucacgcagggcaaaaaagcuccguuuuagcucguuccuccucuggcgcuccaagacguuguguguucgccucuugac

SEQ ID NO: 13485 - RNA, 74 nt, Human
ugcuguggcuuuuuuaaggauaacuaccuugggggccuuuucauuguuuuccaacuccgggaucuggucacgca

SEQ ID NO: 13486 - RNA, 66 nt, Human
agagucccaaauaugucuuuuuaaaaauguaaacauuaggaaaaaaauauuauaaucaucagcucu

SEQ ID NO: 13487 - RNA, 67 nt, Human
gggaggcauuucucuguacacauagacuuaaguacacauauacuaagcuguaaauagucugccuucc

SEQ ID NO: 13488 - RNA, 86 nt, Human; identical to SEQ ID NO: 7751

SEQ ID NO: 13489 - RNA, 80 nt, Human
gccccucacccaaguggcggcaucuuaacggcauugguggaagcuggggucagaaaagagaaaugaccauuuggaggggc

SEQ ID NO: 13490 - RNA, 97 nt, Human
gcuaggccuacucugguuauggggacacugacgcccgggucaccgcugccauagccaguaacaucugggccgccuacgaccggaacgggaaccaagc

SEQ ID NO: 13491 - RNA, 69 nt, Human; identical to SEQ ID NO: 12457

SEQ ID NO: 13492 - RNA, 71 nt, Human
acacuguguuucugaggguccuggaauggccagaacugaaggauccucuccagguucuucaauaucagugu

SEQ ID NO: 13493 - RNA, 74 nt, Human
ggccugugccuagaguuuaagcuaccucagugccuaggcaguuguugucagcguccacaucacuggcagagguc

SEQ ID NO: 13494 - RNA, 86 nt, Human
gguggucuuuugugcugcugucauccuagucagggcugugcuugggccgcccagccagcauggccaggugccugcaccgcagcccc

SEQ ID NO: 13495 - RNA, 83 nt, Human
ucccauaggggaggcagacugcugugcaucacccugcugagugucaucagugaugcagaguagcagaagcuccucucagggga

SEQ ID NO: 13496 - RNA, 82 nt, Human; identical to SEQ ID NO: 8961

SEQ ID NO: 13497 - RNA, 123 nt, Human; identical to SEQ ID NO: 6745

SEQ ID NO: 13498 - RNA, 100 nt, Human; identical to SEQ ID NO: 3028

SEQ ID NO: 13499 - RNA, 65 nt, Human
ccaccagauggccuaacucacugcucuucaauucugcauaccauagagcaauggaggaggcuagg

SEQ ID NO: 13500 - RNA, 64 nt, Human
gguaguuaaaaguagucaugcagcaacccugaaugcuuugcugccuuagauauuccuaauuacu

SEQ ID NO: 13501 - RNA, 71 nt, Human
cagggagagugauuuguguccuccaggggacauuugguaucgucuggagauauuuuugguuguucuaucug

SEQ ID NO: 13502 - RNA, 78 nt, Human
ggcaggcagggguggggugcuacuggcauuuugugaacagauccuauggugcacaggauagccccccacuccccugcc

SEQ ID NO: 13503 - RNA, 71 nt, Human
ggguauugcugcgaguuaucuaaacaaauguuugcagaaggcguuacagauaaaaaaacaaagcaaaaccu

SEQ ID NO: 13504 - RNA, 74 nt, Human; identical to SEQ ID NO: 365

SEQ ID NO: 13505 - RNA, 68 nt, Human; identical to SEQ ID NO: 8705

SEQ ID NO: 13506 - RNA, 84 nt, Human
auuugucaauuuuuauuuugguuuucuuacaaagguugacauuuuccauaacagguguaagaguguugaaaaaaaaauucaaau

SEQ ID NO: 13507 - RNA, 74 nt, Human; identical to SEQ ID NO: 365

SEQ ID NO: 13508 - RNA, 102 nt, Human; identical to SEQ ID NO: 2172

SEQ ID NO: 13509 - RNA, 77 nt, Human; identical to SEQ ID NO: 3082

SEQ ID NO: 13510 - RNA, 90 nt, Human
ccacgcaggugccccgcgcuccccgcucagccaugucguccuacagccgcguggcgcuggugaccggggccaacaggggcaucggcuugg

SEQ ID NO: 13511 - RNA, 69 nt, Human
gcuucccucugcugugguuggaggagacaccugcuguggauccgucucucuaggcuugucgagggcugc

SEQ ID NO: 13512 - RNA, 89 nt, Human
guguguauguguacucuagacguugucccacgaugagaccccgaaccaugguuccaucaggaugcaucacgaucauuaggcaugcacau

SEQ ID NO: 13513 - RNA, 127 nt, Human
cccaucuguacaguccagccacugacauaagccccacucgguuaccacccccuugacccccuaccuuugaagaggcuucgugcaggacuuugaugcuugggguguuccguguugacucccagguggg

SEQ ID NO: 13514 - RNA, 77 nt, Human
cucucauauuggcacaucugcuguccauuggggguucucaguuuccucccccagacagcccuaccugugccagagag

SEQ ID NO: 13515 - RNA, 79 nt, Human
gagggguucauuugcguggggcuguuggccuggaucauccauccaucuguacaguucagcgcacugccacaagccccuc

SEQ ID NO: 13516 - RNA, 102 nt, Human; identical to SEQ ID NO: 2172

SEQ ID NO: 13517 - RNA, 82 nt, Human; identical to SEQ ID NO: 8961

SEQ ID NO: 13518 - RNA, 77 nt, Human; identical to SEQ ID NO: 8698

SEQ ID NO: 13519 - RNA, 80 nt, Human; identical to SEQ ID NO: 367

SEQ ID NO: 13520 - RNA, 65 nt, Human
ggaccauaugcauaguaccgagaaacuagugcgaaguagugaucagguauugcuguuagauaucc

SEQ ID NO: 13521 - RNA, 93 nt, Human
acuagcuggggcaacauggcaaaaccccacgucuacaaaaaauuuuuaaaaauuagcugggcaugguggugugugccagugguuccagcuacu

SEQ ID NO: 13522 - RNA, 85 nt, Human
caguacggaugugcgggcaggcgucauagauagggaugccuggguggccuggucauggcugauccugcuuguguaugacagacug

SEQ ID NO: 13523 - RNA, 98 nt, Human
agccagcaggagcaguuggagaccgcuguuacgaggagggaauguacgaggcugccaagcugcucuauagcaauguuucuaacuuugcccggcuggcu

SEQ ID NO: 13524 - RNA, 74 nt, Human
gaaagauuuggugaaggaagcuaucaacuccuauaucagaggggacgacccuuccucuuaccuggaaguuguuc

SEQ ID NO: 13525 - RNA, 78 nt, Human
gcuuugccugcauggauggacaagaguuccgcuucgcacagcuguguggucuucacaucgucauucaugcagaugagc

SEQ ID NO: 13526 - RNA, 95 nt, Human
gacugugguuuuauugguaaagauauaagacauauuggcucuauuaaaaacucagguaauaaagcacuaagguugauuuuuguauugcuacaguc

SEQ ID NO: 13527 - RNA, 64 nt, Human
ggaggauauagcaauuuuauagauuacuacauggucaagaaucuacgcaucggauguauucuuu

SEQ ID NO: 13528 - RNA, 64 nt, Human
gcagaagcagcagaggguccggcagggguucuucuccucguacugcacggccuuccgcaccugc

SEQ ID NO: 13529 - RNA, 104 nt, Human
aaaaauccagcugagugauaaaggcugaguguugaggaaauuucugcaguuuuaagcagucguauuugugauugaagcugaguacauuuugcugguguauuuuu

SEQ ID NO: 13530 - RNA, 77 nt, Human
cagacuucacagagaaugcaguugucuugacuucaggucugucuguucuguuggcaaguaaaugcaguacuguucug

SEQ ID NO: 13531 - RNA, 74 nt, Human
cgcugcuauuagaaugcauugugaaacgacuggaguaugauuaaaaguuguguuccccaaugcuuggaguagug

SEQ ID NO: 13532 - RNA, 97 nt, Human
gguaaaaugcuuuuuguucauuucugguggugggaggggacugaagccuuuagucuuuuccagaugcaaccuuaaaaucagugacaagaaacauucc

SEQ ID NO: 13533 - RNA, 76 nt, Human
accccuaacauugaccuugugcaucccugagagagugggcagagaauccaauucucaugaagcgcgaagucggggu

SEQ ID NO: 13534 - RNA, 74 nt, Human
aggccugucucuugagcaugggcaggccccugucccagacauagguacccccaaucucacuuuggacagagccu

SEQ ID NO: 13535 - RNA, 70 nt, Human
uccaauugugcucaaaucuauagcauuuuguugcuuccaacaauuuauggguguuugcgcagugagugga

SEQ ID NO: 13536 - RNA, 94 nt, Human
cgucggcauggcugucauucugaggguggaaaauaacuggauuucggguuaauuggugacauccucaagagcuguggcaagccaugucucggcg

SEQ ID NO: 13537 - RNA, 72 nt, Human
gaagcacauuuaaagcacuuuucuguaaaagcuaguuccuuaccugcuuggaaaucuuuuuguuuguucuuc

SEQ ID NO: 13538 - RNA, 95 nt, Human
ggggcagaaaguguguaagugaaguauuuuucaaagaaugcaguuauuaucugauugcauuugaccuuuugaccuuuguuacauaauucuacccc

SEQ ID NO: 13539 - RNA, 65 nt, Human
ggggacucugggaggcuggugcagccagaaggcauggcucuugacagccuucuaguagaaucucu

SEQ ID NO: 13540 - RNA, 83 nt, Human
ugcaggagucuuggagggucggaugcggcgccggaugaggaugaggcguggcggaagaugcguuuggcucugcagacacugca

SEQ ID NO: 13541 - RNA, 79 nt, Human
caacgggggcuucauaacugaaauaagacacaaugaaaucuacaggguuuauguuuuauauucaaauauaaccuuauug

SEQ ID NO: 13542 - RNA, 71 nt, Human
ggcagugaaaacccugugucugauaagucucagagacaaacugcuacuuagaauuacagggguucacuguu

SEQ ID NO: 13543 - RNA, 63 nt, Human
cagacuguuugcaaaauagagggaggaucacucauaaucuuacauagcacugucagcagucug

SEQ ID NO: 13544 - RNA, 68 nt, Human
uauauuuccguuuccccaagucuucaccuguccccaucuacccagaucauuugggaaauguaaaugug

SEQ ID NO: 13545 - RNA, 87 nt, Human
uauggccacccgaaagcgcuccuccagcagggacagcucacugaugaggucggugauggcguugguaaaggcuuccugggggcugua

SEQ ID NO: 13546 - RNA, 83 nt, Human
cucccauuuuuuggcuuuugaggggguucaguuuggguugcuugucuguuuccggguuggggggaaaguugguugggugggag

SEQ ID NO: 13547 - RNA, 70 nt, Human
agagauuuauaaccaaauucuguaauugggacuuccagucuuuccccaaguagagaauuggacuuacucu

SEQ ID NO: 13548 - RNA, 75 nt, Human
ugaauuaguucuuaagugauuuuuggcuugcauaccauuuuugcaaacacaaauugucauuacucugcucauuua

SEQ ID NO: 13549 - RNA, 62 nt, Human
uugcucauugccauucuguguuuccucuaaaaacugaguuuucacaauuuuggauuuaguaa

SEQ ID NO: 13550 - RNA, 65 nt, Human
cgcuuccgccggguggacaucgacgaauuugacgagaacaaauuguggacgagcaggaggaggcg

SEQ ID NO: 13551 - RNA, 76 nt, Human; identical to SEQ ID NO: 4813

SEQ ID NO: 13552 - RNA, 62 nt, Human
cuacuuccucugagugguucuugugccuagcccaggaggggacgccguugagaaggaaguag

SEQ ID NO: 13553 - RNA, 88 nt, Human
gguccaacgcucauugugaguugaacagaugcuuaaccccacauggguaucagaugauuucuguguacuguguguauaauggugggcc

SEQ ID NO: 13554 - RNA, 76 nt, Human; identical to SEQ ID NO: 12630

SEQ ID NO: 13555 - RNA, 61 nt, Human; identical to SEQ ID NO: 12631

SEQ ID NO: 13556 - RNA, 75 nt, Human
gaggcaggaggccccugaaggcaaggcagguagacgguggagaaucugccuccccugccuuuggacccuguccuc

SEQ ID NO: 13557 - RNA, 62 nt, Human
gugcuguggcuaaauugaugaucgacuucauuugcaguggaggugcaucaagagcccggggc

SEQ ID NO: 13558 - RNA, 79 nt, Human
cuggguauaggaccgucgugagacauggucaguuaaccccuacugaugcauguguugugccaugguacucccugcucag

SEQ ID NO: 13559 - RNA, 73 nt, Human
gcuuggaguucuaugauuuucucagguaccgacauuuacgagcacccguuagaaagagcgugggacccucagc

SEQ ID NO: 13560 - RNA, 68 nt, Human
ggcucguucucccguguucaguucuuccgacggcagccugugggagacaguggcgcgggcucugagcu

SEQ ID NO: 13561 - RNA, 86 nt, Human
guccuugugcuccgcggcacccccaaggucacucaggcccugaacguccugaccacgaccuucgggcgcugccagagccccuggac

SEQ ID NO: 13562 - RNA, 68 nt, Human; identical to SEQ ID NO: 1919

SEQ ID NO: 13563 - RNA, 72 nt, Human; identical to SEQ ID NO: 1920

SEQ ID NO: 13564 - RNA, 61 nt, Human
cgccuagaucucuuucccagggccauggcgaacccgaagcugcugggacuggagcuaagcg

SEQ ID NO: 13565 - RNA, 63 nt, Human
gccagucuuagguuuuugaacaggauaguagguauccggagucgauugagggccagagcaggc

SEQ ID NO: 13566 - RNA, 64 nt, Human
cauuaaacucuucuaacuuucuucuuucugugauaauucagaagauaguuauggaucuucaaug

SEQ ID NO: 13567 - RNA, 74 nt, Human
gcaaauguuucagcccaaugucaacccaguuaaaaaaaaaauuaaugcuguguaaaaugguugaauuaguuugc

SEQ ID NO: 13568 - RNA, 70 nt, Human
gucauuguuauaaaaaaucaguuaucacuauaccaugcuauaggagacugggcaaaaccuguacaaugac

SEQ ID NO: 13569 - RNA, 100 nt, Human
guguucuaaccaauugccuuuucuuguuaucugagcucuccuauauuaucauacucagauaaccaaauuaaaagaauuaggaauaugauuuuuaauacac

SEQ ID NO: 13570 - RNA, 68 nt, Human
agcgguggccccgagguucgagucuugcucuucaaugcuaccggggaccgggacccggcggcccugcu

SEQ ID NO: 13571 - RNA, 66 nt, Human
ccuggcaccuguguuccagcccacaucccacaugcggcucgggcuucggaacacggaguggccggg

SEQ ID NO: 13572 - RNA, 87 nt, Human; identical to SEQ ID NO: 76

SEQ ID NO: 13573 - RNA, 84 nt, Human; identical to SEQ ID NO: 286

SEQ ID NO: 13574 - RNA, 64 nt, Human; identical to SEQ ID NO: 287

SEQ ID NO: 13575 - RNA, 89 nt, Human; identical to SEQ ID NO: 288

SEQ ID NO: 13576 - RNA, 99 nt, Human
aggccacagaaguacuuacggaaauaaaauuuuagaagaucauaguuuaagauacauagaauucuucuuauaaugguacauucaaaacacaucuguccu

SEQ ID NO: 13577 - RNA, 75 nt, Human
gaaguacuuacggaaauaaaauuuuagaagaucauaguuuaagauacauagaauucuucuuauaaugguacauuc

SEQ ID NO: 13578 - RNA, 97 nt, Human
guuugagaaauguuucucaauggcucuuugaagggaaagcugugucacuacugcuuucugcuuucaauggcuaggugaccccaaauauuuauccaac

SEQ ID NO: 13579 - RNA, 88 nt, Human
uggaaauucaauacacugagaaguguuaaaaucauuaaccaaaauuacugaaugguagaauacugucucgaaauguacugaauucaca

SEQ ID NO: 13580 - RNA, 113 nt, Human
accaguacuaucugcgggucaccacgguggcuucccacacuucugacucggacguuccuuccggugucacugagguggucgugaagcucuuugacucugaucccaucacuggu

SEQ ID NO: 13581 - RNA, 67 nt, Human
acugggugucccggcuggcaaaccucacgcaaggcgaagaccaguacuaucugcgggucaccacggu

SEQ ID NO: 13582 - RNA, 61 nt, Human; identical to SEQ ID NO: 347

SEQ ID NO: 13583 - RNA, 61 nt, Human; identical to SEQ ID NO: 9580

SEQ ID NO: 13584 - RNA, 112 nt, Human
gccgggugguggcagcaacagaggguugguggcggcuggggacgcccgaggccgugcugcuccccuggcugguggggucccugccgccgcagaccgcucgcgacuacccggu

SEQ ID NO: 13585 - RNA, 60 nt, Human
ggagcugugucuacucugcgggccugagcccaccccucagccaguuguauccacagcuuc

SEQ ID NO: 13586 - RNA, 71 nt, Human
ggcccagaguuaccacgcugccaggccacauccaggccguguauguucagaacguggucaagcuuuacgcc

SEQ ID NO: 13587 - RNA, 68 nt, Human
gggaucugugaggugcuguacgcugccuccuguaucugcggggaguucuuagagcaucugcaggaacc

SEQ ID NO: 13588 - RNA, 72 nt, Human
uaaaccuguaucccaaggaguccuauacgucagugugaugugcuggacucugaauucugggguacagcuuug

SEQ ID NO: 13589 - RNA, 65 nt, Human
uugauguaaaugaagauaaagugguuucuuggucaauaauugcaauuucuuucuuuuaaagucag

SEQ ID NO: 13590 - RNA, 61 nt, Human
cauuuccuuaagaaacuuuuucugauuagccauggcagaaaacaguuggaaaaggcaagug

SEQ ID NO: 13591 - RNA, 70 nt, Human
gguugcucuucgucgcucuccaccucgaugucaucguuaucgcucauuuccuacggcccagggagcggcc

SEQ ID NO: 13592 - RNA, 68 nt, Human
uuugauguggucccuacguuuucguuccagugcauuaugaugagcccguuugucagccgcagauugaa

SEQ ID NO: 13593 - RNA, 109 nt, Human
gaucucggcguugugcaugucgggcgacugcuccaugaucuugcgccgcucgaucugcgaccacaccaugaaggcguucaugggucgcuugaugugcccacucgggguc

SEQ ID NO: 13594 - RNA, 63 nt, Human
cccucauccucuuaucuaguuuacuuuucuuuauccuugaguauacuauagaccaggauaggg

SEQ ID NO: 13595 - RNA, 128 nt, Human
ucccuuuauaauuucaaagugcccuauacuuccacugucauaguacuuauauuaauuguacacuucucuaaauuaguguaagaguuugugggaguguguguguguguaugugugugugugugaaaaga

SEQ ID NO: 13596 - RNA, 84 nt, Human
gccauaucacaaaaguccuaucauggguaaugaaaagucuuauuuuuaauauauuucuguuuccuuuuucuuuugacauguggc

SEQ ID NO: 13597 - RNA, 81 nt, Human
uucugauaauuuugguguaaacaaaaaugauauuuaauuuuuauuaaaucaaguuuaccuauaucaaauucccuuuuagaa

SEQ ID NO: 13598 - RNA, 69 nt, Human
gcauaauaaaaaaagagguagcaaaugaaaauuaaagcauuuauuuugguaguucuucaauaaugaugc

SEQ ID NO: 13599 - RNA, 72 nt, Human
cagagaugaggcagaguggagagaaacaacucuggcugagccagagucuccagccacuacuucuuauuccug

SEQ ID NO: 13600 - RNA, 68 nt, Human; identical to SEQ ID NO: 1444

SEQ ID NO: 13601 - RNA, 66 nt, Human
ccccacgcucaguccuggucaaaggcgugccagaccuuucugagugcccccagggaggggcugggg

SEQ ID NO: 13602 - RNA, 82 nt, Human
cggauugagugucaucgacccugaagauguggcccuucucuuuaaguccgagggccccaacccagaacgaugccucaucccg

SEQ ID NO: 13603 - RNA, 72 nt, Human
cucucuucguccauggccugacuauauaggcauuggcauaagauccgugguacucauugucauggaagggag

SEQ ID NO: 13604 - RNA, 64 nt, Human; identical to SEQ ID NO: 1777

SEQ ID NO: 13605 - RNA, 65 nt, Human
uuucuuauauuguuguuaaucaucaaggaaucucuucucgauuaaaauacacacaucuuaagaaa

SEQ ID NO: 13606 - RNA, 78 nt, Human
ccccgucguaaacgcugaggaaugauguggccaagaaugccugauguucuuuaaacaaauuccauggaguuuaagggg

SEQ ID NO: 13607 - RNA, 68 nt, Human
ggagugguucuauaucuguuaaaaucauaagacaugauucuagacaggauaguaagaaaaguacuacc

SEQ ID NO: 13608 - RNA, 61 nt, Human; identical to SEQ ID NO: 387

SEQ ID NO: 13609 - RNA, 65 nt, Human
gcugcugcuggaaaugcugacuuuuaacccacacaagcgaaucucugccuuucgagcucugcagc

SEQ ID NO: 13610 - RNA, 60 nt, Human; identical to SEQ ID NO: 1551

SEQ ID NO: 13611 - RNA, 85 nt, Human
ggagacagggagaggcucuucuguguguagugguugugcagagccucaugcaucacggagcaugagaagacguuccccugcugcc

SEQ ID NO: 13612 - RNA, 77 nt, Human
ggguacgugccaagcauccucgcgcgacccgagagccuggggagcggggguuugcuggccguggcacucauuuaccc

SEQ ID NO: 13613 - RNA, 69 nt, Human
ggcaucggggcugggugcagcucuggcagaguccgcaggaccucugcaccagcuggcccagucugugcu

SEQ ID NO: 13614 - RNA, 102 nt, Human; identical to SEQ ID NO: 2172

SEQ ID NO: 13615 - RNA, 74 nt, Human; identical to SEQ ID NO: 365

SEQ ID NO: 13616 - RNA, 102 nt, Human; identical to SEQ ID NO: 2172

SEQ ID NO: 13617 - RNA, 77 nt, Human; identical to SEQ ID NO: 3082

SEQ ID NO: 13618 - RNA, 75 nt, Human
ggacgccuuccagcuucagcuauguuacuuacguuugaugcuacuuaaaguaaugaaugacguuuuaaggaaucc

SEQ ID NO: 13619 - RNA, 88 nt, Human
uguuuucuaugggacugauucugaaauucuuaacuauuaagaauauuuuaauagcagcaugacauuuagcaguaauccauuaagggca

SEQ ID NO: 13620 - RNA, 102 nt, Human; identical to SEQ ID NO: 2172

SEQ ID NO: 13621 - RNA, 113 nt, Human
cagccccagaggugucacaggaaggcaccagcaaggacauuggucuuugauuugauucagcaguccugucaaguauaaaugugauggcugugcugccuggcccucugcagcug

SEQ ID NO: 13622 - RNA, 60 nt, Human
cugaucuuacgugcucaagaagcuguugugaaggcagagcagcaucugcugaagagacag

SEQ ID NO: 13623 - RNA, 63 nt, Human
auggguuuuuaaagcaugagaaugugauaauugugcuacauaaucuuagacuuuugaacuuau

SEQ ID NO: 13624 - RNA, 70 nt, Human; identical to SEQ ID NO: 194

SEQ ID NO: 13625 - RNA, 74 nt, Human; identical to SEQ ID NO: 365

SEQ ID NO: 13626 - RNA, 102 nt, Human; identical to SEQ ID NO: 2172

SEQ ID NO: 13627 - RNA, 77 nt, Human; identical to SEQ ID NO: 3082

SEQ ID NO: 13628 - RNA, 82 nt, Human
cuugaccagccggaaagcauuggggaugacggccgacagcagggugguguggaugucacccaggacuuuccggaaggcaaag

SEQ ID NO: 13629 - RNA, 78 nt, Human
gcugccaucuucccaguauuucuuggacagucccaggaacuugaggcggugcaggguggcucccaggaggacaucagc

SEQ ID NO: 13630 - RNA, 83 nt, Human
cuuuuuuaucagauuuuaguaagccaauuguucucaaguauucuuaaaguacauuacagcuuaccuuaaauucgaugauuagg

SEQ ID NO: 13631 - RNA, 69 nt, Human
gagacaggguuucacuauguugcccaggcuguucucaaaacuccagggcucaagggauccuccugccuc

SEQ ID NO: 13632 - RNA, 92 nt, Human
ccauuugcucaguagaaguuuaauggagaaaucguuguuuaaaacaaucagucaaaaagaacagcucuuuuacaaacaaguuauggcagugg

SEQ ID NO: 13633 - RNA, 61 nt, Human
cuacagcaacaagggcuucuauuccaucuacaacuuggaucgggggaaaagggagauguag

SEQ ID NO: 13634 - RNA, 73 nt, Human
gaguaaugggauauccaauaaacugagaauguuucuucacaaucuccuuuauucuucguuccuccaaguacuc

SEQ ID NO: 13635 - RNA, 67 nt, Human; identical to SEQ ID NO: 10746

SEQ ID NO: 13636 - RNA, 76 nt, Human
cugggguguuuauggcaagucacuuugacagacauuauuguggcaauguugucugacuuacuguuucacaaaccag

SEQ ID NO: 13637 - RNA, 65 nt, Human; identical to SEQ ID NO: 247

SEQ ID NO: 13638 - RNA, 80 nt, Human; identical to SEQ ID NO: 100

SEQ ID NO: 13639 - RNA, 76 nt, Human
gcccacugugacaaugucaccgaucuggacgucccugaagcagggggacagguguacagacauguucuuguggcgc

SEQ ID NO: 13640 - RNA, 71 nt, Human; identical to SEQ ID NO: 1764

SEQ ID NO: 13641 - RNA, 74 nt, Human
cccaaaacuauuguuuguguuucuguguuucauauucagugauuuaauacaguaucauggcugagguggauggg

SEQ ID NO: 13642 - RNA, 82 nt, Human
uuguaauuuuuaauuucaugcguuuaaucauugucucuucauuuuaagacuuuuaauacaaaugucauuuuuaaagaaacaa

SEQ ID NO: 13643 - RNA, 77 nt, Human
cacugcacuccaaccugggugauagaauaagacucuugucucaaggaaagaaaaaaugucuacucaguagagcagug

SEQ ID NO: 13644 - RNA, 83 nt, Human
guuuaguguauaccugucacucuagaauguaggcucccugagauaaaaacuauaauucuuuugauggcaguuacauucccaac

SEQ ID NO: 13645 - RNA, 78 nt, Human
uguuuugggacccaaguuuggccaggucgcggucuauagaacagugacagaagaggccauuagguggguuuuaauaca

SEQ ID NO: 13646 - RNA, 72 nt, Human
acuaagacuggcuugugguuuaaugaauauguucaguuuuugaauuuaauaguaccccaauucaguaauggu

SEQ ID NO: 13647 - RNA, 70 nt, Human
auugauagacuucguaguaugucacucuuccaagaugugagugcucuuaacuacgaaugguuaauucaau

SEQ ID NO: 13648 - RNA, 68 nt, Human
gccucuuugggcggaagacaggucaggccccuggauacucuuacacagccgccaauaagaacaaaggc

SEQ ID NO: 13649 - RNA, 81 nt, Human
uacggggaugguccggcuaccacaauccgguuggucucugcccagcagggaaaaagagagguauuggugcccauuuccgug

SEQ ID NO: 13650 - RNA, 75 nt, Human
guguugggcccgcgggcgcgggcucccgggcgcgcgugccccggggucugcugugcaggcgcgcgggcccggggc

SEQ ID NO: 13651 - RNA, 65 nt, Human
cucuaagcuuuacaaaaaagauucuaacugucacaaggaucauucgaacauuaaaggcuauggag

SEQ ID NO: 13652 - RNA, 66 nt, Human
gcgcgguacaucgcggaagucggugcuuuaguacgccgcuggcaccuuuacucucgccggccgcgc

SEQ ID NO: 13653 - RNA, 66 nt, Human
guggcuccuucuugaagcaucugccagagacugaggcaggcagagcccaagacccaggggagccac

SEQ ID NO: 13654 - RNA, 64 nt, Human
guuagaauugauuuccaagaaucggcauguauacuuaauacugaauuucuuugauuuaacugac

SEQ ID NO: 13655 - RNA, 71 nt, Human
gugguccucaagugucugaaaaaaauucacuuuuagaggaguaucaacguuuuugggacauaagaggcuau

SEQ ID NO: 13656 - RNA, 72 nt, Human
uccauaaugaugggcuuuuagguuguuucuaauguuaugcuauuagcagcuguuuaauuccaauauaaggga

SEQ ID NO: 13657 - RNA, 68 nt, Human
uuagggaauaaugacaagaaaaaagucuguaaauguugaguacagacauaauuuuguuuuuucucuga

SEQ ID NO: 13658 - RNA, 77 nt, Human
accgcuccacgagccuggagagcucggacugcgagucccuggacagcagcaacaguggcuucgggccggaggaaggu

SEQ ID NO: 13659 - RNA, 67 nt, Human
cgccugggcuuccuaucccaucgggacccagauggcuggggggcagggggaaugggaguauaaggug

SEQ ID NO: 13660 - RNA, 67 nt, Human
uucauucucuuaucuaaaucucucuguucucucucagggaauauuuucagagaauagguggaaugaa

SEQ ID NO: 13661 - RNA, 83 nt, Human; identical to SEQ ID NO: 6805

SEQ ID NO: 13662 - RNA, 65 nt, Human; identical to SEQ ID NO: 4539

SEQ ID NO: 13663 - RNA, 69 nt, Human
guaggggcccucguccuucuucucggccgccaccagcaggcugugcuccaggucggccugggccccugc

SEQ ID NO: 13664 - RNA, 101 nt, Human; identical to SEQ ID NO: 11969

SEQ ID NO: 13665 - RNA, 66 nt, Human
gauaaggaccuguuuggggcagcagggagcaaaaucuccuuuaacaaccaagcaguuuccucauuc

SEQ ID NO: 13666 - RNA, 78 nt, Human
gcagguaugugaugacaucagccgacgccuggcacugcugcaggaacagugggcuggaggaaaguugucaauaccugu

SEQ ID NO: 13667 - RNA, 62 nt, Human
ugcuacuauuuuauugcccgagguggggguguaugcaccgcacaccggggcuaugagaagca

SEQ ID NO: 13668 - RNA, 69 nt, Human
cggggggugcugggggcggggcaggggcagguguagccucugugccucguuguccccuggcgcuacccg

SEQ ID NO: 13669 - RNA, 62 nt, Human
gggucauacauuaauucaauugcugagauugaggaacuggcaggcucagcgaagaaggaccc

SEQ ID NO: 13670 - RNA, 71 nt, Human
guugcacagccacagacuucucagcacagaguggggacugccuuccauugugaagucucuuauggugcagc

SEQ ID NO: 13671 - RNA, 66 nt, Human
gaagcuguagagugcugcccgaaaucucuaggaaguugguggcaagggacagcacucacacucuuc

SEQ ID NO: 13672 - RNA, 68 nt, Human
uugcuuuguuuacugcuaguauauuaggaaauccuaggaucucagaauucacaauaguaaauaaacaa

SEQ ID NO: 13673 - RNA, 73 nt, Human; identical to SEQ ID NO: 721

SEQ ID NO: 13674 - RNA, 82 nt, Human
ggggaccggucucaccgaaugcauccugucgggcaucuugucugugaacgggaagaaggugcugcacauggaccggaacccc

SEQ ID NO: 13675 - RNA, 63 nt, Human; identical to SEQ ID NO: 722

SEQ ID NO: 13676 - RNA, 60 nt, Human; identical to SEQ ID NO: 723

SEQ ID NO: 13677 - RNA, 61 nt, Human; identical to SEQ ID NO: 6766

SEQ ID NO: 13678 - RNA, 76 nt, Human; identical to SEQ ID NO: 758

SEQ ID NO: 13679 - RNA, 65 nt, Human
ggugccggcaaccuuggugaccuugagcacguugaagcgcacugucuugcucagaggccggcacu

SEQ ID NO: 13680 - RNA, 109 nt, Human; identical to SEQ ID NO: 831

SEQ ID NO: 13681 - RNA, 75 nt, Human; identical to SEQ ID NO: 74

SEQ ID NO: 13682 - RNA, 87 nt, Human; identical to SEQ ID NO: 76

SEQ ID NO: 13683 - RNA, 71 nt, Human; identical to SEQ ID NO: 77

SEQ ID NO: 13684 - RNA, 60 nt, Human
ggggccagcggcaugggaggcaucaccgcaguuacggucaaccagagccugcugagcccc

SEQ ID NO: 13685 - RNA, 79 nt, Human
ccuggcccaucccuuccccagugcacucugaccuagcuagugccuggugcccagugaccugggggagccuggcugcagg

SEQ ID NO: 13686 - RNA, 67 nt, Human
ggcugaguucuguaguuuccagaguuggcuggcuagagccuucuaagagguuacagaacuauuagcu

SEQ ID NO: 13687 - RNA, 120 nt, Human
ccccggaccugcagucuauggagcagauucggcggaucaugcggccacagaugugccugaccagggccugcugugugaccugcuguggucugacccugacaaggacgugcagggcugggg

SEQ ID NO: 13688 - RNA, 123 nt, Human
gagaacgaccguggcgucucuuuuaccuuuggagccgaggugguggccaaguuccuccacaagcacgacuuggaccucaucugccgagcacaccaggugguagaagacgggcuacgaguucuu

SEQ ID NO: 13689 - RNA, 100 nt, Human; identical to SEQ ID NO: 698

SEQ ID NO: 13690 - RNA, 60 nt, Human; identical to SEQ ID NO: 2705

SEQ ID NO: 13691 - RNA, 83 nt, Human
gcuccugguggacccauguggaaaugggaccuccagaucccauucugggagucacugaagccuuuaagagggacaccaauagc

SEQ ID NO: 13692 - RNA, 131 nt, Human
ucucucuccucggcagcagcgggaggcagaggaaggcggcagaagaugaagagcuuucccauccagggugacuuuuuuaagaacccaccucuugugcuacccaucccgccuccugccggguuucaggggga

SEQ ID NO: 13693 - RNA, 86 nt, Human
aaagagguuaauuuccuuguuuauuccuucuguaggguagacaucauucuauucaacucuuacacuaaacauguauguagcucuuu

SEQ ID NO: 13694 - RNA, 65 nt, Human
uggugauuucugagacugagaugaagauacguuuccaaagagaguauuuacauuugaaucugcca

SEQ ID NO: 13695 - RNA, 83 nt, Human
uaaaaauuccaaauaauuaucucuaaagcaaauccuuuguuaguuacauggcuuuacauauuaauuacucuggaaaguuuuug

SEQ ID NO: 13696 - RNA, 83 nt, Human
uguuuaguagcagaucuccuuucuugauaguuucuugguacugccaguucuugcuaucaggucuguugguuucuacuauuuca

SEQ ID NO: 13697 - RNA, 63 nt, Human
uuuaaaacugaacuaagucaaucugauauguuugaucagagguuacaagucaaaaguuuuaaa

SEQ ID NO: 13698 - RNA, 98 nt, Human; identical to SEQ ID NO: 6333

SEQ ID NO: 13699 - RNA, 73 nt, Human
uuuuaugucaccaguugguccucaucaaauaaaauuuccuuaggagugcagagggcucauugggaaaauaaaa

SEQ ID NO: 13700 - RNA, 71 nt, Human
cccacuuuaacugcgugcagaucaggggugguuuauguggacauuucuagggaagcggcaguaacuuuggg

SEQ ID NO: 13701 - RNA, 64 nt, Human
ucaucaggccaugccauggaaaggggcgguaacucccaggugugccauggugaugguaaacugg

SEQ ID NO: 13702 - RNA, 110 nt, Human
gggugaugccaccuccugggugggugaugccuccucuggguggugauaccuccucuaggugggugaugccuccucuggguggugauaccuccucuaggcgggugaugccc

SEQ ID NO: 13703 - RNA, 75 nt, Human
ugccuccucugggugcgugaugccuccucugggcgggugaugccuccucugggugcgugaugccuccucugggca

SEQ ID NO: 13704 - RNA, 60 nt, Human
gugacaacaugcuggagccaagugcuaacaugccuugguuucaagggauggaaaagucac

SEQ ID NO: 13705 - RNA, 79 nt, Human; identical to SEQ ID NO: 1810

SEQ ID NO: 13706 - RNA, 60 nt, Human
ggugacaacaugcuggagccaagugcuaacaugccuugguucaagggauggcaagucacc

SEQ ID NO: 13707 - RNA, 61 nt, Human; identical to SEQ ID NO: 2067

SEQ ID NO: 13708 - RNA, 61 nt, Human
auggagucagugugacaacgggcuguacccaaaucugagacggcucucuugucuucuccau

SEQ ID NO: 13709 - RNA, 131 nt, Human; identical to SEQ ID NO: 1788

SEQ ID NO: 13710 - RNA, 64 nt, Human
auggugacaacaugcuggagccaagugcuaacaugccuugguucaagggauggcaagucaccgu

SEQ ID NO: 13711 - RNA, 61 nt, Human; identical to SEQ ID NO: 823

SEQ ID NO: 13712 - RNA, 61 nt, Human
cccugguggccaauuggaaccggguguuguaaaaccccggauugggguggccacccuaggg

SEQ ID NO: 13713 - RNA, 73 nt, Human
cugucuuuuuauuguuucuugucuguuuuugcagucuuacaaaaaaaauguugacuaaggaauucugagacag

SEQ ID NO: 13714 - RNA, 66 nt, Human
ggagaggagauuucucaucaaaaguccguggugugugugugugcccguguguggugggaccucuuc

SEQ ID NO: 13715 - RNA, 66 nt, Human
auggugacaacaugcuggaagccaagugcucaacaugccuugguucaggggauggaaagucaccgu

SEQ ID NO: 13716 - RNA, 65 nt, Human
gccaucugaucuauaaaugcgguggcaucgacaaagagaaccauugaaaaauuugagaaggaggc

SEQ ID NO: 13717 - RNA, 76 nt, Human; identical to SEQ ID NO: 2134

SEQ ID NO: 13718 - RNA, 71 nt, Human
cagguuuguuacacguguauacaugugccauguugguguggacagagcacauuuuuguauaaacaaaccug

SEQ ID NO: 13719 - RNA, 80 nt, Human
gaccaugucuuaugaauuaacccauacugcacauuaaaaacuuuacuggguaugcugggaucauuaauucaugacagguc

SEQ ID NO: 13720 - RNA, 61 nt, Human
gaucauuaauucaugacaggucaccauagagaagaaauucccuuguccuauacagaugauc

SEQ ID NO: 13721 - RNA, 69 nt, Human
guauagugcccaauaacuaguuuuguuuuuuuauauauauauacuuuaaguucuaggguacauguguac

SEQ ID NO: 13722 - RNA, 90 nt, Human
cuucugagugugaggaggaugaugaggaugcccagggcaggucucugccugcucccuucguucugguccuuccaccagucacccauggag

SEQ ID NO: 13723 - RNA, 84 nt, Human
uauugugaaugaacucagugucaaauaacuauauacugaaaaaugauucaaaugguaaauuuuauguuguguuuaaucacaaua

SEQ ID NO: 13724 - RNA, 62 nt, Human
gaccagugacccuguuuuguggcauucaugcaaaacaugcugagggcuuuguucaucugguc

SEQ ID NO: 13725 - RNA, 91 nt, Human
gucccugguuuuuaauuuucugucugaugucacagaucauuguugcacacaaacguggcauagaaaagaacauguucagaagccauggggc

SEQ ID NO: 13726 - RNA, 80 nt, Human; identical to SEQ ID NO: 9351

SEQ ID NO: 13727 - RNA, 61 nt, Human
cagacaagaggaagaagccaagcacaggugccauuucaggcaaagucuuggcuucagucug

SEQ ID NO: 13728 - RNA, 63 nt, Human
cucacugagaauucaccaaguggggcaggauuccugcaacuacccgcguaguucaggggagag

SEQ ID NO: 13729 - RNA, 64 nt, Human
caggagaccgggucuugaacagcugguaccaaccuuagaaacuagcucucuaauccggcucgug

SEQ ID NO: 13730 - RNA, 80 nt, Human
uggggccuuccgguucacagcgaauuacugguuaaccaauugacaaaaaguagaaugcuguaaaaacuguuaggugccca

SEQ ID NO: 13731 - RNA, 94 nt, Human
ggggugguucuaggacuggauuuccuggugagguccaagcuguugcuguugucaacaugucuggcccagcaggcucuggaccugcugcugaacc

SEQ ID NO: 13732 - RNA, 94 nt, Human
ggcuguggcuggaaugccgacauguggccuuuccuuguagaugcuugauuuucucacaacuuggaggcauccucguggcauggcuggcgugguc

SEQ ID NO: 13733 - RNA, 70 nt, Human
ggggaggaggugggucgcagaaugggcugacucggagggaguuuuuaauuuuggcuuuaccugcuucucc

SEQ ID NO: 13734 - RNA, 92 nt, Human
gaacacaaguguguuguugucuucuaucuucuucauggcagacucaguggucagcggaaacuugaugauagcauaguggucaagcuuguuuc

SEQ ID NO: 13735 - RNA, 80 nt, Human
ggguguugaccuuggccacaucaaugucauacagcuucuucacagccuguuuaaucuggugcuuguuggcuuuaacaucc

SEQ ID NO: 13736 - RNA, 64 nt, Human
gugucuucggccgccggaagggugggugacgugcggaucuucuucuuuuuguggcuguggacac

SEQ ID NO: 13737 - RNA, 64 nt, Human
gccccacucgcuccgguaguugccuuugcgcagagcgaugcacucgccuaccggaacugaaggc

SEQ ID NO: 13738 - RNA, 70 nt, Human
gcguugcccgccagcuccaggaucucggcggucagauacucgaggaccgcagccauguagacgggcgcgc

SEQ ID NO: 13739 - RNA, 72 nt, Human
ccgggugcgauggugcaugccuguaaucccagcuacucgggaggcugaggcaggagaaucgcuugaaccugg

SEQ ID NO: 13740 - RNA, 60 nt, Human
aaucacaaugguggaaugucaucaguuaaggcaggaacuggcuauuucacguuuaugguu

SEQ ID NO: 13741 - RNA, 62 nt, Human
ucuuaaguuauuuauuucuggguuuuaaacauaaauauguuuacuugggauuuagcuuugga

SEQ ID NO: 13742 - RNA, 87 nt, Human; identical to SEQ ID NO: 76

SEQ ID NO: 13743 - RNA, 77 nt, Human
gggcugcggcugcagaaguaccgccugcggaguaacugcaaagaugcuguccgugcgcguugcugcggccguggucc

SEQ ID NO: 13744 - RNA, 85 nt, Human; identical to SEQ ID NO: 4613

SEQ ID NO: 13745 - RNA, 60 nt, Human
gcuacauccgucguaacguguguccuccgaagaaauacaaagcguucgggcggaaaaugc

SEQ ID NO: 13746 - RNA, 64 nt, Human
ggcgagaggcccaaggcgcagcagugguggcccucgguagggcgacacaccuuugggaaaugcc

SEQ ID NO: 13747 - RNA, 74 nt, Human
ugauccccccaggagggcaacaccacuuggugucaggggcgucccggcagagaaguguggcuaaggggggguca

SEQ ID NO: 13748 - RNA, 82 nt, Human
ggccggcggagaggccagcagcccccgggacaccagugccuucuuccuggagaccaaggagcgccuguaccuccuggcggcc

SEQ ID NO: 13749 - RNA, 64 nt, Human
uuguacagcagcgcagucacagucggcccccacaaggaauuugcugugaccaugagaccuacag

SEQ ID NO: 13750 - RNA, 111 nt, Human
agauuuugguuuuuauaaauauaaauguuuuauuuuuaaauguaggaagauauugaugcagaaucuucguuuucauuaaauaugaacuuuagcaguaaaagaacaaaauuu

SEQ ID NO: 13751 - RNA, 64 nt, Human
augagaguggaggcuuuuuugcuuggucauuaauuuagcagaauugcuugcagcaaacucuuau

SEQ ID NO: 13752 - RNA, 62 nt, Human
gggauaugucuuuucugguuuguuguuggcauuuauuaaccuuacagucaaacagaaaucuc

SEQ ID NO: 13753 - RNA, 99 nt, Human
ucaaugcagaaagacacaccacaaguaagugcuuuuaaugucaaguuuuuuuugagggggaaacauuuaagcauuggacuuuacaaguguuuacauuga

SEQ ID NO: 13754 - RNA, 70 nt, Human
cgggugaaggaggaagagauccacucugccaacaagugccgucucaagcuccugcuuccugggaaacccg

SEQ ID NO: 13755 - RNA, 75 nt, Human
uaggaucugguguggcuuuuggggagccagugugcuguguggugaccucauuggccuccugaacccuagaaccug

SEQ ID NO: 13756 - RNA, 89 nt, Human
gggcaucaaggcuucaaacacagcagagguguucuuugauggaguacgggugccaucggagaacgugcugggugagguugggaguggcu

SEQ ID NO: 13757 - RNA, 130 nt, Human
uugccaugcacauccucaacaauggaagguuuggcauggcugcggcccuggcagguaccaugagaggcaucauugcuaaggcgguagaucaugccacuaaucguacccaguuuggggagaaaauucacaa

SEQ ID NO: 13758 - RNA, 68 nt, Human
ccuucccuuccacagaguuuaguuuccucauuuguaaaaugaagacaaaccucgugagagagggaagg

SEQ ID NO: 13759 - RNA, 65 nt, Human; identical to SEQ ID NO: 1518

SEQ ID NO: 13760 - RNA, 75 nt, Human; identical to SEQ ID NO: 74

SEQ ID NO: 13761 - RNA, 108 nt, Human
ggcuuaaaggguauguccuugaacuuggaaccugacaauguugguguugucguguuuggaaaugauaaacuaauuaaggaaggagauauagugaagaggacaggagcc

SEQ ID NO: 13762 - RNA, 71 nt, Human; identical to SEQ ID NO: 77

SEQ ID NO: 13763 - RNA, 95 nt, Human
cugggaccgugccuucaagcccuaacaacuucuuggcccacgguguccuccccgacagcgugcaccuucacccgcugcucaagguccgcucccag

SEQ ID NO: 13764 - RNA, 60 nt, Human
ggccuggcccagagcgagcuuaugcgacugcccaguggcaaagugggcuucagcaaggcc

SEQ ID NO: 13765 - RNA, 60 nt, Human
cggccgccgcggaggcgcagcaugucggggcgcccgagggcguggaggccgcggaggccg

SEQ ID NO: 13766 - RNA, 82 nt, Human
gucgagcagcagcggcgacucgaggccgcccgggggcugaugguggcccgacgggaagcccgagaagcugaggcuguggugc

SEQ ID NO: 13767 - RNA, 65 nt, Human
ggagaacaaggggucuguggaaaucaugagaaaggacuugaaugacgcccgggaccugcauggcc

SEQ ID NO: 13768 - RNA, 73 nt, Human
aggcccggcucccaauagaggccgcgcaaacuguugugacaucagcggcugcggcugcugcccagaccggccu

SEQ ID NO: 13769 - RNA, 61 nt, Human
gacggcggcggcuguagcggcgugacgaggagccccauggcaccugcccagcacccaccuc

SEQ ID NO: 13770 - RNA, 76 nt, Human
gccaucccgggcagugggcaccgucaaaguauaccugcccaacaagcaacgcacgguggugacuguccgggauggc

SEQ ID NO: 13771 - RNA, 88 nt, Human
ggguccauuggaauggauuuggaacccaccuuggcaagguuaaaccccgaaaacccggccccacagaccaacgcuuuccaguuaaccc

SEQ ID NO: 13772 - RNA, 60 nt, Human
ggcacggcucggggcguggugguggccacgggcgaccgcacugucaugggccguaucgcc

SEQ ID NO: 13773 - RNA, 74 nt, Human
agggaaauuacagugcaaccugaaacaugcuucuuaaugaauucauagugcugucacaguugaauguaaacccu

SEQ ID NO: 13774 - RNA, 60 nt, Human
guaaauaaaacaaccagcaugagcaaucagcuuaugucagauuccauggguuuguauuac

SEQ ID NO: 13775 - RNA, 68 nt, Human
uaggggagggaagagaacuaagaugauacuaacaaaugcuaucacugguuuuguggcugccucccuua

SEQ ID NO: 13776 - RNA, 83 nt, Human
guauuuuucagcauucuuggauaaagcaguucugcauuuuuaaauugggacugcagaagugacugucuauaguugugaaauac

SEQ ID NO: 13777 - RNA, 70 nt, Human
gcgggagagcggcggggccgagagcgugacucgcccgcuccgcgcugcuucccccgcgccgccuccccgc

SEQ ID NO: 13778 - RNA, 85 nt, Human
acugcauuugaacuuuauuacuuuuaggcaucauuuacugaauccuuaugaugugcuaauuacagugcuaggccuuaaacacagu

SEQ ID NO: 13779 - RNA, 65 nt, Human
cuuuuauuuaguuugauauguuucuuuacagaaugcagaaaacacaucuuaaaaucauauagaag

SEQ ID NO: 13780 - RNA, 91 nt, Human
ucaugcgagaccuggcugcuguagcugcugcgggacuaccacugauaggucgucaggcucagguagcugcuggccgcguacuuguugguga

SEQ ID NO: 13781 - RNA, 65 nt, Human
cggaucgauacgaauagggagucuggguucaugauccccugaauccugugaguguguggagacug

SEQ ID NO: 13782 - RNA, 73 nt, Human; identical to SEQ ID NO: 1863

SEQ ID NO: 13783 - RNA, 71 nt, Human; identical to SEQ ID NO: 1145

SEQ ID NO: 13784 - RNA, 67 nt, Human; identical to SEQ ID NO: 1146

SEQ ID NO: 13785 - RNA, 92 nt, Human
gcaccccggagcggauggccgaggcuggcuucauccacugccccacugagaacgagccagacuuggccaguguuucuucugcuucaaggagc

SEQ ID NO: 13786 - RNA, 64 nt, Human
gcagcccuuucucaaggaccaccgcaucucuacauucaagaacuggcccuucuuggagggcugc

SEQ ID NO: 13787 - RNA, 105 nt, Human
uccgguugcgcuuuccuuucugucaagaagcaguuugaagaauuaacccuuggugaauuuuugaaacuggaccagagaaagagccaagaacaaaauugcaaagga

SEQ ID NO: 13788 - RNA, 60 nt, Human
ccgccaaucucucuagcacugguuccagguaucugaaugcuuugguugacagugcggugg

SEQ ID NO: 13789 - RNA, 60 nt, Human
gaggacuugaagcagaaagcaagugaauacgagucagaagccaaguaucuucaagaccuu

SEQ ID NO: 13790 - RNA, 89 nt, Human
agcuccauuuacagaacuguugcuuuuuugcaguugucuuuguucuugaaaaaccaguaacugcuucuggauaccuuuuguguagagcu

SEQ ID NO: 13791 - RNA, 89 nt, Human
uagugaaauauugaggcagcaauccaguacauuaagagucauccucugcucuauuuguuaccuuguuauugcugucucaacauuuacua

SEQ ID NO: 13792 - RNA, 94 nt, Human
gggauaguauuaauuuuuuuugguugggugcugugguugguuaaaaugaccaacuauuuugcagccccuccuuucaauagguugauucuauucu

SEQ ID NO: 13793 - RNA, 60 nt, Human
gguggaagugacguuggagaguucuagacuuaagccucaagaagccuugcagcuuccacc

SEQ ID NO: 13794 - RNA, 78 nt, Human; identical to SEQ ID NO: 932

SEQ ID NO: 13795 - RNA, 73 nt, Human
acccgaacaacaugcacucgucgaugucacggugggcugggaugccguaguugacgauguuguuguccugggu

SEQ ID NO: 13796 - RNA, 72 nt, Human
gaggcgcuguguaugcagggcccggcaguaagcccagcugccuacagccaaggcccagcgacagacauccuc

SEQ ID NO: 13797 - RNA, 66 nt, Human
ggugggagggaaaguguucggcagggcagaaacccugccuggcuguauccaacugucacucccacu

SEQ ID NO: 13798 - RNA, 83 nt, Human
gaguuagacuuuccauuuuauuuacaugucuaguaauuguagauugaaaacuuggcauuguagauaagauguuauagcaacuc

SEQ ID NO: 13799 - RNA, 67 nt, Human
uagccuagcucccuggggucucccaugcuucuguguaaucuggcagacagccaggcgauuuaggcug

SEQ ID NO: 13800 - RNA, 64 nt, Human
ccagaggacggcagaacccaucaucaugcagagccaagcaugucaaccuuucugcauccuuagg

SEQ ID NO: 13801 - RNA, 78 nt, Human
cugaugaauucaaaaucagcaaaggucuucgaaugccauucgaugaaaagauggacccuuggcugucagaauuaguag

SEQ ID NO: 13802 - RNA, 99 nt, Human
gaggcaggaggaucacuugagcccaggagauuaaggcugcagugagcugugaucgugccacugcacuccagccuggaugucauagagagucccugucuc

SEQ ID NO: 13803 - RNA, 79 nt, Human
aggagacccaguuaauguaauuccagaagcaaguugcauuugccaagcagcuuacacgugggcuuaugacuggguuccu

SEQ ID NO: 13804 - RNA, 66 nt, Human
gaugccagaaguccggggagccuuguuggugcaaaugccaacaggaaguuuugggacuaagccuuc

SEQ ID NO: 13805 - RNA, 65 nt, Human
gagacggguggaucacgaggucaggaguucgagacuagcuuggccaacauggagaaacccgucuc

SEQ ID NO: 13806 - RNA, 69 nt, Human
aagggcugaauaguuaugacagagaccauacauggcuugcaaagucuaaauauuuacuaucuggcccuu

SEQ ID NO: 13807 - RNA, 87 nt, Human
ggcuggucucgaacuucugaccucaagugaucugcucucuugggccucccaaagugcuggaauuacaggcaugauucgcacccagcc

SEQ ID NO: 13808 - RNA, 90 nt, Human
ucacccaggcuggagugcaguggagugaccuugguucacuauaaccuccuccucccagguucaagagauucuccugccucagccuccuga

SEQ ID NO: 13809 - RNA, 66 nt, Human
gaugcuuuuuguggccagucuguaaguugugagaagucucuuggcugugggccauuacuguguauu

SEQ ID NO: 13810 - RNA, 60 nt, Human
gaagcccugcuggggucgcgcggcuuuggaaaaacaaauccuggcccuggacucgguuuc

SEQ ID NO: 13811 - RNA, 71 nt, Human
ggaggggacuggaggaaacccccuuguuggaagagauuccaagagaagcacgguuuucucuuucccuugcc

SEQ ID NO: 13812 - RNA, 65 nt, Human
ugacuguuggaguaaaaaaccucuuaaauccauuguaucagagguccuuaccucucugacaguua

SEQ ID NO: 13813 - RNA, 68 nt, Human
ugguguguauauuuguucucgaggaccagcuuacgaggugagagguugaagaauuguaguacauacca

SEQ ID NO: 13814 - RNA, 62 nt, Human
cugggaccgccccugcccguggaaagccacaaggacaaagggagcggcaccucgacccccag

SEQ ID NO: 13815 - RNA, 83 nt, Human
aacaaaauuauagaauuuccagauuucuugccagguauuuuugaaaaccuaucaaggugcuccauuggauuucuguauuuguu

SEQ ID NO: 13816 - RNA, 79 nt, Human
ugagagaaggugaugggaguccuccaccuggcacugauuugagucauucaaggguuaggaugcaggucaucuuuuuuca

SEQ ID NO: 13817 - RNA, 70 nt, Human
uccuguaguguuccuggagaagcuagagccugauuguaggcuacuacucaucaauuaacuucuacagugg

SEQ ID NO: 13818 - RNA, 73 nt, Human
caaaaccaaauuuaaguucacaaggccaugcuacuuccagagagugaaugcccuuguuuagaaugggucucug

SEQ ID NO: 13819 - RNA, 118 nt, Human
ucaucaguuuauuaguuuggaaaaacuguaguuucuagcuuaugaauagcacauucaucaaguuggcucuucaucuauaucacuacuuuccuaaaugaaacaauaagauaucugguga

SEQ ID NO: 13820 - RNA, 94 nt, Human
cagucagccccuggacaaagguccuggcagcaaugaaggcgcggguaaccugaaucuucaguuuccggggcacgucuccaaauggcuugagcug

SEQ ID NO: 13821 - RNA, 100 nt, Human
gaaaaacuucugaauucugcauguacagcauaccauaagucccuacaaacauaucauuuaguaacuuuugugcauucugcaagaacucucgaaaaaauuc

SEQ ID NO: 13822 - RNA, 81 nt, Human
gugauacugaggguuuaucaacugaaacauccguuccaagaaccgagcccaaaaaucauugaacauuuccuccaaauucac

SEQ ID NO: 13823 - RNA, 77 nt, Human
cuuagccccucugcuggguagagaggcacuuucagggacuucccuccagcugccucuucaucugggaaugagcuaag

SEQ ID NO: 13824 - RNA, 85 nt, Human
gugcuugaggucucccugcucuugguggcagugguagcagcaacagcagcagcagcagcagcagcagcagcagagaccucuccac

SEQ ID NO: 13825 - RNA, 79 nt, Human
ggccgcgaugucccccgccugucugcgaaugcugcguagcggguagacauggagggcuuucggcaucgucagaguggcc

SEQ ID NO: 13826 - RNA, 60 nt, Human
gggguucuucaggguugccaugagaaccagggauccggggauugggcagcagagggcccc

SEQ ID NO: 13827 - RNA, 71 nt, Human
cuaaccauugaugagcacuccugauuuuaaucuagaacauucagauuuaccauaauguuccuuagugguag

SEQ ID NO: 13828 - RNA, 63 nt, Human
gagcugaucgccagcaguguauucuuaauugucuucauuugagcacugguaaacaaucugcuu

SEQ ID NO: 13829 - RNA, 75 nt, Human
uagcaucugguaugcaccuagacauaaaauaguucccaaguaugauuauuucuaagugguguauuuacagggcua

SEQ ID NO: 13830 - RNA, 71 nt, Human
ccacguccacuacuugaucaaguggcgggacuuaccuuacgaucaggcuucuugggagagugaggaugugg

SEQ ID NO: 13831 - RNA, 113 nt, Human
ucacagggaguuaaugaggggugaggaaggccgaccaggcaagaagcucaagaaggugaagcuucggaaguuggagaggccuccagaaacgccaacaguugauccaacaguga

SEQ ID NO: 13832 - RNA, 72 nt, Human
gcugucuuggaagacauggcucguccggacagacauggauugucuggacgauguggcuuuucuauggcaugu

SEQ ID NO: 13833 - RNA, 70 nt, Human
gacuccccuuggugguauucgcccuccggaacccaaagacuuugguuucccggaagcugcccgggggguc

SEQ ID NO: 13834 - RNA, 68 nt, Human
cuucuacucauauagacguugcuaccgacgcggguauagcaccaugaucacgcugucgugacuggaag

SEQ ID NO: 13835 - RNA, 86 nt, Human
ggaauguaaguaagugacaaugcuuauggaaagccaguuaguuagaauuggaaaucugucuugucauuuuacaagcauuagauucc

SEQ ID NO: 13836 - RNA, 60 nt, Human; identical to SEQ ID NO: 1551

SEQ ID NO: 13837 - RNA, 64 nt, Human
ggcccuugugcccugucucuucucaggcgucuuuacaccuggguagggauuggcacacggcgcc

SEQ ID NO: 13838 - RNA, 78 nt, Human
gucagcacuuacauuacgaaaauuggcuacaagcccgacacaguagcauuugugccaauuucugguuggaauggugac

SEQ ID NO: 13839 - RNA, 61 nt, Human
agcuugauugaaaagauacuaagaacuaaacugaacccguuacuaaccauuuucaaaggcu

SEQ ID NO: 13840 - RNA, 63 nt, Human
uuuuuuuuuaacauuucgaaugcuuuaaucaacagacauauacaaaugaauuuuaaaauaaaa

SEQ ID NO: 13841 - RNA, 67 nt, Human
aguggccgugucucauugccucagacaugcagcagcaugaagugcgcgaugagcuggagggcccacu

SEQ ID NO: 13842 - RNA, 94 nt, Human
ccugcccuuggcuuccagaacagcugucagccugaguagagggugagggggccuccugcugcaggcagauuccuucugcagagcccuggccagg

SEQ ID NO: 13843 - RNA, 60 nt, Human
ugaugagaacaccguguacagcaucggcgaggacgggaagguaggcggcugcaggauuca

SEQ ID NO: 13844 - RNA, 71 nt, Human
cugguuugccaauuggucagguccccagcgugaacguuuccuagaggaccugguagcuaaggcagugccag

SEQ ID NO: 13845 - RNA, 64 nt, Human; identical to SEQ ID NO: 4220

SEQ ID NO: 13846 - RNA, 90 nt, Human
cagaagaaaacgcgucagacuguggaagcugagcagaggccaguucugugccuagugucagcucuuugaaucagacacgagacgcuucug

SEQ ID NO: 13847 - RNA, 103 nt, Human
uuuuuuuucuuuuuuuugaaacagggucuggcucuguugcccaggcuggagugcagugggcaacagaguaagaguccgucucaaaaaaaaacaacaaaaaaaa

SEQ ID NO: 13848 - RNA, 65 nt, Human
cuggcgguggagguucucccgaggccucagcgccucuguucucggaaggucucuuuacauguuag

SEQ ID NO: 13849 - RNA, 69 nt, Human
gaaugggcugcuugcuguggacucauggguccgugagucugcucaucuucuucaguuugcguuucauuu

SEQ ID NO: 13850 - RNA, 83 nt, Human
ggggguuugucaagauuuguaggcuuugucauuuuuaugcaauuuggaaauauucuagcuauucggucucuuccccugccucc

SEQ ID NO: 13851 - RNA, 61 nt, Human
cguggccggccaugggaagagccauguuuucaacguggagcuuggcagcgagcuggccaug

SEQ ID NO: 13852 - RNA, 70 nt, Human
guugcaagcaaacuuguaucugggucuucaagauuuugacuuugaggaccagaggcccuauugcuucagc

SEQ ID NO: 13853 - RNA, 69 nt, Human
acugcucuaugagaacauuucuaccucuggaaaaggaggcuggugaaugucccuaucucaaaggguugu

SEQ ID NO: 13854 - RNA, 64 nt, Human
aggacguguuagccacuuucuucuucuccccugacucuucucagucggugguuaucagugucuu

SEQ ID NO: 13855 - RNA, 74 nt, Human
gugugcggcaguagaaauagcacaggccuuggggacacgcagggcuggguguuaacccugauacugccucaugc

SEQ ID NO: 13856 - RNA, 118 nt, Human; identical to SEQ ID NO: 3011

SEQ ID NO: 13857 - RNA, 80 nt, Human; identical to SEQ ID NO: 3013

SEQ ID NO: 13858 - RNA, 70 nt, Human
gucauauuccuaaguggaagaagccagucuaaagcuauagcuacacacuguauugauccaaguauaugac

SEQ ID NO: 13859 - RNA, 76 nt, Human
guuuauagcagcuuuauucauaauugccaaaacuuggaagcaaccaagaugucccuuaauggaugaagaaauaaac

SEQ ID NO: 13860 - RNA, 94 nt, Human
gcaggcauguguuggcaaaggcuguuaauaguaguuaaguguuaagacugcuuuucuuuaacguuuucaugguaaugcauauuuagagcacugu

SEQ ID NO: 13861 - RNA, 85 nt, Human
ccccauauuauuacagguuccaaaucgaggccgagugcaccgcccaccaaugccacggccuuuaacaauauguauuagcaugggg

SEQ ID NO: 13862 - RNA, 72 nt, Human
guguacgggcaguucacgggccaggcccuccucucagggcgagagaugguggggcccacgcugcccggauac

SEQ ID NO: 13863 - RNA, 61 nt, Human
uugaugucaugugucaagugcuuacugauuugauugaugaagaaguaaaaaguggcaucaa

SEQ ID NO: 13864 - RNA, 64 nt, Human
guggcacaauuuaauuguuuuguaucagaaauacacugacccaccuuuuauugaguccugccac

SEQ ID NO: 13865 - RNA, 80 nt, Human
uuuuguuuacaagauugauuuaauaugagaggauacaaaaugucaucguuauccucucuuaugaacaacuguagucaaaa

SEQ ID NO: 13866 - RNA, 64 nt, Human; identical to SEQ ID NO: 9729

SEQ ID NO: 13867 - RNA, 73 nt, Human
uaguaucauggacuaaacuaggucagagugaaguauaugcaaaaugaccauuuuguuguuuuccauguuauua

SEQ ID NO: 13868 - RNA, 76 nt, Human
gugugaaaugggccagcugccugccugucugcuccucccuggcucggccgggcgcugccauggcuccagcucagau

SEQ ID NO: 13869 - RNA, 77 nt, Human
guguuuccagggacuuuaggaauucuuuuuuuuuuuuuuggaaagggauucucguuuugucgcccagguggaauugc

SEQ ID NO: 13870 - RNA, 61 nt, Human
auuugagaaggaggcugcugagaugggagagggcuccuucaaguaugccugggucuuggau

SEQ ID NO: 13871 - RNA, 61 nt, Human
gaauauauuguauuuaauauuggauucucuaugaauugaauuuuggugagcacaaauauuu

SEQ ID NO: 13872 - RNA, 71 nt, Human
cguaacauuuuccaaauguuccuuaucaguugguccacugagagccacugaucugauuggaaaacaagacg

SEQ ID NO: 13873 - RNA, 88 nt, Human
ggccuuccagaaaggcaguuggaguuggcagguuacucuugcuucauuuuuggugguguuuucucuuuuucucugucuacugugggcu

SEQ ID NO: 13874 - RNA, 88 nt, Human; identical to SEQ ID NO: 12250

SEQ ID NO: 13875 - RNA, 60 nt, Human; identical to SEQ ID NO: 12251

SEQ ID NO: 13876 - RNA, 71 nt, Human
ugccuucaugaagcuugugaccaaguggaggaaauagcuauuaaccacacaaucacauaaucaagaaggua

SEQ ID NO: 13877 - RNA, 60 nt, Human
uuucuuugguaccucugcuuacugccucuugugaugccacuagucagaaugccuuggaaa

SEQ ID NO: 13878 - RNA, 67 nt, Human
cauuguuuguuucuauucaaccaauuucagaacuucaugaaaaaguugaaugguagguugagugaug

SEQ ID NO: 13879 - RNA, 87 nt, Human
gguaacacaaugggagccuuuucugcaaggcuggcaugugaauaaaguaccacaguaugagcagaggcuccugcuucuugguuuauc

SEQ ID NO: 13880 - RNA, 66 nt, Human
ggugacuacuagggccaagucaagagggaagaguagaacucaucccccacggccucaguaaaagcc

SEQ ID NO: 13881 - RNA, 60 nt, Human
agggggccgguggaccugcuccagcagcuggugcugcaccagcaggagguccugcccccu

SEQ ID NO: 13882 - RNA, 64 nt, Human
ucuccgagcucgccugcaucuacucggcccucacugcacgacgaugaggugacagucacggagg

SEQ ID NO: 13883 - RNA, 91 nt, Human
ggacuccagcccgccccagaagccgagguuucuccugagcgaggugagcaccuguaccuggagguuggagacaggggcagggcuggcagcc

SEQ ID NO: 13884 - RNA, 61 nt, Human
ucuucccuuccuccuccauguucccugcacuccaguuccgaccccagagcaggagggaaga

SEQ ID NO: 13885 - RNA, 73 nt, Human
gggaacucuauuuguuugauguucuccgcgcagaucgaacuacugcugcccauggucuugaacugagaguccc

SEQ ID NO: 13886 - RNA, 72 nt, Human
gccuacugagcagagagugguccagguauugaauggacucaauauccuagaaggacucacauucuagcaggc

SEQ ID NO: 13887 - RNA, 107 nt, Human
guucuugccaccaaaaagaagcaaauaacaucuaguaccugugggcaguuggcuaagaggcugugguauuuuuuguguguauuugcuuucuaccuggggaucagagc

SEQ ID NO: 13888 - RNA, 67 nt, Human; identical to SEQ ID NO: 681

SEQ ID NO: 13889 - RNA, 78 nt, Human; identical to SEQ ID NO: 7298

SEQ ID NO: 13890 - RNA, 63 nt, Human
ugcuggggcuggugguccaggggucuuacuccuuggaggccaugugggccaugagguccagca

SEQ ID NO: 13891 - RNA, 84 nt, Human; identical to SEQ ID NO: 286

SEQ ID NO: 13892 - RNA, 77 nt, Human
gcacggcccggguucuccguucucuuccugcaggcuaugcuuggaugaucuacggaaucugaccuuggaggcggugc

SEQ ID NO: 13893 - RNA, 93 nt, Human
gccguggagugggagagcaaugggcagccggagaacaacuacaagaccacgccucccaugcuggacuccgacggcuccuucuuccucuacagc

SEQ ID NO: 13894 - RNA, 66 nt, Human
guagcagaauauguuacaacugcggcaaaggaaaugcuaaacugucacagcuguagaucaugcugc

SEQ ID NO: 13895 - RNA, 78 nt, Human
gggcccagacuuguuuggggaggccagggugugcucggagugugcgagccaauaccaucacuccuaugucaggggccc

SEQ ID NO: 13896 - RNA, 74 nt, Human
gggguucuggcccccagcacugugagaaccccccagguguccugggccagggucaggaaaggggcgggcucccu

SEQ ID NO: 13897 - RNA, 79 nt, Human
guguccccuugcacaagugggggguccagggucacagucuaugaguaggccucagccccccaugcggcaagcuggacac

SEQ ID NO: 13898 - RNA, 63 nt, Human
ggugugguggcucaugccuguaaucccaggacuuugggaggccaaggcgugagcaccugcgcc

SEQ ID NO: 13899 - RNA, 63 nt, Human
aggcaaguucuucauccacucaaggagaaacuuuaaaauccacuuaaaaugaagagcauuccu

SEQ ID NO: 13900 - RNA, 113 nt, Human
gcuaauuacaaaguauuuaugacucuugugaggaccacuugacaagguugcuauauauauguaaaaaaacccucugcacuuccucauuugacuuacuacugaguaaaauuagc

SEQ ID NO: 13901 - RNA, 72 nt, Human; identical to SEQ ID NO: 9067

SEQ ID NO: 13902 - RNA, 70 nt, Human
cagggauauuguuaauuuucauacuuaaaaaugauaccuuauuaucuuuuaaaaauugccaaacucucug

SEQ ID NO: 13903 - RNA, 60 nt, Human
gcacaugcugcuuuacagacgauacauauuuguaaacuuacucaugcaaaauuagugugc

SEQ ID NO: 13904 - RNA, 68 nt, Human
cugcaaccucagccuccuggauucaagcaauccucucacgucagccacccagguagcggggacuacag

SEQ ID NO: 13905 - RNA, 74 nt, Human
ugggcucaagcaguccucccacuuggccucccaaagugcugggauuacaagagugagccacugcacucagccca

SEQ ID NO: 13906 - RNA, 90 nt, Human
gucccucccuccccugcugugaccuuguggggguugagaaaccuaggcacucauggcccccuggaggggcagggcaggcagggcuggggc

SEQ ID NO: 13907 - RNA, 68 nt, Human
ccugucucaaacagcccagggccugaaauacccugauucaccuacaguguuccccugggcucagcagg

SEQ ID NO: 13908 - RNA, 92 nt, Human
uaagcaccagaucauaugggauguggauauacuggcuucaguguaagcuucacucuauuccaggguucacacucaacaauugaugguguuug

SEQ ID NO: 13909 - RNA, 86 nt, Human
gccucuguguuccugggacaccgcugacuggaggcugcuccucuucuaaggggguccggcacagagcgccacccaaagcacauggc

SEQ ID NO: 13910 - RNA, 72 nt, Human
ggaucuagaccaugcagcuuuucccuacugucaccagauugggagcagggauuggcugccauuguccucucc

SEQ ID NO: 13911 - RNA, 68 nt, Human
ggauuaguucuuuuuuccagucuuccuuuacuuuaucuggauaagauugggcagauugaauuugaucu

SEQ ID NO: 13912 - RNA, 62 nt, Human
uuugcggauguccacgucacacuucaugauggaguugaagguggucucguggaugccgcaag

SEQ ID NO: 13913 - RNA, 77 nt, Human
gauccugucacgaacacauuuagcacacauggaaccaccauaggcccugcugacauguuucuuuguuuuggacaauc

SEQ ID NO: 13914 - RNA, 60 nt, Human
gcuuucccaaccuucuugguauaaagguaaacaauucuauuaccagggguucgggacagc

SEQ ID NO: 13915 - RNA, 78 nt, Human
uuuuuuuauuuagguuucugacucugugcuugugccuucaacacuuucacaacgauuuucugcuccucgauaaggaaa

SEQ ID NO: 13916 - RNA, 76 nt, Human; identical to SEQ ID NO: 758

SEQ ID NO: 13917 - RNA, 63 nt, Human; identical to SEQ ID NO: 9379

SEQ ID NO: 13918 - RNA, 74 nt, Human; identical to SEQ ID NO: 493

SEQ ID NO: 13919 - RNA, 62 nt, Human
gggguugccauggacucucugucuccucccaucggagaagcagagagccagaccaaagcucc

SEQ ID NO: 13920 - RNA, 105 nt, Human
uuucuuauauuguuguuaaucaucaaggaaucucuucucgauuaaaauacacacaucuuaagaauaagguuucagagcauauuccuguuuaucaacaagaagaaa

SEQ ID NO: 13921 - RNA, 65 nt, Human
gaagcagaacagguaauauaaaaccgauacaauaaggccuccccucuauccuuaucugucugguc

SEQ ID NO: 13922 - RNA, 65 nt, Human
gaguugacaauuuuauuuucacauuugccaauacaaaggaaaacugcaucuuuuuugucccacuu

SEQ ID NO: 13923 - RNA, 60 nt, Human
cacccguggucaccccagaugaagaugccguuuucgaaaacgggugauugguugcgggug

SEQ ID NO: 13924 - RNA, 71 nt, Human
gacggcguguccaugggggggaucucucguagaauggagcugcaggggugcucagcuugggaguggucguc

SEQ ID NO: 13925 - RNA, 62 nt, Human
auuguuauuaauauccuuucagaaccaccaaaaaggaaaaaaagaaaagauauuaauacaau

SEQ ID NO: 13926 - RNA, 83 nt, Human
ggcaagggaugguauuuaugcucgcuugcugagacuuccagacuuucagaucucaagcgauguuugauauuguauuucagguc

SEQ ID NO: 13927 - RNA, 84 nt, Human
uggcacagauccucgaacaauucuuaaagauuuauugccggaaacaauaccuccaccugaguuggaugauaugacacuguggca

SEQ ID NO: 13928 - RNA, 77 nt, Human
aggucuagugcaucuuuuaaccagccgaauggaguccuuuacaaacugccgacuuggcucaacaaacugcauuaccu

SEQ ID NO: 13929 - RNA, 65 nt, Human
gagccucuccuggcucugucugcuggucuaggccagggguggggcugaucaagggcagagagcuc

SEQ ID NO: 13930 - RNA, 73 nt, Human; identical to SEQ ID NO: 163

SEQ ID NO: 13931 - RNA, 76 nt, Human
gagucggugcuugguaccuggucucuccagucucaacagacucaggucaggucucucaaccaggaagcaaccacuc

SEQ ID NO: 13932 - RNA, 60 nt, Human
caccagaguucugcucccucacuccucgccccgcccccugucccagaguccgaccuggug

SEQ ID NO: 13933 - RNA, 70 nt, Human
ccaguuucaaccagaguuccaaccaaugggcuccauccucuggauucuggccaaugaaauaucucccugg

SEQ ID NO: 13934 - RNA, 62 nt, Human
ggguccucuucuuuucccagagcuccaccccaaccaggagcucuagauaauggagagcuccc

SEQ ID NO: 13935 - RNA, 76 nt, Human
guggauccugcaugaagacaguggcugacggugccuggacguacaauaccacuuccgcugucacgguaaaguccgc

SEQ ID NO: 13936 - RNA, 66 nt, Human
cucccagaugcugggcccagagccaccccaacaauccagcacaggaccccgcucagcaccagggag

SEQ ID NO: 13937 - RNA, 80 nt, Human
gucuucccccaagcgcaugguugugggacuaagcaccucaaaggagggcacagaccccgccagccugcugggaaaaaggc

SEQ ID NO: 13938 - RNA, 63 nt, Human
gucgcccaggcuggagugcaguggcacgaucucugcucacuacaaccuccgccuccuggcgau

SEQ ID NO: 13939 - RNA, 65 nt, Human
gcuucuccagguuagggugagccgccgucuggauuagugguggcgggccacacaccaggaugagc

SEQ ID NO: 13940 - RNA, 86 nt, Human
ggcgugguuccgggaaacgcagcggcgccgacccugggucucgcacauucuucacguccguucgcagcgucacccggaucuucgcc

SEQ ID NO: 13941 - RNA, 66 nt, Human; identical to SEQ ID NO: 11638

SEQ ID NO: 13942 - RNA, 82 nt, Human
ugugguacuucaggaacucuuuuucaaacucacaucacaguacaucuggagauugucuaagaggcagccuccugacaccaca

SEQ ID NO: 13943 - RNA, 86 nt, Human; identical to SEQ ID NO: 12138

SEQ ID NO: 13944 - RNA, 79 nt, Human; identical to SEQ ID NO: 12139

SEQ ID NO: 13945 - RNA, 71 nt, Human
cugccggcacugggcagcugccccacacaaugggaagcagugguggggcugggccaguccaggagccgcag

SEQ ID NO: 13946 - RNA, 84 nt, Human
guuuauugaguggcaugugaguggcgagcuaaauugggcuguaacacuuuucuugguuggcucaccgagcugcaggcaagugac

SEQ ID NO: 13947 - RNA, 75 nt, Human; identical to SEQ ID NO: 12474

SEQ ID NO: 13948 - RNA, 63 nt, Human
cuauuuuugagaauaacuuuaaugagacauuuccucucauuaacauuguuauuaaugauguag

SEQ ID NO: 13949 - RNA, 64 nt, Human
ggaaugauuauguguggcauuguacucuuucaucaggagguauauaaugucuaguuuuuguucu

SEQ ID NO: 13950 - RNA, 76 nt, Human
uaggaaaggcaagagaaaugcuuguuucuuuuauauauccagcuuuuuaagaaauacguguuugccagucauccua

SEQ ID NO: 13951 - RNA, 78 nt, Human; identical to SEQ ID NO: 12410

SEQ ID NO: 13952 - RNA, 88 nt, Human
ggagaaccgcuugaacccaggagacagagguugcugugagccgaaauagugcuacugcagucgagcuugggcgacagagugagaaucc

SEQ ID NO: 13953 - RNA, 73 nt, Human
gugggggcgguugugaucaugaggucaggaguucaagagcagccuggccaaaauggagaaagccugucucuac

SEQ ID NO: 13954 - RNA, 65 nt, Human
agagcauccccugcaaagcccccaccccagagccugcugauggaagcggggcugcaggacgcucu

SEQ ID NO: 13955 - RNA, 85 nt, Human
cugcacaaagaccccuugcugccagggccaggcaccggccuagcuccuugccugccugccugaggcagccguggaaucagggcag

SEQ ID NO: 13956 - RNA, 60 nt, Human
gguggcacagguagaaaagacagauggaaacaaugcccaugaauauacccaaaguguccc

SEQ ID NO: 13957 - RNA, 60 nt, Human; identical to SEQ ID NO: 10992

SEQ ID NO: 13958 - RNA, 61 nt, Human; identical to SEQ ID NO: 13200

SEQ ID NO: 13959 - RNA, 84 nt, Human; identical to SEQ ID NO: 286

SEQ ID NO: 13960 - RNA, 110 nt, Human
gccuucuuguccacugcuuugaugacacccaccgcaacugucugucuuauaucacgaacagcaaagcgaccccaaaguggauagucugagaagcuccaacacacaugggc

SEQ ID NO: 13961 - RNA, 73 nt, Human
gacccuuucagugccacgcuugcagggugcaaguuuuaugcauaugguggccaccuucccugcuggaaggguc

SEQ ID NO: 13962 - RNA, 77 nt, Human
uaugggggucucucaacaacccaacccuuagggaguuuacacucuuggagggguggacaaucaucacgagccucaug

SEQ ID NO: 13963 - RNA, 96 nt, Human
gcccuuuuuuuuuuuuuuucuguagcaaugaaaauuuuuaauuugaauaaaaaucacguaagcaugagguuguuggggaacacggaaaggaagggc

SEQ ID NO: 13964 - RNA, 60 nt, Human
uuaggggguguagcacauuuaucaggagguaagaucuccauagucuccuaccccuccugg

SEQ ID NO: 13965 - RNA, 82 nt, Human
gagcuugccuaaguuuugggcagagaacuccuugauguucuggcagaaaguguuuaucuggccugaaaugagcagcaaguuc

SEQ ID NO: 13966 - RNA, 86 nt, Human
gcccuggugugacuucaagaguucauguuaacuacuuuucuggaaacuuacuuuucuuaguugaugaauucuugaagagccugggc

SEQ ID NO: 13967 - RNA, 68 nt, Human
gagaucaccgcgcuggcacccagcaugaugaagagcaagaucaucgcaccgccguagcgcacauacuc

SEQ ID NO: 13968 - RNA, 64 nt, Human
ucugccaacaacggcgugucguggggcaccacgauguacccugugaucgcugaccgcaugcaga

SEQ ID NO: 13969 - RNA, 77 nt, Human
cucaucgauuuucugguacagaaaaagaucaauccucaagugaugaaggcugggagacucugccaggaaaagaugag

SEQ ID NO: 13970 - RNA, 66 nt, Human
cugccccaucaggcccaucucaagauguuggauuacagugcaacaugagaugggguggggacacag

SEQ ID NO: 13971 - RNA, 64 nt, Human
uauauuguacaagagugguauauuuuacauucaaauguuggauaugccauuaauuguauuuaua

SEQ ID NO: 13972 - RNA, 78 nt, Human; identical to SEQ ID NO: 99

SEQ ID NO: 13973 - RNA, 65 nt, Human; identical to SEQ ID NO: 247

SEQ ID NO: 13974 - RNA, 80 nt, Human; identical to SEQ ID NO: 100

SEQ ID NO: 13975 - RNA, 77 nt, Human
aucccugagagacgugugcauggaaaacguuggagcuucuguugagauaaucuucauuagguauauaucuuagggau

SEQ ID NO: 13976 - RNA, 60 nt, Human
cagccuuuucuuuaucuuauagcaggaaaaaaaaaacuuuggagggaaauagaagggcug

SEQ ID NO: 13977 - RNA, 72 nt, Human
ggucggcugccagguacagguuuccuaaagacaaaaaaaaauggaggaaucuguaaaccaaaugcagccacu

SEQ ID NO: 13978 - RNA, 131 nt, Human
gagaaagcaugcacuuguuauuuggaaaacugggcuaaauauauaacaguauccaaaguuauaccauaauaauuuauuguaauuguguauuacauagcuuuguuuacccagauauaggugcguucuuuuuu

SEQ ID NO: 13979 - RNA, 64 nt, Human
guuagucaucugugacuuuuguucuggaauaccgguuuuuaauauaucuuacagucugacuaac

SEQ ID NO: 13980 - RNA, 66 nt, Human
gaaugcuuuuaagaaccaaggacaaauuuucaguauugaagaagacaacauacauaaaaagcacuc

SEQ ID NO: 13981 - RNA, 77 nt, Human; identical to SEQ ID NO: 8674

SEQ ID NO: 13982 - RNA, 61 nt, Human
cuauuggcaugucuggugauuaguucugugacuguguuuuaccugugccagcaugccaugg

SEQ ID NO: 13983 - RNA, 86 nt, Human
cugaacauuuuccgaaaaucauuuugagcaaaauaucuguuuaauaacaagauaaccacaucaagaugguuggaaagcugaagcag

SEQ ID NO: 13984 - RNA, 70 nt, Human
gcccugagguucagaacaugaacauuuuccagaagaaggauuuuccuuuuuggaaaggagaacuucuggc

SEQ ID NO: 13985 - RNA, 80 nt, Human
cuaccaucuuuauggcagccgcauggacaggcagacgaaacagcagcccagacagaauguggcuuacaacagagaggagg

SEQ ID NO: 13986 - RNA, 62 nt, Human
gagggaaaaggcacugcuuauuccagugcagccagucaugguaaugcagugcaccagcccuc

SEQ ID NO: 13987 - RNA, 76 nt, Human
caguagagcaguuauuaaaccuuaaaguuccaaaaugaucuccuucgacuuuaugucucacauucaugucaugcug

SEQ ID NO: 13988 - RNA, 70 nt, Human
gcuguugguggaucuaccauucugguguuuggaggacaguggcccucuucucacagaucuacuaggcagu

SEQ ID NO: 13989 - RNA, 75 nt, Human
acauugccagcaggugggggugucuccagccuugcgccucccgcugggucaggaugucugucaccgcugcgaugu

SEQ ID NO: 13990 - RNA, 61 nt, Human
gcacugcuuccauuggcucaugucaaagaaaagcugccacagagccuccauccagcucugc

SEQ ID NO: 13991 - RNA, 73 nt, Human
ucaugguacaaggaccccugcuuugccagugcuuggggugguuuccggggagcaggaguuucaauuuucauga

SEQ ID NO: 13992 - RNA, 83 nt, Human
cugucaagaaggaacaucaaagugaagacauuuucugucaggcaaauuuucaggaaagucuccuuugcacccuuacuugaggg

SEQ ID NO: 13993 - RNA, 79 nt, Human
ggccaauacaaucuacaucuagacacaauauuguaaaauuuuggaauauuaaggauagaaggaagauauuaaaguggcc

SEQ ID NO: 13994 - RNA, 72 nt, Human
gaggcacuuuagagcaaaucaugaaagaucgauggaugaaugugggucacgaagaugaugaacuaaagccuu

SEQ ID NO: 13995 - RNA, 79 nt, Human
uggagccacucccugacuacaaggacccccggcggacagagcugaugguguccauggguuauacacgggaggagaucca

SEQ ID NO: 13996 - RNA, 82 nt, Human
cugguuccgccggccguggucgccgagucggugucguccuugaccaucgccgacgcguucauugcagccggcgagagcucag

SEQ ID NO: 13997 - RNA, 65 nt, Human; identical to SEQ ID NO: 2198

SEQ ID NO: 13998 - RNA, 65 nt, Human
cuuucuauuaccagacagaaaguuuggaucuuuagugguuccaaucugacuucaguaauaggagg

SEQ ID NO: 13999 - RNA, 100 nt, Human; identical to SEQ ID NO: 2199

SEQ ID NO: 14000 - RNA, 100 nt, Human
cgccauuugcuccuguuuucggcaggcuuccagcuucucugggcucaggggccaaugcucccgucaagacgcuggggcagcagcagcagggggaggugug

SEQ ID NO: 14001 - RNA, 69 nt, Human
gggaugggggucaaggagucaccuguaaucaaggugagauucugcaggacgaucauggagccucgugcc

SEQ ID NO: 14002 - RNA, 64 nt, Human
ggaauggguauugugggaauugggagaauaugaugucaaguauccagccuugauacccauuacc

SEQ ID NO: 14003 - RNA, 65 nt, Human
gguuucucuguggcagugcuuguugcuugucaguuuaucaauugcauuuuacugcauagucuacc

SEQ ID NO: 14004 - RNA, 60 nt, Human
ggacaagagauacuggaugcuuugcaaaaagcagagccuagaacagaggaucucaagucu

SEQ ID NO: 14005 - RNA, 89 nt, Human
uucucaggccaaguggucaacuggagcagacccuggaacaguucagugcccuucugaaaaccugggcucagcaguuaacccuccuggaa

SEQ ID NO: 14006 - RNA, 88 nt, Human; identical to SEQ ID NO: 7351

SEQ ID NO: 14007 - RNA, 94 nt, Human
uuuuuuugucuuuauucauuuauuuauuuauucauucauuuugugcccuucugggaaugaaccaggacuauuugaauggaaagagaaaaaaaaa

SEQ ID NO: 14008 - RNA, 84 nt, Human
ucugcaggccuccuuuaugacuaaauccagccauuaagcuucaaaugaguuaccugcuggcauuguguaagggcagccagcaga

SEQ ID NO: 14009 - RNA, 65 nt, Human
ugauuuggacacaaagacuaaacagauucagcaguggauuaagaaaaaacaccuaguccagauua

SEQ ID NO: 14010 - RNA, 77 nt, Human
cccugccaagcugcacaacucccucauuggcaccaagggccgucugauccgcuccaucauggaggagugcggcgggg

SEQ ID NO: 14011 - RNA, 98 nt, Human
auuugugucuaucuaauggguuauugagaaaaucaaauaaaauaaugcaugcaaaguacuuuuagcacagguccaauauccaugguaagaauacaaau

SEQ ID NO: 14012 - RNA, 94 nt, Human
guaagccuaccaggaggaaccagaacagcugcauaacuuggcaucuaccuaugugcuccugucccuuccacuuccuccuucuguggguaauuac

SEQ ID NO: 14013 - RNA, 84 nt, Human
ccuaaacagaugaaaaaauaggaggugggcuggauguggcccauggcuacagguuuccuggccccucacucauuucacuggugg

SEQ ID NO: 14014 - RNA, 73 nt, Human
ucacagcacuacuucuucaauguaaauuuuuuguccauuuuacagaugaaaaaacugaggauuagagaaguga

SEQ ID NO: 14015 - RNA, 87 nt, Human
ggaaagauuuugauuauacaguuuguuuuuaaauugucuuuuauauguauuugguaagaaucgguuguuacacaagcuguucuuucc

SEQ ID NO: 14016 - RNA, 92 nt, Human
guuuagaaaacuuguuuagcuccauagaggaaagaauguuaaacuuuguauuuuaaaacaugauucucugagguuaaacaugguuuucaaau

SEQ ID NO: 14017 - RNA, 100 nt, Human; identical to SEQ ID NO: 3028

SEQ ID NO: 14018 - RNA, 64 nt, Human
aaaaaagggccuuaucuuuuuuauccagaguuauaauauaaaaaggauuuaaaggcuuuuuuuu

SEQ ID NO: 14019 - RNA, 80 nt, Human
uuuuuuuucagcuacauaaacauuuuucucauguuuuguuacuaaaacaacuuguuuaggguuuuaugguugggggaaaa

SEQ ID NO: 14020 - RNA, 62 nt, Human
gcaagcguaagggcguacgugggggggcgucuugcugggccgguugggguacuugcgcaugc

SEQ ID NO: 14021 - RNA, 130 nt, Human
gucugcaggcgaacgggcuuuucugccuguguuggugcggauguguggugguugagguggucgcuugcggcuugaaguugcgcaugcagaugcggcacuggaagggcuucuggccuguguggaugcggau

SEQ ID NO: 14022 - RNA, 66 nt, Human; identical to SEQ ID NO: 6268

SEQ ID NO: 14023 - RNA, 79 nt, Human; identical to SEQ ID NO: 6269

SEQ ID NO: 14024 - RNA, 65 nt, Human
cggcgaucgcgggagagggggccauaccggacccgcaagcaugcccaccacugccacaaacgccg

SEQ ID NO: 14025 - RNA, 93 nt, Human
gauuguggggaaccugggugaaggcaccuuuggcaaggugguggagugcuuggaccaugccagagggaagucucagguugcccugacacgauc

SEQ ID NO: 14026 - RNA, 67 nt, Human; identical to SEQ ID NO: 6270

SEQ ID NO: 14027 - RNA, 68 nt, Human
ucggcaguguuuuuaccccccccaacuuguguuuuuuggcgcgcgccuuggucuggggggucugcgga

SEQ ID NO: 14028 - RNA, 75 nt, Human; identical to SEQ ID NO: 10146

SEQ ID NO: 14029 - RNA, 85 nt, Human
ccacggcggggccaagcuggccugaaaggcaccugggaagacucacuggaaggaaaggcacgcgggccgguagggcugagccggg

SEQ ID NO: 14030 - RNA, 60 nt, Human
gcugugcaccucaacacgcugcugggagagcggccugugcagcaccgcgaggugcagggc

SEQ ID NO: 14031 - RNA, 62 nt, Human
ggcucuccauucccaggcucagugcaggauccaggccugcauguguggcggguggagaagcu

SEQ ID NO: 14032 - RNA, 85 nt, Human
gaucagguauugauaacagaacauggcgacuugggaaauggaaaguuuuuggauccaaagaacagaaucuguuuuaaauuugauc

SEQ ID NO: 14033 - RNA, 76 nt, Human
uguagcaugaaucaaauguauuuauuaauagcacuuaugacuauagaauauaauuuggcauaugauucauauuaca

SEQ ID NO: 14034 - RNA, 69 nt, Human
auuuuuauacaguagugagaagaauauguuccuaaguucuuagauaucuuuuuauugaugugcaaaaau

SEQ ID NO: 14035 - RNA, 60 nt, Human
ugguaaaauugcauggguuuguagguacuuuuggaaucuagaagaaaugaaauuuuacca

SEQ ID NO: 14036 - RNA, 121 nt, Human
aacagcuccaguuacaacagcuccaguauagcuguggacuuuuaauauauggacuuuauuguguugagguaaguuccaucuaugccuauuuugcugagcauuuuaauuaugagugaauguu

SEQ ID NO: 14037 - RNA, 77 nt, Human
auuuuguuauuguguuguaucacauugaugguucaguauacucaaacaaucaaugugauacaacacaauaacaaaau

SEQ ID NO: 14038 - RNA, 70 nt, Human
aagggaaguuaggauucacuuagaguagcauuaauagaguuauguguuaugaaaggucuuagugucuguu

SEQ ID NO: 14039 - RNA, 76 nt, Human
acaaauguagauacaauaaaauguaaacaauguagcuauuaaauaugauuacagaaaauguucuauuuauuuuugu

SEQ ID NO: 14040 - RNA, 67 nt, Human
acuagauguaugggauauuucuaauaucuaguauucuagauauuaauaucuaauacuaaucucuagu

SEQ ID NO: 14041 - RNA, 60 nt, Human
ggagcggugguggccagaccacgccugcuucaccaggucugcauaggccucuagcgcacc

SEQ ID NO: 14042 - RNA, 63 nt, Human; identical to SEQ ID NO: 11061

SEQ ID NO: 14043 - RNA, 63 nt, Human
gggcgucccaguucccuuucccauuccugagccugaugguuguaagaguggaauuaacugccc

SEQ ID NO: 14044 - RNA, 63 nt, Human
aggguuaaauucaguauuuggaccugacauuucagguuauaucuccaaacugagguuaauucu

SEQ ID NO: 14045 - RNA, 85 nt, Human
gcuauguuaacuuuuacagaaaaaauaucauugaguuaggacccuauggcacauaagaauauuuuuuacaacaguuaaacaaagc

SEQ ID NO: 14046 - RNA, 64 nt, Human
cggggugggcggggggagccgagcagucacguauggggcaucugcucuuuucucuguccuccug

SEQ ID NO: 14047 - RNA, 85 nt, Human
cuugaaagggcugcaaauuucccauguucuggcauuaaagggauuucaacccuuuggccaaauugggguaccaguaacccccgag

SEQ ID NO: 14048 - RNA, 81 nt, Human
uuuuuuuuuuuuuuuuuuuuuuuuuuuuuuuuucggguuuccucuuugaaaguuuauuguuuucuuuaaaaaaaaaaaaaa

SEQ ID NO: 14049 - RNA, 64 nt, Human
cuccauuuucauuaggcagguugacuaaaaaugauugcaguaacagguuuauauaaaauaggag

SEQ ID NO: 14050 - RNA, 75 nt, Human
accaugcacccuugaaaaaagcuuugccuccuucaucacgagcaaucuuccgccagcagucaagcgugccugugu

SEQ ID NO: 14051 - RNA, 61 nt, Human
ggaaauaacuuauguguacuucuugauuucaucauacaagacaagcacaaaagcaccaccc

SEQ ID NO: 14052 - RNA, 104 nt, Human
auugguuuuaaucucacguguaacauagguuggcugguuuuguuuuuguuuuagacaauuuaaggcagaauuaucucccugcaacacugcagauaaauccuagu

SEQ ID NO: 14053 - RNA, 81 nt, Human
uauaaguuucaagaguucagauauacagauaaagcaauuuaaaaaaagcuuuucuuauucuaaggcuuuugaugcauuaua

SEQ ID NO: 14054 - RNA, 64 nt, Human
aguugaggacuuugaaucugggacagaacugcaucaccucacucccagagaaaguuggucagcu

SEQ ID NO: 14055 - RNA, 73 nt, Human
ucccagcucacucagcuggagcugaaggggaacugcuuggaccgccugccagcccagcugggccagugucgga

SEQ ID NO: 14056 - RNA, 62 nt, Human
cuugguugugcaucuucccagucuauuucugcuucuagaaauacccuguguacaacagcaag

SEQ ID NO: 14057 - RNA, 65 nt, Human
gauagggcccuccaaucagucuucuggcucccuuucacucauaguaacugguugcucuuccuauu

SEQ ID NO: 14058 - RNA, 73 nt, Human
gauggaaaaaucagcucagaaaggccaauuacuucuuuaauagaucaguuuuuuugacauaauaacucacauc

SEQ ID NO: 14059 - RNA, 71 nt, Human
ucagaaucugagaauucuucaucacaagcuauccgcuugucugaugcucgaauagaauaucucucgucugg

SEQ ID NO: 14060 - RNA, 60 nt, Human
gagcugggcaggagaggugaccuccaacuguguuccuaaaguucaucuuucgcuuggcuc

SEQ ID NO: 14061 - RNA, 73 nt, Human
gggagggcaauuuuucaucuuccaauggcggccucaaccuugaggcgaauccacuggcgaaagaugccuuucu

SEQ ID NO: 14062 - RNA, 62 nt, Human
cauguaugacuuaagaucuuuucuuuuuuugugaagaaauuuaggucucaagaacuuuuaug

SEQ ID NO: 14063 - RNA, 71 nt, Human
ugugguacaggaggcugcuuagcaguuuugagauaguuuaaucuacuaaauguggccucagcugugucgca

SEQ ID NO: 14064 - RNA, 73 nt, Human
gcuugacuuuagacacagguuucaaaaguagaaaguuuuauucucuuauguuucuauggcuuugaaguuuugc

SEQ ID NO: 14065 - RNA, 69 nt, Human
agugaugggucuguuugcaguaaaguuuaugcagaaugacguuuugcagaaaauaacagaagcaucacu

SEQ ID NO: 14066 - RNA, 61 nt, Human
gguacuauuaaaagcuguauuuggaauauguguaccaauaucaguuuuccuuuguaguacu

SEQ ID NO: 14067 - RNA, 62 nt, Human
ugaaaaacuagauuuaaaauagugguuuuagaaaacaggauaucacaaguaacaguuuuuca

SEQ ID NO: 14068 - RNA, 65 nt, Human
cccugccgggggguuggccgaggcccugggaaagggguugccgggggugugggccccgggcaggg

SEQ ID NO: 14069 - RNA, 79 nt, Human
gccauccagugccauccucgucgcugcagcgacacacgcucucgccgccgccaugacugagcagaugacccuucguggc

SEQ ID NO: 14070 - RNA, 75 nt, Human
ugugguuaucuccucagauggccaguugcccucucaggcuccugggauggaacccugcgccucugggaucucaca

SEQ ID NO: 14071 - RNA, 67 nt, Human
gcugguccggccguagcaccuccgcgccgucgccaugucgcgguuuuucaccaccgguucggacagc

SEQ ID NO: 14072 - RNA, 62 nt, Human
gucugcggaugaagaugcugagaaaaaugaggaggauucagaaggcucuucagaaugaggau

SEQ ID NO: 14073 - RNA, 77 nt, Human
gaagacucaccaugacaacuggcaggaacauaaacagcaauucacugaugaccaacugcuuguucucaccgaucuuc

SEQ ID NO: 14074 - RNA, 69 nt, Human
ggugaccagcagucaugcaggaccccauucggauccugucagaacgcaaauugaccugcgagguucgcc

SEQ ID NO: 14075 - RNA, 68 nt, Human
ggaucuaggagauuacuuguagcuguccaugaguucaggggcauggccagauuguuuccuaguuggcc

SEQ ID NO: 14076 - RNA, 77 nt, Human
gccaaauugagacaauuucagcaaaucuguaagcaguuuguauguuuaguugggguaaugaaguauuucaguuuugu

SEQ ID NO: 14077 - RNA, 89 nt, Human
uuuccggguguuguagguuucucuuuuucaggcuuauacucaugaaucuugucugaagcuuuugagggcagacugccaaguccuggaga

SEQ ID NO: 14078 - RNA, 84 nt, Human
aggguccuauguggaaaugagugggacaaugauaaaaauaaacaaauaauuaaaauuccaaaucaaaacauaacuccuggcccu

SEQ ID NO: 14079 - RNA, 65 nt, Human
cuccccauugaaguucacaagacgggaggccauuucuccucauucuuggugcaucaaauccggag

SEQ ID NO: 14080 - RNA, 83 nt, Human
guuuuauuauauaauuaucuuccuuauauauauaauauauauauaauauauauauauuaugauguaaacauauauaauauaau

SEQ ID NO: 14081 - RNA, 63 nt, Human
ggcacugggucagauuuauugcacuugcaacagaguuuaaauaaguccugggugucuggugcc

SEQ ID NO: 14082 - RNA, 62 nt, Human
ccgauucucuggcuccagcucaggaaacacagcuuccuugaccaucacuggggcucaggcgg

SEQ ID NO: 14083 - RNA, 96 nt, Human
cucuuugcauagguucugugguuucuucugagcugacucaggacccugcugugucuguggccuugggacagacagucaggaucacaugccaaggag

SEQ ID NO: 14084 - RNA, 63 nt, Human
gcugguaccagcagaagccaggacaggccccuguacuugucaucuaugguaaaaacaaccggc

SEQ ID NO: 14085 - RNA, 74 nt, Human
guguaggugugggaagguggaaucuggauuucgguaucuuucggauaaaguauucgcugcuguuuacucugcau

SEQ ID NO: 14086 - RNA, 64 nt, Human
guugauauugcuaggguggcgcuccaauuaggugcaugaguagguggccugcaguaauguuagc

SEQ ID NO: 14087 - RNA, 70 nt, Human
uguguguguaugugugugagugagauggguagcgggggugcuaucaugucgcccacgcgggucacgaacg

SEQ ID NO: 14088 - RNA, 68 nt, Human
uccuuuuucaguuugguuuugucuuuucucaugauuuagauugagggaauacaaauuuuggaggagga

SEQ ID NO: 14089 - RNA, 67 nt, Human
gcugcucacucagguuggcucuauccagucgaacacccgcugguuacugcugcccuccuucagcagc

SEQ ID NO: 14090 - RNA, 61 nt, Human
ggaggggagugcccucuggccaggggcuuccgacuccucucccaggguauacuccaccuuc

SEQ ID NO: 14091 - RNA, 87 nt, Human
uuucuuaaaggcauuuugguuuuuuaaaaucuguacagcaagagcaacuuuuucugucaaauaaaaaugagaaaugcaaaaaagaaa

SEQ ID NO: 14092 - RNA, 68 nt, Human; identical to SEQ ID NO: 6548

SEQ ID NO: 14093 - RNA, 90 nt, Human
uaguuuauuguccaguuaacuuuagugaccuuuuaaaaguuggcauuguaaauaaaacaacuugcaaaaaaguuuucuggaauagaauua

SEQ ID NO: 14094 - RNA, 65 nt, Human
cuauggcccuccaggcccacagcgguauccaauuggcauccagggucggacucccggggccaugg

SEQ ID NO: 14095 - RNA, 64 nt, Human; identical to SEQ ID NO: 3889

SEQ ID NO: 14096 - RNA, 64 nt, Human; identical to SEQ ID NO: 3890

SEQ ID NO: 14097 - RNA, 69 nt, Human; identical to SEQ ID NO: 10228

SEQ ID NO: 14098 - RNA, 77 nt, Human
cugagggcccucaugccauauuccugugccuuugaagaauucaucaucagguaguaaagcaugaccaggaucuucag

SEQ ID NO: 14099 - RNA, 85 nt, Human
ugaugcagagcucaugggucacuaaguaaugggauggucuucaguugaaaugagacuuaauaacucuugaauggugcuuugcuca

SEQ ID NO: 14100 - RNA, 79 nt, Human
cccauuuuuuggcuuuugaggggguucaguuuggguugcuugucuguuuccggguuggggggaaaguugguuggguggg

SEQ ID NO: 14101 - RNA, 60 nt, Human
uugaaugcacuuuugguuuuuggucauguucgguuggucaaagauaaaaacuaaguuuga

SEQ ID NO: 14102 - RNA, 75 nt, Human
agugccacggagagugagguggcccggggcaaaaacauccucagaaaugcccugguaucucaucuagauggcacu

SEQ ID NO: 14103 - RNA, 99 nt, Human
ggacgcagccuccugaccuauggccgccgcaucccccuggcugaaugggaaagccggauugcggagguggaugccagugugguacgugagaucugcucc

SEQ ID NO: 14104 - RNA, 75 nt, Human
gggugcacacuuugucugugaccgaaugaaaaucgaugacaugauguucguccugcaagggcaguggaugcgccu

SEQ ID NO: 14105 - RNA, 63 nt, Human
cauuuguaggguuucucuccggaguggaugcgcuggugcuccuucaggcucccccuguaggug

SEQ ID NO: 14106 - RNA, 85 nt, Human
gaaaaauaucauucacuucuucuuggugcagaaggcauagaccggauuaugcaaucacugagaaguagcuucuggauguguuuuc

SEQ ID NO: 14107 - RNA, 79 nt, Human
ugggguggcagguauuagggauaauauucauauagccuucugagcuaucugggcagacuuggugaccugucgaacucca

SEQ ID NO: 14108 - RNA, 72 nt, Human
caguauguugcucugccucuuggacuuggauguauugggaaauccaucuugguuuaauuagagaauuugcug

SEQ ID NO: 14109 - RNA, 78 nt, Human
gguguagaagcauuucuuuacugaaccuuaccagggagccauccaggauccugaagaguuuguggaaggaauggcacu

SEQ ID NO: 14110 - RNA, 71 nt, Human
gcgucuauagagcaacucacagcauugaagcuagcuucauuaaacaagcuuucacugugaguuacugaugc

SEQ ID NO: 14111 - RNA, 65 nt, Human
gcuacaaucuucucgaguuucagcugggcaggauccgcuuccaggcucacucagugguuguuggc

SEQ ID NO: 14112 - RNA, 71 nt, Human
ccaggaaaggcuccagugguucuuacuugauccaaaaaaugucaagaauuaaucuaggaggccgggccugg

SEQ ID NO: 14113 - RNA, 68 nt, Human
gaggcggguggaucacucaaggucaggcauuugagaccagccuggccaacauugugaaaccccgucuc

SEQ ID NO: 14114 - RNA, 64 nt, Human; identical to SEQ ID NO: 7986

SEQ ID NO: 14115 - RNA, 104 nt, Human
guuucucaugaaauggaaagauucagaugaggcagacuuggugcuggcgaaagaggcaaauaugaaguguccucaaauuguaauugcuuuuuaugaagagagac

SEQ ID NO: 14116 - RNA, 68 nt, Human
ucucagaaagcuggcaaagaaaaagaugguacaaaaagaaaaucuuuaucugacagugaaucugauga

SEQ ID NO: 14117 - RNA, 71 nt, Human
ugcugcugacaaaccaagaggauuugccagaggucuugauccugaaagaauaauuggugccacagacagca

SEQ ID NO: 14118 - RNA, 80 nt, Human; identical to SEQ ID NO: 4773

SEQ ID NO: 14119 - RNA, 70 nt, Human
ggugacgcccagguccuugagcuccugcaugggggggcccacagggucgcuggagccgccaucugucacc

SEQ ID NO: 14120 - RNA, 75 nt, Human
ggguuugagcccacaggaccugcacacaaacuuccccaccucuuggacuuggggacaggaucugugccucaaccc

SEQ ID NO: 14121 - RNA, 77 nt, Human
cucuugacccuuaaugcucagguucuuguggggaguuaaucagccacaucccaauuuuaccuugagggggggaagag

SEQ ID NO: 14122 - RNA, 73 nt, Human
ggggagaaaaagcuguagaacaaauguuugggguuaccauugaaaaucuaaugucugcaauauuuuucuccuc

SEQ ID NO: 14123 - RNA, 69 nt, Human; identical to SEQ ID NO: 528

SEQ ID NO: 14124 - RNA, 90 nt, Human; identical to SEQ ID NO: 5735

SEQ ID NO: 14125 - RNA, 69 nt, Human
cagugcuggccuggaagccccucaagucggguaugaaggagcuggccguguuccgggagaaggucacug

SEQ ID NO: 14126 - RNA, 77 nt, Human
ccggcagaugggcaaggguggcaagcaucaccuuggccuggaggagcccaagaagcugcgaccaccccacugccagg

SEQ ID NO: 14127 - RNA, 60 nt, Human
gccucuaagaagucccgacuguccuccucuucuaucauugacagugggaauaauguuggc

SEQ ID NO: 14128 - RNA, 97 nt, Human
cgucagacuuggaagaaauauucuguucuaaaaucuucucacuuuuauaaaaaauaugcuuuucuuuuggauuuaggauguuaucuaauuucugaug

SEQ ID NO: 14129 - RNA, 97 nt, Human
gagaaaccacacuggaguaagguaagcuguccuggagagcuggaagcuuuacuugaaucgggugcuuuguuuuuggcagucuuuauuccuguggcuc

SEQ ID NO: 14130 - RNA, 76 nt, Human
gagaguccugauuuuucucacaaccagcaucuuuggcuucuguugaaaggcaugugggcugcucaucagaacuuuc

SEQ ID NO: 14131 - RNA, 69 nt, Human
cugggggaaggaggguugggaauguguauauugaacaaaauccucuaaaugauucugacuugccucugg

SEQ ID NO: 14132 - RNA, 72 nt, Human
ucagaaacuguguugcacauugguguacaucucuuuaaauagauuucaccuuggcauucacacuuugucugg

SEQ ID NO: 14133 - RNA, 76 nt, Human
guuccuacuugcaaaagaaaagugacguggaggaucacucggugcaccugcuuuuuuucugcaaaucgcugggaac

SEQ ID NO: 14134 - RNA, 74 nt, Human
gccaccgagaagcagaagaaggcccuggagaaguugcucccggacuccucuugagggcugccugagcugguggc

SEQ ID NO: 14135 - RNA, 71 nt, Human
ggcuaagugccagcuccucuuugcccucaaggugcucaagcaugaugcccgaggagaagcugguugaggcc

SEQ ID NO: 14136 - RNA, 67 nt, Human
gcugguggugaacuucgagagcgacaagcugaaggcugugaagggcuuccggaaugucaucauuggc

SEQ ID NO: 14137 - RNA, 63 nt, Human; identical to SEQ ID NO: 123

SEQ ID NO: 14138 - RNA, 65 nt, Human; identical to SEQ ID NO: 404

SEQ ID NO: 14139 - RNA, 91 nt, Human; identical to SEQ ID NO: 124

SEQ ID NO: 14140 - RNA, 91 nt, Human
ugccccuguuggaugcagugucucgggacuucgucaguguccugcacaggcgcaucaagaaggcggggcuccggaaauuacucgggggaca

SEQ ID NO: 14141 - RNA, 79 nt, Human
cagccugcgggccgggagcggccgggauguaaaagcucuuacccuccacuaugaccgcuauaccaccucccgcaggcug

SEQ ID NO: 14142 - RNA, 63 nt, Human
gccgccgccaggguagcgguguagcugcgcagcgucgcgcgcgcuaccgcacccagguucggc

SEQ ID NO: 14143 - RNA, 73 nt, Human
ucuuauaccccaaaagucauacagugucagaacaaaggcugggauggguaugauguacagugggaauguaaga

SEQ ID NO: 14144 - RNA, 85 nt, Human
gcccgccagcucuggcugggaggacuugcucuugggucugcagccugcaucaggagccuccacuuuccccagugcuggauuaugc

SEQ ID NO: 14145 - RNA, 77 nt, Human
guaugggggguguucugcuuggcaccaugucuggcuuuuuggccagaaguccuuugcagagcugaauauccccuugc

SEQ ID NO: 14146 - RNA, 103 nt, Human
uguggaagagaaauggaagucggcucccauugcggcagacaucauggcuuccaagcuucgcugcucuugggcuccgaaacaguauccauuggcuuuauccaca

SEQ ID NO: 14147 - RNA, 73 nt, Human
cuuuuuuacuaaaggaugccuaaagccacagguuuuauugccuaacuuaaggccaugacuuuuaggauaugag

SEQ ID NO: 14148 - RNA, 65 nt, Human; identical to SEQ ID NO: 1518

SEQ ID NO: 14149 - RNA, 75 nt, Human; identical to SEQ ID NO: 74

SEQ ID NO: 14150 - RNA, 89 nt, Human; identical to SEQ ID NO: 288

SEQ ID NO: 14151 - RNA, 61 nt, Human; identical to SEQ ID NO: 776

SEQ ID NO: 14152 - RNA, 82 nt, Human
agugguucuucuuaucuccauccccaucggcuuccucuuuaagaaagccgguccugggcugaagagauggggagcagccgcu

SEQ ID NO: 14153 - RNA, 89 nt, Human
cugaucaggggagguggggguacacaucaauuugaguuguucaggcuacugaaacauuaaaaugugaauucccaaacuuuucuuuuugg

SEQ ID NO: 14154 - RNA, 96 nt, Human
gaaaagaaggagacaggauuuuuuuaaagagcaagaaagucacaauauuacuucuuuccuuccuuuuuuccuucuuuccuuucuucuuucucuuuc

SEQ ID NO: 14155 - RNA, 76 nt, Human
gggggagcuugaaggaacuacuacuaagccccuggccccaaacccaagcuucagucccacuccaggcuucaccccc

SEQ ID NO: 14156 - RNA, 64 nt, Human
ccugccaaaagagcucauguugugccaccaccaagaggaaggggcaggggaggauuuggacagg

SEQ ID NO: 14157 - RNA, 103 nt, Human
ucaaguggaaaaucugaauacauugacguuauaaaggucucaugcuugugcuucccaaguuugagaccuuuauaacgucaaguggaaaaucugaauacauuga

SEQ ID NO: 14158 - RNA, 83 nt, Human
gcugggcugagcuucuaccuacgagugaaacucuguccucccgcgaggaccaggcaucgcugugugaggacggcacggccagc

SEQ ID NO: 14159 - RNA, 76 nt, Human
gggggugcagggcccugugguuggacuucaccucucagcacugaaaacccaaaacccagcuggccuuaacacuccu

SEQ ID NO: 14160 - RNA, 92 nt, Human
gaugguaauauucuauccuuaugacacuauugcaaccaaauuggcuuuaccaucuuggcuuuaguagguauagaagacaauggauuaccauc

SEQ ID NO: 14161 - RNA, 63 nt, Human
uuaaaacaucauauggagaaguuuacauggugauuguucaccugcaguacuguggaguuuuaa

SEQ ID NO: 14162 - RNA, 63 nt, Human
auggugacaacaugcuggagccaagugcuacauggcuugguucacaggauggcaaguccccgu

SEQ ID NO: 14163 - RNA, 79 nt, Human
gccaaaaugggaaaggaaaagacucauaucaacaugucgucauggacacguagauucgggcaaguccaccacuacuggc

SEQ ID NO: 14164 - RNA, 75 nt, Human
uauucugucauacgguagcaagaacuggccuauggcaucguauuccuggcauugagacuguauugacccugaaug

SEQ ID NO: 14165 - RNA, 64 nt, Human
aucuaaugcuaaugaacaaagguuauuuuuaaaaaaacgguuuuugugauauuaaccaugggau

SEQ ID NO: 14166 - RNA, 74 nt, Human
gauuugcuuuuaauuacaaauacugugcaugacgaugccuucuucugcaaaaccaauaaauacaagaacaaauu

SEQ ID NO: 14167 - RNA, 64 nt, Human
ugauuuguccaagauaucugaaaaaggaaacaaaagccugauuugcagguauuuauaaaaauca

SEQ ID NO: 14168 - RNA, 63 nt, Human
uucucuaaccuuucaaaggauuaaggcucaaagggugugacucaucugugggagggcagggaa

SEQ ID NO: 14169 - RNA, 63 nt, Human
auuuauuaauuccauuaagacacaacuacauauuuuauucuuauaauggccauguuaauaagu

SEQ ID NO: 14170 - RNA, 93 nt, Human
accuggagcugcacccccccaguuauccguggucucaccguggccuccucucuuccuuggaccacgaccagcuauccggagggguuuccaggu

SEQ ID NO: 14171 - RNA, 84 nt, Human
cagcgcugggcaugcuggcggcagggggugcggggcuggccguggcucugcauucggcugugagugccaguugaccuggagcug

SEQ ID NO: 14172 - RNA, 63 nt, Human
ccagcuauccggagggguuuccagguauauaagcauggugugcgccuuccugccacagcaugg

SEQ ID NO: 14173 - RNA, 74 nt, Human
cggggcgcggggcucccgggcgcgcgugcccggggucugcugugcagcgcgcggcccgggcagcucccgcuacg

SEQ ID NO: 14174 - RNA, 71 nt, Human
aucucuuuaucuauagggcaagcgugcaggccaucuagacuacuugcucuaaguccugagaugaacugggu

SEQ ID NO: 14175 - RNA, 73 nt, Human
ucuuacaugguaugcuaaggagucaguacuuuacucauaaggaggcaaaauuggcaaggcauacagaaaaaga

SEQ ID NO: 14176 - RNA, 90 nt, Human
gggguuuguggagcgcugugggagcguccagccugggugucguuacuugcggcuccguggugaagcuacucaauacgcgccacaacgucc

SEQ ID NO: 14177 - RNA, 121 nt, Human
ccccggaccugcagucuauggagcagauucggcggaucaugcggcccacagaugugccugaccagggccugcugugugaccugcuguggucugacccugacaaggacgugcagggcugggg

SEQ ID NO: 14178 - RNA, 121 nt, Human
gagaacgaccguggcgucucuuuuaccuuuggagccgaggugguggccaaguuccuccacaagcacgacuuggaccucaucugccgagcacaccaggugguagaagacgguacgaguucuu

SEQ ID NO: 14179 - RNA, 65 nt, Human
cgccuccugcaccaugcggcucgaucuccuccuugcucaggcggcccuugucguuggugauggug

SEQ ID NO: 14180 - RNA, 92 nt, Human
ggccaagguguaggcguccagccacgagaugaccucuugacacuuguccagaaccuucuucuuguccgacucgcugaucuugcccuugagcc

SEQ ID NO: 14181 - RNA, 75 nt, Human
gugccucuuguccguggccgugacguucaggaugccguuggcaucgauugucgaaggucacucgaucuggggcac

SEQ ID NO: 14182 - RNA, 94 nt, Human
uguccgacucgcugaucuugcccuugagccccucauccuccacggcgcucuucauguugaaggcguaggacuccagggcguucuuggcuugaca

SEQ ID NO: 14183 - RNA, 62 nt, Human; identical to SEQ ID NO: 5274

SEQ ID NO: 14184 - RNA, 77 nt, Human
gggugcggcuccaccccuuccacgucauccgcaucaacaagauguuguccugugcuggggcugacagauccacaucu

SEQ ID NO: 14185 - RNA, 63 nt, Human
cugccguagauuaaaagcaauuauaaaaucauaaaauugaauguuugcagaauccuggagcag

SEQ ID NO: 14186 - RNA, 73 nt, Human
ugguuucuuuucauuagaucugauuuacguuucccacuguagaucugauuuuguaguugaaaacauuucacca

SEQ ID NO: 14187 - RNA, 65 nt, Human
uuucugaauauugugccuuuuuauaccuagccuagauuaaaaccgaugccauacuuauucagaaa

SEQ ID NO: 14188 - RNA, 60 nt, Human
uuuugaugaauuucaccuauuccauucuucacguuucagaauuggucgacuuuguuagaa

SEQ ID NO: 14189 - RNA, 66 nt, Human
gccccaucccuuguccaguguccucucuaaggcagauuuaaaggacacaaaaggaagcuguguggc

SEQ ID NO: 14190 - RNA, 64 nt, Human
gugcccaccuauaccagugguggacacaguagaaccagauuguguaccuuguccacuguggcau

SEQ ID NO: 14191 - RNA, 73 nt, Human
uccaaauaucuuacaggcugcugagaaacuaggugaaccugagaaccuuaguauacugauugaagaaugugga

SEQ ID NO: 14192 - RNA, 88 nt, Human
gcucagcgucgccgcgaugguguuguuggagagcgagcaguuccugacggagcugaccagacuuuuccagaagugccggacgucgggc

SEQ ID NO: 14193 - RNA, 84 nt, Human
ucagcacuguggugagcuccaaggaagugaauaaguuucagauggcuuauucaaaccuccuuagagcuaacauggaugggcuga

SEQ ID NO: 14194 - RNA, 64 nt, Human; identical to SEQ ID NO: 8423

SEQ ID NO: 14195 - RNA, 64 nt, Human
auuugccaauuuuugaguguucuucauguuacugauuuguaggagcucuuuauauauugcagau

SEQ ID NO: 14196 - RNA, 87 nt, Human
cuccuggcccccaucccagacccuucaggggauccuggcgauucgaagcagcauagccugauaggccucuggugaggguguugggag

SEQ ID NO: 14197 - RNA, 77 nt, Human
guuuucuuggccgccuguuccaggaugcucaagaugaugcugugggccuccuggcauagcucagcacccaggaaagc

SEQ ID NO: 14198 - RNA, 70 nt, Human
gagacucuuccaggucaaagggcggcgugugguccgugccaccgagguaccuguguccugggagagcuuc

SEQ ID NO: 14199 - RNA, 89 nt, Human
gcggaguggccgggcccgagugcacgugucugaggagggcacugagcccgaggcgaugcuccaggugcugggccccaagccggcucugc

SEQ ID NO: 14200 - RNA, 65 nt, Human
cuuugcgagucagagcacucacgcccgucuacauggauagaggccucgaguaucugaccgucuag

SEQ ID NO: 14201 - RNA, 91 nt, Human
uccuggaucuggcugacaacgcggaucgugacaacaagaagacgcucauuauucaucgucaccuccagcuagucauccguaacgaccagga

SEQ ID NO: 14202 - RNA, 65 nt, Human
gaugggaaauaauucaguuugagagccaacuagaccuagauucagaccuagauuugaaucccauc

SEQ ID NO: 14203 - RNA, 70 nt, Human
agugaagcaaauauuuuauuuaaaucagucgucaaaucacaacuuauccaaaugaauguguugcaacauu

SEQ ID NO: 14204 - RNA, 72 nt, Human
auauggcacaaacacaauccaguaucuaucaaaauaccauuuguaaagaaccugacuuauuucaugccaugu

SEQ ID NO: 14205 - RNA, 90 nt, Human; identical to SEQ ID NO: 2702

SEQ ID NO: 14206 - RNA, 74 nt, Human
gggcccuggcguuacccaacuuaaucgccuuugagcacaucccccuuuugccaguuugcguaauaacggggccc

SEQ ID NO: 14207 - RNA, 82 nt, Human
ccaggcugcugggacugggcugguuuuguccuugaaguggucaggauacaggacaagggcagccccaccccauccagccugg

SEQ ID NO: 14208 - RNA, 79 nt, Human; identical to SEQ ID NO: 3096

SEQ ID NO: 14209 - RNA, 120 nt, Human
gggggcccggucugccaacucagcuccucugcugcaaaagcggggugcuuguuggggccaucuccuggcaauggcaagugagucuggagcagagaggggagaggggcugggugggucccc

SEQ ID NO: 14210 - RNA, 85 nt, Human
gaccggccggagagccgagaaggugcacgggcugcucaagacauucgugaggcagaacgcugccauccguggcauccggcacguc

SEQ ID NO: 14211 - RNA, 103 nt, Human
gcgaugacuucuguuucuuccagaugcucaugggugggggugugugucgcacagugacacucaacuucaacaugccaggcgccuuugugcaugaagucauggu

SEQ ID NO: 14212 - RNA, 102 nt, Human
ggugcaguggcacacaccuguaaucccagcuacuccgaaggcugaggcaggaggaucaccugagcccaggaaguugagacugcagugagcugagauugcacc

SEQ ID NO: 14213 - RNA, 72 nt, Human
gacggagaggaugagggugaagaguauuaaccugugugcuguacuuuuacacuccuuugucuuggaacuguc

SEQ ID NO: 14214 - RNA, 65 nt, Human
ggugugacccucgccaugguaaauacauggcuugcugccuguuauaccguggugacgugguuccc

SEQ ID NO: 14215 - RNA, 68 nt, Human
ugccaccaucaaaaccaagcguaccauccaguuuguggauuggugccccacuggcuucaagguuggca

SEQ ID NO: 14216 - RNA, 98 nt, Human
uguggugccuggcggagaccuggccaagguacagagagcugugugcaugcugagcaauaccacagcuguugccgaggccugggcucgccuggaccaca

SEQ ID NO: 14217 - RNA, 69 nt, Human; identical to SEQ ID NO: 6797

SEQ ID NO: 14218 - RNA, 63 nt, Human; identical to SEQ ID NO: 6798

SEQ ID NO: 14219 - RNA, 98 nt, Human
uuuuuaaaauuaugagauacuuuuuuaugugugcuucauuaacaauaaaaacauugcaaagggaaguaauacucaagagaauaucaucauuuuggaaa

SEQ ID NO: 14220 - RNA, 104 nt, Human
uucgcccacuuuuugaugggguuguauguuuuuuucuuguaaauuuguuugaguucauuguagauucuggauauuagcccuuugucagaugaguagguugcgaa

SEQ ID NO: 14221 - RNA, 98 nt, Human
uuuucucccauguuguagguugccuguucacucagaugguaguuucuuuugcguucucuuucccucucccaacauggcggccucagcaaaaaagaaga

SEQ ID NO: 14222 - RNA, 68 nt, Human; identical to SEQ ID NO: 12184

SEQ ID NO: 14223 - RNA, 82 nt, Human
gcaggccgccugcacauugagcagcagcagggugggcgagcacuugucagccaucuccuggaagauguaguaggcauccugc

SEQ ID NO: 14224 - RNA, 90 nt, Human
aucuaugaaggccaaguggaggugacuggugaugaauacaauguggaaagcauugauggucagccaggugccuucaccugcuauuuggau

SEQ ID NO: 14225 - RNA, 64 nt, Human
auaagaucuaagaguuaccuggcuacagaaagaagaugccagaugacacuuaagaccuacuugu

SEQ ID NO: 14226 - RNA, 61 nt, Human; identical to SEQ ID NO: 200

SEQ ID NO: 14227 - RNA, 62 nt, Human; identical to SEQ ID NO: 11985

SEQ ID NO: 14228 - RNA, 93 nt, Human
cgggggucggggcgcaauugccagggacaucuggagcccggccugcuucugucgggcuccaggguaccccuggauggcugcgcugugcccucg

SEQ ID NO: 14229 - RNA, 62 nt, Human
uagauauauaagaaccugaucuccaaguguugaagacugaaaaucagauaucuauaugucua

SEQ ID NO: 14230 - RNA, 76 nt, Human
gaggcuaagucugggcagugggcuggccccuggugugagcauuagaccagccacagugccugauugguauagccuu

SEQ ID NO: 14231 - RNA, 81 nt, Human
gccuuaagaaaauagcuuccugucucaggcuuucuaggaagucacaaacuaggugucugggaggcaguuuuagguaagugc

SEQ ID NO: 14232 - RNA, 95 nt, Human
cccucuucuaagcagcaggaacagaguugcuuuaggcugucauagucuucccuggaucuaacuaaagcaaauaugugaugagcuuuaggggaggg

SEQ ID NO: 14233 - RNA, 79 nt, Human
agauccuguuuugaaauuccauucacauuacauucgauuuacuagaaugccuuuuuuuuucuuuuuugagauggggucu

SEQ ID NO: 14234 - RNA, 64 nt, Human
auccucuugccucugcagccuaauaauuuuuuuuuaauuuuuauuuuuuuguagaguuggggau

SEQ ID NO: 14235 - RNA, 70 nt, Human
cucuguugcucagcaggaaugcagggguacaaucacgacucacuauacccuugaacuucugggcucaggg

SEQ ID NO: 14236 - RNA, 115 nt, Human
aaggcuuauuuuuccaggcaggaggagaggcugguggucuugagcuuuuggccuggaauuccagucugaauuuucaaauauucccugccuccaaccccuuugggauccuagucuu

SEQ ID NO: 14237 - RNA, 99 nt, Human
gauguuaagggugaacuugucacuugguauguagguccgacucccaucccagagguggcagugggccuuggcucaagaucaaguuugaacuaaaauauu

SEQ ID NO: 14238 - RNA, 61 nt, Human
cuuuuuucuuuucuuugauuucucuucaguagcacuuucggaaucagaggaaucagaagag

SEQ ID NO: 14239 - RNA, 95 nt, Human
gagcuaucugagucacuagaugaggaggaggaagaugaugaugauuuaugccuuuucuuuucuucuuucuuaacuuuagauuugggaaucagcuc

SEQ ID NO: 14240 - RNA, 75 nt, Human
gcaucuguuuucugguuuucaaucucucuuacaacuucuugaccagagauuacuuguccaaaaacaacaugaugc

SEQ ID NO: 14241 - RNA, 103 nt, Human
cacaggucgggggccuagagaccaccaaugcccuuggacacacagaauccccuugauuuccaggagguaguggguggcauucucugagccuuugcacauggug

SEQ ID NO: 14242 - RNA, 98 nt, Human
gccuuguauuucugcagguucucaaaguggcccaggcacuugcagugggagagcugugccccuggcguugcugugauagaacuuguggcagaugcggc

SEQ ID NO: 14243 - RNA, 68 nt, Human
ccuuaauuacuuccuuagcagccccagcuccacagugaagguuggggcuucaacaugggaauuuaggg

SEQ ID NO: 14244 - RNA, 66 nt, Human
ggugccagcaggguggggggggggguucauugugaggcuucuccucuuggcuuguagguggcugcc

SEQ ID NO: 14245 - RNA, 95 nt, Human
ugccaauuaccccuaucugauuacuauacauuauauguauugaaacauuauuauguaccccauaaauauguagagagcagucaagggagcuggcg

SEQ ID NO: 14246 - RNA, 63 nt, Human; identical to SEQ ID NO: 12577

SEQ ID NO: 14247 - RNA, 102 nt, Human; identical to SEQ ID NO: 2172

SEQ ID NO: 14248 - RNA, 77 nt, Human; identical to SEQ ID NO: 3082

SEQ ID NO: 14249 - RNA, 85 nt, Human; identical to SEQ ID NO: 6504

SEQ ID NO: 14250 - RNA, 62 nt, Human
ccccagucagucaccgccucugcgcuguuccucagguguaauauuguuaagaaagaaagggg

SEQ ID NO: 14251 - RNA, 67 nt, Human
gcccucauccaccgagaccucacgagagcgcaccaggucgcucuuguagcccacgaggaugaugggc

SEQ ID NO: 14252 - RNA, 68 nt, Human
gccuggacauuguggugcacugccgcugaugucucaaugaacuugcagucaaagaccaccgcgcaggc

SEQ ID NO: 14253 - RNA, 120 nt, Human
gcucaaauugcugcuaggaagauuuauaggcaaagaagugugggagugggaggccaagagcugccuucuucacaucaacagaaacuccagcuguucuuuccccuuagcaguucucugagc

SEQ ID NO: 14254 - RNA, 69 nt, Human
ggagggcggucaggggaacuucacagugcggggaggggugucuggaaaggaaacucugaagcgccgucu

SEQ ID NO: 14255 - RNA, 64 nt, Human; identical to SEQ ID NO: 6321

SEQ ID NO: 14256 - RNA, 65 nt, Human
aagucugccacaaugcugauaacccagcccauggaaucagggcugugcugcagcugggcaugcuu

SEQ ID NO: 14257 - RNA, 100 nt, Human
ugaucaucaucgugcagugcugccuguaugaggugagaccagcccuggcaggaccuaggucucagcuaucaaacagguagcuguacgguggcuuugauca

SEQ ID NO: 14258 - RNA, 105 nt, Human
agcuuugguuuugcuuacaaaguauauuuaaggauuauucugcugaagauucaguuuaagaguuuuccuugggagaacuaaguaagaaacacaaugccaacagcu

SEQ ID NO: 14259 - RNA, 76 nt, Human
auuggcaaauagcgugggauagauugguuucuuaaugggugugaccaauccuguuuuuccuaugcucugggugaau

SEQ ID NO: 14260 - RNA, 80 nt, Human
gccugaugguauacuacugcuuugcggaauugcauacaacugugcauuacaaaguuaauaugguaauuauggucuggggu

SEQ ID NO: 14261 - RNA, 75 nt, Human; identical to SEQ ID NO: 74

SEQ ID NO: 14262 - RNA, 87 nt, Human; identical to SEQ ID NO: 76

SEQ ID NO: 14263 - RNA, 71 nt, Human; identical to SEQ ID NO: 77

SEQ ID NO: 14264 - RNA, 66 nt, Human; identical to SEQ ID NO: 3167

SEQ ID NO: 14265 - RNA, 68 nt, Human
ggcccugaaaagacccgacgacacagcuuuccaaauaguggaacuucggauuuuuucuaacuggggcc

SEQ ID NO: 14266 - RNA, 64 nt, Human
ugaguauaccugucuguaucgguucagaguucauggcgaaccugucaagugaagacacuacuca

SEQ ID NO: 14267 - RNA, 84 nt, Human
gcauccuaggccuauuaauauuccggaguauacguagccggcuaacguuaacaaccgguaccucuagaacuauagcuagcaugc

SEQ ID NO: 14268 - RNA, 88 nt, Human
ggcgcacgugcacuagugcuuucgagcucuguacauguccgcggucgcgauguacgcguaucgauggcgccagcugcaggcggccgcc

SEQ ID NO: 14269 - RNA, 82 nt, Human
aauuuuuguucaggaaugacuugcucauucuguguuuuuaaaaauaggaaauaaggcauagugagucaucauuacaucaauu

SEQ ID NO: 14270 - RNA, 67 nt, Human
acuguguuauuugauuaguaauauguucccuuaaaauucauuuugagguguauguuauacacacagu

SEQ ID NO: 14271 - RNA, 84 nt, Human
cagaaggacuccccaaaauucccucuguguccacucacauaaaggugaaaagcgaagagaagaucaaagugguggagaagucug

SEQ ID NO: 14272 - RNA, 73 nt, Human
ggaagcauucagcagcuggacgcugagcugaggaacaccaagugggagauggccgcccagcugcgagaauacc

SEQ ID NO: 14273 - RNA, 62 nt, Human
gcaucuuuuauucuugguaguuuuugggauccccggaugcuuuuuccuugggugacugaugc

SEQ ID NO: 14274 - RNA, 65 nt, Human
ugauuguagugucuuacuguguguguucaaccuugugcuuagaguaucagaaauaucucucuuca

SEQ ID NO: 14275 - RNA, 61 nt, Human
gcugcugcagcccgcggggucccucggcuccuacagcuaccggaguccccacuggggcagc

SEQ ID NO: 14276 - RNA, 61 nt, Human
ugguggccccugccacggaugguggccucaaccugaccuccaccuuccucaggaaaaacca

SEQ ID NO: 14277 - RNA, 61 nt, Human
ggccccugggagaugacgagguuggugcaaaggcagcugguagguggucugcuggguggcu

SEQ ID NO: 14278 - RNA, 61 nt, Human; identical to SEQ ID NO: 12046

SEQ ID NO: 14279 - RNA, 64 nt, Human; identical to SEQ ID NO: 9729

SEQ ID NO: 14280 - RNA, 73 nt, Human; identical to SEQ ID NO: 12049

SEQ ID NO: 14281 - RNA, 84 nt, Human
cggacuuccauaaacucaaccuuccuuaaccccagaaaccacagacuuucaagagugaugacgaggggaagagaugagaagacg

SEQ ID NO: 14282 - RNA, 68 nt, Human
gugauuaacaaaacauuuugugcagaaggcugaagucuaaucuaagcaaauuugugucuggugauuau

SEQ ID NO: 14283 - RNA, 63 nt, Human
ugcucuagaucacgucuacaagucaacuuuccuucucugauuuuagaucuauucaagagagca

SEQ ID NO: 14284 - RNA, 63 nt, Human
ugggccacagaggcauaaggucuggguuaagaaauaucuaagacgugcucaaucuguguucca

SEQ ID NO: 14285 - RNA, 75 nt, Human; identical to SEQ ID NO: 74

SEQ ID NO: 14286 - RNA, 87 nt, Human; identical to SEQ ID NO: 76

SEQ ID NO: 14287 - RNA, 71 nt, Human; identical to SEQ ID NO: 77

SEQ ID NO: 14288 - RNA, 60 nt, Human
gugaaaugaggguagcaguagugacgcccaucuccacuggcagugcugauccucagaaac

SEQ ID NO: 14289 - RNA, 64 nt, Human
ugcgcugaaugaugucacggcagucguugaacacacggcggauguucucaguguccacagcgca

SEQ ID NO: 14290 - RNA, 60 nt, Human
gcucucgggggcaccuuccgggguuccuaagccgcggggccccucgcugccccucgaggc

SEQ ID NO: 14291 - RNA, 98 nt, Human
gcuuggagaggacaagugcagccugucaguuuuagaagcaaguaaaucauccucuuuucaagagcaguguccguggugugcaguuccucuccaauugc

SEQ ID NO: 14292 - RNA, 87 nt, Human; identical to SEQ ID NO: 4554

SEQ ID NO: 14293 - RNA, 81 nt, Human
ucaugcucugaaacuuugcaucaaggacugaccaacuggucagggucaucaugauguacaaagaagccaaacagaacauga

SEQ ID NO: 14294 - RNA, 70 nt, Human
aaaguuugauuauacuuuggaggaucacagauuguuccauaaccuuaagccuccaacuauuuccgacuuu

SEQ ID NO: 14295 - RNA, 65 nt, Human
cucucccuugcaguuguucgccccucugggccaaaccaaagggacgcugcucuguacagguagag

SEQ ID NO: 14296 - RNA, 102 nt, Human
uggaauucuucauugagucguugacuucucgacggaaugcugacagguucugggugaaccugucucuguuuuucguaagaagauuucgcucgaugccuucca

SEQ ID NO: 14297 - RNA, 74 nt, Human
ucucagaagcucuaucccauggagacugugauguucuuacaagaaccuuuguccgucggguauuguaggugaga

SEQ ID NO: 14298 - RNA, 72 nt, Human
uguauuuugacaucauuaugagauuuaaacaaauuccucagugaauguuugguugugauauguuaaccugca

SEQ ID NO: 14299 - RNA, 95 nt, Human
acguauucgacgcgccauuguucggcaucgccugggcaguacgcaggccgagagugguggugcuggcauggccgaacaggcgcgucggaauacgu

SEQ ID NO: 14300 - RNA, 82 nt, Human
aaaaguaaugugagucugucuaaccauauuuuccuaacucaacaguaggaucaugaugguaaggcaaauacaaguuauuuuu

SEQ ID NO: 14301 - RNA, 69 nt, Human
uccugaacgcagccugcugaggucgacuugagaaaguucagggccuggagagaaggcugugaggcagga

SEQ ID NO: 14302 - RNA, 71 nt, Human
ccuggcacggugacucacgccuguaaucccagcacuuugugaggcugaggcaggcagaucacaaggucagg

SEQ ID NO: 14303 - RNA, 69 nt, Human
gauuggaauuugaguuaaaauuuagcuuuguacauuacgugugagaguuacagacuagcaagucuaauu

SEQ ID NO: 14304 - RNA, 91 nt, Human; identical to SEQ ID NO: 8804

SEQ ID NO: 14305 - RNA, 71 nt, Human
acuuuuaaaacuuuaaacgacccacagcugaaauaguuguacuuagcuagguuaaaaacacauaauaaggu

SEQ ID NO: 14306 - RNA, 82 nt, Human
gcaauaauggaagaacagaguauuuuaauuuuuaucuucaaagaaaaucguacaaugacacugauuuuucuguuaaaacugc

SEQ ID NO: 14307 - RNA, 78 nt, Human
cgccgagcacagcuucuccuuaugucacgcacgauuucccgcucggccgugguggugaagcuguagccgcgcucggug

SEQ ID NO: 14308 - RNA, 61 nt, Human
cguagauuggcacagugugggugaccccgucaccggaguccaucacgaugccagugguacg

SEQ ID NO: 14309 - RNA, 107 nt, Human
cuggcucuagccugcuuuuguuuggauuuagaucuugguggagaggacugucccacuccucucuucuggcuagugagucuuccacaaaagccgcugccaggagccag

SEQ ID NO: 14310 - RNA, 97 nt, Human
uuuuuuuuuuuuauugaaaucaagacaugaauagcuaagguuuuauuuguuaucacuauuugcugggcuauuaucugauuuggaaaaaaaaaaaaaa

SEQ ID NO: 14311 - RNA, 64 nt, Human; identical to SEQ ID NO: 14289

SEQ ID NO: 14312 - RNA, 64 nt, Human
ccuuuugauuauuuaguccaauaacauugaguuuuuuucuucuuugggcuggaauucaugaagg

SEQ ID NO: 14313 - RNA, 61 nt, Human
uuugaaaucauaaugauaggaauaauagcuaacauugaauuacuccuuaauaugugccaaa

SEQ ID NO: 14314 - RNA, 74 nt, Human
guccugcaaggcuucuggcuacaucuucacaaguuaugauauagacugggugaggcagacgccugaacagggac

SEQ ID NO: 14315 - RNA, 61 nt, Human
guuccuuuucuaugcggcccgagccggccaugggccaggugaagcugcagcaguaaggaac

SEQ ID NO: 14316 - RNA, 64 nt, Human
aacugaaauacaguagaaauggaaaacuacagcaguuuugauguuuucucauaguaaugcaguu

SEQ ID NO: 14317 - RNA, 80 nt, Human; identical to SEQ ID NO: 9102

SEQ ID NO: 14318 - RNA, 130 nt, Human; identical to SEQ ID NO: 3361

SEQ ID NO: 14319 - RNA, 80 nt, Human; identical to SEQ ID NO: 7076

SEQ ID NO: 14320 - RNA, 69 nt, Human
cugucagggcugauggugaaggggucagcacgcggauguugaucuuuucuuucuucagcaguucggcag

SEQ ID NO: 14321 - RNA, 68 nt, Human
gauucaauaguaauaaaaacaacagaaacaagauucauauuuccacagcuguuuucuuauuuggaguc

SEQ ID NO: 14322 - RNA, 70 nt, Human
uagaagguggaguaaaauuccuggcauaagauaaucagauugcacaaggaaccucuaaaucuaacuucua

SEQ ID NO: 14323 - RNA, 60 nt, Human
ucucugggguuucaguuggcccuauuguuuggugagggaaaccauagugaaccucagaga

SEQ ID NO: 14324 - RNA, 77 nt, Human
caaggacaucggcuccaagucugacccacucugcauccuuuuacaggaugugggagggggcagcugggcugagcuug

SEQ ID NO: 14325 - RNA, 78 nt, Human; identical to SEQ ID NO: 5666

SEQ ID NO: 14326 - RNA, 90 nt, Human
gggcggaggcacucgcgcgggggguaauucggggucuggguucuggugccgcgcagcuuuccccgauggcccacugcgugaccuugguuc

SEQ ID NO: 14327 - RNA, 90 nt, Human
cacagagcaaauaacauuacugaaagaaccuggaggcuauuaaauacaaaauggcaguuuucuuucaaagugaaaauauuugcuucuuug

SEQ ID NO: 14328 - RNA, 71 nt, Human
gccaaauguggaacuaagguggguucaguggggaccagggaaggccucauggccccaguccacaauugugc

SEQ ID NO: 14329 - RNA, 67 nt, Human
uacuccucagugccuugcagucucccaaucacagaagaguagauaugggaagggccaaagaggagua

SEQ ID NO: 14330 - RNA, 60 nt, Human
ccucggaucuagccugcggagacagggcggccgggccaggucuggggagagaggccgagg

SEQ ID NO: 14331 - RNA, 75 nt, Human
ggcggcccggccuucggccgcccggggcgcgcggggcacgcccgcgagggggcgagcccgggggcuggagcugcc

SEQ ID NO: 14332 - RNA, 70 nt, Human
ggggcagggaggaaaaagcgaaaacacggaauuacagagaaagucgguuucuucuuaaucuccuuggccc

SEQ ID NO: 14333 - RNA, 77 nt, Human
gaagaucaaucugauggcuaaagaucaguaugacugcguaaggcaguuugacaucuacccaucccuaacagauuuuc

SEQ ID NO: 14334 - RNA, 80 nt, Human
uguggaacaaccaaggagaaggcauauuccucccuuuccaaaggugggcaaugugccucuuccuggaagguuauuuuaca

SEQ ID NO: 14335 - RNA, 130 nt, Human
ccacgucaccgacccuucggcuuuuggguucgggugaugaugguuccacgucagcggcccuccgccucuuggguuugcgugacgguuccacaucaccgacccuccgccucuuggguucgggugaugaugg

SEQ ID NO: 14336 - RNA, 96 nt, Human; identical to SEQ ID NO: 8065

SEQ ID NO: 14337 - RNA, 70 nt, Human
gagaaacauacaugacuuagagugaaaaauaauucuagaaaaguuucacuagguaaguaugcaaauucuu

SEQ ID NO: 14338 - RNA, 70 nt, Human
acaaaagguacuuuuggagaccucugucauggaagucaccuucaagacaguacuguaacaagccauuugu

SEQ ID NO: 14339 - RNA, 86 nt, Human
uuuuuuguagagacggggccuugccauguuacccaggcugguuuugaaccugggaaacauagggagacccugucucuauuguaaaa

SEQ ID NO: 14340 - RNA, 94 nt, Human
caaacacaaagcagguuugguugaggacagacacucagggaauuuuugaccaccaaaaaaguuuuggggguuuguuuuuccuguuuuuuguaug

SEQ ID NO: 14341 - RNA, 60 nt, Human
gaugucauaggcggccuucuucaguucguaaucucucugugccuuggccaucucgaucuc

SEQ ID NO: 14342 - RNA, 71 nt, Human
gccaccugcugggcccgcuccaccaccugcaccugcacccgcugcuccucaaucugcugcuuagucuuggc

SEQ ID NO: 14343 - RNA, 64 nt, Human
uugucccgcuccgcuuccgcuggcuuccgcacccgggccuccagcuccuucucccgccgggcga

SEQ ID NO: 14344 - RNA, 70 nt, Human
agguagagcucaaaaguuagcagcuauuauguauuuuuccaacauguuugauugcugcuucugcuccccu

SEQ ID NO: 14345 - RNA, 60 nt, Human
uuguuugguauacuucauuuccagugaugggcuggucacugaugcugaggagccaggcag

SEQ ID NO: 14346 - RNA, 64 nt, Human
acuuuuuuaaugggucucaaaauuuugugacaaauuuuuggucaaguuguuuccauuaaaaagu

SEQ ID NO: 14347 - RNA, 89 nt, Human; identical to SEQ ID NO: 288

SEQ ID NO: 14348 - RNA, 81 nt, Human
ugacuguuuagaauaugguuuucuuaauuagcagucauggggaaaacaugcauuuuuaauuuggaaaaaaccugacaguua

SEQ ID NO: 14349 - RNA, 61 nt, Human
ugguucuguuuaccuugauuagugaaguaauuugcugcaguguuacagaggagcagaauca

SEQ ID NO: 14350 - RNA, 68 nt, Human; identical to SEQ ID NO: 8944

SEQ ID NO: 14351 - RNA, 91 nt, Human
cauacuuucaugcauuucaucauuucucaaaagagcuuuauuuccuuuuaguaggaauagaucuagaaaucaagauuugggugcuaauaug

SEQ ID NO: 14352 - RNA, 61 nt, Human
gacgccaauucggccaaugggagcccuuucaagcaggcuucugugcccuuuaugauguguc

SEQ ID NO: 14353 - RNA, 131 nt, Human; identical to SEQ ID NO: 6294

SEQ ID NO: 14354 - RNA, 65 nt, Human
ccuuguguuggaggcugcugugaugucaggaacggggaucugucuagcuuuuggccacuuccugg

SEQ ID NO: 14355 - RNA, 88 nt, Human; identical to SEQ ID NO: 11656

SEQ ID NO: 14356 - RNA, 77 nt, Human
ggcuagaaaagccaaggccaaaggcuggaggggagaggacagucagcauguccagccuggggucuggguguaggguu

SEQ ID NO: 14357 - RNA, 78 nt, Human; identical to SEQ ID NO: 99

SEQ ID NO: 14358 - RNA, 65 nt, Human; identical to SEQ ID NO: 247

SEQ ID NO: 14359 - RNA, 80 nt, Human; identical to SEQ ID NO: 100

SEQ ID NO: 14360 - RNA, 77 nt, Human
cucaggauggcgcugggcuguccccucgccucuguccuugccagaagauggaggagaggcggcccaacucuucugag

SEQ ID NO: 14361 - RNA, 90 nt, Human
gggagggugggguggggggcagacuggggcucaacaaauggaaugugugccgggaagggccaccuggaagcccccacuccacccccaccc

SEQ ID NO: 14362 - RNA, 63 nt, Human
guuaccaggccggggccguguuggcaagacgccucauccgccucguguuccuguccuggucgc

SEQ ID NO: 14363 - RNA, 69 nt, Human
ucuccagcagugggcaccacugguccgcaucgcccguguuccggauggcaagucuccacugugggcaga

SEQ ID NO: 14364 - RNA, 61 nt, Human; identical to SEQ ID NO: 776

SEQ ID NO: 14365 - RNA, 84 nt, Human; identical to SEQ ID NO: 286

SEQ ID NO: 14366 - RNA, 69 nt, Human
aauggugacaacaugcugggagccaagugcuaacaugccuuggguucaaggcauggcaacgucaccguu

SEQ ID NO: 14367 - RNA, 64 nt, Human
cguacugacucgaacaagcguuuaaaagagcucaaccuguagagacgugcucgcgagucagccg

SEQ ID NO: 14368 - RNA, 78 nt, Human
aaggcuccacauacuucacaaacuuccauuuguuuuucuugugcagcaaagcuuucaauugucgacguuguggaccuu

SEQ ID NO: 14369 - RNA, 69 nt, Human
cagaagacugcugguuuugagauaaugccaaacgagcauggccucgucugauccuacguucuacuucug

SEQ ID NO: 14370 - RNA, 64 nt, Human
ggugaacaucaucucccagaauauucagcuuuuagcuuguuuuuucuuuuggaccaguucaacc

SEQ ID NO: 14371 - RNA, 61 nt, Human
aaggcaaucggaauuugaguacuaugguuaccuagaugaagaugauggugucacgugccuu

SEQ ID NO: 14372 - RNA, 64 nt, Human
gguccggauaaaaggagcugggagguccugauuauggaaaaaguuggcccuaaaaugcuggauc

SEQ ID NO: 14373 - RNA, 74 nt, Human
caggcagaagaagaugcccaugauggcgcccugcauggagcgcggggccucugaguaggcaaacuccaggccug

SEQ ID NO: 14374 - RNA, 77 nt, Human
gaugcuggcaaagaucucacugaucccaaugagcagguacugagggaucugcaccagauggacaguggugccgcguu

SEQ ID NO: 14375 - RNA, 68 nt, Human
ggauguauuguaagcgcuccaucuccaggacuccugccacaaugacggagguauaaccaaagacauuc

SEQ ID NO: 14376 - RNA, 94 nt, Human
ggcaauuguugauguucccaaaguccuuggggcagugcagccagcccccgggcaaggacagcauugccacuaggcuggagcccaacagugagcc

SEQ ID NO: 14377 - RNA, 80 nt, Human
ggggcgcaggugcgcgggugcguggugccacugggugaccgacuuagccuggccagacucucagcaccuggaagcgcccc

SEQ ID NO: 14378 - RNA, 82 nt, Human; identical to SEQ ID NO: 4821

SEQ ID NO: 14379 - RNA, 66 nt, Human; identical to SEQ ID NO: 4822

SEQ ID NO: 14380 - RNA, 66 nt, Human; identical to SEQ ID NO: 4823

SEQ ID NO: 14381 - RNA, 62 nt, Human
aaggucacguggcaauggucucgggacuuugggucccggaguggccgugaaacggugguauu

SEQ ID NO: 14382 - RNA, 74 nt, Human
gaaaugaggucggguuuauaugcacuuauugguauuggaauuucuggugcaacuuauagguuugauuuuaauuu

SEQ ID NO: 14383 - RNA, 83 nt, Human
ggaaacucaucuccuuccugaggagccggggaggcuggacccaguccccgucgugcagucaggugggcgggugugucuuuucc

SEQ ID NO: 14384 - RNA, 77 nt, Human
gucucgggcaaagcguuaugagaagcuggacuuccuuggggagggacaguuugccaccguuuacaaggccaugagau

SEQ ID NO: 14385 - RNA, 103 nt, Human
ugaugcuuuuggacauaaaucuaauauuagccuugucuuugauuuuauggaaacugaucuagagguuauaauaaaggauaauagucuugugcugacaccauca

SEQ ID NO: 14386 - RNA, 64 nt, Human; identical to SEQ ID NO: 7119

SEQ ID NO: 14387 - RNA, 77 nt, Human; identical to SEQ ID NO: 3323

SEQ ID NO: 14388 - RNA, 85 nt, Human
acagccagcgcucucagcucaugaugcgcacccggaucgccgcccaggguuucacggucgcagccaucuugcugggucuggcugu

SEQ ID NO: 14389 - RNA, 60 nt, Human
guguaacuguaaccgaaaguuuuuucaaaaauccuagaugcuguuguuugaauguuacau

SEQ ID NO: 14390 - RNA, 82 nt, Human
uaagcccagggucuggccuugaaagcuccgcagaaaugauuccaaaacccaggagcaaccacuggcccuaccgugggacuua

SEQ ID NO: 14391 - RNA, 73 nt, Human
cgggccacccgggucaagcgcgcuccgccgggaaacuucugcgggcgccgggcugaagcuccgggcagggcug

SEQ ID NO: 14392 - RNA, 76 nt, Human
accugccuaccagacacaagauucgagagcucaccucauccagaauugguuugcucacucgcaucagugggcaggu

SEQ ID NO: 14393 - RNA, 131 nt, Human
guucuauagaguuuacccuuaccugugucgggccuugaaaacauucgucaaagaccguaaagagaucccucuugccaaggauuuuuauguugcauuccaagaccugccuaccagacacaagauucgagagc

SEQ ID NO: 14394 - RNA, 70 nt, Human
guuucagagcagcgauggagaaauuaaauacuugcaauuagcagaggaacugauucguccugagagaaac

SEQ ID NO: 14395 - RNA, 60 nt, Human
gcucgcugggaaaguccuugcugugaaaucgaagauugaggacuacuuuccagaauuugc

SEQ ID NO: 14396 - RNA, 75 nt, Human
agacuaaggccaacacagcagaaagggcaaagggcuggaaagaagcuaaguccugauggaggcuuucugaagucu

SEQ ID NO: 14397 - RNA, 73 nt, Human
cuucagagaggugggauguggaggggagaggacaugaggauggagcugccaaagccauccugccacugugaag

SEQ ID NO: 14398 - RNA, 100 nt, Human
gucgggcuugugcguauggguggugugaugucuggggcugucccugcugcacagcccaggaggcgguggaagaagauauccccauagcgaaagaacggac

SEQ ID NO: 14399 - RNA, 64 nt, Human; identical to SEQ ID NO: 14289

SEQ ID NO: 14400 - RNA, 87 nt, Human
aggcgugaacaguuauccagaagaacagcacccuccaccacuggucugggcuugagguucaucaucaauaaucuguacaccucgccu

SEQ ID NO: 14401 - RNA, 71 nt, Human
cagugggaggagucaaugucauucuaccccucgcuaaacgaagauauuaacaucuauugcuuguuccgcug

SEQ ID NO: 14402 - RNA, 63 nt, Human
uggucgacaggcucucaaggcaacuccccauuuucaagaggcugcuccugccugcuucgauca

SEQ ID NO: 14403 - RNA, 73 nt, Human
aagauugaauuaggagguuaggcaggaguaggaucaaagacuuagaaaaugcuuguuuccuccuauuauucuu

SEQ ID NO: 14404 - RNA, 78 nt, Human
ggaagccgcggggacaguugacauuguggaauggagcgaaagagucgaccgggccgucgauggccaugggguguagcc

SEQ ID NO: 14405 - RNA, 69 nt, Human
ccuggaagacuuuuuuuucuuauuuuaguugagaaguuucauaaacugcucaaggauuaguuuuccagg

SEQ ID NO: 14406 - RNA, 79 nt, Human
uacaacaugacaccaacagaagggaucaaagugugucgugaaauugcgagucuucauuccuuuuucuugguucuuugua

SEQ ID NO: 14407 - RNA, 70 nt, Human
ucuuuuagucuagacuauuuaaccaaagguauguguuccuuuaauaauuuuucuuuaguuuauugaaaga

SEQ ID NO: 14408 - RNA, 70 nt, Human
ggacggugugggacacgggcuaccacuggguacacgucacggucuuacaccugugccccacgacgggucc

SEQ ID NO: 14409 - RNA, 69 nt, Human
caucuugugggccuugugguguucuggucacugcuacccucucaaugccacacaugagcccucagggug

SEQ ID NO: 14410 - RNA, 73 nt, Human
gaguuucauccuugugauaagaaauguguacuuggaacaagcuaaccugcuauuucccaccuuuaugaaacuc

SEQ ID NO: 14411 - RNA, 79 nt, Human
aggacuuuagcagcucguuguauuuccuggucaaccucucagcgaccuggagggauucgucgagcucccgccgcagcuu

SEQ ID NO: 14412 - RNA, 61 nt, Human; identical to SEQ ID NO: 10042

SEQ ID NO: 14413 - RNA, 85 nt, Human
ggcugggauuggaacuguguuugggagccucaucauugguuaugccaggaacccuucucugaagcaacagcucuucuccuacgcc

SEQ ID NO: 14414 - RNA, 130 nt, Human
ucucuagccgcagcuuccaaaccagcgccauuucaagggacaucgacacagcagccaaguucauuggagcuggggcugccacaguugggguggcugguucuggggcugggauuggaacuguguuugggag

SEQ ID NO: 14415 - RNA, 65 nt, Human
uggcgcugcacagguggcuggacugucccaccuucuguggacagagccacuuggugcugcgacca

SEQ ID NO: 14416 - RNA, 65 nt, Human
caugggcaaauagcgugggauagauuuguuucuuaaugggugugaccaauccuguuuuuccuaug

SEQ ID NO: 14417 - RNA, 77 nt, Human
ccugaugguauacuacugcuuugcggaauugcauacaacugugcauuacaaaguuaauaugguaauuauggucuggg

SEQ ID NO: 14418 - RNA, 73 nt, Human
cuuacaaaguauauuuaaggauuauucugcugaagauucaguuuaagaguuuuccuugggagaacuaaguaag

SEQ ID NO: 14419 - RNA, 82 nt, Human
cagauaagacagggaacacuugugagcacacagagcagcaucugaugcccugugguguuuggcaugugcccccugucuacug

SEQ ID NO: 14420 - RNA, 72 nt, Human
ccacagccuguaacucaguguuuuguacuucacugaauugugaugguuagaaacuucguggauaguuugugg

SEQ ID NO: 14421 - RNA, 79 nt, Human
aucucaggacucuggauaccuuuauuuuugcuucagguggcuuuuaaucagauucaaaagggaauuuaguuuucuagau

SEQ ID NO: 14422 - RNA, 66 nt, Human
guccgucugcccguagcuaauccacaggccugugagaacuggcuccggggaaagaauaggauggau

SEQ ID NO: 14423 - RNA, 88 nt, Human
gggagguacacauagucgguugcucccggcaccaaggccgcaggcggcggucggugcagggcgccccgcuggcguaguaguccauccc

SEQ ID NO: 14424 - RNA, 60 nt, Human; identical to SEQ ID NO: 5344

SEQ ID NO: 14425 - RNA, 69 nt, Human; identical to SEQ ID NO: 5346

SEQ ID NO: 14426 - RNA, 93 nt, Human
cggaauagagucugagaagcagaaggaggucugggagucaugcaggaaugaauacuucugguccuuugggauauagguuucuucaaacuccug

SEQ ID NO: 14427 - RNA, 60 nt, Human
aagugcgaaaaaagcagugugggccgggcgcgguggcucacgccuguaaucccagcacuu

SEQ ID NO: 14428 - RNA, 63 nt, Human
ucugcuuugaauacgggcaguuuauugcaugucaauuaaacccguauaaacuguuaagggaga

SEQ ID NO: 14429 - RNA, 69 nt, Human
aucggagagcagguaguacuggcaggacauggggaugcccuccuccgcgugaacagucugcuccacgau

SEQ ID NO: 14430 - RNA, 61 nt, Human
ggcaucuuggugaugaugcagcacccuggggagcccaccuguauucucuuggccaggugcc

SEQ ID NO: 14431 - RNA, 93 nt, Human; identical to SEQ ID NO: 2387

SEQ ID NO: 14432 - RNA, 64 nt, Human
gaugaacgcuaccgacauuuaggauucucuguugaugaccuuggaugcuguaaagugauucguc

SEQ ID NO: 14433 - RNA, 62 nt, Human; identical to SEQ ID NO: 2389

SEQ ID NO: 14434 - RNA, 83 nt, Human
uucauuauuggugugaacucaugaguucucauauuuuccauaguuuaucauucauuacuauucucacuguuuucauacuugaa

SEQ ID NO: 14435 - RNA, 67 nt, Human
cggucuguuaucuccuuuugcgcgacacggucucagcuguuccgccugaggcgagugacgcuggccg

SEQ ID NO: 14436 - RNA, 117 nt, Human
gacuuuauagagaaagaccaguuuuaccuagauacuaaaggaagaauuaaaccgcuguuaguuugaaaugcuuuuuuuuuuuuuuuuuuaaauggagauagggucuuaacucuuguc

SEQ ID NO: 14437 - RNA, 72 nt, Human
gccucccaaacuggugagauuacaggcaugagccaccacaacuggccugaaauucuuaaaggaugggagugu

SEQ ID NO: 14438 - RNA, 66 nt, Human
ggcuggaggagugcagucguacagucauggcucacugaagucuugaccccgcugccucagccuccc

SEQ ID NO: 14439 - RNA, 83 nt, Human
cuugcuuuucaguuccaaauuugcaagaaaaugaggaaucugagauuacacaugguuuucuuguuaauuuugaacguggcggg

SEQ ID NO: 14440 - RNA, 98 nt, Human
gggguugggagcgggaugcguggcagggccaugugguggugguaacaggggccauuuguuaaauugguuugaaaugcaaagucucugcuaaaaaccuc

SEQ ID NO: 14441 - RNA, 76 nt, Human; identical to SEQ ID NO: 758

SEQ ID NO: 14442 - RNA, 61 nt, Human
guuucucccagcaggacccucuuuuuguuuugaaagauggucggcugcuuuugggaggcac

SEQ ID NO: 14443 - RNA, 71 nt, Human; identical to SEQ ID NO: 1764

SEQ ID NO: 14444 - RNA, 75 nt, Human
gcuuucagugcaguuucaaacauuuucacaacaggcaauaguccaugagaauuuggaaugacaguauagaauggc

SEQ ID NO: 14445 - RNA, 60 nt, Human
ugcuucaguuuccuuuguguuucucuacccaaccccaagaugaaagaagggagaagagua

SEQ ID NO: 14446 - RNA, 61 nt, Human
gugaaugaguaacuuauuuuguaucaggaauguuuugguacuguguuuucacucaaaccac

SEQ ID NO: 14447 - RNA, 98 nt, Human
uguaucaggaauguuuugguacuguguuuucacucaaaccacugacuuaacagauacugcuguguauaacauguacuaaauauuacaguuauugugca

SEQ ID NO: 14448 - RNA, 73 nt, Human
uuuaguuguacauuuagccaguguuauuugaaguauguaacuuuuaaaauauuaagugucuuguaugauuaga

SEQ ID NO: 14449 - RNA, 70 nt, Human
aacuggugauugucggugauggagccuguggaaagacaugcuugcucauagucuucagcaaggaccaguu

SEQ ID NO: 14450 - RNA, 62 nt, Human
cgucuccgaguuugcgacucgcggaccggcgucccggcgcgaagaggcuggacucggauucg

SEQ ID NO: 14451 - RNA, 71 nt, Human
gacaugacauuaggaacuuagcauuuuagaucuguguucaaacaagucuuaaaauugucuagucucauguc

SEQ ID NO: 14452 - RNA, 65 nt, Human; identical to SEQ ID NO: 3707

SEQ ID NO: 14453 - RNA, 61 nt, Human
agaagagaaguugcuaggccugauugacguuuaagcccagaacuggcguagcuucacuucu

SEQ ID NO: 14454 - RNA, 70 nt, Human
cuucaaacugguuucuucacucugaagcagguuccccuuccccuucaggauaucuggaccaaguuugaag

SEQ ID NO: 14455 - RNA, 79 nt, Human
ucuucccauccuuaacuguucaaguaugucuguuguaaccaauaaguuuauugcugugaaauuacuucugaugguaaga

SEQ ID NO: 14456 - RNA, 63 nt, Human
gauauacguguguguguguguguguguguauauauauauauauauauaauguguguguauauc

SEQ ID NO: 14457 - RNA, 85 nt, Human
ggccacuuuuaugcuaaauaaagacacugagauaauaaauuuccuuguacaguuuauugucuaauacuagcaaaucaaauuggcc

SEQ ID NO: 14458 - RNA, 67 nt, Human
ggcuagaaagaugcuaaggggaugcuacagcuguuuguccccugacagagauuccaucuaucuaacc

SEQ ID NO: 14459 - RNA, 94 nt, Human
gggcgucugcuggagugugcccaaugcuauaugucaguugagguucuaagacuuggaagccacagaaaugcagaaugccacuccggaagggucc

SEQ ID NO: 14460 - RNA, 103 nt, Human
uccugccuggaaguuuaggucaaagaggcugcuuggagcaaaauacaguggugucucaucccaaauauucuccaggcguuucuuccauccuuccaggauuuga

SEQ ID NO: 14461 - RNA, 66 nt, Human
aaaauuggcaaaaguaacuuaaguaguuaacguucaauagauacuuucaaaauuucuguuaauuuu

SEQ ID NO: 14462 - RNA, 75 nt, Human
uguuucucugucauugcugucauguucucuagcgauauuuuccuuaagucggcaguaguagucuagaucaaaaca

SEQ ID NO: 14463 - RNA, 112 nt, Human; identical to SEQ ID NO: 2686

SEQ ID NO: 14464 - RNA, 77 nt, Human
cugggguguuuauggcaagucacuuugacagacauuauguggcaaauguugucugacuuacuguuucaacaaaccag

SEQ ID NO: 14465 - RNA, 90 nt, Human
gaggacuuuaaauaucucuuuaugaaguucccugccuaaccucuuucuauuuaaaggcaaacaaauuucgaagagguuuuguguucccuc

SEQ ID NO: 14466 - RNA, 84 nt, Human
ggagaugaaacggaagaugcgcgaggaugugaucucuuccauacggaacuuucucaucuacguggcccuccugcgagucacucc

SEQ ID NO: 14467 - RNA, 62 nt, Human; identical to SEQ ID NO: 5613

SEQ ID NO: 14468 - RNA, 105 nt, Human
ggaaggugcaacguaagagcagacacaaccugagaugcccuugagauuuaggagaacaggagggcgcccuuucuguugugaccugacucuuaaaagaaaucuucu

SEQ ID NO: 14469 - RNA, 94 nt, Human
acuccacggcgaugucgcugggauagaagccuuugaccaagcaugucaagugaccugguucuuggcuucuucucccgggauuggggccgggggu

SEQ ID NO: 14470 - RNA, 80 nt, Human
agcgcacugcuccacugcgccucucugcagcuggacucuugacguagagaaaccuggggaucugugagggagcuggugcu

SEQ ID NO: 14471 - RNA, 91 nt, Human
gcggccgcugcuaccgacuagcaccgcggccagucugcuccggaaaaaggcggacugcgcccggcgcuggcgacugaggcggcgagcgcgc

SEQ ID NO: 14472 - RNA, 67 nt, Human
gcccagaggacucccaacccuggcuuggugucaagaaacagccagcaagaguuaggggccuuagggc

SEQ ID NO: 14473 - RNA, 74 nt, Human
ggaggaaugcuggacuggaggccccuggagccagauggcaagagggugacagcuuccuuuccuguguguacucu

SEQ ID NO: 14474 - RNA, 61 nt, Human
ggcugugauugcagccugcucuagugggacagcccagagccuggcugcccaucauguggcc

SEQ ID NO: 14475 - RNA, 73 nt, Human
gcauuugucuuucugaccucaugcaauuccuaggaaacucuguguucugugauuuagucaggcaauaaaaugc

SEQ ID NO: 14476 - RNA, 97 nt, Human
gguuucuuaauuagauauagcugaaaagaacgcuagaccaaauagguucucugccuugccuuuucguuuguuuuguuuuagcuauuaucagggaacc

SEQ ID NO: 14477 - RNA, 79 nt, Human; identical to SEQ ID NO: 7764

SEQ ID NO: 14478 - RNA, 93 nt, Human
guggcuucaauucuaagaguggacagcggggaucuuccaagucuggaaaguugacaaggagaugaccuucaggccauucagaaaggagcugac

SEQ ID NO: 14479 - RNA, 77 nt, Human
ucuuuucgaaguauggcaaaauugugggcugcucuguucauaagggcuuugccuucguucaguauguuaaugagaga

SEQ ID NO: 14480 - RNA, 60 nt, Human
gauuucucucuacccccccucagcaucuucccgcugagagugugggggaagagccuuguc

SEQ ID NO: 14481 - RNA, 105 nt, Human
ccccaucgccuccaguugcuauggcaacaggccauucugggccagccacgucucugcauggcagugcccaaugguggaguugcuaggggcgacggagcuguuugg

SEQ ID NO: 14482 - RNA, 67 nt, Human
cucaccuggaacauugggaauuguuuauuuuuugaugaggucaucagaaauaaucucaccaggucag

SEQ ID NO: 14483 - RNA, 88 nt, Human
gacacuguuuuuauuuaguuugauauguuucuuuacagaaugcagaaaacacaucuuaaaaucauauagaaggaaauaaaaacacauc

SEQ ID NO: 14484 - RNA, 65 nt, Human
agcaagaguagggugcauggcuugaauaagaggaaacagccguucacccaacauuugcuuuugcu

SEQ ID NO: 14485 - RNA, 92 nt, Human
gcuguugcauuguaacuuguggugugcauuaagaugugcugaggauugcgaacuccugcagcauauuuauacugugggacggugcggacagc

SEQ ID NO: 14486 - RNA, 78 nt, Human
aagagaagugagacaaaccaucuaauaucuguaucaugcuauuaauaggcugugauguugaguuucucacuuacucuu

SEQ ID NO: 14487 - RNA, 78 nt, Human; identical to SEQ ID NO: 99

SEQ ID NO: 14488 - RNA, 90 nt, Human
cuuuaggaggcugaggugggaggacugcuuaaggcaaggagucugagaccagccugggcaauacagcaagaucccaucucuauuucaaag

SEQ ID NO: 14489 - RNA, 65 nt, Human
guuaagauaaacaugagaaacuugaucuaauauuuaauauauauucaguucuacacuuuauuaac

SEQ ID NO: 14490 - RNA, 76 nt, Human
guuucacuuugggaggccaaggcggguggaucacaaggucaggagaucgagaccauccuggccaacauaguaaaac

SEQ ID NO: 14491 - RNA, 82 nt, Human
agcaucuguguuuucauucguuuguaccuacugugggcuagccucuagaggauacaaugaaaggcuacacgucauucuugcu

SEQ ID NO: 14492 - RNA, 62 nt, Human
aggcguuucuacaaugacguguuacaaggagugguacuuugugagcuucgguguauuugccu

SEQ ID NO: 14493 - RNA, 78 nt, Human
guggguauuaacauuggcuggaguagcaaggaucuucaacacuagaagauauuugcugcagccuuuagguauacguac

SEQ ID NO: 14494 - RNA, 91 nt, Human
gaauucagaauauuguauugaugaugguuauucuuuuauauaauuacaauaauuauccaggaaaauagcaaacagaugcagugcugaauuc

SEQ ID NO: 14495 - RNA, 130 nt, Human
gcucccaccccuuucccccugccccacccccaggccuaacuucuuggcuuaagauacaaaagggcacucucuacuggcccuggugucaaacgucagcagccucaggccuggaugcauuuggauacaaagc

SEQ ID NO: 14496 - RNA, 68 nt, Human
ucacucauuaacucaugcauaccaaacauagcuaaaguaaaguauuaaugguaugaguuaauaaguga

SEQ ID NO: 14497 - RNA, 93 nt, Human
ccugcagccaguugcaugaagggcaucccaucuugcugcucuguccacuggcauggcggccccacugcccuuuuuugccacuggcuucugagg

SEQ ID NO: 14498 - RNA, 70 nt, Human
gugcuccuagugccaacaaugugcgacauuauucaaccacugugacgccaaugaugacugcuaggaggac

SEQ ID NO: 14499 - RNA, 78 nt, Human; identical to SEQ ID NO: 11810

SEQ ID NO: 14500 - RNA, 76 nt, Human; identical to SEQ ID NO: 11811

SEQ ID NO: 14501 - RNA, 84 nt, Human
uuuguuucacugcguucaauuuugaguuuccuaacauccauucuacaggucaaucaaaauacaaaggcgugcaaaugaaacaag

SEQ ID NO: 14502 - RNA, 71 nt, Human
caugguggugaguuuauuacauuagcaugagggcaggguguaagcaggcagaguggaugaacguuuacaug

SEQ ID NO: 14503 - RNA, 62 nt, Human
ugcgcgcaccaucccaacacagcagcaagaaaagggcaaugcaugaagggguuggugccgca

SEQ ID NO: 14504 - RNA, 85 nt, Human
acccuagaaaagaucaccaacagccguccucccugcgucauccugugacugcacaggacucuggguuccugcucuguucuggggu

SEQ ID NO: 14505 - RNA, 96 nt, Human
gcccccucccgaggaggucgagccgggcagugggguccgcaucgugguggaguacugugaacccugcggcuucgaggcgaccuaccuggagcuggc

SEQ ID NO: 14506 - RNA, 75 nt, Human
ucuccaagcuggagaaugggggcuucccuaugagaaagaucucauugaggccauccgaagagccaguaauggaga

SEQ ID NO: 14507 - RNA, 91 nt, Human; identical to SEQ ID NO: 5353

SEQ ID NO: 14508 - RNA, 67 nt, Human; identical to SEQ ID NO: 5354

SEQ ID NO: 14509 - RNA, 72 nt, Human
cucgggugguggcgcaugccuguaaucccagcuacucaggaggcugaggcaggagaaucgcuuaaacccggg

SEQ ID NO: 14510 - RNA, 94 nt, Human
ggcaggagaaucgcuuaaacccgggagguggagguuguggagcugagauugugccauugcacugcagccugggcaauaacagcaaaacuccguc

SEQ ID NO: 14511 - RNA, 62 nt, Human
aguagcccucuuucuccugggaucuugcugaaauuaguggguggggggguggggggacgacu

SEQ ID NO: 14512 - RNA, 72 nt, Human
gccuugagcuaagguauccgcuucaaggccuccuauccauggcccuuggaagcggauaccuuagcucaaggu

SEQ ID NO: 14513 - RNA, 102 nt, Human
guguguaguaguaucucauuuugguuuuaauuuauauauuucccugaugauuaaaaggggauguccuguaaauguuuucuuuugugaaauaccauagcacac

SEQ ID NO: 14514 - RNA, 78 nt, Human
uuauggcagauugauaccugccuggucgcaugaugcaaugaguauuuuuagacgagggaauuauuucaagggccauga

SEQ ID NO: 14515 - RNA, 69 nt, Human
acuggugacacaugcuggagccaagugcuaacauugccuugguuccacgggcaugugacagucacccgu

SEQ ID NO: 14516 - RNA, 62 nt, Human; identical to SEQ ID NO: 6733

SEQ ID NO: 14517 - RNA, 68 nt, Human
gagcaagcggggcccgcgcagcuucaggggccgcaagggccggggcgccaagggcaucggcuuuccuc

SEQ ID NO: 14518 - RNA, 67 nt, Human
uucggcuggcuagcaggacacugagacuccccucugcuuugggcaguguccgcugcagccagucgga

SEQ ID NO: 14519 - RNA, 67 nt, Human
accagccuggcuaacauggugaaaccccgguuucuacuaaaaauacaaaaaacuagccaggcguggu

SEQ ID NO: 14520 - RNA, 81 nt, Human
ccuguugacagauggagauugggcagcagggccuugcugcauuguuaucugcuguuccgacuugguuugucuuguccaagg

SEQ ID NO: 14521 - RNA, 77 nt, Human
ggcuagaaaagccaaggccaaaggcuggaggggggaggacagucagcauguccagccuggggucuggguguaggguu

SEQ ID NO: 14522 - RNA, 85 nt, Human
aaucuaaggcaaacagacuugaccaucuucagacccacugcauucucaagcugaaguggucugcucauaguuugugugccagguu

SEQ ID NO: 14523 - RNA, 117 nt, Human
gcucagucggugaugaugagcucguccaccccccagucuucauagcucccaucuggcagguaacggcgaaugaugauggggaucuuucgggccuugaguuccuucauggcaaugagc

SEQ ID NO: 14524 - RNA, 88 nt, Human
ggagcgcucgggugcccagcagcgggcucgcucguacuuggucauguaugguguggugauucgcuucugguuggccugcggucgcucc

SEQ ID NO: 14525 - RNA, 106 nt, Human
aguuugccauguuucuucugugccuaccauucucccuuggccucaacuucuguaagaugggggggggacaaaaagagaaguaaaguuaagaagaaaguggaaaauu

SEQ ID NO: 14526 - RNA, 71 nt, Human
gaugucaaaguuuuuacaugcauauauuucagcuuaugcugaagaccuaccuguauguugcacauugaauc

SEQ ID NO: 14527 - RNA, 82 nt, Human
uuuuuuuuuuuuuuaaacauagagcugcgagagaguagggcaucccuuguggugguaccucuauguuuaaagaaagaagaaa

SEQ ID NO: 14528 - RNA, 64 nt, Human
ggggguuuugugaagaccuuuccugucccacaugacuagacgaugaggcauucacauuauuucc

SEQ ID NO: 14529 - RNA, 74 nt, Human
gucaaagaaaauagggcuuuuggcauucucauuaguuagaaauauauuuaggaugucuucccuuuucuuuagac

SEQ ID NO: 14530 - RNA, 80 nt, Human
ggaaagaaggaaaaaaggaaggaaagaaguaauauugugacuuucuugcucuuuaaaaaaaucccugucuccuucuuuuc

SEQ ID NO: 14531 - RNA, 60 nt, Human
ugggaauucacauuuuaauguuucaguagccugaacaacucaaauugauguguaccccca

SEQ ID NO: 14532 - RNA, 64 nt, Human
cuuauucccuaauagaguuaagaagcuuauacagcauccuggccaaacaaguuaugggaguagg

SEQ ID NO: 14533 - RNA, 61 nt, Human
gccucuggguccugggcagauacagccuuugcugugggagggaugugggggaccuugaggc

SEQ ID NO: 14534 - RNA, 89 nt, Human
acucauuuuuaaggucgggaguuagauuuuaugauagaauuaugacuguuagcuuuucuccuuauagcaucuuagucuuagaaaucggu

SEQ ID NO: 14535 - RNA, 71 nt, Human
auugaugaauucuguaucuucucugguuuccuguaucuuuuuaaucaagucuagaaacuauguucaucagu

SEQ ID NO: 14536 - RNA, 99 nt, Human
uaauuauuuuaaauguguuaauacugugccuuugauaaguuagcuuuaaaguuaguuuaagacuuuuacacugccaguauuccacauuuggugaaauua

SEQ ID NO: 14537 - RNA, 67 nt, Human
ccuaagucugaagucucaucagacgaacgacauccaguucagccuggugacaagaaucggacugagg

SEQ ID NO: 14538 - RNA, 64 nt, Human
gggcaaagucucuggggagcgguuaggagguggaaagccagaagugcugacacagauggugucc

SEQ ID NO: 14539 - RNA, 74 nt, Human
gguuugcgcugcuaugagaaucuaaggcugccacugaucugacaggaggcagaacucagguggcaaugcuuacu

SEQ ID NO: 14540 - RNA, 73 nt, Human
uucuggagugaguuauuagcauggaagaaggaggaagaucuugggaucaaacgugggugaugguacuucagga

SEQ ID NO: 14541 - RNA, 82 nt, Human
guucaauccagcuuguugcuaauauuaguuacccuuguuuuaaugacagagaguggcuggaaucuguagcuaggggaggggc

SEQ ID NO: 14542 - RNA, 129 nt, Human
ggacaggcaauuuagucauuaugauaauaaggaaaacaguguuuuagaugagagaucauuaaugcauuuuucccucaucaagcauauaucugcuuuuuuuuauuuugcaauucucuguauucuaugucu

SEQ ID NO: 14543 - RNA, 61 nt, Human
agcugcccuccucuucuccccucacacuacagcccuggugggggagaagggggugggugcu

SEQ ID NO: 14544 - RNA, 62 nt, Human
ccuucgccugccugugucucuccccaaaccccuuuagauggggagggaagaggaggagaggg

SEQ ID NO: 14545 - RNA, 69 nt, Human
ggucugguccccguguugccuauuagcccuuuacccugagcaccaccccaacagacuuggggaccagcc

SEQ ID NO: 14546 - RNA, 70 nt, Human
uuuggcuuaacauucaagcaccuggaauaaagaucucccgggguuucguuguugcacaaaaucagccaaa

SEQ ID NO: 14547 - RNA, 80 nt, Human
gaaguugaucuacuuccagcugcaccgggcccucaagaugauuguggaucccguggagccacauggcgagaugaaauuuc

SEQ ID NO: 14548 - RNA, 80 nt, Human
cauagcacaggagauucagagggcugggaugacuucugagcugcucucuauacccaaggcccuuucaauuucuagcugug

SEQ ID NO: 14549 - RNA, 70 nt, Human
ggagguaauaaagucaaagaauccuucgguugaauuuuagguuuaauuuucuucggugcuccuucccucu

SEQ ID NO: 14550 - RNA, 66 nt, Human
uccagacuuaaggaaggaagucccaccaguguuuguugcauuugaauuuccuuuaaaaaugcuggg

SEQ ID NO: 14551 - RNA, 61 nt, Human
caugcucuugcgaagcuugauggggcgcgagcccacauacuucccauucaucucacgcaug

SEQ ID NO: 14552 - RNA, 64 nt, Human
cgcgcacguagucgcugggguccuugaagcugacgaagccguagcccuuggucuugccugugcg

SEQ ID NO: 14553 - RNA, 83 nt, Human
ugcucugcaaccuuagacaccucugccagaccuuugucuucgagaaagagacaugcuguacagguaagguccccaggagagca

SEQ ID NO: 14554 - RNA, 91 nt, Human
gcuuuugggaagugaugagucauuuugcaccagguaauaggggaaaauugugugaccuccagcaaacacaugaaugguuauuuccuggagc

SEQ ID NO: 14555 - RNA, 63 nt, Human
ggcaugugccaccacacccaauugacuuuaguauuuuuaguaaagacaggguuucaccaugcu

SEQ ID NO: 14556 - RNA, 82 nt, Human
ggugcaggccucacuugagccugggaggcggagguuggcuaacugcaaccucugccucccaggcucaagcgauucuugugcc

SEQ ID NO: 14557 - RNA, 71 nt, Human
ucgaacuccugaccucgugaucugcccgccuuggccucccaaagugcugggauuacaggcaugagccucgg

SEQ ID NO: 14558 - RNA, 106 nt, Human
uguauuuuuaguagagaugggguuucacuauguuggccaggcuggucaugaacuccugaccucaagugaucugccugccuuggccucccaaauugcuaggauuaca

SEQ ID NO: 14559 - RNA, 96 nt, Human
augugaguacucgaguugauaauucccucuaucuuuuuaaacccauaaacuacauuuuuaaaaaaaucaaugggaguuuuaaauuuugacucaugu

SEQ ID NO: 14560 - RNA, 79 nt, Human
caggaagucugauuuuuuuuuuuuggagucuuuguugcuauauuuuguggggcugggagagagagauuagauuauuuug

SEQ ID NO: 14561 - RNA, 109 nt, Human
agcgguugacccuccuggcuccccugaauucuguauucaaagauggaaccccuccaauugaugcccauacaaggaauuugcuucggaaccacauaauuaaagaccagcu

SEQ ID NO: 14562 - RNA, 68 nt, Human
uucagacaagccggccucggcaaucaucucucuggaagugagcgguugacccuccuggcuccccugaa

SEQ ID NO: 14563 - RNA, 85 nt, Human
ggcacagugagacagauguggaagagcagacccaggagcugaagaccaucacucagcuccagggugagccugcaccgccgugacc

SEQ ID NO: 14564 - RNA, 87 nt, Human
ucugaguggcggcucugagcaagcugagcccagggaggcuuugagguacacagggucccuuggggggccuaagagcagccaugagga

SEQ ID NO: 14565 - RNA, 84 nt, Human
cugaugaucauuuuagauagguaaggugaucuccauguaagggagggccaacaucuaccuuagaagcuaaaugugucacaucag

SEQ ID NO: 14566 - RNA, 77 nt, Human
uguugaauuuagggcaaaaugacauguuuauauuuuaaauaaaugaaaucuagucauuaaagagucuuaauaaagca

SEQ ID NO: 14567 - RNA, 65 nt, Human
auguaagucauugugucuaugaugccacuuuuaaaaggaaaaugcaauugcguaauggcuuauau

SEQ ID NO: 14568 - RNA, 61 nt, Human
auuguuugaauguuuuauucagcuuaaaacuuuacccaugaagucauaaacaguaaacaau

SEQ ID NO: 14569 - RNA, 78 nt, Human; identical to SEQ ID NO: 13039

SEQ ID NO: 14570 - RNA, 63 nt, Human; identical to SEQ ID NO: 13040

SEQ ID NO: 14571 - RNA, 74 nt, Human
ggaggcucagcccacccuccagcuuuuccucaggguguccugagguccaagauucuggagcaaucugacccuuc

SEQ ID NO: 14572 - RNA, 72 nt, Human
gaacugaagcuggggcugcagcuguggccuugguuugauccuuggccuuggcucuggccuuggcucuggcuc

SEQ ID NO: 14573 - RNA, 63 nt, Human; identical to SEQ ID NO: 11285

SEQ ID NO: 14574 - RNA, 65 nt, Human
cauugcacaauaucaugcuaccucuugaaucuuuaaaauauucaauuggcaaauguuuuucaaug

SEQ ID NO: 14575 - RNA, 61 nt, Human
cagcccucacuucuccauccuggaggucuuccagcaggaggucuuucacggggauuggcug

SEQ ID NO: 14576 - RNA, 91 nt, Human
gugggucugacuugggggccauuuuagaaacugacucugaagaaguuuuuaauucucucauuguugcugaaugccccucgcagggagccac

SEQ ID NO: 14577 - RNA, 130 nt, Human
uggacaggcagaggcugaggcugcugcuauccagggaagacacacccucacgcugcgugcccucuaggugcacucggcaagccaggguuccagcuucaccaggaccaggcucuucuccuugggccuccca

SEQ ID NO: 14578 - RNA, 75 nt, Human
cuggaggaggagaagaagcaucuggaguuuaugaaucagcugaaaaaauaugaugacgacauuuccccauccgag

SEQ ID NO: 14579 - RNA, 60 nt, Human
gccucuggaugaccuuuuuccccaaugaugaagacgacccagggcaaggaauccagcagc

SEQ ID NO: 14580 - RNA, 74 nt, Human
ucaguggcuacgggaugaacuggccaacacgcagcagaaacugcagaagagugagcagucuguggcucaacugg

SEQ ID NO: 14581 - RNA, 93 nt, Human
guacuggaaugcuaagauaaaagaacuguauaguuucuguuauguaauacgagaauagaaauguuauuaaaaucuuucuauaauuuccagugc

SEQ ID NO: 14582 - RNA, 70 nt, Human
uaguaugaaacuuaguguuuuaguagaucuugugauuucugaaaacgaauuucuucuaaacaucaagcua

SEQ ID NO: 14583 - RNA, 61 nt, Human
ggggaguuugugcugggccuggcgucccaggcuguggacuggaacuggacaugagaacccc

SEQ ID NO: 14584 - RNA, 73 nt, Human
ggugguggacugcacuccggggccauuuaaugucuuuaggccuugagucucggcuucggucccagucaacgcc

SEQ ID NO: 14585 - RNA, 67 nt, Human
uccccagacuuccaagcaaggugggcuggcuaacgucccuccuaccugucgcagguuaucuggguga

SEQ ID NO: 14586 - RNA, 72 nt, Human; identical to SEQ ID NO: 14437

SEQ ID NO: 14587 - RNA, 80 nt, Human
agaguucaauauaucgauguugcauguuauuuuuaucuuuagacauggcagcuacugcaucuucaugugucacaaacucu

SEQ ID NO: 14588 - RNA, 67 nt, Human
auuccaucucuuccguagccucccauuccagaaccucccaugccagagccgccuccaggaguagaau

SEQ ID NO: 14589 - RNA, 62 nt, Human
gguaaugucucuggccgccaccuccaggacccccugggccuccuccaggccgguacagcacc

SEQ ID NO: 14590 - RNA, 65 nt, Human
gcaguugcagaaaggaaugucagucagaaaugaauuguguuucagucacucugcaugguugcugc

SEQ ID NO: 14591 - RNA, 64 nt, Human
gggccacuaauagaugaauuucuugcacucccaagaacaagccucucucgucuuccaaaugcuu

SEQ ID NO: 14592 - RNA, 63 nt, Human; identical to SEQ ID NO: 7225

SEQ ID NO: 14593 - RNA, 93 nt, Human
gaugaagucuugcucugucgcccaggcuggagugcaauggcgcgaucucggcucacugcaagcuccggcuugguaacagagcgagacuccauc

SEQ ID NO: 14594 - RNA, 68 nt, Human
gcugggaaaacguaucugguuuggguccuaagagucccagugagaccagguugcuguaguucuccagc

SEQ ID NO: 14595 - RNA, 65 nt, Human
agugauggucaguauuucuuugaaauucuacaaggaacuucaggcacaugugcugaugaguuauu

SEQ ID NO: 14596 - RNA, 69 nt, Human
uguuuugccucugucuuugaaaaauacuuccaauuccaagaagagggcaaggaaggagagaacagagca

SEQ ID NO: 14597 - RNA, 74 nt, Human
acuuccgcugcaggcugacuuauucccaucagcaccaaagccgcuggagggggucauccacuagcaaaugaagu

SEQ ID NO: 14598 - RNA, 83 nt, Human
gcuuucuuuaggaucucucuugcacuguccaacucagagaauuucaaaucuugauggauuccaaugauggagcuaaaucaggc

SEQ ID NO: 14599 - RNA, 75 nt, Human
cugggguguuuauggcaagucacuugauacauuauuguggcaaauguugucugacuuacuguuucaacaaaccag

SEQ ID NO: 14600 - RNA, 65 nt, Human; identical to SEQ ID NO: 247

SEQ ID NO: 14601 - RNA, 80 nt, Human; identical to SEQ ID NO: 100

SEQ ID NO: 14602 - RNA, 79 nt, Human
auggaaaacuuuugaggaggggcuagcuaaauaagggguccagguaaugguggcccuugcaaccuuaagaccuagaaau

SEQ ID NO: 14603 - RNA, 64 nt, Human
gcagcgaggaaugucagguagugaucagccugugaaggcaaacagauguggcaccacuuggggu

SEQ ID NO: 14604 - RNA, 74 nt, Human
agggguguaggugugccuugugguaagaagugggcuagggcauuuuuaaucuuagagcgaaaccuauaaucacu

SEQ ID NO: 14605 - RNA, 71 nt, Human
gcccgcucauaaggggauggccauggcgagguuuauagauaguugggguggugaguguaaaugagugaggc

SEQ ID NO: 14606 - RNA, 77 nt, Human; identical to SEQ ID NO: 9246

SEQ ID NO: 14607 - RNA, 100 nt, Human
ggacuacacucccggaggacaagcggucucugcaaauuggcuguggcgcugccuucguuggcagugucuccgacagaugcuggcuuuggcuagugugucc

SEQ ID NO: 14608 - RNA, 89 nt, Human
guaucagaaagacuuguguuaaaucaguccgcccuuuaacuugcgcaaaggcauggcgcggggugacuuggccagucugaccugagugc

SEQ ID NO: 14609 - RNA, 63 nt, Human; identical to SEQ ID NO: 7379

SEQ ID NO: 14610 - RNA, 67 nt, Human; identical to SEQ ID NO: 7380

SEQ ID NO: 14611 - RNA, 73 nt, Human; identical to SEQ ID NO: 7381

SEQ ID NO: 14612 - RNA, 69 nt, Human
aacugggcuuucccaguauuucaaaaagagauaauauaucuguuaacguuauuggaaugcugcucaguu

SEQ ID NO: 14613 - RNA, 67 nt, Human
gaaauguuauuuuauuagaucuaacucuucauaguauguaaauguuagaacauuuuaauaauauuuu

SEQ ID NO: 14614 - RNA, 79 nt, Human
gugugaguugggauguauggauaugugauagucauauuuucaagguauggauguuuggugauaacgucucagagcaugc

SEQ ID NO: 14615 - RNA, 69 nt, Human
uucuucuuaccacagguccacucacaaaucgcagcugguauggacugguacugccccaaauaagaggaa

SEQ ID NO: 14616 - RNA, 80 nt, Human; identical to SEQ ID NO: 9351

SEQ ID NO: 14617 - RNA, 65 nt, Human
augagauuugggaggggccaggggcagaaugauaugguuugacuguguccucacccaaaucucau

SEQ ID NO: 14618 - RNA, 75 nt, Human
ucugaauuaauguugaaaugaguuaagacuuucggagacuguugggaaggcaugauugguuuugaaaugugagga

SEQ ID NO: 14619 - RNA, 86 nt, Human
uacguagugaggaucacaugcaugaagaauccauugcucgcugaaagaagaucuuggaaugagugcguggauccacaauucaugua

SEQ ID NO: 14620 - RNA, 99 nt, Human
ucucuuuucauauuauaagauuuuagcaauacuuccaauauugauuuccuuaccaaauggaaucuauaagcuaaauuuuuaaaaauuguuaaaggauga

SEQ ID NO: 14621 - RNA, 85 nt, Human
aagauuguuucagggugucucagggucccucuguaccaucugcuguggaaugcaggacccucugugacauucuuuaucccuucuu

SEQ ID NO: 14622 - RNA, 62 nt, Human
cagaggaugugagaggcagaggcaggcuccuggggcugagcuccuuccucugcaucauucug

SEQ ID NO: 14623 - RNA, 127 nt, Human
ucucagggucccucuguaccaucugcuguggaaugcaggacccucugugacauucuuuaucccuucuuccccggguuggugugcauggagggucuugucugcugugauucgacucuggaugcuguga

SEQ ID NO: 14624 - RNA, 61 nt, Human; identical to SEQ ID NO: 14051

SEQ ID NO: 14625 - RNA, 72 nt, Human
ugaugucaguuccuuugcgcccugacugcaucaucaugcggcggcgaacggugucaaauggauaggaaguca

SEQ ID NO: 14626 - RNA, 62 nt, Human
ugccucugagaacauuggaccaugcacccuugaaaaaagcuuugccuccuucaucacgagca

SEQ ID NO: 14627 - RNA, 75 nt, Human; identical to SEQ ID NO: 12674

SEQ ID NO: 14628 - RNA, 96 nt, Human
gcgagaccccaacggcugguggcgucgccugcgcgucucggcugagcuggccauggcgcagcugugcgggcugaggcggagccaggcguuucucgc

SEQ ID NO: 14629 - RNA, 68 nt, Human
ggccuccaugccuauguggugguacaaugucacugacggauccugccagcuguuuguguaugggggcu

SEQ ID NO: 14630 - RNA, 64 nt, Human
ccuuguuuuaguugaauaugaagaaagucaguaguccuacagauacguaguuagaaaaaggagg

SEQ ID NO: 14631 - RNA, 67 nt, Human
gcauaaauguuuuuuaugaagauaacuuuucuaaagcaaaaaugugagaagugccaucauuuuaugc

SEQ ID NO: 14632 - RNA, 62 nt, Human; identical to SEQ ID NO: 14622

SEQ ID NO: 14633 - RNA, 89 nt, Human
ggaagauuguuucagggugucucagggucccucuguaccaucugcuguggaaugcaggacccucugugacauucuuuaucccuucuucc

SEQ ID NO: 14634 - RNA, 70 nt, Human
cccaaguagcugggauuacaagcaugugccaucacaccuggcuaauuuuuguauuuuuaguagagauggg

SEQ ID NO: 14635 - RNA, 74 nt, Human
ccucgugaguagcugggauuacaggagcaugccaccaugacugucuaauuuuuguauuuuuaguugagacgggg

SEQ ID NO: 14636 - RNA, 67 nt, Human
cacuaguuucucgguacuaugcauaugauccaauaucaaaggaaaugauagcauugaaggacucgug

SEQ ID NO: 14637 - RNA, 61 nt, Human
ggacaucuaacagcauacugaucacuacuucgcacuaguucucgguacuagcauauggucc

SEQ ID NO: 14638 - RNA, 72 nt, Human; identical to SEQ ID NO: 9079

SEQ ID NO: 14639 - RNA, 127 nt, Human
ucggggauaucuaacagcaauaccugaucacuacuucgcacuaguuucucgguacuaugcauaugguccaauaucaaagggaaugauagcauugaaggacucggggauaucuaacagcaauaccuga

SEQ ID NO: 14640 - RNA, 88 nt, Human
acuuucaagcuccuggggaaauguugcugguugaccguuuuugggcaauccauuuucggccaaagauuucacccuugagguugcaggu

SEQ ID NO: 14641 - RNA, 80 nt, Human
gaguggccugguagaagguugagugcacgucuuuguccccucuggcagcagauucuaguagcugauuuuagcagguccuc

SEQ ID NO: 14642 - RNA, 64 nt, Human
gcguuguuaacagacuccugacgcccacacauucguuccuggccagaaguaaaagcacagcugc

SEQ ID NO: 14643 - RNA, 83 nt, Human
ggcucagucaaagcugcuccugcucagguccggcccccauccccgggaacauccgccugucagagggaagucaaaguggagcu

SEQ ID NO: 14644 - RNA, 66 nt, Human; identical to SEQ ID NO: 11638

SEQ ID NO: 14645 - RNA, 60 nt, Human; identical to SEQ ID NO: 11639

SEQ ID NO: 14646 - RNA, 62 nt, Human; identical to SEQ ID NO: 10420

SEQ ID NO: 14647 - RNA, 89 nt, Human
aggcacauuggguaucauucauuacauucuugaguuuuuaggguuuucucuuuucuucuggagacagucuugcuguauugcccaggccu

SEQ ID NO: 14648 - RNA, 61 nt, Human
gaugucagucccaaggaccaguagcugccaucaguuuggauucugaaaacuaacuggcauc

SEQ ID NO: 14649 - RNA, 74 nt, Human; identical to SEQ ID NO: 4266

SEQ ID NO: 14650 - RNA, 74 nt, Human
cuugcagucauacagaggagcuggccacgaaauacgagaggcaauccagcauccagcagaugagaaguugcaag

SEQ ID NO: 14651 - RNA, 62 nt, Human
guuguuccacuaguaggcaaauuaaagaaauuuuacgaauuuucucagagguuagaagcagc

SEQ ID NO: 14652 - RNA, 81 nt, Human; identical to SEQ ID NO: 13161

SEQ ID NO: 14653 - RNA, 92 nt, Human; identical to SEQ ID NO: 13162

SEQ ID NO: 14654 - RNA, 76 nt, Human
gacgcugccagcucgggacucuguuccaccgugguggucugccccuacagugcugcaggcugagcugacauuuguc

SEQ ID NO: 14655 - RNA, 93 nt, Human
ucaggagccaggguaccacagccucaagggcucucaggagguuguaacugaggguuguuuuuugggguccaucaucuuggggucuucuucuga

SEQ ID NO: 14656 - RNA, 102 nt, Human
ggaaacuucaguuuuuauaaucuuccuaaauugauccuuuauguugauaaacagugucgauauuaaggagcucauuaauuuuggaagauccauaucugaucc

SEQ ID NO: 14657 - RNA, 113 nt, Human
cuuuaauugauaaagccagaguggagacacagaaccacugguucaccuacaaugagacaaugacaguggagagugugacccaagcuguguccaaucuggcuuugcaguuggag

SEQ ID NO: 14658 - RNA, 70 nt, Human
auuuuauuuuccccacaacaaagaauuaucccacuucucuaguaauuuccaucgugcaagaauguagaau

SEQ ID NO: 14659 - RNA, 61 nt, Human
uaaagggucaugggagagaaaagguaucugugggaagagaauaaucucuuuugacuucgug

SEQ ID NO: 14660 - RNA, 75 nt, Human
ggggcuaggguuucgcuauguugcucaggcuaguuucaaacuccuggguucaagugauuuuucuaccucugccuc

SEQ ID NO: 14661 - RNA, 87 nt, Human
ugaccuggcggacaggugggagccacagcguacaccccaugauucccucugugcugugcguagugccuacugcuugcuuccagguua

SEQ ID NO: 14662 - RNA, 67 nt, Human; identical to SEQ ID NO: 1379

SEQ ID NO: 14663 - RNA, 63 nt, Human; identical to SEQ ID NO: 1366

SEQ ID NO: 14664 - RNA, 86 nt, Human; identical to SEQ ID NO: 1381

SEQ ID NO: 14665 - RNA, 91 nt, Human
aaggaaacauuuauaaauuauuauaccuaagaaaaggcacaaaaagccuuuuacuuauuuuuauugauuauugaugugauauauuuuccuu

SEQ ID NO: 14666 - RNA, 69 nt, Human
caaagacuuacugauuaagcaaaucccuacuugacaacaucuacguauuguuuguaacuucaauuuuug

SEQ ID NO: 14667 - RNA, 66 nt, Human
uaaauaaauauggcaguaauagucauuccuauuucauuagggauauaucuucuucauauuaauuua

SEQ ID NO: 14668 - RNA, 61 nt, Human
uaguuuauuucauaaaaauacaaaaauauaaauauacauuuauaaaaauaugaaugaauua

SEQ ID NO: 14669 - RNA, 89 nt, Human
aguagugggagcacuguguuuagaguuaagagugaacacuguuugauuuuacuuggaauuuccucuguuauauagcuuuucccaaugcu

SEQ ID NO: 14670 - RNA, 81 nt, Human
gaugauccccaagucuuagcuguugcugcucacgauguuggagaauaugugcggcauuauccacgaggcaaacgggucauc

SEQ ID NO: 14671 - RNA, 74 nt, Human
uagggaggcggaucauuugaggucaggcguuugauaacagccugggcaauauggaugaaaccccgucucuacug

SEQ ID NO: 14672 - RNA, 72 nt, Human
cuacugguagaaagccaaaucuuuucuugaugaaaaugcauuacaugaaauuuuaagucuuucugucuauag

SEQ ID NO: 14673 - RNA, 61 nt, Human
ugcguguccuaacugguuggaaaaacugugaucaccacuucaaguguagggacuccucgca

SEQ ID NO: 14674 - RNA, 71 nt, Human
ccaggcaugguggugcaugccuguagucccaguuacuuggaaggcugaggcugagaaucacuugaaccugg

SEQ ID NO: 14675 - RNA, 63 nt, Human
cgagacuacuuacuuucuccaguguaccuagggaacccucaggucucuagagugagggucuug

SEQ ID NO: 14676 - RNA, 66 nt, Human
agccccaucauuuaauuucuggggggggcgaaguuagaagguaaagcuggagaagaugaagggguu

SEQ ID NO: 14677 - RNA, 63 nt, Human
ucaacuuagagaauuggagauacaacagauuagaugaaauaugucagaguucgauagaaauga

SEQ ID NO: 14678 - RNA, 81 nt, Human
agccuuguggcugaggccugugacacuccggaacacugggaggcaguaccccagagccuagcaggccgacaagcaaggacu

SEQ ID NO: 14679 - RNA, 75 nt, Human
uccagugaccugggaagcgaagaagaggagguggaauuugggccaggacuuacuucuuugacauggggaucugga

SEQ ID NO: 14680 - RNA, 76 nt, Human
aaugaggcuuuugcuaaguggccagacuugggauuugaucuuccucacuuguuauuuauuaaguuuaagccuuauu

SEQ ID NO: 14681 - RNA, 72 nt, Human
uuauguuuggcuuucucugauuuguccaaagcuggaaguggggacaaaaauuagggaggcugucaguuauga

SEQ ID NO: 14682 - RNA, 87 nt, Human
gaacuccugggcucaagcaagccucaugccuuggcucccaaagugcugggauuacaggcgugagacaccgagcccagguuaaaguuu

SEQ ID NO: 14683 - RNA, 77 nt, Human
cugcccuagccaggggcacuggccagccugguuccaggcccacauggccuagucagugccucgaggagcugguucag

SEQ ID NO: 14684 - RNA, 70 nt, Human
aacuuaaauucuuuguaccaguuaaaaaaaauguauaaaauuuacaucugugcaguggaguuguuaaguu

SEQ ID NO: 14685 - RNA, 70 nt, Human
caugauaaucauauucggauuuauagaagcauuuuacaaguauugcaaucauugaguagagauaaucaug

SEQ ID NO: 14686 - RNA, 67 nt, Human
gguacuuuuugaaacgugacugcguugugugaacaaucugcaauuuuucaguccgugagauccugcc

SEQ ID NO: 14687 - RNA, 74 nt, Human
gcuuuucuugaucacuguggcuggggacccgcuagcgcguuaucauccugugucgcaguggcauuuagucuggc

SEQ ID NO: 14688 - RNA, 65 nt, Human
ucucuguccuucuacaggagguguuccgcuuugccuacuacaagcugcuucacgaaggcagauga

SEQ ID NO: 14689 - RNA, 62 nt, Human
cccaaaggauggcuggagggcucggcugcggcgcggguccccgaagacuuggccagguuggg

SEQ ID NO: 14690 - RNA, 86 nt, Human
gucccuucccuccccaggccucgcuuccccagccuucugaaagaaggagguccaaggggaucgagggcuggcggggagaagcagac

SEQ ID NO: 14691 - RNA, 74 nt, Human
aguugugacugaaaacacugaaaccuaccacguccagauucacuggauugggggauagaggaacggucacagcu

SEQ ID NO: 14692 - RNA, 84 nt, Human
aggcagaacggaggguggcgggggacaaacgcgcgggacaauuuucucuccagcugguuaauuuuucuccaauauuuguagccu

SEQ ID NO: 14693 - RNA, 62 nt, Human
aguuauuugcuucaucuugaccuguuuuuuuaaauguaaacuuuuaaggacuugagauaacu

SEQ ID NO: 14694 - RNA, 67 nt, Human
guugcccaggcuggagugcaguggcaugaucucgggucacugcaaccucugccucucggguucaaac

SEQ ID NO: 14695 - RNA, 60 nt, Human; identical to SEQ ID NO: 8964

SEQ ID NO: 14696 - RNA, 86 nt, Human; identical to SEQ ID NO: 8965

SEQ ID NO: 14697 - RNA, 64 nt, Human
auccucaggcuuuucccuaccaguuuggcgcaccuuugaaagcuggcggggccugcuggggggu

SEQ ID NO: 14698 - RNA, 61 nt, Human; identical to SEQ ID NO: 1283

SEQ ID NO: 14699 - RNA, 91 nt, Human; identical to SEQ ID NO: 1284

SEQ ID NO: 14700 - RNA, 74 nt, Human
acuuggaaauaaauaugaauugguagguuaccuauuaaacaaguguguuagaguagccuagcaguuuucaaagu

SEQ ID NO: 14701 - RNA, 72 nt, Human; identical to SEQ ID NO: 1989

SEQ ID NO: 14702 - RNA, 90 nt, Human; identical to SEQ ID NO: 14224

SEQ ID NO: 14703 - RNA, 65 nt, Human
uuaugcugcagcauauuguacuggccugcugcuggcccgcaggcuucucaauagguuuggcaugg

SEQ ID NO: 14704 - RNA, 81 nt, Human
acaaagcuccaucuauguauucuucuguauuugcaagcugcauguucauguagccaucuacagauaccagauagcccuugu

SEQ ID NO: 14705 - RNA, 76 nt, Human
aaggccauucaaguucaagcacagagauacaaaucuuucagagccccaucuaguuguguuugaaauaugugaccuu

SEQ ID NO: 14706 - RNA, 77 nt, Human; identical to SEQ ID NO: 283

SEQ ID NO: 14707 - RNA, 72 nt, Human; identical to SEQ ID NO: 284

SEQ ID NO: 14708 - RNA, 64 nt, Human
aagaucaaaugacagucgaacucagaaauugaccaaucuaggccucugagugucaguguuucuu

SEQ ID NO: 14709 - RNA, 107 nt, Human
ggcagcagcuucaaucuucaguuauuccacagcuaucuugaggcuaauugauacugucugccucuucagcuuaugguaucagugacaugagauuugaaaaugaugcu

SEQ ID NO: 14710 - RNA, 99 nt, Human
guuaagugguaaaaauuaugagagugauuuauagagcugugccuuaaauauuuuauuuauccauaucuucuaaauucauuuucauggcaaucaguuaau

SEQ ID NO: 14711 - RNA, 83 nt, Human
auuuuuuaacaccuacagaacuguuuauuuguuuggauacuggaugauucaagcucauuaaguccugggggaaaaugaaaaau

SEQ ID NO: 14712 - RNA, 74 nt, Human
ggagcgcuggaugaaagaagacugcacucacugcauuugugagguuugugcugcgaguuuuccaguccaacucc

SEQ ID NO: 14713 - RNA, 74 nt, Human
gccaauuagagguuaaauaaauugcuuaaaaguguucucaaaacuugcaguuucuucaaucuuaugaaauuggc

SEQ ID NO: 14714 - RNA, 68 nt, Human
gcuuagauaagucuggguucuacucccaaagccucuaggcuaggcauggagcagcccaauuaucuagc

SEQ ID NO: 14715 - RNA, 60 nt, Human
aagauucaucagugacacaaggauuuauuuauuaucauuuucuauaacacugauggucuu

SEQ ID NO: 14716 - RNA, 76 nt, Human
ggugcccauccuuauguacauaguguuuucaauguuuagcuccgacuaccaaacgagaucaugcagcuaggauacc

SEQ ID NO: 14717 - RNA, 61 nt, Human
ugccuuuuauacaaugcucaugaaucuuuuuuguuaagaccacaaaagcaauaaaaaugca

SEQ ID NO: 14718 - RNA, 91 nt, Human
cagaaacagauccaccuccagguacgugguggacgaaugggagcagcuggcugcuggccccacgcuuaccaaccuugaguccacauuuuug

SEQ ID NO: 14719 - RNA, 60 nt, Human
ggccguuggcuugaucacucacgacacuauuacugacguuaguuauuauacugccgugcc

SEQ ID NO: 14720 - RNA, 71 nt, Human; identical to SEQ ID NO: 8542

SEQ ID NO: 14721 - RNA, 67 nt, Human; identical to SEQ ID NO: 8543

SEQ ID NO: 14722 - RNA, 88 nt, Human; identical to SEQ ID NO: 8544

SEQ ID NO: 14723 - RNA, 61 nt, Human; identical to SEQ ID NO: 347

SEQ ID NO: 14724 - RNA, 74 nt, Human; identical to SEQ ID NO: 3804

SEQ ID NO: 14725 - RNA, 63 nt, Human; identical to SEQ ID NO: 7988

SEQ ID NO: 14726 - RNA, 75 nt, Human
ggggcuugcacugccuucucaggccagcuauacccuagcugagcaaagaacugaagaagcaaguguccacucccc

SEQ ID NO: 14727 - RNA, 78 nt, Human
cggagcaccaggugcaagguggacucuuucuggauguuguagucagacaggguacgaccaucuuccagcuguuuuccg

SEQ ID NO: 14728 - RNA, 85 nt, Human
ccagucagcucaggccucuauggagcaaagaaacugguguccuucuuggagcgcugccuucaucuccuugaacugagccaacugg

SEQ ID NO: 14729 - RNA, 76 nt, Human
cccccaagcugggcccgcgacucgaaggugacugggauggugaucucguuggacugcguggcuagcuugggcaugg

SEQ ID NO: 14730 - RNA, 69 nt, Human; identical to SEQ ID NO: 9003

SEQ ID NO: 14731 - RNA, 70 nt, Human
gccuggacuugcaacugguggggaugagggcagucuggggccagagcccucccacugugggaucugaggc

SEQ ID NO: 14732 - RNA, 88 nt, Human
ucugugagccgcuccagcaaauuaauugaaccaaaagaggggguugugguaacucccaacuugaaggcaguuagugagaaguuccaga

SEQ ID NO: 14733 - RNA, 68 nt, Human
gaagacucuguagcuccuccagauucucaaugcauuuaauuaaauuuuggcggaggcagagagucuuc

SEQ ID NO: 14734 - RNA, 72 nt, Human
ccuccgugacugucaccucaucgucgugcagaaugaaggccguguagaugcaggugagcucggugacagagg

SEQ ID NO: 14735 - RNA, 82 nt, Human
gagagguuuagucaagaauaccaaagcccaugucaucaucagacuccucggauucuucuuucuuugcuuccacuugcuucuc

SEQ ID NO: 14736 - RNA, 77 nt, Human
gaacauucgugcugagcccuuugaaagugauaugauuguauuauuuaaaugaguggggcuggggcaugguaguguuu

SEQ ID NO: 14737 - RNA, 71 nt, Human; identical to SEQ ID NO: 1050

SEQ ID NO: 14738 - RNA, 77 nt, Human
ugcgugaccuggcagcuguagcuucugugggacuuccacugcucaggcgucaggcucagauagcugcuggccgcgua

SEQ ID NO: 14739 - RNA, 81 nt, Human
guccaggggugggaauacagggggugggaggugugcauaagaggugauaggcacaggccagcccgguacagaccccuaggc

SEQ ID NO: 14740 - RNA, 62 nt, Human; identical to SEQ ID NO: 186

SEQ ID NO: 14741 - RNA, 62 nt, Human
gaaggugcugacuuccuugggagaugccauaaagcaccugggaugaucucaagggcaccuuu

SEQ ID NO: 14742 - RNA, 76 nt, Human
gcugcauguggauccugagaacuucaagcuccuggggaaaugugcuggugaccguuuugggcaauccauuuucggc

SEQ ID NO: 14743 - RNA, 66 nt, Human; identical to SEQ ID NO: 12

SEQ ID NO: 14744 - RNA, 90 nt, Human; identical to SEQ ID NO: 3033

SEQ ID NO: 14745 - RNA, 82 nt, Human; identical to SEQ ID NO: 3034

SEQ ID NO: 14746 - RNA, 103 nt, Human
uuggacaacugccccuuccaugaccagccacaucugaaaaggaaagcauucugcucuuuccagaucuacgcugugccuuggagggcacaaugaacuugucgaa

SEQ ID NO: 14747 - RNA, 85 nt, Human
caugauaauuugaugaguaaaucaaacuauauaauuuuaaaauuugcauauuuuaaaguuuuaucaguuacuuacagacuguuug

SEQ ID NO: 14748 - RNA, 70 nt, Human
guauauuuccguuuccccaagucuucaccuguccccaucuacccagaucauuugggaaauguaaaugugc

SEQ ID NO: 14749 - RNA, 70 nt, Human; identical to SEQ ID NO: 9761

SEQ ID NO: 14750 - RNA, 67 nt, Human; identical to SEQ ID NO: 1347

SEQ ID NO: 14751 - RNA, 66 nt, Human; identical to SEQ ID NO: 3934

SEQ ID NO: 14752 - RNA, 69 nt, Human; identical to SEQ ID NO: 1348

SEQ ID NO: 14753 - RNA, 60 nt, Human
gguaaaguggcaacggccaauuuggguaucuggucucccaaaaguacuugccgcucuacc

SEQ ID NO: 14754 - RNA, 68 nt, Human
aguugagggcgugccagcugcugcucccgaacucuuucgcacaguaguauacagccguguccucagcu

SEQ ID NO: 14755 - RNA, 71 nt, Human
cagauaaucuaaaacuacgaauacuaccugacuccacaaggguacgguguauucuccaguuuuagcaucug

SEQ ID NO: 14756 - RNA, 67 nt, Human; identical to SEQ ID NO: 3685

SEQ ID NO: 14757 - RNA, 64 nt, Human; identical to SEQ ID NO: 7119

SEQ ID NO: 14758 - RNA, 71 nt, Human; identical to SEQ ID NO: 3322

SEQ ID NO: 14759 - RNA, 77 nt, Human; identical to SEQ ID NO: 12696

SEQ ID NO: 14760 - RNA, 60 nt, Human
ccuuugaacaaccugucgguuuuuaucaccauuuuauagguaagaaaauugggucagagg

SEQ ID NO: 14761 - RNA, 93 nt, Human
gcugauagugugaacaccagcacuaagacuggacaacugugggcuguuaaugugaacaccaguacuaggacuggaugacugugggcuguuagc

SEQ ID NO: 14762 - RNA, 85 nt, Human
cacaccucagccuuccaaguaguugggacuacaggcauauaucaucaugccuggcuaaauuaacuauuuuauuuuaagagaugug

SEQ ID NO: 14763 - RNA, 91 nt, Human
uuuuugagucugggucucgcucugucacccaggcuggaguacaguggugagaucauagcuuacuguagccucgaccucccgggcucaaaga

SEQ ID NO: 14764 - RNA, 69 nt, Human
ggaugucaguacuggcaugugcuuaugacccucgugggcaugauaacuggguacguggaguucuguucc

SEQ ID NO: 14765 - RNA, 86 nt, Human
ggauuuccacaagacggcacccuaugucgucacuggcagcguagaucaaacaguaaaagugugggagugccguugauugugucucc

SEQ ID NO: 14766 - RNA, 81 nt, Human
gggcccaugcucuuaguggggaaaacucuuggagccguuuacuuugagcuuugaacacugaaaccauuguuggcaggguuc

SEQ ID NO: 14767 - RNA, 76 nt, Human
ggucuuuuauuggagaguauacaguacaagcagaucauucugccuuagaggugcuaauucccgaaauuagaagacc

SEQ ID NO: 14768 - RNA, 89 nt, Human
ggaggaugaggaggagggagguggagacguggacaucaccccaggacguuuuguccgcuaucaguucacaccggcauuucuccgccucc

SEQ ID NO: 14769 - RNA, 87 nt, Human
acgcagugcucacggggagcaagugggcaggggacgguccagaucgauggccacccacugagccgcugcuacguggcccccuggcgu

SEQ ID NO: 14770 - RNA, 84 nt, Human
uuucaguucuuuacguauugucacccagagaacaguguucacuaaaaacauuauucccacugccagauagaaaaggacaugaaa

SEQ ID NO: 14771 - RNA, 63 nt, Human
uaugccuggacauugaugcuaacaugaccaugcuuggggaugucucuagcuggucuggggaua

SEQ ID NO: 14772 - RNA, 77 nt, Human
ucagagaacagaagggguuccugagcagguagccuggggggacaccagagguggcucuggggcuccuccugcucuga

SEQ ID NO: 14773 - RNA, 65 nt, Human
uuauuaaauauauaagcagcuuccuaucuuuuaaauagauauuuaaaugacuuuauauaaaauaa

SEQ ID NO: 14774 - RNA, 69 nt, Human
ccuguucuucauuagacggaccucucucuuucgugcugcuucuucagcaggcuguguaggaagugcugg

SEQ ID NO: 14775 - RNA, 73 nt, Human
gaggaugccauaacaacuccaggggcaauagugcuagugggugcugugcgaaucugguauguuuguacgucuc

SEQ ID NO: 14776 - RNA, 64 nt, Human
gcugggcacuaagaucugcuguccaucaguggucugugcauacuguagaaugguaguacccggc

SEQ ID NO: 14777 - RNA, 66 nt, Human
gugauguccuaugccuuaugcaaagauucuagaggacaacucuauaccucaggucauagacaucau

SEQ ID NO: 14778 - RNA, 81 nt, Human
gugcaauaaagaaaacauuaaauauuuaguuuggacuugaauaucaagucguagaaauuuauuuggaauacuugcuggcac

SEQ ID NO: 14779 - RNA, 68 nt, Human
uguacugcaagaccugacuauucauaacggaaaacgauuucuaaagcaacagcagguauuuuuguaca

SEQ ID NO: 14780 - RNA, 101 nt, Human
cccuagagacuaugucuuuuaacgccguguacgacgucgccagcuagaugggccuuucucggugaggugaguugccugcggcagggugaaugacauuaggg

SEQ ID NO: 14781 - RNA, 64 nt, Human
ggaccucauuagucuuaggaguaauacgcguucgcuguucuucuacauucauuucacuaggucu

SEQ ID NO: 14782 - RNA, 75 nt, Human
ucccguucccccagucagccuggcccugcuggugccuccggcgcuacgggcugggcaagauggcggccuucggga

SEQ ID NO: 14783 - RNA, 83 nt, Human
uccugccaagaucaguuccaacuucagcagcauuauugcagagaaauuacguuguaauacccuuccugacacuggucgcagga

SEQ ID NO: 14784 - RNA, 121 nt, Human
cgggcaaguccaccacuacuggccaucugaucuauaaaugcgguggcaucgacaaaagaaccauugaaaaauuugagaaggaggcugcugagaugggaaagggcuccuucaaguaugccug

SEQ ID NO: 14785 - RNA, 60 nt, Human
ggugacaacaugcuggagccaagugcuaacaugccuugggucaagggauggcaagucacc

SEQ ID NO: 14786 - RNA, 78 nt, Human
uccacuugacaggccuugcgcugccucucaggaugucuacaaauugggggucacuggaugguccuguaggcgagugga

SEQ ID NO: 14787 - RNA, 77 nt, Human
accuucaccuuccucaccaaaagcacucacuuccugguuuccagaaagaggugaagugaaguggugacuauggaggu

SEQ ID NO: 14788 - RNA, 91 nt, Human
cacugcgcuuuaugacgaugccucccauggcucucccaguaguuguucugacuguggcugggccaugccaugcaccucuuuuugcccacug

SEQ ID NO: 14789 - RNA, 62 nt, Human
uucgagccagacaugucaugauuuggguuugcaguccuucucucuggugucuucaggcugag

SEQ ID NO: 14790 - RNA, 64 nt, Human; identical to SEQ ID NO: 7119

SEQ ID NO: 14791 - RNA, 79 nt, Human
gagcaaugguaccauccugggagcccaccuccuugaaagauuagacuccaauuuucaaaauccuaggguuaccuaguuc

SEQ ID NO: 14792 - RNA, 63 nt, Human
gaguaaucguuguguaaacaauagaauggaaugaaauuacauuaaauuguaugcaaauggcuc

SEQ ID NO: 14793 - RNA, 65 nt, Human; identical to SEQ ID NO: 1518

SEQ ID NO: 14794 - RNA, 75 nt, Human; identical to SEQ ID NO: 74

SEQ ID NO: 14795 - RNA, 87 nt, Human; identical to SEQ ID NO: 76

SEQ ID NO: 14796 - RNA, 71 nt, Human; identical to SEQ ID NO: 77

SEQ ID NO: 14797 - RNA, 82 nt, Human
ggcggcggcugaaccggggccugcggcggaagcagcacucccugcugaagcgccugcgcaaggccaagaaggaggcgccgcc

SEQ ID NO: 14798 - RNA, 61 nt, Human; identical to SEQ ID NO: 387

SEQ ID NO: 14799 - RNA, 78 nt, Human
gacucccagccaaauccauccugcucuuccauuucuuccacgauggugcaguguaacgaugcacuuuggaagggaguu

SEQ ID NO: 14800 - RNA, 65 nt, Human
gggacuaguuagcuuuaagcacccuagaggacuaggguaaucugacuucucacuuccuaaguucc

SEQ ID NO: 14801 - RNA, 64 nt, Human
uuugaagcagauguggugauacugagauugucuguucaguuuccccauuuguuugugcuucaaa

SEQ ID NO: 14802 - RNA, 61 nt, Human
gcagggugagaaagucccagccccaagaggcugggcugggaaggagcuggcugagucuugc

SEQ ID NO: 14803 - RNA, 84 nt, Human
gcauccagucgguuuuagcaguacccucagguagucuccgaagagagaugguuugauaaugggucuccuagauuuucuaauugc

SEQ ID NO: 14804 - RNA, 96 nt, Human
guaaucccagcacuuugggaggccaaggcggguggaucaggaggucaggaguucaagugauccucccuccuuggucuccaaaagugcuuugauuac

SEQ ID NO: 14805 - RNA, 83 nt, Human
uaacuggcgaaaagcuuucagaaacacuggagauaucguuagcuucccugauuucuuguguuuccgggaacguucuaagguua

SEQ ID NO: 14806 - RNA, 92 nt, Human
augcuuguauacagaguauuuauacaaauguuuuagcaucuucauaugcgguguuaaccccuaguucuguacagcauauucuguucaaguau

SEQ ID NO: 14807 - RNA, 89 nt, Human
ucugaugcacugcguguuuaaacacagaucaguccuuuuuucuggugcuacuguggaagaagauugucuuugggcaugcugacagcaga

SEQ ID NO: 14808 - RNA, 107 nt, Human
ugguccaugcuuuucugacguucucagaauaguggcuagcuucaaaccugacaagcgcugcuugaagcccgaacacuagagaauguugcugaaagcagaaacggcca

SEQ ID NO: 14809 - RNA, 79 nt, Human
gucaucuuuggcuugcaacauugcccuggaugcugucaagaugguacaguuugaggagaauggucggaaaagagauggc

SEQ ID NO: 14810 - RNA, 63 nt, Human
cuuugugcucauaaguucuuaucauuuagcucccacuuauacguaagaauaugcaguauuugg

SEQ ID NO: 14811 - RNA, 78 nt, Human
ggguuuuguuauacagauuauuuuaucacccagguauuaagcccaguacccaauagugaucucuucugcuccucuccc

SEQ ID NO: 14812 - RNA, 78 nt, Human
gucaauuucgguugauuccaucaauuccaucguuuacguuugcuauugugaagggugcuugguuuuuucaaaauuggc

SEQ ID NO: 14813 - RNA, 81 nt, Human
ugcuauugugaagggugcuugguuuuuucaaaauuggcuuccucagauauuugcaaaacuuuguucaccuguucauaagca

SEQ ID NO: 14814 - RNA, 99 nt, Human
aagaccugagagaauguaagaacauauagaacauccaaaauaagacauaucuuugguuguuuuaaaaccuuuuuguuugccucauuuucuucugugcuu

SEQ ID NO: 14815 - RNA, 65 nt, Human
cccagguauggguacauucuccucuuuuccgugaguuggagaaaccuagauuugucccucuuggg

SEQ ID NO: 14816 - RNA, 92 nt, Human
ugggccucaguguauuggucgggcuugaccguggucuccugguacaucuucccagaucgaggugaaucccuucaggugcucugagagcucca

SEQ ID NO: 14817 - RNA, 68 nt, Human
aaggggaucugaaaaccagagcguccccggcgcucccuucugugccgcccgcuuaggcagguucccuu

SEQ ID NO: 14818 - RNA, 67 nt, Human
acaaauggcauacuaccucucaacauugaguuauuuuuuaaaagucgacuagugugauauuguuugu

SEQ ID NO: 14819 - RNA, 88 nt, Human
gaacuugaguguauucgagagaucaaagagagaguaggcacgucaaaaguuuagguuuuacucagugguggaguagacucaacaguuu

SEQ ID NO: 14820 - RNA, 96 nt, Human
guguagacaaaguagcugauggauucaagguuguggcacguucuggaaacauaguagcaggcauagcaaaugaaucuaaaaaguuauauggagcac

SEQ ID NO: 14821 - RNA, 84 nt, Human
guuccacccugaaguuggccuuacagaaaauggaaaaguaauacugaagaauuuccuuuaugauauagcuggaugcaguggaac

SEQ ID NO: 14822 - RNA, 83 nt, Human
ggucucuucagagcugcuggugcccaguggugcuucaacgugguaucuaugaggcccuagagcuccgggacaaugauaagacu

SEQ ID NO: 14823 - RNA, 76 nt, Human
uugccgucugccacagcuggugccgucugagaagggggucccccuguagcagcacaucgcugacuuggcucggcaa

SEQ ID NO: 14824 - RNA, 74 nt, Human
gcaguggagggggcaggaccuccugcuggugcagcaccagcucgugugagcagguccaccggccccuacauugc

SEQ ID NO: 14825 - RNA, 69 nt, Human; identical to SEQ ID NO: 6356

SEQ ID NO: 14826 - RNA, 64 nt, Human; identical to SEQ ID NO: 3818

SEQ ID NO: 14827 - RNA, 65 nt, Human
ccugugguggucuuggacaguauguggaaacagaagcuccaugacgguagaagacuucucauugg

SEQ ID NO: 14828 - RNA, 66 nt, Human
uuccaucacuacaucuuuucuuccggaucuucaucauggaaguuucauuuguugcggaauauggaa

SEQ ID NO: 14829 - RNA, 80 nt, Human
ggucagacagggggacagggcagagcuagcauaacucaggcuuuuggggaugugcauggcagcuguuuuccuuuggggcc

SEQ ID NO: 14830 - RNA, 72 nt, Human
gucacagcugccugguaccuccauuuguuucucuguaauucaggaauaauugcaucuaggggcugcugugac

SEQ ID NO: 14831 - RNA, 82 nt, Human
uguugagaugaggguuucagggaagcagaaaaaccaagugcuggaucauuucuccuuugaggggccuuuguccaauucagca

SEQ ID NO: 14832 - RNA, 68 nt, Human
gaggcggguggaucacuugaggucaggaguuugagaccaaccuggccaacauggugaaaccuugucuc

SEQ ID NO: 14833 - RNA, 88 nt, Human
uguacuucugaggcaucaaacaugucuucuaaggccuucuccacacauuggagaaggcuuagaagacauguuugaugcuuagaaggca

SEQ ID NO: 14834 - RNA, 98 nt, Human; identical to SEQ ID NO: 651

SEQ ID NO: 14835 - RNA, 71 nt, Human
gcaaguggccuacguuaaaguugauaaacagcagauuaaugauacugcgcgacaacaauuaacgcacuugu

SEQ ID NO: 14836 - RNA, 94 nt, Human
guuuuaagccugccugaaaaucgacaaacagaugaauggacuucacagcuuuuaucuauucaugguauugaagaagucguggugaugccugaac

SEQ ID NO: 14837 - RNA, 64 nt, Human
uggguuggaguauucugacugcgguugcuauaauuuggcugcucaucaguuuuggucuggcuca

SEQ ID NO: 14838 - RNA, 86 nt, Human
ggaaaaucuaaagcuugucuuguagguucgaaccgggggaaauucccgggacccgguaaccgugcaaggcgguaccaagcuuuucc

SEQ ID NO: 14839 - RNA, 62 nt, Human
ggggaguccgguauuaagggcuuuugugcggaauuccauggugccaaaagacugguuucccc

SEQ ID NO: 14840 - RNA, 65 nt, Human
gguccaauucgauuucagguaauggggcaaagcgacucaugguuuuugaacguucgaacgcggcc

SEQ ID NO: 14841 - RNA, 130 nt, Human
uacaguaucuuaagugucgaccaguuauauaccuaaucugguuuuuuauaacuucuguuugauuaugcucuuacagaaguuauaaaaaaccagauuagguauauaacugguugacacuuaagauacugua

SEQ ID NO: 14842 - RNA, 73 nt, Human
agcuuagcagagaaaccagcgaaaccugugaggguaucugaagaugacuucacggaggcgguacagcugagcu

SEQ ID NO: 14843 - RNA, 60 nt, Human
ggugccagucaagggaugaguggggucuggaaucuagccucaagagggggaaguggcacc

SEQ ID NO: 14844 - RNA, 95 nt, Human
ugggcuaccagucuugagaaguaggugagggcaugcaaauguaaaaaaguaauguguguucugggaucuacuaguucuugagaagcacaaguuca

SEQ ID NO: 14845 - RNA, 63 nt, Human
cuguggaacuuugaacaugagagagauaaccugaaauuggaacacauguuuacgaagaagcag

SEQ ID NO: 14846 - RNA, 75 nt, Human
ucuugggaacuggaguaaaggucacucuugcuacgcuuuagcagagacugguggcauuuugccccugcccugaga

SEQ ID NO: 14847 - RNA, 72 nt, Human
ucuuuauagcaguaugagaaugaacuaacacaguaaauugguacugcggagaguagaguauugcuauaaaga

SEQ ID NO: 14848 - RNA, 77 nt, Human
gcagucuuuuuaaaugauacagaaauacguuuauagaugcagaaagacauuuaugauauaucguuaagcagaaaagc

SEQ ID NO: 14849 - RNA, 69 nt, Human
uaucugaauggcagaauuuauggauaauuuuuauuuuuuuacuuaucaguauuuucucaauuuuagaua

SEQ ID NO: 14850 - RNA, 62 nt, Human
uggaugguugcagugagcugagaccaggcugagagccugguugacacacugaggcccaucua

SEQ ID NO: 14851 - RNA, 60 nt, Human
gagccuucgugcccccccuucccccuuuuuugucccccaacuugagauguaugaaggcuu

SEQ ID NO: 14852 - RNA, 63 nt, Human
agucaggugccugggucugggucucauccagagacccacgggccuaggcagagcauccuggcu

SEQ ID NO: 14853 - RNA, 74 nt, Human
ggagaagaucaccucuucucacagcacacaaauuuuauguuugucucauugcaguguagaagguauucuguucc

SEQ ID NO: 14854 - RNA, 82 nt, Human
ggggcuucugagcugugggucaggaaacagcucuaacgaagauauuuauuggguguuuacucugccccauuccuuaagcucc

SEQ ID NO: 14855 - RNA, 75 nt, Human
uucaaguacagaaggcuuccucucaaauaagucuccugaggugacauaaagacugaaagaagccuaugacuugag

SEQ ID NO: 14856 - RNA, 65 nt, Human
cuuccucgaggaggacggggauggccucccuguuggggugguccuuguggccuuccuugaggagg

SEQ ID NO: 14857 - RNA, 78 nt, Human
gguauauugaaguuagagcaugaucacauuauguuucauaggcauuugaaacacugucaucuucuuauucacgugucc

SEQ ID NO: 14858 - RNA, 71 nt, Human
ggagauuuuauaggaugguuccugggcugauugauaaugccaaggcagcagggagcugaccugcauucuuc

SEQ ID NO: 14859 - RNA, 84 nt, Human
agucuccaugcaauuuucagaugaaaaacauucugugcauuuucaauuuguguguuuucauuuagaugguugaaaggguuugcu

SEQ ID NO: 14860 - RNA, 97 nt, Human
uugauagcuuguaauguccauuuaaauuuucaaguguaucuugccuucucuguagcaagagccagccugcggauauuggauauacaaccagcugcag

SEQ ID NO: 14861 - RNA, 71 nt, Human; identical to SEQ ID NO: 8959

SEQ ID NO: 14862 - RNA, 102 nt, Human; identical to SEQ ID NO: 3952

SEQ ID NO: 14863 - RNA, 77 nt, Human; identical to SEQ ID NO: 3082

SEQ ID NO: 14864 - RNA, 69 nt, Human
ggaauaggcuaaauuugcuagagaugugcuguggaauuaucuguauuucuagcuaugaucuuagcuucc

SEQ ID NO: 14865 - RNA, 65 nt, Human
gucacccaggcuggagugcagucgcacaauccuggcucacugcaaccuccgccucccggguugac

SEQ ID NO: 14866 - RNA, 84 nt, Human
guccauuucauugcaagaauaugaaaaauuaaauugagauccagguucuuuuuuuauuuuuuaauuuuuauuuuuugagauggc

SEQ ID NO: 14867 - RNA, 78 nt, Human
aucucucucuuuucaccuguauuguuuauugaaaauccaagacacuaugccaaugcaaccgugacuacuuugggagau

SEQ ID NO: 14868 - RNA, 74 nt, Human
guuacggaacucucacuucuguguuauggacauuuucaugacaugcacagaaguggagaggaugguucugugac

SEQ ID NO: 14869 - RNA, 103 nt, Human
uaagggauccuccugcucaggcucuggacuagcugggauuacaggugugugccaccacaccuugcuuucccacuaauucuguuccugcuaguuucuucccuua

SEQ ID NO: 14870 - RNA, 69 nt, Human
ucgauugucaagugcaacagagggagaagguugucaucaucuagcaauaccuugugugcugacuguuga

SEQ ID NO: 14871 - RNA, 72 nt, Human
uuugcagaaguucccuaagccuuuaccacaggaauaccaguacuuugaugaacucaguggaauaccugcaga

SEQ ID NO: 14872 - RNA, 63 nt, Human; identical to SEQ ID NO: 1060

SEQ ID NO: 14873 - RNA, 69 nt, Human
ucccgaaacaagcuuucaccgacguggccacuggcucccugggccagggccucggggccgcuuguggga

SEQ ID NO: 14874 - RNA, 68 nt, Human
ucguauuuuuagaagagacggggccccaccaugcugaccaggccggucccgaaccucugaccuuauga

SEQ ID NO: 14875 - RNA, 64 nt, Human
ugucaacacuggucugauuauuucuggaauuuuuuuuuuuuuuuuuuugaaacagugucuguca

SEQ ID NO: 14876 - RNA, 77 nt, Human
aucuugcugucacuuccaaguucaauauuccugacuuaaagguuggcacguuggaugucuugguuggcuugucagau

SEQ ID NO: 14877 - RNA, 78 nt, Human
ggccaaguuccagaggaucuguuugccaaaugaguugaccuugguaccuauauaacaaaggucccuuggacauugccc

SEQ ID NO: 14878 - RNA, 80 nt, Human
gugacgggagcuuaggucgggaagggauggaucgcugagccgauagcguccgcuaggcugucugccucgguaccuguuac

SEQ ID NO: 14879 - RNA, 63 nt, Human
uuuggagcgccgggagcgagagugugaacauggcuacgccucuucauucccguccaugccgag

SEQ ID NO: 14880 - RNA, 87 nt, Human
aaucuuuaaaauguguuguuuuucacaaguaauuuaaguauagcauuauuauuauuugguacuugagucaaagacgacauuuagauu

SEQ ID NO: 14881 - RNA, 65 nt, Human
ggaacaccauaggaguugccaucagggauaacacccauggacacaaacucucccucugggguucc

SEQ ID NO: 14882 - RNA, 74 nt, Human
cuagcggguggcccucucuggaacaggucgauucccggguagcacccucggaguugagcuggggcccccgaaag

SEQ ID NO: 14883 - RNA, 89 nt, Human; identical to SEQ ID NO: 2878

SEQ ID NO: 14884 - RNA, 81 nt, Human
uggggggggcggcgggaagcugggaaggcuagugcuuggagagcccuagggacaggccauuucagggcccugccuuuccca

SEQ ID NO: 14885 - RNA, 76 nt, Human
gccaucaaugucaaugacuccgucaccaagagcaaguuugacaaccucuauggcugcgggaguccucauagauggc

SEQ ID NO: 14886 - RNA, 63 nt, Human
gucauucaucaccgacauagacccaucaacgcacugcagcugccauggaggguaugaagugac

SEQ ID NO: 14887 - RNA, 81 nt, Human
cgcccuugcaaucucuaggucacuuucuccgcuuguagauuuugcgcgcaagccccagaaagacggcugggggcaggggug

SEQ ID NO: 14888 - RNA, 97 nt, Human
cucaugauuccguuucuagguccuaggcccgugccugauccaggauccaagcucccggaagcuggcacugggcccgcccuggguaggcagcagugag

SEQ ID NO: 14889 - RNA, 104 nt, Human
gcgcggggacacugggcagagggggcgugcggccucucuaggaagcuuucucggagccccagacacuggcgaggcgccgcgcccccucuucuggauuccggcgc

SEQ ID NO: 14890 - RNA, 67 nt, Human
cccaccuucuguugcuauuuugagagucauaguugcuuugaacugugcaaugaguaauaaacuuggg

SEQ ID NO: 14891 - RNA, 70 nt, Human; identical to SEQ ID NO: 3642

SEQ ID NO: 14892 - RNA, 60 nt, Human; identical to SEQ ID NO: 3643

SEQ ID NO: 14893 - RNA, 69 nt, Human
gaugugggccgcauguucaagcaauucaacaaguuaacugaggacaaggcagacgugcaguccaucauc

SEQ ID NO: 14894 - RNA, 104 nt, Human; identical to SEQ ID NO: 5474

SEQ ID NO: 14895 - RNA, 67 nt, Human
aguagauacacuuugaaaucuuggagcacuuaauagaggugacuuaauauuuuggaguugagaaacu

SEQ ID NO: 14896 - RNA, 68 nt, Human
ggagaguaaguaggcccucucaagggagcguaagugauguuccauauuaaccacagacuguccucucc

SEQ ID NO: 14897 - RNA, 63 nt, Human
ggaggcugcccgaauuugugccaauaaguacaugguaaaaaguugugggcaaagauggcuucc

SEQ ID NO: 14898 - RNA, 86 nt, Human
ccuuuaaagaaaccuuuagaaggacuuagaccucacauauuaauguugagaaguucugcuuaauuuuaaaaugguuucuauaaagg

SEQ ID NO: 14899 - RNA, 63 nt, Human
gucagaauuaucuuaauguagauuauaauuuggucuuuuaggaaaaaaaaacaaaaaucugau

SEQ ID NO: 14900 - RNA, 69 nt, Human
ugacguauuuugcuucuaguaugugccuacugugauuuuuuucaugugggaaaaugccaaaauuuguua

SEQ ID NO: 14901 - RNA, 117 nt, Human
uggaauuuguagaaaauuauggacauuuuuggugagaaagaacaauagucaaaacucacauggauagaguguguuuguuuuuugccaaaaaugccccagacuuuuucccaaaccuca

SEQ ID NO: 14902 - RNA, 72 nt, Human
uuuuaauucaauuuuuauggugaugggcaaaucauucuugguaaauguaaaucaaacaugauugauuuaaaa

SEQ ID NO: 14903 - RNA, 70 nt, Human; identical to SEQ ID NO: 1335

SEQ ID NO: 14904 - RNA, 76 nt, Human; identical to SEQ ID NO: 3277

SEQ ID NO: 14905 - RNA, 67 nt, Human
agaauuuuuacagacauacgcaguaggucuaugccaguccuuuugugaacuuuuaaaggaaauuacu

SEQ ID NO: 14906 - RNA, 64 nt, Human
gaauuaugguuaguaacuuuggaaaacaguccauguauuacaccagaguugcuucguauauuuc

SEQ ID NO: 14907 - RNA, 88 nt, Human
ggguuggggggacuucagaucauacagucugccauggagaaaagaacuugcuggcagacagccugaugguucagaggcuccagugccc

SEQ ID NO: 14908 - RNA, 114 nt, Human
uuuuagauuuaaaugauguauuuguucagcucacugauagggggcaaauacuacauuaauauauuuucuuccugucaagaguuauuuacauauguacaguauuucaguuaaaaa

SEQ ID NO: 14909 - RNA, 74 nt, Human; identical to SEQ ID NO: 365

SEQ ID NO: 14910 - RNA, 102 nt, Human; identical to SEQ ID NO: 2172

SEQ ID NO: 14911 - RNA, 77 nt, Human; identical to SEQ ID NO: 3082

SEQ ID NO: 14912 - RNA, 70 nt, Human
gagaagggcugguagguuaaauuauccuauuuuuuauucugaaaaugauauuaauagaaagucccguuuc

SEQ ID NO: 14913 - RNA, 68 nt, Human
agauacacccuuuccguuuggauggugaguuccuaaguuuauccagagguaaagcccauugugugucu

SEQ ID NO: 14914 - RNA, 63 nt, Human
gcagaccccagcgugggcucccuuccaagcuuccucuagcuuugggccuaugcuguccccugc

SEQ ID NO: 14915 - RNA, 100 nt, Human; identical to SEQ ID NO: 192

SEQ ID NO: 14916 - RNA, 88 nt, Human; identical to SEQ ID NO: 1500

SEQ ID NO: 14917 - RNA, 84 nt, Human; identical to SEQ ID NO: 286

SEQ ID NO: 14918 - RNA, 71 nt, Human
gcccuacccuuguuaguuauuuuaggagacagucucaagcacuaaaaaguggcuaauucaauuuauggggu

SEQ ID NO: 14919 - RNA, 76 nt, Human
cucuaacuucaucuaccuguuuauagcggccggacagacuucaggaaagaaacuggcgccagggauggagggggag

SEQ ID NO: 14920 - RNA, 130 nt, Human
gcagacaaaaccugauugcaugucauguuaaaaugcucuaaggggaaauuuaagugcuuucuuuucauuuaccuaauuucaucaauuggcaauuaagaugugacgucuagguaauccaggcaguguccgu

SEQ ID NO: 14921 - RNA, 91 nt, Human
gagagagaagaaagagaagugaaacgacaguugguggcuuggugggauaggaagcugaaaccaaugguuaagucaaaguuuuguuuuccuu

SEQ ID NO: 14922 - RNA, 104 nt, Human; identical to SEQ ID NO: 10248

SEQ ID NO: 14923 - RNA, 78 nt, Human; identical to SEQ ID NO: 99

SEQ ID NO: 14924 - RNA, 65 nt, Human; identical to SEQ ID NO: 247

SEQ ID NO: 14925 - RNA, 83 nt, Human
accucacuccuguuuggcugauuggguugaauuucucuuaauaccauacugaauguaacuugacgaguuaguagggaacuggu

SEQ ID NO: 14926 - RNA, 73 nt, Human
ugagguggggccuacucggagguguuugggucauggagacgaaucccucaugagugaccuuggugccaucuca

SEQ ID NO: 14927 - RNA, 92 nt, Human
gguguccagcauccacaucaucggcggagucauugcugugggaguuuuccuucuccuuauugcaguggcuggacuggugggugcugucaacc

SEQ ID NO: 14928 - RNA, 61 nt, Human
gccuggcuaauuuuuguauuuguuguagagauggugucucgcuuugucauguuggccaggu

SEQ ID NO: 14929 - RNA, 81 nt, Human
gggugucauaaacaccauuggcuugggagcugagugcaccuggauguccucugggcccugccgcugacuggcugugcgccc

SEQ ID NO: 14930 - RNA, 81 nt, Human
aggguuccaucuuugcuaucuguugaucagccuuagaaaaucuaaguaugaucaauaaauuuuaaugguugauggcauccu

SEQ ID NO: 14931 - RNA, 60 nt, Human
cacggcucaagcagcggcgccgcacacucaaaaaccguggcuacgccgccagcugccgcg

SEQ ID NO: 14932 - RNA, 100 nt, Human
gcuggcgcgcgagaacgccgccaugcgccuggagcucgacgcgcugcgcggcaagugcgaggcgcugcagggcuucgcgcgcuccguggccgccgcccgc

SEQ ID NO: 14933 - RNA, 61 nt, Human; identical to SEQ ID NO: 12046

SEQ ID NO: 14934 - RNA, 62 nt, Human
cagccaggucugggaagucuuucacuucuccuacuucgcugaaaggcuguccaccuugguug

SEQ ID NO: 14935 - RNA, 74 nt, Human
uuuuugacgucaggauaggacucuuggcacuccgcacugaaacaccgugauuaguccugacuagacagcaaaag

SEQ ID NO: 14936 - RNA, 98 nt, Human; identical to SEQ ID NO: 5891

SEQ ID NO: 14937 - RNA, 123 nt, Human
cguuggaaccagcuggaccgcuccgacguggcggugccgcucacucugcacggcuacucggaccucgacagcgaggagccgggcacgggcggcgccgccucgcgcaggggccagccucccgcg

SEQ ID NO: 14938 - RNA, 72 nt, Human
cuuguggaccacgcccgccgggcccaaggauccgccgccggggcgcggaccgggggcugggcuggccgcagg

SEQ ID NO: 14939 - RNA, 84 nt, Human
gcccggcugcccgcggggucuacgugcugcccaucggcgacgcggacgcggcugcagcagugaccacgucguacagguaugggc

SEQ ID NO: 14940 - RNA, 73 nt, Human; identical to SEQ ID NO: 12049

SEQ ID NO: 14941 - RNA, 102 nt, Human
cccugucuccacuggaagugaguggugcagcaucucuuuggcagguggggggcaucaguaccuggccagagggguccucgucgcugagcuccuggaucaggg

SEQ ID NO: 14942 - RNA, 62 nt, Human
gggagacauuuaugauuaaaccauuuaugcuacauauaacuggggaaaacuaugaugcuuuc

SEQ ID NO: 14943 - RNA, 65 nt, Human
gggaggugaggacuucaucucaacaucggcuggugguugguaggggagcuuuuucuuuucuuucc

SEQ ID NO: 14944 - RNA, 74 nt, Human
gccaccgagaagcagaagaaggcccuggagaaguugcucccggccuccucuugagggcugccugagcugguggc

SEQ ID NO: 14945 - RNA, 78 nt, Human
cugggcuuugggccuggugguugggagucaccuacugacaucgggacugacauuccugaaccccugguaugaggccag

SEQ ID NO: 14946 - RNA, 61 nt, Human
guccuuucuuucgccaggcuggggacccgcuucgcguuaucauccuggucgcagggaaggc

SEQ ID NO: 14947 - RNA, 65 nt, Human
ucugacagcagccauuauccugcuccauaccuuuuggggaguuguguucuuugaugccugugaga

SEQ ID NO: 14948 - RNA, 72 nt, Human
cgccgccgccgccgccaucaugaguggaaaucgugcacuugcaggccgggcagugcggcaaccaaaucggcg

SEQ ID NO: 14949 - RNA, 91 nt, Human
gugcgcucggggcccuucgggcagaucuuccggccggacaacuucguuuucggucagaguggugcugggaacaacugggccaagggugcac

SEQ ID NO: 14950 - RNA, 71 nt, Human
ccccuccgcccccucuggaggcugaagagggauuccagccccugccacccacagacacgggcugacugggg

SEQ ID NO: 14951 - RNA, 72 nt, Human
ggaggagcagcugacucagggguggaggagccuaggaaugccucucuccaggcccaagucgugcucuccuuc

SEQ ID NO: 14952 - RNA, 78 nt, Human
guccuuucucuggagaggcuuguggggccucaggacgcuacccacugcucuccgggccucuccugccgccucugggac

SEQ ID NO: 14953 - RNA, 67 nt, Human
ccucuggacuugcauucugauaggugcuuuaauuuaaaugugcccaaagggagugacugucuucagg

SEQ ID NO: 14954 - RNA, 60 nt, Human
ugcagcuaugcucugaaugauuucauuccugagagugauagcauucugguccuggcugca

SEQ ID NO: 14955 - RNA, 92 nt, Human
auuuucuccuuauaguaguuggaccgauuauggacacggaauaauuuuauacuguggcuaugagagcauuuaagagauuauuaggagaaagu

SEQ ID NO: 14956 - RNA, 104 nt, Human
ccacgggcaccuaccacggggacagcgaccugcagcuggaacgcaucaacguguacuacaaugaggccaccggcggcaguacgugccccgcgccgugcucgugg

SEQ ID NO: 14957 - RNA, 98 nt, Human
cgugacccugccccagccuaggccugucugcuggccuucagugccaucccaccccugggcaaggcaggcuuagcagcuaagggaggcugggggucacg

SEQ ID NO: 14958 - RNA, 73 nt, Human
uuccaaaagcauuuaauugaauuucucaauguuuuucaaaaacaaaaagauccaaauuagagguaaaaaggaa

SEQ ID NO: 14959 - RNA, 64 nt, Human
gugacauugacaucgugguaggcuucaagcaagccucagugcccagaaggucauguucuguuac

SEQ ID NO: 14960 - RNA, 61 nt, Human
ucugcccccggaagugggcagccagugcagcagcagccccacagccuggcuguuggguagg

SEQ ID NO: 14961 - RNA, 61 nt, Human
ugagagccacagggcacgggugaggcacaagcgccuucgugccgaauuucuuuggccuucg

SEQ ID NO: 14962 - RNA, 85 nt, Human
uacaaccuacuucacucauuuauauuauuugccaggccccugaaggcgucugguuugugacuucugugauuuaauacugguugua

SEQ ID NO: 14963 - RNA, 69 nt, Human
uugcugagcaugguuaucaauauaacauuuaagaucuuggaucaaauguuguccccgagucuucugcaa

SEQ ID NO: 14964 - RNA, 68 nt, Human
aguugggcugggucuugguacacgugguuccgcccaucuccacguccaagaacuaguucaccccagcu

SEQ ID NO: 14965 - RNA, 69 nt, Human
gcgcggcuguggcacaugucgucucuugcuuuguuguacucgccgacggcuaaguccauugcacgccgc

SEQ ID NO: 14966 - RNA, 94 nt, Human
ggucauugugcccugccaaggcacagcguagaucuggaaagagcagaaugcuuuccuuuucauauguggcuggucauggaaggggcaguugucc

SEQ ID NO: 14967 - RNA, 79 nt, Human
ggggaguucucgggcgcgcacaggcagcucgguuugcccugcgauugagcugcgggucgcggccggcgccggccucucc

SEQ ID NO: 14968 - RNA, 69 nt, Human
guagacagcacccccuugaguccaauuccuccccuuucggaggaagccgguuucuccuuucuaugcuac

SEQ ID NO: 14969 - RNA, 87 nt, Human
gugaguucucugcccgcucuuugcccacccgcgucaggccggucccccuccggccucuucuguggcgcgagggacagcggaaaccac

SEQ ID NO: 14970 - RNA, 64 nt, Human
cccccggaguccuuuuuuauuuuuuuucccuuugggccaaaaagaaaaaaaaggggacuggggg

SEQ ID NO: 14971 - RNA, 67 nt, Human
auucauuuuuguucuaaauuuuuaaaccuucuaucaugaaaaacuucaaauauacacaaaagagaau

SEQ ID NO: 14972 - RNA, 90 nt, Human
ccuaccaagaauucccugccuuaaacuccaggaugauauggacauuuuuccccauugucacuuaaaguucauuuagaaacaucugguagg

SEQ ID NO: 14973 - RNA, 60 nt, Human; identical to SEQ ID NO: 8964

SEQ ID NO: 14974 - RNA, 86 nt, Human
uggcaucccagauguugcaguugaagucgucguagccagcgagcagcagccguucgcugcgcgagaaggcaacagaggugaugcca

SEQ ID NO: 14975 - RNA, 63 nt, Human
agacacgccugccccaugacaagaccaagugcuucaaguucaucuaggggcagcgcacggucu

SEQ ID NO: 14976 - RNA, 61 nt, Human
gaagguguacggcuacaugccccuccuguacacgcaguucaggguggauucugugcucuuc

SEQ ID NO: 14977 - RNA, 69 nt, Human
gugaggacauugccaugaacuuccuugucucccacaucacucggaagccccccaucaaggugaccucac

SEQ ID NO: 14978 - RNA, 61 nt, Human; identical to SEQ ID NO: 9223

SEQ ID NO: 14979 - RNA, 103 nt, Human
uuuucuaauuuacaaccaguuaagaauuacaauauccaaagaaaguauuuuaaaauauauaugcucacugguaagugauuuucuacucaaauaaauaggaaaa

SEQ ID NO: 14980 - RNA, 73 nt, Human
agauguuauuuaugguguggaggaagcaugauauuuuacaaaugcgauugccgccagcuccuuacagaacucu

SEQ ID NO: 14981 - RNA, 86 nt, Human
auaucaucaaagucaugacauuggaaauauugcagcuuuucacagucauuagaaaugcuuauuuccugaaguuccuuugauuguau

SEQ ID NO: 14982 - RNA, 72 nt, Human
ucuuguggcuggguggaacugagucuuuuuuggugaaauguacacaguaguucuguucccccaguuacauga

SEQ ID NO: 14983 - RNA, 64 nt, Human; identical to SEQ ID NO: 7119

SEQ ID NO: 14984 - RNA, 77 nt, Human; identical to SEQ ID NO: 3323

SEQ ID NO: 14985 - RNA, 88 nt, Human
ggccaggcuggucucgaacuccuugugauccacccaccuuggccucccaaaauucuaggauuacaggcaugagccacugagccuggcc

SEQ ID NO: 14986 - RNA, 67 nt, Human
ggacaucuaucauuauaugucgagguugaguccauguaacguuggcagucucuagugacugguguuc

SEQ ID NO: 14987 - RNA, 78 nt, Human
guacugcucccuugagcggucguauucuucgcuguuuccagaacucgugauuguaguaccaucguccagggguugugc

SEQ ID NO: 14988 - RNA, 75 nt, Human
ucucgugugccuuucccauaguaucguaaggacguuucgaguaauuuacaacaacuaagggaguguauaucggga

SEQ ID NO: 14989 - RNA, 93 nt, Human
ccuuuacuaauucaaaguugcauguucuaugacaucugugacuugcguugcagaguguacaugaaacuguauaauugagucauucaguaaagg

SEQ ID NO: 14990 - RNA, 89 nt, Human
uaucuugguuaauugcuacugaaagguugagaaaggaaugguuugauauuuaccacagcgcugugccuuucuacaguagaacuggggua

SEQ ID NO: 14991 - RNA, 102 nt, Human
agggaggggguagggcuggguuauuaagauacaggcugcuguauuuuacauugguugugggggaaggggagccugagaaaacaaagucacuauucccuuuuu

SEQ ID NO: 14992 - RNA, 66 nt, Human
uuuaguggacuucugugagauuguaguuguacuuuguaucucuaaaucuaaagauaguuuuuuaaa

SEQ ID NO: 14993 - RNA, 101 nt, Human
aaucgagaauuucucacaaugggugguauacaagacuggaugggaaacaaaguuuauuaaccccaggugagccacuccauaacuuugaugggauuucgauu

SEQ ID NO: 14994 - RNA, 66 nt, Human
uccaggucuuuuuaaagaaucaacauguauucacaguacuugggaugcuaagcaaaggaccuguga

SEQ ID NO: 14995 - RNA, 67 nt, Human
uggggcggguuuuauuucaaaugcagccacagaggcgguuuuugcacagguacgugauccgacucca

SEQ ID NO: 14996 - RNA, 60 nt, Human
gucccacuuaguuuuuguuuuuucuuuaaaaaaaaaacaaaagcucacaaacaauaggac

SEQ ID NO: 14997 - RNA, 77 nt, Human
ucagcaggaaagaguuuaaaagacuugaauggaaaucagaaauuuagggauuugagaaaauaacuuuuugguacuga

SEQ ID NO: 14998 - RNA, 70 nt, Human
gauugcagccaacccuuaaggcccuaccuugugaaggugcuugugggccacaccaagguggguugugguu

SEQ ID NO: 14999 - RNA, 65 nt, Human
gggagggcauguugcugcagucuggggcaugugagcuuggccuccagagaugagcucauccuccc

SEQ ID NO: 15000 - RNA, 74 nt, Human
gcuugucugcaacagccccaaacuggaaacaacccauauccaucaaguuuauccagcaggguggacaaauaagc

SEQ ID NO: 15001 - RNA, 62 nt, Human
guagaagcauuuugagaacagguuggcaucaucacauaagcccuuauauucaagaacucugc

SEQ ID NO: 15002 - RNA, 73 nt, Human
ucaggauaaacccaauuaaguuuuuuauauacugcugauucaguuuguuaauuauuaugaugggauuuuuuga

SEQ ID NO: 15003 - RNA, 111 nt, Human
ugaggaaguucuuucuguggauagucugcugugaguuuuuauugggaaucaauguuaaauccaguuaaauguuuuuuuucuccaguauauuaaucauauggcuuuucuuua

SEQ ID NO: 15004 - RNA, 130 nt, Human
ggcccgcggucuuggcuccccuuucuuccuucuggcuggccggccgcaggguaggggguccguggaccucccggccuguagggggcgucgggcgcagcggaagggccugcuccggagccuggccagggcu

SEQ ID NO: 15005 - RNA, 99 nt, Human
ucaccgagaccgcggcggagccuacggucccugcagugccugcugcugaggaggccaccgaagcucggggacgcgaggagccggcguggcccuggguga

SEQ ID NO: 15006 - RNA, 79 nt, Human
augaaccuucagugaaaguaggcugcacagcuaaauggccuucuauuuugaggcaguucuuuauauucugaaauagcgu

SEQ ID NO: 15007 - RNA, 63 nt, Human
ccaacgugggcaaguugcucaaggguaucgacagguacaauccugagaaccuggccacccugg

SEQ ID NO: 15008 - RNA, 74 nt, Human; identical to SEQ ID NO: 365

SEQ ID NO: 15009 - RNA, 102 nt, Human; identical to SEQ ID NO: 2172

SEQ ID NO: 15010 - RNA, 77 nt, Human; identical to SEQ ID NO: 3082

SEQ ID NO: 15011 - RNA, 131 nt, Human
ucccgaaaaaggaaugccaggucagacagguggaggagggaaauggggcacaggucaagguaugaugaaucucuuaaaaagaaauccggccaggcacaguggcucacgccuguaaucccagcacuuuggga

SEQ ID NO: 15012 - RNA, 83 nt, Human
ggaggcuaagccuuggcuugccaucugcuggagaaguccuacucaucuuuuucauacugacaggcacacaggguuuagucucu

SEQ ID NO: 15013 - RNA, 67 nt, Human
guauggcuuccauuugcuucaaauuugccagcuucuccuuugagauaugagguaauggaaucucuac

SEQ ID NO: 15014 - RNA, 68 nt, Human
gcaggguagucugagagugaagggccugaauaauaaauacaauuccuaaacucucaaauuccccucgu

SEQ ID NO: 15015 - RNA, 80 nt, Human
aaauauaagguuggguuagcaauauuuauagggcuuuauuuuuuaaguucaaugugucugugguccagaagaaauuauuu

SEQ ID NO: 15016 - RNA, 90 nt, Human
caaaaaggugcuacgguagugaugaaauuauaaguagauuuguaguugucccauuuauuauuuuaauauuuauguuuaagugcuugguug

SEQ ID NO: 15017 - RNA, 60 nt, Human
ggcuuaggacuucaaaaggugauuaaauauuuaaugaugugucauaugaguccucaagcu

SEQ ID NO: 15018 - RNA, 61 nt, Human
ccagcugaauugaauuuuuguaggcaaauaagcguuuuaaguaugagaaugauuuaguagg

SEQ ID NO: 15019 - RNA, 65 nt, Human
gagcuuuugucuucaguguuuauuucuuuaacauaaaggauuugaacuggaagacuucuaaguuc

SEQ ID NO: 15020 - RNA, 63 nt, Human
cagugaagcaggauguauguggccuugaggauaaccugcacuggucuaccuucugcuucccug

SEQ ID NO: 15021 - RNA, 96 nt, Human
ucacuuuuuacgugagcguauaaucccaagaucaguguuauauuuuacuggagaagcuauugaagaugaugaugaugauuaugaugaagaagguga

SEQ ID NO: 15022 - RNA, 78 nt, Human
ggcccugguaggcccacaacuucccuaagccaagcuccccaggcccagcucaggccucgcgguggccucuccaggguc

SEQ ID NO: 15023 - RNA, 71 nt, Human
guuguccugaagucgggcucucccggcugcaucuccaggccggacucuggccgacuccaggucccaacaac

SEQ ID NO: 15024 - RNA, 72 nt, Human; identical to SEQ ID NO: 9079

SEQ ID NO: 15025 - RNA, 72 nt, Human; identical to SEQ ID NO: 9079

SEQ ID NO: 15026 - RNA, 70 nt, Human
agaguauguauuggcucauuuauuugcaaaguuagaggauugcaaaaugcuaugugcccaaugcagaccu

SEQ ID NO: 15027 - RNA, 64 nt, Human
cccaccagaucucaugucaacuuguaguuuguagucaccacuguuggagguggggccuggcggg

SEQ ID NO: 15028 - RNA, 60 nt, Human
cuucuccccaccugggccuuggguucuucagcuauaaaauggccagagguuggggggcgg

SEQ ID NO: 15029 - RNA, 73 nt, Human
cuucaucuccacucugcacggcggcugagggcccuuacucugggccugggcacccuuagaggggagaacgaag

SEQ ID NO: 15030 - RNA, 60 nt, Human; identical to SEQ ID NO: 1720

SEQ ID NO: 15031 - RNA, 63 nt, Human
ucugcaagggcgacacuggaccacccgcugccccuacaaggcauacgcuggggcccaugcaga

SEQ ID NO: 15032 - RNA, 62 nt, Human
caaagagaacugccagugccaggaaagcccaggggaagccguggcugccaggaagcucuuug

SEQ ID NO: 15033 - RNA, 85 nt, Human; identical to SEQ ID NO: 10310

SEQ ID NO: 15034 - RNA, 81 nt, Human; identical to SEQ ID NO: 4229

SEQ ID NO: 15035 - RNA, 68 nt, Human
uuuuuuuuuuuuuuuucacggagcuuuauacuuacuuuuaauuucugcacugaaaaagaaaaggaagg

SEQ ID NO: 15036 - RNA, 73 nt, Human
cugggcaugaugguuggcgccuauagucccagcuacuugggaggcugaggcaggagacuggcaugaaccccgg

SEQ ID NO: 15037 - RNA, 66 nt, Human
gaggcgggcagaucacgagggcaggagauccagaccauccuggcuaacuuggugaaaccccggcuc

SEQ ID NO: 15038 - RNA, 63 nt, Human
ggcauggcacugagcagcuucuuuuaagaacauaauuuguagccaggcgcaguggcuuaugcc

SEQ ID NO: 15039 - RNA, 81 nt, Human
aaugaggaccuucaaauaggagugauugaaauaaauaacuacuugcauguuaugcuuucauucuggguggaauacuucauu

SEQ ID NO: 15040 - RNA, 95 nt, Human
cacuggugagguggauugaugaugaaucuucugacacaccuggagcaacuccagaacacagucacgaggauaaugggaauuuaccgaaacccgug

SEQ ID NO: 15041 - RNA, 69 nt, Human
gaagcugaccggcgcccucuaaaccuuugcccuaucuguuugcacaaguugcagugugcuguuggcuuc

SEQ ID NO: 15042 - RNA, 61 nt, Human
gcagaugucccuaagguagagguguuggaacgggagcuggccuggcugaaggagcaucugu

SEQ ID NO: 15043 - RNA, 81 nt, Human
cuggcugcugacugggcagggaccuggacccccuuuauuugcaccgucaggggaaacggguucccccuuuguauguaccag

SEQ ID NO: 15044 - RNA, 63 nt, Human
cuggugacggggcccugggcuggggcugucccacacuggacccagcucucccccugcagccag

SEQ ID NO: 15045 - RNA, 69 nt, Human
gguuugauuucacuggagccugcugggaacgugaccucugaccccugaugcuuucgugaucacgugacc

SEQ ID NO: 15046 - RNA, 75 nt, Human
uugaguagggccuagcccccuccaccccuuuucuuccauuugagaggagagugcuuggggcuugaaaccccuuaa

SEQ ID NO: 15047 - RNA, 61 nt, Human
gcucuccgccgcagcuucagcaccucggcccagaacaaugcuaaaguagcgugcuaggggc

SEQ ID NO: 15048 - RNA, 73 nt, Human
ucuggaggcaucgggcagccacuuucacuucuccugaagaacagccccuggugagccgccugacccucuauga

SEQ ID NO: 15049 - RNA, 86 nt, Human
gcccaguucacuucuuugcagagccuuuuaccccugcacaguuuagaacagagggaccaaaugcuucuaggagucaacuggcuggc

SEQ ID NO: 15050 - RNA, 61 nt, Human
ggggucggcuaagugggacauuaguaacugcacacuauuucccgucuacugaguaaacccu

SEQ ID NO: 15051 - RNA, 92 nt, Human
ucuggcauggcucccuuuguccuuccugugcccugcaaauauuagcaaagaagcuucaugccagguuaggaaggcagcauuccaugaccaga

SEQ ID NO: 15052 - RNA, 73 nt, Human
cccuggaguuuacuuccugccaggugaccuccugggggagggagccuucaagcgagccuggccagaagcgggg

SEQ ID NO: 15053 - RNA, 64 nt, Human
ggucgguaccuacucucggggccguuaguucuaagguccugauccugaggaagucacugggacc

SEQ ID NO: 15054 - RNA, 108 nt, Human
ugagagccugagaugggugaccucugaaggaggggagcuggucuggccgccccucuaggccucaguuuccccaucugugcagugggcagccugcaguucacacuuuca

SEQ ID NO: 15055 - RNA, 131 nt, Human
uuuccuuucuuucuguuuugagucggagucuugcucugucgcccaggcuggagugcaguggcgugaucuuggcucacugcaaacuccgccugggcaacagagugagaccccgucucggggggaaaaaaaaa

SEQ ID NO: 15056 - RNA, 84 nt, Human
ugcugaaaccuuucagaaauagccauaauuuuguauuacauacaaguaagccauuuuaaggaguuucaugaaagacguuuggca

SEQ ID NO: 15057 - RNA, 83 nt, Human
uggaacugaaauacuaccuaguuacuucuuuuaguagaauacuucugaggcaagaaacuaaaaucuaguugucauauuuucca

SEQ ID NO: 15058 - RNA, 61 nt, Human
agcaaguaguacaguauguuagggaucaucucaaaaguuccaagcuacuucuuucuuugcu

SEQ ID NO: 15059 - RNA, 83 nt, Human
ccuaauccucuccuuacucccagacuuuggccuaaucaccaggagacaaaaggaaaauaaggggggugggggugggggugggg

SEQ ID NO: 15060 - RNA, 64 nt, Human
gccaccagagucaaaauguaaguuuuuuauuuuuggcgaccacuuacuugaacacuugaguggc

SEQ ID NO: 15061 - RNA, 74 nt, Human
auacccccuuguagggauggaccacguuuaguuuaugcacacaugagcuugaguggcugcucuuuaaaggguau

SEQ ID NO: 15062 - RNA, 76 nt, Human
ccacuaaucugcuuucuguuucuauggauuugccuauucuggacauuucauauaaauggaaucauccaauaugugg

SEQ ID NO: 15063 - RNA, 69 nt, Human
uuagcaucauauuuuugaggaucauccgugcuauaucauggauggguaccauguuccuuugauggcuga

SEQ ID NO: 15064 - RNA, 61 nt, Human; identical to SEQ ID NO: 347

SEQ ID NO: 15065 - RNA, 74 nt, Human; identical to SEQ ID NO: 3804

SEQ ID NO: 15066 - RNA, 61 nt, Human; identical to SEQ ID NO: 347

SEQ ID NO: 15067 - RNA, 61 nt, Human; identical to SEQ ID NO: 9580

SEQ ID NO: 15068 - RNA, 84 nt, Human; identical to SEQ ID NO: 384

SEQ ID NO: 15069 - RNA, 89 nt, Human; identical to SEQ ID NO: 385

SEQ ID NO: 15070 - RNA, 67 nt, Human; identical to SEQ ID NO: 3685

SEQ ID NO: 15071 - RNA, 73 nt, Human; identical to SEQ ID NO: 2833

SEQ ID NO: 15072 - RNA, 104 nt, Human
cauaaaguaguauugcauagugacuaccauuucagggucuggauuuagacuuggcuuugaguccuaucucugcagcuuuuaguaacugugugacauugucauug

SEQ ID NO: 15073 - RNA, 70 nt, Human
gcuucaguuuccucaucuauaaagugaagauaauauuccuuaauggucaggguuauagugaggacuaagu

SEQ ID NO: 15074 - RNA, 88 nt, Human
guggcuggguuuagaaugauuccuugggaaaagggguagcaaaguaacuuuguccugaagaagccccaaguauccugagcccagcagc

SEQ ID NO: 15075 - RNA, 100 nt, Human
aggcucggcacagagaaggaggucgaggugauugggggagcagacaaguaccacuccgugugucggcucugcuacuucaagaaggccucaggcccagccu

SEQ ID NO: 15076 - RNA, 63 nt, Human; identical to SEQ ID NO: 12838

SEQ ID NO: 15077 - RNA, 85 nt, Human; identical to SEQ ID NO: 10310

SEQ ID NO: 15078 - RNA, 99 nt, Human
uuagauuggggcagguuaaggcaggcggccgaauuuggggcuaauugggccaauuggccuuauggggggccgaauaacauuuaauggcccgcgguuuaa

SEQ ID NO: 15079 - RNA, 62 nt, Human
uguuugagucuagaacucaguuccaguacuguaacuggagaccugacaaccugagccagaca

SEQ ID NO: 15080 - RNA, 69 nt, Human
uugggaauauauauguagccaugauaaagaaaaaacgaagauccuaggagacaaaaauguugaucccaa

SEQ ID NO: 15081 - RNA, 78 nt, Human
cuaauaaacucugcaaugaaaucauguugacugcaucagucuguaccaugaccugaccucauuagcaaguuuauucag

SEQ ID NO: 15082 - RNA, 68 nt, Human
aggcgggguggaucacuuaggggucaggaguucaagaccagccuggccaacauggugaaacccugucu

SEQ ID NO: 15083 - RNA, 75 nt, Human
ccccuguaaucucagcuacucaggagguugaggcaggagaaucucuugaaucugggaggcggagguugcaguggg

SEQ ID NO: 15084 - RNA, 78 nt, Human
uggaguuuuuaaaaacuuuuggacguggccgggcacggugacucaugcccgguaauccccagcacuuuugggaggcca

SEQ ID NO: 15085 - RNA, 65 nt, Human
ccuuguguuggaggcugcugugaugucaggaacggggaucugucuagcuuuuggccacuaccugg

SEQ ID NO: 15086 - RNA, 88 nt, Human
cgccccuguugacagauggagauugggcagcagggccuugcugcauuguuaucugcuguuccgacuugguuugucuuguucaagggug

SEQ ID NO: 15087 - RNA, 63 nt, Human
ggcugagccgauggaacucggggucggcagaaaggauuauggguggaaaacauuggcucuucc

SEQ ID NO: 15088 - RNA, 62 nt, Human
auauuauggcuugcaaccuggagaccucugguagauuucuuuagugcaucccagccaagugu

SEQ ID NO: 15089 - RNA, 61 nt, Human
gcuaucucaggguccauaauuuguguagaaauccugugcauuacaugaacuuugaaauagc

SEQ ID NO: 15090 - RNA, 64 nt, Human
ugugaucccaaaguuaaccuuggcuaucuauaauuugugauggcagcuauucuuuggguaaaca

SEQ ID NO: 15091 - RNA, 75 nt, Human
uguuguugccaggcucucuucauugcccucaaagagcucuacguaagcagugguuauaaagagcuuugcaugaua

SEQ ID NO: 15092 - RNA, 66 nt, Human
gaaaagaaugcagcagccuaacuuaguguuaccauauguuacugaauuugaaacugaccuuuuuuc

SEQ ID NO: 15093 - RNA, 79 nt, Human
ggcauggcuucuguuuccuuggggccucaguucugguguaacccgggaauacgggguuuggaggaagcgcggaggggcc

SEQ ID NO: 15094 - RNA, 104 nt, Human
uugaagccagagcaaguauguccuucaucagguaaucaggaacucuucaguugaagcugaggaacuaacugauuaguuguugaucauaauauaauugguuacaa

SEQ ID NO: 15095 - RNA, 68 nt, Human
agccuguccccagcccuucggaagccccggcgccagcccgggcccucggcagggaggaugacggagcu

SEQ ID NO: 15096 - RNA, 71 nt, Human
ccaguggacggcuuuucugcagguuuaauagaugacaaugaucucuaccgaugggaaguccuuauuauugg

SEQ ID NO: 15097 - RNA, 65 nt, Human
gcucuucugugaucuuggccucccggagcaguuccuccuggguuaguggccgcucacaguggggc

SEQ ID NO: 15098 - RNA, 86 nt, Human; identical to SEQ ID NO: 7015

SEQ ID NO: 15099 - RNA, 84 nt, Human
guuuuacuacugugugauuuuuguuuggacaucugaaguagagcuuguuuuguuuuuaaauaagaauauucacaaauuaaaaac

SEQ ID NO: 15100 - RNA, 90 nt, Human; identical to SEQ ID NO: 2449

SEQ ID NO: 15101 - RNA, 83 nt, Human
acagcacaucuccauuagcacuagccacaauucaggagcucaguagacacgaacuaguggcuugcauauuggagagugcaugu

SEQ ID NO: 15102 - RNA, 96 nt, Human
agauaaacuaugccauauucauaaauuuaaaauuucuaguagacucauuaaaaagguaaaaacaggagaaaugaauuuuaaugcuauauuuuauuu

SEQ ID NO: 15103 - RNA, 76 nt, Human
gaguguccaauucuaggguauuucuccuugauaaaugauuuauuauugucacaaaagauaccaaauuuugauacuc

SEQ ID NO: 15104 - RNA, 70 nt, Human
ccuguuggcacugaugaagaacccuuacaguucaggguccuggaacuucuaccagugccacucugacagg

SEQ ID NO: 15105 - RNA, 75 nt, Human; identical to SEQ ID NO: 12474

SEQ ID NO: 15106 - RNA, 68 nt, Human; identical to SEQ ID NO: 3588

SEQ ID NO: 15107 - RNA, 76 nt, Human
ggggccagagagcaagggagcuugagaaucagaucuguaacugcccagcaccguuucucugcucuuguuucacucc

SEQ ID NO: 15108 - RNA, 78 nt, Human
cugagcuagcaugcccagcccacagagagccuccacuagagugaugcuaaguggaaaugugaggugcagcugccacag

SEQ ID NO: 15109 - RNA, 92 nt, Human
ccgggcgccacagagcagggggcaaaguucuccccagcagccucaggaggccccgcugcuaauccacugucuucuguucugucugugccugg

SEQ ID NO: 15110 - RNA, 90 nt, Human
aacaaggcaaaauaucugccuuauacaugucacaaguuauaaagauugagagcuguauuuagguaaaugcguuguauguuuugucauguu

SEQ ID NO: 15111 - RNA, 90 nt, Human
aggagucuugcccuguugcccaggcuggagugcaguggggcgaucuuggcucacugcaaccucugccucccggguucaagcaauucuccu

SEQ ID NO: 15112 - RNA, 63 nt, Human
cccccuucaguaaauuguccugacauccucccccacuuggagagccagucuacuagaaggggg

SEQ ID NO: 15113 - RNA, 62 nt, Human
gaagcaaaugaauauuuaccuugugcuuucaugcaaauuuagggaccaaacucaaagguuuc

SEQ ID NO: 15114 - RNA, 89 nt, Human
gcuggacaccagaucuaagaauugugacaggaucuucucauauuucauuuuagaacacuugauacuagucugaugauacucauguuagc

SEQ ID NO: 15115 - RNA, 61 nt, Human
uccaaguuccuuuuuauucaaaugaaucagaacugcaaucauaaacauaaaaagaccuggg

SEQ ID NO: 15116 - RNA, 65 nt, Human
aucuguaacuuaaauugggccaaucagaaugguuaucuuuguucaggucacaugaguugcaagau

SEQ ID NO: 15117 - RNA, 69 nt, Human
gcagcgauucagccagcugagaauucgucccgcuccgaggcuugagcaggaccggggcugaguaaaugc

SEQ ID NO: 15118 - RNA, 61 nt, Human
cggcaccaucacgugcuuggggacggguucucucccggggcgucuucgugcaguggugccg

SEQ ID NO: 15119 - RNA, 67 nt, Human
cccuggaggagaucuaucucuucucccugcccauuaaggaaucagagaucauugauuucuuccuggg

SEQ ID NO: 15120 - RNA, 69 nt, Human
gguguuaagugcuccaaggagguggccaccgccauccguggggccaucauccuggccaagcucuccauc

SEQ ID NO: 15121 - RNA, 75 nt, Human
guuucccgguguggggcuggaccaggcggcgggcagcggguuuuccuccugguccuccaaaaugcgcuucagaac

SEQ ID NO: 15122 - RNA, 85 nt, Human
gcuucccacuggcacccugaaaccugcccaggcugggcgccagcgucguccacaggccuuggccagcgggggcccucagggaagc

SEQ ID NO: 15123 - RNA, 71 nt, Human; identical to SEQ ID NO: 9014

SEQ ID NO: 15124 - RNA, 72 nt, Human
aaugcacauacaaugccagaacuccuuaaaagcaacuaauaucauauuuguguuuugcauaaaacaugcauu

SEQ ID NO: 15125 - RNA, 81 nt, Human
augugaaagaaggaauaguaccuuucauaaaacaagcccuucagcgcugaguuaacugaucgguacuauugugcugcacgu

SEQ ID NO: 15126 - RNA, 91 nt, Human
cggcuccgacacaucucacugugcugcgugguggugugguucggagugaacuucuccuauuaacggccugagucuggaugugucggggcug

SEQ ID NO: 15127 - RNA, 70 nt, Human
ggugggugccugagucugcacgcuggcuucugacccaaggccaugugaaagaggcccacagguacuugcu

SEQ ID NO: 15128 - RNA, 61 nt, Human
gccuagaauucagaauguacccgauguccacuaacaguagacuggauacaugaacuguggc

SEQ ID NO: 15129 - RNA, 92 nt, Human
ggaggaucgcuugagcccaggaggcggagguugcagugagcugagauggcaccacuuauugcacuccagcccgggcgacagagcgagacucc

SEQ ID NO: 15130 - RNA, 80 nt, Human
ggccuggugaaaggagccugccagaagacacucagcgaccugaagcuggacuaccuggaccucuaccuuauucacuggcc

SEQ ID NO: 15131 - RNA, 90 nt, Human
ccuaucagagacaucuauuuuucugggcuccaacccaacaugccaccauguugacauaaguuccuaccugacuaugcuuucucuccuagg

SEQ ID NO: 15132 - RNA, 63 nt, Human
gccggguugggaccgcugcgggcccgccugccuuuggcgucgccggccguucccguucccggc

SEQ ID NO: 15133 - RNA, 66 nt, Human
uuccccuuuucccaguauuacugaauagucccagcuggagaguccaggcccugggaaugggaggaa

SEQ ID NO: 15134 - RNA, 61 nt, Human
ccguguacaccaaccuuauggugugaguggccaggcccacacuaaaccugggacuacacgg

SEQ ID NO: 15135 - RNA, 65 nt, Human
uguggcuugggacaagcuggucagguauggaaccuggcuaacugcaagcugaaagaccaaccaca

SEQ ID NO: 15136 - RNA, 65 nt, Human; identical to SEQ ID NO: 247

SEQ ID NO: 15137 - RNA, 80 nt, Human; identical to SEQ ID NO: 100

SEQ ID NO: 15138 - RNA, 64 nt, Human; identical to SEQ ID NO: 10357

SEQ ID NO: 15139 - RNA, 63 nt, Human
ccuacccuccuuuuuuucccuaucacugaagcuuuuuagugcauuaguggggaggaggguggg

SEQ ID NO: 15140 - RNA, 71 nt, Human
gucggauuacaaauaaggccucucauuugcaguagacagccagggaagggucuuagaauugugaaaucggc

SEQ ID NO: 15141 - RNA, 60 nt, Human
uuuuugaguuuaaaugcauuuuauuuuuagacaaccuacaugacauguuuuucuuaaaaa

SEQ ID NO: 15142 - RNA, 65 nt, Human; identical to SEQ ID NO: 11397

SEQ ID NO: 15143 - RNA, 63 nt, Human
ugugguggcuggagguuggccgaauugacaaacccaucuugaaggcuggccgggcguaccaca

SEQ ID NO: 15144 - RNA, 60 nt, Human
cuauuauuccagugcuuugagaagccgacguggaggaucgcuugaggcaaggaguucgag

SEQ ID NO: 15145 - RNA, 61 nt, Human
cuguucuccagcagaaccaaaugucagucacauauaccacauuuaaaauugcuuagaauag

SEQ ID NO: 15146 - RNA, 122 nt, Human
gaucucuugagcccaggaguuugaggcugcagucucccaaguagcugggcauuguuguguguaccugcagucccagcuacuugggaggcugaagugugagaauugccugagcccaggaguuc

SEQ ID NO: 15147 - RNA, 62 nt, Human
guacggccgcccggaaaacugaaguuggccugaaaagcuaaaaugacugggugaagccgaac

SEQ ID NO: 15148 - RNA, 71 nt, Human
ucccacguugagggucucgaggacgccuagaucucuuucccagggccauggcgaacccgaagcugcuggga

SEQ ID NO: 15149 - RNA, 73 nt, Human
gaucgguugcacgcagcugagcaggagagccucaagcgcuccaagguagcucaaccuggugcuggacgagauc

SEQ ID NO: 15150 - RNA, 75 nt, Human
agcugcgcuccccugcuagaaccuccaaacaagcucucaagguccauuuguaggagaacguaggguagucaagcu

SEQ ID NO: 15151 - RNA, 64 nt, Human
gacaucugucaccccauugaucgccaggguugauucggcugaucuggcuggcuaggcggguguc

SEQ ID NO: 15152 - RNA, 64 nt, Human; identical to SEQ ID NO: 10357

SEQ ID NO: 15153 - RNA, 64 nt, Human
uuuuuuuuuuuuuuuuuauuuugcauacuuuaauuucagaacaaaaugaagaaaauaaaauaaa

SEQ ID NO: 15154 - RNA, 71 nt, Human
cauugacaagacaggguucccacugacaagaccacaauuuaccagguugcugcucaaacgaacccccaaug

SEQ ID NO: 15155 - RNA, 60 nt, Human
ggggccggagaagugcgccugggugcgcacccaggcgcacuucugcauugaccagguccc

SEQ ID NO: 15156 - RNA, 82 nt, Human
gucgccgccacggggggcgugcgaucggcccgagguuaucuagagucaccaaagccgccggcgcccgccccccggccggggc

SEQ ID NO: 15157 - RNA, 74 nt, Human
cccagggccuggcaccucccacaucauccauugucuugcuggccagugcgauaacggguggauugccaccuggg

SEQ ID NO: 15158 - RNA, 63 nt, Human
cugcgagccauucacccagcuggucccuccaagacagagccggggccagcggcagacucccag

SEQ ID NO: 15159 - RNA, 60 nt, Human
auggugacacaugcuggagccagugcuaacaugccugguucacggauggcaagucaccgu

SEQ ID NO: 15160 - RNA, 79 nt, Human; identical to SEQ ID NO: 1810

SEQ ID NO: 15161 - RNA, 79 nt, Human
gccugagcgagcagaaggcccgcgagacgcucaagaacucggcucugagcgcgcagcugcgcgaggccgcuacucaggc

SEQ ID NO: 15162 - RNA, 75 nt, Human
ggccaugggcgccaaccaugcuggagaccagagcaacacaugccuggacacggcgacggaacgcaccacgaggcc

SEQ ID NO: 15163 - RNA, 64 nt, Human
caacaggccuauuagaagaaugaacuaacgugucuacgcaugauuauuuuucuuaagcugguug

SEQ ID NO: 15164 - RNA, 70 nt, Human
cuuugaagcagguaucuugcauggcccaccggggucgaagucccugccaugcuaccucugaaagucaaag

SEQ ID NO: 15165 - RNA, 80 nt, Human
gagggcacuggaaaggucgguacuuagaugcccagugaaaaccccucaccccaaucucugcccugccugcaggagcccuc

SEQ ID NO: 15166 - RNA, 69 nt, Human
guggugcuucgagcuggagggcagcaggugacccucaccacucaugcccccuuuggcuugggggcccau

SEQ ID NO: 15167 - RNA, 72 nt, Human
acaaggccugucugccugaugccaagacccaacgccuguuuuuuaaguggcagcaggacauacggcaauugu

SEQ ID NO: 15168 - RNA, 85 nt, Human
ccaaccaaauggcuuugccuccaccaaaagacauagagauucuuaccucuaugcuaaguuuguguuuggguacccucuagguugg

SEQ ID NO: 15169 - RNA, 73 nt, Human
uuucagcguauucucagcuaugacacaguggugcaaacaacuggagacucguggcacauaccauaugaugaag

SEQ ID NO: 15170 - RNA, 69 nt, Human
gagaaauggauaaacgaaaaaaagaaaaagaaaaccaaucacagcuuccuaauccuuaucucauuuuuc

SEQ ID NO: 15171 - RNA, 78 nt, Human; identical to SEQ ID NO: 99

SEQ ID NO: 15172 - RNA, 65 nt, Human; identical to SEQ ID NO: 247

SEQ ID NO: 15173 - RNA, 80 nt, Human; identical to SEQ ID NO: 100

SEQ ID NO: 15174 - RNA, 60 nt, Human
agcaccuuuuagaauaucccauguucuggcaauacaaacacguucuucugaaagguagcu

SEQ ID NO: 15175 - RNA, 70 nt, Human
gaaguguaacaauacauuccaggccuuuuauuucaauaguaaaauaauacaugucuuguucuaacacuuu

SEQ ID NO: 15176 - RNA, 81 nt, Human
acuguuagauacauuaccauucguuaugaaauaaccuuguuaugcuucaauaucauauuggugaaaugucuucauugcagu

SEQ ID NO: 15177 - RNA, 63 nt, Human
guaaggcugucauugugucagggcacagcacugcgccccaucaagucacacugucaaauuugc

SEQ ID NO: 15178 - RNA, 66 nt, Human
ucccuuuaucgugaacagaaggcgccugguaauuaaaacgggaauccucugcuuucacugcuggga

SEQ ID NO: 15179 - RNA, 69 nt, Human
agccugcuuugcaaggagcagcgccucugcugcugcugugcacagccgcgcgcuucaauaaaaguagcu

SEQ ID NO: 15180 - RNA, 62 nt, Human
uggagaaagcagcccaggacacuguugaauaaaacacacaauagucucuguggucuucucca

SEQ ID NO: 15181 - RNA, 102 nt, Human
acacuugaggugugugaccacuuuacagagaagaggcuaugaaagauaaaucuucaucuauuuaaaaguacuucuccauaaagaaagaacagacuuccuugu

SEQ ID NO: 15182 - RNA, 87 nt, Human
accugcuaugaauauuacugcacaaaucuggaaggacaaaugcuuuuguuuuucuuagguagauggcagugaaugaaauuguugggu

SEQ ID NO: 15183 - RNA, 63 nt, Human
aaccucuaucagacuaaguaauuucccuuuaauuccuaguuuuuuuuauugugaauggauguu

SEQ ID NO: 15184 - RNA, 127 nt, Human
uauaauuguuuuaaugugcuguucaggacaccauuauaauguuuacuguaacauaauguuuccuuucugugggaaaacuuucaguauuucauaguuaaguaucauguuugcuguuaagauuuuuaua

SEQ ID NO: 15185 - RNA, 69 nt, Human
cggacgagacgggcccuuguggaguucgagucgaacccagaagaaacgagggagcccgggucuccuccg

(The sequence listing continues in the following parts.)
